United States Patent Application Publication US 2017/0009304 A1 - sequence listing, part 13

SEQ ID NO: 258748 - DNA, 90 bp, Homo sapiens
gggcccacctccccaccaaggaagaacccagtgacttgattgtaaaaatttacagagcggaatcatatgctggtctccaagagtttaaag

SEQ ID NO: 258749 - DNA, 96 bp, Homo sapiens
cttggatacaggaaaccaacagtcacacatgtacattacagtactatactggcaattgctggagaagattttgcaattgttgcttctgatactcga

SEQ ID NO: 258750 - DNA, 90 bp, Homo sapiens
atgtacctctgccagcaggttgggagatggcaaagacatcttctggtcagagatacttcttaaatcaggtcaattcagtgaagatatgat

SEQ ID NO: 258751 - DNA, 100 bp, Homo sapiens
gggtgccgcggccctgcgcagctgccccatgtgccagaaggagttcgcccccaggatcaatatggaaattatgtaatccaacatgtactggagcacggtc

SEQ ID NO: 258752 - DNA, 83 bp, Homo sapiens
cctcactctctctgtcagaaaaatgattacagtttaaagacaatttctgtgatcaagttgtcatttggaagattaaacccatt

SEQ ID NO: 258753 - DNA, 98 bp, Homo sapiens
ctactttgatgacaacagcgtctcccctgtcaatgagaatcagatcgaggtgtaatcctgagagattcacatggtgttgcacaagtacgttttgtgac

SEQ ID NO: 258754 - DNA, 101 bp, Homo sapiens
tggagctggaatggtgagaccaacatccgtgacacctggactctttcaggttctgaactccgggaagcagtttgttcgctatataaacatgttgataaacg

SEQ ID NO: 258755 - DNA, 101 bp, Homo sapiens
ctccagccccctgtaggagaggagaaaggagcgagtcaagctacaacttcaagcagaagagagaggagttgtgtctatcaaaggagtgtgtgctaaccgtt

SEQ ID NO: 258756 - DNA, 75 bp, Homo sapiens
gcaccccgagaaccgtcagtttgagccagatggatcaccccttctgtgtcattctctgaggaaaacaagttcttc

SEQ ID NO: 258757 - DNA, 73 bp, Homo sapiens
gacaacagcgtcatcttgagcggacacatcatctcagagttggagcacctgacgtttgtcaacacggatgtgg

SEQ ID NO: 258758 - DNA, 76 bp, Homo sapiens
cagtctcttaaatatgataatcaggaagaacacccaaacccaggaaagagataccctggaatacagcgaactgcat

SEQ ID NO: 258759 - DNA, 50 bp, Homo sapiens
tggcacacagtctactatcaccgacagatgccagaagtgggtggagaact

SEQ ID NO: 258760 - DNA, 73 bp, Homo sapiens
cggccgcggcagcgcctctcctccgcgggatccgcggggaatcaacagtgagacaattatgaaaccagcttca

SEQ ID NO: 258761 - DNA, 100 bp, Homo sapiens
gcccgcgtctgccgcccacgtacatgcacgccatgtgctatacacagaatgggattttacatatgctggacagaaataagagaatcaagccccggccaga

SEQ ID NO: 258762 - DNA, 100 bp, Homo sapiens
ccagcatctcatctgtgacaatctcctaccaggaagagacttgttattgcagacacgtcttgtgaaccatgtcagcagaatcaaagaatcttcaggatgg

SEQ ID NO: 258763 - DNA, 74 bp, Homo sapiens
cgtgggcaccctgtcaggatcatatgtggcccccaaagcagactcattaccagagaagctggctgtgcatgaga

SEQ ID NO: 258764 - DNA, 74 bp, Homo sapiens
gatgctggagaatttggcccttttgtcctcactaggtttgtccagaggggttgcgtttatccggtttgacaaac

SEQ ID NO: 258765 - DNA, 83 bp, Homo sapiens
aggacccacgcgtgacccgggccaagtacttcattcgagatgagtttctgtccaatcagtgaaagtcgaagagtactacagga

SEQ ID NO: 258766 - DNA, 100 bp, Homo sapiens
tgccgccgttgcctccgccgccaagagtgagcgagcggacccgcgatggagaaccatggagtctggcagtaccgccgccagtgaggaggcacgcagcctt

SEQ ID NO: 258767 - DNA, 96 bp, Homo sapiens
ccaagatggcggcggcggcggcagcgacagcagcagcagcagccagtattcgggaaaggcagacagacttcgacccccaccacttctggcagtgga

SEQ ID NO: 258768 - DNA, 49 bp, Homo sapiens
ggcgtgtgagcagctgggacaggttggaagcgaagtggaagcactgaac

SEQ ID NO: 258769 - DNA, 100 bp, Homo sapiens
accggtggatcctgtccttcatgcagtctctcattggcttctttgagactgaaatggcagggagtacctgacaggcttccacaagcggaaggtcgagcga

SEQ ID NO: 258770 - DNA, 98 bp, Homo sapiens
ctggaacttcatcatcatctacttcacaggaattgccatttgttgggtatctacagccattggttgctgttcaggtcagctttgctcctaacaacact

SEQ ID NO: 258771 - DNA, 82 bp, Homo sapiens
gcaagctgaagacatcaagaagatcttcgagttcaaagagaccctcggaacgtcaaaatgcagatcttcgtgaaaaccctta

SEQ ID NO: 258772 - DNA, 89 bp, Homo sapiens
atgcagttttatccttttctgtacaacatcacttcttctgtttgcagtggtgtgccttgcacatacaaaaaagaacctgttcgtatatc

SEQ ID NO: 258773 - DNA, 100 bp, Homo sapiens
cggctcaccgcaacctccgcctcccagctgttggaaaaattagaggaaagcctcttccattactcttattttttgaggccctctttatcacaagtcatgc

SEQ ID NO: 258774 - DNA, 139 bp, Homo sapiens
ctccagctgctgggaacgggcgagaaagaggaggaggcgagaaactcccaccgacccacagaggttccagcaacagatagaaatgctttaagttcactctggggaaagctggcctctgaaatcttaatgcagaattggg

SEQ ID NO: 258775 - DNA, 95 bp, Homo sapiens
gtgttgcccgccaccatgagctacacaggaggaggatcccgtgctgactgtcatcacctacgtggggctgagcgtctctctgctgtgcctcctcc

SEQ ID NO: 258776 - DNA, 89 bp, Homo sapiens
tgcggagctgctccgtggccacgaggacgtcaccatggatgacatctgaactggagagcagcctaacgtctatggactggttaccacag

SEQ ID NO: 258777 - DNA, 100 bp, Homo sapiens
ccacactctgcaccgctaggccgtccccgaccttgcctgaacaaggcaaaagctgtgcctcacttctgcgggttgaaccctttgtatgtgcccagtgccg

SEQ ID NO: 258778 - DNA, 99 bp, Homo sapiens
acccacacgtgttcaatacacctcccacctgtcctcaggcatatcaaagacaagttggatggcttgaggactggtactaaaaggaaacgtgactgggag

SEQ ID NO: 258779 - DNA, 100 bp, Homo sapiens
caacatgctgtactttgccaagcaccaccaagatgcctacatccggggcaactgtactcctgatgatattggtctgtgaaaccccgtatggctgctatgt

SEQ ID NO: 258780 - DNA, 90 bp, Homo sapiens
ggacatgaacctgaacgtcatcaacgagggcggcattgacaagctgggcgagccatcccaacatcctgcgtctctacaactatttttatg

SEQ ID NO: 258781 - DNA, 50 bp, Homo sapiens
tggagtcttggtgacaaatggatagcagaatcctatttccaggaggagga

SEQ ID NO: 258782 - DNA, 117 bp, Homo sapiens
ttgttcggaatcctataattgaaaaacagtaaagatggaaaaccagttattgaatatcaagaggaggagttgttggtgtatgcaacagcgttattgcaacaggctaacgaaaacaga

SEQ ID NO: 258783 - DNA, 100 bp, Homo sapiens
ggggcggccattcaggatggccgacttaaggcaggagacagacttatagaggtatgactacgtggaagtcttcgatggagaaaatgaaaatggacatttt

SEQ ID NO: 258784 - DNA, 83 bp, Homo sapiens
cagaaattgaaaagtactgcccagagaattttgtagacatcaagggccgcaagcttcttatcattgggaccactagccgcaaa

SEQ ID NO: 258785 - DNA, 75 bp, Homo sapiens
cgcgcacttcgtcatgttcttcgcgccctgaaactatgttccaacttcctgtcaacaatcttggcagtttaagaa

SEQ ID NO: 258786 - DNA, 98 bp, Homo sapiens
cggcctgtatcaccagaggagattagacgtagcagattaggtttcacaagaagtactgtggctgtatacagtacctgtatgctggttgttcttttgcg

SEQ ID NO: 258787 - DNA, 129 bp, Homo sapiens
attatggctgctgttgtccaacagaacgacctagtatttgaatttgctagtaacgtcatggaggatgaacgacagggaggttcccctgaaggatgctaaggaatacgctgaatccataggtgccatcgt

SEQ ID NO: 258788 - DNA, 99 bp, Homo sapiens
agcgactagggctcgggcgccggcgagatgcctttgttcaccgccaaccccttcgagcaagacgtgggtgatgacacatctccacgtgattgaagaaag

SEQ ID NO: 258789 - DNA, 78 bp, Homo sapiens
ttctgcagattaacgacatacttctggccccaccaactgttcaagctctcctgccacagctcctcaccccctgaaaat

SEQ ID NO: 258790 - DNA, 74 bp, Homo sapiens
aaggggccttcgctgagctaccggtgccaagtcctgccctgccaacttcttggcagctgccgacgacaaactca

SEQ ID NO: 258791 - DNA, 50 bp, Homo sapiens
gcaagaccgcgaggcgagacctcttgatctaagcctttcccacgttatgg

SEQ ID NO: 258792 - DNA, 131 bp, Homo sapiens
cgatgtttgatattgaatatttcagaaaagatccaagaccattcttcaagtttgcaaagcatttaaatcaaacggtattgagatggattgggttatgaaacataatggtccaaatgacgctagtgatggga

SEQ ID NO: 258793 - DNA, 100 bp, Homo sapiens
tggaagacgaggccacagacacttctgatagtgaagttgacatttggtcagttgggtgcatcatgggagaaatgatcaaaggtggtgttttgttcccagg

SEQ ID NO: 258794 - DNA, 100 bp, Homo sapiens
tggatttggtcaaggagcttgacagagacacagtttttgctctggtgaattacatcttctttaaagctgacagcagatcccaggtacagagggcacgcta

SEQ ID NO: 258795 - DNA, 101 bp, Homo sapiens
cccagagctcaatgggggaccacagcatgcacttccttccagcagctacacagctgcatcttcctcccgtgaggctggccgagctccacgctgatctgaag

SEQ ID NO: 258796 - DNA, 90 bp, Homo sapiens
gaaaatgtatgtactgacgggaaaaggaggataagcaagtcgaatttttgtcttacggtcatcatcagatttgaaatatttaaagtggat

SEQ ID NO: 258797 - DNA, 74 bp, Homo sapiens
ctcactggagatgacacgtgcgtggggtgttggaaatcaggacctttgatatttaggaaaactatgtttaactc

SEQ ID NO: 258798 - DNA, 76 bp, Homo sapiens
catctcgctcggctgcgggaaatcgggctgaagcgactgagtccgcgatggagcctcctgacagtgggcctccacc

SEQ ID NO: 258799 - DNA, 83 bp, Homo sapiens
cggctgcagacttggccaaatggacgggactattaaggagagaacattgaaagtattctctaagctatttgaagagagtgact

SEQ ID NO: 258800 - DNA, 74 bp, Homo sapiens
agaacatgcatatttgggtccaactgtgaagccagatgataaggactcacaccacccggcaagaactgctcact

SEQ ID NO: 258801 - DNA, 75 bp, Homo sapiens
tttatgttgtgtcatttcgaaggattatgatgcatcattatcacagaagaaattcgtgtctatagcttttaagga

SEQ ID NO: 258802 - DNA, 101 bp, Homo sapiens
tagaatgaagaccacaataaaagagacctctacttagctcagcaattcttaccttttcctggtccagaactttacacagaaaaggtgctcaaaggatattt

SEQ ID NO: 258803 - DNA, 75 bp, Homo sapiens
ggttcacagggaagtcgcctggaaaaaccaatagtcctatgtgcttcccaagctgtatgtgaagctacattactg

SEQ ID NO: 258804 - DNA, 100 bp, Homo sapiens
ggatgtgtctggtctcgtttctcttgagctcctgcccctcctaaagctgaagccaaagcgaaggctttaaaggccaagaaggcagtgttgaaaggtgtcc

SEQ ID NO: 258805 - DNA, 112 bp, Homo sapiens
gccgtgctgcttatggcggcgctggagagggggcgctgagctgttggggtgtcatggagaaactccagctgggcccagagattctgcagcgggaaaatccaaggcttattta

SEQ ID NO: 258806 - DNA, 88 bp, Homo sapiens
gcggcgctggggcccccagaagtgatcgctcagctggagaacgcggctaaagttctgatgttttcggctttgtgagaaaccttaccat

SEQ ID NO: 258807 - DNA, 90 bp, Homo sapiens
agaaaaccttcaccaagtgggtcaacaagcacctcatcaaggaatgagctcagtgaccacttggatgctatggactccaacctggataac

SEQ ID NO: 258808 - DNA, 100 bp, Homo sapiens
tccaaagcaagtgcttctttaaatggggtccttgaatgggcaagagggcacatgaagtacggcgtcctccacattcacggcctctacacggacccctgcg

SEQ ID NO: 258809 - DNA, 83 bp, Homo sapiens
cggaagggtgatgtggctgcggcatcgccggcctcgctatgatttaaaggcccgtaagcagaagacttcctcctcccaaagtt

SEQ ID NO: 258810 - DNA, 100 bp, Homo sapiens
ggggatgtacactcactgattcttaaggctctgttccttagagatccaaaggactacaggaatatgtggaagctgtctcttttcaacacttcatcaaaac

SEQ ID NO: 258811 - DNA, 100 bp, Homo sapiens
cgggacacgcctagcgcgggctccagaatcatgtcaaccctgccatggacttcacgcagactccacctgggatgttggctctggacaacatgctgtactt

SEQ ID NO: 258812 - DNA, 75 bp, Homo sapiens
aaagaagtgttaagaattgcctttgggactctgaaggctgaaggtgacctggtactgcttgatgtatgtcccctt

SEQ ID NO: 258813 - DNA, 100 bp, Homo sapiens
ggatggtcttgaaacacaaatggtttttggatttgtacacacagatatgacgaaagacttgaaagaagaacatttaaagaaaaatattcctcttgggagg

SEQ ID NO: 258814 - DNA, 90 bp, Homo sapiens
cctcgccgccgcccgtctcctgtcgcgcagcttcctccacctagaggatcaagacataatgggagcatttttagacaagccaaagatgga

SEQ ID NO: 258815 - DNA, 100 bp, Homo sapiens
agactgtaccgggaaaatgactgcatgttcccctcaagagctgggggacctccctctggtccgcctggatttctcctgtaaccgcgtctcccgaatccca

SEQ ID NO: 258816 - DNA, 100 bp, Homo sapiens
cagaaggcttttttgtcctaaataaaagtaccacaattggaaggcatgaaaattcagaccttgttttacaggtggatctttaactcaagactagcatgaa

SEQ ID NO: 258817 - DNA, 50 bp, Homo sapiens
agaaacgtgacgagcaatgatgaaatcctggtgtatagcctggaagcagg

SEQ ID NO: 258818 - DNA, 50 bp, Homo sapiens
cgcgaatatcgtcatcgttagaaggtcaacatggctgaacaggagcctcg

SEQ ID NO: 258819 - DNA, 100 bp, Homo sapiens
gaagactcagatcctgaacgactgtttacgggagatgctgctcttcccttacgatgactttcagccagagactgctgctactttgaaacgtacgatagag

SEQ ID NO: 258820 - DNA, 83 bp, Homo sapiens
cagctggttgtggaggaaatcttcaatccagatattgacacaaatgccagaccctaagaccttcaagcagcactttgagagca

SEQ ID NO: 258821 - DNA, 100 bp, Homo sapiens
gcacagtatagtgaagataaagccaggcaagggatttctgcatgaatccccagacagtgctgctcctgcgggtcatcgccgccttctgtttcctgggcat

SEQ ID NO: 258822 - DNA, 98 bp, Homo sapiens
ggctgtgtcgcagcctctcgggatgacaccactctgaatgcactgaacacagctgaagccgacgtagcttctctgaacagacgcatccagctggttga

SEQ ID NO: 258823 - DNA, 100 bp, Homo sapiens
cgatgatttactgaaatttgatgacctagatggaacacatgctctgatgctttggacatcagacagtgcaggagaagaatgtgatgcggcagaaggggct

SEQ ID NO: 258824 - DNA, 100 bp, Homo sapiens
catgcttattgctacagtttacagacaagaggtttcagccagtgcatgaccttactattggacttaaagagagatctacttcagagccagcagtcccgcc

SEQ ID NO: 258825 - DNA, 100 bp, Homo sapiens
ttctttactcagctgagtgtgccacacaggtagccctggacggcattcagtgttttgaaacactgtgctcctgttctggcaaagctgcgcccaccgcctg

SEQ ID NO: 258826 - DNA, 100 bp, Homo sapiens
cttgaacttaatacagcaagaaagaccatcaagtttaccacactctcgagtggaccctgaggagctcttcaccaagctcgaccgcattggcaagggctcg

SEQ ID NO: 258827 - DNA, 100 bp, Homo sapiens
cgaggcggcggcggcggcggccagagagcagcagccgcctgattggcagattgctactctggctttactcctgggcggcgctgccatcattctcattgca

SEQ ID NO: 258828 - DNA, 100 bp, Homo sapiens
ctggagcccacctgctttgagaagagcaatgacattgggggcctgtggaaattttcaagtgtcctgccatacttcgtagctacaaaactggctaaaatcc

SEQ ID NO: 258829 - DNA, 135 bp, Homo sapiens
ctcggaggaaccggcagctctccacgcccctgcccgaagcctgacccgactgcctctctcagtgagctttgccctttcggatgaagcatacagatccctacgagatcaagataaggaccaatgtattctcattac

SEQ ID NO: 258830 - DNA, 100 bp, Homo sapiens
ttgacataaaacagttgatagcaaagaagataaagttgacagcagaggcagaggttaatcaaactgtggcagcattaaaaaccaataatgtgaatgtcag

SEQ ID NO: 258831 - DNA, 100 bp, Homo sapiens
ggacccgagccgaaaagttatcgtcagaatgtcgggcaaagaccgaattgaaatctttccctcgcgaataataagaaagccttgagttttgtgaaaaacc

SEQ ID NO: 258832 - DNA, 97 bp, Homo sapiens
cccccgtgatggtgcctgctgcagacatactaaaccacttagccaatcacaacgccaatctagaatactctgcggccgccatggcatcagatgaagg

SEQ ID NO: 258833 - DNA, 105 bp, Homo sapiens
gtccgattagccttttctctgccttgcttgcttgagcttcagcggaattcgaaatgaaaccaaggtgtatgttggtaacctgggaactggcgctggcaaaggaga

SEQ ID NO: 258834 - DNA, 99 bp, Homo sapiens
ctaccgagaagtacaaataatgaaaatgttagaccaccctcacataatcaaactttatcagtgttgatgggaaccattttcagcatcctgctggtgact

SEQ ID NO: 258835 - DNA, 96 bp, Homo sapiens
actcagaataatttcatcactggagtcagagcgataaatgagttctgcctcaaatccaggatgttggttcctgcaaacaagaactgaccctatcac

SEQ ID NO: 258836 - DNA, 115 bp, Homo sapiens
tcctcattgctactgccctctgcgctcctgcatctgcctccccataattgcatcgatgaaattgagaccataatcagtgttaagctccagctcattggaattgtcggtattggaa

SEQ ID NO: 258837 - DNA, 102 bp, Homo sapiens
tcaggtccacccatctggccgggcagtaccttcttcaagagaaatggagcccttctccaaggtatttaaagcatgtgatgaagatcacaaaggatatctcag

SEQ ID NO: 258838 - DNA, 49 bp, Homo sapiens
tgtcgacgaccgacagggtggtgaaagagaatgtaactggtcactacat

SEQ ID NO: 258839 - DNA, 100 bp, Homo sapiens
aatatggtgtgaaggttggcctgacaaattatgctgcagcatattgtactggcctgctgctggcccgcaggattgccagtagaaagccaacagacggtgc

SEQ ID NO: 258840 - DNA, 100 bp, Homo sapiens
catctttcagcagttggcacacatggttaaggaacaggaggaaaccattcagagtattggatacaaatgaccgatttctacgaaaaataaccatcgggca

SEQ ID NO: 258841 - DNA, 83 bp, Homo sapiens
ggttttaacaacctggatcttcgaacttttgacacggctttggaaacgacgtcatgtgttagatgagatcgtggggctcacca

SEQ ID NO: 258842 - DNA, 100 bp, Homo sapiens
ctggagcaggaagtcctctgcatcactgtgttcgagagggaccagttctcaccagatggcgctcctgtgaagaggaagcctcaggagggagtgagagcag

SEQ ID NO: 258843 - DNA, 95 bp, Homo sapiens
ctctgggtggcggcttccacgtgaatctggggaaggagtcgagagcgcagaccctgcagaatggttgtgcagcctgactctgaagaagctggtgg

SEQ ID NO: 258844 - DNA, 90 bp, Homo sapiens
cctgttacttccaagtcatcaccagaaaggtcgtttaggccaattgggtttgaaagaaggatttccatctgctgtgaaaaatattagttc

SEQ ID NO: 258845 - DNA, 100 bp, Homo sapiens
cgcccccgggagcgggcgcccagaggcagaacgcagagctggccaagcttcggcaggagctcagcaaggtcagcaaagagctggtggagaagtcagaggc

SEQ ID NO: 258846 - DNA, 100 bp, Homo sapiens
tccctgtgaatgtgtttgctctcatgaacatgcaatgagaagactgatcaatctgctcaggtaacggaggccttggaaagagactctgcgtcaggtcacc

SEQ ID NO: 258847 - DNA, 75 bp, Homo sapiens
gccatcatcctcatcatcatcatagatctgcgatgagctgggagtgaagcggccatcttctgtgaaagtattctc

SEQ ID NO: 258848 - DNA, 96 bp, Homo sapiens
cttggatcattaccagaagagataggtcagctcaaacagttaatggagctggttccagcaacagatagaaatgctttaagttcactctggggaaag

SEQ ID NO: 258849 - DNA, 96 bp, Homo sapiens
gttggagaactacagaaacctggtctccctagatggaacaaattccactgagctatcctcaaggtcacggattccatcctctgtcacctccatttc

SEQ ID NO: 258850 - DNA, 100 bp, Homo sapiens
gaggcatacaccacttagtaaactaatgaaagcctattgtgaacgacaggcccagtttgatatctctgtggccagtgaaattatggctgtcctggctctc

SEQ ID NO: 258851 - DNA, 101 bp, Homo sapiens
ccggaccctgctggctatcctgcgcctttccactgctctggtgagtccagtgagccgacagtccataagaaactcccagaagcacagccccacttcagagc

SEQ ID NO: 258852 - DNA, 80 bp, Homo sapiens
catccttcatacgactgaccctggagctgaaggccaggttttgcagtggtctgaggcctccaggcccaaggtcagcatcc

SEQ ID NO: 258853 - DNA, 153 bp, Homo sapiens
cgacgagcgggccctggctcaggaacagggacagcacctcatcccctggatgggggaccacaagatcctcatcgacaggattttttatcaagcagaaatgcatcgaacaacgagaatcaagatcactgagctaaatccccacctgatgtgtgt

SEQ ID NO: 258854 - DNA, 83 bp, Homo sapiens
cggacctgtctgggtctcagccgccaaagaccccgtccggtaggttcctgcacttggccatcatccatgaagaaaaggcactg

SEQ ID NO: 258855 - DNA, 87 bp, Homo sapiens
ctatgggtgaaatttggctttcattcatgaatgaggagtctccccaggacagtgctatcacccgggatattaaccgaacattcccag

SEQ ID NO: 258856 - DNA, 104 bp, Homo sapiens
ggcgggaagcggccccttcgtgtgcgcttgggcgaggccgggcggcgcttctgtcctcctactcggacccgcaggaaaaatcagttgctgccgtctgacaaggt

SEQ ID NO: 258857 - DNA, 95 bp, Homo sapiens
gagatgggcagacggattcatttagagctgcggaacaggacgccctctgatgtgagaagccctaccactgcaactgggacggctgcggctggaag

SEQ ID NO: 258858 - DNA, 75 bp, Homo sapiens
aagtggctggaacaacaagaaaccggccttcttgcgtcgatggagaaaattcagatccagttaacacaatcattt

SEQ ID NO: 258859 - DNA, 100 bp, Homo sapiens
aggagaggcgccagagagagctgctggaacagcactatgcccagtatgatgccgacgatgacgaggcctatatgaacccaatagcaatggcgagatcaag

SEQ ID NO: 258860 - DNA, 100 bp, Homo sapiens
aaactctacataggaacacgatgtgaatggaagaaacctgtcattcttacctgttgattcggtggtaattacagaatctgatgcacagagaacaatgtac

SEQ ID NO: 258861 - DNA, 75 bp, Homo sapiens
caccaagtgcatcaccatccccagcttagaccatgctcagcctccaagcagccttgtcatcgacaaagaatctga

SEQ ID NO: 258862 - DNA, 100 bp, Homo sapiens
gaccgattgtcgctcggcggcgggagtcggtttacccagggttgatgataaccgctggccttattcattggattttaaatacattgaacataactgttca

SEQ ID NO: 258863 - DNA, 74 bp, Homo sapiens
aaaaacatcctgaatcagaatggccatctgaaattcagagtgtagctctgagacttgcttccaaagtcatttcc

SEQ ID NO: 258864 - DNA, 75 bp, Homo sapiens
ggcaaatgcagatgaactagaagatgatgattttgacaggcacagagtgcaagttggattgaaaaaacaagacct

SEQ ID NO: 258865 - DNA, 75 bp, Homo sapiens
aatgacctgtcgcctgccagctctgatttgcttgctgaaaatggtcgattaagcaatacccaaggagtcgtttct

SEQ ID NO: 258866 - DNA, 90 bp, Homo sapiens
aaatatggcctcaatatgtgccgccagtgtttccgtcagtacgcgaaggatatcggtttcattaagcttctcaataggtttggcatggac

SEQ ID NO: 258867 - DNA, 82 bp, Homo sapiens
ctttccgccctaatggaggtctccagtttcgaaatccccggcttcctgactgatgaagagtgtcggctcatcatccatctgg

SEQ ID NO: 258868 - DNA, 83 bp, Homo sapiens
caacaccacaataatccacagccaaggtcatattggaattgctgttcctgatgtatacagtgcttgtaaaaggtttgaagaac

SEQ ID NO: 258869 - DNA, 83 bp, Homo sapiens
ttacaatgctaccctgctttttctggtgtcctgaacctggaagttgtgctttttaagctgtccagactaccctcaagtttaca

SEQ ID NO: 258870 - DNA, 78 bp, Homo sapiens
aagactttgggctggtgaccagatattagaggacatgaaagatcagatgtcaacttcatctgtgcaggcattagctga

SEQ ID NO: 258871 - DNA, 100 bp, Homo sapiens
gggcgttatgaaatcacagtgaagcttggtggattaaatgtggcatatagtccctactacaaaatttttcaacctgggttgtcgttttggaaagtaggcc

SEQ ID NO: 258872 - DNA, 74 bp, Homo sapiens
ctgtgtggttcctgggaaccctgctgggaactcagctcccacccccagggactggggccccctgccccagaagc

SEQ ID NO: 258873 - DNA, 90 bp, Homo sapiens
cggcgagaatcggggtccagcacagatgatggcgacagcggagaagggaagatacagcatcatgcaggcctgctgggccttggagcccac

SEQ ID NO: 258874 - DNA, 98 bp, Homo sapiens
ggctggagctggaggcgcggcgccggtgagctgaggacagagcgggatgccaccagcttgtccaaagggaagttccaggagctcctggtgggcatcgt

SEQ ID NO: 258875 - DNA, 88 bp, Homo sapiens
cagattctaactccaatggcccaaaatggaaggagcctgggagaggccaggcctccccggactgctagcctgcttttcctggggtccc

SEQ ID NO: 258876 - DNA, 83 bp, Homo sapiens
gccactacagggaagtgcatcacatgtcagggcagcccaatggatccaatggtgatgaagagacctcagttgtatggcatggg

SEQ ID NO: 258877 - DNA, 100 bp, Homo sapiens
cgggatgtgaaggactccgggtgaggccggccacgccccgcacggaaacctgtaggaagtgtcagggactctggaaagaacataatggcctcacctgtga

SEQ ID NO: 258878 - DNA, 100 bp, Homo sapiens
tgctttatttttgtggcaggcatctgtgggatctgtaatagaaataaccatccgggtatggctgaaaagagacagtggtcaatactggcccagcatttac

SEQ ID NO: 258879 - DNA, 75 bp, Homo sapiens
cggaggtgaggcggaactctgagctggctctgaagcaccgacaaggcaagaatcacaagatgcgcatcattgcct

SEQ ID NO: 258880 - DNA, 98 bp, Homo sapiens
attctgtcaactagaattgtatgtagaagcagaaagatgaaggtcttagaatcattgattggaatgatccagaaattcccttatgatgaccctactta

SEQ ID NO: 258881 - DNA, 75 bp, Homo sapiens
tagaaacctaagcatgccggatctggaaaacagattttctctgtgggcagttctttttgttttgggaagacttct

SEQ ID NO: 258882 - DNA, 83 bp, Homo sapiens
ggcgacgcgcgggaacaacgcgagtcggcgcgcgggacgaagatgatatcatcaagttgaatcgaaaggaagggaagaagcag

SEQ ID NO: 258883 - DNA, 82 bp, Homo sapiens
gcctggaggagaatcaagagctccgagtgtactaatggtcacttgatgtgcgctggctgttttatccacctactagcagatg

SEQ ID NO: 258884 - DNA, 98 bp, Homo sapiens
gccctgccaatcaaatgcctggaagccgtgatcctgggaatctatacacagaatgggattttacatatgctggacagaaataagagaatcaagccccg

SEQ ID NO: 258885 - DNA, 99 bp, Homo sapiens
ggaggcgcgtctccccggcccagtccgcgcccggccccgcggggccgctccggcccgctccgagggtcgacatgttaaaacgggtcagttggcagccat

SEQ ID NO: 258886 - DNA, 100 bp, Homo sapiens
cactctgccaggtcctgcatgctgtgagccatcaggactcttgtcctgcactgggaagtcttccagaaggtgacagaggtcttcatcctagtgcctgcgc

SEQ ID NO: 258887 - DNA, 101 bp, Homo sapiens
gtgatgtcgtaaagccgggagtgtcgtaaaccagaaagaactggttgtcttcttgggcggtgttgcagggttcatctttactttttaccaaaactcaagga

SEQ ID NO: 258888 - DNA, 98 bp, Homo sapiens
agctggagaagggacgccggctgcgacagttacagcagctacagcagctgcgagacagtggcgagaaggtacctggaagaggtgggctacacagacac

SEQ ID NO: 258889 - DNA, 100 bp, Homo sapiens
ccatcgactacaaacggaacttgccgcgtcgaggactgtcgggatgagacttctgtgagcagcgaggattttgatatgagcgactccacatggatgtcag

SEQ ID NO: 258890 - DNA, 83 bp, Homo sapiens
agagtgaaggacctgaaaatcatatagagaaagacagatggaagtctttaagatgaaggatttgggggcagagcacttggcag

SEQ ID NO: 258891 - DNA, 82 bp, Homo sapiens
tgggccgcaggggcgcgcagcgcggggagctgccaggttcaagggcagcaggaaagacgagatcctgggcatcgccaacaac

SEQ ID NO: 258892 - DNA, 100 bp, Homo sapiens
aattaagcagatgctccagtttgagaaacctggatctgcgatctgtttgtgtactatactggcaattgctggagaagattttgcaattgttgcttctgat

SEQ ID NO: 258893 - DNA, 98 bp, Homo sapiens
gtgcccatccagtccggtgccatctgaagcccccttcccaggttttgagagtattttagaagggctttatggaccacggctacgaagagacctcagtt

SEQ ID NO: 258894 - DNA, 108 bp, Homo sapiens
cagaaataccagtccccagtgagggtgtacaaatacccctttgaattaattatggctccattgatcagccgcaactacaagggcgatgtggccatgagcaagattgag

SEQ ID NO: 258895 - DNA, 83 bp, Homo sapiens
ttggcgtgtccctgcagcgaaggatcctggagcatcagatccatgctgctgctgactcggagccccacagcttggcacaggct

SEQ ID NO: 258896 - DNA, 90 bp, Homo sapiens
cttcgcctccaggatgcgctgagccctacaacacccccagcggccgccggctcccccacgagtgaccacaatatgaatgggaacagcaag

SEQ ID NO: 258897 - DNA, 98 bp, Homo sapiens
cgcagagcgaggctgcgggaccccaggatgggggacaggaggctgcggggcctcaggtgaaaccagcccagagaagttacgggatttgcccccggggc

SEQ ID NO: 258898 - DNA, 100 bp, Homo sapiens
caaaggcaaaggattcggatttattaagcttagacattttaaatccaaaggatgtgattagtgtccagctggaagacactacctcttgcaaaactttttg

SEQ ID NO: 258899 - DNA, 82 bp, Homo sapiens
aagttcgagcactaatatttaagaaagaagatgttaactttcaggattttttatcaagcagaaatgcatcgaacaacgagaa

SEQ ID NO: 258900 - DNA, 100 bp, Homo sapiens
cggagctggacgccgcgatcgtggggcccgcgaggcgggcagccggggcgtccagcatcccagccatcactcttccacctgctccttagagaagggaaga

SEQ ID NO: 258901 - DNA, 82 bp, Homo sapiens
gcgcgacgctgctggtggccaagaccaaggcctctccagacttatctaaaaacagactggttgaagttccaatggaattgtg

SEQ ID NO: 258902 - DNA, 74 bp, Homo sapiens
agagctggagcaagcaaatgacgacctggaaagagccaagcgggtgataaaagaaaatgtggctgaagttaccc

SEQ ID NO: 258903 - DNA, 74 bp, Homo sapiens
caggatggcgcggccgagtccccgtacggccacccggcgggttttcacctcaaatggccccacggtgatcatgc

SEQ ID NO: 258904 - DNA, 74 bp, Homo sapiens
gcaagagtgcgccctctactggaggggtgaagaaacctcatcgttacagggctgcttccccaagcccacagtct

SEQ ID NO: 258905 - DNA, 100 bp, Homo sapiens
tctcgctccgtggccttagctgtgctcgcgctactctctctttctggcctggaggctatccagcgtcctagcttactctgccaccactgcccggcaggag

SEQ ID NO: 258906 - DNA, 100 bp, Homo sapiens
aaagcacaaggattctcgctgtgacagagacaacaccgagtatgagaaagtgatgccaatgaccatccagttctccattctgattatgctgcactcggct

SEQ ID NO: 258907 - DNA, 100 bp, Homo sapiens
gctagatgaaagggaagctggcatcactgagaaggttgttttcgagcagacaaaggtcatcgcagtcttcccatgcacaagatgattaatacagatctta

SEQ ID NO: 258908 - DNA, 74 bp, Homo sapiens
gcatcgggagcggccgcgccatccccatcaagcagggaaagcaggcaggatgggagagtcgccgatagaaccac

SEQ ID NO: 258909 - DNA, 83 bp, Homo sapiens
ccaggcctggctcgcgcctctcccaggacccgcctggctgcgagatatgagcaggccgggctctcgccatgggtcactgtcgc

SEQ ID NO: 258910 - DNA, 50 bp, Homo sapiens
cctcagggaaggggcagcacagtctaacataagaccagactatgcagact

SEQ ID NO: 258911 - DNA, 50 bp, Homo sapiens
tctccctcccaggacacaggagtcaagacaacaatatgcacaggttttgg

SEQ ID NO: 258912 - DNA, 80 bp, Homo sapiens
aagcagcgtgcgttcagccctggggccgactgcagctcccgcccactccttctggccggctatgaggatggatcggtggt

SEQ ID NO: 258913 - DNA, 101 bp, Homo sapiens
cgcgagccgagggggaccggcgaccgctgccgaagcatgaagaaggggtaaggcgtgagcccccaagatttcacgacaaatcttcctattttcaagctgaa

SEQ ID NO: 258914 - DNA, 100 bp, Homo sapiens
cgggcggcacgcacgcggtgcagggtaacatggcggatgcggaaggtttttcccctccagtaaatgtgactgtctctccccgttctgaagaaagccatac

SEQ ID NO: 258915 - DNA, 82 bp, Homo sapiens
agaacaccaggacatcccagagtctgggaaatggtaactaggatttctacctcaaccgcgagacctatgcaaggacggtgtg

SEQ ID NO: 258916 - DNA, 101 bp, Homo sapiens
gcgaagccttgaaaaagctgccctgagacggtgtcccgccgaaagagaataccttctgcctcctgagacacagcctctccatgaggtggtgtacttcagtg

SEQ ID NO: 258917 - DNA, 74 bp, Homo sapiens
ccttgcccggtacaccactaccgaaaagctgtctatttgtggggtgatcagccccagatttgacgtgcaactca

SEQ ID NO: 258918 - DNA, 75 bp, Homo sapiens
ttcaatccagaagaaattaatttgttccgcagaaagggaaccttctcatttacaccgagtttggcaagatgcttg

SEQ ID NO: 258919 - DNA, 100 bp, Homo sapiens
ctttgtggctgtgcttgccaggcctggctccagttttatgaatgaagctatggctacagattccccaagaagacccagtcgttgtactggtggagttgtg

SEQ ID NO: 258920 - DNA, 101 bp, Homo sapiens
gccagcgatgtccccatccgccgccgagaggaggcctatgagaatcagctacctggcctatcgaaactttatgattgacacttaccgactgaacccccaag

SEQ ID NO: 258921 - DNA, 87 bp, Homo sapiens
cttttggatggtctcatctacttgctattggcattatactttgacaaaattttaccctaaaaagcttgtggtgaaggggggcaaaaa

SEQ ID NO: 258922 - DNA, 75 bp, Homo sapiens
ctgctctgaagcgcacgacctccgactactttctccttcaaggattcactttaagagatttggaaactcttccct

SEQ ID NO: 258923 - DNA, 101 bp, Homo sapiens
atgaaaacacgtggatcggcctgaacgacaggatcgtggagagagatttccagtggacggacaacaccgggctgagggtctccccagacacccgagcaccc

SEQ ID NO: 258924 - DNA, 100 bp, Homo sapiens
tgaaacaactgatgagagcctgaggagccattttgagcaatggggaacgctcacggactgtgtggtatggagagtcggcttgactacactgtgtggagca

SEQ ID NO: 258925 - DNA, 101 bp, Homo sapiens
catggacatgaagaggaggatccacctggagctgaggaaccggaccccggcagctaaaaagcttgtggtgaaggggggcaaaaaaaagaagcaagttctga

SEQ ID NO: 258926 - DNA, 100 bp, Homo sapiens
gttcttagaagtggtgatgcaagaagtttctaggaaaggccggacaccagattctctgcaatgactgtaatggacgatccactgttcagtttcatatatt

SEQ ID NO: 258927 - DNA, 82 bp, Homo sapiens
aagctgtatgtgatcgggggcagcaacaacgatgccggatacaggagggacgtgcaccaggacaaccctccatatgataagg

SEQ ID NO: 258928 - DNA, 108 bp, Homo sapiens
tgaagctgcagatctgggacacagcggggcaggagcgcttccgcaccatcacctccacatgtgaagttcatttccaatccgccctccatggtggcagcggggagcgtg

SEQ ID NO: 258929 - DNA, 75 bp, Homo sapiens
aaattgctgcctctggtggggaagtggaagtacgtagagaaatcgacactcttaatgaacgtttagctgctgaag

SEQ ID NO: 258930 - DNA, 89 bp, Homo sapiens
ctgactttcagctatggaatcgagaggagctctaaattgggaagtaatgcaggaaacaagccttgtaaaaatcaacttggattcacttt

SEQ ID NO: 258931 - DNA, 90 bp, Homo sapiens
cttcgacattgccgtcgacggcgagcccttgggccgcgtctcctttgagatgcttcaggactgccccaaggcccgcagggaggtggagct

SEQ ID NO: 258932 - DNA, 98 bp, Homo sapiens
agaagtcgcgtgtctaggtgagtcgcggtgggtcctcgcttgcagttcagcgaccacggccttgtttgtatgaagtccagcacatctgtggttgagct

SEQ ID NO: 258933 - DNA, 100 bp, Homo sapiens
cagatcctgccttcacctacgagtggaccaaggctgaaccttcacctagccccaggattacaaggaaaagcaccaggcaaaccaccatcacatctcattt

SEQ ID NO: 258934 - DNA, 83 bp, Homo sapiens
gtacaccatgcacaaggtcttccagtttctgaacctaggacatttcattaccatccagaagtgtctcccactgaaggcatccg

SEQ ID NO: 258935 - DNA, 75 bp, Homo sapiens
gccacacagtgtccagatacgagggacagagcgggatgccaccagcttgtccaaagggaagttccaggagctcct

SEQ ID NO: 258936 - DNA, 100 bp, Homo sapiens
cagcttcaggagtactggcggaggggctggacgttccacgccaaaggacatggatttgattgacatactttggaggcaagatatagatcttggagtaagt

SEQ ID NO: 258937 - DNA, 101 bp, Homo sapiens
ctgcccagacggctcacctgtgcgggatggaacaaaaggaagaagaactttggcatcagctacctgggccgggaccggctaggacaggaagtttacctctc

SEQ ID NO: 258938 - DNA, 98 bp, Homo sapiens
cgggttgtccgggtcctgtcaatgtcacatgtgtatatctcatgattgatatggagaaactagtcatgggccaaaggtcaagatacttctctgggaaa

SEQ ID NO: 258939 - DNA, 96 bp, Homo sapiens
ggcggcggctgcggtcgaagaaggggacgccgacaaggccatcgaggagggcacgctggaggagatcgaagaggaggtccggcagaagaaatcatc

SEQ ID NO: 258940 - DNA, 100 bp, Homo sapiens
actggatctgctgccagcattagcctggctcaatatctaatcaatgtcagattttgtggaagtataatactttgtcattatgagatgtcgtctctcggtg

SEQ ID NO: 258941 - DNA, 83 bp, Homo sapiens
atcagggcttcctcatggtgggtgttatagttttgccgctggactcttccctcccttcccccaccccatcaggatgatatgag

SEQ ID NO: 258942 - DNA, 95 bp, Homo sapiens
gcgaggagcgcggagccggagctggacgccgccgccgccaccgccacctgcgcggcagtcatcaaggaatatcagaagctctttcctgacattcc

SEQ ID NO: 258943 - DNA, 74 bp, Homo sapiens
ctgaagaagagatacatggatgactacatttttctcttcaaaatgtcacaggtggaagtgatggggacacggtg

SEQ ID NO: 258944 - DNA, 50 bp, Homo sapiens
cccaaagcgctggaattacaggctctgactacctgcttcaagattaccca

SEQ ID NO: 258945 - DNA, 90 bp, Homo sapiens
gacgacttcgaccctgcccagcacgaccagctcatgcaggtttactcatttggggagatgccgtgggacttggcgctgatgcagacatgc

SEQ ID NO: 258946 - DNA, 100 bp, Homo sapiens
gactccttcggcagtccacccaccgccgccgcctcccagatgggcaccaacaaatgcgccagccagtcgggcatgactgcctacggcacgagaaggcatc

SEQ ID NO: 258947 - DNA, 122 bp, Homo sapiens
ctgggaaactccccatgcagccccctctcagctccatgagctccatgaaacccactctgtcgcacagtgtcagagatggctttggattccccgttctgtgtgctgctgtctggctcctgaac

SEQ ID NO: 258948 - DNA, 75 bp, Homo sapiens
ccgcctggacggctcgggcgctggagtgctggacccaaaggagacaacatttatgaatggaggtcaactatattg

SEQ ID NO: 258949 - DNA, 101 bp, Homo sapiens
tctaaacggactcatgtactttgtcagaggacaaaagcatgtcttcccttcctgggtgcattggtttggatgcagcaacagctacagtggagtctgaagag

SEQ ID NO: 258950 - DNA, 75 bp, Homo sapiens
gctcaaggatgaggtcctagaggggtctggaataacaatccagaggacgacttcaggatgcccaatggctccacc

SEQ ID NO: 258951 - DNA, 82 bp, Homo sapiens
ccagggctcccaggcagcagaatctgcccacagagttcggataacgaaggaggcccaacttcattcaataaggagcctgacg

SEQ ID NO: 258952 - DNA, 99 bp, Homo sapiens
ctgcccacccaacgcgaagacggtaacccgtgtgactttgactgggagtgcatcatcgacgaggactgtgggcccagcatgtactgccagtttgccagc

SEQ ID NO: 258953 - DNA, 100 bp, Homo sapiens
cgtagggaccacatcaaagacagctttcacagtttgcgggactcagtcccatcactccaaggagagaaggcggagacagcagccaatcgcatctgcaagg

SEQ ID NO: 258954 - DNA, 100 bp, Homo sapiens
aggggacggaggcaatgacgtcagcatgattcaggaatctgactgcggcgtgggagtggaaggaaaggtcattgacgagactctggatgttaaggaaatg

SEQ ID NO: 258955 - DNA, 74 bp, Homo sapiens
ctgtgaatgggaagttacgcgaagtccacccagcgtttctgagctccagggcccacaacggcagtgtcctacat

SEQ ID NO: 258956 - DNA, 97 bp, Homo sapiens
gttataagaaaggtgcagaagtcattttaaactatggacgactccgaggaacattgaggactctgtctactagtgacgatgtcgaagacagggaaaa

SEQ ID NO: 258957 - DNA, 74 bp, Homo sapiens
ctctggatggggtcaagtcctggctgaagccacggctgggacaggaagccacaaccatgctcgacagctgacca

SEQ ID NO: 258958 - DNA, 110 bp, Homo sapiens
cctgcctcaggtttatttgtacaaatagcacaggaggacccgtcgccatgggccgtgtgatccgtggacagaggaagggcgccgggtctgtgttccgcgcgcacgtgaag

SEQ ID NO: 258959 - DNA, 74 bp, Homo sapiens
ggcaaagaggtgttgcagaacctcggccccaaggacaagttggtgacaaagttcctgctgatataaggttaact

SEQ ID NO: 258960 - DNA, 50 bp, Homo sapiens
agggccgagcacagcaatgcaagttgctccttgagggcaggacagttctt

SEQ ID NO: 258961 - DNA, 100 bp, Homo sapiens
cggatattcagttgcacatccccacatcaatgcactgccaatggtcttcagaactactagcagataatttggggggacttcatattcagaagtctatata

SEQ ID NO: 258962 - DNA, 90 bp, Homo sapiens
tctatggtcctcctcacctatggccgctggcagatgaagtacaacttgccttcctggtgtgaccgagtcctctggaagtcttatcccctg

SEQ ID NO: 258963 - DNA, 75 bp, Homo sapiens
cccacaacccgcagagacttctactggctgcgctcctttctggccggagatggaattactctgatcaccaaagag

SEQ ID NO: 258964 - DNA, 96 bp, Homo sapiens
cttacaacaaggaagggactttaatcactgaccatcccaatatacagtgggatggagtaggacctcttccagactgtgctgaaccaccaaaaggga

SEQ ID NO: 258965 - DNA, 90 bp, Homo sapiens
caaacaaaaaccaactgaagcagctgacagaggatcagttcagtgatatgagaatcagcataaaccagacgcctgggaagagtcttgact

SEQ ID NO: 258966 - DNA, 100 bp, Homo sapiens
ttccaaactgatctaacagggcaaaaaaagggctggaaacttcgctatcatggagatcgtgagatcaacctacccaaagactactgcagcactgacttgg

SEQ ID NO: 258967 - DNA, 75 bp, Homo sapiens
gcggcggcgccggcctccggggagaaacgacttatgaaaatatgcatcagtttaatactgtcttggaattcatga

SEQ ID NO: 258968 - DNA, 83 bp, Homo sapiens
catcttcgaacttagacttccggaaggactttggcgaggccctgctggtttaccgtgtcttcaggaacgaagctaaacgcacc

SEQ ID NO: 258969 - DNA, 82 bp, Homo sapiens
gggaactctaaagatttagttggaaaagtagaaccaacctatgaccctgtgagcgaggaccaagaccccttgtccagcgact

SEQ ID NO: 258970 - DNA, 82 bp, Homo sapiens
tactgtgctatcctagaatcaaggatttcagcaacaatgcctctgttcaaactcccagcaatggctgccatccggaagaaac

SEQ ID NO: 258971 - DNA, 90 bp, Homo sapiens
ggcctttattgcgcacttccaggacaacttacattcggtcaaccgggacctcaaatccaaaaggtaattctggcacttggagactatatg

SEQ ID NO: 258972 - DNA, 98 bp, Homo sapiens
gcagagaccaaattcctcgttgcgcctctgaccttctcgaacaggcagcccatcaaacctgctaagatatcaacatggactagggactccagacttgc

SEQ ID NO: 258973 - DNA, 73 bp, Homo sapiens
cgagtgtcaggatggccgagtggtctaaggcgccagactcaagcaatggctgccatccggaagaaactggtga

SEQ ID NO: 258974 - DNA, 83 bp, Homo sapiens
gtgacctggattggatcctggggacagcatgtctcagggggatatgagactttctactcggaatatcctgagtgttgcgtgga

SEQ ID NO: 258975 - DNA, 100 bp, Homo sapiens
atgtgcatcgatatgttggaaaagagccgagtggactaagattcaacaaactatttttgaatgaagatggtgatgatgaacagtctacacagatggctgc

SEQ ID NO: 258976 - DNA, 83 bp, Homo sapiens
cgggcacctccgagcgcaaggacagcgcgaggtccgcgcagcccagcgcagccatgtggtctttgggaagaagcttcctgcct

SEQ ID NO: 258977 - DNA, 90 bp, Homo sapiens
gctgaatccagtaccaaaaacgtcaacaacagttttacggtatgatctcgtgaaaccttgagagaaactgaatgacgaatgaaactattg

SEQ ID NO: 258978 - DNA, 114 bp, Homo sapiens
aaagtaacaaccagtttgtattgtaccgcataactgaagccactaagacgactcagattgatggacaacttttcttaattaagcaccttttgatacttcgtgaacaaattgctc

SEQ ID NO: 258979 - DNA, 75 bp, Homo sapiens
gtatggaagagactctgatgcaaatagacttgaaagagggctccagaaaaagtagatgcgtatctgtacaaacag

SEQ ID NO: 258980 - DNA, 90 bp, Homo sapiens
gtcacctggatcccagagtaaagatctactgaggcagttaatagtatcatatctatcgtttttggtactcgaagaattgcctgggctcac

SEQ ID NO: 258981 - DNA, 75 bp, Homo sapiens
agagtcttcaatcatattacaaatgttttgtttcctaagtcgggaggttttgagagattacctgaagttgcactc

SEQ ID NO: 258982 - DNA, 100 bp, Homo sapiens
tttcccggttcgctcggccgcggtcgctatggaggagccggagatgcagctcaaggggaagaaaggcagtataccttaaatggcaagaaggaaataaatc

SEQ ID NO: 258983 - DNA, 100 bp, Homo sapiens
tggttgggccggagcctcacagctgtattcatgtgggtattatctaagtaccgcagtggaaaactgcccaaggcatttaagatcatccctgcactctcca

SEQ ID NO: 258984 - DNA, 100 bp, Homo sapiens
gcttctttcggttctacctgggagaatccaccgccatccgccaccatgtaagactttgaccccgacgcaggcttcagtgattgccgcggatcagaagcct

SEQ ID NO: 258985 - DNA, 100 bp, Homo sapiens
cccgcgtttcagccctagggaagttaatagaagatgaaattgcaaccattcttaaatctacattgaaaggactagaatatttgcactttatgagaaaaat

SEQ ID NO: 258986 - DNA, 75 bp, Homo sapiens
atctgcaaaacttattcgggataaagtagcaggtcaagaagtggcgctgacctggagcccctgcctggggctggc

SEQ ID NO: 258987 - DNA, 75 bp, Homo sapiens
caatttagatgaacagcaggagcttgttgaaaggggttggaagtgtatcctcccttcttattttttctagctgtt

SEQ ID NO: 258988 - DNA, 83 bp, Homo sapiens
ctcggcgtgctgcgcctccgcggctgccctgcgccagacagcccacctgaggatattgaccataaggactcatatctcattac

SEQ ID NO: 258989 - DNA, 98 bp, Homo sapiens
tatacatatgcaaacatgacctttcaagttcagtggctccagttaatgttcgtgaagaaattgaagagttttttccaagaatgtggaagataaatcaa

SEQ ID NO: 258990 - DNA, 75 bp, Homo sapiens
ctttggagccccccaggccccagtagacttaattcagtgcacaaatgagatgaatgtgaacatcccacagttggc

SEQ ID NO: 258991 - DNA, 100 bp, Homo sapiens
gctctttctccaagtttgatggctgatcttgaaggtttacacttgtcaacttcctcttcagtcatcagtccgctgcctactacctgccccgacacctggc

SEQ ID NO: 258992 - DNA, 96 bp, Homo sapiens
attttagtgcaatggtggccaacttgattcagtgtgttccaggtataaagaaggccttgctaatacaagagagatcctggtggacctgggtctgga

SEQ ID NO: 258993 - DNA, 83 bp, Homo sapiens
tttggttggaagacctattatcagatcaaccaccaaagtgggaaacattgaaatcaagatccccataggcactgagatagaag

SEQ ID NO: 258994 - DNA, 98 bp, Homo sapiens
tgaggactataataccttgggatgtggacacaatttgtaagaaaatggtgtgaatggaacattaacttcaaatgtagcagactctccccggaataaaa

SEQ ID NO: 258995 - DNA, 98 bp, Homo sapiens
ctgacaagcccttgcgcctgcctctccaggatgtctacaaaattggtgtatacctgaggtgcaccggaggtgaagtcggtgccacttctgccctggcc

SEQ ID NO: 258996 - DNA, 100 bp, Homo sapiens
gcctgcctccgccggctacagcgggaagagcggcgtttacgtgtgtgccaagtgtggctatgagctgttctccagccgctcgaagtatgcacactcgtct

SEQ ID NO: 258997 - DNA, 90 bp, Homo sapiens
cagacctctgtggcagcattttttccagaacacaaaagcacgattacgtggtgttcatgatggtttgttcactggacaaatagatgctgt

SEQ ID NO: 258998 - DNA, 75 bp, Homo sapiens
cccgagtgcagtttcgatggaaaatgaaggccatggcgagtgtcactgcggggaatgcaagtgccatgcaggtta

SEQ ID NO: 258999 - DNA, 87 bp, Homo sapiens
acttctgcgcagcggcgcccgcagccgcagccccctgctccggaggctggtgcaggtcctggaccggatcaaaggctcactgctgcc

SEQ ID NO: 259000 - DNA, 50 bp, Homo sapiens
cgggaggagcgtctgagcaggaggatcatccacgaggatggctactccga

SEQ ID NO: 259001 - DNA, 50 bp, Homo sapiens
tgcagccgcgggggttgacccaggccgaggcatttcatccttcatgaagc

SEQ ID NO: 259002 - DNA, 82 bp, Homo sapiens
gaccatacagacctaccggtctgtcagtgagatggcttctaacaagaatccacattcatctcaatggaaggatcctgcctta

SEQ ID NO: 259003 - DNA, 75 bp, Homo sapiens
gtgcctatggaagttcatttaccaccagagtttgggcttcctgtagacacccttttcctgcgcaacagagctggg

SEQ ID NO: 259004 - DNA, 50 bp, Homo sapiens
gacgcgctcatctgctggagcccggccctgttaaacctggcagagcgact

SEQ ID NO: 259005 - DNA, 83 bp, Homo sapiens
cggagcagcgcgtcgtggggcgagcggcagggcgaagctgtgctcaggcccgggctggacgcagagccagagctgtccccaga

SEQ ID NO: 259006 - DNA, 100 bp, Homo sapiens
ctgctttcatggagttcacagaagagtcgaggagatacagtttatgtaacttgatggaagaaaatggaattactccaaaaagacaagtgctcaagcagca

SEQ ID NO: 259007 - DNA, 100 bp, Homo sapiens
caacagagggacaacaaaagcctcctacaagagtcctaccaaaaggtcaaagaattgactgtagatccaactgctgctggtgatgttcgtccaataatgc

SEQ ID NO: 259008 - DNA, 83 bp, Homo sapiens
acccccggccccgtagggtccccggcgccaggccacccggccgtcagcagcatgcagggtactccaaagattcaggtttactc

SEQ ID NO: 259009 - DNA, 100 bp, Homo sapiens
tgtcttccatgaagaaatgatgaagatgcgacaggctaagctggattatcaggcccgccagctcatcctgcagtatggcttgaccctcagtgatctggat

SEQ ID NO: 259010 - DNA, 90 bp, Homo sapiens
ctcgcctactgcgtgcaggatgccaccgtggtggacgtggagaagcggaggaacccctccaagcactacacatggagaagggctgtcact

SEQ ID NO: 259011 - DNA, 74 bp, Homo sapiens
gcgggttagggggccggcgcccgcggttcaggctactgcagcactggggtgtcagttgttggtccgacccagaa

SEQ ID NO: 259012 - DNA, 75 bp, Homo sapiens
tggaaaaacgactaccggcagctcgagaaggagctgcagggccagacacgatgaggcgagtggtacgacagagca

SEQ ID NO: 259013 - DNA, 98 bp, Homo sapiens
gacacagcctcgctggaggcagtttctgctttgctgcaagataacatcgctgatgctgtagcttgtgcaaagagggttgtccgtgatccacaaggcat

SEQ ID NO: 259014 - DNA, 98 bp, Homo sapiens
cgattaaagaggaaggggcagtgctcacatttctgggcagggctgtgggacagatgatgtctaccatgttctacccactggtcacctttgtcctcctc

SEQ ID NO: 259015 - DNA, 74 bp, Homo sapiens
aaaaaacgccagccaagaagcatgtgcgactgcaggagagtgagaaagatcagtctaaagaaaaggagaagaaa

SEQ ID NO: 259016 - DNA, 90 bp, Homo sapiens
aagcttccaggttgatgcctttggaacgtcattcattctcgatgtcgtgctaaatcagttgacaggcgctgccctcgatgtggtcatgaa

SEQ ID NO: 259017 - DNA, 100 bp, Homo sapiens
agtctgtgcagtggcacctgcgcgaagctggccaaagcctgcccagacggctcacctgtgcgggatggaacaaaaggaatcagagatcattgatttcttc

SEQ ID NO: 259018 - DNA, 74 bp, Homo sapiens
aagaatctcgtgctcaccggtttctcccacatcgacctggcttgtgacatcacgggaggactgtacctgaaggt

SEQ ID NO: 259019 - DNA, 90 bp, Homo sapiens
acttccaccggactttgaaaaggaagggaatatcagtgtgcgtgtgaccaccatggatgcagagctggagtttgccatccagcccaacac

SEQ ID NO: 259020 - DNA, 82 bp, Homo sapiens
cggtattggatgattcgtatctaagactctgggacactcctgaagtcgggaaatgtttctccttggaccaagatgactgatg

SEQ ID NO: 259021 - DNA, 75 bp, Homo sapiens
agtcaggcttcgagatgcttaaggttgacttccccagaaatctggccaagtctgtaactgtggaatgaggctgag

SEQ ID NO: 259022 - DNA, 83 bp, Homo sapiens
gcagccgatccagcctgcggagcctgtggggcagatgagtgccaaaccaaatatggaaatgctaatgcctggagatactgtac

SEQ ID NO: 259023 - DNA, 125 bp, Homo sapiens
agatggcgctggccggatggaaatcctaatgacagtctccaaattcgcctccatctgtaccatggccaagaagcttgagagaagaaaaatttcagaaaaattgtctcaatttgactagaatatca

SEQ ID NO: 259024 - DNA, 75 bp, Homo sapiens
ccgggaagatttacacagatggaaccagaaaagatacgaggctctaggagagtgtgcaggatgacagaattcgag

SEQ ID NO: 259025 - DNA, 100 bp, Homo sapiens
ggctgaaggggatcgtctaaaagaggtggaggccatagtggagtttgactaccaggcccagcacgatgatgagctgacgatcagcgtgggtgaaatcatc

SEQ ID NO: 259026 - DNA, 83 bp, Homo sapiens
cctggaccacggcgcagacgcgggcgagctgcggctcggacgccagcggacacgcgggcgagaacacgatgatgaacgcgtta

SEQ ID NO: 259027 - DNA, 75 bp, Homo sapiens
cgtggtcatcagtggtcagtgggggcgcagatcaggcctctataaccgccaggaatcacattcagctggtgaaac

SEQ ID NO: 259028 - DNA, 90 bp, Homo sapiens
cgcgaggacagcgcgtgcccgcgaggagccgccgcgcgcccgcgccctccgcgcgacgccaggtgtttccccccgggccggcctgccgtg

SEQ ID NO: 259029 - DNA, 100 bp, Homo sapiens
ggtagccgaggggcagtaaaagcatctactgggggacatcctgttgtgaaggagggtttgcatttgtgtatgaagctcaagatgtggggagtggcagaga

SEQ ID NO: 259030 - DNA, 100 bp, Homo sapiens
ggtgtggacaccgcctgcaggcgaggagaaggggtggcggagagggtacctggaatgcatgaactgcacccggctcagtgacatgagtgagcgactgacc

SEQ ID NO: 259031 - DNA, 99 bp, Homo sapiens
aatctctggaagaaactaaaccagaaagtgacttcagtgatgattttagtgatgattttgtagaaactcggcgaaggcggtcaaggagaaatcagaaaa

SEQ ID NO: 259032 - DNA, 75 bp, Homo sapiens
cttgtacagagatgtgatgttggagaactatagcaatctggttttcttgggtgactctgacatcattagaagcat

SEQ ID NO: 259033 - DNA, 74 bp, Homo sapiens
cccgcggccggccagccgaagatggtggcggctactcctcctgcttttcctccgcaaccatgtctgacaaaccc

SEQ ID NO: 259034 - DNA, 50 bp, Homo sapiens
ccagagggcccttgtgtccaagctcacctccgcctccaggaagaccagac

SEQ ID NO: 259035 - DNA, 87 bp, Homo sapiens
gaagttgggaatgcccttctaaatgttgtcctaaaaagtaacatatcagcagacgacatgctgtataccgagacagatttggaagaa

SEQ ID NO: 259036 - DNA, 80 bp, Homo sapiens
agggttatgcatctgaatagatatcttatatagctgtaatttgagagagtgcagattctctcgggcctagccgtccttgg

SEQ ID NO: 259037 - DNA, 50 bp, Homo sapiens
aaggggtccttctactcctaatttgcagttaacatgtttcgaacattacc

SEQ ID NO: 259038 - DNA, 117 bp, Homo sapiens
ctttgacgccctggtgaagatgggggagctggccagcgagagccagggctccaaagaactcgcaccttttctgctgccatgacaaccatgcaaggaatggaacaggccatgccaggg

SEQ ID NO: 259039 - DNA, 83 bp, Homo sapiens
aaagctgttgtctcagggagcacagaagcagaggaccctgcggccttccgcagtgtttgtgtccctgggtacttgagattagg

SEQ ID NO: 259040 - DNA, 82 bp, Homo sapiens
catgccgagccttccttgtaacagcgcgaatccccaccaagttcattcggctcctaaagaagtagcagtgtccaaggaacaa

SEQ ID NO: 259041 - DNA, 83 bp, Homo sapiens
tgcgaacggagctcggagtttgaggacttctggaggcccccgtcaccctccgcgtctccagacatgcaagaaagcacttcagc

SEQ ID NO: 259042 - DNA, 120 bp, Homo sapiens
ccccgtctgagaagtgaggagcccctccgcccggcagctgccccgtctgagaacgaggtgctcagtcccctctgatctttctctatgtggttgacacatgcctggaggaagatgaccttc

SEQ ID NO: 259043 - DNA, 82 bp, Homo sapiens
cggcagggggcggaacaaggagccttggagcggggcaaagctggacacctgttctgctgttgtgtcctgccattctcctgaa

SEQ ID NO: 259044 - DNA, 110 bp, Homo sapiens
tcatgctggccaagaagatcatcattaaggacggaggcacgggaagaggaagaacgtctgagaaataaaattcgagctgatcatgagaaggccttggaagaagcaaaaga

SEQ ID NO: 259045 - DNA, 100 bp, Homo sapiens
acttcaatttttctgcagtggctctgggtccagccccttacttaaagagtgtgaacatggctacgcctcttcattcccgtccatgccgagcccccgactg

SEQ ID NO: 259046 - DNA, 98 bp, Homo sapiens
tcacggtgaccttcgcttggtgtcctcctggcctcagcaacctgacaattctgtcgtgtcccggggccaaaccagtgctcctgccacctctctggctg

SEQ ID NO: 259047 - DNA, 75 bp, Homo sapiens
gcgcggcagagtccccgtacgcctacagtaacgggccaattcctgtccccccagcagcatggcatcgtgtgctga

SEQ ID NO: 259048 - DNA, 100 bp, Homo sapiens
cctgtgtcccacttgttcgcggcctataggaataaataccttacgtacactttagatgatcaggaaatctggcacctggaaaagaactgcatgtcccagg

SEQ ID NO: 259049 - DNA, 100 bp, Homo sapiens
cctaaagtctgcgaggaggaagtcgcctctgtgctcgtgagtccagggatctaaggctcttgtcaggatggtgaagctgttcatcggaaacctgccccgg

SEQ ID NO: 259050 - DNA, 74 bp, Homo sapiens
ggcggccgccgcagcccaggcgcgggggcgacgacagcttttgtgtggtcctctgagccccagtgagagtttcc

SEQ ID NO: 259051 - DNA, 75 bp, Homo sapiens
cagccctgcacgaccagctgaaccgcctcaagggccatgctggataaggagctggctgcctctgtgaacatccta

SEQ ID NO: 259052 - DNA, 50 bp, Homo sapiens
gacagaattacttttgatgctttcccagaatgaattaccagatggattaa

SEQ ID NO: 259053 - DNA, 82 bp, Homo sapiens
atggatagcgacgacgagatggtggaggaggcggtggaaggtgttggagagcacaatggctgaacaagtccttcctcaggct

SEQ ID NO: 259054 - DNA, 100 bp, Homo sapiens
aaccgaagaagaggcccggactcatacagagattgaaatgttccttagaaaggagcagcagggacttcactgtgactttgcttgcctgatgttccaatac

SEQ ID NO: 259055 - DNA, 75 bp, Homo sapiens
caggggctggagcgaatcccagaccagctcggctacctggtactgagtgaaggaatccctgaggactccaaggta

SEQ ID NO: 259056 - DNA, 100 bp, Homo sapiens
gatgtctactgttttgaagcgttcgatcttttaacatcacatcacatgctgacagcacaagaagaatggaagagcaatctatttgctcctacttggaaaa

SEQ ID NO: 259057 - DNA, 90 bp, Homo sapiens
ggcagggctccctctggatgtggaattctccgtccctttccagggagggaacaaagcccacagcaccgaatgatgccaatgggtggaatg

SEQ ID NO: 259058 - DNA, 75 bp, Homo sapiens
acaatccgtctggatcacggatgtaggaagtgtgaatgatttgggaggggacttcaaaggagttggtaaaggctc

SEQ ID NO: 259059 - DNA, 96 bp, Homo sapiens
tgtgaacctgctcatgtccccacaagatggctcccgcaaagaagggtggcgagaagaaaaagggccgttctgccatcaacgaagtggtaacccgag

SEQ ID NO: 259060 - DNA, 75 bp, Homo sapiens
ctgtcgtcgtggtggccaacaagcaggtgctggagaatctggtaaaagcaccattgtgaagcagatgaggatcct

SEQ ID NO: 259061 - DNA, 122 bp, Homo sapiens
taagaacccgccgcacccggtcctcagcgactcttctgacctccgcgcgacgtacccgccgccgccgttggctggagcaattctgtggtgttcttggtcacacatttatggagtttctgaag

SEQ ID NO: 259062 - DNA, 85 bp, Homo sapiens
ggaaacaaaattcgatttgcaaatcattcagtgaatcccaactgttatgccaaagatttgcttgctgaaaatggtcgattaagca

SEQ ID NO: 259063 - DNA, 145 bp, Homo sapiens
cgctggagcacaaaagagtctccgcggtggaggtctgcgttgctcttgcttttcctcgctggggtgtacgatccagacatttaatgtggatgcaccatgccagaccgtggaagatttaacgaatggggttgtgatggcccaggtt

SEQ ID NO: 259064 - DNA, 100 bp, Homo sapiens
tgagcttgagcacctgaccaaaaagatgctgtatgacatggaaaatccacctgctgacgaatactttgatctggaaagcatgaagactgggctttttttc

SEQ ID NO: 259065 - DNA, 82 bp, Homo sapiens
cgaggagccgccgcgcgcccgcgccctccgcgcgacgccagatgatatcatcaagttgaatcgaaaggaagggaagaagcag

SEQ ID NO: 259066 - DNA, 83 bp, Homo sapiens
cgatggcaaagccgttgccaaggaactgtggctgcaccatctgtcttcatcttcccgccatctgatgagcagttgaaatctgg

SEQ ID NO: 259067 - DNA, 100 bp, Homo sapiens
cataatgaactcagacctattgcaaggaaaggacactcccctaacatatttgggacagcaatcagacctattgctttgagagctgtgacctccattgctc

SEQ ID NO: 259068 - DNA, 99 bp, Homo sapiens
gtgaggcctccccagccacgtggaactttcccgagagatcccatgatccagagacaaaggtggcagctttggagcaagtggagagccagaaaaggatcc

SEQ ID NO: 259069 - DNA, 74 bp, Homo sapiens
tttgtggatcgctgtgatcgtcacttgggccatccagagtagagatgtggcccagttcagaaatgttgtcacac

SEQ ID NO: 259070 - DNA, 100 bp, Homo sapiens
ctagttccacgattaagtgttggtgctgttagtagcaaacctactactcctactatagatggatacacaactgatgacattgagttttactggcgtggcg

SEQ ID NO: 259071 - DNA, 97 bp, Homo sapiens
ttcggggactggacatggagacagatcgcgagcggctgcggaccatttataaccgcgacttcaagatcaggttctgcttggattctgctagacagac

SEQ ID NO: 259072 - DNA, 82 bp, Homo sapiens
gggaaccctggtcaccgtctcctcagttcgtgccctcgtgaggctggcatgcaggatggcaggacagcccggccacatgccc

SEQ ID NO: 259073 - DNA, 75 bp, Homo sapiens
tctgaactcttcctggaggtgcagaagagggcacagtttggaagaactgaagtaattgataatactttaaatcct

SEQ ID NO: 259074 - DNA, 75 bp, Homo sapiens
cgggcctagcccagagacatggagagttgctacaacccagctgcccggcagctctgacagactcagaggacgagt

SEQ ID NO: 259075 - DNA, 100 bp, Homo sapiens
ggttcatcttggagataaagaacaatctaactgggcaaaagaagtacaaggaatttcagaacagccaacccatggccagcacagacatgatggaataaag

SEQ ID NO: 259076 - DNA, 96 bp, Homo sapiens
gccggcagccgacggcaaaggtgtcgtggtggtcattaagcggagatccgattggaaccaaccagatggctgtgtgtgccaaagcacagaacaaac

SEQ ID NO: 259077 - DNA, 76 bp, Homo sapiens
gccacgcaccgcctgctgctgctggcttgctgagcgagagcgagaagcggcccttcgtggaggaggcagagcgcct

SEQ ID NO: 259078 - DNA, 100 bp, Homo sapiens
tgacatcatgcaccttcgtcccatgggtgacctgggccagcttctgtttctgcctcggagtgaatcagaactcattgatgaactttcagaagattttgac

SEQ ID NO: 259079 - DNA, 50 bp, Homo sapiens
gccgcgggcgcgaccggaggcagggaatgaaggatggcagcatgccgtgc

SEQ ID NO: 259080 - DNA, 101 bp, Homo sapiens
agtgaagaacgggataaagaagaacttgaggtgaatcagttcagacagctgtattccaaagtcatcaatgataagcatgatgatgtcatggccaagtttgg

SEQ ID NO: 259081 - DNA, 100 bp, Homo sapiens
agctcaaaaaggaaaatcctttcttgaggcaagagacaaaaaacttggactttcgccgaaagtgggacaaagatgaatatgagaaactcgccgagaagag

SEQ ID NO: 259082 - DNA, 100 bp, Homo sapiens
tgtgtgcattcataagaattcggaatgtctgaaagagcagcagaaacgctactttccagaactggttagtactgcagaaaaaccacgacttaaagaaggc

SEQ ID NO: 259083 - DNA, 97 bp, Homo sapiens
gccagagccaggtgaactggaggagcgatttgccatcgtgctggtactattttgaagcgctggaagaagaactggtttgatctgtggtcggatggtc

SEQ ID NO: 259084 - DNA, 100 bp, Homo sapiens
aagctcttagaagaggatgtcaaacgttggaaagcacgtaaccagggctccatcttccacagaaatttctctgaaactccatattgctcaaccagaaaac

SEQ ID NO: 259085 - DNA, 75 bp, Homo sapiens
caaccttgtgggatgtgaaaactctgttactgaagtgcctccatatgctcgaatgcttaggaatcccctgggttc

SEQ ID NO: 259086 - DNA, 100 bp, Homo sapiens
ggtgagtgccgtgtggggccactgtgaagtcaccatgcgctacatcaacggccttgaccctacaaaagaccccacagctgtagagagagcaaacttgtta

SEQ ID NO: 259087 - DNA, 100 bp, Homo sapiens
tgatattaagccatcaaatgtggaacctatggaaaagattgacgagatgcctgaggctgccgtgaaatcaacagccaacaaataccaagtcttttttttc

SEQ ID NO: 259088 - DNA, 100 bp, Homo sapiens
ccacattctgcgtcaggacattctctctgcacaaggccagcgagaccgaggagaatggctccgacagcttcatgcattccatggacccacagctggaacg

SEQ ID NO: 259089 - DNA, 98 bp, Homo sapiens
ctgggctacaagacgctggccgcgggctccatcagcatggctgagggccagacgggcccagccagcaccaagatgagtgccacgtcctggttcctggt

SEQ ID NO: 259090 - DNA, 99 bp, Homo sapiens
ttgacgaagatcttatctgccctatttgcagtggagtcttggaggagccagtacagaaagaaatttcagagcttccaagaccacaaacttaaaataagt

SEQ ID NO: 259091 - DNA, 83 bp, Homo sapiens
gaaaaggagtgaaaattgaatttgatgaagatgatggtccaatcacagagtttcaagaagtttttaaccgaagtgtcatgatt

SEQ ID NO: 259092 - DNA, 100 bp, Homo sapiens
cgtgagctccggcccgggcgagcgggtgcgtctgccgcagagtcggcacctgaaggacatggagagtcattcttatagaagagcatcagaggaagataaa

SEQ ID NO: 259093 - DNA, 50 bp, Homo sapiens
acaccgcatattctcactcatagattctgctagcctatcaaaaatccagg

SEQ ID NO: 259094 - DNA, 100 bp, Homo sapiens
atgcctatgagtacttcaccaagattgccaccaggaactccaggatggcattgggcagcggcaaactgttgtcagaacattgaatgcaactggggaagaa

SEQ ID NO: 259095 - DNA, 97 bp, Homo sapiens
agaagtttatcaaggctgtcacacatcaagttaaatttggtcaacaaaatccacgtcagatgcggttcatgctattattcagccggcagggaaaact

SEQ ID NO: 259096 - DNA, 101 bp, Homo sapiens
tatgcaggccccaatggcagccagtttggattttcactggacttccacaaggacagccatgggagtgatgtaaattggagtcaaccaggtgaaaagaagtt

SEQ ID NO: 259097 - DNA, 90 bp, Homo sapiens
cagtatgaagaccacagaatagaacaagctgactggcctgaaatcaaatcaatggtcgtaacccacaaaatccttcggaaggccagagga

SEQ ID NO: 259098 - DNA, 76 bp, Homo sapiens
cacagctgtacatccatgccatcttctccagccaccccagccagtggaaccaagcgttcctagaatcccatgggcc

SEQ ID NO: 259099 - DNA, 100 bp, Homo sapiens
tccccatctgcaaactccggaccctggagacgctgtttggaatatgcttcctgaaacttggagagtggcagctgaatctacagggcatcaatgagagcac

SEQ ID NO: 259100 - DNA, 111 bp, Homo sapiens
ccaccagctcccagtgacaaaagcgttaagattgaggaacgggaaggcatcactgtctattccatactgttgatcccacacaagagtgtttcatcccacaggctaaactaa

SEQ ID NO: 259101 - DNA, 83 bp, Homo sapiens
cggcacacgggtgagaagcccttcgcctgcacctggccaggctgcggctggagggggatatgagactttctactcggaatatc

SEQ ID NO: 259102 - DNA, 50 bp, Homo sapiens
accccaagcttcaagaactgatgaagtctctagtgatccctgaaaagttc

SEQ ID NO: 259103 - DNA, 76 bp, Homo sapiens
aatgacgtacagaagaaaacctttaccaaatggataaatgctcgattttcaaagatcggacagctggcttttaaag

SEQ ID NO: 259104 - DNA, 100 bp, Homo sapiens
gagatcatccagcccaccgtagtggatcccgtcagcttcatgttctggaaggtggcatttacaccctacgccccggagcccgggagcacatgccggctca

SEQ ID NO: 259105 - DNA, 96 bp, Homo sapiens
gttgcctccgccgccaagagtgagcgagcggacccgcgatggtggatcctctatccttcagagactctggaacccctgtggtcttctcttcatcta

SEQ ID NO: 259106 - DNA, 88 bp, Homo sapiens
cgtgggtcagcaagagggccccgctgaccaggtggctgcagttccgatgaagttaaattccgtcaagatttaatgaatattgcgggca

SEQ ID NO: 259107 - DNA, 80 bp, Homo sapiens
cctccttcttcctgctcatcctcaaacgcaactctgccttcatccaggaagctgcagacctgcctgcatggttccatcca

SEQ ID NO: 259108 - DNA, 88 bp, Homo sapiens
gtcacccgctatcctgccaactctatcgtggtcgtaggaggctgtcctgtctgcagaagtcactaaatctcagcccgaaaagtgggat

SEQ ID NO: 259109 - DNA, 82 bp, Homo sapiens
ctgctttccactcggctcctgtcgtccgttctctcaggctcccgttcaggaccatggccaacctggagcgcaccttcatcgc

SEQ ID NO: 259110 - DNA, 90 bp, Homo sapiens
ctgctgttgtccaacagaacgacctagtatttgaatttgctagtaacgtcatggaggatgaacgacagcgggtattcccctacatctcag

SEQ ID NO: 259111 - DNA, 100 bp, Homo sapiens
tggcattgcaacaccgtttcacattgccacaatcaagccccttccaaatgacaaaaccttactctacaatccatttcctcccacgaatgaatcagatgtc

SEQ ID NO: 259112 - DNA, 105 bp, Homo sapiens
gggccatgaccgtggagcagaacgtgctgcagcagagcgcggcgcagaagaacactgatatttgcatttaatggggaacaaaagatgaagaaggaaaaggaatat

SEQ ID NO: 259113 - DNA, 92 bp, Homo sapiens
ctcggtgcaggcagcggccgccgccgccgagacagctgcgcgggcgagcatccccacgcagagaaaagctgcctttacactcctccgaagaa

SEQ ID NO: 259114 - DNA, 75 bp, Homo sapiens
gagcgctgttctcgctccggagccgctgcacatttcggtgattcggtctgggcaaaaattaaggaaaaagtctgc

SEQ ID NO: 259115 - DNA, 49 bp, Homo sapiens
gaaccaatcagcagccgcgttaggccacggcatatgcctccaaggacgg

SEQ ID NO: 259116 - DNA, 98 bp, Homo sapiens
cagataatcccaggagctaaacatggaaatattcaagtgggatgtgtagactgttcaatgcaacaaggcaagcagagtcacctgatatgaaaaaggag

SEQ ID NO: 259117 - DNA, 100 bp, Homo sapiens
gtctctctgccgtgaatcattcctgcagatgaaaaagtgtgacttggcagctggacctgaaggagaagaaggagaaggtggaggagaaggcaagccggaa

SEQ ID NO: 259118 - DNA, 100 bp, Homo sapiens
cccatcctcctgcatgttctctggaagaggggatggagcgccagctggtggccctcctggaggagctgtcggctgagcactacctgcccatctttgcgca

SEQ ID NO: 259119 - DNA, 113 bp, Homo sapiens
ccgagccgcccgcagagcaagcgcggggaaccaaggagacgctcctggcactgcagacaatgcagatcttcgtgaagactctgactggtaagaccatcaccctcgaggttgag

SEQ ID NO: 259120 - DNA, 89 bp, Homo sapiens
gcaccagggactggcagctccactgccgtcaactcctgttctcctcagagcctggaggagcagagcgagatcatggagtactcggtgct

SEQ ID NO: 259121 - DNA, 82 bp, Homo sapiens
ctcgccgccgcggggcccgccgccgctcaccgcagccccctcctggcgacccgcaacaaattgtggctactaatttgccccc

SEQ ID NO: 259122 - DNA, 75 bp, Homo sapiens
cttctcgtagtcctgggagcacagcagaagtgttaattatagaaaatgccaagtaggaaatttgccgatggtgaa

SEQ ID NO: 259123 - DNA, 75 bp, Homo sapiens
tggttattgaggaacatggcgttgctggtgcgagtcctttgcacacacccagaagctatgtccttcggcagtaaa

SEQ ID NO: 259124 - DNA, 75 bp, Homo sapiens
gattcagccagcacactcctcgcgagcaagtcacattaactttgctctagaagacaactttacaaggatctaaaa

SEQ ID NO: 259125 - DNA, 135 bp, Homo sapiens
agaggaggccgtccagcagatggcggatgccctgcagtacctgcagaaggtctctggagacatcttcagcagagtttattaaccacttaacctctcagaactgaacaaagacaacattgttcctggaacgccctc

SEQ ID NO: 259126 - DNA, 75 bp, Homo sapiens
ccggtggcttcgtggtcgcgctggatcaggagtgaagctgcagaccttcgcggtcgtgtacaacgtgggactctg

SEQ ID NO: 259127 - DNA, 101 bp, Homo sapiens
tcagatcttcacagcacagttcctgggaaggtggagccaccagcctctccctggtcgacatttataactcagaccccctgatctgccgggcagggctgaag

SEQ ID NO: 259128 - DNA, 98 bp, Homo sapiens
agaccgaaaagaagatgatacaaatgaatttgttagtgctgtgtgctggagggcactaccagatgggattctgctcctaagtgtaggagagaacttgg

SEQ ID NO: 259129 - DNA, 100 bp, Homo sapiens
catctgccatgggatgacgcctcagggtaatacctgcctggagaatggatctttcttactgaactttacaggctgtgcagtgtgcagtaagcgggatttt

SEQ ID NO: 259130 - DNA, 80 bp, Homo sapiens
gccttcactcctctgtggctctggaagagcccgatttcctcaggaggttctgcggggagtgtctccagccctgcctgcag

SEQ ID NO: 259131 - DNA, 100 bp, Homo sapiens
caggttgactaaaacatgggcgattgcaaaggtcgactgcaaggaagtactagacatcatttgtaatctggaatctgaggggcaggataacacagcattt

SEQ ID NO: 259132 - DNA, 78 bp, Homo sapiens
ctaaaacccaagtgattttgcagttacagcctgtgcaacaaggctacatgaatgtgtaagatcttggaggaagacagc

SEQ ID NO: 259133 - DNA, 83 bp, Homo sapiens
cttctgttctacagacctctctcctcttcctgctcatggatatgatgcttcctggtgtgtttagtggttggtgccattccaat

SEQ ID NO: 259134 - DNA, 114 bp, Homo sapiens
cgaggagatcgaatctctgatgaaagacggcgacaagaacaacgacggccgcattgacttcgacgagatcccggtgccctagctgtgctgatttgtctggagcttctttggtaa

SEQ ID NO: 259135 - DNA, 98 bp, Homo sapiens
cacgtgctcttgctaaagaggtagcaagaaagaaaattagagtgaatgtagttgcaccaggagcttcagtttcagcgactcacccgagaactggaagt

SEQ ID NO: 259136 - DNA, 111 bp, Homo sapiens
cagttggaagcagccgatccagcctgcggagcctgtggggcagcaatgtctcaggctgtgcagacaaacggaactcaaccattaagcaaaacatgggaactcagtttatat

SEQ ID NO: 259137 - DNA, 100 bp, Homo sapiens
cggcggcagcggcggcggcgcccgcgggtggtataaaatggcggatttcgaagagttgagggcacacatatctgtaagcactcagcccaatgaagtgggc

SEQ ID NO: 259138 - DNA, 100 bp, Homo sapiens
gagcaaagctacttccattccagaaagatggcatcatttttgccctcaaaagaaatggcagtgctgggcctaaaggagataacatttatgaatggagatc

SEQ ID NO: 259139 - DNA, 101 bp, Homo sapiens
tcagcatcctgcacctagttatcaaaccattgtgaagtcttgcatttcagatcccccagaccagatgacctatcttccttccagctctgagtcacttccca

SEQ ID NO: 259140 - DNA, 80 bp, Homo sapiens
aattatgccctgttggttccaatgctgggattggctgcttttcctctggcaggctgccctgagcacgctcaaccccaacc

SEQ ID NO: 259141 - DNA, 96 bp, Homo sapiens
cttcactcccgctgtctcagcagtctacagcacgagggaagtgtaacatctcccatttttctgacatatttgctgctagagagtttaaagcccgag

SEQ ID NO: 259142 - DNA, 74 bp, Homo sapiens
gagcacagagaaagagaatgatgaagagaaaggcccggagactgctccaccgaggacaccgcgtccagcttgtg

SEQ ID NO: 259143 - DNA, 75 bp, Homo sapiens
ggcaagtacctgcggctgcctcagctggtggacatggctgctcagattgcccgtgaggcagaggctgccatctac

SEQ ID NO: 259144 - DNA, 100 bp, Homo sapiens
gagtggaacatggctagcaggaatgcttactgttgcgtggttcgttattaacagtatcaccttttgccatgatagcatttctttcattggacagttcctt

SEQ ID NO: 259145 - DNA, 100 bp, Homo sapiens
gactccccgtggaacagagttgttgttcagcagaaataatcaagagttgacatcataccagttctttaaggaaaaacagtagtgctctgcatagtttact

SEQ ID NO: 259146 - DNA, 89 bp, Homo sapiens
gctactcaagaaagagtgcccaattccaaatgtacaggagatcaaagacgctggccttcagacctgatcagactcccaggggcagccac

SEQ ID NO: 259147 - DNA, 82 bp, Homo sapiens
ctcgctggagatcgagtaccaaaatgacagaagccacattcgatactctgcgactctggttaataatcctgctgtgtgcttt

SEQ ID NO: 259148 - DNA, 75 bp, Homo sapiens
tgacctttgccccgggctgtggggagccccggagcctgggcccggagaagcgctagagacggagtttcaccgtgt

SEQ ID NO: 259149 - DNA, 101 bp, Homo sapiens
cgaggacggggaggacgcgccgcggccaggcagggaggagaccggcacccagacaggtggcgaaggcagaggaatcagttggccttatttcctcagtggaa

SEQ ID NO: 259150 - DNA, 100 bp, Homo sapiens
ccgaccgcgttcctatggacagacgcacagacacctgcagatctaaagcatgtattccttatttgaaaaagagcaaagttgctcatatcctcaatatcag

SEQ ID NO: 259151 - DNA, 75 bp, Homo sapiens
cagagttctttgtggatggacttgattctgatgagaggtgctggagaatctggtaaaagcaccattgtgaagcag

SEQ ID NO: 259152 - DNA, 82 bp, Homo sapiens
gaaatctactgccttaacccagcacaggggaaaacccatagaactctcaggaggtttggtgcacctcgatttggaggaagta

SEQ ID NO: 259153 - DNA, 96 bp, Homo sapiens
attcagatggagaatatatggctggacagctagctgcttatggctataaaattacagccagaataaaagctacttggccgtaaggctaaaagacca

SEQ ID NO: 259154 - DNA, 101 bp, Homo sapiens
gctcacagatacacccccaaagagcaactgaagattcatacgcagctggcagatattatcatagttgctgcagggcaggagcgatttggcaacatgacccg

SEQ ID NO: 259155 - DNA, 85 bp, Homo sapiens
cctgccctggcttgtgggcagcctgggcgtgctgctgctcgacaccatctaatagctcttcaagtctgcaataaaaaatggcctc

SEQ ID NO: 259156 - DNA, 80 bp, Homo sapiens
cttctctgtcagctctttccccgtcagcatcccagccgtgctcacgacaggccgacggtcgcaaggtcctacggtcaagc

SEQ ID NO: 259157 - DNA, 98 bp, Homo sapiens
tgcggctccaccccttccacgtcatccgcatcaacaagatgttgtcctgtgctggggctgacagaacatggctctctatgctgacgtcggtggaaaac

SEQ ID NO: 259158 - DNA, 101 bp, Homo sapiens
ggcagatcgagtgggccatgtgggccaacgaacaggcgctggcgtccggcctgacaggaacgaatgcaggaatttgggaactgagctgtgcaagtgctgaa

SEQ ID NO: 259159 - DNA, 99 bp, Homo sapiens
attcgcttaggtcttgctctcaatttttccgtattctactacgaaattcttaattcccctgaccgtgcctgcagtgaggtgctggcggaggagtccata

SEQ ID NO: 259160 - DNA, 80 bp, Homo sapiens
gagattgacagtcacaattttgtaataaggctgtgtggttccggtgctggtgccgtggaagtggcaatggcagaagccct

SEQ ID NO: 259161 - DNA, 50 bp, Homo sapiens
tcggagccggcacggctcggcgtgaaaaatgtactctgacctgaatcctg

SEQ ID NO: 259162 - DNA, 149 bp, Homo sapiens
agaattccgtcttgctcagatgtgtggacttcatattgttgtacatgcagatgaattagaagaacttatcaactactatcaggcagagacccgtgctgagtttgctgagagatcggtagccaagctggaaaagacaattgatgacctgg

SEQ ID NO: 259163 - DNA, 75 bp, Homo sapiens
ggacctgcctgggtcgccttatgccctgaaacctgctcctccaaagccagagcccaagcctaaaaaggcccctgc

SEQ ID NO: 259164 - DNA, 152 bp, Homo sapiens
tggagctacagctgcgggagagccgggtaccggccgtggaagcggccaccgactactgtcagcagctgtgccaggacaaggctttgcttttcgaagaaaactgaaaatacagcaaagttacaagaaattgctacggaaggaaaagaaggctc

SEQ ID NO: 259165 - DNA, 100 bp, Homo sapiens
accaccttttgagacttcttgcctaaaagagacctacctccggatcaagaagaatgaatacagtattcccaagctgaaactgatgtaaatgtggtcatgc

SEQ ID NO: 259166 - DNA, 98 bp, Homo sapiens
tcgggccgggctgcgtgagggaggaggatatgttgatgatgtgatcagccgcattgacaggatgtttcctgaaatgtccatccacttatccagaccca

SEQ ID NO: 259167 - DNA, 50 bp, Homo sapiens
tgaacttcaaaaaattggggagtgtttggagaagagggattgaccctgaa

SEQ ID NO: 259168 - DNA, 82 bp, Homo sapiens
tcccctcccactgtggctcccgcatctgcctccctgccccagcccatcctctctaaccaagttcctgttcccgacatccgga

SEQ ID NO: 259169 - DNA, 101 bp, Homo sapiens
cgccgccgccattgccgctctctcggaatgtatacaaagactatcgcttccttgagctggcatgtgattcccaggaggatgtcgacagctggaaggcatct

SEQ ID NO: 259170 - DNA, 97 bp, Homo sapiens
gaggccctggatagtgatggccaacaccccagatgcaagcgtggattggggtctccaccagctcctggccgggttcgaggacaagtcagcctatgcg

SEQ ID NO: 259171 - DNA, 100 bp, Homo sapiens
gcccgttggccgcgcggcgccgcgctcggcggccgccattgcagtggaaggaagctgaaggaaaagagttccgtttgagatcagcaaagaaagcttctgc

SEQ ID NO: 259172 - DNA, 113 bp, Homo sapiens
ggctgttttagtgctttttatttttccccaattcagcagagaatattttcaagggggttacagaatgtctgaaggggacagtgtgggagaatccgtccatgggaaaccttcgg

SEQ ID NO: 259173 - DNA, 100 bp, Homo sapiens
acaggagataggccatggttcagatggaggcagaagaagctgctgctaaagcatcatcagaagtgaacctggcaaacttacctcccagctatcacaatga

SEQ ID NO: 259174 - DNA, 100 bp, Homo sapiens
aacaacttgacttttgacgtcatccaccaagggcaagatcttctgcagtatgtcaatgaggtccaggcctctggtgcagctcagtggaagatgatgacaa

SEQ ID NO: 259175 - DNA, 101 bp, Homo sapiens
gtcgccgccatggcccgctggatcccgaccaagaggcagaagtacggggttggcgtcgggtttggagttcaagtcggtagccgacagcgttctgtttttac

SEQ ID NO: 259176 - DNA, 133 bp, Homo sapiens
cgtctccagccaaattcaaaaaggataaggagatcatagcagagtacgatactcaggtcaaagggaagaggaagaacgtctgagaaataaaattcgagctgatcatgagaaggccttggaagaagcaaaagaa

SEQ ID NO: 259177 - DNA, 75 bp, Homo sapiens
caggactttaagtggttgaaatacatcgtctacaaggagagagtggtaagaatgattgatgttggctgatattgg

SEQ ID NO: 259178 - DNA, 101 bp, Homo sapiens
gaggaaatcagttatgggaatatgatgctgaggtatggcaggattttatgtttgcctgtgccctttatccaactgatcagggcttcctggattcagtgaca

SEQ ID NO: 259179 - DNA, 90 bp, Homo sapiens
gcgaagctggccgagcaggctgagcgatacgacggtcccagctagtccacagggaccagcagtgccatggaaggatttaacatgtctcag

SEQ ID NO: 259180 - DNA, 75 bp, Homo sapiens
agagagggcggcgctggaacagttgcagggtcacagaaacatcgccatggcaatgacaggctcaacaccttgctc

SEQ ID NO: 259181 - DNA, 80 bp, Homo sapiens
attgaaggaacttggagttaatggtctaatttatgatagctagacagataagtttacagcagcagcttattcatgtgatg

SEQ ID NO: 259182 - DNA, 100 bp, Homo sapiens
gccgcccgtcgtacctgatggtaggaggcagtagttccccgcttcccttccgcgggagggagagttaggttcctggagagccactggtttgtgtgggtca

SEQ ID NO: 259183 - DNA, 51 bp, Homo sapiens
gtcactttagccactgctactacaggactgtgaggaatgtatccagctgga

SEQ ID NO: 259184 - DNA, 96 bp, Homo sapiens
aaaatatggagctctcattcaaggtgagccaatggtggcagcagaagtaggcgtatgggataactattgtgtaaagaaacagcttcttcactcctg

SEQ ID NO: 259185 - DNA, 97 bp, Homo sapiens
ttcacgtgacatcaagaggaagcggaaaccagtggccacagcatctttgtctagccccagtgcagtgaacagcagagaatttcaaaggaccttgcta

SEQ ID NO: 259186 - DNA, 83 bp, Homo sapiens
gtgggatttggatgtgggatccggttccttggtgtcatccagccttagcaaaccagaggattcctacaggaagcaagtagtaa

SEQ ID NO: 259187 - DNA, 83 bp, Homo sapiens
agcttcgcagtctggaaagctttaggagttcacagtatgcatccaagaagtcagattcaaatccgctgactgaaatacttaag

SEQ ID NO: 259188 - DNA, 82 bp, Homo sapiens
atagcttgaacagggctgacaacatttttccttttccgctattgacctgaaaagtggttctggaaaagtgtaccaaggccct

SEQ ID NO: 259189 - DNA, 75 bp, Homo sapiens
gcccccagcagtcactgggtcaccagagtttgagagagtatttcgggcacagatttgcagatttacagaatggct

SEQ ID NO: 259190 - DNA, 90 bp, Homo sapiens
cgactacaaggagatcgaggtggaagagatggagaacatcattgcaacagtaagagattccaacctcaagctgacccttgctttcgggat

SEQ ID NO: 259191 - DNA, 75 bp, Homo sapiens
atcagatcaaccaccaaagtgggaaacattgaaatcaagcctgactggctcatggagaaagcctacctaagaatg

SEQ ID NO: 259192 - DNA, 96 bp, Homo sapiens
ttcccttttttactccattcaagagcagcattcataaatttccaggttgcccatgaggaaattggaaacattctggcttttcttgttcctttcgta

SEQ ID NO: 259193 - DNA, 75 bp, Homo sapiens
aatgcagaggaagaatttttctatgaggttcactggttgaggacccagttcccatctttggatatagaggtcgat

SEQ ID NO: 259194 - DNA, 100 bp, Homo sapiens
tgccctgaaaaagtatcgtcgagaagcctatcatcggtacggaaaaaggaccagatcaatattgaaacaaagaataaaactgttcgttttataggagaac

SEQ ID NO: 259195 - DNA, 100 bp, Homo sapiens
caggatatgacaggggtaacacccttccagatgatttttgagcctccatttgatggtgaagatgaagacgagctatttcagtctatcatggagcacaacg

SEQ ID NO: 259196 - DNA, 99 bp, Homo sapiens
atagtggtgcccaatgacggaaactgtcatctgaaaaacaacgtctatgtcaaatcgacaaccatgcttcaagtggaaataaagagattatttcgcata

SEQ ID NO: 259197 - DNA, 83 bp, Homo sapiens
gttggaagcagccgatccagcctgcggagcctgtggggcagggtttacagagtccacggggaatgggatgcaagccagaagct

SEQ ID NO: 259198 - DNA, 101 bp, Homo sapiens
agcgacggtagcagcagcatggccgcgatctatgggggtgtagagggccctggcaggtgcccggcccgccccccaccctccggctcccagggcctgctgga

SEQ ID NO: 259199 - DNA, 100 bp, Homo sapiens
tgcttgcgaaccagttcagcagtgcctcagggtccaaattccaagcctgtagtgtccttcattgctggtttaactgctcctcctgggagaagaatgggtc

SEQ ID NO: 259200 - DNA, 82 bp, Homo sapiens
tccaacgcacacttaaggctccagcaaatttgtggggacattcatggacaattctttgatttgatgaagctctttgaagtcg

SEQ ID NO: 259201 - DNA, 100 bp, Homo sapiens
ataaagggaaggacaaggaattacataacatcaaacgtgggtcttcagaactactagcagataatttggggggacttcatattcagaagtctatataaag

SEQ ID NO: 259202 - DNA, 75 bp, Homo sapiens
aaagagtgcccagaatacactgtgcggcagctcaccatccagttggagaatattggcaactttattaaagctatt

SEQ ID NO: 259203 - DNA, 75 bp, Homo sapiens
cgcgaattggagaaaaagttcagtgggaagcatgtcgtctttatcgctcagttccgccatggagtcatagttgca

SEQ ID NO: 259204 - DNA, 78 bp, Homo sapiens
gtcagtgtgcttgcttggagatcaggacgcaaagtgtaccacatgaaggaagatggttgggtgaaagtagaaagtaca

SEQ ID NO: 259205 - DNA, 82 bp, Homo sapiens
ttgcctcagatactattttgaaggggatgttcgtctaaccccagaagactttgctagagctcagaagtactgcaaatatgct

SEQ ID NO: 259206 - DNA, 83 bp, Homo sapiens
gcgagcagaggcttaaggtcttcagcggggcgctccaggaggcactcacagtaatccagtccctcatagcactggtgaatgac

SEQ ID NO: 259207 - DNA, 83 bp, Homo sapiens
gtatgagccacacatccccgaccacttgcggcctgagtatgatgaaggatttgggggcagagcacttggcaggtcatgaaggg

SEQ ID NO: 259208 - DNA, 100 bp, Homo sapiens
gcaaactatgtataggaattccaaagacagatttgaccagttttgggccatcaatcggaaactcatggaatatcctgcagaagaaaatggatttcgttat

SEQ ID NO: 259209 - DNA, 100 bp, Homo sapiens
gagaagctgaaggacatgaaagtgctgtacaccaaccgagcccagagtatgtattcccgtgtgccagagtgccaggtcaccacatactattatgttgggt

SEQ ID NO: 259210 - DNA, 100 bp, Homo sapiens
aaaatatggaaagcttgaagtcgccaatctcctgctacagaaaagtgcatctccagatgctgctgggaagacatctttccaggaacagcgtgaggaggac

SEQ ID NO: 259211 - DNA, 74 bp, Homo sapiens
tggagctctacgcctcctacgtttacctgtccatgcttccatgatgacgcccccaaggactacaggcaagtctc

SEQ ID NO: 259212 - DNA, 102 bp, Homo sapiens
gaagaaactcaagctggacatcgacaagagcttttctgaacgcctgaaagtagtagatgtgataggcaccaaagtatacaacgatggagaacaaatcattgc

SEQ ID NO: 259213 - DNA, 75 bp, Homo sapiens
agatggcagccagtcagtggtggagagagagtctacaaggagattgaacaggtggttggcccacatcgccctcca

SEQ ID NO: 259214 - DNA, 73 bp, Homo sapiens
tgacatcgagaaggtccttccagcctggcagatttgctgtgatggcctgttgctgggccttagatccagagga

SEQ ID NO: 259215 - DNA, 109 bp, Homo sapiens
ggaacgaaagtgaacaggagccgctcttaggcgacacacctggaagcaggctgcctgctgtttcccggggagatcatgaaacgaggtcgccttcccagcagcagtgagg

SEQ ID NO: 259216 - DNA, 80 bp, Homo sapiens
gtctacatcattatggaactggtttcagtttggtgccctggttgtcagatgttggaaagcagtaggacggaacatactct

SEQ ID NO: 259217 - DNA, 75 bp, Homo sapiens
gggagtcctggcggtttttattaaggctgttcatgtgaaaggcacaattcagattcagaagcgtcaacagttagt

SEQ ID NO: 259218 - DNA, 101 bp, Homo sapiens
aagaaaagaaagagaaaaagcagaaagtagatgaagatgagattcagaagatgcaagatgggatttcaccatgctactcaggcttgtcttgaactcctggg

SEQ ID NO: 259219 - DNA, 98 bp, Homo sapiens
gtaaagaacgatcgtccagtggaggaccaaactcttacccaggatctactggagcagctgttggagcccatgacgcctgtcgggatgcaaaagagaag

SEQ ID NO: 259220 - DNA, 74 bp, Homo sapiens
tcctttgctgtcgcactctgccacctcgcagagctacacgcggagcagattactcttgtctctgctgctcctgg

SEQ ID NO: 259221 - DNA, 75 bp, Homo sapiens
gacacttacaaggtggacaggcatgattattgggccaccaagggtcaccatccttgtcagcctggccctagcttt

SEQ ID NO: 259222 - DNA, 98 bp, Homo sapiens
gagagtcttaaaatcctgctctggccggattccagactcgtgggggaaaggctgaactgataaatttcaaacggaagagagtggcagcatttagaaag

SEQ ID NO: 259223 - DNA, 100 bp, Homo sapiens
cagccagatcaacacaattgataggcaagtgtccagagaatggctgggatgaaagtacacttgaactctttttacatgaacttgcaatcatggacagcaa

SEQ ID NO: 259224 - DNA, 51 bp, Homo sapiens
cgacgaggagcagggcctgactgcgcagatggactcaccctgtcacccagg

SEQ ID NO: 259225 - DNA, 89 bp, Homo sapiens
aaggacccgggactagtggaccagctggtgaaggcagacagcgagtggcgacgatacagctgatactgattctggaactctatagtccc

SEQ ID NO: 259226 - DNA, 82 bp, Homo sapiens
cagacgctgcagatggaattccttcggaacaaccggaccacagacatattactgatgccacacttgccattgtgaaaggaga

SEQ ID NO: 259227 - DNA, 82 bp, Homo sapiens
ccccgagtacctgcagcccctgccttccacgccggtcagccccatcgagacaatgcagatcttcgtgaagactctgactggt

SEQ ID NO: 259228 - DNA, 90 bp, Homo sapiens
cgccgcgctccaaccgcctcctcctcctcagtaacgcggaggaaggaacagagccacagagaaaaatgacttgctcacaacagaagagcc

SEQ ID NO: 259229 - DNA, 75 bp, Homo sapiens
gagtcgggctctggaggaaaagaaagctcttttagtgtagcatggcagaaagaacaatggctatgcccacacaaa

SEQ ID NO: 259230 - DNA, 87 bp, Homo sapiens
ccaactgaacgtaggggggaccaggaagccttgtgtgttgccaaagtgcaggtggaaatgggagcccaggtgttggatgtcaacatg

SEQ ID NO: 259231 - DNA, 75 bp, Homo sapiens
gcgctcggcctggctaccgtatcccaacccaaacccccacttccaggagcggcttctgctctccctgctgccggc

SEQ ID NO: 259232 - DNA, 74 bp, Homo sapiens
cgccttgcagcactgctggaccagtttccagacatcagtcaagagtctgattctccatttgttttcatctgcaa

SEQ ID NO: 259233 - DNA, 100 bp, Homo sapiens
acagatccctgagctgagcccacactctgccaagcagctggccactgacatcggtactattttgaagcgctggaagaagaactggtttgatctgtggtcg

SEQ ID NO: 259234 - DNA, 75 bp, Homo sapiens
gagtggacatcttcagctgtggaatagtccccttcccctgagcccatctacaatagcgaggggaagcggcttaac

SEQ ID NO: 259235 - DNA, 51 bp, Homo sapiens
gccttcgagcagctgcagaggtcccgggagtgcatccgccccaaccctttt

SEQ ID NO: 259236 - DNA, 74 bp, Homo sapiens
gatggcaagaatcagctggggcagaagcgcgtggtcaagccttcaaagaaaaacctcggtatccaccaagtcag

SEQ ID NO: 259237 - DNA, 87 bp, Homo sapiens
ttggttccccctccctcagcttccgccccaaaaggaggtggtgagaaagcccgagcacttcacatatcaagaggaaaactattgccc

SEQ ID NO: 259238 - DNA, 83 bp, Homo sapiens
ctttcggccagctctccaatctgaagcattgcagtgtcgagatggctatgaaccctgtgtaaatgaaggaatgtgtgttacct

SEQ ID NO: 259239 - DNA, 89 bp, Homo sapiens
gggctccttcaagcccagcgagcatggtcgggtcggcagcggttctggtcggaacctgtgggtcagcgggctgtcctccacaacacgcg

SEQ ID NO: 259240 - DNA, 51 bp, Homo sapiens
ccaccacagaagatgaggacctcaaaggtttccaccgtgcacattatgaag

SEQ ID NO: 259241 - DNA, 98 bp, Homo sapiens
tgcattaaaggttttagaaatactacataggtaccatgcgggatactatgaagtatgtctatggacaccatggaattcgaaaaggactctatcgtggt

SEQ ID NO: 259242 - DNA, 80 bp, Homo sapiens
ctgaaggaagctcggacttctcctggggatatggtagcaaattatggagttggaggacagtatgaaccccattttgactt

SEQ ID NO: 259243 - DNA, 111 bp, Homo sapiens
agacccagaagctccaattttccaagtggcagattatggaatagttgcagatttatttaaggtattgttgcagcatctggcagtgagactgaggatgaggacagcatggac

SEQ ID NO: 259244 - DNA, 74 bp, Homo sapiens
ggattcccgtgagcacaggccccgtactgcttccatcagctcctgcccctcctaaagctgaagccaaagcgaag

SEQ ID NO: 259245 - DNA, 87 bp, Homo sapiens
cgcccagttgctggggctggagaagagtaaggggaccctggactttggtgctgacgcagtccaacagatgcgctcggcctcccggga

SEQ ID NO: 259246 - DNA, 75 bp, Homo sapiens
agatggccagtcacgagaacccaggttgcttgtctggagatggagccactacaggcgggcctgggcgcctggagt

SEQ ID NO: 259247 - DNA, 117 bp, Homo sapiens
aggcaatagaattggatcccaataatgcagtttactattgcaacagggttcaggataagtttgaggtgctgaattacacaagcattcctatctttctcccggaagtcaccattggag

SEQ ID NO: 259248 - DNA, 75 bp, Homo sapiens
tcctgaccaccgtgaacggacagtcccccccaggacacagaatttccaggtgttgtggtgcgaccaattggtgaa

SEQ ID NO: 259249 - DNA, 98 bp, Homo sapiens
gggtcttgggtcctccgagagcagcagcggtattgggagagttgctgctacatctttaggaaatttgactaaccatggttctgaagatttaccccttc

SEQ ID NO: 259250 - DNA, 98 bp, Homo sapiens
tgccgataatgtccaatactgtggctactgtaaataccattttagtaagctggatgtacagttacccagcacgtgtacctcctcctcctcctattgct

SEQ ID NO: 259251 - DNA, 50 bp, Homo sapiens
acagacgggaaaaatagtagcaccagaaccctctggatattgatgcctcg

SEQ ID NO: 259252 - DNA, 100 bp, Homo sapiens
gggtcatctcttctattgtacctgcagtattgactcggagacaaaaagaggccaagaccaagagtgacagtgggacagctgcccagacttctctagacat

SEQ ID NO: 259253 - DNA, 100 bp, Homo sapiens
atctggggtgcctgatgccatcatcctgtgtgtgcgccagatctgcgctgttatcctggagagcaacgatgcctcagggaacacttggaactggttgtac

SEQ ID NO: 259254 - DNA, 75 bp, Homo sapiens
gatctggaccattattttgcatttccagatggagtttcactcttgtctcccaggctggagtacaatggcatgatc

SEQ ID NO: 259255 - DNA, 135 bp, Homo sapiens
accacctgcaagcatggcaaagactggcaaaagcacaaggattctcgctgtgacagagacaacaccgagtatgagaacaatcatttggggaagaatctacagttgctgatggacagagtggatgaaatgagccaa

SEQ ID NO: 259256 - DNA, 100 bp, Homo sapiens
cttcacccctggcttctaagcccacagagtttgaggaagaggcaaagaaccctggcctggaaacacacaggaagagaaagagatcaggcaacagtgattc

SEQ ID NO: 259257 - DNA, 90 bp, Homo sapiens
gaagattataactttgtcttcaaggcatttggaaacagagccctgggctccagctggcttggtggggagaagagaagccccctgcagaag

SEQ ID NO: 259258 - DNA, 75 bp, Homo sapiens
ctgaaggagcaccagggcatcttcaccttcctctgcgaggtacaggtttgcagattccgccagcagcacagcaag

SEQ ID NO: 259259 - DNA, 100 bp, Homo sapiens
ggaaactgacggagacgcagatgtggacttgaaagaagctgcagcggaggaaggcgagtgccgtgttcacatggaccaacttgcttgtggtggttgtgga

SEQ ID NO: 259260 - DNA, 102 bp, Homo sapiens
tgttgctgctgtactccttctccgcaaaatgatgcttcaacacccaggccaggtctctgcctcggaagtgagtgcttctgccatcgtcccctgcctgtcccc

SEQ ID NO: 259261 - DNA, 81 bp, Homo sapiens
tccctctgcccccccttccccacgcaaccccagatccatttacactttacaaacccagcgggtgccgcttctccacccgag

SEQ ID NO: 259262 - DNA, 95 bp, Homo sapiens
ggtctacctgctcttcgcctcgcgcctgcccggagcgctcatgcacacgctgccagccatagcaccaagactgatgccagtagcactcaccatag

SEQ ID NO: 259263 - DNA, 90 bp, Homo sapiens
gatcgaaacccttactacggaggagagagtgcatctataacaccattggaagatgtttttatgtgatagtcaaaaggagctggatgagtt

SEQ ID NO: 259264 - DNA, 75 bp, Homo sapiens
acttcgtcatgttcttcgcgccctggctggtccagggaccctcatcatggccacaggagtccaggactttaaccg

SEQ ID NO: 259265 - DNA, 100 bp, Homo sapiens
aggaacaagagagaaagagtggatttcagcctgcacggatggtcttgaaacacaaatggtttttggtccacaaaaggtggctccgattcctccctttctg

SEQ ID NO: 259266 - DNA, 100 bp, Homo sapiens
agccacgtgtaccagtgtgtgttgatcttggcttgattcagtctgccttgtaacagggaattccaaatgaaagctggagaataacaaagataaatgaacg

SEQ ID NO: 259267 - DNA, 87 bp, Homo sapiens
caaccatcgatgtcaagtatccacacacctggcctgaatggatccctctgcctttcagaggttcaattcccatgaaagtgcagcaca

SEQ ID NO: 259268 - DNA, 102 bp, Homo sapiens
ctcgccgcttttctacatcgcggtggtctttacctgcttcatcgtgaccaccggcctggtattgggatgatgttgcaaattcatcccacctcctgctgcagc

SEQ ID NO: 259269 - DNA, 100 bp, Homo sapiens
gccggtgctggctgggagttctggtctcaggcaaggtggggactgggcacatcatcaatacgaaatacaggtatcaggatgaagatacacctcctcaaga

SEQ ID NO: 259270 - DNA, 138 bp, Homo sapiens
tcccgactctgcttaaaaccacgtggttcgatggctgccgcggctacgctgaggctctccgctcagccgggggccattgagactgccatggaagacttgaaaggtcacgtagctgagacttctggagagaccattcaa

SEQ ID NO: 259271 - DNA, 74 bp, Homo sapiens
attgctatcaatgcgaatgatcctgaagcctcaaagtttcatgctctaagcgaaagacatgaggcctcagcctg

SEQ ID NO: 259272 - DNA, 73 bp, Homo sapiens
cgaccggtggctgtggcgacatgtcgacctgacgctctacacggtccagtgcgaggcattgacttccataagc

SEQ ID NO: 259273 - DNA, 51 bp, Homo sapiens
tatcccaggaatacagctttgcattaggatcataaaaggattcctctgtac

SEQ ID NO: 259274 - DNA, 74 bp, Homo sapiens
cgatctgaactttctggggaacagaccagttgtggtcactcctggaagcaaggcggctctagctaatttatgta

SEQ ID NO: 259275 - DNA, 78 bp, Homo sapiens
tggagtcagcagaactgaaatagagatgtaacctagaagtcaagcggtaaaacaagctttgcaactatgtggatggac

SEQ ID NO: 259276 - DNA, 100 bp, Homo sapiens
ctaggagtactggccgagatggctaagaagtccatgccaggaggtcgtctgcagtcaggagcttctggaagaggtgaagaaggaattgcagaaagtgaaa

SEQ ID NO: 259277 - DNA, 100 bp, Homo sapiens
actgggggctgaagagcgcgccgccctctcgtcccactttccaggtaagtaaggaggtctctgtaccatggctcgtacaaagcagactgcccgcaaatcg

SEQ ID NO: 259278 - DNA, 100 bp, Homo sapiens
aggagctggagctctacaaggacggaggcgttgcgattattgaccagtggatctgcgcacacgccaggcctcaggcccaggcccaaggccaagtgagaga

SEQ ID NO: 259279 - DNA, 97 bp, Homo sapiens
cccccagcctgcgtgctgcccagagcccccatagagagaggtacggacattgctgcaggagaagaggttgccatcaagcttgaatgtgtcaaaacca

SEQ ID NO: 259280 - DNA, 98 bp, Homo sapiens
cacagccagcatggccgtcccactgctggagttcctgtccaacacctggatttcattagcatcatgacctacgattttcatggagcctggcgtgggac

SEQ ID NO: 259281 - DNA, 75 bp, Homo sapiens
aagcagatccagcagctccaagactgtgattgggttattcaacagcgtaattcagattcatctcctcctgataat

SEQ ID NO: 259282 - DNA, 99 bp, Homo sapiens
taaccagagccatccttcgggagaggatatgtagcgaggaggaacgcgctaaggcaaagcacctgcagtagaagactcagaaagtggtgtttacatgcg

SEQ ID NO: 259283 - DNA, 100 bp, Homo sapiens
ggccgcgccatgtggctgctggggccgctgtgcctgctgctgagcagcgccgcgggcagttgcagtggtgcagaatggctgacctcagtcttgcagatgc

SEQ ID NO: 259284 - DNA, 100 bp, Homo sapiens
ttggagttggaatttgtgcaatgtttagccaacccaaattaccttaattccaggtgattggtgaaaacactaaacaaccctgagcccagggccaacccct

SEQ ID NO: 259285 - DNA, 50 bp, Homo sapiens
gaaaaacctgtatgtggaaccacctgtgcttttgaagatgatgatatcac

SEQ ID NO: 259286 - DNA, 83 bp, Homo sapiens
gtccccggcacacgcgcagccccggcctctcggcctctgccggagaaacaggagaagaaggaagttgtggaagaggcagaaaa

SEQ ID NO: 259287 - DNA, 100 bp, Homo sapiens
gaatggctaagttttggacatcgatttcaactaaacagctttgctgagccatcaaggtctaatggaagcatggttcggcattcttcatctccatatgtag

SEQ ID NO: 259288 - DNA, 100 bp, Homo sapiens
aaatatacaagacccagatgagcccattttagaatttagcttaggaattcctcctgatcagcagagactgatctttgctggcaagcagctggaagatgga

SEQ ID NO: 259289 - DNA, 90 bp, Homo sapiens
gggatctttccggatcaatccagatggcagccagtcagtggtggaggatgatgatgctgaagctatccttgctgcagacttcgaaattgg

SEQ ID NO: 259290 - DNA, 100 bp, Homo sapiens
catgaaacagtttgacctgaactatggaactttgtctcctcagcactctgctgtcactcaaggaagtatcatcaagaacaaggagggcatggatgctaag

SEQ ID NO: 259291 - DNA, 75 bp, Homo sapiens
agcaccgctttgggctacccgtgctggagaatctggtaaaagcaccattgtgaagcagatgaggatcctgcatgt

SEQ ID NO: 259292 - DNA, 100 bp, Homo sapiens
cggagccgtgggacgagggcggcggctgcccaacatacatggatgttgtcattgtcttggatggctccaacagcatctacccctggtctgaagttcagac

SEQ ID NO: 259293 - DNA, 100 bp, Homo sapiens
aatatggaatgttcttaacccagaagtagctgaatgtgttactccattgctgaggagtggaggatcagctgatttattcggaggatttgctgactttggc

SEQ ID NO: 259294 - DNA, 51 bp, Homo sapiens
tcattgctctttggcgactcttattgccccctggccactgttctaggtgct

SEQ ID NO: 259295 - DNA, 74 bp, Homo sapiens
cggctgcagcccgaccagtccaagagccggcggcatgacgagttgctccttgagggcaggacagttcttatggc

SEQ ID NO: 259296 - DNA, 100 bp, Homo sapiens
taccagaatgatgctgaaatctccagtttgtatgatgcaatggtggcagcccagattccctatactgcccttgaagtatgcagagcatttttacaggaag

SEQ ID NO: 259297 - DNA, 51 bp, Homo sapiens
gggcgtaggaccctctgagccaggttgcttctagaactgctggagttactg

SEQ ID NO: 259298 - DNA, 100 bp, Homo sapiens
attctcctcgcgctgcaaggatgctcctgggatttcggagaggccgcaggagtcatttcggagggtgacaggacggttctacggagaggatgggctgccc

SEQ ID NO: 259299 - DNA, 100 bp, Homo sapiens
gcccccgcgcgcccggccggcccggagcaccgagctcgcggcacggtaggagggatgcccgctgtctgtagccccggcatggtgcccgtggccctgcccc

SEQ ID NO: 259300 - DNA, 100 bp, Homo sapiens
agacgtgggcgccctccccgccaaggcccgtgcgagtactatactggcaattgctggagaagattttgcaattgttgcttctgatactcgattgagtgaa

SEQ ID NO: 259301 - DNA, 90 bp, Homo sapiens
cagccctaaaaccaatggcctatccaaggacatgagcagtttacacatctcacccaattcaggtcacattcaccgacatcggactcacgg

SEQ ID NO: 259302 - DNA, 74 bp, Homo sapiens
aggattccaagtaactcttatttggtacctggagtacaagagggtccctaacagcagaccacctgaatatgagt

SEQ ID NO: 259303 - DNA, 100 bp, Homo sapiens
aagcctggttcagttaaacctactcaaactattggtgaagttgtggtatgataaagtgggacaccagctgattgtaaatgttctgcaagcaacagatcta

SEQ ID NO: 259304 - DNA, 97 bp, Homo sapiens
ctgattttagatgaggctacgtctgccctggattcagaaagcaagtcagctgttcaagctgcactggagaaggtgatttgaagatattaaagctaga

SEQ ID NO: 259305 - DNA, 100 bp, Homo sapiens
cgagctgctgatacagaagagatggatattgaaatggacagtggagatgaagcctaagaatatgatcagggaaatctaagttaatttcaaggcattcgaa

SEQ ID NO: 259306 - DNA, 87 bp, Homo sapiens
acgctaaacgtgccctactctgccccgggggagaggagtgtggccatctggggccgtgtggtatttgccactcaggagacatgtccc

SEQ ID NO: 259307 - DNA, 149 bp, Homo sapiens
tctgttcgaactgagccgagtaattaccttggaaccagatcgtccagaggtatttgagcagcgagcagaagctttcttagaaatggcttctgaggaagctgccgttactatggtgaattattacactcctattactcctcaccttcgaa

SEQ ID NO: 259308 - DNA, 50 bp, Homo sapiens
gcctgctggaggagctggtggcggaagctctctggaccttcctgtggttt

SEQ ID NO: 259309 - DNA, 75 bp, Homo sapiens
atactttggttacctatgtacctgttaccactttcaaaaaagtgatgagagcctatttacaacagctaaggcaag

SEQ ID NO: 259310 - DNA, 97 bp, Homo sapiens
gctgctgtttggaaaggtggcaaaggatagcagcagggtgattctgggggtccacttgtctgtaatggtgtgcttcaaggtatcacatcatggggcc

SEQ ID NO: 259311 - DNA, 97 bp, Homo sapiens
aaggccaatgtggccaaggctggcttggtggatgactttgagaagaaggcagaatattactgaagaatgatcctgttcaacctcctagtgcctctac

SEQ ID NO: 259312 - DNA, 100 bp, Homo sapiens
cagaactcagagcagctgctgcggaccctgcaagggaccgtgagccaggcccaggagcgggtgcagctgcagatgggcttctatttcgaccgcgatgatg

SEQ ID NO: 259313 - DNA, 75 bp, Homo sapiens
cagttattgaatatcaagaggaggagttgttgacaactgacatatatccacaagaagtgccatagtgaacctgat

SEQ ID NO: 259314 - DNA, 83 bp, Homo sapiens
ggtttatcaaaatcacgttataatcagattttgaccaagcattttgtaaggaactgtggctgcaccatctgtcttcatcttcc

SEQ ID NO: 259315 - DNA, 101 bp, Homo sapiens
cattcagatgtggtggaatatgccaaggaaaaactggagagcttcatcaaaaatagtgatagctttgataaatacacctgtaagatcggaatggagtgaac

SEQ ID NO: 259316 - DNA, 100 bp, Homo sapiens
gtttggcctgccccagtgacagtgggacgggctgccctattgtgttcagtgtggacccctccgagggcagccctggttccccagcagggctgggggcctt

SEQ ID NO: 259317 - DNA, 90 bp, Homo sapiens
cctgcagaacggctgcctaatttacagcaaccatgagttgatcatggccttgccaggttggtgacagtatattgtgagcatggtcataaa

SEQ ID NO: 259318 - DNA, 75 bp, Homo sapiens
aatgcatcatgtcaggcagcttatgatgccaatttgtcccatggtgaggctccaggttgggctctatgctgtgta

SEQ ID NO: 259319 - DNA, 78 bp, Homo sapiens
aactcggcagaggagaaattcagacggctcccgaggacacatcaccttcactttgggatatggaatttgataagcagt

SEQ ID NO: 259320 - DNA, 75 bp, Homo sapiens
cgcgccgccaccgtctgaactaggatgtcccgacatgaagcctgcaagataaacagtctgtggaggagaccagtg

SEQ ID NO: 259321 - DNA, 100 bp, Homo sapiens
ttggcctcccaaggtgctggaattacaggttgaaaaagatcatctagcaaagccttttttcccagctacatataaggaatttgaaagtcacataaaatgg

SEQ ID NO: 259322 - DNA, 75 bp, Homo sapiens
aactgaaaaagaacgtgttgaaacaaggaattgccccatagccttcacaggtggatacattgcaaatagcctagc

SEQ ID NO: 259323 - DNA, 113 bp, Homo sapiens
ctgaacgtcaccgaggagaagtaccaggaggcgttggccaaggatccataatgagatggcatcaacatcagataaaggtgcccaaggaagaaatgacaagaaagattctcaag

SEQ ID NO: 259324 - DNA, 95 bp, Homo sapiens
gagtttgtacggaaagaagatatgacctatgcagttcgaaaactggataacactaagtttagatctcatgagggaacagtgttgataaagactgc

SEQ ID NO: 259325 - DNA, 75 bp, Homo sapiens
ctaccagtttttgtctccagagacccaggtcccctcctaaccgcaagcgtcctgctaacgagaaggcaactgatg

SEQ ID NO: 259326 - DNA, 78 bp, Homo sapiens
gcccgaatgccagcgcctcttctaccggggcaagcaggcaagccggtatattcggggcccaggagcaaggaaaagtgg

SEQ ID NO: 259327 - DNA, 83 bp, Homo sapiens
catccacactggacgcgagctgcgctgcaagggatattccaatgcctttagttagctcaggagtagagcatggtaacctgaga

SEQ ID NO: 259328 - DNA, 80 bp, Homo sapiens
atttctcaatagattgtcttctcctccaaggtctacatgattacctgaagtttaataagatattagaaatggctactccc

SEQ ID NO: 259329 - DNA, 102 bp, Homo sapiens
ctgcgcgaagctggccaaagcctgcccagacggctcacctgtgcgggatggaacaaaagaatgattgtcacataatgtgtagagaaaatggaagaatcaaag

SEQ ID NO: 259330 - DNA, 75 bp, Homo sapiens
tgccaatcaagatgagtatggctctacaagtttcacgctgtttaagtcatgaacctacaaaagcctgtgaaaaaa

SEQ ID NO: 259331 - DNA, 100 bp, Homo sapiens
gcggtagcaacctcgccccttgcaacaaaggcagactgagcgccagagaggacgtttccaactcaaagcatccagggcattgtggatgcctaccgccaag

SEQ ID NO: 259332 - DNA, 80 bp, Homo sapiens
cgacctgggcaccagcaggacccgaggccaggagccaggggcccagaaggggttcggtccgagcccggtgggaggctccc

SEQ ID NO: 259333 - DNA, 50 bp, Homo sapiens
ggggaactctactcttcctacgtgctggggagtcagggaagagcaccatc

SEQ ID NO: 259334 - DNA, 90 bp, Homo sapiens
cgagcagcgccagcggccgagcgggcggcttcctggcctgggcgctccggtggcggcggagcgtccgtctccaagagagtatgaagagag

SEQ ID NO: 259335 - DNA, 51 bp, Homo sapiens
cttcaccatgaaatggatagatgaggaagattgagaggatccagaatccag

SEQ ID NO: 259336 - DNA, 101 bp, Homo sapiens
ctcgctccgtggccttagctgtgctcgcgctactctctctttctggcctggaggctatccagcttcgatcctttggtacagaagacagaccgacagatcgt

SEQ ID NO: 259337 - DNA, 74 bp, Homo sapiens
catcccagactctgccagtatgtggatatttctaggggaaagcatgatggagaacttaatgttctggatgatat

SEQ ID NO: 259338 - DNA, 100 bp, Homo sapiens
tactggaagctctacgctactgccatgataataacataattcacagggatgtgaaggatggaacaaaattcatctgtattggggctctgtattctgaact

SEQ ID NO: 259339 - DNA, 73 bp, Homo sapiens
aagagctgtgttccagttagctttgctaccagttatgcagctcttcacagatggaatcacaaataaacttatt

SEQ ID NO: 259340 - DNA, 100 bp, Homo sapiens
atcaagtgtgggatagtataatccagcaggcaaccaaacttttcaggctgcctttcgagctcaggggcccctggctatgctgcagcactttgatactatc

SEQ ID NO: 259341 - DNA, 111 bp, Homo sapiens
gtttacaaagcaacaggtgaagatttccttaaaattgctggtgtgttcctaaacccaaaggaaagaaaaccaaagatatgaaaaaacctgtcagagtacctgctgaaccac

SEQ ID NO: 259342 - DNA, 51 bp, Homo sapiens
gcagtagcagtggaatgggaggaagaggtatcatctttatcagaaagtgag

SEQ ID NO: 259343 - DNA, 100 bp, Homo sapiens
tgacacctacatccccctgaaccatatggacccaaatcagaaggggtttctagaggggaaggtgtggctcattgactttaatccatttggtgaagtcaca

SEQ ID NO: 259344 - DNA, 75 bp, Homo sapiens
caactcttcttggatgccattcaccctacagaaggatcagctcagctactatttaataaaacaaaatctgtagaa

SEQ ID NO: 259345 - DNA, 90 bp, Homo sapiens
aatggtacaaacgtcatcaaaattgctcctgagacagctgttaaattctgggcatatgaacaggtcctttctgaaatggtatctatgatt

SEQ ID NO: 259346 - DNA, 83 bp, Homo sapiens
atcgagcagaggctgctcatgttctccttcgtcaacgaccgggctttgttcgcgggggtcacagctctcatggctgcagctag

SEQ ID NO: 259347 - DNA, 100 bp, Homo sapiens
ggtattctcacgggatcccgaggctgaagaaatagaagctgaatatgctgcattagacaaacgagaggtaaatgagctggatggtatcccgttgatcctg

SEQ ID NO: 259348 - DNA, 50 bp, Homo sapiens
tatggaatcacaataatttcaggcttgagctggaagaatctctacttgtg

SEQ ID NO: 259349 - DNA, 50 bp, Homo sapiens
tctagcccagtggaccttctgaagcggttaagaagattgtctaccaaata

SEQ ID NO: 259350 - DNA, 100 bp, Homo sapiens
gaaggagttccaggcacgttaccggcagctgggatcacaggatggtatcctatcattttaccagaagacgggggcctacctcatggcctggagctcatgc

SEQ ID NO: 259351 - DNA, 75 bp, Homo sapiens
gcagtggtcgcttcttctccttgtcagagcaccataacatggtgtgggaagtgaagacaaatcagatgcctaatg

SEQ ID NO: 259352 - DNA, 136 bp, Homo sapiens
cagctaacgttctgcaccgtgacctcaagccttccaacctgctgctcaacaccacctgtgatctcaaggccctgagcctgtgcaattatttcgagagtcaaaatgtggatttccgaggcaagaaggtgatcgaact

SEQ ID NO: 259353 - DNA, 100 bp, Homo sapiens
caacgccaccaattccaacctggtcaactttgtagtgtgccaactctttgccttgctagcagccatttggtttcgaacttatctacattcaagcaaaact

SEQ ID NO: 259354 - DNA, 50 bp, Homo sapiens
cgaccccagagcggcgctggacagcctgcggcgagagggctacaccgtgc

SEQ ID NO: 259355 - DNA, 90 bp, Homo sapiens
gatacatccagacattatctgccagttaagattattcttaaaactctggtatctgctgtgcgtttcagtcaacaatacagcttgtgttcg

SEQ ID NO: 259356 - DNA, 90 bp, Homo sapiens
tccaagtgcgcgccctggcgggtccggaccaaggtcattcccaaaagcaagttcgtcttggtgaagttcgacacccagtacccctacggt

SEQ ID NO: 259357 - DNA, 88 bp, Homo sapiens
aaagaatctgaggtggctcacgttgaccaactctttgatgatgcatccagaaatgacatcagatgtaccatcactgggtccagccatt

SEQ ID NO: 259358 - DNA, 73 bp, Homo sapiens
ccacatcgggggcaccaccctccatgcctttgcaggaagtattacttaattcacctctacaggaggaacataa

SEQ ID NO: 259359 - DNA, 100 bp, Homo sapiens
gaggagtcggcctattgcctccattctagaggaagtgaagaagctttctgagcaggcatccgagatgtttccaaatggagtgagagaacaagaaagcctc

SEQ ID NO: 259360 - DNA, 83 bp, Homo sapiens
ctgagagaaacccactgaagacgtctgcgtgagaatagagaccaccgaggttatgaagacagtatggagtttccagaccatag

SEQ ID NO: 259361 - DNA, 82 bp, Homo sapiens
agggctgcggccgcccgaagaggagagagcgcgggcctctaggaagaacccagtgacttgattgtaaaaatttacagagcgg

SEQ ID NO: 259362 - DNA, 74 bp, Homo sapiens
cccggtgcaagaggcgcaaacaagccaatcccaggaggaaaaacgaatgaccgaagaagcatgccgaacacgga

SEQ ID NO: 259363 - DNA, 98 bp, Homo sapiens
ctccgccgtccccagccctgcctctccctgggctctggcctttgaactggccacaggtgactatttgtttgaacctcattcaggggaagagtacactc

SEQ ID NO: 259364 - DNA, 50 bp, Homo sapiens
cggaggtcgataagctggaactgatgaatcattgcgatgatgagtccaga

SEQ ID NO: 259365 - DNA, 87 bp, Homo sapiens
ccccggctccggcccccgcaggagcaggttgcacgatgggaacacaagacccgcaagctgagcagggccttcggatccccctacctg

SEQ ID NO: 259366 - DNA, 129 bp, Homo sapiens
cctgatttcctgcttctccttttcatgagtgttcctgtggtctctgcacctcctttctaataactgaagtgaagtgatggactccgatttggagagtagtaagacgtgaaaggaatacacttgtgttta

SEQ ID NO: 259367 - DNA, 100 bp, Homo sapiens
agctgccctcagctgcactgtggcaaggcttttgcttccaaatacaagctgtatagccccttcatgaataagttttttccagccagctttccaaatcgac

SEQ ID NO: 259368 - DNA, 75 bp, Homo sapiens
cctatctcttctgctggctgggctcaatgccgcggtatgacttctctttggaaaagaaaaccattgagtgggctg

SEQ ID NO: 259369 - DNA, 75 bp, Homo sapiens
gcgaaaggagctggtgcctgtgcaagttgttgaggtgactcggtaataatatttccaccccctccaccaccttac

SEQ ID NO: 259370 - DNA, 102 bp, Homo sapiens
gttttctctgccatgttgctattgcaggacggagagatgcgctctgtgctgcggaaggcgggctccccgcgcaaggcccgccgcgcgcgcctcaaccctctg

SEQ ID NO: 259371 - DNA, 100 bp, Homo sapiens
tcttgcattcttggcacatctaggaagaacgtgcaaggatgcgaattgtgaatcgcttctccaaacagctcgcttctcatatgtgcggatgaaatatctt

SEQ ID NO: 259372 - DNA, 100 bp, Homo sapiens
gtacacatcggtttcccttccagccattggaacaggcagaagtcaattcatctggaaagactatctctgagtcagacttaaaccactctttttcactaac

SEQ ID NO: 259373 - DNA, 82 bp, Homo sapiens
gcaccccgtggggtggtgcacacagaacaacaaggtgttgatgccgccggacgggatgatccaccaacacattctcagccag

SEQ ID NO: 259374 - DNA, 100 bp, Homo sapiens
tccgaaccgccggcgcccggccatggcggtctccaggttttgggcggaaagacgtagttgaatatttgcttcagaatggtgcaaatgtccaagcacgtga

SEQ ID NO: 259375 - DNA, 90 bp, Homo sapiens
cgagaacccctgctgccccgagacggtgtgcgtcgtttcctgctgtgactaagtcagcaacacagttcctctgacatgggccttggctgt

SEQ ID NO: 259376 - DNA, 50 bp, Homo sapiens
gacgttggggcggcctggctccctcagtttggaaattttagcattcaggt

SEQ ID NO: 259377 - DNA, 100 bp, Homo sapiens
ataaactcaaccccttctcttccaaaaggtgctggagaatctggtaaaagcaccattgtgaagcagatgaggatcctgcatgttaatgggtttaatggag

SEQ ID NO: 259378 - DNA, 100 bp, Homo sapiens
tgcccagaaattggtcgtctgagagctttacgtcatcttcgattagctaataaccaactgcaattcctacctccaggtggttttggaatgtatgcttaaa

SEQ ID NO: 259379 - DNA, 100 bp, Homo sapiens
tgtcgctggagcacaaaagagtctccgcggtggaggtctgcgttgctcttgcttttcctcgctggggtgtacggtacagaggtgcagttccatggtacac

SEQ ID NO: 259380 - DNA, 100 bp, Homo sapiens
gacacccagaaggacgttcaacctccaaagcagcaaccaatgatatatatctgtggaggtacacaaggcttgcttgtagagatggagttacatggaggga

SEQ ID NO: 259381 - DNA, 75 bp, Homo sapiens
accaggaggccaggggtgtcgccatgtaggagagaagtttgctgaggaatgccttcaagcacaaagtgatgaatg

SEQ ID NO: 259382 - DNA, 83 bp, Homo sapiens
gaaatatttttctttaaagcctgaagaaaaggtcgtgagatggagaataaagaaactctcaaagggttgcacaagatggatga

SEQ ID NO: 259383 - DNA, 51 bp, Homo sapiens
tcggcgcgatttgaggagctgctgctgcagattgactggggcgactttggg

SEQ ID NO: 259384 - DNA, 100 bp, Homo sapiens
gaaaccagccaccctgccgcgtccgactgccagggatccctcacgccgcgaggtgtgatgaatgcagactctgctaccattttggctgtttggatcctcc

SEQ ID NO: 259385 - DNA, 106 bp, Homo sapiens
aagaacgctctcatccggaggcaggaccagctgcagctgctgtactggtgtggcatactcggacagagaagcccaagatgaagcaggaggagcagctgcagcggca

SEQ ID NO: 259386 - DNA, 80 bp, Homo sapiens
aaatgtgtgaaacagctgttgaatatgctccagattatcaaagcttttggactgaccctgatgctcccataagacagaaa

SEQ ID NO: 259387 - DNA, 82 bp, Homo sapiens
gcattgatgaaattaaagatgcatgctgatggcgataagtcattaccacaggtagacaagggcgtggtccccctggcaggga

SEQ ID NO: 259388 - DNA, 98 bp, Homo sapiens
ggggtgtgcaaacccgagagaactggactgtgccctgtccacggtgcctcctgcatgtcctgctgccctgagctgtcccgagctaggtgacagcgtac

SEQ ID NO: 259389 - DNA, 89 bp, Homo sapiens
gcgtcggctgcggttctctctcgaccccttctgcccggcgcttcggcccgggccgctcaggtgcagggctttgttcgcgggggtcacag

SEQ ID NO: 259390 - DNA, 75 bp, Homo sapiens
cgccggcgccgccgcccccgggctcgcggcctgcagaaacagatgattatgctgagattatagatgaagaagata

SEQ ID NO: 259391 - DNA, 80 bp, Homo sapiens
caaggacaacctcggcctgagacaccggaggaccggggtggcccagttgaaatccttcccttcctctaccttggaagtgc

SEQ ID NO: 259392 - DNA, 100 bp, Homo sapiens
gccgggagccatggagcgcggccctggggcccgggggcgcgggccggggtggttctgcggggagtgtctccagccctgcctgcaggtgccatccccgctg

SEQ ID NO: 259393 - DNA, 96 bp, Homo sapiens
aagaagtttctaggaaaggccggacaccagcgcccgggggctggagaaggccaggcagcagctgcaggaggagctccggcaggtcagcggccagct

SEQ ID NO: 259394 - DNA, 82 bp, Homo sapiens
cattgctatttttgcacttcagttcacatactatttatgggtacttcgtactggatttcgaggctggcatcctgcagtattt

SEQ ID NO: 259395 - DNA, 100 bp, Homo sapiens
tacaacgagacggtggagactctcatggctggggaagttagtgccatggttggtacatcaggaacgtctctatcaagaatacaatttcagcaaggctgag

SEQ ID NO: 259396 - DNA, 78 bp, Homo sapiens
cagacgaagcccctcaccctggagcgcaccatcaacctgaaaacaatgaagagtcgttatatggaactctatgacctt

SEQ ID NO: 259397 - DNA, 74 bp, Homo sapiens
catgcccctcaggctggaacttgccctgtctcctcgcagatgaggccaaacgtaccaagaaagtcgggatcgtc

SEQ ID NO: 259398 - DNA, 75 bp, Homo sapiens
atctgagggtgccctcaatgagcacatgaccagcttagcttctgtcctaaagtatgtgaggaactgccctctcca

SEQ ID NO: 259399 - DNA, 82 bp, Homo sapiens
ccggtggcaagtcgaccagctcctcccacacggattctgtgtagaaatccacggcgccaggaactccgagagcttcggctgc

SEQ ID NO: 259400 - DNA, 100 bp, Homo sapiens
tcactgacaggaggaatgtggacaccgtgcaccctggatgggatgggggaaggcgcacacatgcaggccacaggaatggttttagggaagactgttgccg

SEQ ID NO: 259401 - DNA, 51 bp, Homo sapiens
ccctacctggcagccagtgataaggaaactgggaagaactggtgaagtact

SEQ ID NO: 259402 - DNA, 99 bp, Homo sapiens
aggacagttgcatcatcaaagaaggagacgtggggtcactggtgtatgtcatggaaggagcatctttccttgaagaagtacattattgacattgtggtt

SEQ ID NO: 259403 - DNA, 75 bp, Homo sapiens
agttctttagtttcatctctctataaagttatccaggagccacaaagtgaggaacttaaaaggagtctagaaaat

SEQ ID NO: 259404 - DNA, 88 bp, Homo sapiens
aggacagaggacaggcatggcttccccttgggcctcctcagtaggcgcctgtttctgcgccggaccagtcgaggactctggacagtag

SEQ ID NO: 259405 - DNA, 83 bp, Homo sapiens
gaccgcgcgcagggcctgcagcgggagctggacggcgagcgcgagcggcgcgagaaagctaagtcctatcagccatggaaaca

SEQ ID NO: 259406 - DNA, 80 bp, Homo sapiens
gcatgagttagtcgcagacatggacaccaaacatttcctgccgctcggttttgggatttgagattgacgcggtgaactct

SEQ ID NO: 259407 - DNA, 75 bp, Homo sapiens
atgcccgtatttatggagttcagacactcagcacagcaggggtgactgtcgttcctacagttacgtgtgtggaat

SEQ ID NO: 259408 - DNA, 98 bp, Homo sapiens
ccatcgtccccggcgagcagggagcggagtaccagcacttcatccagcagtgcacagaactgctttctccaggggttaaaaataagaattttaaatgc

SEQ ID NO: 259409 - DNA, 100 bp, Homo sapiens
ttccacagaagatagcaaaaccatacagggctatgatgctattgtggttgaacaatggacagtcctggaagatgctcgtcagaagttccgctctgttctg

SEQ ID NO: 259410 - DNA, 75 bp, Homo sapiens
acttctgccactgctgctccgtggagatcgtcccgcgcctgccgcggagcgtgctttggacaccatgaattttga

SEQ ID NO: 259411 - DNA, 75 bp, Homo sapiens
gatgaatcatccagatcttctgataaaagtacttgggattttaaagaaaaatgacttaggtaaccctcagatgtc

SEQ ID NO: 259412 - DNA, 97 bp, Homo sapiens
gttctttatggctgtagatggtgtggctcctcgagcaaaaatgaaccagcagcgtgggaggcgttttagagctgaactagagaaacatggttataag

SEQ ID NO: 259413 - DNA, 90 bp, Homo sapiens
ctcagccttttgctggcatattgaggatcactggagttactccattaactacctccactgcttccatgatgacgcccccaaggactacag

SEQ ID NO: 259414 - DNA, 98 bp, Homo sapiens
ttgggatgcggatcgatgtcgccagcatagacatggtctccgaagtgaatatgatatttcagcagttgaatcagttgaattcacttcatcaagaaact

SEQ ID NO: 259415 - DNA, 75 bp, Homo sapiens
agaatccaagcggagagagtcagcctctggttcagactgcagtaaccaggttcatgcttgaaccagatccggaac

SEQ ID NO: 259416 - DNA, 75 bp, Homo sapiens
ctcctggttgagctcaaagttattttacattaaactacatcaagcagcatgcttgattcaagcctattggaaggg

SEQ ID NO: 259417 - DNA, 51 bp, Homo sapiens
caaaaggcttttaaagccatatacaggactctggggactggtgaacaatgc

SEQ ID NO: 259418 - DNA, 100 bp, Homo sapiens
ctgtggcctctccaaggatggctatggaggatggcaggacttggtctgccttggaggcagtcgtgcccaggagcaggccaacaagctggcggagaagcgg

SEQ ID NO: 259419 - DNA, 100 bp, Homo sapiens
cgaccccatccccatcccggtccctgcagagcgatccccgggcccagatatggacgcagcagagccggcaggtgagctcaggagataagatggaagatgc

SEQ ID NO: 259420 - DNA, 75 bp, Homo sapiens
attttttctcatggatgttcttcttcgagtatttgtagaagggtttttgccaatccagaagactgtgtagcattt

SEQ ID NO: 259421 - DNA, 82 bp, Homo sapiens
atcccagacctgtgcttctgactatcttctcttcaccagctcttcagatcaatatggtctgacggtaactgctgtaaaagac

SEQ ID NO: 259422 - DNA, 82 bp, Homo sapiens
gaaaagtgagtttattctgaagagcatccagttcaatttaccagctggatatgtgggactagtattcctgggtatggcactg

SEQ ID NO: 259423 - DNA, 50 bp, Homo sapiens
cgaacaacaacccaaccattactggttttgcgtgtgaagctgtgtggaaa

SEQ ID NO: 259424 - DNA, 98 bp, Homo sapiens
aaacgtgttcgctgcccagaagaagggaaggcgcgagtgaggaaaggaggtactgtagatctttgatggaaaacagattccacagagaatggttgatg

SEQ ID NO: 259425 - DNA, 100 bp, Homo sapiens
gatgcctggtgccccattacaacccgtggttacctacctgggcaaagtctccaccactggcatgcagtttttgtcaggctgcacagaaaagccagtcatt

SEQ ID NO: 259426 - DNA, 98 bp, Homo sapiens
cgtgaccgagaccgtgaccgagagcgtgaccgagagcgcgaatatcgtcatcgttagaagggtatcactgggatacatcagattggatgccaagcgtt

SEQ ID NO: 259427 - DNA, 83 bp, Homo sapiens
ctgagtggttgtgtggtcgcgtctcggaaaccggtagcgcttgcagcatggctctgggcgtggggaggctgagacacgggagt

SEQ ID NO: 259428 - DNA, 90 bp, Homo sapiens
ggcgaacccgcggcgcaataacggaatagctattcagtcagacagaaccacttatcacgttttgcagtatctcctgaggaagtcagaatt

SEQ ID NO: 259429 - DNA, 78 bp, Homo sapiens
atcttcctctggctctacagcgtatggatggagcagatctgtgttttgaaatcgtaaagcgagctgacgctggttttg

SEQ ID NO: 259430 - DNA, 82 bp, Homo sapiens
cgctcacctgcgctgtgatgcctgcagagctgtggcttaccagggcaagtgtccagagaatggctgggatgaaagtacactt

SEQ ID NO: 259431 - DNA, 87 bp, Homo sapiens
attcgctgtattgctgttcatccaacccagcctttcattctaactagcagtggtagcaacacaagtcggaatagaatggaacctgtc

SEQ ID NO: 259432 - DNA, 96 bp, Homo sapiens
cccagcctacctcgcttattctgcgtgccgtgcttcttggccagggcgatttctctctggattcgattttccagaatcctgttacacctgggattt

SEQ ID NO: 259433 - DNA, 99 bp, Homo sapiens
gggcacggcggccgagctgcggcagagcgtgtctgaggtggtgcgcggctccgtgctcctgggagcccagatgaaggcatccttggcatccctgccccc

SEQ ID NO: 259434 - DNA, 100 bp, Homo sapiens
gggtagtgccagctacggtccgcggctggggttccctcctccgtttctgtatccccacgaggttctgcttccttcggtgctgcggctgtgtgttttctga

SEQ ID NO: 259435 - DNA, 74 bp, Homo sapiens
attttattcaatagagttcaagcaattcagaagaaaagtggaaactttgatattctggatgaaattgaagaaca

SEQ ID NO: 259436 - DNA, 98 bp, Homo sapiens
caagtataccacacaggaacacggggaaattcaactactgaggaggttacggcacaaaaatgtcatccagctggtggatgtgttatacaacgaagaga

SEQ ID NO: 259437 - DNA, 75 bp, Homo sapiens
aggttttttattaatcaagcggtcaggataccgggtagctacagcaagctgggtagcaggcagatccaaaggata

SEQ ID NO: 259438 - DNA, 82 bp, Homo sapiens
ggcggcgcgacggctggtgcgcaggtggagccttttgccagcttgaccgaggccgtgcggagctcagttccccgactgctca

SEQ ID NO: 259439 - DNA, 100 bp, Homo sapiens
gaacctgggaccagtgtgaatttggaagggatcgtgtggcatgaaacagaagaaggttatgcaatggtctctgcaagatggtttattcttgaattggacc

SEQ ID NO: 259440 - DNA, 100 bp, Homo sapiens
tggtaacgtttttatccatggatgacttgcttgggtaaggacatgaagacagttcctgtcataccttttaaaggtactttattaccaaggttgccatcgg

SEQ ID NO: 259441 - DNA, 76 bp, Homo sapiens
actcccaggtctactggacagtggcgtgtgtcttcccaagggattgttgaagaaacttctgaagagggaaactctg

SEQ ID NO: 259442 - DNA, 100 bp, Homo sapiens
cggtgatgaagaatccccccgaaaggaccccccaggtcaaaatgcagatcttcgtgaaaacccttaccggcaagaccatcacccttgaggtggagcccag

SEQ ID NO: 259443 - DNA, 89 bp, Homo sapiens
cctccgcgctcttcttcgccagcaccgtgctctccaccacagggccgcgatgggcctcttggaacattggtgtgttcatctgcattcga

SEQ ID NO: 259444 - DNA, 99 bp, Homo sapiens
tgcagaaatcacattggaccctcctcccaactgtaggtctaaccataaaatcatcaatactgagaaattaaaaggggaacatgtcaggcctcactcttt

SEQ ID NO: 259445 - DNA, 100 bp, Homo sapiens
agcagtcatagcatctttactggaaaaaagtgaagctgagcttcagtcattgtctattcctggaacttaccaagagaagatcacccacctgggacattct

SEQ ID NO: 259446 - DNA, 75 bp, Homo sapiens
cttgccctcgcgtcttcagaaaacagcagtagtactccagaggagtgtgagggtgccagccgggccgccgatgac

SEQ ID NO: 259447 - DNA, 100 bp, Homo sapiens
ccggcactgcctggctgcgagcacatgatggcgatacgggagctcaaagtgtgccttctcggggtcccctcttgctgttggctgcacatcaggaaggctg

SEQ ID NO: 259448 - DNA, 78 bp, Homo sapiens
agaagacgctccacgaagtcctggaaaaagtcttcaagtctttcagacctgcctatatgaacccaatagcaatggcga

SEQ ID NO: 259449 - DNA, 83 bp, Homo sapiens
gaacttgtacagagatgtgatgttggagaactatagcaatctggttttcttgggtgagtttggctactgtgatttttgttgca

SEQ ID NO: 259450 - DNA, 95 bp, Homo sapiens
agaatcttcagcccagttatcaaatgaagagcaaaagcggcgccaggaaattgaacaaaaacttgaagttcaggcagaagaagagagaaagcagg

SEQ ID NO: 259451 - DNA, 111 bp, Homo sapiens
aggtgaatggcagcaaggtgggcccggacggcacaccctacgttaccgtgctcaaggtgagaagccctaccactgcaactgggacggctgcggctggaagtttgcgcgctc

SEQ ID NO: 259452 - DNA, 51 bp, Homo sapiens
gcggtggagcgcagagcgggcgagcgcgttgtcgccgtgatcctgaaggcg

SEQ ID NO: 259453 - DNA, 75 bp, Homo sapiens
cagctggacagcacaattggaatccaccctgtctgtgcagagtccctggctctacctcttctgccacaaacgtca

SEQ ID NO: 259454 - DNA, 75 bp, Homo sapiens
attttggaccagggagccctacagcgtctcttcaaaaagagatttaccgcattgtttctcagaagcaaatgtcag

SEQ ID NO: 259455 - DNA, 112 bp, Homo sapiens
atttcagcatcggggcagacaccgccctgaacactatcaccgacgattccccagctttccgttgcacaaacagtgaagtgacagtccagcccagcccctatttgagttaccg

SEQ ID NO: 259456 - DNA, 97 bp, Homo sapiens
agacacaggagtcaaattggaggtgaatgaaagccttgatgacttacaagccctcaaggggaagcattttctcctggactccttgatgccggagctg

SEQ ID NO: 259457 - DNA, 75 bp, Homo sapiens
ggaaccatgacaggcatgttgtataaatgtacagcaattgggcagatgtgtgaggcacctgtggtgacccgagag

SEQ ID NO: 259458 - DNA, 83 bp, Homo sapiens
cacctgggctgcacctcagcctgtgtggccgtctataaggtgtacatcggtgagctcccgcaggacttcctccgcatcacgcc

SEQ ID NO: 259459 - DNA, 97 bp, Homo sapiens
aggtgagaagcaaaatggtgctgtccaacacatcaccgcagatcaccttcctgaagctgacgccacaggaccatcagcacgtgcccatcgacatcca

SEQ ID NO: 259460 - DNA, 101 bp, Homo sapiens
ctcgcggcgagcggacggggtcgagtcagtgcgttcgcgcgaggttacgttatatataggattcgtgttcgccgtggtggccgaaaacgcccagttcctaa

SEQ ID NO: 259461 - DNA, 73 bp, Homo sapiens
tccaaggttgatgcatctctctcagaggttaccatagagatgaatgaaccagttcaactaacttttgcactga

SEQ ID NO: 259462 - DNA, 75 bp, Homo sapiens
acctcggggacattattgcgcgtggaacggctgcttttggaaggtgaaggttggaaaccacactgcagaaggaac

SEQ ID NO: 259463 - DNA, 100 bp, Homo sapiens
aaaagaccctcttcagacttgaacaagagttctaaagttcctgttgcttcagacaatggatgagcaatcacaaggaatgcaagggccacctgttcctcag

SEQ ID NO: 259464 - DNA, 110 bp, Homo sapiens
atgtggaagacacaaagcctgcgaaagtgctcgggaagagggagagcaaacttggctcagcccagtgctggagaatctggtaaaagcaccattgtgaagcagatgaggat

SEQ ID NO: 259465 - DNA, 83 bp, Homo sapiens
ggtctggagtgcgtgggggaccggctgttggcgggggttgtgtccactgtggtccccgactctgcccacaagctgttcatcgg

SEQ ID NO: 259466 - DNA, 99 bp, Homo sapiens
agtttggagaggacaatgacaatgcggagacatctgccagtggatctccagacactttactaccatcaggggctgattcaggagatcaatgatttgagg

SEQ ID NO: 259467 - DNA, 82 bp, Homo sapiens
gcaaggacagcgcgaggtccgcgcagcccagcgcagccatgatgcctaaatcaaaggaacttgtttcttcaagctcttctgg

SEQ ID NO: 259468 - DNA, 90 bp, Homo sapiens
gacaaagctggcaaaggagaagtaacttttgcggtttccaacctagatgaggaaagccgatggacagtccactacactgccccgtggcac

SEQ ID NO: 259469 - DNA, 75 bp, Homo sapiens
cgcgactcggcggcggcgtctttttgagaaagatcagtctaaagaaaaggagaagaaagtgaaaaaaacaattcc

SEQ ID NO: 259470 - DNA, 75 bp, Homo sapiens
cctgtgacagggctggtagcagcgcagaggaaaggcggcttttagccagattgccaaaatgctttggagttttta

SEQ ID NO: 259471 - DNA, 90 bp, Homo sapiens
aaaggggagctggtgggaggattggatattgtgaagggtcatcgagcagctcggtgggaagcagctggtcatgaaccacatgcatcatga

SEQ ID NO: 259472 - DNA, 76 bp, Homo sapiens
ccaagatcttgtcaagctgtgtcagcctaatcagttcaagaagttccctcagatgacctcatatcaccggatgcta

SEQ ID NO: 259473 - DNA, 100 bp, Homo sapiens
accctccccacactctgccgcttccttctttgggccttcaccatcttccacaaagcccaaggagacccaggctcccaccccgtggccaggtacctaggct

SEQ ID NO: 259474 - DNA, 75 bp, Homo sapiens
agacaggtggcgacggcagaggagtgctgtccctggacaccaacatcacaaaccaggtgaataagctgaaccgag

SEQ ID NO: 259475 - DNA, 75 bp, Homo sapiens
cctcgacgtcttgcctgtgtcccacttgttcgcggcctatagaggttactacataataattgtgcctttgaagaa

SEQ ID NO: 259476 - DNA, 126 bp, Homo sapiens
cggactgcagccgcgagctcctggaggcggcgggatggaggcggcggccgccctgggcgctgcctatggcacagccaagagcggtaccggcattgcggccatgtctgtcatgcggccggagcagat

SEQ ID NO: 259477 - DNA, 75 bp, Homo sapiens
tggaggggctgcggagacagagccctccggccagcggggagtgctttactgtcctgtgcgaagccatggatggga

SEQ ID NO: 259478 - DNA, 90 bp, Homo sapiens
cttttgcctcagatactattttgaaggtgtgacagatcaattgtcaataaatcaaggcagactgcactggacattgctgtattttggggt

SEQ ID NO: 259479 - DNA, 100 bp, Homo sapiens
caaagaatcagagaaacaacttctactccaggaagtggagaatcacaaaaagcagatgctcaggatgtgggctctcttgatgagaagatgaagagcttgg

SEQ ID NO: 259480 - DNA, 100 bp, Homo sapiens
gggctccttaatgtgacccagaagggcctataccgggatgtgatgctggagaactttgcactcgttagctcactgggactcagattcagactctgaggga

SEQ ID NO: 259481 - DNA, 98 bp, Homo sapiens
gcggctgcgctgttcgtgctgctgggattcgcgctgctgggcacccacggagcctccggggctgccaagtacatcgtgcaagtggatggtaagatagg

SEQ ID NO: 259482 - DNA, 98 bp, Homo sapiens
gtgcgcgtgcgcctgggggcaccgctgccgttccgaggcgggggccggccccagcccagactggaagatgagattgacttcctggcccaggagcttgc

SEQ ID NO: 259483 - DNA, 75 bp, Homo sapiens
gcggaacaacgtcggcgagcggggacattggctccctggattatcaagagtttgtagttgacattgaatccaggc

SEQ ID NO: 259484 - DNA, 74 bp, Homo sapiens
ggactgtgaagagtgaggagaccatagctgcacagccagatgaaatcagacatcactgaaggagttgatattcc

SEQ ID NO: 259485 - DNA, 100 bp, Homo sapiens
gccctacgccgtggacttccagcgcagagttgctggagaatgtaaccctaatccataaaccagtgtcgttgcaaccccgtgggctgatcaataaagggaa

SEQ ID NO: 259486 - DNA, 74 bp, Homo sapiens
atccatttcaagttgatttgctatctggtgtgagagtgttgcggagataggaacatgggagagaaacaatctgg

SEQ ID NO: 259487 - DNA, 100 bp, Homo sapiens
gaacagcaaaaggtcacaaattacattacccaatggtggaatattgtatacctggtgatcagcccatgacctaaacctccagacaaaataaaacggaaaa

SEQ ID NO: 259488 - DNA, 99 bp, Homo sapiens
cgtggcttttgtgaagcacagcacggtactggagaacacggatgtgctcggccttgttctccccatgtgggccatagccctcatttcctttggtgtcgc

SEQ ID NO: 259489 - DNA, 75 bp, Homo sapiens
cctagccttcgcagaaacgatggcggaggaagaagttcattcggctcctaaagaagtagcagtgtccaaggaaca

SEQ ID NO: 259490 - DNA, 75 bp, Homo sapiens
gaacgggggtcttcctcctccgccgttgacaggtattaataggggaccctattaccacatgtctttctccctcag

SEQ ID NO: 259491 - DNA, 75 bp, Homo sapiens
aggccaaaaatgtgcatactcacagagttagagagagggatggtggtaagaatgattgatgttggctgatattgg

SEQ ID NO: 259492 - DNA, 88 bp, Homo sapiens
cgctggactgcgagacggcccggctgcagcgagcgctggacggagaggaaagcggctttcatgagaaggacaagaagccatattgccg

SEQ ID NO: 259493 - DNA, 78 bp, Homo sapiens
aagcaggagccaacattaacaaaccggaggaggaagccaagaatctggtgagcgaagccatcgcagctggcatcttca

SEQ ID NO: 259494 - DNA, 83 bp, Homo sapiens
caacccgataccatcggacaggatttctccgcctcagcccaacggggaggtatcatgatattagctggtttgacatcaagtca

SEQ ID NO: 259495 - DNA, 75 bp, Homo sapiens
gcttactgcaagaagtatgagcagctcaaggttcgaccttgaaactacaagagtgaatctgaaagttagttcaaa

SEQ ID NO: 259496 - DNA, 50 bp, Homo sapiens
atcatggaatcccttgcatggctctcagatgcattcagtctactagcata

SEQ ID NO: 259497 - DNA, 80 bp, Homo sapiens
aagaagcaaggtgaagataactctactgcacagcatgctacaagtgaaaactgatgagaaactgaatgtgtctgatgaga

SEQ ID NO: 259498 - DNA, 75 bp, Homo sapiens
tgccatgttggcgattcattccaacaaaccagagccaacacagatctatagatttcttcgaactcggaatctcat

SEQ ID NO: 259499 - DNA, 128 bp, Homo sapiens
cggaggcggctccgctcggccggcgcggcgcagaagaaacccgcggcgaccacagccaaagcgggcgcactgtttagtacagctgttgaaatgaagataaaacaatcagcagaacaactggaagataa

SEQ ID NO: 259500 - DNA, 75 bp, Homo sapiens
tttactctgaatcccaatcctacaggagttcaaaacccacacatgacccctcgtccagtcattgtggaacccatg

SEQ ID NO: 259501 - DNA, 100 bp, Homo sapiens
gtaaacacctgggagctgagatggatcgtttacagccaggtgaggaagtggagatagctgagctcactacaggatgaatagccttggaagatagagatcg

SEQ ID NO: 259502 - DNA, 75 bp, Homo sapiens
atcctacacaactcatggcaccgtgcacgtggtcgtcaacaaccaggaggatgaaaaggcagctgctgagattta

SEQ ID NO: 259503 - DNA, 83 bp, Homo sapiens
tttccaccgaggaaaaggaatcgtatcgtatgtccgctatccagaacctccactctttcgaatagcctaacatggcagaccag

SEQ ID NO: 259504 - DNA, 82 bp, Homo sapiens
gaagagcatgatcggcatgtccaccaagtgtaaatgagcaaagatggatcaggaaggtgggggagatgggcagaaggccccg

SEQ ID NO: 259505 - DNA, 83 bp, Homo sapiens
gtgcggttctcagaggagggatgagcgcccgtagatattttgtggcgaatgtgtatatctcatgattgatatggagaaactag

SEQ ID NO: 259506 - DNA, 100 bp, Homo sapiens
ctggaagccatctgccctcactatcagcagccagtgtactaatggtcacttgatgtgcgctggctgttttatccacctactagcagatgcccggctgaag

SEQ ID NO: 259507 - DNA, 76 bp, Homo sapiens
aaagtaaggactgatgcagaaaaactgaagaatgagtccctggaacgccagatgcgtgaaatggaagagaactttg

SEQ ID NO: 259508 - DNA, 82 bp, Homo sapiens
tctgggatcccggccaccagcaattgtccgcgaggagccacccctggatctgacaggcaaggtgtaccagctggaggtgatg

SEQ ID NO: 259509 - DNA, 101 bp, Homo sapiens
ggatggcaaagacgacatccggtgcgccgaggctgctcacaaaataagactttgaccccgacgcaggcttcagtgattgccgcggatcagaagcctgagca

SEQ ID NO: 259510 - DNA, 83 bp, Homo sapiens
aaaggcatggtgatccttcgggacaagattcgcttctatgaggatgatgataattccgaagaaggcttccacactattcattc

SEQ ID NO: 259511 - DNA, 83 bp, Homo sapiens
ctggaaagaagatgctaattaaagtgaaggtactgactttaacatagatagcttacctctgcctcggaaagcccatcatgact

SEQ ID NO: 259512 - DNA, 50 bp, Homo sapiens
cgagtctccagagtcactccgttctaagaggaagtttgctaactagaagt

SEQ ID NO: 259513 - DNA, 76 bp, Homo sapiens
attagaagtggagctgacaccacagggcgaatcaaagccatccagctggagtactcagaggcccggagaacgatga

SEQ ID NO: 259514 - DNA, 136 bp, Homo sapiens
cagctgcagcgtgtagtgcgagtggggcggacgcgcgcagcccgcccgcccggcgaccagcaaggtcactcctggaagcaaggcggctctagctaatttatgtattggagatgtaatcacagccattgatggggaa

SEQ ID NO: 259515 - DNA, 74 bp, Homo sapiens
aggaaaaatagatggcatcattgacaagactgtttgtctgtgggatataaacgcaggaccaaaagaaggcaaaa

SEQ ID NO: 259516 - DNA, 100 bp, Homo sapiens
agaaatgatcttagttctggaatagtgatcccattaagatactaatgccatcactgtctcctacaatggaagaaggaaacattgtgaaatggctgaaaaa

SEQ ID NO: 259517 - DNA, 97 bp, Homo sapiens
tgtagaaacagtcccggaattacagagactggtgtcgttcagtatttctacattgaagactggcaattcgttaatgattatcgacatcctgtcagtg

SEQ ID NO: 259518 - DNA, 91 bp, Homo sapiens
aaggaaattgtcacagataaacaagatgcactggatttcaagaaggacaaaggagacgttctcttccagatggctgaagtccacaggcaga

SEQ ID NO: 259519 - DNA, 131 bp, Homo sapiens
agaaaaacttcctgaaagcttaatgcccaaactgattgatttggaagattcagcagttgaagactgggatagtttccaagctattttggatcatacctacaaaatgcatgtcaaatcagaagccagtctcc

SEQ ID NO: 259520 - DNA, 97 bp, Homo sapiens
actgacgatacacctgtggttcttgtgggaaacaagtcagacctcaaacagctaagacaggggttgagcattcatgatggtacctggaagtcagcaa

SEQ ID NO: 259521 - DNA, 75 bp, Homo sapiens
cgcggagagcacgccatgaaggcctcgggcacgcaattctgtggtgttcttggtcacacatttatggagtttctg

SEQ ID NO: 259522 - DNA, 90 bp, Homo sapiens
cctggagagcatgccccggccccctgagcaggacacattggcgtgagacctgggagtacgttgtgccaaatcattgccacttgccacatg

SEQ ID NO: 259523 - DNA, 100 bp, Homo sapiens
gttgtggcggcagcgagttgaactttaggagagctgtgttctctgcagattctaatgttttacctcaatcatatatccacacaagtgcttctcttgacat

SEQ ID NO: 259524 - DNA, 111 bp, Homo sapiens
caaaaacattgcccagatgtggtggcatgcacctgtggtcccagctatttgagaagctaagggcaacatgcaggttctggtgacttacggtggcgatcccatccctaaaag

SEQ ID NO: 259525 - DNA, 48 bp, Homo sapiens
cgtcaatcagagcgtcctgtgcgagacgtctcccacaacctgctccgg

SEQ ID NO: 259526 - DNA, 75 bp, Homo sapiens
ggagaaagttaactgaattggtgacacttcgggtctctcacagaggaagatgtgtatatctcatgattgatatgg

SEQ ID NO: 259527 - DNA, 74 bp, Homo sapiens
tggagggaaaacaacacacattgcagcactaatgcatgatcaggactttgtgtcattgtatcaagattttgaaa

SEQ ID NO: 259528 - DNA, 100 bp, Homo sapiens
gcactttcctccttctcaaattgcagcaggagctttttgcttagcactgaaaattctggataatggtgaatggattggaggtggacacaaaggaagaggc

SEQ ID NO: 259529 - DNA, 100 bp, Homo sapiens
agcactttaagggctgccctgcggacctagtggtgtgtgacggggctcctgatgaccccaccaacaactgaacgctttggtcaggctgctacaatggaag

SEQ ID NO: 259530 - DNA, 100 bp, Homo sapiens
cagagcggtcggtgacagcctcaagggcttcagcaccgcgcccatggcagagccagaccgctgctcccggcagatcggcttctcctttgtacgacccaag

SEQ ID NO: 259531 - DNA, 100 bp, Homo sapiens
ggatcgagcagctgaacgagtgcaagcagctgtccgagtcccaggtcaagagcctctgcgagaaggaatagccaggccagaagaaggaaggcctgtggtg

SEQ ID NO: 259532 - DNA, 75 bp, Homo sapiens
ttcccacgctgctactgcctgggggctgaggatgacaaaaaagccttcataggcctgggcaatatttaagggaaa

SEQ ID NO: 259533 - DNA, 75 bp, Homo sapiens
cgtcatggggctgtttggaaagacccaggagaagccgcccaaagaactgttgagtggtgattttatgcaatggct

SEQ ID NO: 259534 - DNA, 50 bp, Homo sapiens
agctatcctgagatctgtactgctaacggagttttgctcttgttgcccag

SEQ ID NO: 259535 - DNA, 80 bp, Homo sapiens
tgccagtactgccgctaccagaagtgcctggccatgggcatgaagcgggaagggtttggaaatcccttgtctccaggttg

SEQ ID NO: 259536 - DNA, 90 bp, Homo sapiens
ctgagcgcctggagttggagacaattcctggttcagaatttaaacatctttctaggtgtgtagctgggacggtgctggtctgagctggac

SEQ ID NO: 259537 - DNA, 100 bp, Homo sapiens
aagatggtgccgggggtcgctggctctgctgctgccgccggcgaaggaggaggcgttgccggggatgctgtgaagaagtgttttgccgtgtgtcttgcat

SEQ ID NO: 259538 - DNA, 83 bp, Homo sapiens
aaaattgagacggagctaagagatatctgcaatgatgtactgagtcctgccaaatatcacaaaacctagatattatgaaggag

SEQ ID NO: 259539 - DNA, 82 bp, Homo sapiens
ctgagggccttcgagagctaccgcgccagacaggaagcgccgcggagccatcaacagcaagcagctcacctacctggagaaa

SEQ ID NO: 259540 - DNA, 101 bp, Homo sapiens
tgttcattgtttgtcaccacaaaaaggacagggttcagtttggcaaagacttggtgcagatgtgacagcagttgaatttttaggtcatgtaggtggagttg

SEQ ID NO: 259541 - DNA, 98 bp, Homo sapiens
gcggagcgggcggcagagcagggcggcggcgactcgaataactgaagtgaagtgatggactccgatttggagagtagtaagacgtgaaaggaatacac

SEQ ID NO: 259542 - DNA, 100 bp, Homo sapiens
tgccttctgcttgggcttcagggctgcctggctgcaggttaatttggagtggcccctggagtcagtttcctacaccatccgaggccccacccagcacgag

SEQ ID NO: 259543 - DNA, 100 bp, Homo sapiens
tcataacgcaagttaggcgggattatttgaaaggtcttattgaagttaaaacagatgagtttcctcgccatgggagcaacatagaagccatgtccaagct

SEQ ID NO: 259544 - DNA, 100 bp, Homo sapiens
ggcccggccacagcctgcagcggagcccacgagaggcagcgccatggcggagcagacctactcgtggggacatcacccagaagggctatgaaaagaaaag

SEQ ID NO: 259545 - DNA, 101 bp, Homo sapiens
tgtactacagccagtcttctatgtttccacatcggtcagaaaaagatggccgtgggtctggatttccaggaaagcggagacctcgaggtgcaggactgtcg

SEQ ID NO: 259546 - DNA, 80 bp, Homo sapiens
tcgcgtctgcccggccaagaggcaaaggggaggttacgcagcaaaccatccagaaggaatgtaagaagcacttggcaggc

SEQ ID NO: 259547 - DNA, 90 bp, Homo sapiens
gcccactagcctaaagccgggcggactgcggtgctggagaatctggtaaaagcaccattgtgaagcagatgaggatcctgcatgttaatg

SEQ ID NO: 259548 - DNA, 75 bp, Homo sapiens
gctatcccaaccaggagggacgataaggttttaaccacattctgccttatttctacataatttatttcaccatgt

SEQ ID NO: 259549 - DNA, 75 bp, Homo sapiens
ggcactggacgggtgattatggtggcccacttttcctcctgccaggttcctcatgccatgcacctgctgtcaccc

SEQ ID NO: 259550 - DNA, 87 bp, Homo sapiens
tgtacagccagggctccttccccgagggcagtctactttgttcggcataaagaatcccggcagaggtttgccatgaagaagattaat

SEQ ID NO: 259551 - DNA, 100 bp, Homo sapiens
cactgccaaggctacccttactcagatgctgaacgtcattttcacccgcatggaaaaccaagtgataccgtcatgaatttaagtcaaacgagttatggac

SEQ ID NO: 259552 - DNA, 99 bp, Homo sapiens
ggagcaacagtttacagcccttccagatacagctaccagtccctggtcttcagaatgaacagaaacgattccaactggaagaactgagaaagtttgggg

SEQ ID NO: 259553 - DNA, 100 bp, Homo sapiens
aaggacatgaaaaggcagatccttcccagtttgaacttttaaaagtattagggcagggatcatttggaaagacaattgtggcaattaataaagacccaga

SEQ ID NO: 259554 - DNA, 75 bp, Homo sapiens
ggacaggccccagctgggagccaggcaaggtgggtgatgctgaagaatgtgcatctggccccagggtggctgatg

SEQ ID NO: 259555 - DNA, 110 bp, Homo sapiens
ccctggatgggggaccacaagatcctcatcgacaggtcatcatcagatttgaaatatttaaagtggatacaaaactatttcagcaatgcagacaattaagtgtgttgttg

SEQ ID NO: 259556 - DNA, 82 bp, Homo sapiens
tgctcttctgcctcttgatctccgccaccgtcttcaggccagatgtagtatctaccccttggactgcagaacttggaggtga

SEQ ID NO: 259557 - DNA, 100 bp, Homo sapiens
agattatcaaagcagagatgatggggaatatgggaaaacaaagtgcatgatgaagtcttcagactgtgtcataaagcatgctggtgtatacagtactggc

SEQ ID NO: 259558 - DNA, 82 bp, Homo sapiens
cgaaaacgcaaattgccatgtgatactccaggacaaggagagaaaaggaacagttccgtaagctctttattggtggcttaag

SEQ ID NO: 259559 - DNA, 101 bp, Homo sapiens
gcggcggcggcggatcccggagagccccggagtgagcggagtagcgagtcggcaacccggaggcttgttgattggtgctggctgtgccctctaccccttgg

SEQ ID NO: 259560 - DNA, 90 bp, Homo sapiens
ggccacctacagaaacaaaatgtcaacaaattgatgggtttcctatcctgggagcaggagagtgtgcctatttgaatgacaaaggtgcca

SEQ ID NO: 259561 - DNA, 97 bp, Homo sapiens
gaactggagagaactgctggaaggagactggatgatagaattctcttttgtgacagggacggcttgttgcgggcacttctcacccctgagaatctgg

SEQ ID NO: 259562 - DNA, 95 bp, Homo sapiens
gtcgggccagggccggttctgcaccatcttcaggtcctactccaggggcgctcaggagtatggatgtgtccaacagccaaaaactcaagaaagta

SEQ ID NO: 259563 - DNA, 87 bp, Homo sapiens
acagcaccattcaggatgctggtttataccaaggacaggtaactataactacccaatattgcagccatggagtccatgcttaataaa

SEQ ID NO: 259564 - DNA, 82 bp, Homo sapiens
gccttttgtgctgatcaacttgatgtctttttacaaaaaggagcccagcagccggggccgccctattacaccgacccaggag

SEQ ID NO: 259565 - DNA, 82 bp, Homo sapiens
ggtctgaagttcacgactactagaaggggaggggagtggaaaggctctcagtgaaaaaggtgagtaatagctctggagagac

SEQ ID NO: 259566 - DNA, 75 bp, Homo sapiens
atcatattcatcatggacgtgatgttggtgtgttcacatttgatcatggcatgtatgagaataatgttatcacta

SEQ ID NO: 259567 - DNA, 74 bp, Homo sapiens
ctcctcttttgacttggactatgactttcaacgggactattatgataggtattactgtctctaagccagacctg

SEQ ID NO: 259568 - DNA, 96 bp, Homo sapiens
aggagttgaagtttgtgactttggttttctgtctcaactggtctctgacaagcctctgactgaatgtatccgtgctggccactatgcagcaagcat

SEQ ID NO: 259569 - DNA, 75 bp, Homo sapiens
accgtgtctcagcatgattgcttcccattttgtgcctcccacaatggtgcgcatgaatgtcctggcagatgctct

SEQ ID NO: 259570 - DNA, 80 bp, Homo sapiens
ccatagtgtccgggaatttgtcgagaaatcattcttgcacattggaaaaaccattgtccttcacagttgttgatcacata

SEQ ID NO: 259571 - DNA, 98 bp, Homo sapiens
aacaattattgaaggcacaagaaggctgggctgcaagggccccctggtctggtcctacctgcagctggcagcttcgggggccgccacagcgtatttca

SEQ ID NO: 259572 - DNA, 97 bp, Homo sapiens
ggcaaggttcgagtggatgtcacataccctgctggattcatggcctatgaaagagacaaccagcaccaagatgaagcagaaggagatccaggtaata

SEQ ID NO: 259573 - DNA, 100 bp, Homo sapiens
ggagactggcggagctggcggggagtcgcgggcgcctccgcctcagcaaatgaagaaacacccctgccgccagtgtgacaagtctttcagctcgtcccac

SEQ ID NO: 259574 - DNA, 82 bp, Homo sapiens
gaggtgatgtctgggagcccttccttgacagcccgggccgagaaggatgctccaggatgaaacgccataggcctgtcagcag

SEQ ID NO: 259575 - DNA, 75 bp, Homo sapiens
cagaaccaaaggctattggatcagctcagcaggaattatatccagatcgagagacagaagattctgaaagggttc

SEQ ID NO: 259576 - DNA, 50 bp, Homo sapiens
gtggaaacaaatcagcaatctagacagggcagggcattgttcatgcactg

SEQ ID NO: 259577 - DNA, 80 bp, Homo sapiens
acttcgccaactccgctgcctttgccgccaccatgcccaaaacgatgccttcaattaagttgcagagttctgatggagag

SEQ ID NO: 259578 - DNA, 113 bp, Homo sapiens
gaagttgtaaggatgaaactacgtttgcaacacagtattgaaaggcttgggatgtggtaatgccagccacactcctcagagccgtggccagatctcatcatatattatcaaaa

SEQ ID NO: 259579 - DNA, 100 bp, Homo sapiens
cctgctccttctacatctgcagataaagtggagagaactcttgatgtttcagtgagctttaatggaggaaaatctgtcatttcaggatcattaattgtca

SEQ ID NO: 259580 - DNA, 102 bp, Homo sapiens
gctccgcgcccgccagttgcttgatcaggtggaacagattcagaaggagcaggattaccaaagggcttcaggtgagaccacaggagttgacatcactaaaat

SEQ ID NO: 259581 - DNA, 82 bp, Homo sapiens
attctcccagagattgcctggaacaccagctcgggtcctcgcacaccatcctgcagaaaaatatggctcaggagactaacca

SEQ ID NO: 259582 - DNA, 83 bp, Homo sapiens
aggatatcgacgtcgtgatccagaagtccagagctgaggactgcctgtttgcagcatgatgccttcttctgtagagtgggcgc

SEQ ID NO: 259583 - DNA, 100 bp, Homo sapiens
ggacacacctccattggatttaaaagacagtcctcgtcagcactgactttcagctatggaatcggcagtaagctcctacaggacattttaaaactacata

SEQ ID NO: 259584 - DNA, 87 bp, Homo sapiens
gaaatcgggctgaagcgactgagtccgcgatggagatggccttggtggtattggcatggggttaggaccaggagggcaacccattga

SEQ ID NO: 259585 - DNA, 88 bp, Homo sapiens
tgctgggccgggtaccatggacgtgggcgaacttctgagctaccaggtgctggagaatctggtaaaagcaccattgtgaagcagatga

SEQ ID NO: 259586 - DNA, 80 bp, Homo sapiens
gagttcaaaatgctttagaagacatgaagaatgcaaccctctccctgaattctaatgacagtgagccaaaatattaccct

SEQ ID NO: 259587 - DNA, 76 bp, Homo sapiens
tactgattcccaaatggatgatgttgaagttgtttatacaattgaatgtcaagatgttgtcatgaagagagagaga

SEQ ID NO: 259588 - DNA, 135 bp, Homo sapiens
ggaaaacggtgaaatcctttttggctgtttgccagcagtgcctgtctaatgttaatactccagtgaaagaacagtgctgaagctgctgaaagatggcagaagaagtggtggtagtagccaaatttgattatgtgg

SEQ ID NO: 259589 - DNA, 88 bp, Homo sapiens
tcctcccggcgtggcagatgctccaggcaaacaatttacattttcttatgaaaatgaagtctgcaaacaagattactttattaaatca

SEQ ID NO: 259590 - DNA, 100 bp, Homo sapiens
agcaatacaaactgggtggacattacccaagattttgaagaagcttgtcgaggacacagcattgttggttttgccatgtactattttacctatgacccgt

SEQ ID NO: 259591 - DNA, 73 bp, Homo sapiens
tgctcccggaccgggccgcgcacgccgcctcagccaagtatcttcaagaccttctcatggagagtgtgaattt

SEQ ID NO: 259592 - DNA, 75 bp, Homo sapiens
gcttaaaggccttcccggagacagaggcccccctggattcagaggaagccgaaaacaccctgcaatctttcagac

SEQ ID NO: 259593 - DNA, 50 bp, Homo sapiens
gcaacagaattacagagtatgataagtttgggaagttgatgaacagatca

SEQ ID NO: 259594 - DNA, 100 bp, Homo sapiens
tgaggacctactcacagataggaattgaaggtaaacagaatctggtgattatgggtaagaagacctggttctccattcctgagaagaatcgacctttaaa

SEQ ID NO: 259595 - DNA, 100 bp, Homo sapiens
tcctgctggaggaaccagtagtcctggcattggctgaaaagtatggccgatctccagctcagatcttgctcaggtggaaaggacagtgctattggggcct

SEQ ID NO: 259596 - DNA, 88 bp, Homo sapiens
aagatgcttacaagaaacagttctctcaatacataaagaacagcgtaactccagacatggttcagtggtcacctcacaatgagactat

SEQ ID NO: 259597 - DNA, 83 bp, Homo sapiens
ggccgggagggatccgggtcctgaagggactggtgattgcagctggaagtgcccatgaccgagctggcgtcctccgggggcgg

SEQ ID NO: 259598 - DNA, 50 bp, Homo sapiens
caagcatctgggccatcttcaatgtactactaaccaataacctgcttggc

SEQ ID NO: 259599 - DNA, 75 bp, Homo sapiens
cgagtcggcgcgcgggacgaagataacaccatccagtcggttttctgttgctgctgttgctgttcagtgcagaag

SEQ ID NO: 259600 - DNA, 100 bp, Homo sapiens
cttccgtatctgcctaggcattttgctgtctcctcctaatacggttggaagtgtatcctcccttcttattttttctagctgttggaggtgtttaccaccc

SEQ ID NO: 259601 - DNA, 82 bp, Homo sapiens
ccgcggaggggtctgcgcagtgcaggcagataccgtttgacaccaccaagagcctatctctggcagaagtagccaacgagct

SEQ ID NO: 259602 - DNA, 98 bp, Homo sapiens
gccactatatccaaactatgcaagaaagagtccatccagaagttcaaaggcacttagaagattttcgctcctgggcaacgtgctggtctgtgtgctgg

SEQ ID NO: 259603 - DNA, 98 bp, Homo sapiens
ggggaaacagtattttctggaagggcaaagttaaacctcctccacaaatttcacccagcaaatcgatgggcggagaattttgtgtggctgctatcttc

SEQ ID NO: 259604 - DNA, 51 bp, Homo sapiens
gaggagtcccgctcgaagctagattgtaaaccatggctgtgtggatacaag

SEQ ID NO: 259605 - DNA, 101 bp, Homo sapiens
ggctgggcacactccaccttccctagtcaccagctggtttcccagaggagaaggctgagacccgagaagggaggacactggggttgggaaatcaagcatcg

SEQ ID NO: 259606 - DNA, 75 bp, Homo sapiens
gcgagcgggtgcgtctgccgcagagtcggcacctgaaggacatggagacgatgagatgttctccgacatctacaa

SEQ ID NO: 259607 - DNA, 75 bp, Homo sapiens
tacatttcaccgtataattaagaacccagcgggtgccgcttctccacccgaggcttccacctccaacgagccatg

SEQ ID NO: 259608 - DNA, 100 bp, Homo sapiens
cattaagcagatcctggatggggtgaactaccttcacacaaagaaaattgctcactttgatctcaagggttcttttcctatgactccatcaattccagct

SEQ ID NO: 259609 - DNA, 94 bp, Homo sapiens
tcgagatgcttcgagtcctggaggaggatccccaagtagggggagtcgggggagatgtccaggaatgggtgaatttaaggtccatcgagtacgt

SEQ ID NO: 259610 - DNA, 100 bp, Homo sapiens
gcaaagaacggcagattactggaatgaggcaaagtagcctaaagaaagattggttcttatcagaagaagaatttaaattatggaacagactttatagatt

SEQ ID NO: 259611 - DNA, 100 bp, Homo sapiens
gcggaggtgcggagagactccttgggggtcgagcacataacggggttcgggtgtctcgtgtgtgaacatcacagagtgaccgactcctcatcaaaggtgg

SEQ ID NO: 259612 - DNA, 98 bp, Homo sapiens
aaacgaggacccaagaagcagaaggagaacaagccaggaaaaccccgaaaacgcaagaagcgtgtggagcagctgcgccaggccattgaagaactgta

SEQ ID NO: 259613 - DNA, 83 bp, Homo sapiens
cccaccttgtggccctgggctttaccatctttgtggctgtgcttgccaggcctggctccacaaaatgatgcttcaacacccag

SEQ ID NO: 259614 - DNA, 88 bp, Homo sapiens
cgctggagcggagccggccgtacgcggtgctgcgagggcagaacctggatactaatggaccatactaccaaggaccagtccacctgaa

SEQ ID NO: 259615 - DNA, 74 bp, Homo sapiens
gccaagaagtcgcccatcgcagcagctcggatgccggctccaggagcagcagtggaggtcgggaacgcctcatt

SEQ ID NO: 259616 - DNA, 74 bp, Homo sapiens
cactctaatggtatatgaagatgtcgtccaaatagtatcaggattccaagacgcaaacatgcagatctttgtga

SEQ ID NO: 259617 - DNA, 95 bp, Homo sapiens
agtggtcgcttcttctccttgcacttttccagccattaactccaggctctcgagaatttgaagatgttgtaaatattctccattcttcttacctt

SEQ ID NO: 259618 - DNA, 83 bp, Homo sapiens
ccgcaccgcggcttaaatgatgtattttgtgatcgcagcgatgaaagaacatccagtcatggataaaaatgagctggttcaga

SEQ ID NO: 259619 - DNA, 82 bp, Homo sapiens
ctgaaggacgcgcaggagaagctggagctcacggagaagaaggcctccgacatataacacgtgggaaccggaggagaacatc

SEQ ID NO: 259620 - DNA, 99 bp, Homo sapiens
cacaaatacatttgccactattccaggaatggttgggcccgtcattgctaaaagtctgacccctgatgtttctaagcatgaattgaggaacagaagaag

SEQ ID NO: 259621 - DNA, 100 bp, Homo sapiens
cctactttctggatctgtgcttgtgaaaggctccatggtcttgcctccttgcagatgttgatgaatgccaggctatcccagggatatgccaaggaggaaa

SEQ ID NO: 259622 - DNA, 75 bp, Homo sapiens
gggagccccgcgggtcctgcccagggcaatttgcatatttctccaaagaaccatccagaacctgagcagcctgtc

SEQ ID NO: 259623 - DNA, 98 bp, Homo sapiens
ttgtctgtactgatagcatctaatatggtggatgcttccaaaagcatcgaagctgtccatgaggacatccgcgtgctctctgaggacgccatccgcac

SEQ ID NO: 259624 - DNA, 75 bp, Homo sapiens
caagaaggccctggacacagcaatatctctgggctttcacagatcagcaagttgctcggatggaaaaactagctg

SEQ ID NO: 259625 - DNA, 100 bp, Homo sapiens
atgacactcttattgaaacaacagactatgctgggcttatttgctcatctctcagagatctagaacttgcctaccaagtacatggccttttaaaaaccgg

SEQ ID NO: 259626 - DNA, 75 bp, Homo sapiens
caggaacaactgtgtcagcagctagcccttttcctcaaggtacctggactatgccagagtccccaatagcaatcc

SEQ ID NO: 259627 - DNA, 75 bp, Homo sapiens
ggctgaagggagtggatcagagcactgcctgaggaagcatgagtgggaaaagcatgggacctgcgccgcccaggt

SEQ ID NO: 259628 - DNA, 75 bp, Homo sapiens
cctcacggacgaccaggacgaagtgctcggcggcatggtcacgtatcagttaaaaattcttacaacagcattatt

SEQ ID NO: 259629 - DNA, 83 bp, Homo sapiens
ctagaaactcgctctaaagacggaaccgccacagcactcaaaaagtcagaaacatggccctggatgatgtcgtgatcctgaat

SEQ ID NO: 259630 - DNA, 82 bp, Homo sapiens
atccatgcgcctggctaacctcctgatgctcctgtcccacgtcaggcatgcgaggctcaacaccacatggaagctgccaagg

SEQ ID NO: 259631 - DNA, 75 bp, Homo sapiens
aaagacatggagattctcttaaaaaggtcagtaaaatcagcttggtggatctagcaggaagtgaacgagctgatt

SEQ ID NO: 259632 - DNA, 74 bp, Homo sapiens
gggatgggtttgtggatcaggatgagtatattgatatctgagaaatatgggctgcccgtggagaagatagcaaa

SEQ ID NO: 259633 - DNA, 75 bp, Homo sapiens
gacctgttcacgcaggggaaacttgaacattcgcagttgaaatggatgcagtcagaactgaatgttgaagaagtg

SEQ ID NO: 259634 - DNA, 100 bp, Homo sapiens
aggagctgtggttgtaacactctacaagatgggttttccggaagccgccagggtcttaccaggatgtgcttccagccctatacatatagccagctgcagc

SEQ ID NO: 259635 - DNA, 117 bp, Homo sapiens
gcggcgacggagggggcggccgggtccgcatcgagaagatgagctcagaggtggtggattcgaatccctacaggtctctaattaacagaagatggcaaagcccagccacagcagcta

SEQ ID NO: 259636 - DNA, 100 bp, Homo sapiens
atttatggggctgattcttctgccgattctggtaccatcaagcctccagggtcgtatagacctccccctcctatgggcaaaccaccaggttcaattgtaa

SEQ ID NO: 259637 - DNA, 50 bp, Homo sapiens
gtaagctggctaccagggccaagaactacaggatctcatgcacatctcac

SEQ ID NO: 259638 - DNA, 100 bp, Homo sapiens
gacctaaggaggtacccactggatgaacaaaactgcaccttggaaattgagagctctttagcgtcacctccctcactgggcagcatgggggagaagtcag

SEQ ID NO: 259639 - DNA, 75 bp, Homo sapiens
ctctcggactgagaaacgcaaggctctgccgacttccagttctggaacaagatggttaaactcatttttccctgc

SEQ ID NO: 259640 - DNA, 82 bp, Homo sapiens
ttcggtggactccttcggcagtccacccaccgccgccgcctcccaggtttggacctcctgcgtacagacggtttagtagtgg

SEQ ID NO: 259641 - DNA, 75 bp, Homo sapiens
ggataaatatatctatggagcacaggaaaatgtttataggaggccttagctgggacactacaaagaaagatctga

SEQ ID NO: 259642 - DNA, 90 bp, Homo sapiens
gcttcctcaagatcgaggggcttcaggacagtgaacatggtcccgggattcttgagctgtgcccagctgacgagcttttgaagatggcac

SEQ ID NO: 259643 - DNA, 131 bp, Homo sapiens
cctacctgctcaagccgctcttccccacctgcccggtgcccgaggaggcagccaagctcgtagcctgccactccggtggaataattaatgatagttctgaattaattggtcctgctgaagctcactcagat

SEQ ID NO: 259644 - DNA, 100 bp, Homo sapiens
ccatgtccaaaccaggaaatggacagctcaacgggacccaggtggagtctgtacagctcaaagtcaacatagcccgaaaacagcccatgctggatgccgc

SEQ ID NO: 259645 - DNA, 100 bp, Homo sapiens
ggaaaatgactgcatgttcccctcaagcaccagtatgcatgagcgggtgaaccgaacagaaagacagtttcgatcacttccagctaaccaacagaaacta

SEQ ID NO: 259646 - DNA, 82 bp, Homo sapiens
caggcctcggactccgcggccggcccggcgcggcccagcgccctcaggtcgggaaagaggttaaagaagacacgcaagtatg

SEQ ID NO: 259647 - DNA, 100 bp, Homo sapiens
tcacaatgtggatcaaacaggaaaatctgttatcatcaacaagaccagcagcaccagaatctccagaaacatgacaaggaggactttcctgcctcttgga

SEQ ID NO: 259648 - DNA, 90 bp, Homo sapiens
acccagcccatggaggagatcggcctcagcccccgcaaggatggcctttcctaccaggagttcatccgtgagggctgccttcacaagctc

SEQ ID NO: 259649 - DNA, 100 bp, Homo sapiens
tgcgtcctatggacccttctacctggaatactctcttcttgcagaattggtgtccgcaatgttgccagtgtctgtctgcagattggctacccaactgttg

SEQ ID NO: 259650 - DNA, 88 bp, Homo sapiens
ttagtcatgctgttattttagcccagtggtccagagagatgactgaaaatgccggtggtggtgtgcacattgagccccggtatagaca

SEQ ID NO: 259651 - DNA, 75 bp, Homo sapiens
ccgaaacttctgtggctgaaagagcctcctgacaaggtgatccgggcgggccccgcaggaattttatcccctcac

SEQ ID NO: 259652 - DNA, 100 bp, Homo sapiens
ggaaacagagacagtatttgtaccagttatccaggctggaatggaggctctgaaggctgtattcgtgcctggccaatggcagtgcggatgagtttcagcg

SEQ ID NO: 259653 - DNA, 74 bp, Homo sapiens
tgtaacgtgtcattagagtatgagaaaacgattggcctaatgaagaagttcaacctggagagatggaaaatcag

SEQ ID NO: 259654 - DNA, 100 bp, Homo sapiens
ccaccttcagagcgtcacggcgtacgccctcatggggaaaatctccccggtgactttcaggaactgcaagcacatgttgaccagataactgaaatggcag

SEQ ID NO: 259655 - DNA, 100 bp, Homo sapiens
ggaggccgaatgtgcaggatcaccgaggggaaagtgagcttgacaggactgtggtctggagctcaatgatgaagatggccaccgctgttatccgctggag

SEQ ID NO: 259656 - DNA, 100 bp, Homo sapiens
aagcccagccaagccccgccgatcgcgggcaccggagccagccccgcagcggatgatcaagcggtgctgattcacgagagtggaagcctccagagcttgg

SEQ ID NO: 259657 - DNA, 90 bp, Homo sapiens
ctgaaaacaaatgtttttctggtcttcacttttttgaggcaggaaggtgacttcatggtcatgacgattttcttcaatgtgagcaggcgg

SEQ ID NO: 259658 - DNA, 75 bp, Homo sapiens
gccggcatcgtctttccgtcctctgaggcgacggccgcggctgcacaggtcatcatcagatttgaaatatttaaa

SEQ ID NO: 259659 - DNA, 125 bp, Homo sapiens
atcacactgaagctgggaggcaaaggctacaagctgtccccagaggactacacgctcaagtgtactaatggtcacttgatgtgcgctggctgttttatccacctactagcagatgcccggctgaa

SEQ ID NO: 259660 - DNA, 98 bp, Homo sapiens
aaaaactaagcatccagaggccctgagcagctttcagcactggaggcggtgcgtctttctacgtgaataggattttgtggctggccagatacactgca

SEQ ID NO: 259661 - DNA, 75 bp, Homo sapiens
cggcaccacccatcttgagtatctgacaggggcaagtgtccgagtggtgaatcagctacttacagagatggatgg

SEQ ID NO: 259662 - DNA, 75 bp, Homo sapiens
tctggacaaaggaacaggtatctcaggacactgtcttcagccttttcttcaagtttttgaccgtggattgtgttg

SEQ ID NO: 259663 - DNA, 50 bp, Homo sapiens
tttgcgcaacgccaacctcaggcgagatgttactgcaacaaggaggtata

SEQ ID NO: 259664 - DNA, 101 bp, Homo sapiens
tgggcaccgaggaggagctgccgcggctgttcgccgaggagatggagaatgaggacgagatgtcagactagacgcttgaagcaaagctgccatcccagaag

SEQ ID NO: 259665 - DNA, 100 bp, Homo sapiens
gcacaaccccagttaagctgcgctccgggaggttccagcaacagatagaaatgctttaagttcactctggggaaagctggcctctgaaatcttaatgcag

SEQ ID NO: 259666 - DNA, 74 bp, Homo sapiens
ccagtgtttccgtcagtacgcgaaggatatcggtttcattaagtccctgcactaggtcagacaatcccctttgg

SEQ ID NO: 259667 - DNA, 100 bp, Homo sapiens
gtcaagagcggaggtagagggaaggaaacccagcgtttgctggcagaaccagttcctggcatcaaagccgaaccagatgagagcaacgcccgttattttc

SEQ ID NO: 259668 - DNA, 96 bp, Homo sapiens
cttagctgtgctcgcgctactctctctttctggcctggaggctatccagctgcctccggagccagcgtggtggccatagacaacaagatcgaacag

SEQ ID NO: 259669 - DNA, 75 bp, Homo sapiens
ttcaagcttagcttcgttattggctgagcagagtcctgtgtatggaaactcacatgagtcagctcagtctagaag

SEQ ID NO: 259670 - DNA, 83 bp, Homo sapiens
caaggagctgtgtcactgcaaactcactgtttggaatcgaagcctcttaaaatggcagatgacttggacttcgagacaggaga

SEQ ID NO: 259671 - DNA, 50 bp, Homo sapiens
gtcatggaagagtttttaaaccaggttgatgacaacaagaaactaggaga

SEQ ID NO: 259672 - DNA, 96 bp, Homo sapiens
gatagctgtcctctttaagaagaaatttggaggggtgcaagaacttttaaatcaacgtacatctccgttcatggatgcattaacagccaatgggac

SEQ ID NO: 259673 - DNA, 84 bp, Homo sapiens
ttaactgtgaaaagtccaacagtcagtttaattatggccaatatacccagtagaagaattagaagaagaaagcgttgcagaaga

SEQ ID NO: 259674 - DNA, 50 bp, Homo sapiens
gcggagggagccgcgggatggaccgcagtgattacagtggcgagatcttg

SEQ ID NO: 259675 - DNA, 75 bp, Homo sapiens
acgcggccgcggagacctacctgcggcgtcggcagctgctgctccgagtatcctagaaggaaaacatcaccatgg

SEQ ID NO: 259676 - DNA, 87 bp, Homo sapiens
gagatgtggggggattctcgacctgctaacagaactggaccttttcgggaatgggtactgttcaaaaaggaatgccccacaagtgtt

SEQ ID NO: 259677 - DNA, 82 bp, Homo sapiens
cgacgcctgcgacacggtgcgcgtcaaggccctcttcgccatctcctctggagaagaagcaggcgctccctccattccagcc

SEQ ID NO: 259678 - DNA, 100 bp, Homo sapiens
tacacgtttaatttttctaaagagtcttgttatttcttctttgagaaaaacctgaaagatgtctcattcaactttgtggggaaacttttgggtccacgtg

SEQ ID NO: 259679 - DNA, 75 bp, Homo sapiens
aaatcacctgtacttggtcatgcagcttgccggtggtggtgtgcacattgagccccggtatagacagttccccca

SEQ ID NO: 259680 - DNA, 126 bp, Homo sapiens
tattacaatcgcttgtacaaaggagagtttaaacagccaaaacagttcattcatattcagctatctctcagaagatagaagtgtgcaagaagtactacagaagcatttcaatatcagcaaaaacct

SEQ ID NO: 259681 - DNA, 83 bp, Homo sapiens
tggtgatactaccagacaagttcagagaatatcatgcttccagtctactgtaaagacaaacatcatatctgaactaagtaaat

SEQ ID NO: 259682 - DNA, 100 bp, Homo sapiens
gttcgcctgttgtcagaggtcacctgtctacttttcaaggctctgaaaaatttcccccattaccagcagaatgcagagagcagtttgcagcagaagaatg

SEQ ID NO: 259683 - DNA, 51 bp, Homo sapiens
ctgacaatgtgagcagtgcttttgaacaagtgcaccaattccagctggaca

SEQ ID NO: 259684 - DNA, 83 bp, Homo sapiens
tccctgcagactggcaggagcagattccaaaggcacaggaagaagcttgcagtacctccctgcacttggctattcaaaacggg

SEQ ID NO: 259685 - DNA, 98 bp, Homo sapiens
aataagctatatactttggttacctatgtacctgttaccactttcaaaatatgaatctgatgaacaagaaaagagtgcctatcaagagtatgacagtg

SEQ ID NO: 259686 - DNA, 90 bp, Homo sapiens
ctgtagccgttgaaaacggaactggcaccgacagacaggtggccaccctgatcgaccgctttgtgaagggaaggggccagctagacaaag

SEQ ID NO: 259687 - DNA, 74 bp, Homo sapiens
agtatccgccagtcaataggaagtacgagtccaagaagtatgatgcgtttttggcctcagagtctctgatcaag

SEQ ID NO: 259688 - DNA, 82 bp, Homo sapiens
cttatttgacgacgactcttccgacctgaaaagcacgcctgggggcctcagtggtcagcccaaggctgccccctcggtcact

SEQ ID NO: 259689 - DNA, 74 bp, Homo sapiens
tggcagttttacagtctccgcacagcgtaaaagagcagtggacctcaatgttaaaatcttggatttgagtagta

SEQ ID NO: 259690 - DNA, 83 bp, Homo sapiens
caaacacagaatcagcaaagaggaggccatgcgctggttccagcagaagaataacctgaatctgctcagagacctggctgtgc

SEQ ID NO: 259691 - DNA, 100 bp, Homo sapiens
aaagttcttccagtcctcctaggcatcttattgatcctccagtcgaggcttcatcaccatgacgccccagctcttcatcaactacaagctcaagtctgtg

SEQ ID NO: 259692 - DNA, 100 bp, Homo sapiens
tacgggaacccacgaccattatatgctggaatggttccttatggcttgaaacccctccttcctgtgtctgtgcggagtcagatagacatgctggtcccac

SEQ ID NO: 259693 - DNA, 93 bp, Homo sapiens
agaagaagattaacctggagttaaggaacagatccccggaggagggacctcaggatggaaaccagcagcctgcaccgcccgagaaggtcggct

SEQ ID NO: 259694 - DNA, 100 bp, Homo sapiens
gcggaggcgactagcggcggcgggagcggcgccgagaggccgtgcgggacgcgggcgccaggaccggccgaacgcagagagaatctggacgaggctagag

SEQ ID NO: 259695 - DNA, 82 bp, Homo sapiens
accccagggccctgtggcatgaggaagctgggggcatcttctccccaggccttggacaagattcgctatgagagcctgacag

SEQ ID NO: 259696 - DNA, 82 bp, Homo sapiens
cttccccgagccccccgccggagtcgaagcctggtccgacccccagtggcactaacgtgggatcctcagggcgctctcccag

SEQ ID NO: 259697 - DNA, 98 bp, Homo sapiens
ttcactgactttgatcttgaaccacaagactcttgtattatggatgttgacaatgcgtctctggcacgtcttgaccttgaacgcaaagtggaatcttt

SEQ ID NO: 259698 - DNA, 100 bp, Homo sapiens
acagataaagatggtgaacaacctcaaatactgctggtgctggctgccagctgctgcgccccccatgtagaaggtgcacctcctgggagcaggcacgtct

SEQ ID NO: 259699 - DNA, 100 bp, Homo sapiens
gctgtgtcctctgaagaaaccaatgactttaaacaagagaccccagagtcagaaggagtgagaaccctgacccctaatcccactgcatccagccaatagg

SEQ ID NO: 259700 - DNA, 51 bp, Homo sapiens
cttgaatggcgactagatgtacagttgctctatatgcaatcagtgctgtct

SEQ ID NO: 259701 - DNA, 100 bp, Homo sapiens
agctccaggattctgacagggatgttgcgaagatacgtaggtaacctttccagagatgtgacagaagtccttatacttcagttgttcagtcagattggac

SEQ ID NO: 259702 - DNA, 75 bp, Homo sapiens
gggtgccctccatggccaggaggacacccctggtggcctgcttgccttatgatctcctcattgcgtccccctctg

SEQ ID NO: 259703 - DNA, 98 bp, Homo sapiens
agcaccagatgaaggagcattcctcttgggaaggagaagcagaagggtcagtaaaagaaatcaagcatagtcctgggcccacgagaacagtctccact

SEQ ID NO: 259704 - DNA, 100 bp, Homo sapiens
catcccgggacgcttccggttatggcgtcattatgcagccaggttatagctgaggtggtaccagtttaagaagtgagaacttcttcactgactgaaattt

SEQ ID NO: 259705 - DNA, 99 bp, Homo sapiens
gaagcagctgcctgctatgctgaaaacccctggaaacttgctaaagagctgtggttgacaggactgaggtgattcgcacctgcataaacccagtgtact

SEQ ID NO: 259706 - DNA, 83 bp, Homo sapiens
agaaagatggcggagcaagagactgtagaagcggccaggaagaaaaccaccccctcttaaggttgtttttgtgaccgttcttt

SEQ ID NO: 259707 - DNA, 75 bp, Homo sapiens
agagcgtgaccgagagcgcgaatatcgtcatcgttagaagctgcacctgtggggggacctctcatgcagacttgc

SEQ ID NO: 259708 - DNA, 90 bp, Homo sapiens
tttctagtccctcttacttgaagcatgtctttcagagcccggcaccacccatcttgagtatctggttttgctgttactgctcagtgtagt

SEQ ID NO: 259709 - DNA, 82 bp, Homo sapiens
cggctggtgggtggcaggaaatgccaagaaccaaaaacttttgctagaaaatcagcttttacgagagaaaactcatggcctt

SEQ ID NO: 259710 - DNA, 75 bp, Homo sapiens
gaggggaccgcgcccgcctcatttgcgccttgcagcactgctggaccaggacccattccaacaatctcgtaaaac

SEQ ID NO: 259711 - DNA, 75 bp, Homo sapiens
ctctgttctgcccggaggagccgccctatttaggtcagttaacgtccataccaggatacctgaatccctccagta

SEQ ID NO: 259712 - DNA, 80 bp, Homo sapiens
ctggccgctatcatcccagcagtggagttcagcccactactctgaaccagggagtgcatccgccccaacccttttccccc

SEQ ID NO: 259713 - DNA, 96 bp, Homo sapiens
ctcaaaagaaaattcataaatttgaggaagctttgaagtgctggagaatctggtaaaagcaccattgtgaagcagatgaggatcctgcatgttaat

SEQ ID NO: 259714 - DNA, 100 bp, Homo sapiens
ttttctacagcttctgataatcaaccaactgttacaatcaaggtctatgaaggttgctccttgagggcaggacagttcttatggctttatccgttgcgta

SEQ ID NO: 259715 - DNA, 75 bp, Homo sapiens
gcctgcggtacctgcactccaaaggtgtatttcaccgcgacctcacatccaagggcattttgtcagtgatgctga

SEQ ID NO: 259716 - DNA, 74 bp, Homo sapiens
ggctctcatgttcctccatgataaaggaatcatctataggtggagccgccaccaaaatgcagattttcgtgaaa

SEQ ID NO: 259717 - DNA, 100 bp, Homo sapiens
acctttacgtgaagtggaggcccaaggacagtgaggagctgggtggtcccagcctggagctgtgccagcctgacatggcttccaatcagaagactataca

SEQ ID NO: 259718 - DNA, 124 bp, Homo sapiens
cacgcggctgctgccgacccctggcacctggcgcccagcgcgcccgtggccgctgccgcctccgccccaggaacttagtgatttggcccgtgaccctccagcacaatgttctgcaggtccagtt

SEQ ID NO: 259719 - DNA, 116 bp, Homo sapiens
ttgaaaggagcagggaaaagatccagaagcatgttagttcgacatcatcatcttttcttgaagtacttaaggaaatatctgttggagaactaaatccaaatgaaactgtacaggcc

SEQ ID NO: 259720 - DNA, 90 bp, Homo sapiens
attcggaggtccggtccgttgcctcaaaccagtcagagatggagttctcttcacttcaggacatgcctcctgaggaggtgtactcggcgg

SEQ ID NO: 259721 - DNA, 75 bp, Homo sapiens
ctggattgtcacctttgctgcaaaaaattacggccttagattgtaagcaaaagaaatcaaggtcaagatctggaa

SEQ ID NO: 259722 - DNA, 98 bp, Homo sapiens
ctttctcagcaccttggcgaagccttgggtttctttcttaaaggactgatttttagaactccacatttgagacatttgcctgaaaaaattaaggatga

SEQ ID NO: 259723 - DNA, 88 bp, Homo sapiens
ccgacaggctggagcgcgagaggtgagaactctgtctcagtcgacgggaagtgcagtgactccacgctactgagcaacttgttagaag

SEQ ID NO: 259724 - DNA, 100 bp, Homo sapiens
ccgggcagtgctttccccaagtagtccgatggctgcggctgcgccgaggcgccctactcaggtgctgaccttaaggaaagagccaaaatgagttccagtg

SEQ ID NO: 259725 - DNA, 75 bp, Homo sapiens
cagccggccagccggggggcactgcccgcccgggctctgcagcgtgcagggtcaaagacagccggccccccatgt

SEQ ID NO: 259726 - DNA, 101 bp, Homo sapiens
atcgtggcctcctacctggtccggatgccacccttcacccaggccttctgcgctctgcaggtcccagtagggatggcacaatcagcgaggacaccatccga

SEQ ID NO: 259727 - DNA, 100 bp, Homo sapiens
gcccatcgtgtgaactatagagtttgtggacagatttatattgagaccgtccaggctggacttgaactccttcctcggctgaagtgatcctcctgcctca

SEQ ID NO: 259728 - DNA, 80 bp, Homo sapiens
gagactccctgtcccggaccgcaggtggcagtagagaagagcatcacagaagttgctcaggagctgacagagctggtgga

SEQ ID NO: 259729 - DNA, 98 bp, Homo sapiens
actgcccacgcgctcagacatgatatgcggctatgcctgcctcaaaggagctgcatttggaaggctggtaggagaaatcatggccatgctctttcctg

SEQ ID NO: 259730 - DNA, 80 bp, Homo sapiens
caccagcgccttgatcgagtacttgaggcctgccttgctctgccaggaaccatgagtgaggcccgcagggacagcacgag

SEQ ID NO: 259731 - DNA, 100 bp, Homo sapiens
cctgctcaagccgctcttccccacctgcccggtgcccgaggaggcagccaagctcgtagcctgccactccgtgcctctgcggccgtcacgatgttctgga

SEQ ID NO: 259732 - DNA, 82 bp, Homo sapiens
atccttctgtcatagaaactcacatgagacaaatgcgctcagcttcaattgacctgagtcagaactccatcacaggggaaca

SEQ ID NO: 259733 - DNA, 90 bp, Homo sapiens
ggcactgaaggggttaagtcccctggggctggattccgccttccggcttttcccagaccccagagcccaaattgtggctactaatttgcc

SEQ ID NO: 259734 - DNA, 115 bp, Homo sapiens
tccgtgggacaatatgttcaagagaatggccgaatttgggcctgactccggcgggagagtaaaggaagctgaatatggtgggcatgatcagatagatttgtatgacgatgtcata

SEQ ID NO: 259735 - DNA, 100 bp, Homo sapiens
ttccccggcccacagtgggggtgtgcaaacccgagagaactgggtttaaacttacacgaatcgctttctggaggaggaggggacccgctgcgcgattgac

SEQ ID NO: 259736 - DNA, 101 bp, Homo sapiens
ggcactatgtcgtccgaggcccagagatgaccccttatgaagactgtgagctgcttgtccccatcctgcggccgtcctggggacacagagccctccgtggt

SEQ ID NO: 259737 - DNA, 100 bp, Homo sapiens
acctctgccttccgggttcgagtaattctcctgcctcagcctcccaagcagctgggtctacaggttgaggaacaggttagcaccactgagagagtgtttc

SEQ ID NO: 259738 - DNA, 74 bp, Homo sapiens
gaagcaagtgcagatagatggccttgcgctgagatgcgtctggagagccagagggcctgcctgaaggaatcacc

SEQ ID NO: 259739 - DNA, 82 bp, Homo sapiens
ttcggttagccagccacgaagttctcgcgagagtcgtctcctcgataccaagggttgtgtttgcacattatggtcccgtctg

SEQ ID NO: 259740 - DNA, 75 bp, Homo sapiens
cctcggagcaacgagcgcagcgccgatttctctatgaatcatcatcaagaactctgggagaacttttgaattcat

SEQ ID NO: 259741 - DNA, 100 bp, Homo sapiens
gcggtgtcggagagccagctcaagaaaatggtgtccaagttatttatcagagagtctgatgctgaaagagaacagaacttgcctgtcacagttactagat

SEQ ID NO: 259742 - DNA, 75 bp, Homo sapiens
aatggggatttaaagcactgaaacaaatgattaagattaacttcaagttggcaacagcattattgagaaaagccc

SEQ ID NO: 259743 - DNA, 100 bp, Homo sapiens
ccaagctgaagcacttccagctccggacagtcattttgtttactcattcagccctgttgcaggtcccaataaactcttcataaggttgacagaagcaccc

SEQ ID NO: 259744 - DNA, 73 bp, Homo sapiens
cgagctgaccctgggagacatcgacggcaacatgagtgagaatgaggaagaggaaatttctcagcaagaaggc

SEQ ID NO: 259745 - DNA, 98 bp, Homo sapiens
cccgcggcgcaggaggcggtggagcgcagagcgggcgagcgcgaaatcatgagtggaggatctcaagtccacattttttggggtgctccaattgctcc

SEQ ID NO: 259746 - DNA, 83 bp, Homo sapiens
agaggcccgcccaccagttcgcccgtccccctgccccgttcacaatcaattctgtggtgttcttggtcacacatttatggagt

SEQ ID NO: 259747 - DNA, 97 bp, Homo sapiens
cgagatggagcgggcgcactgggaggtggaacgggccgaactgcagatgtcctcctcgcactttcttaccagccctttgcaaaatttttcttgatga

SEQ ID NO: 259748 - DNA, 100 bp, Homo sapiens
ccggagtcgcgcggccgggagcacgggcgccggcatagtacaatgaggcagccagcggatcttggattgagaaaatcatgagttctattggagaagggat

SEQ ID NO: 259749 - DNA, 75 bp, Homo sapiens
ctccttttcatgagtgttcctgtggtctctgcacctcctttctatgccatggacaatattaccaggcagaaccaa

SEQ ID NO: 259750 - DNA, 82 bp, Homo sapiens
caaggggcttacgcagaaggacctggccacgggcgaagctgtgctcaggcccgggctggacgcagagccagagctgtcccca

SEQ ID NO: 259751 - DNA, 100 bp, Homo sapiens
tctttcctaccatctaaaatacgaaggtttctggctggggtcctagcacagtgtctgatggagctttcctaccagaccctgaaattcacgcatcaggcgc

SEQ ID NO: 259752 - DNA, 100 bp, Homo sapiens
cacggagaaccagtaccggctgacctcgctgtacgccgagcacccaggcgactgcctcatcttcaagactgtgccctgtccacggtgcctcctgcatgtc

SEQ ID NO: 259753 - DNA, 127 bp, Homo sapiens
atcgatgccatcaacaaccgcgtcacccagctcatgagccaggaggccaacctgctgctagccaaggccgacccagaacgctggacaaacattcctttgctggtcaagatcctaaagctgatcatca

SEQ ID NO: 259754 - DNA, 50 bp, Homo sapiens
ctgaacttcagttgccttacctgtaagggcctgggttccaataaataatt

SEQ ID NO: 259755 - DNA, 75 bp, Homo sapiens
agggactgcaccttctccatcaggtgcagaaggtacccgaggattaataaagaatctttacttcctgtagcaaag

SEQ ID NO: 259756 - DNA, 100 bp, Homo sapiens
gctgactgctggtgaagaaaatgctttatttttgtggcaggcatctgtgggatctgtaatagaaatgatgaccagtgtcccagtgaaggaacgagtgaag

SEQ ID NO: 259757 - DNA, 101 bp, Homo sapiens
atgctcctactatccatttcaactacagatactttgaagtagaagaagctgatggtctggtccatcgaactcatatgtcatcctgtcgggtggataagccc

SEQ ID NO: 259758 - DNA, 100 bp, Homo sapiens
atttgatcattttagtgctggagaatctgaaaacaaccctttttgctgcacatgtaagtggagctgtgcttacctttggtatgggctcattatatatgtt

SEQ ID NO: 259759 - DNA, 80 bp, Homo sapiens
gtggccggttcttggtgggatctgagcagaccgccctggtggtgcaggctgtgaagaaagaccaggagggggattcagca

SEQ ID NO: 259760 - DNA, 73 bp, Homo sapiens
tgctgtgcagtctgatgaaagacttcagcctctgctcaatcacctcaggccaggagacaagcttctcaagtct

SEQ ID NO: 259761 - DNA, 127 bp, Homo sapiens
gcctgagcgggacatggactcaacagatctgtctgcctgcaatctacaagggtggaattgcgtttgttgccataaaaggagcatttaaagtttacttcaaacagcagcaatatttacgacaggcaca

SEQ ID NO: 259762 - DNA, 100 bp, Homo sapiens
gggacggacaagaccctggtgaaggaggtcgtacaggacagtgagctgataactgttcccaggccatgtaggtggccagcacaggacaggtcaccttctg

SEQ ID NO: 259763 - DNA, 100 bp, Homo sapiens
ctcacttgcatgtatttggaacaaaaaaaggagatgcctggcagccccgctctctgcactgccccagagcacatcagctatgtgccccagctctcaaacg

SEQ ID NO: 259764 - DNA, 100 bp, Homo sapiens
ccgtggcgtcttggtgttctccacgctggttcgcagatctgaagaaaacccttgctgtgttattagataacattttgcagcgcattggcaagttggagtc

SEQ ID NO: 259765 - DNA, 75 bp, Homo sapiens
acagcttctgcaaagacaggaggagtgggccctttgtggtgatttgcagatcaaaatcaagtctttggcatctgg

SEQ ID NO: 259766 - DNA, 50 bp, Homo sapiens
ctactcatctacatcctctacaaggtcaaaatgcagatcttcgtgaaaac

SEQ ID NO: 259767 - DNA, 82 bp, Homo sapiens
agctgcttagacgctggatttttttcgggtagtggaaaaccaggttcgagaacttgtcttggacaattgcaaatcaaatgat

SEQ ID NO: 259768 - DNA, 50 bp, Homo sapiens
aaatgtcaactttttgggtcagacagagagccacctgagctgaagattcc

SEQ ID NO: 259769 - DNA, 100 bp, Homo sapiens
atggagctgcagggaattgtgccggaggttctgaagaagatcgtaacaacttatgacatgagtgcagcagctgccccgagccccgtgcttggcaacattc

SEQ ID NO: 259770 - DNA, 96 bp, Homo sapiens
ggatatggtggcagtggggatggctataatggatttggtaatgatggaggctaaggagaagcgccaggaacaaattgcgaagagacgcagactttc

SEQ ID NO: 259771 - DNA, 98 bp, Homo sapiens
gaggagcaccaggagacgcaactcatcggtgttgctaacaaccacaagcagaatttgatgacggtggcaaaccttggtgtggtgtttggacccactct

SEQ ID NO: 259772 - DNA, 78 bp, Homo sapiens
tcctttatatagaagggagagtaggaagagagaagggcacagttacctaagtatcaacgtaatcttcctcggccagga

SEQ ID NO: 259773 - DNA, 100 bp, Homo sapiens
gatgtggtggtctactctgatgtcaatcttgagggctagctccttgctcggattgaacgtatggaaaggcggatgcagctggtaaagaaggataacgaga

SEQ ID NO: 259774 - DNA, 83 bp, Homo sapiens
agccaagagagaccttggagtaattcgtcgacagttctttatagctccaagctctacagattcttcaaatatattgagaatag

SEQ ID NO: 259775 - DNA, 75 bp, Homo sapiens
ggagggcttcgcgtctgcttcggagaccgtaagggtctccttgaagaaaatgatattttcaggaatgctcaagca

SEQ ID NO: 259776 - DNA, 90 bp, Homo sapiens
ttggggtgttccaattcctgtgtttcatcataagaccaaggatgaatacttgatcaacaggatgtacagttacccagcacgtgtacctcc

SEQ ID NO: 259777 - DNA, 50 bp, Homo sapiens
ggcagcttgatcattggctatgccaggtgattacgtttttgaagaagaag

SEQ ID NO: 259778 - DNA, 100 bp, Homo sapiens
cccgactcctccgacgccgatccggacagcggcacagaggagggaggctaatggtcgatttgaagtgggcaagaaaatctgtttgagcatctcaggccat

SEQ ID NO: 259779 - DNA, 50 bp, Homo sapiens
cttcgagagctaccgcgccagacaggcatctgcatctgggaccgacctcc

SEQ ID NO: 259780 - DNA, 80 bp, Homo sapiens
caagacaccccttgaccagcacacactgcaaggagatcagacaatgggagcagccgcacattgcactccagaacagagac

SEQ ID NO: 259781 - DNA, 100 bp, Homo sapiens
gcaagatgcggaggctgcctcggcggagcagaggaaccacacgctgatcatggcaaccccgtggccaactggattcacgcccgctccacgaggaagaagc

SEQ ID NO: 259782 - DNA, 82 bp, Homo sapiens
ctcctgggccggccttgatgattcacaacttttagctgtgccaggtgcgtatagcagcaaaattcatcattcatgcccctcc

SEQ ID NO: 259783 - DNA, 95 bp, Homo sapiens
gcgagcgaacgaccaagagggtgttcgactgctagagccgagcgaagcaaatgactgctgtccatgcaggcaacataaacttcaagtgggatcct

SEQ ID NO: 259784 - DNA, 75 bp, Homo sapiens
gtggaattccagttcatgctgcccacatctcatccaaacagtatttagcgtggactacaatgatgaactggatat

SEQ ID NO: 259785 - DNA, 87 bp, Homo sapiens
gccaatgttggtgctggcaaaaagatcctcaccaagacaggggagctgcccaggcagcccaccacccaccctgaggagacagaggag

SEQ ID NO: 259786 - DNA, 80 bp, Homo sapiens
gacccaggagaaattcgccctcaaaggcatttgcacgccaaaggcaaagaagaaaaaatgtccaaatcattaaagaacta

SEQ ID NO: 259787 - DNA, 100 bp, Homo sapiens
gaaggagcaggattaccaaagggtgttcttcaacggtgccaacgtccggcaggtggacgtgcccacgctgaccggagccttcggcatcctggcggcccac

SEQ ID NO: 259788 - DNA, 74 bp, Homo sapiens
ctgggtgaagtgctccgtcgcccttgcctccagccgggcccctcagatgagagctgcacccaggccagcaccag

SEQ ID NO: 259789 - DNA, 99 bp, Homo sapiens
gtttccccctgttgcagggttttgtttatataactcaagttgtttggctaaattcttcagctgctagtctatggggtccttacaaagacatttggcata

SEQ ID NO: 259790 - DNA, 88 bp, Homo sapiens
aatgggaagcaagagaaaaagaacattactgtcttggtcatcatcagatttgaaatatttaaagtggatacaaaactatttcagcaat

SEQ ID NO: 259791 - DNA, 100 bp, Homo sapiens
gggctttatgggcatgtcccctctcttacaagcccatcatgctatggaaaaaatggaagaatttgtttgtaagaatgtctaatttaatagggatatagac

SEQ ID NO: 259792 - DNA, 90 bp, Homo sapiens
gctgctgctgctgctgcttgcccggcccccgcctgcctccgccggctacagcgggaagagcggacccgtcgccatgggccgtgtgatccg

SEQ ID NO: 259793 - DNA, 97 bp, Homo sapiens
cagcagcagcttctacagcaacaacacaaaatcaatttgctccagcaacagatccagatttgcttggaacggtagaagaaatccttccaagcctctc

SEQ ID NO: 259794 - DNA, 75 bp, Homo sapiens
caagctctcgagagtctcacggagacgcagggaaattcaactactgaggaggttacggcacaaaaatgtcatcca

SEQ ID NO: 259795 - DNA, 90 bp, Homo sapiens
cagcagctgtgggagccccgagaacgcctccagcggggatgacacagaagatgccatggacaatattaccaggcagaaccaattctacga

SEQ ID NO: 259796 - DNA, 76 bp, Homo sapiens
cgcaagcccagacaatgccggtggaggaatttgtggctggctggatctctggctggtgggccaccaaaaaagggga

SEQ ID NO: 259797 - DNA, 51 bp, Homo sapiens
cacatcaagtccagggttaagtacagaaggaaaaggccaaagttgttgagc

SEQ ID NO: 259798 - DNA, 113 bp, Homo sapiens
gcgagggctacccgctctttgccgtgacaacaccgttcccccagccgggctggtagtgaagcgcgcagtggcgagccagccagactctgtggatgcagccgagagggcggaga

SEQ ID NO: 259799 - DNA, 100 bp, Homo sapiens
gttcatccgaccctgctaacccagactcacataagaggaaaggatcgccatgtgacacactggcatcaagatatgaagagcattttaagaggtgcagcct

SEQ ID NO: 259800 - DNA, 100 bp, Homo sapiens
ggggaccttacaaacaactgcaacagggccgctggcctagaaatggcctcaaatggaagctgccacccgatcctggtggaggctttgagctaggctagag

SEQ ID NO: 259801 - DNA, 101 bp, Homo sapiens
gcctcccgcgcctcgctcagctccaacatgggcggcgactggcggcgcgatggacctgaccgggctcctgctggacgaagaaggcaccttctccctcgccg

SEQ ID NO: 259802 - DNA, 100 bp, Homo sapiens
attctacaacacatggtggaatgtatccgggaggtcaacgaggtcatccagatgccgtcactgccaccaggagccctgtactatcagccatggtcaaccc

SEQ ID NO: 259803 - DNA, 83 bp, Homo sapiens
aagtcctgaagcggctgtcgctaagcccagccctgcagaggctgggaggcggcagaatgcagccagaggagggcacaggctgg

SEQ ID NO: 259804 - DNA, 100 bp, Homo sapiens
tccattggatttaaaagacagtcctcgtcagcactgactttcagctatggaatcggactcagtggcatttgaggatgtggctataaacttcacctgtgag

SEQ ID NO: 259805 - DNA, 100 bp, Homo sapiens
ccgagaacatctactctttcaactacaccagccagcccgaccaggtcctgggaactccaacaagggagcaaatcagagaaatgaacccaaactacacaga

SEQ ID NO: 259806 - DNA, 73 bp, Homo sapiens
gacgggcagccccggactctcggaagatccatccaaaagctatgtgaaattacgagactttgtgcttgtgaag

SEQ ID NO: 259807 - DNA, 83 bp, Homo sapiens
gtggctctttctgctgggcctgcccttcaccctctacatgattgtcctgggtcacataatgccagctgagcgtaaaaagccag

SEQ ID NO: 259808 - DNA, 75 bp, Homo sapiens
ccctggcacctggcgcccagcgcgcccgtggccgctgccgcctccgccccaggtggaagatggtatcttgaagtt

SEQ ID NO: 259809 - DNA, 75 bp, Homo sapiens
acctgaaaaacagtctgaaaccagtatccatcaatacttggtacaagaaaattccccaggacacagagctggttt

SEQ ID NO: 259810 - DNA, 100 bp, Homo sapiens
ttttatgtcagtgccgagcaagatggtcatccagactcagagctctctctacagagaggaaattctccactgtgcacacccacctttggaaagctctgac

SEQ ID NO: 259811 - DNA, 100 bp, Homo sapiens
tgtagtcacaggagctgtagagaggaccccggtacatctgaaagccgggaaatgggtgcaaatagctatgggcaacttggcctcggccataaggaagatg

SEQ ID NO: 259812 - DNA, 100 bp, Homo sapiens
tcagaattgtcagatttcgctttgatgaatcaggtcccgaaagtgctaaaaagaatgtttctccatcccagagagatgaagtaattcaatggctggccaa

SEQ ID NO: 259813 - DNA, 100 bp, Homo sapiens
ccgaccccaaaagagtattcttggatcttgcacaggaaggaattaaaggtattatctaagtaccgcagtggaaaactgcccaaggcatttaagatcatcc

SEQ ID NO: 259814 - DNA, 75 bp, Homo sapiens
gagaaggagaaggcctcctggagcagcctctccatggatgagaaagtcgagtggatcaacaagcgtggggccaag

SEQ ID NO: 259815 - DNA, 98 bp, Homo sapiens
tgatcttcgccaaactgtggagcctcttctgtaaccaaggtgctggagaatctggtaaaagcaccattgtgaagcagatgaggatcctgcatgttaat

SEQ ID NO: 259816 - DNA, 87 bp, Homo sapiens
cccgcttccatgcggttcgggtccaagatgatgccgagctcctgaaattattcttgggttaccattttgtgaagctattgatatgtg

SEQ ID NO: 259817 - DNA, 88 bp, Homo sapiens
ccttttggggctctcactctggaggatggggtggatgggaggagccaaaaacctgtatatcatctccgtgaaggggatcaagggacgg

SEQ ID NO: 259818 - DNA, 50 bp, Homo sapiens
gcagtgccttgtaactcacaatgggttgcaaattcagaggctatgatttt

SEQ ID NO: 259819 - DNA, 98 bp, Homo sapiens
ctatggattaaattttttgctgatggagagctggaatctatgggattttcagctcgatacaatttcacacctgatgctttgctgactaatgttgacca

SEQ ID NO: 259820 - DNA, 49 bp, Homo sapiens
cagcatgagcgaaagctacacgctggagatggtgatggaatttcctgat

SEQ ID NO: 259821 - DNA, 75 bp, Homo sapiens
gggcagacggattcatttagagctgcggaacaggacgccctctgatggaagatggagagttggaagaaggtgaat

SEQ ID NO: 259822 - DNA, 100 bp, Homo sapiens
tggcagcattcagccagtattttagttaacaagcacaagccctggctggagcccacctaccacggcatagtcacagagaacgacaacaccgtgctcctcg

SEQ ID NO: 259823 - DNA, 100 bp, Homo sapiens
gctggagaagggagactacaaggacagcagcgactttggggcccgtcaccctcagatgatagaagatgttttgggagaagggtcagtctctgccagtcgg

SEQ ID NO: 259824 - DNA, 105 bp, Homo sapiens
atttaagagagctctggacaagctggaatgcatccaagagaatccctcaacatgctgatgtcatgtggcctgtgttttggaccgtggttcgtacctatgctcctt

SEQ ID NO: 259825 - DNA, 51 bp, Homo sapiens
caggatctctcctggacaaatcaatcagaaaggcctaaagaatgtatttga

SEQ ID NO: 259826 - DNA, 83 bp, Homo sapiens
cgctcaacggcgagccagagctggacctcaccagcaagggggaaatttgcagtggtgagaaaatgtataaagaaagattctgg

SEQ ID NO: 259827 - DNA, 75 bp, Homo sapiens
gtgtcactcatgtcattcctgtggtcctggatgcctcatcccttagtttcaacaccagattgaaatggtttgcca

SEQ ID NO: 259828 - DNA, 75 bp, Homo sapiens
tgacggtggaggttcgcggctctaacggggctttctacaagctcggtcaaggagtgtgatgactggcgagcagat

SEQ ID NO: 259829 - DNA, 83 bp, Homo sapiens
ccaagctacagattccaatacctcattccctaagacttcaccatgagatgaggaagatggagagaatgcccacccatatagaa

SEQ ID NO: 259830 - DNA, 90 bp, Homo sapiens
gaacccccaatgctgaccaaggaggagcctgttccagaactgctggaagctgaggacctcagcatggccctgccctcagggcaggtctgc

SEQ ID NO: 259831 - DNA, 100 bp, Homo sapiens
tacggagcataggaggaaaattcatcatctgtccaaaagaatatccgctaaggatgccttagcccacccctacctagatgaagggcgactacgatatcac

SEQ ID NO: 259832 - DNA, 101 bp, Homo sapiens
ggaaattcatccagagggtccaggccatgaagagtcctgaccacaatggggaggacaacttcgcccgggacttcatgttacatgctatgggaaaacttcct

SEQ ID NO: 259833 - DNA, 101 bp, Homo sapiens
gaaggacaaagagatcatagccgagtatgaaagtcaagtcaaaggtactctttcatctactggacagagttcgagagtcctctaccactgcagacaaagaa

SEQ ID NO: 259834 - DNA, 100 bp, Homo sapiens
gtccggccggggacccggcccgggaccggcggcgcgcggcggccgaggccagatgaagatgtgtgtgtctttaagtgctcagtgtcccgagagacagagt

SEQ ID NO: 259835 - DNA, 96 bp, Homo sapiens
gtttttaccaagagatgataatgaaaaaacgtcttgaagagtttcaacttatgagagatgcatccaagaagtcagattcaaatccgctgactgaaa

SEQ ID NO: 259836 - DNA, 133 bp, Homo sapiens
agaagagccaaggaagagaaacttcagcaggcgatagcaatgcacagccaatttcatgctccactatagcatcaattcctgaagattgccaagcccctctccagcctcactccactgattgctgcagctaagg

SEQ ID NO: 259837 - DNA, 100 bp, Homo sapiens
cggagagccgcccgccgaggatgcgacgcaccgcaggtgccctacgagacgctgaacaaacgctttcgcgccgctcagaagaacattgaccgggagacca

SEQ ID NO: 259838 - DNA, 100 bp, Homo sapiens
tggcaaagctccgagcccaggagtatctgactgtcttctctcagatgattgcatttcatgatccagagctgagtaatcatctcaatgagattggtttcat

SEQ ID NO: 259839 - DNA, 98 bp, Homo sapiens
tgatcacgcagctggctggcttcagtggaccagtgagtggtgtcattgagcaaacacgaagtcgggctcatccaaggatgagattttgccagagaaag

SEQ ID NO: 259840 - DNA, 100 bp, Homo sapiens
ctctctggaacagacatctctaatgagatccatcatgttacacaaaatggaggactatataaaagaccgtttaatgaagcttttgaagaaacaccaatgc

SEQ ID NO: 259841 - DNA, 82 bp, Homo sapiens
cgcaactggtcttggtagcggaggcacccgaatgctgcccgggtgaggtaagaatgattgatgttggctgatattggagtgc

SEQ ID NO: 259842 - DNA, 100 bp, Homo sapiens
tcaaaaggggggacatcctcaagatcatccaagcctagaaaacatggaacagatagagaaatttcaggaaaaggcttatgtggaattccaagattatata

SEQ ID NO: 259843 - DNA, 75 bp, Homo sapiens
gagatggaacccgaagaagaaaggattcgttacagccagagattgggagtgtttgccattgtggagatgggggac

SEQ ID NO: 259844 - DNA, 75 bp, Homo sapiens
gacagcagctctccacagtgagagtcacacagagagaggttgctgctaaaaccttgcctttttataaggactact

SEQ ID NO: 259845 - DNA, 74 bp, Homo sapiens
actgcgctagaccgaggacagcaacaagtgttcaaaggattgggaaggtggcggcggcggtgcctgtcatcatc

SEQ ID NO: 259846 - DNA, 110 bp, Homo sapiens
tgggcggcggaaaatagcctttgccatcactgccattaagggagcgctgacccagctgatccagctctatcatcgcttccaccgggtgctgtcccagccgcagctccgag

SEQ ID NO: 259847 - DNA, 82 bp, Homo sapiens
tcgccacggtccgcctgccattctgcggccacaaaaacatctgctcgctagccacggcgtgatggtgggcatgggtcagaag

SEQ ID NO: 259848 - DNA, 100 bp, Homo sapiens
cagtgaagagcccaaggtcaaggagatggtacggatcttaaggactgtgccattcctgccgctgctagtggaaatcatgacctatgtaacatggaaactg

SEQ ID NO: 259849 - DNA, 88 bp, Homo sapiens
gtctttgcagcgtagcccgagtcggtcagcgccggaggctactgcagcactggggtgtcagttgttggtccgacccagaacgcttcag

SEQ ID NO: 259850 - DNA, 100 bp, Homo sapiens
acatttttggagaaagccagcctaatccaaagactgtggaacttttaagtggagtggtggatcagaccaaagatggacaggagaatatgccacagatgaa

SEQ ID NO: 259851 - DNA, 100 bp, Homo sapiens
agctggttggccctgtgatccctcaagactggtccacggagtgtatgaccacaaacagccatcaaggatcaaaaccattcaagtgcaagatatgccattt

SEQ ID NO: 259852 - DNA, 90 bp, Homo sapiens
gttctatcttcccatcataaaaaagtgaagacattcagtgaagcttgcctgatggtaaggaaaccagccctagaacttctgcattacctg

SEQ ID NO: 259853 - DNA, 74 bp, Homo sapiens
gcacagtctcagccccatggggtatatccaccctcaagtgtggatgatccagattccagtaccagtacattagg

SEQ ID NO: 259854 - DNA, 75 bp, Homo sapiens
tttctgcatctcccacttccagagcagcaaattcaacacccaacagcttccttaatagcaaaggtagcaacagcc

SEQ ID NO: 259855 - DNA, 114 bp, Homo sapiens
actgagtatgtcggaggagagcgacatggacaaagccatcaagggtcaactgctatgatgtgtttggagcccagtcaccctttggtggctacaagatgtcggggagtggccggg

SEQ ID NO: 259856 - DNA, 51 bp, Homo sapiens
cggatctggtaacatggcaaaagatgttgcccgaagctcagcagagagtcg

SEQ ID NO: 259857 - DNA, 120 bp, Homo sapiens
ggtggaggtctgcgttgctcttgcttttcctcgctggggtgtacggacccagatgatgtggtaccagttggccaaagaagagcctggtgttggtgcatgtgctttggactagcatttatg

SEQ ID NO: 259858 - DNA, 51 bp, Homo sapiens
atcccactgatgaggatcagcccatggcagctgaaaaagttggatgaagat

SEQ ID NO: 259859 - DNA, 88 bp, Homo sapiens
ggcaacctcatcgccttcatcatctacgagtttgtcctgggagattgtatggagacatgacaatggatgaagtccgagaatttgaacg

SEQ ID NO: 259860 - DNA, 100 bp, Homo sapiens
gaaaaacaaagcagtcaatggagcagagaatgatccctttgttagaccaaatttaccacaactgaaatctactttcttcaatgtgttaaccaatagtcag

SEQ ID NO: 259861 - DNA, 100 bp, Homo sapiens
ctggggaggtgccagggctgaaccaggtgtcatggagaaactccagctgggcccagagattctgcagcgggaaaatccaaggcttatttatgccaggctg

SEQ ID NO: 259862 - DNA, 83 bp, Homo sapiens
caaaaatgacacactgcattgtttaaaggaactgtggctgcaccatctgtcttcatcttcccgccatctgatgagcagttgaa

SEQ ID NO: 259863 - DNA, 100 bp, Homo sapiens
cagtgacgaagagaactgtctcctggtgaccgagcacccgcctccgggcatcttcaactctcgtcgtcaaggtgcacatgaatgataacagcacaaagtc

SEQ ID NO: 259864 - DNA, 97 bp, Homo sapiens
atttgaatctattcgtcattcaattgctggaataattaggtctccaaaatctgcactgggctcttcagcagatcgtgggggtcctccctgcaagccc

SEQ ID NO: 259865 - DNA, 91 bp, Homo sapiens
cgcctctgtgctcgtgagtccagggatctaaggtgctggagaatctggtaaaagcaccattgtgaagcagatgaggatcctgcatgttaat

SEQ ID NO: 259866 - DNA, 101 bp, Homo sapiens
gcgcctagatggctttggtcacggtccagcggtcacctacccccagcaccacctccagcccctgcgcctcgtttcagacccaaagtttacgcctatcagac

SEQ ID NO: 259867 - DNA, 75 bp, Homo sapiens
tggaagaagatggaaaaaacttgtttaatgggcatttgtctggccttcccttttactgctggctgggaaggagga

SEQ ID NO: 259868 - DNA, 82 bp, Homo sapiens
ggaagaggaaaggagacggatagaagaagaaaggcttcggttggagcagcaaaagtccagaggtgtccttctaaagctggta

SEQ ID NO: 259869 - DNA, 144 bp, Homo sapiens
ggctgaaggaagatggcggacggcgtggaccacatagacatttacgcggatgtcggcgaagagttcaaccaggtaaccctgtatcatttgctaaagctgtttcaatcagacaccaatgcaatgctggggaaaaagacagtggtt

SEQ ID NO: 259870 - DNA, 82 bp, Homo sapiens
ccgaagccccctgcaggaactctacaacccaatccaggtatggggaggatgtcaggcaggaccagcagcagctcctggaggg

SEQ ID NO: 259871 - DNA, 90 bp, Homo sapiens
acgctcattggccggaggaagctcaccttcgacgaggaagcttataaaaatgtgatgtagaagatctttatgaaccggtgtcagtaccct

SEQ ID NO: 259872 - DNA, 96 bp, Homo sapiens
ccggtgtgtgggccagcggagctccgttcagaaatgtccagaaatgacaaagaaccgttttttgtgaagtttttaaagtcttcagacaattccaaa

SEQ ID NO: 259873 - DNA, 90 bp, Homo sapiens
ccgcttcaaccccaggggaccagaggaactcagccctgattgcggaacttagtgatttggcccgtgaccctccagcacaatgttctgcag

SEQ ID NO: 259874 - DNA, 82 bp, Homo sapiens
ctgcccttcaccgcgggcgccaatggggagcagaaggactcggacacagatgatcaagcggtgctgattcacgagagtggaa

SEQ ID NO: 259875 - DNA, 123 bp, Homo sapiens
acaggcagacggactcggtattggagctgaaggcggcggcagagaacttgccggtgccagctgagctggtggagctgtctaaggctcaagatatagaagcaggagatggcaccacatcagtag

SEQ ID NO: 259876 - DNA, 99 bp, Homo sapiens
atcctggctgtgtgaccccaatctgcgctcctcagaccaccggcaggtgaacagcctgatgcagaccgaggagtgcccacctatgctagacgccacaca

SEQ ID NO: 259877 - DNA, 98 bp, Homo sapiens
attcctcagctacgaggaggcgctgaggagaggtgcgctacaaggaggagtttgagaagaacaagggcaaaggtttcagcgtagtggcagacacgccc

SEQ ID NO: 259878 - DNA, 90 bp, Homo sapiens
cttgcagctgcctacaaattcaagagtgaccagggatgcccagcctcagcagaagccccaggggacagtggagagcggtcagaaggggag

SEQ ID NO: 259879 - DNA, 101 bp, Homo sapiens
cgggccctggctcaggaacagggacagcacctcatcccctggatgggggaccacaagatcctcatcgacaggggacggcaaaacagaacagaaaggcggag

SEQ ID NO: 259880 - DNA, 100 bp, Homo sapiens
gcccgagtggcggacgggctcccgctggccgcctcgatgcaggaggacgaacagttggtagctggcagtgttgtgatggcttttgaagaagtatgcccgg

SEQ ID NO: 259881 - DNA, 85 bp, Homo sapiens
caggtcccggaaggtccttagggaggaccccagacaccggagactgggaaatgaaatgaccatggttgacacagagatgccattc

SEQ ID NO: 259882 - DNA, 101 bp, Homo sapiens
tccccagagaccctatgcaacgggcagctgggctgcagtgaccccgctttcctcacgcccagcatcaagatggtgctcatgtggaccagtggtgacgcctt

SEQ ID NO: 259883 - DNA, 122 bp, Homo sapiens
cagctgcagaaaattttctagttttggggagacaattacaaacatgttttatcaatgcagctaagaactgtcaagtaatccacctctggctaccatccttattcctcctcatgctcggattc

SEQ ID NO: 259884 - DNA, 88 bp, Homo sapiens
aacggcggcctccaggcctcaggccccctcaccatcctagaggtcaagatcagctctggctagggaagatcagttttcctgccatcca

SEQ ID NO: 259885 - DNA, 51 bp, Homo sapiens
tccttcagtggtgttggtagtaaaatgagatggggtcttgctatgttgccc

SEQ ID NO: 259886 - DNA, 75 bp, Homo sapiens
tcaagatgatttatggtaataaggaatctctgaaggaagaagatgaatcagatgatgataatatgtaacatttac

SEQ ID NO: 259887 - DNA, 80 bp, Homo sapiens
agcatcacaatataatattaggggtgttacgtataggctcactcaaggttgtaaacatgttaaaggcatcctgttatatg

SEQ ID NO: 259888 - DNA, 100 bp, Homo sapiens
tttatgagaccctgggcaagaagacgtacaagagggagctgcaggccctgcagggcgagggcgaggaaattgatggaaaatccctgctattgatgacaag

SEQ ID NO: 259889 - DNA, 100 bp, Homo sapiens
gagctgtagccactgtagcagcaagaagatgcttataagatcaggatccgtattgatgatgagcctgccaatctggacattttggatacagctggacagg

SEQ ID NO: 259890 - DNA, 51 bp, Homo sapiens
tggaaagcatgagactatatgctagagcccaagtttacaatagagaggatt

SEQ ID NO: 259891 - DNA, 75 bp, Homo sapiens
gaagtgcgcaaacttgacactcaccctgaccggtggaatatgtgatcaagtgtgacatgtcagctctgcagaaga

SEQ ID NO: 259892 - DNA, 75 bp, Homo sapiens
aactgcttggcacctcttcaataggtgacattcaatgagtatttataacagcaatgatgtagcagtatcgtttcc

SEQ ID NO: 259893 - DNA, 75 bp, Homo sapiens
gaagccgggtggggcaggctggaaggaagacgaacctacgaagcagagagacgggatttcgccatgttgcccagg

SEQ ID NO: 259894 - DNA, 100 bp, Homo sapiens
gccatgtccatggaggaccccttctttgtggtgaaagggaattgaaagatgttggccatcgtgatcagatggctgcagctagaggaatcctgcagaagaa

SEQ ID NO: 259895 - DNA, 101 bp, Homo sapiens
accttctctctttcgctctttggactaatgggagttgcttttggaatgaatttggaatcttcccttgaagagaaaattttcagagaatccacatgtttacc

SEQ ID NO: 259896 - DNA, 100 bp, Homo sapiens
tccagtcccgggcgggccgtcgcgggagagtattgcctaagtgtaatcttgaacatgggcggtgctgtgagtgctggtgaagacaatgatgagctgatag

SEQ ID NO: 259897 - DNA, 75 bp, Homo sapiens
gacctactggattatgggcctttcagagatgtgcctgcctatagtcagtctattatcctcccagtccacaacgct

SEQ ID NO: 259898 - DNA, 100 bp, Homo sapiens
gtccagcatcaaccaggaggcgttggtgctcacggccaaggccacggactcacaccacccggcaagaactgctcactacggctccctgccccagaagtca

SEQ ID NO: 259899 - DNA, 97 bp, Homo sapiens
taccctgagcaccagcatcgttgtagagaggaggtccgcgagatcctaggggaccaggacttcttccagtgttgtggaagctgatcgaggaagccta

SEQ ID NO: 259900 - DNA, 82 bp, Homo sapiens
aggaacgtttgggttttcctagctgatcttgcatctttaatggataaaacatttgagagaaagttgcctgttagttctttaa

SEQ ID NO: 259901 - DNA, 74 bp, Homo sapiens
ggagaccatagctgcacagccaggttattattcttggcgaaattcaaaggatggctcctggttcatccagtcgc

SEQ ID NO: 259902 - DNA, 75 bp, Homo sapiens
gggatattatcgatgagttcatctaccaggtcactcagctctatgtgccagcatccagacatgtgtggaggttcc

SEQ ID NO: 259903 - DNA, 51 bp, Homo sapiens
acccagacaggtggcgacggcagaggagtacgtcagcctgtcatatgcatc

SEQ ID NO: 259904 - DNA, 101 bp, Homo sapiens
ccacaatttccatcaaaaagtgattaagcagagaatggagaagaaggttgattccagagagacaagagagacacctccaacttcgacaaagagttcaccag

SEQ ID NO: 259905 - DNA, 100 bp, Homo sapiens
agagatagtaacctacattcgtctactgataaagaacaagccgaaaggaagccacgtggacacaggttgaacatcacggcggagaacgactgccggcggc

SEQ ID NO: 259906 - DNA, 82 bp, Homo sapiens
aaagcatgggattttttaccaaggaagaatggttaaagggaatgacttcattacaaaagtgtggactatgggccagtttttg

SEQ ID NO: 259907 - DNA, 50 bp, Homo sapiens
cctgaacctggaagttgtgctttttaagtgcctccggagccagcgtggtg

SEQ ID NO: 259908 - DNA, 50 bp, Homo sapiens
cacttggctgctcttctgaagaaccaaggctcgggttcatgacgctctcg

SEQ ID NO: 259909 - DNA, 88 bp, Homo sapiens
cggcaggtggtccgcggcttctcggagcttgcatgtactggcattgaaaacattgacgaagctattacattgcttgaacaaaataatt

SEQ ID NO: 259910 - DNA, 100 bp, Homo sapiens
gaagatgcttcatctgcccctgcccagatccggaagaacggtgaatttcccccgcagaatgccgaactggggaggaggcaagaaatgtggggtgtgtcag

SEQ ID NO: 259911 - DNA, 76 bp, Homo sapiens
aggtgaagtccacaatcaagttccaaatgaagaaggtaccgaaagcacagtaatcactggtgtcgatattgtcatg

SEQ ID NO: 259912 - DNA, 90 bp, Homo sapiens
ctacgccgtggacttccagcgcaggccaggagtggtggctcacacctgtaatcccagctctgggaggccaaggccagtggattgcttgag

SEQ ID NO: 259913 - DNA, 98 bp, Homo sapiens
ggtggttggcaggaacagcactgggtacaggttggagatgcttgatgctgcaaagaacaagatgcgagtgaagatcagctatctaatgattgccctga

SEQ ID NO: 259914 - DNA, 100 bp, Homo sapiens
ccgacgaggaacgaatgggacaagatcccgtccatgaatcagctgacatgggctcattgctccttctccaagccctctgaggacatcaaaagcgtggacg

SEQ ID NO: 259915 - DNA, 100 bp, Homo sapiens
aggaaatcatgtcaagcgaagccttgaaaaagctgccctgagacggtgtcccgccgaaagggccggtcactccgcgcaagtttgggttcctgttttagaa

SEQ ID NO: 259916 - DNA, 74 bp, Homo sapiens
tggcatcgtctcccgagcctgctcctgccgccgaggcttatcaggagggcagacttcaaaagctactaaaaatg

SEQ ID NO: 259917 - DNA, 100 bp, Homo sapiens
gtgttccttccgctagtgatcctttgcaccctgcttggagacggacttgcttccgaacatccagtcatggataaaaatgagctggttcagaaggccaaac

SEQ ID NO: 259918 - DNA, 75 bp, Homo sapiens
cacagcggcagctccagcccggcccggcagcgacatggaagatccaggtgattgagaatgatagagccagcagag

SEQ ID NO: 259919 - DNA, 85 bp, Homo sapiens
gaaacaaggtcgtcggctggcggagcggcttatctcactgatgaaaaggcctccaggtttttcacctttccgatcatcacgaata

SEQ ID NO: 259920 - DNA, 89 bp, Homo sapiens
gagaacgaacatcttctggacctttgtccaggtagtgggcagcagtcagtgacaggtgtaacctctgtggatgacagcaacagttactg

SEQ ID NO: 259921 - DNA, 75 bp, Homo sapiens
tgccgctcatcgtgtggctgctggtgaaaagcttctccgagaggacagaactgtaccgctctctttttggccagc

SEQ ID NO: 259922 - DNA, 82 bp, Homo sapiens
tgaagatcagcatccgccagctcaagtggaaggagggctatctgaagcagtgccggaagagaagggacatgttcagtgacga

SEQ ID NO: 259923 - DNA, 95 bp, Homo sapiens
ccatcacctatcacagcagcatccgctctctggaggtaaatgccatctgctatggggccaagattatgcttccaggtgttcttcgatatgaggac

SEQ ID NO: 259924 - DNA, 76 bp, Homo sapiens
gtatgccaaagcagcagccttctcgacagccttttactgtgaacagagagacaagagagacacctccaacttcgac

SEQ ID NO: 259925 - DNA, 90 bp, Homo sapiens
gggcaaggagccacctcatcttatgtccatcttcaagggacgcatggtggtctaccagtgagaaagatcagtctaaagaaaaggagaaga

SEQ ID NO: 259926 - DNA, 82 bp, Homo sapiens
tccccgacccggccatgcgcggcctcgggctctggctgctgggcgcgatgatgctgcctgaataccctctaccatctgcttt

SEQ ID NO: 259927 - DNA, 75 bp, Homo sapiens
agacctgcagggttcgtggataataaactcaagcagcgagtcatccaggatgaagatttgataaagtggaaggca

SEQ ID NO: 259928 - DNA, 105 bp, Homo sapiens
ctcagtcagcatcagcatggggcatgcagcttcttggacacttaatgattgttggcaagaaatgtgctgctgatctgggcctgaataagggttatcgaatggtgg

SEQ ID NO: 259929 - DNA, 100 bp, Homo sapiens
ctggcctatcactacgcgcgtctgggctcccacctggtgctcactgcccacactgaggctctcctgcagaagatgaagacttccggggcaggcgtcagga

SEQ ID NO: 259930 - DNA, 83 bp, Homo sapiens
tcccttctttcagtgaacttatggaaggctcacgaggcccagggaatcctctggaccatcagattaccaatgaaagaggagaa

SEQ ID NO: 259931 - DNA, 100 bp, Homo sapiens
tttaggaaacacctctacctcctgcgaggcctcccgggctccgggaaaactacactggccaggaagttctactacatcaccctgctacgagaccccgtgt

SEQ ID NO: 259932 - DNA, 100 bp, Homo sapiens
caagaagcagttccataaagccactcagtagagacaggatttcgccatgttgaccaggctggtcttgaactcttggcctccagcagttcacccccctcgg

SEQ ID NO: 259933 - DNA, 88 bp, Homo sapiens
tattttggaaagcagtttttaagacaaatgaaagctcaagaagtggagctggctttggaagaagtagaaaaagctggagaagaacaag

SEQ ID NO: 259934 - DNA, 75 bp, Homo sapiens
cttcctacgtgaaatcactgtggcaaccggggaggagaaatgtgatgctcagagggtgtggctgacaagctccag

SEQ ID NO: 259935 - DNA, 98 bp, Homo sapiens
gacaggagagcctgggcaagactggagaggtgtgaagaggtacagctgcagcccccagaggtctggtcccctgacccgtgccaaccccatagccatga

SEQ ID NO: 259936 - DNA, 83 bp, Homo sapiens
caccaggcagcccccaaatcccggcccagtacgaggatgtcgtccaggaaagattgtgcagatgactgaagcagaagttcgag

SEQ ID NO: 259937 - DNA, 100 bp, Homo sapiens
actcttcgttcgattattagctttagtgaaatgggctaataatgctggcaaagtggaaaaatgtgcgggatatctgcattacctccacctcctccacctc

SEQ ID NO: 259938 - DNA, 100 bp, Homo sapiens
gtcagtgtcctcaccatgcccttctgcttcaaacagactgcaagtggcaacgtggaagcaaaagtagtatgcttttatagacgacgtgatatttccaaca

SEQ ID NO: 259939 - DNA, 100 bp, Homo sapiens
cggctcgacaagttcaagcagctgcttgccggccccaacacggaccttgattcatgttacatgtaaagctgtcctcatttgtgactatggacctatggag

SEQ ID NO: 259940 - DNA, 88 bp, Homo sapiens
caactcctactccttagctttcctggcagggaccctgatgcttggtgtgacctgagtaaatttgacctccctgaggaaccatctgcag

SEQ ID NO: 259941 - DNA, 100 bp, Homo sapiens
ctatggcagcagcgtggcctccgccaccgtgcacatccgaatgggttctactgggacttcaccatgctgctgttcatggtgggaaacctcatcatcatcc

SEQ ID NO: 259942 - DNA, 75 bp, Homo sapiens
agaatacagagatatggaatcagggcctgccttaagtgtgaaagtaatgactgatgaaagtggaaaatccaaagg

SEQ ID NO: 259943 - DNA, 112 bp, Homo sapiens
gctgttgttacctgggaaccctggaggggccttcctcatccgggagagccagaccaggagaggttcctgggtggagctacccatgaacagcagcaatggcaatgataatggc

SEQ ID NO: 259944 - DNA, 75 bp, Homo sapiens
tcagtagatgccagtccctcaaccttgaactttccagacgcagaactcacacacacatccctaggttaatacctg

SEQ ID NO: 259945 - DNA, 100 bp, Homo sapiens
ccggtacgaaatggaagatgggaaagttattgaacggctgggccagagcgtggttgctgaccagttgaaaggtaacgatgactcggacatagacatccag

SEQ ID NO: 259946 - DNA, 100 bp, Homo sapiens
ctgaaggggacagtgtgggagaatccgtccatgggaaaccttcggtggtgtacagatttttcacaagacttggacaggtgctgggtaggccaggtttcag

SEQ ID NO: 259947 - DNA, 75 bp, Homo sapiens
aaaatctctggacaaagaaatttctgaagatcgccacatcacagaatcgtatctatctcacagctgacaaccttg

SEQ ID NO: 259948 - DNA, 75 bp, Homo sapiens
gcacagccagcaccgcacgccctgcaagggagatggagttttaacattgaatgcggagaacactaattatgccta

SEQ ID NO: 259949 - DNA, 75 bp, Homo sapiens
ctccaatgggcctttccagcccgtggtccttctccatattcgagaattgatgaattgcaagtttgtgccccatag

SEQ ID NO: 259950 - DNA, 87 bp, Homo sapiens
gaagaagaagagcatgatcggcatgtccaccaaggcaggattttttatcaagcagaaatgcatcgaacaacgagaatcaagatcact

SEQ ID NO: 259951 - DNA, 100 bp, Homo sapiens
ggcggcattcccaccaactacaaggggcaggtcctggtgcttgatggtcgaggccatctcctgggccgcctggcggccatcgtggctaaacaggtactgc

SEQ ID NO: 259952 - DNA, 75 bp, Homo sapiens
aaattatccgactcctcggaccagcaggacagggagttgaccacatttggccatttcccagaagggccccacccc

SEQ ID NO: 259953 - DNA, 98 bp, Homo sapiens
aaccataaaaaatgtggagcccaagcaggaactgaaggatgaaaactttcggaagagaaagttgcctgtggtaagttcagttgttaaagtaaaaaaat

SEQ ID NO: 259954 - DNA, 90 bp, Homo sapiens
ctaggcgaagatccggactctgggtgttttgctaccgtgaccgtttagatctatccatactaatggaaatgtaactggaactgactctga

SEQ ID NO: 259955 - DNA, 82 bp, Homo sapiens
aacggtggtggcgtgggcgacattctccgcaagccctccaaagatccattttgcagactctgatcacagtgaaacgttccat

SEQ ID NO: 259956 - DNA, 83 bp, Homo sapiens
cggcggagggaccaaggtggagatcaaacgtcaagtctggcaccatctttgacaacttcctcatcaccaacgatgaggcatac

SEQ ID NO: 259957 - DNA, 82 bp, Homo sapiens
tcctgccctctcgctttccctctcgcgtctctggctgcaggcccctggccccaacatggcccgtcgctctcagagctcctcg

SEQ ID NO: 259958 - DNA, 83 bp, Homo sapiens
ctcaacttattcccttcaattcaagtaacaggtgatgatgaacagtctacacagatggctgcaagttgggaagatgataaagt

SEQ ID NO: 259959 - DNA, 100 bp, Homo sapiens
ggcaacatcaggtgactgtcccagaagtgaatcgcaggtgagtgccgttttgaacggcatgttagaccagagcttcagggagcgagcaaaccagaaacac

SEQ ID NO: 259960 - DNA, 100 bp, Homo sapiens
tacaaagacatttcgagaattttgtggacctgctgatcctcatatttccttcacaaacagaaaatgaatgaaaataaagatactgattcaaagaaaagtg

SEQ ID NO: 259961 - DNA, 100 bp, Homo sapiens
cgggaggctggcgctgcgccgggccccgggccccgatggccccgaccgcgtgctggagctcttcgacccacccaagaatttagcttgggttaaatcatat

SEQ ID NO: 259962 - DNA, 51 bp, Homo sapiens
cagcctcctgagtagctggtattacaggtagatcatggcaaccatagaaga

SEQ ID NO: 259963 - DNA, 75 bp, Homo sapiens
ttttggtcttctgtcaaaaacacagggatgagtgccggtggtggtgtgcacattgagccccggtatagacagttc

SEQ ID NO: 259964 - DNA, 100 bp, Homo sapiens
tatcaaacttatttttgtgatattctccagcatatcttttctgttgtgacagacacttcacatactgctggctatacctccctttgaatttgctttcaaa

SEQ ID NO: 259965 - DNA, 48 bp, Homo sapiens
ccagagctgaggactgcctgtttgcagtaactctcaggagccttctcc

SEQ ID NO: 259966 - DNA, 110 bp, Homo sapiens
aaaggaagcatgacaatttcccacataaccaaagaagagaagggaaggatgttaattcatcttcacccgtgatgttggcctttaaatattctgaaaaagagttccacgtc

SEQ ID NO: 259967 - DNA, 83 bp, Homo sapiens
ctgtctgcctgtgtccctgaccatggctccctgcagtaccctttaacgtggcttgaacctggcatctgtagcaagactcagag

SEQ ID NO: 259968 - DNA, 98 bp, Homo sapiens
cggaggaaactaacctcaacctctgccatcacaaggggtttgtaccagttgctggagccccgaatgattgttcgttgcaggaaacaagatttccctct

SEQ ID NO: 259969 - DNA, 101 bp, Homo sapiens
gcgtggtagcagaggagcttgaggctgatgaccatggttatggtgtttcttatatcttcatgggggatggcatgatcaccttccacatctccagcaaaaaa

SEQ ID NO: 259970 - DNA, 74 bp, Homo sapiens
gcgccggggccagcggagccggagccgccgggacatggacctgcctagagctggaacgttacctccagagcgag

SEQ ID NO: 259971 - DNA, 90 bp, Homo sapiens
attttgaaatatgattaaactcctgatgctgcagcagaggctaagaatattaatggccagatctaggagcaatttacagcaatgagggat

SEQ ID NO: 259972 - DNA, 75 bp, Homo sapiens
gcagccgcagcgacggcggcgacagcagatataattgaccctgcaatcctgcgcccgggccgcctggacaaaaca

SEQ ID NO: 259973 - DNA, 80 bp, Homo sapiens
cctccctgcgactcctggaccaccgggcgctggtctgctcccagccggtgtccctggccagtgtccttccacctgtccac

SEQ ID NO: 259974 - DNA, 100 bp, Homo sapiens
tcttcactccctgtgccttcctttgttggtaccgacccatctataaggcctttagaagacttggtggcaaattttttcccaaagaagttattagaacttg

SEQ ID NO: 259975 - DNA, 87 bp, Homo sapiens
gcggaaaatgatccagtcacagaggactactgagcccagccaggctgtatgccattgctgccaaagaaaaagatattcaagaggagt

SEQ ID NO: 259976 - DNA, 100 bp, Homo sapiens
cacggccgggagaagcatgggaaggaggccgagccgggatctcaggtcctcgggggcggcggccacgccaaggacggtgtacagctgcagctatcaaggc

SEQ ID NO: 259977 - DNA, 100 bp, Homo sapiens
aaaattaaacagtcggtgggaaacaaaagcatgtcctttccaactggaaagtcagacagaaagtggtggagagagagctggatgctcttttggaacagca

SEQ ID NO: 259978 - DNA, 99 bp, Homo sapiens
ccttcttgtgtatctggagaaaatagaggctttcagtccagtgtaaagctgttggagcgcgggagcaaaggtaaagaatgatgtaatgcgctggctgct

SEQ ID NO: 259979 - DNA, 100 bp, Homo sapiens
atcatgaaggaacacatagcaccaagagaggccatgctaaatctcgccctgtcagaggtatccgttacagcactgatgtgagtgtagatgaagtaaaagc

SEQ ID NO: 259980 - DNA, 101 bp, Homo sapiens
tcgccttgtatctcaacaccctgagtgcggatttctgctatgatgacagagctttttagatgaggaatttcctcactatgattccctgtcctgcgcagatg

SEQ ID NO: 259981 - DNA, 100 bp, Homo sapiens
gccctttccaaaccagacccctgtgtcatcctcaagatgcagtctcatgggcagtggtttgagattcgatgggaactttaataccaatgtgtctagaaca

SEQ ID NO: 259982 - DNA, 100 bp, Homo sapiens
tattgttggcctcctctatcgtctactgacagaggatgctgaaaacgccattcaacagatgggtggccagtggcttggtggaagacaaatcagaactaac

SEQ ID NO: 259983 - DNA, 100 bp, Homo sapiens
ccagaaggctagaagaatcagacgtgctccaggaggccagaaggaaatacgtggcttcccacacttctgactcggacgttccttccggtgtcactgaggt

SEQ ID NO: 259984 - DNA, 99 bp, Homo sapiens
accagctgctcttcacacagggttctggggaaaacaaggaagaattctgcttggtcagaatcgtgatggcattgtgttcagcactgatgactattttca

SEQ ID NO: 259985 - DNA, 75 bp, Homo sapiens
ccaaggcctgttggtccatccagagtgacaatgcagatcttcgtgaagactctgactggtaagaccatcaccctc

SEQ ID NO: 259986 - DNA, 88 bp, Homo sapiens
tacgcgtccctttgggtttagcacgatgagctcaatcggcactgggaatatggttgagccccttatacccacgaattgctgatggaac

SEQ ID NO: 259987 - DNA, 125 bp, Homo sapiens
gcgattccagagagcggcggaaaggataagcctcgacttagaagctaccgagttaccctaagaaagattgctggactcgctgaagagagactacgcaggaaagccccagccacccatcaaatcag

SEQ ID NO: 259988 - DNA, 97 bp, Homo sapiens
cagccgccgccagagaggcccgcccaccagttcgcccgtccccctgccccgttcacaatgctaatgacaaactatgtgaccttcatggtgggggaga

SEQ ID NO: 259989 - DNA, 75 bp, Homo sapiens
gcgctaagatggcgactcccatgcatcggctaatagcccggagacaagccaaagagagcaggatgaatggacagt

SEQ ID NO: 259990 - DNA, 50 bp, Homo sapiens
gaaaaagactgtcatttggaagcaggagcattggtttgaaaaggccctac

SEQ ID NO: 259991 - DNA, 82 bp, Homo sapiens
gcaataataatgcttcactacatgaagtcaaagacattgcctaagatactgagccatatcgccccagcattttgcatgagca

SEQ ID NO: 259992 - DNA, 50 bp, Homo sapiens
gctgctcgcacgggagccagctgggtgggcgaactttctgaccaagtata

SEQ ID NO: 259993 - DNA, 96 bp, Homo sapiens
cgggaaggcggcgccccggccgaggtggcggcggctcctcaggacgagaaggaacagctgaacgagtacaagggccacctctcaggcctggccaag

SEQ ID NO: 259994 - DNA, 75 bp, Homo sapiens
ggtggatacctgaaaggtctcctaaccgctgcagagagtgctttcttccagagaccaacagcagcagaactatta

SEQ ID NO: 259995 - DNA, 83 bp, Homo sapiens
gctgcgcaggacttctcctggcggcgctgcggatccagggggtcggctgccaggtacagatgatcccagccctagactcagtg

SEQ ID NO: 259996 - DNA, 82 bp, Homo sapiens
gcgcgcagggcctgcagcgggagctggacggcgagcgcgagcggcgcgagaaaagatgccctgtatccaagcccaatatggg

SEQ ID NO: 259997 - DNA, 77 bp, Homo sapiens
gtggatcgctgtgatcgtcacttgaaactgaggcttcttgaagagcttgaagacacttggctcccttatctgacccc

SEQ ID NO: 259998 - DNA, 82 bp, Homo sapiens
cgcctttttaccctgtggcctttcccatccaggcgtccagaggcttccccgggcgctgcctggacaggcctgcctgcgtgct

SEQ ID NO: 259999 - DNA, 100 bp, Homo sapiens
gacacattccaccccagtggggggtcccataccactcatggatctgaatcagatgttgagaaaccaaggcagtatcatgagcaggaagaaacacctgaga

SEQ ID NO: 260000 - DNA, 100 bp, Homo sapiens
cgggatcgtgaccgagaccgtgaccgagagcgtgaccgagagcgcgaatatcgtcatcgttagaaggcatctctgggaaaggacctggggctggtgaggg

SEQ ID NO: 260001 - DNA, 82 bp, Homo sapiens
gtcccaggacatggacacctgtgagacctgcctagagctggaacgttacctccagagcgagccctgctatgtttcagcctca

SEQ ID NO: 260002 - DNA, 95 bp, Homo sapiens
gtttcctgacctctgacacgtattgtctcaagattaaaggacaaggtgctgcggatgctgtacgtgtgggcgctctgccgagaccaggacgagct

SEQ ID NO: 260003 - DNA, 83 bp, Homo sapiens
tctgcctccggggacaagaaactagagcaaataaccgttttgaaatttttagcagccactgctgcatcaggggcttttgttcc

SEQ ID NO: 260004 - DNA, 98 bp, Homo sapiens
cggcttgttgtcttcaattaaaaaatttattaaaggaagcacacctaaggtttgctgtaatggcacaagagtatttgtgcagaaagaaattcttgata

SEQ ID NO: 260005 - DNA, 75 bp, Homo sapiens
tgtttgtggatcgctgtgatcgtcacttggtaaacattataccagtgattgccaaagcagatacggtttctaaaa

SEQ ID NO: 260006 - DNA, 75 bp, Homo sapiens
agctacataatcttctagataaaccacagttacaaggaattccaatggaggccgagaccccaagtactgaggtgc

SEQ ID NO: 260007 - DNA, 75 bp, Homo sapiens
ggccttagctgtgctcgcgctactctctctttctggcctggaggctatccagcggacgcatggaatacctcgtga

SEQ ID NO: 260008 - DNA, 82 bp, Homo sapiens
accccgaagatattaagttccacttgtaccttgtccccagcgacgccttgctaacaaagagtcattcttatagaagagcatc

SEQ ID NO: 260009 - DNA, 97 bp, Homo sapiens
aatgtcactgcagctttaaaaagcagtgggctctggaacaacacggtgttcatcttttctacaggcgcactgcacactcgccggggggcacgccatg

SEQ ID NO: 260010 - DNA, 100 bp, Homo sapiens
gagactgtggtaatcaggctgtagaagaacgactacaaaatattgaggcccacttgcggttacagacaggctccagtgatcattctacatatattgtaca

SEQ ID NO: 260011 - DNA, 75 bp, Homo sapiens
tgaagatcatctgcctgggagacagcgcagtgggcaaatccaagtactgctacaaggttcagtggtcagagctat

SEQ ID NO: 260012 - DNA, 83 bp, Homo sapiens
tgcgttcacaggtgtttctgcggcaggaactgaaacatttgatcttggaggcagcagatggctttctgtttattgtctcatgt

SEQ ID NO: 260013 - DNA, 116 bp, Homo sapiens
cgggagtgccgtgcgccgcagcccgggcccaggccccggcagcgcctgggacaaggttgaaccatgattccggtgacagagctccgctactttgcggacacgcagccagcataccg

SEQ ID NO: 260014 - DNA, 100 bp, Homo sapiens
tgctgtcaatggaggaggacattgatacccgcaaaatcaacaacagtttcctgcgcgaccacagctatgcgaccgaaggctgctttgtaccgcctcagtg

SEQ ID NO: 260015 - DNA, 100 bp, Homo sapiens
aatcatgccaattttctggagggtagtgtattggacgtcacaatttttaacatggatgaatttcatcctttcatcgaagcacttctgccccacgtccgag

SEQ ID NO: 260016 - DNA, 95 bp, Homo sapiens
cccgccccgccatgagccccccgctctgagggccccggcccctggatgcacagccccggcgctgggtctgggatccccaaggcctgggcaggcat

SEQ ID NO: 260017 - DNA, 82 bp, Homo sapiens
cagggcctgcagcgggagctggacggcgagcgcgagcggcgcgagaaagtacgaggaacagcaaattcaggaaaaagtggcg

SEQ ID NO: 260018 - DNA, 94 bp, Homo sapiens
cgaaggaaaaggaggaattcgccgtgcccgagaatagctccgtccagcagataacgaaggaggcccaacttcattcaataaggagcctgacgga

SEQ ID NO: 260019 - DNA, 83 bp, Homo sapiens
tgctggtcggctccagcaccctcttcttcgtgttcacgatgatcggctgaatgtaacagaggaactaacgtccaacgacaaga

SEQ ID NO: 260020 - DNA, 98 bp, Homo sapiens
agaccacccagccagtggacgatggaaggctatctgtatgtccaggagaaactgggacactgtcacccaggagtggtcaaagctgccctgaaacagat

SEQ ID NO: 260021 - DNA, 75 bp, Homo sapiens
acagaaacacctaggaagggagaactgaacactgagctgaaggttgaagtggagagcttgaaacgagaactccag

SEQ ID NO: 260022 - DNA, 88 bp, Homo sapiens
cagtccgccgctcaccccgcggccgcaccttcccgccttctcaggttatgaagacagtatggagtttccagaccatagtagacatttg

SEQ ID NO: 260023 - DNA, 90 bp, Homo sapiens
agatgccaaagcagctcattcacatacagccactattcatggccgaattgatcaagtcaaccaactccttgaactggatcatcagaagag

SEQ ID NO: 260024 - DNA, 83 bp, Homo sapiens
atttacaagttattttctcttcttctgaaaaagagatcttgaagaagctcattcacacagaagacccatttaatgatgaacat

SEQ ID NO: 260025 - DNA, 75 bp, Homo sapiens
atttctcctgctctgcagcttctgttcagctgctctgttaaaagcgaaaatgaaacaattgcctgcggcaacagt

SEQ ID NO: 260026 - DNA, 87 bp, Homo sapiens
gatttcagacatctgtagcaatggaaggtcgttgaggacttccacatggagattggcacaggaccagactcaagacacacaactcat

SEQ ID NO: 260027 - DNA, 100 bp, Homo sapiens
gtgggaagcgagaccgtggccaagctacccgggtctcggacaggcggcactgggaccacgaggcagggagccaggcttgaagcaggtgacatgtagacgt

SEQ ID NO: 260028 - DNA, 75 bp, Homo sapiens
cgggagctggacggcgagcgcgagcggcgcgagaaagtgctcgcggtgaggatcgatgacctggaccacctcccg

SEQ ID NO: 260029 - DNA, 51 bp, Homo sapiens
tctggacaacggagatcgtccccagtcaagatgaagactggcccatttgca

SEQ ID NO: 260030 - DNA, 101 bp, Homo sapiens
ggaagaagatttgtaaagaaaactcttagaaccttttgcccagagtagcagccaaacttgaggttgccccgatttctgacatcattgcaatcaagtcacct

SEQ ID NO: 260031 - DNA, 90 bp, Homo sapiens
gtctgtacacctgtccccctgcttcagaacaccttccaccatgaccacctcagcaagttcccacttaaataaaggcatcaagcaggtgta

SEQ ID NO: 260032 - DNA, 89 bp, Homo sapiens
tggagaagctcctggactggtttaaaacggtcactgaaggagggctccaacaaaagaatcctctgaagaggagtatgactctggagttg

SEQ ID NO: 260033 - DNA, 90 bp, Homo sapiens
gataggtgatagttgggaatggagaccatcaaagggcctgaaggggctctttttgaacattcagtggagacaccccttgtcagagccgac

SEQ ID NO: 260034 - DNA, 75 bp, Homo sapiens
cttggagctgccgccgccgggactcccgtcccagcagttttgcagagggcaagcaggtccacagagctcctcacg

SEQ ID NO: 260035 - DNA, 90 bp, Homo sapiens
cagatttcagatactctgactccacctttacttttacctacgttggcggccccagaagatttggattcaagatgtgaaataatcagcgat

SEQ ID NO: 260036 - DNA, 90 bp, Homo sapiens
attacagaaattgagaaaaaacttcctcggctgtacaaagttttaaagggtaattgggatacttctggcagcgaactgagtgaaggggaa

SEQ ID NO: 260037 - DNA, 74 bp, Homo sapiens
ccgggaagcagctatttgaccaggtggcgaaactcttggatctaaagaaacagttggctgtagctgaggggaaa

SEQ ID NO: 260038 - DNA, 75 bp, Homo sapiens
ggaagaatgatagcacagaaaatctctgtcagaactgggctgtgcttaagagtaaaacttcagcgatgtttacca

SEQ ID NO: 260039 - DNA, 75 bp, Homo sapiens
gagcaaccgctttgtagaaaccaacctcttcctggaggagattcagttctcaaaagtctatggtcctgtgttcac

SEQ ID NO: 260040 - DNA, 50 bp, Homo sapiens
gtcaggttcttctcccggttcacagcactgggaggtgttcagaaaagtta

SEQ ID NO: 260041 - DNA, 95 bp, Homo sapiens
agctgcaaaccacccaagtctgcaatcttaccagggaggccaagcgaccacccaaagaagagtcatcctttttgaacttccatgactcagactgc

SEQ ID NO: 260042 - DNA, 101 bp, Homo sapiens
ccaagaatataatgtccgagttgcttcccgatacttcaaaggtcctgagctacttgtagactatcagatgtacggagcgcaagaggacggcagcgtcggcg

SEQ ID NO: 260043 - DNA, 90 bp, Homo sapiens
gccgtctacgtgctggacctgaagggcaagccccacaccagtgagaagcatcagcaccgtgaacttgtctgagaatagcagtgttgtcat

SEQ ID NO: 260044 - DNA, 100 bp, Homo sapiens
ggatactcagcgtcgctggcagccgctgtacttggcaagaaaattggatgtatattttgaatatgaagaaaaaataatgagcaaaactactctggataaa

SEQ ID NO: 260045 - DNA, 83 bp, Homo sapiens
aaacaccatggctgcggcggcccagctctctctgacacagtttgggagcctctggtggagcaagtaattgggattcctacagt

SEQ ID NO: 260046 - DNA, 98 bp, Homo sapiens
ctggccctgccaagaaggcgctctccggaatcaacacctgggggcttggaaggtgaaagaaaatggcccgaaccaagcagactgctcgtaagtccacc

SEQ ID NO: 260047 - DNA, 95 bp, Homo sapiens
gcatactgggaaaggggaaaggttgaggcaactaacgttctttggcatggacacaagttcagtgggaggattagaattgactgatcagactcctg

SEQ ID NO: 260048 - DNA, 115 bp, Homo sapiens
ggagatacccaagcaactataatgcttggtcccatcgcatctgggttttacagcacttggccaagctagatgtcaaggttttattgactgataccaatactcaatttgtagaaca

SEQ ID NO: 260049 - DNA, 90 bp, Homo sapiens
gaagggctggaggaggcagaggccaactgctccgtggcgttcgctgaggctcagagatgggtggagtgctgaggaatgtaaacaagtttg

SEQ ID NO: 260050 - DNA, 100 bp, Homo sapiens
tgcggctgcaggccgttgttggtcgagctggcgggtcccgcgggccaggccgtggagagcaaatttttcagaacataaaacaagaatatagtcgttatca

SEQ ID NO: 260051 - DNA, 80 bp, Homo sapiens
tcatcctccagcaaatgaaatttaccgaaggaaagacctttcagtatttgaggtccttcggggtcgtcctctgggagatc

SEQ ID NO: 260052 - DNA, 124 bp, Homo sapiens
ccctgtagcgccgccgacgactgcagccagcagcgtggaggagcctgaagggatgatcatggtgattttactgctgcttgtggctatcgtggttgttgcagtctggccgaccaactgatggcag

SEQ ID NO: 260053 - DNA, 82 bp, Homo sapiens
gcggtggggactgcacgtagcccggcgctcggcatggctctcctggtgctcgaatcatgaataaactggaggataagcagga

SEQ ID NO: 260054 - DNA, 110 bp, Homo sapiens
cggccttggatgtttctgtcctaaatagctgacattgcatcttcaagactgtggtcaaagaattgactgtagatccaactgctgctggtgatgttcgtccaataatgcac

SEQ ID NO: 260055 - DNA, 150 bp, Homo sapiens
taacctcttcggtccgcgacgatcctctagagcactgtgtgtctccccggacgcgagcccgctcccctgatcgtgagatggagaataaagaaactctcaaagggttgcacaagatggatgatcgtccagaggaacgaatgatcagggaga

SEQ ID NO: 260056 - DNA, 98 bp, Homo sapiens
tcaccaacccggccttcaccaaactccctctgagatctgtatctgtggacctgaatgttgatccctcgcttcagattgacatacctgatgcgctcagt

SEQ ID NO: 260057 - DNA, 100 bp, Homo sapiens
gatcagtggatgagacactacgtttggttcaagcattccagtacactgacaaacacggagaagtgctgagtgaaacgcagcacaagctgctggcggaggc

SEQ ID NO: 260058 - DNA, 75 bp, Homo sapiens
acaacgaagccaccggcgtgtgccccgacggcgacgagaccaggaatcaccttcaagcctatgtcgtgaggcttt

SEQ ID NO: 260059 - DNA, 75 bp, Homo sapiens
tcaggagacggagccacggagcaggtcacactgcagaacagagtgatattgcaaaaagccaaattatcagtctac

SEQ ID NO: 260060 - DNA, 75 bp, Homo sapiens
gaggaatgtctttcctaccatctaaaatacgaaggtttctggctggcaaaagagtgcattgagaagagtcttcta

SEQ ID NO: 260061 - DNA, 50 bp, Homo sapiens
gatcctctgtacgcccgttcactgataaaccggcccccggtgaagctgac

SEQ ID NO: 260062 - DNA, 100 bp, Homo sapiens
gcagtacctccgccagatccacgccaaccacgaggaatccctttgcccacgtccagctgaagccgacagtgaccaacgacaggtctgcccccctcctcag

SEQ ID NO: 260063 - DNA, 95 bp, Homo sapiens
gcacatggggatgaagaggtatgaagtggctggacgccgagtgctcttctactttgatgagaggctgggaggcggcagaatgcagccagaggagg

SEQ ID NO: 260064 - DNA, 80 bp, Homo sapiens
ctgtttggccaacctttgcccagagactgctgaggagtccaaggctctaatcccaagagaagatggcgaattagaagatg

SEQ ID NO: 260065 - DNA, 82 bp, Homo sapiens
ctaatctgtgtgtgaagggagaggatttagactcacaacaataggaaatgcatttgcagtcctgagcaatcctgataagaga

SEQ ID NO: 260066 - DNA, 100 bp, Homo sapiens
gcggggtttcggcggccgggagggagttgtcggcgccgcggccgctgcggacggacgctcgcctgccggctgagctgccttgaggtgcagtgttggggat

SEQ ID NO: 260067 - DNA, 82 bp, Homo sapiens
attgacaactttttaagcagatggaaaggcgtaggaggaggagcaggagttcttccagatcgccaagaacatcaaaaaccat

SEQ ID NO: 260068 - DNA, 98 bp, Homo sapiens
gaggacaacgactaccaccgcagcgacgagcagcgtttagtcacatcaagaaatagaacagaattcagccatggccccaagaaagagaggtggacgag

SEQ ID NO: 260069 - DNA, 90 bp, Homo sapiens
ccccgaccagaactgggccatccgcgccatcgagaccctctcggtaatctatgccagcaattatgacaatgttagcagaccatgcagctc

SEQ ID NO: 260070 - DNA, 118 bp, Homo sapiens
cttgaaaagactgggcttgtccttgctggtgcatgcgtcgtcggcctctgggcagcaggatgaacgtgaagccagagaaaatgtgaagagagagcaagatgaggcctatcgcctttca

SEQ ID NO: 260071 - DNA, 89 bp, Homo sapiens
tggtgtggacagaagcggatacgggccaccactctcctggaaggtggcttccgagacaaagccacagacccaagcatgtcggaacagga

SEQ ID NO: 260072 - DNA, 96 bp, Homo sapiens
tctaccttctggaagctactactacgtggtgcttggaaagtcagagttttggacaatctggcaaagtcagcatctgaagaatacttaaaagaaaac

SEQ ID NO: 260073 - DNA, 100 bp, Homo sapiens
tgatgctggagaattataggaacctggtctccctggaattcttccatctctatgacaacaagcccattttagctttctggagaatagcatctgagaaaag

SEQ ID NO: 260074 - DNA, 80 bp, Homo sapiens
gcagatggcactttccaaagtggatgcctccggggagggatactgaggcccctgagcactcggcatggggtggaagacga

SEQ ID NO: 260075 - DNA, 98 bp, Homo sapiens
aactagaagatgatgattttgacaggtttcctatcctgggagcaggagagtgtgcctatttgaatgacaaaggtgccagtagtgccaggcactacaca

SEQ ID NO: 260076 - DNA, 83 bp, Homo sapiens
ggactgagtcctgcaggacacaggtaatgctggaggatggaagaagcaaagggtttggcttcgtctgcttctcatctcctgaa

SEQ ID NO: 260077 - DNA, 88 bp, Homo sapiens
ccgggacacccagaagccgggaaatggacctgcaagcgcaggaccgagcccaccgcatcgggcagcagaacgaggtgcgtgtgctccg

SEQ ID NO: 260078 - DNA, 83 bp, Homo sapiens
ttcttgtttgtggatcgctgtgatcgtcacttgcccatcgatggtatacatgacaaggggattgtagaagacatccattgtgg

SEQ ID NO: 260079 - DNA, 100 bp, Homo sapiens
aagagcgagccgcctgccccggtgcgcagacagagctattccagcaccagcagaggacttggagaagactctagatgtttttaacataattttagcaagg

SEQ ID NO: 260080 - DNA, 100 bp, Homo sapiens
ccttccagggggctgccctctcgaagcttggattccttagcaccaccacagctcagccagaacagaaggcctcgaatctcattggcacataccgccatgt

SEQ ID NO: 260081 - DNA, 83 bp, Homo sapiens
ggcgagagtgggcgagaacgtccactgcgggccggcgaaagctgcgccactggcttcaccacgcggtcagacattgggcccgc

SEQ ID NO: 260082 - DNA, 74 bp, Homo sapiens
tgaccttgttatcagtgatggctcttctctggaagatcttgtgtctctgctggatgaaccgaatcctaacagtc

SEQ ID NO: 260083 - DNA, 74 bp, Homo sapiens
aacaccctgcaatctttcagacagggggatatgagactttctactcggaatatcctgagtgttgcgtggatgta

SEQ ID NO: 260084 - DNA, 50 bp, Homo sapiens
cagaaattgaaaggcttcaaagctagcagagaagagcaagttagtacctt

SEQ ID NO: 260085 - DNA, 90 bp, Homo sapiens
gaacggtgcagcagtgatggatgcagctcttctgttgataggatgatttgaacacctgcctggaattccatcatctgaaacagagttggc

SEQ ID NO: 260086 - DNA, 82 bp, Homo sapiens
cacaaaggagagctccgtggagagaagcttgaagaagaatacccacacctacttctacaccagctttgcagcctacatcttc

SEQ ID NO: 260087 - DNA, 89 bp, Homo sapiens
aagatggcgctggccggatggaaatcctaatgacagtctccaaattcgcctccatctgtaccatggtgtattacctgactgcttaaccg

SEQ ID NO: 260088 - DNA, 100 bp, Homo sapiens
cgggccgcggatccccaagcccgccacgccgcccagcccggccccgcccgcgccggaagagccacgccgattgcaggatacctatatggggtgagcccac

SEQ ID NO: 260089 - DNA, 100 bp, Homo sapiens
aaatgagggcaacttctgaagacttcaacaaggtccttatgtcgtcagaagatcgagaagctcaggaggatgaattgctggccctggcaagtatttacga

SEQ ID NO: 260090 - DNA, 97 bp, Homo sapiens
atccttgctaaaaagggggtcaatccaggcaaactagatgtggaaggcagatctgtttttgacagtgtttcctgccttgctgactcttcttccctct

SEQ ID NO: 260091 - DNA, 100 bp, Homo sapiens
agattgctgaccaggggcttgagagctgggttctattttccctcctcaaactgactttgcagccacggagaggatccagcattcggaggcaaacatgaag

SEQ ID NO: 260092 - DNA, 80 bp, Homo sapiens
ggcacagagagatgcaaagcgacctaaaattagtcacactcgtcctacagagcaacccagtgttttgcctttgttcatga

SEQ ID NO: 260093 - DNA, 101 bp, Homo sapiens
ctggaccaggctctcctctctcaatttctggatatgtgcatggatctgaaagttcatcctgaacaggaaaaggaagatgagaatgtgcctactgctcctga

SEQ ID NO: 260094 - DNA, 100 bp, Homo sapiens
ggggattctcgacctgctaacagaactggaccttttcgttaacaagcacaagccctggctggagcccacctaccacggcatagtcacagagaacgacaac

SEQ ID NO: 260095 - DNA, 98 bp, Homo sapiens
accaacggctcaagaatttcaagaacaaaggccgcgacttggagaaccttcggctcgcgtgcttctgagctgctgtggatggcctcggctctctggac

SEQ ID NO: 260096 - DNA, 122 bp, Homo sapiens
gtcgctgtggcccgcgccggcggcatcgagactatcgctaatgagtatagcgaccgctgcacgcctattgcggaatgctgcagcactccttactctcttttgggtttggtcttcacggtttc

SEQ ID NO: 260097 - DNA, 90 bp, Homo sapiens
atctacctaccaatcgtgaaaactatattcacaggctttatgatctatatagcttccaggtcatccctgtcctgggagaggtcatcgctg

SEQ ID NO: 260098 - DNA, 90 bp, Homo sapiens
agcggagctcccccaagagccggaaagtactatactggcaattgctggagaagattttgcaattgttgcttctgatactcgattgagtga

SEQ ID NO: 260099 - DNA, 100 bp, Homo sapiens
gccagaagcgggcggcgcgggggagatgaaattcattgagtttgaagatgctctggaacaagagaagaaagagctgcaaatccaggtggagcactacgag

SEQ ID NO: 260100 - DNA, 123 bp, Homo sapiens
aatgtggatcaagcaggttttaaatcaagatttaacattccaacacataaaaattatttatccaacagctcctcccagaaggtgacaaagtacaatttgaagaatttgcaaaagtagtaagga

SEQ ID NO: 260101 - DNA, 90 bp, Homo sapiens
cacgccgggttctttacctccgagccaggccgccgcaaagcagagtatgttggataaaggacattgttgtggcagtaactggagagaaca

SEQ ID NO: 260102 - DNA, 90 bp, Homo sapiens
cagttatccccagattaactctccgagtcggtgctggccaagacaagatgcaacagttaatgcccgggcaaaccaggatcttgcccttct

SEQ ID NO: 260103 - DNA, 98 bp, Homo sapiens
cagaaagttcattgggcctgcacctccagctctattaccaggttttaaacttcgccatgatcgtgtcttctgcactcatgatatggaaaggcttgatc

SEQ ID NO: 260104 - DNA, 80 bp, Homo sapiens
gctgaccctgggcatcacgcgcatcctagcaaagtggaagatgctttctacaaaggtgaactcaggctgaatgaggaaaa

SEQ ID NO: 260105 - DNA, 97 bp, Homo sapiens
gggagtggagcttggtttcgggatctcggtgctgcagacggcgagacctcctgcacaggtgacttaagagattaaaattaatttggttgctgttggt

SEQ ID NO: 260106 - DNA, 100 bp, Homo sapiens
ctgtaacctccaaactatgagtaatctggtggccagcatcgaaatgttcagccttttagtgatgaagatgcatcaattgaaacaatgagccattgcagtg

SEQ ID NO: 260107 - DNA, 48 bp, Homo sapiens
gggcattcctcatgccaaaggaaagacggagtcttgctctgttgccca

SEQ ID NO: 260108 - DNA, 76 bp, Homo sapiens
gctgacaagggtccagcctccgatgtggagtctttcattttggatcaggatgatttggaaaatccaatgctggaaa

SEQ ID NO: 260109 - DNA, 90 bp, Homo sapiens
tgcgtttgtggccgtccggcctccctgacatgcagttgagtcgtggggacagcttgaaggagccaacctcaattgcagagagcagccgtc

SEQ ID NO: 260110 - DNA, 90 bp, Homo sapiens
gtcacttcctatcccatcccagcctcagttttctcatgatgcggcttccttcaaggcagagctgagctacagaggccctgtgagtgggac

SEQ ID NO: 260111 - DNA, 83 bp, Homo sapiens
cagcagatatcctgtctcagatgaagagggttattttggagctgttggagcactccttgagctgttgaagatcccgtgatcat

SEQ ID NO: 260112 - DNA, 100 bp, Homo sapiens
tgtagggagcatagctgctacactgaagatgaagcaaggcccaatgacccaggcgggatcatggcccaagttgcaatgtccaccctccccgttgaagatg

SEQ ID NO: 260113 - DNA, 74 bp, Homo sapiens
cctgcgctgtgatgcctgcagagctgtggcttaccagcaccctgtggatgacattgacaagatgaaagagcgag

SEQ ID NO: 260114 - DNA, 76 bp, Homo sapiens
ccactacctcctggctgccgtgaataggcagcctaaaggcaccatgagccaggacaccgaggtggatatgaaggag

SEQ ID NO: 260115 - DNA, 98 bp, Homo sapiens
tgtcccaatgccatccagagctgtgcctcccagcaccacagtccttctgcagtccctcgtccagccacccccagaccacagcaccgggaagtccagtc

SEQ ID NO: 260116 - DNA, 83 bp, Homo sapiens
agaacattgaaggggcacaagatgccacagaaaattctgcttccagtttagcaccagaatttatccagttggcgaaggacttt

SEQ ID NO: 260117 - DNA, 100 bp, Homo sapiens
gggcagctcgcacttgctcaacaagggcctgccgcttggtatgacctggacgcgtgtgacattcaagaaaaatacccggatttatttcaagtgaacctgg

SEQ ID NO: 260118 - DNA, 75 bp, Homo sapiens
ccccatctggtccagttactatggaaactgccgttctctcctgtgggtaattccagaattgattggccataccat

SEQ ID NO: 260119 - DNA, 50 bp, Homo sapiens
tgatttgcctcagcttgtactttgccaaaacaaaggggatttggtgatgg

SEQ ID NO: 260120 - DNA, 82 bp, Homo sapiens
gagtatgcttcgtttttcgccgtcatgggcgcctcggccgccatggtcttcagcgcacggggtcactctggtgcccattgag

SEQ ID NO: 260121 - DNA, 89 bp, Homo sapiens
gggactcagcagccttggtgctcaggtgccagatgcaaaggacatggtccggcgaggagagatcatcgacaatgacaccgaggaggagt

SEQ ID NO: 260122 - DNA, 82 bp, Homo sapiens
atagtctccagcgggcctggactgtgggctggtgtgtggaactggtacatcaggaacgtctctatcaagaatacaatttcag

SEQ ID NO: 260123 - DNA, 74 bp, Homo sapiens
tttgtcctaaacccgtgtttgccttccatcatgctaacttcccaccatggcacattacacttctgtggatttaa

SEQ ID NO: 260124 - DNA, 90 bp, Homo sapiens
ccacactgcttcgatcctggacaggatgcaggcagatgtctcggcgcggaagatggccggcggcgtggacggccccatcgggatcccgtt

SEQ ID NO: 260125 - DNA, 80 bp, Homo sapiens
agagcattctccttagcaactgcgggactgcggcggcgccggcctccggggagaaacggaagccattaatttgctagaac

SEQ ID NO: 260126 - DNA, 75 bp, Homo sapiens
ctgcttcatccgggaagtgcttggggatggagtgcctccaaaggttgctgagcctggatctaaaaaatcagcaaa

SEQ ID NO: 260127 - DNA, 76 bp, Homo sapiens
ctcacaccaggcctccggatttcagtgtgatttgactacgaacaataggaaccagttacattcaaggatgcctctg

SEQ ID NO: 260128 - DNA, 74 bp, Homo sapiens
gggggtcaccgtccagagccaaggtccagggggcaaggtcgtgctttccctggacctctatcacactgaagatg

SEQ ID NO: 260129 - DNA, 49 bp, Homo sapiens
caacatggagccccaccatggtagtccttgcactgccagaagatcgtcc

SEQ ID NO: 260130 - DNA, 80 bp, Homo sapiens
tgctgcaggaggccaaggacggcgttctggatctcaaagcgatggagtcatcagaacccactgtgaggaagtgacttctc

SEQ ID NO: 260131 - DNA, 96 bp, Homo sapiens
tgacccgctgcaaggagaagctgcacgacgtggacttctacaaggcccgcatggagggactggtgattgcagctggaagtgcccatgaccgagctg

SEQ ID NO: 260132 - DNA, 83 bp, Homo sapiens
caccaagacaccccttgaccagcacacactgcaaggagatcagatttctcacattggcaaactgagagattttcttctggaac

SEQ ID NO: 260133 - DNA, 98 bp, Homo sapiens
acaatcgcaaagggaaacttatcttcttttatgaatggagcgtcaaactaaactggacagatttgttcccgacaaggagttttctggttcagaccgta

SEQ ID NO: 260134 - DNA, 100 bp, Homo sapiens
ggagagaactgctgtgcgtctgaagtgatggcggagcagcccatcaataagggaggggtcaggactccagtacctccaagaggaagactctctgtggctt

SEQ ID NO: 260135 - DNA, 74 bp, Homo sapiens
gaaacctttccaacacagatgtccaagctgccaagaaggctcccctgttcctttttgctgacgtgtcatttcta

SEQ ID NO: 260136 - DNA, 90 bp, Homo sapiens
gtgttcgagtggacaaaatggcgaagatcgccaagactcacgaaggttgaaatcacaaagattagacacctttttagataggtgttcttc

SEQ ID NO: 260137 - DNA, 76 bp, Homo sapiens
ggttggagttgagtctcacgttgaaacagaatgaagtgcttcctggagctaaggctgatcagttgatgttcgcttt

SEQ ID NO: 260138 - DNA, 82 bp, Homo sapiens
gcagccgatccagcctgcggagcctgtggggcaggctgtgtataagatggcagacgtagcctgcaaatgccacggcgtctcg

SEQ ID NO: 260139 - DNA, 100 bp, Homo sapiens
gtttcccgaggagcttgggccgccgcagctcttttggtacaccagaaggccagaatggaacgacttcaaagagaacttgagattcaaaagaaaaagctgg

SEQ ID NO: 260140 - DNA, 97 bp, Homo sapiens
gccaacagcgaggctttcagttctttggaattccattcttttccttattcttctgatgtggatccagcattactctactgactggcagagacaggag

SEQ ID NO: 260141 - DNA, 100 bp, Homo sapiens
tggaaattggactaaattaccagaatgcagggatgcagaggccaggatgtgggcccagccctgtgccaggaggctggctggaataaaggtacagatagag

SEQ ID NO: 260142 - DNA, 96 bp, Homo sapiens
gaaagccctggtacatgacggactggctctgaagcaccgacaaggcaagaatcacaagatgcgcatcattgcctttgtgggaagcccagtggagga

SEQ ID NO: 260143 - DNA, 151 bp, Homo sapiens
ccagatattttgtgatacctgtgaagctgttgcccgcctgcatcagtgcaaaactcctattatccaccgggacctgaagatgccttcgtgaacagccaggaatggacgctgagtcgatctgtcccggagctcaaagtggtgagtggttccc

SEQ ID NO: 260144 - DNA, 83 bp, Homo sapiens
gtcttcggtggactccttcggcagtccacccaccgccgccgcctcccagcaaaagtactttgactcaggagactacaacatgg

SEQ ID NO: 260145 - DNA, 80 bp, Homo sapiens
atcacacgcataatggatgaaaggaaccgacagatgacccctaaatccaaaaggaagagtatccatagccgaatgctgcg

SEQ ID NO: 260146 - DNA, 75 bp, Homo sapiens
gaccctcgaagtgcgcaaacttgacactcaccctgaccgcaattctgtggtgttcttggtcacacatttatggag

SEQ ID NO: 260147 - DNA, 51 bp, Homo sapiens
gctctgggaagtgcgcagtccggtgaatggaagagaatccgaagaagaaaa

SEQ ID NO: 260148 - DNA, 100 bp, Homo sapiens
cacgtggaattcgcgaagctgccaaagccttagacaaacttcattagaggggtggtagactcggaggatctccctctaaacatatcccgtgagatgttgc

SEQ ID NO: 260149 - DNA, 87 bp, Homo sapiens
ccacgactattcttggacttgggaccccctcaggggaacagcgagcagatcaaagggattcccctgaaaccaatgttggcccatccc

SEQ ID NO: 260150 - DNA, 100 bp, Homo sapiens
tcaagagcatacagcatcatctgaggacggctcaggagcatgacaagcgagaccctgtggtggcttattactataagcgtgtggaaaattggcctctgat

SEQ ID NO: 260151 - DNA, 82 bp, Homo sapiens
ccaggccgccgggggcctgctgcgcccggctaccagagattcactgactgctataagtgcttctaccagttgcagcctgcga

SEQ ID NO: 260152 - DNA, 90 bp, Homo sapiens
cgaggatatcgtgtctggagcagtggagcccaaagacccctggagacatggtactgtctgatgagcgtgaaaggttgtttcaccgacttc

SEQ ID NO: 260153 - DNA, 81 bp, Homo sapiens
ctggactcggattcgttgcctgaggctcttgtcaggatggtgaagctgttcatcggaaacctgccccgggaggctacagag

SEQ ID NO: 260154 - DNA, 90 bp, Homo sapiens
atcgaattggtggaaaggttgaagttcaagagctcagaccctaaactatgtgttctcatttcacccaagaccattggccagtgcagggca

SEQ ID NO: 260155 - DNA, 80 bp, Homo sapiens
acaggaaagtctaagggatatggctttgtctcctttttcaacaaatgggaacagcatatgccatatatgagctggctgtg

SEQ ID NO: 260156 - DNA, 98 bp, Homo sapiens
aatcattccaaacggagcagtaattcttctgctgtaaatgtaggcttttgtttcgtttgtgccagagcaatcatcctcttccagtggtagcgtgtttg

SEQ ID NO: 260157 - DNA, 73 bp, Homo sapiens
tcccaagtggctgggattacaggcagctgctggaggaggtgaagtggcatcgatgtcatctttgaaaagtttc

SEQ ID NO: 260158 - DNA, 75 bp, Homo sapiens
attttcagaggggaatgctaagagctcctacctcccggcagcctctccaggcccagaactttctccagtcagcct

SEQ ID NO: 260159 - DNA, 136 bp, Homo sapiens
ccgctgcccgcgcgcatctggctgcagctctgcggggcgcaggaggcggtgcacagcgccaagataaaataccatgaggagtttgagaagagccgcatgggccctagcgggggcgagggcatggagccagagcgtc

SEQ ID NO: 260160 - DNA, 80 bp, Homo sapiens
gtgatctcgcagtgtggggagatgtagtccagacaaagactgaatcaggaagactatgaccgtctgaggcctttatctta

SEQ ID NO: 260161 - DNA, 80 bp, Homo sapiens
gggatggcagccactgatttgtcctatgaagtctgggccaacggtcacaaaagttgtcactgttgtgacaaccaaaaaag

SEQ ID NO: 260162 - DNA, 139 bp, Homo sapiens
atactatcgaaccatccgaggatttgaagtccttgtggagaaagaatggctaagttttggacatcgatttcaactagagtggtaaaatttcagccttccctttggccttgggactcagtgaggaacaatttgagaagtg

SEQ ID NO: 260163 - DNA, 100 bp, Homo sapiens
tctgaatcatcgggtgttctctactccagagctccgacttatttctgtgggcagacattaacattcagattaagcctgatcaagatgacaacctcccaaa

SEQ ID NO: 260164 - DNA, 75 bp, Homo sapiens
gaccatattctctgggtgaaagtctgcaaccctgaaaaagatgcaggtgtcagtgtggaggcagttgatccagtg

SEQ ID NO: 260165 - DNA, 85 bp, Homo sapiens
ctggcatcagggaggctttcagccggagaagcgagtttcagctggtgctggtgaatctggtaaaagtacaattgtgaagcagatg

SEQ ID NO: 260166 - DNA, 98 bp, Homo sapiens
acaccaaggtcgtattgattgaattgttaacaaacaaggtagctacagcaagctgggtagcaggcagatccaaaggatatcatgaagtttccagggcc

SEQ ID NO: 260167 - DNA, 90 bp, Homo sapiens
attatgaaagcattcatggacggccggccccagcccacgcagcaggaggacacactgccgaagggaccagttggacggccttctggcttt

SEQ ID NO: 260168 - DNA, 90 bp, Homo sapiens
tgcctatgtattccctggggatggcgcatcacacaccaaagctctttcgacgtgtagcagcagctttgccgggaatggaaagcacacagg

SEQ ID NO: 260169 - DNA, 76 bp, Homo sapiens
ctcagatgcccttgttcttgaggatgggtcacagaatgatcatactcaagatcttcctggggagtcaatggcaaat

SEQ ID NO: 260170 - DNA, 75 bp, Homo sapiens
cgctgcgcagcctggcggtgctggaaggcgccagcctggtggtgggcaacaaagaagtttgtcatcctgatattg

SEQ ID NO: 260171 - DNA, 75 bp, Homo sapiens
tgccagagaaccgagcatccagtcatctcctataaagattttaccaaatgttgcaagaactctggagttcttatg

SEQ ID NO: 260172 - DNA, 50 bp, Homo sapiens
gggagctgtgcagctccttatcatgctgaaaatgtgtgtctgacatgcaa

SEQ ID NO: 260173 - DNA, 83 bp, Homo sapiens
attttgactgaaaaagcgaaggacttttttcaggcagaaaacaagtctcgtctggacgtgtcctgggtcatgaaacttaatcc

SEQ ID NO: 260174 - DNA, 100 bp, Homo sapiens
ctgggagaaaatattattccttatgttgctgatggagctaaggctgcaattctgggttttacatcaccggtctgggcagatcgaatcatcaatttagttg

SEQ ID NO: 260175 - DNA, 78 bp, Homo sapiens
acagaggaaacttccaagccaaaagatgactaaagaaatacaagttaaggtatctgatgatcctgaagctgacgcaac

SEQ ID NO: 260176 - DNA, 100 bp, Homo sapiens
agtccaagaggaggaggaggcggaggtccaagcggaaagagccagaatcaactcctgtgcccttgcttggaagtgacaagagtgctttcacccgagtagc

SEQ ID NO: 260177 - DNA, 100 bp, Homo sapiens
aaagaaggaccgattttaccgatccattttacctggagataaaagcatccgtgtcattctggaccttactcccaactaccggggtgagaactcgtggttc

SEQ ID NO: 260178 - DNA, 90 bp, Homo sapiens
caggaccagactcaagacacacaactcataacagttgatgaaaaattggtcaatgtgacggtggactacattagaccagccagcccagcc

SEQ ID NO: 260179 - DNA, 83 bp, Homo sapiens
ttcgtgatattttacaagatgtgcatgataagttcagccagtgctacccctgaatttgaaggtagaggaggtgatgaccttgg

SEQ ID NO: 260180 - DNA, 78 bp, Homo sapiens
agcatctgatgcacgttccatccggcgctcagctgggcttgaggagaagacagactgctgctttggacctgttggtaa

SEQ ID NO: 260181 - DNA, 90 bp, Homo sapiens
ggtggaggttcgcggctctaacggggctttctacaagctatgaaacccacgtagtcgaacaccgtgatgcttctcctgcagggcgtgtga

SEQ ID NO: 260182 - DNA, 80 bp, Homo sapiens
aggcattcagccgaagcgcaattctgattcagcatcgacgaacccatactgttcaacagcatgatcctttactgtgtgcc

SEQ ID NO: 260183 - DNA, 83 bp, Homo sapiens
ccacaaacaagttctagtcactctgatcttggccagcttgcttctcaaggagtcatgctccttggggtgaccctcttgaagaa

SEQ ID NO: 260184 - DNA, 100 bp, Homo sapiens
cctgggaggacagcaccaccggcaaggaggacacgggcacctttgacaccgtcctgtgggccataggtgaagaagatcgttgaggaggctgttctcaaat

SEQ ID NO: 260185 - DNA, 96 bp, Homo sapiens
cacgccgaggccgatgtgcggcgtgtgctgctgcagatgcgcctgcttcctctgcgccagaagaaggcccacctgatggagatccaggtgaacgga

SEQ ID NO: 260186 - DNA, 75 bp, Homo sapiens
tccagattctcctgcagttataccagtggggctgatttgatggagttggacatggccatggaaccagacagaaaa

SEQ ID NO: 260187 - DNA, 100 bp, Homo sapiens
aactgttctaatgaggtcctatctattactgctatgttgtcagatttacagagtaaatttgtggccaaagaaaatgaagtacagagtctgcatagtaagc

SEQ ID NO: 260188 - DNA, 100 bp, Homo sapiens
ggaggctggctgcatcatgggagaagaggtgctggagaatctggtaaaagcaccattgtgaagcagatgaggatcctgcatgttaatgggtttaatggag

SEQ ID NO: 260189 - DNA, 83 bp, Homo sapiens
ggcccgtggccatcggcagctgcggccacacccggcacagtcttcactaccgtagaagaccttggctccaagatactcctcac

SEQ ID NO: 260190 - DNA, 74 bp, Homo sapiens
aggtctcctcggatcgcctggagaggcactcggacctggtggtttgaagtgtcctgtttgcagctttgtatatg

SEQ ID NO: 260191 - DNA, 134 bp, Homo sapiens
tgattcagaggctgagacctgtgcatgctcatctctatttgcagccaggaatggaagatggattcaagatggaaaaggtgatgtaaccattacaaatgatggtgctaccattctgaaacaaatgcaagtattac

SEQ ID NO: 260192 - DNA, 97 bp, Homo sapiens
tcgatctggacctggcctggcgggctcaaactgctttttctgcaaaccctgccaatccagcaattttgtcagaagcttctgctcctatccctcacga

SEQ ID NO: 260193 - DNA, 87 bp, Homo sapiens
gagccatgaggcgccagcctgcgaaggtggcggcgctgctgctcgggctgctcttggagaaaactttagaaactgttcctttggaga

SEQ ID NO: 260194 - DNA, 75 bp, Homo sapiens
cgtgaccgagagcgcgaatatcgtcatcgttagaagagccagcggtgagcctggagcagtgtgagcagctggtgg

SEQ ID NO: 260195 - DNA, 100 bp, Homo sapiens
cggcaggaggagagtgaacattctcataaacatttaattgaactccgccgggaatttaagaaaaatgtacctgagggtgacttttaaatatgacggctcc

SEQ ID NO: 260196 - DNA, 74 bp, Homo sapiens
gattccagcttcggaacaagagaccctggggctgattcaggagatcaatgatttgaggttaaaagttagtgaaa

SEQ ID NO: 260197 - DNA, 96 bp, Homo sapiens
tgacctttaggtgcttttatattcatctcaaaaacaaaattctgaactcaggacttggcaagcagttacaattcatgatacagaaaaatgccaagc

SEQ ID NO: 260198 - DNA, 74 bp, Homo sapiens
ctggaaccccaatcactcagcgcttctcgcacagaaccaaatggcgagacaccatcatctttatacagagttgc

SEQ ID NO: 260199 - DNA, 88 bp, Homo sapiens
aaaattcaagaagttgaaaaacgcttttcacgtcacctggagagatgcacagttaacagccaggtccttgcctgctgtgcagtctgat

SEQ ID NO: 260200 - DNA, 130 bp, Homo sapiens
cagccggcagctccggagctgcccgcgccatgtccgcgcacaatcggggcaccgagctcggtactccaaagattcaggtttactcacgtcatccagcagagaatggaaagtcaaatttcctgaattgcta

SEQ ID NO: 260201 - DNA, 87 bp, Homo sapiens
acagccacagcagcctcccaaggagtctgcaagttggtctacagtgaatatagagccagtcttgcttttgaccttgttagcagccga

SEQ ID NO: 260202 - DNA, 75 bp, Homo sapiens
cggggcatcatcaagagcatggacagtcattttgtttactcattcagccctgttgcaggtcccaataaactcttc

SEQ ID NO: 260203 - DNA, 96 bp, Homo sapiens
tccaaaaccggcagctgttagccgagcaagaaaatatgagagccacacccgtgttcacacaggtgagaagccctttgagtgtgatatttgtcacca

SEQ ID NO: 260204 - DNA, 90 bp, Homo sapiens
ggtcgaggacggtcggactcccgcggcgggaggagcctgttcccctgagtcagccataatggcaggtgaagaaattaatgaagactatcc

SEQ ID NO: 260205 - DNA, 82 bp, Homo sapiens
ctgcagaggacacgaggcggcgggctggagacatggaccgcggcgagcaaggaaacccagaagttctgtgaacaagtccatg

SEQ ID NO: 260206 - DNA, 100 bp, Homo sapiens
cgcgtccgccgattcctcctccttggtcgccgcgtccttggctggcgttctgcccagtcaagcccgtccaactccagctccagctcagactccagctcag

SEQ ID NO: 260207 - DNA, 100 bp, Homo sapiens
gagctgaaggagcggaacaagaggatccaggaggacaaccggctggagctgcagaagaacatgctgtttgagagcatccaggagggcaagtacgagttcc

SEQ ID NO: 260208 - DNA, 75 bp, Homo sapiens
accttcatcgctgacctggttgtggggctgtgcactgggcaggaggagatgttaaagtaacccatcttgcaggac

SEQ ID NO: 260209 - DNA, 75 bp, Homo sapiens
cccacactggccgtcccggccatctcgctgcccgacgatgtccgcaggcggactcgctcagcagcagcctgaaaa

SEQ ID NO: 260210 - DNA, 101 bp, Homo sapiens
gaccagcccctgctcacaccttggttctgccgacgctgcatcttcgcactggctgtgcggaacttaaggcatacagaacgatggagtatatggcagaatcc

SEQ ID NO: 260211 - DNA, 100 bp, Homo sapiens
cttctgcatcgacagatagccgtcttcagcttgagccccatcactagtcctgacacagctctccctgaggagcagccacattccagctcccagtgcgccc

SEQ ID NO: 260212 - DNA, 101 bp, Homo sapiens
taaaaatcaacaatgagattagaagtgtgaaaagattgcagctgctaccagaatcttttatttgcaaagagaaactagaaagctgatattgcaattgctcc

SEQ ID NO: 260213 - DNA, 51 bp, Homo sapiens
ccatcgtcaccatgacaacactaggcctgagaaatgccagtggcctgacag

SEQ ID NO: 260214 - DNA, 90 bp, Homo sapiens
cccgcctccctccagctgcgagtgcggcctcggctggcggcggcaccagttcatggcctcccacgggaacgacgccgcgagagccaggtt

SEQ ID NO: 260215 - DNA, 82 bp, Homo sapiens
ctgcccccccttccccacgcaaccccagatccatttacactttacaataaacccgggacccacttcactccagtgcctccga

SEQ ID NO: 260216 - DNA, 78 bp, Homo sapiens
caaaatcttctgttctctgccccaaactaccagttccagcgagtgatttgcgtcatgtggattgggtgaagtcatatt

SEQ ID NO: 260217 - DNA, 89 bp, Homo sapiens
tccagaacatctgggagaatatttaatggaaaatcgcttggttaaaacctgacacttttaacaggctctcaccacacacttgttcatgg

SEQ ID NO: 260218 - DNA, 74 bp, Homo sapiens
cgacatccaggcgaactcggcctatcgctaccctccgaagtccgtcctggactgctcttcctgctcttcagcag

SEQ ID NO: 260219 - DNA, 87 bp, Homo sapiens
gggagcgaccgggagcggcggcagcggcggcgcggaggcggctgaggtgcgagccgattgatcgtgtcctgtgctgaagatgtttcc

SEQ ID NO: 260220 - DNA, 80 bp, Homo sapiens
ggacattttggaaggagcgatcacatcagcagcagatcagatggcaaggtcagccccggcacgttatccataggaagcgc

SEQ ID NO: 260221 - DNA, 91 bp, Homo sapiens
gcgggagttcgaagagttggatactcagcgtcgctggcagccgctgtacttggccaagactaaggggctgcagagcggggtggacattggc

SEQ ID NO: 260222 - DNA, 75 bp, Homo sapiens
aagactatgaatctctgttccaaatgctttgctgctgatcttgcatctttaatggataaaacatttgagagaaag

SEQ ID NO: 260223 - DNA, 96 bp, Homo sapiens
cattgatccgatggtggttactgaaaccagcctggacaccaagtctgtgtcagaaggccacctcaagaggaacatcgtggtgaagaccgtggagat

SEQ ID NO: 260224 - DNA, 90 bp, Homo sapiens
tcttcagcctccaggctctccagtttttcgtcgagagattcactatggaatcgactctaaaatagagctcaagcttgagaagagagaacc

SEQ ID NO: 260225 - DNA, 90 bp, Homo sapiens
agccgcgaaccgagcgggcggcgggcgcgcgcaccatgggggagaaacccgggaccagctgataggaagatgtcttcaggaaatgctaaa

SEQ ID NO: 260226 - DNA, 100 bp, Homo sapiens
aggagaccaggaaaatggccacagggctcctgagagccaaaaaagagatgcttctgatgagcagaattcacagtcctcgatggaacattcgatgaacagc

SEQ ID NO: 260227 - DNA, 83 bp, Homo sapiens
taaaaacttgcgccagagaaacacaaattaagtactgcttacaatgattttctgccgtctcttggcaaaaatggcaaataatg

SEQ ID NO: 260228 - DNA, 74 bp, Homo sapiens
gagtaccaggtggcccagctctacatgatccagcgtttgctgccaattgatggggcaaatgatctcttttttca

SEQ ID NO: 260229 - DNA, 101 bp, Homo sapiens
tgaagttcctccgggagcacttcgagaagctggagaaggtgacagagctgaatgaacctctctccaatgaagatcgaaatctcctctctgtggcctacaag

SEQ ID NO: 260230 - DNA, 73 bp, Homo sapiens
aacgcagacactgaactttgggcctgaatggttcaggccctctgtggttaaagactgtatccatgctgtgctc

SEQ ID NO: 260231 - DNA, 82 bp, Homo sapiens
ctggcagcagcccccggggcaagagcaggagcccggcaccccccgccgacaaggagggagcaggccgggctctcgccatggg

SEQ ID NO: 260232 - DNA, 83 bp, Homo sapiens
cagtatatacatcaagtcactgagtttagcagccactgctgcatcaggggcttttgttccaccaccaagtgcacaagagatac

SEQ ID NO: 260233 - DNA, 98 bp, Homo sapiens
tgagtggttgtgtggtcgcgtctcggaaaccggtagcgcttgcagcatgttgacggactggacaaagcttctatagcaaactcagatggccccacagc

SEQ ID NO: 260234 - DNA, 80 bp, Homo sapiens
tggcggatggccccaggtgtaagcgcagaaagcaggcgaacccgcggcgcaataacgaacactctgctccagccaaggtg

SEQ ID NO: 260235 - DNA, 82 bp, Homo sapiens
ggaaaggtgtgctgtgcctgaggccaggtgacttaagagattaaaattaatttggttgctgttggttctgaacaaataatga

SEQ ID NO: 260236 - DNA, 95 bp, Homo sapiens
gagatcaaatggcacttcattggccacctacagaaacaaaatgtcaacaaattgatggttgagaaaccaaggcagtatcatgagcaggaagaaac

SEQ ID NO: 260237 - DNA, 100 bp, Homo sapiens
gcagctgggcgagaagctgctccggcctagcctggcggagctccacgacgagctggaaaaggcatttggctttatgtcccgagttgccctacaagcagag

SEQ ID NO: 260238 - DNA, 100 bp, Homo sapiens
ttcgggaagcagggattccagtgccaagtgtcctctcgcatggcagagcaagtgggaaggcccagaagatcccttacaatacctgagaggtcttgttgcc

SEQ ID NO: 260239 - DNA, 75 bp, Homo sapiens
atgacattgtggacagtgacagcgatgctgaggatcgaggaacgttgtctgatacggactcagaggaagacgaag

SEQ ID NO: 260240 - DNA, 87 bp, Homo sapiens
agtcagtcattttactgtcaagacatttcttcggcattctgcaacaggtgatgatgaacagtctacacagatggctgcaagttggga

SEQ ID NO: 260241 - DNA, 109 bp, Homo sapiens
gcgacggagggaggagggaaggagatgaacgagattaagacccaattcaccacccgggaagacaatgcagatcttcgtgaagactctgactggtaagaccatcaccctc

SEQ ID NO: 260242 - DNA, 82 bp, Homo sapiens
cagctgagcacggaggggataggcacggacgcaacacttttggaacttagacgctaggaaagcaggcaggatgggagagtcg

SEQ ID NO: 260243 - DNA, 74 bp, Homo sapiens
ggactaccaaggagaagctatagactacttctactccaccaggaaggctaagtcctatcagccatggaaacacc

SEQ ID NO: 260244 - DNA, 85 bp, Homo sapiens
tttatgatggagtagttcagactgtcaaacatattcatgtcaaagctttttccaaagatcaggagcagcgctcttgatatggaaa

SEQ ID NO: 260245 - DNA, 90 bp, Homo sapiens
gcaacagcaagcacatgcagaagaatcccccagggcccagaggggcttgcttctgacatgtctgatgagcgcattcctgctgttgctcct

SEQ ID NO: 260246 - DNA, 51 bp, Homo sapiens
gccagcatgccccagtccaaaggacttcgcaggtgagcagtaacggaaatc

SEQ ID NO: 260247 - DNA, 74 bp, Homo sapiens
agccagtcttctatgtttccacatcggtcagaaaaagatatatttggagttcttacaacatggcagacattgac

SEQ ID NO: 260248 - DNA, 96 bp, Homo sapiens
gtcagtgtttacactgtcaaggatgacaaggaaagtgtccctatctctgataccatcatcccagcccctctgaggaaggcaaagtttgttgagagc

SEQ ID NO: 260249 - DNA, 100 bp, Homo sapiens
agccgagataattagattcctcaccaactactaccagtcatttgtggatgtcatggaatttcgggtacatcaggaacgtctctatcaagaatacaatttc

SEQ ID NO: 260250 - DNA, 82 bp, Homo sapiens
gtcttctgcggctctcggtgccctctccttttcgtttccggaaacatggaccaagaatcgccttcagccctgtctggtgcat

SEQ ID NO: 260251 - DNA, 100 bp, Homo sapiens
ttacatcatagactttcagctacttgaagatagccatcagccgctacgtgactcttttctccagaatgttgtaccatctttgggtaggcagacttccctg

SEQ ID NO: 260252 - DNA, 95 bp, Homo sapiens
gattcgcagtggtcgcttcttctccttggtggtcctggctctgccatatgacacccccgtgcccggctacatgaataacactgtcaacaccatgc

SEQ ID NO: 260253 - DNA, 100 bp, Homo sapiens
cctgaaattgctgcttccctctggcagtcattggaatacactcagacatgcgaggattcatgacagcgcatggacagccagaccagcctcgatctgcgcg

SEQ ID NO: 260254 - DNA, 100 bp, Homo sapiens
tcccgagggtcccttccagctgtcacattctggagcgtatgagatgagatctgtagaaacttccagtgtgtagatgcttctgttctgaattatgactgtg

SEQ ID NO: 260255 - DNA, 95 bp, Homo sapiens
accagacactccctattttagaggagcttcaccagcacacagagcagcttgtacagagctctgagctcttcaccctgacctatggtgccctggtc

SEQ ID NO: 260256 - DNA, 85 bp, Homo sapiens
gacaacatccaagtgcaggaaaacttcaatatctctcggggccatgtgtccttcaagcccagcttagaccaacagcgttcatgcc

SEQ ID NO: 260257 - DNA, 104 bp, Homo sapiens
gaatgggacaagacccatctttatgcaaagccagcgttacagtaatgttccagggtcttgcctcacccaagctagagtgcagtggcctttgaagcttactacag

SEQ ID NO: 260258 - DNA, 90 bp, Homo sapiens
ggaggacaaagagcccctcatcgagctcttcgtcaagaaatgctgagcctgatgaacaggactttgagaagagcaattcccgaaagcgcc

SEQ ID NO: 260259 - DNA, 76 bp, Homo sapiens
cagcagcaacttaatggaaactaggtgagatcggactggaactgttcggctgcgaccagaaatttattttcctgag

SEQ ID NO: 260260 - DNA, 76 bp, Homo sapiens
aaggattaaggatccccaaagtctcagacttcagtattcaagataaactggactacatcacagctttaaatataaa

SEQ ID NO: 260261 - DNA, 50 bp, Homo sapiens
gagcgatttgccatcgtgctgtcaagttcatccgagaagtaacaccatat

SEQ ID NO: 260262 - DNA, 100 bp, Homo sapiens
aatcgaaggcattctggaaaagactggtatctcaatctaaacttgctgaagctgctgaaagatggcagaagaagtggtggtagtagccaaatttgattat

SEQ ID NO: 260263 - DNA, 83 bp, Homo sapiens
tgttaacatccaggacttggccccgtcctgcgccggctttctgtttggggacggcaaaacagaacagaaaggcggagataaaa

SEQ ID NO: 260264 - DNA, 100 bp, Homo sapiens
aaggaatccaccttcttacgctatggcagatgatatcatcaagttgaatcgaaaggaagggaagaagcagaattttccaagactaaatagaagactcctc

SEQ ID NO: 260265 - DNA, 100 bp, Homo sapiens
tccctgcagaggctcttcctcatcatctcagccacgaagtacagccggaggtatattgaagcaagtcaaagattacattaaacagtgtagcaaatgccag

SEQ ID NO: 260266 - DNA, 75 bp, Homo sapiens
attccaagtaactcttatttggaactttttacccctgaatgcaagtttaaagaatctgtttttgaaaattattat

SEQ ID NO: 260267 - DNA, 87 bp, Homo sapiens
aaggcctgacatatctgagggagaagcacaagatcatgcacagagattgcgcagtctctttgtggagaggacttgatcattaaagga

SEQ ID NO: 260268 - DNA, 100 bp, Homo sapiens
gtttcccccatggctcactatgtgcctgatatcatgccaattgaatctgttattgcaaggtttgaagatcagcttcagcaatggttgtctgaagactcag

SEQ ID NO: 260269 - DNA, 100 bp, Homo sapiens
gtcggagtttgagccccggaggcagagcggctgccatggctaaggtgattcaaactaaatcaacccaatgtctctcctacccactcaccattgctaccct

SEQ ID NO: 260270 - DNA, 96 bp, Homo sapiens
ttatgtcagaggaagtggctttcttattgcagcaaaaattcccgtaccaatgtcagtgctaggtgctgaagctgctgaaagatggcagaagaagtg

SEQ ID NO: 260271 - DNA, 98 bp, Homo sapiens
cattggaccacacaaagtcttactgggggattcccgaagtcttccgttttctgagaatgtgagtgctgttcaaaaattagacttttcagatacaatgg

SEQ ID NO: 260272 - DNA, 100 bp, Homo sapiens
tgaacatgcggccaactgtgccacccatgctctgatttcatgccaatattgggaaccaacctaaatccagaattcatttcagtctgcaacaatgccacat

SEQ ID NO: 260273 - DNA, 51 bp, Homo sapiens
ctcaactggctatttgacagagactttgctaccaggacttgctggcccctc

SEQ ID NO: 260274 - DNA, 100 bp, Homo sapiens
cccgaggagcaccccgtgctgctgaccgaggcccccctgaaccccaaggccaaccgcgagaagatgacccagcctagatattatcctactgaagatgtgc

SEQ ID NO: 260275 - DNA, 100 bp, Homo sapiens
ccccgctgcccttggggacctggcaaagtcgaggtttcctcacagcgttgagattgagactgggggtcggtgagcgccgcgagggggtcaacgcctccgt

SEQ ID NO: 260276 - DNA, 90 bp, Homo sapiens
tcgtgtcgctgctgcaggaggccaaggacggcgttctggatctcaaagcgaaatgagccgtcagactgctacagcattacctaccggtac

SEQ ID NO: 260277 - DNA, 100 bp, Homo sapiens
gacggcgccatcaccgagcgcttgatgtgcgcggagagcaatcgccgggacagctgcaaggactccctggaggaaaagcggaagcggcagcggtctgaac

SEQ ID NO: 260278 - DNA, 100 bp, Homo sapiens
ttctcctcctttcctccctcccagatcttctcacggtctctgaaagaagatgaatttggctgagatttgtgataatgcaaagaaaggaagagaatatgcc

SEQ ID NO: 260279 - DNA, 74 bp, Homo sapiens
aacatagagaggaactggagcaattgaagctgactactaaggagaataagatttatcgaggtgtgagagtcgga

SEQ ID NO: 260280 - DNA, 75 bp, Homo sapiens
caagaatacctcggcaaattccgacgtcttgaagacttccgagtagatgctgcacggttaggtattttacctgtg

SEQ ID NO: 260281 - DNA, 101 bp, Homo sapiens
tatgatatacaagacaaggtgaagcctcggaaggattaatgcagtatcgaatggacaagtccgaggtgatagttacagtgaaggttgtctgggtcaaacag

SEQ ID NO: 260282 - DNA, 100 bp, Homo sapiens
cgaaggccgggacccggttccccggcccacagtgggggtgtgcaaacccgagagaactgggtgacaaacagcatgtttggtgcttcaagaaagaagtttg

SEQ ID NO: 260283 - DNA, 113 bp, Homo sapiens
gcgccagcggccgagcgggcggcttcctggcctgggcgctccggtggcggcggaggttttaaaatcaaagatgggaaaatcggagaaaattgcccttccccatggccagcttg

SEQ ID NO: 260284 - DNA, 97 bp, Homo sapiens
ggagggagccatgaagcattacgaggtctcggcgcggaagatggccggcggcgtggacggccccatcgggatcccgttccccgaccacagcagcgac

SEQ ID NO: 260285 - DNA, 100 bp, Homo sapiens
ctaaagatgacctctctggtgctgacatcaaggcggcaaagatctgcaacaacatgctgttagctattagtatgattggaactgctgaagctatgaatct

SEQ ID NO: 260286 - DNA, 75 bp, Homo sapiens
ggatctgaagagctatggtgaaacaccactgaagcattgccaaggtagtgggcagcagtcagtgacaggtgtaac

SEQ ID NO: 260287 - DNA, 96 bp, Homo sapiens
ggatttcctcccggacatgatggtcgagggccgcctgctcgttcctgacagaatgttcttccaggggacccagccccctaaccatgggagctcagg

SEQ ID NO: 260288 - DNA, 97 bp, Homo sapiens
tctcctgatacccggatgtgaggcgatccgctggcgctagtctgaccctccgccaggcaaaaggaagtaaactgtttcacgttagacctgtaaccca

SEQ ID NO: 260289 - DNA, 101 bp, Homo sapiens
agaggaaaggtggcatcttggccatagattgtcactgctgttccaagggcacacgcagagggatttggaattcctggagagttgcctttgtgagaagctgg

SEQ ID NO: 260290 - DNA, 98 bp, Homo sapiens
gctgtttggaaagacccaggagaagccgcccaaagaactgtgagatggaagattttcgaggtatagcagaagaatcatttccaagctttctcaccaat

SEQ ID NO: 260291 - DNA, 75 bp, Homo sapiens
ccagaagtaaaagcacagctgccttgtctggagaagcaggtttaccgacaagactgtgaaactttcgggatggtg

SEQ ID NO: 260292 - DNA, 83 bp, Homo sapiens
cgaggaggcgcgggaggtgttcgagaacgaccccgagacggtgtccccaggtgtcattgccaacccctttgcggcaggcatcg

SEQ ID NO: 260293 - DNA, 82 bp, Homo sapiens
ctgccgtccttctccactttcgccagcccgtgccgcgagcgcggcctgcaggagcctgcctgctccgcttcagcggactctc

SEQ ID NO: 260294 - DNA, 100 bp, Homo sapiens
cctccgcgcggtccatcgcccactggacgccgcccgcggccggaccgctctaagcgaaagacatgaggcctcagcctgaaatgaggttgttttgaggtca

SEQ ID NO: 260295 - DNA, 99 bp, Homo sapiens
ggacgactccgaggaacattgaggtgtttaaaattatccaactgccatagagctaaattcttttttggaaaattgaaccgaacttctactgaatacaag

SEQ ID NO: 260296 - DNA, 100 bp, Homo sapiens
gttcaggaaacatccaagaaaaatgtccttaaagcaattgagcaggctgatctactgcaggagatacaaactggactctcaggacaaaacgacaccagcc

SEQ ID NO: 260297 - DNA, 118 bp, Homo sapiens
atccaggtgccttctggggactgtcatctctaaaaagattggcaattcatgatgttaaagccacagatctgggattaggtaaagtaagatttaaggcagaagtagattttgatgggcg

SEQ ID NO: 260298 - DNA, 82 bp, Homo sapiens
ttcgattaacatgctgaggattgtagagccatatattgcatgggggttcggctcctggctgatcccactggggcctttggga

SEQ ID NO: 260299 - DNA, 100 bp, Homo sapiens
gtgaccccatatatgattttctttaaggatggtttagaaatggaaaaatgtcagcagtgttgtactgctacttctataaacggacagccgtaagactagg

SEQ ID NO: 260300 - DNA, 114 bp, Homo sapiens
gcccagtaaggatgtacatgttgtaaaagagcaaaatccaccacctgcaaggaaaccactgattgcttgtgtggagaaacagctattaggagaacatttaacagcaattctgca

SEQ ID NO: 260301 - DNA, 100 bp, Homo sapiens
gaactggaggctgagtacgacagcctcaaacaggagctggagcagctcaaagagggggtgaagccagccagttttgacaaagtagcaattcctgaagtga

SEQ ID NO: 260302 - DNA, 103 bp, Homo sapiens
ctgtcccagccgatgggttgtccgactgggagcagaggaagccttgaggacctactcacagataggaattgaagtgccggtggtggtgtgcacattgagcccc

SEQ ID NO: 260303 - DNA, 97 bp, Homo sapiens
ttgatgggctacagttagagtctgaagttgttaccaatggtgaaactacatgttcagaaacggcagtacatacctgtgaaaatgaagagcaaagcct

SEQ ID NO: 260304 - DNA, 73 bp, Homo sapiens
agaattgcagaaagacatgcttcattgtaatatgtgcaaaaggtctgtctctcctgccagagtgtatacacca

SEQ ID NO: 260305 - DNA, 50 bp, Homo sapiens
aattggagtcagcagaactgaaataggtaattctgaattgctcagctctg

SEQ ID NO: 260306 - DNA, 97 bp, Homo sapiens
gggagatagacgctgctgcctgcccagctgagagccagcctggaggttacccagcagcaggccacccaggccgaaggccagctactagagctgcgca

SEQ ID NO: 260307 - DNA, 100 bp, Homo sapiens
tcgggcggtcagcggacttcgtggtagaatccattggctctgaagtggggtctctggcttagcagtgtctgcaaaaacgaatcttttcctacaacctgtt

SEQ ID NO: 260308 - DNA, 148 bp, Homo sapiens
gaaaaatcagattagttgaagacaagccaggttccagacgacgccggtcctactccagaagccggagtcattcaagaaatgttgctgaagtgctgctgaaagggccagagatgcaaggatttgggatacattttgaacctttaagctg

SEQ ID NO: 260309 - DNA, 80 bp, Homo sapiens
agggcctgccctgctcctggtggcacccagtggcctgtactactgcgccatcatgaccgggtcctataacaacttcttca

SEQ ID NO: 260310 - DNA, 98 bp, Homo sapiens
gagaaatgaagaagaaaactgtatgtaccctaaatatgggagataagaagtatgaagacatggaaggaccgtatccttgatgagcttgacaaagacga

SEQ ID NO: 260311 - DNA, 100 bp, Homo sapiens
caacagacggcaacagatgtttcaacatcaagtaacattgaggagtctgtaaatcatatggatggagaaagccttcaaacagtggccgagctgcagaact

SEQ ID NO: 260312 - DNA, 100 bp, Homo sapiens
gcccgagaagctaaacaaccagctcctgagcctcccaaaccttacagcagcagtgttgtactgctacttctataaacggacagccgtaagactaggcgat

SEQ ID NO: 260313 - DNA, 74 bp, Homo sapiens
gagaaaaggcctaagaattttggcattggtgtagaatgagccaaggagactcaaacccagcagctattccgcat

SEQ ID NO: 260314 - DNA, 100 bp, Homo sapiens
atcaaccccctggccagctgcaagaccgatgtgctcgtcacggaagaccctgcagatgtcagagtatgtatgtaactgctctgtggttggaagcctgaat

SEQ ID NO: 260315 - DNA, 83 bp, Homo sapiens
agctgactcagtggtggtgctgctgtgcaggcgagcccacaccttaaccgtgctcttcatcctcacctgtacgcttggctatg

SEQ ID NO: 260316 - DNA, 96 bp, Homo sapiens
cgggttgctttccaaaatggcgcgggtgctgaaggctgcagccgcgaatgccgtaggattccagctttccctcctggccagaaatgttcagcctgg

SEQ ID NO: 260317 - DNA, 74 bp, Homo sapiens
ggcgctccaggaggcactcacagcagagagagatcatcattgcctgaatttagctttgtgactgcaagagcaag

SEQ ID NO: 260318 - DNA, 75 bp, Homo sapiens
cgacagccactttgggctttggagccccccaggccccagtagcttgctttgaccagatcaagttctttaagtgac

SEQ ID NO: 260319 - DNA, 98 bp, Homo sapiens
caaccccacatccctcccggctgtagccaagaactattcggttctctacttccaacagaaggtcttatatccagatggccaggctcagatgattcacc

SEQ ID NO: 260320 - DNA, 82 bp, Homo sapiens
cccgtccgtccgccgccaccacccactccggacacagggtttggaaatcccttgtctccaggttgctgggattgacttcttg

SEQ ID NO: 260321 - DNA, 50 bp, Homo sapiens
gtcttcctgaagaaggctgggctcctgcgccgagtgcctgaagttcgaaa

SEQ ID NO: 260322 - DNA, 75 bp, Homo sapiens
gggcagcatatgaaagtggattatggcatgaccgacggagcccagcaagccttgaggagaaccatggaaatctac

SEQ ID NO: 260323 - DNA, 100 bp, Homo sapiens
actttagctgtaaggaggagccagaaattgacagcccaggggagctggaagtcgagtgtgctactcaactcaggagatttggagacaaactgaacttccg

SEQ ID NO: 260324 - DNA, 99 bp, Homo sapiens
cgaacgatgtgcgagaactgcgcagacctggtggaggtgttaaatgaaaaaatggtggagtcaatgaagaaagtagcagggatggatgtggagctgaca

SEQ ID NO: 260325 - DNA, 83 bp, Homo sapiens
ctaatatttaagaaagaagatgttaactttcaggtacaccagaggatcgcttcctggcagaatttgggagctgtttattgcag

SEQ ID NO: 260326 - DNA, 82 bp, Homo sapiens
cagaaccttagcaaagaggagctgatagcggagctgcagcaacagctggaggaggaggctgccaagccgcccgagcctgaga

SEQ ID NO: 260327 - DNA, 122 bp, Homo sapiens
tcgttccccgccaaccgcaaccattgacgccatgtcgggttattcgagtgaccgagaccgcggccgggaccgaggcccaggatccggttgtggccgtggctgaggatggccgggagaagccg

SEQ ID NO: 260328 - DNA, 115 bp, Homo sapiens
agatggcctaccctcctgtacttgttccaactcaagtctttcatggtgctgattcagacatagaatggctacagaaagactttgggttgtatgtagtaaacatgtttgatactca

SEQ ID NO: 260329 - DNA, 75 bp, Homo sapiens
ggaagcaggactgcgccgcgtcttcctcaaggcgcattctacattctaaaggggagctcagtgaagatagacata

SEQ ID NO: 260330 - DNA, 83 bp, Homo sapiens
gccgctgactgtgcccctgtggaaggagatgtaaccttctgtaatggaagatgattgaagacaaggggcctcgtgttgctgac

SEQ ID NO: 260331 - DNA, 100 bp, Homo sapiens
gtaaagaagcagtaaaattcttaaaaagatgcagaaagatggatttttgcatgagatgcttctggacagaccccttgtctgtgtcccctgcccgctgggc

SEQ ID NO: 260332 - DNA, 96 bp, Homo sapiens
gtgtacctgccgcgacaccgaggtgtgatgaatgcagactctgctaccattttggctgtttggatcctcctttgaaaaagtctcctaaacagacag

SEQ ID NO: 260333 - DNA, 80 bp, Homo sapiens
gagatgatggctgatgaagaggaagaagtcaagccgatcttgcagaaattgcagcttcagtatcagacacagcacagcag

SEQ ID NO: 260334 - DNA, 87 bp, Homo sapiens
gggctcgcgggtgaccgaaaggatcatgaactagtgacctggaaaggatctgcaatcagaactattgaacttctccattcagaccgc

SEQ ID NO: 260335 - DNA, 100 bp, Homo sapiens
agctagcagtgagcaccttttggcccaatgaatatcaggctcctcgtgtaccagttcaagcactgcccatggttgttccacctcaggagcctgacaaacc

SEQ ID NO: 260336 - DNA, 75 bp, Homo sapiens
ggaagggactttaatcactgaccatcccaatatacagggcttttttccagacttcaagctcccattccaacagta

SEQ ID NO: 260337 - DNA, 73 bp, Homo sapiens
ttgacttggatacgaacatgttatatgttccaacatgtttaccgtggctgatgtgttgagtcaagatgaactg

SEQ ID NO: 260338 - DNA, 90 bp, Homo sapiens
ctgaaaaccaagtcttgtagtggagtgttgctgaacctgtttgcatgagttgctcctgacggccctttaggatacttccatgtctgtagg

SEQ ID NO: 260339 - DNA, 100 bp, Homo sapiens
aaagctgccaagttgaaaatggacgagtaatcgcctgctttgattcattgaaagaaaaccagtagattcccagacatcgcgaagtgaatctgaaattgtg

SEQ ID NO: 260340 - DNA, 98 bp, Homo sapiens
cgaggagcacagccgggccgctgcgaaggtccggaccctatttgtcagtggccttcctctggatatcaaacctcgggagctctatctgcttttcagac

SEQ ID NO: 260341 - DNA, 101 bp, Homo sapiens
aaaatgtgcatatttcaggagtgtcaactggaaaatcatcagcgtgttagcattttctttgactatgcaagatgtagcaagaacactgcgtggccctactt

SEQ ID NO: 260342 - DNA, 75 bp, Homo sapiens
gccggcgacttgagtgacgacctggagcattggtaagcgtcacactgccaaagtgagagctgctggagaactcat

SEQ ID NO: 260343 - DNA, 100 bp, Homo sapiens
tgcaagacccatccccactttgtgattccctaccgctgcttagttttgagtatccgaggagcccaggaggaggaacccacagacccccagctgatgcggc

SEQ ID NO: 260344 - DNA, 83 bp, Homo sapiens
ctcgcggcgagcggacggggtcgagtcagtgcgttcgcgcgagaaaccaaggtgtatgttggtaacctgggaactggcgctgg

SEQ ID NO: 260345 - DNA, 100 bp, Homo sapiens
gccaggctggtttcggaaatgcccttacagcagcagattggtgaaagacaacaagtgttagtaacagaagaatcttttgattccaagttttatgttgcac

SEQ ID NO: 260346 - DNA, 75 bp, Homo sapiens
ccagctgaggtgtccgtaaagattccagagaagcctgtgaacaaaaacttcagtgaagatttcatacattggcct

SEQ ID NO: 260347 - DNA, 100 bp, Homo sapiens
aagtggaaaaaacctgagaacttcctgatctctctcgctgtgagacatgtctgagactcctgctcagtgtagcattaagatatttggagttcttacaaca

SEQ ID NO: 260348 - DNA, 100 bp, Homo sapiens
gacaggggctgtagctgtcaaatggcggttgagaaaggaggctgcatcatgaacgcttccaccggaagtcagctggggagactctgtgaaagtaatgaag

SEQ ID NO: 260349 - DNA, 97 bp, Homo sapiens
cctgaaggaggttcgagatcacatgcaggactctttcttaatgcagcctgagcagggagaaggttttaaggtgaaaacgaagaaagaaatccggcat

SEQ ID NO: 260350 - DNA, 98 bp, Homo sapiens
tatagcaatctggttttcttggctgagtcagtgctgattctctcaaatagagcttgaaggataaatcttcatttttgtttcaacaaaacttcgaaaca

SEQ ID NO: 260351 - DNA, 98 bp, Homo sapiens
cctggggctgacaggaatcttctggtgtactctttttatgaaaaggaggactggaatgaaattgaccccattaaaaagaaagaccttcatcacagcaa

SEQ ID NO: 260352 - DNA, 83 bp, Homo sapiens
cagcgctttcctcatgggattcgccagctagctaattatattcactttataggaacagcttcagcttcagtgatgaaaaactg

SEQ ID NO: 260353 - DNA, 82 bp, Homo sapiens
cccctcgggaatcaggagtgacctggagcactgtgatttaacaacctgggtgtcctgcatgtgactaagaagaacatgatgg

SEQ ID NO: 260354 - DNA, 99 bp, Homo sapiens
ctataggggggcacgatgctcccgcatccaacttgacttccagactctcagactgtgtggaaagaataatcatgggccagactgggaagaaatctgaga

SEQ ID NO: 260355 - DNA, 98 bp, Homo sapiens
attgaactagaaaacagccggccaaaggccaaggggggcctggccagcctggcaaaagatgggatcgcttacacctgagacgaactacagaacagcac

SEQ ID NO: 260356 - DNA, 75 bp, Homo sapiens
gggagacgcccgaggacagggaggtgcgtctgcagctggcgcggaagaggctgaccggttccctgatgtgttacc

SEQ ID NO: 260357 - DNA, 75 bp, Homo sapiens
gccacagggagtcacctctgcgttctcagctcctgcccctcctaaagctgaagccaaagcgaaggctttaaaggc

SEQ ID NO: 260358 - DNA, 75 bp, Homo sapiens
tccttctcaaccttgtgggatgtgaaaactctgttactgaaggtgttcaggcgcttcgtggaggttggccgggtg

SEQ ID NO: 260359 - DNA, 97 bp, Homo sapiens
tccctaaggctggagaccgggtccacaaagacgagtgcgccttctccttcgacacgccgatgcaccgtggcctggcggcgagcccccggtcaccttc

SEQ ID NO: 260360 - DNA, 82 bp, Homo sapiens
gacctgggctgggaacccgcggtggagcgggacacgaacgtggtgtggacactgccagcggctgcagccgacttggaatgac

SEQ ID NO: 260361 - DNA, 75 bp, Homo sapiens
cgctagtgatcctttgcaccctgcttggagacggacttgcttccgatacagtttatgtaacttgatggaagaaaa

SEQ ID NO: 260362 - DNA, 83 bp, Homo sapiens
cgctggccgggggcgcgggcggcggcgccggcaggaagcctggtccgacccccagtggcactaacgtgggatcctcagggcgc

SEQ ID NO: 260363 - DNA, 131 bp, Homo sapiens
cccaccccatgaaaacctctcaccccgtcgttgcctccacttggcccgtccatagagccagccctgaccctctattctgcaccctgtgagccaccgagactgaaccaaacccaggaagcggcgccaccaac

SEQ ID NO: 260364 - DNA, 90 bp, Homo sapiens
atcgtgcttagcgtctgcctgtctgcaacaccgggaggcaaggagcacctggtctggcagggaacgatcagcgttggagtagatgccacc

SEQ ID NO: 260365 - DNA, 100 bp, Homo sapiens
ggacaatctcaagagcagcaggcagacatctgaaccgtggcatgtagaagtccaggtgtttggtgatcaccatggcaatgctgtgtacttgtttgaaaga

SEQ ID NO: 260366 - DNA, 74 bp, Homo sapiens
aattggaagctgtacacagcaagacgttgagttacatgttcagaagggtatatttacttctggcacatgggaag

SEQ ID NO: 260367 - DNA, 74 bp, Homo sapiens
tggacgacctcggcgaggtgcccaccatcgagtccctgatagaatccgtctcttgctcaagtgaaaattgaaga

SEQ ID NO: 260368 - DNA, 73 bp, Homo sapiens
tctgctgttcacatcccggctgtgacgtcgtgtccgctggactgtgctgctgccatctcggctcactgcaacc

SEQ ID NO: 260369 - DNA, 97 bp, Homo sapiens
aagagtggcagagtgagcacatcaaggcctgcgagaaggcagacggtaacaagtactccttgctggattgaacttcatctgaatggacctctacagt

SEQ ID NO: 260370 - DNA, 51 bp, Homo sapiens
agccacaatgcaggacaagtggacactcccagaaatcctggatagaaagca

SEQ ID NO: 260371 - DNA, 50 bp, Homo sapiens
cgcgcgtgcgcggacatggcctcaaacggaaactactttgcttcgcactt

SEQ ID NO: 260372 - DNA, 75 bp, Homo sapiens
caacttttgacctgtgaagatatacagacaaactttccagaaatgatgaatagatataagcagctattgacctat

SEQ ID NO: 260373 - DNA, 75 bp, Homo sapiens
tcctccctcttctcccgactatttggcaagaagcagatgcgcattttgatggatatcaaagctcagctctttgaa

SEQ ID NO: 260374 - DNA, 100 bp, Homo sapiens
gttccaggccttcctcaatggggaaacccaaattgtagctgacgaagcattttgcaacgcagttcggagttattatgagaggatgttaagcaagtttttg

SEQ ID NO: 260375 - DNA, 98 bp, Homo sapiens
tcggctacaacatttggcagaggatgcccaggctgaggaagagatcaagcaagagatgaacacactgcagcagaagctgaatgagcagcagagtgtgc

SEQ ID NO: 260376 - DNA, 100 bp, Homo sapiens
gtaccttcctgttctaccttgtcgaaacagaagacaaatcattctttgtaagaacaaaggctaagtgctatttatggaggtacctatatgctgaataaac

SEQ ID NO: 260377 - DNA, 97 bp, Homo sapiens
ggtcacgaaatggattggagtgaaccggagaccccgaaaacggaagcgcagggagaaggaagaggtgtttgaaaagcacagtattgctatgcagaat

SEQ ID NO: 260378 - DNA, 115 bp, Homo sapiens
tggcctagacctgaactcttcagataatcagagtggaggaagtacagccagcagtttccaatacttatctacaggaatcgccatgaccccagctctgagggaggcaacagcaaag

SEQ ID NO: 260379 - DNA, 51 bp, Homo sapiens
ggccacgcaccgcctgctgctgctggagctcaggccccggggcctccagcg

SEQ ID NO: 260380 - DNA, 100 bp, Homo sapiens
ttcgagggtgaagctcctcgacaccatggtggacacttttcttcagaagctggtcgccgccggcagtgctgcattagacgtggaactatctgatgattcc

SEQ ID NO: 260381 - DNA, 75 bp, Homo sapiens
ggagcacatcttcacactggacactctcgtgcaggactttgtgttttatgccccacgtctgagaatcaacaagcg

SEQ ID NO: 260382 - DNA, 98 bp, Homo sapiens
ggagagcacaaccatcgcagttggaagcccatggggcagtccagcctagggtgaatgtttccccctccaagaaggggcccttgcagcaccacaacctg

SEQ ID NO: 260383 - DNA, 96 bp, Homo sapiens
catttgttgatctgttcaccactcatttgcaacttatatcgccagtccagcagctaaggatattttgtgcagatcacagaactgtgtggtgcaaag

SEQ ID NO: 260384 - DNA, 83 bp, Homo sapiens
aaatcttgtgacaaaactcacacatgcccaccgtgcccagcaggctcctgctccagcccagcccccagagagcagaccccagg

SEQ ID NO: 260385 - DNA, 103 bp, Homo sapiens
gcaaaccaaggatctggggatcttcgcactatcccaagacaaatcttcctattttcaagctgaaagaatctactgttagaagaagatacagtgactttgaatg

SEQ ID NO: 260386 - DNA, 109 bp, Homo sapiens
cggctccgtcgtggaagcaggactgcgccgcgtcttcctcaaggtgaaagaacttgtcctggacaacagtcggtcgaatgaaggcaaactcgaaggcctcacagatgaa

SEQ ID NO: 260387 - DNA, 98 bp, Homo sapiens
cggccttcgggtcgggcgtctccgccggctactgccgcttcagttctcccggtgtggccacgagtcggatgctgttgatggagtaatgaatggtgaat

SEQ ID NO: 260388 - DNA, 82 bp, Homo sapiens
ttccccccgcaccaaattgcatcgtttcccagagacaaggtctcaccatgttgcccagaatggacccgaactcctgagctca

SEQ ID NO: 260389 - DNA, 97 bp, Homo sapiens
ctgcataatcttacatggactaaagatgaaactttaaaccgcaagcctgcactgcccaaagtcttggaaacttgctggatatgatgtaccgggagcc

SEQ ID NO: 260390 - DNA, 115 bp, Homo sapiens
actccatcgcctgctgcttcagcttctgcagctccctagtggtcccacagctgcggccgccgccttcttcctccatgacccatcctcatgccaacaaactacccttgaaggattc

SEQ ID NO: 260391 - DNA, 75 bp, Homo sapiens
gcccccagctcagctcttactgcgggccgctccgacggcggtccatcctggtggacccaagtggagagattgtgg

SEQ ID NO: 260392 - DNA, 82 bp, Homo sapiens
ggaggagtacatccccacacaggagatccaggtcaccagcatccactggagctacaagagtgatgtgtccaatctagatccc

SEQ ID NO: 260393 - DNA, 75 bp, Homo sapiens
acttatctacggtaatggatgaaatccacactgttctcaagaaggggtttgtgaccatgactctggaaagcctag

SEQ ID NO: 260394 - DNA, 90 bp, Homo sapiens
gtgtcctgagatcaaatggcacttcattggccacctacagaaacaaaatgtcaacaaattgatggacttgtctgcagcgcagattgctac

SEQ ID NO: 260395 - DNA, 90 bp, Homo sapiens
ggacagctcagcgccccggcatcacccacggcatctctgggaaaggacctggggctggtgaggggcccggaggagcctttgcccgcgtgt

SEQ ID NO: 260396 - DNA, 90 bp, Homo sapiens
cagagagagaaacaggggagcaaggtgcaagagtccacaaagggacctgatgaagcgaagatcaagttgcaaccagtgtggcagagagtc

SEQ ID NO: 260397 - DNA, 100 bp, Homo sapiens
cttacaacatggcagacattgacaatgtggggtgatcagccccagatttgacgtgcaactcaaagacctggaaaaatggcagaataatctgcttccatcc

SEQ ID NO: 260398 - DNA, 100 bp, Homo sapiens
ccgactgccgaggaacgagagcgcgaagctaagaatgttcgtggcatcagagagaaagatgagagctcaccaggtgctcaccttcctcctgctcttcgtg

SEQ ID NO: 260399 - DNA, 100 bp, Homo sapiens
ctcccgcagcgacgcggctggcaagactgtttgtgttgcgggggccggacttcaaggtccaggtcaagacctcgtctccgttctcatagtcgtagcagtg

SEQ ID NO: 260400 - DNA, 100 bp, Homo sapiens
gcaagaacgagtcgggcagccgctccaatggttaaatgggccagggaaaactatcaccataacattggctcaccatattgcttacggttagcttctgctg

SEQ ID NO: 260401 - DNA, 75 bp, Homo sapiens
agattctgctcacggaactgcaggttgaggaggaagaggaggagttggtcttgctgtctcaggagtggcaaaggt

SEQ ID NO: 260402 - DNA, 82 bp, Homo sapiens
gtgtcatccagccttagcaaaccagaggttgcaggcgccccactggttactgcaacgaccactgcagtgtcttcagtcctgc

SEQ ID NO: 260403 - DNA, 74 bp, Homo sapiens
tttttgaccagaaaaccgacaaccttcccagaaagtccaagctcgtgcaaagtggaagatgctttctacaaagg

SEQ ID NO: 260404 - DNA, 100 bp, Homo sapiens
cgctccggctgtaaggagccgcggcggggggaaaatggagcccttcaccaatgaattggaacatcgatcagttaaaaaggctggcattgaggtccaggaa

SEQ ID NO: 260405 - DNA, 105 bp, Homo sapiens
taggcgtgagccaccgtgcctggctgaaggatgtaatccctgttcattactacttaatacctccaccaacaaagactaagaatggcagcaaagataaggaaaaag

SEQ ID NO: 260406 - DNA, 75 bp, Homo sapiens
gcaggagcgattccgtcgccaaacaggtactgcttaggatgaatatgatttggagaaattccatttcttgtctaa

SEQ ID NO: 260407 - DNA, 100 bp, Homo sapiens
tgatgctcgggccggacgggcgggcgcggatccctgcgtcccgatccagaatataagaagtttttagaaacctactgtgtggaggaagagaagaccagtg

SEQ ID NO: 260408 - DNA, 50 bp, Homo sapiens
ggaccactcgttgctgacagtcagaaaagaccttcagagaagacatggct

SEQ ID NO: 260409 - DNA, 98 bp, Homo sapiens
cgacgttcacagaggaacactgccggggcccaaccacaagacgactcaataggaggaaggcccaaggatgtgaccttctcttggattttcctgattat

SEQ ID NO: 260410 - DNA, 98 bp, Homo sapiens
aattgagaactactgctctaaactgaggagaactgaattctttgaacttgtcagtaaaggagaatacgattggaacatcaaaaaccatcgtgatatat

SEQ ID NO: 260411 - DNA, 76 bp, Homo sapiens
aatttggtttcacagcttgtccatagcctcaaccaggtatcaacagatcacatggcagcaagtgtgaagacagaaa

SEQ ID NO: 260412 - DNA, 100 bp, Homo sapiens
gctggtgcgggatccttgtctttgtcctgtactttgtgcaggctgttcctgagactgcaggcatcaagtttccagacttcaagtctgcaggtgtcacgct

SEQ ID NO: 260413 - DNA, 90 bp, Homo sapiens
agaaactgaggcctggaatttgattaactcattcaaggttacccagttgtggatgacgtagtagatgaaagtgatgacaacgatgatatt

SEQ ID NO: 260414 - DNA, 83 bp, Homo sapiens
ctattttctagtgctgagatcctgagacaatggtttatcatttaaaagtgcctgtgtgaagtcacttttgctggaaaactgca

SEQ ID NO: 260415 - DNA, 75 bp, Homo sapiens
cgggacgccatgtccatggaggaccccttctttgtggtgaaagggcagcagataatggcagctttaaactcccag

SEQ ID NO: 260416 - DNA, 99 bp, Homo sapiens
atcagaaagagagctccaaggagaaaatccagaagagcaaaggcgatgatgccacattacctgtggcaactatggcggtggtcctggttatagtagtag

SEQ ID NO: 260417 - DNA, 82 bp, Homo sapiens
gaatgtccatccccagatacttctcaaaatacttgtaaaagtcctccaaaaatgagcaagattttcttcaatcacatctgaa

SEQ ID NO: 260418 - DNA, 83 bp, Homo sapiens
cttgactggttcgaggacagcacccgccaacctcctggaaggtctccctgtgctgtcaggaatctacaggacttggctcgtat

SEQ ID NO: 260419 - DNA, 83 bp, Homo sapiens
acagccgaccctccaagttagctgacttctgggggaacaacaacgagatcctcagtgtgtactaatggtcacttgatgtgcgc

SEQ ID NO: 260420 - DNA, 98 bp, Homo sapiens
tggcagcgcgggaaacgtcaaactcgagcctgatagcgcatatcaaggtggagtcttctttctcactgtacattttccgacagattatccttttaaac

SEQ ID NO: 260421 - DNA, 131 bp, Homo sapiens
ttcagttcaacttgctagacttcacacggcgagcatacggcaccaattacatcgagaccctcagagtgcaggtaaatgagctggatggtatcccgttgatcctggacaactgcaacatcagtgacagtaac

SEQ ID NO: 260422 - DNA, 83 bp, Homo sapiens
gactgaggagtcgccgccgccccgagtcccgtgcctccggagccagcgtggtggccatagacaacaagatcgaacaggccatg

SEQ ID NO: 260423 - DNA, 100 bp, Homo sapiens
gcctggaatgcagccaaatgtctcctttgtgaggataaacagctcgttggcagtagcagcttatgaggatgaggtggagcacagtgaaagaattcaagat

SEQ ID NO: 260424 - DNA, 100 bp, Homo sapiens
tggcatgggctacaaggaaaacggtacaacagagcctgtatcatggaggggtccagcatgaggaattcggactggttttcatttgcccatttgctgaaat

SEQ ID NO: 260425 - DNA, 80 bp, Homo sapiens
ctgcatttctgcattctgcttaattccctttccttaggtgttgggatggccaccaactgggggagcctcttgcaggataa

SEQ ID NO: 260426 - DNA, 82 bp, Homo sapiens
cccactccgacgtgtgctccgcccagggggtgcgaggataccccacgtctgccatcatggatgttctcgcagaagcaaatgg

SEQ ID NO: 260427 - DNA, 122 bp, Homo sapiens
cgcctggtcaactataacaagatggtcttctgtccctactacgatgcaatcctgagtgtcatggagaaactccagctgggcccagagattctgcagcgggaaaatccaaggcttatttatgc

SEQ ID NO: 260428 - DNA, 98 bp, Homo sapiens
ttttctttactctggggtcccggctgccctgtggcctcgctcctcggagggctccaccaaagcctgtacccaagaccattgacaaccagcgagtgtat

SEQ ID NO: 260429 - DNA, 98 bp, Homo sapiens
tggtccacctcttccgcttctaccgcgtgctcacctgtatcagctggcccctgtcgcttctactcgaacacgaatgcaaaagcagaaaatgaatgata

SEQ ID NO: 260430 - DNA, 100 bp, Homo sapiens
cctgtaaaaccagtgacgttttccacaggcatcaaaatggccgaagaacagttgagaattgttgaagaacaaagaaagattcatgaggaaaggatgaaac

SEQ ID NO: 260431 - DNA, 82 bp, Homo sapiens
ttgaccttcgtgctgtttctctccctggcttttggggcaagctacggaacagaagaaacattcatggtgtctcaagagaaaa

SEQ ID NO: 260432 - DNA, 100 bp, Homo sapiens
aggaaggcacatgaactgaagcttctgtcagaatgccaatacaagcagttgaaacactttgtgctactctgtggggctttggaaaagcatgttaaatgtg

SEQ ID NO: 260433 - DNA, 96 bp, Homo sapiens
cgcccgcggcgtccccggtttggtgttgcggcgcccaccttcgggaggatcaggcaaggcaggctgaggtaaagcggctcttccgccccattgagg

SEQ ID NO: 260434 - DNA, 98 bp, Homo sapiens
cgagcgcgctcgctccggcgccggcctcgcctcctcgcagcagcgccatggatgggcgggatccccgctgtgaacggccgcggggagcggctgctgct

SEQ ID NO: 260435 - DNA, 75 bp, Homo sapiens
agcccaaaccccgccaccatcatagtgatgttacagcctttcgattatgatcccaatgagaaaagtaaacacaag

SEQ ID NO: 260436 - DNA, 96 bp, Homo sapiens
caacaagaatgaggagcaggacatcttcatttacagagcaacttgatgaaggtacacccaatagagaggaagtgcccaccgcgtgccccgattgga

SEQ ID NO: 260437 - DNA, 75 bp, Homo sapiens
ggaagccatgaggccaaaggcagttgtattgtttccagagatgaatgatatgctgagagaaaaggtaactggaag

SEQ ID NO: 260438 - DNA, 100 bp, Homo sapiens
gtccagaattcacttttactaccccaaagtttggcagctagtttattgctgcagctcagacagaagtggcatagcttatttttacgccgaatgagagctc

SEQ ID NO: 260439 - DNA, 82 bp, Homo sapiens
agaaccgactggaccccacgtggcaggagatgctgaaccatgctacctgcaaggtcaaaatgcagatcttcgtgaaaaccct

SEQ ID NO: 260440 - DNA, 99 bp, Homo sapiens
gctggtgaaaaaggaggagttgctgaagcatgtcctaaatgaggtgctgaaccggcaaatccaaaaggagatctggaggatccaggacgtgatggaggg

SEQ ID NO: 260441 - DNA, 90 bp, Homo sapiens
gctctctgtaagaaatatgctgatcttactgtttgtctgtgggatataaacgcaggaccaaaagaaggcaaaattgtggatgctaaagcc

SEQ ID NO: 260442 - DNA, 82 bp, Homo sapiens
atgaagacagatgcaccaacgagatctattccagaggggagcttcaccacttcattgacggctttaatgaagagaaaagcaa

SEQ ID NO: 260443 - DNA, 90 bp, Homo sapiens
aagctgccacaaaccaggccaagatccacgctgacgcagagcggaaggaggccgccatggcatcagatgaaggcaaactttttgttggag

SEQ ID NO: 260444 - DNA, 98 bp, Homo sapiens
gaagtcttcgaggagaacgacggctccctcaagaatgtgcatgctgctgtggcccgagggaggcagatggttggagcaaaacgtcccactcactggag

SEQ ID NO: 260445 - DNA, 97 bp, Homo sapiens
attgaaattatctctggtgctgcagctctgtatttacctcctgagtgttttgtagttggaaaagagccaccaaagatttccaacaaggttgatgtat

SEQ ID NO: 260446 - DNA, 98 bp, Homo sapiens
ccgagcaccgggccctctgcgacctggggccctgggtgaagtgctccgccgcccttgcctccaggcggccggcgcggggcgcaggcggcgcggccatg

SEQ ID NO: 260447 - DNA, 82 bp, Homo sapiens
agacatcggcctctgcaggcttgccgaagaagggaggagagtgtgctgggcagacgatgctggacacgatggaggcgcccgg

SEQ ID NO: 260448 - DNA, 90 bp, Homo sapiens
ggaactggaggaacaccgattttctgtttgatcctggcgcccctgtgaaattgccttgtctgccagtgaaactgtcgcctccgctacctc

SEQ ID NO: 260449 - DNA, 49 bp, Homo sapiens
gaggtggagtcggagctgggacggtttcatgtccttagcaagctactga

SEQ ID NO: 260450 - DNA, 78 bp, Homo sapiens
tgtagtggagaaaaatggtcctatgtgtcggatattgacggccaagcactcctgcttctgacccttccgacggtgcag

SEQ ID NO: 260451 - DNA, 100 bp, Homo sapiens
gcaagattgcactacggaaggacctggataacgcatggctaatgtaaaagcagccccaaagataattgacacaggaggaggcttcattttagaagaggaa

SEQ ID NO: 260452 - DNA, 75 bp, Homo sapiens
ctacaggtgtttgtctcagaaatcgtatacatagacggatctcaatggagcaacagccaactcagtttataaatc

SEQ ID NO: 260453 - DNA, 82 bp, Homo sapiens
atcgtgttcctggagtatgagagttctgagaaggagaaagacactttaattggttggggtcagataagaagaggagtgacaa

SEQ ID NO: 260454 - DNA, 100 bp, Homo sapiens
cagaatttctcctcataaaaaaggtccagcctgatgagtgaagaggctaagcgaggagcacccaacccttggctctttgaggagccagaggagaccagag

SEQ ID NO: 260455 - DNA, 50 bp, Homo sapiens
gcatgccgcaatggacatctccagtcagggtatgagtattatagaacaat

SEQ ID NO: 260456 - DNA, 75 bp, Homo sapiens
tgggggtcctctctgagtcaaatccagtggtggagccgccaccaaaatgcagattttcgtgaaaacccttacggg

SEQ ID NO: 260457 - DNA, 100 bp, Homo sapiens
tgagatctgcagctggggcaggctgcagcaaagtgttactcaccaaagagatttgtgtggagagaagcaaaccataggtgcattactcactaaatattct

SEQ ID NO: 260458 - DNA, 90 bp, Homo sapiens
ggcggagctgacggtggaggttcgcggctctaacggggctttctacaagacaatgcagatcttcgtgaagactctgactggtaagaccat

SEQ ID NO: 260459 - DNA, 98 bp, Homo sapiens
gtgctccaggtcacccactatctggatgccgggcagaaaccagcctggacaccaagtctgtgtcagaaggccacctcaagaggaacatcgtggtgaag

SEQ ID NO: 260460 - DNA, 101 bp, Homo sapiens
tgtgatggtggttccaaagctgtgatgaatggcttggcacctggcagcaatgggcaagacaaaggccaccatggcggagctgcaggaggtgcagatcacag

SEQ ID NO: 260461 - DNA, 75 bp, Homo sapiens
gccgcctgccatgccccagccagtccccacagcataacagaatcccacgtggcgaagtctcgattttggaattat

SEQ ID NO: 260462 - DNA, 99 bp, Homo sapiens
gtgaggcctccccagccatgtggaactacttaattcagtgcacaaatgagatgaatgtgaacatcccacagttggcagacagtttatttgaaagaacta

SEQ ID NO: 260463 - DNA, 75 bp, Homo sapiens
ggaacagtgattgatcagattgctgaaacactatgggaacaggtgtttgagaagtcccccctgcgggtgaagaac

SEQ ID NO: 260464 - DNA, 100 bp, Homo sapiens
ttgatgaaagaggctgcacacccctgcactatgcagctacatcagacacagatggcaagacttaaccaccaccatgtcgagcaaaagaacaaagaccaag

SEQ ID NO: 260465 - DNA, 85 bp, Homo sapiens
gaagaggagctgctgaggatcgccaaaaagctggagaagatggtggccaggaagaacacggaatactcccccagttgcaagaggc

SEQ ID NO: 260466 - DNA, 114 bp, Homo sapiens
agccaacgcagaactaactgatgacgaacatgagaatgaatcgaaacatgaagaactggcagatacactgaagagatggtgccttggcacccttgcctggaactcgttagcaac

SEQ ID NO: 260467 - DNA, 75 bp, Homo sapiens
atgcccatcacaaataaccctatcgcagccgggagacatagggcctgattacattccaacagaggaagaaaggag

SEQ ID NO: 260468 - DNA, 100 bp, Homo sapiens
cagatgctgccagggtccctgaagagggaagacacgcggaaacaggttctgctccagacgagcccttaccacgttgactcactcctgcagctcagcgatg

SEQ ID NO: 260469 - DNA, 100 bp, Homo sapiens
ccgccggccgccgcgccgcccggcagcctcggcagttgtgaatgggagagttcacatccgcgactggcgagaggagacactgtggaagacaaagcaaccg

SEQ ID NO: 260470 - DNA, 99 bp, Homo sapiens
caggagaccatcgcagagtttttgtacattgcccggccgctgctgcacttttgatacaaccaagtcggatgggcagtttaagaagacagccagtaacag

SEQ ID NO: 260471 - DNA, 90 bp, Homo sapiens
ccgggcggcacgcacgcggtgcagggtaacatggcggatgcggaagcttacatcacgagaaaaagcagccaaggattataaccagaaatt

SEQ ID NO: 260472 - DNA, 51 bp, Homo sapiens
agcgtcgtgcacgcgggccagaggcgggtgtcaaattgagaaccaggtaga

SEQ ID NO: 260473 - DNA, 97 bp, Homo sapiens
ccagctgaaggatgcccacaggtcccatcccttcatcaaggagtaccaggccaagtgcctccatatctgggacctggatgtgcgtggcaaccatcgg

SEQ ID NO: 260474 - DNA, 98 bp, Homo sapiens
ttttggtttacagttggctgatgattccacagataacccagaatgaccatacctgaagaagacgctgatgtgggacaaggcagtaaatattgcctcgt

SEQ ID NO: 260475 - DNA, 100 bp, Homo sapiens
aagaaaaatcgatgcctgtctatcgggatacaggtcattgaatctttgggaattattatttataaagcactggactatggtttgaaggagaatgaagaaa

SEQ ID NO: 260476 - DNA, 51 bp, Homo sapiens
gttagtgaagcgcgcccggcgtcacggtttttgtggaaactctggataagt

SEQ ID NO: 260477 - DNA, 90 bp, Homo sapiens
tccgggttgagatccacagagctaaacgttttagagtaccaaccattgtgtgctgtgaggtaaagttgttttacaggtttgcagcctggt

SEQ ID NO: 260478 - DNA, 128 bp, Homo sapiens
ctcctgggcccaactgtgaccgatttaaactgcacataccatatgctggagagacattaaagtggtgctggtgacagctttgtgggagctctggccttctacctggcttactatccaaatctgtcctt

SEQ ID NO: 260479 - DNA, 82 bp, Homo sapiens
gaagatcatcattaaggacggaggcacgatcgaagacctgcaggtgaagctgcagcacgcggaggcggaccgggagcagctg

SEQ ID NO: 260480 - DNA, 75 bp, Homo sapiens
ctgacctcttaaggctctgtcagtcttagctttaatgaagcaccagttgagattcccagtccttctgaaacccca

SEQ ID NO: 260481 - DNA, 51 bp, Homo sapiens
ccagctcgcagcccgctgctgggaacattttagtggacaaaccaaatgacc

SEQ ID NO: 260482 - DNA, 88 bp, Homo sapiens
catgtggtttggggagtctgaggccaatgtcagagaaatctttgacaagttcaaccttcacttgactggagacatccacgccatcacc

SEQ ID NO: 260483 - DNA, 78 bp, Homo sapiens
accatgatggaatgcttgacagagatgagtttgcagttatgtgtcttgctgaatcagggctctcttatccctgccatc

SEQ ID NO: 260484 - DNA, 98 bp, Homo sapiens
gaggaggacggtctgcatactcgctgcccgccggctccctcccccgcgtccctgcgaccgccgcggcgaagatggtgtcccgacccaggctaagcttg

SEQ ID NO: 260485 - DNA, 75 bp, Homo sapiens
attctcagcaatcagactgtcgacattccagaaaatggacattcggaaattctttggagtaataccaagtggaaa

SEQ ID NO: 260486 - DNA, 100 bp, Homo sapiens
ctgctgctctgtctcagcgccgcctccctgcttcttaacaggttaatacaatctgttggaatgacactggagaatatattttatctggctcagatgacac

SEQ ID NO: 260487 - DNA, 82 bp, Homo sapiens
aagattgtcacatcttaaaccttccagtgaagggtaatactgaacaacctgtccaaactagcaagattggacttggaagaag

SEQ ID NO: 260488 - DNA, 154 bp, Homo sapiens
gagcagagtgtcagataatagctcattttagtagagggcaataaatgccacatgagatgatcacctcagcagaaaactgttattctggtacaagttaacccaggagaagcatttacaataagaagagaagatggacagtttcagtgcattacag

SEQ ID NO: 260489 - DNA, 98 bp, Homo sapiens
ccagagtggcatgtcctcagtgcaatgctgaatacctaatagtttttccaaaattgggaaagctccaaccatggccatggggctcttccgcgtgtgtc

SEQ ID NO: 260490 - DNA, 100 bp, Homo sapiens
ctttctggacagaccaacctgtcagtgctgcaagatgggcaacactccagattcagcctcagacaacctcggtttccgctgtgctgcagacgcaggccgg

SEQ ID NO: 260491 - DNA, 108 bp, Homo sapiens
tacaatcttcgcatgaaatggaagagagggtggtgcggatagcttgaggaaggtgacggccctgctcgggaggccctccagtctctgagccagcggcttcgggtgcag

SEQ ID NO: 260492 - DNA, 90 bp, Homo sapiens
gatgaacccaacctagtgggtgtaatacatcatgaactgcaggcaggggaacaggaacctgataaagaatcaggagcctcagtggatgaa

SEQ ID NO: 260493 - DNA, 100 bp, Homo sapiens
gtgcgaagaagctgcagccgcacctggccaaggttttgacgaagtatattatgggcagtacatctctttttacatgaaacaaatcttcttcttggatgac

SEQ ID NO: 260494 - DNA, 100 bp, Homo sapiens
cagtgaccttgaacgattccgctctgcggcgggtgtccctaaactagcagtttagggtgtcagactcgttcaaaacaagccatgactcctcagcaaaaca

SEQ ID NO: 260495 - DNA, 100 bp, Homo sapiens
ttttgaaaaacagtattccaaagaactcggagatgcctggaatacagtaagtgcttttggctgcccgtattcagacatgaacttgaaaaaggaggcaaca

SEQ ID NO: 260496 - DNA, 50 bp, Homo sapiens
aacctggcacggctcttgcttccgctgtcggaaaaggtaacagaagatgg

SEQ ID NO: 260497 - DNA, 100 bp, Homo sapiens
cggaggatgagcctgcagagcgcgcagtacctccgtactatactggcaattgctggagaagattttgcaattgttgcttctgatactcgattgagtgaag

SEQ ID NO: 260498 - DNA, 49 bp, Homo sapiens
aagatctcgtacaagatccttctttgatgtcacatgtacttcagtttga

SEQ ID NO: 260499 - DNA, 90 bp, Homo sapiens
gggccttatttccactttgtaattccagcgagtcgacttcccatcctgagttgatgacatctttatatttggcttcaaagaaagaagacc

SEQ ID NO: 260500 - DNA, 100 bp, Homo sapiens
aagagagtcaaatctagactggttcagattcagaacaagaaagtggacatctctaaggtctcctccaagtgtgggtctaaggctaacatcaagcacaagc

SEQ ID NO: 260501 - DNA, 74 bp, Homo sapiens
attgtcgtgccgcttttggaggatgggagaggccatggcaaaggtggagccgccaccaaaatgcagattttcgt

SEQ ID NO: 260502 - DNA, 75 bp, Homo sapiens
caattccctctgcacgagatgtttgtgtcgcctcagggccacgggcgccatgtcagaaccggctggggatgtccg

SEQ ID NO: 260503 - DNA, 101 bp, Homo sapiens
aacaagggctcaatatggaggattacggaactgctcgcagaaagaagaaggtggttcatagaacagccacagcagatgacaaaaaacttcagttctcctta

SEQ ID NO: 260504 - DNA, 89 bp, Homo sapiens
ccgggacatgcatcgtcccctggactctctcaacgtggggtagagcagcggctgccatgctcttctgtggcttcatcatcctggtgatc

SEQ ID NO: 260505 - DNA, 100 bp, Homo sapiens
gatgattccaagctatgctcttcaccgtgacccaaagtactggacagagcctgagaagttcctccctgaaaggaaaagcacaatagtgaggctattattt

SEQ ID NO: 260506 - DNA, 83 bp, Homo sapiens
gctgcttatggcggcgctggagagggggcgctgagctgttgggaaaatgaaactgaagccgtggtcacgtgacaggacatgta

SEQ ID NO: 260507 - DNA, 100 bp, Homo sapiens
ccgaccggagatagctaagatgccgcgcaggaggatctaccgctaccagtctcatgactatgccttcagtagtgtcgaaaaattacttcatgctctagga

SEQ ID NO: 260508 - DNA, 98 bp, Homo sapiens
tactgcgggcgggggtctgagggcctgcaaacaactcgagctggagcctcggccaggaccggcgcgagaggcggcttcatagagcccagtgtgcaatt

SEQ ID NO: 260509 - DNA, 82 bp, Homo sapiens
atgcctcaccctcatctatatcctttggcagctcacaggaagaaatgttggctatttggcgatgagaggtggtgaacagtga

SEQ ID NO: 260510 - DNA, 107 bp, Homo sapiens
caagaaaaggccaagatgatgaagtgagaacgttgatggcaaatggcgccccattcaccacagactggattggtgctgaagacatggacggcttccaggcagacacg

SEQ ID NO: 260511 - DNA, 75 bp, Homo sapiens
cagaaatcacattggaccctcctcccaactgtaggagaaggaagccaacatccttttggagccatgaatattgtc

SEQ ID NO: 260512 - DNA, 82 bp, Homo sapiens
ctcgctccctctgctcttcctcccttcgctcgcaccatggcaggccagaaagcagacccagggaggatagcacatgtcttcg

SEQ ID NO: 260513 - DNA, 83 bp, Homo sapiens
gcgacggctgaacgcagcccgccctccccaagtcgacgccgcaacccggggaaagcaggtgctggagaatctggtaaaagcac

SEQ ID NO: 260514 - DNA, 83 bp, Homo sapiens
gccaaggaataaacatgcaatgaacccaaaaggattttgaagatgtaactgagtttctggaagaggtcattgaagccttgata

SEQ ID NO: 260515 - DNA, 78 bp, Homo sapiens
ctcctcggccttggagagcagcggcggcggcggcaccccgggcgcgaaacgcttcgttaagggactcaggcagtacgg

SEQ ID NO: 260516 - DNA, 110 bp, Homo sapiens
agaactgttctcaggactcattattttaacatttgggagaaacacagccagaagatgacaagagcacctcaaaggcagcagcctcaaggagcagccatggccccagactt

SEQ ID NO: 260517 - DNA, 100 bp, Homo sapiens
aacggcattgctttttgctgtacatcctattcatactgaggcggttattgcagccgaaggagaaatgaatgcatccagggctctgaaagaagcctccatg

SEQ ID NO: 260518 - DNA, 100 bp, Homo sapiens
agagaacttctttatccttcgaaggaagcctgtggagattaaaaggagcccaagccccatctcatcctagcacaccctcctccactgtcctggcagtagc

SEQ ID NO: 260519 - DNA, 73 bp, Homo sapiens
cgatgggcaacacggtgcaccggaccctgccagaattccatagtactcagcacacagatggccacattgggac

SEQ ID NO: 260520 - DNA, 103 bp, Homo sapiens
cccagatctggtgagtcagaggaaatcatttctgctctgcacttggcaccaaggctgtcaccctgttacctccgggtgcagtggctcacacctgtaatcccag

SEQ ID NO: 260521 - DNA, 89 bp, Homo sapiens
aggctgctctgggattctcttcagccaatcttcattgctcaatgtactaatggtcacttgatgtgcgctggctgttttatccacctact

SEQ ID NO: 260522 - DNA, 76 bp, Homo sapiens
atcttgaaaataaaacttgccaggttccagactctatgacatctgctgcctggattgacatgtacgtggaggggac

SEQ ID NO: 260523 - DNA, 75 bp, Homo sapiens
gggacgagacctgaccttgcagtacaacatctacaatgttggctcaaggattcaagccaaaactcgagaatttag

SEQ ID NO: 260524 - DNA, 78 bp, Homo sapiens
taactcggtgtcaaagccaagacataaactcaaccccttctcttccaaaaggagcagcagccaagctggacagatgac

SEQ ID NO: 260525 - DNA, 75 bp, Homo sapiens
gaataaggagaaggataagtcgaaggggaaggcgcctgaagaggacgaaggttctgcggcatgaggaatttgaag

SEQ ID NO: 260526 - DNA, 75 bp, Homo sapiens
ggcatccgtaaccacaaggaggacgagttatcagggaataccaagagcagagagagcatccaggaacctagatct

SEQ ID NO: 260527 - DNA, 98 bp, Homo sapiens
ctgcccgtttggagggtcacaaagaagggattgtacagactgaacagattaggatggagagcaatacatcatcatctttggagaatttagcgacggcg

SEQ ID NO: 260528 - DNA, 104 bp, Homo sapiens
actgcagccacgcgggcgagcggctgtgtggatgtcggcgaagccgcgggcgagggagtgcatccgccccaacccttttccccctcgtctcctgtgagaattcc

SEQ ID NO: 260529 - DNA, 74 bp, Homo sapiens
aaaaatctgaggttatcaatgacgagacatggaaggtctttaatgtaactttaaatggttcaccaaaggatgct

SEQ ID NO: 260530 - DNA, 100 bp, Homo sapiens
agggcctccccaggccgcctccgcccgtgaaggtccaggtgcaggtacagcagtctccgcaacaggtctcggctcagctctccccacaactcaccgttca

SEQ ID NO: 260531 - DNA, 75 bp, Homo sapiens
caatattcaggttcagaagctgctgaatgccttttttgagctaaagttgcagacaagatccagctcatcaataat

SEQ ID NO: 260532 - DNA, 127 bp, Homo sapiens
ctagaaatggcagagaattacttccagctctcagtagactggccagaaagatctgaattctacaaacacattgtgctttctggagggtctactatgtatcctggcctgccatcacggttggaacgag

SEQ ID NO: 260533 - DNA, 100 bp, Homo sapiens
aaaactttgggcttgcaacttttgttaccaaaggaatcagcaaaagcggcgccaggaaattgaacaaaaacttgaagttcaggcagaagaagagagaaag

SEQ ID NO: 260534 - DNA, 74 bp, Homo sapiens
tttccaaagagatgatgctcctgcatctgttcattcggcagcagaatcaactgaggaagtatctagcctccgtc

SEQ ID NO: 260535 - DNA, 100 bp, Homo sapiens
agctctccagaaaattgatgcagatcggcttcagctccccaggaatatgattgaaaacagcatgtttgaggaagaaccagatgtggtggatttagccaaa

SEQ ID NO: 260536 - DNA, 100 bp, Homo sapiens
ggactatgtggtggacttggacacgtcccagctctctctgggcatctggaaaggtgtaggagctgcacgatctgggaacctcacgtttatggtgggagga

SEQ ID NO: 260537 - DNA, 74 bp, Homo sapiens
cagcgggcggacggccggcgggggcggcgtgcggcctagcgtctcaggtcttgcgagattcacggatccaccat

SEQ ID NO: 260538 - DNA, 99 bp, Homo sapiens
aagaggtcgaattggagctgatggcctactcatgcaccctgtgctggagtccctgaggaatactgaccggcagtggctgattgacaccctctatgcctt

SEQ ID NO: 260539 - DNA, 100 bp, Homo sapiens
ggaagatggcggatctggaggagcagttgtctgatgaagagaaggaacttgctactaccagcaccatgccctaccaatatccagcactgaccccggagca

SEQ ID NO: 260540 - DNA, 75 bp, Homo sapiens
aagagctcgtattccgtgtgccatgaactgtgtcaagggctccaagtgccagactggcacagcctccaggttggc

SEQ ID NO: 260541 - DNA, 102 bp, Homo sapiens
agtttgagagaagtttaagagaagaaatggacatgattgcctaaatcagccaaacacagggtactccaaagattcaggtttactcacgtcatccagcagaga

SEQ ID NO: 260542 - DNA, 100 bp, Homo sapiens
tctacaaggccaagttcatctcctccgtcaccagccacatctaccagttttgcctgcactctccctggatgctggaggctggaggcagtgacgcagcaac

SEQ ID NO: 260543 - DNA, 95 bp, Homo sapiens
ggaaaatggcggtgtctacagtgttctcgacttcgtcgctgggcagcttgtgcagctggaagagaaagggcagggttcagtgccctggtcagtat

SEQ ID NO: 260544 - DNA, 100 bp, Homo sapiens
agggattcggtgaagatttggaggatttgggggctgtagcccccccagtcagtggagacttaaccaaagagggactggtgattgcagctggaagtgccca

SEQ ID NO: 260545 - DNA, 51 bp, Homo sapiens
gaggagagattgagctgtttgacggggagctgtcggaaaaggtaacagaag

SEQ ID NO: 260546 - DNA, 98 bp, Homo sapiens
ggagagcaaccgccaagcttggtgggagtcaagctcagcaaaacccagcagctcagattcctgccaggcagcgggagattgaaatgaaccgacagcaa

SEQ ID NO: 260547 - DNA, 50 bp, Homo sapiens
tgggtttgagtccagcagtgctttagagctggaaacaacttctggtggat

SEQ ID NO: 260548 - DNA, 100 bp, Homo sapiens
ggctgctggacctcagctacccccgcacccacgcggccctgctgaaagtggcgcaaatggtttaactatagatcaacacatcatcttgcatctcatgggt

SEQ ID NO: 260549 - DNA, 100 bp, Homo sapiens
attgtggctgaacaaaagaagctggaagccgcagaccttgtgatattccagctcctggcggaggagaagaccatctctgccaagtatgcagaggagcgcg

SEQ ID NO: 260550 - DNA, 75 bp, Homo sapiens
ggctaaccagttagtggtgctcaacgtgtacgacatgtctgaagatgatgagaaactgaaaaagaggaaggagcg

SEQ ID NO: 260551 - DNA, 110 bp, Homo sapiens
gggatatcggaagagagggccgaagcccaaaccgctagtggtgcaggtacagcacatgggaaccggaggaaaacatcctggatgctcgcttgctcgcagcctttgaggaa

SEQ ID NO: 260552 - DNA, 74 bp, Homo sapiens
aggattagatgatccaagtcaccaagaaattactgtctcaagtgatacgctatatgttctcctttcagccaaga

SEQ ID NO: 260553 - DNA, 76 bp, Homo sapiens
ccccagagtttggggaccccttgtcttgacagtatcatgcacagtggcagtatgatcacctcacggctacctatct

SEQ ID NO: 260554 - DNA, 75 bp, Homo sapiens
gtaagcctatgtcatttcatccaccacattacttaggagcgagcccagggcgtggtgctgaaagtgctcacaaac

SEQ ID NO: 260555 - DNA, 74 bp, Homo sapiens
tggctatggacagcaggaccgtggaggtcagagtcagagttggaatcagggctacggcaactactggaaccagg

SEQ ID NO: 260556 - DNA, 75 bp, Homo sapiens
cgctttgccactgataggaatgacttccggagatccacatctcaaagaagtggggcttcaccaagttcaatgctg

SEQ ID NO: 260557 - DNA, 83 bp, Homo sapiens
tcgtcttcctactgtcttgttttttccctgcaacagatgccacctcagtatggacagcaaggtgtgagtggttactgccagca

SEQ ID NO: 260558 - DNA, 101 bp, Homo sapiens
ttgggctatgccagttttaaagtgggagagctgctgaagtcaaaggagcaattgctggtcctgagcctgagcaggttcccttgcgtcagaagcccaggagg

SEQ ID NO: 260559 - DNA, 90 bp, Homo sapiens
ggtgcagccaccctcgctccctctgctcttcctcccttcgctcgcaccatggtcatggcaaaaccccaaaagatgccgcgtcagttcgag

SEQ ID NO: 260560 - DNA, 83 bp, Homo sapiens
ggaaaaaggaaggagaaaagatccggaagaaatatccggacagggtccccattaacgtcttcaaggacccagttgctgatccc

SEQ ID NO: 260561 - DNA, 90 bp, Homo sapiens
cgcgcgcggcccctcctccccggcgcctcccaggctataatagatgaatttgagcagaagcttcgggcctgtcataccagaggtttggat

SEQ ID NO: 260562 - DNA, 82 bp, Homo sapiens
ttgaaacaaaattggcgattattcctggtggagtgttgctaacaaccacaagcagaatttgatgacggtggcaaaccttggt

SEQ ID NO: 260563 - DNA, 100 bp, Homo sapiens
ggatcaagcatgcctgtcaactggtggataatattaatgcagctgtgatggatttgaaaaaaaagaagatccgcagtctaagtgaagaggtcaaaatagg

SEQ ID NO: 260564 - DNA, 82 bp, Homo sapiens
gacagcggccccctggagggggcagtcccgggagaacctgcggcggccggagcgctatccagtcagttcgctgctattccca

SEQ ID NO: 260565 - DNA, 50 bp, Homo sapiens
tcagaacagcattgacgacaaaatgaagactattctcagcaatcagactg

SEQ ID NO: 260566 - DNA, 82 bp, Homo sapiens
cgagcgcccctccgagctggggttggacgctgccagtttgcacagcagcaggagcaggccgggctctcgccatgggtcactg

SEQ ID NO: 260567 - DNA, 96 bp, Homo sapiens
cacgaacatgagcccactgctgcacttctatggccgtaaagtgtcatggagaaactccagctgggcccagagattctgcagcgggaaaatccaagg

SEQ ID NO: 260568 - DNA, 75 bp, Homo sapiens
cttcaacagtgaggaggatgccaaagctgccaaggaggtcctggagtacaatgccattggaggcaagtataaccg

SEQ ID NO: 260569 - DNA, 82 bp, Homo sapiens
gatccgcgggacaagaaaattcatgcggcctactcctccgtcccggtcagcaacatgaactcaggcctgggctccatgaact

SEQ ID NO: 260570 - DNA, 100 bp, Homo sapiens
cctggttctgccttctggacaatctttccgggccatgaagcccccaggaggagaatcgagcaatctttttggaagtccagaagaagctactccttccagc

SEQ ID NO: 260571 - DNA, 88 bp, Homo sapiens
gggccctcactgagatgtgtggaggatttgatgaagatgttaaagcgaaagtggagaaccttctcgggatttccagcctggaaaaaac

SEQ ID NO: 260572 - DNA, 100 bp, Homo sapiens
agctggccaaagcctgcccagacggctcacctgtgcgggatggaacaaaagttaagaagagttttattggccaaaataaatcattctttggtcctttgga

SEQ ID NO: 260573 - DNA, 100 bp, Homo sapiens
atacaggaaatgtttgatgaagtttcctataacaaggtgctgtaccctgtgtgccatgtgcgtaacctgatgctgtggagtgcagtgtacctgccctgcc

SEQ ID NO: 260574 - DNA, 75 bp, Homo sapiens
gggaacaaatactactacatcccgcagtacaagaactggagagagatcatcctgatgttcacagatacagtgtgg

SEQ ID NO: 260575 - DNA, 100 bp, Homo sapiens
ccggaatcagacggtgccccatagatggccagctttcccccgagggtcaacgagaaagagatcgaatattatccagcaatgcaaatgaacaaactataac

SEQ ID NO: 260576 - DNA, 75 bp, Homo sapiens
tatttacccagaagtagtccatatgattccacctgctcctacgaagcccgactttgatggtcctcgagagaagat

SEQ ID NO: 260577 - DNA, 98 bp, Homo sapiens
ggcaaccactatttgagtttctgcctctacaaatttgactattctaggtacttcattcaaggcctggccgacaacaccgttattgctaaagtaaataa

SEQ ID NO: 260578 - DNA, 90 bp, Homo sapiens
cagagggatggctgctcagctgctgactgatgaggcactgggaggtggggaagacagggctccagctaccacaggacgggctctgggtat

SEQ ID NO: 260579 - DNA, 102 bp, Homo sapiens
tggtgcccattgggcagtgcctgtgccaggcaggctacgagaaggtggaggatgcctgccaggctgtaaacactttgactgaatcaacgttgaagaatgtcc

SEQ ID NO: 260580 - DNA, 74 bp, Homo sapiens
tgacagttgaaaatcctaaattcaggattcaggtccgttcctctgaagaatgggtacagcgaggacatagagct

SEQ ID NO: 260581 - DNA, 82 bp, Homo sapiens
tagcccttccggatcctgcgcgcagagcatcaagcatgatggaaccatgtgtgatacctgccgccagcaaccaatcattggc

SEQ ID NO: 260582 - DNA, 96 bp, Homo sapiens
cacacggcgctctccgacctctacctggagcatttgctgcagaagcgtagtcggccagaggaacccaagccagaccgtctccttgtattgaaagta

SEQ ID NO: 260583 - DNA, 79 bp, Homo sapiens
cagattcgcagtggtcgcttcttctccttgatttcgatggggtcctctatcatatttcaaatcctaatggagacaaaac

SEQ ID NO: 260584 - DNA, 97 bp, Homo sapiens
gggcgccgcgccgcacgagcaccagcctagagccaggtacaggtgaacaaaggcagagtaaactgtcaccccagatgcaggtacatcaagacaaaac

SEQ ID NO: 260585 - DNA, 100 bp, Homo sapiens
tggactgcatcctaccaccaactcgtccaactgacaagcccttgcgcctgcctctccaggatgtctacaaaattggtgatggagtctcgctctgttgccc

SEQ ID NO: 260586 - DNA, 100 bp, Homo sapiens
ctcgctggcctgggattcctccgtgacagcagcagatgatagtgtcgaaccaagtggaacaaagaaagaagatctgaatgacaaagagaaaaaagatgaa

SEQ ID NO: 260587 - DNA, 87 bp, Homo sapiens
atgagcagaaaggagttggggcttgatgaaggcgtggatagcctgaaggcagccattcagtatatttgccttccctccatgatctcc

SEQ ID NO: 260588 - DNA, 75 bp, Homo sapiens
tggtggaagctatcaggaccaattacaatgacagatacgatgaggttggcgggacgaagactggcgtggtgcggt

SEQ ID NO: 260589 - DNA, 100 bp, Homo sapiens
aagccacaatttccatcaaaaagtgattaagcagagaatggagaagaaggttgattccaggtgttcaagcagccctggccagggatcatgcgcacagtct

SEQ ID NO: 260590 - DNA, 75 bp, Homo sapiens
gaaactagagcaaataaccgttttgaaattagtctgatgtgaatgctacacagggagaaaatcagccagatctag

SEQ ID NO: 260591 - DNA, 100 bp, Homo sapiens
aagattttaatattgcactaggagtttttgctttagctggactaacagatttgggagccggcactgatgagggctgcctaattgagatcctggcctcccg

SEQ ID NO: 260592 - DNA, 100 bp, Homo sapiens
ataggatttggctacccagcctacatctcatcggcttcagctccccaggaatatgattgaaaacagcatgtttgaggaagaaccagatgtggtggattta

SEQ ID NO: 260593 - DNA, 75 bp, Homo sapiens
tgcgggaagaaggcctccagctagtgagcatgatccgggtagtttgagctccctaaaagaggaaggtggactcta

SEQ ID NO: 260594 - DNA, 74 bp, Homo sapiens
ggagccggtgccgcagctgcgatggccgtggccgtggggagaccgtctattttaggtgatgggcaagtcagaaa

SEQ ID NO: 260595 - DNA, 90 bp, Homo sapiens
gatcagagatcggcggagaccctcgaagtgcgcaaacttgacactcaccctgaccggctcgttatcggaaagagcaaacattgcttaagc

SEQ ID NO: 260596 - DNA, 75 bp, Homo sapiens
cctcaggacttgagtaacagcaacatgaaaccgaaacttcattgccccttcaatgtgggaatccagccagaccct

SEQ ID NO: 260597 - DNA, 102 bp, Homo sapiens
agtctctgcccccgccggccggcctcaacagttgcatcataaatacaaaggactgaagttataaaagagaaaagagaagtttgctgctaaaatgaatctgag

SEQ ID NO: 260598 - DNA, 100 bp, Homo sapiens
ggctctgtttgtagagagaaaattgaagctgtggcaactgaattaaatgttgactgtgaaatagttcgggtaaaataccatgaagattttgaaaaaacaa

SEQ ID NO: 260599 - DNA, 96 bp, Homo sapiens
acatcacacagttgaagctccaggaggtcaaaaggctgataccatgttaaagatgggttttcaacaacaagtgcttgacattttggaaaacattcc

SEQ ID NO: 260600 - DNA, 100 bp, Homo sapiens
aggaggaggaggctggagtgggcgcggaggcgaccgccatggcgttcctcaaactccgtgaccagaaatgcactcggtgatggaaagagagccactattc

SEQ ID NO: 260601 - DNA, 101 bp, Homo sapiens
tccgtgtatatattgcatcttcctctggctctacagcgatgttcctcctgctgatcaagagaagctttttatccagaagttacgtcagtgttgcgtcctct

SEQ ID NO: 260602 - DNA, 101 bp, Homo sapiens
ctgcttggttggagatcatgaccaaatatgctgtgggagaagagtgtgacttcgaggcagaagtcaattcatctggaaagactatctctgagtcagactta

SEQ ID NO: 260603 - DNA, 75 bp, Homo sapiens
gaagattgcacggctggggatcaacatgctcctgaagatggtcgctttgctgttcgtgatatgagacagacagtt

SEQ ID NO: 260604 - DNA, 100 bp, Homo sapiens
aaaaaagggcgggaagtggcgtggccaagattcgcattgaagatgacgggagctacttccaaattaaccaaatgatgaaactgaggcacaaactgcttaa

SEQ ID NO: 260605 - DNA, 82 bp, Homo sapiens
gggggaagcagcacgggatcccagcctcaggcctgcacggacggtgttggttggggccaagatcaaggctcgagatcttcgc

SEQ ID NO: 260606 - DNA, 98 bp, Homo sapiens
agacttcctggactgtgtgatcattagatccagcacacggaagacatggagaacgagatcgacgagctgctgcaggagttcgaggagaagagtggccg

SEQ ID NO: 260607 - DNA, 97 bp, Homo sapiens
cagccttgttcatcggctcccagagaaaaatcggcagatgttacagctgctcatgaaccacttggcaaagatgctagaatgaatgatcttcactatc

SEQ ID NO: 260608 - DNA, 146 bp, Homo sapiens
ctcatgagcgtgaagctggccctggacatcgagatcgccacctaccgcaagctgctggagggcgaggagagccgaacctcagaggatccagaacggcagctggtccttgctggactgttcctgtccatgtgcctggtcatggtgct

SEQ ID NO: 260609 - DNA, 101 bp, Homo sapiens
cccaggtcctggcagcaggtgagtggcggtcgccatcagacccgcgaagagagaagaagaaggaggttcctgctgtgccagaaacccttaagaaaaagcga

SEQ ID NO: 260610 - DNA, 101 bp, Homo sapiens
ggccggtgccagcacctttcggcttctgagacggcggcagcagcggcattcagagaatggatcttggagaatgtctgaaagtccatgacctggctttaaga

SEQ ID NO: 260611 - DNA, 74 bp, Homo sapiens
gagtccgaggtctacgacgacggcaccaacaccttcttctggccagagcctgggaacctctcagagaaggtctc

SEQ ID NO: 260612 - DNA, 100 bp, Homo sapiens
ccaagacctgcggccggacgcttgcggaccggccttggacaagattcgctatgagagcctgacagacccttcgaagttggacagtggtaaagagctgaaa

SEQ ID NO: 260613 - DNA, 75 bp, Homo sapiens
cctgaaacagaaattctggaacacctatatgttatgagttgcagaaacgaattgctgaaatggaaactcaaaagg

SEQ ID NO: 260614 - DNA, 75 bp, Homo sapiens
agatgggcctactcgcccgccaccctgcgctgccgccgctctgaggagttaaagcacactagcaacttcagacgt

SEQ ID NO: 260615 - DNA, 82 bp, Homo sapiens
caaagtgatgttccacagttttgcggcgccaccctggccccctgctgtagctgccgccttggttctcttggctgaagctggt

SEQ ID NO: 260616 - DNA, 100 bp, Homo sapiens
gatgatcgagaggatctggtgtaccaggcgaagctggccgagcaggctgagcgatacgacgatgagtgaccgaggaggtggcgttcctttgaggaaaatt

SEQ ID NO: 260617 - DNA, 100 bp, Homo sapiens
ctgaagacccggccgcccagatgatgcggtggtgggggacctgccggcacgcgactccccccgggcccaaagttggtcaaagaaaaagtgatgtatgaaa

SEQ ID NO: 260618 - DNA, 90 bp, Homo sapiens
agccggagcgcggagcccggctcccgcaccatggaggaggacgacagctacgggacaaactctgcctgggcgagtccttttcctgcgtta

SEQ ID NO: 260619 - DNA, 102 bp, Homo sapiens
aagaattttccaaatgaatttgcaaaacttactgtaggaagcccgtgcctctactactggatcaagattatgttaatttaaagaaccaaattataaaggcgg

SEQ ID NO: 260620 - DNA, 100 bp, Homo sapiens
atggaaacaggaggaagaattcccaagccaaagctttccagagatcgagatggtgatcatggagcgtagcaagctctcagagctggccgccagcacctcc

SEQ ID NO: 260621 - DNA, 75 bp, Homo sapiens
gttctcgaatcattctttgtacagaaattgaaaggcttcaaagctagcaggctggcggtaaggctggaaaggact

SEQ ID NO: 260622 - DNA, 97 bp, Homo sapiens
ggctgccccagatcgcgcgcctggacaacgataaataggatttaccaatccttggatgaagtgcttgggaagtctttaagtgccataatcaactgcc

SEQ ID NO: 260623 - DNA, 88 bp, Homo sapiens
tatgacaaatcacaacttgtagaggtccgtgcaagacagcggccagggcggccgggagaagctggagctcgtcctgtcgaacctgcag

SEQ ID NO: 260624 - DNA, 75 bp, Homo sapiens
cctggaccttgcagccgcaatgagttgctgggagcctgagcacctttcgtttttcggctcagagaaagccaagtg

SEQ ID NO: 260625 - DNA, 75 bp, Homo sapiens
aacttgtcatgttccaacactacttagctttccaaggtatctagagatcaggttctggacaatgctgcagttcaa

SEQ ID NO: 260626 - DNA, 82 bp, Homo sapiens
ccaagtgcgcgccctggcgggtccggaccaagccctggcctcccacgactacatcctgaagattgtgcccacggtttatgag

SEQ ID NO: 260627 - DNA, 90 bp, Homo sapiens
cctagtaactatgtcactgaagcagaagactccatagaaatgtatgactacaccaaaattgcattgagccaaacttgccaccaagagccc

SEQ ID NO: 260628 - DNA, 75 bp, Homo sapiens
gacaggagttcatctacccggagaagcaggagccctactcggcagatgccatggacaatattaccaggcagaacc

SEQ ID NO: 260629 - DNA, 75 bp, Homo sapiens
tcgcccgcctcctgcaggtgcccagcagtgcgttcgctgacgtggagcctgtatccggtgtccgaggcgaactca

SEQ ID NO: 260630 - DNA, 74 bp, Homo sapiens
agtaccagcacttcatccagcagtgcacaggtcagggaagtcaaagatgcatccctgagttcttcctagcaggc

SEQ ID NO: 260631 - DNA, 100 bp, Homo sapiens
tgtcaggtgttactcggggtgcgccagtggaagcgggaggcagttgcagctttcaggtggctgggagcccgagccccacacctgccgggcagcaggtgct

SEQ ID NO: 260632 - DNA, 84 bp, Homo sapiens
ccgcccgtccccggcacacgcgcagccccggcctctcggcctctgccggagaaacaggttggacgtgataagtatgagcctgca

SEQ ID NO: 260633 - DNA, 100 bp, Homo sapiens
gccgaggcctgggccatggaactggcggacgtgggggcggcagccagctcgcagggattaaactgcaaatatctcatgaagctgctgcctgtatcactgg

SEQ ID NO: 260634 - DNA, 82 bp, Homo sapiens
gggccggaggcggcgcgccctgcaagaggattcaggagcagttccagaaaaatcccgacagttacaatggtgctgtccgaga

SEQ ID NO: 260635 - DNA, 75 bp, Homo sapiens
cccctgctccagccatggtatcagctctggcccagtccccatgtgagagcagcagaggcggtcttcaacatcctg

SEQ ID NO: 260636 - DNA, 101 bp, Homo sapiens
ctacagcctctgtgacatctccaaggtggacaggactgtggacgtggtattgctgaagcttcagtatcagacacagcacagcagccatctgaagagcaaag

SEQ ID NO: 260637 - DNA, 82 bp, Homo sapiens
atgacatgcgcccagaaacggacccgcagagatgagattgtggggaacctgggtgaaggcacctttggcaaggtggtggagt

SEQ ID NO: 260638 - DNA, 101 bp, Homo sapiens
ctgaccaccatcatcacggatgctgtgaaccagattaacgtcttcaaggacccagttgctgatcccaacaaaaggtccaaaaagggccgattatctttaca

SEQ ID NO: 260639 - DNA, 100 bp, Homo sapiens
gcggcggcggcgggcccggcggcgggccgaggagccgggcgcaatggagcggaagagccggcacagtcttcactaccgtagaagaccttggctccaagat

SEQ ID NO: 260640 - DNA, 111 bp, Homo sapiens
ctggcgcccgtcaacttctgcgacgaagaaaaaaagagcgacgagtgcaagccccctccggacagcagcatcgccacgctgcaggtgagaagcgcaccaaggaaccaggag

SEQ ID NO: 260641 - DNA, 75 bp, Homo sapiens
gagaaccagccgactggagcaggcagcagcccaggggctttgttatgcacctaaagccatattggaagctccaga

SEQ ID NO: 260642 - DNA, 75 bp, Homo sapiens
gaacatcgagtgttggataacttctctgacatagtagaaggttcctggtccagaactttacacagaaaaggtgct

SEQ ID NO: 260643 - DNA, 75 bp, Homo sapiens
ccatagggctgagtctgggaccgaggccaggaatagttgctgaacaccccaggcctgctgaggtccctccttgag

SEQ ID NO: 260644 - DNA, 100 bp, Homo sapiens
agctgctcggcttggagcaatgacgtccatggtgtgtaagctgcacatcattgactcctgggcccaactgtgaccgatttaaactgcacataccatatgc

SEQ ID NO: 260645 - DNA, 90 bp, Homo sapiens
tgagcctgaaggggaggcggaggacagacgccctcctgcaaaacggcccaactacgttaagcttggcactctggcacctttctgctgtcc

SEQ ID NO: 260646 - DNA, 90 bp, Homo sapiens
gaaaagtgagaggtcagactcctaagggggacttgatctcatcttcatgccaggccttgggtttgacaaacatggcaaccgactggggag

SEQ ID NO: 260647 - DNA, 145 bp, Homo sapiens
aaactcgcctagcagtgtctcgggtcatcacttggacaacagaacccaaaagttctgatgttcggaagtgatgtcttggcattgcccattttcaagcaggaagattccagccttccattggatggtgaaacagagcacccaccct

SEQ ID NO: 260648 - DNA, 100 bp, Homo sapiens
ggaagtgcagctgcctcagttcttagcgcaggtctcattcaggaacgtcgcctgataacactgcaccaccacctccccctccaaggccacagccctctca

SEQ ID NO: 260649 - DNA, 50 bp, Homo sapiens
cggtgacagagtggagccatggctagaggaagaagccatggatttaataa

SEQ ID NO: 260650 - DNA, 90 bp, Homo sapiens
catcttgctgaagtatgtcaccgtcagtatcccaaggcttgggaacaatgggccgaggcattgtcatttcttttgcaagggccaggattc

SEQ ID NO: 260651 - DNA, 75 bp, Homo sapiens
gacgcagccgtagacaccagctccgaaatcaccaccaagataagatttgtgaccaaatcagtgatgctgtccttg

SEQ ID NO: 260652 - DNA, 98 bp, Homo sapiens
gttcctgctgtggttttgatcatgttgttaccctcggacgtagcccggcttgtattggggaaattggattccaagatccatcaaggagcaaagaaggg

SEQ ID NO: 260653 - DNA, 100 bp, Homo sapiens
cgctgccctacggcttctccgccatgcaaggctggcgcgtctccatggagcttccaccaacactttcttccaaatatcctgaagatgacccagactactg

SEQ ID NO: 260654 - DNA, 90 bp, Homo sapiens
tccaggcagtgttctctgacggagctgtctctttgcacacgaggagcctgaaatatggaaaagcaagcaccggaagcaccccggcggccg

SEQ ID NO: 260655 - DNA, 100 bp, Homo sapiens
ccccaaggaaggatgagaatagctactgaatgttctaagaacggaagcatctgggctggatggaatttagcatcaagcagagtcccctttctgttcagag

SEQ ID NO: 260656 - DNA, 99 bp, Homo sapiens
agtacctggcttgcattctgcgcaagaaccgccggcgggtgtttgatgaggtttatataactttccaagacaaggaagttgtgcaaagcctcacagcta

SEQ ID NO: 260657 - DNA, 50 bp, Homo sapiens
tccgtctggatcacggatgtaggaagtgattgcccagaatgcacgctaca

SEQ ID NO: 260658 - DNA, 90 bp, Homo sapiens
cggagaccccgaaaacggaagcgcagggagaaggaagaggtgtttgaaaagatctgagtgggacatacttttgaaggatgtgcaatgttc

SEQ ID NO: 260659 - DNA, 100 bp, Homo sapiens
tcatcggtgtgcacttttaacagtgctttctcctgctcaagacagccacacgaacacggatctccccccagtgtcagagcagatcatgcagactctcagt

SEQ ID NO: 260660 - DNA, 100 bp, Homo sapiens
ggaccttctgagcttctcactcaaggatggagaaatccagcggtcgcaccgcccattacaagttgacctccacggtgatgctgtggctgcagaccaacaa

SEQ ID NO: 260661 - DNA, 98 bp, Homo sapiens
agcagctcccccagtccctcagggcgctgacagctgctgacctgaacctggtgctgtatgtgtgtgaaactgtggacccagcccaggtttttgggcag

SEQ ID NO: 260662 - DNA, 113 bp, Homo sapiens
gcagtggcagaaaaacgagccatttctccgtcgattaaagagccatctgtggtgccaattgaaggggatggccgcttccattcagcactgccacccagagaactgctggtgag

SEQ ID NO: 260663 - DNA, 100 bp, Homo sapiens
tatggagcattaccggatcagggaatagccaaggcagcaccagacatgccaccactgctctttgaggtgtcatccctggagaatgcttttcagattggag

SEQ ID NO: 260664 - DNA, 98 bp, Homo sapiens
gtctgtctacatgaccctgtacacgctcacccatgtggtgctgctcatctacgaggcggaaatctgttcagcctgtgtgcgctgtaagagctgtgggg

SEQ ID NO: 260665 - DNA, 74 bp, Homo sapiens
aggattccaagtaactcttatttgcaaaagctggcaggctgacagaggcggcctcaggacggaccttctggcta

SEQ ID NO: 260666 - DNA, 100 bp, Homo sapiens
tcaagcggcaggacgcacttgtcttagcagttctcgctgaccgcgctagctggatccaaggagctggttctgctggttggaccaaacctcgtgagccagc

SEQ ID NO: 260667 - DNA, 100 bp, Homo sapiens
ctttttcctggaccatcttcttcaattaatgcaacctaagactgcaataagctcttttacagcatgaaaaagccagcacgcctgttctgaaatccagcac

SEQ ID NO: 260668 - DNA, 101 bp, Homo sapiens
gtaaactcaaaaactgacactcgattcagctattggaaagtttttttaatgtggttggaacaactgaggcattgcttcagagtttggagttcgaggttatc

SEQ ID NO: 260669 - DNA, 74 bp, Homo sapiens
aggaagtgagcatagtactcaataggagtgacactctttgtggccctttatgactatgaagcacggacagaaga

SEQ ID NO: 260670 - DNA, 95 bp, Homo sapiens
ggagctttcgtcacctgtccttctacattttcgatagagacgttttccggagggattccatcatagcgggctgacgcacgaggcacacaggaagg

SEQ ID NO: 260671 - DNA, 103 bp, Homo sapiens
gaacaagggacactcaaactaccagagctcttgaagtcctattggctggataattttgcaaaagattctgtaaaccctggagtcatggtgttgctgggatgcg

SEQ ID NO: 260672 - DNA, 83 bp, Homo sapiens
gtcctcggagcaggcagagcagccgagccagttgtcgagatgtccacagaaggaggatttggtggtactagcagcagtgatgc

SEQ ID NO: 260673 - DNA, 101 bp, Homo sapiens
gttgctaatcacatgagagcagtagaaaatacgcttcacaaggagaagaacccttggttagattgagtcttactgagagactggggaaacgaaaattttca

SEQ ID NO: 260674 - DNA, 108 bp, Homo sapiens
acaaggacatcctgaggaaggccgtccacaaggtgtcctgtggccaggcggaaagcagtgagaagcccaacgctgaggacatgacatccaaagattactactttgact

SEQ ID NO: 260675 - DNA, 100 bp, Homo sapiens
tggtgcctgttgttaaggaattaatgggggaggctatggaggctatgatgattacaatggctataatgatggctatggatttgggtcagatagatttgga

SEQ ID NO: 260676 - DNA, 100 bp, Homo sapiens
gggacccggcatccgagtacatctacttctgctccaaacactttgaggaggactgctttgagctggtgggaatcagctcgcatgtggaagactctcacct

SEQ ID NO: 260677 - DNA, 90 bp, Homo sapiens
ttctatcttattaaatgggatgaacttcaaggcctggccgacaacaccgttattgctaaagtaaataatgttgtgtgggacctggaccgc

SEQ ID NO: 260678 - DNA, 75 bp, Homo sapiens
gtcgcagcttggtctcagaggagcatcgctggggttgaaaggattgttgacaaaaggaaaaataaaaaagggaag

SEQ ID NO: 260679 - DNA, 100 bp, Homo sapiens
ttcttctggaatgtcttgggggttttgatcctgtcactgtgacaatgcagatcttcgtgaagactctgactggtaagaccatcaccctcgaggttgagcc

SEQ ID NO: 260680 - DNA, 75 bp, Homo sapiens
caagaccagcgcgagggccctgggcaaggcccgacaggttgcagtgagagcagatgctggcaagaagcacttacc

SEQ ID NO: 260681 - DNA, 108 bp, Homo sapiens
acagaacagcacgtaccagaggtggaagtccaagtcaaacgcagaaggactgcctcactgagcaaccaagagtaccgttttgcagagattcgctaccatcgccctgag

SEQ ID NO: 260682 - DNA, 100 bp, Homo sapiens
caggagatccaggtcaccagcatccactggagctacaagagtgcggtcgacaccatcttctccctgcagggagactccagcctgtttgtggcctcggcgg

SEQ ID NO: 260683 - DNA, 82 bp, Homo sapiens
ctggaaattgccttattggaaaaacatttcttacgtgaaaggtgtagcagtcactcggcctacacccacagcatcgaccttg

SEQ ID NO: 260684 - DNA, 73 bp, Homo sapiens
gaagtgcagaggtttttttctgagatggacagagacgtatgtgcgttggtctcctaagggcacctacctggct

SEQ ID NO: 260685 - DNA, 97 bp, Homo sapiens
tcgggagtgatcacctaccctacaggtggcacaagaatggctcaactctccaaatagagagaatttctatcagttgcaagtacgaaaatttcctgcc

SEQ ID NO: 260686 - DNA, 115 bp, Homo sapiens
atccggaatgctgcccgatggccctgggtcctcgctgtggggcaatccgggcttgcagacgaggttccagttacagccatcccttgtcataacttttgaactgtatttggaaaaa

SEQ ID NO: 260687 - DNA, 75 bp, Homo sapiens
aatgacataaggatgtttccaagaggaggcaataaagtgcatggttctgccctgatgtttcctggaataatgctg

SEQ ID NO: 260688 - DNA, 100 bp, Homo sapiens
gactgagtacctgaaccggcacctgcacacctggatccaggataacggaggctggcttttccaaaaatgtcaattaatagaacgaatacttgaagcctgg

SEQ ID NO: 260689 - DNA, 98 bp, Homo sapiens
ctgcgtcgcactgtgcccccagctgtcccagccctgcaagaaaaggtggctgaagtggaaactcggctgcgggagcaactctcagacacagagaggag

SEQ ID NO: 260690 - DNA, 96 bp, Homo sapiens
aagaatccaaagaaaacaaaatggtggtatcatgtaacaaatgtggcaattattttggatctatcacctgtcatcataactggcttctgcttgtca

SEQ ID NO: 260691 - DNA, 129 bp, Homo sapiens
tgagtacttgcagccctcggccaaacggccagacgccgacgtcgaccagcagagactgactcaatctgtgtcccaggctttgatccaagcctcaacatgatgactggaatcacccccattaacccaatg

SEQ ID NO: 260692 - DNA, 100 bp, Homo sapiens
tgctgttgcttctgggccagaggaagagaatgaggaatgcttctagtcacaacagacacccttggccatgactttcatgtcttccaaattctgactcatc

SEQ ID NO: 260693 - DNA, 82 bp, Homo sapiens
cttacgtctgcggaagtgcagctgcctcagttcttagcgcagatacagactgaaatgttaccagataaaatgatgtcatgtc

SEQ ID NO: 260694 - DNA, 48 bp, Homo sapiens
aagatggtgataaagtatataagaaaattcgagtccttgaggctgaga

SEQ ID NO: 260695 - DNA, 100 bp, Homo sapiens
caaatttttggatgatgatggatccatttctcctattgaggagtcaacacccttcttcagcatcttccctgggcattgctgtgagtttaggccggcccgt

SEQ ID NO: 260696 - DNA, 98 bp, Homo sapiens
ggggggcggccaggggccgactgtgaagtttgccaggcagtatagcaggaatgagcccctgacctttgcatggttacgccgatacatcaaatggcctt

SEQ ID NO: 260697 - DNA, 75 bp, Homo sapiens
tggctactatggaaggcgccgtggccctccccggaatgttctccagcatttggctcaaggccccaagggcacatg

SEQ ID NO: 260698 - DNA, 75 bp, Homo sapiens
gaagattttgaagacaatcgtcacttatacaggttatgaagacagtatggagtttccagaccatagtagacattt

SEQ ID NO: 260699 - DNA, 51 bp, Homo sapiens
gagagtgagggcgagaaggagggcgacggcatccgtgtcattctggacctt

SEQ ID NO: 260700 - DNA, 82 bp, Homo sapiens
gcattttcttattaggactggctgataacgaagcagctattgtccagcttattcagctgattctgaatcatcttacactacc

SEQ ID NO: 260701 - DNA, 88 bp, Homo sapiens
atgacccagccgaagtggaggcgggtctggaacagaatctgacagtgatgaatcagtaccagagcttgaagaacaggattccacccag

SEQ ID NO: 260702 - DNA, 100 bp, Homo sapiens
cgaagaagtagaagcatcgaaagcgttggagaggtgttaccggaacggcggcgacaagggtgttcccgaactagagtggccaagtacatcgtgcaagtgg

SEQ ID NO: 260703 - DNA, 96 bp, Homo sapiens
cccgggcttgtgggacacctatgaagatgacatctcggaaatcagagtgtgaacatggctacgcctcttcattcccgtccatgccgagcccccgac

SEQ ID NO: 260704 - DNA, 100 bp, Homo sapiens
tcttcaatgctgttaactggattgagtccagctcttgggatggacctcttggaatagctcttcagaggagctggacccagcatggatggtggaaccacag

SEQ ID NO: 260705 - DNA, 83 bp, Homo sapiens
accatgtggctgccttgggctctgttgcttctctgggtcccaggtcagaaaaagagtgcacgccagtatcacgtacagttctt

SEQ ID NO: 260706 - DNA, 73 bp, Homo sapiens
gactatggtgtatacctagaggactcaggccacactcttaggcagagctgcaaccctcttgtcctctttgaag

SEQ ID NO: 260707 - DNA, 82 bp, Homo sapiens
gtctctctgctgcggcgcggggaccgctgtgctctcggttttgatacttatagaggactcccttcaatttccaatggaaatt

SEQ ID NO: 260708 - DNA, 100 bp, Homo sapiens
atatggaggccatttcacctctaaaaaatgggatgggtgcagagattcttagaagaggaggtgtatcccctgttaaaaccatatgaaagcgtgatgaagg

SEQ ID NO: 260709 - DNA, 86 bp, Homo sapiens
ggctgaagaagcagttctacaaggcgagccaggtcacagagatgcggcggaccctgacgcctgccagctccccagtgtcctcgccc

SEQ ID NO: 260710 - DNA, 75 bp, Homo sapiens
caaaattgtatctgtttttctcagaagagaattccacaaggttaaagtattgcacaatcagctggtccttttcca

SEQ ID NO: 260711 - DNA, 75 bp, Homo sapiens
aatggttgccttttcttcattatcaagagatggtgagttgtcctccttggctgtgtggagtggtgtgaatgtggc

SEQ ID NO: 260712 - DNA, 100 bp, Homo sapiens
gcaagaccagtccatttggggaaatccttcggatggtgaactcattagaactacttcagctctcagctgctgctgtggacaaaggatgcagtgtgggcga

SEQ ID NO: 260713 - DNA, 83 bp, Homo sapiens
gcctgcggagcctgtggggcagatgatgaaccaggtggaagggcagcagaagaaccttgtgcacgccattgagtccctgccag

SEQ ID NO: 260714 - DNA, 100 bp, Homo sapiens
cccggccgcctgtccgtcgatgcaccgaaaaggtaaagtaccttttattcatgtgggaaatcaagtagtatcagaacttggtccaatagtccaatttgtt

SEQ ID NO: 260715 - DNA, 75 bp, Homo sapiens
atttcaaagatcagcagaaagctcttgaattcggagtgatttaccactgcacagaggagcggctgtacacgggcc

SEQ ID NO: 260716 - DNA, 75 bp, Homo sapiens
cggcgcccctgagccggccgagcggcgacggaccgcgaggttgaaggtcgaggagctggaaggcgagcggagtcg

SEQ ID NO: 260717 - DNA, 88 bp, Homo sapiens
tccagaacgtgccatggagacgcttaacgctccagtcagcccggtcaagcatgacagcaactcaaactcggcaaacttccaagacgtg

SEQ ID NO: 260718 - DNA, 90 bp, Homo sapiens
cgctgctgattcctgcggccgcggtctacgaagaccaagtgggcaagtttgattggctaacatttccaatgatcactggccatctttggt

SEQ ID NO: 260719 - DNA, 100 bp, Homo sapiens
aatgatagaatgaagaccacaataaaagagacctctacttagctcagcaattcttaccttgggtagaaatatttctgtcatggctcattcaaagactagg

SEQ ID NO: 260720 - DNA, 74 bp, Homo sapiens
ctcgtacgggctgtcggccgaggtcaagaaccgggatgagacctgcacgcagtggctcacagcagcacgatttg

SEQ ID NO: 260721 - DNA, 75 bp, Homo sapiens
cggaaacttaggggccacgtgagccacggccacggccgcataggaacatctggattatgagattatccagtctct

SEQ ID NO: 260722 - DNA, 101 bp, Homo sapiens
ctgtccctaacgttcttgatctctgtgaagattcaagattgctgctctctgaacactatagtcgtcgaatctcacaagcgtacggtctgatgaatgaactg

SEQ ID NO: 260723 - DNA, 100 bp, Homo sapiens
ggagccgctgccgctatggatgatcgagaggatctggtgtaccaggcgaagctggccgagcaggctgagcgatacgacgttgctgttgctgatgcaaaga

SEQ ID NO: 260724 - DNA, 82 bp, Homo sapiens
tgcagcgggagctggacggcgagcgcgagcggcgcgagaaaaggcagaagaggcctggaccttggcgcacacagacccagga

SEQ ID NO: 260725 - DNA, 50 bp, Homo sapiens
gaagactcggggtcctttcaggaagcctacgaggacaagcagaaactcaa

SEQ ID NO: 260726 - DNA, 75 bp, Homo sapiens
tgttggagaactacaggaacctggtctccctggggaggctgtgctgcccaagcttcacctggatgaggactaccc

SEQ ID NO: 260727 - DNA, 74 bp, Homo sapiens
ctgcacgatgctgctggactccgaggtctacaacatgcccctggagagccagattcctggtcgggtggcttcca

SEQ ID NO: 260728 - DNA, 75 bp, Homo sapiens
actccagtgggaggaggactccaacccctgagccccttccagtgctgcctgaggtgccctctacctgtgcctgcc

SEQ ID NO: 260729 - DNA, 74 bp, Homo sapiens
ttctgccatgattgggaggcctccccagccacatggaactagtttatgtggccgaggcagacaagtggaattag

SEQ ID NO: 260730 - DNA, 90 bp, Homo sapiens
gcctcccgggtagctgggactacagacaatgatgagtgctcagcccagcctggcccatgtggtgcccacgggcactgccacaacaccccg

SEQ ID NO: 260731 - DNA, 97 bp, Homo sapiens
acaccgtcacgctgctggaggaggagcaggacatcgagactttacatggctctgttcacgtcacgctgtgtgggactcccaagggaaaccggcctgt

SEQ ID NO: 260732 - DNA, 100 bp, Homo sapiens
caagaatcactcggagggcggcggagtgatcgtcaataacaccgagagggatttcaaggatttggatttggagatggtggcttccagatgtcttttggaa

SEQ ID NO: 260733 - DNA, 83 bp, Homo sapiens
gaaacccgacccagtgccgcgcagctgctggagaaaccaaggtgtatgttggtaacctgggaactggcgctggcaaaggagag

SEQ ID NO: 260734 - DNA, 118 bp, Homo sapiens
accgcctgattaacgagcctagtaatgactgggatatttactactgggccacagacttaattcagtgcacaaatgagatgaatgtgaacatcccacagttggcagacagtttatttga

SEQ ID NO: 260735 - DNA, 124 bp, Homo sapiens
tgtggagacaaatcatcaggaatccattatggtgtcattacatgtgaaggctgcaagagtcttcctgcgagcaattaatcagtatgcagatatgctgaacaaaaaatttctggatcaagccaac

SEQ ID NO: 260736 - DNA, 100 bp, Homo sapiens
gagagccaagagtgtagaggacgacgctgagggccacctcatctaccacgtcggggactggctacaagagcgatctgtgagtacccaggaagctgcaccg

SEQ ID NO: 260737 - DNA, 100 bp, Homo sapiens
cgggcgtcttctacctgacgctcgtcctcatcctggtcactagcggactcttcttcgccttcgattgttgacctcctgtactggagagacattaagaaga

SEQ ID NO: 260738 - DNA, 100 bp, Homo sapiens
caggacgtgaaggggaagaggcccaccctggagtaaccctcactggagaatccagaggtactgcttctccgagatggccccagtgtgtgcggtggttgga

SEQ ID NO: 260739 - DNA, 101 bp, Homo sapiens
caattaaaaacttcagagcaaaacatcactgtaattcttgctgtagaaagcttaaacttccagagaagatggcgaattagaagatggtgaaatagacgatg

SEQ ID NO: 260740 - DNA, 82 bp, Homo sapiens
gccctcccgctcggccccgccagcagcactgtggaggccgtcctcgatgtgaagttcatttccaatccgccctccatggtgg

SEQ ID NO: 260741 - DNA, 83 bp, Homo sapiens
cagttttgctgaccttattcaccatgacttatcagctgttccgatggccccactatggggctccactggctggggagtgtctg

SEQ ID NO: 260742 - DNA, 75 bp, Homo sapiens
ctgcctcagcctcctaagtagctgggactacaggagggccctcctggacccgggagcggaccctggtggcggtga

SEQ ID NO: 260743 - DNA, 100 bp, Homo sapiens
gggtgcggcgggtcctggccgaagaactctagaggaaagcgtctacagcattgctatttctctggcacaacgttacagtgtctcccgctgggaagttttt

SEQ ID NO: 260744 - DNA, 102 bp, Homo sapiens
gacggcggcgccgcgccgagccacccgcccgcccaaggtctctcgcgggcgggagaacggaaaactcccaacttcctgggcaaagcccaacaccttccccca

SEQ ID NO: 260745 - DNA, 75 bp, Homo sapiens
aaaaaatggaagaatttgtttgtaaggggagtaatcagcaactcagggggacctgtacgagtctatagcctacct

SEQ ID NO: 260746 - DNA, 100 bp, Homo sapiens
ttggaatcgtgctctccgaggacaagcaggaggtggtggagctggtgaagcaccatctgtgggctctggaagaacctgtggacaaagtggctgccatgag

SEQ ID NO: 260747 - DNA, 98 bp, Homo sapiens
aacaccaaccaggtccctgacagcccagctccaggcttcagcaaccaggagggattgactgagatcttaacaacagcagcaacgatacatcagcaaat

SEQ ID NO: 260748 - DNA, 75 bp, Homo sapiens
atgaaagcagcagttttcatcatctaagtgaaaggtaatttcatctgtgccaaagcctccagaggacaagccaga

SEQ ID NO: 260749 - DNA, 97 bp, Homo sapiens
tgaggctcagagatgcctgtaccgtgatgtgacgctggagaacctggcacttatgtcctccctggcaataattcggcatagacctgctcttgttaaa

SEQ ID NO: 260750 - DNA, 50 bp, Homo sapiens
aaatgaatttgcaaaacttactgtaggcttcttctcatatcggtaattcc

SEQ ID NO: 260751 - DNA, 83 bp, Homo sapiens
gtcgcgcccgggaggaaggaacgaggcaaggagctaaagcagcgtgcgttcagccctggggagtacgaccccagcaaagcgac

SEQ ID NO: 260752 - DNA, 83 bp, Homo sapiens
ttaccattgtgaaagaaggttgggttcagaagagggattgctgtgctaaggagacagcaacgtatgataaaaaatcgagaatc

SEQ ID NO: 260753 - DNA, 123 bp, Homo sapiens
atgacgccatcctgccgcagctggcgcagcccacgctcatgatcgacttcctcacccgcgcctgcgacctcggttgcaaaacttcctcaagttgttcaacagcaaacacccgtggccagcatc

SEQ ID NO: 260754 - DNA, 83 bp, Homo sapiens
ttttatttttccccaattcagcagagaatattttcaaggggggaagctcttcgtgggcggtcttgactggagcacgacccaag

SEQ ID NO: 260755 - DNA, 75 bp, Homo sapiens
gtcagaccagaccgtccgggtgaagggtacccagtgtgttgaacaaattcaagagttggttctacgcttctgtga

SEQ ID NO: 260756 - DNA, 83 bp, Homo sapiens
gagcgcctgcctgaggagagcagtatttaggtcagttaacgtccataccaggatacctgaatccctccagtaggactgaaatc

SEQ ID NO: 260757 - DNA, 89 bp, Homo sapiens
ttggcagcgaggtcgcggcaggttcgagctgcggttggatttctcacgatgtccagtgttatctccatgtctgcccctttcttcctggg

SEQ ID NO: 260758 - DNA, 100 bp, Homo sapiens
ctcttcatattggcgatcctgttgtaacaccttccaccatgaccacctcagcaagttcccacttaaataaaggcatcaagcaggtgtacatgtccctgcc

SEQ ID NO: 260759 - DNA, 100 bp, Homo sapiens
cttccacgtcatccgcatcaacaagatgttgtcctgtgctggggctgacagcacagccatgacagtgcagatcctgctgaagctggaccgcctggacctc

SEQ ID NO: 260760 - DNA, 101 bp, Homo sapiens
aggcagtggcgcttgagttggtcgggggcagcggcagcttcaggatgagttagagaaaggtgaacgggacaatgcagaactgcaggagtttgccaacgcca

SEQ ID NO: 260761 - DNA, 82 bp, Homo sapiens
gggacctggaaagacagacaggatggggaggaggttcttcagtgtatgcctgccttatgtttgatcatcggccaaggtcctg

SEQ ID NO: 260762 - DNA, 98 bp, Homo sapiens
gtgaactgatccaaggactgggctacagcctgaagcaggacattctaaatgaaaagactgaattggaagcaacacttaaggaagcggagttggtaact

SEQ ID NO: 260763 - DNA, 100 bp, Homo sapiens
tggacagtcagtttcttttcaaagccatcgactacagtgacagcgccatgctccaagctcagcagctgctcctggggctgggctctttcctggaggacgc

SEQ ID NO: 260764 - DNA, 99 bp, Homo sapiens
aggacctctggccacccggattgttcctactgacatgaatgaccagaatctagaagagccatccagatatagctgccaaatgctgttaaatcaactgag

SEQ ID NO: 260765 - DNA, 100 bp, Homo sapiens
cattcccgtccgacgaggatatcgtgtctggagcagtggagcccaaagacccctggagacatggtacaggtttgcagattccgccagcagcacagcaagc

SEQ ID NO: 260766 - DNA, 101 bp, Homo sapiens
tagcggcgcggcgctcgctcctacggggagtcctcagcactgcctcttctatttccctgtggaaacctcaaaagagaaatcctgccaaaagcgctcaagga

SEQ ID NO: 260767 - DNA, 75 bp, Homo sapiens
tggaggagccttctcaagaacagagcgcaccttttgacaagacagccaacatcaccttctccctcaatgctgacg

SEQ ID NO: 260768 - DNA, 73 bp, Homo sapiens
ttcttgactccgctgctcgccatgatcacccggaagttcaggctgaattctgaaggcaaacttgagcagacgg

SEQ ID NO: 260769 - DNA, 98 bp, Homo sapiens
agtggcagtcgcagcggaatcagctccagggggccatgcagcacttcagccaaagattcctctaccagaatcatcttattgtgaaggttcctccctat

SEQ ID NO: 260770 - DNA, 95 bp, Homo sapiens
cgagggtgacgctcgctccgctcgtcccgctcgtcatggcctacccgggatacggaggaggggaagaggcagaaatccaggcagaacttgaacgt

SEQ ID NO: 260771 - DNA, 100 bp, Homo sapiens
ctggatctctggtgagacatttttcttccttctgtcacatcacacccaatgatttggagcctggctgccaaccacttgagcttcctcaactccttcaaga

SEQ ID NO: 260772 - DNA, 102 bp, Homo sapiens
gtaccaggcgaagctggccgagcaggctgagcgatacgacgcccgcggcgccatggctcacgtcggctcccgcaagcgctcgaggagtcgcagccggtcccg

SEQ ID NO: 260773 - DNA, 73 bp, Homo sapiens
acaatggttgcatctgcagatggtttagtttatgaaccaggtgtgaaagctgttttggccgaaagttatgaaa

SEQ ID NO: 260774 - DNA, 75 bp, Homo sapiens
cgcccctccagctgaccaacatccaagtgccccagcaggtgtgggcccatcgctggatggatctgtcagaacacg

SEQ ID NO: 260775 - DNA, 110 bp, Homo sapiens
tgaagccagccagaccaggaacccaccagaaggaaccaattccggacacataacaagcagcagtgaggacaccaaaggaagaaggtagataatgactataatgcccttcg

SEQ ID NO: 260776 - DNA, 82 bp, Homo sapiens
ttgggatgagggaatacaagtgtcatgtctgtggttactgtaaaatggggaaaggagaaatttgaaggtgtagaattgaata

SEQ ID NO: 260777 - DNA, 100 bp, Homo sapiens
atcaactcctcgcataacacctatctcactgggcagagacacctgcggaagccacagggaagccacagagagatgaagccggcccacagaggcagctgcc

SEQ ID NO: 260778 - DNA, 100 bp, Homo sapiens
acgagctgtgcgaggtgatcggaaagactatctgctgccaaactcttgactgaatatggcgttagtgttttggttttagaagctcgggacagggttggag

SEQ ID NO: 260779 - DNA, 100 bp, Homo sapiens
actggagttcaccttgaccctgccgtcaaagaagttcagtataatcctacctatgagaccatgtttgctcctgagaatgtggtccaacccatgaaggagc

SEQ ID NO: 260780 - DNA, 78 bp, Homo sapiens
gtcctcggcggccccggcgccggcaaggggacccagtgcgcccgcatcgtcgaggcgtggtgtccctcgtggccgttc

SEQ ID NO: 260781 - DNA, 82 bp, Homo sapiens
tgagagcatccacatcatccgtgggacaaaaggtcagcccaaggccaaccccactgtcactctgttcccgccctcctctgag

SEQ ID NO: 260782 - DNA, 97 bp, Homo sapiens
tggcaggagcttttcgtaaagggaagtcatttctactggacttcatgcttagatacatgtataacaagactaaatgtgttaaatgggcttgccaaca

SEQ ID NO: 260783 - DNA, 90 bp, Homo sapiens
ttactgtcatcaagaactgtaatacttctggaatccagacagaatggtatgtcggggagctgatctctgatgctgaggctgatgtgagag

SEQ ID NO: 260784 - DNA, 82 bp, Homo sapiens
cgctacttccttatggctaaaaggaaggttgtgcaggaccagcgttccctgtgcaggcgccactgcgtttcctgcagattcc

SEQ ID NO: 260785 - DNA, 90 bp, Homo sapiens
ggttaagattcggagagagaggtgctagtggctggacttgacctggaaaggaccgtataatagacgctggccccaaaggaaactactctc

SEQ ID NO: 260786 - DNA, 75 bp, Homo sapiens
gcagctccagagctttgtcaaagatgtgattcttggagcaaatacccggccagacttggatctccgagaccccat

SEQ ID NO: 260787 - DNA, 74 bp, Homo sapiens
caggggctgactgagagcgtctgcttgatgcttgtgaccacaccagaaaaatgggatgtagtgacaagaaagag

SEQ ID NO: 260788 - DNA, 98 bp, Homo sapiens
tcgcctttgccgatccgccgcccgtccacacccgccgccaggtgaaagaaaatggcccgaaccaagcagactgctcgtaagtccaccggtgggaaagc

SEQ ID NO: 260789 - DNA, 117 bp, Homo sapiens
tcggaggagcggctgctgctgctgctgctgctgctggtggcccctttgcagagaatggatcttggagaatgtctgaaagtccatgacctggctttaagagcggattatgaaattgca

SEQ ID NO: 260790 - DNA, 50 bp, Homo sapiens
cctgccttcgctcccgcaccgataatgagcttcagtccccaagatctgcg

SEQ ID NO: 260791 - DNA, 82 bp, Homo sapiens
tacactctctgtgggatggagggggaaggaacttggcattagaattcctcgaccactaggacagggaccaagcagattcatc

SEQ ID NO: 260792 - DNA, 127 bp, Homo sapiens
cctatctggacatggtgattgcagagacgctgaggatgtacccgccagctttcagaaagtcctatgagtttgaagatttactgcagtcttcctctgagagcagcagggtggactggtacgcgcagac

SEQ ID NO: 260793 - DNA, 82 bp, Homo sapiens
ccgactagcgcgggcccgttgcggctgcaggcaccatggaccgagcccccacggagcaggagcttgaggagttttgggttta

SEQ ID NO: 260794 - DNA, 82 bp, Homo sapiens
gacaagccgctggcagccgcggatctcaccgccgctcaggtgttacctggaatgtcagagagctgaaagcagtcatattttg

SEQ ID NO: 260795 - DNA, 112 bp, Homo sapiens
cttacaatatgccacatcagccgaatatacatcttccactatggaattctcactacggatttttctggccattgccgaaatctaaaaaaacttgtagcaaaggcagtaaaaa

SEQ ID NO: 260796 - DNA, 83 bp, Homo sapiens
atggagatgaagaagaagattaacctggagttaaggaacagatccccggaggaggacatggatttgattgacatactttggag

SEQ ID NO: 260797 - DNA, 101 bp, Homo sapiens
gcccaacatggcggagagagaggtggagtccggcccccgaaagagggaccctatgtactcggaactgggcttatcttgtacgctttatccaaagaaatata

SEQ ID NO: 260798 - DNA, 100 bp, Homo sapiens
cgggagtcatcttcaaagccctgaagctttcacttgacagggccactgggcaaggaactgagggtggcatccagccaacagctaccaaggaactgaggcc

SEQ ID NO: 260799 - DNA, 100 bp, Homo sapiens
tgaagatgggggagctggccagcgagagccagggctccaaagaactcgcgtccagcctgcatgccgtgcggactgcacccaccagcaaggtgatcaagac

SEQ ID NO: 260800 - DNA, 51 bp, Homo sapiens
tgtctgtcctcctagccaaagaaagatatttcagcagttgaatcagttgaa

SEQ ID NO: 260801 - DNA, 83 bp, Homo sapiens
cacttgcacgaaagctttcctaggccaaaaagagctccctgtgctgtcaggaatctacaggacttggctcgtatttacattcg

SEQ ID NO: 260802 - DNA, 100 bp, Homo sapiens
caaaccatcttctcccaaggtttttgcaggagcggcctgcttcagactcctggcagaaacttgagaagtctcgcgagtataagaacagtaaccagctccg

SEQ ID NO: 260803 - DNA, 90 bp, Homo sapiens
tttgcatatgagtgctgctgcagcttcccgagacatcaccttggtggtctcatggattataaccatttggatatttggttcactaacaat

SEQ ID NO: 260804 - DNA, 97 bp, Homo sapiens
cgagtcttcggagcgaccccggcagacggccatcctgagacgacagggtcgatacatatgctcaacagtgcctgcgaaggcggaagaggaagcacag

SEQ ID NO: 260805 - DNA, 100 bp, Homo sapiens
aggtgcgagttacaccaaccaggacagaaatcattatcttagccaccagaagcctccccagctttctgaggatgatatctggctaaaaagcgagggagac

SEQ ID NO: 260806 - DNA, 113 bp, Homo sapiens
tattgggagatccacagctaagacgccaggacccactggaagcctagaaatgggaaatcctcattgacgattcaatttgttgaaggccaatttgtggactcctacgatccaac

SEQ ID NO: 260807 - DNA, 100 bp, Homo sapiens
cgtcctggactcctctgagaaacagtggtgggtacgggcacctcgctggcgctctcctccctcctgtccctgctgctctttgctgggatgcagatgtaca

SEQ ID NO: 260808 - DNA, 75 bp, Homo sapiens
gttcaagaagaacactccagagacccaacatgagtgaagtttcctgcaagaaacgggacgactatttggaatggc

SEQ ID NO: 260809 - DNA, 75 bp, Homo sapiens
gcgggcgggagaacggaaaactcccaacttcctgtttatcgatggtcgactggcaaaactaaatgcaggaagggg

SEQ ID NO: 260810 - DNA, 75 bp, Homo sapiens
gtctaattccgtgtaccgctacccgcccaagtccggtctcctcagtccccagaggaaggaagcactgcagagatt

SEQ ID NO: 260811 - DNA, 139 bp, Homo sapiens
tgcgaaggccgggacccggttccccggcccacagtgggggtgtgcaaacccgagagaactggaatcctcactatggatgggctcattgaggacattaagcatcggcggtattatgagaagccatgccgccggcgacaga

SEQ ID NO: 260812 - DNA, 98 bp, Homo sapiens
cgcctcttccgccgccgggctcggggcctccgcagcgacaacatggaggccgtgaagaccttcaatagcgagagtattggaacagttgtgctgctgcc

SEQ ID NO: 260813 - DNA, 100 bp, Homo sapiens
ccgacacactatgctccctccaaagccatggcaggaaagggacacagccggcgctgatgctgggaggcctccagggatggagagtggcctggctggcaac

SEQ ID NO: 260814 - DNA, 101 bp, Homo sapiens
ctgctgctgccgcctctgctgctgctgctgctgctgcgcgtcccgcccagccgcagcttcccaggtacctggaaggaaaccacctaacagccgtgcccaga

SEQ ID NO: 260815 - DNA, 75 bp, Homo sapiens
cgcatctccgcacactctctcctcacgcctcctgacagaaggacagaataacgggctcccagattcacaagcccc

SEQ ID NO: 260816 - DNA, 97 bp, Homo sapiens
gaaaatcaagttccatcctcagacaagaggtactttgaactcaagtaaacaaaagggaagattttctcgttgatactggagactgcacaacaatggg

SEQ ID NO: 260817 - DNA, 100 bp, Homo sapiens
cctgacccgaagtaccgacccgagttatgcccaccctccaactttgcgacggaaatgtgtcatcgaaagccagcctttctgagaaaagtctacagcattc

SEQ ID NO: 260818 - DNA, 100 bp, Homo sapiens
gaggaggaccctgtattctctgttgagaattcagggagggactcagatgcccttagacttgaaacataaagatgcctatcaagtgatattggatggtgtg

SEQ ID NO: 260819 - DNA, 90 bp, Homo sapiens
gggaaacacagcaaggaaatgtgagccccaggctgcagaagctcctgatgataattcattattgctgctgcgggcggagttatatttgac

SEQ ID NO: 260820 - DNA, 83 bp, Homo sapiens
cgagtctgttgggccttggtggctgtgctcttggcagacctgttggcactgagtgccgcttacaaacacgcagatggcaagaa

SEQ ID NO: 260821 - DNA, 100 bp, Homo sapiens
cctcaataagggaagacctggtgggtggagaatcattcatcacagcttcgaggaagaagaggtggataagatgatggaacagaagatgaaggaagaacag

SEQ ID NO: 260822 - DNA, 100 bp, Homo sapiens
ccttctgctccacgaggagcacagccgggccgctgcgaagaattaaatgtgagggagtctgacgtaagagtttgtgatgagtcatcatgtaaatatggag

SEQ ID NO: 260823 - DNA, 82 bp, Homo sapiens
ctgcggttggggcgggaagagccggggccgtggctgacatggagcaggaaaaatatattcagggggaagagatgtaatagat

SEQ ID NO: 260824 - DNA, 100 bp, Homo sapiens
agtcgggatccaacctctcagacagcggctctgtgaagcggggcgaaaaggacctgcgcctgggggaccgcgtgctggctgatgaggaagagatgcttga

SEQ ID NO: 260825 - DNA, 97 bp, Homo sapiens
tgggctaataatgctggcaaagtggaaaaatgtgcgctctgggtgaaccaggaggatgaggtggaggaggggcccagcgatgtgcagaacggacacc

SEQ ID NO: 260826 - DNA, 100 bp, Homo sapiens
ctacaccctcacagtttgctctgctcttccaacaccagtggaagatgatcacatcccagtacagtgctgtggataccaatccactttctctgtatgtcat

SEQ ID NO: 260827 - DNA, 100 bp, Homo sapiens
ctctggggcttcctgctccagctggcaaagtgtttcatggatttcaaagctggaggcgccttatgtcacattcttggggctgcttacaagtataaaaatg

SEQ ID NO: 260828 - DNA, 75 bp, Homo sapiens
gacagagtgtttcacatttgctgccatgagcaaagaggaggtcgacaggaaggtggacttttaaatattctccac

SEQ ID NO: 260829 - DNA, 97 bp, Homo sapiens
agaacaaagacttaaggaacagcttggcgctcaacgatgctgaaatttctggaaaagacaatggaaatcaggggcaggaagagaacagtgtggggtg

SEQ ID NO: 260830 - DNA, 100 bp, Homo sapiens
ggcagtgaagacataccgctggcagtgcatcgagtgcaaatgttgcaatatctgcggcacctccgagaatgacgtcatgtggctgcctagcaggcagagg

SEQ ID NO: 260831 - DNA, 75 bp, Homo sapiens
cgtgatgctcggcatccccatgttacccgccagagtcaggaggaccaacacaggaaacaaagcttagcaggagag

SEQ ID NO: 260832 - DNA, 100 bp, Homo sapiens
atccgccactgcgcagggcggctgggcagctatgtcatcaacgggcgcaccaagacttctgcctggtgtcgaaggtggtgggcagatgccgggcctccat

SEQ ID NO: 260833 - DNA, 100 bp, Homo sapiens
gccagcacgctcatctcagatctccagcggaggttgaggggatcgtcagtagagatgctgcagaattgcctgaggttctgtccattgaggaggaagtgga

SEQ ID NO: 260834 - DNA, 83 bp, Homo sapiens
gttcttgtttgtggatcgctgtgatcgtcacttgaacacaccacagccatcagcactggaatgcaaagaccagaacaaacaga

SEQ ID NO: 260835 - DNA, 98 bp, Homo sapiens
ctccgcagtgaccggactcgggggagtagaatatcagagagcctaaactatgaacattggtgttactgtcctgatttctaccaccgtctgcatctttg

SEQ ID NO: 260836 - DNA, 98 bp, Homo sapiens
atgaaccagccgggcggcgcggcggctccgcagatcttaccaatatatttgagtccttcctgcctcagttattggcctatcctaaccccatagatcct

SEQ ID NO: 260837 - DNA, 100 bp, Homo sapiens
caagaacatccgagggtgcctgggaatcggtcgcctggaggaccagtatttcccatggaggcttgtgctgcattgcacctgtcctcgcggccaaggtgct

SEQ ID NO: 260838 - DNA, 100 bp, Homo sapiens
ttttacaaagatgagaaaatatccaaagaacccaaaggatgcatctttttggattcctgtacaggagtggtgcagaagctccaccatgaggcgaggtgga

SEQ ID NO: 260839 - DNA, 50 bp, Homo sapiens
gattattcctcgcccacatctgtgccagaatgctgtccagtttcaacgag

SEQ ID NO: 260840 - DNA, 138 bp, Homo sapiens
aagcccggggcctgttgcctgggggcacacaggtgctggatggtacctcggggttctctcctgcccccaagctggctgcaagctttcttcctggtggcagatgacatcatggattcatcccttacccgccggggacag

SEQ ID NO: 260841 - DNA, 82 bp, Homo sapiens
ccgcaaccattgacgccatgtcgggttattcgagtgaccgagaccgcggccgggaccgaggagtgcagccgtagcagagcgg

SEQ ID NO: 260842 - DNA, 83 bp, Homo sapiens
cttagtctcaacccgggtgtgtttgcactactagagtgtactaatggtcacttgatgtgcgctggctgttttatccacctact

SEQ ID NO: 260843 - DNA, 75 bp, Homo sapiens
aagttgtcatttctcttgagtaaatacctaaaagtgggcttgctggagtataaatggcattcgcacagaggaggt

SEQ ID NO: 260844 - DNA, 96 bp, Homo sapiens
ggttccatgatgggaagtgacatggagtcggatggtcagggctgccctttctgtcgttgtgaaataaaaggaactgagcccataatcgtggacccc

SEQ ID NO: 260845 - DNA, 95 bp, Homo sapiens
tgattctttactcagctgagtgtgccacacaggtagccctggacggcattcagtgttttgctacaaaccactgagtaagcaaaaatcagaggaag

SEQ ID NO: 260846 - DNA, 82 bp, Homo sapiens
tttggcaaagctggggattggccagctgactgctcaggaagtaaaatcggttgttgatcattatgaaaatcctagaaacgtg

SEQ ID NO: 260847 - DNA, 100 bp, Homo sapiens
tccgccaggcgtacggtgccaagggattcagcctggcggacatcccctaccaggagatcgcagttgttacagggtagatcacccaaacctgacaagtggg

SEQ ID NO: 260848 - DNA, 100 bp, Homo sapiens
cagagattcaggccagagttgtgggccgccgtcggcagcaagaacagagagagaggtggacagatctgagagatactgagagtatgtattcccgtgtgcc

SEQ ID NO: 260849 - DNA, 123 bp, Homo sapiens
ttcggctttggcgctcggggtgactcttctcaaatgccttctcatccccacatagaaagaccacagcaagattctttcattcgtctcctcctagcctgggggaccaggctcgaactgaccctg

SEQ ID NO: 260850 - DNA, 100 bp, Homo sapiens
ggaccgccaagagcgacgccgccgtgtgcccaacggtcggtgtccccggctgaggcagcgcggccgcagcagcccttgatgaaactacagaatctgtttg

SEQ ID NO: 260851 - DNA, 100 bp, Homo sapiens
tcagagtggaaaaagtaccatcatttgaaacaggtgaaaaaccatttcaatgtagtcaatgtgacatgcgtttcatacagaagtacctgcttcagagaca

SEQ ID NO: 260852 - DNA, 98 bp, Homo sapiens
agccctgcctggaattgttcatactccccatccccaggatgtcaacctcagtccctcaaggccatacctggacccaacgggtgaagaaagacgatgag

SEQ ID NO: 260853 - DNA, 87 bp, Homo sapiens
ctagcaaacctcatcccgcccgtgaaggccacgccattaaagcgcttcagtcaaaccctgcagtatgtgggtgccccggtggcttat

SEQ ID NO: 260854 - DNA, 75 bp, Homo sapiens
ggcgggcgcagtttctcacgacgggccgagcctgccactggaaatgaggcaagttatcctttggaaatgtgctca

SEQ ID NO: 260855 - DNA, 100 bp, Homo sapiens
caacaagctgcctggtgcaatttgttccttgacttgtggtggagcagatattgggtatcttcaaagaacagtaaaacatccaactttactacaggatcct

SEQ ID NO: 260856 - DNA, 90 bp, Homo sapiens
gctagagttgccatttcgctgggatttttgggtggtgcaaaggaaaatgactcaggcactttggacacggtaggcgctgtggttgtggac

SEQ ID NO: 260857 - DNA, 80 bp, Homo sapiens
tagatcctgacactaaggaaatgctgaagcttttgcaaaatgatgcttcaacacccaggccaggtctctgcctcggaagt

SEQ ID NO: 260858 - DNA, 50 bp, Homo sapiens
tggctccctgcagtaccctttaacggggttgtgtttgcacattatggtcc

SEQ ID NO: 260859 - DNA, 76 bp, Homo sapiens
gggcccctcccgccccagtgccgcggcgttctggagccgggactactaaaggtcaatatgatgaagaagagatgac

SEQ ID NO: 260860 - DNA, 75 bp, Homo sapiens
tccctgctggaggagcgcttccggggttggattgagattgttggatgtgctgatcgttcctgttatgacctctcc

SEQ ID NO: 260861 - DNA, 98 bp, Homo sapiens
cgccggcgagaagcggccgagccagcagcagaacggtggcagccgaagttaggaagcagatctccggacaatatagtggttctccccaactgctcaaa

SEQ ID NO: 260862 - DNA, 48 bp, Homo sapiens
caaagtctgtggcaatgtgtgagctggagataagatgggtagactgct

SEQ ID NO: 260863 - DNA, 100 bp, Homo sapiens
caccgccctacacatcaaactccgggccacaggaggaaataggttgaaatcacaaagattagacacctttttagataggtgttcttcagcaccactgaca

SEQ ID NO: 260864 - DNA, 99 bp, Homo sapiens
tgctgatgctgtccacttaccagacggacttcatcctggtctggtccttgcactcctgtttccaagcatggcgagcatggcggctataggcagctgctc

SEQ ID NO: 260865 - DNA, 49 bp, Homo sapiens
attgcaccacagatatatgggttgttcatatccagctttcagagtggca

SEQ ID NO: 260866 - DNA, 98 bp, Homo sapiens
gctctcgcaggcccccccgcgccgaccgcgttcctatggacagacgcacagacacctgcagggcgccctgcgtccggcagaggaggcgagcatcccgc

SEQ ID NO: 260867 - DNA, 98 bp, Homo sapiens
gaagtcttcatcaaccgggaccgtggcttcggcttcatccgcttgggtaaagttctttacaaagttcgctggaaaggctatacatcggatgatgatac

SEQ ID NO: 260868 - DNA, 75 bp, Homo sapiens
gtcacaaaggaaaacgaggaaagtcccaggatgactactgtgtcaagacactgcccatctctaagataagaacct

SEQ ID NO: 260869 - DNA, 100 bp, Homo sapiens
ctgaaaacatccagctcccaccgggggtggatgtgaacactgaccggaagatcagtgccaaggagatgcagcgctggatcatggagaagacggccgagca

SEQ ID NO: 260870 - DNA, 82 bp, Homo sapiens
ggggaagtaatggtatccggccaattgagattcggagttaaaacagatttataccatggacacagagatcccctaaggtcct

SEQ ID NO: 260871 - DNA, 138 bp, Homo sapiens
gcagagtgaccccagcgtcctcaccgactcctcggccacctcctccgcggacgccggggagaacccagtgctctggctattgctgaaaacaccttctagttccaccttgtaactggactcccaaaagatgaatgctga

SEQ ID NO: 260872 - DNA, 90 bp, Homo sapiens
atgaggcacttgaattagaggggcctcttatcactcctggatcagaggttgacggatatattcagacgttacgacacggatcaggacggc

SEQ ID NO: 260873 - DNA, 100 bp, Homo sapiens
atgcggaagaatttgaagacaaagagtggacatttgtcatagaaaatgatgtaaatgaagaccctggagaagatgtggccctcctctctgttagttttga

SEQ ID NO: 260874 - DNA, 73 bp, Homo sapiens
gaccccaactccacccagcgctaccggctggaagccctcaagatcgccacatcacagaatcgtatctatctca

SEQ ID NO: 260875 - DNA, 82 bp, Homo sapiens
ctggcggagctggagctggagctctcggagggtggatgctctccgattgcgtttggaagagaaggaaaccatgttgaataaa

SEQ ID NO: 260876 - DNA, 50 bp, Homo sapiens
caggagcccgctgctcttccccactcagggccgcgatgggcctcttggaa

SEQ ID NO: 260877 - DNA, 90 bp, Homo sapiens
ggaggttgcagtaagccaacaccgtgccactgcactacagcctgggcgacagggagagcttgtttcatatccatatcccactgtattcct

SEQ ID NO: 260878 - DNA, 101 bp, Homo sapiens
cagccgaccttgagctccaggagttcgtctcttacgtctgcggaagtgcagctgcctcagttcttagcgcagtttctcttcagcaacgggtagcagaattg

SEQ ID NO: 260879 - DNA, 100 bp, Homo sapiens
cgttggagcgcggaaatctggaaccgggatggcgacgtctacactgagtcggaggcgaagggtgatctggaccctctggcatctctcaaatcgctgactt

SEQ ID NO: 260880 - DNA, 100 bp, Homo sapiens
ggcacctgcgcgaagctggccaaagcctgcccagacggctcacctgtgcgggatggaacaaaagtattaaaggtggaagaaggtccatatctttttctgt

SEQ ID NO: 260881 - DNA, 82 bp, Homo sapiens
aagaaagccaaaggccctgtccatatcgtgcattcagagaactgggtggtggacttggcagatgaacttgctcttgttgatg

SEQ ID NO: 260882 - DNA, 100 bp, Homo sapiens
gaacctgttcgccacctgggaggtggacggctccagccccagctgcgtgcccagggcgtctctggccgagcctctttttgtggaaaacgacagcagcagc

SEQ ID NO: 260883 - DNA, 100 bp, Homo sapiens
ttgtcacgaatgggaagccaagtgccatcttcaaaatttcaggtcttaaatctggtttggaataaattgcctcatccaatttgaagacttcgccaatgcc

SEQ ID NO: 260884 - DNA, 100 bp, Homo sapiens
gattattcttggagctggaccagtacttgagctgaagaaatcaggggagaaacccctgcttggtggaagcctgatggaatatgcaatcttgtctgccatt

SEQ ID NO: 260885 - DNA, 75 bp, Homo sapiens
tggatgacctcttcgtctttatgcagaagagggtttttttgaagaagcaggatgctgatctaaacgtggaaaaag

SEQ ID NO: 260886 - DNA, 101 bp, Homo sapiens
tccaggtcttcctggtccaaagtgagcgtcaccctggacccacagtcggccagtgggtacctgcagctgtcagaggactggaagtgcgtgacctacaccag

SEQ ID NO: 260887 - DNA, 75 bp, Homo sapiens
ctgcaatgctgcctaccatgattggctcacctgttactcggcctcccagaaagatggataggagaaatgactacg

SEQ ID NO: 260888 - DNA, 100 bp, Homo sapiens
atgaggttgatgccaactccttcttcccacgctgctactgcctgggggctgaggatgacaaaaaagccttcatagggctccagcaccaccaggacctgag

SEQ ID NO: 260889 - DNA, 74 bp, Homo sapiens
aagaacattgagtcgtatgaggattaacaatgtaccggttgattcttcaccacactgaaaccattaggaaaaat

SEQ ID NO: 260890 - DNA, 100 bp, Homo sapiens
ctgggtgcagatgcagtgtggctctggatagcaccttatggacagatgacatggcagagcttctcctcggggagtcgaagctggagcagtacctgaagga

SEQ ID NO: 260891 - DNA, 83 bp, Homo sapiens
cgcagacacgggacccgcttcgaggccgctttggcgccaaatcctgagaacccagcttagactagaaagtctagaagacacac

SEQ ID NO: 260892 - DNA, 100 bp, Homo sapiens
aatggtggatgaagttgttcattgtttgtcaccacaaaaaggacaggtacggaaaaaggaccagatcaatattgaaacaaagaataaaactgttcgtttt

SEQ ID NO: 260893 - DNA, 50 bp, Homo sapiens
cctcccagagtgttgggattacaggcgttggagaccagggccagccctgg

SEQ ID NO: 260894 - DNA, 90 bp, Homo sapiens
cacagataccaaaaaaatctggggtagagattttaccaaatgttgcaagaactctggagttcttatggtagtaaaatgccggaaagaaaa

SEQ ID NO: 260895 - DNA, 75 bp, Homo sapiens
cagcctactatctgtctggagaagagcatgacgacagagatgatggtgtggattattgggccaaaagaggaagag

SEQ ID NO: 260896 - DNA, 75 bp, Homo sapiens
cctcgtgaagaacctgaaggacacactagtggccataaaatgcagtaaaaacaaatccagttcccaagaagctgt

SEQ ID NO: 260897 - DNA, 75 bp, Homo sapiens
tgctggaagcagatatatctgcccatgaggatatggactgtttaatgttgacctttggggacattccacatcatg

SEQ ID NO: 260898 - DNA, 80 bp, Homo sapiens
ttggagtgtcccccagataggtcattccacattggtgcctcatgcactgatgcaggtgacagccctgttggcactaccac

SEQ ID NO: 260899 - DNA, 101 bp, Homo sapiens
cggggcgccctccgccacgcagccggccaccgccgagacccagcacatcgccgaccagtccttcagtgaatctacagacctattttctcaggagctcagcc

SEQ ID NO: 260900 - DNA, 100 bp, Homo sapiens
gtttaatcagaggttctaagcactggacatttgaaaaggtggtagctgagcacccagatgcttcaggtgaggagattgaagagctgctcaggtcacagtg

SEQ ID NO: 260901 - DNA, 90 bp, Homo sapiens
caagaatcaatgaatgaaattctatttgaagaataccagtttcaagcagtattaagagtaaatggtcctcagaatggttggaatgaccct

SEQ ID NO: 260902 - DNA, 75 bp, Homo sapiens
aagtaaagcccacagagatctacaaccttggagcccagagccacgtcaaagcttctaaccctcctttatgtgact

SEQ ID NO: 260903 - DNA, 75 bp, Homo sapiens
gttcttgctaagattgtgaattacatgaagagagaagaagaaggaggttcctgctgtgccagaaacccttaagaa

SEQ ID NO: 260904 - DNA, 95 bp, Homo sapiens
ccaagatgtctgacatggaggatgatttcatgtgcgatgatgaggaggactacgacctgtttgccagggtttggatacctgatccagaggaagtc

SEQ ID NO: 260905 - DNA, 88 bp, Homo sapiens
ctggccgaaggggcgtctgcggctctccgccgtccccagccctgcctctccctgggctctggccgttaattaaggaaaagttgagcca

SEQ ID NO: 260906 - DNA, 75 bp, Homo sapiens
tgtgctgaaatgtttgacgacactgatggtttgccactgaggcggctcccagctgcgttggcgacatggccgaca

SEQ ID NO: 260907 - DNA, 100 bp, Homo sapiens
ttccaatcgctcctgtttgtcttctgctttggcccagatacttggtgcttgaaaaactgaagaaggaagacgctgaccgaattcatatattcagttcttt

SEQ ID NO: 260908 - DNA, 75 bp, Homo sapiens
cagcagtacgacctgcagggccagccctacggctttccatctgatggtcccctggtgtgtgccctggaacaggag

SEQ ID NO: 260909 - DNA, 99 bp, Homo sapiens
gttcaagataaagtgattttttgcctttgttgattaactggacaaattcaggctgcaaggtgtgactgttgtaaatctcaaggaactcttaaagagcga

SEQ ID NO: 260910 - DNA, 100 bp, Homo sapiens
aatccagaaaattatcaacattctcacagacaagcatggagcctggggaaattctgcagtgagggagttgaccacatttggccatttcccagaagggccc

SEQ ID NO: 260911 - DNA, 100 bp, Homo sapiens
gaatgttccctgacaatttcgttaagcaaatgaagaaacacccctgccgccagtgtgacaagtctttcagctcgtcccacagcctgtgccggcacaaccg

SEQ ID NO: 260912 - DNA, 100 bp, Homo sapiens
cgcctggcctcactcaaacagtaaacgaggaggaattaattccaatgagtgtgaaaatgtatcaagaaaaaagaaaatgtcagaggaatttgaagccaat

SEQ ID NO: 260913 - DNA, 90 bp, Homo sapiens
gttatgaggcttaataaagaagacacagggctgggtgactccgtatgctccagccccagtatctccagcaccaccagccccaagctcgac

SEQ ID NO: 260914 - DNA, 75 bp, Homo sapiens
tgaagggaaagacgatggagggcagcgaagagagtcaccgaccatgacggggggacttgatctcatcttcatgcc

SEQ ID NO: 260915 - DNA, 75 bp, Homo sapiens
ggacgacatgctgccctgtgatgaggccggctgcctcctcttctcacaggcccgggcgcaggaccgctggaggac

SEQ ID NO: 260916 - DNA, 122 bp, Homo sapiens
agaaacagggtccacagcagttccctatgggtcttttaaacatgaaacccgaaccctagcggagattgccaaagtggagctggacaatatgccactccgtggaaagcagctgcgtgtgcgct

SEQ ID NO: 260917 - DNA, 75 bp, Homo sapiens
tcttagatttggctcctttttgcacccttaaatgtaagagaaatccaagaccagtgacttatcaattccatccaa

SEQ ID NO: 260918 - DNA, 83 bp, Homo sapiens
cctattccttcacatgtaattcagaaattagggacaggtttgcctgaatccatcattgcagctgcatgttcaagaagtggccg

SEQ ID NO: 260919 - DNA, 74 bp, Homo sapiens
cggctgcaggagcagctagcgcagccatcaggaaatatggccgagattttcaggcaatctcagacgtgattggg

SEQ ID NO: 260920 - DNA, 97 bp, Homo sapiens
ggggcgaggtcgccgccatggcccgctggatcccgaccaagaggcagaagtacggggttggtgtcatggagaaactccagctgggcccagagattct

SEQ ID NO: 260921 - DNA, 100 bp, Homo sapiens
accgagagcgtgaccgagagcgcgaatatcgtcatcgttagaaggtaaaaaagagtgtcaagtggacatgcaaagcttgtggagagaagcagtccttttt

SEQ ID NO: 260922 - DNA, 74 bp, Homo sapiens
ttgagccctaccttactggacagtcaaatcaggagcgagaacccgagcagcgccatgagcaacactaccgtcgt

SEQ ID NO: 260923 - DNA, 100 bp, Homo sapiens
ctctgtgtaccagaagaccaatgccgtgtctgagattaaaagggttggtaaagacagcttctgggccaaagcagagctgtcggaaaaggtaacagaagat

SEQ ID NO: 260924 - DNA, 83 bp, Homo sapiens
ctcggctggtggcaagtattgctgtgggtgctgggacttcccgtccgcggcgtggaggggcagctgcaatgactctccgcacg

SEQ ID NO: 260925 - DNA, 100 bp, Homo sapiens
gagagacgctggaggatgcggacgcggaggccgcctggggtagcggcggcgggagtcctggcgctctgcaggtacaccaggggttggaaaaaccacacta

SEQ ID NO: 260926 - DNA, 100 bp, Homo sapiens
cctgtttttaccgtagaggtaaagaactatgggggtgaagctaagtagtcttcttggtaaaaagggaaacttggaaaaactccagagctactgggaagtt

SEQ ID NO: 260927 - DNA, 51 bp, Homo sapiens
gaggccgtgaagaccttcaatagcgaggatatgttcaaggaatgagtgatt

SEQ ID NO: 260928 - DNA, 100 bp, Homo sapiens
tgacacttcacaattggctttcattctatgagaagaattatgtgtgtgttggaatcagagatcattgatttcttcctgggggcctctctcaaggatgagg

SEQ ID NO: 260929 - DNA, 91 bp, Homo sapiens
ctggagcctcagttggaagcagccgatccagcctgcggagcctgtggggcagtgaaaatgcctcgtgtaaaagcagctcaagctggaagac

SEQ ID NO: 260930 - DNA, 90 bp, Homo sapiens
gaaaggatgatggcatttctcttttaatatctgatactcagcctgaagattgctagtcatagtggctatgtgcagattgactggaagaga

SEQ ID NO: 260931 - DNA, 78 bp, Homo sapiens
aagaatcgtccacagagatcccccagttctcctcctgctcccaccggttcagcaagagacgaggacttgctatgttgc

SEQ ID NO: 260932 - DNA, 83 bp, Homo sapiens
atttgccttatacagctaaagccatggaaagaccactggagcgatccagcgaagatgtggatataatcttcactcgactgaaa

SEQ ID NO: 260933 - DNA, 88 bp, Homo sapiens
agatccttcaaaattaaaagaggagcagcatggcatttcagtcactggtttgcagagtccagcaaagaatggccgagtggattctgag

SEQ ID NO: 260934 - DNA, 98 bp, Homo sapiens
acagacggagtgctgtgccacattctggcagccaggaggtgctgtctgaattgagagtactatctcagaaattgaaggaaaaccatcagtccaggaag

SEQ ID NO: 260935 - DNA, 75 bp, Homo sapiens
gtctcatcccagaaagagaagactttaaccactgtgatgcctgagaatccaacctgtcaccatggcccaccgatt

SEQ ID NO: 260936 - DNA, 50 bp, Homo sapiens
agcacatgttcatccactcggggagtgcatccgccccaacccttttcccc

SEQ ID NO: 260937 - DNA, 74 bp, Homo sapiens
ttggatccgcgggacaagaaaattcatgcgagtacctgtggagaagaaacaatggattccttagaccatatgct

SEQ ID NO: 260938 - DNA, 100 bp, Homo sapiens
ctccgaaaaaacaaaacaaatatgaactatgataagctgagcagagccctgcgatactattatgacaagtcatgcggaggaatccctttggtgtggacat

SEQ ID NO: 260939 - DNA, 100 bp, Homo sapiens
gagcacaggcctccaggagccgctgggagctgccgccaggagctgtcaccatgacggttgatggacggatggctacatggatgtgatggagatggtttac

SEQ ID NO: 260940 - DNA, 100 bp, Homo sapiens
gtgtagaatggatcaaagctagagtgactgagttgaacccagacaagaactgcattcacacagatgacgacgagaaggctgaagccgacgtagcttctct

SEQ ID NO: 260941 - DNA, 75 bp, Homo sapiens
caagagtggagacaaagagatgagcaggacagagcgggatgccaccagcttgtccaaagggaagttccaggagct

SEQ ID NO: 260942 - DNA, 122 bp, Homo sapiens
gccagcagaaggagaacacgctgcttcacctcttcgccggcgggaagaatgttggtgaaaagcacagaaaccagtgacgtttgtggctgtggaatttccatggagaaaagagagcatctgaa

SEQ ID NO: 260943 - DNA, 100 bp, Homo sapiens
tgcgtcctgctcctcgggtgcctgcacctcggccgtcccggcgcccctggggacgccgccctcccgggacctgaaggagaagaaggagaaggtggaggag

SEQ ID NO: 260944 - DNA, 100 bp, Homo sapiens
ccatgtttatgcattaaagaattatgggttctacttattcatcttctagaccacagaagtaaatggtttgtctcggaatatgaaaacaaagttgcagtac

SEQ ID NO: 260945 - DNA, 100 bp, Homo sapiens
tgcactgcatggttgctgctggatgtgttgtgttcctggcttccctctggatgctgacagaaacaaggtgctgttcctttgggaaccacggccaaagaag

SEQ ID NO: 260946 - DNA, 113 bp, Homo sapiens
cctggggctggaaattgcgctggaccgtcgccttgctcctcgccgcggcggggactgcagacaatgcagatcttcgtgaagactctgactggtaagaccatcaccctcgaggt

SEQ ID NO: 260947 - DNA, 82 bp, Homo sapiens
cgacaggattcgttggctgccgtccccgctgctgtgcattgggaatgtatcctgtcaggtataatgtcagtgaatggcaaga

SEQ ID NO: 260948 - DNA, 50 bp, Homo sapiens
ctggaactctgcagaccaactgccgtgaattctccgctatctctttgaca

SEQ ID NO: 260949 - DNA, 75 bp, Homo sapiens
gtagatggattttttattcaattgtttattgaaaatggtactttaaagataacgaaggaggcccaacttcattca

SEQ ID NO: 260950 - DNA, 50 bp, Homo sapiens
ctggccacggggactctcttctggatgggcggcgtgatggatgacaagag

SEQ ID NO: 260951 - DNA, 97 bp, Homo sapiens
cccgtgtcctgcaggtattgggagatccacagctaagacaccgggacctcctggaagccaaaaatgctgatgaacttattagtcctaaagacattga

SEQ ID NO: 260952 - DNA, 100 bp, Homo sapiens
tgtatgattaggccacaatcttcaatgagtaaacatattcctgcacccaggcatgtggaatatgctcatagtggcgatgtgcttggcccttctgggctgc

SEQ ID NO: 260953 - DNA, 83 bp, Homo sapiens
tggaaaatgcgctcgggctggaccagcagatgcgcctgcttcctctgcgccagaagaaggcccacctgatggagatccaggtg

SEQ ID NO: 260954 - DNA, 100 bp, Homo sapiens
gaaataatggaaatcaatgaaaaactcgcagaagctgaaagtgaagctgccatgaaagagattgaatccattgtcaaagatttggagcaagaggtggtgg

SEQ ID NO: 260955 - DNA, 100 bp, Homo sapiens
gtgaaatcctgtcctgaagactgtaaggcgtctgtagaggcttctggtgaaatcgcattatgcaagactggatttcctgaagatgtttacagtgcagtct

SEQ ID NO: 260956 - DNA, 100 bp, Homo sapiens
ggttatagatggacaagagacgatcattctgcaagcaggcaacctgaatacagatgatgtcagttcatacagactgtattgtgtcagtgcagattttaag

SEQ ID NO: 260957 - DNA, 100 bp, Homo sapiens
actcccaggctcaagcagtcctaccatgtcagccttcccagtagctgggaccacagcctggctcccaccatgagtgctgagcttaacgtgcctatcgacc

SEQ ID NO: 260958 - DNA, 83 bp, Homo sapiens
ggtggtcacgtggcccagatttatgaacatccatgatagcagtcttctgtaaatcgaacttttcaagaattctctgaaggaac

SEQ ID NO: 260959 - DNA, 100 bp, Homo sapiens
ctggcctcatctgttccagggaggtgggattgatggccaatccgccatggtatagttgaagattgggacttaatggaaaggtttatggagcaagtgatct

SEQ ID NO: 260960 - DNA, 75 bp, Homo sapiens
acaagtatcctgttgtgcacattgggaaacgctatctgaattcaggagactcacagatgaatgcttctcacccgg

SEQ ID NO: 260961 - DNA, 101 bp, Homo sapiens
aaaaaatatggactagcaatggcaaaaccgaacctagtcccaaagctttcatggcagaccagcaactcccctactgggcctcacaccttaaacagcaccag

SEQ ID NO: 260962 - DNA, 82 bp, Homo sapiens
caaccaccgcacccctacgctgaccagctatccagtcagttcgctgctattcccatgggtcacaggagacagatgaggagtt

SEQ ID NO: 260963 - DNA, 122 bp, Homo sapiens
atgaaaactgtgaggttgtcatgggcaacctggagataaccagcattgagcacaaccgggacctctccttcctgcggaataacaagcctttgtattcatttgaagataatgcagactatgtt

SEQ ID NO: 260964 - DNA, 101 bp, Homo sapiens
ggcgcgatggagcagcgaaaacgtggttgtagagttccgtgactcccagctcctctccaccaaactgccatattgccgtgagaatgtgtgtctggcttatg

SEQ ID NO: 260965 - DNA, 101 bp, Homo sapiens
ctcaacctgcgacatcactttcgcctgcgtgtcggatcccaaggcggccaaggacttaccagatgtatgctactcatggtgggtcctggcttccctaaaga

SEQ ID NO: 260966 - DNA, 111 bp, Homo sapiens
aacgcacaggccgtcgctatgagcgggaccaccctgggcacagcaggcatcggagagatcctgaaggagctagacgagtgctacgagcgcttcagtcgcgagacagacggg

SEQ ID NO: 260967 - DNA, 101 bp, Homo sapiens
ttggaatcattttgctctcagtcatccttacccctaaagaaggagagtccagggatgtggaaattgcaagaacctattgatggcttggatgctctggtggt

SEQ ID NO: 260968 - DNA, 75 bp, Homo sapiens
gatgttgtcctgtgctggggctgacagggtgtggaacgtccgctacaaccactctcatgaccagctggtcctcac

SEQ ID NO: 260969 - DNA, 96 bp, Homo sapiens
tcagggctacacttaaatgaaggagttggtaaaatattaaagaagatcaacaaggccatcgtctccaagaagaataaagacattgtgacagtggct

SEQ ID NO: 260970 - DNA, 101 bp, Homo sapiens
tgctggccgtgatcaaacactgcaaggaccccctccggctcaagtgtgtcaagcaagcaacagaagaaccttgaaggctatgtgggatttgccaatctccc

SEQ ID NO: 260971 - DNA, 100 bp, Homo sapiens
cctcaaccctggaaaacagctggatttgacccattccgattcggagtcctccctccacatgagtgaccgccagcgtgtggcccccaaacctcctcagatg

SEQ ID NO: 260972 - DNA, 100 bp, Homo sapiens
ctccatcacccaccaacaacaccacaataatccacagccaaggtatatttgcttacttaaactaccatgttcctcgaacgagacgagaaatcctggagac

SEQ ID NO: 260973 - DNA, 50 bp, Homo sapiens
gccggcaccaccgctgcaagagccgggattatcattggcaatggcgttca

SEQ ID NO: 260974 - DNA, 100 bp, Homo sapiens
atggccaggatgctatagcattgtcagtgctgaagccgacgtagcttctctgaacagacgcatccagctggttgaggaagagttggatcgtgcccaggag

SEQ ID NO: 260975 - DNA, 75 bp, Homo sapiens
ggcgctgctggcgctctggctgtgctgcgcgacccccgcgcatgggacagagcagaatgggctgatatagatccg

SEQ ID NO: 260976 - DNA, 98 bp, Homo sapiens
tcaccatacaggaacagggcagacgttagcgtgagtgatcactctcaatcccggttgatcatggccttgccaggttggtgacagtatattgtgagcat

SEQ ID NO: 260977 - DNA, 90 bp, Homo sapiens
aaaatgacgacacgccccacaggtcttgggaggattaagtgaggggacatgagactttctgctgacccctctgtcacccactgccagtca

SEQ ID NO: 260978 - DNA, 83 bp, Homo sapiens
acggagacagaccccggcccggcgaccgagctgggcccgtgagccactcggcctcaggttgtgaccgagattcccgacgagag

SEQ ID NO: 260979 - DNA, 87 bp, Homo sapiens
caagatgtacagtgacctgaggaaagaatctatggggtatagaacaggctatgcttacaggcatcctctcattcgagagaagcctag

SEQ ID NO: 260980 - DNA, 51 bp, Homo sapiens
ctggcgctcatccgcttccacgtcaagattgtcaagtggtcagactgttgt

SEQ ID NO: 260981 - DNA, 90 bp, Homo sapiens
cagggtctctgggagtggctgccaggagttctgtgctgagccgaagttcatctgtgaagacatgagccgcacagacgtgtgtcaggggag

SEQ ID NO: 260982 - DNA, 50 bp, Homo sapiens
atcgacgcctatgtcgacgagcagtccctgcactaggtcagacaatcccc

SEQ ID NO: 260983 - DNA, 83 bp, Homo sapiens
gacattcaggaattctcctgccaccgcgtggtgcttgccgcagccagcaactatttcagataacatttggtcagccaggcttg

SEQ ID NO: 260984 - DNA, 100 bp, Homo sapiens
gacggcggtcagagccgaacgcgagggcggcgcccggggactggagctgcgcgcaataggttagctttatacgtctacgaatatttactgcacgtaggag

SEQ ID NO: 260985 - DNA, 90 bp, Homo sapiens
ttctaaatgacagtgccaagccatattcagcccatgcttagcagtgtctgcaaaaacgaatcttttcctacaacctgttaactgactgga

SEQ ID NO: 260986 - DNA, 100 bp, Homo sapiens
gttagtgtctatgctcagaatccaagcggagagagtcagcctctggttcagactgcagtaaccaagcggctgaggaaggtggagctcgggacagccctgc

SEQ ID NO: 260987 - DNA, 98 bp, Homo sapiens
tttttttataaaggaacttacctccatctgtcttttcaagtcacagcccgttggagattgtgattttaatgttcgtctgcagtgtatagaacgagaaa

SEQ ID NO: 260988 - DNA, 74 bp, Homo sapiens
accgaggttggctcgatgctgttcccagatggaagatggtaccccaaagcatatcatccagatgacaggattta

SEQ ID NO: 260989 - DNA, 83 bp, Homo sapiens
tccagagcgccgcgcacttcgtcatgttcttcgcgccctgggtggtgaaggaggagatctttgatgacaatgccaagcttccc

SEQ ID NO: 260990 - DNA, 75 bp, Homo sapiens
cgacgttccatctgtggaaggacctaccaaccagattctggggagcaggtcctggtggatgtggagaccaagagc

SEQ ID NO: 260991 - DNA, 90 bp, Homo sapiens
gtgggaactctttccagcttgtgtctggagggtgtgaagacagagaatgaccacatcaacctgaaggtggccgggcaggacggctccgtg

SEQ ID NO: 260992 - DNA, 82 bp, Homo sapiens
tggacgtttgccgtccactctgaggctgctccagttacagcaccacccggccgctgcacccggctgctcccaggccccccag

SEQ ID NO: 260993 - DNA, 100 bp, Homo sapiens
gcacctacactggcaacattagatccacctcatacaggtgtgctgggcatcaaggtgaagatcatgctgccctgggacccaactggtaagattggcccta

SEQ ID NO: 260994 - DNA, 51 bp, Homo sapiens
cggacagaagcgctggtcggcgtctggcgcacgagctttcagatggagatc

SEQ ID NO: 260995 - DNA, 78 bp, Homo sapiens
ggagcacaagtagctgctcttccaagcaaggaagtcgacaggtgttggagcgggccggagagaagtagagtgggctgc

SEQ ID NO: 260996 - DNA, 100 bp, Homo sapiens
caggcggccgcacaggttccaggtctttaacgtgagcccgctgcaggtgtgcggcccagtccgagacagcaggtcacagtgctgtcgatatcaccaaggt

SEQ ID NO: 260997 - DNA, 74 bp, Homo sapiens
gaccacccctgaagaaattgcacagattcaattagcagagcctcacagacaatggccaaatgtgtcaaagctgt

SEQ ID NO: 260998 - DNA, 82 bp, Homo sapiens
cccgcgtccgccgattcctcctccttggtcgccgcgtccttggctggcgtccctgccaggagcccggaagtgggtccgcacg

SEQ ID NO: 260999 - DNA, 97 bp, Homo sapiens
cactgggagaagaacctctcataccctcggcaaggtagggcctcctcttgacatcaagctgggcgcattgaactgtacggctttcagcatccagtgg

SEQ ID NO: 261000 - DNA, 100 bp, Homo sapiens
ttcatcacccctctcttccaaatcctgtagccataaatgtctggctaatggcatttacaggagctgagatctgtatctgtggacctgaatgttgatccct

SEQ ID NO: 261001 - DNA, 93 bp, Homo sapiens
agatggaacccgaagaagaaaggattcgttacagccagagattggtgggatgtgtgtgggctgaaattccgagctgcggttgtgcatgagaat

SEQ ID NO: 261002 - DNA, 101 bp, Homo sapiens
gtagagtacctgttgttgcagagttattttctgagtcagtttcagacctcgaagtagggggaaaactgcagtggaagatgaggacagcatggatgggctgg

SEQ ID NO: 261003 - DNA, 100 bp, Homo sapiens
cacggccgcaactgggggggccccgacttcgagcgggtgcgctgtggccttgagcacgagcggcagaggaaggcgaatacttcctgaaggtgctgatccc

SEQ ID NO: 261004 - DNA, 100 bp, Homo sapiens
ccgggaagctcttggagatgcacaacagtcagtgaggttggatgacagttttgtccggacagtgtctcactctgtcactgaggctggagtacagtggcgc

SEQ ID NO: 261005 - DNA, 88 bp, Homo sapiens
ggctccttctggaagcagttgctcaacacgttttaaccttgaaactgaatggaagaataactatcctcgcctgcgggaacttgaccgg

SEQ ID NO: 261006 - DNA, 76 bp, Homo sapiens
gtcaacgaatcatccacgcacctgcagctctgctgagagagtgcaagccgtgggtctttaacacctctgtgtgaag

SEQ ID NO: 261007 - DNA, 99 bp, Homo sapiens
cggtagcgtcccgggtcccctagcagggctctagagaccacgtgaagtctcctcgacaaattggagacaatctgattgttcctggaggagtgaagacca

SEQ ID NO: 261008 - DNA, 50 bp, Homo sapiens
gaggcagccacggggcccctgggtacccaagatattgtatttggagaagt

SEQ ID NO: 261009 - DNA, 76 bp, Homo sapiens
tcatcaactcctacgaggacaaaagcaacgacttcgtatggaacggaaaacagttcttccttcaaagcatgcagta

SEQ ID NO: 261010 - DNA, 90 bp, Homo sapiens
gagacgtctggatacctcgttaggatcagctcgcacagaggttgtctgcaagcagggtttttaatgaccacaacaagcaagcatgcagct

SEQ ID NO: 261011 - DNA, 83 bp, Homo sapiens
gctcccggagtgtatgtctttggagaacttctggagctggccaacgtgcaggaggtggatccataaagaacccagccaacccg

SEQ ID NO: 261012 - DNA, 100 bp, Homo sapiens
cagagagagaggtggacagatctgagagatactgaggcccacgaggactcggagaagctgcgggagatcgtactgcccatggaaaaggagatcgaggagc

SEQ ID NO: 261013 - DNA, 97 bp, Homo sapiens
tgaacctgtacgccacctgggaggtggaccggagctcgtccagctgcgtgcctaggcctcgctattccctgggacacaacaatattgaacgtaggct

SEQ ID NO: 261014 - DNA, 100 bp, Homo sapiens
ctgcagcgacttcctcaaaggctactgccccctgggtgcaaagggcccggcctgccccgcacctgagctgccctcgcccccctctgctggctacagccct

SEQ ID NO: 261015 - DNA, 82 bp, Homo sapiens
tggggtcggcgccgagtgggaggatggcggaagttttgggatttgagattgacgcggtgaactctgtccagttttcaaacca

SEQ ID NO: 261016 - DNA, 99 bp, Homo sapiens
atgctaatggagcccctgccatcacactgctaatacgagaaaagggtcatcacactgaaacggtgttcaaccgggttttgccagggcctattgcaccag

SEQ ID NO: 261017 - DNA, 75 bp, Homo sapiens
aagtggctacacttgccactgtgtgctgccatacacagatttgataatgggctgcattaaaagtaaagaaaacaa

SEQ ID NO: 261018 - DNA, 98 bp, Homo sapiens
acatcaagaagatcttcgagttcaaagagaccctcggaacggaggttcccctgaaggatgctaaggaatacgctgaatccataggtgccatcgtggtt

SEQ ID NO: 261019 - DNA, 100 bp, Homo sapiens
ccaactttgcgacggaaatgtgtcatcgaaagccagtgccttgtgggacattgagactgggcagcagaagactgtatttgtgggacacacgggtgactgc

SEQ ID NO: 261020 - DNA, 100 bp, Homo sapiens
gttctcctgaaaggttaaaggttatggtccagattaacaccagcggagaagagaggaaatgtttcaacgtgcgcaagcgttgcggcggcgggcagaggac

SEQ ID NO: 261021 - DNA, 107 bp, Homo sapiens
ggacttgggacttgcctggcgactttggccggacttttgctaactgcggcgggcgagacgttctcaggtgttgacttcaaaatcaaaactgtagagctaagaggaaa

SEQ ID NO: 261022 - DNA, 83 bp, Homo sapiens
ggacagccccaggatgccgtgggccgcagccactcaggactgtcaaagtgccctctggtggtcagaagatgctgtgctgtctc

SEQ ID NO: 261023 - DNA, 71 bp, Homo sapiens
gctacgagaaggtggaggatgcctgccaggggccaggtgggtggcagagcaaaagaggaatggactgtggg

SEQ ID NO: 261024 - DNA, 75 bp, Homo sapiens
agcagtcgagcaccgccaagtcggccacctggacgatctggtgaggaaggatattatcctgaacttacagaattt

SEQ ID NO: 261025 - DNA, 51 bp, Homo sapiens
cattgttcgatacagggtgtatgaggaattgacagaagaaggactgccttt

SEQ ID NO: 261026 - DNA, 95 bp, Homo sapiens
acggatgctgttagaccttctacttgaagcaaatatgaagagagaagggcacagttacctaagtatcaacgtaatcttcctcggccaggacaggc

SEQ ID NO: 261027 - DNA, 100 bp, Homo sapiens
caggcaggctacgagaaggtggaggatgcctgccaggcgtgcatcgcttcaaggccgggacagtgtggccgagcagatggctatgtgctagagggcaaag

SEQ ID NO: 261028 - DNA, 100 bp, Homo sapiens
gaacagatgagaaacccggcaatgaaagaccagaggagcgagagcagcaagaaccacacccagcagcaatgtcagcggaagtggaaacctcagagggggt

SEQ ID NO: 261029 - DNA, 97 bp, Homo sapiens
ggaggccaagcacatcgctgaggattcagaccgcaaatatgaagaggtggaaccgtcccaaaatgtcccttgctcagaagaaggatcgggtagctca

SEQ ID NO: 261030 - DNA, 100 bp, Homo sapiens
tagggacctgtgttatatttgaagaaaatgttgaacatgaacctttcagctcttggggcattggtgagtctcagtaatgcacgtctcagttccatcaaaa

SEQ ID NO: 261031 - DNA, 74 bp, Homo sapiens
ccagccgagaggacgcggctgtgatatacgaagggtcatggaggacgctggcggcggcgaggagaccccggccc

SEQ ID NO: 261032 - DNA, 100 bp, Homo sapiens
gcagagctacgtggacgcaggaactccagttctgaagaaagtctccaaatacattcaagagcagaatgagaagatctatgctccacaaggcctcctcctg

SEQ ID NO: 261033 - DNA, 75 bp, Homo sapiens
cttccttgtgcagaaggagagtttatcttccttcggcttaatgttcttcgtgagtgggatgaagctctcttgact

SEQ ID NO: 261034 - DNA, 98 bp, Homo sapiens
ctaggaggaggactagatagtctggctccctgactggcagtcctcacctttccgagctgtctgtgaactcgcaggggggagtggcccctgccaacgtg

SEQ ID NO: 261035 - DNA, 50 bp, Homo sapiens
tctccttttccttggctaccccactcctgtaggaggcctgctgatggcat

SEQ ID NO: 261036 - DNA, 98 bp, Homo sapiens
gagatcttggaccagacactcgacctcctgagtttgatattaaactgctctcagaattttcctcttgcctagcagatcagcatttgtattttagtcca

SEQ ID NO: 261037 - DNA, 75 bp, Homo sapiens
tgggacgcctgccgcctgcggccgagggaagaaacccttttttcttggagccagcaataattatcacaattactg

SEQ ID NO: 261038 - DNA, 100 bp, Homo sapiens
ttcatggaaaccactgggaggacctgggctttcaggacttcatcacctgattcttccaatgagaattccgtagcaactcctcctccagaggaacaagggc

SEQ ID NO: 261039 - DNA, 80 bp, Homo sapiens
caagaatctgcaggacttggtccgcggcatccgtaaccacaaggaggacgagggagcatttcctgaagacgtagtcatgc

SEQ ID NO: 261040 - DNA, 100 bp, Homo sapiens
cttggagagaaactgatatttaatgaaaatgacttcgtagaagacatatctgaagagatggattaagaatgctttggattaaggattgtggagcacattt

SEQ ID NO: 261041 - DNA, 75 bp, Homo sapiens
tccggggaggtcacctgacgaggaggcagcacacttctgcttttgttccttcatcaggacgaatttactcttttg

SEQ ID NO: 261042 - DNA, 98 bp, Homo sapiens
gagctgggggggcgctcaagctgcgaggatccgggctgcccgcgagacgaggagcgggcgcccaggtgagccctattcccagaggcaggtggtgctga

SEQ ID NO: 261043 - DNA, 90 bp, Homo sapiens
aagacaacaccctgatctggcatggacattgaacacctacctcttcatgatgcaagcccaaggcattctgatccgggacaacgtgagaac

SEQ ID NO: 261044 - DNA, 95 bp, Homo sapiens
gcccctctatgcagtcatgtatcctgtgtttaatgagaactctcttgatagagcccaagcagccaagaataaaggcaataaatattttaaagcag

SEQ ID NO: 261045 - DNA, 104 bp, Homo sapiens
aaaactcttttgaaagttgtgggtcagctgaccaggcttgcattgatgacaatgttgatatggtgaagtttctggtagaaaatggagcaaatattaatcaacct

SEQ ID NO: 261046 - DNA, 75 bp, Homo sapiens
gggagccgcacgcggcgatatggaagaggagggcaagaagggcaagaagacaaatttacatgtattggagaccag

SEQ ID NO: 261047 - DNA, 90 bp, Homo sapiens
tatagacttccagctgaaggtttaaagctggatcatcattgaactaaaacacaaagcaagagaaaaaccttatgatagtaaaagtttgcg

SEQ ID NO: 261048 - DNA, 96 bp, Homo sapiens
gagagagcgagctgagtggttgtgtggtcgcgtctcggaaaccggtagcgcttgcagcatggagccgggtgtgggctgagccctgcctgattgatg

SEQ ID NO: 261049 - DNA, 100 bp, Homo sapiens
gctgatgtcagtgttatatcctccaggaatactggccagaatgtgaaggctgtgtctgagactcctgcagtgccaccagtttcagaagatgaggatgatg

SEQ ID NO: 261050 - DNA, 127 bp, Homo sapiens
ggccgtggacacctgtgtcagcatgtgggacctggttctctccatcgccttgtctgtggggtgcactgattgctggactcgctgaagagagactacgcaggaaagccccagccacccatcaaatcag

SEQ ID NO: 261051 - DNA, 100 bp, Homo sapiens
ggcggcgctgctgctcgggctgctcttggaggtgttgggctggatcttgatagcagttgttatcatcattcttctgatttttacatctgtcacccgatgc

SEQ ID NO: 261052 - DNA, 105 bp, Homo sapiens
tttgttgctgctgcacattaggttgcagtatgtggccagttatttgcctcagtaaaagagaaaccacccctactcctaatcccccgactacagaagaggagaaaa

SEQ ID NO: 261053 - DNA, 74 bp, Homo sapiens
gagggactaggtccaaacgctaggtggctgggtccagctagtgagacctgcaacgacttccacccgatgttctt

SEQ ID NO: 261054 - DNA, 100 bp, Homo sapiens
cacagttcccgttgggccatcagaggaagatcaaagatcaaccctcccccatgggctcctgcctgcctgccagacctgcgaccgcatcaagcagtccgcc

SEQ ID NO: 261055 - DNA, 74 bp, Homo sapiens
gagaaagtttcatctgtggatggagtattgagttacttccagagtcttcaagagtgccaactgggaccaggacc

SEQ ID NO: 261056 - DNA, 100 bp, Homo sapiens
acaggaagtggctgtgcgctagatgctgtcaccagagctcaactacagaacacctacactctgaaagcctttactgttggatctaaatgtgttgtgtggt

SEQ ID NO: 261057 - DNA, 75 bp, Homo sapiens
agaggcccgcccaccagttcgcccgtccccctgccccgttcacaatggcgaactttctgaccaagtatacaacta

SEQ ID NO: 261058 - DNA, 96 bp, Homo sapiens
cccgccctgtgggagaagcacagtccacaggtatcgtgatttccgatacccacctggacacccccaggagtataaacacaacatctactattggca

SEQ ID NO: 261059 - DNA, 83 bp, Homo sapiens
cgcggtttccccgccgcccacccggacgccgacgaaagccagcgagctcctcagcctcagctgtgggcctggcctcggcattg

SEQ ID NO: 261060 - DNA, 74 bp, Homo sapiens
aaacacctgcgcatggtcggcagccggagggtgaaggcccagagcgtccgagctgggccacagcctgaacgaga

SEQ ID NO: 261061 - DNA, 80 bp, Homo sapiens
tgataaaatccactcattgctggagtagatcccataatagatcacgttcaagacagaaagacagacgtagatctaagagc

SEQ ID NO: 261062 - DNA, 98 bp, Homo sapiens
gggagactggagtcgaaggccgtgaggtatttttctaagaaatacaggtatcaggatgaagatacacctcctcaagagcatatttccccacaaatcac

SEQ ID NO: 261063 - DNA, 101 bp, Homo sapiens
ccttgttgccgtcccttcgcctccttcaccgccgcagaccccttcaagttctagtcatggaatgaatctgaagtctgctgcagtaaaacacagaaggcttt

SEQ ID NO: 261064 - DNA, 75 bp, Homo sapiens
gtaatactggtgatagctgtggtcctgggtaccatgggccctgaaagcagcagatctcacctgcattggaggatg

SEQ ID NO: 261065 - DNA, 98 bp, Homo sapiens
ttccttcttcataatgcctgcaacagtagcagatgccactgctgttcgtaatgggtaaaatgaaaggcctggcatttattcaagatcctgatggctac

SEQ ID NO: 261066 - DNA, 83 bp, Homo sapiens
actgtggaaagtctggaccgagctcttggatgttcttggacttgacgaataccaagctgctattttacacttgaagagggagc

SEQ ID NO: 261067 - DNA, 97 bp, Homo sapiens
tcctgttccaccttcagagcgtcacggcgtacgccctcatggggaaaatctccccggtgactttcagggttttggccaaattgggcgagggcacaaa

SEQ ID NO: 261068 - DNA, 90 bp, Homo sapiens
gggactacttccacatggcctacaacgtcatcacgccctttctcttgctcaaggtctttggcaaagggaacacggcgttctggatcgtct

SEQ ID NO: 261069 - DNA, 76 bp, Homo sapiens
gtcctggatcagtttctttgtcatgtagccaagactggagaaacaatgtgctccatacttgcttgcagtgcctacg

SEQ ID NO: 261070 - DNA, 59 bp, Homo sapiens
gttgacaaggcactgctttttcatgacgcgtcgagggcgaggcccccagcagtgagact

SEQ ID NO: 261071 - DNA, 75 bp, Homo sapiens
ccggaggcggctcacctggcgggacagctgtccctacctggctcgcaagctgacccttgccatccccatcatcgc

SEQ ID NO: 261072 - DNA, 97 bp, Homo sapiens
tatactttggttacctatgtacctgttaccactttcaaaaactaccaaaaggaagcgtggctacattaaaaataagctggtttttaagaaaggcaag

SEQ ID NO: 261073 - DNA, 97 bp, Homo sapiens
ccctgtcccatcgcaaacccaaagatccccgttcctggagattctgattgaggtcatcatcagatttgaaatatttaaagtggatacaaaactattt

SEQ ID NO: 261074 - DNA, 100 bp, Homo sapiens
aggtgatacaatgatggggcagcaagtggccaaagatgacctgatcagagccatcaagaaactaaaggcacttggcactggcttcggcatcatccctgtg

SEQ ID NO: 261075 - DNA, 75 bp, Homo sapiens
ctggccgccccgagcggagcctggagagactctgacctgtttttgttggacacccgtgtagtatgggcctcagaa

SEQ ID NO: 261076 - DNA, 100 bp, Homo sapiens
ccggactctttggccatcctgtcagagatgggagaagtcacagacggaatgatggatacaaaggggagagaatgtagaagatgccttccttgaggctgcc

SEQ ID NO: 261077 - DNA, 101 bp, Homo sapiens
gtaccacctaatgcaacacatccaatgccagctacactgactaacagaaatggcgaaaagtcttttgaagacagcctctctgtctggaaggacaaaattgc

SEQ ID NO: 261078 - DNA, 119 bp, Homo sapiens
ggatgatcgagaggatctggtgtaccaggcgaagctggccgagcaggctgagcgatacgacggccgggtgctcgtccactgccgggaaggttatagccgctccccaacgctagttatcg

SEQ ID NO: 261079 - DNA, 71 bp, Homo sapiens
gaaggccctcaatgataaatttgcctccctaattggcaaggtggcgacctgcacatgacccagtttttccg

SEQ ID NO: 261080 - DNA, 89 bp, Homo sapiens
gagtggtctaaggcgccagactcaagttaattggccttggtcctcacagctccaaaaagaaacaggatctcgataagctctatgagctg

SEQ ID NO: 261081 - DNA, 100 bp, Homo sapiens
caaggcgaaggtgtgtggattctccgcagcccgtcggtcaggacggaagctcctgttttcttgtcagccgccagctgagggccattcgcagcttctccag

SEQ ID NO: 261082 - DNA, 99 bp, Homo sapiens
ccctcgagaatccctgcagttgatcaagagactgggaaatgggcagtttggggaagtatggatgggtaccccaatctgaagtcagtaaatgaactaatc

SEQ ID NO: 261083 - DNA, 75 bp, Homo sapiens
tagaatctctggaattgtgcatggtgaccatcgggatgaggaggaagagacccacatgaagaagtcagagtcgga

SEQ ID NO: 261084 - DNA, 100 bp, Homo sapiens
atgttgtttatgtcattgactcctgcaaccgagattcgggccctccaccctctacagtgagtgaagccgaatttgaagatatcatgaagcgaaacagagc

SEQ ID NO: 261085 - DNA, 100 bp, Homo sapiens
ggagagccgagcagccccggctctgggctacggactatgggcgaatagctctgaccacccggcgaagggggagctgatcaccttctattactattggaag

SEQ ID NO: 261086 - DNA, 98 bp, Homo sapiens
gttttgaagagaaggggaataagactgcatctgttcatatgaggaatcctttgtgcattgaagactttagattcctctctgcggtagacgtgcactta

SEQ ID NO: 261087 - DNA, 123 bp, Homo sapiens
ctggaagcccgggaccgtgtgggaggcaggacttacactcttaggagatgtgaagatgtttggcttggtatgccatcacctattcctgcgaaatacattgactactggacctttttgaaggac

SEQ ID NO: 261088 - DNA, 87 bp, Homo sapiens
ggagctcctggtcgatgaagaggatgatgtttttggtgaagggattaaagcctgtggtttccacagaagcaccacctatcatatttg

SEQ ID NO: 261089 - DNA, 75 bp, Homo sapiens
ctgaaatccatcttcatcctaccgctccgcccctggattatcaccgaggcctcttggtggaccgtccctctgaaa

SEQ ID NO: 261090 - DNA, 93 bp, Homo sapiens
cacgaagttctcgcgagagtcgtctcctcgataccaaacaatgcagatcttcgtgaagactctgactggtaagaccatcaccctcgaggttga

SEQ ID NO: 261091 - DNA, 75 bp, Homo sapiens
tgggtccagccccttacttaaagacaacagcagttctgtagagagtttaaatatgaaggaatggcaggacgggct

SEQ ID NO: 261092 - DNA, 140 bp, Homo sapiens
cgaaaacgcagaattgagcaggatatgttagaaaagaggaaaatacagcgtgaattagcaaaaagggctgaacaggtctctgctgctgatgaagctgtgaccaaacgcacccaacccttggcagccatctgtccctgcag

SEQ ID NO: 261093 - DNA, 82 bp, Homo sapiens
cgctagtcagggctcagcagtgccccagcatggggcagagcctctcggtgccagccaggcatgttatttgaaagcaattgag

SEQ ID NO: 261094 - DNA, 98 bp, Homo sapiens
gtcagtagcctctcactgaatgagcctgaagacaaggatgtgactgacgggggcaccgccctgttggctgccagtcagtacgggcacatgcaggtggt

SEQ ID NO: 261095 - DNA, 90 bp, Homo sapiens
ctggcggtggaggccacagaccagcatttcatcgcccagcctggggtccaggcatttgtctggccttcccttttactgctggctgggaag

SEQ ID NO: 261096 - DNA, 50 bp, Homo sapiens
tgtcaccgttatgtgggaagcgaatccacactgtgacttctgccgtgttc

SEQ ID NO: 261097 - DNA, 90 bp, Homo sapiens
caagtattgctgtgggtgctgggacttcccgtccgcggcgtggaggttccaagagcctctgagttcctgccttttttcatctctgaatcc

SEQ ID NO: 261098 - DNA, 101 bp, Homo sapiens
actttctttgtttatgtcagtaatttcacctggcccatcaaaattcaggttcttgggtgtctctggggagtccctgggccagaccttcctccagactccag

SEQ ID NO: 261099 - DNA, 75 bp, Homo sapiens
cggctggccgggcccaggtcccttcctccgctggagcattggatttgctaaaggagcttaagaatattcctatga

SEQ ID NO: 261100 - DNA, 100 bp, Homo sapiens
gatagaaaggcaggagcagcttctggatgaaatacatcgtgagaagagagctctctgatccttctgacttaccaaggaatgccttcagaatttttaccat

SEQ ID NO: 261101 - DNA, 98 bp, Homo sapiens
aaagaaagaaagaaaacgagcgcgagagggggaaaagcgagcgatcgagcgagcgcgcgcgcgaaaactccgggcagagacgaggtctcactgtgttg

SEQ ID NO: 261102 - DNA, 75 bp, Homo sapiens
ggactaccttatgatttcctggctggttgatatgtgaagagccaacctgtcgcaatcgaactcgtcaccttcccc

SEQ ID NO: 261103 - DNA, 80 bp, Homo sapiens
aggcattcagccccactactgtcaacactggccgagattgtgttcacctattgaaaattaaaaagacattttgtttatgt

SEQ ID NO: 261104 - DNA, 58 bp, Homo sapiens
gggaaggaaaaacctgtatgtggaaccacctatatcaatgatgtcaaacggctgaaac

SEQ ID NO: 261105 - DNA, 100 bp, Homo sapiens
atgtgaaggtttcctggagaaaaacagagacaccgtctatgacatgctggttgaaatcctgagagcaagcaagctttggacatcagacagtgcaggagaa

SEQ ID NO: 261106 - DNA, 101 bp, Homo sapiens
tttcactctgttcaagagacatgcactgaacttctgaagataatcgagaaataccagctaagactcaatgggtgttttgaatgctgtatcaaatgcctggg

SEQ ID NO: 261107 - DNA, 83 bp, Homo sapiens
gaaagacagcaacctgctcctggaggacgtcacctggaagtacacaggtaacacaagtggcaagacagccgggaacccctacc

SEQ ID NO: 261108 - DNA, 73 bp, Homo sapiens
aagaagggaaggcgcgagtgaggaaaggaggtactgtagacagtctccattctggagcagcggttgacactga

SEQ ID NO: 261109 - DNA, 80 bp, Homo sapiens
atttggctttgcctttctggacacagaagtatttgtgacagaactattatggagctgctaagatgatattttctgacaac

SEQ ID NO: 261110 - DNA, 73 bp, Homo sapiens
atgacccttacattgcagacctccttcaagtggctgataacagagattccagacattctaaatgcaagtaatc

SEQ ID NO: 261111 - DNA, 83 bp, Homo sapiens
ccgggaccggccgaaaggcgaggaaccgcgggagatacagatgacccaccaagaattactcagaaccctgtgatcaatgggaa

SEQ ID NO: 261112 - DNA, 75 bp, Homo sapiens
agataaatcacgagaggaagcttaaatctgtcgtttgaatttaggaccacctcgctgcggttggatttctcacga

SEQ ID NO: 261113 - DNA, 76 bp, Homo sapiens
gcacattcttgctacctccagtcaagacaattctgtgaagagatgtggtatggtgtattcctgtgggcactggtgt

SEQ ID NO: 261114 - DNA, 82 bp, Homo sapiens
ggcgagcgcgagcggcgcgagaaaggacatctctacaccgttcccatccgggaacagggcaacatctacaagcccaacaaca

SEQ ID NO: 261115 - DNA, 100 bp, Homo sapiens
ccgaaatccttcctgtaccgcttatgccaggccgatcccgacctggactcagacaagatcgccggggagtggcctgtacagcaacctccagcagtacgat

SEQ ID NO: 261116 - DNA, 74 bp, Homo sapiens
tatttctttgaaattctacaaggaacttcaggcacatggtgctgatgaggtggtggacataatgcgagttaacg

SEQ ID NO: 261117 - DNA, 76 bp, Homo sapiens
ggccccaggagccaataacctgcagaattatatccagatcgagagacagaagattctgaaagggttcaatgaaatg

SEQ ID NO: 261118 - DNA, 100 bp, Homo sapiens
tttttcattgttccactggacgctcatcagagggaagatctttttcctcaattggtagttagaaacaaacctgtggcaaggcaggctcctggcaaacgga

SEQ ID NO: 261119 - DNA, 100 bp, Homo sapiens
tgacgcagtaagaaggccatcagtagatgccagtccctcaaccttgaactttccagacgcagaactacatacaatctttgccagcaacacttcctccttg

SEQ ID NO: 261120 - DNA, 73 bp, Homo sapiens
tgggccgctgcttgcattcttatttagaggcattttatttaatgggagaatgaaaccagtgtcttgaaagacc

SEQ ID NO: 261121 - DNA, 75 bp, Homo sapiens
gaaatttgtgctcaaaacccccaagatattactgcaatgtctgtgactgtgtggtgaaggactccatcaactttc

SEQ ID NO: 261122 - DNA, 74 bp, Homo sapiens
gaagccccctgcaggaactctacaacccaatccaggtctctgacccctcccaaggatcatgccgcagccccact

SEQ ID NO: 261123 - DNA, 82 bp, Homo sapiens
aagaagtggtttatcaaaatcacgttataatcagattttgaccaagcattttgtaaggagtccaatgtgctgattgctgcta

SEQ ID NO: 261124 - DNA, 74 bp, Homo sapiens
agtgctgggattataggcgtgagccaccgtgcctggctgaagttctgggaggtgatcagtgatgaacatggcat

SEQ ID NO: 261125 - DNA, 82 bp, Homo sapiens
agacagcagtacagacagctcaggctgcccagatggtggctcccggagtccagtgcctccggagccagcgtggtggccatag

SEQ ID NO: 261126 - DNA, 100 bp, Homo sapiens
gaggcgaagacaagagagctcattggactctagtatgggattcctttctacctacaatacctcgcccactggccagagtatttcattgttgcagaggcac

SEQ ID NO: 261127 - DNA, 75 bp, Homo sapiens
ccgaccaatcctcacgattgagtgtcaaagaagatatggaatgtgcagatgtcccactattaactccaagcagca

SEQ ID NO: 261128 - DNA, 118 bp, Homo sapiens
agctctggagtcccaactcatgaaatttagagttcaagcaagcaagatacgagagcttttagcagagaagattatgtctactttgagaattcctccagcaacccatacctaataagaa

SEQ ID NO: 261129 - DNA, 50 bp, Homo sapiens
acatagttttccaccctaaagaggaggctgaacagtacccagggggagat

SEQ ID NO: 261130 - DNA, 95 bp, Homo sapiens
agatgccaaccttcccgccagactacggcttccccgaacgcaaggagcgcggaacttgatgggaaacctgcttctcctactccggttattgtggc

SEQ ID NO: 261131 - DNA, 98 bp, Homo sapiens
agctgggcctaggtctgcgccctggaagagagaagggcacagttacctaagtatcaacgtaatcttcctcggccaggacaggcccccatcggtaatcc

SEQ ID NO: 261132 - DNA, 74 bp, Homo sapiens
gcagtggtcgcttcttctccttgcctggcaggagatcgcagatgctgcggatgcttctgagccccggtggtgtg

SEQ ID NO: 261133 - DNA, 97 bp, Homo sapiens
tcctggccgcgccgcctcctgctcagatacctgttcccggccctcctgcttcacggtgtcatggagaaactccagctgggcccagagattctgcagc

SEQ ID NO: 261134 - DNA, 99 bp, Homo sapiens
ttacacccgaggtccctctttggggtggctctttgctaagtgctgctgttgcttcccgtgtagaggctgctctttggcgtaaattgcaatcgattaggg

SEQ ID NO: 261135 - DNA, 101 bp, Homo sapiens
gcttggttaaaacctgacacttttaacaggtggtttggctttgaatgacagcaagaactctgtctttaatggcttcattggtagcgtatgatgattcggac

SEQ ID NO: 261136 - DNA, 110 bp, Homo sapiens
tagtgtctgccttctggagagctgaccaaacactaagggaagtcacacttcttttctaaggtcacatgaggacttggcatctgactctgaagactgtcttgcctgcatcg

SEQ ID NO: 261137 - DNA, 83 bp, Homo sapiens
gttccatccggcgctcagctgggcttgagggcgaactttctgaccaagtatacaactacccagagggcctaggagaagtgctg

SEQ ID NO: 261138 - DNA, 100 bp, Homo sapiens
ccgaacgatgtgcgagaactgcgcagacctggtggaggtgttaaatgaaaatggcagaaacggtggacacaagcgaaatggtcaacggcgctacagaaca

SEQ ID NO: 261139 - DNA, 104 bp, Homo sapiens
aaagaagtccaagaagcaaaaaagggactgctaagaagataccaccagggctggtggacgaagccattgataccaaatctctgttggatgcttcagaagaagca

SEQ ID NO: 261140 - DNA, 100 bp, Homo sapiens
gtcaagagtttttctaatatgggcagtaacacatagcgtcaaagaggataccggtgaatgtacagataatgcatacatcgatattcagctacgaattgct

SEQ ID NO: 261141 - DNA, 101 bp, Homo sapiens
gccaagccgaaccgagccggggcgccgggagctattgggacctgcggggaccgcagatgttcatggactgcagcccacaggccctgcccatcgcatcagag

SEQ ID NO: 261142 - DNA, 100 bp, Homo sapiens
tctgaaagactgttttcttggaaaggcattaaggatatagctagtgcaataaaagaacttcttgatacagtgaataatgtcttcaagaaatatcaatacc

SEQ ID NO: 261143 - DNA, 82 bp, Homo sapiens
gccagcatgccccagtccaaaggtgcctcaggaaccctgaagctgggctgagccatgatgctgctgccagaacccctgcaga

SEQ ID NO: 261144 - DNA, 100 bp, Homo sapiens
cgccgccaacgcgcaggtgctagcggccccttcgccctgcagtgggcctttggagtgacgctgtgggaactcatgactctgggccagactccctacgtgg

SEQ ID NO: 261145 - DNA, 51 bp, Homo sapiens
caggccgccgctcaggaatgaattcagaattacctccgagttgcatttcag

SEQ ID NO: 261146 - DNA, 97 bp, Homo sapiens
cttttgtagatcaacctaagcaggtacgacaacaattccacgatgccaaattcatggcagacattgatctggatccaggctgtacattgaataaaaa

SEQ ID NO: 261147 - DNA, 75 bp, Homo sapiens
gacttcactacttttaagcaaaagaaacccttaggagaaatcttgagagtggacagcaattgtgaagatcgccag

SEQ ID NO: 261148 - DNA, 83 bp, Homo sapiens
ccttgatacagtctagacggggaaagacatggaccctagaactcaggtatcttggagatggccgcttccatctggagtctgtc

SEQ ID NO: 261149 - DNA, 100 bp, Homo sapiens
gagccccgcagccgacccctgccggccggtgtccccaccgccatccctgacccatggcgctgaagaggattcagaaagtcacagtcaaagtgcctcagaa

SEQ ID NO: 261150 - DNA, 90 bp, Homo sapiens
caaatggatttggtattggaagaatgaatctggcacatggattcagtatggagaagagagatgtggtatggtgtattcctgtgggcactg

SEQ ID NO: 261151 - DNA, 100 bp, Homo sapiens
gaagtgtggctcagaggtgaccactccggagaacagttcctccccagggatgatggacatgcatggttcttttagagcaagatatatttcatcgttcctt

SEQ ID NO: 261152 - DNA, 75 bp, Homo sapiens
gggatgaacctcgagttgctggacaggggcaagtgtccgagtggtgaatcagctacttacagagatggatggtct

SEQ ID NO: 261153 - DNA, 97 bp, Homo sapiens
ggtgtcagaaatgaggtcataccggatgtctatggtacagacagagggtgtgtccgcagccggccaggtggtatccctgaaggtgtggctgattgac

SEQ ID NO: 261154 - DNA, 100 bp, Homo sapiens
cagagcttgacccaggcactaatgttgggggaaaggttatccacctggtggaacgggctcctcctcagactcacctcccttctggggcatcttctgggac

SEQ ID NO: 261155 - DNA, 75 bp, Homo sapiens
ccagggccaccatgtctgcctcctggtgaaaaaggccataaaattttgagtagaaaaatccagaaatttgaaaat

SEQ ID NO: 261156 - DNA, 50 bp, Homo sapiens
tcagccggagaagcgagtttcagctggacacaatgtttgcacgaggactg

SEQ ID NO: 261157 - DNA, 100 bp, Homo sapiens
gcggtggaggtctgcgttgctcttgcttttcctcgctggggtgtacggcatttggctttatgtcccgagttgccctacaagcagagaagatgaatcatca

SEQ ID NO: 261158 - DNA, 90 bp, Homo sapiens
tcctcgaatttcagcgtaaactgcagcatgatgttctgaagcttgagaaccctgccatcagcatcactgaaaacgtgctgcatttcaaag

SEQ ID NO: 261159 - DNA, 100 bp, Homo sapiens
ccggctttggggtcaagcagattgtgccagaacagataaagcccagtgtaagccagcctcagcctgccaactctaataacggcacttccacagcaaccag

SEQ ID NO: 261160 - DNA, 100 bp, Homo sapiens
cgagaacgccgtggagaaggtgaacatcaagccgcagttttaatcgcctggacctgccaccatacaagagctatgagcaactgaaggaaaagctgttgtt

SEQ ID NO: 261161 - DNA, 50 bp, Homo sapiens
atttttgccctcaaaagaaatggcaggtactccaaagattcaggtttact

SEQ ID NO: 261162 - DNA, 83 bp, Homo sapiens
ccaggaccccgagcggcaggagtctctggaccggtgccagaaccctgtggagcatcatgaactgggaagagtagctgagcccc

SEQ ID NO: 261163 - DNA, 83 bp, Homo sapiens
cctggaccttggacattcagacttcagaatgattgccaagcatgcccacggacatggaacacacaggacattacctacatctt

SEQ ID NO: 261164 - DNA, 83 bp, Homo sapiens
cggaggagcagctcacctgagagacggagccccggctcgcccgtgtgcagaggggtcgggccccggctcagtggtcccaggca

SEQ ID NO: 261165 - DNA, 50 bp, Homo sapiens
cagcccagacgtttattcagaggtctctcaggcagctgcagagcttcaac

SEQ ID NO: 261166 - DNA, 50 bp, Homo sapiens
gacaaagttgaaaacaaagtgctggaccagtcctgcctctgttgtagaag

SEQ ID NO: 261167 - DNA, 100 bp, Homo sapiens
ccgattggttatattaatactcctggacctgtgtgtcagttaatgtggtctcccatgtctcatatgtcatttgtcagagtgaaccgctgtggtccccgag

SEQ ID NO: 261168 - DNA, 50 bp, Homo sapiens
gagaggggcagttttggagccatgatccggaacatggtggcggtgctgga

SEQ ID NO: 261169 - DNA, 73 bp, Homo sapiens
agctttatgaaacagcttgcttcctacaggggaaactgactctactctgtgatgccaagacagatgggagttt

SEQ ID NO: 261170 - DNA, 131 bp, Homo sapiens
ttcaggaattttactgggataattatccaaataaattgcaagcattctatccaaatggcaattaagttggaatatgcaaggttggttaagttggcccaagaagacaccccaccagaaaccgattatcgttt

SEQ ID NO: 261171 - DNA, 82 bp, Homo sapiens
gctacagctgatgacctcattgatgtggtggaaggaaacagcctccatccctgtgagatcactgccctgagccaatccctac

SEQ ID NO: 261172 - DNA, 100 bp, Homo sapiens
gagcctcgtggctgcgtcaccgccgcccccccagacaagatggacaccgcggaggaaggaattgaatgatctggcacgggaccctccagcacagtgttca

SEQ ID NO: 261173 - DNA, 106 bp, Homo sapiens
caaggctcgggaactcatcagccgcatcaaacagagtgaactttctgccaagatgcgaggtgctgatactcaaagaaggtttaagttgtctgatctctctataaat

SEQ ID NO: 261174 - DNA, 100 bp, Homo sapiens
aaattgtagacaaaaccataataaatgcagataaggatggagatggaagaatatcctttgaagaattctgtgctatgacggtcgaaccaaacccattcca

SEQ ID NO: 261175 - DNA, 51 bp, Homo sapiens
aagatggtgaagcagatcgagagcaagagtaaccagagagcacagagaaat

SEQ ID NO: 261176 - DNA, 100 bp, Homo sapiens
cgggaggccgggctggcacatcgagtgctctgccatcgctaggatgaaggtttaaggctcagaaaggtagcacattcggataaacctggatcaacctcaa

SEQ ID NO: 261177 - DNA, 90 bp, Homo sapiens
gttttatcctagaggataaaggaaatctttgggaaagtcagtattttatatagcaaaaaaatatgtcgtaactgcaagtgtggccaagaa

SEQ ID NO: 261178 - DNA, 74 bp, Homo sapiens
tggaggaggctcttcagtctccatggattccactgcaatgagctggtggaggaataatttctggatcatcttag

SEQ ID NO: 261179 - DNA, 100 bp, Homo sapiens
gggccagtcggcgccctcgctcaccgccagcctgatcggggctgctagtcgcatacccggagtaacacctgccgccatcatcaatctgctgagatttgtg

SEQ ID NO: 261180 - DNA, 101 bp, Homo sapiens
atcattactaacaggatattcctcatgacattgctgtctgaaagatgaggtctatcttaatctggtgctggactatgttccggaaacagtatacagagttg

SEQ ID NO: 261181 - DNA, 75 bp, Homo sapiens
aattcaacaaatataagtatacagcatctgtcctcatagcagaactgataaatttcaaacggaagagagtggcag

SEQ ID NO: 261182 - DNA, 75 bp, Homo sapiens
gcccggggtgtctcgcgcacgggccctcaggaaggatcccaggatgctggtatcctgcatagatttcaggtacat

SEQ ID NO: 261183 - DNA, 100 bp, Homo sapiens
cgacccggacaccgacgcgctcatctgctggagcccggtatcgagaaccttccctgcgaacttcagaggaacttccagctgatgcgagagctggaccaga

SEQ ID NO: 261184 - DNA, 83 bp, Homo sapiens
ccctggtgggcacggcgtgcaaggagccttcacgtaaatgggtccagtcatgcctcccagtaagaagccagaaagctcaggaa

SEQ ID NO: 261185 - DNA, 100 bp, Homo sapiens
ggaaattcaggaaacatccaagaaaattgctgtcaaagccattgaagactctgatatgttacaggaggttttgacacaagggcgcatatcttcaaagcac

SEQ ID NO: 261186 - DNA, 51 bp, Homo sapiens
ggattccaagtaactcttatttggaggtgcttcccaaggaccgtagatgcc

SEQ ID NO: 261187 - DNA, 82 bp, Homo sapiens
gtttctcttctgcagaaaaagaggctcttcctcctcctcccgcgacgagcatcctggccagaacaagccaaggagccaagac

SEQ ID NO: 261188 - DNA, 82 bp, Homo sapiens
ccagcatgtcaataaggggtcataggtggaaaagacatggaaggaaaatcacctcggcagtgtttgaaggaaggatactgca

SEQ ID NO: 261189 - DNA, 100 bp, Homo sapiens
ctcacggccacggcgctggtcaccggggtctgcctggagtgctgcagccgcccccagccccgttatggggagtatggccccaggtgacacaatggccgca

SEQ ID NO: 261190 - DNA, 83 bp, Homo sapiens
gctgcagagaccccgctatggctgttttaaaatcaaagatgggaaaatcggagaaaattgcccttccccatggccagcttgtt

SEQ ID NO: 261191 - DNA, 97 bp, Homo sapiens
ccagccccagcagtcctcgcagtcccagagtcagacccttggtctccaagcaatgcagccccagcagcccttggttcatgcagcatcccaagaactt

SEQ ID NO: 261192 - DNA, 100 bp, Homo sapiens
cgccgctgctacctgcagcgccgtgtggcacgacacaaaaatcagcagtcctttgagaaacaaggttttcattccggtactcctgctgcttccttcaact

SEQ ID NO: 261193 - DNA, 100 bp, Homo sapiens
ccgggagggggccctgagcctcctgcaacacctgcggcctcactgggacccccaggaggtgaccctgcagccttctcttggagtcaagaagcctaccaaa

SEQ ID NO: 261194 - DNA, 75 bp, Homo sapiens
gcagagagagagagaagagaggagattgcagcagcgaaccaatcccaagggccagatattcgaagcttacaacat

SEQ ID NO: 261195 - DNA, 125 bp, Homo sapiens
acaggagggaaggaagtggtaacccaactccattaataaaccccttggctggaagagctccttatggtgcagggcgccgcgcacttcgggccggtgtggctagccagctttgggacagtgcgcac

SEQ ID NO: 261196 - DNA, 98 bp, Homo sapiens
aaggcagatcgcttgttccacaccagctaccactcccaggcagtgcatatccgccctgtttgcagagactggagtccagagttgccaccagatgggat

SEQ ID NO: 261197 - DNA, 50 bp, Homo sapiens
tttgttcaggaaccaccagtgacagattgactaagataacacgcacaggt

SEQ ID NO: 261198 - DNA, 100 bp, Homo sapiens
tcctggagccgcccccgggacgtcagtcctggaggaggcgagggacctgggccttgagaggaccctccttcctgatatcctctacagagatgtggccttc

SEQ ID NO: 261199 - DNA, 98 bp, Homo sapiens
aatgcattgaacaactacaatgctgaagtatgggcatatctggctctggtctgcctgaaacacatagattttcctataccatgtccacttagaatgtt

SEQ ID NO: 261200 - DNA, 100 bp, Homo sapiens
ctttggtttgatgaattaattggcctttgggtttcagtgcaaaatctcccacaatgggagggggtttgaactgcactggtccactgatagacaaagtttc

SEQ ID NO: 261201 - DNA, 83 bp, Homo sapiens
ataagctatatactttggttacctatgtacctgttaccactttcaaaatgtcgacttcttccactacaaaatctccagcgtcc

SEQ ID NO: 261202 - DNA, 100 bp, Homo sapiens
ggccactgggcgcagcacccaggaggccccgtgtgggccgcggcccggccctcaccatggagtccatgttcgaggacgacatcagcatcctgacgcagga

SEQ ID NO: 261203 - DNA, 100 bp, Homo sapiens
ggacctggatatggcaaccagggtgggggctacggaggtggttatgacaactatggaggaggcggtcaggctgctgaggaaacaccacaggctgaacggg

SEQ ID NO: 261204 - DNA, 100 bp, Homo sapiens
aggacgaggagtgcggccgggtccgggacttcgtcgccaagctggccaacaacacgcaccagaaccaagatccaattccctggagaatttttaacccctc

SEQ ID NO: 261205 - DNA, 74 bp, Homo sapiens
caaagacttcaatcactacaaaatggaactacagatcaacattcagaataccagcatctcagacatgtcgaaaa

SEQ ID NO: 261206 - DNA, 100 bp, Homo sapiens
tttttcaccattcttccaccctggaaactctatacacacacagccggaggtcatactgcatcagaaccatgaagaaggaatacggttggacagaatgaac

SEQ ID NO: 261207 - DNA, 75 bp, Homo sapiens
tggccacagaagttgctgctgacgctctgggtgaagaatggaaggtctttgagagctggatgcaccattggctcc

SEQ ID NO: 261208 - DNA, 82 bp, Homo sapiens
atgcagtgcgcatggacgaggctcgggataacgcctgcaacgacatggacaatgcagatcttcgtgaagactctgactggta

SEQ ID NO: 261209 - DNA, 90 bp, Homo sapiens
cacccacatacaggagacaccaaagaagagaaagacaaggatgaccaggaatgggaaagccccagagatggggtctcactctgttgccca

SEQ ID NO: 261210 - DNA, 90 bp, Homo sapiens
agaagaggaagaagaccaaggcccaccatgccccaggcccaaatattgagaaatcagtgaaggatttgcaacgctgcaccgtttctctaa

SEQ ID NO: 261211 - DNA, 82 bp, Homo sapiens
ggaagaactcgtcatgctctttgtagcgtggtgcttctgttgctcacagctgctactgtttgaacggtcttggatgaacaga

SEQ ID NO: 261212 - DNA, 82 bp, Homo sapiens
cgctcgatcttgggacccaccgctgccctcagctccgagtccagggcgagcgtgagtgcatctccatccacgttggccaggc

SEQ ID NO: 261213 - DNA, 101 bp, Homo sapiens
gcatgttgggcgccccggacgagagctccgtgcgggtggctgtcaggtgctgacagctgcagaagaaattgtacatggtgctgtacagaaggtatttctcc

SEQ ID NO: 261214 - DNA, 100 bp, Homo sapiens
cttgaaacaaaaggagaccctaatcttcagagtgtgaacatggctacgcctcttcattcccgtccatgccgagcccccgactgcagcattcaaagccccc

SEQ ID NO: 261215 - DNA, 75 bp, Homo sapiens
gcgcctcggcagccctgacgccacgaggaaggattgctgtggaaactgcagcgacagcgaggaagagctccccac

SEQ ID NO: 261216 - DNA, 90 bp, Homo sapiens
gtttctttcttaaaggactgatttttagaactccacatttgaggtgtgtgtctggggaagagacttacagaagtggagttgctgagtcaa

SEQ ID NO: 261217 - DNA, 101 bp, Homo sapiens
ctctctctctctccctctccctctcctgccagccaagtgaagacatgcttacttccccttcaccttccttcatgatgctttggtgcaattcccatcgacca

SEQ ID NO: 261218 - DNA, 82 bp, Homo sapiens
atgtgctgaagactcgcctgatgaactccaagggggagtatcagagatgccctgtatccaagcccaatatgggacaccagca

SEQ ID NO: 261219 - DNA, 100 bp, Homo sapiens
tgcaggaggaggaggaagaagagaagctggacgctctgcaggggatcctctctgctttcctgcatccattcatatattcattcagtcagctaatttttaa

SEQ ID NO: 261220 - DNA, 75 bp, Homo sapiens
ccagaattcatacaaagagtcttctgcagaaagccgtcattacacctgattttgaaaaaaaccactgtgttccac

SEQ ID NO: 261221 - DNA, 100 bp, Homo sapiens
ctgttaccctggaagttcttcatcaggtaatggaactgctggtccatctgaataaacgtataaaaagccgccccaaaatacaacttccagtagagacact

SEQ ID NO: 261222 - DNA, 73 bp, Homo sapiens
gacactctgccaccttctccagcattgtgaaagatgctgagatgaatcgtcacctgtgtgtttggctttttag

SEQ ID NO: 261223 - DNA, 83 bp, Homo sapiens
gatagagacatatggaccacatgttcctgagcttgagatgctaggaagacttggaatgccgggtctaagttgtagattttatc

SEQ ID NO: 261224 - DNA, 103 bp, Homo sapiens
ccccctccccggctgccgccgccgccgcctcggccgaccagggacctgcccgcctgcggctgctccggatatttggagttcttacaacatggcagacattgac

SEQ ID NO: 261225 - DNA, 75 bp, Homo sapiens
agcagcccaccagggagctcctgcagacacagcaggatgccaatgcctcttccctcttagacatctatagcttct

SEQ ID NO: 261226 - DNA, 89 bp, Homo sapiens
ctgctgggaataaaatatgctttggcagtccgtcagtgagagggtccaagcctggtaagaatgtccagcttcaggagaatgaaatcaga

SEQ ID NO: 261227 - DNA, 100 bp, Homo sapiens
gtgtgaccaaaagtgccatttgttaaaggtttctgctttgggacaaccatacatctaattccttaaagtagttttatatgtaaaacttgcaaagaatcag

SEQ ID NO: 261228 - DNA, 80 bp, Homo sapiens
agagcttggttaacttgggagaaagtttcatctgtggatggagtattgtaccacagcagcctggcttcactgaatgggct

SEQ ID NO: 261229 - DNA, 51 bp, Homo sapiens
cctgaacgggaaggagatctccgcgatgtacagttacccagcacgtgtacc

SEQ ID NO: 261230 - DNA, 87 bp, Homo sapiens
tgctaatccagtatttgcggatagctccaaactgggatatgttgaagatgacagcgatgcagagacctatggagaagagaatgatga

SEQ ID NO: 261231 - DNA, 50 bp, Homo sapiens
ccccgaggaggggaccatgacacattgatattcactgatggactccaaag

SEQ ID NO: 261232 - DNA, 75 bp, Homo sapiens
ctcagttggaagcagccgatccagcctgcggagcctgtggggcagctctgcttatgataatgtcaacaaagttcg

SEQ ID NO: 261233 - DNA, 100 bp, Homo sapiens
gcgcgaatatcgtcatcgttagaagcatggcgaggacaacatccttgctgcctccagctggcgggcgaccacagctactgcctgctctgcgctactgagc

SEQ ID NO: 261234 - DNA, 95 bp, Homo sapiens
tccggcgcgcggcgtcctcctcccgctcggaaggaaggaagcagccaccctcgccatggcctccccgcccgcctgcccctcggaggaggacgaga

SEQ ID NO: 261235 - DNA, 82 bp, Homo sapiens
gccgcgcggcgcggacggcgcaagtcggccagagcagcatgtggatctccactgatgccgccgcctcggtgctggagcctct

SEQ ID NO: 261236 - DNA, 100 bp, Homo sapiens
gagccagggaaccaggggtccgggctagagctggagtcgtgagcgcgcgcccgccccgctctgggaggaccgcgagaagtcacctgcaccggtgcccgtg

SEQ ID NO: 261237 - DNA, 108 bp, Homo sapiens
cagacacgggtgaatgctgctaaaaacaagactggggctgctcccatcattgatgtggtgcgatcggtacggttcctggagcagcagaacaagatgctggagaccaag

SEQ ID NO: 261238 - DNA, 100 bp, Homo sapiens
gtggcctggagcacggagaaccattaatcatctctaaggtatttatgagcctccatttcttatactactgcagtgaaccaacattggatgtgaaaattgc

SEQ ID NO: 261239 - DNA, 100 bp, Homo sapiens
cagcgtggcatgagccaggagcccgggccgaggcacttccgttccggcgcccctccggtcatcaacccgctgggcaccagcttcccggacgacaccgcgg

SEQ ID NO: 261240 - DNA, 98 bp, Homo sapiens
ggcaagctgtgcgacgtgaccctcaaggatgtagtaactggagttagtcccctgctcttcaggaaactcagtaatcctgacatattttcatccactgg

SEQ ID NO: 261241 - DNA, 90 bp, Homo sapiens
gctgggattgttgcggtgcgctggagccggttaacacagaaatctgcctcctgggccatgccgcttctaaggcctgtttcttctcatgag

SEQ ID NO: 261242 - DNA, 88 bp, Homo sapiens
aagaaccgcgcgggaagccccagcccgcagccctcgggggtgagaagccctaccactgcaactgggacggctgcggctggaagtttgc

SEQ ID NO: 261243 - DNA, 96 bp, Homo sapiens
ggctcgtcgcagtttcgcagccagggcagccaggcagagctgcacccgctgccccagctcaaaggtgtctgcttttggggcagagttttcatcgga

SEQ ID NO: 261244 - DNA, 50 bp, Homo sapiens
ccttcctggtgctgcccctgggcaagggtctcttctggggtctacgagcc

SEQ ID NO: 261245 - DNA, 100 bp, Homo sapiens
cagacttggatgaagagctggtcattaagggatccatcctacagaacctcgatgacttacgagccctcaaggggaagcattttctcctggaccccttgat

SEQ ID NO: 261246 - DNA, 100 bp, Homo sapiens
tgtgttcttctctggactccttagatgactctgtggtgggtccctcagcccttctgagctctgtgctgaacaaggtgatattgaggcatggagtgacaca

SEQ ID NO: 261247 - DNA, 75 bp, Homo sapiens
tcgtgtggcaggaaacagaagatgagttttgccgaattgacaagcccctgtgtcacagtgaggatgagaaactca

SEQ ID NO: 261248 - DNA, 99 bp, Homo sapiens
gccaagatcggtgagattgccactgggtcccccgtgtcaactgaactggcatcaaagctaagccagaagatttatcacattttcatcatcagctacagg

SEQ ID NO: 261249 - DNA, 100 bp, Homo sapiens
gtttagcttcagggatcatcctgggctctctctttgaaatctgcttgggccagtatgatgatggtacctatggagttgtgtataagggtagacacaaaac

SEQ ID NO: 261250 - DNA, 75 bp, Homo sapiens
ctcagcgtgcccatcccggggggcagcaacggcgacatccagcaaggacccttgattcctgaagagaacaaggag

SEQ ID NO: 261251 - DNA, 100 bp, Homo sapiens
gctctgggagcctagaatgcatcagtgcccttgtggcgaatggggctcacgtcgactacaagagactgtgaaaaggaagttggaaggagctcgatcacca

SEQ ID NO: 261252 - DNA, 74 bp, Homo sapiens
gttcctgagctgtgcaaccaatcagagtccagtggagaaggagcccagcgaagtgccaacacctaagagacctc

SEQ ID NO: 261253 - DNA, 75 bp, Homo sapiens
cggcttttggcggcctttctgctcctcgcggcccaggcttcagtttcacattcttggtacctcctggtggtgcct

SEQ ID NO: 261254 - DNA, 96 bp, Homo sapiens
acgccttccacccaagggaactggaaactggccaagaagcggaaagagaccatgagcagcacccgacaggagatgactgtgatggtgaactcaatg

SEQ ID NO: 261255 - DNA, 96 bp, Homo sapiens
aggatgtggcccggtttatcaactggatggaggtgcaacacgcaggactacatctggcacaaggggatgcgctgcgagtccatcatcaccgacttc

SEQ ID NO: 261256 - DNA, 78 bp, Homo sapiens
gcggcccgggcgccatcgagccttggcggcggacgtgcaggagaatggggtactaagagaaaagcacgaagctgtgga

SEQ ID NO: 261257 - DNA, 73 bp, Homo sapiens
ctgaactcaacttctgaaatttacagaaacaaactacatctcaggaacctcaagaaggcatgaagccagcccc

SEQ ID NO: 261258 - DNA, 100 bp, Homo sapiens
tggcacgatacgtgttccagtcaggggctatctgatgggttagagtgcctttgagaagaaatcagtggatactggatttgctcctgtcaatgaagtttta

SEQ ID NO: 261259 - DNA, 100 bp, Homo sapiens
gtgattccctgcggtgtgcaagtccgactggaacagaaaaatatgtcgtaactgcaagtgtggccaagaagagcatgatgtcctcttgagcaatgaagag

SEQ ID NO: 261260 - DNA, 75 bp, Homo sapiens
cgggagtacatctacatgcattttggggaggactggactcgggccatatccgtggtgccgtcaacatgcctttca

SEQ ID NO: 261261 - DNA, 119 bp, Homo sapiens
ccgcagtggcagtggctccccatcgccggacacctactccctctattgctacccatgcacctggggagactgcaagattccagaatgactatcttgacttacccctttaaaaatcttcc

SEQ ID NO: 261262 - DNA, 112 bp, Homo sapiens
tgaaaacttcgaggcactcaagtcctggctcagcaagactctcgagcccatggaggttcccctgaaggatgctaaggaatacgctgaatccataggtgccatcgtggttgag

SEQ ID NO: 261263 - DNA, 100 bp, Homo sapiens
attggaaaactagctgccaaattggataagacactgcagctcagcaaagacccaaatatcgtcatagccaagatggatgccacagccaatgatgtgcctt

SEQ ID NO: 261264 - DNA, 90 bp, Homo sapiens
gaatgttaatgcttgatgggatgccggcagtcagagtcaaaacagagcttttggaatctgaacaagggagtgaattactggaactgaaac

SEQ ID NO: 261265 - DNA, 75 bp, Homo sapiens
acggagtgtgcgacggattgggagggatcccgggtgcaaggggcacaagtttgcacacagtggcctggcttgcca

SEQ ID NO: 261266 - DNA, 75 bp, Homo sapiens
ttggcacctgccatccgtgacaaactggacatccttggggctgctgagacaggcctcctgatcacttgccacgtg

SEQ ID NO: 261267 - DNA, 83 bp, Homo sapiens
gaactgaagctagcttatgctgttcgaggcaataaatgttcggctttccagtttggcagcagcactacaaatttcaacttcac

SEQ ID NO: 261268 - DNA, 75 bp, Homo sapiens
tgaatctaatccaccatctttaatgagaggcctacaaaggttaaagctgaagctcaacaaagatatagtgatctc

SEQ ID NO: 261269 - DNA, 100 bp, Homo sapiens
ctttggtgtggacatctgctgccggaaggggtcccgaagccccctgcaggaactctacaacccaatccagctctggatgagggggatattgccttgttga

SEQ ID NO: 261270 - DNA, 50 bp, Homo sapiens
gccaggatttcctggaagcagagaaatgcatgcagcagattggaataaat

SEQ ID NO: 261271 - DNA, 75 bp, Homo sapiens
aagagtttgaggacatggagagaagtctgccactaaggttggaaagaaccatgactgtattcaggaaggcacatg

SEQ ID NO: 261272 - DNA, 96 bp, Homo sapiens
gcagaagggacgtgagcccagccgaggtaccgctgaagaggaatcaattttggagcctcctcaacaagcccaagagtgagatgaccccagaggagc

SEQ ID NO: 261273 - DNA, 75 bp, Homo sapiens
tttaggaagaaacaacataaagaacttaaatggactgggtttggaatcacttgctaggagtcttgtctctctgcc

SEQ ID NO: 261274 - DNA, 90 bp, Homo sapiens
gaaagctcgttctgccgatgatcaaggaacacattatgcaaatgcttcaaaatcgggggtacatggtatggagtagacatcaacaacgag

SEQ ID NO: 261275 - DNA, 100 bp, Homo sapiens
atttagccatactgaaggggaaggaaataagagctgggcaaagcattctgtgaattggctgactccacttctatggctgtggaaaatctctgttctcaca

SEQ ID NO: 261276 - DNA, 101 bp, Homo sapiens
gccgccggctcggggagcccagttccgccgctgccgagcgcgtccagattacctctctagtgacccttcagctgttaaccctggttggccatgacgatcag

SEQ ID NO: 261277 - DNA, 87 bp, Homo sapiens
agaccagacctactgcagccacgcgggcgagcggctgtgtggatgtcggcgaagccgcgggcgagataccagcagtttggaatctta

SEQ ID NO: 261278 - DNA, 74 bp, Homo sapiens
acgcttgtggaggaaacccacactaacgagttcatcacctggagccagatgcttgtgaccacaccagaaaaatg

SEQ ID NO: 261279 - DNA, 100 bp, Homo sapiens
cagcctcccgaggagctgggactacagagatgtgtgcacagacccaggccatgcagatactggtgcctctaacttcgtcagcccagaacacctcacctct

SEQ ID NO: 261280 - DNA, 98 bp, Homo sapiens
cagacagtgacgattatagcacaatatcaacctgaagctttgtgtccctggtgatgttggaacattaatgatggaacatggccaaacttcagtcatga

SEQ ID NO: 261281 - DNA, 100 bp, Homo sapiens
taatgcacaccttaaaatattactactgggttattaatcctgctgacagtagtggcattacacctaaaggattagcattcctctgaatattgatttgctg

SEQ ID NO: 261282 - DNA, 75 bp, Homo sapiens
gaattgcagaacaagaattaaaaatccccagattgctggaaccagaagttattaatgaagtgtggcaagaagaaa

SEQ ID NO: 261283 - DNA, 90 bp, Homo sapiens
gaaaaacgctttttgcatacaagcaggaaaatgagatgttatccagtgaacctccttggcctgggcgaagctgtgtggaccaagcaagtc

SEQ ID NO: 261284 - DNA, 99 bp, Homo sapiens
gtgccctcttcaacagacagccagaatggactggaaggatcaccagcacatatgcggccagtcagcagctgtcaccgtccaggcagacgaagtccacgt

SEQ ID NO: 261285 - DNA, 75 bp, Homo sapiens
gcaagagcctcaaactcaacactgcagaagatggtgcataaggcaaatccaatacgcaagtaccagggtctggag

SEQ ID NO: 261286 - DNA, 75 bp, Homo sapiens
cacgtgcccatcagtgacagcaagtccattcagaagcattatggctcctccacctggtatgagaccacccatggg

SEQ ID NO: 261287 - DNA, 116 bp, Homo sapiens
gcttttttcattgttccactggacgctcatcagagggaagatctttttcctcaattgccgggggccattgagactgccatggaagacttgaaaggtcacgtagctgagacttctgg

SEQ ID NO: 261288 - DNA, 75 bp, Homo sapiens
caaaccttggaagcagaaatgggaagagctaaagatggctgaatttctagatgaccaggaaactcgactgtgtga

SEQ ID NO: 261289 - DNA, 100 bp, Homo sapiens
gtcggctgctgcgggaaatacttcctgtttggcttcaacattgtcttctgggggctggttcacttctggttcttccacagccttacctggcccaaatcct

SEQ ID NO: 261290 - DNA, 50 bp, Homo sapiens
actggagctaattcaggaatagattttgataaacctgatttcaagagaag

SEQ ID NO: 261291 - DNA, 89 bp, Homo sapiens
tgcttttgcaccatttggaagaatatcaattaaatgtgagggagtctgacgtaagagtttgtgatgagtcatcatgtaaatatggagga

SEQ ID NO: 261292 - DNA, 74 bp, Homo sapiens
ttttgtacttacaaagtccatgctaacctactatgagggtcgagcagagaatcaagtcatttggaacagcaact

SEQ ID NO: 261293 - DNA, 94 bp, Homo sapiens
cgaggcctcccgggctccgggaaaactacactggccagatgaaggatttgggggcagagcacttggcaggtcatgaaggggtccaacttctcgg

SEQ ID NO: 261294 - DNA, 75 bp, Homo sapiens
agcctttgcggggcttagtgaggctcccgatggcgggagctccaggaaagagtattgggaaagggtcgttgtggt

SEQ ID NO: 261295 - DNA, 82 bp, Homo sapiens
ccaaaaggagcatgaaacgagacgacaccaaggagaccaagacacattccaccccagtggggggtcccataccactcatgga

SEQ ID NO: 261296 - DNA, 75 bp, Homo sapiens
tttcagcatcggggcagacaccgccctgaacactatcaccgacgagtacgagagggcctccaaagtggaccagtt

SEQ ID NO: 261297 - DNA, 124 bp, Homo sapiens
ctcctgtgagcagtgggaaaaatggaccaacttctttggcaagtggacattttactggctcaagttcgatacaagaggctgttttcctagcgtggcttgctgcctttggtaagaacatgtcgtc

SEQ ID NO: 261298 - DNA, 100 bp, Homo sapiens
tggaccttttttcatttccatttctaccttgtatgcctcaatttgctggatttaagcactgctgcactttatgaggcccaacagcgccctggaatcctgc

SEQ ID NO: 261299 - DNA, 132 bp, Homo sapiens
agcgctttgcttctggatcagctgacaaaagcgttattatctggacatcaaaactggaaggcattctgaagtacactactatactggcaattgctggagaagattttgcaattgttgcttctgatactcgat

SEQ ID NO: 261300 - DNA, 104 bp, Homo sapiens
cagattcgcagtggtcgcttcttctccttgatgtgtttttaccaaattcagctcattctacctctaagagtcagtctgatctcaataaggaaaatcaaaagcca

SEQ ID NO: 261301 - DNA, 96 bp, Homo sapiens
aagaaggacttcggaatgcactacaacaggaaaatcatattatagatggagtaaagcagcagtgttgtactgctacttctataaacggacagccgt

SEQ ID NO: 261302 - DNA, 50 bp, Homo sapiens
tctatgtgaccagactgcacaggagccatgtgttcacatgtcatgtggac

SEQ ID NO: 261303 - DNA, 76 bp, Homo sapiens
gtcccagagagccattctatgtcaaacattccaagtactctttgagtctctctgccacgcctggtcgatctggact

SEQ ID NO: 261304 - DNA, 98 bp, Homo sapiens
cggggacctgcatgtgtgtgcgcgcgaaggagcggaagaatggcagtgctcaaactcaccgaccaggcaaagatgccttttgatgccaacaaactgta

SEQ ID NO: 261305 - DNA, 100 bp, Homo sapiens
accgttcccgcgagagagatgaaagacgtcgaggggacgattggaatgacagtgaacagcagagaatttcaaaggaccttgctaatatctgtaagacggc

SEQ ID NO: 261306 - DNA, 74 bp, Homo sapiens
tgattcaaaggtattagaagccttgaaattaaaggctgaaggcctgctgacccagggtgataagatcactgctg

SEQ ID NO: 261307 - DNA, 82 bp, Homo sapiens
aagatgaaggaaattgcagaagcctaccttgggaagtcccccagggcctcctgcctccttttcctccaggcatgttcccact

SEQ ID NO: 261308 - DNA, 75 bp, Homo sapiens
aagtcaccaaggaaggctgtgagcagttcatagccgagatgtctgtttgtttctgcgtcacatgatcttggccta

SEQ ID NO: 261309 - DNA, 98 bp, Homo sapiens
tgccaagctcgcgccggatgcggagcgcggtgctgccggtggagcttcagtacagtgctgtggataccaatccactttctctgtatgtcatgcatcca

SEQ ID NO: 261310 - DNA, 100 bp, Homo sapiens
aagatggaagtggtggtgcatggacgactgaccacaatcaactgtgaggaagaggatggagatgaagatgaggaagctgagtcagctacgggcaagcggg

SEQ ID NO: 261311 - DNA, 97 bp, Homo sapiens
gctacgtcccctgttggccggagcccagcagctgtgggagccccgagaacgcctccagcggggatgacacagaaggctgtggaaaatctctgttctc

SEQ ID NO: 261312 - DNA, 75 bp, Homo sapiens
ggatgggggactttgtcacagcttggatggaatgtatcctgtcaggtataatgtcagtgaatggcaagaaagttc

SEQ ID NO: 261313 - DNA, 90 bp, Homo sapiens
tgctggctctgcgcagtggcttctctggcgccttgctgcagcagtccttcctcactgctgctcacgatggacttccccagctccctccgc

SEQ ID NO: 261314 - DNA, 80 bp, Homo sapiens
actgttcctggaggaatccgagaagagcagagcggagggagccccagacacgatgacagcaagcctcccatccagatgcc

SEQ ID NO: 261315 - DNA, 75 bp, Homo sapiens
ccggttcgcgtctctctgctgcggcgcggggaccgctgtgctctcgctctaagcgaaagacatgaggcctcagcc

SEQ ID NO: 261316 - DNA, 100 bp, Homo sapiens
agttccaacaacctctgccacaccctggggcctgtgcatcctcctgacccacaggactcatgttcaacacggggattgggcagcacattttgaaaaatcc

SEQ ID NO: 261317 - DNA, 75 bp, Homo sapiens
aagaaattttatcttttgaaacacgttctgattaaccaaggatgaatagacctagtgctgccaacccttgttctc

SEQ ID NO: 261318 - DNA, 75 bp, Homo sapiens
cttcgctcgtactcgtgcgcctcgcttcgatacacttcttgtaccagtactccctccagtttttcctggacattt

SEQ ID NO: 261319 - DNA, 100 bp, Homo sapiens
gccaaagaaacaagccgtggaataggtgtatcaagtaatggtgcaaagcctgaacccagaagaatcagtgcggtttctgtggcagagcgagttgcatttg

SEQ ID NO: 261320 - DNA, 75 bp, Homo sapiens
gaccatatgaaaagggtcgcctaatcatcgaatttaaggtggttgtgtcaaaccgattggtgacatctccatgct

SEQ ID NO: 261321 - DNA, 100 bp, Homo sapiens
acttcgtgaacaaattgctccatttcacactgaattcaccattaaggaaatttccctggacctcaagaaaactagaggcagaagctcctcctggggtaga

SEQ ID NO: 261322 - DNA, 100 bp, Homo sapiens
ttccaacagcttcctttgcagggaaaattgatgccagccaaacctgtaaacaactttatgagtctaaagaatcttcaagagggagacatagggaaaagga

SEQ ID NO: 261323 - DNA, 75 bp, Homo sapiens
aagcctcccacaaaagagatgagacaagaggaatggttacacaggctggagtaaaagggacattgggaagattag

SEQ ID NO: 261324 - DNA, 100 bp, Homo sapiens
cttcgttaagggactcaggcagtacgggaagaacttcttcagaattagaaaggagctgcttcccaataaggaaacactatatgttctcctttcagccaag

SEQ ID NO: 261325 - DNA, 50 bp, Homo sapiens
tgaccaccctccagctacccccggtgccgtgagcgatgtggagatgcagg

SEQ ID NO: 261326 - DNA, 100 bp, Homo sapiens
cggacgggaaggcgggagacgagaagcctgaaaagtcgcagcgagctggagccgccggaggtcatatgagaggttccctgcttaccctgcagagattagt

SEQ ID NO: 261327 - DNA, 100 bp, Homo sapiens
ctcattgctctttggcgactcttattgaatgtgcagctctcactgctaacagaaagagggatgggtgaagcagtacaagaatttgtggacaaggaggaga

SEQ ID NO: 261328 - DNA, 106 bp, Homo sapiens
aagtgttgaagttgcagtgacacttctcattgctcttaaggcaccatgactcctgtgaggatgcagcactccctggcaggtcagacctatgccgtgcccctcatcc

SEQ ID NO: 261329 - DNA, 115 bp, Homo sapiens
cgctagggaagatcgcaccgcggacgcccgctgagcttggcgcacgggccgaccaggtgagaagccctaccactgcaactgggacggctgcggctggaagtttgcgcgctcagac

SEQ ID NO: 261330 - DNA, 87 bp, Homo sapiens
aacttcagaggactgtctttctcttttcagttagactcatggactgaggctccaaagtatgaggactggaatgtcacgtggaatacc

SEQ ID NO: 261331 - DNA, 80 bp, Homo sapiens
cggctccagccccagctgcgtgcccagttgccaccttccagagaagaggtacgagatgacaagacaaccataaagtgtga

SEQ ID NO: 261332 - DNA, 100 bp, Homo sapiens
gccatgattgtgaggcctccccagccacgtgaaactgaacccaagacagaccaggatgaggagcattgccggaaagtcaacgagtatctgaacaaccccc

SEQ ID NO: 261333 - DNA, 82 bp, Homo sapiens
ctgggcgctccggtggcggcggagcatgatgccttcttctgtagagtgggcgctttgcagaatacgtgttgaatgaaatcac

SEQ ID NO: 261334 - DNA, 101 bp, Homo sapiens
aagttagcagcgtttattttacaggtcctgggaactccaacaagggagcaaatcagagaaatgaacccaaactacacagaatttaaattccctcaaattaa

SEQ ID NO: 261335 - DNA, 75 bp, Homo sapiens
gcaaggcaagtagcggcggcgcttcaagcatggccgaaatggatgaacgattccagcagattctgtcgtggcagc

SEQ ID NO: 261336 - DNA, 100 bp, Homo sapiens
cccgactcggtgattgaggacaagaccatcgagctcatggatggcccaacagcaggccttgaggttccgaggtccggctcccccaccaaatgcagtgatg

SEQ ID NO: 261337 - DNA, 100 bp, Homo sapiens
caatgacttcttcctccttgctgagctcctgagtgactacattcgcctcctggccatagtccgcagcctgggcctggtggacaggaacaacgaaccgctt

SEQ ID NO: 261338 - DNA, 100 bp, Homo sapiens
tctgtcaggaggtgctcaaaacgcccgtgcggaccacggcctgtcagcacgtgtgccagtcaggggaagactggtggtacatgggagaaaggtgtgaaaa

SEQ ID NO: 261339 - DNA, 83 bp, Homo sapiens
aaggtcacctggaaattgccttattggaaaaacatttcttacgtctcctctgagcctccggcctccataagacccaaaacaga

SEQ ID NO: 261340 - DNA, 100 bp, Homo sapiens
aagttggataaaaggaggacctctcgccaagggccccaatgagtggcacacagtctactatcaccgacaggctttgatgaactaggtggacttctcaaac

SEQ ID NO: 261341 - DNA, 75 bp, Homo sapiens
gcaccccgaacgggttgcttcccccgctgcgagtccagaatgacagggtccagaaactggcgagccacgagggac

SEQ ID NO: 261342 - DNA, 98 bp, Homo sapiens
tctccgcgctatggctgcgttcggccgtcaggtcaccttcttgactcctttgcccgttcagctttatgggattcaggcctagattacttgcacgggac

SEQ ID NO: 261343 - DNA, 51 bp, Homo sapiens
gcgggaggtgaagttgctgctgttgggtgctggggagtcaggaaagagcac

SEQ ID NO: 261344 - DNA, 75 bp, Homo sapiens
gtcaggaactcgactcagacgtggataaagataatcccggactccatccccgtgtctacctccctccttggagac

SEQ ID NO: 261345 - DNA, 82 bp, Homo sapiens
tgaatccagctagcaaagtaattgcactgaaaggtggcgacatgtctaagaatgtgagccagtcacagatggcaaaattgaa

SEQ ID NO: 261346 - DNA, 75 bp, Homo sapiens
agccttctggtataccatcgtcaccatgacaacactaggatgtgttcagagcaacattgttttgttgacacaagc

SEQ ID NO: 261347 - DNA, 98 bp, Homo sapiens
caggaatatatcgcagtagttaaaaaactagatccaggttggaatcctcagagagacaagagagacacctccaacttcgacaaagagttcaccagaca

SEQ ID NO: 261348 - DNA, 100 bp, Homo sapiens
gggctgctgggcggcgcgggcgcgcagtactccagcgaccggtgcagctggaaggggagatttatcacacgtcctgatgtcaagcaaagcaagatggctg

SEQ ID NO: 261349 - DNA, 96 bp, Homo sapiens
ctggtgatagccttggttctgaagatcgtgatcttctttacaggacataccgagggattgcatatgttaaatggaaattttataaagaagcaactc

SEQ ID NO: 261350 - DNA, 75 bp, Homo sapiens
cccaagccgccctggatggagactcccagatctttaatctcatgaagtacgacagctacagccgcttcttaaagt

SEQ ID NO: 261351 - DNA, 74 bp, Homo sapiens
cggaaggcggtacagacagccattaccatcctggttccagacattacataaggtgaagagggagctgagatcta

SEQ ID NO: 261352 - DNA, 75 bp, Homo sapiens
tggcacccagtgctcatggtcaccggcttcgtcttcatccagggcatcggaagctccaggactggcgggatgggc

SEQ ID NO: 261353 - DNA, 75 bp, Homo sapiens
tcaccgacagtgccctgagggccttcgagagctaccgcgccagacagaccctctttcccagctgcccgctcctca

SEQ ID NO: 261354 - DNA, 78 bp, Homo sapiens
tacctcctgcgaggcctcccgggctccgggaaaactacactggccagtactatactggcaattgctggagaagatttt

SEQ ID NO: 261355 - DNA, 80 bp, Homo sapiens
ggattagctccagttcgctctagcagacaagatcagatccacaggtgacttaagagattaaaattaatttggttgctgtt

SEQ ID NO: 261356 - DNA, 95 bp, Homo sapiens
ctggaagtacgggcagttgcagtgttggagctaaaacctgtcatttactccatcctttatagtgatgctacaggacgaagaggaatggataaaaa

SEQ ID NO: 261357 - DNA, 73 bp, Homo sapiens
gacagtggctggcggtgcctggacgtacaagtactcaccagatgagctgcggtatctgccattaaacacagcc

SEQ ID NO: 261358 - DNA, 88 bp, Homo sapiens
cacgtgcagacatctacaaccttcgatctcctgacgaaccctagcacttttggaagaagaggaagatataaaccaaattacagattac

SEQ ID NO: 261359 - DNA, 82 bp, Homo sapiens
gccagcctcgtaccctgccagccacctctcggccatctgcagatgccatggacaatattaccaggcagaaccaattctacga

SEQ ID NO: 261360 - DNA, 75 bp, Homo sapiens
agacttctttgtggctttgctaaaggacagatcaagcttcaggagtctccggaagacatgcctgcagggcagaca

SEQ ID NO: 261361 - DNA, 100 bp, Homo sapiens
agatgacaaggcctaccatcgtttcttcctgcctttgggccgtcaggcagttggttgggacccgctccaaccctcggagaaggaagccaacatccttttg

SEQ ID NO: 261362 - DNA, 98 bp, Homo sapiens
caacaagaggaaagacacacctaccaagaagccagtcaagcggccaggaggagatgttaaagtaacccatcttgcaggacgacattgaagattggtct

SEQ ID NO: 261363 - DNA, 82 bp, Homo sapiens
caggaggagctgctggcgcccgcagatgcagcctcccgcgacgatgcccctcaacgttagcttcaccaacaggaactatgac

SEQ ID NO: 261364 - DNA, 88 bp, Homo sapiens
gagaacttgaggaagagaacacgagcttgaaggcagaagctcctcctggggtagagacagatcttattgatgttggattcacagatga

SEQ ID NO: 261365 - DNA, 50 bp, Homo sapiens
cctgcatcttttgcgctctcaaggctctgggcatcaccagcggccccagg

SEQ ID NO: 261366 - DNA, 83 bp, Homo sapiens
cgaggcggcgggctggagacatggaccgcggcgagcaaggcagttccggtcaccacaggaggagcacccatctttgacaggcc

SEQ ID NO: 261367 - DNA, 75 bp, Homo sapiens
ggccgccgcgatgtcagctcagtgctgtgcgggccagagatgtggtatggtgtattcctgtgggcactggtgtct

SEQ ID NO: 261368 - DNA, 78 bp, Homo sapiens
tttattttaaaagctgatgttccaaggttagtggatgacagatgtgtggtgcacccagaggccggggaccttgccaac

SEQ ID NO: 261369 - DNA, 87 bp, Homo sapiens
ggagcaggatctgaaagctgaaattgagaagctttgtgagaagggcagaagcacaacagatttgttttggactgtaaagacaaagag

SEQ ID NO: 261370 - DNA, 75 bp, Homo sapiens
cccatccagactgtttgatgctgaacttcaccgttaaggttatgggaagctggctggaagcagcggtactacaag

SEQ ID NO: 261371 - DNA, 83 bp, Homo sapiens
aagacaccaagtgagaggccaaccagaacaatccatttcacagatgaagaaacagactcagtgagcacgtgatcacttctcac

SEQ ID NO: 261372 - DNA, 100 bp, Homo sapiens
gtcaagaggcctgggggtcagcacggaggggactggagctggagagtgactgtagagcctcaggccacagatgctatggcccacgtggccggcttcactg

SEQ ID NO: 261373 - DNA, 82 bp, Homo sapiens
agaggctgtgcttcggcgctccggctcctcagagagcctcggctaggtcagcccaaggctgccccctcggtcactctgttcc

SEQ ID NO: 261374 - DNA, 75 bp, Homo sapiens
cggactgcgagggaaagggggccttgttgagtccgccagattgacgagatgcctgaggctgccgtgaaatcaaca

SEQ ID NO: 261375 - DNA, 121 bp, Homo sapiens
ggagatcctccgaggccgcctgctcttccggaggagggtctctccaggtgccagctgctgcccgtgctggtgccattgccccatgtgaagtcactgtgccagcccagaacactggtctcgg

SEQ ID NO: 261376 - DNA, 82 bp, Homo sapiens
tagaggaacatccggagacttcactgcccaaacaggaagtctatgatgagtacaagtactccaaagattcaggtttactcac

SEQ ID NO: 261377 - DNA, 90 bp, Homo sapiens
accttcacccagcatttcatccctcgtcgaaaggattggattggcatctttagagtttctctggaaacccccctggtaagtgtggaggag

SEQ ID NO: 261378 - DNA, 103 bp, Homo sapiens
tagggacattggggttgatgaaacttacctctttgaatctgaaggtttaggtttcttcaggagaagcattaccaaaaacgctgtgtacaagtgtaaaaacggg

SEQ ID NO: 261379 - DNA, 83 bp, Homo sapiens
cccgcgagtggcgcgccggggatgtatgaagctaaaatgcagcggctaagaacgcggctctggagcttgacaggcctgacgtc

SEQ ID NO: 261380 - DNA, 90 bp, Homo sapiens
gaactcgtcatgctctttgtagcgtggtgcttctgttgctcacagcctgcctgctccgcttcagcggactctcgctggtctacctgctct

SEQ ID NO: 261381 - DNA, 83 bp, Homo sapiens
caccaatgtctcagggacttgcttccaaagattttcctgagagaactgatttcaaatgcttctgatgctttagataagataag

SEQ ID NO: 261382 - DNA, 90 bp, Homo sapiens
atcggggcagacaccgccctgaacactatcaccgacagcaaggtccgtggtcctgtcagtggaagcccggatagcatgaatgcctctcga

SEQ ID NO: 261383 - DNA, 82 bp, Homo sapiens
cttcagcagactcaactatcatggacattcaggtcccgacacgagccccaggaactgtggctgcaccatctgtcttcatctt

SEQ ID NO: 261384 - DNA, 100 bp, Homo sapiens
cggacactttcgcaacatcaagggagttttccggggccctctcagcaagaacgggaacaaaactctgtggatggcattcccaatgacagtagtgatagtg

SEQ ID NO: 261385 - DNA, 82 bp, Homo sapiens
ttcggttgtcgcccgttggccgcgcggcgccgcgctcggcggccgccattgcagggcagccccgagaaccacaggtgtacac

SEQ ID NO: 261386 - DNA, 82 bp, Homo sapiens
ggagcagatggataatggagactggggctatatggtgtgatgaatgcagactctgctaccattttggctgtttggatcctcc

SEQ ID NO: 261387 - DNA, 80 bp, Homo sapiens
ccccaacatctcctggctctttcactgccgcattgtctctcgggttcatgacgctctcgatattcctgtgcagaaacctg

SEQ ID NO: 261388 - DNA, 82 bp, Homo sapiens
ggatatctctactcgctccaaaggttatcaatactctggctgaccatcatcatcgtgggactgactttggtggaagtccttg

SEQ ID NO: 261389 - DNA, 83 bp, Homo sapiens
gtccgtgtccctggaggggcccaggaagggcgaggaaagcggagtggagtagctacagcaagctgggtagcaggcagatccaa

SEQ ID NO: 261390 - DNA, 100 bp, Homo sapiens
gcgacctggggccctgggtgaagtgctccgccgcccttgcctccaggaacgtggaggaactctgccgcttccctgagctgcctgcccgcaagcccctcac

SEQ ID NO: 261391 - DNA, 50 bp, Homo sapiens
ccagtgcctccgacgcctcctgatggttcaccgacgaggacgagcatgtg

SEQ ID NO: 261392 - DNA, 100 bp, Homo sapiens
ggggtgtgcaaacccgagagaactgggtgacttcatggtcatgacgattttcttcaatgtgagcaggcggtttggctatgttgcctttcaaaactatgtc

SEQ ID NO: 261393 - DNA, 99 bp, Homo sapiens
cgaagagaagatccaggcctcagaggaggagaaaggccggagccagccgaggaacaaggagtgtcctacctgccgaaagaagctggtgtccaagcgatc

SEQ ID NO: 261394 - DNA, 100 bp, Homo sapiens
ctctcagggcccaacagctggctgcggagctggaggtggagatgatggccgatatgtacaacagcttctttatgaaaaaggcatcagcctcagggcctcc

SEQ ID NO: 261395 - DNA, 87 bp, Homo sapiens
taacaccagatagtggaaagaaaccatgtgctgaaatgtttgacgacactgatggtttggtgcatggctgcctcctaatcccatagt

SEQ ID NO: 261396 - DNA, 74 bp, Homo sapiens
tgagctgctggctaagatcaccaacacagacgtgctgactgcctgcatccacgggtctgcggcgatgctctacc

SEQ ID NO: 261397 - DNA, 100 bp, Homo sapiens
gcacagagaagagcccagagtatagagcggaagcaagagagcaaatgatggctcagacattcattctgctgtgctctccacaattagaaaactagaggat

SEQ ID NO: 261398 - DNA, 82 bp, Homo sapiens
caaatgttgggacttgggaatcccagcttttcagatccatttacaggtgtggtgttcatggctggccacgtgtatgccgtgg

SEQ ID NO: 261399 - DNA, 90 bp, Homo sapiens
gcaggccgggaagcttctgcgagccctagcgctgcggccccgcttcctggcggccgggtcccaggatgaatctggttatagatggacaag

SEQ ID NO: 261400 - DNA, 76 bp, Homo sapiens
ggtgaccgcgtggcaggggctctcggacatgctgccaacgacgcgaggtgcagtcagcctcagtttccaaagccgg

SEQ ID NO: 261401 - DNA, 75 bp, Homo sapiens
gaactatgatgccgaccagaagtttgggttctgccccatggctgagtctgaaggaaggcctgacggtgcaagaac

SEQ ID NO: 261402 - DNA, 100 bp, Homo sapiens
tggccaaggtgattcagattgcaacgtcatcctccacagctaagcacttttctgtagaaggtcagttggaattcagggcattgctatttattcctcgtcg

SEQ ID NO: 261403 - DNA, 74 bp, Homo sapiens
ccgaggccaggagccaggggcccagaaggttaaacccatccagagtaatggctgcggccttacccaggaccctg

SEQ ID NO: 261404 - DNA, 90 bp, Homo sapiens
ggaaagggccggaaaacacacgttcctccgaaaccggtttgcaagtccttgtagagggagtgcatccgccccaacccttttccccctcgt

SEQ ID NO: 261405 - DNA, 75 bp, Homo sapiens
gtcattggtgacctgctcttctcagggcgacatggagtccaatgggaaatacatcaccaaatctggaacccgtgt

SEQ ID NO: 261406 - DNA, 100 bp, Homo sapiens
tcgatggcggtggtggccacgctgaggctctctgctcagggctccaaggtcctggccaagaaagagctggcctatgtcccaattatcggctggatgtggt

SEQ ID NO: 261407 - DNA, 75 bp, Homo sapiens
aaagcctcctggaccgtccaagaaattgctcgctgtaagcagctcatctgtgaccccagctacgtaaaagatcgg

SEQ ID NO: 261408 - DNA, 83 bp, Homo sapiens
ctgcgtccgagtctccgccgctgcgggcccgctccgacgcggaagacacgatgaggcgagtggtacgacagagcaagtttcgg

SEQ ID NO: 261409 - DNA, 120 bp, Homo sapiens
gcagcaccgcagccttgggcctcgcgccggctatggccgtgccctggggctgagccctcaggcctccggtgtggctgtctctgatggtgtcatcaaggtgttcaacgacatgaaggtgcg

SEQ ID NO: 261410 - DNA, 74 bp, Homo sapiens
gagaacccgcccatgaagccagatttctcccaggtcacccccgaggttccatactggccaccatccccgagaga

SEQ ID NO: 261411 - DNA, 100 bp, Homo sapiens
cggcttctgagacggcggcagcagcggcattcaggttctgtcatatgttgaagaatccatacaccattaagaaacagcctctgcatcagtttgtacaaag

SEQ ID NO: 261412 - DNA, 100 bp, Homo sapiens
tgccatgatgagtgtggatgaaacactaatgtgttcttttcaggttttttgcatgtctgacacccatgactccacctggaccttatggctccacccagaa

SEQ ID NO: 261413 - DNA, 100 bp, Homo sapiens
attgagaagaagcggaaaaaagaaaactctagaagtctggatgtcggtgggcctctgagatatgccgtttacggatgtcagtattgaatatggtggtgag

SEQ ID NO: 261414 - DNA, 100 bp, Homo sapiens
acagagtcaaatgtaaatgcctatgaagagtgtccttctggaattcccatagatatgtggaatactcagaaccgtgctgcatactatcctcctagccaaa

SEQ ID NO: 261415 - DNA, 87 bp, Homo sapiens
aaatgtggcgacttgtgcacacatgtagagacctttgtatgacccacctgccatgctgtgaggacacccaggccacatagagagagt

SEQ ID NO: 261416 - DNA, 75 bp, Homo sapiens
aaagcatatggacaggtctacgccacatcacttagccggactactttagttctgtggccacagtggtgtatcttc

SEQ ID NO: 261417 - DNA, 100 bp, Homo sapiens
ctctgcgggactctgaggaaaagctcgcaccaggacctgaaggagaagaaggagaaggtggaggagaaggcaagccggaaagagcgaaagaaagaagtgg

SEQ ID NO: 261418 - DNA, 98 bp, Homo sapiens
ggctccaccccttccacgtcatccgcatcaacaagatgttgtcctgtgctggggctgacagagccccggagctatgtggagtctgtggcacggacagc

SEQ ID NO: 261419 - DNA, 83 bp, Homo sapiens
ccagcggccgggatagccccggcggagcccgcagcttccctgccggtgacttaagagattaaaattaatttggttgctgttgg

SEQ ID NO: 261420 - DNA, 51 bp, Homo sapiens
gaagcaggactgcgccgcgtcttcctcaagacatgggaaagcggaaccacc

SEQ ID NO: 261421 - DNA, 100 bp, Homo sapiens
aaaagcaagctgaagacatcaagaagatcttcgagttcaaagagaccctcggaacccaggcccagacatgtccgtccttgtaagttaaaagcttccatgg

SEQ ID NO: 261422 - DNA, 80 bp, Homo sapiens
cccaaatgtctgactctgactctcggactgagaaacgcaaggtgtttgtggcttgatcgtcccccaggaagacatgccat

SEQ ID NO: 261423 - DNA, 100 bp, Homo sapiens
actcaaatgcaagtccaagaggaggaggaggcggaggtccaagcggaaagttgccgaacaagcaaccggaaaagcttaataggcaatgggcagtcaccag

SEQ ID NO: 261424 - DNA, 97 bp, Homo sapiens
cctggaatctaaagcctcctcagccttctgagtcagcctgaaaggaacaggccgaactgctgtatgggctctgccaaaggaggactttctggtttgt

SEQ ID NO: 261425 - DNA, 74 bp, Homo sapiens
tttctgaagactattgtggaagaagcatccattaagattattgctatggcagctttggtccatcacagttttgc

SEQ ID NO: 261426 - DNA, 75 bp, Homo sapiens
gtgtctcaggagcttgatccagacctctacaagcaaatggagaagttcaggaagacacctagctgttgggcagaa

SEQ ID NO: 261427 - DNA, 100 bp, Homo sapiens
tgacattgaacctacagacaagtgtccaacctcatggccttcctcatcatggttgtggtgtacctgcggatctacgtgtacgtcaagaggaaaaccaacg

SEQ ID NO: 261428 - DNA, 98 bp, Homo sapiens
gggagtcatcatgagcgatgttaccattgtgaaagaaggttgggttcagaagaggggtttgtaaaagaatggacttggtctgccagagaatgttgaat

SEQ ID NO: 261429 - DNA, 100 bp, Homo sapiens
ggagggtcggggccgccggtggagtctcggcggccgggcacatacccccggcctcatgagtacctgtccccagcggatctgcccaagagctgggactggc

SEQ ID NO: 261430 - DNA, 90 bp, Homo sapiens
ccccagacaagatggacaccgcggaggaaggtgtggatgaggtcaccattgtcaacattttgaccaaccgcagcaatgcacagagacagg

SEQ ID NO: 261431 - DNA, 100 bp, Homo sapiens
tcagcggctctttgtatgatgacatatggccgcgtggaaagtgtcaaaattcttcccaagaggggatctgaaggaggagtggctgcctttgtggattttg

SEQ ID NO: 261432 - DNA, 87 bp, Homo sapiens
tgaacttaatacagcaagaaagaccatcaagtttaccagagctgagagaagataatatcattttaattgaaaccaaggccatgctgg

SEQ ID NO: 261433 - DNA, 100 bp, Homo sapiens
caagagccccattgagcgtcagaagagcctgttgagtcttctccccctattcctaaaggagtctccccaggacagtgctatcacccgggatattaaccga

SEQ ID NO: 261434 - DNA, 75 bp, Homo sapiens
gctccagtttgagaaacctggatctgcgatctgtttgtggccgagtgtactacttcaaccacatcactaacgcca

SEQ ID NO: 261435 - DNA, 74 bp, Homo sapiens
tgtgcagccgcgaggaggcgcgggaggtgttcgagaacgaccccgagacgctcattgctatggacagtgctatc

SEQ ID NO: 261436 - DNA, 96 bp, Homo sapiens
ggcgagatgggcaagcccaggaacgtggcgctcatcaccggtatcacaggccagtgatttcctgaaggaaatataatgatctgttcatcgaagtag

SEQ ID NO: 261437 - DNA, 100 bp, Homo sapiens
gtcacgtgatccgacaaacggcctctgcatagtgcagaacattctgctgctcttaaaggcttaggtggagaaaagcagggctagaattggaacccaaagc

SEQ ID NO: 261438 - DNA, 75 bp, Homo sapiens
cgggcggcggcgccggcaggaagactagacgcttgaagcaaagctgccatcccagaagacgacatgctctcagca

SEQ ID NO: 261439 - DNA, 100 bp, Homo sapiens
gcgagaaccgccgggaagcgacgccccggggcgggggcgatggcggcggcggcggccggagcttctctcagccggaaaactgcaggatggactcttgcac

SEQ ID NO: 261440 - DNA, 105 bp, Homo sapiens
gctgctcaacaacggcttcagggagtcggaccagcttttcaaacaatacaggtgtgcaccgggatatttcgggaatccccagaaattcggaggtagctgccaacc

SEQ ID NO: 261441 - DNA, 50 bp, Homo sapiens
acgtgatcttcctagagctcctggcccgtccagaaaaggctttgaaagac

SEQ ID NO: 261442 - DNA, 100 bp, Homo sapiens
tccagaccaaggcaggtgaggcgcttctcaataggtttggcatggacaagatctatgaaggccaagtggaggtgactggtgatgaatacaatgtggaaag

SEQ ID NO: 261443 - DNA, 75 bp, Homo sapiens
cctcgccagcagccgtccggagccagccaacgagcgacctgcctagagctggaacgttacctccagagcgagccc

SEQ ID NO: 261444 - DNA, 50 bp, Homo sapiens
cagttgactgaacctggaaaagagccggcgcgggtttaagtggacgccag

SEQ ID NO: 261445 - DNA, 82 bp, Homo sapiens
tctggagtgcgtgggggaccggctgttggcgggaagcggggagaggtggtgagagatgacccctgttgaggatttcattggt

SEQ ID NO: 261446 - DNA, 75 bp, Homo sapiens
ggctctcaacttattcccttcaattcaagtaacagtggactgctgggacgggcccgatgggaagccggtcatcta

SEQ ID NO: 261447 - DNA, 127 bp, Homo sapiens
agacacaacccggccatcgaggccctgctgcacgacctcagctcccagaggatcaccagcgtgggaacaagagttgaatgctcgagcccgggccctccaagctgcatctgcttcatgttcatttcgg

SEQ ID NO: 261448 - DNA, 100 bp, Homo sapiens
ggaagaagaagaagaagaggaagaagctgaagaagaagggcaaggagaaggcggaagcacagcaggtggtgaacatcccgtccttcattgtccgcctgga

SEQ ID NO: 261449 - DNA, 75 bp, Homo sapiens
aacaaatcttgaagcacctctccagaattttccaatgagaaaagtgccctgtaagaaagatgctgcatcaggttc

SEQ ID NO: 261450 - DNA, 80 bp, Homo sapiens
gggcgcagtttctcacgacgggccgagcctgccactgaagaagaggaggatgatgactggggagaagatacaactgagga

SEQ ID NO: 261451 - DNA, 100 bp, Homo sapiens
gaagaacgagggcttctattccagcacgtgcccaggcctcctcttccagcagcctctatctttattctacaggatccagagaatcacccgctgatggttt

SEQ ID NO: 261452 - DNA, 75 bp, Homo sapiens
gcttgatggaaaagaactctgtagtgaaagtgaccaatgccctggtgggtatgagcccctcatcctcgctctcag

SEQ ID NO: 261453 - DNA, 74 bp, Homo sapiens
atacgatagaaaatgtaaaggccaagatccaggataaggaagatcctccaggtcctattgacaatactaagatt

SEQ ID NO: 261454 - DNA, 83 bp, Homo sapiens
tttcacaataagagcagaggatggaacacttcagtgcattcaaggtcagcccaaggccaaccccactgtcactctgttcccgc

SEQ ID NO: 261455 - DNA, 89 bp, Homo sapiens
ggaaggagggcgagcgaggaggatggcggagtcggggctcctgacgacggcagaatgcctccaaaggtgacttcagagctgcttcggca

SEQ ID NO: 261456 - DNA, 90 bp, Homo sapiens
agagttgttcagaatcctccaaaaccagtcatgaccactagacccacagctgttaaagcaacagtcttgctggtggatgccctccttact

SEQ ID NO: 261457 - DNA, 97 bp, Homo sapiens
aaatccaaagagtgtctgacatttcttttgtgcaagatgagcctcaagtgcttctgcattacaaattctccactttaccaatacttacaggatctgg

SEQ ID NO: 261458 - DNA, 75 bp, Homo sapiens
tggaaaatgagccatgaaccaaccaatgtaagaatgattgatgttggctgatattggagtgctcattcacatgaa

SEQ ID NO: 261459 - DNA, 89 bp, Homo sapiens
tgcggagccgcgggccggcgagcgcgtcgccaccatgggaaagcaggcaggatgggagagtcgccgatagaaccacctcttccctgcct

SEQ ID NO: 261460 - DNA, 82 bp, Homo sapiens
cgacgttaagaatccttgagaaaacctaatggaatgatattaccagtgaccaaaaggacatggatttgattgacatactttg

SEQ ID NO: 261461 - DNA, 82 bp, Homo sapiens
caggaattgagagtcacagaggaaggacagtggagtctggcatcttattgatccaaaacgctaacgatgtattaattgcacc

SEQ ID NO: 261462 - DNA, 50 bp, Homo sapiens
gacgacaacccgggcctccgagccgaacgcacggccggcgacgcagagcg

SEQ ID NO: 261463 - DNA, 100 bp, Homo sapiens
tcgccaaactgtggagcctcttctgtaaccaaggaacctcggagagctgatagatcggtttgtggctgatttcaaagcccaggggccacctaagcccaac

SEQ ID NO: 261464 - DNA, 75 bp, Homo sapiens
ttcttcatctgaggctcaggggactttggaggaacttccagcaccattacttgatgataaatgtaaaaaggaatt

SEQ ID NO: 261465 - DNA, 74 bp, Homo sapiens
aggacagctgttccttggccatcccaaagctattctgggggcaacagaggattcctctagcagtgaagattccg

SEQ ID NO: 261466 - DNA, 90 bp, Homo sapiens
atggtcagaaaccctccataacctgaaggccatcgaagacggcaatttggaggaaatggaagaggaagtacggcttaagaagcgaaaaag

SEQ ID NO: 261467 - DNA, 101 bp, Homo sapiens
gtgactttcagcctgcgagccttcttcccggggcgccataaacgcccccaatttcccagctgctaaaggaagaggaagccaatgttttcagttgcaccaag

SEQ ID NO: 261468 - DNA, 97 bp, Homo sapiens
gaggtggcagcggcaggagagtccggccgcgacaggacgaacactctgctccagccaaggtggtgagggcagctgttcctaaacagcgcaaaggcag

SEQ ID NO: 261469 - DNA, 100 bp, Homo sapiens
tcacctcaagcccaaactccagatcagcaaccaaataggaccaatggagcaccaaggatgacattgatcttgatgccttggctgcagaaatagaaggagc

SEQ ID NO: 261470 - DNA, 74 bp, Homo sapiens
ttcgcagtggtcgcttcttctccttgtcgtgatgagaggagatggattgaaaagcagaacagagcaacaagagc

SEQ ID NO: 261471 - DNA, 75 bp, Homo sapiens
caatttttagtggagttgccatctatgttaatggatacacagcttcagtatcagacacagcacagcagccatctg

SEQ ID NO: 261472 - DNA, 119 bp, Homo sapiens
cgaggacagcgcgtgcccgcgaggagccgccgcgcgcccgcgccctccgcgcgacgccagcccgtggaccgggagcccgtggaccgggagccggtggtgtgccaccccgacctggagga

SEQ ID NO: 261473 - DNA, 75 bp, Homo sapiens
tctgcccggccaagaggcaaaggggaggttacgcagcaaaccatccagaagagcttggggcttccttggtcgcac

SEQ ID NO: 261474 - DNA, 100 bp, Homo sapiens
tgagaggctctgggaaactcagcctgtgaccccagcgtgggtgaagataggatcaagatggccatgtggcaggccaagttctatagaaattttagagtat

SEQ ID NO: 261475 - DNA, 85 bp, Homo sapiens
ccgatccccatttttattgaaagatgtattgagtacattgaagccacagctcggcttattccaggggtgtgtttcgtcgagatgc

SEQ ID NO: 261476 - DNA, 100 bp, Homo sapiens
cagaggttcacaaaacaagtgtagtaggaagcgccgcggagccatcaacagcaagcagctcacctacctggagaaataccggcccaaacagaggctgcgg

SEQ ID NO: 261477 - DNA, 130 bp, Homo sapiens
aaagatttatttctcttgacaaccaagggcctccgtctggatttccaaggaagaatttcctctgaagcaccggcctggctacagcaatatggctacctgcctcccggggacctacgtacccacacacagc

SEQ ID NO: 261478 - DNA, 98 bp, Homo sapiens
aatgaagtccgagtcatacccccaggagtaagagcccatagcagtctgccagacaatagagcatatgggtaccactgatgaaattatgaccaggtggg

SEQ ID NO: 261479 - DNA, 80 bp, Homo sapiens
gcccgtctgggccagccacctggtgtccgatgtgaagttcatttccaatccgccctccatggtggcagcggggagcgtgg

SEQ ID NO: 261480 - DNA, 74 bp, Homo sapiens
ttagtcgtttatttcttccgagttagaaatcctacaaaggaccttattgagaggatccagaatccagatctctg

SEQ ID NO: 261481 - DNA, 89 bp, Homo sapiens
gcgcctcgctggggcggggaccttgccttgcccgggcagcagccgctcttctaaaacattcaaaccaaagaagaatatccctgaaggat

SEQ ID NO: 261482 - DNA, 75 bp, Homo sapiens
acggcgagagtgggcgagaacgtccactgcgggccggcgaaagctggagccgaggaggtgctgctgctggcccgg

SEQ ID NO: 261483 - DNA, 90 bp, Homo sapiens
cttggactacatctttctcgggctcaggaggaaaggtcccggagagagcgagtgcgtcagtctcgaatggacacagatctggaaaccatg

SEQ ID NO: 261484 - DNA, 75 bp, Homo sapiens
cgtcagtccctgctctgtgcgcgcctccatctgggccatggatggcctctgaagagccaatccattcaggatggg

SEQ ID NO: 261485 - DNA, 73 bp, Homo sapiens
tttgcaccgagatcttggaccagacactcgacctcctgacctctgaagagccaatccattcaggatgggaaac

SEQ ID NO: 261486 - DNA, 135 bp, Homo sapiens
tcacagtgggtccgaaactgggctgtgtggcgctactttcgagactactttcccatccagaccagtgaagaagtgatgtctttgatgagttccctgagagttcccagccagtggcagagaaatatcacatataag

SEQ ID NO: 261487 - DNA, 89 bp, Homo sapiens
gttgaccactaatataatggaaattttgagaggcgatttttcctcagccaataaatgtgaggaaattatcaggaaaggaggtgaaacat

SEQ ID NO: 261488 - DNA, 106 bp, Homo sapiens
catggtagctggggaaagaggaacaagtggggacataagccttttaacaaggaactctttttacaggccaaccgtttccctggggagatggtaaccatactctatt

SEQ ID NO: 261489 - DNA, 90 bp, Homo sapiens
ctttttattacagaagaagattatcagtgctgtccccggcataggtccatctctgcagaagccatttcaggagtacctggaggctcaacg

SEQ ID NO: 261490 - DNA, 90 bp, Homo sapiens
cgcacatggattcggtagaactttgccttcctgaatctttttccctgcactacgaggaagagggccattaagtttaatgatggcctgagc

SEQ ID NO: 261491 - DNA, 50 bp, Homo sapiens
ccagggaactcaaacagcagatgcaggtatcatgatattagctggtttga

SEQ ID NO: 261492 - DNA, 100 bp, Homo sapiens
atcgaggtgaatgggagcaagattggcccagacaacctgccttatgtccagatcttgaaggatcgtgtgggtggacgagttgccacatttcgcaaaggaa

SEQ ID NO: 261493 - DNA, 100 bp, Homo sapiens
tttttctcctatttcagcagttggccacaacttcattgctgggaaaaggtggacaacacaaaggttaccatgaaggaaatcttactgaaggcagtgaagc

SEQ ID NO: 261494 - DNA, 75 bp, Homo sapiens
gtgcaaacccgagagaactggattgttgaacagataaatacgaaactgccatcatcatttgtagaaaaactgttt

SEQ ID NO: 261495 - DNA, 75 bp, Homo sapiens
cgcacctgcagctctgctgagagagtgcaagccgtggggaactcttggtgtaataacagaagctacaataaaaat

SEQ ID NO: 261496 - DNA, 98 bp, Homo sapiens
acagttacgcttcgtcctccacctctccctccaacttcgacatcagcgaggatgacattgatgatggattcaggagactgtttgcccagttggcagga

SEQ ID NO: 261497 - DNA, 100 bp, Homo sapiens
atggtggtggtcatatcaatcatagcattttctggacaaacctcagccctaacggtggtggagaacccaaaggtaaaaaacgccgctgctaacgttctca

SEQ ID NO: 261498 - DNA, 75 bp, Homo sapiens
gatcgtcttcgagagtttctgcatcgtggggaaaagaagagtcatgttctctttcgaggccggccgccgctgccc

SEQ ID NO: 261499 - DNA, 74 bp, Homo sapiens
tccagtggaaccacatgggatatcccaagtagtacccgtcttccagccagccccagtcggcgccatggcgtctg

SEQ ID NO: 261500 - DNA, 74 bp, Homo sapiens
ttcaagaggcagctgcgtatttaaaaattggaggtggacacaaaggaagaggcagccagacagctacttcagcg

SEQ ID NO: 261501 - DNA, 97 bp, Homo sapiens
aacaccaccttcatctccaccatcggtgtcatggagaaactccagctgggcccagagattctgcagcgggaaaatccaaggcttatttatgccaggc

SEQ ID NO: 261502 - DNA, 50 bp, Homo sapiens
gctggatattgatgcgccagtcactgcgtcatcacgtagacataaccaag

SEQ ID NO: 261503 - DNA, 49 bp, Homo sapiens
cgccaagtcgggtgacaatctggcagagccaaatatcatgcagcttcgt

SEQ ID NO: 261504 - DNA, 100 bp, Homo sapiens
ttccaatggggtaactgaaatacttcagaaggatgcagctagctgcatgacagtccatgacaagacagttctcgttcacacaacagagacagctcgtctt

SEQ ID NO: 261505 - DNA, 74 bp, Homo sapiens
gcagatgatgccccctatgggagggccaccaatgggacaagagccgtgccgctcttggccaccgaaagcgtcaa

SEQ ID NO: 261506 - DNA, 88 bp, Homo sapiens
tttctaccaaactctggctggagtcacacattgtagctacagcaagctgggtagcaggcagatccaaaggatatcatgaagtttccag

SEQ ID NO: 261507 - DNA, 82 bp, Homo sapiens
cggcttcggagcgggagtgttcgttgtgccagcgactaaaaagaggtgcctgtgtcagtggccatgatgactccccaggtga

SEQ ID NO: 261508 - DNA, 100 bp, Homo sapiens
aatgtacttgctacagcccctgacaaaaaaaagcagaaattgctagaagaaaacgttagtgctttcaaaacagctggagaagaagcaggcgctccctcca

SEQ ID NO: 261509 - DNA, 127 bp, Homo sapiens
ggctgccttccctgacccccagttacgcctggaatatgaaggcttccccgtcccggtctggctctgggagaggagtggacagcagctggttgagatacatccccatctggagacaggactgccactg

SEQ ID NO: 261510 - DNA, 73 bp, Homo sapiens
gcttcgaaagcatcatccacgagttcgacccgtggtgcctatggtcctgagcactgggtcacgtctagtgtca

SEQ ID NO: 261511 - DNA, 75 bp, Homo sapiens
agagctcagacatgttctcaccacccttggttctgaagatgaaacaagaatagatatgcaatatcctgctcagca

SEQ ID NO: 261512 - DNA, 100 bp, Homo sapiens
tggacatccccaaaattgacatctatcattatgaattggatatcaagccagagaagtgcccgaggagagttaacagggtcccagggctggtggttgcttt

SEQ ID NO: 261513 - DNA, 83 bp, Homo sapiens
gaccacatagacatttacgcggatgtcggcgaagagttcaaccaggcctggtactgtggcgctccgtgaaattagacgttatc

SEQ ID NO: 261514 - DNA, 51 bp, Homo sapiens
agagcgctcccaggagaaacaacacaagctccgggtggataaggcagctgc

SEQ ID NO: 261515 - DNA, 100 bp, Homo sapiens
gcggccgctctctgaagaacctccgagtacgaggtcgtttaggccaattgggtttgaaagaaggatttccatctgctgtgaaaaatattagttcggttat

SEQ ID NO: 261516 - DNA, 100 bp, Homo sapiens
cgacgcggggcccatggccaggaccaccagccagctgaacaccttccaccatgaccacctcagcaagttcccacttaaataaaggcatcaagcaggtgta

SEQ ID NO: 261517 - DNA, 76 bp, Homo sapiens
tttgactccttgctgaatctgagcagccgccagatcccacccttggacccccatgaaaatggaaacaatggaacaa

SEQ ID NO: 261518 - DNA, 76 bp, Homo sapiens
gaaggagagaacagaggaacctatggagacagagcccaaagatgactccaatgatatgtgggaggaccaggaggag

SEQ ID NO: 261519 - DNA, 99 bp, Homo sapiens
atgggcaccaccatggcgaccacacagggcacctttcacagccagcaggcattggaatatggcaccaaactcgttggaggaaccactccagggaaagga

SEQ ID NO: 261520 - DNA, 100 bp, Homo sapiens
agatgattcgctatacccgatcgcggttttaatcgacgagctccgcaatgaagacgtgcagctccttccagggagatactacagcaaaccttttgttaca

SEQ ID NO: 261521 - DNA, 75 bp, Homo sapiens
gatatcttcagcgaaagtgaaaccaggatagaagcagatttgggatatcctggaggtaaagcaagaattattcat

SEQ ID NO: 261522 - DNA, 80 bp, Homo sapiens
aagtttgaaactcctgcaccaaactattacaattgtggcaaaggagcagagaactttgacaagttcttcacacgaggaca

SEQ ID NO: 261523 - DNA, 126 bp, Homo sapiens
caagcaccacgcggcctacgtgaacaacctgaacgtcaccgaggagaagtaccaggaggcgttggccaagggacacagcattgttggttttgccatgtactattttacctatgacccgtggattgg

SEQ ID NO: 261524 - DNA, 82 bp, Homo sapiens
gctcacttgcatgtatttggaacaaaaaaaggagatgcctggcagccccgctctctgcagggacggcaaaacagaacagaaa

SEQ ID NO: 261525 - DNA, 76 bp, Homo sapiens
tggatctctctcgattcagtccctgcaagaacctgcattggaaagtcgagatggtcgtgtggacagctggcgaaac

SEQ ID NO: 261526 - DNA, 75 bp, Homo sapiens
gagatatctggccgcctctgccgcagctggaggcccacgaggactcggagaagctgcgggagatcgtactgccca

SEQ ID NO: 261527 - DNA, 74 bp, Homo sapiens
cacagtattcgacatcaaatacaggcctacttggatgattgtcaccggaggtatagctgtgcccactgccgcgc

SEQ ID NO: 261528 - DNA, 85 bp, Homo sapiens
gaatgagctcttcaacaagactgcggccaacttggtagtggaaactgggcaggtggataagattgtggaccagctgcagcagtta

SEQ ID NO: 261529 - DNA, 100 bp, Homo sapiens
aacagggcgactgctaatcagtcacgaggctcccttgacaggcggctttgcatcggaaatcagctctacagttcaggtgcttatggaaactctgggtgct

SEQ ID NO: 261530 - DNA, 97 bp, Homo sapiens
cacccccagtgggtgctcacagctgcccattgcctaaagaacttcataaacaagcagatatgcaagaagagaaaaaccgaatcgaaagagtccttgg

SEQ ID NO: 261531 - DNA, 110 bp, Homo sapiens
gagctctatgtgttcttagtagatcagatgcatgtagccctaaaccagtgcagtgtgccctgaaccgccctgccttctttgctgagaggctctactatgctatgaaaggt

SEQ ID NO: 261532 - DNA, 76 bp, Homo sapiens
tcttcccttcgctccggcccggtgaaactgaacttataatcgtcactggattggaagacatgtaaggaatttgcat

SEQ ID NO: 261533 - DNA, 100 bp, Homo sapiens
aaaatcccagatctacctgacgggcctgcgagggttgaagattgtgaagcaatagcctaaggaagaggaggctgcaaaatgggcccgggaagaagaagaa

SEQ ID NO: 261534 - DNA, 90 bp, Homo sapiens
gaagatggcgcttgacggaccagagcaggtgcatccagatcaacaccgactccagcctcctcaactccgagttctgcttcatcctcaagg

SEQ ID NO: 261535 - DNA, 75 bp, Homo sapiens
cgggcctcctctgggagctcattaggaccatggtggatcgggcagaggcgatcccttggttccagtaccccatta

SEQ ID NO: 261536 - DNA, 50 bp, Homo sapiens
cctcggaagagcgctcccaggagaaacaaacaaatttacatgtattggag

SEQ ID NO: 261537 - DNA, 75 bp, Homo sapiens
ggtcctcataatcttacttatcctctaggtcccaggaatgaagaatctccctggaaaaggagacatgaatgtctg

SEQ ID NO: 261538 - DNA, 50 bp, Homo sapiens
gatggtcatcctgtctgtctgttcacagaactctcaaagatgaagacttt

SEQ ID NO: 261539 - DNA, 98 bp, Homo sapiens
tccgccctaatggaggtctccagtttcgatgtcaagccctccaacatcctagtcaactcccgtggggagatcaagctctgtgactttggggtcagcgg

SEQ ID NO: 261540 - DNA, 75 bp, Homo sapiens
tccaacaattagaagcaccttataacattcaatagtgcatgactagagagcttcaccaatctccatctggccgaa

SEQ ID NO: 261541 - DNA, 80 bp, Homo sapiens
actcctccaagaaccaacccccaaattggctgggacaggcacagaagatctctgatgatctgatgcagaagatcagtact

SEQ ID NO: 261542 - DNA, 83 bp, Homo sapiens
ccggtgcccgaggaggcagccaagctcgtggcctgcctctgcgtgcagatgccctgtatccaagcccaatatgggacaccagc

SEQ ID NO: 261543 - DNA, 75 bp, Homo sapiens
aggaaagggaaggagcaagccgtgaaactaattctgaagcaagcccttatagttgtgctgcagtggtgtttcaat

SEQ ID NO: 261544 - DNA, 115 bp, Homo sapiens
caactctggtatggacacagcttctagtgttgctttggatcttgtggaaagtcagagtgaccatggaggctggtggcctccccttggagctgtggcgcatgatcttagcctactt

SEQ ID NO: 261545 - DNA, 96 bp, Homo sapiens
gaaatttcaggaattaagtcaaccacgttctcataccagcctgaaggatggcaatgattcagatgaattcatgtaaaaggagaaaaggagaaaagg

SEQ ID NO: 261546 - DNA, 95 bp, Homo sapiens
tagaattctgcatcattacaactgatgaaaatgaatgtaattggatgatgtttgtgcgcaaagccagatttaaggaggactttttccagagtggt

SEQ ID NO: 261547 - DNA, 75 bp, Homo sapiens
cgaaggcaccgacgtcatcatgctgaccaccaatcagatccgtaagggttggggtgctggaggactgcttcacct

SEQ ID NO: 261548 - DNA, 90 bp, Homo sapiens
gagaataggacctgagagtatattgggctaaggaggagagctgccactgcagagccccgccatggaagacacgccgttggtgatatcgaa

SEQ ID NO: 261549 - DNA, 83 bp, Homo sapiens
ctgcaggcggcccactggcagttcgagcgggagatacagatgacccaccaagaattactcagaaccctgtgatcaatgggaat

SEQ ID NO: 261550 - DNA, 96 bp, Homo sapiens
cgagcacgagcggatcttgcaggagatcgagagcaccgacaccgcctgtgtggggcccaccctccgcctgccacagtgactcaggtcactcaagga

SEQ ID NO: 261551 - DNA, 86 bp, Homo sapiens
aaggttaattcgaaagtcttgtggaagatctggaagaaacagattcctgacattcagacaactgacttgtaactgacttataactg

SEQ ID NO: 261552 - DNA, 84 bp, Homo sapiens
gatgtctacttcgaagactggcaagcacggccacgccaaggtgctccttgtcttctgagatgttgggcccctcttgggatggag

SEQ ID NO: 261553 - DNA, 83 bp, Homo sapiens
tacccatactcccagaaacgccagggatgagggcgctacaggcctcagctccaaatgagaagatgaagcaagtgttaaagaag

SEQ ID NO: 261554 - DNA, 100 bp, Homo sapiens
ggggaaggaactttgggtcctgaatcttctgggagctgaggaaccagatatcttgaaaagctgccagaaaggtagtgggcagcagtcagtgacaggtgta

SEQ ID NO: 261555 - DNA, 75 bp, Homo sapiens
cattccgtatgacccacagataacagcggaagaattagctgaaaaggttgctatcaagatcatagataagaccca

SEQ ID NO: 261556 - DNA, 85 bp, Homo sapiens
cttggactgagtcctgcaggacacagcttaaagcttttcaagccaggccaagaagctgtgaagtaccagggtcctcgggacttcc

SEQ ID NO: 261557 - DNA, 83 bp, Homo sapiens
ttcgtcttagccacgcagaagtcgcgtgtctagccctggtccagcgcctccctctctcagcatggacgaggagagcctggagt

SEQ ID NO: 261558 - DNA, 100 bp, Homo sapiens
ctattcctgcatggcgggaaacaagtctggagatgtaaaatatgtgacttacatggttaatgtacttggtttttctattgggaaagctactgatcggatg

SEQ ID NO: 261559 - DNA, 74 bp, Homo sapiens
ctcaggaatttatggtcgcctttttgaatgaggtcagagctgaagtcctcacgacgtttgccctctgtggattt

SEQ ID NO: 261560 - DNA, 87 bp, Homo sapiens
agtcagtctgttgatgaaactatatatcagacaccccgaagaactttctctcttaaagaaacccagagatccaacaaagaaaaaaaa

SEQ ID NO: 261561 - DNA, 90 bp, Homo sapiens
ggcgggaccatgttcaccagcaccggctccagtgggctctgggtggcactgaatcaacaagacaagcaactcaattgattaatgctttga

SEQ ID NO: 261562 - DNA, 90 bp, Homo sapiens
gttccaccttcagagcgtcacggcgtacgccctcatggggaaaatctccccggtgactttcagtctgttggacgagctcccccagtcagt

SEQ ID NO: 261563 - DNA, 74 bp, Homo sapiens
ctacacgccgccgcttgtgctgcagccatggtatggtgctgggtgcagatgcagtgtggctctggatagcacct

SEQ ID NO: 261564 - DNA, 75 bp, Homo sapiens
ggtggttgatggcgccttcaaagaggtgaagctgtcggactacaaaggtatgaaaatgaaagtcttcagaatgga

SEQ ID NO: 261565 - DNA, 90 bp, Homo sapiens
cattgatttgatgcataaaggcagctttgaaacagtgaaaaattagacgatttcaagaattggagctgaatctgatgttaagtaatggca

SEQ ID NO: 261566 - DNA, 90 bp, Homo sapiens
caaggaatcaacatttaccgaaagccacccatctacaaacagcatgacctcttaagtcatgaaaatgcagcaacgctgaatgatgtaaag

SEQ ID NO: 261567 - DNA, 100 bp, Homo sapiens
gcgcgagcgccctgcagcgcttggtagagcagctcaagttggaggctggcgtggagaggatcaaggagccaaagtgaatgatgtggttccatgggtgttg

SEQ ID NO: 261568 - DNA, 75 bp, Homo sapiens
agcgaggagtcagaaactcagccactggttgccttggtaggcaataaaaatcctgaggtgcagaggcaattcccg

SEQ ID NO: 261569 - DNA, 100 bp, Homo sapiens
cttatatcgccagtccagcagctaaggatattttgtgcagggttttggccaaattgggcgagggcacaaaataaccacttaccccttctcaccgaggaag

SEQ ID NO: 261570 - DNA, 75 bp, Homo sapiens
cgttcacagagctagccggacgtcctccgactcaaggttaccagcacaactttgacacctatgatgatagcttaa

SEQ ID NO: 261571 - DNA, 100 bp, Homo sapiens
gaaatagctcatgggaacccagaagaggtgacggaggaaggctgaacaaggacctgcgacattttctcaatcagcgattccagaaggggtctcctgatca

SEQ ID NO: 261572 - DNA, 82 bp, Homo sapiens
cgtgcacgagaccggctacttctcggcgctgccgtctctggaggagtactggcaacagaggccgagcacggctacgcctcgg

SEQ ID NO: 261573 - DNA, 100 bp, Homo sapiens
ccctgcagtacctgcagaaggtctctggagacatcttcagcagctagtgtcagcagtgggatacctgcgcttgaaggacatcatccaccgtgacatcaag

SEQ ID NO: 261574 - DNA, 83 bp, Homo sapiens
cacggagaaggtgaactgtctggataagacatgagcaccagcctccaggaaggccaggaggacgggccggcaggatggagagc

SEQ ID NO: 261575 - DNA, 80 bp, Homo sapiens
ggccacgggatcctcatgttcactacccttcatgcatgaaagacaaagctactcagtataacaagaggattgcctgatcc

SEQ ID NO: 261576 - DNA, 96 bp, Homo sapiens
ggagtggcgcccggcgaggtagcgccaggcgaggtgctggagaatctggtaaaagcaccattgtgaagcagatgaggatcctgcatgttaatgggt

SEQ ID NO: 261577 - DNA, 100 bp, Homo sapiens
gcttatcggcgcaggccagtgcccatcaaacgcttcaatggagacgtcctctccccggctccgccccccagcgtcccgtggccatgacgaccgctcagag

SEQ ID NO: 261578 - DNA, 82 bp, Homo sapiens
ccaacgcctggctcggagcagcagcctctgagacatttatgcagtgtgtgattctttctaaaacaactccctggaagagagg

SEQ ID NO: 261579 - DNA, 90 bp, Homo sapiens
agaacagacaccccttcaagaagctttgaatcaactgatgagacaattgcagagtggaagagaaagccaatacccacctcctcttgggca

SEQ ID NO: 261580 - DNA, 95 bp, Homo sapiens
cgccgtcgccgtcgccctcccagaatgacatccacgacagcgatggcagttccagcagcagccaccagagcctcaagagcacagccaaatgggcg

SEQ ID NO: 261581 - DNA, 100 bp, Homo sapiens
tttgggtttagcacgatgagctcaatcggcactgggtccaagtggtaagaagttcagaagcaagcctcagttggcaaggtacctgggaaatactgttgat

SEQ ID NO: 261582 - DNA, 51 bp, Homo sapiens
ccttgaatggcgactagatgtacagaaaacccgcctagtgccaagcaaccc

SEQ ID NO: 261583 - DNA, 100 bp, Homo sapiens
acccggcggcctctcattctgcagctcatcttctcaaaaacagatatcagttttagagaatgtggcgtggagaaattctcaaggaaagagtaaaatgctg

SEQ ID NO: 261584 - DNA, 90 bp, Homo sapiens
caagaaacagaagcttttgtagaggaacctagtaaaaagggagcacttaaggaagagtgttgtagaatatttgagcacaggtggagtaga

SEQ ID NO: 261585 - DNA, 143 bp, Homo sapiens
gccacatctcggagcaactgaggcgccgggaccggctgcagagacaggcgttcgaggagatcatcctgcagtgtccaagccttgtcatcggccagtaagtttgaagcagagttgaaagctgagcaagatgagcggaagcggga

SEQ ID NO: 261586 - DNA, 100 bp, Homo sapiens
cccatccagactgtttgatgctgaacttcaccgttaaggatgactttgacaacgatgtggatgctctgctggaagaaggcctttgtgcccccaaaaagag

SEQ ID NO: 261587 - DNA, 114 bp, Homo sapiens
gttgcgggccccgggacctgggctgggaacccgcggtggagcgggacacgaacgtggtgagaagccctaccactgcaactgggacggctgcggctggaagtttgcgcgctcaga

SEQ ID NO: 261588 - DNA, 83 bp, Homo sapiens
cgttactatgtggatgttccacaggaagaagtgccattcagtattctaccttgtaaatactgttatttgtatatactgtaaat

SEQ ID NO: 261589 - DNA, 82 bp, Homo sapiens
tcctttagcagcagatgagagtgcaccccagagggttctattgcccacacaaaaagtttcttactgaagtacttcttcctat

SEQ ID NO: 261590 - DNA, 82 bp, Homo sapiens
ggaagcagccgatccagcctgcggagcctgtggggcaggcctctccatggtgcagttgaaaatgattgtttggaaattgtcc

SEQ ID NO: 261591 - DNA, 99 bp, Homo sapiens
tcctgccgtcttcctatccttacccgacctcagatgctcccttctgctcctggtctctgcatggattcccccagccctatggacccccacatggcggag

SEQ ID NO: 261592 - DNA, 97 bp, Homo sapiens
caccatgttcacgtgacatcaagaggaagcggaaaccagtggccacagcatctttgtctagccccagtgcaggacgtgttcctcatgatccggcgcc

SEQ ID NO: 261593 - DNA, 75 bp, Homo sapiens
gcgagaactgcgcagacctggtggaggtgttaaatgaaagcgggctggtccgagtctctgttttggaagctcaac

SEQ ID NO: 261594 - DNA, 75 bp, Homo sapiens
gcaagatgcggaggctgcctcggcggagcagaggaaccacacgctgatcatggtttcccaggcagctgcagactt

SEQ ID NO: 261595 - DNA, 75 bp, Homo sapiens
agaggtaattcacttgaacaactttcactgccatcggggacaagcaatgcagcaagtcttggaaaaccttacgga

SEQ ID NO: 261596 - DNA, 75 bp, Homo sapiens
cccgagatcttccagaagcttcagggggcagagtcacaaagctgtaagaaatgcagagcaaagcggcagtccccg

SEQ ID NO: 261597 - DNA, 100 bp, Homo sapiens
tttctggcctggaggctatccagcgggctttgttatgcacctaaagccatattggaagctccagaagaaagagcaccccccggaagtcagcagggaaacg

SEQ ID NO: 261598 - DNA, 75 bp, Homo sapiens
gctgaatgaaaaattcaagctgggcctggactttcccaatctgaataaatctgctgtcttgcgcaaggccatcga

SEQ ID NO: 261599 - DNA, 100 bp, Homo sapiens
gcgggggcagcctcagagcggggaggtggggaagacagggctccagctaccacaggacgggctctgggtatagccgttccagtcagggacagccgtggag

SEQ ID NO: 261600 - DNA, 75 bp, Homo sapiens
ctgtggagacccacctgctcaggaaccctcaccttgtttcggactataggttgatgttgatgaatcaacacttag

SEQ ID NO: 261601 - DNA, 100 bp, Homo sapiens
aaactgaagcaaaagatcagcgaggagcagcagcagctccagcaggcgctggctcctgctcagggcctggattccttctgaaaacattcaagatatcaca

SEQ ID NO: 261602 - DNA, 51 bp, Homo sapiens
gcaatttgcaatctttgcattagaggatctgaagaggcaaaatgcagtatt

SEQ ID NO: 261603 - DNA, 100 bp, Homo sapiens
acttcggaatgcactacaacaggaaaatcatattatagatggagtaaaggcagaatccagagaccacatttgaagtatatgttgaagtggcctatcccag

SEQ ID NO: 261604 - DNA, 75 bp, Homo sapiens
gagaaattaaggaaagaattttctccttttggatcaattaccagtgctaagtgtggggatgtgccaactgccgag

SEQ ID NO: 261605 - DNA, 51 bp, Homo sapiens
gtccagcccagcgattctcagtcagttctcttgcaactagcaagtgaagcc

SEQ ID NO: 261606 - DNA, 82 bp, Homo sapiens
agaagaccgaagcgttcgtatctggaagcagttggaattgatcacaccttttcagttgtacttcaatcctgaattaatcttt

SEQ ID NO: 261607 - DNA, 98 bp, Homo sapiens
gtcgggcgcgggcaaggccatcggcgtcctgaccagcggcggcgacgcgcaagaaggacactcgtgaagtggtagccataaagtgtgtagccaagaaa

SEQ ID NO: 261608 - DNA, 83 bp, Homo sapiens
cagcggcagccgagcccgcccgcgcgccgataacgaaggaggcccaacttcattcaataaggagcctgacggatttatcccag

SEQ ID NO: 261609 - DNA, 100 bp, Homo sapiens
ccgcgccccacttgctcgtgcactttacacacatgagggtgacttttaaatatgacggctccaccatcgtccccggcgagcagggagcggagtaccagca

SEQ ID NO: 261610 - DNA, 83 bp, Homo sapiens
gaccagattgcccctgagagtgactattccctgagggtaagttctcttctacgctgtatgagactggtggctgtgatatgtca

SEQ ID NO: 261611 - DNA, 82 bp, Homo sapiens
cctggatgaggctactagtgccctagatgtgcagtgcgagcaggccaagtttgcctgcaatggtactgtaattgagcatccg

SEQ ID NO: 261612 - DNA, 75 bp, Homo sapiens
tgaacttcaacccatccaatccctactgcaatggtttgaagatgccgcatttggattggatgaattccaaattct

SEQ ID NO: 261613 - DNA, 98 bp, Homo sapiens
tggtcacagaagtctctaccaatggtgcttcagaagtttcatactttcaggtaaaggccgaggggcaaagaaaaggaaagcatctggctctgaaaatg

SEQ ID NO: 261614 - DNA, 75 bp, Homo sapiens
tccccaacaagaggaaagacacacctaccaagaagccagtcaagcggccaggggacggcaaaacagaacagaaag

SEQ ID NO: 261615 - DNA, 85 bp, Homo sapiens
cgagcccagcgtcaacttcctcaagtcgcccaaagagcgcatcagcgaggaggtggggctgctgcagctccttggggaccccccg

SEQ ID NO: 261616 - DNA, 74 bp, Homo sapiens
ccctggtcttgctcggccgatgaagtgcagaggtttttttctggaaaaatgccagctgtgggacaaggagtgca

SEQ ID NO: 261617 - DNA, 75 bp, Homo sapiens
ccacccctcaccacacaccccagatgatgaactacttccttgagacgagttgtactgctgtcacaggaaatggac

SEQ ID NO: 261618 - DNA, 50 bp, Homo sapiens
cggaaatgtagccagtggggccgccaggtaagtcaaatctcatggatgcc

SEQ ID NO: 261619 - DNA, 75 bp, Homo sapiens
gggcgccgcgtccctgcacagcccgccgcagagaaatgactgctgtccatgcaggcaacataaacttcaagtggg

SEQ ID NO: 261620 - DNA, 90 bp, Homo sapiens
cccaagaaacatctcaccaatttcaaatccgctcagaggctgagaatggtgtggaggagaaaaagaaagcctgcaggtcgccaacagccc

SEQ ID NO: 261621 - DNA, 100 bp, Homo sapiens
cttcaagaaagtacctcgtctcaaaacctggctgctatcagagaagaagggtgtttggggtgtgttttacaaagcccaggatccggttgtggccgtggct

SEQ ID NO: 261622 - DNA, 75 bp, Homo sapiens
tgttaaggattccaagtaactcttatttgaatccacattcatctcaatggaaggatcctgccttaagtcaactta

SEQ ID NO: 261623 - DNA, 50 bp, Homo sapiens
ttttcttatgcttataagagtggaacagatcatggaagggaagtggttgc

SEQ ID NO: 261624 - DNA, 100 bp, Homo sapiens
aacagaaccaaggagctgcgctgctacagatgttaccacttctgtggctgctaccccactcctgggccgtccctgaagggactttgaacatgtcggggat

SEQ ID NO: 261625 - DNA, 100 bp, Homo sapiens
ccagacggccagaaagttccgccatgagctggggcacggagctgtggctgctgcctattcacactctgaggcttggtgtggaagtggattcctttgatgg

SEQ ID NO: 261626 - DNA, 100 bp, Homo sapiens
gtttgagtacgaagggtgcaaagtgggacgcggcacctacggtcacgtctacaaggcgaggcggaaagatggagtgtgaacatggctacgcctcttcatt

SEQ ID NO: 261627 - DNA, 90 bp, Homo sapiens
tggaactatacacctctgcatgaagctgctattaaagggaagatcgatgtgtgcattgccaaacatcatgtcaatggcaacagaacagtc

SEQ ID NO: 261628 - DNA, 100 bp, Homo sapiens
aaaattaaaaagcttaaagaagacatttcacagggggtacacatatctgtatataggacaatccggggctcagagctgcctgttttggagcggatttgcc

SEQ ID NO: 261629 - DNA, 100 bp, Homo sapiens
ctgagttgcctagtcgcggctacggcgtcatggaggagatccggcggcagggcaagctgtgcgacgtgaccctcaaggtgctgaaggagaagaagcaggc

SEQ ID NO: 261630 - DNA, 103 bp, Homo sapiens
cgggaggcctcggaggaggacctgctggtggtgcacacgaggcgctatcttaatgagctcaagatccggggatttctttcacggtttgataatgtccttcccg

SEQ ID NO: 261631 - DNA, 75 bp, Homo sapiens
tgcctctgcagggcttcaaagcattgcaagctcccctactttatgaatgagctcactctgacggaacttgacatg

SEQ ID NO: 261632 - DNA, 75 bp, Homo sapiens
tctgctcctagccaagatctcctcatcacaaaggaggctgtgctggatgcttttctggatgatggcttccttgtc

SEQ ID NO: 261633 - DNA, 101 bp, Homo sapiens
cagcagaaaatcaaaacaagctctttatgagaatggcatctaaggagcgtagagtggcagctctccaagaaattgttcgactcctgagaccaggtgggaag

SEQ ID NO: 261634 - DNA, 74 bp, Homo sapiens
ggagaagaacatggcggtcatgaggagccgagacctccaactcgaggtggcaatggctacatcaatgactttcc

SEQ ID NO: 261635 - DNA, 83 bp, Homo sapiens
gtgcccgctttgttcagctgcagcatggagagatagataaacggacctgcctagagctggaacgttacctccagagcgagccc

SEQ ID NO: 261636 - DNA, 100 bp, Homo sapiens
gtggttctcaaatataggcattctgatgggaacttgtgtgttaaagtaacagatgatttagttatggcagttaaacagggaaaccaactgcagatgcaag

SEQ ID NO: 261637 - DNA, 100 bp, Homo sapiens
gtaatattaaacacatgaggaaacagcttgatcgtctgggcctgtgtttcagctgggataggtatgttcatgcggatgctcctaccaataaaacactggc

SEQ ID NO: 261638 - DNA, 100 bp, Homo sapiens
gcggctgcggtggcggcgggtggaccgattgtcgctcggcggcgggagtcggacaagaggaccctgccttggtgtgagagtgagggaagaggaagctgga

SEQ ID NO: 261639 - DNA, 100 bp, Homo sapiens
atgaagttgaccatgacaatggcactgagcctcataccagcgatgaaggtaagtgcggcagaagcctggcgcatgcgcagtacaagcccttaagcggcgc

SEQ ID NO: 261640 - DNA, 100 bp, Homo sapiens
cccacccacagacggccttctgcaattccgacctcgggccaagccagaagacccttccctgctggaggatcccaagattaaggagattgctgcaaagcac

SEQ ID NO: 261641 - DNA, 100 bp, Homo sapiens
ctctgtgcggagactgggcggccggccgacccttcctgtcgctgacggcgactgcgggaggccagaatacagttgagttttgccaaatttgacagttcac

SEQ ID NO: 261642 - DNA, 82 bp, Homo sapiens
gccaagggaccaaggtggaaatcaaacgaatgggaagtggtagtgctggaaaagaaggggggccctttaaagctcttttaag

SEQ ID NO: 261643 - DNA, 100 bp, Homo sapiens
cagagaggacgtttccaactcaaactccctcgtgaaagatgcttctgttcctctgattgatgttacaaacctccctactcctcgaaaattccttgatacc

SEQ ID NO: 261644 - DNA, 100 bp, Homo sapiens
cttcactactggaattgttgtttctgcctttggatttcctgttattcttgctcgtgtggctgtggccatccggctgtccttagagcaagccctgcctcct

SEQ ID NO: 261645 - DNA, 90 bp, Homo sapiens
ccgccaactacctgctctgtaccaactgccggaaagtgctgcggaagctctaagcgaaagacatgaggcctcagcctgaaatgaggttgt

SEQ ID NO: 261646 - DNA, 87 bp, Homo sapiens
acaccacaataatccacagccaagtttcaccagtgatcattaaagaatgggcagcttacaaaggaaagtctcctcaaaccccggaac

SEQ ID NO: 261647 - DNA, 75 bp, Homo sapiens
aacaccgagcccatcaccgccaagagtgctgggtaggccaggtttcagcatcgcagacaagaagcgcaggacagg

SEQ ID NO: 261648 - DNA, 75 bp, Homo sapiens
gaagaacggaaacgaaggcggaaaggatccaaggagggtgaaaggaagcatgtttacaccaatgccaaaaagcag

SEQ ID NO: 261649 - DNA, 95 bp, Homo sapiens
acgattcagagactgaaaaacctgaggctgatgacccaaagaacaccttccaccatgaccacctcagcaagttcccacttaaataaaggcatcaa

SEQ ID NO: 261650 - DNA, 75 bp, Homo sapiens
ttgaaatttttaagacacgctgcaacaaagcagccatcactggtgcaagctatatttaacggagatcctgatgaa

SEQ ID NO: 261651 - DNA, 50 bp, Homo sapiens
gccaggggaccaagctggagatcaaacggctggggagcagaataccaccg

SEQ ID NO: 261652 - DNA, 131 bp, Homo sapiens
aagagatttatggcagcctcactcccagtagtttctgcatttagtgagataaggaaccttttgaggatggctttgcaaatggggaagaaagtactccaaccagagatgctgtggtcacgtatactgcagaa

SEQ ID NO: 261653 - DNA, 100 bp, Homo sapiens
gcgactacgaccagtgaggcggccgccgcagcccaggcgcgggggcgacgacagttgacgaaggatcagagattggtgtattcgggcagactgcttcccg

SEQ ID NO: 261654 - DNA, 100 bp, Homo sapiens
acccatggcgctgaagaggattcagaaagcgtctacggtgacgtgcagcgcgtgaagatcctgttcaataagaaggagaacgccctagtgcagatggcgg

SEQ ID NO: 261655 - DNA, 74 bp, Homo sapiens
ttgtatagagatgtgatgttggagaactacagaaacctggtctccctaggaaactcccagtacagccagcagca

SEQ ID NO: 261656 - DNA, 82 bp, Homo sapiens
cttgctccgagagggagtcctcgcggacgtcagccaaggcgctgcgtacacctgcttggaggctgcaacggggcgggctctg

SEQ ID NO: 261657 - DNA, 82 bp, Homo sapiens
gggttgaaggtgatcatcatggacacagttttgacagtaattcttttgggccgatctgttattttgaaccacatggccagag

SEQ ID NO: 261658 - DNA, 74 bp, Homo sapiens
ctatccatttcaactacagatactttgaagtagaagaagctgatggccaaggcagaggcttcctcaggagacca

SEQ ID NO: 261659 - DNA, 120 bp, Homo sapiens
ggcacttcattggccacctacagaaacaaaatgtcaacaaattgatggatacagctgcccgtctttcatatcagaaaaatgctggatttcaagaatataccattcctattactgtaaaag

SEQ ID NO: 261660 - DNA, 73 bp, Homo sapiens
tcagaactgaaaagtgctgaaggatccatcagttacacaagtgacaagaaatgttccaccaggacttgatgaa

SEQ ID NO: 261661 - DNA, 83 bp, Homo sapiens
ctcgcgcgcgaccgccgaatcgctcctgcagcagaggaggcatacacggaatacctgaggagcatccactatatctcccaggt

SEQ ID NO: 261662 - DNA, 119 bp, Homo sapiens
ggaagacctgcgtcctttttcgtttttcggatgatgccttcaatactacctttatttccaccataggtctgtcagaaactgttggaatcttacataaagtcaagtctcagaaatgtccg

SEQ ID NO: 261663 - DNA, 75 bp, Homo sapiens
ggaggagccgcagcgccgggcgaccccgcccgggcctcgggttagaggatgcattgggctcagtgaaaattcatg

SEQ ID NO: 261664 - DNA, 98 bp, Homo sapiens
tcacagtttaggtctcaaggcaagcctattgagttaacacctctgccgctgctaaaaggtggatctcgagccagaggggaaagtatttgtggtaataa

SEQ ID NO: 261665 - DNA, 51 bp, Homo sapiens
gtgcttgttatgagctaggtaacctagggatcttaaggagcctacgtggaa

SEQ ID NO: 261666 - DNA, 100 bp, Homo sapiens
gcccagaggactttcttccagcttctgctgtccttctttgtggagagcaagaatcatgatgaaacctggaggaattacttttcagacattgacttcttcc

SEQ ID NO: 261667 - DNA, 83 bp, Homo sapiens
ggcgggacaagcgcgacgcccggcgcgagctcaagctgctgctgctcgatgtgaagttcatttccaatccgccctccatggtg

SEQ ID NO: 261668 - DNA, 75 bp, Homo sapiens
gaagatgatgttgtctacagaccaggagccctttagattatttctccctgtgacgctatcaagcagcctgggttc

SEQ ID NO: 261669 - DNA, 51 bp, Homo sapiens
gtcccttcttccacatgaaaaggataaggcagtatttggcagtcgtattca

SEQ ID NO: 261670 - DNA, 98 bp, Homo sapiens
ccgtgccccgaagacataaatccctgagtgcccgggaggagccttaacaagcgcacggagccctcaaggaaaatgtttataggaggccttagctggga

SEQ ID NO: 261671 - DNA, 100 bp, Homo sapiens
gcaaagaatccagtgggagagagtcaatggcctgcttgacgtgaactccaaagtcctcctggtgcccctgggcgctgggattgctctagcctgtaagtat

SEQ ID NO: 261672 - DNA, 101 bp, Homo sapiens
cacagtgtcggaccccaggactcaccccaagggctacaccgagtacaaagtaaccgcgcaggaagccagcagacctgcagaacttggctcccgggacccac

SEQ ID NO: 261673 - DNA, 75 bp, Homo sapiens
gttttgcagtatgaccctcccagcaatgcaagatccatgaagctaatgtacaaggagtcaggggtgtttgaaggc

SEQ ID NO: 261674 - DNA, 97 bp, Homo sapiens
gctgaatgggctgaaggaggaggacaaagagcccctcatcgagctcttcgtcaaggctgaccggttccctgatgtgttacctgcttctgctactgat

SEQ ID NO: 261675 - DNA, 100 bp, Homo sapiens
caacacccacactcagccactgcgggcgaggagggcacaaggccaggttcccaagagctcagggatcactgagattctgatgaacagaccttctgcccgc

SEQ ID NO: 261676 - DNA, 98 bp, Homo sapiens
ttttctttccttcctgcattttcagcaggttcccttgcgtcagaagcccaggaggaaaactcaaggacgtgtttgagatgaggtttgccaagatgcca

SEQ ID NO: 261677 - DNA, 75 bp, Homo sapiens
aggcggaggcgcccaccctctatctgtggaagactggtaagccttcccagtgatccaagctgtgttgaagaaatc

SEQ ID NO: 261678 - DNA, 82 bp, Homo sapiens
ggggcctcccgcgccccccgggacccccacgccgccgccagggaaaggcaggtatggtgaggtgtggaggggcagctggcaa

SEQ ID NO: 261679 - DNA, 100 bp, Homo sapiens
tggaaagttagagtggacctacctgataaataccctttcaaatctccatctatagaagctgtatggaaattctgaccaaacccctttccaatcatgagaa

SEQ ID NO: 261680 - DNA, 100 bp, Homo sapiens
gtgcgtctgccgcagagtcggcacctgaaggacatggaggaaccgtggagcatgcaacacatcccggcactgttttcggccttctgtggcctcttggtcg

SEQ ID NO: 261681 - DNA, 83 bp, Homo sapiens
gagcacccgaggtcatccttggcatgggctacaaggaaaacggtggtcttcaagctgacagagaagctgacggaacagaagga

SEQ ID NO: 261682 - DNA, 100 bp, Homo sapiens
cctttgtcatcccactggagcgatcccgcaaggctggtttcttcttacccccggatgaatatgtggtgaccgaccctgagcaagagaagaactttggctt

SEQ ID NO: 261683 - DNA, 100 bp, Homo sapiens
agctgtgaacaggagggcctgttccctaattcttgccgcttcaaaagcagtggactgtcttttggattcaaagtgggcaaaggccaagaaaggagaggaa

SEQ ID NO: 261684 - DNA, 51 bp, Homo sapiens
gcatgcagcttactgcttgaaaggtgttttcgccatcagggtgtattggag

SEQ ID NO: 261685 - DNA, 100 bp, Homo sapiens
atgccaatgcactttgccactttcatattgcagccagcatcaacccagccacagctgagatgagtgaactgagtgtggcacagaaaccagaaaaactttt

SEQ ID NO: 261686 - DNA, 100 bp, Homo sapiens
gccgttggctccagacaaataaacatggagtccatcttccacgagaaacgcaaatctgtccaaggctgcctggggagcattggagaagaatggcacccag

SEQ ID NO: 261687 - DNA, 75 bp, Homo sapiens
gacccgagaaagggaatttcaggaacaaatgaaagtagctcttcgttttgctgctgacatcatctccgttttggc

SEQ ID NO: 261688 - DNA, 90 bp, Homo sapiens
aatgaggaatgtctttcctaccatctaaaatacgaaggtttctggctgggagtgaaaaggctctcagtgtctgagttaaatgaaatcctg

SEQ ID NO: 261689 - DNA, 82 bp, Homo sapiens
cctcgcagggcaacaccctgtgataattccaggtgattctctacatctgcagcttgaggattcaagatgaccaacgaagaac

SEQ ID NO: 261690 - DNA, 100 bp, Homo sapiens
gaatattttgcctgctggaacctgctgtatctactcaagagtggaagttttcacagatcaataatgactgatatcaagaaagacaatagagtcacaacat

SEQ ID NO: 261691 - DNA, 100 bp, Homo sapiens
agctaaggcgccagcccagctgtgtgagggctgccccctgcaaagcctgcacaagctctgtgagaggatagagggctgcacaaggcccaggaggagcacc

SEQ ID NO: 261692 - DNA, 74 bp, Homo sapiens
ccaaatcgtgacaccatgaaagtcctctttggacatctaactaaggagcatgataaagatccagaaagcttttt

SEQ ID NO: 261693 - DNA, 75 bp, Homo sapiens
gcagtggtgggttccatgtgatggtggagtaggaggcaggtctccgcggtcacagtgctgtcgatatcaccaagg

SEQ ID NO: 261694 - DNA, 101 bp, Homo sapiens
aagcagattgccaacattgaccgtattacaaagatagcattgggcagctggagaatgatctgaggaacaccaagagtgagatggcacgccaccttcgggaa

SEQ ID NO: 261695 - DNA, 83 bp, Homo sapiens
aaagtgtctcggctcagctaatggaaatggagaccttgattctgcaatggctgccatccggaagaaactggtgattgttggtg

SEQ ID NO: 261696 - DNA, 100 bp, Homo sapiens
cagaaagcaggcgaacccgcggcgcaataacgcttggtgtaaaaattgccaaagcagttgcctgccacaactttgtaaaagccaaaaaggaggttgaaaa

SEQ ID NO: 261697 - DNA, 74 bp, Homo sapiens
tcctccttctttgttcaagactgggcttccaccgagcagacatgtagactgccaaagtgtatgggatgctttca

SEQ ID NO: 261698 - DNA, 82 bp, Homo sapiens
gaagcggccgggctggatcaggatgaggtgagaagccctaccactgcaactgggacggctgcggctggaagtttgcgcgctc

SEQ ID NO: 261699 - DNA, 101 bp, Homo sapiens
aagtttgatggctgatcttgaaggtttacacttgtcaacttcctcttcagtcatcagtgcagagatcctacaagaatccaggatgatgatcccagattgcc

SEQ ID NO: 261700 - DNA, 100 bp, Homo sapiens
tgctgcctggctgggattcctacacaatgcgttgcctggctccacgccctgctgggtcctacctgtcagagccccaaggcggtgtctcagggcagcagcg

SEQ ID NO: 261701 - DNA, 100 bp, Homo sapiens
gctgaagcccaggcccagcaacaggctgggggcccaggtgcttcgggggtcccagccattaacagagcttcgtgcaggtaagaatcaggccttattggag

SEQ ID NO: 261702 - DNA, 48 bp, Homo sapiens
gaaaggagaacaccttatttcagtgctgtccccggcataggtccatct

SEQ ID NO: 261703 - DNA, 100 bp, Homo sapiens
ctcaaattttcaagtgccaaacggaggaatacctcgtatgcaacctcaggcttcagccattgttccaatcagaaaaattcatgctctgaccatcacatgg

SEQ ID NO: 261704 - DNA, 75 bp, Homo sapiens
gttggaagaggcgagtccggtctcaaaatggaggtttggtgcacctcgatttggaggaagtagggcagggccctt

SEQ ID NO: 261705 - DNA, 101 bp, Homo sapiens
caaagaccacttttcccactacctgcagccttttatcacccagatacgtcggtaacctttccagagatgtgacagaagctctaattctgcaactctttagc

SEQ ID NO: 261706 - DNA, 100 bp, Homo sapiens
gctgaatcagaaaagatgaaaatagagctgaaaaagactcatgctgctgagacagagatgacactggaaaagaatgtctacatattcaactttccccgcc

SEQ ID NO: 261707 - DNA, 100 bp, Homo sapiens
gtaaagagacttgctattcaagatctgaaattacttgctaataaaacaccacatacttggagtagggagaatattcagattatgatgcatcattatcaca

SEQ ID NO: 261708 - DNA, 83 bp, Homo sapiens
agccatgggatctccaactgcatgcaagagcaacctggaaagactttgacagcgcagcttgcttggctcaggaacaacagaag

SEQ ID NO: 261709 - DNA, 75 bp, Homo sapiens
gtgaaaaataccacgacaaaaccaccctatacaaaattggacagctgtacatgatcagcaaacacagccatgaac

SEQ ID NO: 261710 - DNA, 117 bp, Homo sapiens
ccgtccagcaacttgtggacctcctgtgccgcctggagctctaccgggctgcccagatcatcctgaactgaaaagccatggagacttcagcatcctcctcccagcctcaggacaaca

SEQ ID NO: 261711 - DNA, 100 bp, Homo sapiens
actgctccggtcccagctcttcgcgcccctgggagggaggtgggaggctctaggctccaagacgccgtcgcttgagcatttaaatcaaacggtattgaga

SEQ ID NO: 261712 - DNA, 75 bp, Homo sapiens
aaagaagctattattacaagaataaaggcaggaatcaatccattcaatgggcggcgactggcggcgcgatggacc

SEQ ID NO: 261713 - DNA, 82 bp, Homo sapiens
cttaatggttcataagcgaagccatactgtaatctcaggggcgatataatcaatgaggtggtcctaaagttgctcaaggctg

SEQ ID NO: 261714 - DNA, 73 bp, Homo sapiens
gcccatgcgggaccagatcatccgcgtgaagcgtgccggtggtggtgtgcacattgagccccggtatagacag

SEQ ID NO: 261715 - DNA, 75 bp, Homo sapiens
tgctccacactgccaaccggccagaggacgagtgtgctgttctgaagcccagaaaattccatggacaccccctgg

SEQ ID NO: 261716 - DNA, 100 bp, Homo sapiens
cccgaggcccccaggacctccatctcccaatgttggaggaccctgatgctcccataagacagaaaatgccccttgatgatctggatagagaagatgaagt

SEQ ID NO: 261717 - DNA, 73 bp, Homo sapiens
ttctcaacaccacggaattccatatctctggaaacatggctacagaacatgttaatggaaatggtactgaaga

SEQ ID NO: 261718 - DNA, 75 bp, Homo sapiens
gggcactgcccgcccgggctctggctaatggaggttggcaggatgctactaccccttcatcagtgacctccccta

SEQ ID NO: 261719 - DNA, 99 bp, Homo sapiens
tgatatctatgatctcctcttcctcaggtttgaaagaggacctttgggtgtgctgttgtttaaactagttgagtggtgattttatgcaatggcttcaag

SEQ ID NO: 261720 - DNA, 74 bp, Homo sapiens
gcagaaggactgcctcactgagcaaccaagaagaatggagttcagtggtggaggactgcttttgtgaacatgag

SEQ ID NO: 261721 - DNA, 75 bp, Homo sapiens
ctggaaaaacctgtgctcatatcactgggaaaaggagtctcactctgtccttcaggctgtgagtgcagtctcctg

SEQ ID NO: 261722 - DNA, 82 bp, Homo sapiens
caaatccctggcccgggtgacccacgcggaggccgtcaagctgtgcggtcagagaagaaacgccttaggaagccaagcaagt

SEQ ID NO: 261723 - DNA, 88 bp, Homo sapiens
agcatctacaaccctgaagtgcttgatatcacagaggaaactctgcattctcgcttcctggagttttcaaggcactgtgaagcccctg

SEQ ID NO: 261724 - DNA, 83 bp, Homo sapiens
cttacatcatgccgagccttccttgtaacagcgcgaatccccaccaagatgatcatgacgcagtcctgaggtttaatggggca

SEQ ID NO: 261725 - DNA, 98 bp, Homo sapiens
acgttgtttgatgccaatcatcctcgaagttactggctgaccaacaaagttcctatcaaaagacccagcacaggtcttctcatgtatacacttgccac

SEQ ID NO: 261726 - DNA, 51 bp, Homo sapiens
cttctatgatccaagaagtctgggtctggagcccggcactgtggtcataac

SEQ ID NO: 261727 - DNA, 100 bp, Homo sapiens
ggccagcctggggcggccggccaggaaccacccgttaaggcaagaaggggttaaaagtggaatgtatgttgtaatagaagttaaagttgcaactcaagaa

SEQ ID NO: 261728 - DNA, 100 bp, Homo sapiens
cacataaagctaggtcgtcccactgttccgtgtatcacttggataaggaagttccaggttaaaggcagcctcagctcacggggcagttgatggtggtaga

SEQ ID NO: 261729 - DNA, 75 bp, Homo sapiens
tagtccttattttccaaccacactgcagaagaaagatcagcaactggagcctaaaaaaagtaccagccctaaaaa

SEQ ID NO: 261730 - DNA, 97 bp, Homo sapiens
tcatcgggagaatgctcttcaggatagtatcttggccagggaactcaaacagcagatgcaggattatttttacccaagatacttaggtaagtctcaa

SEQ ID NO: 261731 - DNA, 50 bp, Homo sapiens
tgtgtggtggactgtggcacggggttaacacagaaatctgcctcctgggc

SEQ ID NO: 261732 - DNA, 100 bp, Homo sapiens
gagcatggtcttcggtggatggcgaggactccactgatgactcctatgatgaggactttgctgggggaatggacacagagccacctggacatgagacccg

SEQ ID NO: 261733 - DNA, 98 bp, Homo sapiens
gcggatcgccgcgctcagcgacaaacaagctgaacaagctccaaacacttgtgaatgtcatgtttgtaagcaggaagcttctggactgacaccatctg

SEQ ID NO: 261734 - DNA, 100 bp, Homo sapiens
ctggtaacgtttttatccatggatgacttgcttgggcatggatagagtccagtgttctggtgatctacaattggctcaccagcttcagcaagaagaagac

SEQ ID NO: 261735 - DNA, 97 bp, Homo sapiens
agccggagtcggggacccaggagtttcctgtgtccagcgctgccggagccgcctgagttggttgaatctggcgatgtggaacccatggatatggagg

SEQ ID NO: 261736 - DNA, 82 bp, Homo sapiens
gtggaagctgagcgcgtggtggagttttcctgtgatcctgactgctgtcatggcgtgccctctggagaaggccctggatgtg

SEQ ID NO: 261737 - DNA, 100 bp, Homo sapiens
agaagaagttgcgaaggatccccaacggggaggccaacgtgaagaagttgtttgactggctggtatcagtgatcaacagcagcatctgtgcagacaccga

SEQ ID NO: 261738 - DNA, 100 bp, Homo sapiens
aagataaatgaaggggtctagatgtaaatgtcagtggaaaggagagctaccatcactaaggtctttgactttgaactgagcagccaggatatgaccacct

SEQ ID NO: 261739 - DNA, 75 bp, Homo sapiens
ctagtgctagcagcttagatgccatttctcctgttcaggactctcatagtgatgatgatacaaaggataataagg

SEQ ID NO: 261740 - DNA, 90 bp, Homo sapiens
gatcccagctttaaaggagatgcaggagaaaatacggcattgctagccagctgaggtgggtgtcctggttggcaaagaccggtcaagttt

SEQ ID NO: 261741 - DNA, 75 bp, Homo sapiens
cggcaagatgtccagtaatgtcccggcggatatgcctctgcataagagcctagatccaagcaacctggaacatct

SEQ ID NO: 261742 - DNA, 75 bp, Homo sapiens
tctatagagcctggcaccaagtggaatattacagatgtggaattagaagaagctattagaagaagtcttgaggaa

SEQ ID NO: 261743 - DNA, 82 bp, Homo sapiens
ccggagcgggcggctgagacaaaggcgacgatgccatggacaatattaccaggcagaaccaattctacgatacccaagtcat

SEQ ID NO: 261744 - DNA, 100 bp, Homo sapiens
caagaaaactgcacataactccgaaggtgtgttccagagaacaagccttcagacatttgctatattgacgctgagctgtcaggggactcaggcttatgag

SEQ ID NO: 261745 - DNA, 90 bp, Homo sapiens
tggcggatggccccaggtgtaagcgcagaaagcaggcgaacccgcggcgcaataacgatcaggtatttggatccaatctcgctaatctgt

SEQ ID NO: 261746 - DNA, 100 bp, Homo sapiens
ctttgaaaatcaaactgactaataaacactttccctgcctcacggtctccgtggagctggcaagcacgaggagcggcaggacgagcatggctacatctcc

SEQ ID NO: 261747 - DNA, 97 bp, Homo sapiens
caacctatgggcagaccgcctatgcaacttcttatggacagcctcccactgctctggacttattggacaaaatgttgacattcaacccacacaagag

SEQ ID NO: 261748 - DNA, 82 bp, Homo sapiens
ccgaaaagcgtttccgcagacagaagtggggagaagcggagggactggtgattgcagctggaagtgcccatgaccgagctgg

SEQ ID NO: 261749 - DNA, 101 bp, Homo sapiens
attcacctcctgcctcaccacccccatcaagatcgccctgcgctgaaaaactgattgcttatcaacgagaattccttgctttgaaagaacgtcttcgaata

SEQ ID NO: 261750 - DNA, 100 bp, Homo sapiens
cgagggcccctcccccaggcctctgggctctgagacttgatcctgctccctcggtgtctgcattgactcctcatgctgggactggacccgtcaacccccc

SEQ ID NO: 261751 - DNA, 75 bp, Homo sapiens
gctgggccagtaccatgacatcaagcagaacaccttccaccatgaccacctcagcaagttcccacttaaataaag

SEQ ID NO: 261752 - DNA, 90 bp, Homo sapiens
atttttggcctcatactctgttatagataaacaagagaatgcacacgaggcggcttctgcaacttcatgcatttgaagcccatttccaga

SEQ ID NO: 261753 - DNA, 100 bp, Homo sapiens
gccatggaaaccgctctggtcacaccaatactgttgcagattgtgaacttcgaccacttccagatccttcgggccattgggaagggcagctttggcaagg

SEQ ID NO: 261754 - DNA, 50 bp, Homo sapiens
ggacattccaggcagaggcaagatgattttgagtcaaagtattccttcca

SEQ ID NO: 261755 - DNA, 100 bp, Homo sapiens
tgccaacatcctttcgagccccacactattcctgatcagagaactccagttgcttcaacacacagtatcagtagtgcagccaccccagatcgaatccgct

SEQ ID NO: 261756 - DNA, 75 bp, Homo sapiens
cgagaagctccagatggcgtcttccgtgggcaacgtggccgacagcacaggtgctgctgcatgaggaggcgggtg

SEQ ID NO: 261757 - DNA, 83 bp, Homo sapiens
taataagccgatgcttgccgatgttgtcttcgaaattcaagatatttagcttcctgtggtatactgatgagcagaactcttcc

SEQ ID NO: 261758 - DNA, 96 bp, Homo sapiens
ctacgacttgcgaagtgacgccatccccatcgtggctgccaaggcctccagggacgttatcagtgatgaaccctaaggactctgcaatatgaataa

SEQ ID NO: 261759 - DNA, 75 bp, Homo sapiens
aagatgaccagaggactagacctgaagtttcaaagacaagttggatggcttgaggactggtactaaaaggaaacg

SEQ ID NO: 261760 - DNA, 129 bp, Homo sapiens
cccacccagatgccagtagtgcccgccccacccgcatgctctttgtcactccccggcggcagcacgaaagtaccatatggaagtgctactgaaatgggaacaaccaaaaaggctgtaaagccaaagaag

SEQ ID NO: 261761 - DNA, 83 bp, Homo sapiens
tgtttctctgctgcaccgacctcgacgtcttgcctgtgtcccacttgttcgcggcctatagcatgttggcagataaattgaac

SEQ ID NO: 261762 - DNA, 91 bp, Homo sapiens
acagaaggcatatgaatccaaaattgattatgacaagatcttgtcacaaatacagaagtatgataacttaataacacctgtagtagattca

SEQ ID NO: 261763 - DNA, 90 bp, Homo sapiens
ccctgtcaagaaggtgccggtggtgcgagtcttcggagcgaccccggcaggatgtgatcttcgtggtggaaagctaaattttaaaaccac

SEQ ID NO: 261764 - DNA, 90 bp, Homo sapiens
tgttgttttgcatgaattatcaggagatgatgacactgatcagaatatgagggctcccctagaccctccaaaattgcctggaaaagagca

SEQ ID NO: 261765 - DNA, 100 bp, Homo sapiens
cagtgatggcattgtggcccacttccctgcccatgagaagccagtgtgctgcatggcttttaatacaagtgcagcagccgctcttctaaaacattcaaac

SEQ ID NO: 261766 - DNA, 97 bp, Homo sapiens
aagtcagcatgagcaaaaactccaaactcctctccaccagcgccaagagtgggtaattccagaattgattggccataccattgtcactgtattactg

SEQ ID NO: 261767 - DNA, 100 bp, Homo sapiens
ggattccaatgctggtcaccccagctcctcagcagcatgaagaagaggacctggatgatgatgtcatcctgacagaaatatggacatttctggaattaca

SEQ ID NO: 261768 - DNA, 75 bp, Homo sapiens
ctatgaaagcaaacgtatgggcatcatcgtgcgggactttatggacagcagcctgctaaccaagtcatcattcga

SEQ ID NO: 261769 - DNA, 101 bp, Homo sapiens
cctacgggatccgctttgacgtgatggtgaacggcaaggtcttattagtaggtaagaaacagctgctcctccacctccaccccagccccatggagcttgct

SEQ ID NO: 261770 - DNA, 75 bp, Homo sapiens
cgcccagcacagagatgtctgtcgcagtgaacaggcccagctcgggaaaggaatgggtaccacagaccatgtcat

SEQ ID NO: 261771 - DNA, 74 bp, Homo sapiens
ttaaggtaccagcatggactggaatttgtatttagcgtggactacaatgatgaactggatatcttggtgagcgg

SEQ ID NO: 261772 - DNA, 100 bp, Homo sapiens
gaaggcatcctgtaggataagtcaaaggaggaatttgcctcttctacagatagagctgttaaggtgtagagcagaccaaacagtgcaaggaggagcccaa

SEQ ID NO: 261773 - DNA, 88 bp, Homo sapiens
gcatcggcggcggcttccgtcacctccgctcccccgatcctattcccagtcgttacgcctgcctcacaccttgcgatgcgccaacatc

SEQ ID NO: 261774 - DNA, 100 bp, Homo sapiens
cccagaggtcgtggaggtggccgtggaggcagaggtggcatgggaatcatgtcaaccctgccatggacttcacgcagactccacctgggatgttggctct

SEQ ID NO: 261775 - DNA, 58 bp, Homo sapiens
aaaaattttccaaaagagagatggaagctgaaaccccacgtagtgttcttgaagaaat

SEQ ID NO: 261776 - DNA, 82 bp, Homo sapiens
aatgcatttgccttatacagctaaagccatggaaagcctttgaagtaaattttatggatgatgtaggtcagactctattaaa

SEQ ID NO: 261777 - DNA, 82 bp, Homo sapiens
cggtgaactctgtccagttttcaaaccacacaggttaaacactttaagatgagaaaaattgatctctgtctgagctctgaag

SEQ ID NO: 261778 - DNA, 75 bp, Homo sapiens
caagtctgcccttgtttgaggccttcacagcatgtggttttgtgcaggagtctcaggagcaggggctgcggcaga

SEQ ID NO: 261779 - DNA, 100 bp, Homo sapiens
gtgatgacaatcttactgaagagccattttttcaccatgctaaaaaggaggctgatccgatagagtaatacctaattatatcaccatgagatggcaaaac

SEQ ID NO: 261780 - DNA, 100 bp, Homo sapiens
agaaagtaaagttggaagttaagggagacaaagttgaaaacaaagtgctgcgaggaggtctgcaagcgtggcttcacggtgatcgtggacatgcgtgggt

SEQ ID NO: 261781 - DNA, 71 bp, Homo sapiens
acccagagtgcagagccgcctttccagcatgcaggggctgctcagtgtactaatggtcacttgatgtgcgc

SEQ ID NO: 261782 - DNA, 50 bp, Homo sapiens
tagctgtggataacgtcacctgcatgggttcccggcccccaagtcgcaac

SEQ ID NO: 261783 - DNA, 100 bp, Homo sapiens
actgccaaccggccagaggacgagtgtgatgaggagactgaggcccggagccatctgtcgtgtgctaggccacagctaagtcaagacgtcctgacctgga

SEQ ID NO: 261784 - DNA, 97 bp, Homo sapiens
gaccacagcattcctgaaatacatccaggaaagacatggagattctcttaaaaagagaggatctgacgaactactctcaggcagtgttctcagtagt

SEQ ID NO: 261785 - DNA, 98 bp, Homo sapiens
agctcatgttttctcctgatcaagaaaatcatccatctaaagcaccagtaaaatatggtgaactcattgtcttagggccattctcaagcacaacctgg

SEQ ID NO: 261786 - DNA, 108 bp, Homo sapiens
ggggggcggaaccagcctgcacgcgctggctccgggtgacagccgcgcgcctcggccagcactgggaagtcttccagaaggtgacagaggtcttcatcctagtgcctg

SEQ ID NO: 261787 - DNA, 75 bp, Homo sapiens
tttggaaatgtcatccgatggcacaatcaggtgtttcagtcacctccagtaacacgggcgtgccagatatctcgg

SEQ ID NO: 261788 - DNA, 100 bp, Homo sapiens
acggggtccactggtgccctggagacccgcagcctcaaggatcacaaaggtcattgaccacagtggcgcccgccttggtgagtatgaggacgtgtcccgg

SEQ ID NO: 261789 - DNA, 75 bp, Homo sapiens
aaaaatgccagccagaagaggcgttcgctgcgcgtgcacattccggtaaggctggcctctctgcagtcagaggtc

SEQ ID NO: 261790 - DNA, 51 bp, Homo sapiens
ccaccctctcctgaccctgaagaactgtgggcacttttgtgattcccctgc

SEQ ID NO: 261791 - DNA, 73 bp, Homo sapiens
ctggagaagggatggaaatacttcaacaagacattccatacaccaagcttgggtgatgaggaatttgaaatcc

SEQ ID NO: 261792 - DNA, 100 bp, Homo sapiens
caacgaattagcagagcttaagaatgaatatgatgacctctgtgagcctgaacaatttggagttgtgatatgcacccaatgtccagggagcgtgcaaaat

SEQ ID NO: 261793 - DNA, 82 bp, Homo sapiens
ttcctgctggggctcatgtttgaggtcactgcagccagaggggtccagaagagagaggaggcactgcctccactacagcaac

SEQ ID NO: 261794 - DNA, 89 bp, Homo sapiens
aaagatccctggaatatgaagagacacagtatggtagccacacccccaggttcaaaccttgtactactcagctgatcacaagctgcttg

SEQ ID NO: 261795 - DNA, 75 bp, Homo sapiens
cccatgcagggggactctctgaagctgtgcaggctgcctgtatgggctgaagaagatgcagagcagcctgaagct

SEQ ID NO: 261796 - DNA, 50 bp, Homo sapiens
ccctacagaaggtggagcccgggcggagatggggttttgccgtgttgccc

SEQ ID NO: 261797 - DNA, 100 bp, Homo sapiens
ccttgtataatgacgaagaaagagtgcttagatttgctgtgaccaatcaaattggcccggtcaaagaaagcataacccctactgtagaactaaatgcact

SEQ ID NO: 261798 - DNA, 100 bp, Homo sapiens
attccatgatggagaaaatacatggagcagaccagcagttatttgcagctatcatgtgaggagaatgtactactcatcacctcccacctgtgaaagcccc

SEQ ID NO: 261799 - DNA, 101 bp, Homo sapiens
agtggaagtgccacctcatgtgaagaatgtctgctaatccacccaaaatgtgcctggtgctccaaagaggtgcgtatagcagcaaaattcatcattcatgc

SEQ ID NO: 261800 - DNA, 100 bp, Homo sapiens
gctctccacccagaacgagccatggacaaccacagtgacagcgaagaggagcttgctgccttctgtcctcaggaaaaccatattgaggctattgagtgtg

SEQ ID NO: 261801 - DNA, 98 bp, Homo sapiens
acagccaactgcagcccattcagtaccaataccagaatacagtcgctttgaatcgaagatacatgacttacgagaacaaatgatgaacagcagcatga

SEQ ID NO: 261802 - DNA, 75 bp, Homo sapiens
ctaccgatgggaagtccttattattggccctccagatacactttagtacaggtttgcagattccgccagcagcac

SEQ ID NO: 261803 - DNA, 100 bp, Homo sapiens
ctactaaccgtccagataggatagacaagtgggagaaactacagatgaccacaagtgaaaggaggaaaatattctgctctgtcacattccacgtaatcgc

SEQ ID NO: 261804 - DNA, 80 bp, Homo sapiens
gacagtaactgaacattggtctaaagtctttccaaaaggtcaaggttcacaagaatggcagttcggaaaaccctcattcc

SEQ ID NO: 261805 - DNA, 82 bp, Homo sapiens
cttgtgggagcaaaaccaacgcctggctcggagcagcagcctctgagcccttcagatatttcaacactcctctcagcatcct

SEQ ID NO: 261806 - DNA, 75 bp, Homo sapiens
caataaccaggtgcttggcaaaatcgagcgggccattgctctgggcctcagaactgtgctgcctgtgttcacgag

SEQ ID NO: 261807 - DNA, 100 bp, Homo sapiens
taacgacctctcacagaaactatatgccaccatggagaagcataaagaggtgttacagcacatgaaggccgtgcaggcagatcaggagcgggagaggcag

SEQ ID NO: 261808 - DNA, 100 bp, Homo sapiens
tcccaagtagctgggaccacaggaagccgacggtttagttctgataaatattgatcatgggagcatcacctactccaagtccacggacgataacgtggac

SEQ ID NO: 261809 - DNA, 98 bp, Homo sapiens
ccctgagcacgctgctgtgtgagcagcagacctgtgaccgcatcaagcagtcagcagctggcaccaagcgtcgggtgtttatcattgagactatgggt

SEQ ID NO: 261810 - DNA, 100 bp, Homo sapiens
gggatatagcagaagcagcagcagcaactcctgatttaggggcaatcgatgtaacagtcctttggacagcccccggaatttctctccaaatgcacctgct

SEQ ID NO: 261811 - DNA, 96 bp, Homo sapiens
gtggaggccacgctcagctcgccaggcggcgcaggggcagcttttggcaaggagtctgaagttcttattgggaacctgggtgataaattaatccct

SEQ ID NO: 261812 - DNA, 100 bp, Homo sapiens
tatcgtggacgtcactggccctggtggggattgacagccacgggaagtgcagggctcgcggcctggcaagaatgtacagctgacagagaacgagatccgc

SEQ ID NO: 261813 - DNA, 80 bp, Homo sapiens
ccaccagcactcctttaaagtgggcactgcaaaagtgcatgcttttcacttccactgcatctctcgctggctcaaaacac

SEQ ID NO: 261814 - DNA, 100 bp, Homo sapiens
ggatcaagaagatttctttcttcatgaccctgcccttgccagaatttcctgcgctgttccacctcattcaacttcagttacagacgttccacgttccgtc

SEQ ID NO: 261815 - DNA, 82 bp, Homo sapiens
gccccctgaggccccagaactatcttttcgaggccacaagaggaagctgaatgaagaggacgccgccagcgagtccagcagg

SEQ ID NO: 261816 - DNA, 74 bp, Homo sapiens
cccttctgctccacgaggagcacagccgggccgctgcgaaggatgtaatccctgttcattactacttaatacct

SEQ ID NO: 261817 - DNA, 87 bp, Homo sapiens
gaggatccctccggggcggagcggggcggggcccgagagcagcacgcaggtgctgtccctggacaccaacatcacaaaccaggtgaa

SEQ ID NO: 261818 - DNA, 97 bp, Homo sapiens
ctggcgctcctggccctctccgcggcgcggccatcggccagtgcagttacagaatgtctgaaggggacagtgtgggagaatccgtccatgggaaacc

SEQ ID NO: 261819 - DNA, 85 bp, Homo sapiens
gaaataaggacaaaagccaagaggaggacagttcgctacacagcaatgcatcgagataccccatgtttccccatcactcgaggag

SEQ ID NO: 261820 - DNA, 99 bp, Homo sapiens
aaatggttgaaggaggcagaggaagaatcttctggtggcgaagaagaagatgaagatgagaacattgaggttctgagtggtgttgctcagccagtagct

SEQ ID NO: 261821 - DNA, 75 bp, Homo sapiens
cgcggaccggcgtccccggcgcgaagaggctggactcggattcgttgcctgagaaattccgggatttctttaatc

SEQ ID NO: 261822 - DNA, 75 bp, Homo sapiens
caggtactattcggggaaagaattgaaccttcaccatataagcttttcacctctggttcctacatctggattgta

SEQ ID NO: 261823 - DNA, 74 bp, Homo sapiens
acaaaaggagaccctaatcttcagctttccccagacatggccaacaagggtccttcctatggcatgagccgcga

SEQ ID NO: 261824 - DNA, 75 bp, Homo sapiens
atgcctgatctgtacttctacagagatcctgaagaggatggagatgaagatgaggaagctgagtcagctacgggc

SEQ ID NO: 261825 - DNA, 75 bp, Homo sapiens
gcctaagtagaatttacatgggaatgcactctattctgatgtggaagatgtcaagtttgtgatcaactatgacta

SEQ ID NO: 261826 - DNA, 100 bp, Homo sapiens
gaggctctgagccccggcggcgcccgggcccacgcggaacgacggggcgagacatttatgcagtgtgtgattctttctaaaacaactccctggaagagag

SEQ ID NO: 261827 - DNA, 90 bp, Homo sapiens
gagaaagagaatctcatacacctgtctctattcaggaagagatagagtgtgaacatggctacgcctcttcattcccgtccatgccgagcc

SEQ ID NO: 261828 - DNA, 97 bp, Homo sapiens
gctcatggcccaccagctagaaagggaatgcagagagcaaccaatgtcacctaccaagcccatcatgtcagcaggaacaagagaggtcaggtggtgg

SEQ ID NO: 261829 - DNA, 83 bp, Homo sapiens
gttttgtgcagattgccagtctaaaggtaatagcctgcagctggtgttttgagaagccctactgctgaaaacttaacaatttt

SEQ ID NO: 261830 - DNA, 100 bp, Homo sapiens
gacacctcccggctgcctggggccacccctgggctcaccacggtggagatagtgacaatgtctcaccaagggtctccgtctctccaccgggggcttcatc

SEQ ID NO: 261831 - DNA, 82 bp, Homo sapiens
ccaccctcgctccctctgctcttcctcccttcgctcgcaccatggctggcctgccactcctcctgctatgatgcctgggcag

SEQ ID NO: 261832 - DNA, 100 bp, Homo sapiens
tcatcccctggatgggggaccacaagatcctcatcgacagacaggtgatttggcttctgcacagttaggaggagcaccaaaccgatgggaggttttgtca

SEQ ID NO: 261833 - DNA, 75 bp, Homo sapiens
agccctgtgtgacaccaagataagtaacggatcactgagattctgatgaacagaccttctgcccgcaatgccttg

SEQ ID NO: 261834 - DNA, 87 bp, Homo sapiens
gctgcagaacccccagaccatcatgttggtgttcgaggaagagacattgttgttcttggtgtggagaagaagtcagtggccaaactg

SEQ ID NO: 261835 - DNA, 73 bp, Homo sapiens
cacaggctcagcaaggacagcagcaggttacaagacaagtggctcagtgcaaatgtgcaaaaaggtttcaggt

SEQ ID NO: 261836 - DNA, 98 bp, Homo sapiens
ctccccgaggctgaggcgtgtgtgcggcaacacctccccgacctctacgctgctgccggggtggtgtttactagtgatcctcataaaagttacctccc

SEQ ID NO: 261837 - DNA, 100 bp, Homo sapiens
ctaccacctacctgagtatgtcgaaaatctctgcccctggaggagaaatagaagactcaccccacacagaccgcgtttctctccagtgtcgacctacaca

SEQ ID NO: 261838 - DNA, 76 bp, Homo sapiens
ctttgtagcagacactgcaaatgaagctctcgaggctgctaagagactaaagggagcactatgtctgcggaagtcc

SEQ ID NO: 261839 - DNA, 98 bp, Homo sapiens
gccctctgcgacctggggccctgggtgaagtgctccgccgcccttgcctccagacgaaatctcacaaaactgtcccttatcttcagtcacatgctggc

SEQ ID NO: 261840 - DNA, 75 bp, Homo sapiens
cctacagaaacaaaatgtcaacaaattgatgggcagtaagctcctacaggacattttaaaactacataaatgtgc

SEQ ID NO: 261841 - DNA, 50 bp, Homo sapiens
ggggccgtggctgacatggagcagcgtgagtgcatctccatccacgttgg

SEQ ID NO: 261842 - DNA, 75 bp, Homo sapiens
ggctaatctccttaagtcggccttccctcacctacaagacttcttggacacttaatgattgttggcaagaaatgt

SEQ ID NO: 261843 - DNA, 48 bp, Homo sapiens
aggtgtcaagaagctcagaatggcatgtactggcattgaaaacattga

SEQ ID NO: 261844 - DNA, 100 bp, Homo sapiens
ctggaccagcgacctcttggcttccaaaacccagatgcggacgaaaagccctggtgctttattaaagttaccaatgacaaggtgaaatgggaatactgtg

SEQ ID NO: 261845 - DNA, 100 bp, Homo sapiens
tttgctgtcagccatgaacggatggatgtgatgcctgctagccaaaaggggtatttgaagtataccatacaactgttttgaaaatccagcgtggacaatg

SEQ ID NO: 261846 - DNA, 90 bp, Homo sapiens
ggccgacttacttctatgagtacatcagggttttgactctgggaggagggctgccttatttggagcaccttaatctctctggttgtctta

SEQ ID NO: 261847 - DNA, 75 bp, Homo sapiens
aatcgggctgaagcgactgagtccgcgatggagccacgaaggaagacaggaggtccgaggagaaagcggcagcca

SEQ ID NO: 261848 - DNA, 114 bp, Homo sapiens
aggtcatccaaagcagccgtcccctctgcagcctctctgacaagtgaccgtagctttatgggatctgcgtaacttaaaattaaaactccataccttcgaatctcataaagatga

SEQ ID NO: 261849 - DNA, 82 bp, Homo sapiens
ccagactgcctgggtttgaattgtgcggtttcaggcaaagggcgttgtgaatacagctgtgtctgcagcagtccaagctgtt

SEQ ID NO: 261850 - DNA, 100 bp, Homo sapiens
gtccattggcaccatacagcctccaagtctctgacttgtgcttggcagcaacatgaagatcattttgagagatggaaccatgtaaccaccacgaccaaga

SEQ ID NO: 261851 - DNA, 100 bp, Homo sapiens
gacaagcagcatgccgtcatcaactacgaccaggacagggacgagcactgggtgaaggacctgggcagcctcaatggggacctgaaggagaagaaggaga

SEQ ID NO: 261852 - DNA, 75 bp, Homo sapiens
tccctgcagtaccctttaacggttgatctcctatcaagagtttttggcatttgaatctgttttatgtgctccaga

SEQ ID NO: 261853 - DNA, 74 bp, Homo sapiens
tttgttaaggattccaagtaactcttatttgagcttactcacatagcatattggtatatcaaaatgaaatgcaa

SEQ ID NO: 261854 - DNA, 82 bp, Homo sapiens
gggggagctgcgacgcgcaagggctgcggagccgcgggccggcgagcgcgtcgccaccatgatgcctgtgaggagccaccaa

SEQ ID NO: 261855 - DNA, 100 bp, Homo sapiens
gaatgagatgtgaatggcagatggataaaggaagacgtctctgctggatgaaccgaatcctaacagtccagccaatagccaggcagcacagctttatcag

SEQ ID NO: 261856 - DNA, 82 bp, Homo sapiens
ggagaggagcctcggccccgtacccagacctgcctagagctggaacgttacctccagagcgagccctgctatgtttcagcct

SEQ ID NO: 261857 - DNA, 51 bp, Homo sapiens
cccggattcaggattcagatgaaccaggggactcattctcacagttccggt

SEQ ID NO: 261858 - DNA, 101 bp, Homo sapiens
ggatttccgaggcaagaaggtgatcgaactgggtgcggggacaggcatcgtggggatcttggcagcgctgcaggttcctctgtgacgagggtgcaggtatc

SEQ ID NO: 261859 - DNA, 100 bp, Homo sapiens
tcgctgccaagctctgggggtcatcacagagaaggagacccaggtgcaaggtgtccctgccttcactgtgctccaacctgaaggtcccctggcagtgctg

SEQ ID NO: 261860 - DNA, 83 bp, Homo sapiens
ggcccggcacgtgttcctaacggggcccccagattgaagatctcaaacagacaaatcatggcttggaagaatatgttaggaaa

SEQ ID NO: 261861 - DNA, 96 bp, Homo sapiens
aacctcccacaccgaccaatcctcacgattgagtgtcaaagaagattataccgaaaagaagttctagagaaattaatagaaaaatgtgtttctaaa

SEQ ID NO: 261862 - DNA, 96 bp, Homo sapiens
cgagccagaagcagtatttgtcctggtgtatactcttgatgtaccagatgcattctattactgttatagtccagaccctggtaatgcaaagggaaa

SEQ ID NO: 261863 - DNA, 51 bp, Homo sapiens
gaacgttttaggaatctagatgaatttgaacaatttgaaagcaccattggg

SEQ ID NO: 261864 - DNA, 75 bp, Homo sapiens
aaactatattaaaaggaactggagaattgctgcgctgaacatcttaaagttgctgtctgagttggaccaacaaag

SEQ ID NO: 261865 - DNA, 100 bp, Homo sapiens
gagtacctcagcacacattacaaggcccctcgaatggtgctggcagcagctggaggatacagagcagtgcctttgaagaacaactacagtgaggacctgg

SEQ ID NO: 261866 - DNA, 74 bp, Homo sapiens
gcgtatagtggaaccttatgtgacctggggaggtggtgcggagctcctgtttgacggtattaagaaacatcgag

SEQ ID NO: 261867 - DNA, 78 bp, Homo sapiens
tgggagtgacccgattttccagccaaaagcgtttgaacaatacttgaatctggaagatggcagactgctgactcatct

SEQ ID NO: 261868 - DNA, 96 bp, Homo sapiens
cggggctggccgccatgcacaagctgcacttcctgcacagtgtatgtggtagaagaccaaagaagagatgagctaggaccatccacctgcctcaca

SEQ ID NO: 261869 - DNA, 75 bp, Homo sapiens
ccacaaacttgcctacgtcagtaacagccaccaaggagggagctctgacagcctttcgcaagacatatgacaaaa

SEQ ID NO: 261870 - DNA, 76 bp, Homo sapiens
tgcgatttcttgataaagtcttggttgctgccaacaagtacataccgagcatcaaatattaaggcacccggagaac

SEQ ID NO: 261871 - DNA, 90 bp, Homo sapiens
gccttcaacgctcagaacaacggctccaattttcagctggaggaaatttcccgggctcagcttgtggccaaacgtaccaagaaagtcggg

SEQ ID NO: 261872 - DNA, 97 bp, Homo sapiens
ctacaaccagctggaaggcagattcaagcagctgcaaggtggactgtgcattgtcacttattcgacttgggatggagcggaatattcctggtttgct

SEQ ID NO: 261873 - DNA, 89 bp, Homo sapiens
gacggagccggagtcgcggacgccgcggggtctccgggacaggtgagaagccctaccactgcaactgggacggctgcggctggaagttt

SEQ ID NO: 261874 - DNA, 98 bp, Homo sapiens
gtcaacgtgtcagctgccggcaggtgggctgtgctgtaccacacggaggacactcgggaccagaaccagcaggcttctccagctcacacaactccaca

SEQ ID NO: 261875 - DNA, 90 bp, Homo sapiens
cgagaagcgggcagccgagaaggtgtccgaggcccgcaaaaagtgaagtcaccctgctgagaaatgaagtggcacagctgaaacagcttc

SEQ ID NO: 261876 - DNA, 50 bp, Homo sapiens
ccgagtcgcgcggaggcggaggcttgggggccaattcctgtccccccagc

SEQ ID NO: 261877 - DNA, 100 bp, Homo sapiens
gtcctggcgcgatgcgtcaagtacactgaaattcatcctgagatgaggtgaaacctttgtcctggggaatagtctggcccgctccttggaaccacactca

SEQ ID NO: 261878 - DNA, 75 bp, Homo sapiens
gtgaaatcagaggagatgtaactatcggggttccagcgttcctgaaaatgatcgattggcttccatagctgctga

SEQ ID NO: 261879 - DNA, 75 bp, Homo sapiens
aggaccaggaggagctactacctcaatggtgacatcactcaaaaaggatatgaaaagaaaagggcaaagctgctt

SEQ ID NO: 261880 - DNA, 75 bp, Homo sapiens
ctcgttgcggccatcgccctgccggaccgcgcctcaggctcccccagggtgcaaatagctatgggcaacttggcc

SEQ ID NO: 261881 - DNA, 98 bp, Homo sapiens
tgagtcagacaaggactctggcttttcagcagcctcgtcttacagcgtgactgcaaagaaaaagacttttgttttgcaaaagaaaagcagctcggtga

SEQ ID NO: 261882 - DNA, 90 bp, Homo sapiens
catttattactttgaagtgaagattgtcagcaaaggaagagatgggaagaatgttggtgaaaagcacagaaaccagtgacgtttgtggct

SEQ ID NO: 261883 - DNA, 100 bp, Homo sapiens
ttgaacttctgaaaggagatgcacacagtctgttttggcaggtactttagattgattgccgagcggggcagttttgtgagccttcatctgaagccttcag

SEQ ID NO: 261884 - DNA, 100 bp, Homo sapiens
ctgtgctgcgcggcccccgcgcatggcctgtatccggtgtccgaggcgaactcagtaagatgatgttaagaggaaacctgaagcaagtgcgcattgagaa

SEQ ID NO: 261885 - DNA, 80 bp, Homo sapiens
ccaacttctgcgggatcttcaaccacctcgagcggctgctggacgaagaacaactctgctcatggtgattacatgcaaaa

SEQ ID NO: 261886 - DNA, 82 bp, Homo sapiens
aatcaaccggtcaggctggacgtgcacgcagcccggcgggaggataaagaccaccacgagcaaacatgaacgttggagttgc

SEQ ID NO: 261887 - DNA, 74 bp, Homo sapiens
tcagctcgcacagaggttgtctgcaagcagggtatgttagagcccaccaaggaaccactgaaaccactttctgc

SEQ ID NO: 261888 - DNA, 75 bp, Homo sapiens
cagacatttaataacaatggctcaaattgatcaagcagatatgccaggtggtggagacactgccacttgctgtgc

SEQ ID NO: 261889 - DNA, 124 bp, Homo sapiens
gtcccctagtccctacagcagcagcagctggcgccgctctcgcagtccctacagccctgtgctcagagtcacctaagctgaagattcccttgagaacaagtactgtcctgtggtttcatggcct

SEQ ID NO: 261890 - DNA, 98 bp, Homo sapiens
atgcagtacattaatactgcttctaagacagtatctttcagatgaaggcattgaagcttgcacaagctctccagacaaagtcaatgtaaatgacatca

SEQ ID NO: 261891 - DNA, 99 bp, Homo sapiens
cactccctttcctctgctgccgctcggtcacgcttgggtcatctagtagcaggcacccaaatcaggcaactcccaagaaaagtggtttaaagaatggcc

SEQ ID NO: 261892 - DNA, 100 bp, Homo sapiens
ggagctgtggttgctgctgtgatatggaggaagaagagctcaggtggaatccatagagctccccatggacaacaagaccaataagaggcgtgggttctgc

SEQ ID NO: 261893 - DNA, 100 bp, Homo sapiens
aactaattactgctcaacaaatcctaaaatggctctctgagatgcaagaagaggaagtagaaataagcctccctagggctattactgtgtttcgacccca

SEQ ID NO: 261894 - DNA, 76 bp, Homo sapiens
atggattcccagtcaagaaatgctcagccttccaattttttaagaagcgggtcatgaatgaaaaacttcagcactg

SEQ ID NO: 261895 - DNA, 99 bp, Homo sapiens
cagtaaaaaatattggagatattaatcaagatggctacccagaactggcattgcccgccttgtcgaggaatctgcaactgcagtttctgccggcagcga

SEQ ID NO: 261896 - DNA, 131 bp, Homo sapiens
ggcggatggccccaggtgtaagcgcagaaagcaggcgaacccgcggcgcaataacgataaacaggggtcacatgacgacagaagccaagagggctgcaaagatggaaaagaagatgaaaattttgcttggg

SEQ ID NO: 261897 - DNA, 74 bp, Homo sapiens
attgctagccaaatctggcataatccctgcactcattgaattgctaaatggcattctgtgaaactttagaagag

SEQ ID NO: 261898 - DNA, 100 bp, Homo sapiens
taataatttatgtgcacaccggtgtgttctactccctcttctgggaatgaagcctccccagcaaagcctatacctgcttgttgattctgttgatgaaggg

SEQ ID NO: 261899 - DNA, 100 bp, Homo sapiens
ctattgtgcacaaatgaagatgtttccagccctgcctcggcggaccaaagggttaagaatagacccaccagcatttcgtgggatggtcttgattcaggga

SEQ ID NO: 261900 - DNA, 91 bp, Homo sapiens
tttgttttcccctcggcactaggcagcggaggagcccgaccgacccgacaatgcagatcttcgtgaagactctgactggtaagaccatcac

SEQ ID NO: 261901 - DNA, 83 bp, Homo sapiens
ggggtggtcatgatgttcgacattaccaagcagtgaccatatactccttgacgacagggactaccaccttcaccttcatgccc

SEQ ID NO: 261902 - DNA, 74 bp, Homo sapiens
gtgttctggtgctagagtggagaggctggcaaagaagaaggcacacgcatggaaaaggttcgtgctgtgtttga

SEQ ID NO: 261903 - DNA, 82 bp, Homo sapiens
cacccaagcctgagccggttcctgttcaaaagagaatgtaaagctgtacagttatggcgaccccaaagagaaagcatgaaag

SEQ ID NO: 261904 - DNA, 100 bp, Homo sapiens
ttccgaaatggcaggtgtgagtgcctgtataaaatattctatgtttaccttcaacttcttgttctggattcgattacgtatcctccctggcacggagcag

SEQ ID NO: 261905 - DNA, 90 bp, Homo sapiens
gcccaggaggtggtgaaggacatcttggaagatgtagtcacatctgccattaaagctatcatgagaagtttttctctcctacaagaagcc

SEQ ID NO: 261906 - DNA, 76 bp, Homo sapiens
tcgtaatgcgactcaaagctgcacggcagtctgtttatgagatagacgatcagctgaacactctcttgaaggagtt

SEQ ID NO: 261907 - DNA, 100 bp, Homo sapiens
aagctgccaagttgaaaatggacgagtaatcgcctgctttgattcattgaaagtcctgggaactccaacaagggagcaaatcagagaaatgaacccaaac

SEQ ID NO: 261908 - DNA, 83 bp, Homo sapiens
gccccctcctcgtcgggaagaatcgtttggtctcctgccgtgcccgttggaggctggcagcgaagaagatcgaaaattaaacc

SEQ ID NO: 261909 - DNA, 100 bp, Homo sapiens
tgatacagcaataccaccttcagtacttggcaagatttgatgctcttgtgctcagtgacatcattcaggggcaagattcttgccaagagaattaatgtgc

SEQ ID NO: 261910 - DNA, 88 bp, Homo sapiens
agctctttcctttccgtctggcggcagccatcaggtggagccgccaccaaaatgcagattttcgtgaaaacccttacggggaagacca

SEQ ID NO: 261911 - DNA, 51 bp, Homo sapiens
ctggactgtgggctggtgtgtggaactgacacattcgctaagccatcggag

SEQ ID NO: 261912 - DNA, 100 bp, Homo sapiens
gaagaaattgatattttgatgaacaatattgaacgctatcttaaggagaactgtgtttatgaaactgtagttttgcctttggatgaaagggcatttgaga

SEQ ID NO: 261913 - DNA, 100 bp, Homo sapiens
cccgactgcaactgctggattgctgcaaggctgagggacgagaacgaggttggtcaaagaaaaagtgatgtatgaaaaagaggcaaaacaacaagaagaa

SEQ ID NO: 261914 - DNA, 75 bp, Homo sapiens
cctgtgggactgaagaggactccagcccagcttcgcccatgcacgagcgggtgacaaaatatctgaacagaagag

SEQ ID NO: 261915 - DNA, 75 bp, Homo sapiens
cttcagagagaggaagccgaaaacaccctgcaatctttcagacagtacgagctcaactggaggcagtcctgtgcg

SEQ ID NO: 261916 - DNA, 139 bp, Homo sapiens
gccgccatcctcggcgcgactcgcttctttcggttctacctgggagaatccaccgccatccgccaccatgacaatgcagatcttcgtgaagactctgactggtaagaccatcaccctcgaggttgagcccagtgacacc

SEQ ID NO: 261917 - DNA, 97 bp, Homo sapiens
cctcttcgccaggaaacaaacatggccaacttttcttaccgcttctccatatacaacttgaatgctgccactgcagagccccgccatggaagacacg

SEQ ID NO: 261918 - DNA, 82 bp, Homo sapiens
aggatgtcctgctccgacctaagcggagcagcctcaagagccgagccgagattcttggatctcccagtcagcttcatttccc

SEQ ID NO: 261919 - DNA, 98 bp, Homo sapiens
cgccttcctgtgcggggccgtggcggccgcggcgatgactcggacccagaaaccagcctggacaccaagtctgtgtcagaaggccacctcaagaggaa

SEQ ID NO: 261920 - DNA, 130 bp, Homo sapiens
gccttgctgatctgagctcagacctgccaatttaccagagataattgataacaccctgtaacagctgattccaatgacaggatttacacagagagcaactattgatccagaactgaatgaaatacacgtc

SEQ ID NO: 261921 - DNA, 74 bp, Homo sapiens
ccccacccgcatgctctttgtcactccccggcggcagcacgaaagtaccatgagcagccaaaccaagtgaacta

SEQ ID NO: 261922 - DNA, 112 bp, Homo sapiens
gggacgtccggcttcggagcgggagtgttcgttgtgccagcgactaaaaagaggtatcatgatattagctggtttgacatcaagtcatttgtgagtcatcagatcttctcct

SEQ ID NO: 261923 - DNA, 100 bp, Homo sapiens
gatggacggccgaaccccgcgcccgcaggacgccccagccagtgctgggcctaaaggagataacatttatgaatggagatcaactatacttggtccaccg

SEQ ID NO: 261924 - DNA, 75 bp, Homo sapiens
cagaacctttgaccgcttttgtggcctcatggggtgtccgcaatgttgccagtgtctgtctgcagattggctacc

SEQ ID NO: 261925 - DNA, 86 bp, Homo sapiens
cggcgaacgcggagagcacgccatgaaggcctcgggcacgctccttccgcttccagccgttcgagtcctatgactccaggccctgc

SEQ ID NO: 261926 - DNA, 87 bp, Homo sapiens
gtccaggagctctgctctcccctccagattttctaccctagcaaggatggtacgaagattccaatgttcattgtgcataaaaaaggc

SEQ ID NO: 261927 - DNA, 75 bp, Homo sapiens
gtgacgctatcaactgcagagattggtgaaaggtgtagcagtcactcggcctacacccacagcatcgaccttgtg

SEQ ID NO: 261928 - DNA, 85 bp, Homo sapiens
tttatccagggtgcttggagaagatgtcagaccggtgatgaacaatgacaagcactgctttgaatgctatggctacgacatcatc

SEQ ID NO: 261929 - DNA, 76 bp, Homo sapiens
catatttgagtcatttccttcgtacccacagtgcttcatgagaggtcttgagtcaccacgtccgaatataattctt

SEQ ID NO: 261930 - DNA, 82 bp, Homo sapiens
accgcggggttagccactgctggctgcttccagtgttcgccgagaggtgtcgtgaaaactacccctaaaagccaaaatggga

SEQ ID NO: 261931 - DNA, 100 bp, Homo sapiens
agaagaatttaaggacccaagtgatcgtgtgatgaaacttatcacttctgatgtattagagggtttccggtcccccatggaaaagaagaccaagtgcaca

SEQ ID NO: 261932 - DNA, 101 bp, Homo sapiens
tttccatgtcaacatagtcctggctgtgtggttccgggtgctggtgctgtggaagtggcaatggcagaagccctgaataaatataagctcagtgtaaaggg

SEQ ID NO: 261933 - DNA, 100 bp, Homo sapiens
ccagagcggcaggcggagctggggtccggactgcgagatggaggaggggcggcgctgcggccacccggcagattcaagtcaatctgaaagtcccagccag

SEQ ID NO: 261934 - DNA, 100 bp, Homo sapiens
gaattacagcagccaacctatgttgccctgagttacataaatagggggcttgtacatgacagctggaatagcctccagttgaggggcttggtggtgctcc

SEQ ID NO: 261935 - DNA, 73 bp, Homo sapiens
gaagagctgcagctcctcctgtgcgggaaatctgaaatagagtactatgctatgttggctaaaactggtgtcc

SEQ ID NO: 261936 - DNA, 75 bp, Homo sapiens
gtgtgtttctgcatagaaacagatttctttatgagaataatgttatcactattgatctggttcaaaattcttctc

SEQ ID NO: 261937 - DNA, 75 bp, Homo sapiens
accatggtatgacactgaaatctgtaacggttcgagaacttgtcttggacaattgcaaatcaaatgatggaaaaa

SEQ ID NO: 261938 - DNA, 74 bp, Homo sapiens
gaagaggctcagaagcgcctcaagatggccgaggaagaccggaaggccatgaacgtgaagctcttggagcaatt

SEQ ID NO: 261939 - DNA, 100 bp, Homo sapiens
caggcagatgagcagccctttgatctctgctttgggggccgaaggcagttctgcaagaggagctattctgatcttgccccaggatgggtgagttcaacga

SEQ ID NO: 261940 - DNA, 75 bp, Homo sapiens
tgatgaattgcaagtttgtgccccatagctgcacagcttcttctcagcctgttgataaccatgttagcccatctt

SEQ ID NO: 261941 - DNA, 100 bp, Homo sapiens
cggaggtggcagccatctccttctcgggaaggatcgaatcatatttgtaaccaaagaagatcatgaaactccaagcagtgcagaattggtggctgatgac

SEQ ID NO: 261942 - DNA, 83 bp, Homo sapiens
tttgccctggtggcccctgtccaggctgaagaagactctggataccagaaggccctattgatcaggggccagctataggaaga

SEQ ID NO: 261943 - DNA, 76 bp, Homo sapiens
tccgtgaaggcgtccgtcctgcgcatcgcagagtacatcgatgcccaccctgagaccatcgtcctggacccgctcc

SEQ ID NO: 261944 - DNA, 83 bp, Homo sapiens
ccaagttaacccttaccacccagcagcagggcatcaaggaatagacccatctctgcaagcagagaatagaattcctgggccct

SEQ ID NO: 261945 - DNA, 75 bp, Homo sapiens
gaagcctcttgtcccttcattgtcatctgcttttgaggcctatgagagctacaagaagaaggactacacccaggt

SEQ ID NO: 261946 - DNA, 49 bp, Homo sapiens
cgaatcagccttttcacgctcaagattctcagagagagttcaacagcag

SEQ ID NO: 261947 - DNA, 90 bp, Homo sapiens
cctcaggggccatggcgaagcacgagcagatcctggtcctcgatccgcccacagacctcaaattcaaagctgatcttgcatctttaatgg

SEQ ID NO: 261948 - DNA, 76 bp, Homo sapiens
ggaagctaccacatgcaaacatacaagcagtctcacctcaggttgactgggtttgactccaaatgggaaacttttg

SEQ ID NO: 261949 - DNA, 100 bp, Homo sapiens
ctcgctgttcgcggtgacggtggcgccgcccggggcgaggcagggccagcagcaggcgggagaatcggcaaggttggaaaccagaagcgtgttgttggtg

SEQ ID NO: 261950 - DNA, 89 bp, Homo sapiens
caaacagcccgtgaaattacaagaggctgccaggaggcttattcaaacctccttagagctaacatggatgggctgaagaagagagacaa

SEQ ID NO: 261951 - DNA, 86 bp, Homo sapiens
cttcaatactacctttatttccaccatagacaatgcagatcttcgtgaagactctgactggtaagaccatcaccctcgaggttgag

SEQ ID NO: 261952 - DNA, 90 bp, Homo sapiens
agatgctggatatccaggcatcccagctacgaaggatggaatcttcaatcaatcatatttcacaacctctctccttgcagagccagtgcc

SEQ ID NO: 261953 - DNA, 136 bp, Homo sapiens
ccctgggtcactttcagtgagtcatcgctgacagctgaggaagtctgcatccacattgcacataaagttggcgtcccctaccctgggctctcagcgcccaccccaagcgccgagaggaagatgtacgtcccatctt

SEQ ID NO: 261954 - DNA, 82 bp, Homo sapiens
cctcttctggtgtcaaagcttttggacattcctgggatactctcttaacttactggaataaagtatcacctcaggagctcat

SEQ ID NO: 261955 - DNA, 100 bp, Homo sapiens
agcgaactgaagaggttctacacaattgatacagatccacgggttttagaaaaacaagaattacagcagccaacctatgttgccctgagttacataaata

SEQ ID NO: 261956 - DNA, 75 bp, Homo sapiens
cagaccagcctcgatctgcgcgctacatcctgaaggactatgtcagtgatttccaaaactcagattctgaataaa

SEQ ID NO: 261957 - DNA, 115 bp, Homo sapiens
gatctggtggagctactggcgtggtagttaaaggcccagatgataggaatcccatctcatttaggatccaaactactggatacaggtgcatcgcttggaacatggagatggagga

SEQ ID NO: 261958 - DNA, 123 bp, Homo sapiens
gggccgcagcgggaccccagttcctccgccaagcgcggccgccgcccccgcctcagggatgatggcgccacttcctcagtttcggcactcaagcgcctggaacggagtcagtggacggataag

SEQ ID NO: 261959 - DNA, 100 bp, Homo sapiens
gcagactggtgacttcacttttgagtgcaactgccttccagaagtaaaatgcccattcccatcaagaccagacaatggatttgtgaactatcctgcaaaa

SEQ ID NO: 261960 - DNA, 50 bp, Homo sapiens
ccagtgttcaccatcctggccccggaagggacccagacatggagctgcgg

SEQ ID NO: 261961 - DNA, 51 bp, Homo sapiens
cgagaaccgtcagtttgagccagatggctatcttagcggcacagagacgag

SEQ ID NO: 261962 - DNA, 104 bp, Homo sapiens
gaagctgatacctgggggagataatgtaactgtgtgcaaggataacaggatggaggatgaagctgtcctggacagaggggcttccttcctcaagcatgtgtgtg

SEQ ID NO: 261963 - DNA, 50 bp, Homo sapiens
cctgtacagcctgcaaaactgccataaagaatgctgatgggagaaccatt

SEQ ID NO: 261964 - DNA, 143 bp, Homo sapiens
cgaagaagcgacagctgctaaagtggcatcctgggattttgttgaagccacacaaagaacaaattgcagttgtttgaggcttgtctgagacgacaggaatatagaagagacccaaatgagaagaaacgcgatcagttttgggg

SEQ ID NO: 261965 - DNA, 50 bp, Homo sapiens
cagtgtaggagaagcaggacctgagaactgagcccactcgcaagttggag

SEQ ID NO: 261966 - DNA, 101 bp, Homo sapiens
agagtgagagagagctattagagattgtgaagaagaatttcgatctccgccctggggtcattgtcaggtctctaattaacagaagatggcaaagcccagcc

SEQ ID NO: 261967 - DNA, 100 bp, Homo sapiens
gtatgttgaactggaaatataggacatgcgtttgagatctactgtgaagctacagagacttctgaagtggagagtctgcgacctcctcggttcttcaatg

SEQ ID NO: 261968 - DNA, 89 bp, Homo sapiens
catgattttcaagctcttgcattagaatctcggggaatgggagagatgcagacagacatgctgaactatctggaagtccactgaaaagc

SEQ ID NO: 261969 - DNA, 75 bp, Homo sapiens
aaaggataataaactagttgagaagcagaacccagctgaaggactggctttccttaaagtttcccatgtctcaat

SEQ ID NO: 261970 - DNA, 83 bp, Homo sapiens
ccaagctgaaggcctccagcaggacctccgccctcctctccggctttgccatgttacagaatgtctgaaggggacagtgtggg

SEQ ID NO: 261971 - DNA, 75 bp, Homo sapiens
cgtgcgtgtcacccacgcagacatcttcagccgctgccagtggagacctttggcgacttggcctttggcgacatc

SEQ ID NO: 261972 - DNA, 80 bp, Homo sapiens
cgagcagaactacggcgagcgggaattctatgagcatgccaaggctctgtgggaggatgaaggagtgcgtgcctgctacg

SEQ ID NO: 261973 - DNA, 100 bp, Homo sapiens
catgaaggtacttcgaaatcatctgcaagaaatacgaagccagattgtttcggttttaaaacatgaatcctacactcatccttgctgccttttgcctggg

SEQ ID NO: 261974 - DNA, 100 bp, Homo sapiens
cgtggctggaggagcaaggcatgatcctgaagcagacgttctgtgaccaggtatctcccagctccacattctgtaaggtgtacaccataaccccactgct

SEQ ID NO: 261975 - DNA, 83 bp, Homo sapiens
cgagccgggatctcaggtcctcgggggcggcggccacgccaaggacgggtttttagaacttcagccataaaaatgggcagaat

SEQ ID NO: 261976 - DNA, 97 bp, Homo sapiens
gggatggcaagatagcggcgcgggagcgtaccatatggcaatgacccttggccagtctctgggaactaaactcctgggatgtttacacaggtgctgg

SEQ ID NO: 261977 - DNA, 100 bp, Homo sapiens
gacagaacatttacttaacacatcatgaaggctagtttggatgtggaggggaatagactccatctatccatatgagcttgtgatgaatggaaaatactac

SEQ ID NO: 261978 - DNA, 74 bp, Homo sapiens
cttgtctatcttcagacacaaaagaagagtcaagtaccattggccaggatcaaacgcttatggaacgtgataca

SEQ ID NO: 261979 - DNA, 75 bp, Homo sapiens
tgcagatgaggcagcatgacacacggcctgactccccatccccaggatgtcaacctcagtccctcaaggccatac

SEQ ID NO: 261980 - DNA, 100 bp, Homo sapiens
tcctttattgcagcaggaatttggctggcgcggagatctccaccgtgaacccagaacagtattcaaagcgctttttggactttattggccacatcttgac

SEQ ID NO: 261981 - DNA, 75 bp, Homo sapiens
cgtagaattaagacggagttcctagtgcaaatgcaagtccctgcactaggtcagacaatcccctttggggtacag

SEQ ID NO: 261982 - DNA, 90 bp, Homo sapiens
ggttcgtgcgctgtggagacgcggagggtcgaggcggcgcggcctgagaagtgagcttgtagtggacaaaacaaagaggaaaaaaagaag

SEQ ID NO: 261983 - DNA, 120 bp, Homo sapiens
caaagaccgccaggtcatgaacatgtggagtgagcaggagaaggagaccttccgggagaaacaatgcagatcttcgtgaagactctgactggtaagaccatcaccctcgaggttgagccc

SEQ ID NO: 261984 - DNA, 100 bp, Homo sapiens
tgatgagccatctccacttaatgactgtctcacattggccggcaacttgttccagattcatgcccaagcacaaaacaacccatttaaagaagatgctcgg

SEQ ID NO: 261985 - DNA, 87 bp, Homo sapiens
ggagagcctgcctgcacggaagagacgcctcctcgggtcctgatgaagaagctgttgtggatcttggcaaaactagctcaactgtga

SEQ ID NO: 261986 - DNA, 83 bp, Homo sapiens
ctcccagccacctctgaagttgccaggcttcccaacattcttgtctgtggaggtgaacacagaaaagctgacagcctttgtaa

SEQ ID NO: 261987 - DNA, 50 bp, Homo sapiens
tgagatcatggtggccaaacccacaggggcatttgacattcaaggatgta

SEQ ID NO: 261988 - DNA, 100 bp, Homo sapiens
ccggcgcccagcggtagccctccttgcgcctccgattcccaggaagaccaacactgtcatctgaagttggaatcatcatctgtgatattgctaatccagc

SEQ ID NO: 261989 - DNA, 83 bp, Homo sapiens
tgtcaagcgagaaagaacatcctctttaacccagttcccaccctcacagtcagaacatgaaaggctcccggagcagcgctgac

SEQ ID NO: 261990 - DNA, 98 bp, Homo sapiens
ctgctagaggaggcgttgcaggacagcccccaggcacgccccaaaggcgagggcctgactccataccagggcaaaaagcgctgcttcggcgagtacaa

SEQ ID NO: 261991 - DNA, 101 bp, Homo sapiens
atctaactcttatttctccgttggcccaaccagtcccagcgctgtcgtgctcctctactcgctcaccatctgctacctggatatgctgatgaccagtgagg

SEQ ID NO: 261992 - DNA, 73 bp, Homo sapiens
ggatggggtattcttgaaccaggtcatgctccaaatgactttgaagaatatcctgaacatagaacgaactttt

SEQ ID NO: 261993 - DNA, 51 bp, Homo sapiens
attctttttgggtgggagcaactctgaagtgccgcagtgtgtctggagaat

SEQ ID NO: 261994 - DNA, 50 bp, Homo sapiens
ggtggacagaaagtcagcctcttgtggcatacagaaagttagccaaggaa

SEQ ID NO: 261995 - DNA, 98 bp, Homo sapiens
aaggcgcgagtgaggaaaggaggtactgtagaatcgaattctctgggttgatgagaacaatttgacagctcatgtagaggctggcataacaggacaag

SEQ ID NO: 261996 - DNA, 100 bp, Homo sapiens
gaccagtactgaaagagcctttattcatcgactcagtcagtctcttggtttggtctctaaaagtaaaggaagcaaagggagatattaccacacagaagag

SEQ ID NO: 261997 - DNA, 100 bp, Homo sapiens
tgggggcgggcggcatcggctgcgagctcctcaagaatctcgtgctcaccggtttctcccacatcgacctgctgtttgcagacaaggtcccaaagacagc

SEQ ID NO: 261998 - DNA, 90 bp, Homo sapiens
ttaatgtggaatcaaggatgaagtttaacacaggaatgagaagtagagcacatagctgctaagataagttccaggaatggatggaggtgc

SEQ ID NO: 261999 - DNA, 89 bp, Homo sapiens
aacagattcagaaggagcaggattaccaaagggtgtttgaggcagagcagtttggatgcccacagcgtgctcagaggatgaacacagcc

SEQ ID NO: 262000 - DNA, 96 bp, Homo sapiens
gttgaaaaacgcttttcacgtcacctggagagatgcacaggaggataagatcaatgccctcattaaagcagccggtgtaaatgttgagcctttttg

SEQ ID NO: 262001 - DNA, 100 bp, Homo sapiens
tgggaggccactagcagccagttccggcccgaggacaccgactaccagcaggtgaccattgtgaggtagatattttgttctaattttccagatgaggaag

SEQ ID NO: 262002 - DNA, 74 bp, Homo sapiens
cggcaaggggacccagtgcgcccgcatcgtcgaggggttggccggagacctacgacatgaatacctcggagccc

SEQ ID NO: 262003 - DNA, 75 bp, Homo sapiens
gctggggcggaatttcaagatggatcggttatcgccagtgtgacccttcagaacgaaagttatatggaaaatcac

SEQ ID NO: 262004 - DNA, 100 bp, Homo sapiens
ctttggaggcagatctggaaacagtgtagcagcattggttttccaaaaaatgtgagactttttcttggacgaattcagtgtggtttattgacaatcattt

SEQ ID NO: 262005 - DNA, 90 bp, Homo sapiens
tggagcacaggcttgtccggggagcagtatgccggaagctggttttcaggccacaaatgctttcacagaatggaatggagccagcacggt

SEQ ID NO: 262006 - DNA, 100 bp, Homo sapiens
gaacaagacaacttatttgatgcacctgaatggacagaagaggacctcagccaactgacaagaagtatggttaagttcccaggagggactccaggtcgat

SEQ ID NO: 262007 - DNA, 80 bp, Homo sapiens
cacagattccagcttcggaacaagagaccctggcagaagtcaattcatctggaaagactatctctgagtcagacttaaac

SEQ ID NO: 262008 - DNA, 90 bp, Homo sapiens
agcagactcataagcggctagagcagtgcctccaattacgtcacctccaggctgaagtcaaacagataccatgtttgtgtggaagtgccc

SEQ ID NO: 262009 - DNA, 100 bp, Homo sapiens
caggacatggggcagcgtcttaacgtttacctaatggtgtcctcagttgtgggcttctatagctctccactcttccggagcctgcggcccagatggcacg

SEQ ID NO: 262010 - DNA, 101 bp, Homo sapiens
gaggagcgggccctggaggagcagctgctcaagtactcgccggacccggtggtcgtccgcggctccggtcacgtcaccgttaactctcaggagccttctcc

SEQ ID NO: 262011 - DNA, 98 bp, Homo sapiens
ggcgctcctgagaccctccagcgctgcctggaggagaatcaagagctccgagaagccagacctgccgcccccacccagcaaagcccccatgaagaagg

SEQ ID NO: 262012 - DNA, 75 bp, Homo sapiens
agaccagccgggccctggtggccgacagccatcctgaaagggcaattgaaggaacagactaaaaatcgtgtcctg

SEQ ID NO: 262013 - DNA, 100 bp, Homo sapiens
cccacgagcgctccctcaacactgacgtgctctttgggctgctccgggaggactactgttcgaagatttttggaagaatactgagaacggcataaagtga

SEQ ID NO: 262014 - DNA, 97 bp, Homo sapiens
caggcgtccgctacttcagaagagtgtactgtcgcatggggagtctgtaacgaggagacatcacagctttcccagatcgggaggaaaaatatggaat

SEQ ID NO: 262015 - DNA, 103 bp, Homo sapiens
tgagctcaaggccctcaggctgctgaacttccagaggcaggtggttcagtacatcggggagatctgccgctacctgctgaagcagccggtgcgcgaggcggag

SEQ ID NO: 262016 - DNA, 97 bp, Homo sapiens
gccattgcacccaatgttacagtcatggttggggaattagttggagcacggcttattgctcatgcaggttttccgggactccgtgggatccgcggct

SEQ ID NO: 262017 - DNA, 100 bp, Homo sapiens
taagaagaaaaagagcaaagataagaagagaaaaagagaagatgaagaaacccagcttgatatgttgggcagagcggcttgggtaaatccaccttaatca

SEQ ID NO: 262018 - DNA, 108 bp, Homo sapiens
gttttcttatttagccggagtgagaagcaagaaggccctggacacagcaatatctctgggctttcacaggaaaatatatgcagatgatgaacattcttaagccaattg

SEQ ID NO: 262019 - DNA, 98 bp, Homo sapiens
caacttcaacaatgccctggagtcaaagactgctgccagcggggtggaggcgaacagcagaccaagttttcatgggctgagctgctgagttcagcctg

SEQ ID NO: 262020 - DNA, 82 bp, Homo sapiens
cagatcgcgagcggctgcggaccatttataaccgcgacttcaagatcaggtacgccatcccaccagagcacggcaagcgcct

SEQ ID NO: 262021 - DNA, 100 bp, Homo sapiens
gagtgaagtatttgtgctataccatgaaagtatttacaaaggtacatggtgcagtggccgggagcacgcatccttcggcgtcaggagctagatgccttcc

SEQ ID NO: 262022 - DNA, 98 bp, Homo sapiens
cctctccttagtcgccgccatgacgaccgcgtccacctcgcaggtcttccagagaaccgctttggtttgggaacaccagaaaagaataccaaagcaga

SEQ ID NO: 262023 - DNA, 82 bp, Homo sapiens
gcggagtggcgcccggcgaggtagcgccaggcgagtgtggacgaatgtggaacctcgctctgtggctgtgttcccttggcac

SEQ ID NO: 262024 - DNA, 82 bp, Homo sapiens
agcttgccaccaaagacctgcgactttgctcagtctgcgctcctcagaccaccggcaggtgaacagcctgatgcagaccgag

SEQ ID NO: 262025 - DNA, 102 bp, Homo sapiens
atcatgtccctctaacacggcctttcaactttgcttacacagtcttatgatgtaatcagcgcgatttcacttcctgaatttcgatgaattctaagacatggg

SEQ ID NO: 262026 - DNA, 100 bp, Homo sapiens
cgtggaagatttagaaagagagcctggaagacctagatcttcgctgctggtgaagaatattcagctggaggatggcaaaatgatcctggcctcgaacttc

SEQ ID NO: 262027 - DNA, 98 bp, Homo sapiens
attcgcctaaaagaaggtctggatatatctcatcttcaaggacaaggtttattacccagaactctttgtctgggtcagtcaagaaccatttccaaaca

SEQ ID NO: 262028 - DNA, 73 bp, Homo sapiens
aggaggcattgacatatatcatcttttgaaggccactctctgacccaatttgttcgccactgtgcggatcatt

SEQ ID NO: 262029 - DNA, 82 bp, Homo sapiens
gactgtttggagtgaagaagtagaaattgaaagagaagtgctcttagaaaaggttcgatacaagaggctgttttcctagcgt

SEQ ID NO: 262030 - DNA, 98 bp, Homo sapiens
accacttaccccttctcaccgaggaagagcgggagaaaggttgacgaaggatcagagattggtgtattcgggcagactgcttcccgatcatctgcagc

SEQ ID NO: 262031 - DNA, 83 bp, Homo sapiens
agaccctggagcctcagttggaagcagccgatccagcctgcggagcctgtggggcagaatttcgaggatgtcagatgtaaatg

SEQ ID NO: 262032 - DNA, 100 bp, Homo sapiens
cccgacgaccccgagtcgcagatggcctgccacgttttccgcgccacagaccccagccaggtatgcttcagaagtgtccttctgttgatgacttcgtaag

SEQ ID NO: 262033 - DNA, 90 bp, Homo sapiens
gctacctgcattcactgaacatcgtttatagagaaatctgacagaatattttgtggctgtggatgttaacaacatgttgcatctgtacgc

SEQ ID NO: 262034 - DNA, 96 bp, Homo sapiens
agaagagaagtggaatcctcagacctcaagctttttgcaagtagctttggatatgttaaatcctcatgttactttgcctgttttttacccacatct

SEQ ID NO: 262035 - DNA, 97 bp, Homo sapiens
acagacaatgccaatttacgtgtcattatggaactacttatgagctttatcttcaagccaggatgaagggagactgggcaagactcttacgccccac

SEQ ID NO: 262036 - DNA, 51 bp, Homo sapiens
gcagctgaagccgctgcccctgctacagcatccgcacttccactaatagcc

SEQ ID NO: 262037 - DNA, 102 bp, Homo sapiens
ggctgggcgacttgcgaggatgagagcgacgaagccaactgtccaggccgacttaacattacctatcccatgctgttcaaactgaccaataagaattcggac

SEQ ID NO: 262038 - DNA, 90 bp, Homo sapiens
aatgactttactgaagaggaggaagcccagggtccttttgtacaagtggatgaactgatggaaattttccgaagatgcaagataccaaat

SEQ ID NO: 262039 - DNA, 125 bp, Homo sapiens
caatgctgagccttcagaatcagacactgcccgatatgttacatcaaaaattcttcatctggctcagagtcaagaggctagtattactagcttgaaacaagctgccctggttaaagcgcctctca

SEQ ID NO: 262040 - DNA, 75 bp, Homo sapiens
agacttggccaaatggacgggactattaagtgggtgtataacattctcgacaagaaggctgaagcggaccggatt

SEQ ID NO: 262041 - DNA, 75 bp, Homo sapiens
gcctcatctactgcacacttgagtccatgagattttagagtggtagagatggaagattttgatgcaaatatcgaa

SEQ ID NO: 262042 - DNA, 75 bp, Homo sapiens
gaaagagaagctagaatctgccgtcttttgaagcaccctaatattgtttccccctttctagggtgaggatggttc

SEQ ID NO: 262043 - DNA, 73 bp, Homo sapiens
ctgctccgggacaacatgctgcggggcacagtgcccaccagaagtatgtccgacaagcctggcagaaggcaga

SEQ ID NO: 262044 - DNA, 75 bp, Homo sapiens
tacctgagtccaggacaagtgacttggagagtgtgctcttctgtggcaggttttgagaacagagtgctgttttag

SEQ ID NO: 262045 - DNA, 74 bp, Homo sapiens
agacccggaggaaactaacctcaacctctgccatcacaagggcctccggtgtggctgtctctgatggtgtcatc

SEQ ID NO: 262046 - DNA, 75 bp, Homo sapiens
tgaggcctccccagccttgtggaactgctagtgaaaactttagtggctgacactcctctaactgcggtagatttc

SEQ ID NO: 262047 - DNA, 75 bp, Homo sapiens
agcctcatctactgcacacttgagtccatgagattttagagtggcacaggagcagagaagactggcgtgtgcccc

SEQ ID NO: 262048 - DNA, 76 bp, Homo sapiens
caagttcattggatcaaacatgtcacaagagtcggacaagcatccgtgtcattctggaccttactcccaactaccg

SEQ ID NO: 262049 - DNA, 100 bp, Homo sapiens
ttcatttccttgatcctgaaatggctcgagtttcaggagcagcagaaaggtggagaccaacaagaacagctcagatctaattatcatggacctgcgacag

SEQ ID NO: 262050 - DNA, 82 bp, Homo sapiens
ctccccctccaccttgctgaccaccctcatgttctttaataccaaaattcagaaggagctggcggacatcactttagaccct

SEQ ID NO: 262051 - DNA, 137 bp, Homo sapiens
agcagcagcttacagcccaacatgaactccagtgacccagacctggctgtggtcaaacccacccggcccaactcactagacattactgccgggagtgttgagtgaagggaccaggtggagatggtgagtaattcccg

SEQ ID NO: 262052 - DNA, 90 bp, Homo sapiens
ggcggctgctggtagttccatgctgtctgttcagacttcagcttggtctgatgttctgagcgaagaagcaatactgaaatggtataagga

SEQ ID NO: 262053 - DNA, 96 bp, Homo sapiens
cacggatcggattcctcagctacgaggaggcgctgaggagaggtgatttgtggagctatgatttcttcagtggtgaatttgtggtgtcacctgaac

SEQ ID NO: 262054 - DNA, 87 bp, Homo sapiens
gacagttagtcacccacctacatgttgagattttacatcctgaagtccaaactctagatctacggagctgcgatatatcagatgctg

SEQ ID NO: 262055 - DNA, 100 bp, Homo sapiens
ctggaggatgcctatgtattccctggggatggcgcatcacacaccaaaggttcgagaacttgtcttggacaattgcaaatcaaatgatggaaaaattgag

SEQ ID NO: 262056 - DNA, 100 bp, Homo sapiens
ggctacctcaaaatggacaaccatcgtattcccagagaaaacatgctgatgaagtatgcccagttggggttagacttggaggaactcgaggagatagaag

SEQ ID NO: 262057 - DNA, 98 bp, Homo sapiens
cctttcaatgtgacacaaggaaagtattctacagaaactcagccacctgtgacaaatttgagtgtctctgttgaaaacctctgcacagtaatatggac

SEQ ID NO: 262058 - DNA, 73 bp, Homo sapiens
tgattcgtagcacgcttgcttgcatcctggaatattctcaaccaggccctagactggagctggttacagacgg

SEQ ID NO: 262059 - DNA, 100 bp, Homo sapiens
gctgtacaagtggaccaactatctgagcgaaacgcttcgttaagggactcaggcagtacgggaagaacttcttcagaattagaaaggagctgcttcccaa

SEQ ID NO: 262060 - DNA, 100 bp, Homo sapiens
ttttgctagctgctaaaaccacctttgtcaccagaatgaatgaagtgcttcagatttaaataatttggagcaagaggtggtggtggccttcccccgaaga

SEQ ID NO: 262061 - DNA, 75 bp, Homo sapiens
tcgcggagtcccaatgaaacgggcagccatggccctccacagcccgcaggtcagactatgatgactggagaccgt

SEQ ID NO: 262062 - DNA, 75 bp, Homo sapiens
gctgcaccccaccttgatccagcggacttacggggtccgcaagcaggtggtgaacatcccgtccttcattgtccg

SEQ ID NO: 262063 - DNA, 99 bp, Homo sapiens
caaggaattaccttggagaggctgtgagccacaatgcatcgctggaagtagccaatccaacttagaaataatgtttcattcaagataaggctcgtggct

SEQ ID NO: 262064 - DNA, 83 bp, Homo sapiens
aatattttgcctgctggaacctgctgtatctactcaagagtggaagttttcacaggagattttgtttctgtaagcagtcctga

SEQ ID NO: 262065 - DNA, 100 bp, Homo sapiens
cgccgccgccgccttgctgctgctcaaagctgctgccgccccttgggctaaaagaacatgttcttcaagtatacatggaataactttttgcatacacaag

SEQ ID NO: 262066 - DNA, 89 bp, Homo sapiens
gctcttccccacctgcccggtgcccgaggaggcagccaagctcgtagcctgccactccgtgcgtgagcagaagtggcctatatcgctcc

SEQ ID NO: 262067 - DNA, 106 bp, Homo sapiens
accccggagcccaaacccggggcaggcgggcagctgtgcccgggcggcacggccaggtgagaagccctaccactgcaactgggacggctgcggctggaagtttgcg

SEQ ID NO: 262068 - DNA, 74 bp, Homo sapiens
gctctgaccaccgtgatgagcccctgtggaggtgaagacattgtgggccccttcacagatgtagtcactacaaa

SEQ ID NO: 262069 - DNA, 82 bp, Homo sapiens
tctggtgccaaatacattgtcttaacttccaaacatcatgaagtttatgatgtctctggagcagcaagtgacagaaattgtg

SEQ ID NO: 262070 - DNA, 96 bp, Homo sapiens
gaaagcagcatagagaatgagatagccgtcctgagaaaagtgacagaaggaagtcaaggcaccattatgactcggatgagaaatcagaaacaagag

SEQ ID NO: 262071 - DNA, 50 bp, Homo sapiens
gtcagcactgactttcagctatggaatcgtggtggtcctgctccatgatg

SEQ ID NO: 262072 - DNA, 82 bp, Homo sapiens
aaaggagctcggggactcccccaaagacaaggccctagcacaaaacacagatcttaaagaacgcttacgcagaatccatgcc

SEQ ID NO: 262073 - DNA, 100 bp, Homo sapiens
gaaccttgggtgatttgttctgtatcagaagacaatatcatgcaagtgtggcaaatggggcatatgatattttcctgaatgcaaaagagcaaaacattgt

SEQ ID NO: 262074 - DNA, 83 bp, Homo sapiens
gacggctgcttcctgggcgacgtggatgatatcatcaagttgaatcgaaaggaagggaagaagcagaattttccaagactaaa

SEQ ID NO: 262075 - DNA, 100 bp, Homo sapiens
ctgactcggagcgaggagacccgagcgagcagacgcggccctggcgcccgccctgcgcactcaccatggcggaccccgtggtttaatggatggggcttta

SEQ ID NO: 262076 - DNA, 83 bp, Homo sapiens
atgtgtttgagcaaacctcgcctctcctacaacgacaatgcagatcttcgtgaagactctgactggtaagaccatcaccctcg

SEQ ID NO: 262077 - DNA, 100 bp, Homo sapiens
gaacaagaggcagctggaacggcgggacccactcggcagcagttcacagtgagcagtggcgagagcccaccgctgagcgccggcaacatctaccagaaga

SEQ ID NO: 262078 - DNA, 50 bp, Homo sapiens
ggagaactacaggaacctggaggctgtggtcttgctctgttgcccaggct

SEQ ID NO: 262079 - DNA, 100 bp, Homo sapiens
tggagagaaaggacagaaaggagaaccagcagtggttgagcctttctggcataaagcatgcttccattgcgagacctgcaagatgacactgaacatgaag

SEQ ID NO: 262080 - DNA, 100 bp, Homo sapiens
agatgtcttttgaaaggtgtactgcaaggaacaaaatgtttgtaaattctccttttaccaaggactcaagagtagccttcctcgaggacctgcctttccc

SEQ ID NO: 262081 - DNA, 75 bp, Homo sapiens
gcggtggagcgggacacgaacgtgcgctgataaagcagtttgtgtccgacgtggcctggggggagctggactacc

SEQ ID NO: 262082 - DNA, 82 bp, Homo sapiens
gcgcgaggtccgcgcagcccagcgcagccatgtgcagaccatgaattacgtggggcagttagccggccaggtgtttgtcacc

SEQ ID NO: 262083 - DNA, 101 bp, Homo sapiens
gccccgggccccgatggccccgaccgcgtgctggagctcttcgacccacccaagagggagaaccgaagattacaggaggccagcatgaggttggaacaaga

SEQ ID NO: 262084 - DNA, 99 bp, Homo sapiens
gtccctcacatccgatgcaccctttttgtcagattatcaggatgaggtgaacgagataattgggagagacatgtcccagatttctgtttcccaaggagc

SEQ ID NO: 262085 - DNA, 95 bp, Homo sapiens
ccaaacggaggaatacctcgtatgcaacctcaggcttcagccaagactaaggtgtcagtatgttcttcaagctgctctgctcctgggcccaagct

SEQ ID NO: 262086 - DNA, 107 bp, Homo sapiens
gtccactccacctggacctgccccatggaggtgctgcgggatcacctcctcggcgtgagcgacagcggcaaaactgtggatattcataaggagaaagtggcacgaag

SEQ ID NO: 262087 - DNA, 90 bp, Homo sapiens
gctagaattacctggaacttcatcatcatctacttcacaggaattgccatttgaagtgaaagtacttagcattgatcaaagaaatttcaa

SEQ ID NO: 262088 - DNA, 90 bp, Homo sapiens
aacctggctgaagaatctgttggttcagagatggttctaggcaacaagaatgggtgaatcagcaaagggaagatattgaaaggcaaagga

SEQ ID NO: 262089 - DNA, 108 bp, Homo sapiens
tgatgaaaacaaaatagcagagaaacctgactgggaggcagaaaagaccactgaatctagaaatgaggaaggtgtcttgctgcaggtaactaatgaagaagtggtcaa

SEQ ID NO: 262090 - DNA, 141 bp, Homo sapiens
gctgggaggtggagtcgttgctgttgctgtttgtgagcctgtggcgcggcttctgtgggccggaaccttaaagcatgtacagaagcatattcccaatctgatgagcaatatgcttgccatcttggttgccagaatcagctg

SEQ ID NO: 262091 - DNA, 50 bp, Homo sapiens
cctggatccaggataacggaggctggatgcttgggatttgctttacattc

SEQ ID NO: 262092 - DNA, 100 bp, Homo sapiens
cagatcgggagcgcaaggtcgccctcaaggccatgatcaaaacaataatgcatatactgccatgtcagattcctacttacccagttactacagtccctcc

SEQ ID NO: 262093 - DNA, 100 bp, Homo sapiens
tgtaatgaatttcatacaccccatgatgcagcatttttcctgtctaggccaatgtatgcccatcatatttcggtgttggggatgtcctttgcactgaccc

SEQ ID NO: 262094 - DNA, 75 bp, Homo sapiens
tccggacgacgaggaaccgcccaacatggcctcggaggcttcctggactgggtccccaagaagatgcagcgggtg

SEQ ID NO: 262095 - DNA, 50 bp, Homo sapiens
gcaagcaggcaacctgaatacaggcgtctaaatactttaaacaaatgtgc

SEQ ID NO: 262096 - DNA, 75 bp, Homo sapiens
tgacccggcagtacggcaaatatggcggagacaatggcgatgaccactcagaaggaggcctggtggagaaccacg

SEQ ID NO: 262097 - DNA, 75 bp, Homo sapiens
aacttcctcaccagcaccttacagatcagtgtgcgtgtgaccaccatggatgcagagctggagtttgccatccag

SEQ ID NO: 262098 - DNA, 90 bp, Homo sapiens
cctctgaagcctcctcgccgccgtttctgagaagtggtaaatgagaatgtcagtctcgtgatctcgcggcagttgctgactgatttttgc

SEQ ID NO: 262099 - DNA, 83 bp, Homo sapiens
caacaagaacctgaacgaggacacgaccttcctgcccttcacgctccaggagctagcccgcgggaggactcagactccagcac

SEQ ID NO: 262100 - DNA, 98 bp, Homo sapiens
ctgctatgcttcgaagctgtagtctgaatcaacctaagttttaaacagaaggtgaacctctgagacaagttggatggcttgaggactggtactaaaag

SEQ ID NO: 262101 - DNA, 98 bp, Homo sapiens
aggagctgctgctggacgccaaccagctccgcgagctgcccgaggtggaatacatgttggtatcttttgatcatgaaaataaaaaagtccggttggtc

SEQ ID NO: 262102 - DNA, 76 bp, Homo sapiens
cgacagtttcttttccggccctgggatgtcacgagttctctgtggcccatgaccttcggcctggcctgctgcgccg

SEQ ID NO: 262103 - DNA, 73 bp, Homo sapiens
tccccgggggcgccatggcgaccggagcgaacgccacgccgttggctgcatcttcctcccgtgaggctggccg

SEQ ID NO: 262104 - DNA, 100 bp, Homo sapiens
ttgtgtccatgaaccgcggcatcaacaatggtagcgacctgcccgaggaccagctgcggatttcaggtatgctgctgaaagtgggaatcctctacattgg

SEQ ID NO: 262105 - DNA, 75 bp, Homo sapiens
tgcgcagaaggccggggccggccagaagcgggcggcgcgggggagatgatatatgcaagttgccgaaagacgaag

SEQ ID NO: 262106 - DNA, 100 bp, Homo sapiens
gacagagcacctaggattaaattggtttcctaagtgtttgccaaactactgtgaacatggaggaagctgctcccagtcctggactaccttctattgtaac

SEQ ID NO: 262107 - DNA, 50 bp, Homo sapiens
cctcctgagcagctgggactacaggtggtcactaactgccaagagagaat

SEQ ID NO: 262108 - DNA, 90 bp, Homo sapiens
atggccgggatcatcaagaaacaaatcttgaagcacctctccagcaagccctcgcagggagcctggtagcaggggccggaagcacagtag

SEQ ID NO: 262109 - DNA, 98 bp, Homo sapiens
gatcccagacatcgtcgtgggagaaattagagaagaatctttctgataggcttgcatatactttagaagaacagaagaacctcacagtctgtcctgat

SEQ ID NO: 262110 - DNA, 95 bp, Homo sapiens
cggcactgctacctctgacccaaagcagggcaccagaactagcacctctgaaaagtaaaatgatctatgcaagctccaaggatgcaattaaaaag

SEQ ID NO: 262111 - DNA, 74 bp, Homo sapiens
acctgtacttggtcatgcagctgtttcaggcacagaactgtatatccaataatagtgaaatggatcccactaat

SEQ ID NO: 262112 - DNA, 100 bp, Homo sapiens
gtaagaactcctacatcaaactctccttcaaagaacatggccagattgagagatggacagagacgtatgtgcgttggtctcctaagggcacctacctggc

SEQ ID NO: 262113 - DNA, 100 bp, Homo sapiens
cattaaagtgtcctttgccactagaagacctgaattcatgagaggaggtggaagtggaggtgggcggcgaggtcacaaggcacttaaagcattgttgagg

SEQ ID NO: 262114 - DNA, 100 bp, Homo sapiens
gccgtccgccaggaagactccctgcctcctgagtcccaacctgtcatttactccatcctttatagtgatgctacaggacgaagaggaatggataaaaaca

SEQ ID NO: 262115 - DNA, 127 bp, Homo sapiens
agaatgtcacaggtccagggcagaggaccaacatgggcattttgtttatgagcaagggggccatcagtggacgaagtcgctggagcaacctggagaaggtctgtacctccgtgaacctcaacaaggc

SEQ ID NO: 262116 - DNA, 98 bp, Homo sapiens
gagagcccccaggtggaccatggcggtgagattccagggtcctcactgagcagcgagtcgtcccccgtgtcctctccggccaccaaccacagctcccc

SEQ ID NO: 262117 - DNA, 100 bp, Homo sapiens
cgagatgtgggagctgctggccgcggcgtgggcagttcaggggctgggcggctgaggcagttttatacaatgacagatctgttctggaaaatcatcatgc

SEQ ID NO: 262118 - DNA, 73 bp, Homo sapiens
gctctaggatgtgcgttcttccactagaagctcttctgagggaggatgagaacaagttgagcagtgccaacgg

SEQ ID NO: 262119 - DNA, 80 bp, Homo sapiens
catttacagaaagagtcaacagcagtggcaacagtgacaccacagccaaagccctatgggaagctttactgaacactaag

SEQ ID NO: 262120 - DNA, 90 bp, Homo sapiens
ccacccgaggagttccgcccctttctggcaaagatgagggggattcttaagggacccttatgatcctcaagtctgcctgcagcaacaacc

SEQ ID NO: 262121 - DNA, 100 bp, Homo sapiens
cattgaggaagaaaaagaagacttgcttcagcatttctcacaagggcaagtattttgtaaccttcccatatccatatatgaatggacgccttcatttggg

SEQ ID NO: 262122 - DNA, 100 bp, Homo sapiens
ccccttctcagattgcaaacagtggttctgctggattgataaacccagctgctacaggagctggagtcagatggcagcactatggaggactattcacagg

SEQ ID NO: 262123 - DNA, 100 bp, Homo sapiens
tgccaccgccccggagcctcacagcctgggcatcctccatgcctcctacagcgtcagagcctttgtggtagaaacccagccctgcatgccccaaactccc

SEQ ID NO: 262124 - DNA, 49 bp, Homo sapiens
cagctctcaagagagtctaaagatgcttgaagcccacatgcagagctac

SEQ ID NO: 262125 - DNA, 90 bp, Homo sapiens
cgcgtctcggaaaccggtagcgcttgcagcatgagaaggtgttcgccagcctcccgcaggtggagaggggcgtctccaagatcatcggcg

SEQ ID NO: 262126 - DNA, 102 bp, Homo sapiens
agatgccgcagcccgagtcccagaaggcggcgatcctgggctgcgggcaaggcggaatgggtaccacagaccatgtcatcgtcctggcgtccacgaaccgag

SEQ ID NO: 262127 - DNA, 100 bp, Homo sapiens
ccctccttctactaccggcccacgccctccgactgccaggcaccgcgtccgtgctgcagcgccggtcccccaatgaggagtacgtggaggtggggcgcct

SEQ ID NO: 262128 - DNA, 101 bp, Homo sapiens
gcccacacctccaggcgaccgggtttcctgaaatgcagtttttccagcaagaaaatgtgagaaaaattcttacagatgttcttttctgttatgccagagaa

SEQ ID NO: 262129 - DNA, 74 bp, Homo sapiens
gcctgagcaggagagacagatcacagccagagaaggggccagtcggaaagtacatcaggaacgtctctatcaag

SEQ ID NO: 262130 - DNA, 75 bp, Homo sapiens
agctcacacttttgtggttgatgtagctcagccaggcgttgtggggcagatgatcgaggcagctgaagagcgccc

SEQ ID NO: 262131 - DNA, 100 bp, Homo sapiens
aagagaagacgctttacccgactctttgggccgttatctcacatggtgatggaatttcctgataatgtgttaaatctcgatggacatcagaataatggtg

SEQ ID NO: 262132 - DNA, 51 bp, Homo sapiens
cggtgcggagactccatgaggccctgttattgggactctgcctatgatgac

SEQ ID NO: 262133 - DNA, 120 bp, Homo sapiens
cccgagtatgcttcgtttttcgccgtcatgggcgcctcggccgccatggtcttcagcgacaatgcagatcttcgtgaagactctgactggtaagaccatcaccctcgaggttgagcccag

SEQ ID NO: 262134 - DNA, 73 bp, Homo sapiens
cagcagaggaagccttgaggggcttgtatggtcgtgtgaggaaagggtgcctcagttctccttctcccgcttg

SEQ ID NO: 262135 - DNA, 82 bp, Homo sapiens
caacgacctggcggtggggctgcggcgcctgggactgcaccgcaccgagggcgagctccagagttcttggagtctctgcgga

SEQ ID NO: 262136 - DNA, 73 bp, Homo sapiens
gacaagagcatcaaccctctgggtggctttgcaaaatgttacgagatgacagatttgacaaataacaaagtct

SEQ ID NO: 262137 - DNA, 100 bp, Homo sapiens
cctcttcaaggagggaaaagaaagaatgtatgaggagaattctcagcctagtactatactggcaattgctggagaagattttgcaattgttgcttctgat

SEQ ID NO: 262138 - DNA, 83 bp, Homo sapiens
ccgccacattaccattttttcacccgagggtcggctctaccaagtagggaagaaggagaaagggccaacccctgaagaagcaa

SEQ ID NO: 262139 - DNA, 80 bp, Homo sapiens
gtgttcgagaacgaccccgagacggatttggggtggaaggcaggcatggtcaaacccatttcactgacaggagagcagag

SEQ ID NO: 262140 - DNA, 98 bp, Homo sapiens
aatttgatggtactgaagttttaaagggagatgagcttgctgatgaccgtatggcactggtgtcaggcatcagcttagatccagaagcagcgattggt

SEQ ID NO: 262141 - DNA, 75 bp, Homo sapiens
ggatgacaacgtctgcatggcctttgcagggctacagaactggctacccttatcgataccctgctctgagagaga

SEQ ID NO: 262142 - DNA, 74 bp, Homo sapiens
tggccggaatgcagtaccctcagcagcaggagtggagtcaacatatcaatggagcaagtcacagtcgtcgatgc

SEQ ID NO: 262143 - DNA, 82 bp, Homo sapiens
atttcgtcccagcctgacaaccttggaacagaacaagaggacaggaggtgtcgttccaggagaatggggtactaagagaaaa

SEQ ID NO: 262144 - DNA, 51 bp, Homo sapiens
tgatttctgcatttccatctgaggatctcactctgttgcccaggctggagt

SEQ ID NO: 262145 - DNA, 98 bp, Homo sapiens
tcgggaccaaggatcacgtcatgactccgggtgtccgcaatgttgccagtgtctgtctgcagattggctacccaactgttgcatcagtaccccattct

SEQ ID NO: 262146 - DNA, 88 bp, Homo sapiens
caccctagacgaagcctttgaagaattaagactgctgctggtggtgacaatgtcaaataacggcctagacattcaagacaaaccccca

SEQ ID NO: 262147 - DNA, 100 bp, Homo sapiens
gcaccgtctcccagtacgaccgggacaagtactggaaccgctttcgagaccgtcgtctcggagatgcagccaagaaagccatcagtaaattgacaaccag

SEQ ID NO: 262148 - DNA, 100 bp, Homo sapiens
acttcacaacatgatagttgatctggataatgtggtcaaaaagcatcagaagagctaacaattgctggaatgacctttacaacttttgatcttggtgggc

SEQ ID NO: 262149 - DNA, 88 bp, Homo sapiens
ccggggccggggctgcggggcgaggatcatggttttggcaggagacacactgcccattgaggtatactgccatctcccagtcatgtgt

SEQ ID NO: 262150 - DNA, 123 bp, Homo sapiens
cgcatttgctgcatcgagcagttggtttagtatcagccaaacttgcagctgttcagaccgcgctccgccgagagttgcatgctgagaatttgaaaaatgaagatgatgtagacactggactat

SEQ ID NO: 262151 - DNA, 49 bp, Homo sapiens
aacgaatgaatgaacagccacgtcaggagaggagttcattacttcggaa

SEQ ID NO: 262152 - DNA, 82 bp, Homo sapiens
tgcagacttcaggtcgtggcagagaaaaccagctgagacagggcgccacttactaggttggacgtgataagtatgagcctgc

SEQ ID NO: 262153 - DNA, 82 bp, Homo sapiens
gctatgggtgatcattccaagagccagcagagccagccgcagagcagccagcccaactacagcaaggcctgggaagactatt

SEQ ID NO: 262154 - DNA, 100 bp, Homo sapiens
gacgaccccacccgcaaaaccaaagccctgctgcagagtgtggccatctggggccgtgtggtatttgccactcaggagacatgtccctatgacatagcag

SEQ ID NO: 262155 - DNA, 100 bp, Homo sapiens
cgggtatctggaagatggggaagagtgtgactgtggagaagaagagggccagtggatagcatacgtgcttatgtatccatgtgaactctgtttttcatgc

SEQ ID NO: 262156 - DNA, 96 bp, Homo sapiens
gctcgatccagcaccatggggaagcgggacaatcgggtggaagatgagaatgtgcctactgctcctgatcctccaagtcaacatttacgtgggcat

SEQ ID NO: 262157 - DNA, 96 bp, Homo sapiens
tggtatttcaagggggagctcttggcaaaacaccagatgggagcttcaggatggttcgtactaagacatggaccctgaagaagcactttgttggct

SEQ ID NO: 262158 - DNA, 100 bp, Homo sapiens
acgaggtctatgagaacaagacggacgtcatcctgatcttggaactgatttgaagcattcattaccatctggacttggtctctcagaaacccaaattaca

SEQ ID NO: 262159 - DNA, 98 bp, Homo sapiens
ttccagaaaaattacagcacatctcagtgaatttgcaagtgaatgtgacagtgatgataacatgggtgccaaaaatacttcaataggagaagaattta

SEQ ID NO: 262160 - DNA, 100 bp, Homo sapiens
attcagtattttcaagatccaaggactcagataccctttgaagtcccacagtacccacagacagacagaagcattaaaatgcgtggctcaggctagcaag

SEQ ID NO: 262161 - DNA, 50 bp, Homo sapiens
ggatgagtatttccggcagcctgtggtggcctgagctgaagcctgtggac

SEQ ID NO: 262162 - DNA, 100 bp, Homo sapiens
ggaacaagccggccaacgccgtcctgcacaaggtcctgtgtcccttgatctgtcacaatggcggtgtgtgcgtgaagcctgaccgctgcctctgtccccc

SEQ ID NO: 262163 - DNA, 98 bp, Homo sapiens
atggcggaggcttcgagtgacccgggtgccgaggagcgggaagagttgctggggtcactgcagccagaggggtccagaagagagaggaggcactgcct

SEQ ID NO: 262164 - DNA, 75 bp, Homo sapiens
caacaacttgcagctcatctctattgatggacgagattgaggagctgcgggccgagatgctggagatgcgggacg

SEQ ID NO: 262165 - DNA, 75 bp, Homo sapiens
cgtgagtgatcactctcaatcccgggcatcacgttgggtggtttccatttagaccgaggccggttcagaacttcc

SEQ ID NO: 262166 - DNA, 100 bp, Homo sapiens
ctgaggaacccggcgaaaagccgcgggggcccgggcccggattactatctcaaaaactatgaggatggtgctggagaatctggtaaaagcaccattgtga

SEQ ID NO: 262167 - DNA, 100 bp, Homo sapiens
atcggattctggaaggcctggggccccaggtggagctggatgaatttcacccattcatcgaggcacttcttccacatgtccgtgcaattgcctatacttg

SEQ ID NO: 262168 - DNA, 101 bp, Homo sapiens
aagaagcaggtgcttatgatggacctaggactgctgaaaaagcttgtggtgaaggggggcaaaaaaaagaagcaagttctgaagttcactcttgattgcac

SEQ ID NO: 262169 - DNA, 103 bp, Homo sapiens
tttgttaaggattccaagtaactcttatttggcatgttttccacaaatcctgcgtggatccctggcttagtgaacattgtacctgtcctatgtgcaaacttaa

SEQ ID NO: 262170 - DNA, 88 bp, Homo sapiens
gggcaattcccgaccgaaccaaacgaaaaagcttgtggtgaaggggggcaaaaaaaagaagcaagttctgaagttcactcttgattgc

SEQ ID NO: 262171 - DNA, 90 bp, Homo sapiens
aagatctgctagaaatcatgaaaaagtttgtgccccctgactacaagatccatagtcagaaaagccacgaggctttgctcgaggtttgga

SEQ ID NO: 262172 - DNA, 75 bp, Homo sapiens
gtggaattctcatcaacagttgtggaatatggatcagttccatgacaagaccccttatacgattatgtttggtcc

SEQ ID NO: 262173 - DNA, 75 bp, Homo sapiens
tgatgataatgtgacgtcagccgtagaaggcatcaacagctgtcggaaaaggtaacagaagatggaactcgaaat

SEQ ID NO: 262174 - DNA, 83 bp, Homo sapiens
caagatggtcatcctgtctgtctgttcacagagacagtcattttgtttactcattcagccctgttgcaggtcccaataaactc

SEQ ID NO: 262175 - DNA, 82 bp, Homo sapiens
ttgtccatgaccctgaaggtccaggagtacccgaccctcaagactgcaaaattcaaaatggggctcaaggtattcgtttcat

SEQ ID NO: 262176 - DNA, 80 bp, Homo sapiens
tctgcagacagctcccacaggagtcatgcccagtgtgtgaagtgttctggacttggtgcctctttctgttatatgctttc

SEQ ID NO: 262177 - DNA, 83 bp, Homo sapiens
ggcctgactctgggagcacgcaatggtcctagaacaattggagattcatacgcacacaaagaacctcaacccttacctcacac

SEQ ID NO: 262178 - DNA, 100 bp, Homo sapiens
gaaacaacacaaaaccctatctcaagaacttgttaacctccggggagagctagtaaatcaacaggattacctttcccttaataatcttcaaaatgtccac

SEQ ID NO: 262179 - DNA, 83 bp, Homo sapiens
ggatcgtgctcctgaaggccctagccttcgtgtactattttgcaagaacgaggctcaaggatgtgagggacacagtattgaca

SEQ ID NO: 262180 - DNA, 82 bp, Homo sapiens
tggcctccggcgcggccgcggcgggtcggtctcctagtatgacgccgtgcccatccagtccagcgtggtgttatgttcctgc

SEQ ID NO: 262181 - DNA, 80 bp, Homo sapiens
aagggcccaactggaattccacttacggaaggccaatgatgaggccaatcagagtgatacaagtgtctccttgtcagaac

SEQ ID NO: 262182 - DNA, 97 bp, Homo sapiens
gccagaaaagaactttgaaggaagaaaggaaattgtgctaaggtacggttcctggagcagcagaacaagatgctggagaccaagtggagcctcctgc

SEQ ID NO: 262183 - DNA, 100 bp, Homo sapiens
cgcgctcgctccggcgccggcctcgcctcctcgcagcagcgccatggagacagcaatatgttgggaaggtcaagtttgcctccttggaattttcccctgg

SEQ ID NO: 262184 - DNA, 75 bp, Homo sapiens
gacagttcgctacacagcaatgcatcgaggagcttcaggatggttcgtactaagacatggaccctgaagaagcac

SEQ ID NO: 262185 - DNA, 101 bp, Homo sapiens
gggaaactaaaaacgcatctatctaacgtttaccctagcaaaccagaagcgagcagctgcaaagcatctaatagaacgctactaccaccagttaactgagg

SEQ ID NO: 262186 - DNA, 101 bp, Homo sapiens
gagcggcgccccctcccccctccggcgcggaccccgcgtgcgccttgctcgcccgcagccccgagaccgcaggcattgaacctggccacatcccaggtacc

SEQ ID NO: 262187 - DNA, 88 bp, Homo sapiens
ttccccagctctgcagccacatactatccgtttgttcaggaaccaccagtgacagagcttcttggtgacctgtggcagaggctctccc

SEQ ID NO: 262188 - DNA, 75 bp, Homo sapiens
attcccaaaatgaaaatttctccaaaaaggatgtcatgttcctggcctgttgttcccatgactttgccgactaaa

SEQ ID NO: 262189 - DNA, 82 bp, Homo sapiens
aggaactcaaagtggatgaggaaacaaattgtggctactaatttgccccctgaagatcaagatggctctggggatgactctg

SEQ ID NO: 262190 - DNA, 74 bp, Homo sapiens
ggatctggaggcacagctgcagtctgacgagaggggtatcatgatattagctggtttgacatcaagtcatttgt

SEQ ID NO: 262191 - DNA, 100 bp, Homo sapiens
tatgtttctaatagagaataaggagaaacttgcttctcatttgccgacatgagatgttggggatcagccaggtgaggtaggttattcaggctctcctgct

SEQ ID NO: 262192 - DNA, 90 bp, Homo sapiens
gccttggttatgacagtggaaccggggtttggagggcagaaattcatggaagatatgatgccaaagtatttcagacaacttttaagaggt

SEQ ID NO: 262193 - DNA, 75 bp, Homo sapiens
tggagcagctgtaactgcaagacctggacaagctgctgataaagatgatagttcagaagacatttcagtgccgag

SEQ ID NO: 262194 - DNA, 87 bp, Homo sapiens
gaggagaagctggaggagcggctgaagcgcgtgcgcatggtattgttgcagcatctggcagtgagactgaggatgaggacagcatgg

SEQ ID NO: 262195 - DNA, 100 bp, Homo sapiens
cgcgcccgccagttgcttgatcaggtggaacagattcagaaggagcaggattaccaaaggattggtgctgaagacatggacggcttccaggcagacacgg

SEQ ID NO: 262196 - DNA, 82 bp, Homo sapiens
ggttgcggaaagagcagttttataccaccgccagtcctcccaccacatccatcacccactgtccacccacctgcctccggat

SEQ ID NO: 262197 - DNA, 101 bp, Homo sapiens
tgggaaaggacaaaaaaattcctggaaaaagaagtccaagaagcaaaaaagggactgctaagaagataccaccaggctactgcagcactggggtgtcagtt

SEQ ID NO: 262198 - DNA, 100 bp, Homo sapiens
cgagagatgaggacactgaaattcagagaggggaagtgatttgcctcagcttgtactgctaagtgctatttatggaggtacctatatgctgaataaaccc

SEQ ID NO: 262199 - DNA, 90 bp, Homo sapiens
cccgcagcggcgccgaggacagtgcagccgagttgcgtctccctcgcgcgaggtgttagacaaacccagtaggctaactgaaaaggaact

SEQ ID NO: 262200 - DNA, 100 bp, Homo sapiens
tttgctaaacagatggcatagtctatgacatgcatcatatgtgtgagcaatcacagaaggtgaccaagaatatggcccaggtgaccaaagccctggacaa

SEQ ID NO: 262201 - DNA, 75 bp, Homo sapiens
gctgggctctgcctgctgacctggggaggccattggctctatggaaaacactgggtctaaaattcccaggactcc

SEQ ID NO: 262202 - DNA, 75 bp, Homo sapiens
atcaggtcctcgcgctgccgcggcatccaggcgttcagtatcctggtgtgaaccagctatcctccagtataggag

SEQ ID NO: 262203 - DNA, 100 bp, Homo sapiens
ggaagatgggggccgtcctgaggagcctcctggcctgcagcttctgtgtgctcctgagagattaacttcatctaccttgccaagagcacaaaaaaaacca

SEQ ID NO: 262204 - DNA, 75 bp, Homo sapiens
cgccgaggcaccgaggcactcagaggagatggtgtggacggaaagcaagctcgcagaaccaattctagcactccc

SEQ ID NO: 262205 - DNA, 75 bp, Homo sapiens
ccttgggctgcctttcctgcaggtgaattttattgtgagtgactctggagcacatgttttaaattcttggactca

SEQ ID NO: 262206 - DNA, 75 bp, Homo sapiens
ctccagcacagtgttcagcaggtcctgttggagatgatacaattgacatgtggtctgcaggtgtcatatttcttt

SEQ ID NO: 262207 - DNA, 82 bp, Homo sapiens
gtcctgtatcaaaactgaagatggtttgaaacagcttcacaagtttcgtgccttagcaccaatgtactatcgagggtcggct

SEQ ID NO: 262208 - DNA, 50 bp, Homo sapiens
atcacctatttcagatagttcctgtgatgagcacctctgaggagttggat

SEQ ID NO: 262209 - DNA, 75 bp, Homo sapiens
gcatgccagtaaaactactcatgtcagctgttctgcaggatcccatgagaagtttcttgcagaacataaattatt

SEQ ID NO: 262210 - DNA, 51 bp, Homo sapiens
gcccggggaggttgagaactggtagagatcttttcctagcaagctgttcac

SEQ ID NO: 262211 - DNA, 100 bp, Homo sapiens
ggacgggtcctttggtacatgcagtccgagtgtgctggagaagagaaacgagttggcacacgcacagtgtttgttggcaatcatccagtttcggaaacag

SEQ ID NO: 262212 - DNA, 97 bp, Homo sapiens
aaaacctctgcgaggaaagggaaggagcaagccgtggacactcatgaggaccatgatacttccactgagaatacagacgagtccaaccatgaccctc

SEQ ID NO: 262213 - DNA, 50 bp, Homo sapiens
ctcgaagcatgctttcttggcattataccttggttgcatgtacaagttat

SEQ ID NO: 262214 - DNA, 75 bp, Homo sapiens
gcgcgaatatcgtcatcgttagaagaatccaaaggactgcatgacacaccataggatatagtcaagaagcctttg

SEQ ID NO: 262215 - DNA, 100 bp, Homo sapiens
accaagctgtggaccctcgtgagcgacccggacaccgacgcgctcatctgctggagcccgggtcctcactgagcagcgagtcgtcccccgtgtcctctcc

SEQ ID NO: 262216 - DNA, 74 bp, Homo sapiens
ctgcagctcatgaagccttggagataaatgaagctgaactagagaaacatggttataagatggagacttcatag

SEQ ID NO: 262217 - DNA, 113 bp, Homo sapiens
catgacgccatcctgccgcagctggcgcagcccacgctcatgatcgacttcctcacccgcgcctgcgacctcgagaatctcgatgctggcctggagcagaaactgagctggac

SEQ ID NO: 262218 - DNA, 75 bp, Homo sapiens
ccagaggactttcttccagcttctgctgtccttctttgtggagagcaaggaacgtcaaggtcgtgggaaataaaa

SEQ ID NO: 262219 - DNA, 75 bp, Homo sapiens
tttattggatatggctaccagaatctcagggtgaggccgcaggcggtgctctgggtccgggagcgctgtccccag

SEQ ID NO: 262220 - DNA, 75 bp, Homo sapiens
gcgcccagggaaggcatttccagcccgcccacccaggtgtggatgaggtcaccattgtcaacattttgaccaacc

SEQ ID NO: 262221 - DNA, 100 bp, Homo sapiens
ccaaaatacatgtaaaatcttgtacacatcttagctgcaatacattccagctgcagctcttgtctcctagcagcagcattgtcccagcatttaacacggg

SEQ ID NO: 262222 - DNA, 75 bp, Homo sapiens
gagtctgaagttgttaccaatggtgaaactacatgttcagaaagtcccaggtgtgtgatggcggctgcaatctgt

SEQ ID NO: 262223 - DNA, 75 bp, Homo sapiens
cagagctccagcagccttgttagggcgtggcctgaggcttggataagtggggtttttcgttggaatatacgttgc

SEQ ID NO: 262224 - DNA, 74 bp, Homo sapiens
aaaatgattcgggaatatcggcaaatggttattgttgtgggtaatccagccaataccaactgcctgactgcttc

SEQ ID NO: 262225 - DNA, 97 bp, Homo sapiens
gggtgtttttccgtaagcatactcaggcttgtaattccacatctgaagtcaaagatctattggaacagaaaagcaagttgaccatagaagtggctga

SEQ ID NO: 262226 - DNA, 74 bp, Homo sapiens
cctggagcctcagttggaagcagccgatccagcctgcggagcctgtggggcagatcctaattatctcatggcta

SEQ ID NO: 262227 - DNA, 75 bp, Homo sapiens
caaggagggcaaagcgtcctgcgttcaaaaggtgatgacctatcaacagccattctcaaacagaagaaccgtccc

SEQ ID NO: 262228 - DNA, 100 bp, Homo sapiens
cgtctgtctctgcggcttctggttctcacttgtcggccatccgttgcacactggtaaactgcacatgtgaatgttttcagccagggaagattaacctgag

SEQ ID NO: 262229 - DNA, 100 bp, Homo sapiens
agcgatcgagcgagcgcgcgcgcgaaaactccgggcaggctcgtgaagaagaaatgactgcaaaagtaagggacctgcagactcaacttgaggagctgca

SEQ ID NO: 262230 - DNA, 103 bp, Homo sapiens
gcgcggccctgcaggcgatgtcgccgaaaccgggctgcaggcggacacgatgaggcgagtggtacgacagagcaagtttcggcatgtatttgggcaagcggtg

SEQ ID NO: 262231 - DNA, 111 bp, Homo sapiens
ccccctggtgcccacgcccaatgtgctctgggacctggttgacaggatagggtgtcttcaaaaacaaacatatttaaaagattttacttctcatctccaggaagaaccagc

SEQ ID NO: 262232 - DNA, 100 bp, Homo sapiens
aagtacagatcacacgcccactaaagcccagaagaatgtggctaccagcgaaggccacagacctccaccagcacgaagtggacatcgttgtgtggcagat

SEQ ID NO: 262233 - DNA, 99 bp, Homo sapiens
gaaggggacttgggcccagtttatggcttccagtggaggcattttggggcagaatacagagatatggaatcaggtgactctgacatcattagaagcatg

SEQ ID NO: 262234 - DNA, 98 bp, Homo sapiens
aaggtgcaagacacaaaattgtcatcagtattcagaagctcaaagaaagacaaaatctcctgaagtctttggaaaggtactatactggcaattgctgg

SEQ ID NO: 262235 - DNA, 87 bp, Homo sapiens
cccacaacctttaagcagcagaggagcacgaggatcgtgggagctaagaaagttccacaaacatgtggagtttgatttccttattaa

SEQ ID NO: 262236 - DNA, 51 bp, Homo sapiens
aggcacagtcatccattctgaccgatggggcattctcttctcccaccctcg

SEQ ID NO: 262237 - DNA, 75 bp, Homo sapiens
ccaggagtcatcggacgccagaatctggagaagatggggagccccgaggatgacctgattgggattccattcccg

SEQ ID NO: 262238 - DNA, 50 bp, Homo sapiens
ggcaagcagaagaatatgcaaattttagggatgacaaaagtgaaagttgg

SEQ ID NO: 262239 - DNA, 89 bp, Homo sapiens
cagagtacgatactcaggtcaaaggtttgaagaagaactgaccagcaagtggttatatctttttgaaggcagtggagtcccgtatggcc

SEQ ID NO: 262240 - DNA, 82 bp, Homo sapiens
tcaatatctgtcttcggtggactccttcggcagtccacccaccgccgccgcctcccagcattttgaaagcgaagcagaagcc

SEQ ID NO: 262241 - DNA, 90 bp, Homo sapiens
agtatgcttgggagtcttctgctggaggttccttcactgtgcgtgctgaccatggtctatcagccacagtctctgcaagtttccaagagc

SEQ ID NO: 262242 - DNA, 100 bp, Homo sapiens
ccacacggaagccaatgagatatgggcatacagagggacacacggaggtctgttttgatgattctgggagggtatgtctctgtgccagactgtcgtcgtg

SEQ ID NO: 262243 - DNA, 100 bp, Homo sapiens
acccaagaggtggaagaggacgggctttaggctggaagcgccttagaggagccatttttccagaatgaaatatgactgaggactctcagagaaactttcg

SEQ ID NO: 262244 - DNA, 80 bp, Homo sapiens
ccgccccgctcaccttagccccgcgcccgaggtcagtcttcactgtttccaatggaagatggattcttggatgatggccg

SEQ ID NO: 262245 - DNA, 97 bp, Homo sapiens
gtacatgggctacaccaacaccgacaaccccttcggagacaacaacctgctgggcaccttcatctggaataagggactccagaacgggtggaactgg

SEQ ID NO: 262246 - DNA, 106 bp, Homo sapiens
cccaggctcaagcaatcctaccatgtcagccttcccagtagctggaactacaggatgcggaagggagagctgtttgactatctcacagagaaggtggccctctctg

SEQ ID NO: 262247 - DNA, 112 bp, Homo sapiens
cactgtccatgttctgcgaaagtcctggcctgaacctgatcagaaaccgggccatgtagggcaggaccgggtggactttggccagactgagccgcacacggtgcttttccac

SEQ ID NO: 262248 - DNA, 90 bp, Homo sapiens
cagagatcatgactttggtagatgagactaacatgtatgaaggtgtaggaagaatcggcaaccagttctttttcttctccaaatgtatcc

SEQ ID NO: 262249 - DNA, 100 bp, Homo sapiens
agcaattggatattattcagcgactagtaagcctatgtcatttcatccaccacattacttagctttagcgtcacctccctcactgggcagcatgggggag

SEQ ID NO: 262250 - DNA, 88 bp, Homo sapiens
gagctcatctggaattttgccgatttcatgactaaccagtcaacgcacctcttgctttttcctccaaagtatgttatgttaagtttcg

SEQ ID NO: 262251 - DNA, 100 bp, Homo sapiens
caatagggaaagtgaggcagctgcaaggagggcggcgggactgcactcgagtgtccagacctgctcgatgactcagcccacctgcacccaggtgaaataa

SEQ ID NO: 262252 - DNA, 96 bp, Homo sapiens
ctagaatgtgcaccataagaatgagttttgtgaaagggtggggagcagaataccggaagatgtatcattacatggatataaaaaatacttgctgtc

SEQ ID NO: 262253 - DNA, 48 bp, Homo sapiens
cctgttgtggctctataagcaggtgggagatgccatcccagcagtgga

SEQ ID NO: 262254 - DNA, 98 bp, Homo sapiens
tgggaaggaggccgagccgggatctcaggtcctcgggggcggcggccacgccaaggacgggggaaatctgtgcgttcaagatccatggccaggagctg

SEQ ID NO: 262255 - DNA, 90 bp, Homo sapiens
cgggagcacgtcatcgccatcgaaggaatttgaagcctacattaatgcttctggagaacatggaattgtggttttctctttgggatcaat

SEQ ID NO: 262256 - DNA, 100 bp, Homo sapiens
cgagagggggaaaagcgagcgatcgagcgagcgcgcgcgcgaaaactccgggcagagtaacagttacccctcaatgagcgacccctacctgtccagctat

SEQ ID NO: 262257 - DNA, 100 bp, Homo sapiens
ctctgtctcgctcagaggagatgcaccggctcacggaaaatgtctataaggaaaaccagtagattcccagacatcgcgaagtgaatctgaaattgtgcca

SEQ ID NO: 262258 - DNA, 113 bp, Homo sapiens
caggctcagggaagaccacccagatcccgcagtatctctttgaggaggtatcacctgattttgatacagcagcaggaagcttgttcccagcctaccagaaacaccaaaaccgg

SEQ ID NO: 262259 - DNA, 75 bp, Homo sapiens
aacatatgagatcctcttgaaagataagagttatgcccagccaagtcttcagtatatccaggggcaacagatttt

SEQ ID NO: 262260 - DNA, 75 bp, Homo sapiens
ggtcctgggcgaatgaggaagtttcgatggaaaaacatagctgactggaaataccggcatgcaggattgatggcc

SEQ ID NO: 262261 - DNA, 75 bp, Homo sapiens
ttcgcttggtgtcctcctggcctcagcaacctgacaattctgtcgtgtcccgggatcgggctccttttgtgctga

SEQ ID NO: 262262 - DNA, 109 bp, Homo sapiens
gatcctttccaaacttggtgtcttttctacaaactctgtgcctcaacaaccatttctaagtgatcgtgatgcttgtaaatgagaatcctctgctgacagaagaagcagc

SEQ ID NO: 262263 - DNA, 74 bp, Homo sapiens
aaacctgggggctccctggacaactccgagcaggctgaccccgcactacatctacccaccagccatcgtgcagc

SEQ ID NO: 262264 - DNA, 101 bp, Homo sapiens
aaaggccagagctggagacctagcacccagaagatgagaccgcaattcgagaatcaaagggccgggagcgatgtattgtgcttctgctaagccaaaaacag

SEQ ID NO: 262265 - DNA, 129 bp, Homo sapiens
tggctccctcattaccgtcgccagcggagcgaacccgagagcgtggagcgggctgggccagctctctccttcctgcttcctccttgctgtggtggctgggatgcttcttccatgattttttgaatctag

SEQ ID NO: 262266 - DNA, 100 bp, Homo sapiens
caccctccgccgcccagtggccccgaggagcctggggagaagcgccccaagtttgtgagtggcagtgtgatgagtgtttatagtggagactttggcaatc

SEQ ID NO: 262267 - DNA, 116 bp, Homo sapiens
ctcaaggctcagctcagggagctgaatattacggcagctaaggaaatctgaaatagagtactatgctatgttggctaaaactggtgtccatcactacagtggcaataatattgaac

SEQ ID NO: 262268 - DNA, 75 bp, Homo sapiens
cactgacctgggacagtgaatcttctcgaggctggacagtccaagatcaaggtgcctgcatctggcgtctagtgt

SEQ ID NO: 262269 - DNA, 83 bp, Homo sapiens
atggaattctaatttgaaccatgtttggattgaagccgcctctgtattacttaccagatgaagatctccttcaacgacaaaag

SEQ ID NO: 262270 - DNA, 97 bp, Homo sapiens
agaaagggcaatttagccatctgtgtgattatcctcttgtttatcctggctgtcatcaatttaatagcagtcttgtgagagcagaagtaaaatttct

SEQ ID NO: 262271 - DNA, 100 bp, Homo sapiens
ggggcctcggagccaagacgagggtggagagattcaaccagttagcgtgaaagttggagataaagttcttctcccagaatatggaggcaccaaagtagtt

SEQ ID NO: 262272 - DNA, 74 bp, Homo sapiens
tggatatggtggcagtggggatggctataatggatttggtaatgatggtaatgtgaggctacaggagatgatgg

SEQ ID NO: 262273 - DNA, 98 bp, Homo sapiens
cacaaaacaaggttccggctgaggaccttacattgacattcaggacatgtacttgtagacaggattcaaagcagttaagaatgtctctgccaagtcga

SEQ ID NO: 262274 - DNA, 98 bp, Homo sapiens
tggaaggctggtgctgccagatggacaaggagaccaaagagaacaacctctctgaagaaggtcgaatgcaattcccgcctgaaccctataaatacaac

SEQ ID NO: 262275 - DNA, 76 bp, Homo sapiens
attccttatgcagagtggccgacttggaggagatatttcatcaaatactccagactatgcctggaatagctacatt

SEQ ID NO: 262276 - DNA, 98 bp, Homo sapiens
gcagctggagcctcaggcggcagcgcttctagaaatcatgaccaccccaggaaaagagaactttcgcctgaaaagttacaagaacaaatctctgaatc

SEQ ID NO: 262277 - DNA, 80 bp, Homo sapiens
ctctctgtctgtgccatcgccaccaatggagccgtgcaggggggcggagcctactattcagccatgctgtttattcaggc

SEQ ID NO: 262278 - DNA, 100 bp, Homo sapiens
cccacaagctgcttaaggagatggtgctgctggagcggctgcggcaccccaacgtgctgcaggcacccagtcagtcagagtcagagccagagaaggctcc

SEQ ID NO: 262279 - DNA, 90 bp, Homo sapiens
agaggatgaggatggactctcagaaaaaaattgccaaaataaatgtcggttatgaagacagtatggagtttccagaccatagtagacatt

SEQ ID NO: 262280 - DNA, 100 bp, Homo sapiens
agctaccggccagggttttctttactctggggtcccggctgccctgtggcctcgctcctcggaggaatatggaaggctccatgttgacaatcagctttgg

SEQ ID NO: 262281 - DNA, 75 bp, Homo sapiens
agaaccagataggacaaggccaactggttttcctttggaatatggataaatacaccatgatacggaaactagaag

SEQ ID NO: 262282 - DNA, 75 bp, Homo sapiens
ccgaaaataaccgccttcgcatggagctggaaaccatcaaggatggatgacatccagctctgcaaggacatcatg

SEQ ID NO: 262283 - DNA, 75 bp, Homo sapiens
tgcactatgctgctgcctcagggatgaaagcctgtgtagaggtaaatggttgcagttttgtgatgagaacaggaa

SEQ ID NO: 262284 - DNA, 83 bp, Homo sapiens
atgctggagaattataggaacctggtctccctgggagcacgtgaattgcctctgcttacgttcaggccctgtcctaaacccag

SEQ ID NO: 262285 - DNA, 107 bp, Homo sapiens
cgattattagctttagtgaaatgggctaataatgctggcaaagtggaaaaatgtgcgacttgttgagcccattaaagaaatggaagtctcgctatctgatggagcag

SEQ ID NO: 262286 - DNA, 50 bp, Homo sapiens
cctcactcttcatggtcactgatcttcaaagctgctgcgggcattctatg

SEQ ID NO: 262287 - DNA, 96 bp, Homo sapiens
cgcggagaatctgctgtcgcctgcagctgctcgcctgtctccgtcggaagggagcccaagctttgcagagcattagtgccagcagtagttcccaag

SEQ ID NO: 262288 - DNA, 99 bp, Homo sapiens
cagaagaaggacttcggaatgcactacaacaggaaaatcatattatagatggagtaaagtcaccaggagactaaagtccatcaaaaacatccagaaaat

SEQ ID NO: 262289 - DNA, 82 bp, Homo sapiens
cgcgtcccgctcgctgggagagaggtacctctccttttccctctccctttccctaaggaatcccttggcaccatgtcctgtg

SEQ ID NO: 262290 - DNA, 75 bp, Homo sapiens
ccgggcacgtcaaccccttcctcccgtatatcaggagatcatgaatcagacagataaaaatcaacaagaaatccc

SEQ ID NO: 262291 - DNA, 99 bp, Homo sapiens
gcatctggctgttagaagaattcatgctcatccggtgccggtggtggtgtgcacattgagccccggtatagacagttcccccagctgaccagatcccag

SEQ ID NO: 262292 - DNA, 50 bp, Homo sapiens
aaagcagcgtgcgttcagccctggggactgcaatgtgccgatcttagctg

SEQ ID NO: 262293 - DNA, 90 bp, Homo sapiens
tggctggataacatggagtcgggcaagatggcgcctcccaagaacgctccgagagatgccttgagtatgctcaggtaatcaaaatgttgg

SEQ ID NO: 262294 - DNA, 75 bp, Homo sapiens
caagacacacaactcataacagttgatgaaaaattgctctggattaatcgaattacagctgctagccaggaacat

SEQ ID NO: 262295 - DNA, 83 bp, Homo sapiens
gctctctgctcattggggcgttgaggagtagctacagcaagctgggtagcaggcagatccaaaggatatcatgaagtttccag

SEQ ID NO: 262296 - DNA, 100 bp, Homo sapiens
aagaaggtggtggtcaacgggcgggtgctggagctgttccgggccgcgcagctgccgaacgacgtggtcctacagtgagtgatagttgcttcaggaatct

SEQ ID NO: 262297 - DNA, 83 bp, Homo sapiens
ctactactacgtggtgcttggaaagttgttgacctcctgtactggagagacattaagaagactggagtggtgtttggtgccag

SEQ ID NO: 262298 - DNA, 98 bp, Homo sapiens
cagaccctacccctatccccagtggagccggagtgcgggcgcgccccaccaccgccctcaccatgatgaagagcatgatctagaagaggatgagagtg

SEQ ID NO: 262299 - DNA, 88 bp, Homo sapiens
aggcaatgagccgacccatcttgtacagcaactggctgtcaaaggttgactatagtcaatggggccaatggagccaagtgtatggaaa

SEQ ID NO: 262300 - DNA, 98 bp, Homo sapiens
gtttcccacttgattacccgttaagtcccccaaagatgagatttacctgtgagatgtttcatcccaacagtttctgggtgtctctggggagcccctgg

SEQ ID NO: 262301 - DNA, 101 bp, Homo sapiens
tcttgtgctcagtgacatcattcaggatgatgatgctgaagctatccttgctgcagacttcgaaattggtcactttttacgtgagcgtataatcccaagat

SEQ ID NO: 262302 - DNA, 100 bp, Homo sapiens
ccagctcccagtacagcatctgcttcacgctgggctcctttgccaagatctatgccgacacctttgtggcactggagtttgggtctgaggagcctagaca

SEQ ID NO: 262303 - DNA, 50 bp, Homo sapiens
tcaccagatcgcagcaggagacagatgaagaggaagatgatgatgtagtg

SEQ ID NO: 262304 - DNA, 101 bp, Homo sapiens
cgagggaaagcaagaatatctgttcctgcaactgcactgattctagaaacactctctattcgaactctcatgaggtgtgggccatgtttgaggattgcccc

SEQ ID NO: 262305 - DNA, 100 bp, Homo sapiens
cgggtgtccccgcggcgcaggaggcggtggagcgcagagcgggcgagcgcgacctgcaggctgggacaatgaaaagaaaatagctattttacatgaaaat

SEQ ID NO: 262306 - DNA, 50 bp, Homo sapiens
gtggaaagaagttgcaaaacactggccctcaccagccctttgcagctcct

SEQ ID NO: 262307 - DNA, 82 bp, Homo sapiens
ccgggtcgcagccgcaccaagcgctggccttttggcaagaagaacaagattctcattcagattgtggatgcctcgtcagtca

SEQ ID NO: 262308 - DNA, 88 bp, Homo sapiens
tgagctcttcaaattggcccagatctttttcaacggattggtgtctccgctgtgcctggctccgtatttccggttactgagactttgt

SEQ ID NO: 262309 - DNA, 96 bp, Homo sapiens
ccggccccggcctggtcctggccccggagctgttgctggacccctggcaggaatttgaggaagccaggaagtgggtgtcgaagaagttacactttg

SEQ ID NO: 262310 - DNA, 80 bp, Homo sapiens
agccgatccagcctgcggagcctgtggggcaggtttaaacggaacctgcagcgtttccagtgttcccacgtccacgtcgg

SEQ ID NO: 262311 - DNA, 89 bp, Homo sapiens
gtctacaaaggtctggacactgaaaccaccgtggaagtcgcctggtgtgaactgcagggagtaaactcacgaaatcctcgaagacctcc

SEQ ID NO: 262312 - DNA, 97 bp, Homo sapiens
tatactcctcccagtgacgggtctggagtgcgtgggggaccggctgttggcggacgagccaaactcaggctgtaccttgagcagctcaagcaactgg

SEQ ID NO: 262313 - DNA, 97 bp, Homo sapiens
agcctcatcacccggctgctggaggcccaccttgggacaccttgactccaagcccagcagtaagtccaacatgattcggggccgcaactcagccacc

SEQ ID NO: 262314 - DNA, 75 bp, Homo sapiens
tgggcgagctgcggctgcgggtgcggcgggtcctggccgaaggcggtgcgtctttctacgtgaataggattttgt

SEQ ID NO: 262315 - DNA, 82 bp, Homo sapiens
ggaattttgaagtacaccgtggtgacattgtatcattggtttacaacattaaagcctgaacttggaaagataatgtacagtg

SEQ ID NO: 262316 - DNA, 82 bp, Homo sapiens
gcctcagcccggggaggccaggctggcagccctcaccgcaggagacaggtttggtgcacctcgatttggaggaagtagggca

SEQ ID NO: 262317 - DNA, 100 bp, Homo sapiens
gttgggagcgcagcggcgttggcggcggcggcggcggcagcggcagcgcggcggggccggttgtcgccgtgatcctgaaggcgctgacctacgacgagaa

SEQ ID NO: 262318 - DNA, 75 bp, Homo sapiens
ggagtgggggcacccgtgtacatggccgccgtcctggaatacctgacagcactgatagccattgggcgatacagc

SEQ ID NO: 262319 - DNA, 51 bp, Homo sapiens
agagttgaatgccagccaccagccatgggtattacatcaaataccaataac

SEQ ID NO: 262320 - DNA, 80 bp, Homo sapiens
cttcaaccccaggggaccagaggaactcagccctgattgcggtgtacgtgtcttacgactatggaaaatcattcaagaaa

SEQ ID NO: 262321 - DNA, 100 bp, Homo sapiens
gagttcacatccatgtgaaaggccagccaccagttcaggagcacttgggagtgatctaggtgctgctcatttcctcatcaaggagctgtcctaccataac

SEQ ID NO: 262322 - DNA, 100 bp, Homo sapiens
atgcctgacgcatctgtctgaggagcggtcagtgacgcgatggagcgggcaaggatcagtttgacaacttagaaaaacacacacagtggggaattgatat

SEQ ID NO: 262323 - DNA, 101 bp, Homo sapiens
gagttcttacaacatggcagacattgacaaaaagaaagtcgtgctgtatccctactgacttctccagctgctggtataaaaacagttgatcctctgccttt

SEQ ID NO: 262324 - DNA, 100 bp, Homo sapiens
gtcccttccggatttggctttactttaagaggagattcagacatagacaagaatgattacccagcctctacggcagacacatgcaggccaacccagaacc

SEQ ID NO: 262325 - DNA, 83 bp, Homo sapiens
aggaaaacaagctcagggctcccacggattctacattatggttacaggaggttccagtggcatcgggaagtgcattgctatcg

SEQ ID NO: 262326 - DNA, 101 bp, Homo sapiens
gagagagtccacctcggcagaagaggacatcattgatggatttgccatgaccagctttgtcacttttgaagcgctggaggatcagattttattaagacctc

SEQ ID NO: 262327 - DNA, 82 bp, Homo sapiens
gctgcagaagccaaagccacgtgtcccttgcccacggccccatccgccacccgtgactggggcacttccctcctgccctctg

SEQ ID NO: 262328 - DNA, 82 bp, Homo sapiens
aaattctgaactcaggacttggcaagatacagttgatatattagttggatggcatatagatcatactcagaaaccttcgctc

SEQ ID NO: 262329 - DNA, 75 bp, Homo sapiens
gagggaggaagagaactactcctttttacctttggttcacaacatcatcaaatgcttcacgcaggccatgctgag

SEQ ID NO: 262330 - DNA, 100 bp, Homo sapiens
aggcaggggaggaagccacctcgaggttggtgaaagatgctccttgggatgaggtcccgcttgctcactccctggttggttttgccactgcttatgactt

SEQ ID NO: 262331 - DNA, 90 bp, Homo sapiens
atgttcttggctcagatcaacaagaccgtggcaaggaggtgtacagccctgactttcatagcctcggaggagaaggtcttggtggccgac

SEQ ID NO: 262332 - DNA, 75 bp, Homo sapiens
gggctgtcggccgaggtcaagaaccgggattttttatcaagcagaaatgcatcgaacaacgagaatcaagatcac

SEQ ID NO: 262333 - DNA, 100 bp, Homo sapiens
ctgatgcagcagagcttggaaggatgcttcagctcatcttaggctgtgctgtgaactgtgaacagaagcaaggagtgtgaaaccaagattgcacaagaga

SEQ ID NO: 262334 - DNA, 100 bp, Homo sapiens
cggcagtctcgcgcggtgaggagccgggttgggggagcggctcgtggagggataccaataactagtgcctcgtactacgcgacagtgaccctggatcagg

SEQ ID NO: 262335 - DNA, 50 bp, Homo sapiens
ggaattcatccacatactatatttcagtacagctattggaatcagatgca

SEQ ID NO: 262336 - DNA, 100 bp, Homo sapiens
tccaacagtgacgtgttctccaaataccagctcgacaaagatggggttgtcctctttaagaaggccgtctatacccaggattgccccctggcagcagcga

SEQ ID NO: 262337 - DNA, 88 bp, Homo sapiens
agcgagctggtgattggagccctgcggagggatgtgtttggccaaatgggagagtggttacaacacacgagctacaaactacaatgct

SEQ ID NO: 262338 - DNA, 100 bp, Homo sapiens
gatagacgacctgaagtcagaactgagtggcaacttcgagcaggtgatgatgaacagtctacacagatggctgcaagttgggaagatgataaagttacag

SEQ ID NO: 262339 - DNA, 78 bp, Homo sapiens
tgtaaagccacccacaaacaaactacccattttcttttttggaactcatgagactacaagccagctgccatgttgtga

SEQ ID NO: 262340 - DNA, 75 bp, Homo sapiens
cgccatggcgacagattatgactgctggaaggagcacgaggaagcacccctcatatggaaaatttgaaatgcaga

SEQ ID NO: 262341 - DNA, 74 bp, Homo sapiens
tcggatacgatagaaaatgtaaaggccaagatccaggataaggaaggattccatatggctctcatatcattcca

SEQ ID NO: 262342 - DNA, 99 bp, Homo sapiens
tgggccctcggaacctttttagtgccggactccgggccgcaggcagtcccgcggcagcaggatcacagttacatggacacagaacagtatgaagaagca

SEQ ID NO: 262343 - DNA, 100 bp, Homo sapiens
gtctttgttggcaaacagttctgggggtcgtccgatcctgcagatgtcaagccctccaacatcctagtcaactcccgtggggagatcaagctctgtgact

SEQ ID NO: 262344 - DNA, 101 bp, Homo sapiens
ctgtcgctgacggcgactgcgggaggccagcctcgaagcggaggatccctgtgtcccagccgggcatggccgacccccaccagcttttcgatgacacaagt

SEQ ID NO: 262345 - DNA, 75 bp, Homo sapiens
cgagctggggttggacgctgccagtttgcacagcagcagaccaagatcactccatggatgaaatgacagctgtgg

SEQ ID NO: 262346 - DNA, 82 bp, Homo sapiens
cggagtccttggggacggagcagcgcgtcgtggggcgagcggcagggacctcaggatggaaaccagcagcctgcaccgcccg

SEQ ID NO: 262347 - DNA, 99 bp, Homo sapiens
gcctgggccgccgctgctacctgcagcgccgtgtggcacgacacaaaaatcagtttggcaatgaggagcagcagctggcgtgggccaagcgggagagcg

SEQ ID NO: 262348 - DNA, 100 bp, Homo sapiens
tacaagaaaggacgtaagaaagcagcttatgctggaggcttggttttggaccccaaagttgttcgaagcattcagcaaacaatggcaaggcagagccacc

SEQ ID NO: 262349 - DNA, 90 bp, Homo sapiens
gttgctgacagaactaaagtctcctgcaaggtctcctcatgctgctacagaacctacctacaatacactggggcaacgaagaaattgggc

SEQ ID NO: 262350 - DNA, 83 bp, Homo sapiens
ctactctgcctcggggacgaaagcagaacacaccacagccatcagcactggaatgcaaagaccagaacaaacagaaggaagcc

SEQ ID NO: 262351 - DNA, 75 bp, Homo sapiens
ccaaggtcctagaactcaggaagagtgatgtggttttggataagggtggaaatgctaacctggtatttatgctta

SEQ ID NO: 262352 - DNA, 75 bp, Homo sapiens
ttctgagtagctgggattacaggtgtgcaccaccacgcccaggcacattgcaagcaacccgtgccttgatggtgg

SEQ ID NO: 262353 - DNA, 120 bp, Homo sapiens
cgggtcgccggagctctgatcgccgggaacccttgccgctgctgtcctgcgaccccaagcagacaatgcagatcttcgtgaagactctgactggtaagaccatcaccctcgaggttgagc

SEQ ID NO: 262354 - DNA, 74 bp, Homo sapiens
gggctaaagcctctggaagaggtgaagttgggaaactgcggattgccaagtctacttccccagcaggacagcat

SEQ ID NO: 262355 - DNA, 75 bp, Homo sapiens
ttttgaagacgctaaatggagcagagatggctcccatcaggattttccacaagccacagacccctttgcttctgt

SEQ ID NO: 262356 - DNA, 74 bp, Homo sapiens
ccgggagatcgcggacgggttgtgcctggaggtggaggggaagatggcagtgaacgtatactcaacgtcagtga

SEQ ID NO: 262357 - DNA, 100 bp, Homo sapiens
cacaatgtgagggactcagccattgcaaattgtacagatgagcatgatgccttcttctgtagagtgggcgctttgcagaatacgtgttgaatgaaatcac

SEQ ID NO: 262358 - DNA, 100 bp, Homo sapiens
accggagtcaagaccgtgctcatctcccgactcaagcagattgctcgctgtaagcagctcatctgtgaccccagctacgtaaaagatcgggtagaaaaag

SEQ ID NO: 262359 - DNA, 50 bp, Homo sapiens
tttgctgtctcctcctaatacggtttgtaaaagaatggacttggtctgcc

SEQ ID NO: 262360 - DNA, 97 bp, Homo sapiens
gatgcctaaatacctcaattttgtcaagggtgtgactctgtgcacatcgaagatgccgaggctgtggagcagctgcgagaagctctgcacgaggccc

SEQ ID NO: 262361 - DNA, 82 bp, Homo sapiens
ctggctgcagggacccggtgacagcgtgagaggtgtgggcaagagcagtttactgttgcgttttgcagacaacactttctca

SEQ ID NO: 262362 - DNA, 100 bp, Homo sapiens
cggagctccggcgcatcatggcggctggccgggcccaggtcccttcctccgcattcaactcagaaacagacagtttcaagctggcctatggagggcacca

SEQ ID NO: 262363 - DNA, 88 bp, Homo sapiens
gttcttagactctgtgagtaaagacagcttcatcttcccagttcatcatggcttcaacatccaggtaaactgtcttgagccccaccct

SEQ ID NO: 262364 - DNA, 106 bp, Homo sapiens
gtagtcatacattcagctgatgcatttgcacctgtggcttatctacgctttttagaattgcacttggaggacaagttagcatgtaaatactgggctccccacatca

SEQ ID NO: 262365 - DNA, 90 bp, Homo sapiens
gccatcctttcttctctaaaattgactggaacaacattcgtaacttgaaaatgcctcgtgtaaaagcagctcaagctggaagacagagct

SEQ ID NO: 262366 - DNA, 100 bp, Homo sapiens
cgcgtcaggccgcgacgagggcgctgagacatgggaaagcggaaccaccaaaaggagtgatgatcaacgatctcatgataaatctggatgctagttctca

SEQ ID NO: 262367 - DNA, 96 bp, Homo sapiens
cctctcccgccaatgggtggaccgcgctggcggccgcgagctcgcggagctgtttcttatctcagtcatcactatggtgcttctgacgttgatgac

SEQ ID NO: 262368 - DNA, 90 bp, Homo sapiens
gagcaccacaggcgcccgaaggccggaacagattctgcctgatcaatgcaggagtcctgtacctctacttcagcaattacctacagattg

SEQ ID NO: 262369 - DNA, 50 bp, Homo sapiens
ttccaaccttccagccccttttgaaagtactggagaaaatgaaactggga

SEQ ID NO: 262370 - DNA, 75 bp, Homo sapiens
gctaacagaactggaccttttcgcaaaccctcctggggcttgcccatagatgctgttcagtgggatatctgcaat

SEQ ID NO: 262371 - DNA, 102 bp, Homo sapiens
ctaaaaagacaggaccccttagtgcccagccctctgttgaaaaagagaacttggcaatagaaagtcaatcgtgttcgactacagttatagagattacattct

SEQ ID NO: 262372 - DNA, 85 bp, Homo sapiens
tggtcggtgccggctcaggagccgggggatttcagtcataatcggttgtctaactggaacatcagcttggaatcacaaacattac

SEQ ID NO: 262373 - DNA, 75 bp, Homo sapiens
actgttagaatctgggactttcttcgttgccatgaggaaagaattctccgaggacatttattcagaacagctggg

SEQ ID NO: 262374 - DNA, 98 bp, Homo sapiens
gggattcacggttatgcctttgcaatcacaaataatggatatatcctgacgcatccggaactcaggctgctgactctttttgatcagaacaatgctgc

SEQ ID NO: 262375 - DNA, 100 bp, Homo sapiens
gaaggacgcactgactcgcctcaagcacctgcgcatcgtcatcgacactctcgaaagcgatgggaacgctttgtccacagtgaaaatcagcaccttgtca

SEQ ID NO: 262376 - DNA, 90 bp, Homo sapiens
cggctcccaccccggcccgaccccgacccggcccggtcaggccccatactcagataaacaacccagacatgcgagtgcagatcctcaaag

SEQ ID NO: 262377 - DNA, 100 bp, Homo sapiens
ggaagacctgtgtcctgttccgcttctccgaggacgccttcaactccacttttatctccaccatagatttcatgaacgtctactaccagatacgctccag

SEQ ID NO: 262378 - DNA, 101 bp, Homo sapiens
gggagggcactgcggcagcttccccgcggcggcggccggcagcggcgagatcgtccaactgaacgtaggggggaccaggtcgcaatggaagaagagatcgc

SEQ ID NO: 262379 - DNA, 75 bp, Homo sapiens
gggtgcagtctacagtcccgaattctatgcaggagctctggaagatcatcgcagaaccagtaacatgacccatcg

SEQ ID NO: 262380 - DNA, 89 bp, Homo sapiens
gcgggagccgcacgcggcgatatggaagaggagggcaagaagggcaagaaggcagttgtgaaaaacttcaggacaaaaatgtttcattt

SEQ ID NO: 262381 - DNA, 50 bp, Homo sapiens
ggagaatcctgggtttagccattgaggtgtgatgaatgcagactctgcta

SEQ ID NO: 262382 - DNA, 74 bp, Homo sapiens
gggtggagtgtaggtcatatcgccgcgtttgtagatgcggacaacctgatcctcaaccctgacacactgagcct

SEQ ID NO: 262383 - DNA, 50 bp, Homo sapiens
ccagaacatgctacaaaactgctccagagctggaagtcgagtgtgctact

SEQ ID NO: 262384 - DNA, 75 bp, Homo sapiens
cggagcctccgctgcagcgcgatctgcgcgaccagaccggcccccccgagtgtaatgttcaagctcagaaatgcc

SEQ ID NO: 262385 - DNA, 75 bp, Homo sapiens
tttgcggttcagccctttgatgaccgcagcagatctccagcaccctgccggtggcactactgagagacgaggtgc

SEQ ID NO: 262386 - DNA, 75 bp, Homo sapiens
tcagttggaagcagccgatccagcctgcggagcctgtggggcaggtgcctggaatacttattaagaaacgatgca

SEQ ID NO: 262387 - DNA, 75 bp, Homo sapiens
cgcttcccctttccagagagccagaaagaagatgatcggctgaatgtaacagaggaactaacgtccaacgacaag

SEQ ID NO: 262388 - DNA, 75 bp, Homo sapiens
ctttggcgaggggacggagccggatcaggagccgccgccgccatatcagctgagatctgtatctgtggacctgaa

SEQ ID NO: 262389 - DNA, 83 bp, Homo sapiens
cccagctttaaaggagatgcaggagaaaatacggcattgctaggtgtggtggacacaggcctattcatcaacatggctgagag

SEQ ID NO: 262390 - DNA, 83 bp, Homo sapiens
ccgaccccgtcccgaccctggccgccccgagcggagcctggaggtgtggaaacaggaagagaactagaactggaagtaaagca

SEQ ID NO: 262391 - DNA, 100 bp, Homo sapiens
cggcgggcggcagcatgtcggtggcggggctgaagaagcagttctacaaggcgagccagggtgtgagatggcagacaggtttgcaggaaaccctcagaaa

SEQ ID NO: 262392 - DNA, 82 bp, Homo sapiens
cttcgagtgcgaggcgaggtggctcctgacgctaagaggaatgtatcctgtcaggtataatgtcagtgaatggcaagaaagt

SEQ ID NO: 262393 - DNA, 100 bp, Homo sapiens
agcccgggatatgagcctgtttctggggcaaaaacattcaagaatgagagcgagaacacctgtcaagggaggcaaatacatgcaggcggtgattcagtat

SEQ ID NO: 262394 - DNA, 94 bp, Homo sapiens
tatcagtgcaggagaggattgtgtctgcttggtgtggagccatgaaggtgagaagccctaccactgcaactgggacggctgcggctggaagttt

SEQ ID NO: 262395 - DNA, 118 bp, Homo sapiens
caaccgcaaccattgacgccatgtcgggttattcgagtgaccgagaccgcggccgggaccgaggggtttccaggcctgaggtgcccgccctggccccaggagaatgaaccagccgcag

SEQ ID NO: 262396 - DNA, 90 bp, Homo sapiens
tcaagtgaagcaaaagcctttcatgattatgtggatgggaagagagtcccaagggatgcagggcatcctctgtacccctttaatgacccg

SEQ ID NO: 262397 - DNA, 100 bp, Homo sapiens
tgttgcgggccccgggacctgggctgggaacccgcggtggagcgggacacgaacgtgctcaccatggatgatgatatcgccgcgctcgtcgtcgacaacg

SEQ ID NO: 262398 - DNA, 100 bp, Homo sapiens
atgctcacaagatgagccatgatgcatttactgtcatcaagaactgtaatacttctggaatccagacagaatgtgcacttgttgagctcgtgaaacacaa

SEQ ID NO: 262399 - DNA, 95 bp, Homo sapiens
ggcgactgtcattcacaaccccctgaaagcactgaaagagcatattccttttgtggaactattgaatacatggcaccagatattgtcagaggggg

SEQ ID NO: 262400 - DNA, 100 bp, Homo sapiens
caaatacaggatgatagttcgtgtgacaaacagagatatcatttgtcagggccgcctttttgcctatcctgacactcaccgccatcgcctgggacccaat

SEQ ID NO: 262401 - DNA, 75 bp, Homo sapiens
caaagactttggtagacattgccaaatcccaagatgctgaggaaggaaaatcacctcggcagtgtttgaaggaag

SEQ ID NO: 262402 - DNA, 90 bp, Homo sapiens
gggggcggcagccagctcgcagggaccctgatgctcccataagacagaaaatgccccttgatgatctggatagagaagatgaagttagat

SEQ ID NO: 262403 - DNA, 50 bp, Homo sapiens
gggcctcggagcaaggcgttggcagctctagccggcccggtccttggact

SEQ ID NO: 262404 - DNA, 82 bp, Homo sapiens
cagcgccagcggccgagcgggcggcttcctggcctgggcgctccggtggcggcggagctggagaagaagcaggcgctccctc

SEQ ID NO: 262405 - DNA, 51 bp, Homo sapiens
agacacttatactatgaaagagagctaatttacaaagaagtcatggattgg

SEQ ID NO: 262406 - DNA, 95 bp, Homo sapiens
cacacccggctccccggacgcctcgatcctgagagtgagaagcctgactgaccccgcctagacgccaggcccacttcacgccgtctaagtggaga

SEQ ID NO: 262407 - DNA, 83 bp, Homo sapiens
caagatctgtttccctgatcgcgaagtaaagcggctatgagaggttttcctccgagtacccagaattctgttctaaaaccaag

SEQ ID NO: 262408 - DNA, 75 bp, Homo sapiens
cccagaggagaaactcgctcgccttcagaagacagtcttcaggtcctgtgttgatgttaatgctggtcatctgtg

SEQ ID NO: 262409 - DNA, 100 bp, Homo sapiens
ggcccggggagggtggttaccgctgaggagctgcagtctctgtcaagccctggcctcccacgactacatcctgaagattgtgcccacggtttatgaggac

SEQ ID NO: 262410 - DNA, 75 bp, Homo sapiens
tgggagtcttctgctggaggttccttcactgtgcgtgctgaccatggctccaaacaggcatgcgaggtgcctttg

SEQ ID NO: 262411 - DNA, 97 bp, Homo sapiens
tcagcctggcctggtgtgtgggtgatgcacgtctccagctggaggggcagtgcctgcaggaactacagccacagaccccgcacctggaggaggactt

SEQ ID NO: 262412 - DNA, 100 bp, Homo sapiens
ggaggagctgaccaggaagacctactgtcaaaatgcagatcttcgtgaaaacccttaccggcaagaccatcacccttgaggtggagcccagtgacaccat

SEQ ID NO: 262413 - DNA, 100 bp, Homo sapiens
ccacactctgggacagtgggagatttggaacagctttgagaagagcaagggagtaactattcccagtcagaggcgctatgtgtattattatagctacctg

SEQ ID NO: 262414 - DNA, 100 bp, Homo sapiens
tgccagctccaaaactagctcaggcgatgcctcctcactcagcatcgaggagactaatctcactctgtcccgcaggctggagttcagtggcgcgatctcg

SEQ ID NO: 262415 - DNA, 100 bp, Homo sapiens
ggaggtgaatttccatgtcaacatagtcctgcaaagccttctagacaagctcagtggaatctgaagggcccaccccatggaggaatgctgggtgacagag

SEQ ID NO: 262416 - DNA, 100 bp, Homo sapiens
aaaatcaccagttactttaatgaggtaaaccagacttgaatacaacattgccaattagacaaacagcatcaattttcaaacaaccggtaaccaaagtcac

SEQ ID NO: 262417 - DNA, 96 bp, Homo sapiens
cagagctgtgcctcccagcaccacagtccttctgcagtccctcgtccagccacccccaggtgtgtccctggaatcctccaacctctgcatgccaga

SEQ ID NO: 262418 - DNA, 75 bp, Homo sapiens
gaagaacttcacaatcaagaaatgcagaaacgtaaagaaatgcaattgagtctctgttggatgaacccaatccca

SEQ ID NO: 262419 - DNA, 83 bp, Homo sapiens
tgaagtaatacagaactgccccatcgatgtgcggcgtccgctgtataagggaaatcctcattgacgattcaatttgttgaagg

SEQ ID NO: 262420 - DNA, 98 bp, Homo sapiens
tcctggctcagcaagactctcgagcccatgtggacagcagcaaggaatcagctgaagcagcttgtgatatactatcgcaacttgtgaattgctcttta

SEQ ID NO: 262421 - DNA, 75 bp, Homo sapiens
tttgcagagaccatcgacgggctgacttgagccggctgcgtgcacttttcctacaaagcatcgtgtgagatccgc

SEQ ID NO: 262422 - DNA, 75 bp, Homo sapiens
acttttggtgcttaaatccagctgtgattggaaaatgccttttatgaacatgcacagacttattactacactgag

SEQ ID NO: 262423 - DNA, 100 bp, Homo sapiens
ccgccatgtgcaccgtagtggaccctcgcattgtccggagatacctactcaggcggcagctcgggcaggggctatcatggtgaacttacttcagattgtg

SEQ ID NO: 262424 - DNA, 75 bp, Homo sapiens
tcaggcaggccttggcgtaccttgagcagaggatgaggagaagcagcagcaggcccatgacctgtttgaggaggc

SEQ ID NO: 262425 - DNA, 90 bp, Homo sapiens
ggctgtgcggtgaggcgcgaggcccgaggggcggcccaggactcgagggaaggtgctgagctactggtgcttcagtcccggccacagcat

SEQ ID NO: 262426 - DNA, 75 bp, Homo sapiens
acggcgtacgccctcatggggaaaatctccccggtgactttcagcgcctgaattctgctattatctatgaccgag

SEQ ID NO: 262427 - DNA, 90 bp, Homo sapiens
cctggatccagcagtacatgaagttccctttcctgccaatattggccctggccaacgtcaacattgggagcctcatctgcaatgtagggg

SEQ ID NO: 262428 - DNA, 74 bp, Homo sapiens
caaactccttcacactgcagatgctccagtcagtctcagtcatcctacatcatcaggaatccacagcagaggcg

SEQ ID NO: 262429 - DNA, 76 bp, Homo sapiens
aagaaagctgcggcctgtatcaccagaggagattagacgtagcagattagggaagctgccaaagaatgtcgacgtc

SEQ ID NO: 262430 - DNA, 96 bp, Homo sapiens
gtttgaaagtgcgattgtggaagctgctcggtgtgttaacagggcacaaccattatgtgatgtgtgctcagttccaccccacagaagacttggtag

SEQ ID NO: 262431 - DNA, 90 bp, Homo sapiens
gaagcctcatagacagaacgattgatgaagtagttgagatctgtgccagttcagaagcaggcgagcctcttccctgatgaaaaagaagat

SEQ ID NO: 262432 - DNA, 83 bp, Homo sapiens
agaagagtgtcgtctcctagaaatctagcactggagaaactcagagcaccataacatggtgtgggaagtgaagacaaatcaga

SEQ ID NO: 262433 - DNA, 82 bp, Homo sapiens
ccagcggccgagcgggcggcttcctggcctgggcgctccggtggcggcggagctgtcattcttctctacagaagagcttctc

SEQ ID NO: 262434 - DNA, 60 bp, Homo sapiens
ggctccctcctcccagggccaggcgccgctcagaacgtcatcaagagttcatataactag

SEQ ID NO: 262435 - DNA, 83 bp, Homo sapiens
cggaacccggcgcggcggcggcacgatggtcatggcgtatttcgtcgagaatttttggttgatattcactgatggactccaaa

SEQ ID NO: 262436 - DNA, 100 bp, Homo sapiens
aaaggaactcaaagaatttggtctgcctaccctcctaggctgagctggggtttacccaaataccatcacattgttctgtatctactcgtgatctcccagg

SEQ ID NO: 262437 - DNA, 100 bp, Homo sapiens
gtacatttgcccattctcaggaagagcttgaaaaaattcctagaggacctgtgcaacaacctcttgaggatcgaatcttcactcccgctgtctcagcagt

SEQ ID NO: 262438 - DNA, 74 bp, Homo sapiens
gaaaatgtgataaaaacaaggtggaagattcttccaaggaaccagtgcgaagtggtatgttcaagccacttgtg

SEQ ID NO: 262439 - DNA, 82 bp, Homo sapiens
ccgtttgttcaggaaccaccagtgacagatttcagaagaggagccccgccgaggcatgagggccgtgctccccccagaggaa

SEQ ID NO: 262440 - DNA, 80 bp, Homo sapiens
gtgccagcacctttcggcttctgagacggcggcagcagcggcattcaggatctatcttgggatcccatggctttctttac

SEQ ID NO: 262441 - DNA, 92 bp, Homo sapiens
atgacagcggcgaggagaacgtcccgctggatctgacccgagatgctgcagttggagaagaaacttgaacgtgaacttgaggatgatgcacg

SEQ ID NO: 262442 - DNA, 82 bp, Homo sapiens
tggctgtgctgcgcgacccccgcgcatggagccttcacgtaaatgggtccagtcatgcctcccagtaagaagccagaaagct

SEQ ID NO: 262443 - DNA, 100 bp, Homo sapiens
caaggagaggcggcggcggcctcggctgaagaaagaagagatttccaaaatgagggagctcctggctagaaaagacagcgaaacaggagaaaatattaga

SEQ ID NO: 262444 - DNA, 100 bp, Homo sapiens
cgcagtctggccacccgcttccatgcggttcgggtccaagatgatgccgccatgtgaagatgtgcttgcttcccctttgccttctgccatgattctaagt

SEQ ID NO: 262445 - DNA, 74 bp, Homo sapiens
aagattagtggctgctaaacttgaaccgaaaagagccaaataccacaagttgaaatacgggacagaattgaatc

SEQ ID NO: 262446 - DNA, 74 bp, Homo sapiens
cgggatgtattcgtccccgctctgcctcacccaggctgaaggtgatgtggccgccctcaaccgacgcatccagc

SEQ ID NO: 262447 - DNA, 50 bp, Homo sapiens
ggccctcttcccgccggagcccctggtctgggaggggctgaacgtggtga

SEQ ID NO: 262448 - DNA, 99 bp, Homo sapiens
gagctgaggctggagctgagcagagggcagggaggcaagtggtggcctgagagctttgaagatactgctataatttgaaaatttgaaattagtgtttca

SEQ ID NO: 262449 - DNA, 83 bp, Homo sapiens
cctgcattcgcggggcatgttcccgaggctgtcaccaggctggacggcagtctggaaacgaccaatgagatcttggactctgc

SEQ ID NO: 262450 - DNA, 71 bp, Homo sapiens
gtgcactgggccgcgcatttcggcaagtcttccgtgtgtgctaagatcgtgcagctcctggggcagaatga

SEQ ID NO: 262451 - DNA, 75 bp, Homo sapiens
gcgggaggcgcggcgagggcgccagtggccataaaatgcagtaaaaacaaatccagttcccaagaagctgtacaa

SEQ ID NO: 262452 - DNA, 101 bp, Homo sapiens
gtcgtggaagctgagcccatattaagagatgtcaggtcatcatcagatttgaaatatttaaagtggatacaaaactatttcagcaatgcagacaattaagt

SEQ ID NO: 262453 - DNA, 97 bp, Homo sapiens
aggagcaacaggaagtggctgtgcgctagatgctgtcaccagagaattaaacaaccaccatgtcgagcaaaaaggcaaagaccaagaccaccaagaa

SEQ ID NO: 262454 - DNA, 100 bp, Homo sapiens
atttggggccttcgcggtgggattaaaagcagcgaacctcgagaccaacgtggaggagctgtgggtggaagaacccagtgacttgattgtaaaaatttac

SEQ ID NO: 262455 - DNA, 75 bp, Homo sapiens
gaaaagcagcggtatttctctgcctcctgtggacaaaaaaagacatatctgaagagatggattaagaatgctttg

SEQ ID NO: 262456 - DNA, 100 bp, Homo sapiens
cgggccgtgcagctccaagagctgtggcccgggggcctcttctggaccaggaaactctccactttgcagtgttgatgtgggtatttacctatgttggtgc

SEQ ID NO: 262457 - DNA, 49 bp, Homo sapiens
ggacaatggcagtagagatgagatcagcccggcccctgcatagcctcag

SEQ ID NO: 262458 - DNA, 100 bp, Homo sapiens
atctctgtcagtcggacctgcagcaggttctgttcttgcttgagtcttgcacagctgcatcagatctgttgctgcactcagcactggtgcaggagaccgc

SEQ ID NO: 262459 - DNA, 50 bp, Homo sapiens
acaggagaggtttttgaacagcagctgtccccgccctactccggaccgcc

SEQ ID NO: 262460 - DNA, 75 bp, Homo sapiens
ccccgagcgggacagcgcggcggggagcgacgaatcacccggaagttcaggctgaattctgaaggcaaacttgag

SEQ ID NO: 262461 - DNA, 75 bp, Homo sapiens
gtgattcttgtgggtggcatgactaggatgcccaaggttattaatgctgcactggctttagcagcaaaaccacag

SEQ ID NO: 262462 - DNA, 90 bp, Homo sapiens
ttctcagagatttcaaatcatgaaggttgataggagaatagtgacagtggtacaggaaagaaagaaaaagaaaagaaaaacagaaagggc

SEQ ID NO: 262463 - DNA, 71 bp, Homo sapiens
gccctgggcgcgggggcggcgtgtcaggtggttgcggagctgagtattgcccgggctgtgagtgcagtctc

SEQ ID NO: 262464 - DNA, 100 bp, Homo sapiens
ggaggagcgatttgccatcgtgctgggtactagatggaaacttgagaaaggactgcttattgataacagctaaggtattcctggaagcagagtaaataaa

SEQ ID NO: 262465 - DNA, 100 bp, Homo sapiens
accgtgggggcgttcgcgtggctcccagcccgggaccccacccccgctggacagtgggggaaactgaggcctgagcgggaagcaatgaggctccccaaga

SEQ ID NO: 262466 - DNA, 75 bp, Homo sapiens
caatctccttttccttggctacccgcaatgatagtaagaaatgctaaagatacagctcatacaaaagcagaacgg

SEQ ID NO: 262467 - DNA, 51 bp, Homo sapiens
atccaaatactgcatatcagaaacaacagatgtcagccctgcctcaggaac

SEQ ID NO: 262468 - DNA, 50 bp, Homo sapiens
ctgacagatgtccagtactactgggattccacctgctcctacgaagcccg

SEQ ID NO: 262469 - DNA, 105 bp, Homo sapiens
gatctctgaagatatcaagtcatattatacagtgcgacagctagaattggaaaaccttacaaaactggcgatggaatatgagaggagccctctggaaagaaaagg

SEQ ID NO: 262470 - DNA, 98 bp, Homo sapiens
caccacactagaatggagcactacagaggtacaggtttgcagattccgccagcagcacagcaagctctacagatgagtggctctttggcatttggtgc

SEQ ID NO: 262471 - DNA, 100 bp, Homo sapiens
aggaattgaaaggaaccactcattcacttctagacgacaaaatgcaaaaaaggaggccaaagactttgtgcatggctgcctcctaatcccatagtccaga

SEQ ID NO: 262472 - DNA, 100 bp, Homo sapiens
tgttgctgctgcacattaggttgcagtatgtggccagttatttgcctcagtaaaagagttgaaggtcgaggagctggaaggcgagcggagtcggctggag

SEQ ID NO: 262473 - DNA, 98 bp, Homo sapiens
agacatccctgctgagagagccaaggtgctggagaatctggtaaaagcaccattgtgaagcagatgaggatcctgcatgttaatgggtttaatggaga

SEQ ID NO: 262474 - DNA, 100 bp, Homo sapiens
gagcaacagctttcagcaacacagaaattcaggaagctgctttcaaaaggccttcccttcttcttggtggtgttcttgagtaagataatctggactggcc

SEQ ID NO: 262475 - DNA, 98 bp, Homo sapiens
gtctcatcatcatttgccttctaggtattcacgtccccaggctcattcttcagcctcagcccatttttcagtgaagaattttactttgagattccaag

SEQ ID NO: 262476 - DNA, 75 bp, Homo sapiens
tcttggaccaagctctcagagtatgtcagccaacaaatggaattttcttgagcatgtttctaatcgttttgccat

SEQ ID NO: 262477 - DNA, 82 bp, Homo sapiens
ctttcgccagcccgtgccgcgagcgcggcctgcaggaggatgaccgagtgggagacagcagcaccagcggtggcagagaccc

SEQ ID NO: 262478 - DNA, 75 bp, Homo sapiens
gacccggtttgctgatcgccccagggatcaggagatttacaagggtcccgactcttccttccggtattccagcct

SEQ ID NO: 262479 - DNA, 75 bp, Homo sapiens
ggtcactagcggactcttcttcgccttcgaggagactcatgcatctgtatgccgtgtgcgtggactgcctggaag

SEQ ID NO: 262480 - DNA, 100 bp, Homo sapiens
caaggacttaatttatacactttattattggaaatcttcaagttcaggaaagattcgggaactggagcctctcctctgtcacagtgacaatccatctcag

SEQ ID NO: 262481 - DNA, 90 bp, Homo sapiens
gtggcttcccactggcgaagagaagctacaaaatatgctcgatggatagcattcactggaaacgcaaacatgcagatctttgtgaagacc

SEQ ID NO: 262482 - DNA, 100 bp, Homo sapiens
cggcgcggtagcgaaggccgccgaacctgcctggctagccggcgacttgagtgacgagttgaaggtcgaggagctggaaggcgagcggagtcggctggag

SEQ ID NO: 262483 - DNA, 102 bp, Homo sapiens
agacgatctgcacttcgcattttggcattgacatttaattttagggtcctttatatagaagggagagtagggaaaatgaccgagttgcaatggttaacggag

SEQ ID NO: 262484 - DNA, 126 bp, Homo sapiens
ctgttgaaagcgacaagtggaggcgccgctctagcggccgggactctgaactatggcggaacagatggagtcggataactgttcaggaggagatgatgactggacccatctgtcttcaaaagaagt

SEQ ID NO: 262485 - DNA, 75 bp, Homo sapiens
gagatcccaggcggtgacagagtggagccatggctagagctgctgatgcaaggaatcccctgggctcccgtccac

SEQ ID NO: 262486 - DNA, 74 bp, Homo sapiens
aaaccacagtgttctttgcctcaagacccagctattgttcagctatcagttgagggatttgcagttgataaaat

SEQ ID NO: 262487 - DNA, 75 bp, Homo sapiens
ggcggcagtatgaccgggtttctttgatgcgacctcaggaaggagatgaggtgacaaaatatctgaacagaagag

SEQ ID NO: 262488 - DNA, 100 bp, Homo sapiens
tctgcgtgagtgtggtctacgagctgtttctcatctttatactcttccaggcccagggccccggccagtgcccagccccgctgggagacccggccagcac

SEQ ID NO: 262489 - DNA, 100 bp, Homo sapiens
ctcggctggagagcagaagaccgaaagaaagggctattgcaagacacgaagtccgagaaattgagcagcgacatacaatggatggccctcggcaagatgc

SEQ ID NO: 262490 - DNA, 101 bp, Homo sapiens
acaggagacaccaaagaagagaaagacaaggatgaccaggaatgggaaagccccaggctccagcaggaggaaatggtgcagaaaatgttgctgctgatcag

SEQ ID NO: 262491 - DNA, 90 bp, Homo sapiens
gtttgtgtcagccaccttgttctctaaagagttgctggagaatgtaaccctaatccataaaccagtgtcgttgcaaccccgtgggctgat

SEQ ID NO: 262492 - DNA, 50 bp, Homo sapiens
gtcacactacgacagtgagaaaggaggtgactctgacatcattagaagca

SEQ ID NO: 262493 - DNA, 83 bp, Homo sapiens
cccgtcgtgccggcgccgcccggaccgccagactaatagggatgccaaaggaaaaatatgatcctccagatcctcgcagaatt

SEQ ID NO: 262494 - DNA, 60 bp, Homo sapiens
tgatgtgtaggaggaagagctcaggctgctggtggtctacccttggacccagaggttctt

SEQ ID NO: 262495 - DNA, 100 bp, Homo sapiens
cccatctgaagggaggaaatagtggcaggtgacagtctgcatgtgcagttttcaggcatatcacacctgaaaaattttatgtggaagcttgtgatgatgg

SEQ ID NO: 262496 - DNA, 83 bp, Homo sapiens
gggaaggcggcaagagctgcggagcccctggaaggtatacagaagatgggtgtccacataagaaattctttcacacacgtttt

SEQ ID NO: 262497 - DNA, 100 bp, Homo sapiens
ctgctacacggcgaactggaacccactcggggactctgccttttaccgtctcaaaccatgaattatgtgggacagctggctgggcaggtgattgtcactg

SEQ ID NO: 262498 - DNA, 100 bp, Homo sapiens
cttagttcaatggctgaaacacagtcgaaaagaatactgtgaattatgcaagcacagatttgcttttacaccaaatctgactgcagccatgagcagcaat

SEQ ID NO: 262499 - DNA, 74 bp, Homo sapiens
tatgatatgctaagaaagaatcttgtcactttagccactgctactacaggagaagatttacaaatctctgcctg

SEQ ID NO: 262500 - DNA, 100 bp, Homo sapiens
gaacaacttagcaaaatgttctttactactaagcaccgttggtatcctcatggacggttgcagatatcaagaaagtcaacaacttcatcagagaacaaga

SEQ ID NO: 262501 - DNA, 50 bp, Homo sapiens
caaagcttgcgaggtggcgttaggcctccaggcccaaggtcagcatccca

SEQ ID NO: 262502 - DNA, 99 bp, Homo sapiens
ccacttccagcaacagctcctgcagcagtaccgagtgccccggggaagccattccccaccccccaggggactcggaacaggaggtgatactgaccacca

SEQ ID NO: 262503 - DNA, 100 bp, Homo sapiens
gtcgggagtgatcacctaccctacaggtcttgatgcagaactttattatgtgagaaatgaccttattagtcactacgctctatcctttagtctgttagta

SEQ ID NO: 262504 - DNA, 100 bp, Homo sapiens
agggatgagcatttggactttatccagtcacacctgcggaggttctgccttcagtcaagaagaacggccaatccgacagattttgtacctcggggacctg

SEQ ID NO: 262505 - DNA, 100 bp, Homo sapiens
tactggccatctgatctataaatgcggtggcatcgacaaaagaaccattgaaaaatttgagaaggaggctgctgagcacttttctgtagaaggtcagttg

SEQ ID NO: 262506 - DNA, 98 bp, Homo sapiens
atcttcgcatgaaatggaagagagggtggtgcggatagcttgaggaagcaagtaactggcagaagttttggtgataaagattttcggacaggtttaga

SEQ ID NO: 262507 - DNA, 50 bp, Homo sapiens
ttcctgtacagcctgcagaactaagctgttgtgaaggcagagcagcatct

SEQ ID NO: 262508 - DNA, 51 bp, Homo sapiens
ccaggaggagatcaaggagtacaaggaattgagttcttctcagactttatc

SEQ ID NO: 262509 - DNA, 100 bp, Homo sapiens
agccccaaagcgagcgaagctagggtcgccgccactgccgcaggaggcgtgaggtctcggcgcggaagatggccggcggcgtggacggccccatcgggat

SEQ ID NO: 262510 - DNA, 76 bp, Homo sapiens
aaggccccacccctgccattctagaatctctcatcagccaaaccccctaaaggtctccacactgctgtttaacggc

SEQ ID NO: 262511 - DNA, 97 bp, Homo sapiens
gagcccgagtggatcggggacggagagaacacgagcccatcagaccctacagcttggggcctgggctcctctgaccatcctcattgagaaaggaaag

SEQ ID NO: 262512 - DNA, 73 bp, Homo sapiens
gtgtgaaagatttcaatgagacacaggctgttcggctcttgaatcccagcgatgaaaccaggaactcactttc

SEQ ID NO: 262513 - DNA, 85 bp, Homo sapiens
tgacgccatgtcgggttattcgagtgaccgagaccgcggccgggaccgagggtattaatctctggagaagacacatccacagtta

SEQ ID NO: 262514 - DNA, 100 bp, Homo sapiens
atgctctctctccagtccttgctgaagagactttccgttacatgaattgaatttagtggaagcttttgtagaagatgcagaattgaggcagactttacaa

SEQ ID NO: 262515 - DNA, 95 bp, Homo sapiens
gtccattgttctcttggagcagctggtcatcatggtaaatggtcttaaaatggttgatgagccaatggaagagggagaagcagattcttgtcatg

SEQ ID NO: 262516 - DNA, 90 bp, Homo sapiens
gccacattccagttccgcacgcgctgggattcggagcttcagcgggaaggagcgtctcctggctcagaccagtgctagaagtgtccagtc

SEQ ID NO: 262517 - DNA, 98 bp, Homo sapiens
acagagaagagtaaagagtagatctacaggagattttataggaagacgaaacttgtcggctttcaagacatggagtgtgtgccttgtggagaccctcc

SEQ ID NO: 262518 - DNA, 82 bp, Homo sapiens
ttctgtggaggacataagggagatagtgcagagactgaaggtttttgtctgatgaaaatagtctggagtataaatattacaa

SEQ ID NO: 262519 - DNA, 100 bp, Homo sapiens
atcacttccttccttactttgtcttggtatactacatggcaaaatgggaaagacttaattcagtgcacaaatgagatgaatgtgaacatcccacagttgg

SEQ ID NO: 262520 - DNA, 90 bp, Homo sapiens
aaacttcttggaggttttcaggaaacttgcagcaaagccattcgggttggagtaattgaacacacgcaggacttgaaagatgttactaat

SEQ ID NO: 262521 - DNA, 75 bp, Homo sapiens
gcgcgaatatcgtcatcgttagaagattggactccttcttgtcctgagccagtgtatatcccaacgggcttagaa

SEQ ID NO: 262522 - DNA, 100 bp, Homo sapiens
agaagagtggctggacattctggaccgagacatgggtgcccggcaccgcgcccgagcccactccattcagatcatgaaggtggaggagatcgcggccagc

SEQ ID NO: 262523 - DNA, 75 bp, Homo sapiens
atttacgcgccgtgtaactgtgaatctttcaaagggagcctccaccaaggcgctggtgcaacacctgccagctct

SEQ ID NO: 262524 - DNA, 75 bp, Homo sapiens
cctcgggccgacgccatgaagatcaaagatgccaagaaacccttttggggggaaagagctcagagatgaggaaca

SEQ ID NO: 262525 - DNA, 100 bp, Homo sapiens
cgggcagcaggatggtggtggatgcggccaactccaatgggcctttccagcccgtggtccttctccatattcgagggaaatttacctaaatattctcata

SEQ ID NO: 262526 - DNA, 113 bp, Homo sapiens
ctcatcctcattttaaaaagattggatagaatgttcaacaaaattcataagatgcctactttgagggcttattaaaactactagaaggcacaatagtcaatgttccagaaaag

SEQ ID NO: 262527 - DNA, 75 bp, Homo sapiens
ctgcagagtgctgaagacggggtagccacgaggccggaaggtggtggtcgtacgctgtgaaggcatcaacatttc

SEQ ID NO: 262528 - DNA, 100 bp, Homo sapiens
gctgaagaagcagttctacaaggcgagccagaccttcacggcatggtgcaactcccacctgcggaaggcaggcacacagatcgagaacattgatgaggac

SEQ ID NO: 262529 - DNA, 96 bp, Homo sapiens
cctgctggacatggctgacgtggccgtgtatggtgtcgaggtgccaggagcagatggagcagctgctgctcggggagcaaagcctggaggccttcc

SEQ ID NO: 262530 - DNA, 82 bp, Homo sapiens
ctgggtcagtccgccgctcaccccgcggccgcaccttcccgccttctcaggtacggacattgctgcaggagaagaggttgcc

SEQ ID NO: 262531 - DNA, 51 bp, Homo sapiens
ccctcagctccgagtccagggcgaggtggccagcatcgaaatgttcagcct

SEQ ID NO: 262532 - DNA, 120 bp, Homo sapiens
ctgtggggtgttcgttccgcacccgctcccggcgcctgccggagaggccagacagatttgaccagttttgggccatcaatcggaaactcatggaatatcctgcagaagaaaatggatttc

SEQ ID NO: 262533 - DNA, 83 bp, Homo sapiens
ccgggacctgctgctggacccggcctgggagaagcagcagcgcaagtctctgctttctatccgtcaagatgataaagtcgtgt

SEQ ID NO: 262534 - DNA, 82 bp, Homo sapiens
cttgccctcatcctggttctggaatcctcagttcaagtgtaaggagaggatgaggcccgtgaaaaaggcactgaaacagctc

SEQ ID NO: 262535 - DNA, 100 bp, Homo sapiens
agctggcttatcaatattgctgtttgatgcgatcctgaccagtgcaaccacgggatgctatgttagatactaaagaaggcttccccacaacccatatgca

SEQ ID NO: 262536 - DNA, 97 bp, Homo sapiens
gattttctgcagaagatgaagctttgagtaacattgccagagagtatgaaaacccatggacaatcccgaatatgttgtcaatgacgagaattggctt

SEQ ID NO: 262537 - DNA, 97 bp, Homo sapiens
cctgccccggcttcaggatttacacagacgtggggcgatgcttgtgaccctgcagctcctcaaacccatggcgaattgtggatgattgcggtggagc

SEQ ID NO: 262538 - DNA, 110 bp, Homo sapiens
aaacactggaatgtccagatgaaccggctgatgcatccaattgagcctggaggaccacttgatccttatcactgcttttggcacactcctcatccaagagttgatcgcag

SEQ ID NO: 262539 - DNA, 75 bp, Homo sapiens
caaacatcgatggcctactggggataacattcatgcagaacatcagactggatgagctgaacctctcctggtgtt

SEQ ID NO: 262540 - DNA, 50 bp, Homo sapiens
cagatgttgttgaagataaagacaaggtcagcaaaggaggcagaagacaa

SEQ ID NO: 262541 - DNA, 50 bp, Homo sapiens
acgttccagagactataatggcagacggtctggaaaatcccgaagcagaa

SEQ ID NO: 262542 - DNA, 98 bp, Homo sapiens
gactgctcaatggagagaaggaaagtcaatcgtaggaagaacacagtacagaaatgcactcggtgatggaaagagagccactattctgaagaacactt

SEQ ID NO: 262543 - DNA, 100 bp, Homo sapiens
aagagacctctacttagctcagcaattcttaccttgtgaccgaactagcagttgcccagtgatcttcatattagatgaatttgatctttttgctcatcat

SEQ ID NO: 262544 - DNA, 99 bp, Homo sapiens
cagaggtggaggcgctttgaaagtgtggggctgccttccaggaggatgatgtcatcatgctcaatggcaccaaggaggatgtggacgtgctgaagacaa

SEQ ID NO: 262545 - DNA, 50 bp, Homo sapiens
atccgcagcaggaagcttggggccagtcctgctcctataattgtcaacac

SEQ ID NO: 262546 - DNA, 89 bp, Homo sapiens
ctatgatctcttctttgccttcctacaaacaggaaattacaaagaggccaagaagatcattgagggtttggctgctttcttgaaggcta

SEQ ID NO: 262547 - DNA, 100 bp, Homo sapiens
ctaggccctctgggctttgctcccgggttgctgggtgaggctgcaaggtttagcacagcatttttgaaacgttggggttgttggagtggttggattttcc

SEQ ID NO: 262548 - DNA, 126 bp, Homo sapiens
gcaaattgctataaatcatctctgaagctcgtgaaagaaaataacatccgatcagttgcctcaggagtgcaagtagctgatgaagtatgtcgcattttttatgacatgaaagttcgtaaatgctcc

SEQ ID NO: 262549 - DNA, 98 bp, Homo sapiens
gatcccggaatgcctgaaccaactgttttgaggaccccagagagatgcccaggcagcccgagaattcattctgaagatgttcgtggacctgaacccag

SEQ ID NO: 262550 - DNA, 100 bp, Homo sapiens
ctgggcgtcagccgccaccggcagcagcagcaccaccggacggttgtggcagcactgcctgaaggtatgagaccagattctaatctttatggttttccat

SEQ ID NO: 262551 - DNA, 100 bp, Homo sapiens
tgcccatcctgcttccaaaaggagaggtcgattctattttcaaatagagctgcagcaaggatgaaacagcaaggtgaagtaagactcaaatgtcttactg

SEQ ID NO: 262552 - DNA, 83 bp, Homo sapiens
ggcaggctcgcctcctccagctgttgttgctgctgaactgccattggatgtccagaatcccctgtagttgataatgttgggaa

SEQ ID NO: 262553 - DNA, 97 bp, Homo sapiens
ttggttactgggtctcctctcaagaaatctcaagatattaaagttactgctgttaaaaaggagtggaagctggacacactatgtgacttgtatgaaa

SEQ ID NO: 262554 - DNA, 82 bp, Homo sapiens
cgtagtggctgcggcgcgggccgagaaggaaggtcaaaatgcagatcttcgtgaaaacccttaccggcaagaccatcaccct

SEQ ID NO: 262555 - DNA, 96 bp, Homo sapiens
cttgttgtcttcaattaaaaaatttattaaaggaagcacacctaagatgtagctgagcagtattttcaagagagcatggctcatcttaaggattct

SEQ ID NO: 262556 - DNA, 100 bp, Homo sapiens
gaacatggctagcaggaatgcttactgttgcgtggttcgttattaacagcagcgtcaccctttacaccagaaagctggcgggcactatggggaaaaaaca

SEQ ID NO: 262557 - DNA, 80 bp, Homo sapiens
gctcttcggggactccatcacccagattgatatcagtaaatgccattatttagtggatttggacaccatgagagaaacac

SEQ ID NO: 262558 - DNA, 82 bp, Homo sapiens
ccctgcaaagatcctgggagaccaagagcgttctaccaaggagaagcagagctcagaggaagaagaaaaggaaacaagaggg

SEQ ID NO: 262559 - DNA, 100 bp, Homo sapiens
gcaaaaggcgcttttcctggagctggtgccggccttgtacctcctttattcctgaagcccgggcagtgcttgacctggtcgaccagtgcccaaaacagat

SEQ ID NO: 262560 - DNA, 75 bp, Homo sapiens
cctgcatatgattggctctttagctgaaatacttctgaagagatcgcggattcaggtgtggctctatgagcaagt

SEQ ID NO: 262561 - DNA, 100 bp, Homo sapiens
tggtgccccggagactccgggcactggggagcccagaggaatatatgcagaacatgtcctgcggcccaagaatcttggacttgcacatcagaggcaacag

SEQ ID NO: 262562 - DNA, 129 bp, Homo sapiens
ggcagagcctgaagaaaaagtacctcatcttatagaccaccagatttcttctggtgaaaacaccagatcagatttgtgggcagattcaagtctcgcaaagagcgggaagctgagcttggagccaaagcc

SEQ ID NO: 262563 - DNA, 98 bp, Homo sapiens
atgttggagaactacagaaacctggtctccctaggtgactctcctattccatctgtttcttcgggatcatcttcacctctttcagccacttctgcccc

SEQ ID NO: 262564 - DNA, 98 bp, Homo sapiens
ttggaaattgaacaagcgtcacttgacaagcctatagaatcgacctccaagaagctggtgaactcggtggctggctgtgctgatgacgctcttgctgg

SEQ ID NO: 262565 - DNA, 100 bp, Homo sapiens
ggatcctccagccccacttggagaaccaggaaaacctttcaatgaactgtgggattatgaaggggctttgaccacgacctttgaagagcttcattttgag

SEQ ID NO: 262566 - DNA, 100 bp, Homo sapiens
ccgggatcgtgaccgagaccgtgaccgagagcgtgaccgagagcgcgaatatcgtcatcgttagaagataacctttggttgaattgagactgaacaggac

SEQ ID NO: 262567 - DNA, 50 bp, Homo sapiens
gtttccaggaagttcagagagaacagaagactggactttatgagtataaa

SEQ ID NO: 262568 - DNA, 75 bp, Homo sapiens
ccccgcttctatgtcctgtacacaatcttcatgaaaggacagtcattttgtttactcattcagccctgttgcagg

SEQ ID NO: 262569 - DNA, 82 bp, Homo sapiens
agaccgcggccgggaccgagggtggatgaagacctgatcattgaagttcaccagttatttttctcaagaatgtgaataacaa

SEQ ID NO: 262570 - DNA, 90 bp, Homo sapiens
ccctctgcaacgggctcatcaactcctacgaggacaaaagcaacgacttcgtatgggattcctggtcacctcccttgctcttttcttcct

SEQ ID NO: 262571 - DNA, 82 bp, Homo sapiens
tctgtgtggctgtaacttacgtgtactttaccaacgagctgaagcagacccaacatgagtgaagtttcctgcaagaaacggg

SEQ ID NO: 262572 - DNA, 75 bp, Homo sapiens
aagaattaaaaatccccagattgctggaaccagaagttttctggatatgccgcagaaggatccgtgccagaagca

SEQ ID NO: 262573 - DNA, 98 bp, Homo sapiens
ttggtctgggccgcttcttcagctctgagaccaccgcagcccactccctaggtatttaccttgctgtggattgctgactggatggtccatcacttctg

SEQ ID NO: 262574 - DNA, 83 bp, Homo sapiens
aggggccccagcagcccccgaaggccctatcaggacatggagtatgaaagacgaataccaagctgctattttacacttgaaga

SEQ ID NO: 262575 - DNA, 74 bp, Homo sapiens
accacacagacctcgccattgagtatgagtgctactatatcggggccacagatgatgcagccaccaaaatcatc

SEQ ID NO: 262576 - DNA, 90 bp, Homo sapiens
gcagccactgccacacggccgggaggccgagggcgcagaaggatggtgaaacgccacttataaaggctaccaagatgagaaacattgaag

SEQ ID NO: 262577 - DNA, 111 bp, Homo sapiens
gcaatcttcctgctaaggccattggacacagaatccgagtgcccaagccttgtcagtactgtaacataattgcagcatttattggtaccaagtgtcagcgttgcacaaatt

SEQ ID NO: 262578 - DNA, 83 bp, Homo sapiens
gttcttctgtatgcccatgtcaactttgcaaaagcccagtctccgggctgatctatgactcggtcatgctgaagcaccagtgc

SEQ ID NO: 262579 - DNA, 50 bp, Homo sapiens
ggaagtccgggagagaatacacagagccaatggagtcttgctctgttgcc

SEQ ID NO: 262580 - DNA, 90 bp, Homo sapiens
cattccaaatgaagagatgcctgcagatcgatggcaaagccttcctgcttctgacacagacggacattgtcaaagtgatgaagatcaaac

SEQ ID NO: 262581 - DNA, 101 bp, Homo sapiens
ctttaatgaaaagggatggaactacattcttgagcccttgaatggtttcgaatctaatgggccaggccttcagtacaaagttagctggcgccagaaagatg

SEQ ID NO: 262582 - DNA, 129 bp, Homo sapiens
acctctgctgccagcccttcctcacttttggaaatggcgggtgaaattacagagaccggggaactctactcttcctacgctgaagccgacgtagcttctctgaacagacgcatccagctggttgaggaa

SEQ ID NO: 262583 - DNA, 100 bp, Homo sapiens
atctggtatctgtagatggctacatgaacatgcaggtttctctagaggactttctaaagaaaattcagcgagtggattttgatatattccacccatcttt

SEQ ID NO: 262584 - DNA, 80 bp, Homo sapiens
gaaggatctttgagtctagcaagtgttattatttctgccctttgtacccttacaagaattcccatttgcagaaaccctat

SEQ ID NO: 262585 - DNA, 100 bp, Homo sapiens
gacgagaagcctgaaaagtcgcagcgagctggagccgccggaggtacagcagggaagaactggaaactcagagaaagaaactgcccttccatctacaaaa

SEQ ID NO: 262586 - DNA, 98 bp, Homo sapiens
atcccacacagtgatcagagattgcgccctcagcgaacgcaggggtgatgtgcaagctccaggaaagagatgaaatcggacgaattgaactagtccag

SEQ ID NO: 262587 - DNA, 82 bp, Homo sapiens
ggaagagcgagcccggacggcgcctctcgaacgagtgtgggcgcgagatcagtcgcatcgaatacattcattcaaagaactt

SEQ ID NO: 262588 - DNA, 100 bp, Homo sapiens
gtggttttggatcctggagtacctgtctggtacctggtacccggcacactgtgagttcctggacatcaagggctggaagtatttgaaaaggagcagtcca

SEQ ID NO: 262589 - DNA, 98 bp, Homo sapiens
ctgcgctatgccctgctgtagtcacaggagctgtagagaggaccccggtacatctgaaagccgggaaatgcacatcctttactgcattgtggacagcg

SEQ ID NO: 262590 - DNA, 100 bp, Homo sapiens
tggcagttcccgttaaccttagccacaaagtcaaagaacaagcgggagcctgtgtcaggaaagcatgtcagagcagagctgccagatgtccgaactgcgg

SEQ ID NO: 262591 - DNA, 96 bp, Homo sapiens
ttttataagtattgacattacacagtgttaacaatgcatccacagagcttgccagcaaagcacggacagagaaggaggagaagctgagccaggcct

SEQ ID NO: 262592 - DNA, 50 bp, Homo sapiens
gcaggatggcaccggacccctggaactggagctctgctatcgaagccctg

SEQ ID NO: 262593 - DNA, 75 bp, Homo sapiens
acgagggcggcattgacaagctgggcgaggaacagatggagtcggataactgttcaggaggagatgatgactgga

SEQ ID NO: 262594 - DNA, 80 bp, Homo sapiens
tttgagaaaatggacgctgacatcaatgtcacaaaagcggatgttgaaaaggatcagtgaggaggaggacctgcacctgg

SEQ ID NO: 262595 - DNA, 100 bp, Homo sapiens
aaggactgcctcactgagcaaccaagaagcccagaacgcttcctccagcttggcgccaaggtcccaaagggcgcactgctgctcggcccccccggctgtg

SEQ ID NO: 262596 - DNA, 100 bp, Homo sapiens
cgagtcagattggagcatttgtgttgatgaagatgaaagagactgcagaagcagggtccctgaggtcggtgctcaataaagagtctcattcaccctttgg

SEQ ID NO: 262597 - DNA, 87 bp, Homo sapiens
tcgctatgcagacacactcttcgatatcctggtggctggcagtatgcttggacagctgggaagtggtggaaggactgaggggggaga

SEQ ID NO: 262598 - DNA, 75 bp, Homo sapiens
aagagcctcattatctaccacccgagatgccccaagaattgcctgaggttctgtccattgaggaggaagtggaag

SEQ ID NO: 262599 - DNA, 100 bp, Homo sapiens
tggattctgaggaccagcagatggccagtcacgagaacccagtactgctgcgcacggccactgccaacggcttccagatggtcaccagcggggtacagag

SEQ ID NO: 262600 - DNA, 95 bp, Homo sapiens
cctggagtctgcgaaggccgggacccggttccccggcccacagtgggggtgtgcaaacccgagagaactggacgccctcctgcaaaacggcccaa

SEQ ID NO: 262601 - DNA, 95 bp, Homo sapiens
gattggagattccacccaaacttgctggtcactgggagaaggaagaggcccagcagaagggactcgctgagccaccccccgccccactccatgtt

SEQ ID NO: 262602 - DNA, 100 bp, Homo sapiens
tggagagcatgtggagggacttggagccaggcaacaatttgggatgaatcccaaagacattatgctgaatgggagaaatcatttttgaaacggttgtata

SEQ ID NO: 262603 - DNA, 87 bp, Homo sapiens
ccgccccgcgagcacagagcctcgcctttgccgatccgccgcccgtccacacccgccgccagctgagcttcagtcattgtctattcc

SEQ ID NO: 262604 - DNA, 78 bp, Homo sapiens
agagttcaaggaggccttccagctgtttgaccgaacaggtaacagttaacctcttccacatgcagcatctgcaggctg

SEQ ID NO: 262605 - DNA, 51 bp, Homo sapiens
ccttgctggacagtggctgtgcgttccagttctcctacacagctgtcttcg

SEQ ID NO: 262606 - DNA, 75 bp, Homo sapiens
ctcgcgggatcctccttccagcccatcgagcctgaggagaaggcagagcccccccaggctatgaatgccctgatg

SEQ ID NO: 262607 - DNA, 78 bp, Homo sapiens
ttcgtttttcgccgtcatgggcgcctcggccgccatggtcttcagcggttaacacagaaatctgcctcctgggccatg

SEQ ID NO: 262608 - DNA, 87 bp, Homo sapiens
tttcacaagtacagtctacaaaaagacctgctagagccattattgccccgcataccaatcccattgtggaaaatggacagactcatc

SEQ ID NO: 262609 - DNA, 75 bp, Homo sapiens
ggacccggagccgaaacaccggagggagccatggatttgctgcgggagctgaaggccatgcctatcacgctgcac

SEQ ID NO: 262610 - DNA, 100 bp, Homo sapiens
ctcctcccccctcccctcagcggtggctcccaagaagtccgagacacgcggcaagaagctcttctggctgccattagtgaaaaagacgccaatatagctc

SEQ ID NO: 262611 - DNA, 100 bp, Homo sapiens
cgagcagttccaactggccatcgagagctcacaatgtctctctgcaccaagctccatgactcaggatttgcctggagttcctgggaaagaccagttgttt

SEQ ID NO: 262612 - DNA, 75 bp, Homo sapiens
cccacgactgcctgggacctggccaagggctccacacaccaagaccaagattgctcgagactttaatcccaactg

SEQ ID NO: 262613 - DNA, 100 bp, Homo sapiens
agggtcaccatcaaaatggaatgtaaccctagccaggtgaatggctcaagcattttgaaagcgaagcagaagccgtagaatcagcggcgagcctgttgaa

SEQ ID NO: 262614 - DNA, 97 bp, Homo sapiens
gacaagagcagttagaaagggaacagctggaatgggagagagagcgcagaatatcaagtgctgaccaactgccagagttttctctgggtgttaacag

SEQ ID NO: 262615 - DNA, 83 bp, Homo sapiens
cttgggcctcgcgccggctatggccgtgccctggggctgagccctcaggaccagaggagcgagagcagcaagaaccacaccca

SEQ ID NO: 262616 - DNA, 76 bp, Homo sapiens
cctgcctcagcctcctaagtagctgggactacaggtgaaagaaaagatgttgtcccggttaagagtagtttccacc

SEQ ID NO: 262617 - DNA, 75 bp, Homo sapiens
aagagtcacctaaagttaggcggcactccagccccagctcgttactccacaggatccgctgaacataggatgttg

SEQ ID NO: 262618 - DNA, 51 bp, Homo sapiens
ggttcgccaagaagctggtagacagcaattaccagctctggctgggtcgcc

SEQ ID NO: 262619 - DNA, 100 bp, Homo sapiens
ggatgagttaatgggccgggaccgaaacctagccccggacgagaagcgcagcaacgtgcggtgggaccacgagagcctcatgatggagcagtccaagaag

SEQ ID NO: 262620 - DNA, 100 bp, Homo sapiens
gttcagttcaagctctcagacattggagaagggattagagaagtaactgttaaagaatgggctatggaacacacctgatgaatcatttgaaagaatatca

SEQ ID NO: 262621 - DNA, 74 bp, Homo sapiens
gcagaagaggagtcctttaggaagggatttgtcttggctgttactatgacacgggaagcaattgatgaatttcg

SEQ ID NO: 262622 - DNA, 100 bp, Homo sapiens
atttcaacttgccaatgtgcaaagctgcagaaaccacagtggtagagaaatttaaaagcctgttgattcaagaactttctaaagtatttccggaagacat

SEQ ID NO: 262623 - DNA, 100 bp, Homo sapiens
cagtatttactgagagctcatcagattctgacaatggagatattaattatgattatgttcatgaattgtcattggaaatgaagcgtcagaagatacagag

SEQ ID NO: 262624 - DNA, 90 bp, Homo sapiens
aactaccagccatggctagacctgaaaatttcttccaaggttgatgcatctctctcagaggtccggcaggttcggctattccaggacgag

SEQ ID NO: 262625 - DNA, 75 bp, Homo sapiens
gggagcctgctccctgctcagctgcttgcctgtgtccctggagtgttacacagtgcctcctgaagacaacctggc

SEQ ID NO: 262626 - DNA, 88 bp, Homo sapiens
gtgccatcttgccacatcttagaagtttagttgaaatcattgaacatgtgatcaccagcagcttgcaaaacttatccaggagtcgcca

SEQ ID NO: 262627 - DNA, 75 bp, Homo sapiens
agatctccagtgtgacagcccaggcggcagagccgaggggtgaggacgcttgagcggaagttagaagcaaaaatg

SEQ ID NO: 262628 - DNA, 75 bp, Homo sapiens
gcccaggggtctgagtctcacagcttgtaaaggtcatcctttttcagtactaacgctgccggcacttccgcatct

SEQ ID NO: 262629 - DNA, 74 bp, Homo sapiens
agcaaggtgcaagagtccacaaagggacctgatgaagcgaagatcaagctaggacttctctcaaacttgtgtgc

SEQ ID NO: 262630 - DNA, 50 bp, Homo sapiens
cttcacaggaattgccatttttgctgattgttggaggttcttttggtctt

SEQ ID NO: 262631 - DNA, 90 bp, Homo sapiens
tcctagtgagtcggcggctgatttagaaggaggttcaggctacggtgagccgaaggcctaaatgtgcacagcatgctcaagcaccagacg

SEQ ID NO: 262632 - DNA, 97 bp, Homo sapiens
ccatagattggaatattggtgggccagcaatcctcagacgcctcacttaggacaagtgtcatggagaaactccagctgggcccagagattctgcagc

SEQ ID NO: 262633 - DNA, 100 bp, Homo sapiens
aagagacatgagacagtagtcaaatactcagccatgactgacaatactaatgtcaactatgtgcggtacaagggtgattactacctctgcactgagacca

SEQ ID NO: 262634 - DNA, 100 bp, Homo sapiens
ttcattggccacctacagaaacaaaatgtcaacaaattgatgggaggagatgttaaagtaacccatcttgcaggacgacattgaagattggtcttctgtt

SEQ ID NO: 262635 - DNA, 75 bp, Homo sapiens
ggacagatggacttcaaatgctgtttgtattccagagactagttgaagactgggatagtttccaagctattttgg

SEQ ID NO: 262636 - DNA, 100 bp, Homo sapiens
cggcccgcgggcgtaagcggactgcagccgcgagctcctggaggcggcgggatggaggcggcggccggacctcagcatggccctgccctcagggcaggtc

SEQ ID NO: 262637 - DNA, 100 bp, Homo sapiens
gctctgtagtgggcagagtaacatgcagatgactgtgttacaggtgaccaagaatatggcccaggtgaccaaagccctggacaaggccctgagcaccatg

SEQ ID NO: 262638 - DNA, 88 bp, Homo sapiens
ttgacatagacctggaccagccagaggacgcgggctctgaggatgagctggaggagggggttttgggatttgagattgacgcggtgaa

SEQ ID NO: 262639 - DNA, 83 bp, Homo sapiens
gccgagggggcgcggcccaggacggcggctaggccgtagtgcagcctctccggagtcctcagagaaagatgctggtttcgagt

SEQ ID NO: 262640 - DNA, 100 bp, Homo sapiens
ggaggcgcggcgagggcgccaggtcagcacctcatctatgggcactttaccaaagcgggtgaaaattgtggaagttggtccccgagatggactacaaaat

SEQ ID NO: 262641 - DNA, 100 bp, Homo sapiens
ggagcaacatgcatttccagtctcagtggattcacctgccagtgtccagaagcctctagttctgttgcaggggctgttggcatgaccacctctggggaga

SEQ ID NO: 262642 - DNA, 100 bp, Homo sapiens
agcagtctgccagacaatagagcatatggcccatatgttgtaaagtactatggcagttattttaagaatacagacctctggattgttatggagtactgtg

SEQ ID NO: 262643 - DNA, 133 bp, Homo sapiens
agttcgaatccctatgtccagtttgaaatccttggcactacctatagtgagacttttggcaaagacatgcgcaagtagctgctgctggtggtgacaatgtcaaataacggcctagacattcaagacaaacccc

SEQ ID NO: 262644 - DNA, 98 bp, Homo sapiens
ccagagcgtcggggaggcaagatgatccaccagcggttccatcctacacttgggaggaagaaggcacctacgatcaaactctggagttccgtagggga

SEQ ID NO: 262645 - DNA, 99 bp, Homo sapiens
gacgaattctatgaccaggcctctccggacaagaggactgaagcagatggcaactctgatcccaactctggtggagccgccaccaaaatgcagattttc

SEQ ID NO: 262646 - DNA, 95 bp, Homo sapiens
cctcgcctcctcgcagcagcgccatggttagctttatacgtctacgaatatttactgcacgtaggagcacagaaatctgcacagaccttcttatc

SEQ ID NO: 262647 - DNA, 100 bp, Homo sapiens
tgcttcagttcctcatccttcgactaatgggccgcaccatcactgccgtcctcactaccttttgcttccagatgagcggagaacagccttgggagtcatc

SEQ ID NO: 262648 - DNA, 75 bp, Homo sapiens
gctctgactgatggcttagggaacctcaccatcatcattgaaaccatggcagcttggatcttaaaagcaagagcg

SEQ ID NO: 262649 - DNA, 50 bp, Homo sapiens
cctcgcccatgttctggccgagagtccctggagaagtgggagcgtctgac

SEQ ID NO: 262650 - DNA, 83 bp, Homo sapiens
ggaacccgcacctgtgaacctcggcagtgcgtccccgggactctgttctgtgaggtcaaaatgcagatcttcgtgaaaaccct

SEQ ID NO: 262651 - DNA, 100 bp, Homo sapiens
cagagctgcacaaagggaaaggcttgtacctccttttaaacctcaagtaacatctgagacagatactagatattttgatgaagaatttacagctcagact

SEQ ID NO: 262652 - DNA, 97 bp, Homo sapiens
gtgatttcttatgcttgttttaggatttggatgatgtgttggagaaagccaagaaggccacctcaagaggaacatcgtggtgaagaccgtggagatg

SEQ ID NO: 262653 - DNA, 50 bp, Homo sapiens
aggagaaaagacagcaatggaccgaggaccctgagtggcctcagccagac

SEQ ID NO: 262654 - DNA, 90 bp, Homo sapiens
ctgcgttgctcttgcttttcctcgctggggtgtacggtcaaaaggctgagtttcaaattctggataatgtagactcaacgggagagttga

SEQ ID NO: 262655 - DNA, 90 bp, Homo sapiens
agattttcatcctggactgcctgtctaattacaaccctaaagatgatcgggaggctcagaggagcattccggaagagtttttcgactaca

SEQ ID NO: 262656 - DNA, 100 bp, Homo sapiens
cgccgcgggagccgctgcccgaactcccggcccgaactccaggaattgaatgatctggcacgggaccctccagcacagtgttcagcaggtcctgttggag

SEQ ID NO: 262657 - DNA, 76 bp, Homo sapiens
tgaccctttgggtgcttatatctgtaagcactgcaggagttgatccctgaattttattatctccctgagatgtttg

SEQ ID NO: 262658 - DNA, 82 bp, Homo sapiens
caaaggcaaaggcggctcgggagattcagccgtgaagcaagtgcagatagatggccttagaatccatcggtctgctgcaagg

SEQ ID NO: 262659 - DNA, 114 bp, Homo sapiens
cccccttctttcgatcagagatcggcggagaccctcgaagtgcgcaaacttgacactcaccctgaccgtattgaatttgaccgggattgtgactattttgcgattgctggagtt

SEQ ID NO: 262660 - DNA, 99 bp, Homo sapiens
gttgtggaatatgttaaaggtctacagaaagaagatggttcttttgctggagatatttggggttcttgctcaagtaccaactctatggacccaggacag

SEQ ID NO: 262661 - DNA, 74 bp, Homo sapiens
ttggagaaaaagttcagtgggaagcatgtcgtctttatcgctcagacacagctccgaattgattccttctttag

SEQ ID NO: 262662 - DNA, 75 bp, Homo sapiens
atctgtactgccggcacctcaaccagatgaggaagtacaactttgagccctggtacctgacagtgtaaagaagga

SEQ ID NO: 262663 - DNA, 90 bp, Homo sapiens
ctgtgacaagtgtggattgcctattaaaatctatgggagaatgattaacgtcttcaaggacccagttgctgatcccaacaaaaggtccaa

SEQ ID NO: 262664 - DNA, 100 bp, Homo sapiens
cggctgcagcggctcttccctgggcggacgatggacagccagggcaggaaggtggtggtgtgcgacaacggcaccgggactcaccccacacagaccgcgt

SEQ ID NO: 262665 - DNA, 90 bp, Homo sapiens
aaattttttacacaacctgaaaaggttcaaaccttgtactactcagctgatcacaagctgcttgatgggaacctactagatggacaggct

SEQ ID NO: 262666 - DNA, 90 bp, Homo sapiens
gcatcgcccactccagaagtagcatggaaatggagggcatcttcaaccacaaagggaaagcaggcaggatgggagagtcgccgatagaac

SEQ ID NO: 262667 - DNA, 101 bp, Homo sapiens
gccgggactccctggaaacctagaaatgcctaaaatgaccaatgtgtgatttcagtggaataaatggcgtccaaagtcacagatgctatagtctggtatca

SEQ ID NO: 262668 - DNA, 99 bp, Homo sapiens
agcatgaaaatgactatgtatgctgacgaagtggaatctcagttgaaaaatattaggcctgaattattggaacaactttggaaagccagagctgaaaaa

SEQ ID NO: 262669 - DNA, 96 bp, Homo sapiens
cttgcagccatcaaggttatggatgtcacagggattaaatctcttgatgaacagtgtgtggttggcaaaatttccaagcactggactggaattttg

SEQ ID NO: 262670 - DNA, 98 bp, Homo sapiens
ccttgataagctgtttaaaccagccctaccacttatgtcttggatgaagatgaacctcgattccttgaagaagttgattacagtgcagaaagtaatga

SEQ ID NO: 262671 - DNA, 100 bp, Homo sapiens
tcagagcactgggactgcaaggtggtttcctgtaaaaactgcagcatccagcgtggacttaagaagaccctgcgggagattgtgattggcgtcctgcacc

SEQ ID NO: 262672 - DNA, 82 bp, Homo sapiens
cctgaacctggaagttgtgctttttaagacctgcctagagctggaacgttacctccagagcgagccctgctatgtttcagcc

SEQ ID NO: 262673 - DNA, 78 bp, Homo sapiens
accggatccaacccagttagttacttcctgtctagagttgtagcttccacctgataccttacttgtaaaagctctttt

SEQ ID NO: 262674 - DNA, 97 bp, Homo sapiens
ggagcaccggaggcgggggcggcttcgaccccccgcccgcctaccacgaggtggtggacgcggaggtggatagatacttctcaagacatcacacagc

SEQ ID NO: 262675 - DNA, 100 bp, Homo sapiens
gacgcggctgccgtacgtggccctcgatgtgctctgcgtgttgctggttggtaggaggacagtttgatctggaaatgaatttcattatccaagaaggtga

SEQ ID NO: 262676 - DNA, 83 bp, Homo sapiens
aaacagcccgcccgaccccgtcccgaccctggccgccccgagcggagcctggaggagaactacgatgacccgcacaaaacccc

SEQ ID NO: 262677 - DNA, 51 bp, Homo sapiens
cccggtgcctcagctgcccagtgcccacggaatttttggaatttcgtaagg

SEQ ID NO: 262678 - DNA, 76 bp, Homo sapiens
gtggagaagaaggacaagcttgcgggcccttggaagaaaatcctcgctgtgtccaggctgaggcggggggctaatg

SEQ ID NO: 262679 - DNA, 100 bp, Homo sapiens
gcaggatgaactgaaacggattgccagagaattggcagaaggccatttcataattctgaatcatgtctgataacggagaactggaagataagcctccagc

SEQ ID NO: 262680 - DNA, 87 bp, Homo sapiens
gagcgctcaggatggaggaagactcgatccgcctgcctgcgcacctgcgccacagacctccaccagcacgaagtggacatcgttgtg

SEQ ID NO: 262681 - DNA, 80 bp, Homo sapiens
gcatcctgccgtcttcctatccttacccgacctcagatgctcccttctgctcctggactttccttatcccagttgattgt

SEQ ID NO: 262682 - DNA, 75 bp, Homo sapiens
gcacagctttttcaaaggtgttgactggcagcatgtctacttacaaaagatgttagtaggcaggaagaggcggag

SEQ ID NO: 262683 - DNA, 100 bp, Homo sapiens
ttgtccagggatctgaaaccactttgcagtcgacatactcggataccagcgctcagcccacctgtgattatgactgtgccctgtccacggtgcctcctgc

SEQ ID NO: 262684 - DNA, 100 bp, Homo sapiens
gtatataaggtcaccgcccggaacaatcaaccatgacgaccgaatctggatcagactcggaatccaagccggaccaggaggccgagccccaggaggcggc

SEQ ID NO: 262685 - DNA, 103 bp, Homo sapiens
cagtaccaagacccgacacaaggcagcttcccacagcaggttggacagttcacagaggctgacccgcggctgattgagtccctctcccagatgctgtccatgg

SEQ ID NO: 262686 - DNA, 95 bp, Homo sapiens
gtcgcaggtcgcgcctgctttggccccggcgggttcggcatccgagcctggcaggggccaataggaacaaatgtggtatctggggctggcggtct

SEQ ID NO: 262687 - DNA, 75 bp, Homo sapiens
cctcctccttcaggcattgctactctggtctctggcattgctggtgggactcggagatcatgcagcagaagcaga

SEQ ID NO: 262688 - DNA, 75 bp, Homo sapiens
cgggacaagcgcgacgcccggcgcgagctcaagctgctgctgctcggtcatattgaacattccagatacctatca

SEQ ID NO: 262689 - DNA, 90 bp, Homo sapiens
cattagcgggggcctttcctgaggacggcgtacggagtgtgggatcagttccatgacaagaccccttatacgattatgtttggtccagat

SEQ ID NO: 262690 - DNA, 95 bp, Homo sapiens
aagaatgtgcttggtcacatgcagcagggtgaggaggtcctccggcagctgcagaccctggcaccaaagggcgtgaacgtccgcatcgctgtgag

SEQ ID NO: 262691 - DNA, 75 bp, Homo sapiens
cgccgaagcactcgttccgggggtgaagcctcctgcgccggccttgcctcgggccaagtcctgtatctgccatgt

SEQ ID NO: 262692 - DNA, 118 bp, Homo sapiens
gccaggccgtgttccgtgtctctggattcaagtcccaggagtcctgaccagagagcagaatcaggaaacccaggcccaacggcaggtggatgcaagaagaaatgttccccaaaacgac

SEQ ID NO: 262693 - DNA, 100 bp, Homo sapiens
ttcagcctctactaaagttgtcatccgtggagcaggaaaccagaggttggaaagaaccatgactgtattcaggaaggcacatgaactgaagcttctgtca

SEQ ID NO: 262694 - DNA, 98 bp, Homo sapiens
acctcagttcgattttatccacatgatgtggtttttgccaatccagaagactgtgtagcatttggcaaaggagaaaatgccaagaagtatcttcgaac

SEQ ID NO: 262695 - DNA, 100 bp, Homo sapiens
agagagcagtaccctgatggagtcccttgcaggacctctttgtttttagacatgaattggccataatgagactagcagcctttatgggcattactatgtt

SEQ ID NO: 262696 - DNA, 100 bp, Homo sapiens
gcagtttgttcctgatttccattcagaaaaccagcctgtcccactgtgaactcatcacagatgatgggatcctgcacctgagcaacagtacctgtggcca

SEQ ID NO: 262697 - DNA, 90 bp, Homo sapiens
ccattcccggcgcgcacctggcagtcccgggctcgagccccgccctgccgccagccaggctactgcagcactggggtgtcagttgttggt

SEQ ID NO: 262698 - DNA, 132 bp, Homo sapiens
ttcttcatcgtgctattcctggtctacatcctgcgggtgcctttgaaaatcaacgacaacttgagcacagagttgctggagaatgtaaccctaatccataaaccagtgtcgttgcaaccccgtgggctgatc

SEQ ID NO: 262699 - DNA, 98 bp, Homo sapiens
ggtgctgatatcaacacggtcaacgtggacggcttgacagccctgcaccaggcagaaggagaagacagcctgaagaagatgcagctgatggagcttgc

SEQ ID NO: 262700 - DNA, 83 bp, Homo sapiens
cgcagctgcagccgcctgaccacggcgactggacttacgaggagcagtttaagcagcgagcagctgatgcagctgtacagtgc

SEQ ID NO: 262701 - DNA, 78 bp, Homo sapiens
ggcggccgagctgcggcagagcgtgtctgaggtggtgcgcggctccgtgctcctgcttcttaatgaagaggataactc

SEQ ID NO: 262702 - DNA, 82 bp, Homo sapiens
cagcacttggagcgcagaaccggccgcgcccgttttcggctttgtgagaaaccttaccatcaaacacgatggccagcaacgt

SEQ ID NO: 262703 - DNA, 83 bp, Homo sapiens
cagcaactgaggcagcggcaggctcaggtgcagccgctgctcaccatggatgatgatatcgccgcgctcgtcgtcgacaacgg

SEQ ID NO: 262704 - DNA, 90 bp, Homo sapiens
tacagctctcatcaatggccatttgaattcacttcagagcaatccactactgccagaccagaaggtgaaggttggaaaccacactgcaga

SEQ ID NO: 262705 - DNA, 74 bp, Homo sapiens
tggacatggaaccccagggctgcctggtggctgagaggctggctatgtggctacccccatagctatggttcagg

SEQ ID NO: 262706 - DNA, 100 bp, Homo sapiens
ctggaaggtgcgtgtggggctgggtctcggagtgggagacgtggagtgcaggcatttggctttatgtcccgagttgccctacaagcagagaagatgaatc

SEQ ID NO: 262707 - DNA, 75 bp, Homo sapiens
ctcaggtcctcgggggcggcggccacgccaaggacgggattaagcatgaaaatattgttgccctggaagacattt

SEQ ID NO: 262708 - DNA, 50 bp, Homo sapiens
aagaaaaagggccagtgtctcccagggacatggatgaagctggaaaccat

SEQ ID NO: 262709 - DNA, 75 bp, Homo sapiens
gatcgggccggaggacgtgctggggctgcagcggatcaccggtgtaaggttcgtgatcctcgggccaattttgat

SEQ ID NO: 262710 - DNA, 100 bp, Homo sapiens
catcggcatgctctatctgtactgccggcacctcaaccagatgaggaagtacaactttgaggatcatccagcagctcgtcaacggcatcatcacgcccgc

SEQ ID NO: 262711 - DNA, 51 bp, Homo sapiens
tctttgcatccggagagtggacaagaaagttgaaggtttagaacagatgtg

SEQ ID NO: 262712 - DNA, 75 bp, Homo sapiens
ggaagaggaaagcaaaggagtcagggatggctcttcctcaggtcctcagaatggttggaatgaccctccagcttt

SEQ ID NO: 262713 - DNA, 100 bp, Homo sapiens
taccccggcccctctgccgacctcttgcaatccaagtgacatgagccatgggtacgtgacagtaaagatggcttcccagttacgactcttcgatccccag

SEQ ID NO: 262714 - DNA, 109 bp, Homo sapiens
aggaagcgatggcttcagacagcatatttgagtcatttccttcgtacccacagtgcttcatgagaggtgatctgcaactctttcaccatctgtaatgcggagatgcagg

SEQ ID NO: 262715 - DNA, 75 bp, Homo sapiens
agcgcgagcggcgcgagaaagtctctaattaacagaagatggcaaagcccagccacagcagctatgtccttcagc

SEQ ID NO: 262716 - DNA, 99 bp, Homo sapiens
ggttttttgtggcttccttcgttattggagccaggcctacaccccaggtcagggaagtcaaagatgcatccctgagttcttcctagcaggcaagcagcc

SEQ ID NO: 262717 - DNA, 96 bp, Homo sapiens
tcttcagttcctttaaatgagccgaggtcatggtggttcggaggtcctcgatgggcttcctggaatattggtgtgtttatttgcatcagatgtgct

SEQ ID NO: 262718 - DNA, 97 bp, Homo sapiens
catcagcatttacatgacagaaatcacctatgtttacagcgacaggtgaccagcacccatgcagaaactacctagaagttgccaagctatcagtcaa

SEQ ID NO: 262719 - DNA, 100 bp, Homo sapiens
ccgcttccatgcggttcgggtccaagatgatgccgattctggaacttttcaaagcctgactctcttcttgaaacagtggagcatcatacagagtttactt

SEQ ID NO: 262720 - DNA, 100 bp, Homo sapiens
gattggacagcaggtcgacaggctgtatttctgcagtttcggttttcatttgcttcagcttactaagaagcttcaaatctaactccatactgaacaaggg

SEQ ID NO: 262721 - DNA, 100 bp, Homo sapiens
agtggtgggagaaccagccgactggagcaggcagcagcccagggtttggattcaggatttgttcctagtgtccaagattttgataagaaacttacagaag

SEQ ID NO: 262722 - DNA, 101 bp, Homo sapiens
caacagcgcccggctggaggttgagagggacaatctggcacaggacctggccactgtgaggcagaagcgaagtggtgaacacccatggccccgtggagcct

SEQ ID NO: 262723 - DNA, 89 bp, Homo sapiens
acccagttgagaaagctgcccaactaagacctatctccctaccaggagtttctagcactgaaggtaacagtcctttggacagcccccgg

SEQ ID NO: 262724 - DNA, 75 bp, Homo sapiens
gcggagctgacggtggaggttcgcggctctaacggggctttctacaaggaactcaacagaggcaattattatccc

SEQ ID NO: 262725 - DNA, 82 bp, Homo sapiens
gtgattctgaagagggtctggaggagccttctcaagaacagaggtcagcccaaggccaaccccactgtcactctgttcccgc

SEQ ID NO: 262726 - DNA, 74 bp, Homo sapiens
gcctgcgcgaccacaagcctgaatccggattatcgggaagaggacacggggagaagctggactccttcctccct

SEQ ID NO: 262727 - DNA, 100 bp, Homo sapiens
cagccgcaccagcgccgggacgggggtggccgtgcagtttttcagaagaagtgaagtcaagatgaagaaccatttgcttttctggggagtcctggcggtt

SEQ ID NO: 262728 - DNA, 50 bp, Homo sapiens
tcaagttcctgtgtgagcggaatgacaagctgcatcttcctcccgtgagg

SEQ ID NO: 262729 - DNA, 99 bp, Homo sapiens
aattttttggaacagaagatcagccaagaagacgctggagggaggctgttaggagggactctgagcttcacacctgtctgctgccatgggtgcagagcc

SEQ ID NO: 262730 - DNA, 100 bp, Homo sapiens
atgttggatcggatccttctggagtccgtgtgccagcaacagagctgggtccgggtgtacgataacagacgagtacctttggaaaggtcacgctctcgcc

SEQ ID NO: 262731 - DNA, 100 bp, Homo sapiens
atttgaacaactttccgaatctgcaaaagaagaatctgaatctgaagctgaagaaggtgactgaattttgaaactacaccctcagtaaagcaaacaggag

SEQ ID NO: 262732 - DNA, 75 bp, Homo sapiens
aagagctgtggcccgggggcctcttctggaccaggaaactctccacacttgtgtatgcggatacctgcttcagta

SEQ ID NO: 262733 - DNA, 78 bp, Homo sapiens
acggaaacaaagttattttgctcgaaatggcgaaaagtcttttgaagacagcctctctgtctggaaggacaaaattgc

SEQ ID NO: 262734 - DNA, 100 bp, Homo sapiens
gtgtgccaggaccccaccagctgcccagcccccattggcgagtttgagaaggtactgcaacgactggagcagaggcggcagcaggcttcagagcgggagg

SEQ ID NO: 262735 - DNA, 74 bp, Homo sapiens
gggtcggggatcggtcgcctgagaggtgaccctggcaaagatgagagtgcacatttcgtcctgcctgaaggtcc

SEQ ID NO: 262736 - DNA, 90 bp, Homo sapiens
gtgcctccattcccgggaggggggagcggcgttggaggccaccgtttccaggtactccaaagattcaggtttactcacgtcatccagcag

SEQ ID NO: 262737 - DNA, 98 bp, Homo sapiens
cgcgccgcaccatgcccgccgtggacaagctcctgctagaggaggcgttgcaggacagcccccagaggccacaagaggaagctgaatgaagaggacgc

SEQ ID NO: 262738 - DNA, 100 bp, Homo sapiens
gaatcatccacgcacctgcagctctgctgagagagtgcaagccgtgggaagcatcaagtgtacctgatttgtgaacctatcttgcttcagttggtttcct

SEQ ID NO: 262739 - DNA, 82 bp, Homo sapiens
ccactcggctcctgtcgtccgttctctcaggctcccgttcaggaagctcttcgtgggcggtcttgactggagcacgacccaa

SEQ ID NO: 262740 - DNA, 100 bp, Homo sapiens
cgtggattttaaccgaggcacggacaacatcaccgtgaggcagggggacacagccatcctcagatgtatggtctgctggctgtgtgttggctgagctgtt

SEQ ID NO: 262741 - DNA, 101 bp, Homo sapiens
cagcgtccctgagacgccaacggcagtcactgccccccattccagctcctggtttaatggatcgagaagtggcgttgcttgctgaaatggacaaagtgaaa

SEQ ID NO: 262742 - DNA, 76 bp, Homo sapiens
cagaagtagcatggaaatggagggcatcttcaaccacaaagggtgtcgaagtgcagacagactacgtgcccctgct

SEQ ID NO: 262743 - DNA, 96 bp, Homo sapiens
tggctttgacggcttcgccaagggccagcccccgtcctgcggccccgaggacgacgcccagctccagctggcccttagtttgagccgagaagagca

SEQ ID NO: 262744 - DNA, 100 bp, Homo sapiens
ctgctgctgagcagcgccgcgggtgccaatgggtcatgtttggttagaaggtgacaatctacagaattctacagattccaggtgctatggacctattcca

SEQ ID NO: 262745 - DNA, 99 bp, Homo sapiens
tggaagttgattactcagtctctaaaaagctaaggtaaaatctgtaaaaactgggtcagttttttggacaatgtgctgctgcttatcctatttctatat

SEQ ID NO: 262746 - DNA, 82 bp, Homo sapiens
cttccccagctgcccggtgcccgaggaggcagccaagctcatggcctgccactgcgtgcagacaagaggagcagcagcggca

SEQ ID NO: 262747 - DNA, 90 bp, Homo sapiens
ccattagatccaaagccattcccaaattatagagctaattacaactttcggggcatgtacaatcagaggctgacccagctggatgttgac

SEQ ID NO: 262748 - DNA, 51 bp, Homo sapiens
gagaacttcagccctggagaagaggttacgagaagtttctgagaagctgaa

SEQ ID NO: 262749 - DNA, 75 bp, Homo sapiens
cggctcagtgccgatggctgcggctgtgaggatttataagattggccagggctaccttatcaaggacggcaagct

SEQ ID NO: 262750 - DNA, 75 bp, Homo sapiens
gttcgtgaaagtgaaccccaaggcggaggttgatactgcctctccaagcccaatggaaacatctggatgtgcccc

SEQ ID NO: 262751 - DNA, 100 bp, Homo sapiens
gtgatctccagcgccggcctcctcagtgcgaagaagctgcagccgcacctggccaaggaaactggcgatggaatatgagaggagccctctggaaagaaaa

SEQ ID NO: 262752 - DNA, 90 bp, Homo sapiens
cggcgtctggctgctgcggaccccgccgagtcctagcgcctggcctgcgcgccgctgcccgcgccacagagcctgagcccttgtgaagcc

SEQ ID NO: 262753 - DNA, 85 bp, Homo sapiens
gccaggtccggtgttggggtgtccgagttgccgccggagaggagtggcctcgcccgcttggggcaattccaaaagtcttcagatt

SEQ ID NO: 262754 - DNA, 101 bp, Homo sapiens
ccaccgtggggagcgcgatggagaaaaaggaattccccaccccacccggcagggtcggcccagaatcttgtggaagaagaatgaagttgctgattatgaag

SEQ ID NO: 262755 - DNA, 75 bp, Homo sapiens
aaacgtgtgagcgcgcggctgaaagcgactgggacctggacgttggaacttgccaggaatccagcaatgatgcag

SEQ ID NO: 262756 - DNA, 50 bp, Homo sapiens
caggagtcctgaccagagagcaggcactatgtcgtccgaggcccagagat

SEQ ID NO: 262757 - DNA, 100 bp, Homo sapiens
gtggcatgggggatgtctggcgctggcagagctgggcaggagaggcctgttgctgccgtctcgactcgtggatggttacctaaccaaactcctgcaaaac

SEQ ID NO: 262758 - DNA, 100 bp, Homo sapiens
gatgcgaaagccatggagttgagctgcagcgaagcacctctttacacagagtctcgttctgtcacccagcctggtgtgcagtggttcaagccattctcct

SEQ ID NO: 262759 - DNA, 100 bp, Homo sapiens
gacatgcgcgggagggcgccgcggggcagccgccgctcctccgggccttgaaaagatcttttgaggtcgaggaggtcgagacacccaactccaccccacc

SEQ ID NO: 262760 - DNA, 91 bp, Homo sapiens
gagaagtgaggagcccctccgcccggcagctgccccgtctgagaaatgcttctgatgagcagaattcacagtcctcgatggaacattcgat

SEQ ID NO: 262761 - DNA, 100 bp, Homo sapiens
gctctcagtaaaacggtattctattattatggaagtgataaagaaggccaatgatgaggccaatcagagtgatacaagtgtctccttgtcagaacccaag

SEQ ID NO: 262762 - DNA, 100 bp, Homo sapiens
gcgcggccgagtccccgtacggccacccggcggggcactttccctcatggtattgatattttgaccacagctgactattttgccgtcggtaacagatcca

SEQ ID NO: 262763 - DNA, 95 bp, Homo sapiens
tggggatccgggagaagcacccacaaaactagcatcctcctggaggagctcggcccctggcaaccactaatctgctttctatctatggatttgcc

SEQ ID NO: 262764 - DNA, 100 bp, Homo sapiens
gttcctgcacatctaccacgccgtcaaggaccggcacaaggacgttctcaagtggggcgatgagtgctacagttgaaactccagcagcgccggacccggg

SEQ ID NO: 262765 - DNA, 74 bp, Homo sapiens
accgatgctgcaagagatcagtaacttgttcttgattctgctcatgatggagacggggtttcgccatgttggcc

SEQ ID NO: 262766 - DNA, 100 bp, Homo sapiens
tgcaaatagcgggaagaacaaaggaaggggagcccgggacccccgggggcgcagagataattgacgaccttgccaacctagtggagaacacagatgaaaa

SEQ ID NO: 262767 - DNA, 90 bp, Homo sapiens
cttgcactttgttttcaatgacaccaagttggacgctatgctggaagaatttaagaaagtacttcctcctgtgctggttccaagacacag

SEQ ID NO: 262768 - DNA, 83 bp, Homo sapiens
gcggaaggttaatgttcttcagaagaagcttccttgtggtcatagatgcaaagagatgtgtcatcctggtgaatgtcccttta

SEQ ID NO: 262769 - DNA, 82 bp, Homo sapiens
cagagagggcctgggagcttgctgcagcttcagtggacatcctcatcatggatgatgacgacgtccccagctggcctcccac

SEQ ID NO: 262770 - DNA, 83 bp, Homo sapiens
gccttttctctgccttgcttgcttgagcttcagcggaattcgaaatgggggatatgagactttctactcggaatatcctgagt

SEQ ID NO: 262771 - DNA, 75 bp, Homo sapiens
gtgagagctccccaggggagttctctgtgtctgtgaaaaaaatggctacaaacttcctagcacatgagaagatct

SEQ ID NO: 262772 - DNA, 104 bp, Homo sapiens
agctgggaaaggaatgagaagacagaagtcagagacaagaagaggctaacatgactgataccactataatttagtacttggcatccagagatgagccccagaag

SEQ ID NO: 262773 - DNA, 100 bp, Homo sapiens
ggagaacctgcggctggccctggatgccatgagggagaacggcctggacgaccagctcatgaacttggccctgctgagctcccccgaggacatgatcgag

SEQ ID NO: 262774 - DNA, 98 bp, Homo sapiens
caaaatgaactatatgcctggcaccgccagcctcatcgaggacattgacatcaccattactttaagtactgcaaaatctcagcattggctctgctgaa

SEQ ID NO: 262775 - DNA, 75 bp, Homo sapiens
gagcccacaggtgctaaagagagcagtaccctgatggagtcccttgcaggtgtgatgaatgcagactctgctacc

SEQ ID NO: 262776 - DNA, 98 bp, Homo sapiens
ctgctcatgaaccacttggcaaagagctaaatcccctgaagcagcagaaagctttcattctggacctgttcaggactcggaatattgccataatgacc

SEQ ID NO: 262777 - DNA, 75 bp, Homo sapiens
gagaacggaaaactcccaacttcctgaaagctgtatacctgcacaagtggtggctgccattgatgtcaacactgt

SEQ ID NO: 262778 - DNA, 100 bp, Homo sapiens
agacacttgggatgcaaagacactgatggaatgctgtaggcctgatcatggttatactcatgacagcttgttgcagatccttgtgccagcaacccttgtc

SEQ ID NO: 262779 - DNA, 100 bp, Homo sapiens
gcagtggcagcatggagaaacgcaagtccatgtacacgcgagattataagaagcttgggttcattcagatccagtttgctgaccagaagcaagaattcaa

SEQ ID NO: 262780 - DNA, 95 bp, Homo sapiens
gacccagcgtacatactgaatgatctctacatctcagactactgtgtgtggattcagaaagtcaaagagtaaaacttgtctcggcacagagtcaa

SEQ ID NO: 262781 - DNA, 75 bp, Homo sapiens
tacagcttctggaggaacagaatttgtgagaggggccagtgtatcctttctactccaccgaaaattctattctgt

SEQ ID NO: 262782 - DNA, 87 bp, Homo sapiens
aaagggttcagggttgaaaatgagctcagggaccattgacatttatggatgtggccatagaattctctgtggaggagtggcaatgcc

SEQ ID NO: 262783 - DNA, 75 bp, Homo sapiens
caggttgagaattctcacttaattctaacaggagctggagccctcaacaaagacagaactgtaccgctctctttt

SEQ ID NO: 262784 - DNA, 100 bp, Homo sapiens
gaccctgcccagcagaatttgtatagagatgtgatgttggagaactacagaaacctggtctccctagccacttccggctcctgcgtcgctccggaagcct

SEQ ID NO: 262785 - DNA, 83 bp, Homo sapiens
aaacagagcagcagcagcagagatgataacatgtttcagaccaaactgcagctggaatacccagtacagttctgcttactaca

SEQ ID NO: 262786 - DNA, 83 bp, Homo sapiens
agataatcagagtggaggaagtacagccagcagtacgacaccgagcttctggtcaggtgatggctcttaagatgaacacattg

SEQ ID NO: 262787 - DNA, 88 bp, Homo sapiens
cacacagaggatgatgctgactttgatgaagagccagtcttggtgctctgtgttcacctggttcatctgaggagctgcatctaccctg

SEQ ID NO: 262788 - DNA, 76 bp, Homo sapiens
aagctgttcgacgagatccactggatcatcgtgcagtccctgaaggctgtggcgaagcctggctacagataaggga

SEQ ID NO: 262789 - DNA, 50 bp, Homo sapiens
caacagtagcccccgggcccccgtcagggtggctacggaccacaacatgg

SEQ ID NO: 262790 - DNA, 83 bp, Homo sapiens
ctgatatccagggctgccgatgggaaatcccaggctgccgcggctcctgtgtgctttgaaggaaatctggcattttttaaagt

SEQ ID NO: 262791 - DNA, 75 bp, Homo sapiens
ttggcattgacatttaattttagggtcctttatatagaagggagagtaggacttgatagacgacctgaagtcaga

SEQ ID NO: 262792 - DNA, 100 bp, Homo sapiens
cctgcgtcctttttcgtttttcggatgatgccttcaatactacctttatttccaccataggttatcaatactctggctgaccatcatcatcgtgggactg

SEQ ID NO: 262793 - DNA, 83 bp, Homo sapiens
gccggacccaggatgaagaggttggagatgggaccacatcagtaattattcttggcctttccgttccgaacgtccacggcgcc

SEQ ID NO: 262794 - DNA, 100 bp, Homo sapiens
gttggaggcttcgcccggctttgcagcggggacttcggcggcggcgcctcaggcacctcggcccggacctgcctagagctggaacgttacctccagagcg

SEQ ID NO: 262795 - DNA, 97 bp, Homo sapiens
cagagacaacgagatgaacttccagttacaacacagggatcacaacaaacacaaccgccacagaagcactatggcattacttctcctatcagcttag

SEQ ID NO: 262796 - DNA, 98 bp, Homo sapiens
ccgcaagcacgcgggacccatcgtctccgtgtggcaccgcgagctccgcaaagtggactaaagaggatggacatagaacttccacctctgctgtccct

SEQ ID NO: 262797 - DNA, 74 bp, Homo sapiens
acggcaggactgtggccgtgggggacatcgtctgggctattactataacaagcgcattctgcacaagaccaagg

SEQ ID NO: 262798 - DNA, 96 bp, Homo sapiens
gctgcagttccgggagcaggaggtacggaaccagggccaggcgaggaccaactccacctccgcaccatgactcctgtgaggatgcagcactccctg

SEQ ID NO: 262799 - DNA, 100 bp, Homo sapiens
gcccctgagccagagctccagcagccttgttagggcgtggcctgaggcttggataagtggggaagaattttaaatcgtttctccaaagacattggacact

SEQ ID NO: 262800 - DNA, 100 bp, Homo sapiens
gaaagagagcgccaggtgcttagcaggttgtggcagcactgcctgaaggtatgagaccagattctaatctttatggttttccatgggaattggtgatatg

SEQ ID NO: 262801 - DNA, 74 bp, Homo sapiens
ttttcccacatttcaaatattccatggacacctatggacgtggctttatttctccaagaatttaatgctcctga

SEQ ID NO: 262802 - DNA, 74 bp, Homo sapiens
cgggagctccagagcctgctggtggaggagcagattatgagcttacagaaagcctggcctacattttactcttt

SEQ ID NO: 262803 - DNA, 75 bp, Homo sapiens
ggaaatcctaatgacagtctccaaattcgcctccatctgtaccatgagactgggtgtgttgctgtattgcccagg

SEQ ID NO: 262804 - DNA, 83 bp, Homo sapiens
gggagtggagcttggtttcgggatctcggtgctgcagacggcgagacctcctgcacagctccgggattgtggagggctgcggg

SEQ ID NO: 262805 - DNA, 97 bp, Homo sapiens
cctgactctctgaggctcattttgcagttgttgaaattgtccccgcagttttcaatcatggtacggttcctggagcagcagaacaagatgctggaga

SEQ ID NO: 262806 - DNA, 98 bp, Homo sapiens
aaagaagtggagcgtgtcctgaaggagttccaccaggccgggaagcccatcggggggatatgagactttctactcggaatatcctgagtgttgcgtgg

SEQ ID NO: 262807 - DNA, 100 bp, Homo sapiens
gatgacacaaaatcccagatctacctgacgggcctgcgagggttgaagattgtgaagcaatagcctaagagagatcttggtagaggagagcaacgtgcag

SEQ ID NO: 262808 - DNA, 83 bp, Homo sapiens
cgagaaggcacggagtcgccgcggagcgcagacaacagtgattgactacgtgaagccctcggatctcaagaaggacatgaacg

SEQ ID NO: 262809 - DNA, 98 bp, Homo sapiens
atgacttttggacagtccaagctatatcgaagatttcgggcagacaacttgaacaagctgaagaacctatgcagcaagacaatcggagagaaaatgaa

SEQ ID NO: 262810 - DNA, 83 bp, Homo sapiens
gtatcggggcctttatttctcgtcggcggcgccctgcaccgcgcctcgcaaagcgtccgagctgggccacagcctgaacgaga

SEQ ID NO: 262811 - DNA, 73 bp, Homo sapiens
aaaagaaatatacccaagctggatgctcagaggttggatggcaagcatgtggtgtttggcaaagtgaaagaag

SEQ ID NO: 262812 - DNA, 100 bp, Homo sapiens
caagggtaacaaaattcgttttgcaaatcattcggtaaatccaaactgctatgcaaaaggacattgtgtggctaagccagatttagtctctttactagag

SEQ ID NO: 262813 - DNA, 101 bp, Homo sapiens
gaaagattggagaagcagcagacagccaataaggtggaaattgagaaaattcggtattctttgaaactggagaaaggagattatacaattcgactacagat

SEQ ID NO: 262814 - DNA, 73 bp, Homo sapiens
caaagatgagggggattcttaaggtttgatctgtggatgaaatgaatcatgattttcaagctcttgcattaga

SEQ ID NO: 262815 - DNA, 100 bp, Homo sapiens
gattgctatcacttctgcagaatccagtgggagtttgtgcagttaatggtctgttatatgttgttggaggggatgatggttcctgtaacttggcgtcagt

SEQ ID NO: 262816 - DNA, 75 bp, Homo sapiens
ctcacagattccagcttcggaacaagagaccctggcagcctggcatcctcgctacaacctcattgttgtgggccg

SEQ ID NO: 262817 - DNA, 101 bp, Homo sapiens
cacaactccagtgctaactcaacagatcttcaacttgctgctgagcttgggaagacattactggatcggaacacagagttggaggactctgttcagcagat

SEQ ID NO: 262818 - DNA, 98 bp, Homo sapiens
gcgagggtgcgatggcgcggagcccgggacgcgcgtacgccctgctgcttctcctgttctgggaggtgatcagtgatgaacatggcatcgaccccacc

SEQ ID NO: 262819 - DNA, 100 bp, Homo sapiens
ccgtaccttacccaactctactgctgcttccagaccaaggaaataatgcaaaaggtgtcccaaggctcctgaccagtgaacaaagatttgagaaagacag

SEQ ID NO: 262820 - DNA, 100 bp, Homo sapiens
gtcataccttctatctttgattctccatatcacctacaggttcagcttgttggtttagatgaggagagttcagagtttatttgcagaaacacctttgacc

SEQ ID NO: 262821 - DNA, 98 bp, Homo sapiens
ggcgaagacgagatccagttcctgcgaactcactgatagccattgggcgatacagcatgacaatagagactgtggatgtcggatggtgtaaagaaatc

SEQ ID NO: 262822 - DNA, 97 bp, Homo sapiens
ctccactccgtcccccgcgggtctgctctgtgtgccatggacgggctgcaagatcaaggccctgcgggccaagacaaacacctacatcaagacccca

SEQ ID NO: 262823 - DNA, 98 bp, Homo sapiens
gtttgaacaaactcgaagaacagctgtggaaagaagttgcaaaacactggatatatttttgccatcatggatcagtttggagatatattagaaggtga

SEQ ID NO: 262824 - DNA, 99 bp, Homo sapiens
ttctgattttgaaacacctgggtctgggcttcccgggcgagcggtggatgccttcaattaagttgcagagttctgatggagagatatttgaagttgatg

SEQ ID NO: 262825 - DNA, 89 bp, Homo sapiens
ccggcctggggtagctgcgcagcaggatctcgaggacctggaagaagcagaggagccagacatggaggaagacgatgatcagaaagctg

SEQ ID NO: 262826 - DNA, 98 bp, Homo sapiens
gtagatacaaatttttggatgatgatggatccatttctcctattgaggagtcaacgacacatgacggaagtgtgtatttttgggccactccacggcag

SEQ ID NO: 262827 - DNA, 74 bp, Homo sapiens
atcgtgtggcaggaaacagaagatggatcttacctagccatatggcctgctgcctctgccaacttaaaaacagc

SEQ ID NO: 262828 - DNA, 100 bp, Homo sapiens
gctgcagcggaggcggaagcaggactcggggcacttggctggactgtgctgctgccatctcggctcactgcaacctccctgcctgattctcctgactcag

SEQ ID NO: 262829 - DNA, 82 bp, Homo sapiens
cgcgcgaagcgagcgagaaggcacggagtcgccgcggagcgcagagatcccgctgtgcgctggctgtgaccagcacatcctg

SEQ ID NO: 262830 - DNA, 90 bp, Homo sapiens
ttgactctctgggttctaaccccttcttaacaaggaatcagattccccgtactccagaaaacttgaccttgttagatgacttggataaag

SEQ ID NO: 262831 - DNA, 82 bp, Homo sapiens
aacgaccggctcctgctcaagatctcagagaaggaggaggtgaccacgcgcgagcaaattgtggctactaatttgccccctg

SEQ ID NO: 262832 - DNA, 100 bp, Homo sapiens
tatgacagtggaaccggggtttggagggcagaaattcatggaagatatgatgccaaagctgtcggaaaaggtaacagaagatggaactcgaaatcccaat

SEQ ID NO: 262833 - DNA, 88 bp, Homo sapiens
ccagaacaaagtgggaaagggaagcttagcccgccgctgccgcctccgagcagcccgccaggattcagtccccgtgggggtggctttg

SEQ ID NO: 262834 - DNA, 92 bp, Homo sapiens
ggagaaaaactggatgttggtagaaaaagcaagagtttgttatatagcagaagcagtcaattatagatttcttcaaaccagcttcaaaacaa

SEQ ID NO: 262835 - DNA, 98 bp, Homo sapiens
aagaagaatgaccaaatttacgccatgaaagtggtgaagaaagagctggtgcatgatgacgaggtctcctctgagcctccggcctccataagacccaa

SEQ ID NO: 262836 - DNA, 100 bp, Homo sapiens
caggcccacagctgcctacagaaccgtcccaaaatatggcaaagaaacctattctgaggaccctgctgcaggaagactatgggttcttccgcgccatcag

SEQ ID NO: 262837 - DNA, 50 bp, Homo sapiens
gaaaaagagaacagtatgttgagagagttaataacgacatgatagtcact

SEQ ID NO: 262838 - DNA, 100 bp, Homo sapiens
aaaggatcctgattcctcttcaaagggatccaggtccggcacgatcaagacccaggctacatgcatcacaagtttgccatcgtggacaagagggtgctca

SEQ ID NO: 262839 - DNA, 50 bp, Homo sapiens
ctttcacaggctggatgaagattggggaatctgaacctgtgatgttaaga

SEQ ID NO: 262840 - DNA, 90 bp, Homo sapiens
gccatggagttgagctgcagcgaagcacctctttacatactttacttgtgaaagaaccagtggctgtccttaaggccaacagagtttggg

SEQ ID NO: 262841 - DNA, 88 bp, Homo sapiens
tgttgatcttggcttgattcagtctgccttgtaacagacgccctgcatgccaatggaggcctgtgtcgccgagagtcgcagggctctg

SEQ ID NO: 262842 - DNA, 83 bp, Homo sapiens
cgcaaacttgacactcaccctgaccggaaggtgggagtcaatcattttgacaagtctcctgaaaggaacagctagcaggaact

SEQ ID NO: 262843 - DNA, 100 bp, Homo sapiens
ttatctcgaaagcctatcagcatagttaaggttttgctgttactgctcagtgtagtcacaccttgaataagaaatggaaaaccttgggatgttgataaag

SEQ ID NO: 262844 - DNA, 82 bp, Homo sapiens
cttggttccgcgttccctgcacaagaacgccagatcaagtgtcccaagtgtgataagctgttcttgagaacaaatcacttaa

SEQ ID NO: 262845 - DNA, 103 bp, Homo sapiens
tggcagcagccagaggaggaatatggcgctcttaggcagccgagcggagctggaagcggacgagctgcagaaccttggcctgaaaatgctacattatatcagc

SEQ ID NO: 262846 - DNA, 74 bp, Homo sapiens
tttattcaagatgacggaagcagatttaagggtgtccgcaatgttgccagtgtctgtctgcagattggctaccc

SEQ ID NO: 262847 - DNA, 82 bp, Homo sapiens
cgacgttccatctgtggaaggacctaccaaccaggagcatcagatccatgctgctgctgactcggagccccacagcttggca

SEQ ID NO: 262848 - DNA, 75 bp, Homo sapiens
gggaaatgtaagcagtgtggtaagattacataccggttacggcacctccttcgtgcaaggtgtgatgcatcccca

SEQ ID NO: 262849 - DNA, 89 bp, Homo sapiens
cgggaccccagcgcgggcggcggcggctgggcgggagccccagaggaaagccatcaccaagtcgggcctccagcacctggccccccctc

SEQ ID NO: 262850 - DNA, 101 bp, Homo sapiens
ttttggaagttagagaaaagggctatgaacgattaaaagaagaactcgcaaaagctcagaggcattttccaagccaccacagtgattcagctgcttcctct

SEQ ID NO: 262851 - DNA, 88 bp, Homo sapiens
gcgacctggggccctgggtgaagtgctccgccgcccttgcctccagactccagcgggaggaagaagaggcctttgccagcagtcagag

SEQ ID NO: 262852 - DNA, 74 bp, Homo sapiens
tcagaccagagaagagcacagaatgtaccagagaggtcgttgaggacttccacatggagattggcacaggacca

SEQ ID NO: 262853 - DNA, 101 bp, Homo sapiens
taatcagatgtctccagtggactactgttatagagagaacatttcatgtagatactccagaggaaagggtttaatgaagaaattcattcgatgttctacac

SEQ ID NO: 262854 - DNA, 90 bp, Homo sapiens
gatatcttcagcgaaagtgaaaccaggatatgaaactatccatgaagaacaatattatcaatacacagcagtcttttgtaaccatgccca

SEQ ID NO: 262855 - DNA, 80 bp, Homo sapiens
gctcggccgcgcggactgaaggagactgaaggcgctgagatgcgtctggagagccagagggcctgcctgaaggaatcacc

SEQ ID NO: 262856 - DNA, 98 bp, Homo sapiens
attttctgtggcatcctgaagttaatggttctatgaaacagtgtatcaaagtgtggactgagagtaatcaagtcagaggattatatgacttttatctg

SEQ ID NO: 262857 - DNA, 98 bp, Homo sapiens
aggacccgcagactgaggaccgcaggctgcagccctccacgcctgagaagaagggtctgttcacggttccctttgagagtgaggacaaccagggcatc

SEQ ID NO: 262858 - DNA, 75 bp, Homo sapiens
ttatgaaagaagtcattccttttttgaagattttcctggaaacatgaactgccaagagaggaatgggacacaaaa

SEQ ID NO: 262859 - DNA, 99 bp, Homo sapiens
cccgggaggcccgtgacatcttctacaagcccttccacggcgatatccagtgcggcggccacgcgccggtaaattactacgaaagggaaattgcggcac

SEQ ID NO: 262860 - DNA, 100 bp, Homo sapiens
cccgtggttccagcgccggttttgaccgccacattaccattttttcacccgagggtcggctctaccaagtagatggctctgagagattcctctgcgaatc

SEQ ID NO: 262861 - DNA, 74 bp, Homo sapiens
cgggcgcggccggagaccgtggggcccccggttgccgccccctcgggggagctgttccggtggaatgtttcgga

SEQ ID NO: 262862 - DNA, 82 bp, Homo sapiens
agcgaagctgctgcggttcctgagccggagcaattctgtggtgttcttggtcacacatttatggagtttctgaagggcagtg

SEQ ID NO: 262863 - DNA, 50 bp, Homo sapiens
aagaattgaaccttcaccatataagcagccctagcaaaccaagagtgagc

SEQ ID NO: 262864 - DNA, 50 bp, Homo sapiens
ttagtaagaagaattccagtcttataaagagtccaatgtgctgattgctg

SEQ ID NO: 262865 - DNA, 100 bp, Homo sapiens
tccacaagggcttcctggccctctaccaaaccgtggacaaagatcattccactcagcctgggacgatggggaggaaaaaaatccagatctcccgcatcct

SEQ ID NO: 262866 - DNA, 76 bp, Homo sapiens
gatgacacctttattttaaaagctgatgttccaaggaattgaatgatctggcacgggaccctccagcacagtgttc

SEQ ID NO: 262867 - DNA, 98 bp, Homo sapiens
tctgcccccccttccccacgcaaccccagatccatttacactttacatgcctacaccaactaatgttacaattgaatcctataacatgaaccctatcg

SEQ ID NO: 262868 - DNA, 101 bp, Homo sapiens
caccgcctggtctctttcctgtggccagcccaggcatgaacgctgctgtccgggctgtgacgcgcatgggcatttatgtgggtgccaaagtcttcctcatc

SEQ ID NO: 262869 - DNA, 100 bp, Homo sapiens
atactatccgtttgttcaggaaccaccagtgacagaagacaatggacctcagatagcctatgttcgggacttcaaagcaaaggttcagtatttccggttc

SEQ ID NO: 262870 - DNA, 100 bp, Homo sapiens
ttgctctgggaatcttgaaaatctgtgacattgcaagggaaaaagtaaataaagctgctgtttttgaagagatcataacagtcaatgcctgctctcagag

SEQ ID NO: 262871 - DNA, 111 bp, Homo sapiens
cggcccggcggctgctgctgctgctgacgctgctgctgcccggcctcgggtttggtgccctggttgtcagatgttggaaagcagtaggacggaacatactcttcgtggttg

SEQ ID NO: 262872 - DNA, 75 bp, Homo sapiens
ctggggtcccggctgccctgtggcctcgctcctcggagggctggagcattggatttgctaaaggagcttaagaat

SEQ ID NO: 262873 - DNA, 86 bp, Homo sapiens
agaccctggagcctcagttggaagcagccgatccagcctgcggagcctgtggggcagccgccaagctgagccaccaaagaaggagg

SEQ ID NO: 262874 - DNA, 111 bp, Homo sapiens
ttggatcaaacatgtcacaagagtcggacaaggcgaactttctgaccaagtatacaactacccagagggcctaggagaagtgctgtatagagagcagttcgacttcaacgc

SEQ ID NO: 262875 - DNA, 100 bp, Homo sapiens
cacaggagaagccttcaggctgcaccacgtggaggccaacaggagtgcccttatgcctgcacagttgttttttaagacggaagatggaggcaaatatcca

SEQ ID NO: 262876 - DNA, 90 bp, Homo sapiens
ggagaggcctggaggacaccaacatggctctgacgcccgctctgcggcttcggtgtttgaacaggccacagtccaggagcgcttacattc

SEQ ID NO: 262877 - DNA, 100 bp, Homo sapiens
tggcactgctcctgctggccgcctggacggctcgggcgctggaggactgatcctttgaaatactccagccatgactaaaagagaagcagaggagctgata

SEQ ID NO: 262878 - DNA, 74 bp, Homo sapiens
cagcagatatcctgtctcagatgaagaggaaaatcttaaacggctaagagacagcatcacccgaagacagagag

SEQ ID NO: 262879 - DNA, 100 bp, Homo sapiens
cagactggtgacttcacttttgagtgcaactgccttccaggtgtggatgaggtcaccattgtcaacattttgaccaaccgcagcaatgcacagagacagg

SEQ ID NO: 262880 - DNA, 75 bp, Homo sapiens
acatggcgatggctgcgtgtcctgccccacatgtataatttcaccagtttcactgtgagcctcaacgagctggag

SEQ ID NO: 262881 - DNA, 74 bp, Homo sapiens
ggcagacaataggaggcaaaatgttggataaatatatctatggagcacaggtggagtctttcattttggatcag

SEQ ID NO: 262882 - DNA, 50 bp, Homo sapiens
caggagccgggaaagagcagacggcaccgtttctccttggaccaagatga

SEQ ID NO: 262883 - DNA, 100 bp, Homo sapiens
gatgatccttacggaaaaggaacagattgttcctaaaccagaagaggaggttgcccagaagaaaaaggtctcctctgagcctccggcctccataagaccc

SEQ ID NO: 262884 - DNA, 100 bp, Homo sapiens
cagtgaaggagtgcagaggcatcacctgaaagttcacacaaaagatgttggacaatttctacaattttgcttcatcatttgctgtctctcaggcccagat

SEQ ID NO: 262885 - DNA, 80 bp, Homo sapiens
ccccactaccccagacctcatcatcaactccatccaacacttcgtttactccgaactacctgaagaagcaggtcacaccc

SEQ ID NO: 262886 - DNA, 83 bp, Homo sapiens
aaaccagctgagacagggcgccacttactaggtgtcgtgaaaactacccctaaaagccaaaatgggaaaggaaaagactcata

SEQ ID NO: 262887 - DNA, 90 bp, Homo sapiens
ttctaaaacaccaccaaaaagttacagcacagccagacgttctagaagtgcaagcagggtgagttctgcagtcagggtgtccgtgagggc

SEQ ID NO: 262888 - DNA, 100 bp, Homo sapiens
cgagatcagccagccgaccgagaacccttaggagaaatcttgagagtggacagcaattgtgaagatcgccagagagttctgtgtttcatcaccgccgaaa

SEQ ID NO: 262889 - DNA, 90 bp, Homo sapiens
cttaacccttcctccgccggaacccaggctcggaagggccattctacaggttcatgacaaagaggtccttgcctctcagctgctggtgct

SEQ ID NO: 262890 - DNA, 100 bp, Homo sapiens
agccaaaggatgtgccatacaaagaactcttaaagcagctgacttcccagcagcatgcgattcttattgaccttgttacgatatcagaagtgcttggtag

SEQ ID NO: 262891 - DNA, 83 bp, Homo sapiens
ggccgtgatgctgcccactggtggtcccccgctcccggggtccccggccggccaagcaggctggcggtaaggctggaaaggac

SEQ ID NO: 262892 - DNA, 100 bp, Homo sapiens
aaagccatctggcacgccttcaccgcactcgaccaggaccacagcggcaaggtctccaagtcccagctcaagtgattcgcctttgccagtctcatctcgt

SEQ ID NO: 262893 - DNA, 90 bp, Homo sapiens
atggaggcacctgtcggcagactggtgacttcacttttgagtgcaactgccttccaggcctcagcaactgttgccattcccaaagaacac

SEQ ID NO: 262894 - DNA, 112 bp, Homo sapiens
atttactggagcgaggaaaagagccctggatgattttgagggaagaaacacagttcacaggtgagcaagaggatgctggcggggggcgtgaggagcatgcccagccccctcc

SEQ ID NO: 262895 - DNA, 90 bp, Homo sapiens
tgatcaagtcccggatgcagatggatggactgagacgcagagtgtaccaggggatgctggactgcatgagactttagaagacagctttcc

SEQ ID NO: 262896 - DNA, 75 bp, Homo sapiens
caaggacacggtctacaccgacttcgacggtgctgccttcacctgcctggagactgccttccgcctggacgccct

SEQ ID NO: 262897 - DNA, 86 bp, Homo sapiens
ttcgccgaggcaccgaggcactcagaggaggttctgcggggagtgtctccagccctgcctgcaggtgccatccccgctgtgcccac

SEQ ID NO: 262898 - DNA, 100 bp, Homo sapiens
gtgttgttgaggctgaggactgactggggttctgagactccctgtcccggaccgcagttgaagaggtcagaaacccaggatgatccacctgtcaggggtc

SEQ ID NO: 262899 - DNA, 100 bp, Homo sapiens
acagatttttagcaaaaggctatttgcattccatattggaagaagagatttctacacatgaaaaaaatgcctttgtttagtaaatcacacaaaaatccag

SEQ ID NO: 262900 - DNA, 100 bp, Homo sapiens
gtccgggggagggaaggggacagaagatggccaagaagagaaagccccccagcatcaagggtcagtgggaccatgtacaacactggaagacacgtatccc

SEQ ID NO: 262901 - DNA, 100 bp, Homo sapiens
caacccggtcgaccccatctcccatgacctgcttgtgaacctggcccgggacctgcagtgccccaagaagacgagatgatgcctattggccagaaggaaa

SEQ ID NO: 262902 - DNA, 75 bp, Homo sapiens
ctgaggaagcccaactcctatgagctcctctctggcagagtgttctgccagttctggataatccactgtccaaga

SEQ ID NO: 262903 - DNA, 100 bp, Homo sapiens
ggaaaagcaacattcattgtaacaccattgctcctaatgcgggatcacggatgactcagacagttatgcctgaagaaaaaatgtgagcgctattggcctt

SEQ ID NO: 262904 - DNA, 100 bp, Homo sapiens
cgtggcatgtcgatttgtccttcactacaggaattgaggggagtgatgatgatgctttagtaactggagaacaggatgaagagctcagccgatgggaaca

SEQ ID NO: 262905 - DNA, 76 bp, Homo sapiens
gcggtgcaggtcctcaagaagacaggcaaggaggtggtgctggaggaaatgcttcggttacccacagtctttcgcc

SEQ ID NO: 262906 - DNA, 100 bp, Homo sapiens
aacgggacgagttcgtcatccgtgctgaggacatcccttccctcaagcggacaaagcacaagtggcgaatcatcagtcccaccctgctagcagaatatgc

SEQ ID NO: 262907 - DNA, 100 bp, Homo sapiens
tagcagctccggcggcagcaacattgactacgaggaatggcggcggctgccgcaggacctgcagcatcccagagtctgttctctggggaggcagtaaggg

SEQ ID NO: 262908 - DNA, 102 bp, Homo sapiens
gacatcagtgaagggggttgtgcaaaatagacagaagccttcacagagcagagtgcctaacagagtgcctgtttcagagtctcgttctgttgcccaggctgg

SEQ ID NO: 262909 - DNA, 90 bp, Homo sapiens
aaggcagatcgcttgttccacaccagctaccactcccaggcagtgcatatccgccctgtttgcagaaacggagccccccacctgatgggc

SEQ ID NO: 262910 - DNA, 82 bp, Homo sapiens
tcaagattctgaatctggtgatgaacttagcagcagctccactgaacagataagggccaaatttgagtttcatcatggtgac

SEQ ID NO: 262911 - DNA, 83 bp, Homo sapiens
gactagataaatgtgtatactgtcctcctcctgatcaggtggagaaggaaagggagctagagcttcgagacagactggatgag

SEQ ID NO: 262912 - DNA, 100 bp, Homo sapiens
atcaacaaccagacagggcagcacgccgtcattgacatcaatgccttcccagacctgcgaccgcatcaagcagtccgccagcggaaccaagcggcgcgtg

SEQ ID NO: 262913 - DNA, 75 bp, Homo sapiens
ctatgagaactcaacacctccctacaaggaccttcctcccaagccaggttggacgtgataagtatgagcctgcag

SEQ ID NO: 262914 - DNA, 98 bp, Homo sapiens
tgaagggaagccatggtgaatgcacagcaacttctgcgcacgctctccgcccggggcaggagccccggcttcaggtaggggcctaggagggccccaga

SEQ ID NO: 262915 - DNA, 102 bp, Homo sapiens
gcgtgtctaggtgagtcgcggtgggtcctcgcttgcagttcagcgaccacggttcgagaacttgtcttggacaattgcaaatcaaatgatggaaaaattgag

SEQ ID NO: 262916 - DNA, 76 bp, Homo sapiens
gtttccctcccgtgagttctggcacagaaaagacccgacgacacagctttccaaatagtggaacttcggatttttt

SEQ ID NO: 262917 - DNA, 75 bp, Homo sapiens
gtcaagagatatgaggatgggaccatcagttccaacggtggatccataaagaacccagccaacccgcagagggag

SEQ ID NO: 262918 - DNA, 90 bp, Homo sapiens
gaggagaagaagaagcagctggtcagacagagctcgtccgcatggtgctgaatggctgaggaccttcccagtctccccagagtccgtgcc

SEQ ID NO: 262919 - DNA, 82 bp, Homo sapiens
acgcagagcacactgcaggccgagtgtgaccagtaccgcagcatcctggcggagacggtgtccctggccagtgtccttccac

SEQ ID NO: 262920 - DNA, 100 bp, Homo sapiens
caaatggccaaactaatacagatctgccagcaggttgagtgatcctgcagcatatcctgacatggagtctgatatacgttcatgggaattgtttctttct

SEQ ID NO: 262921 - DNA, 95 bp, Homo sapiens
tcagagtgaagaggaagccagaagatgggagagacatttttgaaactattgcccagaagaaaagatgtttggttttcacaagccaaagatgtacc

SEQ ID NO: 262922 - DNA, 100 bp, Homo sapiens
gacgtgtttagaaatatacatatatacacactattttcttgtgggagatctcctttgggcaaaggacattctgagcatgtgagacctgaggactgcaaac

SEQ ID NO: 262923 - DNA, 73 bp, Homo sapiens
gacttgattgatatatatgctgacgaggagttcaaccagatgacctgagaattaatttatggcacttagaaat

SEQ ID NO: 262924 - DNA, 112 bp, Homo sapiens
cggtgccccatagatggccagctttcccccgagggtcaacgagaaagagatcggagaactgtgtttatgaaactgtagttttgcctttggatgaaagggcatttgagaagac

SEQ ID NO: 262925 - DNA, 87 bp, Homo sapiens
aggtgctaaagagagcagtaccctgatggagtcccttgcaggtgctacagctcgagagggcagagccacagtccctggacggcgtgg

SEQ ID NO: 262926 - DNA, 100 bp, Homo sapiens
cagacgcgcgcgccagcgacagcagcccgccccggcctctcgggagccgtggggcagaggctgcagagccccaggaggagtgcgatgacatggatcctgc

SEQ ID NO: 262927 - DNA, 74 bp, Homo sapiens
ggtcacaaagaactcaagaaaatcttcgaagacttttcacatgctacaagtgaaaactgatgagaaactgaatg

SEQ ID NO: 262928 - DNA, 83 bp, Homo sapiens
tgctattgaaagagagtatgcacagaaactcccatcaagactgaagcagacgttttggcagaaaaccaggttcttgatagcag

SEQ ID NO: 262929 - DNA, 100 bp, Homo sapiens
cgggatcgtgaccgagaccgtgaccgagagcgtgaccgagagcgcgaatatcgtcatcgttagaaggtctcctactccctccctccagtactgcgagaac

SEQ ID NO: 262930 - DNA, 51 bp, Homo sapiens
tgaagaatgtatttgcagaacctcagttggttagtctgctgctaattggaa

SEQ ID NO: 262931 - DNA, 100 bp, Homo sapiens
agctgctcggttcacccacaaggaatgagagctgcctgcctgctgctgcttggagagccccagacagtcgcttgaagagagagcagctctaaattgggaa

SEQ ID NO: 262932 - DNA, 100 bp, Homo sapiens
cagcatttccgctcctgaggtccatatgtcgactgcgggaagcaagcggtcttcttcttcacgcaaggttgaaaggaggagcaggaggtactgatggaca

SEQ ID NO: 262933 - DNA, 90 bp, Homo sapiens
acctgcatctctgcaaactcaacttgctgggccggtgcaactattcgcagtccgagcgacaactgggactggacctggtgcctaggaaag

SEQ ID NO: 262934 - DNA, 82 bp, Homo sapiens
ggacccagtttggtggaggagctctggacctgtaggaacaccgcccctcagcagtgttgtactgctacttctataaacggac

SEQ ID NO: 262935 - DNA, 83 bp, Homo sapiens
cttttaactttcattgtcttttccgcccgcttcgatcgcctcgcgccggctgctctttccggagcacaaagttatcattgttg

SEQ ID NO: 262936 - DNA, 100 bp, Homo sapiens
gctgatggtgatggagattttgatgtggatgatgccaaagttttattagactaaacttcagtggctctgtgaggaactgaaagagagagaaaacagagag

SEQ ID NO: 262937 - DNA, 74 bp, Homo sapiens
ttctccttcaagtacttggcagatcactctcttagcagggtaacttcctgatgttgccatggcatttgtaaact

SEQ ID NO: 262938 - DNA, 95 bp, Homo sapiens
gaagctgcagaaccaacgaggtggccgaatcttccttcaggatatcaagagtacccagtactatgacatgcgctggtcatgtgagcacctcatta

SEQ ID NO: 262939 - DNA, 90 bp, Homo sapiens
caggattctggaaccgtggagacaccgagaaaccatgagtgtaaggttaccccagagtatagacaggatatttggccttgacattaaagg

SEQ ID NO: 262940 - DNA, 50 bp, Homo sapiens
ctcacaggagctctctgcctccaacagagagcccgagcccagcacattgt

SEQ ID NO: 262941 - DNA, 100 bp, Homo sapiens
aaggtggtctgcatcatggtcttccttctcttcattgccttcaactttggacctgtcagccctactgccaataaagggaaaataagagatgctcatcgac

SEQ ID NO: 262942 - DNA, 100 bp, Homo sapiens
caccactggacctccaaggaagccacgtgcagacatctacaaccttcgatctcctgacgagtacctggcaaagaattctgcaactttgttcagtgccagc

SEQ ID NO: 262943 - DNA, 82 bp, Homo sapiens
aaccgtcagtttgagccagatgtgtctttggtgcaacactaacaaggcttgtctggactacccagttacaagcgtcttgcca

SEQ ID NO: 262944 - DNA, 98 bp, Homo sapiens
agaatatggaaaacatatattggagctacatggatgaaatttcaagagcaggaatgtcctccttcaccagaaccaacacggaaagaaaaagacaagaa

SEQ ID NO: 262945 - DNA, 129 bp, Homo sapiens
gcctcgttacctgcaggtattgggagatccacagctaagacgccaggacccactggaagcctagaaatggactcacaccacccggcaagaactgctcactacggctccctgccccagaagtcacacggc

SEQ ID NO: 262946 - DNA, 90 bp, Homo sapiens
agaaacttttgcccttatcagtaacacctgagaaccggccctccgtgatcacctgtgcctcggctggcgcccgcaactgcaacctctcgc

SEQ ID NO: 262947 - DNA, 50 bp, Homo sapiens
ccgggagccgggccggcctagccagtgagacggtttaagcggaagcatct

SEQ ID NO: 262948 - DNA, 100 bp, Homo sapiens
tcatgcacagttgaagcagtgaggtggtgccagtccatgcaggatccttctgtcaatgtcctgtggcggtacactggaacccgaccatcgaatcttgcga

SEQ ID NO: 262949 - DNA, 100 bp, Homo sapiens
ggatccttgggtgaaagaaaatcctgcttgacaaaaaccgtcacttaggcccgtgttcccaagaaaatcctcaagtgcaaggcagtgtctcgagaactta

SEQ ID NO: 262950 - DNA, 82 bp, Homo sapiens
ttcgaccacttccagatccttcgggccattgggaagggcagctttggcaagacaatgcagatcttcgtgaagactctgactg

SEQ ID NO: 262951 - DNA, 75 bp, Homo sapiens
cgggctggagacatggaccgcggcgagcaagtgtgaaagcagctgtagacaacaaggaagtgaatgaatgttgcc

SEQ ID NO: 262952 - DNA, 73 bp, Homo sapiens
gatgaagttcgagcactaatatttaagaaagaagatgttaactttcaggcttgttatgctgcctccgcgattg

SEQ ID NO: 262953 - DNA, 83 bp, Homo sapiens
ctccgcctcgccgcagtcggggcagccgctcgcccctcttttccatgtatccgtccagatgcgagccacccctctggctgctc

SEQ ID NO: 262954 - DNA, 75 bp, Homo sapiens
aaaagaagcgggagaatctgggcgtcgctctagagggcgtctctggccgagcctctttttgtggaaaacgacagc

SEQ ID NO: 262955 - DNA, 96 bp, Homo sapiens
atctgtaccagcactcttgaggctccttgccaagtgaaatatgactcttctgggggagtctggttggaagcaaatgtttttttaatggacttgcat

SEQ ID NO: 262956 - DNA, 100 bp, Homo sapiens
gctgtgccctatggattcctgagtgtgtgctgtatttgtgggccttgaaaattctctaccccaaaacactgtttttacttcgtggaaatcatgaatgtag

SEQ ID NO: 262957 - DNA, 50 bp, Homo sapiens
ctgaacttcatgcttgacaatctcgcagaaaccagggtggttatgaccgc

SEQ ID NO: 262958 - DNA, 50 bp, Homo sapiens
tcaggttgtccgagcatctgggaattgtggaagatatcaataagcgcaga

SEQ ID NO: 262959 - DNA, 102 bp, Homo sapiens
ccgcactgtccagcccaagcctgactatgggcttcgtgctgtgtcactccatcgctgggggtacgggttctggcctgggctcctacctcctggagcgactga

SEQ ID NO: 262960 - DNA, 74 bp, Homo sapiens
tgcgccaccacgtcacgcacacgctcggcgctgcgatccgcgcatataacgggtggttctcttcccaaagtgga

SEQ ID NO: 262961 - DNA, 100 bp, Homo sapiens
ctgtgacagggtccaacagggcctggtccgtgtccggtcccccaaatctgtcgtccctgcccccagggcgtcgacattccagatggctatcctgcttcag

SEQ ID NO: 262962 - DNA, 100 bp, Homo sapiens
gagaattaaacacagtgccaatctgccctgtagataaagaggtcatcaaatctcaggagacatggcagggaggtttaatagacatggataagaagtccac

SEQ ID NO: 262963 - DNA, 87 bp, Homo sapiens
gttgaaaagcggtaactctgctgctgtgagttgaaactgtgggacagccagacagaagagatagcataggagtgtgtgcagaaaaac

SEQ ID NO: 262964 - DNA, 75 bp, Homo sapiens
ccaagtgcaagatctgtttccctgatcgcgaagtaaattacagaatgtctgaaggggacagtgtgggagaatccg

SEQ ID NO: 262965 - DNA, 51 bp, Homo sapiens
ggcgggggctggcccggggttccagagggttctcgtggcaaccttttacta

SEQ ID NO: 262966 - DNA, 100 bp, Homo sapiens
ccgacgttacaatggtggagttggcaggtgtgcgcaggcacagcagtgaccaccacctcagcggctgtagtgtcccagagtcctcagctgtataatcaaa

SEQ ID NO: 262967 - DNA, 74 bp, Homo sapiens
gagcgcgggtacagcttttcgctgactacattcaggtgctggagaatctggtaaaagcaccattgtgaagcaga

SEQ ID NO: 262968 - DNA, 74 bp, Homo sapiens
acatctaaaccaaccactgccacaacctgcgcagcagacagaacattaaccaggtggtatttgttggaaatttc

SEQ ID NO: 262969 - DNA, 100 bp, Homo sapiens
aactgatacataataagacacaatctattctgctgattcacaattatggagactgtccatccaacatattctttacaatggatgatgtggtcaaggttgg

SEQ ID NO: 262970 - DNA, 101 bp, Homo sapiens
gaaacagagaaagataggcggccatggtccaaccttgaagggtgacttttaaatatgacggctccaccatcgtccccggcgagcagggagcggagtaccag

SEQ ID NO: 262971 - DNA, 100 bp, Homo sapiens
gaagggaggagactcctgaccctcagaatgctgttccatttcctccaagtcaccggcttacagcaaaagaagtgtttgataatgatggaaaacctcgtgt

SEQ ID NO: 262972 - DNA, 98 bp, Homo sapiens
ggtgggcgagatcatcaagcgcttcgagcagaagggattccgcctcgtggccatgaagttcctccgggagcaaatggaatgatgactttgaaaaccac

SEQ ID NO: 262973 - DNA, 75 bp, Homo sapiens
acgagcgcgaggtggtgcggatgctcctgcagtctgcgctcctcagaccaccggcaggtgaacagcctgatgcag

SEQ ID NO: 262974 - DNA, 100 bp, Homo sapiens
tccccatggcgtctcatccgcaaacccggatccaggcttacctggagaagaacaagatcggtcccctgtttgagtgcctttgctaacagtagccagacgt

SEQ ID NO: 262975 - DNA, 136 bp, Homo sapiens
agactagccactttgcattgactggaaacaatggcatttacagaaagagtcaacagcagtggcaacaggtgtgatgaatgcagactctgctaccattttggctgtttggatcctcctttgaaaaagtctcctaaac

SEQ ID NO: 262976 - DNA, 82 bp, Homo sapiens
gcaaaaactccaaactcctctccaccagcgccaagagctgaataccactagaaacatacctgtaaccagagacagctgatta

SEQ ID NO: 262977 - DNA, 89 bp, Homo sapiens
agggggcgctgagctgttgggagtatcctggctttaaatcctcgaacacaaactcatgcaactctgcgttccacttcggccaagaaatt

SEQ ID NO: 262978 - DNA, 101 bp, Homo sapiens
cgccgtcgcttcggcggagcctgggctgaccagccaggacagcggggtaaacccgaacaattctgcgcgaggctggagtgcagtggcacgatcttggctca

SEQ ID NO: 262979 - DNA, 100 bp, Homo sapiens
ctagaagacacactcaatcaagtgatttcagaggctttgaaaaaatttggtatctcagcaaatgacacttcaattctaattgtttacattgaagagggag

SEQ ID NO: 262980 - DNA, 82 bp, Homo sapiens
cgaacgaccaagagggtgttcgactgctagagccgagcgaagcgcatctgcatctgggaccgacctcctgggctggctgatc

SEQ ID NO: 262981 - DNA, 75 bp, Homo sapiens
atgtcactcaggagcacgagcgaagtacagcttatggatggggtgaagttgaacaaattgctatgatgaaaccaa

SEQ ID NO: 262982 - DNA, 82 bp, Homo sapiens
tcgccgcccgtccccggcacacgcgcagccccggcctctcggcctctgccggagaaacagctatttcaagaagcccctgaat

SEQ ID NO: 262983 - DNA, 101 bp, Homo sapiens
tggacaacctggagtcccgcgtggccctcgaatgcaaggaaggtacaggtttgcagattccgccagcagcacagcaagctctacagatgagtggctctttg

SEQ ID NO: 262984 - DNA, 75 bp, Homo sapiens
agaagccgatccccatttttattgaaagatgtattgagtacattgaagccacagcgatctagggcagccctgcag

SEQ ID NO: 262985 - DNA, 75 bp, Homo sapiens
agtccggacatctgaaacttggctgcctttaatattggttgggaacaaatctgatctggtggaatatagtagtat

SEQ ID NO: 262986 - DNA, 98 bp, Homo sapiens
gacatggtcatgagcttcgtcaacctcgccgccccgggggaaggtgcggaggacgcagacagcgggcccgagagccgcagcgggggcgaggagaccag

SEQ ID NO: 262987 - DNA, 75 bp, Homo sapiens
aaacccccaagatgggcatctattacattccagcaggatggggaagcagaatagcaaactggcccctgaagtgat

SEQ ID NO: 262988 - DNA, 100 bp, Homo sapiens
aaaactgaaaacacatcccatctgtttgctcattatcaaattatagtgatttgaagaaagagtctgctgtgaacctaaatgctcctagaaccccaggaag

SEQ ID NO: 262989 - DNA, 90 bp, Homo sapiens
cgttctatttctctagctattgccttattttttctcatggatgttcttcttcgagtatttgtagaagggcagaggtggaggagacactga

SEQ ID NO: 262990 - DNA, 144 bp, Homo sapiens
tagagtgcgtgcatggcgaagtccccggagaactctaccctggaggagattctggggcagtatcaacggagtctccgggtgaacagagtatctgtcaggcaagagctgctgtgatggtttatgatgatgccaataagaagtggg

SEQ ID NO: 262991 - DNA, 99 bp, Homo sapiens
cgctctttgccgtgacaacaccgttcccccagccgggctgctcctacagaagaagggaaaaaagagctgctgttcctaagtaacgcgaacccctcgctg

SEQ ID NO: 262992 - DNA, 74 bp, Homo sapiens
gacccggtgtctgctcctgtcgccttcgcctcctaatccctagccactatgggcactccagtgtttgtccatgc

SEQ ID NO: 262993 - DNA, 82 bp, Homo sapiens
atcaggatgaatgatgacccaagtatggaagttatggaaacaaaggacatgctttacatcgtcactgaatttgctaaaaatg

SEQ ID NO: 262994 - DNA, 75 bp, Homo sapiens
gagggagaacacagttggagaaaatcggcagctgagacggccttggccgatctaaagcttaaggactatggagtg

SEQ ID NO: 262995 - DNA, 75 bp, Homo sapiens
gcgggaccccaggatgggggacaggaggctgcggggcctcaggtgtgatattcctgccatgtataataatctgga

SEQ ID NO: 262996 - DNA, 100 bp, Homo sapiens
agttcctagcagatttaatagacgagtatcagagcatcctggccagaacaagccaaggagccaagacgagagggacacacggacaaacaacagacagaag

SEQ ID NO: 262997 - DNA, 100 bp, Homo sapiens
caaaggcaggggaggaagccacctcgagacaagttggatggcttgaggactggtactaaaaggaaacgtgactgggaggccattgccagcagaatggagg

SEQ ID NO: 262998 - DNA, 82 bp, Homo sapiens
aatgcatacttggaatgaatccttctagagacgtccacgggaactactggagaccacgtgccgcctggccaacacgctgaag

SEQ ID NO: 262999 - DNA, 123 bp, Homo sapiens
ggctctgtaggaaggaacttggttccccctccctcagcttccgccccaaaagtttggacccaattaaatcctttgaagctcctgcaaccatcaattctgcatctcttcatcctgagaaagaat

SEQ ID NO: 263000 - DNA, 74 bp, Homo sapiens
ctgaagcagggctacacatttttcatcccttccgggacagagcagaatgggctgatatagatccggtgccgcag

SEQ ID NO: 263001 - DNA, 100 bp, Homo sapiens
gtgtggttgcacttggagaaacattagaggaggcttttcattatatttttaatgtgcaactagcctgtgagattcagggtttaatgaagaaattcattcg

SEQ ID NO: 263002 - DNA, 100 bp, Homo sapiens
ggcgaatatgaggccgcgctgaccatctacgatacccacctctggattaatcgaattacagctgctagccaggaacatggactgaagtatccagcgctca

SEQ ID NO: 263003 - DNA, 83 bp, Homo sapiens
cgaggaggcagccaagctcgtagcctgccactccgtgcatggtcagtaggacagaaggtaacattgatgactcgctcattggt

SEQ ID NO: 263004 - DNA, 100 bp, Homo sapiens
tgttagtgctcaagagcctcattatctaccacccgagatgccccaaggactatttaagaaacaactgaggcatcagaccaactttccccacaagtcctcg

SEQ ID NO: 263005 - DNA, 75 bp, Homo sapiens
agagctgaggactgcctgtttgcagtgctactatatttcatgaactggtatataaacaaaccaaaattatttctt

SEQ ID NO: 263006 - DNA, 98 bp, Homo sapiens
aagaaggagatacattaaatgcaatagcccttcagtactgttgtacgaatcaggaaacccaggcccaacggcaggtggatgcaagaagaaatgttccc

SEQ ID NO: 263007 - DNA, 82 bp, Homo sapiens
ttggttccctctcagattcagtaactattttcagggtttgaaagtattcttgaagggctgtttggacctgcattattaaaag

SEQ ID NO: 263008 - DNA, 100 bp, Homo sapiens
catggaatgctgccgtcgggcaactcctggcacactgctcctctttctggctttcctgctcctgggcaaactctttgattctacaatagctgatgaggga

SEQ ID NO: 263009 - DNA, 100 bp, Homo sapiens
ctctgagtgatgttcagaagtttgcagagataaatgtccccaaagctccagagatagatccagtagagtgtttggtggcagataactctgtaacagtggc

SEQ ID NO: 263010 - DNA, 90 bp, Homo sapiens
ccagtctcgactggattacaattggttcgatacaagaggctgttttcctagcgtggcttgctgcctttggtaagaacatgtcgtccatct

SEQ ID NO: 263011 - DNA, 100 bp, Homo sapiens
gtcctctagcaattcatcaaaattaccacaatcaagctatagaagtggtctggagtcaccagcctgcattcttgagctgggtggaaggcaggcattttag

SEQ ID NO: 263012 - DNA, 97 bp, Homo sapiens
aaaggcattagtcctatcttgtaagagaaatccaagtgggaaggaaagcagaactccctagaatctgagctgatggaactacatgaaactatggcat

SEQ ID NO: 263013 - DNA, 100 bp, Homo sapiens
gccgcggtggcggcgctgccgcctgaagtgcgggcgcagctggcggagctggagctggagctctcggagggctgctctttggcgtaaattgcaatcgatt

SEQ ID NO: 263014 - DNA, 98 bp, Homo sapiens
tgttttgcctgaatacatgatttaaacaagagatttccacagaagatgccatggacaatattaccaggcagaaccaattctacgatacccaagtcatc

SEQ ID NO: 263015 - DNA, 82 bp, Homo sapiens
ggcgcggaggcggctagaaggtgaccgcggatcccagcttcctgcagccaggtgctggagaatctggtaaaagcaccattgt

SEQ ID NO: 263016 - DNA, 73 bp, Homo sapiens
ccaaccattgtgtgctgtgaggtaaagagtggattcaactgcacataagaagaacataatgttgaagtcattt

SEQ ID NO: 263017 - DNA, 75 bp, Homo sapiens
ggagaccccgaaaacggaagcgcagggagaaggaagaggtgtttgaaaagaggtaaacctcctttgcggtggaca

SEQ ID NO: 263018 - DNA, 90 bp, Homo sapiens
ttcattgttggactattgtggttggcttctgttacgctaggaatatggcaaacaaccaccaccacctaaaatccccaaaattgagaccac

SEQ ID NO: 263019 - DNA, 75 bp, Homo sapiens
tatgtattctccgctctgtctcacccaggtactccaaagattcaggtttactcacgtcatccagcagagaatgga

SEQ ID NO: 263020 - DNA, 100 bp, Homo sapiens
gtcgccgctatgaagaaagtggttcaacagctccggctggaggccggactcaaccgcgtaaaagtctgctaaaaggtcagagtaatgcagaatgcgtgcc

SEQ ID NO: 263021 - DNA, 100 bp, Homo sapiens
agaagatctatgggtcagacagaattgacccctaccatggaggagaccatcaaagatccccccacatcagctgtcttgctggatcactgtcatttctctc

SEQ ID NO: 263022 - DNA, 87 bp, Homo sapiens
accagtaccggctgacctcgctgtacgccgagcacccaggcgactgcctcatcttcaaggtttgcctgcaatgagatttcattctct

SEQ ID NO: 263023 - DNA, 83 bp, Homo sapiens
ctatgatcccacatctggaatctggaatgaaatcttccaagtccaaggatgtgtgaaattcgatgctactgtgatgctgccca

SEQ ID NO: 263024 - DNA, 97 bp, Homo sapiens
gtaaagtggttggttgcagttgtgtagtagttaaggattcagaacaaggctctggacagagcaaggagcacagaccaggacccatcggcaacgagcg

SEQ ID NO: 263025 - DNA, 83 bp, Homo sapiens
ccagagccccgcgtttcagccctagggaagattttcagctgaactctcatctctcaacactggcaaatattcataagatctac

SEQ ID NO: 263026 - DNA, 90 bp, Homo sapiens
ttcaattcatggtttcttataaccctactccacgtctggcagaggtggaggagacactgaagcgactgcagagccagaagggagtgcagg

SEQ ID NO: 263027 - DNA, 98 bp, Homo sapiens
ttcgtctcggaaaccccgcctcttacagtcacgagatctcacattcttgaaggtggcattgaagagcactaagatcggaagatgagtgagcttgacca

SEQ ID NO: 263028 - DNA, 96 bp, Homo sapiens
ttgatgaggacactggactaccagcccatgcaagagacgagttgtactgctgtcacaggaaatggacgctggattacaagcatggcagctcaggca

SEQ ID NO: 263029 - DNA, 100 bp, Homo sapiens
tcactgcttacctatatcccaaacagtgctgtctggtggcccttctatcacttctatgcagcaccactgggagtctgagtgcgattcagaagatgacgcg

SEQ ID NO: 263030 - DNA, 75 bp, Homo sapiens
cccatacaaacaacctggaggtgagggaagccagttgagggaagttctccatgaatgtacgtcacaatgatgatg

SEQ ID NO: 263031 - DNA, 88 bp, Homo sapiens
gaagaggaagaactcacgggtgacattcagtgaggatgatgagatcatcaacccagttgacattttgctaaaggctgtgggagacact

SEQ ID NO: 263032 - DNA, 100 bp, Homo sapiens
ctcgaagcctggatgaaatagatctctcggctctgaggcaaccatgtccaagggacctgcagttggtattgatcttggcaccacctactcttgtgtgggt

SEQ ID NO: 263033 - DNA, 90 bp, Homo sapiens
atcagcgatgcctactgctccgcggtgtttgcaggccctggatggggatttctctgaagacaaccgcaataagtgtcgcatcgccaccgc

SEQ ID NO: 263034 - DNA, 50 bp, Homo sapiens
aagctcagcctggacagcaacaggtagacatagctgacattgagaatgaa

SEQ ID NO: 263035 - DNA, 100 bp, Homo sapiens
ctggccgggggcgcgggcggcggcgccggcaggaagcggctggctgtcggcaattggattcttccagtacagcccgggcgctgccgtggtcatgctgctt

SEQ ID NO: 263036 - DNA, 73 bp, Homo sapiens
cgccgattcctcctccttggtcgccgcgtccttggctggcgtgtgatcaatgttgatgggacgaagaggcgga

SEQ ID NO: 263037 - DNA, 100 bp, Homo sapiens
caaagcttccatcactgggacagaaagggttcaaagtcaagtgttttctgaagcaaactgtgccaatttgatcagcactcttattacaaacttgataagc

SEQ ID NO: 263038 - DNA, 75 bp, Homo sapiens
tgctgctgctgcatgtctaccaggagaggagggaactgcggagcggctcctcacagccagtgaccttgcagccag

SEQ ID NO: 263039 - DNA, 75 bp, Homo sapiens
ctgtacagcacagattatgacagcgtctttcttaaggccgtttgagcaaggaagacattgaacgtatggtccagg

SEQ ID NO: 263040 - DNA, 100 bp, Homo sapiens
ctcggactgcaattacaacagcttcaatccgtcgtcatagatggagaagagaaggtgctttacaaggccaagtacggtccaatgtggatgtcctacttag

SEQ ID NO: 263041 - DNA, 82 bp, Homo sapiens
cacacaaaacctcttacatcatgggcgacttcaggaacagccatagatgtatcctccactcctcgctggccaccatcctgct

SEQ ID NO: 263042 - DNA, 75 bp, Homo sapiens
cttggggatcctctgtacgcccgttcactgcctatcatctgcgtcgtgaggaaacagattggtttgataaaccca

SEQ ID NO: 263043 - DNA, 100 bp, Homo sapiens
ggaaactgccgccgctctgccacggtctgcccacccaacgcgaagacggtaacccgtgtgactttgactggcttcggaaagcagtgatggatcacatatc

SEQ ID NO: 263044 - DNA, 75 bp, Homo sapiens
gcatactccggaagaaacctgccacagatgggaactctccggagtcctttctgtattgttgtgattttgcttctg

SEQ ID NO: 263045 - DNA, 100 bp, Homo sapiens
caagaaatcaaaataaaggaaacacatttcatatactgcagatttccacaagacggcaccctatgtcgtcactggcagcgtagatcaaacagtaaaagtg

SEQ ID NO: 263046 - DNA, 50 bp, Homo sapiens
agaagctgcttccaggatactacatgttgccagtagtcatcagagtacca

SEQ ID NO: 263047 - DNA, 88 bp, Homo sapiens
ccctccctcagcttccgccccaaaagccagcttaccaaaacctgaggcagaaagtggataattttgtgtcaacacatctggacaagca

SEQ ID NO: 263048 - DNA, 49 bp, Homo sapiens
gcaaagtgtccccggcaagaaggagctggctaaatatgaatacatggaa

SEQ ID NO: 263049 - DNA, 101 bp, Homo sapiens
cgccgccaccgccgcctccgccgctgcctcaggagcggaacaacgtcggcgagcggggccataaagaatgctgatgggagaaccattttcctaattttcaa

SEQ ID NO: 263050 - DNA, 100 bp, Homo sapiens
tctgcggcgggtgtccctaaactagcagtttagggtgtcagacagcacccaagaaaacctcatttggctcgctgaaggatgaagaccggattttcaccaa

SEQ ID NO: 263051 - DNA, 51 bp, Homo sapiens
cttcagcatggtgatattgataaacgtgaaactttgaaaagcaccccaaag

SEQ ID NO: 263052 - DNA, 74 bp, Homo sapiens
aaacttgaatgtgctaagagaaatctgaacacagcttaaatcaaaagtctatgaaagcagagatccccggaaac

SEQ ID NO: 263053 - DNA, 100 bp, Homo sapiens
ccttgctcaacagaagatttgctctatgatcgtgataaagatgctgcacttaaaaggatgcttgttttgatgtcctgctcattgttttccctatgaagta

SEQ ID NO: 263054 - DNA, 87 bp, Homo sapiens
acaaaggggaagaccagagcattgaagatcagtacaaaaattcttcaagaaatctaaggctgaccaactgactgaagagcagattgc

SEQ ID NO: 263055 - DNA, 75 bp, Homo sapiens
gttcggccaagggaccaaggtggaaatcaaacgcatgatgggcccacctcctggtatgagacctcctatgggtcc

SEQ ID NO: 263056 - DNA, 75 bp, Homo sapiens
ccgtgaccgagagcgtgaccgagagcgcgaatatcgtcatcgttagaaggtgcacagatgtattcataaaggaag

SEQ ID NO: 263057 - DNA, 50 bp, Homo sapiens
ttcagctttaaagagaattgaaggtgcatgctccgagtccttgattcatt

SEQ ID NO: 263058 - DNA, 100 bp, Homo sapiens
tgcccacagactccgatggctgcggccgcgctgagggccccgactcaggtttgatgaacttgtgaaaaaattcaaagtcgaatatcatgctggtggctct

SEQ ID NO: 263059 - DNA, 125 bp, Homo sapiens
gatgggaaagagccacctccagtagtaaattatgaagaagatgcacgatcagttacatctatgtcgggaacatgccctgtgtgccgccgtcatttcccacctgcggttattgaagcatctgcagc

SEQ ID NO: 263060 - DNA, 100 bp, Homo sapiens
gcggaaaatactacagagtgtgcacactggctatcattgatccagatggacttcagcagaaatctttatgatattggggaacaactggacagtgaagatc

SEQ ID NO: 263061 - DNA, 108 bp, Homo sapiens
ggagggccccggactccgacggcggctcggacgccgactcggaggtgggtccggggagcccgactcggaccgcggagaaagtgaagtcactgcttttgctgtcttgga

SEQ ID NO: 263062 - DNA, 51 bp, Homo sapiens
gaaatggagggcatcttcaaccacaaaggtgttgacttcaaaatcaaaact

SEQ ID NO: 263063 - DNA, 75 bp, Homo sapiens
ctctctggagtctcgagcccgggaagtgcgttttggaagatgagaatgtgcctactgctcctgatcctccaagtc

SEQ ID NO: 263064 - DNA, 75 bp, Homo sapiens
gatgaccaatgactcagaagggaaaatgggatttaaacacccaaagcttcctgtgcttcccagaattccatcatc

SEQ ID NO: 263065 - DNA, 76 bp, Homo sapiens
gcacgaggagcgattcctcaagaacaatgaataatacggcagctagtccaatgtctactgcaacttcaagtagtgg

SEQ ID NO: 263066 - DNA, 74 bp, Homo sapiens
aagtttgttcaaaacaagtggctgattgagagtgaagacatttccacctggacacctgaccatgtgcctgccct

SEQ ID NO: 263067 - DNA, 100 bp, Homo sapiens
tgcagagcgtggacgacatcaacaaggtgcacgtcggcgacgaggacttcgtacacctgcgagtgttccaatctctccctcatgaaaacaagcccttgac

SEQ ID NO: 263068 - DNA, 103 bp, Homo sapiens
cagcctctgtggccctgtgacctgcagggaccattgcaatttagagatgtggccatagaattctctctggaggagtggcattgcctggacactgcacagcgga

SEQ ID NO: 263069 - DNA, 100 bp, Homo sapiens
caaacccgtcacacagaccaaggccacttcttgcaaaccacatacacagcacaaagaatgtcagacaggaaagaaaggcagccagattaagtaaagaagc

SEQ ID NO: 263070 - DNA, 100 bp, Homo sapiens
ctggtggaagacttgcagaaagaacctggaagacagaggctggaggtgcagtagacattgttgcaatcatgatcggcaatctgaaaggcacaaaaattct

SEQ ID NO: 263071 - DNA, 98 bp, Homo sapiens
ccggctgccggctgacgtctccttgcgatggagcatatccggacgaccaagtcccgaaccgacagccacaagtggcgcccgaacagggacgtgagtga

SEQ ID NO: 263072 - DNA, 75 bp, Homo sapiens
ggcgggcccggcggcgggccgaggagccgggcgcaatggagcggaagagagcaacgacatgccctttgatgagct

SEQ ID NO: 263073 - DNA, 100 bp, Homo sapiens
atgggccaggaagaggagctgctgaggatcgccaaaaagctggagaagatggtggccaggaagaacacgaatgtggccccgtcccagagcaccacccgag

SEQ ID NO: 263074 - DNA, 100 bp, Homo sapiens
gaaattcgccccgattaaagactgtgttgcattatcaggtacatcaggaacgtctctatcaagaatacaatttcagcaaggctgagggccatctgaaaca

SEQ ID NO: 263075 - DNA, 82 bp, Homo sapiens
aacctcccagattccagtcatcctcctgcctcagccacccaagaagctgggaccacagtaagactttgaccccgacgcaggc

SEQ ID NO: 263076 - DNA, 100 bp, Homo sapiens
tcgcttcacggcgccgagccgcggtccgaggctaccctgagaggaatctacatgcagagaagttcaggagactgaactaacggaacgtcaggaagcgctg

SEQ ID NO: 263077 - DNA, 74 bp, Homo sapiens
cttcaacaaccacgggaagccgcggctctccaagttctaccagccctacaataccttatccaattaaagatgtg

SEQ ID NO: 263078 - DNA, 50 bp, Homo sapiens
tgtggctgtcggcagagctggtagagtgagacggtttaagcggaagcatc

SEQ ID NO: 263079 - DNA, 100 bp, Homo sapiens
cattggctttaagaagaaggacaagggaggcattaatctcacagccacttttacagaagcacttgcagaactcatcagaagccaccccgcttatcagcag

SEQ ID NO: 263080 - DNA, 100 bp, Homo sapiens
cgggccgtcaccctgcctcccctgcgtcccgccaccggccgcttctgtcctcggtactccaaagattcaggtttactcacgtcatccagcagagaatgga

SEQ ID NO: 263081 - DNA, 100 bp, Homo sapiens
cacgactcctcgggcagcctcaacgagaactcggagggcaccggaggtgatcgagaaaaacttgagtggctggtggtacattcagattgaagataaggaa

SEQ ID NO: 263082 - DNA, 96 bp, Homo sapiens
ccggaacctggttgtccgagatcgctgtgaggactacactgaaacattcaaatgtgtggcgaaaacataattttcattccttggatggaacttcaa

SEQ ID NO: 263083 - DNA, 83 bp, Homo sapiens
ggctgtgcttcggcgctccggctcctcagagagcctcggctaggactggagactgatgcatgagggggctacggaggcgcagg

SEQ ID NO: 263084 - DNA, 100 bp, Homo sapiens
ctgctctgcgtcaacgccatcgcagtgctgcacgaggagcgattcctcaagaacagctctccagcagaactatctcctactactctttcccctgttaatc

SEQ ID NO: 263085 - DNA, 90 bp, Homo sapiens
caaaggtcaagctggttttcatcaggaggaacatatgcagcagaaaaaagaggaggaagaagttcttaaagaagtaactgcacatttcca

SEQ ID NO: 263086 - DNA, 98 bp, Homo sapiens
tatcggatattatggtgaaaggcttgaggataacaccattttcatattatactgggattatggagaaatacactttcgggaaatggcctctaaatcct

SEQ ID NO: 263087 - DNA, 75 bp, Homo sapiens
gggatggttccatcatggcgtcaatgcagagtccttagccaggatggaggctgttgtgaacttgtaccaagaggt

SEQ ID NO: 263088 - DNA, 75 bp, Homo sapiens
tgcatgaagatggacgaggtcctgtacagcatcgccgagaaggtgtgaccatgaagctcatggatgaggtcgccg

SEQ ID NO: 263089 - DNA, 100 bp, Homo sapiens
cggcgaagacgaaagtcggcacgacgcgctcgacacgcgggtgcggggcgacctcggtggcccgcagcttttaacctggagacttgccggcttatggttt

SEQ ID NO: 263090 - DNA, 87 bp, Homo sapiens
acaggcgccgcgggctccgcgcccggccggacccgggcccgaggggacggcaaaacagaacagaaaggcggagataaaaagaggggt

SEQ ID NO: 263091 - DNA, 74 bp, Homo sapiens
atagcttgaacagggctgacaacatttttccttttccgagtgaaccagaggaaatgcctccagaagcaaagatg

SEQ ID NO: 263092 - DNA, 83 bp, Homo sapiens
ggagattgataattcagaacttcttcatatgctcgagtctccagagtcactccgttctaagggaatgggtactgttcaaaaag

SEQ ID NO: 263093 - DNA, 100 bp, Homo sapiens
ccccagaggagatggtgcctagactgagtttcaaaggatgaattacattcacccacaaggtttttgattggtcaaggagcacatgtaggggctgtcaaca

SEQ ID NO: 263094 - DNA, 100 bp, Homo sapiens
ggacatcgggcgctgcggccggggacccgctgctgagatagacagcgcgttccttcacctcgggcagaataactttgcagaagcccacaggttcttcaca

SEQ ID NO: 263095 - DNA, 75 bp, Homo sapiens
tctggacatctgggtgaagttttaataaggtgttcctgcatgaagccaccgtgcgcctgatggcaggagccagcc

SEQ ID NO: 263096 - DNA, 51 bp, Homo sapiens
cattgatgaaatttatggcattcagaacaatacaaactggactctcaggac

SEQ ID NO: 263097 - DNA, 82 bp, Homo sapiens
gtggattcagcgcgatgcccaaatccaagcgcgacaagaaagttaccggtattgtaagaacaagccgtacccaaagtctcgc

SEQ ID NO: 263098 - DNA, 87 bp, Homo sapiens
cagaagatgaagagaattttgaagaagctattaaaaatgtgaacacagcactaaatacaactcagcatattgccaattatatctctg

SEQ ID NO: 263099 - DNA, 50 bp, Homo sapiens
tgaatatcaagaggaggagttgttgaatgatgccaatgggtggaatgatg

SEQ ID NO: 263100 - DNA, 87 bp, Homo sapiens
gatccacgcgcagttcctcaaagaagctgtttttggaaggaagaaagatggaaagcggtgcagttctgctggaatccaaatcctccc

SEQ ID NO: 263101 - DNA, 90 bp, Homo sapiens
agtgtccagagctaatagcatcggttccaccagtgcctcttctgtccccaacacaggaagccagcagacctgcagaacttggctcccggg

SEQ ID NO: 263102 - DNA, 90 bp, Homo sapiens
gcaaaatgacagatcttctagaagaaggtgctggagaatctggtaaaagcaccattgtgaagcagatgaggatcctgcatgttaatgggt

SEQ ID NO: 263103 - DNA, 82 bp, Homo sapiens
agttaatcttggcgacattgacaatgatggctttgaagatggagtgaaggtacctgagcgcaggaaccatggtcttcattgc

SEQ ID NO: 263104 - DNA, 75 bp, Homo sapiens
agtggacgaggaggagcgggtccgggtgctgcagggtgtccgggtgaaagaactcttttcttctttgggagtcga

SEQ ID NO: 263105 - DNA, 84 bp, Homo sapiens
agctcgccccgaacgggggtcttcctcctccgccgttgacagccccctcggaaaaccacactgagagttgcattaaaaaccagc

SEQ ID NO: 263106 - DNA, 100 bp, Homo sapiens
accaaaagcaagttcatgggcatgtccgtgggggtctctatgataggggaagatttttgcagctcaagtggcagtcctcctttccagcccatcaaaagcc

SEQ ID NO: 263107 - DNA, 97 bp, Homo sapiens
ggaagaaccacggctgccagcgcgtcaagtatggccagtgctgggtcttcgccgccgtggcctgcacaggcgatcagtgggtgaccgcggctgcgag

SEQ ID NO: 263108 - DNA, 80 bp, Homo sapiens
gaagagcgacaagccgctggcagccgcggatctcaccgccgctcagggtggaaagcggtgacacgccaaaggaccctgcg

SEQ ID NO: 263109 - DNA, 90 bp, Homo sapiens
ggaactttgttcctaagcccgtcgagacatgatgagatcgaatatgatgttccttgtcaccttcaaggtgtatgcaacagcgttattgca

SEQ ID NO: 263110 - DNA, 100 bp, Homo sapiens
gggcccagtttatggcttccagtggaggcattttggggcagaatacagagatatggaatcagatttgaacatggaattcaatccttcagatcatcctcgg

SEQ ID NO: 263111 - DNA, 74 bp, Homo sapiens
gaggaggaagaagaaggtgatgatgaggaaatatctgatgaggaagggtctggagatgaagattcagagggact

SEQ ID NO: 263112 - DNA, 98 bp, Homo sapiens
caattgttgataccaatggaatcacggtttttggaacaaggattttggatgaagaagtttttgaggaagatgaagtcctcagtacattctgaagaaga

SEQ ID NO: 263113 - DNA, 83 bp, Homo sapiens
tgtccagaggccctgtgtccgtgacgcagttggatcagtcggctttaaattactcagcttaccctgaaagaagcagatcccag

SEQ ID NO: 263114 - DNA, 96 bp, Homo sapiens
acccctcaaccgtatttggggctgctcctggaggagctacgcaggtgtaaggcaaacattggtgggcaccgatcttcctgttcattctgcaagaac

SEQ ID NO: 263115 - DNA, 99 bp, Homo sapiens
ggaaaacatgacgtctccagccaaattcaaaaaggataaggagatcatagcagagtacgatactcaggtcaaaggagattagcagaggcatttcatatc

SEQ ID NO: 263116 - DNA, 50 bp, Homo sapiens
ttcattaagcagtgcagaaacacaggtagttgatgtcacttggcgatatt

SEQ ID NO: 263117 - DNA, 89 bp, Homo sapiens
gctgctgctgcagccagagctccagggcgggctgcgcaccaaggccctgattgtggtgttgggtggtgaattcctcaagtacatggagg

SEQ ID NO: 263118 - DNA, 76 bp, Homo sapiens
tcctccttgggccaaaacctcagaagaatttgttcacataaacagattggcaggcaatccatggaccttgtggaac

SEQ ID NO: 263119 - DNA, 100 bp, Homo sapiens
cctgggcgtcttcccaggctgtcatataactcctgagaatagtggttcttaactctgtcagaaagcaacattgaatgcagaagaaatggcggacttctac

SEQ ID NO: 263120 - DNA, 100 bp, Homo sapiens
gtgggcaaactaagccgattttccggaaaaagtatgtccgtggttcagaccctgtattaaagcttttggacgacaatgggaacattgctgaagaactgag

SEQ ID NO: 263121 - DNA, 100 bp, Homo sapiens
gcggccgggagcgccgggacggggcgcgaagccggaggctccgggacgtggatacagctattgagaagggcaaaggcaaggccaagaaaggctcgtcctt

SEQ ID NO: 263122 - DNA, 82 bp, Homo sapiens
cgggtcgcccccaccattatttcggtgagggggcaacgctaagaaggggatactggtgagaagccctaccactgcaactggg

SEQ ID NO: 263123 - DNA, 75 bp, Homo sapiens
gctgttcaagatgtaaagactaatcctgacatgttgttagcagtttttgaagtactttggaagtgttgctgaaat

SEQ ID NO: 263124 - DNA, 98 bp, Homo sapiens
actggaaatagactggtgcgcccaggggaggaagataatgcagccataagcgaggtttctaagcatgaattgaggaacagaagaagcagagcagatga

SEQ ID NO: 263125 - DNA, 100 bp, Homo sapiens
ccaagggagcagagacactggtcacgagatgtctgcacagcctcacagacaaaggttcctctgcggcaaggagatcaagaagaagaagtgcatcttccgc

SEQ ID NO: 263126 - DNA, 100 bp, Homo sapiens
cttcgcttggtgtcctcctggcctcagcaacctgacaattctgtcgtgtcccgattataacgatagaggagactcatgaagaattaaaaaaacagtacat

SEQ ID NO: 263127 - DNA, 89 bp, Homo sapiens
ccaagaagaccattcagatgggatctttccggatcaatccagatggcagccagtcagtggtggaggcttcttctcatatcggtaattcc

SEQ ID NO: 263128 - DNA, 99 bp, Homo sapiens
ctggcgggcgtgggaacccaggccccgccgaggcggccaggtgcttgtgaatgacttcttcttggtggcttgtcttgaggatttcattgaaaatgcccg

SEQ ID NO: 263129 - DNA, 100 bp, Homo sapiens
gctacttaatcctactcagaagaacttgtacagagatgtgatgttggagaactatagcaatctggttttcttgggtggataatattaatgcagctgtgat

SEQ ID NO: 263130 - DNA, 74 bp, Homo sapiens
gatcatcgagctaaaatatcgtgttgattttaccaaatgttgcaagaactctggagttcttatggtagtaaaat

SEQ ID NO: 263131 - DNA, 75 bp, Homo sapiens
tttaagaagaaatgctaatgtcaacctcaaaaaccagctagagatgatcgctatggaaaatcctgcagacttgaa

SEQ ID NO: 263132 - DNA, 100 bp, Homo sapiens
attcgtgtggatgacttctcttgtacagtaccttgcagaagccggctggacagctgaaggaagagtggtaggagtgacccagcctcgaagagtggctgct

SEQ ID NO: 263133 - DNA, 82 bp, Homo sapiens
gtggaactgagtgacagagaaactttgttaaatagtgcaaccacttcactgaactcaaaggaactgtggctgcaccatctgt

SEQ ID NO: 263134 - DNA, 50 bp, Homo sapiens
ctcaggacacggcctacaacaccaagagagctgagctcaatgtgcagcaa

SEQ ID NO: 263135 - DNA, 98 bp, Homo sapiens
ggaggcggaggcagaggtggaggcgctttgaaagggatgattctctgaacgactgtcggatcatcttcgtggacgaagtcttcaagattgagcggccg

SEQ ID NO: 263136 - DNA, 75 bp, Homo sapiens
gtcggtacagtctctgcacctcgcgccccagcaggctgtgtataagatggcagacgtagcctgcaaatgccacgg

SEQ ID NO: 263137 - DNA, 83 bp, Homo sapiens
tcggaggtctcatctttgaactactgccggagcttctgccaggagccttcacgtaaatgggtccagtcatgcctcccagtaag

SEQ ID NO: 263138 - DNA, 97 bp, Homo sapiens
cctcagccccgtcctcttgtcctcctcagcctcgtggatggcattcccaatgacagtagtgatagtgaaatggaggacaaaactacagctaatttgg

SEQ ID NO: 263139 - DNA, 50 bp, Homo sapiens
ggtgaaggtcggagtcaacggacaccctgtagaccttgaatctgcagaaa

SEQ ID NO: 263140 - DNA, 100 bp, Homo sapiens
ccgacgagggggccgaaaccgagaggctgaaactgccgccaaccggatctgtaaggtgctggctgtcaaccaagagaacgagcacctgatggaggactac

SEQ ID NO: 263141 - DNA, 101 bp, Homo sapiens
ctggaatcgtatcctcctgtgttttttcagactccttggaaattaaggaatgcaattctgccaccatgatggaaggctgaagtgcaatgttgtgatctcgg

SEQ ID NO: 263142 - DNA, 51 bp, Homo sapiens
aatcatcaacctttctaatgaaggccctggccaacgtcaacattgggagcc

SEQ ID NO: 263143 - DNA, 98 bp, Homo sapiens
gcaggctgccatgacaaccaggcaatgctggatagataccgaattcttatcacaaagaacctaaaggcagacccagaagagctttttacaaaactaga

SEQ ID NO: 263144 - DNA, 100 bp, Homo sapiens
ctgtgttattctgcatattgcagttcttgtcaatgacctggtctgagaaagaaccccagtttaagtttatctacttcaaccacatgaatctcgccgagaa

SEQ ID NO: 263145 - DNA, 96 bp, Homo sapiens
tccgagtacccgggttccaaacccctagccacgacatggaagaatttttgcaacgcgccaaatctaaactgcacaaaagctgtgagccgctttcac

SEQ ID NO: 263146 - DNA, 51 bp, Homo sapiens
cgtctttgactggaacatgctgaaattcaagatggctgtgccacccacgta

SEQ ID NO: 263147 - DNA, 100 bp, Homo sapiens
ccgctcacttttacctgtttggattaatatgtctctgttcaggctgtgacagtgaggaactccatggctaagtctctgtatagtgccctgtttgactgga

SEQ ID NO: 263148 - DNA, 100 bp, Homo sapiens
tcatgccagtcgacccccaggaaaggaaaaacccacaaacatgttcacaacgggcatgctgaactagatgcagagcacgcccagaaggtcctggaaatgg

SEQ ID NO: 263149 - DNA, 90 bp, Homo sapiens
gaaaagaaaaggtccaaactcctatctccttacagcccgcagacacaagataacaacgaacttgatgcaagtgataggtttgccaaggtc

SEQ ID NO: 263150 - DNA, 82 bp, Homo sapiens
tgggagctgcctctgaggaacacgccgcagcctcctgcccgaaggccacctgaacctaacggctccctgcaacgctgcctgc

SEQ ID NO: 263151 - DNA, 74 bp, Homo sapiens
tcgacaaagatggggttgtcctctttaagaagtgctggctgaagatgcaatcaaggccgccctggctgattaca

SEQ ID NO: 263152 - DNA, 98 bp, Homo sapiens
caaaggaaaattttgtgaggaccactgtatactacagcactctaaccgaaaagctcacagatcaggtgatgcagaatcctcgagttctggcagcttta

SEQ ID NO: 263153 - DNA, 88 bp, Homo sapiens
gcgaggggggcgccgcggcgggtggatgagagttggccccgatatccgctcaggcatctgggctgatgggccgtaccctgcaccgtga

SEQ ID NO: 263154 - DNA, 100 bp, Homo sapiens
gacaagtcttcgactacgtgaccgcatgttggcagataaattgaacatgactccagaagaagctgaaaggtggattgtaaatttgattagaaatgcaaga

SEQ ID NO: 263155 - DNA, 100 bp, Homo sapiens
ccacagcagcctcccaaggagtctgcaagttgaatcaggaaacccaggcccaacggcaggtggatgcaagaagaaatgttccccaaaacgacccagtgac

SEQ ID NO: 263156 - DNA, 73 bp, Homo sapiens
ggtggtgaggggctggctgcacaagcaggtattaattgactggattaatgatgtgttggttggagaaagaatc

SEQ ID NO: 263157 - DNA, 98 bp, Homo sapiens
agctggtgaggtccccaaatattgaccaactggcatcccacagcctcctcttccagaatgcctttgcgcagccgagattcgggccctccaccctctac

SEQ ID NO: 263158 - DNA, 125 bp, Homo sapiens
cagaacagcgacagtacaaagaagactcttgtcacactaattgccaacaacaatggtactctgtggatatccccttggacaaaactgtcgtcaataaggatgtcttcagagatcctgctcttaaa

SEQ ID NO: 263159 - DNA, 75 bp, Homo sapiens
caccactgccacaaacgccgcaccaggtcttgtagcagcgcctcctcggcaaaagctgtgcctcacttctgcggg

SEQ ID NO: 263160 - DNA, 75 bp, Homo sapiens
ccagactccactccccagctgtgaaaggccacccctttgctgtgaagttgcttgcgctctgtaagaaagaaatca

SEQ ID NO: 263161 - DNA, 78 bp, Homo sapiens
ctcactgcagaggtgctggagctggcaggtgttgattgagacactctgtgccctgggggctcagtgccgctggtctgc

SEQ ID NO: 263162 - DNA, 75 bp, Homo sapiens
catgagatggtagccaaacccccagggaggtggggaagacagggctccagctaccacaggacgggctctgggtat

SEQ ID NO: 263163 - DNA, 99 bp, Homo sapiens
gaaaacctggctaggcttatcatagtaaaaacaaatccgggacacagtcagctggattttcagtgagcaaatgttggtttactacatcaatattttccg

SEQ ID NO: 263164 - DNA, 82 bp, Homo sapiens
gaaacgtaaagaaatgcaattgaggtggataatattaatgcagctgtgatggatttgaaaaaaaagaagatccgcagtctaa

SEQ ID NO: 263165 - DNA, 100 bp, Homo sapiens
tcatggaagttgattactcagtctctaaaaagctaagaacaagttgaaatcatcgcagaaggataaagttcgtcagtttatgatcttcacacaatctagt

SEQ ID NO: 263166 - DNA, 98 bp, Homo sapiens
ttttgcaagggcgaggtcagccccaaactaccggtccccagtctatgtgaggatctcctgtcttctgttgaccagccactgaaaattgccagagacaa

SEQ ID NO: 263167 - DNA, 50 bp, Homo sapiens
gccaaggatggagtgaaatacaggctccctgggctctgtcagctagcaga

SEQ ID NO: 263168 - DNA, 98 bp, Homo sapiens
atattttccgatcaagactacaagagatcagtcattacaatagcaacttctgttgataagttggtgaaagagtttctagccaaagccaaagaagactt

SEQ ID NO: 263169 - DNA, 91 bp, Homo sapiens
acagaattctctacatttgtgaaagtcagtttctgaggaatttcatcaggttcgatacaagaggctgttttcctagcgtggcttgctgcct

SEQ ID NO: 263170 - DNA, 100 bp, Homo sapiens
atgcccatcctgaaggacgtggccactgtggccttctgcgacgcgcagtccacgcaggagatccatgagaaggtgtgctcctgagaaaattagaagcagg

SEQ ID NO: 263171 - DNA, 90 bp, Homo sapiens
ctcaaggagcacaacgggcaggtgacagcttttgaaatgacattaacagaaggaagtaagttggagaagaaactcttttattcaaccttt

SEQ ID NO: 263172 - DNA, 82 bp, Homo sapiens
agccgcgcctgcagaccggcctcgcggagcccgcgcgccgagccccacgtgtcgtgaaaactacccctaaaagccaaaatgg

SEQ ID NO: 263173 - DNA, 75 bp, Homo sapiens
ctcaggccggggcgcacgtcggctcccacgcttagccagctcccgagttactggaggtgaactgtttgaagacat

SEQ ID NO: 263174 - DNA, 100 bp, Homo sapiens
ggaaagcagtttttaagacaagtctctaattaacagaagatggcaaagcccagccacagcagctatgtccttcagcagctaaacaaccaaagagaatggg

SEQ ID NO: 263175 - DNA, 74 bp, Homo sapiens
aaaaatgatgagaatgaggacccgggaagaaatgagtaaaggtgggattctatccaaagcttgtgattatatcc

SEQ ID NO: 263176 - DNA, 98 bp, Homo sapiens
gccaagagcagctccctgaatgttcgcgtggtggagggccgcgcgctgcctgccaaggacgtggaatgtcggtccagctccacgtcccgtactcagag

SEQ ID NO: 263177 - DNA, 100 bp, Homo sapiens
tgtgcagactacatggcatctaccataggggaggatagcaaacaagctcaatttttagccttggcagtagtatactttatctctgttcttatggtctcca

SEQ ID NO: 263178 - DNA, 100 bp, Homo sapiens
caagatcaaaatgaagactgcctttacttaaacatctatgtgcccatggaagatggtgctggagaatctggtaaaagcaccattgtgaagcagatgagga

SEQ ID NO: 263179 - DNA, 100 bp, Homo sapiens
cctgcgtcctttttcgtttttcggatgatgccttcaatactacctttatttccaccatagtgaagaactgaatgtcatcatgtctggaatcaagcgaacc

SEQ ID NO: 263180 - DNA, 82 bp, Homo sapiens
caaagtgcccggacccaaaacaggaagtgattcctcctaaggagtggaagccaagacagtgctatgatgacattgataattt

SEQ ID NO: 263181 - DNA, 100 bp, Homo sapiens
atttaatgaagaaaagaaaggaatccgtaaagacccatttctctatgaggtctccatcatcaccagttccagtagtgaaaaacagaacccaacaaactca

SEQ ID NO: 263182 - DNA, 104 bp, Homo sapiens
ctgagtggtttttcggatcatgtctggtggctccgcggattataacagatggcccactgcgtgaccttggttcagctgtccatttcctgtgaccatctcattga

SEQ ID NO: 263183 - DNA, 100 bp, Homo sapiens
atttctatgacagaagagagaaagaagaaaattgctggaataatgaccttgaatagaggaaatgggatatcatctggatcccagtgtcttggctgtgagg

SEQ ID NO: 263184 - DNA, 82 bp, Homo sapiens
ttcaagacaccaagtgagaggccaaccagattggccggtcgactgaaagccccattgattttgtagtaactgacacggttcc

SEQ ID NO: 263185 - DNA, 100 bp, Homo sapiens
tccagcagcagaagcagcgcctgatcgagtccctccggaactcacactccaggatctcatagatcagaacatactggagcctgtaacccgtgcacagagg

SEQ ID NO: 263186 - DNA, 100 bp, Homo sapiens
gttgtattgcaatcatggtgcagaaataccagtccccagtgagggtgtacaaatacccctttgaattaattatggcttacgaggatgtcgtccaggaaag

SEQ ID NO: 263187 - DNA, 50 bp, Homo sapiens
gctctactaccagacagagaacaacatggatggaattggaggacattatc

SEQ ID NO: 263188 - DNA, 100 bp, Homo sapiens
atctaagagagatgaaaatgtttgtaatttcctagaaggaggattgatgtacagttacccagcacgtgtacctcctcctcctcctattgctcgggctgta

SEQ ID NO: 263189 - DNA, 100 bp, Homo sapiens
actggggaaggccgtgtgcgccggctccgcggaagatgccggaccaagccctacagcagatgctggacagaggaatggtaggaatcattctcactgctgg

SEQ ID NO: 263190 - DNA, 100 bp, Homo sapiens
ctgctttgctgtcggaaagatgttttaatgattcttccatatgtggcaattgtccaagaaaagttgtggcccactttctttgagagaccccttgtgagga

SEQ ID NO: 263191 - DNA, 100 bp, Homo sapiens
ctccttaaaagatgcaatatcctacatgcagatatcaagccagacaatatcctggtgaatgaaaactttgccattgatttgatagcagagcagcccgtga

SEQ ID NO: 263192 - DNA, 92 bp, Homo sapiens
atttgtgcaatgtttagccaacccaaattaccttaattggactccgcaaagctgaaagaggtagacaaagccaacctcacagtaaaagcaga

SEQ ID NO: 263193 - DNA, 89 bp, Homo sapiens
gggacagcgacgacgcggaggcagagaagggaacgcccggcccagccccatttataatcgcttagatacaaattgctgtggattcagac

SEQ ID NO: 263194 - DNA, 83 bp, Homo sapiens
gccttagctgtgctcgcgctactctctctttctggcctggaggctatccagcttccagatttcggaaggttcacgagtgttgc

SEQ ID NO: 263195 - DNA, 51 bp, Homo sapiens
gacctgacgaagagccttttgtgaaggactccatccccgtgtctacctccc

SEQ ID NO: 263196 - DNA, 99 bp, Homo sapiens
atccgttggatatccacaccatccttctcgctgcaggattgaaactcccatgatgaacatcatcccagggggagccgtggccaagcctttcatcactta

SEQ ID NO: 263197 - DNA, 118 bp, Homo sapiens
ggctacccgctctttgccgtgacaacaccgttcccccagccgggctgattgacgagatgcctgaggctgccgtgaaatcaacagccaacaaataccaagtcttttttttcgggaccca

SEQ ID NO: 263198 - DNA, 75 bp, Homo sapiens
ggccatggtcactgctgactccaagtactgctacggcccccaaggcagcagcccccaccccccacaacccccacc

SEQ ID NO: 263199 - DNA, 51 bp, Homo sapiens
gatcccgctctgcacattccaaaggcaggcaatactgaacactgcgcagct

SEQ ID NO: 263200 - DNA, 90 bp, Homo sapiens
tccaattctgtttcaaaccatcagctcagtggatttgatcaagataaacttctgcactggaggggcctctcctcccctcgttctgcacat

SEQ ID NO: 263201 - DNA, 75 bp, Homo sapiens
tttcttcattgctgcttcttatgctccatgcttattgacatgtgtgtgcagaactgtggtccaagtttccagtct

SEQ ID NO: 263202 - DNA, 75 bp, Homo sapiens
tgggacgtccaaggatgatgggcactggaaaatcctgccttgcttcgttgggcctatgcaagaacaataaatgtc

SEQ ID NO: 263203 - DNA, 105 bp, Homo sapiens
gtgatgccattccagcactggactcatggaggctgagcatttattcaggaggagctgacaagcacaagtgtggaacacatcattgtcaatcctaatgctgcctat

SEQ ID NO: 263204 - DNA, 82 bp, Homo sapiens
ctctgctcatgatggcatctgggggagcgcgggagccctggaggggaaggtactccaaagattcaggtttactcacgtcatc

SEQ ID NO: 263205 - DNA, 51 bp, Homo sapiens
ctcaaggagcgctgcctcaagcactgtgtgttttaatagaaaagttgtcac

SEQ ID NO: 263206 - DNA, 100 bp, Homo sapiens
ggagcttgatgaacctagacagcaggttattgaagagagggaaaaactaaagaatgaccgggaagcccgccagaagaagatgtactatcttaggaccgag

SEQ ID NO: 263207 - DNA, 100 bp, Homo sapiens
cccggcgattcctgcggacccagctgcggcgacgccaggagaccccaagctgcatcgccgagtgggctccccctactattatagcgctgccgcccgagga

SEQ ID NO: 263208 - DNA, 100 bp, Homo sapiens
cccaggtggaccccaagaagaccattcagatgggatctttccggatcaatccagatggcagccagtcagtggtggagcacgacttcagcctggagaggac

SEQ ID NO: 263209 - DNA, 99 bp, Homo sapiens
agcggcggagctgcgcctcggcccgctcttctccctgcttaacgagaaccatagaaggaagaggcccagcagaagggactcgctgagccaccccccgcc

SEQ ID NO: 263210 - DNA, 83 bp, Homo sapiens
ttacccaagattttgaagaagcttgtcgaggcaagataacccctgtgacagaaggctactgttgctgtaacaaagggcataca

SEQ ID NO: 263211 - DNA, 100 bp, Homo sapiens
aggacagaaatcattatcttagccaccagcaatggccaatgtacatggtggactatgccggcctgaacgtgcagctcccgggacctcttaattactagac

SEQ ID NO: 263212 - DNA, 75 bp, Homo sapiens
gcctcccgagtggctgggactacagggtctcactctgtcacctgagctagagtgcagtggtgcgatcacagctta

SEQ ID NO: 263213 - DNA, 98 bp, Homo sapiens
gggcgggaggctccgcggagccgaggcgtggaggaatgccatctccaaccacactgaagaagtcggagaagtctggtttcagcagcccctccccttca

SEQ ID NO: 263214 - DNA, 50 bp, Homo sapiens
cagccagcacactcctcgcgagcaaggaaagctccaaccatggccatggg

SEQ ID NO: 263215 - DNA, 75 bp, Homo sapiens
ccatggggagcctcagcggtctgcgcctggcagcagtggaaaaggctactatccgaccagctaaaagcatggact

SEQ ID NO: 263216 - DNA, 91 bp, Homo sapiens
cctttttcgacgcctccgccgccgcctgaggaggcgagctagccgggagttacaccgccaccgccagtactgttgcccagaaatggttgaa

SEQ ID NO: 263217 - DNA, 100 bp, Homo sapiens
accgaaaaaagtttcttagaagcattatcaaaaccacaccttctcagtttagcacattaaagaggtcgttatgttaaagtctgggacatgttaaaaggag

SEQ ID NO: 263218 - DNA, 75 bp, Homo sapiens
tcattacttactccaactctggccaggaacacctcatcaaaatgcagaagcagaaactgcagatgcccccgcagc

SEQ ID NO: 263219 - DNA, 100 bp, Homo sapiens
gacaggcccaagatcctgatggacagccccgaagacgccgacctcttccactccgaggaaatcaagaggctgggaggcggcagaatgcagccagaggagg

SEQ ID NO: 263220 - DNA, 96 bp, Homo sapiens
cgtggagcccggcaatgccgccatccgggagaagctggcctgggccaaggggatcctcttggtgtatgacatcaccaaccgctggtcctttgacgg

SEQ ID NO: 263221 - DNA, 100 bp, Homo sapiens
tgccagtggatccatacaactgctccgcctggtggaatctgaggtgtgatgaatgcagactctgctaccattttggctgtttggatcctcctttgaaaaa

SEQ ID NO: 263222 - DNA, 75 bp, Homo sapiens
tctcgaatgggcacacctgtgtagtatgtgcagaagcttataatcctgatgaagaagaagatgatgcagagtcca

SEQ ID NO: 263223 - DNA, 82 bp, Homo sapiens
gcccagcggctccccgactccttcaagggtgatcgaggagttctacaaccagacatgggtccaccgctatggggagagcatc

SEQ ID NO: 263224 - DNA, 100 bp, Homo sapiens
atcgctaccctccgaagtccgtgtgatccgccttattatgcagtacttgaaggagaacagtttacatcgggcgttagccaccttgcaggaggagactact

SEQ ID NO: 263225 - DNA, 99 bp, Homo sapiens
atgcaatgtcacttacaacattaatcagatactgcatttaaggtgtgtgttcctgcccgacaacggcgccttcttcgtgaactacgtcattgcctcagc

SEQ ID NO: 263226 - DNA, 78 bp, Homo sapiens
gaagcactattaggaatggaccttgtcaggattaaactgcaaatatctcatgaagctgctgcctgtatcactggtctc

SEQ ID NO: 263227 - DNA, 75 bp, Homo sapiens
cccccgcttctatgtcctgtacacaatcttcatgaaagatagacgatcagctgaacactctcttgaaggagttcc

SEQ ID NO: 263228 - DNA, 82 bp, Homo sapiens
atggaattctaatttgaaccatgtttggattgaagccgcctctgtattacttaccaggtgccctacgagacgctgaacaaac

SEQ ID NO: 263229 - DNA, 74 bp, Homo sapiens
ccactccagtgccaacagccaattctacagaggagaaggcagagcccccccaggctatgaatgccctgatgcgg

SEQ ID NO: 263230 - DNA, 90 bp, Homo sapiens
gcatgacccgttttacgaccgatccccttggttcattttagtgggaaggcttaggcagatactccaatatttctgacacatacatacacg

SEQ ID NO: 263231 - DNA, 100 bp, Homo sapiens
ccccgccgccggccctcggtgcgcccggccgcctgcacccccagaggagcccaaggtgggcatcaagaccatcaaggtgtactgccagcgcatgcaggag

SEQ ID NO: 263232 - DNA, 100 bp, Homo sapiens
ctttggtttacatacaggaaaaactttccagccattgatatggccgcgtggaaagtgtcaaaattcttcccaagaggggatctgaaggaggagtggctgc

SEQ ID NO: 263233 - DNA, 90 bp, Homo sapiens
ccatcgcagagaaatcgggcatttgcaagatccgcccacccgcgagactcaccgcactgtgttaaaccagatcctacggcagtccacgac

SEQ ID NO: 263234 - DNA, 58 bp, Homo sapiens
ctgtatctgctgctgctgctcataatgggacacgagtgggtttggctggattctgaac

SEQ ID NO: 263235 - DNA, 151 bp, Homo sapiens
ggcaacccccaggagcctgtgcaggaggagcccaagacccgcctcctgagtatgacagtccggagaggcccacggactttctaaaaccaatttttccaacaacaacgatttccgtgctcttctgcagtctttgtatgctactttcaaggag

SEQ ID NO: 263236 - DNA, 74 bp, Homo sapiens
ctcactggagatgacacgtgcgtggggtgttggcttcgagagcatgcagaggctctgcgacaagtacaaccgtg

SEQ ID NO: 263237 - DNA, 82 bp, Homo sapiens
ggcacacgggtgagaagcccttcgcctgcacctggccaggctgcggctggagaaagaagcttccggttctgaggtcctggag

SEQ ID NO: 263238 - DNA, 83 bp, Homo sapiens
ctgcgaccagatcttccaggacgagacgggcaagaaccggacagtcattttgtttactcattcagccctgttgcaggtcccaa

SEQ ID NO: 263239 - DNA, 73 bp, Homo sapiens
cgacgccgccccgccgggccccagatcagactgattcttgctattccaaatcctcttccacgttgacagccct

SEQ ID NO: 263240 - DNA, 75 bp, Homo sapiens
tcatggatgttcttcttcgagtatttgtagaaggggcatggtggctttgccaatggtccttgttttgctgctggt

SEQ ID NO: 263241 - DNA, 100 bp, Homo sapiens
gaagtggaagttaaattgactccgctgattctggtttgatgatcgtggacggagtgattacgatggcattggcagccgtggtgacagaagtggctttggc

SEQ ID NO: 263242 - DNA, 97 bp, Homo sapiens
gcgggtcttgggtcctccgagagcagcagcggttgatgctatgaaactgggagtaaaggaaatgaagaaggcatacaagcaagtgaagatcgaccag

SEQ ID NO: 263243 - DNA, 100 bp, Homo sapiens
cagatgatgaagagtatcaggaatttgaagagatgctggaacatgcagagtctgcacaagcatttatgtttgaatcatctttaagtctggcggtcacaaa

SEQ ID NO: 263244 - DNA, 50 bp, Homo sapiens
catggaggccgctcattttggtgacctggcaaaccgtggggaactgtggg

SEQ ID NO: 263245 - DNA, 100 bp, Homo sapiens
actgcacgataaaggaactcaggcgcctcttcttagttgatgatttagttgattctctgaaggtgttggagagcacaatggctgaacaagtccttcctca

SEQ ID NO: 263246 - DNA, 76 bp, Homo sapiens
gtccagctacaggaaaaacaagtggattgttgaaggccggctccggaggggttggctgtgttccggccgcagagca

SEQ ID NO: 263247 - DNA, 100 bp, Homo sapiens
tggcctcctgtatgttggaggttatgaaagaccctttgcacaaatcaagacgcaggaggagggagacgcactgatgacatcgggccgctcctgcagctcg

SEQ ID NO: 263248 - DNA, 138 bp, Homo sapiens
ctccgttgagagacgcggctttcggcaagaactggattcgtggcgccacaagctcattcactgtgtaggagtccgctcagaatttgatcagatcgacacatccaacccaaactgtgtggtaattgcagacgcaggaga

SEQ ID NO: 263249 - DNA, 50 bp, Homo sapiens
gccaaactcaatactgacaatgaaggtgactattatatggttaaaaagat

SEQ ID NO: 263250 - DNA, 100 bp, Homo sapiens
ggaaacagcgcaaagagctcagccactacacgggccggtgctggtgtgtgctccgagcaacatcgccgtggaccagctaacggagaagatccaccagacg

SEQ ID NO: 263251 - DNA, 49 bp, Homo sapiens
gccaagaatcagaggaagtgggtgaaaatggaggtttcctcctcctgcg

SEQ ID NO: 263252 - DNA, 76 bp, Homo sapiens
atccactgttgcccagttggtgaagagacttacagatgcagggtatattcaggcctgccgggcactcatgatcacc

SEQ ID NO: 263253 - DNA, 75 bp, Homo sapiens
ccccgtcgccgccgccgccgccgccgcccggaccccggcgcgctgaatgcaggttttgcgtgtgaagctgtgtgg

SEQ ID NO: 263254 - DNA, 100 bp, Homo sapiens
cgggatcttcaaccacctcgagcggctgctggacgaagtcaggatggctaaaggtgaccccaagaaaccaaagggcaagatgtccgcttatgccttcttt

SEQ ID NO: 263255 - DNA, 98 bp, Homo sapiens
ctcaactacaagctacaagctcctctaagtgaacccacgctgagccagcatactcatgccttacggacatccaaaaattgcttggaactgacttcatg

SEQ ID NO: 263256 - DNA, 75 bp, Homo sapiens
accagtgccaaagactgagcctgaacctccttctgtcaaggtctgctcaccaggtggccagataccgcccacgtg

SEQ ID NO: 263257 - DNA, 90 bp, Homo sapiens
ctttcatggcagaccagcaactcccctactggcgtactgtaagaactctgtggacggcctctggtactgcttcgatgacagcgatgtgca

SEQ ID NO: 263258 - DNA, 85 bp, Homo sapiens
gaatctaaggagtggtttgtgcagctctattaccacgggaagaaggacagaataacgggctcccagattcacaagccccaccaag

SEQ ID NO: 263259 - DNA, 82 bp, Homo sapiens
cttctggaagctactactacgtggtgcttggaaagaagcatccgaaatcatgaagagcatcggtgaggccatccagtatctg

SEQ ID NO: 263260 - DNA, 75 bp, Homo sapiens
gtgacagaatatgccaaaaatggagaaatttttggtcctcttcctgatggatgggaacaagccatgactcaggat

SEQ ID NO: 263261 - DNA, 90 bp, Homo sapiens
gacaaaatgatgagaggctctcgcagaggatgtgttagactcagagatgaacgtgaagccagagaaaatgtgaagagagagcaagatgag

SEQ ID NO: 263262 - DNA, 87 bp, Homo sapiens
gaaatagcgcggctgtgcaagtacctgccagagaacgacctgaagttcacttcttcaactgagatggacatgatataatctccattg

SEQ ID NO: 263263 - DNA, 100 bp, Homo sapiens
tttgatcatgttgttaccctcggacgtagcccggcttgtattggatctgccgacaccccaggccatcgagccccaggccatcgtgcagcaggtcccagcc

SEQ ID NO: 263264 - DNA, 74 bp, Homo sapiens
ttggtgacagtaaagaggatactcagaaggccagtgaagcttctcagatgaccaagatggtgctgcagatggtg

SEQ ID NO: 263265 - DNA, 100 bp, Homo sapiens
gagccatcacctcgctgcgggccaacggtgtggagatcaaccgtgagcagtggatccagaatagcctaacatggcagaccagagacagcgctcactgtct

SEQ ID NO: 263266 - DNA, 74 bp, Homo sapiens
tggaatttgccattcagcccaatacaactggcaaacaactttttgaccagatcactgtgtccactactatgatc

SEQ ID NO: 263267 - DNA, 100 bp, Homo sapiens
ccgctccctgtgcaagctgtccatgaaaccccttggtgaaggccctccagacccaaagcacagaaaactgaatctgtagataacgagggagaatgaattg

SEQ ID NO: 263268 - DNA, 82 bp, Homo sapiens
aaggggaagaaagagaatattgttcagttgattatgccagccagatgcagaaagtggggctgatccaacaattgaaactgac

SEQ ID NO: 263269 - DNA, 82 bp, Homo sapiens
cacagagttagagagagggatggtggccagcctttattattgccatataagccttctggtagtaccaagatgtattatgttc

SEQ ID NO: 263270 - DNA, 129 bp, Homo sapiens
gagaccgtgaccgagagcgtgaccgagagcgcgaatatcgtcatcgttagaaggattttctgccgtctcttggcaaaaatggcaaataatgatgctgttctgaagagactggagcagaagggtgcagag

SEQ ID NO: 263271 - DNA, 51 bp, Homo sapiens
cacctgtggagctctgggtacagttggttagtctgctgctaattggaattg

SEQ ID NO: 263272 - DNA, 74 bp, Homo sapiens
taccccatgccatcaacctgcgtgaggtcaacctgcgcccccagatgtcccagcttcagaatggaaagtgcaac

SEQ ID NO: 263273 - DNA, 101 bp, Homo sapiens
caagaacaggactccagagcgataaacactcgctggagagggagacgcaggaagcgatgaaagagatgtctgcataaacaggggtcacatgacgacagaag

SEQ ID NO: 263274 - DNA, 51 bp, Homo sapiens
agcagaatggctggcaccacctcagtggtacaggagctgcagcaggccatc

SEQ ID NO: 263275 - DNA, 75 bp, Homo sapiens
ggacacacccaggaaaagactcaggacggacaagcacagtcttcggaagcaacggcagcctttaacagttgagca

SEQ ID NO: 263276 - DNA, 98 bp, Homo sapiens
atgacaggcatgttgtataaatgtacaggtttgatgaacttgtgaaaaaattcaaagtcgaatatcatgctggtggctctacccagaattcaattaaa

SEQ ID NO: 263277 - DNA, 75 bp, Homo sapiens
tggagatcctgatgtttctcagtgccattgtgatgatgaagaaccgcagatccaacttaattcagtgcacaaatg

SEQ ID NO: 263278 - DNA, 82 bp, Homo sapiens
acaaatgggagcaaatcaatgccttgggagctgacaatgaggtcttctgggaactggcttccagctgtttggctatgaggaa

SEQ ID NO: 263279 - DNA, 117 bp, Homo sapiens
cttccttttgcgggtggcggcgaacgcggagagcacgccatgaaggcctcgggcacggtgagaagccctaccactgcaactgggacggctgcggctggaagtttgcgcgctcagacg

SEQ ID NO: 263280 - DNA, 102 bp, Homo sapiens
cttcccgcgtccgccgattcctcctccttggtcgccgcgtccttggctggcgtgttgggcccgaaggcatcctgcagaacggggctgtggacgacagtgtag

SEQ ID NO: 263281 - DNA, 75 bp, Homo sapiens
ccatgccgctcctaagcctgcacagccgcggcggcagcagcagtgagaggatgccggctccaggagcagcagtgg

SEQ ID NO: 263282 - DNA, 75 bp, Homo sapiens
gtggatctcaagtactaccggccaactgaagtgaggcgacaggaagaagggtattacagccgcctggaagccgag

SEQ ID NO: 263283 - DNA, 74 bp, Homo sapiens
tactctgcctcggggacgaaagcagagaccccgcagatgtgtcttcagagagtgacagtgccatgacctccagc

SEQ ID NO: 263284 - DNA, 74 bp, Homo sapiens
ggcacttggagtccggacatctgaaacttggctaaaacactgtcttatgaaccattatcttcagcaactgtttc

SEQ ID NO: 263285 - DNA, 73 bp, Homo sapiens
aggcctaagaattttggcattggtcatcatggtcacaggagaccatccaatcacagctaaagctattgccaaa

SEQ ID NO: 263286 - DNA, 97 bp, Homo sapiens
tgagacaatcattgttttccactccttgcttactgggtcctacgccaacagatatgggagggttcagaattttcacagctgtattcaggtaactgaa

SEQ ID NO: 263287 - DNA, 82 bp, Homo sapiens
ctgctggctgcttccagtgttcgccgagagaaaaagatgttgctggtccatttgacgaagaagtccagagcggcttgtgact

SEQ ID NO: 263288 - DNA, 75 bp, Homo sapiens
cagcctgcggagcctgtggggcagataccccatgtttccccatcactcgaggagtctgggcagagactggactac

SEQ ID NO: 263289 - DNA, 82 bp, Homo sapiens
cgggcggcttcctggcctgggcgctccggtggcggcggaggtacaatgactcttcttgcttttcacctaagttgaataagca

SEQ ID NO: 263290 - DNA, 98 bp, Homo sapiens
gcaataccacctcccctacctcctaaggagcgagttcagaagacctttcctcacccaattgataaatgggccattgctgatgcacaatctgctataga

SEQ ID NO: 263291 - DNA, 82 bp, Homo sapiens
agccggtcccctggataaagagatcaccgcagacctgctgtccaacggcatcgacgtgtacccccagaaggaatttgatgag

SEQ ID NO: 263292 - DNA, 82 bp, Homo sapiens
ctgctcttcgctctcttcctggctgcgtccctagctggagctctcaaacactgctgtcctgcaccagatgcggcgggaccag

SEQ ID NO: 263293 - DNA, 98 bp, Homo sapiens
tttccaaatgaaaatcaagtagtgtttgccagagttgattgtgatcagcactatgtgaaggaatggacaagagttgagcagcctttctgctgattatc

SEQ ID NO: 263294 - DNA, 100 bp, Homo sapiens
tcgatcagaagtcatttgcagcatccactttttagatggcgtggtacagacctttaaagttactcattagcagcaatccttggagcagtgccattcctgg

SEQ ID NO: 263295 - DNA, 104 bp, Homo sapiens
gcctggcccttggcctcctcctgctgctactgtgtccagcgcaggttttacagacatttcaccagaggaattgaggcttgaataccataacttcttaaccagca

SEQ ID NO: 263296 - DNA, 80 bp, Homo sapiens
ttggcagctggacaggcagagtgctgatgtgaaaaataccacgacaaaaccaccctaggtatcgtgcagcagtttttggt

SEQ ID NO: 263297 - DNA, 71 bp, Homo sapiens
gaggccaaaggcagttgtattgatggatgcatctggaccctcagatagtgatatgccaagtcggacacgac

SEQ ID NO: 263298 - DNA, 99 bp, Homo sapiens
cagctgcagagccagatgatccacaggatgctgtagtagcaaatcagtgaaaaggatttggtgaaacaggcaaagaccttaaatagtgcagcaaataaa

SEQ ID NO: 263299 - DNA, 100 bp, Homo sapiens
tccaagcggagagagtcagcctctggttcagactgcagtaaccaggctggagcggctctgggctccggaatcgcccgcagccggtactgcgggacccact

SEQ ID NO: 263300 - DNA, 100 bp, Homo sapiens
aagctttcgtttcactccaagagtccagcgcctgaatgaacttgagtactactataattccttgacccagcagtacctttactgggatggggaaaaagag

SEQ ID NO: 263301 - DNA, 98 bp, Homo sapiens
ggtgctggcgagacctcacctgcatggacttccactatgagggagtgcatccgccccaacccttttccccctcgtctcctgtgagaattccccgtcgg

SEQ ID NO: 263302 - DNA, 89 bp, Homo sapiens
ctcgaattagcaaaggaaacttttgctattatttcatcaaacatgtcccgccactgacagaagaacaactaaataggaaacctgctctt

SEQ ID NO: 263303 - DNA, 50 bp, Homo sapiens
gcggcgttggaggccaccgtttccagggggacttgatctcatcttcatgc

SEQ ID NO: 263304 - DNA, 51 bp, Homo sapiens
tatttcgaatgccattccgaggaagggacaatgactcattcttcccaggac

SEQ ID NO: 263305 - DNA, 98 bp, Homo sapiens
ctttacgaacgttgcaggaaaagctagacttctggctgaaggagtacaacgtagctacagcaagctgggtagcaggcagatccaaaggatatcatgaa

SEQ ID NO: 263306 - DNA, 87 bp, Homo sapiens
cggagaatgcagtgcgcatggacgaggctcgggataacgcctgcaacgacatgggaatcatgaccagcacctaatgaaatgtagccc

SEQ ID NO: 263307 - DNA, 75 bp, Homo sapiens
aagcgaggagacaggctgaatttgaacactttcagaggaggatgctttcattggatttggaggaaatgtgatcag

SEQ ID NO: 263308 - DNA, 74 bp, Homo sapiens
agaaaccaggctgctttcaggaacattgctgtggattcccagggttccattaacttcaaatgatgatgaagatg

SEQ ID NO: 263309 - DNA, 82 bp, Homo sapiens
ctcctaatccctagccactatggtgacttaagagattaaaattaatttggttgctgttggttctgaacaaataatgagttct

SEQ ID NO: 263310 - DNA, 90 bp, Homo sapiens
caactccgcagcaaacaactccgcaaacgaaaaagaacgacatgatgcaatcttcaggaaagtaagaggaaaccatcatagcctttgcct

SEQ ID NO: 263311 - DNA, 90 bp, Homo sapiens
gtatgactgggaccgagatggaaggaaacctcgacctgtctcccagttggttgcacagcaggttactcagcagtttgtgcctcctacaca

SEQ ID NO: 263312 - DNA, 74 bp, Homo sapiens
aaaaaaggagatgcctggcagccccgctctctgcagtaagaatgattgatgttggctgatattggagtgctcat

SEQ ID NO: 263313 - DNA, 51 bp, Homo sapiens
atcacctgccccatcatcgtgcccttcggagaggagccaagagcaggcaaa

SEQ ID NO: 263314 - DNA, 101 bp, Homo sapiens
gccccaatcttgtgtgggcactgaagggggactacaggttcgagagtgccaatgggtcatgtttggttagaaggtgacaatctacagaattctacagattc

SEQ ID NO: 263315 - DNA, 100 bp, Homo sapiens
tgggaaacccacaggaggcaaccacactagtttaggacgcaatgagcccctgaagaaagagcggcttaagtggaagagcgactaccccatgactgacggg

SEQ ID NO: 263316 - DNA, 74 bp, Homo sapiens
acaacacgcagggaccccgcgcggccctggaggccaggctgtgggagaccgagattgagaggatccagaatcca

SEQ ID NO: 263317 - DNA, 90 bp, Homo sapiens
ctgcggggaggcagcggaaggcggcaggccaagactaaggggctgcagagcggggtggacattggcgtcaagtactcggagaagcaggag

SEQ ID NO: 263318 - DNA, 78 bp, Homo sapiens
ccgctctagcggccgggactctgaactatggcgccatccagtattgtgctagaggaggaccacaaagtggaagagtcc

SEQ ID NO: 263319 - DNA, 75 bp, Homo sapiens
cttcatgggataatgcaggttttaaaggctatggaatacagatagagcaggtgaaattgcactactgatgaatcg

SEQ ID NO: 263320 - DNA, 82 bp, Homo sapiens
aggggagttctctgtgtctgtgaagtgtggacactgccagcggctgcagccgacttggaatgacctgggagacaaatacaac

SEQ ID NO: 263321 - DNA, 108 bp, Homo sapiens
cctctgcccccccttccccacgcaaccccagatccatttacactttacactggtgctcaagaccgaatcggctgggcttttggcctaggattagaaaggctagccatg

SEQ ID NO: 263322 - DNA, 80 bp, Homo sapiens
ccgctcccgccgcctacccgaccggcttgggcactgtttaaaggaaagttccgagaaggcatcgacaagccggaccctcc

SEQ ID NO: 263323 - DNA, 90 bp, Homo sapiens
cggacgtgtccgcgaagatggcgggccggtggtttgagtccagccaatgacactggagccaaaaagaagaaaaagaaacaaaaaaagaag

SEQ ID NO: 263324 - DNA, 74 bp, Homo sapiens
gcttgttatgttttcatcacttctctccagaaggtcaccatcagaaaagctaagtttgctgtatagtgaggatc

SEQ ID NO: 263325 - DNA, 100 bp, Homo sapiens
gggacgctgcccacggcgtccccggtcgcgttgtctaacgggttttctcactatagtttatcaagtgagtcccacgtggggcccacgggtgcaggccttt

SEQ ID NO: 263326 - DNA, 87 bp, Homo sapiens
ctgaagtaatatctggactttgaaattcatggtagcccaagcattagtgttccagagaaccaggcagatgctccattgccttctgtg

SEQ ID NO: 263327 - DNA, 100 bp, Homo sapiens
gctggctgcgctctgcccggcgagtcgggctctggaggaaaagaaagtggctgcagctcagacgactccaggagagagatcatcactccctgccttttac

SEQ ID NO: 263328 - DNA, 50 bp, Homo sapiens
cggcacgatgccctttgacttcaggagaacactctgctccagccaaggtg

SEQ ID NO: 263329 - DNA, 101 bp, Homo sapiens
tcgacgacatcatcgtcttcgcctatgcctgccaggctgctggttaaaagccaactgcaaggtctaatgactgcaggatctagctatccattgtttctggc

SEQ ID NO: 263330 - DNA, 95 bp, Homo sapiens
acaaggccattttctcaaacgagagtcagcctttaacgaatacctcctctgaaaaatggcagaagcagttttccatgccccaaagaggaaaagaa

SEQ ID NO: 263331 - DNA, 100 bp, Homo sapiens
aggtctgttagaggaagacgacgagtttgaagagttccctgccgaagaattagaggagacagcactgattgcagtgacagaagcggtgccagctaactcc

SEQ ID NO: 263332 - DNA, 83 bp, Homo sapiens
ccagagtattgccgcggtggaaatggaggtcagcccaaggccaaccccactgtcactctgttcccgccctcctctgaggagct

SEQ ID NO: 263333 - DNA, 99 bp, Homo sapiens
gtggtaatgaagctcaagaaactggagtccagtgtgagcactggtcgtaaatctgctgaatgccatggtggcaaaactggggaaccgggaggacccact

SEQ ID NO: 263334 - DNA, 100 bp, Homo sapiens
ggcctgcagcgggagctggacggcgagcgcgagcggcgcgagaaattcatagccctgatgaagcaagttactctgctctcctaataaatgcaagaaaatg

SEQ ID NO: 263335 - DNA, 100 bp, Homo sapiens
tgtgttgttactgatgcagagatacagcaaaagagtctacatagggccatcgatgcacccctcggagctaatagcggagatgagaaacagtgggtttgca

SEQ ID NO: 263336 - DNA, 50 bp, Homo sapiens
gagcccgggacccccgggggcgcaggtgcctcatctccagacatggagcc

SEQ ID NO: 263337 - DNA, 51 bp, Homo sapiens
aagacaatatcatgcaagtgtggcaaatgggtcacgcccagaaccccctgc

SEQ ID NO: 263338 - DNA, 97 bp, Homo sapiens
gaaaattgaaggctccaaatccttagctcagagctggaggatgaaggatcggatgccttcaattaagttgcagagttctgatggagagatatttgaa

SEQ ID NO: 263339 - DNA, 131 bp, Homo sapiens
gatgctggcatgattggaaaccaagttaatcgaaaagttctcaattttgaacaagctatcaaggattacattgcagtgaaggagaagtatgccaagtacctgcctcacagtgcagggcggtatgccgccaa

SEQ ID NO: 263340 - DNA, 100 bp, Homo sapiens
tgtgtggagagggactgacgtgtttggagggaaatgggaatgtacacgataattaaagagtaaagttgtgctcaacgacacgatgaggcgagtggtacga

SEQ ID NO: 263341 - DNA, 83 bp, Homo sapiens
gcggtgactgccgccgcggcctcggacgactcgccttcagaagacaatgcagatcttcgtgaagactctgactggtaagacca

SEQ ID NO: 263342 - DNA, 80 bp, Homo sapiens
aaagttattttggactacctctatactgatgaagctgtggtgataaaagaagtgaattgtccattccagaagaggaggct

SEQ ID NO: 263343 - DNA, 82 bp, Homo sapiens
cagacatcatcctaccaggccttgcagcgggtgctcgtcagcctaggacagagcgggatgccaccagcttgtccaaagggaa

SEQ ID NO: 263344 - DNA, 100 bp, Homo sapiens
gcttcatcaacgatatatgtcagatctaaagagggtgttttaaatagcatttccaggaaaggaaggctggaaggctgctgtcaaccacactacactgctt

SEQ ID NO: 263345 - DNA, 75 bp, Homo sapiens
ggaaccatggagggtgtagatgcaccaattccagctggacatcactgtgaaaatgggacgggataaagtccgaga

SEQ ID NO: 263346 - DNA, 75 bp, Homo sapiens
gtggcaggtgacagtctgcatgtgcagttttcagggcccaccagctctgagcagatcatgaagacaggggccctt

SEQ ID NO: 263347 - DNA, 100 bp, Homo sapiens
gccactgactcctacttcctctgtatagagcaactgttgaactcagctgcctgtagagcaacattttgcagatgttgtacttagtgaagaatttctcaat

SEQ ID NO: 263348 - DNA, 90 bp, Homo sapiens
ccgccatgagctggggcacggagctgtggagttttgctgctaatgggattcaagcgcatccagaaagtagtactggatctgatgcccgaa

SEQ ID NO: 263349 - DNA, 100 bp, Homo sapiens
aagaaggtgatcctggcctcggggagttcctggtgtgtgcctccagccagcgtggtaccctgcagagggcactccgttcttccctgtggaacagtagaga

SEQ ID NO: 263350 - DNA, 111 bp, Homo sapiens
cggacccggcgccgaggcggccacccgagacgcggcgcgcacgctccggcctgcgctcaccatggatgatgatatcgccgcgctcgtcgtcgacaacggctccggcatgtg

SEQ ID NO: 263351 - DNA, 75 bp, Homo sapiens
cggagactgcgggcccgtagctgggctctgcgagatgactttgaagaagccaaggaaattttgacaaagatgaga

SEQ ID NO: 263352 - DNA, 83 bp, Homo sapiens
taccaggcgaagctggccgagcaggctgagcgatacgacgggcgtgatggtgggcatgggtcagaaggattcctatgtgggcg

SEQ ID NO: 263353 - DNA, 98 bp, Homo sapiens
agctttccagctggtggaactgggcccagccagtaagaatttcagttgtgggcctccagtcttctggaatgtcttcactgcagctgctggaaatcact

SEQ ID NO: 263354 - DNA, 82 bp, Homo sapiens
aaccattgacgccatgtcgggttattcgagtgaccgagaccgcggccgggaccgagggccaagtcctgtatctgccatgtct

SEQ ID NO: 263355 - DNA, 75 bp, Homo sapiens
ctcttctcgccctggcggggaaggacactcatgaggaccatgatacttccactgagaatacagacgagtccaacc

SEQ ID NO: 263356 - DNA, 74 bp, Homo sapiens
taatcctcaatttaagcctgatctaacccctagaaacaggatgtacagttacccagcacgtgtacctcctcctc

SEQ ID NO: 263357 - DNA, 75 bp, Homo sapiens
atccaacaccatattgaagcctgtgcccagctacctggtgttcaatgtcatccccacgctggccgacatcatcat

SEQ ID NO: 263358 - DNA, 82 bp, Homo sapiens
ccccccgcgcctctcttcgcctcgcctcgggacccgcggtccccgctcttgctgattcttcgctgctgctgccttaccgccg

SEQ ID NO: 263359 - DNA, 75 bp, Homo sapiens
ggcccgcgggggagccccgggagccgcacggttgacatcatggacatatgtgagtccatcctggagaggaagcgg

SEQ ID NO: 263360 - DNA, 50 bp, Homo sapiens
ctcagctgcaagtccaaagccacaaggaggagagggcagtgagagatagg

SEQ ID NO: 263361 - DNA, 103 bp, Homo sapiens
ctggcaggaaaggagtggacacagtagaactgaaggcagaagctagtctaatggaccagatgagtagttgtgatagttcatcagattccaaaagttcatcatc

SEQ ID NO: 263362 - DNA, 74 bp, Homo sapiens
tcaacttcctgatagatgtacactgaaaactggacattataacattaagacaaatagcttgaagctggaaggta

SEQ ID NO: 263363 - DNA, 100 bp, Homo sapiens
cacggacgaggccgccctcagttgctgctccgacgcggaccccagtaccaaggaacttgatactaaatttgggactctttgctgcgggagtttggctggc

SEQ ID NO: 263364 - DNA, 51 bp, Homo sapiens
aaggattccaagtaactcttatttgttctccgggagatgttgcataaccac

SEQ ID NO: 263365 - DNA, 75 bp, Homo sapiens
cgtgctttttctgggtttcaacaggtgctggagaatctggtaaaagcaccattgtgaagcagatgaggatcctgc

SEQ ID NO: 263366 - DNA, 100 bp, Homo sapiens
cgccatcttggatccgcgggacaagaaaattcatgcggtgacttaagagattaaaattaatttggttgctgttggttctgaacaaataatgagttctttt

SEQ ID NO: 263367 - DNA, 83 bp, Homo sapiens
aacttgaacttcataacactggagagacaatgcagatcttcgtgaagactctgactggtaagaccatcaccctcgaggttgag

SEQ ID NO: 263368 - DNA, 82 bp, Homo sapiens
tagggttgtacaggcccacgccagacacgacgtctggcaggaacctcggcctcagaggagggaggtgtagaaagaggtacat

SEQ ID NO: 263369 - DNA, 83 bp, Homo sapiens
cttaaaagtggaaagatgacggatgaaaagaatgaacactgtccttcaaaacgagatggggaaatggtgcttctggatggagg

SEQ ID NO: 263370 - DNA, 76 bp, Homo sapiens
gtctccttgtcagaatttaggaatcccctggcccccgctgtgcaggagctacggcatccggaatcgagacgaggtt

SEQ ID NO: 263371 - DNA, 82 bp, Homo sapiens
gcgctgctctgtggggctctggccgcgcctggcctggccgggaccatgggaggaggtacaggagaactgtgtgcggtggcga

SEQ ID NO: 263372 - DNA, 100 bp, Homo sapiens
gctggacgtgcacgcagcccggcgggaggataaagaccaccacgatccgcctcacggacacgctgggcaggctctcgcacatcctggagatggaccactt

SEQ ID NO: 263373 - DNA, 50 bp, Homo sapiens
atgcggaggacagctctgatgaggagagagttaagaaagacgtggacaag

SEQ ID NO: 263374 - DNA, 50 bp, Homo sapiens
aacctgtatctgtgcaggcaatgtggccaagtcctgtatctgccatgtct

SEQ ID NO: 263375 - DNA, 89 bp, Homo sapiens
tcctgcttcccgggtgttgctcgtatgttccatttaagcagacctcttccatagctgtagctggagcggtaattggagctgttcttgcc

SEQ ID NO: 263376 - DNA, 96 bp, Homo sapiens
agctacagggtgaccaacgcaagaacatatgccagttcctcgtagaggctttattttaaaggcaagtgagactgcttcaaataaaacaacttcaag

SEQ ID NO: 263377 - DNA, 75 bp, Homo sapiens
tgtgcgatgctgctgggcgaccggatcaggcctctgcgtggccaaaccagagatgatcttcaagttggagcgagg

SEQ ID NO: 263378 - DNA, 74 bp, Homo sapiens
ctcatctcctggtctgacatccaaagagtcactctttgttcgaataaatcatgttgttgatgtcagtgttgcgg

SEQ ID NO: 263379 - DNA, 73 bp, Homo sapiens
gaatcctcaacagatgccactgtaagtggggagagaagctgctcagctgaactgctcattttcagtgtcccga

SEQ ID NO: 263380 - DNA, 82 bp, Homo sapiens
caacttacccgagaacgtgcgggaagagaagatcatcgagcatttcaaacggaggactcacgaatggcagtggaagatacat

SEQ ID NO: 263381 - DNA, 100 bp, Homo sapiens
gccggagagggagggcaccgctgtcgtcgggacatcaaagacgtcagactggatggcgagtcccagtgaggcgatgtgggcagaggagctccgagccgcc

SEQ ID NO: 263382 - DNA, 90 bp, Homo sapiens
cagttcaaacagctgcttatttcggctgtgaaggacctgtttggggagtttggcaatgaggagcagcagctggcgtgggccaagcgggag

SEQ ID NO: 263383 - DNA, 97 bp, Homo sapiens
tgctgctacggctgttgccatgaggcgaggctagggaggacctcacttccccggggtgtaataatgttaactgagatggctgagagctagcaaggaa

SEQ ID NO: 263384 - DNA, 100 bp, Homo sapiens
caaggacttcctgctcacagcccgacgaaaggatgccaaatcgcggggtgtcctgtcctcgccatgaggccgcagcaggcgccggtgtccggaaaggtgt

SEQ ID NO: 263385 - DNA, 100 bp, Homo sapiens
gtgaaagtgtctacctagactaagagggcttctgaggcaatcaggcagcgtcagtcttcagccgctaagccgagaagatctgggaaggagtcagtcagag

SEQ ID NO: 263386 - DNA, 98 bp, Homo sapiens
cgcatggagctggaaaccatcaagcaacatctgaatgaattgatgacgaagaagtggctattagggtcaaacgctgtagacattatctgtgtcaccgt

SEQ ID NO: 263387 - DNA, 83 bp, Homo sapiens
cttttctttataaattacccagtctcagatttggagcaagaggtggtggtggccttcccccgaagaaatttggtaatcctggg

SEQ ID NO: 263388 - DNA, 100 bp, Homo sapiens
tgtgcagtggcacctgcgcgaagctggccaaagcctgcccagacggctcacctgtgcgggatggaacaaaaggaagttgaagaccatgtggcgtttctaa

SEQ ID NO: 263389 - DNA, 100 bp, Homo sapiens
gtgctgaagaagagccgagagggaggaaagggaggcaagaaggaagcagttgttgacctcctgtactggagagacattaagaagactggagtggtgtttg

SEQ ID NO: 263390 - DNA, 100 bp, Homo sapiens
atggagatgaagaagaagattaacctggagttaaggaacagatccccggaggagggcagcacattccccctgttcccaggtgggtccagagatgtcgcct

SEQ ID NO: 263391 - DNA, 75 bp, Homo sapiens
gctggagcaattgttgtgacttcactaataaaggctcatccatggaataccaattctttttcttagtgttcacat

SEQ ID NO: 263392 - DNA, 75 bp, Homo sapiens
cctgcagaaggtctctggagacatcttcagcagggtgaagttgaacaaattgctatgatgaaaccaaaaggccag

SEQ ID NO: 263393 - DNA, 87 bp, Homo sapiens
atagtctactgtccaattctgtttactctgaattaccatcagctgaagggaaaatgaagacacagaaccacacatgcagctaccccg

SEQ ID NO: 263394 - DNA, 75 bp, Homo sapiens
agatgccaggacaccccgaaagccggaaaacggatatttggccttgacattaaaggcagagactgtggcaatgag

SEQ ID NO: 263395 - DNA, 96 bp, Homo sapiens
gctggcgcagggcacggtgggcgcctacctggactcacaccacccggcaagaactgctcactacggctccctgccccagaagtcacacggccggac

SEQ ID NO: 263396 - DNA, 100 bp, Homo sapiens
agggggccagctcaggacacacagacccagctggaactcggaaggatctgagtctctccctgcggagacagccctgaagaactcctgtaacgtcaagctg

SEQ ID NO: 263397 - DNA, 75 bp, Homo sapiens
cttcgatgatcgtgtgtcggatgaggagaaggttccatcttagcccacatccagaagcaaaagcacttcaatgag

SEQ ID NO: 263398 - DNA, 75 bp, Homo sapiens
ccctcaggcctatcagaaccaggtgaccgaattataaaagtcaatggagaaagtgttattggcaaaacctattcc

SEQ ID NO: 263399 - DNA, 50 bp, Homo sapiens
ccaagttcaaccaagccattgatcccgttgaagataccacattacactta

SEQ ID NO: 263400 - DNA, 80 bp, Homo sapiens
cagaagagtgagagatggaacccgaagaagaaaggattcgttacagccagagattgcttaaagcttttcaagccaggcca

SEQ ID NO: 263401 - DNA, 83 bp, Homo sapiens
gatcatgcatccaacgtcaagtacaccatgcacaaggtcttccagtttctgaacctagggccatgaagcccccaggaggagaa

SEQ ID NO: 263402 - DNA, 88 bp, Homo sapiens
aaatatggcaaagaaacctattctgagctgtcacgaccaccacccagaggcccagcagcatgactaccacctggaggctcagtagcac

SEQ ID NO: 263403 - DNA, 127 bp, Homo sapiens
ccactgaggatcagattttgaagagagatatgccaccagcatttattaacttagaccatgctcagcctccaagcagccttgtcatcgacaaagaatctgaagtttacaagatgcttcaggagaaaca

SEQ ID NO: 263404 - DNA, 83 bp, Homo sapiens
cgccgcctctagggatggacgctattgtggacgatgaaaggctctctgcagaggagatggatgagaggaggcggcagaacatt

SEQ ID NO: 263405 - DNA, 90 bp, Homo sapiens
ccagggctcatcgccacggccaagcatactccggaagaaacctgccacagatgggtgtggtcactcacctgtctaccactcccgtgaaat

SEQ ID NO: 263406 - DNA, 100 bp, Homo sapiens
agcttgagatacgccgctctgaatcttgccgccctgcactgccgcttcggtcactagaggtcacaagccccaaagtggacgtgttcaatgctaacagcaa

SEQ ID NO: 263407 - DNA, 75 bp, Homo sapiens
acagtattccaaagaactcggagatgcctggaatacagtaagtatatttaaagttggagttcgttgctaaagatg

SEQ ID NO: 263408 - DNA, 100 bp, Homo sapiens
cttgtatctctaattggaagcaacattgtggatatcaagcctgccaatatggaagagctaacagaggtgattacagcagcagaatttcatccaaacagct

SEQ ID NO: 263409 - DNA, 90 bp, Homo sapiens
ggcagatgttacagctgctcatgaaccacttggcaaacatcttcatgatacagttaagaggaatcttgacagcgccacttcccctcagaa

SEQ ID NO: 263410 - DNA, 100 bp, Homo sapiens
tacaagttcaatggcagcccttctaaggtctcggcgcggaagatggccggcggcgtggacggccccatcgggatcccgttccccgaccacagcagcgaca

SEQ ID NO: 263411 - DNA, 100 bp, Homo sapiens
tttctccgcgcgctcggctgcgctgggcgggccccaggggaaggtgtggctcattgactttaatccatttggtgaagtcacagattcactgctgttcacc

SEQ ID NO: 263412 - DNA, 100 bp, Homo sapiens
tgctgaaaacctttgggcttcatggagtcgtcttagatgttgattcagtgcaatgtagcaggacaactcatggagcccccccgggcccatcgagtaccgg

SEQ ID NO: 263413 - DNA, 99 bp, Homo sapiens
gatgaagttgacctctcagatgctagtgtagctgaagcaagcacgaaaaatgctaacaacagcttcacgcttagcagtgtctgcaaaaacgaatctttt

SEQ ID NO: 263414 - DNA, 100 bp, Homo sapiens
gaataaaccagacagcaccattcaggatgctggtttataccaaggacaggaagacaactgttagttttgtggcttactgctgctccacccagtgtctgca

SEQ ID NO: 263415 - DNA, 73 bp, Homo sapiens
taaattgcaagcattctatccaaatggtgaattttgtggtatgccagcttgttgctctgtttgctgctttctg

SEQ ID NO: 263416 - DNA, 100 bp, Homo sapiens
cgctctgggtccctcagaatatgactctctgcctgaaaatagcgagacaggtgtcatggagaaactccagctgggcccagagattctgcagcgggaaaat

SEQ ID NO: 263417 - DNA, 100 bp, Homo sapiens
gactgcagtacttggagagactctatatgaaaaggaactccctgacatccttggtgccagcgagatttcagattcctgtaaacctctaaagaaaaggagt

SEQ ID NO: 263418 - DNA, 75 bp, Homo sapiens
acaaataagaagatcatcatgaaatggagatgtgggaactggccagaaggtttttcacgactgaaaacaacatag

SEQ ID NO: 263419 - DNA, 100 bp, Homo sapiens
ttaggagacataagaccgttggttctgacgaggcacagcgtttcttgcaagaatgggagtggaaggaatgaaggccagctgaatggtgaaacaaatacac

SEQ ID NO: 263420 - DNA, 51 bp, Homo sapiens
gagaaagtggctatgctcaaaatggtggcaattttggaggtagccccggtt

SEQ ID NO: 263421 - DNA, 87 bp, Homo sapiens
tcataacagatcaaggaatcgaattttaccaggtctccagaaatgctttgggttcatctttcattgctgcaaggaacttccatgcct

SEQ ID NO: 263422 - DNA, 75 bp, Homo sapiens
aggtggcacccccaaaggctcatgaagttcgaatcaagatttctaacgacccaagtccaggatacaacattgaac

SEQ ID NO: 263423 - DNA, 100 bp, Homo sapiens
tcctgtctcctggagttggtgtgaagcatatagggagttcatctatgacactgactggaaacagctacgtgaaataccgtctgacggaaaatgaaaacaa

SEQ ID NO: 263424 - DNA, 75 bp, Homo sapiens
cggtcggctgcggtggcggcgtttggatgattgtctctcggcggcggagtcggatactgtggcatatgaggacct

SEQ ID NO: 263425 - DNA, 83 bp, Homo sapiens
cccggtttgacgcacacggcaccaaactaggctgggaggcggcagaatgcagccagaggagggcacaggctggctgctggagc

SEQ ID NO: 263426 - DNA, 100 bp, Homo sapiens
gttcagaatcctccaaaaccagtcatgaccactagacccacagctgttaaagcaacagaattccctttatcggacgtgaaggacctcttcaaggagaact

SEQ ID NO: 263427 - DNA, 74 bp, Homo sapiens
ttggaaatcctgccgcggacttctctgcacagcatccctgtgacagaccaacatcgccttcctgcagaatgtgc

SEQ ID NO: 263428 - DNA, 75 bp, Homo sapiens
gtgtttctggaaagtgacagcaggtcaaaatgcagatcttcgtgaaaacccttaccggcaagaccatcacccttg

SEQ ID NO: 263429 - DNA, 88 bp, Homo sapiens
tgggggcagcacgggcttgcccaggcggaaggaggtgacggaggaggaggctgagaggggtttttctgtaagactgaagatgacttca

SEQ ID NO: 263430 - DNA, 83 bp, Homo sapiens
cgtggagtcggctgagggaaaagcgaggcaaggcaggcggacaatgcagatcttcgtgaagactctgactggtaagaccatca

SEQ ID NO: 263431 - DNA, 82 bp, Homo sapiens
actgctgctccgtggagatcgtcccgcgcctgccggtgtcgtgaaaactacccctaaaagccaaaatgggaaaggaaaagac

SEQ ID NO: 263432 - DNA, 78 bp, Homo sapiens
gacaatgcagcttctcttgcagtgcaggtgcttttgaagatgatgatatcacgcacgttgaaggaagtgtagatccta

SEQ ID NO: 263433 - DNA, 106 bp, Homo sapiens
ggaaaccgatctgcccgttgtgtttgtgaaacagagaaagataggcggccatggtccaaccttgaagaatctccctggaaaaggagacatgaatgtctgcaatgat

SEQ ID NO: 263434 - DNA, 50 bp, Homo sapiens
cagctattgactggtttgatggtcgctttgctgttcgtgatatgagacag

SEQ ID NO: 263435 - DNA, 75 bp, Homo sapiens
caggaagcaaggactgcctctcatgaatcaaattattagctgggcaacattagagctaatgtcaaaccccgaaat

SEQ ID NO: 263436 - DNA, 95 bp, Homo sapiens
ccctggctcaggaacagggacagcacctcatcccctggatgggggaccacaagatcctcatcgacagggctctggaggccacgggcatgatgctt

SEQ ID NO: 263437 - DNA, 98 bp, Homo sapiens
ccacccgcatgctctttgtcactccccggcggcagcacgaaagtaccatgattcagtggcctttgaggatgtggctgtgaacttcaccctggaggagt

SEQ ID NO: 263438 - DNA, 90 bp, Homo sapiens
tacaggaatgccattaaacggaccagccccagtgatggagcaatggcaaactatgaaagtacaggttccacttccaaacatgagttccag

SEQ ID NO: 263439 - DNA, 99 bp, Homo sapiens
gagggcgtcatcagcgtctccgaggacagccacctcgtacatctcatcctgtagtgaagttttcctgtacagactgtgaaccaatggttattgataaac

SEQ ID NO: 263440 - DNA, 106 bp, Homo sapiens
gagtccttctgtcggttggtcctggagcggcgcagccggagtggggccgtgagtggtctaccatcacggcaacagtgcgacgggcggccattacactacagacgtc

SEQ ID NO: 263441 - DNA, 82 bp, Homo sapiens
ttggtccgggactggagctgcagaagtatgagggatggtcagactggatatttctgaaggcacaactctaaggtgaacagga

SEQ ID NO: 263442 - DNA, 78 bp, Homo sapiens
ccgaggactccagcacaccgagggacggctgtcctcagcgaggggccgtgcacccgctcctgagcagcgccatgggcc

SEQ ID NO: 263443 - DNA, 75 bp, Homo sapiens
tgggacaagacccatctttatgcaaagccagcgttacagtaatgttccaggtggggacatgtgtgtcagagggaa

SEQ ID NO: 263444 - DNA, 100 bp, Homo sapiens
aagggcaacttcgcggtggtcaagcgggccacgcacctcgtcaccaaggccaaggtgagaagccctaccactgcaactgggacggctgcggctggaagtt

SEQ ID NO: 263445 - DNA, 100 bp, Homo sapiens
ctccaatgtctaaccggagaagacatactggcagcaggaataatccagaatggctactctgatctatgttgataaggaaaatggagaaccaggcacccgt

SEQ ID NO: 263446 - DNA, 74 bp, Homo sapiens
gtccccccgttccctggaggtcctgtggaatgtcaccgtgaccccctcgggacagatcacgacctcgggggcac

SEQ ID NO: 263447 - DNA, 100 bp, Homo sapiens
gattttttgcctttgttgattaactggacaaattcagtttttacccacctcttgatgaaccatctattggaagtaaaaatgttgatctgtcaggacggca

SEQ ID NO: 263448 - DNA, 101 bp, Homo sapiens
gagccactcatttatgagagcgaccgtgatggggccattgaagacatcatcacagcttcgagagctgtgcccaggagtgaacaaccagccctacctctgtg

SEQ ID NO: 263449 - DNA, 75 bp, Homo sapiens
accccgcgcccgcaggacgccccagccagaacacggagagttcctggctctggatcttggagggaccaacttccg

SEQ ID NO: 263450 - DNA, 82 bp, Homo sapiens
caagacccagatgagcccattttagaatttagcttagatctaaactgcagaggtagaaagcagaaaacttggcaaatgacag

SEQ ID NO: 263451 - DNA, 98 bp, Homo sapiens
aaggaattaagagaagcaacatctccgaaagccaacaaggaaatcctcgatgatgctttcattggatttggaggaaatgtgatcaggcaacaagtcaa

SEQ ID NO: 263452 - DNA, 87 bp, Homo sapiens
cggaactggagaaagctgagggtggttaccctaacagctaatgataagacaagtgtttccttctcctccctcccgggacaaggtgtc

SEQ ID NO: 263453 - DNA, 75 bp, Homo sapiens
cggctccaggtgggctcacgcggcatacttccgacagggtgttgccctccagtaccttggacgtcatgccgatgc

SEQ ID NO: 263454 - DNA, 83 bp, Homo sapiens
acgaggtctggccaggcctctatctcggagaccagccctgggctgcatcttgtacctgctgtgcttccggcagcacccttttg

SEQ ID NO: 263455 - DNA, 100 bp, Homo sapiens
gcagagcctaagagaactatggcaacatcaggtgactgtcccagaagtgaatcgcaggaagggaaaaggccgaggcatcagcgtgtgaagaccgcaaaga

SEQ ID NO: 263456 - DNA, 100 bp, Homo sapiens
ggcattagcgaggaggaggcggcacagtatgaccggcagatccgcctgtggggactggaggcccagaaacgaaaaatggctacaaacttcctagcacatg

SEQ ID NO: 263457 - DNA, 52 bp, Homo sapiens
gcctgagagatctccaagaattacaggtccgactgcagacacagccaccgag

SEQ ID NO: 263458 - DNA, 100 bp, Homo sapiens
ccgactcccttctggaccaagacgactcctacgactgattcttgctattccaaatcctcttccacgttgacagcccttcagatatttcaacactcctctc

SEQ ID NO: 263459 - DNA, 90 bp, Homo sapiens
tttgtccaaaaggcggagtcagttaaaacaaatgatgttgaatttgaagtatcatcggaccgacggactgggaaacccattgctgttaaa

SEQ ID NO: 263460 - DNA, 100 bp, Homo sapiens
tctgctctcactggcattcctcttcccctcatcaagaaagtctcctgctttcactgcggtcccgcttagcgacccgccgccgccgccaagcgaggctgag

SEQ ID NO: 263461 - DNA, 50 bp, Homo sapiens
aaaagcaacgtggggcattccagcactctttcttcagcagtgccactttc

SEQ ID NO: 263462 - DNA, 105 bp, Homo sapiens
tggaggcgaggtagagttggggtcgcagaggcaaggaactgctccaccgccaatgaaacttcctcctccttataaagctctgactgatgacagtgatgaaaatga

SEQ ID NO: 263463 - DNA, 90 bp, Homo sapiens
cagcatctgacccacggtgggctgagtctgtccctgaggggaagtgttcgccagttactacatgaaaagataagagatgcttatactcac

SEQ ID NO: 263464 - DNA, 100 bp, Homo sapiens
gaacgaggcaaggagctaaagcagcgtgcgttcagccctggggagtggagtcaacatatcaatggagcaagtcacagtcgtcgatgccagcttcttcttg

SEQ ID NO: 263465 - DNA, 89 bp, Homo sapiens
aaggacactgacaactctgagggagggccatcactgtgcatgtccccatgccctcagcaggagtcgtggacatccccattgtggagaag

SEQ ID NO: 263466 - DNA, 74 bp, Homo sapiens
tcatctttacagaggaatagtctacaaaggaagacttgtaacctggagaagagttgctctaggtcgtaaccagc

SEQ ID NO: 263467 - DNA, 100 bp, Homo sapiens
cacgcacctgaccacggcaccccggtggaagagacgctgcatgcctgccagcggctgcaccaggagagcaacagcgagctcgccatcctgtccaatgagc

SEQ ID NO: 263468 - DNA, 75 bp, Homo sapiens
gcaggaatcccaatttgcctccacttagtgagcggaagaatgaaatgagccgtcagactgctacagcattaccta

SEQ ID NO: 263469 - DNA, 91 bp, Homo sapiens
accgtcttcggtctcctggggtcggcgccgagtgggaggatggcggaagtggaagttaaacgagctgagcctcgggacagcaagagccaag

SEQ ID NO: 263470 - DNA, 100 bp, Homo sapiens
ttttagtgcaatggtggccaacttgattcagtgtgttccagagtaccttcaagtttaaatctgagagtgatattcatttggcagaacatcataaacaggt

SEQ ID NO: 263471 - DNA, 74 bp, Homo sapiens
gcctctgcaatcatgggtcaccaagagaggctgagagaccaggtgcccctgggcgctgggattgctctagcctg

SEQ ID NO: 263472 - DNA, 75 bp, Homo sapiens
ggagtggaaacggaagcattttgtgagagggctggagggaagatctgccttctggagactgcgccgtcctcccgg

SEQ ID NO: 263473 - DNA, 90 bp, Homo sapiens
gtactttatgtggctgtgatcagggaaaatacaaggttcgccatcggtggtgtgaactcattgttaagcacaagttcacgaaagcctaca

SEQ ID NO: 263474 - DNA, 98 bp, Homo sapiens
ggaaacttaggggccacgtgagccacggccacggccgcataggcttgccttttgtcactgctccgaataaatttgaagctctggctgctcatgacgct

SEQ ID NO: 263475 - DNA, 100 bp, Homo sapiens
atgacaacgatgacgatgaagatgttcaagttgaggtggctgagaaagtgcagaaatcgtctgcccccagggtcgagcacgcacgcatgcatgccaagca

SEQ ID NO: 263476 - DNA, 74 bp, Homo sapiens
ggaaaggcacccatccttattgctacagatgtagcctcccgtgggctaggtgcgggcggcacccagagactcac

SEQ ID NO: 263477 - DNA, 87 bp, Homo sapiens
taaagttccagggaggccgcgaagagttctctgtggcccatgaccttcggcctggcctgctgcgccgtggagatgatgcacatggca

SEQ ID NO: 263478 - DNA, 98 bp, Homo sapiens
cgggcgccactgcagagcctgtccgtcagtccctaggtatccgcactgctcagggaaacctccacagctgttgagaaaaaggagaaacctcttccaag

SEQ ID NO: 263479 - DNA, 96 bp, Homo sapiens
attaaaggttatctacctagaacgttttggtactggaattacaactattatcctcctgtagagaaactatgttccaacttcctgtcaacaatcttg

SEQ ID NO: 263480 - DNA, 100 bp, Homo sapiens
atcgagcgcatcgaggatttggcgctgcagaaccagatccgggagcacgtcatctccatcgaggccaacacaagccatcagccccatgctcagctcccag

SEQ ID NO: 263481 - DNA, 100 bp, Homo sapiens
aaagaaatggcataatcttaaaacttgaaccttctgataacttaagagagattctccaaaatgtggccagattgcagggagtatcaaatatgagaaagct

SEQ ID NO: 263482 - DNA, 83 bp, Homo sapiens
gcgggaggtgttcgagaacgaccccgagacggttcatgatcaagagggcccaaggacggaagcgctttgggatgaagaatttt

SEQ ID NO: 263483 - DNA, 75 bp, Homo sapiens
gtgcaatcctggagccccccagtgaggtacttcctcctgtgctggttccaagacacagcgaatataatcctcagc

SEQ ID NO: 263484 - DNA, 100 bp, Homo sapiens
cgtgttcgcgggtgtgtgctgcgttcacaggtgtttctgcggcagttacagaatgtctgaaggggacagtgtgggagaatccgtccatgggaaaccttcg

SEQ ID NO: 263485 - DNA, 83 bp, Homo sapiens
ccggaagtgtatagggaaacctgggggctccctggacaactccgagcagcccgcggcgccatggctcacgtcggctcccgcaa

SEQ ID NO: 263486 - DNA, 95 bp, Homo sapiens
ttgacttggaagcaatgtttgaacaaactcgaagaacagctgtggaaagaagttgcaaaacactgggctttcttagaaatggcttctgaggaagc

SEQ ID NO: 263487 - DNA, 100 bp, Homo sapiens
ccagaccctggagcctcagttggaagcagccgatccagcctgcggagcctgtggggcagatatggaatgtgcagatgtcccactattaactccaagcagc

SEQ ID NO: 263488 - DNA, 100 bp, Homo sapiens
gaactgataaaacccaccagtctagggttctccaaaaaatgtggaatcctttgcatctatgctgagacattctcctcttacacagatgggacctgcaaag

SEQ ID NO: 263489 - DNA, 100 bp, Homo sapiens
agagccgggagttcaagaagaacactccagaggtcagggctcatcttctaccggaaaggggtgaaggctgtggaccccaagactggccgggagatccctt

SEQ ID NO: 263490 - DNA, 100 bp, Homo sapiens
gcggcattcccgggatggcggcggcgtggatggctccggcgcaggacactgcccatctctaagataagaacctggaaaggggactctgttggccattgga

SEQ ID NO: 263491 - DNA, 101 bp, Homo sapiens
ggtcaggacaattccatttggggaccagagatggacggtcactcagcctatggaggaagaaatgcagagtaacgtggaagtggtccacacctaccgccagc

SEQ ID NO: 263492 - DNA, 75 bp, Homo sapiens
tgggagcctagaatgcatcagtgcccttgtggcgaatggggctcacgtcgaatgcttccctgcaggtggacacag

SEQ ID NO: 263493 - DNA, 76 bp, Homo sapiens
aagttacctcagacagaaccctctggtcacaggattcgagattttgaagcagatgttgtcagaagaaagggtcgtg

SEQ ID NO: 263494 - DNA, 83 bp, Homo sapiens
caaggacacggtctacaccgacttcgacggcccactgctcagtggagcgtggaggacgaggaggaggccgtccacgagcaatg

SEQ ID NO: 263495 - DNA, 120 bp, Homo sapiens
gcttctttcttctggcatcattaacggaccttttaccatgaatagttctactccttctacagaagaagttggattccatgggttccaagagaagaagagctacctccccttccagcagtg

SEQ ID NO: 263496 - DNA, 82 bp, Homo sapiens
attgatctcttggagcagctggggatcatgtccacctggaaggccgctgtggtggaaggatgtttgactgcagagatgtggc

SEQ ID NO: 263497 - DNA, 74 bp, Homo sapiens
atttgtatagagatgtgatgttggagaactacagaaacctggtctccctagttcgaagcattcagcaaacaatg

SEQ ID NO: 263498 - DNA, 83 bp, Homo sapiens
gtgctgctgggattcgcgctgctgggcacccacggagcctccggggctggatgagacctgcacgcagtggctcacagcagcac

SEQ ID NO: 263499 - DNA, 90 bp, Homo sapiens
ctgaatttcccctatctgtttcaactgctggaagatgaaggctacaaaggcttcgtgggctgaaaccactatcagcggcctgaccccgga

SEQ ID NO: 263500 - DNA, 51 bp, Homo sapiens
ggagcaagtccgatggagaggctaagcctctggccaggctgccgcacctct

SEQ ID NO: 263501 - DNA, 98 bp, Homo sapiens
cgtctctctgctgcggcgcggggaccgctgtgctctcgacacctagctcccctgtttgacaaccctaagttggataaggagctgcgggcaatgctgag

SEQ ID NO: 263502 - DNA, 100 bp, Homo sapiens
gaaagtgagcagtccagaaagcggcttatcgaacagagccgggagttcaagaagaacactccagagagaaaacactcattgatcttcaaaatgaaatgag

SEQ ID NO: 263503 - DNA, 75 bp, Homo sapiens
cggcctacctcttcctctggcccgaagccttcctttatcgctttcaggatgtaatccctgttcattactacttaa

SEQ ID NO: 263504 - DNA, 100 bp, Homo sapiens
cagaagccaaaaagcattgctggtatttcgaaggactctatccaacctattatatgtctatcagccacagtctctgcaagtttccaagagcagcagaaaa

SEQ ID NO: 263505 - DNA, 108 bp, Homo sapiens
cttcgttccccgccaaccgcaaccattgacgccatgtcgggttattcgagtgaccgagaccgcggccgggaccgagggaggtgaagtgaaatctgcaagagtcctgct

SEQ ID NO: 263506 - DNA, 96 bp, Homo sapiens
gatatgagtacttttattgatgttgaagatgaggacctgcagagaaacgcctcctgattttgtcttacaatggaacttaaaaagtcgcctgacggt

SEQ ID NO: 263507 - DNA, 89 bp, Homo sapiens
gccatgtcgggttattcgagtgaccgagaccgcggccgggaccgaggataagatttgtgaccaaatcagtgatgctgtccttgatgccc

SEQ ID NO: 263508 - DNA, 104 bp, Homo sapiens
cgaagtggccaagaaggagaagcagctgcggaaaatgctagaaggaacttgctactaccagcaccatgccctaccaatatccagcactgaccccggagcagaag

SEQ ID NO: 263509 - DNA, 100 bp, Homo sapiens
gccaaagatgatatcaagagggtcatggcggcgatcgagaaagtgcgcaaatggtaagaatgattgatgttggctgatattggagtgctcattcacatga

SEQ ID NO: 263510 - DNA, 75 bp, Homo sapiens
caacaatcaaagacaatatcaatgacaaactgacggaaaaggagagagaattcatgttacatgtaaagctgtcct

SEQ ID NO: 263511 - DNA, 50 bp, Homo sapiens
gcgtggtggactgtggcaccggtagaacttcatggaggaacacggagtga

SEQ ID NO: 263512 - DNA, 50 bp, Homo sapiens
ctgcattttgccacatgctggatatcttctaccctcctcatctttggaag

SEQ ID NO: 263513 - DNA, 100 bp, Homo sapiens
caaccaccgccctggccatctaccatgtggttatccggtgttggctcctgctgcttactatgaccaaactggtgcccttgtagtgaatgcaggcgcgaga

SEQ ID NO: 263514 - DNA, 98 bp, Homo sapiens
gccgcgacgcccggcccgcagggcaggatccaccttgatgttcagtgaagagtaccagaaaagtctgctagagcagtaccatctgggtctcaatcaaa

SEQ ID NO: 263515 - DNA, 100 bp, Homo sapiens
tgtgctgccttggccaaaagagctgtgtggtatggaccaattttggggcattgctttaagagcacaatctggtgatgtcagtcgagcagctatccagtat

SEQ ID NO: 263516 - DNA, 75 bp, Homo sapiens
aaggggaagaggcccaccctggagtaaccctcactggagaatccagaggagctcttgtccctggcaaagcgaaag

SEQ ID NO: 263517 - DNA, 100 bp, Homo sapiens
ctcccatctcctgccatgtccaggttgcacatgagaaggaacagggaggcacctcccgaactaacaacttggagaccgggccctccacacggctgttcca

SEQ ID NO: 263518 - DNA, 82 bp, Homo sapiens
tgggaactccgccatgtcatccacttcgcccaacctccaggccagaagcggactcctagaagaggggagcagcaaggatgga

SEQ ID NO: 263519 - DNA, 100 bp, Homo sapiens
gaaaacaagcaaatgctgccttccttgttggatgctacatgctatctgcatcatattggtgcatttactgatccgatacagattacatttcttgccagag

SEQ ID NO: 263520 - DNA, 100 bp, Homo sapiens
ccgcaccaagctctgctccacactgccaaccggccagaggacgagtgtgccaccaaggtgttccagggcgtcctggagctggagggcgtcgagggccagg

SEQ ID NO: 263521 - DNA, 100 bp, Homo sapiens
cgggagtggttcgctacctttctgtttgtgcagggtacctgctcttccgagacttctgcctgaaccacctggaggaggccaggcccttggtggaattcta

SEQ ID NO: 263522 - DNA, 100 bp, Homo sapiens
gcattgcccgactccgtaggagcgcgggggcggctcctgctcttcctggactcctgagcagaggaatgtatcctgtcaggtataatgtcagtgaatggca

SEQ ID NO: 263523 - DNA, 83 bp, Homo sapiens
ccggcgccgaggcggccacccgagacgcggcgcgcacgctccggcctgcgcaaaatgatgcttcaacacccaggccaggtctc

SEQ ID NO: 263524 - DNA, 50 bp, Homo sapiens
gggactccctggaaacctagaaatgacaatgcagatcttcgtgaagactc

SEQ ID NO: 263525 - DNA, 99 bp, Homo sapiens
cctccgggcccgcccccggcctatgcccccactaacggggacttcacctttgtctcctcagcagacgcggaaggtgagtgctccagttgtaacatctac

SEQ ID NO: 263526 - DNA, 74 bp, Homo sapiens
gtacctgcgctatgaagacacgcttcttctggaagaccagccaacaggcagacctgttatcctaaactaggtga

SEQ ID NO: 263527 - DNA, 90 bp, Homo sapiens
gatggcggccatcagcaacactgtccagttcttggaggcagagacccgtgctgagtttgctgagagatcggtagccaagctggaaaagac

SEQ ID NO: 263528 - DNA, 100 bp, Homo sapiens
attctctttggaatgggaaatcctctgcttgacatctctgctgtagtggacaaagatttccttgataaataacgaaggaggcccaacttcattcaataag

SEQ ID NO: 263529 - DNA, 75 bp, Homo sapiens
ctcctgcccagcgtggtggggcagcagaagctccagagcccagacttgcagccgtttacctctgcaagagaacaa

SEQ ID NO: 263530 - DNA, 51 bp, Homo sapiens
atgcagtcactacccctgagctgatacgtaggtaacctttccagagatgtg

SEQ ID NO: 263531 - DNA, 100 bp, Homo sapiens
agacccctctgctgcaccacttcatggggaaggaggagtttgagaagacccagaaggagctgctggaaaagggcagcatcacgcggcagggcaagagcca

SEQ ID NO: 263532 - DNA, 100 bp, Homo sapiens
gaccagcgcccgaaggccgacacgctggccctgaggcaacggctcatcaggccagttttaccaggaggtgctctggggatctccagcagcatcagatgac

SEQ ID NO: 263533 - DNA, 105 bp, Homo sapiens
ccactacctcctcgtgctcagcctggcgccggagctgaaacacgacgtgaaggtctcctgcaagcgcaaaatcttctaacgcaactacctcagcaaagccaagcc

SEQ ID NO: 263534 - DNA, 100 bp, Homo sapiens
cttgaattaaaactgaatgaactgataacggagaatggaactgtatgccagcagcttgttgtacaggaggttatattcaaaagaaaaaggaactgtgggg

SEQ ID NO: 263535 - DNA, 75 bp, Homo sapiens
tttcctattcggttcctgaaggaccctggtggaggaagaaaggtcgaagaattccatccactgacgccaacctgc

SEQ ID NO: 263536 - DNA, 80 bp, Homo sapiens
ccacccaccgccgccgcctcccagtggccggctcacctcattcctgccaagacccaggtccgtgttctcacagtgctgcc

SEQ ID NO: 263537 - DNA, 87 bp, Homo sapiens
ccagtttgctacggtctacggggcagagcaggatcaaaatacttgctggatggtggactcagagaccaataaaaataaactgcttga

SEQ ID NO: 263538 - DNA, 101 bp, Homo sapiens
ctcctgagtagctgggattgcaggtttgaggaagcgatgaaggaggctcatgctgtagatcaaaagcttgcagagaagcaggaagatgaagccaccctgga

SEQ ID NO: 263539 - DNA, 131 bp, Homo sapiens
aaagatagctgtggatcgagtgaacgctgctgatgggagataccatgtcctgtttctcggaacaggagtatgctgctgctgttccgctttgcgtcctcgctacaaacgcctggtggacaacatattccctg

SEQ ID NO: 263540 - DNA, 75 bp, Homo sapiens
agtctacctgcctacccgcgagtacccgtctgaacagactgataccccaatgtccttctttgactttgtggttga

SEQ ID NO: 263541 - DNA, 101 bp, Homo sapiens
ccaagggagcttctgtcccgaggaccaggggatgcgaaggtaataatttttcaccatgcatcggaaaaaggtggataaccgaatccggattctcattgaga

SEQ ID NO: 263542 - DNA, 75 bp, Homo sapiens
ctgatgcagtgtgtttcatccttcagcaaaaatggagctttacagacgggagtcttgttctgtcaccaggctgga

SEQ ID NO: 263543 - DNA, 83 bp, Homo sapiens
cagcttttcagaactgcagggaaacagccatcatgaggaaggtgggagtcaatcattttgacaagtctcctgaaaggaacagc

SEQ ID NO: 263544 - DNA, 75 bp, Homo sapiens
cagcctcaggcgtgcgcggacggtgtgcggtttgcagatggcgtgtacctggttctgctcatgggccttctggaa

SEQ ID NO: 263545 - DNA, 48 bp, Homo sapiens
agtggctgaggctggacagagcacagagtcaagggtccagagaaggag

SEQ ID NO: 263546 - DNA, 100 bp, Homo sapiens
gtttcccagaaaaaatgcccagcgcggcgcggggctgcggagtcgtccggagccgctgcgcggcggtatatattgcacccctaaaagccctagtacgtga

SEQ ID NO: 263547 - DNA, 98 bp, Homo sapiens
ctccggagacagcccaaatatcctcggaagagcgctcccaggagaaacaagcttgtaattccacatctgaagtcaaagatctattggaacagaaaagc

SEQ ID NO: 263548 - DNA, 75 bp, Homo sapiens
tgtaagcagctgaacgagaaccaagtgcggacgctgtgcgagaaggaggagacatcacagctttcccagatcggg

SEQ ID NO: 263549 - DNA, 98 bp, Homo sapiens
cctcccaagtggctgggattacagtgcccatcccctccaaagccagcagcctctcagccctctccttggccaaagacagcctggtgggcggcatcaca

SEQ ID NO: 263550 - DNA, 100 bp, Homo sapiens
tgggttcatttaccctttggtcggaacgagcgcatcagcgaggaggtggggctgctgcagctccttggggaccccccgccccagcaggtcacccagacgg

SEQ ID NO: 263551 - DNA, 100 bp, Homo sapiens
agacacacctaccaagaagccagtcaagcggccaggacggaagctcctgttttcttgtcagccgccagctgagggccattcgcagcttctccaggccacc

SEQ ID NO: 263552 - DNA, 74 bp, Homo sapiens
catcttagtctagggactgaggagtcgccgccgccccgagtcccgctttgcccgaagtttttacatacaaattc

SEQ ID NO: 263553 - DNA, 51 bp, Homo sapiens
ccggctgcctgaataaatttaagaagggatttccctggggaaagtcttcac

SEQ ID NO: 263554 - DNA, 100 bp, Homo sapiens
ccaaacccctagccacgacatggaagaatttttgcaacgcgccaaatctaaactgtttaaggaagaaatctctaaacgttttaaatcacatactgaccaa

SEQ ID NO: 263555 - DNA, 119 bp, Homo sapiens
aaaaagcaagctgaagacatcaagaagatcttcgagttcaaagagaccctcggaacgacatgtattcctctgagaaaccttggacagcagattttggtttaatatctgattgggacaac

SEQ ID NO: 263556 - DNA, 51 bp, Homo sapiens
cgatgccatcgtgatggcggatgagagattctgacatcaaagtacttgaag

SEQ ID NO: 263557 - DNA, 100 bp, Homo sapiens
gacagctttgcttctgataattttgcaaacacggatttcttcaagaagttcttatatgagccattgccagtagaatctcacctggaccactgtatgcatg

SEQ ID NO: 263558 - DNA, 90 bp, Homo sapiens
cggaccggcacgcgggcggggcacgaaacatgattcccgtgacagaattccggcagttctctgagcagcagcctgccttccgagtgctga

SEQ ID NO: 263559 - DNA, 100 bp, Homo sapiens
agattatatgactggggtttacgaggatatatagtcatagaagatttgtggaaggagaactttcaaaagtatggaagctccaaaaggaaagataccagat

SEQ ID NO: 263560 - DNA, 75 bp, Homo sapiens
gtggccgattactgcgagaacaactacatacaggctgaccggttccctgatgtgttacctgcttctgctactgat

SEQ ID NO: 263561 - DNA, 100 bp, Homo sapiens
atggagcccatcgcggctgacgagatggtcatcgagtacgtgggccagaatatccgtcagggcggcgactggcggcgcgatggacctgaccgggctcctg

SEQ ID NO: 263562 - DNA, 75 bp, Homo sapiens
tgctgtgggaaataatgatgtaaagggaattgacataggggatagcttaactattccagatgaattcacggaaga

SEQ ID NO: 263563 - DNA, 100 bp, Homo sapiens
gctgccgagaaggagggaggggaaacacaaagccggctacgcgctgcgaggtgctggagaatctggtaaaagcaccattgtgaagcagatgaggatcctg

SEQ ID NO: 263564 - DNA, 111 bp, Homo sapiens
ccaagaatggaaagtttctctatttcttaagatccagggttccagctgccactgggcccaagagatgggtgctctcctaggcgccccttcccctggcaggggccgaggacg

SEQ ID NO: 263565 - DNA, 75 bp, Homo sapiens
gacaaaggtcgcctttgctactaccgcgactggctgctgcggcgcgagacagcccacctgaggatattgaccata

SEQ ID NO: 263566 - DNA, 87 bp, Homo sapiens
aaggtcatcggatttttgcagaaacacaatgagaaggcaacagtatggaggtgcaagtagatattgagtcaaagccatccaaattca

SEQ ID NO: 263567 - DNA, 110 bp, Homo sapiens
ggcggcctggggcggcgcgacggctggtgcgcaggctcaggccacagggtcaccacatacatcgcccacccatggaggcggccggccaatgcccatgccagtgcgctcca

SEQ ID NO: 263568 - DNA, 50 bp, Homo sapiens
caaggacagcttttttcctgcaaggtggatccataaagaacccagccaac

SEQ ID NO: 263569 - DNA, 146 bp, Homo sapiens
cagatgtggtttccttattggagcaagggaaagaaccctggctggggaaaagggaagtgaaaagagatctgttttcagaaaccagcctggacaccaagtctgtgtcagaaggccacctcaagaggaacatcgtggtgaagaccgtg

SEQ ID NO: 263570 - DNA, 100 bp, Homo sapiens
acgcaataaaccaagcactctagatgccctcaactatgctctccgctgtgtccacagcgttcaaggtgactctggagaagaccttttgtttgggacatca

SEQ ID NO: 263571 - DNA, 100 bp, Homo sapiens
gaagaagaagttgcgaaggatccccaacggggaggccaacgtgaagaactatacacagaatgggattttacatatgctggacagaaataagagaatcaag

SEQ ID NO: 263572 - DNA, 75 bp, Homo sapiens
agcatccccaccatcaacatggagaacaagaccacgtgggtgacagagctgaatgaacctctctccaatgaagat

SEQ ID NO: 263573 - DNA, 100 bp, Homo sapiens
gactatgacgacttcaccaaagagctgaaccagtaccggcgtgccaaggagggcagcagccgcggccgagttctgggaggtgatcagtgatgaacatggc

SEQ ID NO: 263574 - DNA, 100 bp, Homo sapiens
gtgggcaccttgcgcttcttgcagtcggtgagagaacgccgagccgtcgccgcagcctccgccgccgagaagcccttgttcccgctgctgggaaggagag

SEQ ID NO: 263575 - DNA, 98 bp, Homo sapiens
catcattcggaagcaacagcggcagtcccctgcccaagcttttacaaagttgatcacagtaaatggacaagaatatcatcttcaacttgtagacacag

SEQ ID NO: 263576 - DNA, 83 bp, Homo sapiens
gccgtgaaggcgtcggccggaggacaccccatcgtgcaggtgtccttaagtttgctcgcttggtcaagtcctacgaagcccag

SEQ ID NO: 263577 - DNA, 100 bp, Homo sapiens
tgctggtggtactagctatggaaagctgacatttggacaagggaccatcttgactgtccatccaaaagtccttggatgaggatgacctaggtcctagaag

SEQ ID NO: 263578 - DNA, 75 bp, Homo sapiens
gcggtggctgcgggactgacgataccttctccaggcaaattccgttcccctgcagcaccatctcctttggctctt

SEQ ID NO: 263579 - DNA, 90 bp, Homo sapiens
ccaacgcatcatgccagggagccaagcgtcctgcccggccgtaaaattcaattcgtcataatctgtccctacacagcaagttcattcgtg

SEQ ID NO: 263580 - DNA, 75 bp, Homo sapiens
gagaaactggtgatgttccagaggagtttttcagaagaagtgaagtcaagatgaagaaccatttgcttttctggg

SEQ ID NO: 263581 - DNA, 100 bp, Homo sapiens
gtgagattgcagcctgctgcctcccctccaacagccacagctattggatttcccacccagaatctttaggtaaatgagagcaaagactcaggtggactga

SEQ ID NO: 263582 - DNA, 80 bp, Homo sapiens
gacattcctgggagctctgaggaatcgccgcaggtggcggaagtcacttttcaagaagatctccaagcagacctccgtgc

SEQ ID NO: 263583 - DNA, 90 bp, Homo sapiens
cgggcgcggccggagaccgtggggcccccggttgccgccccctcggcgtcgtatgtctcgtggggtgaatccctccttggtgagctggct

SEQ ID NO: 263584 - DNA, 100 bp, Homo sapiens
cttcgaccctgcccagcacgaccagctcatgcaggttggtgttcgaggaagagacattgttgttcttggtgtggagaagaagtcagtggccaaactgcag

SEQ ID NO: 263585 - DNA, 75 bp, Homo sapiens
gctccagaaattctgcttggtgatgagtatgatgcacctgcagtagatatggacatttctggaattacagagccc

SEQ ID NO: 263586 - DNA, 74 bp, Homo sapiens
ctgccagtcctgctctgccgcctgccaccgctgcccgagcccgctgatgttctaatcatgtcagataaagatga

SEQ ID NO: 263587 - DNA, 90 bp, Homo sapiens
gaaagaaggggttcctggtcatacaccagtactaccaaggacagcttttttcctgcaaggttttagctaaagaagatactgaggcagcta

SEQ ID NO: 263588 - DNA, 50 bp, Homo sapiens
ccgggagctgggcggccatttaccaggccacggaaaggtatgatatattt

SEQ ID NO: 263589 - DNA, 83 bp, Homo sapiens
ccgcaaatgactggtcacgcgggactgaacaccgcacaggcaggaggcatggccaaggtattgcagttggacacatatatttt

SEQ ID NO: 263590 - DNA, 101 bp, Homo sapiens
cgcgtcggccgccgccgggcctgggttcctcatgggtgcctcctgtggcgggggcaacatgaaggtggacgattcggcctacgagagcctgggcctgcgcc

SEQ ID NO: 263591 - DNA, 75 bp, Homo sapiens
gggagatgaacccaacctagtgggtgtaatacatcatgaactgcagggtttatggctacaaatgatttgatgacg

SEQ ID NO: 263592 - DNA, 75 bp, Homo sapiens
cgcggaggcgacgccggggacgcccgcgcgacgagcaggtggcggcggctgcagactccgtgggaaggaggcttg

SEQ ID NO: 263593 - DNA, 51 bp, Homo sapiens
tcctgcaggatctcagtgatggccctcgggaccaaggatcacgtcatgact

SEQ ID NO: 263594 - DNA, 75 bp, Homo sapiens
cagcctgcggagcctgtggggcagtacaagtatcaagtactcacacccgggagagacagatggcaccagactcct

SEQ ID NO: 263595 - DNA, 50 bp, Homo sapiens
atggagtaagaggggttggctgtgaatatgttcctcctgctgatcaagag

SEQ ID NO: 263596 - DNA, 73 bp, Homo sapiens
agctctcagggatgctggtctggcagtcagggtcctcttgggataccaggctcttctggttttccaggaaatc

SEQ ID NO: 263597 - DNA, 90 bp, Homo sapiens
tgaacggcagccccaagaacggaaagttgctgatcatctgggctgtgatccacaaacccggttctttgtccctcctaatatcaaacagtg

SEQ ID NO: 263598 - DNA, 51 bp, Homo sapiens
ggacctaggtcgcggcgacatggtgaaacgtcggtctcgccgcagccaggt

SEQ ID NO: 263599 - DNA, 80 bp, Homo sapiens
gtggcggctcgggacggaggacgcgctagtggatcgtgggactttaccagatcggtttgtaataacacctcgaagacgct

SEQ ID NO: 263600 - DNA, 102 bp, Homo sapiens
tcccatcgcaaacccaaagatccccgttcctggagattctgattgagggagtgcatccgccccaacccttttccccctcgtctcctgtgagaattccccgtc

SEQ ID NO: 263601 - DNA, 96 bp, Homo sapiens
tgcaaacctggagccagaaacattaccgtcatattccacccattactaaggtgtggaatatcaaacaaatgattaagttgacacaggaacatatag

SEQ ID NO: 263602 - DNA, 101 bp, Homo sapiens
cgaagccattcagtcctcaatctccttttccttggctacccgtactactgagcgagtgtgcttgatccagggaacggttgaagcactgaatgcagttcatg

SEQ ID NO: 263603 - DNA, 139 bp, Homo sapiens
caactcttacatcagttaatagtagcaaatatgactggactggaaccatcaaacaaggctgcagagccataatgactttgttgccatcctggacctccctgagggagagcaccaatacaagttctttgtggatggacag

SEQ ID NO: 263604 - DNA, 100 bp, Homo sapiens
gcccagcacagccagcaccgcacgccctgcaagggaggtggccctcatgacactgacgctcttcccggtccggctcctggttgccgctgccatgatgctg

SEQ ID NO: 263605 - DNA, 100 bp, Homo sapiens
cagaaataccagtccccagtgagggtgtacaaatacccctttgaattaattatggctgaaaaggccaaagttgttgagcccctggactatgagaatgtta

SEQ ID NO: 263606 - DNA, 50 bp, Homo sapiens
cagctggcaaattcagtgcagatcagggggaaccgtgaaggactgagccg

SEQ ID NO: 263607 - DNA, 100 bp, Homo sapiens
cggcatgaggaccgccgcggggggacgtctgcggcccgcgtcggcgctggggacaaaggttgcagagaacacatcttagaagatgaaaaacctgaatcta

SEQ ID NO: 263608 - DNA, 82 bp, Homo sapiens
atcaagaacaatatcgacttccccggccacaactacaccacattagaaatgatatttgccaaatttgatgaagtgcaaagtt

SEQ ID NO: 263609 - DNA, 100 bp, Homo sapiens
tcgggatgtattcggctgaagagctcaaattggagaaagtttgaatattggtgttgtacaaactgcatatgcaaatggaagttcaacacggtatcttgaa

SEQ ID NO: 263610 - DNA, 100 bp, Homo sapiens
tcttgtacttggattcagcaaggaaccttccggctctctatgagaacatgctggtggagctgccctttgcaggcttctttctttccaagttgcttggaac

SEQ ID NO: 263611 - DNA, 90 bp, Homo sapiens
atggctggaggagcgtctctccgccactgcgcacattttgcagcctgcaccggccaacgatgtctttggtggacttgggaaagaggttgc

SEQ ID NO: 263612 - DNA, 100 bp, Homo sapiens
gcgcgagaggagcgacgaagagtactacgccaaggaggtttacaaaatagacatgccgcccttcttcccctccgaaagaagctgtggatcggaaaaggac

SEQ ID NO: 263613 - DNA, 75 bp, Homo sapiens
aaagattgaaaatatcagccatctaacagagctgcaagagttctgggcagaagattccgctgtgggggcaataag

SEQ ID NO: 263614 - DNA, 100 bp, Homo sapiens
agaaggctggtccaaaaacttcaaacttctgcagtctcagcttcaggtgaagaaggcagctctcactcaggcaaagatcctatagcaatggaactcagcg

SEQ ID NO: 263615 - DNA, 50 bp, Homo sapiens
ccgccatacgcgctctccctgtttagtaagactttgaccccgacgcaggc

SEQ ID NO: 263616 - DNA, 83 bp, Homo sapiens
cgatggtcttcctgctggggctcatgtttgaggcagggcaagaatcctttcgttccatcacaaggtcgtattacagaggtgca

SEQ ID NO: 263617 - DNA, 98 bp, Homo sapiens
agaatatggaggccatttcacctctaaaaaatgggatggttgtatcacggactgattcaccgagcccaaccgtactcaactcacatatttctacccca

SEQ ID NO: 263618 - DNA, 100 bp, Homo sapiens
gccccgagaacgcctccagcggggatgacacagaagagacaaagcatggaggacacaagaatgggaggaaaggcggactctcaggaacttcattcttcac

SEQ ID NO: 263619 - DNA, 90 bp, Homo sapiens
ggccatctttgctcctccctgcaactaactccattcttaattgttggacacgagcctgaacattggtctgtctatagaagatatcttgaa

SEQ ID NO: 263620 - DNA, 90 bp, Homo sapiens
ccgaggaaaaggaatcgtatcgtatgtccgctatccagaacctccactctttcggcgccatgtcagaaccggctggggatgtccgtcaga

SEQ ID NO: 263621 - DNA, 88 bp, Homo sapiens
ccagcacctttcggcttctgagacggcggcagcagcggcattcagtgccggtggtggtgtgcacattgagccccggtatagacagttc

SEQ ID NO: 263622 - DNA, 100 bp, Homo sapiens
gattcagcttgctttactctttcattgttgggacatgtatattgttgatcctcagtctgtccagaagtgggtcaaattttcttcagtatctgatggcttc

SEQ ID NO: 263623 - DNA, 100 bp, Homo sapiens
gatcacatgggccctggggccacagggacaggtttggtcattttccccggagcctttgactggtttctggaggttttgagcaaaattttggactgtgaag

SEQ ID NO: 263624 - DNA, 82 bp, Homo sapiens
gccaggcgctcgggggccgaactggccctggactacctctgcagaacaagttgaaatcatcgcagaaggataaagttcgtca

SEQ ID NO: 263625 - DNA, 80 bp, Homo sapiens
cgaggaggcgctcatcatcccccccgacgccgtcgcggtggactgcaaggatcttacacatttgttccatggcttctcag

SEQ ID NO: 263626 - DNA, 80 bp, Homo sapiens
ctatcagcggggggagaacgttactgtggagaaccaaccaagcagggaggagagagcgatggcttttttcacccagaagg

SEQ ID NO: 263627 - DNA, 90 bp, Homo sapiens
gtggtcagtttcgctttgattgctaccctggtatatgcacttttcaggctgttcggctcttgaatcccagcgatgaaaccaggaactcac

SEQ ID NO: 263628 - DNA, 74 bp, Homo sapiens
gctgatggcccctacctggtgatcgtggaacagcctaagcaggtggtgctgatgcagtgcaacattgagtcggt

SEQ ID NO: 263629 - DNA, 73 bp, Homo sapiens
ccaggcctgcgtccgagtctccgccgctgcgggcccgctccgacgcggaagcttgtcagctcatttgcagctt

SEQ ID NO: 263630 - DNA, 100 bp, Homo sapiens
gccagggacctcaaggaagcttatgacagatgcgtctgttactagagtggagagtctaccttcgtctcacatgtgccacaaaggatggcatggcccggga

SEQ ID NO: 263631 - DNA, 59 bp, Homo sapiens
gagcagcagaaacgctactttccaggaacgatttgtaaccctggaccgcggaagtctat

SEQ ID NO: 263632 - DNA, 83 bp, Homo sapiens
gaaacacttcttttattttcctgtaatatatctgtatcatcggagatcaatgtccgagttaccaccatggatgcagagctgga

SEQ ID NO: 263633 - DNA, 75 bp, Homo sapiens
agcggcctgatctgggttccgctgattcctttcgtaaccgcaccacacccgagtttttgatgacggagatgagaa

SEQ ID NO: 263634 - DNA, 75 bp, Homo sapiens
agaaggccattgacatctacgaacaggtggtggaagatggatatgaattttttgctaaacgacagttggtaacct

SEQ ID NO: 263635 - DNA, 100 bp, Homo sapiens
aaagaaaaaaaaatgataaagaagaagtcaccgtttctacctggacttaaccaccaccatgtcgagcaaaagaacaaagaccaagaccaagaagcgccct

SEQ ID NO: 263636 - DNA, 97 bp, Homo sapiens
caaaattctacgttagagagactgaaaagacatctaatttcattgctcggcagaatgaccagtcaacaggggacataaaagtaattggtggagatga

SEQ ID NO: 263637 - DNA, 82 bp, Homo sapiens
gcttttgccaaagggaacctgactttcacagctcagtacctaaggaagaaggtagataatgactataatgcccttcgagaaa

SEQ ID NO: 263638 - DNA, 82 bp, Homo sapiens
atcattgcccaaggcctccctttttgtcgaagacggtttttcagaagaagtgaagtcaagatgaagaaccatttgcttttct

SEQ ID NO: 263639 - DNA, 89 bp, Homo sapiens
gagccgacttggaaactcaaggccaatctcaggttgagacatgagcccccctccatgcgcctgaaggcccgacccagcagccctggctt

SEQ ID NO: 263640 - DNA, 100 bp, Homo sapiens
ctgcagcctttgtgcccatcaccagctctacagcctgccctcaagtatgtgttgtatacattggttggctttgtgggttttgtaacccattatgtgctgc

SEQ ID NO: 263641 - DNA, 82 bp, Homo sapiens
cctccagaagacatccttcacccctgtaggaggaaggcattactgggtaccggccaagaggctgtttggtggtcagatcgtg

SEQ ID NO: 263642 - DNA, 90 bp, Homo sapiens
cggcgcgatggagcagcgaaaacgtggttgtagagttccgtgactcccagagttgcatgctgagaatttgaaaaatgaagatgatgtaga

SEQ ID NO: 263643 - DNA, 133 bp, Homo sapiens
cggagcccggcggagcccgggcggcccgcggacgccaggagcctcctcgggcagcgagattgctttttttccggaattctcacactcaagaaagcaaatgaacttcttctgagcacaggcatgcccggcagtt

SEQ ID NO: 263644 - DNA, 90 bp, Homo sapiens
ctggaagcaatgaggacagcttgtgaaggcgctaaggcacatatactcaggggtcctcataaacaggtactctttgagcacatcaaattc

SEQ ID NO: 263645 - DNA, 75 bp, Homo sapiens
tgggcctgcccaacaacgccgagagagtcctccttaccacacagggtggcagagcgagctctctattactggaat

SEQ ID NO: 263646 - DNA, 96 bp, Homo sapiens
ggcctcgtgccgttacggccatcacggcggccgcagtggcgtcctggagccctcctcagatgacagtcatgtccctttccagggacctcaaggacg

SEQ ID NO: 263647 - DNA, 74 bp, Homo sapiens
tcatgctctggaattttggcatcaaggacaaacccaccttcatcaaaggggaccttcgggagaaaaactgggaa

SEQ ID NO: 263648 - DNA, 101 bp, Homo sapiens
gttctggtgccgcgcagctttccccggtccatggaggtgaaccacccagcacccctcagcctcttggaacttgcagcccacagcctgctgagcaatgaggc

SEQ ID NO: 263649 - DNA, 75 bp, Homo sapiens
ggaggggagccgggccaggaaggatggctccgtgaaaatgttcctgaggggccgccctgtgcccatgatgatccc

SEQ ID NO: 263650 - DNA, 100 bp, Homo sapiens
cacagtctaccatgaattggaagcctcctgttcaggtatacggtattgaaggtcgctatgccacagctctttattctgctgcatcaaaacagaataagct

SEQ ID NO: 263651 - DNA, 98 bp, Homo sapiens
ttggagcgaggctatcacaagctgcaccagcttctaaccgactggtattccctctcgagtggtttccactcaacaagcccagtgttggggactacttc

SEQ ID NO: 263652 - DNA, 100 bp, Homo sapiens
gacaactgaggaaactgctagtatttctgggagtcctgcagagtctagttgccaagtggaacattcttgtacagaatgagcacatgttgttggtgtacgc

SEQ ID NO: 263653 - DNA, 82 bp, Homo sapiens
gaaattggaaaagctatttctcaacggtatataccctctcagtgtctggagaccggctgattgtgggaacagcaggccgcag

SEQ ID NO: 263654 - DNA, 80 bp, Homo sapiens
cacttgctctggagggaagagcgatgggagaggcccttgatgagcctccctatttgacagtgggcactgatgtgagtgct

SEQ ID NO: 263655 - DNA, 83 bp, Homo sapiens
cccagaaatgaacctgcccacggtgtccgcgctcagggacttaaacaggcacaatcaaaaccatctcagtcagaagtcagagc

SEQ ID NO: 263656 - DNA, 100 bp, Homo sapiens
cccacacttcgcggcttcttcatgctttttcttctcaccatttctggccaaaactacaaacaagacttcgcaggtgtcgtgaaaactacccctaaaagcc

SEQ ID NO: 263657 - DNA, 102 bp, Homo sapiens
gcgtggagatatggcgcaactgcggcgcagaggagctctaaattgggaagtaatgcaggaaacaagccttgtaaaaatcaacttggattcacttttcagtta

SEQ ID NO: 263658 - DNA, 88 bp, Homo sapiens
cgcgccggatgcggagcgcggtgctgccggtggagcttcagaaatgcactcggtgatggaaagagagccactattctgaagaacactt

SEQ ID NO: 263659 - DNA, 98 bp, Homo sapiens
tcaggccgatccgctccgctcacggttcatcctcagcagcaccggcttctttttgaagtgtttgacgaaaaccgattggtaagttatattgtgcttat

SEQ ID NO: 263660 - DNA, 83 bp, Homo sapiens
cgggatttgggtcgcagttcttgtttgtggatcgctgtgatcgtcacttgggatgtttcagcagcccctgagaaggaagagga

SEQ ID NO: 263661 - DNA, 74 bp, Homo sapiens
gtgaaccaatagacggaattgatgctgtcctcattgcaacgtggttggtttttttgaagaagcaggatgctgat

SEQ ID NO: 263662 - DNA, 83 bp, Homo sapiens
gatgctggagaactataacagcattgtgtcattggtgactgcagatgagctgtggaaaggcgctttagcagagactggtgctg

SEQ ID NO: 263663 - DNA, 100 bp, Homo sapiens
ggagctgacagagtgatgggaaacgcgtgagccaggccgagaggatgttggcaaaggatgaactgatgaccatacttgagaaatgtttcaaggtttttaa

SEQ ID NO: 263664 - DNA, 83 bp, Homo sapiens
caaggcactgctttttcatgacgggggatatgagactttctactcggaatatcctgagtgttgcgtggatgtaaaacccattt

SEQ ID NO: 263665 - DNA, 100 bp, Homo sapiens
attacctggaacttcatcatcatctacttcacaggaattgccatttcccaccttgggacaccttgactccaagcccagcagtaagtccaacatgattcgg

SEQ ID NO: 263666 - DNA, 76 bp, Homo sapiens
tctggaggagcagttgtctgatgaagagaaggtcttgccccagaagctgcgggcacatccacgcctgaaatgcggc

SEQ ID NO: 263667 - DNA, 99 bp, Homo sapiens
tgagcacccaaaggtgatgagcacggaaacccaggccgcagcctcacagatggcgcagtgaatttgctggacacgtcgaccatccacggggactggggc

SEQ ID NO: 263668 - DNA, 74 bp, Homo sapiens
ccgcggcgcaggaggcggtggagcgcagagcgggcgagcgcgaaggaagaatcctgctcaaaaatgaggtgaat

SEQ ID NO: 263669 - DNA, 49 bp, Homo sapiens
atggcatagtcacctgggcagcatgaagctttctaaaaccaatttttcc

SEQ ID NO: 263670 - DNA, 75 bp, Homo sapiens
aaagatccccttaagatcaactctatgatgtcgcacgcggccacaagcgccttatgccgctccataaagctgcag

SEQ ID NO: 263671 - DNA, 100 bp, Homo sapiens
gggcatacatctttcttcgacaaagggtgggagagttcagagcacacgctgctgagtggacagccaacgtcacagccgaattcaaagaaaccaggaggcg

SEQ ID NO: 263672 - DNA, 80 bp, Homo sapiens
ggaggtcaacgaggtcatccaggtgggcttggtgcttgcatttcctgcgttgcagtgtcaggatttttcagggatcagcc

SEQ ID NO: 263673 - DNA, 139 bp, Homo sapiens
caccgccgccgccgccccctcctgaggaggacccagagcaggacagcggcccggaggacctgcctctcgtcaggacccagatgatgtggtaccagttggccaaagaagagcctggtgttggtgcatgtgctttggacta

SEQ ID NO: 263674 - DNA, 74 bp, Homo sapiens
gggccgctgggagccgttattggctgccgttaaggaccgttacgtttcccggtactaaggctcgtacgtctgca

SEQ ID NO: 263675 - DNA, 75 bp, Homo sapiens
atgactattgcaccacgcccggggggacgctcttctccaccacaccgggagttaccaccaccctgtgaatctgcc

SEQ ID NO: 263676 - DNA, 75 bp, Homo sapiens
cccagtactttggcatcaccaacagtcagctcaagccagacacatgtatgcaaccactcatgtattcggttcagg

SEQ ID NO: 263677 - DNA, 75 bp, Homo sapiens
cccctcgcctatgccttcagacatcaccagccaggacggccttagcaagatttcgccaggctcagctggaagagg

SEQ ID NO: 263678 - DNA, 100 bp, Homo sapiens
agagtatctactgacaaaagacagtggacatttgggagcaataaaaataagaagaaaggaaaagccagaaaaatagagaagaaaggaaccatgaagaaac

SEQ ID NO: 263679 - DNA, 51 bp, Homo sapiens
caatgctggatttccatgaacaacaggaacacagaggacgatcgccccccg

SEQ ID NO: 263680 - DNA, 83 bp, Homo sapiens
cgggcggcgcgggcgcgggcgctgcggcgggacagctcgacgcgcagctccagctccagaaatcccagtacctgcaactgggc

SEQ ID NO: 263681 - DNA, 96 bp, Homo sapiens
ggtctaaagcagcaacatctatttggaacaagatggggaggagggcaaaatacttcaaagggaaaaagatccatggagaaattgacattaaagtag

SEQ ID NO: 263682 - DNA, 74 bp, Homo sapiens
ctgtccagcatccgaccaccgaggctggagggggagaacacccaggtcaaaatgcagatcttcgtgaaaaccct

SEQ ID NO: 263683 - DNA, 98 bp, Homo sapiens
cagtgagcgtctcgttcaatatgtcaagccccactgtgttctccttgcctcaaaagaaaactcggcacctgttaaacttggaggctttggggtagcta

SEQ ID NO: 263684 - DNA, 100 bp, Homo sapiens
acaacccatacaaacaacctggaggtgaggtgattcgcctttgccagtctcatctcgtgtctgctttgttaagttccatgatccagactcagcagttgtg

SEQ ID NO: 263685 - DNA, 110 bp, Homo sapiens
tttccacacattgcgagctgtaatgcgtaatcctgaagaggatggaaaagattatgtgatagaaaagctggagcaatgcgggttctttgacgacaacattagaaaggaca

SEQ ID NO: 263686 - DNA, 75 bp, Homo sapiens
ataaaaacaagtgtgtgcatctggctgttagaagaattcatgctcatccgggctaactcaggtgagatggagccg

SEQ ID NO: 263687 - DNA, 75 bp, Homo sapiens
agaaaagaagaagaacaagctacagagacacaacccattgtttatgagcttcttcgagacaccttcacttccctg

SEQ ID NO: 263688 - DNA, 96 bp, Homo sapiens
tggagaaacatgcagattatatcgcatcctatggctcaaagaaagatgattatgattaaggctgctgtcccaagcatcaaattctgcttggacaat

SEQ ID NO: 263689 - DNA, 100 bp, Homo sapiens
tgatgccaactccttcttcccacgctgctactgcctgggggctgaggatgacaaaaaagccttcatagaatgcgaggaacgtggcattggaggcctacct

SEQ ID NO: 263690 - DNA, 88 bp, Homo sapiens
tctgggacctttttccagggtcaaagcagatcgtgaggaggaagctgaatctgaattatccagaacagaaagttgtgactgttggaca

SEQ ID NO: 263691 - DNA, 100 bp, Homo sapiens
ttcccacaacccccaagacggaactggttttggggacaccagggcatggacctgaaggagaagaaggagaaggtggaggagaaggcaagccggaaagagc

SEQ ID NO: 263692 - DNA, 51 bp, Homo sapiens
gggagatagacgctgctgcctctgaactgtcccaagcaataaacagtggta

SEQ ID NO: 263693 - DNA, 75 bp, Homo sapiens
ccgcggggttagccactgctggctgcttccagtgttcgccgagaggtgcccgtggttgacacgagctgtgtcccc

SEQ ID NO: 263694 - DNA, 78 bp, Homo sapiens
tgccgcccgccgctggcttcaagtgcaagaatgcccaggaaaaccatgggctggctgtgcccaccccctcggttccag

SEQ ID NO: 263695 - DNA, 136 bp, Homo sapiens
ctgaggctggccatccaggagatcatgtcgctgaccagcccgtctgccccgcccacatctagaacgggattccagcagaagttcaccttccacagcaaggagattgtggccatcagctgctcgtggtgcaagcagg

SEQ ID NO: 263696 - DNA, 90 bp, Homo sapiens
ctcctgtggtttttgattcaagtcctgttctacctactgccaattggaaaggatcgaagagcagtcataaaaccacaaagtcaacgcaaa

SEQ ID NO: 263697 - DNA, 75 bp, Homo sapiens
gctaagttgctgatcgtggcgatccagatgcagaggtgtgccttcatgtactgaggcttgtccagtctgtggttc

SEQ ID NO: 263698 - DNA, 101 bp, Homo sapiens
agaaacaagtgaccaacagttgaatcaaagtatggacacaggcgtctgtagaggcttctggtgaaatcgcattatgcaagactggatttcctgaagatgtt

SEQ ID NO: 263699 - DNA, 100 bp, Homo sapiens
aggacgcaaagttctccggcgagagataattgacgaccttgccaacctagtggagaacacagatgaaaaacttcgcaatgaaaccaggcgggtaaacatg

SEQ ID NO: 263700 - DNA, 97 bp, Homo sapiens
tttatcagttgcaacaggactgtgacctgagctgtcagatcaccattcccaaaggtgtcatggagaaactccagctgggcccagagattctgcagcg

SEQ ID NO: 263701 - DNA, 100 bp, Homo sapiens
aagagaagcagtgaaggagtgcagaggcatcacctgaaagtatggaagctccaaaaggaaagataccagattgatcttgatcacctctgcctccccagca

SEQ ID NO: 263702 - DNA, 50 bp, Homo sapiens
gaaacttctcaggactgacaaactggaggcttgaagctgcaaaagatgat

SEQ ID NO: 263703 - DNA, 83 bp, Homo sapiens
caatgtgggatcgatgtttcaatattggaagcgctttgatttacagcagctgcaggtttaactgacgctgctgcactggatac

SEQ ID NO: 263704 - DNA, 143 bp, Homo sapiens
acccgcggacatcgtcaaggtggccatagaatggccgggcgcctaccccaaactcatggaaattgatcaggtcctcgaggccacacgggttaatcgaagaaagagcgcactggctttgcgctgggaagcagggatctatgcca

SEQ ID NO: 263705 - DNA, 82 bp, Homo sapiens
aaggtcgccgaacccgcctggctagccggcgagttgagtggcgactaaaccaggtggacaggtgaaatgtcagtatatctct

SEQ ID NO: 263706 - DNA, 75 bp, Homo sapiens
gacgccggtcctactccagaagccggagtcattcaaggttgcccccaagtttcctggcagtgtgtgatactgagg

SEQ ID NO: 263707 - DNA, 100 bp, Homo sapiens
cgccctggtcccaggacacagttcacctgcgagtgctccatcggcttccgaggagacgggcgaacctgctatgagtggaatcaggaaaagcaggctgctt

SEQ ID NO: 263708 - DNA, 75 bp, Homo sapiens
ggcgttcacacaaactggtcagcgtttccctggagaggaagaggcaagatacttttctgctgtgagaatgtaaga

SEQ ID NO: 263709 - DNA, 75 bp, Homo sapiens
cttttcgtttccggaaacatggtatcgagaaccttccctgcgaacttcagaggaacttccagctgatgcgagagc

SEQ ID NO: 263710 - DNA, 83 bp, Homo sapiens
gttccatctgtggaaggacctaccaaccagcacccagtcagcttgaagagtttcaaatggaccctaccactgagaaatcaaga

SEQ ID NO: 263711 - DNA, 87 bp, Homo sapiens
gagggtagggtcgcgctcgcccgggcggcagactccatttatcttaaagaaattggacagcatatgaagacaggacatcacatatga

SEQ ID NO: 263712 - DNA, 88 bp, Homo sapiens
caccagcaaccatgagtggttccatgatgggaagtgacatggtaacacaagtggcaagacagccgggaacccctaccccatcccctta

SEQ ID NO: 263713 - DNA, 95 bp, Homo sapiens
ggcgcccggagccggcgtggcgctcatcgagggacgcccggcccaagtggctcttcagtcgtagagatccagaggaggatggaatgatgaaaaga

SEQ ID NO: 263714 - DNA, 71 bp, Homo sapiens
ccaagaactttggcctgatcgcatcattcctggagaggaagtttgacaagtatgcgcccaagctggacagc

SEQ ID NO: 263715 - DNA, 107 bp, Homo sapiens
gccagctcatgctgtacgctgagagggctgaggcacgccgaggaaactcattcaggcaagttcagccctttatgaggaattcccctgtggtcacattccaattcctg

SEQ ID NO: 263716 - DNA, 75 bp, Homo sapiens
cagctgcctcagttcttagcgcagagtaactggaatgagattgttgacagctttgatgacatgaacctctcggag

SEQ ID NO: 263717 - DNA, 98 bp, Homo sapiens
cagtcagcagtacattcctcatgggtacatggagttgactattccacctaagaacggagataattatatccagatcgagagacagaagattctgaaag

SEQ ID NO: 263718 - DNA, 90 bp, Homo sapiens
gaataggaacagatgtcagcaatgtcgcttcaaaaagtgtctgtctgttggaatgtcaagagatgcctgtcccaagccagatgatttacc

SEQ ID NO: 263719 - DNA, 100 bp, Homo sapiens
atgctagctatgtggtgtcagtgattgaacaaattttgcactacatgattcacaatgactacaccattctagattgcatttacaatgaggtaaaccagac

SEQ ID NO: 263720 - DNA, 82 bp, Homo sapiens
ctttctgggcgttcatgatcctggccagcctgctcatcgcctactgcagaaaacgaagccccctcctgtattgacagctggg

SEQ ID NO: 263721 - DNA, 82 bp, Homo sapiens
ggcggacggcgtggaccacatagacatttacgcggatgtcggcgaagagttcaaccaggaaattcgaaatgagtcccatgac

SEQ ID NO: 263722 - DNA, 90 bp, Homo sapiens
cacttgcatgtatttggaacaaaaaaaggagatgcctggcagccccgctctctgcagtcgggtcacaaatcttcgaagagtgacatatgt

SEQ ID NO: 263723 - DNA, 75 bp, Homo sapiens
tgcggaagtgcagctgcctcagttcttagcgcaggaaaccactgattgcttgtgtggagaaacagctattaggag

SEQ ID NO: 263724 - DNA, 75 bp, Homo sapiens
tttatcctcaagagtcagctggcaggttgcctggcagagcagtggtccggcaagaagggagacacagctgccctg

SEQ ID NO: 263725 - DNA, 83 bp, Homo sapiens
tcacctcgctactcgcttgcctacccgccggcccgcgggtctacttcctcaaagaggctgaggctgcagtggccacccaggag

SEQ ID NO: 263726 - DNA, 87 bp, Homo sapiens
gaaccctgagagctttggacactagtgaacaggagcgcatgaaaaggtactcaccagatgagctgcggtatctgccattaaacacag

SEQ ID NO: 263727 - DNA, 100 bp, Homo sapiens
cgtttccacgactttctgggagactcaagatgcagatgcctccagctattacgagtcccatggcaacaaggatcagaggcagagctgctttccatgccgt

SEQ ID NO: 263728 - DNA, 97 bp, Homo sapiens
ggccgagcgggaggcagccgtggccgagatcctgggcgcagtgatcctgggcttcggggtgtggatcctggccgacaagagcagtttcatctctgtc

SEQ ID NO: 263729 - DNA, 96 bp, Homo sapiens
tccccgagcagtttgagtccccttgcccgctccttcaggaaacattggcaaatttggagcgacagatctatgcttttgagggaagctacctggaag

SEQ ID NO: 263730 - DNA, 111 bp, Homo sapiens
accgcagtatcatgctggccaagaagatcatcattaaggacggaggcacggtttggtgcacctcgatttggaggaagtagggcagggcccttatctggaaagaagtttgga

SEQ ID NO: 263731 - DNA, 74 bp, Homo sapiens
atgttcactacccttcatgcatgaaagacaaagctactcaggtttttcttcccccagtccctcagctgctgctg

SEQ ID NO: 263732 - DNA, 83 bp, Homo sapiens
tcgcccaacagcagcaaccctatcatcgtctcctgtggctgggacaagctggtcaagacttattcgtctaatggaagagatca

SEQ ID NO: 263733 - DNA, 100 bp, Homo sapiens
cttattcatctgtccagcatgactcatccccgggagtgttgacccaggttcgggaaagcaaattcaggctgcaggacagctgcccgggccccccacaagc

SEQ ID NO: 263734 - DNA, 100 bp, Homo sapiens
acctctatagagatgtgatgctggagaattacgggaatgtgttctcactgggtacttcaggtcatgccttctgacagcttctttttttccattgtccgag

SEQ ID NO: 263735 - DNA, 83 bp, Homo sapiens
agccgcgcgcctttgtgcgcgcgccgagggggaccagaccgccttgcaccgggccacagtggtggggaacacggagatcatcg

SEQ ID NO: 263736 - DNA, 86 bp, Homo sapiens
ccggcggcggcgcgcagcgtgtcaggcggagagacccgccgccagataggaaccaaggctttagccttctcaactcattgactgga

SEQ ID NO: 263737 - DNA, 82 bp, Homo sapiens
tcccttttgcctcagatactattttgaaggtaggcacaacttacgtaacagataagagtgaagaagataatgaaattgagag

SEQ ID NO: 263738 - DNA, 100 bp, Homo sapiens
aaaagaagagcttgaagatctgaacaaagaaatcaagaaaactgcgaataaaattcgagccaagttaaaggggtgtccgcaatgttgccagtgtctgtct

SEQ ID NO: 263739 - DNA, 50 bp, Homo sapiens
gtgatgatagctttggagacagtttccagccaatggattctggtcaactg

SEQ ID NO: 263740 - DNA, 100 bp, Homo sapiens
gttcatgagtggaatccatgtttctggacgcggatttttggcctcatactctgttatagataaacaagagtgcctggaagagctgggatgtctggttgag

SEQ ID NO: 263741 - DNA, 99 bp, Homo sapiens
gccccctcacatctatgccatcacagacaccgcctacaggagtatgatgcaagatatgtcttgtcgttcaagacttgcaacactaaacgagaaattgac

SEQ ID NO: 263742 - DNA, 152 bp, Homo sapiens
cggttttcccagaacaggctgatttgcgtcttctgtcctggcataaggatcccttcactctcggaagtgttccggtatatttgaaggctcccatgattctgaatggagtctgtgttatctggaaaggctggattgatctccaaagactggat

SEQ ID NO: 263743 - DNA, 90 bp, Homo sapiens
agctctgcagccacatactatccgtttgttcaggaaccaccagtgacagaaaatgcactcggtgatggaaagagagccactattctgaag

SEQ ID NO: 263744 - DNA, 90 bp, Homo sapiens
atttaatggaaaatcgcttggttaaaacctgacacttttaacaggttacaggaaatacaggaggcagaggaacaaataaaagacaccacg

SEQ ID NO: 263745 - DNA, 75 bp, Homo sapiens
ggaaaaggtgccaagagcttagttgaactccttgtcatataaaagtgggtctggagtaaacaacagaagaactga

SEQ ID NO: 263746 - DNA, 96 bp, Homo sapiens
ggagcggcgccgcgtagcttccatccgccagctgccatgagcgagcgcctccgtcccagagtgtgaacatggctacgcctcttcattcccgtccat

SEQ ID NO: 263747 - DNA, 100 bp, Homo sapiens
tcaaaactttggatggccctactttcaggtaaaacctggctgtgccctgttgaaatcaattctgttgcagtcatatgcggtggaatctgttcttcttttg

SEQ ID NO: 263748 - DNA, 75 bp, Homo sapiens
gaaaacgagagtatatgcgatgagtttgggatcatagacggtatttctatgtaaacgaacagtcgggcgagtctc

SEQ ID NO: 263749 - DNA, 100 bp, Homo sapiens
gtattaccaggtccctgaaaagctaccccccaaagtcctggagctgtggtgaggtttatacatggggcgacaatgatgagggacaactgggagacggaac

SEQ ID NO: 263750 - DNA, 50 bp, Homo sapiens
gaccgacgtgatgggtatcctgatgggtgagtcaagtgaagacatagacc

SEQ ID NO: 263751 - DNA, 75 bp, Homo sapiens
ctgcaccaacactgcacttaaataagggcacacctagtcaggtatctttaggtggtgttgatcttacagtccggg

SEQ ID NO: 263752 - DNA, 83 bp, Homo sapiens
ctctccatcccttccgaggcccgacttcgtcaggatggctaaaggtgaccccaagaaaccaaagggcaagatgtccgcttatg

SEQ ID NO: 263753 - DNA, 100 bp, Homo sapiens
ccattgtgaaagaaggttgggttcagaagagggattctgtttctggcgtctgcatacgcaagtccccaactcgctgaggagagctgttcagctatggctg

SEQ ID NO: 263754 - DNA, 73 bp, Homo sapiens
agaaaccgccccagcgatggaagaggatcaggagctggagagatcgatgctatagaagacaaacaagggaagg

SEQ ID NO: 263755 - DNA, 73 bp, Homo sapiens
aaagagccctggactgtgaagagtgaggagaccatagctgcacagccagatctccttaggtgatgcacagtcc

SEQ ID NO: 263756 - DNA, 98 bp, Homo sapiens
ctttgaacatgctggtgccgctagccaagctgtcctgcctggattcgagaaatgatggagtccttcgaaggccctcagcctgcggatgtgaggctgat

SEQ ID NO: 263757 - DNA, 90 bp, Homo sapiens
ctgatcacaaacaaatccttgaaagaagaagatggagaagaaatagttacctatgatcgtctctaattaacagaagatggcaaagcccag

SEQ ID NO: 263758 - DNA, 85 bp, Homo sapiens
aagagcccgcaggctaccttccccgggcaggggcgctcaacccaaccggctccagggcactgaatggctattcaagtggacaagt

SEQ ID NO: 263759 - DNA, 50 bp, Homo sapiens
gcggcagagagcggggcggcggcaggtcttgtcaacggaaaggggtccct

SEQ ID NO: 263760 - DNA, 89 bp, Homo sapiens
ctttggtgccctcaacatctctcagagacgaaaggtaaatgagctggatggtatcccgttgatcctggacaactgcaacatcagtgaca

SEQ ID NO: 263761 - DNA, 82 bp, Homo sapiens
gaaaagaatacattcctgattacctgccacccattgtgtcttctcaagaaggattcaagttcgaaatatggcaactttgaaa

SEQ ID NO: 263762 - DNA, 88 bp, Homo sapiens
ggctctccctgggaggatctgacggaggggagatctattgggaaactgattataaccactcgggcaccatcgatgcccacgagatgag

SEQ ID NO: 263763 - DNA, 96 bp, Homo sapiens
tcccgaaatgagacttggtgcactctatacctactgggttcccctgcttggatttacactgggcaacgtggttggaatgtatctggctcagaacta

SEQ ID NO: 263764 - DNA, 75 bp, Homo sapiens
ctcagaaagtcttgacacagatagtcttcttattgctgccatgtttgaccgtgagaacaaggccggcgtgaactt

SEQ ID NO: 263765 - DNA, 75 bp, Homo sapiens
ccgatgcaccctttttgtcagattatcaggatgaggtttgctaatccagactttacacaacctatctcagaagtt

SEQ ID NO: 263766 - DNA, 91 bp, Homo sapiens
tgcaggcatccctgtagccccatccaggggacctcaccaagcagcttcctatcatggtggtgggggagcacaaggacaaagtgattcagtg

SEQ ID NO: 263767 - DNA, 97 bp, Homo sapiens
ccggcgcggggtcggcgctgggctggaggcggcggagcgcgagagcttcgagcggactcagggcacctttcacagccagcaggcattggaatatggc

SEQ ID NO: 263768 - DNA, 96 bp, Homo sapiens
gttggctgcaggagcagctagcacagggagccttggaaggagcccgaatcactgatggaattggacagtgcatggagatggttcagcaggacaagg

SEQ ID NO: 263769 - DNA, 87 bp, Homo sapiens
tggagagcgaggaggagcgggtggccccgcgctgcgcccgccctcgcctcacctggcgcagatggggacattggttttggaccttta

SEQ ID NO: 263770 - DNA, 83 bp, Homo sapiens
tgaccgtgtcttacatcagttcagagaggtttttagaacttcagccataaaaatgggcagaattttccttgatcatatcggtg

SEQ ID NO: 263771 - DNA, 82 bp, Homo sapiens
cacgtacttgtcatgagtcatatgacagaactgagcaacttatgactctcatctctgctgcacgagaatatgagatagagtt

SEQ ID NO: 263772 - DNA, 98 bp, Homo sapiens
gcggcaggctgaggagaaagcggcgcgcggagcaatggctgccatccggaagaaactggtgattgttggtgatggagcctgtggaaagacatgcttgc

SEQ ID NO: 263773 - DNA, 76 bp, Homo sapiens
agcggagaggagatgcacacggcactcgagtgtgagtctctgctttctatccgtcaagatgataaagtcgtgtgcc

SEQ ID NO: 263774 - DNA, 100 bp, Homo sapiens
caagaatcgtaggccaggctgatggagagctgaacattactcttccagaagagtgtctttctcgagaagcaggtggaaacatgagcattcagtttcttgg

SEQ ID NO: 263775 - DNA, 110 bp, Homo sapiens
cggccttcgcgagcgtctgggcgggtggtagatctctggaaacatggctacagaacatgttaatggaaatggtactgaagagcccatggatactacttctgcagttatcc

SEQ ID NO: 263776 - DNA, 100 bp, Homo sapiens
ctaggatcagaaacccgagtagaaagtaagtcagcagaagagcgagttcgcccgtgctgtgaaagtctctgctggatgaaccgaatcctaacagtccagc

SEQ ID NO: 263777 - DNA, 86 bp, Homo sapiens
taaggatcatgtctgcgagccaggattcccggattttttatcaagcagaaatgcatcgaacaacgagaatcaagatcactgagcta

SEQ ID NO: 263778 - DNA, 98 bp, Homo sapiens
gccgtagagatcgctcccactcaggtcacaggcagcacatggtctcctacagcgttcattgtcaatgatggggatgtccccgatgggctgaaccttgg

SEQ ID NO: 263779 - DNA, 80 bp, Homo sapiens
ctatcatcgtctcctgtggctgggacaagctggtcaaggtatggaatcttgcggcatccacgagaccaccttcaactcca

SEQ ID NO: 263780 - DNA, 90 bp, Homo sapiens
gggagattggcttcggggcgtctaccgctttgccactgataggaatgacttccggagcgggtcctcctcgccctggtatgatgccagcac

SEQ ID NO: 263781 - DNA, 98 bp, Homo sapiens
gcctggcgtcgccagtggctcctggggccttgactgacaactacacctttgcccaacctgggattcaaatgaaagtgaaaatgttagaagaactcgtg

SEQ ID NO: 263782 - DNA, 99 bp, Homo sapiens
ctcagatcaaaaagatactgactcatcggatagccatgccatcctgaaaacggccttccttgtttccatgtgatccccactatctcaagcatcgtcccg

SEQ ID NO: 263783 - DNA, 100 bp, Homo sapiens
cggagttgcgtcccggggacttggggccgcagggaggctccttcctcagagaagcttcctgttatgtaccttatggattctattgtgaaaaacgttggaa

SEQ ID NO: 263784 - DNA, 100 bp, Homo sapiens
cttctaacgacaattaatttgttagcttcctctggtcagcaccaatgttgttatgaattattcagagatcgagtctaaggttcgagaggcaacgaacgat

SEQ ID NO: 263785 - DNA, 99 bp, Homo sapiens
ctagcagaggaaaataagaacacagtggatgtcgagaacggtgcttctatggcaggatatgtgtacaagtccccagagtatgagtcccttggttttgag

SEQ ID NO: 263786 - DNA, 100 bp, Homo sapiens
aagaagctgctggagtgtcttcctcgctgcccgctgctgcctccagagaggctacggtggaatacaaatgaggcctgaagacggaagaagggagtgtcag

SEQ ID NO: 263787 - DNA, 111 bp, Homo sapiens
ctccatggccagtgaggaagtcttgaagaatagagccataaagaaagcaaagcgcagaaatgttggatttgaaacttaattcagtgcacaaatgagatgaatgtgaacatc

SEQ ID NO: 263788 - DNA, 74 bp, Homo sapiens
gcaaatagtacttcaagagcacagtcttatgtaaggttcttgattattacagacctctttctgaaaagcccgga

SEQ ID NO: 263789 - DNA, 82 bp, Homo sapiens
ccggttcttggtgggatctgagcaggagacacacggacatcgggaacggacggaggaaggatgtgcagttgcagccttttca

SEQ ID NO: 263790 - DNA, 75 bp, Homo sapiens
ctcccaagtagctgggactgcaggcccgacaacaagctcaaatacgtcaccaaatggcagaggacagcaaagcag

SEQ ID NO: 263791 - DNA, 75 bp, Homo sapiens
gataaggaccagtacctgcccaggaaactgattgtgaataagtggaatacagctctcattggccttatgacatac

SEQ ID NO: 263792 - DNA, 100 bp, Homo sapiens
cgctctgtgacctgcgggtattggatgattggtagctaagactcccgaatacttcagaagtggggaaatggttgtgaccgagattcccgacgagagagac

SEQ ID NO: 263793 - DNA, 76 bp, Homo sapiens
tattatgctacatgaaaaggaagaggccccttcacagatgtagtcactacaaatcttaaattgcgaaatccatcgg

SEQ ID NO: 263794 - DNA, 51 bp, Homo sapiens
tgaagattatcgcacgtttttacaggtccatgtgaaatctgaggtccttgc

SEQ ID NO: 263795 - DNA, 100 bp, Homo sapiens
tggagaagaaactcttttattcaacctttgccactgtgttcaagcagccctggccagggatcatgcgcacagtctatgggaaccacgaacgctttgagac

SEQ ID NO: 263796 - DNA, 90 bp, Homo sapiens
ctcggcgtcgctgccaccatgacgggaaggaggaagagttcatcgattggtggagcaaattctttgcctccataggggagagggaaaagt

SEQ ID NO: 263797 - DNA, 100 bp, Homo sapiens
atggaatcatctccagccgcctagcaggcaaggagcatctttccttgaagaagtacattattgacattgtggttgaaagtacagctccagcagaagcttt

SEQ ID NO: 263798 - DNA, 132 bp, Homo sapiens
gaagattttgctagagctgaaggctgtgataatgaggaagatcttcaaatgggcattcacaaggaatttctgctgaagattttttgcgtgttccggaacctgatgaagatgagtgtcttccctcgggactgg

SEQ ID NO: 263799 - DNA, 73 bp, Homo sapiens
ggccgaagcggcgcctgcccgggtactgggcctaatcgctacgtgcctctttggctatgatgcctatgtcacc

SEQ ID NO: 263800 - DNA, 93 bp, Homo sapiens
acttcaagaatgaagctgcggaccctcgcggcacggatgggcagaagcctttgcaggtatcagaagttcacatatcaaatatatctgcccgca

SEQ ID NO: 263801 - DNA, 98 bp, Homo sapiens
cggcgacatactacctctggccccgagatcagaatgccggtaatacattgcatgcaactggatcctgcaagaatcatttatcaggaaattctcttgct

SEQ ID NO: 263802 - DNA, 100 bp, Homo sapiens
aaccagttaatgcagatggcaccattctccagcaaggtggtggaggtggatacagcagtcggagaacatctggcagagacaaatacggaccacctgttcg

SEQ ID NO: 263803 - DNA, 90 bp, Homo sapiens
cctccggtaccgagaaagctttcgagccagcaaccgattgtttgttgacacaagtgtttactaacactggaccagataataatttggatg

SEQ ID NO: 263804 - DNA, 74 bp, Homo sapiens
cagcgcctgttcccggggcagatccaggttcaggatccacctctgatgttcagtgaagactaccagaaaagtct

SEQ ID NO: 263805 - DNA, 78 bp, Homo sapiens
aaccgtggctcacgagctgcagggagtgcaccagggcttgtcaatgaggcagatcagattcaggttcgacgggcagcc

SEQ ID NO: 263806 - DNA, 123 bp, Homo sapiens
ggaagaccgcgcgcagggcctgcagcgggagctggacggcgagcgcgagcggcgcgagaaaggtttccaggcctgaggtgcccgccctggccccaggagaatgaaccagccgcagaggatggc

SEQ ID NO: 263807 - DNA, 90 bp, Homo sapiens
cagagtcgtaatcgctctacccagtcccaggacgtggcgcgggtctccagtgcttcagtgcaagcagctaatgactcagtctgtagactc

SEQ ID NO: 263808 - DNA, 96 bp, Homo sapiens
cagagccatccttcgggagaggatatgtagcgaggaggaacgcgctaaggcaaagcacctggcctatatgaacccaatagcaatggcgagatcaag

SEQ ID NO: 263809 - DNA, 75 bp, Homo sapiens
atatcctcacacttcctcctggatgatggcatggaggaagcaatgaggctccccaagaacacacctgaggaaaag

SEQ ID NO: 263810 - DNA, 98 bp, Homo sapiens
atcttccctactatgatggtgtgtatgatggcctggcgacccattcaggcacttatggccatttcagccagaaaaaggtcactggtcagaacagcaag

SEQ ID NO: 263811 - DNA, 82 bp, Homo sapiens
agctataccagccaccctgcccccaagaaggaagtcatcatgggccggcctggaacaggctgatcagctgaccgaagaacag

SEQ ID NO: 263812 - DNA, 75 bp, Homo sapiens
ccagcagccgcgcttcagccagactgcttttcaggaagccttggacgctgcaggtgataaacttgtagtagttga

SEQ ID NO: 263813 - DNA, 75 bp, Homo sapiens
gccggcaggctgagaaaagcgagaccgcgtgcgaggaccggctgtgggtgagcgtggaggatgctcagatgcaca

SEQ ID NO: 263814 - DNA, 82 bp, Homo sapiens
ctgcggtcgaagaaggggacgccgacaagagccccacagtcttcgttataacctcacggtgctgtcctgggatggatctgtg

SEQ ID NO: 263815 - DNA, 100 bp, Homo sapiens
gccctgtttcagacagacctcatctataacctccttgaaaaactgggatacatggatctggcctcaagactggtgcttgtcaaaattcccaaaaatgatc

SEQ ID NO: 263816 - DNA, 100 bp, Homo sapiens
cgagagcgtgaccgagagcgcgaatatcgtcatcgttagaagtcctatggtctaggaataggctttttagctgtgactgtacattagaagctccaagaag

SEQ ID NO: 263817 - DNA, 100 bp, Homo sapiens
tgtgccacgccgcccaggagacccctctgctgcaccacttcatgctcggaatacctggccatcacctctgaaagcaaagagaactgcacgggcgtccagg

SEQ ID NO: 263818 - DNA, 90 bp, Homo sapiens
cgacgctgctggccagggtccagtgtggcaaaggagcagagaactttgacaagttcttcacacgaggacagcccgtcttaacaccacctg

SEQ ID NO: 263819 - DNA, 83 bp, Homo sapiens
ttcatgaagcgaattgctgcttgtcaggagcagattttgagatatacatctccagatttcctctatgttcgttcttggttacc

SEQ ID NO: 263820 - DNA, 96 bp, Homo sapiens
agaggtttcagggagcagcaagacaatcactgcagagataccaggtgccccctttcaaaggtctcagcatcctcacgctacctcctgccgccactt

SEQ ID NO: 263821 - DNA, 108 bp, Homo sapiens
attggctggttcctcttggaaggtgcatctgcagtacaggatatgaagaaattgagggttcttgccatggtgtcatggagaaactccagctgggcccagagattctgc

SEQ ID NO: 263822 - DNA, 74 bp, Homo sapiens
ttgtaataaaataaaagataatgacaaagaagatggctgcttctatttcagaatgggagctgactgatatggtg

SEQ ID NO: 263823 - DNA, 96 bp, Homo sapiens
ggatcgtgaccgagaccgtgaccgagagcgtgaccgagagcgcgaatatcgtcatcgttagaagatgctgcagttggagaagaaacttgaacgtga

SEQ ID NO: 263824 - DNA, 83 bp, Homo sapiens
agacactgttcaagtcatcagtcacgttcgatttgctgatcaggaagtaagatccctagctgtgacctggattgaggccatta

SEQ ID NO: 263825 - DNA, 75 bp, Homo sapiens
gcgccgtcccgtccgacagccaggcccgggagaactattgacctgaaaagtggttctggaaaagtgtaccaaggc

SEQ ID NO: 263826 - DNA, 76 bp, Homo sapiens
cattgctattcctgcaatgattattggcattcctgtgtatgtgggccgcaagttgctgatatgtgttcaagatgag

SEQ ID NO: 263827 - DNA, 75 bp, Homo sapiens
agcagctccgagccccagaccagctctcaggatgactttctccccccacccgctgcctgcggttttgtttctgtt

SEQ ID NO: 263828 - DNA, 104 bp, Homo sapiens
gaactacaggaacctggagtttgtggacaattccagggctttcgaatcgtgcttcagccttcctgaccgctctcgcctccaaagcccgaaaaatagagtcgctg

SEQ ID NO: 263829 - DNA, 51 bp, Homo sapiens
caggcgtgaagcaggagctgttgacatgcgattcaattagcagagcctcac

SEQ ID NO: 263830 - DNA, 95 bp, Homo sapiens
agtcaaaacaagaagacaaaaacattgctgaggcctgagagaagcagaacacatgattctgtgcagatttgcagaccagacagctgtccagctcc

SEQ ID NO: 263831 - DNA, 82 bp, Homo sapiens
cgtctctctgctgcggcgcggggaccgctgtgctctcgatcctgataacttaagtgactctctcttttccggtgatgaagaa

SEQ ID NO: 263832 - DNA, 82 bp, Homo sapiens
ttggatgctgccttgtccggtaccctgtcaggtgacttaagagattaaaattaatttggttgctgttggttctgaacaaata

SEQ ID NO: 263833 - DNA, 100 bp, Homo sapiens
cgctggcgaaggtggcccctacggctgcaaggacgctctgcgccagcagctccgctcggcgcgagagcaatcagccatgactgcctttgcactgtccatg

SEQ ID NO: 263834 - DNA, 83 bp, Homo sapiens
ccggacggcacaccctacgttaccgtgctcaagacctgcctagagctggaacgttacctccagagcgagccctgctatgtttc

SEQ ID NO: 263835 - DNA, 106 bp, Homo sapiens
cagattcgcagtggtcgcttcttctccttgttatccaagcattaggtgaacatcttaaattaagacaacaagttattgccactgctacggtatatttcaagagatt

SEQ ID NO: 263836 - DNA, 83 bp, Homo sapiens
ctgtcgctgcccgtgtgattactgagactcaggtgtcgtgaaaactacccctaaaagccaaaatgggaaaggaaaagactcat

SEQ ID NO: 263837 - DNA, 100 bp, Homo sapiens
ctttgactgtggggagaagccatcatttgacaggggaacacttaagaatctgtcctcaggaatatacatgctgcaccacagaaatggaagacaagttaag

SEQ ID NO: 263838 - DNA, 100 bp, Homo sapiens
tgggaaaccagcctgatcaggagatggtgtccgcctccgaatggcctgcagaatgatcacaaggcagtgatgaagcaggtggaggaggccctgcaccagc

SEQ ID NO: 263839 - DNA, 98 bp, Homo sapiens
gccaccgggcatgggaagtatgagaaggtgcttgtggaagggggcccggctccctaggcgtcccatctcggtttgaagatgccgcatttggattggat

SEQ ID NO: 263840 - DNA, 74 bp, Homo sapiens
gactccggcgctcgccatggccgacgaaaagcccaaggtgccaagtctagtggtggcagggaagacttggagtc

SEQ ID NO: 263841 - DNA, 100 bp, Homo sapiens
caaaacttaaaattgaagacataaaagaagccaacaaagcattgcaggttggaaaagagactgttcaaaccactgaggatcagattttgaagagagatat

SEQ ID NO: 263842 - DNA, 100 bp, Homo sapiens
gatacaactctggagtcctctgagagttcatggcctcccacgggaacgacgccgcgagagccaggtttgagtccaaagtaccctccttctactaccggcc

SEQ ID NO: 263843 - DNA, 100 bp, Homo sapiens
aatatggaggccatttcacctctaaaaaatgggatgggggatggcattcctactgtatttgtggcagtggcaggcagaagtaatggtttgggaccagtga

SEQ ID NO: 263844 - DNA, 86 bp, Homo sapiens
ccatgatccccaccttcacggctctgctctgcctcgttgttgacctcctgtactggagagacattaagaagactggagtggtgttt

SEQ ID NO: 263845 - DNA, 102 bp, Homo sapiens
tgatataaaagcagcaaatctacttttgggttacaaaaatccagaccaggttaatttggagtggcccctggagtcagtttcctacaccatccgaggccccac

SEQ ID NO: 263846 - DNA, 98 bp, Homo sapiens
tcattgcatttttccttggaacagcagcctgcctttaccagggatttatcaaagatgttcatgaagactcccttacagttgtttttgaaaataagtaa

SEQ ID NO: 263847 - DNA, 74 bp, Homo sapiens
tcccatgttgtgtatcctgtcccggggaatctagaagaagagatttccaaaatgagggagctcctggctagaaa

SEQ ID NO: 263848 - DNA, 75 bp, Homo sapiens
tcgcagtggtcgcttcttctccttgaacattatacatccatgggcataccaagttggatttcacagtctggcata

SEQ ID NO: 263849 - DNA, 101 bp, Homo sapiens
cctcctggaggcaaagttctggcagaacgaggcaatttccctccctgcaggcggaaggaaggcaattagagcggtacgagctcaactggaggcagtcctgt

SEQ ID NO: 263850 - DNA, 82 bp, Homo sapiens
tttcagagcgcagccatcggtgcgctgcagtatctttacgcgttcagtattgttcccatgaagctaatggatgcagcagaac

SEQ ID NO: 263851 - DNA, 96 bp, Homo sapiens
ccgctatggatgatcgagaggatctggtgtaccaggcgaagctggccgagcaggctgagcgatacgacgacagggtctcatcctgttgcccaggct

SEQ ID NO: 263852 - DNA, 100 bp, Homo sapiens
actttaattacttgagaatttataatggaattggagtcagcagaactgaaataggagccaaaaacctgtatatcatctccgtgaaggggatcaagggacg

SEQ ID NO: 263853 - DNA, 83 bp, Homo sapiens
agaagagcatgatcggcatgtccaccaagcacacttccaccctgggcagcgtgtttggggacgcgtactatgagcagcagatg

SEQ ID NO: 263854 - DNA, 98 bp, Homo sapiens
catcagcactgcctctggcatccccgacttcaggcggccttctgatctgtttaccacgtgagcaagcagctcggttctgtgcagagataaagtccccc

SEQ ID NO: 263855 - DNA, 100 bp, Homo sapiens
ctggctcagagggtcaggaacagagtcaatttcagggcctcattgctacgatttcagagtaccctggtaatagctgagcatgcaaatgattccctagcac

SEQ ID NO: 263856 - DNA, 83 bp, Homo sapiens
gaaggcgtctgcgagaccatggagaacggataacgaaggaggcccaacttcattcaataaggagcctgacggatttatcccag

SEQ ID NO: 263857 - DNA, 87 bp, Homo sapiens
aattctcataccctctatgacctggacaggggatgcacaaattatattaacctgggctccttcctcatcaaaccagtacagagagta

SEQ ID NO: 263858 - DNA, 85 bp, Homo sapiens
tcgcgaggagaagaggacggccctgagcaagtacgtgtcccaggcagaagcctcagctttgcagcagcagcagtactaccagtgg

SEQ ID NO: 263859 - DNA, 75 bp, Homo sapiens
gcagaaggtctctggagacatcttcagcagtgtggcaaaggagcagagaactttgacaagttcttcacacgagga

SEQ ID NO: 263860 - DNA, 75 bp, Homo sapiens
ctgcccgtggctccctcccagagcaaccctgcacaaaggttgcacgttttcaaaaaatacctaatggtgaaaatg

SEQ ID NO: 263861 - DNA, 90 bp, Homo sapiens
cgacactctgcaagattctctcctgaagtcccaggtgctggagaatctggtaaaagcaccattgtgaagcagatgaggatcctgcatgtt

SEQ ID NO: 263862 - DNA, 96 bp, Homo sapiens
agccaagtcaaaatattctccagaattactcaaataccgtcctcctcatggagaagcaaaagctggatcaagcacccttccaccagtgaaatcaaa

SEQ ID NO: 263863 - DNA, 75 bp, Homo sapiens
attcacggatcagcctgagatgatcccagctgtgctctggacaggggctcacacagtcgacaaaagaaaacgttt

SEQ ID NO: 263864 - DNA, 106 bp, Homo sapiens
gccccctgctggttgtgcgaaccccgggcagcccgggaaatctccaagtcagaaagccaaggccacctttgatgccatttctaagacctacagctacctgaccccc

SEQ ID NO: 263865 - DNA, 76 bp, Homo sapiens
agagttcacactgaagagcaaccctgaaaaattactgaatgtgaagaaatgaatccactgaagacctacatttccc

SEQ ID NO: 263866 - DNA, 90 bp, Homo sapiens
gggcgagtgaatctcgtgtctggccacgtgaagacccagctgatcgcccatgacaaagaggtctatgttaacaatgaatgggcaaccagt

SEQ ID NO: 263867 - DNA, 87 bp, Homo sapiens
gtggcttctgtttgactatgctgaacatgacctctgggtctctacagcggaacaatgtcgttcttcccccaaaagcatgatttgctg

SEQ ID NO: 263868 - DNA, 100 bp, Homo sapiens
ggaacggaagcctctatgtgagagataacactggcgtcctgagctgtgagactctttttgatcagaacaatgctgcaaaaaaagaagagtcagaaactgc

SEQ ID NO: 263869 - DNA, 116 bp, Homo sapiens
cccatcctgccgtccttctccactttcgccagcccgtgccgcgagcgcggcctgcaggagagtgcctggtgaagaatgtgatgggatcactagcatgtctgcggagagcggccctg

SEQ ID NO: 263870 - DNA, 75 bp, Homo sapiens
ggaggaagatggcggcgggggcgagcacctgaactcctggggggaccgtcagtcttcctcttccccccaaaaccc

SEQ ID NO: 263871 - DNA, 74 bp, Homo sapiens
ccgcttcatcgagtgctacattgctgagcagaacatggtgagaatgagatggtgatcatgagacctggaaacaa

SEQ ID NO: 263872 - DNA, 95 bp, Homo sapiens
ctcctgctgtaaggagtgcatgctgtgtcttggggccctttgggacgagtgctgtgactgtgttggagtcagtggatcggtggggaaaatgctgc

SEQ ID NO: 263873 - DNA, 100 bp, Homo sapiens
cttaacttctgctagaaattgttaccagcctctattagaaaatcccatggtgtcagaaagtgaattactctgcttaatgtaagcaagctgaacattttga

SEQ ID NO: 263874 - DNA, 75 bp, Homo sapiens
atggagcaacagcagcaactgcagcagcggcagtacaaaattggacagctgtacatgatcagcaaacacagccat

SEQ ID NO: 263875 - DNA, 100 bp, Homo sapiens
atttatgggaagtttggcagaatgtatatttgcttacttaaactaccatgttcctcgaacgagacgagaaatcctggagaccctaatcaaaggccttcag

SEQ ID NO: 263876 - DNA, 100 bp, Homo sapiens
ctgaggaagctgaagcagaggtttcccagggggacttgatctcatcttcatgccaggccttgggtttgacaaacatggcaaccgactggggaggggcaag

SEQ ID NO: 263877 - DNA, 100 bp, Homo sapiens
cgacaaaatactcttctccactcgctattgtggttagcaggaagaagatgagccttaagtctgaacgccgaggaattcatgtggatcaatcggatctcct

SEQ ID NO: 263878 - DNA, 74 bp, Homo sapiens
gacaagaagctcacccaggaacaagtatctgacaggccataggaaaaggatacagagtagagtttcatgaacct

SEQ ID NO: 263879 - DNA, 100 bp, Homo sapiens
aggcaccaattgacaacggttcaaaaatcaccaactaccttttagagtgggatgaggcattaaacgtcgtctttgaaaaaatcccggaaaacgagagtgc

SEQ ID NO: 263880 - DNA, 100 bp, Homo sapiens
gtcactgcaccctccgccaggctccgcgggatgcaccgtggtagccgagggcggaggcgacactctcagcccagaagaatcagtgcggtttctgtggcag

SEQ ID NO: 263881 - DNA, 96 bp, Homo sapiens
gcggctgtgaagccctagtcgagctctttgacatctgtcttgcccgagccaaggagaggtggcggtcccttagcacaggaggctctgaagtggaga

SEQ ID NO: 263882 - DNA, 80 bp, Homo sapiens
gccccacgcatccaccagttgtaattaatgctgcagatgatgatgaagatgatgatggctaaactcaaaatgggatctcc

SEQ ID NO: 263883 - DNA, 101 bp, Homo sapiens
atccccgaccacttgcggcctgagtatggggaacgcccttttgcttgtgactggcagggctgcgacaagaagttcgcccgctccgacgagctggcccgcca

SEQ ID NO: 263884 - DNA, 75 bp, Homo sapiens
tcggcctcggcgtgctgcgcctccgcggctgccctgcgccagggcacctggacgatgacggattaccgcacgggt

SEQ ID NO: 263885 - DNA, 83 bp, Homo sapiens
ggcgagctgggcgacggcgccttcggcaaggtttacaagcagaagatggctgtgccacccacgtatgccgatcttggcaaatc

SEQ ID NO: 263886 - DNA, 90 bp, Homo sapiens
gccagatatccgctgtccaattcccaggaggcggaccggaacatgaacattttgcagtactgcccctcttccgacatgtggacgctcttt

SEQ ID NO: 263887 - DNA, 100 bp, Homo sapiens
agcaggcagtgtgcctacaggtctacaaagaaacttcaggtttcttcttgaagggctcaaggaatgaagcatcccacaaaatgatcctgctgaataattg

SEQ ID NO: 263888 - DNA, 75 bp, Homo sapiens
ggaaccctggtcaccgtctcctcagcaaatatgccagaggattatcctgatcagttcgatgatgtcatggatttt

SEQ ID NO: 263889 - DNA, 115 bp, Homo sapiens
tggatttgagattccaaacttatttgtggtgggatatgccttagattacaatgaatacttcagagatctgaatgtcatttgaaccaattctccgcctccttccccagggaatctc

SEQ ID NO: 263890 - DNA, 100 bp, Homo sapiens
aatacgatgttgcagctcagccctgaagaaaagggaaaacttgctgcggttgctcaagacttcccaagtaagaagcggaagaggagccgctggaaccaag

SEQ ID NO: 263891 - DNA, 75 bp, Homo sapiens
atctgtgtcgttcttggcagaaattatattttccagcccgtgtctgcaggcagaagactgatttttggaaatatg

SEQ ID NO: 263892 - DNA, 75 bp, Homo sapiens
cctccggtaccgctgcagccaccgcggcccccgcgggggcataaggaaatggtggcaggcacttcctcctaacaa

SEQ ID NO: 263893 - DNA, 84 bp, Homo sapiens
cgctcttcaggcgcagtgtgcgttcagctgtgtcagctaatgggtgtactgatggttggacccccaggcactggtaaaactatg

SEQ ID NO: 263894 - DNA, 49 bp, Homo sapiens
cttcgtctatgtggcgcccggcataggagatacaactcgtcaacgaatc

SEQ ID NO: 263895 - DNA, 100 bp, Homo sapiens
caaaaatagtgatagctttgataagcctggcatgcgtgggcagtgatgaacttcgaagctgtgctacactacaaacatcagaaccaagcccgcgatgaga

SEQ ID NO: 263896 - DNA, 100 bp, Homo sapiens
aatctatgagatgaacaagagactgcagtctcgcacagagtgatctcagtgaaaaccaaattcaggcaatcccaaggaaagctttccgtggggcagttga

SEQ ID NO: 263897 - DNA, 100 bp, Homo sapiens
gatgatgggcaacgtggtaagaccagtgaattccacgaacatgagcccactgctgcacttctatggccgtaaatataaccccgttttcacacgaatggcc

SEQ ID NO: 263898 - DNA, 75 bp, Homo sapiens
gcagggaagccaccagctgctcgtcgtatcagaggagcagttcaaggagccttcacgtaaatgggtccagtcatg

SEQ ID NO: 263899 - DNA, 82 bp, Homo sapiens
ttggatgtggccagtcactggctgcacctccacagacagcatcgcacagaattattttaaaaaaaagcagtgatccaagcaa

SEQ ID NO: 263900 - DNA, 89 bp, Homo sapiens
cggttccccggcccacagtgggggtgtgcaaacccgagagaactgggctgcccaacatacatggatgttgtcattgtcttggatggctc

SEQ ID NO: 263901 - DNA, 82 bp, Homo sapiens
tttaagaaaaggcattgaggaactcaatcaaaccagtattcttttcacacagagtgaagatagtccaagtcctaagagacag

SEQ ID NO: 263902 - DNA, 103 bp, Homo sapiens
ggcgaggttcgggctggttgttccgttgcgagctgcagctgcgatctctgtggtaggcccagtgccggtggtggtgtgcacattgagccccggtatagacagt

SEQ ID NO: 263903 - DNA, 82 bp, Homo sapiens
gacacgctgcctgctgttgccacactcctcatggatgtcatgtcctacttcaatgggtgtggacactgccagcggctgcagc

SEQ ID NO: 263904 - DNA, 75 bp, Homo sapiens
actacgaccccagtgaccggccccgcttcaccgagctggtgtgcagcctcagaggcatttcatccttcatgaagc

SEQ ID NO: 263905 - DNA, 83 bp, Homo sapiens
cacctggaccttggacattcagacttcagaatggttccagcaacagatagaaatgctttaagttcactctggggaaagctggc

SEQ ID NO: 263906 - DNA, 50 bp, Homo sapiens
aactaccattcgcctgatgaactctcaggaaattgaacttagctcattaa

SEQ ID NO: 263907 - DNA, 83 bp, Homo sapiens
ctgtgctcgcgctactctctctttctggcctggaggctatccagcaataatcatgggccagactgggaagaaatctgagaagg

SEQ ID NO: 263908 - DNA, 98 bp, Homo sapiens
gggtgggttccagctgcccgcacgccccgaccttccatcagagacacatctcaattcaaaggcagcttgctgatctagagaatttagcttttgtaact

SEQ ID NO: 263909 - DNA, 90 bp, Homo sapiens
aacgacaagaaaaacaatcgcttcaatgatgggaaggtggatcccgccgggaggtactttgctgaaagcgaaacgactgatagtgtgccc

SEQ ID NO: 263910 - DNA, 100 bp, Homo sapiens
tgggaactggcttccagctgtttggctatgaggaaaaactgcagtccaatcctctacagcatctctttgaaaatttaagaagaggattacctcaggttcc

SEQ ID NO: 263911 - DNA, 75 bp, Homo sapiens
tcatggacacgctactttagctaaggcatgaccagcaatgaacagtagtaaggtctcggtgattcagaatacacc

SEQ ID NO: 263912 - DNA, 82 bp, Homo sapiens
ctgtgctcgcgctactctctctttctggcctggaggctatccagcggcgaccattgacgaggtggagacggacgtggtggag

SEQ ID NO: 263913 - DNA, 100 bp, Homo sapiens
aggcccggccacctctgagaagggagacgacgctgctgggtccgctgagcggggcgacccgaggtaaaataccatgaagattttgaaaaaacaaagggga

SEQ ID NO: 263914 - DNA, 83 bp, Homo sapiens
cgagggttggggactcgaacccccgcttcgcagctcaggagcctgaggtccgaaagaatcctggtaattgatgtccacccgag

SEQ ID NO: 263915 - DNA, 123 bp, Homo sapiens
ctctgccgagtctcaatatctgtcttcggtggactccttcggcagtccacccaccgccgccgcctcccagatgtgaagttcatttccaatccgccctccatggtggcagcggggagcgtggtg

SEQ ID NO: 263916 - DNA, 96 bp, Homo sapiens
aaaactggagagcttcatcaaaaatagtgatagctttgataagttaatttggagtggcccctggagtcagtttcctacaccatccgaggccccacc

SEQ ID NO: 263917 - DNA, 71 bp, Homo sapiens
ttcttccaaggaaccagtgcgaagggctgtaaagtgagggaccacatggttacacttcgtgatcaaggtga

SEQ ID NO: 263918 - DNA, 51 bp, Homo sapiens
cagaagttgaagcagcagcttatgcagattgaaaatggaagccctgactga

SEQ ID NO: 263919 - DNA, 75 bp, Homo sapiens
cctcaccatccctttcgccttcttcctgcccgagctgtttgtgaagtgtggatatgcaggctctaactttccaga

SEQ ID NO: 263920 - DNA, 50 bp, Homo sapiens
tatcttttctccactcatataaaataaacctctgcgccatgagagccaag

SEQ ID NO: 263921 - DNA, 51 bp, Homo sapiens
gaaatccggaattatcacagaacagaatgttgctgcgggatgtaaaagctc

SEQ ID NO: 263922 - DNA, 50 bp, Homo sapiens
agcagttctacaaggcgagccaggtttgatgaaatcctggaggccagtga

SEQ ID NO: 263923 - DNA, 75 bp, Homo sapiens
ccgcgctgacaggggggcctggccgcgcagccgaatagcctaacatggcagaccagagacagcgctcactgtcta

SEQ ID NO: 263924 - DNA, 111 bp, Homo sapiens
tgagagccgcagtggatggctggaggtgcagggccaggaggaacatgaggacagagcgggatgccaccagcttgtccaaagggaagttccaggagctcctggtgggcatcg

SEQ ID NO: 263925 - DNA, 104 bp, Homo sapiens
tgccaggcagaaggcctctctcctgatacagcaggcgctcaccatgttccctggaggtgagaagccctaccactgcaactgggacggctgcggctggaagtttg

SEQ ID NO: 263926 - DNA, 100 bp, Homo sapiens
acgtgctttcccattttgctcagcgactgtttgatgacgtcccgcaggcggttttggtgaataacatcaccacaggtgagaggctcatccgagtgctgca

SEQ ID NO: 263927 - DNA, 50 bp, Homo sapiens
attgaagttaactgttccccttggtatgacaacgaatttggctacagcaa

SEQ ID NO: 263928 - DNA, 100 bp, Homo sapiens
ggaggcatcggaggcggctgcgagagtggcagaggagctggcggagagcggcctgcgggcgatcgggccgagaatttaagggacgctgtgaagcaatcat

SEQ ID NO: 263929 - DNA, 100 bp, Homo sapiens
ccgagacctcagttcccggcggctcttgcggggcacagaaaaatggctacaaacttcctagcacatgagaagatctggttcgacaagttcaaatatgacg

SEQ ID NO: 263930 - DNA, 74 bp, Homo sapiens
tgtgagcggaaaggggcccggcgtctgcctcgagactgaagaccgccatggcaatgacaggctcaacaccttgc

SEQ ID NO: 263931 - DNA, 80 bp, Homo sapiens
ggaaggagtcgagagcgcagaccctgcagaatgcagacggttgatgatgaagcgccggccgtgtaaatgaagatcgggtg

SEQ ID NO: 263932 - DNA, 82 bp, Homo sapiens
ccggcagaacacagcagggcggaggaaagtgcagcctgccacagtgactcaggtcactcaaggaactatccgaccagctgcc

SEQ ID NO: 263933 - DNA, 100 bp, Homo sapiens
gacagtttcccttggccagtccctgttcttccatttccccccactgctcagagacggcgagtcttgccacttgcctagtgaggcttttccgaacctggaa

SEQ ID NO: 263934 - DNA, 104 bp, Homo sapiens
aggccgaagggtccccgggacccgcctgctgagtggacccgggtttctgggagatgattggtgaggaacacgggatcgacttggctgggagcgaccgcggggcc

SEQ ID NO: 263935 - DNA, 100 bp, Homo sapiens
cttgatgaaagaggctgcacacccctgcactatgcagctacatcagacacagatggcaatatctcctatagggctcttcaaactgtggtcaacttagtaa

SEQ ID NO: 263936 - DNA, 82 bp, Homo sapiens
agaccgggcagatctggcccaacgatggcgagggcgccttccatggagacgcaggagcttgaagaaatccgcaaatgtggga

SEQ ID NO: 263937 - DNA, 90 bp, Homo sapiens
aaaaacgagataactggttttgtgagccttgtttgccaccttccagagaagaggtacgagatgacaagacaaccataaagtgtgaaacct

SEQ ID NO: 263938 - DNA, 87 bp, Homo sapiens
gggccacgcacctcgtcaccaaggccaagatccaaaggggctattctgaacatttcatctggcagtggcatgctccctgtcccactc

SEQ ID NO: 263939 - DNA, 83 bp, Homo sapiens
acccggcgaagacgcgaccgcggcgcgagtcaccatgcgccgtgccgtccctgcagtgacaccgaggtgctcctagccgtctg

SEQ ID NO: 263940 - DNA, 83 bp, Homo sapiens
aacaggattccacagtgtcctctggaaaatggagaaaagccttacagatgctcatgggaagggtgtgagtggcgttttgcaag

SEQ ID NO: 263941 - DNA, 100 bp, Homo sapiens
gaatttatacaaggagaagcactggatccaaagcatgtctgcaacccagccattttcagctgcatgaaagcggttacgatgctggcaaagccctgcagcg

SEQ ID NO: 263942 - DNA, 100 bp, Homo sapiens
gcaaaggtcccagttccttctcggagccggctgtcccgcgccactggaaaccgcacctccccgcaggtgcagtagacattgttgcaatcatgatcggcaa

SEQ ID NO: 263943 - DNA, 98 bp, Homo sapiens
tgctgggctccttcatgatccgggatagcgagaccactaaagggaagaaggagaaagggccaacccctgaagaagcaatacagaaactgaaggagaca

SEQ ID NO: 263944 - DNA, 106 bp, Homo sapiens
tagctagcacacatgcacaagacatagttcaaataataacagatgcactactggaaatgtttagctgtaactgaagttcgtgaagtcaccagaaaatcagtccctc

SEQ ID NO: 263945 - DNA, 50 bp, Homo sapiens
cctgatcctgccatccgacgtccaggttgcatcataaatacaaaggactg

SEQ ID NO: 263946 - DNA, 80 bp, Homo sapiens
aaaaaaaaagaggaattccagaagggccaccccgacctccaagggcagcctggtttcacagacatattttcagagtcgaa

SEQ ID NO: 263947 - DNA, 90 bp, Homo sapiens
ctatgatctgcagggagacgcacagccaggacatcctggaacctgggaaaggcgccagccagcctttgacacctttgatgggtccctgtt

SEQ ID NO: 263948 - DNA, 90 bp, Homo sapiens
atttcagcagcacaatcaacgcaaccacagaaacaagtggtacagctgggagtgtccactcgccttccaccagcatggcaacgtcttcac

SEQ ID NO: 263949 - DNA, 83 bp, Homo sapiens
ccatgctttatgaagcaatctgtaacttgcttcaagatcaagatttagtggtatgtacaagctgtgaggacaacgcagaagcc

SEQ ID NO: 263950 - DNA, 136 bp, Homo sapiens
taacagactttattaaaagtgaatgtttaaataatattggtgactcctctcctctgattagagccactgttgcggaagtgaccgtggtggcttcaataaatttggtggtaagtgaacagagtttccaaaattccca

SEQ ID NO: 263951 - DNA, 100 bp, Homo sapiens
cggagacatggccaacatcgcggtgcagcgaatcaagcgggagttcaaggaggtgctgaagagcgaggaggtcaatgtgacggtggactacattagacca

SEQ ID NO: 263952 - DNA, 90 bp, Homo sapiens
ttcacaccccagcaggggctgcggccctggccaacgtcaacattgggagcctcatctgcaatgtaggggccggtggacctgctccagcag

SEQ ID NO: 263953 - DNA, 75 bp, Homo sapiens
ttcatctctaaaggtccttctaggagagaggtgaaaggtattgttgcagcatctggcagtgagactgaggatgag

SEQ ID NO: 263954 - DNA, 90 bp, Homo sapiens
gcctgccctgaggagtccccgctgcttggtgccaagctctcctgatgaaatgtgttctgccccactgggctccagggacagtgtctggtg

SEQ ID NO: 263955 - DNA, 83 bp, Homo sapiens
ctgccctgtggcctcgctcctcggagggagcatggggaagtgattgactgtgtgcaggagctgagccactccgtgaacaagct

SEQ ID NO: 263956 - DNA, 100 bp, Homo sapiens
catcaagggagttttccggggccctctcagcaagaacgggaacaaaactctgggccaaaagagaaacattggctactttgacaaccttaaagcggactcc

SEQ ID NO: 263957 - DNA, 75 bp, Homo sapiens
ttggtgagaaacattaagacctactaccaggataaaattgtccatggaccacgtgtgccttggtcactactgaag

SEQ ID NO: 263958 - DNA, 82 bp, Homo sapiens
gcagcagaagctgcatatcaaactgaataccaagctgctattttacacttgaagagggagcacaaagaagaaattgaaaacc

SEQ ID NO: 263959 - DNA, 100 bp, Homo sapiens
ttgataaacatccagggatctatttgtttttagtccatcccaatgaaatggatgttttagaagaatgtatgtctcttcccaagctatcttcttattctgg

SEQ ID NO: 263960 - DNA, 82 bp, Homo sapiens
ccgacctcgacgtcttgcctgtgtcccacttgttcgcggcctatagaaaacgccaggtcttcaagggtgtctgccaccacca

SEQ ID NO: 263961 - DNA, 100 bp, Homo sapiens
cacttcacaagttgtctaccgcctgtccaggaaggagatggacagagacgtatgtgcgttggtctcctaagggcacctacctggctacctttcatcaaag

SEQ ID NO: 263962 - DNA, 100 bp, Homo sapiens
tcgaggacatctcaactgcagacttcgaggagctagaaaagcaggtggcagggcccagccccgaaccagacaagggacccctcaaggagcttcattctag

SEQ ID NO: 263963 - DNA, 110 bp, Homo sapiens
aggaatagattctcttgaccatgtgacatctgatgctgtggaacttgcaaatcgaagcccagatgaaccaatgacaaatttggaattaaaaatatctgcctccctaaaac

SEQ ID NO: 263964 - DNA, 90 bp, Homo sapiens
aggcggcctcgctaccaacatccgaagggagcacctaatgcagatctaatctttaagactggtgggagttgatcatggccttgccaggtt

SEQ ID NO: 263965 - DNA, 83 bp, Homo sapiens
atggaattctaatttgaaccatgtttggattgaagccgcctctgtattacttaccagctcaccatggatgatgatatcgccgc

SEQ ID NO: 263966 - DNA, 90 bp, Homo sapiens
ctgtcccagccttcctgccgggcccacaggtgttgaagaagataaaggtgcagtcgccgttctgagtgctcgaggggccagggcccagag

SEQ ID NO: 263967 - DNA, 96 bp, Homo sapiens
atctggaggagcagttgtctgatgaagagaaggggttagtatcattcaaggatgtggctgtggatttcacccaggaggagtggcagcaacttgacc

SEQ ID NO: 263968 - DNA, 100 bp, Homo sapiens
aaaagggatttaatggtgaagattttgaacggcttacgaaaatttgtgcaacacatcaagacagtcctgcgttaactgcggccgggaggctatgagcgag

SEQ ID NO: 263969 - DNA, 98 bp, Homo sapiens
tggtcggatttcaccacaagaagggctgccaggctcctctgctgaacagcccctgggcgggagactcaggaagctgagcctggggcagtacgacaacg

SEQ ID NO: 263970 - DNA, 74 bp, Homo sapiens
cccggcgtctgcctcgagactgaagaccggctcttgtcaggatggtgaagctgttcatcggaaacctgccccgg

SEQ ID NO: 263971 - DNA, 97 bp, Homo sapiens
gtttcaaaaattttagaaaatggacctgctgacagagcagatggcctggagattcatgacaaaatcatggagatttgcctactggctgggaagaagc

SEQ ID NO: 263972 - DNA, 83 bp, Homo sapiens
gtttcaatgagagtggtgatccaagctgcgtgattatgcagaactgggctaggattgaggtactaggttttgacaagcttgca

SEQ ID NO: 263973 - DNA, 51 bp, Homo sapiens
aaacctggcacggctcttgcttccggcatggattccgtgaaggaacaacac

SEQ ID NO: 263974 - DNA, 83 bp, Homo sapiens
cggattcatttagagctgcggaacaggacgccctctgatctggctggaggcgtgatcctgggtgtggccctgtggctccgcca

SEQ ID NO: 263975 - DNA, 83 bp, Homo sapiens
cgccgaggcaccgaggcactcagaggagcattttgaaagcgaagcagaagccgtagaatcagcggcgagcctgttgaaagaac

SEQ ID NO: 263976 - DNA, 83 bp, Homo sapiens
cttggactgagtcctgcaggacacaggaactgtggctgcaccatctgtcttcatcttcccgccatctgatgagcagttgaaat

SEQ ID NO: 263977 - DNA, 75 bp, Homo sapiens
gctcgggcgacggccatcttcatccgatgagggaattggggcttggagtgcaagcattgggaagaatttcccagg

SEQ ID NO: 263978 - DNA, 74 bp, Homo sapiens
caagcctcattttggaatattgcaggaagagagaagggcacagttacctaagtatcaacgtaatcttcctcggc

SEQ ID NO: 263979 - DNA, 75 bp, Homo sapiens
gtggagatcaactcctctctgttaatggagtgattcggaaaccccgacctcagagagaacgtgctcagtgggata

SEQ ID NO: 263980 - DNA, 83 bp, Homo sapiens
cctggaatggcaagcgcagcaacaacagagagcacgtgccccagtggacaggaaagctaaggcctcagcgatgccggactccc

SEQ ID NO: 263981 - DNA, 82 bp, Homo sapiens
tgaaggcttcctcccgccaccctttccgcccccgggtagaacctctgctagccagacaactatattattttgctcaacaaaa

SEQ ID NO: 263982 - DNA, 74 bp, Homo sapiens
ccgccactgccaggctctggaccctggactctgcagaaggtgcagcttcaagcttaggaccacccaccatgcct

SEQ ID NO: 263983 - DNA, 74 bp, Homo sapiens
ggcccccgcctgcctccgccggctacagcgggaagagcggcacagcgtcaccttcgtcccctccggagctgcac

SEQ ID NO: 263984 - DNA, 75 bp, Homo sapiens
aagccgtgacatcctgggatattctttgttgagaggtgcagtggcttctatgttttgggttgatgctgaattagg

SEQ ID NO: 263985 - DNA, 82 bp, Homo sapiens
gagccgcgctgcgcagccgacgcgggaatgaagcgggcgctgggcagcaaaatgatgcttcaacacccaggccaggtctctg

SEQ ID NO: 263986 - DNA, 98 bp, Homo sapiens
gcaagcatgcccaccactgccacaaacgccgcaccaggtcttgtagcagcgcctcctcgggattaaagcctgtggtttccacagaagcaccacctatc

SEQ ID NO: 263987 - DNA, 75 bp, Homo sapiens
atactttacgcttgtgtgataaaactggggaatggaagttggatacactttgtgacttgtacgagacactgacca

SEQ ID NO: 263988 - DNA, 75 bp, Homo sapiens
ttcatggagaagaaggccttgactacggaggggttgccagtgagaaagatcagtctaaagaaaaggagaagaaag

SEQ ID NO: 263989 - DNA, 82 bp, Homo sapiens
agagagggaagagattcagccagcacactcctcgcgagcaagggcaacaggtttgtctatgctggctctaactcgggcgtgg

SEQ ID NO: 263990 - DNA, 83 bp, Homo sapiens
cgtgccctacttcaaggataagggcgacagcaacagctctgccggctggaagcacaaacacagagcagtctaaagcaaccgag

SEQ ID NO: 263991 - DNA, 100 bp, Homo sapiens
gagaacctggcacttatgtcctccctgggagcaatatcaattcctatatgacgtcattgccagcacctaccctgctcagaatggacaagtaaagaaaaac

SEQ ID NO: 263992 - DNA, 99 bp, Homo sapiens
tgttcatgtgttttggaggcaccgtctctccctgggaccagataagctccgaagaagtatgcctaacctagcccggatgccaagtacaactgccattag

SEQ ID NO: 263993 - DNA, 100 bp, Homo sapiens
atccagcgctcattgggaatttagttaaggtcattctagtcttgactaccttccatgtaccactggtaattatgacttttggacagtccaagctatatcg

SEQ ID NO: 263994 - DNA, 73 bp, Homo sapiens
ttatccctactacaggactgcggacaagggctggcagtaggtcccattagtccaccacagccaccttcagtca

SEQ ID NO: 263995 - DNA, 100 bp, Homo sapiens
cctgggggttcagattgcaaggtggcaaggagcagaagcagcccttacaagttgcaaagccacagcgtcctgtgtttactcatgaaaatattcaaggtgg

SEQ ID NO: 263996 - DNA, 124 bp, Homo sapiens
gatgaagggaaggaaatcatgtcaagcgaagccttgaaaaagctgccctgagacggtgtcccgccgaaagtactttgccagacgtttatcaaaatggggctgctgtcttctttcacttgtagtg

SEQ ID NO: 263997 - DNA, 96 bp, Homo sapiens
cgcttgttggactgctgctgcaaaacttttctgtcagaaccatccagtcctggacatgggaccacatcggcgactgcagtggacgtggctgggccg

SEQ ID NO: 263998 - DNA, 75 bp, Homo sapiens
ttgaaaaagctgccctgagacggtgtcccgccgaaagcctgattacatcaaccccagagccgtgcagctgggctc

SEQ ID NO: 263999 - DNA, 90 bp, Homo sapiens
ggaaatgtgaacaacactattgtcgtgccgcttttggaggatgggagaggccatggcaaagctcctctggtgcaagtgtggtagctattg

SEQ ID NO: 264000 - DNA, 51 bp, Homo sapiens
agtcctcggtgcggcgcggccagcggctggactctattacctggcagaact

SEQ ID NO: 264001 - DNA, 90 bp, Homo sapiens
tgcacctggagattgacgcagagtgggcggcggtggtgctttttagttggagaaggagcctacagatgggcagtagatcatggaataccc

SEQ ID NO: 264002 - DNA, 100 bp, Homo sapiens
ttcagcaccctggaggccctggaggctctacagattctcccctgcccctggagaaggaggagcaggtccgacttcaggctcggaagtggctggaagagca

SEQ ID NO: 264003 - DNA, 100 bp, Homo sapiens
tgaccgtgggtgaactctcttccttcctaatgtatgctttctgggttggaataagcattggaggaaatgaagtgtctgatgaagagtgcttgaagagagt

SEQ ID NO: 264004 - DNA, 82 bp, Homo sapiens
tgaagaggaggatccacctggagctgaggaaccggaccccggcagctaaagaagcttccggttctgaggtcctggaggtgcc

SEQ ID NO: 264005 - DNA, 100 bp, Homo sapiens
ctgcgccatctgtcaggccgagttccgagagcctctgattctcctgtgccaggtatggagagtcggcttgactacactgtgtggagcaagttttaaagaa

SEQ ID NO: 264006 - DNA, 76 bp, Homo sapiens
tgtgaagccacacagtgtccagatacgaggatttcaggtatgctgctgaaagtgggaatcctctacattggtgggc

SEQ ID NO: 264007 - DNA, 115 bp, Homo sapiens
aagctgctggtccgtgacgccaagcagaggctgagtgccgcccaagtcctgcagcacccctgggttcagggggctaaggatcaagggaagcctgaagtgggagaatatgcgaaac

SEQ ID NO: 264008 - DNA, 98 bp, Homo sapiens
ttgaagatattagcctaacaagatggaagcaggtttaaaattttacataagaagttacctttttcagtgtggtttattgacaatcatttacaatgccg

SEQ ID NO: 264009 - DNA, 74 bp, Homo sapiens
cttcaatgcagatgggtctgagtgattcgcctttgccagtctcatctcgtgtctgctttgttaagttccatgat

SEQ ID NO: 264010 - DNA, 90 bp, Homo sapiens
tttcattggaggagaagaagggatggcagagaaggtggcagaaagagcactctattattggaataatgaatacatcatgagtttgataga

SEQ ID NO: 264011 - DNA, 97 bp, Homo sapiens
ggcaacgtgttggaccttccggagcttctcagaagacagagggttttcttttgagctggatgaaaaagaaagtcggcgtctgttccaacagatcctt

SEQ ID NO: 264012 - DNA, 107 bp, Homo sapiens
aaaattcagcagcagaaattccagtgactagtaatggagaagttgatgactctcgtgaacatagctttaataggaacattaaccaggtggtatttgttggaaatttc

SEQ ID NO: 264013 - DNA, 101 bp, Homo sapiens
aattatgtagaggaagaaaacattcctgctctgaaagctcttcttgaaaaatgcaaagatgtagatgagagaaatgagtgccattggtcatgagcatgagg

SEQ ID NO: 264014 - DNA, 100 bp, Homo sapiens
ttcagccaagccatatctaacagaactatcttcaacttttcagaaaaagtcccagactctccagaaaatgagctgaaatccagatgggaaaacctgttgg

SEQ ID NO: 264015 - DNA, 101 bp, Homo sapiens
tcttagatccggattcaccattgttcaggtggcgacatgtctaagaatgtgagccagtcacagatggcaaaattgaaccaacaaatggccaaaatgatgga

SEQ ID NO: 264016 - DNA, 75 bp, Homo sapiens
tggttccccctccctcagcttccgccccaaaaggcagtgctcggaatgtgaccaggcagggagcagtgacatgga

SEQ ID NO: 264017 - DNA, 83 bp, Homo sapiens
aaggccaagtatccgccagtcaataggaagtacgagttctgaacaacccagtcctgccagctccagctccagctccagctcca

SEQ ID NO: 264018 - DNA, 72 bp, Homo sapiens
atgacgtacagaagagtactgggtgtgattttgcaggcgatgccagtccctccactccagaggagaacgaaa

SEQ ID NO: 264019 - DNA, 100 bp, Homo sapiens
cgctcggctgcgggaaatcgggctgaagcgactgagtccgcgatggaggtatattgaagcaagtcaaagattacattaaacagtgtagcaaatgccagga

SEQ ID NO: 264020 - DNA, 75 bp, Homo sapiens
gcggggtccgatggttctcgaaggcccgcggcgccccgtgctgcaggaatggaagttggatacactttgtgactt

SEQ ID NO: 264021 - DNA, 90 bp, Homo sapiens
ggtgaactaccttcacacaaagaaaattgctcactttgatctcaaggttgcccccaagtttcctggcagtgtgtgatactgaggaggtga

SEQ ID NO: 264022 - DNA, 92 bp, Homo sapiens
caggacggtcgattggtctgaaattcttgaagagacagatgccatggacaatattaccaggcagaaccaattctacgatacccaagtcatca

SEQ ID NO: 264023 - DNA, 82 bp, Homo sapiens
gagggcctccccaggccgcctccgcccgtgaagatgctgcagttggagaagaaacttgaacgtgaacttgaggatgatgcac

SEQ ID NO: 264024 - DNA, 75 bp, Homo sapiens
gtggagggcagaagtaggaagtctttgggacaaaactgtatttaccttgctccgggagtgtgagctgagccctgg

SEQ ID NO: 264025 - DNA, 51 bp, Homo sapiens
accctgagctcaatggggctgcctataggatcacctgctgttaccagctac

SEQ ID NO: 264026 - DNA, 101 bp, Homo sapiens
atctctcagggtcccttctgagatgatctggatccccgacattgttctctacaacaagtgtcccgcatgagatgtctgcagaatgagacttacagtgcgct

SEQ ID NO: 264027 - DNA, 100 bp, Homo sapiens
aaggactacccctttgccaggttcaataagggtgaggaggtcctccggcagctgcagaccctggcaccaaagggcgtgaacgtccgcatcgctgtgagca

SEQ ID NO: 264028 - DNA, 83 bp, Homo sapiens
ttctcaggatatgacaggggtaacacccttccagatgatttttgaggtttatgcatgtatgatggttttcttcttgagcaaca

SEQ ID NO: 264029 - DNA, 76 bp, Homo sapiens
aagatggagatgatggggatgatacagccagcgaatcttatttgcctggagctggagagagatgcatatgtccagg

SEQ ID NO: 264030 - DNA, 50 bp, Homo sapiens
tctccctggacctcgtgcatacggagatcaaagacgctggccttcagacc

SEQ ID NO: 264031 - DNA, 100 bp, Homo sapiens
ttcataaaaagccaaagtctgacaaagagacaagactagcaactgcaatggtacggattttcaaatatgcgctatatttcttcgctaattagtggtgttg

SEQ ID NO: 264032 - DNA, 98 bp, Homo sapiens
gcagcgtccctgtgacctggccgatgaggaagtactgagcctgttggaggaactggcccggaaacaggaggacctgctcagatggaagataaaaagcc

SEQ ID NO: 264033 - DNA, 100 bp, Homo sapiens
ggcttaatgaaagagagtgctcaattcagagaagaaatcagaaggtggtggaggaagcaccaagcttcaaacatacccatatagataaaccagactgctc

SEQ ID NO: 264034 - DNA, 100 bp, Homo sapiens
ctgtgcacctctcagcaggcctttgctggacagatgaagagtgacttgtttctggatgattctaagagaccctccagcccgccctgttgtctcctgccaa

SEQ ID NO: 264035 - DNA, 100 bp, Homo sapiens
ctgcaccccgatgttttcgccaccgcgcccagagtcgtccttgtctactccactaccaaatgttgaagttcttcaagaatcagtcctttggaggtgatgt

SEQ ID NO: 264036 - DNA, 100 bp, Homo sapiens
cctacctcaacaacccgtacgtgcggaaggccctcaacatcccggagcagctgccacaatgggacatgtgcaagtacatccagacactgaaggaccacag

SEQ ID NO: 264037 - DNA, 100 bp, Homo sapiens
atcagttcctcctcagaattcccccctcaacttcgaagtgtgtgccactgtttataccaggattatacacatgaattccataaaaccaaagcaaacttta

SEQ ID NO: 264038 - DNA, 82 bp, Homo sapiens
attatagctctgtatgagaaggacaacacctacttagattgtccagaacatcgtgggcacagctctgatgattttagtggcc

SEQ ID NO: 264039 - DNA, 100 bp, Homo sapiens
gcagaaccaggcgtccaggacgccgctgaccaccctcaacacggatatcagcatcctgtccttgcagactggcattgctcgggtaccacttgctggagct

SEQ ID NO: 264040 - DNA, 50 bp, Homo sapiens
cagagagaaccagtgcgtcattatcaggctttccttaaagtttcccatgt

SEQ ID NO: 264041 - DNA, 83 bp, Homo sapiens
ctggaaccgggatggcgacgtctacactgagtcggaggcgaaggtcctctcagggtgcgccatcattgtccgaggtcagcctc

SEQ ID NO: 264042 - DNA, 96 bp, Homo sapiens
gagcgcctcgtcgacatgagtgatgtggaggaaaacaacttcgagggcagacagtcctgcgttaactgcggccgggaggctatgagcgagtgcacc

SEQ ID NO: 264043 - DNA, 100 bp, Homo sapiens
ctgcggcctcctctcctctcctaacctcgctctcgcggcctagctttacccgcccgcctgctcggcgaccaggtaagtaaggaggtctctgtaccatggc

SEQ ID NO: 264044 - DNA, 100 bp, Homo sapiens
gcgacgctgctcaaaacctcgctccggaaaggggacacctggtcaaaatgcagatcttcgtgaaaacccttaccggcaagaccatcacccttgaggtgga

SEQ ID NO: 264045 - DNA, 100 bp, Homo sapiens
ttcccacttgattacccgttaagtcccccaaagatgagatttacctgtgagatgtttcatcccaacagactggaatgtcacgtggaataccagcaacccc

SEQ ID NO: 264046 - DNA, 100 bp, Homo sapiens
aaggaaagttgactgaaaatggggcggaagaaaatacaaatcacacgcataatggatgaaaggaaccgacaggctttggtgttaagatgttgagtactgc

SEQ ID NO: 264047 - DNA, 82 bp, Homo sapiens
gcggatctcaccgccgctcaggacgactgcaagaacattgccaacatcatgaagacactcgcctatcgaggcttcatcttca

SEQ ID NO: 264048 - DNA, 75 bp, Homo sapiens
attccaagtaactcttatttgggtacccagtgtgttgaacaaattcaagagttggttctacgcttctgtgagaag

SEQ ID NO: 264049 - DNA, 48 bp, Homo sapiens
agctacaacatcatcttctgggacccaagtttcttcaccatggggatg

SEQ ID NO: 264050 - DNA, 50 bp, Homo sapiens
caaacaagcagatatttgtgtgtaatagctcttcaagtctgcaataaaaa

SEQ ID NO: 264051 - DNA, 75 bp, Homo sapiens
cttcatccggctggatatcagaacgtgctcaggaacactgaagtcatgtattcacaggcctccactgggctctca

SEQ ID NO: 264052 - DNA, 80 bp, Homo sapiens
taaagtctttccaaaaggtcaaggttcacaaggttaatgttgaagaaggaaaatgcggaagtcgtcatttgacaagtttt

SEQ ID NO: 264053 - DNA, 100 bp, Homo sapiens
ggcatgactcgcatccctgtcattgagaacccccagtacttccgtcagggacacaactgccacaagccggacacgtttcctccgtgtcacaaagcagtac

SEQ ID NO: 264054 - DNA, 98 bp, Homo sapiens
gagcatggcccgcgcggcgccgggcgctgactgagagggagaaccgaagattacaggaggccagcatgaggttggaacaagagaatgatgaccttgcc

SEQ ID NO: 264055 - DNA, 100 bp, Homo sapiens
ggtccagaccatgcagacaatatgccctttttctccaaacaccatttcaagatgctgggctcttgcactgtttggtggaaatggtgagacaggatttgag

SEQ ID NO: 264056 - DNA, 82 bp, Homo sapiens
ggggcctcatcagaaatgttacacacggagtatcaaactctgctgccaaggagaatggggtactaagagaaaagcacgaagc

SEQ ID NO: 264057 - DNA, 106 bp, Homo sapiens
aaatatgtgaaatgcagaccgaagaattagctggaaattctgagacactaaaagaacctggtggatccataaagaacccagccaacccgcagagggaggggagggg

SEQ ID NO: 264058 - DNA, 100 bp, Homo sapiens
cgggactcttggcctgtccctcacatccgatgcaccctttttgtcagattatcaggatgaggatacagtttatgtaacttgatggaagaaaatggaatta

SEQ ID NO: 264059 - DNA, 82 bp, Homo sapiens
gactttcacaataagagcagaggatggaacacttcagtgcattcaagtacctggagtagaacagaaaaattattatgtctgt

SEQ ID NO: 264060 - DNA, 49 bp, Homo sapiens
accagtttgccatcccaaggccgaagttacatgggaattggtctttctg

SEQ ID NO: 264061 - DNA, 100 bp, Homo sapiens
tcgtcttgcattttcccgcgtgcgtgtttgatattcactgatggactccaaagaatcattaactcctggtagagaagaaaaccccagcagtgtgcttgct

SEQ ID NO: 264062 - DNA, 100 bp, Homo sapiens
aacctcactgagttagaatcagagcggatgcagtggtgcagtatgacgtggagctgattgcactaatccgagccaactactggctaaagctggtgaaggg

SEQ ID NO: 264063 - DNA, 75 bp, Homo sapiens
ctggaaggtgcgtgtggggctgggtctcggagtgggagacgtggagtgcagctgagttgatggcttccggagaac

SEQ ID NO: 264064 - DNA, 98 bp, Homo sapiens
gggaaggctctggcttgggacgaaagtgtcaaggcattacggctcccattgaggatgagaacaagttgagcagtgccaacggccatgaagaacgtagc

SEQ ID NO: 264065 - DNA, 82 bp, Homo sapiens
cgacttcgtcgtgggtcagcaagagggccccgctgaccaggtggctgcagaacatgaacgattggatgcccatcgccaagga

SEQ ID NO: 264066 - DNA, 87 bp, Homo sapiens
gcattactgtgaggggttgaggcctgacatttcattagtggatcaggaactcctcagaagaaatatcacgttaccaagaaatgattc

SEQ ID NO: 264067 - DNA, 75 bp, Homo sapiens
cgacagccggctcgggacccaactctgcgagccagcccacaactggagttttatataaagaagataattatgtca

SEQ ID NO: 264068 - DNA, 87 bp, Homo sapiens
cgccctctgaatcttttgtagtattagacaatgaacaaaaagtttatcagcgaatacatcatgagattggcgctgttccactggctg

SEQ ID NO: 264069 - DNA, 100 bp, Homo sapiens
ggacgttggctggattgtgttagtcatcacgaccagcttttcagagatgagtatgcgctgtatagaccactgcaggaagtgagctcacaatgactcaagc

SEQ ID NO: 264070 - DNA, 100 bp, Homo sapiens
tgggaaatgaaagagcgccttgggacagggggatttggaaatgtcatccgatggcacaatcagagcagcccgacggccatggaggctgaagagacgatgg

SEQ ID NO: 264071 - DNA, 107 bp, Homo sapiens
ggatgccggcagtcagagtcaaaacagagcttttggaatctgaacaaggggaacttagtgatttggcccgtgaccctccagcacaatgttctgcaggtccagttggg

SEQ ID NO: 264072 - DNA, 100 bp, Homo sapiens
gtcggcgctgccccgtgggctcgctggggagccacggcggagacccccgccctcaactgaggatcttagaaatgaagttgaaaaattacgcaatgaagtg

SEQ ID NO: 264073 - DNA, 90 bp, Homo sapiens
tgtcagaaaagagtagcctgggctgtctggaaatctgagacggagtctcagtggcgtgatcctggttcactgcaacctctgggccccccc

SEQ ID NO: 264074 - DNA, 82 bp, Homo sapiens
gtctcgttgctgcctctgtgtacgctgaggggggaggttcctgacggagacttcgcccttcatgtggtccaacctgggcatt

SEQ ID NO: 264075 - DNA, 82 bp, Homo sapiens
cccgggctttagctatggcagcggcagcaccgggagtcagcagagtgaaggagcatcagatccatgctgctgctgactcgga

SEQ ID NO: 264076 - DNA, 101 bp, Homo sapiens
acaccggctacttctcagctttaccatccctggaggagacctggcagcaggtactatcttggtcgtcggatgtttattgttatttctgagccagacatgat

SEQ ID NO: 264077 - DNA, 74 bp, Homo sapiens
tgaaaatgtgctgcctcgagagccgctgggcggcaccttcctacttctgcccagccacagccctcccctcacag

SEQ ID NO: 264078 - DNA, 98 bp, Homo sapiens
aagcttaggaccacccaccatgcctatccagacctacgtctaccagtggccctggacgctcctgctcctggctgtcagcggcttctgtaactttgccc

SEQ ID NO: 264079 - DNA, 51 bp, Homo sapiens
cactaagcagttggaggctgtgtctggtgggtttggaggatttgggacaac

SEQ ID NO: 264080 - DNA, 100 bp, Homo sapiens
tggattactacgagaacaagatgtacctgactcccagtgagaaacatatgctcctcaaggtcattcagtggtgcacccaccacaaggatgaccctcctcc

SEQ ID NO: 264081 - DNA, 111 bp, Homo sapiens
cgcagatgcccaccggaatggagaaggaagaggagtcggattttttatcaagcagaaatgcatcgaacaacgagaatcaagatcactgagctaaatccccacctgatgtgt

SEQ ID NO: 264082 - DNA, 90 bp, Homo sapiens
cttgtatgagggtcatattgaaaaggatgcccgggaattcctggacaagcagagcgaaccagacggacagtaaggtttggaggaaggggg

SEQ ID NO: 264083 - DNA, 99 bp, Homo sapiens
tgccgctgaatgggctgaaggaggaggacaaagagcccctcatcgagctcttcgtcaaggcgcagatcaggcctctataaccgccaggaatcacattca

SEQ ID NO: 264084 - DNA, 100 bp, Homo sapiens
tgcccactctgcggagttagcagtcacgacctccagcacagaagatgctcatgaagcagcaggaccggctggaggagcgagagcaggacattgaggacca

SEQ ID NO: 264085 - DNA, 98 bp, Homo sapiens
ggccatgcagttcttcaccaagggctaccaggagaccatctcagaacaatgtctcccttttgcagagctgtattgacttgttcaagaataactgatat

SEQ ID NO: 264086 - DNA, 101 bp, Homo sapiens
gattttatgggaaaattaagcagatgctccagtttgagaaacctggatctgcgatctgtttgtgatgctgagggttggaaaagcaaaagcagatgtgtggc

SEQ ID NO: 264087 - DNA, 78 bp, Homo sapiens
cggaggcggaggcagaggtggaggcgctttgaaaggccaagctataacatcagaaatggtgaatgaatacaagaaaat

SEQ ID NO: 264088 - DNA, 100 bp, Homo sapiens
ctcgtttggaggcactggactacttacaaaaatgttggagaaggaacgagagaaggaaattagtgatgatgaggcagaggaagagaaaggtgagaaagaa

SEQ ID NO: 264089 - DNA, 127 bp, Homo sapiens
gcgccgcggccgcatctacatccaggcccacatcgacagggacgtcctcattgtcctcggtgacagagctgaatgaacctctctccaatgaagatcgaaatctcctctctgtggcctacaagaatgt

SEQ ID NO: 264090 - DNA, 96 bp, Homo sapiens
ggaccccctcgcttcctgctcgacctgcggcagtacttggtattatcagaaaatccacccagcttcaccattactgtgacgtctgaggctggagaa

SEQ ID NO: 264091 - DNA, 80 bp, Homo sapiens
gttggaagcagccgatccagcctgcggagcctgtggggcagtggtgacatctttactcattaacctgggaagccccgtaa

SEQ ID NO: 264092 - DNA, 98 bp, Homo sapiens
tccgaaaccacaagtttgccgatgaatagccaggtctggctgggtcggcacaacctgtttgagcctgaagacacaggccagagggtccctgtcagcca

SEQ ID NO: 264093 - DNA, 49 bp, Homo sapiens
cagcaagagaaaacatcgaccttcaagtgcacagcgacttcaccgcggc

SEQ ID NO: 264094 - DNA, 100 bp, Homo sapiens
gctgtgtcaatgccattgaattctccaacaatggaggccagtggctggtctcaggaacgactgaagctggtgactgttttgggtgctggccttctctgtg

SEQ ID NO: 264095 - DNA, 100 bp, Homo sapiens
ttggggctgtgggacttcgaaggagggctctcctgtctgccaccatcctgggttgacaattctacacaaggagacatggaaggtctttaatgtaacttta

SEQ ID NO: 264096 - DNA, 112 bp, Homo sapiens
cgcagcgtggattttaaccgaggcacggacaacatcaccgtgaggcagggggacacagccatcctcaggactgcatcaaaacatgtaaacaaggacctcggtaatatggaag

SEQ ID NO: 264097 - DNA, 100 bp, Homo sapiens
ctgacccaaacattcggaacactgatgggaaatcagccctggacctggcagatccttcagcaaaagctgtccttacaggctgatgtttcagacaccgcag

SEQ ID NO: 264098 - DNA, 82 bp, Homo sapiens
gaaggagttccaccaggccgggaagcccatcggggtcctgcagttctgagcttgggttccctttgcctggacaccaaccaag

SEQ ID NO: 264099 - DNA, 101 bp, Homo sapiens
gcgaaggccgggacccggttccccggcccacagtgggggtgtgcaaacccgagagaactggggagcatcgagtacagctgtccggcctccaacgagtgtga

SEQ ID NO: 264100 - DNA, 100 bp, Homo sapiens
aagccgagttcaacatcctcctggccaccgactcctacaaggtactccaaagattcaggtttactcacgtcatccagcagagaatggaaagtcaaatttc

SEQ ID NO: 264101 - DNA, 99 bp, Homo sapiens
gaaaacaactttccttttactcctttggtataatagaggccaaactgagcagtttctggcagttgattgtggatgagaaaaagcaggttttcacttctg

SEQ ID NO: 264102 - DNA, 90 bp, Homo sapiens
aacaacactgagatagtctgcagccttcccttcttcttggtggtgttcttgagtaagataatctggactggcccccgtctttgcttccct

SEQ ID NO: 264103 - DNA, 75 bp, Homo sapiens
cttccctgtcgccgttcgctgcgctgccgggatggatgagggagatgctgcaatcatgcatcccggggtcgtgtg

SEQ ID NO: 264104 - DNA, 90 bp, Homo sapiens
ccactggctctgctgaccttgtgccttggtatgatctcgtgaaatcttgagagaaactgaatgacgaatgaaactattgttcctgtttca

SEQ ID NO: 264105 - DNA, 127 bp, Homo sapiens
tcaaccggcggagacactggcagggccagaaacgcgcgcagcgggggcgggaggggtcagcagattatgatccagaggccaagcccagcccgtctgcttttgtgtataaagttctcatggaacagag

SEQ ID NO: 264106 - DNA, 82 bp, Homo sapiens
cgcagagggatccaagatcaacgcgagcaagaatcagcaggatgacgggctgattcaccccaagagtggccgttcctaccac

SEQ ID NO: 264107 - DNA, 100 bp, Homo sapiens
ggtcgagcacataacggggttcgggtgtctcgtgtgtgaacatcacaggcattgggatcccgtggcagttgcagcactgaagtggagaaggagacccagg

SEQ ID NO: 264108 - DNA, 98 bp, Homo sapiens
tggactaccgcctggatcctcagctccagctgcactgctcagacgagagagcccgagcccagcacattgtgccctgtactatatctcagctgctttct

SEQ ID NO: 264109 - DNA, 96 bp, Homo sapiens
cgcagcaagcggggcgctgtgtccccaagctccccgtcctcggaatgcaggctcaacagtaccagcagcagcgtcgaaaatttgcagctgccttct

SEQ ID NO: 264110 - DNA, 87 bp, Homo sapiens
gaggagcagctcacctgagagacggagccccggctcgcccgtgtgcagagaaggacagaataacgggctcccagattcacaagcccc

SEQ ID NO: 264111 - DNA, 89 bp, Homo sapiens
gcacaagtgacaggagcgctgctgcagagtgagagtgggactgcgccagttttgctacttgagaagatagaacatgatgacatctgcaa

SEQ ID NO: 264112 - DNA, 100 bp, Homo sapiens
ttcagtgctgctcagctgacggctgaatgtgccatcgtcaccctgattttatttggagagaagcaagcatctttgcctctttggagtaggaaattcagac

SEQ ID NO: 264113 - DNA, 50 bp, Homo sapiens
gtcggagatccgctcgcgcgccgaaggaaattatctcattcaaagctagt

SEQ ID NO: 264114 - DNA, 100 bp, Homo sapiens
ctgcgcgcctgatgggtcgaggcggacgcgcggctgcgtcaggaagatacttggaaaattctactcatggactcctggctttggtgccgctctgccagca

SEQ ID NO: 264115 - DNA, 80 bp, Homo sapiens
ctcagggacacgccggctaccacctgagccggaacaatgcccagcgccttggggtctcccagtctactcattcgctcacc

SEQ ID NO: 264116 - DNA, 100 bp, Homo sapiens
ccgccgtgatgctgtcccgatcccgctgtgtgtctcgggcgttcagccgctcgctctccgccttccagaagatgaggaaactgaggcttggtgaagttac

SEQ ID NO: 264117 - DNA, 74 bp, Homo sapiens
gcaacatctttcctaaccctgaagcgacttttgtcaaggaaatgaaaacagctcaggcatgtttgctgcagaag

SEQ ID NO: 264118 - DNA, 75 bp, Homo sapiens
tggaattaggcaaatatggacaggatcactactcttggaatcaaagataaatccaaatactgcatatcagaaaca

SEQ ID NO: 264119 - DNA, 102 bp, Homo sapiens
tgacaagaccaaggtcaacaaggacaacaatgagatcgtggacaagatcatgggcaaaggacagatccaggaagctcttcgtgggcggtcttgactggagca

SEQ ID NO: 264120 - DNA, 100 bp, Homo sapiens
cggaggaccacaggcttccagtacgagctggttaggaggcacagggcgtcggacctgcacgagctgtctgaggtggggctggtgtccgagcacttctcgc

SEQ ID NO: 264121 - DNA, 75 bp, Homo sapiens
gagtccggactcgacctctcggacgcggagcccgacgcgggcgaggccacgggtgttttgaatgctgtatcaaat

SEQ ID NO: 264122 - DNA, 96 bp, Homo sapiens
ttgggcggatgttgtgagccgggtcgctgcggccgaggctccggtggtgaagcagcgcttgcagatgtacaactcgcagcaccggtcagcaatcag

SEQ ID NO: 264123 - DNA, 88 bp, Homo sapiens
agcttttcttcagtaaacttcaaggagataaaggacgatgggccacagaaagcgaggctggtgatatggacctgagtgggttgccaga

SEQ ID NO: 264124 - DNA, 100 bp, Homo sapiens
tattgtaagaacccagtttataccactggaaggaaacctacgatgttttcaaactgcagtaaacaatcaatctataagaccattgaaagtaaggcccagg

SEQ ID NO: 264125 - DNA, 100 bp, Homo sapiens
ggagacgagaagcctgaaaagtcgcagcgagctggagccgccggaggtctgcaattaaggccttacgtcctggagggatacttgtatactctacatgcac

SEQ ID NO: 264126 - DNA, 75 bp, Homo sapiens
taaaagccacccaggccttggtcctagcacccactcgagaattggctcagcagtataaagtttggataaagcctg

SEQ ID NO: 264127 - DNA, 100 bp, Homo sapiens
ggaagaagcagtaaacagttgggaaatgcagtcactacctgagtataaggataaaaagggatattcaccccttgaacggaaagatgctgaaggatgggag

SEQ ID NO: 264128 - DNA, 100 bp, Homo sapiens
gtattgaagtcaaagccactgaaaactgtgctaaagaagctatttctgcgacagggtctcactgtattgcccaggttggtctcgaactcctggcttcaag

SEQ ID NO: 264129 - DNA, 100 bp, Homo sapiens
taaacagacaaacagtgctctcaaagaaaaacttgatggtggaatagaaccatatcgacttccagagcatctgacagatacgtctcatggtgtaagaaat

SEQ ID NO: 264130 - DNA, 97 bp, Homo sapiens
ccgcgacgagctatccgggaaagggccgaatgcgatcaaacctaatccgcgagacttgctaagaaaatgtttataggaggccttagctgggacacta

SEQ ID NO: 264131 - DNA, 98 bp, Homo sapiens
ttgataaaaagagatgtggggggattctcgacctgctaacagaactggaccttttcggagccggtgaaacctgaagaaggcagagatatggcaaacag

SEQ ID NO: 264132 - DNA, 83 bp, Homo sapiens
cttcaaccagcctttggtcatcaccaggacaagtcattacgttttcatttctcacaactgggctgagcacaactgaaccatgg

SEQ ID NO: 264133 - DNA, 85 bp, Homo sapiens
tcctgtaacccagcctgtttcacttcttgacggaagtgaaaatgtgacaggattggacctttcagatttcccagcattagcagac

SEQ ID NO: 264134 - DNA, 83 bp, Homo sapiens
cttgataacacagagtttcaaggtggctgagatctgcgttgaaatggagctgcgggacgagattctgcccagagcccagaaca

SEQ ID NO: 264135 - DNA, 100 bp, Homo sapiens
tcagacagatgctgcgtagagacttcagcattgggacacgagtggcgtctggaaccctctgaagggcacagccaagcctcctaaggatctggaagcccga

SEQ ID NO: 264136 - DNA, 50 bp, Homo sapiens
gcagaggcacccacgctcctacaatgtatttaacatgaagtcgctccaga

SEQ ID NO: 264137 - DNA, 101 bp, Homo sapiens
attaccatgacgctctgaacatcatcgacatggccctgagtgaatacccagaaaatttcatttaatgacagttcggactatcacaggaaatatctactatg

SEQ ID NO: 264138 - DNA, 98 bp, Homo sapiens
agcgcctactagagcagggtttggagactcaggcttgaagaaaatttgcctacacgttgtggattttgtcatataccatatgatgaactgaatatgcc

SEQ ID NO: 264139 - DNA, 75 bp, Homo sapiens
ctgacttttgccgagtactgcagtttgcatttatgtcggatcctcagtgaaaataaaagccatgatagttcaaca

SEQ ID NO: 264140 - DNA, 100 bp, Homo sapiens
gcgggcggccggtcgggcggggcggcggcgctgacaggttaaataggattgcgaatcaggtggccattcagcggaagaagcagtttgtggagcgagccca

SEQ ID NO: 264141 - DNA, 100 bp, Homo sapiens
ttggacaccgcttactccagaaacatgggtggaagctgggccagggattgggaaaatctcttcagggcaaacctgtatgtgggactggtggtcatgtgtg

SEQ ID NO: 264142 - DNA, 75 bp, Homo sapiens
gtcggaggtctcatctttgaactactgccggagcttctgccagttttcggctttgtgagaaaccttaccatcaaa

SEQ ID NO: 264143 - DNA, 51 bp, Homo sapiens
agtttttccaaatattcatctgtacagtctggctcttgctgattgaattcc

SEQ ID NO: 264144 - DNA, 100 bp, Homo sapiens
gactgctgtcagatagcacttgccttccccatattattcagggctccttcagtggtagatgtcccctgtatggtgtggccaccctgaatggctcctccct

SEQ ID NO: 264145 - DNA, 75 bp, Homo sapiens
gaacagtggaagaaactgcggagggaaagctgggaacgagaggccctctctccagcccctacgaccatggacttt

SEQ ID NO: 264146 - DNA, 100 bp, Homo sapiens
gtttccggtggcggcggaggctgcactgagcgggacctgcgagcagcgcgggcggcagcccgggggaagcggcagaacgcagagctggccaagcttcggc

SEQ ID NO: 264147 - DNA, 100 bp, Homo sapiens
agtccaagtcccggaagatcgcgatcctgggctaccggtctgtgggtattcctggagtggagagccactctttttgacctgccctacatcagaagtcacc

SEQ ID NO: 264148 - DNA, 74 bp, Homo sapiens
gaggaaagccgaagagatgaggcggcagcagaagctaaagcaggccaagccatcaccatcgaggctgagccaag

SEQ ID NO: 264149 - DNA, 50 bp, Homo sapiens
tctgaatatagggacaccacagtggtctgtttttctggggggccaccaac

SEQ ID NO: 264150 - DNA, 48 bp, Homo sapiens
ggagaagcaggagccctactcggcaggcgccttggtgctgaattgggg

SEQ ID NO: 264151 - DNA, 82 bp, Homo sapiens
cccagagactgctgagcccgtccgtccgccgccaccacccactccggacacagaaagaagcttccggttctgaggtcctgga

SEQ ID NO: 264152 - DNA, 83 bp, Homo sapiens
gcaacacagaatttctgcaagtaattggccaagtcctgtatctgccatgtctgtggcgtccacctcaacaggctgcattcctg

SEQ ID NO: 264153 - DNA, 88 bp, Homo sapiens
ctaaaatgaaagaaaccgctgaggcttatttgggaaagaaggatgttttagaagaatgtatgtctcttcccaagctatcttcttattc

SEQ ID NO: 264154 - DNA, 75 bp, Homo sapiens
gaaaccttttccgggtggggatctctgaaattactcaggaatgtatcctgtcaggtataatgtcagtgaatggca

SEQ ID NO: 264155 - DNA, 75 bp, Homo sapiens
ccgagaggagccacaatggagacgccgccgctgcctcccgctcactgtgtgcccagtattctgcagacaaacgag

SEQ ID NO: 264156 - DNA, 75 bp, Homo sapiens
tgaattggatgaaagataaagcccttaaggacaagaaactaatctggattcactccctctggttgatacccactc

SEQ ID NO: 264157 - DNA, 100 bp, Homo sapiens
ccaagcccatcgtccgctctgtctccgtggtcacaggcagcgagcagaagaggaaggtgctgtgatgcaccatgccaatagtggataagttgaaggaggc

SEQ ID NO: 264158 - DNA, 100 bp, Homo sapiens
ttctagagggcccgtccccagcccgggccgtccatcctcgcattgctgttgaatgtgaccaaagacttgaccactcaaagtccagctccccagaacactg

SEQ ID NO: 264159 - DNA, 75 bp, Homo sapiens
acatccacttctaccccaccttccggatctacgcagaccccaccaagaggctggagctgtacttccggcccaagg

SEQ ID NO: 264160 - DNA, 99 bp, Homo sapiens
gagcgggagaaggcgctgcgcaagcacgctgaggagtctgaaaggcactttattatgcaggtggtctgtgaagccacacagtgtccagatacgagggta

SEQ ID NO: 264161 - DNA, 111 bp, Homo sapiens
actggacctccaaggaagccacgtgcagacatctacaaccttcgatctcctgacgagtggcacagaattgctctcagcgtccacaagaaaaatgtcaccttgatcctcgac

SEQ ID NO: 264162 - DNA, 73 bp, Homo sapiens
ttcaagcttaggaccacccaccatgcctatccaggggttatggttttgtgaaattcacagatgaactggaaca

SEQ ID NO: 264163 - DNA, 100 bp, Homo sapiens
ctttctacaaggagggcaagtttgcttccaagggtatattcaggcctgccgggcactcatgatcaccgccatcctcctgggcttcctcggcctcttgcta

SEQ ID NO: 264164 - DNA, 100 bp, Homo sapiens
cggacggcagccacagcgtccgactcgactcggagggtttctgtgagagacaaattgcttgttaaaggtgcaatggatgagcttcatagtctggatccaa

SEQ ID NO: 264165 - DNA, 83 bp, Homo sapiens
cccagccgcgccgagagggcggtgagaagccctaccactgcaactgggacggctgcggctggaagtttgcgcgctcagacgag

SEQ ID NO: 264166 - DNA, 75 bp, Homo sapiens
gtcgcggggcccgcgcccggagctggcgccaggatccctttgtggccttccacatcaacaagggccttgtgaaga

SEQ ID NO: 264167 - DNA, 75 bp, Homo sapiens
gcgcttcgccccgggccccccagcatgaagaccccggcggacacaggaaggtgctcgggtcttcggggcactggg

SEQ ID NO: 264168 - DNA, 87 bp, Homo sapiens
catgacacttacaagatggacagggatgataattgggcctccaagagtgtgttccagagaacaagccttcagacatttgctatattg

SEQ ID NO: 264169 - DNA, 72 bp, Homo sapiens
acattcacaacagataggtgatagttgggaatggagaccatcaaagatatgaagatcaatgatgcagactga

SEQ ID NO: 264170 - DNA, 75 bp, Homo sapiens
ggccaatgtgattctgggcaaagtgtggtgacttgtggattttcactggtacccattcctggcccagtgggtaac

SEQ ID NO: 264171 - DNA, 50 bp, Homo sapiens
tcccaagtggctgggattacaggtaaagaagttaaaagcgtttagtggcg

SEQ ID NO: 264172 - DNA, 100 bp, Homo sapiens
cctgacagctgtgtactttgccctcagcatctcccttcatgtctgggtcatggatttcaaatatgcgtgcattagagaatgattttttcaattctccccc

SEQ ID NO: 264173 - DNA, 100 bp, Homo sapiens
cttttactggcaaatagtacttcaagagcacagtcttatgtaagtttcaccagtgatcattaaagaatgggcagcttacaaaggaaagtctcctcaaacc

SEQ ID NO: 264174 - DNA, 76 bp, Homo sapiens
atatttctcttttgtctgcccctattgtaagtgcagatggaacacaacagatctgttacctaaagcaataaaaaat

SEQ ID NO: 264175 - DNA, 100 bp, Homo sapiens
ctccattctgttggttttatgcatctttatccaatcaagtgcccttggacaaagcctgaaaccaggtgtaggagctgcacgatctgggaacctcacgttt

SEQ ID NO: 264176 - DNA, 75 bp, Homo sapiens
atcgggcagctacacatcttgaaagagaagctcttcctgtgagattgtcactgctgttccaagggcacacgcaga

SEQ ID NO: 264177 - DNA, 82 bp, Homo sapiens
tgtcattgatggtctcaatgttgccaaaatgtttcctaaagttcgtgaatctcaacttcctccaccaggcggtgtgaagatg

SEQ ID NO: 264178 - DNA, 115 bp, Homo sapiens
cgcattttggcattgacatttaattttagggtcctttatatagaagggagagtaggctgtggaaaatctctgttctcacaaagtctccccaatgctctacaagcaactgcgtcag

SEQ ID NO: 264179 - DNA, 80 bp, Homo sapiens
atgcctgcagagctgtggcttaccaggcacgtctgagaatggtggatgtggtggagaaagaagatgtgaatgaagccatc

SEQ ID NO: 264180 - DNA, 100 bp, Homo sapiens
aactgtcacagaaagagctgttaacacttcctagataacggtgtggaaaagccactggcagtgattcaagtggtgtcattgatctcacaatggatgatga

SEQ ID NO: 264181 - DNA, 83 bp, Homo sapiens
ccacactcaggctctggccgcagtgtcctgtcattcgagtcaggcctgcaggtggagttcatcaaccccatcttcgagttctc

SEQ ID NO: 264182 - DNA, 87 bp, Homo sapiens
tcaactaagaccaagtcctcgctggactgctcagggtgccagacctcatcattgcccccgaggaattagcacttgttcacaacttga

SEQ ID NO: 264183 - DNA, 100 bp, Homo sapiens
gacagagccaaaatcagagctggaacctgaggagagagatgccatggacaatattaccaggcagaaccaattctacgatacccaagtcatcaaacaagaa

SEQ ID NO: 264184 - DNA, 75 bp, Homo sapiens
ggtcactttggacctatcaacagtgttgccttccatcctgatggcaagaggaatcaacagtgagacaattatgaa

SEQ ID NO: 264185 - DNA, 101 bp, Homo sapiens
tccacctggcctcagaagaggactctttttgtcctcaatgtgcccccatactgcacagaggagagaaggatattcctggactgactgatactacagtgcct

SEQ ID NO: 264186 - DNA, 75 bp, Homo sapiens
attttagggtcctttatatagaagggagagttctgcttggattctgctagacagacccgacaaagactgtctatc

SEQ ID NO: 264187 - DNA, 51 bp, Homo sapiens
gttcctctgcggtgtggtggaaggtggtgaaattgcctctacctttgatca

SEQ ID NO: 264188 - DNA, 82 bp, Homo sapiens
tctacactgacgaaagctttactcctgatttaatggggtttctgttgaaccagtctggtcaccgtcactcccattcccactc

SEQ ID NO: 264189 - DNA, 113 bp, Homo sapiens
ccgacagtccagctcctttcggctcttgcaggaagccctggaggctgaggagagagaggagggggctgatcctgatagcattgaaatggtggccacacgggtgctagagctct

SEQ ID NO: 264190 - DNA, 98 bp, Homo sapiens
caatggataaacttcggggaatggtatttggagctccagttccaaaacagtgtctgatcttaggggaacaaatagggatcaagtttgtggttctagca

SEQ ID NO: 264191 - DNA, 90 bp, Homo sapiens
actccgaggtggaggaggagtccccaggaaagcgcctggacgcagacatatgtagagtgtgtcggtcagaaggaacacctgagaaaccgc

SEQ ID NO: 264192 - DNA, 98 bp, Homo sapiens
ggggagtcatcatgagcgatgttaccattgtgaaagaaggttgggttcagaagagggctgcagaagaaagatcagcaactggagcctaaaaaaagtac

SEQ ID NO: 264193 - DNA, 101 bp, Homo sapiens
gtctcagcttggggggaactctgtcccccagcctggctgcacttgaggttcccgcccaggaaggtctcagcggcggtggcagccgaggtgcaggatgcaag

SEQ ID NO: 264194 - DNA, 82 bp, Homo sapiens
ctggatcatggctgccgcgccgccgctacgggaccgcctgagctttctacaccgggattttttatcaagcagaaatgcatcg

SEQ ID NO: 264195 - DNA, 74 bp, Homo sapiens
agatgtccagtaatgtcccggcggatatgttacccagcatgccacaatctgattgctgacctggatggaacaga

SEQ ID NO: 264196 - DNA, 71 bp, Homo sapiens
gctcagagaggggaagtgtttggccaaggtcacccagcgagcagtgacatcagtgtctggcccaggtgagc

SEQ ID NO: 264197 - DNA, 100 bp, Homo sapiens
cagaggaggagcttgctgcagagtggacagagcagaatgggctgatatagatccggtgccgcagaatgatggccccaatcccgtggtccagatcatttat

SEQ ID NO: 264198 - DNA, 126 bp, Homo sapiens
gtccagccacatcacattggagtcacaatcaaagaactggatctttatctggcttactttgtccacactccggatcgttcctgcaatcccaacctgatgagctttattacacgcataactgcacca

SEQ ID NO: 264199 - DNA, 75 bp, Homo sapiens
ggtggcagcccaggcggtccgaacccgtcggccggccgagcctggaggaggatttgacagctaaggatattgaag

SEQ ID NO: 264200 - DNA, 75 bp, Homo sapiens
tgaggaccccccaatccgcgtgagacgctgacagaggcaaaaatctgctaactcagggggcagactcaaccaaga

SEQ ID NO: 264201 - DNA, 100 bp, Homo sapiens
caggaagcgacctctcctcgcccccctctgcaacgggctcatcaactcctacgaggacaaaagcaacgacttcgtatggcctccccatggccacccatgg

SEQ ID NO: 264202 - DNA, 100 bp, Homo sapiens
gcggagacggcggaagcggagagcaacagcgcgccgccttcaaatgtttatctggtgtgactgtattatgccctcagagagtactgtatgttgcccaggc

SEQ ID NO: 264203 - DNA, 51 bp, Homo sapiens
cgtctcaggggctgaagtttgtgagggggcagctggcattttatgctatgt

SEQ ID NO: 264204 - DNA, 48 bp, Homo sapiens
aagaaactgtccgagaagcccaaaagatctcggctcaccaaattccac

SEQ ID NO: 264205 - DNA, 82 bp, Homo sapiens
agaaaatccacaagaacgcactttcctcccagatgtgaagttcatttccaatccgccctccatggtggcagcggggagcgtg

SEQ ID NO: 264206 - DNA, 100 bp, Homo sapiens
tgcagcgggagctggacggcgagcgcgagcggcgcgagaaagtgtgaccatgaagctcatggatgaggtcgccgggatcgtggctgcacgccactgcaag

SEQ ID NO: 264207 - DNA, 75 bp, Homo sapiens
aagaagagggcggagcggagacgggagtattatgaaaagatcatggctctgagagattcctctgcgaatctgttt

SEQ ID NO: 264208 - DNA, 82 bp, Homo sapiens
gcgtgtctaggtgagtcgcggtgggtcctcgcttgcagttcagcgaccacggtcttgccccagaagctgcgggcacatccac

SEQ ID NO: 264209 - DNA, 50 bp, Homo sapiens
gagggaaagaacttgtattccaaacagaaacctctgtagaggagcaggat

SEQ ID NO: 264210 - DNA, 99 bp, Homo sapiens
aagatgggaaagcccatcctttcaaaatcaacttagaatcagaaccacagatgaggaaacagtctcagagaagataagagactttcttagagtcacaca

SEQ ID NO: 264211 - DNA, 100 bp, Homo sapiens
cagcctctcaagtagctgggactacaggtgctggagaatctggtaaaagcaccattgtgaagcagatgaggatcctgcatgttaatgggtttaatggaga

SEQ ID NO: 264212 - DNA, 90 bp, Homo sapiens
cccagacctaagtttgaagattggctttgtaacaagggtgtccgcaatgttgccagtgtctgtctgcagattggctacccaactgttgca

SEQ ID NO: 264213 - DNA, 88 bp, Homo sapiens
gcagctgctgctgaccctggccttcaaccccgagccgctggtgctacaggttgagcaatgtttaaagcgtttgaaaaacatgaatttg

SEQ ID NO: 264214 - DNA, 98 bp, Homo sapiens
ccgcccatccccgctccccgaggccggccgcctggtcatggcgcagccgggcccggcttcccagcctgacggcacttttaaatcaacttagagctgtg

SEQ ID NO: 264215 - DNA, 82 bp, Homo sapiens
gaggagacggcggccttcgaggaggtcatgaaggacctgagcctgacgcgggccgcgcggatctctgttgaggagctggcgc

SEQ ID NO: 264216 - DNA, 101 bp, Homo sapiens
ctggagtgcgtgggggaccggctgttggcggtgcaccaattccagctggacatcactgtgaaaatgggacgggataaagtccgagaaatgtttatgaagaa

SEQ ID NO: 264217 - DNA, 82 bp, Homo sapiens
gagttttatggtgtgctttaagagccctgcagaaaaaagctgcggtgcaaccctgggcagtttgcgtgtcgcagcggcacca

SEQ ID NO: 264218 - DNA, 100 bp, Homo sapiens
aggatgacttccggagagttgtggactttatagatgaaggggtcaacattggcttagaggtgaagagcaagactgccgcttacaaacacgcagatggcaa

SEQ ID NO: 264219 - DNA, 96 bp, Homo sapiens
cacgatctccggcagcggcctgggaactcttagctgagcaggcgagagggcagtaaacaagagctctgaaaggggaaggaagccaggagaaagcca

SEQ ID NO: 264220 - DNA, 85 bp, Homo sapiens
agactggcttccagtgcgctgtcaaaaagctggtgaaactgcgtgctgtaagctgggaccagctttgtccataactgctgagaga

SEQ ID NO: 264221 - DNA, 75 bp, Homo sapiens
gcgtggacaacgccttcctcatcgcctatgccatcggcatgttcatcagttatgcaaagggtgacctggacatat

SEQ ID NO: 264222 - DNA, 74 bp, Homo sapiens
tggtggccaacctcttgtatgagaaacggtatcttggagatggccgcttccatctggagtctgtcatgattgcc

SEQ ID NO: 264223 - DNA, 97 bp, Homo sapiens
catgaatgaaatgaagagttattctcaagctgtcacaggaattgtctacaacctgttgtctctgcgcttcaactcacggatccgtgtgaagacctac

SEQ ID NO: 264224 - DNA, 83 bp, Homo sapiens
attttgggtcttcttcttaatcccatatctggacatctggaacatccatgattactcgagtggatggaaggaagttgcttctt

SEQ ID NO: 264225 - DNA, 100 bp, Homo sapiens
cagctctgcgccgatctatgcacgcagatgctggagaagtccccttatgaccagaacattgacatcaccaatttcagcagcagctggagcgatggcctgg

SEQ ID NO: 264226 - DNA, 97 bp, Homo sapiens
tctcagtgatccctcaagatccagtgctgctctcaggaaccatcagctctggattaatcgaattacagctgctagccaggaacatggactgaagtat

SEQ ID NO: 264227 - DNA, 90 bp, Homo sapiens
aaggattccaagtaactcttatttgagatgtgaatacagctgtgatggagttgctcatcatggcttacgcactgaagactgcctgtgcca

SEQ ID NO: 264228 - DNA, 100 bp, Homo sapiens
caccactggacctccaaggaagccacgtgcagacatctacaaccttcgatctcctgacgaggctctggtatcagttcctcttcagtattgcatggcatgg

SEQ ID NO: 264229 - DNA, 80 bp, Homo sapiens
tgtcatagacgtccgacgtgtctgcatcttcatgatacagttaagaggaatcttgacagcgccacttcccctcagaatgg

SEQ ID NO: 264230 - DNA, 80 bp, Homo sapiens
gccagcccacgcattagcatttcagcagaaattccacaggagcggaaagaatgtcggagcgggccgcggatgacgtcagg

SEQ ID NO: 264231 - DNA, 90 bp, Homo sapiens
tgaccgtggagttcgaggagtgcgtcaaggactccccgcgcttcaggtgcatctgcagacgcagcaggaggtgaagctgcgcatgacggg

SEQ ID NO: 264232 - DNA, 74 bp, Homo sapiens
gcgggcgttttggaagataccggaagtagagtcacggagaggagctgctgctcttcctccagaacctgcccaca

SEQ ID NO: 264233 - DNA, 75 bp, Homo sapiens
gcataaggaagccaagttggaccgttctgatgtgactgagagagaaggtaggatccatgccaaaagagcttctgg

SEQ ID NO: 264234 - DNA, 75 bp, Homo sapiens
agggacacaactgccacaagccggacacgtgctaggtcctttcacaaaactgttcctgtgaaagcatttcctgct

SEQ ID NO: 264235 - DNA, 75 bp, Homo sapiens
gagggacgcggagtcgcgctgtgacgagcgggaggcgcggcgagggcgccagtcagcctacgctgtgtccctgct

SEQ ID NO: 264236 - DNA, 130 bp, Homo sapiens
gtttttctcttccttcgctaacgcctcccggctctcgtcagcctcccgccggccgtctccttaacaccgaacacccaaaagctggcaggctgacagaggcggcctcaggacggaccttctggctactgac

SEQ ID NO: 264237 - DNA, 80 bp, Homo sapiens
accaggttgtttcgatagctcacactcctgcactgtgcctgtcacccagggcaccagctgagagacagaatttttggaag

SEQ ID NO: 264238 - DNA, 75 bp, Homo sapiens
ccggaatgatcctcttcaagatctcttgttcttccccagtgatgacttttcaattgaatctctacaaaaagctct

SEQ ID NO: 264239 - DNA, 80 bp, Homo sapiens
atcatctactgaaatctttaaagggcactgaaggatagcacagaagtagaaattgtggatgagaaaatgagaaaaaagat

SEQ ID NO: 264240 - DNA, 100 bp, Homo sapiens
cgccatgggcctgctggccttcctgaagacccagttcgtgctgcacctgctggtcggctttgtcttcgtggccggctggatcctgcaggcagctgtagcc

SEQ ID NO: 264241 - DNA, 100 bp, Homo sapiens
ggaggctggaggtactgagaggatggaaatcagcgcggagttaccccagacccctcagcgtctggcatctgagtggaagctggacacactatgtgacttg

SEQ ID NO: 264242 - DNA, 98 bp, Homo sapiens
ggaggcgggagcggagacctcgctgcgctcatggcgtcgcccggagccagtcttggtgctctgtgttcacctggttcatctgaggagctgcatctacc

SEQ ID NO: 264243 - DNA, 51 bp, Homo sapiens
agccgccgcccgccgcacccatgagggccgcctgggcagaatgtcacgatg

SEQ ID NO: 264244 - DNA, 75 bp, Homo sapiens
gctgaccaagatgctatgtgagatcttgaaagtgggcgagttgcgctaattcacctaaataagattgatcctcat

SEQ ID NO: 264245 - DNA, 76 bp, Homo sapiens
tggacgcgctcagcgagtgggactggatggagttcgctgtgaagttgtcctgtgcctactcgggcttttcttctcc

SEQ ID NO: 264246 - DNA, 108 bp, Homo sapiens
gggatgtcttcttcggcttcgaggagaataagtgcagtatgagctacatgtttgagtacccggagtatcaggacatggatttgattgacatactttggaggcaagata

SEQ ID NO: 264247 - DNA, 80 bp, Homo sapiens
ttccatggcagggaacttttggcagagctcccactacttctgggctggctggctgagaaactacctactcttcgttccac

SEQ ID NO: 264248 - DNA, 90 bp, Homo sapiens
attctccggggacccttccgtatctgcctaggcattttgctgtctcctcctaatacgggctacaacagaccaaaagcttatattgctgcc

SEQ ID NO: 264249 - DNA, 100 bp, Homo sapiens
tgtcggcagactggtgacttcacttttgagtgcaactgccttccagacctgatggccaaaagaaaggaagaaaatttttcctctcctaaaaatgccaaaa

SEQ ID NO: 264250 - DNA, 82 bp, Homo sapiens
cttcattgctccttcaggacatgggcatcacgttgggtggtttccatttagaccgaggccggttcagaacttcccaaatgat

SEQ ID NO: 264251 - DNA, 75 bp, Homo sapiens
actgaatcacaggagatatttccagtgctccatgtgcatccctcttgaagcttcgcactctgttgaagaggacac

SEQ ID NO: 264252 - DNA, 83 bp, Homo sapiens
tacctgtctggattattcattattacatgaagtatcatgtttctggatcatagacggtatttctatgtaaacgaacagtcggg

SEQ ID NO: 264253 - DNA, 75 bp, Homo sapiens
ggaaggctttatgaataaggaggtgatgatccaatgccctttgacattaaagctgagatgacactgaagacaaat

SEQ ID NO: 264254 - DNA, 83 bp, Homo sapiens
gctgcttatggcggcgctggagagggggcgctgagctgttggggtaccacatggaatgcttggacccccctctccaggaggtg

SEQ ID NO: 264255 - DNA, 100 bp, Homo sapiens
attcaaatccaaagttctcgcccactatcctcagaatatagaatggaacccttttgatcaagatgcggtgaacatggtggtcactaactgccaagagaga

SEQ ID NO: 264256 - DNA, 90 bp, Homo sapiens
atggcggtaggctgggaccataacacaaggaggaagaaggcacctacgatcaaactctggagttccgtaggggaggtgatggccagccaa

SEQ ID NO: 264257 - DNA, 88 bp, Homo sapiens
tgggagagaagacgtaccattatgtgcccgaattccgaaaaggtcggattgtttgtgctgaacgaactgtcctcttgcttcagaagcc

SEQ ID NO: 264258 - DNA, 75 bp, Homo sapiens
ccccaacaccctctacgaaggcggctacttcaagtatgacttctctttggaaaagaaaaccattgagtgggctga

SEQ ID NO: 264259 - DNA, 90 bp, Homo sapiens
cgactctcagaccaagagcatcttcgagcaagaaactaataataataattccagcttctacacaggtgctggagaatctggtaaaagcac

SEQ ID NO: 264260 - DNA, 96 bp, Homo sapiens
aggtgcaggccgttggggcggctcagaggcaggagaccaagacacattccaccccagtggggggtcccataccactcatggatctgaatcagatgg

SEQ ID NO: 264261 - DNA, 75 bp, Homo sapiens
gtcgggttattcgagtgaccgagaccgcggccgggaccgagggtgctacctttttacccacacttaagtgacgca

SEQ ID NO: 264262 - DNA, 83 bp, Homo sapiens
cgggatcctggctactctggccccgcaggccgggagcagaggggcgcagcccagtggtttggagtcagcggcgactgggaggg

SEQ ID NO: 264263 - DNA, 74 bp, Homo sapiens
ggatcaaaactcattcgaaaagctaaagaggcaccattcgtacccgttgggattaatgaaaatcaagttccatc

SEQ ID NO: 264264 - DNA, 82 bp, Homo sapiens
agatcgtggacaagatcatgggcaaaggacagatccagcttccttcaaaatgtctactgttcacgaaatcctgtgcaagctc

SEQ ID NO: 264265 - DNA, 100 bp, Homo sapiens
ctgcagtaaagaggcagctccgagtgaggaccatctacgagagcaaaatgattgaatacgatcctgaaagaagattagctagaggaaatgacagagcttg

SEQ ID NO: 264266 - DNA, 76 bp, Homo sapiens
tcaagccccacctgaggaagaaaatgaaagtgagcctgaagaaccatcgggaggcaagtgaggcctatctggttgg

SEQ ID NO: 264267 - DNA, 97 bp, Homo sapiens
ggtgtcttctggttgcagaatgcgaagtctgtggtttatcattgtaatcagcttcttaccaaatacagaagatggtgatggaatttcctgataatgt

SEQ ID NO: 264268 - DNA, 99 bp, Homo sapiens
gctgctcctcctcgtgctggcggcggcggcggcggcggcggcggcgctgctcccgggggcgacggatgccatggacaatattaccaggcagaaccaatt

SEQ ID NO: 264269 - DNA, 109 bp, Homo sapiens
atacactggaacagaatcaacccagaacggatagctccctcctggaaaaggtactccaaagattcaggtttactcacgtcatccagcagagaatggaaagtcaaatttc

SEQ ID NO: 264270 - DNA, 75 bp, Homo sapiens
tgaggacctgcaccgccaagccaagctcaacctcaaatcagtactgagggagcaggacaggctgctttggtttgt

SEQ ID NO: 264271 - DNA, 82 bp, Homo sapiens
aggagccccgcgagtggcgcgccggggatagtccggcagcgtcttctcttgagggagcaatttggagaagagctggaaccca

SEQ ID NO: 264272 - DNA, 80 bp, Homo sapiens
aagatgtcggagacacggtggaaacgcttatgctggtttaggtgaatttcgaattcgtgacctgaatgatgaaattaaca

SEQ ID NO: 264273 - DNA, 100 bp, Homo sapiens
caacatttactgagcatctacttcgtgccgagtccaggcatgataaagaaaagatagaaaagaaagagaaacgggacagttcaggaggaaaggaagagaa

SEQ ID NO: 264274 - DNA, 82 bp, Homo sapiens
tcttcagttcgtgtgtggagacaggggcttttatttcaagtcagcgtgggagaaattgtaacgagaaaccaacaaatgtcag

SEQ ID NO: 264275 - DNA, 90 bp, Homo sapiens
ctccaagacctcatcaacaattaagagtgatggtgatgattttaattacatcattgcatttttccttggaacagcagcctgcctttacca

SEQ ID NO: 264276 - DNA, 100 bp, Homo sapiens
tgccgccgccggctctcgggagcgcaacactgcagggctgggttacgacccctacaaccctgagctgcccaagccccccgcgcagagggagaatggcacc

SEQ ID NO: 264277 - DNA, 98 bp, Homo sapiens
tcaattcttcgacaggaaaaaaatttgctggatattgatgcgccagtcactggcaaggtagtaatttcattatctggagtatttcacctccacatctc

SEQ ID NO: 264278 - DNA, 96 bp, Homo sapiens
gatcgagaaaaatcacgggctgtccaggaactgtcggaacagaaccaaaggctattggatcagctcagcagggctttggtcctcttagatgtcact

SEQ ID NO: 264279 - DNA, 83 bp, Homo sapiens
ctttgcagccggccttagtgctcgcgcaggtatgagccagagcgggatgagtggcacttggtggccccaatgctgacacgaag

SEQ ID NO: 264280 - DNA, 94 bp, Homo sapiens
atcctcatgctcctactatccatttcaactacagatactttgaagtagaagaagctgatgccctggtacctgacagtgtaaagaaggagctcct

SEQ ID NO: 264281 - DNA, 74 bp, Homo sapiens
ggaaggatgttaattcatcttcacccgtgatgttggcctttaaatgtttacaggtacatacattacacccctat

SEQ ID NO: 264282 - DNA, 83 bp, Homo sapiens
acatccacagaatagacctgaagacaaaaatccagaagtacaagcagtctgtcagcaaactgaaacttcaggccaaattcaag

SEQ ID NO: 264283 - DNA, 100 bp, Homo sapiens
gcgcgaagagactgaactgaagacgctgcagactcagatagcaaaataataagcctacttcatgataagcccagatgaaccaatgacaaatttggaatta

SEQ ID NO: 264284 - DNA, 100 bp, Homo sapiens
gaggctctcactaaccacaggcatcagttggtactcgccatgaaactcaaagatcgagagatgactttgaagaagccaaggaaattttgacaaagatgag

SEQ ID NO: 264285 - DNA, 82 bp, Homo sapiens
gattacttcagaattaccagtgttacaggtcaccgggagcaagaagtccaccaagaggaccaaatccatcaacggctccctc

SEQ ID NO: 264286 - DNA, 96 bp, Homo sapiens
aactccagtggtccctcacctgactgagtggcgcagtcagagataaatggaacagaccattaaaaatctcaagtgacgactttgggaaactctggt

SEQ ID NO: 264287 - DNA, 100 bp, Homo sapiens
ctcgcaaccactcaccgtctacttctccctgagcctcctgcagatcatggacgtgcaaaagctggcaggctgacagaggcggcctcaggacggaccttct

SEQ ID NO: 264288 - DNA, 100 bp, Homo sapiens
cgtcggtctgggaggaactcattgtccaatggatgggaccccaatgaaatgttcaagttcaatgaggagaactacggtgtgaagactacctatgatagca

SEQ ID NO: 264289 - DNA, 75 bp, Homo sapiens
gcgcctcggcccgctcttctccctgcttaacgagaaccatagtgccaccatggcaactgcaccatacaactactc

SEQ ID NO: 264290 - DNA, 74 bp, Homo sapiens
acaaaacagcagatttcccaagagcagcggaaaatgatccagtcacagagcactgcagtttcctcctgaaggct

SEQ ID NO: 264291 - DNA, 100 bp, Homo sapiens
actggcatcgtgctgaatcggccggttttgagaggggaagatggggacaaagccgctccacctcccatgtcggcacagaccccaccaacaactgaacgct

SEQ ID NO: 264292 - DNA, 51 bp, Homo sapiens
caaaattcaggcatttgtccaaggaagagctggagaagagcgtccggcgcc

SEQ ID NO: 264293 - DNA, 50 bp, Homo sapiens
caactacttccttaagatcatcgaacggggaggtaacaactccttcaccc

SEQ ID NO: 264294 - DNA, 100 bp, Homo sapiens
tcagcctcccgggagaatctcctggaggagcaaggcagcatagcactgcggcaggagcagattgacaatcaattgaaaacatacttcaagttttttattg

SEQ ID NO: 264295 - DNA, 98 bp, Homo sapiens
ctagtcctggtggatctgcagtacgaaggtctatgctccatcagcaagcactgccgactacaatagggactcgccaggctatccttcctccaaaccag

SEQ ID NO: 264296 - DNA, 116 bp, Homo sapiens
agcaggagtcgtccgcttatagtggaggctgctaggagccggtcagaggtagaacttcatggaggaacacggagtgacccaaaccgaacatatggctaccatagaagcacatgcag

SEQ ID NO: 264297 - DNA, 73 bp, Homo sapiens
cgagaaccgtcagtttgagccagatggtatgagggtgctggttgatgctcgagagaagcttcatattccctgg

SEQ ID NO: 264298 - DNA, 98 bp, Homo sapiens
gatgaccacacagacctcgccattgagtatgaggtgactctgacatcattagaagcatgccagaacagactggtgaaaagtaaaccttttcacctaca

SEQ ID NO: 264299 - DNA, 82 bp, Homo sapiens
cggaaacgccgaggaacccggctgaggcggcaggcttcagggatgacttcttagggggcaggggaggtagtcgcccaggcga

SEQ ID NO: 264300 - DNA, 74 bp, Homo sapiens
aggaaagaagatcaagctacagatatgcggacaaggagttgtgaaactggacgttcagccaaagtgcgtagccg

SEQ ID NO: 264301 - DNA, 82 bp, Homo sapiens
caagaggctcctgcagacccctggcttcctattctctgcaatgactgtaatggacgatccactgttcagtttcatatattag

SEQ ID NO: 264302 - DNA, 82 bp, Homo sapiens
cgagcgcgccgcgtagacctccgctcccccaggaacgtggctgaagagcggtctgggtcttgtgcaccaggaaggcagccag

SEQ ID NO: 264303 - DNA, 100 bp, Homo sapiens
ctcggaccagcagtgaccttcaaagtgagcgccaatgtccaaaacgtgaccactgaggatgtggagaaggccacagtgctttctcctgctcaagacagcc

SEQ ID NO: 264304 - DNA, 75 bp, Homo sapiens
ggcggttgaaggagcagtctatctttgccttctctgactaccagatccagcagatgacagccaacttcgtggatc

SEQ ID NO: 264305 - DNA, 50 bp, Homo sapiens
gcaatttgccatttatttgtaataaggtgatttgatgaaggctgctgcag

SEQ ID NO: 264306 - DNA, 75 bp, Homo sapiens
gtcatgatctatgacgccgagaagcagaggccccgaggactgatcctttgaaatactccagccatgactaaaaga

SEQ ID NO: 264307 - DNA, 90 bp, Homo sapiens
acttattcctgtccggagacagcctaaggctaaaagatggcggcaaggcagcccaggcaaatgtaagaataggcgatgtggttctcagca

SEQ ID NO: 264308 - DNA, 76 bp, Homo sapiens
tcttgccctcctaacatcatgaccacaactgatgtagaaggccaatccttaagacaccgagacaagcggcttagtt

SEQ ID NO: 264309 - DNA, 130 bp, Homo sapiens
caccactgaagatgaggttgaaaaacctgacttttatcatcatattgataatctcaggagaactctatgcagaagtttctgcagaaaaatgtgggccccctccacctattgacaatggagacattacttc

SEQ ID NO: 264310 - DNA, 75 bp, Homo sapiens
gtagcttggatccttgtgggcatgatccataatcggtttcaagatccacatctcaaagaagtggggcttcaccaa

SEQ ID NO: 264311 - DNA, 100 bp, Homo sapiens
gagatgctggtggcagggcatgaggacagcaatggttgtatcaactatgaaggagtggagtcaacatatcaatggagcaagtcacagtcgtcgatgccag

SEQ ID NO: 264312 - DNA, 100 bp, Homo sapiens
tcttcatctgagagtacttcttcaacaggttttgggtcctgctcctcggtggtgttccttcttagacaacttgaccgaagaattagaagagaatccagaa

SEQ ID NO: 264313 - DNA, 100 bp, Homo sapiens
ataaagctcctgggcaaggggacgtctgcagctgattctgaaacacagacaacatcaagggggaaagaaagtgaagattcatcttataagccaatttttt

SEQ ID NO: 264314 - DNA, 83 bp, Homo sapiens
gccacttgcttgggatcctttatcctggtcatcttctatttccaaagtatgttgcacccagacctgcctagagctggaacgtt

SEQ ID NO: 264315 - DNA, 50 bp, Homo sapiens
aacagattcagtggcctgcattgagccccgaagccaggacaggagacggc

SEQ ID NO: 264316 - DNA, 96 bp, Homo sapiens
cctgggcacgctggagtcggagctgcagcagaggcaaagcaggagcctgaacgaactgcgggtgttgctgctggaggccaatcgtcactccccagg

SEQ ID NO: 264317 - DNA, 75 bp, Homo sapiens
ggattccaagtaactcttatttgctctgattgctcttttgagagaaggtgagagcctggaggatttgatgaaact

SEQ ID NO: 264318 - DNA, 82 bp, Homo sapiens
cggacatgagcaagcccccgacagctcagccagacttcccctatgcggagctggagtttgttcagatcatcatcatcgtggt

SEQ ID NO: 264319 - DNA, 90 bp, Homo sapiens
gaccagctagagaccatacagacctaccggtctgtcagtgagatggcttctaacaagataacgaaggaggcccaacttcattcaataagg

SEQ ID NO: 264320 - DNA, 99 bp, Homo sapiens
ctcattgtagcctcaaactcccaggctcaagcagtcctaccatgtcagccttcccagtagctgggaccacagcactgctcagcacgcaggcatgtgagg

SEQ ID NO: 264321 - DNA, 90 bp, Homo sapiens
gcatcatcctcagaggatgaggaggtcataagtcaagactgtctcctatatataatctggttccagtgaaaatgaaaaatgcacacctaa

SEQ ID NO: 264322 - DNA, 80 bp, Homo sapiens
actcttctccttcacagtaaagtggctggatgaagctcttacaccaagtgtcacgagtctggagaacagatgggttgagt

SEQ ID NO: 264323 - DNA, 100 bp, Homo sapiens
ggatggtgccacaggaggctgtgcgggccccgctccgcttcgaatggattgggctaatggatactacagacaacagagaaaacttgttgaagagattggc

SEQ ID NO: 264324 - DNA, 51 bp, Homo sapiens
ccagatggcagccagtcagtggtggagggtgcagaagctggatacctacca

SEQ ID NO: 264325 - DNA, 100 bp, Homo sapiens
ttgatgcgctgcgggcagccgtggtggaccggaaaggtggagggagcaaagtcctgcacactggagtggtgtactagcggatcaagtatggacactgact

SEQ ID NO: 264326 - DNA, 83 bp, Homo sapiens
gtggaaaatgcgctcgggctggaccagcaggctatgactttgcagccgtcctggagtggttcgcggagcgtgtggaccgcatc

SEQ ID NO: 264327 - DNA, 100 bp, Homo sapiens
gacaatgtgaatgccctgaaagatcgagcagaggcctatttgatagaggaaatgtatgatgaaggaattactcacagctgtgctgtgtgcattctctgtg

SEQ ID NO: 264328 - DNA, 100 bp, Homo sapiens
gggcacgtgtttgcggttcagccctttgatgaccgcagcagccagaggtgttcctggggagatggcggaacagcacggagcacccgaacaggctgcagct

SEQ ID NO: 264329 - DNA, 122 bp, Homo sapiens
aatcgaaattgtacacatttccaccgtgcagatcctcacagaaggcttccctcctggagggcgtctctggccgagcctctttttgtggaaaacgacagcagcagcagtggcctggaagacgc

SEQ ID NO: 264330 - DNA, 97 bp, Homo sapiens
agggagcccgcgtcggctgagagcccacaggcccccacagtgctcttaaagttccgtacagataaaggaagagatcccagttctgatacatatgagg

SEQ ID NO: 264331 - DNA, 98 bp, Homo sapiens
gctgcagttgctggccgagcctggcctgggccgcgtccatcacctggcactcaaggttctcttagaagcacaagatatggcagtgagagaccataacg

SEQ ID NO: 264332 - DNA, 74 bp, Homo sapiens
ggatttaaaagacagtcctcgtcagcactgactttcagctatggaatcgtaatctatgccagcaattatgacaa

SEQ ID NO: 264333 - DNA, 98 bp, Homo sapiens
aaggtgtttttaatgttgaagttgttgctgtttcgtctatccatacacaaaaagttcaggagccctggaaaggagaaggaataagacggcaggaggaa

SEQ ID NO: 264334 - DNA, 75 bp, Homo sapiens
tgttatatgtcctaaagtaaggtttcagggagattggtggacggctcctcatggtagaaactcgacttgcaaatg

SEQ ID NO: 264335 - DNA, 88 bp, Homo sapiens
ttagaattataaaatatttgttgggagagctcaaggccctggtagcagaacaaggaggagatgttaaagtaacccatcttgcaggacg

SEQ ID NO: 264336 - DNA, 100 bp, Homo sapiens
atcaccggcctcctgcaagagtttgatgtccagatgccttcaattaagttgcagagttctgatggagagatatttgaagttgatgtggaaattgccaaac

SEQ ID NO: 264337 - DNA, 100 bp, Homo sapiens
gatgacgtacagaagagtactgggtgtgattttgcaattgatgaactcccagagggcgctgtgaagcctccagcaaacaagtatcctatcttcttttttg

SEQ ID NO: 264338 - DNA, 100 bp, Homo sapiens
caatcacaggccctctccggaccaggaatgtttacccttgcggaagttgcatcacttaatgacattcagccaacttaccgaatcctgaaaccatggtggg

SEQ ID NO: 264339 - DNA, 75 bp, Homo sapiens
tattgcttacggcttagacaaaaagctagatgctggtgtgccagaaaaaataagcctgatttccagagatgagaa

SEQ ID NO: 264340 - DNA, 100 bp, Homo sapiens
cgacatggttctcaacaagatggccaaagatgagctccttcaggagcagcgtgcagatatggaccagttcactgcctcaatctcagagacccctgtggac

SEQ ID NO: 264341 - DNA, 99 bp, Homo sapiens
gctccctgctgcataagaccttgtcagagctgaagaaatcaggggagaaacccctgcttggtggaagcctgatggaatatgcaatcttgtctgccattg

SEQ ID NO: 264342 - DNA, 100 bp, Homo sapiens
gtggtggtggtgggggtagcaggaagatgagaatgtgcctactgctcctgatcctccaagtcaacatttacgtgggcatgggacaggcttttgctttgat

SEQ ID NO: 264343 - DNA, 100 bp, Homo sapiens
gtttaaagcaaactttactactggctatcacttggggattccaggggtaccaaagtctgatctcttgcacaccaaatcattaaggggccataaagactgc

SEQ ID NO: 264344 - DNA, 100 bp, Homo sapiens
agcgagcaaagtgctgctgtgccatggggagctgcggagcaagagtggacatacatatctgaagagatggattaagaatgctttggattaaggattgtgg

SEQ ID NO: 264345 - DNA, 88 bp, Homo sapiens
ggaaaagagcaatatggatgtttaaaaatgagaaggccattgcgtggtacacccctatccactggaagcaagcgtgggaaaaattaga

SEQ ID NO: 264346 - DNA, 98 bp, Homo sapiens
gtaactctgtccttattatcggaccccgaggatcaggaaaaactatggggccacctacagatgctcctgcagtggacacagcagaacaagtctatatc

SEQ ID NO: 264347 - DNA, 83 bp, Homo sapiens
taagggctacgggaagatcctggaggtggatctgaagaacgggaacaggcctttgagagcagccagaagtacaaagaggggaa

SEQ ID NO: 264348 - DNA, 74 bp, Homo sapiens
gattgacaacttcttcagtgagccaacaaccaagagctgggagatcaaccctgaccaccccattgtggagacgc

SEQ ID NO: 264349 - DNA, 100 bp, Homo sapiens
gaggaattctctctcctcacctgcagcatcaactgttacctcaccttcggagacaagatcaaggctcacatccggttcaagccaacactttcccagcagc

SEQ ID NO: 264350 - DNA, 75 bp, Homo sapiens
acctctttgatctcgacaataaggcaaggatatcctgaaggatactatagttccaaaagtggatggagcagtcag

SEQ ID NO: 264351 - DNA, 89 bp, Homo sapiens
aaaatgcatgacagtaacaatgtggagaaagacattacaccatctgaattgcctgcaaacccaggtcctttgtcatccagcaaatccca

SEQ ID NO: 264352 - DNA, 109 bp, Homo sapiens
gggaggatcacttgagccagggagttgaaggctgcagtgagccctgtttttgccaccacactccagcttgggacatggacatcttccagcaacagatctcgagaagaca

SEQ ID NO: 264353 - DNA, 100 bp, Homo sapiens
cgcgggccgaccgggcgcaccgaccatggcctccaaatgccccaagtgcgacaagaccgtgtacttcgggctttgttcgcgggggtcacagctctcatgg

SEQ ID NO: 264354 - DNA, 75 bp, Homo sapiens
cagtgttgtgccagcctacaggaggaaaggccagactcacagaagttatttctcaaactctgaggctgcggagtt

SEQ ID NO: 264355 - DNA, 73 bp, Homo sapiens
gaaggtctctggagacatcttcagcaggttgactatagtcaatggggccaatggagccaagtgtatggaaacc

SEQ ID NO: 264356 - DNA, 82 bp, Homo sapiens
gagcgctggggccccctgctcctgtgcctgctgcaggccgctccagtgagtgttgcagagagctgctggacacagtggataa

SEQ ID NO: 264357 - DNA, 75 bp, Homo sapiens
ggaagatcagaggctcacattccaggagcagcatttctttctattactactatctatgctgagactggttcaggt

SEQ ID NO: 264358 - DNA, 83 bp, Homo sapiens
ggaagatggtggccgcaaagaagacgatgtgtgcaacagcaccgatcttccggaagtcgagatcattagcctgctggaggagc

SEQ ID NO: 264359 - DNA, 100 bp, Homo sapiens
tcagtcagttgtttgatttcatcgatgatctggcagacctcagctgcctggtgctgtatagatcaattggagaatacgacgtcctccgtgggatttttac

SEQ ID NO: 264360 - DNA, 75 bp, Homo sapiens
agctgttttggaactgtcaggtacctcaaagcttttcggctttgtgagaaaccttaccatcaaacacgatggcca

SEQ ID NO: 264361 - DNA, 99 bp, Homo sapiens
ggagggcgcgcggccgagcggaggcggagtcggcgccgagaacatgggattcgggttcgtaactttcgagaatagtgctgatgcagacagggccaggga

SEQ ID NO: 264362 - DNA, 100 bp, Homo sapiens
ccgccgtcgctcggacgctcctgctcggctgggtcttcgcccaggtggccggcgcttcaggcttttgatgaggccattgctgaacttgatacactgaatg

SEQ ID NO: 264363 - DNA, 50 bp, Homo sapiens
cacagcaaggcagtcacaccaaggcaaagctgggaaacagttctgtgagc

SEQ ID NO: 264364 - DNA, 100 bp, Homo sapiens
accgcttaccgcatctggctggagccctgcattcgcggcgtgtgcagacttcccaagtaagaagcggaagaggagccgctggaaccaagacacaatggaa

SEQ ID NO: 264365 - DNA, 100 bp, Homo sapiens
ccttggtagcagcgggtgacatggaaggggcagtacaagcttacgtctctgctcttcagtacaatcctatatgtcacagatctaagcagcagggatttaa

SEQ ID NO: 264366 - DNA, 75 bp, Homo sapiens
acgtggatcgttgttttgaaacataaatactgcaacaactgtagctgacttaaagtcaataataaatgaatgcta

SEQ ID NO: 264367 - DNA, 100 bp, Homo sapiens
aatacgtggttggagagctcatctggaattttgccgatttcatgactaaccagtctttcactctactcagttcctgagggtcaatcgaagtatgtggagg

SEQ ID NO: 264368 - DNA, 74 bp, Homo sapiens
ccccattgctgagccagcggagctgcttgcgatctagggcagccctgcagaggtacctgttctactgtaatcgc

SEQ ID NO: 264369 - DNA, 100 bp, Homo sapiens
aacgggccgcgaaccgcagtatcatgctggccaagaagatcatcattaaggacggaggcacgacaaatttacatgtattggagaccagaccagaagccct

SEQ ID NO: 264370 - DNA, 107 bp, Homo sapiens
cgcctcatccaaatgagacccttcctggagaaccgggcccagcagcactggggacccgtgcatctcttccgactctcgggcaagtgcttcagcctggtggagtccac

SEQ ID NO: 264371 - DNA, 75 bp, Homo sapiens
cagaaagagaatgtggtccagaagctggaggaaagcaggaatgttcagaggcaaatgaagattctgcagaataag

SEQ ID NO: 264372 - DNA, 96 bp, Homo sapiens
cggaggctgagggagtttgtggagtcgcgagtgctggtgtccgggggaagaggtggtaccagagacgccatgtgaaatcctctaccagggaatgct

SEQ ID NO: 264373 - DNA, 90 bp, Homo sapiens
gtggatgagacaagcacagtgccaggcacttggaaatgtttggttctttgcagatgtagttccagcagtcaggaagtggagagaggccgg

SEQ ID NO: 264374 - DNA, 98 bp, Homo sapiens
ggaggtctccgccggctcccgggcaggaatttgtggatgcttatgtgaattatgtcttccaaatctcagttcatgaatggtacacagccttctctagt

SEQ ID NO: 264375 - DNA, 107 bp, Homo sapiens
cccaaaccccctcgggaaaaggatggcggcagcacctacccagatcgaagccgtttaagctatgaagaaggacatccctcacactctgaaacagatctccttcagag

SEQ ID NO: 264376 - DNA, 100 bp, Homo sapiens
gcccatcttcttcggcgccctgcgctccgtacgctgcgcccgcggcaagactgaggctgatgtgaatccaaaggcctatccccttgccgatgcccacctc

SEQ ID NO: 264377 - DNA, 82 bp, Homo sapiens
ccgagcgcttgatgtgcgcggagagcaatcgccgggacagctgcaagacctgcctagagctggaacgttacctccagagcga

SEQ ID NO: 264378 - DNA, 100 bp, Homo sapiens
agtatttctttggcatcactgcagctagtaatttgccttctggattcaaagagctcctgggaaggtgctgctggatgcagtttgcaaccacctcaacctc

SEQ ID NO: 264379 - DNA, 102 bp, Homo sapiens
tcgacatgagtgatgtggaggaaaacaacttcgagggcagagaaggaagcagccaccctcgccatggcctccccgcccgcctgcccctcggaggaggacgag

SEQ ID NO: 264380 - DNA, 75 bp, Homo sapiens
tggtcaaagactgggatgcttagatcaactttagctcagcaagcttcatattctccaattcagcctcattctcta

SEQ ID NO: 264381 - DNA, 100 bp, Homo sapiens
tggctactatccctcgggaggcgcctggccagagcctggtcgagccggaggaagccaccaggttcctaaatatttgtcacagcaatgggctaaagcctct

SEQ ID NO: 264382 - DNA, 100 bp, Homo sapiens
cagggaccagccaccactgttgccttttcaagaacgggggagtattttgcttctggaggctctgatgaacaagtagtgaagcgcgcagtggcgagccagc

SEQ ID NO: 264383 - DNA, 80 bp, Homo sapiens
cacgcagccacagaggaggccagggaagctctagaggcgttttttggccaagggacaatgcagatcttcgtgaagactct

SEQ ID NO: 264384 - DNA, 75 bp, Homo sapiens
aacagctccagtacaagcacctcctgctccagtaattggaaaaatgaggaagctgtgagtaccagtggaaggaac

SEQ ID NO: 264385 - DNA, 100 bp, Homo sapiens
taattcagatgtggaagtcatgcctgcacagtcacctcgagaagatgaagaaagcagcattcaggtgactaataaaggtaccagaagaatatggctgcac

SEQ ID NO: 264386 - DNA, 101 bp, Homo sapiens
cacatccttgtctgtgaagctaaactcaatgctgctgtgtgggaagaagatttgtaaagaaaactcttaggtttttcgttggaatatacgttgcacattta

SEQ ID NO: 264387 - DNA, 75 bp, Homo sapiens
cgaggatcgtgggagctaagaaattgtaaaccatggctgtgtggatacaagctcagcagctccaaggagaagccc

SEQ ID NO: 264388 - DNA, 100 bp, Homo sapiens
gtttggagccccggagtggggtgtcggcgcctcattcgggtggagctgagccggagacaggattcaggagcagttccagaaaaatcccgacagttacaat

SEQ ID NO: 264389 - DNA, 100 bp, Homo sapiens
gtcgaggttcacattgttgctgatgccacctcatcaagaagcatgatggacaggatgtttgccctcgagcttgcattgaaaggctctagttacagtggac

SEQ ID NO: 264390 - DNA, 90 bp, Homo sapiens
tgcggagcccgctcacttttacctgtttggattaatatgtctctgttcaggtgatgatgaacagtctacacagatggctgcaagttggga

SEQ ID NO: 264391 - DNA, 75 bp, Homo sapiens
tcggcggccttgggggcggccctacgtagcctggcttctggatgttcctcctgctgatcaagagaagctttttat

SEQ ID NO: 264392 - DNA, 75 bp, Homo sapiens
tcagtgtgttagctttccccaatggagcagcatttctttctattactactatctatgctgagactggttcaggtt

SEQ ID NO: 264393 - DNA, 147 bp, Homo sapiens
tggacgataattcaaaaacactatcccagggagtgcaagcttagagcgtctggccaagaatcagaggaagtggtgataacaatccatattcctcatttggagcaactctggtgagggatgatgagaagaatttatggagtatgcccc

SEQ ID NO: 264394 - DNA, 101 bp, Homo sapiens
gacgaagccggagtgtaggcggcagaggattcgctcccagagcagctgcggccagcccgagcgggaagaagttccgcagcaagccgcagctggcgcgctac

SEQ ID NO: 264395 - DNA, 75 bp, Homo sapiens
cccagctttaaaggagatgcaggagaaaatacggcattgctagtgtggacgaatgtggaacctcgctctgtggct

SEQ ID NO: 264396 - DNA, 100 bp, Homo sapiens
tgatcatgcagatcgaactttttcatcaatttccagagcttggcgaaacagtcagcgtgatacctctgatattaagatgttggggatcagccaggtgagg

SEQ ID NO: 264397 - DNA, 145 bp, Homo sapiens
caccgggatcgtgaccgagaccgtgaccgagagcgtgaccgagagcgcgaatatcgtcatcgttagaaggtacatcaggaacgtctctatcaagaatacaatttcagcaaggctgagggccatctgaaacagatggagaagatat

SEQ ID NO: 264398 - DNA, 90 bp, Homo sapiens
aaacgggcggcccgcgcggaggctcgcgagatccgcatgaaggagctggagcggcagcagaaggagggaggtggggaagacagggctcca

SEQ ID NO: 264399 - DNA, 75 bp, Homo sapiens
atcaaatccgtgtcggagtccttacagggccggtgcataaacttctcccgagttccatctcagtaaaagggaagc

SEQ ID NO: 264400 - DNA, 75 bp, Homo sapiens
ttcgagcgctgttctcgctccggagccgctgcacatttcgaacagctttgctgagccatcaaggtctaatggaag

SEQ ID NO: 264401 - DNA, 100 bp, Homo sapiens
gttttcgcctgcagctgctcaccgtgacagacatcacacctccagtgcaatccctgttcctaagagacaaagctccatatttgggggtgcagatgtaggc

SEQ ID NO: 264402 - DNA, 83 bp, Homo sapiens
gcctgtgggcacagacaaggagctcagtgacctcctggacttcagcatggtttttagaacttcagccataaaaatgggcagaa

SEQ ID NO: 264403 - DNA, 87 bp, Homo sapiens
gcccgcgcggaggctcgcgagatccgcatgaaggagctggagcggcagcagaaggagccgtgctggtatagaggactctaagaagtg

SEQ ID NO: 264404 - DNA, 95 bp, Homo sapiens
tcaggttcacgccaacagtacctcattgctctttggcgactcttattgggcaattgaaggaacagactaaaaatcgtgtcctggaaggaaactac

SEQ ID NO: 264405 - DNA, 98 bp, Homo sapiens
aaaaagatggtgttattcagaccaaagtgaaacatcgtactccaatgcctgcctagggtagttaaaagacgagtgaatgctctcaaaaacctgcaagt

SEQ ID NO: 264406 - DNA, 100 bp, Homo sapiens
cacttcctggcaatgatagatacatcagtgtgggaagccaagcagatacaagctgctgaatcaggaataataaaagttaaaacaattgctgcacgaaaca

SEQ ID NO: 264407 - DNA, 98 bp, Homo sapiens
agaagagtctacatgcaaagccaagccaatcagatggatattgcccaatactgatatcagttcaccagaatatgatcttaattgagcatatacattgc

SEQ ID NO: 264408 - DNA, 90 bp, Homo sapiens
gcttatttaataacatttgagaaacacgaagaatggctaaccacctcccctaagacaaggtctacaggtccaactgctgccactggcagt

SEQ ID NO: 264409 - DNA, 98 bp, Homo sapiens
ttcgacattgccgtcgacggcgagcccttgggccgcgtctcctttgaggtatgccattttgaagactgagacgttggagttttatcctagaggataaa

SEQ ID NO: 264410 - DNA, 98 bp, Homo sapiens
tgggatcctacgtgcatgaagatggacgaggtcctgtacagcatcgccgagaaggtttgagcacaaaatgaacataattagggaaaataaggatctgg

SEQ ID NO: 264411 - DNA, 83 bp, Homo sapiens
cgctgaggtggcccgtggggcagacaatgcagatcttcgtgaagactctgactggtaagaccatcaccctcgaggttgagccc

SEQ ID NO: 264412 - DNA, 100 bp, Homo sapiens
gggcggcagcatgtcggtggcggggctgaagaagcagttctacaaggcgagccagagagaagaagaaggaggttcctgctgtgccagaaacccttaagaa

SEQ ID NO: 264413 - DNA, 100 bp, Homo sapiens
tgttgacctatgatctgcagggagacgcacagccaggacatcctggaacctgggaaagggtagatgacattaatgctgataagaatatctcttctgcaca

SEQ ID NO: 264414 - DNA, 75 bp, Homo sapiens
ctttttcagaaatgcgcagagcaaacatctttcaaaggtctctaattaacagaagatggcaaagcccagccacag

SEQ ID NO: 264415 - DNA, 82 bp, Homo sapiens
ctgagtggcgcggcggtgtcagacaatgcagatcttcgtgaagactctgactggtaagaccatcaccctcgaggttgagccc

SEQ ID NO: 264416 - DNA, 100 bp, Homo sapiens
gaaaaccccaaaagtgtacataagaggtaccaatcttgggaaaaagaagcaacacatttgtcatataccaggatgtggtaaagtctatgggaagacctca

SEQ ID NO: 264417 - DNA, 100 bp, Homo sapiens
agaagatggcgcctggcagggcagccagctggccaggggggcccgtctgggccagccacctggtgtccgcaataatgacgatgaggacctgacaccagag

SEQ ID NO: 264418 - DNA, 88 bp, Homo sapiens
aaagaggatacctctgcgatcccgggtcatctccagatgctagggttatggagtgtgaacatggctacgcctcttcattcccgtccat

SEQ ID NO: 264419 - DNA, 75 bp, Homo sapiens
ctatgaatatccagtttgagccatcggatctaagatccaaaagaatatcctccgaatcctaaatctagagctcca

SEQ ID NO: 264420 - DNA, 83 bp, Homo sapiens
ggcggaggcggaggcagaggtggaggcgctttgaaagccatccagtccaatggatcagatgggcaagatgagacctcagccat

SEQ ID NO: 264421 - DNA, 82 bp, Homo sapiens
ccccgtcccgaccctggccgccccgagcggagcctggagagatgcctcggcagtggaatccaatttctttccagccacaacc

SEQ ID NO: 264422 - DNA, 82 bp, Homo sapiens
ctcggtgctgtggtgcagagctagttcctctccagctcagccgcgtaggttacaagaggacccacctgtgggtgtcagtggc

SEQ ID NO: 264423 - DNA, 50 bp, Homo sapiens
ctaccacgtggcatgttaccactgtgagtagagacggggtttcaccgtgt

SEQ ID NO: 264424 - DNA, 105 bp, Homo sapiens
tggttcagcaggtggccctaaggttggagcatatagcactttctacattgtgggtttaatattatcaatgcagataccttttgtgggattccagccaatcagaac

SEQ ID NO: 264425 - DNA, 101 bp, Homo sapiens
atgcttccagaaaaatctcaaggaaaagtattgcaagcaacagtagtcgctgttggatcgggttctaaaggaaagtcgttccccatcaggaagtcctcgca

SEQ ID NO: 264426 - DNA, 90 bp, Homo sapiens
aaggatttcggggacttcaagacacagttaaccattagcatacagaaccggtgaccacccgtcaggtgcgtaccattgtggaagaggtcc

SEQ ID NO: 264427 - DNA, 75 bp, Homo sapiens
agctaatgaccgtggttcccactgaggaaaacagttcctcctgaggatttcagagaagagctggacttcctggct

SEQ ID NO: 264428 - DNA, 100 bp, Homo sapiens
gcagagttttcatcatggataactgtgaggagctaatccctgaatatctgagtttctacgataaagacagttcagggtggagttctagcaaagataagga

SEQ ID NO: 264429 - DNA, 100 bp, Homo sapiens
attcacaggaagccactgcgagaaagagtcgggccacaaaaagttaaaaagtaccatccagagaagcacagaaacaggcatggcagctgaaatgagaaag

SEQ ID NO: 264430 - DNA, 50 bp, Homo sapiens
caccacaccaacatctagtcccttccgctgtccgcaggcttgtccaaaag

SEQ ID NO: 264431 - DNA, 80 bp, Homo sapiens
gccgcctggcgcgcaggtgccgggacgtggatgcccaggacagcattttgaaagcgaagcagaagccgtagaatcagcgg

SEQ ID NO: 264432 - DNA, 82 bp, Homo sapiens
ccaccatcggtgacctcaccgcctcggttcgccctcagccgccccgcaaacggggattcagcgtccgatcctttggaacagg

SEQ ID NO: 264433 - DNA, 100 bp, Homo sapiens
atggcattacgaacctttggccacttgctcactgcaaatctaacttcatcatggtgaactaatttagagcatcctccagagctgaagcagaacattccag

SEQ ID NO: 264434 - DNA, 101 bp, Homo sapiens
cctgcctcagcctcctaagtagctgggactacagggtttctatcttactaaaggatatttcagaaaatctatattcactgaggaggatgataattgggtct

SEQ ID NO: 264435 - DNA, 96 bp, Homo sapiens
ggccttaaagaatctcaactttttgacccgagtgacctccaggatacatccaacagagtaacagtcaagttttcatctctgtgaactgcttaagca

SEQ ID NO: 264436 - DNA, 98 bp, Homo sapiens
aacacagaatgttcttggtgagaagggccggcggattcgggaactgactgctgtagttcagaagaggtctgtgagaagttaacctggtgataccgatc

SEQ ID NO: 264437 - DNA, 83 bp, Homo sapiens
cgacgaccggatcctgaggaggcagctgcggtggcagctgctgagttctcggtgaagttggaatcgaagcctcttaaaatggc

SEQ ID NO: 264438 - DNA, 100 bp, Homo sapiens
tgatttaaacaagagatttccacagaagtttcggagcaacatcccctgtcacctggttgatatctcttgcggattaccctgcagtgccacgctaccatgt

SEQ ID NO: 264439 - DNA, 100 bp, Homo sapiens
tcctttatatagaagggagagtagcgagttggaagactttgttgaagacttgaagaaggactccacggcagccagccgattggttactctgaaagacgtg

SEQ ID NO: 264440 - DNA, 74 bp, Homo sapiens
cttctccaccatcctgggcaactggttgggtggacacacgtttgcaaaatggatttgctcctgggatgaagctg

SEQ ID NO: 264441 - DNA, 82 bp, Homo sapiens
gtcagagaacccctccgtctatgtgcctgtttggcaatgaggagcagcagctggcgtgggccaagcgggagagcgagaaggc

SEQ ID NO: 264442 - DNA, 100 bp, Homo sapiens
ccgggaagcactacaagggtcctgaagtcagttgttgcatcaaatacttcatatttggcttcaatgtcatattttggagtcaagtaaagaacagtttgcc

SEQ ID NO: 264443 - DNA, 98 bp, Homo sapiens
agcccctgaccccatctgtgaatgaggctgtgactgagctacgaagtgaagagtgtcctcggaaaggaagtggggttgttaaattgttttgtccagtc

SEQ ID NO: 264444 - DNA, 82 bp, Homo sapiens
tcgctccggagccgctgcacatttcgtacctggagtagaacagaaaaattattatgtctgtgttcccttgggactcattgga

SEQ ID NO: 264445 - DNA, 83 bp, Homo sapiens
tgagggaccgcggggttagccactgctggctgcttccagtgttcgccgagaggtgatcaatgttgatgggacgaagaggcgga

SEQ ID NO: 264446 - DNA, 50 bp, Homo sapiens
ctggcaatgtgtctaaattacatctccctgcacaagcagcactttctttt

SEQ ID NO: 264447 - DNA, 74 bp, Homo sapiens
ggagataaattcccggaaccgcgattcggcgtgtcaggtatcatgatattagctggtttgacatcaagtcattt

SEQ ID NO: 264448 - DNA, 100 bp, Homo sapiens
gccaggacccactggaagcctagaaatggtctctcaggcagctgcagagcttcaacagtactgtatgcagaatgcctgcaaggatgccctgctggtgggt

SEQ ID NO: 264449 - DNA, 96 bp, Homo sapiens
cagtactcttattgattcacttaagaaaactcagcctgagaatgaattttgattcagctaaagttccatcagatgagtattgccctgcttgtagag

SEQ ID NO: 264450 - DNA, 82 bp, Homo sapiens
caactacctgttcccccgagagctcttcaaggcgccatgtcagaaccggctggggatgtccgtcagaacccatgcggcagca

SEQ ID NO: 264451 - DNA, 75 bp, Homo sapiens
aaaagaaatagcaagaactgaggagcaccaggagacgcaactcatcggctttccgcttggccctcatccagcttc

SEQ ID NO: 264452 - DNA, 100 bp, Homo sapiens
actggatcgcctcccaagtggcagattggtgagcaggaatttgaagccctcatgcggatgctcgataatctgggctacttggtgaattgggatgttcaga

SEQ ID NO: 264453 - DNA, 90 bp, Homo sapiens
ttgcatggtaagacggtcagccgccgcagcatcacgggccagctcaagatgatgtctttctacctaaagatattgacctagacagtgtgg

SEQ ID NO: 264454 - DNA, 75 bp, Homo sapiens
gcggagatgccccgccgggcaaaatcggtgaattcacataaaagggcatcagaaaaatacaaagacaacccatca

SEQ ID NO: 264455 - DNA, 82 bp, Homo sapiens
ggcgcgggaggtgttcgagaacgaccccgagacggtatcgagaaccttccctgcgaacttcagaggaacttccagctgatgc

SEQ ID NO: 264456 - DNA, 50 bp, Homo sapiens
tcgcaagtcaccgcctggacgcaggtcttgctcagttttctaggctagag

SEQ ID NO: 264457 - DNA, 90 bp, Homo sapiens
caaggaaaatggtcatccccacctgtttgcttggaaacatgttccaaatcaagtatagatattgagaatgggtttatttctgaatctcag

SEQ ID NO: 264458 - DNA, 101 bp, Homo sapiens
ttccccggggtgtaataatgttaactgagtttataggcaagcaataaacagcaagatgtttgaggtggatatgaaaattgctgcaatgcatgtaaaaagaa

SEQ ID NO: 264459 - DNA, 101 bp, Homo sapiens
taaagtgaccaattcccttggtcaaagaagtgaccaaaaagtcatctacatttcagagatcccagaagacccacttgtggctgaagagtactacgctgatg

SEQ ID NO: 264460 - DNA, 75 bp, Homo sapiens
cgaggaacagaagaagaagaaccggaagaaactgtccgagaagcccaaaagagttaattgttaaatccagtatgg

SEQ ID NO: 264461 - DNA, 100 bp, Homo sapiens
agttccctcctcctgcaccaaagggagccgccaccgtctggtgtctaaaccgcctcgggttttgcagacattgggtacagaaacttaccggcctagttct

SEQ ID NO: 264462 - DNA, 83 bp, Homo sapiens
aggtcttcagcggggcgctccaggaggcactcacagactttgtgcccattgacctagacgagtggtgggcgcagcagttcctg

SEQ ID NO: 264463 - DNA, 82 bp, Homo sapiens
ctgtagacactcctgctctcttccatccccatcttacagatgtattaagaagcctcaggcataatcaccagcaacacccggg

SEQ ID NO: 264464 - DNA, 136 bp, Homo sapiens
gctgtgtggccccgtgtcctgcaggtattgggagatccacagctaagacaccgggacctcctggaagccaaaaatgcttcttggacacttaatgattgttggcaagaaatgtgctgctgatctgggcctgaataag

SEQ ID NO: 264465 - DNA, 100 bp, Homo sapiens
aaggcggcggctctctggtccgcagcggcaacagtaacgaaaaacagggcttttgctaatccagactttacacaacctatctcagaagttgtagatgaag

SEQ ID NO: 264466 - DNA, 50 bp, Homo sapiens
aacctgccttcagtcttcagttaataactatcatggtgaacttacttcag

SEQ ID NO: 264467 - DNA, 106 bp, Homo sapiens
atcaccgaagcaaaaagaccagttttcatctttgaatggttgcgatttcttgataaagtcttggttgctgccaacaagcctcccaaagtgaaatgcctgaccaaga

SEQ ID NO: 264468 - DNA, 98 bp, Homo sapiens
caaagcaagctgtagaacacgtacaaagtcatttatccaagaaacaagtgacatcaactctttttcaggggtagtaaaaagaatcattcctgcagtag

SEQ ID NO: 264469 - DNA, 80 bp, Homo sapiens
ttcaagcttaggaccacccaccatgcctatccagccttatgccagcctggaccatcttggaggcagtgtaggatcatgga

SEQ ID NO: 264470 - DNA, 75 bp, Homo sapiens
gcaacagtggcttcgggccggaggaaggaggcaagtgaggcctatctggttggcctttttgaagacaccaacctg

SEQ ID NO: 264471 - DNA, 90 bp, Homo sapiens
ctgcataagaggtcctagaagatatctggtatggccagagtacagagggaccggagcttaattggcttagtgtcgacttcaataattgga

SEQ ID NO: 264472 - DNA, 82 bp, Homo sapiens
aggaaagccgcccagctctataccttgtgggtcaccttccagaaagtgtcctataaggccaagcgctggatccacgacgtac

SEQ ID NO: 264473 - DNA, 60 bp, Homo sapiens
aaatactctttctgcacagaccacactggaagggaatttgaaggagaagaagaatatctg

SEQ ID NO: 264474 - DNA, 98 bp, Homo sapiens
ggacaatttgtagctaagactcccggataccctgaagtcgggaaatggtggatccataaagaacccagccaacccgcagagggaggggaggggctgag

SEQ ID NO: 264475 - DNA, 74 bp, Homo sapiens
agctgcgcgaagccggggcggagcacgcgagctatgggactggtgattgcagctggaagtgcccatgaccgagc

SEQ ID NO: 264476 - DNA, 100 bp, Homo sapiens
cacaaattgacgcaaatagcgaaagtagtcatcaaaatctgtgaacatgaggtgctccagtgaaccacccagggaatgacgaggtggcgagtgaggatga

SEQ ID NO: 264477 - DNA, 82 bp, Homo sapiens
cttggtggagcagctgcctgggagaatgttgactctactgcaggagcggtggtgccccccccgggcacggggccatgtacaa

SEQ ID NO: 264478 - DNA, 100 bp, Homo sapiens
tcagaatgaatgtcggccctgccatgagaactgcacccagggctgtgccataagtaacgtgaagaaggtgtccctggaactgggcgggaagtcacccctc

SEQ ID NO: 264479 - DNA, 101 bp, Homo sapiens
gagcgaacacctgccgcggtcctcccgccggcgctggccctcccaggcccaatacttcaaagcatcctacctctgctcaatatatattacttggagaggat

SEQ ID NO: 264480 - DNA, 100 bp, Homo sapiens
gagcgcaactagcggcgggtcgtgggcacctccagatgtcgacgtacaagcgggccacgctggacgaggaggacctggtggactcgctctccgagggcga

SEQ ID NO: 264481 - DNA, 105 bp, Homo sapiens
cagggattttgaaaatgctgcacatcccttaatagtcatctacataggcgcattctacattctaaaggggagctcagtgaagatagacataaacagtatgaggaa

SEQ ID NO: 264482 - DNA, 90 bp, Homo sapiens
aacttggagaagtggtgaagcttcatccccatgaactaaataatctcctgtctaaactctgtcagattcagggagttttgtatcttctcg

SEQ ID NO: 264483 - DNA, 82 bp, Homo sapiens
gacagcgacttccttgcagcctcttctccggcgcacagtgcagaaaaacgccaagtacatctgcctggctaacaaggactgc

SEQ ID NO: 264484 - DNA, 87 bp, Homo sapiens
agcacctcatcccctggatgggggaccacaagatcctcatcgacagtaagactttgaccccgacgcaggcttcagtgattgccgcgg

SEQ ID NO: 264485 - DNA, 90 bp, Homo sapiens
ggagtcgccattttggatggtgaaccctgaagtcggtgtctgctgcgttcacggcaggattcggttagatgctggacgagaaccaccacc

SEQ ID NO: 264486 - DNA, 83 bp, Homo sapiens
ccggtgccgggggctggtggacaagtttaaccagatcacaaaatttgtccaggatagacatagagctagaagaaacagacttc

SEQ ID NO: 264487 - DNA, 51 bp, Homo sapiens
gaaatctaatgaaccgaaactttggttggttgaatctggcgatgtggaacc

SEQ ID NO: 264488 - DNA, 75 bp, Homo sapiens
gaacggagcttgaagcaaagctgcaggttttaaagctgcagaaccttggcctgaaaatgctacattatatcagca

SEQ ID NO: 264489 - DNA, 83 bp, Homo sapiens
gagctgtggcaggcagaagaaggggaactcctgctgcccactcaggaggaagaaggcacctacgatcaaactctggagttccg

SEQ ID NO: 264490 - DNA, 90 bp, Homo sapiens
cccccaggaaggatttcactcagctgttcccacgggccagcccccaggagttcctatcagactgagattgggcagaccctggacctcctc

SEQ ID NO: 264491 - DNA, 51 bp, Homo sapiens
ttaaggattccaagtaactcttatttgacatgtcatgctgcccaaggacat

SEQ ID NO: 264492 - DNA, 74 bp, Homo sapiens
atccagatctgcacggagagcgagaagctgctacaggagctgagagaccctaccctcactttccgtctgcttgg

SEQ ID NO: 264493 - DNA, 75 bp, Homo sapiens
cggattctacattgcctccggaggtggtcaagtaccccctgcacgccatcatggagatcaaggagtacctgattg

SEQ ID NO: 264494 - DNA, 75 bp, Homo sapiens
cagaaaattcttgctctctttgcacctgaagattcactgacaggggcactatgaacgaagaggagcagtttgtaa

SEQ ID NO: 264495 - DNA, 100 bp, Homo sapiens
ctcccgcgccccctctcgctctgcctctccctctgcctctgcctctgcctggccgcggctctgggaagtgcgcagtccgacacgatgaggcgagtggtac

SEQ ID NO: 264496 - DNA, 78 bp, Homo sapiens
tcccgcgcgcccccgctcctgcagtactgccaaatctgtcgaaagggagataatgaagaactgcttcttctttgtgat

SEQ ID NO: 264497 - DNA, 75 bp, Homo sapiens
tttccagctcacccactgccagcagagagatgacctgatcagagccatcaagaaactaaaggcacttggcactgg

SEQ ID NO: 264498 - DNA, 118 bp, Homo sapiens
gacccctacggagccccagcttgcccacgcaccccactcggcgtcgcgcggcgtgccctgcttgtcacaggtaactaaatgaccatggaatctggagccgagaaccagcagagtggag

SEQ ID NO: 264499 - DNA, 100 bp, Homo sapiens
caatgaggcagatcagattccgatttgacgggcaaccaatcaatgaaacagacacacctgcacaggtagatgacaaggtgaatttccattttattctgtt

SEQ ID NO: 264500 - DNA, 99 bp, Homo sapiens
ctggaatcgcccaagtccctctactcgcgaggcagctgtgcctcctgctgaatgcggagaacatcttccactcaatggcagacatcctgctgcgggagg

SEQ ID NO: 264501 - DNA, 88 bp, Homo sapiens
ccggggtgtcagtgtggaggagactgagcatgttggcagataaattgaacatgactccagaagaagctgaaaggtggattgtaaattt

SEQ ID NO: 264502 - DNA, 97 bp, Homo sapiens
agaagtgcaccatagcgggagttgcttatgggttgaagatgacagcgatgcagagacctatggagaagagaatgatgaacagggaaattattctaaa

SEQ ID NO: 264503 - DNA, 82 bp, Homo sapiens
ctcatacaggtcggagaggtcagcaacagggacatcgtggagacggtgctcaacctggtgagacacagtaacctggttgaac

SEQ ID NO: 264504 - DNA, 100 bp, Homo sapiens
cgccagtactcgtttcctgatctgcagagatcttttgatcttacagcagctgttaatgaggcttggagatgctggaagtgttcgccagttactacatgaa

SEQ ID NO: 264505 - DNA, 100 bp, Homo sapiens
gctagtgcaagccttgtttattttcctcaccactgaatctacagctttatcttcaagccaggatgaagggagactgggcaagactcttacgccccacact

SEQ ID NO: 264506 - DNA, 74 bp, Homo sapiens
gggcaccagcaggacccgaggccaggagccaggggcccagaagctcttttgaaacagatggtcaccatgtttag

SEQ ID NO: 264507 - DNA, 100 bp, Homo sapiens
caaatactcctgtaaatttgagtgtgtggcacaaatacaattatgcccacctccacctcagattcccaattctcacaatatgacaaccacactgaattat

SEQ ID NO: 264508 - DNA, 75 bp, Homo sapiens
gggccccccagcctccgccaacccagaaacgcttcgttaagggactcaggcagtacgggaagaacttcttcagaa

SEQ ID NO: 264509 - DNA, 50 bp, Homo sapiens
gtttattctcccatagcatgtggaaacattggcaaatttggagcgacaga

SEQ ID NO: 264510 - DNA, 78 bp, Homo sapiens
gcaaacaagccaatcccaggaggaaaaacggaaagatgaatgggagggctgattttcgagagccgaatgcagaggttc

SEQ ID NO: 264511 - DNA, 100 bp, Homo sapiens
ccccaagaatcctcatgctcctactatccatttcaactacagatactttgaagtagaagaagctgatgttatggagaaaacttgtatagatgcacttcct

SEQ ID NO: 264512 - DNA, 75 bp, Homo sapiens
aagagttgtggcgaggcagatcctgccccgtggccgcggccgtctcgagccagcaccgctctttgaccttgccat

SEQ ID NO: 264513 - DNA, 100 bp, Homo sapiens
acaagcttcatctgagcattgtacctaaaacaaagagaatggatcttggagaatgtctgaaagtccatgacctggctttaagagcggattatgaaattgc

SEQ ID NO: 264514 - DNA, 84 bp, Homo sapiens
gctgtgctcgcgctactctctctttctggcctggaggctatccagcatgtcatgtggcctgtgttttggaccgtggttcgtacc

SEQ ID NO: 264515 - DNA, 51 bp, Homo sapiens
aggtctctacggatctgatagcccagagccatgctgcaggcagtgcgagcc

SEQ ID NO: 264516 - DNA, 74 bp, Homo sapiens
gcgacgctaagttgctgatcgtggcgagagagatcatcattgcctgaatttagctttgtgactgcaagagcaag

SEQ ID NO: 264517 - DNA, 75 bp, Homo sapiens
aattctggaataaattctgcagaaatagataggagttcatgatcaagtgttgcccacaccaaatgcttcatccag

SEQ ID NO: 264518 - DNA, 101 bp, Homo sapiens
gcctgcatgcaggcaagatggtcatgctgcaaggagtggtccctctagatgcacacaggaaacttggatttaactggccagaagcaggtattcaaagcaga

SEQ ID NO: 264519 - DNA, 100 bp, Homo sapiens
ggcggctagaaggtgaccgcggatcccagcttcctgcagccaggtctcctctgagcctccggcctccataagacccaaaacagatgacacctcttcccag

SEQ ID NO: 264520 - DNA, 101 bp, Homo sapiens
gcaggtttaaaattttacataagaagttacctttttcaggtgctggagaatctggtaaaagcaccattgtgaagcagatgaggatcctgcatgttaatggg

SEQ ID NO: 264521 - DNA, 76 bp, Homo sapiens
gccaaggtcctgcttcaccgaacagcacctcaggagcagatgcaaataatacggcactccgaacagacactaaaaa

SEQ ID NO: 264522 - DNA, 100 bp, Homo sapiens
ccaaaggtgaatcttttggttggtgattttgatgatagccacaaagcaagcaggattctgtgaggagaccaggaggaattttgaagccaccttaggttgg

SEQ ID NO: 264523 - DNA, 85 bp, Homo sapiens
ttctgctgggaccacaaggagaagagggcagcagagtcacagctgcaggattccaatgagagagccatccccctcctcagatctg

SEQ ID NO: 264524 - DNA, 100 bp, Homo sapiens
cagtttggcagatgtgagcaaactatgtataggaattccaaaggaatcagagatcattgatttcttcctgggggcctctctcaaggatgaggttttgaag

SEQ ID NO: 264525 - DNA, 51 bp, Homo sapiens
gcccctgattggaacccagtccacaggctggatctacgccacactcacccc

SEQ ID NO: 264526 - DNA, 83 bp, Homo sapiens
cggggttagccactgctggctgcttccagtgttcgccgagagcttcatggcggctgaagagatgcattggcctgtccctatga

SEQ ID NO: 264527 - DNA, 87 bp, Homo sapiens
tttcctgggttgcttctggcggccatggtgttgctgctgtactccttctccgtcatccgtccttggctcaggatttggagagcttgc

SEQ ID NO: 264528 - DNA, 82 bp, Homo sapiens
gccgaatcgctcctgcagcagaggcctgtctccactaactctggaccctaaaacagctcacccaaatctggtgctctccaaa

SEQ ID NO: 264529 - DNA, 100 bp, Homo sapiens
agcagccgccgccagagaggcccgcccaccagttcgcccgtccccctgccccgttcacaatggggggccctcagcctcttggccttgaacgggctgttca

SEQ ID NO: 264530 - DNA, 76 bp, Homo sapiens
ccctgcatgtggagctgccgtctcagcaggttgagataagtcgaagagtgactctggaaaaactccctcctgtcct

SEQ ID NO: 264531 - DNA, 100 bp, Homo sapiens
attgtgagactaaaggatacggaggaagtgtggacagtggacctacatacaatggtacaaacccgtagtgctgatgaaccaatgacaacatttgttgtct

SEQ ID NO: 264532 - DNA, 80 bp, Homo sapiens
ctctgttgcttctctgggtcccagagccgtgccctccagaagcagccgcgtgtctgctgggtggctccaagcccgtgaac

SEQ ID NO: 264533 - DNA, 100 bp, Homo sapiens
aattgaggcgcaatgatgagaggatgtggtggtctactctgatgtcaatcttgagggctaggtatccttctgatgaagagaagaaaggcctaaactccca

SEQ ID NO: 264534 - DNA, 50 bp, Homo sapiens
ctcgggggcggcggccacgccaaggacggatggaacagattaaaagggcc

SEQ ID NO: 264535 - DNA, 95 bp, Homo sapiens
gcaagacagataaatcatcctgagctacacatggtactcagtaatctagctgcagttttgatgcacagagcagcggctgcttacctgtttcagag

SEQ ID NO: 264536 - DNA, 75 bp, Homo sapiens
tctacatgctagagggcttgggcattcacacggttccaagttccccatcaagtggacagccccagaagctgccct

SEQ ID NO: 264537 - DNA, 100 bp, Homo sapiens
gcattttctgttgactgtaaaggtgctggtaagatttcttctgcttttcaggctgcctttcgagctcaggggcccctggctatgctgcagcactttgata

SEQ ID NO: 264538 - DNA, 100 bp, Homo sapiens
cacgaatacgcctcgataaacagggccgtgccgcagatgcccaccggaatggagaaggaagaggagtcgatcaatgaactgagccatgttcaaatccctg

SEQ ID NO: 264539 - DNA, 83 bp, Homo sapiens
agttctggatggaggtaaaggaatatcacggtgtgagttcttgatacgaatgaaaggccaagagtttgttgatgagattcaag

SEQ ID NO: 264540 - DNA, 100 bp, Homo sapiens
gaacgctatggcgagcccagcgaagtcttcatcaaccgggaccgtggcttcggcttcatccgcttgatattttctaaatttggcacagtcttgaagatta

SEQ ID NO: 264541 - DNA, 82 bp, Homo sapiens
ctttgcagcccgtgcggggccgtctcggagaccccgcgccgacggctgctcaaacatcaggctagttcttctggagctcaac

SEQ ID NO: 264542 - DNA, 96 bp, Homo sapiens
gcggagccggccgcggccccctgttgtgttgctgcggagagctatcttccagagggccacactgggcatggacacccttttccctgcctggaggag

SEQ ID NO: 264543 - DNA, 82 bp, Homo sapiens
cagcagtatggcttccagtacccccttgccatggcagcaaaagataaaagcaacagtgtttgatgactgcaagaaagaaggc

SEQ ID NO: 264544 - DNA, 97 bp, Homo sapiens
ggatattgaaatggacagtggagatgaagcctaagaatatgatcaggatggcaccaagcattatgaaaagcctaatggaccacaccattcctgaggt

SEQ ID NO: 264545 - DNA, 100 bp, Homo sapiens
ttcaggaagacttggccaggccgtgttccgtgtctctggattcaagtcccaggagtcctgaccagagagcagacccaacatgagtgaagtttcctgcaag

SEQ ID NO: 264546 - DNA, 71 bp, Homo sapiens
gagtgatatcagacaccgagcttcagcaagctctctccaacgtactgagatgatgaggaacgtggagctgg

SEQ ID NO: 264547 - DNA, 101 bp, Homo sapiens
cacaaatgtttttctgttttgcctgaatacatgatttaaacaagagatttccacagaaggcaagaaagtgaaggggggctccagcaagctgacaggccgtg

SEQ ID NO: 264548 - DNA, 114 bp, Homo sapiens
gcgcgcagggcctgcagcgggagctggacggcgagcgcgagcggcgcgagaaagtgacccggccctgtagctacagcaagaagtcccactttgactttgaggaggaagacgtgg

SEQ ID NO: 264549 - DNA, 100 bp, Homo sapiens
ggactacgtctgtgcggctgcgtggggctcggccgcgcggactgaaggagactgaaggtcatcatcagatttgaaatatttaaagtggatacaaaactat

SEQ ID NO: 264550 - DNA, 100 bp, Homo sapiens
agtttaggcaacggattatcttacgagagacaagagagacacctccaacttcgacaaagagttcaccagacagcctgtggaactgacccccactgataaa

SEQ ID NO: 264551 - DNA, 77 bp, Homo sapiens
ttcttatccgagagagtgagagcgctcctggggacttctccctctctgtcaaatggagtctcgctctgtcatccagg

SEQ ID NO: 264552 - DNA, 83 bp, Homo sapiens
tgagggtcaacgtcaagcgggagtatgaccacatgaatggatccaggtgtgacacagtgaccagcgccgtgatgatgcagtat

SEQ ID NO: 264553 - DNA, 82 bp, Homo sapiens
acaatcccgggcatgggcggcaactctttgatgtactactataatgggaaagcgcagatataatttctacagtagaatttaa

SEQ ID NO: 264554 - DNA, 83 bp, Homo sapiens
gggacacgcggttcttctccagcgccctggcctccctcaccttggacacctcgcttggcctacaacacagcagtcccctcagg

SEQ ID NO: 264555 - DNA, 75 bp, Homo sapiens
aacagaaggaaattgaaggaacttggagttaatggtctaatttatgatagagcttgacctcatggacctcgtagg

SEQ ID NO: 264556 - DNA, 98 bp, Homo sapiens
agatcttccctttcacctatgaaagcaaacgtatgggcatcatcgtgcggtggacagaggactgcagaaaatcaacctatcctccttcaggaccaacg

SEQ ID NO: 264557 - DNA, 76 bp, Homo sapiens
acatgcgtttaatcacacaccaaaaactatgaatggagacatgaggcatggaaataaccagcctgcaagaactggc

SEQ ID NO: 264558 - DNA, 100 bp, Homo sapiens
ggaggaggccctggagctgatcaacgtgaataatgctggaatgggcctggtggggcccctggaggggctcagccttgctgccatgcagaatgtctttgac

SEQ ID NO: 264559 - DNA, 75 bp, Homo sapiens
gtggagacgtggtactcagcaagctcgagttaaagttggatgtgctggaacagactcagcccgcctgcacccagg

SEQ ID NO: 264560 - DNA, 100 bp, Homo sapiens
agaagaataagcacaagagaaagaaggttaagctggctgtcctgaaatattataaggtttccacttgagcggcacagtgacagaacctgcaatacaatcg

SEQ ID NO: 264561 - DNA, 101 bp, Homo sapiens
ccccaaaccgttcgaagatacagggtagtgcacagtggagatggaccttataaattataactttgaaaatgcatctcagacatttgatgacctccctgcaa

SEQ ID NO: 264562 - DNA, 50 bp, Homo sapiens
cttggctacatttattgaagaattggagatccccgtcgaggtcaagatca

SEQ ID NO: 264563 - DNA, 92 bp, Homo sapiens
cgctcgctgggagagaggtacctctccttttccctctccctttccctaagacggttgatgatgaagcgccggccgtgtaaatgaagatcggg

SEQ ID NO: 264564 - DNA, 100 bp, Homo sapiens
cggacttcctggacacgtgggagacttttcccaggtccctcgtatcaaaacattaagagtataatggaagatagcacgatcttgtcagattggacaaaca

SEQ ID NO: 264565 - DNA, 100 bp, Homo sapiens
attccagtcacttttcacagaaggactgaagagtctgacaggctgagggtaaaaagctgggattggtaggctgggtccagaacactgaccggggcacagt

SEQ ID NO: 264566 - DNA, 83 bp, Homo sapiens
gggatgagtttgaaggcctcttcaagcagccagcagaaaatgtcaaccagtacctcacagtaaaggtgggattctatccaaag

SEQ ID NO: 264567 - DNA, 100 bp, Homo sapiens
gggcgacggcgcggcgcgcctggggcccggtggggtcctgcggggacgcgggcgaggacggcgcggacgaggcagctatatgttctcctttcagccaaga

SEQ ID NO: 264568 - DNA, 83 bp, Homo sapiens
catcgttccaaccagttcaaagcttgttgtctttgatactacattacaactcaaggagaaattgaagccatagtcgtgcctgt

SEQ ID NO: 264569 - DNA, 74 bp, Homo sapiens
ctaaagcagcgtgcgttcagccctgggctatggcattgctggttctaccaacgtgacaggtgatcaagttaaga

SEQ ID NO: 264570 - DNA, 98 bp, Homo sapiens
gccgagccgcgcagcgctgcgggggaggcgcccgcgccgacgcggggcccatggccaggaccaccagccagctgggcgaagctgtgctcaggcccggg

SEQ ID NO: 264571 - DNA, 48 bp, Homo sapiens
ggcttgattcagtctgccttgtaacagagtgaagttcccagaccctac

SEQ ID NO: 264572 - DNA, 100 bp, Homo sapiens
catacgtggataactatagttgagcagggctattgagtggccagacttccccaacaaatgccaaattggagaaactggactctcagcaggtgttgcagct

SEQ ID NO: 264573 - DNA, 80 bp, Homo sapiens
ccggctcgagatggcggcggcggcggcggcggcgggggactcggactcctgggatgacagtcatgtccctttccagggac

SEQ ID NO: 264574 - DNA, 75 bp, Homo sapiens
aagacgccacagacagcagcgcagtaccaccttccagagatgttgaatttagtattagtgacaaacagaggcctg

SEQ ID NO: 264575 - DNA, 100 bp, Homo sapiens
tagtcctcgggaagaagtttcagactacaaggggtattgtccagtcagaagaaaaacttgtcatcagtgcatcctgggcaaaagatgatgatatcagcag

SEQ ID NO: 264576 - DNA, 75 bp, Homo sapiens
acaaggccttctccatggatgaacacaatgcaggctctgctgaccgagatgatggaaaggtgtaagaaactagga

SEQ ID NO: 264577 - DNA, 100 bp, Homo sapiens
gcacagagggctttatacagggccgtgatgttggagaactacaggaacctggagtctgtggaaaagaatggtttgtcattcattgaaacttcggccctag

SEQ ID NO: 264578 - DNA, 90 bp, Homo sapiens
gtatgatgaagcaatacggcatttttcaacaatgcttcaggcatctccttggaaacaatgccatctttgaatgtgagagataaacctagt

SEQ ID NO: 264579 - DNA, 100 bp, Homo sapiens
gaggaggccttcgaggctctggagtcctccacggctacggtgaacccagatactggctacatcaactatgaccagctggaggagaacgcacgcctcttcc

SEQ ID NO: 264580 - DNA, 92 bp, Homo sapiens
gcccatcgtgtgaactatagagtttgtggacagatttatattggtaagaatgattgatgttggctgatattggagtgctcattcacatgaag

SEQ ID NO: 264581 - DNA, 100 bp, Homo sapiens
gctacaacttggagaatggaaaagaaccattgaagcttgagagaaaagcccccaaaagcagctattcagggaaagatgccaccctcctgatacatgaagc

SEQ ID NO: 264582 - DNA, 100 bp, Homo sapiens
gcgggtggcagcgatccgcgggctggcgacgtagaggaggacgcctcacagctcatctttcctaaaggtggtgactttcgatgcagggggagtaagtggc

SEQ ID NO: 264583 - DNA, 50 bp, Homo sapiens
gccatatcctacaggactttgaaggagaaaaacctttcaagtgcgatgag

SEQ ID NO: 264584 - DNA, 75 bp, Homo sapiens
aaggcgacaggaaccagctcgggggccaactctgaggagtccactgcagcaggcagttgtgaaaaacttcaggac

SEQ ID NO: 264585 - DNA, 100 bp, Homo sapiens
tgaaaaagcactgactgctctgcttaaggtgtccgcaatgttgccagtgtctgtctgcagattggctacccaactgttgcatcagtaccccattctatca

SEQ ID NO: 264586 - DNA, 96 bp, Homo sapiens
ctactggatgtggagccagaaattgtgtggaatgcctggtgtttctttcagttcttggatgccaatctgagggccggtgcataaacttctcccgag

SEQ ID NO: 264587 - DNA, 51 bp, Homo sapiens
agatttcagtgtcctccttagctctgcagggagttctgggaaatcgttcat

SEQ ID NO: 264588 - DNA, 75 bp, Homo sapiens
gctattggaccatgtagaatgttgcaatattgtttacaggtggcagttaaaatgaagcagtacaaagatgaactt

SEQ ID NO: 264589 - DNA, 102 bp, Homo sapiens
tactcagacgctggcgggcgcagtttctcacgacgggccgagcctgccactgaaataatgcaaaaggtgtcccaaggctcctgaccagtgaacaaagatttg

SEQ ID NO: 264590 - DNA, 75 bp, Homo sapiens
taaggtgatatggagcaactgctttcacaggggcaccagtctctcatcacttttgtgaacaagcacctgaacaag

SEQ ID NO: 264591 - DNA, 101 bp, Homo sapiens
cagagagatttgtatagagatgtgatgttggagaactatagcaacttggtatcactaggtgacttggcatgaaattgcaaggcctcagatacatgggtatg

SEQ ID NO: 264592 - DNA, 100 bp, Homo sapiens
cgccccggtgcagatgaacctgtacgccacctgggaggtggaccggagctcgtccagctgcgtgcctaggaccgtggcaaggaggtgtacagccctgact

SEQ ID NO: 264593 - DNA, 82 bp, Homo sapiens
agcaccgaggagcgcgccgcgcccttctccctggagtaccgagtcttcctcagttttaaaatcaaagatgggaaaatcggag

SEQ ID NO: 264594 - DNA, 100 bp, Homo sapiens
gatggcggagtcggggctcctgacgatatattcgactttatgggagaaaatttagcaaagaagatcatgttctttttattaagttattgtatgagctggt

SEQ ID NO: 264595 - DNA, 75 bp, Homo sapiens
ctgccgtgatggcatcaaccgctacgactgtgtctgccaacctggcttcacaggaatgggtaccacagaccatgt

SEQ ID NO: 264596 - DNA, 75 bp, Homo sapiens
caggagacatgggaccaccaggtcgtctgatacttggcatatcgaaattttatgattgacacgtatcgtctaaac

SEQ ID NO: 264597 - DNA, 100 bp, Homo sapiens
aggaggtgtgacatcatcatcatctctggccggaaagaaaagtgtgaggctgccaaggaagctctggaggaagctgatccagttcgggcttatgaagaac

SEQ ID NO: 264598 - DNA, 100 bp, Homo sapiens
cacaggtgtcacactactacttggcacagctcactagtgtgaggcagtggggtctaaaattcccaggactccacagctttgcaccagataagcctggagg

SEQ ID NO: 264599 - DNA, 100 bp, Homo sapiens
acggtggataacgacaagaaaaacaatcgcttcaatgatgggaaggtggatcccgccgggaggtactttgctggcctggttggtttacacaacattggac

SEQ ID NO: 264600 - DNA, 98 bp, Homo sapiens
catgctgaaaaactgagtgaatatgatcagatttctccaccaaattctcagcctgataagggcagtacatgccacactactacccttcctgctcttgt

SEQ ID NO: 264601 - DNA, 75 bp, Homo sapiens
atcaagcatcagccatgatggtagaatctaggaagtggagagactgattttggacctcagctcaagaacctcaat

SEQ ID NO: 264602 - DNA, 100 bp, Homo sapiens
tgtacagacatctgcgccggagagaatatcagcgacaggactacatggatgccatggctgagaaggaagccctcaatctagaagagtagaggtccaaagg

SEQ ID NO: 264603 - DNA, 80 bp, Homo sapiens
cctggtgtcacctatcagtaaaaggaactgtggctgcaccatctgtcttcatcttcccgccatctgatgagcagttgaaa

SEQ ID NO: 264604 - DNA, 75 bp, Homo sapiens
actctgctgcagatcccttgccctggtccttggatgtggctgtgttgcccaagctattctcagtcgaggacgttt

SEQ ID NO: 264605 - DNA, 82 bp, Homo sapiens
agcatggatatccaggtgctgagccaggagcagcagcctttctatcaggatcctcatgaccagccaaagagaagaagaatta

SEQ ID NO: 264606 - DNA, 107 bp, Homo sapiens
acaacatgaaacagcatctcagacttctttcccagatgtttataatgagggcacacagaactgaaggcagaagctagtctaatggaccagatgagtagttgtgatag

SEQ ID NO: 264607 - DNA, 74 bp, Homo sapiens
tcagatgctgccagggtccctgaagagggaagacacgcggaaacaggcagaggaacgaggacgcctgaaggaag

SEQ ID NO: 264608 - DNA, 96 bp, Homo sapiens
tggctactactggttccatcgtatggctcatgtggcttttcatggcctgccactgaaaatcaagaaagaaccccacagtccatgttcagaaatcag

SEQ ID NO: 264609 - DNA, 75 bp, Homo sapiens
tttacttgaaacaaaaggagaccctaatcttcagacaaaattgcttacccagtacatattaaatctcggcaagta

SEQ ID NO: 264610 - DNA, 75 bp, Homo sapiens
tcctgagtagctgggattacaggcgtgtatatcagtaaaaccacatatattcgtcaaggggaacagtctcttgat

SEQ ID NO: 264611 - DNA, 75 bp, Homo sapiens
tgtcaaaatccatagatggaaaagatggtgtgatgaatgcagactctgctaccattttggctgtttggatcctcc

SEQ ID NO: 264612 - DNA, 51 bp, Homo sapiens
gtttttggagcgccgggagcgaggtgtgactgaagaaatatcaaatgtttc

SEQ ID NO: 264613 - DNA, 82 bp, Homo sapiens
tgataacaccctgtaacagctgagttgatgataattagaagcatgctttccactgaacttcccgacaacatttgttatgcag

SEQ ID NO: 264614 - DNA, 90 bp, Homo sapiens
ccgcactggaagacttgaacacttccttctctaacatggcattgtgccagttaccagtgattgccagtacctcttccctgccaaggttgt

SEQ ID NO: 264615 - DNA, 82 bp, Homo sapiens
agaagtccagagctgaggactgcctgtttgcagggagttaaatacctgtgcatcccagcagcggattcaccatctcaaaacc

SEQ ID NO: 264616 - DNA, 100 bp, Homo sapiens
tggtgaaggttgagcctgactaccgcctttttgttgtgcacctgctccccaagctccagcagctgggtgtcatggagaaactccagctgggcccagagat

SEQ ID NO: 264617 - DNA, 82 bp, Homo sapiens
ctacaagcccagcccagatgcaggcctggtccgacccccagtggcactaacgtgggatcctcagggcgctctcccagcaaag

SEQ ID NO: 264618 - DNA, 100 bp, Homo sapiens
cggcttgcctggaacagatacgggagatggaaaagcagctggattgccttttgcaattcttacttcaaggcatacccccttccaacgaggagtattctgt

SEQ ID NO: 264619 - DNA, 75 bp, Homo sapiens
cgcgggctctgaggatgagctggaggagggggtgcccaccagctgacctctcctccttctcagtcagagtctctg

SEQ ID NO: 264620 - DNA, 96 bp, Homo sapiens
gcccgctggccgggctggctgcggccgccctgggccgggccccaccggacggtgctggagaatctggtaaaagcaccattgtgaagcagatgagga

SEQ ID NO: 264621 - DNA, 98 bp, Homo sapiens
gggctcagagatccaagtgcgcgccctggcgggtccggaccaagaggctgtggccaggccagctgggctcggggagcgccagcctgagaggagcgcgt

SEQ ID NO: 264622 - DNA, 83 bp, Homo sapiens
acttataaatggcgccgaagcaggacccgaagcctaaattccaggagggtgaatgaaaactttgccattgatttgatagcaga

SEQ ID NO: 264623 - DNA, 82 bp, Homo sapiens
ttagggccgaggggcactgcagctgacaagagagctccacgcaggagatcggtgaggagctgatcaacggagtcatctactc

SEQ ID NO: 264624 - DNA, 101 bp, Homo sapiens
gatcctgtccttcatgcagtctctcattggcttctttgagactgaaatggcagaggatgttaagcaagtttttggacagaccacaattcatcaacatattc

SEQ ID NO: 264625 - DNA, 90 bp, Homo sapiens
ggagctggcggagagcggcctgcgggcgatcgggccgagctaccagagattcactgactgctataagtgcttctaccagttgcagcctgc

SEQ ID NO: 264626 - DNA, 100 bp, Homo sapiens
gggattcgcgctgctgggcacccacggagcctccggggctgcggctggctgtcggcaattggattcttccagtacagcccgggcgctgccgtggtcatgc

SEQ ID NO: 264627 - DNA, 90 bp, Homo sapiens
ctggcaatgggggcaggagctgttggagctttgcagctgacctacatctcgaaggattttactggagcccagagaactcaaccaaccgag

SEQ ID NO: 264628 - DNA, 75 bp, Homo sapiens
gaaggaataagcctggaagaaaaagatacaacgaactagcacaacgagggtacatgtgaagattttttggcagct

SEQ ID NO: 264629 - DNA, 87 bp, Homo sapiens
cctcaactgcctgcagggcgccttcctctacctgctgcactgcctgctcaacaagaaggtgaaaatccccagcaaggaggaagaggc

SEQ ID NO: 264630 - DNA, 98 bp, Homo sapiens
acagacataacatggagctccagtggaagtgatttgtcggatgaagataagacactttctcagttacagagaggctggtgcctctgccgagatcaccc

SEQ ID NO: 264631 - DNA, 82 bp, Homo sapiens
gtgaacctggaccaggaggaggttttcaggaccaaaattgtggaaaagtcactctgggtggcccagttgaaatccttccctt

SEQ ID NO: 264632 - DNA, 101 bp, Homo sapiens
cttcattcataaggataaaggatttggctttatccgcttgtgtgcaggtaacagagctggaagggatgtacgtgtgactccgctgccttcactggcctcac

SEQ ID NO: 264633 - DNA, 100 bp, Homo sapiens
ctggggctggtcctggccttgaggaagactgtcatcccagccctggatgggtctgttcctggtttcccagatgcataaaggaagacatatccctcccctg

SEQ ID NO: 264634 - DNA, 85 bp, Homo sapiens
aggatctgccccagagaaagtcctcgctcgtcaccagcaagcttgcgggggaatgaaagctactggttgattttaaagtgcctgg

SEQ ID NO: 264635 - DNA, 75 bp, Homo sapiens
agggctgaccgtgtccaagggagtgcagatcaacatcaaaggtaatagcctgcagctggtgttttgagaagccct

SEQ ID NO: 264636 - DNA, 96 bp, Homo sapiens
cttcaaaaggtttgaaaaatatgacaaatggaagcttcaggagctcaggcaatttgtaaaaagcagcaaatgcagccctgaggatttggctactgc

SEQ ID NO: 264637 - DNA, 75 bp, Homo sapiens
cactgtgagagctgtcggcactgtaactctggacacaactcagatgggaagttcatcgcccgggcacagcggata

SEQ ID NO: 264638 - DNA, 75 bp, Homo sapiens
gcaacgcgagtgggagcaccaggatctcgggctcggaacgagactgcacgccaggcccagacatgtccgtccttg

SEQ ID NO: 264639 - DNA, 80 bp, Homo sapiens
agacgtgcaacaaagtgcgatggttacaggaggttccagtggcatcgggaagtgcattgctatcgagtgctataaacaag

SEQ ID NO: 264640 - DNA, 100 bp, Homo sapiens
tgctgctactgtgtccagcgcaggttatcaatactctggctgaccatcatcatcgtgggactgactttggtggaagtccttggttacatgtcattattgc

SEQ ID NO: 264641 - DNA, 82 bp, Homo sapiens
gacaccgttgtacaaagatacgcggacccctttaaccggatcgacattccaccatatgagtcctatgagaagctctacgaga

SEQ ID NO: 264642 - DNA, 100 bp, Homo sapiens
atagactgatcaaatcgaggagtgaatctgatttgtctcagcctgaatcagatgaagagggttacgcactggcccatgaagcttcccatcaccaacagca

SEQ ID NO: 264643 - DNA, 100 bp, Homo sapiens
taaaactcctttgccaacaatcattggctctcctactaagaggtttttcattagtcaatacagtgaaggctggcatgatcatcagcttcccatccaataa

SEQ ID NO: 264644 - DNA, 108 bp, Homo sapiens
cgcactgagtcaacagactgagcgcgtccaggcctgacagctctgcggctcgggccctgagacaatgcagatcttcgtgaagactctgactggtaagaccatcaccct

SEQ ID NO: 264645 - DNA, 100 bp, Homo sapiens
tggacatctgggtacccataaagattggggcgctcacatactttgctcaagcagatgctctcaaggtcctgggaactccaacaagggagcaaatcagaga

SEQ ID NO: 264646 - DNA, 98 bp, Homo sapiens
cccgccgccatgggctcctcgcaaagcgtcgagatcccgggcgggggcaccgagggctaccacgttctgcggcttattcagctgattctgaatcatct

SEQ ID NO: 264647 - DNA, 75 bp, Homo sapiens
atttatgcaaacttgggccaaaggacagttagaagacagtagattgtctttggctatagagtttttttttttaaa

SEQ ID NO: 264648 - DNA, 76 bp, Homo sapiens
actctggatgggattgcaaaatggaagttcgtgaatgctaatcaagggctaaataaagtggaaagcagcatccttg

SEQ ID NO: 264649 - DNA, 103 bp, Homo sapiens
cagacgcggcacagagagggcctgggagcttgctgcagcttcaggtgagaagccctaccactgcaactgggacggctgcggctggaagtttgcgcgctcagac

SEQ ID NO: 264650 - DNA, 75 bp, Homo sapiens
gtatcttcatggtgcggctcatcttcgagaggtgatgtttgcagacagaaaaagtaaactgtcaaggaattcaga

SEQ ID NO: 264651 - DNA, 100 bp, Homo sapiens
tgctgatggtgatggagattttgatgtggatgatgccaaagttttattaggtcctgaccactggcatgaacttttcccaaatgccaagggggaaaaccag

SEQ ID NO: 264652 - DNA, 75 bp, Homo sapiens
gacgaggaagaggaggtttctgagttgtctatcaacgtctatgactacaactgccatgtggacttgatcagactg

SEQ ID NO: 264653 - DNA, 74 bp, Homo sapiens
cctcccgagtaggtgggattacaggaaagactgcctcacctgagcaagaagcttcaccctggacaaaaaccccg

SEQ ID NO: 264654 - DNA, 75 bp, Homo sapiens
acacagacgtggggcgatgcttgtgaccctgcagctcctcaaagtgtttatctcagtggatgatctggaaccccc

SEQ ID NO: 264655 - DNA, 100 bp, Homo sapiens
cagaaagatatgaaggactgggttgaagccctgaaccaagccagcaagatcaccgtggttgtgtcaaaccgattggtgacatctccatgctgtattgtca

SEQ ID NO: 264656 - DNA, 98 bp, Homo sapiens
cacatgttctgtcatagagaaacctctggataagttcttgcctaatgaccttgaatgatgccatgaggaacaaggcaaggctgtcaattacaggaagt

SEQ ID NO: 264657 - DNA, 83 bp, Homo sapiens
cccggagcccccagcgcagcggccgcgaacatccatgatagcagtcttctgtaaatcgaacttttcaagaattctctgaagga

SEQ ID NO: 264658 - DNA, 100 bp, Homo sapiens
atcatggcattttctgttaataaggatagtgaatattacaattccctaagatggattcttgaaaatgacccaacagaattggacctcaggtttatcatag

SEQ ID NO: 264659 - DNA, 100 bp, Homo sapiens
agctttgaaagaacttgccagacttaaacagaaaaagcttgtggtgaaggggggcaaaaaaaagaagcaagttctgaagttcactcttgattgcacccac

SEQ ID NO: 264660 - DNA, 82 bp, Homo sapiens
gggcgaagtttcaagcagacttcacttgctcttgtacatgagattacagtagaatgcacattccttgactatataatgggag

SEQ ID NO: 264661 - DNA, 50 bp, Homo sapiens
cagagcaaggagaagctgttgcacacttccaccctgggcagcgtgtttgg

SEQ ID NO: 264662 - DNA, 98 bp, Homo sapiens
ggcgcgctgcccacacctccaggcgaccggtactatactggcaattgctggagaagattttgcaattgttgcttctgatactcgattgagtgaagggt

SEQ ID NO: 264663 - DNA, 75 bp, Homo sapiens
aaggaacaactacaagcacaataaaactgaactttacagatgaatgattcaggggtcagtttacttcataaaaaa

SEQ ID NO: 264664 - DNA, 98 bp, Homo sapiens
agaaaaggagttaactggaagaaatgagaactagaatgtatttacccggcaactctgtttagaacatgatgaaaagctagtatcctatctgtctctgt

SEQ ID NO: 264665 - DNA, 100 bp, Homo sapiens
caaagctcctgaacagcaagtgaaaaacttcacagagaatgcagttgtcttgacttcaggtctgtctgttctgttggcaagtaaatgcagtactgttctg

SEQ ID NO: 264666 - DNA, 100 bp, Homo sapiens
gtgcccggactgccgcaggaccgtggagaaggaggagaggcatggcggccttgaccagccagtgatgccttcaattaagttgcagagttctgatggagag

SEQ ID NO: 264667 - DNA, 94 bp, Homo sapiens
tccgagggtgcctgggaatcggtcgcctggaggaccagtatttcccatggaggatctgactgcagccatgagcagcaatgagtgcttcaagtgt

SEQ ID NO: 264668 - DNA, 100 bp, Homo sapiens
tcgcaacatcaagggagttttccggggccctctcagcaagaacgggaacaaaactctggaacttgatactaaatttgggactctttgctgcgggagtttg

SEQ ID NO: 264669 - DNA, 100 bp, Homo sapiens
gaatgcttgaagacagagatttattcgtaatgcgactcaaagctgcacggcagtctgtttatgaggatcaaaaccattcaagtgcaagatatgccatttt

SEQ ID NO: 264670 - DNA, 100 bp, Homo sapiens
cgcggacagcgggctggagcctgacgagctggcgggtaactaggatttctacctcaaccgcgagacctatgcaaggacggtgtggaccaactcgcgcccg

SEQ ID NO: 264671 - DNA, 74 bp, Homo sapiens
aacaagatcccccgtctgaggactgacctttttccgtattttcttaaagtgacaatagtgagaagactgacaga

SEQ ID NO: 264672 - DNA, 96 bp, Homo sapiens
atatcaacactaccaaaaataatccagtgatgtcattgcaagatcagatgtactttatgaaaaatcgtgcccggaggcaaggtattaacttaaaac

SEQ ID NO: 264673 - DNA, 100 bp, Homo sapiens
cgaggaagccgccgggcgccgcgcctttgggtcagccaagatgggaagtcgctccttgacaagctccagcggcccttgactcccggcagctccgattccc

SEQ ID NO: 264674 - DNA, 97 bp, Homo sapiens
gaccattcagatgggatctttccggatcaatccagatggcagccagtcagtggtggagatggatagctcccagttgatccattgtcgggagcttgtg

SEQ ID NO: 264675 - DNA, 51 bp, Homo sapiens
tgctgtcctcaagctctgcgattttggcagtgcaaagcagctggtccgagg

SEQ ID NO: 264676 - DNA, 82 bp, Homo sapiens
gtgatccagcaaggtcggcagagcaaggggcttacgcagaaggacctggccacggctgaccaactgactgaagagcagattg

SEQ ID NO: 264677 - DNA, 100 bp, Homo sapiens
ttgatatggagtttgaacgagccaagtcagctatagaggccaaggcagaggcttcctcaggagaccatcccactgacacagagatgaaggaggagcagaa

SEQ ID NO: 264678 - DNA, 80 bp, Homo sapiens
cccgaagacgccgacctcttccactccgaggaaatcaaggtgcctaatggataagaacttcgttaggattgggaaatggt

SEQ ID NO: 264679 - DNA, 100 bp, Homo sapiens
ccggccgacccttcctgtcgctgacggcgactgcgggaggccagcgtcagcctcgagtttgaccagcagcaggggtcggtgtgtccctctgaatctgaga

SEQ ID NO: 264680 - DNA, 100 bp, Homo sapiens
ttgtgatattctggaggaggaggattggcagccaccatttgcatgtgatgttgataaacttcattttacgccacgtatccagagactgaatgaattggag

SEQ ID NO: 264681 - DNA, 51 bp, Homo sapiens
tgtatggagcgattttgcagatgaaagggcccgagttactggggaagaacc

SEQ ID NO: 264682 - DNA, 82 bp, Homo sapiens
gtcctctgaaaactcgggaatttgtcactgaaatggtgacaggaggtcttccccagggaggtcctgaactacacagctgaga

SEQ ID NO: 264683 - DNA, 75 bp, Homo sapiens
tgggaaaacacttcaaatgctgaggctggttttaacctacgcaaagttaacaaacacataaagtttccggaaatc

SEQ ID NO: 264684 - DNA, 87 bp, Homo sapiens
tagacctggagtggacacgcccctccttcccttcatgattcgtttgtagcgcagatgctgcctcgaactctgtcactgagaccccac

SEQ ID NO: 264685 - DNA, 90 bp, Homo sapiens
cggcaatcgacctgaggacttgcgagccgctcagctcccgggacgtttggccaaacgtaccaagaaagtcgggatcgtcggtaaatacgg

SEQ ID NO: 264686 - DNA, 98 bp, Homo sapiens
ttgctctcagcatcggtgcacttgtaatatacttcatagattcatcaaagtactttgtaaaagccctgacaccagcatttttggtctgtgtaggatcc

SEQ ID NO: 264687 - DNA, 83 bp, Homo sapiens
cactacaccccaagcatgtgagctgtggaggatccctccattcgtgggtccaggagctggtaggtgagtgctgtcctcggctc

SEQ ID NO: 264688 - DNA, 76 bp, Homo sapiens
caaagagaagatcacaccactcacgctcaagatgtcatggcacccccagtaccggagctccaagttccgtcatgtc

SEQ ID NO: 264689 - DNA, 111 bp, Homo sapiens
cctggagcctcagttggaagcagccgatccagcctgcggagcctgtggggcagaaatcaagatgactaccagctggttcgaaaattaggccgaggtaaatacagtgaagta

SEQ ID NO: 264690 - DNA, 118 bp, Homo sapiens
ccgggcggtgcgcactgcgggcgcatccctgccccggcgccgtccgtgcccgcgggacctgacagccgggtcagaggggacagagggacttggactggctttggcccaataatcagag

SEQ ID NO: 264691 - DNA, 90 bp, Homo sapiens
cacactcttggggctctacctctttttcaaaaacaaactcacgatgttggacattgcatcaaatagaatcaaaaagattgaaaatatcag

SEQ ID NO: 264692 - DNA, 83 bp, Homo sapiens
ctcgtaattacattctctcggccagcgcctccgcgggttgttatgaggctcaaaggaacggctgctgtgaaaaaacatgcttt

SEQ ID NO: 264693 - DNA, 81 bp, Homo sapiens
ggacaggctgattgagcgcatggaaaaggcttgtaattccacatctgaagtcaaagatctattggaacagaaaagcaagtt

SEQ ID NO: 264694 - DNA, 83 bp, Homo sapiens
ttcgagcactaatatttaagaaagaagatgttaactttcagggagaaacacatctcatctttcctaaaaaagcttcagtggag

SEQ ID NO: 264695 - DNA, 100 bp, Homo sapiens
agaagaagtatttgatgtcttagagaaacttggagaagggtgccagcgagatttcagattcctgtaaacctctaaagaaaaggagtcgcgcctcaactga

SEQ ID NO: 264696 - DNA, 51 bp, Homo sapiens
cggaagctggagccacctgcgggtgcagtctttgcaagccacatttggaac

SEQ ID NO: 264697 - DNA, 80 bp, Homo sapiens
gcagccgagcggagctggaagcggacgaggcctcatgcgctcacgggttcggggggccgatgctgcccaagccaaggtcc

SEQ ID NO: 264698 - DNA, 100 bp, Homo sapiens
agacagacaagacaaatgtgcccttggctgggatcaccaggagaaattgcagctgcatgaatcccaaaaagataccagcgggcaagcagaaaacaagagg

SEQ ID NO: 264699 - DNA, 73 bp, Homo sapiens
agcaccttgtggagcaaatagtagttctggtaccagctatcatgaacagggctctctaaatacgtacagattc

SEQ ID NO: 264700 - DNA, 88 bp, Homo sapiens
acatctgactgccaggctaggatgtgacacttaagcagagaccacgcagaggctgcctttggatcaagtccaggaagtgcttccccca

SEQ ID NO: 264701 - DNA, 100 bp, Homo sapiens
acactttctgaagctcatgaagactgtgtaaataatatcagggtcaacatatttcactggcacctattcacaagcttgaagaagctctgtatgaatacca

SEQ ID NO: 264702 - DNA, 75 bp, Homo sapiens
gtcaaactcttctcaggccctaaacatgccatgcatgggattaatgaaaatcaagttccatcctcagacaagagg

SEQ ID NO: 264703 - DNA, 82 bp, Homo sapiens
ataccacagaacattggctggtcaggatatacaaggtctattctggataagcaggttttgtgaagacatttattctttcttg

SEQ ID NO: 264704 - DNA, 76 bp, Homo sapiens
gaaaaagccaaagtgggaccaggatggagacctcacagacacggtcagtggtccccgctccacagcctccgacctg

SEQ ID NO: 264705 - DNA, 100 bp, Homo sapiens
gcaggggagacactggggacctcggaaggcacttctgcgggcagccaccctcgggctgcatacggcacgtgtggttctcaaatataggcattctgatggg

SEQ ID NO: 264706 - DNA, 75 bp, Homo sapiens
agaaactgtccgagaagcccaaagatgaagatgagctggattcccacaccatggtgaagactagtgtggagagtg

SEQ ID NO: 264707 - DNA, 123 bp, Homo sapiens
actggaaacaatggcatttacagaaagagtcaacagcagtggcaacagtgccggtggtggtgtgcacattgagccccggtatagacagttcccccagctgaccagatcccaggtgttccagag

SEQ ID NO: 264708 - DNA, 50 bp, Homo sapiens
tttctcatctttatactcttccagcgcgagcttcggcctcggctctgtac

SEQ ID NO: 264709 - DNA, 75 bp, Homo sapiens
gatggatgctcacccgaaggctgattactttggtgacatctgttcccgagctgttcctgactgcagtgaagctca

SEQ ID NO: 264710 - DNA, 74 bp, Homo sapiens
agcccgctgggtggtctcggccgcccactgcttcagccacaggatcatccagcagctcgtcaacggcatcatca

SEQ ID NO: 264711 - DNA, 100 bp, Homo sapiens
agctgatactacccacccccggttacgcctgtcacataaagaatgtaaaaagggcagctctctggcatgttcctgactgaggatctcataacatttaact

SEQ ID NO: 264712 - DNA, 83 bp, Homo sapiens
atcaaaatgaagactgcctttacttaaacatctacgtgcccacggaagatggctcgattccttttgtccaaagtgaacccatc

SEQ ID NO: 264713 - DNA, 75 bp, Homo sapiens
cagtaccatattctctggaggttttagacacgtgtgactgaagaaatatcaaatgtttcctagtaagacagcaac

SEQ ID NO: 264714 - DNA, 100 bp, Homo sapiens
ggatttgttaaggattccaagtaactcttatttgagcgccagtggaacatgtggatcccaggatttggctctgaagaaatccgaccctacaaaaaagctt

SEQ ID NO: 264715 - DNA, 75 bp, Homo sapiens
ccggcgcgcacaggctgtagcaggttccggcggacggcgttgcgaagaaggagctcaaaaagtgggatgagtttg

SEQ ID NO: 264716 - DNA, 82 bp, Homo sapiens
gatatagcagaagcagcagcagcaactcctgatttaggggcaatcgatagtcacaatggcttcagcctttcgcctttctttg

SEQ ID NO: 264717 - DNA, 100 bp, Homo sapiens
agcctccagagtagctgggactacagcaggacagaaggagcaagctgtggaatggtataagaaaggtattgaagaactggaaaaaggaatagctgttata

SEQ ID NO: 264718 - DNA, 100 bp, Homo sapiens
ccacagatgagccagtatggaccacaaggtgggatgtgtgtgggctgaaattccgagctgcggttgtgcatgagaatacacccttcgtggtaccccatct

SEQ ID NO: 264719 - DNA, 100 bp, Homo sapiens
cgcaggtcctcgcggtgcgcaccgtttgcgacttggcctatatgaacccaatagcaatggcgagatcaaggggtccaatccagtcttcagggccaacaat

SEQ ID NO: 264720 - DNA, 74 bp, Homo sapiens
tcacacgccgccatccgggaggcccagggaagaacccctgaacagtgcccaagtgttgtctctttgttgtcaga

SEQ ID NO: 264721 - DNA, 100 bp, Homo sapiens
aaggccaagatggacgccgagcaggatcccaggcagagcggcttgggtaaatccaccttaatcaacaccctcttcaaatccaaaatcagccggaagtcgg

SEQ ID NO: 264722 - DNA, 100 bp, Homo sapiens
cgccggcggagggtgcatgtttgcgaggaagccgccgggcgccgcgcctttggcttgaccacatattatcccctccacccatgccgtttcggaaatgcag

SEQ ID NO: 264723 - DNA, 51 bp, Homo sapiens
caccaacaccagcggggcgtccgagtcttctggtccatcggaggatccgag

SEQ ID NO: 264724 - DNA, 50 bp, Homo sapiens
gaacaacttaagagcttcttcaaagagcagcccgacggccatggaggctg

SEQ ID NO: 264725 - DNA, 75 bp, Homo sapiens
attcgcagtggtcgcttcttctccttggttgttttctgcatggaccgtgccctagaatttgcccctgcctgccat

SEQ ID NO: 264726 - DNA, 100 bp, Homo sapiens
cggccgccggccccgtggctgacctgtttcgggcatcgcagctgcccgccgagacgctgcaccagagataattgacgaccttgccaacctagtggagaac

SEQ ID NO: 264727 - DNA, 75 bp, Homo sapiens
cgttgctgcggccgtggtccgcgcccttcctcggcgggccggactgacttaattcagtgcacaaatgagatgaat

SEQ ID NO: 264728 - DNA, 75 bp, Homo sapiens
cccagggccaggcgccgctcagaacgactcaagaatgaacaatccgtcagaaaccagtaaaccatctatggagag

SEQ ID NO: 264729 - DNA, 50 bp, Homo sapiens
cggacgtccggcgcgggagagaaagaacctaaaggcagacccagaagagc

SEQ ID NO: 264730 - DNA, 98 bp, Homo sapiens
cactgatgccacccagaggatgttctaccggccctccagttaccagccccctctgcagaatgccaagcctgaaaactggttttttaaaatggaagcca

SEQ ID NO: 264731 - DNA, 89 bp, Homo sapiens
gagcaaaccccagcaagatgcggaggctgcctcggcggagcagaggaaccacacgctgatcatgcacgcactcctggctttaaagttta

SEQ ID NO: 264732 - DNA, 99 bp, Homo sapiens
ccagggtacagcacagctacagagcctggaagcagtgagctaggtgttcccgagcagcctgacctccagtctttcagtgtattcaagaaaaacatcaac

SEQ ID NO: 264733 - DNA, 75 bp, Homo sapiens
atccccagtggagccggagtgcgggcgcgccccaccaccgccctcaccatgaacaggacgcaggccttgatgccc

SEQ ID NO: 264734 - DNA, 99 bp, Homo sapiens
ccgccgccgcccctgttgcgatggcgcagaaaccccgttgacaaggcactgctttttcatgacggaactcgctttgaacgcttgcttatgagaatagga

SEQ ID NO: 264735 - DNA, 83 bp, Homo sapiens
gtgacgctgctggaggaaacacctcaggacacggcctacaacaccaagaggatattagaaatggctactccccagtcaatttt

SEQ ID NO: 264736 - DNA, 75 bp, Homo sapiens
ttggatgcaatgttcttaggatcctcctcccgtccttctcatccttcgtcaaaatgcagatcttcgtgaaaaccc

SEQ ID NO: 264737 - DNA, 118 bp, Homo sapiens
ctttgccactgacattgcagagctgtgggctgtgttccacaagttcaaagctgctacaggccagagcggatggtcatttccagcagagagccctgcctgctgccttccacacatggaa

SEQ ID NO: 264738 - DNA, 100 bp, Homo sapiens
tacaagaacatgatgatataagtttgagaaggaaaattgcctaagaattatgacccaaaagttaccccagatccagaaagatggctgccaatgcgagaac

SEQ ID NO: 264739 - DNA, 100 bp, Homo sapiens
ctcggaaggcggtgccacagagcttggagctttgctgatagtccaactccaccgccaccacctccaccagatgacattcccatgtttgatgactctccac

SEQ ID NO: 264740 - DNA, 74 bp, Homo sapiens
ccgcggttcggccgcgccggccgaacccttaggagaaatcttgagagtggacagcaattgtgaagatcgccaga

SEQ ID NO: 264741 - DNA, 50 bp, Homo sapiens
gtcacctctcaactgtgtgccaaagggatattttgcaccatttccctctg

SEQ ID NO: 264742 - DNA, 75 bp, Homo sapiens
ggatggaagtgacagtagaaagcaggttgctccttgagggcaggacagttcttatggctttatccgttgcgtaag

SEQ ID NO: 264743 - DNA, 75 bp, Homo sapiens
agcagaggacgacatgttgcttttcgtggagaaagccttgagccgggccatgcttctcacatcttacctgcctcc

SEQ ID NO: 264744 - DNA, 75 bp, Homo sapiens
cggcctgcacaccaagggcgcccttcccctggatacggtcactttctacaagtgtgatccgccttattatgcagt

SEQ ID NO: 264745 - DNA, 85 bp, Homo sapiens
gagttcttacaacatggcagacattgacaaagtttccaggatggcttctgcatcaacttctaaatataattcacactccttggag

SEQ ID NO: 264746 - DNA, 98 bp, Homo sapiens
cggtccctgtgacctgtggagacacggccagatctgccctccaccattacaacacaagctagcatggagtttcgacggaaagggtcacaaatgtccac

SEQ ID NO: 264747 - DNA, 74 bp, Homo sapiens
tttcctgcttttggtttccctggcaggggttgaactgtggagtgtgtggctgcatatctatgtgagactgaatt

SEQ ID NO: 264748 - DNA, 74 bp, Homo sapiens
gatagtgacctctcacctgaagaacgagatgatgagagtaatgttgcagttaccagacccgattcagaaagttc

SEQ ID NO: 264749 - DNA, 100 bp, Homo sapiens
agaggagtacttcgccacttactttaatgagaagatctccattcctgaggaggaggacataagcagctctatgaccaatagcacagctgccagtagaccc

SEQ ID NO: 264750 - DNA, 100 bp, Homo sapiens
gtagtgcaaaaaccattcttaagaccacggaggggtgatcgtgaacatcactgccaccctggggaaccgggggcaggcgctccaggtgcatgcaggctcc

SEQ ID NO: 264751 - DNA, 134 bp, Homo sapiens
ccacgcgtcccccagtaggagaatgactccgattcgtgaccctcagcgccggtgcatgtcgatatgccttcaattaagttgcagagttctgatggagagatatttgaagttgatgtggaaattgccaaacaatc

SEQ ID NO: 264752 - DNA, 96 bp, Homo sapiens
aggaccagtttgccatcccaaggccgaaggagccatgtggctagaaatcctcctcacttcagtgctgggctttgccatctactggttcatctcccg

SEQ ID NO: 264753 - DNA, 48 bp, Homo sapiens
aacccaagcaaaacttcagatgcagtttctggcatttgaagtcaaaga

SEQ ID NO: 264754 - DNA, 100 bp, Homo sapiens
ttgaagcatgtctttcagagcccggcaccacccatcttgagtatctgaggttggaaagaaccatgactgtattcaggaaggcacatgaactgaagcttct

SEQ ID NO: 264755 - DNA, 75 bp, Homo sapiens
gagagcctactgagcagcctgagtggaagacgccaaaagactcatgtacccatgttacaggtatggactgctgat

SEQ ID NO: 264756 - DNA, 98 bp, Homo sapiens
ggggaggagaaagtagccccataccacgtgcagtatacatgtctccatgaggcatgaattgctggaggaagcccggagacaaggtttaccttttgccc

SEQ ID NO: 264757 - DNA, 82 bp, Homo sapiens
gccctgggtctcatcctcaaggagaaagccatgaccgacactttcactcttcaggcacatgctactacttatacatgtgtga

SEQ ID NO: 264758 - DNA, 74 bp, Homo sapiens
ctgaagcgactgagtccgcgatggaggccctgggaggagcggggacactgaggacctctctccaaattggcctc

SEQ ID NO: 264759 - DNA, 104 bp, Homo sapiens
tgtgaagctcaccgagacggcgatccgggcgctcgagacttaccagagccacaagcgtctgttcctcacacaccccgcccaaggacgtgcctggcagcggcctg

SEQ ID NO: 264760 - DNA, 75 bp, Homo sapiens
gaacgaggcaaggagctaaagcagcgtgcgttcagccctgggccggtggctgctggcagcggaatcccccagatc

SEQ ID NO: 264761 - DNA, 80 bp, Homo sapiens
cagtccgccgctcaccccgcggccgcaccttcccgccttctcagagatccagagcttcgcgggcgccgagaaggacgcgc

SEQ ID NO: 264762 - DNA, 101 bp, Homo sapiens
caaagaggagccagttaccatgactcatccaggttggtaacaaggaagatgctgagaaggaagtagctatttctaccttctcatccagtaaccaggtatcc

SEQ ID NO: 264763 - DNA, 102 bp, Homo sapiens
aggatggcctctggacatccgagtgggcttcagggatgacttcttagggggcaggggaggtagtcgcccaggcgaccggcgaacaggcccccccatgggcag

SEQ ID NO: 264764 - DNA, 101 bp, Homo sapiens
cgtgtcgctgctgcaggaggccaaggacggcgttctggatctcaaagcggaatttcgggagctcctacagtatcgagataactcagacaaaacccttgaag

SEQ ID NO: 264765 - DNA, 74 bp, Homo sapiens
accatgtcttcatttgcttccacaagaaccgcgaggacagagcctcctgacaaggtgatccgggcgggccccgc

SEQ ID NO: 264766 - DNA, 82 bp, Homo sapiens
agcagcgccagcggccgagcgggcggcttcctggcctgggcgctccggtggcggcggaggggaacgcccttttgcttgtgac

SEQ ID NO: 264767 - DNA, 83 bp, Homo sapiens
ctcagttccttacctacatggcactagaagaacgcttagcccaggctatggagattaactgctgaagtactgatcgagttctg

SEQ ID NO: 264768 - DNA, 75 bp, Homo sapiens
acggaattccagtctctgtggacaaaatgacccagatctaattatcatggacctgcgacagtttcttatgtgcct

SEQ ID NO: 264769 - DNA, 113 bp, Homo sapiens
gttggaacttcgttgcttgcttgcctgtgcgcgcgtgcgcggacatggcctcaaacgctgggattctgtccctgaccgtcttcacagtccaggtgatcttgactactgcttta

SEQ ID NO: 264770 - DNA, 100 bp, Homo sapiens
gcatgaaggagctggagcggcagcagaaggagtgaatggtagtgtctagaaagggtatgtcccttcaagagagaggtgccaatgtccaaccggcctaata

SEQ ID NO: 264771 - DNA, 52 bp, Homo sapiens
cgtacgggcggccgtgcgcgaggcgagatccacctccgacccttaagccaga

SEQ ID NO: 264772 - DNA, 90 bp, Homo sapiens
gaagaagggaaggcgcgagtgaggaaaggaggtactgtaggccctccacgcccttcaggaggagcaggccagactcaagatgaggctgtg

SEQ ID NO: 264773 - DNA, 51 bp, Homo sapiens
ggcaaagatgagggggattcttaaggaaagttcacatccttggctccttcc

SEQ ID NO: 264774 - DNA, 74 bp, Homo sapiens
ccctgacaccaacatcgtctacctctgtggcaagggtgacttttaaatatgacggctccaccatcgtccccggc

SEQ ID NO: 264775 - DNA, 83 bp, Homo sapiens
gagcattcctgcagctcccaaaaacagatctccatccagcacagacagacccaggttttgagcaaaattttggactgtgaagc

SEQ ID NO: 264776 - DNA, 114 bp, Homo sapiens
gaggactgcgtggttttggtcgactacaccatccggaagttctgcatacagccaagtgcctggtgaagaatgtgatgggatcactagcatgtctgcggagagcggccctgggac

SEQ ID NO: 264777 - DNA, 78 bp, Homo sapiens
gagacccgactgcaactgctggattgctgcaaggctgagggacgagaacgaggtgcagtagacattgttgcaatcatg

SEQ ID NO: 264778 - DNA, 75 bp, Homo sapiens
tctggaagcaagaatttatcaaaggaaagatggatccagacaaggtgctatacgtggatgacctgcttagtttta

SEQ ID NO: 264779 - DNA, 82 bp, Homo sapiens
ataaaactgaagatgtgaatactctggaaacgtaaatattttcaccacgatcgattagactgggatgaacacagttctgccg

SEQ ID NO: 264780 - DNA, 83 bp, Homo sapiens
tttagtgctttttatttttccccaattcagcagagaatattttcaagggggttcgtgccctcgtgaggctggcatgcaggatg

SEQ ID NO: 264781 - DNA, 82 bp, Homo sapiens
cagtccgggcaggggcagcgggagccggccgggtagtttgagctccctaaaagaggaaggtggactctacagggacaaacag

SEQ ID NO: 264782 - DNA, 50 bp, Homo sapiens
aacttgcaaataatggcactgttctcaggcccctggccccaacatggccc

SEQ ID NO: 264783 - DNA, 75 bp, Homo sapiens
attttggaaagcagtttttaagacaagtgtgtgtggtttcagcgcagcatggctgtggtcatccgtttgcaaggt

SEQ ID NO: 264784 - DNA, 100 bp, Homo sapiens
cgaagggaagtaagaaacagatggaagtgcatcttagaagatttaggtatctagaagagcagaagacagagaatggaaaagataaggaacagaaacaaac

SEQ ID NO: 264785 - DNA, 88 bp, Homo sapiens
cgagactgtggaggacatcgccgcccggctcaacattcccgtcagccaggttaacccccgaatatggttgagccccttatacccacga

SEQ ID NO: 264786 - DNA, 120 bp, Homo sapiens
ctctccttgcagctgcttagacgctggatttttttcgggtagtggaaaaccaggacttcgcaggtgagcagtaacggaaatcagccccgtttattcctcccagcacctgccttatccaac

SEQ ID NO: 264787 - DNA, 90 bp, Homo sapiens
aggattggattggcatctttagaatacgagatcctgacacccaatgccatccccaagggcttcatggatgggaagcaggcctgtgaaaag

SEQ ID NO: 264788 - DNA, 100 bp, Homo sapiens
ctgccagcagccaggccatggagctctctgatgtcaccctcattgagggtgtgggtaatgaggccaagtggaggtgactggtgatgaatacaatgtggaa

SEQ ID NO: 264789 - DNA, 100 bp, Homo sapiens
gagacacagtatagcttctgacagtggagacactggcattggaacttcctgttctgatagcgtggaaggtatgtgggcaaagactattctgctgctcagg

SEQ ID NO: 264790 - DNA, 82 bp, Homo sapiens
tgtgcgaccccaaggacgggcacctactcatggatggcggctacatcaacaatctgccagggggcagaccgggccgttccag

SEQ ID NO: 264791 - DNA, 75 bp, Homo sapiens
ggcgatggtcttcctgctggggctcatgtttgagtgagacggtttaagcggaagcatcttactgccattgactgc

SEQ ID NO: 264792 - DNA, 80 bp, Homo sapiens
aggaagcctggaggtttatctcatacatgctggtacatgctggtgcaggcctgagtgttccttccagcatgtcggagggg

SEQ ID NO: 264793 - DNA, 100 bp, Homo sapiens
attcttcgacaggaaaaaaatttgctggatattgatgcgccagtcactgcattggaggcgttgtactggtaaacctggcagggtctgaaaaacctgctgg

SEQ ID NO: 264794 - DNA, 90 bp, Homo sapiens
gctttcttcattttgactacgataaaagctctttcgacgtgtagcagcagctttgccgggaatggaaagcacacaggacagaagcagaga

SEQ ID NO: 264795 - DNA, 82 bp, Homo sapiens
cccgggtggcttacagacgctgccagcatcgccgccgccagggtttccaggcctgaggtgcccgccctggccccaggagaat

SEQ ID NO: 264796 - DNA, 101 bp, Homo sapiens
cggcatgtcatctttgccaggactgatgcagatgcccctcctccaccagaggactgggaggagcatgtcaacagatatggacatttctggaattacagagc

SEQ ID NO: 264797 - DNA, 82 bp, Homo sapiens
gtccagtggatttttaatcacatgagcccaaacaaattcgaatatcttctaaaacaggaatacctctcaatgtcttaccaaa

SEQ ID NO: 264798 - DNA, 83 bp, Homo sapiens
agatcttcgagttcaaagagaccctcggaacgtgtcccgacccaggctaagcttgagcatggctgagcaggagcccacagccg

SEQ ID NO: 264799 - DNA, 49 bp, Homo sapiens
ttcccggggcagatccaggttcaggtatccgttacagcactgatgtgag

SEQ ID NO: 264800 - DNA, 74 bp, Homo sapiens
cggcccctgcgcaagcccacctgaaaaagctgagatctgtatctgtggacctgaatgttgatccctcgcttcag

SEQ ID NO: 264801 - DNA, 100 bp, Homo sapiens
cggttgaggagctgctcttcctccagaatgcgctcggacggaacgttaggaaggccctgaggccacaagaggaagctgaatgaagaggacgccgccagcg

SEQ ID NO: 264802 - DNA, 87 bp, Homo sapiens
agccgggccctggcgaggcaggaatggccccgaggcctccgaccgccgcgccccagggctgtgctgaagtttgctgctgccactgga

SEQ ID NO: 264803 - DNA, 96 bp, Homo sapiens
gaagagacatgagatcatggtggccaaacccacagaggaagaatacaagcgattgagtgaagcactagcagaggatgggagctacaatgccgtggg

SEQ ID NO: 264804 - DNA, 96 bp, Homo sapiens
atgcctgctctgacaacgaactacctttgccttcttcaccaaaaccagttacagagaagatcccagtaaggcatttatatacaaaagatattgaca

SEQ ID NO: 264805 - DNA, 97 bp, Homo sapiens
gaacccaagcagtggcgaagggaatcgcaaggctcttccctgaccattttctactgtccctgcgcgagattattcttggagaaaccctgtctgttta

SEQ ID NO: 264806 - DNA, 99 bp, Homo sapiens
attgggactcccatcaagtctccacacagctagcagccacgtggggcacttctccagctgagctgcccctcctggacctgatgaagctgtacgaaggcg

SEQ ID NO: 264807 - DNA, 75 bp, Homo sapiens
gtctgagtgtctgctctaccacatcaaagatggcgtcaccaggtatggcccgggtccactgccttccccgacttc

SEQ ID NO: 264808 - DNA, 100 bp, Homo sapiens
cggtggcgctcaagtaccagcagcaccaggagtccctctccgcccagttacaagaaatattcccaagagactctaacttaaaagacaaattcataaagca

SEQ ID NO: 264809 - DNA, 100 bp, Homo sapiens
caaaactgcagttttgacagcacccgggaagaaggtaaggccttactccggcaaatcctacagcttcggaaccaaggcgagactcctaccaccgaggtgc

SEQ ID NO: 264810 - DNA, 101 bp, Homo sapiens
gttgtgaaggaatgaccctaggagagctgctgaagactctgttacggcatggtgcaaatccagatctgagagatgaagatgggaaaactccattagataaa

SEQ ID NO: 264811 - DNA, 98 bp, Homo sapiens
ctgctgtcagaaaagggctgggcttgggaaggggaggtggaggccaggtgtcgtgaaaactacccctaaaagccaaaatgggaaaggaaaagactcat

SEQ ID NO: 264812 - DNA, 100 bp, Homo sapiens
gaggatgcgcaggggttttctgcacttctacactcaggtgctgctggtgagtagcagccggtacccagaccagtggattgtcccaggaggaggaatggaa

SEQ ID NO: 264813 - DNA, 100 bp, Homo sapiens
aagaagtgtggcgtgaatttggtcctcagcaaccacctactctagagttgatccctgaattttattatctccctgagatgtttgtcaacttcaataatta

SEQ ID NO: 264814 - DNA, 96 bp, Homo sapiens
cggagaactttgtcggagagtttcagtcgcattggagatcgggaggatctccattgagatgcatgggaccctggaggaccagctcagccacctgcg

SEQ ID NO: 264815 - DNA, 80 bp, Homo sapiens
cctgccctctcgctttccctctcgcgtctctggctgcagcttcaaggttactgactttttatgatgtttggtggctatga

SEQ ID NO: 264816 - DNA, 99 bp, Homo sapiens
gccgaggcgtgttaacactccggattcctgagttccaggaaaaccttcccagagaaagggccgccagatcccacccttggacccccatgaaaatggaaa

SEQ ID NO: 264817 - DNA, 88 bp, Homo sapiens
cccaaacaacatctcctgctattccttgggctgcctttcctgcaggtgctgtacttctttgcagtatacaaggactagcagttaatat

SEQ ID NO: 264818 - DNA, 74 bp, Homo sapiens
accaagctttcagaggtattctagaagaagaaattcgacttcaggaagaaatcaccaaacagtctccaacgttg

SEQ ID NO: 264819 - DNA, 75 bp, Homo sapiens
aaaggaacatactctcaaaatatttacttatatcaattcctggacacagaggtgtgggccatgtttgaggattgc

SEQ ID NO: 264820 - DNA, 117 bp, Homo sapiens
agaccgcgcgcagggcctgcagcgggagctggacggcgagcgcgagcggcgcgagaaaaatgagtctgcaggtcttaaacgacaaaaatgtcagcaatgaaaaaaatacagaaaatt

SEQ ID NO: 264821 - DNA, 75 bp, Homo sapiens
caacgaggtggccgaatcttccttcaggatatcaagaaaacaaccctttttgctgcacatgtaagtggagctgtg

SEQ ID NO: 264822 - DNA, 100 bp, Homo sapiens
agaaagaatgaaggaatttattggaattgtttggaatgcagtgaagcatctcacactacagcactggaagatcaattcttttatcatccatactttagag

SEQ ID NO: 264823 - DNA, 83 bp, Homo sapiens
cgggaagggccggcccgcctccctggccggggcgcagttcggaggttcagccggcacagtcttcactaccgtagaagaccttg

SEQ ID NO: 264824 - DNA, 99 bp, Homo sapiens
gttgaagctaaacccatatgcaaagaccatgcgccggaacaccattcttcgccaggccaggaatgaagctgcagtaaaggaagatgaagaagaagtttc

SEQ ID NO: 264825 - DNA, 90 bp, Homo sapiens
gacagaaccgcggagcttcagggtggaagattcgtggaaactttgccaagtgcaatggatgagcttcatagtctggatccaagaaggcaa

SEQ ID NO: 264826 - DNA, 50 bp, Homo sapiens
cggcctgcgggcgatcgggccgagagacctgtcggccatggagcctaatg

SEQ ID NO: 264827 - DNA, 98 bp, Homo sapiens
tctccatggccagtgaggaagtcttgaagaatagagccataaagaaagcaaagcgcagaaatgttggatttgaaattccgaagaggctcaatctgtaa

SEQ ID NO: 264828 - DNA, 98 bp, Homo sapiens
cgcggcccccgccgccgccaacagctcgggggacggcggggcggcgggcgacggcaccgggaccgatgatgtggcgaccatcagttctgctgcttctg

SEQ ID NO: 264829 - DNA, 97 bp, Homo sapiens
gggagctggctacttctcgctctgcttcatcccactattattttggcacaacaggaaggtcatcctgtacagttctacagcatgaataggcctgcct

SEQ ID NO: 264830 - DNA, 75 bp, Homo sapiens
cagaaatagcaaacttcatgcagctggtggaactagatgtgtctcgaaatgagtcaaggaaacttttcttttgag

SEQ ID NO: 264831 - DNA, 101 bp, Homo sapiens
cgctgcgctgtagcctggaggctccgggcgcggggaagtcatgctcgcttcacggaggcaatagctagccggtagtggaggacatgctagaggacgaggaa

SEQ ID NO: 264832 - DNA, 75 bp, Homo sapiens
tgatgctgaacttaggaggactttatgggttaaagaactgaatcattatctggaagctgagaaatcttgtaggac

SEQ ID NO: 264833 - DNA, 90 bp, Homo sapiens
gcatggagaggggccgtggcccctgcagcggaaccggacccagtccctgagccgcccctacacccacagcatatttgaagatgggagacc

SEQ ID NO: 264834 - DNA, 83 bp, Homo sapiens
ggaagatcgtcgccacctggatgctggagctttagatagtgacgggggcagagagctggactgccagctgtgcggtgcctggt

SEQ ID NO: 264835 - DNA, 100 bp, Homo sapiens
gcttgagaaggctgacctggacccctccctggatttcatggactccttggagcatgacattcccaaagtggtcccaggctgcacccatggcagaaggagg

SEQ ID NO: 264836 - DNA, 82 bp, Homo sapiens
tcccagtgtccccacgagctgtgtggtccatgatgagtcccggcccaggcccctgagctggagggatggaaaactcctctgc

SEQ ID NO: 264837 - DNA, 50 bp, Homo sapiens
accacgagatagctgtactttcaagaaactggcgatggaatatgagagga

SEQ ID NO: 264838 - DNA, 100 bp, Homo sapiens
accttctcatcttctacctcagtttctcactgcttatctacataaaaactaaattctgtccaacgtttaataaatcaatggaggaacagggtaaatgaac

SEQ ID NO: 264839 - DNA, 74 bp, Homo sapiens
aaaaccctgcagaacggctgcctaatttacagcaaccatgagggcgctattttcttggaaggtgttactgttaa

SEQ ID NO: 264840 - DNA, 100 bp, Homo sapiens
ttcctcgtctcccaactgatccgagcagggaaaccttaccagctccagtcaccttcaggccattcagaggaggaaagagaggggaatatgaagtcagcca

SEQ ID NO: 264841 - DNA, 74 bp, Homo sapiens
gaccaaccaatgagtcgaaggtctcgtagagcttccttagtggattggtgatagaaaagcagtgctttgatccc

SEQ ID NO: 264842 - DNA, 98 bp, Homo sapiens
cggagggggaggcggcgggggctcggcggggttcctggagcctcccgccgcgctccctccgccgccgcgcaacgcaacaacgaaagcttgacctcctg

SEQ ID NO: 264843 - DNA, 89 bp, Homo sapiens
ctggatctttgctagaaagagaggtgctggagaatctggtaaaagcaccattgtgaagcagatgaggatcctgcatgttaatgggttta

SEQ ID NO: 264844 - DNA, 88 bp, Homo sapiens
atggcggagctgacggtggaggttcgcggctctaacggggctttctacaagccacagcagaacgggatctctccgcgcatgtttaagg

SEQ ID NO: 264845 - DNA, 50 bp, Homo sapiens
cttgatcagaacagagggagcaggtgttttcgccatcagggtgtattgga

SEQ ID NO: 264846 - DNA, 90 bp, Homo sapiens
ccacaaccataatagaatgtctacattcctcgacgagtagaacagcccctctatggtttagatggcagtgctgcaaaggaggcaacggag

SEQ ID NO: 264847 - DNA, 50 bp, Homo sapiens
ccttgctggattatatctacaggatatattcgactttatgggagaaaatt

SEQ ID NO: 264848 - DNA, 82 bp, Homo sapiens
cgagcacagagcctcgcctttgccgatccgccgcccgtccacacccgccgccagaacagcagagaggggcagcaggatgaat

SEQ ID NO: 264849 - DNA, 90 bp, Homo sapiens
gagagagctgacaaaaggcttgtgctcagatcaacatgtacctgttgtcacgcgtcctgtttgccctgagccgcctggctgtagagaagg

SEQ ID NO: 264850 - DNA, 50 bp, Homo sapiens
ctcttgttttccaacatcatccccattagtttgcgtgtgaacttggacat

SEQ ID NO: 264851 - DNA, 75 bp, Homo sapiens
cagaaatctacagttactcacacaagcaggcattttggagatcaaagatgggtagaaaagatgctgctactataa

SEQ ID NO: 264852 - DNA, 99 bp, Homo sapiens
aaggaacagcatcctgacatcgaaaacccggacctcgcttacctgcatgctgagctgaactagagaaacatggttataagatggagacttcatagcatc

SEQ ID NO: 264853 - DNA, 75 bp, Homo sapiens
aagtgcgcaaacttgacactcaccctgaccgctgtcttttggggagacattgccttagatgaagatgacttgaag

SEQ ID NO: 264854 - DNA, 83 bp, Homo sapiens
gcagccgagtcactactgcctgcctgcctgcctgctacgcacttgcacctcctgcgccgccgccccccatccaaggatatgcc

SEQ ID NO: 264855 - DNA, 97 bp, Homo sapiens
caattccagtcacctgataaagcagaaacccagcgtggagacccgtctgttatttctattctactctgctactcaagtagtggtcactatgattctg

SEQ ID NO: 264856 - DNA, 74 bp, Homo sapiens
ctgatgtttgataaaactaccaacaggcacagaggtcaaaatgcagatcttcgtgaaaacccttaccggcaaga

SEQ ID NO: 264857 - DNA, 101 bp, Homo sapiens
cgttatctgcaggtattgggagatgcacagctaagatgccaggaccacctggaagcctagaaatgataagtaaactgaggcccaaagaagttaagtaaatt

SEQ ID NO: 264858 - DNA, 90 bp, Homo sapiens
gagcagtctctggacaagatgaccacactccaggaatgccagtgcatcttttgcacagctgtgattggtctgttggacgtttttacacct

SEQ ID NO: 264859 - DNA, 138 bp, Homo sapiens
caaccttccagagatcagttccatccgaagagttcctctcccacctgaacttgttgagcagtttggacggcttggcaactcttgtgaaatttcatagatctcgtcgcttactgggagtctgctatattgttgttaagg

SEQ ID NO: 264860 - DNA, 50 bp, Homo sapiens
caaggaatgattgagattgtggaggaggggcttcgtgggacacatatgca

SEQ ID NO: 264861 - DNA, 75 bp, Homo sapiens
cacggaaagtactggaacatacaacacacacacttttagtaggagagtcaggtcacagatgtgacattgatgtgt

SEQ ID NO: 264862 - DNA, 113 bp, Homo sapiens
gtatccagttttatgctgatgagagctataacttaatgggccaagaccagcttcaagtctccatggtaccagaaaacaacaacctcacagcacctgaacctcaagaagaggta

SEQ ID NO: 264863 - DNA, 74 bp, Homo sapiens
agctggtgggcactcagcaccctctgcttaccacagccaggttaatgactccagagagtaagatcagattcgtc

SEQ ID NO: 264864 - DNA, 107 bp, Homo sapiens
gtcgtaagaagaggtcccaatcccccactctttccgccctaatggaggtctccagtttcggaacaagatcactcaaggtgaaggataatctactaataccagcactt

SEQ ID NO: 264865 - DNA, 76 bp, Homo sapiens
ggaaaatcatggaagttgattactcagtctctaaaaagctaaggcatcgtcatgtgatcatcacctaagaactaga

SEQ ID NO: 264866 - DNA, 82 bp, Homo sapiens
cgggtcctcctagaaattccccccgaagaagactcccccacatctggatgtgaagttcatttccaatccgccctccatggtg

SEQ ID NO: 264867 - DNA, 83 bp, Homo sapiens
caacagagtcgtaatcgctctacccagtcccaggacgtggcgcgggtctccagtgcttcagaaatgcactcggtgatggaaag

SEQ ID NO: 264868 - DNA, 100 bp, Homo sapiens
gaccatgtgatgcacctgctccagaaagctgacttcccagcggggattcctgaatgtggcaccgatgctctccggtttggattatgtgcctacatgtccc

SEQ ID NO: 264869 - DNA, 90 bp, Homo sapiens
ccggcctggagctcccagggccgagagcatgtctgttcgatcctggcttccctcctgcggaacctgagagggcagcagcggacccggctt

SEQ ID NO: 264870 - DNA, 100 bp, Homo sapiens
gttcagctttatctatattttttgactgctctgctcctctatgctggacatcaaatttccaggaggatcagctgatttattcggaggatttgctgacttt

SEQ ID NO: 264871 - DNA, 51 bp, Homo sapiens
aagagcactagtgtctagaaggcactaaggaataactgaagtgaagtgatg

SEQ ID NO: 264872 - DNA, 132 bp, Homo sapiens
actttcgcaacatcaagggagttttccggggccctctcagcaagaacgggaacaaaactctgttttaagacaattatctcctatattgatgagcaatttgagaggtacctgcatgacgagagcggcttgaac

SEQ ID NO: 264873 - DNA, 117 bp, Homo sapiens
gcagcggctgcttgagatctgtttctggggcctctggcggtggcggcctggggcggcgcgacggctggtgcgcagctccagcagtacccgcggctacgggaggagatggagcgcatc

SEQ ID NO: 264874 - DNA, 83 bp, Homo sapiens
ctttgagatgcttggacgaaaatgcttgcaattttccagattattcaaagtatcaggatgggcatgtgaagtgactgacctta

SEQ ID NO: 264875 - DNA, 96 bp, Homo sapiens
ccgcagcccccgcacctcccaccccaggcgcagtatctgccgtcccagtcccagcagaggtaccagccgcagcagagtaagcaggaaattcacagg

SEQ ID NO: 264876 - DNA, 78 bp, Homo sapiens
tggcatctgccggctgctccgcaccccggggtcccaggaagggcggcccaggtgaccctggcaaagatgagagtgcac

SEQ ID NO: 264877 - DNA, 95 bp, Homo sapiens
ctcgtgctacctgccctggccctgctcagcgccagcggcactggctccgccgcccaaggtcaatgcatcacgtcaagaagccaaattgacagagg

SEQ ID NO: 264878 - DNA, 82 bp, Homo sapiens
ccggagctgggcgcggattcgccgaggcaccgaggcactcagaggagggaaggtggccatccagaaggaggacttgcagaag

SEQ ID NO: 264879 - DNA, 90 bp, Homo sapiens
tgcccttcgagagcccaggttacgacggattttctgccagcctgcagtgttgagtatcctgctgtggcccctggtggtttatcatgagct

SEQ ID NO: 264880 - DNA, 98 bp, Homo sapiens
ctactctggcagcccatcccggtgcacacagttcctctttctgaagatcaggatgtcctggaacaggtggaggcctatcaagctgaggctcgtgaggc

SEQ ID NO: 264881 - DNA, 74 bp, Homo sapiens
cccggagcagctggctggctttgataagtacaagagtcattcaggagagcaggaaagaaaaggccatccctgtg

SEQ ID NO: 264882 - DNA, 100 bp, Homo sapiens
agtgggataaatctcaaagatctcgtacaagatccttctttaagccagtcccactcgtgtgataacccattaatctattaagccataagtggattaatcc

SEQ ID NO: 264883 - DNA, 75 bp, Homo sapiens
gggaaagagtcctgcatggtttcaagggacgtaccaggaggatggtgcccagccaatgttttcagttgcaccaag

SEQ ID NO: 264884 - DNA, 98 bp, Homo sapiens
atgaaatcacagcttcagatcactgggaagatggagagttggaagaaggtgaattggaagatgatggggcagaggagacccaggatacctccggaggg

SEQ ID NO: 264885 - DNA, 96 bp, Homo sapiens
gattcagtataacctagaccagtcctgtttgcctcatgatatcaggttcatgaaatatttggaagacagcatgagatctaacaacttgtgaagtgg

SEQ ID NO: 264886 - DNA, 83 bp, Homo sapiens
ccagccctcatgagcaacaaccctttggccactatccaagggtcgctgtaattggttcaactccatacaaaaaaatgaggaag

SEQ ID NO: 264887 - DNA, 82 bp, Homo sapiens
tgccgtctgctcttctgcctcttgatctccgccaccgtcttcaggccaggctctggaagaggatctgaaccagaagaagcgg

SEQ ID NO: 264888 - DNA, 75 bp, Homo sapiens
ccgccatcactttcatcacatggatcctcatccagtttgcatttaggtattaatattagaaccaaccaaaatcta

SEQ ID NO: 264889 - DNA, 75 bp, Homo sapiens
tagcactttgaaagaaaaaggctacaaagctgctttcattggaatagaattcaattcgtcataatctgtccctac

SEQ ID NO: 264890 - DNA, 99 bp, Homo sapiens
ggacagcacctcatcccctggatgggggaccacaagatcctcatcgacaggatgtacagttacccagcacgtgtacctcctcctcctcctattgctcgg

SEQ ID NO: 264891 - DNA, 74 bp, Homo sapiens
attttgcaacgtagtgttgccaatccagcatttttgaacagtgtaatgacaatagtaaagtccaggccatttcg

SEQ ID NO: 264892 - DNA, 100 bp, Homo sapiens
aaagatttatttctcttgacaaccaagggcctccgtctggatttccaaggaagaatttcctctgaagcaccgatgccatggacaatattaccaggcagaa

SEQ ID NO: 264893 - DNA, 75 bp, Homo sapiens
acctacaaatacatctttggaacaggcaccaggctgaaggttttagcaagggaactgatcacagccgcacatgag

SEQ ID NO: 264894 - DNA, 104 bp, Homo sapiens
cgcggcgggacgggacgtgcggcccagcgagttggtcggtcccggggtcacccgctacgggaagcaggcctcgccacagtgggctcgggatgagtttgaaggcc

SEQ ID NO: 264895 - DNA, 100 bp, Homo sapiens
ctatgaggtagatattaaaccagacaagtgtcctaggagagtgaacagctttttggagaccacggcatatttcttcatgaaaccaaaacttggagagaag

SEQ ID NO: 264896 - DNA, 90 bp, Homo sapiens
cacggagcagtgggttctggtggagatggtacaggcgctttacgaggattgacaattgccaaacgcatccagatttctgatttacctcaa

SEQ ID NO: 264897 - DNA, 88 bp, Homo sapiens
agcggcgctacattggggtgatgatgctgaccctgagtcccagcagatctcaagagagcgttcggtggaggccctgggtctgcacagc

SEQ ID NO: 264898 - DNA, 82 bp, Homo sapiens
ttcgttgatgttctggtggattatggatcagatccaaatcaggactgctgagatgtcctctattcttgaagagcgtattctt

SEQ ID NO: 264899 - DNA, 50 bp, Homo sapiens
aagaagaattccagtcttataaagacatggatttgattgacatactttgg

SEQ ID NO: 264900 - DNA, 100 bp, Homo sapiens
gagccactcgggggtgaagctttgcaggtggacaaagtgaagcagccgacacgagtcgttgttcataaaacagcttttgaaagttgagagcacacccctg

SEQ ID NO: 264901 - DNA, 82 bp, Homo sapiens
cgcagcaaaggcaaacttggaaagagcaagatcggcagccctaaagagcttactccacgggaacagcctctagataatctga

SEQ ID NO: 264902 - DNA, 100 bp, Homo sapiens
gtcaactcaaatgcaagtccaagaggaggaggaggcggaggtccaagcggaaagctgttccatttcctccaagtcaccggcttacagcaaaagaagtgtt

SEQ ID NO: 264903 - DNA, 83 bp, Homo sapiens
ggcagtgtccccagccgccatggatagcgacgacgagatggtggaggaggcggtggaagcaaaatgatgcttcaacacccagg

SEQ ID NO: 264904 - DNA, 129 bp, Homo sapiens
gggagcccggccggagctgggtctggagacgccgtggcagcctgaacggagtgtgcgacggattgggaggaagatgtggatgaatatgttaaactcggccacgaagagcagcaaaaaagactgcaggcg

SEQ ID NO: 264905 - DNA, 100 bp, Homo sapiens
accgaggctgaggatgatggtagattgccagaggaagatggatggccgagagtacccagacgcacagggctttgctgctgatgtccggctgatgttctcg

SEQ ID NO: 264906 - DNA, 119 bp, Homo sapiens
cagctataccagccaccctgcccccaagaaggaagtcatcatgggccggcctggaacagacaatgcagatcttcgtgaagactctgactggtaagaccatcaccctcgaggttgagccc

SEQ ID NO: 264907 - DNA, 75 bp, Homo sapiens
gtatgaaaccaaatactgctattaagccatgtttcctgagagactgggagttgcaggtgcacttcaaaatccatg

SEQ ID NO: 264908 - DNA, 75 bp, Homo sapiens
cagaatcaagttcatgacggatggtgtgctgcttaaagaaatccagaagtcggtcctgaccgccagcctgtcgta

SEQ ID NO: 264909 - DNA, 90 bp, Homo sapiens
cccgtatctgctctcctgaaataattctggagtcatgcctgaaatgccagaggacatggagcaggtgcataaggcaaatccaatacgcaa

SEQ ID NO: 264910 - DNA, 73 bp, Homo sapiens
tttgatcctggggagtctgattcagatgacaactgtacagatgtcactgggccgttgctccagggagaactgc

SEQ ID NO: 264911 - DNA, 114 bp, Homo sapiens
gaaccttcgcattcagaatttgaccatcttggtgagaaacattaagacctactaccaggttctctacttttagagtcgaaaataaatcctaacactgcataccagaaacaacag

SEQ ID NO: 264912 - DNA, 50 bp, Homo sapiens
ttttgcatctgaaaccatacggacttttcccaggtccctcgtatcaaaac

SEQ ID NO: 264913 - DNA, 75 bp, Homo sapiens
atcgcttcaatgatgggaaggtggatcccgccgggaggtactttgctggtcctgacttccagtccttgttctcac

SEQ ID NO: 264914 - DNA, 130 bp, Homo sapiens
ctgtgtttgaagtcaacattcgatttattggaggcctacttgcagcatattacctatcaggagaggaggtggcagggcccagccccgaaccagacaagggacccctcaaggagcttcattctagcaggag

SEQ ID NO: 264915 - DNA, 50 bp, Homo sapiens
ccacagtgctgtccaaatactactctctctgtggaacaactactttcacc

SEQ ID NO: 264916 - DNA, 75 bp, Homo sapiens
caacatcctcctggccaccgactcctacaaggtcgcaatggaagaagagatcgccgcgctggtcattgacaatgg

SEQ ID NO: 264917 - DNA, 83 bp, Homo sapiens
agaaagcaatgataattcccaggacagtcagtctggtactaacaatgcaggtcccagtagggatggcacaatcagcgaggaca

SEQ ID NO: 264918 - DNA, 100 bp, Homo sapiens
cccgcgaccgcgccccggcccgacatggcgccggagctgaccccggaggaggagcagcaacatggccaatctttcctaagctgctcagcttacaagaaaa

SEQ ID NO: 264919 - DNA, 90 bp, Homo sapiens
tcatgggccatgcccggtgaccacttttggaccaaaggcctgtgtgctgcagaacccccagaccatcatacgttggacctctcgaacaac

SEQ ID NO: 264920 - DNA, 84 bp, Homo sapiens
ccgtcaaaatccgaaagattcgggccagagacgacaacccgggcctccgagaggaagtccacaaatgaaggggacaccccattt

SEQ ID NO: 264921 - DNA, 90 bp, Homo sapiens
ctcttgttggatcctgatactgctgtattaaaactctgtgactttggaagccctaccattgaccatgccctgctggacatgcccttcctt

SEQ ID NO: 264922 - DNA, 75 bp, Homo sapiens
gagcgcccctccgagctggggttggacgctgccagtttgcacagcagcagaccaccatcatggcagtggagtttg

SEQ ID NO: 264923 - DNA, 100 bp, Homo sapiens
gtcctctggtgcgaaattccggatttccttgggtcttccggtaggagctgtaatcaattgtgctgacaacacagccatacacactgctgctatggatatg

SEQ ID NO: 264924 - DNA, 90 bp, Homo sapiens
ccactttgggattgctctaccacaactggaaggtggacttttaaatattctccactgaagcaaatgctgcaacaatttgcatttccttca

SEQ ID NO: 264925 - DNA, 89 bp, Homo sapiens
gagatgccatctacaaagaattctccttccacaattttaatcagatcagtgtgcgtgtgaccaccatggatgcagagctggagtttgcc

SEQ ID NO: 264926 - DNA, 100 bp, Homo sapiens
gaaaattaagagttatgtgaattatgtgctaagtgaaaaatcatcaacctttctaatgaagagctggcggagttgcctttgatacggttagacttctcat

SEQ ID NO: 264927 - DNA, 98 bp, Homo sapiens
gtggtactcagagtatcgcttccctgaagaactcactcagaccttcatgagctgcaatctcatcactggaggagcggatccgtcgcggggatgacctg

SEQ ID NO: 264928 - DNA, 100 bp, Homo sapiens
aatagctattgtcttcaaggtgttcaatcggttgtgaaacagctattttattcccaatgcgttccaagaagatttttggaagcgtgcatccagtgagacc

SEQ ID NO: 264929 - DNA, 82 bp, Homo sapiens
tgtcacgctcccaccagcagcgcctatgagtttgtcacctggctcgatggcattaactgacagcagccatggcgagcggcag

SEQ ID NO: 264930 - DNA, 80 bp, Homo sapiens
gagactttctccttcaagtacttggcagatcactctcttagcagtaagactttgaccccgacgcaggcttcagtgattgc

SEQ ID NO: 264931 - DNA, 88 bp, Homo sapiens
tcgagcagctgaacgagtgtaagcagctgaacgagaaccaagtgcggacgctgtgcgagaagattcctgatttacctgaagaaccttc

SEQ ID NO: 264932 - DNA, 100 bp, Homo sapiens
gagggcgtccgagtcaacaaccgcttcgagctgcctcccggcatggtgctcaaggccttcttccccacgtgctgcgtctcgacggacagcgggctgctgg

SEQ ID NO: 264933 - DNA, 100 bp, Homo sapiens
gaattcctcaagacaccattccaggtacaccaggggttggaaaaaccacactaggcaaagaacttgcgtcaaaatcaggactgaaatacattaatgtggg

SEQ ID NO: 264934 - DNA, 90 bp, Homo sapiens
gccggcgcggcgttgtcccaggcgggttgccacccacacagaatatgcctatgggtcctggagggatgaatcagagcggccctcccccac

SEQ ID NO: 264935 - DNA, 100 bp, Homo sapiens
gcgtacgggcctcttttgaaagcctgagttacgatgtattgagcgcgtcgtatgcggccagcactaaggttccgagcctcactctatccctgtcctgaga

SEQ ID NO: 264936 - DNA, 98 bp, Homo sapiens
gttaatacgccattcctagaagaaaagccacagtcagacttgttggggcttattcaggtcatgattgtggtatttggagatgaacctccagtcttctc

SEQ ID NO: 264937 - DNA, 100 bp, Homo sapiens
caggcgctggctgctgagcccaaggccaaggaccccttcgctcacctgcccaagagtgctcaggagctgtcccaggaaatcaaggcttttctgactggcg

SEQ ID NO: 264938 - DNA, 101 bp, Homo sapiens
gaaacttgctgctcgggaagaagctaaattgttggcgggtttcatgggcgtcatgaataacatgcggaaacagatgcagtggcagaacgtggagcacgttg

SEQ ID NO: 264939 - DNA, 48 bp, Homo sapiens
atgaaggtgcagaaaccatgggagctgtgtattcttattacaaccaag

SEQ ID NO: 264940 - DNA, 100 bp, Homo sapiens
tgctgctctgcctgctccacaagcggcgccgcgccctcggcctgcacggtgccctctggtggtcagaagatgctgtgctgtctcgttaggatgaatggat

SEQ ID NO: 264941 - DNA, 75 bp, Homo sapiens
aatgatagatacatcagtgtgggaagccaagcagatacaagtgcaaagttccccatcaagtggacggcccccgag

SEQ ID NO: 264942 - DNA, 90 bp, Homo sapiens
ctacagcaccctgtgcaagcccgcgccgctcacaggtatatgaatgacctaaaggtacaaataaagacggagagagaacagtgccaactg

SEQ ID NO: 264943 - DNA, 75 bp, Homo sapiens
tgttcctgaacggcagccccaagaacggaaagctgccttcctatttcaaggaaagacgccaaggtaattttgacc

SEQ ID NO: 264944 - DNA, 83 bp, Homo sapiens
agctgtgctcgcgctactctctctttctggcctggaggctatccagctgaactttgaggcgctgatcatcaccatgtcggtag

SEQ ID NO: 264945 - DNA, 75 bp, Homo sapiens
tagagagaaaaatcctggatctgtatgctttgagcaaggggccactaggtgtgacagaggaactgcacatcatca

SEQ ID NO: 264946 - DNA, 89 bp, Homo sapiens
tagcaaaaaagatgatccgggtataataatgaagttaaaagagcagcactccaaggtgaggaaaatagcagctgaatactatgacaacc

SEQ ID NO: 264947 - DNA, 50 bp, Homo sapiens
ctccccagccatgtggaactgtggaatgaatcttacttgttgaatatctt

SEQ ID NO: 264948 - DNA, 75 bp, Homo sapiens
cggccaccccgcacctcctccaccaccgcctcccgctccctgacgacaggtgaaggagtccctctttctccagca

SEQ ID NO: 264949 - DNA, 83 bp, Homo sapiens
gactttctccttcaagtacttggcagatcactctcttagcaggccagaagcggactcctagaagaggggagcagcaaggatgg

SEQ ID NO: 264950 - DNA, 100 bp, Homo sapiens
atggaggccagcctaggtcttgtatgaaacctgtgaggtggcaattttggaggtagccccggttatggaggaggaagaggaggatatggtggtggaggac

SEQ ID NO: 264951 - DNA, 100 bp, Homo sapiens
gtgtaagagctataccagttgctgccatgactttgatgagctgtgtttgaagacagatatgcctcttcatgttcgacgcagtagtgacccagctctaatt

SEQ ID NO: 264952 - DNA, 100 bp, Homo sapiens
ctgggagacccgccgaattccgggagccggaccgggaccaggaccgggccccactttccaacaggggcaagtgtccgagtggtgaatcagctacttacag

SEQ ID NO: 264953 - DNA, 82 bp, Homo sapiens
gtccacccaccgccgccgcctcccagtgaaaaatgtactctgacctgaatcctgaattttccttgatggtcaaaagattaag

SEQ ID NO: 264954 - DNA, 76 bp, Homo sapiens
ttctgctcaccaacagatgaagacagatgcaccaacgagtctgcgctcctcagaccaccggcaggtgaacagcctg

SEQ ID NO: 264955 - DNA, 82 bp, Homo sapiens
ggaactctacaacccaatccaggtcaaaatgcagatcttcgtgaaaacccttaccggcaagaccatcacccttgaggtggag

SEQ ID NO: 264956 - DNA, 98 bp, Homo sapiens
gaacccaggagcagttgggagttttaaagaatgccagcctttttaaagagagaacttacttgaaggtcgatgttttctcttgctgattccatctcgct

SEQ ID NO: 264957 - DNA, 75 bp, Homo sapiens
gcggagcgaacctcacctttccagggcgcaagactttgaagattatccaatgagaattttatatgaccttcattc

SEQ ID NO: 264958 - DNA, 50 bp, Homo sapiens
cttcaagggaataaaattttctaagatttggaggccaatcactgccacct

SEQ ID NO: 264959 - DNA, 114 bp, Homo sapiens
ctgcactgagcgggacctgcgagcagcgcgggcggcagcccgggggaagcgaacacttaaggagttccgtgatcgaccgaaaggacttaataatcaaaaggattaagcccaaac

SEQ ID NO: 264960 - DNA, 50 bp, Homo sapiens
gccttccaaagtgctggcattacagttatttgcagtgacttaaaatttgg

SEQ ID NO: 264961 - DNA, 109 bp, Homo sapiens
ggaaaaggagaacctgcagctgaaatccaagcttcacgacctggaattggtgaagtacatttttaccttaggggatatagcccagctgtgtccagccagggtggagaag

SEQ ID NO: 264962 - DNA, 100 bp, Homo sapiens
cggcggccgagcctcgctttgagagacagcctttctgagaaaagtctacagcattctttctctgcaggttctcttaactacagtgacttcaacagttttt

SEQ ID NO: 264963 - DNA, 95 bp, Homo sapiens
cttcacacagctgcttccattggccagtatgaagtggtgaaggagtgtgtgcagcggaatgggtaccacagaccatgtcatcgtcctggcgtcca

SEQ ID NO: 264964 - DNA, 74 bp, Homo sapiens
ggcgaaggcggctcgggctcgggctccggtttaaggagttcatgagtaaacatgttcacttaatgtgttaccgg

SEQ ID NO: 264965 - DNA, 82 bp, Homo sapiens
cgatggtaggcgtccctggagcggccgccttccagccgcaagcaccaggaaatccgagccatgagaagtcagctcaaaaaga

SEQ ID NO: 264966 - DNA, 97 bp, Homo sapiens
cgggacaccccggaagctgggaaatgatctgccgacaccccaggccatcgagccccaggccatcgtgcagcaggtcccagcccccagtcgaatgcag

SEQ ID NO: 264967 - DNA, 83 bp, Homo sapiens
ctcctgggaccctccaagagcactagtgtctagaaggcactaagggagccagggagtaacgaagagatcaaagagttcgccgc

SEQ ID NO: 264968 - DNA, 98 bp, Homo sapiens
gcatctgcaacctccgtggcagtaagaaaggtaagtggagaaagagttgaagggaaagtgttgggatttggacatggagttcctgaccctggagcctg

SEQ ID NO: 264969 - DNA, 50 bp, Homo sapiens
tggaagtgtagaacgtcattcagaggtgtcagctgtgatgcatgtttaaa

SEQ ID NO: 264970 - DNA, 82 bp, Homo sapiens
gaggagaacctgcccttcgccaaggagatcgtctctctcatcgaggcccaaaccgccaaggaacaggcctttgagagcagcc

SEQ ID NO: 264971 - DNA, 97 bp, Homo sapiens
cttcgccacgccggggtcttcaggtggaggtcctgattgccataagcagcctcacgtctccgctgctgttcacagcctctggatatctgtcattcag

SEQ ID NO: 264972 - DNA, 100 bp, Homo sapiens
aagaccgggcagatctggcccaacgatggcgagggcgccttccatggagacgcagatgcctgctctgtgcctgtatctgagatcatcgccgttgaggaaa

SEQ ID NO: 264973 - DNA, 85 bp, Homo sapiens
ggtcctcctggcccacctggaattatgccagtgactttcgaggatgtggccttgtacctctcccgggaggagtggggacggctgg

SEQ ID NO: 264974 - DNA, 51 bp, Homo sapiens
tcgtcaaaggctggggagcggagtacagctcgcaaaggatctccttcatcc

SEQ ID NO: 264975 - DNA, 101 bp, Homo sapiens
ggaaactattgagtccaggctttctgaattaaaaagggttacggaggatgcagatccctatgtgcagcctgaagatgaaaactatgaaaatgactctgtcc

SEQ ID NO: 264976 - DNA, 80 bp, Homo sapiens
agcgcctatgtgaaaaacctgaagaaggggatcactactcttggaatcaaagataaatccaaatactgcatatcagaaac

SEQ ID NO: 264977 - DNA, 75 bp, Homo sapiens
gggggcagtcgcgcctgtgaacgggtgaggtggctttgaccccgggttgcccggccagcacgaccgaggaggtgg

SEQ ID NO: 264978 - DNA, 83 bp, Homo sapiens
gcgctctaagaatcaagaaaatggaccagtttgttcgttacgaggagccttcctcgggccctgaagtgtctgaagagcaggcc

SEQ ID NO: 264979 - DNA, 75 bp, Homo sapiens
ttacggtgaagacctgccttccctctgggaatctggagcttcagtaacagactttaagtttgccatgtacccacc

SEQ ID NO: 264980 - DNA, 82 bp, Homo sapiens
agcttaagtttggtacactagattgtacagttcatgagggactctgtaacatgggctggttttccccatgtgtgaggagagg

SEQ ID NO: 264981 - DNA, 100 bp, Homo sapiens
tgccgagaatgctaggcttctggcccagaaaagaggagctttgcagggctctgcatggcaggttagctcaggttgccatgaagcatccgtcagctgtgac

SEQ ID NO: 264982 - DNA, 83 bp, Homo sapiens
cccaagagggcggcggcagcgggtcctacgaggagggctgtcagagcctcatggagtacgcaatggctgccatccggaagaaa

SEQ ID NO: 264983 - DNA, 87 bp, Homo sapiens
acaagctgtccccagaggactacacgctcaagggcgaagagagcctccggatcctggtggagcccgaaggggacagcttcccgctga

SEQ ID NO: 264984 - DNA, 82 bp, Homo sapiens
atcgacctgcagttcagctacgcgccacggcactcgcgccggaacgagggccctgggaggagcggggacactgaggacctct

SEQ ID NO: 264985 - DNA, 80 bp, Homo sapiens
cagcggccgagcgggcggcttcctggcctgggcgctccggtggcggcggaggaaacttcctcctggccaaccctgtgtct

SEQ ID NO: 264986 - DNA, 100 bp, Homo sapiens
taaaagccttaaagacttaccgaattagttttcaagaatctatctttttgtgtgaggatctgcagtcatcttagtctactgtgctgaatacatcaatgag

SEQ ID NO: 264987 - DNA, 74 bp, Homo sapiens
ctgcagcacccgccaccgtcgccggccgcccgcacgtccgtccgatgttgcttacctttgatgatcagttcctg

SEQ ID NO: 264988 - DNA, 75 bp, Homo sapiens
gcgcggggaccgctgtgctctcgccgggtgggcttggactgggcgtgctccatggcagagatcctgcggtcactc

SEQ ID NO: 264989 - DNA, 100 bp, Homo sapiens
cgttctccaatgcaatgctgtttgccctgaacatcatgaattcccaagaaggaggtgctggagaatctggtaaaagcaccattgtgaagcagatgaggat

SEQ ID NO: 264990 - DNA, 88 bp, Homo sapiens
agattggaaggggacttgattattttaagaaaccacagtgttttttacaaaggacccatttagtcgtgatatttataggatatgagga

SEQ ID NO: 264991 - DNA, 75 bp, Homo sapiens
gcgagcggggctttggacgccggtggagacgcaggcgagagccctgcgctgggttacgcctcagatgctgtgtgt

SEQ ID NO: 264992 - DNA, 51 bp, Homo sapiens
gtcccgcctccctgggagctccgcacgggcaccatactggacatacctttt

SEQ ID NO: 264993 - DNA, 100 bp, Homo sapiens
taaagtatttgccgttggtgattcaagggtgtgccagaagtcaggcgagatctccctcctgaagcagcagctgaaggagtcccagacggaggtgaacgcc

SEQ ID NO: 264994 - DNA, 75 bp, Homo sapiens
acacagctggtcttcatttcctgaaaccaccatcatgggttcgggtcccatagaccccaaagaacttctcaaggg

SEQ ID NO: 264995 - DNA, 100 bp, Homo sapiens
atagacccctcacatcctgagaactcaggggagctggagctggaggcacaagagagaaggtctatcagccacagtctctgcaagtttccaagagcagcag

SEQ ID NO: 264996 - DNA, 82 bp, Homo sapiens
gctttctggattatatcaatgactgcaagcacctattatgtttttcagttatgggacaaaaatattatatcaaaacactgaa

SEQ ID NO: 264997 - DNA, 98 bp, Homo sapiens
aggggagcgaaggctgaggtggcagcggcaggagagtccggccgcgacaggacggcctcatggcggtccgagcttcgttcgagaacaactgtgagatc

SEQ ID NO: 264998 - DNA, 100 bp, Homo sapiens
cttgtacttggattcagcaaggaaccttccggttaatgttgaagaaggaaaatgcggaagtcgtcatttgacaagttttataaatgagtatttgaagctc

SEQ ID NO: 264999 - DNA, 75 bp, Homo sapiens
gaagaccgaagcgttcgtatctggaagacttggaatggaaaattatctatgtgggctctgcagaaagtgaagaat

SEQ ID NO: 265000 - DNA, 98 bp, Homo sapiens
ggcttagtttacaatgacccactaccatcttccaagatccatctgccttctgcataggccaaacaggagcaaattcaggacctgacacataagaactg

SEQ ID NO: 265001 - DNA, 95 bp, Homo sapiens
ggacatccgccatgctccaaacaacttggcctcagagcttacaagaccctatgaaaaaattagttgagaaagaagagaagaagaaaatcaaccag

SEQ ID NO: 265002 - DNA, 100 bp, Homo sapiens
atcctgaagtggcactgcattttgtcaaggatgagaaaactcgctttagtctggcactggagtgtggaaacattgagggaactctaatgatccaggacaa

SEQ ID NO: 265003 - DNA, 96 bp, Homo sapiens
tggcggcgcacaagtcaggtccggcacatgtttccgcggagcggacccagcaatgacggtggagatgacccctgagaagttcagtgtcttaatgga

SEQ ID NO: 265004 - DNA, 98 bp, Homo sapiens
gtcctgttccaccttcagagcgtcacggcgtacgccctcatggggaaaatctccccggtgactttcaggcagtcgatgatgtgaagaaaggttacatc

SEQ ID NO: 265005 - DNA, 75 bp, Homo sapiens
ctggagatgaggaggatgggagtcccatcgtttgggcgcaccgaagtcatcgacaacacgctcaatcctgacttc

SEQ ID NO: 265006 - DNA, 125 bp, Homo sapiens
gttttgagaagccttccgctattcagcagagagctattattccctgtattaaaggtcacggtctagatcacattctcgatccagaggaaggcgatactctcgctcacgcagcaggagcaggggac

SEQ ID NO: 265007 - DNA, 100 bp, Homo sapiens
ttattccagccacacatctctggggaatgtttctaatgatgaaagcacttcaaactaaatacatgttaaactgggcatttctacttctggaagtggctga

SEQ ID NO: 265008 - DNA, 83 bp, Homo sapiens
ttgagcaaaaaagaaaagttgtttcctccaacattgatgttcctccagcaagtttaccaaacgagaaccagaagatacgaaaa

SEQ ID NO: 265009 - DNA, 110 bp, Homo sapiens
gagggtccccgacctcgctgtgggggctcctgtttctctccgccgcgctctcgctctggccgacgagtggagaaactcacgtggaaaatgaagagcagtacacccaggct

SEQ ID NO: 265010 - DNA, 83 bp, Homo sapiens
agagatgaagagacaggccaggtcaggctcaccaagcagatatataatcatgtgccacacagtgatgtttccgtcaatgacag

SEQ ID NO: 265011 - DNA, 83 bp, Homo sapiens
cgcagcatccaagtcggccctggcaagagcggtgagcggggcgcctatgcctccttcgggagagacgcaggcgtgggcggcct

SEQ ID NO: 265012 - DNA, 96 bp, Homo sapiens
cagaccctggagcctcagttggaagcagccgatccagcctgcggagcctgtggggcaggtgtccctggccagtgtccttccacctgtccacaagca

SEQ ID NO: 265013 - DNA, 112 bp, Homo sapiens
agaaggaacttgcagaaatcacattggaccctcctcccaactgtaggtggtacatgccagagtcctgctctcccggcccttgtccgtccaccagcccctcctttgcaaccat

SEQ ID NO: 265014 - DNA, 93 bp, Homo sapiens
tccggagttgccatgaaatatggaaacgactcctcggccgagctgagtgagataacgaaggaggcccaacttcattcaataaggagcctgacg

SEQ ID NO: 265015 - DNA, 98 bp, Homo sapiens
cgtgttgttggtgtgcttttggggtcatggcaaaagaaagtacttgatgtatcgaacagttttgcaggatggtgatcgagacatttttattgatgggg

SEQ ID NO: 265016 - DNA, 73 bp, Homo sapiens
cagccacccatcaaatcagagagaaggaatccaccttcttacgctatggcagagattgccttgcaacaggttt

SEQ ID NO: 265017 - DNA, 83 bp, Homo sapiens
cacaatgaggctccctgctcagctcctggggctgctaatgctctgggtctctgagtttattaaccacttaacctctcagaact

SEQ ID NO: 265018 - DNA, 87 bp, Homo sapiens
aaaatcagtgattctacatctcaagctcatattttgaagtgtttacgggctccacataaacacggtttccttgaaggccgccatgca

SEQ ID NO: 265019 - DNA, 82 bp, Homo sapiens
gcaagtacaaggtgaagctggtggagaagcgggcgttccgtgagatccagaaacttcctcctggccaaccctgtgtctggca

SEQ ID NO: 265020 - DNA, 100 bp, Homo sapiens
cccagtgacgggtctggagtgcgtgggggaccggctgttggcggacgggaggcgtgggcagcttcgacatcgccggcctgctgaacaaccctggcttcat

SEQ ID NO: 265021 - DNA, 82 bp, Homo sapiens
actggatgcagcaaggaaataggatttaaccgctctctgcctcccagggccggagttaagatgagtccagcgaagtgcctag

SEQ ID NO: 265022 - DNA, 100 bp, Homo sapiens
ctcacctgccttgcatcgttccgagtcctgtactggactgcatcaggccgcgtctcctcaggaacaactctgctcatggtgattacatgcaaaataacga

SEQ ID NO: 265023 - DNA, 75 bp, Homo sapiens
ctattgctactggtggtgcagatgtacgaagtaggtccaaagttgttgaccgtatttacagtctctacaaactta

SEQ ID NO: 265024 - DNA, 100 bp, Homo sapiens
ttccaacaagatgtgggcacaaaaactaccattcgcctgatgaactctcaggtcagcccaaggccaaccccactgtcactctgttcccgccctcctctga

SEQ ID NO: 265025 - DNA, 93 bp, Homo sapiens
ccgccgacgcctcagccgcttggggcccgcacggaccctctacttcagccaacatagccgaggtagaggtctccatccctgccaagctgcaca

SEQ ID NO: 265026 - DNA, 99 bp, Homo sapiens
ctacagctttcactatggggtggagacgtggtactcagcaagctcgagttaaagttggatgtgctggaacaggaaactactaaagttcctggggaagca

SEQ ID NO: 265027 - DNA, 90 bp, Homo sapiens
cagggagcaggtggtgaagcgtgaggagctcttcatcgtcagcaaggcctccatgaagaagtggactattctgagaaactgaagttcagt

SEQ ID NO: 265028 - DNA, 100 bp, Homo sapiens
tcacaattggctttcattctatgagaagaattatgtgtgtgttggcctttgcccagtttgatgctgagggtgatgggacagttgatgccgagaacatgtt

SEQ ID NO: 265029 - DNA, 75 bp, Homo sapiens
aattcatggaacacagtgacaaggagccttcacgtaaatgggtccagtcatgcctcccagtaagaagccagaaag

SEQ ID NO: 265030 - DNA, 98 bp, Homo sapiens
gccaaagccacagataaaccagtggaagcaggagaagcagcaattatcgtccgagcagtggtctccattgaggacccatttgaccaggatgattgggc

SEQ ID NO: 265031 - DNA, 98 bp, Homo sapiens
ctactggccttgcccagcgcctagaaagcataaaggatgttattggcagaaagataaaaatttcagtgaagaagaaagtaaagttggaagttaaggga

SEQ ID NO: 265032 - DNA, 83 bp, Homo sapiens
ggattccctggttggagctgggtgggtcatgataactgggtacgtggagttctgttccattctggggggaagtttattttgag

SEQ ID NO: 265033 - DNA, 83 bp, Homo sapiens
cttggctctcaacttattcccttcaattcaagtaacagctccataatgggagaagtaaagaacaaagacttaaggaacagctt

SEQ ID NO: 265034 - DNA, 116 bp, Homo sapiens
cgcgcgcagggcctgcagcgggagctggacggcgagcgcgagcggcgcgagaaagtgtggacactgccagcggctgcagccgacttggaatgacctgggagacaaatacaacagca

SEQ ID NO: 265035 - DNA, 51 bp, Homo sapiens
aacactacaagtccacggtgggagggtctctctctgtcacccaggctggag

SEQ ID NO: 265036 - DNA, 100 bp, Homo sapiens
ctcgggcaccatgagcgacgtggctattgtgaaggagggttggctgcacaaacgagacagagtttcactcctgttacccaggctggaggacaatgatgtg

SEQ ID NO: 265037 - DNA, 83 bp, Homo sapiens
cccccaagcagcagcaggactcagaggcgagagtggccccagccgggccagaagcaggtcctgtccctgggcgccgacgtgct

SEQ ID NO: 265038 - DNA, 82 bp, Homo sapiens
ctgcaaccgcaacatcgaccagaccatgctctccatcctgctcttcttccacagcatggccggactcccctgcatcttgctg

SEQ ID NO: 265039 - DNA, 100 bp, Homo sapiens
atgaactgaagcttctgtcagaatgccaatacaagcagttgaaggccggggtcagaaagaaaaaagagggtcccggggccgaggcaggaggacatcagag

SEQ ID NO: 265040 - DNA, 76 bp, Homo sapiens
ggcaagggttcggccgtgccctccgacagccaggcccgcgagaagagtggccagacgctaaggactggagcttgca

SEQ ID NO: 265041 - DNA, 100 bp, Homo sapiens
acacccacctcacaggctgttgtgaggactaagggtgcggcagtgcctggtacatgatacctttatcaatgaatgtgtcaacctttctggcatacgacca

SEQ ID NO: 265042 - DNA, 75 bp, Homo sapiens
agaatcatctgtaaacctgataacactgcatgaaatgttagagtcaagtccatcatctccagaaccagctagtct

SEQ ID NO: 265043 - DNA, 98 bp, Homo sapiens
tccacctgtgccttcacggaatgtatcctccgaagctatggcctgaagacgggattctttagagatgacctgatcagagccatcaagaaactaaaggc

SEQ ID NO: 265044 - DNA, 116 bp, Homo sapiens
tcagcagcagcaacgcatttttgagcctccacctcccaaaaaacagaatggagcaattggaagaaagggcaagtgtccagagaatggctgggatgaaagtacacttgaactctttt

SEQ ID NO: 265045 - DNA, 89 bp, Homo sapiens
tccagagaaagatctctgaccactaaatctgtgtgcaggttgaaatcacaaagattagacacctttttagataggtgttcttcagcacc

SEQ ID NO: 265046 - DNA, 88 bp, Homo sapiens
cgcgaaccaacggttagcggtggcaggggctgactgagagcgtctgcttggcacagttggtggatctgaaatctgaactgacagaaac

SEQ ID NO: 265047 - DNA, 83 bp, Homo sapiens
cggagccgcgcagccctcggagcacggaacccaagacagaccaggatgaggagcattgccggaaagtcaacgagtatctgaac

SEQ ID NO: 265048 - DNA, 51 bp, Homo sapiens
gaaaaaaagagcgacgagtgcaagatgatccataattatatggaacattta

SEQ ID NO: 265049 - DNA, 82 bp, Homo sapiens
gccctttgcgcttggatccacttccccatctgtaacgaggtgttgagacgagacaatgcagatcttcgtgaagactctgact

SEQ ID NO: 265050 - DNA, 100 bp, Homo sapiens
atgaattgcaagtttgtgccccatagctgcacaggaaagagtaagactgttaagaagaccgaagcatgtattaatgctgtggctatgagaggcctcctgc

SEQ ID NO: 265051 - DNA, 100 bp, Homo sapiens
tgaagggttcgcagtgataaaggaggcatttgacagcactagcaggcgccaagcccatctttgtgtgcttgcatccaactgtgatgagcctatgtatgtc

SEQ ID NO: 265052 - DNA, 99 bp, Homo sapiens
gctgcaggagccgcccaggccaccccctctcatgccaccagcttgggctccccacggagggcagcaagtgggacttggggaacccggctgtcaacctgt

SEQ ID NO: 265053 - DNA, 100 bp, Homo sapiens
tcacgactactagaaggggaggggagtggaaaggctctcagtgaaaaagattttgactaaaggagaagttcaagtatcagataaagacacacacaactgg

SEQ ID NO: 265054 - DNA, 100 bp, Homo sapiens
cggccactgcaacaccaccacggatatcaaagaggccaatttctttggcaggctgggtggagaaggagacatactactgaccccattggaagaagaacca

SEQ ID NO: 265055 - DNA, 74 bp, Homo sapiens
aggtgcttcaccctgccccaaggggcaagattcttgccaagagaattaatgtgcgtattgagcacattaagcac

SEQ ID NO: 265056 - DNA, 100 bp, Homo sapiens
ccaggaccgagtaacctctgagtttgctatgctggaaaatgagaagaagaagcgtgaaatggcagagaaggagaaagagaagattgaacgggagaaggag

SEQ ID NO: 265057 - DNA, 100 bp, Homo sapiens
ggggacctactggatgatgatgataatgaagatcggggggatgaccagttggagttactggaagtgcgcagacagcaagaggaagaggagaggaagaggc

SEQ ID NO: 265058 - DNA, 75 bp, Homo sapiens
tcaccggagcgtcccagctgcgaggaggacatggtccggcgaggagagatcatcgacaatgacaccgaggaggag

SEQ ID NO: 265059 - DNA, 89 bp, Homo sapiens
ctcttccagttgcggcttattgcatcacagtaattgctgtacgaaggtaatgcaggtggtgaaggagcaggttatgagagcacttacaa

SEQ ID NO: 265060 - DNA, 75 bp, Homo sapiens
tcgctctcggcctccgacacggtttggaattacaagcttcggcgctgtcttttcacattgcttgggcacttagat

SEQ ID NO: 265061 - DNA, 83 bp, Homo sapiens
aggagacctagtggaagtggttctttcagatggaccagcttttgggaaatatgattgaaatgtgggttgatcgaatggacaac

SEQ ID NO: 265062 - DNA, 80 bp, Homo sapiens
atcttatttgtgcagtctgactacacagaggcgtataatcccaaaataatgacactgctctcaaccttctgaaagaatca

SEQ ID NO: 265063 - DNA, 50 bp, Homo sapiens
ggcctgactctgggagcacgcactcgggttcatgacgctctcgatattcc

SEQ ID NO: 265064 - DNA, 100 bp, Homo sapiens
acctccattggatttaaaagacagtcctcgtcagcactgactttcagctatggaatcggagaatggggtactaagagaaaagcacgaagctgtggatcat

SEQ ID NO: 265065 - DNA, 104 bp, Homo sapiens
ggaaagcaggatgacagcaaagaagatctgccagtaacaagaaagagaaagcgacatgctattgaagtattaacttcacagaaaagtagtgaataccctataag

SEQ ID NO: 265066 - DNA, 75 bp, Homo sapiens
atcagctacagactttcctgagtcaggtacaatgactcttcttgcttttcacctaagttgaataagcaccctgtg

SEQ ID NO: 265067 - DNA, 98 bp, Homo sapiens
caacatggcggaacgcaggagacacaagaagcggatccaggtgattttacaacgagatgctgctctccatagggatgctcatgctgtcagccacacaa

SEQ ID NO: 265068 - DNA, 98 bp, Homo sapiens
ctgcagctgctgctgcggctctcactgtgcgggctgctgctccagagggcggaggagcttctggaagaggtgaagaaggaattgcagaaagtgaaaga

SEQ ID NO: 265069 - DNA, 75 bp, Homo sapiens
gtcggaggccgattcgacacagacaagcggcttctacgctccggcactctgagttcatcagcaaacgccctggcg

SEQ ID NO: 265070 - DNA, 82 bp, Homo sapiens
ctgcagcgggagctggacggcgagcgcgagcggcgcgagaaattaagggaagaaagtcggaggctggctttggctgcgaaaa

SEQ ID NO: 265071 - DNA, 74 bp, Homo sapiens
caacagtggcttcgggccggaggaaggaaaaccaattctgtgtcctcggaggaccacagcccagttgggcccca

SEQ ID NO: 265072 - DNA, 98 bp, Homo sapiens
tccgggtcgctggcggcgtggacacctgagtcccggggtaggggtctcccgcgagattctggacaatcaggaagtccaagccacaatgatcctgccaa

SEQ ID NO: 265073 - DNA, 76 bp, Homo sapiens
atcgttacgaaattgactccttgataggcaaaggttcctttggacagtactttacctcgtgtgggcctttattcct

SEQ ID NO: 265074 - DNA, 73 bp, Homo sapiens
gtggtactaggattatacattgtaagaggtgacaacgtgtttggagatcgtttccctgccatgtctgatgcct

SEQ ID NO: 265075 - DNA, 100 bp, Homo sapiens
agggcttcctggcgctcttctcaggtgacagcagggacatgtctcgggagatgcaggatgtagacctcgctgaggtgaagcctttggtggagaaagggga

SEQ ID NO: 265076 - DNA, 100 bp, Homo sapiens
atctggctcggaggaatctcagtagggacaacaggcaggagaattatgggagcgcatttccccaggctgagcaactgggggcatttgcagctggagtcaa

SEQ ID NO: 265077 - DNA, 51 bp, Homo sapiens
tttgtgtgccccatgcccacccagaccaggatcctggggcgtcctttggca

SEQ ID NO: 265078 - DNA, 98 bp, Homo sapiens
aggagtcggcggctcagttgtccatgaccctgaaggtccaggagtacccgaccctcaaggacttccaatagtagtcagacattatcatcctgtcatac

SEQ ID NO: 265079 - DNA, 95 bp, Homo sapiens
cgcgcccaggaccccgaccagctgcgccaacatgccctggctgaaggccttaccgaggaggagtatcaggccaggagcacctctccacccactgc

SEQ ID NO: 265080 - DNA, 75 bp, Homo sapiens
caatgatcttttcaatgctgcgaaagctgccaaaagtgacatgcaggctgaggctgaggtggcctccttgaaccg

SEQ ID NO: 265081 - DNA, 100 bp, Homo sapiens
gccctcgctggaccagaccatggccgcggccttcgctgtcggagaaggccacactgggccctgctgtgcgccccctgccctggcagcgcgtggaccgcga

SEQ ID NO: 265082 - DNA, 51 bp, Homo sapiens
attagagcggtaatcaagagatatcttagcaaagcaatgtctcaagatggt

SEQ ID NO: 265083 - DNA, 50 bp, Homo sapiens
tgaaccgcgcggccgaaccctccgggtaacaagatgctcaactatagtgc

SEQ ID NO: 265084 - DNA, 51 bp, Homo sapiens
agaagtagaaatacagtcccaccttcggacaaggacacactcagcattcac

SEQ ID NO: 265085 - DNA, 119 bp, Homo sapiens
ctggcggccaacgggccaggtaggatttccgggagaggctgctgtggaggctgaggaggcggcggcggagatctggggtcctggcggcagagaccacgtcccagcaggagcggctgcag

SEQ ID NO: 265086 - DNA, 87 bp, Homo sapiens
ctggggccagggaaccctggtcaccgtctcctcagcaaaatgatgcttcaacacccaggccaggtctctgcctcggaagtgagtgct

SEQ ID NO: 265087 - DNA, 75 bp, Homo sapiens
cctggtctgacatccaaagagtcactctttgttcgaatgttcttgattattacagacctctttctgaaaagcccg

SEQ ID NO: 265088 - DNA, 90 bp, Homo sapiens
gttgttcattaagacttcccagcattcctacagatataaatagggtgaggatccacgacctccgcagtggtaacatcgccctgtcgctct

SEQ ID NO: 265089 - DNA, 74 bp, Homo sapiens
aatgtctttcctaccatctaaaatacgaaggtttctggctgggaccaggaatcaccttcaagcctatgtcgtga

SEQ ID NO: 265090 - DNA, 105 bp, Homo sapiens
gaaaaaccgcgaagtcatggggctctgtcgggaagcaatggctgccatccggaagaaactggtgattgttggtgatggagcctgtggaaagacatgcttgctcat

SEQ ID NO: 265091 - DNA, 74 bp, Homo sapiens
tcgccgaggcaccgaggcactcagaggagcccatggcgaattgtggatgattgcggtggagccttcactatggg

SEQ ID NO: 265092 - DNA, 82 bp, Homo sapiens
cctgagacaccggaggaccggcaattctgtggtgttcttggtcacacatttatggagtttctgaagggcagtggagattact

SEQ ID NO: 265093 - DNA, 100 bp, Homo sapiens
cgggggctggtcccagaagatggcggaggcggggatctattaatgagatgaagcggttggaagaaatgtcaaatatgtttcagagctctggagtccagca

SEQ ID NO: 265094 - DNA, 90 bp, Homo sapiens
acgcgatgaagcccagacctgcagggttcgtggataataaactcaagcagcgagtcatccagccctgaaacatgtatctgatgacatgaa

SEQ ID NO: 265095 - DNA, 73 bp, Homo sapiens
gaggacagttcgctacacagcaatgcatcgagctggctttagcaatagcagatcttgccctacagatgccttc

SEQ ID NO: 265096 - DNA, 100 bp, Homo sapiens
cgggcattccggaactgctcaacaaacttcgccagggactatgcagccatcgtcttctttgctaacaaccgctttgagacagggaagaaaaaactgcagt

SEQ ID NO: 265097 - DNA, 83 bp, Homo sapiens
atgacggtcgcacccagcgacaggccgctgcaattgccatgaaattaaatggtggcagacatgtccaaggaatattgcgggga

SEQ ID NO: 265098 - DNA, 100 bp, Homo sapiens
caagatcatggtggggagtacggacgaccccagcgtgttcagcctccctgactccaagttcttttagaactcatcaaattgaagctgttccaaccagctc

SEQ ID NO: 265099 - DNA, 82 bp, Homo sapiens
gtgattagcttcgcagtctggaaagctttaggagttcacagtgatgtgaaatggtctgacttcgggtttcctggaagaaatg

SEQ ID NO: 265100 - DNA, 130 bp, Homo sapiens
ttttaccagaagctgcttgacctttccactgaggatgacgggacagtggccttcgcgctaacgaaggaacattcttccagaagaaatttgcaatgctgaagaggatgatgactcaaatctggaacatctt

SEQ ID NO: 265101 - DNA, 82 bp, Homo sapiens
ctacacgatgagatgcttcattggtttcgtgcagtagaatgttgtgtgagaaatggaatctatttggaatttgcagaagcaa

SEQ ID NO: 265102 - DNA, 75 bp, Homo sapiens
cttacgtgtactttaccaacgagctgaagcaggatgagaacaagttgagcagtgccaacggccatgaagaacgta

SEQ ID NO: 265103 - DNA, 75 bp, Homo sapiens
cagtgatgaggatgacaaaagaaaccaaggaaatttgtatgataagttggctcgagagcatggaatccgattttt

SEQ ID NO: 265104 - DNA, 82 bp, Homo sapiens
gccgaggcacaggctgctcgcggaccaccctgctccgaaaactaagtattggtaaaggttttcaaggtgtcatgaaaagatg

SEQ ID NO: 265105 - DNA, 100 bp, Homo sapiens
ctcgagcgacagagacaagctgagcttgccgcacaaaaagctagagagattcccagaaaatctaagctggcagttcataggaatatcagagacgacgaag

SEQ ID NO: 265106 - DNA, 75 bp, Homo sapiens
ttaaattttagctcattccgagacacctgccgtcagggggtaaaggaagtggtatctttgacgaatcaacccccg

SEQ ID NO: 265107 - DNA, 74 bp, Homo sapiens
caatcaggaagaaacatctccaaagacccatctttagattaaagagtctattgttggggaaatcagacgggaaa

SEQ ID NO: 265108 - DNA, 82 bp, Homo sapiens
cctgctccgcagcgacatcaccaagctggaggtggacgccatcgtcaacgccgggagacattacctcatccctcaagattgc

SEQ ID NO: 265109 - DNA, 118 bp, Homo sapiens
cggaaaccatgggttattgcagtggcaggtgcacgcttatctttatctgtggcatgcaactgcataagctgtggccatgactactgaagtaggctctgtgtctgaagtgaagaaggac

SEQ ID NO: 265110 - DNA, 75 bp, Homo sapiens
tgaaaggcctgtataccctcagaccagaagctgagctgtctctcttgctgcacaacgtggtcctgctctccacca

SEQ ID NO: 265111 - DNA, 82 bp, Homo sapiens
tgaactctcagtggtcctacctggggatattatcaaatctactactgttcatggcaggtcacgagaagagaatgccttctag

SEQ ID NO: 265112 - DNA, 100 bp, Homo sapiens
atcgtctcccgagcctgctcctgccgccgagcttactgaaacaaatgcaggtatcaagtgcttggactccatgtgctgtttcccggaaggagaagcagcg

SEQ ID NO: 265113 - DNA, 101 bp, Homo sapiens
ggaggacctggcagcagaggatgatgagggcttcagtgcagacgcagtggtggccctggagcagtatgccagcaaggtctgctcaccaggtggccagatac

SEQ ID NO: 265114 - DNA, 75 bp, Homo sapiens
ggaaattcattggacctgatcaacatcgtaatttctattaaatccagactccaaaatgatgcaaatcaacctgac

SEQ ID NO: 265115 - DNA, 98 bp, Homo sapiens
aagagaatgtgtcagccgatgcaccgagtccagcccaggaaaatggagagctatcatggtgaacttacttcagattgtgcgggaccactgggttcatg

SEQ ID NO: 265116 - DNA, 75 bp, Homo sapiens
ggtgttctgaaggaagttgtaagacagagatcagatttaaaggaatcaaaatggattgatgatgaagaattcctt

SEQ ID NO: 265117 - DNA, 75 bp, Homo sapiens
cagggaagcagaggagaaccgggagccattcagaaaaggtgcattggatcgttgtgtgatggggataacagcagt

SEQ ID NO: 265118 - DNA, 75 bp, Homo sapiens
ggtacatcacctaccggctggtgcagtagctaccgcctgacagggcaaaataacatggcagccagacgaattaca

SEQ ID NO: 265119 - DNA, 74 bp, Homo sapiens
taaagtgtctcaagcactgtttgcaaaggttgcagcaaccaaaagccagaaggtgggtgcggctgctatttgga

SEQ ID NO: 265120 - DNA, 127 bp, Homo sapiens
tgaacattatgtggaaggatcaacagtcaattgtgtactagcattccaaggagcccagtttcctccaattgcagcacaagaccttccttttgttctaaaggctggctaccttgaaaaacgcagaaaa

SEQ ID NO: 265121 - DNA, 121 bp, Homo sapiens
ttcatcacgaggccacccagtcccacttcaaacattcgtctcggaaaccccgcctcttacagtcacgaggctaccggctctctgaccagttccacgacatcctcattcgaaagtttgacag

SEQ ID NO: 265122 - DNA, 87 bp, Homo sapiens
cgtggaggcggtgcgctgtgccaactgtgacctggagtgcagcgagcaggtgtgatccctcacatccacaaatctctgattggaaag

SEQ ID NO: 265123 - DNA, 75 bp, Homo sapiens
gcttcaagccctggctcaaaatatgctgccaactgtccctattcagaaatcaatttgaataaagaccgtattttt

SEQ ID NO: 265124 - DNA, 97 bp, Homo sapiens
gcctcggtgcggcggcgagcgcggtcgagatcgccatgcctacccaagctgcacacatacatgtaagagaagcaaaaatgtcagatgatatcaggaa

SEQ ID NO: 265125 - DNA, 82 bp, Homo sapiens
cacacatcaccacatggaatcagctcaatatgttggagcagcaataggcttggcaactcttgtgaaatttcatagatctcgt

SEQ ID NO: 265126 - DNA, 100 bp, Homo sapiens
cccactgctggggtggtggttccaatgagacagggcacaccaaactccatctggtgaaaggtgtagcagtcactcggcctacacccacagcatcgacctt

SEQ ID NO: 265127 - DNA, 90 bp, Homo sapiens
tgacaagtgcagacagcagcttcatgatattactgtaccgttagaagtttttgagcaccagaatttcctgagtttgccactaaagtccag

SEQ ID NO: 265128 - DNA, 75 bp, Homo sapiens
gtctgcccagggcagggctcctaaggaaggacccgcctttagattgttgtgtccactgtatcctggcttgcttgt

SEQ ID NO: 265129 - DNA, 98 bp, Homo sapiens
ccacacgccccggaacatcgtccctcctgacgctcagaaggatgccctgggctgctgcgtggtacaggtggtcttggaggcattgggatgggacttgg

SEQ ID NO: 265130 - DNA, 85 bp, Homo sapiens
cggtctcctttcccggccgcacaggctctctgatccttctgacttaccaaggaatgccttcagaatttttaccattcttgtggaa

SEQ ID NO: 265131 - DNA, 101 bp, Homo sapiens
aaccggggaccttaacaatccacctaagaaattcagagatctttaatctcatgaagtacgacagctacagccgcttcttaaagtctgacttgtttttaaaa

SEQ ID NO: 265132 - DNA, 98 bp, Homo sapiens
gagcaacttactagtttgttgcaaaataatgtaaacgtcaatgcacaaaatggatttggaaggactgcgctgcagggcagcaagtgtgaagacagaaa

SEQ ID NO: 265133 - DNA, 100 bp, Homo sapiens
ggcgcccgacccgagcgcgcccagaggacggcggggagccaagccgacccccgagcagcgccgcgcgaactcgtcggcgcctctggctgaggacatcgac

SEQ ID NO: 265134 - DNA, 82 bp, Homo sapiens
ccaggatctcgggctcggaacgagactgcacgagaaaactgccagctgacttcaaggttctggaagcctcagatctggtgta

SEQ ID NO: 265135 - DNA, 98 bp, Homo sapiens
cgcggtttccccctgggcctccccagcagcagccatgggcatcagaaaaagtggacagggcagtgctgaaggaactgagtgaaaaactggaactggca

SEQ ID NO: 265136 - DNA, 83 bp, Homo sapiens
aggaacgaggcaaggagctaaagcagcgtgcgttcagccctggggagagtgtgctgggcagacgatgctggacacgatggagg

SEQ ID NO: 265137 - DNA, 87 bp, Homo sapiens
tggcccatctgcagggacgcgtacgagctgcaggaggttatcggttccatcataatgaatggatccaatatggcaaatacatcaccg

SEQ ID NO: 265138 - DNA, 100 bp, Homo sapiens
agccagtggtcacagctggatgtttgcgacatcccagagagcttccagagaattgactttaaaattaggaccatagagctcgatggcaagagaattaaac

SEQ ID NO: 265139 - DNA, 96 bp, Homo sapiens
gacaatggaagagcagctgagttcatccgaaggcgaaactactttgataaatctaagtgttatgaatgtggggaaacctcgacctgtctcccagtt

SEQ ID NO: 265140 - DNA, 100 bp, Homo sapiens
cggcggcggcgaggaggggaatttccttgtgcctccattcccgggaggggggagcggcgttggaggccaccgtttccagatatttggagttcttacaaca

SEQ ID NO: 265141 - DNA, 83 bp, Homo sapiens
ccggagcgcatctcgcccaggagccggagcagcggcactgcctgacctgcctagagctggaacgttacctccagagcgagccc

SEQ ID NO: 265142 - DNA, 100 bp, Homo sapiens
aaggtaggattcgtgtgattttcagcattccatgtgaacccaatcttgatgctttaatacagaaccagcatgtgtcagcagttgagtctttggagggccc

SEQ ID NO: 265143 - DNA, 79 bp, Homo sapiens
cacgggaatatatccgaagcctgaagatggttccaagtattccctatctaggagcatttcatactactgaagctgaagc

SEQ ID NO: 265144 - DNA, 75 bp, Homo sapiens
ctgccttgactgttaccggctcaggaaaagccggccacgcagtgaagaacccagcaagtccctataaccttgcat

SEQ ID NO: 265145 - DNA, 80 bp, Homo sapiens
cggtgcccgaggaggcagccaagctcgtagcctgccactccgtgcgggatgcgggagagaagggagacaaaggcgccccc

SEQ ID NO: 265146 - DNA, 75 bp, Homo sapiens
ctagagaccgagtgtcctcagtatatcagggtctcctctgagcctccggcctccataagacccaaaacagatgac

SEQ ID NO: 265147 - DNA, 50 bp, Homo sapiens
ctcggagctaatccacaatctccgcagactttgcctcccgggccaaactg

SEQ ID NO: 265148 - DNA, 74 bp, Homo sapiens
ccatggctcagaaaatggactgtggtgcgggcctcctcggcttccaggcaatctgaaggcaaatcctgtttaga

SEQ ID NO: 265149 - DNA, 80 bp, Homo sapiens
ggagacaaagttgaaaacaaagtgctggtcaaaatgcagatcttcgtgaaaacccttaccggcaagaccatcacccttga

SEQ ID NO: 265150 - DNA, 74 bp, Homo sapiens
gctttactgggtagatgcaggcttcaaaaagattgagattctctcgggcctagccgtccttggaacccgatatt

SEQ ID NO: 265151 - DNA, 83 bp, Homo sapiens
ccggtattgtaagaacaagccgtacccaaagtctcgcttctgccgaggtgtccctggtgggatgcagatcttcgtgaagaccc

SEQ ID NO: 265152 - DNA, 95 bp, Homo sapiens
agcagctggaattgattcgtttacagatggagcaaatgcaggtcaattgttttcgaagcccgaggtgataaagcagaaatacgagacggggcctt

SEQ ID NO: 265153 - DNA, 100 bp, Homo sapiens
aacgtgagactgctcagtgagatgctgcttcattacagccaggaggactcttcggacggggacagagagctgatgaaggccaagtcagaacttcgagcag

SEQ ID NO: 265154 - DNA, 88 bp, Homo sapiens
aagttcaggaaacatccaagaaaaatgtccttaaagcaattgagcaggctgatctactgcaggagtaccacagcagcctggcttcact

SEQ ID NO: 265155 - DNA, 90 bp, Homo sapiens
aaatctccaaaattccctatttggattgttggcagtgagactcacctcaccgtattttttgccaaggaaatctggcattttttaaagttt

SEQ ID NO: 265156 - DNA, 100 bp, Homo sapiens
cacacttatagatcttctgcactgtttacaggcacaggctcgtttctggcgctggagacatcaaacttactaaagacggcaatgtgctgcttcacgaaat

SEQ ID NO: 265157 - DNA, 75 bp, Homo sapiens
gcagtggtcgcttcttctccttgaacatgaatgaagcctcttctctgcttagtgccacgtgtaacacattcatca

SEQ ID NO: 265158 - DNA, 75 bp, Homo sapiens
gtcagcacccctgcagatcatcctggcgatctacttcctctggcaggatggccaggccatgttatgggatctcaa

SEQ ID NO: 265159 - DNA, 75 bp, Homo sapiens
gcgggtgcctttgaaaatcaacgacaacttgagcacagactgggagtcttggtgtgaaattgaggaattatctcc

SEQ ID NO: 265160 - DNA, 48 bp, Homo sapiens
ggtgtttggggtgtgttttacaaagaaaaggaagatggcgccatttct

SEQ ID NO: 265161 - DNA, 85 bp, Homo sapiens
tatcagagattgagaatgtccatggatttgtttctcattctcatatttcaccaataaagagtctccgggaccattatggcagtca

SEQ ID NO: 265162 - DNA, 101 bp, Homo sapiens
gtcggcatgctcacccgcctctacaacatcaagaagtggatagtctgctgaaatacactggctatgggaatgctgcaggactgttggcggccaggggcctc

SEQ ID NO: 265163 - DNA, 50 bp, Homo sapiens
caaaggaagacttgtaacctggagaagagtaacaaatgtggcaattattt

SEQ ID NO: 265164 - DNA, 89 bp, Homo sapiens
tcagcattttctgttgactgtaaaggtgctggtaagatttcttctgagacggtaaagaacaggtccaagaaaagctcaaagaaagcaaa

SEQ ID NO: 265165 - DNA, 74 bp, Homo sapiens
gtggccatcaagcaactctccggtctgtttctgtcgactgtggaccacttatgtgcgatccgtggaccacttgc

SEQ ID NO: 265166 - DNA, 74 bp, Homo sapiens
caagacgctcccagagtgttcaaaattacctggtaaaatccagtacaaggaatatatcattgaaggatttgaaa

SEQ ID NO: 265167 - DNA, 121 bp, Homo sapiens
ccgagatgtgatgttggagaactacaggaacatggtcttgctggtgtaacacagccagcctcgaagacttccctctgagttggaatgataatgaccgaatcccgagaagttatagacttag

SEQ ID NO: 265168 - DNA, 73 bp, Homo sapiens
ataaactgaaagatatcagcaccttggaacctttggagccatgtgtgagatacctgcccaggctgtacctgga

SEQ ID NO: 265169 - DNA, 76 bp, Homo sapiens
ctacacgtctcggggcagcaccccctactctcaggactctgcctactccagcaggccagactgaagatgcagagcc

SEQ ID NO: 265170 - DNA, 99 bp, Homo sapiens
aaagcttctccctcagtatttagaccagttcgcctctacggaccaaacttcatccttcaggtgtactcatctcagaggaagtcctggcaccctgtgtgc

SEQ ID NO: 265171 - DNA, 83 bp, Homo sapiens
aagtcgagtatctggtgaagtggaaaggatggcccccaaagagtgtggccatctggggccgtgtggtatttgccactcaggag

SEQ ID NO: 265172 - DNA, 75 bp, Homo sapiens
ccatcgacctcaaggacatcaacttccggccgcagatgtcccaggtcgcaatggaagaagagatcgccgcgctgg

SEQ ID NO: 265173 - DNA, 97 bp, Homo sapiens
aggacaaagaaggcaaacccctgctgaaggctgtggtccaaggccatttttgctggctataagcggggtctccggaaccaaagggagcacacagctc

SEQ ID NO: 265174 - DNA, 82 bp, Homo sapiens
ccagagcctcagcaggagcctgttctcatcaccatggcaacagcaggttacgggcaggacttgagtggcttcggacagggct

SEQ ID NO: 265175 - DNA, 100 bp, Homo sapiens
ccgtggtccttctccatattcgaggtatccgctgatcattgacccctctggacaggccacagaattcattatgaatgaatataaggatcgtaagatcaca

SEQ ID NO: 265176 - DNA, 88 bp, Homo sapiens
gcgacaagccgctggcagccgcggatctcaccgccgctcagggtaagaaccttgatgctgtccatgatatcactgtggcgtatcctca

SEQ ID NO: 265177 - DNA, 75 bp, Homo sapiens
tggctctaagatctgaatgttgtgaccactaatttggtgtgatgaatgcagactctgctaccattttggctgttt

SEQ ID NO: 265178 - DNA, 75 bp, Homo sapiens
gttggagtgtggatatgagtcatggaactctggggctatgttgctgccaggtctttgcaagggaaggaaatgtgc

SEQ ID NO: 265179 - DNA, 100 bp, Homo sapiens
gcaggaagaacccatcgggcagctacacatcttgaaagagaagctcttcctgtgagatgctgacatcagaaggaacacagcctcaagcagcaaatccttc

SEQ ID NO: 265180 - DNA, 90 bp, Homo sapiens
aaagctgccaaaagtgacatgcagtggacatttgggagcaataaaaataagaagaaaggaaaagccagaaaaatagagaagaaaggaacc

SEQ ID NO: 265181 - DNA, 82 bp, Homo sapiens
ccctgtcgtctgtgttgtgactgctttggacgtgggagtcacctgaaagccaggaaatgatgtccagctcgccgctgtccaa

SEQ ID NO: 265182 - DNA, 75 bp, Homo sapiens
tacggcctggcactgcgcttcttcaaagatagcatagaagccaatgtggaaaatgcagaggtgcacgttcagcaa

SEQ ID NO: 265183 - DNA, 83 bp, Homo sapiens
tgaacgacaattaccctcaggcgggctcaatggaaggccggagaagatgacccagcagatggctgggatgaacttctatggag

SEQ ID NO: 265184 - DNA, 100 bp, Homo sapiens
gccccatgcagttggctgtgaatgcacattgtgttctgcaaaaaacaaaaaggatagcctccggcattccagaatgccagctgatgaagaccgagaggcc

SEQ ID NO: 265185 - DNA, 88 bp, Homo sapiens
tttcaaccctgaggacgatgagtgtgaagttgcatttgctggtctggcctttgcgtccttctacctggcagggaagttacactgcttc

SEQ ID NO: 265186 - DNA, 98 bp, Homo sapiens
caactgaggcagcggcaggctcaggtgcagccgctggaaaagtgtactggctcctgtcctggatcaactcagaaaatgaaacacatcggattctgtcc

SEQ ID NO: 265187 - DNA, 50 bp, Homo sapiens
ctaggcatcttattgatcctccagtcgagcagcatctggaatcaagagac

SEQ ID NO: 265188 - DNA, 98 bp, Homo sapiens
ggctccaacagggatgcgctgagcgatttcttcgaggtggagtcggagctgggacggactaccgaccagactcccggaaatcatgttggtaggatccc

SEQ ID NO: 265189 - DNA, 83 bp, Homo sapiens
gagccgctgcgtctccatgccaggggacatctcagttattgccttgtctgtcaagatccgcagttatgaagaacacttggaga

SEQ ID NO: 265190 - DNA, 100 bp, Homo sapiens
cccaagcggccggagcggcgccatggaggagggggcgccgcggcaggcagctctgtggccatggatatgttccagaaggtagagaagatcggagagggca

SEQ ID NO: 265191 - DNA, 98 bp, Homo sapiens
cgccctgagcgctcagctccagaggcgattgccaacactcctgatagctgaatgtgtgctggtttacatgactccagagcagtccgcaaacctcctga

SEQ ID NO: 265192 - DNA, 88 bp, Homo sapiens
gacagtcgtagatacaaatttttggatgatgatggatccatttctcctattgaggagtcaacgaaatctgagaatgaagatgacagcg

SEQ ID NO: 265193 - DNA, 97 bp, Homo sapiens
tggttagtgtctatgctcagaatccaagcggagagagtcagcctctggttcagactgcagtaaccagcgctacactaagtatgagaccagcccccat

SEQ ID NO: 265194 - DNA, 114 bp, Homo sapiens
cgctcctgctcctccaggcgctgcccagccccttgtcagccagggctgaacccccgcaggaatttgctgattcccttggaattccgtttttggaaaccagtgctaagaatgcaa

SEQ ID NO: 265195 - DNA, 98 bp, Homo sapiens
ctggagcctcagttggaagcagccgatccagcctgcggagcctgtggggcaggctccccacaggtgcaggaagccgccgcccagccatggacggggag

SEQ ID NO: 265196 - DNA, 74 bp, Homo sapiens
cgaagtcttcattcataaggataaaggatttggctttatccgcttgatgctgcacttaaaaggatgcttgtttt

SEQ ID NO: 265197 - DNA, 143 bp, Homo sapiens
aactaagagagctttggatttcacagattctcaagaaaatgaagaaaaagcttctgaatatagagcatctgaaatgtgtgaagatgccttaagaaaaaataagagcttaattgggccggatcaaaaggagtatcaaagggaac

SEQ ID NO: 265198 - DNA, 82 bp, Homo sapiens
ctgagcccgcccttgatcttcgctgtggcatggcggacgaggggaagtcgtacagcggatgccggctccaggagcagcagtg

SEQ ID NO: 265199 - DNA, 100 bp, Homo sapiens
tctcatctggcttggcgcctgaggttctcccattagaacacactgttgcagcagctaggagtggctcctttttctgagggcccttggcccttgtacattc

SEQ ID NO: 265200 - DNA, 99 bp, Homo sapiens
ctcgggctgctggtgctgtgcgcgaggctcctcactgcagcgaagggactctgaaaaggaatcttgcccaagcagtgatgaagttgatgaggaggaaga

SEQ ID NO: 265201 - DNA, 101 bp, Homo sapiens
atacatctcactggggctgatcagttgatcagatgttttgggaggttatgcagttgagaaaagagatgtcattggcaaagctgggttatttcaaagaggaa

SEQ ID NO: 265202 - DNA, 133 bp, Homo sapiens
accactcagataaaacagctattcaatccaagaaccaacttccaaatccaacatcagtcccccggcagagggcagtagagatggccggcccaaggcctcggtggcgcgaccagctgctgttcatgagcatcat

SEQ ID NO: 265203 - DNA, 80 bp, Homo sapiens
caactatcaaggcctcccagtacgttgtgtgaagagtatcattcgacagttcatggctcagttccacgaaaagatctacc

SEQ ID NO: 265204 - DNA, 96 bp, Homo sapiens
atgaagaggttggagatgggaccacatcagtaattattcttgattttggaagatggcaaagttcatgacacccgtgatccaggacaacccctcagg

SEQ ID NO: 265205 - DNA, 87 bp, Homo sapiens
aagattggagagcttctagaccaggcatcggtgaccagggaggaagtggtgtctgagctaggatggaacaaaattcatctgtattgg

SEQ ID NO: 265206 - DNA, 75 bp, Homo sapiens
cgtggaacggctgcttttggaagcttcattcagatattgactctggtgatgggaacattaaatacattctctcag

SEQ ID NO: 265207 - DNA, 100 bp, Homo sapiens
tcgagaccatcccggctaaaacgaacttggcaagtggcttgaacctctgaaaaaccttagatttgaaattaactgcatcccaaacttaattgagtatgtt

SEQ ID NO: 265208 - DNA, 74 bp, Homo sapiens
ttgagcctttttggcctggcttgtttgcaaagcctcctgctcttcatggatgaagcagacgccttccttcggaa

SEQ ID NO: 265209 - DNA, 97 bp, Homo sapiens
gagaagggagaagagccctggctggtggagagagaaattcaccaagagacccatcctgacgcagccgtagacaccagctccgaaatcaccaccaagg

SEQ ID NO: 265210 - DNA, 99 bp, Homo sapiens
ccactccagctgctgggaacgggcgagaaagaggaggaggcgagaaactcccaccgacccacagaggcatgatgacctgaaggagatgctggacaccaa

SEQ ID NO: 265211 - DNA, 51 bp, Homo sapiens
ggggcgctgactgcgtgttaacatcagaagctggcagggcggagatgctgg

SEQ ID NO: 265212 - DNA, 90 bp, Homo sapiens
ggcttggcagacggcggacggtgcaggaggcccgggcgctcctccgctgtcgccgcgctgttttgagtatccgaggagcccaggaggagg

SEQ ID NO: 265213 - DNA, 89 bp, Homo sapiens
cgcagctctacgtgtaccgcctcaaccgcgacgccgagaccgagacatgggtgcccggcaccgcgcccgagcccactccattcagatca

SEQ ID NO: 265214 - DNA, 83 bp, Homo sapiens
ctcacagctgcagtctaatagtaacacagagatttgagttctgtgaacctgcatttgttgttggtaattgcctccagatagct

SEQ ID NO: 265215 - DNA, 100 bp, Homo sapiens
gtcactgaacgggaaccacgccgtgcgcctgccgctgatggagtgcgtgcagatggccatccgggatggtgtcattgaggccagcatcaaccacgagaag

SEQ ID NO: 265216 - DNA, 100 bp, Homo sapiens
cgaggggctctggaaagaccgggtccaggtggccattaaggtgatttctcgaggtctctgagcggcccctgatgttcctgttggacactcctggcgtgct

SEQ ID NO: 265217 - DNA, 75 bp, Homo sapiens
agctagcagctgttattgctttgaaagcaaggaagtctgtcctattttgtaacggattatgatccaaccattgaa

SEQ ID NO: 265218 - DNA, 100 bp, Homo sapiens
ccaggatttcctggaagcagagaaatgccaaaccaaacaggaagcttacttttctctacctagccaatgatgtcatacagaacagcaagaggaaggggcc

SEQ ID NO: 265219 - DNA, 80 bp, Homo sapiens
gaacgctctcatccggaggcaggaccagctgcagctgctgcagaggaacgaggacgcctgaaggaagagctggaagaggc

SEQ ID NO: 265220 - DNA, 96 bp, Homo sapiens
caggcttctgcagcctccaaaaggttcgatacaagaggctgttttcctagcgtggcttgctgcctttggtaagaacatgtcgtccatcttgccatt

SEQ ID NO: 265221 - DNA, 100 bp, Homo sapiens
agacactccccagggcagaaatagcgaccatggcgaggtgacgcagaagttctccctggtgattgtgcagggccacctggtgtcagaaggggtcctgctt

SEQ ID NO: 265222 - DNA, 100 bp, Homo sapiens
ccaatatttccttggcaaatataattagacaactaagtagcctaacttttgcgagaattgaagcaccctaatgtgattgcattgcagaaggtgttccttt

SEQ ID NO: 265223 - DNA, 96 bp, Homo sapiens
gaagaacttatcagagattgagaatgtccatggatttgtttctcattctcatatttcaccaataaagatacctgggagagaggatttttcatgtta

SEQ ID NO: 265224 - DNA, 90 bp, Homo sapiens
agatggaaaaccagttattgaatatcaagaggaggagttgttggattaagttgtcatcattctgggaagaaaaaaaaaacattaatgaag

SEQ ID NO: 265225 - DNA, 82 bp, Homo sapiens
tggtctctggctccctcctcccagggccaggcgccgctcagaacggtcacagccaagactgcctttctatttattttacctc

SEQ ID NO: 265226 - DNA, 73 bp, Homo sapiens
cgaggctagccacgcaggcggggccctgggtcccagactactatgacatcatcaaaaagcccattgccttaaa

SEQ ID NO: 265227 - DNA, 100 bp, Homo sapiens
agagagcattgtggctcaggctttggcaggcctgagtgcagcccgggatcagctggtggaaacttcagaacattttcgtatagatggtccagtaatttca

SEQ ID NO: 265228 - DNA, 82 bp, Homo sapiens
cagaccctggagcctcagttggaagcagccgatccagcctgcggagcctgtggggcagaaatggaatctatttggaatttgc

SEQ ID NO: 265229 - DNA, 99 bp, Homo sapiens
tttaaagctgagctgcgaggaaaatggcggcgggaggtcctgttctcgaacatcgaagacatcctggaagttcataaggatttcttggccgccttggag

SEQ ID NO: 265230 - DNA, 100 bp, Homo sapiens
ccagagcttctttgtgaggaataaaaagaattatatccagatcgagagacagaagattctgaaagggttcaatgaaatgagagtcatcttggacaatgag

SEQ ID NO: 265231 - DNA, 90 bp, Homo sapiens
aagaagtcgtagggggtgagggtggaagctgggaaacccacaggaggcaaccacactagtttagaaatggttcaccaaaccaccagccag

SEQ ID NO: 265232 - DNA, 100 bp, Homo sapiens
acaaaagctgctcagagtctcaatgaacttgtgagggagataaatctgcaggacatcaaggaagatttagaattggatccagaggaaaacagcaccctgt

SEQ ID NO: 265233 - DNA, 124 bp, Homo sapiens
ttggtcaggtactattcggggaaagaattgaaccttcaccatataagagaaagtggctcatgccaaagaagaaaaccttagtatgcatcagatgctggatcagactttactggagttaaacaac

SEQ ID NO: 265234 - DNA, 75 bp, Homo sapiens
gcaaaatctacaagatgatgcagggaggagaagtccattggaatattaagcccaggagttgctttggggatggct

SEQ ID NO: 265235 - DNA, 75 bp, Homo sapiens
ttcagcgagcccaccagaacacgtttcctatcctgggagcaggagagtgtgcctatttgaatgacaaaggtgcca

SEQ ID NO: 265236 - DNA, 100 bp, Homo sapiens
agtatgaaataaacgccactcctaaaggctggtcctgccactgggacagtatgtccgtggttcagaccctgtattaaagcttttggacgacaatgggaac

SEQ ID NO: 265237 - DNA, 119 bp, Homo sapiens
atattttgcgagtactcaacaccaacatcgatgggcggcggaaaatagcctttgccatcactgccattaagatttctgaggacaatcccagacccaggagatgttccagactcattttt

SEQ ID NO: 265238 - DNA, 83 bp, Homo sapiens
gtttggaggccgaaataagaaggctccgccaggagactccaaagctgagctctttcccctgccctgtgtgtggccgtgtgtac

SEQ ID NO: 265239 - DNA, 100 bp, Homo sapiens
tatctgaaagatggagatgtgattaagactgagggagccactctaagacttcaaatcatcccaacaccagagaacactaaatgacagtggacaggaagac

SEQ ID NO: 265240 - DNA, 96 bp, Homo sapiens
gttatgatgaatccgactccttcatcgataactctgaggcggctttgcttcacctctgggtcatgattgttctgttgacttacacaccagaaatgc

SEQ ID NO: 265241 - DNA, 101 bp, Homo sapiens
gcgtggatagcctgaaggcagccattcagaaggttgatgctgctgaattgcttcgtttatacttaaactatgaccttttagaagaagctgtggatttggtg

SEQ ID NO: 265242 - DNA, 82 bp, Homo sapiens
cagcgcgcacttcacccgcagttggctgacaaacgggctcatcataatgcactggaacgaaaacgtagggaccacatcaaag

SEQ ID NO: 265243 - DNA, 100 bp, Homo sapiens
gaagggactgccagaggtggaggggaggattttgaggacacttgtggagagctcgaattccagaatgatgaaattgtattgatcgtgtcctgtgctgaag

SEQ ID NO: 265244 - DNA, 85 bp, Homo sapiens
gcaacatggcactgggcaagttccgggccgcgctgcgagactacgagacgccaggtggaagagaccggagtggtgctgtccctgg

SEQ ID NO: 265245 - DNA, 100 bp, Homo sapiens
aaacttaaaagcaagctggttctctgggatataaataaggatctagtttgaagcactaagaagaataagacatcagtttgaaaagaggctctatcagaac

SEQ ID NO: 265246 - DNA, 50 bp, Homo sapiens
ttgcaacagaattacagagtatgataacccagcccttgctgacatctaca

SEQ ID NO: 265247 - DNA, 90 bp, Homo sapiens
tccggaaagggagccctgacgacgtggagtttaagtctggagcaggcactgagctgtctgtgcgcggttcacctttccttgccagtgaag

SEQ ID NO: 265248 - DNA, 100 bp, Homo sapiens
aactaatgcatgctatggaggcacagctgctgtcttcaatgctgttaactggattgagtccagctcttgggatggacccctatggtgtagccgtgggtgg

SEQ ID NO: 265249 - DNA, 85 bp, Homo sapiens
aagggaccacggtcaccgtctcctcagattccagctaagaaagagtcttgtccaaacactggaagagacaaagaccacctgttga

SEQ ID NO: 265250 - DNA, 100 bp, Homo sapiens
gacccgcacgccgggctttgttgtggaaatcccggttacctggccatcgaagacggcaatttggaggaaatggaagaggaagtacggcttaagaagcgaa

SEQ ID NO: 265251 - DNA, 82 bp, Homo sapiens
caaggttgggcattgggtggaggagcagaatttactacagcatgtgatttcaggttcaaaaaggcatttgaatctgagccaa

SEQ ID NO: 265252 - DNA, 75 bp, Homo sapiens
taaactcttggcatttggctttgcctttctggacacagaagtatttgtgacagatggatgcatctggaccctcag

SEQ ID NO: 265253 - DNA, 75 bp, Homo sapiens
agaagaggattcttcatatgtgatcaaccttatgaacctgttaggtgtgcaagcatttcctggaagctattgaaa

SEQ ID NO: 265254 - DNA, 75 bp, Homo sapiens
ctagaatcaactgagagagatgcttaaaaatcaccagttactttaatgaataggaccatctagttgcaggaaaac

SEQ ID NO: 265255 - DNA, 75 bp, Homo sapiens
cctcgtctcccgctccgccctcccttttccctggatgagattgagcaggtgatcctggtgggtggggccactcgg

SEQ ID NO: 265256 - DNA, 100 bp, Homo sapiens
gggctttgtcgagagtcgattcttcccgcccacacggcagatgggactcctgttcacctgaatgatgtcggggataagcagtcggctgtgaagatgaaga

SEQ ID NO: 265257 - DNA, 97 bp, Homo sapiens
atacagccgcttcaccgtgcccctgcccgcgaccatggcctcctccgaggtggcgcggcacctggttgggataattcttcactattccacccttgcc

SEQ ID NO: 265258 - DNA, 90 bp, Homo sapiens
ctcggatcgaatccctcacgcgggcgcggatcgaccggagcagagagctggcgagcaaggtctataagaaggagaaagctcgagtcatca

SEQ ID NO: 265259 - DNA, 75 bp, Homo sapiens
gagaatgtaagacaggaaaataattaaatattcttaccgagtggcaccctgtgctgcgcacactaaagaaccgca

SEQ ID NO: 265260 - DNA, 83 bp, Homo sapiens
tgcaagcgagaccctgcaggcccaaagtgaagaagccagaaggctcctgggatctgactgcagccatgagcagcaatgagtgc

SEQ ID NO: 265261 - DNA, 87 bp, Homo sapiens
acacgccggggcgcccgcgcgcggggaccccacgggagctagagccggtgcaggccacgcagaacaagacagggaagtatgtgccgc

SEQ ID NO: 265262 - DNA, 98 bp, Homo sapiens
aaactgtcaatctccgatccctgggattcaacacacaaatacgctctgttcaggttattggtggcatggttgtgagtcccggcccagcccctccaccc

SEQ ID NO: 265263 - DNA, 82 bp, Homo sapiens
aagacgacgagtttgaagagttccctgccgaagatttggtgcttccagatgtgagttatcaggtggaatccagtgaggagga

SEQ ID NO: 265264 - DNA, 73 bp, Homo sapiens
agatggtatatgactgcactagctcttcctttgatgggtaagaaggtgttttaccctgtggtgttcagtcttt

SEQ ID NO: 265265 - DNA, 76 bp, Homo sapiens
atgaaactcctggtgaatataagagaaagagaagacaacgtgtaggagacagccgctcaggaagcaatcttgcatg

SEQ ID NO: 265266 - DNA, 90 bp, Homo sapiens
gatggaagtacaagtgtcagcacctatgccagaagcctgtcttagatgttcatgcagaactagacagaattacacgaaaaccagttacag

SEQ ID NO: 265267 - DNA, 75 bp, Homo sapiens
acacctccaatcgctggtagaagcaccacaccaacatctagtcccttccgatacaaactggactctcaggacaaa

SEQ ID NO: 265268 - DNA, 50 bp, Homo sapiens
caggtccatacatgaagtcaccataaggtgggaacatccagttgcaggaa

SEQ ID NO: 265269 - DNA, 50 bp, Homo sapiens
aggggctcggcgcccggcggggactgcagcctgccacagtgactcaggtc

SEQ ID NO: 265270 - DNA, 82 bp, Homo sapiens
cctcctggtggcctgtgatgtctgcctgtgtccctacacctcccatggtcactgcgggtcatgtggtttttgaagacgtggc

SEQ ID NO: 265271 - DNA, 75 bp, Homo sapiens
cttttggactccctattgtatttgccagagcacatctggcaaatcctcccccagtactggtcaacacagatagct

SEQ ID NO: 265272 - DNA, 82 bp, Homo sapiens
cctgcgcccgtgcgtccgtctgcgacccgaggcctccgctgcgcggctgcaaccccaccctatggatgaacaggtaacagag

SEQ ID NO: 265273 - DNA, 100 bp, Homo sapiens
catgtcagtgtcctttcacacccatgtgaaagaggccaagatcaaggctcgagatcttcgcgggaagaagaaggaggagctgctgaaacagctggacgac

SEQ ID NO: 265274 - DNA, 90 bp, Homo sapiens
ggcactgaagggggactacaggttcgagaggaaatcctcattgacgattcaatttgttgaaggccaatttgtggactcctacgatccaac

SEQ ID NO: 265275 - DNA, 75 bp, Homo sapiens
gaaacctcgtggcctggtctccattatttgagatgagttacatcttggagctcagtgtggaggctgctggccctg

SEQ ID NO: 265276 - DNA, 129 bp, Homo sapiens
atgggccggacatctactgggtcagcttcatcctcggcggcggtggccgctagctccaaggaaggcttcagggatgacttcttagggggcaggggaggtagtcgcccaggcgaccggcgaacaggcccc

SEQ ID NO: 265277 - DNA, 74 bp, Homo sapiens
tggattggtggatctgaagtacaaaatattttccagcaattaccagctctggctgggtcgccacaacttgtttg

SEQ ID NO: 265278 - DNA, 97 bp, Homo sapiens
cacgagtctcagtccgaccgggctagctttggcgaggggacggagccggatcaggagccgccgccgccatatcaggacattatcccctttggcaaca

SEQ ID NO: 265279 - DNA, 98 bp, Homo sapiens
gaaaaggaaggacgatagcaggaatcatctatgaaaattatttgttgagtagaaaacgagcattgtgccagcagaaaactgagcttccggtcacagag

SEQ ID NO: 265280 - DNA, 75 bp, Homo sapiens
gatgaccctgggagttccttgcactgcactgctcatcgcagagctaaagaggaacatgtttgacaagctgaaccg

SEQ ID NO: 265281 - DNA, 87 bp, Homo sapiens
cccggcagcgacggcaccatgtcagacaaggaaattactcatgatgtcaaagggtggcttgatgatattggcttaccccagtacaaa

SEQ ID NO: 265282 - DNA, 51 bp, Homo sapiens
cgcaggttttggactcgctgaagcggctgaactccagtgcacccagttaga

SEQ ID NO: 265283 - DNA, 100 bp, Homo sapiens
cagggtcgaagctgctgaagtggtttttcctaatggaaaatcacatacctttccaatgtcatacttgtaacaccacagatcgaaatgccatatgtgtgaa

SEQ ID NO: 265284 - DNA, 60 bp, Homo sapiens
ccatcccttccgaggcccgacttcgggatcagtgtccttcagggatgtggctatcgattt

SEQ ID NO: 265285 - DNA, 100 bp, Homo sapiens
atggagaccaaacctgtgataacctgtctcaaaaccctcctcatcatctactccttcgtcttctggccacgagactcaaacaacttgctgggaccatccc

SEQ ID NO: 265286 - DNA, 98 bp, Homo sapiens
gatgacttggaagactccatgatcggccctgaagttgtccatcccttggctctgacacctccattctctgtccccaagcgccatgagaggccttcttt

SEQ ID NO: 265287 - DNA, 100 bp, Homo sapiens
ccggccggggcctgaggagcgggcacagggcaaggcggcggacggctgcgtcgcccgaggcgaggaggagcgctggcggaaggatcgagatcgagaccgg

SEQ ID NO: 265288 - DNA, 100 bp, Homo sapiens
tatcttcccttacaagggttatatatggaattatggtaccctccctcaggtataatacttctccacgtctgcttcaggaagaaagtgcctgccattctta

SEQ ID NO: 265289 - DNA, 75 bp, Homo sapiens
tgcccccggaggtgcccacgcagctgcctggacaagattgaaagaaggtggcaagaggaagaagcagaagcagag

SEQ ID NO: 265290 - DNA, 90 bp, Homo sapiens
gtcttgagatgaaaagcattggttctccagttaaggttggaaagatggatgctacttcctattctagtgttgacttcaaaatcaaaactg

SEQ ID NO: 265291 - DNA, 75 bp, Homo sapiens
catccagaagatcacacagtgttgactcagaaggtgtggacatcaagctgggcgtgtgtgctaatggacttctca

SEQ ID NO: 265292 - DNA, 100 bp, Homo sapiens
caacagctcaatagcaaactacagcaacaacgagaacaaattttccggcgctttgagcaggaaatgatggatgcaatgcagtatgcttctgaatctaaag

SEQ ID NO: 265293 - DNA, 100 bp, Homo sapiens
ctacttgcagcatattacctatcaggagaggaggtctaacataagaccagactatgcagactccaatttccacgacttcaagatgcataccttcactcga

SEQ ID NO: 265294 - DNA, 75 bp, Homo sapiens
cagggcagacccctgtgttttccaaagtggtagacggaggagaagtccatccccaccacccaccagaaggcgacg

SEQ ID NO: 265295 - DNA, 100 bp, Homo sapiens
aggctccggcgtctgcgcttccccatggggctggcctgcggcgcctgggcgctctgaggaactttatattgctgttggaatatctggagccatccaacat

SEQ ID NO: 265296 - DNA, 51 bp, Homo sapiens
ccgctgccgtcgcgcgccttgcatcatggcagaacaggatgtggaaaacga

SEQ ID NO: 265297 - DNA, 98 bp, Homo sapiens
cttcatctgcgatggacagaataactgtcaagacaacagtgatgaggaaagctgtgaaagttctcaagggatatcagtatgaacaacattactcagtt

SEQ ID NO: 265298 - DNA, 100 bp, Homo sapiens
aatgcatctactcatgcctcgaaatctcctgacagtgttaatggaagtgaaccaagcattcctcaggtctgctattgatcttgaagagatggcatctggt

SEQ ID NO: 265299 - DNA, 100 bp, Homo sapiens
gcaacttcttccttgtggacttcgagcagtcgcacctggaggttcagctgaaagccttgagccgggccatgcttctcacatcttacctgcctcctccctt

SEQ ID NO: 265300 - DNA, 75 bp, Homo sapiens
gctcggccgatgaagtgcagaggtttttttctgggtaaaaaacttgttgctgcaagtcaagctgccttaggctta

SEQ ID NO: 265301 - DNA, 100 bp, Homo sapiens
tgaggacaggaaacctcacaacacaatccaggacaacatggaaaactacaggaagctgctctccctcggccaatgtgctttgtgaagcagctggagattc

SEQ ID NO: 265302 - DNA, 98 bp, Homo sapiens
ggagacggcttggaaaacggagagactggggagaaggttctccaaaaaatgtggaatcctttgcatctatgctgagacattctcctcttacacagatg

SEQ ID NO: 265303 - DNA, 102 bp, Homo sapiens
aggggacgtccgatgatgatgtcccgtgtccgggctacctgtttgaagagattgctacacggatgataccatcggggaccttaagaagctgattgcagccca

SEQ ID NO: 265304 - DNA, 50 bp, Homo sapiens
gctctaacggggctttctacaagtagccggatcgagctgggagatgtgac

SEQ ID NO: 265305 - DNA, 112 bp, Homo sapiens
cggactccgccctgcacaggatcatcgaggtcgtcgacgccatcatgaccacggcccagaggtctgcctcagccacctccctgacgctgtcccactgtgtggatgtggtgaa

SEQ ID NO: 265306 - DNA, 100 bp, Homo sapiens
gaaacacagggcaccaactatgaagactctcagggcgcgatttaagaagacagagttatgcaaagggtgacctggacatatcttacatcacatccagaat

SEQ ID NO: 265307 - DNA, 95 bp, Homo sapiens
ggctattggactgacttttcttatgctgggatgtgccttagaggattatgggttcatctctaacaagtatttagtgaaacgacagagcagagact

SEQ ID NO: 265308 - DNA, 90 bp, Homo sapiens
tgggcagtgcccagagtgccctcttcttgcagcatggcctggccacccagagggcccttgtgtccaagcacatgcttgactatctttggc

SEQ ID NO: 265309 - DNA, 90 bp, Homo sapiens
cccctgccagaacggggccacctgcacggactacctgggcggctactcctgcaagggtttgaacatcctcatccctgtgttagaccggat

SEQ ID NO: 265310 - DNA, 90 bp, Homo sapiens
ggaaaaagaggaaagtggactgtccggggccgggctcaggagcagaggtggcacaagatctctgtaaagtagcaggcatagcaaaagttc

SEQ ID NO: 265311 - DNA, 74 bp, Homo sapiens
ctcagatctggagcatcggctgcaggggtcagtgatggagctgcttcaggctggtgggccaccaaaaaagggga

SEQ ID NO: 265312 - DNA, 82 bp, Homo sapiens
aaaaggacccgggttttcgaaattcttcttatccagagacagattcgagtggtgaatgcatttcgtagttctttatatgaag

SEQ ID NO: 265313 - DNA, 75 bp, Homo sapiens
ccataaaaattcatcagagagcattttactactgagctgcaaaggtactactgagcgagtgtgcttgatccaggg

SEQ ID NO: 265314 - DNA, 102 bp, Homo sapiens
gcgagaagccccagctgcactacgcgatagctgatcagcttccttgggttttgctgatgacacaagagagctttgcctgaagatggaaacactggagtcaga

SEQ ID NO: 265315 - DNA, 87 bp, Homo sapiens
ttcccatcatccaccgcgaccttaagtccagcaacagtacctactgtcaacaacgggaagtggaggccattactgaaggtgtagagg

SEQ ID NO: 265316 - DNA, 100 bp, Homo sapiens
gtccctgggcgcgtcagaacaggcgctgcggctgatcatctccatcttcctggggcagcttgtgcagctggaagagaaagggcagggttcagtgccctgg

SEQ ID NO: 265317 - DNA, 50 bp, Homo sapiens
aaggaaaatggcctaactggatggtgtgtggatacataagtaaatgctac

SEQ ID NO: 265318 - DNA, 50 bp, Homo sapiens
cgaactaagcagggcggtcggggctgctagcagaagaaagtcttcccaca

SEQ ID NO: 265319 - DNA, 75 bp, Homo sapiens
gccaggccctgcaggacctgctttcggagtacatgggcaatgtctgccatcatggatgttctcgcagaagcaaat

SEQ ID NO: 265320 - DNA, 100 bp, Homo sapiens
ggcaaacagtatatcatttcagaggagtgagaaagatcagtctaaagaaaaggagaagaaagtgaaaaaaacaattccttcctgggctaccctttctgcc

SEQ ID NO: 265321 - DNA, 98 bp, Homo sapiens
ggcaatgtcttcaccactgggttcagccgcatgagcgagcggcagctggctctctggaatccgggcttccgagtggacctgccaatcaagtcggcccg

SEQ ID NO: 265322 - DNA, 96 bp, Homo sapiens
aatgtcgggggcctcatcagaaatgttacacacggagtatcaaactctgctgccaagggggagctgatcaccttctattactattggaagaagacc

SEQ ID NO: 265323 - DNA, 75 bp, Homo sapiens
cgttaccattacgatccatctccgattcctccattgcatatgtttgaagaagaactgaccagcaagtggttatat

SEQ ID NO: 265324 - DNA, 83 bp, Homo sapiens
aaccatgtttggattgaagccgcctctgtattacttaccaggtgtcccgacccaggctaagcttgagcatggctgagcaggag

SEQ ID NO: 265325 - DNA, 50 bp, Homo sapiens
atgctatagtctggtatcaaaagaagggttacacatcattttggaatgac

SEQ ID NO: 265326 - DNA, 88 bp, Homo sapiens
ttgagaactatgtggcagatatcgaggtggatggaaagcagaataactgaagtgaagtgatggactccgatttggagagtagtaagac

SEQ ID NO: 265327 - DNA, 75 bp, Homo sapiens
caagatagaagagggacatattggggtatattacagaccgttccccagcacaccccaccccactcagccgctcag

SEQ ID NO: 265328 - DNA, 104 bp, Homo sapiens
gattttgaagagagatatgccaccagcatttattaaggtgaaaatcctatttataagagtgccgtaacaactgtggtcaatccgaagtatgagggaaaatgagt

SEQ ID NO: 265329 - DNA, 98 bp, Homo sapiens
gcggcagcatgtcggtggcggggctgaagaagcagttctacaaggcgagccaggatccctgctgccttggtgatcccgggctgacagccagagagcac

SEQ ID NO: 265330 - DNA, 82 bp, Homo sapiens
ctactacatggacgtctggggcaaagggaccacggtcaccgtctcctcaggaactgtggctgcaccatctgtcttcatcttc

SEQ ID NO: 265331 - DNA, 100 bp, Homo sapiens
ttgaatccatgttgaaaaatctatccaggattcatcccgtgtcaacaatggtaaagggaccctgtgctccatggggatggtccagcagctggtggccctg

SEQ ID NO: 265332 - DNA, 98 bp, Homo sapiens
ccaagtctcctgaagaggaaggagcggtgtcctcttaagaaaatgaattacctctggactacaaatttacaagattctcttcaagcaattcaaaaaca

SEQ ID NO: 265333 - DNA, 75 bp, Homo sapiens
ctcagttggaagcagccgatccagcctgcggagcctgtggggcagaaatatggctacacacacctttctgcagga

SEQ ID NO: 265334 - DNA, 79 bp, Homo sapiens
tctcttctatgacggagaatccgtttcaggaaaggtacttgttttggctccaacaagggaactggcaaaccaagtagcc

SEQ ID NO: 265335 - DNA, 75 bp, Homo sapiens
ctactgttgattcacagaaagactgtagaaaatttccagttccacagaaggttgcagtgtaggattttggaagtc

SEQ ID NO: 265336 - DNA, 76 bp, Homo sapiens
ggtactctttcctcgtggaatttgaagattctacagataaatcagccctgactataatgtggaatttttccgacag

SEQ ID NO: 265337 - DNA, 85 bp, Homo sapiens
cgcgaggagccgccgcgcgcccgcgccctccgcgcgacgccaggtgagaagccctaccactgcaactgggacggctgcggctgga

SEQ ID NO: 265338 - DNA, 90 bp, Homo sapiens
gggaggaggagcgggcgagaagctgccgccgaacgacaggacgttggggcggcctggctccctcagatatgaccacacgaggccctctgc

SEQ ID NO: 265339 - DNA, 100 bp, Homo sapiens
gttcggcggctgatggcggatcaggatcggaagcctgcgtaactttctcccttgatccgggagtctttccactggcttcttaatgaagaggataactcag

SEQ ID NO: 265340 - DNA, 75 bp, Homo sapiens
ccagccttcgagtcgttcttgctcttcgagggcgagaagttggatggcaagcatgtggtgtttggcaaagtgaaa

SEQ ID NO: 265341 - DNA, 83 bp, Homo sapiens
aaccatcccccagagtagttgtggcggaataatctaaatatgggtgttggggtccctgatgggcctgggtgacattatctcac

SEQ ID NO: 265342 - DNA, 90 bp, Homo sapiens
agacttggtgcactctatacctactgggttcccctggtggagccgccaccaaaatgcagattttcgtgaaaacccttacggggaagacca

SEQ ID NO: 265343 - DNA, 120 bp, Homo sapiens
cggctgattctgcatctggaaactgccttcatcttgaaagaaaagggagtcctcttggtatatgatattacaaattatcaaagctttgagaatttagaagattggtatactgtggtgaag

SEQ ID NO: 265344 - DNA, 90 bp, Homo sapiens
ggaccctgcttcctagagcacggcagcaaggcgaaccccatccctactcactggagctcagctttgatttttaacctcccttccccaccc

SEQ ID NO: 265345 - DNA, 142 bp, Homo sapiens
tgccacaggaccctttgtggaggagttgtttgaagtgacatcctgttatttccctatcgattttacccctatgctggctatgagtttgacatctgcttcacctcagtgcagaagagagcgatccggaccctctggacagtgc

SEQ ID NO: 265346 - DNA, 75 bp, Homo sapiens
ccgggggcctgggacccgtcgcgtcagagccaggaatctacagaagttttaaaagctcagtcagcagggacagtc

SEQ ID NO: 265347 - DNA, 90 bp, Homo sapiens
gtcgtagggggtgagggtggaagctgggaaacccacaggaggcaaccacactagtttagtgctgggccgcccaaccctgtcggtgcagca

SEQ ID NO: 265348 - DNA, 75 bp, Homo sapiens
cacttgctctgcgctgaggtgctgggacagccatggtttcagacgatgtgttcagagcaacattgttttgttgac

SEQ ID NO: 265349 - DNA, 75 bp, Homo sapiens
gaaagtcctctcgggagaagcagcgcctgttcccggggcagatccaggttcagggagtgcatccgccccaaccct

SEQ ID NO: 265350 - DNA, 74 bp, Homo sapiens
ctgggacagtgcagatccctgtttcagcagttcagctccaccagggaatgattcaccgggatttgaagcctgtc

SEQ ID NO: 265351 - DNA, 83 bp, Homo sapiens
catgctcatggagaacatctccaccaaggataacgaaggaggcccaacttcattcaataaggagcctgacggatttatcccag

SEQ ID NO: 265352 - DNA, 100 bp, Homo sapiens
cgcgcctgtcctggatcgacaccctctacagcagtgggactcttccctggacactgtgttgagttaattaaccaaaaagttccccagtcagtgaccaact

SEQ ID NO: 265353 - DNA, 90 bp, Homo sapiens
gtttggaaagggccctcaaaatgccttcttcctcgtaaaattctggggtctcattctgtcgcacaggttggcgtgcagtggtgtgatctc

SEQ ID NO: 265354 - DNA, 100 bp, Homo sapiens
gcttgaccagttacggcaggaggccgagcaacttaagaaccagattcgagagccctctggcacaaatggaagaagaaagaagggagcaagtagctaaaat

SEQ ID NO: 265355 - DNA, 90 bp, Homo sapiens
cttcgcagcttttagaccaaaatatgaaagacttacaggcctcgctacaagataagccaatggacacgtcagtgttatctgaagaaggag

SEQ ID NO: 265356 - DNA, 82 bp, Homo sapiens
tgcgtcatctgtgtggccactcgcaggagaagcactatccttgcagcccttgtgatggtggatgcttccaaaagcatcgaag

SEQ ID NO: 265357 - DNA, 100 bp, Homo sapiens
tcagttctgcgtttgaaaggaaacccgggtactgccagggggatggttaccgcatcggctttggccagtgtgctggaaaagtgctgcctgctctcctgcc

SEQ ID NO: 265358 - DNA, 98 bp, Homo sapiens
gcgccccgctggaggagctccccagctggtggctggagcgaccccttgttctttggtggcgctggctttcccaacgagcctgctgcagtcattgccct

SEQ ID NO: 265359 - DNA, 90 bp, Homo sapiens
atcacggagtttgggcatcctgcagccattaatgatcccaagatagaatggccttgatgaagatgacaggcatggccggggtcagctctt

SEQ ID NO: 265360 - DNA, 87 bp, Homo sapiens
agaacaggatatgactacagtagatgaaggcttaagcaggtaaagcagtcactgtgaagaaaataacattttaagaaacttttctgt

SEQ ID NO: 265361 - DNA, 100 bp, Homo sapiens
ggaaaccaggcatctctgggtgggcaacttacccgagaacgtgcgggaagagaagatcatcgagcatttcaaacgggaggagattggacaggctggactc

SEQ ID NO: 265362 - DNA, 100 bp, Homo sapiens
gtctccgccttccagttcggagaggcttatcaggagggcagacttcaaaagctactaaaaatgaacggccctgaagatcttcccaagtcctatgactatg

SEQ ID NO: 265363 - DNA, 75 bp, Homo sapiens
cccatctcccgccgggcgccatggcagccgtgggatgatgacatagagaccaccaaggtggaaatgctgagactt

SEQ ID NO: 265364 - DNA, 100 bp, Homo sapiens
cacatttcctgcaaggactccaaagtggtgagcaaccaggttttcctgtgactgtgacagtagagagtccttcatcctctgaagttgaagaggttgatga

SEQ ID NO: 265365 - DNA, 75 bp, Homo sapiens
cggagacagcggcacagaggtgcttctgccaggaacgaatgcaggaatttgggaactgagctgtgcaagtgctga

SEQ ID NO: 265366 - DNA, 125 bp, Homo sapiens
gggctctgtgtctctctctatattcttcatcacactgcttgttctgggtagacaggatggctggctgtggtgaaattgatcattcaataaacatgcttcctacaaacaggaaagcgaacgagtcc

SEQ ID NO: 265367 - DNA, 82 bp, Homo sapiens
agcacacctggagcaacaacctggcggtgctcgagtgcctgcaggatgtgagggaggtgaatgaaaactttgccattgattt

SEQ ID NO: 265368 - DNA, 82 bp, Homo sapiens
tgaagtggaaaatcaagctaagcgcctactagagcagggtttggagactcaggatattagaaatggctactccccagtcaat

SEQ ID NO: 265369 - DNA, 75 bp, Homo sapiens
cccggggacttggtgttcgctaagatgaagggctaccctcactggcctgccaggactcggtgaaatacctggagt

SEQ ID NO: 265370 - DNA, 75 bp, Homo sapiens
ggaccacatagacatttacgcggatgtcggcgaagagttcaaccaggttggcgctgtacgtttatgagtacctgc

SEQ ID NO: 265371 - DNA, 82 bp, Homo sapiens
aacggagataaattcccggaaccgcgattcggcgtgtcagatggcccactgcgtgaccttggttcagctgtccatttcctgt

SEQ ID NO: 265372 - DNA, 50 bp, Homo sapiens
cagacgccgacgtcgaccagcagagactgatctgactgcagccatgagca

SEQ ID NO: 265373 - DNA, 82 bp, Homo sapiens
ggcagcctgagtcccagtgatatgagttttgatcatcctgagaaaaatgggccttggcctgcagacccaataaaccttccct

SEQ ID NO: 265374 - DNA, 82 bp, Homo sapiens
actctttccgccctaatggaggtctccagtttcgcaaaatgatgcttcaacacccaggccaggtctctgcctcggaagtgag

SEQ ID NO: 265375 - DNA, 98 bp, Homo sapiens
agtgtgcctctgcgaatttaaagctcatgaaaacagtgctgtccccggcataggtccatctctgcagaagccatttcaggagtacctggaggctcaac

SEQ ID NO: 265376 - DNA, 103 bp, Homo sapiens
gacctttttgaagcctttgcaaaagttgttcctactgaaggattggtctccatattaaagaagaggaatgatactgtaggagatcatcctgcccaaatgcaac

SEQ ID NO: 265377 - DNA, 75 bp, Homo sapiens
ctcaatgctgctgtgtgggaagaagatttgtaaagaaaactcttaggtggaacggcacatgtgtgatggggacat

SEQ ID NO: 265378 - DNA, 83 bp, Homo sapiens
agcagtcctaccatgtcagccttcccagtagctgggaccacaggctttctgtctctggtcgtgatgagaacagtgtggagtta

SEQ ID NO: 265379 - DNA, 100 bp, Homo sapiens
tgattatttcagaaactggaatcccaacaagccctttgaccaaggtgatttgatgaaggctgctgcaggagagttcgcagatgatccctgctcttctgtg

SEQ ID NO: 265380 - DNA, 90 bp, Homo sapiens
gtcgcgtctcggaaaccggtagcgcttgcagcatgttgtcgagatgtccacagaaggaggatttggtggtactagcagcagtgatgccca

SEQ ID NO: 265381 - DNA, 95 bp, Homo sapiens
ggcattcgtcttggtaaacttggtatatttggtttccaggcaggactgacgtctttggattgcagtggatcttactgcttacctgtaccagttat

SEQ ID NO: 265382 - DNA, 50 bp, Homo sapiens
caggacccgaagcctaaattccaggaggggacccagacagcgtggtcctc

SEQ ID NO: 265383 - DNA, 90 bp, Homo sapiens
cttgtacattcgcaccaatgcttcagctgtggaaagaaataacttgatgaggttatcacagagcattccatttacacctgtgcctccaag

SEQ ID NO: 265384 - DNA, 100 bp, Homo sapiens
ggattatcggatgaaccagaagctgtgggaggtgtattccggtgactgaggatctcctctctgtgctggctgagctgcaagaggctctatggcattggcc

SEQ ID NO: 265385 - DNA, 90 bp, Homo sapiens
gctgagactcggggcgccagtccgggcaggggcagcgggagccggccgggtgagaagccctaccactgcaactgggacggctgcggctgg

SEQ ID NO: 265386 - DNA, 99 bp, Homo sapiens
ccggggcttgccctggtcttgctcggccgatgaagtgcagaggtttttttctgggaatgaaagctactggttgattttaaagtgcctgggcctcacagg

SEQ ID NO: 265387 - DNA, 98 bp, Homo sapiens
atggagtccttgcctacaaactcctggtgcaaaccggcagccgcgataagcccatcgacatcagccaggttgttcggaatcctataattgaaaaacag

SEQ ID NO: 265388 - DNA, 105 bp, Homo sapiens
cggacagccgcgcgctgagggtctcggggcgggcgccgcgggacctctccgggccatggcacttgcacctcctgcgccgccgccccccatccaaggatatgcctt

SEQ ID NO: 265389 - DNA, 50 bp, Homo sapiens
ggccgtgtctccggcatcatgtgtggtaacatctgccggcacctgctgcc

SEQ ID NO: 265390 - DNA, 83 bp, Homo sapiens
actcaccctcggacagacagaggtcctgtccaaaatgcattgctgtcttcacaagagtcagtgagccaaggatacaatttcca

SEQ ID NO: 265391 - DNA, 82 bp, Homo sapiens
gttaaggattccaagtaactcttatttgggtgatcagttatgaagaagggaaagctttggcagaatcttggaatgcagcttt

SEQ ID NO: 265392 - DNA, 98 bp, Homo sapiens
ggcggccgggcgggggagatggcggcgcgatggagcagcgaaaacgtggttgtagagttccgtgactcccaggtgtctgcattattgggccgaatccc

SEQ ID NO: 265393 - DNA, 100 bp, Homo sapiens
ggttccctactcccctgctatccccaacaagaggaaagacacacctaccaagaagccagtcaagcggccaggagaacgtatttaccgggcagtcaaagat

SEQ ID NO: 265394 - DNA, 97 bp, Homo sapiens
gctgttgaaaatgagcagctgtcctcatgtctctccagcaggttacacttccaggggctccccactcagtccccagtcatctatcgacagtgagctg

SEQ ID NO: 265395 - DNA, 90 bp, Homo sapiens
ctaaaggccccatacaatgaagtagacattggtggaaacatttagagttaagtatgacattgacctgcccaacaagaaggtctgcattga

SEQ ID NO: 265396 - DNA, 75 bp, Homo sapiens
atgcaggccttcccacaagggcccggcagcatgacaagacaccacctcagataattttggatacaacctactgac

SEQ ID NO: 265397 - DNA, 75 bp, Homo sapiens
tctcactctgttaaagctggtctgttctaactgagcattttctgcattagcaaatatcgacctggctttagaaca

SEQ ID NO: 265398 - DNA, 82 bp, Homo sapiens
gcgaagctggccgagcaggctgagcgatacgacgctgcatcttcctcccgtgaggctggccgagctccacgctgatctgaag

SEQ ID NO: 265399 - DNA, 51 bp, Homo sapiens
ggcggacagtgcggaactaaagcttcaaggttactgactttttatgatgtt

SEQ ID NO: 265400 - DNA, 96 bp, Homo sapiens
ctccacggtcaacgtggtatactcgcagacaacccaaccggtatacaatgggaagcagtttaagtgcacggtgtgtgactacacagcggcccagaa

SEQ ID NO: 265401 - DNA, 97 bp, Homo sapiens
ctgctattgacctggtgatggagcttatgtacacaacgggggaggaagtggagcaaaagatacagatattgtggatgaagccatctattacttcaag

SEQ ID NO: 265402 - DNA, 83 bp, Homo sapiens
aaaagaacggagcttgaagcaaagctgcaggttttaaaggatttgaagcattcattaccatctggacttggtctctcagaaac

SEQ ID NO: 265403 - DNA, 99 bp, Homo sapiens
gaacaaactatattcacctgccagataccgtcatgaatttaagtcaaacgagttatggactgaaattaagcttgttctggatgcctttgctttgccttt

SEQ ID NO: 265404 - DNA, 75 bp, Homo sapiens
gcgccgtgagttcgccgctggtggctccgggtctttaaggaggagaagtacttgaaagaggccatggagtgtagc

SEQ ID NO: 265405 - DNA, 100 bp, Homo sapiens
aagaactttctcatttgggatcagcgatatttcctgagtctgaagctgcgttggaccaggaacagattactgctgcttattctgtagaacataatcaatt

SEQ ID NO: 265406 - DNA, 100 bp, Homo sapiens
tcccccagacctgctgcttgagtcccagtggcaccactattcaggtacaggtttgcagattccgccagcagcacagcaagctctacagatgagtggctct

SEQ ID NO: 265407 - DNA, 75 bp, Homo sapiens
ccttcgaggcagcctcccctggcaaggactcaagaagactgggacatgttggatgttgatgaagatgaaaagcta

SEQ ID NO: 265408 - DNA, 51 bp, Homo sapiens
cttttttggaactcatgagacatatatgggcaataggttgtatatttgctg

SEQ ID NO: 265409 - DNA, 90 bp, Homo sapiens
tttcaagaccaaaaaacacaataccaggcatacatttggcagaataaatgaaccaggtgaccaagaatatggcccaggtgaccaaagccc

SEQ ID NO: 265410 - DNA, 50 bp, Homo sapiens
tgcgtcaatcagagcgtcctgtgcgacaccattcgcttttcacccaagat

SEQ ID NO: 265411 - DNA, 75 bp, Homo sapiens
gtggaaacaaggtcgacaactactcagacaattattatgtagttggcagctgagaacaatacttagtggatacca

SEQ ID NO: 265412 - DNA, 100 bp, Homo sapiens
tggattgttttaaagcaacctataaacatcagctctcaacagctcccaaactgcctccaggagagagagaaccttcacaggaagcaggtacacccttgcc

SEQ ID NO: 265413 - DNA, 100 bp, Homo sapiens
tgaaggacaaacactggttcagcccccacagaacctttattgtgtaagtttgctgatggaggacagaaaaagagacagaacccaaacaaatacatcccta

SEQ ID NO: 265414 - DNA, 50 bp, Homo sapiens
cgacctgctaacagaactggaccttttcgctccattgggtgtgatattcc

SEQ ID NO: 265415 - DNA, 100 bp, Homo sapiens
gccctttccagggcaatttcaccatcattttgtatggaagctgtgggaatcactttaaccctgatggagcatctcatgggggcccccaggactctgaccg

SEQ ID NO: 265416 - DNA, 100 bp, Homo sapiens
aagatcaacctggaagcggcagagttaggtgaaatttcagacatacacaccaaattgttgagacaccaagaatttagtttcctcctcaaagaaagggtat

SEQ ID NO: 265417 - DNA, 97 bp, Homo sapiens
tacccgagaacgtgcgggaagagaagatcatcgagcatttcaaacggtgggaggaggagctcgccaagcgcatgaaccttcagaccatggtggacac

SEQ ID NO: 265418 - DNA, 95 bp, Homo sapiens
gaaagcaaaggagtcagggatggctcttcctcagggatcatagacggtatttctatgtaaacgaacagtcgggcgagtctcagtgggagtttcca

SEQ ID NO: 265419 - DNA, 88 bp, Homo sapiens
cgggcccggcggcgtggaccacctcccggtgaagatcctgcagccaggtatgctctggcatcccatttcttctggggtctgtggtcca

SEQ ID NO: 265420 - DNA, 90 bp, Homo sapiens
aaagacatggagattctcttaaaaagaaccaagcgcctccaggtctctacacgaagacccaggacccagccaaagcccccaacacccctg

SEQ ID NO: 265421 - DNA, 50 bp, Homo sapiens
atccccccgaaaggaccccccagagcaacctgcaagcaatcaaggccagt

SEQ ID NO: 265422 - DNA, 90 bp, Homo sapiens
gctgtagcactgccgaagaatctgtatctcaaaatgtggaagggacccaggctgattcagatttgacttgggctcatatgacataaggat

SEQ ID NO: 265423 - DNA, 75 bp, Homo sapiens
cccgcagctgtcccaccaccacaggttaccaagtcaaacaccagcccagaggagctgggccctcttgctaaccag

SEQ ID NO: 265424 - DNA, 75 bp, Homo sapiens
gagcaagatgcagtcagtggagcccttagagatttgtttgattccatggataaaacttcttccagtattccacct

SEQ ID NO: 265425 - DNA, 97 bp, Homo sapiens
tggaatcgtatcctcctgtgttttttcagactccttggaaattaaggaatgcaattctgccaccatgatggaagaaacagagctgtcagtcagtgct

SEQ ID NO: 265426 - DNA, 90 bp, Homo sapiens
gcctggtccgtgtccggtcccccaaatctgtcgtccctgcccccaggattcttggtgccaccattgagaactccaggattgtcctgcaga

SEQ ID NO: 265427 - DNA, 90 bp, Homo sapiens
cgcgcgcaggagctcatgtggcctgcggctcctgtcgcctgtaattactccaaaggtttcggcggcaaatacggtatcgacaaggacaaa

SEQ ID NO: 265428 - DNA, 75 bp, Homo sapiens
cctttccacctcgcggcagttcggtcagcccaaggccaaccccactgtcactctgttcccgccctcctctgagga

SEQ ID NO: 265429 - DNA, 75 bp, Homo sapiens
tcagcctcctgaggagctgggattacagttaagtatgagagagaagctagtaaatactgggacacattttacaag

SEQ ID NO: 265430 - DNA, 75 bp, Homo sapiens
gaagagggaagacacgcggaaacaggcgcaagcaaactgtcgagtaggagttgcagcactgaatactctagcagg

SEQ ID NO: 265431 - DNA, 100 bp, Homo sapiens
gacttttgcttcatgtgtcctggaaactgggctgggtagagatcaacagcagttcaaggtggacattgaagtggacctaattcggttttccttttaaaag

SEQ ID NO: 265432 - DNA, 100 bp, Homo sapiens
cgaaaaacaaccacactgcttcgatcctggacaggatgcaggcagatacctacattggccccgtcctggtctctgtcaatccctaccgggacctgcagat

SEQ ID NO: 265433 - DNA, 99 bp, Homo sapiens
ctgaggagtccaacatcaccatgcaggagccagcaccgctctttgaccttgccatgcttgccttagatagtccagagagtggctggacagaggaagatg

SEQ ID NO: 265434 - DNA, 100 bp, Homo sapiens
cggcttcagctgtcaggaggacgatttcctggggggcatggagtgcaccctggggcagaaggagcatttctaccagaggcagcaccggctgcccgagccc

SEQ ID NO: 265435 - DNA, 100 bp, Homo sapiens
gcagctgccttcttactaccctgggtttagatgtagattctctggtcattgagcatatccaagtgaacaaagcacctaagatgcgccgccggacctacag

SEQ ID NO: 265436 - DNA, 100 bp, Homo sapiens
cagcagaacagaggcttcgcatttgtgcagctgtcctctgcaatgcatttgagacggagttggcttatctctcaggaaatagacttacagtggatgaaca

SEQ ID NO: 265437 - DNA, 100 bp, Homo sapiens
gggcccaaccacaagacgactcaataggaggaagttcaaaagaatgctgaaccgggagctgacacacctctcagagatgagccgatcagggaaccaggtg

SEQ ID NO: 265438 - DNA, 83 bp, Homo sapiens
tgaccctgggagacatcgacgaaatctgcaactcgacctagcccctctccggaaaggagcagcacaggcccagaaccacctgc

SEQ ID NO: 265439 - DNA, 100 bp, Homo sapiens
gagcagctgcctgggagaatgttgactctactgcaggtatggatcctggcgggagccagtcaacccctattatgtcaatgccggctatgccctggcccca

SEQ ID NO: 265440 - DNA, 51 bp, Homo sapiens
cttggcatgggctacaaggaaaacggccaagattgacagacacctaatatt

SEQ ID NO: 265441 - DNA, 75 bp, Homo sapiens
agggatccttcacccgtgtctgaccccttatccctctggacagaatgcaggtccaaccacgctggtataccctca

SEQ ID NO: 265442 - DNA, 100 bp, Homo sapiens
ctgggaacgtgagtatcaaccaaggagcatttctggagtattgaccaaacggaatttcgaatcccacccaggctgatcattcagatatgggacaatgaca

SEQ ID NO: 265443 - DNA, 75 bp, Homo sapiens
tcaacatctctcagagacgaaaggaagaggatcacctagcccgggtagaagaggcaatcacccgtatgcttgtgt

SEQ ID NO: 265444 - DNA, 98 bp, Homo sapiens
gtcctacttctcatttaagctactcaagaaagagtgcccaattccaaatgtacaggaagaggcagaaatccaggcagaacttgaacgtttggaaagag

SEQ ID NO: 265445 - DNA, 80 bp, Homo sapiens
gcagtttccagtggcagcagtacagcattactttatagcaaacgactggtatctcagatgaagacatcatcaacattact

SEQ ID NO: 265446 - DNA, 83 bp, Homo sapiens
ccgagctggagagcgtggacaagagcgcggggcaagtggctcggaacacaggtttccagccaatggattctggtcaactggtg

SEQ ID NO: 265447 - DNA, 100 bp, Homo sapiens
agtcttccatgtattcacttcctaatgcacccactctggcagacctggaggacgatacacatgaagttgcacctggacttgatatgaaagtaaccatcag

SEQ ID NO: 265448 - DNA, 75 bp, Homo sapiens
cttggcctcagcaaacttgcgagactgaagttgctgaagatcctcaacaagtttcaactgtccatctccaactgg

SEQ ID NO: 265449 - DNA, 75 bp, Homo sapiens
ttctcttcctgcttcatctctaaaggtccttctaggagagaggtgaaaggagaagatggtataaactggtccatc

SEQ ID NO: 265450 - DNA, 129 bp, Homo sapiens
tggagtttacacaggcaaactgtcagaaaagagtagcctgggctgtctggaaatctgaggtttggtgcacctcgatttggaggaagtagggcagggcccttatctggaaagaagtttggaaaccctggg

SEQ ID NO: 265451 - DNA, 87 bp, Homo sapiens
aagtagcaaaggcaagaaggcaacgacgttccatctgtggaaggacctaccaaccagggtgaaaatgggatggaggattgtgtcatg

SEQ ID NO: 265452 - DNA, 82 bp, Homo sapiens
cttctcagctcagccaaacgggtccatggaattgtacggcggtccagttcatttaatacgggtcgaattgagcatctgtata

SEQ ID NO: 265453 - DNA, 100 bp, Homo sapiens
tttcaaaaagagatttcactggagctattaccctgttggagtttgcccagtatgcggagatcgtccacttcaccctcccagatgggactcagaggagcgg

SEQ ID NO: 265454 - DNA, 90 bp, Homo sapiens
gatcatttgcatttcgttagctttctggattatatcaatgactgcaagcacctattatgaaatcatgaccaccccaggaaaagagaactt

SEQ ID NO: 265455 - DNA, 100 bp, Homo sapiens
cccttatgcaacagtttctctagtgggcccttctaggtgacttggcatgaaattgcaaggcctcagatacatgggtatgacctgaaatgtttggcaatga

SEQ ID NO: 265456 - DNA, 80 bp, Homo sapiens
gaagcctgtgtgtgcttcaaatcgtcaccctcatggtcgctccggtgtgcatcaccttcgaccaggccaacctgaccgtc

SEQ ID NO: 265457 - DNA, 100 bp, Homo sapiens
tgcagtacctgcagaaggtctctggagacatcttcagcagtgttttacatgctctacctgccggaatcgcctggtcccgggagatcggtttcactacatc

SEQ ID NO: 265458 - DNA, 100 bp, Homo sapiens
aatgattttgaagttattggaagataaaaatggagaggtacagaatttagctgtcaaatgagggagacgtggtgggcggtccttcctgtgacacgaccct

SEQ ID NO: 265459 - DNA, 88 bp, Homo sapiens
gtagcgaactgcggtcgctggaatgtgtgtctcacgaggcaattcgaagttttcaagtagcccttcacatctatccaatgaaccctga

SEQ ID NO: 265460 - DNA, 98 bp, Homo sapiens
acctgctgtatctactcaagagtggaagttttcacaggtttgtggaaggaatgcttaacatttgttacaatgccgttgatcgtcatattgaaaatggt

SEQ ID NO: 265461 - DNA, 51 bp, Homo sapiens
ggcggcgaggaaggcgtctcccggccaacagaatcctggatttgagtctgt

SEQ ID NO: 265462 - DNA, 98 bp, Homo sapiens
ccgggatcgtgaccgagaccgtgaccgagagcgtgaccgagagcgcgaatatcgtcatcgttagaaggttatacattggctcttcaaagacgttcacc

SEQ ID NO: 265463 - DNA, 90 bp, Homo sapiens
gtggctatgacaaaccttcagcctgaagacccgggagggaaaaataaatgcactcggtgatggaaagagagccactattctgaagaacac

SEQ ID NO: 265464 - DNA, 82 bp, Homo sapiens
ccgggacttaccactgaataaatccagtccagcgtgcgacgacttactggcttcatgattcttctgctgatcgacattgagc

SEQ ID NO: 265465 - DNA, 137 bp, Homo sapiens
acggcgggcggacagcatgctgagcctcctcgtctggatcctcactctctccgatactttctcccaaggcgcaacctggtggaggaggtgaatgctgcccacatgaagacctgcctctttcacaagaccctgcaccc

SEQ ID NO: 265466 - DNA, 75 bp, Homo sapiens
aaattttaaagactgttgtgaacagggatgtacctaatttgagtcagcagatactggagttatttgaaacatgtc

SEQ ID NO: 265467 - DNA, 88 bp, Homo sapiens
agaaaaagagggttgtccccaaaaagcctcccccatcaccccaacctacaggaccagttgctcttctgtgatgactgcgatcgtggct

SEQ ID NO: 265468 - DNA, 75 bp, Homo sapiens
cagccctggaatcctttctgaaacaggtgagcagtaggtcatccagtcccagtgtcagaatgattactacctcag

SEQ ID NO: 265469 - DNA, 101 bp, Homo sapiens
ctgggaggccggccggtgccagcacctttcggcttctgagacggcggcagcagcggcattcagtgtgacaaacagtggcaaaacaacactggctaagaatt

SEQ ID NO: 265470 - DNA, 98 bp, Homo sapiens
cagttttcttcagaagaaggacttcggaatgcactacaacaggaaaatcatattatagatggagtaaaggcagaagctcctcctggggtagagacaga

SEQ ID NO: 265471 - DNA, 73 bp, Homo sapiens
caagcagcggatcatcccctttctgccaggtgatctgtgaaaatggttcgctattcacttgacccggagaacc

SEQ ID NO: 265472 - DNA, 74 bp, Homo sapiens
gcgtggatggcctattacatcaatcaccctctctacactccccctaccaccttgggtgttgaggttcatcccct

SEQ ID NO: 265473 - DNA, 82 bp, Homo sapiens
ccaaaactttctactataaatcccggttttggctgcttaaactgctggaactgtggctgcaccatctgtcttcatcttcccg

SEQ ID NO: 265474 - DNA, 100 bp, Homo sapiens
ggatgacatatttttggacctgaaacagaaattctggaacacctatatgctccgggattgtggagggctgcgggaggtggaggtgactgcctgcctggtg

SEQ ID NO: 265475 - DNA, 50 bp, Homo sapiens
ggcagcggcgcgggaggccgtgcggcactattcctgatcagagaactcca

SEQ ID NO: 265476 - DNA, 129 bp, Homo sapiens
tgcattagccctggccagcagactgggagatcccgtctatgattctaccatcactgagagcatggatgacatgctcaggcgcgccggaagcacctagagagcggcgcgtgcgcagcgggagtcgaagcg

SEQ ID NO: 265477 - DNA, 100 bp, Homo sapiens
ggctggaaggagaactaaatgggagaagaggaatgttccctgacaatttcgttaagatgtcatctgggtgattctcagtgtggaggtgggtggactttta

SEQ ID NO: 265478 - DNA, 100 bp, Homo sapiens
gctgaatcacacgccgccatccgggaggcccagggaagagattcgtcagcgaactgcagctcaaagaaacctttctccaacaccagcaagccctaaccag

SEQ ID NO: 265479 - DNA, 90 bp, Homo sapiens
gcaggcgctcaccatgttccctggagattcgtgtgagggatgacaagatgcctttggcgcaccttgcaatagctgttgaagctgttggtt

SEQ ID NO: 265480 - DNA, 74 bp, Homo sapiens
tcaaaactctctgaaaaatggctccctccgagttaagggctccagcggggccccacagacgagcaggatgcctg

SEQ ID NO: 265481 - DNA, 100 bp, Homo sapiens
tttccatctcttcagagatgaaccaggctgtattcatcaccaaagaaaaaacttacaccaatgcagaaatcggttagtccattagtttggtgcaggcaag

SEQ ID NO: 265482 - DNA, 83 bp, Homo sapiens
ccctgatacaggccaatgtgaccgtggggacttgctcgggcttttgttcccagaaacctcctgctcttcatggatgaagcaga

SEQ ID NO: 265483 - DNA, 101 bp, Homo sapiens
gccgccaccgtctgaactaggatgtcccgacatgaagccgtgttgaaatccttgtctcctgtagacccagtggaacccataagtaattcagaaccatcaat

SEQ ID NO: 265484 - DNA, 50 bp, Homo sapiens
aaggattccaagtaactcttatttggttttcttccacccctgagatggca

SEQ ID NO: 265485 - DNA, 82 bp, Homo sapiens
cccggcgctctcctggctcccttctgccccagctccgtctcggcggcggcggatgaaggatttgggggcagagcacttggca

SEQ ID NO: 265486 - DNA, 97 bp, Homo sapiens
accgccggcggggagagaagcggatcccgtccgagccccggccccaagtaacgccgccgccccggagccgccgtcacagggattatggacccagaac

SEQ ID NO: 265487 - DNA, 82 bp, Homo sapiens
cgtcaatcagagcgtcctgtgcgagaagatggcgaattagaagatggtgaaatagacgatgcaggatttgaagaaatacaag

SEQ ID NO: 265488 - DNA, 100 bp, Homo sapiens
cgccagcctccgggagaggagccgcacccggccggcccggccccagccccatggacctccgagcagcttcggaaccaaaaagaagcttcccagagccggg

SEQ ID NO: 265489 - DNA, 75 bp, Homo sapiens
catcaggacggaagcacaggggccactcagagtcgcccgagaaatgcctgaggaaacccagacccaagaccaacc

SEQ ID NO: 265490 - DNA, 80 bp, Homo sapiens
aggggaagaaaagaaggggaagaagatcaaaacccaccatgccccaggttatcaatactctggctgaccatcatcatcgt

SEQ ID NO: 265491 - DNA, 82 bp, Homo sapiens
tgaaatatcagattcagaggatgacagttgcaaaagcgatccaagcagcggaagttacagcagaaggccttccgcaagaggc

SEQ ID NO: 265492 - DNA, 51 bp, Homo sapiens
cctgctgctactgtgtccagcgcaggttgctatcaagatcatagataagac

SEQ ID NO: 265493 - DNA, 101 bp, Homo sapiens
aggcaagccccctgtttctactcttgcgccccctgctggtttcctgccctgtctatcaggcttcagctgtgggatactgcgggtcaggaacgtttccgtag

SEQ ID NO: 265494 - DNA, 83 bp, Homo sapiens
ccaaggcccctccggccagggccgggagccgggccggcctagccaggtcaaaatgcagatcttcgtgaaaacccttaccggca

SEQ ID NO: 265495 - DNA, 100 bp, Homo sapiens
ccgagaccgtgaccgagagcgtgaccgagagcgcgaatatcgtcatcgttagaagggtgctggaaatgtaaacaagaatagactgttcattcctgatggc

SEQ ID NO: 265496 - DNA, 75 bp, Homo sapiens
caggcgaacccgcggcgcaataacgaaaaatggctacaaacttcctagcacatgagaagatctggttcgacaagt

SEQ ID NO: 265497 - DNA, 90 bp, Homo sapiens
cgtatttaaatcgctgtctccaagtcctttttccaccagctcagatagcacagactttagaccaagatcactccatggatgaaatgacag

SEQ ID NO: 265498 - DNA, 76 bp, Homo sapiens
ttggaagatgccatcggatgcatggaggccaaccagtgacgagtagcacagcccctctatggtttagatggcagtg

SEQ ID NO: 265499 - DNA, 75 bp, Homo sapiens
ggagatcaaagagattgtcaaaaggttgcagggggaagcgagtagcattatctgatgatgagacaaaggaaactg

SEQ ID NO: 265500 - DNA, 100 bp, Homo sapiens
tcaaggagatcggcctcttgaaggaatatcagaagctctttcctgacattcccatagggtattctgggcatgaaacaggcatagcgatatctgtggccgc

SEQ ID NO: 265501 - DNA, 99 bp, Homo sapiens
ggctgctgctgctgctgacgctgctgctgcccggcctcgggcaaaatgatgcttcaacacccaggccaggtctctgcctcggaagtgagtgcttctgcc

SEQ ID NO: 265502 - DNA, 73 bp, Homo sapiens
ggggccatgtgcaggaccctaacgacaggcgcctccggcccatttacgtcctagcctccagcttggtgtataa

SEQ ID NO: 265503 - DNA, 75 bp, Homo sapiens
gtggatccaggaactggcataggtgcactcagcaacgccattgccgaaatctaaaaaaacttgtagcaaaggcag

SEQ ID NO: 265504 - DNA, 74 bp, Homo sapiens
caatgtggggcttttcgaccagcatttccggctgacggagtgttctgccagttctggataatccactgtccaag

SEQ ID NO: 265505 - DNA, 50 bp, Homo sapiens
gttttcctgaaggccaagacccgggttgaagtcaaggaccaacaaagcaa

SEQ ID NO: 265506 - DNA, 100 bp, Homo sapiens
gtcatggagggagcaggagctggatccggcttccggaaggtgctgcagggtgcacagctgatcgccgtggcctcctcggaccccgcggcggcgggcgtgg

SEQ ID NO: 265507 - DNA, 51 bp, Homo sapiens
ggaagtgttacggctcggaggcaccaaggttggaagcgaagtggaagcact

SEQ ID NO: 265508 - DNA, 75 bp, Homo sapiens
gaaggatgtggactgcagtgctgcagtgccagagaacctgcagttttggaggatttgacttgacgaatcgctctc

SEQ ID NO: 265509 - DNA, 75 bp, Homo sapiens
tggcgcagcctccctctattaccaggaggctactcacagtcgaactacaactccccggggtccggccagaactac

SEQ ID NO: 265510 - DNA, 100 bp, Homo sapiens
catgatgatgcagtcagggcgcaaaggaagtgtcagctgtgatgcatgtttaaaaggaaattttcgaggtcgcagatataagtgtttaatttgctacgat

SEQ ID NO: 265511 - DNA, 75 bp, Homo sapiens
gtccctgctgtgcacctgggggtacaggcaaaagtcaacaactctagcttaattggagtaggctatactcagact

SEQ ID NO: 265512 - DNA, 100 bp, Homo sapiens
cggcgggactcacggcagaagtgagctggaaggtcttggagcgaagagctcggaccaagcgctcagtcgagttgaactgaaaagattatgtgaaattttc

SEQ ID NO: 265513 - DNA, 100 bp, Homo sapiens
gcgcctcaatgaccggattgagatgtggagttacgcagcaaagcaaattgctatcactgctgggtgcaaaaccaccacctctgctgtcatggttcactgc

SEQ ID NO: 265514 - DNA, 142 bp, Homo sapiens
aggaggcggcaagcccggctgcagaaagagcttgcagaagcagcaaaggaacctctaccagtcgaacagattttaaacaagctgcactgataagccggactaacgggagcctttgtcacgccactgccatgtgccatcacag

SEQ ID NO: 265515 - DNA, 98 bp, Homo sapiens
gtgcctgtggcagtgactttcttggatcgggtcgcctgtgtggcaagagtagaaggagcatcgatgcaggtttagcagtttccttacagctattgcac

SEQ ID NO: 265516 - DNA, 90 bp, Homo sapiens
gcaaatccagacagaacctttgacttggtgttgaaagtgaaatgtcatgcctctgaaaatgaaggttacctacctgggcaaagtctccac

SEQ ID NO: 265517 - DNA, 100 bp, Homo sapiens
cgctggggagcggcatgtcaccatcactggctctccggtctccatcgccctggcccagtacctcatcactgcctggtctcctctgagcctccggcctcca

SEQ ID NO: 265518 - DNA, 100 bp, Homo sapiens
ccatggccttcgtcgggggtttggtgggcggcccaccgggactcgccgttggaaatggcccgccagctgctggcagtgtttggcggctactacatccggc

SEQ ID NO: 265519 - DNA, 74 bp, Homo sapiens
ctatcatcccagcagtggagttcagcccactactctgaaccaggttttaaaatcaaagatgggaaaatcggaga

SEQ ID NO: 265520 - DNA, 74 bp, Homo sapiens
cacggagctgaaggatgaccaggtcaaaaagatctctggaaacatggctacagaacatgttaatggaaatggta

SEQ ID NO: 265521 - DNA, 90 bp, Homo sapiens
ggcaccttcacctccctgctgctgctggcgtcgacagcttgtagtgaacaggactctgagccaggggcccggcttacctgccgcatcctc

SEQ ID NO: 265522 - DNA, 74 bp, Homo sapiens
ccgcttcaaccccaggggaccagaggaactcagccctgattgcgtttatgggaaaaacagatggagactattac

SEQ ID NO: 265523 - DNA, 80 bp, Homo sapiens
cgtggtgtgtccttcctgaccttccacctccaccaggtatagtcgtctccccctccaccacggcaagtcctgcagaggga

SEQ ID NO: 265524 - DNA, 90 bp, Homo sapiens
ctgggagctgaggaaccagatatcttgaaaagctgccagaaagaaatgaccatggttgacacagagatgccattctggcccaccaacttt

SEQ ID NO: 265525 - DNA, 73 bp, Homo sapiens
tttggatgatgatggatccatttctcctattgaggagtcaacgttttgcagcatttggacaaacaaagccagt

SEQ ID NO: 265526 - DNA, 74 bp, Homo sapiens
tagaacaagtggtactaggattatacattgtaagaggtgacaacgtgttggatggcaagcatgtggtgtttggc

SEQ ID NO: 265527 - DNA, 90 bp, Homo sapiens
agctagacctgcagagtgaagaaagctggtaatagatgtctgacaaactaaagaaagacttgtgttacgaagatttccaacccgcagcag

SEQ ID NO: 265528 - DNA, 95 bp, Homo sapiens
ggtcacctgtctggagcaaataaaagagccctgcaatttgaagatacatgagacagcagccaaacccccagttgaatggatcgcagcagttacca

SEQ ID NO: 265529 - DNA, 144 bp, Homo sapiens
ggaaaggacaaaaaaattcctggaaaaagaagtccaagaagcaaaaaagggactgctaagaagataccaccaggtgattcgcaaggggtggctcaccatcagcaacattggcatcatgaaaggcggctcgaagggatactggtt

SEQ ID NO: 265530 - DNA, 75 bp, Homo sapiens
aacagctgttgtactatctacagaaccgccgtgattcattgtcaggaaaagggtttcgaaaaaacgatgaaatga

SEQ ID NO: 265531 - DNA, 74 bp, Homo sapiens
ccccgccatgaatgaggagtacgacgtgatcgtgctgggcaccggcctgacggccgagacgcatccagagcttt

SEQ ID NO: 265532 - DNA, 101 bp, Homo sapiens
tgactggaaactgattggaaactctttgggaaagccactcgaaaagttggagtcattcgttgcccagtttgcagccaagaatgtgcagagagacacatcat

SEQ ID NO: 265533 - DNA, 100 bp, Homo sapiens
cgattgcatgaggatgctgaggctgtcctgtcctcgtccgtctcatcaaaggctggcaggcgctggtgggcgcaagaaaattttccgtctcagcgacgtg

SEQ ID NO: 265534 - DNA, 97 bp, Homo sapiens
gcttatcaatgttatcgtgcctctagcaaaaagggtggacaagttccggcagttcatgcagaatttcagcctgtgcacgtcgggcgtagttcggctt

SEQ ID NO: 265535 - DNA, 51 bp, Homo sapiens
aaatcaatgtcagcccaacaacttacaggtgtgatgaatgcagactctgct

SEQ ID NO: 265536 - DNA, 82 bp, Homo sapiens
ggggccgctctgggatcccggccaccagcaattgtccgatgaggacggggacttggttgccttttccagtgacgaggaattg

SEQ ID NO: 265537 - DNA, 98 bp, Homo sapiens
atctcgctcggctgcgggaaatcgggctgaagcgactgagtccgcgatggagtgccctatagaatggttccattatggctgcgttggattgacagagg

SEQ ID NO: 265538 - DNA, 75 bp, Homo sapiens
aatgaattgaatcttgagacgggtcctcaccagaccaaaggtgagaaggtgcggactacagagactcaagtgttt

SEQ ID NO: 265539 - DNA, 51 bp, Homo sapiens
gaggaccaggatgctgccttcttcaagttgctgatgattcctctgatcatg

SEQ ID NO: 265540 - DNA, 101 bp, Homo sapiens
cacaccatcactggaagcaatgaggacagcttgtgaaggcgctaaggcacatatactcaggggtcctcataaacagaaaactttagaaactgttcctttgg

SEQ ID NO: 265541 - DNA, 74 bp, Homo sapiens
ggagtgcgtgggggaccggctgttggcggctgcctgtggaggaaccgattgtgtccacagatgaggtcatcttc

SEQ ID NO: 265542 - DNA, 50 bp, Homo sapiens
ggcgccgtcgcgccactcctccgaatcatcacgaagtatgtatatgagct

SEQ ID NO: 265543 - DNA, 75 bp, Homo sapiens
gctgctgagtggtgacagtagcccagcccgccggccagtcaccaggagactaaagtccatcaaaaacatccagaa

SEQ ID NO: 265544 - DNA, 90 bp, Homo sapiens
aggacacccctgaagccgagaaatgagatcctgaaggagctagacgagtgctacgagcgcttcagtcgcgagacagacggggcgcagaag

SEQ ID NO: 265545 - DNA, 75 bp, Homo sapiens
aagaaggttaagctggctgtcctgaaatattataagtactatactggcaattgctggagaagattttgcaattgt

SEQ ID NO: 265546 - DNA, 75 bp, Homo sapiens
cagcacgcctgggccgggggctgcagcatggtgtccctggccagtgtccttccacctgtccacaagcatggggaa

SEQ ID NO: 265547 - DNA, 50 bp, Homo sapiens
atcttcctttgaccacgttatcaaggaggatgcagaaaatgcgattgtgc

SEQ ID NO: 265548 - DNA, 89 bp, Homo sapiens
cccccgctcccggggtccccggccggccaagcagaggtccagcaccccatcctcgcccactggcacgtcatcctcagactcgggaggac

SEQ ID NO: 265549 - DNA, 51 bp, Homo sapiens
cagcaggaaacagttacttgcagtgagacctcgctacagtggtccagcacc

SEQ ID NO: 265550 - DNA, 88 bp, Homo sapiens
cttatgctgactacgaatctgtgaatgaatgcatggaaggtgtttgactttacgatgcaaattatactttgacaacttactatctcag

SEQ ID NO: 265551 - DNA, 83 bp, Homo sapiens
cagcctgcagcggagcccacgagaggcagcgccatggcggagcagacctactcgtggttttgagcaaaattttggactgtgaa

SEQ ID NO: 265552 - DNA, 98 bp, Homo sapiens
ttcagaggcccaaattgaggcgcaatgatgagaggatgtggtggtctactctgatgtcaatcttgagggctagggcaataaatgtgttcgtaagtgcc

SEQ ID NO: 265553 - DNA, 95 bp, Homo sapiens
gcccacggacaccacctcaacgtcacagaagatcttattagacggaatgctgaacacaacgactgtgtcattttttccctggaggaactctcgtt

SEQ ID NO: 265554 - DNA, 78 bp, Homo sapiens
ctgccaagagacatgttagaaggacaagcacaacagcaacgccatgaaagagacttggccctcttgaaactaaaggct

SEQ ID NO: 265555 - DNA, 101 bp, Homo sapiens
gaaacatcagttgaaacatagggaactctttttgtcacgccagtatgaatctctgcccgcaacacatatcagctgtcaccactgactaaagaagagaaaac

SEQ ID NO: 265556 - DNA, 75 bp, Homo sapiens
cagcacctttcggcttctgagacggcggcagcagcggcattcaggcttgcttccggcgtcatggctcaaagggcc

SEQ ID NO: 265557 - DNA, 80 bp, Homo sapiens
tgggcgcccagcacgactcctcgggcagcctcaacgagaactcggagggcaccggaggtgcagcagtaccgcgtcgccat

SEQ ID NO: 265558 - DNA, 97 bp, Homo sapiens
gccaaccatgctcaacttcggtgcctctctccagcagactgcggttttaaaatcaaagatgggaaaatcggagaaaattgcccttccccatggccag

SEQ ID NO: 265559 - DNA, 95 bp, Homo sapiens
catcgacttcggttcgggtgcgctgctcaaggacacggtctacaccgacttcgacggggaacgcccttttgcttgtgactggcagggctgcgaca

SEQ ID NO: 265560 - DNA, 101 bp, Homo sapiens
agcctcctgagtagccgggattacagttggaagctgaaggtgttcctgaagtatctgaaaaatatgaaattagctctgttcccacttttctgtttttcaag

SEQ ID NO: 265561 - DNA, 101 bp, Homo sapiens
cacacattgcgcagtcgggaccatcgccggagcctgaggacacttctctgtcgtcacagtggatcagtacaagggaaagcgggatttggagtcactgaggg

SEQ ID NO: 265562 - DNA, 100 bp, Homo sapiens
aggtctgcgttgctcttgcttttcctcgctggggtgtacgacctggaatggccaaatatcaaggtgaagttcaaagtttgaaactggatgatgattcagt

SEQ ID NO: 265563 - DNA, 58 bp, Homo sapiens
gagacttgaagttgcactcaaggaggccaaagaaagtctctagtgatccctgaaaagt

SEQ ID NO: 265564 - DNA, 90 bp, Homo sapiens
cggacggcacaccctacgttaccgtgctcaagcgcctgaagggaaacgatcctcaggcctgacagccgtttgggtcgctcgaaatcggtt

SEQ ID NO: 265565 - DNA, 100 bp, Homo sapiens
cttcccaggtcctcaactttgaagagatcgactacaaggagatcgaggtggaagagggaattgcaacccagtgaagaagttacctggaagtaaagactgg

SEQ ID NO: 265566 - DNA, 83 bp, Homo sapiens
gccaaccatgctcaacttcggtgcctctctccagcagactgcggaacaagatcactcaaggtgaaggataatctactaatacc

SEQ ID NO: 265567 - DNA, 100 bp, Homo sapiens
gaaacagttcatccgctacctcatctcgtccaacgtcggggaagttgtctggatgaagcctgctgggagcgtgaatgacatggccctggatgccttcgac

SEQ ID NO: 265568 - DNA, 75 bp, Homo sapiens
ggagaagatggattaggaggcgcctctcttccctccccgcgtcaaaggccttgtacagctccatcaagaatgaga

SEQ ID NO: 265569 - DNA, 111 bp, Homo sapiens
gaccctggagcctcagttggaagcagccgatccagcctgcggagcctgtggggcaggactccagaagacctttccagattcgtggttgagctgcagcagagggagcttgcc

SEQ ID NO: 265570 - DNA, 100 bp, Homo sapiens
ctcctacacctacctctctctggcaggtgacagcagggacatgtctcgggagatgcaggatgtagacctcgctgaggtgaagcctttggtggagaaaggg

SEQ ID NO: 265571 - DNA, 100 bp, Homo sapiens
agaagggctatgaaaagaaaaggtccaaactcctatctccttacagcccgcagacacaagcaaaccagtccagctacgggggcccagccagccagcagct

SEQ ID NO: 265572 - DNA, 100 bp, Homo sapiens
ggacagaggtggctttggccctggcaagatggattccaggcaactttggctttggggattcacgtggtggcggtggaaatttcggaccaggaccaggaag

SEQ ID NO: 265573 - DNA, 75 bp, Homo sapiens
ccgggccggaaggaacagacccctgtagcggacagaatgttgctgcgggatgtaaaagctcttaccctccactat

SEQ ID NO: 265574 - DNA, 100 bp, Homo sapiens
gtcttcgtttgttatggccgctgctgtcgctatggagacagtaactgagggcaaacccatcagacaaccagagccataatttgtggtcaccgctgaaatt

SEQ ID NO: 265575 - DNA, 100 bp, Homo sapiens
ccactcacccgcagactccttctccagcatgggctcgcctgtcaacgcgcagaaagacgagaatccaggacttgaatcgtatcttcccactttctgagga

SEQ ID NO: 265576 - DNA, 51 bp, Homo sapiens
tgctcatggaagatccaaatccggtagtaccgttgtcagcacacagcgttc

SEQ ID NO: 265577 - DNA, 75 bp, Homo sapiens
tggtttttctacgcattgattccatgtttgctcacagtgtaaacaggaacatcgataagtagtgtaaaaacttgc

SEQ ID NO: 265578 - DNA, 100 bp, Homo sapiens
ctgatgctaccaaaggtggaaagtcctgaagaaatccagtgggaaactgttaaggcagcaataatagaagagcagaaacgaagtgaaaaggctgtggaag

SEQ ID NO: 265579 - DNA, 100 bp, Homo sapiens
cctcttacatcatgggcgacttcaggaacagccataggtttttcgttggaatatacgttgcacatttatggcgattctgagtgtgagggcagacttctgc

SEQ ID NO: 265580 - DNA, 75 bp, Homo sapiens
tatcaagtcatattatacagtgcgacagctagaattggaaaaccttacagctgctgagtcactcagaaatccttc

SEQ ID NO: 265581 - DNA, 99 bp, Homo sapiens
gccctgaggctgcaccaagtggcgaaggagccggctccaagcagggtttccaggcctgaggtgcccgccctggccccaggagaatgaaccagccgcaga

SEQ ID NO: 265582 - DNA, 99 bp, Homo sapiens
aaagtgctgggattataggcgtgagccaccgtgcctggctgaaggcgttcaatgtcatcaatggcggttctcatgctggcaacaagctggccatgcagg

SEQ ID NO: 265583 - DNA, 74 bp, Homo sapiens
aaggaagaaattagaccagatgagaagtcaagatctgggaaaactgcagcatttcttttacccatactgagtca

SEQ ID NO: 265584 - DNA, 82 bp, Homo sapiens
ggcgctgctggcgctctggctgtgctgcgcgacccccgcgcatggtttttgactaaaggccagaatgcattggtagagctac

SEQ ID NO: 265585 - DNA, 99 bp, Homo sapiens
cttgtccacacagagttcctgtacaaggttcctgacctgtgtactatactggcaattgctggagaagattttgcaattgttgcttctgatactcgattg

SEQ ID NO: 265586 - DNA, 90 bp, Homo sapiens
tggacaggtttacacagaagccaggattgtcaatgaggcagatcagattccgatttgacgggcaaccaatcaatgaaacagacacacctg

SEQ ID NO: 265587 - DNA, 103 bp, Homo sapiens
gaacttcaccagtgacccagtcagtgcccttcagttaaagaccaccaggagcacacttctgggaaaacggcaatggattaataacaagaaattaatggtgaag

SEQ ID NO: 265588 - DNA, 100 bp, Homo sapiens
ggtcttcgccaagatgaagggctacccgcactggccggcccgggtagcagtagctgatgtgcagtttggccccatgagatttcatcaagatcaacttcag

SEQ ID NO: 265589 - DNA, 99 bp, Homo sapiens
gggagagccactgacgccgggaccgggaccgccgccgccgccgccaccatggagcagtctcacaggtgctggacagcctggaagagattcatgcgctta

SEQ ID NO: 265590 - DNA, 100 bp, Homo sapiens
gtcttcggtggactccttcggcagtccacccaccgccgccgcctcccaggtgcgcgcggagccatggttatcatgtcggagttcagcgcggaccccgcgg

SEQ ID NO: 265591 - DNA, 100 bp, Homo sapiens
gtacaactaccgctgctggaccacaaaccgctgccagaaaacgacatcaccccgcccggagagcctgtgaacagccggcccaaagcagcttcccgcttcc

SEQ ID NO: 265592 - DNA, 83 bp, Homo sapiens
aattgtagctgacgaagcattttgcaacgcagttcggagttattatgagagctgaactagagaaacatggttataagatggag

SEQ ID NO: 265593 - DNA, 83 bp, Homo sapiens
gcctggttaatcaacagtcttttcagaaagttcgtcgctgcttcctgtgctccaggagaggacatctcctgtattcctgtcca

SEQ ID NO: 265594 - DNA, 99 bp, Homo sapiens
ggctgctgcaggccatcgacccccagagcaacgctttgtccagggatctgaaaccactttgcagtcgacatactcggataccagcgctcagcccacctg

SEQ ID NO: 265595 - DNA, 75 bp, Homo sapiens
cagccgcggatctcaccgccgctcaggcaatggctgccatccggaagaaactggtgattgttggtgatggagcct

SEQ ID NO: 265596 - DNA, 87 bp, Homo sapiens
gccgttagtcccttaatacaaaggatccatccttttacaatccctgctattattcgtccattcagcgtattgaactatgatccacct

SEQ ID NO: 265597 - DNA, 100 bp, Homo sapiens
aggaaacaacaagaatttcatattttacttttattggtactccagtccaggcaacaaatatgaatgacttcaaacgagagtgcctgtgaagaaaacgggg

SEQ ID NO: 265598 - DNA, 101 bp, Homo sapiens
cttggataaacttggagaaccaatgcaaatagtacggtattccgaacagacactaaaaatagctgtcatctcaaagaatccagtgcttgtgtcacagtatg

SEQ ID NO: 265599 - DNA, 74 bp, Homo sapiens
ctacggtccgcggctggggttccctcctccgtttctgtatccccacgagttcttcctgtccaagatccggtccc

SEQ ID NO: 265600 - DNA, 75 bp, Homo sapiens
gtcccgagagcatcattgtcgccagtatcacggcccgcaagccgctgccaagcccgacggccatggaggctgaag

SEQ ID NO: 265601 - DNA, 100 bp, Homo sapiens
aaacaacactaagaaatttggatgggttaaaaagcctgttctcagcccattggaaggcaccaagatgactgtgaataatctgcaccctcgagtcactgag

SEQ ID NO: 265602 - DNA, 73 bp, Homo sapiens
tcgccctggagaagtaccaggaggctacggaaacaggccgagaagaacgtggagaagaaaattgacaaataca

SEQ ID NO: 265603 - DNA, 80 bp, Homo sapiens
gtggccgtggggagaccgtctgagtccaaaactacttacctggaagaccttccaccaccccctgagtatgaattggcccc

SEQ ID NO: 265604 - DNA, 100 bp, Homo sapiens
ggcgactagcggcggcgggagcggcgccgagaggccgtgcgggacgcgggcgccaggaccggccgaacgcagagctggctactccaagaccctggcatga

SEQ ID NO: 265605 - DNA, 102 bp, Homo sapiens
tacaggattggagtgggggcacccgtgtacatggccgccgtcctggaatacctgacagcaactttcatcctttgaaacgtgtgctgaaaaagaagaatcagc

SEQ ID NO: 265606 - DNA, 90 bp, Homo sapiens
gacggacgttgagagaacgaggaggaaggagagaaaatggcgtccacgggtcaaaatgcagatcttcgtgaaaacccttaccggcaagac

SEQ ID NO: 265607 - DNA, 100 bp, Homo sapiens
aagcctgtctgaagtgcagtctctgagctccttccagtccgaatcgtgcgatgacaatgatctgggacttggctagtggcaaattaaaactgtcattgac

SEQ ID NO: 265608 - DNA, 100 bp, Homo sapiens
aaattcttaaaaaggctcagaaagatggatttttgcatgagacgcttctggacaggagttcaaagaaggacgcagagccagccacacagccccacaggtc

SEQ ID NO: 265609 - DNA, 106 bp, Homo sapiens
gtgattgagcagtttgaagacttgctagttaggattttattactggcagcatgtatatcttttacactacaacaacaggagtgcaaacttctctacagccgaaaag

SEQ ID NO: 265610 - DNA, 75 bp, Homo sapiens
ttctggccgaccctcgccttccttctctgcagcttccccgcagtctgcgggccaggcatcgacatccgcaacgac

SEQ ID NO: 265611 - DNA, 99 bp, Homo sapiens
cggagacgtgggagcgttctcttgttttccgagtgcgcggactcatcgggtcacagtttatgcttttatgacgcgggttgtggagttgctcagtgcttg

SEQ ID NO: 265612 - DNA, 100 bp, Homo sapiens
gccctggcccgtcatggagatggaaaaggagttcgagcagatcgacaagtccgggagctgggcggccatttaccagagctacttcctcagccgagcccag

SEQ ID NO: 265613 - DNA, 90 bp, Homo sapiens
cttggcctcggggtctccctacaccaacggtgctggagaatctggtaaaagcaccattgtgaagcagatgaggatcctgcatgttaatgg

SEQ ID NO: 265614 - DNA, 75 bp, Homo sapiens
agtcgcctccaggccaagagggatccttcacccgtgtctgatcaatgcaatgtcccggaatggcttccatttgcc

SEQ ID NO: 265615 - DNA, 73 bp, Homo sapiens
ggaatcacggcactcaccctgtgccctctgatctggagagcatctaccttcaggacagccttcccagcggccc

SEQ ID NO: 265616 - DNA, 96 bp, Homo sapiens
tgcaaggagaaaattttggtggagaattatccaacaagaaaaagacctgtggctattaagataggtaagaatgattgatgttggctgatattggag

SEQ ID NO: 265617 - DNA, 82 bp, Homo sapiens
tgttgcttctgggccagaggaagagaatgaggctgcctgctgtttcccggggagatcatgaaacgaggtcgccttcccagca

SEQ ID NO: 265618 - DNA, 75 bp, Homo sapiens
tttgtctttgaaggcatgttgagtgagcaagtgaagaccaatattcaacaggcacacgctgcagacttggaaaag

SEQ ID NO: 265619 - DNA, 90 bp, Homo sapiens
cctccggccttgtgtgtccgactcggcagcagtgccccccaggttcgcctaatagtcttggctacttccctacagctgctaatcttagcg

SEQ ID NO: 265620 - DNA, 100 bp, Homo sapiens
tttgctacagcatcccacattaagtcaacgacaatagattttgaaggtttcaaactattcatgaagacattcctggaagccgagcttcctgatgatttca

SEQ ID NO: 265621 - DNA, 100 bp, Homo sapiens
gaaacatattccgtggtgtatctgtacagcagtttcctcatccctgcagctgtgtttgaacaggtgttacacataatattgcattacttcgagaggtgat

SEQ ID NO: 265622 - DNA, 100 bp, Homo sapiens
atgtgaatgatagagatggattgacagatatgactcttttacattatacctgcaaatctggagctcatggtattgatgtctcacgcagccaccagtgcct

SEQ ID NO: 265623 - DNA, 75 bp, Homo sapiens
agggattgggaaaatctcttcagggcttcagggatgacttcttagggggcaggggaggtagtcgcccaggcgacc

SEQ ID NO: 265624 - DNA, 74 bp, Homo sapiens
cgggttttggaggctggcaagattgggatatttgagagtccaactggcactgagagaagatgactgaggaggag

SEQ ID NO: 265625 - DNA, 87 bp, Homo sapiens
aggaactgggcgccggcgcttacagcatgaggatttttagactctgaggagcagttggagctaatccacattatggaaatggaaacc

SEQ ID NO: 265626 - DNA, 97 bp, Homo sapiens
gaggtgacaacaataacaagactgtccttcggacaagttttagaaatagccaggcaagcagcacaaataaagcttttgagaaaacttcaaaagcagg

SEQ ID NO: 265627 - DNA, 100 bp, Homo sapiens
gtcggactcccgcggcgggaggagcctgttcccctgaggggatgaggccagaactgagaaggaaggattaactccaaaggatcatgtgtccaaagaaaca

SEQ ID NO: 265628 - DNA, 100 bp, Homo sapiens
gagcggggcccaacatggcggagagagaggtggagtccggcccccgaaagaggcattcctctgaatattgatttgctgaatagcccagacttattggaag

SEQ ID NO: 265629 - DNA, 71 bp, Homo sapiens
ctgatgagtggaccaagtgaagttaaagccttccatctgaagtatgatgaagttcgtctggatccaaatgt

SEQ ID NO: 265630 - DNA, 75 bp, Homo sapiens
gccagactcagggatcaaagagcaaacagattcagtggcctgcattggttagtaggagggctgctttccctcagc

SEQ ID NO: 265631 - DNA, 100 bp, Homo sapiens
gccggctggatgggaagttaatgtttacggcgaagtctactcaacgtttccaagtgccggtggtggtgtgcacattgagccccggtatagacagttcccc

SEQ ID NO: 265632 - DNA, 98 bp, Homo sapiens
cggacatgctgggtggatccggatcgcatggaagacgcagcctggccgcgctctcccagataaaagaatcagagtgtctcaacccttgacaagaggac

SEQ ID NO: 265633 - DNA, 96 bp, Homo sapiens
ctaacttctactgacgaagcttggaagttgcagaagcactgctcagcacgcaggcatgtgaggaagctgggcttaaaggagactccagcaaatgga

SEQ ID NO: 265634 - DNA, 82 bp, Homo sapiens
gaacagacaagcaggttgtcttggaggagacacccctgtttctggccgcccgggagggcagctacgagaccgccaaggtgct

SEQ ID NO: 265635 - DNA, 83 bp, Homo sapiens
aggttgagcccagtgacaccatcgagaatgtcaaggcaaatactcctgagctcaagaaatcagtgtcaatgctttctctaaat

SEQ ID NO: 265636 - DNA, 98 bp, Homo sapiens
gttcctgctgccctcaaggtcgtgcgtctgaagcctacaagaaaggtatatgtggatattcctggagctatggatttatttcttaatttgccacttgt

SEQ ID NO: 265637 - DNA, 73 bp, Homo sapiens
tattggacaaatttggtggggagcataatccaccatcaatatatctggagggagagcttatggatggagacca

SEQ ID NO: 265638 - DNA, 82 bp, Homo sapiens
atgaacaactcgggcgccgacgagatcggatgtccagctcgccgctgtccaagaaacgtcgcgtgtccgggcctgatccaaa

SEQ ID NO: 265639 - DNA, 75 bp, Homo sapiens
aactcctctttacttgctgtcagctgcggagtgcattccactcttcgttcaacttgttttggagagattaactcg

SEQ ID NO: 265640 - DNA, 83 bp, Homo sapiens
cccgatttctatttgactggcaatagtctggctgtgtgggtatccccccttctactccaaccacggccttgccatctctccgg

SEQ ID NO: 265641 - DNA, 100 bp, Homo sapiens
ggccatgctccagctgacaacaggaggagaaacccagcagcagattcaagcagctatgggattcaagattgatgtaccaagggaagaacacctacctgga

SEQ ID NO: 265642 - DNA, 90 bp, Homo sapiens
atcagagagatcatactcccaagaacaggctttgacccttctttaaaaggccccttcccagctgcctgcctgccctagccagctcccagg

SEQ ID NO: 265643 - DNA, 100 bp, Homo sapiens
tggtggactgtgcagatcattctcgcctcgtggaatccaaagttgagcttaatgagcgcctggaccatgctgctgagcgcctactggcacggcctccacc

SEQ ID NO: 265644 - DNA, 100 bp, Homo sapiens
tgacctatctgacaagagcatcaaccctctgagtaattccctcctggtcccagacagtctaagaggcacagataaacgcagaaatggacctgaattttcc

SEQ ID NO: 265645 - DNA, 82 bp, Homo sapiens
gagacccgagttcatcgcctacccccatctccgcatcaggaccaaggaaaatcaggaaaatgtttccaacctggtgattgag

SEQ ID NO: 265646 - DNA, 75 bp, Homo sapiens
attgactgggctggcgttaactgtgcggaggcagacaccattcgcttttcacccaagatgatttgatgtcttata

SEQ ID NO: 265647 - DNA, 94 bp, Homo sapiens
gtgggagcaaaaccaacgcctggctcggagcagcagcctctgagggtggcccagttgaaatccttcccttcctctaccttggaagtgcctacca

SEQ ID NO: 265648 - DNA, 97 bp, Homo sapiens
tgatgacagagtatgcaagagtcaccttctcaactgttgtcctcatgatgtcctttctggaacttagaacttcatggaggaacacggagtgacccaa

SEQ ID NO: 265649 - DNA, 98 bp, Homo sapiens
aaattcctttggaagttattccgtagcataagagctgaaacttcagagcaagttttcattgggcaaaatggggtatgccattgcattggccttaaggg

SEQ ID NO: 265650 - DNA, 100 bp, Homo sapiens
ccatcaggggccttgataacacagagtttcaagaacatgatgagtgtatcacaaatcagcacaactgtgatgaaaatgctttatgcttcaacactgttgg

SEQ ID NO: 265651 - DNA, 95 bp, Homo sapiens
gataagaagcccatggtggacgcccagcacttcctgccggccgaactaaagatgactcagagccatctggagaagaaacagtagaaaggacaagg

SEQ ID NO: 265652 - DNA, 96 bp, Homo sapiens
cctgagccgcccctacacccacagaccaaggatgccctcttcacaattctccatgacctccgaccccaggaccgtttcagtatcattggattttcc

SEQ ID NO: 265653 - DNA, 100 bp, Homo sapiens
cgaaggccctatcaggacatggagtatgaaagacgatttacagccagttacttactcagaacctgcattttggtgttcgatagcatattatgaattaaat

SEQ ID NO: 265654 - DNA, 83 bp, Homo sapiens
cgcagcaccgcagccttgggcctcgcgccggctatggccgtgccctggggctgagccctcagccctttcccagtctgcctgga

SEQ ID NO: 265655 - DNA, 75 bp, Homo sapiens
tttctccgcctcagcccaacggggaggcccagggccccggccagtgcccagccccgctgggagacccggccagca

SEQ ID NO: 265656 - DNA, 75 bp, Homo sapiens
aggttagcagtagactgttggaagtaagaattaaacaaccaccatgtcgagcaaaaaggcaaagaccaagaccac

SEQ ID NO: 265657 - DNA, 80 bp, Homo sapiens
caattgccatgcacacttctggctccctgtgctgtcaggaatctacaggacttggctcgtatttacattcgacgcacact

SEQ ID NO: 265658 - DNA, 85 bp, Homo sapiens
ccgtcaaaagagtcggactcaggcccttaagcaaaacgggaggaagcactgaaacaacacaaaaccctatctcaagaacttgtta

SEQ ID NO: 265659 - DNA, 100 bp, Homo sapiens
caattaataaagacccagaagctccaattttccaagtggcagattatggaatagttgcagatttatttaagttctcaaaagtctatggtcctgtgttcac

SEQ ID NO: 265660 - DNA, 97 bp, Homo sapiens
gaaggcttggctggtgttttggaagctgatcttcctaactacaagagcaagatcttaaggcttctttgtacagtatgtatcggcaagcagtgtaaac

SEQ ID NO: 265661 - DNA, 83 bp, Homo sapiens
tccatcatctccagccagagggagcgcttccgtgcccggaaccaggagcttgaggccgatcaccattaacaaggacaccaagg

SEQ ID NO: 265662 - DNA, 100 bp, Homo sapiens
ccagagagcccaacgcctggtgctcaagactttctccgaggccgactgcagcagtggcccagggcaaagagtgtgcgtcatcgatgagattgggaagatg

SEQ ID NO: 265663 - DNA, 100 bp, Homo sapiens
gatgaaagtggaaaatccaaaggatttggatttgtaagctttgaaaggcatgaagatgcacagaaagcgccggctctgcagcagtaccgcactagcgccg

SEQ ID NO: 265664 - DNA, 100 bp, Homo sapiens
ggatgtcggcgaagccgcgggcgaggcatgacagcaagcgctgtggcggctttgatcctcatgacgtcctccatcatgtcggtcgtggggtccctgtacc

SEQ ID NO: 265665 - DNA, 82 bp, Homo sapiens
aatcttctaattcttggaaaaattctgggtgaagcaatttttatatggtactgcaacaaagcatttgacttataatgatttc

SEQ ID NO: 265666 - DNA, 80 bp, Homo sapiens
atgtgattctgggcaaagtgtggtgacttgtggattttcactggtgctggagaatctggtaaaagcaccattgtgaagca

SEQ ID NO: 265667 - DNA, 134 bp, Homo sapiens
ccaggggaagaagaagaaacgggccgcgaaccgcagtatcatgctggccaagaagatcatcattaaggacggaggcacgctggtcttggaagaacagggacattgatagcctgttatgtaatgaaacactacag

SEQ ID NO: 265668 - DNA, 95 bp, Homo sapiens
gaattgctactgctgcctctgtcactcctggtgaccagcattcaaggggatcccaacaagccctcaggattcagaagtgttaaagctcctgtcac

SEQ ID NO: 265669 - DNA, 100 bp, Homo sapiens
gggcactgatgccggggttgcggtgcgagtgcggttcgctcccagccccacaggatggccaggccatgttatgggatctcaacgaaggcaaacaccttta

SEQ ID NO: 265670 - DNA, 90 bp, Homo sapiens
gaaccaggacctggacccggacccaaagtgccatgtctttaatggaagaaatgatttcccttggggatggagacatcaggaccatgtgcc

SEQ ID NO: 265671 - DNA, 88 bp, Homo sapiens
tggtttgaatatcgtaagcgcacgtttaaacatctcaaggactccatccccgtgtctacctccctccttggagacacttccgacacga

SEQ ID NO: 265672 - DNA, 90 bp, Homo sapiens
actatgaatctctgttccaaatgctttgctgcaatggcaccagcatgatatcattgatcattcctcccaaagaccagatttcacgagtgg

SEQ ID NO: 265673 - DNA, 90 bp, Homo sapiens
cttcaggcctgacaatttcatctttggtgtgcctaccgcatgttgccgctgctgtttctgctgggacgtctgactccagttccttctccc

SEQ ID NO: 265674 - DNA, 119 bp, Homo sapiens
acaccagctatgcccccgtggccaccgcctccagcttgccaccaaagacctgcgactttgctcagctgtgccacgaccgtggctatctggtgacccaggacgagcttgaccagaccctg

SEQ ID NO: 265675 - DNA, 83 bp, Homo sapiens
cctcgccatgccggcccggcggctgctgctgctgctgacgctgctgctgcccggcctcgggagtttatgtggccgaggcagac

SEQ ID NO: 265676 - DNA, 83 bp, Homo sapiens
gcgctattcttcactcgagacaagcagctccattcagcagccctggcatcactaaagggagatatagtggaacttaataaacg

SEQ ID NO: 265677 - DNA, 49 bp, Homo sapiens
cgcactggcccaggacctgcacaagatggagtctccctctgttgcccag

SEQ ID NO: 265678 - DNA, 98 bp, Homo sapiens
aggaggaattcattttcagcagacacaagaaaagcagtttttttttcagatgttccatttaagcagacctcttccatagctgtagctggagcggtaat

SEQ ID NO: 265679 - DNA, 100 bp, Homo sapiens
tgtagatgggcctgggggcccccgtcgggattggaaagccaagcatgtgacacgaatgcagagtttgagtccagatcccaaagcccagtacacaagtatc

SEQ ID NO: 265680 - DNA, 80 bp, Homo sapiens
tgtggataagacagtcccacagtccaggatcaactcactatcctgaaggtccattctcccaagaagaggggacagaaaga

SEQ ID NO: 265681 - DNA, 75 bp, Homo sapiens
agcagacagagaagctgctgcagtttcaggagtatctgtgaaggaacagaccaggagacaccctgagacagggct

SEQ ID NO: 265682 - DNA, 101 bp, Homo sapiens
gagggtccaggccatgaagagtcctgaccacaatggggaggacaacttcgcccgggacttcatgcaccatatgaaggcggagtatggaaagttagagtgga

SEQ ID NO: 265683 - DNA, 83 bp, Homo sapiens
cgggacctgggctgggaacccgcggtggagcgggacacgaacgtggccactcttcacctccaccatgagcctggacatccaga

SEQ ID NO: 265684 - DNA, 100 bp, Homo sapiens
ggcagcagcacatctgtggaggatctgccagggagcaaacctgagcctgatgccatttctgggattgtgtgcacactctgcattccagggacacgtggct

SEQ ID NO: 265685 - DNA, 82 bp, Homo sapiens
cttcgttattggagccaggcctacaccccaggatctttaccttatatagtaaatctctgcccctcgacctggcctgtcgtat

SEQ ID NO: 265686 - DNA, 48 bp, Homo sapiens
gctggaattaggcaaatatggacagcttcgggctcagaatcaggttct

SEQ ID NO: 265687 - DNA, 98 bp, Homo sapiens
ccaacctacttagatgacaatgtcaagaaagaaaactcctccttgtacctaggaatccagacgctctgcagtgtcccatcgtcttatgcggatggcgg

SEQ ID NO: 265688 - DNA, 100 bp, Homo sapiens
cctcacttctttgattgaatacttacataatgcattggaacatgacatgagattaagcctttctgagaaaagtctacagcattctttctctgcaggttct

SEQ ID NO: 265689 - DNA, 98 bp, Homo sapiens
agcactgcatcaaaggcttctattagagctacttttccaggtatgtgggagagaacaataacaataggaagtgctggaaagactttcagtgtaactgg

SEQ ID NO: 265690 - DNA, 100 bp, Homo sapiens
tgcagtctcatatttctcctctgaaggttcgttccaccagtcataaaccagatgaaatctatggcatgattgaaagactatctcctggcactcgcaagat

SEQ ID NO: 265691 - DNA, 75 bp, Homo sapiens
cctcagttggaagcagccgatccagcctgcggagcctgtggggcagagagtgataatgaactctcaagtggaaca

SEQ ID NO: 265692 - DNA, 100 bp, Homo sapiens
aacgccatcaccttcagcaaccgcccggtcctcatctacgagcaagtcaggctgaagagcagcccgacggccatggaggctgaagagacgatggaatgcc

SEQ ID NO: 265693 - DNA, 100 bp, Homo sapiens
aaaaatgtgagcgctattggcctttgtatggagaagaccccataacgtttgcaccatttaaaatttcttgtgtgaccaagaatatggcccaggtgaccaa

SEQ ID NO: 265694 - DNA, 90 bp, Homo sapiens
gctgaagacggggtagccacgaggtgggatgtgtgtgggctgaaattccgagctgcggttgtgcatgagaatacacccttcgtggtaccc

SEQ ID NO: 265695 - DNA, 100 bp, Homo sapiens
gatggtcaagtccatctttttgaacacatattaaatgggtactgcaaaagactatgggattttgttaccagattcttacagaaccaaatgctgaccctcg

SEQ ID NO: 265696 - DNA, 90 bp, Homo sapiens
gtttgctctgctcttccaacaccagtggaagatgatcacatcccaggaaacttggatttaactggccagaagcaggtattcaaagcagag

SEQ ID NO: 265697 - DNA, 100 bp, Homo sapiens
tacaagcagactctgaagatgatcagacaaggcaaagcgaaattggtcattctcgctaacaactgcccagctttgagatgcttgtggttggtggcatcga

SEQ ID NO: 265698 - DNA, 74 bp, Homo sapiens
agaagagaccccaagagtgttgagcagcccatcgtgcttaaagaaggatagcctgggctggaagctcttctacg

SEQ ID NO: 265699 - DNA, 90 bp, Homo sapiens
caacgtcatccgctacatcgtgtgcagatgcgagccacccctctggctgctcctgcgggttccctgtccaggaagaagcggttggagttg

SEQ ID NO: 265700 - DNA, 100 bp, Homo sapiens
aggccggagggcacgcgcgcaggagctcatgtggcctgcggctcctgtcgcctgtagctccctggggaagggaatgcagggttgctggggctgggcccag

SEQ ID NO: 265701 - DNA, 101 bp, Homo sapiens
atgctgggatcggttcctccaggagaagttagcttcagagttctttgtggatggacttgattctgatgagagtggaaattgcaacactaacaagagagaat

SEQ ID NO: 265702 - DNA, 101 bp, Homo sapiens
cttcttgaaggctgtgctgagaaaagtaaacagctgaaggatgaaggagccagtttggctgaaaataaaagtattaattttaaagacccacagtttgctga

SEQ ID NO: 265703 - DNA, 75 bp, Homo sapiens
accatccagaccatttcaactgcgccaactgcggtgagaaagatcagtctaaagaaaaggagaagaaagtgaaaa

SEQ ID NO: 265704 - DNA, 130 bp, Homo sapiens
gctgtgctcctgcttaaagaaatcagtccttcctttccgacttagtcctcgggaagaagtttcagactacaaggattgaaagaaggtggcaagaggaagaagcagaagcagagagaggagtcgaagaaga

SEQ ID NO: 265705 - DNA, 89 bp, Homo sapiens
tggtcaaaagatatggcgccatatcaggatgccgaatataccaactctcctttggtacctacattctgtactcctggtttgaaaattcc

SEQ ID NO: 265706 - DNA, 100 bp, Homo sapiens
acagcactcatggtggcagccatcaaccgaaacaacaggtttgatgacaaatacaccttgaagctgaccttcatcagtgggagaacaaagcagcagcggg

SEQ ID NO: 265707 - DNA, 101 bp, Homo sapiens
tgaaaagccataatcagcgcctggtggagcaggtgggatcccttcaagatgcgctagaagagacgagttgtactgctgtcacaggaaatggacgctggatt

SEQ ID NO: 265708 - DNA, 90 bp, Homo sapiens
tgagaaattggatcttacacttgaaatacagactgttggggaacaagaggctgatgaggaagagatgcttgataatctaccagaggctgg

SEQ ID NO: 265709 - DNA, 100 bp, Homo sapiens
agccatgaggcgccagcctgcgaaggtggcggcgctgctgctcgggctgctcttggagccaggtctccagctggggtggacgtgcccaccagctgccgaa

SEQ ID NO: 265710 - DNA, 83 bp, Homo sapiens
gactggtctctcccaccacacagagccacataaagaagatccctaatagtcatttctcaacaattatatagtcaactgatgta

SEQ ID NO: 265711 - DNA, 80 bp, Homo sapiens
cttgagaagtcctcacagaagtcccggcgagagagagaaaaggaacagttccgtaagctctttattggtggcttaagctt

SEQ ID NO: 265712 - DNA, 95 bp, Homo sapiens
gcagtggtcgcttcttctccttgtctgcagatctccaggggagcccaccagcctagtcaacatggcctcggaagacattgccaagctggcagaga

SEQ ID NO: 265713 - DNA, 80 bp, Homo sapiens
agacatcagccacgcatctgaccttgttggagctgcagaggctggagacagagttgggccaacccgctgagcgctggaag

SEQ ID NO: 265714 - DNA, 82 bp, Homo sapiens
cctctgctcgcggccgcgcctttgagggttgtgagtcccggcccagcccctccacccccctgcccccccgatgcgaccatgg

SEQ ID NO: 265715 - DNA, 90 bp, Homo sapiens
ggggctccgggcggctgggaccggcctggggtagctgcgcagcaggatgaatctgaggacacagatactgatggggaagaggagacatca

SEQ ID NO: 265716 - DNA, 96 bp, Homo sapiens
gtggccgctgtgctatatcacaagatgaacaatgagaagcaggcagaagattgcatcacacgaactgataaatttcaaacggaagagagtggcagc

SEQ ID NO: 265717 - DNA, 75 bp, Homo sapiens
cgcgcgcctttgtgcgcgcgccgaggccaaagaactgccaactctgaaagataatgatttcattaatgagggcca

SEQ ID NO: 265718 - DNA, 88 bp, Homo sapiens
ttcttgtgggaaacaagtcagacctcaaacagctaagacagaagttcaccatgtctattctcaagatccatgccagggagatctttga

SEQ ID NO: 265719 - DNA, 98 bp, Homo sapiens
cccagctgttcattggaggtgtcactggatgtgcattccactcttcgttcaacttgttttggagagattaactcgaggggtcaaaactagtgagcttc

SEQ ID NO: 265720 - DNA, 76 bp, Homo sapiens
ccgggaagcccctcagctgtgaggagaaggaaaaggtatgacaatcggtgcaggaacatgagccaggagcaggtgg

SEQ ID NO: 265721 - DNA, 50 bp, Homo sapiens
ccgcagccccctcctggcgacccgcaagtgacaggagtttctgccaaatc

SEQ ID NO: 265722 - DNA, 83 bp, Homo sapiens
aatacagaagcacagtcagcaaaagcaaagacccctcggggctgctcatctctgtgatcaggcatggaagaggagatggttcg

SEQ ID NO: 265723 - DNA, 100 bp, Homo sapiens
gttcaagagtcttcaacctgttctgcttatatggaaatattgagaaggtcttgatagactttctgtaaagaaggaatgatttggtgatggagtgttccca

SEQ ID NO: 265724 - DNA, 100 bp, Homo sapiens
tttcacaataagagcagaggatggaacacttcagtgcattcaagggatagttgctgttctcttctgtggagtcacacaagcacattatacctacaacaat

SEQ ID NO: 265725 - DNA, 75 bp, Homo sapiens
gctcaccaaactgaagatgccttctcagtcagttgaggagtaagactgctgctgctgctgctgatgtgaatggat

SEQ ID NO: 265726 - DNA, 100 bp, Homo sapiens
ctgcaacgcgcacgtgctgtgcatctccagcatccccgataagtatgctgtgcgcttcatccctcgggagaatggcgtttacctgattgacgtcaagttc

SEQ ID NO: 265727 - DNA, 75 bp, Homo sapiens
actggatgctgcagacactgaacgaggagccagtggccgactgaaccaagctaactcctccggaagagagtccaa

SEQ ID NO: 265728 - DNA, 75 bp, Homo sapiens
gaagagcagttcccaggatctgcataaagaaaacaatggactgctcttcctggagacctcagccctggactctac

SEQ ID NO: 265729 - DNA, 98 bp, Homo sapiens
ggcagcccccaaatcccggcccagtggaatttctgtggagccacacgacggagagcatgtgtgtcggatatatgtcagcccaggatgggaaagccaag

SEQ ID NO: 265730 - DNA, 98 bp, Homo sapiens
ggacgtggcgctctacatggccttcttccccgtgtggaaccatctctacagatgtgcttctcagaatgatgatggctccagatccaaggatgaaacaa

SEQ ID NO: 265731 - DNA, 94 bp, Homo sapiens
cagcccacatgcccgctcacctgcgctgtgatgcctgcagagctgtggcttaccaggtggtggagattgtgaagaagctggagtctcgccagcg

SEQ ID NO: 265732 - DNA, 95 bp, Homo sapiens
ttttgtcttctgttgggcttggaacagggctgcacacctttctgctttatctggatggttcacatttgagtaaagacaggggagtttgttttcag

SEQ ID NO: 265733 - DNA, 83 bp, Homo sapiens
cgcgaggaggcgcgggaggtgttcgagaacgaccccgagacggttagagcagccagcgggtacagaatggattttggaagagg

SEQ ID NO: 265734 - DNA, 100 bp, Homo sapiens
acctccggggctcaagtgatcctttcatctcagcctcctcagtagctgagactacagattccagcaagattatggaagagcatagctacatacaaaagga

SEQ ID NO: 265735 - DNA, 74 bp, Homo sapiens
attcagcctgctgaagatccagatgatcccaggtggaaagaagtttgattctgtggttgtcaatggctttgttt

SEQ ID NO: 265736 - DNA, 97 bp, Homo sapiens
ttggcggcagcctgggacgcgcttatcgtgcggccagtccggcgctggcgccgcgtggcagtgggggaacgggtatggcaatccccgaaactcacca

SEQ ID NO: 265737 - DNA, 90 bp, Homo sapiens
gaatggctggtctcctactcccagatgcatccgtgtcaatccatttgaaccacagcgacgtctccccgcgaagaaaagtcgacaacaact

SEQ ID NO: 265738 - DNA, 100 bp, Homo sapiens
caaaggccgagagaccctgatgcccacagcccccagtttcaagtgccccatttgctccaagtctgtggcttctgacgagatggaaatgcactttataatg

SEQ ID NO: 265739 - DNA, 74 bp, Homo sapiens
ttggggaccacacggaatttgtcaaaaacctgctgccaaagtctataggtgtattacctgactgcttaaccgat

SEQ ID NO: 265740 - DNA, 90 bp, Homo sapiens
cttgcaggctcggctggggcccgcaggaccttgaagaggaaatccagcaacatgaagcgcctgtccccagcgccacagctgggcccgtcc

SEQ ID NO: 265741 - DNA, 88 bp, Homo sapiens
ggagactcagaatcgaatctcttctccctccccttcttgaacatccatgatagcagtcttctgtaaatcgaacttttcaagaattctc

SEQ ID NO: 265742 - DNA, 100 bp, Homo sapiens
cagaccaatttctgcatcagtgttatctcgaccagaggctagtaggactggagagttaagtgggcagaccaacatccacctcagcaaaaacttcttcctg

SEQ ID NO: 265743 - DNA, 84 bp, Homo sapiens
ctgccatattgtgtcttccccggccggtccctcgcctcccggccgagctgacgtacgaggatgtcgtccaggaaagattgtgca

SEQ ID NO: 265744 - DNA, 73 bp, Homo sapiens
aaaagcagttcaacgagaatgaagccatccaatggatgcaggaaaactggtggattctccacagttttcctcg

SEQ ID NO: 265745 - DNA, 100 bp, Homo sapiens
ccccgttaccccccagcccacacaccaccaccccagttttgggtggggagaaggcaaagtgtacagtattttctccaaggtacactccgatcggaatgta

SEQ ID NO: 265746 - DNA, 50 bp, Homo sapiens
cgtcgctgctggcacttcaggctctgtgacaaatggcctacagctgtgag

SEQ ID NO: 265747 - DNA, 74 bp, Homo sapiens
gttgttccgttgcgagctgcagctgcgatctctgtggtaggcccaggtgccatgcctctgcaactcctcctgtt

SEQ ID NO: 265748 - DNA, 75 bp, Homo sapiens
cgccttcctctacctgctgcactgcctgctcaacaagaagtctattatcctcccagtccacaacgctgaaccgtg

SEQ ID NO: 265749 - DNA, 90 bp, Homo sapiens
tcgactttcccgccgagggcccggaccccgaatatgacgaatacagattctgttcatcttgctctgaaattaaataattctgaactcatg

SEQ ID NO: 265750 - DNA, 99 bp, Homo sapiens
cgaggaaccaccggatcgaagacagtcaagtgtagactctcgccaaagccgctctgggcaaggttaccttccgaacaagaatctatcactgtaatatta

SEQ ID NO: 265751 - DNA, 100 bp, Homo sapiens
caggctcaagcagtcctaccatgtcagccttcccagtagctgggaccacagggcaaacctggtggacctgcagaagaagctggaggagctggaacttgac

SEQ ID NO: 265752 - DNA, 83 bp, Homo sapiens
ggccgagcgggcggcttcctggcctgggcgctccggtggcggcggagcacttgcacctcctgcgccgccgccccccatccaag

SEQ ID NO: 265753 - DNA, 100 bp, Homo sapiens
gccgcggccgcactcagcgccacgcgtcgaaagcgcaggccccgaggacccgccgcactgacaggtgtcccgacccaggctaagcttgagcatggctgag

SEQ ID NO: 265754 - DNA, 75 bp, Homo sapiens
tggtggtctacgacccggacaaggtgcatgcctacatcatcagctacctgaagaaggagatgccaagtgtatttg

SEQ ID NO: 265755 - DNA, 96 bp, Homo sapiens
ttggtagagaagaatgaacattgtattgagaacaatatagatttgcaggtgtcatggagaaactccagctgggcccagagattctgcagcgggaaa

SEQ ID NO: 265756 - DNA, 100 bp, Homo sapiens
ggctctcaaggttctgatttagattcatcagcaactcctataaacacagtggacgtcaataatgaaagctcttcagagctacctcctgccccatctcctt

SEQ ID NO: 265757 - DNA, 100 bp, Homo sapiens
ccacagatgcaaacggacgggccaacgccgtggccagctccactgagagaaccccagggcacctcgatttaaagatttccagcaacaggacagtcaggag

SEQ ID NO: 265758 - DNA, 100 bp, Homo sapiens
cgcgtctctctgctgcggcgcggggaccgctgtgctctcggctgggctgggatcagatgggaagcggaagctcatcatgaccagaaactgtttccctatg

SEQ ID NO: 265759 - DNA, 82 bp, Homo sapiens
agatttaccgcaagggcaccatctccttctttgagattgatggacgtaagaacaaggctgtcacccttgacccaaactttct

SEQ ID NO: 265760 - DNA, 90 bp, Homo sapiens
gcgggaggccgaggagaagctggaggagcggctgaagcgcgtgcgcatggaagggccgatgatccactcaggttcagtgattgccgccgg

SEQ ID NO: 265761 - DNA, 85 bp, Homo sapiens
ccagctcagactcagacttcgagccatcccagaaccacagccaaggagaactgcgctatcctcaaggagctggtgacgctgcggg

SEQ ID NO: 265762 - DNA, 75 bp, Homo sapiens
tggaggagcactgcaagcttgagcaccagcagccccttggatctcccttcgtggagacgacaccggggtcctcct

SEQ ID NO: 265763 - DNA, 75 bp, Homo sapiens
gccggcgcccggccatggcggtctccagttaatagaagatgaaattgcaaccattcttaaatctacattgaaagg

SEQ ID NO: 265764 - DNA, 100 bp, Homo sapiens
ccggccgctctcccctcctctcacggcacctcccaccatgaagcttcgtcagcaattgaagtggttgatatgtgaactctgcagtttatataaccttcct

SEQ ID NO: 265765 - DNA, 87 bp, Homo sapiens
cgcgggccggccccgcggggagcgcccccggcgcgatgcccttcaggaaagagaagtcattcagaattcaaaagaagttctaagttt

SEQ ID NO: 265766 - DNA, 75 bp, Homo sapiens
tttactgagaattttccacctcctgacacaacaccactcagaatgacactgtgcgctttgctttggatgtcctgg

SEQ ID NO: 265767 - DNA, 100 bp, Homo sapiens
gacgtggacggggacgtgttcgtgtatctgatgtgtagccatgcagaagacctacgtgcaaaagcagaatgggaaggcaaagggacagcttcccgatcta

SEQ ID NO: 265768 - DNA, 76 bp, Homo sapiens
cgtgaggcagggggacacagccatcctcaggtcatgttgatgctgggaaaagtactctgatgggccatatgcttta

SEQ ID NO: 265769 - DNA, 50 bp, Homo sapiens
agatcccacagatactctactatagacatatctgaagagatggattaaga

SEQ ID NO: 265770 - DNA, 50 bp, Homo sapiens
ttgcgtctcctttctactctgcaaggtggtaaaaccaatcccagttaaag

SEQ ID NO: 265771 - DNA, 100 bp, Homo sapiens
ccgccagcatgcccaagctcttcctgcacctggaaaagagagctttcaagttgtggatggaataaaaaagaaaaatatagttctgcaccaaatgcagttg

SEQ ID NO: 265772 - DNA, 74 bp, Homo sapiens
gggattctcgacctgctaacagaactggaccttttcgttgggatgaatgggttccggagagcagagtactcaaa

SEQ ID NO: 265773 - DNA, 101 bp, Homo sapiens
acctgttaccattgtctggtggagaggaactacgaagatcgggggacccgctccctctccatctgttttaaatgtaacagccacagggtcgactcatggat

SEQ ID NO: 265774 - DNA, 73 bp, Homo sapiens
tcattgaagcttggaattacatagctggaaaggatcttacaggggaaggtgtggctcattgactttaatccat

SEQ ID NO: 265775 - DNA, 101 bp, Homo sapiens
tctcaataaaagcccaggaagaagacgaggatggatgaatctgaatttagagacaaactcactccaattactatttttatggaatatcggttggattatag

SEQ ID NO: 265776 - DNA, 90 bp, Homo sapiens
ggccttcgggtcgggcgtctccgccggctactgccgcttcagttctcccggtgtggccacgagtcgggcagagattgtcaagaggctgaa

SEQ ID NO: 265777 - DNA, 83 bp, Homo sapiens
cacctgcgctgtgatgcctgcagagctgtggcttaccagggcttccgagtggacctgccaatcaagtcggcccgctaccgtgg

SEQ ID NO: 265778 - DNA, 100 bp, Homo sapiens
tgaaggtgaaagtggagaaatcagggatcagtgacattcagggatgtggccattgacttctctcaggaggagtgggagtgcctgcagcctgatcagagga

SEQ ID NO: 265779 - DNA, 100 bp, Homo sapiens
caggacttcaaacgagcttctgaagaaatcaccaagaacgaaaagggtcttggtcagagaggaggaattctagtattgttggcagacgatcacttgaaag

SEQ ID NO: 265780 - DNA, 100 bp, Homo sapiens
gacaagacactgaagaaagcatcgtcctaggaatggatttctcctctaatgacagtgaacacttgtcctgctccttcacctttttcttgcatggagacag

SEQ ID NO: 265781 - DNA, 96 bp, Homo sapiens
cgtgagtttttactgactcgaggagctcgaggccatgagcagatataccagcccagtgaacccagctgtcttcccccatctgaccgtggtgctttt

SEQ ID NO: 265782 - DNA, 95 bp, Homo sapiens
gtggaacatggctagcaggaatgcttactgttgcgtggttcgttattaacaggttcctggtttcagagaagatgaccgaagaagtggatttcctg

SEQ ID NO: 265783 - DNA, 90 bp, Homo sapiens
cgctgtccccgcagcccggcagcgcataagcttaaatcgtctcagaaggacaaggtccgccagtttatggcgtgcactcaggctggcgag

SEQ ID NO: 265784 - DNA, 80 bp, Homo sapiens
caacaacacaagaggttctacagcaggaacttcagggcattcacagtttccggtgtcagctgtgatgcatgtttaaaagg

SEQ ID NO: 265785 - DNA, 100 bp, Homo sapiens
ggccggtgtccccaccgccatccctgacccatggcgctgaagaggattcagaaacatttaaatcaaacggtattgagatggattgggttatgaaacataa

SEQ ID NO: 265786 - DNA, 100 bp, Homo sapiens
cagccccaacatcgtcattgcactcgcgggtaacaaggcagacctggccagcaagagagccgtggaattccaggttcatgggacggctccagacattgca

SEQ ID NO: 265787 - DNA, 87 bp, Homo sapiens
taggagtgaccgccatctgcctgggagtgcgctgaattacatgaatgacagtcttcgaaccaatgtgtttgttcgatttcaaccaga

SEQ ID NO: 265788 - DNA, 97 bp, Homo sapiens
ctgcgtcaccgccgcccccccagacaagatggacaccgcggaggaagttgatattcactgatggactccaaagaatcattaactcctggtagagaag

SEQ ID NO: 265789 - DNA, 114 bp, Homo sapiens
ccgcgggaagatggcggcgccgctcatccccctctcccagcagggcggcaaggagtacctgatgcgggcccacttcggcctgcctagtgtggaggccgaagacaaggagggcaa

SEQ ID NO: 265790 - DNA, 98 bp, Homo sapiens
gagcgccgctgccgaagtccgcgcgcaggagaacatattgtgatgttcgtgcctcagagctaaaactatgagtgaatttcggattcaccatgacgtca

SEQ ID NO: 265791 - DNA, 100 bp, Homo sapiens
caagcggggaaccctgccctggtgtccgcctatggcacgggactcgaagggggcaccacagggactttgaacatgtcggggatcgccctcagcagactcg

SEQ ID NO: 265792 - DNA, 100 bp, Homo sapiens
gccgccgccatgtcggcgcaggcccagatgcgcgcgatgctggaccagttgatgggcacctcccgggacgagcaccccaagatctggctacctcgggccc

SEQ ID NO: 265793 - DNA, 83 bp, Homo sapiens
ggaatattgagaaggctgaggaactcagcaaccagctagctactcgagagctcattgctatggacagtgctatcaccctgtgg

SEQ ID NO: 265794 - DNA, 75 bp, Homo sapiens
ggacttccaatcgagtgactgcctggcacggttggcaaacatgaattgactgggcataaagtagctgtgaagata

SEQ ID NO: 265795 - DNA, 75 bp, Homo sapiens
ggtcaccttccccatttctggctggtttgccctgaagattcctgttgccatcaccctggggtcccaatcttccat

SEQ ID NO: 265796 - DNA, 75 bp, Homo sapiens
gaagattcttccaaggaaccagtgcgaagacagcatcaactgggcaagtggtgaggatgaccatgtagttgccag

SEQ ID NO: 265797 - DNA, 83 bp, Homo sapiens
cgagaatacagagagaaaattgagacggagctaagagatatctgcaatgatgtactggatgacaaggagtatgtgggctttgc

SEQ ID NO: 265798 - DNA, 100 bp, Homo sapiens
gttaattactacgaagctgggaatttcaggtcatgtgcacagattaatggctggatccatggcagacatttgaagacagtgatttgttccatttgattgg

SEQ ID NO: 265799 - DNA, 100 bp, Homo sapiens
gggggttcggtgcgtgccccgacggggcgcgcgcgaagcgagcgagaaggcacggagtcgccgcggagcgcaggtatgagcagcagcgggacaatcttgc

SEQ ID NO: 265800 - DNA, 74 bp, Homo sapiens
aagaccgaagggaagacttccagtagctccaaggaggttaaggtaaaaggattcttcagctctttgaaagaaaa

SEQ ID NO: 265801 - DNA, 100 bp, Homo sapiens
gatccggaagcacagccccgaggtgtgcgaagccaccaaggaaactgaacagccaagactcctataacaattttaccaacaacaaccctggcaaccctcg

SEQ ID NO: 265802 - DNA, 96 bp, Homo sapiens
ccgcatcatgggcaacggcttcggggccttgggcgtggaagtgcgagccaaggaccaggacatcttggatctggtgggtgtgctgcacgatcccga

SEQ ID NO: 265803 - DNA, 100 bp, Homo sapiens
ctgctcatgaagccgtacttcatcacctgcagggaggccatggaggctcgtctgctgctgcaggaagcgtcagcccccgtagcacctctgttaccacgac

SEQ ID NO: 265804 - DNA, 83 bp, Homo sapiens
tgaatgatgtcatcaccgtcatcgagggaaggtgcgcgcggagccatggttatcatgtcggagttcagcgcggaccccgcggg

SEQ ID NO: 265805 - DNA, 74 bp, Homo sapiens
ggaatctgtcttggaggacatcagaagcctggagatgcccaaagatgagctgcccaaccataactgcattaagc

SEQ ID NO: 265806 - DNA, 82 bp, Homo sapiens
tgtacttgcgtccgctacagtatgtcaatcgcttgccccagcacagggacccagacatggagctgcgggaagaagcctggtc

SEQ ID NO: 265807 - DNA, 98 bp, Homo sapiens
tcgaagcgggaagatggctgcagacaagcctgcaggtttaactatagatcaacacatcatcttgcatctcatgggttctatgaatttttaaattggtt

SEQ ID NO: 265808 - DNA, 51 bp, Homo sapiens
tgctgaccccagagtggcctgtctcctgactacgtcaaaagctacctcctc

SEQ ID NO: 265809 - DNA, 73 bp, Homo sapiens
ctgttcccgctgtttgtgccagcatctgctgtcaggtggctcagtgtaacctcctctgagaaggtggacaaag

SEQ ID NO: 265810 - DNA, 100 bp, Homo sapiens
attttggggcagaatacagagatatggaatcagaaatgactgctgtccatgcaggcaacataaacttcaagtgggatcctaaaagtctagagatcaggac

SEQ ID NO: 265811 - DNA, 100 bp, Homo sapiens
gaggcgtctacaagagcgattgctacacatggacagtgatgatgaaattcctatcaggacagtaataccccacttttattcgctataatttgcaagaaag

SEQ ID NO: 265812 - DNA, 82 bp, Homo sapiens
tttgtacctgcaggcctcctacacctacctctctctggctgcctctaagaatcaaacttcactcttgggagaaccaccaaaa

SEQ ID NO: 265813 - DNA, 100 bp, Homo sapiens
tcctaagctcaactctagccagctaggttcctggtgctttggggctgccactgcagagccccgccatggaagacacgccgttggtgatatcgaagcagaa

SEQ ID NO: 265814 - DNA, 75 bp, Homo sapiens
catttatccaagaaacaagtgacatcaactctttttcagagcccacccacctttgggttcctgttggacatcgat

SEQ ID NO: 265815 - DNA, 100 bp, Homo sapiens
ctaaaattgattccattcctggagaagcttgtagaactgttatacatgggaagctgttgataccaaaaataatgtactttataaaatcaacatctgtgga

SEQ ID NO: 265816 - DNA, 95 bp, Homo sapiens
aattattcgtgctataaacactggcaatttgaacttctgaattatacaccagcagattatgatcactaaggaggaagagcgagagaagaagtttt

SEQ ID NO: 265817 - DNA, 98 bp, Homo sapiens
cacagtcaaagaaagaaacatcccagtcgcccagctccagtgtcaggaagaccaacactgtcatctgaagttggaatcatcatctgtgatattgctaa

SEQ ID NO: 265818 - DNA, 75 bp, Homo sapiens
actggggagcactgtttgcagagttctctctctctggttactccacaggatccgctgaacataggatgttgccac

SEQ ID NO: 265819 - DNA, 100 bp, Homo sapiens
gcccagagacctgagcagctctgcaaggttctaacagacttaattcagtgcacaaatgagatgaatgtgaacatcccacagttggcagacagtttatttg

SEQ ID NO: 265820 - DNA, 100 bp, Homo sapiens
ccctcaatgtgttagcagactctgtcctcatggagcagcccccactccgaaggcggaagctagaacacttggaaaactgcccagcttgtagccagcttcc

SEQ ID NO: 265821 - DNA, 90 bp, Homo sapiens
ccctgccatgttgcaagttcttctacagccccagttatgtggacgagctgttaaaccagctcttcagcatgcaggaagaaatccatccca

SEQ ID NO: 265822 - DNA, 75 bp, Homo sapiens
gtgccctcctggggctctccgtggagtcccctctcagtgtcaggccttggacaagattcgctatgagagcctgac

SEQ ID NO: 265823 - DNA, 76 bp, Homo sapiens
ggcatctagactttggtttacatacaggaaaaactttccagccattggtatgtgcactgcgcgtgaccagccgggc

SEQ ID NO: 265824 - DNA, 123 bp, Homo sapiens
ccaagtctacctgtgccatcaacaacaccctcattgctttcttcattttgactacgataaaagacataaccagtgcggtgcaatccaagcgaagaaaatccaagtaaacaagcaggactgcga

SEQ ID NO: 265825 - DNA, 82 bp, Homo sapiens
tatcaactggcttgataagaatcagaccccaccaacaactgaacgctttggtcaggctgctacaatggaaggaattggggca

SEQ ID NO: 265826 - DNA, 127 bp, Homo sapiens
ggagagaccaaagatgaactactatgaccatgcggatttccaccacagtgtaaaaagtctgccacgtctctgtgctcagtgtcctctctacatcctgtggcttgagcctgagcttgcccatattccc

SEQ ID NO: 265827 - DNA, 100 bp, Homo sapiens
cgcgagtgggagcaccaggatctcgggctcggaacgagactgcacgatgaggctgccagccttgagagcaccaccgttacctggttgaagaggggagggg

SEQ ID NO: 265828 - DNA, 96 bp, Homo sapiens
agcaggcaacgaagctgggaaggaaagctgtgtggtgcgagtaactgtacagtatactgttttccctttggacgacctgaaggtgctctaaaagct

SEQ ID NO: 265829 - DNA, 74 bp, Homo sapiens
gcagggagcggagtaccagcacttcatccagcagtgcacagctgcaggacaagttcgagcatcttaaaatgatt

SEQ ID NO: 265830 - DNA, 75 bp, Homo sapiens
ggattgcgaagcaacagagaatcaatttggatcggcttatcataaccaggcggtggaagcagggcagagccgaag

SEQ ID NO: 265831 - DNA, 74 bp, Homo sapiens
ccgccttcgcatggagctggaaaccatcaagatcatggaagggaagtggttgctgtgtatgttactggtgcttg

SEQ ID NO: 265832 - DNA, 100 bp, Homo sapiens
agacagtatgcaaggccacgacccacgagatcatggggcccaagaaaaagcacctggacttgccagctcaggccagaccttcttctcagatgtcgactcc

SEQ ID NO: 265833 - DNA, 75 bp, Homo sapiens
cctccaactttgcgacggaaatgtgtcatcgaaagccagcgaatgacaacagagctgctcaaggcgggaactctg

SEQ ID NO: 265834 - DNA, 83 bp, Homo sapiens
gccggagctgggcgcggattcgccgaggcaccgaggcactcagaggagacacgatgaggcgagtggtacgacagagcaagttt

SEQ ID NO: 265835 - DNA, 97 bp, Homo sapiens
ctcgccagcagccgtccggagccagccaacgagcgcactattcctgatcagagaactccagttgcttcaacacacagtatcagtagtgcagccaccc

SEQ ID NO: 265836 - DNA, 74 bp, Homo sapiens
ccaaggtgtacttcatctacgagttacgccccatggtgtccatcctgccagcagactgattcagaatgggaggc

SEQ ID NO: 265837 - DNA, 100 bp, Homo sapiens
gaggatccaggaggaggagttgcagagtgggtaattccagaattgattggccataccattgtcactgtattactgctcatgtcattgcactggttcatct

SEQ ID NO: 265838 - DNA, 75 bp, Homo sapiens
gacttcccgtccgcggcgtggaggatgtgcactgggaactacacctttgttccttacatgataactccacataac

SEQ ID NO: 265839 - DNA, 75 bp, Homo sapiens
attcaaggatatttatctaaaaattcttcttttgagtgccagtaaagggaaagacattcccggtcaggcatctct

SEQ ID NO: 265840 - DNA, 100 bp, Homo sapiens
ctcaccgaaggtgttcaccagcacactgctctgccaggacttacggtaactattatgagggaggcatggctttccaccgtcgggccaggaagagcacctg

SEQ ID NO: 265841 - DNA, 75 bp, Homo sapiens
gtgcactggacgggcgagaacagcagcgtcctccaaaagctggggaaagctgatgagacaaaagacgaacagttc

SEQ ID NO: 265842 - DNA, 75 bp, Homo sapiens
gcgcccagagccccgcgtttcagccctagggaagaactgtaaaaagctactactggagaacaataaaaacccaac

SEQ ID NO: 265843 - DNA, 98 bp, Homo sapiens
cttgatcccagctggactgctcaagaagaaatggcccttttagaagctgtgatggactgtggctttggaaattgttccggaactttaagatcatttac

SEQ ID NO: 265844 - DNA, 100 bp, Homo sapiens
gtgcagatcagcgcaaggcaaagttgggtgactcccacgacctgcagcgcttccttagcgatttccggccgccatggcatcagatgaaggcaaacttttt

SEQ ID NO: 265845 - DNA, 50 bp, Homo sapiens
ctggacaaaggaacaggtatctcagtgtgccatgcggagctgaatgccat

SEQ ID NO: 265846 - DNA, 50 bp, Homo sapiens
agcaaatctggctatcttctccatccaggctggcggccattgccctgctg

SEQ ID NO: 265847 - DNA, 100 bp, Homo sapiens
cagcagcccagacgcggcacagagagggcctgggagcttgctgcagcttcagattggtttatcttggaagctaaagggcattgctcatcctgaagatcag

SEQ ID NO: 265848 - DNA, 99 bp, Homo sapiens
tcttcaagttggagcaaggagaggggccatggacattggaaggggaagccccacatcagagctgttcagatcctgggtgtttggctgacctacagatac

SEQ ID NO: 265849 - DNA, 82 bp, Homo sapiens
gcctcggtgcagggctccaccccgtcgcctcgacagataatcgttatgtaccttcaggtgttagagtgtgagcgtaaccaac

SEQ ID NO: 265850 - DNA, 101 bp, Homo sapiens
accattttctactgtccctgcgcgagagagacaagagagacacctccaacttcgacaaagagttcaccagacagcctgtggaactgacccccactgataaa

SEQ ID NO: 265851 - DNA, 80 bp, Homo sapiens
tgatcttcctcctgctaatgttgagcctggaattgcagcttcaccagatagcagctgatcttgcatctttaatggataaa

SEQ ID NO: 265852 - DNA, 50 bp, Homo sapiens
aggcccagagacatgctgaaacatcgaagttgctgatagtccaactccac

SEQ ID NO: 265853 - DNA, 79 bp, Homo sapiens
agttcttcgggccagggacacggctcaccgtgctagaggtggggctggtgtccgagcacttctcgcaggccccgcagag

SEQ ID NO: 265854 - DNA, 87 bp, Homo sapiens
ctggagcggcagctcagcttggagcaggaggtccaggacatgtctcaggaaggctatggaactagatctcaacctcctctggccccc

SEQ ID NO: 265855 - DNA, 134 bp, Homo sapiens
aaggcactgaagccctacgagattcacaccgtcttcggtctcctggggtcggcgccgagtgggaggatggcggaagtttggtgcacctcgatttggaggaagtagggcagggcccttatctggaaagaagtttg

SEQ ID NO: 265856 - DNA, 75 bp, Homo sapiens
attcgtgacaacctctacctccgcacggtgccatgatgaagtggcacacactctaactgaaagcagagtattaaa

SEQ ID NO: 265857 - DNA, 82 bp, Homo sapiens
cggaagaaaaaaggagctgtttctaggcttttctaggcgcccagccgagggcgtgatggtgggcatgggtcagaaggattcc

SEQ ID NO: 265858 - DNA, 90 bp, Homo sapiens
ttgatacttctgtctccattgaggaaggcctttgaaattgttgttcgccatgccaagaactacaccaatgccatgttcaagaacaactac

SEQ ID NO: 265859 - DNA, 98 bp, Homo sapiens
atagcacgaggcctgttgtctaccaagtgcagtttaaatattttgctacttgagaagatagaacatgatgacatctgcaataaaactttgaagattac

SEQ ID NO: 265860 - DNA, 51 bp, Homo sapiens
gaaagacggagatactattggtgttaaggttggtgttcgaggaagagacat

SEQ ID NO: 265861 - DNA, 98 bp, Homo sapiens
tcgggttcgtcctcttcttggtgctgtggctgatgcatttcatggctatcatctacacgttcagccctatgtagctacaacctaaagccttctgaata

SEQ ID NO: 265862 - DNA, 83 bp, Homo sapiens
cgcgggcgccaggaccggccgaacgcagaggtttttagaacttcagccataaaaatgggcagaattttccttgatcatatcgg

SEQ ID NO: 265863 - DNA, 87 bp, Homo sapiens
cacggcgcccggcctctccagcaggagctggtcgctgtcggctaagcaagattggagctactcgtcgtccacctccagctcgcgtaa

SEQ ID NO: 265864 - DNA, 75 bp, Homo sapiens
acaatgaaacagctccaatgctggagcaggttttgctgttactgctcagtgtagtcacaccttgaataagaaatg

SEQ ID NO: 265865 - DNA, 100 bp, Homo sapiens
cgggcctcagctgggattcccgcgcccctcggacggccacgagactcggatgaataatacggcagctagtccaatgtctactgcaacttcaagtagtgga

SEQ ID NO: 265866 - DNA, 100 bp, Homo sapiens
ctccactccctctccactggccgtcttcccagagttgtgacagccaatcggatgctgaagcagatgcttttcagtactatactggcaattgctggagaag

SEQ ID NO: 265867 - DNA, 121 bp, Homo sapiens
gtaaaacgccggaattgtcctttccaacatccagagctgcatcattccttggggcaaaatgtggacaagggcaccaccaagtctgaagatcgtgctgctttgctgaagaaattcaatgaac

SEQ ID NO: 265868 - DNA, 83 bp, Homo sapiens
tcgaggttagagggaactgggaggcactttgctgtctgcaatcgaagttgaggtaaagtccatggttccctggcccgtgctgg

SEQ ID NO: 265869 - DNA, 152 bp, Homo sapiens
ccgtgatctgctgggtctgtagaggagcgcaggcctggtgcaaacagactcaagaggctcggagaaccagcttggattggaagtaaaggaagatcagagaaaataagaacatataattttccacagaaccgggtcacagatcacagaataaa

SEQ ID NO: 265870 - DNA, 100 bp, Homo sapiens
ggccatcaatcggaaactcatggaatatcctgcagaagaaaatggatttcgttatatcccctttagaatatatcagctctttcagtctcacatggcaacg

SEQ ID NO: 265871 - DNA, 98 bp, Homo sapiens
ggagatcaacctgaggccgcagatgtcccagagcaaagactcaggtggactgaaggccgctatgatcgaattggtggaaaggttgaagttcaagagct

SEQ ID NO: 265872 - DNA, 100 bp, Homo sapiens
gaaaagaagattgtctatcatgaaggagttcttctcaccactaaatccaatacgagttcatattgatattggagctgatggcagagccacaggagaagca

SEQ ID NO: 265873 - DNA, 75 bp, Homo sapiens
gcaactcagaaacatcaggtccaaggcccgatgagagaaagggaaagttaaggatgctggagcagaacaatggat

SEQ ID NO: 265874 - DNA, 75 bp, Homo sapiens
ctcccaaagtactgggattacagattctctttgtggccagatgggtttgtatggacaggcttgtccatctgtaac

SEQ ID NO: 265875 - DNA, 98 bp, Homo sapiens
tgtaatgctgtccgccaggccctgcaggacctgctttcggagtacatgggcaatggtcagttaaatgaaagcatggaccatgggggagttggaccata

SEQ ID NO: 265876 - DNA, 75 bp, Homo sapiens
gacattgcaagggaaaaagtaaataaagctgctgtttttgaagaggccacagacctccaccagcacgaagtggac

SEQ ID NO: 265877 - DNA, 100 bp, Homo sapiens
cagaaggtgtgaccccaacgaagagtggagaacggcaacccatccagatcaccatgccgaggacagttatgggatggatgggaaggttaatcagccccgt

SEQ ID NO: 265878 - DNA, 75 bp, Homo sapiens
cctcggtacctgttactgctgctacttcctcgtttgacaccttcctggggacagagcagaatgggctgatataga

SEQ ID NO: 265879 - DNA, 75 bp, Homo sapiens
tccctttcactgaagaagtggggaaaacaaggctcagacaggggcatgagccagaaggagagctctaagtctgcc

SEQ ID NO: 265880 - DNA, 100 bp, Homo sapiens
ggcatcgacagtgagtgtggcccattcatcaagctcagtgaccccggcatccccattacggtgctgtctaggcaagggcttacctgttgctttagacaaa

SEQ ID NO: 265881 - DNA, 100 bp, Homo sapiens
tctcatctttgaactactgccggagcttctgccagtgggcatccccaccatcagatggtgcggggcagagggggactacaacgtcatggtgatggagctg

SEQ ID NO: 265882 - DNA, 75 bp, Homo sapiens
agagcagagaaaacattctcagtttatgagattatgtgcaagatcctcaaggactatcctattaagtgtaatctc

SEQ ID NO: 265883 - DNA, 75 bp, Homo sapiens
gtttctgtacatggattatctgctggagaatgctggaggagaccttaaggatggccaccaccactatgaaggagc

SEQ ID NO: 265884 - DNA, 74 bp, Homo sapiens
gagctctatgaaaacattgctgaatggattgtggaatgtcgttgtctgctgggtcttcccctcttcattccccc

SEQ ID NO: 265885 - DNA, 75 bp, Homo sapiens
ttggctggaaaaccccaaaagtgtacataaggatggacatgtagaggtggcacgtttgcttttggatagtggtgc

SEQ ID NO: 265886 - DNA, 83 bp, Homo sapiens
gtccctcaaagcgggaaatgcgtcaaaggtaaggggcctggataccaagaagtgactgctcatctaatccataaagctatgtt

SEQ ID NO: 265887 - DNA, 50 bp, Homo sapiens
accaacaagcgcaagagagacgaagatatctcccggggccaattcagcat

SEQ ID NO: 265888 - DNA, 100 bp, Homo sapiens
ctacgagcgcctcatcctggacgtcttctgcgggagccagatgcacttcgtgcgcagcacgtgaagaacagtaagcacagcaacaagtacgaaggctggc

SEQ ID NO: 265889 - DNA, 138 bp, Homo sapiens
agtggatgaacatgtgcttggtgtcgtttttccttgagctgaacgtcttgcaacagtggccgcacgcatagaaaggaaggcagaggaagccacggccactggaccctggcgagggttccaaggacacagacagttcag

SEQ ID NO: 265890 - DNA, 100 bp, Homo sapiens
tgtcttccccagctctgcagccacatactatccgtttgttcaggaaccaccagtgacagaggtttttaatgaccacaacaagcaagcatgcagcttactg

SEQ ID NO: 265891 - DNA, 90 bp, Homo sapiens
gcgggggagatggcggcgcgatggagcagcgaaaacgtggttgtagagttccgtgactcccaggaaagtaatggaccagtgaaggtgtgg

SEQ ID NO: 265892 - DNA, 100 bp, Homo sapiens
agtgaaaaagaaattgtttttctcattaagctttacagtcgaagctctgtaagaagaaaacactttgtgggccagttcagtgatcggattttgtggttgg

SEQ ID NO: 265893 - DNA, 98 bp, Homo sapiens
cctttttccatctgcaggactatgaccaggcccgccactacctcctggctgccgtgaataggcagcctaaagaaggtgatgctctcttacacaacctt

SEQ ID NO: 265894 - DNA, 75 bp, Homo sapiens
caacagcctggctgatagtaatgccagtttggcatgagagggagtgaaggatgtgcctacctcagcgatgatggt

SEQ ID NO: 265895 - DNA, 137 bp, Homo sapiens
gggcgccgccgcgggcgccgggagcgagctgggagggagccgcgcgcctttgtgcgcgcgccgaggtactccaaagattcaggtttactcacgtcatccagcagagaatggaaagtcaaatttcctgaattgctatg

SEQ ID NO: 265896 - DNA, 90 bp, Homo sapiens
gaagttatgcttgttggaattggtgacaaaatcagaggcatactttatagatttattaactccaaggcaagaagcagttcctgttgtctc

SEQ ID NO: 265897 - DNA, 82 bp, Homo sapiens
ccggaccctggaagagaagagggtggctaatgattaagatgcagcagcttttttatgagaattacgagcagaacaaaaaggg

SEQ ID NO: 265898 - DNA, 80 bp, Homo sapiens
tgccgagtccgaagcgggagtcaggctgagccttcggcccccaagtttcactgggatcgattctgaatatgaaaagccag

SEQ ID NO: 265899 - DNA, 96 bp, Homo sapiens
ggcccgcagccgccacctacccagtgaccatgatagatctgaaatagctcaactcagtcaagaaaaaaggtatacatatgataaattgggaaagtt

SEQ ID NO: 265900 - DNA, 101 bp, Homo sapiens
tgaatgtcgcatgaggtcccctccgcccgtggggactggctgctgccgtcgcagagggccccattgtgctgtcccgaccccaggatggggactctccactg

SEQ ID NO: 265901 - DNA, 80 bp, Homo sapiens
tcggcctagtgcgccagggcctcaagtgcgatgttccgccatggagtcatagttgcagctgactccagggctacagcggg

SEQ ID NO: 265902 - DNA, 51 bp, Homo sapiens
cggcgaggccctcatgtaccacacgaatgtcgtactctcaggaggctccac

SEQ ID NO: 265903 - DNA, 75 bp, Homo sapiens
accccaaggccaaccgcgagaagatgacccaggcaatggtgaagatcgaggacatggctgtgtccctcattctgg

SEQ ID NO: 265904 - DNA, 117 bp, Homo sapiens
atgacagcggcgaggagaacgtcccgctggatctgacccgagtgttgctaacaaccacaagcagaatttgatgacggtggcaaaccttggtgtggtgtttggacccactctgctgag

SEQ ID NO: 265905 - DNA, 90 bp, Homo sapiens
aagatgagcaggaatgttttgctacaaatggaggaggaggaggacgacgacgatggggatatcggcctgaccgccgctgcctacagagtc

SEQ ID NO: 265906 - DNA, 83 bp, Homo sapiens
accacgagctagtgttggagtgcaccaagaaatggtgaggagctcatctacctggacccccacaccacgcagccagccgtgga

SEQ ID NO: 265907 - DNA, 100 bp, Homo sapiens
cggcgacaagggtgttcccgaactagagtgggatgtttcgtctgaactcactttctgctttggcagaactggctgtgggttctcgatggtaccatggagg

SEQ ID NO: 265908 - DNA, 101 bp, Homo sapiens
tggaagttataacgctacacgaagaactaagaatattattagcacaagagcaccatactttgagggacctgaaggagaagaaggagaaggtggaggagaag

SEQ ID NO: 265909 - DNA, 98 bp, Homo sapiens
agggcttcagtgcagacgcagtggtggccctggagcagtatgccagcaagatcaccggggaacccttgatccgtcgatcagatgataatgaaaaggcc

SEQ ID NO: 265910 - DNA, 107 bp, Homo sapiens
tcagctgagcacggaggggataggcacggacgcaacacttttggaacttagacgctagacagagcgggatgccaccagcttgtccaaagggaagttccaggagctcc

SEQ ID NO: 265911 - DNA, 73 bp, Homo sapiens
gaacaactgtgtcagcagctagcccttttcctcaaggtaccagcaacttcaaggtttctgccagcccactgtt

SEQ ID NO: 265912 - DNA, 100 bp, Homo sapiens
gaagccggagtgtaggcggcagaggattcgctcccagagcagctgcggccaggaaagaccacagcaagattctttcattcgtctcctcctagcctggggg

SEQ ID NO: 265913 - DNA, 100 bp, Homo sapiens
tgaacaatccgtctggatcacggatgtaggaagtgagtttgccagatccggcccggtgcctgggttccaggaggacacgctgcagttggccttcatcgac

SEQ ID NO: 265914 - DNA, 75 bp, Homo sapiens
atagcttctggaggcagttcaagcactctgagaagaattatatccagatcgagagacagaagattctgaaagggt

SEQ ID NO: 265915 - DNA, 75 bp, Homo sapiens
cttcctgcgcgcgcgcctgaagtcggcgtgggcgtttgaggaagctggcaaatcctgaaggaacccaaagtggct

SEQ ID NO: 265916 - DNA, 98 bp, Homo sapiens
tcgtcgaacgcacaacgcggcgccgcaggtacatgtcccagagcaagcacacggaggcccgggagctcatgtactcgggagccctgctcttcttcagc

SEQ ID NO: 265917 - DNA, 100 bp, Homo sapiens
atagaaagaatggagaactattaaccaccattcttcagtgggctgtgattttcagaggggaatactaagaacaagagtgagccatggagctacgtgtggg

SEQ ID NO: 265918 - DNA, 96 bp, Homo sapiens
agtcatgatagaaatgaaccatttgtctttagtcttggcaaagatgtccctggtagatttgggaaagaagcttttagaagcggcacgagcaggtca

SEQ ID NO: 265919 - DNA, 74 bp, Homo sapiens
cttctagacgacaaaatgcaaaaaaggaggccaaagactttgagaatgctttattgcaacttttagctgactag

SEQ ID NO: 265920 - DNA, 100 bp, Homo sapiens
ttcagccagtggtcatcagagaagactctcttagtgactcttccagggtggtatttccaacattttggaggaactggttgtccagcctctgttggtatca

SEQ ID NO: 265921 - DNA, 90 bp, Homo sapiens
gcgcctgttctcgggctgtttggcggtctctgctggatgaaccgaatcctaacagtccagccaatagccaggcagcacagctttatcagg

SEQ ID NO: 265922 - DNA, 82 bp, Homo sapiens
cagcgggagctggacggcgagcgcgagcggcgcgagaaagaggatttgatgaagatgttaaagcgaaagtggagaaccttct

SEQ ID NO: 265923 - DNA, 97 bp, Homo sapiens
gagttcgagaccagtctggccaacatggtgttcaggcgcttcgtggaggttggccgggtggcctatgtctcctttggacctcatgccggaaaattgg

SEQ ID NO: 265924 - DNA, 74 bp, Homo sapiens
ctcatctgacccccctgtgttattctttcatttcttacgtacaggtttgtgttgctagttaagctagcttgtat

SEQ ID NO: 265925 - DNA, 98 bp, Homo sapiens
ttctctttaaatatttgatgaaattcaccagtgaagccgtgacatcctgggatattctttgttgagagaagtctggaacgttttttcttagagttcca

SEQ ID NO: 265926 - DNA, 76 bp, Homo sapiens
atcaattaaacactgcattgtgttgctgcagattgccaaagtgttcaggcgcttcgtggaggttggccgggtggcc

SEQ ID NO: 265927 - DNA, 75 bp, Homo sapiens
taactatttcaagatgatatttattcaccaaacaaggatactcttattagcatgaagtgggaccctacaggtcat

SEQ ID NO: 265928 - DNA, 82 bp, Homo sapiens
ggagaagaggaagcgacgcgaggagctgttcatcgaacagaagccaaatttgtatcctactgtggggcttcaaacaccagga

SEQ ID NO: 265929 - DNA, 100 bp, Homo sapiens
catgaatgtccctttggccgcagtagtatagagctgaccaagatgctatgtgagatcttgaaagtgggcgagttgcgccctcgggaccaaggatcacgtc

SEQ ID NO: 265930 - DNA, 100 bp, Homo sapiens
aagaattcagaaggaacttgcagaaatcacattggaccctcctcccaactgtaggtggggaccaaggcatactgaacacattttttagcagctgggcaac

SEQ ID NO: 265931 - DNA, 99 bp, Homo sapiens
gttacggtgactcttgggtccgaaggggacggacgtcctcccacgtaccatttagaaggcctactactactgtgccataatagaggatgtgattctgcg

SEQ ID NO: 265932 - DNA, 50 bp, Homo sapiens
tatccgggaggtcaacgaggtcatccagatcatgagcgtcttgttgttca

SEQ ID NO: 265933 - DNA, 82 bp, Homo sapiens
cgggaggaggagagcttcacctgtcggcttggagagatccaggattatatctgtccaagatgcgagtctggttttatcgagg

SEQ ID NO: 265934 - DNA, 89 bp, Homo sapiens
actttaggaggacctgaagaaactgaagaagaaaatacaacgtatactggaccagaagtttcagtactttgcagcaactcagtttgaac

SEQ ID NO: 265935 - DNA, 100 bp, Homo sapiens
caaaagtgtatatagcatcttgcatgttggggaccacacggaatttgtcaaaaacctgctgccaaagtctataggagtcagaaataccatcagaggaggg

SEQ ID NO: 265936 - DNA, 100 bp, Homo sapiens
cagcagaaagacgtcacactgagagtatctggagaccttcatgttggaggagtgatgctcaagttagtagaacagatcattgaaacattgtagtcggtat

SEQ ID NO: 265937 - DNA, 85 bp, Homo sapiens
cggagaccccgcgccgacggctgctcaaacatcagggtgtttcccattaaacactaccaggacaaaatcaggccttacatccagc

SEQ ID NO: 265938 - DNA, 100 bp, Homo sapiens
gatttaatgaccaaaactaaatcaactagtggaaatgacgacagcacatccttagatctagagtgggaagatgaagaagctgactacacagacttagtct

SEQ ID NO: 265939 - DNA, 100 bp, Homo sapiens
caaactcggcctcatcagcccggcctacctcttcctctggcccgaagccttcctttatcgctttcagttggatcaccgttataatgaattcaaacttcac

SEQ ID NO: 265940 - DNA, 100 bp, Homo sapiens
gtcattgttgcttccttcttcatattgaagaacttcaaccccacagtatggcctagcaatcctggttgtctctttctagaatgtttgatgggaaattgcc

SEQ ID NO: 265941 - DNA, 74 bp, Homo sapiens
taacagccaagatgctgcggaatctgctgagattttattccctcaaagttgcccccaaagttaaagccacagct

SEQ ID NO: 265942 - DNA, 105 bp, Homo sapiens
gagcttcgggtaactctcacagtggagggtgcgggaatggaaggagcagggtagcaagaccttcatgtgcacggggcgccctggctggctcactgtctcactacg

SEQ ID NO: 265943 - DNA, 82 bp, Homo sapiens
agggacactcggtgtgcgacgtggagatccgaaggaatgaaatccggacatttatgcagtgtgtgattctttctaaaacaac

SEQ ID NO: 265944 - DNA, 98 bp, Homo sapiens
catgcgcttcatgatgatgcgagcagagaacttctttatccttcgaaggaagcctgtggaggtgacaaaaggtgagacactcacctagaacagtgccg

SEQ ID NO: 265945 - DNA, 98 bp, Homo sapiens
ttgccacacggtggggcccaacgaggcgctggtggtttcagtgtgagccactgccccatgttgtgttgatgccaatctgccatgctagcctgtctacc

SEQ ID NO: 265946 - DNA, 100 bp, Homo sapiens
tgatgattatgttgctgtagctaccaggaccttatggattttctgaacccaaacggtagtgactgtactctagtcctgttttacaccccgtggtgccgct

SEQ ID NO: 265947 - DNA, 100 bp, Homo sapiens
tgaccacctagagccttggatccaggagaacggcggctggaaccaaggtgggaagctggcagtgcttggttcatgtcacatgttcagtgatcaatatttg

SEQ ID NO: 265948 - DNA, 90 bp, Homo sapiens
ccatctgaagggaggaaatagtggcaggtgacagtctgcatgtgcagttttcaggacccctaccatggaggagaccatcaaagatccccc

SEQ ID NO: 265949 - DNA, 98 bp, Homo sapiens
cagaaataccagtccccagtgagggtgtacaaatacccctttgaattaattatggctccctgactataatgtggaatttttccgacagtttatactgg

SEQ ID NO: 265950 - DNA, 92 bp, Homo sapiens
gcattttggcattgacatttaattttagggtcctttatatagaagggagagtagagcccaacctgggggaggacgatgaggacaaagacttg

SEQ ID NO: 265951 - DNA, 75 bp, Homo sapiens
gaggcctccccagccatgtggaactgtgtgaaagctgtggagccgttttccattctgaatgcaaagaaaagtctg

SEQ ID NO: 265952 - DNA, 100 bp, Homo sapiens
ctgaactccacttcactgcacttataaatattcagtttaaaaaacatcggctttccgttgtacataccaatacctatgcgaaatctgtggtgaacatggc

SEQ ID NO: 265953 - DNA, 75 bp, Homo sapiens
atctttcgggaaagctctctggggcaggcttatatcaaaggtgggtggatccttaggaaagcctggaagatttac

SEQ ID NO: 265954 - DNA, 98 bp, Homo sapiens
gcgggtgctgcaggcgccgccgccggacgtcggcaacggagaaggcttccgtatccatgattatttgtactttcaagtgctgagtcctggggacattc

SEQ ID NO: 265955 - DNA, 101 bp, Homo sapiens
aatctgtcatcagaagaaattcaacagagagctcaccagattactgatgagacggtgatcgttggctcctacttgattgcacacggtttcttcagcgtcta

SEQ ID NO: 265956 - DNA, 98 bp, Homo sapiens
tttctaccttgtatgcctcaatttgctggatttaagcactgctgcactttatgagtgaggctggaccgactgtcggaggcagccaaggtgaacacaga

SEQ ID NO: 265957 - DNA, 75 bp, Homo sapiens
tgtaggagtctctctaccactggatgaaaatatgactgcaccagagccaatggaacttgatggccctaaaggaac

SEQ ID NO: 265958 - DNA, 97 bp, Homo sapiens
gcaagtgaggattctctgagagcaagagtggatgaggccatggaactcattattgcacatggacgagatgggatttcaccatgctactcaggcttgt

SEQ ID NO: 265959 - DNA, 83 bp, Homo sapiens
cgaccctgaactggaataattaggaagaggcagaaatccaggcagaacttgaacgtttggaaagagtcagaaatcttcacata

SEQ ID NO: 265960 - DNA, 100 bp, Homo sapiens
tggcagaaacagaggactaattttggcagttctaaatttgaatttgagattggtgctggtgaagagaagcaaaaggaaggaggcaaaaagaagaacaaag

SEQ ID NO: 265961 - DNA, 71 bp, Homo sapiens
cgccgtgttatccttgagtaaagtgtggcaaaggagcagagaactttgacaagttcttcacacgaggacag

SEQ ID NO: 265962 - DNA, 101 bp, Homo sapiens
aaaagactcaggacggacaagcacagtcttcggaaggtagatatagttgtaggtactccgggaagactagatgacttggtgtcaactggaaagctgaactt

SEQ ID NO: 265963 - DNA, 48 bp, Homo sapiens
gcctaagcaacccagctcccagggtaagatgatggcatgcaaacactg

SEQ ID NO: 265964 - DNA, 75 bp, Homo sapiens
tggacaacacggagaacgacctcaaccaggggaagagcattaagaagttggttttgaagaaccttaataatagca

SEQ ID NO: 265965 - DNA, 98 bp, Homo sapiens
aggtcacgaaatggattggagtgaaccggagaccccgaaaacggaagcgcagggagaaggaagaggtgtttgaaaagtgaggtctgccagtctttagt

SEQ ID NO: 265966 - DNA, 48 bp, Homo sapiens
gatgatacctttctaacagcccaaatgcttgggatggaagaagtttga

SEQ ID NO: 265967 - DNA, 74 bp, Homo sapiens
gagccgatactgagcttcttcctatttgccatgggcaaaacaacgagtggatgagaaacccagcctgggagccg

SEQ ID NO: 265968 - DNA, 75 bp, Homo sapiens
gcaaaatgcgttaggaaaatgtgatgcatgtctcagtgcatcagaagagctaacaattgctggaatgacctttac

SEQ ID NO: 265969 - DNA, 90 bp, Homo sapiens
aaaatgatcttgctgttgtggatgtcagaattggtatgactaggacacgcaggagaaagaaggtattctgcctgagagagctgaagaggc

SEQ ID NO: 265970 - DNA, 74 bp, Homo sapiens
tgatgcctgcagagctgtggcttaccagcttcgagagctgtgcccaggagtgaacaaccagccctacctctgtg

SEQ ID NO: 265971 - DNA, 100 bp, Homo sapiens
ttggagtttaatgagaggaatatactcatcatcagtctatttagaagagatcatggaagggaagtggttgctgtgtatgttactggtgcttggaactgct

SEQ ID NO: 265972 - DNA, 50 bp, Homo sapiens
cgtatccccagcccactgggctacgcagatccctttgggcgtcccacaag

SEQ ID NO: 265973 - DNA, 99 bp, Homo sapiens
ctcctcgccagcagccgtccggagccagccaacgagcgattatagcatttgatgagctgaagactgattacaagaatcctatagaccagtgtaataccc

SEQ ID NO: 265974 - DNA, 100 bp, Homo sapiens
tgcagcttcaagcttaggaccacccaccatgcctatccaggtcaaaatgcagatcttcgtgaaaacccttaccggcaagaccatcacccttgaggtggag

SEQ ID NO: 265975 - DNA, 88 bp, Homo sapiens
cgaggacttcggtcttttgttctgttgcagctgggtttgctgttgctagggaaatcatcctcatcctttgataactgtgcttgaacac

SEQ ID NO: 265976 - DNA, 101 bp, Homo sapiens
gctggaggtgggatccacacagctcagaacagctggatcttgctcacactctttcaagagaagcttccttgatcttatctagtaagctgcctcagaggggc

SEQ ID NO: 265977 - DNA, 82 bp, Homo sapiens
ctcgcggcgcctgggattttctctgcgttctgctcctactgcttcgcgtccagacaggctgaccaactgactgaagagcaga

SEQ ID NO: 265978 - DNA, 100 bp, Homo sapiens
tagcctgtctaccagggccaggtgacctgtcctttcagcttctttctcacacgcagatgaacactggacttcagaaatgattcagtggtcccaatttaaa

SEQ ID NO: 265979 - DNA, 117 bp, Homo sapiens
ggtgagggagcgagccagcaagcggaagctgcccttcaccgcgggcgccaatggggagcagaaggactcggacacagaatcagcttaaaatggctcgtttcaccattgtggatggga

SEQ ID NO: 265980 - DNA, 75 bp, Homo sapiens
cctacaacgtcatcacgccctttctcttgctcaaggtctccaccagctcctggccgggttcgaggacaagtcagc

SEQ ID NO: 265981 - DNA, 100 bp, Homo sapiens
aaatagaaaagtctctaacacagcttgccgggattgctgtccttgccattggactatggctccgattcgactctcagaccaagagcatcttcgagcaaga

SEQ ID NO: 265982 - DNA, 101 bp, Homo sapiens
gtgaatgctgctaaaaacaagactggggctgctcccatcattgatgtggtgcgatcgggttatatggccaccatggctgctcagggggtccccgagagtct

SEQ ID NO: 265983 - DNA, 50 bp, Homo sapiens
cagcgggagccggcgtgcgagcggcagggagtgcatccgccccaaccctt

SEQ ID NO: 265984 - DNA, 90 bp, Homo sapiens
aaagataattcgcagtgatgtgaaactggcctcccaagccctgataactgtgtcagcgtgttatgatgccgtcccgtaccaacctggcta

SEQ ID NO: 265985 - DNA, 117 bp, Homo sapiens
ggagccatgaggcgccagcctgcgaaggtggcggcgctgctgctcgggctgctcttggagacaatgcagatcttcgtgaagactctgactggtaagaccatcaccctcgaggttgag

SEQ ID NO: 265986 - DNA, 119 bp, Homo sapiens
gtggagcagatccgatggagaggctgagctgctccaggacttgggctccctgtgctgtcaggaatctacaggacttggctcgtatttacattcgacgcacacttagaaatttcataaat

SEQ ID NO: 265987 - DNA, 88 bp, Homo sapiens
tagaattcacacagagccacctagagagactagcttgcaaaattttcctcatattgaggtggttcggaaaaaagaggagagaagaaaa

SEQ ID NO: 265988 - DNA, 82 bp, Homo sapiens
gttaccatggtgaagctggcagccaaatgcatcctggcaggataaggagccccgtggaatcatccctttagagaatctgagt

SEQ ID NO: 265989 - DNA, 90 bp, Homo sapiens
gatcgcgctggataaagatgcgcctctgcgatttgcagcgacaagactctgggacgatgaagaagccgcacaccactgaagagattggtg

SEQ ID NO: 265990 - DNA, 82 bp, Homo sapiens
tcttgccctcatcctggttctggaatcctcagttcaagaacaccttccaccatgaccacctcagcaagttcccacttaaata

SEQ ID NO: 265991 - DNA, 75 bp, Homo sapiens
gggcggtggaccagggcaccagttcgacgcgctttttggacatgagaaacctgaggttcgctttgaaacaggaag

SEQ ID NO: 265992 - DNA, 60 bp, Homo sapiens
agagacgaggagaagatgtggagacttccaagaaatattgaccaggatgttgtcattact

SEQ ID NO: 265993 - DNA, 96 bp, Homo sapiens
gctctcggtccgggacgtgcgcttccccacgtcgcttgggggccacggcgcggacgccatggcagaggtggaggagacactgaagcgactgcagag

SEQ ID NO: 265994 - DNA, 88 bp, Homo sapiens
caccaccaccaccaccacagagtctgtggaagaggtggttcgagggaagaaggagaaagggccaacccctgaagaagcaatacagaaa

SEQ ID NO: 265995 - DNA, 82 bp, Homo sapiens
tctggagccccagattcaacccgtgtacgtgcctgtgcctaaagtagcccctgaagaagatgaaaggaaaaagaggcgacga

SEQ ID NO: 265996 - DNA, 100 bp, Homo sapiens
gaaaacctcaggaaattctacaagggcaaggggacgcgagataaggtcctgatcagaatcatggtctcccgcagtgaagtggacatgttgaaaattaggt

SEQ ID NO: 265997 - DNA, 139 bp, Homo sapiens
ggcgggacgcgagcggcgagccggagcgcggagcccggctcccgcaccatggaggaggacgacagctacgaggcaaggacctagcaacacttatgaagatcctcgaatgaactgtggtttccagtccaattatcaccag

SEQ ID NO: 265998 - DNA, 98 bp, Homo sapiens
ggaaacatggcactgttgcctatcagaagtcaattcaaaggacctgcccccagagagaaaaccaatagagccatggcgactccctctgctgccttcga

SEQ ID NO: 265999 - DNA, 51 bp, Homo sapiens
gtgaaatcagaggagatgtaactatcgggagaaggccagtggctttgagga

SEQ ID NO: 266000 - DNA, 100 bp, Homo sapiens
agcttccaggtgtcccagaaacccaggaaatcgagactcatgactcccagagaggatggcatctagaagggtgtcaaattgagaaccaggtagatcccca

SEQ ID NO: 266001 - DNA, 100 bp, Homo sapiens
caaatgttcattgcacacttgagttaagcagtagtgtttgggaagaaaaacagaggagttctattaagacgcatttaaatcaaacggtattgagatggat

SEQ ID NO: 266002 - DNA, 99 bp, Homo sapiens
gtagctcaaaagatctgcagagctcccagggcggacagcagcctcgggtgcaatcctggagccccccagtgaggaaataagcgggttttgaaaacaaaa

SEQ ID NO: 266003 - DNA, 83 bp, Homo sapiens
caagtggctctgccacaagagcatctttgctggattatcttcaatgggactatgttcggagtgaactggagtttgcctatgag

SEQ ID NO: 266004 - DNA, 100 bp, Homo sapiens
gggactctgatcccagccatggccttcctctcctgcgtgagaccagaaagctgggagccctgcgtggagcaatcatcctcttccagtggtagcgtgtttg

SEQ ID NO: 266005 - DNA, 75 bp, Homo sapiens
actcggggactctgccttttaccggccttggatgtatgggccactggcgtcacgttgtactgctttgtctatggg

SEQ ID NO: 266006 - DNA, 98 bp, Homo sapiens
caaacatcagttcatttcaccccagcacttcaatatgcattgcattaactgtcatggattgacggcagtcaaggaaaaagcaggagccactctacgga

SEQ ID NO: 266007 - DNA, 98 bp, Homo sapiens
gctcggccgactgggcccggagcggcgcggaggccgggcgctgacgataaagctgtacaccaagcatgggactttgaaataccagacagactgtgccc

SEQ ID NO: 266008 - DNA, 97 bp, Homo sapiens
ttaattgaaggacaacttcctcctctgggcactccacagaaggatgttattatcaagtcagatgcaccggacactttgttattggagaaacatgcag

SEQ ID NO: 266009 - DNA, 75 bp, Homo sapiens
cagagaacagcctcctggaggagaccctacactttgaccatgctgtccggatggaaggtggaagcaggagcacct

SEQ ID NO: 266010 - DNA, 97 bp, Homo sapiens
tgtactctggcgtgcaacctggaattggaacggagagtgatcagcagctggactgtgccttggacctaatgaggcgcctgcctccccagcaaatcga

SEQ ID NO: 266011 - DNA, 100 bp, Homo sapiens
tcagaaactgatcaatcctgtaaaaacctcccggaaccatcaagatcttcacagagaacttcttatgaatcaaaaaagggcaagtgtccagagaatggct

SEQ ID NO: 266012 - DNA, 97 bp, Homo sapiens
tcaagcagcaggaagatcttttgagggtacggttcctggagcagcagaacaagatgctggagaccaagtggagcctcctgcagcagcagaagacggc

SEQ ID NO: 266013 - DNA, 75 bp, Homo sapiens
cctcctgtggtggaggagaaggaaagggtctccgtctctccaccgggggcttcatccttccagggaggagaagag

SEQ ID NO: 266014 - DNA, 90 bp, Homo sapiens
gctggccgggctggctgcggccgccctgggccgggccccaccggacggaaagaccacagcaagattctttcattcgtctcctcctagcct

SEQ ID NO: 266015 - DNA, 90 bp, Homo sapiens
gggactttgcagaaatgtgtgcagactacatggcatctaccataggggaccgagaggagcggaagctgctgctggaccctagcagccccc

SEQ ID NO: 266016 - DNA, 71 bp, Homo sapiens
agaaaacaaaggcggccggcctggtgcgcaaggccccgaacaacaggcgccatggctgcggagcggacccg

SEQ ID NO: 266017 - DNA, 138 bp, Homo sapiens
gctccaggagcaagtactccaggaagcacagagctgtaccagtacacggcccacgttgccaggtgaagctttgttctaagaatatttgtttcatctagtttatgagtccaaatgatatagactgtaaatgtcacagca

SEQ ID NO: 266018 - DNA, 82 bp, Homo sapiens
tcgaacccgcctgcgatggggcgagaaaggtcccactgcagccctccaagcaggctgatcagctgaccgaagaacagattgc

SEQ ID NO: 266019 - DNA, 101 bp, Homo sapiens
cgagaaactggacaaccaacggctcaagaatttcaagaacaaaggccgcgacttggaggttcaggaagatttgactgaagagaaaaaaagggaactggagc

SEQ ID NO: 266020 - DNA, 82 bp, Homo sapiens
gagcggcatccagcttgccaccaggtattgttgcagcatctggcagtgagactgaggatgaggacagcatggacattccctt

SEQ ID NO: 266021 - DNA, 83 bp, Homo sapiens
cgacaagccgctggcagccgcggatctcaccgccgctcaggggtgctggtgacagctttgtgggagctctggccttctacctg

SEQ ID NO: 266022 - DNA, 49 bp, Homo sapiens
ccgggagaagctggcctgggccaagattaaggatgctcaactgcaaaat

SEQ ID NO: 266023 - DNA, 82 bp, Homo sapiens
agtgtttctttataatacattccatgggaggaggtggaccggctggaagtcgtgaacaaacaatctgtgcgtgttattcctg

SEQ ID NO: 266024 - DNA, 100 bp, Homo sapiens
tgctgtcgccgctgctgggagatgggcctactcgcccgccaccctgcgctgccgccgctctgaggagttaaagttatgattttggatgacaacatgcaaa

SEQ ID NO: 266025 - DNA, 134 bp, Homo sapiens
gtttgaaacagaagctggaggcaaaagaaatctctggagttgaagattggaagataaccaatcaaattcttgtagacagtggcctgattccaccaagagaaggcccaggaggaagaagagaaaaagatgctgtg

SEQ ID NO: 266026 - DNA, 83 bp, Homo sapiens
atcggccgcacgtggaatgacccgtctgtgcagcaggacatcaagttcttgccgttcaaggccaaatttgagtttcatcatgg

SEQ ID NO: 266027 - DNA, 88 bp, Homo sapiens
gcctattgtgggacttcaccttgtgatcatgtccctgaatgatgtgactttatcattgttaatggatcaagcccatgactccagattt

SEQ ID NO: 266028 - DNA, 83 bp, Homo sapiens
ctttgccgatccgccgcccgtccacacccgccgccaggtacctgccgtgggcagatctgagctttcttcttggacaccccata

SEQ ID NO: 266029 - DNA, 97 bp, Homo sapiens
cggggccttccacaccccctccgtgggtgtgtgtgtaaacaggaacatcgataagtagtgtaaaaacttgcacaatgaaatccgaagccaaggatgg

SEQ ID NO: 266030 - DNA, 149 bp, Homo sapiens
tttgcacagactgccagcttcattatgctgccgacagcttccagcaaaaggaggacgtttgcagccagatatttcagtgctaagagatgccgtttgcaggcctcatctctgcttgagaatcgggggctccaggcactagaagagccggc

SEQ ID NO: 266031 - DNA, 95 bp, Homo sapiens
ggccaaagcctgcccagacggctcacctgtgcgggatggaacaaaagctcactccatcactcgatgagataatatgagatttctacttcggagag

SEQ ID NO: 266032 - DNA, 99 bp, Homo sapiens
gttccctctcttcgcggagcggcgccgcgtagcttccatccgccagctgccatgagcgagcgcctccgtcccagggatcctcaattcctgagctagcac

SEQ ID NO: 266033 - DNA, 75 bp, Homo sapiens
tggagagggagtgatgtcttccagactcggtaaagaaactgcggcaatgaaagctgatctcctgagggccaggaa

SEQ ID NO: 266034 - DNA, 100 bp, Homo sapiens
gtttccccctgttgcagggttttgtttatataactcaagttgtttggctaaattcttcaggatcaagagaaatatggattattaaatgtaacaaaaattg

SEQ ID NO: 266035 - DNA, 100 bp, Homo sapiens
cctcctccccaccaccaccatctccatcacccaccaacaacaccacaataatccacagccaaggaggcttttaggcgtttgggtaatggggtgtctgatg

SEQ ID NO: 266036 - DNA, 97 bp, Homo sapiens
caggtcctgcacctcagcttctcccattccgggtaccagttcgcgtcctgctccaaggactgcactgtgaagactggggcagcacctactccgtgtc

SEQ ID NO: 266037 - DNA, 87 bp, Homo sapiens
tcccccaggatacagggtcaaaggagagcacaaccatcgcagttggaagcccatggggcaggtaatggaactgctggtccatctgaa

SEQ ID NO: 266038 - DNA, 90 bp, Homo sapiens
gccaggaagtcggagtttgagccccggaggcagagcggctgccatgacctaatctgggagcctgcaagtgacaacagcctttgcggtcct

SEQ ID NO: 266039 - DNA, 75 bp, Homo sapiens
aaagagtaaagttgtgctcaacggtggtttgttggaaatgctccgactacaaagctcaacttgaatatgatggtg

SEQ ID NO: 266040 - DNA, 100 bp, Homo sapiens
gtcatcaagaagaatgacgatgccccatggctgggggttatggagtgatgggtgacgatggttctattgattatactgttcacgaagcctggaatgaagc

SEQ ID NO: 266041 - DNA, 97 bp, Homo sapiens
gccaagtgtatctgttaataattcttggagaatctaggtcctgctgtactagccaccaaagcagctgctggtactaagaaatatgatcttagtaaat

SEQ ID NO: 266042 - DNA, 75 bp, Homo sapiens
gcagtctgttgaggcatctggacaccacacacatcatcagtctgatctgcttggctttgaggaagagtggcagta

SEQ ID NO: 266043 - DNA, 98 bp, Homo sapiens
cctctttaagacgaattaaagggagattacacagaagcaaaagccttgatagcatggatttctgtgagctcactgtgactctgacatcattagaagca

SEQ ID NO: 266044 - DNA, 75 bp, Homo sapiens
gattcgcagtggtcgcttcttctccttgattggagctggagggagcatcactgggctgaagtttaaccctctcaa

SEQ ID NO: 266045 - DNA, 100 bp, Homo sapiens
acaacttcagttcattggggttaaggagatctacagaccagtcacgcaagaaacctattggaattcgagacttaattaatgaagctttgcatcgagaaac

SEQ ID NO: 266046 - DNA, 75 bp, Homo sapiens
ctgccgcttcagttctcccggtgtggccacgagtcggctgcagatctgggacacggccggccaggagcggttccg

SEQ ID NO: 266047 - DNA, 99 bp, Homo sapiens
gaccgggagcggcggcagcggcggcgcggaggcggctgaggtgcgagccgggactttctccctcgagggtcgggcattgtaacaagacgacctcttgtg

SEQ ID NO: 266048 - DNA, 100 bp, Homo sapiens
gggaaggaggccgagccgggatctcaggtcctcgggggcggcggccacgccaaggacgggctggtgagattggagagatgaaggatggagtcccagaggg

SEQ ID NO: 266049 - DNA, 75 bp, Homo sapiens
cggcactgaacaccaccggggcccgtccacctcccgcaggcctgatcacttgaacggacatatcaagcaggtgca

SEQ ID NO: 266050 - DNA, 73 bp, Homo sapiens
tcgggtggagtgtaggtcatatcgccgcgtgaagtaagaactctgctagagaggaaatggctgcttcatcatc

SEQ ID NO: 266051 - DNA, 78 bp, Homo sapiens
gagaagctaatgctggccgtaggcaagcaccggaagcaccccggcggccgcggtaatgctggtggtctgcatcaccac

SEQ ID NO: 266052 - DNA, 100 bp, Homo sapiens
gatatttagagatggtgaagaagcaggtgcttatgatggacctaggactgctggatgaaaactttcggaagagaaagttgcctgtggtaagttcagttgt

SEQ ID NO: 266053 - DNA, 75 bp, Homo sapiens
cggtgcagggtaacatggcggatgcggaagggttgaaaaataccggccacagaccctgaatgatctcatttctca

SEQ ID NO: 266054 - DNA, 75 bp, Homo sapiens
cgcggacccaggcgcggatggcgaggccagcaggtcttgaggaccggcccagctcaggctcctggggcagcggcg

SEQ ID NO: 266055 - DNA, 96 bp, Homo sapiens
ccattccaggacacttctgagtacatcatttcatgtcatcctgttggcactgatgaagaacccttacagatcaagcttcaggagtctccggaagac

SEQ ID NO: 266056 - DNA, 87 bp, Homo sapiens
tggggcttaagatgtcctgcctgaaagtgaggagaaggaggaagtgaccatggacacaagtgaaaacagacctgaaaatgatgttcc

SEQ ID NO: 266057 - DNA, 100 bp, Homo sapiens
gttcgccgctggtggctccggggactttgaatccaaagcaaaccatcttggtgattctggtgggactcctgtgaagacccggaggcattcctggaggcag

SEQ ID NO: 266058 - DNA, 100 bp, Homo sapiens
aaagaatgtatgaggagaattctcagcctaggatttaagcgagagcctcactggttcccaggacatcaacctgaactggatcctccccgatacaaatgca

SEQ ID NO: 266059 - DNA, 111 bp, Homo sapiens
ccgggagaagcatgggaaggaggccgagccgggatctcaggtcctcgggggcggcggccacgccaaggacgggtcagtactcctgcatttgtaccaacgaaaactcacgtg

SEQ ID NO: 266060 - DNA, 87 bp, Homo sapiens
ccctatccagacggctgcccttcaagtaccagtcctcagaatggttggaatgaccctccagctttgaacagagtacccaaaaagaag

SEQ ID NO: 266061 - DNA, 90 bp, Homo sapiens
tgactttagtggttcaatccaaagaatggggaatgcatcagcaacccccacacccccctccagatcagccatggatgccaccaacaccag

SEQ ID NO: 266062 - DNA, 83 bp, Homo sapiens
ctgcaaattattccatagcacggataccaaatctgtgattctgcctgatcaatgcaggagtcctgtacctctacttcagcaat

SEQ ID NO: 266063 - DNA, 101 bp, Homo sapiens
ctttaccctttttaatattggccaatcatcaagacaagccagcagctcgctcagtacaagagataacggcaaaagcttctatcatttttgttactcttcag

SEQ ID NO: 266064 - DNA, 75 bp, Homo sapiens
tggataaatctaagcaactgttcaatgggttaaggttctggctccttggcagcaatggctgtatttgaagataag

SEQ ID NO: 266065 - DNA, 90 bp, Homo sapiens
ggttctgggaagatggcgaaggtctcagagctttacgatgtcacttgggaagatgtacattgaagatgtcagtttctacatgtgggaagt

SEQ ID NO: 266066 - DNA, 74 bp, Homo sapiens
ttcgaaggattttgcaacaaattcgagctgtccgactctgagaatggcaatttctcagcaagacctggtacaca

SEQ ID NO: 266067 - DNA, 110 bp, Homo sapiens
tcaagtactggctatattatttgcacccagtcctgcagcgccagcagctggactatggcatctatgttatcaaccagaggctgacccgcggctgattgagtccctctccc

SEQ ID NO: 266068 - DNA, 83 bp, Homo sapiens
gtgtctaggtgagtcgcggtgggtcctcgcttgcagttcagcgaccacgggacccagacatggagctgcgggaagaagcctgg

SEQ ID NO: 266069 - DNA, 100 bp, Homo sapiens
cccagtgacgggtctggagtgcgtgggggaccggctgttggcggatttacactgactgggccaaccactacctagcaaaatcaggccacaagcggctgat

SEQ ID NO: 266070 - DNA, 100 bp, Homo sapiens
cccgaagctctgtttttgcactgagggcctttaatgtggaactggctcagatcatcaatgctgtggtactgttgattttattgagtgccctggctgatcc

SEQ ID NO: 266071 - DNA, 101 bp, Homo sapiens
gatgccctgcagtacctgcagaaggtctctggagacatcttcagcaggtactaggttttgacaagcttgcatcatgcgtgagtataagctagtcgttcttg

SEQ ID NO: 266072 - DNA, 51 bp, Homo sapiens
tgacaaggaggcctgagtagaccgcaggccccttcacagatgtagtcacta

SEQ ID NO: 266073 - DNA, 88 bp, Homo sapiens
agcattagaagccttacagagtgaaaaatcacggttagaaaatggatttctgactggaatctcaccactgaaaaaaagcacacccttt

SEQ ID NO: 266074 - DNA, 75 bp, Homo sapiens
gaaaaggtgattcttcctaaactaacaggagagatgaatggagagtatagaggcagaggatttggacgaggaaga

SEQ ID NO: 266075 - DNA, 90 bp, Homo sapiens
tgaaggagcagtctatctttggagccccagactctggtaaatgctctgcttcctcctgcctggatacttctaatgaccctgacgacctgg

SEQ ID NO: 266076 - DNA, 100 bp, Homo sapiens
acggcggggcctgggggaccgagcagcgggaggctgtctttcccttccagcctggaagtgttgcagagaatcaaactgatggctgaaggcgagttgaagg

SEQ ID NO: 266077 - DNA, 99 bp, Homo sapiens
gaactagtagatagagccaaacaatcttttcaaggacgcttccattgcacacagattccatgtgatgagagagaaacatcctgaaaaattcaacagcag

SEQ ID NO: 266078 - DNA, 83 bp, Homo sapiens
taacctggatcccagaaggtcgcgaaggcagtaccgtttcctcagcggcggccccatggctgggggttatggagtgatgggtg

SEQ ID NO: 266079 - DNA, 75 bp, Homo sapiens
ttcgccaaggagatcgtctctctcatcgaggcccaaaccgccaagtctgcgctcctcagaccaccggcaggtgaa

SEQ ID NO: 266080 - DNA, 93 bp, Homo sapiens
gaagaactcgagcgacagagacaagctgagcttgccgcacaaaaagctagagagacatatctgaagagatggattaagaatgctttggattaa

SEQ ID NO: 266081 - DNA, 95 bp, Homo sapiens
tcttgggggtcctccgagtcttgcggctcctgcgcaccctacgccccctgcgcaggagagcctgtcctgcctccagtccacctgtggccttgtcc

SEQ ID NO: 266082 - DNA, 96 bp, Homo sapiens
tcgcactgtgacatgtctgatcccttgctcccatccctgcagcatgaacaagagagcagagctgacatctgataaagacatgtaccttgacaacag

SEQ ID NO: 266083 - DNA, 75 bp, Homo sapiens
gctcaacccaccgctgccgaaatgaagtataaggatgcgtattggatagcaatgaatagttctctgaaatgtaaa

SEQ ID NO: 266084 - DNA, 75 bp, Homo sapiens
gaccagaggaagaagcaacacattgtcttctccaagttattgaaagctatgggttggcaggaatatcctgaaaat

SEQ ID NO: 266085 - DNA, 96 bp, Homo sapiens
tatgaactcaggtcttaccaactccgatggtatcctgaggtgcggcaccactgtcccaacactcccatcatcctagtgggaactaaacttgatctt

SEQ ID NO: 266086 - DNA, 100 bp, Homo sapiens
tctgccctcagtatcaacaatgattgctcaagacttctttgtggctttgctaaaggacaggttacagatcgacatatctggagatcagcattagaaagtg

SEQ ID NO: 266087 - DNA, 82 bp, Homo sapiens
ggacagctgttccttggccatcccaaagctattctgggggcaacagaggtttggcaaatacgtgtagacctacatttattaa

SEQ ID NO: 266088 - DNA, 50 bp, Homo sapiens
atcctaactatgatgatgaccaggaaaggcagactacaagttactgagca

SEQ ID NO: 266089 - DNA, 100 bp, Homo sapiens
gcaggttcccgcccggaagaagcgaccaaagcgcctgaggaccggcaacatggtgcggtcggggaataagaattgcctgaggttctgtccattgaggagg

SEQ ID NO: 266090 - DNA, 98 bp, Homo sapiens
gaaaacacatctaccgactgatcttcttcctaaatctttctgggaaaacaattgcaagggtgccaaagcatgctttctgcgggacattcctttctcgg

SEQ ID NO: 266091 - DNA, 51 bp, Homo sapiens
tgaaaggctcccggagctccgagctgtttgcagacaaggtcccaaagacag

SEQ ID NO: 266092 - DNA, 100 bp, Homo sapiens
ctgccgggcaccgaggaccagctcaatgacagattacgtgtgaaaatgaacttgtgcaaacccaaccccatgctgataatccatctaatactgtcacttc

SEQ ID NO: 266093 - DNA, 75 bp, Homo sapiens
ggatgagcctgcagagcgcgcagtacctccgattatgatgcatcattatcacagaagaaattcgtgtctatagct

SEQ ID NO: 266094 - DNA, 90 bp, Homo sapiens
gttccatcccacctttgagtcagttggaaaatggatataccttatttgattatgatgttggactgaatgatataattcagctgctagttc

SEQ ID NO: 266095 - DNA, 75 bp, Homo sapiens
cctaaattcaaggtcaagagctcgcctctgattgagaagcttcagctggactgggcagcctttggggtcatgacc

SEQ ID NO: 266096 - DNA, 75 bp, Homo sapiens
gtcggcagcaagaacagagagagaggtggacagatctgagagatactgagtcagcagtcggctttgattataaag

SEQ ID NO: 266097 - DNA, 76 bp, Homo sapiens
gccaagaggcaaaggggaggttacgcagcaaaccatccagaaggctgctgtccccaaggcccagcctcctcacccc

SEQ ID NO: 266098 - DNA, 90 bp, Homo sapiens
acaagaatcattcttgcagcatttcgtgaacaggagtacagctgtgtagtaaagatgccttctggtgaatttgcacgtatatgccgagat

SEQ ID NO: 266099 - DNA, 90 bp, Homo sapiens
actaaagtgcaggccgaactagatgagaccaaaatcattctggcgtcctgcctctgcggctctgccccctgcatcctgtgcagctgctgc

SEQ ID NO: 266100 - DNA, 50 bp, Homo sapiens
cagtcatgagcagggcttctctgtggaaaaaagtcctccatacattttct

SEQ ID NO: 266101 - DNA, 96 bp, Homo sapiens
ttatgtgacttgtgcctgtctcatattcttctgcatcttcattgtgcagattctcgtgctgccaaacttatagtgatttaggatactacattatca

SEQ ID NO: 266102 - DNA, 101 bp, Homo sapiens
ggaggcggaggcagaggtggaggcgctttgaaagcagaagatggctgtgccacccacgtatgccgatcttggcaaatctgccagggatgtcttcaccaagg

SEQ ID NO: 266103 - DNA, 100 bp, Homo sapiens
gttcggtgcagctgccagatccgctgatctagtgcttctcgaaaaaaaccttcaggcggcccatggatcattgctgaaggtgccaatgggccaacaactc

SEQ ID NO: 266104 - DNA, 50 bp, Homo sapiens
cgcctcctacgtttacctgtccatggtacagcaatcatttgaaactccaa

SEQ ID NO: 266105 - DNA, 88 bp, Homo sapiens
agcccgcggagtatacaccatgagcaaagctcaccctcccgagttgaaaaaatttggaatccagatatgacactaaaaagttatttca

SEQ ID NO: 266106 - DNA, 100 bp, Homo sapiens
gcaggccttgcttttatcgaacttgtcaatgaaggaaggattgttaaaatgagtcttcggaagcaaacccctagtgacttcttaaagcaaatcatcggac

SEQ ID NO: 266107 - DNA, 75 bp, Homo sapiens
cctgggctttaccatctttgtggctgtgcttgccaggcctggctccagtaccggcggacgtcgagaaatgtcagg

SEQ ID NO: 266108 - DNA, 101 bp, Homo sapiens
caaccaccttggaagactagagaggaagttcagaagcagaaggaactttccaaagctgaaatccagaaagttctaaaagaaaaagaccaacttaccacaga

SEQ ID NO: 266109 - DNA, 85 bp, Homo sapiens
acagttggatcttgctcagtctctgtcagaggaagatcccttgacactgtttccagcaagttgcaaaacaacaatgtttatacta

SEQ ID NO: 266110 - DNA, 100 bp, Homo sapiens
accagagactccctgtgcttcactgtcacccactacaagcacagcaagcagcagtacagcatccaggcctccctccgtatccagagcacctcaccagccc

SEQ ID NO: 266111 - DNA, 100 bp, Homo sapiens
tgacatgtctgatcccttgctcccatccctgcagcatgaacaagttgcagatctgatctcttctgaacacctcatcgtgtctccatccctgggaatctga

SEQ ID NO: 266112 - DNA, 100 bp, Homo sapiens
ggctgggaccgtgcgcgtgcgcctgggggcaccgctgccgttccgagggcagagcggcttgggtaaatccaccttaatcaacaccctcttcaaatccaaa

SEQ ID NO: 266113 - DNA, 73 bp, Homo sapiens
acaagatggcgaccgagacggtggagctccataagctaaaggtgttacagggtcttgattatttacataccaa

SEQ ID NO: 266114 - DNA, 83 bp, Homo sapiens
gccccacttgctcgtgcactttacacacatgagggatgatccaccaacacattctcagccagacagtgatgatgaagcagaag

SEQ ID NO: 266115 - DNA, 100 bp, Homo sapiens
cctggctgcggcctgactctaagactcaggtctcagcggcggtggcagccgaggtgcaggatgcaagaaggcgccccccggccgggctcccgctccaggc

SEQ ID NO: 266116 - DNA, 90 bp, Homo sapiens
gctgcgccacattgtggatgaggtcaatggattaataaggttattaatgctgcactggctttagcagcaaaaccacagagtaaactggcc

SEQ ID NO: 266117 - DNA, 75 bp, Homo sapiens
attcaagctgataggctgcgctaccggaatgtcatccagcgagtgattagtaagagatgctaaaaaccttgtacc

SEQ ID NO: 266118 - DNA, 51 bp, Homo sapiens
tctatctaacgtttaccctagcaaaccaaccacctcctccaccctgaaggg

SEQ ID NO: 266119 - DNA, 83 bp, Homo sapiens
tgctgaggcgaggagaggccgaactccaagggacgacgctcgcggaagcagaggtttggggcaagccgattttttcagttgat

SEQ ID NO: 266120 - DNA, 90 bp, Homo sapiens
ccatccccatcatgatgtacagaaccaagtctcttcactaggcttaaaagacaaccttcttgcttctgggacatccagcctgacagccac

SEQ ID NO: 266121 - DNA, 100 bp, Homo sapiens
tgatgccccacttggtgaatggagatgcagctcagcaggaacagggaagtcatatctgctaaagcgaatcctgggctcactgccccccacaggcactgtg

SEQ ID NO: 266122 - DNA, 100 bp, Homo sapiens
caaggaaaaaaacctctgaccgtgaagagacatgagatgattgccaaacccccaggtttgacagatgaaaaagtgaaggcatatctttctcttcaccccc

SEQ ID NO: 266123 - DNA, 90 bp, Homo sapiens
aggtggagccaccagcctctccttggatttgaatttgttgaaatgagcagtcgtaaatcaaagagtaacagcttaattcacacagagtgc

SEQ ID NO: 266124 - DNA, 90 bp, Homo sapiens
gaagcccttgatggacatggcaccccagcagtaggacacccagggcaattgaaggaacagactaaaaatcgtgtcctggaaggaaactac

SEQ ID NO: 266125 - DNA, 100 bp, Homo sapiens
gagaacaaacgcaaaaggacagtaaactgtggaccttgaagttagcagagctaaagttgcagacaagatccagctcatcaataatatgctggacaaagtc

SEQ ID NO: 266126 - DNA, 75 bp, Homo sapiens
ttaatcctcaatttaagcctgatctaacccctagaaacagcctccaccaggcggtgtgaagatgcctaatgtacc

SEQ ID NO: 266127 - DNA, 82 bp, Homo sapiens
tcactgccttcttgggaattgcttcgtttgccattttcttatggagaactgtccttgttctggaggaaagcaggaatgttca

SEQ ID NO: 266128 - DNA, 75 bp, Homo sapiens
catgggctctatcaaggaaaacaagtgtctgcttatgtcggttgctccttgagggcaggacagttcttatggctt

SEQ ID NO: 266129 - DNA, 74 bp, Homo sapiens
ataaaacccagaagcagaacttgaaggttaaaccactagcccatttcacagatcactaaggaggaagagcgaga

SEQ ID NO: 266130 - DNA, 75 bp, Homo sapiens
gcgcggggccgaggccgcctccgagcgccaggaggactcagagagagtaatgataattaccggaccaaacatggg

SEQ ID NO: 266131 - DNA, 88 bp, Homo sapiens
gctgagcgtgcagcaggatttcacctccgggaatttggcttggaacaaaattgctattattcaccccaatgcattttccactttgcca

SEQ ID NO: 266132 - DNA, 75 bp, Homo sapiens
ttgctgggagtggacttttccagtaaggaaagttacagaatgtctgaaggggacagtgtgggagaatccgtccat

SEQ ID NO: 266133 - DNA, 100 bp, Homo sapiens
gcggagaattggagatggggaccgccctggacatcaagattaaaagagcgaataaagtttatcacgccgggtattctaccttgtaaatactgttatttgt

SEQ ID NO: 266134 - DNA, 100 bp, Homo sapiens
agaccggggaactctactcttcctactgaatggtagtgtctagaaagggtatgtcccttcaagagagaggtgccaatgtccaaccggcctaataacaatc

SEQ ID NO: 266135 - DNA, 100 bp, Homo sapiens
ctggcgtgcactccgcacctcggggacattattgcgcgtggaacggctgcttttggaagggcgaagctgtgctcaggcccgggctggacgcagagccaga

SEQ ID NO: 266136 - DNA, 100 bp, Homo sapiens
aagaactacattattaataaggatatcctccggagagtgctagttcttatggcctcgaagcatgctttcttggcattatctgttaaacgtttaatgaaag

SEQ ID NO: 266137 - DNA, 82 bp, Homo sapiens
cggcgcgcgggagcgctacggccccaacgcgtgagtgcatctccatccacgttggccaggctggtgtccagattggcaatgc

SEQ ID NO: 266138 - DNA, 90 bp, Homo sapiens
agaaaatcagtgacattccaattcctgaaagagctccaaaacgtgctgctacccccgtatgatgatgccactgtgaatggtgctgccaag

SEQ ID NO: 266139 - DNA, 82 bp, Homo sapiens
cggacgcagtgatttgctccccctcgtgcagcaacccccacacccagcaccaggttgtgaccgagattcccgacgagagaga

SEQ ID NO: 266140 - DNA, 96 bp, Homo sapiens
cgcgggggagccccgggagccgcacgatagcagcgacagtgagctggagctgtccacggtgcgccaccagccagaggggctggaccagctgcaggc

SEQ ID NO: 266141 - DNA, 74 bp, Homo sapiens
gcctgatgaagccgccgatctggaaaggcaaatagggaagtatggccacggctgcattaccggaaagcgggtct

SEQ ID NO: 266142 - DNA, 100 bp, Homo sapiens
catgtatccgcagggcagacatccgctcagaggatgaaacaggaaactgagtcataaaacactactacaaacaagcccaaggattttatcccagattttc

SEQ ID NO: 266143 - DNA, 100 bp, Homo sapiens
tattatgtgcctccagaaatttgggaaaacctgccttataacaataaaaggaagagctaaagatggctgaatttctagatgaccaggaaactcgactgtg

SEQ ID NO: 266144 - DNA, 98 bp, Homo sapiens
ctatactcaggagccaggcctctctctcatcagccaggctccccaacgtggacttggtgctgtcccagaccaagcaggacattgcgcgtgcccgccgg

SEQ ID NO: 266145 - DNA, 100 bp, Homo sapiens
tccgactgcactcacacgacgtgcgctatgggtcaggtcagcccaaggccaaccccactgtcactctgttcccgccctcctctgaggagctccaagccaa

SEQ ID NO: 266146 - DNA, 75 bp, Homo sapiens
tggctacttcatattttggaaagcagtttttaagacaaatgggcctttgggtccccgaggattagctgaagctac

SEQ ID NO: 266147 - DNA, 98 bp, Homo sapiens
ctttagaccctccacctaattgcaggccacttggatgttgtagcattgctcattaaccatggcgcagaagtgacctgtaaggataagaagggttatac

SEQ ID NO: 266148 - DNA, 100 bp, Homo sapiens
aagctctgtaagaagaaaacactttgtgggccagctgtgtcaaggaaagggctttatttgtgaattttgccagaatacgactgtcatcttcccatttcag

SEQ ID NO: 266149 - DNA, 100 bp, Homo sapiens
tcagtgtatcgacggataacagagttcacatattcaaacctgtatctgtgcaggcaatgtgggtggcatggagaaatcgttgtcaaaacagagatgtccg

SEQ ID NO: 266150 - DNA, 100 bp, Homo sapiens
cgcgcttttgctcctcctgaagtgtctttggtccaacgttgttccaggtagaagcagtaagtacttcagtgcaggactcaagtgtacttgtacagagaag

SEQ ID NO: 266151 - DNA, 98 bp, Homo sapiens
tgtcctggaagagtcgtaccaagtacaccattacaccagtgaagatgaggaagtctgggggccgagaccacacaggctcaggaagaggccaaagaagc

SEQ ID NO: 266152 - DNA, 82 bp, Homo sapiens
cgcgtacgagatctccgaccagtctgggggcgctggcggcctgcgcagccacctcaaggttccaagaccaaagattaaatta

SEQ ID NO: 266153 - DNA, 100 bp, Homo sapiens
tgcctgaaggtgaaggagatggatgacgaggaatacagctgcattttggtgttggtattaggagatctgcacatcccacaccggtgcaacagtttgccag

SEQ ID NO: 266154 - DNA, 100 bp, Homo sapiens
ggagaaggaacatgaagtagaagtcaatggcaccgacacattgtggggagaaacagaccataatgacttcagcaaataaagcaatcgaattacaactaca

SEQ ID NO: 266155 - DNA, 101 bp, Homo sapiens
ggccaggagagcgctcggcggaacgacaaatcctccacccctgggctcaagtccaacacaccaaccccaaggaacgacgccccaactccaggcaccagcac

SEQ ID NO: 266156 - DNA, 75 bp, Homo sapiens
gaatttccatgtcaacatagtcctggtgaagcatcagggcctgaacaagaacatcaacctggactctgcggatgg

SEQ ID NO: 266157 - DNA, 90 bp, Homo sapiens
caagagagagcatgattttttggacagagatgccattgaggctctatgcagacactgaggggcaccagaggagcagactacaagaatggc

SEQ ID NO: 266158 - DNA, 75 bp, Homo sapiens
ggagtcccaatgaaacgggcagccatggccctccacagcccgcagaaaaagcttgagtctccacccccatctacc

SEQ ID NO: 266159 - DNA, 74 bp, Homo sapiens
agggaaccctggtcaccgtctcctcaggcagaagctcctcctggggtagagacagatcttattgatgttggatt

SEQ ID NO: 266160 - DNA, 83 bp, Homo sapiens
gctggacggcgagcgcgagcggcgcgagaaaggcagcgggtggcatgagacgtgggaacatgggccacctcacacggatcgcc

SEQ ID NO: 266161 - DNA, 100 bp, Homo sapiens
atgtatgatcgtgtgattgactttgatgagaacactgctctggatgatgcagaagaggagtcctttaggaaggttgtccttctattcaggccactcttcg

SEQ ID NO: 266162 - DNA, 75 bp, Homo sapiens
ttccttgttgctattataaaaggtgagaagccctaccactgcaactgggacggctgcggctggaagtttgcgcgc

SEQ ID NO: 266163 - DNA, 75 bp, Homo sapiens
cacaggcctgctgaactgggtgctttatataggttgtcatttacgtgctgaagcatattgacttgaggaaaacgc

SEQ ID NO: 266164 - DNA, 82 bp, Homo sapiens
aagatcatcattaaggacggaggcacggatgataatgaagataattcaaatgatgggacccagccatccaaaaggaggcgaa

SEQ ID NO: 266165 - DNA, 100 bp, Homo sapiens
ttctccaatctttctacatcccagaggcctgcggcctcaccatggacccagaatgcgcccagctgctcccggctctctgtgctgttctggtagatcccag

SEQ ID NO: 266166 - DNA, 82 bp, Homo sapiens
tgtactacaagttggcgaagaagatccttcacgcaggctttaagatgatgagcaaaatgaggacggggacttggttgccttt

SEQ ID NO: 266167 - DNA, 51 bp, Homo sapiens
cctcccaagtagctgggactacagactccagcgggaggaagaagaggcctt

SEQ ID NO: 266168 - DNA, 98 bp, Homo sapiens
cttctactccatcgtgggactcagcagccttggtgctcaggtgccagatgcaaagaaaaacaggatgaagttgtctattacgatccatgtgaaagtcc

SEQ ID NO: 266169 - DNA, 100 bp, Homo sapiens
ggaaccggaccccggcagctaagcagcgctatgcaaacaagcactgaagaggaatcggagtagaatgcgtcagttggacacaaatgtagagcgaagagcc

SEQ ID NO: 266170 - DNA, 82 bp, Homo sapiens
cctactcgcccgccaccctgcgctgccgccgctctgaggagttaaagctactgtgtgaagacattcacaggacacagagaat

SEQ ID NO: 266171 - DNA, 100 bp, Homo sapiens
ggccgctgtgcctgctgctgagcagcgccgcggaaaacctcggatcaattctcagctggtggcacaacaagtggcacaacagtatgccaccccaccaccc

SEQ ID NO: 266172 - DNA, 75 bp, Homo sapiens
ggaagggcctgaggattacagtgaaactgaccattcagaacagacaggcccagctttgcagcccctgagaaggcc

SEQ ID NO: 266173 - DNA, 51 bp, Homo sapiens
gacaagcacatcaccactctgcaggaatgtatcctgtcaggtataatgtca

SEQ ID NO: 266174 - DNA, 75 bp, Homo sapiens
cggcagcagctccagagctttgtcaaagagcagcctggcatcctcgctacaacctcattgttgtgggccgatacc

SEQ ID NO: 266175 - DNA, 100 bp, Homo sapiens
cgaccagaatggattgtggaaaggttctgaagaaggccttccaggccacgctcaggtggctcctgagctcacccaagacccccggctgctctgatctcgg

SEQ ID NO: 266176 - DNA, 74 bp, Homo sapiens
tggcggcttcctcccagcgttcccaaatcattcgctccaagttccgatctgaaataacatctgctttgctgccg

SEQ ID NO: 266177 - DNA, 83 bp, Homo sapiens
cccagggcggctccgacgcgccctcagacctcctgccccccgaggtctgcagtctcctgaacccagcagccatctacgccaac

SEQ ID NO: 266178 - DNA, 74 bp, Homo sapiens
gcgcccggccggcccggagcaccgagctcgcggcacggtaggagttacagaatgtctgaaggggacagtgtggg

SEQ ID NO: 266179 - DNA, 98 bp, Homo sapiens
cctgccaaatacatcagcttgtaggagacagagcggaagatggagaaccgtgattaccgggatgcacaggagtttgctgctgatgtacggcttatgtt

SEQ ID NO: 266180 - DNA, 98 bp, Homo sapiens
caggagtccagggctggagagaaaacctctgcgaggaaagggaaggagcaagccgtgatgatgaggagtctgatgaggaagctgtgaagaaaaccaac

SEQ ID NO: 266181 - DNA, 73 bp, Homo sapiens
tgcggattgcagccgagaacgagctcaaccagcttaatcctgattatcgagatgcccaaaatgaaggaaaaaa

SEQ ID NO: 266182 - DNA, 75 bp, Homo sapiens
cttgggagtgatttgcgccatcatcctcatcatcatcatagtcgttccccccgccacgagaagaagaagaaggtc

SEQ ID NO: 266183 - DNA, 96 bp, Homo sapiens
gttgaacatgagcgcgttcctgcaaaggggaacgcccttttgcttgtgactggcagggctgcgacaagaagttcgcccgctccgacgagctggccc

SEQ ID NO: 266184 - DNA, 83 bp, Homo sapiens
gctcggccccgccagcagcactgtggaggccgtcctcggccagaagcggactcctagaagaggggagcagcaaggatggaatg

SEQ ID NO: 266185 - DNA, 100 bp, Homo sapiens
acgattgggctgagcagaggacgacatgttgcttttcgtggagcataagcagtactataatggatgtagacagcacaatttccagtgggcgttcaactcc

SEQ ID NO: 266186 - DNA, 100 bp, Homo sapiens
gacgttcatcgccgtgttatccttgagtaaagccatcaagttttatcgtagggctatgcaacttgtacctgatatagagttcaagattacttatacccgg

SEQ ID NO: 266187 - DNA, 51 bp, Homo sapiens
gaaaatgccaacgccgtgtctgaagtatacctgaggtgcaccggaggtgaa

SEQ ID NO: 266188 - DNA, 100 bp, Homo sapiens
tgaacatgtggaaggtgcgcgagctggtggacaaagcctgatgttctaatcatgtcagataaagatgatattgagactccactgctaactgaagcagccc

SEQ ID NO: 266189 - DNA, 50 bp, Homo sapiens
aacctgagtttgacagaggaatctgtcgcctggttgggcccggaaatggg

SEQ ID NO: 266190 - DNA, 73 bp, Homo sapiens
ctcgacctgctaacagaactggaccttttcgcgttacagtgtttctgccacctctgtacaaaagacaatttta

SEQ ID NO: 266191 - DNA, 87 bp, Homo sapiens
gacttcaagaatgaagccacggaccctcgcgggactttgaacatgtcggggatcgccctcagcagactcgcccaggagaggaaagca

SEQ ID NO: 266192 - DNA, 48 bp, Homo sapiens
catggctccaatggcttgttggtctataacttgacccaggagttcttc

SEQ ID NO: 266193 - DNA, 112 bp, Homo sapiens
ctgcagcagagggagcttgccttgaaggacaagaacagcgccgtcaccagcagaaccgggctgtgggtcggcccaaggggaagctgggcccggcctccgcggtgaagttggc

SEQ ID NO: 266194 - DNA, 100 bp, Homo sapiens
gatgacttctcagacggggatgtctttggcccagagctggacaccctcctggactcgctgtgatgacgaggacgaggaggaggaggaggaaggagaagag

SEQ ID NO: 266195 - DNA, 83 bp, Homo sapiens
cttatggcggcgctggagagggggcgctgagctgttgggtgcctccggagccagcgtggtggccatagacaacaagatcgaac

SEQ ID NO: 266196 - DNA, 100 bp, Homo sapiens
ctcctcaagtggttgttaatcctggagccaatcaaaatttgcggatgaatgcacaaggtggagcgaatcaaggagcgtgtggaggagaaagagggaatcc

SEQ ID NO: 266197 - DNA, 82 bp, Homo sapiens
accgctcgatcttgggacccaccgctgccctcagctccgagtccagggcgaggatggcactggatctttaaaacgcagtggt

SEQ ID NO: 266198 - DNA, 101 bp, Homo sapiens
gagaggagagcgaggaggaagaggacgaggacgacgaggaggaggaggaggaggaaaaagatgcagcacctgaggtccactgcgacgcctagcccgtcccc

SEQ ID NO: 266199 - DNA, 96 bp, Homo sapiens
gcgccgcgggccaccgcgccgaactgctccggttcccggaaggccggggtcagaaagaaaaaagagggtcccggggccgaggcaggaggacatcag

SEQ ID NO: 266200 - DNA, 51 bp, Homo sapiens
gactatgcaaaacaagtttatcaacagttaaatctcacacagaaacagatg

SEQ ID NO: 266201 - DNA, 82 bp, Homo sapiens
tggggatggcaaagacgacatccggtgcgccgaggctgctcacaaaagtgtccctggccagtgtccttccacctgtccacaa

SEQ ID NO: 266202 - DNA, 51 bp, Homo sapiens
attatgaggcatgggcaaaacttgatgtgaaaatgtggtgacctggaagaa

SEQ ID NO: 266203 - DNA, 98 bp, Homo sapiens
ctggcgacccattcaggcacttatggccatttcagccaggtgaagcaagaagcatttcatttgcacatctttcttggacttgggatatacagttccag

SEQ ID NO: 266204 - DNA, 110 bp, Homo sapiens
tttctcatcagcagactcactccggctgtggctattacgggcttccagcaaaagttctccttccacagtaaagagattgtggctatcagctgttcctggtgcaagcaggc

SEQ ID NO: 266205 - DNA, 119 bp, Homo sapiens
ctggaggacatctgggggccacaaatgctccttctcctggagacgcaactcaagcgtggtaccatgcgacgacgctatgaagatgatggcatttcagatgatgaaattgaaggaaaaag

SEQ ID NO: 266206 - DNA, 98 bp, Homo sapiens
ctgaaggacgcgcaggagaagctggagctcacggagaagaaggcctccgacagctgcggtgcaaccctgggcagtttgcgtgtcgcagcggcaccatc

SEQ ID NO: 266207 - DNA, 73 bp, Homo sapiens
ctctcatttttagttaatcacgatttctctcctcttgaggatttaagaggggtgcagatcccggaatgcctga

SEQ ID NO: 266208 - DNA, 90 bp, Homo sapiens
ctgaaataaaaggcaatcttgctgaaaataaatttgtagatgaatatatcatatctccatcacctggtttggagatgtggaaaggagtgg

SEQ ID NO: 266209 - DNA, 100 bp, Homo sapiens
cccgggcgccccgctgctgcccccgctgctgctgctgctgctgtgggcgccgcctccgagccgcgcagagtttgttattaaccccaacgggaaatccgag

SEQ ID NO: 266210 - DNA, 75 bp, Homo sapiens
gttcttcgggtgctgcggagccatgcgggagtcgcaatgtgtgcttggatcagccctagactggagctggttaca

SEQ ID NO: 266211 - DNA, 100 bp, Homo sapiens
cgagctttcccgggataagtagctttagcgatcgggagacagccgggcgctgcaagacaagttggatggcttgaggactggtactaaaaggaaacgtgac

SEQ ID NO: 266212 - DNA, 50 bp, Homo sapiens
gcacagagaagctcccagctttgaaggaaagggggctgtatacagctttg

SEQ ID NO: 266213 - DNA, 50 bp, Homo sapiens
gcgaacatcatcagtggctcggaggcatttcatccttcatgaagccattc

SEQ ID NO: 266214 - DNA, 80 bp, Homo sapiens
caaggatgtgatgccagaggtcaacaaggttctggacaagatgaagtctttctgccagggggatcctggaccgttggcac

SEQ ID NO: 266215 - DNA, 50 bp, Homo sapiens
gtcctcttgtcctcctcagcctcggaggtggtccaggccacgctggtggt

SEQ ID NO: 266216 - DNA, 95 bp, Homo sapiens
ggacaaggtggtgcagatcgtggagatcatgcagcaagagggcccttgccttgtccacaccatcactggagatttgctgagagcccttgaaggac

SEQ ID NO: 266217 - DNA, 98 bp, Homo sapiens
aaaaattcagcagcagaaattccagtgactagtaatggagaagttgatgactctcgtgaacatagctttaataggtacttgattctaaagctcgaaag

SEQ ID NO: 266218 - DNA, 90 bp, Homo sapiens
ttgttggggcgacagctgctcctggctacatagctccaggcttctccagggaaagtgaccgaggcagtgaaagaggccattgacgcaggg

SEQ ID NO: 266219 - DNA, 75 bp, Homo sapiens
tccggggccctctcagcaagaacgggaacaaaactctggtacttgttttggctccaacaagggaactggcaaacc

SEQ ID NO: 266220 - DNA, 100 bp, Homo sapiens
gcatggagttcatggtgttagcgcaaaagttctgaatggcatccgtcctaccggaaacctaggaaaaggtcctagctggtgcattaaaacaagaaataag

SEQ ID NO: 266221 - DNA, 100 bp, Homo sapiens
actgtggtctgttgtaccccactgctggggtggtggttccaatgagacagggcacaccaaactccatctggacggggaggtttactgcatcgacgcgcgg

SEQ ID NO: 266222 - DNA, 80 bp, Homo sapiens
gagctagaactcaaggtgcccctggtggtccggcttgaaggttccctctcccagcctgtgctgactcagccatcttccca

SEQ ID NO: 266223 - DNA, 100 bp, Homo sapiens
ctttgggtgtgagacacacgccatgctgccctatgaccagtacctgcaccgctttgctgcgtacttccagcaggcctccccaccagatgccctgcgctgg

SEQ ID NO: 266224 - DNA, 100 bp, Homo sapiens
caacactccatttttgtttcctttatatggccaaggagaactcccccagtgtttctgcaggatgtatatacaaagacgatatctttatggtcgtatatca

SEQ ID NO: 266225 - DNA, 100 bp, Homo sapiens
acagctttgccactcgactttccaacatttttgttattggcaaggggaaattgagggctttcgccttagcgcccactgctcctgtgacagcagggataac

SEQ ID NO: 266226 - DNA, 111 bp, Homo sapiens
tcatgctcgcttcacggaggcaatagctagccgcacgtcagctaactgttcagatgatgcaaaatcctcagattcttgcagcccttcaagaaagacttgatggtctggtag

SEQ ID NO: 266227 - DNA, 100 bp, Homo sapiens
tggccaacctcagtgcagccaaccatgatgctgccatctttccaggaggctttggagcggctaaaaaccttcaggatggctaaaggtgaccccaagaaac

SEQ ID NO: 266228 - DNA, 98 bp, Homo sapiens
ggatggctgagggagccccgcggatcgtttaggaaagccggccagccatgaaccagagaatcagtcagagtgctccagtgaaacagccaccacccctg

SEQ ID NO: 266229 - DNA, 100 bp, Homo sapiens
caccctgacaccggcatttcgtccaaggccatgggcatcatgaattcgtttgtgaacgacattttcgagcgcatcgcagagaaaatgggctgggctttct

SEQ ID NO: 266230 - DNA, 82 bp, Homo sapiens
caagaagccaaagaactggctaggcaaataagctttaagggcttttaaattttgacacagaattgtcaactaaagaaatgag

SEQ ID NO: 266231 - DNA, 73 bp, Homo sapiens
caggccagtcgcctccaggccaagagggatccttcacccgtgtctggtttggacatatttgactcttttcccc

SEQ ID NO: 266232 - DNA, 74 bp, Homo sapiens
tttacagcagcttttagaacgtaagccaggaattaaccgacttgcagagggatcctcctgcccagtgttctgca

SEQ ID NO: 266233 - DNA, 100 bp, Homo sapiens
gccgccgccgccgccgcgccgagcggaggaggaggaggaggcgaggaggagagactattctgaggttgggaccaagaaggaactatctattttaaaccaa

SEQ ID NO: 266234 - DNA, 97 bp, Homo sapiens
ccagcacggcatccctgacgagacctgcaacaactaccaggccaaggaccagggtggtgtgctacgtgaacatgaacctcatggatgcctccgtgcc

SEQ ID NO: 266235 - DNA, 75 bp, Homo sapiens
gagactttctccttcaagtacttggcagatcactctcttagcaggaattgaatgatctggcacgggaccctccag

SEQ ID NO: 266236 - DNA, 74 bp, Homo sapiens
ggaatttgattaactcattcaaggttacccagttgatgaggagaaaaggcgacctgatattttccatgcattga

SEQ ID NO: 266237 - DNA, 75 bp, Homo sapiens
atggctttattgacctcgactcccatgcggaagaaggagagacgaccatcttgcaactagaaaaagatttgcgca

SEQ ID NO: 266238 - DNA, 50 bp, Homo sapiens
ggctgcaggagcagctagcgcagttacaggtcggttcacccagaagccag

SEQ ID NO: 266239 - DNA, 106 bp, Homo sapiens
gtgtaccatttccacttgatgtcatcacgcagaaggggtgaaagagactcggtgacagatacaggtgtgggccatgtttgaggattgccccagcattcagttctat

SEQ ID NO: 266240 - DNA, 50 bp, Homo sapiens
cccgctggtcaccactccggcaccagatggaatcagtgtgagtggctttc

SEQ ID NO: 266241 - DNA, 75 bp, Homo sapiens
agcagtacttcgggccgggcaccaggctcacggtcacaggcatgaacaaccgggaggtgctggagcaggtggagc

SEQ ID NO: 266242 - DNA, 98 bp, Homo sapiens
ttatgattcaggagagcatgagatttgaaaagttggaaaatggatataccttatttgattatgatgttggactgaatgatataattcagctgctagtt

SEQ ID NO: 266243 - DNA, 100 bp, Homo sapiens
ccaggggtactcggaaggcgcgggcaggagcctggcgaggatgcaccttcccctgccttggaaagggttgtgagtcccggcccagcccctccacccccct

SEQ ID NO: 266244 - DNA, 82 bp, Homo sapiens
cttcgagttcttcgtgctgctcaaggcttgggcactgtttaaaggaaagttccgagaaggcatcgacaagccggaccctccc

SEQ ID NO: 266245 - DNA, 94 bp, Homo sapiens
tgccgcagctggcgcagcccacgctcatgatcgacttcctcacccgcgcctgcgacctcgaaggatatggccctgaagccacatgagcggaagg

SEQ ID NO: 266246 - DNA, 91 bp, Homo sapiens
accttcccattggataatgaagtgaaggcctttatgagaggacagaggctatatgaaaagtccttatgtcgtcagaagatcgagaagctca

SEQ ID NO: 266247 - DNA, 98 bp, Homo sapiens
gattctggggcagtatcaacggagtctccgggcatatagcactttctacattgtgggtttaatattatcaatgcagataccttttgtgggattccagc

SEQ ID NO: 266248 - DNA, 100 bp, Homo sapiens
caaaaggtggcctttccactggagttgcttcacttagctctacaatcaacccatgtgaccgaagggaggagcactttcacttcctttatagaatggaatg

SEQ ID NO: 266249 - DNA, 100 bp, Homo sapiens
ccccgcgtcaccactgtgaggcctacagctctgccggggaggaggaggaggaggaagaggaggagaaggctgagctcattggaagtctcacccacaagct

SEQ ID NO: 266250 - DNA, 100 bp, Homo sapiens
caaacttcttaacccctagaccggtttttagtccattgactatgcagcctaatgttgcagtaccatgcaggactagcatctggccttttaaatcagcagt

SEQ ID NO: 266251 - DNA, 83 bp, Homo sapiens
aggccttcccgttctccacccacaagctactgagagccgcagggcacctggtgtgggcaagagcagtttactgttgcgttttg

SEQ ID NO: 266252 - DNA, 76 bp, Homo sapiens
ctgagccactccatgatttgggccattgaaagggtagtaaaaagaatcattcctgcagtagcttccacaaatgcag

SEQ ID NO: 266253 - DNA, 100 bp, Homo sapiens
gaaaagagacatgaagaattggtatttcaaatgaccaccatgttgcaaaagtgacttctgacagctctctccatggaaggaggcggcggccgcgatgagc

SEQ ID NO: 266254 - DNA, 73 bp, Homo sapiens
gcgcctgcttcccgtctgcgcgagtccacgcagctccccagagatgaagtcttgctatgttggttaaactggt

SEQ ID NO: 266255 - DNA, 50 bp, Homo sapiens
ctacaaccagggagtcgtgggctcctgtcttcgttcctggctagaacaag

SEQ ID NO: 266256 - DNA, 95 bp, Homo sapiens
ccagcggggtcgcctagtgtcatgaccagggcgggagatcacaaccgccagagaggatgctgtggggtgatccattcatgttgcagcagtctaca

SEQ ID NO: 266257 - DNA, 101 bp, Homo sapiens
tgcagcgtctccttcccgttctccaggtggtgatctttgtgaagtctgtgcagcggtgcattgccttggcccagctactagtggagcagaacttcccagcc

SEQ ID NO: 266258 - DNA, 100 bp, Homo sapiens
ctgcttcccatcttcatccagttcggcctctactctccccgaattgaccctgattacgtgggtagtttgagctccctaaaagaggaaggtggactctaca

SEQ ID NO: 266259 - DNA, 75 bp, Homo sapiens
ctgctgagtttcttcatctacaacccgcgcttctggccgcgggaaggagaggtacaggcaattaaacttctggta

SEQ ID NO: 266260 - DNA, 98 bp, Homo sapiens
atcttatatggtgtgattctgctgttcagcaggagaaaatttcagagctgcaaaattatcagcctgagttctaccaagtatgccacaccaaaaaggat

SEQ ID NO: 266261 - DNA, 96 bp, Homo sapiens
attttgttaagaagcacctcatgcaagcgagggacctgggactgctcacagccaggttgaaatcacaaagattagacacctttttagataggtgtt

SEQ ID NO: 266262 - DNA, 73 bp, Homo sapiens
cggccgggagagtagcagtgccttggaccccagagctagagccggtgcaggccacgcagaacaagacagggaa

SEQ ID NO: 266263 - DNA, 51 bp, Homo sapiens
ctgtcagccaccagcaccttctgcagcaggacaaattgatggccaggagat

SEQ ID NO: 266264 - DNA, 75 bp, Homo sapiens
cccgctcctaaggcaggaagatggtggccgcaaagaagacgacaaatttacatgtattggagaccagaccagaag

SEQ ID NO: 266265 - DNA, 52 bp, Homo sapiens
agccgctgagacggtttttcacaaggactgagagtggctttcacaatggaag

SEQ ID NO: 266266 - DNA, 82 bp, Homo sapiens
cgtttattgtgcgcaggcttttccatcctcatcctcacagggtgcgtcagcaatttcctgctcctcttggttggtcaggcac

SEQ ID NO: 266267 - DNA, 52 bp, Homo sapiens
ccccaccttcacggctctgctctgcctcgggctgagcctgggccccaggacc

SEQ ID NO: 266268 - DNA, 98 bp, Homo sapiens
cggaatatgggcgggaaccactcccacaagccccccgtgtttgacgagaatgaggaagagttgacgggcgccgacctgaaggactgcgtcagcaacaa

SEQ ID NO: 266269 - DNA, 87 bp, Homo sapiens
tggacagtgctatcagcatggaattgtggcaggccaaatttgagtttcatcatggtgactatgaaaaacagtttctgcatgtactga

SEQ ID NO: 266270 - DNA, 120 bp, Homo sapiens
ctttctggaaggctggttggtgtgaggattcagtcttgcagccactcgagacatcacttctgttctttttggctttcacccccaaccagtgaccaaagacttgaccactcaaagtccagc

SEQ ID NO: 266271 - DNA, 50 bp, Homo sapiens
ccctgctgtgcacctgggggtacagatgtgttttcgcattataacaagga

SEQ ID NO: 266272 - DNA, 100 bp, Homo sapiens
cagcgctttgacaagtgcctggaagagttctatgcactctgtgaccagctggagctgtgcctgaattatatccagatcgagagacagaagattctgaaag

SEQ ID NO: 266273 - DNA, 50 bp, Homo sapiens
ctggccttccggccccagatggatccccgtttggcaatgaggagcagcag

SEQ ID NO: 266274 - DNA, 96 bp, Homo sapiens
ggagctgaatctgccgcagctagaaatgctcaagaaccagctggaccaggtccccttcccctgagcccatctacaatagcgaggggaagcggctta

SEQ ID NO: 266275 - DNA, 75 bp, Homo sapiens
catgagccagctgagtttcgatcggatcctcaagaaggatctggtgcagaaaacctcggatcaattctcagctgg

SEQ ID NO: 266276 - DNA, 75 bp, Homo sapiens
cggagacgcagatgtggacttgaaagaagctgcagcggaggaaggcgagatgagtcctgccggcggtgaccatct

SEQ ID NO: 266277 - DNA, 96 bp, Homo sapiens
gtggacacctgtgtcagcatgtgggacctggttctctccatcgccttgtctgtggggtgcactgtagctttccacagccccaccaccaggatcaag

SEQ ID NO: 266278 - DNA, 50 bp, Homo sapiens
ggagactcacttatgtgcacaatggaagaggagatcccagaactggagat

SEQ ID NO: 266279 - DNA, 75 bp, Homo sapiens
ggaggctttcctgctggtggcaaccgcctacgagacactcaaggctaatctagacgaaatccagatgagttcacc

SEQ ID NO: 266280 - DNA, 75 bp, Homo sapiens
aagcaaaatgcgttaggaaaatgtgatgcatgtctcagtgggcattcttcttgagcaccgagaaaaagaatttgg

SEQ ID NO: 266281 - DNA, 80 bp, Homo sapiens
ggtgtctggactggaacctctgggcccacggacccagacatggagctgcgggaagaagcctggtctccggggccgctgga

SEQ ID NO: 266282 - DNA, 75 bp, Homo sapiens
ccggggtgtaataatgttaactgaggtgtatgcaacagcgttattgcaacaggctaacgaaaacagacaaaattc

SEQ ID NO: 266283 - DNA, 74 bp, Homo sapiens
cgggaccggctgtatgattaggccacaatcttcaatgagtaaacatattcctaacccttaggagaaatcttgag

SEQ ID NO: 266284 - DNA, 98 bp, Homo sapiens
gcattacaagcagcagtggggacgagctttgaaagaacttgccagacttaaacagaaatctcctgcaaagaagctgagccatgcaattagtaaatctt

SEQ ID NO: 266285 - DNA, 100 bp, Homo sapiens
aacggatggctgagggagccccgcggatcgtttaggaaagccggccaggtcaagtctggcaccatctttgacaacttcctcatcaccaacgatgaggcat

SEQ ID NO: 266286 - DNA, 75 bp, Homo sapiens
ggcctcgcctcctcgcagcagcgccatgctgtcgcctggttgggcccggaaatgggacgtcgcgctttctcaggg

SEQ ID NO: 266287 - DNA, 75 bp, Homo sapiens
ggcgaatgcaattaggaactgttctgccggaatttgaaaagtgcctgagccaggtgagaatttcaaggattatcg

SEQ ID NO: 266288 - DNA, 75 bp, Homo sapiens
ggaagcggcggcggcggcgccgggcccgggggtggtgacagcaggtctgagatccagagacaatggccccgatgg

SEQ ID NO: 266289 - DNA, 99 bp, Homo sapiens
caggggctctgggagtggctgccaggtgtctgacttccagcaactgctggcctgtgccagggtgcaagctgagcactggagtggagttttcctgtggag

SEQ ID NO: 266290 - DNA, 100 bp, Homo sapiens
gacccctgggagccgaagccagactgggcacacaccggcagccacagctccgaagctggcaagaaggtgtgggatgtgattggccgcagcctgattattg

SEQ ID NO: 266291 - DNA, 75 bp, Homo sapiens
tttgctgcgggcgccggcgctggcggccgtgccgggaggaccagaggagcgagagcagcaagaaccacacccagc

SEQ ID NO: 266292 - DNA, 84 bp, Homo sapiens
gttaaatgctattggggtaaagaatctcctgatatgactaaaaacttccaacaggtttttagaacttcagccataaaaatgggc

SEQ ID NO: 266293 - DNA, 102 bp, Homo sapiens
gaaacaagctatgtactctagcactgacacgtttacccacttgaaacagaatagctgaaacctttggacttcaagaaaattatatcaaaattgtcataaata

SEQ ID NO: 266294 - DNA, 75 bp, Homo sapiens
agaaacgtccacatgtgggtactgcattcctaccggtgtgacaggtcctaccagaaggaacactacccaaaatac

SEQ ID NO: 266295 - DNA, 50 bp, Homo sapiens
accctgaccggatcccataaacactgtcgtcctggtacctgggctagctt

SEQ ID NO: 266296 - DNA, 100 bp, Homo sapiens
cctcacctcgctactcgcttgcctacccgccggcccgcgggtctacttcctcaaagacctgcctagagctggaacgttacctccagagcgagccctgcta

SEQ ID NO: 266297 - DNA, 89 bp, Homo sapiens
aacttgtgccccagttgctgtgctccaaggacacacaggatcaattacatctttacaggccctttctggttactgtggctttatggcag

SEQ ID NO: 266298 - DNA, 82 bp, Homo sapiens
ccatgactacgacatccacttctaccccaccttccggaagcaaggtctcgctgtgttaccctggctggagtgcagtggctac

SEQ ID NO: 266299 - DNA, 100 bp, Homo sapiens
accagatgtcaaaactgatttcagaaatgcatagttttatccaggccataaaattttgagtagaaaaatccagaaatttgaaaatcagtatcgtggtaga

SEQ ID NO: 266300 - DNA, 96 bp, Homo sapiens
ggaagatggcggacggcgtggaccacatagacatttacgcggatgtcggcgaagagttcaaccaggctcttgcagccaatgccggaacaggatttg

SEQ ID NO: 266301 - DNA, 74 bp, Homo sapiens
actttagccactgctactacaggtgtaattgaaaagtgatcctctcttcagagatgtcaaaaacaaacaaatcc

SEQ ID NO: 266302 - DNA, 101 bp, Homo sapiens
aggaacttggttccccctccctcagcttccgccccaaaagtacttctcttcatatggactcagtactactgacaagagccatcctctgagattactaagat

SEQ ID NO: 266303 - DNA, 75 bp, Homo sapiens
ggaaaacgtggatgattactacgacaccggcgaggaacttggcagcgccacgatcatgtctctcgaagactttga

SEQ ID NO: 266304 - DNA, 82 bp, Homo sapiens
cgccgagtcctagcgcctggcctgcgcgccgctgcccgcgccacagggtaagcttgatgattaccaggaacgaatgaacaaa

SEQ ID NO: 266305 - DNA, 100 bp, Homo sapiens
agagcagcagtggagaaagtgctccagatagctacatcgggataggaaattcagaaaaggcagcaatgagcagcacaacattctgaaattttttggttat

SEQ ID NO: 266306 - DNA, 100 bp, Homo sapiens
cagtcaatatgttggaggcatgctaaggttaattatagaaaatgccaagtaggaaatttgccgatggtgaagtggtaagaggtcgatggcctgggagttc

SEQ ID NO: 266307 - DNA, 50 bp, Homo sapiens
accagcttagcttctgtcctaaaggaagatgagaatgtgcctactgctcc

SEQ ID NO: 266308 - DNA, 83 bp, Homo sapiens
gggcctggtccgtgtccggtcccccaaatctgtcgtccctgcccccagggtgcccccacttgactctcgccccagctccccag

SEQ ID NO: 266309 - DNA, 75 bp, Homo sapiens
attccaagtaactcttatttgcactagtcacttactcctggtctaagggtacatggtattggctgctctacaatc

SEQ ID NO: 266310 - DNA, 75 bp, Homo sapiens
gactttggctactactggttccatcgtatggctcatggtgacaaagtaattccactttatgcacctctatgtaga

SEQ ID NO: 266311 - DNA, 82 bp, Homo sapiens
ttggaccgagccgatcgccgcggggcagttcgggccggctgtcctggcgcgggaaagcaggcaggatgggagagtcgccgat

SEQ ID NO: 266312 - DNA, 82 bp, Homo sapiens
gccgccgccgccgccgctgccgctgccgctgccgcacctccgtagctgactcggagccgaggaggtgctgctgctggcccgg

SEQ ID NO: 266313 - DNA, 100 bp, Homo sapiens
agagtctccgcggtggaggtctgcgttgctcttgcttttcctcgctggggtgtacgatctccagatcacactaagtttgtgggaagcttcaaaaccaaac

SEQ ID NO: 266314 - DNA, 75 bp, Homo sapiens
tgtggccaacgagctcaacgccaggcgccgctcctttacaggtttggtgcacctcgatttggaggaagtagggca

SEQ ID NO: 266315 - DNA, 100 bp, Homo sapiens
actgattttatgggaaaattaagcagatgctccagtttgagaaacctggatctgcgatctgtttgtgatctggaaagcatgaagactgggctttttttcc

SEQ ID NO: 266316 - DNA, 100 bp, Homo sapiens
gccaatcagtccttcaagaagagtccagccttcatgcccttctcagctggcatggaaagctcacctgatgggcccagccggctgcacgatgaacctgcgc

SEQ ID NO: 266317 - DNA, 50 bp, Homo sapiens
gcagtatgtagagagcttttttgaggttccctctcccagcctgtgctgac

SEQ ID NO: 266318 - DNA, 75 bp, Homo sapiens
ccgatgaatgtgggaagactgaggagatgtttcacaaagcagaagaattattttctaaaacaacaaacaatgaag

SEQ ID NO: 266319 - DNA, 50 bp, Homo sapiens
atatcagaatcttgttgactacataaagttttgtaccaatggctagaagc

SEQ ID NO: 266320 - DNA, 75 bp, Homo sapiens
ccagtgggtgctgactgtggcccactgcctgatctgcatcacccaacccgggagctggtggtgaacgcagtcacc

SEQ ID NO: 266321 - DNA, 75 bp, Homo sapiens
agaactgccccatcgatgtgcggcgtccgctgtataagaaatcctgccagaaacctgtagacaaatatatcgagt

SEQ ID NO: 266322 - DNA, 85 bp, Homo sapiens
ggaagtggatgagttccacctcattttagagtatcaagcaggcatttatgtttgaatcatctttaagtctggcggtcacaaagtg

SEQ ID NO: 266323 - DNA, 100 bp, Homo sapiens
ggccctcggctggtgctgagcgaggaggcggttcgggcgaagagcggcttagggcctcaccgcgacctggtgtcggagatgtatgcagtgtgacgccaag

SEQ ID NO: 266324 - DNA, 100 bp, Homo sapiens
cattcctgaaatacatccaggaaagacatggagattctcttaaaaagcaatacgaggattctctccaccacatagaatctgcagttttgaagaggcaaag

SEQ ID NO: 266325 - DNA, 50 bp, Homo sapiens
ctcctgagtagctgggattacaggaagtgacctcacaatgactcaagcta

SEQ ID NO: 266326 - DNA, 80 bp, Homo sapiens
agagccctttgcaggatgcagaagaagccaaaaacattctggggaatgggtactgttcaaaaaggaatgccccacaagtg

SEQ ID NO: 266327 - DNA, 100 bp, Homo sapiens
tgaacagctggcaataaagaatgttggcaagcaggggcgacctatctactgctcttgaggtcgccattgactgctatgaaaagtataaagtattaccaag

SEQ ID NO: 266328 - DNA, 82 bp, Homo sapiens
cctcccactgcaaaaaggcctgggtttcagaggagcgtgctcgacctttctctccagtggagatttgccaacctgcccaaca

SEQ ID NO: 266329 - DNA, 82 bp, Homo sapiens
tgagccgtggaggtggcataaggcaaccctagccgagagtccttagccaggatggaggctgttgtgaacttgtaccaagagg

SEQ ID NO: 266330 - DNA, 75 bp, Homo sapiens
ggccgcggctactacctggagatgctgatcgggacccccccgcagaagatgcacacttgactgaaggaggacagg

SEQ ID NO: 266331 - DNA, 75 bp, Homo sapiens
ccgtgaggcattccgagtctttgacaagaagcccttcactccggtcaagtacttctccatcgaccgcgtattccg

SEQ ID NO: 266332 - DNA, 100 bp, Homo sapiens
cgctacgagggcatcctctacaccatcgacaccgaaaactccaccgtagcccttgccaaaggcatttgcaagtaaaatcactggcatgttgttggaatta

SEQ ID NO: 266333 - DNA, 100 bp, Homo sapiens
gtttaccacaatgtgagggactcagccattgcaaattgtacagatgagggtcgtcgggctgttaaagcgggagcttatgctgcttgccaggaagcaaagg

SEQ ID NO: 266334 - DNA, 100 bp, Homo sapiens
tcgggactgggagctgcgagctgctcacggcggttgttagtggacctgtccatgatcctgtgtgaccccttcgccatcaacacgctggcactgagcacag

SEQ ID NO: 266335 - DNA, 75 bp, Homo sapiens
ctcctgcagttcagtgtcatcgtcgcacagtcagggcgaagctgtgctcaggcccgggctggacgcagagccaga

SEQ ID NO: 266336 - DNA, 100 bp, Homo sapiens
cgtggatccaagatggcgacggcgatgttgccgaggtactgtctgaatgccgcctgctcgcctacatatcccaggtgcccacgcagatgtccttcctctt

SEQ ID NO: 266337 - DNA, 95 bp, Homo sapiens
ctacagaaacaaaatgtcaacaaattgatggtgcaaacttctgctcctggaggctcccgttcactggactttgcaggagacacacaggctcccca

SEQ ID NO: 266338 - DNA, 95 bp, Homo sapiens
actttgccaccagcagccacaacagatcagattgtggtggtgccatgcagcaagaatcagagagatgcagagttagagccagaaggcctgacatg

SEQ ID NO: 266339 - DNA, 75 bp, Homo sapiens
tacacacctatttttaatgaatacccacccgaaacaatgaaatgtaatacattcataagacaagtgaaagaagag

SEQ ID NO: 266340 - DNA, 90 bp, Homo sapiens
gcggccatcgtcatcctgctgctgaagatctggaagacgcgctcctgcgccgagtggcagaatttagtgacatttggaagcttttcaaac

SEQ ID NO: 266341 - DNA, 100 bp, Homo sapiens
cgctttgcgtcccgacgcccgcaggtcctcgcggtgcgcaccgtttgcgacttgaaggaagaatcctgctcaaaaatgaggtgaattaatacttgggcgc

SEQ ID NO: 266342 - DNA, 80 bp, Homo sapiens
gctcaattgcccctaggactcacccttattccccaacagagtgtgaggtgtgagacaagtacttcagttcaagagtgtat

SEQ ID NO: 266343 - DNA, 100 bp, Homo sapiens
ctcagggccggttgtggccatggcagagaaaatcctgaaggagcaagagcggctggcctacataaaccccgacctggctttggaggagaagaacaaaggc

SEQ ID NO: 266344 - DNA, 100 bp, Homo sapiens
cccatgtcttggaacgaattcatcctttggaaactgaacaggcaggattagaatccgagttcctggggaaaaccccagggcaaaacgctcagaaatggat

SEQ ID NO: 266345 - DNA, 95 bp, Homo sapiens
ctggctggtcagctgtgccacagagattgtgaatgagagccacaagtctgaatttatagagctgaggaagtggctgaaagctaggaagtttcaag

SEQ ID NO: 266346 - DNA, 74 bp, Homo sapiens
ctggattcaagtcccaggagtcctgaccagagagcaggtgaaagaaaagatgttgtcccggttaagagtagttt

SEQ ID NO: 266347 - DNA, 80 bp, Homo sapiens
gaaagagcaccgaagaagcttcgaggatctgtttctcttcagcaacgggtagcagaattggaaaaaattaatgcagaatt

SEQ ID NO: 266348 - DNA, 75 bp, Homo sapiens
tctccggggaaagccgtggccccgagggcggatccgaggaggcaggtggaagtcatcataaagtttctgtttcac

SEQ ID NO: 266349 - DNA, 83 bp, Homo sapiens
ccgctgccgggcaccgaggaccagctcaatgacagacacgttgaatccgaggtgacatctgtggtctggccgaaggaggctag

SEQ ID NO: 266350 - DNA, 83 bp, Homo sapiens
ggaggagaccatggctgactacctgctgtacaccctcaacaaacaccagcgctttggggtctccctcttttgtccaaggctgg

SEQ ID NO: 266351 - DNA, 75 bp, Homo sapiens
cctggcaggaatcccaatttgcctccacttagtgagcggaagaatgataggctcgaggagagagcatcctcagat

SEQ ID NO: 266352 - DNA, 120 bp, Homo sapiens
ggcggcagtgcgagaaagccgaagatggcggtccccgcggcgctgatcctacgggagagccccagaggaaatactatgtgaagtatgccggaaaacatttaaacgcaaagattaccttaa

SEQ ID NO: 266353 - DNA, 98 bp, Homo sapiens
ctcctggatttcagcagaaagtgttccatatcaatcagccagctgaattcattgaggaccagtcaattctaaactgttttgatcgcattgagaacctg

SEQ ID NO: 266354 - DNA, 74 bp, Homo sapiens
cgaggataagccaacctttatagcttttctgaagctcagcagcagctatgcaacaccagacaggaagtgaatga

SEQ ID NO: 266355 - DNA, 96 bp, Homo sapiens
aaatcaaagactttgaatgtgcctaaagagcatgaagacaatatatttacacctaaaccaacactctttgcaacatcagatgctgacctgaaagaa

SEQ ID NO: 266356 - DNA, 98 bp, Homo sapiens
gtcaccctcaaaagagtccagattcaacaggctgccaataaaggagcaagatggctagggatggtcctagaacaattggagattcatacgcacacaaa

SEQ ID NO: 266357 - DNA, 90 bp, Homo sapiens
cagattctgttgcgaaggcagccatctttagttcgtctttcctagagagaaatctcctgcaaagaagctgagccatgcaattagtaaatc

SEQ ID NO: 266358 - DNA, 50 bp, Homo sapiens
aaaaacatcctgaatcagaatggccttgtattccctgaatgactataaac

SEQ ID NO: 266359 - DNA, 48 bp, Homo sapiens
agtctttcatgctattaaatctgtcaaagacgggatttcaccatgttg

SEQ ID NO: 266360 - DNA, 90 bp, Homo sapiens
agcagagccgatgggtcatgaggatgtaagtgcgtttgaaggcttccacaccctctactccagggacactttcttcatgagcaacaaacc

SEQ ID NO: 266361 - DNA, 101 bp, Homo sapiens
ggaggcacaggtggcccccaccacccggaggagcagctcctgcccctgtccgggggatgactgattctcctccgccagactcagcccacctgcacccaggt

SEQ ID NO: 266362 - DNA, 97 bp, Homo sapiens
tgcacagcgtcaacagatcaaagcagcatatctccaggaaacaggaaagatatagtggaaatgctatttactcaaccaaatattgaactgaaccagc

SEQ ID NO: 266363 - DNA, 95 bp, Homo sapiens
tggataaaaataatgtgaggcgacaagcaacaacaatcatagctgacccctttgctgatgcaagtaagggtgatgacctgcttcctgctggcact

SEQ ID NO: 266364 - DNA, 113 bp, Homo sapiens
cagtttgcaatatgactttggaggaattctcggctggagagcagaagaccgaaagcaaaatgatgcttcaacacccaggccaggtctctgcctcggaagtgagtgcttctgcc

SEQ ID NO: 266365 - DNA, 99 bp, Homo sapiens
cgaatacgcctcgataaacagggccgtgccgcagatgcccaccggaatggagaaggaagaggagtcggcgcattctacattctaaaggggagctcagtg

SEQ ID NO: 266366 - DNA, 83 bp, Homo sapiens
aagtgcatcctctcacaccccagctgtgcatggtgcaagcaactgaacaagttgaaatcatcgcagaaggataaagttcgtca

SEQ ID NO: 266367 - DNA, 75 bp, Homo sapiens
cggagctgtgcgagagcctcctcacttggaccattgccctcttgaacatttaccgtaaccctcaaaactcttccc

SEQ ID NO: 266368 - DNA, 82 bp, Homo sapiens
aggccgcccgggaactgctgacgcttgatgagaaggacccacggcgtctgttcgaaggagccagagaagaagatcgtccagg

SEQ ID NO: 266369 - DNA, 50 bp, Homo sapiens
ctccactccccagctgtgaaaggggcccggcctgccccgcacctgagctg

SEQ ID NO: 266370 - DNA, 82 bp, Homo sapiens
acctcgttgtgcccgtcttcacgttcctgcagttcttcttctatgttggctggctgaaggaatcagagatcattgatttctt

SEQ ID NO: 266371 - DNA, 100 bp, Homo sapiens
tatagtagagatggaaacctcatagcagctgcctgccagaatggaagcatacagatctgggaccgaaatttgactgtacaatccttggatttaccctccg

SEQ ID NO: 266372 - DNA, 90 bp, Homo sapiens
agctgagatccatctgcaccacggtgctggaccgtataatagacgctggccccaaaggaaactactctcgatttatgaatcacagctgcc

SEQ ID NO: 266373 - DNA, 90 bp, Homo sapiens
ggaagcggaggagtctccaggagacccggggacagcatcgcccaggcccctgattacaacagcagtgaattgaaaacagcctgcaggaag

SEQ ID NO: 266374 - DNA, 98 bp, Homo sapiens
aaggatgatggcatttctcttttaatatctgatactcagcctgaaggacattcactgaacaatgccagggatacaagtgccatggatactctaccgct

SEQ ID NO: 266375 - DNA, 75 bp, Homo sapiens
ctgtgctccaggactccctcaataataaattgtgggaatgtattttgtgctggatgctgccacctgaagctgccc

SEQ ID NO: 266376 - DNA, 74 bp, Homo sapiens
tctcgctcggctgcgggaaatcgggctgaagcgactgagtccgcgatggaggcacagttggcgggcagctccca

SEQ ID NO: 266377 - DNA, 82 bp, Homo sapiens
agccagaagatgggagagacatttttgaaataattcagcattggcgtatttgcttgtcccaatacaagaatgccaaaggagg

SEQ ID NO: 266378 - DNA, 50 bp, Homo sapiens
ccaaggaggtgacccaacagggacaggaatcattgtagtcaatcattttc

SEQ ID NO: 266379 - DNA, 75 bp, Homo sapiens
gcatccgtttccacgactttctgggagactcatgggcgcagttcttcatccacccactaatgatcagagatgcaa

SEQ ID NO: 266380 - DNA, 87 bp, Homo sapiens
cagacaaggttcaaaaactaagcatccagaggccctgagcagctttcagcactggaggtgctggcattgacggagtggaggaaatta

SEQ ID NO: 266381 - DNA, 83 bp, Homo sapiens
cgatgagacagagttgcgaccgcgcggcagaaggtgcttcctggaggggcctgccccactgttcctgtgctgagttccaggac

SEQ ID NO: 266382 - DNA, 75 bp, Homo sapiens
ttggccgtgcctgttattaaaaagttatctccagaagaagaagagaaaaggagaatccgaagggaaaggaataag

SEQ ID NO: 266383 - DNA, 75 bp, Homo sapiens
ttcgcttcgcgttttggccagggcgggggtctgggctttaggcaactgacagacttcaaggatgcagctgctact

SEQ ID NO: 266384 - DNA, 100 bp, Homo sapiens
ggcgcggcagcggagggacggcagtctcgcgcgatgaaatcatgcaccaggacatcgtcccgctctgtgctgccgacatccaggaccagctaaagaagcg

SEQ ID NO: 266385 - DNA, 51 bp, Homo sapiens
gggtcctttatatagaagggagagtgacatttgctctgaactggatgatac

SEQ ID NO: 266386 - DNA, 80 bp, Homo sapiens
agctatggcctgaagacgggattctttagggtcccctcctaaccgcaagcgtcctgctaacgagaaggcaactgatgact

SEQ ID NO: 266387 - DNA, 75 bp, Homo sapiens
agttgctccgcagagtcttccactgtgggaaggtccctcgtctgagctggctcactcgcccaccaacagcgggaa

SEQ ID NO: 266388 - DNA, 74 bp, Homo sapiens
ggacggagcctgacctcttacttcctgtgggcatgcggctaccaagggcatccttgtggctatggtctgtactt

SEQ ID NO: 266389 - DNA, 97 bp, Homo sapiens
agaggtggttaaagccatattggagtagcgaggaatctgattccaagcaaaaaccaggtgaccaagaatatggcccaggtgaccaaagccctggaca

SEQ ID NO: 266390 - DNA, 100 bp, Homo sapiens
ctcctgtgtggagaagagaaagaatgttcaaatccatcaaatcttctagaactttacacacagatgatggaccatttggattgtgcaacaaatgaagaaa

SEQ ID NO: 266391 - DNA, 100 bp, Homo sapiens
actcccagttcatccccattcatcaccctggagccttccctcctcttcccagcaggccaggcggatgtcagatgggctttttctacaaaaatgcagggaa

SEQ ID NO: 266392 - DNA, 75 bp, Homo sapiens
gttgtaaaagagcaaaatccaccacctgcaagtttttccagaaaggaggagtcaaggaagcccttagtgaacgag

SEQ ID NO: 266393 - DNA, 98 bp, Homo sapiens
tttcccacaggacacgaagtttgtcggcccttgccttggcagagctgagagaagaaaactacgcctcagccctgagcaatgtagtaacttttatgtgg

SEQ ID NO: 266394 - DNA, 98 bp, Homo sapiens
ttcgatgatcgtgtgtcggatgaggagaaggggcatgatggatgaggaagggaaccagtttgtggcctatttcctgcctgtagaagagacgttgaaga

SEQ ID NO: 266395 - DNA, 101 bp, Homo sapiens
cgacggcggaacccgtgggcctgtggactgcagcctcggcggtcagcagatcaggatcctcatgaccagccaaagagaagaagaattaggaagcataaatc

SEQ ID NO: 266396 - DNA, 100 bp, Homo sapiens
gaaaaacttaaaatggatatgaaaagtgaagaaagtgatcataggagaaaaccatttcagggtgattctgggggtccacttgtctgtaatggtgtgcttc

SEQ ID NO: 266397 - DNA, 83 bp, Homo sapiens
gggaggaacatgacatcgcggaggtgtgcctacaggggttgtggaaggagacgctgcccccggtctatgccctggaattgctg

SEQ ID NO: 266398 - DNA, 100 bp, Homo sapiens
ccggccccggagctgggcccgagccaggccggagctgaggagaacgactgggttcgcctgcccagcaaatgcgaagggatccacggggaagctggtgtgc

SEQ ID NO: 266399 - DNA, 119 bp, Homo sapiens
gcccaggacccgcagcagagacgacgcctgcagcaaggagaccaggaaggggtgagacaaggaagaggatggagatgaagatgaggaagctgagtcagctacgggcaagcgggcagctg

SEQ ID NO: 266400 - DNA, 83 bp, Homo sapiens
cgccgcgggacctctccgggccatggaaattccgggtagatatgcctggctcaggcagtgcattcatccccaccatcaacgcc

SEQ ID NO: 266401 - DNA, 100 bp, Homo sapiens
cccaactacagcaacttctcctctcaggccatcaaccctggcttccttgatagtggcaccatcaggggtgtgtcaggtctagtgacggagcccgcgcgcg

SEQ ID NO: 266402 - DNA, 82 bp, Homo sapiens
aaacacctcaggacacggcctacaacaccaagagctgcttccagctgccatggtgatgccaccccagcccgtggtcctgatg

SEQ ID NO: 266403 - DNA, 96 bp, Homo sapiens
gaatctaaagcctcctcagccttctgagtcagcctgaaaggaacaggccgaactgctgtatgggctctgtgctggagaatctggtaaaagcaccat

SEQ ID NO: 266404 - DNA, 100 bp, Homo sapiens
ctgcaacctctgtctcccaggttcagcttgccagcaaagcacggacagagaaggaggagaagctgagccaggcctatgcaatcagtgctggtgtctctct

SEQ ID NO: 266405 - DNA, 83 bp, Homo sapiens
gctgctgaacctgagctgcaagttggaattgatataatgaagactagttttccagggtgatcagcccatgacctaaacctcca

SEQ ID NO: 266406 - DNA, 89 bp, Homo sapiens
cacagacggggtggagcccatggaatcggtcctggaggacaggaaagtggagaatgaggacatgaataaagaccagatcttgctggaaa

SEQ ID NO: 266407 - DNA, 75 bp, Homo sapiens
caaaacttcaagccaaacatcaagcagaatgtgatttgcttgaagatatgagtggaagatagatgataagcctgt

SEQ ID NO: 266408 - DNA, 97 bp, Homo sapiens
gaaagataggcgtgctatccattgggcagcatatatggtgctttgcagtccgctctctgggctgggtagaggtacctgaagaggacctggcaccggg

SEQ ID NO: 266409 - DNA, 83 bp, Homo sapiens
atatggacggataagagatattgatctgaaaagaggctttggttttgtggagctgtaatcgactgtgaggataagaatggaaa

SEQ ID NO: 266410 - DNA, 50 bp, Homo sapiens
aaaaggggacacggcggtgcttaggtatcagtttttggaagaagcttttc

SEQ ID NO: 266411 - DNA, 74 bp, Homo sapiens
gtcatgctctttgtagcgtggtgcttctgttgctcacagctccagtaataaaccgattcacaaggcgtgcctca

SEQ ID NO: 266412 - DNA, 100 bp, Homo sapiens
cgacaggattcgttggctgccgtccccgctgctgtgcattggacatttatgcagtgtgtgattctttctaaaacaactccctggaagagaggacatttaa

SEQ ID NO: 266413 - DNA, 75 bp, Homo sapiens
cgctgagggtgagtgccgggagctctgaggagagttaagaaagacgtggacaagggcacacggcactcagacatg

SEQ ID NO: 266414 - DNA, 74 bp, Homo sapiens
gctgcccatcccagtggcggctgccaaggagacgctaaaagatggcggcaaggcagcccaggcaaatgtaagaa

SEQ ID NO: 266415 - DNA, 82 bp, Homo sapiens
ctgcggtggcagctgctgagttctcggtgaagaactgaaaagctccatcattggcaagaagaagccagcagcagctaagaaa

SEQ ID NO: 266416 - DNA, 75 bp, Homo sapiens
gacgccgcaacccggggaaagcagttggaatcgaagcctcttaaaatggcagatgacttggacttcgagacagga

SEQ ID NO: 266417 - DNA, 75 bp, Homo sapiens
cagaattagaaaggagctgcttcccaataaggaaacagtaatggtaactcgggatttgaaggacagagtcgctat

SEQ ID NO: 266418 - DNA, 50 bp, Homo sapiens
tcaactatctgggggggacattcccagaagagaaaggatgcacgtcccag

SEQ ID NO: 266419 - DNA, 97 bp, Homo sapiens
ggttctgcggcacgggatggcggaggcgcctcctgtctcagtcactcagcctctgaagaagcttcgggttcagactcaggcagtcagtcggaaagtg

SEQ ID NO: 266420 - DNA, 98 bp, Homo sapiens
aaatagatgcttctaaatctgttgatgaagtgaaatccgggtccccggccgtgctggcattcgcaaaggagaagtcttttgggtggcccagcttcatc

SEQ ID NO: 266421 - DNA, 76 bp, Homo sapiens
cacaagctttttcatacagctcccaatgtaccccactatgctactctaagcgaaagacatgaggcctcagcctgaa

SEQ ID NO: 266422 - DNA, 49 bp, Homo sapiens
tctgtcttagcaaggctgtcatcacagccaaagaggtgctgaaaaaata

SEQ ID NO: 266423 - DNA, 100 bp, Homo sapiens
cgactccgtcgcagactacggacctgtctgggtctcagccgccaaagaccccgtccgattcgacttccacctgaagtaaatcggatattgtatataagaa

SEQ ID NO: 266424 - DNA, 100 bp, Homo sapiens
cattcaaattgctcacagctgatcctaagaatggactgctgaattatgaagtatttcagacccagtagtagaacatcactctgccactcactcctttatc

SEQ ID NO: 266425 - DNA, 83 bp, Homo sapiens
gctgagcgggcggtcattcgcatcgcagcgctgataaagcagtttgtgtccgacgtggcctggggggagctggactacctggt

SEQ ID NO: 266426 - DNA, 75 bp, Homo sapiens
caacatgatagttgatctggataatgtggtcaaaaagggttttgtgaccatgatcttgcagtgctcaattgaaat

SEQ ID NO: 266427 - DNA, 83 bp, Homo sapiens
tacgaacattttatactcaccaagaactgtggtgtaaagcgcctgtaaaaccagatatgccctgcgtccaagcccaatatagc

SEQ ID NO: 266428 - DNA, 75 bp, Homo sapiens
cggaggcagaggagctgaagactccagtatgcaactgactacaaggaggacatggacatcttccagcaacagatc

SEQ ID NO: 266429 - DNA, 112 bp, Homo sapiens
ttcattcccactcatgagatccaagtctctacagttaactggcaaagaaggttgaaaactaagcatggggaagagctgcaaggtggtcgtgtgtggccaggcgtctgtgggc

SEQ ID NO: 266430 - DNA, 90 bp, Homo sapiens
gggcctgccaggtggcgctcggtgtcttcaaaaacaaacatatttaaaagattttacttctcatctccaggaagaaccagctaggagtag

SEQ ID NO: 266431 - DNA, 75 bp, Homo sapiens
accttcaatatcaaaaatgactttactgaagaggaggaagcccagaataatccagaatggctactctgatctatg

SEQ ID NO: 266432 - DNA, 83 bp, Homo sapiens
ggagcagagaggaaaaaacggctatctataatagcttaccctgaaagaagcagatcccagttcaaaagtagccataagaagga

SEQ ID NO: 266433 - DNA, 90 bp, Homo sapiens
gaagtcctcaccactcaacagtcaaagtgaagcagaccagcatgttttggaaatttgatcttcactcatcatcccacatagacacacttc

SEQ ID NO: 266434 - DNA, 100 bp, Homo sapiens
atcttcgtcagcattgcccagtctgagcaggagagcctgctgcagcaggcccaggcacagttccgaatgagattattttgcagaggatgatggggagatg

SEQ ID NO: 266435 - DNA, 72 bp, Homo sapiens
tcaagcacacccaatggacagcatgcctcaccaagtcacatgacaagcaatggcgggtgaaaaagttgagaa

SEQ ID NO: 266436 - DNA, 50 bp, Homo sapiens
ctgtactaggactgggaacgggatatggctttagttgcccctgaagctcc

SEQ ID NO: 266437 - DNA, 124 bp, Homo sapiens
ccgctctccctgcgctctccgcaccgcggcttaaatgatgtattttgtgatcgcagcgatgaaagggaagtttaattagcattgacagcacctgtacagagatgggcaattttgacaatgctaa

SEQ ID NO: 266438 - DNA, 100 bp, Homo sapiens
tacccatccggggaggagcgttgcattgcctgcaagctctgcgaggccatctgccccgcccagagagcatcagtgatgtcacgtttggagcaggggtcag

SEQ ID NO: 266439 - DNA, 76 bp, Homo sapiens
ctcactttaagagatgactgtcaagaatataccactgagccaagaacctacacggaggaggaactgaatgccaagc

SEQ ID NO: 266440 - DNA, 100 bp, Homo sapiens
cggtcagtagctggatcctttgataatgaaggcattgctatttttgcacttcagttcacatactatttatggatgatgaaccaggtggaagggcagcaga

SEQ ID NO: 266441 - DNA, 98 bp, Homo sapiens
ggaggagtccctgaagatctatgctcctctgtacttggttactgaagatggagctgacccaaatccatatgtcaaaacatacctacttccagataacc

SEQ ID NO: 266442 - DNA, 83 bp, Homo sapiens
tgctcttacgtatttgtgtgacttgactcttcaaacacaaaggaggctgatccgatagagtaatacctaattatatcaccatg

SEQ ID NO: 266443 - DNA, 83 bp, Homo sapiens
ctcaccgacagtgccctgagggccttcgagagctaccgcgccagacagggggaaatttgcagtggtgagaaaatgtataaaga

SEQ ID NO: 266444 - DNA, 100 bp, Homo sapiens
ctcggaggagaaaggcaggagagatagaggcagcagaagccagggcagctgaaagacagagaccttcagacttccttgtgaaacctcctagtagaaaaag

SEQ ID NO: 266445 - DNA, 99 bp, Homo sapiens
ctgcgccttgctccttttgtctaccttcttctgatccagacagggtttgggatgctctgacagacaattacatcccttcactctcagaagactggaggg

SEQ ID NO: 266446 - DNA, 100 bp, Homo sapiens
gtagagaggattgaagacagccatagcccgggcgtggccgtgatacagttcgccgtcggggagcaccgagcccaggccgctacctgtctgaggaacccga

SEQ ID NO: 266447 - DNA, 74 bp, Homo sapiens
gcattatttatcccagtggattgaaagccaagcatgaaatactacccgccggactttgacccatcaaagatccc

SEQ ID NO: 266448 - DNA, 98 bp, Homo sapiens
tggtccatagcctctgttcgttttcactgcaggaccaggcacgaaaatctgggttggaatttgcccctgacaaataataaaatgatgagtgatgcaag

SEQ ID NO: 266449 - DNA, 100 bp, Homo sapiens
cttagctcagcaattcttaccttacagtgatgtgtgttctgaaattgtgaaccatgagtctagtacttaatgatctgcttatctgctgccgtcaactaga

SEQ ID NO: 266450 - DNA, 129 bp, Homo sapiens
aagcctgcagagaaaaagaagccaaatgccacgagacctgtaacgcctccaaggggtattccactacatgagcatcaccatcttggtcttttttatgatggagatcatctttaaattatttgtcttccg

SEQ ID NO: 266451 - DNA, 100 bp, Homo sapiens
caagagtccctctaaagcagctcaaaaggttcaacatgcactgaaaaaatcagagaaggctttggataccctaaacaaagccattgtcattgatcccaag

SEQ ID NO: 266452 - DNA, 113 bp, Homo sapiens
attaacctgccgccgcccctcaccagacagatcgctgtcaaaaccctagcacatggattaattgatgtatgttgagtttatggagctgccttttggtggcttgctttatctgc

SEQ ID NO: 266453 - DNA, 50 bp, Homo sapiens
caaactaagccgattttccggaaaaaggcactaaccaggctgtatctgga

SEQ ID NO: 266454 - DNA, 75 bp, Homo sapiens
ataaaagtcctgaaacagttttgcagtcgaatttgttcctagagacagagaacccaatacaaaagtgagaacatg

SEQ ID NO: 266455 - DNA, 100 bp, Homo sapiens
atacagcttggtgaagagttactagctcaagacaaactttctgcctccttggaaagctctacatctccttgtgattggagtgtgggtttcaagattccag

SEQ ID NO: 266456 - DNA, 82 bp, Homo sapiens
aggtgagtcgcggtgggtcctcgcttgcagttcagcgaccacgtctctgctttctatccgtcaagatgataaagtcgtgtgc

SEQ ID NO: 266457 - DNA, 100 bp, Homo sapiens
agctctaaggagctcaaaacatcctgaggacagtgcctggagcaatggactttgtgagccaagaacaaggtgaaatggtgatgctctatgatctcttctt

SEQ ID NO: 266458 - DNA, 100 bp, Homo sapiens
gtgcaagtaatcagtctttgacaagtgatgagaagctgtcggagcttcccaaggaaaacgggccttactatacatcatatcccccatcaccagatttgtg

SEQ ID NO: 266459 - DNA, 82 bp, Homo sapiens
cgtccagaagcctgtaggaaagcggaagcggcctggcaggggaaggatcgagggatttcagtcataatcggttgtctaactg

SEQ ID NO: 266460 - DNA, 100 bp, Homo sapiens
ccccgcagagcgcatccatcaaagctttgcgcaacgccaacctcaggcgagatgcattcaacagaaggtgtcaaattgacagctctcaatgacagcagcc

SEQ ID NO: 266461 - DNA, 83 bp, Homo sapiens
cgcggagccggcgctgagaggggctgcggccggagcgggcggctgagacaaaggcgacggttgatgccggcccaggatggatc

SEQ ID NO: 266462 - DNA, 76 bp, Homo sapiens
gctcaaggacagtttcttacagtaattggagcattttgaactgaagtttctgacaaaagtattgccacagatcttg

SEQ ID NO: 266463 - DNA, 100 bp, Homo sapiens
gaagtgaggagcccctccgcccggcagctgccccgtctgagaactcaccatcatatttaagaacatgcaggaatgcattgatcagaaggtgtatcaggct

SEQ ID NO: 266464 - DNA, 75 bp, Homo sapiens
cagaagttgctgctgacgctctgggtgaagaatggaagaatgccagaggattcaacatgagcatacctatgcctg

SEQ ID NO: 266465 - DNA, 100 bp, Homo sapiens
ggggagctggccagcgagagccagggctccaaagaactcggtacggacattgctgcaggagaagaggttgccatcaagcttgaatgtgtcaaaaccaaac

SEQ ID NO: 266466 - DNA, 83 bp, Homo sapiens
cttggcaggaatatggaagacaggttagcatggcctcattgaaagaactagatcaaagactctttgaaaattacatcgagttg

SEQ ID NO: 266467 - DNA, 101 bp, Homo sapiens
cgcctggaccctgatgccatcccaagccctggttatgtggtccgaatcagtggtgggaacgacaaacaaggtttccccatgaagcagggtgtcttgaccca

SEQ ID NO: 266468 - DNA, 75 bp, Homo sapiens
tatgagaccatgaagaacaaagacacaggtcactcaaataggcaggttttgacacaagggcgcatatcttcaaag

SEQ ID NO: 266469 - DNA, 98 bp, Homo sapiens
cagcatcacccccggacagcaagaaatgtctttcctccaggacccaagtttcttcaccatggggatgtggtccattggtgcaggagccctgggggctg

SEQ ID NO: 266470 - DNA, 100 bp, Homo sapiens
tggatcataaagagacacataccaaattggatctatccagagactcttgaagacaactctgaaaagtgggctgtgactcccgatgcaggggatggtgtgg

SEQ ID NO: 266471 - DNA, 100 bp, Homo sapiens
gactacttctactccaccaggaagaaaacacggccatctttatgtgtaaatgttgtaacctcttctcaccaaatcagtcggaactcctctcccacgtttc

SEQ ID NO: 266472 - DNA, 100 bp, Homo sapiens
cctggctaccatggaccatcctgctggtcagcactgcggctggcagaggtggaggagacactgaagcgactgcagagccagaagggagtgcagggaatca

SEQ ID NO: 266473 - DNA, 101 bp, Homo sapiens
cccccttgtcccgggatcgctccgtcgcacccaccatgatggaagacgacgggcagccccggactctgactcacaccacccggcaagaactgctcactacg

SEQ ID NO: 266474 - DNA, 89 bp, Homo sapiens
aagaacgggagttcagaaaacagttccccctgcatgaaaaggtggtgaaggcatttgtgatcctggcctcgcagttcctatcccatgac

SEQ ID NO: 266475 - DNA, 100 bp, Homo sapiens
acagactagccactttgcattgactggaaacaatggcatttacagaaagagtcaacagcagtggcaacagtgaatgagttcacggtgatcaggaagaagt

SEQ ID NO: 266476 - DNA, 75 bp, Homo sapiens
tcgagtactcgttggccctggtcaccgtgctgaacgaggactatggcaaggagtctcaggccaaggatgtcattg

SEQ ID NO: 266477 - DNA, 75 bp, Homo sapiens
gcctgtgcccgtcttctgtgacatgaccaccgagggcgggaagtggacgatgacctggttccacatggactgtca

SEQ ID NO: 266478 - DNA, 75 bp, Homo sapiens
gtgtggacgccactacagttcatcaacatcaactacgtccctctgaagaccccaccaacaactgaacgctttggt

SEQ ID NO: 266479 - DNA, 102 bp, Homo sapiens
cgcgacagagctgtcctcgcacctggatggcagcaggggcgccggggtcctctcgacgccagcctcgtcacgtgttcaatatgctaaagaagtatgtccgcg

SEQ ID NO: 266480 - DNA, 50 bp, Homo sapiens
cccctcaccccccgagagccgatttggtgttgtactgcgaggcattcctg

SEQ ID NO: 266481 - DNA, 100 bp, Homo sapiens
aatttatcaatggaccaaataatgctcatatccaacaatcacagtacaagagtcactttgttgcagccagtttaagtaatcagaaggctggaagttctgc

SEQ ID NO: 266482 - DNA, 76 bp, Homo sapiens
cagctaagcaaaccagacgcactggtcaggtcaaaggtcgtgataaacatatcaataatttgaaaaagaaatgcca

SEQ ID NO: 266483 - DNA, 82 bp, Homo sapiens
acctgaaccggcacctgcacacctggatccaggataacggaggctgggtgtcgtgaaaactacccctaaaagccaaaatggg

SEQ ID NO: 266484 - DNA, 100 bp, Homo sapiens
gtttcttctccaatgtggacaacgctgagcatatgatctttcggtgtctatctgcactttctttgacctaaaacttgaggatattatctttaggaagaaa

SEQ ID NO: 266485 - DNA, 50 bp, Homo sapiens
gctgtccttctttgtggagagcaaggctacagcaactggacgaggagaac

SEQ ID NO: 266486 - DNA, 82 bp, Homo sapiens
caagtctcctgaagaggaaggagcggtgtcctcttaagaaaatggtatttctttaaatccagaacaatggagccagctgaag

SEQ ID NO: 266487 - DNA, 75 bp, Homo sapiens
cgaggaccatgctgggccggagcctccgagaaactggattatggacagaacttggaaatattgagaataatttct

SEQ ID NO: 266488 - DNA, 75 bp, Homo sapiens
gctgcttggcaaatcaggctgacctcgacacagagtggaatctgtttatagatcctaattatctcatggctaatg

SEQ ID NO: 266489 - DNA, 83 bp, Homo sapiens
gaagagggctccaggcatccggtcctggtccctgctggttggtgagaagccctaccactgcaactgggacggctgcggctgga

SEQ ID NO: 266490 - DNA, 75 bp, Homo sapiens
gagtctccgccgctgcgggcccgctccgacgcggaagatgatcacggaagccttggcccaaggtgggatgcacat

SEQ ID NO: 266491 - DNA, 97 bp, Homo sapiens
tctgttgacatggaaaacaaggaaaatggctctgtcggtgtaaaaaaagttcaccgaacagcagaaagaatttcaagctactgctcgtaaatttgcc

SEQ ID NO: 266492 - DNA, 82 bp, Homo sapiens
atgccctgcagtacctgcagaaggtctctggagacatcttcagcaggattgacgtgtctcagaatgaccttccttgggaatt

SEQ ID NO: 266493 - DNA, 82 bp, Homo sapiens
cagctgccacctgcctttgacctttttgaagcctttgcaaaactctctatcaatatcagctcacatcattgaaaagataatt

SEQ ID NO: 266494 - DNA, 100 bp, Homo sapiens
cttcccgctgctgctcttctccaggctctgtgtttgaaagctgaatggctctatagtcaaggcaaggggagagcatatcggcctggccagcacatccagc

SEQ ID NO: 266495 - DNA, 75 bp, Homo sapiens
attgatttgctcttacgtatttgtgtgacttgactcttcaaacacaaaggacctgctgaagttcccatgatgtca

SEQ ID NO: 266496 - DNA, 100 bp, Homo sapiens
ggcagaaggtggatttgatccctgtgaatgtgtttgctctcatgaacatgcaatgagaagactgatcaatctgacatccagctctgtcacccaagctgca

SEQ ID NO: 266497 - DNA, 97 bp, Homo sapiens
gccctcttgataaaaagagatgtggggggattctcgacctgctaacagaactggaccttttcgtctcaaatatctatcagtgtagaagagtgggaag

SEQ ID NO: 266498 - DNA, 101 bp, Homo sapiens
ttctgtgcctggaaaatatctgttaacagactgcttttacacctacgttttacccagccccctataacatcacccccaacaggatgcttgctcagtctgca

SEQ ID NO: 266499 - DNA, 80 bp, Homo sapiens
caccacgcactgggtcgtcacggaggacgggaaaatccagcagcagtttggtgccctggttgtcagatgttggaaagcag

SEQ ID NO: 266500 - DNA, 75 bp, Homo sapiens
gcgccgacacgctgcgctaccaggccaacaactgccccatctgccggctgcgtaccgggtgtctggtccgagccg

SEQ ID NO: 266501 - DNA, 97 bp, Homo sapiens
cgcctcctggggctgctggcggagggtctgaggcggcgcggccatggctcacctccggggatttgccaaccaggctcatcggaacctgtcccagctc

SEQ ID NO: 266502 - DNA, 100 bp, Homo sapiens
taatggagctactgtactggctattggaaggaggagattctgaagataaggagtgatcagggccaaagcggtcagtgagaaggaagtggactctggaaac

SEQ ID NO: 266503 - DNA, 98 bp, Homo sapiens
caccatctacctattcttcaaatggttctttggcatggacacaagttcagtgggaggattagaattgactgatcagactcctgttttattagggagta

SEQ ID NO: 266504 - DNA, 75 bp, Homo sapiens
tggaccctgagccctgggacctctgaagtgaacactgcagggccatttggtggaatttcagtgttggccactttg

SEQ ID NO: 266505 - DNA, 90 bp, Homo sapiens
ggaggcccggccacctctgagaagggagacgacgctgctgggtccgctgagcggggcgacccgaggtgaaagaagaacgtccagaaaaaa

SEQ ID NO: 266506 - DNA, 98 bp, Homo sapiens
cgaagatggtggcggctactcctcctggcaagccggtatattcggggcccaggagcaaggaaaagtggccttttgcgtgacacagaagtggacacatc

SEQ ID NO: 266507 - DNA, 74 bp, Homo sapiens
caaagataagaagagaaaaagagaagatgaagaaacccagcttgatatgttggccaaagctgtcttgaaattta

SEQ ID NO: 266508 - DNA, 98 bp, Homo sapiens
gcgggggagccccgggagccgcacggatggatgtggacagtttccatatgatgcaaacatccagatacactgggtatcatttctggatgggcgccaga

SEQ ID NO: 266509 - DNA, 88 bp, Homo sapiens
cgcgtcctgctgaccccagccggcgccgagggcttggaatctcgagcgggaaaaggtttgaagactgcttcattctgcctctagtacc

SEQ ID NO: 266510 - DNA, 74 bp, Homo sapiens
ttctcgcgagagtcgtctcctcgataccaagggacggcaaaacagaacagaaaggcggagataaaaagaggggt

SEQ ID NO: 266511 - DNA, 74 bp, Homo sapiens
aaaccgtgaatggtgtctggaggagtgagagccggcaggagcaggccgggctctcgccatgggtcactgtcgcc

SEQ ID NO: 266512 - DNA, 96 bp, Homo sapiens
tgtgagctgcctggtcctgctgcaggtggcaagctctggtactgggcctaatcgctacgtgcctctttggctatgatgcctatgtcaccttccccg

SEQ ID NO: 266513 - DNA, 98 bp, Homo sapiens
catagtcatggtgatgggtattacagatgtagatgataaaatcatcaaaagagccaatgagctcgtttgatcccttccaactgataccttgtaatttt

SEQ ID NO: 266514 - DNA, 75 bp, Homo sapiens
atcccagcaaataggaaaattaagtttagtagtgctcctattaaggtccccagcctgggtaaagatggccccatg

SEQ ID NO: 266515 - DNA, 74 bp, Homo sapiens
ccagccacagcctcccgcgcctcgctcagctccaacatggtgaggagaattcgtgttgcaaactgcaataaaca

SEQ ID NO: 266516 - DNA, 75 bp, Homo sapiens
cgcagcgacaacatggaggccgtgaagaccttcaatagcgagggaaatatgaaatctgatgatgatcctcctgct

SEQ ID NO: 266517 - DNA, 100 bp, Homo sapiens
ctccatgcgcagtcatgagtcgcttcaagtttatcgtgctgggagaaggactggccaagggagaagatgcctttcgggcagtgctttgctgcatgcagct

SEQ ID NO: 266518 - DNA, 75 bp, Homo sapiens
ctccggcacgggggcctctcgtccgatgctcaggagagcttggaaggtcctagcagaagatgtgactcagactgc

SEQ ID NO: 266519 - DNA, 83 bp, Homo sapiens
gccccccgggacccccacgccgccgccaggccaagactaaggggctgcagagcggggtggacattggcgtcaagtactcggag

SEQ ID NO: 266520 - DNA, 74 bp, Homo sapiens
caatgggcctttccagcccgtggtccttctccatattcgagggacaggagagagtggcaagagtacgtttatca

SEQ ID NO: 266521 - DNA, 101 bp, Homo sapiens
ccaaggtatttgagatgctgttgcacaaaattccccttatttgccagtgtttgatgatggtgatgagcgaacattgagacgtacctcactttgtctgaaag

SEQ ID NO: 266522 - DNA, 82 bp, Homo sapiens
gctgcgttcacaggtgtttctgcggcagatcatgtttgagaccttcaacaccccagccatgtacgttgctatccaggctgtg

SEQ ID NO: 266523 - DNA, 100 bp, Homo sapiens
aagagaaaaataggctgccagcaaacagtcttccgcaggaaggagatgtgggacatctctacaccgttcccatccgggaacagggcaacatctacaagcc

SEQ ID NO: 266524 - DNA, 82 bp, Homo sapiens
ttccaccaggccgggaagcccatcgggctcttgtcaggatggtgaagctgttcatcggaaacctgccccgggaggctacaga

SEQ ID NO: 266525 - DNA, 50 bp, Homo sapiens
ccccctccacggcaccatcaccgttctgctggccactgccccaacccagg

SEQ ID NO: 266526 - DNA, 90 bp, Homo sapiens
caaagattgcctgcagtttattgggtgaagcaagaagcatttcatttgcacatctttcttggacttgggatatacagttccagtttatta

SEQ ID NO: 266527 - DNA, 95 bp, Homo sapiens
ttcaggatgggggaagtggaagtgaaattggagccgggtgtgggctgagccctgcctgattgatgctgccaaggaggagtacaacggggtgatag

SEQ ID NO: 266528 - DNA, 98 bp, Homo sapiens
tactgcataccctcatttctggggtcaacagtccagatgggtgagggccccaaggctgttgcagctcctcgacctgatcggttggtcaatcgcttgaa

SEQ ID NO: 266529 - DNA, 80 bp, Homo sapiens
ccgattcctcctccttggtcgccgcgtccttggctggcgtactagacgcttgaagcaaagctgccatcccagaagacgac

SEQ ID NO: 266530 - DNA, 100 bp, Homo sapiens
aggctgcaaacaacaattttggagtggtacttacagattcctctaggcacagtggagtccagagaaaatgttgcaaaaagagttacagaagaaacagaag

SEQ ID NO: 266531 - DNA, 89 bp, Homo sapiens
gcgtcgctgcccccagctcagctcttactgcgggccgctccgacggcggtccatcctggtatctgaacttaggactggagctgcagaag

SEQ ID NO: 266532 - DNA, 87 bp, Homo sapiens
ttataaggatgtcatccccatggctgatgcagcaggcatcatccgctatgcaattgggtctggcttcagccttgtcatgaaccaccc

SEQ ID NO: 266533 - DNA, 100 bp, Homo sapiens
gatgtcggcgaagagttcaaccaggtgatcatggagctcagcttggtctccatggggctggtggtgatggaatacatgatgacacagcaggtggagagga

SEQ ID NO: 266534 - DNA, 75 bp, Homo sapiens
acgtgggcaacgtacgtcagacggcagtggtggaaaagatccatgccaagatggtgggcagtggtggtgctggct

SEQ ID NO: 266535 - DNA, 74 bp, Homo sapiens
gtattccataatatacagaaatctccagagattagcctgaggcctgctcagtcgttcctaatgaataaaaatca

SEQ ID NO: 266536 - DNA, 75 bp, Homo sapiens
agcggatcgcgtggagtgacggtcccacggcagcgcatatccctcctaaatgtacaatcaaggatttgctaccaa

SEQ ID NO: 266537 - DNA, 96 bp, Homo sapiens
ccttccagtacacagacgagcatggggaagaggtggaaactgagtcagacagaggcgaggtgacttgtctgaggtcacagctagtgagtggtgaag

SEQ ID NO: 266538 - DNA, 100 bp, Homo sapiens
agcgagctgtttgacccctttgacctcttcgatgtgcgagactttggaaaggacatggatttgattgacatactttggaggcaagatatagatcttggag

SEQ ID NO: 266539 - DNA, 82 bp, Homo sapiens
tttttatcaacaaaggcaaaggattcggatttattaagcttgccacggaatgaattgtcccgggtctccaaaaagaacattt

SEQ ID NO: 266540 - DNA, 90 bp, Homo sapiens
ggaggactctggagctgacagcgcgcacttcacccgcagttgatgctttcttcacatgtcgaaaaaatgtccttctggcgaacagctcat

SEQ ID NO: 266541 - DNA, 50 bp, Homo sapiens
ggtgtcttctaccagttcttagagctccttaataagcatttatagtcagt

SEQ ID NO: 266542 - DNA, 83 bp, Homo sapiens
ctgtattggtctcctgctcctagagcaaattgtggctactaatttgccccctgaagatcaagatggctctggggatgactctg

SEQ ID NO: 266543 - DNA, 97 bp, Homo sapiens
cttatctcgaaagcctatcagcatagttaaggtaatcttcagcaagtactgcaactccagcgacatcatggacctgttctgcatcgccaccggcctg

SEQ ID NO: 266544 - DNA, 100 bp, Homo sapiens
cccatctccgcatcaggaccaaggcagctggtcttcatccaactgctgagcagattgaaatgtttgcctaccatctccctgatgcaacactgtccaatct

SEQ ID NO: 266545 - DNA, 82 bp, Homo sapiens
tcagatcaaccaccaaagtgggaaacattgaaatcaaggcctgtcatctttacttcagagtgttactgggaacccagttcca

SEQ ID NO: 266546 - DNA, 75 bp, Homo sapiens
ctgaccaccaatcagatccgtaagcgctcctttaccctcatcgtggaggcctgggactgggacaacgataccacc

SEQ ID NO: 266547 - DNA, 100 bp, Homo sapiens
agggagttgtcggcgccgcggccgctgcggacggacgctcgcctgccggctgaggtgctggagagtcatgcctgtgagccctgggcacctcctgatgtcc

SEQ ID NO: 266548 - DNA, 100 bp, Homo sapiens
tgatcctggaccccatcttcaaggtgatcatcctgttgctggggagggtgacctgattccgccacctctccaggatggagccctggggctgtcgctggag

SEQ ID NO: 266549 - DNA, 100 bp, Homo sapiens
ccatggtgcattgcagttgcgtgttgttcagaaagtagcctctagttcgttagtcaaaacgtgaaaaaaaagacctgctttgccctgggaaatagtaacc

SEQ ID NO: 266550 - DNA, 101 bp, Homo sapiens
gaggaaacagtgaccctgagcgaagccaagccgggcggcagcgcatcagagcagagtgacgatgatcctgtttgtcctggagctggagtgggtgctgagca

SEQ ID NO: 266551 - DNA, 50 bp, Homo sapiens
atcgatgtgcggcgtccgctgtataagaggcatttcatccttcatgaagc

SEQ ID NO: 266552 - DNA, 75 bp, Homo sapiens
cagagaaattggccatggaagctttggagcagtgtattttggagaccagtgtaaatttgatcatgatgcagagat

SEQ ID NO: 266553 - DNA, 90 bp, Homo sapiens
gccagactcctggagatcgacccgtacttgaagccctacgccgtggacttccagcgcagggctgctaaggaagcaaaaaaggctaagcaa

SEQ ID NO: 266554 - DNA, 100 bp, Homo sapiens
tctccctgaagcccaccggtccccaacgcatcatgccagggagccaagcgtcctgcccggcctaattcgccaaaatgacgaacacaaagggaaagaggag

SEQ ID NO: 266555 - DNA, 83 bp, Homo sapiens
ctgtggaggcggactccccagaccagaagaaaatcattagcctatgacaacagtgcaggaggaaagcacagtagactcccagc

SEQ ID NO: 266556 - DNA, 83 bp, Homo sapiens
atcggtggtaacgacggcctcagcaggcggggaagatgaaagggatttttagactctgaggagcagttggagctaatccacat

SEQ ID NO: 266557 - DNA, 101 bp, Homo sapiens
ttatcgtagcaaggtgctcttctgggacaacgcgtacgagttcaacctcagcgctctgaaggtcctgacttgtcctgggcaagccaagtccattgcttctg

SEQ ID NO: 266558 - DNA, 100 bp, Homo sapiens
aagaattaaacctggtgtttggacttcaacttagcatggctagaattgtgtacgtgtcttacgactatggaaaatcattcaagaaaatttcagacaagtt

SEQ ID NO: 266559 - DNA, 83 bp, Homo sapiens
ggaggtgcttctcatgcaaaaggaatcgtgctggaaaaagtgaaataatgcaaaaggtgtcccaaggctcctgaccagtgaac

SEQ ID NO: 266560 - DNA, 99 bp, Homo sapiens
agacattcttacaaacagcaaccctcattgaagatattttgggtgttaaaaaggacgtgttcctcatgatccggcgccacaagaccaccatcttcacgg

SEQ ID NO: 266561 - DNA, 100 bp, Homo sapiens
gtacaaggaccagaagaaactgcaccggaaatgtgcctaccagggagaaacaaaggcagcgctgccctcgggggagcattggccctggcggaacgcagca

SEQ ID NO: 266562 - DNA, 50 bp, Homo sapiens
ggggagacctttctgacgtggagttcgtggccaacagtgttgcaaacagg

SEQ ID NO: 266563 - DNA, 100 bp, Homo sapiens
caggcgcagatgcgggccctgctggaccagctcatgggcacggctcgggacgtgagaagcgccaccttcaagtgaacgtcaccaacccagtacagtgcag

SEQ ID NO: 266564 - DNA, 50 bp, Homo sapiens
gctgcccggtctgctccgctactggacccctatggtgtagccgtgggtgg

SEQ ID NO: 266565 - DNA, 50 bp, Homo sapiens
atcatcattaaggacggaggcacggtgtggccgacgacgatgccctcgct

SEQ ID NO: 266566 - DNA, 75 bp, Homo sapiens
tcggtgccaaggaccacgcatccatccagatgaacgtggccgagggcaaaataacatggcagccagacgaattac

SEQ ID NO: 266567 - DNA, 100 bp, Homo sapiens
gacacacatcccctacccctggtggaggtggttgtgccaacaggggctgccggtaaccttgcagaaaatcccgttttgtcaacctaatgaagcattcaaa

SEQ ID NO: 266568 - DNA, 100 bp, Homo sapiens
ccccctattcaagttcatgtcacgctgggtaatgaggatttgactgtgaagtgtggaggaatgaacgtaattaactttgaacatcttgatacagaaagac

SEQ ID NO: 266569 - DNA, 152 bp, Homo sapiens
ggcgggggtggtgctggctcagtacatattcaccttgaagaggaagacggggcggaagaccaagatcatcgagatggttgcaaaagcttctcatttcagagagatgccaggatcctaagtgcctgccaaacttaccaattctaaggaataag

SEQ ID NO: 266570 - DNA, 100 bp, Homo sapiens
gaggcccctcttgaggactcacagtgtttgagatcagctcagctactatttaataaaacaaaatctgtagaattcacgttttgtaatgacactgtcgtca

SEQ ID NO: 266571 - DNA, 100 bp, Homo sapiens
cttgcatcctgtgctgccaactccatcaatcaggccaaacaccagagcaccctagaaggtttaactaaaagaatgctcatgtttgacccagttcctgtca

SEQ ID NO: 266572 - DNA, 82 bp, Homo sapiens
gaaagggccgcctcgtctccgctcctgggggaccgcagaagaagatagtggtgagctggcaaagccaaagattggttttcca

SEQ ID NO: 266573 - DNA, 90 bp, Homo sapiens
cctcggacggccacgagactcgggatacaacttcagtattaaaggaggaacatgttacaacctttgaagatgaaggatcctatataattc

SEQ ID NO: 266574 - DNA, 98 bp, Homo sapiens
cgacccgctgctcagcgtcctcatgtggggggtaaaccactcgccaactgggtacatggaaaactcagtctcctacagcgcaattgaagacgttcagc

SEQ ID NO: 266575 - DNA, 100 bp, Homo sapiens
gccgggccggcccgaccccaccggccatacggttccatcataatgaatggatccaatatggcaaatacatcaccgagtgtaaaatccaaagaggaccagg

SEQ ID NO: 266576 - DNA, 73 bp, Homo sapiens
tcccaggagctccggagaggaaccctccgaaggtgacttcagaactggagttgtgaagatgacctctccgacg

SEQ ID NO: 266577 - DNA, 95 bp, Homo sapiens
tggaatactctactggacaaacatttcctccaaggtgtttatctcagtggatgatctggaacccccggagccccaggaccctgaagattccagac

SEQ ID NO: 266578 - DNA, 75 bp, Homo sapiens
gacaacaccccaggcagcctgccctcatgctacaaggtgagctgcctggaaatccctgggccctctggccccaag

SEQ ID NO: 266579 - DNA, 100 bp, Homo sapiens
agtggacatggtagctggggaaagaggaacaagtggggacataagccttttaacaaggaactctttttacaggccaacttataggctttatactgtggtg

SEQ ID NO: 266580 - DNA, 88 bp, Homo sapiens
gattgagggactccggggccctcctccttcaggcattgctactctggtctctggcattgctggtggacagagttcattcaaagaggca

SEQ ID NO: 266581 - DNA, 90 bp, Homo sapiens
gggaccggcgtcagggacacggggtgctgcgctgcgccgacggctccacctacaaggaaggcaacagcccccaggggagcaaccagggag

SEQ ID NO: 266582 - DNA, 88 bp, Homo sapiens
gagccgcgaaccgagcgggcggcgggcgcgcgcaccatgggggagaaacccgggaccaggccaccagtgacttctgtgtggctcctga

SEQ ID NO: 266583 - DNA, 76 bp, Homo sapiens
tgcctgtgttaaacctaaatcttcaacataataagatatttgtgaaccaagatttggagcaagaggtggtggtggc

SEQ ID NO: 266584 - DNA, 75 bp, Homo sapiens
ctgaactgggtgctttatatagggactaattgtcagcctagaaaaggaacttgctccattgtttgaagaactgag

SEQ ID NO: 266585 - DNA, 83 bp, Homo sapiens
aggcccaagccaagaagttaggaaacaactgcgttttcgccccagccgacttatcaggaactgttgccgttattacatcagat

SEQ ID NO: 266586 - DNA, 100 bp, Homo sapiens
aagactgctgctccctcgccgtcactgttgtataaatgaatactgtatgtctgagtatttgagaatgagtggcatctattggggtctgacagtaatggat

SEQ ID NO: 266587 - DNA, 83 bp, Homo sapiens
gccgcataacagaccaatttttattccacgaggaggagtacctggaaattagacccagccgatgcccaatcctgtggcgtact

SEQ ID NO: 266588 - DNA, 100 bp, Homo sapiens
cgagaaggaggttgccgacgccatcaggctcaacgaggaactcaaagtggatgaggaaagaatcccagtcagaagttccagcctgccactgttctctgat

SEQ ID NO: 266589 - DNA, 50 bp, Homo sapiens
gttcacaaggaatggttttcggcagcaacccaaggagatctgtgcgctgg

SEQ ID NO: 266590 - DNA, 82 bp, Homo sapiens
cgggtacctgcggccaattcggtggaacgaggacgcggactgcgaaggcaggttctgttgcaaaatgtgaaaatgaaggtga

SEQ ID NO: 266591 - DNA, 98 bp, Homo sapiens
aaaagcgttatgttaatgctgggacgctgcctgccacacattgttcccaatgtgctattggcaaagagagaggctaaaataaatgaagctgtagaatg

SEQ ID NO: 266592 - DNA, 80 bp, Homo sapiens
caaacaataaagaatccctacagatcaatattgaaggtgccaaatctgattccagttttgatgttcaaattgggaagacc

SEQ ID NO: 266593 - DNA, 83 bp, Homo sapiens
cgcagaacccgggagtaggagactcagaatcgaatctcttctccctccccttcttggagcctgtgttggaagagatggtgatg

SEQ ID NO: 266594 - DNA, 100 bp, Homo sapiens
ctatcattgaagttaatggcaaaagggtcataggaaggcagtatccttggagtgttgctgaaggttgcagcctgtgaacttttacatagcatggttatgt

SEQ ID NO: 266595 - DNA, 75 bp, Homo sapiens
tgagaccagtgcccatgaaggtcagactgaggttgtaaagctctctgaaatagtgaccttagcgaagcaagcaca

SEQ ID NO: 266596 - DNA, 51 bp, Homo sapiens
gcgacggagcctttgggaaagtgtacaaggcatgaagtcatcaatatcaac

SEQ ID NO: 266597 - DNA, 50 bp, Homo sapiens
aaggattccaagtaactcttatttggtagggaaaagtggcaatgtaccag

SEQ ID NO: 266598 - DNA, 90 bp, Homo sapiens
tgaatgctacttggatgcctcttaagtctttcccagggaactccgatgaagtgttccaacaaaatgagcgagtgaaccaagaagaggatg

SEQ ID NO: 266599 - DNA, 96 bp, Homo sapiens
ctggcattggaacttcctgttctgatagcgtggaaggaaggcagcaacaactcatctccagtggattttgtaaataacaagaggacagacttatct

SEQ ID NO: 266600 - DNA, 74 bp, Homo sapiens
aggaggacacccggacacctggaagctgggaaatgtttggaaattttagcattcaggtgccaggaatgcagatg

SEQ ID NO: 266601 - DNA, 100 bp, Homo sapiens
cgatggctggttttgctcatttctatggctgtctgcataattgctatgatcatcttctccagctgcttttgttacaatgggaagccgtgtccgcctttta

SEQ ID NO: 266602 - DNA, 51 bp, Homo sapiens
aaggattcgttacagccagagattgatgccatggacaatattaccaggcag

SEQ ID NO: 266603 - DNA, 100 bp, Homo sapiens
acatccctggtagaaaaattatctacccaccacctcaggcgtgtggcagccttggaagccaagcaaaagcccagcacttcccagagccagggactgacac

SEQ ID NO: 266604 - DNA, 82 bp, Homo sapiens
catcacccaccaacaacaccacaataatccacagccaaggaggactcagagagagtaatgataattaccggaccaaacatgg

SEQ ID NO: 266605 - DNA, 83 bp, Homo sapiens
ctcgccacacccttgttttgagatcctctctaagattgagaggatccagaatccagatctctggaatagctaccaggcaaaga

SEQ ID NO: 266606 - DNA, 98 bp, Homo sapiens
gttcgtggattcttacggaagacgtagccgcacagacgatctcaagtggagtcgcttacctttggcctttggtgctgtgagtgctctggcgaagtttg

SEQ ID NO: 266607 - DNA, 75 bp, Homo sapiens
ggagaagagagctctggggtcgacacgcttttcctaaaaggattgtacaccttagaagtgcttaaggaagagtga

SEQ ID NO: 266608 - DNA, 74 bp, Homo sapiens
ggcctcccgtttctggctccgggctgagcttcctggagaagaggaaggctcggacatcatcatgcagctggacg

SEQ ID NO: 266609 - DNA, 100 bp, Homo sapiens
cttggtgtgtttctgggaggaagcggcgagcgctggggtgggcccgggcaactacagcttctcctaccagctcgaggttgacatgatgaacaatcggttt

SEQ ID NO: 266610 - DNA, 100 bp, Homo sapiens
gcagacggcgttttgcgcccaactgcgggcccagcacagggatcacattgtcggggtgacctggatcctacttgaagcctttgagctggactgtggcttt

SEQ ID NO: 266611 - DNA, 127 bp, Homo sapiens
gaaggaggactttcccaggtcccagtgtatctggcaaaattgaaccattcttagaaagatcaagcttcaggagtctccggaagacatgcctgcagggcagacaccacacacagttatcctgtttgct

SEQ ID NO: 266612 - DNA, 97 bp, Homo sapiens
atggagcgggcgcactgggaggtggaacgggccgaactgcagagtaatcaagtcagaggattatatgacttttatctgcctagagaagaactatgga

SEQ ID NO: 266613 - DNA, 100 bp, Homo sapiens
aaagaagctgtgtcagccagaagggccctggagaatgaactggaggctgctcagatggagtccgcctgcgtgaccatccatgaggctctgaaaacggtga

SEQ ID NO: 266614 - DNA, 74 bp, Homo sapiens
agcagttcgtgaagtctgtgaggaggtcctggcagtcagtaacttttgaaaggcagcctgcctccttcatccgt

SEQ ID NO: 266615 - DNA, 82 bp, Homo sapiens
caccactggagccagccggtttgcctcggcagccaaggagggcgccgccatggcatcagatgaaggcaaactttttgttgga

SEQ ID NO: 266616 - DNA, 132 bp, Homo sapiens
tggaacaacattgggagtggaaaaattttcaagtaacattaacgaaaagaagagccatgcagactttgctaccaggacttgctggcccctctggggagatggttaaatccacaacaagtctgacctcgtctt

SEQ ID NO: 266617 - DNA, 75 bp, Homo sapiens
ttttatttggcagatctgaagggaaagctccagatactactaggtggaaaatttgcagccagaaataaaaactat

SEQ ID NO: 266618 - DNA, 100 bp, Homo sapiens
cctcagtcaaattgcctagtgtaccttctactcatctgccggcagggccaggtatctacgagaccccagcaggcaccatcctttaccatgctcatttaga

SEQ ID NO: 266619 - DNA, 97 bp, Homo sapiens
atgcccagacaagtccccagggaatgccacagcatcctccagcacctcaggtctctccgaatagcattgctgccacagaagctgaagcacgaatctt

SEQ ID NO: 266620 - DNA, 82 bp, Homo sapiens
cttcgagtgcatcgaggacctgtctgaaggtggcttctggcacagcagcttaattgaccggaacctcattgattattttgtt

SEQ ID NO: 266621 - DNA, 83 bp, Homo sapiens
attgtttctctccctctgcccccccttccccacgcaaccccagatccatttacactttacaaggtcctatacgttgcttgtgg

SEQ ID NO: 266622 - DNA, 101 bp, Homo sapiens
agtaagaagacgccgggctcctgttgttttggagaatcatgtagtgacagatgaagacgaacctgctttgaaacgccagcgactagaaatcaattgccagg

SEQ ID NO: 266623 - DNA, 87 bp, Homo sapiens
gaggaggctggagattccacccaaatcctcttctccaagaagttccgatgcctcaaccgctcagccgccggaatcgcagccactgcc

SEQ ID NO: 266624 - DNA, 98 bp, Homo sapiens
caattctggagacctgggtgtgggtcaagcaaccaggctatgtatgtcaaaaaggatgttcctttgtggcaaaaacatggacggaacttctgaaacat

SEQ ID NO: 266625 - DNA, 101 bp, Homo sapiens
agccctctgcattcacgtagcattgctgcggccaggagtggtggctcacacctgtaatcccagctctgggaggccaaggccagtggattgcttgagcccag

SEQ ID NO: 266626 - DNA, 74 bp, Homo sapiens
cgagatttcggcgaggagcatcccttctatgacagatacagaagatcattgagacactgacacagcagcttcag

SEQ ID NO: 266627 - DNA, 76 bp, Homo sapiens
gtgacactcaacaggattcccggttttaaatgcacagagagcaggatacaaggcagccatagttcacaatgttgat

SEQ ID NO: 266628 - DNA, 75 bp, Homo sapiens
tggtggccatagacaacaagatcgaacaggccatggctttatcctgtggataaacgcagagtgaacgagtttggg

SEQ ID NO: 266629 - DNA, 90 bp, Homo sapiens
ggacgccacctactccaagcccccctcgcctatgccttcagacatcaccagccaggtggttattaacttggtgatgcttttggctgaaat

SEQ ID NO: 266630 - DNA, 100 bp, Homo sapiens
gggatgctgtcgcccatcctggcccacgggggggtccgtttcatgtggatcaaacacaacaacctgtatcattatggcgatgagatcgccattgagctgc

SEQ ID NO: 266631 - DNA, 82 bp, Homo sapiens
tgagcttggcctcggcgtcctcggctattggaatcagatgcaaagatggtgttgtctttggggtagaaaaattagtcctttc

SEQ ID NO: 266632 - DNA, 83 bp, Homo sapiens
ggggtcatctccttcatgcagagtgacatgggtcgggaagcagcatatgcaagggaacattttcatcgtggactttgagctgc

SEQ ID NO: 266633 - DNA, 82 bp, Homo sapiens
cgaggagttccgcccctttctggcaaagatgagggggattcttaaggtgtttggagaagagggattgaccctgaatcttgaa

SEQ ID NO: 266634 - DNA, 75 bp, Homo sapiens
catctctaacctaccagctgccactttccaggtaaaataccatgaagattttgaaaaaacaaaggggagaggctt

SEQ ID NO: 266635 - DNA, 100 bp, Homo sapiens
gccagcaccctggggttgaggaactgcctgggcaattccaaaagtcttcagatttccaaaaggaaggactgcagcagacatttctgcccccagaaaggca

SEQ ID NO: 266636 - DNA, 83 bp, Homo sapiens
cctgatccgggagagtgagagctccccaggggagttctctgtgtctgtgaaatgcaacgccaggagcagcatcagccacgctg

SEQ ID NO: 266637 - DNA, 100 bp, Homo sapiens
ggccgcctccttcttcctcatcgtggcagctctggtctgaagatgatgagaaactgaaaaagaggaaggagcgatttgggattgtcacaagttcagctgg

SEQ ID NO: 266638 - DNA, 74 bp, Homo sapiens
ccgacgcccgcaggtcctcgcggtgcgcaccgtttgcgacttgctcttggagtttgacaaggagttgtctgtct

SEQ ID NO: 266639 - DNA, 85 bp, Homo sapiens
tctgcactgtttacaggcacaggtggacccaagagccatatcagtgctagcaaaatggcagaattcatatagcatcaaagttgtc

SEQ ID NO: 266640 - DNA, 101 bp, Homo sapiens
tgcatctttatgataattggatcaaagatgctggagattacctggggcaattgatgttatcggtcagactataactatcagccgagtagaaggcaggcgac

SEQ ID NO: 266641 - DNA, 100 bp, Homo sapiens
caaagacagatgtatggctgacaagacgctcccagagtgttcaaaattacctattggccgcgtaatccaggttgctgctgggagcagcaacctcaagaga

SEQ ID NO: 266642 - DNA, 60 bp, Homo sapiens
cttcgtacccacagtgcttcatgagagactgccttttcaaggtgtgccctatgaacagat

SEQ ID NO: 266643 - DNA, 100 bp, Homo sapiens
cagagctgagggagcaagaggtgtcggaggtctcatctttgaactactgccggagcttctgccagatatggccgcgtggaaagtgtcaaaattcttccca

SEQ ID NO: 266644 - DNA, 98 bp, Homo sapiens
atgcagggtgtgagcagggctgagatgggcaccgcggatctggggccgtcctcagtatgactatgaatatgatgaaaatggtgacagagtcgttttag

SEQ ID NO: 266645 - DNA, 98 bp, Homo sapiens
gccgaagcctcggaaggagcggcccacggcaaaggacaaccctccatatgataagggagccttcagaatcgaaatcaactttccagcagagtacccat

SEQ ID NO: 266646 - DNA, 75 bp, Homo sapiens
agaggatctggtgtaccaggcgaagctggccgagcaggctgagcgatacgacggcctgtttaaagaagaaaaccc

SEQ ID NO: 266647 - DNA, 100 bp, Homo sapiens
atcctgctgctgaagatctggaagacgcgctcctgcgccgtttgctggcctagacctgaactcttcagataatcagagtggaggaagtacagccagcagt

SEQ ID NO: 266648 - DNA, 50 bp, Homo sapiens
gctctcgggagcgcaacactgcaggtggggaagaaaacatgacagaaaca

SEQ ID NO: 266649 - DNA, 83 bp, Homo sapiens
gatatgtggatgggaaggctgaatatgaggaaaaattcctggtacaagatgcacttcctgaaggattcagtcaggaatttgaa

SEQ ID NO: 266650 - DNA, 75 bp, Homo sapiens
accgggaggaaagaagacaagagagaacgcaaacagtttgaagctgaggattttacattgcctaagatactgagc

SEQ ID NO: 266651 - DNA, 97 bp, Homo sapiens
gagctcacattccagcctacttacaagtatgatacgggctctgacgactgggataccaggccgccaggctaccccaatatgaatcaagggggcatga

SEQ ID NO: 266652 - DNA, 74 bp, Homo sapiens
ggctggttccggctgcagcccgaccagtccaagagccggcggcatgacgagacaatctctatgggaagcagaag

SEQ ID NO: 266653 - DNA, 75 bp, Homo sapiens
gcggcaagaaaaatgccagccagaagaggcgttcgctgcgcgtgcacattccggaactggcccaaataaggaagg

SEQ ID NO: 266654 - DNA, 90 bp, Homo sapiens
cggctgtggaccgggcggcacgcacgcggtgcagggtaacatggcggatgcggaagggttgatttgggaagcagagcacagcagcccaaa

SEQ ID NO: 266655 - DNA, 97 bp, Homo sapiens
gcgacagcaggtcacagtggacgaggtgttggcggaagtactatactggcaattgctggagaagattttgcaattgttgcttctgatactcgattga

SEQ ID NO: 266656 - DNA, 96 bp, Homo sapiens
gagaaatccccactcctccaagaaccaacccccaaattggctgggacaggagaaaatgcagaagtctccatggacgtttccctggcttaccgtgat

SEQ ID NO: 266657 - DNA, 74 bp, Homo sapiens
ccgccgattcctcctccttggtcgccgcgtccttggctggcgtcatttgacattgtgcagcaaagaaatggtta

SEQ ID NO: 266658 - DNA, 78 bp, Homo sapiens
agctaccccaaaacagaaaccaaaaactccattttgctttggtggtataagttgaaatccaaaccaggaaagaaggac

SEQ ID NO: 266659 - DNA, 100 bp, Homo sapiens
cccagatgaccttaaccctcaagccgaagccttcagtgggactcccccagcagatacattctcagctggagcattggatttgctaaaggagcttaagaat

SEQ ID NO: 266660 - DNA, 82 bp, Homo sapiens
aaactgccaagaaatccaaaaagccgagtagagaagttatcagcacatgattaagtaccggtacatcccgttcacacatggg

SEQ ID NO: 266661 - DNA, 75 bp, Homo sapiens
aaattctcgcctgtcttcccttcacccagagcaaattgagacgtcccgatgcttgctctgtcaaggcacagccta

SEQ ID NO: 266662 - DNA, 100 bp, Homo sapiens
gccgggcgctggtcgtcagcgccgaggctgggctgaggcgccgcggtaccatgaggcgccgatctacggaatccagaggcagcattgtctccaaccttcc

SEQ ID NO: 266663 - DNA, 50 bp, Homo sapiens
ctcctcgaagtcatcccagtaacccgagcaacttcccgagaagagaagaa

SEQ ID NO: 266664 - DNA, 49 bp, Homo sapiens
atgaagaacagtcacaggacagccacataaagaagatccctaatagtca

SEQ ID NO: 266665 - DNA, 73 bp, Homo sapiens
cccttgcaactaacctcttggcttctgaggcatctgacaagggagaaactgcctacatccgggttaaagttga

SEQ ID NO: 266666 - DNA, 106 bp, Homo sapiens
gtccgtccgccgccaccacccactccggacacaggaggagacatcacagctttcccagatcgggaggaaaaatatggaatgtgttttaccgctgactgaacacaac

SEQ ID NO: 266667 - DNA, 75 bp, Homo sapiens
cagaggagggcactgcggctcagaggctgggagattgctgcgatgattgacactgagtttgccaagcagacctcc

SEQ ID NO: 266668 - DNA, 83 bp, Homo sapiens
tgttggtgtccttgattttgaacaagcacaggtgaaagaacttgtcctggacaacagtcggtcgaatgaaggcaaactcgaag

SEQ ID NO: 266669 - DNA, 82 bp, Homo sapiens
cggcgccgaggcgcggcggcaggacgggaaccacgcgagctgcagccagtctctatgaagaagctgcagaaaatttgcatca

SEQ ID NO: 266670 - DNA, 100 bp, Homo sapiens
ggggaggaagaatgccggtcacagcccaggaggcaaggcatctttacatatgtgattatcataaaaacttaattcagagtgttcgaaacagaagaaagag

SEQ ID NO: 266671 - DNA, 88 bp, Homo sapiens
ggcggcggcggcggccggagcggcgagcatggcccgcgcggcgccgggcgctgactgagggaccagccaccactgttgccttttcaag

SEQ ID NO: 266672 - DNA, 51 bp, Homo sapiens
ggaagagcgctcccaggagaaacaagtccagtgcacgtgccaacattacac

SEQ ID NO: 266673 - DNA, 82 bp, Homo sapiens
ttaaagaagaatggcaagatgaagattttccgatcaaaatcaccaggacagccaatacaagtggtttatgtaccatcccatc

SEQ ID NO: 266674 - DNA, 75 bp, Homo sapiens
gcacagagacttcttgccatggctgccgtaagaatatatctcttccaaatgcatgatgaaggagttctcgtcaac

SEQ ID NO: 266675 - DNA, 98 bp, Homo sapiens
gctcctcaagtgcaacaagtcccacttccgaaaccacaagtttgccgatgtgtgggcccatcgctggatggatctgtcagaacacggctttgggctgg

SEQ ID NO: 266676 - DNA, 88 bp, Homo sapiens
aggcctcgggcgggggctggcccggggttccaggtcatcatcagatttgaaatatttaaagtggatacaaaactatttcagcaatgca

SEQ ID NO: 266677 - DNA, 104 bp, Homo sapiens
cttttgagtgacatttatttagcagctagtaacttcacttatttcagggcttcttctcatatcggtaattccactcaggccactgtgagggatgcagttgttgg

SEQ ID NO: 266678 - DNA, 74 bp, Homo sapiens
tgggaactttgtgacatcccccgctgcaatccacacaacttaaagatctgctgccgagtgaatggggaagtggt

SEQ ID NO: 266679 - DNA, 90 bp, Homo sapiens
gaagatattgactggatagacaatggagaatgcctggacttgattgagaagaccatgctcgacagctgaccaaggccatgatgcgaaagg

SEQ ID NO: 266680 - DNA, 75 bp, Homo sapiens
ctgaactaggatgtcccgacatgaagcccgcggcgccatggctcacgtcggctcccgcaagcgctcgaggagtcg

SEQ ID NO: 266681 - DNA, 90 bp, Homo sapiens
caagctcctacttccagaaaaagtgctcctgggactccaggataccagttaaacacagtgggaatatcacttttgatgagattgtcaaca

SEQ ID NO: 266682 - DNA, 100 bp, Homo sapiens
ttttcccttttctttcttctaatttttaaaaagcagcctctggagccagccatgtttggcactgaatcttcatataaacctctcataatgaaggcccccg

SEQ ID NO: 266683 - DNA, 100 bp, Homo sapiens
cagtgatgaaattcttgtgcgtctaacatctgcggttcgttccaccagtcataaaccagatgaaatctatggcatgattgaaagactatctcctggcact

SEQ ID NO: 266684 - DNA, 101 bp, Homo sapiens
aaagtgctgggattacagatttttgtcaaagcaacaggcttcacaagtcctggttaggaagcgtcgtgcaaattctttacttgaagaaaccaaacagggta

SEQ ID NO: 266685 - DNA, 101 bp, Homo sapiens
ttcaccaccatggcctccgtctgccacacgctgatggtgcagcaccgcatgatggtacccaaagtcagcctgacagaaatgttcgcttacgcagctagccc

SEQ ID NO: 266686 - DNA, 100 bp, Homo sapiens
ctggcgctgctggccgcgctgctgctggccgcacgcggggctgctgcccaaggagctctgccagtgccggccgggagaaggcaattgctcctgctgtaag

SEQ ID NO: 266687 - DNA, 97 bp, Homo sapiens
tcctggagaagcggccgcggccagggaacggggcatcgcggttccaacgagtgttgttcgctgcctgtggcatccaaagctgaaccagatcatggtt

SEQ ID NO: 266688 - DNA, 100 bp, Homo sapiens
aactttgggcctgtaatttctgttttcaaagaaatcaggttacctacctgggcaaagtctccaccactggcatgcagtttttgtcaggctgcacagaaaa

SEQ ID NO: 266689 - DNA, 100 bp, Homo sapiens
gccctgcctatgaccagcaagaggatggggccctggatgagggggaagggcctcaaagccagaagctacaggaggagaaccagaggctccaggcctccct

SEQ ID NO: 266690 - DNA, 117 bp, Homo sapiens
gaccctagtaagcacatatttggtagcctttgcatacaagaatgtgaaatttgttctcaagcacaactctggtagctgaagaacatctcacagtggacgccagggtctattcctacg

SEQ ID NO: 266691 - DNA, 50 bp, Homo sapiens
cctcctgattagctgggattacagagtactgcagtggactgtaaaataac

SEQ ID NO: 266692 - DNA, 75 bp, Homo sapiens
tggatagataccgaattcttatcacaaaggccgactgcagcagtggcccagggcaaagagtgtgcgtcatcgatg

SEQ ID NO: 266693 - DNA, 73 bp, Homo sapiens
tcccgtccgagccccggccccaagtaacgccgccgccccggagccgccgcgctgccccatacctgaagaccaa

SEQ ID NO: 266694 - DNA, 78 bp, Homo sapiens
ttattcaatgtcaggctgaagctcaagaaggagttggcctgggccctgccctggagttttgtattgctgtcaacccca

SEQ ID NO: 266695 - DNA, 98 bp, Homo sapiens
cccaagcggatactggtcttctcgtcggattgcccatgcacttgttgcagaaacagccaagttgaaaacgaggcccactgcgactttgtgaagctgcg

SEQ ID NO: 266696 - DNA, 100 bp, Homo sapiens
agggtcccggacggcagccacagcgtccgactcgactcggagggtttctgtgagagacaaattgcttgttaaagaatatctcaggagtatatccttgccg

SEQ ID NO: 266697 - DNA, 99 bp, Homo sapiens
cgccgccaccatgcccaagagaaagaataatcatgggccagactgggaagaaatctgagaagggaccagtttgttggcggaagcgtgtaaaatcagagt

SEQ ID NO: 266698 - DNA, 100 bp, Homo sapiens
tttagagctgcggaacaggacgccctctgatattatgatgcatcattatcacagaagaaattcgtgtctatagcttttaaggacttgattacatcatttt

SEQ ID NO: 266699 - DNA, 82 bp, Homo sapiens
ggcggtgctcgagtgcctgcaggatgtgagggaggccttggacaagattcgctatgagagcctgacagacccttcgaagttg

SEQ ID NO: 266700 - DNA, 82 bp, Homo sapiens
aaggagctaaagcagcgtgcgttcagccctgggttcaaaaggtgatgacctatcaacagccattctcaaacagaagaaccgt

SEQ ID NO: 266701 - DNA, 90 bp, Homo sapiens
cctcgggtctcgggggccgctctgggatcccggccaccagcaattgtccggtggctctggtaggcgaggaggaaggttttctgctcaagg

SEQ ID NO: 266702 - DNA, 75 bp, Homo sapiens
ggccagaagctggagatgatgctggagcagaagttagcgcttctctctcgcaagccagggctgagcaggaagaag

SEQ ID NO: 266703 - DNA, 75 bp, Homo sapiens
gtgtgatccaggcacatgatgtgcagaacccactccatttcggtgagatgaagctctggaatgatgaagtggaca

SEQ ID NO: 266704 - DNA, 99 bp, Homo sapiens
gtctttggaggatgcggctttgatggtgagccaagccccccgagaggcccctgctcgtcgggccccatcctcagcgcagtacctggaagaaaagtctga

SEQ ID NO: 266705 - DNA, 100 bp, Homo sapiens
ttctaactaccacttgctcaagtctccgggaccattatggcagtcaagtggacgggtgggcattcttctcctgtcctctgcctgaatgcaagtaaagaag

SEQ ID NO: 266706 - DNA, 90 bp, Homo sapiens
cgcgggcggacggcggaggcgcctcccaggtcttgactccactaacggggacttctcatacggctttgaacttggaccttggtgcataag

SEQ ID NO: 266707 - DNA, 96 bp, Homo sapiens
tagcacagccagaagaggaaagcccccgacaaaagaacccattagccagatggcgtttaatgattgcttcagtttgaactaccctggcaacccctg

SEQ ID NO: 266708 - DNA, 80 bp, Homo sapiens
caactacctgctctgtaccaactgccggaaagtgctgcggaaggattggccatttgatgatggagctccaccccctaatc

SEQ ID NO: 266709 - DNA, 82 bp, Homo sapiens
cttaaagatgacaccttgcattccctatttaggttatcttctgaagatggtgaagaagcttctgcttatctctatgagagtg

SEQ ID NO: 266710 - DNA, 100 bp, Homo sapiens
aatcagtactcttttcctatgtggaggcctcagcaagaatcccctttttgtgcaaatgcatgcggacattactggaagtaaagcaatgaatggctctgca

SEQ ID NO: 266711 - DNA, 74 bp, Homo sapiens
tccataaggctgaaccggcaactggtggagctgtctaaggctcaagatatagaagcaggagatggcaccacatc

SEQ ID NO: 266712 - DNA, 90 bp, Homo sapiens
ggagaaggccatcaccacgcagaacgtcaacaccaagtgcatcaccatccccaggtaaatgaaattgcctttataaatacccttgaagcc

SEQ ID NO: 266713 - DNA, 86 bp, Homo sapiens
tgattgctgcggtgtttgaccgagacataaactgcagaagagcagcctctacaatgcagatcttcgtgaagactctgactggtaag

SEQ ID NO: 266714 - DNA, 101 bp, Homo sapiens
cccgtactgcacatcgtggtggtcggatttcaccacaagaagggctgccagctactacccacagatggcatgatccgaaaacactctcatgtcaagatagg

SEQ ID NO: 266715 - DNA, 100 bp, Homo sapiens
tgaatttccatgtcaacatagtcctgaagatgaacaagtttctgctgtttgaggcacagacttttctggaagcagagcgagccacctgaaaggagagcac

SEQ ID NO: 266716 - DNA, 96 bp, Homo sapiens
caggttttaaatcaagatttaacattccaacacataaaaattatttatccaacagctcctcccagcctgaagagttgagagaaatcattgagaaga

SEQ ID NO: 266717 - DNA, 73 bp, Homo sapiens
tggctgtcctgaaatattataaggtggagtattgctcctggaaaatccaaaaggtgacaataggttggacctt

SEQ ID NO: 266718 - DNA, 98 bp, Homo sapiens
gataaaaagagatgtggggggattctcgacctgctaacagaactggaccttttcggaagaaggcctggatatggtgaacagagaaactgcacatgaaa

SEQ ID NO: 266719 - DNA, 96 bp, Homo sapiens
atggatggctatccagacgctctggtcatactaaagaacacatctggaagttggttagtctgctgctaattggaattgctgcgtggggcattggct

SEQ ID NO: 266720 - DNA, 75 bp, Homo sapiens
ccggcctcctcagtgcgaagaagctgcagccgcacctggccaagggcagatataatgcacctgactgactctgtg

SEQ ID NO: 266721 - DNA, 100 bp, Homo sapiens
tcagcacccctgcagatcatcctggcgatctacttcctctggcagagctcaggccccggggcctccagcggcaccagcggagaccacggtgagctcgtcg

SEQ ID NO: 266722 - DNA, 100 bp, Homo sapiens
ggaaaatggcggacgggaaggcgggagacgagaagcctgaaaagtcgcagcgagctggagccgccggaggacgtgtttagctttcaagtgtctcctaata

SEQ ID NO: 266723 - DNA, 89 bp, Homo sapiens
gcgcaaaggctgccctggatgggactcctggttttcttccacccctgagatggcaagaccagccccttgtcttcctcagcctgctcaac

SEQ ID NO: 266724 - DNA, 76 bp, Homo sapiens
acgccctgcatcgagcagctggagaagcttctgcagaaagccgtcattacacctgattttgaaaaaaaccactgtg

SEQ ID NO: 266725 - DNA, 75 bp, Homo sapiens
ctgagaggtctgaggctagtctgaaggtgtcagagttcaatgtcagttctgaagctttcaccaacaatcaccagt

SEQ ID NO: 266726 - DNA, 109 bp, Homo sapiens
cttagaaggcaaaagagggaggagatgcgactcgaagcagaaagctgtacaggaagaggcacatacaaagaaaagaatccccgaaagggcggtttgtgatgctcctgcc

SEQ ID NO: 266727 - DNA, 50 bp, Homo sapiens
ctggcgccgggtcccgcggggaaatgaaaaatgtactctgacctgaatcc

SEQ ID NO: 266728 - DNA, 82 bp, Homo sapiens
ccccatgccatcaacctgcgtgaggtcaacctgcgcccccagatgtcccaggggtttccaggtgtaagggcttattggactg

SEQ ID NO: 266729 - DNA, 100 bp, Homo sapiens
gccctctgaatcttttgtagtattagacaatgaacaaaaagtttatcagcgaatacatcatgagcgccctttggctctgggagctgatatttctatgtat

SEQ ID NO: 266730 - DNA, 83 bp, Homo sapiens
gtccaggcctgacagctctgcggctcgggccctgagcactattcctgatcagagaactccagttgcttcaacacacagtatca

SEQ ID NO: 266731 - DNA, 100 bp, Homo sapiens
ggattgtgggagtctccgcgtcccgctcgctgggagagaggtacctctccttttccctctccctttccctaagatttccgtgagggtggaagaaaatcat

SEQ ID NO: 266732 - DNA, 76 bp, Homo sapiens
cgccaatgtggacggactcactgccctgcaccaggctgaactcacgggaatcaaatggcgtaggtacaattttgga

SEQ ID NO: 266733 - DNA, 100 bp, Homo sapiens
caacaaccgtggctcacaagatgaaagagcacgctgctttgactctcccgcgaagacctttccttcactgttctactgtgattcccgttgtggttctgac

SEQ ID NO: 266734 - DNA, 101 bp, Homo sapiens
tgtacaaaattacaagtggaaatccacaaggattcttttcaatacatcctaaaacagatgccatggacaatattaccaggcagaaccaattctacgatacc

SEQ ID NO: 266735 - DNA, 86 bp, Homo sapiens
ctacagaaacaaaatgtcaacaaattgatggggtgttgaaagcagcaggggcctagaagacattaaaccgataccacagaaataca

SEQ ID NO: 266736 - DNA, 50 bp, Homo sapiens
cgccatcgttgctgccttcttcgtcaagaagggagaattccacaagttgg

SEQ ID NO: 266737 - DNA, 98 bp, Homo sapiens
gaacatgtaacaagaatccaaagaaaacaaaatggtggtatcatgctgtcacgggaagtctttttaggataaacgtaggcctgcgtggcctggtggct

SEQ ID NO: 266738 - DNA, 100 bp, Homo sapiens
ttctcagtgcaagcttttaataaaggggcaagttgcagtgcccaaggatttgattatggactcggaaatagcaaagaaaatcccgttttgtcaacctaat

SEQ ID NO: 266739 - DNA, 98 bp, Homo sapiens
aaggagctgtcctttgttttggattacataaaccagtcacccaagtgcattgcctttggaaacgaggtggtggagtctatggcccttctccttgaatc

SEQ ID NO: 266740 - DNA, 98 bp, Homo sapiens
tgagcgtcccagtacactgacagaggtgtcatggagaaactccagctgggcccagagattctgcagcgggaaaatccaaggcttatttatgccaggct

SEQ ID NO: 266741 - DNA, 78 bp, Homo sapiens
tccgcttctcagaggacgccttcaacaccaccttcatctccaccatcgggagttaaatacctgtgcatcccagcagcg

SEQ ID NO: 266742 - DNA, 51 bp, Homo sapiens
aagagggatccttcacccgtgtctggagtggaggcagcacagacagtgagg

SEQ ID NO: 266743 - DNA, 97 bp, Homo sapiens
aaaaaacatatccgagggtgtcctgttacttccaagtcatcaccagaaaggtattggctgggatccaccaaaacttcaatcaattttcctttcttaa

SEQ ID NO: 266744 - DNA, 100 bp, Homo sapiens
tcgtggggcagctcggcagcatggcgtccgtgacgctgagcgaggcggagaaggtgtacatcgtgcatggcgtccagccttgatgacttacaagccctca

SEQ ID NO: 266745 - DNA, 51 bp, Homo sapiens
cttctgcactgtttacaggcacaggttgggtatctacagccattggttgct

SEQ ID NO: 266746 - DNA, 100 bp, Homo sapiens
cagttccttgtggagccggagctgggcgcggattcgccgaggcaccgaggcactcagaggagtgaccctggaaacagacgggggattcttataagtcaca

SEQ ID NO: 266747 - DNA, 78 bp, Homo sapiens
ttaagataagaagtaatctggaatcagaaagcactacgctaaccgctcctctggaagagctaacaatgggaacctcct

SEQ ID NO: 266748 - DNA, 90 bp, Homo sapiens
ctgtaggaggaaaaactgtatcacgttttcgtgaaacggaggtggagctgtacaacgaatttcctgaacctatcaaactggacaagaatg

SEQ ID NO: 266749 - DNA, 100 bp, Homo sapiens
aaatcaagaactacatccaaggcatcaacctcgtccagatgggaaactcttgtctagtgatgtgactcattacgtgatcccagactggaaagttgttcaa

SEQ ID NO: 266750 - DNA, 90 bp, Homo sapiens
tggtgatgggtattacagatgtagatgataaaatcatcaaaagagccaatgaggatgatcctttcaaaaataaagccttgttatttagca

SEQ ID NO: 266751 - DNA, 71 bp, Homo sapiens
tactccacagaggataaatttcaacctccggggccacaatagcgaggaaatgagcagatttgcagaaaaac

SEQ ID NO: 266752 - DNA, 100 bp, Homo sapiens
gaggccgtggatgcaggcattaaggactccctcctccaagaggtctaaatctcctgcctaaaagtcagaccactctaaatttgacctggcaaccaatatt

SEQ ID NO: 266753 - DNA, 75 bp, Homo sapiens
gagcaccgcggcgccgagcgcagacccgagaggcagacctgttatcctaaactaggtgagtcagcttttggtaca

SEQ ID NO: 266754 - DNA, 75 bp, Homo sapiens
ggcaggagcagcggccgcggcgccgcagggaccagcgggcccagggagtggagcttggtttcgggatctcggtgc

SEQ ID NO: 266755 - DNA, 82 bp, Homo sapiens
gagcttatactcctcccagtgacgggtctggagtgcgtgggggaccggctgttggcgggttgtggcagcactgcctgaaggt

SEQ ID NO: 266756 - DNA, 97 bp, Homo sapiens
ctgatattttatattgaaatggatcctccaggtgtcatggagaaactccagctgggcccagagattctgcagcgggaaaatccaaggcttatttatg

SEQ ID NO: 266757 - DNA, 83 bp, Homo sapiens
cccgcggccgcaccttcccgccttctcaggtgcagtctttgcaagccacatttggaacttttgagtccatcttgagaagctcc

SEQ ID NO: 266758 - DNA, 58 bp, Homo sapiens
caggaccaacctctcctctggatgctctagcttcacagttgactgcaggcattcagct

SEQ ID NO: 266759 - DNA, 90 bp, Homo sapiens
cacctggatttacctgttttctgggagcttcgaagcttctggagatcagactgctcatatctggagatacgcggtgcagctgccgacacc

SEQ ID NO: 266760 - DNA, 101 bp, Homo sapiens
tccttgtgaaacctcctagtagaaaaagttcttgggacaaacttcatttgccctgtatgatgagattcgtcagtttcgcaaggcctgtggggaggctcatc

SEQ ID NO: 266761 - DNA, 101 bp, Homo sapiens
cccgcccgtgaaggccacgccattaaagcgcttcagtcaaaccctgcaggttctaagctggtctatgtccatcaccttcttggagaaggagcctttgccca

SEQ ID NO: 266762 - DNA, 50 bp, Homo sapiens
caggattctcatggcagcccctggcatggtcaagctcaaagttaaagcta

SEQ ID NO: 266763 - DNA, 100 bp, Homo sapiens
cttgatggagaggccaggcgggagaactaccgcagcagactgtatgaaaacaagggagaggctgacttcgtggaatctttgctgcagctcttcaggtcca

SEQ ID NO: 266764 - DNA, 83 bp, Homo sapiens
cggagccggagccgcagaggctcccgggctggactcaggcttctcaggtgagaagccctaccactgcaactgggacggctgcg

SEQ ID NO: 266765 - DNA, 88 bp, Homo sapiens
cgggacgccatgtccatggaggaccccttctttgtggtgaaagggagccaaaaacctgtatatcatctccgtgaaggggatcaaggga

SEQ ID NO: 266766 - DNA, 80 bp, Homo sapiens
caataatgaaatgctgactaaggaacaaggcggttcaggaccatcatcctccatagccatagcgggcaccaaccaccctg

SEQ ID NO: 266767 - DNA, 76 bp, Homo sapiens
cctccctttactcaccagcactttccttggcagccacatgttctcctgctgggcgtccccctggataccagtaaac

SEQ ID NO: 266768 - DNA, 82 bp, Homo sapiens
tttggagtgtgcgtgcgcgccgagcggttatggaaacaaaggacatgctttacatcgtcactgaatttgctaaaaatggaga

SEQ ID NO: 266769 - DNA, 75 bp, Homo sapiens
gcggggaggccatcgaatcggatgacacggtggtgaaggaggagatctttgatgacaatgccaagcttccctgct

SEQ ID NO: 266770 - DNA, 100 bp, Homo sapiens
ttaatacagcaagaaagaccatcaagtttaccagtggcacaagaatggctcaactctccaaatagagagaatttctatcagttgcaagtacgaaaatttc

SEQ ID NO: 266771 - DNA, 100 bp, Homo sapiens
gactcttttacattatacctgcaaatctggagctcatggtattgccaacaagagagtcggaatatcactcttcagatctcagaatgttgaggatgtctcc

SEQ ID NO: 266772 - DNA, 100 bp, Homo sapiens
gggaattgcttcgtttgccattttcttatggagaactgtccttgttgtcctccagcagcctgacctgagtgggttagtgatccagagaaaccagcaggcc

SEQ ID NO: 266773 - DNA, 100 bp, Homo sapiens
attcatcaaagacgtaatcaaagacggcaacgcgcttatcagcgctatgagaaatgtgggacctaggaaaaggcctgaagattccccagctataccagtc

SEQ ID NO: 266774 - DNA, 83 bp, Homo sapiens
gaaaagaatggagatgaggattgccagcgaggcgggcagaagaagaaaggccaaccggacgtgtcccatctgccgggccgacg

SEQ ID NO: 266775 - DNA, 95 bp, Homo sapiens
tgctgagaatactcttcaagaatgatgatttcatgaatgcagactctgacttgaagaaaacagtggatgaaagtgcacggattcagagagcatac

SEQ ID NO: 266776 - DNA, 50 bp, Homo sapiens
ggcagcgggcacccaggcgtggcggatgtggacgagtgccaccgcgtgcc

SEQ ID NO: 266777 - DNA, 100 bp, Homo sapiens
aagtccatggcgaatcagctgctggccaagtttgaggagagcactcggaacccctcactcatgaagcaggaggcctcatgggacctgtcaggatgatttc

SEQ ID NO: 266778 - DNA, 78 bp, Homo sapiens
ctgtttctcatctttatactcttccaggcgttggagaccagggccagccctggccacaccccaggctgtgtcaccttc

SEQ ID NO: 266779 - DNA, 76 bp, Homo sapiens
cattcagttaaagttcacacagttcctaagccagagaagatggcgaattagaagatggtgaaatagacgatgcagg

SEQ ID NO: 266780 - DNA, 150 bp, Homo sapiens
gacgtctccaagcaggcagctgacatgatcctgctggacgacaactttgcctccatcgtcacaggggtggaggagggcctcccagaagttcctgccgaatcgtcttcgtcacccccggggtccgaggtagcctcccttacacagcctgag

SEQ ID NO: 266781 - DNA, 101 bp, Homo sapiens
tttattaacacctcttgccactcagctgacatatgaaggactcattgatgaaatttatggcattcagaacagatttggtgctatggagaaatttttggtag

SEQ ID NO: 266782 - DNA, 90 bp, Homo sapiens
gtcaattcctattggtttatcacattaattggccttggtcctcacagctccaaaaagaaacaggatctcgataagctctatgagctgaag

SEQ ID NO: 266783 - DNA, 87 bp, Homo sapiens
ggtgcagaagaaaccagccgaacttcagggtttccaccgttcgttcaagtttggtgccctggttgtcagatgttggaaagcagtagg

SEQ ID NO: 266784 - DNA, 99 bp, Homo sapiens
cggagccagcggctgaggaggggccccagcagcccccgaaggccctatcaggacatggagtatgaaagacggattggctaaaagatgtgtgtgaaaaga

SEQ ID NO: 266785 - DNA, 100 bp, Homo sapiens
gccggcgccgagggacaccgcagtatgaggcagaggtcaaaatgcagatcttcgtgaaaacccttaccggcaagaccatcacccttgaggtggagcccag

SEQ ID NO: 266786 - DNA, 100 bp, Homo sapiens
caaagctgggaattccttatagagttattcacaatgcctccataatgaatgctgtaggctgctgtggtttacaggccctggagagtgaatttgtttcctg

SEQ ID NO: 266787 - DNA, 100 bp, Homo sapiens
ctcagcctcccgaggagctgggactacagacttcattagaggggtggtagactcggaggatctccctctaaacatatcccgtgagatgttgcaacaaagc

SEQ ID NO: 266788 - DNA, 100 bp, Homo sapiens
aataagcaagaaaagagcaacatgggagactattcttgatgggaaggccataggaaaaggatacagagtagagtttcatgaacctgaaacttggtggaaa

SEQ ID NO: 266789 - DNA, 82 bp, Homo sapiens
ggacatcatcagactcctacaccaaatagtacagaattcccatttgcagaaaccctatgagattaacctgatggaggaacta

SEQ ID NO: 266790 - DNA, 100 bp, Homo sapiens
actactttgtcatctgcggactggacacggagaccgggctggagccggacgagctgtcggggcttccttctgaactctccccagctattgaggaagaaga

SEQ ID NO: 266791 - DNA, 80 bp, Homo sapiens
ttgtgcctggaggtggaggggaaggtgttaacagaactgaaatccgacaaccagaggctgaaagatgaaaatggtgccct

SEQ ID NO: 266792 - DNA, 82 bp, Homo sapiens
gtccaaggtacagtcgccgcgtgcggagcttgttactggttacttgacctgcctagagctggaacgttacctccagagcgag

SEQ ID NO: 266793 - DNA, 100 bp, Homo sapiens
tggacgctgcacagcggaatctatatagggatgtgatgttagagaactacagaaacctgatcttccttggtagtaagcattaataatgtctttcatcttt

SEQ ID NO: 266794 - DNA, 100 bp, Homo sapiens
tgcagggcgaggtggtagcctttgactaccaatccaaaatgctggctttaactatgaagagcgagctctgtatctcgaagcaataattcagaaccaccgc

SEQ ID NO: 266795 - DNA, 75 bp, Homo sapiens
ggggaacccgttcagctctccagtgggacagcgcatcgtgagtgacctgcaggaagaaggcaagaatgccatcaa

SEQ ID NO: 266796 - DNA, 101 bp, Homo sapiens
ggcctgattgggaagaaactcttagcgcaatggtactaggttttgacaagcttgcatcatgcgtgagtataagctagtcgttcttggctcaggaggcgttg

SEQ ID NO: 266797 - DNA, 100 bp, Homo sapiens
gcagctaacactgggaaagttcagatcatctctaataatagctcaccatcatcttcaagaacttccaggagtgtgtggaccagaaggtgtaccaggctga

SEQ ID NO: 266798 - DNA, 101 bp, Homo sapiens
ggacgccgagcggtgactccccgccgctcccgggggccgtgacgtcactcaagactgcttgcaactgattgcagacagtgaaacaccaactatacaaaaag

SEQ ID NO: 266799 - DNA, 90 bp, Homo sapiens
ccccaagcgcggccagacctgcgtggtgcactacaccgctgccaaggggccaagggatgagctggggccctccttcccaatggcatctcc

SEQ ID NO: 266800 - DNA, 100 bp, Homo sapiens
gcagaaggtgtcattttaagacgagtaggcgaagcaaggactgctgctttgctggctctgcaagaaaatggactagacgcaactacagtgaaacaagagc

SEQ ID NO: 266801 - DNA, 98 bp, Homo sapiens
gaagctatgggtacggaggcaactcggcgacagcaggctacaccccgagtgcgagatcgagcgtcctgagcgcctgaccgcagccctggatcgcctgc

SEQ ID NO: 266802 - DNA, 100 bp, Homo sapiens
cctgtggctgtgcagggccccgagccggcccgggtcgagagcatcctcctcaagtggacaaaaggcttcaaggcatctggctgcgagggcgaggacgtgg

SEQ ID NO: 266803 - DNA, 82 bp, Homo sapiens
caggcggtgacccgctaccggaaggccatcgccaagggagtgcatccgccccaacccttttccccctcgtctcctgtgagaa

SEQ ID NO: 266804 - DNA, 100 bp, Homo sapiens
ttttccacagggaattgagttgagggagaaccgaagattacaggaggccagcatgaggttggaacaagagaatgatgaccttgcccatgaactagtaaca

SEQ ID NO: 266805 - DNA, 97 bp, Homo sapiens
ttcagattatcttcaagagattcagacccaattagaacactctgtattaagccagcaatttgtggacatcggatacccaaggagacgaagctgaagc

SEQ ID NO: 266806 - DNA, 98 bp, Homo sapiens
gcaacacggataacattccacctgaaagaaagaaggggatcaacctgaaagagtccaaccaatcgcatcatctaccttgatccattccgacctgacat

SEQ ID NO: 266807 - DNA, 85 bp, Homo sapiens
cgccctgttccccgcgctgcggcctggcggcttccaggcgcactaccgcggtgtcgtgaaaactacccctaaaagccaaaatggg

SEQ ID NO: 266808 - DNA, 75 bp, Homo sapiens
cgggaagtgtgaagcggccaatggcacggaggcctgcgttctctgctttctatccgtcaagatgataaagtcgtg

SEQ ID NO: 266809 - DNA, 120 bp, Homo sapiens
ataaagtcagccatgtgagcactgggggtggtgccagtttggagctcctggaagctatccaggcagaattgctgaaagtcaaacaaaagataaaggcacagaaagataaagagaaggcag

SEQ ID NO: 266810 - DNA, 51 bp, Homo sapiens
aggacatcctggaagctgggaaaggctgaactagatgcagagcacgcccag

SEQ ID NO: 266811 - DNA, 100 bp, Homo sapiens
gaacctgggagctggcgcggagcctgctggtgctgcgcttgtgcgcctggcccgcgctgctggcgcgccacgagcaggagactacctaggtggagaagcg

SEQ ID NO: 266812 - DNA, 100 bp, Homo sapiens
cgtatctaacagccaatagaaaagcagaaagccgcctcttggtttgcgtcctgcactgaaaggaaatgacggattttttggttgaaagactggaaaagaa

SEQ ID NO: 266813 - DNA, 100 bp, Homo sapiens
tttgaagatgatgttgtgattgagtttatattcaaccagctggaagtgaagagtcacctaaggtcctgcgagtacaagggtcgacccccaaaggcagggg

SEQ ID NO: 266814 - DNA, 100 bp, Homo sapiens
tgaacagatgcgtctcgctcaagtgatctttgataagaatgattcagattttgaagctaaagttaagcaggccatcgaggagggcacgctggaggagatc

SEQ ID NO: 266815 - DNA, 100 bp, Homo sapiens
ggaaaatggcaaacagataaagtccatagatgcaggacctgattctgctcctaagtgtaggagagaacttggtgcctcttccactctggagtgaagttaa

SEQ ID NO: 266816 - DNA, 130 bp, Homo sapiens
acctactccatcaaggtcatcgaggccaacaacccattccaggctgtgcaggaagcataagctgtggccatgactactgaagtaggctctgtgtctgaagtgaagaaggactctagccagttaggaacag

SEQ ID NO: 266817 - DNA, 75 bp, Homo sapiens
gccctggctaccatggaccatcctgctggtcagcactgcggctgacatggcccatgaacatggacatgagcatgg

SEQ ID NO: 266818 - DNA, 100 bp, Homo sapiens
gaccaatgaacttgaagatggtgacagacaaaaggctatgaagcgtttacgtgtcccccctttgggagctgctcaggaacaacttgatacagagacaagt

SEQ ID NO: 266819 - DNA, 75 bp, Homo sapiens
cgccatgaaggcctcgggcacggtgaggaaaatagcagctgaatactatgacaacctccctcactacaattcctg

SEQ ID NO: 266820 - DNA, 51 bp, Homo sapiens
gttgtgatggcccaggttcttcaaaagatacatcgctattgcggttccgag

SEQ ID NO: 266821 - DNA, 97 bp, Homo sapiens
tttatgaagcactgagaaatatgagctttgatccaaaccttctccacaacaatggacataatgggtaccctaatggtacttcagcagcactgcgtga

SEQ ID NO: 266822 - DNA, 100 bp, Homo sapiens
tcttggctgatgagatgggccttgggaaaactgtacagacagcagtcttcctgtattccctttacaaggagattgttgaacagataaatacgaaactgcc

SEQ ID NO: 266823 - DNA, 109 bp, Homo sapiens
atcagctgtgaaaaactctttggatgattctgccaaaaaggatatgggccctcacattttccaaacctgtccatctgctaactattttgactgcagagccatgtccatt

SEQ ID NO: 266824 - DNA, 83 bp, Homo sapiens
tctgccactgctgctccgtggagatcgtcccgcgcctgccgctgtgttggggtggaagaggaggaggcgcccgacatcgacat

SEQ ID NO: 266825 - DNA, 82 bp, Homo sapiens
gccaagcagaaaattacctaaatgcactctttcgaaagaaagttttctggatatgccgcagaaggatccgtgccagaagcaa

SEQ ID NO: 266826 - DNA, 83 bp, Homo sapiens
ctggggttctgagactccctgtcccggaccgcaggttttgctgttactgctcagtgtagtcacaccttgaataagaaatggaa

SEQ ID NO: 266827 - DNA, 90 bp, Homo sapiens
cttgggaggctccgttgcctgctcccggagggagacgcgctgccgaggagaacccagcgggtagtgggcagcagtcagtgacaggtgtaa

SEQ ID NO: 266828 - DNA, 106 bp, Homo sapiens
cccagttccccagttctggcagattctggaaactgtacattgaagcagagttcatttgatgaatacagttcagaacttaaatctggaaggttggaatggagtcctg

SEQ ID NO: 266829 - DNA, 75 bp, Homo sapiens
aaagtgttgacactggaagaacgttgcagcaaattagaagtgcaaaatggcaactcttaaggaaaaactcattgc

SEQ ID NO: 266830 - DNA, 100 bp, Homo sapiens
ggaagaattcacagcaaaggcatttttaaaagacgcagtaaaacgcaggactcttcccgcttggattcgcgaaggtcttgaaaaaatggaacgtgaaaag

SEQ ID NO: 266831 - DNA, 74 bp, Homo sapiens
cagcgcgcacttcacccgcagttgatgagcagcaccagcagtaagagggctccgaccacggcaacccagaggct

SEQ ID NO: 266832 - DNA, 82 bp, Homo sapiens
tgagcgcccggagcggtccgcgagccaccgaggcccagaattcagaaggagctggcggacatcactttagaccctccaccta

SEQ ID NO: 266833 - DNA, 101 bp, Homo sapiens
gtggttccagcctccggagctcgcccaagccgcgtccccagagagcgccctgagagaacagggtggccgcttggtccagagtgagtatattgctccatgtg

SEQ ID NO: 266834 - DNA, 82 bp, Homo sapiens
gaagaatatggagagagccctttgcaggatgcagaagaagccaaaaacattctgggcgtcctttctgaagaacagatccgga

SEQ ID NO: 266835 - DNA, 100 bp, Homo sapiens
aggcggggctttccctaccatcgttgagagagagccttgggacggcagggatggcgaggctctgaacaagaaggaacacagagggtgcgacagcccagac

SEQ ID NO: 266836 - DNA, 90 bp, Homo sapiens
cccacgtgtcctgttgtgcttcattcccacaggccgcataaggttgaaatcacaaagattagacacctttttagataggtgttcttcagc

SEQ ID NO: 266837 - DNA, 108 bp, Homo sapiens
ctcggggcaggactctactggaactcaccaggatggagacaccctccccaccgtgggggggttgtggaaaccagaacttcgcctggagaacagagtgcaaccagtgta

SEQ ID NO: 266838 - DNA, 74 bp, Homo sapiens
caacaagatggaggaagaggaaggtgccaaagaaaccatcagaattatttgaacttcaagaagatgaagcccta

SEQ ID NO: 266839 - DNA, 75 bp, Homo sapiens
aagccaacaacagtgacggaatgcctccatacatacatgccttgaattggaacgctacctacagacggagccccg

SEQ ID NO: 266840 - DNA, 75 bp, Homo sapiens
gttttgatcaccggggctagcagaggagaagaagatgattctttggccatcaaaccaccccagcaaatgtctcgg

SEQ ID NO: 266841 - DNA, 82 bp, Homo sapiens
atcgcctgggtggttgttggcgtgtccctgcagcgaaggatcctgatgccggtgcagctgacgacagccctgcgtgtggtgg

SEQ ID NO: 266842 - DNA, 75 bp, Homo sapiens
cctacgcagagctcatcgtccttgtctgcagatctccaggggagcccaccagcctagtcaacatggcctcggaag

SEQ ID NO: 266843 - DNA, 82 bp, Homo sapiens
ggcggcggctgtagcggcgtgacagaaacctttcaacgaagtctaaaaataggaagcttccagaaccaccagacaatgagga

SEQ ID NO: 266844 - DNA, 75 bp, Homo sapiens
agcggccgccgccgctgccgcttccaccacaggtcgccactgggacactgtgaaccaggagtgagtcggagctgc

SEQ ID NO: 266845 - DNA, 75 bp, Homo sapiens
ccttggtctgagtggactgtcctgcagcttttcctccgcaaccatgtctgacaaacccgatatggctgagatcga

SEQ ID NO: 266846 - DNA, 87 bp, Homo sapiens
gagttcgacgtctacttcgaggggtctgacttcaagttctacgccaagccatactttctcaggtagttacttttggtgacgctgtcc

SEQ ID NO: 266847 - DNA, 100 bp, Homo sapiens
agctgaattatggcagcccagtcaagtactatactggcaattgctggagaagattttgcaattgttgcttctgatactcgattgagtgaagggttttcaa

SEQ ID NO: 266848 - DNA, 130 bp, Homo sapiens
aagtggatgccctggggctgagaggagtcttctggtgcagtcttattttgaaaagattcatgatgttgctatcaaaagttgagaaattgtcagaagaaatcatggagataatgcaaaatttaagtagtat

SEQ ID NO: 266849 - DNA, 75 bp, Homo sapiens
acagcagagacgtcatacttggaaatggctgcaggttcagagtagtgacggcagagactctgatggacccaagcg

SEQ ID NO: 266850 - DNA, 100 bp, Homo sapiens
ggaaattcccagaggactttggagaccagaaaatttttactactggagatgtcaacaaagatgggaagctggattttgaagaatttatgaagtaccttaa

SEQ ID NO: 266851 - DNA, 51 bp, Homo sapiens
atctgccactctctaggacccttgctggtcaaaatgcagatcttcgtgaaa

SEQ ID NO: 266852 - DNA, 90 bp, Homo sapiens
gagacaatagccgcaacctagttggcagaggaagctcaccccgaggaagtctctcgccacgctttaatgaagcaccagttgagattccca

SEQ ID NO: 266853 - DNA, 100 bp, Homo sapiens
aggatggtgtcctccgggacggagatggagccgtggtccttcccaatgagggaacaatggcaaaagcctttgatgaagcattttcctctgagacaacagc

SEQ ID NO: 266854 - DNA, 83 bp, Homo sapiens
gggagacttaaaaggccctcagaccacaggattaatgataacgaaggaggcccaacttcattcaataaggagcctgacggatt

SEQ ID NO: 266855 - DNA, 75 bp, Homo sapiens
cttgaacccgggaggcggaggttgcagatgacagtcatgtccctttccagggacctcaaggacgactttcacagt

SEQ ID NO: 266856 - DNA, 50 bp, Homo sapiens
tttcccaagataatgggaggagcatctggcagctgcaatgactctccgca

SEQ ID NO: 266857 - DNA, 98 bp, Homo sapiens
cgacctcaagaagcagctccacgaaaggcagccgcggatcgccgcgctcagcgacaaacaaagagatggaaaacttgatgactagctccaccctaccg

SEQ ID NO: 266858 - DNA, 76 bp, Homo sapiens
ccacacacagatgtggtgaaatgtacccagttagtaagaggagctgtcattgactggcccacagaggagggcaagg

SEQ ID NO: 266859 - DNA, 83 bp, Homo sapiens
gagcctccggagcagaggaagaatgaaagctggtggaatgcgaattgtgcagaaacacccacatacaggagacaccaaagaag

SEQ ID NO: 266860 - DNA, 75 bp, Homo sapiens
gcggcgcggggaccgctgtgctctcggttggtttcttcaaacggaacctgaaggagaagatggaggctggcagag

SEQ ID NO: 266861 - DNA, 100 bp, Homo sapiens
ccaagaagagaagaggctgtggattcactgtctccagcgcctcttctttgagaaccaccctgcctccatccctgccaagcgagggtgggtcctgggcccc

SEQ ID NO: 266862 - DNA, 100 bp, Homo sapiens
ccgcagatcgctgtagtgggcggccagagcgccggcaagagctcggtgctggagaacttcgtgggccggcagttgtgaaaaacttcaggacaaaaatgtt

SEQ ID NO: 266863 - DNA, 119 bp, Homo sapiens
ggaaagcgggctggcaggcgagggagcccgcgtcggctgagagcccacaggcccccacagggcgccctgcgtccggcagaggaggcgagcatcccgctcaggtgatgaggaacccctcg

SEQ ID NO: 266864 - DNA, 101 bp, Homo sapiens
ggatcaccggcgtgccccaccatgtcagacgcagccgtagacaccagctccgaaatcaccaccaaggcacttccgttccggcgcccctccggtcatcaacc

SEQ ID NO: 266865 - DNA, 98 bp, Homo sapiens
attacaataagcagaggctgtttgacagagcagacttaccctgaagtagttagaatgacctagaggatcaagacataatgggagcatttttagacaag

SEQ ID NO: 266866 - DNA, 98 bp, Homo sapiens
agtccctgagcccttgggagttgccttgaaacctctgccgggtcccaggaatatattaaaggaatctgtgaacctgaactagaagaaagagaatgtta

SEQ ID NO: 266867 - DNA, 51 bp, Homo sapiens
acaccactgaagcattgccaagcttccaggccgagcggcccgcgttaaacg

SEQ ID NO: 266868 - DNA, 90 bp, Homo sapiens
cttctgctgtccttctttgtggagagcaagaggcggggtttcaccatgttgcccagactggtcttgaactcctgagcttaagcaatccac

SEQ ID NO: 266869 - DNA, 128 bp, Homo sapiens
gctttctcgcttttcatctttttggatggctgcttgtcgcaatattgtcttcttcgctttagacaagtgcgtatagcagcaaaattcatcattcatgcccctcctggagaatttaatgaggttttcaa

SEQ ID NO: 266870 - DNA, 100 bp, Homo sapiens
ccagagttgtgggccgccgtcggcagcaagaacagagagagaggtggacagatctgagagatactgagaccaagccaccctggtagaacaagtaaaaaga

SEQ ID NO: 266871 - DNA, 88 bp, Homo sapiens
aattttccactctcctttccaaacctttgcagctgccctttgttaaaggcatcaagcatgatggaaccatgtgtgatacctgccgcca

SEQ ID NO: 266872 - DNA, 101 bp, Homo sapiens
aagctgtatctctaccttcagctcccctcaggacccaccactggagacaaaagcttggaagctcgaagtctggctgtggccatgggagatacagtagtgga

SEQ ID NO: 266873 - DNA, 73 bp, Homo sapiens
aagcatggctatgcagactctaaagacagaatgctttgacctccaagctgttttaaatctagtagataagcca

SEQ ID NO: 266874 - DNA, 100 bp, Homo sapiens
tttggaaagacccaggagaagccgcccaaagaactggttttgggtcctgctcctcggtggtgttccttcttagacaacttgaccgaagaattagaagaga

SEQ ID NO: 266875 - DNA, 100 bp, Homo sapiens
cggggcttgccctggtcttgctcggccgatgaagtgcagaggtttttttctgcctcatgatgatcctgagacttgtcttgttgctgctctgagcatctgg

SEQ ID NO: 266876 - DNA, 83 bp, Homo sapiens
ctcgggctgctgctcaagaagctcaaggacgagggctgccgggcgttctacctggaagacaatgcagatcttcgtgaagactc

SEQ ID NO: 266877 - DNA, 75 bp, Homo sapiens
tactttattgatcaacatccttcatagtgtgaccgcaacaagggaaaacatggcttatactgtggaatgcctgcg

SEQ ID NO: 266878 - DNA, 100 bp, Homo sapiens
aggtaactttggaaggtcgtgctggagctctatgtgatggatggtgacagttctacaacagatgcttctcaactaggaatctctgcagactatattggag

SEQ ID NO: 266879 - DNA, 75 bp, Homo sapiens
ccaaggaataaacatgcaatgaacccaaaagggtcagtcttccacctccactaccggtgccaaaaaaagggctgc

SEQ ID NO: 266880 - DNA, 51 bp, Homo sapiens
gtgaatttccatgtcaacatagtccaggagagcgacttgcagttgtggagg

SEQ ID NO: 266881 - DNA, 90 bp, Homo sapiens
gtttccagaaaacagaaatcgaaacagatacagagatgtaagcccatgaccagctttatccagggactctaccattcccacccctttggc

SEQ ID NO: 266882 - DNA, 108 bp, Homo sapiens
ctcaccgccgccgccgccaccactgccaccacggtcgcctgccacagacaatgcagatcttcgtgaagactctgactggtaagaccatcaccctcgaggttgagccca

SEQ ID NO: 266883 - DNA, 87 bp, Homo sapiens
ccgggtgctgcggctctgcgcggtccccgccagcgccccatcctgagccgggcaagttaaagtcttcagagccctgtatacgtttga

SEQ ID NO: 266884 - DNA, 74 bp, Homo sapiens
tcaagagtcttcatctccagctgcctcagttttcttatcactaaaacagcaaccccatatcatgtgaacctcct

SEQ ID NO: 266885 - DNA, 100 bp, Homo sapiens
ccgacggcccctggataggcggtcagacacattctatgtgaaaaacatggcaaaatcatggaagccatggaaaagttaaagtctgggatgagattcaatg

SEQ ID NO: 266886 - DNA, 90 bp, Homo sapiens
gacccagaaaatggtgcttaccaactacatgttccctcaacagccaaggactgaggatggtaaaatcccagaggaatccaaagccctctc

SEQ ID NO: 266887 - DNA, 97 bp, Homo sapiens
tcataataattcagatggagaatatatggctggacagctagctgcttatggctataaaattacaggtggagccgccaccaaaatgcagattttcgtg

SEQ ID NO: 266888 - DNA, 100 bp, Homo sapiens
agagcagcctccgtcgctgtcgctgagagcctcacgagtcgaggtcctgcaggtggagctccggcagccgccctgattttcagctgaactctcatctctc

SEQ ID NO: 266889 - DNA, 100 bp, Homo sapiens
gaggctcttccaaccaggggctgagcttctgcgctgtggagaagccagctggaaggccataatgaacctgtagtgttgcaagtgtttgtgggcaacgact

SEQ ID NO: 266890 - DNA, 88 bp, Homo sapiens
ggacgcgccccgaggaggagcggggcggcgcaggcggtcacagttacctggagaggctcctgaatgttgaggtgccccagaaagttgg

SEQ ID NO: 266891 - DNA, 82 bp, Homo sapiens
aacaacaccgccttgcagtccgtttctcttcgaagtaagagtggtttcagacaccctcacaggttttctaccatgcagcaac

SEQ ID NO: 266892 - DNA, 135 bp, Homo sapiens
gctgtcctgggagaatgccccgaagtactgtttacagctcacgattcctgggggaactgtcttactgcaggttgcaaaagcttctcatttcagagagatgccaggatcctaagtgcctgccaaacttaccaattc

SEQ ID NO: 266893 - DNA, 75 bp, Homo sapiens
gtggtttttcggatcatgtctggtggctccgcggattataacagctgacctgatctccagcttcctgctcatcac

SEQ ID NO: 266894 - DNA, 101 bp, Homo sapiens
tcaggaccgggcctcaaaatggccacacgcgtacccccgtagcggaaaaacgttgctgcttttgctcagaggacatccatgaccctaatggtctttttgtt

SEQ ID NO: 266895 - DNA, 74 bp, Homo sapiens
taacctgcgggagaggtttggaattgatgatcaagatttccaggaaccctaaggactctgcaatatgaataatt

SEQ ID NO: 266896 - DNA, 74 bp, Homo sapiens
cagagttcaaggaggccttccagctgtttgaccgaacagagctgtccggcagcagaacaagccattcggaggga

SEQ ID NO: 266897 - DNA, 75 bp, Homo sapiens
gacaagacccatctttatgcaaagccagcgttacagtaatgttccagagagtaatgccttctagctttttcctgc

SEQ ID NO: 266898 - DNA, 75 bp, Homo sapiens
aggctggactcggattcgttgcctgagatggcggctcagcggcagcgggcgctggccatcatgtgccgcgtctac

SEQ ID NO: 266899 - DNA, 97 bp, Homo sapiens
agctgtgtctgcggggaggcagcggaaggcggcagtaatctatgccagcaattatgacaatgttagcagaccatgcagctcgtcagctgcttgattt

SEQ ID NO: 266900 - DNA, 100 bp, Homo sapiens
ccagttggagttgcggcggcgggaacgattgggctgagcagaggacgacatgttgcttttcgtggagtttttggctttcacccccaaccagtgaccaaag

SEQ ID NO: 266901 - DNA, 100 bp, Homo sapiens
ggaaacatcctaaatgaaaagaattctgttgccagcatcagtacttgtgacgggttgagctatcatggtgaacttacttcagattgtgcgggaccactgg

SEQ ID NO: 266902 - DNA, 90 bp, Homo sapiens
ctaaatttgaaaaggagaaaatgaatgccaaatgggacacggtggtgatctttgtgaagtctgtgcagcggtgcattgccttggcccagc

SEQ ID NO: 266903 - DNA, 75 bp, Homo sapiens
ggcggcggctgccgcgcggcacacaattgaattttgaagattgcaccggtcgacaaaggacagcctatttttccc

SEQ ID NO: 266904 - DNA, 78 bp, Homo sapiens
atgattgtgaggcctccccagccacgtgaaactggatgagtgacattccaagatgtggccattgacttctccaaggaa

SEQ ID NO: 266905 - DNA, 98 bp, Homo sapiens
cccagcatgaggcaggaggagcgctacctgctcctacagaagaatggtcagctgtccaccatcaatggcgtagctgagcaagatgagctcagcctcca

SEQ ID NO: 266906 - DNA, 97 bp, Homo sapiens
cggctataataatagcaaacatcgatggcctactggggataacattcatgcagaacatcaggtgctggtctcagtgtcagtgataatgaatctggtc

SEQ ID NO: 266907 - DNA, 75 bp, Homo sapiens
catggaaatatttgacattgagttcaaggagcagggacaagttacaggaatgttctccaagcagcaatccaaaag

SEQ ID NO: 266908 - DNA, 100 bp, Homo sapiens
cgggattgtacctgcaggcagaaagtcttcctacgaccgtcttttcccttagaggcaccagagtccgaaattgaagttcagaggaagaattgccttccac

SEQ ID NO: 266909 - DNA, 82 bp, Homo sapiens
caagaagaccaaaccatcccacggctccaaggtcctctccacccggatcctggccatgaaggcctcgctctgcaagctgtcg

SEQ ID NO: 266910 - DNA, 98 bp, Homo sapiens
gtctgccgtgctggagggaaggctgctgttggaggatgcctaaatcaaaggaacttgtttcttcaagctcttctggcagtgattctgacagtgaggtt

SEQ ID NO: 266911 - DNA, 50 bp, Homo sapiens
ggagaagtccccttatgaccaggttaaaaagatcaagtggcatgagcagc

SEQ ID NO: 266912 - DNA, 50 bp, Homo sapiens
ccgtgatcctgttagatatcgaagcatgctcgaagacgaccttcagctca

SEQ ID NO: 266913 - DNA, 100 bp, Homo sapiens
gccgggggctcagagatccaagtgcgcgccctggcgggtccggaccaaggtgaaaggtgtagcagtcactcggcctacacccacagcatcgaccttgtga

SEQ ID NO: 266914 - DNA, 83 bp, Homo sapiens
cgccgctacgggaccgcctgagctttctacaccgggtactccaaagattcaggtttactcacgtcatccagcagagaatggaa

SEQ ID NO: 266915 - DNA, 75 bp, Homo sapiens
cccagtcacaattatcaccgggtatttagagcctgatccggggatggcctctgcctccaccacaatgcatactac

SEQ ID NO: 266916 - DNA, 82 bp, Homo sapiens
cggtggactccttcggcagtccacccaccgccgccgcctcccaggtgcagagcattgtagaccaaggagccatggataggag

SEQ ID NO: 266917 - DNA, 122 bp, Homo sapiens
cgctgccgctatggatgatcgagaggatctggtgtaccaggcgaagctggccgagcaggctgagcgatacgacgggtgttctaaggatacattttattgaagctcaggatcttcaggggaaa

SEQ ID NO: 266918 - DNA, 75 bp, Homo sapiens
caccgggagtgggagagattggactgggagactcagcaggaaccatggactctcagatcaagatctgggacttga

SEQ ID NO: 266919 - DNA, 90 bp, Homo sapiens
gcgagtctctttgcggcgctacactagagcagagtacgagtctgaggcggagggagtaatggtgtcgtgaaaactacccctaaaagccaa

SEQ ID NO: 266920 - DNA, 75 bp, Homo sapiens
ggatgccgtgatcaagtacaaggacaggcagagttgcgagccttggaggaaggagatggtagtgtgtcagggtct

SEQ ID NO: 266921 - DNA, 95 bp, Homo sapiens
ccgccctcctcagcctgatcctggaagagactcggggccccccagcctccgccaacccagtatggtttgaagtggtgaacatggatttttctcgg

SEQ ID NO: 266922 - DNA, 75 bp, Homo sapiens
agcgcctcacgctgcacactgcccaggccctgggtgtctctagcctcaaagatgttcctaatgtggatctaccac

SEQ ID NO: 266923 - DNA, 90 bp, Homo sapiens
gcctgccgggacagcctcaacgggcaatttcttgcaaccaccaccgaggccccgaaaagcactggtcgtcagggagctcctccccttggc

SEQ ID NO: 266924 - DNA, 75 bp, Homo sapiens
aagggggactacaggttcgagagaattacatgaacgacagccttcgcaccgacgtcttcgtgcggttccagccag

SEQ ID NO: 266925 - DNA, 88 bp, Homo sapiens
cctggagcctcagttggaagcagccgatccagcctgcggagcctgtggggcagtgagatggaagattttcgaggtatagcagaagaat

SEQ ID NO: 266926 - DNA, 100 bp, Homo sapiens
tactgctgcctctgtcactcctggtgaccagcattcaaggtgaaatgacaatggatgctctgttggctcgattgaaacttctgaatccagatgaccttag

SEQ ID NO: 266927 - DNA, 100 bp, Homo sapiens
cagaaattgccggtctgggagttgggggcaaggagaagatcctggtagcagcactgtctggagatgcacgacggtgcctggacatctgcaggcgtgccac

SEQ ID NO: 266928 - DNA, 97 bp, Homo sapiens
acagcaagttctttgacctgcagccattggaaaagaagtttgttcgagtttcaggagaagcaactattggacatgtagaaaaattcctcagaagaaa

SEQ ID NO: 266929 - DNA, 98 bp, Homo sapiens
cggcagtggctgaagcttcccttcgccgcatctctctgcagcaactcggtagcccagccatgacccataggaatctgacttcctccagtctgaatgac

SEQ ID NO: 266930 - DNA, 95 bp, Homo sapiens
gggccttactccttcacagatcgagtttgaaacagctgagacacttctaaattcagaagttcatatgcttctggaacatcgaaagcagcagaatg

SEQ ID NO: 266931 - DNA, 100 bp, Homo sapiens
ctcaagtcctggctcagcaagactctcgagcccatgtgttacacataatattgcattacttcgagaggtgataatcaactcacgctttgtaaaaggagac

SEQ ID NO: 266932 - DNA, 73 bp, Homo sapiens
gttctctaaaaaaactggctgtgaataatatagctggtattgaagagggagctgtgattggtatagacgatga

SEQ ID NO: 266933 - DNA, 80 bp, Homo sapiens
taaattcccggaaccgcgattcggcgtgtcagtgagtgtgtccgcttgaaaccaactgacatacagcccgacatcttcag

SEQ ID NO: 266934 - DNA, 80 bp, Homo sapiens
catcccagccatcacctggatttacctgttttctgggagcttcgaagggggatatgagactttctactcggaatatcctg

SEQ ID NO: 266935 - DNA, 75 bp, Homo sapiens
caagagttggatcaacccagagctattgccttagatccttcaagtgggctggacagtcttgtgaaattgagactc

SEQ ID NO: 266936 - DNA, 50 bp, Homo sapiens
gctgtatgagttatgtgcattaataacttcagtgaagatttcatacattg

SEQ ID NO: 266937 - DNA, 82 bp, Homo sapiens
gaagaagagcatgatcggcatgtccaccaaggtgcagaccatgaattacgtggggcagttagccggccaggtgtttgtcacc

SEQ ID NO: 266938 - DNA, 75 bp, Homo sapiens
gtggcgtccacctgctcgtccgcagaggaccgtgtgtatgtacaacaaaataatgtggagaacgtctacaatttg

SEQ ID NO: 266939 - DNA, 74 bp, Homo sapiens
ccctggcaagattcttctgaattgtgctgccttggccaaaagagggtctaggtgctggagtgcgcacggaggcc

SEQ ID NO: 266940 - DNA, 88 bp, Homo sapiens
catctgaaagctttcatatcggttgactgcaggtttcatgtccttagcaagctactgagtttcatggcacctattgaccatactacaa

SEQ ID NO: 266941 - DNA, 87 bp, Homo sapiens
ggaagttaatgtttacggcgaagtctactcaacgtttccaagactatgtcttcagcagtggtgcagttatatgcagcagatcggaac

SEQ ID NO: 266942 - DNA, 75 bp, Homo sapiens
ggcggaggacgagctccgggatgctgtactccttgtctttgcaaacaaacaggtttaccgacaagactgtgaaac

SEQ ID NO: 266943 - DNA, 82 bp, Homo sapiens
ctgaagtcggtgtctgctgcgttcacggcaggattcggttagaactgccattggatgtccagaatcccctgtagttgataat

SEQ ID NO: 266944 - DNA, 101 bp, Homo sapiens
cggacactgtcgcccggcgcccagtgttctaagaacggaagcatctgggctggatggaatttagcatcaagcagagtcccctttctgttcagagtgttgta

SEQ ID NO: 266945 - DNA, 50 bp, Homo sapiens
gcctcccgagtaggtgggattacaggctgcctttaatattggttgggaac

SEQ ID NO: 266946 - DNA, 100 bp, Homo sapiens
cagactcttatgtgaagggcagaagggcaagctctcggctggcagaattcctccctgagacggtaaagaacaggtccaagaaaagctcaaagaaagcaaa

SEQ ID NO: 266947 - DNA, 100 bp, Homo sapiens
ggaatcgagatcagccgtccagaggagctgtgaagagggataccaaggaaagttctttctgctgtctttctcttcggtaatgcttatcttatgaacactc

SEQ ID NO: 266948 - DNA, 75 bp, Homo sapiens
gcagagccgccgaggatgataaacacccaggacagagtaaacatcagtctccaaagataactacatcccttcttc

SEQ ID NO: 266949 - DNA, 83 bp, Homo sapiens
agacggcagtggtggaaaagatccatgccaagcattttgaaagcgaagcagaagccgtagaatcagcggcgagcctgttgaaa

SEQ ID NO: 266950 - DNA, 89 bp, Homo sapiens
aacagaagagtgagagatggaacccgaagaagaaaggattcgttacagccagagattggtcatatataccagaagttctgagattgaag

SEQ ID NO: 266951 - DNA, 88 bp, Homo sapiens
gatcccggcggccgcgtgcagggcacccgctggcgccacggccaggacacccgagggcaacatccttcgagaccggttcaagagcttc

SEQ ID NO: 266952 - DNA, 100 bp, Homo sapiens
cgagccgccagaggaagctggaggcgctgatccgagaccctcgctcccccatcaacgtggagagcttgctgattcaaccctatgaaaagataaaggccag

SEQ ID NO: 266953 - DNA, 90 bp, Homo sapiens
aaccctctcgtcagaggagagctgcgatagttttgactcactagagtcagggaaacagatgaatgcatgatatctcttggtaaaatggcc

SEQ ID NO: 266954 - DNA, 100 bp, Homo sapiens
gcaatcagaaaatcaagtaaaggaacccaacagagatctcttctgttctccactgctagatggagcagcatattgtatgggacgtatgaattctgactgt

SEQ ID NO: 266955 - DNA, 75 bp, Homo sapiens
cagatctcttagcaaacagttcggatccagatttcatgtatgaactgggcggcgactggcggcgcgatggacctg

SEQ ID NO: 266956 - DNA, 101 bp, Homo sapiens
acgaggcgcctcgggtccccgcaccacctcctgctgccttcccgtcgccgctcccgaagcttttccaggtttggcatagaaatggtaccccttgttcaaaa

SEQ ID NO: 266957 - DNA, 82 bp, Homo sapiens
cattgctcagctgaaagatttactgcctgaacatctgaaattgacagtttagctgacagatttgaagaatatcctaaactga

SEQ ID NO: 266958 - DNA, 83 bp, Homo sapiens
cgccaggccccagccggcagcatgctgaggacttcctgggagagacaatgcagatcttcgtgaagactctgactggtaagacc

SEQ ID NO: 266959 - DNA, 100 bp, Homo sapiens
ctgggggctcctccccctcccccaccatcagcacccccggtgtcatggagaaactccagctgggcccagagattctgcagcgggaaaatccaaggcttat

SEQ ID NO: 266960 - DNA, 90 bp, Homo sapiens
ctgtacagggatgtgatgctggagaactgcaggaacctggcctcactagctgtgtgttctcatttcacccaaaacctttggacagtgcag

SEQ ID NO: 266961 - DNA, 96 bp, Homo sapiens
ggcagtcgcaacccatactattcggacagatggcacagaaaccgctgcgcctgtttgttggcatccaaagctgttggggttgatggtgctgaaaaa

SEQ ID NO: 266962 - DNA, 50 bp, Homo sapiens
aaatggcacctggtgtacagatctgaggagtctgtgtgaagcagcacaag

SEQ ID NO: 266963 - DNA, 82 bp, Homo sapiens
gccagcctgcgaaggtggcggcgctgctgctcgggctgctcttggagacatctgaatgggactccgagtgccttacatccct

SEQ ID NO: 266964 - DNA, 71 bp, Homo sapiens
cgacagagacaagctgagcttgccgcacaaaaagctagagaggtggtttgtgatgaaaatggttccaaggg

SEQ ID NO: 266965 - DNA, 74 bp, Homo sapiens
agcaaggtgacctctcagtgagagatgctgccgtcgacactctggcggcgactggcggcgcgatggacctgacc

SEQ ID NO: 266966 - DNA, 83 bp, Homo sapiens
aaggcacagtggcctcagtctgaggatgaggggcccttgaacctcagttccgtggggaccccactgcctggagtacaggtgcg

SEQ ID NO: 266967 - DNA, 98 bp, Homo sapiens
ttactacagccttctatgatccaagaagtctggaccattaaaaatctcaagtgacgactttgggaaactctggttatccttcgcaaatgatgtgaaac

SEQ ID NO: 266968 - DNA, 98 bp, Homo sapiens
ccgggccacccagcccgcccaactcccagcggagagcaagctgttgtgaacttggataattctgtggttgacctggagacccttcaagctctctatga

SEQ ID NO: 266969 - DNA, 100 bp, Homo sapiens
acaggaaagatcctacaggaatggatcctgatgatatttggcagctgtcctccagtcttaaaagatctccaagaaggagaagcttctctcgcagccggag

SEQ ID NO: 266970 - DNA, 95 bp, Homo sapiens
ggggctgaggccgtgtcagcacgatggaccccaaacagaccaccctcctgtgtcttgccctgggcgctgcctatggcacagccaagagcggtacc

SEQ ID NO: 266971 - DNA, 74 bp, Homo sapiens
gaccattggggtcacggtgtttgccgtggggaattccctgttcttcaggacaatttagaagtttatttgggatt

SEQ ID NO: 266972 - DNA, 97 bp, Homo sapiens
gcgccagggaccgggggaaccgccgccccggccggacctcgaccctgagctctatctcagtgtacacggggctgacgtttaccctacgtcctggtga

SEQ ID NO: 266973 - DNA, 100 bp, Homo sapiens
agctctctgagtacttcctagcatttggacctgtggccagtgttgtcatggacaaggacaaggagttggcttctctgggtttggacagattgaaatctgc

SEQ ID NO: 266974 - DNA, 85 bp, Homo sapiens
agtacctgcagaaggtctctggagacatcttcagcagggtttccaggcctgaggtgcccgccctggccccaggagaatgaaccag

SEQ ID NO: 266975 - DNA, 125 bp, Homo sapiens
cacagttctaccacaacctatgacatcagctatggggaaaggaacagttgctgttcaagaaaaagcagataacaacgaacttgatgcaagtgataggtttgccaaggtcagacctctcatcatcc

SEQ ID NO: 266976 - DNA, 50 bp, Homo sapiens
cgcaacagccccttcgtcccaagttcctgagggtctgtgtgccagctctc

SEQ ID NO: 266977 - DNA, 100 bp, Homo sapiens
gacatcgacgccgcctggcaggccctgcgcaccagggtgactatgaccagagcaggaccaaagtgctgcacatgagcctgaaccccaccagtgtggccag

SEQ ID NO: 266978 - DNA, 89 bp, Homo sapiens
gtggaggattactagagaacatccccagagtcctccctgagaaacttggggtagatttagtatttaaaagacccaactcagcccatctt

SEQ ID NO: 266979 - DNA, 51 bp, Homo sapiens
tgaggagtcatggaagagtttttaaaccagtttctagatgcattggaatta

SEQ ID NO: 266980 - DNA, 97 bp, Homo sapiens
tggcggtccgacagagtcctccgtgtcctcccccgcatgacccccttggtggtatggtcaggaaaaagactacaatgtactagtcatggatcttctg

SEQ ID NO: 266981 - DNA, 75 bp, Homo sapiens
gtgcagggtaacatggcggatgcggaagatctgactgcagccatgagcagcaatgagtgcttcaagtgtggacga

SEQ ID NO: 266982 - DNA, 74 bp, Homo sapiens
gtgtccagcgctgccggagccgcctgagggccacatctgccagagcctggagtctgcgaaggccgggacccggt

SEQ ID NO: 266983 - DNA, 98 bp, Homo sapiens
aacgacctggcggtggggctgcggcgcctgggactgcaccgcaccgagggcgagctccaggactgatcctttgaaatactccagccatgactaaaaga

SEQ ID NO: 266984 - DNA, 95 bp, Homo sapiens
gggcgctgctggcgctctggctgtgctgcgcgacccccgcgcatggttgggcccgaaggcatcctgcagaacggggctgtggacgacagtgtagc

SEQ ID NO: 266985 - DNA, 80 bp, Homo sapiens
agacaccggcgggcgcgagccgttgcaggtcagcccaaggccaaccccactgtcactctgttcccgccctcctctgagga

SEQ ID NO: 266986 - DNA, 74 bp, Homo sapiens
gcctcagcctggccagaggagaagcttcgagagctgtgcccaggagtgaacaaccagccctacctctgtgagag

SEQ ID NO: 266987 - DNA, 101 bp, Homo sapiens
tacacgacatgtatagtatggcttgccttcattccaattttttttggcaccgctcaatcagcggaaaagtcaggtcaattcagtgaagatatgatacccac

SEQ ID NO: 266988 - DNA, 76 bp, Homo sapiens
tgcacggaagagacgcctcctcggtatgtcgagagtaccaacgtggcaattgcaaccgaggagaaaatgattgtcg

SEQ ID NO: 266989 - DNA, 82 bp, Homo sapiens
tggactccttcggcagtccacccaccgccgccgcctcccagaattcggttccctcaaaattataaaggcaggaaagctcaag

SEQ ID NO: 266990 - DNA, 97 bp, Homo sapiens
cgagacacgccgccgccgccgccgccgccggcgcggaaggacgaggctgaggcgagaaacgagaaaattgtacaagctggagataaggaccttgatg

SEQ ID NO: 266991 - DNA, 82 bp, Homo sapiens
tggagcctcagttggaagcagccgatccagcctgcggagcctgtggggcagaacccttaggagaaatcttgagagtggacag

SEQ ID NO: 266992 - DNA, 74 bp, Homo sapiens
attacctttataatcatgtggctatgtggccggaacaaaggttatcaatagtctggctgtctatcgtcatcgtg

SEQ ID NO: 266993 - DNA, 129 bp, Homo sapiens
gaagatgaacgggcggaagcagagtctgggggagctcatcggcactctgaacgcggccaaggtgccggccgacaccgacaatgcagatcttcgtgaagactctgactggtaagaccatcaccctcgagg

SEQ ID NO: 266994 - DNA, 116 bp, Homo sapiens
gcaccgggccctctgcgacctggggccctgggtgaagtgctccgtcgcccttgcctccagacaatgcagatcttcgtgaagactctgactggtaagaccatcaccctcgaggttga

SEQ ID NO: 266995 - DNA, 100 bp, Homo sapiens
ttggctgaagaggaaataaaaacagaacaggaggtggtagagggcatggatatctctactcgctccaaaggtttttcgttggaatatacgttgcacattt

SEQ ID NO: 266996 - DNA, 100 bp, Homo sapiens
cacagaagccgacaaggcgttcaagcgaaaacatgaccgctgagcccatgaggtttgacatctacaggaaggtgcccaaggaccttacgcagccaacgta

SEQ ID NO: 266997 - DNA, 96 bp, Homo sapiens
gtccggagctagctggatcctctaggcagattaacagccatgcaacagaatggagtcccagccacccaggagaggatgcagtggcgtcttttgctg

SEQ ID NO: 266998 - DNA, 90 bp, Homo sapiens
ggggcaagtggctcggaacacaggatcccaggagggcactcatggtggtttatgggactctggactcctgagaagcggccttgagtctac

SEQ ID NO: 266999 - DNA, 100 bp, Homo sapiens
ccccacaagtggccccagcccaggaacgaatctctcaggctgcatcaggatgaatgatgacccaagtatggaaattgtcactgctgttccaagggcacac

SEQ ID NO: 267000 - DNA, 96 bp, Homo sapiens
caaggaagctggtgcatgcagtgtctctgggcaaggttatgcaacctggaagctccgaccccaggagccagcccatcaacctgaaccattacgcca

SEQ ID NO: 267001 - DNA, 74 bp, Homo sapiens
gaaaaatatatccgcagggttcggatgagaccagatgtggacgagtgctcactagcagaaaaaacctgtgtgag

SEQ ID NO: 267002 - DNA, 100 bp, Homo sapiens
ccagacagactgctgagcgactatattgagaaggaggtaaagagagacaagagagacacctccaacttcgacaaagagttcaccagacagcctgtggaac

SEQ ID NO: 267003 - DNA, 50 bp, Homo sapiens
ccgccgtctgctgttacctcttgttctcccatgggcaggtggtctctctg

SEQ ID NO: 267004 - DNA, 83 bp, Homo sapiens
gacacgcacttatcattcagtggcaattctgtggtgttcttggtcacacatttatggagtttctgaagggcagtggagattac

SEQ ID NO: 267005 - DNA, 90 bp, Homo sapiens
cgcaggcgcagacccacccgccatgaagccccccgcaggtggttattaacttggtgatgcttttggctgaaatgaaaatacaggaccgcg

SEQ ID NO: 267006 - DNA, 75 bp, Homo sapiens
gaggaagagaactactcctttttacctttggttcacaacatcatcaaatgtatgcagttggcagtagatgtgcag

SEQ ID NO: 267007 - DNA, 88 bp, Homo sapiens
atgaagtgcagaggtttttttctggtggttgtgtcaaaccgattggtgacatctccatgctgtattgtcacaagcacatatggctgga

SEQ ID NO: 267008 - DNA, 96 bp, Homo sapiens
aaattcagagaggggaagtgatttgcctcagcttgtactagccaaagccttggctggacagtcagtacgaatctgtaaaggccccagggctgtgtt

SEQ ID NO: 267009 - DNA, 100 bp, Homo sapiens
acacgaagaactaagaatattattagcacaagagcaccatactttgagggtcactacaggaaaagatatcttcattaaagtgcaacagcacactgagagc

SEQ ID NO: 267010 - DNA, 101 bp, Homo sapiens
ggacatgagaactatttcatttgatattcctcctcaggagcctgtttgcaaggtttcaccagagacaacacttccagcagcttctccgaggatgcaggaat

SEQ ID NO: 267011 - DNA, 74 bp, Homo sapiens
cctgacttctgtgagctcattgcgcgggactagggagctttcaccaacaatcaccagtggtttacacaacattg

SEQ ID NO: 267012 - DNA, 75 bp, Homo sapiens
ttgagatggcctgtctgataactgactctgatctcaacattttggctgaaagaccagcatgctgatgatgtcaaa

SEQ ID NO: 267013 - DNA, 100 bp, Homo sapiens
caacagatcgtggatctgaaagtgacaagcattttagaaaggccaaatttgagtttcatcatggtgactatgaaaaacagtttctgcatgtactgagccg

SEQ ID NO: 267014 - DNA, 83 bp, Homo sapiens
ccggaaagtttatacaaaaagctcccacttaaaggcccaccagaggactcacacaggctttaatgactgatgaaacaatatcc

SEQ ID NO: 267015 - DNA, 98 bp, Homo sapiens
atgtctcctgatatcctacacaacaaacaaatttccatcggaatatgtaccgactggaagaggaagaacgtctgagaaataaaattcgagctgatcat

SEQ ID NO: 267016 - DNA, 98 bp, Homo sapiens
gaccattggggtcacggtgtttgccgtggggaaagaagagcaagttagtaccttgtaccaaaacatcaaccttgtggagccaagattaattcagccat

SEQ ID NO: 267017 - DNA, 90 bp, Homo sapiens
gaagatgaacacagtattgaaatgcatttgccttatacagctaaagccatggaaaggcctgtgatacttgggctgtgatcctctagagcc

SEQ ID NO: 267018 - DNA, 75 bp, Homo sapiens
ttcgctcacctggatgacaacgagaggagtagtttatgccaacgtgacttcattcatacagatgaaccaaggatc

SEQ ID NO: 267019 - DNA, 100 bp, Homo sapiens
gtgacttaaattctcccagtcggtggaggtataaataactacatgtaaaattaatgcagttcccgatgccttcaattaagttgcagagttctgatggaga

SEQ ID NO: 267020 - DNA, 98 bp, Homo sapiens
tgtctctctctgcctggcgtcttcagaatttggaaactagttgtgtcagttgtacccgaggcgttctcagcagcagcaagtacctgtggtggatttcc

SEQ ID NO: 267021 - DNA, 90 bp, Homo sapiens
gaggtaagaaacggttgtggatcttgaagctttggaaagggccgttgctccagggagaactgcaaatatcttcatccacccccacattta

SEQ ID NO: 267022 - DNA, 100 bp, Homo sapiens
cggaagtgtaacgttgaggcccttcttgtgtatctggagaaaatagagtactcgcttcccactcccaaagggggcaaatacgccatcaacccccatctca

SEQ ID NO: 267023 - DNA, 96 bp, Homo sapiens
tggcctgacaaattatgctgcagcatattgtactggcctgctgctggcccgcaggctctggattaatcgaattacagctgctagccaggaacatgg

SEQ ID NO: 267024 - DNA, 100 bp, Homo sapiens
cgccatttcacatccagcagaggaggcgggggcagccgctgagacggtttttcacaagtatgccgagattttgctgtcctggaggaccacaccctggctc

SEQ ID NO: 267025 - DNA, 90 bp, Homo sapiens
caggaattggtttctacacttgtggaaacacttatgactggcaaaaggaaggtgggagtcaatcattttgacaagtctcctgaaaggaac

SEQ ID NO: 267026 - DNA, 119 bp, Homo sapiens
ccagatcctgaacttcaccatcctacagatcttccctttcacctatgaaagcaaacgtatgggcatcatcgtgcggacaaaacctgctacaaccccctcttcaactacgaggacatgca

SEQ ID NO: 267027 - DNA, 75 bp, Homo sapiens
cagcagcctgttcggcgaggacaacgtgcgcgccgctcagaaggacactcatgaggaccatgatacttccactga

SEQ ID NO: 267028 - DNA, 100 bp, Homo sapiens
caggtggcctgggagtagatattgtcctagatgctggaggacagtcattttgtttactcattcagccctgttgcaggtcccaataaactcttcataaggt

SEQ ID NO: 267029 - DNA, 75 bp, Homo sapiens
cagcaggagcagtgcgccctcctgagcaaggtgagaagccctaccactgcaactgggacggctgcggctggaagt

SEQ ID NO: 267030 - DNA, 51 bp, Homo sapiens
cagcctcccaagtagctggaattacaggtttaagaattgtttaagctgcat

SEQ ID NO: 267031 - DNA, 104 bp, Homo sapiens
caaaaggaatgaccctagccagactcagggatcaaagagcaaacagattcagtggcctgcattgtcacccacaaaagctgtatataatgccagacattggaatc

SEQ ID NO: 267032 - DNA, 100 bp, Homo sapiens
ggccacagcaggaccagagtggaccagcacaccccaggagagaggactggggtcccaggagtaggaggaggtaagaatgattgatgttggctgatattgg

SEQ ID NO: 267033 - DNA, 74 bp, Homo sapiens
gacaaaaacactagcagaactatttgcatcaagcatgatggaaccatgtgtgatacctgccgccagcaaccaat

SEQ ID NO: 267034 - DNA, 75 bp, Homo sapiens
gccccggcagcgcctgggacaaggtacagagtgaagacagtgtcctcctgtttgttattgcatggacgatcacgg

SEQ ID NO: 267035 - DNA, 95 bp, Homo sapiens
cgcacctctgtttgggggtcctcaggagttcatgatcaagtgttgcccacaccaaatgcttcatccagagtcatagtacatgtggatctggattg

SEQ ID NO: 267036 - DNA, 75 bp, Homo sapiens
tgcggtgaaggagttagtagaaaacagtctggatgctggtgccaccaatattgctgtcttgtcgacggtctcact

SEQ ID NO: 267037 - DNA, 98 bp, Homo sapiens
gtcctttttcgtttttcggatgatgccttcaatactacctttatttccaccataggagcatctttccttgaagaagtacattattgacattgtggttg

SEQ ID NO: 267038 - DNA, 143 bp, Homo sapiens
caatttttttcttacatctgattccaatgctccagaagcagcggctggaatttgcgttttatgtcattgaacaggttcagattttgcttaaactgtggagcaatggtttcagtttagatgatggagaattgagaccttacaat

SEQ ID NO: 267039 - DNA, 76 bp, Homo sapiens
aagaaagagaatgtaagacaggaaaataattaaatattcttaccgaggttggtttgttggaccttgaactcaatcg

SEQ ID NO: 267040 - DNA, 75 bp, Homo sapiens
gtgaaatgggctaataatgctggcaaagtggaaaaatgtgcgggtggttctcttcccaaagtggaagccaaattc

SEQ ID NO: 267041 - DNA, 98 bp, Homo sapiens
gaactagacacgttggaagtagctgatgaagataacagtgaaatatcagattcagaggatgacagttgcaagcatgatgcactctcctggctttgacg

SEQ ID NO: 267042 - DNA, 100 bp, Homo sapiens
cgggctttgttgtggaaatcccggttacctgacggagtttcactgttgttgcccaggctggagtgcagtggcgtgatttcagctcacggctacctctgcc

SEQ ID NO: 267043 - DNA, 75 bp, Homo sapiens
cgtggagatatggcgcaactgcggcgcgcaaggggagagccagttgcgcagagccctgcaaccagcagtccaggg

SEQ ID NO: 267044 - DNA, 75 bp, Homo sapiens
tgcccgagtgctacttctactccaagttcggatctgtgccagttcagaagcaggcgagcctcttccctgatgaaa

SEQ ID NO: 267045 - DNA, 49 bp, Homo sapiens
aaagctttaggagttcacagtgtggtaaagactatcggcctccgggaag

SEQ ID NO: 267046 - DNA, 75 bp, Homo sapiens
cttctaccagcccatgcccctgaaggcctcgctggagatcgagtaccaagtactttgaactcaagtaaacaaaag

SEQ ID NO: 267047 - DNA, 100 bp, Homo sapiens
gaatttcagcagttctctgatttttatattttattcctcttcctatccaatccctgccttttgagtccaggtggtgctggagaatctggtaaaagcacca

SEQ ID NO: 267048 - DNA, 75 bp, Homo sapiens
taggtggtctggataccattgtcaagatccctccacatgtactgagactggtcgaattgacaaatcttaccctac

SEQ ID NO: 267049 - DNA, 90 bp, Homo sapiens
tgggaaacaggcttcacatgtttcttgtacagttgagatgtgcagtgttacaactccttgcatgatggctcatacctgtaataccagcac

SEQ ID NO: 267050 - DNA, 50 bp, Homo sapiens
ctgaacattactcttccagaagaggactcacaccacccggcaagaactgc

SEQ ID NO: 267051 - DNA, 84 bp, Homo sapiens
ccacgtagcccagcgccggcacgcgcgaggcccggggggccctcagcctcttggccttgaacgggctgttcatcttgattcaca

SEQ ID NO: 267052 - DNA, 100 bp, Homo sapiens
gggaaaggatgacatatttttggacctgaaacagaaattctggaacacctatatggtgactctgacatcattagaagcatgccagaacagactggtgaaa

SEQ ID NO: 267053 - DNA, 90 bp, Homo sapiens
gctgggtcagtccgccgctcaccccgcggccgcaccttcccgccttctcagatatatttttgccatcatggatcagtttggagatatatt

SEQ ID NO: 267054 - DNA, 83 bp, Homo sapiens
ctgaaatccttctctgacgtcagtgtcatccgcgtggccagcggctacttactcatgggaggataagacagagcagcttgtgg

SEQ ID NO: 267055 - DNA, 100 bp, Homo sapiens
aaccgcagccacagcgcccacttctttgagtttctcaccaaggagctagccctgggccaggaccgggcttcacttacgttctgcatgaaggcgagtgctg

SEQ ID NO: 267056 - DNA, 100 bp, Homo sapiens
gaaaagggaggagcgctccggtggtctggcgcgctgggctcgctagttctgggaggtgatcagtgatgaacatggcatcgaccccaccggcacctaccac

SEQ ID NO: 267057 - DNA, 90 bp, Homo sapiens
agccttcagcttttggcagcatgaaagttagcagaaggggatgattatgaagtcattcctaacagtaatttctatgtatccagaacggcc

SEQ ID NO: 267058 - DNA, 50 bp, Homo sapiens
aggaatgttccctgacaatttcgttaagtgtatgtggtagaagaccaaag

SEQ ID NO: 267059 - DNA, 101 bp, Homo sapiens
ttaacttctgtttacatggaactcagacatctgcaaatcatgaaattcattgagtttgaagatgctctggaacaagagaagaaagagctgcaaatccaggt

SEQ ID NO: 267060 - DNA, 75 bp, Homo sapiens
ataatcggaatgtgatcacagagcctatttacccagaagtagtccatatgataagaactccattttctgttgatg

SEQ ID NO: 267061 - DNA, 82 bp, Homo sapiens
aagccctccttcgtgtcgtacgtacgccctgagagacggtaaagaacaggtccaagaaaagctcaaagaaagcaaataccag

SEQ ID NO: 267062 - DNA, 101 bp, Homo sapiens
cgacagagaagtcattcaggaaagagaaagatgaggtctatcttaatctggtgctggactatgttccggaaacagtatacagagttgccagacactatagt

SEQ ID NO: 267063 - DNA, 100 bp, Homo sapiens
caggaactgcgcagcctcttcgagcgccgcggacgcgtcatcgagtgtgacgtggtgaaaggccctgtttgtgctcttcgtcctggcctacatccacatc

SEQ ID NO: 267064 - DNA, 51 bp, Homo sapiens
gatctgagagactccataccagtagctttgcagtttggggagggctgtttt

SEQ ID NO: 267065 - DNA, 97 bp, Homo sapiens
acacacagctgggtgggggcacagactatcaagaaatccaagtggtaatgggcgaagtttattcagcatccggcaatggacttatcgtagttgggga

SEQ ID NO: 267066 - DNA, 98 bp, Homo sapiens
aaaggagaaaatagtctgggtcagatttgaaaatgcagatttaaatggttttttgccctgacatctcttcgtcttgtgtttttacttgcatttggctt

SEQ ID NO: 267067 - DNA, 75 bp, Homo sapiens
gctatcgtggacgtcactggccctggtggggattgacagccacgggaaggacactcatgaggaccatgatacttc

SEQ ID NO: 267068 - DNA, 75 bp, Homo sapiens
ttcttgatgctggttctgtgaattactggaaagctacccttgaggagaataggttgaattctgaaaaagatcgag

SEQ ID NO: 267069 - DNA, 100 bp, Homo sapiens
cgccgggggcctgctgcgcccggatcaacaaactccatttatgtaaacccctaattagagcaattgacagctcaaacctgaaagacgattacagcactgc

SEQ ID NO: 267070 - DNA, 88 bp, Homo sapiens
gggggctgcagtgaacatgctccacctgcatggctggcaaaccatggtgggccccagctgtggcaacgcggtaaaaatattgcttcgg

SEQ ID NO: 267071 - DNA, 100 bp, Homo sapiens
cgcagcttggagacagcccgggccgagcccccggaccccttgccggacaagatgcgccagtcggtgtcagcctgggcttctgcccaccacagccctaccg

SEQ ID NO: 267072 - DNA, 89 bp, Homo sapiens
ctgccatcttagtctagggactgaggagtcgccgccgccccgagtcccgcggccctccaggcactgaagcgtaagaagaggtatgagaa

SEQ ID NO: 267073 - DNA, 50 bp, Homo sapiens
cgggagccgggccggcctagccaggtgccaagtcctgccctgccaacttc

SEQ ID NO: 267074 - DNA, 100 bp, Homo sapiens
gagtgcgtgggggaccggctgttggcggggctggaccccaatggagaacaggtggtgtggcaggcgagcgggtgggcagcccgcatcatccagcacgaga

SEQ ID NO: 267075 - DNA, 83 bp, Homo sapiens
aaggttctacagaaagtcaccagaggaagctttcagtgccaatggaaaagatatcattgtcgactttccccagcagtctcact

SEQ ID NO: 267076 - DNA, 75 bp, Homo sapiens
gccatcacgaggatgatttcggaacctggagaaaatgtgatctgtgaaaatggttcgctattcacttgacccgga

SEQ ID NO: 267077 - DNA, 80 bp, Homo sapiens
gctgtatctactcaagagtggaagttttcacagatgatgtctttctacctaaagatattgacctagacagtgtggatatg

SEQ ID NO: 267078 - DNA, 74 bp, Homo sapiens
agtgaccacaagcctgtcagctcagtgtttgacatcgggtgttgaatatgaaacattcgatatattggaggatg

SEQ ID NO: 267079 - DNA, 51 bp, Homo sapiens
gttaaggattccaagtaactcttatttggcaagaagagaggcggaggcgat

SEQ ID NO: 267080 - DNA, 83 bp, Homo sapiens
tgggcgctgctggcgctctggctgtgctgcgcggcccccgcgcatggtgtggacactgccagcggctgcagccgacttggaat

SEQ ID NO: 267081 - DNA, 50 bp, Homo sapiens
catgagatgattgccaaacccccagtgtccaggaggagcatttacaccca

SEQ ID NO: 267082 - DNA, 96 bp, Homo sapiens
ggatgccgtgatctccagcgccggcctcctcagtgcgaagaagctgcagccgcacctggccaaggcttcaccagcctccaccaagacgggacaagc

SEQ ID NO: 267083 - DNA, 101 bp, Homo sapiens
tggagctggagtgtgcagtactcggcaggaaattgaaagcataacccctactgtagaactaaatgcactgtgcatgaaacttggaaaaaaaccaatgtata

SEQ ID NO: 267084 - DNA, 82 bp, Homo sapiens
tgaaaacaattcatctcaaacgggaacctgaggatcagctttactatgtgaaatttttgtcactcccagaggtgagacaagc

SEQ ID NO: 267085 - DNA, 87 bp, Homo sapiens
aatttttggatgatgatggatccatttctcctattgaggagtcaacccactgtagtctgcagatcaaagctctggcgaaaatccatg

SEQ ID NO: 267086 - DNA, 75 bp, Homo sapiens
aggcaatccgcagaaactacgagttgatcatgtggatgccatggagactggaagaccattccaacttggacgcgt

SEQ ID NO: 267087 - DNA, 113 bp, Homo sapiens
agccgcgctgccgagaagctttacctcgctgaccctatgaagttccctgacatcgtggagttctgcgaggccatggccaacgccgggaagaccgtaattgtggctgcactgga

SEQ ID NO: 267088 - DNA, 100 bp, Homo sapiens
gaccaggaaaggaccctgagaagccagaggccagcatggaagtgaaggggcagaagctgatcatcaccagggacagagtggactgaagcatggaaaccgg

SEQ ID NO: 267089 - DNA, 82 bp, Homo sapiens
cagcgggagctggacggcgagcgcgagcggcgcgagaaacccagagcctgaccacctgcgaggtctgcggtgcctgctttga

SEQ ID NO: 267090 - DNA, 85 bp, Homo sapiens
caagtccgaggtgatagttacagtgaaggttgtctgggtcaaacagagaaagcgtcgtggtggagcaataaattctagacaagct

SEQ ID NO: 267091 - DNA, 97 bp, Homo sapiens
ccggggtgtaataatgttaactgagcacgtcagctaactgttcagatgatgcaaaatcctcagattcttgcagcccttcaagaaagacttgatggtc

SEQ ID NO: 267092 - DNA, 97 bp, Homo sapiens
gcaggaggctaagaaagtggtgaatcccctgtttgagaaaaggcctaagaattttggcattggcaaacaagcatgcatttaggatccttatgcacgg

SEQ ID NO: 267093 - DNA, 98 bp, Homo sapiens
ccctaactggtctggaataggggttgtcaggggtactttcattgaattccgaaatgggatgttaaacgtgtcccctattggaagaagctgcagccaag

SEQ ID NO: 267094 - DNA, 98 bp, Homo sapiens
gagagcttggttaacttgggagaaagtttcatctgtggatggagtattgacagacaattttcccgcagagcccaattacatgggcagcaggcagcagt

SEQ ID NO: 267095 - DNA, 50 bp, Homo sapiens
cctcagcctcagagtcagatgcaggacagtactactggtatgacgagcgg

SEQ ID NO: 267096 - DNA, 101 bp, Homo sapiens
cggacggcgacgcagcccgcggcagaagtgtattggaacaacacaaactaacaaaagaacagtgggaagaaagaatacagaactggcatgaagaacataga

SEQ ID NO: 267097 - DNA, 96 bp, Homo sapiens
gaggaagattctttgtcctcagttcccatttctccttataaggatgagccctggaaatatctggaatcagaaggtccggtttatcactaaaatatg

SEQ ID NO: 267098 - DNA, 104 bp, Homo sapiens
tgcagcaatccctttgagtttccaagtcaggatatgtgcctttcagctttaaagagaattgaagttcttcgtgccatgaaggaggacagtgaaaaagttccgag

SEQ ID NO: 267099 - DNA, 124 bp, Homo sapiens
atttcaagagaggacaaaataactaccccgaaaacagaggtgtcagagccagaaaaggaagatggcgccatttctaccatagtacttcgaggctctacagacaatctgatggatgacatagaaa

SEQ ID NO: 267100 - DNA, 50 bp, Homo sapiens
tcatcctgctgctccccggaaggatggcctgcacggtggctggtcgggtg

SEQ ID NO: 267101 - DNA, 99 bp, Homo sapiens
ccccgatccgatcacctttcaaggagtcctgtgatccatcactcggattggcaggacctggggccaaaagccaagtggatgggagctgggaagtgtgga

SEQ ID NO: 267102 - DNA, 87 bp, Homo sapiens
ctcaacatcccggagcagctgccacaatgggacatgtgcaaaactcagcctcctcccaagctccctgtgggtcctagccacaagctc

SEQ ID NO: 267103 - DNA, 100 bp, Homo sapiens
gcgcccttcccctggatacggtcactttctacaagccacctgtctttaccagtttccaagactatgttactgggcttcagactttaatttccaatgttgt

SEQ ID NO: 267104 - DNA, 74 bp, Homo sapiens
atgatctttgggatagcagattgtttgcctactccaggctgaccggttccctgatgtgttacctgcttctgcta

SEQ ID NO: 267105 - DNA, 73 bp, Homo sapiens
aaagcgagcgatcgagcgagcgcgcgcgcgaaaactccgggcagaaagatgtgtcatggcaatgctgagaagg

SEQ ID NO: 267106 - DNA, 100 bp, Homo sapiens
gggggaaaaaatcccaaggtctgcaaagtttctgtgtttgaagaacatacgcaccttcctgaaagtctgccacgataaatttggattaaggaacagcgag

SEQ ID NO: 267107 - DNA, 75 bp, Homo sapiens
cgtggaactttctggtgttatgttcagccccctcaagagggagtcgtcgcatggtggatgtcatggacgtgaaca

SEQ ID NO: 267108 - DNA, 90 bp, Homo sapiens
tatttatgaccttttctatggaaagaggagctcatgggcatttcacccatatctccaaaagaggcaaaggttcctgtggccaaaatttct

SEQ ID NO: 267109 - DNA, 75 bp, Homo sapiens
agccatcattcatcttactcttcttgctctcctttctgtaaacacaggaactgtggctgcaccatctgtcttcat

SEQ ID NO: 267110 - DNA, 75 bp, Homo sapiens
catgtgcgccggtttctgctcaccttccagagagaggatcttgagaagaagtgggagcccgtccagtatttcaac

SEQ ID NO: 267111 - DNA, 51 bp, Homo sapiens
gcccacctccccaccaaggaagattctcttcaggggaagagtccacatccc

SEQ ID NO: 267112 - DNA, 97 bp, Homo sapiens
ttcttcaatatcccatttttgcagcttcaggaccttcttcagattcgatcgtatgtgtacgcagaagagccaaatattgacattcacaacttcgtgg

SEQ ID NO: 267113 - DNA, 76 bp, Homo sapiens
ggcatggcaagactccacctcctggtgaagaaagcaaacaagggtgacatgccatgccgtgccaacatcctggtca

SEQ ID NO: 267114 - DNA, 101 bp, Homo sapiens
cagcctggaaggtgcgtgtggggctgggtctcggagtgggagacgtggagtgcagaaaacgggcaatgctgtgagagccattggaagactgtcctctatgg

SEQ ID NO: 267115 - DNA, 75 bp, Homo sapiens
cgtctcggaaaccggtagcgcttgcagcatggaatcctacggcccctgaatattttggcatcttcaacctaccgc

SEQ ID NO: 267116 - DNA, 74 bp, Homo sapiens
gagaggcggcggcggcctcggctgaagaaagaaggtggagggtggggcaccccgggccaacctcaccgtggtgc

SEQ ID NO: 267117 - DNA, 74 bp, Homo sapiens
gctctggttcctgttgcggccggaagtgggaaaactcttgcctttgccatcccaatgattcatgcggtgttgca

SEQ ID NO: 267118 - DNA, 83 bp, Homo sapiens
cagacgatgagacagagttgcgaccgcgcggcagcatctgcaggggctgctgagagtaaatacttggcgcctccagctgctgg

SEQ ID NO: 267119 - DNA, 75 bp, Homo sapiens
cagatctctgcagttacaggaacatcgtctgcttcatgatttggtgcttccagatgtgagttatcaggtggaatc

SEQ ID NO: 267120 - DNA, 80 bp, Homo sapiens
aaccagagccggaggcgggaggacgggctgccgcaggtcagcccaaggccaaccccactgtcactctgttcccgccctcc

SEQ ID NO: 267121 - DNA, 100 bp, Homo sapiens
agaagacaatatcatgcaagtgtggcaaatgggcaagtgtccagagaatggctgggatgaaagtacacttgaactctttttacatgaacttgcaatcatg

SEQ ID NO: 267122 - DNA, 82 bp, Homo sapiens
cggccagttttgaaatcgacacacaaagaatagagttgagcctgtgggacacttcgggtctggccgtgggcctgggcttcgg

SEQ ID NO: 267123 - DNA, 96 bp, Homo sapiens
tgcaaaggttttttcgggcctgactgcacgcagtgtcctgggggcttctccaacccctgctatggcaaaggcaatctgacacttcctccatggccc

SEQ ID NO: 267124 - DNA, 100 bp, Homo sapiens
agctgaagcgtgttggggaaggagctgtaaagagaggttctccaaaaaatgtggaatcctttgcatctatgctgagacattctcctcttacacagatggg

SEQ ID NO: 267125 - DNA, 83 bp, Homo sapiens
tcggctgcgggaaatcgggctgaagcgactgagtccgcgatggagcccgtggaccgggagcccgtggaccgggagccggtggt

SEQ ID NO: 267126 - DNA, 100 bp, Homo sapiens
tggagtataatctgccttccagcctgcttgactttgaaaatgatttaattgaatcaagctgcaaagtaactagatgtgctcatcttttgctacgggaccc

SEQ ID NO: 267127 - DNA, 83 bp, Homo sapiens
cagggcctgcagcgggagctggacggcgagcgcgagcggcgcgagaaagtgaaatgacaatggatgctctgttggctcgattg

SEQ ID NO: 267128 - DNA, 100 bp, Homo sapiens
ccactgggtgccagcacacgcctgctggatgtgagcttgcagagcatctgttaaaattgcagagttttctcgtactccagaagactttctaaagaaatat

SEQ ID NO: 267129 - DNA, 100 bp, Homo sapiens
ggtttcaaagtcagcatacaaaacttacaggaggcaaaagctttacatgaggtcaggttggtgacattggtccatcacatgggtggagttattcgaaaag

SEQ ID NO: 267130 - DNA, 100 bp, Homo sapiens
caagcatgtacggcaaaggcaagagtaacagcagcgccgtcccgtccgacagccaggcccgggagaagacctgcgcgaagtctggctcaattatcctctc

SEQ ID NO: 267131 - DNA, 90 bp, Homo sapiens
gtccagcagatggcggatgccctgcagtacctgcagaaggtctctggagacatcttcagcaggcagcagcccggcccgtcggagcacata

SEQ ID NO: 267132 - DNA, 82 bp, Homo sapiens
ctgtcttcatctttacagaggaatagtctacaaaggaagacttgtaacctggagaagagggacttccttccccgcggttcag

SEQ ID NO: 267133 - DNA, 74 bp, Homo sapiens
tgcaagaaacatatactgcttacctcattgaaacaaggttgcagatattttattccaaactgcccaaaatgcag

SEQ ID NO: 267134 - DNA, 97 bp, Homo sapiens
cgggcgctttggagccggccccaggcagcgtgtgtcggtcgcctagtctggagaactagtcctcgactcacgcctgctgagggatgcccaagaagtt

SEQ ID NO: 267135 - DNA, 80 bp, Homo sapiens
aattttattggactgtttgtctttgttctctgcctcttgtattctaggacgaatgccttagtttccactttccagcctgg

SEQ ID NO: 267136 - DNA, 75 bp, Homo sapiens
actcccacaatgccacaggaggaggcagcagcagccaacagggaagagtgtcgcacccaggagaaagttaatgca

SEQ ID NO: 267137 - DNA, 100 bp, Homo sapiens
gagagactacgcaggaaagccccagccacccatcaaatcagagagaaggaatccaccttcttacgctatggcagcaaaacaagctatcgatcagggaaga

SEQ ID NO: 267138 - DNA, 101 bp, Homo sapiens
ccccaggtgatgcctgaagctcaagggactgtgtccaccctcaggtgatgtgtccaatctagatcccaacttctcatttgaaggcaccaaactggatgtgg

SEQ ID NO: 267139 - DNA, 87 bp, Homo sapiens
ggaagaggaggcggaaaaggacgcaaagttctccggcgagccactgaggcggctcccagctgcgttggcgacatggccgacaccccc

SEQ ID NO: 267140 - DNA, 90 bp, Homo sapiens
ctggctttaggtgaacgacgtggctgcgtgggcatgtggcagtgcgggggctgtccaagggctttggcctggccacccaggaaccctgga

SEQ ID NO: 267141 - DNA, 88 bp, Homo sapiens
agcacctcctcgccagcagccgtccggagccagccaacgagcggtactgcttctccgagatggccccagtgtgtgcggtggttggagg

SEQ ID NO: 267142 - DNA, 98 bp, Homo sapiens
gcctagcgtcctggaattacttcaatcaaatggctcggacttctggaagtcagtgcacttcactgactacagccagcacactcagatggtcatggccc

SEQ ID NO: 267143 - DNA, 83 bp, Homo sapiens
tgaaggttgtccttatcagcagatcaaaggataaacttgaccaggtttccagtgaaataagaggaggacttcatccaacccag

SEQ ID NO: 267144 - DNA, 100 bp, Homo sapiens
gagagacgtcgctgaggggcttgcctgaagcgagggaatttttccctagattggtgtaaacagccagacgtgggccttcccaaacccgacctggtcctgt

SEQ ID NO: 267145 - DNA, 83 bp, Homo sapiens
ggtccccgcaccacctcctgctgccttcccgtcgccgctcccgaagcttttccaggatgggagtcccagcttctggagacggg

SEQ ID NO: 267146 - DNA, 74 bp, Homo sapiens
gaaaatgagcagatactgaatgtaaaccctgcagaatctgaattatccagaacagaaagttgtgactgttggac

SEQ ID NO: 267147 - DNA, 101 bp, Homo sapiens
tgttaccatgacttcatacaattgcagttacaatatacccatgatggctgtgagctttgggcaggttggagtaatagatttttccctctaccttaaggatg

SEQ ID NO: 267148 - DNA, 82 bp, Homo sapiens
aggaaactatggcctccaggcttccgacggcctggtcctgtagtttattaaccacttaacctctcagaactgaacaaagaca

SEQ ID NO: 267149 - DNA, 90 bp, Homo sapiens
ctccagtgcctccgacgcctcctgatgagctgtccgtggcacagtgcacgcagcggcccgtggacatcgtcttcctgctggacggctccg

SEQ ID NO: 267150 - DNA, 90 bp, Homo sapiens
tctgtctgcctgtgtccctgaccatggctccctgcagtaccctttaacgctgaagacttacagtgagaaactggacaaagagcaagcagc

SEQ ID NO: 267151 - DNA, 98 bp, Homo sapiens
ctaaatcccatgcacggagtgccctgtcctgccggagccgctgtgtgcaaagttcctattgatggtccccccatagctatagaaagcgcaattggtgg

SEQ ID NO: 267152 - DNA, 88 bp, Homo sapiens
ggggcgcgggcggcggacagattgaccttcagagcgagggaagaaggccgtgctgggttccagtcctttcctgtccgaggccaatgca

SEQ ID NO: 267153 - DNA, 87 bp, Homo sapiens
ttcccatggtacacaatggttatggatttttctaccatatcagagatgacaggttgtttacattcagagctctatcaataagaggaa

SEQ ID NO: 267154 - DNA, 80 bp, Homo sapiens
acctcgacgtcttgcctgtgtcccacttgttcgcggcctataggagaatggggtactaagagaaaagcacgaagctgtgg

SEQ ID NO: 267155 - DNA, 82 bp, Homo sapiens
catcgtaacaacccagcctcaggaagagatggggcaaggccagaacgaaacattagcacaacaccccgatcccccaaggagg

SEQ ID NO: 267156 - DNA, 75 bp, Homo sapiens
ggttgtgcgaaccccgggcagcccgggaaatctccaagtcagaaaggccaaagaagcccaggatgacctggtgaa

SEQ ID NO: 267157 - DNA, 50 bp, Homo sapiens
gttttcaggccacaaatgctttcacagggagttctgtccaacatctcttc

SEQ ID NO: 267158 - DNA, 117 bp, Homo sapiens
ctcagatgcttttgaccagaagttctcaaaggtgcctaccaaggtcaaaggctatgacaacctctttgctatgggccaattcctgtccccccagcagcatggcatcgtgtgctgaac

SEQ ID NO: 267159 - DNA, 100 bp, Homo sapiens
caggaacctgggcgagcagcggcgggggcccgagggagatgtggtactggatcttcctctgggctctcttctcttctctgtttgtccatggtgctgcagg

SEQ ID NO: 267160 - DNA, 131 bp, Homo sapiens
ctgatggatcttttcaggaagctattatcagcaagttgacagatgctagttggtataccgtggtcaccaggagactaaagtccatcaaaaacatccagaaaattaccaagtctatgaaaatggtagcggca

SEQ ID NO: 267161 - DNA, 73 bp, Homo sapiens
cggcccacagtgggggtgtgcaaacccgagagaactggatggagatggacacatggatcatttactgccaggc

SEQ ID NO: 267162 - DNA, 75 bp, Homo sapiens
ggagccattttgagcaatggggaacgctcacggactgtgtgatcccagccatcatgtccatagagaagatctggg

SEQ ID NO: 267163 - DNA, 117 bp, Homo sapiens
agaccgtggacaatgtgctctttgcccctattatggagaaaggtgttccctaggtgcaaatatatacagagcttcataatcagcccaagaccacatagagcaaacatgaatgatatt

SEQ ID NO: 267164 - DNA, 82 bp, Homo sapiens
acccgcgccgcgagggctccttccctcaggtaagtaaggaggtctctgtaccatggctcgtacaaagcagactgcccgcaaa

SEQ ID NO: 267165 - DNA, 83 bp, Homo sapiens
gtcctgagcggccaggacgacgaggagcagggcctgactgcgcaggtgttggagagcacaatggctgaacaagtccttcctca

SEQ ID NO: 267166 - DNA, 74 bp, Homo sapiens
ggaaatctaccaggaggtccattcgactgccagaaaccattgacttagggggctgcagtcttgcagtgatatct

SEQ ID NO: 267167 - DNA, 101 bp, Homo sapiens
ttttccccaattcagcagagaatattttcaaggggggtgctccatacttgcttgcagtgcctacgtggctctggctttgggtgataacctcatggctttga

SEQ ID NO: 267168 - DNA, 89 bp, Homo sapiens
gggaaatcgtgcacatccaggctggtcagtgtggcaaccagatcggtgccaaggtggtcagaaggcgcgagttgtgtttgctgagctgg

SEQ ID NO: 267169 - DNA, 90 bp, Homo sapiens
catccaggtctcctactaccactgcatctgtgtcagcaacagcagctccaaggaggcctgtgcccttcaatattacttcttgatactgtg

SEQ ID NO: 267170 - DNA, 98 bp, Homo sapiens
tctaggagacgagagagcgaacgccagggaccctgtgcaggcctgctcctccgtttgcaaggttttcttccacccctgagatggcaagaccagcccct

SEQ ID NO: 267171 - DNA, 98 bp, Homo sapiens
ccgccctgcgccccgctctgctgtgggcgctgctggcgctctggctgtgctgcgcggcccccgcgcatggacccacgcagaggccgtcggacaacagt

SEQ ID NO: 267172 - DNA, 83 bp, Homo sapiens
tggactcttaggtgttctgcggttaaatcttggtgggaaggatacgagcaagataaagcagcgagggatttaagtctggcaac

SEQ ID NO: 267173 - DNA, 100 bp, Homo sapiens
gtgtccatggacagagactaccacgtggcatgttaccactgtgaggtcgtcctctcagcatgggggtcccgcggcctcagccctgggcgctggggctcct

SEQ ID NO: 267174 - DNA, 100 bp, Homo sapiens
cgaaacaagtctcgatttcgttctgcaaacaatgtcaaagacaggagacaatttatccagcatgttgctagaaaatctaactgataatgaaagtgaaaat

SEQ ID NO: 267175 - DNA, 75 bp, Homo sapiens
cacccgaatgctgcccgggtgagtggattgtattacacagagcatgaatatacttctttaggttacacgcatggg

SEQ ID NO: 267176 - DNA, 50 bp, Homo sapiens
tgcatcccgggctcggctgtaacccagcgggtgccgcttctccacccgag

SEQ ID NO: 267177 - DNA, 88 bp, Homo sapiens
cgggagacccaggaggagcccgcagggctctgccagcagacagccttggcacacaggcacaagggctggagcccagagatgagagtgc

SEQ ID NO: 267178 - DNA, 100 bp, Homo sapiens
cttggccaacctccggattgagaggaggaaacagctggaggagatcctggagatgaagaccgccgggagagcctgcccacctccccaccctggacgccgg

SEQ ID NO: 267179 - DNA, 90 bp, Homo sapiens
ggaagttgtgttgtcagagaataagagccaggactgtctccagtttggtcctcctgctgaaggggaagtggtccaagtgagatggacaga

SEQ ID NO: 267180 - DNA, 75 bp, Homo sapiens
acggagcataggaggaaaattcatcatctgtacaaacgtgtttgcaagcaattaagtttatcctgccaaaagaaa

SEQ ID NO: 267181 - DNA, 75 bp, Homo sapiens
gattcacgggacctttgaaatacagtaaatgggcagaggtggaggagacactgaagcgactgcagagccagaagg

SEQ ID NO: 267182 - DNA, 128 bp, Homo sapiens
ggcgggaacgattgggctgagcagaggacgacatgttgcttttcgtggaggtatttcagtgtctgtagacaagatggaatcatctccatttaatagacggcaatggacctcactatcattgagggtaa

SEQ ID NO: 267183 - DNA, 75 bp, Homo sapiens
gttcctggtcatacaccagtactaccaaggacagcttttttcctgcaagaaagggctattgcaagacacgaagtc

SEQ ID NO: 267184 - DNA, 82 bp, Homo sapiens
cctcaactttctgggcgttcatgatcctggccagcctgctcatcgcctactgcaagcctcagctcaaaggcatcgtcaccaa

SEQ ID NO: 267185 - DNA, 100 bp, Homo sapiens
gaagaatcgtttggtctcctgccgtgcccgaggagctgatcacgcagtacctggctgagcttcggaaccccgaggagatgactcgctgtggcttctcgtt

SEQ ID NO: 267186 - DNA, 82 bp, Homo sapiens
cccgcgctggtgcagccaccctcgctccctctgctcttcctcccttcgctcgcaccatggagaactacgatgacccgcacaa

SEQ ID NO: 267187 - DNA, 75 bp, Homo sapiens
gccggccctcggtgcgcccggccgcctgcacccccaggccaaatttgagtttcatcatggtgactatgaaaaaca

SEQ ID NO: 267188 - DNA, 75 bp, Homo sapiens
tacattgaagctgcatataaaactgctgtacaggtttgcagattccgccagcagcacagcaagctctacagatga

SEQ ID NO: 267189 - DNA, 75 bp, Homo sapiens
attcttgtgggtggcatgactaggatgcccaaggtcagtttaggggctggtgcaaaggatgagttgcacattgtt

SEQ ID NO: 267190 - DNA, 73 bp, Homo sapiens
acatgaatacatttcccaccttcaaatttgaagtttatgatgtctctggagcagcaagtgacagaaattgtgt

SEQ ID NO: 267191 - DNA, 100 bp, Homo sapiens
agataaaagtcctgaaacagttttgcagtcgctttctttagcttgcccatggtgatgtgaagatgagaagaaatagcaaggcccaaccagttcttcatct

SEQ ID NO: 267192 - DNA, 100 bp, Homo sapiens
agcgaggcagctgtactaggactgggaacggggcgaactttctgaccaagtatacaactacccagagggcctaggagaagtgctgtatagagagcagttc

SEQ ID NO: 267193 - DNA, 90 bp, Homo sapiens
ggttgtggtcctggccaagagctacaatgagcagcgcatcagacagaacgtgcaggtgaatatgaccatctcccagaacaggccttctat

SEQ ID NO: 267194 - DNA, 75 bp, Homo sapiens
gccgatgcctggcatactgcataaatggaagcagggtaccgccaaaaagaagctctgtgccctctatgggaagtg

SEQ ID NO: 267195 - DNA, 49 bp, Homo sapiens
tcatcctgctggcatactttgtggttttagaaagagcgttttcgctacg

SEQ ID NO: 267196 - DNA, 100 bp, Homo sapiens
ccattcctgatgacttcaagaatgtttttgaccagaaaaccgacaaccttcccagaaagtccaagctcgtgtatcaccttttgccatgatagcatttctt

SEQ ID NO: 267197 - DNA, 100 bp, Homo sapiens
aagtgcagacagcagcttcatgatattactgtaccgttagaagtttttgattgatattcactgatggactccaaagaatcattaactcctggtagagaag

SEQ ID NO: 267198 - DNA, 75 bp, Homo sapiens
cgtttttcgccgtcatgggcgcctcggccgccatggtcttcagcgatgcagcagcttttttatgagaattacgag

SEQ ID NO: 267199 - DNA, 100 bp, Homo sapiens
ctgctgtatgaataatagataagcgtcttgaataacatctgaatttcctaggacagtcattttgtttactcattcagccctgttgcaggtcccaataaac

SEQ ID NO: 267200 - DNA, 75 bp, Homo sapiens
ggggctcagagatccaagtgcgcgccctggcgggtccggaccaagtttctctacaataattggagttggtgttgg

SEQ ID NO: 267201 - DNA, 90 bp, Homo sapiens
gaaacaaggcttccagtgccaaggtggtcttcaagctgacagagaagctgacggaacagaaggagtggatgaagatataattgtgaccca

SEQ ID NO: 267202 - DNA, 92 bp, Homo sapiens
agccatgacgacagtgtggaggggcccaaggaatttccccaggagaagatgtgtctgcggctcttcaggctggagtgcagcggcacaatctc

SEQ ID NO: 267203 - DNA, 75 bp, Homo sapiens
gttacaaccacctccaaggggcccaagagagctggaattctataatatgttgagacgggagaagattgaccttga

SEQ ID NO: 267204 - DNA, 73 bp, Homo sapiens
tcacggctcttcactgaggtgctggatcacaatgaatgtctaattatcacagcccttgaagataaggatggtc

SEQ ID NO: 267205 - DNA, 99 bp, Homo sapiens
ctacaggtgcttgccactatgcccaactaatatttggaattttcgtatacgtggattccagaggggtgacagcgaaatcccttacgtcgtcctgactca

SEQ ID NO: 267206 - DNA, 98 bp, Homo sapiens
aaggggcgtctgcggctctccgccgtccccagccctgcctctccctgggctctgatcccagcttctgcagtggaaatgcctggttcagcagatgtcac

SEQ ID NO: 267207 - DNA, 82 bp, Homo sapiens
gacattgtggacagtgacagcgatgctgaggatcgaggaacgttgtctgaaaaacctatacctgctgaacgccaccgagggt

SEQ ID NO: 267208 - DNA, 100 bp, Homo sapiens
gaaggggaagaggcccaccctggagtaaccctcactggagaatccagagggtcgggaacttctggcttctgctccaactggatctggaaaaacattagct

SEQ ID NO: 267209 - DNA, 75 bp, Homo sapiens
gaggagcggaccgaccgctccaaggagtggacgcttctcttgtgagccagctggaggtcttacctctttgactga

SEQ ID NO: 267210 - DNA, 74 bp, Homo sapiens
ccggagctagctggatcctctaggcagctgagtcagtgctgattctctcaaatagagcttgaaggataaatctt

SEQ ID NO: 267211 - DNA, 75 bp, Homo sapiens
atctggccgccgccgccgcgagcgctcccgtaagactttgaccccgacgcaggcttcagtgattgccgcggatca

SEQ ID NO: 267212 - DNA, 83 bp, Homo sapiens
cgaggacagatcctgggtgttcgacagctacagcctgacagggatggacgggacagaaggcagtgccgggcagcccggccccg

SEQ ID NO: 267213 - DNA, 75 bp, Homo sapiens
gggggcgccctggaggagtccctgaagatctatgctcctctgtacttggggttcatgtgggatgtggctgaggaa

SEQ ID NO: 267214 - DNA, 75 bp, Homo sapiens
agtgcaggtggctcctggaagaccctcagggcaacaaccttcgggctgcaggggccgaggctctgggaaaactcc

SEQ ID NO: 267215 - DNA, 75 bp, Homo sapiens
cgccaagagaagaatctaacaaacggcaaagaacttactgattcttgagcctgtttctggaccagtacagagcca

SEQ ID NO: 267216 - DNA, 97 bp, Homo sapiens
tgttcacgcacgggatccagagcgccgcgcacttcgtcatgttcttcgcgccctggtgagcgagtgctgtgctttcatgggcctcttctttatgaag

SEQ ID NO: 267217 - DNA, 74 bp, Homo sapiens
attttccctcctcaaactgactttgcagccacggagagcgcaaatctgtccaaggctgcctggggagcattgga

SEQ ID NO: 267218 - DNA, 98 bp, Homo sapiens
agactgtccaggcagccaggttaggccaggaggaccatgtgaatggggccagagggctcccgggctgggcaggtttgggatgtacattccgttcctgc

SEQ ID NO: 267219 - DNA, 75 bp, Homo sapiens
ctgcgcctccgcggctgccctgcgccagccgctgccatggcccagacactgcagatggagatcccgaacttcggc

SEQ ID NO: 267220 - DNA, 78 bp, Homo sapiens
cgaggagaagcgcagcgacggcgtcgggagagcgcgcctagccggctcgcgattgctctaggtcgtaaccagcctttg

SEQ ID NO: 267221 - DNA, 90 bp, Homo sapiens
tctaatatgagcagcatggtagttacaggaccttgaagtggagtttgattcttgtatgattgagcactgtcttagtgcagtggaatgggc

SEQ ID NO: 267222 - DNA, 50 bp, Homo sapiens
gccgccaccacccactccggacacaggctggggccgggctggcggggccc

SEQ ID NO: 267223 - DNA, 100 bp, Homo sapiens
cctgcgggtgcctttgaaaatcaacgacaacttgagcacaggtactccaaagattcaggtttactcacgtcatccagcagagaatggaaagtcaaatttc

SEQ ID NO: 267224 - DNA, 98 bp, Homo sapiens
actcccaggctcaagcagtcctaccatgtcagccttcccagtagctgggaccacaggaggatttgacagctaaggatattgaagaaattattgatgag

SEQ ID NO: 267225 - DNA, 80 bp, Homo sapiens
aaggactgatcaagaaacacagctaggacattcactgaacaatgccagggatacaagtgccatggatactctaccgctaa

SEQ ID NO: 267226 - DNA, 52 bp, Homo sapiens
cccgagtacgtctacagtcagccttacgtctgcaggtgtacccaacagctcc

SEQ ID NO: 267227 - DNA, 100 bp, Homo sapiens
ggatccacgttcagaagctgactctgcaggcaagaccgacgttattttcctggtggctgtgttcaaaaccacccaaagatggtgtcggacggcatgacag

SEQ ID NO: 267228 - DNA, 87 bp, Homo sapiens
atggcctctcctggactggctgcgtgaccccgacggctgcttctgggtgctggagaatctggtaaaagcaccattgtgaagcagatg

SEQ ID NO: 267229 - DNA, 99 bp, Homo sapiens
ccgagactgcagaggcgaagtgcgcggcgcccaggcctcccagcagcagtcccgagcagaggtcaagagacaactgcctttgaaagagagtgagtgact

SEQ ID NO: 267230 - DNA, 76 bp, Homo sapiens
aggtgtggacagaaacacttatcgagaatgcaagttctagccggtttttcctacaaggaatccagttgaatacaat

SEQ ID NO: 267231 - DNA, 85 bp, Homo sapiens
ccagttcctagctgaaaaaggtgatgtacaagcacaggatgccgaggaatttcccaacctggcagttgcatctgaaagaagagac

SEQ ID NO: 267232 - DNA, 75 bp, Homo sapiens
aatgactggaaactgattggaaactctttgggaaagccactcgaaaaggtgcagctcagtggaagatgatgacaa

SEQ ID NO: 267233 - DNA, 83 bp, Homo sapiens
cacctccattggatttaaaagacagtcctcgtcagcactgactttcagctatggaatcgtaatctcaggggcgatataatcaa

SEQ ID NO: 267234 - DNA, 80 bp, Homo sapiens
ccggcggggagcgccggagttccttgtggccgacgtgcaccaagaccctgtttgggaagatgatggactacctgcagggc

SEQ ID NO: 267235 - DNA, 100 bp, Homo sapiens
gacagctctgcggctcgggccctgagatgatgattattctccaccgtctaagagaccaaaggccaatgagctaccgcagccaccagtcccggaacccgcc

SEQ ID NO: 267236 - DNA, 75 bp, Homo sapiens
gcagaacgtgagggtgtaacttacaaaaagaacccagcgggtgccgcttctccacccgaggcttccacctccaac

SEQ ID NO: 267237 - DNA, 100 bp, Homo sapiens
aatgctgggatcggttcctccaggagaagttagcttcagagttctttgtggatggacttgattctgatgagagtctgttctctggggaggcagtaagggg

SEQ ID NO: 267238 - DNA, 89 bp, Homo sapiens
gcttactggtgaaggaatgggacaagacccatctttatgcaaagccagcgttacagtaatgttccaggaatagctattcagtcagacag

SEQ ID NO: 267239 - DNA, 97 bp, Homo sapiens
gcaggttttggactcgctgaagcggaatccctaacactggaggatgtggctgtggacttcacctgggaggagtggcagttcctgagccctgctcaga

SEQ ID NO: 267240 - DNA, 74 bp, Homo sapiens
ctgcgtgaggcctttgaaaatgatatgctggctgttaacagtgatgacagacctaatgctctattaagttcacc

SEQ ID NO: 267241 - DNA, 74 bp, Homo sapiens
ggaaaactcgggctggcaaaaaattaacaactttagtgctgacatcaaggtcaataactgggagatggacaaac

SEQ ID NO: 267242 - DNA, 98 bp, Homo sapiens
ggattccctgctcagtgccctgagtctcaatgaagagcttggaagctcgaagtctggctgtggccatgggagatacagtagtggagcctgcccccttg

SEQ ID NO: 267243 - DNA, 82 bp, Homo sapiens
cgcccgccgccgagccgtctcctgcagcggcccccgccgggtactccaaagattcaggtttactcacgtcatccagcagaga

SEQ ID NO: 267244 - DNA, 83 bp, Homo sapiens
gtccggaggcgctgttccagccttccttcctgggtactgggcctaatcgctacgtgcctctttggctatgatgcctatgtcac

SEQ ID NO: 267245 - DNA, 100 bp, Homo sapiens
agcggcggatggggcacgcacagagtgcaagacgctgagcaatgcaggaccctgatgcttggtgtgacctgagtaaatttgacctccctgaggaaccatc

SEQ ID NO: 267246 - DNA, 90 bp, Homo sapiens
gcccggttcttcctgatgcagactgccgtccactagaggctggacaggaccccccgagtttaattggttggggtcagataagaagaggag

SEQ ID NO: 267247 - DNA, 100 bp, Homo sapiens
ggaagattcaaacaaccaaccctgatttcctgcttctccttttcatgagtgttcctgtggtctctgcacctcctttctcgtcgtctcggagatgcagcca

SEQ ID NO: 267248 - DNA, 76 bp, Homo sapiens
cgccgacagcctggcgcgggcagagccgctggacaaggtgctgcagcaggcctacgagaagcagcggggcacccgg

SEQ ID NO: 267249 - DNA, 96 bp, Homo sapiens
cggctgccgcctgctccccggaaaagggcactcgtctccgtgggtgtggcggagcgcgcggtgcatgctttaaggatttttatgaactggagccag

SEQ ID NO: 267250 - DNA, 90 bp, Homo sapiens
cctgcctgctcacagcggggcgcccctgcttgtggaggagaatggcgccatccctaaggtgtgtgcagtggcctcagggatccggaaagt

SEQ ID NO: 267251 - DNA, 83 bp, Homo sapiens
aagtgatgttggagaactacaggaacctggaggctgtggagacatgcgctggaacaagggaaccatcttaaaagcatccgtgg

SEQ ID NO: 267252 - DNA, 50 bp, Homo sapiens
gaggactcagaccagtctctgcaagagagctgccgttatactgttctggg

SEQ ID NO: 267253 - DNA, 83 bp, Homo sapiens
cgacctccaaggatgcccgtgagcctgttgtcggggccagggcgaccattgacgaggtggagacggacgtggtggagattgag

SEQ ID NO: 267254 - DNA, 109 bp, Homo sapiens
tcgcccgggtcctcctagaaattccccccgaagaagactcccccacatctgggcttgggcactgtttaaaggaaagttccgagaaggcatcgacaagccggaccctccc

SEQ ID NO: 267255 - DNA, 75 bp, Homo sapiens
ggctgtgccgaggcgcccaactcagggatacccacccaccatcccagggtctacaacatccacagccggaccgtc

SEQ ID NO: 267256 - DNA, 75 bp, Homo sapiens
ggacaagagacgatcattctgcaagcaggcaacctgaatacagtgacctgaccaacggtgcagatgggatgctgg

SEQ ID NO: 267257 - DNA, 80 bp, Homo sapiens
cctggctgccttgagaggtcacttctgcctttccagtgacaaaatggtgtggaaaactaggtgtctgtgttcactccagg

SEQ ID NO: 267258 - DNA, 100 bp, Homo sapiens
gagaatgtccccatcatgtacatctgccatgggatgacgcctcaggtcttacttatccgagcccagacattgtataagaagtttgtgaagtcaactggct

SEQ ID NO: 267259 - DNA, 100 bp, Homo sapiens
acgccggctgcgacagttacagcagctacagcagctgcgagacagtggcgagaaggcaaagtgattggaaagaacgggaaagtgatccaggagattgtgg

SEQ ID NO: 267260 - DNA, 76 bp, Homo sapiens
tctcgggatgattataggcgtgatgatagaggttgtctaccttcataacaacaatatctctgtagttggatcaagt

SEQ ID NO: 267261 - DNA, 100 bp, Homo sapiens
tggcagatggcaacagaggatgtcaacaattttttggagaaaatgcatccgatgcagatttatggctcctgaacagttgcactgtaaaaaacccagctga

SEQ ID NO: 267262 - DNA, 100 bp, Homo sapiens
gttgagggccctcgatgtgatacctgccgctctggtttctactcattccctatttgccaagtgacagccccaatgctgttcatgaggtggagaagtggct

SEQ ID NO: 267263 - DNA, 75 bp, Homo sapiens
atacaacacgattcttctaatggatgggaacatgggtctaacaaagtgccagtggtgcagcaccctcaccatgtc

SEQ ID NO: 267264 - DNA, 100 bp, Homo sapiens
catttctcctcctttgacagggacatcagtggagccttctcagacccacaggtcctcagccagcagagccacgttccttatgagcaccgtgggtttattt

SEQ ID NO: 267265 - DNA, 75 bp, Homo sapiens
tctgccggctgctccgcaccccggggtcccaggaagggcggcccagctcctctggtgcaagtgtggtagctattg

SEQ ID NO: 267266 - DNA, 98 bp, Homo sapiens
atccaccgggtccatttgatagcctagaagaaagcaggacttatcagatgtagacttcctagatgattcttcaacggagagtttgcttctgagtgggg

SEQ ID NO: 267267 - DNA, 116 bp, Homo sapiens
ttcaccttcagatgcgcggggcgtgcgcgtcctcctccccaggcccgccgcctccctgccaagcatcaagatggtgctcatgtggaccagtggtgacgccttcaagacggcctact

SEQ ID NO: 267268 - DNA, 100 bp, Homo sapiens
aaaaacaatagctcaaggaaacctttccaacacagatgtccaagctgccaaaatggggaatgcatcagcaacccccacacccccctccagatcagccatg

SEQ ID NO: 267269 - DNA, 96 bp, Homo sapiens
ggcattgcatccacaggaggggcaggaaattctttgaaggcccgatttcccgccaaccactcggggcgacctcgggtgcctcgctgaagacacagc

SEQ ID NO: 267270 - DNA, 76 bp, Homo sapiens
gccgccgccgcctcggggacctttgcggggaggcctcaggtccacctcattcatttaaccgagatgagacaataat

SEQ ID NO: 267271 - DNA, 100 bp, Homo sapiens
ggccataatcgtcctcaccaagtctggcaggtcacgcatgaagggagcaccgtggagaagacagtggcccctacagaatgttcataggttctcaaccctc

SEQ ID NO: 267272 - DNA, 82 bp, Homo sapiens
tggctgtgcgcgctggcgctgagcctgcagccggccctgccgacgagccaaactcaggctgtaccttgagcagctcaagcaa

SEQ ID NO: 267273 - DNA, 83 bp, Homo sapiens
agccccttaaatgccgcaccctacggcatcgaaaggaatggtcctcgtccgaagtgagaatgggcagttgttaatgattcctc

SEQ ID NO: 267274 - DNA, 100 bp, Homo sapiens
tgctgagcccgtccgtccgccgccaccacccactccggacacagggaagatcagttttcctgccatccaggctgctccctccttcagcaactcattccca

SEQ ID NO: 267275 - DNA, 100 bp, Homo sapiens
cacatggtaatgggtacaacaaatcaattctccacaagaacacggcttgaagagtgtaaagaaagaatgaggcctgttaaagcagctttgaaacaacttg

SEQ ID NO: 267276 - DNA, 100 bp, Homo sapiens
ctgcagaaggtctctggagacatcttcagcagggagttctgggaaatcgttcattcatttacagatgaacagaaaagactcttcttgcagtttacaacgg

SEQ ID NO: 267277 - DNA, 88 bp, Homo sapiens
tgggaaagggccggaaaacacacgttcctccgaaaccggtttgcaagtccttgtagaggaactgtggaaggtgcatcagtgaagaaat

SEQ ID NO: 267278 - DNA, 100 bp, Homo sapiens
ccctggagcgacgacggccgctgcctaagctggaaaaaggaaaacgacagattcctttaaatgagcaattcctcagcaagtgccctaatgcagatcttaa

SEQ ID NO: 267279 - DNA, 74 bp, Homo sapiens
tgaagctctgctgccccgcaggcaccttcgggccctcctgccttctctctggcatctctatcccctatgaggca

SEQ ID NO: 267280 - DNA, 100 bp, Homo sapiens
tggagagtcgtgcggacagcattgggagcggccgagccatcccaattaaacagagtctgaagcaagagcactggccaaagagaggcagaaaaaggacaat

SEQ ID NO: 267281 - DNA, 82 bp, Homo sapiens
aagagtgttgagcagcccatcgtgcttaaagaagggttgtggcagcactgcctgaaggtatgagaccagattctaatcttta

SEQ ID NO: 267282 - DNA, 75 bp, Homo sapiens
cagggatcaaaactcattcgaaaagctaaagaggcaccattcgtacccgttgagtgaaccagaggaaatgcctcc

SEQ ID NO: 267283 - DNA, 83 bp, Homo sapiens
agctaaagcagcgtgcgttcagccctggggatttttttcccaggaagccatcccgtcagaggggttcaagtgatgaaagttgg

SEQ ID NO: 267284 - DNA, 100 bp, Homo sapiens
cttagagaaagccaggatacatcagcagtttcttatcaccacaggagaaaatctagattatcttgatggtgtccatacggtgtttggtgaggtgacagaa

SEQ ID NO: 267285 - DNA, 75 bp, Homo sapiens
gcaaacgaaaaagaacgacatgatgcaatcttcaggaaagtaagagggtcgtagttcccccgctccctgggaaag

SEQ ID NO: 267286 - DNA, 75 bp, Homo sapiens
ctgaattgtgctgccttggccaaaagagccttcaagatggtcagcaaggccagcagtccacagcccaggtcaaag

SEQ ID NO: 267287 - DNA, 75 bp, Homo sapiens
cagccgcctgaccacggcgactggacttacgaggagcagtttaagcagatgatatcatcaagttgaatcgaaagg

SEQ ID NO: 267288 - DNA, 98 bp, Homo sapiens
cggcggcagcggcggcggcgcccgcgggtggtataaaatggcggatttcgaagagttgaggacacgagacgacttcctgggccaggtggacgtgcccc

SEQ ID NO: 267289 - DNA, 98 bp, Homo sapiens
tacaagtgctcctgcaagcctggctaccaaggggaaggcaggcagtgtgagggtgctggagaatctggtaaaagcaccattgtgaagcagatgaggat

SEQ ID NO: 267290 - DNA, 75 bp, Homo sapiens
taagacagtttaaacatctcccagatgcttcttggacacttaatgattgttggcaagaaatgtgctgctgatctg

SEQ ID NO: 267291 - DNA, 83 bp, Homo sapiens
cgtgtgtacttatcctggatgatgccaccagtgccctggatgcaaacagccagttacagctcaaaaagtttccaagaagacag

SEQ ID NO: 267292 - DNA, 98 bp, Homo sapiens
tcaactaacctccacacaatggtgttcgcattttggaaggtctttctgatcctaagctgccttgcagaccgagacatgggtgcccggcaccgcgcccg

SEQ ID NO: 267293 - DNA, 100 bp, Homo sapiens
gttgctctgtgtgctgagcgttctaaaggaaggcgtccgttggccttcgtacccgtcttgattgagaagacttgcactatctgccagatgctgcttccta

SEQ ID NO: 267294 - DNA, 80 bp, Homo sapiens
aaggtcttcagcggggcgctccaggaggcactcacaggaacaagatcactcaaggtgaaggataatctactaataccagc

SEQ ID NO: 267295 - DNA, 100 bp, Homo sapiens
gaccgccaagaaaggcagcgaggtggagagcggaagtgcacggctgtctataacgtgctgccgggtctcaggatggaggagtgaagtctcctgtcgccgt

SEQ ID NO: 267296 - DNA, 50 bp, Homo sapiens
ccactctttgtgccgcagcttcgcagtttcagtcattcagtcagtaccgc

SEQ ID NO: 267297 - DNA, 98 bp, Homo sapiens
cgcctccccaactcgggtaaagctcctcggcctcggcgtgctgcgcctccgcggctgccctgcgccaggcatggaagaggagatggttcgtgttacgc

SEQ ID NO: 267298 - DNA, 51 bp, Homo sapiens
cgaggcgattgcgggggcctgggctagggtgaagttgaacaaattgctatg

SEQ ID NO: 267299 - DNA, 73 bp, Homo sapiens
tgccagaacagaacactattcacaaagattgcctgcagtttattgatttcacagagatgatgagagccctggg

SEQ ID NO: 267300 - DNA, 100 bp, Homo sapiens
gccgctccgagtggaggcgactgggggctgaagagcgcgccgccctctcgtcccactttccaggcttatgtttgggacaataataaggatctggcggagt

SEQ ID NO: 267301 - DNA, 100 bp, Homo sapiens
aaaccacagacatgactgagtcctccatgaagaccgagtcgtccggaaatccattgcccgtgttctcacagttattaaccagactcagaaagaaaacctc

SEQ ID NO: 267302 - DNA, 131 bp, Homo sapiens
gaggtccgggcttggagttcgcctcagacgcggtggagccgccggagtctgagaaggcgccccagcgggatcccagagaaggatctgcacagtgttatggcaccctacttcctgcagcaacgggacaccct

SEQ ID NO: 267303 - DNA, 100 bp, Homo sapiens
tggaaacagtcagagccaccagccaatgatcttttcaatgctgcgaaagctgccaaaagtgacatgcaggagttcaaagaaggacgcagagccagccaca

SEQ ID NO: 267304 - DNA, 100 bp, Homo sapiens
ttgacttttcaaaaggaagtggcagagttgtattccctgaatgactataaaccacccatttcgaaagcgaaaatgacccaaattactaaggcagccatca

SEQ ID NO: 267305 - DNA, 105 bp, Homo sapiens
ggaaattattttgggtcttcttcttaatcccatatctggacatctggaacatccatgttaagatcccagatgcagcttttattcaggcagcccgcagaaaacgtg

SEQ ID NO: 267306 - DNA, 83 bp, Homo sapiens
agaggatctcttctaacatccagaagatcacacagtgttatgacttcaaacctgcttctattgacacttcttctgaaggatac

SEQ ID NO: 267307 - DNA, 75 bp, Homo sapiens
agaattttatagaagtgaagtgattaagaattccttggtcctcagaatggttggaatgaccctccagctttgaac

SEQ ID NO: 267308 - DNA, 100 bp, Homo sapiens
agattgcaaggtgaataaagaagtggagcgtgtcctgaaggagttccaccaggccgggaagcccatcgggcctccggtgtggctgtctctgatggtgtca

SEQ ID NO: 267309 - DNA, 83 bp, Homo sapiens
gccattctcccatgtctactcgcaggcgtcatgttgggaatcgggcttgttttcctgctcagaacaaagtgacttccctgaac

SEQ ID NO: 267310 - DNA, 75 bp, Homo sapiens
atggagatgtcaacagagctatcaatgttcttctggaaggaaacccagacacgcaaactgaaaccgtgtcagttc

SEQ ID NO: 267311 - DNA, 115 bp, Homo sapiens
gggtcccagtgctctgtgaatggtgttcagatcgtggaggccacacatctaaatcaaggtcttaaagaaagtgcagaagagatggtcaaaaacaaattggaaggaaaggataaac

SEQ ID NO: 267312 - DNA, 82 bp, Homo sapiens
gaccacctggcagagaagttccggcagaaggcctccatccacgaggcctggactgacggctggtgagattggagagatgaag

SEQ ID NO: 267313 - DNA, 83 bp, Homo sapiens
ccgccttctctgtcagctctttccccgtcagcatcccagccgtgctcacgatataacacgtgggaaccggaggagaacatcct

SEQ ID NO: 267314 - DNA, 100 bp, Homo sapiens
gaactggcttcggatggcgtcccgcgtagacgcagtggcctccaaggtgcagacagctgtgactatgaagggggctaagtcctatcagccatggaaacac

SEQ ID NO: 267315 - DNA, 100 bp, Homo sapiens
atcctgagccaaggccagtggatggggctcccggacctggaggtcaaggactggatgcagaagaagcgaaggcggggagacaaccccttccccaagaatg

SEQ ID NO: 267316 - DNA, 100 bp, Homo sapiens
tttgaaaatatggttgcattctgtgcatttgggcaaaatgagccaattcttctgtatatttacgatttccatggaggtggaatttaattctcctcccctt

SEQ ID NO: 267317 - DNA, 51 bp, Homo sapiens
ggagaagcagcaattatcgtccgagcaggtcaaaatgcagatcttcgtgaa

SEQ ID NO: 267318 - DNA, 96 bp, Homo sapiens
ccaaccagagattcatctttcatgcagtgacatgttgataaaaaatgatggtgacttaagagattaaaattaatttggttgctgttggttctgaac

SEQ ID NO: 267319 - DNA, 75 bp, Homo sapiens
ctacttcaaggataagggtgacagcaacagctcggcgggctggaagcccacacatcttgctgacttcactcaagt

SEQ ID NO: 267320 - DNA, 75 bp, Homo sapiens
cgggagatcccaggcggtgacagagtggagccatggctagaggtaatcacagacctggaggagcagctaaaccag

SEQ ID NO: 267321 - DNA, 100 bp, Homo sapiens
atcctgcgcatcactggctactatggctaccagccctgggcagcgagctgcaaaattgtcgagatgtccacagaaggaggatttggtggtactagcagca

SEQ ID NO: 267322 - DNA, 115 bp, Homo sapiens
atggctatatcagcaaggcagagatgctagagatcgtgcagctcggggagtacagacagtgaggaaagtacagactctgaagaagaagatggagcaaagcaagacttgtttgaac

SEQ ID NO: 267323 - DNA, 100 bp, Homo sapiens
tgacctcaaaggatttcagccacaggaaagcaatctcccgggcaggcctccagcatctggctcctgcacatcccctcagccttcctgtggcaaatggtcc

SEQ ID NO: 267324 - DNA, 98 bp, Homo sapiens
ctggcttaatttccctactccaccatcatcaacaaagtatttgtgtggaagtaatcgaaaagacaacatatttattgatcctggataccaaacatttg

SEQ ID NO: 267325 - DNA, 107 bp, Homo sapiens
ggaccacatagacatttacgcggatgtcggcgaagagttcaaccagaccagatgatgtgcttctgcatcgcactcatgatgagattgtcctcctgcattgcttcctc

SEQ ID NO: 267326 - DNA, 50 bp, Homo sapiens
aaggagggtcctctcagtgattaagctctacctacaaggactccaacact

SEQ ID NO: 267327 - DNA, 90 bp, Homo sapiens
gaagcagagccgttgtgtaaaagagctctggaaatccgagaaaaggtggaagaagagcccgaagaagaacctgaagagacagcagaagac

SEQ ID NO: 267328 - DNA, 80 bp, Homo sapiens
cccatttttattgaaagatgtattgagtacattgaagccacagggccttcatcctagaataatcactgaaggatttgaag

SEQ ID NO: 267329 - DNA, 75 bp, Homo sapiens
cccagtttaagattctggtcagcttgttagaagggagagaaggtacccaaagggaaaaagggaaaagctgatgct

SEQ ID NO: 267330 - DNA, 113 bp, Homo sapiens
ctatgagagcggacgggccatacccaataaccaggtgcttggcaaaatcgagcgggccattgacaatgcagatcttcgtgaagactctgactggtaagaccatcaccctcgag

SEQ ID NO: 267331 - DNA, 76 bp, Homo sapiens
ccgtcgcggagccggagggcgggaggaacatgacatcgcggagtttccacgggctcccttgctcagcagtatgcgc

SEQ ID NO: 267332 - DNA, 150 bp, Homo sapiens
gccattatttgacacaaagaagactgcaggagggacaggtttgagtagaaatatgaagagctcacccaagtggatgtgatgtacctgtgtggtctaagctggaatctggtcaccttccatccatgcaacaacttgttcaaattcttgaca

SEQ ID NO: 267333 - DNA, 90 bp, Homo sapiens
tcctgcctttaacacacctactgggattccttgggcaatggtgaatttgaaaagccatgctgtgacctacaagcaaactaaatagccaac

SEQ ID NO: 267334 - DNA, 75 bp, Homo sapiens
tcggctcagcctacgggagaagcaggaggaggtccggagactgcagcagttgctggatttgtgcgactcggtgaa

SEQ ID NO: 267335 - DNA, 100 bp, Homo sapiens
atggggtgaggaagattttgaagacaatcgtcacttatacaggtctcacagggatactgggtttgggcattgcggctcccaatctagccttttctcagat

SEQ ID NO: 267336 - DNA, 74 bp, Homo sapiens
gaccagtctgggggcgctggcggcctgcgcagccacctcaaggcctttaccagaagcattaaccgagacaagca

SEQ ID NO: 267337 - DNA, 100 bp, Homo sapiens
cccgcttcttccacctggctgacctcttcctgtcctcctcgcctcgaatggctacagagagaggaaatttggtgtttcttacggggtctgctcaaaacat

SEQ ID NO: 267338 - DNA, 100 bp, Homo sapiens
cgggcgctgcatgtgcaaagcaggcttcgaggccgttgagaatggcaccgtctgccgagtccctggccccacctcttctgccacaaacgtcagcatggtg

SEQ ID NO: 267339 - DNA, 75 bp, Homo sapiens
gtcatcgacagctgcaaggaggccgtcaccttcaaggccgtcagacaaggctggactctgtgaagctgagcagga

SEQ ID NO: 267340 - DNA, 75 bp, Homo sapiens
agccctcgcgacgcgcccggcccggagcccccagcgcagcggccgcggtttctgctttgggacaaccatacatct

SEQ ID NO: 267341 - DNA, 100 bp, Homo sapiens
tatttaaggatgaagaaaacaccggagcggacaggctgatgactcaggacgagattgaggagctgcgggccgagatgctggagatgcgggacgtctatat

SEQ ID NO: 267342 - DNA, 100 bp, Homo sapiens
gggctctgaaagctagaagaaaaggtgtacttgcaagaaacctcaggacttgagtaacagcaacatgatatcttaatgcaattcagacaatgtgtccaca

SEQ ID NO: 267343 - DNA, 100 bp, Homo sapiens
cggcagcctacccggctcactcaggttggattgaatgaacaaatgaaggctgttcgaaagagaaatgagacctctgttatcgatcagattggggaagatt

SEQ ID NO: 267344 - DNA, 51 bp, Homo sapiens
tgacactcaacaggattcccggattttatggaagaccttgggttatggaac

SEQ ID NO: 267345 - DNA, 98 bp, Homo sapiens
cccgggctgccagggacagaggccagcgcgctgcaacacaagatcaagaactccatctgcaaatggttatgagccttagagtttctgaactccaagta

SEQ ID NO: 267346 - DNA, 82 bp, Homo sapiens
gtccccggcgcgaagaggctggactcggattcgttgcctgagtgtcttgggacaaggtgcgcattcctggtgtgctgcagcg

SEQ ID NO: 267347 - DNA, 90 bp, Homo sapiens
tcaaaatcagacctctgtggcagcattttttccagaacacaaaagtttgcctatctggggcgcctggctcacgaggttggctggaagtac

SEQ ID NO: 267348 - DNA, 98 bp, Homo sapiens
aaggccaagtcactcacaactgggatgaagttgatcctgatcctaaccagattccaggctttcctgatcggaaaagatttggggcaggaacattaaag

SEQ ID NO: 267349 - DNA, 51 bp, Homo sapiens
cactgcgagtactgcttcaccagaccgagacaacacttggactcagttcat

SEQ ID NO: 267350 - DNA, 100 bp, Homo sapiens
accctccgtgggcacctggcaaagatctatgccatgcactgggggaccgactcaagccaaggccacctttgatgccatttctaagacctacagctacctg

SEQ ID NO: 267351 - DNA, 88 bp, Homo sapiens
tgatctgctgggatcctagagctggaacaggaactcaatgttcgaaaagttacactgtctacagataaaaacaagtatggcattcggc

SEQ ID NO: 267352 - DNA, 104 bp, Homo sapiens
cttagctgtgctcgcgctactctctctttctggcctggaggctatccagcagccaaggattgtcaccagtgaagaggtcattattcgagacagccctgttctcc

SEQ ID NO: 267353 - DNA, 94 bp, Homo sapiens
taagctaccagagaatcaagctatccaaatgcgattagttgatgtggcctgcaagatcatccgggcggcctgcagaaccacgcgcggctccgga

SEQ ID NO: 267354 - DNA, 74 bp, Homo sapiens
tgttagtgcgcctctaagatggcgacgcctttggcggtaaattcgggaggcaggtggaagtcatcataaagttt

SEQ ID NO: 267355 - DNA, 100 bp, Homo sapiens
atgtttatgcattaaagaattatgggttctacttattcatcttctagaccacagaagtaaatggtttgtctcggaaaataatccagaatggctactctga

SEQ ID NO: 267356 - DNA, 100 bp, Homo sapiens
ctatcgctaccctccgaagtccggtatccgttacagcactgatgtgagtgtagatgaagtaaaagctttggcttctctgatgacatacaagtgtgcagtg

SEQ ID NO: 267357 - DNA, 100 bp, Homo sapiens
aacagcccccgaaaacgctacgtgagctgggccctgggccagaggcagaaaacggacggaagaaaaggtctggccgaatgactgatggatactcaggaag

SEQ ID NO: 267358 - DNA, 100 bp, Homo sapiens
ctcgatccgcccacagacctcaaattcaaaggttatagttgaagtcctgcctaatcaacctgtgaagttagtacctaaaattaaaccacctacaccagct

SEQ ID NO: 267359 - DNA, 74 bp, Homo sapiens
gaaggcgctgctggagttccgcgacaccatcttcgacaacatcctcaagcactattcctgatcagagaactcca

SEQ ID NO: 267360 - DNA, 96 bp, Homo sapiens
agcattctccagggaaaggatgacatatttttggacctgaaacagaaattctggaacacctatatgattgggaaaatgaggtacgttagtgttcgc

SEQ ID NO: 267361 - DNA, 75 bp, Homo sapiens
aggcagggaggagaccggcacccagacaggtggcgaaggcagaggaaattcagcttgccgagaaatttgtgaaag

SEQ ID NO: 267362 - DNA, 82 bp, Homo sapiens
gaaggagaaataaccccacatctcttgacactagagctccagatgcccccctcggaagcctggagaacgggacaggaccaga

SEQ ID NO: 267363 - DNA, 82 bp, Homo sapiens
ctaacgctggccgacaacagcctggcgtccgccacggtcctgaacgaggctgtgggggccctgatgtaccacaccatcactc

SEQ ID NO: 267364 - DNA, 102 bp, Homo sapiens
gcaagcatgatgagatcaaccatgtgcagaaggacgggctctacgagtgcattctctgtgcctgctgtagcaccagctgccccagctactggtggaacggag

SEQ ID NO: 267365 - DNA, 74 bp, Homo sapiens
atgcgactcaaagctgcacggcagtctgtttatgaggaggactatcgggtctgtatggactttaacattattcg

SEQ ID NO: 267366 - DNA, 75 bp, Homo sapiens
tcctactcctccctcaactccctcatcggagcatcagatccatgctgctgctgactcggagccccacagcttggc

SEQ ID NO: 267367 - DNA, 73 bp, Homo sapiens
taagaacaaacaaagaaacactggagatattcagaaaattctgcttggtcagaatcgtgatggcattgtgttc

SEQ ID NO: 267368 - DNA, 75 bp, Homo sapiens
cgtttgtttctccaaggtttgaaaagcagctggcctgcaaggttgtggcagcactgcctgaaggtatgagaccag

SEQ ID NO: 267369 - DNA, 83 bp, Homo sapiens
cgggtgtctcgtgtgtgaacatcacaggattatattccatcacaacaagatattctgcttgccagaagacccaccaaaggcat

SEQ ID NO: 267370 - DNA, 83 bp, Homo sapiens
aatggaggccagtggctggtctcaggtggcagtagagaagagcatcacagaagttgctcaggagctgacagagctggtggaac

SEQ ID NO: 267371 - DNA, 100 bp, Homo sapiens
ttcctcctttagggattcctgacaaggagaacctggacaatccagatgagcaagcagcccagatcagacgagagctggatggacgtctacaaatggcaga

SEQ ID NO: 267372 - DNA, 50 bp, Homo sapiens
ctcaagtacaactcccggcacgaggccctcgggaccaaggatcacgtcat

SEQ ID NO: 267373 - DNA, 75 bp, Homo sapiens
tgcttgtcggtctggactgatgaaaatccatatgagaccatttgtttgtgactatgaagggtgtggcaaggcctt

SEQ ID NO: 267374 - DNA, 101 bp, Homo sapiens
tcttcagaaagtgaacttggcattttagatctaattcaagaccctctttgcaagttcagtgcttaacctgaccgaactggctgcccttcggcctgaccttg

SEQ ID NO: 267375 - DNA, 100 bp, Homo sapiens
accccagcagggcctggagcttggcgtgggtgatggtgtccttctcaaggcagtggcccaggccacaggctctgtgactggggcaacctgcaaggagctg

SEQ ID NO: 267376 - DNA, 100 bp, Homo sapiens
gctcctgaagctggcagcgacgtccgcgtccgcccgggtcgtggcggcgggcgcccagcgcgtggtgttccccccacactggggctcccactactgcgag

SEQ ID NO: 267377 - DNA, 82 bp, Homo sapiens
ttctcttttgtctgcccctattgtaagtgcagatggaacacaacaggtcctggagttgttaattcaccgagatggggaattt

SEQ ID NO: 267378 - DNA, 74 bp, Homo sapiens
gatggtcggcggcgcccggatgggcagctgaggtatttataacagcaatgatgtagcagtatcgtttccaaatg

SEQ ID NO: 267379 - DNA, 98 bp, Homo sapiens
ccgtggcatgtcgatttgtccttcactacaggtatgcatcttctattgatgatattttggaagatgaagaacattatgcagatcagttaaaagagtat

SEQ ID NO: 267380 - DNA, 82 bp, Homo sapiens
tgggagccccgagaacgcctccagcggggatgacacagaagtatcttaaatagtgaagatggagaaatattcaataatgaag

SEQ ID NO: 267381 - DNA, 51 bp, Homo sapiens
ccggggctgcggctcttcgggcacagcactttcctgagcacctggaccact

SEQ ID NO: 267382 - DNA, 82 bp, Homo sapiens
ggcggaggcagaggtggaggcgctttgaaagatatccttggaacagaagatcttattgtggaagtgacttccaatgatgctg

SEQ ID NO: 267383 - DNA, 123 bp, Homo sapiens
aaaattgacagagaggggaaaccccgtaaagtggttggttgcagttgtgtagtagttaagtcttccactataggaaatgggaatttaaagatgatcagaagacagttgggagcagagtgagaa

SEQ ID NO: 267384 - DNA, 82 bp, Homo sapiens
ccgggagcgagcccaggcggcaggatattagaaatggctactccccagtcaattttcatctttgcaatctgcattttaatga

SEQ ID NO: 267385 - DNA, 96 bp, Homo sapiens
gacagacatgatgcaaggaggcgtgtacggctcaggtggagaaaggaatgttttgaccgagtctgcgaggatcgcccgtggcaaaatcacagacct

SEQ ID NO: 267386 - DNA, 98 bp, Homo sapiens
ggaattccgcccttgtccttacgtcctgctaacccgcttggcattgagattgaaaaaagcccttcagcggccagtagcatctgactttgagcctcagg

SEQ ID NO: 267387 - DNA, 100 bp, Homo sapiens
accctgccgtcatgtctaagtcagagggaactgaattcatggacaatcttgctaaatgccttcgctattacatagctgatcgtttaaataatgaccctgg

SEQ ID NO: 267388 - DNA, 90 bp, Homo sapiens
gggggcaacttggcacttagaaccgcagcagggacgtcggtttgctatcgggactcggcgaggacgaagagttaccttgtacatgcccac

SEQ ID NO: 267389 - DNA, 75 bp, Homo sapiens
cgtcgggcctgtggaagaagcgccgcgcacggacttcggcagaggtatcgagaaccttccctgcgaacttcagag

SEQ ID NO: 267390 - DNA, 101 bp, Homo sapiens
atggcctatccaaggacatgagcagtttacacatctcacccaattcagatgcggcattccaaaagaactcactgtcctgattgggatagcagagaaagctg

SEQ ID NO: 267391 - DNA, 96 bp, Homo sapiens
gctccatcatcacccaggcgcggagggaagacgccctggtgctcaccaagcaagacttcagcaggaaatcctagatgtccagtctcgtctctttga

SEQ ID NO: 267392 - DNA, 90 bp, Homo sapiens
gctcgccaaaagatgttattggagctattttgtaaggaaaatgatgctgctgctctatgaagaaggcctccgggttgtcatacacacctc

SEQ ID NO: 267393 - DNA, 133 bp, Homo sapiens
aaggaactagaacaagaagaagaggagaggaaaaaggaagagagcactgcagccagtgaaaccactgagcacagagagccgatgttggcggggaggcagctggcacctccatcaaccactcccaggcggtgct

SEQ ID NO: 267394 - DNA, 74 bp, Homo sapiens
cagaggactttcttccagcttctgctgtccttctttgtggagagcaaggaacctagaaagattgtacaatgaat

SEQ ID NO: 267395 - DNA, 90 bp, Homo sapiens
gcaatcttcaggaaagtaagagggcgcagaatccgcatttgctgtgatgagttgaatctcttagtgccgttctgcaatgccgagactgac

SEQ ID NO: 267396 - DNA, 84 bp, Homo sapiens
cgcagtagttaaaaaactagatccaggttggaatcctcaggtataattgaaatcctcaaaggaatgcaagaattgggagtacat

SEQ ID NO: 267397 - DNA, 85 bp, Homo sapiens
ccagagttggagccaattaaaccaggagttcaaagaaggacgcagagccagccacacagccccacaggtcctctttagccacagg

SEQ ID NO: 267398 - DNA, 75 bp, Homo sapiens
catatcactggtccctgcacccagacctttgaaactcacaactctacgacacctctacaggaaagaagccttgga

SEQ ID NO: 267399 - DNA, 89 bp, Homo sapiens
gttcgctacacagcaatgcatcgagttacggctagatgaggctcaagaagcagaatgccaggccttgaggctacagctccagcaggaaa

SEQ ID NO: 267400 - DNA, 87 bp, Homo sapiens
aatgctggctttcctggatttgttggaacttcgggtgaccaaggcccaccaggacaaatggtcaagctgaactagcagaaattccag

SEQ ID NO: 267401 - DNA, 99 bp, Homo sapiens
caaacagaattctgtgttgctgttggagcagatttcttctctgtgtagcaaggccctgggaggagcggggacactgaggacctctctccaaattggcct

SEQ ID NO: 267402 - DNA, 82 bp, Homo sapiens
acaacccgacgaggaacgaatgggacaagatcccgtccatgaatcagcttccatgaggcaggctgaacctgcagatatgcgc

SEQ ID NO: 267403 - DNA, 82 bp, Homo sapiens
ctgaatcttgacaagaccatagagagttgcaaagcacaattaggtttggcagttctctaccagtggaccaatcttttcatcc

SEQ ID NO: 267404 - DNA, 100 bp, Homo sapiens
acattgggggacagccgcgtttccgcagcatgtgggagcgctactgccgaggagtgagcgccatcgttcttgtgagattggatcccatcctatgtgactg

SEQ ID NO: 267405 - DNA, 100 bp, Homo sapiens
tcccaagtggctgggattacagctgtggcagaagcagtgtgaacaatgaatgcagaaatgctttgtatacatgaagacctatactgatgagaaagataga

SEQ ID NO: 267406 - DNA, 101 bp, Homo sapiens
cctggggcggccggccaggaaccacccgttaagcttcttccagaccagctggtcttgcttctggagcatctcttggagcagaagactctgagcccccgaac

SEQ ID NO: 267407 - DNA, 100 bp, Homo sapiens
ggaggagcggcagcaagcgggtgctgctcatctgcctcgacctcttctgcctcttcatggctcttccaccaaagccacctaagccaatgacttcagcagt

SEQ ID NO: 267408 - DNA, 75 bp, Homo sapiens
gaatccactgagaaaattcaagttggtgttcttgggggagcagagcgtgggcctttggagtgacgctgtgggaac

SEQ ID NO: 267409 - DNA, 83 bp, Homo sapiens
ctccctggctgctggagagttgaatgccagccaccagccatggcaatggcaccagcatgatatcattgatcattcctcccaaa

SEQ ID NO: 267410 - DNA, 100 bp, Homo sapiens
ccaggccaggggagggtggcactggctctcctggtccagctctcaggacaagaacaaagtgtgctgcatctgtgggtcttgcagatatgatgtctcctgg

SEQ ID NO: 267411 - DNA, 105 bp, Homo sapiens
ctaaacctgtgaccacccctgaagaaattgcacaggagtcagtggatcggtggggaaaatgctgcttaccctgggccctgggctgtagaaagaagacaccaaagg

SEQ ID NO: 267412 - DNA, 50 bp, Homo sapiens
tggataatataatcaactcctctgcctgacggaggacatccgcttggagc

SEQ ID NO: 267413 - DNA, 100 bp, Homo sapiens
ctggtctcgacgtggggcggccagcgatgaagccggactttccttatcccagttgattgtgcagaatacactgcctgtcgcttgtcttctattcaccatg

SEQ ID NO: 267414 - DNA, 51 bp, Homo sapiens
cctccttacaggcctgatgaattgtctgagaaagaaccccagtttaagttt

SEQ ID NO: 267415 - DNA, 74 bp, Homo sapiens
agacttaacttacagatgttttgtaagttttcctttgaatacaggttatagttatgagcgctactctagatgca

SEQ ID NO: 267416 - DNA, 100 bp, Homo sapiens
acttgccagagggaagggttaagccgtttccaaggcaacggaccaggaagcgcgcaagacgtccgccgcagattctgtttctggcgtctgcatacgcaag

SEQ ID NO: 267417 - DNA, 80 bp, Homo sapiens
gatcagatcaataatggaggcaatgcaaaccagtccagctacgggggcccagccagccagcagctgagtgggggttacgg

SEQ ID NO: 267418 - DNA, 82 bp, Homo sapiens
cccgggctacgctcctccatcacgtggatggcccaatggaatcagctacagcagcttgacacacggtacctggagcagctcc

SEQ ID NO: 267419 - DNA, 90 bp, Homo sapiens
agaaacaggatggctgaaggtgacagagcctctggatagagaacgcattgccacatacactaacctgaaggcggctaacacagaccccac

SEQ ID NO: 267420 - DNA, 100 bp, Homo sapiens
gctttttctaactatttcaagatgatatttattcaccaaacaagagctaaagttgcagacaagatccagctcatcaataatatgctggacaaagtcaatg

SEQ ID NO: 267421 - DNA, 100 bp, Homo sapiens
tgggtagagtggaaaaggagcattggatatgatgatactgatgagtcccactgtgctgagaatgtgacagtgatgataacatgggtgccaaaaatacttc

SEQ ID NO: 267422 - DNA, 82 bp, Homo sapiens
gccaagaagggcagcgagcaggagagcggtgacagcacaaaacctgagaccgtagagcctatcccttctcatctggccttgc

SEQ ID NO: 267423 - DNA, 89 bp, Homo sapiens
agcggattctccgcgaggtgtgcagagtgctgagaccggcagaggagatgctgaagaagaaacctcgggccaccactgaggtgagcagc

SEQ ID NO: 267424 - DNA, 99 bp, Homo sapiens
gctgcagaacgggagccgccacttcgaggactgggttcagccgtctgtatatctccccagatacctgaaactgaccacctgagtacgttttcccattgc

SEQ ID NO: 267425 - DNA, 75 bp, Homo sapiens
cagtggtggcagcgggagacaaatggaaacctccacagtcaccggactttgctgaggagttgaggtccctggaac

SEQ ID NO: 267426 - DNA, 100 bp, Homo sapiens
tgatgacacatcagcatttgtttcccttagccagcccgagcaagtaaagattgggttaccttcccgccaatgtagaccggagaccagccactctccagag

SEQ ID NO: 267427 - DNA, 100 bp, Homo sapiens
cgggaggtgaatttccatgtcaacatagtcctgatcatacctggagctgatgctgatgcagctgttggaaccttggtgtcagcagctgagggggccccag

SEQ ID NO: 267428 - DNA, 96 bp, Homo sapiens
tatagaacagtgcctggcacataataggtgctgagaaagaccacagcaagattctttcattcgtctcctcctagcctgggggaccaggctcgaact

SEQ ID NO: 267429 - DNA, 82 bp, Homo sapiens
tgtctgggcttcatagcattcgcctactccgtgaagaaaaatggctacaaacttcctagcacatgagaagatctggttcgac

SEQ ID NO: 267430 - DNA, 101 bp, Homo sapiens
agacaaaaggcaaattattttggaccttcagattagagctacagagacttctgaagtggagagtctgcgacctcctcggttcttcaatgaagatggagtta

SEQ ID NO: 267431 - DNA, 75 bp, Homo sapiens
ctgcctcagcctcccgaggagctgggattatagggcagcagagaagaaagtggtgaaaattacatctgaaatacc

SEQ ID NO: 267432 - DNA, 98 bp, Homo sapiens
aggccgtcaagaagggctcgaccgcggtccaacgcagtccagctgacaaggatggaatacgccatgaagtcccttagccttctctaccccaagtccct

SEQ ID NO: 267433 - DNA, 75 bp, Homo sapiens
ccggaatggagaaggaagaggagtcggtacatgtcccagagcaagcacacggaggcccgggagctcatgtactcg

SEQ ID NO: 267434 - DNA, 75 bp, Homo sapiens
ggggcgggcgccgcgggacctctccgggccatggggacctcaggatggaaaccagcagcctgcaccgcccgagaa

SEQ ID NO: 267435 - DNA, 83 bp, Homo sapiens
cgatccagcctgcggagcctgtggggcaggtatatttgcttacttaaactaccatgttcctcgaacgagacgagaaatcctgg

SEQ ID NO: 267436 - DNA, 100 bp, Homo sapiens
gccagcaaacgtctacactgtacatgctttttattacaagactacggagcataggaggaaaattcatcatctggatatggaccctccacatcccttcccc

SEQ ID NO: 267437 - DNA, 96 bp, Homo sapiens
ccaaaggccgcggcactcccacgcggaccccgaagtccgcaacccggggatgggcccgcggctgcgaggggaataaatgtagccactttttccagt

SEQ ID NO: 267438 - DNA, 101 bp, Homo sapiens
agagggggcgctgagctgttgggaaaaggcgacggcggattgacagaagtatgattggagagcccacaaactttgtgcatacagctcatgttggatcagga

SEQ ID NO: 267439 - DNA, 100 bp, Homo sapiens
tgaacctcggcagtgcgtccccgggactctgttctgtgaggtgtgtgcggattttaggcaaacaagaaaatattagagtgatgcaattggctttgttcca

SEQ ID NO: 267440 - DNA, 51 bp, Homo sapiens
gccagtttggctgaaaataaaaggtatatgactgatgggatgttacttcgt

SEQ ID NO: 267441 - DNA, 90 bp, Homo sapiens
tgactttgtcaatcagtgccatgatcccaacgaagcagcccatgcggtgactgaacaggctattgcattacctcctatagccaaatggcc

SEQ ID NO: 267442 - DNA, 83 bp, Homo sapiens
ctggagctgaggaaccggaccccggcagctgtcctgaacgaggctgtgggggccctgatgtaccacaccatcactctcaccag

SEQ ID NO: 267443 - DNA, 88 bp, Homo sapiens
aataattattattaacatttattaacgatcaataaacttgatcgcattatggccagcactattaagcatatatagcagtgacgaggat

SEQ ID NO: 267444 - DNA, 83 bp, Homo sapiens
ccaataaccaggtgcttggcaaaatcgagcgggccattgaacatccagtcatggataaaaatgagctggttcagaaggccaaa

SEQ ID NO: 267445 - DNA, 96 bp, Homo sapiens
cagaacatgccaaaggccgaggaagatcgccctttggaggatgtaccacaggaggagctggaagacttcccgctgcccacggtgcagcgcagccag

SEQ ID NO: 267446 - DNA, 100 bp, Homo sapiens
ccccaagacagagcgctactcctggcagtgcgtcaatcagagcgtcctgtgcggtattgttgcagcatctggcagtgagactgaggatgaggacagcatg

SEQ ID NO: 267447 - DNA, 74 bp, Homo sapiens
tcaagcacacccaatggacagcatgcctcaccaagtcacatgacaagcaataccagatgacaattttagcatcc

SEQ ID NO: 267448 - DNA, 82 bp, Homo sapiens
agcgcctgcgaccccagtcggtgctccggggaggtcacctgacgaggagagcccacccacctttgggttcctgttggacatc

SEQ ID NO: 267449 - DNA, 100 bp, Homo sapiens
gacagaaaaggaatgctacaactaaaaatagcaggtgcacccgaggttggcaaggccacaggcttcctcaagaactttctgatcgagcccttcgtccccc

SEQ ID NO: 267450 - DNA, 75 bp, Homo sapiens
cttctctacatcccatctcaatcagaattactagattttctctcaaactacgagattgtagatgtctttatggaa

SEQ ID NO: 267451 - DNA, 50 bp, Homo sapiens
cgagccttggcggcggacgtgcaggtacatgtcccagagcaagcacacgg

SEQ ID NO: 267452 - DNA, 98 bp, Homo sapiens
ggagcacgtcatcgccatcgaaggatctatcttgggatcccatggctttctttactgggctctggggccccttcacctgtgtaagcagagtgctgagc

SEQ ID NO: 267453 - DNA, 75 bp, Homo sapiens
tcagctccacattgagagcaaaatctacaagatgatgcagggaggaggtctccagtgggggctgcagactaagca

SEQ ID NO: 267454 - DNA, 101 bp, Homo sapiens
ggccatctacctggacatcgatggacgcattcagaaggagggtgtgaagacagagaatgaccacatcaacctgaaggtggccgggcaggacggctccgtgg

SEQ ID NO: 267455 - DNA, 80 bp, Homo sapiens
acggttactcgcccaactgcctcagaggacaggtgcacattcaggttcccgagcacaaacatcaagataacgttcactgc

SEQ ID NO: 267456 - DNA, 114 bp, Homo sapiens
caggtccgacccgcgaacccctctgggatccccgccgctctgtctacaacccgagatgtgaagttcatttccaatccgccctccatggtggcagcggggagcgtggtggccgca

SEQ ID NO: 267457 - DNA, 82 bp, Homo sapiens
tggagtcgaaggccgtgaggtatttttctaagattcagagcattcttcactccagaataatgagcaaccctctttggccacc

SEQ ID NO: 267458 - DNA, 100 bp, Homo sapiens
aagatggcttatgaaaatcgtcgatgaaagagaaccagtgaccttccgggatgtggctgtggactttacccaggaggaatgggggcagctggaccctacc

SEQ ID NO: 267459 - DNA, 74 bp, Homo sapiens
ctgctgctgctggtggcccctttgcaggctaggcagctggaagagaaagaccgagtgctaaagaagcaggatgc

SEQ ID NO: 267460 - DNA, 83 bp, Homo sapiens
gagggcggttcatgttcatggaggagggtgccaacaagacggtggagccgagagctggcaccatgactcctgtgaggatgcag

SEQ ID NO: 267461 - DNA, 74 bp, Homo sapiens
gctggtccaggccttccagtacacagacgagcatggggaaggtcaaggtcagcatctcctcgacgatcaagatc

SEQ ID NO: 267462 - DNA, 73 bp, Homo sapiens
tggaacctggagacaagcccaggaaagcaacatgagttaaacatgaagtttctggagagacagtggtatttca

SEQ ID NO: 267463 - DNA, 74 bp, Homo sapiens
tggagatgggcagacggattcatttagagctgcggaacaggacgccctctgatagcttggggcttccttggtcg

SEQ ID NO: 267464 - DNA, 82 bp, Homo sapiens
gacactgcccaacatgagatctggggctgcttcacaaactaaaggggacggcaaaacagaacagaaaggcggagataaaaag

SEQ ID NO: 267465 - DNA, 50 bp, Homo sapiens
gctggggagcccttctgcgccacagatcttactgtgccgagatcgctcac

SEQ ID NO: 267466 - DNA, 98 bp, Homo sapiens
tctctcaagagaagctgcaagagcaacatctttcctcaccccaagacagaccccgtgcggctgacacagctgtatgagcaggcccggtgggacctgct

SEQ ID NO: 267467 - DNA, 75 bp, Homo sapiens
ggcgaacatgcgcttttgacacattggagacagtgaccaacaccttcaggacgaacaatatccagatccagagcc

SEQ ID NO: 267468 - DNA, 98 bp, Homo sapiens
acatgagtgagctcatcaagataattaggagagaagacgatctgcacttcgcattttggcattgacatttaattttagggtcctttatatagaaggga

SEQ ID NO: 267469 - DNA, 90 bp, Homo sapiens
tgataacaccctgtaacagctgagcaggaccagatgctgtgttggggaggacaatctggggagttttaggtttaggcgcctttgggtttc

SEQ ID NO: 267470 - DNA, 152 bp, Homo sapiens
tttgtttgttttttatgatttgtatttgactgagagaaacccactgaagacgtctgcgtgagaatagagaccaccgagatcttcgtgaagactctgactggtaagaccatcaccctcgaggttgagcccagtgacaccatcgagaatgtcaa

SEQ ID NO: 267471 - DNA, 90 bp, Homo sapiens
agggaggccaagcgaccacccaaagaagattgcccaaggactccagatactccaaataatgaccctcgttgttctactagcaacaataga

SEQ ID NO: 267472 - DNA, 100 bp, Homo sapiens
gagagtcgatttatggtccaacatttgaaggctttgtggatttgaccctccatgatcaggtccaccttctagaatgtgcctggctagagatcctgatgat

SEQ ID NO: 267473 - DNA, 90 bp, Homo sapiens
ttttgtgctcccctcccccatcaaaggaaaggggaaaatgtctcagtcgaaagtccagttacaacacagggatcacaacaaacacaaccg

SEQ ID NO: 267474 - DNA, 82 bp, Homo sapiens
attccattagctgctgtcatcaagccctttgccaccattccttcaaatgagatgcctgaaaacttcatgcctcctgttccca

SEQ ID NO: 267475 - DNA, 82 bp, Homo sapiens
cgtgggtccgcgctgcttccacccaacttcctgttaggtaaaatgtcggttccaggaccttaccaggcggccactgggcctt

SEQ ID NO: 267476 - DNA, 101 bp, Homo sapiens
tcaggcggcgctggcggcggccctgggacccgcggaagccggcatgctggagaagctggagttcgaggacgaaggaatactctgaagatagtaactccgag

SEQ ID NO: 267477 - DNA, 89 bp, Homo sapiens
tgctgctctcctgagcaacatctctgactgtgatgaaacattcaactactgggagccagtttctaccatgaatgaaatgaagagttatt

SEQ ID NO: 267478 - DNA, 83 bp, Homo sapiens
cgtgaggctgcggctctgacgccctgggcgctgcctatggcacagccaagagcggtaccggcattgcggccatgtctgtcatg

SEQ ID NO: 267479 - DNA, 98 bp, Homo sapiens
ctccattgacattgaaggatttcagctaccagttacttttacgtgtgatggtctgtcagtttgtcgtctctgtcaacgggctcaatgtcctgcatgta

SEQ ID NO: 267480 - DNA, 90 bp, Homo sapiens
gtcatacttggaaatggctgcaggttcagaatgttccatttaagcagacctcttccatagctgtagctggagcggtaattggagctgttc

SEQ ID NO: 267481 - DNA, 96 bp, Homo sapiens
gcacgactcctcgggcagcctcaacgagaactcggagggcaccggagcttctccccagacctggctctggactcaccaggcactgaccactttgtc

SEQ ID NO: 267482 - DNA, 50 bp, Homo sapiens
atcaagggcagccaattactgaggaagcagtcaattatagatttcttcaa

SEQ ID NO: 267483 - DNA, 75 bp, Homo sapiens
cgatgctgctcatgaaatcatcgagaccatccggtccgcgggagagctgtggggcttggtgagtgtttcgtggcc

SEQ ID NO: 267484 - DNA, 75 bp, Homo sapiens
gggggagcgcgggagccctggaggggaaggttcgagaacttgtcttggacaattgcaaatcaaatgatggaaaaa

SEQ ID NO: 267485 - DNA, 100 bp, Homo sapiens
caattcaaaagatgtttgaaaagctgggacacaatgtaggaagtcttttccacatggcagatgatttgggcagagcgatggagtccttagtatcagtcat

SEQ ID NO: 267486 - DNA, 100 bp, Homo sapiens
tagaatgcatcagtgcccttgtggcgaatggggctcacgtcgagagcctcctcaacaagcccaagagtgagatgaccccagaggagctgcagaagcgaga

SEQ ID NO: 267487 - DNA, 101 bp, Homo sapiens
tcaaaatcccaggctgtcggaagcaaggagcacatctacaagctgatgaagagtgacagctatgcccgcttcctccggtcaaatgcttaccaggatttgct

SEQ ID NO: 267488 - DNA, 100 bp, Homo sapiens
aaggagcatgaaacgagacgacaccaagaataactgaagtgaagtgatggactccgatttggagagtagtaagacgtgaaaggaatacacttgtgtttaa

SEQ ID NO: 267489 - DNA, 100 bp, Homo sapiens
aatttatatagagatgtgatgttggagaactacagaaacctcgtctccctggcttcgcagaatcaagaacggctatgtgcgtttaaagatccgtatcagc

SEQ ID NO: 267490 - DNA, 75 bp, Homo sapiens
aagtggcaggaggaggaggaggggctccggctggtctgtggtgagcaggttcaggagaagtggcacctggtggag

SEQ ID NO: 267491 - DNA, 82 bp, Homo sapiens
cggcgagtttccgatttaaagctgagctgcgaggaaaatggcggcgggagggcgtctctggccgagcctctttttgtggaaa

SEQ ID NO: 267492 - DNA, 74 bp, Homo sapiens
tgttcagcaggtcctgttggagatgatatcgcagtctagcagaagcttgttcagatggggatgttaatgctgtt

SEQ ID NO: 267493 - DNA, 75 bp, Homo sapiens
cggtgctgctgccccgcgggtgctgaaaactgtcaagagtgtgaacatggctacgcctcttcattcccgtccatg

SEQ ID NO: 267494 - DNA, 82 bp, Homo sapiens
cagaaaggagttttccatatttgtgccctaaaagacaattccctggtggactggcagaggaagtggacgacaaagttcttca

SEQ ID NO: 267495 - DNA, 98 bp, Homo sapiens
tgaaatctccatgcagctcatgcagccaaaattgcctggaaaagagcagtgagaggagtccgggagatgtgtgatgcatgtgaagcaacattgtttaa

SEQ ID NO: 267496 - DNA, 75 bp, Homo sapiens
tcagactcatttaaaagaacttagtttatgccaacgtgacttcattcatacagatgaaccaaggatcgggatagc

SEQ ID NO: 267497 - DNA, 76 bp, Homo sapiens
gttttgtttgactccagtgttaagagaagaaatgaggacatatcagtatcggttagctccattcagaaccaaatgc

SEQ ID NO: 267498 - DNA, 75 bp, Homo sapiens
ctgaagatgaagcaaggcccaatgacccaggcgcatggagatatggaccaaaaggaacgagacgtgattatgagg

SEQ ID NO: 267499 - DNA, 90 bp, Homo sapiens
tactattcttggaggtaaacttccaaaagatgctggcatcaccatctacatcaggtcagctgtctcagtttggggcaagtttatacgggc

SEQ ID NO: 267500 - DNA, 50 bp, Homo sapiens
ggatcagtatggaatttatgctacaagcgaagtttattttgagttggatg

SEQ ID NO: 267501 - DNA, 51 bp, Homo sapiens
aaaaggctggagcaaagtgcaagcatctcgtccccggtgaagaagacagag

SEQ ID NO: 267502 - DNA, 100 bp, Homo sapiens
cacgaggatcgtgggagctaagaacttcctgcagatttcacaaaactgcatcttactgacagtctccacccacaggtgacccacgtttcttctagccatt

SEQ ID NO: 267503 - DNA, 75 bp, Homo sapiens
cggcgagcagaactacggcgagcggagccgaagagattcctctgaaaatcttggcacacaatggcttggttggaa

SEQ ID NO: 267504 - DNA, 75 bp, Homo sapiens
gaccaggtttccagtgaaataagaacttgtaatagctggcatcgttgagaatgaatggaaaagaacgtgctccag

SEQ ID NO: 267505 - DNA, 76 bp, Homo sapiens
ggagcgcgatgagcctggaacggaagtgaggatcacctacaggttaagcaaccttttccacgggatggataagaat

SEQ ID NO: 267506 - DNA, 100 bp, Homo sapiens
accaaaaaggcctcgcacattcagttggacaggtcagatgtaccaacagtaccagcaacaggccggctatggtgcacagcagccgcaggctccacctcag

SEQ ID NO: 267507 - DNA, 100 bp, Homo sapiens
ggggagcagaaggactcggacacagactgtccaggacggccggcagtttctaaagtatgttgaccccaagctgggagtcccactgccagagagagactac

SEQ ID NO: 267508 - DNA, 83 bp, Homo sapiens
ccagcagatggcggatgccctgcagtacctgcagaaggtctctggagacatcttcagcaggaattcctggtgactggaagggg

SEQ ID NO: 267509 - DNA, 100 bp, Homo sapiens
cagtagctctgctaattgggccaaatgctcctttaatttttgaacgagaggctgggcactcactgcagctggctaatgatgaccatgtggacatgctttc

SEQ ID NO: 267510 - DNA, 82 bp, Homo sapiens
ctccactttcgccagcccgtgccgcgagcgcggcctgcaggaggtgaagcaaatcatggaggaggctgtcaccaggaagttt

SEQ ID NO: 267511 - DNA, 82 bp, Homo sapiens
aagagagaaggaggaaaagaagcagttcctgatgttacaaatgaacaaggatctcccagaatccaggagtcctccagctgag

SEQ ID NO: 267512 - DNA, 75 bp, Homo sapiens
aagttcttggctgcggggtgatggaacaacaactggtcaattcaggtcaaaatgcagatcttcgtgaaaaccctt

SEQ ID NO: 267513 - DNA, 74 bp, Homo sapiens
gaagcagccgatccagcctgcggagcctgtggggcaggctcccaatcgtcaactcatgacttactggttacagg

SEQ ID NO: 267514 - DNA, 50 bp, Homo sapiens
catctatgatcatggctgacaaggaagaggaggctgcaaaatgggcccgg

SEQ ID NO: 267515 - DNA, 113 bp, Homo sapiens
tggaactcagcgctccgctcctcccagttcctaagagtaaagtaccttttattcatgtgggaaatcaagtagtatcagaacttggtccaatagtccaatttgttaaagccaag

SEQ ID NO: 267516 - DNA, 75 bp, Homo sapiens
agcatccccaccatcaacatggagaacaagaccacgtggatggagaacatcattgcaacagtaagagattccaac

SEQ ID NO: 267517 - DNA, 75 bp, Homo sapiens
gcttgcctcaacaagttgctgctctacagtggatccaaacttctacagcaaaaacttacttcttttaggaaagac

SEQ ID NO: 267518 - DNA, 74 bp, Homo sapiens
tctagattcaccaatgtcaaacagtttattgcaccaggctctgattgtactttctccacaagcttcagcatggc

SEQ ID NO: 267519 - DNA, 75 bp, Homo sapiens
cctggaagaactcgtcatgctctttgtagcgtggtgcttctgttgctcacagtctctggctgatgaacttgctct

SEQ ID NO: 267520 - DNA, 100 bp, Homo sapiens
atttctgtaccctgccctggaagttggcaaaaagcgttcgtggcattcagggatgtggctgtgtacttcacccaggaggagtggaggttgttgagccctg

SEQ ID NO: 267521 - DNA, 75 bp, Homo sapiens
cacaagcttattgaattgatcggccacatcagcaagaaaagcctaggcttctcgagcctttggattatgagactg

SEQ ID NO: 267522 - DNA, 134 bp, Homo sapiens
gttattgagaaggggagaaagcttgacgtcactgacctgcttgctgatcctgtggtccggatccagagaaagtcggagcagagcatggacatgggaacgagtgctctcagcaagaagccgtggtggaccctgcc

SEQ ID NO: 267523 - DNA, 51 bp, Homo sapiens
cccaggctgcacatcaggggactgcctcggctgttcggctcttgaatccca

SEQ ID NO: 267524 - DNA, 117 bp, Homo sapiens
cttttagaggcagaggagcggaaggcagtgggtgtgaccaaaagtgccatttgttaaaggtcactctgactgctgagacctcatgtagctacatttcctggccccggaaaagtctcc

SEQ ID NO: 267525 - DNA, 100 bp, Homo sapiens
gggagctggctgaagatggctactctggagttgaggaagcgttgttgacgaccatggacatcatccacgatggatttggattcatgctggcttttggaga

SEQ ID NO: 267526 - DNA, 98 bp, Homo sapiens
cggggcgctgctggcgtgtctcctcctagtgcttcccgtctcagaggcaaactctattcaggattatgaaactgctcaggaacacaatgaaaatgatc

SEQ ID NO: 267527 - DNA, 75 bp, Homo sapiens
agacaccgtttttgaagaacaaattaaagttcttaaatcaagcaagagctcacaatgtctctctgcaccaagctc

SEQ ID NO: 267528 - DNA, 75 bp, Homo sapiens
agagctccgtgcgggtggctgtcagagctattctcaagctggaataactgagactgaatggacaagtggatcttc

SEQ ID NO: 267529 - DNA, 97 bp, Homo sapiens
gaggtccctcagcaaagatggtacaaaagagtctttggaggatgcggctttgatgggccacgtgctgtacgccgacatcaagatggagaatgggaag

SEQ ID NO: 267530 - DNA, 96 bp, Homo sapiens
cgcccatcagggggaagaggcgtcctgttcttcctgggggactggcagctttggagtttaacccttctgccaatccagaggcaagcacaatattcc

SEQ ID NO: 267531 - DNA, 75 bp, Homo sapiens
gcctgccatgtggaaaatgatgcttaatatcgatgctccgctctgcattggataaaacagaagagctcgaggtga

SEQ ID NO: 267532 - DNA, 100 bp, Homo sapiens
ttttggtctttgtccgcgggtcagtacggcccctgggtccacgtggcgcgaaagtaggagctctgcattctccagactctgtgctttcctaagataggaa

SEQ ID NO: 267533 - DNA, 146 bp, Homo sapiens
gcggggcctgggggtgcgacgccgagggcgggggagagcgcgccgctgctcccggaccgggccgcgcacgccgcctcagcatcgccctgagcaactggtggtttgtggcccacctgacagacctgctggaccactgcaagctcctc

SEQ ID NO: 267534 - DNA, 83 bp, Homo sapiens
cgccagcggccgagcgggcggcttcctggcctgggcgctccggtggcggcggaggtcgcgtggggcaggcagtggcgctgcgg

SEQ ID NO: 267535 - DNA, 75 bp, Homo sapiens
ctgagggggaggagacggtgggaggaggaagccaagaatctggtgagcgaagccatcgcagctggcatcttcaac

SEQ ID NO: 267536 - DNA, 75 bp, Homo sapiens
ggcagtccacccaccgccgccgcctcccagaaggagcccagcgaagtgccaacacctaagagacctcggggccga

SEQ ID NO: 267537 - DNA, 50 bp, Homo sapiens
actggattgctgacggcagccctctcagatggagtctagctctgtcgccc

SEQ ID NO: 267538 - DNA, 100 bp, Homo sapiens
tttgatggccgaaatattttaaaggaatgtatcctgtcaggtataatgtcagtgaatggcaagaaagttcttcatatggatcgaaacccttactacggag

SEQ ID NO: 267539 - DNA, 95 bp, Homo sapiens
atttacccactggatattgtccgaaaaatgcgagaccagcgcgccatgatggtgcagacatcaaaacatgccaaaggccaggatttgtttgatca

SEQ ID NO: 267540 - DNA, 100 bp, Homo sapiens
ttcagttacaagagaaactttatgtgcctgtaaaagaatacccagatgaccctgccccgcttaggctctgccctgtctcatcccagcccaacagcatggt

SEQ ID NO: 267541 - DNA, 100 bp, Homo sapiens
ccgatcgccgcggggcagttcgggccggctgtcctggcgcggctctttggtgtaacgggaaactgcgctgcctgtagtaagctcatccctgcctttgaga

SEQ ID NO: 267542 - DNA, 115 bp, Homo sapiens
tgcgacttcttgggctccggggcggccatctgggtcaccatcctgtgcatggcacggctcaagacagtcctgaaatacgaatcagagatcattgatttcttcctgggggcctctc

SEQ ID NO: 267543 - DNA, 82 bp, Homo sapiens
cggccgtcccgggccgggggacccgcccgccatggccaccaagtgagtgtgtccgcttgaaaccaactgacatacagcccga

SEQ ID NO: 267544 - DNA, 100 bp, Homo sapiens
ccggcctgggagaagcagcagcgcaagcagccctggcccgccgggaggaggagagcctggctgttcctgccaagcggcgccgggtcactgctgagatgga

SEQ ID NO: 267545 - DNA, 75 bp, Homo sapiens
caggagggcagcagtagaatcacttgggttcattctattcagagtaaagccaatcccagctgaaggaatcaagtc

SEQ ID NO: 267546 - DNA, 83 bp, Homo sapiens
ccatggggaaggtgaaggtcggagtcaacggacctgcctagagctggaacgttacctccagagcgagccctgctatgtttcag

SEQ ID NO: 267547 - DNA, 131 bp, Homo sapiens
taggaagagtcagaggggtgaccagagagcccaacgcctggtgctcaagactttctccgagttatgccccgtggtgccctgcttgtcaaaatcttcaaccggaatgggaaagttttgctgaatggggagaa

SEQ ID NO: 267548 - DNA, 78 bp, Homo sapiens
agaaaaagcccaggcataaaatcatctccatattctcaggcacagagaaaggatgtacagttacccagcacgtgtacc

SEQ ID NO: 267549 - DNA, 100 bp, Homo sapiens
gatcgatgtttcaatattggaagcgctttgatttacagcagctgcagagttgcatgctgagaatttgaaaaatgaagatgatgtagacactggactatta

SEQ ID NO: 267550 - DNA, 75 bp, Homo sapiens
gtcctgcagaccctggagggacatctgcgctccatcctcgatcattgagaagcagccaggccacattcggagcag

SEQ ID NO: 267551 - DNA, 50 bp, Homo sapiens
ggaaggaacagacccctgtagcgggtccctcgtctgagctggctcactcg

SEQ ID NO: 267552 - DNA, 83 bp, Homo sapiens
ggaagatttcgatcagttagggagaatttgcagccttcaagtagccaccatcatggcagcatctgctcttatttcttaagtct

SEQ ID NO: 267553 - DNA, 100 bp, Homo sapiens
gcctcgcccgccgtgagcgcccggagcggtccgcgagccaccgaggcccagcccgccgccgccatgcccttctccaacagccacaacgcactgaagctgc

SEQ ID NO: 267554 - DNA, 115 bp, Homo sapiens
cggaaaaccgaagttggaagtgtctcttagcagcgcgcggagaagaacggggagccagggtgctttcttctgcgacctggtactcatctacctcatcaaaaagagagagttttac

SEQ ID NO: 267555 - DNA, 83 bp, Homo sapiens
gccatattgtgtcttccccggccggtccctcgcctcccggccgagctgacgccttgccttacacccagacaaaactctcgttg

SEQ ID NO: 267556 - DNA, 100 bp, Homo sapiens
gggagcgcctggcggccgagtcaagccgccgcctcgacccagggcccgcgggccaggagagcgctcggcggctctacaaaaacctctggggcgctgtcct

SEQ ID NO: 267557 - DNA, 98 bp, Homo sapiens
ccacctgtggccgagtcctccctgatggctatgtcttgcccagccacgtgactgaggagatgctatgggagtgcaagcagcttggggctcactccccc

SEQ ID NO: 267558 - DNA, 100 bp, Homo sapiens
gcgcacaggcagaagagcagcagcgtcaggaaggtgccattgcggagcctcatctcctcggaaaccccatttcatttcactttgcctaaagaaggtgata

SEQ ID NO: 267559 - DNA, 90 bp, Homo sapiens
ttatgaagaaaatgggtttctagtaatcaaaaatcttgtacctgatgccgatattcaacgctttcgggaggaaacccaagctccgccgag

SEQ ID NO: 267560 - DNA, 98 bp, Homo sapiens
ccgctccggccgccctttgcgcttggatccacttccccatctgtaacgaggtgttgagacgaggttcgagaacttgtcttggacaattgcaaatcaaa

SEQ ID NO: 267561 - DNA, 50 bp, Homo sapiens
accttggtcccagagtcatcatgaaggaagcgttgttgacgaccatggac

SEQ ID NO: 267562 - DNA, 100 bp, Homo sapiens
gattgatctggagccagaaggaagagtgtatgtgatcatcgatctctcagggtcgtcgggtgaagcaataccaagtttccaggcccgaagagcatcccag

SEQ ID NO: 267563 - DNA, 90 bp, Homo sapiens
ctgggactcctgtctacagagaaaaagaagatatgtatgacgagattattgagttaaagaaggccttggtatgttcctgcttcatcccct

SEQ ID NO: 267564 - DNA, 83 bp, Homo sapiens
ccgtgtctctggattcaagtcccaggagtcctgaccagagagcagttgaggagctcaagcttgggaaaatggtgtgcattcct

SEQ ID NO: 267565 - DNA, 95 bp, Homo sapiens
gactgagtactcaacatattgactgtatttgggctgcagcacaggttctgagttctgtccgcacagaatgggacccactggatgttcgctttggc

SEQ ID NO: 267566 - DNA, 76 bp, Homo sapiens
ccatggatgaagcaccgaacaaactggagcccgcaaggtacaggattatcatggtcataaaatttgtgacccttac

SEQ ID NO: 267567 - DNA, 97 bp, Homo sapiens
gaagaatttggacttgatgaagaagatgaagatgaggatgaggatgaagatggtcagtaggacagaaggtaacattgatgactcgctcattggtgga

SEQ ID NO: 267568 - DNA, 101 bp, Homo sapiens
gagattctcagtgaaggaaatgaagtcctgggccggatgtatcccccgcgttctcccaagtctgctgcccctgccccaatctcagcttcctgtccagagcc

SEQ ID NO: 267569 - DNA, 83 bp, Homo sapiens
tgaatgttgaagatgtccttaccagctttgacaatacaggaaatgtttaatgacagggagagagtttttctctcgtttcccag

SEQ ID NO: 267570 - DNA, 76 bp, Homo sapiens
ggggtttcggcctggaggagttgtacggcctggcactgcgcttcttcaaaggagtgttcagcctgggtgttcctgt

SEQ ID NO: 267571 - DNA, 83 bp, Homo sapiens
cccagaaccatgtgccgagcccgctgcttttggagacacgcttcacatacactacacggattgctgtggaaactgcagcgaca

SEQ ID NO: 267572 - DNA, 96 bp, Homo sapiens
cagagggacagaggcctactgtacatggcacatgactgtggatattcataaggagaaagtggcacgaagagagattggtattttgacaacaaataa

SEQ ID NO: 267573 - DNA, 100 bp, Homo sapiens
acctgcttcccaatcccactgatgaggatcagcccatggtttccaatacttatctacaggaatcgccatgaccccagctctgagggaggcaacagcaaag

SEQ ID NO: 267574 - DNA, 100 bp, Homo sapiens
cctacaaacaggaaattacaaagaggccaagaagatcattgagctcaagactgcagtgcagatgacgacaacttccttgtgcccatagcggtgggagctg

SEQ ID NO: 267575 - DNA, 75 bp, Homo sapiens
cttggctagtgcaagccttgtttattttcctcaccactgaatctacagatgggagacctttaactctgaaggaca

SEQ ID NO: 267576 - DNA, 88 bp, Homo sapiens
atgctgggttctgctgagttagctgaggaggtcaatttaaatggttctggcaaactgctcaagagggacattggctggcgcccggaca

SEQ ID NO: 267577 - DNA, 100 bp, Homo sapiens
cagccgagacctgccgtgggaccccagagattcccagctattcatgctcttatggaaaatgctgtgcaacccttactcacttctgtgggagatgctatag

SEQ ID NO: 267578 - DNA, 82 bp, Homo sapiens
cagatggtccaggagaagctttgaaggctgtgaagacccaagaaactcgagagatcttacatttccactataccacatggcc

SEQ ID NO: 267579 - DNA, 97 bp, Homo sapiens
gtcaggcgcctcagcacggggacccccgggccggccttcacgccgcagagccgctgcaggcagtttctatggagctttcgcctacccggagaggccc

SEQ ID NO: 267580 - DNA, 82 bp, Homo sapiens
ccggttcttggtgggatctgagcagatgaggacggggacttggttgccttttccagtgacgaggaattgacaatggccatgt

SEQ ID NO: 267581 - DNA, 109 bp, Homo sapiens
aacaaaaaacaccacagtactatcgtctatcattggatgaagtggctccggagatctggagccgagatggtcataaactcgtgagtgcttccactgataacatagtgtc

SEQ ID NO: 267582 - DNA, 101 bp, Homo sapiens
ctcagagtttccattgacactgatatgcctaccgtatgtgaacgggagctgtgtgtgtttgcttttcaaaccctgggagtaatgaatgaagctgctgatga

SEQ ID NO: 267583 - DNA, 90 bp, Homo sapiens
tcagaagaatttgttcacataaacagattggtgtcaagcctgtggcagcagagcttcctggggagtcctcagagcaagtcattgccattg

SEQ ID NO: 267584 - DNA, 82 bp, Homo sapiens
cctcagcatttttcatggatttcaaataagtgctccctgtgctgtcaggaatctacaggacttggctcgtatttacattcga

SEQ ID NO: 267585 - DNA, 82 bp, Homo sapiens
gaagagcgacaagccgctggcagccgcggatctcaccgccgctcaggacgaagttatacggaagcgtctcctcattgatgga

SEQ ID NO: 267586 - DNA, 75 bp, Homo sapiens
ccgagatggaccttgggcagctcagttcacaagattgataggcagcagtttgaagaaacagttcgaactctaaat

SEQ ID NO: 267587 - DNA, 75 bp, Homo sapiens
gggatctttccggatcaatccagatggcagccagtcagtggtggaggaaggatttgatgccctggatccctttat

SEQ ID NO: 267588 - DNA, 90 bp, Homo sapiens
tgctcctgctggccgcctggacggctcgggcgctggaggctgaactcacgggaatcaaatggcgtaggtacaattttggagggcatgggg

SEQ ID NO: 267589 - DNA, 82 bp, Homo sapiens
gaatgcaatcaaagccatgcatcagtctcagaccatggagcctgatgtaaatgctgacattgtgcattggctctcttggact

SEQ ID NO: 267590 - DNA, 75 bp, Homo sapiens
atcaggagaagccaagcacgctgacgaggttctgtgagagcattactaaggctcgtacgtctgcatcgattatct

SEQ ID NO: 267591 - DNA, 122 bp, Homo sapiens
ggaccgacggacgcacgggcgggcggccgggagccatggagcgcggccctggggcccgggggcgcgggccggggtggtcagaatggcggcagtggagcatcgtcattcttcaggattgccct

SEQ ID NO: 267592 - DNA, 75 bp, Homo sapiens
tgtcattctgacccggggattcctcacagcgtctggcagtataagaatgcgggagtgattgagttggaagcgtgc

SEQ ID NO: 267593 - DNA, 88 bp, Homo sapiens
gcactcagctcaaatacacacacctgttgccattatagagctggaattaggcaaatatggacaggttgtagcagataccaatataagc

SEQ ID NO: 267594 - DNA, 74 bp, Homo sapiens
aagcgcgcagtgtcgactccccggtctatgccaggcgcatctcaggaacagggcggatacctgaccaactcgtg

SEQ ID NO: 267595 - DNA, 100 bp, Homo sapiens
ggaagatgcaagcggtttgggaccttgaacaaggcaaatatggttttggggcaattccaaaagtcttcagatttccaaaaggaaggactgcagcagacat

SEQ ID NO: 267596 - DNA, 74 bp, Homo sapiens
gaagctggagttcccttcccttccacagtgcaaggaagacgccgagccggaaatcactgtggaaaatcttccca

SEQ ID NO: 267597 - DNA, 100 bp, Homo sapiens
ctggaagcgattaatgataaaatttcatggagaagaaggccttgactacggaggggttgccagcaacccttctgtggggctcaattttggaaatcttgga

SEQ ID NO: 267598 - DNA, 75 bp, Homo sapiens
caaaaacacaggaagcaaaattgaagaggattttccacacatcagatcgaatccagaaccctggctgaaattgca

SEQ ID NO: 267599 - DNA, 100 bp, Homo sapiens
aatgcgatatggtacccaaactggattatgtatgataagtattatcagcaacataatagttctgggcatcttcattaagtacaaggaacttcggacaccc

SEQ ID NO: 267600 - DNA, 75 bp, Homo sapiens
ctcgaacccccgcttcgcagctcaggagcctgaggtccgaaagactgagatttccactagagcttccaagtcatt

SEQ ID NO: 267601 - DNA, 87 bp, Homo sapiens
agccgatgctgtggccgttacaatggggccaaaggtgctacatgcattgaaagaaaaggttacttcactacctgacaaccataaaaa

SEQ ID NO: 267602 - DNA, 100 bp, Homo sapiens
ctggagtggctaggtcttggtgtcggttctttcacgcaaagtgtttctccagcaggacctgagaatacaggtgtggatgtggaagcagccaagcgggcag

SEQ ID NO: 267603 - DNA, 88 bp, Homo sapiens
atgcagcatataagccaggcatgtctcccgaggagtgcaggcgcttcaccacagacgagacgagttgtactgctgtcacaggaaatgg

SEQ ID NO: 267604 - DNA, 74 bp, Homo sapiens
gcacaagggcccaactggaattccacttacgggagctgctctcgtttgaggatgtggcgatgtacttcaccaga

SEQ ID NO: 267605 - DNA, 100 bp, Homo sapiens
gcttacccgaaaagtggaggagctacagcgaaagctggatgaagaggtgaagagattggaaaggtgtatgagcattgtgacatcgatgactgctggtgtc

SEQ ID NO: 267606 - DNA, 82 bp, Homo sapiens
cattgacatccctatcaatgtctacaagaccgaagccaggacagcacagccgtagcactctcagactctagctcaacgcagg

SEQ ID NO: 267607 - DNA, 99 bp, Homo sapiens
caccttttatagaagtacgtccaggaatagaagtgacctgctttttcgcaaaatgtgacagtgatgataacatgggtgccaaaaatacttcaataggag

SEQ ID NO: 267608 - DNA, 99 bp, Homo sapiens
ctgagggccccggcccctggatgcacagccccggcgctggaaagatgaatgggagggctgattttcgagagccgaatgcagaggttccaagaccaattc

SEQ ID NO: 267609 - DNA, 100 bp, Homo sapiens
gctgcgggcccgggccatggccgccgccgatgccgagtggagacctttggcgacttggcctttggcgacatcttcctccacctgctcacgggcaaccttg

SEQ ID NO: 267610 - DNA, 90 bp, Homo sapiens
gtcattcgtaatcagcaggccaaagactcagaggttattcagcttctcaaggctggaaaagcgaaggaagtttcctacaatgcactagcc

SEQ ID NO: 267611 - DNA, 90 bp, Homo sapiens
cctctcgcgctgcactgtctctccgacgcaagactgtcccggcccggattgcaggaggagatgcttcagagagaggaagccgaaaacacc

SEQ ID NO: 267612 - DNA, 109 bp, Homo sapiens
gggccagagcgtcggggaggcaagatgatccaccagcggttccatcctacacttggccagtccgagagtcttgatcagatccccaacaatgtggcccatgctacagagg

SEQ ID NO: 267613 - DNA, 100 bp, Homo sapiens
ctgggcaacgccgaacccagtcgcgcagcgctgcagtgaattttccccccaaactgcaataagccgccttccaagagcatgtaccagagctatggctccc

SEQ ID NO: 267614 - DNA, 101 bp, Homo sapiens
ggaggtgaagtgtcctgcttagtagctggaaccaaatgtgacaagtggacccatcaacttgtgccagtacagggtctgtgcagtggagtaggcacttcagt

SEQ ID NO: 267615 - DNA, 100 bp, Homo sapiens
tcccgtgggcaatagagtcactgtatttgaccttaaaaaagcttggggcttccttggtcgcacccaccacctgcctgcccactggtcagccttcagggac

SEQ ID NO: 267616 - DNA, 113 bp, Homo sapiens
ggccccggcccctggatgcacagccccggcgctgaagcctttgggtctgaagtgtctgtgagacctcacagaagagcacccctgggctccacttacctgccccctgctccttc

SEQ ID NO: 267617 - DNA, 100 bp, Homo sapiens
atctcagcctccaaaagtgctggcattacaggttcttcgtgaactttgtggttgggcaggatccgggctcagacgtcgccttccacttcaatccgcggtt

SEQ ID NO: 267618 - DNA, 83 bp, Homo sapiens
attctgttagacagtgaatgtggaaaggagattgacagtcacaattttgtaataaggatcataaaaggattcctctgtactag

SEQ ID NO: 267619 - DNA, 82 bp, Homo sapiens
ctacatggacgtctggggcaaagggaccacggtcaccgtctcctcagagtctcactgtcgcccaggctgcagtgcagtggtg

SEQ ID NO: 267620 - DNA, 100 bp, Homo sapiens
ccgcgctccgccccggcctagggccttgccccgggagcccgcgaggggcagcgtggacattctcaggctgactctccagggtgaactgacaggagatgaa

SEQ ID NO: 267621 - DNA, 96 bp, Homo sapiens
agagcctactgagcagcctgagtgggagcggcctattgccaattcatggacatgctcttccctggctgcattagtttgaagaaagtaaaatttcaa

SEQ ID NO: 267622 - DNA, 100 bp, Homo sapiens
gttcaaggaggccttccagctgtttgaccgaacaggctgagaagaaagccaaggtcattgcaggaatgaatgctgtggaagaaaaccaggggcccgggga

SEQ ID NO: 267623 - DNA, 90 bp, Homo sapiens
tcgacccctcgttaggaataattgcaaaaatcaatcggactctggaaacggcagtccctgtgaagcaggaagagtgagggcaggttcact

SEQ ID NO: 267624 - DNA, 75 bp, Homo sapiens
cggcgctcggcatggctctcctggtgctcggtgatgtgtccaatctagatcccaacttctcatttgaaggcacca

SEQ ID NO: 267625 - DNA, 50 bp, Homo sapiens
cttgtgtatctggagaaaatagagcagcaacaactccaggcccagcattt

SEQ ID NO: 267626 - DNA, 100 bp, Homo sapiens
cagcgcttcctggtgagcatgccctccaaataccgcaagaacatctggatcaagagaggttggatggcaagcatgtggtgtttggcaaagtgaaagaagg

SEQ ID NO: 267627 - DNA, 100 bp, Homo sapiens
ctaactttctttacagcacgaggagaagatgtacaagaaaaaaatagcacagctttttataataatgcagaggaaggaagtattgagattgacattccag

SEQ ID NO: 267628 - DNA, 75 bp, Homo sapiens
gatctcttctaacatccagaagatcacacagtgttgttcctatatgatagtggactcttcagatcacgaccctgg

SEQ ID NO: 267629 - DNA, 74 bp, Homo sapiens
tatcatcgtctcctgtggctgggacaagctggtcaaggaggactgccaccagaagatcgatgacctcttctccg

SEQ ID NO: 267630 - DNA, 75 bp, Homo sapiens
ctcactttctgaaatggaacctcaggatcttgagctagagctttacttttagaagcccagtcaacaccatttcag

SEQ ID NO: 267631 - DNA, 100 bp, Homo sapiens
ggactcggacgaggatggcagcacgagcaggacatcctggacctggagaaccagcgagaaaacctggagcagccattcctgagtgtgttcaagaaggggc

SEQ ID NO: 267632 - DNA, 75 bp, Homo sapiens
aaaagatctcagtacagtagaagctctggtgacctctgagaaggatgtgcaaacagctctggctctagcaaaagg

SEQ ID NO: 267633 - DNA, 71 bp, Homo sapiens
cgcggcgggaggagcctgttcccctgagaattttccaatgagaaaagtgccctgtaagaaagatgctgcat

SEQ ID NO: 267634 - DNA, 100 bp, Homo sapiens
ccttccaagctctactgtgacttcagagacactgccaagcagccttagccctagtgtagaggagggagcactggcagttgctgggtaatttgaagacgac

SEQ ID NO: 267635 - DNA, 96 bp, Homo sapiens
cctgcagtcgccgccgccgccgccaggtcgggaaagaggttaaagaagacacgcaagtatgatatcatcaccactccagcagagcgagtggaaatg

SEQ ID NO: 267636 - DNA, 100 bp, Homo sapiens
ggaaactgattggaaactctttgggaaagccactcgaaaaggtaagagcttctgttcgtgtgcagggaaagcagctcacagacgccgttaaaaccagctt

SEQ ID NO: 267637 - DNA, 100 bp, Homo sapiens
ccgagatctcactgactacctcatgaagatcctgactgagcgtggctattccttcgttactactggtgcaccaggccgtccagggagcccgggcctgccg

SEQ ID NO: 267638 - DNA, 100 bp, Homo sapiens
aaaccttgtggagatagattattttgggctacgttactgtgacagaagccatcagacggtcaacgaagtgacggtggaacagctggtgcagcagtacccc

SEQ ID NO: 267639 - DNA, 75 bp, Homo sapiens
aacaaacggcaaagaacttactgattcttgagataacaacgaacttgatgcaagtgataggtttgccaaggtcag

SEQ ID NO: 267640 - DNA, 96 bp, Homo sapiens
atttctgctccgactctgcggactactgcagtggagcttgactcttaatgctagagacatgacctaacaccctgatgaccactctcagggaccttg

SEQ ID NO: 267641 - DNA, 51 bp, Homo sapiens
catcaaattttttgacaataaaacgggtctaagagtgtaaccagttccagt

SEQ ID NO: 267642 - DNA, 51 bp, Homo sapiens
gaaagaaagtgtcatttttattccagacatagggcctgattacattccaac

SEQ ID NO: 267643 - DNA, 119 bp, Homo sapiens
tgggcgccgccgcgggcgccgggagcgagctgggagggagccgcgcgcctttgtgcgcgcgccgaggtgtccctggccagtgtccttccacctgtccacaagcatggggaacatcttcg

SEQ ID NO: 267644 - DNA, 82 bp, Homo sapiens
catggcgccgtccacgccgctcttgacagcaaaatgatgcttcaacacccaggccaggtctctgcctcggaagtgagtgctt

SEQ ID NO: 267645 - DNA, 51 bp, Homo sapiens
gaggtggacgccatcgtcaacgccggttctaagctggtctatgtccatcac

SEQ ID NO: 267646 - DNA, 100 bp, Homo sapiens
ctttttcccgcccgcggttccaccgctctgaaaccgatttctaacagagagagactttagaagacagctttccatcgacactaggccctttagaccagcc

SEQ ID NO: 267647 - DNA, 100 bp, Homo sapiens
acagcattcctgaaatacatccaggaaagacatggagattctcttaaaaagtgcaatcaaactgaggccgaaggaaggggagacatactttgatgttgtg

SEQ ID NO: 267648 - DNA, 141 bp, Homo sapiens
acagctcttgttcccgctgatcctgcagcccagtggatggagtccagaatctacagacctgccaggtactatggatatagaggagagaaatcgccaaatgaaaattaacaaatacaaacaggtagccggatcagatcccag

SEQ ID NO: 267649 - DNA, 97 bp, Homo sapiens
gtgtgttgtttgaaaaccagctgcttcaaattggacttaagtctgaatttcggcagaatttaggtaccgagttttggcaattggggatgaaaaagat

SEQ ID NO: 267650 - DNA, 97 bp, Homo sapiens
tgccctcaaggtcgtgcgtctgaagcctacaagaaagattaagcctgatcaagatgacaacctcccaaaagcaccgagacttcgtggcagagcccat

SEQ ID NO: 267651 - DNA, 99 bp, Homo sapiens
ctgagcggctgcggcgcggcttccatcctcccgccctcctgacgcggccggagcgcagccctgaggcccaggaagtccccacgagaagaagaagaagag

SEQ ID NO: 267652 - DNA, 83 bp, Homo sapiens
gctgggccgcaggggcgcgcagcgcggggagctgccagctgtcagtggtagctataggaattaacatatacagaacatcaaat

SEQ ID NO: 267653 - DNA, 83 bp, Homo sapiens
cgccagccgcaccatgccgctcctaagcctgcacagccgcggcggcagcagcagtgagaggccactgcagaacaaattagact

SEQ ID NO: 267654 - DNA, 100 bp, Homo sapiens
gcagagccctctcttcagtcagattctgagccttcagacttctgtacagcagctgaaagaccaggaatatattaaaggaatctgtgaacctgaactagaa

SEQ ID NO: 267655 - DNA, 75 bp, Homo sapiens
aagatggtgaagggccccagggggccaagtcagcccacacgctgggcatctggtgaatgctggagtcctcaccgt

SEQ ID NO: 267656 - DNA, 100 bp, Homo sapiens
atctcccctgagattggggagaaggtgcggactcttgttcttgcactggtgttctggaactgggaagtccaagatcagggctcctgcccctggacctgaa

SEQ ID NO: 267657 - DNA, 82 bp, Homo sapiens
cggaagatcgtcgccacctggatgctggaggtgtttcccattaaacactaccaggacaaaatcaggccttacatccagctgc

SEQ ID NO: 267658 - DNA, 127 bp, Homo sapiens
gccaggagcggttccagagcatgcatgcctcctactaccacaaggcccatgcctgcatcatggtctctggacctctgactgacactgtgcctgcccaggtccctgtatgcactgccacagtgccctg

SEQ ID NO: 267659 - DNA, 100 bp, Homo sapiens
caatgcagtttacggtgaagacctgccttccctctgggaatctggagcttcagtaacagcttctcggacaaactatttagtggaaaaggcttacattttc

SEQ ID NO: 267660 - DNA, 75 bp, Homo sapiens
aatgccaagaagcagccgccagttgggatcaaatgtgagcctatggatcaaggcattgaatgccccagaggagcc

SEQ ID NO: 267661 - DNA, 82 bp, Homo sapiens
aggagaggaagaactagtttcccaaacagatgttaagacattcttggaagccttaccggtcttccccagggaggtcctgaac

SEQ ID NO: 267662 - DNA, 82 bp, Homo sapiens
agctggccaagctgatccgacagagaaagcaacagtatcaaagtgctctattttgggcagataaagtagcttcactctctcg

SEQ ID NO: 267663 - DNA, 100 bp, Homo sapiens
taacctctcagaactgaacaaagacaacattgttcctggaacgccctctttttaaaaaagagtttgtgaagatgatgtctcgctgaggaggtcctggaag

SEQ ID NO: 267664 - DNA, 80 bp, Homo sapiens
ctcagttggaagcagccgatccagcctgcggagcctgtggggcagaggttccatgacgagcctggagtccagccacagcg

SEQ ID NO: 267665 - DNA, 83 bp, Homo sapiens
cgagtcctagatgtcaataaccagtccttcagagaacaagagattgcaagactggaggaagataaagaagaactacgtaacca

SEQ ID NO: 267666 - DNA, 82 bp, Homo sapiens
gctgaaggaccagagagggagccctgcctacatcagtcccgacgtgctcagcggtgtctgtgacctttgatgatgtggctgt

SEQ ID NO: 267667 - DNA, 82 bp, Homo sapiens
aaagtgaaatcagaggagatgtaactatcgctccaaatgagaagatgaagcaagtgttaaagaagactatagaagaagccaa

SEQ ID NO: 267668 - DNA, 100 bp, Homo sapiens
caaaccccagctgtggccctgaggcccagctgtgggtcctgaaggccatgttggggccccgatgccgtgcaatttgataaaacttgttgatgtggaagaa

SEQ ID NO: 267669 - DNA, 83 bp, Homo sapiens
tcccagcccgggtccccgcgttcacagccccagcgcagagtgaccgccttctgatcagaggtgggaggatcgtgaatgacgac

SEQ ID NO: 267670 - DNA, 75 bp, Homo sapiens
ggccaacatggcggaacgcaggagacacaagaagcggatccagttgcatagtttatctcctacctttggaataga

SEQ ID NO: 267671 - DNA, 97 bp, Homo sapiens
ggcgcctctactttctggagtttgtgtaaaacaaaaatattatggtctttgtgcacatttacatcaagggacttccttccccgcggttcaggaatcg

SEQ ID NO: 267672 - DNA, 82 bp, Homo sapiens
ggcgtctctggccggccttggtgcggcgagccgagcgaggcagctctgagccgcgcggtgggaggaggagctcgccaagcgc

SEQ ID NO: 267673 - DNA, 83 bp, Homo sapiens
taaaggactttggatgccactggggaaagaagtcaaagttatgcagtagaagtgaattctggcgttttttacaagagtgcaga

SEQ ID NO: 267674 - DNA, 100 bp, Homo sapiens
tcacatctgctgaagaaacattttcacactgtaagtctgagcatcagtttaatattgacagcatggttcataaacatgggctcaccagcatttcagcttc

SEQ ID NO: 267675 - DNA, 75 bp, Homo sapiens
tcgacatccaggcgaactcggcctatcgctaccctccgaagtccggatgaggaagtacagacaattggtcagata

SEQ ID NO: 267676 - DNA, 76 bp, Homo sapiens
tagatatgaaagtgattttgatagaagactttcgagagtgtatacaaatgacagttctgctgagacacaacttccc

SEQ ID NO: 267677 - DNA, 75 bp, Homo sapiens
gtttgcagaggttacctggccagaaatacttccagcggcaatgtaagcaacagaaaggatgagacaaatgctcga

SEQ ID NO: 267678 - DNA, 98 bp, Homo sapiens
tggccgtagcggcttgttggataagagccgacagttagaatcagaaactgggaccacagaggagcacagtctaaataaggaagctcgaaaatgggcca

SEQ ID NO: 267679 - DNA, 75 bp, Homo sapiens
agttcgtctcttacgtctgcggaagtgcagctgcctcagttcttagcgcagtgtccatgaaactgggaggcgacc

SEQ ID NO: 267680 - DNA, 80 bp, Homo sapiens
ttttgcagttacagcctgtgcaacaagggtggatatggttatagaagaagtggccgagataaatatggccctcctactcg

SEQ ID NO: 267681 - DNA, 80 bp, Homo sapiens
cctctacagtctttaagcagagaaggtacagtcctcgggagtctcctagaaaaggaatgactgtgataaatatgtttttc

SEQ ID NO: 267682 - DNA, 97 bp, Homo sapiens
ccacccccgactcgggcttggcgcggcggccagaggaaccccgagatctgccgacaccccaggccatcgagccccaggccatcgtgcagcaggtccc

SEQ ID NO: 267683 - DNA, 117 bp, Homo sapiens
gcagcgctctcgtcttctgcggctctcggtgccctctccttttcgtttccggaaacatgggcgtgatggtgggcatgggtcagaaggattcctatgtgggcgacgaggcccagagca

SEQ ID NO: 267684 - DNA, 98 bp, Homo sapiens
caattgagaaacaggcacacaagtgtgaggagttgctaaatgctcaggtcgtttatacgcaatgcagactggaatgaagatcgatagtaaaactcctg

SEQ ID NO: 267685 - DNA, 50 bp, Homo sapiens
cccctactcgtccagagccgccaggtgcgacaacgcaaaagggttgaaag

SEQ ID NO: 267686 - DNA, 82 bp, Homo sapiens
caaattctctcctgtttgttgtgacatggaggctcaagctgggtctactcaaggtttggaacaaactctcccttcacttgtt

SEQ ID NO: 267687 - DNA, 51 bp, Homo sapiens
gtgggggtgtgcaaacccgagagaactggctatccgtcagtccatctccaa

SEQ ID NO: 267688 - DNA, 75 bp, Homo sapiens
gggcaagagaaaaagggtaaaactaagcagtggcaccaaaggctgccttaagaccaactgatgtagtgctggaag

SEQ ID NO: 267689 - DNA, 100 bp, Homo sapiens
tccagtctttgctccagcccttcctaagacctggccaccttccttggctcctgtgagatgccttgagcctcattcacatatagcactttctacattgtgg

SEQ ID NO: 267690 - DNA, 97 bp, Homo sapiens
ttggttccaggtgatacagtttgcctttctgttggggatagagttcctgctgacttacgcttgtttgaggagagacagcgtctggagaccatcctca

SEQ ID NO: 267691 - DNA, 82 bp, Homo sapiens
ccagacactggaaaactggatgctgcagacactgaacgaggagccagtgggctgttttgctgcagcttctgaagtgttaaag

SEQ ID NO: 267692 - DNA, 50 bp, Homo sapiens
catgagatgattgccaaacccccagccaccattggttcaggcaatcttca

SEQ ID NO: 267693 - DNA, 74 bp, Homo sapiens
ctgcattcttgctttcagacagaaagcagttttaatccaggtgctggtttgccaactgacaaaaagaaaggtgg

SEQ ID NO: 267694 - DNA, 96 bp, Homo sapiens
gcctgcagcccgcactccttgaggatcgatcagccatgcagaagctggggacagaagtatttgaagaggtctataattacctcaagagagcaaggc

SEQ ID NO: 267695 - DNA, 50 bp, Homo sapiens
gagacccgttcagagtcctacagtggcagatattctatattgagcgcatt

SEQ ID NO: 267696 - DNA, 50 bp, Homo sapiens
aggcaccgagctgtctgtgcgtgatgccactgctactccttcacttgctc

SEQ ID NO: 267697 - DNA, 95 bp, Homo sapiens
gagtacacctgtttccaggacaaccaagcattttcatgaaacaaccccaaataaaggaagtggaaccacttcagagtcttactctgtcacccagg

SEQ ID NO: 267698 - DNA, 82 bp, Homo sapiens
aacagcagatgtaccctcagtacgccacctactattacccccagtatctgcaagccaagaatccacattcatctcaatggaa

SEQ ID NO: 267699 - DNA, 101 bp, Homo sapiens
cggggtccggacagccgcgcgctgagggtctcggggcgggcgccgcgggacctctccgggccatggttccagggtctccctccactgctgtagtaacccgg

SEQ ID NO: 267700 - DNA, 96 bp, Homo sapiens
gtgaaggaagcttatggtacctgcacaccgacaggctggagcgcgagaaaagaaatgaccgcccggatgtgccactgagagccccgcgggtctccc

SEQ ID NO: 267701 - DNA, 96 bp, Homo sapiens
aaaccaggacgaaaagatgtagctatgtgatgatgatgccatttaaacgacaggctctagtggaatttgaaaacatagatagtgccaaagaatgtg

SEQ ID NO: 267702 - DNA, 75 bp, Homo sapiens
agcaaagcgccccccaggtcgctgtcaatgggtgtgggcccatcgctggatggatctgtcagaacacggctttgg

SEQ ID NO: 267703 - DNA, 82 bp, Homo sapiens
ctctgcagctgaataacccttttaacgagtattccaaatttgatggcaagggaagcgtgacagcaatgacagtgttttttcc

SEQ ID NO: 267704 - DNA, 100 bp, Homo sapiens
gcgccccctcccagctcccagcgggtcaaagaattgactgtagatccaactgctgctggtgatgttcgtccaataatgcaccatccaccaaaccagattg

SEQ ID NO: 267705 - DNA, 88 bp, Homo sapiens
cggcgcggtggtcgggacagactggccgttgctgtggagacgcctgggccgcgttcgcaccaaaaccgtgaagaaggcggcccgggtc

SEQ ID NO: 267706 - DNA, 80 bp, Homo sapiens
cgccgcgatggtgacccggttcctgggcccacgctaccgggagctggtcaagaactgaatggagatgtatgcatttcgat

SEQ ID NO: 267707 - DNA, 87 bp, Homo sapiens
caggagcaggatgatatttctgatgatgttgaagaagtcaaagaccagtttgcaacccatgaagcattgatctggagaacattgtgt

SEQ ID NO: 267708 - DNA, 80 bp, Homo sapiens
catcgcaaccaccgccctggccatctaccatgtgcggatagcaggctccaagctctctcccaggctccagtattttggtc

SEQ ID NO: 267709 - DNA, 75 bp, Homo sapiens
aaaggaacccaacagagatctcttctgttctccactgctagttttctggatatgccgcagaaggatccgtgccag

SEQ ID NO: 267710 - DNA, 83 bp, Homo sapiens
tcgagcgacagagacaagctgagcttgccgcacaaaaagctagagagaaccctcacacggacgcctggaagagccacggcttg

SEQ ID NO: 267711 - DNA, 75 bp, Homo sapiens
atagtctatgtataaaagtaaatgggaagctatttcctttgcctgtgtgttcatcctcgaggtggtgtgattcag

SEQ ID NO: 267712 - DNA, 74 bp, Homo sapiens
ccagcacctgcaggcggagaagaagaagatgcagcagaacatccaggagtccacattccaggagctgtgcgagg

SEQ ID NO: 267713 - DNA, 82 bp, Homo sapiens
tctcagcctactatctgtctggagaagagaagaaaaagtcagcactttttgaagtgtctgaggttataccagtcatgacaaa

SEQ ID NO: 267714 - DNA, 90 bp, Homo sapiens
gaaaaacaagaattacagcagccaacctatgttgccctgagttacataaatagtgccggtggtggtgtgcacattgagccccggtataga

SEQ ID NO: 267715 - DNA, 100 bp, Homo sapiens
ctgcacgaggagcgattcctcaagaacaattcagtgctcaagagtgaagaaaattctactgtctttagccacttaatgaagtacccgtgtaatacttttg

SEQ ID NO: 267716 - DNA, 82 bp, Homo sapiens
gccccaccaccgccctcaccatgtgaagtacctggggctgctggcaatgtccaagatcctgaagacccaccccaagtccgtg

SEQ ID NO: 267717 - DNA, 78 bp, Homo sapiens
gaaattgaaattacctccgagggaaacaagaaaacatcaaagaggtctagcaaagactctaaaatagagctcaagctt

SEQ ID NO: 267718 - DNA, 90 bp, Homo sapiens
ccgacggtggcggcgggatgcagctccttcgagaactcatagaacggaagaccagctccttggatcccaacgatcaggtggccatgggaa

SEQ ID NO: 267719 - DNA, 51 bp, Homo sapiens
ttcgcagtggtcgcttcttctccttggagtataacatgtatggctggtggg

SEQ ID NO: 267720 - DNA, 74 bp, Homo sapiens
cacgaaggtgcgcgccggccgcggcttcagcctggaggagctcaggaatgagtccctggaacgccagatgcgtg

SEQ ID NO: 267721 - DNA, 82 bp, Homo sapiens
taaagatcaatgtgtcccggcagacattgtttgaagattccttccaacagcgttgcaggtggcgagctgtttgacttcttag

SEQ ID NO: 267722 - DNA, 75 bp, Homo sapiens
ttcaccgccccacactggcggatgaagcagctggtggggctctactgcgacaagatccagatgtaccagctctcg

SEQ ID NO: 267723 - DNA, 83 bp, Homo sapiens
caaggttttacttggtctttgagaaattgcaaggagatgagtgatgtagaagctggtggtgccaccgtcttccctgatctggg

SEQ ID NO: 267724 - DNA, 100 bp, Homo sapiens
cggagccagcggctgaggaggggccccagcagcccccgaaggccctatcaggacatggagtatgaaagacgacaacatctggggaagatgtacgagactt

SEQ ID NO: 267725 - DNA, 74 bp, Homo sapiens
gtgaccacccctgaagaaattgcacaggttttggaacttgaaggtgaaaaaggagaatggggatttaaagcact

SEQ ID NO: 267726 - DNA, 50 bp, Homo sapiens
gagtccccgccgaagaacccgagctcgtttgtggtggaaagacagccctg

SEQ ID NO: 267727 - DNA, 83 bp, Homo sapiens
cctgcccgccccgcgcctccgtctcccacgtgtccacaggatgaaatgtccgagtcaggccagtcctcggcggccgccacacc

SEQ ID NO: 267728 - DNA, 82 bp, Homo sapiens
ccctcgactccctgcagaggctcttcctcatcatctcagccacgaagtacagccggagggcgtgatggtgggcatgggtcag

SEQ ID NO: 267729 - DNA, 100 bp, Homo sapiens
tcaaaaggtgatctggacaaaggaacaggtatctcagaaggagctggcaaacagccctgactgtccccagatgtgtgcctataagctggtgaccatcaaa

SEQ ID NO: 267730 - DNA, 73 bp, Homo sapiens
cttcatggtatgaggttgactcatttacaccatttcgcaaagcttaattggcttagtgtcgacttcaataatt

SEQ ID NO: 267731 - DNA, 100 bp, Homo sapiens
caagacctctgagcccgccaagcgcggccgcacggccctcggcagcgatggcactgaaggactacgcgctagagaagggaacgccgcgatggctgcgcag

SEQ ID NO: 267732 - DNA, 50 bp, Homo sapiens
gcgttcgggccgcacccgcgcggaaattcgaaatgagtcccatgactatc

SEQ ID NO: 267733 - DNA, 134 bp, Homo sapiens
gggcgagcgaggggctaacttcagcggtggcaccgggatcggttgccttgagcctgatcagcattgttgatattgccaacaagaggagctcttctgctgaggaaagtggacaagatgttctagaaaacacattt

SEQ ID NO: 267734 - DNA, 90 bp, Homo sapiens
ggaaacagcagatgtaccctcagtacgccacctactattacccccagtatctgcaagccaagggacttccttccccgcggttcaggaatc

SEQ ID NO: 267735 - DNA, 127 bp, Homo sapiens
gggcttccccggttctcctgggaaccccatcggccccctgccagcacacacctgagcaggtatattgaaaagtctgattcagttacaatcagtgtatggaatcacaagaagatccataagaaacaag

SEQ ID NO: 267736 - DNA, 100 bp, Homo sapiens
tgaacttaggacagtattgagcttcctacaagctgttctggccagaatcagggcccatttggaggccagcgctgagaagtggaacaggttgctgatgtcc

SEQ ID NO: 267737 - DNA, 87 bp, Homo sapiens
aagtacatcataatcggcgacacagatgttctcagtgcagctgagtcttggtgagcagacatgggaatccgaaggcagcagtataaa

SEQ ID NO: 267738 - DNA, 74 bp, Homo sapiens
accgtcagtttgagccagatggctggtccctgcagacggcttcccatttttatgaccggatgctgggaagcctg

SEQ ID NO: 267739 - DNA, 74 bp, Homo sapiens
ccctgtttgacctcagcgcggatgctccggtctttcagggcctgagcctggtccactggtgtgtcctccccttc

SEQ ID NO: 267740 - DNA, 50 bp, Homo sapiens
cacaagtgcgcattggtgggaaattccgatgaagttaaattccgtcaaga

SEQ ID NO: 267741 - DNA, 98 bp, Homo sapiens
caatccaagccgactgatgactggagaggatggctactatttcaccaatctgcaagctatagtcagcagactggacctcaacaacctcagcagttcca

SEQ ID NO: 267742 - DNA, 75 bp, Homo sapiens
tccttccctgctttcctggacagcattggctataatagatgaatttgagcagaagcttcgggcctgtcataccag

SEQ ID NO: 267743 - DNA, 100 bp, Homo sapiens
cccgagtgcaaaaagcgcctcaatgaccggattgagatgtggagttacgcagcaaagatctctgatgtatggtttaatagaagatagctggattctcaca

SEQ ID NO: 267744 - DNA, 88 bp, Homo sapiens
catacgcggcaggaccaagcaacaaccatcccaatctggcaaaacaagccacatggggctgctcgaagtgtagtaagaagaattggga

SEQ ID NO: 267745 - DNA, 76 bp, Homo sapiens
tgcatctgtgtgttaggagcatgcagaccaatacttcattagaggggtggtagactcggaggatctccctctaaac

SEQ ID NO: 267746 - DNA, 75 bp, Homo sapiens
atcctaaacctgaggaaggaatacttgacagtttgggttgtctgcattcaaaagagcattctattaaagctacct

SEQ ID NO: 267747 - DNA, 98 bp, Homo sapiens
agcgggaccccgagcaccgggccctctgcgacctggggccctgggtgaagtgctccgccgcccttgcctccagggaaaaagacctcgatgaagttctg

SEQ ID NO: 267748 - DNA, 100 bp, Homo sapiens
tctctgactctgctgggattggctttcgccacctgccccactggaacacccgctgtcctctggcctcccacacggacaaggaagatggggagccaaagac

SEQ ID NO: 267749 - DNA, 97 bp, Homo sapiens
gggtaggagtaggactagcagacactgaaggaggaattgttgataaagaccttcgtcactacctcaacttacgatttcaaaagggttctgtggacca

SEQ ID NO: 267750 - DNA, 80 bp, Homo sapiens
agagaatgacctagcaaaagttgatgatcttccccctgttattttaccaagaaaatggtttgcacgactttgaacatata

SEQ ID NO: 267751 - DNA, 74 bp, Homo sapiens
cgttatggtctcgtcaccaatgaaatagccatggtccaggcttcctgctgtgaagacagggtgcactgctgtcc

SEQ ID NO: 267752 - DNA, 83 bp, Homo sapiens
agcacctacgtcccgctgccgtcgccgccgccaccatgcccaagagaaagccatccagtccaatggatcagatgggcaagatg

SEQ ID NO: 267753 - DNA, 100 bp, Homo sapiens
tcctggcgccccgcccccactgctgtttctcaataagcaaaaaggtgacatcactcaaaaaggatatgaaaagaaaagggcaaagctgcttgcacgttat

SEQ ID NO: 267754 - DNA, 96 bp, Homo sapiens
ttgtccttctacctcaccacctttgagttgtggaaagtaaaaatgtagccctaccaaaaggaactattgtactggcttctccaggctggacaacgc

SEQ ID NO: 267755 - DNA, 90 bp, Homo sapiens
ccgggatggcgacgtctacactgagtcggaggcgaagcatggcggacaccgacctgttcatggaatgtgaggaggaggagttggagccat

SEQ ID NO: 267756 - DNA, 100 bp, Homo sapiens
caggggcagcctgtcaagtttccagcaaatgccaatagtactaaagaggaggtggaaatgaattgggacatggtacaggaggttcccatgatccctcggc

SEQ ID NO: 267757 - DNA, 82 bp, Homo sapiens
agcaacttggcgaggttcagactcttggagccagaagctacatgacccctaaacggtggcagaaagagcactctattattgg

SEQ ID NO: 267758 - DNA, 83 bp, Homo sapiens
gtcggagtttgagccccggaggcagagcggctgccatgctgaactttgacctggaccggggcgtgtttccagtagtcatccag

SEQ ID NO: 267759 - DNA, 75 bp, Homo sapiens
cggtcggctcctgctgcccctgtgccgagaccccgcgcacctggccaggccaggtcagagcagcccaccatggga

SEQ ID NO: 267760 - DNA, 75 bp, Homo sapiens
ccttgccaaccctcccaagaagttcagaggttatcttatgatgaggcttttgctatggctaatgatcccttggaa

SEQ ID NO: 267761 - DNA, 82 bp, Homo sapiens
gacgcctggtggagcagctcttcagctcagctggaaccctacatggatgagaacttcatctccagagcctttgccaccatgg

SEQ ID NO: 267762 - DNA, 100 bp, Homo sapiens
tagtcctgggagccgcctccgtcgccgccgtcagagccgccctatcagagagaagtggagatcctgatgtttctcagtgccattgtgatgatgaagaacc

SEQ ID NO: 267763 - DNA, 82 bp, Homo sapiens
agccgatccagcctgcggagcctgtggggcaggtagcagggcgccaagcagtgacttctgaccaacagagtgtggggagaag

SEQ ID NO: 267764 - DNA, 90 bp, Homo sapiens
ggagaacctggcacttatgtcctccctggcagggcactgtgacctttgaagatgtggctgtgaacttttcccaggaggagtggtgtcttc

SEQ ID NO: 267765 - DNA, 75 bp, Homo sapiens
ccccgacgccgtcgcggtggactgcaaggatgaagatgagctggattcccacaccatggtgaagactagtgtgga

SEQ ID NO: 267766 - DNA, 82 bp, Homo sapiens
tgatgaagatgatgaatctgatgacagccaatcaggtctattctggataagcaggttttgtgaagacatttattctttcttg

SEQ ID NO: 267767 - DNA, 115 bp, Homo sapiens
cccagagggctgcggccgcgtcgccgctgaggatgtcccgaaaggggccgcgagcggaggtgtgtgcggactgcagcgccccgggtctcctctgagcctccggcctccataagac

SEQ ID NO: 267768 - DNA, 95 bp, Homo sapiens
ggtgatgcgctgcgtgctgtgcgcctgcgaggcgatccgcctcacggacacgctgggcaggctctcgcacatcctggagatggaccacttcgccc

SEQ ID NO: 267769 - DNA, 90 bp, Homo sapiens
cgaaaaaccatagactacaatccatctgtaattaagtatttggagggagagcctggggatgtacaggagatgcctgctccagaatctcct

SEQ ID NO: 267770 - DNA, 51 bp, Homo sapiens
gctgccgccccttgggctaaaagagtcctcctttgtcacccagcctgaagt

SEQ ID NO: 267771 - DNA, 99 bp, Homo sapiens
tggaccccaagaagaccattcagatgggatctttccggatcaatccagatggcagccagtcagtggtggaggcctcatcatttctgtctcctgtttctc

SEQ ID NO: 267772 - DNA, 82 bp, Homo sapiens
agtgggagcccagttggaagcccgggaccgtttaaaaaactgaggacacagagactcttattaaggcagtttatacattata

SEQ ID NO: 267773 - DNA, 50 bp, Homo sapiens
gccagagccaaagaagccttgcagggtggaagttgatgggtcgaaactaa

SEQ ID NO: 267774 - DNA, 98 bp, Homo sapiens
ttagaaggaggttcaggctacggtgagccgaaggtttgactttgagggtctggaaagtggtgacgatggtgcatttgacaaactccggtcctggagca

SEQ ID NO: 267775 - DNA, 75 bp, Homo sapiens
gggccacgcctgggacgccctcaaggtcgaaggacctgcaagcgcaggaccgagcccaccgcatcgggcagcaga

SEQ ID NO: 267776 - DNA, 82 bp, Homo sapiens
cctgcagcgggagctggacggcgagcgcgagcggcgcgagaaagaacggagctttgactgtaagatctgtgggaagagcttc

SEQ ID NO: 267777 - DNA, 135 bp, Homo sapiens
tggtgcttttgaaccactggaaagtgaggaattttgaagtacaccgtggtgacattgtatcattggtctcttttaagagcctgtgccgatggaggtgccaaccgcttatatgatatcaccgaaggagagagagaa

SEQ ID NO: 267778 - DNA, 95 bp, Homo sapiens
gcagcgccgggcgaccccgcccgggcctcggatgccgtagggccaggtgagctgctgtgaaggactcattcttggtagccggcagttactggcaa

SEQ ID NO: 267779 - DNA, 90 bp, Homo sapiens
gtcccagtgccgggagcgcatcaaggtttgcctgcaatgagatttcattctctacatttaaaggacatcctttctgagctgctgtgaata

SEQ ID NO: 267780 - DNA, 100 bp, Homo sapiens
agtggacaaaccaaatgaccaatcttcaagatggtcttcagagagcaactatcctccccagctggaaatggagaagcttcagctacaagcccttgagcaa

SEQ ID NO: 267781 - DNA, 76 bp, Homo sapiens
ctgggcttcgtccagatcgggaaggatcaggatcctcatgaccagccaaagagaagaagaattaggaagcataaat

SEQ ID NO: 267782 - DNA, 96 bp, Homo sapiens
gcttcaggtgtgaaccagacccccgtggtagacgattttgaatgtggaaatgacgtggaactgtcttttaccaagaatggaaagtggatgggcatt

SEQ ID NO: 267783 - DNA, 90 bp, Homo sapiens
gccgacgggacctgaagtgcagacccctaagctcattgctatggacagtgctatcaccctgtggcagttccttcttcagctcctgcagaa

SEQ ID NO: 267784 - DNA, 75 bp, Homo sapiens
tgtcccagattttcagtctgataaccgatacttctagaattactggctcccataaaacagaacagcggaatgctg

SEQ ID NO: 267785 - DNA, 129 bp, Homo sapiens
tttccaggagcaggatgatatttctgatgatgttgaagaagtcaaagaccagtttgcaacccatgaagtttcctatcctgggagcaggagagtgtgcctatttgaatgacaaaggtgccagtagtgcca

SEQ ID NO: 267786 - DNA, 100 bp, Homo sapiens
cggtgcgcagacagagctattccagcaccagcagagagaggaggttcagatgagcccctgctgacttgagagagacagagagaccacgccgattgctgag

SEQ ID NO: 267787 - DNA, 100 bp, Homo sapiens
aaatggacctgctgacagagcagatggcctggagattcatgacaaaatcatggagggttaaagcacgaattgggagctctcagcgacatcaccagtcagc

SEQ ID NO: 267788 - DNA, 90 bp, Homo sapiens
ctttgtgttgtctgcatttggaggagcaacaatgtgggactatacgcaggatcaggcaaaaatgatcatgccgaaaaagtggcggaaaag

SEQ ID NO: 267789 - DNA, 98 bp, Homo sapiens
cgtgctcgtagctgtcaagagggtcatcgactacgccgtgaaggactatgagagtaaattgcaggccttgcagaagcaggttgaaacccgatctctgg

SEQ ID NO: 267790 - DNA, 75 bp, Homo sapiens
tttcgccagcccgtgccgcgagcgcggcctgcaggagtttggtgccctggttgtcagatgttggaaagcagtagg

SEQ ID NO: 267791 - DNA, 98 bp, Homo sapiens
ctccttcttcccacgctgctactgcctgggggctgaggatgacaaaaaagccttcatagattggagctggagtgagccttccaggaattttggctgcc

SEQ ID NO: 267792 - DNA, 100 bp, Homo sapiens
aggcacttgtggcttcgtacttaataaagtatttcgtcccatatctgctaatgccaaacttgtgatgaatcgccgatctgattttgacttttctgccccc

SEQ ID NO: 267793 - DNA, 80 bp, Homo sapiens
atctacttcacaggaattgccatttggcccagcactagaagatttcagtcatctgccaccagaacagagacgtaaaaaac

SEQ ID NO: 267794 - DNA, 83 bp, Homo sapiens
ggtggactccttcggcagtccacccaccgccgccgcctcccagtcccgcagcgtggacaagcagcatgccgtcatcaactacg

SEQ ID NO: 267795 - DNA, 100 bp, Homo sapiens
cagtacgttttgctggtgttgtccctcccgtggcaggtcaaggtgaagatgttcttaaagggtcccagattacgtatgttacaggtgtagaaggggacga

SEQ ID NO: 267796 - DNA, 98 bp, Homo sapiens
agtgttctcgacttcgtcgctggtctccagaaatgctttgggttcatctttcattgctgcaaggaacttccatgcctctaacactcatcttcaaaaga

SEQ ID NO: 267797 - DNA, 100 bp, Homo sapiens
gctccagtcaaggtgaaaaatgctcagggatggagccctctggcggaagccatcagctatggagataggcagatgacttttctgcaattagataaaaaag

SEQ ID NO: 267798 - DNA, 75 bp, Homo sapiens
atgatttcgatgatgatgatcctgaggtctacagtgaatatagagccagtcttgcttttgaccttgttagcagcc

SEQ ID NO: 267799 - DNA, 75 bp, Homo sapiens
aggacaccaacagtgtggtggagaaagcaatggatgaaatcaaatcccaaggtgttggagcgggccggagagaag

SEQ ID NO: 267800 - DNA, 75 bp, Homo sapiens
caaggcgtgtccagagcattctgctcccataaaagttcatcataatcaaacggcagaagctcctcctggggtaga

SEQ ID NO: 267801 - DNA, 100 bp, Homo sapiens
gatagaccaggctgtggaggagtggaatattgagaaggctgaggaactcagcaaccagctagctactcgagaggacccagatgatgtggtaccagttggc

SEQ ID NO: 267802 - DNA, 98 bp, Homo sapiens
tgggattttgttgaagccacacaaagaacaaattgcagttgtttgaggtacaaggaaatggtagaactagtgatctcacccagcctcactgtaaacag

SEQ ID NO: 267803 - DNA, 98 bp, Homo sapiens
aatgacgacagcaacccgaagacagggaaatttagttctgccttcccaggaccctgcccttccccagaaggagcaggagaaaatgaccaagtttcagg

SEQ ID NO: 267804 - DNA, 74 bp, Homo sapiens
ctgcacctcaggagggaattcagcctcagtgatgtccatgagatataacacgtgggaaccggaggagaacatcc

SEQ ID NO: 267805 - DNA, 75 bp, Homo sapiens
ctaccccactcctgggccgtccctgaaggatgaagcagcaaaggaatttcaggagaaacacaagaaggaagtagg

SEQ ID NO: 267806 - DNA, 90 bp, Homo sapiens
ctgaaggagaacctgcgggtgctggagaacaggtggagccgccaccaaaatgcagattttcgtgaaaacccttacggggaagaccatcac

SEQ ID NO: 267807 - DNA, 83 bp, Homo sapiens
cgagcagtatgccgccctggccacggggactctcttctggatgccagagactgctgctactttgaaacgtacgatagaggccc

SEQ ID NO: 267808 - DNA, 75 bp, Homo sapiens
gctgctaccccactcctgggccgtccctgaagcacagccatgacagtgcagatcctgctgaagctggaccgcctg

SEQ ID NO: 267809 - DNA, 88 bp, Homo sapiens
gtgcccatcagtgacagcaagtccattcagaagttcacagcagatgaggctcgggacctgattcaacgttacctgacagagcaccctg

SEQ ID NO: 267810 - DNA, 74 bp, Homo sapiens
cagattcaaagccaggcaccattcgtggggacttctgcattcaggttggcagggcagctgcaatgactctccgc

SEQ ID NO: 267811 - DNA, 75 bp, Homo sapiens
ccgctggggtcccttttgcctcagatactattttgaaggttgtggggcgggaactgctggcccaatacaccaaac

SEQ ID NO: 267812 - DNA, 75 bp, Homo sapiens
gaacagtgtccgacagctctcagctcaagggattgtcaatgaggcagatcagattccgatttgacgggcaaccaa

SEQ ID NO: 267813 - DNA, 50 bp, Homo sapiens
aactggaaaacagctttttgatcaggctgcatttgatgccagaaggcaaa

SEQ ID NO: 267814 - DNA, 82 bp, Homo sapiens
ctcagaccgtaccttgcaacaaggagtacttcttgcaagcagagctgacaagcaacgtcttaaaaacaggcgtggtgcgctg

SEQ ID NO: 267815 - DNA, 80 bp, Homo sapiens
gctgggctttctattgggcaagaaatagaagctcttgggacccaaccaccatgctgtgaagcagcccaggccacacagag

SEQ ID NO: 267816 - DNA, 98 bp, Homo sapiens
agatcgtgggcgagctgggcgacggcgccttcggcaaggtttacaagctgagatctgtatctgtggacctgaatgttgatccctcgcttcagattgac

SEQ ID NO: 267817 - DNA, 101 bp, Homo sapiens
tggttatgatacaatcttgcgtgtcctgggctctaatgtcagagaatttctacagacatcccagttaccagtgtccttgaattgatagtggcttctgtttg

SEQ ID NO: 267818 - DNA, 100 bp, Homo sapiens
gaaaaacagaaaaataataattacatctgcaaagaccttatttccagggatgaattgtaaaagcaacatcagcttgaccagtataaaattacagtggatt

SEQ ID NO: 267819 - DNA, 74 bp, Homo sapiens
agcaggagatacggaccctggagacctctgtgagtgaaagccttcagagggaagctgctaagaagcaggccatg

SEQ ID NO: 267820 - DNA, 87 bp, Homo sapiens
acaagaagagcagttcccaggatctgcataaagatcctatagcaatggaactcagcgatgcaaatctgcaaacactaacagaatatt

SEQ ID NO: 267821 - DNA, 116 bp, Homo sapiens
gtcgatttggatctgggatgaacatgggcaggataaatggttttgcactgattgcaaaaataaagtcctccgagcatacaatatccttattggtgaacttgactgcagcaaagaaa

SEQ ID NO: 267822 - DNA, 75 bp, Homo sapiens
aacctgaactgcccccagcacttccgagccccgacccctgcagctgtgaggggttgtagaaggtgatttagctgc

SEQ ID NO: 267823 - DNA, 95 bp, Homo sapiens
gctgaagagcgacaagccgctggcagccgcggatctcaccgccgctcagggcataatcaccagcaacacccgggacaataatacgggggccacct

SEQ ID NO: 267824 - DNA, 100 bp, Homo sapiens
ggcataatccctgcactcattgaattgctaaatgggtaatggcagatgagttaaccaactcaagagcagctttacagcgtcaaaaccgtgatgcacacgg

SEQ ID NO: 267825 - DNA, 83 bp, Homo sapiens
ccgggacgcgggtcgcgtcgttgtcctccgcgagcgtccggattgcagaatccacattcatctcaatggaaggatcctgcctt

SEQ ID NO: 267826 - DNA, 75 bp, Homo sapiens
cgcagtggtcgcttcttctccttgcaactattctgtcaaccctggccaatttggaaggtgaagaaacttttgaag

SEQ ID NO: 267827 - DNA, 87 bp, Homo sapiens
ccatggatgttggcaagtctttacaatggcagtgtgtgtgtttggaatcatgaaacacagagagctgtagtacacatggatgaacga

SEQ ID NO: 267828 - DNA, 100 bp, Homo sapiens
gcttctggaaggaaaagaacacctgtgaaagaccgattttctgcagaagatgaagctttgagtaacattgccagagagatcatggaaaatgctgagatta

SEQ ID NO: 267829 - DNA, 75 bp, Homo sapiens
ccagtgggagctgccctctcgaaggcaggacagcggtggcggcaggtaaactaacattatggatttttccaagct

SEQ ID NO: 267830 - DNA, 73 bp, Homo sapiens
gcaggggaaacttgaacattcgcaggtaaacctagcctttaagcaacctggaaagaggctagaacaccaagga

SEQ ID NO: 267831 - DNA, 75 bp, Homo sapiens
tgaggacatgaggaaaatgtccttccagcgctgcgcccggacagacaagcctggagatgcccaaagatgagctgc

SEQ ID NO: 267832 - DNA, 75 bp, Homo sapiens
attaatctcccaaaatattctagaaggggaaaagctacttcaaggtggctttcttcctccagaagaaataaaaga

SEQ ID NO: 267833 - DNA, 100 bp, Homo sapiens
cttcgtggtgactgtcaagcaagagcgcggcgagggtccacgcgcgggcgagaaggggtcccacgaggaggaggctttggcataggatcagaaattctga

SEQ ID NO: 267834 - DNA, 83 bp, Homo sapiens
gacatttcttcggcattctgcaacaggtatccaaaccttgaaacctttgctctagatgtcaggcttgtttttgacaactgtga

SEQ ID NO: 267835 - DNA, 83 bp, Homo sapiens
cgtcgccgttactccgaggagataccagtcggtagaggtgtcttctacaaatgcttctgggaactggaggacccagttaacca

SEQ ID NO: 267836 - DNA, 75 bp, Homo sapiens
tccgtgtggaccctgactcacagaatttcacggtccctcatggtgtctcactccagcagacagaggattgtgtcg

SEQ ID NO: 267837 - DNA, 75 bp, Homo sapiens
cccttcttcataactgatcaccctttccatatgcaggtggatcccacaactcatttgacctttaaccttcacctg

SEQ ID NO: 267838 - DNA, 74 bp, Homo sapiens
ccagctttcccccgagggtcaacgagaaagagatcgagagagaatctgaccaacacagttgatcacttgtaggt

SEQ ID NO: 267839 - DNA, 96 bp, Homo sapiens
ggcgagcgcccggattggggatgagtatgcggaggacagctctgatgaggagcacatgattaagtaccggtacatcccgttcacacatgggaagag

SEQ ID NO: 267840 - DNA, 98 bp, Homo sapiens
ctgggtgaactttcacggacaacctcagaggacaacgaagtgttcggaagaaaacaggcagattttggcgcggcaaaagtcaaactcacagtcggact

SEQ ID NO: 267841 - DNA, 89 bp, Homo sapiens
gaccgtgaccgagagcgtgaccgagagcgcgaatatcgtcatcgttagaaggattattgcatcgagcttttagtgtcttcttattcaac

SEQ ID NO: 267842 - DNA, 83 bp, Homo sapiens
ggacgttgtcttgggaagcaaatgaaggtgagaagccatttaaatgtgatcagtgcagttatgtggcctctaatcaacatgaa

SEQ ID NO: 267843 - DNA, 96 bp, Homo sapiens
gcgggcggagacatggccaacatcgcggtgcagcgaatcaagcgggagttcaaggaggtgctgaagagcgaggagaatttatccagttggcgaagg

SEQ ID NO: 267844 - DNA, 50 bp, Homo sapiens
gaggaaccacacgctgatcatgtcaccttcaggccattcagaggaggaaa

SEQ ID NO: 267845 - DNA, 50 bp, Homo sapiens
cagagaagagcacagaatgtaccagagagccatgaagctcatgactgctc

SEQ ID NO: 267846 - DNA, 90 bp, Homo sapiens
tcagtttgtgcaggacaccgacatggaacagggactcactgggggccctgtctcagcgggaccctcctcacaacaacttcttcttcttcg

SEQ ID NO: 267847 - DNA, 74 bp, Homo sapiens
atttatagctgcaatgtggggtatcttcatgtttaaggaaataaaggtgcagacacgcagtgctgatgagccca

SEQ ID NO: 267848 - DNA, 115 bp, Homo sapiens
taggagtgaatataaaaggacttcatctcctcaacatggaaactaagctcaaatagctataactgtaccaaagacatggaagaaaccaaaagatcggacccgaaccactgaagag

SEQ ID NO: 267849 - DNA, 95 bp, Homo sapiens
ccgggatcgtgaccgagaccgtgaccgagagcgtgaccgagagcgcgaatatcgtcatcgttagaagaggcgacaggaagaagggtattacagcc

SEQ ID NO: 267850 - DNA, 88 bp, Homo sapiens
caatccctgccttttgagtccaggtgcttttaaagcagttctccaccagcctttgaaggtcatccgggaaattctagttaatcagact

SEQ ID NO: 267851 - DNA, 74 bp, Homo sapiens
agtttcctgaggcctccccagccatgctgaactgttttaaaatcaaagatgggaaaatcggagaaaattgccct

SEQ ID NO: 267852 - DNA, 120 bp, Homo sapiens
tgacctttctcatctgactcgtgatctgcccatcttgttactccctagcagtgtggtaagatcgaagcaaagctgagatggatttgaaggagctgagcgagtcggtccagcaacagtcca

SEQ ID NO: 267853 - DNA, 82 bp, Homo sapiens
acttttcttatcagcatttatcaagtcttacaggagcatcagcacaggttgctaggaagaggctcaatgtttgtgttttcac

SEQ ID NO: 267854 - DNA, 100 bp, Homo sapiens
tgatgccgcagatgatgccccctatgggagggccaccaatgggacaagacatggatttgattgacatactttggaggcaagatatagatcttggagtaag

SEQ ID NO: 267855 - DNA, 100 bp, Homo sapiens
aattatccaaataaattgcaagcattctatccaaatggttatcaatactctggctgaccatcatcatcgtgggactgactttggtggaagtccttggtta

SEQ ID NO: 267856 - DNA, 90 bp, Homo sapiens
gaggtcgacggcgtgatgcggatttttggaggcgtccagcagctccgtgagctggagaatgctggaggagaccttaaggatggccaccac

SEQ ID NO: 267857 - DNA, 90 bp, Homo sapiens
tcgtgcttgtcaacaaggcgctgctgaccacctacgggatgacatggaagcttaccggacccagaactgcttcctcaactccgagatcca

SEQ ID NO: 267858 - DNA, 82 bp, Homo sapiens
ggctggcatcattcaggacacctggcacaaggtgccaagtcctgccctgccaacttcttggcagctgccgacgacaaactca

SEQ ID NO: 267859 - DNA, 95 bp, Homo sapiens
catggccgccctcgagaaacccctcagccaccccatgcaggaaactccacacccactcgcccgggtctatggccacggtcggagagtggtcctgt

SEQ ID NO: 267860 - DNA, 75 bp, Homo sapiens
ggactcagagctgagaaacatgcaggacctggtggaagacttcaagaacaaggtgtccgcaatgttgccagtgtc

SEQ ID NO: 267861 - DNA, 75 bp, Homo sapiens
caacagtttgtggcaagacaagctcagaactgagaagctgtcaccacaggctcgaatgctcatcacagaagaaaa

SEQ ID NO: 267862 - DNA, 100 bp, Homo sapiens
tgaaattgaaaaacttagcccatgggacatggaaccaattcctgataatgaagtctgggccaacggtcacaaaagttgtcactgttgtgacaaccaaaaa

SEQ ID NO: 267863 - DNA, 100 bp, Homo sapiens
gcactgggtgtacctgctttgcttctctgcagtatggtttgaagtggtgaacatggatttttctcggcttcacatgtacagtcctccccagtgtgtgccg

SEQ ID NO: 267864 - DNA, 74 bp, Homo sapiens
ctcggtgctgtggtgcagagctagttcctctccagctcagccgcgtagagcaatgttgatcccagggatgatgt

SEQ ID NO: 267865 - DNA, 100 bp, Homo sapiens
tgttaaggattccaagtaactcttatttgtatattccagaagatattcttaagaatttagtagaggagcttcctcaaccacgaaaaatacctaaacgtct

SEQ ID NO: 267866 - DNA, 102 bp, Homo sapiens
caatatctgtcttcggtggactccttcggcagtccacccaccgccgccgcctcccaggccaagtcctgtatctgccatgtctgtggcgtccacctcaacagg

SEQ ID NO: 267867 - DNA, 95 bp, Homo sapiens
ggaaaatggcggacgggaaggcgggagacgagaagcctgaaaagtcgcagcgagctggagccgccggaggtctcaacaaatggcagctattacat

SEQ ID NO: 267868 - DNA, 82 bp, Homo sapiens
gccgcggagctggtttctgccgacaaatgatatcatcaagttgaatcgaaaggaagggaagaagcagaattttccaagacta

SEQ ID NO: 267869 - DNA, 90 bp, Homo sapiens
ggcgggagagcgccggggccgacacgcgccgctacatccagaagatcaagtcgggagaggaggactttgagtctctggcctcacagttca

SEQ ID NO: 267870 - DNA, 100 bp, Homo sapiens
gggagagggagaacacagttggagaaaatcggcagctgagacggccttggccgcatccttcggaaagctctggacaagatcgcggaaatcaagtctctgt

SEQ ID NO: 267871 - DNA, 82 bp, Homo sapiens
cttccagaggctttgtggtgcgggacgcaccctggaccgccagcagcagtgagaaggttaaacccatccagagtaatggctg

SEQ ID NO: 267872 - DNA, 100 bp, Homo sapiens
cacctatagaaagaaatgagcagctttggataatgacgacagcaacccgaagacagggaaatttagcatggccgaaacagaagccctgtcgaagcttcgg

SEQ ID NO: 267873 - DNA, 82 bp, Homo sapiens
ctcaaggacacggtctacaccgacttcgacggtacaatggcttggtgaccggcacgagggctaagggcatcattgccatctg

SEQ ID NO: 267874 - DNA, 82 bp, Homo sapiens
gtacacactgctgtttaccttggcgaggcctttcaccaagtccatggtgtctgcccaggaggtcaggaaggagaatcccctc

SEQ ID NO: 267875 - DNA, 101 bp, Homo sapiens
agcggcgcctcctgccctttagccgccgctggcccaacggtttccccagcagtagcctctgcgaccaggtgctggagaatctggtaaaagcaccattgtga

SEQ ID NO: 267876 - DNA, 100 bp, Homo sapiens
gactccggagacagcccaaatatcctcggaagagcgctcccaggagaaacaagcctgatcacttgaacggacatatcaagcaggtgcacacttctgagcg

SEQ ID NO: 267877 - DNA, 85 bp, Homo sapiens
attctggaagctacaaacagtttgtttttacctctgcctcctggtcctcagaatggttggaatgaccctccagctttgaacagag

SEQ ID NO: 267878 - DNA, 75 bp, Homo sapiens
gtcgccacagctgattttggtgaatatggccagcttcccagaggcatggaaagctcacctgatgggcccagccgg

SEQ ID NO: 267879 - DNA, 76 bp, Homo sapiens
ctggactgtgggctggtgtgtggaactgtccagtgtgaaaaaagccagtattaaaatactgaaaaattttgatgaa

SEQ ID NO: 267880 - DNA, 140 bp, Homo sapiens
gcctgtgccgctgcacccgcaggtgctgggcgcgctgcgggagctgggcttcccgtacatgacgccggtgcaggtggatgtggacctggccaagcagtgtgcagacctgcctgaggaggatgaggaattgcgcaagaagc

SEQ ID NO: 267881 - DNA, 100 bp, Homo sapiens
gcacagttaccaaaattgaacttgtctttcgcttgtgagcggttgtggtcattgtgagttaagatccttctattctacgtaatattttatggctgcctgg

SEQ ID NO: 267882 - DNA, 51 bp, Homo sapiens
ccctggagaagcagatggaaaagtgggctcgggatgagtttgaaggcctct

SEQ ID NO: 267883 - DNA, 100 bp, Homo sapiens
ggaatgctaagaactgctgggaggatgacagggtcaccagtcgttggcacaccaagaagctgccccgcaagacccaccgaggcctgcgcaaggtggcctg

SEQ ID NO: 267884 - DNA, 50 bp, Homo sapiens
ctgggtttgagtccagcagtgctttaggttcgatacaagaggctgttttc

SEQ ID NO: 267885 - DNA, 99 bp, Homo sapiens
gacaaagaagagcctgaaagagccaaatcttaccttctggaccatgggtagaagagcagaggatggctctgtcattgattatgaactgattgaccaaga

SEQ ID NO: 267886 - DNA, 90 bp, Homo sapiens
tacctgcacgcctgccggcatcagaacgagagcaaatcgaggaaatacttagccaagagaatcacctgttggccgaaaggattctccaca

SEQ ID NO: 267887 - DNA, 98 bp, Homo sapiens
gaagaccaaaactgtccagtgtaaagtgaccctcttagatggcaccgaatacagctgtgacctggaggatatcaatgcttacaattgtgaagagccca

SEQ ID NO: 267888 - DNA, 75 bp, Homo sapiens
tgaagagatggtggattctcactgagttttgactagcggaagaaaagccagagctgctggatctgtacacggtga

SEQ ID NO: 267889 - DNA, 75 bp, Homo sapiens
ttttctaacaagagatctttcttctaggaaaacctatttgattctttgacaggccagccacatcctgaagatgta

SEQ ID NO: 267890 - DNA, 102 bp, Homo sapiens
aagagtctggagtttatctggagtgaggtggccggttcttggtgggatctgagcagggggatatgagactttctactcggaatatcctgagtgttgcgtgga

SEQ ID NO: 267891 - DNA, 75 bp, Homo sapiens
agcacgggaagaagcagctggacccgctcaccatctatggcatccggtgtactccaaagattcaggtttactcac

SEQ ID NO: 267892 - DNA, 99 bp, Homo sapiens
tctatacaaactaatggaaggatacagctatgcaaatatagaacactaaagtgttacatgacagatgtatgagaaactctataaaacaggtcgggagat

SEQ ID NO: 267893 - DNA, 101 bp, Homo sapiens
tgcacacgccctgcatcgagcagctggagaagctcagcgacatgtcctcacctacatggaggatgcagtgtgccagctgctagaaaacagggaagatatta

SEQ ID NO: 267894 - DNA, 90 bp, Homo sapiens
atcactttgtgtcaaaaagaaataactcagctgaagcatcaggctaaagaattacctccaaagccattgtcaagaccacagcagtcatct

SEQ ID NO: 267895 - DNA, 83 bp, Homo sapiens
cgccgctgccccggctgcctcctccctgaggtatcacctgattttgatacagcagcaggaagcttgttcccagcctaccagaa

SEQ ID NO: 267896 - DNA, 75 bp, Homo sapiens
tacagggaaaatttcaagcaaggtggagttggaaaaggctgctttgtaccgcctcagtggagactggaatccctt

SEQ ID NO: 267897 - DNA, 100 bp, Homo sapiens
ctttgagaacctagaaatcatacgcggcaggaccaagcaacagaaattcagttcatgaagataagaagtttcttgacaaatacatgccccagttcatgaa

SEQ ID NO: 267898 - DNA, 82 bp, Homo sapiens
gtccgtccgccgccaccacccactccggacacaggtgtggaaacaggaagagaactagaactggaagtaaagcattgaagat

SEQ ID NO: 267899 - DNA, 51 bp, Homo sapiens
cggcggcccacgcgcagcgacagggagagggatcgactacaagaccaccac

SEQ ID NO: 267900 - DNA, 74 bp, Homo sapiens
gctgctcaagttccagatttgtgagtccattcttgcacaccgagaaaatatgcgacagatgataagaagttttt

SEQ ID NO: 267901 - DNA, 80 bp, Homo sapiens
aatttgcaacacagtagtggtttctgctcctaaccaaccccgacaaaagatacttctaggacctaacacagggctctcag

SEQ ID NO: 267902 - DNA, 90 bp, Homo sapiens
agcagcagctctcgctccagaagcttcactttggtgctggagaatctggtaaaagcaccattgtgaagcagatgaggatcctgcatgtta

SEQ ID NO: 267903 - DNA, 100 bp, Homo sapiens
catcaacaacggctcccccaccatcctgggcaagcgcagctacgagcagcacaacggggtggacggaggatttgatgaagatgttaaagcgaaagtggag

SEQ ID NO: 267904 - DNA, 75 bp, Homo sapiens
gattctttgtagcagacactgcaaatgaagctctcgaggctgctaagagactaaaaatggctcagggaactgttg

SEQ ID NO: 267905 - DNA, 100 bp, Homo sapiens
tggccgcgagctccggaggatgagtgacgagtttgtggactcctttaaggacctccacaaaaagtactcgtacatccgcaagaccaggcctgacggcaac

SEQ ID NO: 267906 - DNA, 90 bp, Homo sapiens
ccgccgatcccggagcccgagccgggagagggagccgccgcagccgccggcgctgtggaggttttgacaagcttgcatcatgcgtgagta

SEQ ID NO: 267907 - DNA, 50 bp, Homo sapiens
aggcgctggcgtccggcctgaacctgcctagagctggaacgttacctcca

SEQ ID NO: 267908 - DNA, 90 bp, Homo sapiens
agactgtacagcaattggcggccagagtcctggtggaggacgatgagatcatgcagggattcatcagggctttcaggcccctgcccaggc

SEQ ID NO: 267909 - DNA, 74 bp, Homo sapiens
gccgcctgaccacggcgactggacttacgaggagcagtttaagcagtatggaagctccaaaaggaaagatacca

SEQ ID NO: 267910 - DNA, 100 bp, Homo sapiens
aacgctctcatccggaggcaggaccagctgcagctgctgtgtggcacattggttgacctttgccagggcccccaccttcggcatactggacagattggag

SEQ ID NO: 267911 - DNA, 100 bp, Homo sapiens
ctggtctcagaggtgaaattggtaaccctggcagagatggtgctcgtggggctcctggtgccgaaggttcccctggacgagacggttctcctggcgccaa

SEQ ID NO: 267912 - DNA, 75 bp, Homo sapiens
ctttgggaaagccactcgaaaagatcatggaagggaagtggttgctgtgtatgttactggtgcttggaactgcta

SEQ ID NO: 267913 - DNA, 88 bp, Homo sapiens
acgagattgctcctcacatcatctattgttccatcacagggatgatcatggtgattttactgctgcttgtggctatcgtggttgttgc

SEQ ID NO: 267914 - DNA, 98 bp, Homo sapiens
gaaaaactgggagagaaagggaaggaaattatgaccaagtacctcaccccaaagcttgtggagagactccagagcaaatacgagcaccaagtggcata

SEQ ID NO: 267915 - DNA, 98 bp, Homo sapiens
ctacttgtgtcactaacggaccgtttatcatgagcagcaactcggcttctgcagaataatccagaatggctactctgatctatgttgataaggaaaat

SEQ ID NO: 267916 - DNA, 87 bp, Homo sapiens
gggccctacggccgcccgccaccaggatttagagggaaagatcattgtagatgaactgaagcaagaagttatcagtaccagcagcaa

SEQ ID NO: 267917 - DNA, 100 bp, Homo sapiens
cttacgtctgcggaagtgcagctgcctcagttcttagcgcagccttgcctccccgattgaaagagatgaaaagccaggaatcggctgcaggttccaaact

SEQ ID NO: 267918 - DNA, 98 bp, Homo sapiens
agatgcagttttttgatgctgaggagctcctggtcgatgaagaggatgatgtttttggtgaaggagtaaaagtccctcgcaatttccgactgttggaa

SEQ ID NO: 267919 - DNA, 83 bp, Homo sapiens
cgggcatgcagacggttaaatgattttgctagtacagttcgtatcctagaggttgttaagatgacggtccttcgctacccacc

SEQ ID NO: 267920 - DNA, 98 bp, Homo sapiens
atcctcctgcgtcgactttccaaagcgctggaattatgggcgtgagccactgtgcccagatatgacaatggatgatgttcgggaatacgagaaaaaca

SEQ ID NO: 267921 - DNA, 96 bp, Homo sapiens
atcattgacaccctcgagcttcgaagtgacatgtacattctcaatgagagcctcacagacccagccatcgttaagttgagacatttgggaaatgat

SEQ ID NO: 267922 - DNA, 84 bp, Homo sapiens
gggctgttcttttgctgcaaatgaagttgatggaattacactgtgatacgactgactgttggacgtgataagtatgagcctgca

SEQ ID NO: 267923 - DNA, 100 bp, Homo sapiens
aggagaccaactttggcgtggctggaggactcctctagttgctcagatataccaaaattggaaggagataggtagtcggtcttctcttgcccaaccagac

SEQ ID NO: 267924 - DNA, 90 bp, Homo sapiens
aaggacagcgcgaggtccgcgcagcccagcgcagccatttggaatcgaagcctcttaaaatggcagatgacttggacttcgagacaggag

SEQ ID NO: 267925 - DNA, 100 bp, Homo sapiens
cacaaccgtctccagccttggtctgagtggactgtcctgcaggtcagtgcaggagcccagccgctgagccatgccgggccccgggcggcctgcagcgagc

SEQ ID NO: 267926 - DNA, 88 bp, Homo sapiens
gatattgaaggtaaagatggcaaacaatatgagagtgttctaatggtcagcatcgatcaattattgatattgctatatggagatttgc

SEQ ID NO: 267927 - DNA, 90 bp, Homo sapiens
cgcctgtacacgttggatgggaaacagccagaaagactccaggggactcattactctgtgcagtcagacatctggagcatgggactgtct

SEQ ID NO: 267928 - DNA, 82 bp, Homo sapiens
tggagcccgactcggtgattgaggacaagaccatcgagctcatgattggtgtgcccgtttaataaaagaatatggaaactga

SEQ ID NO: 267929 - DNA, 100 bp, Homo sapiens
ctgggtgcagacaaccgccctgtgagcttctacaagctaccaagcagtttctcgaagagattaacaagtggacagttcagtacaatgtttccccgctgtc

SEQ ID NO: 267930 - DNA, 90 bp, Homo sapiens
ccgccaccgtctgaactaggatgtcccgacatgaagcaaattgtggctactaatttgccccctgaagatcaagatggctctggggatgac

SEQ ID NO: 267931 - DNA, 99 bp, Homo sapiens
tagtgaaatttctggaacgagttcatcaggaatttaagaagaggattacctcaggttccttacttcagtctctatggagaccaagaaggtgcttatgaa

SEQ ID NO: 267932 - DNA, 74 bp, Homo sapiens
gagtttgaagagttccctgccgaagctcgatgcattctatttctcatcatttggctcataactggaggaaggca

SEQ ID NO: 267933 - DNA, 90 bp, Homo sapiens
cggagcgctgccctgcagcccgagcccatcaaggtgtacggacaggctttcaccactttcctctgtctgtacggcatgatttggtatgca

SEQ ID NO: 267934 - DNA, 100 bp, Homo sapiens
cagaagttaatgcacctggtggttgaaagttttccttcttacagagatgtgactctgtttgagcccaccttgggacaccttgactccaagcccagcagta

SEQ ID NO: 267935 - DNA, 100 bp, Homo sapiens
agtgacagcgtttcctcagggcacttgagttcgaggaagggctgctggacagatgtcctgccccaggaccccatcccgcgctggtggagggtcgcaggag

SEQ ID NO: 267936 - DNA, 90 bp, Homo sapiens
caaatgtttttctgttttgcctgaatacatgatttaaacaagagatttccacagaagatcggcttcaccaccgaccctcggatggcccgc

SEQ ID NO: 267937 - DNA, 100 bp, Homo sapiens
gatgtggaacggagtcgcttcccctactgcgtggtgtggacgcccatcccggtgctcacaactgataaatttcaaacggaagagagtggcagcatttaga

SEQ ID NO: 267938 - DNA, 82 bp, Homo sapiens
agcatccaggcctcattggacagcattcgaggatgcagcagtctcggccctggctgctctatgcagtgaatattacatgaag

SEQ ID NO: 267939 - DNA, 95 bp, Homo sapiens
gtcaatctctttcgaagccattcagtcctcaatctccttttccttggctacccttgtgtggagtttgacttgaatgtaaacaatattgttggaat

SEQ ID NO: 267940 - DNA, 95 bp, Homo sapiens
agatgtcgtccaaatagtatcaggattccaagtcaggatggctaaaggtgaccccaagaaaccaaagggcaagatgtccgcttatgccttctttg

SEQ ID NO: 267941 - DNA, 100 bp, Homo sapiens
gtccaggaggcagtggaggaagtgggggttatggtgggaggagccgatactgagcttcttcctatttgccatgggcgaggcggctttgcacaaggtggac

SEQ ID NO: 267942 - DNA, 129 bp, Homo sapiens
tcaccactggacctccaaggaagccacgtgcagacatctacaaccttcgatctcctgacgacaaaatcctttatatgatacagaaagatgcaaggtattccagtgtgatctgactaaagatgatcttct

SEQ ID NO: 267943 - DNA, 75 bp, Homo sapiens
ctcttcgatgtgcgagactttggaaaggtatcatgatattagctggtttgacatcaagtcatttgtgagtcatca

SEQ ID NO: 267944 - DNA, 100 bp, Homo sapiens
tccaggggctgcagagcatggactgttaaatcttgcacttcttctgagtgagaaatggcaggatattattaaggaagtcaagtttctacaaagaataaaa

SEQ ID NO: 267945 - DNA, 75 bp, Homo sapiens
tattggaagcgctttgatttacagcagctgcagagctccacgcaggagatcggtgaggagctgatcaacggagtc

SEQ ID NO: 267946 - DNA, 83 bp, Homo sapiens
cgcagctcggcttgctgcggtctcaggtggcaagaagaagccactgaaacagcccaagaagcaggccaaggagatggacgagg

SEQ ID NO: 267947 - DNA, 96 bp, Homo sapiens
cgcaccgagcccttccaggacggctacagcctgtgcccgggccgggagctgggcagtgccggtggtggtgtgcacattgagccccggtatagacag

SEQ ID NO: 267948 - DNA, 75 bp, Homo sapiens
gcggagtaccagcacttcatccagcagtgcacagattggccttaagagaaggacggagccacatactgctgacgg

SEQ ID NO: 267949 - DNA, 100 bp, Homo sapiens
ggagtgcgcggcggccgcagctgccacaaaccaggactacaggaatatgtggaagctgtctcttttcaacacttcatcaaaacacgatcattaattagta

SEQ ID NO: 267950 - DNA, 100 bp, Homo sapiens
cagctctccacctcctcagattcccctgcacccgccagctctagctcacaggttacagccagcacatcgatatcagaaaaccaggactctgcagatgttg

SEQ ID NO: 267951 - DNA, 98 bp, Homo sapiens
gtgcaccgaggtccgtgtggccaacgagctcaacgccaggcgccgctcctttacagacagaagatccaaccatggagcgaccctatacatttaaggac

SEQ ID NO: 267952 - DNA, 100 bp, Homo sapiens
atcggggccgcactgtggtattcgccggcacgcgaagtggccgcatccgcaagcgagaattagaactgcagcgtcagcgtgacttgcataagatcaagca

SEQ ID NO: 267953 - DNA, 75 bp, Homo sapiens
ccggcacggcctcgtgcccttcgccttcgtgcgcttcgaggacccccgaaaagctattccgaagtttggaatgat

SEQ ID NO: 267954 - DNA, 75 bp, Homo sapiens
tggaggacatctgggggccacaaatgctccttctcctggagacgcaactcaagagagtcccacgaactggctggg

SEQ ID NO: 267955 - DNA, 100 bp, Homo sapiens
aaaagacagtgttctgctttcatggagttcacagaagagtcgaggagcatatgtaagtggaactcagaaggcaacattccctgaacatactcttccacca

SEQ ID NO: 267956 - DNA, 75 bp, Homo sapiens
aggcatccggtcctggtccctgctggttgatgcctgaggaaacccagacccaagaccaaccgatggaggaggagg

SEQ ID NO: 267957 - DNA, 98 bp, Homo sapiens
agcctcccgagcagctgggactacaggtggggatgcattccaaaggaactcagacagcaaaggaagagatggaaatggatccaaagcctgacttagat

SEQ ID NO: 267958 - DNA, 100 bp, Homo sapiens
accttggcgaagccttgggtttctttcttaaaggactgatttttagaactccacatttgagactggtcgaattgacaaatcttaccctacagtatgtggc

SEQ ID NO: 267959 - DNA, 75 bp, Homo sapiens
ggtcacctggcacaccagcgcccgcaggatgcccagaccgagacaacacttggactcagttcatatcagcagaaa

SEQ ID NO: 267960 - DNA, 75 bp, Homo sapiens
tgaggacatctctgtgccaggccagaaaccgcccacctgcagggtaaactggtccatgctaattttggtactaaa

SEQ ID NO: 267961 - DNA, 90 bp, Homo sapiens
aagcatcccattacagatagaagagtgctgtccccggcataggtccatctctgcagaagccatttcaggagtacctggaggctcaacggc

SEQ ID NO: 267962 - DNA, 100 bp, Homo sapiens
attctggccacggctgggaacgttgtcaccctgaccatcatccccagtgtgatctacgagcacatggtcaaaaactgccaaggggccaagggatgagctg

SEQ ID NO: 267963 - DNA, 50 bp, Homo sapiens
agaaagacagctttgtggaagaggagcgggctgcagatgacagcaaagag

SEQ ID NO: 267964 - DNA, 83 bp, Homo sapiens
cgaggaggcgcgggaggtgttcgagaacgaccccgagacgggaaccagcggggaaactgaggctcggggtggagcgcaggatt

SEQ ID NO: 267965 - DNA, 100 bp, Homo sapiens
tctccccgcgtccggcttggatatcttcggggacctgaagaagatgaacaagcgccagacaaatttacatgtattggagaccagaccagaagcccttctg

SEQ ID NO: 267966 - DNA, 100 bp, Homo sapiens
gaacaccattcttcgccaggccaggaatatatgttaatgaatacacccagggcacacacggttgaagaggttaatactgatgaggatcaaaaggaggagt

SEQ ID NO: 267967 - DNA, 50 bp, Homo sapiens
tgaagaccaatattcaacaggcagtgaataagtctgatgacacagcagaa

SEQ ID NO: 267968 - DNA, 90 bp, Homo sapiens
cgcagacggtgcgcctgtgcagccctcccaggtggagtacacggcagactatatctcccggggccaattcagcatctctacctggccatc

SEQ ID NO: 267969 - DNA, 50 bp, Homo sapiens
acattagacggcctcctgcatctgatgggggcaagattcttgccaagaga

SEQ ID NO: 267970 - DNA, 99 bp, Homo sapiens
aacgcagaaggactgcctcactgagcaaccaagatatttgtgtggaagtaatcgaaaagacaacatatttattgatcctggataccaaacatttgagca

SEQ ID NO: 267971 - DNA, 75 bp, Homo sapiens
ggagcacttcctattccactggattgggaaagaccatggcaggcttccagacagttccagtccattctgcaagag

SEQ ID NO: 267972 - DNA, 100 bp, Homo sapiens
tttgactcaactcatcctgaaggttacctgtttggagagaacagcgatctgaactttctggggaacagaccagttgtgagatgtggtatggtgtattcct

SEQ ID NO: 267973 - DNA, 97 bp, Homo sapiens
attttctattgaagatgtccaaaaggaaattaaaagaggcacgaagctgttttaagacaattatctcctatattgatgagcaatttgagaggtacct

SEQ ID NO: 267974 - DNA, 89 bp, Homo sapiens
caaagaagaagaggagaggagacgggcagaagaagaaaagaggagagttgaaagagaacaggtgattgcatactcggaacatcgttacc

SEQ ID NO: 267975 - DNA, 100 bp, Homo sapiens
ccagatgaagaggtttcccctgaagtactagcaaaggtaatgctaatctctctcttggccggaggtgttggtctaaacctgactggaggaaatcacctct

SEQ ID NO: 267976 - DNA, 82 bp, Homo sapiens
tctcgcctcgggtctcgggggccgctctgggatcccggccaccagcaattgtccgatatctcttccaaatgcatgatgaagg

SEQ ID NO: 267977 - DNA, 78 bp, Homo sapiens
gacaagccgctggcagccgcggatctcaccgccgctcaggtttcaggtttagctgtgcctcccagtgactataatgac

SEQ ID NO: 267978 - DNA, 90 bp, Homo sapiens
cgctttgtgcggctccaggcctccgagtggactccagtccttgctggtgcagacgaagcggcgggctctggagaagattgaccttaagtt

SEQ ID NO: 267979 - DNA, 100 bp, Homo sapiens
agccgattcaagaaggacaaagagatcatagccgagtatgaaagtcaagtcaaagggggccagtctttcttcagcaggaaggattccatccgcaccatct

SEQ ID NO: 267980 - DNA, 51 bp, Homo sapiens
tggacactgagtataccaaactgtgatcgggggtcatactacacatcgatc

SEQ ID NO: 267981 - DNA, 97 bp, Homo sapiens
tcccctgggctcatccagcagcctctgcttcccaggagagaggtgctgaagtccacgaagagggctcctttcggatctaccctctgccggatgaccc

SEQ ID NO: 267982 - DNA, 100 bp, Homo sapiens
gacaaatcagaggaagtacaaaaaattgctgaactttgcgccaattcaattaaggattagtccaaagagtgatattactgacactggcctggcacagagc

SEQ ID NO: 267983 - DNA, 98 bp, Homo sapiens
tctactataagggcacgccggggcccgccgtcaggtggaagcgacccaaggatgaatttcacccattcatcgaggcacttcttccacatgtccgtgca

SEQ ID NO: 267984 - DNA, 117 bp, Homo sapiens
gagcgaacgaccaagagggtgttcgactgctagagccgagcgaagcgagatggctcatggaagagaggagacaaacacgactttgaagctaagcaagcatactcgtccctccagaca

SEQ ID NO: 267985 - DNA, 97 bp, Homo sapiens
cctgaagatgattctaattcaacaaatcataacttggaggagagacttcagcatgcaaaccttcatctgttcggcttgcaccgtcattttcattcca

SEQ ID NO: 267986 - DNA, 83 bp, Homo sapiens
gcggctctccgccgtccccagccctgcctctccctgggctctggttgattcttcaccacactgaaaccattaggaaaaatcct

SEQ ID NO: 267987 - DNA, 90 bp, Homo sapiens
cttgtgtcgtccagtaaagaagataacctcaatcatggccataccgagcagaaccttcgagatctgcggtctggggtctggttgaaagat

SEQ ID NO: 267988 - DNA, 74 bp, Homo sapiens
tcaggcggagagacccgccgccagatatgggagaagggactactataaatgcaagtgcagatggcaacattgga

SEQ ID NO: 267989 - DNA, 82 bp, Homo sapiens
gtgtggtcgcgtctcggaaaccggtagcgcttgcagcatggacgtagacaagtttggcaacgagatcacccagctggcccgg

SEQ ID NO: 267990 - DNA, 100 bp, Homo sapiens
aaattcaaaccctagtgaataaagccaagagagaccttggagtaattcgtcgacaggcaagccaaattagagctgagagttgctgtagcaaaagtggaag

SEQ ID NO: 267991 - DNA, 83 bp, Homo sapiens
gggccagggaaccctggtcaccgtctcctcagggggcttcgccaccttctcctcctgcttccccggcctctgcgagggcaagc

SEQ ID NO: 267992 - DNA, 90 bp, Homo sapiens
cgacacagagatggcttcccccaacccagacgaagactgaactgtcccaagcaataaacagtggtacattgttatcaaaaccgtccccac

SEQ ID NO: 267993 - DNA, 98 bp, Homo sapiens
ggagaccctcgaagtgcgcaaacttgacactcaccctgaccgaatcaggaaacccaggcccaacggcaggtggatgcaagaagaaatgttccccaaaa

SEQ ID NO: 267994 - DNA, 90 bp, Homo sapiens
tacgatttgaccaaatttctggaagaggaagagtttaaagaacgctgtactcagtgtgctgctgtctcatggggtcttactgatgaaggc

SEQ ID NO: 267995 - DNA, 75 bp, Homo sapiens
ggtggaatcaactgccttcaccaaaatccactatcccaggaaaatttaaacctagctctgaattctgcctcagcc

SEQ ID NO: 267996 - DNA, 109 bp, Homo sapiens
ggaagttttatttgcagctcggagcctgtggcggatggtgggactctccggccctgtgcagtgcccaggatgttttggtgcaggagatggaagtggttaaacaaggaat

SEQ ID NO: 267997 - DNA, 101 bp, Homo sapiens
cctcgctgcagcggccctggcgggtgccctggctaccatggaccatcctgctggtcagcactgcggctggaagaggatttgacaacttgacttctgtccat

SEQ ID NO: 267998 - DNA, 100 bp, Homo sapiens
gtcctgaacaggctccatcaggtgcagaggataactcggaggctgcagcaggaacggagatgggttgttgttgtcccagagtcgccaacgcattgtctgc

SEQ ID NO: 267999 - DNA, 100 bp, Homo sapiens
cgggccgaaacctggaggcccggggggcccagctcccgtagggagccgtgggcgctcggtgcccgggccgggcagttccctgacatcgtggagttctgcg

SEQ ID NO: 268000 - DNA, 50 bp, Homo sapiens
gcccagaggatcggaatgacagatgtaacttgcccaggagtcgtgcttaa

SEQ ID NO: 268001 - DNA, 100 bp, Homo sapiens
ttacagcagttgcttcaggcggtaaaccaacagctcacaaaggagaaagagcactaccaggtgttaggtgcttttgaagatgatgatatcacgcacgttg

SEQ ID NO: 268002 - DNA, 75 bp, Homo sapiens
ccctcaaggtcgccaaggaggtggacccccagggacaatctctatgggaagcagaaggcaaggaccccggtcatt

SEQ ID NO: 268003 - DNA, 100 bp, Homo sapiens
cagagacattacatcaggaagatactgcagagatattctactccatctcattcattgtacaggttgcagatatcaagaaagtcaacaacttcatcagaga

SEQ ID NO: 268004 - DNA, 100 bp, Homo sapiens
cgaatagctctgaccacccggcgaagagctctgagctcttcaccctgacctatggtgccctggtcacccagctatgtaaggactatgaaaatgatgaaga

SEQ ID NO: 268005 - DNA, 101 bp, Homo sapiens
cgagtttgaagagttccctgccgaaggtgaaggagtacctcctggcaactatgggaactatggctatgctaatagtgggtatagtgcctgtgaagaagaaa

SEQ ID NO: 268006 - DNA, 108 bp, Homo sapiens
cagaccctggagcctcagttggaagcagccgatccagcctgcggagcctgtggggcaggacactgcccatctctaagataagaacctggaaaggggactctgttggcc

SEQ ID NO: 268007 - DNA, 75 bp, Homo sapiens
gcaggtactggaaacccacaggcacacccaactctcgtggcattatccttcagtggggctattggactgactttt

SEQ ID NO: 268008 - DNA, 82 bp, Homo sapiens
atggagcatgttctcttagtcagcatccttcaccacacagttggaatcgagatggcgtctcactcttgttgcccaggctgga

SEQ ID NO: 268009 - DNA, 100 bp, Homo sapiens
ggacttcagaaatatgaatatgttttacatccaagaactacaggctttacttttgtggtagaccgtctaagagaaggtgtcatggagaaactccagctgg

SEQ ID NO: 268010 - DNA, 75 bp, Homo sapiens
gcgattttacgaatactgggggaggccgagcgcggtggctcagtagagatggggtttcgccatgttggccaggct

SEQ ID NO: 268011 - DNA, 82 bp, Homo sapiens
cagaatgtgatttgcttgaagatatgaggtacaaattctgagctgtctaacccctctgaaacggaatctgagcgtaaagacg

SEQ ID NO: 268012 - DNA, 83 bp, Homo sapiens
ggatgctcttcagttcgtgtgtggagacaggggcttttatttcagctttcaactggcttctgtgtaatgtcatccaaaccact

SEQ ID NO: 268013 - DNA, 80 bp, Homo sapiens
gtgccgaggagcgggaagagttgctggggttacgggcaggacttgagtggcttcggacagggcttctcagaccccagcca

SEQ ID NO: 268014 - DNA, 86 bp, Homo sapiens
tagccttttctctgccttgcttgcttgagcttcagcggaattcgaaatggtgagaagccctaccactgcaactgggacggctgcgg

SEQ ID NO: 268015 - DNA, 100 bp, Homo sapiens
cagatggaacaagggatgttgctgaacagttggagaagatctatgggtcagacagaattgacagtcattttgtttactcattcagccctgttgcaggtcc

SEQ ID NO: 268016 - DNA, 80 bp, Homo sapiens
ctgcgaagcatcacgtccgcttcccgacgctgagggcagccccgtccagggaatgtatcctgtcaggtataatgtcagtg

SEQ ID NO: 268017 - DNA, 75 bp, Homo sapiens
caaaagtccattatgaaactggagaggagaggcagcagcatggcgagtgtcctgtcccgacgccttggaaagcgg

SEQ ID NO: 268018 - DNA, 75 bp, Homo sapiens
gctattagagattgtgaagaagaatttcgatctccgccctggggtcattgtcagcaattctggggtcagaagcca

SEQ ID NO: 268019 - DNA, 76 bp, Homo sapiens
caagacgactcaataggaggaaggagcacagggatcagttgtccttgtttttttttggtcttttcttcatttgaag

SEQ ID NO: 268020 - DNA, 75 bp, Homo sapiens
gtgcctggcgctgaagcatcggaatggagctcctgcccctcctaaagctgaagccaaagcgaaggctttaaaggc

SEQ ID NO: 268021 - DNA, 100 bp, Homo sapiens
tccaatgacaggaaatagcagacagcgggcttgatgtgcttaaaagctgcctccagaaacatgacaaggaggactttcctgcctcttggagatcagagga

SEQ ID NO: 268022 - DNA, 75 bp, Homo sapiens
tgccagtgcatcttttgcacagctctcccattgctatcacatgttttaccagaggcttggacatcaggaaagaga

SEQ ID NO: 268023 - DNA, 75 bp, Homo sapiens
gcctgaaaagtcgcagcgagctggagccgccggaggacctcggacagtgatccaccctaaagcaagaattattgc

SEQ ID NO: 268024 - DNA, 98 bp, Homo sapiens
ctcctgagtagttgggactatagcaaaccctcctggggcttgcccatagatgctgttcagtgggatatctgcaatctgccattgagaactggctctgt

SEQ ID NO: 268025 - DNA, 75 bp, Homo sapiens
catggggctgtttggaaagacccaggagaagccgcccaaagaactgtttttttgaagaagcaggatgctgatcta

SEQ ID NO: 268026 - DNA, 75 bp, Homo sapiens
aggaagagtcaggggcacagagagatggagagagacctagttagctgccccagtgctcagctgtgaagctgcaac

SEQ ID NO: 268027 - DNA, 99 bp, Homo sapiens
taacttctactgacgaagcttggaagttgcagaagaacaaaatccagtctcatagcagaggagaatataatgtttacagcaccttccagagccatgaac

SEQ ID NO: 268028 - DNA, 100 bp, Homo sapiens
ttcatgccccgctggcagatgctgtttagacactctgcaatatcaccaaaaagttcgctgcatagaaaatcaagaagtaaggactatgatgtatatagtg

SEQ ID NO: 268029 - DNA, 75 bp, Homo sapiens
gggcggcggccacgccaaggacggccgttggacataccagatggtcgaagagctccacttcctgctcattaccgg

SEQ ID NO: 268030 - DNA, 100 bp, Homo sapiens
gtgactctgcaccctgcccagaggtccctcagcaaagatggtacaaaagagtctttggaggatgcggctttgatggtctaaagtagggggaaccaagcct

SEQ ID NO: 268031 - DNA, 100 bp, Homo sapiens
tgtccggagtgtgaggagcctgtccccaaggaaaccatggaggagcactgcaagcttgagcaccagcaggtacgaaaggactatggataacatgacttca

SEQ ID NO: 268032 - DNA, 100 bp, Homo sapiens
gttaaaacatttcagggcaagccaattatgggagagacaaaggcagcgctgccctcgggggagtattggccctggcggaacgcagcaaccacgagggatc

SEQ ID NO: 268033 - DNA, 132 bp, Homo sapiens
gaagagtatgataacgaaccacaaatacctggctatattgtcgatgattcagtcagagctattcctgcaccaactgacctgaagttcactcaggtcacacccacaagcctgagcgcccagtggacaccaccc

SEQ ID NO: 268034 - DNA, 100 bp, Homo sapiens
taacttcttatccatcccatctcttggacagatgatgccagttaattactttgaatcagaaatgatggaagaattgcatagcctggacccacgacggcag

SEQ ID NO: 268035 - DNA, 88 bp, Homo sapiens
gatggtcaaaagcatgtggtcacattacttcaggccttcccttcttcttggtggtgttcttgagtaagataatctggactggcccccg

SEQ ID NO: 268036 - DNA, 101 bp, Homo sapiens
tcaacctgctcatggagatgttggtgagcggagacttaaatgccgtccatggagccatgcgtgtgctgacagatatgaatatcgtgtagagatggttcacc

SEQ ID NO: 268037 - DNA, 101 bp, Homo sapiens
tgaacaggaattagagtgtgatcggctcagttgacgtacagggtgctgggcctaaaggagataacatttatgaatggagatcaactatacttggtccaccg

SEQ ID NO: 268038 - DNA, 98 bp, Homo sapiens
gaagacgcggcggcggcggcggaggatgagcctgcagagcgcgcagtacctccggcagtataccttaaatggcaagaaggaaataaatcatctgacat

SEQ ID NO: 268039 - DNA, 100 bp, Homo sapiens
taatgacaccagcgcagctctcttgatttcacacattgtgcaatgaaacccagcgtttgctggcagaaccagttcctggcatcaaagccgaaccagatga

SEQ ID NO: 268040 - DNA, 100 bp, Homo sapiens
tcccatttccactgaccctccgttttaagcctatgttacagcaaggaatcgagctactcacattagatgcatcctgacggagtctcgctctgtcgcccag

SEQ ID NO: 268041 - DNA, 82 bp, Homo sapiens
ttggatcggcatctagtctttccgcttcttgaatttctctctgtaaaggagatattgctggtgaattcaaagagcagttaca

SEQ ID NO: 268042 - DNA, 100 bp, Homo sapiens
ccagtagactatcaacaattgcgtgcattaactgaagcaaagaaattggcttctgcctctgcaaagctaaaggaggaatgccagctcctgagcaggcctc

SEQ ID NO: 268043 - DNA, 75 bp, Homo sapiens
cgcagtggtcgcttcttctccttgtgatgctcctgcgggctgtcccaggtggggctggagatgcctcagtgctgc

SEQ ID NO: 268044 - DNA, 100 bp, Homo sapiens
gcgaaatgatgggatagcgttgcaaatccttaaaagagtcttaacgatccagatgtaccagctctcgaggttgcttcatgattaccacagagacctctac

SEQ ID NO: 268045 - DNA, 75 bp, Homo sapiens
ttgcctccagcaccacttctaatgccatgcgatgatggacctactggttgaactttgccttcagaaccacctgaa

SEQ ID NO: 268046 - DNA, 75 bp, Homo sapiens
aaaattgaaggctccaaatccttagctcagagctggaggatgaaggatcgggcttcccagcagcggcttatggac

SEQ ID NO: 268047 - DNA, 59 bp, Homo sapiens
attcagaagaaacaaaagtgccaccgaagaggggaagtattacaaatggaagatgatct

SEQ ID NO: 268048 - DNA, 75 bp, Homo sapiens
cagcaggagaagaaactgcaggctctgcaggatcgtctcaggagtcgactggaagctctgagcacggagagagat

SEQ ID NO: 268049 - DNA, 75 bp, Homo sapiens
caaacatcccagacgtgccagtgaagtacagaaaggaagccagcagacctgcagaacttggctcccgggacccac

SEQ ID NO: 268050 - DNA, 97 bp, Homo sapiens
tggcactcctggacaggatggattgccagggcttcctggcccgaaaggagagcctattcgtattttacatggagaagtgaacaaagtgaaactggat

SEQ ID NO: 268051 - DNA, 100 bp, Homo sapiens
cgaggagaagcgcagcgacggcgtcgggagagcgcgcctagccggctcgcgagtaagaatgattgatgttggctgatattggagtgctcattcacatgaa

SEQ ID NO: 268052 - DNA, 74 bp, Homo sapiens
tgattgcctgcctgcttcagggctgctatcaacgaagagatatcacgagtgcacagtctgcgggtggaccgggg

SEQ ID NO: 268053 - DNA, 74 bp, Homo sapiens
gacagacatccctgaatcttggtgtttggacataggaggaatcccgttctgcttccagaagtggaagtgctcac

SEQ ID NO: 268054 - DNA, 82 bp, Homo sapiens
ctgaccctgggagacatcgacgacaacagtgattgactacgtgaagccctcggatctcaagaaggacatgaacgagaccttc

SEQ ID NO: 268055 - DNA, 100 bp, Homo sapiens
agagtgagagatggaacccgaagaagaaaggattcgttacagccagagattgtcccggacatgatggcacatggaatgacaatcagctacaagaaatggc

SEQ ID NO: 268056 - DNA, 115 bp, Homo sapiens
gtgaagaccccgaaggaaaaggaggaattcgccgtgcccgagaatagctccgtccagcaggtcatggaaaatggaagatttgcaaaatacaaatattttacccatgtcatgatca

SEQ ID NO: 268057 - DNA, 100 bp, Homo sapiens
atttgctcctgaagaaatttctgccatggttctcactaaaatgaaagaaaccgctgaggcttatttgggaaagaagtggaaattgcaacactaacaagag

SEQ ID NO: 268058 - DNA, 100 bp, Homo sapiens
tattctcccccatctggaagaggattattctctataatcccagttagagacacaatgacataaacatcgctgtgtcaactctgcccgctcagttcctcct

SEQ ID NO: 268059 - DNA, 98 bp, Homo sapiens
cctggaggagctgcatgtcattgatgtcaagttcctatatggttgccaagcacctactatttgctttgtctaccagctgattgccatcgcaacaggag

SEQ ID NO: 268060 - DNA, 83 bp, Homo sapiens
cacccccaccagctgggcctcgggacaatgcagatcttcgtgaagactctgactggtaagaccatcaccctcgaggttgagcc

SEQ ID NO: 268061 - DNA, 87 bp, Homo sapiens
cccttggacagtctgcaccttctcttactgctggcctgcagtgactcttcgagaagacagtgccaagaggttggagaggagggcacg

SEQ ID NO: 268062 - DNA, 80 bp, Homo sapiens
gattgccaggatggccgggacgaggccaattgccaattatatccagatcgagagacagaagattctgaaagggttcaatg

SEQ ID NO: 268063 - DNA, 90 bp, Homo sapiens
cgccgagctggacccggaccggttttggactgctgagaaggaagaatttgaacatcaacagaaagagctggagaaagtttgcaaccccat

SEQ ID NO: 268064 - DNA, 71 bp, Homo sapiens
cagaggcgagccctggtggaggaagagatactaatggaccatactaccaaggaccagtccacctgaaccac

SEQ ID NO: 268065 - DNA, 111 bp, Homo sapiens
aaggcggcggacggctgcgtcgcccgaggcgaggaggagcgctggcgtgcaccgtccaggtgaggttagagctggggcatcgcgcccaactgcgcaagaagcccaccacgg

SEQ ID NO: 268066 - DNA, 89 bp, Homo sapiens
ccttgaacatttcccaatgctccagaaggacaaactggtaggagcaattgtctactatgacgaccattcctcaagaattttgtatccaa

SEQ ID NO: 268067 - DNA, 82 bp, Homo sapiens
tttacagaaagagtcaacagcagtggcaacaggtgtgcaactgaggaacatggctcaagaaactaatcacagccaagtgcct

SEQ ID NO: 268068 - DNA, 83 bp, Homo sapiens
tgggatccgatggcctgaggagcttgaatgtgacagggaggtatatcatacaaagagaatgcaacatgttatctgtgtaaaat

SEQ ID NO: 268069 - DNA, 51 bp, Homo sapiens
acaagtctttgggaactcaaaaaggttcaagccaaatgttaccagcttctc

SEQ ID NO: 268070 - DNA, 95 bp, Homo sapiens
cggtgaagagaggttttgaattcacgcttatggtagtgggagaactgcgacacatcaccaagctgaagccctggagcctctttgatgtacttgtg

SEQ ID NO: 268071 - DNA, 82 bp, Homo sapiens
aggtgaaaccaacagccagtgatatgctatacatgaaggaacccagccagccggcggaatgcaagcagcagtaggaagcgga

SEQ ID NO: 268072 - DNA, 75 bp, Homo sapiens
tctggaatcagcttctctcattttctttccctgcaccaactagcaggtgatcagactctgagaatatgggatgtg

SEQ ID NO: 268073 - DNA, 100 bp, Homo sapiens
cgagcctcctgcagcggaacatgaccccccaaggcctgcagatcatgattgagctccaagaagcccaagaaacatcccaaagtggccgtgaaagccaagc

SEQ ID NO: 268074 - DNA, 100 bp, Homo sapiens
aggcgctggagctgggtcagtccgccgctcaccccgcggccgcaccttcccgccttctcagtggcctcgtggtctatgcggacggacctctgaacttgga

SEQ ID NO: 268075 - DNA, 100 bp, Homo sapiens
caaaggggaggttacgcagcaaaccatccagaagagttttgcggcctccaggtggtggatccaatttttcattaggttttgatgaaccaacagaacaacc

SEQ ID NO: 268076 - DNA, 90 bp, Homo sapiens
cttggatccgcgggacaagaaaattcatgcggcaatgaatcgctccctggctaatgtgattcttggaggctatggcaccacttcaacagc

SEQ ID NO: 268077 - DNA, 87 bp, Homo sapiens
gctgggcgttcatctaccacgctttcgtctgtttgatgaagacaatccagtacacaagtctggaaccagatacatgttcacaacaga

SEQ ID NO: 268078 - DNA, 100 bp, Homo sapiens
cactgccgcagccaggagatggttcgggcctagcggagccgggactggaggttgccaacttggcctgttccatctcaaataatgaagaaggtgtaaagct

SEQ ID NO: 268079 - DNA, 75 bp, Homo sapiens
gggcgacgagctgaccctgggagacatcgacggagactataaatattcaggaagagatagtttgatttttttggt

SEQ ID NO: 268080 - DNA, 49 bp, Homo sapiens
caggaactcacagagtggattccgatgtgtccgtgaccctcagagatcc

SEQ ID NO: 268081 - DNA, 96 bp, Homo sapiens
taatgacactttgtcgatgaagatcttgattgtgacctctgtggaaaatgagccatgaaccaaccaatgcacccagtcagtcagagtcagagccag

SEQ ID NO: 268082 - DNA, 75 bp, Homo sapiens
atctaaaggaggttttaaacagtataacaggcttaacagcattgcgcagtgatgaagtgattgatttaatgataa

SEQ ID NO: 268083 - DNA, 98 bp, Homo sapiens
gatggggcagcaagtggccaaatgtcatctgggtgattctcagtgtggaggtgggtggacttttaggagtaacgcagcagctgtcatcttttgaaacg

SEQ ID NO: 268084 - DNA, 98 bp, Homo sapiens
taaagaagaaagggcttatgacaaagcaaaacggaggattgaggggccgctctcctcagcctcctgctgaagaggatgaagatgactttgatgatacc

SEQ ID NO: 268085 - DNA, 75 bp, Homo sapiens
gcgaccatgggcgggaagaacaagcagcgaactaaagggaacctgaggaaatgcactcggtgatggaaagagagc

SEQ ID NO: 268086 - DNA, 101 bp, Homo sapiens
ggcacctgcgcgaagctggccaaagcctgcccagacggctcacctgtgcgggatggaacaaaaggatgctttcattggatttggaggaaatgtgatcaggc

SEQ ID NO: 268087 - DNA, 50 bp, Homo sapiens
ttcattccgcagcagcactccgacaggcgaggccagcaccaggtccccca

SEQ ID NO: 268088 - DNA, 82 bp, Homo sapiens
gaaagcctacgggatccgctttgacgtgatggtgaacggcaaggtgcccgtggttgacacgagctgtgtccccagctgttcc

SEQ ID NO: 268089 - DNA, 132 bp, Homo sapiens
tgatgcagaggagcgagctgagcgcctccagcgagaagttgagggagaaaggcgggcccgggaacagaaaaagcttgtggtgaaggggggcaaaaaaaagaagcaagttctgaagttcactcttgattgcac

SEQ ID NO: 268090 - DNA, 101 bp, Homo sapiens
acgcctggaatatgaaggcttccccgtcccggttcaaaccttgtactactcagctgatcacaagctgcttgatgggaacctactagatggacaggctgagg

SEQ ID NO: 268091 - DNA, 101 bp, Homo sapiens
cggcctctgtgaccgattcactgggcagtgccgctgcgctccgggttacactggggatcggattgcgcacttgtctctgcggaacaataacatcgacgacc

SEQ ID NO: 268092 - DNA, 83 bp, Homo sapiens
ggatgatgccaaagttttattaggtgaattatgtaacctcattacgctggatgtagctcacaatcaacttgaacaccttccaa

SEQ ID NO: 268093 - DNA, 100 bp, Homo sapiens
caagcggagaggccgggcgtcttctgagagtcagggactttgaacatgtcggggatcgccctcagcagactcgcccaggagaggaaagcatggaggaaag

SEQ ID NO: 268094 - DNA, 101 bp, Homo sapiens
ggaagaagatttgtaaagaaaactcttaggatgtacagttacccagcacgtgtacctcctcctcctcctattgctcgggctgtagtgccctcgaaacgtca

SEQ ID NO: 268095 - DNA, 75 bp, Homo sapiens
gaaactcttggaggaagcaaccatttcagtctgcaggtcattagggagcgcatggagcttttggaagaagccaag

SEQ ID NO: 268096 - DNA, 97 bp, Homo sapiens
agattataagaagcttgggttcattcggcccctttgttgctttatgcaaacagacgggacttgcgattggttgatgctacaaatggcaaagagaatg

SEQ ID NO: 268097 - DNA, 132 bp, Homo sapiens
gactcgggggtaggcaagacctgcctcctgttccgcttctcagaggacgccttcaacaccaccttcatctccaccatcgaagacgtgcgatgggacacatttcccctaggccgaatgccaggtcagaccgag

SEQ ID NO: 268098 - DNA, 103 bp, Homo sapiens
tttcgaaaaatgtcacccttggacaagtgagacggtttaagcggaagcatcttactgccattgactgccagcatttggctcggagtcacttggctgtgaccca

SEQ ID NO: 268099 - DNA, 123 bp, Homo sapiens
gcctccccaactcgggtaaagctcctcggcctcggcgtgctgcgcctccgcggctgccctgcgccagggaaagcaggcaggatgggagagtcgccgatagaaccacctcttccctgcctcctg

SEQ ID NO: 268100 - DNA, 86 bp, Homo sapiens
cgtcccctgcaccatgagctggggcaccgagctctgggtttttagaacttcagccataaaaatgggcagaattttccttgatcata

SEQ ID NO: 268101 - DNA, 83 bp, Homo sapiens
ggcttccgtttgttggtggaggaggtggcaggcctcggcggtacatggtgcagtggccgggagcacgcatccttcggcgtcag

SEQ ID NO: 268102 - DNA, 100 bp, Homo sapiens
gggttgggctgtgacgctgctgctggggtcaggttcctcagtggtgtgctgaatattgtctttccatccactaccagcacgggggcgtgatatgcacaca

SEQ ID NO: 268103 - DNA, 100 bp, Homo sapiens
ccaaaatggaacagaaagccaagcagaatcaggtggccagccctcagcccccacatcctggcgattcaactttagttggcttaccaagagtgaagcgtga

SEQ ID NO: 268104 - DNA, 100 bp, Homo sapiens
cccaggtggaccccaagaagaccattcagatgggatctttccggatcaatccagatggcagccagtcagtggtggagggtttggagaacattgattaagg

SEQ ID NO: 268105 - DNA, 75 bp, Homo sapiens
tcatgaacagaaacacctaggaagggagaactgcacacggaccctgactactcggctgcctatgtcgtcatagaa

SEQ ID NO: 268106 - DNA, 75 bp, Homo sapiens
cactctgggcgaaaattggatgtgaaaatgaagccagaccgaggcaacatgtcggaaggaaacgccgccggcgag

SEQ ID NO: 268107 - DNA, 75 bp, Homo sapiens
ccgagtcaacaaccgcttcgagctggaacagcatatgccatatatgagctggctgtggcttcatttcccaagaag

SEQ ID NO: 268108 - DNA, 83 bp, Homo sapiens
caccgcagccttgggcctcgcgccggctatggccgtgccctggggctgagccctcaggaaagtggagaatgaggacatgaata

SEQ ID NO: 268109 - DNA, 88 bp, Homo sapiens
ctatcgtgccctttcaacagatgaagaaactgaaacctaacagtatcctgaaacctgattaccagcccttggccataaagaacatttc

SEQ ID NO: 268110 - DNA, 82 bp, Homo sapiens
acgactcctccaaccaggtcaaggtgcagagcattgtagaccaaggagccatggataggagaagtatgggtgaaacagaaag

SEQ ID NO: 268111 - DNA, 100 bp, Homo sapiens
catccgcgactatgtgatgctgagatcggccattctgggcgtgcctgtccctgagggcctagataaaggggacagctgggcgccgtgtacacagaaggtg

SEQ ID NO: 268112 - DNA, 98 bp, Homo sapiens
cgaaacccaagccgccgcgtaggagcgtgcgttcgggccctcttctcccacctgttcggaccaacttggaggccttgcagaagaagctggaggagcta

SEQ ID NO: 268113 - DNA, 100 bp, Homo sapiens
gaagaagattccccatgagtgcctggtcatcggagcgcttgaaagtgcattcaaggaaatgaaagccttgagccgggccatgcttctcacatcttacctg

SEQ ID NO: 268114 - DNA, 104 bp, Homo sapiens
gggcaaagctcaagatggcggacaaaacgccaggcggatctcagaaggccagttcaaaggatttttagactctgaggagcagttggagctaatccacattatgg

SEQ ID NO: 268115 - DNA, 85 bp, Homo sapiens
ccgccatgggggcctgcctgggagcctgctccctgctcagctgcggggggccctcagcctcttggccttgaacgggctgttcatc

SEQ ID NO: 268116 - DNA, 90 bp, Homo sapiens
tgcccacgtcgagcgtgcccgagacccgagtttgcctatctggggcgcctggctcacgaggttggctggaagtaccaggcagtgacagcc

SEQ ID NO: 268117 - DNA, 75 bp, Homo sapiens
atttcattgccgagggcatcgaccaaaccagaggatgatatgaagcaacagcatgtcatagaaaccttgattggc

SEQ ID NO: 268118 - DNA, 100 bp, Homo sapiens
acacaaatgcacgcgacaggaaccaggctcacggttttgaggagatccgtgctactttccttcagaccgatttgctgaagttgctggtgaaaaagtgcag

SEQ ID NO: 268119 - DNA, 97 bp, Homo sapiens
gccggcctgcggcggagggaaaaaggaagaggagaaggaaattgtcccgaatccctgcaggtatttgggattcaattgaaggaaattgataagaatg

SEQ ID NO: 268120 - DNA, 98 bp, Homo sapiens
ttgtggttcctgctgtggttttgatcatgttgttaccctcggacgtagcccggcttgtattgggattgtgcagactggtgcttaaaatggaagtcgat

SEQ ID NO: 268121 - DNA, 100 bp, Homo sapiens
acgtgttggaccttccggagcttctcagaagacagagggttttcttttgagggtcactcagctgccgcaaggagcaaggcaagttctatgaccatctcct

SEQ ID NO: 268122 - DNA, 75 bp, Homo sapiens
gcagtcatgagtcgcttcaagtttatcgctccagggttccttgaaaagaaaacaggtagttaacctatctcctgc

SEQ ID NO: 268123 - DNA, 101 bp, Homo sapiens
ctacttccattccagaaagatggcatcatttttgccctcaaaagaaatggcaggattaaccacaatgaacggttggaattcctgggtgatgctgttgttga

SEQ ID NO: 268124 - DNA, 100 bp, Homo sapiens
tgcagcgtcgcggtgcatcaaggattgttttaagaaaatggcagacaaaccagacatgggggaaatcgccagcttcgataaggccaagctgaagaaaacg

SEQ ID NO: 268125 - DNA, 75 bp, Homo sapiens
gtctggggaccagcgaagaccaccagcacttcacctgcaccatctggagacgagtaccggaagcgagagtgtcga

SEQ ID NO: 268126 - DNA, 82 bp, Homo sapiens
gttccaacaaaagaatgctgccacagggacatcgatggagtgttgcagcgagcaaatagtacagagtatggtttggcctcag

SEQ ID NO: 268127 - DNA, 98 bp, Homo sapiens
taaacatcgttgtccacgtccagcattatgagaacatggacacgagaacccccataaataatcttcgtgggaccagggagattggatctgctctcacc

SEQ ID NO: 268128 - DNA, 98 bp, Homo sapiens
gtgtccagggtggaagcagcactgccttactgggtccctctgtccctgagaccccgaaagcagaaggacagaataacgggctcccagattcacaagcc

SEQ ID NO: 268129 - DNA, 75 bp, Homo sapiens
accttcacgatgtttcccttggtcaaaagcgcactaaatcgtctccaagattcctcctgaagacacagcatccac

SEQ ID NO: 268130 - DNA, 50 bp, Homo sapiens
gaaacgtaaagaaatgcaattgagttttcctttgcagctagaaaacggtc

SEQ ID NO: 268131 - DNA, 100 bp, Homo sapiens
cacagcagtaaatttcagggactagaaactccttctcagtctgtccttgaggaaatacactgctacgagcctcagctcaacaggctgaaagagaaagctc

SEQ ID NO: 268132 - DNA, 100 bp, Homo sapiens
cactgtggatcctaaggatgctggaaaagctcccttaaagatatttgctcaggatggggaatttagcatggatcttcgtaccaagagcaccggtggggcc

SEQ ID NO: 268133 - DNA, 101 bp, Homo sapiens
gatcataaagagacacataccaaattggatctatccaggtacacctgagagcctggcagaaaaagaacggcagctctccaccatgattacccagctgatca

SEQ ID NO: 268134 - DNA, 96 bp, Homo sapiens
cggaaatgtgtcatcgaaagccaggtgctggagaatctggtaaaagcaccattgtgaagcagatgaggatcctgcatgttaatgggtttaatggag

SEQ ID NO: 268135 - DNA, 97 bp, Homo sapiens
ctccccgccgctcccgggggccgtgacggactcaagcacagagggttcggaaaccgcgttgctgcacggggccccaggggctgcttccccgatattc

SEQ ID NO: 268136 - DNA, 50 bp, Homo sapiens
tcagaaagaagtgatggagcaaagtgccgttccaaagaggtgtttgaaag

SEQ ID NO: 268137 - DNA, 49 bp, Homo sapiens
gccaattgcagtttgaggctgttgaaaggattgttgacaaaaggaaaaa

SEQ ID NO: 268138 - DNA, 106 bp, Homo sapiens
ctctactcctgggctcaagcagtcctcctgcctcagtctcccaaagtgctggaattacagggttgattatggaagattcccacaagagtaccacgtcagagacagc

SEQ ID NO: 268139 - DNA, 120 bp, Homo sapiens
atgacgtccatccatttcgtggttcacccgctgccgggcaccgaggaccagctcaatgacagacctgcctagagctggaacgttacctccagagcgagccctgctatgtttcagcctcag

SEQ ID NO: 268140 - DNA, 87 bp, Homo sapiens
ccgcgcgcagggcctgcagcgggagctggacggcgagcgcgagcggcgcgagaaaattgtcactgctgttccaagggcacacgcaga

SEQ ID NO: 268141 - DNA, 94 bp, Homo sapiens
ctggccggatggaaatcctaatgacagtctccaaattcgcctccatctgtaccatggtgagaagccctaccactgcaactgggacggctgcggc

SEQ ID NO: 268142 - DNA, 75 bp, Homo sapiens
cagttagtcacccacctacatgttgagttaaatcgtcgatctgaaattgttgctaatagctctggtgaattcatc

SEQ ID NO: 268143 - DNA, 88 bp, Homo sapiens
gcggctggccgggcccaggtcccttcctccttggaatcgaagcctcttaaaatggcagatgacttggacttcgagacaggagatgcag

SEQ ID NO: 268144 - DNA, 75 bp, Homo sapiens
gacagcctacaggaggtggtgaactaccacatgattgattttgtagcccatgatgatattccttattcatctgct

SEQ ID NO: 268145 - DNA, 82 bp, Homo sapiens
cccgcgccgagccggaggccgcgtggacccgaaagccgctgggaaaaatgatatcatcaagttgaatcgaaaggaagggaag

SEQ ID NO: 268146 - DNA, 100 bp, Homo sapiens
ttggctcatggggcagatcctactcaccgtttgaaatatgacgccgtgcccatccagtccagcgtggtgttatgttcctgcccatccccatcaatggtga

SEQ ID NO: 268147 - DNA, 100 bp, Homo sapiens
ctcaggttcttgttacaactgagtccgggttggaggaggtgtggggccgctgccgccagacttgcacacctacccctgtggagcgtgcaccctataaggg

SEQ ID NO: 268148 - DNA, 101 bp, Homo sapiens
aggctgccggctgggaaggcgtgggcgacccggtgtgtggcgcgcccagagccccgcgtttcagccctagggaaggactcgctcagcagcagcctgaaaac

SEQ ID NO: 268149 - DNA, 95 bp, Homo sapiens
cttactccacagatagccaagacttatcgatgcggtatgaaaccaaatactgctattaagcatttcttgagacttaaagtggcattctaaaggca

SEQ ID NO: 268150 - DNA, 101 bp, Homo sapiens
ctggcgctctggctgtgctgcgcgacccccgcgcatgaatcatgtgagggccaaccggggaaggtggagcagatgagcacacacaggagccgtctcctcac

SEQ ID NO: 268151 - DNA, 78 bp, Homo sapiens
aagtgcagtatgagctacatgtttgagtacccggagtatcagccaccattggttcaggcaatcttcagcggtgatcca

SEQ ID NO: 268152 - DNA, 98 bp, Homo sapiens
tggcatacaggcggaagcatcagcaaatgagctgctaagaaggacaaataagatagcagagtgaaagagcttttgtctccttagaaggaaggctgaga

SEQ ID NO: 268153 - DNA, 100 bp, Homo sapiens
cggagcccgcagaacctccacagtcaagaggacgctggcttgaggacacccctggcagtgcccggcccatatcctgctccttttgggatggtcccccacg

SEQ ID NO: 268154 - DNA, 83 bp, Homo sapiens
tgcgtgttcgcgggtgtgtgctgcgttcacaggtgtttctgcggcaggctctgacgcccgctctgcggcttcggtgtttgaac

SEQ ID NO: 268155 - DNA, 100 bp, Homo sapiens
cctcaccatctggctcttcaagcaccgccgggtgcgctttctgcacgagaccgggctggccatgatctatggcatccttctttaaaagagaaatccacgt

SEQ ID NO: 268156 - DNA, 80 bp, Homo sapiens
gcgaggacggcgaggcgctcaacggcgagccagagctggacctcaccagcaagcaattctgtggtgttcttggtcacaca

SEQ ID NO: 268157 - DNA, 50 bp, Homo sapiens
acgacccggagcacccgacccctgagctcttgatggaaatgtgtatgatc

SEQ ID NO: 268158 - DNA, 75 bp, Homo sapiens
tgtccttgctggtgcatgcgtcgtcggcctctgggcagcaggtttctgctttgggacaaccatacatctaattcc

SEQ ID NO: 268159 - DNA, 82 bp, Homo sapiens
tggttccccaacatgcctcaccctcatctatatcctttggcagctcacaggcaggggaaatggaaggtgatgcagtcgaagc

SEQ ID NO: 268160 - DNA, 83 bp, Homo sapiens
ctgctcaagatctcagagaaggaggaggtgaccacgcgcgagagacacctatggctgccgatgaaggctcagcagagaaacag

SEQ ID NO: 268161 - DNA, 82 bp, Homo sapiens
ctgtgacgggcgtgggggcctcaagctgtcccaggacatggacacctgtgagggcgtgatggtgggcatgggtcagaaggat

SEQ ID NO: 268162 - DNA, 100 bp, Homo sapiens
ccagagggcaacgggaacacccaatctatggcttcccttccgttttcgcgtggttcttttgcaaggctgggagcctatatgtgagactgaagaattaacc

SEQ ID NO: 268163 - DNA, 87 bp, Homo sapiens
cgatgttccgccggagcttgaatcgttttgactaccgaccagactcccggaaatcatgttggtaggatcccagtctttttcgcctgg

SEQ ID NO: 268164 - DNA, 75 bp, Homo sapiens
ttgaaaggtgtactgcaaggaacaaaatgtttgtaaattctccttttaccaaggcgcattctacattctaaaggg

SEQ ID NO: 268165 - DNA, 87 bp, Homo sapiens
tagctattatttctcttgctattgggggagtaactgaaggcatttttagatgaattcactaactggtcaagaataaatcccaacaag

SEQ ID NO: 268166 - DNA, 76 bp, Homo sapiens
cgagggacctgggactgctcacagccaggacacattcagctaacgtattttagcaggtggagtgaggttgaagatt

SEQ ID NO: 268167 - DNA, 100 bp, Homo sapiens
aacaagtgactgtcccaattggagttctgctggtgatctttgaatctcgtcctgactgtctaccccagatcttaaatctgacccaggccttgaaagacaa

SEQ ID NO: 268168 - DNA, 98 bp, Homo sapiens
gctggagcagatcctggtggctgagaaccgatattctctaagccgctttcatcatgggagaaatagagcagaggccgaccccaggatcacgactgggg

SEQ ID NO: 268169 - DNA, 100 bp, Homo sapiens
cacattttacagaataagtcagatgactttctgttgcctttgttccattgaatgttcccaataacaaaaattctacagagtgggaaaaagtgaagtccct

SEQ ID NO: 268170 - DNA, 83 bp, Homo sapiens
gttgtgcctgtgcccagcacagggtgtgctgctggtgcactgccagtgaaagatgtagaagataaacctgaacaacaaaccag

SEQ ID NO: 268171 - DNA, 99 bp, Homo sapiens
ctgtggagacggtgacagattctagccgctactttgtaatccggatccaggatggtactgtccccagaagaccatgtctgtgttgagctgtatctgtga

SEQ ID NO: 268172 - DNA, 100 bp, Homo sapiens
atttgttaaggattccaagtaactcttatttggatggtgccatgacaatggtgtgaactacaagattggagagaagtgggaccgtcagggagaaaatggc

SEQ ID NO: 268173 - DNA, 98 bp, Homo sapiens
gggaagctgatgaaagctctgcacattctgcggctaaagatgcgcattagcacagggcaaggcttcccagttgaagtctgagcgggaattggacaaga

SEQ ID NO: 268174 - DNA, 75 bp, Homo sapiens
aaaaatgctggccaggctgtcacaattgttgcacaatatcgacctgaaggctccagtgatcattctacatatatt

SEQ ID NO: 268175 - DNA, 74 bp, Homo sapiens
gcatcggcagctccggaggccggggtaactggcagacctgcctagagctggaacgttacctccagagcgagccc

SEQ ID NO: 268176 - DNA, 100 bp, Homo sapiens
ttcagcttcatgaaccaggagcagggaaaccagctgagccaacccacattctgacctaaggagcactgagatacctcaccaccaaggagcagtttcacca

SEQ ID NO: 268177 - DNA, 100 bp, Homo sapiens
ggcacgacgcgctcgacacgcgggtgcggggcgacctcggtggcccgcaggactcacaccacccggcaagaactgctcactacggctccctgccccagaa

SEQ ID NO: 268178 - DNA, 90 bp, Homo sapiens
tcgcgctactctctctttctggcctggaggctatccagcgactcgctcagcagcagcctgaaaacttgctacaagtatctcaatcagacc

SEQ ID NO: 268179 - DNA, 49 bp, Homo sapiens
tgaccacccctgaagaaattgcacaggtcaaagattctaaactgcctgc

SEQ ID NO: 268180 - DNA, 82 bp, Homo sapiens
gtgactccccgcagcctggacaggtgatgctgcattaccgctcagacctgctccagatgctggacacactggtcttctctag

SEQ ID NO: 268181 - DNA, 83 bp, Homo sapiens
cgccactgcagagcctgtccgtcagtccctaggtatccgcactgctcaggggtgtgggcagaagaaaaagctagtgatcaaca

SEQ ID NO: 268182 - DNA, 100 bp, Homo sapiens
gcctcacccacagcttttgatatctaggaggactcttctctcccaaactattggtttttcagcagcagatgctgtaacaggactgaaattggtagaagag

SEQ ID NO: 268183 - DNA, 100 bp, Homo sapiens
actggacttctcaactgccattctggattccagaagatttaactacgtggtccgggttcgtaagaagaactcgctgaaggactgcgtggcagtggctggg

SEQ ID NO: 268184 - DNA, 100 bp, Homo sapiens
ttctggctttctttgcagcaagcgatggcatagtaaatgaaaacttggttgaaccctcggatacgatagaaaatgtaaaggccaagatccaggataagga

SEQ ID NO: 268185 - DNA, 76 bp, Homo sapiens
tctctgctgctctctcatttgctggccatcggattgggaatgctgcttctaaattacttgggcaaaattgggtcca

SEQ ID NO: 268186 - DNA, 100 bp, Homo sapiens
ccgaggttcgtgcgcgtctggtggcggcggcgtgatgttctcggcaggagcggagagtttgctccaccaggccagaaatgtgagcgtgtactgctggccc

SEQ ID NO: 268187 - DNA, 99 bp, Homo sapiens
atcatggattcaaagaagtagaagaaaactggtctaagcatttctcatcaggatgaggtggtagtaaatgaccgatggggtcagaactgttcctgtcac

SEQ ID NO: 268188 - DNA, 75 bp, Homo sapiens
cccagctcgcgcttcagcgtcccggcgccgtcgcgccactcctccgaatcctgcccggcctgtacatcggcaact

SEQ ID NO: 268189 - DNA, 100 bp, Homo sapiens
ggtaccggctgggccggaagatcggcagcggctccttcggagacatctatctcggtttccacttgagcggcacagtgacagaacctgcaatacaatcgga

SEQ ID NO: 268190 - DNA, 89 bp, Homo sapiens
cgagagcgtgaccgagagcgcgaatatcgtcatcgttagaagacggtctggaaaatcccgaagcagaagcccgtattcatctaggcatt

SEQ ID NO: 268191 - DNA, 100 bp, Homo sapiens
acagcacaaagaatgtcagacagggcttagctgaaaacaaaagtactttaggacctgaggaagttcgtaaatctgccctgacactggttatgggtcctct

SEQ ID NO: 268192 - DNA, 75 bp, Homo sapiens
gctggggctacaggcgtgtgtcactgcgcccagtttttccagaggcctcaaatacagcctcctagagctaccatc

SEQ ID NO: 268193 - DNA, 100 bp, Homo sapiens
ggagtgccgtgcgccgcagcccgggcccaggccccggcagcgcctgggacaaggatcaccattaacaaggacaccaaggtacccaatgcctgtttattca

SEQ ID NO: 268194 - DNA, 100 bp, Homo sapiens
gagcccggccggagctgggtctggagacgccgtggcagcctgaacggagtgtgcgacggattgggagtttctaataagtgaccgtgacccacagtgcaac

SEQ ID NO: 268195 - DNA, 50 bp, Homo sapiens
ggcggacagtgcggaactaaagtgccggtggtggtgtgcacattgagccc

SEQ ID NO: 268196 - DNA, 80 bp, Homo sapiens
ttcagccttaccaagcaacaagtgaaattgaggtcacaccttcagtccttcgagcaacaagataaagccgatcttatccg

SEQ ID NO: 268197 - DNA, 90 bp, Homo sapiens
gagctcggaggggcgctgtgtgtacatcacccccatggaggccctggcagagcagcaaaccagtccagctacgggggcccagccagccag

SEQ ID NO: 268198 - DNA, 75 bp, Homo sapiens
cttcagccaagtgaaaggcactatcgagattggaaccacagaagttggtagctggcagtgttgtgatggcttttg

SEQ ID NO: 268199 - DNA, 90 bp, Homo sapiens
cccgcttcgaggtggagagagcccagtgggaggtggagcgggcggagctgcaggaatacatggtttacaggaagcatacctacatgaggc

SEQ ID NO: 268200 - DNA, 100 bp, Homo sapiens
ttcccatggttgccggctcccctctcaggacaacccagatgtgcaacaaagtgcgatgttgatattcactgatggactccaaagaatcattaactcctgg

SEQ ID NO: 268201 - DNA, 99 bp, Homo sapiens
cgaacgtgctgctgccgcccaaggagagcaacctcttcaaacgcatcttggtgtcagcagttgagtctttggagggccccctgctccaggtggaaggac

SEQ ID NO: 268202 - DNA, 100 bp, Homo sapiens
gagtgaagaacgccgccatccagccaccattccaaggagatctattgggaaactgattataaccactcgggcaccatcgatgcccacgagatgaggacag

SEQ ID NO: 268203 - DNA, 90 bp, Homo sapiens
cagaatcccactgagacgcttcggagagtgttgccaaaagtcagaattgtcctgggtcacataatgccagctgagcgtaaaaagccagca

SEQ ID NO: 268204 - DNA, 117 bp, Homo sapiens
gaagaagcctggtctccggggccgctggattctgaggaccagcagatggccagtcacgagaacccagacttctgaatgaacagtgaatctattactgaggaaaaccagaggaagcct

SEQ ID NO: 268205 - DNA, 100 bp, Homo sapiens
ttgaaaggagcagggaaaagatccagaagcatgttagttcgacatcatcatcttttcttgaaatggcaggatggtggctggcaaagtgttgatggcaaag

SEQ ID NO: 268206 - DNA, 100 bp, Homo sapiens
ctgcttggccatatttgtcactgtgatctccctcttggtgtacaagtctgtgcagacttttgcagacaaatcaaaacaagaagctctgaagaatgacctg

SEQ ID NO: 268207 - DNA, 50 bp, Homo sapiens
cttttagaccacaggcaaatgctttatggtcctagaacaattggagattc

SEQ ID NO: 268208 - DNA, 74 bp, Homo sapiens
cgcttccgattgggctaccacgccattccgagtatgagattcacagtctgagaatgaggcttcaccagtaaaac

SEQ ID NO: 268209 - DNA, 75 bp, Homo sapiens
agcggccccggggacaccagcagctctgctgcggagcgggaggaggaccgaaagagtggagactgctgcacggac

SEQ ID NO: 268210 - DNA, 75 bp, Homo sapiens
ggcagtgcttggtcttattaaacgctttatgaaagtgtctcagcagatgaagttaattcaccattatcacccctc

SEQ ID NO: 268211 - DNA, 75 bp, Homo sapiens
ggggaaagcaaggccaaagacagggagaagcctttctgagaaaagtctacagcattctttctctgcaggttctct

SEQ ID NO: 268212 - DNA, 100 bp, Homo sapiens
gcagaaggattccgggagcacagttccgccgagacaagtaaatttttgtgaaacattgcagatgttagatggatttgggagaattttccaaactaagtgg

SEQ ID NO: 268213 - DNA, 82 bp, Homo sapiens
gaaccgcccgcaggcccgtcgcagctccattaatgcaactaccattacactaaggaggtgcttcccaaggaccgtagatgcc

SEQ ID NO: 268214 - DNA, 96 bp, Homo sapiens
ccgaaaactggagtggtttcgtccaagaggttttcagcagctggagaatatgatattctttcaggaacggcaggagcagctgatgggatatcggaa

SEQ ID NO: 268215 - DNA, 75 bp, Homo sapiens
tacgagcctgatcagctccaggagctcaaggcctcctgaaccggcccaaccccttgctggcgttgccccccgccc

SEQ ID NO: 268216 - DNA, 87 bp, Homo sapiens
ggtcttcagcggggcgctccaggaggcactcacaggaccaagaatcgccttcagccctgtctggtgcatccttggcagaaagtgagg

SEQ ID NO: 268217 - DNA, 97 bp, Homo sapiens
ggacacacagaaatataaacctttcaagagtcaagtaaagccagacgaggacagccggctgctgcccctgctggtctgcctgcggttcctgttcgtg

SEQ ID NO: 268218 - DNA, 100 bp, Homo sapiens
agctgtgtggtgcttctgtggtgaaggagctttcatcattcacccttggcacaaaactggcgatggaatatgagaggagccctctggaaagaaaaggaca

SEQ ID NO: 268219 - DNA, 82 bp, Homo sapiens
gatcatccaagtggaggttcctacagagattcatatgagagttatgctggacagtgccacatcgcttatccaggcagctaaa

SEQ ID NO: 268220 - DNA, 98 bp, Homo sapiens
ataaatcttgtttgacctttaccgatgatggatgtgggatgacacctcataaactacaccgaatgctcagaacccctgaacagtgcccaagtgttgtc

SEQ ID NO: 268221 - DNA, 97 bp, Homo sapiens
gagaggctacgtattaattcactcaggaagaataccattttgccaaaaattcttcagcagctgctcagccaggaactgagatctttaatctgccagc

SEQ ID NO: 268222 - DNA, 82 bp, Homo sapiens
gaggaaggaacgaggcaaggagctaaagcagcgtgcgttcagccctggggcgcctgtgtctggcagagctggtgtgagacga

SEQ ID NO: 268223 - DNA, 74 bp, Homo sapiens
cctaatgcacccactctggcagacctggaggacgatacacatgaaggtctagatgttgatggaatatatcgagt

SEQ ID NO: 268224 - DNA, 100 bp, Homo sapiens
cgcgcgcctgggctccggcagtgaccgaggcgaactccggggccgctccggggcccgcagatacgaggaggaaagctcatgatcacttacacccgtaaaa

SEQ ID NO: 268225 - DNA, 87 bp, Homo sapiens
cataagagaatcccattatatgttgatgtattaaaagacctgagaacctggtattaacccttcctggaagaattgtagaaaatggaa

SEQ ID NO: 268226 - DNA, 48 bp, Homo sapiens
tcggggctccagtggagagttcttacgtgtaaacaggaacatcgataa

SEQ ID NO: 268227 - DNA, 90 bp, Homo sapiens
ggcctccccagccatgtggaattagcaaacgaggcccctgagagctccacctagttcacaggataaaatcccacagcagaactcggagtc

SEQ ID NO: 268228 - DNA, 75 bp, Homo sapiens
cacctccgctgctgctgctgctcttcccgctgctgctcttctccaggctctgtgtatgccgagattttgctgtcc

SEQ ID NO: 268229 - DNA, 76 bp, Homo sapiens
agagccagcaatgcctccatgaacaatctcacccaattactctgctcaggccaagctataacatcagaaatggtga

SEQ ID NO: 268230 - DNA, 100 bp, Homo sapiens
ctttccctagtactctgcaaacagttgccgaggtactgtctgaatgccgcctgctcgcctacatatcccaggtgcccacgcagatgtccttcctcttccg

SEQ ID NO: 268231 - DNA, 75 bp, Homo sapiens
cctgttacattaaatatgaacgtggctatgccttcatgggtgctgacacctttacggcaaaagttaatattgaag

SEQ ID NO: 268232 - DNA, 99 bp, Homo sapiens
aaactgctctgagagcttacgtaaaagaacattacccgaatggagtctgcactgtggagaacgccggggccatcggcccgtcccggttcgggctcaaga

SEQ ID NO: 268233 - DNA, 71 bp, Homo sapiens
tgctcacagggcccgatacttctggggcaacctacccgggatgaacagaataatccagaatggctactctg

SEQ ID NO: 268234 - DNA, 100 bp, Homo sapiens
ttaatgggacctgtgaagcaactgaagaaaatgtttgaagcaacaagattgcttgcaacaattgttatgcttgttaacctcaccctacagatgaagataa

SEQ ID NO: 268235 - DNA, 97 bp, Homo sapiens
ggcaaagccattcctgacctcaccgcgcccgtggccgccgtgcaggcggccgtcagcaacctcgtccggacagagtctcgttctgtcacccagcctg

SEQ ID NO: 268236 - DNA, 75 bp, Homo sapiens
tgaaacatgaaaacatcgtggccctgtacgacttccagatatcagttttagagaatgtggcgtggagaaattctc

SEQ ID NO: 268237 - DNA, 100 bp, Homo sapiens
tagcgtgaaaaccacaagcaggtccaaagagagaggtgaaattgatgcccatgaagacagcttcaaatctgcagatgaatctggacaggcactgcttgct

SEQ ID NO: 268238 - DNA, 75 bp, Homo sapiens
cttacatcttgcatcctcaagcggtgaagctcgtgtgtggagtgccacggtacaatcagacgacagatggacagt

SEQ ID NO: 268239 - DNA, 75 bp, Homo sapiens
acatctaggagcatctacccatggacagacatgtcttcccatggagatcaacaacccctccccgtcgtaaacgct

SEQ ID NO: 268240 - DNA, 82 bp, Homo sapiens
gaaaaacctcatctaggattcggttcatgcttcaagatgttatagacctaaggctggacatggatttgattgacatactttg

SEQ ID NO: 268241 - DNA, 80 bp, Homo sapiens
ctcagttggaagcagccgatccagcctgcggagcctgtggggcagcctctacggcagacacatgcaggccaacccagaac

SEQ ID NO: 268242 - DNA, 75 bp, Homo sapiens
ctgagctaaaatggctgaggagagagtcgcgacgtggaagatagatgataagcctgtaaaaattgacaagtggga

SEQ ID NO: 268243 - DNA, 83 bp, Homo sapiens
aagaattcctcactaatgagctctccagaaaattgatgcagggaacgggtatggcaatccccgaaactcaccaggtctgctgg

SEQ ID NO: 268244 - DNA, 75 bp, Homo sapiens
ctctggagtaattggagccaagaaatgagtataggattgaagccaaaggcagatgccttcttcgttatgatgttt

SEQ ID NO: 268245 - DNA, 100 bp, Homo sapiens
aaaggatctgttggtggaatgggcttgccagggtgccttcaccagggatggaagaggcaggctgcagcagagagatgcagagttctttcacacgtcgtga

SEQ ID NO: 268246 - DNA, 102 bp, Homo sapiens
gagcagagggggcctgagctcaagcaagcctctcgccgagacatgtacaccatctgccagagtgctgggctagatcttcctctgatggcgctgcctccatgc

SEQ ID NO: 268247 - DNA, 97 bp, Homo sapiens
acaagccatgaacagtgggtctccagcacctcagtctaatcagatgaacacaatgacgtacagaagaaaacctttaccaaatggataaatgctcgat

SEQ ID NO: 268248 - DNA, 75 bp, Homo sapiens
ggagaattatgggagcgcatttccccaggtctattatcctcccagtccacaacgctgaaccgtggctggacgaat

SEQ ID NO: 268249 - DNA, 75 bp, Homo sapiens
accaggagacgcaactcatcggagaattttctctacatgtgcacccatttaaaggactcggcttcaagggaagca

SEQ ID NO: 268250 - DNA, 49 bp, Homo sapiens
tcgcctcccggccgagctgacgatgtccggtctgtgctacgacagcaaa

SEQ ID NO: 268251 - DNA, 82 bp, Homo sapiens
cgacaccccagcctgttgctgacactagtttcaaatctgaacatcaatgatgtactagggaactactcattgactcttgttg

SEQ ID NO: 268252 - DNA, 100 bp, Homo sapiens
aaggataagtcgaaggggaaggcgcctgaagaggacgaagggggcatgtgtccgtttcgccacatcagtggtgagaagacagttgtgtgcaaacactggc

SEQ ID NO: 268253 - DNA, 98 bp, Homo sapiens
cagaaggagaacaagccaggaaaaccccgaaaacgcaagaagcgtctctctgatgtaaaggatggagtaaatcaagcagcacctgcatttggatttgg

SEQ ID NO: 268254 - DNA, 100 bp, Homo sapiens
aagaagacaaactgtatggtggagaaagaagtgggaaggatctgcgcgggacatggacatcttccagcaacagatctcgagaagacagctggctaaaatc

SEQ ID NO: 268255 - DNA, 75 bp, Homo sapiens
ctggatctgcgatctgtttgtgcatcttgcagacagagtggccatgtatgtgcatgcatatacactctacagtgc

SEQ ID NO: 268256 - DNA, 100 bp, Homo sapiens
ccagcttccagttagtggatatagcacaccatccccagccagagccgtgccgctcttggccaccgaaagcgtcaagcaagaagaagctggagtacggcct

SEQ ID NO: 268257 - DNA, 97 bp, Homo sapiens
ctgtttgtgcgcacagtgctggtctgcctgacatccacagatgaagatatccttgctaaaggaaaacagtccatcaggagtcaggctttaggaaatc

SEQ ID NO: 268258 - DNA, 90 bp, Homo sapiens
cgtggttgctaacgcgaaaccaagtgctggagaatctggtaaaagcaccattgtgaagcagatgaggatcctgcatgttaatgggtttaa

SEQ ID NO: 268259 - DNA, 100 bp, Homo sapiens
ctccgcagcaaacaactccgcaaacgaaaaagaacgacatgatgcaatcttcaggaaagtaagaggtgtaatgtgtacaattctggccaacggcggaagc

SEQ ID NO: 268260 - DNA, 100 bp, Homo sapiens
aggatcaagggataaaccatggttggatggcaagcatgtggtgtttggcaaagtgaaagaaggcatgaatattgtggaggccatggagcgctttgggtcc

SEQ ID NO: 268261 - DNA, 100 bp, Homo sapiens
ttcaatatgactgcctggatgaagaaggatttgagactaagtttattcctccaaagcaaaccaactgagaatgcaggaaacatgccctgaactgtcacag

SEQ ID NO: 268262 - DNA, 100 bp, Homo sapiens
gtggaaatcctcaagctgctgctgaccccgcactacatctacccaccagccatcgtgcagcccagcgtggtgatcccagccgcccctgtcccgtcgctgt

SEQ ID NO: 268263 - DNA, 74 bp, Homo sapiens
tggaccaccccatgaacctcgatatgatggtaattccctgctaagtagcattgaatgttatgaccctatcatcg

SEQ ID NO: 268264 - DNA, 90 bp, Homo sapiens
ctggccagcacgctggactgcgagacggcccggctgcagcgagcgctggacggagaggaaagcggaggtgaaacagcagaaatgcctgac

SEQ ID NO: 268265 - DNA, 82 bp, Homo sapiens
agagaagcatctttttgtagatctcgtctagtatagagatggattaacagtaggaagagtttaatattacaagaacaaagga

SEQ ID NO: 268266 - DNA, 83 bp, Homo sapiens
gatgccgatattcaacgctttcggcaccataaggatgaagtggctggtgacatattcgacatgctgctcaccttcacagattt

SEQ ID NO: 268267 - DNA, 99 bp, Homo sapiens
tgggctgaactgcagtgggagaggagaagagatgctggcgtgaagggcatgggtggtaaagtaccacctgctactcagaaagctaaatcagaagaaaat

SEQ ID NO: 268268 - DNA, 111 bp, Homo sapiens
agagacagctccagacatgtggctcttcttcgggatcactggattgctgacggcagccctctcagatacttgttcccaggaccttaactcacgtgtgaagccaggatttcc

SEQ ID NO: 268269 - DNA, 90 bp, Homo sapiens
gtgcagacagcagcttcatgatattactgtaccgttagaagtttttgatccacctaaacccactgtgttcatctctggggtcatcgcccg

SEQ ID NO: 268270 - DNA, 101 bp, Homo sapiens
tgatattggatggatatgggagctgtggccctcagaatttaaacttaaggaaagagtgggaaagtgaggatttccaacgctcacagtcagcagatggatga

SEQ ID NO: 268271 - DNA, 100 bp, Homo sapiens
atgatgataatcatagcagcacttttcacagcatcagcagtcatctcactagttatgttcaaaaaaatccgtacaggtttacagcaccaaataatctggc

SEQ ID NO: 268272 - DNA, 98 bp, Homo sapiens
ggggacccagaccctggagcctcagttggaagcagccgatccagcctgcggagcctgtggggcagctacaagtgtattcatcagagtttggaggacaa

SEQ ID NO: 268273 - DNA, 100 bp, Homo sapiens
gtgtactccctggtgctcatccccaaagccaagccactcactctgctctggggtcctcagaatggttggaatgaccctccagctttgaacagagtaccca

SEQ ID NO: 268274 - DNA, 100 bp, Homo sapiens
gcgccgtggccgcgtcccactcctcaggccggggcgcacgtcggctcccacgcttagccagctcccggtcaatgagctgaaggagaaaggcaacaaggcc

SEQ ID NO: 268275 - DNA, 75 bp, Homo sapiens
cccaggtttattctcccatagcatgtgatgcagacagacatgctgaactatctggaagtccactgaaaagcaaaa

SEQ ID NO: 268276 - DNA, 100 bp, Homo sapiens
cgaaacattggtacaatgaatacatttaaggattttgaaaagccatggtaaagatgaagaatgtgttttggaagcagaaaataaaaaactagtagaagac

SEQ ID NO: 268277 - DNA, 100 bp, Homo sapiens
aggacagacgcctgaggcggccaaggaggactccctcaatgtggctgacttgacttccctccgggccccactggacatccccatcccagaccctccaccc

SEQ ID NO: 268278 - DNA, 98 bp, Homo sapiens
ctgaggcactgcagaaagtgggcctgagcctcgaggatgacggtgctgcaggaacccgtccaggttgttgatcattatgaaaatcctagaaacgtggg

SEQ ID NO: 268279 - DNA, 95 bp, Homo sapiens
agtgggtaaaaagtacatcaaagccctttctgaggaaaagatgtgaatttcttcggagtaagaaatcctcagaggaaattacccagtatattcaa

SEQ ID NO: 268280 - DNA, 50 bp, Homo sapiens
tctagatcacatactccaagaagacaggtggttgagtttgcctcttatgg

SEQ ID NO: 268281 - DNA, 100 bp, Homo sapiens
gcggcccggagctcgggaccgcttgctgatgaccgtatggcactggtgtcaggcatcagcttagatccagaagcagcgattggtgtgacaaaacggccac

SEQ ID NO: 268282 - DNA, 75 bp, Homo sapiens
cccacttcactccagtgcctccgacgcctcctgatggcgtctacggtgacgtgcagcgcgtgaagatcctgttca

SEQ ID NO: 268283 - DNA, 96 bp, Homo sapiens
gcgggccccgctccgcttcgaatggccttgcagtctcatcctactcaagtgtggctctgtatccaacaacagtcttggagatctcatgaagatttc

SEQ ID NO: 268284 - DNA, 82 bp, Homo sapiens
aagttgacccccctgcacctcgctgtccaagcaggctcagaaattattgtccgcaatttgagaattttctctacatgtgcac

SEQ ID NO: 268285 - DNA, 100 bp, Homo sapiens
cagctgcagccgcagcctgtggctgtgcagggccccgagccggcccgggtcgaggatcatggggttgacagcagcattttccagaatcctaaaaagcttc

SEQ ID NO: 268286 - DNA, 100 bp, Homo sapiens
gcagaagttgtctgagtgcgttggtcggcggcagtcgggccagacccaggactctgcgactttacctattcctgcaccaactgacctgaagttcactcag

SEQ ID NO: 268287 - DNA, 95 bp, Homo sapiens
aagtgatgaagctgcttaccatttaatcattgagctctatgatagggttattaatgctgcactggctttagcagcaaaaccacagagtaaactgg

SEQ ID NO: 268288 - DNA, 100 bp, Homo sapiens
tggtgaaggtggaacggggctcccaggacctccactaatcaccagaacaaaatgtgcaggtgactctgacatcattagaagcatgccagaacagactggt

SEQ ID NO: 268289 - DNA, 100 bp, Homo sapiens
gcgggactccatgtttcagaaccctctcatcgtcaagaaaaacacaccttgactttagtcagatacatcactgtctgttaaaggaaaccaagcgtgaagt

SEQ ID NO: 268290 - DNA, 97 bp, Homo sapiens
acagaagatgctgaagctgaggacacacccaggaaaagactcaggacggacaagcacagtcttcggaaggccgctccccacaggagaacctggtgcc

SEQ ID NO: 268291 - DNA, 101 bp, Homo sapiens
ataagatttcatctgggaaatcactaggagttcttggaagggaaagaaggaagattgtgtacggtggcgccccccaggccctcaccctgaagctcccagtg

SEQ ID NO: 268292 - DNA, 74 bp, Homo sapiens
ctgccctgagacggtgtcccgccgaaagggttacacatcattttggaatgactgtatatcatctggattacgtg

SEQ ID NO: 268293 - DNA, 100 bp, Homo sapiens
caccaacaacaccacaataatccacagccaaggtcctgaaaatccttggttggttcaagcttatgtttcagcagctaaacacccttttgcttctgtggtg

SEQ ID NO: 268294 - DNA, 100 bp, Homo sapiens
gcccagtgcccccgagctcaagcaagggctgtatgagctctcagcaagcaactttgagctgcacgttgcacaagaaactggcgatggaatatgagaggag

SEQ ID NO: 268295 - DNA, 110 bp, Homo sapiens
cacctttcggcttctgagacggcggcagcagcggcattcaggcatcatggccgccctcagaccccttgtgaagcccaagatcgtcaaaaagagaaccaagaagttcatcc

SEQ ID NO: 268296 - DNA, 124 bp, Homo sapiens
ggagcccacctgctttgagagaagtgatgacattgggggattatggaagtttactatctggaatatgaagaccacagaatgttcaaatacctttaaatccctgggcagcaccgcagggacagat

SEQ ID NO: 268297 - DNA, 83 bp, Homo sapiens
gaaactttggggcccgcgccgcgcgccggcggcaccatgaagtcagcggaggaaggaagacagtgacccgcccattcatgaaa

SEQ ID NO: 268298 - DNA, 92 bp, Homo sapiens
tgctggacctcagctacccccgcacccacgcggccctgctgaaagtggcgcaaatgacaatgcagatcttcgtgaagactctgactggtaag

SEQ ID NO: 268299 - DNA, 100 bp, Homo sapiens
cccaggccagtggccacgcaccccggctcgcccgggcagccacccccggccctgctgccacagcaggttctgcggggagtgtctccagccctgcctgcag

SEQ ID NO: 268300 - DNA, 75 bp, Homo sapiens
ctcgggaccaaggatcacgtcatgactccgcgctggaggagctgacctttgacccgagctctgcgcacccgagcc

SEQ ID NO: 268301 - DNA, 87 bp, Homo sapiens
ggaataaacttttgaaacactaatgtacacttttcaggattagaagaggctgtgtatagaaacatacaagcttgcaaggagcttgcc

SEQ ID NO: 268302 - DNA, 75 bp, Homo sapiens
acacctgtggttcttgtgggaaacaagtcagacctcaaacagctaagacagctcctacagaagaagggaaaaaag

SEQ ID NO: 268303 - DNA, 75 bp, Homo sapiens
tgccatcaacctgcgtgaggtcaacctgcgcccccagatgtcccagggttgtgagtcccggcccagcccctccac

SEQ ID NO: 268304 - DNA, 100 bp, Homo sapiens
ctgggagagaggtacctctccttttccctctccctttccctaagcctttccgctgtgcccattgccattactcctgcaacatatctggctctctgaagcg

SEQ ID NO: 268305 - DNA, 74 bp, Homo sapiens
aggcctcagcatacacaggaatgttgtcttctagatatgccactgatacatgagaacgccagatcaagtgtccc

SEQ ID NO: 268306 - DNA, 101 bp, Homo sapiens
ctcggctgctgctcttactttgacaagccaggctaacattgaaggagcaatttacagcaatgagggatttatacatgaaaaatggacaaggatttgcatta

SEQ ID NO: 268307 - DNA, 75 bp, Homo sapiens
agccggcggcccggagtggggcggcgggcccgggaccgtggcgcttcgagagattcgtcgttatcagaagtcgac

SEQ ID NO: 268308 - DNA, 127 bp, Homo sapiens
atggaagcaggtggaattatgccctgttggttccaatgctgggattggctgcttttcttcggcagaaggttctggagagaaaaaatcatgagttggtatggcaaggaaaaggaacattcaagttaac

SEQ ID NO: 268309 - DNA, 50 bp, Homo sapiens
gtcctcgcttgcagttcagcgaccacgaatgatatggaacctagcaaagc

SEQ ID NO: 268310 - DNA, 94 bp, Homo sapiens
ccctgtccccgctggcgggcttccctgtcgccgttcgctgcgctgccggtacctggagtagaacagaaaaattattatgtctgtgttcccttgg

SEQ ID NO: 268311 - DNA, 75 bp, Homo sapiens
cccaggagtcctgaccagagagcaggacagagcgggatgccaccagcttgtccaaagggaagttccaggagctcc

SEQ ID NO: 268312 - DNA, 100 bp, Homo sapiens
agtgctgccagagctgagccagtccctagggctcagggagcaggagcttcaggttgtccgagcatctgggaagtttctgagtcccttcaacatgatcctg

SEQ ID NO: 268313 - DNA, 100 bp, Homo sapiens
tttagtacaggtctttatcttccaactagatgatatcatcaagttgaatcgaaaggaagggaagaagcagaattttccaagactaaatagaagactcctc

SEQ ID NO: 268314 - DNA, 82 bp, Homo sapiens
cttcagcccactgagagtttacctctggagttcagtgatgattcctacaggaagcaagtagtaattgatggagaaacctgtc

SEQ ID NO: 268315 - DNA, 100 bp, Homo sapiens
cccgaatgcaggaagaccgtgatgggagctgcagcacagtcgggggtgtaggttatggggtttgatgaaggccggaacaactttgaaggggaggtcacca

SEQ ID NO: 268316 - DNA, 83 bp, Homo sapiens
tcttctttcttatcatcagtgtgttagctttccccaatgggcgaactttctgaccaagtatacaactacccagagggcctagg

SEQ ID NO: 268317 - DNA, 95 bp, Homo sapiens
ggcggcaggagccgcggagccggcgctgagaggggctgcggccggagcgggcggctgagacaaaggcgacgtgcctccggagccagcgtggtggc

SEQ ID NO: 268318 - DNA, 100 bp, Homo sapiens
gggttcataatctcacagctgagaaaggtccctccacactcctggaactgtacacctattggaacccttaagaaggtgggtgcggctgctatttggacga

SEQ ID NO: 268319 - DNA, 90 bp, Homo sapiens
agagatgtgtacatatcccacgtgaggaaggagcacgggaagtcccttaagctcctaggatttttagatgttgaaaatactccctgcgcc

SEQ ID NO: 268320 - DNA, 74 bp, Homo sapiens
ccgggatgtggcttctgcagctccagaaaaatttaccttcagctttaacaaaaaattggccgtcaaaacctgag

SEQ ID NO: 268321 - DNA, 71 bp, Homo sapiens
attaaaaccagggctccacagttaggagcacaacctccaagagggaaaacatttctccagattatccactc

SEQ ID NO: 268322 - DNA, 101 bp, Homo sapiens
ccctgttgttcagcagtgatgaggaggaatgtatcctgtcaggtataatgtcagtgaatggcaagaaagttcttcatatggatcgaaacccttactacgga

SEQ ID NO: 268323 - DNA, 90 bp, Homo sapiens
cagcctccaaagtagctgggaccacagagcatcctggccagaacaagccaaggagccaagacgagagggacacacggacaaacaacagac

SEQ ID NO: 268324 - DNA, 98 bp, Homo sapiens
ccatggccttctacgttgtgaaaatgctaatcacatatggctctgatagaactgaggcactgaagagaatggcagatgcactggataactatgttatt

SEQ ID NO: 268325 - DNA, 75 bp, Homo sapiens
tcacaaaagcagatgctgctgaattctggagaaagttttttggagacaagttaatgttgaagaaggaaaatgcgg

SEQ ID NO: 268326 - DNA, 85 bp, Homo sapiens
tccgtatctgcctaggcattttgctgtctcctcctaatacggcctgaacttttccgattaagagttcttgagttaaatgcatctg

SEQ ID NO: 268327 - DNA, 100 bp, Homo sapiens
ctggccatcacagatcccgacgtgatcagaacagtgctagtgaaagaatgttattctgtcttcacaaatcgaaggatctcactgatgaaaaggcctccag

SEQ ID NO: 268328 - DNA, 50 bp, Homo sapiens
cggcggtcttcaagctctcacctcctgacaaggtgatccgggcgggcccc

SEQ ID NO: 268329 - DNA, 83 bp, Homo sapiens
cctcgtattctcctgcccttccccagacctgcctagagctggaacgttacctccagagcgagccctgctatgtttcagcctca

SEQ ID NO: 268330 - DNA, 82 bp, Homo sapiens
acgcggacagcgggctggagcctgacgagctggcggttccaaagaactactggttcagattttagctcttcccaagttgtga

SEQ ID NO: 268331 - DNA, 82 bp, Homo sapiens
aggaaggaacgaggcaaggagctaaagcagcgtgcgttcagccctggggtacctgtgcgtgcacgcagacgggaagggctgg

SEQ ID NO: 268332 - DNA, 95 bp, Homo sapiens
cagacccccaatctgcccagagaagccatgacaggagactggtgattggtgcaagcgacgtgggatgaggtcaaaggttccgttacagttactat

SEQ ID NO: 268333 - DNA, 100 bp, Homo sapiens
cttacgtctgcggaagtgcagctgcctcagttcttagcgcaggtgttgctctcttgccattcgtggatgagcgaaggctacgagctgccctagaagaggt

SEQ ID NO: 268334 - DNA, 86 bp, Homo sapiens
tttggaagaggaaccacaagaaaatcaaaagaaacttttgcccttatcagtaacacctgagcctgattacatcaaccccagagccg

SEQ ID NO: 268335 - DNA, 48 bp, Homo sapiens
ctagagcagggtttggagactcaggcatcgttggcttcacagtatgac

SEQ ID NO: 268336 - DNA, 51 bp, Homo sapiens
gctacaccgagtacaaagtaaccgcgcagctttggctagatcagagtctaa

SEQ ID NO: 268337 - DNA, 111 bp, Homo sapiens
gtggatctggattctaaggcaacacttccttgaagaaacaagcttacaggcagcagaagatgtcgttttcattggacctgacacacatgctattcaagccatgggcgacaa

SEQ ID NO: 268338 - DNA, 100 bp, Homo sapiens
gaagaagatggtggataagcccacccagatgattgtgctccagtccctccataagtaccagccccggctgcatatcgttgaggtgaacgacggagagcca

SEQ ID NO: 268339 - DNA, 50 bp, Homo sapiens
ctgcatcctcagagcatgcttggtgggccaccatctgtgcaagtagccaa

SEQ ID NO: 268340 - DNA, 100 bp, Homo sapiens
agctgccctgagacggtgtcccgccgaaagttttgatgtggacaatggcacatctgcgggacggagtcccttggatcccatgaccagcccaggatccggg

SEQ ID NO: 268341 - DNA, 75 bp, Homo sapiens
agggctcgtacttctgctcgcagtcgtgagatggagaataaagaaactctcaaagggttgcacaagatggatgat

SEQ ID NO: 268342 - DNA, 89 bp, Homo sapiens
gtctgtctgctcctggcatgccctgccacagccactgtaaaagctttgattgatcaagaagtgaagaatggcattccttctaacagaat

SEQ ID NO: 268343 - DNA, 75 bp, Homo sapiens
gaaaaacgaaattacttgcaattatgccagctgacgaagaatttgatgaactatgttttgaatttggtctggagc

SEQ ID NO: 268344 - DNA, 90 bp, Homo sapiens
aagccatcgcctggccccggctctctggaccttgtctcgctcgggagcggaaacagcggcagccagagaggaagctcaccagtgtgggaa

SEQ ID NO: 268345 - DNA, 50 bp, Homo sapiens
tttgttgagtgtcaaaacatcctcaaggtgttcaagcagccctggccagg

SEQ ID NO: 268346 - DNA, 105 bp, Homo sapiens
ccgcgcgcagggcctgcagcgggagctggacggcgagcgcgagcggcgcgagaaagaatgggtaccacagaccatgtcatcgtcctggcgtccacgaaccgagct

SEQ ID NO: 268347 - DNA, 75 bp, Homo sapiens
cgagtccgcgggaagatggcggcgccgctcatccccctctcccagcagcccagctcaacattggcaatgtgctcc

SEQ ID NO: 268348 - DNA, 140 bp, Homo sapiens
gtgcgactccgccgcgatggtgacccggttcctgggcccacgctaccgggagctggtcaagaactggctagagtaccgtggcacaatctcagctcattgcaacctctgcttcctgggctcaagcactctgcccacctcag

SEQ ID NO: 268349 - DNA, 100 bp, Homo sapiens
atattggtatctcaattgcggggcttactgctgatgctagactgttatggtgctggagaatctggtaaaagcaccattgtgaagcagatgaggatcctgc

SEQ ID NO: 268350 - DNA, 83 bp, Homo sapiens
cttacttttaaagagggggagataatccatttgataagtaagagtacagaattttctgagacgccttctcccgacagtgactc

SEQ ID NO: 268351 - DNA, 90 bp, Homo sapiens
cctgagttgccaatcattatcacaggttcagaagatgctatatcgagaagtttactgactttcttcggctctttgtgagtgttcacctaa

SEQ ID NO: 268352 - DNA, 96 bp, Homo sapiens
attccaggtggaattgctgatagacatgggggcctcaaacgtggagatcaactcctctctgttaatggagtggaggaccatgacatcatggaagcc

SEQ ID NO: 268353 - DNA, 50 bp, Homo sapiens
atcacgtggggcaggacggtcagagctgaggaactgcgtgtggagtcagc

SEQ ID NO: 268354 - DNA, 75 bp, Homo sapiens
ccaaggccgtcgccgaccgctacgctgtctactggaacagcagcaaccccagaaacatgttccaaatcaagtata

SEQ ID NO: 268355 - DNA, 100 bp, Homo sapiens
gcacaacattctctacttcctcacctacgccgacgagtacgccatcggctacttcaaaaagcaggctacagagctgtctgatgcaatacttgaaggatac

SEQ ID NO: 268356 - DNA, 100 bp, Homo sapiens
caacctggaacccctagtctcaagagatcctccagcctcagcctccctgatcacagattctgctggccatattctctactccaaagaggatgcaaccaag

SEQ ID NO: 268357 - DNA, 85 bp, Homo sapiens
tcggcaccaccggcttccaagcaaccaacttcgggcgcgctgtacagcaagtcaatgccatgcccaggatggcggcccaggtgac

SEQ ID NO: 268358 - DNA, 98 bp, Homo sapiens
ctgccaccgctgcccgagcccggtactccaaagattcaggtttactcacgtcatccagcagagaatggaaagtcaaatttcctgaattgctatgtgtc

SEQ ID NO: 268359 - DNA, 100 bp, Homo sapiens
gcgcccgggacggcggcggacctgtcgcgatgtcagggctgcgcctctctgcagcaggctgttataatggattagtttatgttctgaaaagtaatagtgg

SEQ ID NO: 268360 - DNA, 78 bp, Homo sapiens
gtgatcactctgggactcgtggggctgcagcaccgcttacaagagcagtgattcccaggctttctcagcaatgtaccc

SEQ ID NO: 268361 - DNA, 100 bp, Homo sapiens
gcaggcagcaactgaggcagcggcaggctcaggtgcagccgctgcccctagtccaattcctgacccttcagtagcaactgttgccacaggggaaaatggc

SEQ ID NO: 268362 - DNA, 75 bp, Homo sapiens
cctgtgtccagcgctgccggagccgcctgagttgagtcagcagatactggagttatttgaaacatgtcagcagca

SEQ ID NO: 268363 - DNA, 74 bp, Homo sapiens
agacaccgagcttcagcaagctctctccaacggtttaagaattgtttaagctgcatcaatggagcacatacagg

SEQ ID NO: 268364 - DNA, 97 bp, Homo sapiens
tttggttggtgattttgatgatagccacaaagcaagcaggatgtcgcacgcggccacaagcgccttatgccgctccataaagctgcagtgtgagctg

SEQ ID NO: 268365 - DNA, 82 bp, Homo sapiens
caggcccttgttggggcacaaggtggcaggatattaatgcacacgcctgtgttactggtaaacccatcagccaagggggaat

SEQ ID NO: 268366 - DNA, 99 bp, Homo sapiens
gctatgagttctccaacaagggtgctgacgtcttcctggaggcattggctcggctcaactatctgctcagattttcaagccggtgtgaagcccctgatg

SEQ ID NO: 268367 - DNA, 98 bp, Homo sapiens
tcccacgctgctattcaaaacttcctggacaagttggatggcttgaggactggtactaaaaggaaacgtgactgggaggccattgccagcagaatgga

SEQ ID NO: 268368 - DNA, 100 bp, Homo sapiens
aaaagtaccacgatactgagctccaaaaatggagggaaatcatcaaatcctcagtgatgctccttgaccagaaagctgatgtcctgaccactggagctgg

SEQ ID NO: 268369 - DNA, 91 bp, Homo sapiens
gatgaagctgtcagtcaatgcccgtgcccgcattgtggctgaagagttccttaagaatgtgtggaaacaggaagagaactagaactggaag

SEQ ID NO: 268370 - DNA, 46 bp, Homo sapiens
gtgtcctcgtccaacataacctgttacatgggaattggtctttctg

SEQ ID NO: 268371 - DNA, 82 bp, Homo sapiens
ttggggcgacggccagaagtccagggctaggagcctcagccggcggacgccaggaaacaggcagctatttttgctatgataa

SEQ ID NO: 268372 - DNA, 100 bp, Homo sapiens
gtgtttgagatgaaggtcaaagaaaaagttcaaaaactgaaggactctgaagctgaggtatttaccttgctgtggattgctgactggatggtccatcact

SEQ ID NO: 268373 - DNA, 101 bp, Homo sapiens
ctttccgtgactaaacctgtcctacaaagtaccatgagaaatgtcggttcagatttccaagatgagatgggattctccaacatggaagatgatggcccaga

SEQ ID NO: 268374 - DNA, 75 bp, Homo sapiens
ctggagcggagcgcaggcgccgagactgacaacgcggtcccacaggtaaatgaaattgcctttataaataccctt

SEQ ID NO: 268375 - DNA, 100 bp, Homo sapiens
ggaccttatgctggctgggcccaagcgtacgtttcaggagacggcagcgaggctaccttgcatggtgtggtggacgagctggtgcggttccggcagaagg

SEQ ID NO: 268376 - DNA, 87 bp, Homo sapiens
ggaggaagatgaaccaacgttagaagcagcctggcctcatctacaggctaaagaattacctccaaagccattgtcaagaccacagca

SEQ ID NO: 268377 - DNA, 82 bp, Homo sapiens
cgatcctctagagcactgtgtgtctccccggacgcgagcccgctcccctgactatgctaagaaggaatctgatcttaatggc

SEQ ID NO: 268378 - DNA, 100 bp, Homo sapiens
cagaaataccagtccccagtgagggtgtacaaatacccctttgaattaattatggctatgccctccaaatccttggttatggaatatttggctcatccca

SEQ ID NO: 268379 - DNA, 98 bp, Homo sapiens
gagggccaccccctggtcctctgccctcgcgccccgctagggccaggatgagttagatgaactccgtgctgagatggaagagatgagagacagttatt

SEQ ID NO: 268380 - DNA, 100 bp, Homo sapiens
ctctaatgacaagctcatgtacaaaattacaagtggaaatccacaaggattcttttcaatacatcctaaaacagatcccaagtgtccttcaagatatcac

SEQ ID NO: 268381 - DNA, 100 bp, Homo sapiens
gcaagagcacctggctgatcctgcaccacaaggtgtacgatttgaccaaatttctggaagagtttctgtagaaaatgtttcctgactgcaatgagggaaa

SEQ ID NO: 268382 - DNA, 82 bp, Homo sapiens
gtgtcgccggcagggaggcatagcgcctctctgatcttcctgcatggctcaggtcagcccaaggccaaccccactgtcactc

SEQ ID NO: 268383 - DNA, 98 bp, Homo sapiens
gaagtccatgccaggaggtcgtctgcagtcagttgaagtctgagcgggaattggacaagataaaggggctgaagctagaagagctctggctcgatgga

SEQ ID NO: 268384 - DNA, 75 bp, Homo sapiens
cttgctggtgcatgcgtcgtcggcctctgggcagcagaatgtccctcttccagtggaaagcccaaccatgcagac

SEQ ID NO: 268385 - DNA, 75 bp, Homo sapiens
cctggctacaacgaccccatgtcagggaggaagagcaagcaggccctgagggactataagaaggttcagatccag

SEQ ID NO: 268386 - DNA, 75 bp, Homo sapiens
aggcaaatggcatcttggacaccacggctcttatcaccccaacttccgtgacacatcatctcagagttggagcac

SEQ ID NO: 268387 - DNA, 100 bp, Homo sapiens
caaccaggcaatgctggatagataccgaattcttatcacaaaggaatcctatccatcttcttcaccgatatggtttgtggattctgaagacccaaatctg

SEQ ID NO: 268388 - DNA, 82 bp, Homo sapiens
ggtccttttgctttccgtaggaaagcaggctgtcagtactatgctacaggtgctctagttcacagctataggggaacaggtg

SEQ ID NO: 268389 - DNA, 100 bp, Homo sapiens
tgagatgggagttgccattcgggaagatggaggaaccctaggggttttctcacctaaaaagggctgtgtgcaagaagtttgggttgcacgtgagtcgaat

SEQ ID NO: 268390 - DNA, 97 bp, Homo sapiens
ggccgatgaagtgcagaggtttttttctggctgggtttgaccaaagaagagtcattgcagcagaacgtgggccaggaggaggctgaaatcaaaagtg

SEQ ID NO: 268391 - DNA, 98 bp, Homo sapiens
gaagaagggaaggcgcgagtgaggaaaggaggtactgtaggaatactcccccagttgcaagaggcgcaggaccgtggaagacttcaacaaattctgca

SEQ ID NO: 268392 - DNA, 100 bp, Homo sapiens
catcaaccgccagatcaacctggagctctacgcctcctacgtttacctgtccatgtgcccatgacgcttccggagacaaccctggaaacactgaagcata

SEQ ID NO: 268393 - DNA, 97 bp, Homo sapiens
cggcgccggcgccgcggcctcttcggctgcggaccctgccattccggaggagaaacaggcttgcatgctgatccgaaacctggtggcccacggccag

SEQ ID NO: 268394 - DNA, 100 bp, Homo sapiens
tatgaggcaagcgcagggggacggggaccagcagctgtcgccgccgctctcagtcttaggaaaagtcctcagtgctgtgggcagtgcccagctactgatg

SEQ ID NO: 268395 - DNA, 75 bp, Homo sapiens
gtttgggacgaggagaggatccaggaggaggagttgcagaggcaaaccacagggaagctggaaaagaagcggccc

SEQ ID NO: 268396 - DNA, 83 bp, Homo sapiens
gagcggcgagccggagcgcggagcccggctcccgcaccatggaggaggacgacagctacgcaaaatgatgcttcaacacccag

SEQ ID NO: 268397 - DNA, 100 bp, Homo sapiens
cctcagaagctgctggtcctgtgtcacaccaccttagcctcttgatcgaggaaggtgctggagaatctggtaaaagcaccattgtgaagcagatgaggat

SEQ ID NO: 268398 - DNA, 95 bp, Homo sapiens
gaagacgatctgcacttcgcattttggcattgacatttaattttagggtcctttatatagaagggagagtagatattaaagccatgacagcaaac

SEQ ID NO: 268399 - DNA, 126 bp, Homo sapiens
agagagtcccagcagcacagagggatcgagaagactgagaacagaactggagatcatatactcctatgaaaggaggaatctccaatgtatggtttgacagatttaaaataaccaatgactgcccag

SEQ ID NO: 268400 - DNA, 90 bp, Homo sapiens
ggatattctggtggggagatgaacccaacctagtgggtgtaatacatcatgaactgcaggaccattcctcaagaattttgtatccaaggc

SEQ ID NO: 268401 - DNA, 75 bp, Homo sapiens
cccgccatcgccttcggtggaagggccaattcctgtccccccagcagcatggcatcgtgtgctgaaccctctgag

SEQ ID NO: 268402 - DNA, 82 bp, Homo sapiens
ttgtggagaaagtcgtcttccacttgcacgaaagctttcctaggccaaaaagagacctaatctgggagcctgcaagtgacaa

SEQ ID NO: 268403 - DNA, 100 bp, Homo sapiens
gttgccattatagagctggaattaggcaaatatggacagatgatgaggagtctgatgaggaagctgtgaagaaaaccaacaaatgtgtactagtctggga

SEQ ID NO: 268404 - DNA, 92 bp, Homo sapiens
cttccggggacagccagccctcgctggaccagaccatggccgcggccttcggtgagaagccctaccactgcaactgggacggctgcggctgg

SEQ ID NO: 268405 - DNA, 100 bp, Homo sapiens
aggccgggaggtaggaaggcgccggcgggagtcggggatcctgctttggggagttctgtgctgagccgaagttcatctgtgaagacatgagccgcacaga

SEQ ID NO: 268406 - DNA, 97 bp, Homo sapiens
ctggaccacggcgcagacgcgggcgagctgcggctcggacgccagcggacacgcgggcgagtggtatgtgtgcaacagagagaaattatgcgaatca

SEQ ID NO: 268407 - DNA, 99 bp, Homo sapiens
ccagtggcttcgtgaagcccaagctggactgtggcgtcctggagttgatgggagctgcagcaccaagccgggccagcctccctcccagccagtgacaac

SEQ ID NO: 268408 - DNA, 74 bp, Homo sapiens
cgccttggcctcccgaagtgctgggattacagccttgacttatccgaattggccaaagctgctaagaagaagct

SEQ ID NO: 268409 - DNA, 100 bp, Homo sapiens
gctgagctctgtcggtatctttccaaggtcctagaactcaggaagagtgatgtggttttggataaggaaactaaatatattttgccaactttggaaaaag

SEQ ID NO: 268410 - DNA, 83 bp, Homo sapiens
cattggatttaaaagacagtcctcgtcagcactgactttcagctatggaatcgacccctctgccatgaaccagtccatcccag

SEQ ID NO: 268411 - DNA, 75 bp, Homo sapiens
gatgacagtgatgaaaatgaagaagaagatgcctttaccgaccatgctgaaattttcttctaaggagaaatatcc

SEQ ID NO: 268412 - DNA, 100 bp, Homo sapiens
gctgcggcgagcggagcttcgcggggatcctgctggactgcacgaaaaaatctttaatctcatgaagtacgacagctacagccgcttcttaaagtctgac

SEQ ID NO: 268413 - DNA, 100 bp, Homo sapiens
ggaaggatatagttgctgctatacaacacaattataaaatgtcagcttttaaggcatggcggacaccgacctgttcatggaatgtgaggaggaggagttg

SEQ ID NO: 268414 - DNA, 82 bp, Homo sapiens
gccgctctccagcccgcttgaacgcccgagcgggaagaagttccgcagcaagccgcagctggcgcgctacctgggcggctcc

SEQ ID NO: 268415 - DNA, 83 bp, Homo sapiens
acttcgcgacacccttgaagctgagaaatgacaatgcagatcttcgtgaagactctgactggtaagaccatcaccctcgaggt

SEQ ID NO: 268416 - DNA, 100 bp, Homo sapiens
caactactgcgtgattctcgaccctgtcggaccggatggcaagaatcagctggggcagaagcgcgtggtcaagcacccagtttcatgtatttgaatcgac

SEQ ID NO: 268417 - DNA, 100 bp, Homo sapiens
aaatacatgagccagtgccttattggaaatgatttgcgtgttttaagaactggtgtatatagcctcctgacaaggtgatccgggcgggccccgcaggaat

SEQ ID NO: 268418 - DNA, 76 bp, Homo sapiens
aggagcggggcggcgcaggcggtttggtgcacctcgatttggaggaagtagggcagggcccttatctggaaagaag

SEQ ID NO: 268419 - DNA, 90 bp, Homo sapiens
cgcactgctcatcttggccatcactatacacaacgttccagtgaaatccggcccaactccaccgtgcagtgggaagaagtgtgccggccc

SEQ ID NO: 268420 - DNA, 100 bp, Homo sapiens
ggccttggaggatgatgtgctcagcacaggtgttgtgctctatcatctcaaggcaaatgaagaggattcttccagttctctagtgaaggatcaccttttt

SEQ ID NO: 268421 - DNA, 73 bp, Homo sapiens
tatgattggctctttagctgaaatacttctgaagcatggcctgtatgagaagaaaaagacctcaagaaagcaa

SEQ ID NO: 268422 - DNA, 75 bp, Homo sapiens
gaacttagcagcagctccactgaacagataagggcttgcagtaaggttgggctgctggcacgacccttacatcca

SEQ ID NO: 268423 - DNA, 80 bp, Homo sapiens
acgatcactgggactttaccttctcatactttgttagaaaagccaccaggtgaccatggaggaagaagatgagtctcgag

SEQ ID NO: 268424 - DNA, 100 bp, Homo sapiens
ccaaaggcagcaaaaacaagagtccctctaaagcagctcaaaaggtgagatcggactggaactgttcggctgcgaccagaaatttattttcctgagtaaa

SEQ ID NO: 268425 - DNA, 102 bp, Homo sapiens
ggaaagacttcacgtcttgccgaatgaaaagccagaggccaagaagagtaagacggccgcaaagaaaaatgacaaagaggcagcaggagagggcccagccct

SEQ ID NO: 268426 - DNA, 85 bp, Homo sapiens
ctgcttattgttgtgtcagtgaattaggagaacttggaaaggttcagtttcgtgactatccatatattcctgcacatattacaaa

SEQ ID NO: 268427 - DNA, 98 bp, Homo sapiens
atgggaagccaagtgccatcttcaaaatttcaggtcttaaatctggtgtaatcctgagagattcacatggtgttgcacaagtacgttttgtgacaggc

SEQ ID NO: 268428 - DNA, 100 bp, Homo sapiens
ccgagttctcggtactcttcagggatgagtcatgtggcagtggaaaatgcgctcgggctggaccagcaggaattgtcttagaagaaagaaggcaagccac

SEQ ID NO: 268429 - DNA, 100 bp, Homo sapiens
taaatttccatggcaatttacaacccccatactgtaccaggcaagcatgtcttcaaactggaacaagaagaatacatgaaggaagatataccttggacgc

SEQ ID NO: 268430 - DNA, 82 bp, Homo sapiens
ttctcggcgccgcggctcttttctaaaagtgatgaatttcatcctttcatcgaagcacttctgccccacgtccgagcctttg

SEQ ID NO: 268431 - DNA, 101 bp, Homo sapiens
actctttgtctgggtcagtcaagaaccatttccaaacaaggacatggagggaaggcttcctaagtttttttgaagaagcaggatgctgatctaaacgtgga

SEQ ID NO: 268432 - DNA, 80 bp, Homo sapiens
ctgggagcttgctgcagcttcagctcaccatggatgatgatatcgccgcgctcgtcgtcgacaacggctccggcatgtgc

SEQ ID NO: 268433 - DNA, 100 bp, Homo sapiens
acaaatactactacatcccgcagtacaagaactggagagaaaatgtgccagaggaacttcaagaaccattttacacagatcagtatgaccaggaacacat

SEQ ID NO: 268434 - DNA, 87 bp, Homo sapiens
cttctgcctcgggccctgcccctacatttggagcctggacacgcagtacagcaaggtctctaattaacagaagatggcaaagcccag

SEQ ID NO: 268435 - DNA, 85 bp, Homo sapiens
aggaaccacacgctgatcatggtgaaaggtgtagcagtcactcggcctacacccacagcatcgaccttgtgaacccagcgacctg

SEQ ID NO: 268436 - DNA, 75 bp, Homo sapiens
ttttgcatacaagcaggaaaatgagatgttatccagtgttaaaagatcactgaagttggatggtctgttagaaga

SEQ ID NO: 268437 - DNA, 90 bp, Homo sapiens
tggcgggccgtcatgctcatccaggcaggatgactttgacaacgatgtggatgctctgctggaagaaggcctttgtgcccccaaaaagag

SEQ ID NO: 268438 - DNA, 74 bp, Homo sapiens
gagccccggctggctcaccccggggccgggcagaattgggctccaggaagcaagatttccagatgtagcaaatg

SEQ ID NO: 268439 - DNA, 100 bp, Homo sapiens
gacctgcaggcagcaccggaggcccaggtctccgtgcagcccaacttccagcaggacaagctccaattaaggaacagctatatcctgcttccttctgtaa

SEQ ID NO: 268440 - DNA, 83 bp, Homo sapiens
ctcggcctcggcgtgctgcgcctccgcggctgccctgcgccaggttcctgcacttggccatcatccatgaagaaaaggcactg

SEQ ID NO: 268441 - DNA, 100 bp, Homo sapiens
caagctgtgcagcatcaaagaggcaggagacctgatggccaaaagaaaggaagaaaatttttcctctcctaaaaatgccaaaaggccaagacaagaagaa

SEQ ID NO: 268442 - DNA, 100 bp, Homo sapiens
cgagtccctcttcactttcctcggcaagaaatgtgtggatgacgctgtcagtatagaaagtggtacaaacactgaacgccctgatacacctacaaacacg

SEQ ID NO: 268443 - DNA, 100 bp, Homo sapiens
caaagtgggaaacattgaaatcaaggcccgtggtcgagccagagctgatgagagcacctacgtcctggttgctcacagtggttcaggagttatcgaacat

SEQ ID NO: 268444 - DNA, 90 bp, Homo sapiens
gatgcacagctgtacaaggaggtgctagaagcctgcgccctcaatgatgacctcagtcaaagccttctagacaagctcagtggaatctga

SEQ ID NO: 268445 - DNA, 100 bp, Homo sapiens
gtcagctcggctgagaaagctggaggtggaagccaacaatgcctttgaccagtatcgagaccttgagaaagatcagtctaaagaaaaggagaagaaagtg

SEQ ID NO: 268446 - DNA, 100 bp, Homo sapiens
cttcacttccctcggtctgggcttctctgaggcggcgagagatggtcaggtctggagctcgaccgggccaggaatataaatagtttctggaaaggacact

SEQ ID NO: 268447 - DNA, 78 bp, Homo sapiens
cgctcctaagcctgcacagccgcggcggcagcagcagtgagagtaatctatgccagcaattatgacaatgttagcaga

SEQ ID NO: 268448 - DNA, 100 bp, Homo sapiens
attctgagaaactgaagttcagtgatgatgaagaggaggaagaagttgtgaaggacggcaggccaaagtgatatggatcagaaactttcgaagttggtag

SEQ ID NO: 268449 - DNA, 100 bp, Homo sapiens
tgggatccagcgagcgacatgatcacatgtacatgaagacaatggaaagttatttccttcatccagtctacaaatacccaaggaccataatgcaagagaa

SEQ ID NO: 268450 - DNA, 75 bp, Homo sapiens
gcgcttctgtccgcctgcagttcaactagagagaaattgagaagaagcatccactgaagtatcacatggcttctt

SEQ ID NO: 268451 - DNA, 100 bp, Homo sapiens
gatcttcaggaattttactgggataattatccaaataaattgcaagcattctatccaaatggtctgtgtgtcatgattgcggcctccatttatacagaca

SEQ ID NO: 268452 - DNA, 75 bp, Homo sapiens
ctgggattggagattccacccaaacttgctggtcactgggagaaatgaagctgttgtcatttctggaaggaaact

SEQ ID NO: 268453 - DNA, 82 bp, Homo sapiens
tctcatgaggctgtaggctccttcaacccgtggctgatagctgaaaggttctgcggcatgaggaatttgaagaaggctgcaa

SEQ ID NO: 268454 - DNA, 75 bp, Homo sapiens
agccccgggagcagcggcggcggggggcagccgctcgcccggacccctcaggcctaagcagcgagagctggtcca

SEQ ID NO: 268455 - DNA, 146 bp, Homo sapiens
atcagagattagtaccaggccgagaaaattctgcagatgaacatttgattccacagctgggctatgtggcaacaaagtggagcctttcaggctggcatggagagcttaaggggcaactgaaggagacacactggccaagcgcggag

SEQ ID NO: 268456 - DNA, 111 bp, Homo sapiens
acaagtcctgcgcttggggatcctctgtacgcccgttcactggaacattttagtggacaaaccaaatgaccaatcttcaagatggtcttcagagagcaactatcctcccca

SEQ ID NO: 268457 - DNA, 83 bp, Homo sapiens
accatctggtgctgtggattgcaaccttgaatacgccttctggcaagaggggagagcctctggaacagtgtacagtggggagg

SEQ ID NO: 268458 - DNA, 75 bp, Homo sapiens
tctgattctccaatgggaataccaagggatacctcggatctgcattttcaagtgagcaaagaccgctatggaggg

SEQ ID NO: 268459 - DNA, 112 bp, Homo sapiens
cgacctggcggtggggctgcggcgcctgggactgcaccgcaccgagggcgagctccaggtgtcatggagaaactccagctgggcccagagattctgcagcgggaaaatccaa

SEQ ID NO: 268460 - DNA, 95 bp, Homo sapiens
aataatatacctctttcatttcctaattgactatgctgaattggtgtttatggtacacagataagctgtttctctccaagttctttctcctggcg

SEQ ID NO: 268461 - DNA, 90 bp, Homo sapiens
gcacgtacgccacggtgtacaaggcctacgccaagtatggtttgaagtggtgaacatggatttttctcggcttcacatgtacagtcctcc

SEQ ID NO: 268462 - DNA, 80 bp, Homo sapiens
gatccagcctgcggagcctgtggggcaggcacttccgttccggcgcccctccggtcatcaacccgctgggcaccagcttc

SEQ ID NO: 268463 - DNA, 82 bp, Homo sapiens
ctcagaactgagaagctgtcaccacaggttatcaatactctggctgaccatcatcatcgtgggactgactttggtggaagtc

SEQ ID NO: 268464 - DNA, 90 bp, Homo sapiens
ctggattttcctgtagaactgagggcagggctcagcggagtcctacaccagccgtccatcagactctgatgtatctctggaggaggaccg

SEQ ID NO: 268465 - DNA, 75 bp, Homo sapiens
caaggtggctgcaggagagctcaaggtgcagaaaagccctgtgttccggagggacggcgcagacatccactccga

SEQ ID NO: 268466 - DNA, 50 bp, Homo sapiens
gacgaccgacagggtggtgaaagattattcagagctgggagagcttcccc

SEQ ID NO: 268467 - DNA, 102 bp, Homo sapiens
gagaccgtgaccgagagcgtgaccgagagcgcgaatatcgtcatcgttagaagggctggggagcagaataccaccgccaggatgttactagcaccccctgct

SEQ ID NO: 268468 - DNA, 90 bp, Homo sapiens
tgaggaggtgaaggaagcttatggtacctgcacaccgacaggctggagcgcgagagaatgccaagcaagatgtcgatgatgaatatggcg

SEQ ID NO: 268469 - DNA, 90 bp, Homo sapiens
ctgcgccgggccccgggccccgatggccccgaccgcgtgctggagctcttcgacccacccaagatttggaattctatgactggggaacta

SEQ ID NO: 268470 - DNA, 74 bp, Homo sapiens
gaagaagaaaaagtttctcaaccagagagcacgcaggcccatgagaacagcagggatagccggctggcatggat

SEQ ID NO: 268471 - DNA, 100 bp, Homo sapiens
ccggactcgcggaaaaggccgctggaagccccccctgaagccggcagcaccaagaggaccaatacgggcgagtatccagtacaagattggatctacagaa

SEQ ID NO: 268472 - DNA, 101 bp, Homo sapiens
caggcgaagcaggtagtggcgctgaatcgctcctgccgcgggcacccttacccttctgaagaacagaaaaagcagttggcacaagacacgggactcaccat

SEQ ID NO: 268473 - DNA, 49 bp, Homo sapiens
gcctcccgagtagctgggcttacagaatccaaaggactgcatgacacac

SEQ ID NO: 268474 - DNA, 112 bp, Homo sapiens
tatgacaaggcactggatgatgcaatcaaagctcgacttctcaatcccaagtggccaaagcagtgattccagcagtagttcaagtgatgattctccagctcgatcagttcag

SEQ ID NO: 268475 - DNA, 100 bp, Homo sapiens
ggttctggggatgctacagttcatcaggatgaatgctatcaagtaagacaagtgtttgcccagaaacttcacaaaggcctttcccgtttacggcttccac

SEQ ID NO: 268476 - DNA, 76 bp, Homo sapiens
attcgcaagtggaggagtgctaagcaatttgagagcaagatcataaatcaatcaccttctgctgcttggatgggtg

SEQ ID NO: 268477 - DNA, 100 bp, Homo sapiens
tgttttgaagagaaggggaataagactgcatctgttcatatgagacacagggtctcactgtgttggccaggctggagtgcggcagtctggaactcctggg

SEQ ID NO: 268478 - DNA, 98 bp, Homo sapiens
acctttcagattctttctctggaactgaaccagaggttcacaaaacaagtgtagtagcccaggcgcagtcgaacctcctggggaagtgccgccggccg

SEQ ID NO: 268479 - DNA, 95 bp, Homo sapiens
ccctcttccccacttccctgcactctcatcgctctcggcctcggcctcggcctccgacacgattttgtggaagtataatactttgtcattatgag

SEQ ID NO: 268480 - DNA, 100 bp, Homo sapiens
tggaatatgaagcaacatgagatggtggatgaacccacaggagtcagtggatcggtggggaaaatgctgcttaccctgggccctgggctgtagaaagaag

SEQ ID NO: 268481 - DNA, 74 bp, Homo sapiens
cccagccacgctttctgtacagcctgcagaactggcccatgtgtgacctgctctggtcagatccacagccacag

SEQ ID NO: 268482 - DNA, 74 bp, Homo sapiens
ggtgatccagcagcagctctgcttgagcatttaaatcaaacggtattgagatggattgggttatgaaacataat

SEQ ID NO: 268483 - DNA, 90 bp, Homo sapiens
ctaccggagcgctgcagggggctgcgcctgcctgctccgccccagacctgtcggcgaaaggaaatggaatctatttggaatttgcagaag

SEQ ID NO: 268484 - DNA, 98 bp, Homo sapiens
acgcctagaacagtgccctctgcagctgaataacccttttaacgagtattccaaatttgatggcaagatttgtcccatcagatgaaaagaagaaacaa

SEQ ID NO: 268485 - DNA, 100 bp, Homo sapiens
cgggaatgttgttcacattgaacgcttcaagaataaaatcacagttgtttctgagaaacagttctctaaaagtgtgaagatcggagttgactattttaaa

SEQ ID NO: 268486 - DNA, 82 bp, Homo sapiens
tggtccagctgtgccgcaccgaggcgagcaggagcagggaacagctcaaactggaggattataaggatcgcctgaaaagtgg

SEQ ID NO: 268487 - DNA, 100 bp, Homo sapiens
acatcttcccagctttggttggaagacctattatcagatcaaccaccaaagtgggaaacattgaaatcaagttcacagacattgggaccttcgagacagt

SEQ ID NO: 268488 - DNA, 95 bp, Homo sapiens
ccgagccgggccgcggcgccgagtcgaacggggagccgagctggagctgccgcggcgcagccaggccctccctatcctgaagacattagctgaga

SEQ ID NO: 268489 - DNA, 83 bp, Homo sapiens
gaaagaaccacaaacttgaagatggatatcagctacagactttcctgagtcagaggtacttggaaggctccatcgcccctgaa

SEQ ID NO: 268490 - DNA, 101 bp, Homo sapiens
cttacgtaccacttaaggacattgtggcaatcatcctgaatgaatttagagccaaactgtccaaggctttggcagccaaatttgagtttcatcatggtgac

SEQ ID NO: 268491 - DNA, 100 bp, Homo sapiens
ggagacatgaaaaagatgagcaggaatgttttgctacaaatggaggaggaggaggacgacgacgatggggatatcgggacccagtcgcagagcgcacccc

SEQ ID NO: 268492 - DNA, 50 bp, Homo sapiens
cccgccccatcggttgttgtctgggcggtggaagatagatgataagcctg

SEQ ID NO: 268493 - DNA, 101 bp, Homo sapiens
gcaaagttctgagaacattacagcagatcaagaaatccagctcaacttaaaactagagatcgatacatcagtagtctgaaaaagaaatgccagaaggaatc

SEQ ID NO: 268494 - DNA, 100 bp, Homo sapiens
attaactcttacctgaagcccatgttgcagcgggactttattaccgctttaccagtattgactcggagacaaaaagaggccaagaccaagagtgacagtg

SEQ ID NO: 268495 - DNA, 100 bp, Homo sapiens
cttcagagcgtcacggcgtacgccctcatggggaaaatctccccggtgactttcagtgccctgtgggacatcgagaccggccagcagacgaccacgttta

SEQ ID NO: 268496 - DNA, 98 bp, Homo sapiens
ctcctgctccggccgctgcgcgctcgtcgtcctctgcgcttttcagctggcccagggccccggccagtgcccagccccgctgggagacccggccagca

SEQ ID NO: 268497 - DNA, 100 bp, Homo sapiens
gcgggggtgggcaaggcagtggtcagcgacccgcagtccatctgactcctgcttcccgggtgttgctcgtgtcttgggcgtctttggtactggctttttt

SEQ ID NO: 268498 - DNA, 50 bp, Homo sapiens
ccgctgggctcagatccacctggtgaaggacccagattcaagaacatggc

SEQ ID NO: 268499 - DNA, 90 bp, Homo sapiens
gcgaatggcacgagctggagggagaatttcaagaactgcaggttgaaatcacaaagattagacacctttttagataggtgttcttcagca

SEQ ID NO: 268500 - DNA, 100 bp, Homo sapiens
ttcagttctttggaattccattcttttccttattcttctgatgtggatccaggtcaaaatgcagatcttcgtgaaaacccttaccggcaagaccatcacc

SEQ ID NO: 268501 - DNA, 95 bp, Homo sapiens
ctgctagaggaggcgttgcaggacagcccccaggtctcagccttagatccaaggacagtccaaggaagtcctaagaccatggagttggtgatctg

SEQ ID NO: 268502 - DNA, 90 bp, Homo sapiens
ttaatcctgctgacagtagtggcattacacctaaaggattaggctttggtgaagcacgtgcagtctaaaggatacccaaatgaacgtttt

SEQ ID NO: 268503 - DNA, 74 bp, Homo sapiens
aatgcatgatttctataaagaaagaggtctagaagtacctaaacctggttcttctgatacgatctgtgacctgt

SEQ ID NO: 268504 - DNA, 83 bp, Homo sapiens
ccacaccaccgcactgtcgctgcccgcctgccctgaggagtccccgctgcttgatctcccttgagtttagaaatctggctgag

SEQ ID NO: 268505 - DNA, 87 bp, Homo sapiens
ccactctttccgccctaatggaggtctccagtttcggaatcatattgacaggtcatgaaaatgagaccaaaagatctctggaagcga

SEQ ID NO: 268506 - DNA, 100 bp, Homo sapiens
ctgggatatccccgatggcaccgattgccaccgcaaagcctacagcaccaccagtattgccagcgtcgctgtgcaccgtccaggtgaggttagagctggg

SEQ ID NO: 268507 - DNA, 98 bp, Homo sapiens
gcgtccctgcgaccgccgcggcgaagatggaatacaaacagaagcttgcacgagtaacccaggtccgcaaggaactgaaatcccatattcagagcttg

SEQ ID NO: 268508 - DNA, 75 bp, Homo sapiens
tgcatcaggatgaatgatgacccaagtatggaattaccgagctgatacccagacataccagccttataacaaaga

SEQ ID NO: 268509 - DNA, 100 bp, Homo sapiens
tgacaacgatgtacgccaagatcgacccctcgttaggaataattgcaaaaatcaatcggactctggaaacggcagacaggctcttgccatgttgcccggg

SEQ ID NO: 268510 - DNA, 89 bp, Homo sapiens
tgctcgcgctactctctctttctggcctggaggctatccagcgggacaccgtggtgtttaaggatggccagtactggatccgaggccgg

SEQ ID NO: 268511 - DNA, 100 bp, Homo sapiens
ggattatagtctctcgccacagcggcctcggcctccccttggattcagacgccgattcgcccaggaagctgccacttttgctagagagcaaggctttgag

SEQ ID NO: 268512 - DNA, 90 bp, Homo sapiens
ttccgtgagagacgtagagctgagcgacccagcccgcgagcgaggtcagttcaccgggacctggaggcccagattgcgatcgtgacggag

SEQ ID NO: 268513 - DNA, 71 bp, Homo sapiens
ccagggtatacttcgtggcctgcaccatcgctggttgtcttcttgcctgccctgtgtcgtaaaatgggggt

SEQ ID NO: 268514 - DNA, 98 bp, Homo sapiens
atatctacagtaatagtcttgaggctgttgccagctatcatggtgaacttacttcagattgtgcgggaccactgggttcatgttcttgtccctatggg

SEQ ID NO: 268515 - DNA, 100 bp, Homo sapiens
tttaattccttttcgaccttcaatccagttccaaggactccacgggttagcagacttgaagaaagagaagcagaactgaagaaggaatataatgcattac

SEQ ID NO: 268516 - DNA, 100 bp, Homo sapiens
cggtggtatcggcggcagctgtgagggggttccgggaagatggtgctgatcaaggaattagtcaagggtccagagaaggaggagaagttgagacaggcgg

SEQ ID NO: 268517 - DNA, 75 bp, Homo sapiens
atcgctaccctccgaagtccggctcaaaactgaaggagatctttgacaagatccacagcctgctctctggaaaac

SEQ ID NO: 268518 - DNA, 100 bp, Homo sapiens
ggagcagtacggagacacactgcatttctgtcggcactgcagcattctcttttggaagagtttcgctcttgtccatgctggagtgcaatggtgtaatctc

SEQ ID NO: 268519 - DNA, 100 bp, Homo sapiens
cctggccctgtcccacaccatcagagacgagttgtactgctgtcacaggaaatggacgctggattacaagcatggcagctcaggcagcagaagttgcagg

SEQ ID NO: 268520 - DNA, 95 bp, Homo sapiens
acgtacagacatgcaaagtaaagtgtcccattgttaggcatgcggcaactgctccacctcattcgtgtcctcccgatgatacgaagttgatagag

SEQ ID NO: 268521 - DNA, 88 bp, Homo sapiens
tatggcaacatgacagaggaccatgtgatgcacctgctccagaattatatccagatcgagagacagaagattctgaaagggttcaatg

SEQ ID NO: 268522 - DNA, 83 bp, Homo sapiens
ctgctgtcagcatggcccaggctcctgctgacccgggcagagaagttggaatcgaagcctcttaaaatggcagatgacttgga

SEQ ID NO: 268523 - DNA, 98 bp, Homo sapiens
ggtccctctggcccggcctgacccggtctggcttgttcgggctcagcggccgcgaggccgcagctcccggcctgcggggagccatcccctatgccctg

SEQ ID NO: 268524 - DNA, 100 bp, Homo sapiens
tccacaggctccggaagcagctggtgtgggcctgaggtcctttcgagactgctggggaacctggtggtgaagaacaagaaggcccagtttgtgatgaccc

SEQ ID NO: 268525 - DNA, 75 bp, Homo sapiens
gatctgtggtcggatgaggagaggaagtgcaagtaaagcagctgcagcgagtgtgaacatggctacgcctcttca

SEQ ID NO: 268526 - DNA, 100 bp, Homo sapiens
gtggagccacaggtcctaccgggccaagctgcctctgaggatatttctggctgtcgccaactccatggctttccagtcatgcctctgctgctgctgttac

SEQ ID NO: 268527 - DNA, 100 bp, Homo sapiens
agctgaacatctttcagagttgtatccgccaatggtggcagagtctacatagaactatgcttcgtggtgttctggggaaaacctttcgacttgttggcta

SEQ ID NO: 268528 - DNA, 96 bp, Homo sapiens
ccgagagccgcgagcgcccggccgaacccgcgatggaataatgcccagcggcccgccaggtcccgaaaaattggaagctccaccacccaccccagg

SEQ ID NO: 268529 - DNA, 100 bp, Homo sapiens
gaggcctccggaccttcaagactgtctttgctgagcacatcagtgatgaatgcaagaggcgtttctataagaattggctacttgaaattgacatttccag

SEQ ID NO: 268530 - DNA, 74 bp, Homo sapiens
atatgggataagctattggaaagatctcggaaaatggctcgattccttttgtccaaagtgaacccatctcagac

SEQ ID NO: 268531 - DNA, 101 bp, Homo sapiens
tgaacgagggcacgcggcttgaaggactgtgggcagatgtgaccaagagcctgcattaaggtgctggagaatctggtaaaagcaccattgtgaagcagatg

SEQ ID NO: 268532 - DNA, 88 bp, Homo sapiens
aaagagtcaacagcagtggcaacagatctgaaatagctcaactcagtcaagaaaaaaggtatacatatgataaattgggaaagttaca

SEQ ID NO: 268533 - DNA, 100 bp, Homo sapiens
aaggaaacaagtattttaagtcttttggaatatttctcttcaaaaatgtcagagaactatgtgactccctgcatgtctcctctgccacatgacagtcctt

SEQ ID NO: 268534 - DNA, 78 bp, Homo sapiens
ttggaaaacccatggtggttaggattcttttctcaaaatgctctggcatttggacacacatcacatgtcgatatttgc

SEQ ID NO: 268535 - DNA, 100 bp, Homo sapiens
caacatgttccgcagccaggccgggggcgcctgcgactgcggggacagcaacgtgatgcgggagagcggaagctccaccatgaggcgaggtggatggagg

SEQ ID NO: 268536 - DNA, 50 bp, Homo sapiens
aaaacaagtgcaaaggccctttatggtgcatgtccgttccgaggaatggg

SEQ ID NO: 268537 - DNA, 95 bp, Homo sapiens
tgacaagagtggaaatggagaggtgacatttggggtctctctttttggcatgtcggccctgttactccctgggaactttgagtcttatttggaac

SEQ ID NO: 268538 - DNA, 50 bp, Homo sapiens
ttttatgatgatgtcacagtaccagccatcatgcagaagggggatacaaa

SEQ ID NO: 268539 - DNA, 100 bp, Homo sapiens
ttttcttcactgtcgtcctcaaccctgctggactctgtgaagctgagcaggagcagatgcggaagatcctctaccagaaagagtctaattacaacaggtt

SEQ ID NO: 268540 - DNA, 83 bp, Homo sapiens
ctttctgctgctgaagtaatgcaatggtctcaatctctggaaaaacttcttgccaaccaaagaccttaaaggctttgatccag

SEQ ID NO: 268541 - DNA, 100 bp, Homo sapiens
gtgtgccagcaacagagctgggtccgggtgtacgaccctgcacttgatggaccagctggcaccacccagatcaataaactggcttatttgaatttgcggc

SEQ ID NO: 268542 - DNA, 51 bp, Homo sapiens
ggagaacaagttgctcccgttgagaagaggctacattggagtggtgaaccg

SEQ ID NO: 268543 - DNA, 88 bp, Homo sapiens
ctggattctgaggaccagcagatggccagtcacgagaacccaggcacattcaggaccccgcgagccagcggctgacgtggaacaagtc

SEQ ID NO: 268544 - DNA, 75 bp, Homo sapiens
acactaggtcgggcgccacagtgccacccaaggagaagaagctcgagcagcacctaaaatagccaatggtaaagc

SEQ ID NO: 268545 - DNA, 73 bp, Homo sapiens
cttcatatgctcgagtctccagagtcactccgttctaaggttgaatttagtattagtgacaaacagaggcctg

SEQ ID NO: 268546 - DNA, 74 bp, Homo sapiens
cttgtcataataaagatatgctaggaaacattacagggaacagaaagaacagcttcaaaagatgaaagacttcg

SEQ ID NO: 268547 - DNA, 75 bp, Homo sapiens
aaagcagaggttaatacaatccctggctttgatggagtagtcaaggtacactggagccccatattttgcagcaat

SEQ ID NO: 268548 - DNA, 102 bp, Homo sapiens
cgggggcggcgtgtcaggtggttgcggagctggtaagtactatactggcaattgctggagaagattttgcaattgttgcttctgatactcgattgagtgaag

SEQ ID NO: 268549 - DNA, 80 bp, Homo sapiens
tgggagacgcgctccacagaaacccggactgagaggcagcgagagggtgacagcctgctgatggtgaagaacccaccccc

SEQ ID NO: 268550 - DNA, 89 bp, Homo sapiens
tggatttggctacacacttatagatcttctgcactgtttacaggcacaggctggagcattggatttgctaaaggagcttaagaatattc

SEQ ID NO: 268551 - DNA, 80 bp, Homo sapiens
tggagtgtaggtcatatcgccgcgggaggagctgtgcagtgagaagcaaagcaggaaacaagcctattacaaatcaactt

SEQ ID NO: 268552 - DNA, 101 bp, Homo sapiens
aagcacaaccccaaaattaacaccatcttcatatccaaggaactgctgttgtaagcggctcatcaagagttgaacttcacgtagccttgttgggaatatgg

SEQ ID NO: 268553 - DNA, 100 bp, Homo sapiens
gagcaatgacattgggggcctgtggaaattttcagagtcttttagtcctgctatacagctgcaccttgtacatcaagctccatgtaatgttcctccttac

SEQ ID NO: 268554 - DNA, 74 bp, Homo sapiens
gcttcttgaccttcactgcggcccacatgcacctcagtgcaccaattccagctggacatcactgtgaaaatggg

SEQ ID NO: 268555 - DNA, 75 bp, Homo sapiens
gagaacgaggaggaaggagagaaaatggcgtccacggtccacttcgactgctcagggaagtacagatgtcgctca

SEQ ID NO: 268556 - DNA, 75 bp, Homo sapiens
ggcggatgccctgcagtacctgcagaaggtctctggagacatcttcagcaggtctcggcgcggaagatggccggc

SEQ ID NO: 268557 - DNA, 100 bp, Homo sapiens
ggaagacagacgtcccccaaaacccctcgcctggctcggacccacggagccggcagcccagcactccggtcaaaatgcagatcttcgtgaaaacccttac

SEQ ID NO: 268558 - DNA, 74 bp, Homo sapiens
cgcggaggaggacatggaggatgggtgcaacaccggaggatttcagcaacctcccacctgaacaaagaaggaaa

SEQ ID NO: 268559 - DNA, 90 bp, Homo sapiens
ggaaaacctaaccatgaagacttgaacttaatacagcaagaaagaccatcaagtttaccaaccagcagaagtagacactgtggatgcatt

SEQ ID NO: 268560 - DNA, 83 bp, Homo sapiens
ggggcttccggaggtcgcggagatggaattggagcagagagaagggccctgtttgtgctcttcgtcctggcctacatccacat

SEQ ID NO: 268561 - DNA, 75 bp, Homo sapiens
tggtgtaccaggcgaagctggccgagcaggctgagcgatacgacggtgttcagcacttactccaacgaggattac

SEQ ID NO: 268562 - DNA, 135 bp, Homo sapiens
cgggcggaaggcgagcggagcgcggccgcgcgggcagcagacggcagacggtgcccggcgcccacggggtgcttctggcctccgtgctctgcttcacctcttctgtggacacaagataccaagtccagatagtgg

SEQ ID NO: 268563 - DNA, 75 bp, Homo sapiens
acagaacagttaatcctcaatttaagcctgatctaacccctagaaacaggaacatgggtgaccttcggaggccag

SEQ ID NO: 268564 - DNA, 50 bp, Homo sapiens
cgccgacccgccgagcaaaatgagtttgccttctgccaggtggatgcctc

SEQ ID NO: 268565 - DNA, 100 bp, Homo sapiens
atttatgagcgcatgaatcagtctctctccctgctctacaacgtgcctgcagtggccgaggagattcaggatgaagttgagatggggacttgcttggggt

SEQ ID NO: 268566 - DNA, 88 bp, Homo sapiens
gctcccagctaccatgccagagccagtttattttcactgtgcagctgttacaccagtatctccatacagccaagaataaagaaagaaa

SEQ ID NO: 268567 - DNA, 80 bp, Homo sapiens
gccagcggcagtggatcgaccccgttctgcggccgttgagcaccatgactcctgtgaggatgcagcactccctggcaggt

SEQ ID NO: 268568 - DNA, 50 bp, Homo sapiens
gagcctcttccttggccagaaggaactgtggctgcaccatctgtcttcat

SEQ ID NO: 268569 - DNA, 82 bp, Homo sapiens
ttcgctctttgcatcttaactgcaggctaccggctctctgaccagttccacgacatcctcattcgaaagtttgacaggcagg

SEQ ID NO: 268570 - DNA, 102 bp, Homo sapiens
acttaaaccagttataggggtaaacactgatccagaacggtagacgttacatccaagaggaaataatccaggcaaggaagcacaagctgatcaagatgtgta

SEQ ID NO: 268571 - DNA, 97 bp, Homo sapiens
acccccccatggaggcgaggtagagttggggtcgcagcctgaagataaggccaaatatgatgcaatatttgatagtttaagcccagtgaatggattt

SEQ ID NO: 268572 - DNA, 100 bp, Homo sapiens
acctgcattaagtcaggactgaggtggtgaaattgcctctacctttgatcacccagaactggtgaagcttggaagttgcaaacttatcgaggaagtcatg

SEQ ID NO: 268573 - DNA, 133 bp, Homo sapiens
cgaagacactgcgactccggagacagcccaaatatcctcggaagagcgctcccaggagaaacaaattcatgatgttgctatcaaaagttgagaaattgtcagaagaaatcatggagataatgcaaaatttaag

SEQ ID NO: 268574 - DNA, 100 bp, Homo sapiens
cagcctatgtagacagccacaaatgggaagcaagagaaaaagaacattactgtcttgatctcactgatgaaaaggcctccaggtttttcacctttccgat

SEQ ID NO: 268575 - DNA, 101 bp, Homo sapiens
tttttagagatcgttttgatggatatatcttccttgacagcaaagaaactaatggcagatcccggaaatccagacttgtatcatgtattaagtgttatctg

SEQ ID NO: 268576 - DNA, 90 bp, Homo sapiens
tggcggtgaccggatattcagttgcacatccccacatcaatgcactgccaatgatgggctcctttaagccaggaggccgagtgatcctgg

SEQ ID NO: 268577 - DNA, 100 bp, Homo sapiens
aattatgatctacctaccaatcgtgaaaactatattcacagttcctctgctggtctgggttctaattcggcgcctcccatccctgactcaaggctcggag

SEQ ID NO: 268578 - DNA, 100 bp, Homo sapiens
cgcagaggaggagcttgctgcagagtgtgaaaggtgtagcagtcactcggcctacacccacagcatcgaccttgtgaacccagcgacctgactgccttgg

SEQ ID NO: 268579 - DNA, 100 bp, Homo sapiens
gcggagtcccaatgaaacgggcagccatggccctccacagcccgcaggacccattccaacaatctcgtaaaacatggtggattactatgaagttctaggc

SEQ ID NO: 268580 - DNA, 98 bp, Homo sapiens
gtgactgtcccagaagtgaatcgcagacagaaacagtctccgccagtcaagaaaccctcaaaagtattttgccatggatatagaagatgaagaaaaca

SEQ ID NO: 268581 - DNA, 74 bp, Homo sapiens
caaactgttgcaaagaaattcgacttcagtaatttgagtagtagagagtaaaacttgtctcggcacagagtcaa

SEQ ID NO: 268582 - DNA, 83 bp, Homo sapiens
gacgtctgcgtgagaatagagaccaccgagtgggtaattccagaattgattggccataccattgtcactgtattactgctcat

SEQ ID NO: 268583 - DNA, 98 bp, Homo sapiens
aagggccaaagaagaaaggaggcatcacatgtttctgctgtggggggcccttccgagcagcagacaggagcaagcctacaacacagcagtcccctcag

SEQ ID NO: 268584 - DNA, 90 bp, Homo sapiens
agagcatgccccggccccctgagcagtcccacccgctgtacctgtgcaatgccagtgatgacgacaatctggagcctggattcatcagca

SEQ ID NO: 268585 - DNA, 89 bp, Homo sapiens
gcagcagcagccaggtgtggcagtgacagggaggcctcatgcattgtgcgtcagcagcaatgtttatggtgaaaaatggcaacgggacc

SEQ ID NO: 268586 - DNA, 82 bp, Homo sapiens
aagtacttaaaaaaacattggaattctgcttatctagagatgcccgagtggtaaaagacatggcaacaggaaagtctaaggg

SEQ ID NO: 268587 - DNA, 75 bp, Homo sapiens
gggttcgcggcgcgccctcctgctgcctccccggagctcccgggccagtagtgttctcaggcgctgtggtctcac

SEQ ID NO: 268588 - DNA, 75 bp, Homo sapiens
agttccaccaggccgggaagcccatcgggaaagttgcagacgttggcagtgctgttgcggcagctcaaggcagag

SEQ ID NO: 268589 - DNA, 50 bp, Homo sapiens
cggcggcgctgcgggaccccgcgcaggtgccttcaaatctcttgacaaag

SEQ ID NO: 268590 - DNA, 73 bp, Homo sapiens
gaaattgttggtactcttctaggatttgatgactttgtcattcttcagattattaaggaatcccagcagcagc

SEQ ID NO: 268591 - DNA, 100 bp, Homo sapiens
atttcatggctatcatctacacgttcagccgtctgtatatctccccagatacctgaaactgaccacctgagtacgttttcccattgctgagctgtttccc

SEQ ID NO: 268592 - DNA, 88 bp, Homo sapiens
gagatgatggacaggatgaaagaataagttttacatcgaaaccaagcttaacagagacttaaaagatgaccttataaagctgtttacg

SEQ ID NO: 268593 - DNA, 88 bp, Homo sapiens
tacccccgcacccacgcggccctgctgaaagtggcgcaaatgaaagctacatccatattggaattttaccgggaacttggattgccgc

SEQ ID NO: 268594 - DNA, 80 bp, Homo sapiens
acggggcaggctgagttcctcttgctcacagagctctgtaaaggccgggctctcgccatgggtcactgtcgcctctgcca

SEQ ID NO: 268595 - DNA, 146 bp, Homo sapiens
tgaacttcataagaagttgcatcaggtggtggagacatcccatgaggatctgcccgcttcccaggaaaggtccgagggcccagcgagcatgatggcctacttggttgtttctgggctattcctaactcgacttcgaagacccattg

SEQ ID NO: 268596 - DNA, 76 bp, Homo sapiens
ttccgattcatgctggaatccaacaagggcaaatcaatgttggagttccagctccttcttcacatcgtagaaacat

SEQ ID NO: 268597 - DNA, 106 bp, Homo sapiens
tgcctggtgcagaggatcctggaggcctgggaagccaacgaccacacgcagttaatttggagtggcccctggagtcagtttcctacaccatccgaggccccaccca

SEQ ID NO: 268598 - DNA, 75 bp, Homo sapiens
agctttcagcagatgacgtggcgaacaaatactgtcccccagcgagcagatcacagggtagtgggcaccatcgac

SEQ ID NO: 268599 - DNA, 80 bp, Homo sapiens
gactgctctgagatcaactgcatgatccgggtgaagaagcaggccatgatttctggagagcttgacattctcaaagactg

SEQ ID NO: 268600 - DNA, 100 bp, Homo sapiens
cagaggagccgccttctgcctcagaacggcgtgactcggaggtatgtttctataaaacctgataaccgaaaattggccaacggaacaaatgtcctcggct

SEQ ID NO: 268601 - DNA, 100 bp, Homo sapiens
ctacgtaaaggagtattggaatgatgtgttcaggaaatgctccctctgatcctgatgctgtgagtgctgaagaggccttgaaatatttgctgcatctggt

SEQ ID NO: 268602 - DNA, 82 bp, Homo sapiens
ccagctcggcccgcgggggagccccgggagccgcacgggaaatcctcattgacgattcaatttgttgaaggccaatttgtgg

SEQ ID NO: 268603 - DNA, 75 bp, Homo sapiens
ggctccaatttgtactctcagctggaacggcaggcctggggttttgactctgggaggagggctgccttatttgga

SEQ ID NO: 268604 - DNA, 100 bp, Homo sapiens
cagagtgaaagccagaatggcatccagagagaggctctttgaactttggatgctttattgtacaaagcttcgcagaatcaagaacggctatgtgcgttta

SEQ ID NO: 268605 - DNA, 101 bp, Homo sapiens
gagtttccacagtgattgatgctgcctcaggtcaaaatgcagatcttcgtgaaaacccttaccggcaagaccatcacccttgaggtggagcccagtgacac

SEQ ID NO: 268606 - DNA, 87 bp, Homo sapiens
attttgctattgatttgaatgggaagaaatatgcatggcaagtcaccaggagactaaagtccatcaaaaacatccagaaaattacca

SEQ ID NO: 268607 - DNA, 100 bp, Homo sapiens
tcctgctcctcgggtgcctgcacctcggccgtcccggcgcccctggggacgccgccctcccggtgtgtgttttaatagaaaagttgtcactttccaaaat

SEQ ID NO: 268608 - DNA, 83 bp, Homo sapiens
caggctggactgaaagaggacacgggaagaacaaagacttagactcggaaactaaatatattttgccaactttggaaaaagaa

SEQ ID NO: 268609 - DNA, 82 bp, Homo sapiens
cacacccaggaaaagactcaggacggacaagcacagtcttcggaaggagcatctttccttgaagaagtacattattgacatt

SEQ ID NO: 268610 - DNA, 82 bp, Homo sapiens
catactatccgtttgttcaggaaccaccagtgacagagctggctcacagttggaccaacgcttacaaatagcaactacaatg

SEQ ID NO: 268611 - DNA, 100 bp, Homo sapiens
aggactcctaaggcttgcaacaagtgttgttaaacacaaaccaccctttaaattttcaagggaaggacagacccctgtaaaagagcccaacagtgaaaat

SEQ ID NO: 268612 - DNA, 101 bp, Homo sapiens
gcaagatggcggacagtgcggaactaaaggaaacttggatttaactggccagaagcaggtattcaaagcagagaacaatccctgggtgacccccattgcag

SEQ ID NO: 268613 - DNA, 100 bp, Homo sapiens
aaacctaaccatgaagacttgaacttaatacagcaagaaagaccatcaagtttaccactcagcaaaacccagcagctcagattcctgccaggcagcggga

SEQ ID NO: 268614 - DNA, 100 bp, Homo sapiens
accacacccgctccgagcagtgctacagagacgtgtctgatctaaagcccacagaagaagaagcatcttcaaaggaggattctgcaccttctaagccagt

SEQ ID NO: 268615 - DNA, 74 bp, Homo sapiens
tcagcttccccattatttcgaggaaggaactgcagtacagcaatggcgatcagaaggtagaacagctgtatggc

SEQ ID NO: 268616 - DNA, 82 bp, Homo sapiens
gccagcggccgagcgggcggcttcctggcctgggcgctccggtggcggcggagtccagaatgacagggtccagaaactggcg

SEQ ID NO: 268617 - DNA, 112 bp, Homo sapiens
ctggtggcctcgtgctggagcccggacgggcgccacattctcaacaccacggaattccatgttggtgttcgaggaagagacattgttgttcttggtgtggagaagaagtcag

SEQ ID NO: 268618 - DNA, 83 bp, Homo sapiens
ctatgcccccgtggccaccgcctccagcttgccaccaaagacctgcgactttgctcaggtgtttcccattaaacactaccagg

SEQ ID NO: 268619 - DNA, 101 bp, Homo sapiens
gccgtcactagccgcgggaccatcaaagtcatcgacggcacctcgggggccacactgcaggcctccgcgctcagtggaatgtatcctgtcaggtataatgt

SEQ ID NO: 268620 - DNA, 75 bp, Homo sapiens
cccctgctacgtggagaaaacctcggataaggcacgtgacacaagctgacctcaagagctccacgttttggcttc

SEQ ID NO: 268621 - DNA, 96 bp, Homo sapiens
tggaatgacgtaaaagaccctgtctcaattgaagaaagagcggtctgctttgtgaatcttgatgtgaacaaggatgaatgcagcacagagcacctg

SEQ ID NO: 268622 - DNA, 107 bp, Homo sapiens
tggtgttcgtcttctctctcctcgattgttgcgcgctcatcttcctctcggtctacttcctatacacagaatgggattttacatatgctggacagaaataagagaat

SEQ ID NO: 268623 - DNA, 101 bp, Homo sapiens
atatctgtcttcggtggactccttcggcagtccacccaccgccgccgcctcccaggccctgggaggagcggggacactgaggacctctctccaaattggcc

SEQ ID NO: 268624 - DNA, 101 bp, Homo sapiens
ctgggcatcacaaatacatttgccactattccaggaatggttgggcccgtcattgctaaaagtctgacccctgatatacagtttatgtaacttgatggaag

SEQ ID NO: 268625 - DNA, 88 bp, Homo sapiens
caagacgctgcggccaagcagaaagttgaacagaacgcggctcccagccacaccaagttcagccccccgaatccaagcccaacttcac

SEQ ID NO: 268626 - DNA, 75 bp, Homo sapiens
gaggagtacgagacgaggttcctgtgcaactcttcacaggactcagcccaggagagtgttattactcgagatatt

SEQ ID NO: 268627 - DNA, 76 bp, Homo sapiens
agcagcagccctgtccggcatctgtcttgagctcccagcaagtttgctaatccagactttacacaacctatctcag

SEQ ID NO: 268628 - DNA, 74 bp, Homo sapiens
caagctcaactacctggaccccaggatcagcattgcctggacagtcattttgtttactcattcagccctgttgc

SEQ ID NO: 268629 - DNA, 74 bp, Homo sapiens
ggcaagaagcatgctggattgtaatcagctgctgataaagatgatagttcagaagacatttcagtgccgagtag

SEQ ID NO: 268630 - DNA, 51 bp, Homo sapiens
gctactcagtccctctttgccaggtgttgaaattccgtaaacttaacttca

SEQ ID NO: 268631 - DNA, 101 bp, Homo sapiens
cagcatggcggtggaggacgaggggctccgggtcttccagagcgtgaagatcaagatcgaaatggtggagtcaatgaagaaagtagcagggatggatgtgg

SEQ ID NO: 268632 - DNA, 79 bp, Homo sapiens
tgaagcttctgaaccatccacacatcataaagctttaccagacctaatctgggagcctgcaagtgacaacagcctttgc

SEQ ID NO: 268633 - DNA, 90 bp, Homo sapiens
ctggccgcgattttctgcaggccccacgagtgggaggtgctgagccgctcagagaggatctgacgaactactctcaggcagtgttctcag

SEQ ID NO: 268634 - DNA, 100 bp, Homo sapiens
acaaagcctgaagaccccggagcccctttagccatgtggatacctacggagcacgagaaatacggcgtggtccaatatcagatggaaatgatgcggagcc

SEQ ID NO: 268635 - DNA, 83 bp, Homo sapiens
ctctgctctgcctccggggacaagaaactagagcaaataaccgttttgaaattgttgcacaccgatgctccagaattgtgagg

SEQ ID NO: 268636 - DNA, 51 bp, Homo sapiens
cattgactttcgtagtacttgtcattagacaatgcagatcttcgtgaagac

SEQ ID NO: 268637 - DNA, 83 bp, Homo sapiens
cagagccccgcgtttcagccctagggaagaatgttcgcatcttaccacatacagttctttacatggctgattcagaaactttc

SEQ ID NO: 268638 - DNA, 100 bp, Homo sapiens
ctccggcccggtttccctcggcgtgctactgtgcgctcgatccagcaccatggggaagcgggacaatcgggtgatccctttcagctccctgcaaaaacag

SEQ ID NO: 268639 - DNA, 100 bp, Homo sapiens
cgacactctgccaccttctccagcattgtgaaaggtggttccttaaaaacagttattgctcaagatgaaaacctcccagaagatgttgtgagagaatttg

SEQ ID NO: 268640 - DNA, 83 bp, Homo sapiens
ggaaggagggcgtccgagtcaacaaccgcttcgagctggcatctgcatctgggaccgacctcctgggctggctgatcaaagag

SEQ ID NO: 268641 - DNA, 116 bp, Homo sapiens
cccagaccctggagcctcagttggaagcagccgatccagcctgcggagcctgtggggcagcatcagtctccgagagttgaagaccatcttgcccctgatcaactttaaagtgagca

SEQ ID NO: 268642 - DNA, 100 bp, Homo sapiens
gggcctcttttgaaagcctgagttacgatgtattgagcgcgtcgtatgcggccagcactaaggacactgcccatctctaagataagaacctggaaagggg

SEQ ID NO: 268643 - DNA, 82 bp, Homo sapiens
cactggcggatgaagcagctggtggggctctactgcgacaagagactctgacctgtttttgttggacacccgtgtagtatgg

SEQ ID NO: 268644 - DNA, 76 bp, Homo sapiens
tctatgcacgcagatgctggagaagtccccttatgaccagccttcatcacggcggcttggattgtcctgtgccaac

SEQ ID NO: 268645 - DNA, 100 bp, Homo sapiens
ggtgtacctgttgtcaaagctcacggaagacaaagaggtgcccgtgaccttcgatgatgtggccgtgtatttctctgagctggagtggggcaagctggag

SEQ ID NO: 268646 - DNA, 98 bp, Homo sapiens
tgaatcttctgggagctgaggaaccagatatcttgaaaagctgccagaaaggctttcttgatcatggatggtgaagatataccagatttttcaagttt

SEQ ID NO: 268647 - DNA, 82 bp, Homo sapiens
ccgccctcgccttcgcctccgcctccggtcaaaatgcagatcttcgtgaaaacccttaccggcaagaccatcacccttgagg

SEQ ID NO: 268648 - DNA, 74 bp, Homo sapiens
tgaccattgaagaggtggcccccgccccgtcgggcctcacgagagtggcagcagacgcaccaggtacgaggaaa

SEQ ID NO: 268649 - DNA, 51 bp, Homo sapiens
gatggaattacactgtgatacgactgactgaattcgaatttagagtttaat

SEQ ID NO: 268650 - DNA, 74 bp, Homo sapiens
tcccactgattctacattatgatgcaaataatacggcactccgaacagacactaaaaacagctctcatctcaaa

SEQ ID NO: 268651 - DNA, 100 bp, Homo sapiens
gtggtaatcctgacgaaattgaaattacctccgagggaaacaagaaaacatcaaagaggtctagcaaagaggcgtggagctatttcctatgacagttctg

SEQ ID NO: 268652 - DNA, 88 bp, Homo sapiens
ggtgtaccaggcgaagctggccgagcaggctgagcgatacgacgaaaccaaggtgtatgttggtaacctgggaactggcgctggcaaa

SEQ ID NO: 268653 - DNA, 100 bp, Homo sapiens
ccagattccatggaaccactcagtattgcaccatgaagagatgattgggaaagctgggggagtgtctctgtcaaagaaagaccacagcaagattctttca

SEQ ID NO: 268654 - DNA, 100 bp, Homo sapiens
cctaaccacttgcaaccctgctaatgcaaaagaagatggcgaattagaagatggtgaaatagacgatgcaggatttgaagaaatacaagaaaaagaagca

SEQ ID NO: 268655 - DNA, 95 bp, Homo sapiens
cctacggagatgagacaggcgtgcagtgtgcgctgaggttgaaggcattcaaggtggccctcttggatgtgttccgggaagctcatgcgcagtca

SEQ ID NO: 268656 - DNA, 97 bp, Homo sapiens
ccttgggaaactgtggaccctactgtacctcaaaaggaacaagttccagttccagtctaccacccaacacctagccagactcggctagcaactcagc

SEQ ID NO: 268657 - DNA, 96 bp, Homo sapiens
gccgagttcaacatcctcctggccaccgactcctacaaggccggagcctcaacagaaagctcctttagttcctcctcctccaccgccaccaccacc

SEQ ID NO: 268658 - DNA, 100 bp, Homo sapiens
gctgctgtgcatcccggccgtctgggcggccgccgcgcttctgctctcagtgtcccggacttcaggtttggtgcacctcgatttggaggaagtagggcag

SEQ ID NO: 268659 - DNA, 142 bp, Homo sapiens
cagaatctgagcaaaaagaagaaaaagcagctcatgaaaaagaaggaattaatagaggatgactttgagatgccatggacaatattaccaggcagaaccaattctacgatacccaagtcatcaaacaagaaaacgagtcagg

SEQ ID NO: 268660 - DNA, 83 bp, Homo sapiens
cagaagttggcaggagcatgggcttcggaggcctatagcccgcaggtgtccctggccagtgtccttccacctgtccacaagca

SEQ ID NO: 268661 - DNA, 75 bp, Homo sapiens
ctgcggtcagcgcttcgatcctgagaccaattccgacgcagcctcccgcgacgatgcccctcaacgttagcttca

SEQ ID NO: 268662 - DNA, 100 bp, Homo sapiens
ggagaggaggatagcagcagaagagaagaagaagcaggatgaactgaaacggattgccagagaattggcagaagatgacctggcccaggagatggaagat

SEQ ID NO: 268663 - DNA, 75 bp, Homo sapiens
cccaccctggagtaaccctcactggagaatccagagctgagatctgtatctgtggacctgaatgttgatccctcg

SEQ ID NO: 268664 - DNA, 100 bp, Homo sapiens
cctacctccaaagtttatactatcagaccttattttcctaaggatgaggttccacttccaaacatgagttccaggccgagacaaagaagcttttggacat

SEQ ID NO: 268665 - DNA, 98 bp, Homo sapiens
gaagtcaattcaaaggacctgcccccagagagatgttctaagaacggaagcatctgggctggatggaatttagcatcaagcagagtcccctttctgtt

SEQ ID NO: 268666 - DNA, 101 bp, Homo sapiens
tgtcgttctctatcactacgtggccgtcaacaatcccaagaagcaggaatgaaagtggcgctttctccgccccagttcccagtgggaaaagctacagaaag

SEQ ID NO: 268667 - DNA, 75 bp, Homo sapiens
actattgtcaccagaaaaatattgtacacagggacctgaaggctgagaacgggaagcttgtcatcaatggaaatc

SEQ ID NO: 268668 - DNA, 75 bp, Homo sapiens
gctgtggcgcgaggcgggactcaaatgctggaggaaggagccttcatcctccccaaggcagaggtgtgcgtgcgg

SEQ ID NO: 268669 - DNA, 75 bp, Homo sapiens
gttcaggatgtgtggtcttctcttcgactacccagtggacttcctcgttctgcccatcttcctaacaaggctatg

SEQ ID NO: 268670 - DNA, 51 bp, Homo sapiens
catcgctgcgcgcttagaagcccggaggcgcacgagtacacgagacaggat

SEQ ID NO: 268671 - DNA, 97 bp, Homo sapiens
gggcgcccgggggcccccagcaccctccagctccctacccatccgccaggagccctcttccttcagactcagcccacctgcacccaggtgaaataaa

SEQ ID NO: 268672 - DNA, 75 bp, Homo sapiens
ccagctggagtatctggacctgtacctgatgcactggccttatgcctttgaggtgaaggtcacagagctgcaact

SEQ ID NO: 268673 - DNA, 110 bp, Homo sapiens
cactttactacaaagatggacttctctgtacaggttttgtaatcaacccccctcagcatggtcctctcatcccccgactggtaacgaccaagcctaccggagaagaggac

SEQ ID NO: 268674 - DNA, 75 bp, Homo sapiens
ccacagccccgcgcacaggcctccggcccctgaagttatcagtgcccacgactatagccagcagtgtgacatttg

SEQ ID NO: 268675 - DNA, 87 bp, Homo sapiens
gggaaccctggtcaccgtctcctcagccaaaattgcctggaaaagagcagtgagaggagtccgggagatgtgtgatgcatgtgaagc

SEQ ID NO: 268676 - DNA, 100 bp, Homo sapiens
aaactgaatactccttccttcctccccacccattcctttaaatccggagggggaaaaaatcccaaggtctgcaaaggcagtggagctactgctgtggttc

SEQ ID NO: 268677 - DNA, 83 bp, Homo sapiens
cgaaatatggctacagagagccctgctacgcgtcgggtccaggtggcagaacatcctagagacaagaggagcagcagcggcac

SEQ ID NO: 268678 - DNA, 101 bp, Homo sapiens
tggagatgaagcctaagaatatgatcagtgagtctgccaaaaaagaggtggttgctgaagtggtaaaagccccgcaggtagttgccgaagcagcaaaaact

SEQ ID NO: 268679 - DNA, 74 bp, Homo sapiens
ggcgttcccaggtgggagcctggagggcaaagcgtggtgcgagcagccctccagtgccctggtagccgccagtc

SEQ ID NO: 268680 - DNA, 100 bp, Homo sapiens
cgtgaccaaaatggtggaggagtactcggtgctgagtggggtgggatgaagctctcttgactatgagtaaaggagaaaaggctcgactggagattgaacc

SEQ ID NO: 268681 - DNA, 100 bp, Homo sapiens
ttacctgcttcccaatcccactgatgaggatcagcccatggttggtgatgacaaaactgtgaagcagtggaaaatggatgggccaggctatggagacgag

SEQ ID NO: 268682 - DNA, 75 bp, Homo sapiens
gacatggaaggggcagtacaagcttacgtctctgctcttcagtacaatcctgaggaggacttcatccaacccagc

SEQ ID NO: 268683 - DNA, 100 bp, Homo sapiens
cctagcaccccgagaaccgtcagtttgagccagatgttcaactagagagaaattgagaagaagcatccactgaagtatcacatggcttcttagaatttat

SEQ ID NO: 268684 - DNA, 82 bp, Homo sapiens
gccgcaagtacccgtccatcatagtcaactgcgtggaagagaagtcgcaatgtatctgctgagcaaaaagatgaaaacaaag

SEQ ID NO: 268685 - DNA, 100 bp, Homo sapiens
tgaaaagatcgtacattgtcagaaggcagttacagcagatgaatggaacagcaaccatacgatagaaatagagataaatcagactctggaaataccatgc

SEQ ID NO: 268686 - DNA, 100 bp, Homo sapiens
ccgccgcagccatgaccgtggagttcgaggagtgcgtcaaggactccccgcgcttcagccacgacaagggacccgaggcggaggagggcgtcgagctgca

SEQ ID NO: 268687 - DNA, 82 bp, Homo sapiens
cgacgttccatctgtggaaggacctaccaaccagggatcatagacggtatttctatgtaaacgaacagtcgggcgagtctca

SEQ ID NO: 268688 - DNA, 73 bp, Homo sapiens
gggtgctgcggctctgcgcggtccccgccagcgccccatcctgagccggcaacagcattattgagaaaagccc

SEQ ID NO: 268689 - DNA, 75 bp, Homo sapiens
tgagcaggctgatctactgcaggaggtggatggaagtttgcttagttgaagaattgccaccaaccactgaattgg

SEQ ID NO: 268690 - DNA, 87 bp, Homo sapiens
gtaaaagcatctactgggggacatcctgttgtgaagtctcttcaagaaaatgaggaggaggagattgggaacctagagcttgcctgg

SEQ ID NO: 268691 - DNA, 75 bp, Homo sapiens
ggagaggagtctccaccaggactgaccgctgccgcccagcacgtccagctccagaacctgggtatcaacccagca

SEQ ID NO: 268692 - DNA, 88 bp, Homo sapiens
acatacctcaacccttggaaaaaaatcgattctgctcctctaggttatgatgtgattgctcaagcccaatctgggactgggaaaacgg

SEQ ID NO: 268693 - DNA, 110 bp, Homo sapiens
tggaaatattcaagtgggatgtgtagactgttcaatgcaacaaggcaagcttcaggatgagttagagaaaggtgaacgggacaatgcagaactgcaggagtttgccaacg

SEQ ID NO: 268694 - DNA, 74 bp, Homo sapiens
tggacgctgacatcaatgtcacaaaagcggatgttgaaaagaagcccttcagcggccagtagcatctgactttg

SEQ ID NO: 268695 - DNA, 82 bp, Homo sapiens
ttcatctgttcttacaataatgagatggcagaaacggtggacacaagcgaaatggtcaacggcgctacagaacaaaggacga

SEQ ID NO: 268696 - DNA, 100 bp, Homo sapiens
aggagctgctgctcggaccagcgcggaccttttggagagcgagacgatcaacaggtgtttatccagaaagttgttcccatcaccaacaaactatttgtaa

SEQ ID NO: 268697 - DNA, 74 bp, Homo sapiens
gcggtgctgcaagagaaggcactcaagtttatggaaggcatggtacgatgtgatacagcggttggaacacctga

SEQ ID NO: 268698 - DNA, 103 bp, Homo sapiens
gggaatcctatgcttggtaatactggtgatagctgtggtcctgggtaccatggatctgaaattcagagtgtagctctgagacttgcttccaaagtcatttccc

SEQ ID NO: 268699 - DNA, 100 bp, Homo sapiens
cttccttgaagaaatacagcttggtgaagagttactagctcaagaacagaaactgttcatacttggtgcgctgtggactcttgtgataattaaccaagag

SEQ ID NO: 268700 - DNA, 73 bp, Homo sapiens
tttcctttccgtctggcggcagccatcaggacaacttgcctttgatgattttcaagagagttgtgctatgatg

SEQ ID NO: 268701 - DNA, 80 bp, Homo sapiens
cagcgtcccagggcccaggccgagcagggaattgtactgccccagatcgtaactggagttgcagccaaccttgtcaatgc

SEQ ID NO: 268702 - DNA, 100 bp, Homo sapiens
cttcgctatggcggcaattcccccagattcctggcagccacccaacgtttacttggagaccaggaggaacatatgcagcagaaaaaagaggaggaagaag

SEQ ID NO: 268703 - DNA, 75 bp, Homo sapiens
ctactcctggcagtgcgtcaatcagagcgtcctgtgcgggtgcaaatagctatgggcaacttggcctcggccata

SEQ ID NO: 268704 - DNA, 100 bp, Homo sapiens
gaagaaataaaagaaatcccctctcactctccaattctgttgttgcctccatgcgccaatccaaaccgaaagccagaagattcccaaatgctggaaaatc

SEQ ID NO: 268705 - DNA, 98 bp, Homo sapiens
cagaactactttcacttgagaaccacccagccaagcagacagtggaggtattgaggctctgaaacaagtaactaagagatatgcccggaaacaaaacc

SEQ ID NO: 268706 - DNA, 100 bp, Homo sapiens
gaagaaagagaatattgttcagttgattatgccagccagatgcagtactatactggcaattgctggagaagattttgcaattgttgcttctgatactcga

SEQ ID NO: 268707 - DNA, 75 bp, Homo sapiens
aagtgccccgcctcagaacgtctccctggaagtggtcaattcaagactccatcaagtatgatggtgaaggatgaa

SEQ ID NO: 268708 - DNA, 73 bp, Homo sapiens
ttttgatcacttccccaagaagctcactcccaaaaaagatttctcgctctgctcgccccccatctcacccccc

SEQ ID NO: 268709 - DNA, 75 bp, Homo sapiens
gcgaagccgaaaaaggcagcagcgaagggagctcactcagtgggtttgatgtggtggatgctggctcgggaagtt

SEQ ID NO: 268710 - DNA, 75 bp, Homo sapiens
gatgttcttcttcgagtatttgtagaaggattgctcgctgtaagcagctcatctgtgaccccagctacgtaaaag

SEQ ID NO: 268711 - DNA, 98 bp, Homo sapiens
ggaggacgagctccgggatgctgtactccttgtctttgcaaacaaacagatggagttcgctcttgttgcccaggctggaatgcaatggcatgaccttg

SEQ ID NO: 268712 - DNA, 100 bp, Homo sapiens
tcaagacggccttcagcgactgcaccagcaagatcggcaggcgagattgcctgacccaggcctgctcggccctcacaggatgtgtggagttggctgttac

SEQ ID NO: 268713 - DNA, 82 bp, Homo sapiens
ctcatgagagcgcggccggaggacagttacagaatgtctgaaggggacagtgtgggagaatccgtccatgggaaaccttcgg

SEQ ID NO: 268714 - DNA, 101 bp, Homo sapiens
gacaagaccatgctggcaagtctgaaggtcaaatctttaatctcatgaagtacgacagctacagccgcttcttaaagtctgacttgtttttaaaacacaag

SEQ ID NO: 268715 - DNA, 80 bp, Homo sapiens
cagaaataaatgtgtgttggcagaaagacaaaccctgagatgaagcaggaggtctctaattaacagaagatggcaaagcc

SEQ ID NO: 268716 - DNA, 106 bp, Homo sapiens
attttggataggcctttctcggccccagactgaggtaccatggctctgggaggatggatcaacattctcttctaacttggggattcccgaagtcttccgttttctg

SEQ ID NO: 268717 - DNA, 50 bp, Homo sapiens
agctttctggagagacagacaccattggagagtacatcgcactgtaccag

SEQ ID NO: 268718 - DNA, 90 bp, Homo sapiens
ctacaacagtttggcgtgcaacatggggcttgagaaaggggaagtgttcgccagttactacatgaaaagataagagatgcttatactcac

SEQ ID NO: 268719 - DNA, 87 bp, Homo sapiens
acagaacatgatgttgacacgggctgggcgcccccagaagcccgggaacaaacgagcccatgaaatcaagagcaccacagctacatt

SEQ ID NO: 268720 - DNA, 82 bp, Homo sapiens
cagtcgggccaagagaagaggcggtggaggacacgacgcgcttaaagggaagccagttgagggaagttctccatgaatgtac

SEQ ID NO: 268721 - DNA, 98 bp, Homo sapiens
acagtgaactctatagattctgctggtatacagctacatccaggagagaatgctgacagtcctgcaggtggagcagttctggaggttttatagccaca

SEQ ID NO: 268722 - DNA, 100 bp, Homo sapiens
ctggagatggagttcgactgcgagggcctgagacggctgcttggcaagaccacggtgtgaacacatgaacagaagacgaaaatttcttctagcctcagta

SEQ ID NO: 268723 - DNA, 98 bp, Homo sapiens
gcaagatgtggaagacacaaagcctgcgaaagtgctcgggaagagggagagcaaacttggctcagcccagaggagaaaagcacactggtggtggcagg

SEQ ID NO: 268724 - DNA, 76 bp, Homo sapiens
aaagaatccaagcaacaggctctgtccaatatggtcagcccttcataaacccagatgggagtccagttgtgtataa

SEQ ID NO: 268725 - DNA, 90 bp, Homo sapiens
cttcgttcgattattagctttagtgaaatgggctaataatgctggcaaagtggaaaaatgtgcggtggccccagaagaatttaaaaccag

SEQ ID NO: 268726 - DNA, 100 bp, Homo sapiens
cagaacaatcttgaatcatgaagctactaaccagagccggctctttctcgggtgacccagagaagacagctaaagtggaatgtggggacttctacaacac

SEQ ID NO: 268727 - DNA, 82 bp, Homo sapiens
agccgtcatgccggggatagtggagctgcccactctagaggagctgaaagtagatgaggatgtgggctctcttgatgagaag

SEQ ID NO: 268728 - DNA, 74 bp, Homo sapiens
gggaggggaaagagcaccgaagaagcttcgaggatctgaggttggacttttcaggaattgaacctgatataaag

SEQ ID NO: 268729 - DNA, 87 bp, Homo sapiens
gaccagaaactcatcccagagttcattaagaagagctttcagcagaggccaaggcagcattgcttgaatttgaagaaagggagcgac

SEQ ID NO: 268730 - DNA, 100 bp, Homo sapiens
ccgtcatccagcggggcgatgagtgtgggcatggggcagccgccagcccaaacaggcgtgtcacagttcttggccaggctgactgagagatttgtgctgg

SEQ ID NO: 268731 - DNA, 82 bp, Homo sapiens
catctaccaattccatatagaaaagactgggccgttactgattgagctacgaggaccaagggtggagagattcaaccagtta

SEQ ID NO: 268732 - DNA, 98 bp, Homo sapiens
tgctggactttgactttgagaaactgtgttctatctccctctcacacatcaatgcttatgcctgtctggcgtggtgaccaagatgaagatgcagagga

SEQ ID NO: 268733 - DNA, 50 bp, Homo sapiens
tcgtgccgctgagcctggcgcagatcgggaagatggagagttggaagaag

SEQ ID NO: 268734 - DNA, 99 bp, Homo sapiens
gcttttcccaagaggagagaatggctgctgggtacctgccccgctggtcccaggaagcaggaagagctggtgcagcaggtgcggaagcggctggaggag

SEQ ID NO: 268735 - DNA, 100 bp, Homo sapiens
tggactggcccccttgagcctgtcccaagccctggtgccaggtgtccatccccgtgctgagattacaggagcttattaatcataagaaggctgaggacac

SEQ ID NO: 268736 - DNA, 75 bp, Homo sapiens
ccatcggccccgacttccagaagggcctgaaggatggaactatcttatgcacatgatgaggagtctgatgaggaa

SEQ ID NO: 268737 - DNA, 75 bp, Homo sapiens
gtttactttaaaaccaccaaagttggatggcaagcatgtggtgtttggcaaagtgaaagaaggcatgaatattgt

SEQ ID NO: 268738 - DNA, 90 bp, Homo sapiens
cagaggtgatataccagacctttcacagacagcaccagttgcccttgaagcagaaaacagaggtgaaatgaaactagctctccagtatgt

SEQ ID NO: 268739 - DNA, 83 bp, Homo sapiens
cttggactgagtcctgcaggacacaggtttattgggcacttcctagcaccaggcactgcaataagaaatggaggttaaaccat

SEQ ID NO: 268740 - DNA, 90 bp, Homo sapiens
ctgcagccacgcgggcgagcggctgtgtggatgtcggcgaagccgcgggcgagccgagttcctgttctgggcttcgctgtgcatgaccca

SEQ ID NO: 268741 - DNA, 98 bp, Homo sapiens
gactcagcttgtctggtattggtcggccatttcataattctgaatcatgtctgataacggagaactggaagataagcctccagcacctcctgtgcgaa

SEQ ID NO: 268742 - DNA, 82 bp, Homo sapiens
gaagctgtggctggccgcatacccgccatcttctccccaggtgagaagccctaccactgcaactgggacggctgcggctgga

SEQ ID NO: 268743 - DNA, 105 bp, Homo sapiens
ggcggatggccccaggtgtaagcgcagaaagcaggcgaacccgcggcgcaataacgaaatcatagcccactaatgagttttggagccagctttgtcagttttttg

SEQ ID NO: 268744 - DNA, 83 bp, Homo sapiens
ggaccatgtcccagctgcagctgtggctgcagtttgaggctctgaacaaggtttcatcagagcaagaaaaagaacaagagact

SEQ ID NO: 268745 - DNA, 100 bp, Homo sapiens
ccatctcgaccacttcgaagaagtcagcaagcaaacggggattcagcgtccgatcctttggaacagggactcacgtgaagcttccaggaccagctcccga

SEQ ID NO: 268746 - DNA, 74 bp, Homo sapiens
ggctggccgccatgcacaagctgcacttcctgcacaggattatagctgagaaggtaaaggacgttctgtttatc

SEQ ID NO: 268747 - DNA, 100 bp, Homo sapiens
gatgatgaatttaccgcccagtccatcacaatcacaccccctgaccgctgcagtggatataacttcttgtggaaactttgctgtaattggcctctcatca

SEQ ID NO: 268748 - DNA, 98 bp, Homo sapiens
catcctcaaggagactcggcggctgccctgggccactggctacgcagagtatcgagaaccttccctgcgaacttcagaggaacttccagctgatgcga

SEQ ID NO: 268749 - DNA, 101 bp, Homo sapiens
ctcaggagcaaatcagtaatgcccggaacttgcctgtttggctccccaaccaggacgagccccttcctggcagcagctgtgccatccaagttggggataaa

SEQ ID NO: 268750 - DNA, 74 bp, Homo sapiens
gaaaagggaagtgaaaagagatctgttttcagggaagaaggagaaagggccaacccctgaagaagcaatacaga

SEQ ID NO: 268751 - DNA, 100 bp, Homo sapiens
gtttgaagcaacaagattgcttgcaacaattgttatgcttgcgaaggaggtggaggagaccatcgagggcatgctcctcaggctggaagagttttgcagc

SEQ ID NO: 268752 - DNA, 82 bp, Homo sapiens
ccaaacttgctggtcactgggaggcaacggggtggtcatccacttgccaggcttgtttgaggaagcagagaagaatgaaaag

SEQ ID NO: 268753 - DNA, 49 bp, Homo sapiens
ttcggctggacttctccatcaccaagggattaatgaaaatcaagttcca

SEQ ID NO: 268754 - DNA, 138 bp, Homo sapiens
ctgataacttcatagctgcctgtacagaaaagaaaatccccgttgtttttcgattgcaagaggttgcccgaagctcagcagagagtcggaggctgctttttaaacctgatgccacagatgaaaaccctgtacctcacg

SEQ ID NO: 268755 - DNA, 97 bp, Homo sapiens
acaggagctggagccctcaacaaaggaaaggggctgtttgccacacagctcatccggaagggggagaccatcttcgtagaacggcccctggtggctg

SEQ ID NO: 268756 - DNA, 74 bp, Homo sapiens
aagcctgcgcgagaggagccgggacacgcctagcgcgggctccaggttttaaaatcaaagatgggaaaatcgga

SEQ ID NO: 268757 - DNA, 80 bp, Homo sapiens
gccctgggcctgagcgccctcctgctgcgctacttcctggagcacctgcgtgtcagcatctgggcggaccccggcaaata

SEQ ID NO: 268758 - DNA, 100 bp, Homo sapiens
tcccccacaaggagacactgtgcagtgcgtcaaagccaggagcaccatcccaccaggagtacgaccccagcaaagcgacctttgtgaaggtggtgccaac

SEQ ID NO: 268759 - DNA, 95 bp, Homo sapiens
cgtgaagaacctgaaggacacactaggttgctgaaaagccaggagtcaaaatgactgagcgctttgactgccaccattgcaacgaatctctcttt

SEQ ID NO: 268760 - DNA, 75 bp, Homo sapiens
ctcagttggaagcagccgatccagcctgcggagcctgtggggcaggtatcagtcagagccggatctctcattggc

SEQ ID NO: 268761 - DNA, 97 bp, Homo sapiens
ctgcaggcaaatacgaagaggctatttcttgtcacaaaaaggctgcagattcttctgatgtagagcgactggaaagattcttcgactcagaagatga

SEQ ID NO: 268762 - DNA, 99 bp, Homo sapiens
cggcaccacagctcacgctggtgctggccatcatgctgcagagtggccgggctgagtactaccagtgatccctgctgccttggtgatcccgggctgaca

SEQ ID NO: 268763 - DNA, 110 bp, Homo sapiens
ctgtaaagccacccacaaacaaactacccattttcttttttggaactcatgagacgagctatgcctgttccagaccagccttcatcagcctcagagaagacgagttccct

SEQ ID NO: 268764 - DNA, 82 bp, Homo sapiens
cgctggccgagacccaggaggacagggcttcagacagcacccaagaaaacctcatttggctcgctgaaggatgaagaccgga

SEQ ID NO: 268765 - DNA, 75 bp, Homo sapiens
gtattcggctgaagagctcaagcttatatttggcaccctttaccctgcgtattattcctacaaggctgtgaaatc

SEQ ID NO: 268766 - DNA, 98 bp, Homo sapiens
acgaggcggcgggctggagacatggaccgcggcgagcaaggagacccggtgagcctccattgataaaaggttggcttccttatcttggagtggtcctg

SEQ ID NO: 268767 - DNA, 75 bp, Homo sapiens
catggcctctggcaccaccaccaccgccgtgaagaatgggttgacacagtgtgggaactggatttcacagagact

SEQ ID NO: 268768 - DNA, 100 bp, Homo sapiens
ccttgatccagcggacttacggacaatgcagatcttcgtgaagactctgactggtaagaccatcaccctcgaggttgagcccagtgacaccatcgagaat

SEQ ID NO: 268769 - DNA, 82 bp, Homo sapiens
cctcatcctggttctggaatcctcagttcaagaatggagatgtatgcatttcgattcttcatccgcctgtagatgacccaca

SEQ ID NO: 268770 - DNA, 100 bp, Homo sapiens
gtctatgtctactgaaggcaataaacgaggaatgatccagcttattgttgcaaggagaataagcaagtgcaatgagaactattccatggcagtatatctt

SEQ ID NO: 268771 - DNA, 82 bp, Homo sapiens
ttcagtatctcaggcggcaccctgtccccgaggaggggaccatgacacaccctgggcgctgcctatggcacagccaagagcg

SEQ ID NO: 268772 - DNA, 98 bp, Homo sapiens
ctgcaccaggttcacggacgagtatcagcttttcgaggagcttggaaagctcgtggtcccaagaagcatctgaagcgggtggcagctccaaagcattg

SEQ ID NO: 268773 - DNA, 98 bp, Homo sapiens
cccttctctgcagtggctgttctcctcaggagtgaccaggagccgctgtacccagccgattccacgactcttctttgcgggagaacatacgatccgta

SEQ ID NO: 268774 - DNA, 74 bp, Homo sapiens
tggtatgcagagttggctttcaaagaatgtactcgacaccttgcggtgcatttggtgccagaaaacagtacatg

SEQ ID NO: 268775 - DNA, 100 bp, Homo sapiens
gataatctaaatggatgtagccgactcattattgcgttagacgttgtcctggagacgaacctggccacaatccgtgtgttggaaagtgtgcagaagaagc

SEQ ID NO: 268776 - DNA, 50 bp, Homo sapiens
gccccatcgagaaatggccgcgtcggcagaccaaagagaaccctgtacag

SEQ ID NO: 268777 - DNA, 100 bp, Homo sapiens
gcactagaaagttcatgaccaaccgactacttcagaggaaacaaatggacctgaaggagaagaaggagaaggtggaggagaaggcaagccggaaagagcg

SEQ ID NO: 268778 - DNA, 82 bp, Homo sapiens
gtacgacctcacgggaggaggtggatgaggcggccagcaccctgacgcggctgccggctgtgtttgatgtggacaagaagaa

SEQ ID NO: 268779 - DNA, 46 bp, Homo sapiens
gcagtggtcgcttcttctccttgagctatcagcttcccagtttgca

SEQ ID NO: 268780 - DNA, 100 bp, Homo sapiens
ggtcgggacacaacagcagcttatcagggaataccaagagcagagagagcatccaggaacctagatctgattactacaatcatgaagttcctgatattga

SEQ ID NO: 268781 - DNA, 50 bp, Homo sapiens
tgcagctctgaagtggttctgattcttggtgccaccattgagaactccag

SEQ ID NO: 268782 - DNA, 92 bp, Homo sapiens
cggcttcctggcctgggcgctccggtggcggcggaggtggaaatgagttctcaacagtttcctcggttaggagccccttctaccgggctgag

SEQ ID NO: 268783 - DNA, 100 bp, Homo sapiens
aagcaggagatgggctcagcagcagccaataggacatgatccaggaagagcagtaagggactgagctgctgccgggggccatcaagtataagaccacagg

SEQ ID NO: 268784 - DNA, 123 bp, Homo sapiens
gccggccccttggcactcgcctcggatttgggggcttcctcactcgtggctttccgaaggctgctgctgttttcactcattagctcctgaggtaaacaaattgaaaaaatgagcgaactggaa

SEQ ID NO: 268785 - DNA, 75 bp, Homo sapiens
actaaaccatatttgggaagacgagcttcacagcgcatcgaactccatttaaaccacagcagaggctttatagaa

SEQ ID NO: 268786 - DNA, 46 bp, Homo sapiens
agccagcacactcctcgcgagcaagctgtttgcagacaaggtccca

SEQ ID NO: 268787 - DNA, 100 bp, Homo sapiens
ttcaggtcatctgaaccttctgagaaaacatggtcaacgtcttgaaaggagtgcttatagaatggtgctgtttggcacggccgatgggcaggtgattgtc

SEQ ID NO: 268788 - DNA, 50 bp, Homo sapiens
cagcctccctagtagctgagattacaggtatgatctcgtgaaaccttgag

SEQ ID NO: 268789 - DNA, 100 bp, Homo sapiens
aaagagccatctgtggtgccaattgaaggtgctggagaatctggtaaaagcaccattgtgaagcagatgaggatcctgcatgttaatgggtttaatggag

SEQ ID NO: 268790 - DNA, 83 bp, Homo sapiens
ccgaggaagccggtgttgccgaggtcaaaatgcagatcttcgtgaaaacccttaccggcaagaccatcacccttgaggtggag

SEQ ID NO: 268791 - DNA, 90 bp, Homo sapiens
ttttgggcctcggccacttcctccaccctttgcggctggggaaaagggccacaggatagagctcagctcccactccactcaacgccaaag

SEQ ID NO: 268792 - DNA, 90 bp, Homo sapiens
tgcgagatatctggccgcctctgccgcagctggagctcccagatggtggtgtggctgcccaggtcagctctgccccgtgctgtgatcagg

SEQ ID NO: 268793 - DNA, 82 bp, Homo sapiens
ccaagcgtgaccagctttctgttgggaacactcaaaggcaagaaaattggatgtatattttgaatatgaagaaaaaataatg

SEQ ID NO: 268794 - DNA, 100 bp, Homo sapiens
ccaaagagtgctgcaagttcatgtgtctggacccaggctgttttggagtcagcggaagatcaccaaggccagggagtggttccaccgcactgtgaagatt

SEQ ID NO: 268795 - DNA, 83 bp, Homo sapiens
cagactcagaaaattttggaaagagaagatgctcggctgatggtgattggcgaggacaacgtggcagtcccctcacaccttta

SEQ ID NO: 268796 - DNA, 75 bp, Homo sapiens
cgccgcgggccggcgtgcgctggtcactgaggcccaggtcgccgccgcggcgcgtagagacgaggtttcaccatg

SEQ ID NO: 268797 - DNA, 82 bp, Homo sapiens
tagccttggaccgagacatgatgaagaaagacagagtttcactcctgttacccaggctggaggacaatgatgtgatctcggg

SEQ ID NO: 268798 - DNA, 98 bp, Homo sapiens
gcttcatgtgtctcatcaagtatggacatttaagagtgaatcagaccttcaactggaatacaagtgttgggctggatcttgatagcagttgttatcat

SEQ ID NO: 268799 - DNA, 100 bp, Homo sapiens
atgttgttggaaaaataaaacgagaaattcaaaatctaaaactctttcgtcatcctcatattatcaaactgttcttggagtgtcaatgttttaataccag

SEQ ID NO: 268800 - DNA, 101 bp, Homo sapiens
gcccgcaactccgccgcccaccatggcttccgaggagctgtacgagccctggaaaggaaaatatctatgaggcaaagcagagaagagctgataaagcgagg

SEQ ID NO: 268801 - DNA, 75 bp, Homo sapiens
gagtatctggtgaagtggaaaggatggcccccaaaagtcatcttagtgggatttggggaagcaacagggctgtgt

SEQ ID NO: 268802 - DNA, 75 bp, Homo sapiens
ggtcagcgtttccctggagaggaagaggcaagctcttttgaaacagatggtcaccatgtttagatattagcagtc

SEQ ID NO: 268803 - DNA, 100 bp, Homo sapiens
ggccggccatggaggctgatggggccggcgagcagatgagaccgctactcacccggctgactttggcctggcaaagcaaaaacaagaaaacagtaaactc

SEQ ID NO: 268804 - DNA, 90 bp, Homo sapiens
tgccagcgcagggcttctggagcagatgaggcacatggagacccaggccaaggacctgaggaccgagacatgggtgcccggcaccgcgcc

SEQ ID NO: 268805 - DNA, 100 bp, Homo sapiens
tgggtggggacataatgaactcagacctattgcaaggaaaggacactcccctaacatatttgaatacctaaaggggcaggacctggatgctatcttgcag

SEQ ID NO: 268806 - DNA, 95 bp, Homo sapiens
cgggacccagattgcgggttcagcaatggcaccagcatgatatcattgatcattcctcccaaagaccagatttcacgagtggcaaaaatgttagc

SEQ ID NO: 268807 - DNA, 100 bp, Homo sapiens
agagtttcttgatctctttatctgtggatgaacaggtgaggaaaacaagtcaggcagctttgctggctctgttggagcaggagctcattgaacgatttga

SEQ ID NO: 268808 - DNA, 51 bp, Homo sapiens
gaagatgctgacattgatgaatctggcattctactggagataccaaagttc

SEQ ID NO: 268809 - DNA, 83 bp, Homo sapiens
gtgccctgtgtgctcatctcgggcctggtgctgctcgcctacttcctgccggcgcaggttttccaagagataacttcaccaag

SEQ ID NO: 268810 - DNA, 74 bp, Homo sapiens
atccaagtggaggttcctacagagattcatatgagagttatggtggccaaatggacaggggactttttcaataa

SEQ ID NO: 268811 - DNA, 75 bp, Homo sapiens
cgcgcatgggcctgttcctggcccgcagccgccacctacccagtgaccatgatagacaatgcagatcttcgtgaa

SEQ ID NO: 268812 - DNA, 51 bp, Homo sapiens
caacagcctggcgtccgccacgaactctttcatcaatctaccaacagccct

SEQ ID NO: 268813 - DNA, 83 bp, Homo sapiens
ccgcagtatcatgctggccaagaagatcatcattaaggacggaggcacggagcatcagatccatgctgctgctgactcggagc

SEQ ID NO: 268814 - DNA, 100 bp, Homo sapiens
ggcaactttgcccaactcggccatgagtccttctactggcagctgccggagacataccagggagacaaggctaaatttattgtgaagaaatcagaagatg

SEQ ID NO: 268815 - DNA, 100 bp, Homo sapiens
cactgaaattcatcctgagatgagggacaagaatccttcaagaaacaggaaaaaactcctaaaacaccaaaaggacctagttctgtagaagacattaaag

SEQ ID NO: 268816 - DNA, 100 bp, Homo sapiens
gagggcttcgtgccctgtgcacgtttgccacctagtgaccaaactgaagtttccaggatggcttctgcatcaacttctaaatataattcacactccttgg

SEQ ID NO: 268817 - DNA, 96 bp, Homo sapiens
ggcgtggaccacatagacatttacgcggatgtcggcgaagagttcaaccagatcctgagagtgagaagcctgactgaccccgcctagacgccaggc

SEQ ID NO: 268818 - DNA, 101 bp, Homo sapiens
tggagacgccattggatgttttgtccagggcagcatctctggtgcatgctgatgacgaaaaacgcatagaatgtcaagctaaccaggcgtccgctacttca

SEQ ID NO: 268819 - DNA, 95 bp, Homo sapiens
ggagtgtcgcagccctgaagttgcctcttctggtgtcaaagcttttggacattcctgggctctaatggtaccaagtgacaggttggctttactgt

SEQ ID NO: 268820 - DNA, 83 bp, Homo sapiens
caggacccgaggccaggagccaggggcccagaaggagcatattaatgaaaagtgccataaactgaaaaaccaaacatgagggt

SEQ ID NO: 268821 - DNA, 75 bp, Homo sapiens
atctattgaatatcgtgttttttcataatccaggttatggaggttttgatgactatggtggctataataattacg

SEQ ID NO: 268822 - DNA, 99 bp, Homo sapiens
tccagaggaaattgaagctaaagtggaaccagctttggtagtacccattaacaagactatcttgctaatcatggccggttaaatgagtctgaagccagg

SEQ ID NO: 268823 - DNA, 82 bp, Homo sapiens
cccgcgctgcggcctggcggcttccaggcgcactaccgcggtgtcagagatggctgaagatgggagcgaagagatcatgttc

SEQ ID NO: 268824 - DNA, 100 bp, Homo sapiens
cttggcagcttcagggatctgtaaaaaagaggatatcaatgcttacaattgtgaagagcccacagaaaagttaccttttcccatcatcgatgataggaat

SEQ ID NO: 268825 - DNA, 95 bp, Homo sapiens
cgccggagcccccggcccaagggcgacttctccagccgggcccgcgaagtgtaactattggtacttcagagatgaatgcattcttggatgaccca

SEQ ID NO: 268826 - DNA, 83 bp, Homo sapiens
taactgtcttcatctttacagaggaatagtctacaaaggaagacttgtaacctggagaagagaattcaattcgtcataatctg

SEQ ID NO: 268827 - DNA, 100 bp, Homo sapiens
acactgtttaccggatctcagctccgacgcccgaggagaaggaggagtggattaagtgcattaaggtccgagtgattggaagctccacattggcactctg

SEQ ID NO: 268828 - DNA, 74 bp, Homo sapiens
acttcagacgagctcttcctgcctggaatctgcaggactctggactgtcttcacactaggtggtgtgggcagca

SEQ ID NO: 268829 - DNA, 51 bp, Homo sapiens
tacacgccgccgcttgtgctgcagccatgatcccctcagtgtcctggcatg

SEQ ID NO: 268830 - DNA, 89 bp, Homo sapiens
cgcataacagaccaatttttattccacgaggaggagtacctggaaattagatgctactatcattcacgatggccatgaggagaagatgg

SEQ ID NO: 268831 - DNA, 100 bp, Homo sapiens
gtaagaatcagaatgttcaattgtgtgaaggtgggagatgggaagattggtattatggcctggatccagaaatcaggaaaatctctaacttccaaggtcc

SEQ ID NO: 268832 - DNA, 75 bp, Homo sapiens
cgcacccctccgagcagcccggggatccagcacgcagggtttccaggcctgaggtgcccgccctggccccaggag

SEQ ID NO: 268833 - DNA, 78 bp, Homo sapiens
tggctggacgtgctgtacagcaagcacccgacagacgtggactacagggtcatggccaccttcaccgagttctacacc

SEQ ID NO: 268834 - DNA, 75 bp, Homo sapiens
gtttctggacgcggatttttggcctcatactctgttatagataaacaagaccagcatctcagacatgtcgaaaaa

SEQ ID NO: 268835 - DNA, 100 bp, Homo sapiens
ggaattggtgggttcttggtctcactgagttctagaatgaagctgcagaccctcgcatctgcgggccaggcatcgacatccgcaacgactatcagcagct

SEQ ID NO: 268836 - DNA, 100 bp, Homo sapiens
gtggaacttctacccgacacttacatgccatggccttctacgttgtgaaaatgttactgaatcaaatggatggatttgatactctgcatagagttaaaat

SEQ ID NO: 268837 - DNA, 74 bp, Homo sapiens
gatgaggaagtactgagcctgttggaggaactggcccggaaacaggaggacggctgaagaagatgcagagcagc

SEQ ID NO: 268838 - DNA, 83 bp, Homo sapiens
tactcttggaatcaaagataaatccaaatactgcatatcagaaacaacagaacatccatgatagcagtcttctgtaaatcgaa

SEQ ID NO: 268839 - DNA, 80 bp, Homo sapiens
agacacctactcagagaagtccctccaccggctctgtgcaggggaaatgctgtctgtagctgagcacttcctggagcagc

SEQ ID NO: 268840 - DNA, 78 bp, Homo sapiens
ccagttccggcccgaggacaccgactaccagcaggtggcatttacaccctacgccccggagcccgggagcacatgccg

SEQ ID NO: 268841 - DNA, 82 bp, Homo sapiens
ctcagacttccagccttcagaactagacctacagagttgaaacagtgaaacctggaaagattgtctggcaggaagaccctcg

SEQ ID NO: 268842 - DNA, 90 bp, Homo sapiens
ctagagtgggaaaaaagcagaggccagggcgccgggtgaagtaccatgcaagcatttcttaaaggtacatccatcagtactaaacccccg

SEQ ID NO: 268843 - DNA, 83 bp, Homo sapiens
cgagcgcttgatgtgcgcggagagcaatcgccgggacagctgcaaggtgtggacactgccagcggctgcagccgacttggaat

SEQ ID NO: 268844 - DNA, 75 bp, Homo sapiens
ctctgtcgagcagcggacgccggtctctgttccgcaggatgcattgatgttgatgggacaatgacagtggactgg

SEQ ID NO: 268845 - DNA, 83 bp, Homo sapiens
ccgacctcgacgtcttgcctgtgtcccacttgttcgcggcctatagggtaatcactttgatcagtatgaggaaggacacttgg

SEQ ID NO: 268846 - DNA, 100 bp, Homo sapiens
gacttggaaaacctgggtgaacgagcgcttccttataggatctctgcccacagtcagcagcacaacagaggcgggcgtcgattagcaaggtaaaagtaac

SEQ ID NO: 268847 - DNA, 100 bp, Homo sapiens
tcctaacgagaggccactcatgcagactgagcttcatcagcttgttcctgaggctgagccggagcaccagtggcagttcgcagcctccaggacttggctc

SEQ ID NO: 268848 - DNA, 75 bp, Homo sapiens
gacttggtacaaggagtatatcatgaaaattctacttcaaaggagtcattgcagttttcagtagaggtgtacttc

SEQ ID NO: 268849 - DNA, 74 bp, Homo sapiens
cccggagccacagctatgcagttggaggcatcacgctcatatagaagcttgagtgcccaagggtttgataaatg

SEQ ID NO: 268850 - DNA, 82 bp, Homo sapiens
cctcggccttccgacgtgggcggtgggccccagccccacagaccagcccagcattcaggaatgcagtttattctactccaag

SEQ ID NO: 268851 - DNA, 90 bp, Homo sapiens
catgcccgctcacctgcgctgtgatgcctgcagagctgtggcttaccagatagcagtcctttcccctcatcaattccacatgccttccag

SEQ ID NO: 268852 - DNA, 83 bp, Homo sapiens
agaacttgcagttgaaggagtataacacaggataatttcttgagaggagataactcccgtaaagttcagcaccagcagcagag

SEQ ID NO: 268853 - DNA, 90 bp, Homo sapiens
cagctggagcgaggggaagcgccctggagagaggagagaaaatgtccactggacctctgtccagttgacatgaagacaatggagactgca

SEQ ID NO: 268854 - DNA, 75 bp, Homo sapiens
ccagcataccaatgaacctctattcaactgcagaaccttggcctgaaaatgctacattatatcagcaattgaaag

SEQ ID NO: 268855 - DNA, 89 bp, Homo sapiens
tatgctcataagaacccacacaatggacaagtgaattcaagccaggaagaagcagcaatctgtcttctggattaaaactgaagatcaac

SEQ ID NO: 268856 - DNA, 76 bp, Homo sapiens
atgtatcggggatatagaccacgattccgcaggctccgagctctgtccagtggtgggagtattacatcccctcctc

SEQ ID NO: 268857 - DNA, 100 bp, Homo sapiens
agattgtaccccacgagctgccacacggcctgcactctgcgctttgagctactgggctgtgagctgaacgatgagcccattattgaagagccaagccgcc

SEQ ID NO: 268858 - DNA, 117 bp, Homo sapiens
cattatgaacgaattctcaacccctacaacttattcctgtccggagacagcctaaggaatcaggaaacccaggcccaacggcaggtggatgcaagaagaaatgttccccaaaacgac

SEQ ID NO: 268859 - DNA, 100 bp, Homo sapiens
cgcgcggggccccggaggagcaggacgcggaggccggggacgcggaggccgaggacgcggaggacgcggctctgccagccaaatccagttgaagaaatat

SEQ ID NO: 268860 - DNA, 75 bp, Homo sapiens
cgtcgctgctggcacttcaggctctggtacacagataagctgtttctctccaagttctttctcctggcgtcaggc

SEQ ID NO: 268861 - DNA, 100 bp, Homo sapiens
tcctcagagagtgaacttggaatcttggacctcatccagaaatttctgaataaattggcagaagaacgcagacagaagaaggaaacttaagatgtgcaag

SEQ ID NO: 268862 - DNA, 83 bp, Homo sapiens
cttcgctgtggtgaagctggggcggcaccggatcaccaagacggagatggaccacacatccccgacctacatgcttgctaact

SEQ ID NO: 268863 - DNA, 50 bp, Homo sapiens
cccatcaccatcacagagagcgataatcaggaaacccaggcccaacggca

SEQ ID NO: 268864 - DNA, 75 bp, Homo sapiens
cctgcctccttcccgccgccccctggggagagattaaacagattctagaaaatgaacttcagatacctgtgtcca

SEQ ID NO: 268865 - DNA, 75 bp, Homo sapiens
cgcgccctggcgggtccggaccaaggctgggatatgaagaacaacagcctgaggttccaattctttatcatgatg

SEQ ID NO: 268866 - DNA, 98 bp, Homo sapiens
acaaggagaagagccatggaaacaggaggaagaattcccaagccaaagctttccagacatgcgtcgggatgtccaggaaatttttcgcatgacccccc

SEQ ID NO: 268867 - DNA, 98 bp, Homo sapiens
cttgatcggactcagcattcagggaccaacaaggcaccatggcgcagaagggccaactcagtgacgatgagaagttcctctttgtggacaaaaacttc

SEQ ID NO: 268868 - DNA, 111 bp, Homo sapiens
cgcagatccagcaggaggttatcaaagcctatggcttcagctgcgacggggaagttgggacccctgattttagcaggatggcccaatggaatcagctacagcagcttgaca

SEQ ID NO: 268869 - DNA, 83 bp, Homo sapiens
gcaggagccgggccgccgaggtcgggcttcctgcctgacacagctcacttcaagaagtgcacaatgtcagaacgtggaattaa

SEQ ID NO: 268870 - DNA, 82 bp, Homo sapiens
gaggcaaggagctaaagcagcgtgcgttcagccctggggctttacaggaagtatggtgctggcatctgcttggcttctagag

SEQ ID NO: 268871 - DNA, 95 bp, Homo sapiens
ggaatgaggaaagagctcattctcatgaagaagcaccatgagcagtgccattcaggaattctgagtgggggccattacgtcacttatgccaaaaa

SEQ ID NO: 268872 - DNA, 75 bp, Homo sapiens
ccgagcgcgagcagttcgacaagacccaggccataaaattttgagtagaaaaatccagaaatttgaaaatcagta

SEQ ID NO: 268873 - DNA, 83 bp, Homo sapiens
gggcgcagccggagccggtgccgcagctgcgatggccgtggccgtggggagaccgtctgttttaaaatcaaagatgggaaaat

SEQ ID NO: 268874 - DNA, 75 bp, Homo sapiens
ggatgaggatgaagatctttctaaatataagttagatgagggtacaggcatccttcacctgctattgttgcaaga

SEQ ID NO: 268875 - DNA, 100 bp, Homo sapiens
atcatgtggttccccgtgggacagcttctgctacaaaatgggcctttgtgttggcttctgcagctcccacgaaggaagggcggcgactggcggcgcgatg

SEQ ID NO: 268876 - DNA, 74 bp, Homo sapiens
ctggcaagatttttaaagaaatgtttggagaccagaatgatgatactctggaaaaggccaaagttgttgagccc

SEQ ID NO: 268877 - DNA, 100 bp, Homo sapiens
ctcaaagctggaggaagctgagcataaggttcagagcctacaaacaggatttaagtgccctgtatgctcaaaatttgtatcctcagatgaaatggatttg

SEQ ID NO: 268878 - DNA, 90 bp, Homo sapiens
caggactccccgcacagtctgaccgacttgcgaatcaccagggagaccagttttgattttaaatgttctcaatccagactaaagacaacc

SEQ ID NO: 268879 - DNA, 51 bp, Homo sapiens
aactagacatggtgaagatcagcaagatgcacttgctcgagggctcggtgg

SEQ ID NO: 268880 - DNA, 114 bp, Homo sapiens
gaggccggcatcgtctttccgtcctctgaggcgacggccgcggctgcacaggtgctggagaatctggtaaaagcaccattgtgaagcagatgaggatcctgcatgttaatgggt

SEQ ID NO: 268881 - DNA, 100 bp, Homo sapiens
gtttgggcacctgcagcgacctacccactacaatacctcttgggactgggctcgatttgagatttcatctgctgcttgcggctatggattcacactgctg

SEQ ID NO: 268882 - DNA, 76 bp, Homo sapiens
cagctggctgccatcaaggtcatggatgtcacggaggaggagatccttgtttacttggagaagacctgtgactggc

SEQ ID NO: 268883 - DNA, 50 bp, Homo sapiens
tttagtaagaagaattccagtcttataaattggttgaatctggcgatgtg

SEQ ID NO: 268884 - DNA, 100 bp, Homo sapiens
gcagcggatcatcccctttctgccagtgtgtcaggaagctgtctgggaagccttcaggactttttgggatcgacttcctgggcgtgaggaatatcattac

SEQ ID NO: 268885 - DNA, 82 bp, Homo sapiens
attaaaccccctgaagaaaatgaaagggaaaatggacaggagattcttctgggagtatgcggttaatgaagttgtggcaggg

SEQ ID NO: 268886 - DNA, 98 bp, Homo sapiens
tgcgactcaggctccggcgtctgcgcttccccatggggctggcctgcggcgcctgggcgctctgagggatcgataaagtttcactgcagaaagtctcc

SEQ ID NO: 268887 - DNA, 114 bp, Homo sapiens
cagctaccatgccagagccagtttattttcactgtgcagctgttacaccaccatgtttcctgagagactgggagttgcaggtgcacttcaaaatccatggacaaggaaagaaga

SEQ ID NO: 268888 - DNA, 80 bp, Homo sapiens
agctactactacgtggtgcttggaaagctccccggataccccctgacaagaggattttcactacgcggcacacacccagc

SEQ ID NO: 268889 - DNA, 98 bp, Homo sapiens
gagtccctccctcccgaaatgaaggagttcacccctgaatacaaagactctggctcctcctcctcctcagaagatgaacgacccaagagatcccatgt

SEQ ID NO: 268890 - DNA, 100 bp, Homo sapiens
ggtctgtgacagggtccaacagggcctggtccgtgtccggtcccccaaatctgtcgtccctgcccccaggtattggatacaaatgaccgatttctacgaa

SEQ ID NO: 268891 - DNA, 100 bp, Homo sapiens
gtgtgggaagaagatttgtaaagaaaactcttagggcagcaggatgggtgtggaagcagtgatggcacttttggaggggaccccagataccccagcctgt

SEQ ID NO: 268892 - DNA, 101 bp, Homo sapiens
cgcgtgcgggattccggcgccgctctccgagctcgatccgctgctcgcacgggagccagctgggtggaaaccacccctactcctaatcccccgactacaga

SEQ ID NO: 268893 - DNA, 100 bp, Homo sapiens
ctccggaggaggctttcggctcagggacgacccccgtggccatgctgaagcggaggcggccgctgctcgagataagaaggctgactgcacaatcacaatg

SEQ ID NO: 268894 - DNA, 75 bp, Homo sapiens
tcctcttcacagggttctgcatcttagcctgctggggaaactgactctactctgtgatgccaagacagatgggag

SEQ ID NO: 268895 - DNA, 83 bp, Homo sapiens
gtcacactttggagtcggctggtcttagccctcagctgttgttgaaatgtgatattcacagatgtgaattctatacttcgcta

SEQ ID NO: 268896 - DNA, 100 bp, Homo sapiens
tactaccaaaaccaaatcttcatagagatgtcaacagatttggacactctgcagtagtcattaacgggctttgatgacagtagggaaagaaccatttcct

SEQ ID NO: 268897 - DNA, 90 bp, Homo sapiens
ggcgatatttctaggggtgtacttgttggggtcagggcacccagattggctgaaaacttctgtgtctgccatttagctactggggacatg

SEQ ID NO: 268898 - DNA, 100 bp, Homo sapiens
gcaaaagctctcagggatgctggtctggcagtcaggccataggaaaaggatacagagtagagtttcatgaacctgaaacttggtggaaatttgatcctga

SEQ ID NO: 268899 - DNA, 81 bp, Homo sapiens
ggatatccacaccatccttctcgctgcagggaaaccacagcttctccaaggagtctatgccatgggtttcaatcgtccatc

SEQ ID NO: 268900 - DNA, 75 bp, Homo sapiens
atggggcagaagaagagcagaaaatagcagccaggaaccaagaaaacttgagaacgtttgtctgcctgatgagag

SEQ ID NO: 268901 - DNA, 83 bp, Homo sapiens
cttcgccccgggccccccagcatgaagaccccggcggacacaggaacatttacctggtaaatcatttaccttttggacatggc

SEQ ID NO: 268902 - DNA, 80 bp, Homo sapiens
ccgggagctctttgggatccggccagatgattacttgatgtgaagttcatttccaatccgccctccatggtggcagcggg

SEQ ID NO: 268903 - DNA, 100 bp, Homo sapiens
aatggacatgattgcctaaatcagccaaacacagggcagctgttgtgctgtgtatggacgtgggctttaccatgagtaactccattcctggtatagaatc

SEQ ID NO: 268904 - DNA, 123 bp, Homo sapiens
tccaaagtggtgccgttttctcactatgctgggacattgctgctacttctggcaggtgtggcctgcctccgagctgcacagttggggatcttcaaaccaagatagatggcttggaaaagacta

SEQ ID NO: 268905 - DNA, 100 bp, Homo sapiens
aaattcgagccaagttaaaggatgagttttgatcatcctgagaaaaatgggccttggcctgcagacccaataaaccttccctcccatggataatagtgct

SEQ ID NO: 268906 - DNA, 100 bp, Homo sapiens
tgctctgcctgctccacaagcggcgccgcgccctcggcctgcacgggctttgtgccttgggcaaagggcagcttactcctggaagaggactgactcaagg

SEQ ID NO: 268907 - DNA, 75 bp, Homo sapiens
tactgcctggagtctctggacgacctatacaaatcagccttcttttattttgaaggaacattttataatgataaa

SEQ ID NO: 268908 - DNA, 90 bp, Homo sapiens
cagagatttccacagaaggactgggatgatacaccttttccacagggaattgagttgactggattatggacagaacttggaaatattgag

SEQ ID NO: 268909 - DNA, 96 bp, Homo sapiens
gctgcctgcatggatgtcttcagctttgtgaagattgcaaagctttcgaggaagatgaagatccctttcctcctactgttctttctgtgggaagcc

SEQ ID NO: 268910 - DNA, 98 bp, Homo sapiens
cgacttcgatgatcgtgtgtcggatgaggagaagaaatacacaatcgagggcagctgaagtcacacatgaaagaagccatgatcaagcttggtttcca

SEQ ID NO: 268911 - DNA, 75 bp, Homo sapiens
agagcattcgaagtgacctcagcagggcatccagctgtgagtaccagagtgcccactggttccaacagttcttct

SEQ ID NO: 268912 - DNA, 100 bp, Homo sapiens
atatggaatccaagggggccagttcctgccgtctgctcttctgcctcttgatctccgccaccgtcttcaggccaggcagccttaagtgccttgaaacaat

SEQ ID NO: 268913 - DNA, 78 bp, Homo sapiens
agcccgacctcgggcgccccgccggtcacctccgcgcggacaccagccgctgccatggcccagacactgcagatggag

SEQ ID NO: 268914 - DNA, 82 bp, Homo sapiens
ggttataaaggaaaacaagaggccccagagggaaaagaagcccaaagttttaaagaaggtgacatttcaaaaggcccgggaa

SEQ ID NO: 268915 - DNA, 75 bp, Homo sapiens
ctctgcttggagctactggttaataatggggctgacgtcaactaccagggccatgatccaaaggaaccagagcag

SEQ ID NO: 268916 - DNA, 80 bp, Homo sapiens
ttccgcccgcttcgatcgcctcgcgccggctgctctttccggagacaagaggagcagcagcggcaccgcccctcaccctg

SEQ ID NO: 268917 - DNA, 100 bp, Homo sapiens
ctgaaagggccccggccagcgtccctgagacgccaacggcagtcactgccccccattccagctcctgggacctatgagtggaatgggcatgaatatgggc

SEQ ID NO: 268918 - DNA, 100 bp, Homo sapiens
cctgccacctggcttcaacgatgtggacgctctgtgccgggcgctgtcagctgtccacagccccaccttctgccagatggaggtttgctcttgttgccca

SEQ ID NO: 268919 - DNA, 101 bp, Homo sapiens
tagaaaatatggatctttacatgttgaatccttgcagcactaaaatttggtgcccgaaatcaggtggtgataagagcagagccccaactctgtgccttgtg

SEQ ID NO: 268920 - DNA, 109 bp, Homo sapiens
tggagcgtgtgtggtgtgtggctgcggcctgggcaagagccgccgcggaccatgaggcgtccgagctgggccacagcctgaacgagaacgtcctcaagcctgcgcagga

SEQ ID NO: 268921 - DNA, 96 bp, Homo sapiens
cctggctggccaagttactggagccgatgccgaatacatcaagcaatggtaacatctttaaatgaagataatgaaagtgtaactgttgaatggata

SEQ ID NO: 268922 - DNA, 51 bp, Homo sapiens
gtgccggcggctctccaccccccaggtgaatacttgtaatgaagtttatga

SEQ ID NO: 268923 - DNA, 100 bp, Homo sapiens
ctggaggtggaggagtccaactcagaggacgaggcctccttcaagtccgagggtgagatctcagaccccttccgcttcaccaccttctacatccactttg

SEQ ID NO: 268924 - DNA, 75 bp, Homo sapiens
acgacaccgatttcctctcgccgagcggcggaccaaacctggaccacccaaaaagccgaagaccccttcaagacc

SEQ ID NO: 268925 - DNA, 80 bp, Homo sapiens
tgaaagagaagggaatgctaagaactgctgggaggatgacaggaggaataagtttttttcatctgtaatttggaagccaa

SEQ ID NO: 268926 - DNA, 95 bp, Homo sapiens
tgatgaacacccagcccatggaggagatcggcctcagcccccgcaaggatggcctttcctaccagttcttcgtgccatgaaggaggacagtgaaa

SEQ ID NO: 268927 - DNA, 82 bp, Homo sapiens
tgcgccggaggaggaggaccaggcccgcgggctcagctctcgccgccagcgggccgcagggaagagcatggaggaaatcaag

SEQ ID NO: 268928 - DNA, 82 bp, Homo sapiens
aggcaagatgatccaccagcggttccatcctacacttggaagaaaaagtcagcactttttgaagtgtctgaggttataccag

SEQ ID NO: 268929 - DNA, 76 bp, Homo sapiens
gggagtcatcaatcaaccttttgtgtcacgagatccaaacaccctcaggcagtttctatggagctttcgcctaccc

SEQ ID NO: 268930 - DNA, 100 bp, Homo sapiens
tgggcgaagcacgctactacctggtgcagggcctgattgaggactgccagctggcgctgcagaacagcctgcttggacacagctcggtggaagatgcgag

SEQ ID NO: 268931 - DNA, 98 bp, Homo sapiens
ggtaccttgctgaagttgcgtgtggtgatgatcgaaaacttgagtttccagcagtgttgctgaacacatcaactggacagattgactctgagttccag

SEQ ID NO: 268932 - DNA, 90 bp, Homo sapiens
tcagcttttggcagcatgaaagttagcaatgctggcatcaccatctacatcaggtcagctgtctcagtttggggcaagtttatacgggca

SEQ ID NO: 268933 - DNA, 50 bp, Homo sapiens
ctggtcttcaccaagaacttcgcagggcctagatctagggtccctggctg

SEQ ID NO: 268934 - DNA, 97 bp, Homo sapiens
ggtgtaccaggcgaagctggccgagcaggctgagcgatacgacggcattcagatttgggagaagtagccccagaaataaaagcatcagagagacgaa

SEQ ID NO: 268935 - DNA, 82 bp, Homo sapiens
tctccacgacctcggtcgagcatgttcaccagggcccaggtcagcccaaggccaaccccactgtcactctgttcccgccctc

SEQ ID NO: 268936 - DNA, 100 bp, Homo sapiens
cggggccgcagtctggccacccgcttccatgcggttcgggtccaagatgatgccggattcaaaagattcttctcttttggagagtgatatgaaacggaaa

SEQ ID NO: 268937 - DNA, 82 bp, Homo sapiens
cggcagccgaggccgcgaactgcatcatggaggaagagctaaagatggctgaatttctagatgaccaggaaactcgactgtg

SEQ ID NO: 268938 - DNA, 83 bp, Homo sapiens
ttcaaagctgtttctgacatctgtaagacttttacatgatctatgttttggtgagctcttagaacaacacacagaagaattgg

SEQ ID NO: 268939 - DNA, 75 bp, Homo sapiens
ccctcccggcttcccggcttcccgtctcgtcaccctctgatacagatccacgggttttagaaaaacaagaattac

SEQ ID NO: 268940 - DNA, 100 bp, Homo sapiens
aaaagaggaaagtggactgtccggggccgggctcaggagcagaggcagatcgggagcggtgccgagaaaaatttccttactagatgacatttcatcgcaa

SEQ ID NO: 268941 - DNA, 98 bp, Homo sapiens
ctggctccgggtgacagccgcgcgcctcggccagccggctcagttcggggaagctgcaggagttcggcgtgggtgatggcagcaagctgaccttggta

SEQ ID NO: 268942 - DNA, 82 bp, Homo sapiens
ggaattctacaatgaggcctccaatctgcaggtctgtgaggaacagaagtgcgaagaagaggtcttccctctggccatgaat

SEQ ID NO: 268943 - DNA, 96 bp, Homo sapiens
aagtggctgccctgaagcgggagaaggatcgtctggtacagcagcttaagcagcagatgcccattcaccagaatctcaaggagctgctggccgtca

SEQ ID NO: 268944 - DNA, 100 bp, Homo sapiens
aggcgtgtcccccaaaggctgtccttgcagtagctggaagccaggatcagagtgacagttgatggcgaatttctgcattacattttcccccttcagttcc

SEQ ID NO: 268945 - DNA, 49 bp, Homo sapiens
caaccacctgccgctcctgcctgaattcagaaggagctggcggacatca

SEQ ID NO: 268946 - DNA, 78 bp, Homo sapiens
cctgcccagctgcctgcccccggaggtgcccacgcagctgcctggacaaggcttttgttgtaacaccctgactttaaa

SEQ ID NO: 268947 - DNA, 80 bp, Homo sapiens
tggcgctttcctgggttgcttctggcggccatggtgttgctgctgtactccttctccgacaaagatcattccactcagcc

SEQ ID NO: 268948 - DNA, 83 bp, Homo sapiens
ctggcagcgccatggagacggtacagctgaggaacccgccgcgccgacaatgcagatcttcgtgaagactctgactggtaaga

SEQ ID NO: 268949 - DNA, 100 bp, Homo sapiens
tacaaccttcgatctcctgacgagatatgatgtttcagcttctccgaggtctggactttcttcattcacaccgagtagtgcatcgcgatctaaaaccaca

SEQ ID NO: 268950 - DNA, 87 bp, Homo sapiens
cctgccctcagccgcccgctggccgggagcggagcccctgtgggatcagctcagctactatttaataaaacaaaatctgtagaattc

SEQ ID NO: 268951 - DNA, 82 bp, Homo sapiens
gcgggcgcatggaagtgctcaccgacagtgaagccgtgctatcaagactaatcaggaccttctcccagaaactccatggacg

SEQ ID NO: 268952 - DNA, 100 bp, Homo sapiens
gcgatggagggcgctccgactgtccgtcagaacttcagtgaagatttcatacattggcctcatgacccagagctccttggagacacatcactatgtggat

SEQ ID NO: 268953 - DNA, 100 bp, Homo sapiens
ggagaagtaccagttctaaatgtcagttataagccacagaaaattagtcccaaatcaactatggcttcccagttacgactcttcgatccccagctgaaag

SEQ ID NO: 268954 - DNA, 83 bp, Homo sapiens
ccgacctcgacgtcttgcctgtgtcccacttgttcgcggcctatagggttgaaaggaggagcaggaggtactgatggacaagg

SEQ ID NO: 268955 - DNA, 50 bp, Homo sapiens
aacagatgcccctgataaaggatacgttgctgctgtgacttactcgaagc

SEQ ID NO: 268956 - DNA, 80 bp, Homo sapiens
ttcccaacagccaccaccaccaccagatggtaactaggatttctacctcaaccgcgagacctatgcaaggacggtgtgga

SEQ ID NO: 268957 - DNA, 83 bp, Homo sapiens
ggattcaccacctccaggaaaaggaaaattgcctaagaattatgacccaaaagttaccccagatccagaaagatggctgccaa

SEQ ID NO: 268958 - DNA, 100 bp, Homo sapiens
agctggctgagtacgacttagataaatatgatgaggaaggtgacccaggatggagagatgtggtcctctatcaattgtaccatctgtgcttgtgtgaaag

SEQ ID NO: 268959 - DNA, 100 bp, Homo sapiens
ccggccggccgcggcgtggggatgccgtcgcaccgaatgccctccgaagtgcttgtacggctgctatgtccattcctccatcatccccaccttccaccgg

SEQ ID NO: 268960 - DNA, 88 bp, Homo sapiens
ggcgagcagaactacggcgagcgggaagcccagaacctcatggccctcaccaatgtggacaccccattgaaaggtggacttaataccc

SEQ ID NO: 268961 - DNA, 83 bp, Homo sapiens
aattcaaggtcacacaatgtcggggatggacctccagatttccttactgcttccaccaacactttcttccaaatatcctgaag

SEQ ID NO: 268962 - DNA, 100 bp, Homo sapiens
agcctaactgaaaggaagagggagcagagcaagaaaaaaaggaagacgatgacttcaggtggaaccgtcccaaaatgtcccttgctcagaagaaggatcg

SEQ ID NO: 268963 - DNA, 90 bp, Homo sapiens
gattggaccatcccccaatcctctcatcttgtcctacctgaagtatgccattagttcccagtacaaaatggttcgttacatcagaaggat

SEQ ID NO: 268964 - DNA, 100 bp, Homo sapiens
aacacaagaagcagccagaaccatcacctgcattggttccatccttgactgttactacagaaaaagtgacaaccaaagccaagcaactgaaggattcagt

SEQ ID NO: 268965 - DNA, 100 bp, Homo sapiens
agccttcatttttattttgacatttctgctgtatgcaagttttcacttatctcgaaagcctatcagcatagttaaggttatcaggacaccccatgggaga

SEQ ID NO: 268966 - DNA, 100 bp, Homo sapiens
gtgtgtggggtcctgtcactatttgaggacatagatgaaaatctcttgttttgaacgaagattttaaagaactcaactttccagcatcctcctctgttct

SEQ ID NO: 268967 - DNA, 100 bp, Homo sapiens
ttccttatgcagagtggccgacttgagttgagtccacgctccatgagaatgctgaacaccatccaaagcagcaaattgagattccttgatttggggaaga

SEQ ID NO: 268968 - DNA, 97 bp, Homo sapiens
ttcactgctctgctgtctcctgcaagaactggctcaagaaatttgcctcgaaaaccaagctctccgtgtgaaatggtcccatctcagactgccctgg

SEQ ID NO: 268969 - DNA, 100 bp, Homo sapiens
gaaacagtatgtttagcaagcactgctatgaagactgagaattgtgtggccaaattatcttatgcccatttggactaaatggcactctcacaggacaggc

SEQ ID NO: 268970 - DNA, 75 bp, Homo sapiens
atcagatggttattgatgttcaaacaggagtcagtggatcggtggggaaaatgctgcttaccctgggccctgggc

SEQ ID NO: 268971 - DNA, 82 bp, Homo sapiens
ctgaggcaaatgtactacctccatcatctttaagcatgattgggacagaatgatagaagctgtacagaatcacattggctct

SEQ ID NO: 268972 - DNA, 100 bp, Homo sapiens
agctgcacatgctaaccaacaggcacgacaagtttctggacactctccgagaggtgaagcgggacgaccctgggacagtctccactggggcagatccagc

SEQ ID NO: 268973 - DNA, 83 bp, Homo sapiens
ctgaaccgcgcggccgaaccctccgctgtgagccgtgagctttgaggcggtgggatgtgtcagcagaatgtctcctgcccccg

SEQ ID NO: 268974 - DNA, 100 bp, Homo sapiens
tcttcgacagctacacaaatctggaacgggtggccgattactgcgagaacaactacatacagagtttggagcctcttccatcaagtggacctgattttgg

SEQ ID NO: 268975 - DNA, 82 bp, Homo sapiens
ggtgcccgaggaggcagccaagctcgtggcctgcctctgcgtgctgcccatcccctccaaagccagcagcctctcagccctc

SEQ ID NO: 268976 - DNA, 95 bp, Homo sapiens
acagcggggcggcggcggcggcggctgcggcccaatatagaaaaggcgacggcggattgacagaagtatgattggagagcccacaaactttgtgc

SEQ ID NO: 268977 - DNA, 100 bp, Homo sapiens
tcccacctcgtctgggctcgcggcgtctccggggaaagccgtggccccgagggcggatccgaggtcttctttgatgtgaggattggagacaaagatgttg

SEQ ID NO: 268978 - DNA, 100 bp, Homo sapiens
accgagaccgtgaccgagagcgtgaccgagagcgcgaatatcgtcatcgttagaaggagtcctaagcagacttaaagccaagaaaataagaagaggaaag

SEQ ID NO: 268979 - DNA, 98 bp, Homo sapiens
cagattgaaagcctagagactgaaatggaattcaggctgctggaagactacgtggaagccatcgagggtgtcagaacgcacctgctgcggcactccga

SEQ ID NO: 268980 - DNA, 100 bp, Homo sapiens
cacgtcagaaagcaaggaagatcagtggatgggggtcaccgtccagagccaaggtccagggggcaaggtcgtggttggtgggacaagtgatgttgaagtg

SEQ ID NO: 268981 - DNA, 99 bp, Homo sapiens
gccggaatgcagtaccctcagcagcaggtaactacagccattcaacagtgtgttcagtactttgaaatgtgtaagactaggaaagctgatgaaactttg

SEQ ID NO: 268982 - DNA, 75 bp, Homo sapiens
ctctctcttccaatgtcatcctccacgtgacagaacattctagtatgccagtagaaaaaaatatcactttagaaa

SEQ ID NO: 268983 - DNA, 100 bp, Homo sapiens
cctccctcagcttccgccccaaaagcaatggctgccatccggaagaaactggtgattgttggtgatggagcctgtggaaagacatgcttgctcatagtct

SEQ ID NO: 268984 - DNA, 90 bp, Homo sapiens
ggcgctcgcggaaataaggccgtggtgggcccctcccctccgcccccagggcgaagcgcgttccttcacctcgggcagaataactttgca

SEQ ID NO: 268985 - DNA, 90 bp, Homo sapiens
atgccaatctgccttcatcccttcgccgtgtgaattcctttcaggaaggaacacacaagtagttatctttcaggctgtctttgaatactt

SEQ ID NO: 268986 - DNA, 100 bp, Homo sapiens
agtcatggatgggcacactgtgggggtgtcctggtgcacccccagtgggtgctcacagctgcccattgcctaaagaagtgctgaagggcctgaccatcac

SEQ ID NO: 268987 - DNA, 71 bp, Homo sapiens
ccaacatctcttcggaaaaacctcaggccacagtggctgccttcacagccagcgagggccacgcacatccc

SEQ ID NO: 268988 - DNA, 87 bp, Homo sapiens
accggggcctggacaccgggcgcaggagggcagcaccagaggccagtggcactcccagctcggttctgtacagagtaatgagatgtg

SEQ ID NO: 268989 - DNA, 82 bp, Homo sapiens
ctgggacagccatggtttcagacggctcggacatcatcatgcagctggacgacgtggttagcagtactgtgactgggccacg

SEQ ID NO: 268990 - DNA, 82 bp, Homo sapiens
attcgcagtggtcgcttcttctccttggtttggtgcacctcgatttggaggaagtagggcagggcccttatctggaaagaag

SEQ ID NO: 268991 - DNA, 75 bp, Homo sapiens
ttctatgatgcccctgaagatgtgcacctagggggcggctaccccgtggggactaggctctaagcccctcatttc

SEQ ID NO: 268992 - DNA, 138 bp, Homo sapiens
cccgcgccgggcctcaggctccttcctactgtccgagggccaccaggccgccgggggcctgctgcgcccgggatgccttccgcgccttccaccctgacctggaattcgtgggcaagttcttgaaacccctgctgattg

SEQ ID NO: 268993 - DNA, 93 bp, Homo sapiens
gcaggatgaagatgactgtggatttcgaggagtgtctgaaggactcgccccgcttcaggcacacattctggcagttccgccatgagaaccccc

SEQ ID NO: 268994 - DNA, 90 bp, Homo sapiens
gacttcataatttttctaggaaaggagccattatttccatttaatttggatgaatttgttactgtggatgaggttatagaagaagtgaat

SEQ ID NO: 268995 - DNA, 75 bp, Homo sapiens
ctctacggatcctacagctcccaggagccccgaggagatgttaaagtaacccatcttgcaggacgacattgaaga

SEQ ID NO: 268996 - DNA, 98 bp, Homo sapiens
ggaaatctggtgtatgttgtcaactatccaaaagctaagtttggtgcgaacgccattctgggggtgtcccttgccgtctgcaaagctggtgccgttga

SEQ ID NO: 268997 - DNA, 75 bp, Homo sapiens
tcgctgctgcttcgtgttcctggtgcagggtagcctctatctgctatgcaaaagcagccttttgtttagaggaac

SEQ ID NO: 268998 - DNA, 90 bp, Homo sapiens
tcttgcaacagtggccgcacgcataggtaccctcccgcctagcggcccccggagcagctcctcagcacctcccgccaaccctcccagcgg

SEQ ID NO: 268999 - DNA, 74 bp, Homo sapiens
tctaacagacatgagttcttatgctgaagcacttcgagaggccaaagatgaagaggaagcctttctggattgga

SEQ ID NO: 269000 - DNA, 74 bp, Homo sapiens
tcctggagaacatggcccggcctcccgggggctctggtcccctcctcgctctgcttatgataatgtcaacaaag

SEQ ID NO: 269001 - DNA, 82 bp, Homo sapiens
tcagcatcgaccagtccaagctgcctggagtcaaggaagatgagttttgatcatcctgagaaaaatgggccttggcctgcag

SEQ ID NO: 269002 - DNA, 51 bp, Homo sapiens
caggaagcgagggatggaggttgtgcagagtggagactgctgcacggactc

SEQ ID NO: 269003 - DNA, 75 bp, Homo sapiens
gttcttcaggaatggagacacggcttcccccaaggaatatacaggaatagcgggttttgcagcaattgttgcata

SEQ ID NO: 269004 - DNA, 75 bp, Homo sapiens
acgtgtacttcggcaccgtccgcgactgctatgagggatgtgataggccaggttctgcctgaagcaacaactaca

SEQ ID NO: 269005 - DNA, 100 bp, Homo sapiens
taaagacagtcgctaccaccaagaccggggctgctgggctggaggttgaggatcttcacgaaaaacatattaaaacaaacccagaagaactgagagagat

SEQ ID NO: 269006 - DNA, 98 bp, Homo sapiens
ttttagaaaagcataaagctgatgttgtaaagatcttaccaatatatttgagtccttcctgcctcagttattggcctatcctaaccccatagatcctc

SEQ ID NO: 269007 - DNA, 75 bp, Homo sapiens
gctgagcccgccgtctacccgtggccgctgccggtctacggtttgccttcccggattgggcctacaagccagagt

SEQ ID NO: 269008 - DNA, 74 bp, Homo sapiens
cttggactctcaaatgggggacagaccctgtacccaagcctgtcatcaaaattgagaagatagaagacatggat

SEQ ID NO: 269009 - DNA, 75 bp, Homo sapiens
cccaacccctcctcccagtgctgaagtcccaaggagccgccctgcagagagctggcggtcaccatggcaatgcgg

SEQ ID NO: 269010 - DNA, 101 bp, Homo sapiens
catggcggctgcgctgttcgtgctgctgggattcgcgctgctgggcacccacggagcctccggggctggtttttcgttggaatatacgttgcacatttatg

SEQ ID NO: 269011 - DNA, 100 bp, Homo sapiens
gccaggatccccagcaggagcaggagcaggagcgggagcgggatccccagcaggagcaggagcgggagcggaaatgcgtgtactgccggaagcggatgaa

SEQ ID NO: 269012 - DNA, 75 bp, Homo sapiens
acgccggagagagcgtgaatttgcctcggggacgcctctccagacctgcctagagctggaacgttacctccagag

SEQ ID NO: 269013 - DNA, 100 bp, Homo sapiens
tgagccaccgggtgagctcaccgcccagcccaaaccaggagattgcgagggagcgatgcggtgcagcgcgctcctgccagggccatccaggtgaccgtgt

SEQ ID NO: 269014 - DNA, 71 bp, Homo sapiens
ccctcacctaccaacggcatagcaatcgcacagctgaggaggacactttgccaccatcaccttgaccttca

SEQ ID NO: 269015 - DNA, 100 bp, Homo sapiens
gcctgcttcccgtctgcgcgagtccacgcagctccccaggtcagccctgacaaaggtcagctagccccttgaggacatcagctttggcctcagggtccta

SEQ ID NO: 269016 - DNA, 89 bp, Homo sapiens
acctttgtgatgatccacttccacttaatgaatgttgggcagatgtacagagtcagctcaggcacatagaagcagcatttgaccaggag

SEQ ID NO: 269017 - DNA, 76 bp, Homo sapiens
cagcctcctgagtagctgtgattacaggctgcagccccgtacggagagccttctgcgagccctggttgcagagaag

SEQ ID NO: 269018 - DNA, 90 bp, Homo sapiens
ttggagaactacagaaacctggtctccctaggtatacccgaaatcttgtggatcaaggaaatggaaaatttaatctgatgattctctgtt

SEQ ID NO: 269019 - DNA, 75 bp, Homo sapiens
ctttgatcgtcttcctcttcagccatccaggtcttgttcagcgttgcgtaatcatccagaaagatgacaatggat

SEQ ID NO: 269020 - DNA, 100 bp, Homo sapiens
gtaggaaatgtgccagtgatattttccagcaccaagcaatatcatttatgctggctgaaatggcaatgaaagttgaactagctagaatgagttaccagag

SEQ ID NO: 269021 - DNA, 98 bp, Homo sapiens
actgtggccttctgcgacgcgcagtccacgcaggagatccatgagaaggtccgtcagttggaatccaatcttcttcccaagcaccaaaaacatctaaa

SEQ ID NO: 269022 - DNA, 100 bp, Homo sapiens
ggggtatgtgtgggaataggagcatggaactacccctttcagattgcctcttggaagtcggctccagcattagcctgtgattgacttgatgcacaacatc

SEQ ID NO: 269023 - DNA, 100 bp, Homo sapiens
ggggttttggctttgtgctatttaaagaatcggagagtgtagataaggttgaatttagtattagtgacaaacagaggcctggacagcaggttgcaacttg

SEQ ID NO: 269024 - DNA, 98 bp, Homo sapiens
aatgacatgccagaggtggtacaattaaggatgactgaaaacatcctggaatcaaatagtgttacggcaacaaggatcccggctactcaacagaaatg

SEQ ID NO: 269025 - DNA, 90 bp, Homo sapiens
caaaactggaaactgaggcatctaatatgaagtttaattggttggggtcagataagaagaggagtgacaatcaagccaacagtagatgat

SEQ ID NO: 269026 - DNA, 100 bp, Homo sapiens
tcttcggctagcaagttcaccagcatccctgcagccttctggtataccatcgtcaccatgacaacactagggtgcgtatagcagcaaaattcatcattca

SEQ ID NO: 269027 - DNA, 75 bp, Homo sapiens
cagagttctgagacctgctctggaacatgtcctatttgtgtgtctcttccttggggagatcctagccagattacc

SEQ ID NO: 269028 - DNA, 82 bp, Homo sapiens
ataactgaaagggaagcagaaccatactatgttctctacttaaaagacaatgactactgatgaaggtgccaagaacaatgaa

SEQ ID NO: 269029 - DNA, 75 bp, Homo sapiens
aaatgtaaaacaatgtgaaatcaattatgtcttcgtgctctgtctgatgatggagtatctgatcttgaagaccca

SEQ ID NO: 269030 - DNA, 60 bp, Homo sapiens
gcccgatcaagcctgacttctagccaaggataatattggacaccgcttactccagaaaca

SEQ ID NO: 269031 - DNA, 89 bp, Homo sapiens
ggcgaggccctcatgtaccacacgctgtccctttccccccaacacatcgcttgacatctgaagaagtatttgatttggatgggataccc

SEQ ID NO: 269032 - DNA, 74 bp, Homo sapiens
tatacaaggaacaatacatcactatgggcctgatcaaccccgtataaccaaagatgtaatttgttttcatgctg

SEQ ID NO: 269033 - DNA, 95 bp, Homo sapiens
tcaaagtagaggtgtatgactgggaccgagatggaagactatatcatcatgtacatagaaaaatccaaaggattctgcaaaaaagctactagaac

SEQ ID NO: 269034 - DNA, 80 bp, Homo sapiens
cttcccggagcaccaactccgtgtcgggagtgcagaaaccaacaaatatggctcgtggacagcagaaaattcagtctcag

SEQ ID NO: 269035 - DNA, 75 bp, Homo sapiens
cctggagcctcagttggaagcagccgatccagcctgcggagcctgtggggcaggaagaaatgttggctatttggc

SEQ ID NO: 269036 - DNA, 100 bp, Homo sapiens
ggatggcccccggtgcaagaggcgcaaacaagccaatcccaggaggaaaaacgaatgaaatatgactgaggactctcagagaaactttcgttcagtatat

SEQ ID NO: 269037 - DNA, 90 bp, Homo sapiens
ggagggggcgaagattgacgccagtaagaacgaggaggatgaaggcctcaagtactacagccttccagcagccttcccagacccacagat

SEQ ID NO: 269038 - DNA, 96 bp, Homo sapiens
ggacaaggaccctgacctgcctgtcgtcgtggtggccaacaagcaggatcccattgaagataccacgctgcatgtgtccttagtagtcatgtctcc

SEQ ID NO: 269039 - DNA, 137 bp, Homo sapiens
ttttcacctcgcgtcgcgcccgggaggaaggaacgaggcaaggagctaaagcagcgtgcgttcagccctggggaagatgagaatgtgcctactgctcctgatcctccaagtcaacatttacgtgggcatgggacagg

SEQ ID NO: 269040 - DNA, 98 bp, Homo sapiens
gcgagcaagatggcgcagacgcagggcacccggaggaaagtctgttactactacgacgggagtctagtggattttctcaagaccccttcaggcatcaa

SEQ ID NO: 269041 - DNA, 82 bp, Homo sapiens
tgactttcagctatggaatcggacaggctgcgggaggagctgcaggactgaggtacagaggccaggggcccagggcaggacc

SEQ ID NO: 269042 - DNA, 100 bp, Homo sapiens
agcgcgtgagcgtcgcgggagcctcgggcaccatgagcgacgtggctattgtgaaggagggttggctgcacaaacgagttgcagagtgggcaggatctta

SEQ ID NO: 269043 - DNA, 98 bp, Homo sapiens
atcgtggtgaagaccgtggagatgcgggatggagaggtcattgatgtccttcaccccgggaaggcgacagtgcctaagacagaaattcgggaaaaact

SEQ ID NO: 269044 - DNA, 82 bp, Homo sapiens
cgagaatggcttgtgaaatcatgcctctgcaaagctattcccttcagcaagctcaagctttttatacgtttccatttcaaca

SEQ ID NO: 269045 - DNA, 111 bp, Homo sapiens
ccggtttccctcggcgtgctactgtgcgctcgatccagcaccatggggaagcgggacaatcgggtgactgcctgcgctgctgacttaaggccccaacaccaaacacagaag

SEQ ID NO: 269046 - DNA, 88 bp, Homo sapiens
aaggagttcgagcagatcgacaagtccgggagctgggcggccatttaccagggcgtctctggccgagcctctttttgtggaaaacgac

SEQ ID NO: 269047 - DNA, 88 bp, Homo sapiens
tcttgatatcgagagcctgcaaaaactcaacactggctaattatttatactggcggctaggggtggagatgggcaaagtgcaggttta

SEQ ID NO: 269048 - DNA, 75 bp, Homo sapiens
ctcccgagtaggtgggactacagattcagaatctgataattcagataacaacacaatctttgtgcaaggacttgg

SEQ ID NO: 269049 - DNA, 74 bp, Homo sapiens
ggaggtccagacacaagaagaggattggaaccagttccgatacagcacaatgccctccaagccacaaaactgtg

SEQ ID NO: 269050 - DNA, 101 bp, Homo sapiens
ccggcagtgaccgtgtgtcagaacaatcttgaatcatgaagctactaaccagagccggctctttctcggaggtggtgcggaaggtggagagcaccaagaca

SEQ ID NO: 269051 - DNA, 100 bp, Homo sapiens
caatcttgaatcatgaagctactaaccagagccggctctttctcgcattccttctgcagcacttgatttattggaccacatgctgacactagatcctagt

SEQ ID NO: 269052 - DNA, 100 bp, Homo sapiens
acgacttactctctacccttggcaggaagatgttaccgagtacttcagtgaattccttagtgcaggggaacggagtcttgaattccagggatgcggcaag

SEQ ID NO: 269053 - DNA, 82 bp, Homo sapiens
ccgggatggagaaggaggaggaatcggcacagaccccacaggctcctcggacactgggtccatcacctcctgccccatcatc

SEQ ID NO: 269054 - DNA, 83 bp, Homo sapiens
cgcttaccccggggtctatggaagtaatggaaggacccctcaacctggaacaagatcactcaaggtgaaggataatctactaa

SEQ ID NO: 269055 - DNA, 86 bp, Homo sapiens
atgagtctcaagatggacaaccgggatgttgcaggtgtaacttggacccatttctcttgcgtgaatattgaacatcgaggagcgga

SEQ ID NO: 269056 - DNA, 100 bp, Homo sapiens
cagcgctcatcgagtccattgagggcaagcagggcaagccccgcctgaagccccccttccccgcagacgtggtttgctgtgttctacaagggggacgagt

SEQ ID NO: 269057 - DNA, 76 bp, Homo sapiens
ggaagaagacagagcttcctcatcctctggaacaattgttcaggcagactgccagattcacttacagccccagcta

SEQ ID NO: 269058 - DNA, 90 bp, Homo sapiens
aataaaactccagcgagatccgggccgtgaacgaaagcagtgacggaggagcttgtaccaccgtaaagatgacggcgccttgaggtaagc

SEQ ID NO: 269059 - DNA, 73 bp, Homo sapiens
atctctgcccccacccctgccctcaggcccacaacaggcacagaacccagcgggtgccgcttctccacccgag

SEQ ID NO: 269060 - DNA, 98 bp, Homo sapiens
ataagactgattttatgggaaaattaagcagatgctccagtttgagaaacctggatctgcgatctgtttgtggccttgtgaaaaagggtaaagaacaa

SEQ ID NO: 269061 - DNA, 96 bp, Homo sapiens
ctttgatcccctgacctgcattaccttgggtttttaccttaaataactaattactggccatatttgggaagtgttgaaaaaaagcagacaatctga

SEQ ID NO: 269062 - DNA, 50 bp, Homo sapiens
ggaccccctagaagcctagaaatgtgttccattggcaagctacaataatg

SEQ ID NO: 269063 - DNA, 50 bp, Homo sapiens
gggaaggagacgctgcagcgcacgggtgtctgtgacctttgaggatgtgg

SEQ ID NO: 269064 - DNA, 82 bp, Homo sapiens
attgcttcttatttagcactcacagaaattctccagaatttcagaaacttctgggcatcgctatggaactttttctgctgtg

SEQ ID NO: 269065 - DNA, 82 bp, Homo sapiens
tccgggattcccagccatggcagattcctccgggcagcaggtactatactggcaattgctggagaagattttgcaattgttg

SEQ ID NO: 269066 - DNA, 127 bp, Homo sapiens
ctcgccctggtcttcgggctgtcgctcgtctacttcctcagcagcaccttcaagcagcggaagaccctgaagaccctgcgggaccaatgggagaaagcactgtgccgggcgctgcgggagaccaaga

SEQ ID NO: 269067 - DNA, 98 bp, Homo sapiens
aaagaatgttggcaatacttgttggtttagtgctgttattcagaggacgattatttatcatttctactaaagcaggatctctaggaattaatctggta

SEQ ID NO: 269068 - DNA, 100 bp, Homo sapiens
ggtgtacttctgggaccttcaggactaaatagtattaagtcctcgccattgtgcatggctggtgtgcatgcaggagtagtgtcaaacacgttgggcggcc

SEQ ID NO: 269069 - DNA, 50 bp, Homo sapiens
ggatgatccattcagcccctgcaggaatatgaagacaaggctggaagacc

SEQ ID NO: 269070 - DNA, 100 bp, Homo sapiens
atattatgctacatgaaaaggaagagggagagtcccgtattctcagagtaaaagttgtttctggaattgatctcgccaaaaaggacatctttggagccag

SEQ ID NO: 269071 - DNA, 73 bp, Homo sapiens
gaggcgtgagtttaaggaccgtcactttttaacgatgatgcagacttcaagcatcaaagtacacaaactgaag

SEQ ID NO: 269072 - DNA, 96 bp, Homo sapiens
cagtaatgtcccggcggatatggccacagggaaaatggacgaaaaccagttcgtggctgtgacaagcacaaacgctgccaagatcttcaacctgta

SEQ ID NO: 269073 - DNA, 50 bp, Homo sapiens
gttctgccttctggacaatctttccgcaaattgccatcgcaagagagggg

SEQ ID NO: 269074 - DNA, 100 bp, Homo sapiens
aggaagaagaggatggtgagcagggccccctcccccgggaatgcgcccaccaaggccctagactcatcttggccctcctcagctccctgcctgtttcccg

SEQ ID NO: 269075 - DNA, 90 bp, Homo sapiens
gtcgacctgacttcttttgagcagttggcactacccgtcttgaggaatcctggattctttcctgtatggcctccatgtcctcttcaaagg

SEQ ID NO: 269076 - DNA, 100 bp, Homo sapiens
gaagaagcagcgtaccaagaaaaataaagaagaggctgcagaatatgctaaacttttggccaagagaatgaaggaggctattacttgacaagcgcatatg

SEQ ID NO: 269077 - DNA, 75 bp, Homo sapiens
tcggacctttcccgctggcgcgcagcctcagctagtttcaggtttagctgtgcctcccagtgactataatgacaa

SEQ ID NO: 269078 - DNA, 100 bp, Homo sapiens
cctgcatgtctggctacctcgtggacaagtttgcagatcgggagcgcaaggtcgccctcaaggccatgatcaaaacggtgagaactctgtctcagtcgac

SEQ ID NO: 269079 - DNA, 91 bp, Homo sapiens
gatcttgggacccaccgctgccctcagctccgagtccagggcgaggtcttgaggaccggcccagctcaggctcctggggcagcggcgacca

SEQ ID NO: 269080 - DNA, 95 bp, Homo sapiens
caccattccctacctgcacgtgagggaagcctttggccagaagatcggccacttccaggatgagccggagccagccatccgaaagagctaccagg

SEQ ID NO: 269081 - DNA, 100 bp, Homo sapiens
atcatgtgcagcagcggtgtgcatcggattttgaatgtggaaatgacgtggaactgtcttttaccaagaatggaaagtggatgggcattgctttccgaat

SEQ ID NO: 269082 - DNA, 75 bp, Homo sapiens
ccactgactatgacctatctgacaagagcatcaaccctctgggcgaactttctgaccaagtatacaactacccag

SEQ ID NO: 269083 - DNA, 83 bp, Homo sapiens
cctggccctggccctgatcatcctgctgggcttcgtccagatcgggaagggacgccaacaaggagagcagcaagacctccaag

SEQ ID NO: 269084 - DNA, 96 bp, Homo sapiens
tgctctcactttctgaaatggaacctcaggatcttgagctagagtatttgactacagtcattccttatgagaaaaaaaacggaccaccgtctgttg

SEQ ID NO: 269085 - DNA, 97 bp, Homo sapiens
tgcaaaaaacctggtgaaaaaggattttttccaattctcaatcacaatcctctgacaactgttgaagatccatatctctttaaattgccagcattaa

SEQ ID NO: 269086 - DNA, 90 bp, Homo sapiens
agattctccggggacccttccgtatctgcctaggcattttgctgtctcctcctaatacgataaagtcagacctaaagccaaaaggaaaga

SEQ ID NO: 269087 - DNA, 50 bp, Homo sapiens
cctggccctcactgtgttggaagatgcgagccacccctctggctgctcct

SEQ ID NO: 269088 - DNA, 100 bp, Homo sapiens
gaagtggagcaattctgaatactgtaaagaccaaagcaaatccggccatgaagactgtctacaagttcagtgctccaagctcccgaagccgaagtctcac

SEQ ID NO: 269089 - DNA, 100 bp, Homo sapiens
tccagggaccgatccgtatactgcagcaggattggctgcagcagctacattagcagtctccaaacgtccacaactatcccgatatggaagccgttcccct

SEQ ID NO: 269090 - DNA, 100 bp, Homo sapiens
acaacagtttggcgtgcaacatggggcttgagaaagggcttatcaacactgcaagctgtgctggattctgctgctgaaaagaaatggcaagtgactgcta

SEQ ID NO: 269091 - DNA, 75 bp, Homo sapiens
ctcggtgattgaggacaagaccatcgagctcatggccgagcatgtcgggactccacctggtgaagaggggacggg

SEQ ID NO: 269092 - DNA, 50 bp, Homo sapiens
gaaatgccctccgggtcacaggataagggattgtggtccatcaggagtct

SEQ ID NO: 269093 - DNA, 82 bp, Homo sapiens
attcccaacagccaccaccaccaccagatgaactccatccggcacaacctgtcactgcatagtcgattcatgcgggtccaga

SEQ ID NO: 269094 - DNA, 82 bp, Homo sapiens
cgtgccctggggctgagccctcagcgtgagtgcatctccatccacgttggccaggctggtgtccagattggcaatgcctgct

SEQ ID NO: 269095 - DNA, 75 bp, Homo sapiens
ggctcaaagaaagatgattatgaaaatgtttataggaggccttagctgggacactacaaagaaagatctgaagga

SEQ ID NO: 269096 - DNA, 75 bp, Homo sapiens
gggggagccccgggagccgcacggcgccatgtcagaaccggctggggatgtccgtcagaacccatgcggcagcaa

SEQ ID NO: 269097 - DNA, 82 bp, Homo sapiens
ggaggcctctaggcagccgcgcagcttccgtgtttgctgcgcccgcactgcgtatacaattggaccgtggatgaggtggtac

SEQ ID NO: 269098 - DNA, 51 bp, Homo sapiens
gggaacaccatctgcctctttcgcctggaagatgttaccgagtacttcagt

SEQ ID NO: 269099 - DNA, 75 bp, Homo sapiens
attgtttatgccaaatcaactgccttacaggaacttgaacaagagtatggggaaccctttctggctgccatggaa

SEQ ID NO: 269100 - DNA, 98 bp, Homo sapiens
ctccggagagcagctctcacacaccgactcctggcacccaggtagttttgctgtcagccacaatgccttctgatgtgcttgaggtgaccaagaagttc

SEQ ID NO: 269101 - DNA, 101 bp, Homo sapiens
aatctgtatgtttttcagccgtctctagcagtatttaaaggacaaggaaccaaagaatatgaaattcatcatgtgataacaatccatattcctcatttgga

SEQ ID NO: 269102 - DNA, 100 bp, Homo sapiens
agtaccagaacatattcgggcccctggtcaagctggaggccgactacgacaagaagctgaaggagtcccagcattccacgcctacgggaaggcaggcaag

SEQ ID NO: 269103 - DNA, 80 bp, Homo sapiens
gccaactctatcgtggtcgtaggaggctgtcctgtctgcaggtcgcctgcgaggccgctggccaggcctgagcctctgcc

SEQ ID NO: 269104 - DNA, 85 bp, Homo sapiens
ttcaccgtgacccaaagtactggacagagcctgagaagttcctccctgaaaggcaacttcgggctcgctggagaacaactaaggg

SEQ ID NO: 269105 - DNA, 100 bp, Homo sapiens
gctgctctgaaccaggacctggacccggacccaaagtgccatgtctttaatgcgcagttgtgtagcagttgagtaatgctggttagctgttaaggtggcg

SEQ ID NO: 269106 - DNA, 83 bp, Homo sapiens
cccgcccgcccaaggtctctcgcgggcgggagaacggaaaactcccaacttcctgtccaaaattgaagacattagagcagaac

SEQ ID NO: 269107 - DNA, 73 bp, Homo sapiens
aaaagttctggaaaggtaacagctatcaggagtaagactgctgctgctgctgctgatgtgaatggatttaaac

SEQ ID NO: 269108 - DNA, 82 bp, Homo sapiens
agaattttggctcctaaagattttgcagaacagagatgacatgccagcccagactttcatctgccactgcagagccccgcca

SEQ ID NO: 269109 - DNA, 90 bp, Homo sapiens
ctttgccgacacattccttcgagatggttgttcctcaaagtcattcaagctgtactcgccgaaggagcccccgaacggcaacgcctttcc

SEQ ID NO: 269110 - DNA, 89 bp, Homo sapiens
cacaagggcgcatatcttcaaagcacctagtacctcctaccattgtcaactgcactttcagaccatgctgaagtctaaattgaatgtct

SEQ ID NO: 269111 - DNA, 74 bp, Homo sapiens
tcgctgctggttcgggcagagtccgacggagaaataaagtgtagtccttctgaaagccccttaatggaaaaaaa

SEQ ID NO: 269112 - DNA, 87 bp, Homo sapiens
cgtcgccgccgccaccatgcccaagagaaaggatgctggcacgtgtgtcctggtcctcaacaaccttctgtgagcctagggacccat

SEQ ID NO: 269113 - DNA, 100 bp, Homo sapiens
gaacaaaatcttcaaactttgcaccaccatcatgggacagcctgacatatgtgcaccttgagataaggtgtcctagtggtcaatgtcacgtggaggaaca

SEQ ID NO: 269114 - DNA, 97 bp, Homo sapiens
tgttggcccagaaactacaggctgaaaagcatgacgtaccaaacaggcacgagataaggaagccattaatttgctagaaccaatgacaaacgacccc

SEQ ID NO: 269115 - DNA, 100 bp, Homo sapiens
ctggcgcagctggcggacccgtggcagaagatggctgtggagagcccgtccgacagcgctgaggcatgaacaaccgggaggtgctggagcaggtggagcg

SEQ ID NO: 269116 - DNA, 89 bp, Homo sapiens
ggtggaggctgtggcaatggaacaggcttgagaaacagatgtcatttgtcagagtgaaccgctgtggtccccgagttggtgtaagaaag

SEQ ID NO: 269117 - DNA, 97 bp, Homo sapiens
tctgttcaggccagaccctctgggagcttctcagccattttccacagatcagcaagagtgagccatggagctacgtgtggggaacaagtaccgcctg

SEQ ID NO: 269118 - DNA, 100 bp, Homo sapiens
ccttaaccaagacgcagatgggaagaagcgttagagcgagcagcactcacatctcaagctataaggaagaccagatggatgagaaactaatggaacctct

SEQ ID NO: 269119 - DNA, 100 bp, Homo sapiens
ttagcgatctatattccctttccagaagatgattccaacgccaccaattccaacctggacaagattagatgcaccccggttggaaacaaagtccctgagc

SEQ ID NO: 269120 - DNA, 74 bp, Homo sapiens
ctgtcctaatcctcactgccgaaagatgaattttgataagaggcaacatgaagcaagaatccagcaaatggaga

SEQ ID NO: 269121 - DNA, 78 bp, Homo sapiens
gcacaggcaggaggcatggccaaggatgaaacaggcgcctatttaatcgacagagaccccacctactttgggcctgtg

SEQ ID NO: 269122 - DNA, 75 bp, Homo sapiens
cagcaagacccacacgtccgttcgagctctgactgcagacctaccaaaacagatgtgttcagagcaacattgttt

SEQ ID NO: 269123 - DNA, 113 bp, Homo sapiens
ggaaccgctctcgcttcgtcctacacttgcgcaaatgtctccgatcaacctctccacttctcctacacctgcacagttaataagccgttcccaggcttccagttctaccagcg

SEQ ID NO: 269124 - DNA, 74 bp, Homo sapiens
aacttcgtgaagttacttccaccggactttgaaaaggaagggaatgttcttacgtctgttgctagattatcgtc

SEQ ID NO: 269125 - DNA, 74 bp, Homo sapiens
ctttgtggctgtgcttgccaggcctggctccagtgcagcttcaagcttaggaccacccaccatgcctatccagg

SEQ ID NO: 269126 - DNA, 50 bp, Homo sapiens
catatgctaggccactatacagatgctgcggcaaatctacagggaccctg

SEQ ID NO: 269127 - DNA, 110 bp, Homo sapiens
ctcaagaggctctcacggtgtctgcctcctccccaggaacccctcaccatccccaagctaccaagtcaggattgttacccccaccacctgcgctccctccaagaccttgt

SEQ ID NO: 269128 - DNA, 75 bp, Homo sapiens
aatcaacccagaacggagagctccctcctagaaaaggagtaggtacagacatgaatgaaggacaactactgggag

SEQ ID NO: 269129 - DNA, 90 bp, Homo sapiens
ggttcttgaacagacagaaggatgtaaaggatggaaaatacagccaggctcccagccccattgccaataccttcctccactatcgaacca

SEQ ID NO: 269130 - DNA, 100 bp, Homo sapiens
ggaatatatcgagttagtggcaatctggcaacaatacagaagttaagatttattgtcaaccaaggctactaataaaattgccagaactaaactatcaggt

SEQ ID NO: 269131 - DNA, 74 bp, Homo sapiens
tcggcgagcccccgcggcgacagggcgaagctgtgctcaggcccgggctggacgcagagccagagctgtcccca

SEQ ID NO: 269132 - DNA, 97 bp, Homo sapiens
tcaactatctcgctgacacgcagatttgggatgatgaaattgttgcagacttttacgtagctgttccagaaataatgcctgaacttaatcgattaag

SEQ ID NO: 269133 - DNA, 76 bp, Homo sapiens
cagcaacagggtgatcagtccataaggactagacagtcatcagaatgtactctgatcctcctcctaagaaacgtgc

SEQ ID NO: 269134 - DNA, 101 bp, Homo sapiens
ggaacccgtggtcctccgcttcatgatccagagaatcacccgctgatggtttttgcccaggcctgaaacaaccagagagctacgggaaaggaagggcttgg

SEQ ID NO: 269135 - DNA, 75 bp, Homo sapiens
ggggctcttccccagaactacaggggctctggccatcttcgtgaccgagacatgggtgcccggcaccgcgcccga

SEQ ID NO: 269136 - DNA, 88 bp, Homo sapiens
aggcccggggggcccagctcccgtagggagccgtgggcgctcggtgcccgggccgggcaggtacctactgtcaacaacgggaagtgga

SEQ ID NO: 269137 - DNA, 75 bp, Homo sapiens
gaaacaatggcatttacagaaagagtcaacagcagtggcaacaggttgaaggggcccggccaggactcggggaag

SEQ ID NO: 269138 - DNA, 88 bp, Homo sapiens
tgcctttgaccttctgccatgattgtgaggcctccccagccacgtgaaacttgttatagttttgccgctggactcttccctcccttcc

SEQ ID NO: 269139 - DNA, 90 bp, Homo sapiens
caagttcatgcgcttcatgatgatgcgagcagagaacttctttatccttcgaaggaagcctgtggagttccaagagcctctgagttcctg

SEQ ID NO: 269140 - DNA, 75 bp, Homo sapiens
gggaagggattgaccccactccctattactggtatacggatcaggtagatgacattaatgctgataagaatatct

SEQ ID NO: 269141 - DNA, 107 bp, Homo sapiens
acctgtccagccagagcatgcgtctcagcagagctgtcttcccaagcctttgatgacaaaccaaaaagcacttggttctgcttcgagatggaaggacacttataggc

SEQ ID NO: 269142 - DNA, 51 bp, Homo sapiens
tggaagagctcaaggagatcatacagcgtgcatcgcttcaaggccgggaca

SEQ ID NO: 269143 - DNA, 97 bp, Homo sapiens
tctcagcctgggcgtcgctgaagctgtgtctgcggggaggcagcggaaggcggcagacaatgcagatcttcgtgaagactctgactggtaagaccat

SEQ ID NO: 269144 - DNA, 83 bp, Homo sapiens
caagaatccgctggcacggacaggctggacccaggaactgtggctgcaccatctgtcttcatcttcccgccatctgatgagca

SEQ ID NO: 269145 - DNA, 99 bp, Homo sapiens
cctgagatcctgaatcctgtttcctacccactattcagccattgggtcacaagcgatgaaaagagcaccttgaaggtgttggagcgggccggagagaag

SEQ ID NO: 269146 - DNA, 100 bp, Homo sapiens
ttcacagatgatacctttgatccagaacttgcagcaacaatagacagcccacctgaggatattgaccataaggactcatatctcattacaagaagcatca

SEQ ID NO: 269147 - DNA, 100 bp, Homo sapiens
cggaaagatgcatgttctgccactaattggtggaaaagttcaaaccttgtactactcagctgatcacaagctgcttgatgggaacctactagatggacag

SEQ ID NO: 269148 - DNA, 83 bp, Homo sapiens
tacaccaaaaactcaggcttcgccacctgcgtgcaaaagacacctatggctgccgatgaaggctcagcagagaaacaggcagg

SEQ ID NO: 269149 - DNA, 50 bp, Homo sapiens
ctagcaatgagctcccaaagccatccagactacatgaggaaataattgac

SEQ ID NO: 269150 - DNA, 100 bp, Homo sapiens
aatcgcctcccgagaagaagttgaggcgctatccacacacagcaccttgacttgcatgagcagggagttccagtgcgaggacggggaggcctgcattgtg

SEQ ID NO: 269151 - DNA, 80 bp, Homo sapiens
tatctctgccgacctgatggaaccactactgcctactttcctcctgtttttacaaagtaccttctccaggcaaattccgt

SEQ ID NO: 269152 - DNA, 83 bp, Homo sapiens
ggggccggctgaccaggaacctgggcgagcagcggcgggggcccgagggatgtgacaagccgaggcggtgagccgggcaggag

SEQ ID NO: 269153 - DNA, 100 bp, Homo sapiens
ccagcataggtgctgggttcatttaccctttggtcggaacggtgtaccaacagtaccgttattgccaccacaagtaaaccagtccctcacttctgtgcca

SEQ ID NO: 269154 - DNA, 109 bp, Homo sapiens
ggaagaccgcgcgcagggcctgcagcgggagctggacggcgagcgcgagcggcgcgagaaatgcctccggagccagcgtggtggccatagacaacaagatcgaacaggc

SEQ ID NO: 269155 - DNA, 97 bp, Homo sapiens
tgagatcaaatggcacttcattggccacctacagaaacaaaatgtcaacaaattgatggccacttctgccccaccaacgttgggccaaccaaaagga

SEQ ID NO: 269156 - DNA, 90 bp, Homo sapiens
cattgatcccaggaaacaagagattgttgctgtggaggaagccttgactatcaaaaacacagatatcgccaaggagctctgccttcctcc

SEQ ID NO: 269157 - DNA, 83 bp, Homo sapiens
gtgcttggcaaaatcgagcgggccattggtttggtgcacctcgatttggaggaagtagggcagggcccttatctggaaagaag

SEQ ID NO: 269158 - DNA, 100 bp, Homo sapiens
caattactgtgtcctgatttcccgctggagctcactcagaaagcagccagtgtatactctgaaagagcgatgcctccaggttgtccggagcctagtcaag

SEQ ID NO: 269159 - DNA, 98 bp, Homo sapiens
aaccccaccgtgttcttcgacattgccgtcgacggcgagcccttgggccgcgtctcctttgaggtgaaatgacaatggatgctctgttggctcgattg

SEQ ID NO: 269160 - DNA, 100 bp, Homo sapiens
tgattctgctggaaatcctgatcagctgcttagcttttcagccgcaactttgttgttcgtgaaactcaagctttgatcttggctcccacaagagagttgg

SEQ ID NO: 269161 - DNA, 82 bp, Homo sapiens
gacagcaagccctactgagcgtgctcccctctgagactggagtgagagggtcttctgaacccagcttagactagaaagtcta

SEQ ID NO: 269162 - DNA, 75 bp, Homo sapiens
tctcaggacattgtgtagcctatggaacatcatttacagcgagcaatttcagcacagcaagtgtttagagaaaaa

SEQ ID NO: 269163 - DNA, 74 bp, Homo sapiens
gcatggacgctcgccgcgtgccggattctgtaaagcctggtgcccatctaacagtgaagaaaatttttgttggt

SEQ ID NO: 269164 - DNA, 100 bp, Homo sapiens
tatatcccatcacgggtggattcaggcaaccctacccatcctcactgtcagtcgacacttccatgtccagtgtgaatgggaaacgctacttcgaatgcca

SEQ ID NO: 269165 - DNA, 82 bp, Homo sapiens
tatcgacgtcgtgatccagaagtccagagctgaggactgcctgtttgcaggtcagtatgggaatcctttaaataaatatatc

SEQ ID NO: 269166 - DNA, 96 bp, Homo sapiens
caatacacaactctgaccagtatccagctcctggactggattgagggcaaggagcggaacatccgggccctgctgtccacgctgcacacagtgctg

SEQ ID NO: 269167 - DNA, 90 bp, Homo sapiens
ggcatcatcgagataaagaaagacagtctccatttcatggcaaccatgcagctattaaccagtgtcaggggtcctactgggcaatagaca

SEQ ID NO: 269168 - DNA, 83 bp, Homo sapiens
ctgccgtccttctccactttcgccagcccgtgccgcgagcgcggcctgcaggaggcggcaaaagcaaatccgtggagctggag

SEQ ID NO: 269169 - DNA, 82 bp, Homo sapiens
ccctgcgggccctgggaccgagctgaggggaggctcggagttccgcggccgaggagatggtaacctgcacctcaatgtgacg

SEQ ID NO: 269170 - DNA, 83 bp, Homo sapiens
cttttgacacggctttggaaacgacgtcatgtgttaggtttactcctggcttgggggcattaggaagcactggaggctcttcg

SEQ ID NO: 269171 - DNA, 83 bp, Homo sapiens
ctctgcgctggccgggggcgcgggcggcggcgccggcaggaaggtcaccgacgatgagggcgcacctgctgtcctggagcttc

SEQ ID NO: 269172 - DNA, 97 bp, Homo sapiens
aacgcctggctcggagcagcagcctctgagacatgaagagtatttctggagaagaatcatcccatggagtgattatgacaaggcttaccgaaagtgg

SEQ ID NO: 269173 - DNA, 82 bp, Homo sapiens
taactttctcccttgatccgggagtctttccactggagcctggagacacaggccccatccttcccaatggggacacttcagg

SEQ ID NO: 269174 - DNA, 82 bp, Homo sapiens
agatgctgctccggctcctggaggacaagaacggtgaggtgcagaacctggctgtcaagtgatttttggaagtaccagcaca

SEQ ID NO: 269175 - DNA, 75 bp, Homo sapiens
cgcttgcgcctggagtcctacatctcacagcagaagacgggcgtgggaggctggagtgcagtggcgggatctcgg

SEQ ID NO: 269176 - DNA, 100 bp, Homo sapiens
gtgtcaccagtttatcacagggaaagtcctggaggagtgactgggtgacatcctataaggtcatggtgagcaatgacagccacacgtgggtcactgttaa

SEQ ID NO: 269177 - DNA, 82 bp, Homo sapiens
ccggatggaaatcctaatgacagtctccaaattcgcctccatctgtaccatggtgacagagctgaatgaacctctctccaat

SEQ ID NO: 269178 - DNA, 100 bp, Homo sapiens
tgcattgactgttccggggtgcaccgctccctgggcgtccatctgagcttcatcaggaccctcaggggcggcacgtaaaaacctatgaggtgtctctccg

SEQ ID NO: 269179 - DNA, 97 bp, Homo sapiens
aagaactgattaccgagccattcaactagccaaggaaaaaaagcagagaggagcggggagcaatgcaggtgtcatggagaaactccagctgggccca

SEQ ID NO: 269180 - DNA, 102 bp, Homo sapiens
ctggatccagtgctactgctacaaataagatcggcttcagctccccaggaatatgattgaaaacagcatgtttgaggaagaaccagatgtggtggatttagc

SEQ ID NO: 269181 - DNA, 74 bp, Homo sapiens
atcgccctgctgggctttgagaagcgcttcgtacccagccagcactatgaaaatctctaacttccaaggtccca

SEQ ID NO: 269182 - DNA, 75 bp, Homo sapiens
ccccagagaacatcgtgcacggcagtggaagccagatctttgtggagttcacctctgtgtttgactgccagaaag

SEQ ID NO: 269183 - DNA, 75 bp, Homo sapiens
gggccgggagatcgctcagctggccgtgtcctggcagatctgaattccagagaacaggagacctgccagcctgtg

SEQ ID NO: 269184 - DNA, 82 bp, Homo sapiens
gagggagtggacatcagccccaaacaggacgaaggcgtgctgaaggctgaccccgcactacatctacccaccagccatcgtg

SEQ ID NO: 269185 - DNA, 51 bp, Homo sapiens
cctatgaacctgactctgtggtcatggagcttcaggatggttcgtactaag

SEQ ID NO: 269186 - DNA, 95 bp, Homo sapiens
ctcgtgaagatctagcacgtccgccatctcgccttcgatcgagatctcgtctgtgccgctcagacactaggtttattcactggatctctgaatac

SEQ ID NO: 269187 - DNA, 51 bp, Homo sapiens
catttcttcggcattctgcaacaggtggtttgtgatgaaaatggttccaag

SEQ ID NO: 269188 - DNA, 99 bp, Homo sapiens
ttacctagggtatgaattaatacagacttggaaactctgaaagaacttagaatcagcattttgagcttcttacagtacatttctagtgaagtaaacccc

SEQ ID NO: 269189 - DNA, 97 bp, Homo sapiens
atacaataccaatgtggtgtataatacagaaggaaaactcgtggcacgttaccataagcctctaaggaaatggcttctggtgtttggcaacttaatc

SEQ ID NO: 269190 - DNA, 83 bp, Homo sapiens
gtccagctcgcccagctcgcccagcgtccgccgcgcctcggccaaggtgtccctggccagtgtccttccacctgtccacaagc

SEQ ID NO: 269191 - DNA, 98 bp, Homo sapiens
cgacagctgcggttggcgggcaccataggccgaagcacccggtgcttagcgaatgccacagacggcgtgcggctagcagcccgcatcgtggacacacc

SEQ ID NO: 269192 - DNA, 75 bp, Homo sapiens
acccctgagaatctgggacctcaacaggtcatcatcagatttgaaatatttaaagtggatacaaaactatttcag

SEQ ID NO: 269193 - DNA, 74 bp, Homo sapiens
gtggcacgcccgagcggcctcgcctgagctccgggggtcgtcgccccgcagggaaaaccagtagattcccagac

SEQ ID NO: 269194 - DNA, 100 bp, Homo sapiens
gctgggtgagcatggggcagccccagtggccaccggagctgtgtgagcaagtgacagtgcacagccagagaacaacacatcacacacaggaaacagttgt

SEQ ID NO: 269195 - DNA, 75 bp, Homo sapiens
gggaaagcctggagtcctggctcattggcctctacacctccatcttcggcgtgctccagctgctgtgcctgctga

SEQ ID NO: 269196 - DNA, 90 bp, Homo sapiens
gggaacgcgcgctgcgcggactgcggcgccccggatctgccgacaccccaggccatcgagccccaggccatcgtgcagcaggtcccagcc

SEQ ID NO: 269197 - DNA, 74 bp, Homo sapiens
gggagatcgcggacgggttgtgcctggaggtggaggggaaggcaccgcacgtggtattgttgtctacactgggg

SEQ ID NO: 269198 - DNA, 90 bp, Homo sapiens
gaaaatggataacagatcagttggggctttgttatgcacctaaagccatattggaagctccagaagaaagagcaccccccggaagtcagc

SEQ ID NO: 269199 - DNA, 50 bp, Homo sapiens
ccaacatccagctacgactggtacaagacaccatcatccgagcagtattg

SEQ ID NO: 269200 - DNA, 105 bp, Homo sapiens
aggagactccggcgctcgccatggccgacgaaaagcccaaggtgcaatggatgagcttcatagtctggatccaagaaggcaagagttattggaagctagatttac

SEQ ID NO: 269201 - DNA, 82 bp, Homo sapiens
gcccaaaggggaagcctagcggagctcagtgtggcagctgctggcctctgggccggcaagcagatatgctactgtcagtgaa

SEQ ID NO: 269202 - DNA, 99 bp, Homo sapiens
gggccccagccccacagaccagcccagcattcagataaccctccttcctccacctcacaaaaactcacaagctgcaacccttctgatgtccactcccac

SEQ ID NO: 269203 - DNA, 51 bp, Homo sapiens
tgagggaagagacaggaagatggtgcccagagcatgtaacttctaatgcca

SEQ ID NO: 269204 - DNA, 98 bp, Homo sapiens
ggagcctgagcaaggagcgggtccgtcgcggagccggagggcgggaggaacatgacatcgcggaggcagcctgcttctgcaaagtggtacgatcgaag

SEQ ID NO: 269205 - DNA, 100 bp, Homo sapiens
ctgatcgccccagggatcaggaggaagttcacaaatgggtgctaccatagtagatgctttggataccctttatatcatgggacttcatgatgaattccta

SEQ ID NO: 269206 - DNA, 75 bp, Homo sapiens
tccactgcatgctagctagtccttccctggaggttgctcaaagaagtacagtctttaaaacaaccatacctgaag

SEQ ID NO: 269207 - DNA, 100 bp, Homo sapiens
cagagctcggaggggcgctgtgtgtacatcacccccatggaggccctggcagagcagggcaagtgtccagagaatggctgggatgaaagtacacttgaac

SEQ ID NO: 269208 - DNA, 100 bp, Homo sapiens
tctgttgattccaagtttcctatagaagacacccctttggttccgatcatcacgaagtatgtatatgagctcctggaaaaggattgtaatttgaaaaaag

SEQ ID NO: 269209 - DNA, 75 bp, Homo sapiens
gggacagaagcgaaattagtgcggaaagttgccggggaaaaggcaattgaaggaacagactaaaaatcgtgtcct

SEQ ID NO: 269210 - DNA, 74 bp, Homo sapiens
gggagttcaagaagaacactccagaggtctctaaggacatctccatgcggctgcataaggagctcgaggtggtg

SEQ ID NO: 269211 - DNA, 99 bp, Homo sapiens
tggcccgtttctacactgtcaccgagccccagcgacacccgaggggctacacagtatataaggtcaccgcccggatgccacttcaaatgaacaacaaga

SEQ ID NO: 269212 - DNA, 50 bp, Homo sapiens
caccgtggtgacattgtatcattggtgtactatcttggtcgtcggatgtt

SEQ ID NO: 269213 - DNA, 75 bp, Homo sapiens
tgaagatggctactctggagttgagtgtgatttggaaggaatcatgccaaatgttaccatcagcttgagtctccc

SEQ ID NO: 269214 - DNA, 100 bp, Homo sapiens
aaaattcacccttgtagagtcattcctgcctttgagcggactcccttttaagcatctggctattaagtgccactggactcagagggcagcagttattggg

SEQ ID NO: 269215 - DNA, 98 bp, Homo sapiens
ggcgacatgtcgacctgacgctctacacgactcggagtttagatgtaagaccaaagattcatgtttgccaaaagaaatctatgaagtaacatcatctc

SEQ ID NO: 269216 - DNA, 75 bp, Homo sapiens
gctggctctgctgctgccgccggcgaaggaggaggcgttgccgggtgctggagaatctggtaaaagcaccattgt

SEQ ID NO: 269217 - DNA, 75 bp, Homo sapiens
gccgaggcgggcggatcacgagcttcatcacgtttcgctcctgtgcctacctggacaagaagcataccatctttg

SEQ ID NO: 269218 - DNA, 75 bp, Homo sapiens
tgttccgcttctcagaggacgccttcaacaccaccttcatctccaccatcggagatacaactcgtcaacgaatca

SEQ ID NO: 269219 - DNA, 115 bp, Homo sapiens
caacttcggatttcactctacccggagagtttcccgcttggttgaacacattggcctcaggaagaatgtctaatttaatagggatatagacagttggtttaaaccaacatttttg

SEQ ID NO: 269220 - DNA, 75 bp, Homo sapiens
tggaagtggatccttcccccgaaagcccggctttcagggtgtccgcaatgttgccagtgtctgtctgcagattgg

SEQ ID NO: 269221 - DNA, 100 bp, Homo sapiens
ctcatactcaaagggttcctgcctcctgctgggctcgcgctgggagatcatccagacagtccccgacgccacgccaggagccaaaaacctgtatatcatc

SEQ ID NO: 269222 - DNA, 75 bp, Homo sapiens
gctggttgttccgttgcgagctgcagctgcgatctctgtggtaggcccagagcgatcgtcttctgatcaaaggag

SEQ ID NO: 269223 - DNA, 98 bp, Homo sapiens
ctctgcctttcctcgccgtgttgctcccgcaccgagccggagcccacctgaatgaccttgaaaatattattccatttcttggaattggcctcctgtat

SEQ ID NO: 269224 - DNA, 98 bp, Homo sapiens
cagaagaagggaaggcgcgagtgaggaaaggaggtactgtagagccaggccaagtctattgcagaacagaagagattcccgtttgccactgataatga

SEQ ID NO: 269225 - DNA, 51 bp, Homo sapiens
agatgatcatctgatagaagagcctggagatgcccaaagatgagctgccca

SEQ ID NO: 269226 - DNA, 82 bp, Homo sapiens
gtcaggctgaaggaatcttggtaaatgggtctctaattaacagaagatggcaaagcccagccacagcagctatgtccttcag

SEQ ID NO: 269227 - DNA, 100 bp, Homo sapiens
ctaccccacgcgctgtccgcgctgagccacctgcacgcgtgccagctgcgagtggacccggccagcttccaggacctgaaggagaagaaggagaaggtgg

SEQ ID NO: 269228 - DNA, 90 bp, Homo sapiens
gtaatacttctggaatccagacagaatgcttttaaaagcagtgcatcttcaaggccatgaaggacctgtttatgcggtgcatgctgttta

SEQ ID NO: 269229 - DNA, 53 bp, Homo sapiens
ccgctcccgtgaccgaaagaagaaggtggtataagttgaaatccaaaccagga

SEQ ID NO: 269230 - DNA, 75 bp, Homo sapiens
tgctaagaaagaatcttgtcactttagccactgctactacagtatgtccgtggttcagaccctgtattaaagctt

SEQ ID NO: 269231 - DNA, 51 bp, Homo sapiens
ggctgatctcgaactcttgacctcagaccaacagaacttcacagtgacact

SEQ ID NO: 269232 - DNA, 75 bp, Homo sapiens
ccctggccgccccgagcggagcctggagattgacgagatgcctgaggctgccgtgaaatcaacagccaacaaata

SEQ ID NO: 269233 - DNA, 100 bp, Homo sapiens
gggaatgatccttactaaccacgaccatcaaatccgtgtcggagtccttacaggagccattccgtagtgccatcccgagcaacgcactgctgcagcttcc

SEQ ID NO: 269234 - DNA, 82 bp, Homo sapiens
ttttattggcaaaggaagttcaactggtagaccaaacagtgtgttcatcctcgaggtggtgtgattcagagtgtttcttcat

SEQ ID NO: 269235 - DNA, 98 bp, Homo sapiens
gtacctggattggagttctcactctgttcatgtagcagctcgactttctcaggatactgtccctctcccacagaggagctgaaggagtaggacagaag

SEQ ID NO: 269236 - DNA, 75 bp, Homo sapiens
ccaaagggggctgctgaccgagagagctcactcagccaggcaggggaaatggaaggtgatgcagtcgaagccatt

SEQ ID NO: 269237 - DNA, 75 bp, Homo sapiens
actcaggcgcctcttcttagttgatgatttagttgattctctgaagttccagctttacatgtggtttggctgggg

SEQ ID NO: 269238 - DNA, 100 bp, Homo sapiens
acaaagaacagcaggctgccaaacttatcttggaaacgaaaatcaaagatgcagagggacaggataacaaagctgatgtaattttaaagtacaatgcaga

SEQ ID NO: 269239 - DNA, 100 bp, Homo sapiens
tggagtttacacaggcaaactgtcagaaaagagtagcctgggctgtctggaaatctgagattatttactggcaagatgagcaggattaccatgaaagaaa

SEQ ID NO: 269240 - DNA, 82 bp, Homo sapiens
gaccagaatgctttggttaaacgaatcaaagagataaaatttgatgctgggactctccttcttagtacacaccgactgattt

SEQ ID NO: 269241 - DNA, 82 bp, Homo sapiens
ttgctgctctgtctgccggttcttgagttaccaggcagtgacattgccagtgggagtgatgtactttctgatgtcataccca

SEQ ID NO: 269242 - DNA, 99 bp, Homo sapiens
gaagtgctcctgctgggcctcaaggaccgcgagggaccatggctaaacctcctggatcattagccagaagcagcagcctgtgccgttcacgccgcagca

SEQ ID NO: 269243 - DNA, 75 bp, Homo sapiens
cttggagtccagcactctgcatgtgactccccgcagcctggacaggccataggaaaaggatacagagtagagttt

SEQ ID NO: 269244 - DNA, 100 bp, Homo sapiens
ctggcatcaggagaagacgcccttgactttactcaagaaagcgagagtgcacagttgactgagatcatcaacagtttgattgcccctctcaacttgtccc

SEQ ID NO: 269245 - DNA, 76 bp, Homo sapiens
catctccgaggacggagacacggcaactccaacaacattgccaccgtggacatctccgcaggcttcgtgggcttag

SEQ ID NO: 269246 - DNA, 74 bp, Homo sapiens
tgtgtccccaaggaaggatgagaatagctactgaagtgtgatgaatgcagactctgctaccattttggctgttt

SEQ ID NO: 269247 - DNA, 100 bp, Homo sapiens
ttggaaggtataactggctttgaagactctgtccgaaagttccctggcaatccagagatcccgatatctaggactgtccatccatccactccctgacctt

SEQ ID NO: 269248 - DNA, 100 bp, Homo sapiens
agcgcctcaccgccaccagctcctggaccaccatggccaagaaccgcagggacagaaacagttgggggatgcttgaagatggaaagaaatttgattcctc

SEQ ID NO: 269249 - DNA, 98 bp, Homo sapiens
gcccatgctgcagcgggaaagagaacagagagtcctggggacagcaataatgacgatgaggacctgacaccagagcagaaggcagagcgtgagaagga

SEQ ID NO: 269250 - DNA, 54 bp, Homo sapiens
gagaaagaagtgggaaggatctgcgcgggagactcggggctcggagcccgcctg

SEQ ID NO: 269251 - DNA, 75 bp, Homo sapiens
aacccgcctgcgatggggcgagaaaggtcccactgcagccctccaagcagactacgtctactttgagaactcctc

SEQ ID NO: 269252 - DNA, 75 bp, Homo sapiens
cgaaactcttgggtatctgtcttctgtgctcttgcagatatgtgtcacaaagatgtctacacggaactgccaggg

SEQ ID NO: 269253 - DNA, 83 bp, Homo sapiens
ttcaaactggtcaaatgcactgtccagacggagatccggaatattgtgggtaatgctaggcctaaagaaacagatcacaaaag

SEQ ID NO: 269254 - DNA, 82 bp, Homo sapiens
caaataccagctcgacaaagatggggttgtcctctttaagaagaaaccttattatctaggtcctgttgttgaaaaaagagcg

SEQ ID NO: 269255 - DNA, 100 bp, Homo sapiens
aatgatttctccagtgctcatcttgttctcgagttttctctgccatgttgctattgcaggacggaaggtgctgatactcaaagaaggtttaagttgtctg

SEQ ID NO: 269256 - DNA, 98 bp, Homo sapiens
caaaaatgcacaattctatctcttgggcaatcttcacggggctggctgctctgtgtctcttccaaggaatagccaggccagaagaaggaaggcctgtg

SEQ ID NO: 269257 - DNA, 98 bp, Homo sapiens
tcagggctgcggccgcccgaagaggagagagcgcgggcctctaggaagtgctggaactttgcctgtcacctttcgttgcctggaagaaaatctgggga

SEQ ID NO: 269258 - DNA, 83 bp, Homo sapiens
gcgctcggcgcctggcgctggcgctggccaaggctttctgcctcctgggggcattgctggcccccatccgagtgcttctggcc

SEQ ID NO: 269259 - DNA, 50 bp, Homo sapiens
ctgaaagcagagaccatggagcttcttgatcattcccgagaagtgttgga

SEQ ID NO: 269260 - DNA, 83 bp, Homo sapiens
ggacgcacagatgagagcgctccgaagactgtgcctccggagccagcgtggtggccatagacaacaagatcgaacaggccatg

SEQ ID NO: 269261 - DNA, 99 bp, Homo sapiens
aaatggcaaagcaaccttctgatgaacagatgttgttattgtaaagaatggaagaagaatatgtggaacaggaggttgtttagccagcgcacctttaca

SEQ ID NO: 269262 - DNA, 100 bp, Homo sapiens
ggagatagctgagctcactacaggtcaagagcaatctgaatccaaatgcaaaggagtttgttcctggggtgaagtacggaaatatttgagtagacggggc

SEQ ID NO: 269263 - DNA, 50 bp, Homo sapiens
cgtcagcgtcaactatgtcctcactgccggtggtggtgtgcacattgagc

SEQ ID NO: 269264 - DNA, 83 bp, Homo sapiens
cccagaccctggagcctcagttggaagcagccgatccagcctgcggagcctgtggggcagagtacccagtactatgacatgcg

SEQ ID NO: 269265 - DNA, 123 bp, Homo sapiens
acacggtccacagctcatcatgatggacttggagctgccgccgccgggactcccgtcccagcagggtccacatatagcctcagttacattagctgcttatgaatgcaattcagttaattttcc

SEQ ID NO: 269266 - DNA, 100 bp, Homo sapiens
caaaacctggaccttctggattacaggccaaattagcaagtatgaatctccagaaatagctctaaattgtggaataatgttaagagaatgcatcagacat

SEQ ID NO: 269267 - DNA, 90 bp, Homo sapiens
agggcgccgcggggcagccgccgctcctccgggttgtcgccgtgatcctgaaggcgctgacctacgacgagaagcggggtgcctgcagcg

SEQ ID NO: 269268 - DNA, 90 bp, Homo sapiens
cccgatcccgccagccactcgcccctggcctcgcgggccgtgtctccggcatcatgtgtgatttgggaatggatgatgaaggagatgatg

SEQ ID NO: 269269 - DNA, 100 bp, Homo sapiens
cagaaaggaaatgttctccttatgtttggtctactattgcatttagaagctggtatattttggaacttcacatccaagatactatatctctgccaatgta

SEQ ID NO: 269270 - DNA, 75 bp, Homo sapiens
ggccataggggctgttatccactacctgctgcagagcctgctcaacaaagccattgaggctgccctggctgcccg

SEQ ID NO: 269271 - DNA, 75 bp, Homo sapiens
acttggagtccggacatctgaaacttgactctgctaacaccagatagtggaaagaaaccatgtgctgaaatgttt

SEQ ID NO: 269272 - DNA, 90 bp, Homo sapiens
gctggtgaaggagctgctggagagggagggactcacagctgcagggaaaatctgcccagtcatttcaagttcaaggagtattgtccccag

SEQ ID NO: 269273 - DNA, 83 bp, Homo sapiens
ggagttccgcatggagaagttgaaccagctgtgggagaaggcccagcgagtgtggacactgccagcggctgcagccgacttgg

SEQ ID NO: 269274 - DNA, 100 bp, Homo sapiens
caggcctgtgattggaattgaaacagtacaactgcctccaccagaggaaaatagtatgggaattcctattatggtgaaaacagctactattgccactgaa

SEQ ID NO: 269275 - DNA, 98 bp, Homo sapiens
tgcactgcaactcggagaggacccagtcccttctggagctagagcttgacagcggaaaagctttgacctggaaatactacgcaaaaaaaattctttac

SEQ ID NO: 269276 - DNA, 90 bp, Homo sapiens
aacaccttaaatacgaccagctggtcatccctcccgaagttttgcggagttattcctgatgaagctaaagctttgtctctgttggcacca

SEQ ID NO: 269277 - DNA, 97 bp, Homo sapiens
gtcagaacaatcttgaatcatgaagctactaaccagagccggctctttctcgcctgaacccccgccaacaaacaaatggcaacttgataattggctg

SEQ ID NO: 269278 - DNA, 75 bp, Homo sapiens
gagcggccgccgccgctgccgcttccaccacagctccagaacctgggtatcaacccagcaaacattggcttcagt

SEQ ID NO: 269279 - DNA, 76 bp, Homo sapiens
cttggggagagttgctaggaaaatgccagacctggtcacctgtctggagcaaaggaaaaagccatggagtatgaag

SEQ ID NO: 269280 - DNA, 83 bp, Homo sapiens
gctttggtccccagcgcagtgaagtggtgagcctttttgtcactggaatcacccttcggtcatcgtgcagcctgggaagagac

SEQ ID NO: 269281 - DNA, 100 bp, Homo sapiens
tggaacgcctggagcgcctcccactgcagacgtctgtccgcctccagccgctctcctctgacggctcccaggccagtgccagtacttgggcttgccagtg

SEQ ID NO: 269282 - DNA, 51 bp, Homo sapiens
cttgtcaacttcctcttcagtcatcagtaatatgaacatcgacatttctgc

SEQ ID NO: 269283 - DNA, 98 bp, Homo sapiens
acgggccctgctgctcgcatcccagcgcggtgctcggcgtacagcagacgctggaggagatggacttcgagaggggggccagtgtcattcaaggacgt

SEQ ID NO: 269284 - DNA, 99 bp, Homo sapiens
gggtcatgcccatcgccatgagcatcaaggcaggcacggtggatgaggactcgtcaggctccgagccatggaggaattgcaagaccaagagggctggga

SEQ ID NO: 269285 - DNA, 90 bp, Homo sapiens
agcggggcggctgcagcgagtaggcggcggcggagggttgctgcagcaactggtcacacagtagtgttggtagaccagacagaggacatc

SEQ ID NO: 269286 - DNA, 100 bp, Homo sapiens
cgataagtgggttgacctgaccatggacgacattcgaaggatggaagaagagacgaagagacagctggatgaagagatctattgggaaactgattataac

SEQ ID NO: 269287 - DNA, 100 bp, Homo sapiens
atgcctggactctgctcagagagatttgtatagagatgtgatgttggagaactatagcaacttggtatcactaggtattaataggggaccctattaccac

SEQ ID NO: 269288 - DNA, 100 bp, Homo sapiens
gagccgccggccgctagcgtcagcgccagccagggccgcaagcttcttatcattgggaccactagccgcaaagatgtccttcaggagatggaaatgctta

SEQ ID NO: 269289 - DNA, 100 bp, Homo sapiens
gaggattgaagagtatttgaagtctgtgtcaaacatccatatcataagtggaattttggagatattcaaagatttttaaagagcgagaagaagatttgag

SEQ ID NO: 269290 - DNA, 75 bp, Homo sapiens
ccaacctgaaaatccctgggctgaactcgcccatccctgaggtggaggaagccttgactatcaaaaacacagata

SEQ ID NO: 269291 - DNA, 60 bp, Homo sapiens
taccaatcaggtcggggcactcaggtgtttgttactgcatactggagcatagtgaaagag

SEQ ID NO: 269292 - DNA, 96 bp, Homo sapiens
gctagaggaagaggcgttgcggcgaaaggaacggctgaaggccctacgggagaaaaccgggcgcaaggaataagttcccctgtcagtggaggatgg

SEQ ID NO: 269293 - DNA, 101 bp, Homo sapiens
tgtggcataaacccggaaaaaagcatccttttccaacaatctcaggtgtctgctttttcaacgtgggagaaggagttgcacaagatagtttttgatccccg

SEQ ID NO: 269294 - DNA, 90 bp, Homo sapiens
ctgtatgcaagttttcacttatctcgaaagcctatcagcatagttaagtgggtaattccagaattgattggccataccattgtcactgta

SEQ ID NO: 269295 - DNA, 74 bp, Homo sapiens
cagaatgtgatttgcttgaagatatgagaaaaatggctactggacaggatcgagtggttgctctcgtggacatg

SEQ ID NO: 269296 - DNA, 100 bp, Homo sapiens
cactgacttccggtggctgagcctctccgcagcttccggccaagttggactgcagctcgcggtttcctggcttctagacccttcttatgactcagtcaga

SEQ ID NO: 269297 - DNA, 88 bp, Homo sapiens
ctgaggcggaggctgacgaggaggcggatcccccggcgtcagtaaaacgatgtttgcagaaatggaaatcattggtcagtttaacctg

SEQ ID NO: 269298 - DNA, 83 bp, Homo sapiens
ggcgacccggtgtgtggcgcgcccagagccccgcgtttcagccctagggaagttcaaatctgaacatcaatgatgtactaggg

SEQ ID NO: 269299 - DNA, 88 bp, Homo sapiens
ttcccaagtctctttccagaggccaggctttatgggagcatgggttaccagcgacgcaccctactcacagatgaatgcttctcacccg

SEQ ID NO: 269300 - DNA, 90 bp, Homo sapiens
ttctgcagaaaaagaggctcttcctcctcctcccgcgacgactggattatggacagaacttggaaatattgagaataatttcttaaagcc

SEQ ID NO: 269301 - DNA, 75 bp, Homo sapiens
gaaacacggaaactgagtatgggatctgatgatgctgcctacacacaagggttttttatcagcaattggacaccc

SEQ ID NO: 269302 - DNA, 74 bp, Homo sapiens
gatcctcaccgcaacattccttatccaatcccttaccgggggacttgatctcatcttcatgccaggccttgggt

SEQ ID NO: 269303 - DNA, 71 bp, Homo sapiens
aggccatcaccacgcagaacgtcaacaccaagtgcatcaccatccccaggacctcagcagccatgtcgaag

SEQ ID NO: 269304 - DNA, 51 bp, Homo sapiens
cattaacctccagctttttaagcaggacacagcattgttggttttgccatg

SEQ ID NO: 269305 - DNA, 75 bp, Homo sapiens
tctctttctggcctggaggctatccagcagctctgcgcatgcggtctcggggagaggctactctgtaagtctccc

SEQ ID NO: 269306 - DNA, 88 bp, Homo sapiens
cagaaactggaggagtcccgctcgaagctagggggattcccgaagtcttccgttttctgagaatgtgagtgctgttcaaaaattagac

SEQ ID NO: 269307 - DNA, 100 bp, Homo sapiens
aaaatttattaaaggaagcacacctaaggtgtggacactgcaagagacttgcacctgagtatgaagctgcagctaccagattaaaaggaatagtcccatt

SEQ ID NO: 269308 - DNA, 100 bp, Homo sapiens
attatcaatgaccggatctatccatatgctgccatctcctatgaagaatggaatgaccctcctgctgtggctcagatgaaggattaccaacgtgaattag

SEQ ID NO: 269309 - DNA, 100 bp, Homo sapiens
gccaattacctggtcatttggtgcattgacctagaggtggaggaggccaaacgtaccaagaaagtcgggatcgtcggtaaatacgggacccgctatgggg

SEQ ID NO: 269310 - DNA, 83 bp, Homo sapiens
ccgccgcccgtccacacccgccgccagataagatttgtgaccaaatcagtgatgctgtccttgatgcccaccttcagcaggat

SEQ ID NO: 269311 - DNA, 83 bp, Homo sapiens
attcgatggacatggacatgagccccctgaggccccagaactatcttttcgcgctgcagtcaggctcagccgatgcttctttc

SEQ ID NO: 269312 - DNA, 75 bp, Homo sapiens
aggcagcttcccacagcaggttggacagttcacaggctcacagaacatttcctgcctgttgctcacactctgttg

SEQ ID NO: 269313 - DNA, 71 bp, Homo sapiens
ggcgcggaggcggctgaggtgcgagccgttctgcacggagctaaaccagccgaccctgcccaacatccgca

SEQ ID NO: 269314 - DNA, 100 bp, Homo sapiens
gaacttgtacagagatgtgatgttggagaactatagcaatctggttttcttggatctccagtctatgtgctgaagaagcagcagcccaagagcagacagg

SEQ ID NO: 269315 - DNA, 74 bp, Homo sapiens
cccactttgtgatcagagccgtgttcggggagtctttcaggtattcctggagtggagagccactctttttgacc

SEQ ID NO: 269316 - DNA, 125 bp, Homo sapiens
ccgaattcagaaggatatcgacgtcgtgatccagaagtccagagctgaggactgcctgtttgcaggggcccagatcattgatctgatgatgctggtcatcgatgtgaccaaggggatgcagaccc

SEQ ID NO: 269317 - DNA, 78 bp, Homo sapiens
acgccaacagtacctcattgctctttggcgactcttattgtggtggctgctcgagcccccagaaaggtgcttggttct

SEQ ID NO: 269318 - DNA, 100 bp, Homo sapiens
accactgaagatgaggttgaaaaacctgacttttatcatcatattgataatctcaggagaactctatgcagaaggacaggcgacactaacaggtgaagat

SEQ ID NO: 269319 - DNA, 74 bp, Homo sapiens
ttttgaagtacaccgtggtgacattgtatcattggtctccagtgatccacaagctcagaaatacatcgcggaaa

SEQ ID NO: 269320 - DNA, 100 bp, Homo sapiens
ccggtgtggagagcggtgctgaggctacgcgggctggagactcaggattgccaacactcctgatagctgaatgtgtgctggtttacatgactccagagca

SEQ ID NO: 269321 - DNA, 96 bp, Homo sapiens
caaaaatcacaagattctctgccacaaaaaaatataataaggctgagtgcggagccaaggttgaagatgaaatccactgaggagggaagtccagca

SEQ ID NO: 269322 - DNA, 74 bp, Homo sapiens
gcgggcggccggtcgggcggggcggcggcgctgacagagtgacaaaaagagtagtccccagaaagaagttaagt

SEQ ID NO: 269323 - DNA, 83 bp, Homo sapiens
ccaaagagaagaggactcttgctatggttcagagctccaaacgagaatggaagccgctggaggaccgtagctgcacagacata

SEQ ID NO: 269324 - DNA, 83 bp, Homo sapiens
ccgaggtggagctgcggggccctggcatgaaaggcggctatgagaggttttcctccgagtacccagaattctgttctaaaacc

SEQ ID NO: 269325 - DNA, 82 bp, Homo sapiens
ctacgacatccacttctaccccaccttccgggcttgggcactgtttaaaggaaagttccgagaaggcatcgacaagccggac

SEQ ID NO: 269326 - DNA, 100 bp, Homo sapiens
acatccccaaaattgacatctatcattatgaattggatatcaagccagagaagtgcccgaggagagttaacaggtgccctcaccaccaatggcatcaacc

SEQ ID NO: 269327 - DNA, 76 bp, Homo sapiens
ggaagggcctcggcactggtaccctttacatcgctgagagatatgccaagagtttaacagtacctgggcatgggag

SEQ ID NO: 269328 - DNA, 74 bp, Homo sapiens
cagaattctgctgtttgggccattcttaatgagggtatgagtattatagaacaattagaccctgtatcttttag

SEQ ID NO: 269329 - DNA, 100 bp, Homo sapiens
tatgcttctgcgagcatgtcgagaatctgaacttaggacagtattgagcttcctacaagctgttctggccagaatcagattgtgttcaattagaccttca

SEQ ID NO: 269330 - DNA, 75 bp, Homo sapiens
caccgggaagcagctatttgaccagacactcttgcactcctgtaatgagcctggcactgtgatgaaacacttttc

SEQ ID NO: 269331 - DNA, 88 bp, Homo sapiens
tcttcattggaggtatcaactgtaagaagaggaaagacttgtctcagaaagcatccctggagaacagcctggaggagaccaaaggccg

SEQ ID NO: 269332 - DNA, 101 bp, Homo sapiens
acatgtggagagttgcgttcgtctcacttaggccaagaagtcaccttgtgtggatggattcagtaccgaagatatgtgttgagacggattctccgccgagc

SEQ ID NO: 269333 - DNA, 98 bp, Homo sapiens
ttcggattgtctcccattttcccaggtgtttgagaagtcccccctgcgggtgaagaacttcgggatctggctgcgctatgactcccggagcggcaccc

SEQ ID NO: 269334 - DNA, 96 bp, Homo sapiens
ctgcagccggcgggtacctgcggccaattcggtggaacgaggacgcggactgcgaaggcagggggggccctcagcctcttggccttgaacgggctg

SEQ ID NO: 269335 - DNA, 100 bp, Homo sapiens
cattagcagcttttcctcctcttccctgcacttcccagaaccaaagaatgtgaagggggtccatggaggcctgacgcgtctcctccatccgcacctggag

SEQ ID NO: 269336 - DNA, 83 bp, Homo sapiens
atgcgatcatgtcacactgcagtggagggaacagatgctgcttgtgttgctcagagtcacggaatctgtactgaagatgccat

SEQ ID NO: 269337 - DNA, 75 bp, Homo sapiens
gttccatcatggcgtcaatgcaggtgtcgtgaaaactacccctaaaagccaaaatgggaaaggaaaagactcata

SEQ ID NO: 269338 - DNA, 78 bp, Homo sapiens
ctcgctcaagatggcggcgcagccaccccgcgggatacgcctcagcgcggaagctcttcgtgggcggtcttgactgga

SEQ ID NO: 269339 - DNA, 75 bp, Homo sapiens
taaggatggtttagaaatggaaaaatgtgttgtaggtggcctagatatccacaaaaagatggtggtagatgtgtg

SEQ ID NO: 269340 - DNA, 128 bp, Homo sapiens
tgcgggctgagcggcgagtttccgatttaaagctgagctgcgaggaaaatggcggcgggaggttagagcagccagcgggtacagaatggattttggaagagggagtcaccactggacctccaaggaag

SEQ ID NO: 269341 - DNA, 100 bp, Homo sapiens
cagtaatagatttgggaattagttttcaaatatatgttctacagttaagtgggcagaccaacatccacctcagcaaaaacttcttcctgacgaatcgcgc

SEQ ID NO: 269342 - DNA, 75 bp, Homo sapiens
atctctatgagcttttgaaacttgttaagcgttttaccaacgaggatcatttggctgtccataaacataaacatg

SEQ ID NO: 269343 - DNA, 50 bp, Homo sapiens
ccaagctcatggcctgccactgcgtgcgtttggtgcacctcgatttggag

SEQ ID NO: 269344 - DNA, 50 bp, Homo sapiens
caggcagtggaaccttcgggctcctaacattcctgatgtagatgaagaag

SEQ ID NO: 269345 - DNA, 82 bp, Homo sapiens
gtcggcttcaaagagaaaaggcaacatcctgtcacaggccatgctctggcaaaaacgctaccggctctctgaccagttccac

SEQ ID NO: 269346 - DNA, 74 bp, Homo sapiens
agtctgggggcgctggcggcctgcgcagccacctcaaggtggaagatggatgcctgaagtgtagactgctgcta

SEQ ID NO: 269347 - DNA, 80 bp, Homo sapiens
cggcgagcgcgagcggcgcgagaaagcgggaggcagcaccgggctcttgatggacttggcagccaatgaaaaggccgttc

SEQ ID NO: 269348 - DNA, 100 bp, Homo sapiens
ccgaattgaacaacagaggcaagaaaaggaaaaagcccgtgaggatgcagcccgggaaagagctagaaaagaatggtttgtcattcattgaaacttcggc

SEQ ID NO: 269349 - DNA, 100 bp, Homo sapiens
aagtatctcaaaaagtcgctcccgctctacattaatcatactcctccaccactgtccaagagtaaggagagagaaatggacaagaaagatttggacaagt

SEQ ID NO: 269350 - DNA, 50 bp, Homo sapiens
ccctccgccaggcaaaaggaaggagctctttgttcaatgcctagccacct

SEQ ID NO: 269351 - DNA, 100 bp, Homo sapiens
tgttcatataaatggtggcagaaataccagaaggatggacaaccggaaattttctacacattttggaattcagttactcaggcactttcttctcaatttc

SEQ ID NO: 269352 - DNA, 74 bp, Homo sapiens
gcaggaagaggaggcacgtaggctcaggtggctgcagcagatggagcagttcatccagtaccttgacgagccaa

SEQ ID NO: 269353 - DNA, 100 bp, Homo sapiens
gctggaaggaaccgctctcgcttcgtcctacacttgcgcaaatgtctccgaagtaaaagattatgagcctccatttggttccaaggtgcgggagcacccc

SEQ ID NO: 269354 - DNA, 100 bp, Homo sapiens
tcaagccccagagaaactggacaagcaatgtgagatgatgaagattttgatggatcatcaaaatctgtcagaacatgtactctgcatggttttatatctg

SEQ ID NO: 269355 - DNA, 51 bp, Homo sapiens
cttgaagtgtggggagaacttggtatctgagtgggacatacttttgaagga

SEQ ID NO: 269356 - DNA, 100 bp, Homo sapiens
cagtggtcgcttcttctccttgataacatgcctggacatttccagcagaggaggtcttggtgtgtcttctagtactgacgggaccatgaaaatctggcag

SEQ ID NO: 269357 - DNA, 75 bp, Homo sapiens
ctcccagctaccatgccagagccagtttattttcactgtgcagctgttacaccatcctattttgtaacggattat

SEQ ID NO: 269358 - DNA, 100 bp, Homo sapiens
catctgggggccacaaatgctccttctcctggagacgcaactcaaggtttgtgaaatggctgctgacatttctgaatccagcggggctgactgcaaagga

SEQ ID NO: 269359 - DNA, 75 bp, Homo sapiens
agttcggagtcctgagtccggatgaactgataaaataccatgaggagtttgagaagagccgcatgggccctagcg

SEQ ID NO: 269360 - DNA, 50 bp, Homo sapiens
cttttgagtgcaactgccttccagggaaaactgaggctgccatcaaaaac

SEQ ID NO: 269361 - DNA, 100 bp, Homo sapiens
gcggatgtgcgcaaggagatgggatggagagcctgagttggcattcgtataaatgacctgggtgtgtgaagtggaattcgtcttctctgagggctccgag

SEQ ID NO: 269362 - DNA, 83 bp, Homo sapiens
cgtcctcctccccaggcccgccgcctccctgccaagaacatccagtcatggataaaaatgagctggttcagaaggccaaactg

SEQ ID NO: 269363 - DNA, 100 bp, Homo sapiens
cactgtctgcggggaaggtcaccattgacagcagctatgacattgccaagatatcccagttcctcgtctatggccgctactgcagccaggtggagtcagc

SEQ ID NO: 269364 - DNA, 75 bp, Homo sapiens
ggagtgtcattgctcatatagaagacccagaggacactaaccaaggtgaattcatgacacctttgactcttctac

SEQ ID NO: 269365 - DNA, 80 bp, Homo sapiens
gacaatggggacccgggacgacgagtacgactacctattcaaagtctgcgctcctcagaccaccggcaggtgaacagcct

SEQ ID NO: 269366 - DNA, 88 bp, Homo sapiens
ccaaggagctggactggtctacaccgctgaagtgtactaatggtcacttgatgtgcgctggctgttttatccacctactagcagatgc

SEQ ID NO: 269367 - DNA, 100 bp, Homo sapiens
tactactggagcgcgccggctccctatctgggaaacaaaagtttcagattgccaaaagacaaaacgggtaccacaaggattggtgacctcgcaccccagg

SEQ ID NO: 269368 - DNA, 98 bp, Homo sapiens
taggagcctccgtgcggagaccactgttcaaggccacaggtctggtctctgatccagctggcgcgcagatacctgcagaagggctacaccacgctgct

SEQ ID NO: 269369 - DNA, 90 bp, Homo sapiens
tgatgactctcaggacaaagcaggctgtatagatcaattggagaatacgacgtcctccgtgggatttttaccagtgagataggaacaaag

SEQ ID NO: 269370 - DNA, 101 bp, Homo sapiens
ggcgcagcggccgctgtcgggctggccatggcgaggggtgcacggcggccacctgagtggcgcggcggtgtcagccaataggagctctgaacccaaaaaga

SEQ ID NO: 269371 - DNA, 75 bp, Homo sapiens
acaacaggatcgtctcgtccaaggtccgccgggatcttcacgtatcaaccggtgaatttacagacttaaagcagc

SEQ ID NO: 269372 - DNA, 100 bp, Homo sapiens
ttgtgctcagtgacatcattcaggacagagtgtctgctcagcagcagctgtggatggtggaagacacgctggcaggtctgggtggcccccagaaaccgcc

SEQ ID NO: 269373 - DNA, 100 bp, Homo sapiens
taaagaggtagcaagaaagaaaattagagtgaatgtagttgcaccagttactccacaggatccgctgaacataggatgttgccacaaaatctacctcgtg

SEQ ID NO: 269374 - DNA, 82 bp, Homo sapiens
cgcattcaagaaagccgacccccaaggagtgtgtcatcttctgtgtgcgggaggaacctgtgcttttcctgcgtgcagatga

SEQ ID NO: 269375 - DNA, 95 bp, Homo sapiens
gcattactttatagcaaacgactggtaaatattgcaacttcagcaacttcaaatattgaatatgcccacgttcctcatctcagcccagctgtgat

SEQ ID NO: 269376 - DNA, 98 bp, Homo sapiens
gggaggacctcacttccccggggtgtaataatgttaactgaggtcttcaataaactcatcaggagatataagtatttggagaaggcatttgaagatga

SEQ ID NO: 269377 - DNA, 100 bp, Homo sapiens
cactgtgcttccccagaggggtggcctcgctgttcccatggacatggcccagcagtcccagctatctgacttcatgtgaaagatggctaatgcagaagtg

SEQ ID NO: 269378 - DNA, 101 bp, Homo sapiens
ccgggaccgaaacctagccccggacgagaagcgcagcaacgtgcggtgggaccacgagagcgttcaagaacatgaagactcgggtgactcagaagtggaga

SEQ ID NO: 269379 - DNA, 80 bp, Homo sapiens
cacgcgggcaagggagcgggagcggtctggcgctcccgccgcaggccaaagaggtgctgaaaaaatatttggagtccaag

SEQ ID NO: 269380 - DNA, 82 bp, Homo sapiens
gcagagccgagtgcagaagatctgggtgcccgtggaccacaggccctcgttgcccagatatggctctgagagattcctctgc

SEQ ID NO: 269381 - DNA, 97 bp, Homo sapiens
aaatgaagaagaagatgcctttaccgaccaatggctttgactacttactaacatacagtgacaatccccaaacggtgtttcctcgctactgtgttag

SEQ ID NO: 269382 - DNA, 100 bp, Homo sapiens
aagacctgccggagccatggaggacgaagtggtccgctttgccaagaagatggacaagatggtgcagaagaagaacgcgatctcccttgagtttagaaat

SEQ ID NO: 269383 - DNA, 100 bp, Homo sapiens
gtaatgaaatcccttccacagacgtcactgataaaaccggtcgggaacatctctcggtcagccaaagaggagcaaagagtcatccacctcaatcatgttc

SEQ ID NO: 269384 - DNA, 124 bp, Homo sapiens
tcaaaccccggggctactctgagtgcatcgtgactgttggtggagaagagagagttgccaaagagatggatgagactgttgctgagttcatcaagaggaccatcttgaaaatccccatgaatga

SEQ ID NO: 269385 - DNA, 83 bp, Homo sapiens
ttcttcccaatgatgcttcctacttcctttccgtgcataagaagccgaatggctgaaggtgatgtggccgccctcaaccgacg

SEQ ID NO: 269386 - DNA, 100 bp, Homo sapiens
gtttatggacaggtgtatgcctgaagcatttaaaaagctgtatgcaggagctattcttgaagtttgtggatgaaaattgggaaggttccctcaagtccaa

SEQ ID NO: 269387 - DNA, 101 bp, Homo sapiens
aaggggcacagcgaactctcatggaggcacttgtggcttcgtacttaataaagagtcatttcctacagtgtaaagaggacaacccggactttgaaggcgtg

SEQ ID NO: 269388 - DNA, 90 bp, Homo sapiens
aaggagctgagagaccctgtgacctcgggactcaacacctcggtgccacaagtatatggttatgatgacttgcagatgcttcagacaaga

SEQ ID NO: 269389 - DNA, 74 bp, Homo sapiens
atagactgcacctggctatcccaaccaggagggacgataagcatcctgaggttagcattacacttctcccagtg

SEQ ID NO: 269390 - DNA, 75 bp, Homo sapiens
gtttaacgatgatggtgactgcctggatccacgtcttctacaagagaaacaccaagggacccacgacaggcctgc

SEQ ID NO: 269391 - DNA, 75 bp, Homo sapiens
ggctccttcaaataaagccacagctgctgattcattgtttgaccgacaggatctcagtggttcaatagcatcccc

SEQ ID NO: 269392 - DNA, 75 bp, Homo sapiens
gcacaagctggagcccaactgataatccttgaacatgatgggcttccccaaggatttattgacattgctacttga

SEQ ID NO: 269393 - DNA, 101 bp, Homo sapiens
gagttaatctcctcagaaatcactaaatactactctgaggggcttagaaattaacagggcccccttgtatttgctggtcctatttttatgaaccatcgaga

SEQ ID NO: 269394 - DNA, 99 bp, Homo sapiens
taaaccactgggaaaactgaagagagctagaacagttcaccgagactcagtattccctgggcctccgatttgcagttccacgtcttgagaaaacaaaca

SEQ ID NO: 269395 - DNA, 75 bp, Homo sapiens
caaagctatcatcctgccaaactccaggctcagatgtcacaggaccgtataatagacgctggccccaaaggaaac

SEQ ID NO: 269396 - DNA, 113 bp, Homo sapiens
gaaggccctatcaggacatggagtatgaaagacgaatccaattctcagttttgaactacctatgaatttggcaaactggtttcctccaccaagaatgagaacaaaaagagaag

SEQ ID NO: 269397 - DNA, 50 bp, Homo sapiens
tttcctacagttcttgatattacagctcttccaccaaagccacctaagcc

SEQ ID NO: 269398 - DNA, 90 bp, Homo sapiens
ttgccagctgggaggaggccgtggtgtctctacctgttcaactcggctcccaccccgtggccaggtacctaggctccgtggactaccgct

SEQ ID NO: 269399 - DNA, 96 bp, Homo sapiens
ttctgaagaagtggctgtagggagcatagctgctacactgaagatgaagcaaggcccaatgacccaggcgtttggaccattttcagaaaaatgtga

SEQ ID NO: 269400 - DNA, 100 bp, Homo sapiens
cggaggctgcgtcatggctgcggccaccggggacctggctgctcggaactgcctggtgacagagaagaatgtcctgaagatcagtgactttgggatgtcc

SEQ ID NO: 269401 - DNA, 82 bp, Homo sapiens
tcctttcccgtgcagacatggcctctggcaccaccaccaccgccgtgaaggaggaagaaggcacctacgatcaaactctgga

SEQ ID NO: 269402 - DNA, 50 bp, Homo sapiens
ggcggccagcaggaggctgatgaagattttcgacaatgaagccaaagacg

SEQ ID NO: 269403 - DNA, 101 bp, Homo sapiens
gctaaactcaatgctgctgtgtgggaagaagatttgtaaagaaaactcttagtttgtgaaagagacagacaatgaagtaagaatgcgactattgcagttcg

SEQ ID NO: 269404 - DNA, 132 bp, Homo sapiens
gcagatgtgaaatctggcaactatacagtgttacaagttgtggaagcccttggggatgccattattacttgcaatcctgaggaattcatagttgaggcgctgcagcttcccaacttccagcagagcgtgcag

SEQ ID NO: 269405 - DNA, 75 bp, Homo sapiens
gggtgacaaccgcgcgccccacctttccccacgtggccgcgaagaccgggtccaggtgcaggtacagcagtctcc

SEQ ID NO: 269406 - DNA, 73 bp, Homo sapiens
cctgtcacctcatcacccctgcagcgcctcagctggtgccgacaagaaagccgaggctggggctgggtcagca

SEQ ID NO: 269407 - DNA, 100 bp, Homo sapiens
ccctgtgcaggcctgctcctccgtttgcaaggttttgctgttactgctcagtgtagtcacaccttgaataagaaatggaaaaccttgggatgttgataaa

SEQ ID NO: 269408 - DNA, 100 bp, Homo sapiens
caaaagttaggaagcaactacgactaaagccattttaccttgtacccaagcatgcaaaggaaggaaatggtttccaaggaacattaaaatctccccagat

SEQ ID NO: 269409 - DNA, 125 bp, Homo sapiens
aggttacccagcagaccatagagctgaaggaagagtgcaaagactttgtggacaatgagagtccctacactaaatccgccagccagacaaagccgcctgatggagcgttggctgtgaggagacag

SEQ ID NO: 269410 - DNA, 75 bp, Homo sapiens
cccgcgcctctcttcgcctcgcctcgggacccgcggtccccgctcttgctggttgattcttcaccacactgaaac

SEQ ID NO: 269411 - DNA, 82 bp, Homo sapiens
atcagccactaatgaagttgggaactcagaccgtaccttgcaacaagtggggatcaggaggcctggcagaaaggagtcctgt

SEQ ID NO: 269412 - DNA, 75 bp, Homo sapiens
aaactcctggagttccagctggcactcaagacccagattgatcactatgttggcatcgcccgagatcagaccaag

SEQ ID NO: 269413 - DNA, 96 bp, Homo sapiens
ttggggactgggattggcatgctttagctatctgaacgaaacttccctttggggagttaagttttccagcccctgtcaccggaagaacagtttgag

SEQ ID NO: 269414 - DNA, 95 bp, Homo sapiens
aggtggagcaataccgcagagagcgagagcacgaattccagagcaagcagcaggcgacctgtgaccgcatcaagcagtcagcagctggcaccaag

SEQ ID NO: 269415 - DNA, 95 bp, Homo sapiens
ctcggtactcttcagggatgagtcatgtggcagtggaaaatgcgctcgggctggaccagcagcttttcctccgcaaccatgtctgacaaacccga

SEQ ID NO: 269416 - DNA, 82 bp, Homo sapiens
tggaagtacctcattttcaccatgagcttgtatatgaactgccaatggctctaatgaagatagaggagaggttgcagatgaa

SEQ ID NO: 269417 - DNA, 87 bp, Homo sapiens
acgggggaacaatccccaagaggcatgaactggtgaaggggccgaagaaggttgagaagattaactgctgaagtactgatcgagttc

SEQ ID NO: 269418 - DNA, 75 bp, Homo sapiens
catgttctgtgcattgcaagtgtgccaggtgctaaagtcagagcagaaatttatgaagcatttgaaaacatctac

SEQ ID NO: 269419 - DNA, 75 bp, Homo sapiens
ggacgaggggctccgggtcttccagagcgtgaagatcaagatcgctgatgaacttattagtcctaaagacattga

SEQ ID NO: 269420 - DNA, 83 bp, Homo sapiens
ggaccagcgcgggtgcgcagacgaaaggcgctctttgccagctgaaagatatgatgcttcctggtgtgtttagtggttggtgc

SEQ ID NO: 269421 - DNA, 73 bp, Homo sapiens
aaagcctttgtgattctcctcatcagaatctctcaagagttattgttgtgggtaatccagccaataccaactg

SEQ ID NO: 269422 - DNA, 75 bp, Homo sapiens
ttgaagccttcatgaaggcaatcgggccatgctggataaggagctggctgcctctgtgaacatcctactcaaggc

SEQ ID NO: 269423 - DNA, 71 bp, Homo sapiens
gtgcagtgcgagacgctagaggatgggaatttcttagccataggctcacatgacaactgcatctatatata

SEQ ID NO: 269424 - DNA, 83 bp, Homo sapiens
ctcagatctgtggagcagatccgatggagaggctgagctgctccaggacttggggtctgtgtgaaaatgtgtgaccctgccaa

SEQ ID NO: 269425 - DNA, 75 bp, Homo sapiens
cctctgcccccccttccccacgcaaccccagatccatttacactttacaaaccactcacgaattcttgtttggtg

SEQ ID NO: 269426 - DNA, 50 bp, Homo sapiens
gttttgaattcacgcttatggtagtgggtgtgatgaatgcagactctgct

SEQ ID NO: 269427 - DNA, 98 bp, Homo sapiens
tttggttacctatgtacctgttaccactttcaaaaggaaaaccttagcactggcaagaaccatggacattccccggtctgtgcagaacttcaggttct

SEQ ID NO: 269428 - DNA, 100 bp, Homo sapiens
ctgtttgtaattgtgccggttcttggacccttggttgccttgatcatctgctacaactggctacatcgaagactagcagactggggcagcacctactccg

SEQ ID NO: 269429 - DNA, 100 bp, Homo sapiens
ctcctcgccagcagccgtccggagccagccaacgagcgtcaagtaagggagaattgactacgcttatacatcagcttcaagaaaaggacaagttactcgc

SEQ ID NO: 269430 - DNA, 75 bp, Homo sapiens
gcagagaagaaatatttttctttaaagcctgaagaaaaggattctggaacttttcaaagcctgactctcttcttg

SEQ ID NO: 269431 - DNA, 75 bp, Homo sapiens
tctaaaaagccctcagtaccagagacagaagcagatggattcgtccttttagttttctggatatgccgcagaagg

SEQ ID NO: 269432 - DNA, 74 bp, Homo sapiens
gctgttactgcttggagtgcctcaccgagccagtgtaaacaggaacatcgataagtagtgtaaaaacttgcaca

SEQ ID NO: 269433 - DNA, 98 bp, Homo sapiens
cggagcgctgaggcgggcgttttcttggatgaattgcttgctttggaggttgaaatcacaaagattagacacctttttagataggtgttcttcagcac

SEQ ID NO: 269434 - DNA, 75 bp, Homo sapiens
aactggcccggaaacaggaggacgtgaggcggaaccaaccctcctggccatgggaggggccgtggtggacgaggg

SEQ ID NO: 269435 - DNA, 90 bp, Homo sapiens
ggcccggcatgggttaccgctgctgcccctgctgtcgctcctggtcggcgcgtggctcaagctaggttgcccccaagtttcctggcagtg

SEQ ID NO: 269436 - DNA, 100 bp, Homo sapiens
aagaaattagacaagaaacattggaaaagaaatcctgataagaactgcttttccaagccttatgcatttgatcgggtgttccagtcaagcacatctcaag

SEQ ID NO: 269437 - DNA, 98 bp, Homo sapiens
gtgcatgtgaagttatcaaaaacagctatttctgcatttgaagtccagccaatttccactgaggtccacgaaggtggagttgctcgatttgcatgcaa

SEQ ID NO: 269438 - DNA, 90 bp, Homo sapiens
gcagctggactatggcatctatgttatcaaccaggacaggaagatgtcacccaagcgcatagctaaaagaaggtcccccccagcagatgc

SEQ ID NO: 269439 - DNA, 100 bp, Homo sapiens
ggaagatcaagaagctcattaagagcttggaggcggcccgcgggactcgctcagcagcagcctgaaaacttgctacaagtatctcaatcagaccagtcgc

SEQ ID NO: 269440 - DNA, 75 bp, Homo sapiens
gtttttatcagaaaaggatcggaaaagaattttgaacacttcagttatggaagatcaaaatgaagatgagtcccc

SEQ ID NO: 269441 - DNA, 99 bp, Homo sapiens
ccacggccctcacgccagcctggatggagaacccctacatcaaggtgacttgatggagggtgagctctattctgctctcaaggaagaagaagcatccga

SEQ ID NO: 269442 - DNA, 51 bp, Homo sapiens
cttgcttcgagaaaggaaacctgtgagattcgcctcgtcacttctggtggt

SEQ ID NO: 269443 - DNA, 75 bp, Homo sapiens
tcgccagcagcccaagagcctcaaagtgatggcaagtgtgtgatttgtgactcctatgtgcgtccctgcactctg

SEQ ID NO: 269444 - DNA, 90 bp, Homo sapiens
tgctgcccttccggagtccgccccgtgaggagaatgatgatcatgacgcagtcctgaggtttaatggggcacccacagccaacttccaac

SEQ ID NO: 269445 - DNA, 75 bp, Homo sapiens
cggagaggagcatgaatggagcaaaatggcggatcatgtgcagggccaattcctgtccccccagcagcatggcat

SEQ ID NO: 269446 - DNA, 82 bp, Homo sapiens
cggaagctggttttcaggccacaaatgctttcacaggagtgcctgtgaagaaaacggggtattgccctgaggcttatattct

SEQ ID NO: 269447 - DNA, 75 bp, Homo sapiens
cagcagcctggacctcagcactggcagggaaccctgagcagaacacatgcacaaactcatgccataccctaaggg

SEQ ID NO: 269448 - DNA, 114 bp, Homo sapiens
atggcggacttcgacacctacgacgatcgggcctacagcagcttcggcggcggcagaggatgatgattattctccaccgtctaagagaccaaaggccaatgagctaccgcagcc

SEQ ID NO: 269449 - DNA, 82 bp, Homo sapiens
ttgatgccaacactctggggaaggtggccagtggcatctgtgacaacttgcttgctcgagtgcagtagcgagatctcagctc

SEQ ID NO: 269450 - DNA, 100 bp, Homo sapiens
ggccgctcggccggcagcatccttggggagagcagcaccgaggccagcaagacgctgcccgccatcgaggtcaccctcggagtccagctcagagtcccgc

SEQ ID NO: 269451 - DNA, 125 bp, Homo sapiens
ggagctgcagcccgagcgcggtggtgccctcagccccgtcctcttgtcctcctcagcctcgctgtcttgtcgacggtctcactgatgcctcttctgcattcaaagttcctcgacccgggccagat

SEQ ID NO: 269452 - DNA, 75 bp, Homo sapiens
tagcaccccgagaaccgtcagtttgagccagatgcactgctcagcacgcaggcatgtgaggaagctgggcttaaa

SEQ ID NO: 269453 - DNA, 58 bp, Homo sapiens
gctgtgtcatagacgtccgacgtgtctggagcaggggagagaagacagaagaggttgg

SEQ ID NO: 269454 - DNA, 75 bp, Homo sapiens
tctaaatcaggaatggattgaaatctaatgaaccgaaactttgggggcactatgaacgaagaggagcagtttgta

SEQ ID NO: 269455 - DNA, 145 bp, Homo sapiens
cgaggagcaccccgtgctgctgaccgaggcccccctgaaccccaaggccaaccgcgagaagatgacccaggaaacctgtaggaagtgtcagggactctggaaagaacataatggcctcacctgtgaagagctggctgaaaaagac

SEQ ID NO: 269456 - DNA, 101 bp, Homo sapiens
gcatttgtggaccagtgccatttacagaacaaggagtaagattgaggaaacttgaatatttttgtatcctgaagggagaaatggatgaagaagaaatggat

SEQ ID NO: 269457 - DNA, 100 bp, Homo sapiens
ctaggctgccgggcgctggtcgtcagcgccgaggctgggctgaggcgccgcggtaccatgaggcgccggatgtctccccgttcaatgttgtggcctggca

SEQ ID NO: 269458 - DNA, 85 bp, Homo sapiens
ggaggggattttgtcagcttgtcgtcaagagatcaactgtggcaaccctccagaaatgcggcacgccatcttggtaggaaatcac

SEQ ID NO: 269459 - DNA, 83 bp, Homo sapiens
cgcctcagcatctggtacagccgagagccttcacgtaaatgggtccagtcatgcctcccagtaagaagccagaaagctcagga

SEQ ID NO: 269460 - DNA, 74 bp, Homo sapiens
aggtggtggagtgacctggccccagtgctgcgtccttatcagccgagccggtgctttgaagaagagtctcacag

SEQ ID NO: 269461 - DNA, 74 bp, Homo sapiens
cgggtccgtgcgcccagcgtcccagggcccaggccgagcagatctgccggaggcgctgggcaatgaccccggga

SEQ ID NO: 269462 - DNA, 100 bp, Homo sapiens
agccgggccgcccgggcgcagtctttaaccatggcgtccctcttcaagaagaaaaccgtggatggtaatgaatttgggcatcctgaatggttagacttcc

SEQ ID NO: 269463 - DNA, 74 bp, Homo sapiens
gacaagacacttttcagaaagacaggatattaatgcacacgcctgtgttactggtaaacccatcagccaagggg

SEQ ID NO: 269464 - DNA, 75 bp, Homo sapiens
cagtggagtcttggaggagccagtacagctgaagaggaggcaaatgaagaagatgtactgggagatgaaacagag

SEQ ID NO: 269465 - DNA, 50 bp, Homo sapiens
gccgtcgatacatcctatcttcaaggaggaggagggggccagtgggggag

SEQ ID NO: 269466 - DNA, 82 bp, Homo sapiens
tcagcctcctaagtagctgggactacagcaaaatgatgcttcaacacccaggccaggtctctgcctcggaagtgagtgcttc

SEQ ID NO: 269467 - DNA, 100 bp, Homo sapiens
cagaaggccattgacatctacgaacaggatgccaggccaaggtggagcaagcggtggagacagagccggagcccgagctgcgccagcagaccgagtggca

SEQ ID NO: 269468 - DNA, 75 bp, Homo sapiens
ctgttaaatgtgcctgaaaagcaatttgcaatctttgcattagcttgaagaagtcatggaaaaagaaacttacaa

SEQ ID NO: 269469 - DNA, 100 bp, Homo sapiens
agccgtatgagtcctacacagggcagaatgtgaagctacggccaaagatgaagaggaagcctttctggattggagtgatgatgatgatgatgatgatgat

SEQ ID NO: 269470 - DNA, 100 bp, Homo sapiens
attttatggaattggagaaaagtggtgctctcctagaaagtgggacttatgaaggcttctagtgaggacgttgccagctccccggagcgccactacacgc

SEQ ID NO: 269471 - DNA, 100 bp, Homo sapiens
tccagaacatctgggagaatatttaatggaaaatcgcttggttaaaacctgacacttttaacagtgtcccagaagcttttgttgacaattccagtttccg

SEQ ID NO: 269472 - DNA, 75 bp, Homo sapiens
cgcgcttctgctctcagtgtcccggacttcaggtccgggcccaccagctggtcttgccaccttgcgacgtagtga

SEQ ID NO: 269473 - DNA, 100 bp, Homo sapiens
tgccactcaacacctcttcacgtagctgaggtatgttcaagatcagtaaatttagaaaaagcttcagagtctttgaaaggaaacatggctgcttttctaa

SEQ ID NO: 269474 - DNA, 100 bp, Homo sapiens
ccggagcccgagcctgaggccgactactacgccaaggaggtcacccgcgtgctaatggtggaaacccacaacggaagctcttcgtgggcggtcttgactg

SEQ ID NO: 269475 - DNA, 100 bp, Homo sapiens
aacgagaatgaagccatccaatggatgcaggaaaactgtgtttaactgctgaagagatcttttcccttcatggcttttcaaatgctacccaaataaccag

SEQ ID NO: 269476 - DNA, 74 bp, Homo sapiens
tcagatcgcatccaggagaaggtggactctattgatgacaggtgtacagtgccaccaacgtggagctggtgaca

SEQ ID NO: 269477 - DNA, 83 bp, Homo sapiens
gggagagcatggctcagcggatggtctgggtggacctggagcaattctgtggtgttcttggtcacacatttatggagtttctg

SEQ ID NO: 269478 - DNA, 100 bp, Homo sapiens
tgttctcagtagtccgaactctaatatgagcagcatggtagttacaggatgaaatctttgacatggtaaaaccaaaggatcctttgaaaatctctcttca

SEQ ID NO: 269479 - DNA, 83 bp, Homo sapiens
gagctggacggcgagcgcgagcggcgcgagaaagaaacccctcctggagtttccccaaagccatggacagccctagtcttcgt

SEQ ID NO: 269480 - DNA, 100 bp, Homo sapiens
aaatacaacatagagaaggacattgcggctcatatcaagaagagtaattccctcctggtcccagacagtctaagaggcacagataaacgcagaaatggac

SEQ ID NO: 269481 - DNA, 82 bp, Homo sapiens
acatttaattttagggtcctttatatagaagggagagtaggcgtccaggtgatcccccaaacagcatgtgctcagccccaga

SEQ ID NO: 269482 - DNA, 80 bp, Homo sapiens
taactaaactccaaatattagagcttagagaaaaccagttaaaaatgttgcctaagtcccgttcaagaagttcttccagt

SEQ ID NO: 269483 - DNA, 74 bp, Homo sapiens
tgagttcctacttgcaaaagaaaagtgacgtggaggatcactcgcaaagagagcaggatgaatggacagtacca

SEQ ID NO: 269484 - DNA, 50 bp, Homo sapiens
cctggtgaccttctgtgaagaactggggagggtgaggacaaaatcttctt

SEQ ID NO: 269485 - DNA, 90 bp, Homo sapiens
cgacgctgctgggtccgctgagcggggcgacccgaggacactgtaatttatgatcgactggcagagacgtcaaaatacaaagaaattacc

SEQ ID NO: 269486 - DNA, 92 bp, Homo sapiens
gcggctctccaagttctaccagccctacggaggaagatgagtactcagaactgcgatcagaactcagccagagccaacacgaggtcaacgag

SEQ ID NO: 269487 - DNA, 88 bp, Homo sapiens
cacctcttctgcccggacctgctgcggcctctttgcacctccacgtgccttcagtgcaatctgacgagctgcttcacagtaaacactc

SEQ ID NO: 269488 - DNA, 100 bp, Homo sapiens
aagtttctgagcatccctgcaatgaagagaacccagggaagttcctttttgaagtagttccaggctttgatgcggcctggaagaattgatagaatcatct

SEQ ID NO: 269489 - DNA, 90 bp, Homo sapiens
ttggatgattcgtagctaagacttcgcgacacccttgaagctgagaaatggcgtccgacctccgatcatgaacgggcccctgcacccgcg

SEQ ID NO: 269490 - DNA, 100 bp, Homo sapiens
agtcctggtgaaagttaaagacccaacagaatacactggacctgaaagttatgtggctcaaatgattgtggattcctacaggaagcaagtagtaattgat

SEQ ID NO: 269491 - DNA, 51 bp, Homo sapiens
ggagaagccctcgagcatccccacagagcctagaacagaattccagccaag

SEQ ID NO: 269492 - DNA, 82 bp, Homo sapiens
ctctcatctcagcctccaaaagtgctggcattacagcattggcatcaacaaaagtcagaattcccgggaacttgaacagagg

SEQ ID NO: 269493 - DNA, 75 bp, Homo sapiens
attcgttttcaggagcatctccagattgttaaaggaaatgggctggcaggaagacagtgaaaatgatgaaacatg

SEQ ID NO: 269494 - DNA, 83 bp, Homo sapiens
ctgagcgatcccaccgaagcagcgtgtcctccgtgggagcccgaggaattgaatgatctggcacgggaccctccagcacagtg

SEQ ID NO: 269495 - DNA, 75 bp, Homo sapiens
gcgacaacccgtcctctcccgagtttttcatgtaaaacttccttttcctgtagatcaaatcacagatcttccaag

SEQ ID NO: 269496 - DNA, 100 bp, Homo sapiens
gttcttcacggtgatattccacaagaaaaggaagatggcgccatttctaccatagtacttcgaggctctacagacaatctgatggatgacatagaaaggg

SEQ ID NO: 269497 - DNA, 100 bp, Homo sapiens
caagaatcctcatgctcctactatccatttcaactacagatactttgaagtagaagaagctgatggtccaatgatgcatcagcagcctccttctcagcaa

SEQ ID NO: 269498 - DNA, 100 bp, Homo sapiens
ctctatatgaaaaggaactccctgacatccttgggggacttgatctcatcttcatgccaggccttgggtttgacaaacatggcaaccgactggggagggg

SEQ ID NO: 269499 - DNA, 51 bp, Homo sapiens
tctcaatgctttgaactggttaaacaaggcagctgaaaaagttggatgaag

SEQ ID NO: 269500 - DNA, 75 bp, Homo sapiens
tcgccgccttcccgcgccccgcagcgccccgcagagcagtcgaggtgactccccggacagctcaacaccaaagct

SEQ ID NO: 269501 - DNA, 96 bp, Homo sapiens
cgtcaacgacaagcttatccttccctacagcctcagcgagttaagtgggcagaccaacatccacctcagcaaaaacttcttcctgacgaatcgcgc

SEQ ID NO: 269502 - DNA, 50 bp, Homo sapiens
cggccagccagtcatcaaacaaactcccacgttaacccacgaaaccttca

SEQ ID NO: 269503 - DNA, 75 bp, Homo sapiens
ttccagcagtccagcacggccaagtcagccacctggacgatggagaaggatgaaactgtgagtgactgctcccca

SEQ ID NO: 269504 - DNA, 96 bp, Homo sapiens
cctcagacagatcgccggggaggcagcgcgggatcccagcctcaggcgtgcgcggacggtgtgcggaaatacaaacctggtcgatgtgatgatatt

SEQ ID NO: 269505 - DNA, 98 bp, Homo sapiens
gccatgtccatggaggaccccttctttgtggtgaaaggaccaatgatgccttaggagccacctggaattggctgtacttcatccccctcatcatcatt

SEQ ID NO: 269506 - DNA, 100 bp, Homo sapiens
cttcctggtctttttgaatacgatcatattgatggttgaaatagctgtgtgttctcatttcacccaaaacctttggacagtgcagggcatagaagattca

SEQ ID NO: 269507 - DNA, 95 bp, Homo sapiens
caggtgacagcaatcagctggcctggtttgatactgacctgtaaatcatcctttaggtgatgctgtggagtcttcaaaaagcccgaccactctgg

SEQ ID NO: 269508 - DNA, 125 bp, Homo sapiens
cctgcacaccaagggcgcccttcccctggatacggtcactttctacaaggtactggaggcgcaaagaaggcatcagaaggagaaatctggcatcatacctacctcaccgacgccctacacttaca

SEQ ID NO: 269509 - DNA, 75 bp, Homo sapiens
accgcccaacatggcctcggaggttgggcccatgagatgtgtgctctgtatattccggaggtacaatttgccagt

SEQ ID NO: 269510 - DNA, 91 bp, Homo sapiens
ctgagcccgtccgtccgccgccaccacccactccggacacagaaaaatggctacaaacttcctagcacatgagaagatctggttcgacaag

SEQ ID NO: 269511 - DNA, 82 bp, Homo sapiens
cccaagccctggtgccaggtgtccatccccgtgctgagatccataatgagatggcatcaacatcagataaaggtgcccaagg

SEQ ID NO: 269512 - DNA, 100 bp, Homo sapiens
gtgtgcttctaccggaggcgggacatctccagcaccctcatcgccctggccgacaagcacgcaaatccacatgaagaccatgcccgccgccatgttcagg

SEQ ID NO: 269513 - DNA, 100 bp, Homo sapiens
tataacctcatacccagtgacttgaaggagcctccccagcctcctagatatctttagaggacattcaagcttttgaaaagacatacaaaggttcggaaga

SEQ ID NO: 269514 - DNA, 97 bp, Homo sapiens
gtgaatactgctacagaagtagagccaaaggatggtgagattgttggcctttcaggaagagtgcttaagggtgctggaaatgtaaacaagaatagac

SEQ ID NO: 269515 - DNA, 75 bp, Homo sapiens
atcctgtcacttctggatgtgaggttcctaaagagaaagatgaaatggtagagcaagagtttaaccggttgctag

SEQ ID NO: 269516 - DNA, 75 bp, Homo sapiens
cccctcctcccctagcttcactcaatgttagtaagggcatcatggtgggaggcttgaagaggaaacactctgatt

SEQ ID NO: 269517 - DNA, 75 bp, Homo sapiens
gggctgctgtgcggcggcggggtctgggccgcgcgagctgcatgaaagcggttacgatgctggcaaagccctgca

SEQ ID NO: 269518 - DNA, 50 bp, Homo sapiens
ctcccacctgtcctcaggcatatcaaaggcatgaatgctttacagttgca

SEQ ID NO: 269519 - DNA, 90 bp, Homo sapiens
gtaaaattatatccaaatatgactgcggtactgcttcataacacacaacttgatcaacgaaaggagtccagctacttgctcttttagttc

SEQ ID NO: 269520 - DNA, 100 bp, Homo sapiens
tttcccagctgtacctggaagctgagcagcagcttgccgctctagaaggtttttcgttggaatatacgttgcacatttatggcgattctgagtgtgaggg

SEQ ID NO: 269521 - DNA, 100 bp, Homo sapiens
caaagttgcatttcctcgtcgagcgcaacccaagtttcatccaggatcgagcagggcgaatggggggggaggcacccgagctggccctggacccggtgcc

SEQ ID NO: 269522 - DNA, 99 bp, Homo sapiens
aattaacaaagaaccacagaattctggacaatcaaaacttaactcctggatacagatcccagtttctgacctgtagcatagtccctctctctgaagaac

SEQ ID NO: 269523 - DNA, 128 bp, Homo sapiens
ccgcagaggccgggctgggcctggaggactgtcggctccagaaagaacaccgagttcgggattcctaccggaagcaggtggtcattgatggggagacgtgcctgttggacatcctggataccgccggc

SEQ ID NO: 269524 - DNA, 100 bp, Homo sapiens
agccatggaaaaattaatcaacagagtgggacctaatggtgagagacttcaagggctaccactggacccttcccctgtcttgaaccctgagccggcacca

SEQ ID NO: 269525 - DNA, 83 bp, Homo sapiens
gatcattcgaacgcgaatctatgagtccaagtactggaaagaggagtgctttggacttacagcaaaagactgttgaagtagag

SEQ ID NO: 269526 - DNA, 100 bp, Homo sapiens
gcagttgctcgaagaactcgagcgacagagacaagctgagcttgccgcacaaaaagctagagagatcctgagagtgagaagcctgactgaccccgcctag

SEQ ID NO: 269527 - DNA, 98 bp, Homo sapiens
ctctgggactcgtctggcgtccctcagacctgtcatttactccatcctttatagtgatgctacaggacgaagaggaatggataaaaacattggcgagc

SEQ ID NO: 269528 - DNA, 75 bp, Homo sapiens
gggggcaccaccctccatgcctttgcagatgttcgggcagcggcgcagcgcgcaggcgttggagctggcgcacat

SEQ ID NO: 269529 - DNA, 101 bp, Homo sapiens
caggcggacgccgctgaggagcgcgcgggcaccctgcagcgcgagctggaccacgagaggaagctgagggagaccgtggatcatccatgccatggagtatg

SEQ ID NO: 269530 - DNA, 98 bp, Homo sapiens
tccaacacacttataatgctcgcagataagcatgctagtctgaatttcctgctgctgttcacaaagatgctttttatctttaactttttgttttcccc

SEQ ID NO: 269531 - DNA, 90 bp, Homo sapiens
agcaggagctgagctgggaggaggctgcccggcgcctggaggtggccatgtaccccttcaagaaggactggacctacagagacatctggg

SEQ ID NO: 269532 - DNA, 90 bp, Homo sapiens
gcggcctcggctcttccagccaccccctctccagtctgctcaggatctgacatgaagaatcaaattgaacagttaggcaagaaatataat

SEQ ID NO: 269533 - DNA, 100 bp, Homo sapiens
aggcagaagaaggggaactcctgctgcccactcagcacatgcagatgacaatccaggctctccaggatgaattgcggatccagagggacctgaatcagct

SEQ ID NO: 269534 - DNA, 100 bp, Homo sapiens
gaggaacatggcgttgctggtgcgagtccttgtggatgggcaggtggtagcactgctggtacagaatctggagcgcctggatgagtctgtgaaagaggag

SEQ ID NO: 269535 - DNA, 90 bp, Homo sapiens
ctccaaagtagctgagactacagcagacctgcttggactgtaagaaaaatttttgcatgacctgttcgagccaagtagggaatgggcccc

SEQ ID NO: 269536 - DNA, 101 bp, Homo sapiens
cagagagggaagagattcagccagcacactcctcgcgagcaagatgccatggacaatattaccaggcagaaccaattctacgatacccaagtcatcaaaca

SEQ ID NO: 269537 - DNA, 75 bp, Homo sapiens
catggacacagttttgacagtaattcttttgggccggtttattttcttgaaaaggctccaggcttcggcttggaa

SEQ ID NO: 269538 - DNA, 100 bp, Homo sapiens
tggaacagttcagcatccccacctgtgtgctcaatggagagcttccactgcgctccaggaaagatatgatccgccaaatgatgattaaaatatttcgctg

SEQ ID NO: 269539 - DNA, 123 bp, Homo sapiens
ctcggtgtgcgcccccgcgagagccggggccccaggcccgccggacaccatgaaccacctggctcttgtcaggatggtgaagctgttcatcggaaacctgccccgggaggctacagagcagga

SEQ ID NO: 269540 - DNA, 87 bp, Homo sapiens
aggacgcaaagttctccggcgagcttcggaaccaaaaagaagcttcccagagccggggccaggagccccaagcgccctctagcagca

SEQ ID NO: 269541 - DNA, 75 bp, Homo sapiens
ggctccccaagctggctggccattttgctgctgtgtgtggagattagccgatgaattacatatgccatctctccc

SEQ ID NO: 269542 - DNA, 100 bp, Homo sapiens
aacatcgtgaacagcatcgtaggggtcagtgtcctcaccatgcccttctgcttcaaacagaatctgtctatgatcttctcccaaaggagttacagttacc

SEQ ID NO: 269543 - DNA, 74 bp, Homo sapiens
gccggtggaggaatttgtggctggctggatctctgagcccacaggcggttttgtgagctgcttccccaggagca

SEQ ID NO: 269544 - DNA, 90 bp, Homo sapiens
gggatattgtggttgataactgtgccatctgcaggaaccacattatggatctttgtcttctttgtgatccgcctcattgctggccctgct

SEQ ID NO: 269545 - DNA, 82 bp, Homo sapiens
aattcactcactttgcaatggaagatatgaaaaacagtagctccgtatcgaatacattgacaaatggatgtgtcatcaatgg

SEQ ID NO: 269546 - DNA, 50 bp, Homo sapiens
gcgtttccgttgtcggcctcccactgcagacactcttgcactcctgtaat

SEQ ID NO: 269547 - DNA, 78 bp, Homo sapiens
tattcaggacccaactgtgaaattgcaacttgagttggtggaaccaagtggctggattcatgttcccttaactgacaa

SEQ ID NO: 269548 - DNA, 100 bp, Homo sapiens
cgccgcccagcccggccccgcccgcgccggaagagccacgccggtgttggagcgggccggagagaagtagagtgggctgcgaggagaaggaaacaggcct

SEQ ID NO: 269549 - DNA, 100 bp, Homo sapiens
gcatctgtgggatctgtaatagaaatctcgagctaatccaagatatggggttccatgtcatttactgaatgaaatggatgcagctaacattgaactgcaa

SEQ ID NO: 269550 - DNA, 95 bp, Homo sapiens
agaagacactccccagggcagaaatagcgaccatggcgagcaattctgtggtgttcttggtcacacatttatggagtttctgaagggcagtggag

SEQ ID NO: 269551 - DNA, 50 bp, Homo sapiens
gaattcaattggctcttgccttatctctggcaggctgccctgagcacgct

SEQ ID NO: 269552 - DNA, 90 bp, Homo sapiens
gggcaggatgaaggcagagcgtgtggcatctccacctcaaggagtcttcctaatattctcaccgatgatcgatttaaagttatgtttgag

SEQ ID NO: 269553 - DNA, 83 bp, Homo sapiens
aatgagtatatttccagcttgcctgctgatgcagacagaacagaagactttgaatatgaggtgccagatagattggaaaaaag

SEQ ID NO: 269554 - DNA, 101 bp, Homo sapiens
tgctgatggtgatggagattttgatgtggatgatgccaaagttttattagacaccaagccctcaaactccctgattcccttcctgtccttccggagctcag

SEQ ID NO: 269555 - DNA, 82 bp, Homo sapiens
atgcaccaatcagcatgctgtgtctagctcaagattggtttatcttggaagctaaagggcattgctcatcctgaagatcagc

SEQ ID NO: 269556 - DNA, 96 bp, Homo sapiens
agcatggggaggagcagcaactgccagccgtggggctcaccaaccaccagctcttcttcgtgggatttgcccagattgccactgcccggaaactga

SEQ ID NO: 269557 - DNA, 51 bp, Homo sapiens
atccatttctcctattgaggagtcaacggtgctggagatctagaagaccca

SEQ ID NO: 269558 - DNA, 74 bp, Homo sapiens
tgagaaaggagctcggggactcccccaaagacaagaggcagccttccaagttttccacccctgagtacacagtg

SEQ ID NO: 269559 - DNA, 100 bp, Homo sapiens
gaggatgtggtgctgcccgagaaggtggacgtgctggtgtctgagtggatggggacctgcctgctgctctgcggccgtcacgatgttctggaagtttgac

SEQ ID NO: 269560 - DNA, 98 bp, Homo sapiens
gcgcccccaggccgctcccggggctcacgggattaacatctgctcgtgcagctgagatcctggcgcgagatggtcccaacgccctcactccccctccc

SEQ ID NO: 269561 - DNA, 75 bp, Homo sapiens
caccagcctcgtggccagctctgcgtctgcggtcaccaccaaggtggctttctagaagatgaccatagaggacct

SEQ ID NO: 269562 - DNA, 75 bp, Homo sapiens
agcgcccccatcccggaggtctccgccggctcccgggccaagaagcttgagagaagaaaaatttcagaaaaattg

SEQ ID NO: 269563 - DNA, 75 bp, Homo sapiens
cagctggatgtttgcgacatcccagagagcttccagaatttctctatgaatcatcatcaagaactctgggagaac

SEQ ID NO: 269564 - DNA, 75 bp, Homo sapiens
tggagaagttgatgactctcgtgaacatagctttaataggtcgaggggagctgcagcgggagtcagacttcatgg

SEQ ID NO: 269565 - DNA, 100 bp, Homo sapiens
atgatgaagagctagacaaggaattactatggaatcttcaacttttgtctgaggtctaaactaaatcataatgcagcgtttatgcagatacccatgggtt

SEQ ID NO: 269566 - DNA, 100 bp, Homo sapiens
caaggaaaaactggagagcttcatcaaaaatagtgatagctttgataagatatggtggtggttttaatgaaagagaaaatgttgaatatatagaaagaga

SEQ ID NO: 269567 - DNA, 100 bp, Homo sapiens
gccacacgcgtacccccgtagcggaaaaacgccccttcccagctgcctgcctgccctagccagctcccaggtgaagagactctcggcttccaggcggaaa

SEQ ID NO: 269568 - DNA, 98 bp, Homo sapiens
ggcaaacgagaattaaatgccgagaaggccagtacggaatatgatgaagaatgggctaagaaaattcagagtgaaaagtttcgctggcataactctca

SEQ ID NO: 269569 - DNA, 87 bp, Homo sapiens
agatccaggtctatttcacgaccaagaagcagttcagaaataccacactattaatgggcataattgtgaagtgaaaaaggccctttc

SEQ ID NO: 269570 - DNA, 82 bp, Homo sapiens
caagcccccctcgcctatgccttcagacatcaccagccaggaccagtccatgggcaattggcagatcaagcgccagaatgga

SEQ ID NO: 269571 - DNA, 83 bp, Homo sapiens
atcaccgacaagatcaccacggacgagatgatcaaacgcctgaagaaagcgtggatacccatcaacgaagttttgatattgga

SEQ ID NO: 269572 - DNA, 50 bp, Homo sapiens
gccatggccgccgccgatgccgaggactccctggaggaaaagcggaagcg

SEQ ID NO: 269573 - DNA, 74 bp, Homo sapiens
ggggaagaaggtccgcgttaaatgcaactctgtgacctgcctgctgcctccctcaacgaccagttgccccaaca

SEQ ID NO: 269574 - DNA, 75 bp, Homo sapiens
taaaagaaggagataatgactacttcacttgcataactaaaggcagtacgccccgaggtgctccgtctgctctga

SEQ ID NO: 269575 - DNA, 82 bp, Homo sapiens
ctgcctcctgaaggagaagaggagaaaacacaggcctattatgtaataaagatgctattaaactacagctggttgaagcagg

SEQ ID NO: 269576 - DNA, 83 bp, Homo sapiens
tggtggcacagcgagccccctttctctagcgacctgcctagagctggaacgttacctccagagcgagccctgctatgtttcag

SEQ ID NO: 269577 - DNA, 75 bp, Homo sapiens
ccgaggcggcggcgaggggcgaacgacccgacgcaagatggcgagtaaagagaacttagaaggttttgactccgt

SEQ ID NO: 269578 - DNA, 83 bp, Homo sapiens
ggcccggggcgcgcagctgcccgccggggcgggctgagctgactgctgcccactttggaggaggcggtgggctccttcacaag

SEQ ID NO: 269579 - DNA, 75 bp, Homo sapiens
actcctataaacacagtggacgtcaataatgaaagctcttcagaggtcagtggctttgtatgactgccgaagtcc

SEQ ID NO: 269580 - DNA, 96 bp, Homo sapiens
gagacaacaacgtgggagcggaagtattgcatcctcacagacagccagttggtattgctcaacaaggagaaggagaaccaagatccaattccctgg

SEQ ID NO: 269581 - DNA, 75 bp, Homo sapiens
atgatattgaggacgctgtcatgtactggataaataaggataagaaactctttaagcctccagtgttagtatttg

SEQ ID NO: 269582 - DNA, 100 bp, Homo sapiens
ccttgaagtatttggctgaggagttttcaatcccaataccagatgacaattttagcatcccagaaggtgaagaagatctggcaaaagcaattcagatggc

SEQ ID NO: 269583 - DNA, 75 bp, Homo sapiens
tcccctgggatatatttttgagaccaaattaatcagcacattgatttataagattgctcttaaacttggtgtgac

SEQ ID NO: 269584 - DNA, 73 bp, Homo sapiens
gttttcaacgttggtcgagagagtcattcagcagttggggaggatactgaggcacacagaggggagtcaccag

SEQ ID NO: 269585 - DNA, 95 bp, Homo sapiens
ctcagccctgtggctgggggcagagctcaggtacgacagtgccagcccacagggccatcctggtggcccgttgtgaagtgatggcagccatgttt

SEQ ID NO: 269586 - DNA, 83 bp, Homo sapiens
ctgctcttccaacaccagtggaagatgatcacatcccagaattaaacaaccaccatgtcgagcaaaaaggcaaagaccaagac

SEQ ID NO: 269587 - DNA, 74 bp, Homo sapiens
tggaaccagctgctaagccagaagcgcgtggagtgcatccgccccaacccttttccccctcgtctcctgtgaga

SEQ ID NO: 269588 - DNA, 100 bp, Homo sapiens
cagcgacggcgtcgggagagcgcgcctagccggctcgcgagttatcctgaatacatgtctaacaattttccttgcaacgttagctgttgtttttcactgt

SEQ ID NO: 269589 - DNA, 100 bp, Homo sapiens
tactccttgtacctcctgcaacccagaaccctggctgaccactttgaaggaggatgctccagcagttttaaccatgctgaccaacgaaactggctttgaa

SEQ ID NO: 269590 - DNA, 100 bp, Homo sapiens
tgacgcagggccaggaggccggggggcggccaggggccgactgtgaagtgattcgcctttgccagtctcatctcgtgtctgctttgttaagttccatgat

SEQ ID NO: 269591 - DNA, 98 bp, Homo sapiens
aaagtttcataggataggactccctcctaagcggaaggcagacagattgctgccaacatgaggggtattgggatgatgcccaatgatattcctgagtg

SEQ ID NO: 269592 - DNA, 80 bp, Homo sapiens
ggggacccagtgcgcccgcatcgtcgagaacactctgctccagccaaggtggtgagggcagctgttcctaaacagcgcaa

SEQ ID NO: 269593 - DNA, 88 bp, Homo sapiens
tctaccaatggacagctctcagtccacactcccaaaagggaaaggcctttccccctggtgctcttcatcctttaccaaagagacaagc

SEQ ID NO: 269594 - DNA, 100 bp, Homo sapiens
ccgaggccagatgcgtttaaaatcgaggagttctcggagtttggaaagatgggcttccccaaggatttattgacattgctacttgagtgtgaacagttac

SEQ ID NO: 269595 - DNA, 100 bp, Homo sapiens
ttcactcctcagcgcgacgtcgtgtcgagttcccaaaaagctccgcaggggctgtagggagggtgtgtttgaccatcgaatgaagtgctggcagaaatgg

SEQ ID NO: 269596 - DNA, 76 bp, Homo sapiens
actcatcttgcacttactgtgaagaccaacatttttgctgctgataaagatgatagttcagaagacatttcagtgc

SEQ ID NO: 269597 - DNA, 75 bp, Homo sapiens
gtctccaaattcgcctccatctgtaccatggtaagaatgattgatgttggctgatattggagtgctcattcacat

SEQ ID NO: 269598 - DNA, 100 bp, Homo sapiens
ctgcgcgaagctggccaaagcctgcccagacggctcacctgtgcgggatggaacaaaaggctcttgtcaggatggtgaagctgttcatcggaaacctgcc

SEQ ID NO: 269599 - DNA, 83 bp, Homo sapiens
aacgacgcggacatggtcatgagctttgtgaacctgggcgccatgtcagaaccggctggggatgtccgtcagaacccatgcgg

SEQ ID NO: 269600 - DNA, 100 bp, Homo sapiens
ggacgccgcagagcgccgaggaggctttcctgctggtggcaaccgcctacgagacactcaaggtttttcgttggaatatacgttgcacatttatggcgat

SEQ ID NO: 269601 - DNA, 102 bp, Homo sapiens
aaaacctgaaagagctatatttggtgtcctgtaaaatcacagattatgtttcttcagatggaggtactgagccctctgccttagtggatgacaacggtagtg

SEQ ID NO: 269602 - DNA, 102 bp, Homo sapiens
gggaagcactacaagggtcctgaagtcagttgttgcatcaaatacttcatatttggcttcaatgtcatattttggaaacgtggcatctcatcggaagaggag

SEQ ID NO: 269603 - DNA, 100 bp, Homo sapiens
cggacagcgggctggagcctgacgagctggcggggcatttgatgtagaactactgtacatagcacagttctttaaaattccaatagcagaaattgctgtc

SEQ ID NO: 269604 - DNA, 80 bp, Homo sapiens
agcgcgcccaactgcatcctcctggccatgttcctcgtccactacgggcatcggtccgtaaaagccctgggctcagccag

SEQ ID NO: 269605 - DNA, 96 bp, Homo sapiens
cgcccctccgagctggggttggacgctgccagtttgcacagcagcaggtgagaagccctaccactgcaactgggacggctgcggctggaagtttgc

SEQ ID NO: 269606 - DNA, 89 bp, Homo sapiens
ggggacccgggacgacgagtacgactacctattcaaagtgtggacgaatgtggaacctcgctctgtggctgtgttcccttggcactcct

SEQ ID NO: 269607 - DNA, 82 bp, Homo sapiens
ggacggcgtggaccacatagacatttacgcggatgtcggcgaagagttcaaccaggtccggcctctttggcctacccccgtt

SEQ ID NO: 269608 - DNA, 90 bp, Homo sapiens
cactgagaccagagttagtggaatccacatatctcctctaccagtgaccaagaccatctgtgctcctcagtgtaatggtcactgctttgg

SEQ ID NO: 269609 - DNA, 98 bp, Homo sapiens
aaaaatttttcaagaattggtagaaggtgtgttttacatacataacatgggaattgtgcaccgagatctgaagttctgcacggagctaaaccagccga

SEQ ID NO: 269610 - DNA, 90 bp, Homo sapiens
gataaaggaaatctttgggaaagtcagtattttatatagcaagcaattaagttggaatatgcaaggttggttaagttggcccaagaagac

SEQ ID NO: 269611 - DNA, 100 bp, Homo sapiens
tggaagactaccaggctgcggaggagagacggggttttgctatgttgccccggctggtcttgaactcctgagctcaagagatccacccaccgcaacctcc

SEQ ID NO: 269612 - DNA, 74 bp, Homo sapiens
gttcatgtcacgctgggtaatgaggatttgactgtgaaggaaacttttgagaagaactttgaaagagaaaccca

SEQ ID NO: 269613 - DNA, 100 bp, Homo sapiens
atgagtcctgaggctctgaaacaccaaggctatgacacaaagtcggacatctgaaatttgatgctgatccagttgaattatttgaaattccagtaaaaga

SEQ ID NO: 269614 - DNA, 75 bp, Homo sapiens
aaatgttgagcctttttggcctggcttgtttgcaaagacaagttggatggcttgaggactggtactaaaaggaaa

SEQ ID NO: 269615 - DNA, 99 bp, Homo sapiens
ccttattggattccagatctgttcagggagaacttgggtggatagcaagccctctggaaggaggggatgaaaactttcggaagagaaagttgcctgtgg

SEQ ID NO: 269616 - DNA, 82 bp, Homo sapiens
aaaggaagagagcactgcagccagtgaaaccactgaggttttaaaatcaaagatgggaaaatcggagaaaattgcccttccc

SEQ ID NO: 269617 - DNA, 151 bp, Homo sapiens
ttggtgatcactaggtgccaacattatgcgaagaactttacgtggacatcccatttaattctcagaagccgatcacaagaaacttacagcctatttagatcttaacctggataagtgctatgtgatccctctgaacacttccattgttatg

SEQ ID NO: 269618 - DNA, 100 bp, Homo sapiens
cggtactcagacaaatacaacgtgcccatttcgtcagtgagggatgtccactgttggagcagttgaacatttcctggtgtgaccaagtaaccaaggatgg

SEQ ID NO: 269619 - DNA, 100 bp, Homo sapiens
gccgaggtcccagccagcatcccggtcaacacgcggtacctgaacctgcaagagaacggcatccagctggtgccgacaagaaagccgaggctggggctgg

SEQ ID NO: 269620 - DNA, 102 bp, Homo sapiens
gtgggatttgaacacctgaagctccccatcaagggaatgaacttcacaatcaatgtccgagttaccaccatggatgcagagctggagtttgcaatccagcca

SEQ ID NO: 269621 - DNA, 75 bp, Homo sapiens
tgtcatcgagcccctcaaaggcttaccctcttctccacctgctccccggctgcccgcaccttccgggcctccgcg

SEQ ID NO: 269622 - DNA, 120 bp, Homo sapiens
ttcacttccttctcatccttttccaccagctaaagtttcttatcaccacaggagaaaatctagattatcttgatggtgtccatacggtgtttggtgaggtgacagaaggcatggacataa

SEQ ID NO: 269623 - DNA, 96 bp, Homo sapiens
gcattatccaacggctgctggaagggtcatgtaaaattatctgattttggtttatgtacgggattaaagaaagctcacaggactgaattttataga

SEQ ID NO: 269624 - DNA, 100 bp, Homo sapiens
ccgacctcttaggcgccgggaccctcaggctcagatcagtggccgaggccccagagaggctgaggggatctggcggtggagcgctaggatcagacgcccc

SEQ ID NO: 269625 - DNA, 100 bp, Homo sapiens
ccgctagtgatcctttgcaccctgcttggagacggacttgcttccggtgatgagaagctacaaggcgaccatccagcagaccttggacatcctgttcctc

SEQ ID NO: 269626 - DNA, 100 bp, Homo sapiens
gctgcaagtcctgtggggctcactttgcaaacacggccaggaagggagaagatgtcaaccggacactagaaggtggaaggaaacctcttcattatgcagc

SEQ ID NO: 269627 - DNA, 100 bp, Homo sapiens
gaatgctccacttgccgagcctgatgatggggacgtgccgcccctttgcgggaccgactgtgattcctccaccacctcactctgctccttccctgttgcc

SEQ ID NO: 269628 - DNA, 100 bp, Homo sapiens
ggagggaccacagggaccaccaagaaggcccggaggacttggaaaaggagagtgacacacccctccagcaagtatccattgaagaaattctagaagaaca

SEQ ID NO: 269629 - DNA, 100 bp, Homo sapiens
cctcgagccgcagcacgagctcaaattccgaggacttctcccacgtggaaggccttctttctcaatctcttcgcctgtggaagtcctattacatctgtca

SEQ ID NO: 269630 - DNA, 75 bp, Homo sapiens
catccggcgctcagctgggcttgaggttgtgaagatgagaaaagaagtgaagagaattcgagttttagttatccg

SEQ ID NO: 269631 - DNA, 82 bp, Homo sapiens
ctgctggtcacggccaacgtgggctcgctcttcgacgacgctactgcagcactggggtgtcagttgttggtccgacccagaa

SEQ ID NO: 269632 - DNA, 98 bp, Homo sapiens
aaatcccacagaggcatctgaggaaatgggtcctgatgaatatgaagagatggaagaagaggaggaggaggaagaggaggaagacgaggatgatgatt

SEQ ID NO: 269633 - DNA, 88 bp, Homo sapiens
attcctgaaatacatccaggaaagacatggagattctcttaaaaaggtcttgggctggcacgaagagctgcccggccagagcatcccg

SEQ ID NO: 269634 - DNA, 101 bp, Homo sapiens
cggccacgcgagcgggaacagtctcctccactcggagcggagatatacgactaaggggtcagacgggggttcgtgctgaacgccgtggctcctacccattc

SEQ ID NO: 269635 - DNA, 100 bp, Homo sapiens
tgaggcctccccagccatgtggagctgtgtggcggggcaccctggcccgcatgcggtacaaaagaaccaaggcagctctgacaataatcaggtactaccg

SEQ ID NO: 269636 - DNA, 75 bp, Homo sapiens
aaaaccctagcgcctattatagtgatcgtaagagacccatacagaaagtagaaatgggtacatcaagtcagaatg

SEQ ID NO: 269637 - DNA, 95 bp, Homo sapiens
ccgcgacctcggtacctcggaccagctctgtaaaagccccgcctctgccttcggataggcagttatttggcagaaaagcagagtatcagatcaca

SEQ ID NO: 269638 - DNA, 89 bp, Homo sapiens
gaaaagttaaaggatgaattactgaaattataactgtgtccagaggacccccaggccatccgtggataatgtgcaccataaccctccca

SEQ ID NO: 269639 - DNA, 100 bp, Homo sapiens
ccaaggatgtgaaagaggctgtcagaaagctggcttatcaggtgacaatctccaatagacttgtgtcttcaccttgctgcattgtgaccagcacctacgg

SEQ ID NO: 269640 - DNA, 74 bp, Homo sapiens
ggagtacgaccgcttgctggaggagcacgcaaagctgcaggtgtcaagctagggatgcggtccattcccattgc

SEQ ID NO: 269641 - DNA, 88 bp, Homo sapiens
cctggcaaccaccccgtctgagaagtgaggagcccctccgcccggcagctgccccgtctgagaaatggtgccaagaacgaagaaggaa

SEQ ID NO: 269642 - DNA, 90 bp, Homo sapiens
caccactgcggcgggctctgggtcagccatgtcatctgagcctcccccaccaccacagccccccacccatcaagcttcagtcgggctgct

SEQ ID NO: 269643 - DNA, 96 bp, Homo sapiens
cagctgaacgagaaccaagtgcggacgctgtgcgagaagaatttcagaaactgtggaggagtgtcactgtagattccatggacgaggagaaaattg

SEQ ID NO: 269644 - DNA, 75 bp, Homo sapiens
ccagctccatcaacctcacgctgcacctggcctctgcctgtgagtttctggatattgtagagctgctgctccagt

SEQ ID NO: 269645 - DNA, 82 bp, Homo sapiens
cagttggaagcagccgatccagcctgcggagcctgtggggcaggtggttgtgggaagagaagtttgcagaactgaaatggag

SEQ ID NO: 269646 - DNA, 90 bp, Homo sapiens
attgtcacaggggatgatattcagacacaggtttcagatggagctctgcgatgctttgcatcactggctgaccgatttacccgtcgtggt

SEQ ID NO: 269647 - DNA, 78 bp, Homo sapiens
tgaaataacccttgatcctcctcctaattgcagtcagcagataagcagagagccctagaagaaaccaaagcctacacc

SEQ ID NO: 269648 - DNA, 98 bp, Homo sapiens
gctggccgagcaggctgagcgatacgacggtatatgaatgacctaaaggtacaaataaagacggagagagaacagtgccaactgggagcagggcaaga

SEQ ID NO: 269649 - DNA, 60 bp, Homo sapiens
cggcgagaagcggccgagccagcagcaggtatgaaaatgaaagtcttcagaatggaagga

SEQ ID NO: 269650 - DNA, 75 bp, Homo sapiens
agaagaagattaaattgcttactggtaaacgcgttcaactggcggaagacctcatcaccaggagactaaagtcca

SEQ ID NO: 269651 - DNA, 100 bp, Homo sapiens
ttggcttcaatgtcatattttggcctcttctgaaacagtctccctggagcaaccatcagagcagtggctggggcactggaagtatgtcctggggagcaat

SEQ ID NO: 269652 - DNA, 89 bp, Homo sapiens
gaggacggtcggactcccgcggcgggaggagcctgttcccctgagttgtcgccgtgatcctgaaggcgctgacctacgacgagaagcgg

SEQ ID NO: 269653 - DNA, 50 bp, Homo sapiens
gcatcgaattcttggacaggaaagggtgtgatcctggtctatgacattgc

SEQ ID NO: 269654 - DNA, 82 bp, Homo sapiens
cggagccttggcacagctcgcttctaaaggtaactaggatttctacctcaaccgcgagacctatgcaaggacggtgtggacc

SEQ ID NO: 269655 - DNA, 83 bp, Homo sapiens
gtgcccgccccacccgcatgctctttgtcactccccggcggcagcacgaaagtaccatcattgatgttgatgggacaatgaca

SEQ ID NO: 269656 - DNA, 100 bp, Homo sapiens
cagacggcgagacctcctgcacagattcctggtcgggtggcttccagtggtcttcagtctgtcgtgcaccgatgagaactctccttattgctgtgaaggg

SEQ ID NO: 269657 - DNA, 75 bp, Homo sapiens
gaccgagaccgcggccgggaccgaggggccgagaactactggtggcgtggccagaacacacggacgctgtgtgtg

SEQ ID NO: 269658 - DNA, 74 bp, Homo sapiens
ttggcattgacatttaattttagggtcctttatatagaagggagagtagaatgattcagtggtggctggtggcg

SEQ ID NO: 269659 - DNA, 76 bp, Homo sapiens
gtttgctcgaagccttcagtccgttgcagagcgagaatataaaaagctctttgaggaaaacaaaggaatgtatcat

SEQ ID NO: 269660 - DNA, 100 bp, Homo sapiens
cttcaaaatctacctctcttgtttggaagaactgatgaagatatttcgacaagcaagagcaagcactccagcaattttgtttttggatgaaattgattca

SEQ ID NO: 269661 - DNA, 100 bp, Homo sapiens
gttagtcggaaagagtgcatctgtagatgctgaaaaatcaatgctgtccaaacttaaacatgagaaccccgcaggtcatcggggtcatgcagagtcaaaa

SEQ ID NO: 269662 - DNA, 80 bp, Homo sapiens
aaatataggacatgcgtttgagatctactgtgatacaaagtggttgtccccaaaattggaaacatattagatctttgtac

SEQ ID NO: 269663 - DNA, 50 bp, Homo sapiens
gccgacaacagcctggcgtccgccacgagtttatgtggccgaggcagaca

SEQ ID NO: 269664 - DNA, 95 bp, Homo sapiens
gggcctttacagccgaagcggaagcctcagtggccggagcagcctcaaagcagaagccgagaacaccactgcgccaacggaggaggctactacca

SEQ ID NO: 269665 - DNA, 75 bp, Homo sapiens
catctataacaacaatgaggacttccaggtcggacaagccaaggtggatgtgtttcgtgaagacctctgtaccaa

SEQ ID NO: 269666 - DNA, 100 bp, Homo sapiens
cccagcttccagtcacagcatagcttcaaggttactgactttttatgatgtttggtggctatgagactatagaagcatacgaagatgatctttatcgaga

SEQ ID NO: 269667 - DNA, 90 bp, Homo sapiens
atttgctccccctcgtgcagcaacccccacacccagcaccagacaatgcagatcttcgtgaagactctgactggtaagaccatcaccctc

SEQ ID NO: 269668 - DNA, 90 bp, Homo sapiens
gtggctgacgcctggggcgtggagctgcccaagcgtggctatccccctgcatcagaagctgctcgcccagctactagtactttgaatcgc

SEQ ID NO: 269669 - DNA, 50 bp, Homo sapiens
aaggaaccttagtcttttaaagtttccacagtgcctacacaacctgataa

SEQ ID NO: 269670 - DNA, 76 bp, Homo sapiens
taagtgatttggccaccaaactcctggacagttggaaagacctaaagatgccagcctgttattgcgctccaggcca

SEQ ID NO: 269671 - DNA, 75 bp, Homo sapiens
ccgggacgtgcgcttccccacgtcgcttgggggccacggcgcggacgccatgagtgacaaaaagagtagtcccca

SEQ ID NO: 269672 - DNA, 100 bp, Homo sapiens
cgacggcgcttctcccggtgatcggagaaacagcacccaggactatcttccaaagagttctggatatcctaaagaaatcttctcatgctgttgagcttgc

SEQ ID NO: 269673 - DNA, 75 bp, Homo sapiens
ggctttccttggacatctccatcaggtgttggggatgtcctttgcactgaccctgaactgccagattgacaaaac

SEQ ID NO: 269674 - DNA, 82 bp, Homo sapiens
ctcggagcgcggcacggagacggcggcagcgctggactaggtggcaggtgagaagccctaccactgcaactgggacggctgc

SEQ ID NO: 269675 - DNA, 75 bp, Homo sapiens
cagacagaatgtacgaccttgttgctgttgtggttcactgtggaagaatgttggctaccagggtatttagcctag

SEQ ID NO: 269676 - DNA, 100 bp, Homo sapiens
gaagaacttcttcagaattagaaaggagctgcttcccaataaggaaacagtgacagagctgaatgaacctctctccaatgaagatcgaaatctcctctct

SEQ ID NO: 269677 - DNA, 100 bp, Homo sapiens
tgatgatgaagaggtttcagggagcagcaagacaatcactgcagagataccagttggctggggaacagaccagggaattggtggatttggagaagagccg

SEQ ID NO: 269678 - DNA, 121 bp, Homo sapiens
tatgtcagaaatgctaagacatcctaggatatcgggaaagcctatattggtgcgaatctggctttgggggaagaggaagaaaagtcggattacaagatcaaccaccaccaacaacaataaa

SEQ ID NO: 269679 - DNA, 100 bp, Homo sapiens
cggagtgagaagcaagaaggccctggacacagcaatatctctgggctttcacagacatatctgaagagatggattaagaatgctttggattaaggattgt

SEQ ID NO: 269680 - DNA, 76 bp, Homo sapiens
ctttacccgactctttgggccgttatctcacctgttcgggggtcttgtctggattttggttgcctcctccaatgtt

SEQ ID NO: 269681 - DNA, 100 bp, Homo sapiens
cccggggtgcgagcagcgcacttccggtttgatttcctctgcatgcctgtcttccatccgcgtttcaagagggagttcattcaggaacctgctaagaatc

SEQ ID NO: 269682 - DNA, 74 bp, Homo sapiens
cgcccaggtgggcaagttgccgtgcctggagatctcacaggctggggcggaaggtcgagagggcgaggcctgtg

SEQ ID NO: 269683 - DNA, 100 bp, Homo sapiens
aattgcagcaggagctttttgcttagcactgaaaattctggataatggtgaatgggtggtgatctttgtgaagtctgtgcagcggtgcattgccttggcc

SEQ ID NO: 269684 - DNA, 83 bp, Homo sapiens
cttgtttgtggatcgctgtgatcgtcacttgaccagaatccgtagaagctagccctgtggtagttgagaaatccaacagttat

SEQ ID NO: 269685 - DNA, 100 bp, Homo sapiens
gtatgactggagaagaaggaaaagaagtaattacagaaattgagaaaaaacttcctcggctgtacaaagttttaaaggtgtttgatatacagaggaaagt

SEQ ID NO: 269686 - DNA, 83 bp, Homo sapiens
cgtctcttacgtctgcggaagtgcagctgcctcagttcttagcgcaggagagctcaaaggatggctactgacatgcagaggaa

SEQ ID NO: 269687 - DNA, 90 bp, Homo sapiens
caaatggctgctctctggcgttcctcacactccccctgaagttcatctaagatcttcattcttcaaagagctcaaccttcaacaagacta

SEQ ID NO: 269688 - DNA, 100 bp, Homo sapiens
aaagtggaagagcttactgtcacagcaactcctttgcaagatgccccgatgaagactcttaagatgacagaaggtgatttttctggtgatcgaggacttc

SEQ ID NO: 269689 - DNA, 50 bp, Homo sapiens
aaaagtgtgacttggcagctggaatggctacaagtttctgtactgctcgg

SEQ ID NO: 269690 - DNA, 75 bp, Homo sapiens
caaaagagatcgatgtctcctacgtcaagattgaagaggtgattggtgcagcccatactgaatgaacacaccttc

SEQ ID NO: 269691 - DNA, 90 bp, Homo sapiens
aagagcaaaggcgatgatgccacattacctaggctaagaatattgtacacaaagattcttgatgttcttgaggaaatccctaaaaatgca

SEQ ID NO: 269692 - DNA, 77 bp, Homo sapiens
tggagcctcagttggaagcagccgatccagcctgcggagcctgtggggcagcaaacagcggcacaacaagctgtggc

SEQ ID NO: 269693 - DNA, 90 bp, Homo sapiens
cgccgattcctcctccttggtcgccgcgtccttggctggcgtttcctgagactggcccagacgctgcggcactatggctacttgcgcttt

SEQ ID NO: 269694 - DNA, 100 bp, Homo sapiens
cagggagccacctccgggcgcagaggcctacatcccacagagatacccagacaacaggatcgtctcgtccaaggacatcgctgccggctcccatgttcag

SEQ ID NO: 269695 - DNA, 83 bp, Homo sapiens
tgctctcggttgcacaataaaccgacgtttagccagagcccagcattacatcaacatgcccgtgcagttcaaaccgaagtccg

SEQ ID NO: 269696 - DNA, 80 bp, Homo sapiens
cgccccgggccccccagcatgaagaccccggcggacacagctctacgaactcgacggggaccccaagaggaaggaattcc

SEQ ID NO: 269697 - DNA, 101 bp, Homo sapiens
tgttcttcacttccagcaagccaggggttccagaaactttagcagttgcagtgcagaggactttgagaagttaactttaaataaaggaggaaactgccttc

SEQ ID NO: 269698 - DNA, 95 bp, Homo sapiens
aatgaagcagacttggatgaagagctggtcattaagggatccatcctacagaaggtgtcttttatgaataatcaaaagcagcaaaagccaacgct

SEQ ID NO: 269699 - DNA, 75 bp, Homo sapiens
ctcaacaagtacatcctggacaagggttccgagtctgaggaagacataaccttgtgcctgcctgcccacctctct

SEQ ID NO: 269700 - DNA, 50 bp, Homo sapiens
ttcgcagtggtcgcttcttctccttggttttaaaatcaaagatgggaaaa

SEQ ID NO: 269701 - DNA, 74 bp, Homo sapiens
ggcccagaattttccagtgccctgaaaaatagttgacctgacagttcaagaaaaggagaaatatcttaatgtgt

SEQ ID NO: 269702 - DNA, 74 bp, Homo sapiens
tccgaggtacaagagaaggacccattactgagctgcaagctttcttcctggtggcagatgacatcatggattca

SEQ ID NO: 269703 - DNA, 100 bp, Homo sapiens
aaagtctaagggatatggctttgtctcctttttcaacaaatgggattctcaaagttggattggtggaaacaatgaaccattgacaggctttacatggcga

SEQ ID NO: 269704 - DNA, 50 bp, Homo sapiens
cagagagaccattgccagtgttcgtaggtagctacagcaagctgggtagc

SEQ ID NO: 269705 - DNA, 90 bp, Homo sapiens
cgcgtctcggaaaccggtagcgcttgcagcatggattggattcagcatcaaaatacatctactcatattgagagctgtcgacagttacgt

SEQ ID NO: 269706 - DNA, 75 bp, Homo sapiens
catccggggatttctgctcacctggagaagggatggaaatacttcaacaagatgtatgagaactttgtggaggag

SEQ ID NO: 269707 - DNA, 50 bp, Homo sapiens
ctccagctagtgagcatgatccggattgtctgtcctggacctggtcgtgg

SEQ ID NO: 269708 - DNA, 100 bp, Homo sapiens
acccgcagagacttctactggctgcgctcctttctggccggagtttgcgatccccgcgtccaggatggagcagctgaacgaactggagctgctgatggag

SEQ ID NO: 269709 - DNA, 100 bp, Homo sapiens
gaatgaagccgcagaccctcgcgaggaggagacccacccggtggacttgagctcgctctccagtaagctactcccaggcttcaccacgctgggcttcaaa

SEQ ID NO: 269710 - DNA, 83 bp, Homo sapiens
aggagaacaagcgctgcaaatacaatcactctaaaatgtgtgatagcttaccctgaaagaagcagatcccagttcaaaagtag

SEQ ID NO: 269711 - DNA, 100 bp, Homo sapiens
tacaggccgagaggaagggttggaggtcgggccacccgaggtgctggacaccctgtcgcagcttctgaaggatatgctgcaggctgctagtcattatcgc

SEQ ID NO: 269712 - DNA, 99 bp, Homo sapiens
ctcctagcggatgggtgctattgtgaggcggttgtagaagggcaccatgccggtggaaaggatgcgcatgcgcccgtggctggaggagcagataaactc

SEQ ID NO: 269713 - DNA, 98 bp, Homo sapiens
tttctggataatcttcgtgcggctgggctgtgtgtagaccaggctgttttggagtcagcggaagatcaccaaggccagggagtggttccaccgcactg

SEQ ID NO: 269714 - DNA, 75 bp, Homo sapiens
tgtttgacgacactgatggtttgattagaagcccaggacccaggaaggagacacaggaaatttattcaaagtccc

SEQ ID NO: 269715 - DNA, 74 bp, Homo sapiens
tagtggcaggtgacagtctgcatgtgcagttttcagctcgatcaagtcatccgccaaagaagcctgtccagttt

SEQ ID NO: 269716 - DNA, 50 bp, Homo sapiens
gaacagaaacacctaggaagggagaactgttgcagagtgggcaggatctt

SEQ ID NO: 269717 - DNA, 98 bp, Homo sapiens
ccgaggactccagcacaccgagggcatgtcgggccccaggcctgtggtgctgagcgggccttcgggagctgggaagagcaccctgctgaagaggctgc

SEQ ID NO: 269718 - DNA, 82 bp, Homo sapiens
cctaaatgaggaatgtctttcctaccatctaaaatacgaaggtttctggctgggtgtcacaacataatgaaagttgctcaag

SEQ ID NO: 269719 - DNA, 119 bp, Homo sapiens
aaaagagaagatcttgaaaagaagcaacaacttcttagagcagcaacaggaaaggcaaatttagcgatcaacccagcggccttgctgcccacagcggcttcccagatctctgaagtaaa

SEQ ID NO: 269720 - DNA, 100 bp, Homo sapiens
atttgggagagacgctctgaactgactgccccgcatcaccggagcgtcccagctgcgaggagataacgaaggaggcccaacttcattcaataaggagcct

SEQ ID NO: 269721 - DNA, 106 bp, Homo sapiens
caggagtccctctccgcccagttacaagggccgttgctccagggagaactgcaaatatcttcatccacccccacatttaaaaacgcagttggagataaatggacgc

SEQ ID NO: 269722 - DNA, 100 bp, Homo sapiens
ggaacctgctttctctcgatgaggataacatccctccagaagatggcaccgaccgtcacgagctaacttcctggaagagctttccgtctattttcaaatt

SEQ ID NO: 269723 - DNA, 97 bp, Homo sapiens
cgaaggatgtgcatgaaggacagcctcttctcaatggtgtacgaagccatcgacagcagagatggagcatcttgtgcagagttggtgtcttttaaac

SEQ ID NO: 269724 - DNA, 76 bp, Homo sapiens
atggatgtgaagctccgctcactgatctgcgtggggctcaactacgtcaaaagctacctcctcccggataagcaga

SEQ ID NO: 269725 - DNA, 100 bp, Homo sapiens
atcttccagatccgcgtagtgaggaatcgtctccaccgtcatggggggcggagacctgatgatatcatcaagttgaatcgaaaggaagggaagaagcaga

SEQ ID NO: 269726 - DNA, 85 bp, Homo sapiens
tgttgccaagctcatcgctgccctctccaccccctcccagcaggtccagcgtcccatccctctgacgccagccaaccccagcatg

SEQ ID NO: 269727 - DNA, 100 bp, Homo sapiens
gcagtgcacagagctgtggggaccaggtattgtcaatatggactcgccatatggttctgtaacaccttcttcaacacatttgggaaactttgcttcaaac

SEQ ID NO: 269728 - DNA, 100 bp, Homo sapiens
gatgttggagaactacagaaacctggtctccctaggttaatgttcgtgaagaaattgaagagttttttccaagaatgtggaagataaatcaagataaaag

SEQ ID NO: 269729 - DNA, 50 bp, Homo sapiens
tttctcatgttttggctttggggctagggcttatgcaagcaaagatctgg

SEQ ID NO: 269730 - DNA, 101 bp, Homo sapiens
ccgggcaccacagggcggccaggactgtcaggagagcctggagttcagggccccgcggggccaaaaggagaaaaggtagaggtggacagatcagagaccag

SEQ ID NO: 269731 - DNA, 80 bp, Homo sapiens
agagagaccagacctgcaagctctttgacacacagcagttcttgtcagtgatggggagctgggatccagatactcctccg

SEQ ID NO: 269732 - DNA, 83 bp, Homo sapiens
cccgaggaagccaaccgcgacttcattgatgcacccattccagtggtgtaacggtgagaagccctaccactgcaactgggacg

SEQ ID NO: 269733 - DNA, 100 bp, Homo sapiens
gctcgggctcttcatggccgtcatgccgactctcatacaggcgggcgccagtgcatcttctaggccgaagaacagttgagaattgttgaagaacaaagaa

SEQ ID NO: 269734 - DNA, 85 bp, Homo sapiens
caacacttctccgagccagcgagccagcgagccgccgacccgccgagcaaaatggccccttcacagatgtagtcactacaaatct

SEQ ID NO: 269735 - DNA, 101 bp, Homo sapiens
cttcattgacaaggaggacctgcacgacatgctggcctcgctgggttcatgttgctgaggaggcagagggctgagttcttccatccatcgccttcaagtgt

SEQ ID NO: 269736 - DNA, 82 bp, Homo sapiens
tacgtgggcaccttgcgcttcttgcagtcggtcatcatcagatttgaaatatttaaagtggatacaaaactatttcagcaat

SEQ ID NO: 269737 - DNA, 101 bp, Homo sapiens
ggcggcctgggctgctgactgcgcacttggaatagtagcaggcggcggcggcggaacgccaggcagatatcaatgaatgcttggaggacaagagtgtttgc

SEQ ID NO: 269738 - DNA, 90 bp, Homo sapiens
ctgagctagcagtgagcaccttttggcccaatgaatatcagctacttcttacaactcagtttccctttaaaataaatgaaaaagtattac

SEQ ID NO: 269739 - DNA, 96 bp, Homo sapiens
cgccaaccatcccgacttccccatgcagatcgagcagctggagcgctacattcaggtggttgtgtcaaaccgattggtgacatctccatgctgtat

SEQ ID NO: 269740 - DNA, 100 bp, Homo sapiens
atgacaaacaaccagctcttcagcacttttccagccattaactccaggctctcgagaatttgaagatgttgtaaatattctccattcttcttaccttgaa

SEQ ID NO: 269741 - DNA, 100 bp, Homo sapiens
gtgtttaccagtgcaatagatgggtggggctttggcaaatacttccctggacaagaaagccagatgaaactgatctaccagggccgcctgctacaagacc

SEQ ID NO: 269742 - DNA, 51 bp, Homo sapiens
atgctccttctcctggagacgcaactcaagcaatggctgccatccggaaga

SEQ ID NO: 269743 - DNA, 100 bp, Homo sapiens
cgctgacgcagagcggaaggaggtgtacgaagccatcgacagcagagatggagcatcttgtgcagagttggtgtcttttaaacatcctcatgttgcaaac

SEQ ID NO: 269744 - DNA, 99 bp, Homo sapiens
ccggggtagctcttcactcctcagcgcgacgtcgtgtcgagttcccaaaaagctccgcaggggctgtagggaggaattcaaaatgtcctcagcctcttt

SEQ ID NO: 269745 - DNA, 82 bp, Homo sapiens
acgttttccggagggattccatcatagattcttcgctgctgctgccttaccgccgagaaccaccacccgccaggcgtcttgc

SEQ ID NO: 269746 - DNA, 101 bp, Homo sapiens
agaggcagcgccatggcggagcagacctactcgtgctgcacagttggggatcttcaaaccaagatagatggcttggaaaagactaactcaaagcttcaaga

SEQ ID NO: 269747 - DNA, 100 bp, Homo sapiens
ccggttccccggcccacagtgggggtgtgcaaacccgagagaactggccttatttagtgtctctgacaaaaccggccttgtggaatttgcaagaaacctg

SEQ ID NO: 269748 - DNA, 75 bp, Homo sapiens
aaattatcagcactttttattaatttgatcagtgatccttcacgttggataatctgcaaaatggcttcaatgctg

SEQ ID NO: 269749 - DNA, 90 bp, Homo sapiens
caggacaccgacatggaacagggactcactgggggaagtaccaccaagaacagggaaggacaagccagaggctggaggaagatacctgca

SEQ ID NO: 269750 - DNA, 90 bp, Homo sapiens
gagaattcctgagagagttgtgcatgctaaaggagcagcgttatacgcagagcaatgggcgcaggccgtttggcatctctgccctcatcg

SEQ ID NO: 269751 - DNA, 56 bp, Homo sapiens
aagtgaagcattatctcatcctgccgagcctggggaggaacctcagcgcccttccc

SEQ ID NO: 269752 - DNA, 129 bp, Homo sapiens
cactaccctgactacagctggagcgcccagaggcgagccctggtggaggaagagggtaaagcatcaagtcgaatatttgggtctgaaagagaacattcgagtgagaagagctggctatgcctatcggcg

SEQ ID NO: 269753 - DNA, 97 bp, Homo sapiens
acaaagaggccgcggaggagaagccggaggaggacaacgactaccaccgcagcgacgagcaggtgtggtacatggacggctatcacaacaaccgctt

SEQ ID NO: 269754 - DNA, 74 bp, Homo sapiens
atggagcagattcggagaattatgagacctactgatgtccctgatacagtgtatcggatctgtcgttctggaaa

SEQ ID NO: 269755 - DNA, 90 bp, Homo sapiens
ggagattatgttgacagaggatattattcagttgaaacagttacactgcttgtagctcttaagggtgactgtcgttcctacagttacgtg

SEQ ID NO: 269756 - DNA, 90 bp, Homo sapiens
ctcccagaagctggagagtatgctgacacctcctattgccaggagagtcccctttctcaaggtgacaaaaggtgagacactcacctagaa

SEQ ID NO: 269757 - DNA, 75 bp, Homo sapiens
ctggtgtggacggtggaagcgtgattctgctgagtgtcagatgctgaagtgcattgagctggatgagcggctgaa

SEQ ID NO: 269758 - DNA, 100 bp, Homo sapiens
ggcgtctccctggcagagaggggcagttttggagccatgctgggctcaaaatgcagagaactcaaagatattcatttcggccagtgttacaagatctcag

SEQ ID NO: 269759 - DNA, 75 bp, Homo sapiens
tccatcaagcctcaggagctgctgtacctggagtagaacagaaaaattattatgtctgtgttcccttgggactca

SEQ ID NO: 269760 - DNA, 101 bp, Homo sapiens
ctggaaggccgtgatgccatcttcaagcagtttcatttcaaagacttcaacaggcgaaatccgctcctgctcccaagaagggctccaaaaaggctgttacg

SEQ ID NO: 269761 - DNA, 83 bp, Homo sapiens
ctctgcgtcctcatcgggcttatgttcgagcttcctttgctccaataagctttgcaatcaaggccaaagaaaatgatctgctt

SEQ ID NO: 269762 - DNA, 126 bp, Homo sapiens
aaccagtaccatgcaggatgaaacattaaattcttccgttcagagtattaggaagtcgtgcagtttctagacaagaagcatccaaaccactatcaagtctacaatctatgcagtatgtacattact

SEQ ID NO: 269763 - DNA, 50 bp, Homo sapiens
ggactccaaaatggcgtcagttggtgctggagaatctggtaaaagcacca

SEQ ID NO: 269764 - DNA, 75 bp, Homo sapiens
aggcagatcacccaaacgtctgacagatttgggaaaaatgccagctgtgggacaaggagtgcaggccgcacaacc

SEQ ID NO: 269765 - DNA, 100 bp, Homo sapiens
agccaccccgcagaaggcgtgcgattcttccagcagatatgaaggaggaagagggtaatctggaagagtttcctgacctactctgctgctgtgattaaac

SEQ ID NO: 269766 - DNA, 82 bp, Homo sapiens
gaacgaggcaaggagctaaagcagcgtgcgttcagccctggggtttgatctgtggatgaaatgaatcatgattttcaagctc

SEQ ID NO: 269767 - DNA, 100 bp, Homo sapiens
cggaggcgctggggcaccatagtgacccctaccagataaagcccccaccctctgctgtcacacagcgcaacaaacagccttggcatccagatgaagatga

SEQ ID NO: 269768 - DNA, 82 bp, Homo sapiens
catgtgaagctcaccgagacggcgatccgggcgctcgagacttaccagagccacaagtgtactaatggtcacttgatgtgcg

SEQ ID NO: 269769 - DNA, 100 bp, Homo sapiens
gtgtcctggaggacatgaccgtccacctcccgatcatcgagatccgcatcgtggagtgccgagattggtacatggttcagtaaaacacagattacagtgg

SEQ ID NO: 269770 - DNA, 98 bp, Homo sapiens
gatatatgaagattacatttctatactatcaccaaaagaggtgctgcggtgtgtcgcggggtgcccaggcctggaggaactctaccttgagtctaaca

SEQ ID NO: 269771 - DNA, 98 bp, Homo sapiens
gcccggggggcccagctcccgtagggagccgtgggcgctcggtgcccgggccgggcagatggagtcttgctctgtcgcccaggctagagtacagtggt

SEQ ID NO: 269772 - DNA, 98 bp, Homo sapiens
catcactggaagcaatgaggacagcttgtgaaggcgctaaggcacatatactcaggggtcctcataaacagggttctcatgtatcagccatcttctgt

SEQ ID NO: 269773 - DNA, 101 bp, Homo sapiens
ttacaaaacaagatattaaagtggcaatgtgtgctgacaagttgtggacatcggatacccaaggagacgaagctgaagcaggagaaggaggggaaaattaa

SEQ ID NO: 269774 - DNA, 75 bp, Homo sapiens
gacaaattatgctgcagcatattgtactggcctgctgctggcccgcagggttggcaacattgtacaagtcaccca

SEQ ID NO: 269775 - DNA, 100 bp, Homo sapiens
tcaggtgaaaggagcagtagatgatgatgtagcagaaggtctttctgtctgagtggaaggagcacaaagttgcactctcacagctcaccagcctggagat

SEQ ID NO: 269776 - DNA, 83 bp, Homo sapiens
cagacaaacagcccgcccgaccccgtcccgaccctggccgccccgagcggagcctggagctgaactttgacctggaccggggc

SEQ ID NO: 269777 - DNA, 75 bp, Homo sapiens
gtttcctgatcgactccagcatcatgattacctcccagatcctctgccttgtcaatgttagtcacaatggtgtga

SEQ ID NO: 269778 - DNA, 135 bp, Homo sapiens
aactctgcagtggaccacagcattcctgaaatacatccaggaaagacatggagattctcttaaaaaggtgaccaagaatatggcccaggtgaccaaagccctggacaaggccctgagcaccatggacctgcagaa

SEQ ID NO: 269779 - DNA, 90 bp, Homo sapiens
caacttcggcaagatccagatcgggatttacgtggagatcaagcgcagcgatgaccttagctggatctccaaaatacaagtgaatcaccc

SEQ ID NO: 269780 - DNA, 90 bp, Homo sapiens
cgaggagctcactgcggtcctaaccccgccgcagctcctcggacgcagatcacaaaatttgtccaggatagacatagagctagaagaaac

SEQ ID NO: 269781 - DNA, 75 bp, Homo sapiens
aactgtccccgggacctcaccgactgcctgctcgtggaaatggagaaggaactcaccccagaggtgctgcaagag

SEQ ID NO: 269782 - DNA, 89 bp, Homo sapiens
ccctgcagtacctgcagaaggtctctggagacatcttcagcaggcagccagataagctggtggtggtatggacccgtcggaaccgacgc

SEQ ID NO: 269783 - DNA, 89 bp, Homo sapiens
cgaggagctgggggtcgtcaccatgcaggactgtgaaggccttattgttcgctctgccaccaaggtgaccgctgatgtcatcaacgcag

SEQ ID NO: 269784 - DNA, 82 bp, Homo sapiens
cgccgctgggcctgcaggtctctgtcgagcagcggacgccggtctctgttccgcaggatgacaccttcagcagtaaacaaga

SEQ ID NO: 269785 - DNA, 100 bp, Homo sapiens
aggaggaggatgaatttgatagagaggtcacctttggctcttcagagatgcagggacacacgatgggcttctggttaaccaaactgaattatttgtgcca

SEQ ID NO: 269786 - DNA, 83 bp, Homo sapiens
ggaacagctgatgaccgtgctgcaggctgggaaggcgctgggcagagtggagtatctggtgaaatggagaggctggtcgccca

SEQ ID NO: 269787 - DNA, 82 bp, Homo sapiens
gcagtccacccaccgccgccgcctcccaggtatttctgggaaaagccagcttctgtttgcactggtcttcacaactcgttac

SEQ ID NO: 269788 - DNA, 82 bp, Homo sapiens
attgtggtggagtccaccccgctgtggctacatccagaagatcaagtcgggagaggaggactttgagtctctggcctcacag

SEQ ID NO: 269789 - DNA, 82 bp, Homo sapiens
tccgacccgcgaacccctctgggatccccgccgctctgtctacaacccgaggtgccaagtcctgccctgccaacttcttggc

SEQ ID NO: 269790 - DNA, 75 bp, Homo sapiens
cctgcggacgaggccgggacttggccgagcggatcctaataaggggaaaatgtattcatgtgattgaacggcgtg

SEQ ID NO: 269791 - DNA, 100 bp, Homo sapiens
aagataatagccagctccccagaaatgaacctgcccacggtgtccgcgctcaggatcgttcttgatgttggctgtggctctgggatcctgtcgttttttg

SEQ ID NO: 269792 - DNA, 83 bp, Homo sapiens
tggccatcaaagtgattccccggaatcgtgtgctgggctggtcccccttggtgaaaggtgtagcagtcactcggcctacaccc

SEQ ID NO: 269793 - DNA, 90 bp, Homo sapiens
attgcagtccatgtagtcagagtgctgacctgcatcatgagtgactccccctcggccaagaccctggaagctgtcctgaatttcaaatac

SEQ ID NO: 269794 - DNA, 100 bp, Homo sapiens
gcctggagccagtgcccaagtacggtttggttgacttccccagaaatctggccaagtctgtaactgtggaatgaggctgagaccgtgacaagaccatcac

SEQ ID NO: 269795 - DNA, 50 bp, Homo sapiens
gagtcggcgtaactatcgcctgacaggaattaaacaaccaccatgtcgag

SEQ ID NO: 269796 - DNA, 83 bp, Homo sapiens
tttaaagaaaattttaaaaggaatcttggattataatcatgaggccaaatttgagtttcatcatggtgactatgaaaaacagt

SEQ ID NO: 269797 - DNA, 75 bp, Homo sapiens
ggagcaattgaagctgactactaaggagaataagttgtggacatcggatacccaaggagacgaagctgaagcagg

SEQ ID NO: 269798 - DNA, 114 bp, Homo sapiens
ggtgcaattgaaggcggttgatggtgaagccattctgagtttatgtgttgactccggtttttcgttggaatatacgttgcacatttatggcgattctgagtgtgagggcagact

SEQ ID NO: 269799 - DNA, 90 bp, Homo sapiens
ggcattgtcatcctgatcttcactgggatcagagatcggaagaatttgagccccagctacatagatctgactgagtgtccctacatgtgg

SEQ ID NO: 269800 - DNA, 101 bp, Homo sapiens
ccttcaccctctgctctgggtaaaggtcatacttacctggttgcttgcgcatctagtaatgttggatcatattctggatgttttgaataccaagtcccaag

SEQ ID NO: 269801 - DNA, 100 bp, Homo sapiens
ctgtaacccagcctgtttcacttcttggcagtcgatgatgtgaagaaaggttacatcaaagcagaagaaaagtcctatcaattacagaagctatacgaac

SEQ ID NO: 269802 - DNA, 73 bp, Homo sapiens
tattttcagaggccggaaaatgccctcaaacgcgccaacgacattgtatctcagtttggaatggaaactgtta

SEQ ID NO: 269803 - DNA, 100 bp, Homo sapiens
tagggaacaagaggcatcactcagtccttctgggacagcttccctaaatgatcttccagtggtccccagctcaaagaggtctgctgtttcagctccaaag

SEQ ID NO: 269804 - DNA, 75 bp, Homo sapiens
gtttttctgttttgcctgaatacatgatttaaacaagagatttccacagaagtgttctaagaacggaagcatctg

SEQ ID NO: 269805 - DNA, 82 bp, Homo sapiens
cgagctcctggaggcggcgggatggaggcggcggccgggaacacagccgcacccgggtctgtgccagctgtggttggcagtg

SEQ ID NO: 269806 - DNA, 100 bp, Homo sapiens
atttggacctgccaccagctccagagcttgactggatggagacaggaccatctctgacattcattggccatcagtttacgtttaataagaaggagacctg

SEQ ID NO: 269807 - DNA, 74 bp, Homo sapiens
gtggaacaatcttttgttggattgaaacagctaatcgttttgctgttactgctcagtgtagtcacaccttgaat

SEQ ID NO: 269808 - DNA, 73 bp, Homo sapiens
cgatctgctggcctcggcctctcaagggaactgctcgcagaaagaagaaggtggttcatagaacagccacagc

SEQ ID NO: 269809 - DNA, 100 bp, Homo sapiens
gtccggaccggagactttggggcctaactaggtgggagagataaacgtggaggtcccattttaacgtttccggcccgcagcaatcatgacagaatacgac

SEQ ID NO: 269810 - DNA, 100 bp, Homo sapiens
aggcctcttcctgctctttgtgctggagaacatgctggggcttttgcggcaccgagggctcaggccaggaaatgtttcaacgtgcgcaagcgttgcggcg

SEQ ID NO: 269811 - DNA, 80 bp, Homo sapiens
tgttttgcctgaatacatgatttaaacaagagatttccacagaagcagcgctggagagcgaggtggcttcaataagcctg

SEQ ID NO: 269812 - DNA, 100 bp, Homo sapiens
gtgatgggtattacagatgtagatgataaaatcatcaaaagagccaatgagtaaatttctaagtgatgaagaaaacttgaaactgtttgggaaatgcaac

SEQ ID NO: 269813 - DNA, 74 bp, Homo sapiens
cacgtgaagatgctgcggctgcaggaggatgcattagcacaacaggcctttgaagaggctcggagaaggacacg

SEQ ID NO: 269814 - DNA, 87 bp, Homo sapiens
cagcttctgctgtccttctttgtggagagcaagatatgtgcagcgggggctacagcgagtggggctagatccccagctgccactgaa

SEQ ID NO: 269815 - DNA, 99 bp, Homo sapiens
gcaacaagtgtctttggttataaattatgatctacctaccaatcgtgaaaactatattcacagcttgccaattctgtaactccttgggatatcttgctg

SEQ ID NO: 269816 - DNA, 73 bp, Homo sapiens
ccaatgatcttttcaatgctgcgaaagctgccaaaagtgacatgcagctctttcgacgtgtagcagcagcttt

SEQ ID NO: 269817 - DNA, 99 bp, Homo sapiens
agcacttaccggctgccccagatcgcgcgcctggacaacggtcatcaccgagtggtcttctcacatcatccttcaggcagcaccaagagtcactggcag

SEQ ID NO: 269818 - DNA, 100 bp, Homo sapiens
ccagaacctctcccagttcttccctgaggccatcagcttcattggaaagaccacagcaagattctttcattcgtctcctcctagcctgggggaccaggct

SEQ ID NO: 269819 - DNA, 116 bp, Homo sapiens
ccacgcccgcctccgccaactttcacgctgcctcggcggcccggcccggctcgacgccaatggagggtacaccacccggactacaacaatgagttgacccagtttctgccccgaac

SEQ ID NO: 269820 - DNA, 101 bp, Homo sapiens
gggacgccgaggcctcgggcgggggctggcccggggttccaggtcctgctgcaggagcagggctggcagcggctggaggagctccgggaccagcagcgctc

SEQ ID NO: 269821 - DNA, 100 bp, Homo sapiens
agaatctggcaatgggggcaggagctgttggagctttgcagctgacctacatctcgaagggcgatgccagtccctccactccagaggagaacgaaaccac

SEQ ID NO: 269822 - DNA, 75 bp, Homo sapiens
ctgcagtggctgttctcctcaggagtgaccaggagccgctgtacccaggtagcatctaaaggaactggtttaaat

SEQ ID NO: 269823 - DNA, 100 bp, Homo sapiens
atggtgatggagattttgatgtggatgatgccaaagttttattaggaagacccactacattatctgagacaatggggaaagctgacgtatggcttattcg

SEQ ID NO: 269824 - DNA, 100 bp, Homo sapiens
ggaaagaatgcaacaggaatttcatggccccactgaacatatctacaaaactgcagataaaacgtcactgtgcagagccttttacagaatattggacttg

SEQ ID NO: 269825 - DNA, 100 bp, Homo sapiens
gttttggaactgtcaggtacctcaaagcgtaaaaacttgtggtggagaatgttgatgtgttaacacaaatgaggaccagctttgacaaaccagaccagat

SEQ ID NO: 269826 - DNA, 100 bp, Homo sapiens
agagagccgcgcccgccgcgcggagcgccccttcgcgtcccctgcaccatgagctggggcaccgagctctggcccgtggaccgggagcccgtggaccggg

SEQ ID NO: 269827 - DNA, 100 bp, Homo sapiens
tagagaattctgggcttccacacaactccagtgctaactcaacagagcttttgaggagaaacgaaaagaacaggaagaaaaagaacaccaaattagagaa

SEQ ID NO: 269828 - DNA, 87 bp, Homo sapiens
gaggccagcgtggccctgctggaggcctcgctgaggaacgacgccgaggaaggatcaaaatacttgctggatggtggactcagagac

SEQ ID NO: 269829 - DNA, 97 bp, Homo sapiens
gaggagaaccgggagccattcagaaaagtccaagtggtaagaagttcagaagcaagcctcagttggcaaggtacctgggaaatactgttgatctcag

SEQ ID NO: 269830 - DNA, 75 bp, Homo sapiens
gttccctcctgactatgaccagcaggtgtttgaaaggctgaactccagtgcacccagttagacttggagcggaaa

SEQ ID NO: 269831 - DNA, 90 bp, Homo sapiens
gaagttctcccagctggcagaagcctatgagctttccccagacatggccaacaagggtccttcctatggcatgagccgcgaagtgcagtc

SEQ ID NO: 269832 - DNA, 101 bp, Homo sapiens
tggctttacaagaaaaccacctaaatatgaaagattcatcaggccaatggtcccaaatgtacctcaggaagctctggataagttattatcatttacacaca

SEQ ID NO: 269833 - DNA, 100 bp, Homo sapiens
gttagcatgctttctccagctgccctatcacctgccagctcatcacaaagaaccctgtggaatctttcatcccatgactcaatcaaaatggagattgtgg

SEQ ID NO: 269834 - DNA, 83 bp, Homo sapiens
ttgtaaatcaggtttttctaagagttcggagatgatcgagacgcaggaggacatctacgtgggctccattgagacagaccggg

SEQ ID NO: 269835 - DNA, 75 bp, Homo sapiens
taaaagtctgtgccccaatggttcgatattcaaaattcttctttactgccaaccaggtaaagatttacaccaatc

SEQ ID NO: 269836 - DNA, 73 bp, Homo sapiens
tgtccgagggcaccaaggcggtcaccaagtacaccagctcgaatgccgtattcacctggaccaacctgctggt

SEQ ID NO: 269837 - DNA, 100 bp, Homo sapiens
gttgctgagtcactgaacaataccagcatcaaaggcttttattcaatgagggccccaaggctgttgcagctcctcgacctgatcggttggtcaatcgctt

SEQ ID NO: 269838 - DNA, 88 bp, Homo sapiens
aagatgagaagcccctggtgctggagatgctgaagactattgcccagaagaaaagatgtttggttttcacaagccaaagatgtaccga

SEQ ID NO: 269839 - DNA, 100 bp, Homo sapiens
ggaggagagcaaccaggaagctcttggggtgacttcgttttccttcaggtgcagtcagcctcagtttccaaagccggaaaaggatcctctagtagccacg

SEQ ID NO: 269840 - DNA, 74 bp, Homo sapiens
caacgttagagaaagtcatcaatgagacctgggtcagaatggcggcagtggagcatcgtcattcttcaggattg

SEQ ID NO: 269841 - DNA, 82 bp, Homo sapiens
aagtaatggtatccggccaattgagattcggagttaaaacagttgcagatctgatctcttctgaacacctcatcgtgtctcc

SEQ ID NO: 269842 - DNA, 100 bp, Homo sapiens
gcaccttgggaagagaaagaaaatgccgaaggcactcagacaggaacaagctgaaagctggatacctaatgtcagtggagtcttctgagtgtttcctgga

SEQ ID NO: 269843 - DNA, 89 bp, Homo sapiens
tttggaacacatccaggaaaagataactttcgacacacctgtagacgttcgccaggtaaaggttgtttacattcagagctctatcaata

SEQ ID NO: 269844 - DNA, 90 bp, Homo sapiens
caccagtggaagatgatcacatcccaggctttgcttcacctctgggtcatgattgttctgttgacttacacaccagaaatgcaccacgac

SEQ ID NO: 269845 - DNA, 100 bp, Homo sapiens
aaggagctagctgaaataacccttgatcctcctcctaattgcaggtgaaaggtgtagcagtcactcggcctacacccacagcatcgaccttgtgaaccca

SEQ ID NO: 269846 - DNA, 50 bp, Homo sapiens
gcgggaaggcggcagtggttgaagggggccaattcctgtccccccagcag

SEQ ID NO: 269847 - DNA, 100 bp, Homo sapiens
aggaagtaccaggacttgcacaggtgggaaagcagtgccactctccgcttcacagatgccccctgccaagatgtcagtgatgctgccgtcagtgaacctc

SEQ ID NO: 269848 - DNA, 100 bp, Homo sapiens
ttacctcgatggcagcgacacaattgtctgtgacagtaacagtacttgggatcccccagttccaaagtgtcttaaagctacttttccaggtatgtgggag

SEQ ID NO: 269849 - DNA, 100 bp, Homo sapiens
ggagccatggccgaagggggagaaggaggcgaggacgagatccagtttctgaggactgccatcccaccacactcgtcccacctggcttgtgtcaatgttc

SEQ ID NO: 269850 - DNA, 74 bp, Homo sapiens
gttccaggcttgtacattgctgtgcagcgtgctcttcaggatccaaatgtggctgcgttcatggtagaaccaat

SEQ ID NO: 269851 - DNA, 95 bp, Homo sapiens
tgcggcgcggggtgagcgtcgaggaggcgcaggagactgaccgcaacggcaggtccacctaaacccactgtgttcatctctggggtcatcgcccg

SEQ ID NO: 269852 - DNA, 75 bp, Homo sapiens
ctgatcgggtcttccttcatgtttggaattcacccagttgcaggccgaatgcctggtcagcttaatgtgctgctg

SEQ ID NO: 269853 - DNA, 83 bp, Homo sapiens
ggagtttgagatgaaggaggacgagccgtggtacgaccaccaggacctccagcaaggcccccttgtatttgctggtcctattt

SEQ ID NO: 269854 - DNA, 100 bp, Homo sapiens
ggggccatgccaaggactatgtggagaacagctttgctgagccatcaaggtctaatggaagcatggttcggcattcttcatctccatatgtagtatatcc

SEQ ID NO: 269855 - DNA, 100 bp, Homo sapiens
tctcgctgttgctggtctctggctccctcctcccagggccaggcgccgctcagaacggtctgctcaccaggtggccagataccgcccacgtgcccccatc

SEQ ID NO: 269856 - DNA, 90 bp, Homo sapiens
atggaaaatcgcttggttaaaacctgacacttttaacaggtccaggtgcaggtacagcagtctccgcaacaggtctcggctcagctctcc

SEQ ID NO: 269857 - DNA, 75 bp, Homo sapiens
agaagtcagagagaggatgctggtttcttactaccgatacagttaattcatctgcctacactatttacatgggaa

SEQ ID NO: 269858 - DNA, 115 bp, Homo sapiens
caggacagggctgaggaaccatgtctccatccccgaccgccctcttctgtcttgattttctctgtgggcagttctttttgttttgggaagacttctgactttaattctttcagta

SEQ ID NO: 269859 - DNA, 98 bp, Homo sapiens
gccgccattcctggcgcccgaactcgcccggccgggagccgccgcgggcaggacgcgcgctgcagatcttcataaacaatgaatggcatgattcagtg

SEQ ID NO: 269860 - DNA, 90 bp, Homo sapiens
agggatcttccagcctctgcctcccgaagtgctgtattacagatatcgatgaatgcaaggttattcacgatgtttgccgaaatggggaat

SEQ ID NO: 269861 - DNA, 50 bp, Homo sapiens
gacgctgcagcgggactgcctggtcatcgtgatgtcaggtcatgagacca

SEQ ID NO: 269862 - DNA, 112 bp, Homo sapiens
cgtgcactccgcacctcggggacattattgcgcgtggaacggctgcttttggaaggtgtccctggccagtgtccttccacctgtccacaagcatggggaacatcttcgccaa

SEQ ID NO: 269863 - DNA, 90 bp, Homo sapiens
cctcagcctagatcccttggtgctctccacgctgttcagttcttggccaggctgactgagagatttgtgctgggagtggatatgttcgtg

SEQ ID NO: 269864 - DNA, 101 bp, Homo sapiens
tctgacagatgccagcgtagctgaatccagtaccaaaaacgtcaacaacagttttacgtctctccatttcaaggactaaaacagtcttgcgttaagtaaaa

SEQ ID NO: 269865 - DNA, 98 bp, Homo sapiens
acggtccagcggtcacctacccccagcaccacctccagcccctgcgcctcgatgagggcagaagtgcagttgaccaagcaggtggtgcacagattgta

SEQ ID NO: 269866 - DNA, 100 bp, Homo sapiens
ttcagcaagcctatatcacatgtttatgttctatgctccctaatgaagatgctattaaggaggaaatcatcgagttccccatcctaaagctaaatggccg

SEQ ID NO: 269867 - DNA, 80 bp, Homo sapiens
cctccatccagcccggggcccccaaggcgatcagtgggtgaccgcggctgcgagggactttgtcatccgtcctccaggat

SEQ ID NO: 269868 - DNA, 75 bp, Homo sapiens
atcattaaggacggaggcacggtaatctatttaaagaagacaccagaagaagcctacagagcactcctgtctggc

SEQ ID NO: 269869 - DNA, 100 bp, Homo sapiens
caggctcagggtatccaagtatttgatcctggggagtctgattcagatgacaactgtacagatgtcactggtgtgatgaatgcagactctgctaccattt

SEQ ID NO: 269870 - DNA, 101 bp, Homo sapiens
cataaagcaaaatttgccgaacgagggttcgcagaaaggtggggcagagctcatctgacgtggcatcagtgcacttacatttcaatcgaccaagttccaag

SEQ ID NO: 269871 - DNA, 97 bp, Homo sapiens
ttggagagtctgagtgcagccaccacctttgagcctcttgagcctgtgaaggacactgacattcaggtggtttcctagaaacatgattgtttattgg

SEQ ID NO: 269872 - DNA, 100 bp, Homo sapiens
agggatcctgcaaaaatgagccattctcaccccgctggttcctcctaagatatatgacatctcaaatgatatgaccgtcaatgaaggaaccaacgtcact

SEQ ID NO: 269873 - DNA, 98 bp, Homo sapiens
cgggcttcccaacaccatgccgtccgccttctctgtcagctctttccccgtcagcatcccagccgtgctcacggtcgcaatggaagaagagatcgccg

SEQ ID NO: 269874 - DNA, 90 bp, Homo sapiens
taggagaatgactccgattcgtgaccctcagcgccggtgcatgtcgatgtacagcagggaagaactggaaactcagagaaagaaactgcc

SEQ ID NO: 269875 - DNA, 90 bp, Homo sapiens
cagctgtgggagaaccaccaaagctggcctctgtgtcctttgtcccaatagtaacaactccctcctggcctttccgggcacgcacacggg

SEQ ID NO: 269876 - DNA, 75 bp, Homo sapiens
cagcaccaaatccaagatggcggccagcaggaggctgatgaaggcttatggtgaaggctctggtgctgattgtag

SEQ ID NO: 269877 - DNA, 50 bp, Homo sapiens
gtaattggagccaagaaatgagtataggagagaagcttcttgaagggcag

SEQ ID NO: 269878 - DNA, 123 bp, Homo sapiens
tgaagatgcacatgtctgggaggataattgggatgatgacaatgtagaggatgacttctctaatcagttacggtggctttaaccaagagagcagatccagctgagcttagaacaatatttttg

SEQ ID NO: 269879 - DNA, 49 bp, Homo sapiens
gtgcagctgcctcagttcttagcgcagcttcatcgcagtaggaatggca

SEQ ID NO: 269880 - DNA, 90 bp, Homo sapiens
agaactcacagctagtctatttgaggtgacaaacagcatgtttggtgcttcaagaaagaagtttgtagagggggtcgacagtgactacca

SEQ ID NO: 269881 - DNA, 83 bp, Homo sapiens
tgaccacctgaaggatctctggaatgatggtctattatcctcccagtccacaacgctgaaccgtggctggacgaatgtttgag

SEQ ID NO: 269882 - DNA, 75 bp, Homo sapiens
ccaccgtcaggcataaattgattattcctcgcccacatctgtgccagggaagcttgtgggctgtgccatcatcca

SEQ ID NO: 269883 - DNA, 96 bp, Homo sapiens
agaccacccagaaatctacaggtcattcctggagatcctgcacacgtaccagtttgtcccgctggctggaagcctggcagtgacacgattaagccc

SEQ ID NO: 269884 - DNA, 82 bp, Homo sapiens
tttcccgggagatcccaggcggtgacagagtggagccatggctagaggattgtcagtggcttcgccccgaggagagctgact

SEQ ID NO: 269885 - DNA, 100 bp, Homo sapiens
gtcgggaacagccatgcaaaggcaggggaggaagccacctcgagtactatactggcaattgctggagaagattttgcaattgttgcttctgatactcgat

SEQ ID NO: 269886 - DNA, 49 bp, Homo sapiens
ggagtaaacttcccctcaccagaaggtctgagcagagggcggggtgcag

SEQ ID NO: 269887 - DNA, 95 bp, Homo sapiens
agaaccatgctccaaggcagctaagaatagactgcatatatattgggattttaaaccgaatgaggacctaatttgcttcaaagatatcaaaccag

SEQ ID NO: 269888 - DNA, 89 bp, Homo sapiens
cagacctgctcacacttcagaatagagaagatggctcccgcaaagaagggtggcgagaagaaaaagggccgttctgccatcaacgaagt

SEQ ID NO: 269889 - DNA, 78 bp, Homo sapiens
gcctttgccgatccgccgcccgtccacacccgccgccagatggtcatcatgggccagtgctactacaacgagaccatc

SEQ ID NO: 269890 - DNA, 100 bp, Homo sapiens
gcaagagtctcttcattaaccatgaagccagttgagggaagttctccatgaatgtacgtcacaatgatgatgaccgaccaaatccctctggaactgccac

SEQ ID NO: 269891 - DNA, 98 bp, Homo sapiens
aagagaaagttcgagaagaatatgaagaaatattgaacacaaaacttgcagagtgtgaacatggctacgcctcttcattcccgtccatgccgagcccc

SEQ ID NO: 269892 - DNA, 82 bp, Homo sapiens
aaggacgcgctggatggcctcctccagcaggatgacgatgtcgataccaagaagcagaagaccgacgaggatgactagacag

SEQ ID NO: 269893 - DNA, 51 bp, Homo sapiens
caaatgccaaaggaattggttatccagggatcccaacggcttcaatgactg

SEQ ID NO: 269894 - DNA, 74 bp, Homo sapiens
caagctgaaggaggaccagatcaagaaggagtgtttctcaggagctatcagaaactatcctcaccatggtagcc

SEQ ID NO: 269895 - DNA, 75 bp, Homo sapiens
gcgacagtggcggcggcgccatggcagggcttgcaggttttgggatttgagattgacgcggtgaactctgtccag

SEQ ID NO: 269896 - DNA, 100 bp, Homo sapiens
cccaggttgtagacgctgcggcccggcccggcggggtgataagaagtacatcatggggcccaagctttccactcttgacgccactgtctttggacacttg

SEQ ID NO: 269897 - DNA, 51 bp, Homo sapiens
gtcaacaacatctagagaatgaaactaatctggattcactccctctggttg

SEQ ID NO: 269898 - DNA, 75 bp, Homo sapiens
ggggaaggcatgagtgacagacccacagcaaggcggtgggggtcgccactgggacactgtgaaccaggagtgagt

SEQ ID NO: 269899 - DNA, 78 bp, Homo sapiens
aagagcaagatcaccgtgacatccgaggtgcctttctccaaaagttccagggtctccctccactgctgtagtaacccg

SEQ ID NO: 269900 - DNA, 100 bp, Homo sapiens
gtgaagttgagcagttggattcaagagcacttcccctttgccttcatcagggcaagtgtccagagaatggctgggatgaaagtacacttgaactcttttt

SEQ ID NO: 269901 - DNA, 100 bp, Homo sapiens
ctttcctaccatctaaaatacgaaggtttctggctggttatcccagatcactgaagctgagatggctgatgaagtaatttgcagtgaaattttaagcgac

SEQ ID NO: 269902 - DNA, 106 bp, Homo sapiens
cgcagcaccgcagccttgggcctcgcgccggctatggccgtgccctggggctgagccctcagtccctgaagaggaaggagaaggaatatgagcatgaaatggagcg

SEQ ID NO: 269903 - DNA, 75 bp, Homo sapiens
acaaaatgattttatgcaatcgatacttcacactatggagagggaagcagatggcaacagatcccctaatttgtg

SEQ ID NO: 269904 - DNA, 50 bp, Homo sapiens
cagcagctgcctcaagaggagcaggtttttagaacttcagccataaaaat

SEQ ID NO: 269905 - DNA, 100 bp, Homo sapiens
gggtctgggttctggtgccgcgcagctttccccgagcaaggtccgtggtcctgtcagtggaagcccggatagcatgaatgcctctcgacttagccagcct

SEQ ID NO: 269906 - DNA, 100 bp, Homo sapiens
actttcgcaacatcaagggagttttccggggccctctcagcaagaacgggaacaaaactctgactggtcaaacaaatggattttacagaggcttacgcgg

SEQ ID NO: 269907 - DNA, 100 bp, Homo sapiens
tgaactcctaatatcaccaattcttctaagttcctggacattgatccggaggaggattcgcagttcaacatcaagaagactgtgcagtctttgtaactga

SEQ ID NO: 269908 - DNA, 83 bp, Homo sapiens
agcttcatatgcaccagaaggagatgaagggaaacggcaacaagcctcccagtactgacctgaaaacttgtgacaagaagaac

SEQ ID NO: 269909 - DNA, 98 bp, Homo sapiens
caaattagctgagaccacagataaagtcaaacaaggcttttgggaagaatttgaggagttgatccccctcatattgtgtacagcatgtctacatcctg

SEQ ID NO: 269910 - DNA, 75 bp, Homo sapiens
gcaatgaccttccctcgggaattccacctctgcgtttttccctccagtgagtgatagttgcttcaggaatcttgc

SEQ ID NO: 269911 - DNA, 100 bp, Homo sapiens
gtgaagaatcagcatcatgtttggcagctgagtattggagccaggagcctgccatgagtccccacgacagtccggtttgtagattccctgatctgcaatt

SEQ ID NO: 269912 - DNA, 75 bp, Homo sapiens
ggggcgacgaggcgattgcgggggcctgggctagcaaaacaagctatcgatcagggaagatctccagttataata

SEQ ID NO: 269913 - DNA, 75 bp, Homo sapiens
gggcctactcgcccgccaccctgcgctgccgccgctctgaggagttaaagatgttctcaaatagtgatgaagctg

SEQ ID NO: 269914 - DNA, 90 bp, Homo sapiens
cagctgttcccactggctctgctgaccttgtgccttggttttgggatttgagattgacgcggtgaactctgtccagttttcaaaccacac

SEQ ID NO: 269915 - DNA, 76 bp, Homo sapiens
cgtggaagcaggactgcgccgcgtcttcctcaagatgcctgaggaaacccagacccaagaccaaccgatggaggag

SEQ ID NO: 269916 - DNA, 98 bp, Homo sapiens
tgcagcagcgccgaggccgagactcagacctgctacaccagcgtgaaggtaatactgcattgcatgattgtgcagaatctggaagtttggacatcatg

SEQ ID NO: 269917 - DNA, 82 bp, Homo sapiens
tcaaggaagaggaggaggacaaaggcgtcctcaatgacttccacaagtgcatctataagggcgtgatggtgggcatgggtca

SEQ ID NO: 269918 - DNA, 75 bp, Homo sapiens
aatactatggaatgcattttgaaacttaaggatgggatacagtgatctgcagccctggatcatataacccccgtg

SEQ ID NO: 269919 - DNA, 95 bp, Homo sapiens
aaccgaagattaaaaaactggagccagtccttttgccagccctgtatgatgagattcgtcagtttcgcaaggcctgtggggaggctcatcttaaa

SEQ ID NO: 269920 - DNA, 100 bp, Homo sapiens
gctcggccgatgaagtgcagaggtttttttctgcttcgtgctgaacctgggcaaagacagcaacaacctgtgcctgcacttcaaccctcgcttcaacgcc

SEQ ID NO: 269921 - DNA, 82 bp, Homo sapiens
gcccgtgcactgggccgcgcatttcggcaagatgatatcatcaagttgaatcgaaaggaagggaagaagcagaattttccaa

SEQ ID NO: 269922 - DNA, 100 bp, Homo sapiens
aagaagaagaaacgggccgcgaaccgcagtatcatgctggccaagaagatcatcattaaggacggaggcacgatgaaccagaaactcgagatgcatggtg

SEQ ID NO: 269923 - DNA, 75 bp, Homo sapiens
tcgggacaccccggaagctgggaaatggcatggctaatgtaaaagcagccccaaagataattgacacaggaggag

SEQ ID NO: 269924 - DNA, 75 bp, Homo sapiens
cacactatggcgctgaaacggattaataagagagacaagagagacacctccaacttcgacaaagagttcaccaga

SEQ ID NO: 269925 - DNA, 78 bp, Homo sapiens
cgcgtcctcctccccaggcccgccgcctccctgccaagggcagctggtggaatttttgaagaaaatggaatctcgagg

SEQ ID NO: 269926 - DNA, 82 bp, Homo sapiens
ttgattgatttccatgctctgaaagacatccttgggcccccgatgtatgaaatggaggacctcatagttgaccagacgatag

SEQ ID NO: 269927 - DNA, 77 bp, Homo sapiens
cagaaccagtcccttgtgtatggcaaagtggatagcttctggaaggtggactgtgcattgtcacttattcgacttgg

SEQ ID NO: 269928 - DNA, 100 bp, Homo sapiens
cggagcccggctcccgcaccatggaggaggacgacagctacggagtggaggcagcacagacagtgaggacgaagaagaggaggacgaggaggaggaggaa

SEQ ID NO: 269929 - DNA, 124 bp, Homo sapiens
gagaaaagagaagtttgctgctaaaatgaatctgagcaatatggaatattttgtgccacacacaaaaagctttaccaacagggacgcttatgtcaactgggcagtgaattttgtgaattggaag

SEQ ID NO: 269930 - DNA, 98 bp, Homo sapiens
aaagccccggactcgtggagttgtgaacgccgcggactccggagccgcacaaaccagggctcgccatgaagccagacctgcagccagttacctactgc

SEQ ID NO: 269931 - DNA, 95 bp, Homo sapiens
aaaccagagtgtgtttaacttctgtgctattccacaggcgagtttataccgaggtggctacagccgatttgccccctactgaagtgacgtgagac

SEQ ID NO: 269932 - DNA, 51 bp, Homo sapiens
aaaagaagaattgcacttacacacagcttgtagaccctggagttaaggcat

SEQ ID NO: 269933 - DNA, 75 bp, Homo sapiens
aggataaggagatcatagcagagtacgatactcaggtcaaagccacagacccctttgcttctgtttttgggaatg

SEQ ID NO: 269934 - DNA, 82 bp, Homo sapiens
aacctcttcagagccctccacgacccctaataactgggccgacttcagctccacggtacactctcctacaaaaccagccagt

SEQ ID NO: 269935 - DNA, 74 bp, Homo sapiens
ctcctggagaagtggctcaacgatgcagaacagcagagaggggcagcaggatgaatgtgggcacagcgcacagc

SEQ ID NO: 269936 - DNA, 100 bp, Homo sapiens
gacccggcaggaccaggactccccgcacagtctgaccgacttgcgaatcaccagggcaagatgatgatgaatgaagtcctggcagcttcctgtgtcccag

SEQ ID NO: 269937 - DNA, 72 bp, Homo sapiens
gaaacccagccgaagcatttaaaagaaattccgggtagatatgcctggctcaggcagtgcattcatccccac

SEQ ID NO: 269938 - DNA, 50 bp, Homo sapiens
cacaagatcaagaactccatctggatgaagtcattgctgtttccgaaaag

SEQ ID NO: 269939 - DNA, 75 bp, Homo sapiens
taacacctacctgattctggcatacagtagctacagcaagctgggtagcaggcagatccaaaggatatcatgaag

SEQ ID NO: 269940 - DNA, 100 bp, Homo sapiens
atttacagatatggctgaggagaatatccattattatgaacagattgtgattgctagcattatgtgcagttacaataaaaatgactggacggaacttgcc

SEQ ID NO: 269941 - DNA, 100 bp, Homo sapiens
gtagttcctattgattcatcagattttgcattggatattcgcatgcctggggttacacctaaacagaacaccttccaccatgaccacctcagcaagttcc

SEQ ID NO: 269942 - DNA, 100 bp, Homo sapiens
cctggaccctgctcagagggacttgtacgtggatgtaatgttggagaactatagtaacttggtgtcactgggttgaagctccattcataccaaagtttag

SEQ ID NO: 269943 - DNA, 85 bp, Homo sapiens
acttcaagaaagagacagaatggtccgagcatgcattgccattatctgtgaactaggattgccagccctagagttccccaatgaa

SEQ ID NO: 269944 - DNA, 101 bp, Homo sapiens
tgtctgtgaagctaaactcaatgctgctgtgtgggaagaagatttgtaaagaaaactcttaggtctgaagaactgttgcccaattcaacagtgccagcatt

SEQ ID NO: 269945 - DNA, 74 bp, Homo sapiens
gaattgggaggtcggcggccccaaaaatatacatcaggggatgtgagagtgtgggacacccgcacctgggacta

SEQ ID NO: 269946 - DNA, 82 bp, Homo sapiens
ctgagctagagggtgaagctggcggagcaggaggatgggcgaagcatcagatggtgaaggagaaggagacacagaagtgatg

SEQ ID NO: 269947 - DNA, 150 bp, Homo sapiens
cgcaactacaagaaaaccctcctcctgaggcaccacgtctctaccgagcacaaactccacgaagccaacgcccaggtgggaccagggagattggatctgctctcaccaggatgtgcatgaggcacagaagcattgaagccaagctgaggc

SEQ ID NO: 269948 - DNA, 100 bp, Homo sapiens
agaatacccacctcatgtccaaaaagttgaaattaatcctgtaaggttaagtcggctccaaggtgttggcagagaaaatcctgaaggagcaagagcggct

SEQ ID NO: 269949 - DNA, 100 bp, Homo sapiens
gtcctgccgcctcccgggagtgccgtgcgccgcagcccgggcccaggccccggcagcgcctgggacaagggcagcacattccccctgttcccaggtgggt

SEQ ID NO: 269950 - DNA, 83 bp, Homo sapiens
atccgcaagcatgctcagaccttcattgctctgtgtgccaccgctacccgtacagtgaggacgcccgccagggtgagcagtac

SEQ ID NO: 269951 - DNA, 74 bp, Homo sapiens
acgaggcggcgggctggagacatggaccgcggcgagcaagacgtgaacgatcaagagagagggaccatagtaga

SEQ ID NO: 269952 - DNA, 83 bp, Homo sapiens
aggaacttggttccccctccctcagcttccgccccaaaaggaaactggagcacccatcctaactgatgatgttagcctgcagg

SEQ ID NO: 269953 - DNA, 100 bp, Homo sapiens
attggtacagaaccagattcagacgtcctctcagaaataatgcattcttttgcaaaggtcttagtacccactgtgtctatggttggaaagcatttgggcg

SEQ ID NO: 269954 - DNA, 73 bp, Homo sapiens
gatgttgctcaactcagacatcttctggaagccccaggaggctgtgcaggcatctagcctgattccaactcaa

SEQ ID NO: 269955 - DNA, 83 bp, Homo sapiens
tcatcctggttctggaatcctcagttcaagggtcggtcagagctgacgatgaagttgatgtggatggtacagtagaagaggat

SEQ ID NO: 269956 - DNA, 98 bp, Homo sapiens
tgatgaactggaaaggactggaattgatttgggaacaactggtcgtcttcagttaatggcaagacttgcagaggaattggcagagggggtcgatttgg

SEQ ID NO: 269957 - DNA, 100 bp, Homo sapiens
ttccttcagtggaccactctgcaatgaccgtttggaaagaaatcccggcctgcaatgtatgatgtgagccccatcgcctatgaagattacagtcctgatg

SEQ ID NO: 269958 - DNA, 76 bp, Homo sapiens
taaagatgcagatcctcatttccatcatttcctgctaagccaaacagagaagctctttcgacgtgtagcagcagct

SEQ ID NO: 269959 - DNA, 75 bp, Homo sapiens
aaaatggatttttgcagtacgatgttggatcacaaggacgagtcataagttttgaggtacgaaaagaccaccatg

SEQ ID NO: 269960 - DNA, 117 bp, Homo sapiens
ttctcgagcttctcagtcagtcctgcctcatcccagccatgtcatcttatctacgaaatgattcaggaactgcaagcacatgttgaccagataactgaaatggcagcagtaatgagg

SEQ ID NO: 269961 - DNA, 100 bp, Homo sapiens
ggaagctatcaggaccaattacaatgacagatacgatgaggctggaaaagaggaacaggagggcatggaagaaagccctcaatcagtgggcagacaggag

SEQ ID NO: 269962 - DNA, 90 bp, Homo sapiens
cttcggaacttcctgtggtcatctccctgacaacccagataacagcggggatctgatgagcttctttcttctggcatcattaacggacct

SEQ ID NO: 269963 - DNA, 82 bp, Homo sapiens
ccggatcctgaggaggcagctgcggtggcagctgctgagttctcggtgaagatgacagtcatgtccctttccagggacctca

SEQ ID NO: 269964 - DNA, 100 bp, Homo sapiens
atttctcttggatttggctacacacttatagatcttctgcactgtttacaggcacagggccatgtttatgagtggactaagtgaaagcaaacaaacccat

SEQ ID NO: 269965 - DNA, 100 bp, Homo sapiens
cagccagggacggaccctcattcctcccagggaccccagacctctgtctctctcggcgaccccgataacgtggtgttgtgcctgctggcggcggacgagg

SEQ ID NO: 269966 - DNA, 74 bp, Homo sapiens
tagcgaactgcggtcgctggaatgtgtgtctcacgagtttggtgccctggttgtcagatgttggaaagcagtag

SEQ ID NO: 269967 - DNA, 80 bp, Homo sapiens
cccagcccaccgttttatttttgacatggatttgattgacatactttggaggcaagatatagatcttggagtaagtcgag

SEQ ID NO: 269968 - DNA, 100 bp, Homo sapiens
gtgggctacacactgctcagcccccacatcacagaagactatctcctcactgaagactatgacgtgctgaagaccgtggccaacaaccgggacaaggggc

SEQ ID NO: 269969 - DNA, 82 bp, Homo sapiens
ttcgggacctcataaaggaaagtgcgcgtcccgggacgactggcgctgtgcgcgctccatgcacgagttttccgccaaggac

SEQ ID NO: 269970 - DNA, 100 bp, Homo sapiens
tcctgttccgcttctccgaggacgccttcaactccacttttatctccaccataggtagctcgtaagctggtcatcctggagggtgagctggagagggcag

SEQ ID NO: 269971 - DNA, 82 bp, Homo sapiens
ctgtcttcggtggactccttcggcagtccacccaccgccgccgcctcccagcaggattcctggttttcaagcctgagctgat

SEQ ID NO: 269972 - DNA, 100 bp, Homo sapiens
ggccctcgcagaggattaacacagtggctgaacaccaggaaggaactggcacttggagtccagacatctaaaatttggtgtggtggctcacgcctgtaat

SEQ ID NO: 269973 - DNA, 88 bp, Homo sapiens
atgtttgctacaaaggtggtgcaaaactcatcagatttatctgccaaacccaaattctcaaagcctttcaacccactgcaaaacaaag

SEQ ID NO: 269974 - DNA, 75 bp, Homo sapiens
ggaaccgagagccaggtccagagcgccgaggagccggtctaggacgcagcaggaccatgaatggcacctacaaca

SEQ ID NO: 269975 - DNA, 90 bp, Homo sapiens
caaaccccagcacttaagcaaacgggaattctcgcaataccctctaccatctgctttggtcagggtgccgctcgaggatttaaaagcaac

SEQ ID NO: 269976 - DNA, 90 bp, Homo sapiens
tcctaccacgggtggatgttcactgagcacggcaagatgagtcgtgccaccaagatctggatgtaggagagaagtttgctgaggaatgcc

SEQ ID NO: 269977 - DNA, 125 bp, Homo sapiens
ccgcagatcgccgtggtgggcggccagagcgccggcaagagctcggtgctcgagaacttcgtgggcaggagtggctttggagagatatcatcccctgtaatccgggaggcagaggtgacacggac

SEQ ID NO: 269978 - DNA, 82 bp, Homo sapiens
ggatttgggtcgcagttcttgtttgtggatcgctgtgatcgtcacttgatgccatggacaatattaccaggcagaaccaatt

SEQ ID NO: 269979 - DNA, 74 bp, Homo sapiens
gacccaacagcttatgcattagctgaacatctttcagagttgtatccttctaggcctgattcttcactacctga

SEQ ID NO: 269980 - DNA, 100 bp, Homo sapiens
agactgacaccccacatcgacaatttggaggtggcaaacagcttcgcagtcactaatgcttccaaaaagggtcctgatggattggccttgcccaacaact

SEQ ID NO: 269981 - DNA, 90 bp, Homo sapiens
caaggccggagaaggccgccgggcccgggcatggtggtctggggcaacgcggaagcccatcacctcttcatgaccactgcctgccaggag

SEQ ID NO: 269982 - DNA, 100 bp, Homo sapiens
gttcgggcagctggagtgtacgggcccgcgggccacggccatgcagcccctggaggactggcctccctgatctctctcctcatggcagcgacccacctcc

SEQ ID NO: 269983 - DNA, 75 bp, Homo sapiens
cccagaagatcctggtcccctgctttaaccatcgaaaatgagatgttcgacaaggactgataggcgttggcctga

SEQ ID NO: 269984 - DNA, 83 bp, Homo sapiens
cgaggacatcatgcgcctccgggagaagacagagcgggatgccaccagcttgtccaaagggaagttccaggagctcctggtgg

SEQ ID NO: 269985 - DNA, 130 bp, Homo sapiens
gaagaggattggaggtgtcagtgttaaaggaacctctacaacgaaggtgaagccacggaagataaggcaaatctgagtagcctccaagaggcacacaagcagaggatgggctgtgttgccctgactgcca

SEQ ID NO: 269986 - DNA, 90 bp, Homo sapiens
aggaaaacagagaaagaagtgataggagggctctgtagagcatccacaatgggtaccccagcctcggtggtcagtgagccacccccttgg

SEQ ID NO: 269987 - DNA, 90 bp, Homo sapiens
gcgacggcctggctttctgcgccatcctgcaccgccaccggcccgacctcatatgaggacggggacttggttgccttttccagtgacgag

SEQ ID NO: 269988 - DNA, 100 bp, Homo sapiens
caacaccgtgccactgcactacagcctgggcgacaggagcgcatcagcgaggaggtggggctgctgcagctccttggggaccccccgccccagcaggtca

SEQ ID NO: 269989 - DNA, 100 bp, Homo sapiens
cgaacgcttcgctggccatttaggagctctgctcaaagccagacgggtctctggacaccagctcttccatcaccagccagcctgaggccttcttctccaa

SEQ ID NO: 269990 - DNA, 98 bp, Homo sapiens
tagatgagtacacacaagaagaaatagacgccttcccaagattgtggactccaatgctggggcagtgattggaaaaggaggcaagaatattaaggctc

SEQ ID NO: 269991 - DNA, 75 bp, Homo sapiens
caggagtcatgagcgacagcggcgagcagaactacggcgagcggggtcccagggctggtggttgctttgggtcta

SEQ ID NO: 269992 - DNA, 75 bp, Homo sapiens
tgcagggagcagaggggacagaggcaccaaggacctccaagacagggtttttaatgaccacaacaagcaagcatg

SEQ ID NO: 269993 - DNA, 82 bp, Homo sapiens
cgaaggtgaagagttgtcccagctcggcccgcgggggagccccgggagccgcacgatcatggaagggaagtggttgctgtgt

SEQ ID NO: 269994 - DNA, 100 bp, Homo sapiens
ttgccgggcgcgggcgagaaagttcaacctggtttgtgatcggaagcacctgaaggacaccacacagtcagtgttcatggctgggctccttgttggcacc

SEQ ID NO: 269995 - DNA, 100 bp, Homo sapiens
cgagctctcagtgccagagaaggtgaataatgcccagtgggatgctccagctctaagcgaaagacatgaggcctcagcctgaaatgaggttgttttgagg

SEQ ID NO: 269996 - DNA, 50 bp, Homo sapiens
ttattcgtaatggacttttagaggggtgcacagagcgttttgtatgtagt

SEQ ID NO: 269997 - DNA, 100 bp, Homo sapiens
cggtctatggactttccgaagacgagcaaatgaagaaacacccctgccgccagtgtgacaagtctttcagctcgtcccacagcctgtgccggcacaaccg

SEQ ID NO: 269998 - DNA, 90 bp, Homo sapiens
gatcagaggtagtcggacctttcccgctggcgcgcagcctcagctagcctccacctcagatatatgacaagcagttggatgaaagagaac

SEQ ID NO: 269999 - DNA, 100 bp, Homo sapiens
atcggcttcactgtcctcacagaggcagaccctgcagccaatttcttcctgaccactatgcccactgactccctcagtgtttccactctgcccctcccag

SEQ ID NO: 270000 - DNA, 75 bp, Homo sapiens
ctcagaaatcactaaatactactctgaggggcttagaaattaacaggctaccaagatgaatgaactaatggagaa

SEQ ID NO: 270001 - DNA, 50 bp, Homo sapiens
cagcgttctgtggttgtcaacagggctgacaggacaactggatcagtttc

SEQ ID NO: 270002 - DNA, 100 bp, Homo sapiens
gcaaatgatgtagttattactgtcccgtttgattttggagaaaagcaaaaaaatgctcttggaatgtcacaggtagactaatggttggcctacgttggtg

SEQ ID NO: 270003 - DNA, 83 bp, Homo sapiens
gccgcccagacgctgcccgcgggcccggccacggcggagccaagatctgacagacatccctgaatcttggtgtttggacatag

SEQ ID NO: 270004 - DNA, 100 bp, Homo sapiens
aagaaatcatgactcatctcaacccacaacgccttcccagtcatcagctgcctccaccccagcccccaaccttcccagtgccggtggtggtgtgcacatt

SEQ ID NO: 270005 - DNA, 100 bp, Homo sapiens
agttccatctcttctataaaaaacttatgtttgaacagcaaaaatcgctccagcggaacatcttggcctcgaacccccgggtgacccgcttccatatcaa

SEQ ID NO: 270006 - DNA, 98 bp, Homo sapiens
gcgacgccggagagaacgaagcctcggctgggagcggtcacatgcatcggacgttacggattactcttacccggctactcccaaccattctctgcacc

SEQ ID NO: 270007 - DNA, 100 bp, Homo sapiens
ctcaacttacctgttgccacttggaatatatatcgaaatcatattccatgcccatcagcattgaatttcagcggagatatgcaacaattgttctggagct

SEQ ID NO: 270008 - DNA, 83 bp, Homo sapiens
gcgacaagccgctggcagccgcggatctcaccgccgctcaggaaccatccgggtatggctgaaaagagacagtggtcaatact

SEQ ID NO: 270009 - DNA, 76 bp, Homo sapiens
gatatataattccacatatttgggaaattggaatgggattaacaggatttggagtgtttttcctgttctttggaat

SEQ ID NO: 270010 - DNA, 50 bp, Homo sapiens
aagagaaaaagaacattactgtcttggatctgccagagcatcttttggag

SEQ ID NO: 270011 - DNA, 82 bp, Homo sapiens
tgcgcgagcggagggaggcgggtactccaaagattcaggtttactcacgtcatccagcagagaatggaaagtcaaatttcct

SEQ ID NO: 270012 - DNA, 100 bp, Homo sapiens
ccagtaccttcgcctgtgcacagcttgccactggcgctgcctgccgcctggtggaggctgtgctctcaggagagtaggtgacctcacagtgactcaagct

SEQ ID NO: 270013 - DNA, 100 bp, Homo sapiens
agaatcctccaaaaccagtcatgaccactagacccacagctgttaaagcaacaggcccagtgacgagcaccatccggaagtgaaggctgatgggtacgtg

SEQ ID NO: 270014 - DNA, 51 bp, Homo sapiens
catcattgtccaggcctgcagaggtgacatcttcatttgattgtacaccat

SEQ ID NO: 270015 - DNA, 95 bp, Homo sapiens
ctacattgacaagaaatgccccttcactggtaatgtgtccattcgagggcggatcctctctgctgggagtgtccactcgccttccaccagcatgg

SEQ ID NO: 270016 - DNA, 90 bp, Homo sapiens
gtctgtggttctctgtcccaggctgttccctaagaaggtctgcccaggactcagggttttggccaaattgggcgagggcacaaaataacc

SEQ ID NO: 270017 - DNA, 100 bp, Homo sapiens
agtcaaggaatggctgcttagtgacgtcatttcgggagttagtactgggctagtggccacgctgcaaggtatgggcactaggaaaagacttcttccatca

SEQ ID NO: 270018 - DNA, 100 bp, Homo sapiens
ctggactgagtttgtagacatgaaggtccatgtaccctgtgaaaccctcgaatacattgaagccaactatgccttatgtttgatcatcggccaaggtcct

SEQ ID NO: 270019 - DNA, 98 bp, Homo sapiens
ccgaggcgaccgttgcgcgcgcgggcggtggcgcgggccgaagcgcccggagcgggagcgagcggcgcggcccggcttgcttccggcgtcatggctca

SEQ ID NO: 270020 - DNA, 100 bp, Homo sapiens
ttatctactttggaggcctgtctggctcctttctctacacaggagggaactgtctgggacctttgctcatctgtgtcagcaagttgacgtcacccgggag

SEQ ID NO: 270021 - DNA, 97 bp, Homo sapiens
tgtacccccagtacacttactactatcctcattatctccaaaccaaggccttataatgggactaattttacgatatgctacagcaccaactgatatt

SEQ ID NO: 270022 - DNA, 83 bp, Homo sapiens
aggcagaggtggaggcgctttgaaaggaactgtggctgcaccatctgtcttcatcttcccgccatctgatgagcagttgaaat

SEQ ID NO: 270023 - DNA, 82 bp, Homo sapiens
gctactggaggcggcccgcttcctggaatggcaagcgcagcaacaacagagagcacgtgttctggcataaagcatgcttcca

SEQ ID NO: 270024 - DNA, 113 bp, Homo sapiens
ctgtgacccacctgcctcctccgcagagcaatggcggtgtctgccgggtccgcgcggacctcgcccagctcagacagtacctgtaatgagaaacagtaaagaaaacagactaa

SEQ ID NO: 270025 - DNA, 75 bp, Homo sapiens
cctgcatggattgggagatactggagttcgcagtatgtgcagtgcgtggccgggtgtttgcagctgatgctccgg

SEQ ID NO: 270026 - DNA, 100 bp, Homo sapiens
atgggcagcatatgaaagtggattatggatatttgaatggtggtacttccataagcatggcacatcttttattgagcaagtatctgtaagccatttgcaa

SEQ ID NO: 270027 - DNA, 99 bp, Homo sapiens
gggagccgcaggcgcagacccacccgccatgaagccccccgcagggatctgtgtggcagaccccttcgaggtcacagtaatgcaggacttcttcatcga

SEQ ID NO: 270028 - DNA, 75 bp, Homo sapiens
tcagggtggtcattgcaatattaagttggaatcgaagcctcttaaaatggcagatgacttggacttcgagacagg

SEQ ID NO: 270029 - DNA, 90 bp, Homo sapiens
cagcagaagaacttttcttacaagacagcacccaagaaaacctcatttggctcgctgaaggatgaagaccggattttcaccaacctgtac

SEQ ID NO: 270030 - DNA, 75 bp, Homo sapiens
aacgcctggctcggagcagcagcctctgaggacctcagcagccatgtcgaagccccatagtgaagccgggactgc

SEQ ID NO: 270031 - DNA, 83 bp, Homo sapiens
tcttagccttccttgcactctgaacttgcagctaatgcgttttgtctttgacagagccagaggccaagaagagtaagacggcc

SEQ ID NO: 270032 - DNA, 51 bp, Homo sapiens
cttggagtccggacatctgaaacttgcaaaagcccaggatggtgcagccat

SEQ ID NO: 270033 - DNA, 50 bp, Homo sapiens
atggaagctttggagcagtgtattttaatggaaaactcctctctgtggaa

SEQ ID NO: 270034 - DNA, 100 bp, Homo sapiens
cgccgacatcatccagctgcctcaaatcgtcgtagtgggaacgcagtgcctatgaagtcatcaagctaaaaggatataccaactgggctattggattaag

SEQ ID NO: 270035 - DNA, 50 bp, Homo sapiens
tcaacaccaccttcatctccaccatcgttatttctcaaactctgaggctg

SEQ ID NO: 270036 - DNA, 89 bp, Homo sapiens
gctcaccttgggccaggcctggcagggctgtgtgaccatgaagctcatggatgaggtcgccgggatcgtggctgcacgccactgcaaga

SEQ ID NO: 270037 - DNA, 75 bp, Homo sapiens
tgccgcaggacctgcagcatcccagagattgcaaatagaagagtcttccaaaccagtgaggctatcacaacagct

SEQ ID NO: 270038 - DNA, 100 bp, Homo sapiens
ctcgccccgaacgggggtcttcctcctccgccgttgacagggcagcgaggtcacaggccccacctttgctgatggcgagctcatccccagggaacccggc

SEQ ID NO: 270039 - DNA, 100 bp, Homo sapiens
cgctctcgctctggccgacgagtggagaaagtcgggaaagaggttaaagaagacacgcaagtatgatatcatcaccactccagcagagcgagtggaaatg

SEQ ID NO: 270040 - DNA, 90 bp, Homo sapiens
tgtttagccctgaaccaggagcaacagatcgccaaactttggcatcagagcaaggtccacacttatcactgaaaattttcccacccagcc

SEQ ID NO: 270041 - DNA, 74 bp, Homo sapiens
tgtgtcctttcataagtatggagagtacttcccaggaactggggacctacggctcttggagcagtcggagtggc

SEQ ID NO: 270042 - DNA, 50 bp, Homo sapiens
ccgtgctgctcggcggcgctgagatgataagagcacttttgaagaaacgt

SEQ ID NO: 270043 - DNA, 75 bp, Homo sapiens
ctggaatcaggatctatttgtaaaggccagcagcttgtgatgatgccaaacaagattgattacacagtacctacc

SEQ ID NO: 270044 - DNA, 83 bp, Homo sapiens
ctgggtttgaacggaatgctggagtcagtggaagacggagctggtcggcccgaaggattttttatcaagcagaaatgcatcga

SEQ ID NO: 270045 - DNA, 90 bp, Homo sapiens
cacgtctcgtccacgacctccctaggggatatcattttcaatgcccaatacccagaactgcctcccgattttatctttggagaagatgct

SEQ ID NO: 270046 - DNA, 75 bp, Homo sapiens
tacgggtgttgaaggtgtcttcagaagagggaagtggaatcccgattgcttgatgattgatggactggtttctca

SEQ ID NO: 270047 - DNA, 90 bp, Homo sapiens
gtggattatcgagcaaaactttgggcttgcaacttttgttaccaaaggaatcagtgggatgaagctctcttgactatgagtaaaggagaa

SEQ ID NO: 270048 - DNA, 100 bp, Homo sapiens
caacgcgaagacggtaacccgtgtgactttgactggtattctaccttgtaaatactgttatttgtatatactgtaaatgatgacatcggtgggcactaac

SEQ ID NO: 270049 - DNA, 75 bp, Homo sapiens
acattcaacacctttacatttagcagtattttcatctcagcctagtgacgatgaatcaagtagtgatgaaaccag

SEQ ID NO: 270050 - DNA, 82 bp, Homo sapiens
aacagtcaattgtgtactagcattccaaggcatcacgttgggtggtttccatttagaccgaggccggttcagaacttcccaa

SEQ ID NO: 270051 - DNA, 82 bp, Homo sapiens
gaaagactggatttgggaagtaacgaattcacggaagtggtagaagaatacatgttcacttccagtgaacaagagcatgttc

SEQ ID NO: 270052 - DNA, 100 bp, Homo sapiens
ccccgggaggtgcttctgcggctgtacggagccatcttgcagagcctaaaaccattggccaaccgtcacgcaactgccagtaaaaatattttccgagaag

SEQ ID NO: 270053 - DNA, 51 bp, Homo sapiens
ctcacctgtgcgggatggaacaaaagtagtttatgccaacgtgacttcatt

SEQ ID NO: 270054 - DNA, 90 bp, Homo sapiens
ctggagctgggtcagtccgccgctcaccccgcggccgcaccttcccgccttctcagcgagtaaccagctcataaatcacatcgaacagtt

SEQ ID NO: 270055 - DNA, 100 bp, Homo sapiens
aaattattttttgggaaaacacttcaaatgctgagcaaatcctgaaggaacccaaagtggctgcttctgttttgaatccctatgtgaagcgttccattaa

SEQ ID NO: 270056 - DNA, 100 bp, Homo sapiens
agggtttgatgaaggtggaggcagcgcggctctcaggaatcccttggcaccatgtcctgtgtgcattataaattttcctctaaactcaactatgataccg

SEQ ID NO: 270057 - DNA, 90 bp, Homo sapiens
aaagcaccgagctgacaagtcaactctaagaaatccgaagtgccaccagattatgacaaacacaacccagagcagaagcagatttaccgg

SEQ ID NO: 270058 - DNA, 100 bp, Homo sapiens
ggggcgcgcccgtggcctcccagcgccgacggcggaggctgaaccggcatcctctaacaagtggcagctggataaatggctaaacaaagttaatccccac

SEQ ID NO: 270059 - DNA, 100 bp, Homo sapiens
acagccagaaaccggggaccttaacaatccacctaagaaattcagagatggagtcgggtggtacagttttgagtaccaactggtctgatgtaggtaaaag

SEQ ID NO: 270060 - DNA, 75 bp, Homo sapiens
agagacagcgattggacagaatttgtgaagagaccgtccaggctggacttgaactccttcctcggctgaagtgat

SEQ ID NO: 270061 - DNA, 90 bp, Homo sapiens
cgcagcagaaagcatttaaccagcatggctacttcatattttggaaagcagtttttaagacaaaatttcgctaaggagtttgtgatcagt

SEQ ID NO: 270062 - DNA, 82 bp, Homo sapiens
agtcacccagaacccccaccccgagtcaaagcgctgaaatgagccccgcggcaggctttacaggaagtatggtgctggcatc

SEQ ID NO: 270063 - DNA, 50 bp, Homo sapiens
gagcccaaagacccctggagacatgatactattcgttacttgtccttgca

SEQ ID NO: 270064 - DNA, 104 bp, Homo sapiens
caccaagcccatgacgacgctgctggccagggtccagctgcaagctttcttcctggtggcagatgacatcatggattcatcccttacccgccggggacagatct

SEQ ID NO: 270065 - DNA, 75 bp, Homo sapiens
cttctgcaatcctggacatgaaatgctcatctttgggtgaaaaattgtcgggatcttctgcagtccagctacaac

SEQ ID NO: 270066 - DNA, 75 bp, Homo sapiens
ccggggccgacccggcccgtagtgtggaagcagcttcagattgctgctaaaattgattcaattcctcacttgaat

SEQ ID NO: 270067 - DNA, 100 bp, Homo sapiens
tgccctttctcctcaaccagtgtggatcccttctctattacctcaccttggcatcgacaggcttttgaacacttgcagcaattagaattaataaagccca

SEQ ID NO: 270068 - DNA, 100 bp, Homo sapiens
cgacagagtcctccgtgtcctcccccgcatgacccccttggttctggctccttggcagcaatggctgtatttgaagataagtttaggccagacatggagg

SEQ ID NO: 270069 - DNA, 100 bp, Homo sapiens
tctgacaatgctaggagcgatgcaggtttccaaatatggtgacctggctaactggatgatacctgtggttccctcattcgagtgctccggcgcacagacc

SEQ ID NO: 270070 - DNA, 74 bp, Homo sapiens
agagggatccaagatcaacgcgagcaagaatcagcaggatgacggcagctgaccatgccactgcctcggtacgg

SEQ ID NO: 270071 - DNA, 98 bp, Homo sapiens
tccatactgaggaggaaaattataatgtggttgcaccaggctgtctttcacaatccagacataggaagaatcgtgagacagccagtgaacttttgatg

SEQ ID NO: 270072 - DNA, 75 bp, Homo sapiens
agcattttactactgagctgcaaagatttcgccagaagtttgagtatcactactcctgaagagatgattgaaaaa

SEQ ID NO: 270073 - DNA, 82 bp, Homo sapiens
agctctacaaggacggaggcgttgcgattattgaccagtggatctgcgcacacgccaggaattcctggtgactggaaggggg

SEQ ID NO: 270074 - DNA, 83 bp, Homo sapiens
gtaaacggggctgctggtgggccgcgtcgaagacatggaccagggctacggaggagaactacgatgacccgcacaaaacccct

SEQ ID NO: 270075 - DNA, 90 bp, Homo sapiens
aaggtggaagattcttccaaggaaccagtgcgaaggactatcctattaagtgtaatctcactgcttaatgagcccaacaccttctcccca

SEQ ID NO: 270076 - DNA, 75 bp, Homo sapiens
ttttacctttggttcacaacatcatcaaatggagtgcgctacagccagcagggaaacaatgagatcacttcctcc

SEQ ID NO: 270077 - DNA, 90 bp, Homo sapiens
aacttatggtagaacttccttggaacaaaagtacaactgctgatgaacttattagtcctaaagacattgatcctgtccagcgctatgtcc

SEQ ID NO: 270078 - DNA, 83 bp, Homo sapiens
taaactcaagcagcgagtcatccaggagccttcacgtaaatgggtccagtcatgcctcccagtaagaagccagaaagctcagg

SEQ ID NO: 270079 - DNA, 83 bp, Homo sapiens
gccaggctgccctcctgctgctgcggcagcctggggctcggggactggctagatctacgctgaccggaaaggagattgagatt

SEQ ID NO: 270080 - DNA, 75 bp, Homo sapiens
atttttgatgagaatgagcttgaggcattgacagatgcgctgctggagccaccaacgtctgtggccctggaacct

SEQ ID NO: 270081 - DNA, 96 bp, Homo sapiens
cggtggctactaaagttcgaaggcacgatatgcgtgtccatccttaccaaaggattgtgaccgcagaccgaggctatttctgccgggcgctccgcg

SEQ ID NO: 270082 - DNA, 82 bp, Homo sapiens
cccctggagggggcagtcccgggagaacctgcggcggccggagcggacatggatttgattgacatactttggaggcaagata

SEQ ID NO: 270083 - DNA, 83 bp, Homo sapiens
ctaagaaggtctgcccaggactcaggaggctactcacagtcgaactacaactccccggggtccggccagaactacagtggccc

SEQ ID NO: 270084 - DNA, 74 bp, Homo sapiens
agcctttctacatgagggataatgaagatggccctcagcacacggtgttaaaatcatcacacaacaggttcaac

SEQ ID NO: 270085 - DNA, 100 bp, Homo sapiens
ccccgcccatccccgctccccgaggccggccgcctggtcatggcgcagccgggcccggcttcccagcctgacgatggcccactgcgtgaccttggttcag

SEQ ID NO: 270086 - DNA, 90 bp, Homo sapiens
cgaggccaggagccaggggcccagaagatatggccgcgtggaaagtgtcaaaattcttcccaagaggggatctgaaggaggagtggctgc

SEQ ID NO: 270087 - DNA, 75 bp, Homo sapiens
agacagctcaggctgcccagatggtggctcccggagtccagcttccttcaaaatgtctactgttcacgaaatcct

SEQ ID NO: 270088 - DNA, 128 bp, Homo sapiens
tacgcagattgcttggccatcaaaactgaagatcggagccaaatccaagaaagagttgtctgctggttctcagcttgaagaagattctgcagtccttattgatcctttttcttggcgttaccattttt

SEQ ID NO: 270089 - DNA, 106 bp, Homo sapiens
ggccaactccaatgggcctttccagcccgtggtccttctccatattcgaggttaaagatcgaggtccggaagccactaggagattttttaattggttttattggag

SEQ ID NO: 270090 - DNA, 50 bp, Homo sapiens
cgttggaataccggctctcagcggcttataacactgcctttaaattcaga

SEQ ID NO: 270091 - DNA, 100 bp, Homo sapiens
gcaatggcgctgtcgtgtacccttaacaggtatctgctcctcatggcgcaggagcatctggagttccgcctgccggtatctgaaaactgaagagtggaga

SEQ ID NO: 270092 - DNA, 88 bp, Homo sapiens
ttccgcgacaccatcttcgacaacatcctcaaggaagatgagaatgtgcctactgctcctgatcctccaagtcaacatttacgtgggc

SEQ ID NO: 270093 - DNA, 75 bp, Homo sapiens
tgaccgactgcagttttgtcccaaagatactcaactcaaggctttgattcctgggtctaagaaggacagcaagtc

SEQ ID NO: 270094 - DNA, 95 bp, Homo sapiens
taggcaatgattcattattgcgactgcctgtttctcgagaaactaagccgtctttaaatcctgagtatgagagagaaccaaatcacaataagtct

SEQ ID NO: 270095 - DNA, 100 bp, Homo sapiens
aatactgatgataactatggcaatagcagcggcaatacgtggaacaacactggccactttgaaccagatgatgggacgaatgacttcctgaagccacaga

SEQ ID NO: 270096 - DNA, 74 bp, Homo sapiens
ttgttcctggaacgccctctttttaaaaaagcgcaaatctgtccaaggctgcctggggagcattggagaagaat

SEQ ID NO: 270097 - DNA, 100 bp, Homo sapiens
caagacaagaaaatcaacaggctttcagccttgaggcaacattggatattattgagttcctcagatgttagcaatgatggttgatttggaagaagatgag

SEQ ID NO: 270098 - DNA, 50 bp, Homo sapiens
gagtgcctccaaaggttgctgagattatttactggcaagatgagcaggat

SEQ ID NO: 270099 - DNA, 78 bp, Homo sapiens
atccgagagtttgcagcaaagatcattgaagggggtgtcttccaaccttttctttgtagaacacaactttcctgaaca

SEQ ID NO: 270100 - DNA, 100 bp, Homo sapiens
cgcgctccctccgccgccgccgccttgctgctgctcaaagctgctgccgccccttgggctaaaaggcattgaatgccccagaggagcccgaaacctccca

SEQ ID NO: 270101 - DNA, 77 bp, Homo sapiens
caaacctcaaagcatggctaagagtgttcagtagaaatgggatgtggagagcatcttgtgcgcaccatactggctag

SEQ ID NO: 270102 - DNA, 100 bp, Homo sapiens
caaatgttcttaatggcatctagaatggcctatatgaacccaatagcaatggcgagatcaaggggtccaatccagtcttcagggccaacaatacaggatt

SEQ ID NO: 270103 - DNA, 83 bp, Homo sapiens
cacaataaaagagacctctacttagctcagcaattcttaccttacggcggagactggctgagtggaaagcaactaaactgaag

SEQ ID NO: 270104 - DNA, 74 bp, Homo sapiens
gagatctcctgtgctgcgaccactgcccggctgccttccacctccagtgctgaatacagattctgttcatcttg

SEQ ID NO: 270105 - DNA, 74 bp, Homo sapiens
gactgcactggacatgacagggaaaccagtttacactcttacatatgaaatgcttcggttacccacagtctttc

SEQ ID NO: 270106 - DNA, 90 bp, Homo sapiens
ttcagagcccggcaccacccatcttgagtatctggtgagccgttctccaaccctttggcccccgatggccacgatgtggatgatcctcac

SEQ ID NO: 270107 - DNA, 127 bp, Homo sapiens
cccagccgaccttgagctccaggagttcgtctcttacgtctgcggaagtgcagctgcctcagttcttagcgcagaaaaagcttgtggtgaaggggggcaaaaaaaagaagcaagttctgaagttcac

SEQ ID NO: 270108 - DNA, 96 bp, Homo sapiens
gtcggtggcggggctgaagaagcagttctacaaggcgagccagattctctttgtggccagatgggtttgtatggacaggcttgtccatctgtaact

SEQ ID NO: 270109 - DNA, 100 bp, Homo sapiens
aaatacccgcaacagccccttcgtcccaacaaagagctcctgggaaggtgctgctggatgcagtttgcaaccacctcaacctcgtggaaggtgactattt

SEQ ID NO: 270110 - DNA, 75 bp, Homo sapiens
ggggcagtgtgctcgtgggaatggaaaggacagcaagcacaggttggatccatgccgtctacacccctgtagact

SEQ ID NO: 270111 - DNA, 98 bp, Homo sapiens
gcagaaggccgcgtccattccaggaagaggatcttctccggaaatttatgtgtctcggtaccacgtgaaagactcctcacgccacgtcatcctaggca

SEQ ID NO: 270112 - DNA, 90 bp, Homo sapiens
aaagcaagctggttctctgggatataaataagcatcaaagctggacgactcctctcctacattccatatcagctgtacaccaagcagtcc

SEQ ID NO: 270113 - DNA, 50 bp, Homo sapiens
atggcctgttatttgtctcaacaaaagatttctcctggcggcgctggtcc

SEQ ID NO: 270114 - DNA, 90 bp, Homo sapiens
tgcagcagcagcagcagaccacccagcagcagctgccccagaaggttgaccccctgtttacagtgccagcgccaccaccgccgatttcca

SEQ ID NO: 270115 - DNA, 50 bp, Homo sapiens
ttgccattggagtctgcactggcctgatagcagaccccacgttagctgaa

SEQ ID NO: 270116 - DNA, 83 bp, Homo sapiens
cccgtcacgcctatccctgtcctctacccagagagtgcttcctgcctgctcaggctcaggtgcaggtgatggtcctaccagtg

SEQ ID NO: 270117 - DNA, 83 bp, Homo sapiens
gtggcagctgctgagttctcggtgaagatgagtaacccgaagcccctagaggagtggtcacctgcctgagggcacttctgtcc

SEQ ID NO: 270118 - DNA, 80 bp, Homo sapiens
gggaaagacgaggaaagaggaggaaaacaaaagctgctacttatggaagatacaaaggcatttaaatcaaacggtattga

SEQ ID NO: 270119 - DNA, 98 bp, Homo sapiens
ctggatgaatcccttgaagaccctgaaacagtgcctgtggcatttgatgatgtctccatctacttttccactccagagtgggaaaaattagaagaatg

SEQ ID NO: 270120 - DNA, 83 bp, Homo sapiens
tgccgcctgcccttccggaaggattttgtccctttcatcactaaggtttggtgcacctcgatttggaggaagtagggcagggc

SEQ ID NO: 270121 - DNA, 97 bp, Homo sapiens
gaagggcggaaaccacatccccgaaagatctggcagtgtggtggggttctggaaacacacccatgttcccatgttggccatgttttccccaagcaag

SEQ ID NO: 270122 - DNA, 75 bp, Homo sapiens
caggattccaggaatatatggaagattggataatgttgtctgtctgtctccaaaactggcacaaagcctgggaaa

SEQ ID NO: 270123 - DNA, 100 bp, Homo sapiens
cagctgcagttagatgaaaatgagcttcctcacgcagttcactttctaaatgaatcagagtctggtgctggcagaaagtagtcctggaagggatagtact

SEQ ID NO: 270124 - DNA, 75 bp, Homo sapiens
caccagctgctgctgacagcaacaccactgcagcatctagagtgagctgagtcgacagaaacttcatacccaaga

SEQ ID NO: 270125 - DNA, 83 bp, Homo sapiens
cttcgacttggagtctttgtccaggacggacttaaccaccaccatgtcgagcaaaagaacaaagaccaagaccaagaagcgcc

SEQ ID NO: 270126 - DNA, 80 bp, Homo sapiens
gcagtggtcgcttcttctccttggttacttttcacatagaaccatatagcaatcgagatgatcaaaacatgtacaaaaat

SEQ ID NO: 270127 - DNA, 75 bp, Homo sapiens
atgaaagaagtcattccttttttgaaggttactataacaacagtaccaaggtggctgtgaaaaccctgaagccag

SEQ ID NO: 270128 - DNA, 90 bp, Homo sapiens
cgaggacataaggaactagtcacagtgttgctgcaacatagagctgacattaactgtcagggaggtggggaagacagggctccagctacc

SEQ ID NO: 270129 - DNA, 74 bp, Homo sapiens
gccaacattttgcggatactcttctggccctgggaggagcggggacactgaggacctctctccaaattggcctc

SEQ ID NO: 270130 - DNA, 100 bp, Homo sapiens
tctgagcatccctgcaatgaagagaacccagggaagttcctttttgaagtagttccaggtataatacttctccacgtctgcttcaggaagaaagtgcctg

SEQ ID NO: 270131 - DNA, 100 bp, Homo sapiens
aagccaacaagcagcagaacttcaacacagggatcaaggactttgacttctggctgtctgaggtggaggccattgagtactacacaaagctggagcagaa

SEQ ID NO: 270132 - DNA, 90 bp, Homo sapiens
gcgatgcagaagcagtgaagggcataggatccggcaaagtcctgaagagtaccatgagctcccgacactctgccagcccagtggttttca

SEQ ID NO: 270133 - DNA, 100 bp, Homo sapiens
cacggcgtacgccctcatggggaaaatctccccggtgactttcaggtgcctgccctgtgctgtcctggaacctggtccttccaccgggcagggggtcgag

SEQ ID NO: 270134 - DNA, 101 bp, Homo sapiens
ttggtaggcatcatgttctgtttacttgaaccagtgagaagatggccgagcaagcaaggataagtatatttggagttcttacaacatggcagacattgaca

SEQ ID NO: 270135 - DNA, 82 bp, Homo sapiens
tttggcagggtgatgcagataggtcacgagaagagaatgccttctagatgcaaaatcacctccaaaccagaccacttttctt

SEQ ID NO: 270136 - DNA, 96 bp, Homo sapiens
gacgacagtcaggagctcagtatggctcttttccaggcatagaatgtcaagctaaccaggcgtccgctacttcagaagagtgtactgtcgcatggg

SEQ ID NO: 270137 - DNA, 90 bp, Homo sapiens
ccgtgcccgacctcagcgtcgaggtcaacatctcctctgagacagcatcatggcagaacaggatgtggaaaacgatcttttggattacga

SEQ ID NO: 270138 - DNA, 113 bp, Homo sapiens
gcggagagagtcagcctctggttcagactgcagtaaccagacacagcattgttggttttgccatgtactattttacctatgacccgtggattggcaagttattgtatcttgag

SEQ ID NO: 270139 - DNA, 114 bp, Homo sapiens
gaggttcagctgatgaagcttctgaaccatccacacatcataaagctttaccagggggatatgagactttctactcggaatatcctgagtgttgcgtggatgtaaaacccattt

SEQ ID NO: 270140 - DNA, 100 bp, Homo sapiens
ggcgaagcacgagcagatcctggtcctcgatccgcccacagacctcaaattcaaaggtcaacatggctgaacaggagcctcgttctctgtcagaatcgcc

SEQ ID NO: 270141 - DNA, 130 bp, Homo sapiens
ccagtcagcttgccgccggcggccaagcagccaaccatgctcaacttcggtgcctctctccagcagactgcgttccagggtctccctccactgctgtagtaacccgggtccggggcctcggtggtgctcc

SEQ ID NO: 270142 - DNA, 89 bp, Homo sapiens
cagcatactgaagtggtttgcaacatccttcttctggataacactgtacaagctttcaaagtcaattttgtagaagactatgaacctac

SEQ ID NO: 270143 - DNA, 75 bp, Homo sapiens
tgacaagccttcaaggagcccagggaagtcaacgaaaggttccgttgtccttgaccacgtattccatcacgtaaa

SEQ ID NO: 270144 - DNA, 98 bp, Homo sapiens
gctgctaagtacatgctggattgtagaacttctctctctggtacagccaaagaccggagctttggagagatgaagtttaaacagtgtcctacagagaa

SEQ ID NO: 270145 - DNA, 90 bp, Homo sapiens
gcggacttcgacacctacgacgatcgggcctacagcagcttcggcggcggcagaggaggctgacccgcggctgattgagtccctctccca

SEQ ID NO: 270146 - DNA, 50 bp, Homo sapiens
gagaaattccaagttcagattctccagatatttggagttcttacaacatg

SEQ ID NO: 270147 - DNA, 78 bp, Homo sapiens
cagtggtgtgattgcacttgttagtggaccttgtgcgaagaaattagaggaattcctgcaggagaagcatttgttcca

SEQ ID NO: 270148 - DNA, 89 bp, Homo sapiens
gccagggtccctgaagagggaagacacgcggaaacagcaatactacatcctgctgatcctgacggacggcgtggtgaccgacatggccg

SEQ ID NO: 270149 - DNA, 75 bp, Homo sapiens
cgccaaggagaccaggaagcgagcactcagcagactgaaccggccgctgacactctcggagaagattgtgtatgg

SEQ ID NO: 270150 - DNA, 96 bp, Homo sapiens
aagcgagggacctgggactgctcacagccagctgtcacgggaagtctttttaggataaacgtaggcctgcgtggcctggtggctggtggcataatt

SEQ ID NO: 270151 - DNA, 74 bp, Homo sapiens
cccaccgtgcccctgatggccgcgaaggtctgcatcgggtcccttcgctgggctgaccaactgactgaagagca

SEQ ID NO: 270152 - DNA, 74 bp, Homo sapiens
ccagcgctgcttcatcttccagtgctgataattatggcattagccatcctgtagagatggtttcagcatgttgg

SEQ ID NO: 270153 - DNA, 51 bp, Homo sapiens
acccaagtgcattgcctttggaaacgagggtagtttgaagtttgagtatcc

SEQ ID NO: 270154 - DNA, 100 bp, Homo sapiens
agcaacattgactacgaggaatggcggcggctgccgcaggacctgcagcatcccagaggtatgcttcagaagtgtccttctgttgatgacttcgtaagtg

SEQ ID NO: 270155 - DNA, 89 bp, Homo sapiens
cccacacacaggatgtcaagcatgtggtttggcacccaagtcaggagtgggctcgggatgagtttgaaggcctcttcaagcagccagca

SEQ ID NO: 270156 - DNA, 98 bp, Homo sapiens
tcagcctcccgagtggctgggactacagatgtaaacaggttacccagctgggagagaggacatctgctggctggtgtggcgtccagcactgatgtgtc

SEQ ID NO: 270157 - DNA, 50 bp, Homo sapiens
tatggcgctgaaacggattaataagattctgaaaaagagttccacgtcct

SEQ ID NO: 270158 - DNA, 100 bp, Homo sapiens
gcacatgtacgggaaggacaaagtggacatgggaaagcggaaccaccaaaaggagtgatgatcaacgatctcatgataaatctggatgctagttctcatg

SEQ ID NO: 270159 - DNA, 75 bp, Homo sapiens
ccagcacctttcggcttctgagacggcggcagcagcggcattcaggtgatgggcagaggcttcagtgtccccttc

SEQ ID NO: 270160 - DNA, 75 bp, Homo sapiens
tgaagacgcacggtgccaggaccaagtatctgcctgatttagcagctaatgaagcccagcttctgaggaaaattc

SEQ ID NO: 270161 - DNA, 75 bp, Homo sapiens
aaggattccaagtaactcttatttgaatggcgatcagtccacgaagcgatgcaactttctccagtcagaaatcaa

SEQ ID NO: 270162 - DNA, 118 bp, Homo sapiens
gtctgttgtaccccactgctggggtggtggttccaatgagacagggcacaccaaactccatctgataaggatgacattcggctgctgccgtcagcattgggtgtgaagaagagaaaac

SEQ ID NO: 270163 - DNA, 75 bp, Homo sapiens
taactgtggacatcaccattcaggaagatatgggataaaaccagcctggaatgtttgaaagtgttaacaggacac

SEQ ID NO: 270164 - DNA, 51 bp, Homo sapiens
taatactaaatgtgttaccataccaagattcaaacgctcaagaaattaagg

SEQ ID NO: 270165 - DNA, 100 bp, Homo sapiens
attcttcgacgctattttttggaactgacacaaagtttcatcattccattacttttgtctgatccaaactatggggtccatcttccggctgtgaaactgc

SEQ ID NO: 270166 - DNA, 101 bp, Homo sapiens
tggaacagaggaggcaggcacagagaggaggaattttgttgtcagagaataaaaggaggttgtccataattgactttaagcagcaatcagtaaaacattga

SEQ ID NO: 270167 - DNA, 85 bp, Homo sapiens
agcagcagaggtgattctgcgtgtggacaacatcatcaaagcggcacccaggtgcagctgacgagatcatgttgccttgtgaatt

SEQ ID NO: 270168 - DNA, 85 bp, Homo sapiens
ccagccgcaccatgccgctcctaagcctgcacagccgcggcggcagcagcagtgagagtttgctggcctagacctgaactcttca

SEQ ID NO: 270169 - DNA, 80 bp, Homo sapiens
cccatctgctgaaccctgactgggtgagccactgcgcctgatcaaggcatcaccgttgaacctcctaagaggaaaacata

SEQ ID NO: 270170 - DNA, 75 bp, Homo sapiens
gcctttgtacccaatgacggttgcttgaactttattgaggaggatgaagaaggttataacgatggagaggtagat

SEQ ID NO: 270171 - DNA, 98 bp, Homo sapiens
aggagctggtgaaactcctcaatgagctcttcggcaagttcgatgaattagccacggtaccggcggacgtcgagaaatgtcaggatcggatggagtgt

SEQ ID NO: 270172 - DNA, 90 bp, Homo sapiens
ctgcagtccagcaggaggtgccatctgctcagtctcctggagttcatgcagatgcagatcagattaccagcaatgctaccagtgatttaa

SEQ ID NO: 270173 - DNA, 74 bp, Homo sapiens
atcctcagttgactcattcactcaggccaccagcccctcgggttccaagatgcagctactggagacagagttct

SEQ ID NO: 270174 - DNA, 97 bp, Homo sapiens
accctgaagatatttagagatggtgaagaagcaggtgcttatgatggacctaggactgctgaaacctgtgaaggtcgaaacagctgcgtttcctgtt

SEQ ID NO: 270175 - DNA, 132 bp, Homo sapiens
cgccgctgctgggagatgggcctactcgcccgccaccctgcgctgccgccgctctgaggagttaaagcagtgattccagcagtagttcaagtgatgattctccagctcgatcagttcagtctgcagcagtcc

SEQ ID NO: 270176 - DNA, 75 bp, Homo sapiens
tgacagaagaaaaagatgtcattccgtaaagcatcctgtccaagtgctgccacgcgatggtggcgctgatctacc

SEQ ID NO: 270177 - DNA, 76 bp, Homo sapiens
cctgaggttctccgagatgagccctataatgaaaaggtgatccgcaggggctggctgaccatcaacaacatcagcc

SEQ ID NO: 270178 - DNA, 98 bp, Homo sapiens
ggagcaagtgaacaccttgactaaaccgacttctgatccatggatgccatcagaccccaactgtaaacttgaagacaagactgaagatggagaggcac

SEQ ID NO: 270179 - DNA, 101 bp, Homo sapiens
caccgccccgggacccgcgccgctgccctccggctccgcgggcggcccacggcgaggtgctggagaatctggtaaaagcaccattgtgaagcagatgagga

SEQ ID NO: 270180 - DNA, 97 bp, Homo sapiens
cgagaggtgcggcgaaggaggcagaggcacttatgcttgtcagggcgtctctggccgagcctctttttgtggaaaacgacagcagcagcagtggcct

SEQ ID NO: 270181 - DNA, 100 bp, Homo sapiens
acaggaagtggccgtagcggcttgttggataagatcgggctggtggtcatcctggcttccacggtggtggccatgtcggccgtggcccagctgtgggagg

SEQ ID NO: 270182 - DNA, 100 bp, Homo sapiens
cagtgcgtgaggttggcgcggcgcagtcttcctgctttggcgttgtctctcaggtcggagagatcttctcggcggccggcgccgccttcacgaagctcgg

SEQ ID NO: 270183 - DNA, 75 bp, Homo sapiens
gtcagtgtggcaaccagatcggtgccaagataacaacgaacttgatgcaagtgataggtttgccaaggtcagacc

SEQ ID NO: 270184 - DNA, 74 bp, Homo sapiens
cgatgtcatcaagttgcaagagattccaaccttccagccccttttgaaaggaaactcttatcactactattgat

SEQ ID NO: 270185 - DNA, 96 bp, Homo sapiens
gaaggaggtggaggagtacaagaactttcggcccgacgaccccacccgcaaaaccaaagccctgctgcaggcaattgaaggaacagactaaaaatc

SEQ ID NO: 270186 - DNA, 100 bp, Homo sapiens
tccccagagcctcagtttgtgcaggacaccgacatggaacagggactcactggggcgggtgcctcccaggtcaaatggaataaaaaaaatgctaactgcc

SEQ ID NO: 270187 - DNA, 100 bp, Homo sapiens
ggcctctactgtgactacagcggggaccgcccgaggtacgcaataggagtgtgtgcactggttagcaggaagaagatgagccttaagtctgaacgccgag

SEQ ID NO: 270188 - DNA, 100 bp, Homo sapiens
atgagctctgcagccttcccaaggtggctggatggaggcgtcctgcctagagctggcgctggagggcgagcgtctgtgcaaggcgggcgacttcaagaca

SEQ ID NO: 270189 - DNA, 50 bp, Homo sapiens
ccggagatgagccgaggcttgtcccaggtgtgacaccttcagcaggtctc

SEQ ID NO: 270190 - DNA, 100 bp, Homo sapiens
attttatcttttattctgctcgaaggctacggaatgcaagagctcaaagcaggaagcaggtattatacctgaagaaccttagccctcgggtgactgaaag

SEQ ID NO: 270191 - DNA, 82 bp, Homo sapiens
gctagtgttggagtgcaccaagaaatgggaggactcaccaggcttgtggccaggggcaggtaccatccgcctagagcaggat

SEQ ID NO: 270192 - DNA, 100 bp, Homo sapiens
ccgccaccaggtcaccctggaagagtcgctggccgaagaatgtgaaaacctttgcatcttctgatagtctagccaaggtccaagaagtagcaagctggct

SEQ ID NO: 270193 - DNA, 74 bp, Homo sapiens
cagaagttactttgcctaaaagtatacaggtggaagcactgcaggctcagctgggagagcagaccaaactttct

SEQ ID NO: 270194 - DNA, 83 bp, Homo sapiens
gaaaatgtggtcctactaggagaaataggctgaggcaacaggctgtgatggccatcagccaggagctgaaccggagggccctg

SEQ ID NO: 270195 - DNA, 90 bp, Homo sapiens
agctcgcccaagccgcgtccccagagagcgccctgagagaacagggtggccgcttggtccagaaaatgtcactgaaattcacaaatgcaa

SEQ ID NO: 270196 - DNA, 96 bp, Homo sapiens
aaggatggaagaggtcctatgacaggatcaaggtgcggtcttgctctgttgcctaggctggagtacagtggtatgagtatggctcaatgcagcctc

SEQ ID NO: 270197 - DNA, 75 bp, Homo sapiens
ggccaaggtgccggccgacaccgaaataaggatctggcatgtcaacacaaacataggaagttgaggcagtcaaag

SEQ ID NO: 270198 - DNA, 97 bp, Homo sapiens
atttcctggtgcatttttaccttgtgatgcacctgggattaaccagcgaggatcagctccatttatcttaaagaaattggacagcatatgaagacag

SEQ ID NO: 270199 - DNA, 82 bp, Homo sapiens
tttgaaaatcaacgacaacttgagcacagggggatatgagactttctactcggaatatcctgagtgttgcgtggatgtaaaa

SEQ ID NO: 270200 - DNA, 83 bp, Homo sapiens
atggagatgaagaagaagattaacctggagttaaggaacagatccccggaggaggttgtagcagataccaatataagcgccat

SEQ ID NO: 270201 - DNA, 100 bp, Homo sapiens
cggaaggcgtcgtcttctcttaaaatgcgcctaaccaaggaaaatgtgaagccttctggaagacaaattgggaagttgagccacagcaatccaaccattt

SEQ ID NO: 270202 - DNA, 98 bp, Homo sapiens
gaggcggcagtatgaccgggtttctttgatgcgacctcaggaaggagatgaggcgaggaaacgagacctctttcgttccttctagaaggtctggagga

SEQ ID NO: 270203 - DNA, 119 bp, Homo sapiens
cgctgcaagatccctttattcatgctaatgtcctttatgccggcctctgctgtccccccattcaggctgcctgctcgaggagggcctctgcggagcgtccgaggcctgtgtgaacggtg

SEQ ID NO: 270204 - DNA, 96 bp, Homo sapiens
cccgacacaaggcagcttcccacagcaggttggacagttcacagggatgggcgtgttttgggcgtgctagaggtgtcacgctccattggggacggg

SEQ ID NO: 270205 - DNA, 82 bp, Homo sapiens
cacgtggctgctgccaagggctacattgaggtgatgaggaaggtgggagtcaatcattttgacaagtctcctgaaaggaaca

SEQ ID NO: 270206 - DNA, 100 bp, Homo sapiens
cggacgcagtgatttgctccccctcgtgcagcaacccccacacccagcaccagctggctctggacaagtcagattcccacccctctgacgctctgaccag

SEQ ID NO: 270207 - DNA, 100 bp, Homo sapiens
ccacggaagaccttctcatgtcccacacaaggcagcgggacaagctgcaggaggacatcgatctcagggaactggaagacgaacactggctctgcgatgc

SEQ ID NO: 270208 - DNA, 90 bp, Homo sapiens
tacatggagacatatatgggtcctgctctttttgcacttcataaacaagcagatatgcaagaagagaaaaaccgaatcgaaagagtcctt

SEQ ID NO: 270209 - DNA, 100 bp, Homo sapiens
gatttttgagctggtggaagtggttggaaatggcacctatggacaagtctataaggtactccaaagattcaggtttactcacgtcatccagcagagaatg

SEQ ID NO: 270210 - DNA, 52 bp, Homo sapiens
atagcaatctggttttcttgggcaaaagtcaacaactctagcttaattggag

SEQ ID NO: 270211 - DNA, 82 bp, Homo sapiens
cggtgctcccagagctgtggaaggaacttgctactaccagcaccatgccctaccaatatccagcactgaccccggagcagaa

SEQ ID NO: 270212 - DNA, 80 bp, Homo sapiens
ctctcttcgctctttgcatcttaactgcagggagtgcatccgccccaacccttttccccctcgtctcctgtgagaattcc

SEQ ID NO: 270213 - DNA, 50 bp, Homo sapiens
gctcaagcagagcttacagtgcaagcttatcactgtgtgggcatatgatc

SEQ ID NO: 270214 - DNA, 98 bp, Homo sapiens
ctcaatgacagtcaagtggaaacaactgtctgaaaattacttggggcacacagcaaaaaatgctgtgatcacagtcccagcttatttcaatgactcgc

SEQ ID NO: 270215 - DNA, 100 bp, Homo sapiens
tcttcctgaggttttcctaagccatcccctggcggaaccgcccccagctgttaaaaagaaagctggctttatcactccagttccaggaggtgtgggaccc

SEQ ID NO: 270216 - DNA, 82 bp, Homo sapiens
agcaaagaatgacagcaagaggcaaaacttcggacatagaggccaaccaacctttggagctccaccagcccattggagaaaa

SEQ ID NO: 270217 - DNA, 82 bp, Homo sapiens
agcagcgccgtcccgtccgacagccaggcccgggagaacttccccgggcgctgcctggacaggcctgcctgcgtgctgggac

SEQ ID NO: 270218 - DNA, 101 bp, Homo sapiens
gagcgagcgagcggccggcaggttgggaggagcggccgaagggatcgcttacacctgagacgaactacagaacagcacgtaccagaggtggaagtccaagt

SEQ ID NO: 270219 - DNA, 100 bp, Homo sapiens
cgacatgatgacagctggccttttttgaaacttgtttctaaaatccaggagaaatcaatggttctgccaattatgagatgtttatatttcacaacggagg

SEQ ID NO: 270220 - DNA, 100 bp, Homo sapiens
cgatccagcctgcggagcctgtggggcaggaactccaggatggcattgggcagcggcaaactgttgtcagaacattgaatgcaactggggaagaaataat

SEQ ID NO: 270221 - DNA, 95 bp, Homo sapiens
tgaatatcctgacatgtgacaatgaaattgaattgaagaaaattgcacgtaatcacccaaatgccaagtgaccaagtcagccatcggggtgctct

SEQ ID NO: 270222 - DNA, 100 bp, Homo sapiens
ctgaactgatgtacatcaatgaagttgaacgtttggatggatttggacaggaaatcttccctgtaaagaaagaagattggcccatgcacaagctggaatg

SEQ ID NO: 270223 - DNA, 100 bp, Homo sapiens
tcagaatctggctcggaggaatctcagtagggacaacaggcaggagaattatgggagcgcatttccccaggatgatgttgaatttgaagtatcatcggac

SEQ ID NO: 270224 - DNA, 100 bp, Homo sapiens
ccagcgggccctggccgctcacccgtggaaagtacaggtcctgacagctgctggacagtgccacatcgcttatccaggcagctaaaaacctgatgaatgc

SEQ ID NO: 270225 - DNA, 98 bp, Homo sapiens
gacaagttcgagtttggggagaagctgaaacgccagaaatatgacgtaccccctgtaccggctgggtggcccacaacttcgggtgttccgaaccaact

SEQ ID NO: 270226 - DNA, 100 bp, Homo sapiens
caccgaggccccccggcaccgcgcctgctgccgggttgcgctccgtgcacctcttgcgggctgtacatccttttgaaatcccagagatcttcagtctccc

SEQ ID NO: 270227 - DNA, 72 bp, Homo sapiens
gcctgtggcaggactgggaccagccctggcttggaaagcagcagctccgtgaagaaagatgagactaatgtg

SEQ ID NO: 270228 - DNA, 134 bp, Homo sapiens
cctgtcttcagatcttcacagcacagttcctgggaaggtggagccaccagcctctccttggccccttcacagatgtagtcactacaaatcttaaattgcgaaatccatcggatagaaaagtgtgtttcaaagtg

SEQ ID NO: 270229 - DNA, 82 bp, Homo sapiens
ccagctcggcccgcgggggagccccgggagccgcacgcccgtggaccgggagcccgtggaccgggagccggtggtgtgccac

SEQ ID NO: 270230 - DNA, 120 bp, Homo sapiens
tgcttgaatgaagcttccgttttacataatctgaaggatcgctactattcaggactaatctatggatgatcatggtgattttactgctgcttgtggctatcgtggttgttgcagtctggc

SEQ ID NO: 270231 - DNA, 88 bp, Homo sapiens
cctcgggcacctccggtaccgctgcagccaccgcggcccccgcgggacttcatagacctcacgttgtcgaagactcaacgaaagactc

SEQ ID NO: 270232 - DNA, 100 bp, Homo sapiens
gcttctgcagcctcagtgctactcaggttccagcaagacctggagcaggtgcaggcatccccaatggattggacaattgccctaaagtccccaacccact

SEQ ID NO: 270233 - DNA, 100 bp, Homo sapiens
cttgtcccttatccatgttttcaggcccgatatctctccctattttggcctattctatgagatgtatgtccatccctgtgacgatgagggctattcggag

SEQ ID NO: 270234 - DNA, 83 bp, Homo sapiens
cactgagtcaacagactgagcgcgtccaggcctgacagctctgcggctcgggccctgaggttgactttggcagaatatcatga

SEQ ID NO: 270235 - DNA, 99 bp, Homo sapiens
gcggagagtcaggggccttgtgtcctaccatggtatttgctaacgtttagagagtgcttccccttgccgagcactggagaggaacgaagggcatcctac

SEQ ID NO: 270236 - DNA, 100 bp, Homo sapiens
gctgctgccctgcgcgctgctggctgacaatgcagatcttcgtgaagactctgactggtaagaccatcaccctcgaggttgagcccagtgacaccatcga

SEQ ID NO: 270237 - DNA, 89 bp, Homo sapiens
gaaataaagagtgattcttctcctctgccttcagagaagtctgatgaagatgatgataaactattccttgagcgagagcgggcagccca

SEQ ID NO: 270238 - DNA, 100 bp, Homo sapiens
gttgaaaagtggaggggtgaatcagtatgttgtgcaagaggtactgtccatcaaacatcttccaccacagcttagagtggagttccaggtgatgacacag

SEQ ID NO: 270239 - DNA, 100 bp, Homo sapiens
ccagggcttcgcggtggacaaggccttcctcacctcccacaagggcatcctgctggaaaccgagctgggttgtcgttttggaaagtaggccaacagaaaa

SEQ ID NO: 270240 - DNA, 100 bp, Homo sapiens
gccacccgatggaagattcgatggacatggacatgagccccctgaggccccagaactatcttttcgactgtgccctgtccacggtgcctcctgcatgtcc

SEQ ID NO: 270241 - DNA, 74 bp, Homo sapiens
ttttggcattgctgctaagtacatgctggattgtagaacttctctctctctgagatctgtatctgtggacctga

SEQ ID NO: 270242 - DNA, 74 bp, Homo sapiens
cgctgccgtggccgcccggctgccgggagccgacagcttcgcgccggtgtccgagctgcaggaggagggaatga

SEQ ID NO: 270243 - DNA, 99 bp, Homo sapiens
cttagaaatactcagtgggtctttggcatagttgtttatactggacacgacaccaaactcatgcaggacagagcgggatgccaccagcttgtccaaagg

SEQ ID NO: 270244 - DNA, 80 bp, Homo sapiens
cgacccggacaccgacgcgctcatctgctggagcccggaagcggggagaggtggtgagagatgacccctgttgaggattt

SEQ ID NO: 270245 - DNA, 75 bp, Homo sapiens
ctggactctgcaacacctgtcaactccatctgcagtgttcaaggaccagtcctgcctctgttgtagaagacatgt

SEQ ID NO: 270246 - DNA, 74 bp, Homo sapiens
tggatcgctgtgatcgtcacttgtgaagttattcgaagtcattgaaactgaaaaaacactctacctaatcatgg

SEQ ID NO: 270247 - DNA, 74 bp, Homo sapiens
atctgtggcccttccaaataagcggcataaagcaattgagaattcagatggtatgttacttacggtcatgaact

SEQ ID NO: 270248 - DNA, 74 bp, Homo sapiens
tacagaaagagtcaacagcagtggcaacaggctgaacagtccaaagaagagcagaagcaaggtctgaatgcaga

SEQ ID NO: 270249 - DNA, 83 bp, Homo sapiens
tggacctctcggctttcctggtcagcagcgacttgatgtctttggtggacttgggaaagaggttgctagaagcagcaagaaaa

SEQ ID NO: 270250 - DNA, 82 bp, Homo sapiens
cccaaatgatggtcctcctcctgacgttgtaaatcaggaccccaacaataacttacaggtgtgcaagcatttcctggaagct

SEQ ID NO: 270251 - DNA, 100 bp, Homo sapiens
ccataagaggaaaagtcaggggagtgttgaagactctgcctcctacaaatatgttctgaaatttcctcaacagaccctccactgagtgttacagaatcta

SEQ ID NO: 270252 - DNA, 50 bp, Homo sapiens
aattcagttgatcattgatgcatacaataaacactttgtgctactctgtg

SEQ ID NO: 270253 - DNA, 103 bp, Homo sapiens
tagcagtcgtccgagcaatcagtgccgcaactccattcaagggaagcacctcatcacggatgaactcggatttgaagaagatatcctgattgtttcagagggg

SEQ ID NO: 270254 - DNA, 96 bp, Homo sapiens
ggaggacctctcgccaagggccccaatgagtggcacacagtctactatcaccgacaggtgtcatggagaaactccagctgggcccagagattctgc

SEQ ID NO: 270255 - DNA, 100 bp, Homo sapiens
ccccactgtccccgggttttcccttgggccagctccctacagaggcacatgctcacacacactgagcagatttactatgctgggcctgtcaataatcctg

SEQ ID NO: 270256 - DNA, 82 bp, Homo sapiens
cgaagcgctgcgctcgcgcccggatccctcagagtgaagacatttccacctggacacctgaccatgtgcctgccctgagcag

SEQ ID NO: 270257 - DNA, 98 bp, Homo sapiens
tcagagcagatgtgatctgcgctaggtggcatctcctctcacggatgcctcgcattccaggatgccttgaagattttctgtaggataaaaggtggtcg

SEQ ID NO: 270258 - DNA, 100 bp, Homo sapiens
aacagataaaggtggatgaaaatgaaaactgttcctctctgggatctccaagtgaaccaccacaggtgcctggaatacttattaagaaacgatgcaaatc

SEQ ID NO: 270259 - DNA, 75 bp, Homo sapiens
atgcaagatacaatggaggagaacagtgagaggtgttgacttcaaaatcaaaactgtagagctaagaggaaagaa

SEQ ID NO: 270260 - DNA, 100 bp, Homo sapiens
tgcagtcgacatactcggataccagcgctcagcccacctgtgattatggtgtgatgaatgcagactctgctaccattttggctgtttggatcctcctttg

SEQ ID NO: 270261 - DNA, 85 bp, Homo sapiens
gttgtgttcctggcttccctctggatgctgacagaaacaagggagatgcaaatgatgggaacaatggagcccttgtccccaggcc

SEQ ID NO: 270262 - DNA, 50 bp, Homo sapiens
gtttccacatcggtcagaaaaagatgaactgcaagcacatgttgaccaga

SEQ ID NO: 270263 - DNA, 90 bp, Homo sapiens
gtttctctctatagaggtgacatcacattgctagaggtagatgctatagtcaatgccgattactgtcctagatgagacatggactgtatt

SEQ ID NO: 270264 - DNA, 51 bp, Homo sapiens
tttcacctctaaaaaatgggatgggagcagcatggacctgtcagcaactaa

SEQ ID NO: 270265 - DNA, 82 bp, Homo sapiens
ctcaaagacatgcggttacactgagcccaggacagggagatacatctggggactataagaaagctcttctgctgctctgtgg

SEQ ID NO: 270266 - DNA, 75 bp, Homo sapiens
gccagggcagctgaaagacagagaccttcagacctctgactatgtgaagatacggtgggaagatgactgaccgca

SEQ ID NO: 270267 - DNA, 83 bp, Homo sapiens
ggcatctcctacattagcgtctacgaccaccaagataccatgtttgtgtggaagtgccccgtgtttgctatgccgatgctgtc

SEQ ID NO: 270268 - DNA, 87 bp, Homo sapiens
aggataaacttgaccaggtttccagtgaaataagcctgttacatgaacagaatatggcaaaaatgagactacttacttttatgggaa

SEQ ID NO: 270269 - DNA, 80 bp, Homo sapiens
gttccatttttgccaaagtactctgctggattagaattacttagcagagagaacgaggtgctcaaagtccaactgaagaa

SEQ ID NO: 270270 - DNA, 100 bp, Homo sapiens
agcgctcggcgcttggcgctggcgctggccaaggcgagtctccgggaccattatggcagtcaagtggacgggtgggcattcttctcctgtcctctgcctg

SEQ ID NO: 270271 - DNA, 100 bp, Homo sapiens
cctgtccatcgtgtgcctgatgatcacgcagctggctggcttcagtggaccagtaactaggatttctacctcaaccgcgagacctatgcaaggacggtgt

SEQ ID NO: 270272 - DNA, 85 bp, Homo sapiens
cgccgaagaagcatcgttaaagtctctcttcaccctgccgtcatgtctaagtcagaggttgaaatcacaaagattagacaccttt

SEQ ID NO: 270273 - DNA, 100 bp, Homo sapiens
cattactgccaatcttttgtagatgtcagcataaaggatttccctcttgagtgctcaaagttccaaatttcattggacagtattacaaatggaagaaaat

SEQ ID NO: 270274 - DNA, 78 bp, Homo sapiens
agaagaaaagactaaaaatggtgtagtaaaaggacagccttctccttcaggcttgtctggagcgggaaagactactgt

SEQ ID NO: 270275 - DNA, 100 bp, Homo sapiens
gttccggcgaggggggagcctcagcaggattgctgtgtgaaaaccgagctgctgggagaaggaggtgaggagcgcctctttccggccgccatcacatcta

SEQ ID NO: 270276 - DNA, 75 bp, Homo sapiens
tggcacaaagttctctcgatcagggcatacatctttcttcgacaaagggggtgacagtccaaagattgacttggc

SEQ ID NO: 270277 - DNA, 100 bp, Homo sapiens
actgacgaagaatgaaatgactgttactcacatatttacttcagatggtctgcatgctgaggtttggtgcctggaatgctgacctagatctggaaactag

SEQ ID NO: 270278 - DNA, 82 bp, Homo sapiens
acaaggggagctcgtaaggtccctcaaagcgggaaatgcgtcaaaggttgctgaagcagaagattgttataatacagctctc

SEQ ID NO: 270279 - DNA, 101 bp, Homo sapiens
ttcttggctcccttgtatatttttctcaggaggcgtcacggtggggaacataggacgacagttagctatgtttcgccgtgaggaagatgcggaaaaggctg

SEQ ID NO: 270280 - DNA, 100 bp, Homo sapiens
agcttcgtgggattttcctgttcctatctgtagaggacacattcagctaacgtattttagcaggtggagtgaggttgaagattcctgtgacagcgatgcc

SEQ ID NO: 270281 - DNA, 83 bp, Homo sapiens
agagaacgagcacctcctcgaagtcatcccagtgaacctgtgaaatttgtagatttgcttggtgaccatgggaaacatgtcag

SEQ ID NO: 270282 - DNA, 75 bp, Homo sapiens
attgcatctctcagaccagaaactgtagctgtccaatgtgaaagaaaacccattgaagtatcacgagaaaaatct

SEQ ID NO: 270283 - DNA, 101 bp, Homo sapiens
ttaattcgaggctttcatgctatagaaagtctcctgcagactgtgatagatgccaacattttcccagccctcattagtattttacaaactgctgaatttcg

SEQ ID NO: 270284 - DNA, 75 bp, Homo sapiens
ctaagaacgcattgccgccggtcctgaccaccgtgaacggacagtcccccccagtttgcccgaccatctgtaagt

SEQ ID NO: 270285 - DNA, 83 bp, Homo sapiens
ctcggctggagagcagaagaccgaaagacctgcctagagctggaacgttacctccagagcgagccctgctatgtttcagcctc

SEQ ID NO: 270286 - DNA, 100 bp, Homo sapiens
gggtatgtccagggaattaatgacctggtcactccattctttgtcgtcttcctctcagaatatgtggggtgtcaaattgagaaccaggtagatccccacc

SEQ ID NO: 270287 - DNA, 75 bp, Homo sapiens
tgctcctgttcttcctactgctgctggctgctgccatgcccaggccctcaagagtattgagtatctggaggagga

SEQ ID NO: 270288 - DNA, 96 bp, Homo sapiens
aggcgatggcggatttagataaactcaacatcgacagcattatccaacggctgctggaagggtgataaaagaaaatgtggctgaagttacccgaag

SEQ ID NO: 270289 - DNA, 50 bp, Homo sapiens
cactcagttttctctgccagtgtctgcatatgagctatttgcattcatca

SEQ ID NO: 270290 - DNA, 100 bp, Homo sapiens
cgccgccagggtctgcagggcctgggccgccgctgctacctgcagcgccgtgtggcacgacacaaaaatcaggcatccgtgtcattctggaccttactcc

SEQ ID NO: 270291 - DNA, 109 bp, Homo sapiens
cccagtatgggaaagatctaccttctggaagctactactacgtggtgcttggaaagtggagtacgacaaggagttctcccctcgtcagcgacaccacaaagagttcaag

SEQ ID NO: 270292 - DNA, 100 bp, Homo sapiens
gacattctcaaggaaacacaagagaaattctatggcctaccatatgttccaaatacttgtttctaagacctcagagaaatttggaatctatagacccgca

SEQ ID NO: 270293 - DNA, 76 bp, Homo sapiens
ccgctgaggcttatttgggaaagaagggaccgtttggagggagccattcacctacaggagcaggacatggagaact

SEQ ID NO: 270294 - DNA, 95 bp, Homo sapiens
acactgcgctcagggacggcttgatggcccctggccccaacatggcccgtcgctctcagagctcctcgcagggggacaacccactggcacccggg

SEQ ID NO: 270295 - DNA, 80 bp, Homo sapiens
gcgagcgcgagcggcgcgagaaactagatgaggaagaggagcgaaggaaaaggcgccgggagaagaacaaagtcgcagca

SEQ ID NO: 270296 - DNA, 51 bp, Homo sapiens
agcagcagccccgcggtgctggcaatatgagaagccgctgtctgagatgga

SEQ ID NO: 270297 - DNA, 75 bp, Homo sapiens
gctcttctccttactaaagctccccagataaggagacaaggaggcatccagctcctggtggacctgttggatcat

SEQ ID NO: 270298 - DNA, 100 bp, Homo sapiens
ggctgcttcccctcccgggtgaggagcgtcctgagactaaggaaagagcctggaaaatggagcagacctggacgaggactccttctcctcccccacgtcg

SEQ ID NO: 270299 - DNA, 75 bp, Homo sapiens
gcgccatggcccagattctgccaattcgttttcaggagcatctccaggagtgattggggcagatgtgagagggca

SEQ ID NO: 270300 - DNA, 75 bp, Homo sapiens
tcttggatttggctacacacttatagatcttctgcactgtttacaggcacaggactgcatcgacgtaggctggtg

SEQ ID NO: 270301 - DNA, 78 bp, Homo sapiens
tgcccccaaccagcagcccgaggtcttctgcaaccaggctgcagccttggatatagccatgattaaaatggtcgcccc

SEQ ID NO: 270302 - DNA, 75 bp, Homo sapiens
ttattaccatgcttcaagagccattccttttggaacaatgagcatgttactctgaggtttctgaagcaccagcaa

SEQ ID NO: 270303 - DNA, 101 bp, Homo sapiens
cgtgggtgtgtggtgagtgtgggcttctccagggaaagtgaccgaggcagtgaaagaggccattgacgcagggtaccggcacttcgactgtgcttactttt

SEQ ID NO: 270304 - DNA, 82 bp, Homo sapiens
acatcgacgccgcctggcaggccctgcgcaccagagctgcggtgcaaccctgggcagtttgcgtgtcgcagcggcaccatcc

SEQ ID NO: 270305 - DNA, 108 bp, Homo sapiens
ctcccggcttcgccgtgcacacgtctcccgctctccccggtactaggttttgacaagcttgcatcatgcgtgagtataagctagtcgttcttggctcaggaggcgttg

SEQ ID NO: 270306 - DNA, 100 bp, Homo sapiens
atgaggtcaaatccgagaacctgggccaaggcgacaagatccaggtgattgagaatgatagagccagcagaggaggacaagtttatgccaccaacaccag

SEQ ID NO: 270307 - DNA, 107 bp, Homo sapiens
cttgacaggcggctttgcatcggaaatcagctctacagttcagttgacgaaggatcagagattggtgtattcgggcagactgcttcccgatcatctgcagctgaaag

SEQ ID NO: 270308 - DNA, 83 bp, Homo sapiens
ctcgcccagctcgcccagcgtccgccgcgcctcggccaagtttccccctttctagggtgaggatggttctacacagccacccg

SEQ ID NO: 270309 - DNA, 75 bp, Homo sapiens
ggcgacttcatctggggcgtcgtgcgcaaaggcctgcagtgcgcgcgccccttcccagctgcctgcctgccctag

SEQ ID NO: 270310 - DNA, 76 bp, Homo sapiens
ccccccttccccacgcaaccccagatccatttacactttacatacctggagtagaacagaaaaattattatgtctg

SEQ ID NO: 270311 - DNA, 51 bp, Homo sapiens
ggatcggcctggagccagtgcccaaacaaagatcattccactcagcctggg

SEQ ID NO: 270312 - DNA, 75 bp, Homo sapiens
ttaaacaggactggctacctcatttgcagggcttatttcaaaacctttgtccctcagttccaggaggcagcattt

SEQ ID NO: 270313 - DNA, 73 bp, Homo sapiens
aaatcctcagccctggctccagaggatcatggcagctcctatgaggcacctcattgtgaacatgctttctgca

SEQ ID NO: 270314 - DNA, 83 bp, Homo sapiens
ctcgtggacaagtttgcagatcgggagcgcaaggtcgccctcaaggccatgatcaaaacgatccctggagttgcagctaccag

SEQ ID NO: 270315 - DNA, 99 bp, Homo sapiens
ggctgcccagcccaaaggcccatgaggggatgcagttatgggctctgtcgccgtgggagctctttgttcaatgcctagccacctattcctacagacacg

SEQ ID NO: 270316 - DNA, 99 bp, Homo sapiens
ctgcgtctcccggctggtggggaagcctctgcgccgccggcaccatgaggccagaagcggactcctagaagaggggagcagcaaggatggaatgacagc

SEQ ID NO: 270317 - DNA, 100 bp, Homo sapiens
atcttccatccctgatgcttggagaagctgaggacacacagggatggatagaatgacagaagatgctcttcgcttgaatctgttgaagcggagcttggac

SEQ ID NO: 270318 - DNA, 151 bp, Homo sapiens
cgggtcaggcgctgtgaacttcctgacaggcatggggggcttcctgcaggcggtggtcttcgggtgcacggggttcagcggccagcctcccaactacgagatgctcaaggaggagcaggaagtggctatgctgggggtgccccacaaccct

SEQ ID NO: 270319 - DNA, 75 bp, Homo sapiens
aaagacagtcctcgtcagcactgactttcagctatggaatcggctccatctactctttgaagcttctgcccagct

SEQ ID NO: 270320 - DNA, 98 bp, Homo sapiens
cagattgtaggaccgagcgcgggcaggcgggaggcaacggagctaccagccggtatttcagtgtctgtagacaagatggaatcatctccatttaatag

SEQ ID NO: 270321 - DNA, 74 bp, Homo sapiens
aggcggaggcgtcgcgggagcctttggggcaccacagagatgcggtatcgtcagtgaagcaggagcatcaatct

SEQ ID NO: 270322 - DNA, 101 bp, Homo sapiens
ccctggtggggattgacagccacgggaagagtcatcttagtgggatttggggaagcaacagggctgtgtggggtaacctgccacctttaagtggaaatcag

SEQ ID NO: 270323 - DNA, 82 bp, Homo sapiens
agcctgcggagcctgtggggcagagaaaaaatgatccctatgctcttgcatccctggtgtcctttgaagttaagaagatgcc

SEQ ID NO: 270324 - DNA, 82 bp, Homo sapiens
ggggcaaactgcttggcacctcttcaataggtgacattcaatgaatgccatggacaatattaccaggcagaaccaattctac

SEQ ID NO: 270325 - DNA, 90 bp, Homo sapiens
ggaatcctggatccagatgatgtcttggcagatgttgttgaagataaagacaaggtcagcagcaaggacaagatggagtaaaagtccagc

SEQ ID NO: 270326 - DNA, 83 bp, Homo sapiens
cagtttctcacgacgggccgagcctgccactgtgccaagtcctgccctgccaacttcttggcagctgccgacgacaaactcag

SEQ ID NO: 270327 - DNA, 83 bp, Homo sapiens
agcgacaagccgctggcagccgcggatctcaccgccgctcagggacaagatcgcagaggaaggtgggcggcgggagtgcccag

SEQ ID NO: 270328 - DNA, 100 bp, Homo sapiens
gcatcctggccgatgccacggagcaagtgggccaggctatgaccagggccagagcactcagatctcagtcagaggagtctgcttctgcctttagtgctga

SEQ ID NO: 270329 - DNA, 93 bp, Homo sapiens
cttcggtggactccttcggcagtccacccaccgccgccgcctcccagcctggtggagttgacagaagagatcctgaagctgctgatggaactg

SEQ ID NO: 270330 - DNA, 50 bp, Homo sapiens
ctccagcggctggagacagtatcgggtaacagctgtggactggcactttg

SEQ ID NO: 270331 - DNA, 90 bp, Homo sapiens
actgaggccccctttcaaggggatcagaggtccctggagtttctgcttcctccagagccaggtggtggtgaatgccttggtgggcgccat

SEQ ID NO: 270332 - DNA, 76 bp, Homo sapiens
ccgcgccggcctcgtccagaacgtggtcagcaaggtaacaattgcttgtgatgcagttctcagctcaaaatctcca

SEQ ID NO: 270333 - DNA, 75 bp, Homo sapiens
acactatctcttctatgacggagaatccgtttcaggaaagttggcagatatccctgttacaatctgtacatatcc

SEQ ID NO: 270334 - DNA, 74 bp, Homo sapiens
ccagtctcttggaagagtttggtccaattgaatcaattaatggccagctcttccgaggctccagcctgcttttc

SEQ ID NO: 270335 - DNA, 76 bp, Homo sapiens
cctttgaccggcaggagctgcagcgcaatgtcatctccagcaggccgagaggtgagcccagcgcatcagtatgctc

SEQ ID NO: 270336 - DNA, 101 bp, Homo sapiens
tactttctgtcagccagaaactggagtgtggtgctttagcgaactgtcttttgtaaaagaaccacaggatgtaactgtcacaagaaaggacccagtcgttt

SEQ ID NO: 270337 - DNA, 82 bp, Homo sapiens
ctgaaacatgaaaacatcgtggccctgtacgacttccaggattttttatcaagcagaaatgcatcgaacaacgagaatcaag

SEQ ID NO: 270338 - DNA, 98 bp, Homo sapiens
agcgggcccctgcgggagaccaggccctgcaacaattcagccacctgcccagtatgatgagctgccgcactacccaggcatcgtggatggccccgcag

SEQ ID NO: 270339 - DNA, 97 bp, Homo sapiens
ctgtcaccacaccaaaatacaaatggggatctgtgactcatcagagtgtgggggttgtgaaaggtccccagtcccaagcggaagttggaagaaccag

SEQ ID NO: 270340 - DNA, 99 bp, Homo sapiens
gaatcttcactcccgctgtctcagcagtctacagcacggtttatggctacaaatgatttgatgacggaactgcagaaagattccatcaagttggatgat

SEQ ID NO: 270341 - DNA, 100 bp, Homo sapiens
ctcctcccagtgacgggtctggagtgcgtgggggaccggctgttggcggtttggcaatgaggagcagcagctggcgtgggccaagcgggagagcgagaag

SEQ ID NO: 270342 - DNA, 100 bp, Homo sapiens
ataataagatcatccacagagatctgaaggctggcaacattctctttaccttagatggagatatcaaattgggagacctgaagactgtgtccacaaaggg

SEQ ID NO: 270343 - DNA, 75 bp, Homo sapiens
tgattggaaactctttgggaaagccactcgaaaaggtcagcccttcataaacccagatgggagtccagttgtgta

SEQ ID NO: 270344 - DNA, 76 bp, Homo sapiens
aagtaatggtgcaaagcctgaacgtcagcttttctttcgcaaaaagctgcttcactcatcccagatgcttcgggcg

SEQ ID NO: 270345 - DNA, 82 bp, Homo sapiens
gccagtcaccagcaggagcagccaaccagcagcagccatcatggagggaaagcaggcaggatgggagagtcgccgatagaac

SEQ ID NO: 270346 - DNA, 82 bp, Homo sapiens
aacccatcgacaagaaggcacctatggtcttgctgcattcagggcttttttaaagtcggaattctgtgaagaaaatattgaa

SEQ ID NO: 270347 - DNA, 74 bp, Homo sapiens
ttgtttgtggatcgctgtgatcgtcacttgactattgcccagaagaaaagatgtttggttttcacaagccaaag

SEQ ID NO: 270348 - DNA, 97 bp, Homo sapiens
tctagggctggttcccgtcatcttcgggagccgtggaggtgctggagaatctggtaaaagcaccattgtgaagcagatgaggatcctgcatgttaat

SEQ ID NO: 270349 - DNA, 82 bp, Homo sapiens
accttagggacaacaccgggacacccgcgaggccggaaaatggaggatacgaagcgttttcggcttcctgcccggagctgtg

SEQ ID NO: 270350 - DNA, 100 bp, Homo sapiens
ctgggctggtgaagtacatgaactcagggccggttgtggccatgggtgtccgcaatgttgccagtgtctgtctgcagattggctacccaactgttgcatc

SEQ ID NO: 270351 - DNA, 100 bp, Homo sapiens
gtgaccgagaccgtgaccgagagcgtgaccgagagcgcgaatatcgtcatcgttagaagtaacagcaacaagtgggaatggagactttggtgactggagt

SEQ ID NO: 270352 - DNA, 101 bp, Homo sapiens
ttgaaactatggctaaattacatattccagtaatggtggatgaagttgttcattgtttgtcaccacaaaaaggacaggactcaccgcttaaggctgtgcag

SEQ ID NO: 270353 - DNA, 104 bp, Homo sapiens
ctctcccaggccacaagacatttcctgctcggaaccttgtttactaattatgaaggatttgggggcagagcacttggcaggtcatgaaggggtccaacttctcg

SEQ ID NO: 270354 - DNA, 77 bp, Homo sapiens
ttctttggctcaaaggagttgtatttagtgtgacgactgttgacctgaaaaggactccttctcctcccccacgtcgg

SEQ ID NO: 270355 - DNA, 127 bp, Homo sapiens
tgaaccggagaccccgaaaacggaagcgcagggagaaggaagaggtgtttgaaaaggttggacgtgataagtatgagcctgcagctgtttcagaacaaggtgataaaaagggcaaaaagggcaaaaa

SEQ ID NO: 270356 - DNA, 100 bp, Homo sapiens
ctatgtttacgcacagctgcctgtcaccccagatgtcctcatcatcccgtcagagctgaggtacttcgtgaaggcccgccaagctgccccctgtgtgcta

SEQ ID NO: 270357 - DNA, 98 bp, Homo sapiens
cccacggggacggattggttgttttttcctgtatgaagcggttggcaccactgaagtgaccgaatgaggatccaaggagctggttctgctggttggac

SEQ ID NO: 270358 - DNA, 51 bp, Homo sapiens
ctttgacaagagagacaactctgactttgtcctgggctgacgcgttccgca

SEQ ID NO: 270359 - DNA, 90 bp, Homo sapiens
ctgaagtgtagcgaaaatgctactatgactcttcctggaatacacccacctaccttgaaccagaaaaagctgttcatttgcaagaggagc

SEQ ID NO: 270360 - DNA, 74 bp, Homo sapiens
tccctgccctgtataccgagggaacagcatcagaggctccttgaaatgctagatacagagaaggaactgttaaa

SEQ ID NO: 270361 - DNA, 83 bp, Homo sapiens
accagctcttcagatcaatatggaactgtggctgcaccatctgtcttcatcttcccgccatctgatgagcagttgaaatctgg

SEQ ID NO: 270362 - DNA, 50 bp, Homo sapiens
tgtgattcgggttttaggggagaaagatcgatgctatagaagacaaacaa

SEQ ID NO: 270363 - DNA, 83 bp, Homo sapiens
tgaaactacatgttcagaaagaattacaccaagaatctgacatggaatttaataatactacacaagaagatgttcaggagcgc

SEQ ID NO: 270364 - DNA, 114 bp, Homo sapiens
catacagggaaagtgggagtgtggaatgctgtcactcagcactggcaggtgggagagttcagagcacacgctgctgagtggacagccaacgtcacagccgaattcaaagaaacc

SEQ ID NO: 270365 - DNA, 75 bp, Homo sapiens
ctgccatgccccagccagtccccacagcataacagatagaatgagtccatttaagtcccaggacggtggaaacta

SEQ ID NO: 270366 - DNA, 100 bp, Homo sapiens
ggaaaaacaacattgctacacatgctaaaagatgacagacttggacaacatgtcccaacattacatcccaaatttatccagttggcgaaggactttgagg

SEQ ID NO: 270367 - DNA, 100 bp, Homo sapiens
cgcggggaccgctgtgctctcgattgatttcctaaattcagtaatagtggaccttcaaaggaagaatcaagacctcaagatgaaggtggagatgatgtca

SEQ ID NO: 270368 - DNA, 98 bp, Homo sapiens
agcagaagagaaagccagttatccacggactggaagatcaaaagaggatgctcctgccagcatttgtcttcattgggctggaacaggatgactgctgt

SEQ ID NO: 270369 - DNA, 90 bp, Homo sapiens
gaggaaataccaaaaatcacagggaagatcggtctgaaattgagaggttaactgcaaaaatagaggtgctaactgccaaagaaaggaaaa

SEQ ID NO: 270370 - DNA, 75 bp, Homo sapiens
ttatcttaagctaagtcggaaggaaagatcttcagcttatagcaaaaacaccaaatggattgcttctgactccga

SEQ ID NO: 270371 - DNA, 101 bp, Homo sapiens
ggaaagtggaaattacaacagagactattaaattgcaacaggattcagaaatcatggaaagcaggatggagagcaatacatcatcatctttggagaattta

SEQ ID NO: 270372 - DNA, 100 bp, Homo sapiens
tgttgctgctcctgctgccgccgctgctgctgggggccttcccgccggccgccgccgcccgaggcattgccgtctgcaacgtgcccgcggcgtctgtgga

SEQ ID NO: 270373 - DNA, 75 bp, Homo sapiens
aaaaatggcatatataatattacagtccttgcatcagaccaagatttgctgctgcttccaggagaagtggagcag

SEQ ID NO: 270374 - DNA, 75 bp, Homo sapiens
ttcagggaataggagctggggagcccttctgcgccacagtagccggatcgagctgggagatgtgacaccacacaa

SEQ ID NO: 270375 - DNA, 75 bp, Homo sapiens
gcacaggccggtggaatgggtccaggccgtggtcagccgcttcgacgagcagggaagtcgagataacatgagtat

SEQ ID NO: 270376 - DNA, 100 bp, Homo sapiens
gttctggccccctgatgtcaccttcacgggcctgactcacagtcctaaatatctgacagcgagatcgcttgtaggcaaggagatgagacaccatctacaa

SEQ ID NO: 270377 - DNA, 83 bp, Homo sapiens
cctcgccatggcgacccacggacagacttgcgcgcgtccctggttcacctggatctgtaattcctgctcaagcacacgggaaa

SEQ ID NO: 270378 - DNA, 98 bp, Homo sapiens
ttccatccgtctcagcgaaccccttttgaagttgaggccaagaaaggatcttgtagagctgaatcgcgcagaatttgaagatcaagatgatgaagcca

SEQ ID NO: 270379 - DNA, 90 bp, Homo sapiens
tggagcacgtccaggctgaccacgagcttttcctccaggcctttgagactgaggagtacctgtcatttgcctttgagcattgtcaccgtt

SEQ ID NO: 270380 - DNA, 82 bp, Homo sapiens
ccggctgttggggtggcggtgacgacaggcagcaaaagaccaggtatctcttcaactgtggagaaggcgttcagagactcat

SEQ ID NO: 270381 - DNA, 50 bp, Homo sapiens
atcatgacgagctcatctccaagggcagggtgccatttgccgtgcctgac

SEQ ID NO: 270382 - DNA, 50 bp, Homo sapiens
ccagagcttcaaactggtgagccgaggtgtacacttaaagcgttctggga

SEQ ID NO: 270383 - DNA, 90 bp, Homo sapiens
tccggcaggagacgaagagcccgggcggcgctcgtacttctggccactgggcgagcgtctggcagtcaagtccatcatctccagaaccag

SEQ ID NO: 270384 - DNA, 101 bp, Homo sapiens
cgcacatttgacttggaagcaatgtttgaacaaactcgaagaacagctgtggaaagaagttgcaaaacactgggtattgaaaaccttccctttgaattaca

SEQ ID NO: 270385 - DNA, 88 bp, Homo sapiens
tcaccactggacctccaaggaagccacgtgcagacatctacaaccttcgatctcctgacgagtctctaattaacagaagatggcaaag

SEQ ID NO: 270386 - DNA, 90 bp, Homo sapiens
caacctttaagcagcagaggagcacgaggatcgtgggagctaagaactgcacatcattgactcctgggcccaactgtgaccgatttaaac

SEQ ID NO: 270387 - DNA, 50 bp, Homo sapiens
ctagtcctttcgatatccctcagcccaccttgggacaccttgactccaag

SEQ ID NO: 270388 - DNA, 100 bp, Homo sapiens
gtcggtgacagcctcaagggcttcagcaccgcgcccatggcagagccagacccgagcagtacaaggcacacttctggccacgggacctggtggccttctc

SEQ ID NO: 270389 - DNA, 82 bp, Homo sapiens
ttgtttgtggatcgctgtgatcgtcacttggtccggcctctttggcctacccccgttggctccgctgccccaggtcgatgag

SEQ ID NO: 270390 - DNA, 87 bp, Homo sapiens
cggctggagcaccagggcatcaagatcgagttcatcgggcagatcgtccaatatcagatggaaatgatgcggagccttcgccatgta

SEQ ID NO: 270391 - DNA, 101 bp, Homo sapiens
catgttagataaacttgtggatggacttgctacctcttgggtgaactctagcaattacaagcaacatggccaacgccctggccagcgccacttgcgagcgc

SEQ ID NO: 270392 - DNA, 82 bp, Homo sapiens
tgagagcccggaaccactctttgtgccgcagcttcgcagagaactggaccccatcctgactgaggtcaccctgatgaatgcc

SEQ ID NO: 270393 - DNA, 125 bp, Homo sapiens
ctcaggcacatctcaagccaatcgatatgtgggactaagcccaagagacccatccttcctacatcagcaacagacccttatagttgcctggatcaaagcaaacctaaatgtgtacatctcccgag

SEQ ID NO: 270394 - DNA, 74 bp, Homo sapiens
cgcaaggagggatggctgccttaaacatgatctataccaaaactcacctttcctggtggtttactaattggttg

SEQ ID NO: 270395 - DNA, 82 bp, Homo sapiens
gggaaccacgcgagctgcagccagggtcctctccagccagagcccaccagccggcctttctccagcctcctgaagaagatgc

SEQ ID NO: 270396 - DNA, 101 bp, Homo sapiens
cggaggctgcctcggcggagcagaggaaccacacgctgatcatgcgaggaagaaaggacccggtttcaggagctgctggccagtccggcctacagagccag

SEQ ID NO: 270397 - DNA, 95 bp, Homo sapiens
accctgcctgcctgaggaggcctcggttggatgcgaaggagctgcagcatccagatctgactgcagccatgagcagcaatgagtgcttcaagtgt

SEQ ID NO: 270398 - DNA, 98 bp, Homo sapiens
acaaggttgatgggcgtgtagtggaaccaaagagagctgtttctagagaggaagtatatattcaagcccaggactgtatagtaaaacaatgaccccca

SEQ ID NO: 270399 - DNA, 87 bp, Homo sapiens
tgatgagagcattcgaagtgacctcagcagggcatccaggcgtctggatgctaaccacatcagctatgtgcccccaagctgtttcag

SEQ ID NO: 270400 - DNA, 82 bp, Homo sapiens
catcaagacggaaaaagtcgatctggagcttttcccctccccggctgtgtaaatgagtatggaagattatgatttcctgttc

SEQ ID NO: 270401 - DNA, 75 bp, Homo sapiens
ctagatactgtcatccccgtgtggctgaatcatgcaatgggagctcactcagtgggtttgatgtggtggatgctg

SEQ ID NO: 270402 - DNA, 75 bp, Homo sapiens
tgagctcggttttcttatgcttataagagtggaacaggtccaaggatcttataaaggaagctatccttgacaatg

SEQ ID NO: 270403 - DNA, 82 bp, Homo sapiens
ccaatgatgggagaccaccgggatgggcagtgaaggagaacgacctgctcagaatgagaagaggaaggagaaaaacataaaa

SEQ ID NO: 270404 - DNA, 83 bp, Homo sapiens
gctcgatctaggttctgcggcacgggatggcggaggcgcctcctgtctcagggggatatgagactttctactcggaatatcct

SEQ ID NO: 270405 - DNA, 75 bp, Homo sapiens
caaagatctcgtacaagatccttcttttttttgaggagatgcaacaaataagaccccctgtccctgcatttcccg

SEQ ID NO: 270406 - DNA, 74 bp, Homo sapiens
cagcggcagtggtgctttcccgaatctcagaatgccactcagattgatggacaacttttcttaattaagcacct

SEQ ID NO: 270407 - DNA, 99 bp, Homo sapiens
ggcgtctggcggggtccgcagtttcagcagagccgctgcagccatggccccaatcaaggtggagatacactacgccttgacacacttatagaatggtgg

SEQ ID NO: 270408 - DNA, 101 bp, Homo sapiens
cggaggacgaaggccgatacagggcgccgcctcctctccagggacggaagccttcacttaggagcaatggccaatgtacatggtggactatgccggcctga

SEQ ID NO: 270409 - DNA, 144 bp, Homo sapiens
tgatgtggcaactgctgatgctcatggtccccatggcatgggggcctcagggcagcctgcctggaggagcaccatactggaccaacacagaaaagatggaaaagcggctccatgctgtgcctgcggccaacactgtcaagtttc

SEQ ID NO: 270410 - DNA, 75 bp, Homo sapiens
gatctgcagccatttatattgcttaggctactggtcaatcagctcaaaacctccatgcagtcagttttacaggag

SEQ ID NO: 270411 - DNA, 82 bp, Homo sapiens
ggaagcagccgatccagcctgcggagcctgtggggcaggaaatactcttaattctaaggaaaacctggaagcacaatgggag

SEQ ID NO: 270412 - DNA, 141 bp, Homo sapiens
gaataagtttcggagcatcggttaacagcctatgggtgaaatttggctttcattcatgaatgagacgttggaacttgccaggaatccagcaatgatgcaggagatgatgaggaaccaggaccgagctttgagcaacctaga

SEQ ID NO: 270413 - DNA, 51 bp, Homo sapiens
gaaaactgaattaaggaagacttcagatggggatggagaagtttatgtttg

SEQ ID NO: 270414 - DNA, 100 bp, Homo sapiens
gaggacggcggaacatctggaggctgggaaatgggctggaccccaatggagaacaggtggtgtggcaggcgagcgggtgggcagcccgcatcatccagca

SEQ ID NO: 270415 - DNA, 75 bp, Homo sapiens
ttcagtcggcccaagaaatcaaaataaaggaaacacatttcatatactgcaggtgatgatgaacagtctacacag

SEQ ID NO: 270416 - DNA, 83 bp, Homo sapiens
ctcagttggaagcagccgatccagcctgcggagcctgtggggcagagaatgggacattttagagactgaagagcattataaga

SEQ ID NO: 270417 - DNA, 100 bp, Homo sapiens
gggaaaagcagcattatcaatagcttaaaacaagaacagatgtgtaatgttggtgtatccatggggcttacaaggctggagtgcaatggcgccatctcgg

SEQ ID NO: 270418 - DNA, 75 bp, Homo sapiens
cggaggctggacgcttgcatggcgcttgaggagagttgtggactggggcaacctttgccagtgatgagaagtgat

SEQ ID NO: 270419 - DNA, 80 bp, Homo sapiens
gctactgctgcctctgtcactcctggtgaccagcattcaagaatcagaaactatccctcttgtgatgaaagctgtctctg

SEQ ID NO: 270420 - DNA, 78 bp, Homo sapiens
agacttccactttgcaggtggaacagaatggggactatggtaggggcagtgctgtgctgtggctttcattgagaagct

SEQ ID NO: 270421 - DNA, 100 bp, Homo sapiens
tgggagctgggccagggcctggactacttctacgacctgctctaggaccagctggaagcagaaagaagaaaggccaatttcacagggcaccaaacaagta

SEQ ID NO: 270422 - DNA, 82 bp, Homo sapiens
aagaaggcaacgacgttccatctgtggaaggacctaccaaccaggtggcacaagaatggctcaactctccaaatagagagaa

SEQ ID NO: 270423 - DNA, 100 bp, Homo sapiens
acttctccagttagttggagcccaggcatagatcaagatcccgatcccgggagcgtcgttctcggtctagagaccgtggtcgtggcggtggcggtggcgg

SEQ ID NO: 270424 - DNA, 100 bp, Homo sapiens
ggcctcattggacagcattcgaggagcggcctattgccaattcatggacatgctcttccctggctgcattagtttgaagaaagtaaaatttcaagcaaag

SEQ ID NO: 270425 - DNA, 75 bp, Homo sapiens
gggacagggggatttggaaatgtcatccgatggcacaatcaggctgtagagggcttactagatgccacaagtggt

SEQ ID NO: 270426 - DNA, 91 bp, Homo sapiens
acggatgacacctacatccccctgaaccatatggacccaaatcagaaggggtttctagagagcagcccgacggccatggaggctgaagaga

SEQ ID NO: 270427 - DNA, 128 bp, Homo sapiens
agctggaacagccagaattggacccgaaaccatgcctcactgtcctaggcaaggactacaaagctgatgaagacccagcattattccagtcagtcaagaccaagagaggccctttgggacccaactgg

SEQ ID NO: 270428 - DNA, 96 bp, Homo sapiens
ggcattgacatttaattttagggtcctttatatagaagggagagtaggttctgtcatatgttgaagaatccatacaccattaagaaacagcctctg

SEQ ID NO: 270429 - DNA, 75 bp, Homo sapiens
gacccagagctagactacaccctcatgagggtctgcaagcagatgataaagttccaagatgagatgggattctcc

SEQ ID NO: 270430 - DNA, 74 bp, Homo sapiens
taattccagtaacggggactcagattccaataggcaaagtgtctcaggtgccgtgagcgatgtggagatgcagg

SEQ ID NO: 270431 - DNA, 76 bp, Homo sapiens
acctttccaacacagatgtccaagctgccaacaaaccctcctggggcttgcccatagatgctgttcagtgggatat

SEQ ID NO: 270432 - DNA, 100 bp, Homo sapiens
aaattcaggagaagctggctattgaggcagagagacgacgcattcaggagaagaaggatgagattaagcctgatcaagatgacaacctcccaaaagcacc

SEQ ID NO: 270433 - DNA, 75 bp, Homo sapiens
ctctcgatgaggataacatccctccagaagatggagcatctttccttgaagaagtacattattgacattgtggtt

SEQ ID NO: 270434 - DNA, 100 bp, Homo sapiens
agctggaagtaaccccttccgggagcctagatcctgtgctttactctgaagactcgcttcgcaaggcatggtgggtcagctggcggcacggcgggcggct

SEQ ID NO: 270435 - DNA, 100 bp, Homo sapiens
gagggcgcaggagcgggactgagagcgcctggaggctcgagcggaggatgtgtatatctcatgattgatatggagaaactagtcatgggccaaaggtcaa

SEQ ID NO: 270436 - DNA, 74 bp, Homo sapiens
ggcacttcattggccacctacagaaacaaaatgtcaacaaattgatggacagagtttcactcctgttacccagg

SEQ ID NO: 270437 - DNA, 100 bp, Homo sapiens
gcaggatggtggtggatgcggccaactccaatgggcctttccagcccgtggtccttctccatattcgagaaaatccaagtccggctagtacgcgaattgg

SEQ ID NO: 270438 - DNA, 100 bp, Homo sapiens
gctcggagcggggagtggggcctagctgcagccggagcctgggagacggtccggggcccgccaagtacctccggccatcctgcacgggctacatagatca

SEQ ID NO: 270439 - DNA, 82 bp, Homo sapiens
gccttgggcctcgcgccggctatggccgtgccctggggctgagccctcaggggcagcttggtggctgccgagtggaggccag

SEQ ID NO: 270440 - DNA, 82 bp, Homo sapiens
atcacctatagcatcaacttcttctccaaggaatactcccccagttgcaagaggcgcaggaccgtggaagacttcaacaaat

SEQ ID NO: 270441 - DNA, 100 bp, Homo sapiens
cctccccaaccccaccatcccaccaaagggggctgctgaccgagagagctcactcagccaggaccgaccagctgggcatgttcacgcacaaggagtttga

SEQ ID NO: 270442 - DNA, 75 bp, Homo sapiens
tccgatttgacgggcaaccaatcaatgaaacagacacacctgcacaggatcgacgagaacgtgctaggagcccag

SEQ ID NO: 270443 - DNA, 100 bp, Homo sapiens
ctgaagaagaggcggctcagatccccagatccagtgtgtgggagcaggaccagcagcctcgaagcggaggatccctgtgtcccagccgggcatggccgac

SEQ ID NO: 270444 - DNA, 80 bp, Homo sapiens
tgttgctggaacggttcggataggttttaaaatcaaagatgggaaaatcggagaaaattgcccttccccatggccagctt

SEQ ID NO: 270445 - DNA, 100 bp, Homo sapiens
cccgaggcccctatggcagatttgaaaattcacccttgtagagtcattcctgcctttgagcggactcccttttaagagttgaaaggccagaacgatctgg

SEQ ID NO: 270446 - DNA, 75 bp, Homo sapiens
ttaatcagaatagcaggtcagagtttgcaggtcgaagtaagaaggaaaccaaatattctcttaaggctgtcgaag

SEQ ID NO: 270447 - DNA, 50 bp, Homo sapiens
caggcatgcaccaccacacctggaaaacagacacatgaccctcattgaga

SEQ ID NO: 270448 - DNA, 90 bp, Homo sapiens
cagaatcagatgaagatgaagattttaaagagcagactagacttctcaagtacgtagagaaatcgacactcttaatgaacgtttagctgc

SEQ ID NO: 270449 - DNA, 82 bp, Homo sapiens
ctttgcaacagaattacagagtatgattggtgaagttcatggatgtctatcagcgcagctactgccatccaatcgagaccct

SEQ ID NO: 270450 - DNA, 100 bp, Homo sapiens
ggaacccaccagaaggaaccaattccggacacataacaagcagcagtgaggacaccaaagttacttatgaaatgaagacaaagaaaaggtttggtaataa

SEQ ID NO: 270451 - DNA, 75 bp, Homo sapiens
gtccgtgcggaggctgagccggccgcgggcgcgaccggaggcaggatccaaactactggatacaggtgcatcgct

SEQ ID NO: 270452 - DNA, 90 bp, Homo sapiens
gagtaacagcagcgccgtcccgtccgacagccaggcccgggagaaggcgtctctggccgagcctctttttgtggaaaacgacagcagcag

SEQ ID NO: 270453 - DNA, 96 bp, Homo sapiens
ttggcacctgccatccgtgacaaactggacatccttggggctgctgagacagtgtctcaatgagatcttggagtcagcagatgcacccttagaagt

SEQ ID NO: 270454 - DNA, 82 bp, Homo sapiens
tcagctttgactgctttatgaccatattaatgcagatgaggcgttctttgtctgaccagtgcacaggacttcagggcttcct

SEQ ID NO: 270455 - DNA, 49 bp, Homo sapiens
agaacagggtggccgcttggtccaggcttgcagccaatttactggagca

SEQ ID NO: 270456 - DNA, 87 bp, Homo sapiens
cagcaatagcaaacaaaacttatctcctgaggagaaggctttatatccactaattacctgccttttatgtgtcagtcagaaacaatt

SEQ ID NO: 270457 - DNA, 96 bp, Homo sapiens
gattgagctgcccgacgtggaacccgctgccttcctcgcactgctcaagaggagatgaacggctggctggaggctgtagcttcctcggtggcggaa

SEQ ID NO: 270458 - DNA, 100 bp, Homo sapiens
gaaggttcgggaagctgttggagcagtgtggggaatttcccaccaggatgagtatgattggctgtgattttagacagtctccttcccctttccaggcact

SEQ ID NO: 270459 - DNA, 75 bp, Homo sapiens
tccaggacacccctgaagccgagaaatggactgatcctttgaaatactccagccatgactaaaagagaagcagag

SEQ ID NO: 270460 - DNA, 98 bp, Homo sapiens
ccgatcatggcggatggcccccggtgcaagaggcgcaaacaagccaatcccaggaggaaaaacggatctgtctggctccattgatgacctccccacgg

SEQ ID NO: 270461 - DNA, 73 bp, Homo sapiens
tcttacaacaaaatggttttccactccattgttgttagaagccagtatatgactctcaacccttctactaaga

SEQ ID NO: 270462 - DNA, 75 bp, Homo sapiens
tacccgagaacgtgcgggaagagaagatcatcgagcatttcaaacgctggttttcccatgggctatgcagcagca

SEQ ID NO: 270463 - DNA, 76 bp, Homo sapiens
ttttgggactgctgtgcctcctcctcctgtggtggaggagaaggaaagtctgcagatctccaggggagcccaccag

SEQ ID NO: 270464 - DNA, 100 bp, Homo sapiens
gaatatatgcctgatgttgctaaatgtagacaatggttagagaagaattttccaaatgaatttgcaaaacttactgtagaggcagtcaaatgcttctcag

SEQ ID NO: 270465 - DNA, 90 bp, Homo sapiens
cgtccggcttcggagcgggagtgttcgttgtgccagcgactaaaaagagacaccattcgcttttcacccaagatgatttgatgtcttata

SEQ ID NO: 270466 - DNA, 75 bp, Homo sapiens
cctctatgaaaaacagaatggaaaagagtcttctgttaaaggcattaggatttcctgaaggacttgtgatacaag

SEQ ID NO: 270467 - DNA, 100 bp, Homo sapiens
ctgattcacaattatggagactgtgaactgtggctgcaccatctgtcttcatcttcccgccatctgatgagcagttgaaatctggaactgcctctgttgt

SEQ ID NO: 270468 - DNA, 74 bp, Homo sapiens
aaggtctcagagctttacgatgtcacttgggaagagtgatttcttctgacttgagcctgcagtgtgctgtgaga

SEQ ID NO: 270469 - DNA, 80 bp, Homo sapiens
accaattaccaagcatataggtttggtgtacagtggcatgggccccgattacagtactatactggcaattgctggagaag

SEQ ID NO: 270470 - DNA, 73 bp, Homo sapiens
gtccgagaacgccgcgctgcgcatctccaacagcgacctgagcggtgtgcctaccgcatgttgccgctgctgt

SEQ ID NO: 270471 - DNA, 100 bp, Homo sapiens
gcctgtgtgagagccacgtgtgccgcgctctgggcacagccttggaaagtcaggaccgcgacggcagcagagcagtcttatcgaatgttacttagcctcc

SEQ ID NO: 270472 - DNA, 100 bp, Homo sapiens
atctttctagaccatatctcttctttggattattttacaaaaccagactaccagagcttactcacatagcatattggtatatcaaaatgaaatgcaagga

SEQ ID NO: 270473 - DNA, 106 bp, Homo sapiens
ttactaaatggctcaaggcaatgttttgtgagaacatttctcaccgaagtgatcagttccagctaggaagagcaatagatggggtttcaccgtgctggccaggctg

SEQ ID NO: 270474 - DNA, 80 bp, Homo sapiens
cagagaatgcctatgagtacttcaccaagattgccaccagacctcctgccccccgaggtctgcagtctcctgaacccagc

SEQ ID NO: 270475 - DNA, 100 bp, Homo sapiens
tttgtggtcttcatttgtgaatacataggctattcctcagtatgctattccttgtcactccagctccaatgtggtggtggagcccagtgggcttcttgag

SEQ ID NO: 270476 - DNA, 96 bp, Homo sapiens
gggagagtcccgtattctcagagtaaaagttgtttctggaattgatctcgccaaaaaggacatctttggagccagtttcaccagtgatcattaaag

SEQ ID NO: 270477 - DNA, 80 bp, Homo sapiens
atactctgactccacctttacttttacctacgttggcggccccagaagattcgagtgagggttgaaaaggatccagaact

SEQ ID NO: 270478 - DNA, 75 bp, Homo sapiens
atccacagattttcactgctcatccggataccatgctgggaaggtccctttctagagataggagaagagagagat

SEQ ID NO: 270479 - DNA, 83 bp, Homo sapiens
ctgggtgcccgtggaccacaggccctcgttgcccagatgaggaatcattatagattctaaaaatatattttcccttctctgtg

SEQ ID NO: 270480 - DNA, 50 bp, Homo sapiens
gtaacatgcagatgactgtgttacagggttttggccaaattgggcgaggg

SEQ ID NO: 270481 - DNA, 80 bp, Homo sapiens
gaggaggcagccaagctcgtggcctgcctctgcgtgcgcgatcagtgggtgaccgcggctgcgagggactttgtcatccg

SEQ ID NO: 270482 - DNA, 100 bp, Homo sapiens
acggagcacgagaaatacggcgtggataagtgccatagagttcatttccatttgccgtatcgatggcaattcttggatagaggcaaatgggaggatttgg

SEQ ID NO: 270483 - DNA, 83 bp, Homo sapiens
atgagtcatgtggcagtggaaaatgcgctcgggctggaccagcaggagcttactccacgggaacagcctctagataatctgag

SEQ ID NO: 270484 - DNA, 75 bp, Homo sapiens
cccacatcctcgtgcctgtgagcagagatggcacctttgatgctgagagcatcagtgatgtcacgtttggagcag

SEQ ID NO: 270485 - DNA, 100 bp, Homo sapiens
atttgggagagacgctctgaactgactgccccgcatcaccggagcgtcccagctgcgaggagcttgggcatgaaccacgacgatgaccactcatcttgcg

SEQ ID NO: 270486 - DNA, 75 bp, Homo sapiens
ccgcatcgaggacttcatccagtttgctacggtctacggggcagagcagataacgaaggaggcccaacttcattc

SEQ ID NO: 270487 - DNA, 100 bp, Homo sapiens
cccccgacagcgccatggcccagattctgccaattcgttttcaggagcatctccagccaaaagaatgcaatggtgtaaagattccagttgatgccagtaa

SEQ ID NO: 270488 - DNA, 98 bp, Homo sapiens
gaaaacagtctggatgctggtgccactaatattgaaccacaggagaagttgtgtcaggtgttgtaagtaaggtgttcaatcaacctaaagctaaagcc

SEQ ID NO: 270489 - DNA, 89 bp, Homo sapiens
ccgcgggcatcgaggagccatcgaaggttctcagcagggttgtgagtcccggcccagcccctccacccccctgcccccccgatgcgacc

SEQ ID NO: 270490 - DNA, 98 bp, Homo sapiens
tcgaaaaaaagatggagccctgcatatgattggctctttagctgaaatacttctgaagattttccgcagatttccagtggccccactgatcccttatc

SEQ ID NO: 270491 - DNA, 100 bp, Homo sapiens
atggatatgtcaggaatgtgattcttcatcttccaagatgccacagggcccagtgggctccgggtcctgccccagggctacggctggaacctgctgtatg

SEQ ID NO: 270492 - DNA, 91 bp, Homo sapiens
agcatttcggctcagctggaggaggccagctctacaggcgacttaattcagtgcacaaatgagatgaatgtgaacatcccacagttggcag

SEQ ID NO: 270493 - DNA, 101 bp, Homo sapiens
gaggcggccacccgagacgcggcgcgcacgctccggcctgcggttcagcagctggacatggagaaccaacgctcatcacctctgtcgttccccagtgttcc

SEQ ID NO: 270494 - DNA, 100 bp, Homo sapiens
gaagaaactaaaggaagtaaaaccagatgttttccaccaaagccctccttttggctggtctgatttctaccgaattctcagcgtcttgccgatcaatatc

SEQ ID NO: 270495 - DNA, 100 bp, Homo sapiens
gtctttgtgtcctgagatcaaatggcacttcattggccacctacagaaacaaaatgtcaacaaattgatggggctcaaaatttgggcggggaactggact

SEQ ID NO: 270496 - DNA, 100 bp, Homo sapiens
gacctgcgccaggccacccacgaccaggccgtgcaggcgctgaagcgcgcgggcaaggaggtgctgctggaggcatgccaatgaagatgtggaaagaatg

SEQ ID NO: 270497 - DNA, 101 bp, Homo sapiens
gatttcagcagaaagtgttccatatcaatcagccagctgaattcattgaggaccagtcaattctaaactgctcccagccaacctctgataaaccctcccag

SEQ ID NO: 270498 - DNA, 75 bp, Homo sapiens
atcacgtggccaggtttgctgctgcagccacgcaacagcagacagcttctgctaccggctctctgaccagttcca

SEQ ID NO: 270499 - DNA, 75 bp, Homo sapiens
gaccatcaacctggaggagaacgagatcgtaggaactcgaatcatttatgacagaaagtttctgttggatcgtcg

SEQ ID NO: 270500 - DNA, 74 bp, Homo sapiens
tttacaagcaggccacgattgaatctctgaagattgcccaaggactccagatactccaaataatgaccctcgtt

SEQ ID NO: 270501 - DNA, 100 bp, Homo sapiens
tgaccacctgctctcacccacgaaaggcatctgtcccaagcaggagaacattgcagacccatcctcatgccaacaaactacccttgaaggattctttcac

SEQ ID NO: 270502 - DNA, 100 bp, Homo sapiens
acggctcacctgtgcgggatggaacaaaagacgaagttatacggaagcgtctcctcattgatggagatggtgctggagatgatcggagaattaatctgct

SEQ ID NO: 270503 - DNA, 82 bp, Homo sapiens
ccagcttcggaacaagagaccctggtgtcagttgtacccgaggcgttctcagcagcagcaagtacctgtggtggatttccag

SEQ ID NO: 270504 - DNA, 75 bp, Homo sapiens
cccgaggaggaagacgaatcgttaaacatcttaggtcagagagaagaagaaggaggttcctgctgtgccagaaac

SEQ ID NO: 270505 - DNA, 100 bp, Homo sapiens
aggaggccttccagctgtttgaccgaacaggtacgccttcgtcaggcccgtcatcctgcagggactcacggacaactcggtgagcgcgtgcccgtccgtc

SEQ ID NO: 270506 - DNA, 74 bp, Homo sapiens
tgtggatggacttgattctgatgagagggcagctgcaatgactctccgcacggtattattgtcattgcaagcac

SEQ ID NO: 270507 - DNA, 75 bp, Homo sapiens
cagggctcctggcacagcggatgtttgtgatgctgccctgtggtggggttggggacatgaacaagctgagtggag

SEQ ID NO: 270508 - DNA, 100 bp, Homo sapiens
ggctgcgccgaggcgccctactcaggaaggaagcagccaccctcgccatggcctccccgcccgcctgcccctcggaggaggacgagagcctgaagggctg

SEQ ID NO: 270509 - DNA, 96 bp, Homo sapiens
gcacaccctagcacacatgaacacgcgcaagttctaggtctcgttccagatcatattctccagctcataacagagaaagaaaccacccaagagtat

SEQ ID NO: 270510 - DNA, 75 bp, Homo sapiens
gtggccggtgacctccctcctccgagggaggggggttgtgaccccagtacagggaagaccatttgaagtaaaaga

SEQ ID NO: 270511 - DNA, 75 bp, Homo sapiens
gtcgaaaaagtgggatcatcggtaaagcacctaaaaccaggtcacttcatcctggcccaggtactgcagctccaa

SEQ ID NO: 270512 - DNA, 50 bp, Homo sapiens
agacctcagtttaattttcacaaggacactcaatcacttgtcggaagtcc

SEQ ID NO: 270513 - DNA, 100 bp, Homo sapiens
tcaatgacctccagtaagggagggcaagaagatatgaacctgagccttcagtcaagaccctccagcttgccttacaaaattggacagctgtacatgatca

SEQ ID NO: 270514 - DNA, 87 bp, Homo sapiens
cttttctacaaactctgtgcctcaacaaccatttctaagtgacgaagaatgctgttcaagctttgattgataagcaccaaagaatac

SEQ ID NO: 270515 - DNA, 74 bp, Homo sapiens
ctgaagcccatgttgcagcgggactttattaccgctttaccagatgccacagtggagctatccttggacagcac

SEQ ID NO: 270516 - DNA, 50 bp, Homo sapiens
attctcgaatacctagaatggggttttgaaagagggaaggaagatatttc

SEQ ID NO: 270517 - DNA, 98 bp, Homo sapiens
agagagagaaacaggggagcaaggtgcaagagtccacaaagggacctgatgaagcgaagatcaaggttgctccttgagggcaggacagttcttatggc

SEQ ID NO: 270518 - DNA, 97 bp, Homo sapiens
cagccatgtgagcactgggggtggtgccagtttggagctcctggaagttccatgccattgcagtgtcaactaggcctcagttacttttcagtttgcc

SEQ ID NO: 270519 - DNA, 75 bp, Homo sapiens
gcgcctgtgggcacagacaaggagctcagtgacctcctggacttcagcatgtaagactttgaccccgacgcaggc

SEQ ID NO: 270520 - DNA, 75 bp, Homo sapiens
caagttttgtgcagattgccagtctaaaggctccctggggaagggaatgcagggttgctggggctgggcccagaa

SEQ ID NO: 270521 - DNA, 143 bp, Homo sapiens
cgcgggggaagtggcggcgccggcagcggacagctcggacagcgcccagggccggagcccgagcccttggaggtttctgccccaaattcacacactccctcctatcaccaaagccacccgccaccgctggcctcctgcatgct

SEQ ID NO: 270522 - DNA, 100 bp, Homo sapiens
aactgcaatcatttttcttcagctttatcagaggcacagttggtggatctgaaatctgaactgacagaaacccaagcagagaaagttgttttggagaaag

SEQ ID NO: 270523 - DNA, 100 bp, Homo sapiens
caaggacccgccctccaagtacgtggagatacagcagcgacatggattagccaattccatttcttcctaccttattaaaccagttcagcgaataacgaag

SEQ ID NO: 270524 - DNA, 83 bp, Homo sapiens
cccggtcagaagctcaaagagtccgtgggggagtgcatccgccccaacccttttccccctcgtctcctgtgagaattccccgt

SEQ ID NO: 270525 - DNA, 101 bp, Homo sapiens
gattgatatgacagaaaggagccaaggatgactcaagtttttggccagaaacatttccccagaggagctcaaaatggagttgccggagagacagcccaggt

SEQ ID NO: 270526 - DNA, 82 bp, Homo sapiens
gggagatgaacccaacctagtgggtgtaatacatcatgaactgcaggggtatcacattcccaacccagaggtcatcttcaga

SEQ ID NO: 270527 - DNA, 83 bp, Homo sapiens
gtgcaactgctcatcctggcctacgtcatcggactgcaataaggtcactgatcagtgcctgtccttcttcaaacgctgtggaa

SEQ ID NO: 270528 - DNA, 82 bp, Homo sapiens
cgctcacctgcgccggtagcgaagaaatcgccccgggacatgaaatttaagatccgcattgaagacccaccccgcagaaagc

SEQ ID NO: 270529 - DNA, 75 bp, Homo sapiens
gccttccctccatccgttccagggacctcaccctcgggggagtcaagaaggtacgattgcaattatgggacacag

SEQ ID NO: 270530 - DNA, 98 bp, Homo sapiens
ttttaactgatgagcaatcactttggattgaagatactacaaaatcagtttatcaaacaggtgcagttcaggagcagatgagatccaagggaaaccga

SEQ ID NO: 270531 - DNA, 75 bp, Homo sapiens
ggctatgagcctgagaacagcgtggcatgcaaggagagcatcagtgatgtcacgtttggagcaggggtcagttac

SEQ ID NO: 270532 - DNA, 101 bp, Homo sapiens
cttatgtttcaggcatgttgagatttggaaagtgatctcagccctcctccaggcttcgattataacttacaggattgtgattcacacatttcagtttccac

SEQ ID NO: 270533 - DNA, 100 bp, Homo sapiens
aggatggaaagaagtattcctcgctcaacctgtttgatacgtataagggcaagtccttagagatccagaaacccgctggactcctagaagtaccccaccc

SEQ ID NO: 270534 - DNA, 75 bp, Homo sapiens
tttccagtgtccttcaggagatctgtgatgagattgctaagaagcctcgaacgccaacctctggtccagtaatca

SEQ ID NO: 270535 - DNA, 88 bp, Homo sapiens
ttacactgacagaagcagtggtcgaatccagtagaaaactggtcaaggaagctataatgctcggaatatttttcaatgtccattccgc

SEQ ID NO: 270536 - DNA, 75 bp, Homo sapiens
ctcttagctgagcaggcgagaggcgaagtggtgaacacccatggccccgtggagcctgacaaggacaatatccgc

SEQ ID NO: 270537 - DNA, 90 bp, Homo sapiens
accgagaccgtgaccgagagcgtgaccgagagcgcgaatatcgtcatcgttagaagcggagtttaagagagctgtgaaagtagcaacagg

SEQ ID NO: 270538 - DNA, 83 bp, Homo sapiens
aggagagctgcgccggcgagaagcggccgagccagcagcagacaatgcagatcttcgtgaagactctgactggtaagaccatc

SEQ ID NO: 270539 - DNA, 82 bp, Homo sapiens
gctacacttttcaccaaggaactggtgctgcagcgagaggctcagatccggaacctgaccgtgctgacccccgaaggggagg

SEQ ID NO: 270540 - DNA, 75 bp, Homo sapiens
ttttgatgtggatgatgccaaagttttattagggtttcctatcgctgaagtgttcacgctgaagcccctggagtt

SEQ ID NO: 270541 - DNA, 115 bp, Homo sapiens
gcgttgcgtgccctacttcaaggataagggcgacagcaacagctctgccggctggaagggaccaggggaagagacatgcgagggcctcatcatgccccagtagctcagacctgag

SEQ ID NO: 270542 - DNA, 83 bp, Homo sapiens
agaccggctacttctcggcgctgccgtctctggaggagtactggcaacaggtcaaaatgcagatcttcgtgaaaacccttacc

SEQ ID NO: 270543 - DNA, 51 bp, Homo sapiens
cacttgctctttctgtggcaaaggaatgggactttgatctgaagaaattac

SEQ ID NO: 270544 - DNA, 106 bp, Homo sapiens
gcggggacccagaccctggagcctcagttggaagcagccgatccagcctgcggagcctgtggggcagaacgtccccacaatcggtgtcattgccgttgtcttagcc

SEQ ID NO: 270545 - DNA, 100 bp, Homo sapiens
cgaggatttggcgctgcagaaccagatccgggagcacgtcatctccatcgagggccgcaccagcttctatgaggagtacggtgtcattcgcgacgtcctc

SEQ ID NO: 270546 - DNA, 108 bp, Homo sapiens
ggctttttgtgtgttttatcatctaaaatccaatccctcgtgctgaagatgctgcaagcaccaaatcatagctcataaaatcaggtcctgagatagttacccataaag

SEQ ID NO: 270547 - DNA, 100 bp, Homo sapiens
gcttaacaacctgctaccccatgccatcaacctgcgtgaggtcaacctgcgcccccagatgtcccagcaatggcagatgagtctggggaccagcgaagac

SEQ ID NO: 270548 - DNA, 98 bp, Homo sapiens
ctcctggctcccttctgccccagctccgtctcggcggcggcgggttctcagaggcactgtgactgacttccctggatttgatgagcgggctgatgcag

SEQ ID NO: 270549 - DNA, 155 bp, Homo sapiens
tgccgcgccctcccagaggcccaccttcaagcagctggtggaggacctggaccgtgtccttaccgtgacgtccaccgacaatgttatggaacagttcaatcctgggctgcgaaatttaataaacctggggaaaaattatgagaaagctgtaaacg

SEQ ID NO: 270550 - DNA, 82 bp, Homo sapiens
tagtaacgtcatggaggatgaacgacagctgagcgggctttggacaccatgaactttgatgtgattaagggaaagccaatcc

SEQ ID NO: 270551 - DNA, 83 bp, Homo sapiens
cggagggctcggtcaacggcttcatcagcaccttgggacaatgcagatcttcgtgaagactctgactggtaagaccatcaccc

SEQ ID NO: 270552 - DNA, 100 bp, Homo sapiens
cagaacaactcttcttcatagttacgttatactgcccctgcattgttggtattgaaattactatgcgagtcagaagaaaacatttgaaattaatcccaga

SEQ ID NO: 270553 - DNA, 100 bp, Homo sapiens
atgctggaccagttgatgggcacctcccgggacgaaaggaagctgttgaagttattgaagtacctgttgctatattctaagaaattaaaatgtccagaaa

SEQ ID NO: 270554 - DNA, 96 bp, Homo sapiens
gaaggacctgtacagggatgtcatgctggagaactacaggaacctggtctcactggaatatcctccgaatcctaaatctagagctccaaggatgct

SEQ ID NO: 270555 - DNA, 100 bp, Homo sapiens
ggagctgggcctaggtctgcgccctgaaggccaatgatgaggccaatcagagtgatacaagtgtctccttgtcagaacccaagagcaaaagcagccttca

SEQ ID NO: 270556 - DNA, 50 bp, Homo sapiens
caagcgcaggggctcctcgggctcagtggctcattgctatggacagtgct

SEQ ID NO: 270557 - DNA, 100 bp, Homo sapiens
cagagctcaagtaatttacaccagaaataccaagggtggagatgctccagctgctggtgaagatgcatgaataggctggagtgcagtgacgtgatctcgg

SEQ ID NO: 270558 - DNA, 100 bp, Homo sapiens
ctcagttgtgcgttgcggccagtcgccactgctaaatacactttcgggaaatggcctctaaatcctggctgaattttttaaccttcctctgtggatcagc

SEQ ID NO: 270559 - DNA, 75 bp, Homo sapiens
caggaaatcgagactcatgactcccagagaggatggcatctagaaggtctccaggaaacctagagaaaaaccgtt

SEQ ID NO: 270560 - DNA, 100 bp, Homo sapiens
ctccaccacctcctcctccaccaccacttccccctccacctcccaatcctatccgatggagagtgttggcgtgtacggattctgtgggtgtaaagcaaag

SEQ ID NO: 270561 - DNA, 82 bp, Homo sapiens
ctcctaatccctagccactatgtatgttttagctgttgggagctctgtgttccatgcgatgttttacggagaacttgcagag

SEQ ID NO: 270562 - DNA, 74 bp, Homo sapiens
gacttggactgcagcgatggcagcgatgaggaggagtgcagcaacgccctgctgcggcggctggtccgcattgg

SEQ ID NO: 270563 - DNA, 98 bp, Homo sapiens
ggtggtgaccccgcccagttggcccagaggatctcttctaacatccagaagatcacacagtgttataccatgtttgtgtggaagtgccccgtgtttgc

SEQ ID NO: 270564 - DNA, 75 bp, Homo sapiens
ctactctgcctcggggacgaaagcagccatcactggtgcaagctatatttaacggagatcctgatgaagttcgag

SEQ ID NO: 270565 - DNA, 101 bp, Homo sapiens
agcagtggctgccatccggacgttgctggagttcttgaagagagataaagagttgtctgatgtcctgtgggccatgctgatgcgcgtgggcctccgcgttg

SEQ ID NO: 270566 - DNA, 123 bp, Homo sapiens
cgctccgagtggaggcgactgggggctgaagagcgcgccgccctctcgtcccactttccagatgacttgtggggggaccacagtctggaggtggaggctggcctgcctcctggctggaggaag

SEQ ID NO: 270567 - DNA, 100 bp, Homo sapiens
cggaatatgggcgggaaccactcccacaagccccccgtgtttgacgagaatgaggaagatgatgatgtgcctgcagatatggttgcagaagaatcaggtc

SEQ ID NO: 270568 - DNA, 75 bp, Homo sapiens
attctcttcattctcttggactgaacttaaatactgatagcctgcctagggtagttaaaagacgagtgaatgctc

SEQ ID NO: 270569 - DNA, 90 bp, Homo sapiens
aattggcccaggatgacagctggagaatggagtcaggatgtgtgctgtgtttggtggaatttattgtcttcgccattcagtacagtgcct

SEQ ID NO: 270570 - DNA, 75 bp, Homo sapiens
tcggacgccatggaggggctgctgaaggcggagatcgcccgccgagggggggccctcagcctcttggccttgaac

SEQ ID NO: 270571 - DNA, 100 bp, Homo sapiens
ctgaagcaagctgtccagtcatgtctgcaggtccgaggtgctgattctggctgatggggacccctcgagcttcctgtcccgccagctgcctttcctgagt

SEQ ID NO: 270572 - DNA, 75 bp, Homo sapiens
tgcggtgtctgctgctattctccgagcttcgcaatgatccaaaaggtaattctggcacttggagactatatggga

SEQ ID NO: 270573 - DNA, 98 bp, Homo sapiens
ttctaatttgaaccatgtttggattgaagccgcctctgtattacttaccagatgccatggacaatattaccaggcagaaccaattctacgatacccaa

SEQ ID NO: 270574 - DNA, 50 bp, Homo sapiens
tcgcagtggtcgcttcttctccttggtgtgtttccattgtagaaaacctg

SEQ ID NO: 270575 - DNA, 98 bp, Homo sapiens
atggcggcgcctgaggagcgggatctaacccaggagcagacagagaagctgctgcagtttcagtttttgcctgtatacatgcacattcgagttctggt

SEQ ID NO: 270576 - DNA, 101 bp, Homo sapiens
ctgaatacatgatttaaacaagagatttccacagaagagtatgtattcccgtgtgccagagtgccaggtcaccacatactattatgttgggtttgcatatt

SEQ ID NO: 270577 - DNA, 75 bp, Homo sapiens
gcctgagcgactaactcctgcgcccctgaggttctgaaacagctggaagaactgctgagtgacatgaaagctgat

SEQ ID NO: 270578 - DNA, 59 bp, Homo sapiens
caaaatctggcctgaaataaaagaaatatacagcctctgcagacactgcttctgaatga

SEQ ID NO: 270579 - DNA, 141 bp, Homo sapiens
ggtttagcgccactctgctggctgaggctgcggagagtgtgcggctccaggtgggctcacgcggagcttgaagaaatccgcaaatgtgggatgaaaaacttccgtaacatccaggttgatgaagctaatttattgacttgg

SEQ ID NO: 270580 - DNA, 100 bp, Homo sapiens
caggaaaatcccttttttagaaaactcagcagtgagacctacagtcaagcaaaggacctggttgtatcacggactgattcaccgagcccaaccgtactca

SEQ ID NO: 270581 - DNA, 100 bp, Homo sapiens
gtgaagcctgagaacctgcgtttggcggagtttgaataccagcaggctcagctggaggctgagatcgaaaacctctcatggaaagtggagcgtgcagaca

SEQ ID NO: 270582 - DNA, 75 bp, Homo sapiens
ggagcctcagttggaagcagccgatccagcctgcggagcctgtggggcaggtgatcatggagctcagcttggtct

SEQ ID NO: 270583 - DNA, 75 bp, Homo sapiens
cgctggcagccgctgtacttgacggccgaagccctgcagcccacgctacagccggagatgcagctcgagcacggg

SEQ ID NO: 270584 - DNA, 100 bp, Homo sapiens
atatggattccaaagagcgtttggatcaggacggacgcttggagaatgatgtaaacctgacccacattgaatctagaccttctcgtttaaagaaagatga

SEQ ID NO: 270585 - DNA, 75 bp, Homo sapiens
ccgccccacccgcatgctctttgtcactccccggcggcagcacgaaagtaccatccatgctgcggatggtctcag

SEQ ID NO: 270586 - DNA, 100 bp, Homo sapiens
gccggaactcggggcgcgcatcccgcaagtcggaacccggcggatcggatcccgcagatcggagacggggcctggagcaggagtcctggcaaaataagca

SEQ ID NO: 270587 - DNA, 100 bp, Homo sapiens
gtgagagcattttggaagaggaaccacaagaaaatcaaaagaaacttttgcccttatcagtaacacctgaggatgattgtcttttgaaagtgtggtatcc

SEQ ID NO: 270588 - DNA, 100 bp, Homo sapiens
gaggttgagcgtctgatccaccatgtaaaggttgtggagatgttggaggttcccaataaacccacacaactgtcgtacaagtactactttatgtctgtga

SEQ ID NO: 270589 - DNA, 51 bp, Homo sapiens
ctagatccaggttggaatcctcaggttaactgtaatggcttcacaattgaa

SEQ ID NO: 270590 - DNA, 75 bp, Homo sapiens
ccaaaacagttcattcatattcagcggcaagaatatcacggcatgggcatgagtagcttgaaactgctgaagtat

SEQ ID NO: 270591 - DNA, 100 bp, Homo sapiens
tgaatggtcacaccgcccgagtcaattgcatacagtggatttgtaaacaggatggctgtgtgactgcacagaaaagttacaaaacaaatttgactttttg

SEQ ID NO: 270592 - DNA, 50 bp, Homo sapiens
atgatttcaaggggatgtttaatactgggtggagtattattgctagtact

SEQ ID NO: 270593 - DNA, 100 bp, Homo sapiens
acattcgaaggatggaagaagagacgaagagacagctggatgaagagccagatgaccaggatgccccagatgagcatgagccctctccatcagaagatgc

SEQ ID NO: 270594 - DNA, 82 bp, Homo sapiens
aacacgagcatggcatggccccgcaggtcttcacccaggccctggagtgcatgcgcagaggctgggaggcggcagaatgcag

SEQ ID NO: 270595 - DNA, 95 bp, Homo sapiens
gccagcactgcttcatccgggaagtgcttggggatggagtgcctccaaaggttgctgagttttaacttctagtcatggcgaatgatcgcaggaga

SEQ ID NO: 270596 - DNA, 75 bp, Homo sapiens
gaagcttctgaggacttctgaagccaaggttgatgccggcccaggatggatcagacctgtgaactacccagaaga

SEQ ID NO: 270597 - DNA, 101 bp, Homo sapiens
tgaaagtttattgcattccaacagctcattttatgttgcacttttccagccattaactccaggctctcgagaatttgaagatgttgtaaatattctccatt

SEQ ID NO: 270598 - DNA, 100 bp, Homo sapiens
gttacatgtatggagaatggctggtctcctactcccagatgcatccgtgtcaattcccccatgagatgtacttaaagaagacttggaagaagagaaagac

SEQ ID NO: 270599 - DNA, 100 bp, Homo sapiens
ctagaaaggttggagctgccgccgcctgcagtcggtgaccgcgcgactcggcgcccgcccgcgactcagcccacctgcacccaggtgaaataaacagctt

SEQ ID NO: 270600 - DNA, 82 bp, Homo sapiens
gcgacaagaagctcacccaggaacaagtatctgacaggtgttggccgaggtcctcacgggcatccctgcaatggataacaac

SEQ ID NO: 270601 - DNA, 50 bp, Homo sapiens
aacaccaagtgcatcaccatccccagctaggtcttgactccactaacggg

SEQ ID NO: 270602 - DNA, 82 bp, Homo sapiens
cgagggcgcgcggctggtgtccgccccgcccgaaagggcccggcctgccccgcacctgagctgccctcgcccccctctgctg

SEQ ID NO: 270603 - DNA, 82 bp, Homo sapiens
gactccttcggcagtccacccaccgccgccgcctcccagattcctggtcgggtggcttccagtggtcttcagtctgtcgtgc

SEQ ID NO: 270604 - DNA, 100 bp, Homo sapiens
acagaatcctgtcggagttgtagccatgccctaggctattttggcattctgctggatatatgttcgtaaataccaaagtcggcgggaaagtgaagttgtc

SEQ ID NO: 270605 - DNA, 82 bp, Homo sapiens
cgctacccaggaggcggagcggacaaggctccggcctgcgaggaggaagatgttaccgagtacttcagtgaattccttagtg

SEQ ID NO: 270606 - DNA, 88 bp, Homo sapiens
aaccgtacccgccaagctgtcatcacaaaagagttgattgaaattatctctggtgctgcagctctgtcagatggcaaaaatcaagcaa

SEQ ID NO: 270607 - DNA, 90 bp, Homo sapiens
atcctttcattatcagaacagcagcttatgaactgcttcattttccaaaagtgtttcccaaaaatcagggttttctgcccaaggatttgc

SEQ ID NO: 270608 - DNA, 88 bp, Homo sapiens
agacctggctgtggtcaaacccacccggcccaactcactttgcagaatgaagaagagtctggagaacctgaacaggctgcaggtgatg

SEQ ID NO: 270609 - DNA, 90 bp, Homo sapiens
cgggaagtggacagactgggcgtcatgacccttagctcacaatgtctctctgcaccaagctccatgactcaggatttgcctggagttcct

SEQ ID NO: 270610 - DNA, 100 bp, Homo sapiens
cagaatggcaacaaaacttgcatggaaggctggatgggccccgaatgtaacagagcccaataggggcacaaaacgtccccgggatgatgaagaggaggag

SEQ ID NO: 270611 - DNA, 82 bp, Homo sapiens
caggaactgcgcagcctcttcgagcgccgcggacgcgtcatcgagtgtgacgtggtgaaagtccagaatgacagggtccaga

SEQ ID NO: 270612 - DNA, 75 bp, Homo sapiens
aagaaaaattcactgtggtccagaagcagatatcggtgaggtggggaacgccaagcacaacgtgcatgtcatgaa

SEQ ID NO: 270613 - DNA, 99 bp, Homo sapiens
ggacaatgaggaggagacggagcacgccaaagggtggccctcatgacactgacgctcttcccggtccggctcctggttgccgctgccatgatgctgctg

SEQ ID NO: 270614 - DNA, 73 bp, Homo sapiens
catatatttaacccccctccaaaaatgagaaagatcagtctaaagaaaaggagaagaaagtgaaaaaaacaat

SEQ ID NO: 270615 - DNA, 82 bp, Homo sapiens
gcccaaggtagagcagacacttgaggagaccagctcagcaaacggaagacacttaaagtgttcttccctgtggaacagtaga

SEQ ID NO: 270616 - DNA, 75 bp, Homo sapiens
gcccaggaacagatagaaggcatggtcaaagatttgggatgaattgtaaaagcaacatcagcttgaccagtataa

SEQ ID NO: 270617 - DNA, 75 bp, Homo sapiens
gtggaggtggccgtggaggcagaggtggcatgggtggatccaaacttctacagcaaaaacttacttcttttagga

SEQ ID NO: 270618 - DNA, 83 bp, Homo sapiens
tcaacatccggagggaattcattgagaaatatgacaagtctctccaccaagccattgaggacctgtgtggagccaccacctgt

SEQ ID NO: 270619 - DNA, 100 bp, Homo sapiens
ttctatgacacccgctacaaccaagagacaccaatggagatctgcctcaatggaacccctgctctggcctacctggcgatcatcctgaacttcacgtccc

SEQ ID NO: 270620 - DNA, 75 bp, Homo sapiens
gacatttcttttgtgcaagatgagcctcaagtgcttctgcattacaatatgagatcctgactccaaactccattc

SEQ ID NO: 270621 - DNA, 98 bp, Homo sapiens
ggaacccgagaccgagtcagaacccgagtgctgcttggcggcgagatcatggagctttgtggtgcaacaagacttggttattttggaagaagtcagtt

SEQ ID NO: 270622 - DNA, 101 bp, Homo sapiens
cccggccgaggcggtgctgcaagagaaggcactcaagtttatgttgctgacaggtggaacctgaggcagcaggacagcctggcattggccacgggacatcg

SEQ ID NO: 270623 - DNA, 74 bp, Homo sapiens
ggaggtggcgcctgccggagcttcctacaatccatcctttgaagaccaccagttattagaggaagtaacacaag

SEQ ID NO: 270624 - DNA, 90 bp, Homo sapiens
gaccccgagtcgcagatggcctgccacgttttccgcgccacagaccccagccaggaagctcttcgtgggcggtcttgactggagcacgac

SEQ ID NO: 270625 - DNA, 82 bp, Homo sapiens
gtgaagaagaatttcgatctccgccctggggtcattgtcaggcaggaatagagttggagcggtgccagcagcaggcgaacga

SEQ ID NO: 270626 - DNA, 100 bp, Homo sapiens
acgacttcgcagaggaggaggaggtgcaatccttcggttacaagcggtttggctcatgcacaattagttcgagaagttgatgtggagaaggtgtctgctt

SEQ ID NO: 270627 - DNA, 50 bp, Homo sapiens
cggcggctcagccccatcatgctggtttcccggaggaaatgacaattacc

SEQ ID NO: 270628 - DNA, 100 bp, Homo sapiens
caggttcaagggtctctccagaaaatcttgtggacaaatccaggggaagtccgcaaccatccctctgttcatgcgaaacaaagatgtcgctgcagaagcg

SEQ ID NO: 270629 - DNA, 147 bp, Homo sapiens
ttcacatccttgtctgtgaagctaaactcaatgctgctgtgtgggaagaagatttgtaaagaaaactcttagatcaggatcctcatgaccagccaaagagaagaagaattaggaagcataaatcaaagaaaaaatttaaaaatccca

SEQ ID NO: 270630 - DNA, 83 bp, Homo sapiens
gcagtggaaaatgcgctcgggctggaccagcagcagcccctgtcaaagggaacaggaagcagtccacggagggtgacgcccta

SEQ ID NO: 270631 - DNA, 50 bp, Homo sapiens
tggctgaagagttccttaagaataaactaacatgttgccaccgttgtcag

SEQ ID NO: 270632 - DNA, 100 bp, Homo sapiens
gaaacactacattccagttaagagcaacctgagcgatctgctagaaaaacttaaatgggcgaaagatcacgatgaagagaattatatccagatcgagaga

SEQ ID NO: 270633 - DNA, 100 bp, Homo sapiens
ccacaatagggtatcatttttacgggccttctggagatgcttccgaactgtgggcaaaaatggcggtcttgggcgtctttggtactggcttttttagggg

SEQ ID NO: 270634 - DNA, 82 bp, Homo sapiens
ctccaatgggaataccaaggggtggatgggttggagctgagatagggaacaccattgaacgatttgatcctgatgaaaataa

SEQ ID NO: 270635 - DNA, 98 bp, Homo sapiens
tgcctaggagcccctccccaccttttccggggaagccctggtcggagcgagccgcgattgtaactgcctatgagaatagctctcagcatgatcccagt

SEQ ID NO: 270636 - DNA, 75 bp, Homo sapiens
tatctttcccagtcctaccagaaattcagacttaatgaacaagccagtgaggagattttgaaagtagaacagaaa

SEQ ID NO: 270637 - DNA, 74 bp, Homo sapiens
cgccttcttcctggacatgaccaactgcatctactacaagccttagtgggtctgatagtgagaccgaggggaaa

SEQ ID NO: 270638 - DNA, 82 bp, Homo sapiens
tcgcctgctcatcaacaaggagaaagctggccagccggaatacacctggcgtctaccctgtggaggggttcgaaatccaaat

SEQ ID NO: 270639 - DNA, 100 bp, Homo sapiens
tgtaccaggcgaagctggccgagcaggctgagcgatacgacgtctctgctttctatccgtcaagatgataaagtcgtgtgcccgagaaccaaagaagtct

SEQ ID NO: 270640 - DNA, 73 bp, Homo sapiens
atgttggcggtccctgtgacctgtggagacacggccagatctgccctccacattactctactgactggcagag

SEQ ID NO: 270641 - DNA, 100 bp, Homo sapiens
ggatccgagcctgtggccgcccatcagggggaagaggcgtcctgttcttcctgggggactggcaggtccagtggcattgcagagcacggatggttgcagg

SEQ ID NO: 270642 - DNA, 83 bp, Homo sapiens
catgccgctcctaagcctgcacagccgcggcggcagcagcagtgagagcagacggttgatgatgaagcgccggccgtgtaaat

SEQ ID NO: 270643 - DNA, 82 bp, Homo sapiens
agagcagacccgtttgggttctccacgcattctagactcccgaagagactaatagggatgccaaaggaaaaatatgatcctc

SEQ ID NO: 270644 - DNA, 85 bp, Homo sapiens
gccggagctctgatcgccgggaacccttgccgctgctgtcctgcgaccccaagcagcatcaagcttctagctgtgcaagaactgc

SEQ ID NO: 270645 - DNA, 82 bp, Homo sapiens
cgagtgcctggatctcagcaatggggataccattctggaagacttgcccatccaatctgacacgatgaggcgagtggtacga

SEQ ID NO: 270646 - DNA, 49 bp, Homo sapiens
gatcaaaatcttcgaaggagggaatgtgggaagcaggtgggctatggat

SEQ ID NO: 270647 - DNA, 101 bp, Homo sapiens
atccgaactcctggatttcaggacaagcaatacgagaattggagacccaaccagccagacagcttcttttctgctggagaagactgtgttgtaatcatttg

SEQ ID NO: 270648 - DNA, 100 bp, Homo sapiens
ctcttacgtctgcggaagtgcagctgcctcagttcttagcgcaggactggaagctgaccctgatcaccagggtgggactggcgctgtcactcttctgcct

SEQ ID NO: 270649 - DNA, 100 bp, Homo sapiens
gagcgcggcgggcggcgccctgcacagcctggcgggctgtgggcagaatcctgttagacaagccagtgtgggtgcaggaattccctactctgttccagca

SEQ ID NO: 270650 - DNA, 50 bp, Homo sapiens
ggcctggcaggggaaggatcgaggggaacgcccttttgcttgtgactggc

SEQ ID NO: 270651 - DNA, 96 bp, Homo sapiens
tgagcttcttcctatttgccatggggactcggagatcatgcagcagaagcagaaaaaggcaaacgagaagaaggaggaacccaagtagctttgtgg

SEQ ID NO: 270652 - DNA, 75 bp, Homo sapiens
cggcccgcgcccttgcccctcggccgggcggacggttagctcccagcgatgccagatgggatcagcacagccctg

SEQ ID NO: 270653 - DNA, 95 bp, Homo sapiens
atggcaggacctgtcggagaaggtggtctaccggcgcttcaccgagatctacgagttccatgttatcagtgagctgaatggaaaaaacattgaag

SEQ ID NO: 270654 - DNA, 100 bp, Homo sapiens
aggaatatgcattgaagcaaattgaaggcacaggaatatccatgtcggcttgtagagagattgcagtacgatgaagagagatcttataagagaagtgtga

SEQ ID NO: 270655 - DNA, 50 bp, Homo sapiens
gaagctcctcacagagtatgtgtcagaaaaggtggacaagtcctattttc

SEQ ID NO: 270656 - DNA, 83 bp, Homo sapiens
ttgggaccctcctgtttttggctgcctccttgagtgctcagaatgaagccattgagacccagagcagcagttctgaagagata

SEQ ID NO: 270657 - DNA, 100 bp, Homo sapiens
cttgaaaatggaagaccctgtttgttaacgaagcccttgtcatttgctgattgtgttggggatgagctgccgtggggatgggaagcagggtttgaccctc

SEQ ID NO: 270658 - DNA, 138 bp, Homo sapiens
cgactatgaagctgcttctgatttttataggaagggagttgatttactcctagaaggtgttcaaggcctaagatctggcaaacttggtgaacagtgtgaagcagttgttcgctttcccagactttttcagaagtatcc

SEQ ID NO: 270659 - DNA, 80 bp, Homo sapiens
gttaactacaacagaccatctgaataccaagctgctattttacacttgaagagggagcacaaagaagaaattgaaaacct

SEQ ID NO: 270660 - DNA, 51 bp, Homo sapiens
agagaggcggaagaggaggcctgatgggtagagacagggtttcaacgtgtt

SEQ ID NO: 270661 - DNA, 100 bp, Homo sapiens
ccgctgcccgcggacaagcagatcgagaccgggcccttcctcgaggcggtgtcccacctgccgcccttcttcgttaattggccttggtcctcacagctcc

SEQ ID NO: 270662 - DNA, 49 bp, Homo sapiens
ggctacaccccggagccaggaggacaaatttacatgtattggagaccag

SEQ ID NO: 270663 - DNA, 75 bp, Homo sapiens
tgagcgaggactccatcttcctgcacctggagcatgtgcaaggacgactgggtttggattcagaagaggattatt

SEQ ID NO: 270664 - DNA, 100 bp, Homo sapiens
cgacctgccaatcctctgttcacgaacagcagaaccatcacctgggcaggacgggaccagcagagcggctggggaaatctgtgcgttcaagatccatggc

SEQ ID NO: 270665 - DNA, 74 bp, Homo sapiens
aacaagttgcagagctacgtggacgcaggaactccagcgtggatttgtccaagatagaaaaacatccagaagca

SEQ ID NO: 270666 - DNA, 75 bp, Homo sapiens
ctgaaaggatgtgcaaccctccaagtggaatatcggttttatggagaacctgtaataaaagcatgtattgaaaat

SEQ ID NO: 270667 - DNA, 74 bp, Homo sapiens
accactgtcgccttcacacaggtgaactcgctcgtttctggcgctggagacatcaaacttactaaagacggcaa

SEQ ID NO: 270668 - DNA, 76 bp, Homo sapiens
gccaaagctcgtactgttccaatacttttgatgggcctggttccttttgaggatggccacacagacaaccacttac

SEQ ID NO: 270669 - DNA, 100 bp, Homo sapiens
gtgatatcattaagtccagatctgccctggcttgaaaaacagtccaattgatgaaagtgaggtgcaaacagcaactgatagtccctctgttaaacctaat

SEQ ID NO: 270670 - DNA, 76 bp, Homo sapiens
aaaagggtatttcttttctctcttcagcccccaacccagtggaggagaagatggggagccccgaggatgacctgat

SEQ ID NO: 270671 - DNA, 100 bp, Homo sapiens
caagatactgagagattgaagcatgctctggaaatgttcccagaacattgcacgatgcctcctggtgtcatggagaaactccagctgggcccagagattc

SEQ ID NO: 270672 - DNA, 75 bp, Homo sapiens
ggaacaccctggaagccgagaaatgcttgccttgcgccatggactggcagccagacgagcagggcctgcagcagg

SEQ ID NO: 270673 - DNA, 90 bp, Homo sapiens
gcgctaccggaatgtcatccagcgagtgattagaaccctcggcctcaggaaagtcggacagtattcagtggctcagtcagtattccatct

SEQ ID NO: 270674 - DNA, 100 bp, Homo sapiens
tggcagtggaagttttggaactgtctatctggtttcagacaagaaagccaaacgaggagaggaattaaagctacatccatattggaattttaccgggaac

SEQ ID NO: 270675 - DNA, 83 bp, Homo sapiens
caccagaggactgggaggagcatgtcaacaggaccttaaaggctttgatccaggagagaaatactttcataacacatcatggg

SEQ ID NO: 270676 - DNA, 90 bp, Homo sapiens
cggctgaacagttgcatgctgggcctgccacggaggagccaggtccctgtctgagccagtgtgatgaatgcagactctgctaccattttg

SEQ ID NO: 270677 - DNA, 97 bp, Homo sapiens
accagtgggtcgagcagctgaacgagtgtaagcagctgaacgagaaccaagtgcggacgctgtgcgagaaggttccaatcgttgcacttactgctac

SEQ ID NO: 270678 - DNA, 83 bp, Homo sapiens
cttccccacacaatatatggtgagcaaggtaccaggtcatcagtacaccatctgatattttcatggtgatggaatatgtctca

SEQ ID NO: 270679 - DNA, 97 bp, Homo sapiens
cctaacagcaggaaggttgtgtgaccaagaatatggcccaggtgaccaaagccctggacaaggccctgagcaccatggacctgcagaaggtctcctc

SEQ ID NO: 270680 - DNA, 80 bp, Homo sapiens
gcagccgatccagcctgcggagcctgtggggcagcagctcctgcagcccccaccatggcctccccccgaggttctgggag

SEQ ID NO: 270681 - DNA, 83 bp, Homo sapiens
gaacggagggctgcagcgcccaccctgcgccagagaccagataaacaaattgtggctactaatttgccccctgaagatcaaga

SEQ ID NO: 270682 - DNA, 49 bp, Homo sapiens
gacgctaagcggggtaggggaagatgccatggacaatattaccaggcag

SEQ ID NO: 270683 - DNA, 80 bp, Homo sapiens
cgaggagccccgggaggtgcttctgcggctgtacggagccatcttgcaggtgatcgggctgctggacgtattcactcctg

SEQ ID NO: 270684 - DNA, 78 bp, Homo sapiens
gctggctcaccccggggccgggcagaattgggctccaggaaatgggtcctgatgaatatgaagagatggaagaagagg

SEQ ID NO: 270685 - DNA, 96 bp, Homo sapiens
tgggggagcacgattggatttgccgaagattaggaagaatccactgatagaaatcatttccatcaataccggatcagtgtactgttacccggacat

SEQ ID NO: 270686 - DNA, 100 bp, Homo sapiens
ccaagccaaggcgaaagagacgctcagacattgtatgcaaacctgttccattctttcttcgtggacaacccattccaaaaagaatgcttccaccagaaga

SEQ ID NO: 270687 - DNA, 83 bp, Homo sapiens
agagtactcatggaaaaggagttccctggatttttggaatgcctccggagccagcgtggtggccatagacaacaagatcgaac

SEQ ID NO: 270688 - DNA, 98 bp, Homo sapiens
gttggataaatatatctatggagcacagagacggtaaagaacaggtccaagaaaagctcaaagaaagcaaataccagcagcagcagtagcaacagcag

SEQ ID NO: 270689 - DNA, 90 bp, Homo sapiens
tcagcactctctaaaggagcaacagtttacagcccttccagatacagctaccagtgccaggccgggcacctggtgtgtaaccaatgccgc

SEQ ID NO: 270690 - DNA, 83 bp, Homo sapiens
ctgataacggagaatggaactgtatgccagcagcttgttgtacaaataagaccacagcttgccaaagagaagattgaaggatg

SEQ ID NO: 270691 - DNA, 103 bp, Homo sapiens
agctgggtcagtccgccgctcaccccgcggccgcaccttcccgccttctcagggaaggtctgtttctctaacaactttttatcgaacagcgaggaatatcatg

SEQ ID NO: 270692 - DNA, 100 bp, Homo sapiens
agatgtttataatgagggcacacaggttcatgattacaaagaaggaaccccagaagagaagacctactacatagaattatgggatgttggaggctctgtg

SEQ ID NO: 270693 - DNA, 74 bp, Homo sapiens
cgtccgctttggagaactacatcaacctgccattggtcatgagcatgaggtcctgctgagagacttgcttctag

SEQ ID NO: 270694 - DNA, 82 bp, Homo sapiens
ccaccctgcgccagagaccagataaaggaggaataagtttttttcatctgtaatttggaagccaagtcagtaacaaaatgaa

SEQ ID NO: 270695 - DNA, 73 bp, Homo sapiens
tcgtgctgtgctaggggatgatccgcaactgatgaaggcatccgtgtcattctggaccttactcccaactacc

SEQ ID NO: 270696 - DNA, 100 bp, Homo sapiens
tgcctcagccttctgagtagctgggattacaggtgtgcaccaccacgcccagattggttgtgatcgtagccaaaaccttgtggacatttgtagagagagg

SEQ ID NO: 270697 - DNA, 109 bp, Homo sapiens
ccgctaatggaactgaagacagctgggcctaacaagtgcccaggtgactcagcacaacagctccagctggcagcatcacttcccgccaatttatccaacttctgccaag

SEQ ID NO: 270698 - DNA, 82 bp, Homo sapiens
tggagcttgacgcgctggagcttgagagaaggtgcttcctggaggggcctgccccactgttcctgtgctgagttccaggaca

SEQ ID NO: 270699 - DNA, 101 bp, Homo sapiens
ggcccttccctaagttctcccagggcgctgccagagccctgccggctaagggatggggaaacaaacaggggctggggagaacaccaaaacaaacctggaga

SEQ ID NO: 270700 - DNA, 74 bp, Homo sapiens
cgcgggccctttgcagctgcgattttcgccctacgttttcaacggagggatggtgatcgctcacaccaaatcct

SEQ ID NO: 270701 - DNA, 50 bp, Homo sapiens
ctcccaagtagctgggactgcagtctctctgccttctggggaaaagataa

SEQ ID NO: 270702 - DNA, 100 bp, Homo sapiens
agagagagaaacaggggagcaaggtgcaagagtccacaaagggacctgatgaagcgaagatcaaggcaggaagttatgttcgtgatgatgcagtccccaa

SEQ ID NO: 270703 - DNA, 75 bp, Homo sapiens
tgataattgggcctccaagaaaccttctgaggaaaggaggccatacagaaattgaacctcagcacttctgtcaag

SEQ ID NO: 270704 - DNA, 82 bp, Homo sapiens
ggaagatccggcgcggggcacaggatccggagctggagcccccagagatctgttggtaatctgaggatttttattctacgtc

SEQ ID NO: 270705 - DNA, 100 bp, Homo sapiens
tgctacatctgttggaggagccaactagcatggaagtgcagaatggaggctccagagtgaaattaatgacactttgtcgatgaagatcttgattgtgacc

SEQ ID NO: 270706 - DNA, 98 bp, Homo sapiens
caagcccatcaagcccctgccttgctgcaagaaggccgtgtgcgaggagtgcctcaaagtctacctgagcgcccagaatgaggacctaatttgcttca

SEQ ID NO: 270707 - DNA, 90 bp, Homo sapiens
gttgatttgcactgctccgggtgtcggctccggcgggacgggcggttctgcgtacccctctccgattcactccttctccagttgcacagc

SEQ ID NO: 270708 - DNA, 101 bp, Homo sapiens
aagaaagacagatcctgtgtcacccggcaactcagaaacatcaggtccaaggaggagagggcagtgagagataggaatctcctccaggttcatgaccataa

SEQ ID NO: 270709 - DNA, 107 bp, Homo sapiens
gcggagaccatgttccgagcggcggctccggggcagctccggcgggcgctacgtggtgaacatgggtctgattgacaaactgtgtgcctgcttcctctcggtgcaag

SEQ ID NO: 270710 - DNA, 82 bp, Homo sapiens
ccgagcaattgtgatgagatattctgctgagtggaagctggttatattctgggcactaaatgaaggcgtttctaggcaattt

SEQ ID NO: 270711 - DNA, 75 bp, Homo sapiens
ttcggacttccccgttagaactcgcgtttccacttcagagatctggaccctgatgctcccataagacagaaaatg

SEQ ID NO: 270712 - DNA, 110 bp, Homo sapiens
cttcacaggaacctggtcctcaggacacaccagccagccagatgcaaccttaaaatcagtgacaagaaacattccaaacaagcaacagtcttcaagaaattaaactggca

SEQ ID NO: 270713 - DNA, 80 bp, Homo sapiens
cagagctggaaacggacattcgtgcaaagaagcgggttcttcggaaagtctttcccagggaactccgatgaagtgttcca

SEQ ID NO: 270714 - DNA, 100 bp, Homo sapiens
tgatctgtcctgaatgtggcttggttgtagagaggatctgacgaactactctcaggcagtgttctcagtagtccgaactctaatatgagcagcatggtag

SEQ ID NO: 270715 - DNA, 100 bp, Homo sapiens
agctctcatcggccaatcactccctccagctggcctcacagatccagaaggcaccagacgtgtcatcagtgagttctgcctcagtcagctcccaagtgag

SEQ ID NO: 270716 - DNA, 100 bp, Homo sapiens
gtacaaaggcatggggctgtccatgggcaccatgatctgtggctgggataagagaggccctgggcctgcttccgcgaggccaacatcccaacccacttcg

SEQ ID NO: 270717 - DNA, 88 bp, Homo sapiens
cagcctctgcccaaagaaagaaggaggtgtcaactctgcccgctcagttcctccttcctacccaccaccgcaggacccgttaaaccac

SEQ ID NO: 270718 - DNA, 100 bp, Homo sapiens
tctggggcaggggccagggccaggcagaagaagagttcaacatagagaaaggtcggcttgtgcaaacccaaagactaaagattatggaatattatgagaa

SEQ ID NO: 270719 - DNA, 100 bp, Homo sapiens
atacacacacctgttgccattatagagctggaattaggcaaatatggacagattacaggctgtgccagccctggaaaaacagttacaattgttgttcgtg

SEQ ID NO: 270720 - DNA, 100 bp, Homo sapiens
gccccaatggcagccagtttggattttcactggacttccacaaggacagccatgggagatctttaatctcatgaagtacgacagctacagccgcttctta

SEQ ID NO: 270721 - DNA, 58 bp, Homo sapiens
tgaagggctacccacactggccggcccgggcttcaacggaccacaccaaaatgccatc

SEQ ID NO: 270722 - DNA, 99 bp, Homo sapiens
ccagaacccagcagcttgccagcatcgttgcagttctacatcaaacagttcgttaactgcagacgtaaattctggatttgccaaacgtgttcgacaaga

SEQ ID NO: 270723 - DNA, 90 bp, Homo sapiens
aaccccagggacctggaaagacagacaggatggggaggaggttcttcagtgtatgcctggttgggataattcttcactattccacccttg

SEQ ID NO: 270724 - DNA, 83 bp, Homo sapiens
cgactggggctgacattcctgaagccgaaggtggcagcatggaggtgatgtgtccaatctagatcccaacttctcatttgaag

SEQ ID NO: 270725 - DNA, 100 bp, Homo sapiens
ctcagtgccattgtgatgatgaagaaccgcagatccaggccgcgatgggcctcttggaacattggtgtgttcatctgcattcgatgtgctggaatccaca

SEQ ID NO: 270726 - DNA, 75 bp, Homo sapiens
cgagagccgcggggagaaggccatcacccaggttgctgcagcaactggtcacacagtagtgttggtagaccagac

SEQ ID NO: 270727 - DNA, 100 bp, Homo sapiens
cggacctgcggcccgacgaggaagttttctactgtaaagtcaccaacgagatcttccgccactacgagtcagggccctttgaagtacgagcagaccttga

SEQ ID NO: 270728 - DNA, 51 bp, Homo sapiens
cgagtactcttatgcagtccccatgaatgcaatgtgcaaggaaattattcc

SEQ ID NO: 270729 - DNA, 82 bp, Homo sapiens
tcgccagcccgtgccgcgagcgcggcctgcaggagctgagcgggctttggacaccatgaactttgatgtgattaagggaaag

SEQ ID NO: 270730 - DNA, 75 bp, Homo sapiens
cggaaactaggaagaggaaattaactatctgtacttataagtgggttgccagcgttgatgtggtggagaatgaag

SEQ ID NO: 270731 - DNA, 75 bp, Homo sapiens
caatacctttggttttgggaagatctcaggaacggcctgcctcaccgtctatgaatatgaagagagtggattgtt

SEQ ID NO: 270732 - DNA, 83 bp, Homo sapiens
ggggggctatgggcccatcgactacaaacggaacttgccgcgtcgaggactgtcggatccacattgtttgaagttattgtgag

SEQ ID NO: 270733 - DNA, 75 bp, Homo sapiens
cactccactatgccccttaccacaggagctctgcacaggctttccttaaagtttcccatgtctcaatggactcct

SEQ ID NO: 270734 - DNA, 75 bp, Homo sapiens
ttcgtcttggtaaacttggtgtggagtctttcattttggatcaggatgatttggaaaatccaatgctggaaacag

SEQ ID NO: 270735 - DNA, 89 bp, Homo sapiens
gcaggacctgggcggaggccgccaagacgaaaagttgccagacggccagcattgccactgccagtgcatccgcccaggccaggaatcat

SEQ ID NO: 270736 - DNA, 90 bp, Homo sapiens
gcagggcaaggaaactggccacaatgaccaaagacttgaccactcaaagtccagctccccagaacactgctcgacatggacaccggtgtg

SEQ ID NO: 270737 - DNA, 80 bp, Homo sapiens
gccgagtctgacggcgccggttcgctgcccggtccgcccgcggtgagagctctgcttatgataatgtcaacaaagttcga

SEQ ID NO: 270738 - DNA, 100 bp, Homo sapiens
ttgtttgatgagacctttgaattaagcgaggaaaagccacagccccgtgaagcgtccgcggaaagcacagagactgcgtgtggcctatgagggctcggac

SEQ ID NO: 270739 - DNA, 75 bp, Homo sapiens
ctgagcctgccacgccgaggacgtggcactctcgagtggaccctgaggagctcttcaccaagctcgaccgcattg

SEQ ID NO: 270740 - DNA, 98 bp, Homo sapiens
gacaagtacatcgccctggatgagtgggccggctgcttcggcatcaagcagaaaaccagcctggacaccaagtctgtgtcagaaggccacctcaagag

SEQ ID NO: 270741 - DNA, 100 bp, Homo sapiens
caccacagccacccttggtgatgagcctcggaaagtgctcctgcggctgtatggagcgattttgcagatgcttcccttgtcactgctgaagacggctcag

SEQ ID NO: 270742 - DNA, 100 bp, Homo sapiens
ggaccctacagaagatgctgaagctgaggacacacccaggaaaagactcaggacggacaagcacagtcttcggaaggtatgccattttgaagactgagac

SEQ ID NO: 270743 - DNA, 74 bp, Homo sapiens
acccagagagggacacaaaagaagccatcgcaaattatgtgaaaggtggaatgaatcttacttgttgaatatct

SEQ ID NO: 270744 - DNA, 50 bp, Homo sapiens
ccgccaaagaccccgtccggtaggcatttttagatgaattcactaactgg

SEQ ID NO: 270745 - DNA, 100 bp, Homo sapiens
tggggaccacattgctccaagccagatatggtacaggactgtcaacgaaacctggcacggctcttgcttccgtgggtaattccagaattgattggccata

SEQ ID NO: 270746 - DNA, 100 bp, Homo sapiens
aagagcgacaagccgctggcagccgcggatctcaccgccgctcaggatagcctgggctggaagctcttctacgtcacaggctgcctgtttgtggctgtgc

SEQ ID NO: 270747 - DNA, 86 bp, Homo sapiens
ccaggaatttgagttctttgagaacaccattgtgtcccgcattgcccgcatctgcaagtccatctcaggttttgcgcacagctgct

SEQ ID NO: 270748 - DNA, 90 bp, Homo sapiens
gcaaaggctgctctgaagcgcacgacctccgactactttctccttcaagacctggagtggaagatcatttatgttggctcggctgagagt

SEQ ID NO: 270749 - DNA, 101 bp, Homo sapiens
tgaatctgggcttatgggatacagctggacaagaagattatgacagattacgccccctatcctatccgcaaacactcccagatggacgtatcatcaaagtt

SEQ ID NO: 270750 - DNA, 78 bp, Homo sapiens
ggacgagctctacctggaacccttggaggacggggttgactatagtcaatggggccaatggagccaagtgtatggaaa

SEQ ID NO: 270751 - DNA, 50 bp, Homo sapiens
tggaggctgagcatttattcagaccgcaggatggaaacaagcccactgag

SEQ ID NO: 270752 - DNA, 83 bp, Homo sapiens
tctggacaggcttgggaactggtggaatactaggatatttgtttggcagcaataggccaagactaaggggctgcagagcgggg

SEQ ID NO: 270753 - DNA, 100 bp, Homo sapiens
ctgaggcccgcggagaccagggctctggacttattggacaaaatgttgacattcaacccacacaagaggattgaagtagaacaggctctggcccacccat

SEQ ID NO: 270754 - DNA, 100 bp, Homo sapiens
gggtgctggtgcctatagcatgagttgattatggaagattcccacaagagtaccacgtcagagacagcacctcaacctggttcagcagttcagggagctc

SEQ ID NO: 270755 - DNA, 82 bp, Homo sapiens
gagcagcgaggcactcatcctgcacgccggcgagtgccagcgcggagctggagtttgttcagatcatcatcatcgtggtggt

SEQ ID NO: 270756 - DNA, 100 bp, Homo sapiens
attgatgccccaggacacagagactttatcaaaaacatgattacagggacatctcaggtgaacgcttggccaagccagagcgaggcaagatgagagtgca

SEQ ID NO: 270757 - DNA, 82 bp, Homo sapiens
agacactgaacgaggagccagtgagtccggcagcgtcttctcttgagggagcaatttggagaagagctggaacccagactcg

SEQ ID NO: 270758 - DNA, 100 bp, Homo sapiens
gcaggagcaggtgtcagcacatcaagaggcaggcagctcccaggcaggtcccgagcagccccgcccaacatggacccagacccccaggcgggcgtgcagg

SEQ ID NO: 270759 - DNA, 75 bp, Homo sapiens
cggcgcgggagccggcgtgggcggcggcaacggggcactgacctgggtggttgtggtttctcgatcaggaccatc

SEQ ID NO: 270760 - DNA, 51 bp, Homo sapiens
aaacaaaatggtggtatcatgaacttggcaagtggcttgaacctctgaaaa

SEQ ID NO: 270761 - DNA, 75 bp, Homo sapiens
cagcctactggtgactcggctgcagagagatggctgcccaaagattgtcaatctggggagctctaagacagacct

SEQ ID NO: 270762 - DNA, 50 bp, Homo sapiens
cctcgcgcgtgaggatctatctcagctgggcaccaaagaaggttacctca

SEQ ID NO: 270763 - DNA, 106 bp, Homo sapiens
ctcggagtccttggggacggagcagcgcgtcgtggggcgagcggcaggattttttatcaagcagaaatgcatcgaacaacgagaatcaagatcactgagctaaatc

SEQ ID NO: 270764 - DNA, 100 bp, Homo sapiens
taaactaccttcccaaatgcatccgggttggatggcaagcatgtggtgtttggcaaagtgaaagaaggcatgaatattgtggaggccatggagcgctttg

SEQ ID NO: 270765 - DNA, 96 bp, Homo sapiens
tttctaccttgtatgcctcaatttgctggatttaagcactgctgcactttatgaggtgaactgtcacccctacaactcagcttgcaaccagccctg

SEQ ID NO: 270766 - DNA, 75 bp, Homo sapiens
cggagtttgagccccggaggcagagcggctgccatgtgatgatgatgatgattttgatgatgaggaagctgaaga

SEQ ID NO: 270767 - DNA, 100 bp, Homo sapiens
ctattcctggtctacatcctgcgggtgcctttgaaaatcaacgacaacttgagcacaggagtcctaagcagacttaaagccaagaaaataagaagaggaa

SEQ ID NO: 270768 - DNA, 90 bp, Homo sapiens
agttttgctgggacgcctactccaaagcggccgggagtcgcgcttcttccccactcccgagacagggaacggcagtgatgcaggagctgc

SEQ ID NO: 270769 - DNA, 100 bp, Homo sapiens
caagtacatcgccctggatgagtgggccggctgcttcggcatcaagcagaacgtggacgaatgtcagctcttccgagaccaggtgtgcaagagtggcgtg

SEQ ID NO: 270770 - DNA, 96 bp, Homo sapiens
gggaaggtgacatgaaaggagctcagacaatttctgtccagcaacatgacagcaagctcaggctgcatgttggcagataaattgaacatgactcca

SEQ ID NO: 270771 - DNA, 50 bp, Homo sapiens
gagaagttccctcttttaacataaagtggcagctagactgtcttgcttgc

SEQ ID NO: 270772 - DNA, 90 bp, Homo sapiens
atttctagtcagatttcaggttcagtgacatcagaaaatgtgtccagagattacaaggattcttctctaatacttgatgttcctctgggt

SEQ ID NO: 270773 - DNA, 99 bp, Homo sapiens
cgatggcctgaggagcttgaatgtgacagagagcagagctgacatctgataaagacatgtaccttgacaacagctccattgaagaagcttcaggagtgt

SEQ ID NO: 270774 - DNA, 75 bp, Homo sapiens
ataggattagatgatccaagtcaccaagaaattactgtctcaagtgatacggacattcggaaattctttggagta

SEQ ID NO: 270775 - DNA, 75 bp, Homo sapiens
atggagtctgtcagtacaggtgccgatatgatggagatcttataacaatttttgatagttctgacctttcctttg

SEQ ID NO: 270776 - DNA, 86 bp, Homo sapiens
gcctcgggtctcgggggccgctctgggatcccggccaccagcaattgtccgaaacctgtttccctccaatcttgtggttgcagctt

SEQ ID NO: 270777 - DNA, 100 bp, Homo sapiens
cttaaacctgacttaaggattgtctttgtacataacaaggaaactacattctgaattacgtggcatcacagcccaagctggctccctttgtcatccaagc

SEQ ID NO: 270778 - DNA, 75 bp, Homo sapiens
acaaggtcaagagcgacccgcagaaggcggtggaccagccgcgccaggatatgtttgccttcatgggcagcctgg

SEQ ID NO: 270779 - DNA, 100 bp, Homo sapiens
tacaatttggatacagataccatctcaaagggtaatcttccaggacatggatttgattgacatactttggaggcaagatatagatcttggagtaagtcga

SEQ ID NO: 270780 - DNA, 82 bp, Homo sapiens
aatcttgtacttcaagaggaggaatcacgctcggaaacaatggccttgaaaagatcttttgaggtcgaggaggtcgagacac

SEQ ID NO: 270781 - DNA, 100 bp, Homo sapiens
ttttttgccatggtggattttgatgaaggctctgatgtatttcagatgccaagacaatgcaaactccagtgaacattcccgtgcctgtgctccggctgcc

SEQ ID NO: 270782 - DNA, 100 bp, Homo sapiens
ctgtttggcaccttcctgttcaactcccctcaccagcgagtgaagcaaagcacgtatttcagacaacttttaagaggtgcagaatcaccaacacgcaatt

SEQ ID NO: 270783 - DNA, 96 bp, Homo sapiens
cttcaagagcccacggacaccacctcaacgactcacagatgaatgcttctcacccggaaacaaacttgccagttgggtatcctcctcagtatccac

SEQ ID NO: 270784 - DNA, 100 bp, Homo sapiens
ggccattttcgttggtggtgttcagttgtggcggttgctggtcagtaacagccaagatgctgcggaatctgctggaaagaatacccacctcatgtccaaa

SEQ ID NO: 270785 - DNA, 88 bp, Homo sapiens
caaattatgctgcagcatattgtactggcctgctgctggcccgcaggttaagtgggcagaccaacatccacctcagcaaaaacttctt

SEQ ID NO: 270786 - DNA, 100 bp, Homo sapiens
ctgcatatttattatcagaacagcattgacgacaaggtgaagcaagaagcatttcatttgcacatctttcttggacttgggatatacagttccagtttat

SEQ ID NO: 270787 - DNA, 100 bp, Homo sapiens
tgaagatgtctcaggaattcttcagtgtactgctaatatactcgggattaaagcctgtggtttccacagaagcaccacctatcatatttgccacaccaac

SEQ ID NO: 270788 - DNA, 75 bp, Homo sapiens
acagtgatcatcataggcttatgtcttgctgcaggagtgggaatagctttgcgaaaaatgggcgcaatggccaag

SEQ ID NO: 270789 - DNA, 82 bp, Homo sapiens
tgggcgtggaccggcagaggacggtggagacaaggaagaggtgcagcggaagcggaggaaggccttgcccaccttctcccag

SEQ ID NO: 270790 - DNA, 100 bp, Homo sapiens
ccgggatcgtgaccgagaccgtgaccgagagcgtgaccgagagcgcgaatatcgtcatcgttagaaggtgcccagtcccctggaaggcagtgaaggggac

SEQ ID NO: 270791 - DNA, 100 bp, Homo sapiens
acagtctgaacatggacctcgaactttagataatctcattaatcctccactcaaccttcaagaaaaataacctccatctcctgggtcccagcgattctcc

SEQ ID NO: 270792 - DNA, 100 bp, Homo sapiens
gcaggaaagccccagccacccatcaaatcagagagaaggaatccaccttcttacgctatggcagacccaacatgagtgaagtttcctgcaagaaacggga

SEQ ID NO: 270793 - DNA, 88 bp, Homo sapiens
ggggacggcagtgctgaggcggaacaggccgggcaccaaggcgcaggaggcaaaaccttcaactgaggacttgggggataagaaggaa

SEQ ID NO: 270794 - DNA, 75 bp, Homo sapiens
acggctggcctattattgctgtattctaacttattcatctcctatgattgagaggatccagaatccagatctctg

SEQ ID NO: 270795 - DNA, 74 bp, Homo sapiens
aatgctgaggagcagacgagtggccaggcttctggggctgactcaactgggaagccctatggggcggatgactt

SEQ ID NO: 270796 - DNA, 85 bp, Homo sapiens
cctggagcctcagttggaagcagccgatccagcctgcggagcctgtggggcaggtagcagtagctgatgtgcagtttggccccat

SEQ ID NO: 270797 - DNA, 100 bp, Homo sapiens
aactttttctaccagatggtatggaagcccggctccgctcagagaaagtggagaatgaggacatgaataaagaccagatcttgctggaaaaagaagctga

SEQ ID NO: 270798 - DNA, 83 bp, Homo sapiens
gccgaacccgcctggctagccggcgagttgagtggcgaggcacggccgagcagatgaggactgtgtggacgaccgggccagac

SEQ ID NO: 270799 - DNA, 100 bp, Homo sapiens
ttaaagaaattgtggcagaatctgacgttatgctcaatgttatagttttgccgctggactcttccctcccttcccccaccccatcaggatgatatgagac

SEQ ID NO: 270800 - DNA, 90 bp, Homo sapiens
gtttcataaagacctaacaagcctagaaaccacgtcagaaatggaagcaggaagtcctgcaggaactcagggagtgagctacaagtgtat

SEQ ID NO: 270801 - DNA, 50 bp, Homo sapiens
ccccatacagctggaaatccacagagacagagtctcactctgttgcccag

SEQ ID NO: 270802 - DNA, 100 bp, Homo sapiens
cagctctgcagccacatactatccgtttgttcaggaaccaccagtgacagagaatcactagatttgatctacttggcgactttggaaggtttaattggct

SEQ ID NO: 270803 - DNA, 76 bp, Homo sapiens
tgttgaacaacttggaattccagtaaaaatgcatttgcaaagggagaaaatgaaggccaaacagaagcaggctcca

SEQ ID NO: 270804 - DNA, 90 bp, Homo sapiens
cgtgcccaaagaggagggcgtcatcagcgtctccgaggacaggtttacccaaggtccagcctagcccctaggcaccatgtcggacagtga

SEQ ID NO: 270805 - DNA, 100 bp, Homo sapiens
ctcgaggtgctctcgggagagatactgggaatttgccaaagagagagagagagtggagaaccgaagggctttcatgaagctgcggcgccagcagcagatt

SEQ ID NO: 270806 - DNA, 50 bp, Homo sapiens
tagacagcgcagcccgaggagttctggaatttcttgaggttggcaaaaag

SEQ ID NO: 270807 - DNA, 50 bp, Homo sapiens
ggagtaaccctcactggagaatccagaggcctgatcacttgaacggacat

SEQ ID NO: 270808 - DNA, 120 bp, Homo sapiens
aggcgatggcggatttagataaactcaacatcgacagcattatccaacggctgctggaagacaatgcagatcttcgtgaagactctgactggtaagaccatcaccctcgaggttgagccc

SEQ ID NO: 270809 - DNA, 90 bp, Homo sapiens
cgctgttggagttggatttggggctatagaaaagacggcatctgctacctttgagagtgccagtcttcaggcagtgacagtggtgggagc

SEQ ID NO: 270810 - DNA, 76 bp, Homo sapiens
caggtcacacactgttgcagcgcagcttactgcagagtgggtctgggcatctgctacgacatgcggtttgcagagc

SEQ ID NO: 270811 - DNA, 75 bp, Homo sapiens
cctttggttcacaacatcatcaaatgaaaactgattgggaggtagctattaaaagtattaataaaaagaacttgt

SEQ ID NO: 270812 - DNA, 75 bp, Homo sapiens
tctattccaacaaggagattttccttcgggagttgatctctaatgcttctgatgactcagaattcatgattgaag

SEQ ID NO: 270813 - DNA, 90 bp, Homo sapiens
agaagaacgggaccaccgccctcattcatgctgcagagaagggcaaggggacgcgagataaggtcctgatcagaatcatggtctcccgca

SEQ ID NO: 270814 - DNA, 125 bp, Homo sapiens
gcagctccctaatgatgatgctcagtttgatgcgtcacactacgacagtgagaaaggaggtgctggagaatctggtaaaagcaccattgtgaagcagatgaggatcctgcatgttaatgggttta

SEQ ID NO: 270815 - DNA, 100 bp, Homo sapiens
cggacgccagcggacacgcgggcgagatgttggagtccggggtgacctggtctcagtgaagaaatctttaggccggaatcgactccttcctcagggactg

SEQ ID NO: 270816 - DNA, 98 bp, Homo sapiens
ggacagcgttctgtcatctcagcaaagaatgggattttatattggaagacatggatcttgctgccaacgagatcagcatttatgacaaactttcagag

SEQ ID NO: 270817 - DNA, 98 bp, Homo sapiens
cccgggtcttccagaaggctgtagaccagagtatcgagaaggatgctcgtcagaagttccgctctgttctggttgaagcaacggtgaaactggatgaa

SEQ ID NO: 270818 - DNA, 75 bp, Homo sapiens
gcaggaacgacaaactcaaagtccaggatttacttacaagacataaattgctcagtgcagaatttttggaacagc

SEQ ID NO: 270819 - DNA, 83 bp, Homo sapiens
ggatctgggcatgagaccccttctcccaggaggggagaacccttaggagaaatcttgagagtggacagcaattgtgaagatcg

SEQ ID NO: 270820 - DNA, 82 bp, Homo sapiens
ttcctggtctgcggcagccatgctgaactcgtatggagaggtatcgagaaccttccctgcgaacttcagaggaacttccagc

SEQ ID NO: 270821 - DNA, 90 bp, Homo sapiens
gaaaaagctgccctgagacggtgtcccgccgaaaggttgaaatcacaaagattagacacctttttagataggtgttcttcagcaccactg

SEQ ID NO: 270822 - DNA, 75 bp, Homo sapiens
ggctcaaagaaagatgattatatatggtattagacaacatgatagcttctggccaattagacgagtccatacgag

SEQ ID NO: 270823 - DNA, 74 bp, Homo sapiens
gatgcctttgttcaccgccaaccccttcgagcaagacgtgggagggagccatggatttgctgcgggagctgaag

SEQ ID NO: 270824 - DNA, 75 bp, Homo sapiens
gaaaacctttgaccatgaagagaaatgagatgatagccaaaccctcagccccaactggaccctaggcaaaagtga

SEQ ID NO: 270825 - DNA, 96 bp, Homo sapiens
acgcgcgtcgcgcgggccgggatgagggactgtggcggcgcggcccgcgcgcagccggccgggaaagcaggcaggatgggagagtcgccgatagaa

SEQ ID NO: 270826 - DNA, 96 bp, Homo sapiens
atgtgattctttctctcgcttggaggaaactaacatttaatgagcatcagctgagggccagggcatttgacactcttgcaaaagcattgaatcctg

SEQ ID NO: 270827 - DNA, 75 bp, Homo sapiens
ctacgtcatcgcgctctggatcctcgtggccagcttggccaagatcggctaccggctctctgaccagttccacga

SEQ ID NO: 270828 - DNA, 50 bp, Homo sapiens
tgctcaagaaccagctggaccagacggagttttgctctgtcgcccaggct

SEQ ID NO: 270829 - DNA, 97 bp, Homo sapiens
ggaatggtgtctgatgccagtgccaatgagcattttcttcctctcgcaaatctggaatgttcaccaaacattgaaactttcctctgcaaagcatttg

SEQ ID NO: 270830 - DNA, 88 bp, Homo sapiens
gggggtgacgtgatggcggcagcggtgctgacggaccgggcccagggtcctgaggacaccgtgagccagccaggcctggccgctgggc

SEQ ID NO: 270831 - DNA, 74 bp, Homo sapiens
tacgttgaaggactttgctgggttcttagatattattaccagattctgccatgtaaatgtcagcttgagtggac

SEQ ID NO: 270832 - DNA, 83 bp, Homo sapiens
gaactgcctgtgcgccctcaacctgctttacaccgattttttatcaagcagaaatgcatcgaacaacgagaatcaagatcact

SEQ ID NO: 270833 - DNA, 82 bp, Homo sapiens
ccaagtttgaagttggagatgctgaaaatgttgcttcatatgaatgatgttgaatttgaagtatcatcggaccgacggactg

SEQ ID NO: 270834 - DNA, 75 bp, Homo sapiens
agattggagcatttgtgttgatgaagatgaaagagactgcagttgtcatttacgtgctgaagcatattgacttga

SEQ ID NO: 270835 - DNA, 99 bp, Homo sapiens
gcctcccgagtagctgtgattacaggggccacttagaagatgtgtatgatatttgctgggcaactgatgggaatttaatggcttctgcctctgtggata

SEQ ID NO: 270836 - DNA, 153 bp, Homo sapiens
agcatgctaacacatctgccaattatgatgtggagctacttcatcacaaagatgcacatgtagatttcctgaaaagtgctgaactagatgcagagcacgcccagaaggtcctggaaatggagcacacccagcaaatgaagctgaaggagcggc

SEQ ID NO: 270837 - DNA, 100 bp, Homo sapiens
aaagttccgccatgagctggggcacggagctgtgggaagtgcacggctgtctataacgtgctgccgggtctcaggatggaggagtgaagtctcctgtcgc

SEQ ID NO: 270838 - DNA, 88 bp, Homo sapiens
tccagcgtgcgacgacttactggcttcatgagatggagtttcactgtgtcagccaggatggtctcgatctcctgacctcgtgatccgc

SEQ ID NO: 270839 - DNA, 75 bp, Homo sapiens
gccttcccagacatgtgacacaagccagtccatgacagacatgcttctcaaagtacagaatgctattggagaact

SEQ ID NO: 270840 - DNA, 100 bp, Homo sapiens
gggtttgaggcagtatatgagctcaccaaaatgtgtaccattcggatgagttttgtcaaggccttgtgaaaaagggtaaagaacaaaacacacagcgaag

SEQ ID NO: 270841 - DNA, 100 bp, Homo sapiens
cccaagttctgcagccagtgcggagagaggctgcctcctgcagcccccatagcagatgctgtgggtgaggtggaggcatggcacaggaactgcatagcct

SEQ ID NO: 270842 - DNA, 96 bp, Homo sapiens
ccagtcgcctccaggccaagagggatccttcacccgtgtctgttggaggtccccctccccactaagtgcctctttgcatagcaccagtccccaccc

SEQ ID NO: 270843 - DNA, 80 bp, Homo sapiens
ttcaagcaattttcatgccgcagcctcctagctgggattacaggttttgattggaacttggtattcaagtgggattacat

SEQ ID NO: 270844 - DNA, 82 bp, Homo sapiens
ctgaacaacagcacactgaaggaggctcagttcaaagacctgttcttaaaaaaaggctggaagtgatggagagagtattgga

SEQ ID NO: 270845 - DNA, 95 bp, Homo sapiens
cgcggcggacgcgcccgggacgcgcggcggcaccgggaggccgggccgagcgagcactgcagcctgtggtgttgaggctcacagcgatgccatcc

SEQ ID NO: 270846 - DNA, 75 bp, Homo sapiens
cagagttgccaaccccagagctgccgagcaaggatgcctgagagggagcagacaccaccgcatgaacacatctgc

SEQ ID NO: 270847 - DNA, 82 bp, Homo sapiens
tcgcaacgggtttgccgccagaacacagatctctggaaacatggctacagaacatgttaatggaaatggtactgaagagccc

SEQ ID NO: 270848 - DNA, 101 bp, Homo sapiens
ctgcaagattttccggccccctcgcgcctcccattgcagcctttgtgataactgcgtagtcaccaccaagtaagcgaagaaaattagagaaaccgagaaaa

SEQ ID NO: 270849 - DNA, 101 bp, Homo sapiens
tttcccgagccctggaggtggggagaaaagtgtcagtgctacaatggagttctcttgtccacggagagcagtgttgcagtgtatggaatgctaaatcttac

SEQ ID NO: 270850 - DNA, 75 bp, Homo sapiens
atttttaaaaagcagcctctggagccagccatgtttggcactgaatcttcatatatgtgtcacaaagatgtctac

SEQ ID NO: 270851 - DNA, 98 bp, Homo sapiens
gcggtcgggccagggtcgtgccgccggcgggtcgggccgggcaatgcctcgcgggcgcaatgaatccgcggcagccttcatctcctcgtcctccaggc

SEQ ID NO: 270852 - DNA, 80 bp, Homo sapiens
cggggtgcgccggcagaggatccagtgttcaccatcctggccccggaagcccaagaagatgaaaggattgttcttgttga

SEQ ID NO: 270853 - DNA, 50 bp, Homo sapiens
cgaagaagcttcgaggatctggtcttgtcatctcctaatcagcagaagga

SEQ ID NO: 270854 - DNA, 89 bp, Homo sapiens
gccatggacgccttcacccgcttcaccaaccagacccagggccgggaccgactcttcagatgccgacaaaaggatcaaggtggcgaagc

SEQ ID NO: 270855 - DNA, 98 bp, Homo sapiens
accaaccacaaggcctgtgtgcgtgacgtcagttggcacccctttgaagagaagattgtcagcagttcggtggaggcaatgcccagagctgtggcagc

SEQ ID NO: 270856 - DNA, 88 bp, Homo sapiens
cggctgcagacttggccaaatggacgggactattaaggttggcaaaagcagcttttgatgatgcaattgcagaactggatacgctgag

SEQ ID NO: 270857 - DNA, 87 bp, Homo sapiens
ccgcgggagaggtaaacagaacaccaggacatcccagagtctgggaaatggctgaaggtgatgtggccgccctcaaccgacgcatcc

SEQ ID NO: 270858 - DNA, 74 bp, Homo sapiens
ccggtggaatgggtccaggccgtggtcagccgcttcgacgagcagacgaattgtacgtgggcagaccgcagaga

SEQ ID NO: 270859 - DNA, 51 bp, Homo sapiens
gcgagtgggactggatggagttcgatatgtcttgtcgttcaagacttgcaa

SEQ ID NO: 270860 - DNA, 73 bp, Homo sapiens
aggaatggagacacggcttcccccaaggaatatacaggagatggcgtctaccagaaggggatggacttcattt

SEQ ID NO: 270861 - DNA, 51 bp, Homo sapiens
caccagcagcatcttagagccccaggactttgacaggtacaaagataagca

SEQ ID NO: 270862 - DNA, 98 bp, Homo sapiens
gaggacccagtcccacatctcccaggcgtctgtagaggcttctggtgaaatcgcattatgcaagactggatttcctgaagatgtttacagtgcagtct

SEQ ID NO: 270863 - DNA, 75 bp, Homo sapiens
cacgactcctcgggcagcctcaacgagaactcggagggcaccggaggtcagtcttcactgtttccaatggaagat

SEQ ID NO: 270864 - DNA, 83 bp, Homo sapiens
atccggcccatagccgagcagactggcatctgtaaggtgcggccgccgccgccgagagggtgacctctctgggcaaggactgg

SEQ ID NO: 270865 - DNA, 100 bp, Homo sapiens
tgccgatgggaaatcccaggctgccgcggctcctgtgtgctttgaagatggcagccctccagagccccttctatggagataagatgaatctcttctccct

SEQ ID NO: 270866 - DNA, 100 bp, Homo sapiens
ctcggagcggagacggcaaatggcggacttcgacacctacgacgatcgggcctacagcagcttcggcggcggcagagggcatttccctggaaatggcagc

SEQ ID NO: 270867 - DNA, 74 bp, Homo sapiens
cccccggccgcagcgcaggcagcccagcaggcccggcctgcatgcctacgaaaaggaggacagtgatgaagtcc

SEQ ID NO: 270868 - DNA, 74 bp, Homo sapiens
ctcggcaggctcttcgggaaggtgttttaactcaaatgggtgatgaaaaggactcttggaaagtgaaaacttta

SEQ ID NO: 270869 - DNA, 75 bp, Homo sapiens
tttccccagcagtagcctctgcgaccaggtgcggcttcaggcagcaaagcacctgctctgagtggccatggggaa

SEQ ID NO: 270870 - DNA, 50 bp, Homo sapiens
ctcgcgactggcctaagtcgccgcagccagccccctgccctgagccagct

SEQ ID NO: 270871 - DNA, 50 bp, Homo sapiens
gttacattgcacaatatttgaataaggacaaatatcagtggatgggttca

SEQ ID NO: 270872 - DNA, 105 bp, Homo sapiens
cggtccccaacgcatcatgccagggagccaagcgtcctgcccggcctgtcacaccatgtctgaccggaaggcagtgatcaagaacgcagacatgtctgaggacat

SEQ ID NO: 270873 - DNA, 75 bp, Homo sapiens
tttcagtgaaacaagttcagagaatgatacagaaggtccagtttctttacacatctctgctaaagcagcaagaag

SEQ ID NO: 270874 - DNA, 75 bp, Homo sapiens
aaaaaatgtggcagcgcctgaaaggaattgccggtggtggtgtgcacattgagccccggtatagacagttccccc

SEQ ID NO: 270875 - DNA, 75 bp, Homo sapiens
gctatccaaatgcgattagttgatgtggcctgcaagacgagatgatgcctattggccagaaggaaagcgtgtggc

SEQ ID NO: 270876 - DNA, 75 bp, Homo sapiens
agtgattctacatctcaagctcatattttgaagtgtttacggaagaacatgagctgcctgtggacatggaaacca

SEQ ID NO: 270877 - DNA, 98 bp, Homo sapiens
ggagttggtggtggcttaagttttgaagggaggtagcatccgttggatatccacaccatccttctcgctgcagggcagaagctcctcctggggtagag

SEQ ID NO: 270878 - DNA, 75 bp, Homo sapiens
ccggaccgagcgcctcgacctcggtctgagataatgctctaccacaagaaaatggcctctcacctggggccattg

SEQ ID NO: 270879 - DNA, 110 bp, Homo sapiens
aagaaccagttattggcaatagcatcatcattgtttgtggcattccagttaagagcacaacattttcaagaaaattcaaggaaaggaaacagattcattgtctgtctgag

SEQ ID NO: 270880 - DNA, 100 bp, Homo sapiens
ccgctcccggggtccccggccggccaagcagggttcataaattcatggaacgtgaaggtcgcagacctcgtcttcttgtagcaaaaatgggacaagatgg

SEQ ID NO: 270881 - DNA, 75 bp, Homo sapiens
gcaggaagagctgcagtctttgtgggacaaggtcccgcagcccccggaagccaatagactccctcagggactctc

SEQ ID NO: 270882 - DNA, 86 bp, Homo sapiens
cgctgaacggatggctgagggagccccgcggatcgtttaggaaagccggccaggtgaatgaggcctctggggatggggatggagag

SEQ ID NO: 270883 - DNA, 103 bp, Homo sapiens
tacttctggccttcgaactgctgggaacctgaaaacactgactatgttctttatagctccaagctctacagattcttcaaatatattgagaatagggatgttg

SEQ ID NO: 270884 - DNA, 74 bp, Homo sapiens
acatctcctccttaacagcctctcctgagaataggctggcttcaagggtttttaatgaccacaacaagcaagca

SEQ ID NO: 270885 - DNA, 100 bp, Homo sapiens
tgccagttcctgagattctgcagcttcaaggtgacatcaccacctatcctcagtttgtggtctgccagctaaaggtgaagatatattcctccaattcagg

SEQ ID NO: 270886 - DNA, 100 bp, Homo sapiens
gaaagagaagtttctggtcactccccaggattatgcgcgacggaggctggtgggacctcaaccccagctggtatccaggctcttgacaccatctggagaa

SEQ ID NO: 270887 - DNA, 51 bp, Homo sapiens
gttgtgtgaagagtatcattcgacagaaaatatttacaccagcagctccag

SEQ ID NO: 270888 - DNA, 75 bp, Homo sapiens
cagcacgtaccttagaactctatggagttgaattccactatgcaagggatgagcccagctctgggatggatccct

SEQ ID NO: 270889 - DNA, 100 bp, Homo sapiens
ccgcagtagctcccccgcctcccgggctgaggggatggtcttcacaataccctcttcaatcccttctgactggttatcagtgcagtggtaatgatgaaca

SEQ ID NO: 270890 - DNA, 100 bp, Homo sapiens
atatcttgaaaagctgccagaaagggatcctggcagagcagtttgttccggatgggccccacctgcacctctaccatgagaaccactggataaagttaat

SEQ ID NO: 270891 - DNA, 100 bp, Homo sapiens
gcacagaaatggtatcaagaaaccccgatcacaaagatacgaatctcttaaggggtggatcaatcttcctgtcctacaactgacaaaggatcccctaaag

SEQ ID NO: 270892 - DNA, 100 bp, Homo sapiens
ctgtgaattctacccgggaaactcctcccaaaagcaagcttgctgaaggggaggaagaaaagccagatgccaattctcggaagcaagaagcagagtggaa

SEQ ID NO: 270893 - DNA, 100 bp, Homo sapiens
ccgttggcatcgctgccttctgtctagcccagaagcatcccatatcaagatggattgcccgtaatttctatgatagtcctgaaaagatatatgaaagaac

SEQ ID NO: 270894 - DNA, 90 bp, Homo sapiens
cagagacaatgatggggctcttccccagaactacaggggctctggccatcttcgtggtaatactcagctggccttacagatcatcaaaag

SEQ ID NO: 270895 - DNA, 82 bp, Homo sapiens
ctgggaatgaagcaggatcaatgatgggataaaaatcaagggaatctggaaaaccaggggctcatgtaactgtgaagaagct

SEQ ID NO: 270896 - DNA, 50 bp, Homo sapiens
gtaccgcctcaaccgcgacgccgagattcttggtgccaccattgagaact

SEQ ID NO: 270897 - DNA, 100 bp, Homo sapiens
aaagagtgcagccgggaaaactcagggtacagtgcagcacctgcaggcaggcaacgctcaccttgacccaggaaagtctctgtacgtgaagaggttgcac

SEQ ID NO: 270898 - DNA, 100 bp, Homo sapiens
cttggtgtggtgtgcggaggagctccaggcccgtcggcgcggagaagtttccaagggtcacttgtgtctcgtccgtgggaagaccgggggagcccagaag

SEQ ID NO: 270899 - DNA, 83 bp, Homo sapiens
cactgaaatgcgggaggctccttaactcttgtataaacagtggagcagcgtgacttcattggagtggacagcacaggaaagag

SEQ ID NO: 270900 - DNA, 113 bp, Homo sapiens
tgaagcggcagctgaggagactccggcgctcgccatggccgacgaaaagcccaagacaatgcagatcttcgtgaagactctgactggtaagaccatcaccctcgaggttgagc

SEQ ID NO: 270901 - DNA, 50 bp, Homo sapiens
gtagagaattttggtctcgattcagcagaagaagatctttacaatccaag

SEQ ID NO: 270902 - DNA, 50 bp, Homo sapiens
cctcacaccctggatccttgacctactagaaaatcaggaaaatgtttcca

SEQ ID NO: 270903 - DNA, 82 bp, Homo sapiens
gccgttggtcctgtgcggtcacttagccaaggggtttaaagccaatttgtctctcttgaggaggcctggagagaaaacttac

SEQ ID NO: 270904 - DNA, 73 bp, Homo sapiens
cggagttcatcaagaattacatgaagaatttttccctagattggtgtaaacagccagacgtgggccttcccaa

SEQ ID NO: 270905 - DNA, 98 bp, Homo sapiens
ccatttccaatcagtcatgggaccagaagtttacactggaactggacagggtagtaacactctggtacagatctccagaagtattgctggggtcagct

SEQ ID NO: 270906 - DNA, 82 bp, Homo sapiens
aatattagttccgtcacaggggctatttgtttggatatcctgaaagatcaatggttgatgatgcaatgatggcaaatgcagc

SEQ ID NO: 270907 - DNA, 95 bp, Homo sapiens
aaggaggagtacaaggacatcctgcgcaaggccgtgcagaagtaagactttgaccccgacgcaggcttcagtgattgccgcggatcagaagcctg

SEQ ID NO: 270908 - DNA, 75 bp, Homo sapiens
cgcaggcgcagacgcgcgggcgggaagatggcggctgggttcaacgttcttacttccgtactcttctcatgtatg

SEQ ID NO: 270909 - DNA, 100 bp, Homo sapiens
cagaactgggttctggactttgggcgtcccattgccatggagagaagaccaagaggtcggagaagaggtagaaaatgtggcagaggccataaaggagaaa

SEQ ID NO: 270910 - DNA, 50 bp, Homo sapiens
ggccggacagcaaggacatttccaatggaaggaggcaaaaccggaagacc

SEQ ID NO: 270911 - DNA, 96 bp, Homo sapiens
cactggggaagagaaaaccagcgtggttctgagcacacggttaatttcaaagcttttcccatggagatatgttaatgaatacacccagggcacaca

SEQ ID NO: 270912 - DNA, 50 bp, Homo sapiens
gaagaactcgtgagccggattgatgcagttggaattgatcacaccttttc

SEQ ID NO: 270913 - DNA, 100 bp, Homo sapiens
acaaagtggaggtttgtggcagccctgcatggagcaagtctgtcagcaccatctttctaacagccagaggcattgatgtgcagcaggtttctttagtcat

SEQ ID NO: 270914 - DNA, 98 bp, Homo sapiens
ctactctatgtggtgcagactccatgctcttggcattgcagctttctatggcggagaacaacaaacaggggcaagattcttgccaagagaattaatgt

SEQ ID NO: 270915 - DNA, 89 bp, Homo sapiens
ctgtctactgctcagtactaccaaggaccagtgtgcttttcttggagaaagaagaaaagaagaaagaaggaagaagaagaagaaagaaa

SEQ ID NO: 270916 - DNA, 49 bp, Homo sapiens
agataccagcctttcaaaccaattactgaagatttcattgctacatatc

SEQ ID NO: 270917 - DNA, 75 bp, Homo sapiens
ggtggctcttccgcatggtcttgagccctatgagtttgtctctctggaatggctgcaaaagtggttggatgaatc

SEQ ID NO: 270918 - DNA, 109 bp, Homo sapiens
agaatacttgggtgacatctgcctgagagatctccaagaattacaggcccttcataacacaaggcttttatctgcttattccgccattgatcccagagtgaagtatttg

SEQ ID NO: 270919 - DNA, 95 bp, Homo sapiens
atggggcatacctatggctttattgacctcgactcccatgcgtctaagggaagcctggagataacagagagccagtctgcagatgctgaacctcc

SEQ ID NO: 270920 - DNA, 75 bp, Homo sapiens
gaccaaaggctcagcccacaactcttgtcctaccacctcaacgaggacctattaaacttggaatggctaaaatca

SEQ ID NO: 270921 - DNA, 75 bp, Homo sapiens
ccggcggggcctcccagctggaagaggcggtggcggcgggtcggggcgagcaccaaagactctgcacagaagcag

SEQ ID NO: 270922 - DNA, 80 bp, Homo sapiens
gccgatccagcctgcggagcctgtggggcaggtattatagctgcaaatgtccttgtattctgtttatggagagtaccttc

SEQ ID NO: 270923 - DNA, 100 bp, Homo sapiens
ccatcctaactgaagcaataaaagctgcttctgtccacactgatggtaagcggatgtttggcacctattttcgtgttggtttttatggaaccaagttcgg

SEQ ID NO: 270924 - DNA, 100 bp, Homo sapiens
tctcagtcaacttcaagaggcttggttagctgaaggctaaacatatttttgactggtatgaacccattctactttcatgcagtaaatataattttacact

SEQ ID NO: 270925 - DNA, 51 bp, Homo sapiens
gtcttggccccgtccttacctcacagcttgccgaactaaagcaagaatgtc

SEQ ID NO: 270926 - DNA, 100 bp, Homo sapiens
tgctgtggttggatatttagaggacattatcatggagccatggagaagctaagcgggcatcagtttgagaactactccttcaagatttcctacatcccgg

SEQ ID NO: 270927 - DNA, 96 bp, Homo sapiens
caagaagctatagatgaagtgaaaagacagtggagagaagaagttgcttcacttcaggctgttatgaaagctaaactacacatccaatttccaaag

SEQ ID NO: 270928 - DNA, 75 bp, Homo sapiens
aagatccccgagatgcagctgatgcagtccgagagctagatggaagggtaaaggacatgttcagttttgaaattc

SEQ ID NO: 270929 - DNA, 73 bp, Homo sapiens
ggggccggggcgccgctggcaggagcgcttggggatcctccaagaggttggaaagaaccatgactgtattcag

SEQ ID NO: 270930 - DNA, 75 bp, Homo sapiens
ctggtgcagccgaggtcttcgggaattccagcgagggaaggtgtcttgctgcaggtaactaatgaagaagtggtc

SEQ ID NO: 270931 - DNA, 100 bp, Homo sapiens
gcagcatcgaccgcatgttcgacaagaatctgcaggacttggtccgcggcatccgtaaccacaaggaggacgaggatccctctgtgacccagctgaccaa

SEQ ID NO: 270932 - DNA, 82 bp, Homo sapiens
agcagcagcaactcctgatttaggggcaatcgatattgagattctaatgtattgccaactgaccagccgacagaagctgcta

SEQ ID NO: 270933 - DNA, 100 bp, Homo sapiens
aagatgaagatgctgttagcctttgcagtctcgacataagtggctgatagttcaggaccattcagaccccatgttcagttcatatgcctataagtcccac

SEQ ID NO: 270934 - DNA, 74 bp, Homo sapiens
ccacagcggcagctccagcccggcccggcagcgacatggaagtttcactgttacatgccttgaagtgatgagga

SEQ ID NO: 270935 - DNA, 97 bp, Homo sapiens
tggagggccagagaaagcaagcttgaaacagagaggaacgggtcactttggtggaggaaattgggggacctggtggccttagtctttcaggtggaac

SEQ ID NO: 270936 - DNA, 75 bp, Homo sapiens
aaacgccgcaccaggtcttgtagcagcgcctcctcgattgctgctctctgaacactatagtcgtcgaatctcaca

SEQ ID NO: 270937 - DNA, 100 bp, Homo sapiens
ggaaggtctatgtcagcacgcagaaggtttgaggagcattgcttctcatacagtaagactgtgccctgtccacggtgcctcctgcatgtcctgctgccct

SEQ ID NO: 270938 - DNA, 83 bp, Homo sapiens
ccgggagtaggagactcagaatcgaatctcttctccctccccttcttgaatgttgtaccatctttgggtaggcagacttccct

SEQ ID NO: 270939 - DNA, 96 bp, Homo sapiens
aatctggtgttatcaacttaaaagatgccacctctaagagctggctttatgtgctggggcagaagagatccgatagctatgttctgctggagcatt

SEQ ID NO: 270940 - DNA, 97 bp, Homo sapiens
gacttcccccggccagagcaatggccgctgagaacagcaagcagttttggaagaggagcgctaagctgccggggagttagggcctagtcaaaatttt

SEQ ID NO: 270941 - DNA, 50 bp, Homo sapiens
cactgactttcagctatggaatcgtttgagccccagctacatagatctga

SEQ ID NO: 270942 - DNA, 100 bp, Homo sapiens
tggaggagccagtgtaatgctagaagtcctagaagaaatttggagtgtgcgtgcgcgccgagcgataaacattgacgatcttgaggatgaccctgtggtg

SEQ ID NO: 270943 - DNA, 80 bp, Homo sapiens
gttcagcagtcatgtaactataagcagcttcggaaaggagccaatgaggatgtataagcattccaataataaggccatga

SEQ ID NO: 270944 - DNA, 99 bp, Homo sapiens
caagaactaaaaaagaatgggagtcaagttgctttgtggaaaaaactcactggggatactacacctggccaaagggcagtacgaataggaataattgat

SEQ ID NO: 270945 - DNA, 100 bp, Homo sapiens
cagtcccatcactccaaggagagaagggtccacatatagcctcagttacattagctgcttatgaatgcaattcagttaattttcccgaaccaccctatcc

SEQ ID NO: 270946 - DNA, 101 bp, Homo sapiens
ctggacacagtcactctgcactcccaagtgaccacttatctcacccaggaacaccacaccctgagggcccagagccgcagctcgaagccgtccaactgcag

SEQ ID NO: 270947 - DNA, 101 bp, Homo sapiens
gggggttgcggcggcgctgagccagcggggccggaaacttggatttaactggccagaagcaggtattcaaagcagagaacaatccctgggtgacccccatt

SEQ ID NO: 270948 - DNA, 82 bp, Homo sapiens
gccgagggtttgatgaaggtggaggcagcgcggctctcagggccaattcctgtccccccagcagcatggcatcgtgtgctga

SEQ ID NO: 270949 - DNA, 80 bp, Homo sapiens
aatatgagggctcccctagaccctattgctacaaaggaccctttaaaccctattaaacaagatgtgaaaaaaggaaaact

SEQ ID NO: 270950 - DNA, 90 bp, Homo sapiens
aaccccgtctgtggcaaagagccccgaagctaagagcccccttcagtcgcagcctcactctaggccttgctaccggagcagcgagcagtg

SEQ ID NO: 270951 - DNA, 75 bp, Homo sapiens
aaggacaccgagtgctcatcttctcgcagagatgaccaagcgagacgtgcctggcttcgccatcgggggcctgag

SEQ ID NO: 270952 - DNA, 139 bp, Homo sapiens
gtgctgcccccgacgcgggaggttcacctcatcctctccttcgacttcagtgccggagatcctttcgagagtttgtgaagatgatgtctcgctgaggaggtcctggaagctccagaccctctccacctggtcaacatgg

SEQ ID NO: 270953 - DNA, 100 bp, Homo sapiens
gcacaaatactattatggataagatgatggttacccatgcagttgttactgtaccagcctattttaatgatgcccaacgccaagcaaccaaagacgctgg

SEQ ID NO: 270954 - DNA, 97 bp, Homo sapiens
ctccgatccctgcgcgggctcgagagctcgccccgaacgggggtcttcctcctccgccgttgacagttttccaagagataacttcaccaagatgtcc

SEQ ID NO: 270955 - DNA, 78 bp, Homo sapiens
tctgggccgcttcttcagctctgagaccaccgcagcccactccctaggtctctaattaacagaagatggcaaagccca

SEQ ID NO: 270956 - DNA, 75 bp, Homo sapiens
gaacacactgggaaatgccgtgtcagtggggttgttttgggagtgtttttgggcctaggcctgagtggaatcatt

SEQ ID NO: 270957 - DNA, 82 bp, Homo sapiens
aagtacacggagtacaacgagccgcatgagagccggacaaactcagacatcgtggaggttacaggaggttccagtggcatcg

SEQ ID NO: 270958 - DNA, 98 bp, Homo sapiens
accagagcgggactctgactccgaacctactgatgataggccaagaagacgctggagggaggctgttaggagggactctgagcttcacacctgtctgc

SEQ ID NO: 270959 - DNA, 75 bp, Homo sapiens
ggggtcttcaccgagctcattaaaggattcggtggcacaagaatggctcaactctccaaatagagagaatttcta

SEQ ID NO: 270960 - DNA, 90 bp, Homo sapiens
caagacaaagggccccttacacaccagacaggtgggcgggggcaggacggaagcccggttatcaccttccctgactacccggccttcagc

SEQ ID NO: 270961 - DNA, 82 bp, Homo sapiens
tttggattgaagccgcctctgtattacttaccagacctcctgccccccgaggtctgcagtctcctgaacccagcagccatct

SEQ ID NO: 270962 - DNA, 75 bp, Homo sapiens
ggaacaacgcgagtcggcgcgcgggacgaagggcttcataaacttcacttaccaaatacttcaagggattcagaa

SEQ ID NO: 270963 - DNA, 75 bp, Homo sapiens
attatagcaatcccagacctaagtttgaagattggctttgtaacaaggtgtagaatgagccaaggagactcaaac

SEQ ID NO: 270964 - DNA, 100 bp, Homo sapiens
tgacttacaccctcaggactttttgtcatctgttttgttccagcaattcagtgaggctggagcattggatttgctaaaggagcttaagaatattcctatg

SEQ ID NO: 270965 - DNA, 100 bp, Homo sapiens
agaaaatggaccagtttgttcgttacgagcatgaacttacgagaggtgttaaaaaaatatggtaaagatgttggtcttcatattaaagctgtaagatcct

SEQ ID NO: 270966 - DNA, 51 bp, Homo sapiens
gcggcaggctcaggtgcagccgctggacagaatgctttgacctccaagctg

SEQ ID NO: 270967 - DNA, 100 bp, Homo sapiens
ccaccctcgatgtggacggggagaccctgatcaagaacaggagcgcagagcttcgtgtcctataaagaatcttcaagagggagacatagggaaaaggaag

SEQ ID NO: 270968 - DNA, 100 bp, Homo sapiens
cgaataattccaggtggaattgctgatagacatgggggcctcaaacgtggagatcaactcctctctgttaatggagtggacacattggcgtgagacctgg

SEQ ID NO: 270969 - DNA, 90 bp, Homo sapiens
cacaactccagtgctaactcaacagaagccgaaccggaagttgacaaccttctggtttcagatgccaccccagacggtttccgtctgtcc

SEQ ID NO: 270970 - DNA, 50 bp, Homo sapiens
ccaagatgcggatccgggcctttccgaagccccatgtgccactcccctga

SEQ ID NO: 270971 - DNA, 74 bp, Homo sapiens
gaactaagaatattattagcacaagagcaccatactttgaggggcggcgactggcggcgcgatggacctgaccg

SEQ ID NO: 270972 - DNA, 75 bp, Homo sapiens
aagacgaccaccatcctgctggacgggcggcgggtgaagctgcagctctgacaatgcagatcttcgtgaagactc

SEQ ID NO: 270973 - DNA, 75 bp, Homo sapiens
gtaccctaaatatgggagataagaagtatgaagacatggaaggtgctggagaatctggtaaaagcaccattgtga

SEQ ID NO: 270974 - DNA, 100 bp, Homo sapiens
aggtcttccaacaaatgagacaacttttgcaaaaatactgaaagagaaaggctatgccactggactcattggggctcccacaggatcagaggctggggcc

SEQ ID NO: 270975 - DNA, 100 bp, Homo sapiens
acggcgctgatgagtctgtttgggatcccgctgtggtacttctcgcagtccccgcgcgtggtcatccaggatgataatgaagataattcaaatgatggga

SEQ ID NO: 270976 - DNA, 82 bp, Homo sapiens
tcccggtggccgccgcgcaggagcctcccggagctgacaatgcagatcttcgtgaagactctgactggtaagaccatcaccc

SEQ ID NO: 270977 - DNA, 82 bp, Homo sapiens
gtggaccacatagacatttacgcggatgtcggcgaagagttcaaccaggatgctccagaccttgtatgattacttctggtgg

SEQ ID NO: 270978 - DNA, 76 bp, Homo sapiens
ggaatctgattccaagcaaaaaccaggctgtggaaaatctctgttctcacaaagtctccccaatgctctacaagca

SEQ ID NO: 270979 - DNA, 95 bp, Homo sapiens
gtctgcggaagtgcagctgcctcagttcttagcgcagtgtttgaaagatgtatggtgatcttgaaacctccagacacaagaaaacttctagcaaa

SEQ ID NO: 270980 - DNA, 75 bp, Homo sapiens
gtcctcatactattttgacctgcagctcctcgtcttcatgtttccagcggagtttaagagagctgtgaaagtagc

SEQ ID NO: 270981 - DNA, 51 bp, Homo sapiens
gcggctgcggggcttccctgcggctggaggagtcggagaggatggcagggg

SEQ ID NO: 270982 - DNA, 74 bp, Homo sapiens
gggaagccgtgatgagggccgtgttgacgtggagagataaagccgagcactgaatgacctggatgaccctgaaa

SEQ ID NO: 270983 - DNA, 75 bp, Homo sapiens
acaataaatgaaataataaagcgaacaacatcaggaggagaatggccccagattgaccctgctacgggaatggtt

SEQ ID NO: 270984 - DNA, 100 bp, Homo sapiens
gcttgattctgtgattgaattcagcatcccagactctctgctgatccgaagaatcacaggaagcctctactcttcatggatcttttggatgaaagaacac

SEQ ID NO: 270985 - DNA, 75 bp, Homo sapiens
ctgcaccttctcttactgctggcctgacagatgtgctggtgctgagctgtgatctgataacagacgttgccttac

SEQ ID NO: 270986 - DNA, 82 bp, Homo sapiens
ggcggcgggcaggcgtgcggaggacactcctgcgaccagacgcaaacatgcagatctttgtgaagaccctcactggcaaaac

SEQ ID NO: 270987 - DNA, 75 bp, Homo sapiens
gattatttccagcgcccattcatgttgaagtctggaaagtagatggtaacatgatgtggcaccaggataaccaag

SEQ ID NO: 270988 - DNA, 87 bp, Homo sapiens
agttccggtgagcggacggcggcgcgcgcaggtgtgatgaatgcagactctgctaccattttggctgtttggatcctcctttgaaaa

SEQ ID NO: 270989 - DNA, 90 bp, Homo sapiens
atcccagacgaagacagtccctggatcaccgacagcacagacagaatccctgctaccagctttttctcctccgtgacagccagagtaatc

SEQ ID NO: 270990 - DNA, 75 bp, Homo sapiens
catgggccccatctggtccagttactatggaaactgccgttctctcctgaaacccaaggacttggacttcgccca

SEQ ID NO: 270991 - DNA, 50 bp, Homo sapiens
gacggctgcccttcaagtaccagatgagtgtgcaaaccatccgaaatgtg

SEQ ID NO: 270992 - DNA, 116 bp, Homo sapiens
gggacccgcacgccgggctttgttgtggaaatcccggttacctgaaagcataaaggatgttattggcagaaagataaaaatttcagtgaagaagaaagtaaagttggaagttaagg

SEQ ID NO: 270993 - DNA, 98 bp, Homo sapiens
aaatttttggatgatgatggatccatttctcctattgaggagtcaacgttatgaagacagtatggagtttccagaccatagtagacatttgctacagt

SEQ ID NO: 270994 - DNA, 80 bp, Homo sapiens
gcttttggttcttacagtagtcggcgtaggccttagacaatgcagatcttcgtgaagactctgactggtaagaccatcac

SEQ ID NO: 270995 - DNA, 75 bp, Homo sapiens
tgtgaacatcatcaaaatattactaaatgcaggagctgagattaactctagacccaacatgagtgaagtttcctg

SEQ ID NO: 270996 - DNA, 90 bp, Homo sapiens
gccgcgctcagcgacaaacaaattgtggtggtgccatgcagcaagaatcagagagatgcagagttagagccagaaggcctgacatggcac

SEQ ID NO: 270997 - DNA, 100 bp, Homo sapiens
gtgatcacagagcctatttacccagaagtagtccatatgctactctccagagagaccggatcttcaaacattttaccaggaagcgccaaagggctatgcg

SEQ ID NO: 270998 - DNA, 80 bp, Homo sapiens
tgaagcttcaacttgtgcacaaaagtgttgtgcatttaatgatcattgtgcttcccagtactcggagcttttagagacca

SEQ ID NO: 270999 - DNA, 75 bp, Homo sapiens
ggtgcacgtcgaaagagccactgaacagttacagcgagctgcttactatcaggtttctggtcctcataccgtgtg

SEQ ID NO: 271000 - DNA, 90 bp, Homo sapiens
ccaagggtcgctttgctgtacatcgtattacacctgaggaggccaaggtggtggagacactgccacttgctgtgccaaatggaacacgga

SEQ ID NO: 271001 - DNA, 98 bp, Homo sapiens
gcccgggctccagttccctctccagcgcggccgcgaggccccggcgccgcccggaactgcagcggctccagaacctgggtatcaacccagcaaacatt

SEQ ID NO: 271002 - DNA, 100 bp, Homo sapiens
ctccagcgggcctggactgtgggctggtgtgtggaactggcacttccaggttggcttaaagggttaccctaggccagcagtcagctcagtcagggtggtg

SEQ ID NO: 271003 - DNA, 75 bp, Homo sapiens
gtcaacacgacaccggataaaccaaagacagcatctgagcacagaaaggcaggggaaatggaaggtgatgcagtc

SEQ ID NO: 271004 - DNA, 100 bp, Homo sapiens
gggcgagcgaggaggatggcggagtcggggctcctgacggtgcagtacagaaggtttctaaaaaattagaaatgcacgtttacagcaagaggttggagat

SEQ ID NO: 271005 - DNA, 76 bp, Homo sapiens
caggctctggctgtgccctggtccagctgcagccactgacaggctggcaaaggaggaggtgagccggcaggagctg

SEQ ID NO: 271006 - DNA, 96 bp, Homo sapiens
cccggatggcccgtggccctgacacggagaacatgcccgtgtcccagcccacccaggtaactctgatcacggcacctagtggggtggaggcccagc

SEQ ID NO: 271007 - DNA, 100 bp, Homo sapiens
caggcgccggccggctgcgaagacgcggtgggccgcccctccggtcccaggatctgtgttcacagacatctgggggaagaaaaggagcaggaaactaccc

SEQ ID NO: 271008 - DNA, 88 bp, Homo sapiens
gccgaggcgcttctgcatctgtgggccgagaggcggggtttcaccatgttgcccagactggtcttgaactcctgagcttaagcaatcc

SEQ ID NO: 271009 - DNA, 88 bp, Homo sapiens
ctctacgctgtggtcaccagggaggagcccatttacatcatcaccgagtacatggccaaggagaccatgaaacgtatggtgcaatagc

SEQ ID NO: 271010 - DNA, 74 bp, Homo sapiens
tcagggccagtgctcactcttattgtctgtccttaggatgaagctctaactgaactgaagtaaggagaaacagc

SEQ ID NO: 271011 - DNA, 88 bp, Homo sapiens
atattttgattggaaggactgcctgcctccaacaggtatggatcctggcgggagccagtcaacccctattatgtcaatgccggctatg

SEQ ID NO: 271012 - DNA, 83 bp, Homo sapiens
acatattgttaatcgtattgctcctcaggtcagggaagtcaaagatgcatccctgagttcttcctagcaggcaagcagccgtg

SEQ ID NO: 271013 - DNA, 138 bp, Homo sapiens
gcctccctgctgagctcgcggctcacgctgagagggacacgcagtgacgagcggccgaagcagctttgcggtactccaaagattcaggtttactcacgtcatccagcagagaatggaaagtcaaatttcctgaattgc

SEQ ID NO: 271014 - DNA, 100 bp, Homo sapiens
aagctgctaaaccgtaccttggctgtccctccttggattgagtaccagcatcacaagcctcctttcaccaacgatcttaagattgaaagtgatgttcaag

SEQ ID NO: 271015 - DNA, 89 bp, Homo sapiens
gcgtcgtctcgcgagagtccaagttaaagaacatggcgacgtctaatctgttaaagtgttatagttttgccgctggactcttccctccc

SEQ ID NO: 271016 - DNA, 74 bp, Homo sapiens
ggcggtacccgggtggttaaacttcgcaaaatggaatttttcacagacaacctatgggacacactcccttgctc

SEQ ID NO: 271017 - DNA, 75 bp, Homo sapiens
cggggcttgaacgtggccgccacagcggctgtgatggctgcttccaagaataacaagcctttgtattcatttgaa

SEQ ID NO: 271018 - DNA, 83 bp, Homo sapiens
ccgagatatgctgccacctccttcctccgaggctccaagatctacgtgctgggtggccatcaagtcaatccggaaggacaaaa

SEQ ID NO: 271019 - DNA, 83 bp, Homo sapiens
gagaacagtttgaagcaaatgggtatttctttaaaaggagaatacttatctctggcgcacatcactatatttggctgcctctg

SEQ ID NO: 271020 - DNA, 98 bp, Homo sapiens
gatgatgataatgttttcagcagcaatttgccctcagagcaagctgcctcgtacccagccagacggcaccagcgtccctggagaaccagcctcaccta

SEQ ID NO: 271021 - DNA, 75 bp, Homo sapiens
tgttgaggggcgactggagccatggcggagtcggcgcctgctcgggttcagcagctggacatggagaaccaacgc

SEQ ID NO: 271022 - DNA, 100 bp, Homo sapiens
gagggatgcacctatggattccattgaatgggctgaagtggtgatcaatgtgaacaatattctcaagaaatttggagagcttgtaatgaccaaagaatca

SEQ ID NO: 271023 - DNA, 75 bp, Homo sapiens
tcctggaggaatccgagaagagcagagcggagggagccccagacacgggagtggagcttggtttcgggatctcgg

SEQ ID NO: 271024 - DNA, 96 bp, Homo sapiens
acaagaagccacggctagggccttcaggcgcaaactcaggtggacctgtgatgccctcggattatcagactcagattgatggacaacttttcttaa

SEQ ID NO: 271025 - DNA, 100 bp, Homo sapiens
cagggacaggagtactccacagaggataaatttcaacctccggggccacaatagcgaggaataaataccttacgtacactttagatgatcaggaaatctg

SEQ ID NO: 271026 - DNA, 109 bp, Homo sapiens
tttttgtgcaaatgcatgcggacattactgagcctcatcgatgagcagctgagccacaaggagaagctgtttgtcctgtcctttggcaccaatgccgggtccctctggc

SEQ ID NO: 271027 - DNA, 90 bp, Homo sapiens
ctcttacagatggacctgtacgcgctgctaggcattgaggagaaggcagcggacaaagagcttcccattgaccggggtggaggtgaagga

SEQ ID NO: 271028 - DNA, 68 bp, Homo sapiens
agaagaggagcagcgcatcctccagcagtcagtggtcttctcacaagactttcaggattaagcgattc

SEQ ID NO: 271029 - DNA, 88 bp, Homo sapiens
gagtcaaaaatctggcatggagcgttgccgaatccttttggaggctgccaggataataaggggattaaagcctgtggtttccacagaa

SEQ ID NO: 271030 - DNA, 75 bp, Homo sapiens
cagagccctgcgatactattatgacaagagatcctgaaggagctagacgagtgctacgagcgcttcagtcgcgag

SEQ ID NO: 271031 - DNA, 100 bp, Homo sapiens
gaagtgtttacagagcagcctccatcgccattgccaaaaagcaaagactgtgccctgtccacggtgcctcctgcatgtcctgctgccctgagctgtcccg

SEQ ID NO: 271032 - DNA, 98 bp, Homo sapiens
ttactttggcagagagaagcaataacactttcagatcttttgaggcgggctggtccgagtctctgttttggaagctcaaccagtggctgatgattcac

SEQ ID NO: 271033 - DNA, 90 bp, Homo sapiens
cctgagcctcctgcaacacctgcggcctcactgggacccccaggaggtgaccctgcaggtacatggactatatcgcacaacaggtgctag

SEQ ID NO: 271034 - DNA, 100 bp, Homo sapiens
aattgttcaggcacgcagcatctaccccatcaccagaacccagcagcttgccagcatcgttgcaggcgtttagatgccaaccatattacctcagtccccg

SEQ ID NO: 271035 - DNA, 75 bp, Homo sapiens
tttctgccgtctgagactgtgtgatgtgctgaagccaagaaggcagttgcagtggtgcagaatggctgacctcag

SEQ ID NO: 271036 - DNA, 90 bp, Homo sapiens
atcgttggttcacagggaagtcgcctggaaaaaccaatagtgctgaacctcctcagaagagcaactggagatagaagcatgaatctttta

SEQ ID NO: 271037 - DNA, 80 bp, Homo sapiens
gggttctgagactccctgtcccggaccgcagataacaacgaacttgatgcaagtgataggtttgccaaggtcagacctct

SEQ ID NO: 271038 - DNA, 98 bp, Homo sapiens
cagtcaaccctaaacagtggactcaacttcaaagacgttctcaaggagaaggcagacctgggaagtactagccggacatcatgagtggctgtcgggta

SEQ ID NO: 271039 - DNA, 134 bp, Homo sapiens
cgcagctccacgcagcaagacccgcgccgccgggacccccaggacgacgtgtacctggacatcaccggcctttggacaagcacacacaaaccacaagaaggtggctgctgacggagagagccgggaggagagcc

SEQ ID NO: 271040 - DNA, 100 bp, Homo sapiens
cgagtggctggtgcccatcgggcgctgcatgtgcaaagcaggcttcgaggccgttgagaatggcaccgtctgccgagtgaaattggagcgatttgaaatt

SEQ ID NO: 271041 - DNA, 58 bp, Homo sapiens
gcgcagcaacgtgcggtgggaccacgagagcgctttcttcgagagtcacccagctcct

SEQ ID NO: 271042 - DNA, 108 bp, Homo sapiens
aggaacaagatgtgaactgtttctcttctgcagaaaaagaggctcttcctcctcctcccgcgacgtttgcagtctgtgttggaagatctcctggttgctacttctgat

SEQ ID NO: 271043 - DNA, 83 bp, Homo sapiens
tctctctttctggcctggaggctatccagctgcagagcagagcgggcggaggaccccgggcgcgggcgcggacggcacgcggg

SEQ ID NO: 271044 - DNA, 75 bp, Homo sapiens
tcaccccttctgcaagaaagcctctttgcaaccggggtaccgactgaatgacggcttttggcacgaggtgaattt

SEQ ID NO: 271045 - DNA, 100 bp, Homo sapiens
gctgcagcagttcgtcgtcagtggcagccccatgcgagcacccgaggaagggtgcctctgccaactggtggaatcatcgccacttccagcaccacgccaa

SEQ ID NO: 271046 - DNA, 90 bp, Homo sapiens
gctgggagctgtggactggagctgttcctatgcggccatcttggctcctccctagatagggaaactgaacagccaagactcctataacaa

SEQ ID NO: 271047 - DNA, 90 bp, Homo sapiens
gcaatttgccatttatttgtaataaggcatcaagcatgatggaaccatgtgtgatacctgccgccagcaaccaatcattggcattcgatg

SEQ ID NO: 271048 - DNA, 100 bp, Homo sapiens
gcctggcccattcctacctcggactgcaggatgccggctggaagaccgagaagcaccagctagaggtggatgagtggagggccacatggcttctgtctcc

SEQ ID NO: 271049 - DNA, 75 bp, Homo sapiens
tcaagttcttcgtggagcctcatctcatcttacaggagcagactaggaacgtcaaggtcgtgggaaataaaaggc

SEQ ID NO: 271050 - DNA, 90 bp, Homo sapiens
ccggcgctcagctgggcttgaggtcgttttctgatgtgacggctgagacatgagatcttcagcctccaggctctccagtttttcgtcgag

SEQ ID NO: 271051 - DNA, 98 bp, Homo sapiens
gtctaccataaatcatgcgttttcatcctcagaagcagggtttttaagtaccggtgaccaggcagcaaaaggcaactatgggctcctggatcagattc

SEQ ID NO: 271052 - DNA, 82 bp, Homo sapiens
cagcaaggtcggcagagcaaggggcttacgcagaaggacctggccacggtatcacctcttctgggctcaagatggacaacaa

SEQ ID NO: 271053 - DNA, 82 bp, Homo sapiens
ggggcgctgcctggcccaggcgcacacggaagtggtttttagaacttcagccataaaaatgggcagaattttccttgatcat

SEQ ID NO: 271054 - DNA, 100 bp, Homo sapiens
ctgaaagctagaagaaaaggtgtacttgcaagaaacctcaggacttgagtaacagcaacatggttgcataccctgtcctgagggcgcggcacggagtgca

SEQ ID NO: 271055 - DNA, 82 bp, Homo sapiens
ggccagccacctgcacctcctaaaaagggactgctgcagagactcttcagtcgccaagctttatcctgtggataaacgcaga

SEQ ID NO: 271056 - DNA, 75 bp, Homo sapiens
ctgcgcagctccggccgcctggctccccatactagtcgccgggaacaacctatcttcagcactcgagctcatgtc

SEQ ID NO: 271057 - DNA, 100 bp, Homo sapiens
ggagcagcttccaggatcctgagatccggagcagccggggtcggagcgggtaaaatgtcggttccaggaccttaccaggcggccactgggccttcctcag

SEQ ID NO: 271058 - DNA, 83 bp, Homo sapiens
cctgctgggcctccagtcaccctcgtcttgcattttcccgcgtgcgtgtgtgagtgggtagctacagcaagctgggtagcagg

SEQ ID NO: 271059 - DNA, 113 bp, Homo sapiens
gccctggctgcctcagccctaccagcactggtcatgtctaaagtgggttacccagaccaaactttggccatttaacggatccatttgacacaccagcatttaacaaactttat

SEQ ID NO: 271060 - DNA, 75 bp, Homo sapiens
ttgatcagcaacaactaactcagcagcaacttaatggaaactagatatgcacccaatgtccagggagcgtgcaaa

SEQ ID NO: 271061 - DNA, 100 bp, Homo sapiens
cctcacttccccggggtgtaataatgttaactgaggctctctatgagaacatgctggtggagctgccctttgcaggcttctttctttccaagttgcttgg

SEQ ID NO: 271062 - DNA, 98 bp, Homo sapiens
cgatacgggagctcaaagtgtgccttctcgggcacaagtggaagtgctgtccgctgcactacgtgcttccagcctggatgcacatgaagagaccatca

SEQ ID NO: 271063 - DNA, 100 bp, Homo sapiens
cagaaatacccaccagtaaagtttttatcagaaaaggatcggaaaagaattttgccaaaacctattgatgtacaagtcattacacaccacatgcagcgat

SEQ ID NO: 271064 - DNA, 100 bp, Homo sapiens
ctccccagtagctgggactacaggtccgcttccgcctgacgccgccctccccggtgcggtccgagccgcagcctgcggtgccgcaggagctggagatgcc

SEQ ID NO: 271065 - DNA, 75 bp, Homo sapiens
ggcactgctactgcgaagacagctggcaggaatgggatggtctagtaaggataacctttgttaggaaaaacaaga

SEQ ID NO: 271066 - DNA, 83 bp, Homo sapiens
ccactgctggctgcttccagtgttcgccgagagccatccgggtgacctgcataggttcctgcggggtctccaacaaggctaat

SEQ ID NO: 271067 - DNA, 82 bp, Homo sapiens
cagcgagcaagacagcaagcaggtacctgccgtgggcagatctgagctttcttcttggacaccccatacccacagtcctcca

SEQ ID NO: 271068 - DNA, 82 bp, Homo sapiens
aaaacttcatcctagaccaagtgataaactgaaccctaaaacaattaatccgagacttatgccaggatcccaccataaaaga

SEQ ID NO: 271069 - DNA, 82 bp, Homo sapiens
ttggctggaacaagaagagtctaggacagtgcagagaggtgatttccaaggacaaatatacgtgtatgttcacttacgcctc

SEQ ID NO: 271070 - DNA, 100 bp, Homo sapiens
ccaaagttgaagaagtcttgaatgactggaaactgattggaaactctttgggaaagccactcgaaaaggcaaatgaaatctccagccatcacagccaccc

SEQ ID NO: 271071 - DNA, 97 bp, Homo sapiens
ctggaaggcatccccaagatcacaggtctcaaggttcccacaaagtctttgctgctgtgctgggcaccacccacccctcaccttgcaggctgcctgc

SEQ ID NO: 271072 - DNA, 75 bp, Homo sapiens
gtgagaaccagccaatgcttcccattgatgctccagaaaacctagatgagcagattaagaaagtgtcccagcaga

SEQ ID NO: 271073 - DNA, 100 bp, Homo sapiens
agattgtcaaaaagcctaaaagcatgcagtgcaaagtgatacttctcgatggatcagaatatacctgtgatgtagagggaggttcccctgaaggatgcta

SEQ ID NO: 271074 - DNA, 145 bp, Homo sapiens
aacccaggaagccaacagcgaaaagaccaataacggaattcactaccggcttcagcttctctacagcaatgattctgtttctggcgtctgcatacgcaagtccccaactcgctgaggagagctgttcagctatggctgctgtcac

SEQ ID NO: 271075 - DNA, 90 bp, Homo sapiens
gttgattcacagaaagactgtagaaaatttccagttccacagaaggatcttcctcaggaaatggaaaagttgcaacagctccgacaaggt

SEQ ID NO: 271076 - DNA, 82 bp, Homo sapiens
ctcttggtttggacatactacatggatcaggtcctgctcaatctggaattttgtcagatcgtgaagtggtaaacctctttct

SEQ ID NO: 271077 - DNA, 75 bp, Homo sapiens
tattctctcttccatttctgaaggacttactgcacttgaataatccagaatggctactctgatctatgttgataa

SEQ ID NO: 271078 - DNA, 75 bp, Homo sapiens
gccatggtgttgctgctgtactccttctccgattgtgttcaattagaccttcaggacctctccaagaagcctccg

SEQ ID NO: 271079 - DNA, 83 bp, Homo sapiens
ggctgttttagtgctttttatttttccccaattcagcagagaatattttcaaggggggccacggcgtatgcctccgaggacgg

SEQ ID NO: 271080 - DNA, 90 bp, Homo sapiens
tttctgtatttcctaaaacagaggcagaatggactgcatccttcttcaacgcagattgcgtacccactgcagagtgctgaagacggggta

SEQ ID NO: 271081 - DNA, 82 bp, Homo sapiens
atgtctgcgagccaggattcccgatatgatgcttcctggtgtgtttagtggttggtgccattccaattttctgtgctgaaat

SEQ ID NO: 271082 - DNA, 90 bp, Homo sapiens
agcaggcctgcgaaggaaacttacccaaagggaagtctagaatgtgatcaatgggcaggactacgaagtgatgatgcagattgactgtca

SEQ ID NO: 271083 - DNA, 122 bp, Homo sapiens
taatggacatatccattttgataatgtcagtgtggtatctctacagatctgcaactatgtgggaccagcaaaggttattgttcagttggtcacaaatggaaaaaatatccacctgcatgccc

SEQ ID NO: 271084 - DNA, 74 bp, Homo sapiens
ttatcgaacagagccgggagttcaagaagaacactccagaggtcgacatttataactcagaccccctgatctgc

SEQ ID NO: 271085 - DNA, 100 bp, Homo sapiens
gataaagaagcatttcaacacaggccccaagccgaatagcacagcagctggagtttctgtcatagcagtgcaaacagctgcacagcaagtggcagaggat

SEQ ID NO: 271086 - DNA, 100 bp, Homo sapiens
tatttagccggagtgagaagcaagaaggccctggacacagcaatatctctgggctttcacagctgcctgctgaagatgaagtcttactacagaaattaag

SEQ ID NO: 271087 - DNA, 100 bp, Homo sapiens
tcatctctgttggcagaattggaggcaattcaaagaaattcagcatcccaaaagaggctaaatttattgtgaagaaatcagaagatgaagaagacgccgc

SEQ ID NO: 271088 - DNA, 83 bp, Homo sapiens
ccggaatcccgcgcgctgcccacgattcgcttctgagtgggtaattccagaattgattggccataccattgtcactgtattac

SEQ ID NO: 271089 - DNA, 101 bp, Homo sapiens
cagatgcaccgagatgcgcgtgcgcagaaagcgtcccgggggctaaaaggtcagattcctgaaattaaacagactttggaaattctaaaatacatgcagaa

SEQ ID NO: 271090 - DNA, 51 bp, Homo sapiens
ttccaacacagatgtccaagctgccaagtcttgggcgtctttggtactggc

SEQ ID NO: 271091 - DNA, 75 bp, Homo sapiens
ggttcccagtgacaccaacattctggacacgtgggcgacctcccacagcccagtgtgccaggacgtgctgaaatt

SEQ ID NO: 271092 - DNA, 96 bp, Homo sapiens
ctccgtcgcacccaccatgatggaagacgacgggcagccccggactctatctttaatctcatgaagtacgacagctacagccgcttcttaaagtct

SEQ ID NO: 271093 - DNA, 100 bp, Homo sapiens
acttgttgctgcaagtcaagctgccttaggcttataacatcacatttaaaagcatctcagcctgccacagtgactcaggtcactcaaggaactatccgac

SEQ ID NO: 271094 - DNA, 100 bp, Homo sapiens
gtcaagttcaacagaaagagtagttttcatctttccacagttcttagaaaagtcctgagactgagttttactggacatactttgaagacaaccctaggga

SEQ ID NO: 271095 - DNA, 83 bp, Homo sapiens
cgaggatcgtgggagctaagaagcttgttagcagtggcacaagatcttacagaggatgaagaaacagtagaagattccataat

SEQ ID NO: 271096 - DNA, 100 bp, Homo sapiens
gccctcctctggggatcgctgtgcgccggaatagccaggccagaagaaggaaggcctgtggtgagtgggacaggaaatgacatcaccaccccaccgaaca

SEQ ID NO: 271097 - DNA, 100 bp, Homo sapiens
agccggcgccgcctgactgtggggtgttcgttccgcacccgctcccggcgcctgccggagaggccagatcatgattctggaaggaggtggtgtaatgaat

SEQ ID NO: 271098 - DNA, 98 bp, Homo sapiens
agagccttggtacttggacctgaaccttgctccgagagggagtcctcgcggacgtcagccaagatctttgtagaatttgatggctgtaactggaagca

SEQ ID NO: 271099 - DNA, 98 bp, Homo sapiens
aagtgtgctcagaatgaggtgcttcggtttcagacctcccacagtgtcacccaggttcctccccgggcagaagaaatcaccattccagctgatgtcac

SEQ ID NO: 271100 - DNA, 100 bp, Homo sapiens
cgggcctgcaccatgagcgtcccggccttcatcgacatcagtgaagaagatcagccaagacccatgagaggctgctcccccagggcccgcctgagctgcc

SEQ ID NO: 271101 - DNA, 82 bp, Homo sapiens
agagctagttcctctccagctcagccgcgttctcccttttgccactggaatcaggagaatgttgcagaggaattgcattcct

SEQ ID NO: 271102 - DNA, 83 bp, Homo sapiens
ccgaaccccttcatgcccaaatcccggaaactccagcgtgtctccagccgtgcttcatggcggctgaagagatgcattggcct

SEQ ID NO: 271103 - DNA, 80 bp, Homo sapiens
acaaggtgtcaacaatgtgccgaagatcacccttagttcttcctcggaagagtatcagaaggtctggaacctctttaacc

SEQ ID NO: 271104 - DNA, 101 bp, Homo sapiens
ccaggacgccttctgcaactccgacatcgtccaatatcagatggaaatgatgcggagccttcgccatgtaaacattgatcatcttcacgtgggctggtatc

SEQ ID NO: 271105 - DNA, 80 bp, Homo sapiens
aggagcctatggagttgtacttaaatgcagacacaagactattgggaagaagttacctgcaactacagcaactccagact

SEQ ID NO: 271106 - DNA, 100 bp, Homo sapiens
tctgatagttgttccttgtgcagaaggtggataatattaatgcagctgtgatggatttgaaaaaaaagaagatccgcagtctaagtgaagaggtcaaaat

SEQ ID NO: 271107 - DNA, 88 bp, Homo sapiens
gaggcgctagggaagatcgcaccgcggacgcccgctgagcttggcgcacgggccgaccaggcgccatgtcagaaccggctggggatgt

SEQ ID NO: 271108 - DNA, 83 bp, Homo sapiens
cctggtcatcttctatttccaaagtatgttgcacccagttggaatcgaagcctcttaaaatggcagatgacttggacttcgag

SEQ ID NO: 271109 - DNA, 98 bp, Homo sapiens
acagctgcacctgcaaaccgggctacgtggggaacgggaccatctgcagagggtccccttctgcttgttatagccccagtagtcctgtccaggttcta

SEQ ID NO: 271110 - DNA, 100 bp, Homo sapiens
aactgttccttcagccaaagaaacaagccgtggaataggtgtatcaagtaatggtgcaaagcctgaaggttgctcctggacgccaccaacaactttagct

SEQ ID NO: 271111 - DNA, 96 bp, Homo sapiens
tgataaaaagagatgtggggggattctcgacctgctaacagaactggaccttttcgaaatgcactcggtgatggaaagagagccactattctgaag

SEQ ID NO: 271112 - DNA, 83 bp, Homo sapiens
cgcgggagcgctacggccccaacggggccccttactggacacggcccgagcggatggacaagaagctgctggccgtgccggcc

SEQ ID NO: 271113 - DNA, 85 bp, Homo sapiens
gaagtatgttatgaaaatgttttgaagcaagtaaaggctggacaccagacaaagaaacagccttggtataatagcacgttagcat

SEQ ID NO: 271114 - DNA, 76 bp, Homo sapiens
cgagtgaggaaaggaggtactgtagcggagctccctgggtcctcagcagtgaggctggcctccctgcgtgacctgc

SEQ ID NO: 271115 - DNA, 127 bp, Homo sapiens
gtgctggatgctgtgatcgccagcgccggcctcctccgtgcggagaagaagctgcggccgcacctggccaaggttggtgttcgaggaagagacattgttgttcttggtgtggagaagaagtcagtgg

SEQ ID NO: 271116 - DNA, 74 bp, Homo sapiens
catgccctgtggtacaaaaaagagcagctctacttcatgtttataactactgtactagtgttcaccagtcaaac

SEQ ID NO: 271117 - DNA, 74 bp, Homo sapiens
tttcatccctcgtcgaaaggattggattggcatctttagagaccgtgtttcttcgcctcgcctccctggtggtc

SEQ ID NO: 271118 - DNA, 98 bp, Homo sapiens
ggagatccatagggaggacggcggaacatctggaggctgggaaatgatatgtgtcacaaagatgtctacacggaactgccagggaatggactcagtga

SEQ ID NO: 271119 - DNA, 74 bp, Homo sapiens
tgcgctgttccacctcattcaacttcagatgtttccattcctgaaaaacccaagcttagatttattgaaagggc

SEQ ID NO: 271120 - DNA, 100 bp, Homo sapiens
agtaccaggctatcagcaaacacctccccaagctgcattaatactacattgtcaaagacaaagacgaacatgagacatgcgatatgagttttaaaaggag

SEQ ID NO: 271121 - DNA, 100 bp, Homo sapiens
ctaaagcagcgtgcgttcagccctgggtgtttcctgaggttataggcgggtgtttgaggagtacatgcgggttattagccagcggtacccagacatccgc

SEQ ID NO: 271122 - DNA, 51 bp, Homo sapiens
aagaggcctgcagtgggagagcaggctattactataacaagcgcattctgc

SEQ ID NO: 271123 - DNA, 100 bp, Homo sapiens
agactgccctcatccacgatggcctagcacgtggaattcgcgaagctgccaaagccttagacaacccgagggcaacatccttcgagaccggttcaagagc

SEQ ID NO: 271124 - DNA, 99 bp, Homo sapiens
aagaaggctggagctgaggtggtaaagcaggtggagcaccctttgctgagtggcctcttataccccggactgcagtttggaaattttagcattcaggtg

SEQ ID NO: 271125 - DNA, 80 bp, Homo sapiens
aaacctgtatgtggaaccacctgaatccttattttagattagtaggaaatggctttctaccactctgaaaagtctcttct

SEQ ID NO: 271126 - DNA, 106 bp, Homo sapiens
ccctgcacgaggtctatgagaacaagacggacgtcatcctgatcttggaactccctaccacttatgtcttggatgaagatgaacctcgattccttgaagaagttga

SEQ ID NO: 271127 - DNA, 50 bp, Homo sapiens
ctcgacagaaccttggcgtccacaaaaagaaacagtatctcacctcccta

SEQ ID NO: 271128 - DNA, 100 bp, Homo sapiens
cggcggcaggggatggcaagatagcggcgcgggagcgtaccaatacagacttttcctatcagcctggagatgccttcagcgtgatctgccctaacagtga

SEQ ID NO: 271129 - DNA, 83 bp, Homo sapiens
cagcatgtcggtggcggggctgaagaagcagttctacaaggcgagccaggctttcatgagaaggacaagaagccatattgccg

SEQ ID NO: 271130 - DNA, 100 bp, Homo sapiens
ccgagttctcggtactcttcagggatgagtcatgtggcagtggaaaatgcgctcgggctggaccagcagtattctgacaagtccctgtacacccagctgt

SEQ ID NO: 271131 - DNA, 101 bp, Homo sapiens
ccatgtgaactgctggcaggctgccttccctgacccccagttacgcctggaatatgaaggcttccccgtcccgtgtgggcgaaatgctgaaaacttcgacc

SEQ ID NO: 271132 - DNA, 100 bp, Homo sapiens
gaggcgagccctggtggaggaagagacagagtgcaagacgatgacttgcaaaatgtcgcagctggaacgcaacatagagaccatcatcaacaccttccac

SEQ ID NO: 271133 - DNA, 51 bp, Homo sapiens
gggccccggagctcagcaagctcaaggaattcagaaaagcagctcagcaac

SEQ ID NO: 271134 - DNA, 100 bp, Homo sapiens
gcctcttcgtggaggaggtggccgcctccttggtcagggagttcctcagcagaaaggttgtggcagcactgcctgaaggtatgagaccagattctaatct

SEQ ID NO: 271135 - DNA, 100 bp, Homo sapiens
gggaccgagaaccgaacttaccaagcatcctctgcggctttcaaccatgctcgacagctgaccaaggccatgatgcgaaaggccacggccagccgcctgg

SEQ ID NO: 271136 - DNA, 100 bp, Homo sapiens
cggggaggcgcggagcgcgcgtgtggtccttgcgccgctgacttctccactggttcctgggcaccgaaagttatgggtaaagcagaaggctcagtagcta

SEQ ID NO: 271137 - DNA, 75 bp, Homo sapiens
gggggaggccgggatggagccccgcggagatgtggtaacgaagtacagcaacttcgtcagcttccccttgtactt

SEQ ID NO: 271138 - DNA, 75 bp, Homo sapiens
cccaactcgggggctgtccggcccttttatgcctcggagaacctaaggcagtgtgatccagctttgcttcctgag

SEQ ID NO: 271139 - DNA, 90 bp, Homo sapiens
gacaataaattccacatcatcggcgcagtgggcatcggcattgccgtggtcatgaggccccaccgtcttatgagcagagctgcggcggcg

SEQ ID NO: 271140 - DNA, 75 bp, Homo sapiens
attccaagtaactcttatttggaggaagttaagtcttcagagcctactgaggatgtggagcccaaagaggctgaa

SEQ ID NO: 271141 - DNA, 83 bp, Homo sapiens
aagctcttcatctacaacccgaccaccggagaattcctggggcgcaccgccaagagctggggggctatcaacagcaggacgcc

SEQ ID NO: 271142 - DNA, 100 bp, Homo sapiens
tgagagagtccgggagcccgagcttgaggtgtccctggccagtgtccttccacctgtccacaagcatggggaacatcttcgccaacctcttcaagggcct

SEQ ID NO: 271143 - DNA, 75 bp, Homo sapiens
tttactggatgaactgataaaacccaccagtctaggctcacgaggcccagggaatcctctggaccatcagattac

SEQ ID NO: 271144 - DNA, 85 bp, Homo sapiens
aaatcagtgattctacatctcaagctcatattttgaagtgtttacggggtgtccgcaatgttgccagtgtctgtctgcagattgg

SEQ ID NO: 271145 - DNA, 90 bp, Homo sapiens
gcgagttacgagaattcccggccgctgcaaggggttttgatggtacagtccaggtctatgatgccacatcttgggatggaacacggagcc

SEQ ID NO: 271146 - DNA, 75 bp, Homo sapiens
tcacgggcctcagctgggattcccgcgcccctcggacggccacgagactcgggaatctgtcttcctgacctgagt

SEQ ID NO: 271147 - DNA, 82 bp, Homo sapiens
ttgagacggagctaagagatatctgcaatgatgtactggaagtttatctcgacaatgctagttgcagtctgtgtgaccctga

SEQ ID NO: 271148 - DNA, 75 bp, Homo sapiens
ggcagaggagctggcggagagcggcctgcgggcgatcgggccgagaataccctctaccatctgctttggtcaggg

SEQ ID NO: 271149 - DNA, 82 bp, Homo sapiens
ctgggaacccgcggtggagcgggacacgaacgtggaacgcggcaggcaaagatggcaaagagcgcttgggcggctcagtgct

SEQ ID NO: 271150 - DNA, 75 bp, Homo sapiens
cccaaaaaagcaaggccttctgagactggatctgatgatggtgaaagattgtctgctggatattctccatcatat

SEQ ID NO: 271151 - DNA, 136 bp, Homo sapiens
gagggactgacgtgtttggagggaaatgggaatgtacacgataattaaagagtaaagttgtgctcaacgattctgatgctcacagtaccacctcaagtgcctccccagctcaatctccttgttacagtaaccagtc

SEQ ID NO: 271152 - DNA, 90 bp, Homo sapiens
ctccaacagctgctgcttgtgctgccatgtccgcaccggcaccatcctgctcggcgtctggtatctggaatccagcactacgccctgccc

SEQ ID NO: 271153 - DNA, 100 bp, Homo sapiens
gaagccgtgatctggctatatggtggggcgcgggcggtgtcgctgtggggagctggtgctgttctcagagtcctccctgctgctgtgtggacgacacgtg

SEQ ID NO: 271154 - DNA, 100 bp, Homo sapiens
ccaaccggctggacctgttcgagatcagccagccgaccgaggaactctaatgaatcattgattgaccagcactattttaccagttggaatgaatgatcag

SEQ ID NO: 271155 - DNA, 100 bp, Homo sapiens
cctctgttccagaagagaaaaagcccaggcataaaatcatctccatattctcaggcacagagaaaggcataagggccatgtgttctgaaattattttgag

SEQ ID NO: 271156 - DNA, 102 bp, Homo sapiens
ttctgcaacaggaggacattgaaaataagatggaacccatccacataagtcattgaaattatgagactatcattcaaatggaagcattatagttcttcggaa

SEQ ID NO: 271157 - DNA, 83 bp, Homo sapiens
cagagacgtgatgcggatgaactacgagctgttggcatccttggacttcattagaggggtggtagactcggaggatctccctc

SEQ ID NO: 271158 - DNA, 100 bp, Homo sapiens
gccaaggtgtgcccatcatcccattcggcaccggcaccgggcttgagggtggcgtctgtgctgtgcagggtcccaagggagagagcatccggggccagcc

SEQ ID NO: 271159 - DNA, 48 bp, Homo sapiens
cccccagcgcagcctgcatgttccaggacatttgggcttccaggacag

SEQ ID NO: 271160 - DNA, 75 bp, Homo sapiens
aggaatgaattcagatatttccagagaatgaccacaacctcttcagtagaaggtctgaaggggcgtctcgattac

SEQ ID NO: 271161 - DNA, 100 bp, Homo sapiens
ctggaaaacctcaggaacctagaatttctgggtactggaatttggctggcccgacctccacaccccagccctggagaagatctgcagcatctgtaaggcc

SEQ ID NO: 271162 - DNA, 100 bp, Homo sapiens
taatcattgagctctatgataggaatgtgaaagatgttgcagaagtgttccagaagtggctgaagatagaaggaaaaaagtgccactgcctatcagaaaa

SEQ ID NO: 271163 - DNA, 98 bp, Homo sapiens
ccagcccgcccaactcccagcggagagcaaggcacgcacagaggctgggctgcggtccagatgcgtttgctccatgaattggtctacgcctcccgaag

SEQ ID NO: 271164 - DNA, 100 bp, Homo sapiens
ctgatttcatgcaagaagtaggctatggcttttgtgcaagtctcttgcatggcaccaagaatgttaccaattcaagcagtttaagattgccaagacaaaa

SEQ ID NO: 271165 - DNA, 100 bp, Homo sapiens
gagtaaccctcactggagaatccagagatccaggatgggggccccgtttgtctgggccttgggccttttgatgctgcagatgctgctctttgtggctggg

SEQ ID NO: 271166 - DNA, 83 bp, Homo sapiens
ggccacctccctgctgctgctgctcttcgccatcttcatgggcctgcgggcctccaaggcggctgagccagaggccaactgca

SEQ ID NO: 271167 - DNA, 100 bp, Homo sapiens
ctcacccgaacatcagggccctccagactcaggcgccccaacaatgtgtcgtggaggccgaatgtttgcaccaaccaaaacctggcgccgttggcatcgt

SEQ ID NO: 271168 - DNA, 75 bp, Homo sapiens
catggcaagactccacctcctggtgaagaaagcaaacagcatttgtaaaggatgttcatgaagattcaataacag

SEQ ID NO: 271169 - DNA, 74 bp, Homo sapiens
atcttatctgccctatttgcagtggagtcttggaggagccagtacaggtggacccccaaaagtacaagggcata

SEQ ID NO: 271170 - DNA, 101 bp, Homo sapiens
caatgatcctgaaaacagaaggaaattgaaggaacttggagttaatggtctaatttatgatagaatgtgaaagatgttgcagaagtgttccagaagtggct

SEQ ID NO: 271171 - DNA, 100 bp, Homo sapiens
tcgcttcggagttggggctgagcagtcctcggggagagcgcgccaagaccgctgcagccgctggctgactccaccgggggacggctacgtgcaggcggac

SEQ ID NO: 271172 - DNA, 100 bp, Homo sapiens
ctggagcggctctgctcggtcctcaaagaatttcgctaaggagtttgtgatcagtgatcggaaggagctggaggaagatttcatcaagagcgagctgaag

SEQ ID NO: 271173 - DNA, 82 bp, Homo sapiens
cctttccaacatccagagctgcatcattccttggggcaaaatgtggacaaggctggtgctcaagaccgaatcggctgggctt

SEQ ID NO: 271174 - DNA, 98 bp, Homo sapiens
ggtgctgcgagggcagaacctggatgactcaaggagaactacatctagtgctgtaacggaaactggccctcctgcaatgccaaggttaccttcctgct

SEQ ID NO: 271175 - DNA, 97 bp, Homo sapiens
gcgtctgcggctctccgccgtccccagccctgcctctccctgggctctggatttgattgccttatgtgacaagcccaagatctgtgacagttggagc

SEQ ID NO: 271176 - DNA, 90 bp, Homo sapiens
ggagtgttcgttgtgccagcgactaaaaagagaacacacatgcaggacttgaaagatgttactaataatgtccactatgagaactacaga

SEQ ID NO: 271177 - DNA, 100 bp, Homo sapiens
gcccccaggagaaaagccagtattgcttgtgctcctaacaacctgtctcttgatgaggaaactgaggcttggtgaagttacgaaacttgtccaaaatcac

SEQ ID NO: 271178 - DNA, 83 bp, Homo sapiens
cggcccactccgacgtgtgctccgcccagggggtgcgaggataccccacgtccaagcatctcattttgaaggcctaatcacaa

SEQ ID NO: 271179 - DNA, 83 bp, Homo sapiens
tggaaatttaaatttctgggacttgaaaggcagagtatccaggtcacaagctacctaactaagaagtttgctgaactacgcag

SEQ ID NO: 271180 - DNA, 98 bp, Homo sapiens
ataaaaccctcacacccatctcagcggcatatgcaagagcaagaggatggtgccatgacaatggtgtgaactacaagattggagagaagtgggaccgt

SEQ ID NO: 271181 - DNA, 97 bp, Homo sapiens
cgaagaggctggactcggattcgttgcctgagatccgcaaggatgctctccgggcgctcaactttgcgtacacggtgagcacacagcgatctaccat

SEQ ID NO: 271182 - DNA, 100 bp, Homo sapiens
actgtggacagtgaagagaggcctctcccaaagcacctgcgcaggctttatcctgtggataaacgcagagtgaacgagtttggggagtcctacgaggaga

SEQ ID NO: 271183 - DNA, 82 bp, Homo sapiens
aagatggaagaacttaaagaaggcctgcggcaaagagatgagcttattgagtattatgcagatatgccagcagaagaaagag

SEQ ID NO: 271184 - DNA, 83 bp, Homo sapiens
tttgtcgtccatttgctgctcactggatggatagaatgacagaagatgctcttcgcttgaatctgttgaagcggagcttggac

SEQ ID NO: 271185 - DNA, 49 bp, Homo sapiens
gcccaacaccttcccccactgatttcctggcacatcatggaaccgactg

SEQ ID NO: 271186 - DNA, 130 bp, Homo sapiens
attatgtgacagatgaccacgacagagagttttcagtcgcagacctctcggttcagatattcacggttccttcacttgtcctgatccggttccccatgcagaggaacttggtggtgatccccaagtctgt

SEQ ID NO: 271187 - DNA, 114 bp, Homo sapiens
gtcttcaacacggtgggcgccgacatcatccagctgcctcaaatcgtcgtagtgggaacgcaggtactaggttttgacaagcttgcatcatgcgtgagtataagctagtcgttc

SEQ ID NO: 271188 - DNA, 100 bp, Homo sapiens
ggcgcgtcctgctgaccccagccggcgccgagggcttggaatctcgagcgggaaaagaccagcagaagtagacactgtggatgcattccagggtcggcag

SEQ ID NO: 271189 - DNA, 98 bp, Homo sapiens
cttaatgaaaacaacagaaatttgtggtgcaccaggtgttggaaaaacacaattatgaagtgatacgtgaaattgagatgagtgtggatgatgatgat

SEQ ID NO: 271190 - DNA, 50 bp, Homo sapiens
gttacaacgaggagaagcactctcagaaacagtttccagtgtggaattat

SEQ ID NO: 271191 - DNA, 100 bp, Homo sapiens
acagaacagcgacagtacaaagaagactcttgtcacactaattgccaacaacaatgactcagacgatgccctgctgaagatgaccatcagccagcaagag

SEQ ID NO: 271192 - DNA, 115 bp, Homo sapiens
aagtgccatcttcggctaggtcgtcacaggctccggctcatggcatcaagtggcatccatcataagcacacgtcacatggagatgggcgtcaagaagttacctctcgtaccagcc

SEQ ID NO: 271193 - DNA, 76 bp, Homo sapiens
gaaacttgtattgtactcgtcctgtagatcgtgagcagtatgaatcttttgaggtcagatttcatttcagtgtaaa

SEQ ID NO: 271194 - DNA, 101 bp, Homo sapiens
tagcaaatacagaaagagagataaagcaagcaagctgttttgaaagtgtctaatattggctgatgtagagctataggagtcaactgagagttcaaatacaa

SEQ ID NO: 271195 - DNA, 100 bp, Homo sapiens
agaagcctgaaaagtcgcagcgagctggagccgccggagtgcatactccttccacgttactgcagacggtcagatgcagcctgtcccttttccccccgac

SEQ ID NO: 271196 - DNA, 50 bp, Homo sapiens
gtgcgcgcctgcgacctgcccgcctgggcatggagggatttttgaaatca

SEQ ID NO: 271197 - DNA, 75 bp, Homo sapiens
acggcagccggcacctgacggcgtgaccgacccgagccgtcaccaggagactaaagtccatcaaaaacatccaga

SEQ ID NO: 271198 - DNA, 100 bp, Homo sapiens
taactatgaggaaaatgccaagcgtactgagcgctttgggcagggaggtgcggggcctgtgggtggacagggtcctagaggaatggggcctggaactcca

SEQ ID NO: 271199 - DNA, 101 bp, Homo sapiens
agctggccgagcaggctgagcgatacgacggtgatcagcttgaaattcagctaaccgagcagctacggtccctcatccccaacgaggatgtgagaaagttc

SEQ ID NO: 271200 - DNA, 100 bp, Homo sapiens
cgacacccttgaagctgagaaatgatcaacaggcggtccttcgggtcggagtggacatcggatggtggcctggaagagacaattgatcctgtttggtggc

SEQ ID NO: 271201 - DNA, 75 bp, Homo sapiens
cagagagagaggtggacagatctgagagatactgaggattctgaaagactaatggagcaacaaggagcactgctg

SEQ ID NO: 271202 - DNA, 50 bp, Homo sapiens
ttcagaaggagcaggattaccaaaggaagcctaaagaaactgttccaact

SEQ ID NO: 271203 - DNA, 101 bp, Homo sapiens
cagtgtggtggatcatttcaaccggcccccagcagtcagcatgtggctgccgcgcgtctccagcacagcagtgaccgcgctcctcctggcgcagaccttcc

SEQ ID NO: 271204 - DNA, 100 bp, Homo sapiens
ccactctgggccagtgcggggtggaggccctgactaccctggaagtagcaggccgcatgcttggaggagtgagctgagtcgacagaaacttcatacccaa

SEQ ID NO: 271205 - DNA, 75 bp, Homo sapiens
gcagattgaaattaataaaatgcacatatcccagtccattgagcacttttctgtagaaggtcagttggaattcag

SEQ ID NO: 271206 - DNA, 100 bp, Homo sapiens
ccggcttcaatatcttcacccagcatggacacattcagctaacgtattttagcaggtggagtgaggttgaagattcctgtgacagcgatgccatagagag

SEQ ID NO: 271207 - DNA, 100 bp, Homo sapiens
cgaaaaagtaaccttgatgaagaggtgaatgtaattcctccacacactccagttagtttatcatctggacttcaagctgcaggcagttctgtttttccag

SEQ ID NO: 271208 - DNA, 90 bp, Homo sapiens
agctgccttagctgaagcatctgctccattgtccaattcttcagaaactccagaattaacactgaatcctccggaaggaattgtagcagg

SEQ ID NO: 271209 - DNA, 96 bp, Homo sapiens
agctccatcaaagaggacccccagccagcccggttctcggacctctggcaggctgccctgagcacgctcaaccccaaccccacggacagctgtccc

SEQ ID NO: 271210 - DNA, 100 bp, Homo sapiens
agacgcggttcctgcggaggaaggtccaggagggacgcctgagacgcaagcagatcgagacagagctgggcaagaagaccctcagcaacctggagaagat

SEQ ID NO: 271211 - DNA, 82 bp, Homo sapiens
cctcgctctccgccgcccgcaccgccgcccgcgccctcaccagaacccagcgggtgccgcttctccacccgaggcttccacc

SEQ ID NO: 271212 - DNA, 100 bp, Homo sapiens
cacgggggctccgcggcgtcctcggcgctgaaggggttaattcaacagttcaccaccattaccgatggaattggctgctctagaaaaaattaaatctact

SEQ ID NO: 271213 - DNA, 82 bp, Homo sapiens
gaagaatctcaaaagtgctagtagtaaaaccgaggtccatatcagcttcttggacacttaatgattgttggcaagaaatgtg

SEQ ID NO: 271214 - DNA, 74 bp, Homo sapiens
tttgtcaatccgtctgaacttcagttgccttacctgtaaggaagatattcctcgtcagcttgtctacattggtc

SEQ ID NO: 271215 - DNA, 83 bp, Homo sapiens
gcaccggcaagaccaccttcatcagggcgtgatggtgggcatgggtcagaaggattcctatgtgggcgacgaggcccagagca

SEQ ID NO: 271216 - DNA, 100 bp, Homo sapiens
ttgaggattgggcagttggtacaggtatctggccaggaacagtcttcacggggacaaagaattttatctattccaatttggcccccaaacctaggtatct

SEQ ID NO: 271217 - DNA, 121 bp, Homo sapiens
aataatggggatgctggaagggagatgccctgcccgttgccctgtgatgaagaaaggacaatgactcattcttcccaggacactggttcttgtggcattcaggaagatggaaagctttatg

SEQ ID NO: 271218 - DNA, 82 bp, Homo sapiens
cttgttgcgggcaccgcagtcgccgtgaagatggcgtctaccagccgattacctggctggtgtttgcttgttctggagtgat

SEQ ID NO: 271219 - DNA, 75 bp, Homo sapiens
ttcacatagattacaatgtttgctttgaaaaagacctgaaggaaaagattatgcccttcattggctagtgctggg

SEQ ID NO: 271220 - DNA, 82 bp, Homo sapiens
gccgctctgtctacaacccgagtgcagggctcgcggcctggcaagaatgtacagctgacagagaacgagatccgcggtctgt

SEQ ID NO: 271221 - DNA, 83 bp, Homo sapiens
gaaactggatgcagcaaggaaataggatttaaccgctctctgcctcccagggctgaaatctctttaatgatggagggaagcag

SEQ ID NO: 271222 - DNA, 75 bp, Homo sapiens
ctcagctgtgcgcaggctatgctccaggggcctcaactccatatagcatagattcagattctttgggaatggagt

SEQ ID NO: 271223 - DNA, 80 bp, Homo sapiens
gatctggggatcttcgcactatcccaagtgcttcctctggagaggcagctccacgaggccgcccgccagaacaatgtcgg

SEQ ID NO: 271224 - DNA, 75 bp, Homo sapiens
caatgataaatttgcctccctaattggcaaggacctgaaggagaagaaggagaaggtggaggagaaggcaagccg

SEQ ID NO: 271225 - DNA, 75 bp, Homo sapiens
aaatggctccgagcagggaccgcctgctgcactttgggttcaaggcgacagttttgaacgaagaatgtgatcaga

SEQ ID NO: 271226 - DNA, 90 bp, Homo sapiens
agcattagtagtggccacatcagtaggcttcaccagaacaaaaggatatggcactgatcactaacttcacagagaatgcagttgtcttga

SEQ ID NO: 271227 - DNA, 75 bp, Homo sapiens
gattccagcctccagcctggatgccaacaggaagtgaccaaagacttgaccactcaaagtccagctccccagaac

SEQ ID NO: 271228 - DNA, 97 bp, Homo sapiens
ccagcagaatttgtatagagatgtgatgttggagaactacagaaacctggtctccctagctgaaccttcacctagccccaggattacaaggaaaagc

SEQ ID NO: 271229 - DNA, 74 bp, Homo sapiens
cagcatctaccccatcaccagaacccagcagcttgccagcatcgttgcaggctttcatgagaaggacaagaagc

SEQ ID NO: 271230 - DNA, 75 bp, Homo sapiens
atgaatttggaatcttcccttgaagaggaagctgcagtaaaggaagatgaagaagaagtttcagataagggcagt

SEQ ID NO: 271231 - DNA, 51 bp, Homo sapiens
agcaaagccattcgggttggagtaattgtgtggcaaaggagcagagaactt

SEQ ID NO: 271232 - DNA, 80 bp, Homo sapiens
gctgaggagaggagcgtcaacagcagcaccatggccattgatctgatgtacggaggcatctactgttttctgtgccagga

SEQ ID NO: 271233 - DNA, 82 bp, Homo sapiens
gctcgatcttgggacccaccgctgccctcagctccgagtccagggcgagggagacattacctcatccctcaagattgctcgc

SEQ ID NO: 271234 - DNA, 74 bp, Homo sapiens
gcggaaagtggctggattggacaagcaggcaaagctgagtttaggaactgcagtttcagtaatggccaagattc

SEQ ID NO: 271235 - DNA, 98 bp, Homo sapiens
gttgctggccaaaggggcctgtgtacttgctgtagatgaaaatggttgttaaaattacacactgtcctacactgctgaccagagatggagatcgaatt

SEQ ID NO: 271236 - DNA, 88 bp, Homo sapiens
ggaagtggtgaaacccaaacaacatctcctgctattccttgggctgcctttcctgcagtgctacacacgcagggccctgtcgatggca

SEQ ID NO: 271237 - DNA, 82 bp, Homo sapiens
taagagatgtgattaatgtattccaccacctccgccagttaagaggaaaaaggctaacagagaccctgatgctggaattgat

SEQ ID NO: 271238 - DNA, 96 bp, Homo sapiens
tggactgcagtgctgcagtgccaggatcaacactctgtggtaggccagaacacaggccccagtccaagtcctaacccctgctcaaatccaaacact

SEQ ID NO: 271239 - DNA, 100 bp, Homo sapiens
gaggaccaacatgggcattttgtttatgagcaaggtggatcagtacaagggaaagcgggatttggagtcactgagggagtacgtggagtcgcagctgcag

SEQ ID NO: 271240 - DNA, 75 bp, Homo sapiens
gatggacagctgggaattgctgaattagaactgcagaggttcctctacagcaagaaagctgtatgtgatggcttc

SEQ ID NO: 271241 - DNA, 100 bp, Homo sapiens
gaccccaactccacccagcgctaccggctggaagccctcaaggttccgaggattctgaagacgacggggagacattgctggaggtagcgggtactcaggg

SEQ ID NO: 271242 - DNA, 100 bp, Homo sapiens
aggagacttatttcagaatggagaatttgcaactcatcatagtcctggttcttctgtgtggcagttcagaatgatggatcaagctagatcagcattctct

SEQ ID NO: 271243 - DNA, 100 bp, Homo sapiens
tgtccccagagcctcagtttgtgcaggacaccgacatggaacagggactcactgggggttcgatacaagaggctgttttcctagcgtggcttgctgcctt

SEQ ID NO: 271244 - DNA, 80 bp, Homo sapiens
agattatttgcaacagctcacgggagcaagaacggaataatgtatttgtggccttggacatgaggcagtcagtcctctgt

SEQ ID NO: 271245 - DNA, 100 bp, Homo sapiens
gaaaagctgaaggaggactgtaacaacactgagaacaaagaacggaagtccttccagaaggagcttgtgatgttcattcagcagacaacacaagaatgga

SEQ ID NO: 271246 - DNA, 100 bp, Homo sapiens
ttcagactcttggagccagaagctacatgacccctaaacgggtttgctactcaacaagcagaaatcattgtgtctgcattggtcaagatcctggaggcca

SEQ ID NO: 271247 - DNA, 121 bp, Homo sapiens
ctcttctgcggcgcctacctctacaaacagggctttgccatccccggctccagcttcctggactggctgactcgctatggttacctgccgccaccccaccctgcccaggcccagctgcaga

SEQ ID NO: 271248 - DNA, 75 bp, Homo sapiens
tgaagaggttggagatgggaccacatcagtaattattcttgctttaatgaagcaccagttgagattcccagtcct

SEQ ID NO: 271249 - DNA, 98 bp, Homo sapiens
acgagtgcaaactgcagtcaccaagtaaaacagtgactattatatggttaaaaagattttggaggaaaacagttcaggtgacttgaacataaattgcg

SEQ ID NO: 271250 - DNA, 100 bp, Homo sapiens
ataacgggaggtgaatttccatgtcaacatagtcctgatggactcaccctgtcacccaggttggactgcactggcctcaacctcctgagttcaagtgatc

SEQ ID NO: 271251 - DNA, 100 bp, Homo sapiens
cggacctcaagctacccacgttctagtcccgcctctgtcatttcctagagctgtggcctcgggttagtctgaatgattcccacaatcagatggtggtgca

SEQ ID NO: 271252 - DNA, 100 bp, Homo sapiens
ccggcaggacgacatgcttttctatgtgcgccggaagctggcgtactccggcagcgaaagcggtgcagacgggaggaagtgtgtcccggcatggatatcc

SEQ ID NO: 271253 - DNA, 115 bp, Homo sapiens
tgctgttagatgaaagacaagatgtccatcttctcatgaccaactgtatcaagaagtcctggacccaagccagaagcctctgcaaagcttccttccagacctgcagataactatg

SEQ ID NO: 271254 - DNA, 50 bp, Homo sapiens
accctgggcacagcaggcatcggaggctctgctgttctcctgcactcagg

SEQ ID NO: 271255 - DNA, 101 bp, Homo sapiens
gatacatgaattcagatactacctcgcctgagcttcgtgaacatctagcacagaaaccagtatttctccccagatatatgcttaaaggaggtaacgtcgat

SEQ ID NO: 271256 - DNA, 83 bp, Homo sapiens
ggggaaagcttacagactgtgtgatttcatgatcctttggctgcatggagaaaatgggacagggcctgctaagttcaacatac

SEQ ID NO: 271257 - DNA, 83 bp, Homo sapiens
cgctttccctctcgcgtctctggctgcagggggggccctcagcctcttggccttgaacgggctgttcatcttgattcacaaac

SEQ ID NO: 271258 - DNA, 98 bp, Homo sapiens
gaagaaaggcctggagagtcgtgcggacagcattgggagcggccgagccatcccaattaaacagccgattacacctcaacaagaaggcaactgacaaa

SEQ ID NO: 271259 - DNA, 74 bp, Homo sapiens
cttgatcctcctcctaattgcaggcatgtggagaccccaaggcaaaaccatcctatcttatcgacaaaaacctg

SEQ ID NO: 271260 - DNA, 90 bp, Homo sapiens
ctcagtttgtgcaggacaccgacatggaacagggactcactgggggtgtacttctctgaagtaagatgatttgtcaaaaattctgtgtgg

SEQ ID NO: 271261 - DNA, 90 bp, Homo sapiens
tggtcaggtctggagctcgaccgggccagaatacaaatggagagatttgcatgggatgcagaaatatggaagactaaccaagcagaccag

SEQ ID NO: 271262 - DNA, 75 bp, Homo sapiens
ggaacatcattgcaacacagcgccatttccgctggcacccaggtgcccatacaatgcagatcttcgtgaagactc

SEQ ID NO: 271263 - DNA, 80 bp, Homo sapiens
agataattgataacaccctgtaacagctgagaactgcaagcacatgttgaccagataactgaaatggcagcagtaatgag

SEQ ID NO: 271264 - DNA, 83 bp, Homo sapiens
cctgagatcagagtcacgcccttggcaaattgtggctactaatttgccccctgaagatcaagatggctctggggatgactctg

SEQ ID NO: 271265 - DNA, 95 bp, Homo sapiens
attaatagcaatgaaaactgagaaggaggagatgagctttgagcctggtgaccaggagtcagaaataccatcagaggaggggtactgtgacttta

SEQ ID NO: 271266 - DNA, 95 bp, Homo sapiens
tgttctcagttgagtgaaagattggagaagcagcagacagccaataaggtggaaattgagaaaattcgggtatcaaggttacattggtgcagccc

SEQ ID NO: 271267 - DNA, 83 bp, Homo sapiens
gtgggcaaaaagttattggagtggtttaatgacccgagcctcagggataaggtgtggaatatcaaacaaatgattaagttgac

SEQ ID NO: 271268 - DNA, 87 bp, Homo sapiens
ccagtacgagttgaatcattgttcaaataagatgaaaaacctcatggtttattcattacctacaatggaaatactatattctttgga

SEQ ID NO: 271269 - DNA, 75 bp, Homo sapiens
aaagcttctccctcagtatttagaccaggtctgggaggggctgaacgtggtgaagacaggccgagtgatgcttgg

SEQ ID NO: 271270 - DNA, 75 bp, Homo sapiens
ccgccattttggatccgctgacagcgtttgctgccaattgatggggcaaatgatctcttttttcagccacctcca

SEQ ID NO: 271271 - DNA, 80 bp, Homo sapiens
aaaccttgcttctaggagataaaaaggggacggcaaaacagaacagaaaggcggagataaaaagaggggtgttaaaagac

SEQ ID NO: 271272 - DNA, 75 bp, Homo sapiens
caagaatctgaagactctacagaaacgagattccttcatcggcacgccttactgcaattaccagctctggctggg

SEQ ID NO: 271273 - DNA, 75 bp, Homo sapiens
agattttcaatcagaaaattgggtgataaaagaaaatgtggctgaagttacccgaagttcagcttgcagtgtaat

SEQ ID NO: 271274 - DNA, 82 bp, Homo sapiens
tgatttgtccctggggcggcagcgcggacccgcccggagatgaggcccctggccccaacatggcccgtcgctctcagagctc

SEQ ID NO: 271275 - DNA, 90 bp, Homo sapiens
gacacacctaccaagaagccagtcaagcggccaggttgagaacttgttgcttagtaaccaagggaccattaagctgtgtgactttggcag

SEQ ID NO: 271276 - DNA, 71 bp, Homo sapiens
cccagcctcaggcctgcacggacggtgttggttggggagtacatcgatgcccaccctgagaccatcgtcct

SEQ ID NO: 271277 - DNA, 100 bp, Homo sapiens
ctcgccgggaccctcctgtgggcccagggaattcaaagaagctttttcactatttgacaaagatggtgatggaactataacaacaaaggaattgggaact

SEQ ID NO: 271278 - DNA, 100 bp, Homo sapiens
tagacttgtttcttatatgtgatgccattccagcactggactcatggaggctgagcatttattcagattttgtggaagtataatactttgtcattatgag

SEQ ID NO: 271279 - DNA, 83 bp, Homo sapiens
tctttgtcaagatcagcaacactatttctgacaatgcagatcttcgtgaagactctgactggtaagaccatcaccctcgaggt

SEQ ID NO: 271280 - DNA, 100 bp, Homo sapiens
cctagagctccgggacaatgataagactcgctatatggggaagggtgtgacagcatggagaagctaaaggctcttctgccaagactggagcaggagctga

SEQ ID NO: 271281 - DNA, 75 bp, Homo sapiens
ccgacaaggcgttcaagcgaaaacatgaccgctgagcccatgaggaaggaagcagccaccctcgccatggcctcc

SEQ ID NO: 271282 - DNA, 135 bp, Homo sapiens
ggctaaccaagaaactaaagaagacttacctgcggaaaacggggaaacgaagactgaggagagtggtgcacgtatcaacatctcagaagggaattgtcctgagagaattatcactttggctggacccactaatgc

SEQ ID NO: 271283 - DNA, 83 bp, Homo sapiens
accatttctggccaaaactacaaacaagacttcgcagccatccaacatattctttacaatggatgatgtggtcaaggttggag

SEQ ID NO: 271284 - DNA, 88 bp, Homo sapiens
ggcgcgggactcaagtacaactcccggcacgagaatggacagcaaattatggatgaacctatgggagaggaggagattaacccacaaa

SEQ ID NO: 271285 - DNA, 50 bp, Homo sapiens
accacgtctcgtccacgacctccctagtaatctatgccagcaattatgac

SEQ ID NO: 271286 - DNA, 75 bp, Homo sapiens
cttactgctcgtctcagcaaggaggagactgtgctggcgataggatttttgggccttggtctcatgggaagtgga

SEQ ID NO: 271287 - DNA, 80 bp, Homo sapiens
ggtcatgagctttgtgaacctgggaacccaagacagaccaggatgaggagcattgccggaaagtcaacgagtatctgaac

SEQ ID NO: 271288 - DNA, 50 bp, Homo sapiens
agcaccctctgcttaccacagccagaatacttcagagagtcagagttgtg

SEQ ID NO: 271289 - DNA, 75 bp, Homo sapiens
cagccttcccagtagctgggaccacagctgcaagctttcttcctggtggcagatgacatcatggattcatccctt

SEQ ID NO: 271290 - DNA, 100 bp, Homo sapiens
ggcgcgatggagcagcgaaaacgtggttgtagagttccgtgactcccagtgtcttccatgaagaaatgatgaagatgcgacaggctaagctggattatca

SEQ ID NO: 271291 - DNA, 110 bp, Homo sapiens
gtccccgcccgcaggtcccgggcaggaatcattaaccaatggcaacaggaatccaaggataaagtgatttccctcctgttaactcatctgcctttgctgaagccaggaaa

SEQ ID NO: 271292 - DNA, 75 bp, Homo sapiens
gagtcggcgagcccccgcggcgacaggtgttgtcctacatcaatggggtcacaacaagcaaacctggagtatcct

SEQ ID NO: 271293 - DNA, 95 bp, Homo sapiens
gccgggaacccgccggggagaggcacccgagacccacggagaccgcaacccttaggagaaatcttgagagtggacagcaattgtgaagatcgcca

SEQ ID NO: 271294 - DNA, 75 bp, Homo sapiens
gtgataaacctgtaggaacaaaaaagttaacaaagtcatttggacggaaactggacgcattggattagaaggctg

SEQ ID NO: 271295 - DNA, 98 bp, Homo sapiens
gttacgccatggaaaccgctctggtcacaccaatactgttgcagattgtgcccatgacgcttccggagacaaccctggaaacactgaagcataaaatc

SEQ ID NO: 271296 - DNA, 100 bp, Homo sapiens
caggcctccgggcccggcgccgccgcccgcagaacaaaatccagtctcatagcagaggagaatataatgtttacagcaccttccagagccatgaaccaga

SEQ ID NO: 271297 - DNA, 73 bp, Homo sapiens
caacacagatgtccaagctgccaagacggatacagagtctgagctggacctcatcagccgcctttccagagaa

SEQ ID NO: 271298 - DNA, 75 bp, Homo sapiens
ggaagatgcaagcggtttgggaccttgaacaaggcaaatatggttttggtgagcgagtgctgtgctttcatgggc

SEQ ID NO: 271299 - DNA, 100 bp, Homo sapiens
cctgggagcaccagcgctgccacttgtacccgcagacattatgaaagatacactgcctctaggactgggacagatagccactgagtacctgcttcaaatc

SEQ ID NO: 271300 - DNA, 101 bp, Homo sapiens
agtgctgaagcctttaaatgcagcatctgcgatgtgaggaaaggcacctccaccaggatgtgatcttcgtggtggaaagctaaattttaaaaccaccccaa

SEQ ID NO: 271301 - DNA, 113 bp, Homo sapiens
atgtgaagtagatgataaagatgatgatatccttctcaaccttgtgggatgtgaaaactctgttactgaaggtattcaggagtctccggtgccgaacggccactcgcttccgg

SEQ ID NO: 271302 - DNA, 100 bp, Homo sapiens
gaaaattgtgacaaatcacttgtgtctgacttccagcaactgctggcctgtgccagggtgcaagctgagcactggagtggagttttcctgtggagaggag

SEQ ID NO: 271303 - DNA, 83 bp, Homo sapiens
gaaaagagcaaatgcagcatttttgataggtgcctatgcagtggcctgccatgggtatccatggtgacaagagtcaacaagag

SEQ ID NO: 271304 - DNA, 87 bp, Homo sapiens
gcggtgcagggtaacatggcggatgcggaagtctcagagatctcagacagaagctgtgaccttcttggctaaccatgatgacagtcg

SEQ ID NO: 271305 - DNA, 87 bp, Homo sapiens
ccagaattgttcagtggaagcccctgcttggatgcctgtccaccactgtactgagtgtttctcaggagctatcagaaactatcctca

SEQ ID NO: 271306 - DNA, 95 bp, Homo sapiens
gcctcagcctcccaagaagctgggattacaggtccaaactaaatgacatgatagatgctattccaaaaagtaagaagaataagagatgtcagttg

SEQ ID NO: 271307 - DNA, 90 bp, Homo sapiens
atccgctgctgctgaggagaggagcgtcaacagcagcaccatggatgccttcaattaagttgcagagttctgatggagagatatttgaag

SEQ ID NO: 271308 - DNA, 87 bp, Homo sapiens
cgagagcgtgaccgagagcgcgaatatcgtcatcgttagaaggttttgctgttactgctcagtgtagtcacaccttgaataagaaat

SEQ ID NO: 271309 - DNA, 100 bp, Homo sapiens
gggcctcaattaatgtatctggctttcaacagacctcacatctttcttcttatgaaattataactccttggagattaactagagaaagaagagaagcccc

SEQ ID NO: 271310 - DNA, 50 bp, Homo sapiens
tgctgaaaggctcccggagctccgaggtgtcagaaactatttaaaagaag

SEQ ID NO: 271311 - DNA, 100 bp, Homo sapiens
ctgaactgagcgtatgtgccacgccgcccaggagacccctctgctgcaccacttcatgtgtactatgaggggctgcaggacaagctggcacagatccgcg

SEQ ID NO: 271312 - DNA, 90 bp, Homo sapiens
cttggaagccaatatatcttcacagaaatggcctcgaacctcaatgaccgcctggcctcctacctggacaaggtacgtgccctggaggag

SEQ ID NO: 271313 - DNA, 98 bp, Homo sapiens
accgtccagcccagcgattctcagtcagacctgtttgtgggccagttgaaaagttgtctcaagtgccaggcctgtgggtatcgctccacgaccttcga

SEQ ID NO: 271314 - DNA, 95 bp, Homo sapiens
agaagtctaatgccaggaagcctggaacgggggttctggtcaaaatgcagatcttcgtgaaaacccttaccggcaagaccatcacccttgaggtg

SEQ ID NO: 271315 - DNA, 75 bp, Homo sapiens
ggcggcggctgccgcaggacctgcagcatcccagagattttaggtgatgggcaagtcagaaagtcagatggatat

SEQ ID NO: 271316 - DNA, 82 bp, Homo sapiens
agaaacattaccgtcatattccacccattactaaggtgagcgagtgctgtgctttcatgggcctcttctttatgaagcaaag

SEQ ID NO: 271317 - DNA, 100 bp, Homo sapiens
tctatgagagagaactgcaaactttccgagaatatggagatacaggtgaaatctgcaaatcatgaaggacaggtggatcaatgcagggcatgaagaagat

SEQ ID NO: 271318 - DNA, 100 bp, Homo sapiens
catttctgctgtttcagttgtactactacaagcactatttatcaacaaaggaagctgaatatggtgggcatgatcagatagatttgtatgacgatgtcat

SEQ ID NO: 271319 - DNA, 50 bp, Homo sapiens
aactctatggggaagaaaacaatggttacacgcatggggagatactctgg

SEQ ID NO: 271320 - DNA, 100 bp, Homo sapiens
tggcttcccccaacccagacgaagagaaaggaaacagattcattgtctgtctgaggatgagttaagttcttctacaagttcaactgataagtcagatggg

SEQ ID NO: 271321 - DNA, 101 bp, Homo sapiens
caggagtgtttgacatagacctggaccagccagaggacgcgggctctgaggatgagctggaggagggggtctctaattaacagaagatggcaaagcccagc

SEQ ID NO: 271322 - DNA, 73 bp, Homo sapiens
gccgatattcaccaagcgcttcgctacaagcactgccagtgaaagatgtagaagataaacctgaacaacaaac

SEQ ID NO: 271323 - DNA, 82 bp, Homo sapiens
taaagtctgagagagggaagtcgcctctgtgctcgtgagtgcatggggtataaggccaacatagccgaggtagaggtctcca

SEQ ID NO: 271324 - DNA, 101 bp, Homo sapiens
ttggatgctttaatcaagattaagaatgaagttgactctactttgaccttccgaagatcatgcagagaaggacacaactcagatgggaagttcatcgcccg

SEQ ID NO: 271325 - DNA, 90 bp, Homo sapiens
gtcgactacaagaagagggcggagcggagacgggagtattatgaaaagatccatcaagctgtccagtcccgtgaaacgcccacggaagga

SEQ ID NO: 271326 - DNA, 75 bp, Homo sapiens
tgcattggacccagctattgctgcagcatttgccaaggagacatccctcttagcactagaaagtttgggatttgg

SEQ ID NO: 271327 - DNA, 85 bp, Homo sapiens
actggatcgaaatgtccatgagaaaaagcttggagataaagttgctttttactgggcggcaccttcctacttctgcccagccaca

SEQ ID NO: 271328 - DNA, 81 bp, Homo sapiens
ctttgactactggggccagggaaccctggtcaccgtctcctcagtattaaaggtggaagaaggtccatatctttttctgtg

SEQ ID NO: 271329 - DNA, 100 bp, Homo sapiens
taaagtcgagtatctggtgaagtggaaaggatggcccccaaatgtcttgggacaaggtgcgcattcctggtgtgctgcagcgattgggagtgacatactt

SEQ ID NO: 271330 - DNA, 75 bp, Homo sapiens
gtcagattggaccctgtaaaagctgtaaaatgataacagaggatctcaaagatttcatgagacaagctggggaag

SEQ ID NO: 271331 - DNA, 82 bp, Homo sapiens
cccacttcatatgtcgaagtctgtttggacaaaaatgccaaaggctactgcagcactggggtgtcagttgttggtccgaccc

SEQ ID NO: 271332 - DNA, 86 bp, Homo sapiens
cgcagccccccaatgcggccgcgagaagcagcgggggggcaggcgatcgaagtttggtgccctggttgtcagatgttggaaagcag

SEQ ID NO: 271333 - DNA, 75 bp, Homo sapiens
gggaactgcttatcctccagggaggaccaccccagtttaaacccattttcctgaacacaattgacccatctcacc

SEQ ID NO: 271334 - DNA, 100 bp, Homo sapiens
ctcgctggtctacctgctcttcctgctgctgctgccctggttccccggccccacccgatgcggcctccaagacagcacccaagaaaacctcatttggctc

SEQ ID NO: 271335 - DNA, 106 bp, Homo sapiens
gaaggaacaaaaggtcccggaccccccggatctgacggggcgggacctggcgccaccttgcagtactatactggcaattgctggagaagattttgcaattgttgct

SEQ ID NO: 271336 - DNA, 74 bp, Homo sapiens
cggcgatatggaagaggagggcaagaagggcaagaagacatatctgaagagatggattaagaatgctttggatt

SEQ ID NO: 271337 - DNA, 100 bp, Homo sapiens
taagagaggatcgcccaatccacatgcttttccaggctttcaacagacctcacatctttcttcttatgaaattataactccttggagattaactagagaa

SEQ ID NO: 271338 - DNA, 101 bp, Homo sapiens
tgagggatcgctgcaacctttagactaatgactgtccgaaacatcgcctccatctgtaatatgagcattggggagtcagcaatgtccgttgtgttaaatca

SEQ ID NO: 271339 - DNA, 83 bp, Homo sapiens
gaagtggtgagcctttttgtcactgaaatagagctgaggtcaaaggctggaaagtcatcaggagaaaaaattggttgtggaag

SEQ ID NO: 271340 - DNA, 50 bp, Homo sapiens
agcaatgccttcaaaacttggaacagagccctttttgattatgacaagac

SEQ ID NO: 271341 - DNA, 100 bp, Homo sapiens
ggcacgcagccttgcgcaagctcaacgacctggtgaagagggcccggctggtgcgaattggtggaacgagaatgcctacacgcagccacaggaatccagt

SEQ ID NO: 271342 - DNA, 97 bp, Homo sapiens
gcagaaggtctctggagacatcttcagcaggatgaagcctgctgggagcgtgaatgacatggccctggatgccttcgacttggaccggatgaagcag

SEQ ID NO: 271343 - DNA, 100 bp, Homo sapiens
gccatatcaaccattcaggctttgaccgcagtaatgaacaaatctccagctgctaaggtgacaaaacacgacagccttcttcaagcccctccagtattat

SEQ ID NO: 271344 - DNA, 83 bp, Homo sapiens
ccagtggtggccagtagaggaggaggtgaacaaggaggagaggttgacggatatattcagacgttacgacacggatcaggacg

SEQ ID NO: 271345 - DNA, 51 bp, Homo sapiens
gtcattaggaacaatggtgcaagagccatccaaaactctgtttgtcaaagg

SEQ ID NO: 271346 - DNA, 101 bp, Homo sapiens
aggaggaagaattcccaagccaaagctttccagcaaatggttatgagccttagagtttctgaactccaagtactgttgggctacgccgggagaaacaagca

SEQ ID NO: 271347 - DNA, 74 bp, Homo sapiens
agaagatgagcatgacagaacgacaagatcttagttgggtatcagaaattaaaaaagaagaagataaaatgcac

SEQ ID NO: 271348 - DNA, 97 bp, Homo sapiens
caggctccgggctgaagattgcttctcttctctcctccaagcttttcctccgcaaccatgtctgacaaacccgatatggctgagatcgagaaattcg

SEQ ID NO: 271349 - DNA, 90 bp, Homo sapiens
agcaatttgaggtcatcaagcaacaaaaagaaatcattgaacacggcatcgagctgtgtgggtacgccacgctgcatcacgtcattgaca

SEQ ID NO: 271350 - DNA, 100 bp, Homo sapiens
tcgaagaatgaaaccggcttgttgtcttcaattaaaaaatttattaaaggaagcacacctaagctgcaagctttcttcctggtggcagatgacatcatgg

SEQ ID NO: 271351 - DNA, 100 bp, Homo sapiens
gtcccagtcccagcagaggtaccagccgcagcaggtctcgtctacagaggactggtctttcaatagcaagttttcacttcatcgacaacatcacgaaggt

SEQ ID NO: 271352 - DNA, 78 bp, Homo sapiens
gcgagatccgggccgtgaacgaaagcagtgacggaggagcttgtaccaccgaaataaggatctggcatgtcaacacaa

SEQ ID NO: 271353 - DNA, 96 bp, Homo sapiens
gaagcattcagggaatttaggtgtagccagaagaaaatcagatgccatggacaatattaccaggcagaaccaattctacgatacccaagtcatcaa

SEQ ID NO: 271354 - DNA, 98 bp, Homo sapiens
ggtgtccacggtagcttcctggctcggcccagtcgcaagaaccagggtgacttctcgctctccgtcagccctggcatgatcaaagactgcggagccac

SEQ ID NO: 271355 - DNA, 82 bp, Homo sapiens
gaaaggagagacacttgtgaacattcaagtgaagcaaaagcctttcatgattatgtgtcgtgaaaactacccctaaaagcca

SEQ ID NO: 271356 - DNA, 101 bp, Homo sapiens
ggaagattcaaacaaccaaccctgatttcctgcttctccttttcatgagtgttcctgtggtctctgcacctcctttctgtctttgactttgaactgagcag

SEQ ID NO: 271357 - DNA, 96 bp, Homo sapiens
ggtcagctccgccgaaggcgccgccaaggaagagaatcgaggagacgtggcgcctgtggcagaagtttttagacgactattctcgctttgaggact

SEQ ID NO: 271358 - DNA, 100 bp, Homo sapiens
cggagcaagatggctgagggcgagcggcagccgccgccaggagagcgacttgcagttgtggaggtacagtgtgaacggctgaggatgctctaccgggact

SEQ ID NO: 271359 - DNA, 99 bp, Homo sapiens
aggagaggggagccggaggaggatgctcctgcctcccagagaggggagccggcgaggatcaaaatcttcgaaggagggaatacaaacagaagcttgcac

SEQ ID NO: 271360 - DNA, 83 bp, Homo sapiens
cccggcgcaggtgaccggcgcgcgggagcgctacggccccaacggtactccaaagattcaggtttactcacgtcatccagcag

SEQ ID NO: 271361 - DNA, 100 bp, Homo sapiens
cgcgccatgtccgcgcacaatcggggcaccgagctcggtgtctgatgatttgtgagcctcaagtgactactctgtggaatcatctgtccttgcctttgaa

SEQ ID NO: 271362 - DNA, 88 bp, Homo sapiens
cagtacttcacatcgtcgttcacatgggagttccatggggagtcctttgacaagaccaacaccacgatcaccagctaactggtccagt

SEQ ID NO: 271363 - DNA, 100 bp, Homo sapiens
ccagatacttatggagaagtacctgaagctgcaggatacctgccgtactcaggataaaatgccagaagttcgacagagttcttttgccctgttaggtgac

SEQ ID NO: 271364 - DNA, 109 bp, Homo sapiens
gcgagggctacccgctctttgccgtgacaacaccgttcccccagccgggctgttacttcgatgccctgctgaaattgcgacaggagcgtgggatgggtgaggacttcct

SEQ ID NO: 271365 - DNA, 100 bp, Homo sapiens
tcggagctgatcgggcgcctagccccgcgcctgggcctcgccgagcccgacatgctgagtctgaacagcagaagaagcaacaggaggctgagaaactgca

SEQ ID NO: 271366 - DNA, 83 bp, Homo sapiens
gtctgcgggaataggacctatggcgtggtggcccagtactaccggcccctgcatgtgacttaagagattaaaattaatttggt

SEQ ID NO: 271367 - DNA, 102 bp, Homo sapiens
gaaaaggctttgagaaattttgagtcctcgagtgaatgggcggatctcatatcttcacttggcaaactcaacaaggagtccatagaggccactgtattctat

SEQ ID NO: 271368 - DNA, 100 bp, Homo sapiens
cttcaggtgctggaaaggaatgaggagttacagagggccgagaaggacaggatcagtacgtagagaaatcgacactcttaatgaacgtttagctgctgaa

SEQ ID NO: 271369 - DNA, 82 bp, Homo sapiens
ctctcctgcccctcgccggtacctcagcaaggtgcgttgccgccagtgaagtaagaactctgctagagaggaaatggctgct

SEQ ID NO: 271370 - DNA, 100 bp, Homo sapiens
atcagtgcccttgtggcgaatggggctcacgtcgagtaccagcagacaggtgttaggtggctgtgggaattgcactgccagcaggcaggaggaattctgg

SEQ ID NO: 271371 - DNA, 75 bp, Homo sapiens
ggcaccagcaggacccgaggccaggagccaggggcccagaaggccaaacgtaccaagaaagtcgggatcgtcggt

SEQ ID NO: 271372 - DNA, 101 bp, Homo sapiens
cacacgactcccgctggctcaatgacctcctgccccccgaggtctgcagtctcctgaacccagcagccatctacgccaacaacgagatcagcctgcgtgac

SEQ ID NO: 271373 - DNA, 100 bp, Homo sapiens
cgggagcttccgggagggcggctcgcaggagggccctcctggacccgggagcggaccctggtggcggtgaagcccgatggcgtgcaacggcggctcgttg

SEQ ID NO: 271374 - DNA, 100 bp, Homo sapiens
cgggcctgaggcgaaggagcggccgggagcccgccgcgctggtagcgatcgcgctagcgagcttttatgaggacggaggggatgaagacattgtgaccat

SEQ ID NO: 271375 - DNA, 51 bp, Homo sapiens
ccgcgggggagccccgggagccgcacggtggatggaagcatgcctagggga

SEQ ID NO: 271376 - DNA, 101 bp, Homo sapiens
aacttacaagattgttaccgactctatcagggtataaatcaactacctaatgttatacaggctctggaaaaacatgaagaagctgcacacatacatgtaag

SEQ ID NO: 271377 - DNA, 83 bp, Homo sapiens
cacaaattgtagccctacccggaaaaggtcttcatctgagagtacttcttcaacaggacttgaaagaggagattgatattcga

SEQ ID NO: 271378 - DNA, 82 bp, Homo sapiens
gagcgctgttttcgtgatcttcagaccccaggttctttggcttatcaggagggcagacttcaaaagctactaaaaatgaacg

SEQ ID NO: 271379 - DNA, 128 bp, Homo sapiens
cgcctccatctgaagagggctccaggcatccggtcctggtccctgctggttggttttaaaatcaaagatgggaaaatcggagaaaattgcccttccccatggccagcttgttcatggtatacacttgt

SEQ ID NO: 271380 - DNA, 74 bp, Homo sapiens
ctggaccagaccatggccgcggccttcggctgaccccgcactacatctacccaccagccatcgtgcagcccagc

SEQ ID NO: 271381 - DNA, 100 bp, Homo sapiens
ctgaggagtatggacggaccctgtcccgtagtgtggagtactgcgccatgagagacgagataaatgaggtggagccgccaccaaaatgcagattttcgtg

SEQ ID NO: 271382 - DNA, 100 bp, Homo sapiens
tggcctccttctccatctacagatcgaacaccagggggacaagctggagatggcgagagagaaacatcaggcttcccagaaggaaaataaacagctgagt

SEQ ID NO: 271383 - DNA, 82 bp, Homo sapiens
aaacacctgaggtggtacctgatgattctggaactttctatgatcaggcagttgtcaggtcctaggcctacttacaagcctc

SEQ ID NO: 271384 - DNA, 51 bp, Homo sapiens
ttcgcagtggtcgcttcttctccttgaggatctgaagaggcaaaatgcagt

SEQ ID NO: 271385 - DNA, 82 bp, Homo sapiens
tcctctgagttcaagaacatcacagtgagagagggaaaggtgagaaggagcccccgagcccgggcatggagaggaagaggag

SEQ ID NO: 271386 - DNA, 100 bp, Homo sapiens
ccccagattcaacccgtgtacgtgcctgtgcctaaagtggataatattaatgcagctgtgatggatttgaaaaaaaagaagatccgcagtctaagtgaag

SEQ ID NO: 271387 - DNA, 89 bp, Homo sapiens
gtgaaagccaggttgaccattgctgccgttctgtacttgcttttcatgattggagaacttgtagccccccaggttcgcctaatagtctt

SEQ ID NO: 271388 - DNA, 87 bp, Homo sapiens
cattttgtgttgcagttgactccctcaatggattggtttacataggtcaaagaggaacgaagggcatcctacgactataaccaagat

SEQ ID NO: 271389 - DNA, 100 bp, Homo sapiens
atcgcaaggcacctctgagaacttcagggcagcgaggtcacaggccccacctttgctgatggcgagctcatccccagggaacccggcttttttcccgagg

SEQ ID NO: 271390 - DNA, 97 bp, Homo sapiens
attgactgcttgtcccagaagcaatttaaggagcagacagcatcgcacagaattattttaaaaaaaagcagtgatccaagcaattgaattggaagca

SEQ ID NO: 271391 - DNA, 76 bp, Homo sapiens
cttggatccgcgggacaagaaaattcatgcggaccatcagcacgtgcccatcgacatccagaccagcaagctgctc

SEQ ID NO: 271392 - DNA, 88 bp, Homo sapiens
gctgagacgcacagtctccgtgccggtggaggggcggccccacggcgagcatgattgacgagatgcctgaggctgccgtgaaatcaac

SEQ ID NO: 271393 - DNA, 97 bp, Homo sapiens
taacacagcagttaaagaatgaagatgagacagaccggccatcattggaatcagcaatgcagcaagtcttggaaaaccttacggagctgccctcgtc

SEQ ID NO: 271394 - DNA, 90 bp, Homo sapiens
agagtggacgcacatacagaagacagccatgcactgagctggggacatgcaacaataacagcctacgctcactccccaacccatcccaac

SEQ ID NO: 271395 - DNA, 83 bp, Homo sapiens
agccgatccagcctgcggagcctgtggggcaggcttcctttctgtctgaccagcctgagccttacctgccatttctttcacgc

SEQ ID NO: 271396 - DNA, 50 bp, Homo sapiens
gaagtaccaggaggcgttggccaaggatactagagtaaaaggatggtttc

SEQ ID NO: 271397 - DNA, 90 bp, Homo sapiens
aaaagatgaatgctgacatcttctgatgcttaacaagaaataaaaatagtcaccttaatcatcaaaaagcctttggattatgagactcgc

SEQ ID NO: 271398 - DNA, 87 bp, Homo sapiens
catagtatcaatcgtaagctcactatattccattagaaagcttaaagtatcagtggttgagaagagcttttcggacctgttactacc

SEQ ID NO: 271399 - DNA, 90 bp, Homo sapiens
ttagcgacatccgagtgcagaacctgcaagatgacctcccttgccacttcacttctgcctttggggcaggcttctgcaccactgtcatcg

SEQ ID NO: 271400 - DNA, 101 bp, Homo sapiens
caaaaagtgattaagcagagaatggagaagaaggttgattccaggaactttatattgctgttggaatatctggagccatccaacatttagctgggatgaaa

SEQ ID NO: 271401 - DNA, 85 bp, Homo sapiens
aaaaccagatccagaaactggaggagtcccgctcgaagctagaggaagttcagaagcagaaggaactttccaaagctgaaatcca

SEQ ID NO: 271402 - DNA, 83 bp, Homo sapiens
acttccagtgagagtgacacaggtcaggaagcagaatattccttatatgccagattctactgcaactgaaagagcaattgcca

SEQ ID NO: 271403 - DNA, 139 bp, Homo sapiens
gtactggtgtgtggctgagaaccagtatggccagagggccaccgccttcaacctgtctgtggagttctgtagatggacggcagatccgagtagaccaggcaggcaagtcgtcagacaaccgatcccgtgggtaccgtgg

SEQ ID NO: 271404 - DNA, 50 bp, Homo sapiens
aagaatcaagatcttccctctctgagcagtgatgtcttggttcgtgtccc

SEQ ID NO: 271405 - DNA, 75 bp, Homo sapiens
cttccctttcgtcaacctgtggaccctcagcttttaggaatccctgtatgggcactaggaaaagacttcttccat

SEQ ID NO: 271406 - DNA, 100 bp, Homo sapiens
cacaggttgaaaaaccaaagctccctgctgcataagaccttgtcagagcatggcttctcgctgtttctgggatgctgacactgacaactatactcatgat

SEQ ID NO: 271407 - DNA, 90 bp, Homo sapiens
cggcaggctcaggtgcagccgctggcggtctatgcttgcttggtgcttatgctgacagtgatgacgatgacaatgatgtttccgaaaaac

SEQ ID NO: 271408 - DNA, 100 bp, Homo sapiens
ggaagcagccgatccagcctgcggagcctgtggggcagctgaggagtacctgtcatttgcctttgagcattgtcaccgttctagtcagaagaacaaaagg

SEQ ID NO: 271409 - DNA, 100 bp, Homo sapiens
ggcgaaggcttcctctgtgtatttgccatcaataatagcaagtcatttgcggatattaacctctacaggtgcagcggaactgctgcctgacgctctgcaa

SEQ ID NO: 271410 - DNA, 100 bp, Homo sapiens
gtccgtggatgaaggtggggtggcgtggcaagccggactaaggaccggggacttcttgattgaggaccatgaatggcacctacaacacctgtggctccag

SEQ ID NO: 271411 - DNA, 100 bp, Homo sapiens
gaagacatcgttcaggagtctaagaagtactggcagcagatggaggcgcatgcggggaaggccagcagcagcatggccctggccaacgtcaacattggga

SEQ ID NO: 271412 - DNA, 82 bp, Homo sapiens
ctccgttcggcggcgctcccatggcgcacattaccattaaccagtacctgcagcagataaactcaagccatggagggattac

SEQ ID NO: 271413 - DNA, 100 bp, Homo sapiens
gagaacttcttaagaagagtgcttcttcacactccagcccatgtcctgccatctgctgctttcctgtgctccatgtttgtaaattcattgctgctgtcta

SEQ ID NO: 271414 - DNA, 97 bp, Homo sapiens
ggcaccttttggaagctcagataagatggagtggactaaagaggatggacatagaacttccacctctgctgtccctaacctgtttgttccattgaac

SEQ ID NO: 271415 - DNA, 96 bp, Homo sapiens
tctagaggcatggttgaaattgaattgagctctccttgtgtacatcatcatggttccccaggagtggatttaccagttaccataccagaagtttct

SEQ ID NO: 271416 - DNA, 98 bp, Homo sapiens
aaaacttcagagacctaagctttttccagagaagagaagctttactggtgttccagccctaaggttcaaaccttgtactactcagctgatcacaagct

SEQ ID NO: 271417 - DNA, 74 bp, Homo sapiens
atgtctgacagccctgtgtgacaccaagataagtaacaaatttggagagcttgtaatgaccaaagaatcaaagg

SEQ ID NO: 271418 - DNA, 100 bp, Homo sapiens
gtggtccaccatcggtgacctcaccgcctcggttcgccctcagccgccccgtctgcgggccaggcatcgacatccgcaacgactatcagcagctgaagcg

SEQ ID NO: 271419 - DNA, 75 bp, Homo sapiens
ccaaattgtcgccattaagaaagtggacccccaaaagtacaagggcatatttaacggattctcagttacacttaa

SEQ ID NO: 271420 - DNA, 74 bp, Homo sapiens
ctcctagatccttgaagtgtgaacttcagcagctgagagaaccaatttagaacttgaattgattcatcgaggag

SEQ ID NO: 271421 - DNA, 95 bp, Homo sapiens
accagaggactgggaggagcatgtcaacaggttcttgatcaatatgaacgagaaggatttaacttcctagccaaggtgtttaattcttcacattc

SEQ ID NO: 271422 - DNA, 83 bp, Homo sapiens
cgcggcgcggggccaccatgggggcccagctcagcacggtccttgaatgggcaagagggcacatgaagtacggcgtcctccac

SEQ ID NO: 271423 - DNA, 96 bp, Homo sapiens
cagcacctcaccgaaaagagcctgtacaaccagcgcctgcgcctacagaacgagcaccgagctgagctgcccctcctggacctgatgaagctgtac

SEQ ID NO: 271424 - DNA, 100 bp, Homo sapiens
tgtgcaggtttcggcacatggagattgattatggtttgaagtggtgaacatggatttttctcggcttcacatgtacagtcctccccagtgtgtgccggag

SEQ ID NO: 271425 - DNA, 100 bp, Homo sapiens
catctatcccgtcaacagcaaggacctgcagcacatctggaacattgatgatggcacctcagatcgcccctacagccatgctctggtggctggaattgac

SEQ ID NO: 271426 - DNA, 73 bp, Homo sapiens
gtgctgccagaaatttgaacaactttccgaatctgcaaaagaagaaacagcacttcttctcagtctcagacaa

SEQ ID NO: 271427 - DNA, 87 bp, Homo sapiens
cagcgacaacatggaggccgtgaagaccttcaatagcgagaacatccagtcatggataaaaatgagctggttcagaaggccaaactg

SEQ ID NO: 271428 - DNA, 100 bp, Homo sapiens
gtatgttctcatgtcctggacactaccacgttgatggctttctaaatccagggtgattttcttccacccccacctccacctctagatgattccagtgccc

SEQ ID NO: 271429 - DNA, 75 bp, Homo sapiens
ggagccctggaggagtgctatgtcacagaaattgaccaagactgctttccagacacctccggcccacacagccgt

SEQ ID NO: 271430 - DNA, 75 bp, Homo sapiens
gccctgatgggcagtcaacagctaaaaccttcctcaccgtgtactacgcaaacatgcagatctttgtgaagaccc

SEQ ID NO: 271431 - DNA, 100 bp, Homo sapiens
cgggcattctccatctccttgcaggctgctggtggtctacccttggacccagaggttctttgagtcctttggggatctgtccactcctgatgctgttatg

SEQ ID NO: 271432 - DNA, 100 bp, Homo sapiens
gtaaatccctatccagagtttttggagctgtacaggatggctgcagctcctccaagttactgttttgttgccttccctccacgtgctaaggatggtctgg

SEQ ID NO: 271433 - DNA, 100 bp, Homo sapiens
ccttcgtacccacagtgcttcatgagagttgtcatggatgcactggtagaagatgatatctgtattctgaatcatgaaaaagcccataagagagatacag

SEQ ID NO: 271434 - DNA, 90 bp, Homo sapiens
gattctgccaattcgttttcaggagcatctccagttgtcatggatgcactggtagaagatgatatctgtattctgaatcatgaaaaagcc

SEQ ID NO: 271435 - DNA, 100 bp, Homo sapiens
aaggaacgagcagtgatggctgaaaaggatgctttagaaaaacacgatcagctcttagacaggcactaacataaatagtgactctccagttggaaaaaag

SEQ ID NO: 271436 - DNA, 98 bp, Homo sapiens
atgggtctgcgtatcttgagtgcttacaaaaccttatctggtcgtccagcccaccccggtgccttgctctggaagggtaatcaggaagcagccgctgc

SEQ ID NO: 271437 - DNA, 100 bp, Homo sapiens
ggacagcgtgcggtctgggccttttgggcagcttttccggcctgacaacttcatctttgattctctgcaatgactgtaatggacgatccactgttcagtt

SEQ ID NO: 271438 - DNA, 100 bp, Homo sapiens
ttctggataacactgtacaagctttcaaagtcaatgtgactattatatggttaaaaagattttggaggaaaacagttcaggtgacttgaacataaattgc

SEQ ID NO: 271439 - DNA, 90 bp, Homo sapiens
ggacaagttttggtggcacgcagcctggggactctgcctcgtgccgctgagcctggcgcagatcgcttgtcaaaattcccaaaaatgatc

SEQ ID NO: 271440 - DNA, 75 bp, Homo sapiens
ttgccacgtggatgtgaagatttcctctaaaagggtcaaagaattgactgtagatccaactgctgctggtgatgt

SEQ ID NO: 271441 - DNA, 101 bp, Homo sapiens
cacatccggtgttagaagcgctggtaggccttggagaggcgggttaggaaggtactccaaagattcaggtttactcacgtcatccagcagagaatggaaag

SEQ ID NO: 271442 - DNA, 100 bp, Homo sapiens
ggaccttttttcatttccatttctaccttgtatgcctcaatttgctggatttaagcactgctgcactttatgaggaaagtaatggaccagtgaaggtgtg

SEQ ID NO: 271443 - DNA, 98 bp, Homo sapiens
aaaattttggagacgaagaaagattatgagaaattgcagcagtcacccaaacctggggagaagatttatgtgatcagtttggctgaaccccgtctgcc

SEQ ID NO: 271444 - DNA, 74 bp, Homo sapiens
ccggccaaggatgaagcctcacttcagtctgcgctcctcagaccaccggcaggtgaacagcctgatgcagaccg

SEQ ID NO: 271445 - DNA, 82 bp, Homo sapiens
gatcactgcggggagatgctcttcggcctagtgcgccagggcctcaagtgcgatggctaccaacctggctcctgcagacccc

SEQ ID NO: 271446 - DNA, 100 bp, Homo sapiens
agagaagtcacaaaacagcagatttcccaagagcagcggaaaatgatccagtcacaggtgtctgcttttggggcagagttttcatcggaggcatgcagag

SEQ ID NO: 271447 - DNA, 50 bp, Homo sapiens
aaatttcctgaacacaccattatggcatgaggatgtggcctgcatgctgc

SEQ ID NO: 271448 - DNA, 100 bp, Homo sapiens
tcctgcaacacctgcggcctcactgggacccccaggaggtgaccctgcagaaacaaaggatggagtatggcccaagaccagctgatactccccctgctcc

SEQ ID NO: 271449 - DNA, 50 bp, Homo sapiens
gagaatttgtccaaatacaaagacagggaaattcaactactgaggaggtt

SEQ ID NO: 271450 - DNA, 74 bp, Homo sapiens
aaatccccacctcccacctggctacctatttccccagtttccaggtgtggacgaatgtggaacctcgctctgtg

SEQ ID NO: 271451 - DNA, 100 bp, Homo sapiens
taatcctcaatttaagcctgatctaacccctagaaacagatttggagcaagaggtggtggtggccttcccccgaagaaatttggtaatcctggggagcgt

SEQ ID NO: 271452 - DNA, 99 bp, Homo sapiens
cagcggaggtggcagaagcaagtacgccaaaatctgctttgaggataacctctgataggaagatgtcttcaggaaatgctaaaattgggcaccctgccc

SEQ ID NO: 271453 - DNA, 75 bp, Homo sapiens
atggatcttgaccccaaggatatattattttattccaagaaagatcagtccatttgacgtggaggacatgaccgc

SEQ ID NO: 271454 - DNA, 75 bp, Homo sapiens
tcggatacgatagaaaatgtaaaggccaagatccaggataaggaagggattcatccaaccatcatttctgagtca

SEQ ID NO: 271455 - DNA, 50 bp, Homo sapiens
aagaagaagcaactgtacaaaccatgctggagtgcagtggcgtgatctcg

SEQ ID NO: 271456 - DNA, 83 bp, Homo sapiens
atgcgggagagagaatgagccagagggacacgctggtgcatctgtttgccggaggagttcttggagtctctgcggagtccctg

SEQ ID NO: 271457 - DNA, 105 bp, Homo sapiens
gaggaaaagtagaaattgatcagcaacaactaactcagcagcaacttaatggaaactagcatcttcatgatacagttaagaggaatcttgacagcgccacttccc

SEQ ID NO: 271458 - DNA, 94 bp, Homo sapiens
acggagctgggcgacgagctgaccctgggagacatcgacggttattcagcttctcaaggctggaaaagcgaaggaagtttcctacaatgcacta

SEQ ID NO: 271459 - DNA, 75 bp, Homo sapiens
tagctgaatgtgttactccattgctgaggagtggcatttggctttatgtcccgagttgccctacaagcagagaag

SEQ ID NO: 271460 - DNA, 51 bp, Homo sapiens
cagcacgacaccttcttccttcgagttgccttgttgaaggggatgctaaag

SEQ ID NO: 271461 - DNA, 98 bp, Homo sapiens
gggaaggcgcgagtgaggaaaggaggtactgtaggtaaaacagaaaggggctcatactcatcttatgggagagaatcaaacttacagggttgccacca

SEQ ID NO: 271462 - DNA, 95 bp, Homo sapiens
ggacgaagttgccggaggggcgcgcaaagccacgaaaagcaaactttttgagtttctggtccatggggtggcatggagggatttttgaaatcaga

SEQ ID NO: 271463 - DNA, 75 bp, Homo sapiens
gcagccgatccagcctgcggagcctgtggggcagctcagggagccaatggtactctggagaacccagccctggac

SEQ ID NO: 271464 - DNA, 100 bp, Homo sapiens
gagcttcgagacagactggatgagcagcaaagggtcctggaaggaaagaatgaagaggccctgcaagatctttgtagaatttgatggctgtaactggaag

SEQ ID NO: 271465 - DNA, 82 bp, Homo sapiens
cgaacgaccaagagggtgttcgactgctagagccgagcgaagcggaagatcagttttcctgccatccaggctgctccctcct

SEQ ID NO: 271466 - DNA, 82 bp, Homo sapiens
agagagaagggtgatgaatcagagatgaagcccatgaacgtggaatatctcatgatggacgcctccatcctgctgcccccaa

SEQ ID NO: 271467 - DNA, 75 bp, Homo sapiens
agctgtgcagccgcgaggaggcgcgggaggtgttcgagaacgaccccgagacgacgagccaaactcaggctgtac

SEQ ID NO: 271468 - DNA, 90 bp, Homo sapiens
ggagagcgacagcccaagtcaccagggtcccctcctaaccgcaagcgtcctgctaacgagaaggcaactgatgactatcattatgagaag

SEQ ID NO: 271469 - DNA, 74 bp, Homo sapiens
cacaagctactgtgagttgctgcaaaataaagtccctttgctcgttggtgacaaagttcctgctgatataaggt

SEQ ID NO: 271470 - DNA, 75 bp, Homo sapiens
aggctctggactgggttcctacctcttagaacggctgaatgacaggtactttgacccagccaacggcaagttcag

SEQ ID NO: 271471 - DNA, 100 bp, Homo sapiens
aagattcttcgttgtcaagccgccaaagtggagagtgcgattgcagaagggggtgcttctcgtttcagttgacttgctggtgaaggtgggggaggttgtg

SEQ ID NO: 271472 - DNA, 99 bp, Homo sapiens
gcagtgcgccctggcgctggagatcagctcacgaatgacaacagagctgctcaaggcgggaactctgagctaagcagtggaggtttctctggatctgga

SEQ ID NO: 271473 - DNA, 74 bp, Homo sapiens
gaggctccagaaacgggtcctgctgctcaccaaggtgtaccttccggtttcccagcacggccatcaagatccag

SEQ ID NO: 271474 - DNA, 105 bp, Homo sapiens
ggagcgtcccggtgcggctgcacgtctcgcggatcatgctccctgatgatattgggacctgctggtatatccttctttctggttccgtgttcatcaaggaatcca

SEQ ID NO: 271475 - DNA, 98 bp, Homo sapiens
tgccaattcatgaagcagcttatcacaactctgtagaatgtttgcaaatgttaattaatgcaggtgctgttccagaattcaaagaagagaaactgcag

SEQ ID NO: 271476 - DNA, 100 bp, Homo sapiens
ggaaatcctcatccctgactttgttaaacagacctctgaagagaagcccaaagacagtgaagaactcgagggctggacatggaggaaggcaaggaaggag

SEQ ID NO: 271477 - DNA, 118 bp, Homo sapiens
atcgagaggatctggtgtaccaggcgaagctggccgagcaggctgagcgatacgacgcaattctgtggtgttcttggtcacacatttatggagtttctgaagggcagtggagattact

SEQ ID NO: 271478 - DNA, 75 bp, Homo sapiens
agagctccagcagccttgttagggcgtggcctgaggcttggataagtggggttctcagaggcactgtgactgact

SEQ ID NO: 271479 - DNA, 50 bp, Homo sapiens
aagcagcagtgaggacaccaaagttttaacttctagtcatggcgaatgat

SEQ ID NO: 271480 - DNA, 75 bp, Homo sapiens
ggtgtgtgggccagcggagctccgtgatcttccattgtttgaagcactggacctttaatccactgtaggtatgga

SEQ ID NO: 271481 - DNA, 101 bp, Homo sapiens
acgacaccgatttcctctcgccgagcggcggtgaagatagtgatccggggagacaggaacacgggcaagacagcgctgtggcaccgcctgcagggccggcc

SEQ ID NO: 271482 - DNA, 75 bp, Homo sapiens
agctgttcgaatcatctgatatttatactgaatgagttactccaatggagatcttcgtggatgatgagacgaagt

SEQ ID NO: 271483 - DNA, 100 bp, Homo sapiens
gtcaaacctgtgagttcaacatgatagagcagagtggaccaccccatgaacctcgagacgagttgtactgctgtcacaggaaatggacgctggattacaa

SEQ ID NO: 271484 - DNA, 82 bp, Homo sapiens
agacgcagccgtagacaccagctccgaaatcaccaccaagcttccccgggcgctgcctggacaggcctgcctgcgtgctggg

SEQ ID NO: 271485 - DNA, 100 bp, Homo sapiens
aatcatggtgcagaaataccagtccccagtgagggtgtacaaatacccctttgaattaattatggctctacaaagcccaaggtgttatagatgaccttgt

SEQ ID NO: 271486 - DNA, 73 bp, Homo sapiens
ccttgccttgagtcagtgcgccgctctccagcccgcttgaacgggccgttgctccagggagaactgcaaatat

SEQ ID NO: 271487 - DNA, 75 bp, Homo sapiens
agaaaaaggcctcatccttttcacatgatgtaggaaggtctgttgcatgagcacccagtcagcttgaagagtttc

SEQ ID NO: 271488 - DNA, 83 bp, Homo sapiens
aaggattccaagtaactcttatttggtgattttctatgatagcgactggaaccccactgtggaccagcaggccatggacaggg

SEQ ID NO: 271489 - DNA, 97 bp, Homo sapiens
aaagaagaaaattgctggaataatgaccttgaatagaggaaatgggatatcatctgctgggttaacaactttggccatgaaggtcttggactcttat

SEQ ID NO: 271490 - DNA, 98 bp, Homo sapiens
gcttcatctcagtgctttcataagtatgaagtgcatatatttataattttcactaatcacaggggatgttcacggaacgccagccaccaaagggccag

SEQ ID NO: 271491 - DNA, 51 bp, Homo sapiens
cgctggcgcgcagcctcagctagacttaattcagtgcacaaatgagatgaa

SEQ ID NO: 271492 - DNA, 109 bp, Homo sapiens
ggccgacttcgatgatcgtgtgtcggatgaggagaagcaactttcatcctttgaaacgtgtgctgaaaaagaagaatcagcaaatactactgaaagtgcaatatttgag

SEQ ID NO: 271493 - DNA, 90 bp, Homo sapiens
ggagcgtccggagctagctggatcctctaggcagatgccgaatataccaactctcctttggtacctacattctgtactcctggtttgaaa

SEQ ID NO: 271494 - DNA, 74 bp, Homo sapiens
ggaggaatccgagaagagcagagcggagggagccccagacacgtcccacagaacaacgagaagcttcaggagag

SEQ ID NO: 271495 - DNA, 51 bp, Homo sapiens
ggaatatatcctgactgattcctcctgacaaggtgatccgggcgggccccg

SEQ ID NO: 271496 - DNA, 90 bp, Homo sapiens
catgtcatccacttcgcccaacctccaggctgctctttggcgtaaattgcaatcgattagggatcgtttctcagaatcaagttagaagtg

SEQ ID NO: 271497 - DNA, 82 bp, Homo sapiens
actcatctcgcacgtgacccccctccctcttcaaggaactgtggctgcaccatctgtcttcatcttcccgccatctgatgag

SEQ ID NO: 271498 - DNA, 82 bp, Homo sapiens
ctcggggtctggatattcctaaagtccagcatgtcatccattaccaggtggcacaagaatggctcaactctccaaatagaga

SEQ ID NO: 271499 - DNA, 75 bp, Homo sapiens
gaagaagggaaggcgcgagtgaggaaaggaggtactgtagacaaatttacatgtattggagaccagaccagaagc

SEQ ID NO: 271500 - DNA, 78 bp, Homo sapiens
cacctccttctgccccaccctggtcacttccccaccggaggtttatcacaaggatgaaacaggcgcctatttaatcga

SEQ ID NO: 271501 - DNA, 90 bp, Homo sapiens
attccatccctgaatgtagattgtgcagtgctcgactgtgaggatggagtggctgcaaacaaaaagggctctgcttcaaaaacaacgacc

SEQ ID NO: 271502 - DNA, 90 bp, Homo sapiens
acatttagaaattctttttacaatgtgtaggaagaacactcctatgccaccttcaccagctgtacaagtgcagggccagcctaacagttc

SEQ ID NO: 271503 - DNA, 100 bp, Homo sapiens
cggagcgcaacactcgcttggttggggagatcggcgcttggccggaaatcatcgagttccccatcctaaagctaaatggccggaccatggagattgagtc

SEQ ID NO: 271504 - DNA, 74 bp, Homo sapiens
atgaccacaacaagcaagcatgcagcttactgcttgaaagggttaaagcacgaattgggagctctcagcgacat

SEQ ID NO: 271505 - DNA, 75 bp, Homo sapiens
aaatgatgtattttgtgatcgcagcgatgaaagtaatcaagatgattaccaactggttcgaaaacttggtcgggg

SEQ ID NO: 271506 - DNA, 90 bp, Homo sapiens
gtggcggcgctgctgctcgggctgctcttggaggtattgttgcagcatctggcagtgagactgaggatgaggacagcatggacattccct

SEQ ID NO: 271507 - DNA, 83 bp, Homo sapiens
ctcatttcccaacttcaggaagagctgagctttcattgttgaggttcctcagtgctgaactaacaagagggtacttccttgaa

SEQ ID NO: 271508 - DNA, 100 bp, Homo sapiens
aagcagctcattcacatacagcgcccctggccccaacatggcccgtcgctctcagagctcctcgcagggggacaacccactggcacccgggtacctgccg

SEQ ID NO: 271509 - DNA, 100 bp, Homo sapiens
agaagaaatggcggacttctacaaggaatttttaagtaaaaattttcagaagcacatgtattataacagctgacctgatctccagcttcctgctcatcac

SEQ ID NO: 271510 - DNA, 83 bp, Homo sapiens
acggcgagcgcgagcggcgcgagaaagcacaaatcctgaagagcccgtgggcgtggactgctcatctgtaaagaaagtggaga

SEQ ID NO: 271511 - DNA, 76 bp, Homo sapiens
cgggctctgccaggagagaagactggttcgagaacttgtcttggacaattgcaaatcaaatgatggaaaaattgag

SEQ ID NO: 271512 - DNA, 100 bp, Homo sapiens
gcgaaacgatcctctcaatcaaaataagtttgggaatacctgctactgcaattcagttcttcaagcactttatttttgtcgtccatttcgggaaaaagtt

SEQ ID NO: 271513 - DNA, 124 bp, Homo sapiens
ttgctgctgctggattcagtgtgggagagtttgcagccctagtgtttgccggagccatggaatttgctgaagactaggactcaatgaaattgctgcccccatgttcctgaggctctgcaagctg

SEQ ID NO: 271514 - DNA, 87 bp, Homo sapiens
tgcgtgaggccgcggagcgccagctcaatgaaggtgcctctgccaactggtggaatcatcgccacttccagcaccacgccaagccta

SEQ ID NO: 271515 - DNA, 95 bp, Homo sapiens
aaaccatgggttattgcagtggcaggtgcacgcttatctttatctgtggcatgcaactgagttgaagttggtgaagacattcatgatttaaacac

SEQ ID NO: 271516 - DNA, 96 bp, Homo sapiens
cactttagccctcagctctgtatcagaaagaacaagatcctgatttttgggctcctggaggagacggcgttggctgcctttctctcttactgccca

SEQ ID NO: 271517 - DNA, 90 bp, Homo sapiens
catcagtctatcctggcaaaacagcagaagaaatttggagaagaaattgcaaggttacagttgtatatgaacacagatcaagattagaga

SEQ ID NO: 271518 - DNA, 100 bp, Homo sapiens
agtggaagagaaaattgtgaactaaggccccctgcccccttttcctggtgcatgtgaagttatcaaaaacagtttattcccatgccagtgctatatggag

SEQ ID NO: 271519 - DNA, 50 bp, Homo sapiens
tccatgtcggcttgtagagagattgcaccttcaccctgccatttctagtg

SEQ ID NO: 271520 - DNA, 96 bp, Homo sapiens
cggcagctgtggccaacagcaacagagagagtccagcacacttccaccctgggcagcgtgtttggggacgcgtactatgagcagcagatggcggcc

SEQ ID NO: 271521 - DNA, 116 bp, Homo sapiens
tgaagatccattggtaaattgatcaggatttttggcctaccctccaaagaaaagtgaatggtagtgtctagaaagggtatgtcccttcaagagagaggtgccaatgtccaaccggc

SEQ ID NO: 271522 - DNA, 83 bp, Homo sapiens
cgccgcgggcgccgggagcgagctgggagggagccgcgcgcctttgtgcgcgcgccgagactacatgaggaaataattgactt

SEQ ID NO: 271523 - DNA, 101 bp, Homo sapiens
gatgccttcaatactacctttatttccaccataggtaccaaccaagaagctgaagaaatatgagaaagaatatcagacaatgcgagagagtcagctgcaac

SEQ ID NO: 271524 - DNA, 100 bp, Homo sapiens
ttcctgtagaaaaagtagatgttatcatatctgagtggatgctatttgatggcattgaatgtgaatttcccatatttttcctttatatgatgattgatgg

SEQ ID NO: 271525 - DNA, 98 bp, Homo sapiens
cggacttcgtggtagaatccattggctctgaagtggggtctctggctctggccaggctgccgcacctctacaggaactttgccgcggagcagtatgcc

SEQ ID NO: 271526 - DNA, 82 bp, Homo sapiens
ttttatattcatctcaaaaacaaaattctgaactcaggacttggcaagagaaaacccaattcctattttctttaatcaagga

SEQ ID NO: 271527 - DNA, 75 bp, Homo sapiens
caagttctcgtggagtcagacaatgaggtaattcatttgcacacctgttagcaagaaacagaagttgaaggactg

SEQ ID NO: 271528 - DNA, 76 bp, Homo sapiens
tggtgggggccacaccatttgccgtggccaggctagagggtgactatgaccagagcaggaccaaagtgctgcacat

SEQ ID NO: 271529 - DNA, 98 bp, Homo sapiens
tgacgctctgaacatcatcgacatggccctgagtgaatacccagaaaatttcatgtagagtataaatgtgaaggtttcctggagaaaaacagagacac

SEQ ID NO: 271530 - DNA, 90 bp, Homo sapiens
ggaacttcaagccgaagccaccgtcagcgggagccccgaggccccagggaccaacgtgctagttcttctggagctcaacttcttgccaac

SEQ ID NO: 271531 - DNA, 82 bp, Homo sapiens
cttcgagtgacccgggtgccgaggagcgggaagagttgctggggtgacgcggcgcacggcgcggatggtggccgagtggcag

SEQ ID NO: 271532 - DNA, 75 bp, Homo sapiens
caggtgaactggaggagcgatttgccatcgtgctgcaccagcagaaccaaaatcgtgtgtggtggcagatcctcc

SEQ ID NO: 271533 - DNA, 73 bp, Homo sapiens
tcagagttggataagcacttggaatcacgggttgaagaagaatggttgagaccggtgatgagaaaagagaagc

SEQ ID NO: 271534 - DNA, 75 bp, Homo sapiens
ccctggctggacttgcggagtccccgccgaagaacccgagtttgaagaaaacaggtctgaaacaaggtcttaccc

SEQ ID NO: 271535 - DNA, 101 bp, Homo sapiens
tgtctcctggacctgctgcctgactacctggctgccatagatgaggccctggcagccttgcacgtgacggggtattccctcagcggatactacacccatcc

SEQ ID NO: 271536 - DNA, 100 bp, Homo sapiens
tgcatcgcactcttcaaccaggagctggtgtctggctctgagctcctgcagctcgtcagcccatttctgggatcatggaagggaagtggttgctgtgtat

SEQ ID NO: 271537 - DNA, 90 bp, Homo sapiens
gggggtagtcaagatgttgctttaggaaaaccacggaagctgaaggtcttggtgttgaacctgcaaccatggtcgtgccactagccagct

SEQ ID NO: 271538 - DNA, 50 bp, Homo sapiens
cggccgagcggcgacggaccgcgagtctccaaacgtccacaactatcccg

SEQ ID NO: 271539 - DNA, 82 bp, Homo sapiens
ctccaggacagcatccaggcctcattggacagcattcgagggcgccatgttttggaagtttgacctgcacacaagctcgcac

SEQ ID NO: 271540 - DNA, 100 bp, Homo sapiens
tgatttcggaacctggagaaaatgagtgtacctcacagccttctaggatctccagagtggacaggaatctcacttggagggaccatggagcagtatacag

SEQ ID NO: 271541 - DNA, 80 bp, Homo sapiens
accagctgcggaatttgcggctttggcagggaggaggtacaggagaactgtgtgcggtggcgaaagaggttcaccttcgt

SEQ ID NO: 271542 - DNA, 95 bp, Homo sapiens
gagcagcagctgggcattgctgaggatctcaaggaccgggctgcagaggggcgagcatcctccaatctaggctggtgggccaccaaaaaagggga

SEQ ID NO: 271543 - DNA, 100 bp, Homo sapiens
aaacagctccagtacaagcacctcctgctccagtaattgtacatagtactctgaatcaatggagaaatggatattcacctatatgtaagcctcaaataag

SEQ ID NO: 271544 - DNA, 100 bp, Homo sapiens
tcagcagcattggtgaagttgaatctgcaaaacttattcgggataaagtagcagatgccatggacaatattaccaggcagaaccaattctacgataccca

SEQ ID NO: 271545 - DNA, 83 bp, Homo sapiens
gacttcatcacctctttgtacatcttctgcaattactcgacatatctgaagagatggattaagaatgctttggattaaggatt

SEQ ID NO: 271546 - DNA, 83 bp, Homo sapiens
caggggttgaactgtggagtgtgtggatgatatcatcaagttgaatcgaaaggaagggaagaagcagaattttccaagactaa

SEQ ID NO: 271547 - DNA, 74 bp, Homo sapiens
gggcattggcgtggacaccattgacatggtgatggctgctcagcctcgaagatatcattctctgctggaactgg

SEQ ID NO: 271548 - DNA, 75 bp, Homo sapiens
atgttacagaagagtcaattaaggaattctttcgaggattaaatgtttcctatcctgggagcaggagagtgtgcc

SEQ ID NO: 271549 - DNA, 100 bp, Homo sapiens
tggctttccagatagcactggagatcctcttccagggccagtgcctcagtttcaatccaggtaacctttaaatgaaacttgcctaaaatcttaggtcata

SEQ ID NO: 271550 - DNA, 82 bp, Homo sapiens
ggccttcgagagctaccgcgccagacaggatggatagaatgacagaagatgctcttcgcttgaatctgttgaagcggagctt

SEQ ID NO: 271551 - DNA, 75 bp, Homo sapiens
ggagctgctgaatcctgcccgcgtgaaccacatgcccagcacgggtgttggggatgtcctttgcactgaccctga

SEQ ID NO: 271552 - DNA, 100 bp, Homo sapiens
cgtggagaagacttggaagctcatggacaaagtgattgtgtcagcagctaaggtgtgtggagctgccagtgagtcaccgtcagtgaagagcctccgcttg

SEQ ID NO: 271553 - DNA, 83 bp, Homo sapiens
agaatgtggagagttttctagaagcctgtcgaaaaatgggggtgcctgaggtcatcatcagatttgaaatatttaaagtggat

SEQ ID NO: 271554 - DNA, 125 bp, Homo sapiens
ctgcatcggatcaccggcgtgccccaccatgtcagacgcagccgtagacaccagctccgaaatcaccaccaaggttctccttactatgacaatgtccgccccctctcttaccctgattcggatgc

SEQ ID NO: 271555 - DNA, 100 bp, Homo sapiens
atcccattcaacagactcacaattggagaaggacagcaacaccacctggggggagccaaacaggctggtgcagacatctccatgattgggcagtttggtg

SEQ ID NO: 271556 - DNA, 95 bp, Homo sapiens
aatgaggcaagttatcctttggaaatgtgctcacactgttaatgactccagagagtaagatcagattcgtccacaaagagatgggcataatacca

SEQ ID NO: 271557 - DNA, 97 bp, Homo sapiens
gaaaggctctggaaagatgtggtgatggggcattcttgctaacaacaatcgggaccagtattcacatctgctaagtgatcattttctgccataccaa

SEQ ID NO: 271558 - DNA, 100 bp, Homo sapiens
atttaaccaacctcagctttacaaaccctgaatttataactgagtgtaatctagctcctgtggtggagtttgctgcagatgtgggaactaaatcagattt

SEQ ID NO: 271559 - DNA, 90 bp, Homo sapiens
ctcctatacaagattaacattcaattggggaccacaaattcagtgcccaccggattgtcttagcagcctcgatcccgtatttccatgcta

SEQ ID NO: 271560 - DNA, 90 bp, Homo sapiens
caaccattgacgccatgtcgggttattcgagtgaccgagaccgcggccgggaccgagggtgtttccccccgggccggcctgccgtgacga

SEQ ID NO: 271561 - DNA, 102 bp, Homo sapiens
actactagaaggggaggggagtggaaaggctctcagtgaaaaaggagtatctaactatcaagttgaagaagatataggaaagttgaagtcttgtctcactgg

SEQ ID NO: 271562 - DNA, 88 bp, Homo sapiens
gcaatgtcacttacaacattaatcagatactgcatttaaggggccagtgtcattcaaagatgtggctgtggatttcacccaggaggag

SEQ ID NO: 271563 - DNA, 75 bp, Homo sapiens
gcaatgaatgacagcactgtagaacagctttatgaaacagcttgcttcctacagattattgtggatgatgatgac

SEQ ID NO: 271564 - DNA, 50 bp, Homo sapiens
ggtatagcccaccagaaaggacagggccacccagtgctcctgcagaagat

SEQ ID NO: 271565 - DNA, 90 bp, Homo sapiens
ttggcccagaaatttcagctgcagttatgaagatttttgatgctgccaaatggaaattgcaacactaacaagagagaatggaaagacagt

SEQ ID NO: 271566 - DNA, 100 bp, Homo sapiens
agcctgcccaacttctgcgggatcttcaaccacctcgagcggctgctggacgaaggtttggtgcacctcgatttggaggaagtagggcagggcccttatc

SEQ ID NO: 271567 - DNA, 75 bp, Homo sapiens
tggattcctactacaggacaatcaaaggattcatgcttactgcagtgcatggtattcagtcagcttttgatgaag

SEQ ID NO: 271568 - DNA, 75 bp, Homo sapiens
gtgggcttccagagacagctccaggagtttgagaagcatgaggtccatcaggcttgggcactgtttaaaggaaag

SEQ ID NO: 271569 - DNA, 90 bp, Homo sapiens
gacaggcttactgaatatcctcttataattaatgcaataaaacgcttccatctttatccagagaatgtgacagtgatgataacatgggtg

SEQ ID NO: 271570 - DNA, 75 bp, Homo sapiens
ggtcgaacagttttttctaatggctattcaagggctgtcagaaatcccgatgatcttgaagcaaggtctcatatg

SEQ ID NO: 271571 - DNA, 143 bp, Homo sapiens
tgtcatttgtgcattttgggtgtacaggcatcacaagatggcctaccctcctgtacttgttccaactcaatacctcaacatgctaaggacttgtgagggctacaatgaaatcatctttccccactgtgcctgtgactccagga

SEQ ID NO: 271572 - DNA, 100 bp, Homo sapiens
tagggttctaagtgatgtccaggaaggaggaggaataatatttatggagcatatattatggaacacaggcatcattcagaagatagtggacagtcacaaa

SEQ ID NO: 271573 - DNA, 75 bp, Homo sapiens
atcgaaatgtccatgagaaaaagcttggagataaagttgctttttactggcagcctgcttctgcaaagtggtacg

SEQ ID NO: 271574 - DNA, 75 bp, Homo sapiens
tgtggggctgggtctcggagtgggagacgtggagtgcagcgagacggtcatctgttccagccgggccactgtgat

SEQ ID NO: 271575 - DNA, 74 bp, Homo sapiens
gggcggccacgttcccgctgcagacgagccaaactcaggctgtaccttgagcagctcaagcaactggtgcccct

SEQ ID NO: 271576 - DNA, 75 bp, Homo sapiens
tggcagcaaggaggtgaccctgaacctctacgacacggccgctctctccttcctgcttcctccttgctgtggtgg

SEQ ID NO: 271577 - DNA, 100 bp, Homo sapiens
gtctgcctgtgtccctgaccatggctccctgcagtaccctttaacggttctttggcatggacacaagttcagtgggaggattagaattgactgatcagac

SEQ ID NO: 271578 - DNA, 100 bp, Homo sapiens
ccatcatatgctgaccttggcaaagctgccagagatattttcaacaaaggatttggtgattgtggaaaaggtctcaggctctcagattgttgacattgac

SEQ ID NO: 271579 - DNA, 75 bp, Homo sapiens
agatgcgcgcgatgctggaccagttgatgggcacctcccgggacgttggattggatgctgctggcaagacaacca

SEQ ID NO: 271580 - DNA, 50 bp, Homo sapiens
gctgtggcacggtcgggtccgggagtcattcttatagaagagcatcagag

SEQ ID NO: 271581 - DNA, 100 bp, Homo sapiens
tagagaagagcttcagaaacagagactgacagatacattgataactccatttgtgggtttaatagaccacaacttccaggcccagccgaatcctgctgaa

SEQ ID NO: 271582 - DNA, 82 bp, Homo sapiens
tcctcctgaggcaccacgtctctaccgagcacaaactccacgaagccaacgcccagggaaggtctgtttctctaacaacttt

SEQ ID NO: 271583 - DNA, 82 bp, Homo sapiens
ccggtgatatgatctgtcctgaatgtggcttggttgtagcactgccagtgaaagatgtagaagataaacctgaacaacaaac

SEQ ID NO: 271584 - DNA, 101 bp, Homo sapiens
gatcttgattgtgacctctgtggaaaatgagccatgaaccaaccaatgtgacagatcagtcagtgaaagcatttgctgaacactgtcctgagcttcaatat

SEQ ID NO: 271585 - DNA, 82 bp, Homo sapiens
ctgtcttcggtggactccttcggcagtccacccaccgccgccgcctcccaggaccccaatgaggatgagccaaacatccgag

SEQ ID NO: 271586 - DNA, 50 bp, Homo sapiens
gaaactgtacattgaagcagagagagacaagagagacacctccaacttcg

SEQ ID NO: 271587 - DNA, 74 bp, Homo sapiens
cttcattgatgccacaaccataatagaatgtctacattcctgaatttgctgattcccttggaattccgtttttg

SEQ ID NO: 271588 - DNA, 75 bp, Homo sapiens
gtttctcacgacgggccgagcctgccactaagctccaccatgaggcgaggtggatggaggaagcgagctgaaaat

SEQ ID NO: 271589 - DNA, 75 bp, Homo sapiens
ctcttattcaagaagcatctataggcatggtggttttctggaaccttcccactaactcacccctgcagcggatac

SEQ ID NO: 271590 - DNA, 98 bp, Homo sapiens
gctcttccccagctgcccggtgcccgaggaggcagccaagctcatggcctgccactgcgtgcatcaatgtaaccactgtgcgggaatatctgccagaa

SEQ ID NO: 271591 - DNA, 100 bp, Homo sapiens
tagttgagaagcagaacccagctgaaggactgaccgagtgacggttctctacaggagcaaagccattcgctatacctggccttgtccatttcctatggcc

SEQ ID NO: 271592 - DNA, 75 bp, Homo sapiens
aaggagctggcggacatcactttagaccctccacctaattgcagcgtcatcacgtagacataaccaagaaacttc

SEQ ID NO: 271593 - DNA, 100 bp, Homo sapiens
gctatatttaacggagatcctgatgaagttcgagcactaatatttaagaaagaagatgttaactttcaggtggatcagtacaagggaaagcgggatttgg

SEQ ID NO: 271594 - DNA, 101 bp, Homo sapiens
gcaggacgactatatcccataccccagcatcgacgagaccctgctctctattccagaggtggtgaggggatgcaaagaactacagggattgctggaatttc

SEQ ID NO: 271595 - DNA, 82 bp, Homo sapiens
gatccagcaaggtcggcagagcaaggggcttacgcagaaggacctggccacgccttctacaccagcaggtacggctacaaga

SEQ ID NO: 271596 - DNA, 83 bp, Homo sapiens
ccccttcatgcccaaatcccggaaactccagcgtgtctccagccgtgctacgagttccagggagctctgtcctggtgaccgtg

SEQ ID NO: 271597 - DNA, 98 bp, Homo sapiens
tcatctcggagactagaggctggataccaaatagcagtggaaaccgaaaagggagatttcattgccctggatcttggtgggtcttcctttcgaattct

SEQ ID NO: 271598 - DNA, 100 bp, Homo sapiens
caccctacacgtcataaagtcagatcttgtgaatgaagaagcaactggccagttccgggtataccgttacctgtcctgctgccgattcctggatgacaat

SEQ ID NO: 271599 - DNA, 100 bp, Homo sapiens
gcgccctctatcatcttcattgatgagttggatgccatcggcaccaagcgggggcatgtgtccgtttcgccacatcagtggtgagaagacagttgtgtgc

SEQ ID NO: 271600 - DNA, 75 bp, Homo sapiens
ggctgatgcagcaggcatcatccgctatgcaattggggttccgaatctattccaaccattctgcactggagtcgc

SEQ ID NO: 271601 - DNA, 90 bp, Homo sapiens
agcaatgtttgaacaaactcgaagaacagctgtggaaagaagttgcaaaacactgggcctcccagaagttcctgccgaatcgtcttcgtc

SEQ ID NO: 271602 - DNA, 96 bp, Homo sapiens
ggtgctcaaagagaaaatgcgactcgaaggacagctggaagccttgtcactggaggcgagtcagcaaaaaggcattgggatgaacgagccgctggt

SEQ ID NO: 271603 - DNA, 75 bp, Homo sapiens
ccgggtgtgagctgcctgaaaatgcactcggatgccgccgctgtcagtgttttagctcacttggaaaggctagag

SEQ ID NO: 271604 - DNA, 98 bp, Homo sapiens
cggctgcaggcttcagcctgcgctggttggtgaaacagagatgtcagatgtcacacaccaagccctacatcaggaagaaggctgtgctgatcatgtac

SEQ ID NO: 271605 - DNA, 48 bp, Homo sapiens
ggatttctctcttctggctaacagcccctcatatggaaaatttgaaat

SEQ ID NO: 271606 - DNA, 75 bp, Homo sapiens
aaagtacctactatgtgtgtggactggagtaacatcagacaactcttgaaatgaatcctcctgataacatcaagg

SEQ ID NO: 271607 - DNA, 75 bp, Homo sapiens
ggttttcaggaccaaaattgtggaaaagtcactctggaacttagtgatttggcccgtgaccctccagcacaatgt

SEQ ID NO: 271608 - DNA, 75 bp, Homo sapiens
gttcgttgtgccagcgactaaaaagaggcatggaagaggagatggttcgtgttacgcagtggccgtttaactgga

SEQ ID NO: 271609 - DNA, 90 bp, Homo sapiens
atagaaggagaaaaggaggttaaatctacagcccctgagactgccattgagctggagttggccacggccaagaacgacatgaaccggcac

SEQ ID NO: 271610 - DNA, 80 bp, Homo sapiens
atgatcctggccagcctgctcatcgcctactgcaagaagttgatgacgcctgagatgttttcagaaatcctctgtgacga

SEQ ID NO: 271611 - DNA, 98 bp, Homo sapiens
tccgacttgccccccaggttaccactaaaaatgccactggccaccacggcactttacttcacatactcagccctcgaggaggaaatggagcgcaacaa

SEQ ID NO: 271612 - DNA, 90 bp, Homo sapiens
tgaccgaaatcgccattgctgcccagcagctaggcatcaagtacatcgggatgaggaatgagcaagcggaaagaccacagcaagattctt

SEQ ID NO: 271613 - DNA, 50 bp, Homo sapiens
cagggacagtggcattgctcgatcaggtgcatcatttctggcatggcttc

SEQ ID NO: 271614 - DNA, 74 bp, Homo sapiens
ggcttctgcctggtgctctgcgtcctcatcgggcttatgttcgaggatgacagtgatgggattccgtggtcaga

SEQ ID NO: 271615 - DNA, 97 bp, Homo sapiens
ccttggcaacttcttccttgtggacttcgagcagtcgcacctggaggttcagctggtaggagtgggagaaggtacaggacacaatatccaatcctag

SEQ ID NO: 271616 - DNA, 76 bp, Homo sapiens
cctacaacagtttggcgtgcaacatggggcttgagaaaggtgccggtggtggtgtgcacattgagccccggtatag

SEQ ID NO: 271617 - DNA, 87 bp, Homo sapiens
gcactggatccacccagtgaccggacttctcacccccaggatgtcatcgaggccagagactgctgctactttgaaacgtacgataga

SEQ ID NO: 271618 - DNA, 100 bp, Homo sapiens
cctgagcccgcggcgctgagccagccgggacggacatgcgcgggagggcgccgcggggcagccgccgctcctccggggagtgaaacacaaatcttttcta

SEQ ID NO: 271619 - DNA, 100 bp, Homo sapiens
ttcctggttggagggacagccccaggatgccgtgggccgcagccactcaggactgtcaaagagtacaggggctcaggtccaggtggcaggggatatgcta

SEQ ID NO: 271620 - DNA, 75 bp, Homo sapiens
ccagaaccacagggcctcttacaaggctgaccagtgcaccggtcttcagggcttcttggttttccacagctttgg

SEQ ID NO: 271621 - DNA, 83 bp, Homo sapiens
cagggggctcccgggtcatcagccactacgccgggcaggatgccacgacaatgcagatcttcgtgaagactctgactggtaag

SEQ ID NO: 271622 - DNA, 100 bp, Homo sapiens
ttccacaccaagtacatgatgtggttccagaggcacgaggagcccaagaccatcactgacgagtttgagcagcagcctggaggctgaagctcaaaagaag

SEQ ID NO: 271623 - DNA, 90 bp, Homo sapiens
cggagcgccgctgggggccgggacaaggtggagcagacacctcgcagtcaacaagacccggcaggaccaggactccccgcacagtctgac

SEQ ID NO: 271624 - DNA, 55 bp, Homo sapiens
cagagaagcggcccatcctgtctgtgcagaagaggccccctgagccccccggacc

SEQ ID NO: 271625 - DNA, 75 bp, Homo sapiens
ggaggcggcgtggaggcgcgaggaggaggacacagagcacagccaagacctgcagagtgccctcatccggctgga

SEQ ID NO: 271626 - DNA, 74 bp, Homo sapiens
taaacatgtggaatcccaatgccgggaaaaagacctcgatgaagttctgcagacccactcagtgtttgtaaatg

SEQ ID NO: 271627 - DNA, 88 bp, Homo sapiens
agatacattaaatgcaatagcccttcagtactgttgtacggtagtggaggacatgctagaggacgaggaagaagaagatgacaaagat

SEQ ID NO: 271628 - DNA, 98 bp, Homo sapiens
gctgctgcaccgcggcgccgacatcaattacgccaatgtggacggactcactgccctgcaccaggcatcattcttaacaaagaagttaaatattggtg

SEQ ID NO: 271629 - DNA, 100 bp, Homo sapiens
aaaatcatttgtgatgggtcagctagtatgcaggctaggcaaactctatccgtggtcctgaaccagttatgtgtgttgcatgagaaaacgccagtaagtg

SEQ ID NO: 271630 - DNA, 96 bp, Homo sapiens
gagagcgtgaccgagagcgcgaatatcgtcatcgttagaagagacacctctgactctgtcacagctctgcagggtgaacttgaggaaggccactgg

SEQ ID NO: 271631 - DNA, 82 bp, Homo sapiens
cggcttctgctgttgctcttctccgccgcggcactgatccccacaggctgaccccgcactacatctacccaccagccatcgt

SEQ ID NO: 271632 - DNA, 75 bp, Homo sapiens
aactacatcaccgctctgcaggctgttcctcctcgggtcccaccacatcaaccgggtccacctgtagttggtgct

SEQ ID NO: 271633 - DNA, 75 bp, Homo sapiens
ccggcattggatttggccccgcaacatcttaaaggtggttggaggcaaagtaaagaagcccggtaaacgtggtcg

SEQ ID NO: 271634 - DNA, 100 bp, Homo sapiens
gctgcgaatgggcaggcgtatgccgtgccctaccagtacccatatgcagatcactaaggaggaagagcgagagaagaagttttctagaaggctaaatcac

SEQ ID NO: 271635 - DNA, 51 bp, Homo sapiens
cgcgaatatcgtcatcgttagaagaagccagctgaagatgagtggggtaaa

SEQ ID NO: 271636 - DNA, 100 bp, Homo sapiens
ccatcgtgaaggagctcctggagctggttacaaggagaacatcatgcgcctctccagccttcacaaggaccgcccggtggagccgctggacctggccgtg

SEQ ID NO: 271637 - DNA, 113 bp, Homo sapiens
gcgaggccgcagagctaaatgggggcctctccagggagtgctctgttcacggctccatcgctgttattctgtggctcctgatggatctgagaagatggacgtggaggatgaaa

SEQ ID NO: 271638 - DNA, 90 bp, Homo sapiens
tgtcctcgtcctccagctgttatctggaaggtgctggagaatctggtaaaagcaccattgtgaagcagatgaggatcctgcatgttaatg

SEQ ID NO: 271639 - DNA, 74 bp, Homo sapiens
tgtgggctttcattttcagtctttagaaagaagtgtggacttccatatgtggaggtgctgtgtaaaaaccggta

SEQ ID NO: 271640 - DNA, 80 bp, Homo sapiens
gtgtggcaaacctttcttgagctcaggccgccatggcatcagatgaaggcaaactttttgttggagggctgagttttgac

SEQ ID NO: 271641 - DNA, 100 bp, Homo sapiens
gctgaccaagctatccgaccagactggctacgtggagtactacagcttttcggagactgggaagcccaactgcgaagaataatgaagctcattgctggag

SEQ ID NO: 271642 - DNA, 84 bp, Homo sapiens
cctgggcgcaccgcggtgcggacccagcacgcctgggccgggggctgcagcatggtgagaagccctaccactgcaactgggacg

SEQ ID NO: 271643 - DNA, 100 bp, Homo sapiens
agctgtcagaagcagcttcatttaaaagatcaccggggaacccttgatccgtcgatcagatgataatgaaaaggccttgaaaatccgcctgcaagcctac

SEQ ID NO: 271644 - DNA, 136 bp, Homo sapiens
gaaaattcctactggacaagaatatgctgccaaaattatcaacaccaaaaagctttctgctagggagaaagcatgggattatggcaaccacagaatctcagtagtacaagttccattcagttttttctgaaagaaa

SEQ ID NO: 271645 - DNA, 98 bp, Homo sapiens
ctaacatccagaagatcacacagtgttatcagtgtactgttacccggacatacctattccttcacaagttctggttcttcagtgctgcttactatttt

SEQ ID NO: 271646 - DNA, 58 bp, Homo sapiens
tgccctgtctcctcgcagatgagatttctacctggacaaggactggtactatacccac

SEQ ID NO: 271647 - DNA, 80 bp, Homo sapiens
ataggatgaagtaaccttgcattcggctgcaaggtgtactgtacgtacacaggctgaactcacgggaatcaaatggcgta

SEQ ID NO: 271648 - DNA, 90 bp, Homo sapiens
gggaagttacgcgaagtccacccagcgtttctgagtgatgaacggcagcagccactcaccaacagccatcaatggtgcaccgtgcacacc

SEQ ID NO: 271649 - DNA, 98 bp, Homo sapiens
gtgtccggtcccccaaatctgtcgtccctgcccccaggtccacctctggaggtatgaaggaggctatccagccctcacagaagtcatgaataaactca

SEQ ID NO: 271650 - DNA, 90 bp, Homo sapiens
ggcggcgggctggagacatggaccgcggcgagcaagataacaacgaacttgatgcaagtgataggtttgccaaggtcagacctctcatca

SEQ ID NO: 271651 - DNA, 101 bp, Homo sapiens
actgaaagctgccgctgaagctgccgccgttgcctccgccgccaagagtgagcgagcggacccgcgatgggcatggctaatgtaaaagcagccccaaagat

SEQ ID NO: 271652 - DNA, 51 bp, Homo sapiens
ttgaaacatttatttccagtccaaatatgccgagattttgctgtcctggag

SEQ ID NO: 271653 - DNA, 75 bp, Homo sapiens
gccaaagttcatcagagtccaaaatggtgatcaggaacacaaacgtgcagatatctgatagccctttccgttgca

SEQ ID NO: 271654 - DNA, 90 bp, Homo sapiens
gtagtaatgcggagtagtgattgcccatacattgttcagttttatggtgcactcttcagagaggcttatgataggtatcaatcaggattg

SEQ ID NO: 271655 - DNA, 98 bp, Homo sapiens
ctgaacgagagggacacggagcagagagaactcgatgccaccgcaacggtattggcgaaccggcaggatgaaagtgagcagtccagaaagcggcttat

SEQ ID NO: 271656 - DNA, 100 bp, Homo sapiens
ccacctgcgacctcgggtcctcagaccagcccaaggaacatctcaccaatttcaaatcggctacgtaattcgaattgacttgattttttcaagtaatcct

SEQ ID NO: 271657 - DNA, 88 bp, Homo sapiens
acccaataaccaggtgcttggcaaaatcgagcgggccattgggtgtcaaattgagaaccaggtagatccccaccacctacagtaaaaa

SEQ ID NO: 271658 - DNA, 80 bp, Homo sapiens
catcttgtgggagcaaaaccaacgcctggctcggagcagcagcctctgagagtgaagacatttccacctggacacctgac

SEQ ID NO: 271659 - DNA, 100 bp, Homo sapiens
cttcagcctgctcaagaactgcagcattgcagccgccaagacgggaggagtctgctactagtcttatcagctcttaaaaacagaaactcatctgtccaag

SEQ ID NO: 271660 - DNA, 100 bp, Homo sapiens
ccaacaatatttacgaggcagtcaagagagcaagccctggaggttcactctttcaagaagtcgtgtgctgaggtgtaatgctacacaagtcagaggaagg

SEQ ID NO: 271661 - DNA, 90 bp, Homo sapiens
cttggagcttcacaaacggtctcatacagaaatacctcagggactttttcagcgtgatgctccagtccgcaacatctcccctccacatca

SEQ ID NO: 271662 - DNA, 93 bp, Homo sapiens
caagccgctggcagccgcggatctcaccgccgctcaggaggccacaagaggaagctgaatgaagaggacgccgccagcgagtccagcagggag

SEQ ID NO: 271663 - DNA, 100 bp, Homo sapiens
aatgaatttgcccaatgttttgatgattggcagagacccactgtctgctgagatgagtgaactgagtgtggcacagaaaccagaaaaacttttggagcgc

SEQ ID NO: 271664 - DNA, 82 bp, Homo sapiens
cccctttcaactctacttcaacccgcaccttgtgttccggaagttccagggagtgcatccgccccaacccttttccccctcg

SEQ ID NO: 271665 - DNA, 97 bp, Homo sapiens
ggcaatgatagatacatcagtgtgggaagccaagcagatacaagaaccgtggagcatgcaacacatcccggcactgttttcggccttctgtggcctc

SEQ ID NO: 271666 - DNA, 100 bp, Homo sapiens
tgaagggggtgctgagcccaaggatccaccccctcccgggccccattctgaggaccttaaggggaagccatatgtttttgaccgtgtattccccccaaac

SEQ ID NO: 271667 - DNA, 96 bp, Homo sapiens
ccagggtctgcagggcctgggccgccgctgctacctgcagcgccgtgtggcacgacacaaaaatcaggatcccttggttccagtaccccattatct

SEQ ID NO: 271668 - DNA, 51 bp, Homo sapiens
cctttacacagtatcagaacgtttactgctagaccactagtggaaactata

SEQ ID NO: 271669 - DNA, 75 bp, Homo sapiens
aaaagagcttctctccagagtagaaaggatgacagcatggaagagaaaccactaaaagtgaaaggaaaggactct

SEQ ID NO: 271670 - DNA, 89 bp, Homo sapiens
agatgttttccaaacgtatggacagctttttatcctccgttgcagacatggttcaaagatggtttcacccaaatatcactggtgtggag

SEQ ID NO: 271671 - DNA, 100 bp, Homo sapiens
acagttaccaagaagacttatgagatctggcatcgacggcatgactactggctgctagccggcattataaagatattgctgcatatcgagctaaaggaaa

SEQ ID NO: 271672 - DNA, 110 bp, Homo sapiens
ccgcaagactcctgggatagttttcctcttttccaactgcttaataatttcctccgaaatgacagttacaggaaatacaggaggcagaggaacaaataaaagacaccacg

SEQ ID NO: 271673 - DNA, 78 bp, Homo sapiens
ctcaagcactgtttgcaaaggttgcagcaaccaaaagccaggcacttcaggtggcaagacagctccttcttcagcagc

SEQ ID NO: 271674 - DNA, 83 bp, Homo sapiens
gcataaagtaccattcttaatgattatcctcaacaagacaggctcccagccaacctctgataaaccctcccagcggccatcag

SEQ ID NO: 271675 - DNA, 75 bp, Homo sapiens
ggcaaacactggaatcctactttttcttctgcagccaggagagcagggacgtcctgtgcgaactgtcagaccacc

SEQ ID NO: 271676 - DNA, 82 bp, Homo sapiens
cgcgcgcagggcctgcagcgggagctggacggcgagcgcgagcggcgcgagaaagaagggaaaaggccgaggcatcagcgtg

SEQ ID NO: 271677 - DNA, 100 bp, Homo sapiens
ctcacgggtcgttgaggccggtgacatgtctgtgagctgcggaggctgcggcccccagagcttttcatcctactataaaggaggatttgaacagaaaatg

SEQ ID NO: 271678 - DNA, 83 bp, Homo sapiens
cgagccccgtgaagcccagttcccctgccagcaagcctgatggagcactccgctggtccaggcggcaacatgtccatgctttt

SEQ ID NO: 271679 - DNA, 75 bp, Homo sapiens
atcagtaaagaaaacaaggaagttattcaagagctgaataattgccagtgcagcctaaacgtgatcatgttctcc

SEQ ID NO: 271680 - DNA, 83 bp, Homo sapiens
tgttaaggattccaagtaactcttatttgaggctgggaggcggcagaatgcagccagaggagggcacaggctggctgctggag

SEQ ID NO: 271681 - DNA, 75 bp, Homo sapiens
cagaacatttccccagaggagctcaaaatggagttgccggagagacagcccaggacctcagcagccatgtcgaag

SEQ ID NO: 271682 - DNA, 100 bp, Homo sapiens
cccagcacttggggaggctgagtatggctgtgacccgatccaaagacgctcctcctttcggcccccccatccccagtggaaccacattccgcaaatccga

SEQ ID NO: 271683 - DNA, 83 bp, Homo sapiens
acgtcatcatgctgaccaccaatcagatccgtaaggttggcaaaagcagcttttgatgatgcaattgcagaactggatacgct

SEQ ID NO: 271684 - DNA, 75 bp, Homo sapiens
gagaaggcaaagaacctctggtgttgaaagagttcggaatccagcattaagaagaaatttctcaagaggaaagga

SEQ ID NO: 271685 - DNA, 83 bp, Homo sapiens
cgaaggtgaagagttgtcccagctcggcccgcgggggagccccgggagccgcacggtttggtgcacctcgatttggaggaagt

SEQ ID NO: 271686 - DNA, 75 bp, Homo sapiens
cagcgggtcctggaggctgctaacctcttccagattgagaggatccagaatccagatctctggaatagctaccag

SEQ ID NO: 271687 - DNA, 98 bp, Homo sapiens
tcacatctacgccatcgcagacacggcctaccggagcatgcttcaagaggggccgtatggggtctttgctggaagagatgcatccaggggccttgcca

SEQ ID NO: 271688 - DNA, 117 bp, Homo sapiens
ccgggacccggttccccggcccacagtgggggtgtgcaaacccgagagaactgggttccttcaatggtgccttagctgctgttcctgtccaggacctgggctccactgtcatcaaag

SEQ ID NO: 271689 - DNA, 88 bp, Homo sapiens
ttggaagagaaattggaaaatgtgaaagccattctgcaggcatatcattttacaggagtgtacatttacaaagatgcgttcaaatagt

SEQ ID NO: 271690 - DNA, 99 bp, Homo sapiens
cagagagggatgggttacatgcccaagaggggacttgatgttaacaaatgtgagattgccagctacatctggtaccttggctggcattatgggaatgag

SEQ ID NO: 271691 - DNA, 96 bp, Homo sapiens
gaacagctctgcgcggctttttgagcggtcccgcatcaaggctctggcaggttcttcacacacccccattcggcgtagtacccagagagctcaaga

SEQ ID NO: 271692 - DNA, 90 bp, Homo sapiens
caccgtcgtcctcctagcagtcatcattggcgtcacagtggttggataatgtcgcacattgttggtcatcaagagagagggcacaggtac

SEQ ID NO: 271693 - DNA, 75 bp, Homo sapiens
gaggagtttctccatcatcccctgctttgtcttcgtggaggccagcggagcctgcaccaccgtggagacaacctg

SEQ ID NO: 271694 - DNA, 96 bp, Homo sapiens
agacgcggctgccgtacgtggccctcgatgtgctctgcgtgttgctggccatcagtggcctatgtacataccacgccgggtctgccttcaggctgg

SEQ ID NO: 271695 - DNA, 96 bp, Homo sapiens
caaagctgaactgaatgagtttcttactcgggagctggctgaagatggctactctggagttgagtttccagaacctgggaatccagtgtgtgaaga

SEQ ID NO: 271696 - DNA, 74 bp, Homo sapiens
atccaagaaggagtggagtctttggctggctatgcagacatctttctggcctggcctccagttgggactcctcc

SEQ ID NO: 271697 - DNA, 82 bp, Homo sapiens
cagagcgactttcattagaaggagagcgacagcccaagtcaccagatctcccacaaacaaattttcgtcgtttaccttttga

SEQ ID NO: 271698 - DNA, 75 bp, Homo sapiens
tgaggaagtatgcgggctccaacattgtgcagctgctgatcgggaactctaatgatccaggacaaagaagttacc

SEQ ID NO: 271699 - DNA, 100 bp, Homo sapiens
gagccggaggcgggagcagcgagccggagccccgggcgctcgaatgcagggtctgggatctgccgatatgggggatatgaagacccctgattttgatgac

SEQ ID NO: 271700 - DNA, 90 bp, Homo sapiens
cctgcatgtactgggggattcgcagggaggatgtcgggacaccccggaagctgggaaatggcaaaggccaggatggaattggtagcaagg

SEQ ID NO: 271701 - DNA, 82 bp, Homo sapiens
acgtggtatactcgcagacaacccaaccggtatacaatggagatcatgaatcagacagataaaaatcaacaagaaatcccat

SEQ ID NO: 271702 - DNA, 99 bp, Homo sapiens
gaaggtgctagacaggcgcgtggttaagggacaagtggaatatctactgaagtggaaaggcttttctgagtatgccattttgaagactgagacgttgga

SEQ ID NO: 271703 - DNA, 95 bp, Homo sapiens
agaaatagtgatctgaatcttttagagtggacccatcacagcatgaaaccacacgtgtcaacattgcatacttgaatactggcatcggaggacac

SEQ ID NO: 271704 - DNA, 100 bp, Homo sapiens
tcactctctggattattgcagattttgataagccttctgggagaaaacttctttttaatgcattaaagcacatgaatgtgacagtgatgataacatgggt

SEQ ID NO: 271705 - DNA, 100 bp, Homo sapiens
cctaacaggaacttaagggacaaggtagaagaaaattcagtgagatctccaagaaaatcacctcgtttaatggcacaagacccatctctgacagttagag

SEQ ID NO: 271706 - DNA, 74 bp, Homo sapiens
gagaagaccttcaagcagcgccgcaccttcggtaatctgtaagtcagatgctccaacaggggatgttcttcttg

SEQ ID NO: 271707 - DNA, 82 bp, Homo sapiens
actaaaagcattgtttctagaacatgagtttggaaattttagcattcaggtgccaggaatgcagatgggacagccagtgcca

SEQ ID NO: 271708 - DNA, 76 bp, Homo sapiens
caaaacagtttacctcttatctaacaggagttttgagagcaaaatgacaacacccagaaattcagtaaatgggact

SEQ ID NO: 271709 - DNA, 82 bp, Homo sapiens
ctgcctggctagccggcgacttgagtgacgaacctgcctagagctggaacgttacctccagagcgagccctgctatgtttca

SEQ ID NO: 271710 - DNA, 100 bp, Homo sapiens
aactgccccgccaccgtcatcaacgggcagtttgtcgaacgatgttggactcatagtcactgccagaaagtaaaccagatatgtcacgtctgagacttgc

SEQ ID NO: 271711 - DNA, 100 bp, Homo sapiens
acggtggtaaagcagacgtccacgaggctcaggaaacttggatttaactggccagaagcaggtattcaaagcagagaacaatccctgggtgacccccatt

SEQ ID NO: 271712 - DNA, 97 bp, Homo sapiens
attgggatcaaccagacggaaaacccgctatcatggtgaacttacttcagattgtgcgggaccactgggttcatgttcttgtccctatgggatttgt

SEQ ID NO: 271713 - DNA, 89 bp, Homo sapiens
gggccgccccgcccgcaggtgctatgctgtgggccccgctcagggcactgtgtttagtcttgagtcagaggaggaggaataccctggaa

SEQ ID NO: 271714 - DNA, 123 bp, Homo sapiens
ccgggcgacctgggcaccagcaggacccgaggccaggagccaggggcccagaagaatggtggtttggcctggagtgatgatgcagatggaggccggggaagagagatctctcgagattttgcc

SEQ ID NO: 271715 - DNA, 90 bp, Homo sapiens
ttcctgaggcctccccagccatgcagaactcgtttctcacctctggaggactcagcattcaaggtgccatcttggaagcagagagcagcc

SEQ ID NO: 271716 - DNA, 105 bp, Homo sapiens
tccattccagaaagatggcatcatttttgccctcaaaagaaatggcaggtactctttgagcacatcaaattcttccattgccgctcttctctgtgccctttatcc

SEQ ID NO: 271717 - DNA, 100 bp, Homo sapiens
tatacatctctcatcatttcagcaacaaggaaataaattagtggcagagtaagggtgacttgttactccacaggatccgctgaacataggatgttgccac

SEQ ID NO: 271718 - DNA, 75 bp, Homo sapiens
tgcaatgtttttgtggaacatgatccgccaccgtgatgatgctctaccttttgcccacgtggccattgcagtaga

SEQ ID NO: 271719 - DNA, 100 bp, Homo sapiens
atacagatccacgggttttagaaaaacaagaattacagcagccaacctatgttgccctgagttacataaatagtaattcgccaaaatgacgaacacaaag

SEQ ID NO: 271720 - DNA, 75 bp, Homo sapiens
ccgcacccttgaaaggaggcccctgccgtgtggacccgtaaaataaaatgggatattcggaatcagcggaggtac

SEQ ID NO: 271721 - DNA, 75 bp, Homo sapiens
cttgtctctagtgagaactttgacgattacatgaaagctctggtaaacactgggatgccggagctcaggcatccc

SEQ ID NO: 271722 - DNA, 83 bp, Homo sapiens
aggtattcattaaagaaaataatgggaaggaagaagtatccaaggctgaagtgcagtggcacgatcataggtggtcactacag

SEQ ID NO: 271723 - DNA, 82 bp, Homo sapiens
cgacaaaatgcaaaaaaggaggccaaagactttggtcctgcagttctgagcttgggttccctttgcctggacaccaaccaag

SEQ ID NO: 271724 - DNA, 101 bp, Homo sapiens
agataatgaggacagatgaagaaatgtttgattgtgccatacttacagttgctgattttcaagaacagtgcaaccctgaaactcgtcctgttgagaaaaaa

SEQ ID NO: 271725 - DNA, 75 bp, Homo sapiens
acgatgagcgtgtgttggttgctttcggccagcgggacggcatccgagacaagcatgagacgaagctgaagggag

SEQ ID NO: 271726 - DNA, 100 bp, Homo sapiens
aaataccttgcatacatggagtctaaaggagcccatcgtgcgggtcttgcaaaggctatggagttactagtagagaaagcaatcagcagtgcttctagcc

SEQ ID NO: 271727 - DNA, 80 bp, Homo sapiens
caaccttggaacagaacaagaggacaggaggtgtcgttccagatgttcctttacctgtcagatttgtccaggaaggaccg

SEQ ID NO: 271728 - DNA, 115 bp, Homo sapiens
tgctgacggtgctcagagccttcccttgtcggagccggctcggggacgcagagactgcagctgccatcgaagaggaggaattgactttaaaattaggaccatagagctcgatggc

SEQ ID NO: 271729 - DNA, 75 bp, Homo sapiens
catttcccggaaggttaacagcccccttctcagttttcctggtgcagctaaatcaagtccagcagctaaaccagg

SEQ ID NO: 271730 - DNA, 100 bp, Homo sapiens
gtaaattgggatattcacaatgtatggaaacagagggtgactgtgaagatcacgctaaccttctgtgcagccttcttcttggatatggattagaagcctt

SEQ ID NO: 271731 - DNA, 115 bp, Homo sapiens
gtttttattgcggagcttttttggtggttcgagaatgtcaagccagattttgttcagcccagggatgttcaggagctgaaagacgtgagatgaacccggtacctcagatggaaat

SEQ ID NO: 271732 - DNA, 106 bp, Homo sapiens
caagaggcccagagacatgctgaaacatcgaaggattttttatcaagcagaaatgcatcgaacaacgagaatcaagatcactgagctaaatccccacctgatgtgt

SEQ ID NO: 271733 - DNA, 100 bp, Homo sapiens
gttggagtccatgtctgctaaagagcgttcattcatgtgttctctcatatttcttactctcaactggttccgagaggttgctccttgagggcaggacagt

SEQ ID NO: 271734 - DNA, 83 bp, Homo sapiens
cccaagatggagacggcggcggctgtagcggcgtgacagacacggcttacctggatggggtgtcgttgcccgacttcgagctg

SEQ ID NO: 271735 - DNA, 97 bp, Homo sapiens
ttgtcaacggaggatgaagtgaacagctgagcagctcgcagagagcaggagtggaaacaaaatgtcagtcagtgtgcatgagaaccgcaagtccagg

SEQ ID NO: 271736 - DNA, 75 bp, Homo sapiens
ggctaatggaggagtgagcatgtggtgtgagctggaacaggcctccggtgtggctgtctctgatggtgtcatcaa

SEQ ID NO: 271737 - DNA, 101 bp, Homo sapiens
aggagggaggggaaacacaaagccggctacgcgctgcgaggcagaaggagaagacagcctgaagaagatgcagctgatggagcttgcgattctgaatggca

SEQ ID NO: 271738 - DNA, 100 bp, Homo sapiens
cctgtgcagggcagagcaggaggccccccgagattggtgctgaagacatggacggcttccaggcagacacggaggaggaggaagaggaggagggcgactg

SEQ ID NO: 271739 - DNA, 98 bp, Homo sapiens
ggagattcaggagatgcagctcaaagaggccaagcacattgcggaagaggctgaccgcaaatacgaggaggtttactggactcatgcgggtggtagac

SEQ ID NO: 271740 - DNA, 73 bp, Homo sapiens
atcaccactaaaatctccaggggcaccattgaaatcctgagtcatgtgctgttcctggggcttggatgatgta

SEQ ID NO: 271741 - DNA, 50 bp, Homo sapiens
tggacgccggaagccgggaaatgaagaaacatggcggctatccttctctc

SEQ ID NO: 271742 - DNA, 82 bp, Homo sapiens
cctggacctggtcagagcgcggatggccgtaaccccgaaggaaatagggtcaccatgaagttcaatcccttcgttacctcgg

SEQ ID NO: 271743 - DNA, 82 bp, Homo sapiens
gcaggaaagctaagaagaatcacacctcattgcaggctggactctgtgaagctgagcaggagcagatgcggaagatcctcta

SEQ ID NO: 271744 - DNA, 74 bp, Homo sapiens
aaaggaagacttgtaacctggagaagagaggctaagaatattgtacacaaagattcttgatgttcttgaggaaa

SEQ ID NO: 271745 - DNA, 115 bp, Homo sapiens
catggagggccccgacgatagcgaggtcacctttgcattgcactcaggtcctgtccctgctatcagtggggcactgaagaaagcaggactgagtcttaaggacatggatttggta

SEQ ID NO: 271746 - DNA, 98 bp, Homo sapiens
ctgggtgctgtaggagcccatctgactcaccaggaccaggaccagggtgaggcaaacaaggtccctacgggcacagaatttaagaaggcactcactct

SEQ ID NO: 271747 - DNA, 83 bp, Homo sapiens
ccgagtccggaccggagactttggggcctaactagatgtatcctccactcctcgctggccaccatcctgctgcccaacagaag

SEQ ID NO: 271748 - DNA, 83 bp, Homo sapiens
caaagacccagtgaacaaatccgggggcaaggccaaaaagaagacccgtcgcagcatggtgtttgccaggcacctgcgggagg

SEQ ID NO: 271749 - DNA, 100 bp, Homo sapiens
gccttttcaacatggatggctcctcccgctgccgctgccgctccaggagacagaatttggtgttcacttggcagaactgactgtagatccccagggggca

SEQ ID NO: 271750 - DNA, 82 bp, Homo sapiens
acttctgctccaggaaattcagcctcaaaaccgtcctgctgcttgctgaccaaatggttttaaaatcaaagatgggaaaatc

SEQ ID NO: 271751 - DNA, 100 bp, Homo sapiens
ggaaatcatgtcaagcgaagccttgaaaaagctgccctgagacggtgtcccgccgaaaggtcatcatcagatttgaaatatttaaagtggatacaaaact

SEQ ID NO: 271752 - DNA, 89 bp, Homo sapiens
ggactatgtgtgcacctggcaaggagaagtctggcctaggaggtggaggatgcagcgcaccaagatcgcaccactgtactccaggatgg

SEQ ID NO: 271753 - DNA, 90 bp, Homo sapiens
gtgatttaaaagctgaaaatttacttctggatgccaatctgaatatcaaaatagcagtgtgccggtccaacaaaagcccttgggtctgtt

SEQ ID NO: 271754 - DNA, 73 bp, Homo sapiens
acacaggcacgactagaagcattgctagaagcagcagaaatttctgaataaattggcagaagaacgcagacag

SEQ ID NO: 271755 - DNA, 90 bp, Homo sapiens
cacaaccgccagagaggatgctgtgattctggctacattggagattggttgctttctaaaactgaaggagaagcccatgaagagatggtg

SEQ ID NO: 271756 - DNA, 83 bp, Homo sapiens
accgacagtgccctgagggccttcgagagctaccgcgccagacagatagcctgggctggaagctcttctacgtcacaggctgc

SEQ ID NO: 271757 - DNA, 83 bp, Homo sapiens
gtaatcatgtcttctgtatgacttgtattcttaaatgggcagagaaagacagcacactggatgctgctgaagaaatcatcaag

SEQ ID NO: 271758 - DNA, 101 bp, Homo sapiens
agcctcaacgtggctgacaggagcgggcgcagtgctctgcaccatgcagtgcatagtgggcatcttgaggactacaaatccctccaggatatcattgccat

SEQ ID NO: 271759 - DNA, 98 bp, Homo sapiens
acagtgagccccgcaaggagtttggaggccctgatggaggggacggaggcaacggtggacacgtcattctgagagatatttggagttcttacaacatg

SEQ ID NO: 271760 - DNA, 75 bp, Homo sapiens
tgatatgcatgcatgtaccgaccttctgaacaaggccaacacctatgcagagctacagagacttctgaagtggag

SEQ ID NO: 271761 - DNA, 98 bp, Homo sapiens
aaagcacaaggattctcgctgtgacagagacaacaccgagtatgagaagacctatatccagactttgcctgacactgcagggtccaagagaattaaag

SEQ ID NO: 271762 - DNA, 100 bp, Homo sapiens
agccatcaacccgtgggcctcctggggggatgaggcccagccccagaacctggagtgcttctttgacggggccgccgtgctcagctgctcctgggaggtg

SEQ ID NO: 271763 - DNA, 76 bp, Homo sapiens
ggaagagtcagacctcgaattagcaaaggaaacttttgatcaccatccatcttcaagaagctactttgaaagtctg

SEQ ID NO: 271764 - DNA, 90 bp, Homo sapiens
tcccacctcagcagcctgatcgctcagctagaagagaagcagcagcagcccaccagggagctcctgcagagtgggaataaggtgtcaatc

SEQ ID NO: 271765 - DNA, 98 bp, Homo sapiens
gatccggctcctccagctaccggcccaaggccatctacctggacatcgatggacgcattcagaagaattcagaaggagctggcggacatcactttaga

SEQ ID NO: 271766 - DNA, 88 bp, Homo sapiens
cgggtctccggccggcggcggcggcggcggcggcggcggcgcagcatgatgccttcttctgtagagtgggcgctttgcagaatacgtg

SEQ ID NO: 271767 - DNA, 97 bp, Homo sapiens
cagggcattccggaggcagccgagggcagcagctcccagtttcttcttttcgagtccagggaccttgacccagcccctctcagcagacgcttcatga

SEQ ID NO: 271768 - DNA, 75 bp, Homo sapiens
cagtggtcgcttcttctccttgagctgaaaccaccaatgggtgaggtcgtcacccctacggccccccaggagcct

SEQ ID NO: 271769 - DNA, 75 bp, Homo sapiens
agaacagtccgaaatggcggggactgttggtctcggccctgcggaaggtcatttatagcaaatacactgacctgg

SEQ ID NO: 271770 - DNA, 100 bp, Homo sapiens
tggcctttgcagcggcggcagcagcaccaggctctgcagcggcaacccccagcggcttaagccatggcttacagaatgtctgaaggggacagtgtgggag

SEQ ID NO: 271771 - DNA, 100 bp, Homo sapiens
cggggacccagaccctggagcctcagttggaagcagccgatccagcctgcggagcctgtggggcagaattcagcattattctggcagacattcacaaaga

SEQ ID NO: 271772 - DNA, 100 bp, Homo sapiens
tcgacctcctggtcagcacttaccggctgccccagatcgcgcgcctggacaacgttcctacaacagcagccagtacccctgatgccgttgacaagtatct

SEQ ID NO: 271773 - DNA, 74 bp, Homo sapiens
gccctggcctccctcaccttggacacctcgcttgggctgtgggtgagcgtggaggatgctcagatgcacaccgt

SEQ ID NO: 271774 - DNA, 83 bp, Homo sapiens
cgagacaacaacggcaccgcgaacactctgctccagccaaggtggtgagggcagctgttcctaaacagcgcaaaggcagcaag

SEQ ID NO: 271775 - DNA, 83 bp, Homo sapiens
cactttcgccagcccgtgccgcgagcgcggcctgcaggaggttcttctgtgtggcagttcagaatgatggatcaagctagatc

SEQ ID NO: 271776 - DNA, 94 bp, Homo sapiens
ctcgcctcggtgcagggctccgccccgtcgcctggaaaggaatactcccccagttgcaagaggcgcaggaccgtggaagacttcaacaaattct

SEQ ID NO: 271777 - DNA, 83 bp, Homo sapiens
ctagaggaagttacatcccgagaagtagctcagatctctgggctcagctttcaccccaaaagaccttggatcctgactagttt

SEQ ID NO: 271778 - DNA, 98 bp, Homo sapiens
tctgcagggcctgggccgccgctgctacctgcagcgccgtgtggcacgacacaaaaatcaggtggacccaagtggagagattgtggaactggcgaaag

SEQ ID NO: 271779 - DNA, 87 bp, Homo sapiens
ctctgagtcctcaactgctgaccccggggtcaggcatcccgggcccaaatcctagacaaagccacagaatatatccagtatatgcga

SEQ ID NO: 271780 - DNA, 83 bp, Homo sapiens
gtggatatatttttggtttcttacatgaaaaatcaaaatggtacatttaagattaacaagtggtggaataacctaagtgatgg

SEQ ID NO: 271781 - DNA, 100 bp, Homo sapiens
catgatagataaagacgttgaactctcagtggtcctacctggggatattatcaaatctactactgttcatggcagacctcgaagtagggggaaaactgca

SEQ ID NO: 271782 - DNA, 100 bp, Homo sapiens
cgggcacgcacggcccgggccggcgctccaaggcccgcccgggagggccggggccgcgctcaggaatccccacatcgtcctcaacattgacctggccccc

SEQ ID NO: 271783 - DNA, 75 bp, Homo sapiens
tcgtgttccgagtgggcctcgccctgctgcaggaggttgaaacggaacagtattacagtttttttctggtagagc

SEQ ID NO: 271784 - DNA, 98 bp, Homo sapiens
caagagttgggcaaaaaaatcaaggtatttggtcccggaacaaagcttatcattacagatgctggcccgcgagagacattgatgcattttgctgtgcg

SEQ ID NO: 271785 - DNA, 76 bp, Homo sapiens
cactgtgagcagtgccaccagtacatgggcttccacccccgctaccagattcttggtgccaccattgagaactcca

SEQ ID NO: 271786 - DNA, 75 bp, Homo sapiens
atgtcaaagacttagcttttaaattaaaaaggaagctattcaccattgaggaagcaagatttccagatgtagcaa

SEQ ID NO: 271787 - DNA, 100 bp, Homo sapiens
caaatgctagaagctatcaaagcccttgaagtcaggagtacaagcgcaagctagccagagtttccctggtgcgcaaagaactcaggtcccggatccagag

SEQ ID NO: 271788 - DNA, 95 bp, Homo sapiens
ctgctccgcaagattcgagcctgagcggcctgggcgtctcgagaggggagacaggtgtggacatgagtggctgggatgcagtgccgtagcaggct

SEQ ID NO: 271789 - DNA, 86 bp, Homo sapiens
gaccctggagcctcagttggaagcagccgatccagcctgcggagcctgtggggcaggagaaccaggtgcatcagcgcattgcggag

SEQ ID NO: 271790 - DNA, 100 bp, Homo sapiens
ggacagaagatgacctgagttttcacaaaggagaaaaatttcaaatattgaacagctcatgtgctcccggttactatggaaaccccttactcattggaag

SEQ ID NO: 271791 - DNA, 50 bp, Homo sapiens
gcctcccgagcagctgggactacagaccatcagcagagcctttatgaatg

SEQ ID NO: 271792 - DNA, 75 bp, Homo sapiens
agcaagcccggaggctcggagccccctgccgtgttcacaggtgcccgtggttgacacgagctgtgtccccagctg

SEQ ID NO: 271793 - DNA, 75 bp, Homo sapiens
accctcgaagtgcgcaaacttgacactcaccctgaccgttacagctcttttgaggaagcttaagcagcaatccag

SEQ ID NO: 271794 - DNA, 73 bp, Homo sapiens
ttttctggtgtcctgaacctggaagttgtgctttttaaggctcctgttctggatgtcagatatgcatctgcct

SEQ ID NO: 271795 - DNA, 74 bp, Homo sapiens
cagccagggcagcgccagcactagctcagacgcaaggtcccgggtggattctaagaccctgacccgtaacacga

SEQ ID NO: 271796 - DNA, 87 bp, Homo sapiens
tgcctggaaggtataagatgtgcaatcagaattgcatgcattttcagcattcagggcaattgaaggaacagactaaaaatcgtgtcc

SEQ ID NO: 271797 - DNA, 75 bp, Homo sapiens
agaggacttggttcctattccagtgctcctccggtagcagggaggcgacagaagttgatattcactgatggactc

SEQ ID NO: 271798 - DNA, 101 bp, Homo sapiens
gaactggaaaacatcatccaggagggttccaaaaggtcccaggtgtcctctccgtgcagtcggaaaaagccccgcatgggccagcaagtcctggataattt

SEQ ID NO: 271799 - DNA, 97 bp, Homo sapiens
gcaggccccggtggcaaaggagaccacagcaccgggaagtccagtcagcggcagatggtgttcggggtggtcaccgccattgacttgctgaacttcg

SEQ ID NO: 271800 - DNA, 50 bp, Homo sapiens
cgagacccagccggagcgagcaacaggtcttattagtaggtaagaaacag

SEQ ID NO: 271801 - DNA, 98 bp, Homo sapiens
cagacatctggaccagttattaatgtgtgccatttatgtgatggcaaaggttgggggccgtcccgctcctaaggcaggaagatggtggccgcaaagaa

SEQ ID NO: 271802 - DNA, 97 bp, Homo sapiens
ctggcccgctccctggcggtgcagagaccagcatccttggagaaggttcaggcgtgaacggcctggaggagcccagcatcgccaagcgactgagggg

SEQ ID NO: 271803 - DNA, 75 bp, Homo sapiens
gaacaggagccgctcttaggcgacacacctggaagcaggctgcctctaagaatcaaacttcactcttgggagaac

SEQ ID NO: 271804 - DNA, 78 bp, Homo sapiens
acctggacccgacctcctcgccttggaggaagaatataagagctattgtgacaatcttggttaccatccattaagtgc

SEQ ID NO: 271805 - DNA, 50 bp, Homo sapiens
cttcaccgagatctacgagttccatttaattatcttcacccccaaatccc

SEQ ID NO: 271806 - DNA, 85 bp, Homo sapiens
gacgacaaaatgcaaaaaaggaggccaaagactttgtcagcttttgccaactgttttcaaatcacatgcatgggggatcttacac

SEQ ID NO: 271807 - DNA, 100 bp, Homo sapiens
caaggaaagtttttgaacttatgggaagcattgtcactgagattgcttgtggacggtgtcaacattgcatacttgaatactggcatcggaggacacaaag

SEQ ID NO: 271808 - DNA, 99 bp, Homo sapiens
ccgcctggccgccccggcccgccgtgacccacggccgcctccggagcccgacgcgatgatgaaacatgcttggaataattataaaggttatgcctgggg

SEQ ID NO: 271809 - DNA, 50 bp, Homo sapiens
caagcgcctctactacctctggatgtctatccagtcagttcgctgctatt

SEQ ID NO: 271810 - DNA, 95 bp, Homo sapiens
gttgtacattctctgagatctcagccctccggttcctgggcagagagaaagctatcagttgagggatttgcagttgataaaatggctggagaggt

SEQ ID NO: 271811 - DNA, 75 bp, Homo sapiens
tgtgcgttgcggccagtcgccactgctgaccaacttggaggccttgcagaagaagctggaggagctagagcttga

SEQ ID NO: 271812 - DNA, 98 bp, Homo sapiens
cagcgtcaggagccatagtacctacagcagcactccaggtctattattagcagaagatttttctgcatagttggcacgctgtacctgtatcggtgtat

SEQ ID NO: 271813 - DNA, 80 bp, Homo sapiens
cggcatgcggcccaacgccaagaacaacgccaatagcttcaccgtctcctctgtcgccgccccttcctggcttcaccgtt

SEQ ID NO: 271814 - DNA, 98 bp, Homo sapiens
gggaatgagacccaaactgctcatacagaattacgcatttccacttctaatgaaaccagcctggacaccaagtctgtgtcagaaggccacctcaagag

SEQ ID NO: 271815 - DNA, 88 bp, Homo sapiens
atcaccgagtacctcaggaagctcagcaagactggagtccctgatggaattatgcagtttattaaggaggagatgatcttccagatcc

SEQ ID NO: 271816 - DNA, 89 bp, Homo sapiens
cggcgatgcccgtgtgcgcagccccgcgagtctcagggtgactatgaccagagcaggaccaaagtgctgcacatgagcctgaaccccac

SEQ ID NO: 271817 - DNA, 150 bp, Homo sapiens
atgcatggtactttgacttttgtcctgattcccagtcaacagatcaagccgcctcctgccaaggaaacagtagtgcagagttggctggatgtgaaggctcacacctgtaatcccagcactttgggaggccgaggcaggcagatcacatga

SEQ ID NO: 271818 - DNA, 74 bp, Homo sapiens
aggataacccccagaagtcctacttcatccgcctttacggccttcaggctgactgtgctgtcctgattgttgct

SEQ ID NO: 271819 - DNA, 100 bp, Homo sapiens
gatcgttggcaacatctttttgatgtcatcggatcaaggaaggtgtcttgctgcaggtaactaatgaagaagtggtcaaccacagagtcttcaagaaata

SEQ ID NO: 271820 - DNA, 74 bp, Homo sapiens
tgagtcgcggtgggtcctcgcttgcagttcagcgaccacgttttgggaggtcatcagcgatgagcatgggatcg

SEQ ID NO: 271821 - DNA, 83 bp, Homo sapiens
tctctctttctggcctggaggctatccagctttgctggcctagacctgaactcttcagataatcagagtggaggaagtacagc

SEQ ID NO: 271822 - DNA, 88 bp, Homo sapiens
tgatgggagcaagttgactaccaccagtggagtccaggatgagggtttggtgcaattctccattaatgaagataacatttgaattccc

SEQ ID NO: 271823 - DNA, 50 bp, Homo sapiens
cagctgctgaagacagcactcaaagactgactttatggcctttcaccaag

SEQ ID NO: 271824 - DNA, 82 bp, Homo sapiens
ctgagaacaaacgcaaaaggacagtaaactgtggaccttgaagttagcagggcttatttcaaaacctttgtccctcagttcc

SEQ ID NO: 271825 - DNA, 100 bp, Homo sapiens
aaacattgaagatcagcacagaaatcccaggaggagcctaagatatgattctataacagactcttccagaaatgatatgaagaggaaatttgccctgaca

SEQ ID NO: 271826 - DNA, 100 bp, Homo sapiens
gtgggagtctccgcgtcccgctcgctgggagagaggtacctctccttttccctctccctttccctaaggtacctgtggaaaagtgaaaagccactctact

SEQ ID NO: 271827 - DNA, 74 bp, Homo sapiens
tgtgaggatggagtggctgcaaacaaaaagaattacctgaagacatcaggagaatacaaacttgcaggtgtttt

SEQ ID NO: 271828 - DNA, 135 bp, Homo sapiens
ccggagcccgccccgcgccgcccagcccggctccgacccaccgcggtcgcggggagcgcggtgcttctggcccagtgtgtggtctactttgccagagccccaaagtccattgaggtgtacagcgcctacaacaac

SEQ ID NO: 271829 - DNA, 100 bp, Homo sapiens
acaaaccacaggcaagaagccagcacccaaggggcaggggtggagagattcaaccagttagcgtgaaagttggagataaagttcttctcccagaatatgg

SEQ ID NO: 271830 - DNA, 75 bp, Homo sapiens
gaaactgaaggctgaagattttatagtggatactgctgcagtaagaatgtcttttccacctcatttgaatcgccc

SEQ ID NO: 271831 - DNA, 75 bp, Homo sapiens
ccgcgacgctatggcgcactggagtaccctgttcctggcaacccggcgacaggaggcatgaggggcccccggccg

SEQ ID NO: 271832 - DNA, 75 bp, Homo sapiens
gacagaaggcgtctcatggcgttggaataccggctctcagcggctgcgcgggtttaagtggacgccaggtgcacc

SEQ ID NO: 271833 - DNA, 99 bp, Homo sapiens
gcctgagcgcaactagcggcgggtcgtgggcacctccaggctgctctttggcgtaaattgcaatcgattagggatcgtttctcagaatcaagttagaag

SEQ ID NO: 271834 - DNA, 95 bp, Homo sapiens
gcagcacaaaaaaccccaaccaaacaaaactcttgacagaagctgtgacaaccagaaaggatgcctcataaaggaactgggaagtaacagccctc

SEQ ID NO: 271835 - DNA, 94 bp, Homo sapiens
ctatcttccctggatttttcttcaccttttccttactcatgagccagggaaggcagagaaaatccatcaagttgtaccctacccaccctttggt

SEQ ID NO: 271836 - DNA, 99 bp, Homo sapiens
gcattgactggaaacaatggcatttacagaaagagtcaacagcagtggcaacagatggacttgccagtttcaaaagtttcctgaagtctgaattcagtg

SEQ ID NO: 271837 - DNA, 100 bp, Homo sapiens
ttcagaggtttgccagggaaagtggatattcagaacggcaatttgaatcaacccatagaagtgacagcgctgtattcatttgaaggacagcagcctgggg

SEQ ID NO: 271838 - DNA, 100 bp, Homo sapiens
cctcaatttaagcctgatctaacccctagaaacaggagtatgctgctgctgttccgctttgcgtcctcgctacaaacgcctggtggacaacatattccct

SEQ ID NO: 271839 - DNA, 96 bp, Homo sapiens
cgaacagttttttctaatggctattcaagatcttcttcagcagtatcgttctgctgtgtgcaaactagacagtgtgaataaggatcttaacagtca

SEQ ID NO: 271840 - DNA, 83 bp, Homo sapiens
gaaactcgctcgccttcagaagacagatcttcgtgaagactctgactggtaagaccatcaccctcgaggttgagcccagtgac

SEQ ID NO: 271841 - DNA, 101 bp, Homo sapiens
tttccgatttaaagctgagctgcgaggaaaatggcggcgggaggtatgatctcgtgaaaccttgagagaaactgaatgacgaatgaaactattgttcctgt

SEQ ID NO: 271842 - DNA, 78 bp, Homo sapiens
cggaaactccagcgtgtctccagccgtggggacggcaaaacagaacagaaaggcggagataaaaagaggggtgttaaa

SEQ ID NO: 271843 - DNA, 97 bp, Homo sapiens
ggaacgtgaagctcgagaagctgcagaacttgaagtgagtaaaagagagacagtgggacagtccctccttcatcagacacagatgggtgacatctgg

SEQ ID NO: 271844 - DNA, 90 bp, Homo sapiens
cggcgcgggccgaggcctgggacagctaccgcagcatgagcgaaagctacacgctggaggttcattttccagacactgaaagagcagaat

SEQ ID NO: 271845 - DNA, 90 bp, Homo sapiens
ccgtcaccttaccttaaaccttttaagcaaggaaattgaactaagaaatggagaggtcaagaaagtagtgaagactgtgacaacacggac

SEQ ID NO: 271846 - DNA, 85 bp, Homo sapiens
gtttggaagatctggatacctgtatggtattctttaggtgatgctagaaggcctcttcatgaaacagcagttttggtagaagatg

SEQ ID NO: 271847 - DNA, 75 bp, Homo sapiens
gattgttggatatgcataagagttcattcggctcctaaagaagtagcagtgtccaaggaacaagaagagaaatct

SEQ ID NO: 271848 - DNA, 88 bp, Homo sapiens
gcgggtctccggccggcggcggcggcggcggcggcggcggcgcagaatgttgtaccatctttgggtaggcagacttccctgacgacat

SEQ ID NO: 271849 - DNA, 51 bp, Homo sapiens
cgagccgcaagaagcacgaactggtgtcccgacccaggctaagcttgagca

SEQ ID NO: 271850 - DNA, 89 bp, Homo sapiens
gtcctggagccctcctcaggtgagctggagctgcccggctcggcagcgggaaggattgttaaaatgagtcttcggaagcaaacccctag

SEQ ID NO: 271851 - DNA, 100 bp, Homo sapiens
caacaacgtcatcttccaccatccataatgaagctgagcttggcgatgatgacgtttttacagatcttatggttggtgatgaggcaagtgaattacgatc

SEQ ID NO: 271852 - DNA, 100 bp, Homo sapiens
agagtttgaaagcgtgctccacaaatatttacagtcggaggagtactcggtgaaatcctgtcctgaagactgtaagagctatcagcttcccagtttgcac

SEQ ID NO: 271853 - DNA, 83 bp, Homo sapiens
tggggttctgagactccctgtcccggaccgcagcattttgaaagcgaagcagaagccgtagaatcagcggcgagcctgttgaa

SEQ ID NO: 271854 - DNA, 90 bp, Homo sapiens
ttcctccaggacagcacctagtcgtggccggaggagtctcagagctgtcagaaaggaaaattgcctaagaattatgacccaaaagttacc

SEQ ID NO: 271855 - DNA, 100 bp, Homo sapiens
agagatcggcggagaccctcgaagtgcgcaaacttgacactcaccctgaccggaagtgggaaaactcttgcctttgccatcccaatgattcatgcggtgt

SEQ ID NO: 271856 - DNA, 74 bp, Homo sapiens
ggacgccggtctctgttccgcaggatgttacagaatgtctgaaggggacagtgtgggagaatccgtccatggga

SEQ ID NO: 271857 - DNA, 95 bp, Homo sapiens
cttggcgaagccttgggtttctttcttaaaggactgatttttagaactccacatttgagacaccattcgcttttcacccaagatgatttgatgtc

SEQ ID NO: 271858 - DNA, 113 bp, Homo sapiens
cagcagatgattgaagtggaaatatccaaacaggccctccagaatgagctggagagactgaaagaggtgttgacttcaaaatcaaaactgtagagctaagaggaaagaaaatt

SEQ ID NO: 271859 - DNA, 73 bp, Homo sapiens
agggaagaccacgatcctctacaagcttaagctgggtgagaagatgacagaggaagaagtagagatgctggtg

SEQ ID NO: 271860 - DNA, 114 bp, Homo sapiens
taatggccatcgctggaaacaagtgcgacctctcagatattaggtgctgagagcagaatgagctactttgtggattctgctgggagcagccccgtcccttactcagcgcctcgt

SEQ ID NO: 271861 - DNA, 75 bp, Homo sapiens
gcggcaagatcaagcactggaaccgcttccgagactgcctccggagccagcgtggtggccatagacaacaagatc

SEQ ID NO: 271862 - DNA, 50 bp, Homo sapiens
ggggtcataggtggaaaagacatggtcagcagcaaggacaagatggagta

SEQ ID NO: 271863 - DNA, 83 bp, Homo sapiens
ctcctaatgaaccgccagcgtgtgcccaaagttttggtggaaaatgcaagttttaaaatcaaagatgggaaaatcggagaaaa

SEQ ID NO: 271864 - DNA, 98 bp, Homo sapiens
ctgtcacctattcgcggctcttcccgcccgccttccgccgtctcttcgagttcttcgtgctgctcaaggccacccgtacatcatgaccgtgggctgcg

SEQ ID NO: 271865 - DNA, 50 bp, Homo sapiens
gactatggcaaggatctctgtcactgagggcagcctatgacattcccccc

SEQ ID NO: 271866 - DNA, 50 bp, Homo sapiens
atcacaattatgccaagtcccccatgcagcatatcgacaaagtcttcaaa

SEQ ID NO: 271867 - DNA, 100 bp, Homo sapiens
ggttaagaaaggaaatcaaaccgaaaatgtgtatatagaaaactcttctacagaaattactctcaaagaaacctgaggatcgacctaacacatctgaaat

SEQ ID NO: 271868 - DNA, 101 bp, Homo sapiens
cgaaacactgataatgcatggatggagacagaagctgtgaactaccatgacgaaacagcctacttctgcttcctcctggccgctctgggtgtgacagctgg

SEQ ID NO: 271869 - DNA, 50 bp, Homo sapiens
cctggctcggagcagcagcctctgaggtacatgtcccagagcaagcacac

SEQ ID NO: 271870 - DNA, 83 bp, Homo sapiens
cgcacttgctcaacaagggcctgccgcttgatgatatcatcaagttgaatcgaaaggaagggaagaagcagaattttccaaga

SEQ ID NO: 271871 - DNA, 98 bp, Homo sapiens
ggagtgtgcgacggattgggagacgccagcccccagcaggacagcatctttttctgagtccagggccgatgaggtggcgcctgcaaagaaggccaagc

SEQ ID NO: 271872 - DNA, 99 bp, Homo sapiens
agatgccgctggcgcagctggcggacccgtggcagaagatggctgtggagagcccgtccgacagcgctgaggcctcaggagtgcaagtagctgatgaag

SEQ ID NO: 271873 - DNA, 75 bp, Homo sapiens
tggctctgctgaccttgtgccttggatcacgcagatttgcgaagccatttcttcacagttgggatgaagcttgag

SEQ ID NO: 271874 - DNA, 101 bp, Homo sapiens
gcgcatgaacagcctcaagccggacctcatgcagctgcgcaagatccgagaccagtacctcgtgaagtacgcagccatctcctcttcggagcagcgccaga

SEQ ID NO: 271875 - DNA, 75 bp, Homo sapiens
accccggcatcccaagccgcctcccgccgccccggcccggcgcgcagggcactgtgaggtgaatgctattgtaca

SEQ ID NO: 271876 - DNA, 97 bp, Homo sapiens
ctgggtcagaccctttgggttggcttcgtggctccacgacttactctctacccttggcaggcctcaggagtgcaagtagctgatgaagtatgtcgca

SEQ ID NO: 271877 - DNA, 50 bp, Homo sapiens
cccaaacttgctggtcactgggaggtacggaatggccacatcaaaagaat

SEQ ID NO: 271878 - DNA, 100 bp, Homo sapiens
cacgagcatgcgaaggcgaagcggcacaacctggtgaggatgaggatgatgaccttcagtatgccgatcatgattatgaagtaccacaacaaaaaggact

SEQ ID NO: 271879 - DNA, 82 bp, Homo sapiens
caaatgccagactgattgtcatgctcagggaccctgtggagagggtcctaaaaaggtggggacgctgtggcgagaagccggg

SEQ ID NO: 271880 - DNA, 74 bp, Homo sapiens
agaggtggagtctgtgcatcgcatcctggctgccatattgcacctggtcctacgagggcactctgtacaagaag

SEQ ID NO: 271881 - DNA, 75 bp, Homo sapiens
caggaactttcttggctctggggtttccttgtctgtcaaatgaccaggtgtcttcagtgccctgggtttgcctgt

SEQ ID NO: 271882 - DNA, 83 bp, Homo sapiens
caaaactctctgacccagtttatgaggccctgaaggccctacaggacatgagctccacagcacccccagctccgcagccatcc

SEQ ID NO: 271883 - DNA, 100 bp, Homo sapiens
ctttgtggacatctgatcatggacatggtgctggacgtcattgctcctccttatacctctgacttcgtgcaacttttcctccccatcctggagaatgaca

SEQ ID NO: 271884 - DNA, 50 bp, Homo sapiens
ggatgtgatgcctgctagccaaaaggatagcagaccccacgttagctgaa

SEQ ID NO: 271885 - DNA, 51 bp, Homo sapiens
gtggggagctctggctgctgctgtcagaggagaaggcagagcccccccagg

SEQ ID NO: 271886 - DNA, 99 bp, Homo sapiens
gtctcgctgagctcgaggaggtggcgcgatggagggactggaaggattcaggagcagttccagaaaaatcccgacagttacaatggtgctgtccgagag

SEQ ID NO: 271887 - DNA, 100 bp, Homo sapiens
accttcaaggccgtcagacaagagcagtcattatggcgaaccttggctgctggatgctggttctctttgtggccacatggagtgacctgggcctctgcaa

SEQ ID NO: 271888 - DNA, 100 bp, Homo sapiens
gccaggcatggcagcgcaatagagtggtgtttccccaggatctgctggagaaaggcctcgaagcaaacaactttgccatgctgggacttggagatgtcgt

SEQ ID NO: 271889 - DNA, 89 bp, Homo sapiens
gaagaatttccccagccctgtggatgctgcattccgtcaaggtcacaacagtgtctttctgatcaagggaagcggatttgtcttggtga

SEQ ID NO: 271890 - DNA, 121 bp, Homo sapiens
ttggtgagcagcgctctggggctcgccttgtatctcaacaccctgagtgcggatttctgctatgatgacagacaccaaatggattgcttctgactccgagtccactgctctccagcataca

SEQ ID NO: 271891 - DNA, 50 bp, Homo sapiens
acgggttgcttcccccgctgcgagactcggtgaaatacctggagtgctca

SEQ ID NO: 271892 - DNA, 101 bp, Homo sapiens
gattcgtggtgaaggtccggggcttgccctggtcttgctcggccgatgaagtgcagaggtttttttctgtactgccaaatctgtcgaaagggagataatga

SEQ ID NO: 271893 - DNA, 100 bp, Homo sapiens
gatgtttccagccctgcctcggcggaccaaaggcttgatccagtggcatatagattagaacctatgattgttccagatttggacctaaaagctgttctca

SEQ ID NO: 271894 - DNA, 116 bp, Homo sapiens
tcccggcagcagcccgacgcaaaccaaggatctggggatcttcgcactatcccaaggtgagaagccctaccactgcaactgggacggctgcggctggaagtttgcgcgctcagacg

SEQ ID NO: 271895 - DNA, 120 bp, Homo sapiens
cctgaacgacaggatcgtggagagagatttccagtggacggacaacaccgggctgtccaatggatgggaccccaatgaaatgttcaagttcaatgaggagaactacggtgtgaagactac

SEQ ID NO: 271896 - DNA, 100 bp, Homo sapiens
aaaaccctgtgccagggacaggaaagataggagtcacagtcgaactgttattggaattgaagagaaaaaaaaccgaacattatgcttactaatacttgat

SEQ ID NO: 271897 - DNA, 100 bp, Homo sapiens
gtcgaagctctgtaagaagaaaacactttgtgggccaggtgcatgtgagggaaccctggcttgttcaacctgtcacctcatctttgaagatcacatatat

SEQ ID NO: 271898 - DNA, 50 bp, Homo sapiens
ctcccgagaagaagttgaggcgctatatccagcacacggaagacatggag

SEQ ID NO: 271899 - DNA, 100 bp, Homo sapiens
ccggcagtacggcaaatatggcggaggtttggacatggcacctttctgctgtgcctggaaaccatttaccagaaagtgacgggcaaggagctgagatacg

SEQ ID NO: 271900 - DNA, 76 bp, Homo sapiens
atatttaagtacaatggtgggcttaattttagttctggacatggcaagacatgtgccactctatcgggcactgctg

SEQ ID NO: 271901 - DNA, 82 bp, Homo sapiens
aggacgcggactgcgaaggcagcttcctgcctgacacagctcacttcaagaagtgcacaatgtcagaacgtggaattaagtg

SEQ ID NO: 271902 - DNA, 99 bp, Homo sapiens
agaagaattagtgcgtagtgctgaagatgatacagtttatgtaacttgatggaagaaaatggaattactccaaaaagacaagtgctcaagcagcaaaat

SEQ ID NO: 271903 - DNA, 82 bp, Homo sapiens
tgttgctcgagtaagagccagttccagagtgtctggatgaattgtaaaagcaacatcagcttgaccagtataaaattacagt

SEQ ID NO: 271904 - DNA, 83 bp, Homo sapiens
cttagacttccggaaggactttggcgaggagcaaatttttcagaacataaaacaagaatatagtcgttatcagaggtggagac

SEQ ID NO: 271905 - DNA, 89 bp, Homo sapiens
ttgaagggttcgaaatactggtacaaaaagaatggataagttttggacataaatttgcatctattgagaggatccagaatccagatctc

SEQ ID NO: 271906 - DNA, 75 bp, Homo sapiens
tataaaggaccagacaaatcaaattagtggttttgcttacaatttatgtccagccagagcaaaagcacacagccg

SEQ ID NO: 271907 - DNA, 99 bp, Homo sapiens
ggggcggcgctgcggccacccggcaggctccatctactctttgaagcttctgcccagcttgcattgtttctaggagaacctgcgtcatacctttatcta

SEQ ID NO: 271908 - DNA, 74 bp, Homo sapiens
tgcggagaacatttggcaggaacaacctcattctaaagtcaatcaccttctgctgcttggatgggtggatttgg

SEQ ID NO: 271909 - DNA, 95 bp, Homo sapiens
cacagagttagagagagggatggtgacagctctggctctggctattgctcaggagctgggtagtaaggtccccttctgcccaatggtggggagtg

SEQ ID NO: 271910 - DNA, 83 bp, Homo sapiens
gcgtggatcccggcggccgcgtgcagggcacccgctggcgccacggccaggacaacaatgcagatcttcgtgaagactctgac

SEQ ID NO: 271911 - DNA, 98 bp, Homo sapiens
ccgcgttggggtgagaccctcacttcatccggcatccaggctggagaagcagaacagcacacctgagagtgactacgacaacactcccaacgacatgg

SEQ ID NO: 271912 - DNA, 80 bp, Homo sapiens
aatgacagtccagttcccctagaacttgagcgctgcaagtctcctacctcaggaatggaagattgcgaaacaatggaaga

SEQ ID NO: 271913 - DNA, 100 bp, Homo sapiens
gagctcaggggccgctctgccgtggagctgggtgctggcacggggctggtgggcatagtggctgccctgctggttcaggcccatgaagttcatcagaaaa

SEQ ID NO: 271914 - DNA, 100 bp, Homo sapiens
gtctccagcctcggtaccatggccgggatcatcaagaaacaaatcttgaagcacctctccagtttgggacagagcactgaatatcgtcacatttggtccc

SEQ ID NO: 271915 - DNA, 75 bp, Homo sapiens
gaaacgtcaagtgaaggcaacatgagggtgcatgctgtggagtgggcccaacgacctacggcactttgaccccga

SEQ ID NO: 271916 - DNA, 115 bp, Homo sapiens
gtcgcgtgtctaggtgagtcgcggtgggtcctcgcttgcagttcagcgaccacggtggaagttaaacgagctgagcctcgggacagcaagagccaagcgccgggacagccaggtg

SEQ ID NO: 271917 - DNA, 75 bp, Homo sapiens
gccagtgggaccccacgtggctgtacctgtgcaagagaggagcttactccacgggaacagcctctagataatctg

SEQ ID NO: 271918 - DNA, 99 bp, Homo sapiens
cttgacaagagaaatgataaaacatttagaacgatgtgaacatcgaatcatggaatcccttgcatggctctcagttattctggtacaagttaacccagg

SEQ ID NO: 271919 - DNA, 82 bp, Homo sapiens
tagaagaaatgctgttttggccatctataccatctatagatcttcagtttagatcttggaggcatatcaactgtggttctaa

SEQ ID NO: 271920 - DNA, 90 bp, Homo sapiens
cccacctcctggaatgaccttaaatgagaagagtgttcaaaattcaattacacagtgtgtgtctggggaagagacttacagaagtggagt

SEQ ID NO: 271921 - DNA, 101 bp, Homo sapiens
cccagaccctgggtgtcgacaagggctacaagaaccagatgactttcacacgacctgccaatcacagacaactcacttttgaagaaattgccaaaagtgct

SEQ ID NO: 271922 - DNA, 75 bp, Homo sapiens
gactgatggagcaggcttgcaatattaaacactgccagtgaaagatgtagaagataaacctgaacaacaaaccag

SEQ ID NO: 271923 - DNA, 80 bp, Homo sapiens
gaccctgttaactactacgttgacactgctgtgcgccacgtgttgctcagacaggatcataggtatattgaactgttcct

SEQ ID NO: 271924 - DNA, 98 bp, Homo sapiens
cccggtgggccatcattggttggctcctgacaacgtgcacgatgccatggacaatattaccaggcagaaccaattctacgatacccaagtcatcaaac

SEQ ID NO: 271925 - DNA, 100 bp, Homo sapiens
ctcactcaaggatcagttggctttagcaattggagaataaaggcagccccgttgatgactgaaaatgacaaagcatccacctaacagacgaggaatcagc

SEQ ID NO: 271926 - DNA, 50 bp, Homo sapiens
gcctacccgggatacggaggagggttacatgctatgggaaaacttcctgg

SEQ ID NO: 271927 - DNA, 120 bp, Homo sapiens
gcaccctcgccttgtgtcaatggaggcacctgtcggcagactggtgacttcacttttgagtgcaactgccttccagaaatgacctccaccttcaacccccgagaatgtaaactgtccaag

SEQ ID NO: 271928 - DNA, 74 bp, Homo sapiens
tgtttgtggatcgctgtgatcgtcacttggccgtatctgaggaacagcagcctgcactcaagggcaaaaaggga

SEQ ID NO: 271929 - DNA, 80 bp, Homo sapiens
tgacagttcacataagaagttcttcgatgtatctaaacttggcaccaagtatgattggaggtggacacaaaggaagaggc

SEQ ID NO: 271930 - DNA, 90 bp, Homo sapiens
ggagaagcagctgggggccttggctgtaaggacccctaaggggtggagagattcaaccagttagcgtgaaagttggagataaagttcttc

SEQ ID NO: 271931 - DNA, 90 bp, Homo sapiens
cttcaactcatgcaccatgaaaagctgctgttttgcaggagatcgtgaccagaacattgatgatggcacctcagatcgcccctacagcca

SEQ ID NO: 271932 - DNA, 75 bp, Homo sapiens
ctggccccgagatcagaatgccggtgactgcttagaaaactgcacagcatctgatgaaattagcgaataagaaca

SEQ ID NO: 271933 - DNA, 82 bp, Homo sapiens
cagaatagacctgaagacaaaaatccagaagtacaagcagtctgttacagaatgtctgaaggggacagtgtgggagaatccg

SEQ ID NO: 271934 - DNA, 100 bp, Homo sapiens
tgaaactggttccaaatactaaaatccagatgtcatattcagaaattgattccagtggaaacattaactcctgaaattgctttgtattggtgtgcccttt

SEQ ID NO: 271935 - DNA, 100 bp, Homo sapiens
gaagagcacgcagtccgacttggccttcttcaggttcccgcgggaccctgccaggttaccttccgaacaagaatctatcactgtaatattaacagccaag

SEQ ID NO: 271936 - DNA, 96 bp, Homo sapiens
ggctattggactgacttttcttatgctgggatgtgccttagaggattatggttttaatccaggtgctggtttgccaactgacaaaaagaaaggtgg

SEQ ID NO: 271937 - DNA, 100 bp, Homo sapiens
ccgggatcgtgaccgagaccgtgaccgagagcgtgaccgagagcgcgaatatcgtcatcgttagaaggaaatggagcagtcaatgaatatgctgaattcc

SEQ ID NO: 271938 - DNA, 98 bp, Homo sapiens
cagcttcctggacttgggggatctgaacgagtcggacttcctcaacaatgcgggacaatggtgacagatccaggcaccgagctccacgcaatgcccgg

SEQ ID NO: 271939 - DNA, 100 bp, Homo sapiens
ttcttccactgatatctcaaaaggtgatctggacaaaggaacaggtatctcagttctggacatggcaagacatgtgccactctatcgggcactgctggaa

SEQ ID NO: 271940 - DNA, 75 bp, Homo sapiens
gtaacaataacaagaaaaacagcctagactagacgcacatcaggaagacagctggattttgaagattgatccaag

SEQ ID NO: 271941 - DNA, 108 bp, Homo sapiens
ctactgagcgtgctcccctctgagactggagtgagagggtcttctggtcgacgtgttgatgcccaatgttggtgagattgtgggaggctcaatgcgtatctttgatag

SEQ ID NO: 271942 - DNA, 96 bp, Homo sapiens
ggaggttttaaacagtataacagcatttatgacattaacagagaacaggactatgtcaagaattctgagggtatacttggtgaaaatgaattaaga

SEQ ID NO: 271943 - DNA, 100 bp, Homo sapiens
atgaaggaagacgtggacccccacaatggggctgacgatgatgtggaagcgtttgccaaagccatgcagaacaacgccaagcccgagcagaaagagggcg

SEQ ID NO: 271944 - DNA, 100 bp, Homo sapiens
cccggctttgcagcggggacttcggcggcggcgcctcaggcacctcggcccggaacatccagtcatggataaaaatgagctggttcagaaggccaaactg

SEQ ID NO: 271945 - DNA, 75 bp, Homo sapiens
gcagtataataacctggaacagatacactctgtgcagttttagagagagacacactcagtattcgagaaagtcga

SEQ ID NO: 271946 - DNA, 88 bp, Homo sapiens
ttgaagctatgcagtatttctttggcatcactgcagctagtaatttgccttctggattttgtccagtggagccccaaaatagaagcaa

SEQ ID NO: 271947 - DNA, 100 bp, Homo sapiens
tttgaatatgcactctttggaaaattcccttatcgatattatgagagcagagcatgatcctcttaaggcacttttgggagtgtggaagtccataatttgc

SEQ ID NO: 271948 - DNA, 101 bp, Homo sapiens
aagaggaagacggggcggaagaccaagatcatcgagatgagaccctcctggatgacttccttctcacgtacactgtcttcatgacaactgatgacttgtgc

SEQ ID NO: 271949 - DNA, 100 bp, Homo sapiens
aggaggagattctgaagataaggagtggtctctggttcatcatccagctccaagtatgaccctgagatcctgaaagctgaaattgccactgcaaaatccc

SEQ ID NO: 271950 - DNA, 80 bp, Homo sapiens
ggagggcgactgtatgatcgtggatgtcccggatgctgcggacaatgcagatcttcgtgaagactctgactggtaagacc

SEQ ID NO: 271951 - DNA, 100 bp, Homo sapiens
cttactttgaagcagccaagatgttttgtattaatggatcacattttgaatttgaaggtgtgtagaccacactccaaaactgaaactgtggatggcagcc

SEQ ID NO: 271952 - DNA, 74 bp, Homo sapiens
tgaaaacatggggattggaattcgcacttttcaggattagaagaggctgtgtatagaaacatacaagcttgcaa

SEQ ID NO: 271953 - DNA, 100 bp, Homo sapiens
aagacctcggggccggcctcgcaaggcgcttcccctttccagagagccagaaagaaagcaagtgcaccggcacctggaccaacacgaagtgagatacctg

SEQ ID NO: 271954 - DNA, 75 bp, Homo sapiens
ttttttcttatgaagcttcttctggttggaaacttgtcaaatttcatcagatctttaaatggatgagatggctac

SEQ ID NO: 271955 - DNA, 96 bp, Homo sapiens
cccatcgtgtgaactatagagtttgtggacagatttatattggcaccatgactcctgtgaggatgcagcactccctggcaggtcagacctatgccg

SEQ ID NO: 271956 - DNA, 75 bp, Homo sapiens
ctgacttctcaaaaagcactgcacagaggaggaggcagcagaaccccatcaaaacaagctatcgatcagggaaga

SEQ ID NO: 271957 - DNA, 101 bp, Homo sapiens
aagctggagacttggtccagccgggcatcagctttccggggccggcagaggaggatctagtgtttcaggagccgtagagccagatcgtcatcatgtctgca

SEQ ID NO: 271958 - DNA, 100 bp, Homo sapiens
aagcttgttccgtggtcccagtgccttcagaacttgttctttatagagttggaagcaagacatcagaataatatcttcatagatgacataagtgacattg

SEQ ID NO: 271959 - DNA, 75 bp, Homo sapiens
ctgaaattcagagaggggaagtgatttgcctcagcttgtactgccaaagaggtgctgaaaaaatatttggagtcc

SEQ ID NO: 271960 - DNA, 82 bp, Homo sapiens
cggatgccctgcagtacctgcagaaggtctctggagacatcttcagcaggtgtctgtgacctttgatgatgtggctgtgact

SEQ ID NO: 271961 - DNA, 76 bp, Homo sapiens
gccctatcaggacatggagtatgaaagacggtcattcctgtcccaatcagctgctctactactgatgacattaaag

SEQ ID NO: 271962 - DNA, 100 bp, Homo sapiens
cggcttccgacatgcccgcaacgtggacagggtcctctgcagcttcaagatcaatgactcggtcacactcaaaaaggttaagaagttcttacaagagttc

SEQ ID NO: 271963 - DNA, 100 bp, Homo sapiens
ggagattatgtctggaggtggcagcagaaatcctactccacccataggaagacccacgtccacacctactcctcctcagactgtgatcaaccactctatg

SEQ ID NO: 271964 - DNA, 83 bp, Homo sapiens
agcatcatcgacacccccgggatcctgtctggagagaagcagcggatcagcagagggatttcagtcataatcggttgtctaac

SEQ ID NO: 271965 - DNA, 100 bp, Homo sapiens
cctttcgggaccccaacagcgaggagaacagcaacgatattgccctggtccacctctccagtcccctgcccctcacagggatttgtatcgttgtgcccgt

SEQ ID NO: 271966 - DNA, 82 bp, Homo sapiens
cgtccttctccactttcgccagcccgtgccgcgagcgcggcctgcaggaggctactatgtgggcatgtgccttgcggcttca

SEQ ID NO: 271967 - DNA, 100 bp, Homo sapiens
caacaagaggaaagacacacctaccaagaagccagtcaagcggccaggtttggtgcacctcgatttggaggaagtagggcagggcccttatctggaaaga

SEQ ID NO: 271968 - DNA, 113 bp, Homo sapiens
gcgggtcgcggcctggagccgttcgtaatgcgagaggtgcgggcgcggctggcggccacgcagatgtatttccactacacaaaattttccacctctgggataccttactactt

SEQ ID NO: 271969 - DNA, 87 bp, Homo sapiens
gttggtgagtgtccggccccagtctggctcttgctgattgaattcctttggtgcagtttagcatgttcctctgtgttctgcatctcc

SEQ ID NO: 271970 - DNA, 100 bp, Homo sapiens
aatttgatggagaaggttcgaggcctacagaacctagcctatcagctggggctggatgagtacctaatctgggagcctgcaagtgacaacagcctttgcg

SEQ ID NO: 271971 - DNA, 75 bp, Homo sapiens
gcatcactaacaacttcccattcaggccttcccttcttcttggtggtgttcttgagtaagataatctggactggc

SEQ ID NO: 271972 - DNA, 88 bp, Homo sapiens
tccactcacccggcagatatccgtgaaggctctagctcttgggacccaaccaccatgctgtgaagcagcccaggccacacagagaggc

SEQ ID NO: 271973 - DNA, 85 bp, Homo sapiens
aagattgggcaagagaagaattcagaagaaacaaaagtgccaccgaagaggatgaatctcctccgaaacaacagctgcctctcca

SEQ ID NO: 271974 - DNA, 101 bp, Homo sapiens
ggaaacaggcgtacatcaggggctgttcttttgctgcaaatgaagttgatggaattacactgtgatacgactgactgtcttctacattaagtccattgagc

SEQ ID NO: 271975 - DNA, 51 bp, Homo sapiens
cccatcaagggaatgaacttcacacactctacacccccaagtgcatatggg

SEQ ID NO: 271976 - DNA, 142 bp, Homo sapiens
ccaaaatggaacagaaagccaagcagaatcaggtggccagccctcagcccccacatcctggcgaacaaagatcattccactcagcctgggacgatggggaggaaaaaaatccagatctcccgcatcctggaccaaaggaatc

SEQ ID NO: 271977 - DNA, 75 bp, Homo sapiens
caacatgcacagcctggcgacggctgcggttctctacttttagagtcgaaaataaatcctaacactgcataccag

SEQ ID NO: 271978 - DNA, 90 bp, Homo sapiens
gaaaggagaaacaccagacactggaagtctcactgtctcgactctgcttatgataatgtcaacaaagttcgagtagctatcaagaaaatc

SEQ ID NO: 271979 - DNA, 75 bp, Homo sapiens
gtaccctttacagaagaagaacaggtctgtgagctggatattatctttaattttgaaaaggcttatttcatcctg

SEQ ID NO: 271980 - DNA, 75 bp, Homo sapiens
ggaatccgagaagagcagagcggagggagccccagacacggtagcagtagctgatgtgcagtttggccccatgag

SEQ ID NO: 271981 - DNA, 101 bp, Homo sapiens
ccggatttcccaccagagtgtggaacccgtggtcatgatgcacatgaacattcaagagaacttggcaaacaaggctgacagggaccagtatgagctgcttt

SEQ ID NO: 271982 - DNA, 102 bp, Homo sapiens
cgaagatatgctcatgtggtgttgaggaaagcagacattgacctcaccaagagggcgggagaactcactgaggatgagaaccagtctgggatcttgtactgg

SEQ ID NO: 271983 - DNA, 90 bp, Homo sapiens
gggaagcggcggcggcggctccagcgtcctaagagatgatcacagtcgtgttaaactgcaaaatgctgagaatgattatattaatgccag

SEQ ID NO: 271984 - DNA, 83 bp, Homo sapiens
gcagcgcccactggaggtgggaggtcagcccaaggccaaccccactgtcactctgttcccgccctcctctgaggagctccaag

SEQ ID NO: 271985 - DNA, 75 bp, Homo sapiens
gtctgcgttgctcttgcttttcctcgctggggtgtacggacactgccttaggaaaaccacgagaggtgtttcgac

SEQ ID NO: 271986 - DNA, 100 bp, Homo sapiens
gtcaccctggtcttcaccaagaacttcgcagagggggttaaggtgatgcccaatgctattgtgcaatccgttggagtcagcagtggcaagttacttatca

SEQ ID NO: 271987 - DNA, 108 bp, Homo sapiens
atgtactggatcgaaatgtccatgagaaaaagcttggagataaagttgctttttactggcattcccatcaagagcaccatggacaaccccaccaccacccagtatgcc

SEQ ID NO: 271988 - DNA, 100 bp, Homo sapiens
atatgtagtgacaaatgctggaagatctcatgatgttcaaccattcacttacactccagacccaggaactttgtgaaggaagccgaggagatcagctcca

SEQ ID NO: 271989 - DNA, 101 bp, Homo sapiens
ctatgtgaacgttgtcagcctaggccggagcctcaacagaaagctcctttagttcctcctcctccaccgccaccaccaccaccaccgccacctttgccaga

SEQ ID NO: 271990 - DNA, 90 bp, Homo sapiens
cagagacagtggcaacaattcaggagacctacctgatgaagcacatgtccaaacacacggtggtggagcacctggtgagccatcactcgc

SEQ ID NO: 271991 - DNA, 82 bp, Homo sapiens
gctgcgcgacccccgcgcatgggaaatcctcattgacgattcaatttgttgaaggccaatttgtggactcctacgatccaac

SEQ ID NO: 271992 - DNA, 100 bp, Homo sapiens
cgaagagagagtgtatgaccaggtggtggaagacaaggaagaggtgcagcggaagcggaggaaggccttgcccaccttctcccagcccttcgggggtggc

SEQ ID NO: 271993 - DNA, 50 bp, Homo sapiens
cgacgaggagcagggcctgactgcgcagccacccagagcttcacggcccc

SEQ ID NO: 271994 - DNA, 83 bp, Homo sapiens
gccgatccagcctgcggagcctgtggggcaggtacacggctgccccacaccccctgctatctcttgatccccacttcagccac

SEQ ID NO: 271995 - DNA, 75 bp, Homo sapiens
cgaggaggggagcgggaagcgcaggccatttcataattctgaatcatgtctgataacggagaactggaagataag

SEQ ID NO: 271996 - DNA, 74 bp, Homo sapiens
tctgagactggagtgagagggtcttctggaatgtcccagcggaattgtcaatgaggagaacttcaagcagattt

SEQ ID NO: 271997 - DNA, 100 bp, Homo sapiens
aaggagctaatgctgcttatttgcagttgttgaacctgtttgcctatgggacatacccagattacatagggtgttaaataccacattatttgaaagctgg

SEQ ID NO: 271998 - DNA, 83 bp, Homo sapiens
ctccggcttccgtcccggacagagcccgtggtcgcgcagcattactctactgactggcagagacaggagaggtagatgtccac

SEQ ID NO: 271999 - DNA, 100 bp, Homo sapiens
ttcagcatggctcatattctacttcattcagaagatcaggtacacaaatgcacgcgacaggaaccaggagtccaatgtgctgattgctgctaacagtcag

SEQ ID NO: 272000 - DNA, 98 bp, Homo sapiens
ccacctgggagcgtcctctaacacattcagactacaagtccagacccaggagagcaaggcccagaaagagagccatttcctgcttttaagtcttggca

SEQ ID NO: 272001 - DNA, 90 bp, Homo sapiens
atcgaggacgacttcaactatggcagcagcgtggcctccgccaccgtgcacatccgaatggtgattcgcctttgccagtctcatctcgtg

SEQ ID NO: 272002 - DNA, 83 bp, Homo sapiens
ggagcacctgaagagatgccagcagaccatggtgaatccgggcagcagctcgcagccgcccccggtgacggccggctccctct

SEQ ID NO: 272003 - DNA, 100 bp, Homo sapiens
gttggcctgacaaattatgctgcagcatattgtactggcctgctgctggcccgcaggatgatacataccttttctcgatgtgtgttatgctgtgctgaag

SEQ ID NO: 272004 - DNA, 87 bp, Homo sapiens
ggaaacaaggcttccagtgccaagcaatggctgccatccggaagaaactggtgattgttggtgatggagcctgtggaaagacatgct

SEQ ID NO: 272005 - DNA, 100 bp, Homo sapiens
ttctgcatctggctcctgcagtcactcatccacatcttgcagctcgggcaaatctggagatatgaagatcaatgatgcagactgatggttttgatgaagc

SEQ ID NO: 272006 - DNA, 109 bp, Homo sapiens
aaaaagttgaaaacaagaccgtccaagagcctcaagggaaagtacatgtcttctaaatgcactactacctctgacagtgtatgtctgccctgtggcccggatgaatact

SEQ ID NO: 272007 - DNA, 101 bp, Homo sapiens
cggcgagaggcgggctgaggcggcccagcggcggcagcggccaccatgctgccactgggctcagagcccgccctgaatgagctgctgcttcgcaaggagga

SEQ ID NO: 272008 - DNA, 100 bp, Homo sapiens
tccatatccgggtgcggctccaccccttccacgtcatccgcatcaacaagatgttgtcctgtgctggggctgacaggtcagaagagatcaattctacaga

SEQ ID NO: 272009 - DNA, 83 bp, Homo sapiens
gccttcccatcaccatcacagagagcgatcaaaccagtccagctacgggggcccagccagccagcagctgagtgggggttacg

SEQ ID NO: 272010 - DNA, 85 bp, Homo sapiens
cacaccaggccggcaggctgagaaaagcgagaccgcgtgcgaggaccgccttcctgtgcatcggtggatctgcagggagacagct

SEQ ID NO: 272011 - DNA, 100 bp, Homo sapiens
gcggaacagggcggcactggcccgccacagcgacgccggcgccgagggacaccgcagtatgaggcagagctggagatggagctgaagatgctgaagtctc

SEQ ID NO: 272012 - DNA, 50 bp, Homo sapiens
agcatgcgattcttattgaccttgacacgaagatcgattgagaagttatt

SEQ ID NO: 272013 - DNA, 74 bp, Homo sapiens
ttaggtggctggacagacagctcattcgactgggaagtgttcgccagttactacatgaaaagataagagatgct

SEQ ID NO: 272014 - DNA, 75 bp, Homo sapiens
gatgagttgggtagatctgaacatccctgataccccagaagaaaaaaccgggaagatcctgacggagttcctcca

SEQ ID NO: 272015 - DNA, 51 bp, Homo sapiens
ctgaagagggaagacacgcggaaacagaattgcctaaggaggtgccagaaa

SEQ ID NO: 272016 - DNA, 100 bp, Homo sapiens
cgaaacccctcggcggcgttcttctgtgtggcccgcctgcagggcggcaccttcctacttctgcccagccacagccctcccctcacagttgagcacctgt

SEQ ID NO: 272017 - DNA, 90 bp, Homo sapiens
ggggaaactgggagtttccaattaacaatgaagcagctttccagagtgttgaatcttccaccagaaaacttgatcacatcaatatctgca

SEQ ID NO: 272018 - DNA, 98 bp, Homo sapiens
ctgctgctgccaagctgtggaccctctcagccaacgatatggaggacgacagcatgggtttcacaaactggactaaacgagattttaaccagtttatt

SEQ ID NO: 272019 - DNA, 75 bp, Homo sapiens
cttggatccgcgggacaagaaaattcatgcgactggtcgaattgacaaatcttaccctacagtatgtggccacac

SEQ ID NO: 272020 - DNA, 101 bp, Homo sapiens
gggggttgctgacccagaggagagttctccaaacatgatcgtttactgcaaaacgttccatcctcagagcagcctgaactgttcctaaagaaacttcagca

SEQ ID NO: 272021 - DNA, 98 bp, Homo sapiens
caacctgcttgggggcgtacaagaaggtcgttccaggggtagaggaggcatgaaggatgaccgtcgggacagatactctgcgggcaaaaggggtggat

SEQ ID NO: 272022 - DNA, 96 bp, Homo sapiens
ccgttcgttcgtttccagcctcaggaatttatggtcgcctttttgaatgagggatcgactacaagaccaccaccatcctgctggacggccggcgcg

SEQ ID NO: 272023 - DNA, 100 bp, Homo sapiens
tgctggatttaagcactgctgcactttatgaggtcatcgggaccctggaggaggtccacatgccacagaatgggatcaaccaccctggcatcactgccct

SEQ ID NO: 272024 - DNA, 100 bp, Homo sapiens
tgccctctccttttcgtttccggaaacatggtctcggcgcggaagatggccggcggcgtggacggccccatcgggatcccgttccccgaccacagcagcg

SEQ ID NO: 272025 - DNA, 83 bp, Homo sapiens
cgcgtgttccaagaactgcctgtgcgccctcaacctgctttacaccgctactgcagcactggggtgtcagttgttggtccgac

SEQ ID NO: 272026 - DNA, 90 bp, Homo sapiens
gccacacatccccgaccacttgcggcctgagtatgcaaattgtggctactaatttgccccctgaagatcaagatggctctggggatgact

SEQ ID NO: 272027 - DNA, 83 bp, Homo sapiens
ccaggatgtctacaaaattggtggacgctattgataacggaatggttgcaattaaggacattttttttcctcttttttttttt

SEQ ID NO: 272028 - DNA, 96 bp, Homo sapiens
cagctataccagccaccctgcccccaagaaggaagtcatcatgggccggcctggaacaggacccttgaacatctgtgaagaaatgactattctgca

SEQ ID NO: 272029 - DNA, 82 bp, Homo sapiens
ccatccgcagcaaggacgtccgcagcagagttcggaatccagcattaagaagaaatttctcaagaggaaaggaaagaccgac

SEQ ID NO: 272030 - DNA, 95 bp, Homo sapiens
aaatgaaacaagcctttgctgaattggagagctggctctttggtgtaacgggaaactgcgctgcctgtagtaagctcatccctgcctttgagatg

SEQ ID NO: 272031 - DNA, 100 bp, Homo sapiens
cttcgtttgccattttcttatggagaactgtccttgttgaaactctgatgaggaagaaagtgcttcagaatctgaactttggaagggtccactaccagag

SEQ ID NO: 272032 - DNA, 100 bp, Homo sapiens
tcgtgatatccaagaacaagcactgcaggtgcctaatggataagaacttcgttaggattgggaaatggtttgtccgaccctacgaaaaggatgaaaagcc

SEQ ID NO: 272033 - DNA, 98 bp, Homo sapiens
tgggactcgtctggcgtccctcaggccagaagcggactcctagaagaggggagcagcaaggatggaatgacagccgtgggccggaggggatgctcgaa

SEQ ID NO: 272034 - DNA, 100 bp, Homo sapiens
aggacgacgaggaggaggaggaggaggaaaaaggttcggctttccagtttggcagcagcactacaaatttcaacttcacaaacaacagtccatcaggagt

SEQ ID NO: 272035 - DNA, 100 bp, Homo sapiens
gccggctacagcgggaagagcgaacatggagaaggcgactctgccgtcggtgacgctcatcgtgggctgtggcgtgtcctctctcaccctgctcatgctg

SEQ ID NO: 272036 - DNA, 98 bp, Homo sapiens
cttggcaaagcatccagagaagctggctactgtcctttctggggcgtgtgatggagagatcactgttacagatgaggaagttagtaatccatcctttt

SEQ ID NO: 272037 - DNA, 83 bp, Homo sapiens
cgaccccgtcccgaccctggccgccccgagcggagcctggagcatcacaggacatggccccctcagccacctagctggggccc

SEQ ID NO: 272038 - DNA, 139 bp, Homo sapiens
cacgaaatggattggagtgaaccggagaccccgaaaacggaagcgcagggagaaggaagaggtgtttgaaaagatatgaattgagaattcgttatttgccaaaaggatttctaaaccagtttactgaagataagccaac

SEQ ID NO: 272039 - DNA, 100 bp, Homo sapiens
cagatcaagtccaatatcgatgccctgctgagccgcttggagcagatcgctgcggagcaaaaggccaatccaggacaagatcgcagaggaaggtgggcgg

SEQ ID NO: 272040 - DNA, 75 bp, Homo sapiens
cgtgagccaccacacctagctggctctggaagaggatctgaaccagaagaagcgggagcaggagatgttcttcaa

SEQ ID NO: 272041 - DNA, 75 bp, Homo sapiens
cacctcctcctccgcctccaaagtcgcgtgtttcaacaaaagacagccagaagacaatctgatgatgacaagttc

SEQ ID NO: 272042 - DNA, 103 bp, Homo sapiens
cctgcctcagcctcccgactagctgggattacagagcaactaagaggtctttcttggctctatgagaacctggtgggattcctgaagataaagtccacaaaaa

SEQ ID NO: 272043 - DNA, 101 bp, Homo sapiens
cgggatggtgccacaggaggctgtgcgggccccgctccgcttcgaatgggcccgatgagagaaagggaaagttaaggatgctggagcagaacaatggattt

SEQ ID NO: 272044 - DNA, 83 bp, Homo sapiens
ggacaagcttaataaaataaccgtccccgccagtcagaagttgagttggagcagtgccagtcctttccaaagaatgtgcatca

SEQ ID NO: 272045 - DNA, 75 bp, Homo sapiens
gcgttgcgattattgaccagtggatctgcgcacacgccagctaaccaggagatgcttcagaaggtcgaagttgag

SEQ ID NO: 272046 - DNA, 75 bp, Homo sapiens
cagcactatcccaagactgctggcaacaggtcattgacgagactctggatgttaaggaaatgattttcaatgccg

SEQ ID NO: 272047 - DNA, 82 bp, Homo sapiens
ccggctggaaatgcttcgtttaccacttcgccgtgcccggcctgcatgcctacgaaaaggaggacagtgatgaagtccacct

SEQ ID NO: 272048 - DNA, 100 bp, Homo sapiens
ctcctcctccccagttctactcaagccttattgaagagataggaactcttggttgggataatgtttcctgaggttataggcgggtgtttgaggagtacat

SEQ ID NO: 272049 - DNA, 90 bp, Homo sapiens
gtttcatcaacgtctaagaaacttggagaactccagggggaagcgagtagcattatctgatgatgagacaaaggaaactgaaaacatgag

SEQ ID NO: 272050 - DNA, 83 bp, Homo sapiens
ctagtagctgccttctgctctccagcgctctcagcaccaagctcacttgtgcatttttggcctgcaaagtagatgaattcaat

SEQ ID NO: 272051 - DNA, 80 bp, Homo sapiens
ggagcattgcttctcatacagtaagatccaggatgagaagactgataaaagaagaagctagctgaacagctgtaaaatgc

SEQ ID NO: 272052 - DNA, 98 bp, Homo sapiens
gggcaccgaggaccagctcaatgacagctgaagaaaaggtgactggtctcatgagccctgaagaatgaactcagaggaggttgtttacatgaggttct

SEQ ID NO: 272053 - DNA, 100 bp, Homo sapiens
aagctgacttggacttcagaggaaggcagctattctcaggatatgacaggggtaacacccttccagatgatttttgagctgtcggaaaaggtaacagaag

SEQ ID NO: 272054 - DNA, 100 bp, Homo sapiens
ggcagcagaaatcctactccacccataggaagacccacgtccacacctactcctcctcagaatgccagaggattcaacatgagcatacctatgcctgggc

SEQ ID NO: 272055 - DNA, 75 bp, Homo sapiens
gaagatcaagaagctcattaagagcttggaggcggcccgcggatctaaaagtgtcgtggtacagcaaagacaaga

SEQ ID NO: 272056 - DNA, 102 bp, Homo sapiens
gctgatgaagaggacattcgcaatgccatcatggccatccgccggaaccgcgtggccctgaaggctgcctcaagggctacgtcaaccacagcctgtccgtct

SEQ ID NO: 272057 - DNA, 90 bp, Homo sapiens
ggcggtgcaggagtcggcggctcagttgtccatgaccctgaaggtccaggagtacccgaccctcaagttagtgtgactctggatccagat

SEQ ID NO: 272058 - DNA, 82 bp, Homo sapiens
ctgggtcagtccgccgctcaccccgcggccgcaccttcccgccttctcagatgccagcacgagccgccgcttcacgccgcct

SEQ ID NO: 272059 - DNA, 129 bp, Homo sapiens
gcatgtccttctctgaatgatgaatacttttactactgtgacaacattaacgtatcaccttttgccatgatagcatttctttcattggacagttccttacaagggctccactcagtgtctgtctgtatt

SEQ ID NO: 272060 - DNA, 60 bp, Homo sapiens
cccagtgaagagcttcgactccaagggaaacttcgtggcttgcatgacagctattttacg

SEQ ID NO: 272061 - DNA, 100 bp, Homo sapiens
gatggcgtcccccgggggcccgtactgcacatcgtggtggtcggatttcaccacaagaagggctgccagattcacaatgacatcctttcaagaagtccca

SEQ ID NO: 272062 - DNA, 90 bp, Homo sapiens
aaatgatgaaccagctcattactgtagcatttgtgaggtacgtgccctggaggaggccaatgctgacctggaggtgaagatccatgactg

SEQ ID NO: 272063 - DNA, 75 bp, Homo sapiens
gtaaagtttctcaggccacaccagagagtacaggggctcaggtccaggtggcaggggatatgctacccaactcaa

SEQ ID NO: 272064 - DNA, 100 bp, Homo sapiens
ggtgtgcaaacccgagagaactggggcacagtcttttgctgagcgcctgcgcctgggaattgcagtgattcatggagaggcgcaggatgccgagtcggac

SEQ ID NO: 272065 - DNA, 100 bp, Homo sapiens
ggtggctgctaccccagccagtgtcaacacgacaccggataaaccaaagacagcatctgagcacagaaagctcattgctatggacagtgctatcaccctg

SEQ ID NO: 272066 - DNA, 100 bp, Homo sapiens
cactgtacagttcctcaaccgcttttctacagtttgtgaggagatatttccctttgctggctaaacagaagcctgggcacccagaatgtgatatcctgac

SEQ ID NO: 272067 - DNA, 100 bp, Homo sapiens
acgccggtgatcatagccatccagaccttctgctaccagaaaaccttctccaccagaatccagctcacgctggttactaatctggatgacagtaactggg

SEQ ID NO: 272068 - DNA, 50 bp, Homo sapiens
gtgactcaggccctcaacctctagcagggtttactgcgaggaaatgcgtg

SEQ ID NO: 272069 - DNA, 82 bp, Homo sapiens
acaaacaacttacagacttccacaagcaagtcactagcatttatgacattaacagagaacaggactatgtcaagaattctga

SEQ ID NO: 272070 - DNA, 50 bp, Homo sapiens
aaggcccgcaagaagctcctggcattgatcagggaccatgaaaagaaact

SEQ ID NO: 272071 - DNA, 100 bp, Homo sapiens
gaagaactcataaacttggcttcctcgcttctgctcctcagggtgcttcaaggatgaccgcatcgtcttctggacttggatgttctccacctacttcatg

SEQ ID NO: 272072 - DNA, 82 bp, Homo sapiens
gcgagctcgcgatgagtggtctcggcaggctcttcgggaagggcacttccaggttggcttaaagggttaccctaggccagca

SEQ ID NO: 272073 - DNA, 73 bp, Homo sapiens
tgttggattgccaaatgttggatacgtcggtaacctttccagagatgtgacagaagctctaattctgcaactc

SEQ ID NO: 272074 - DNA, 99 bp, Homo sapiens
gccgaaaaaggcagcagcgaagaagggagagaaggtacccaaagggaaaaagggaaaagctgatgctggcaaggaggggaataaccctgcagaaaatgg

SEQ ID NO: 272075 - DNA, 75 bp, Homo sapiens
gtctgggtctcagccgccaaagaccccgtccggtagtaagactttgaccccgacgcaggcttcagtgattgccgc

SEQ ID NO: 272076 - DNA, 96 bp, Homo sapiens
gaaggatgaaaaggctttattgccaaactgaacccaagacagaccaggatgaggagcattgccggaaagtcaacgagtatctgaacaaccccccga

SEQ ID NO: 272077 - DNA, 112 bp, Homo sapiens
cagagatcaagcaagggattcttcctttgagagaagacatggagagcgagaccgtcgtgacaacagagagagaggtgctggagaatctggtaaaagcaccattgtgaagcag

SEQ ID NO: 272078 - DNA, 100 bp, Homo sapiens
cacctgacaaatcctagcgaatttttggagcatctccacccaggaacctcgccatccagaataagactttgaccccgacgcaggcttcagtgattgccgc

SEQ ID NO: 272079 - DNA, 100 bp, Homo sapiens
ttctgcaataaaacccagagtaaactcttagataaaatgacgacgtccttctggaagaggcgaaactggattcaagccaaaactcgagaatttagggaac

SEQ ID NO: 272080 - DNA, 82 bp, Homo sapiens
ctgctattgaaagagagtatgcacagatgatcaagcggtgctgattcacgagagtggaagcctccagagcttggggctttct

SEQ ID NO: 272081 - DNA, 100 bp, Homo sapiens
cctgcaccccttcttgcagcgccagcagcttgcttatggcatctatgtcatccaccaggctttcgccaaggtcttcaacacaacccctgatgacttggac

SEQ ID NO: 272082 - DNA, 100 bp, Homo sapiens
gcttaccctccgggggtaaaagagatcaccgacaagatcaccacggacgagatgatcaaacgcctgaagaatctaggtcaacctattaagatacgtttcc

SEQ ID NO: 272083 - DNA, 100 bp, Homo sapiens
cagcgcccgcgccccgccgctgagccgtcgcggagccgcgcagccctcggagcacggcaaaacccatttatggcggttggctgctcctggctccagatgg

SEQ ID NO: 272084 - DNA, 73 bp, Homo sapiens
atctcttaattcaacagaaccatattgggagtgtgattaagaacctacttccgaaagttctatggaagattca

SEQ ID NO: 272085 - DNA, 100 bp, Homo sapiens
cgagcctcggcttgcggccggcagtttccgtgggtctgtgaagaggtcggcggcccctgcgggcgccagtcagtgagaaagatcagtctaaagaaaagga

SEQ ID NO: 272086 - DNA, 90 bp, Homo sapiens
gcggagggggaccaccgtggagagcgcggtcccagcccggccactgcggatccctgaaaccaaacacgaatgcagagtttgagtccagat

SEQ ID NO: 272087 - DNA, 82 bp, Homo sapiens
cgatggggctactttattccagaacaatcacagtcccttcaccgatgttgtcaccaccaacctaaagcttggcaacccgaca

SEQ ID NO: 272088 - DNA, 98 bp, Homo sapiens
tgaaactagtttccttcagcaaactatgtacaagttacagtcatagcagtacccgagatggaagacgcgacaggttccttcaatggtgccttagctgc

SEQ ID NO: 272089 - DNA, 80 bp, Homo sapiens
ctgagcctggagctgtggaagctgtgcacctccctcactttgtggctctccaagtactatactggcaattgctggagaag

SEQ ID NO: 272090 - DNA, 100 bp, Homo sapiens
gtgagattcggggcttacatgggatttgcatgacttttctgcacaacgctggaaaatttgatgcccaggtccaagcatctcattttgaaggcctaatcac

SEQ ID NO: 272091 - DNA, 80 bp, Homo sapiens
cagcctttcaatgtgacacaaggaaagtattctacagggacaggggcagacccggtggtcagcgccaagagcaaccattg

SEQ ID NO: 272092 - DNA, 82 bp, Homo sapiens
atttgttaaggattccaagtaactcttatttgtgagaaggcaaccaaagtgcaggacatcaaaaacaacctgaaagaggcga

SEQ ID NO: 272093 - DNA, 82 bp, Homo sapiens
aaatcaggatcgcttgaggaggagagaggagagggaacgggaggagcgtctgagcaggaggccaacgcagacccgtcagtga

SEQ ID NO: 272094 - DNA, 50 bp, Homo sapiens
tgacagtctgcatgtgcagttttcagacatggcccatgaacatggacatg

SEQ ID NO: 272095 - DNA, 50 bp, Homo sapiens
cgcgagggaagatgcgtgcgcccatttgccggatggagtgctgtgatgtg

SEQ ID NO: 272096 - DNA, 117 bp, Homo sapiens
ctcccgatgaagcagctgcagccgcagccgcctccgaagatgggggatttctacgacccggagcacccgacccctgagaatagccaggccagaagaaggaaggcctgtggtgagtgg

SEQ ID NO: 272097 - DNA, 80 bp, Homo sapiens
ccactttcgccagcccgtgccgcgagcgcggcctgcaggaggcgagaaccactgtctctgatcaacgtgcggaagaggaa

SEQ ID NO: 272098 - DNA, 95 bp, Homo sapiens
ctgcctgcccccggaggtgcccacgcagctgcctggacaatctattgtgcaagtggagacattaggagaatttggggtgttttttactctttttc

SEQ ID NO: 272099 - DNA, 51 bp, Homo sapiens
ctatagtgagccaacatgatttagaccagatggagtctcccaggcgggaat

SEQ ID NO: 272100 - DNA, 75 bp, Homo sapiens
tggagacagagcttaaaatgtagatgcctcggcagtggaatccaatttctttccagccacaacctaccccatggg

SEQ ID NO: 272101 - DNA, 96 bp, Homo sapiens
gaaatacatccaggaaagacatggagattctcttaaaaaggttaatacaatctgttggaatgacactggagaatatattttatctggctcagatga

SEQ ID NO: 272102 - DNA, 83 bp, Homo sapiens
gggagatccgagagctcttcaggtgacttaagagattaaaattaatttggttgctgttggttctgaacaaataatgagttctt

SEQ ID NO: 272103 - DNA, 82 bp, Homo sapiens
agggaaccctggtcaccgtctcctcaggaacttgctactaccagcaccatgccctaccaatatccagcactgaccccggagc

SEQ ID NO: 272104 - DNA, 84 bp, Homo sapiens
gggagcgtcctggggctgtgctccatggcgagctggctacttgaaggaaattttgccaaagaagtgagccatgaaatggatgga

SEQ ID NO: 272105 - DNA, 100 bp, Homo sapiens
ttcagaaattccagatactcaggagttagaggaagaattagaaagtcataaactgttagtttgatgaagaatttctggaaacaaaagaacagttgtacaa

SEQ ID NO: 272106 - DNA, 96 bp, Homo sapiens
tttcctgtgctgcttcgacttgcgtgtgatgttgatcagatcaagcttcaggagtctccggaagacatgcctgcagggcagacaccacacacagtt

SEQ ID NO: 272107 - DNA, 98 bp, Homo sapiens
attaaagcagccggtgtaaatgttgagcctttttggcctggcttgtttgcaaagccaatggagatcttcgtggatgatgagacgaagttgacgctgca

SEQ ID NO: 272108 - DNA, 108 bp, Homo sapiens
cagcggcaagtctgccctggtgcaccggtacctgacgggcacatatgtccaggaggagtctccggaagatgcaacaaggagacgcgcctttgccctggtctctcaagc

SEQ ID NO: 272109 - DNA, 100 bp, Homo sapiens
ccagcctccagcagcagaagcagcgcctgatcgagtccctccggaactcacactccaggatgaccatgaaagctgtggttctaattctaccaaccgtagt

SEQ ID NO: 272110 - DNA, 112 bp, Homo sapiens
gcgcgcccgctgctcggtggcaggagggccggcggagcgccatggcctgcatcctgaaggatcccctaacaacagtgagagagcaatgcgagcagttggagaaatgtgtaaa

SEQ ID NO: 272111 - DNA, 100 bp, Homo sapiens
gaaagattcagcctcttcatcctcaaacaggcgtggtgtccctcgtggccgttcacccctccaccgtcaacccgctcgggaagcagctcttgccaaaaac

SEQ ID NO: 272112 - DNA, 82 bp, Homo sapiens
gagctgagtggttgtgtggtcgcgtctcggaaaccggtagcgcttgcagcatggttatggaaacaaaggacatgctttacat

SEQ ID NO: 272113 - DNA, 100 bp, Homo sapiens
ctggctgcgcgtttggctgcaatgagctcggcctcggggctccgcagggggcacccggcagatgttgatatatcactacttgtgtcttttaacaaaatga

SEQ ID NO: 272114 - DNA, 100 bp, Homo sapiens
gaaaagcatgcccatacgattaaacctgcgcgatatgagtctcatccagtctgtgctgatctgcaggccaaaattcttcagtgttaccgtgagaacaccc

SEQ ID NO: 272115 - DNA, 75 bp, Homo sapiens
ctcggagagctcggaagaggaggaagaagcagaagccgaaaccgccaaagccagctgaccggttccctgatgtgt

SEQ ID NO: 272116 - DNA, 80 bp, Homo sapiens
agattgccagatatcccaggaaagtggattacagtcagacaatgaaattctcaaagcagctgttgaacatcacaaagtgc

SEQ ID NO: 272117 - DNA, 75 bp, Homo sapiens
gctacgcctggccattcggcttctccggagagaagagatcagtgctcagattgtatctgaggaaaggaagagggg

SEQ ID NO: 272118 - DNA, 100 bp, Homo sapiens
aaaaattcaattctttagacgctcatgaagaaatcagggatttcctcagaacccaacgtcttcctcatcttcagccatggactgcagggctgcctggagg

SEQ ID NO: 272119 - DNA, 100 bp, Homo sapiens
cccatttcaatatcagggtgatggagtgtcggctggctgcgaagggtgcttcaaggatgaccgcatcgtcttctggacttggatgttctccacctacttc

SEQ ID NO: 272120 - DNA, 96 bp, Homo sapiens
cagaaacccaggaaatcgagactcatgactcccagagaggatggcatctagaagatgaagactggcccatttgcagagcactccaaccagctgtgg

SEQ ID NO: 272121 - DNA, 101 bp, Homo sapiens
tgtaagcagctgaacgagaaccaagtgcggacgctgtgcgagaagacaaagtttacatggggccaggacaactgtatcaagatttacaaaacttgttgcat

SEQ ID NO: 272122 - DNA, 75 bp, Homo sapiens
gtggtcgaagtcagcagacactagacactacgagagtacaaggtagtgggtcgctgcctgcccacccccaaatgc

SEQ ID NO: 272123 - DNA, 117 bp, Homo sapiens
gccggtgcctgtccccgggggcgccatggcgaccggagcgaacgccacgccgttggactcggtgaaatacctggagtgctcagctctcacccagagaggcctgaaaaccgtgttcga

SEQ ID NO: 272124 - DNA, 100 bp, Homo sapiens
ggattctcgacctgctaacagaactggaccttttcggcggagtacgtccagcttgttactgaacttcgaatgacaagagccattcagcctcagatcaatg

SEQ ID NO: 272125 - DNA, 76 bp, Homo sapiens
ccaagtttgaagttggagatgctgaaaatgttgcttcatatgagcccctccagccagcgtcaggtgcagaatggcc

SEQ ID NO: 272126 - DNA, 100 bp, Homo sapiens
ctggagcagagcattggggagtgtctagccatgacgagaagattccctctgcatcacggcgaaccccaggagatggtcaaaatgcagatcttcgtgaaaa

SEQ ID NO: 272127 - DNA, 100 bp, Homo sapiens
gtgtgcaggtttcggcacatggagattgatttggaatgttaaagaaattcatcaggctgctgactatctcaaagtggaagaggtggtcactaaatgcaaa

SEQ ID NO: 272128 - DNA, 95 bp, Homo sapiens
tggaagggatgaactggcttctttttaactggtataacaggttcaaccttaaagtgcaattgcagattctggcaagcttcatgctcactggtgtt

SEQ ID NO: 272129 - DNA, 51 bp, Homo sapiens
cctcagctcatggctctgcttcagactcctcagacccctgcacaattgaga

SEQ ID NO: 272130 - DNA, 98 bp, Homo sapiens
actttgggagcggttctgtgccaacatcataaagtgctggacaatattcctctcaaggtctgtctttggaggagatgaaaagaagtcttcaatacaca

SEQ ID NO: 272131 - DNA, 90 bp, Homo sapiens
atgataatggacagaatcatctagaaggacaaatgaacttcaatgcagattctagccaacataaaggggatgccaacagacagatcagcg

SEQ ID NO: 272132 - DNA, 74 bp, Homo sapiens
gccaaacagctgcaggcccgaaggctagacgggatcgactacaacccctggctgcagtgcaatggcgcgatctc

SEQ ID NO: 272133 - DNA, 50 bp, Homo sapiens
ccgcactctggagcataatgtgaatactcccccagttgcaagaggcgcag

SEQ ID NO: 272134 - DNA, 82 bp, Homo sapiens
atcctatggctcaaagaaagatgattatggacgtccagatcggtgacatcgtcacagtgggcgagtgccggcctctgagcaa

SEQ ID NO: 272135 - DNA, 75 bp, Homo sapiens
caacaatgagccttcaaacatatttgagattattcaccttaagcgatttcaatttgtaaatggtcggtggataaa

SEQ ID NO: 272136 - DNA, 100 bp, Homo sapiens
tttccctgaaacctgggctcttgaagacgcatcactggagcagatggataatggagactggggctatatggtgcgagacaagaagcttctcaatgacctg

SEQ ID NO: 272137 - DNA, 100 bp, Homo sapiens
aaattatgcaccttttatggaccaaatttttctggttatcccatcatcaggtagcaagttgaaacgaccaacaccaacttttcattctagtcggacatcc

SEQ ID NO: 272138 - DNA, 100 bp, Homo sapiens
ttattcccttcaattcaagtaacagattgttaaaggaaatgggctggcaggaagacagtgaaaatgatgaaacatgtgctcccttaactgaggatgaaat

SEQ ID NO: 272139 - DNA, 82 bp, Homo sapiens
tgccatggactcggaatattacagcggcgaccagtcagcgctcctggttgcagccagaatgcatgacttcaggaggactgtg

SEQ ID NO: 272140 - DNA, 98 bp, Homo sapiens
cagagcgtcacggcgtacgccctcatggggaaaatctccccggtgactttcagatgaacaggaagcggtgcaggaggttcctagagttgttcagaatc

SEQ ID NO: 272141 - DNA, 75 bp, Homo sapiens
ctgcgtctgccgtggacagcgaagctgctgcggttcctgagccggaggtgcccgtggttgacacgagctgtgtcc

SEQ ID NO: 272142 - DNA, 75 bp, Homo sapiens
tactgggggattcgcagggaggatgtcgggacaccccggaagctgggaaatggttattcagcttctcaaggctgg

SEQ ID NO: 272143 - DNA, 74 bp, Homo sapiens
tgaggccggacggggcggacggcgacgcagcccgcggcagaaggtactccaaagattcaggtttactcacgtca

SEQ ID NO: 272144 - DNA, 96 bp, Homo sapiens
actgtgcgagtgtgtggaactgtgaccttcatctttcagatgagctccttaataagcatttatagtcagtttttggcagcaatagaatcactaaag

SEQ ID NO: 272145 - DNA, 80 bp, Homo sapiens
ggactccccgtgaacaacatcttccagcagatctcccccgtggcggggatctgacgagcttttctctacttgtgtcacta

SEQ ID NO: 272146 - DNA, 75 bp, Homo sapiens
agcgactatattgagaaggaggtaaagagagatgccaaaggccagtacctgtttgaccttctttgccaccatctg

SEQ ID NO: 272147 - DNA, 95 bp, Homo sapiens
gcgggcgccgcgggacctctccgggccatgggtgaccctggcaaagatgagagtgcacatttcgtcctgcctgaaggtccaggagcagatggcca

SEQ ID NO: 272148 - DNA, 100 bp, Homo sapiens
agcgcctccaacttcgtctttgcaaggactatgcccgcaggcccatggacagaccttcacgttcccagatctgtttcccgagaaagacgagagccctgaa

SEQ ID NO: 272149 - DNA, 75 bp, Homo sapiens
gttcgcctcagacgcggtggagccgccggagtctgagaagggttttggccaaattgggcgagggcacaaaataac

SEQ ID NO: 272150 - DNA, 78 bp, Homo sapiens
tgacgaagaggaggagaaaaaccagctggagattgagagactggaggagcaggcaccactggatcataccagtgacaa

SEQ ID NO: 272151 - DNA, 90 bp, Homo sapiens
attccgtttataattttgaaaaacctgttgtcatgaaggttggcaacaatgagtaaaccagaattaaaggaagacaagatgctggaggtt

SEQ ID NO: 272152 - DNA, 88 bp, Homo sapiens
ccgcgtccgccgattcctcctccttggtcgccgcgtccttggctggcgtgagggtttctcttcccctcccagttcgctgacctcgccc

SEQ ID NO: 272153 - DNA, 90 bp, Homo sapiens
cgatgatcgtgtgtcggatgaggagaaggaggttgtggctcactggattgctgaaagccgcattgccattgagaagatccgcttgttgac

SEQ ID NO: 272154 - DNA, 82 bp, Homo sapiens
ccagctcctactcctccctcaactccctcatcggctctgacgcccgctctgcggcttcggtgtttgaacaggccacagtcca

SEQ ID NO: 272155 - DNA, 82 bp, Homo sapiens
caccatcttcgacttgagcgaagttttatgcaaggagccttcacgtaaatgggtccagtcatgcctcccagtaagaagccag

SEQ ID NO: 272156 - DNA, 88 bp, Homo sapiens
tggactctgcccctgtaaccgttccggagaatgcgttgagaatgaagacaaccagtgctgctgatgtagagaaggtggaggaaaagtc

SEQ ID NO: 272157 - DNA, 122 bp, Homo sapiens
agcctctcagcttcggagaatggagtcttccatcaatcatatctcacagcggattttggagtatcagctaaaaacacgaggacaattcaaagaagagattcctttattggtacaccatattg

SEQ ID NO: 272158 - DNA, 83 bp, Homo sapiens
atggcgcctgtgggcacagacaaggagctcagtgacctcctggacttcagcatggttgtggcagcactgcctgaaggtatgag

SEQ ID NO: 272159 - DNA, 88 bp, Homo sapiens
ctggatggtcacttactgagcagatcagtgaaaagcatgatgtggtgttcttgataaccaagtatggttatatccacctctatgatct

SEQ ID NO: 272160 - DNA, 97 bp, Homo sapiens
gcctggcccaggcgcacacggaagtggtcagccctgacaaaggtcagctagccccttgaggacatcagctttggcctcagggtcctaatggcagcag

SEQ ID NO: 272161 - DNA, 100 bp, Homo sapiens
atggaacccaagcagtggcgaagggaatcgcaaggctcttccctgaccattttctactgtccctgcgcgaggaaatttggtgagcggcctccacctaaac

SEQ ID NO: 272162 - DNA, 100 bp, Homo sapiens
ggggtcttactgatgaaggcaaatattattgcacttcttgccacaatgttacagagagctccaagagtcaggatcgcaagtcagaaagcaaagaaaagag

SEQ ID NO: 272163 - DNA, 80 bp, Homo sapiens
ctaaacttctggaagtcatcattcttcagtgcaaaggaaggggaattgatcagactattgcagatatcatccgaacatgt

SEQ ID NO: 272164 - DNA, 82 bp, Homo sapiens
ctgaggaccagcagatggccagtcacgagaacccaggtctcctctgagcctccggcctccataagacccaaaacagatgaca

SEQ ID NO: 272165 - DNA, 75 bp, Homo sapiens
ccatgctgggccggcgccctggggccccggagagatttcattcatacctgtgaaaagctctgccatgaaggagac

SEQ ID NO: 272166 - DNA, 75 bp, Homo sapiens
catttaccaaccctggaaccgcagacctctgggcttcctggtctgcaccctgaccaaggaagacaatcgctgcgt

SEQ ID NO: 272167 - DNA, 144 bp, Homo sapiens
gcggccgccggagatgcctgacgcatctgtctgaggagcggtcagtgacgcgatggagcgggcaaggtactccaaagattcaggtttactcacgtcatccagcagagaatggaaagtcaaatttcctgaattgctatgtgtctg

SEQ ID NO: 272168 - DNA, 90 bp, Homo sapiens
gcggagctagacttcctgagccacaacttgcagaagtacaacgctccatcttcacctgcagaatacatccaccggattggaagaaccgcc

SEQ ID NO: 272169 - DNA, 100 bp, Homo sapiens
aggaagtatgctgttctctatcagcctctatttgataagaaaagaatggtttgtcattcattgaaacttcggccctagactctacaaatgtagaagctgc

SEQ ID NO: 272170 - DNA, 90 bp, Homo sapiens
agattcgcagtggtcgcttcttctccttggagttcattcaaaagtgcctgcagtctgagcctgctcgcagaccaacagccagagaacttc

SEQ ID NO: 272171 - DNA, 102 bp, Homo sapiens
gttcgccgcggggaccgggcagggctccccgtcggagtgcactgcgccggacacttcaagtatcctgtggtctgaggccatcttcctcgaggcaaggcccca

SEQ ID NO: 272172 - DNA, 50 bp, Homo sapiens
ctcaaaccttgcttctaggagataaaaagctcaccatggatgatgatatc

SEQ ID NO: 272173 - DNA, 100 bp, Homo sapiens
caggggtactcggaaggcgcgggcaggagcctggcgaggatgcaccttcccctgccttggaaagattctttcttgtggagaagttattcatgtgaagatc

SEQ ID NO: 272174 - DNA, 74 bp, Homo sapiens
gctgtcggaggagaatgagaccctggtggagtttgctattgctttggacatcagacagtgcaggagaagaatgt

SEQ ID NO: 272175 - DNA, 100 bp, Homo sapiens
tggagagacagctaatgagtgtggagaagccttctttttctatgggaaatcacttctggagttggcaagttccagggtcacccccgagaggacaacaggc

SEQ ID NO: 272176 - DNA, 98 bp, Homo sapiens
tggacctcaggtttatcatagatgaagaactttttggacagggaagacaccctctctggacccccatcagaccaaagagcagaagattctgcaggaaa

SEQ ID NO: 272177 - DNA, 89 bp, Homo sapiens
acccagtgcaaagacatcaccatgaacactagcattgatattcactgatggactccaaagaatcattaactcctggtagagaagaaaac

SEQ ID NO: 272178 - DNA, 100 bp, Homo sapiens
cataatttggggttcaagattccagcaattgcttctccattcttgaagttcctaacccccatgaatccacaaccataaccatggccacgcgggtcgaggt

SEQ ID NO: 272179 - DNA, 98 bp, Homo sapiens
aggaccccttctttgtggtgaaaggtcattgaagtcaacaagagagacatagtcttcctggtggatggctcatctgcactgggactggccaacttcaa

SEQ ID NO: 272180 - DNA, 100 bp, Homo sapiens
atcagaatgctgacttaaagaaacagcttcatgaactccaagccaaaatcacagctttgagtgagaaacagacttattctggactcttctgtgtagttat

SEQ ID NO: 272181 - DNA, 74 bp, Homo sapiens
cttgtttaatgactttggtgccctcaacatctctcagagacgaaagcatgcagcagattggaataaatatgatg

SEQ ID NO: 272182 - DNA, 75 bp, Homo sapiens
aaaatagagatcctcacaccagaagttaacaagggtggtgacttcacacgccataatggcactggtggcaagtcc

SEQ ID NO: 272183 - DNA, 60 bp, Homo sapiens
gccgggcgtggacggtgtggggcggtcccggccccgcagtaattcgccaaaatgacgaac

SEQ ID NO: 272184 - DNA, 95 bp, Homo sapiens
acattcaggatcaacttgaacgaatatttctggtgcttttgaagatgatgatatcacgcacgttgaaggaagtgtagatcctattcgagatatag

SEQ ID NO: 272185 - DNA, 100 bp, Homo sapiens
acgcgctgggattcggagcttcagcgggaaggaggcctatgagagctacaagaagaaggactacacccaggtggactacttaatcaacgggatgtatgcg

SEQ ID NO: 272186 - DNA, 96 bp, Homo sapiens
tgagatggtagccaacccctcaggttgtgggtctgtcttgaacacaaatggtgaggttgaaatggatgctagtatcatggatggaaaagacctgtc

SEQ ID NO: 272187 - DNA, 96 bp, Homo sapiens
ccggggctccgtcatctgtctggagatttctgcgccaggagatgaggggcggtagagccctggaatggagatgtccttgacgcctgggcagaggct

SEQ ID NO: 272188 - DNA, 78 bp, Homo sapiens
ttcgacttccacgggcggcggatggcaacctgctccagcgatcagagcgttaagatcttcttcagcagtatcgttctg

SEQ ID NO: 272189 - DNA, 75 bp, Homo sapiens
tcactcccggttttggccaagatctgccagaaaattaaattatgtcaccacagtggatcccaaatacaattattc

SEQ ID NO: 272190 - DNA, 131 bp, Homo sapiens
cgggggtgctgcagaggacacgaggcggcgggctggagacatggaccgcggcgagcaaggtcaaaatgcagatcttcgtgaaaacccttaccggcaagaccatcacccttgaggtggagcccagtgacacc

SEQ ID NO: 272191 - DNA, 85 bp, Homo sapiens
tcttatttgctttatatatcatgtgtgttcctcactcaggcacattgcaagcaacccgtgccttgatggtggttggcatcctcct

SEQ ID NO: 272192 - DNA, 96 bp, Homo sapiens
acaggatattcctcatgacattgctgtctgctgcacataaatcaactcctcctctgtaatggaacagctagtgcagctaccaacaaagatgaaaca

SEQ ID NO: 272193 - DNA, 100 bp, Homo sapiens
ccaggaatgcagtcagtctgttgatgaaactataaataacatctgctttgctgccgagctcagaggagaccccagacccctcccgcagccagagggctgg

SEQ ID NO: 272194 - DNA, 100 bp, Homo sapiens
gagaaagtctctcggactttttccaaacatctttccaggaacagcgtgaggaggacagaagcacccaacaggactgctcaagccacctgcgaacactgct

SEQ ID NO: 272195 - DNA, 83 bp, Homo sapiens
cgcgcagggcctgcagcgggagctggacggcgagcgcgagcggcgcgagaaattgtatcacggactgattcaccgagcccaac

SEQ ID NO: 272196 - DNA, 100 bp, Homo sapiens
ctgccgctgccgctgccgcacctccgtagctgactcgtgggtgagtgtgaagcgtctgccatgctgccactggagtgccagtacttgaacaaaaacgccc

SEQ ID NO: 272197 - DNA, 87 bp, Homo sapiens
gagaaacaaatatgtgataaacttttggtggaagaaattaaaggcatattggcgttcctgtgctatgatgatgggctgtgtgataga

SEQ ID NO: 272198 - DNA, 76 bp, Homo sapiens
agtctgttccacatgatcattgtaataagttcataattggacccttgaagacactcttcagtggttgatagagttt

SEQ ID NO: 272199 - DNA, 100 bp, Homo sapiens
tctcatctgacgtgagttcaagtacagatcacacgcccactaaagcccagaagaatgtggctaccagcgaaggctggagtgaagtggcacgatctcggct

SEQ ID NO: 272200 - DNA, 100 bp, Homo sapiens
acagagggaatttaagaaacatccacagcagcgactggcccaagttctttgaaaaggtgtcagctgtgatgcatgtttaaaaggaaattttcgaggtcgc

SEQ ID NO: 272201 - DNA, 98 bp, Homo sapiens
agggatcacaaacactcagagtggaaaaagtaccatcatttgaaacaggtttccgccagctgtggatgcctttgacattatgaccgcagaggattcca

SEQ ID NO: 272202 - DNA, 75 bp, Homo sapiens
attattcagttgaaacagttacactgcttgtagctcttaagatatctccggagcatttggataatgtgacagttg

SEQ ID NO: 272203 - DNA, 75 bp, Homo sapiens
tcaatatttctgcttcctgcttccacttccgtgaccgttagggacaagacaggccagaagcggactcctagaaga

SEQ ID NO: 272204 - DNA, 82 bp, Homo sapiens
gagcggcgagtttccgatttaaagctgagctgcgaggaaaatggcggcgggaggttgacatcatggacatatgtgagtccat

SEQ ID NO: 272205 - DNA, 122 bp, Homo sapiens
tcaggatattaatgattataaccggagattctcagggcaacccagatctgcatttccggagagttcttttgaagtcacttcagaaggatctacatgaggaaatgaactacatcactgcaata

SEQ ID NO: 272206 - DNA, 100 bp, Homo sapiens
ttcaaagcgggaggctccttgtgccacattcttgcagctgcctacaaattcaagagtgaccagggatggcttctggagttacagtgaatgatgaagtcat

SEQ ID NO: 272207 - DNA, 100 bp, Homo sapiens
gcgctcctggccctggggtattctcacagctctgcggcccaggcccaaggcagagatcctacaagaatccaggatgatgatcccagattgccagcgcagg

SEQ ID NO: 272208 - DNA, 100 bp, Homo sapiens
caaaaagagggcagtgaagatgtgggcaacctccctgaagcccaggagaagaatcgacaaggtgctggggcaaccaatggaaaagacaagacatctggtg

SEQ ID NO: 272209 - DNA, 74 bp, Homo sapiens
tggaccgagccgatcgccgcggggcagttcgggccggctgtcctggcgcggacgccaggaaagcatgtgcagat

SEQ ID NO: 272210 - DNA, 100 bp, Homo sapiens
aaagctgcacttgaggcccagaatgcactgcacaatattaaaactttacctggggctctcaccacacacttgttcatgggcgcagcaaagaagagggatc

SEQ ID NO: 272211 - DNA, 98 bp, Homo sapiens
tgaacgccgcggactccggagccgcacaaaccagggctcgccatgaagccagacttctgcctggtgtcgaaggtggtgggcagatgccgggcctccat

SEQ ID NO: 272212 - DNA, 95 bp, Homo sapiens
agacacagcaggctgagcagctgcaaacccccgaaaaaggtccctccttgtggtccatttctgggcaccatgggctccacagtgtgcacagatga

SEQ ID NO: 272213 - DNA, 48 bp, Homo sapiens
ttcaggaaccaccagtgacagagcaagatgtatccaatgactttgaaa

SEQ ID NO: 272214 - DNA, 90 bp, Homo sapiens
gctgctggatgccgcgtctccgcttctgctgcctgccgggcgggctccggtggccgtttgacaagtatgcgcccaagctggacagcccct

SEQ ID NO: 272215 - DNA, 75 bp, Homo sapiens
ccctacacggtctcctgggtcaaggccaaagaactgccaactctgaaagataatgatttcattaatgagggccaa

SEQ ID NO: 272216 - DNA, 98 bp, Homo sapiens
ttcaaaactttataaaaggacttcaggtacgaccaaaactgccgcttttgaagattttgcatgcagcaggtgcgcaaggtgaaatgttcactgttaaa

SEQ ID NO: 272217 - DNA, 98 bp, Homo sapiens
tatgctggctgttatgtacgcaggaggtcaagaacccagtatggaagggagaagtgaaaagttgaagaaaaatccacacattgcatgaaatacaatgt

SEQ ID NO: 272218 - DNA, 82 bp, Homo sapiens
taacaataaaaaacccaaaacctcaggctcccagatccctaaagaagtggctgacatctttaacgcccccagtgatgatgaa

SEQ ID NO: 272219 - DNA, 90 bp, Homo sapiens
ggcatcggccctgcctgaagtgcgagaaatgtgggaagacgctgacctctgggggccacgctgagtgcatcgtccatgccaaagtgtgcg

SEQ ID NO: 272220 - DNA, 98 bp, Homo sapiens
gccattgagctgtgcacgaccacaccgctgatgaagacaaggactcacagtggctgcaagaggaagtatcattctgcaaaggaggcatatgaacaact

SEQ ID NO: 272221 - DNA, 97 bp, Homo sapiens
gcagcactggagggcccctctgcgttcctgtcatatgcagactggttcaagctgcaagctttcttcctggtggcagatgacatcatggattcatccc

SEQ ID NO: 272222 - DNA, 87 bp, Homo sapiens
cctttccactggagttgcttcacttagctctacaatcaacccatgtgtctgcaaaatgaatgttcaccgtcgatgtgagaccaacgt

SEQ ID NO: 272223 - DNA, 50 bp, Homo sapiens
atcaggacatggagtatgaaagacgttgacaatgacacaccagttactct

SEQ ID NO: 272224 - DNA, 98 bp, Homo sapiens
gccgccgggctcggggcctccgcagcgacaacatggaggccgtgaagaccttcaatagcgaggatgtgatggagctgcttgaagaagatctcacatgc

SEQ ID NO: 272225 - DNA, 73 bp, Homo sapiens
ttttgcctcccaccgtgattctgaggcctccccaaccatgtgcaattatctgttacctaaagcaataaaaaat

SEQ ID NO: 272226 - DNA, 83 bp, Homo sapiens
ttcgaacttttgacacggctttggaaacgacgtcatgtgttagcagtacttctggaatagaaattctaaacattagcctgccg

SEQ ID NO: 272227 - DNA, 100 bp, Homo sapiens
acagcagccaacttcttcgccaaattaaagttttacaagatttaacctgtcatcaagacctgggattttggtggtcacatatcctggagcaggaaaactt

SEQ ID NO: 272228 - DNA, 76 bp, Homo sapiens
cggagttcgggggatggcacagaatgggcttccgccacctttgaagactttcagattcgtccccacgctctctttg

SEQ ID NO: 272229 - DNA, 76 bp, Homo sapiens
aaaacactgattttggatgctctgaagaaagatgacctgaaggagaagaaggagaaggtggaggagaaggcaagcc

SEQ ID NO: 272230 - DNA, 75 bp, Homo sapiens
ctgcccaagatcatcctggctgtcaagtccaaggttgtgctgttggatgagagttcaggaccaccaagccagctg

SEQ ID NO: 272231 - DNA, 89 bp, Homo sapiens
agctctttgaccttctggatgtccttgagttcaaccagatcactttgggaagcagtgacatccaacctgtatcaagtcttctaatctgt

SEQ ID NO: 272232 - DNA, 58 bp, Homo sapiens
ttgtgctgctcacagtcaccgctgtcattgtggacatatctgaagagatggattaaga

SEQ ID NO: 272233 - DNA, 100 bp, Homo sapiens
tgcacggtgaacctggaccaggaggaggttttcaggaccaaaattgtggaaaagtcactctgagctccacgcaggagatcggtgaggagctgatcaacgg

SEQ ID NO: 272234 - DNA, 107 bp, Homo sapiens
acagtgggggtgtgcaaacccgagagaactgggaagcggctcagccccagggcagcacatcagagacaccatggaacacagccattcctctgccgtcgtgctgggac

SEQ ID NO: 272235 - DNA, 96 bp, Homo sapiens
ctttctgtttcagatttcagatactctgactccacctttacttttacctacgttggcggccccagaagaatcaccacgacagcagcatgcatgatg

SEQ ID NO: 272236 - DNA, 100 bp, Homo sapiens
ctgctttgtgggataatttcctcattggttgagtcagtgagttgcgtgtctgcaagagagcatcctatctggtgacctggtgattctcgatggcattccc

SEQ ID NO: 272237 - DNA, 100 bp, Homo sapiens
caaagtgtcactgaactaaaggctgactttccagacaacgcagaagctcctcctggggtagagacagatcttattgatgttggattcacagatgatgtga

SEQ ID NO: 272238 - DNA, 100 bp, Homo sapiens
cgtcgtgatccagaagtccagagctgaggactgcctgtttgcagactgtgccctgtccacggtgcctcctgcatgtcctgctgccctgagctgtcccgag

SEQ ID NO: 272239 - DNA, 100 bp, Homo sapiens
gaaacaggatgggaaatattttacacagatggaggaattggttgagggcgttcgctgggcctttattgacatgctagagaaagaaaatgagtggatggat

SEQ ID NO: 272240 - DNA, 108 bp, Homo sapiens
ggagcattgcagcagccactggctttgtcaaaaaggaccagttgggcaagggccggtgcataaacttctcccgagttccatctcagtaaaagggaagcaggaagacca

SEQ ID NO: 272241 - DNA, 89 bp, Homo sapiens
ggaggagaggatgatttttggatcctgagaattgatctatgttggatcagtgaaaaattagacgatttcaagaattggagctgaatctg

SEQ ID NO: 272242 - DNA, 73 bp, Homo sapiens
agtgattgcatcgatgaccgtgggcaaagatgtcagggtgtgctccgtgcgctccgtggacggctcacccacg

SEQ ID NO: 272243 - DNA, 74 bp, Homo sapiens
ccctggtgcagggagtggccataatgccttcaattaagttgcagagttctgatggagagatatttgaagttgat

SEQ ID NO: 272244 - DNA, 127 bp, Homo sapiens
ttcccggcgtctaggggagcgaaggctgaggtggcagcggcaggagagtccggccgcgacaggacggtttccaatacttatctacaggaatcgccatgaccccagctctgagggaggcaacagcaaa

SEQ ID NO: 272245 - DNA, 98 bp, Homo sapiens
ttagctgtgctcgcgctactctctctttctggcctggaggctatccagctgaagatagtgatccggggagacaggaacacgggcaagacagcgctgtg

SEQ ID NO: 272246 - DNA, 99 bp, Homo sapiens
ctcagtttaaccggatggaagaaatggtcagccatgtcatctgagcctcccccaccaccacagccccccacccatcaagcttcagtcgggctgctggac

SEQ ID NO: 272247 - DNA, 74 bp, Homo sapiens
aggatccccaacggggaggccaacgtgaagaattatttcaagtaccattggaagaggaaggacaacgtggtgga

SEQ ID NO: 272248 - DNA, 51 bp, Homo sapiens
actcctgctcagtgtagcattaagaaagaaggggatcaacctgaaagagtc

SEQ ID NO: 272249 - DNA, 101 bp, Homo sapiens
gagacggcgatccgggcgctcgagacttaccagagccacaaggtgacacgtgcaccatggccggctacgcccgcttgaagaatgtccttctggcactccag

SEQ ID NO: 272250 - DNA, 100 bp, Homo sapiens
gctgggtttgaacggaatgctggagtcagtggaagacggagctggtcggcccgaagccctgggcgctgcctatggcacagccaagagcggtaccggcatt

SEQ ID NO: 272251 - DNA, 90 bp, Homo sapiens
ggattccacagtgtcctctggaaaatgatccatttcactgggcttggcttcctcaagcaaaagttcccttttctgaagaaataagaaatt

SEQ ID NO: 272252 - DNA, 75 bp, Homo sapiens
ggaatcccgcgcgctgcccacgattcgcttctgaggtaccccaagaagctagtgcagacttattcagtgtttccc

SEQ ID NO: 272253 - DNA, 100 bp, Homo sapiens
aaacagcccattcctcaacaatgtcgaggtggaacaagagagcttctttgaagggaagaacatggcacttttcgagcacaaggccaatcagcccccccac

SEQ ID NO: 272254 - DNA, 58 bp, Homo sapiens
tcggcctccccgcgcactagaacgcttcccatcgacggtcagtgcgcacgttgtaatc

SEQ ID NO: 272255 - DNA, 100 bp, Homo sapiens
gaagaaggacttcggaatgcactacaacaggaaaatcatattatagatggagtaaagacgaagttatacggaagcgtctcctcattgatggagatggtgc

SEQ ID NO: 272256 - DNA, 101 bp, Homo sapiens
acccaacacaaatggttcccagtttttcatctgcactgccaagactgagtgcaggttcaggagaagtggcacctggtggaggacctgtcgcgactgctgcc

SEQ ID NO: 272257 - DNA, 90 bp, Homo sapiens
ctaaccactctgcacccagcctgatctgaaattcagagtgtagctctgagacttgcttccaaagtcatttcccaccacatgcagacatgt

SEQ ID NO: 272258 - DNA, 90 bp, Homo sapiens
tggacatctgctgccggaaggggtcccgaagccccctgcaggaactctacaacccaatccaggatatccgacatgaagccagtgacttcc

SEQ ID NO: 272259 - DNA, 74 bp, Homo sapiens
ctctaggctccaagacgccgtcgcttgaggatccttcatctgtacctaatgcagacaatgccttcacattattt

SEQ ID NO: 272260 - DNA, 100 bp, Homo sapiens
tgctgagcgttctaaaggaaggcgtccgttggccttcgtacccgtcttgattgaggaaatgaaacacgatttccaaaatgaacttaatctttcatgagaa

SEQ ID NO: 272261 - DNA, 88 bp, Homo sapiens
gactacggacctgtctgggtctcagccgccaaagaccccgtccggtagatatggatcagaaactttcgaagttggtagaagagctcac

SEQ ID NO: 272262 - DNA, 90 bp, Homo sapiens
ggcgacccgtactgggcctactctgaaaacctcggatcaattctcagctggtggcacaacaagtggcacaacagtatgccaccccaccac

SEQ ID NO: 272263 - DNA, 100 bp, Homo sapiens
atgggacaagacccatctttatgcaaagccagcgttacagtaatgttccagcatggtgacatggaccagaaggagagagatgttatcatgagggaattcc

SEQ ID NO: 272264 - DNA, 74 bp, Homo sapiens
gcgcagaaacggggagcgcagcgcacccgcggcctgcgtcactcgggagatggtactggagtcgccagtattta

SEQ ID NO: 272265 - DNA, 70 bp, Homo sapiens
gccgcgtccagcagtgcgcattcctccaagtctgcggccagcggaagcctgccacctcctatgtgcggac

SEQ ID NO: 272266 - DNA, 113 bp, Homo sapiens
gaggagctgtgcagccgcgaggaggcgcgggaggtgttcgagaacgaccccgagacggtcgcaatggaagaagagatcgccgcgctggtcattgacaatggctccggcatgtg

SEQ ID NO: 272267 - DNA, 87 bp, Homo sapiens
gcccgtatcggggcctttatttctcgtcggcggcgccctgcaccgcgcctcgcaaacaatcatcaaggtgctacccctttagttctg

SEQ ID NO: 272268 - DNA, 100 bp, Homo sapiens
cacatgttcttctcagcaccgaagcttttatcaaaatacaactcaaacctagctactccaatagcaattaaagcagtgccacccagtaaaaggttcctta

SEQ ID NO: 272269 - DNA, 122 bp, Homo sapiens
ggcacgctatgggcggctggcggaccctgctgtcactgactttccagttcagctctggactgttggaaactatcactggtatctcaagcaaagtttatccttcagcacctgtgggaagagca

SEQ ID NO: 272270 - DNA, 75 bp, Homo sapiens
tgcataatgggacgaaagcctttctctttcaagtactatactggcaattgctggagaagattttgcaattgttgc

SEQ ID NO: 272271 - DNA, 74 bp, Homo sapiens
cagcggaaaatgatccagtcacagattgatgtacagctatatattttgtcctttctttcacctcatgatctgtg

SEQ ID NO: 272272 - DNA, 98 bp, Homo sapiens
tctcctctgaccccaagagcatctccttcagtgtggtcttccaggaggccgaggacacaccgctggatcagtgtaagccacagttgaggctattgagg

SEQ ID NO: 272273 - DNA, 75 bp, Homo sapiens
tcgccaaaaacaaatggggcaggaaattgggaatgaattggatgaacaaaatggaacttcacagacagcgatccc

SEQ ID NO: 272274 - DNA, 100 bp, Homo sapiens
ttttgtacaaaagaagcagctcaggaggctgttaaactggctgtggaaaatctctgttctcacaaagtctccccaatgctctacaagcaactgcgtcagg

SEQ ID NO: 272275 - DNA, 50 bp, Homo sapiens
cctgtgagatgtttcatcccaacagctaaatttattgtgaagaaatcaga

SEQ ID NO: 272276 - DNA, 100 bp, Homo sapiens
gtgagccaaccacctgggccagtattatcaggcatggagatgctactgatgtcagggagaaaatgctgagaagcttctgcagttcaagcgttggttctgg

SEQ ID NO: 272277 - DNA, 98 bp, Homo sapiens
acgtcatgagcatagtgatcccattgggggttgatacagcagagacgtcatacttggaaatggctgcaggttcagaagtggagagatctacagaccaa

SEQ ID NO: 272278 - DNA, 90 bp, Homo sapiens
cgcagggtgccctgcagccacggagacgaatgtggacggccagaaggagggatccttagacctggccctggaaggcggtgtggactcccc

SEQ ID NO: 272279 - DNA, 97 bp, Homo sapiens
tcctgtgtggagaagagaaagaatgttcaaatccatcaaatcttctagaactttacacacaggtattggatcaggagtcaattttcagttgaacaac

SEQ ID NO: 272280 - DNA, 97 bp, Homo sapiens
tcctgccttcgcgctgaggagccctcgttttcgagatcaggcctgaccgggataagctccagacctagaggatcaagacataatgggagcattttta

SEQ ID NO: 272281 - DNA, 89 bp, Homo sapiens
acgcttcgctggccatttaggagctctgctcaaagccagacggtggagccgccaccaaaatgcagattttcgtgaaaacccttacgggg

SEQ ID NO: 272282 - DNA, 100 bp, Homo sapiens
atgttgaaaccagactggggaatgaccgccccatccggagagagacagaagagatgggtgatgaagaagttttctcctggttgaagtgtgcaaagggaca

SEQ ID NO: 272283 - DNA, 75 bp, Homo sapiens
aacggaaacaaagttattttgctcgtatggcttgggaagataatttgttagatgatttactacattttgctgcca

SEQ ID NO: 272284 - DNA, 82 bp, Homo sapiens
agatgtgaagaccaagaaggatgattctcactcagcaggatctgagtgatgagacgtgtccccactgaggtgccccacagca

SEQ ID NO: 272285 - DNA, 93 bp, Homo sapiens
cgcgcagggcctgcagcgggagctggacggcgagcgcgagcggcgcgagaaagggaacgcccttttgcttgtgactggcagggctgcgacaag

SEQ ID NO: 272286 - DNA, 96 bp, Homo sapiens
ccagtacttgggcttgccagtggcggattacttcaagcagtggattaatctgaaaaagagtgcagcagctgccccgagccccgtgcttggcaacat

SEQ ID NO: 272287 - DNA, 75 bp, Homo sapiens
cagaggtttaaccataggatagagaaaccaggtgatagaaattgaagatgcttcacccaccaagtgtccaataac

SEQ ID NO: 272288 - DNA, 87 bp, Homo sapiens
tcagtcaactttggttttagtaagatttaagcgagagcctcactggttcccaggacatcaacctgaactggatcctccccgatacaa

SEQ ID NO: 272289 - DNA, 75 bp, Homo sapiens
gtgaaattttcctttggccaacgtgacagaacaaattggagctctggcagatcagcatatcattcatgtggcatg

SEQ ID NO: 272290 - DNA, 100 bp, Homo sapiens
caagtcttgaagagcttgctggagctggaggaaagcaggaatgttcagaggcaaatgaagattctgcagaataagcaagctcagattgtcaaagagaaag

SEQ ID NO: 272291 - DNA, 51 bp, Homo sapiens
tatggctcaaagaaagatgattatgttttttgccctgacatctcttcgtct

SEQ ID NO: 272292 - DNA, 89 bp, Homo sapiens
cccctgctccccagtcctccgccccctcgcgtcgcggccctgggcgggcgccgcgagccgggtgccgtgagcgatgtggagatgcagga

SEQ ID NO: 272293 - DNA, 100 bp, Homo sapiens
gcaaggtcggcagagcaaggggcttacgcagaaggacctggccacgcttccccgggcgctgcctggacaggcctgcctgcgtgctgggacatgtctggcc

SEQ ID NO: 272294 - DNA, 90 bp, Homo sapiens
cccggcaactcagaaacatcaggtccaaggcaagtagcctgcagtatgaaatgctgctgctgacggattctatctccaaggaggacagct

SEQ ID NO: 272295 - DNA, 80 bp, Homo sapiens
caaaggagtcagggatggctcttcctcaggttgaaatcacaaagattagacacctttttagataggtgttcttcagcacc

SEQ ID NO: 272296 - DNA, 72 bp, Homo sapiens
ctgaggtttcagagcgcagccatcggtgcgctgcaggaatgaacctcttggggtgtcttccagagagttctg

SEQ ID NO: 272297 - DNA, 100 bp, Homo sapiens
gctggaggtgcagggccaggaggaacatgagggggacagccgcgccgctgctgcttttccgaagaggtgacttcgaccgagctctccagtggagaccaga

SEQ ID NO: 272298 - DNA, 96 bp, Homo sapiens
ttagtagattatatcttcgtagccatgttactttacatccgagatgcttgttacctaaccaaactcctgcaaaaccacaccacctatgcctgtgat

SEQ ID NO: 272299 - DNA, 95 bp, Homo sapiens
gggagctggacggcgagcgcgagcggcgcgagaaagctttgtccagggatctgaaaccactttgcagtcgacatactcggataccagcgctcagc

SEQ ID NO: 272300 - DNA, 100 bp, Homo sapiens
ggggcttaagatgtcctgcctgaaaggctcttgtcaggatggtgaagctgttcatcggaaacctgccccgggaggctacagagcaggagattcgctcact

SEQ ID NO: 272301 - DNA, 118 bp, Homo sapiens
gcggtgcctgagctgagtgaggccgaggccgggaggccgtgcccggagggaaatcctcattgacgattcaatttgttgaaggccaatttgtggactcctacgatccaaccatagaaaa

SEQ ID NO: 272302 - DNA, 98 bp, Homo sapiens
cacaaagagccctctgcactagcgccgcaggaccgcggacccgagggctctgccagcagacagccttggcacacaggcacaagggctggagcccagag

SEQ ID NO: 272303 - DNA, 100 bp, Homo sapiens
tgaagatactccacagttgtatgtggcctgtggtaggggaccccgatcatctctgagagtcctaagacatggacttgagtcctaatctgcagctgattga

SEQ ID NO: 272304 - DNA, 75 bp, Homo sapiens
ccttcagtcacctaacctgcaggtctgtttctgtcgactgtggaccacttatgtgcgatccgtggaccacttgcg

SEQ ID NO: 272305 - DNA, 99 bp, Homo sapiens
atatcgacgtcgtgatccagaagtccagagctgaggactgcctgtttgcaggcataatcaccagcaacacccgggacaataatacgggggccacctacc

SEQ ID NO: 272306 - DNA, 90 bp, Homo sapiens
gaggattgtgtctgcttggtgtggagccatgaaggtccgagtacaaggcccacttctccctccgcaacctgcatgccttctctgtggagc

SEQ ID NO: 272307 - DNA, 74 bp, Homo sapiens
agtcccatcactccaaggagagaaggagctgccgttatactgttctggggggttgcggtttttctgggacaaca

SEQ ID NO: 272308 - DNA, 100 bp, Homo sapiens
cttagatcccgccctggagctgggtcccaggaatgtgctgctgttcctgcaggacaaggcggctgcaggcttcagcctgcgctggttggtgaaacagaga

SEQ ID NO: 272309 - DNA, 83 bp, Homo sapiens
ggagctgtggataacgggaggtgaatttccatgtcaacatagtcctgttggctggggaacagaccagggaattggtggatttg

SEQ ID NO: 272310 - DNA, 90 bp, Homo sapiens
tgatacattggagaccattgctcctgggggacttgatctcatcttcatgccaggccttgggtttgacaaacatggcaaccgactggggag

SEQ ID NO: 272311 - DNA, 82 bp, Homo sapiens
gcctcacgataaattctggtgccaggaaattcacagtatggccaacagcaagatgcataccagggaccacctccacaacagg

SEQ ID NO: 272312 - DNA, 80 bp, Homo sapiens
ctctcgtcagcctcccgccggccgtctccttaacaccgaacaccaggccacaagaggaagctgaatgaagaggacgccgc

SEQ ID NO: 272313 - DNA, 82 bp, Homo sapiens
atcgcggagtcccaatgaaacgggcagccatggccctccacagcccgcagatgcccatgtccgaggttatgttggagaaaag

SEQ ID NO: 272314 - DNA, 86 bp, Homo sapiens
gtggcgacttgtgcacacatgtagagacctttgtatgtgaccaagaatatggcccaggtgaccaaagccctggacaaggccctgag

SEQ ID NO: 272315 - DNA, 100 bp, Homo sapiens
gagagccatgcccagtgtcgggcctttgtggtcaccaaccagaccacctggacaggctaagtcctatcagccatggaaacaccattgctctcttcttccg

SEQ ID NO: 272316 - DNA, 98 bp, Homo sapiens
ctcttcagtgctggctatgactacaagtgtctgtgtttcactgatggcaagactgtggcccccatgcccccagcacaggaccataagcgattactgga

SEQ ID NO: 272317 - DNA, 95 bp, Homo sapiens
gcgcttggcgctggcgctggccaaggcgtgtctttggtgcaacactaacaaggcttgtctggactacccagttacaagcgtcttgccaccggctt

SEQ ID NO: 272318 - DNA, 90 bp, Homo sapiens
ccgccagcctcggcaccgtcctttcctttctccctcgcgttaggtggatctaggatccggcttccaacatgtggcagctctgggcctccc

SEQ ID NO: 272319 - DNA, 80 bp, Homo sapiens
caaatcttgctgcttttaattcaactcagagacagggcctcagacctaaggcaggagcaccccctatgccagacctcctg

SEQ ID NO: 272320 - DNA, 100 bp, Homo sapiens
aggctgagctgctgcagctggcaaatagtgctcatggatacgttggagcagacttgaaagtcttgtgtaatgaagcaggaattccgatgctgaagatcgt

SEQ ID NO: 272321 - DNA, 75 bp, Homo sapiens
gagctgcaactgtctgatgaacagctacagaagaggatttagaagaattctgctttaagttttgcatcaatcatt

SEQ ID NO: 272322 - DNA, 80 bp, Homo sapiens
ggcgagcagtctcaggcctttagtgatgatggaccctcgagatgcccctcctccaactcgtgctgaaacccgagaggagc

SEQ ID NO: 272323 - DNA, 75 bp, Homo sapiens
ctcggcagtcgcgaagcagcaaccatggtaactaggatttctacctcaaccgcgagacctatgcaaggacggtgt

SEQ ID NO: 272324 - DNA, 75 bp, Homo sapiens
gtccgcggcgcggtcggtcggcgcctgttctcgggctgtttggcgggttgcagattttaaagatgcccttgccag

SEQ ID NO: 272325 - DNA, 75 bp, Homo sapiens
cttagctgtgctcgcgctactctctctttctggcctggaggctatccagcgtgacaccggaaactggtactcaag

SEQ ID NO: 272326 - DNA, 100 bp, Homo sapiens
gtcacctgtctggagcaaataaaagagccctgcaatttgaagatacatgagacagcagccaaacccccaggctggaggcaaagctggaaaggacagtggg

SEQ ID NO: 272327 - DNA, 74 bp, Homo sapiens
aaggaatcgccgggggaatacaggccaaactacaattcccgagagagtttatgtggccgaggcagacaagtgga

SEQ ID NO: 272328 - DNA, 80 bp, Homo sapiens
ggaaggactatttcccagctcgttcatgcttttcagaccacggaggcgcggcgtgatggtgggcatgggtcagaaggatt

SEQ ID NO: 272329 - DNA, 75 bp, Homo sapiens
tgatgaagtctacgttcattcagggcctgctgtggaagaccagccccaaagaagagccgaatgcacataaggtcg

SEQ ID NO: 272330 - DNA, 50 bp, Homo sapiens
gcactccagagacgactaaatggttactataacaacagtaccaaggtggc

SEQ ID NO: 272331 - DNA, 90 bp, Homo sapiens
tccaagtgcgcgccctggcgggtccggaccaaggtcgcctgcgaggccgctggccaggcctgagcctctgccaccatggccattgtgcag

SEQ ID NO: 272332 - DNA, 98 bp, Homo sapiens
cgagagcggcctgattgggaagaaactcttagcgcaatgactgaagttgctgaagatcctcaacaagtttcaactgtccatctccaactgggcttacc

SEQ ID NO: 272333 - DNA, 90 bp, Homo sapiens
agtctttggctggctatgcagacatctttctggtgctaactgccaaagaaaggaaaactcaaattgatgatagaaacaaattgactgaac

SEQ ID NO: 272334 - DNA, 82 bp, Homo sapiens
cttcagatcttcacagcacagttcctgggaaggtggagccaccagcctctccttggtttgatctgtggatgaaatgaatcat

SEQ ID NO: 272335 - DNA, 107 bp, Homo sapiens
acttctttctctttaccctcattggcgcttctctcctgcagtccgcctctgggccctgccgaggcctttgaaattgttgttcgccatgccaagaactacaccaatgc

SEQ ID NO: 272336 - DNA, 100 bp, Homo sapiens
cttacgtctgcggaagtgcagctgcctcagttcttagcgcaggtcatggcaaaaccccaaaagatgccgcgtcagttcgagccacgcatccaataccagc

SEQ ID NO: 272337 - DNA, 82 bp, Homo sapiens
atagacatttacgcggatgtcggcgaagagttcaaccagcagccattgtttgatgtcctgtgactgagaaaccaggctttaa

SEQ ID NO: 272338 - DNA, 95 bp, Homo sapiens
tcatggcggatggccccaggtgtaagcgcagaaagcaggcgaacccgcggcgcaataacggtcctgggaactccaacaagggagcaaatcagaga

SEQ ID NO: 272339 - DNA, 106 bp, Homo sapiens
tataattagacaactaagtagcctaagtcatgctaaatgtgtagaagttgtaaaaacttttaacttaccattactgatgcttggaggaggtggctacacaatccgt

SEQ ID NO: 272340 - DNA, 100 bp, Homo sapiens
gcctgcagggcgccttcctctacctgctgcactgcctgctcaacaagaagtggtccttcggggtgacaatgtgggagattgccacaagaggccaaacccc

SEQ ID NO: 272341 - DNA, 92 bp, Homo sapiens
caaaattctgaactcaggacttggcaagaaagctaaaaccatgggggcaatctaaagaaaataattatctaaatcaacatgtcaacagaatt

SEQ ID NO: 272342 - DNA, 100 bp, Homo sapiens
ctggtgccgggttgggcttctccagatgccggggctgggtccttcccaaggttgaggtactccaaagattcaggtttactcacgtcatccagcagagaat

SEQ ID NO: 272343 - DNA, 75 bp, Homo sapiens
gttacatgtaaagctgtcctcatttgtgactatggacctatggagttggatgtgggcgctatctccaactgtctt

SEQ ID NO: 272344 - DNA, 75 bp, Homo sapiens
cggacccaatcatgagcactgctttaataggggggcagctggcattttatgctatgtgggagcctatgtcttcat

SEQ ID NO: 272345 - DNA, 75 bp, Homo sapiens
cctaccatccttctgctgctgaaccaatgccaacaggttatcctgaatacatgtctaacaattttccttgcaacg

SEQ ID NO: 272346 - DNA, 78 bp, Homo sapiens
ctggttccgttgcgcgccccggatgtggcgcggctgcgcgaggagcaggaaaaggttaaaaatctgtaagagcctgat

SEQ ID NO: 272347 - DNA, 100 bp, Homo sapiens
tttatgctgctcactttcgtccaggacagtatgtggatgtcacagccaaaacgacataccgagggattgcatatgttaaatggaaattttataaagaagc

SEQ ID NO: 272348 - DNA, 83 bp, Homo sapiens
cgggggactgcggggccagcctcagcaattctgtggtgttcttggtcacacatttatggagtttctgaagggcagtggagatt

SEQ ID NO: 272349 - DNA, 100 bp, Homo sapiens
tggatgctactcggaaaggaaacaaaattcgatttgcaaatcattcagtgaatcccaactgttatgccaaaggatcaagatggttctcacataaaaggcc

SEQ ID NO: 272350 - DNA, 90 bp, Homo sapiens
gaaacgtaaagaaatgcaattgaggaaagtacacaggaagatgctatgaaatttccatcttcccaatcttcccagccttccaggctttta

SEQ ID NO: 272351 - DNA, 83 bp, Homo sapiens
ctgcgctggctccgtgaaccttagggacaacaccgggacacccgcgaggccggaaaatgacttcgattttcagaattcctcct

SEQ ID NO: 272352 - DNA, 100 bp, Homo sapiens
gcctgcgagggtacctgtcctaccccagcaacgtgtttgacgggctcctcaccgttgtcctgctggccatgacgctgatggagtacctcatcaagaccgg

SEQ ID NO: 272353 - DNA, 75 bp, Homo sapiens
gagcagccactgcccagtacttgtcaccccgggccagggatgctgctactggcgagccagatgaccaggatgccc

SEQ ID NO: 272354 - DNA, 98 bp, Homo sapiens
gcgacggggctggggctgtggctgcgccgccggccatcgactttcccgccgagggcccggaccccgaatatgacgagcttttcatcctactataaagg

SEQ ID NO: 272355 - DNA, 98 bp, Homo sapiens
gcttctgggacagctctactgacggtattggctgggatccaccaaaacttcaatcaattttcctttcttaaggagataattggagccctttgattttc

SEQ ID NO: 272356 - DNA, 135 bp, Homo sapiens
tggagcccctgcgggtgctggagctatacagcggcgtgggcggcatgcaccacgcgctgagaggtaaaataccatgaagattttgaaaaaacaaaggggagaggctttactcccgtcgtggacgatcctgtgaca

SEQ ID NO: 272357 - DNA, 96 bp, Homo sapiens
tggaaacagtcagagccaccagccaatgatcttttcaatgctgcgaaagctgccaaaagtgacatgcagtagagacgaggtttcaccgtgttagcc

SEQ ID NO: 272358 - DNA, 100 bp, Homo sapiens
gcaccctcgccttgtgtcaatggaggcacctgtcggcagactggtgacttcacttttgagtgcaactgccttccagccatcgactttctggagaagatcc

SEQ ID NO: 272359 - DNA, 100 bp, Homo sapiens
tacaccgagagagtgaggagccagacgacaagcacacactatggcgctgaaacggattaataagccaagagtcgaagctaaaccagaagttcaatctcag

SEQ ID NO: 272360 - DNA, 98 bp, Homo sapiens
ttgaaaccataatgctacaaactctagccagggaaagaatagttggctggtaccacacaggccctaaactacacaagaatgacattgccatcaacgaa

SEQ ID NO: 272361 - DNA, 109 bp, Homo sapiens
agaagaagaacccgtgaagaaggttctggagaaaaagttccatactgtcagtggaagcaaggagccagatgaccaggatgccccagatgagcatgagccctctccatca

SEQ ID NO: 272362 - DNA, 93 bp, Homo sapiens
gcctacgtatcagctccatccaggccaccactgcggcgggctctggtgccggtggtggtgtgcacattgagccccggtatagacagttccccc

SEQ ID NO: 272363 - DNA, 76 bp, Homo sapiens
gcctcttctgaggggcagcggggcctggcgggatggttatcagtgagctgaatggaaaaaacattgaagacgtcat

SEQ ID NO: 272364 - DNA, 88 bp, Homo sapiens
gggcatgcggcagccgcaggggcccccgctcccgggctcggcggcgcgggtgaacgtgagcggcagctatcaatggtgtaataccaca

SEQ ID NO: 272365 - DNA, 98 bp, Homo sapiens
tcgggccggcggacagtgagggcgcggtagctacagcaagctgggtagcaggcagatccaaaggatatcatgaagtttccagggcctttggaaaacca

SEQ ID NO: 272366 - DNA, 75 bp, Homo sapiens
tcgtgtatcccacggagaaggtgaactgtctggataaggcaagtgaaccggagcaaacgacttccgatccagtct

SEQ ID NO: 272367 - DNA, 87 bp, Homo sapiens
tgcccatgcacttgttgcagaaacagccaaggctctctatgagaacatgctggtggagctgccctttgcaggcttctttctttccaa

SEQ ID NO: 272368 - DNA, 75 bp, Homo sapiens
ctgagctccacttcccagcccatgtctccccagactcggaaaatagctacgtcctgagctgcggagttccagggc

SEQ ID NO: 272369 - DNA, 101 bp, Homo sapiens
gggccatcctggagtaccgcatccgcacgctggacggggccctggagaacgcccagaacctgggctaccagcaagccacccgaggggactgcctggccttc

SEQ ID NO: 272370 - DNA, 87 bp, Homo sapiens
ctgctccggccgctgcgcgctcgtcgtcctctgcgcttttcagctggttatgaagacagtatggagtttccagaccatagtagacat

SEQ ID NO: 272371 - DNA, 75 bp, Homo sapiens
gccggcgaaaggagctggtgcctgtgcaagttgttgagataaaatttgatgctgggactctccttcttagtacac

SEQ ID NO: 272372 - DNA, 90 bp, Homo sapiens
aggcagatgccagcaaaaagttgctgaagaagaagaaggatgataaagaaccgcagccagtgaagaagacagtgacaggaacagatgcag

SEQ ID NO: 272373 - DNA, 75 bp, Homo sapiens
agattccttggttaaaattctgcaagactacaatttgcaagtcctccaaaagctggggaaagctgatgagacaaa

SEQ ID NO: 272374 - DNA, 100 bp, Homo sapiens
agccgggctggtggcctcgtgctggagcccggacgggcgccacattctcaacaccacggaattccatgtgtgaccatgaagctcatggatgaggtcgccg

SEQ ID NO: 272375 - DNA, 100 bp, Homo sapiens
acgaacatttctgggtgacactcaacaggattcccgttggattggatgctgctggcaagacaaccattctgtataaactgaagttaggggagatagtcac

SEQ ID NO: 272376 - DNA, 100 bp, Homo sapiens
gggaaaagaagcccaaagttttaaagattacctggctggtgtttgcttgttctggagtgatcttctgactggaaaagaactatgtcatggatcaaggaag

SEQ ID NO: 272377 - DNA, 83 bp, Homo sapiens
aggacattgagaatgcctataagaaaacctttctccctgagatgagattctcattcagattgtggatgcctcgtcagtcatca

SEQ ID NO: 272378 - DNA, 100 bp, Homo sapiens
agctgtctggttgtgagcagggtctgcacgaaataaagctcctgggcaaggggacgtctgcagctgagaagaatccccagcacaagatagaatatagaca

SEQ ID NO: 272379 - DNA, 75 bp, Homo sapiens
caagaggctcctgcagacccctggcttcctttatctccagaagaagaagagaaaaggagaatccgaagggaaagg

SEQ ID NO: 272380 - DNA, 75 bp, Homo sapiens
gacggtttcgccggcagtctcgttctggagagtcttggcttctgggaggaagtcagagggattatctcaggatca

SEQ ID NO: 272381 - DNA, 87 bp, Homo sapiens
agttattggaagataaaaatggagaggtacagaatttagctgtcaaatggaatatgcactttctggttggaatttgaataacatgcc

SEQ ID NO: 272382 - DNA, 100 bp, Homo sapiens
aagacagagagcctggctcttctgcctcctccgacaccgaggaggactctcttcctgccaacaaatgtaagaaggcttttaaggataccggaaaaacacc

SEQ ID NO: 272383 - DNA, 82 bp, Homo sapiens
gttctgcacctcaggagggaattcagcctcagtgatgtccatgagatttgagttctgtgaacctgcatttgttgttggtaat

SEQ ID NO: 272384 - DNA, 90 bp, Homo sapiens
gcgcgaggtcgatgaggactcggagcctgagcgggaggtgcgaggaattgaggaagctcagataggaaaacgaggatacttaacacccac

SEQ ID NO: 272385 - DNA, 82 bp, Homo sapiens
agcgggcggcttcctggcctgggcgctccggtggcggcggagccaaaacaacttcccgacaagtggcagcacgatcttttcg

SEQ ID NO: 272386 - DNA, 75 bp, Homo sapiens
cggctgccctgtggcctcgctcctcggagggctgccaaacgagggattctttcatctggtcggggcagaggaatt

SEQ ID NO: 272387 - DNA, 100 bp, Homo sapiens
cagattcgcagtggtcgcttcttctccttgcatgaatacaactttgtctgagagccccttcaagtgtgatcctgatgctgccagagccattgtggatgct

SEQ ID NO: 272388 - DNA, 100 bp, Homo sapiens
accgagcgggactatgtgggcacgctggagttcctggtgtcggaaaatatttgcaatacctgccacgtccaaggttcagctgaggccaatgtaaagccag

SEQ ID NO: 272389 - DNA, 87 bp, Homo sapiens
agggacagcacctcatcccctggatgggggaccacaagatcctcatcgacagggccaattcctgtccccccagcagcatggcatcgt

SEQ ID NO: 272390 - DNA, 75 bp, Homo sapiens
ggtcgctggaatgtgtgtctcacgagaacactctgctccagccaaggtggtgagggcagctgttcctaaacagcg

SEQ ID NO: 272391 - DNA, 100 bp, Homo sapiens
cctatgttaagaagctacttaatgcccggcgacgcgttgtcttggttaacaacattctacagaatgctcagattctacttgacacacctggcattatcag

SEQ ID NO: 272392 - DNA, 82 bp, Homo sapiens
cggcgcaacatggctgcggccgccgcctccgcctcccaggatgagctgaatacaagccttaaagatggccttttccatgaat

SEQ ID NO: 272393 - DNA, 82 bp, Homo sapiens
tgacagctctgcggctcgggccctgagtttggtgccctggttgtcagatgttggaaagcagtaggacggaacatactcttcg

SEQ ID NO: 272394 - DNA, 82 bp, Homo sapiens
ttaaggtcttcagcggggcgctccaggaggcactcacagtgtactaatggtcacttgatgtgcgctggctgttttatccacc

SEQ ID NO: 272395 - DNA, 75 bp, Homo sapiens
ggagaatctgggcgtcgctctagagccccatggctgggggttatggagtgatgggtgacgatggttctattgatt

SEQ ID NO: 272396 - DNA, 99 bp, Homo sapiens
gcgaagagctgcttctgtatcttaaggtgtgttccagagaacaagccttcagacatttgctatattgacgctgagctgtcaggggactcaggcttatga

SEQ ID NO: 272397 - DNA, 75 bp, Homo sapiens
aggtcaaagaaaaagttcaaaaactgaaggactctgaagctgagagagaaaaggaacagttccgtaagctcttta

SEQ ID NO: 272398 - DNA, 101 bp, Homo sapiens
ctctcatctcgctcggctgcgggaaatcgggctgaagcgactgagtccgcgatggaggcaacgcggtaaaaatattgcttcggtgggtgacgcggtacagc

SEQ ID NO: 272399 - DNA, 89 bp, Homo sapiens
tgaaagctgagctaggaattcccttggaagagatccatcttcggttgtgaatccggcccggaatgcagccaccccttagagcaaccccc

SEQ ID NO: 272400 - DNA, 100 bp, Homo sapiens
gggacatagaacaggtgccacaggtttgaagatgccgcatttggattggatgaattccaaattctgcttgcttgctttttaatattgatatgcttataca

SEQ ID NO: 272401 - DNA, 99 bp, Homo sapiens
ctccttattggagcagaagaaagagccctggatggttaagaggaaggagacaaaagaatggtgtccagcttttcaggctgcctttcgagctcaggggcc

SEQ ID NO: 272402 - DNA, 74 bp, Homo sapiens
gggccagggaaccctggtcaccgtctcctcagtcaccaggagactaaagtccatcaaaaacatccagaaaatta

SEQ ID NO: 272403 - DNA, 95 bp, Homo sapiens
agaaagccatcaccactcaaaactgtaatactaaatgtgttaccataccaaggatgtacagttacccagcacgtgtacctcctcctcctcctatt

SEQ ID NO: 272404 - DNA, 100 bp, Homo sapiens
ggggctggaggtggtgctggggggttttggaaatttgcccatctgcatggcaaagaccgatctttctctgtctcaccaacctgacaaaaaaggtgtgcca

SEQ ID NO: 272405 - DNA, 50 bp, Homo sapiens
cgctggtcgctgccggaaatggccagggttttggccaaattgggcgaggg

SEQ ID NO: 272406 - DNA, 82 bp, Homo sapiens
agctgaagcgggacccggagcccgagcagccgccgccatggcaaagtgaagacatttccacctggacacctgaccatgtgcc

SEQ ID NO: 272407 - DNA, 100 bp, Homo sapiens
ccgggtaccggccgtggaagcggccaccgactactgtcagcagctgtgccagtgcggaaacaggaaattataaaagtgacagagcagctgattgaagcca

SEQ ID NO: 272408 - DNA, 90 bp, Homo sapiens
ccctgtgacctgtggagacacggccagatctgccctccagaacttgctactaccagcaccatgccctaccaatatccagcactgaccccg

SEQ ID NO: 272409 - DNA, 75 bp, Homo sapiens
aggaggccgaggaggagtgggagaggtgatgagacaaaccatgcttctgccacatcaacacaggactttctggat

SEQ ID NO: 272410 - DNA, 100 bp, Homo sapiens
aacacctcaatctcttggagaaagactactttggacttttgtttcaggaaagccctgagcagaaagtaatatttgaagctgaagtctcaggagggagaag

SEQ ID NO: 272411 - DNA, 100 bp, Homo sapiens
acttccccttccccaccgaaccgcgaacaagttgaaatcatcgcagaaggataaagttcgtcagtttatgatcttcacacaatctagtgaaaaaacagca

SEQ ID NO: 272412 - DNA, 100 bp, Homo sapiens
ccctttcttggcccttgttcccccaaatgtctgactctgactctcggactgagaaacgcaaggggctttgaccacgacctttgaagagcttcattttgag

SEQ ID NO: 272413 - DNA, 97 bp, Homo sapiens
ccgagtcccccggagtccgactcgctacgcgggtcttgcgagatatctggccgcctctgccgcagctggagatttttgatcaccatactgaagagga

SEQ ID NO: 272414 - DNA, 83 bp, Homo sapiens
gcagaagatctgggtgcccgtggaccacaggccctcgttgcccagatgaagttctactacatcaccctgctacgagaccccgt

SEQ ID NO: 272415 - DNA, 98 bp, Homo sapiens
gaagatcctagccgacaaggaggtgaagcggccccagcactcccagctgcgcagggcctgccaggtggcgctcgggctacaaaactttatagaggaag

SEQ ID NO: 272416 - DNA, 100 bp, Homo sapiens
tcacaaaacagcagatttcccaagagcagcggaaaatgatccagtcacaggaacattctggacgtgtgtttcggctccagtttgatgagtttcagatcat

SEQ ID NO: 272417 - DNA, 50 bp, Homo sapiens
gcattaccgggttcgctaggctcacagagtaaaggtgggattctatccaa

SEQ ID NO: 272418 - DNA, 100 bp, Homo sapiens
cccagatgtcattggagggtacaggtccatggacagaaagctgcttgggaggacccagtggaatgggtccgggacacacttccctggccatcagcccaac

SEQ ID NO: 272419 - DNA, 101 bp, Homo sapiens
atctggttcgaagtctcagcggtattctggtgcttatggtgcctcaggtccagaggtgtccttctaaagctggtagaggtttcacgagtcatcagggaccc

SEQ ID NO: 272420 - DNA, 74 bp, Homo sapiens
tcaaaaacaaaattctgaactcaggacttggcaagacttgattattcttagaaatgcacttgacctgcttttgc

SEQ ID NO: 272421 - DNA, 100 bp, Homo sapiens
cacacctcaggctgaagtctatctccgcatgtatcagctggagtctgggaagttacctcgaagtccctcttttccactgctgtgaaggctgctttcctgg

SEQ ID NO: 272422 - DNA, 88 bp, Homo sapiens
tgtggaggggaatagactccatctatccatatgagattttaggtgatgggcaagtcagaaagtcagatggatataactgatatcaaca

SEQ ID NO: 272423 - DNA, 100 bp, Homo sapiens
cgggaaacaagtccaaaccgaataggattagcgggtccatatggaatatttgctggtagggatgcctccagaggactggccacattttgcctagataaag

SEQ ID NO: 272424 - DNA, 100 bp, Homo sapiens
gtgaagtaccagggtcctcgggacttccagacactggaaaactggatgctgcagacactgaacgaggagccagtggactactgttcgaagatttttggaa

SEQ ID NO: 272425 - DNA, 100 bp, Homo sapiens
aaggactaccgcctgcacaagcgtttccccgcggccttcgcgccccaggcttcgcggggctacatgacatcaggaactcattatacaatgacaaatggag

SEQ ID NO: 272426 - DNA, 100 bp, Homo sapiens
cgacaagccgctggcagccgcggatctcaccgccgctcagggctaactatatgtcagaaagcatcagcttttctcgatggacccattcatctaatgaaat

SEQ ID NO: 272427 - DNA, 75 bp, Homo sapiens
aagcctttgaaagatgtcataggtactatactggcaattgctggagaagattttgcaattgttgcttctgatact

SEQ ID NO: 272428 - DNA, 99 bp, Homo sapiens
aggccggctggcagccctgcgagatgagccttccaagattaagatactggaacaggaaaatgaacatctgaatcaaacagtgtcttccttaaggcagcg

SEQ ID NO: 272429 - DNA, 82 bp, Homo sapiens
cgtgttcgacatcctggccgtgctgcagtacatgggctgcatcgaggttctccgctctatgcgctccctggactttaacacg

SEQ ID NO: 272430 - DNA, 75 bp, Homo sapiens
tccaagtaccctagaaaatgcagagcagtgaggagaatgaataccttccaagaccagagtggcagctccagtaat

SEQ ID NO: 272431 - DNA, 101 bp, Homo sapiens
tgctgcacaaggccgccgcccatctgggctgttggcagaaggtggacccagcgctgtgctccaacgtgctgcagcacccagacggggttttgccatgttgc

SEQ ID NO: 272432 - DNA, 50 bp, Homo sapiens
cgcaaagcttgcgaggtggcgttagagatggagttttgctgtgttgccca

SEQ ID NO: 272433 - DNA, 95 bp, Homo sapiens
gaggcttatctgaggccaaacccgccactccagaaatccaggagattgttgataaggtcaaaatgcagatcttcgtgaaaacccttaccggcaag

SEQ ID NO: 272434 - DNA, 100 bp, Homo sapiens
gtggcccccgagaccccgtcggacccatggtttccagtgcagcgcggagtgggcgatgccagcgtgccaggctattgagggcacctacattgacaagaaa

SEQ ID NO: 272435 - DNA, 100 bp, Homo sapiens
ttttccggtcccggcgcccggcgagggcgcgcggctggtgtccgccccgcccgaaagacgaaatctcacaaaactgtcccttatcttcagtcacatgctg

SEQ ID NO: 272436 - DNA, 100 bp, Homo sapiens
gcagggttgcagatttcttgagctggtgtcgacagaaaaatgactctgactcagattgatggacaacttttcttaattaagcaccttttgatacttcgtg

SEQ ID NO: 272437 - DNA, 105 bp, Homo sapiens
caggagttcgtctcttacgtctgcggaagtgcagctgcctcagttcttagcgcaggattgtgcctctactcctgcttgtacagactgcttttccagcagcatgga

SEQ ID NO: 272438 - DNA, 90 bp, Homo sapiens
tgcaggttggccccggcggcgggagcgcccccgatccggacaaagaaacgagcgctcgagacggggtttcgccatgttggccagactggt

SEQ ID NO: 272439 - DNA, 82 bp, Homo sapiens
aaaacatttcaactccctacagttgtgccatgcgcctgcacagctgaccacagttgggaaacgttgctgtctttggattcag

SEQ ID NO: 272440 - DNA, 87 bp, Homo sapiens
tgcccactggtggtcccccgctcccggggtccccggccggccaagcagcaataagagctaactgccatcaagagccatcagtatgtc

SEQ ID NO: 272441 - DNA, 100 bp, Homo sapiens
gctgatagacatgggggcctcaaacgtggagatcaactcctctctgttaatggagtggcgtgcaatggaattgagttttgccctggtaaatgggaataat

SEQ ID NO: 272442 - DNA, 51 bp, Homo sapiens
tttaagcactgctgcactttatgagtgtgaagcctcagtttaggtcatctg

SEQ ID NO: 272443 - DNA, 100 bp, Homo sapiens
ggcgtgctgaccagcggcggggatgctcaaggtttggtgcacctcgatttggaggaagtagggcagggcccttatctggaaagaagtttggaaaccctgg

SEQ ID NO: 272444 - DNA, 75 bp, Homo sapiens
caaataaacatggtgcttggggagcagtttctcatagaattctgcttggtcagaatcgtgatggcattgtgttca

SEQ ID NO: 272445 - DNA, 100 bp, Homo sapiens
gggccttctacgacaccctggacgctgcccgcagcagcatccgcgtcgttcgtcctcaaaataaattcgctgctctggacaatgaagaggaggataaaga

SEQ ID NO: 272446 - DNA, 100 bp, Homo sapiens
cacaagtggagctccttttcctccacctaccttcccgattcatggcctcccacgggaacgacgccgcgagagccaggtttgagtccaaagtaccctcctt

SEQ ID NO: 272447 - DNA, 100 bp, Homo sapiens
cttcctacccgttcaccaccctgaagccccacgtcgggatcgtccactacgaaggccacctacaaatagcagatcttcagtgtctattggatttttccaa

SEQ ID NO: 272448 - DNA, 96 bp, Homo sapiens
cccgaatccgccgggtcccactcacgcccgccggccgccgccaggcccagacatgtccgtccttgtaagttaaaagcttccatgggagccttcctt

SEQ ID NO: 272449 - DNA, 82 bp, Homo sapiens
tggaggcgaaaggctggatccttaatccaggccggagacaaagttccaaagaactactggttcagattttagctcttcccaa

SEQ ID NO: 272450 - DNA, 100 bp, Homo sapiens
ctgcgatggacagaataactgtcaagacaacagtgatgaggaaagctgtgaaagttctcaagagtcaagggtccagagaaggaggagaagttgagacagg

SEQ ID NO: 272451 - DNA, 51 bp, Homo sapiens
cgggagatgatcctggcggattttcagaaatatggctacacacacctttct

SEQ ID NO: 272452 - DNA, 75 bp, Homo sapiens
gctgtttccacgtgcggtgctcgtcgggagtgatcacctaccctacagaggaatgtttgctgggggattgaagga

SEQ ID NO: 272453 - DNA, 101 bp, Homo sapiens
agccacaatggccctcaccagaacccagccatgtggtcagcctgatctcggacttcacagccagcagaactccatccagtccaatggatcagatgggcaag

SEQ ID NO: 272454 - DNA, 82 bp, Homo sapiens
gcagtcggcactgctactgcgaagacagctggcagaggagcaggagcggcttcgcttggagcaggagcgagagcaggaacag

SEQ ID NO: 272455 - DNA, 100 bp, Homo sapiens
aagtatggactggagacccacatggagacccattcagataacccactaaggcagtttgaagagaacacatgaagaagaggatgattttggaaccatgcaa

SEQ ID NO: 272456 - DNA, 75 bp, Homo sapiens
aaacaagcttcattgttttcagctaacagtaaccccaggcaagaagttatgaaatggaatggatggggatataat

SEQ ID NO: 272457 - DNA, 75 bp, Homo sapiens
gctgaccttcacctgtcactgtgcccaggagttgtttaaaggctttgcccgccacctctcacacttgctgactca

SEQ ID NO: 272458 - DNA, 82 bp, Homo sapiens
gctgatcgcctgggtggttgttggcgtgtccctgcagcgaaggatcctggttggctgaaggtgatgtggccgccctcaaccg

SEQ ID NO: 272459 - DNA, 100 bp, Homo sapiens
acgcaatcaggagaagccaagcacgctgacgaggttctgtgagagcatgattatattccatcacaacaagatattctgcttgccagaagacccaccaaag

SEQ ID NO: 272460 - DNA, 100 bp, Homo sapiens
gtcctatacaaaaacttagatctaattttgcccactttgagaaattccatgagtgaaaccgtcagactggtcagtggaatgcagcaccctggctctgctg

SEQ ID NO: 272461 - DNA, 149 bp, Homo sapiens
cccaggtggaccccaagaagaccattcagatgggatctttccggatcaatccagatggcagccagtcagtggtggagggttggattgagattgttggatgtgctgatcgttcctgttatgacctctcctgtcatgcacgagccaccaaa

SEQ ID NO: 272462 - DNA, 75 bp, Homo sapiens
atagggatattgtagaaactgtctttaacctgacttgggaagatccccatgaaaaagataagagcacgaactgct

SEQ ID NO: 272463 - DNA, 100 bp, Homo sapiens
agctactcgttaaagttgatgcaaagacaaaggcacagctggatgaatggaaagcaaagaagaaagcttctaatggggaatttaaactttgggataatga

SEQ ID NO: 272464 - DNA, 100 bp, Homo sapiens
taatagttcagaggaagcagaaagtgaaggaggtgggcctttggagtgacgctgtgggaactcatgactctgggccagactccctacgtggacattgacc

SEQ ID NO: 272465 - DNA, 50 bp, Homo sapiens
gagaccagcatccttggagaagagtccgaaattgaagttcagaggaagaa

SEQ ID NO: 272466 - DNA, 82 bp, Homo sapiens
cagcggcgtcgagaggaccatcctgggtgctggccctgtgctggaggtctctaattaacagaagatggcaaagcccagccac

SEQ ID NO: 272467 - DNA, 74 bp, Homo sapiens
taagtgcagatggaacacaacaggtgtctttcaggttgcagaaaagatggaaaaaaggacatgtgcactctgcc

SEQ ID NO: 272468 - DNA, 83 bp, Homo sapiens
agattcttccaggcagagttgcagatttgtcttagaagctgcagagataatgcgggatattggcactgccatccagtttctgc

SEQ ID NO: 272469 - DNA, 101 bp, Homo sapiens
cgacaagccgctggcagccgcggatctcaccgccgctcaggcaagagtgagccatggagctacgtgtggggaacaagtaccgcctgggacggaagatcggg

SEQ ID NO: 272470 - DNA, 76 bp, Homo sapiens
tgaaggcgtggatagcctgaaggcagccattcagatatggacatttctggaattacagagccccctctacattgag

SEQ ID NO: 272471 - DNA, 100 bp, Homo sapiens
ttcagccagtataaaaacacagctcgacagtacgcctacttctataaagtcatccagatcctgaggtgcagaggcaattcccggaggactacagtgacca

SEQ ID NO: 272472 - DNA, 90 bp, Homo sapiens
cttcatgcccaaatcccggaaactccagcgtgtctccagccgtggtccctggtgctgaaccgcctgcgtccagttgccagcgggggtggg

SEQ ID NO: 272473 - DNA, 100 bp, Homo sapiens
ggaaagggtcagaggcttcctaacgcagactcgagtgcgaagcgcgcagtcgccgggaattggcagcaatgaaacagattctcgttaagatgcatagtaa

SEQ ID NO: 272474 - DNA, 100 bp, Homo sapiens
tcttcgtctttgcagcgtagcccgagtcggtcagcgccggagggcagactttgacgacactgcgacatactcagcagtggccaccaatgcccacggacaa

SEQ ID NO: 272475 - DNA, 100 bp, Homo sapiens
cctgccttcgcgctgaggagccctcgttttcgagatcaggcctgaccgggataagctccagcacttgctctgaaatttggggactgagtacaccaaatac

SEQ ID NO: 272476 - DNA, 75 bp, Homo sapiens
gctgcccctggccgatcagatcaagatcctgatgaagaatgtttgatgaaggccggaacaactttgaaggggagg

SEQ ID NO: 272477 - DNA, 82 bp, Homo sapiens
gttgttcatgaactgtaggggcaggctttcagaagcccctttagaaaggtcgttcttccctctttccaatagatgatggctt

SEQ ID NO: 272478 - DNA, 100 bp, Homo sapiens
caaaagcaaagacccctcggggctgctcatctctgtgatcagaatgcaggctcaacagtaccagcagcagcgtcgaaaatttgcagctgccttcttggca

SEQ ID NO: 272479 - DNA, 75 bp, Homo sapiens
ttattgatctaatccaaagtatcttataacttctggctggaattaaggttggcagaaattgcacactcccttctg

SEQ ID NO: 272480 - DNA, 83 bp, Homo sapiens
ctctttctggcctggaggctatccagcatgacgacaacccccccgtgtcttttgtgaagttctccccgaacggcaaatacatc

SEQ ID NO: 272481 - DNA, 111 bp, Homo sapiens
ttgggatttgagattgacgcggtgaactctgtccagttttcaaaccacacagtgtactaatggtcacttgatgtgcgctggctgttttatccacctactagcagatgcccg

SEQ ID NO: 272482 - DNA, 75 bp, Homo sapiens
gaagcacctctccagcggggacctgctccgggacaacatgctgcggggcacagcccgacggccatggaggctgaa

SEQ ID NO: 272483 - DNA, 50 bp, Homo sapiens
aaacgttgcttctgaggggagcccaagtgccatctccctcttctacgagc

SEQ ID NO: 272484 - DNA, 146 bp, Homo sapiens
aaagtccttggtcagagccaggagcctaatgttaaccctgcttcagcaggcaaccagacccagaagacacaagatatgcacccaatgtccagggagcgtgcaaaatttgtcaaaagtggccttttattgtaaaacgacacgagagc

SEQ ID NO: 272485 - DNA, 83 bp, Homo sapiens
ctcctggacccccagtgccgcctggaaaagctgcagctacagcaactggacgaggagaacagtgaactccggtcctgcacgcc

SEQ ID NO: 272486 - DNA, 90 bp, Homo sapiens
cctcacgtagttcttggtaaaggtccacctggtggggcttggcatgcttctattctgctgcttgaagtcagaactgctgatggagacaaa

SEQ ID NO: 272487 - DNA, 100 bp, Homo sapiens
ctaagctcatcattgttactgtccaccacaaattaaagatgaacctgaagatgatggctattttgttcctcctaaagaggatataaagccattaaagaga

SEQ ID NO: 272488 - DNA, 74 bp, Homo sapiens
ccatcagctgccacgcctggaacaaggaccgcacccggtgtcggttggtggaaatatgaattctgctatggcaa

SEQ ID NO: 272489 - DNA, 83 bp, Homo sapiens
cgaagaagctgaaagactctctgaaagccttaaattaagttcgcggcgcggcggacatggcggtggagtcctgagctagtcgt

SEQ ID NO: 272490 - DNA, 100 bp, Homo sapiens
tgtttgacaagacgcggctgccgtacgtggccctcgatgtgctctgcgtgttgctggccgagtcgtccggaaatccattgcccgtgttctcacagttatt

SEQ ID NO: 272491 - DNA, 75 bp, Homo sapiens
tgatatccttctcaaccttgtgggatgtgaaaactctgttactgaaggagcctgtgtgaaatgcagcaaaggggt

SEQ ID NO: 272492 - DNA, 101 bp, Homo sapiens
cagaaacccgagccggtgcagtacacacactggaacacacaccagccgctttgtcccgctggctggaagcctggcagtgacacgattaagcccaacgtgga

SEQ ID NO: 272493 - DNA, 76 bp, Homo sapiens
gggggccagctcaggacacacagacccagctggaactcggcatctccttggaaacaatgccatctttgaatgtgag

SEQ ID NO: 272494 - DNA, 87 bp, Homo sapiens
ggattccaagtaactcttatttggaggagatgttaaagtaacccatcttgcaggacgacattgaagattggtcttctgttgatctaa

SEQ ID NO: 272495 - DNA, 75 bp, Homo sapiens
catatttgttattggggagaaaatcttcagagcttaattggcttagtgtcgacttcaataattggaaagactggg

SEQ ID NO: 272496 - DNA, 82 bp, Homo sapiens
gtgatcctcctgccttagcttccaagaatgctgaggttacagctcggtcaaggagtgtgatgactggcgagcagatggctgc

SEQ ID NO: 272497 - DNA, 100 bp, Homo sapiens
gctgtgctcgcgctactctctctttctggcctggaggctatccagctgatgtcttggcattgcccattttcaagcaggaagattccagccttccattgga

SEQ ID NO: 272498 - DNA, 98 bp, Homo sapiens
atgaagagaaaaatggcacctgtcaaggagctgtacttcagcaccgtggacactttccagaagttcgtggatgccctgttccttcagacgctccctgg

SEQ ID NO: 272499 - DNA, 82 bp, Homo sapiens
ttagctgtgctcgcgctactctctctttctggcctggaggctatccagcgtgatggcatcagctgagaagggaaggaagccc

SEQ ID NO: 272500 - DNA, 100 bp, Homo sapiens
gagaatgtctgtggtgatgactatgatgaagcagaatagcctaacatggcagaccagagacagcgctcactgtctacctctggggagtcattgtaccacg

SEQ ID NO: 272501 - DNA, 100 bp, Homo sapiens
agcgacgttattctgatctcaccaccctggtggcctttccctccagctctgtctatcctaccaagcggatactctgttttcaaggaagctgaatgggaaa

SEQ ID NO: 272502 - DNA, 100 bp, Homo sapiens
gcggtcggtgacagcctcaagggcttcagcaccgcgcccatggcagagccagaccggcttcgtgggacacatatgcaacatgcctatgatttttacaagc

SEQ ID NO: 272503 - DNA, 90 bp, Homo sapiens
gctaaacagaaaaggagaactataattctaggaagtggtcacaaaggaaaagctactattagaattggcttactcaattccagatatggc

SEQ ID NO: 272504 - DNA, 100 bp, Homo sapiens
gcctcttggggacctgggagccccctccgagttacacctccagagccaaaagtaagaacaccacagttttctcaagctgtgcctgaagctactttcaaat

SEQ ID NO: 272505 - DNA, 100 bp, Homo sapiens
gcctttgacagtcccgaggagtcgcccttcggagacctcctccacaccatgcagaggcagaaggctaaagtaaataatgccagcctgattggactgggtt

SEQ ID NO: 272506 - DNA, 100 bp, Homo sapiens
tcttggagttgctggtgttctatactggaagaggcatgccagaggtagagcaggtggatagatacttctcaagacatcacacagcgtgagtcaatcaagg

SEQ ID NO: 272507 - DNA, 80 bp, Homo sapiens
gagcagaggatggaacacttcagtgcattcaaggaaaaccagtagattcccagacatcgcgaagtgaatctgaaattgtg

SEQ ID NO: 272508 - DNA, 51 bp, Homo sapiens
agaagctgtcggagcttcccaaggatccaatgagttccacctacatagagg

SEQ ID NO: 272509 - DNA, 100 bp, Homo sapiens
gagccgagaccgggaatgggctacctacacctgtgtgctgggctttcacgtctacgactggctccgagtggacagcgcctggagaattcaccaagttcag

SEQ ID NO: 272510 - DNA, 98 bp, Homo sapiens
gccagaagaggcgttcgctgcgcgtgcacattccgactcggtgaaatacctggagtgctcagctctcacccagagaggcctgaaaaccgtgttcgacg

SEQ ID NO: 272511 - DNA, 98 bp, Homo sapiens
gaagcagctgagtgatgggcagcccccaccacccgcccaggccagccccagcagcaacagcagcacaggacagagcgggatgccaccagcttgtccaa

SEQ ID NO: 272512 - DNA, 75 bp, Homo sapiens
cgcacgggagccagctgggtgaaatggagcatctactgttgtcacggctatattcggaggcattctccaaaatga

SEQ ID NO: 272513 - DNA, 100 bp, Homo sapiens
acattaacagacaagacacttttcagaaagacagatggcgagtaacccatgggccaggtagcgttctatgccaaccttgaatgccatcaggaagtcactg

SEQ ID NO: 272514 - DNA, 75 bp, Homo sapiens
cgtgctggtcttgaaatttgcagaggtctactttgcacagtcccagcaaaaggtcatccatctccagccccacct

SEQ ID NO: 272515 - DNA, 75 bp, Homo sapiens
gacagattcgcagtggtcgcttcttctccttgtttggtggtaatccatttgcttccttggtgagcaatacatcct

SEQ ID NO: 272516 - DNA, 90 bp, Homo sapiens
ggcgggtggcatggcggagaaggatgacaccggagtttgacgaagaggtggtttttgaggttttgacacaagggcgcatatcttcaaagc

SEQ ID NO: 272517 - DNA, 83 bp, Homo sapiens
gactggggttctgagactccctgtcccggaccgcaggaaataatgcaaaaggtgtcccaaggctcctgaccagtgaacaaaga

SEQ ID NO: 272518 - DNA, 100 bp, Homo sapiens
ctcatcaaggctacaattgctggtggtgacgcctgtgtgagcacaagtatggcaatgcgccccgtgtccgcatcaatggccatgtggctgcccggttccc

SEQ ID NO: 272519 - DNA, 100 bp, Homo sapiens
tggccagctatgggaacgtcatcgttatcaccattaactaccgtctgggaatactagatgttgatgttagtgaagattcacctcctcccctacctgaaag

SEQ ID NO: 272520 - DNA, 87 bp, Homo sapiens
tggactgaaagtttattgcattccaacagctcattttatgttggtaatacgaggaaatagtatcatcatgttagaagccttggaacg

SEQ ID NO: 272521 - DNA, 101 bp, Homo sapiens
ggaggagaccggcacccagacaggtggcgaaggcagaggagtgaaaggtgtagcagtcactcggcctacacccacagcatcgaccttgtgaacccagcgac

SEQ ID NO: 272522 - DNA, 100 bp, Homo sapiens
agaagatcctgcctgtgctctgcggtctcactgtagatcctgagaaatccgtgcgagaccagatgccttggttcaagggatggaaagtcacccgtaagga

SEQ ID NO: 272523 - DNA, 90 bp, Homo sapiens
ggccaccccgcacctcctccaccaccgcctcccgctccctgacgacagacccagcacaccctgcctgcatggcgctgcgctgcaccttca

SEQ ID NO: 272524 - DNA, 100 bp, Homo sapiens
catttcttcagatagctccccagctgtggaaaatgagcatcctcaaggatggtgccatgacaatggtgtgaactacaagattggagagaagtgggaccgt

SEQ ID NO: 272525 - DNA, 85 bp, Homo sapiens
agatttcctctggaagctaccacatgcaaacatacaagcagtctcacctcagctgtgagtacccaggaagctgcaccgtgtggcc

SEQ ID NO: 272526 - DNA, 83 bp, Homo sapiens
ggaaaaaggacttccctagaacaattctgtggtgttcttggtcacacatttatggagtttctgaagggcagtggagattactg

SEQ ID NO: 272527 - DNA, 100 bp, Homo sapiens
gagtgcaaactgcagtcaccaagtaaaacagtctttttgccattcctccaggacatccaccataaggaaaggagaccctggaccaacattctctaagatg

SEQ ID NO: 272528 - DNA, 98 bp, Homo sapiens
agatagtcttgggacccttgcatggtgtttcaaagggtggtgaagaactaaggtatctctcctaaatgtgtgatcaaggaattaccaccaacagagaa

SEQ ID NO: 272529 - DNA, 83 bp, Homo sapiens
atcagacaccgagcttcagcaagctctctccaacgggtttcgaaaaaacgatgaaatgaaagctatggatgttttaccaattt

SEQ ID NO: 272530 - DNA, 100 bp, Homo sapiens
tgccgccgtcagctgtgccgtcgcgcagcacgcgccgccggtgtgcaactgaggaacatggctcaagaaactaatcacagccaagtgcctatgctttgtt

SEQ ID NO: 272531 - DNA, 112 bp, Homo sapiens
cagaaaaccttatcaagaaatatgggacacatttcttgctatctgctactctgggaggaatccatgggaaagagctatgatgggagagcttatgtcatcactggcatgtgga

SEQ ID NO: 272532 - DNA, 90 bp, Homo sapiens
cccggcccgccgtgacccacggccgcctccggagcccgacgcggtcatggattgacggcagtcaaggaaaaagcaggagccactctacgg

SEQ ID NO: 272533 - DNA, 100 bp, Homo sapiens
gctatcacctggagcactggacaagtgcatgcaagaccatgactgcaaggattgggtgcataagatcattcagagaccatttccatccagtttcgagagc

SEQ ID NO: 272534 - DNA, 100 bp, Homo sapiens
aaagacaaggaagatgagctgtcctttcaggaaggagccattatttatgtcatcaagaagaatgacgatggttcaggtgtgggacacagcaggtcaggaa

SEQ ID NO: 272535 - DNA, 106 bp, Homo sapiens
agacattacatcaggaagatactgcagagatattctactccatctcattcattgtacagtttttcagaagaagtgaagtcaagatgaagaaccatttgcttttctg

SEQ ID NO: 272536 - DNA, 100 bp, Homo sapiens
ttagcccaagaaacattatattcatgcactcaaggagttgcccctggtcctgtaattggacttcaggcaccatctactggtcttcttggcgcccggcccg

SEQ ID NO: 272537 - DNA, 100 bp, Homo sapiens
atttgttttatcctgtatgaactttgacggtggatttggttgcagaccaggttctgaatcccatgctgggcagaacactgagctgaaggttgaagtggag

SEQ ID NO: 272538 - DNA, 87 bp, Homo sapiens
tgcgagatatctggccgcctctgccgcagctggagaatgattacggacctgaagccaaagaacaagatgcgctagtggacagattgc

SEQ ID NO: 272539 - DNA, 100 bp, Homo sapiens
aaagcctaaaactcactttcttccggactctttcaagaaatataacaatgattggtggataggaaggctggtgaaagagggctgtgaaattggcttcatt

SEQ ID NO: 272540 - DNA, 100 bp, Homo sapiens
cactgcagcccctgcgtcgccgggaccctcgcgcgcgaccgccgaatcgctcctgcagcagaggaagagcctaggctggatgtcttgatcaataacgcag

SEQ ID NO: 272541 - DNA, 78 bp, Homo sapiens
gggctggctgcggccgccctgggccgggccccaccggacgccctgggcgctgcctatggcacagccaagagcggtacc

SEQ ID NO: 272542 - DNA, 100 bp, Homo sapiens
cgcttcaaccccaggggaccagaggaactcagccctgattgcgatccaaaacgctaacgatgtattaattgcaccacttgagaaatttcgaaaagaacag

SEQ ID NO: 272543 - DNA, 108 bp, Homo sapiens
ctgcgagatctagggctccttacccaagtacatatcctgtaagaccagaattgcaaggccaggacttggaaaaggagagtgacacacccctccagcaagtatccattg

SEQ ID NO: 272544 - DNA, 98 bp, Homo sapiens
gttttaattaagcatggaatacagaaaacaacaaaaaacttaagctttaatttcatctggaattccacaggaagcttttgtccagtgatcgaaatcca

SEQ ID NO: 272545 - DNA, 100 bp, Homo sapiens
gtggagctccttttcctccacctaccttcccgatcgtgagatggagaataaagaaactctcaaagggttgcacaagatggatgatcgtccagaggaacga

SEQ ID NO: 272546 - DNA, 88 bp, Homo sapiens
cgttgacaaaacttttttccatcaagttttcactggtgcctacctagcagctattgacttagtgaactttatgttcattctcttccca

SEQ ID NO: 272547 - DNA, 74 bp, Homo sapiens
gtggtttttatcaccacacgactgggtatatttcctctctggtcagatgttgccattttgtataatgatcgctc

SEQ ID NO: 272548 - DNA, 100 bp, Homo sapiens
cgatgatgtgcagatcaatgacatttccctgcaggcgttggagaccagggccagccctggccacaccccaggctgtgtcaccttcgtcctgaatgaccac

SEQ ID NO: 272549 - DNA, 82 bp, Homo sapiens
ccaagtgcaaggggtgcttcaaggccattgtggcagctgtccccgccctactccggaccgccccaaagactccatgggatgg

SEQ ID NO: 272550 - DNA, 95 bp, Homo sapiens
cagactttctcaactcgttcgaccctacagcttggggcctgggctcctctgaccatcctcattgagaaaggaaagtgagtccagagaagttgatg

SEQ ID NO: 272551 - DNA, 75 bp, Homo sapiens
ggctctgtagccaaggtggctgactactggctggacgtgctgtacagcaagctggtcctggactcccagaagcga

SEQ ID NO: 272552 - DNA, 75 bp, Homo sapiens
cagcaacgccgtgcagctgcccatcgaccagaaaatgtgatgttctgaatcgtggattttcaggttacaatacca

SEQ ID NO: 272553 - DNA, 100 bp, Homo sapiens
ctgaagctgaggctggccatccaggagatcatgtcgctgaccagcccgtctgccccgcccacatctagaacgggaatctttaaccagtttcagtgtagta

SEQ ID NO: 272554 - DNA, 98 bp, Homo sapiens
acatacccactgtttactacaaatgcttgctctactagtggaaattctaatctttcacagacacagagcttttgtgctgccttgcaccaggaactcag

SEQ ID NO: 272555 - DNA, 75 bp, Homo sapiens
tgagagttacgtggcagaaatgatcaagaggcgtggagctatttcctatgacagttctgatcagactgcattata

SEQ ID NO: 272556 - DNA, 100 bp, Homo sapiens
caccactttgaggtcactttccagcagtccagcacggccaagtcagccacctggacgttcccatgatgggcacccacatgccaatggctggagacatgaa

SEQ ID NO: 272557 - DNA, 75 bp, Homo sapiens
acttgggagaaagtttcatctgtggatggagtattggattggatagctttagtcaaagcagctgctgcagctgca

SEQ ID NO: 272558 - DNA, 49 bp, Homo sapiens
accatggaggaggacgacagctacgttacagaatgtctgaaggggacag

SEQ ID NO: 272559 - DNA, 101 bp, Homo sapiens
gcgagaccgcgtgcgaggaccggttgaagaagcctcagcggaggcgatacggcctcctcgccaacactgaggaccccacggagatggcctcgctggacagc

SEQ ID NO: 272560 - DNA, 99 bp, Homo sapiens
aagacagacagctcagaagttccatagaacgggttattaacatatttcagagcaacctctttcaggctttaatagattgaaaaggaagatcaggccaac

SEQ ID NO: 272561 - DNA, 51 bp, Homo sapiens
tgagaaggggagcagtcaggtgagagggaaatcctcattgacgattcaatt

SEQ ID NO: 272562 - DNA, 75 bp, Homo sapiens
ctgccgaccgtgtgcgctccttatattcccccgcagagggctgaaatctctttaatgatggagggaagcaggcag

SEQ ID NO: 272563 - DNA, 87 bp, Homo sapiens
gtattggagctgaaggcggcggcagagaacttgccggtgccagctgaggcaaacgagatgctgctcagtggacggaagctgacagcg

SEQ ID NO: 272564 - DNA, 98 bp, Homo sapiens
tcatagcattcgcctactccgtgaaggatgccaaagaagagtgaatggcccacaaagagcctggtagcacatacgcttttcaaaaggtcatgcactta

SEQ ID NO: 272565 - DNA, 50 bp, Homo sapiens
gctgccaccggcgcgcccgagggagcatgtaacttcaaggtttaaaaacg

SEQ ID NO: 272566 - DNA, 75 bp, Homo sapiens
aaggtcatttaaccaacctcagctttacaaaccctgaatttataactgacatgcaatgatgctacctgttctgac

SEQ ID NO: 272567 - DNA, 83 bp, Homo sapiens
gggcggcgcgggcgcgggcgctgcggcgggacagctcgacgcgcaggtgtggacactgccagcggctgcagccgacttggaat

SEQ ID NO: 272568 - DNA, 100 bp, Homo sapiens
atgaacagtatgaacatgcctccattcacctgtgggacctgctggaagggaaggaaaaacctgtatgtggaaccacctctgtcggaaaaggtaacagaag

SEQ ID NO: 272569 - DNA, 100 bp, Homo sapiens
ctcgcccagcggccgcgacgctatggcgcactggagtaccctgttcctggcagtttcatgtccttagcaagctactgagtttcatggcacctattgacca

SEQ ID NO: 272570 - DNA, 100 bp, Homo sapiens
cggcttccgacgtgcagcctggcagtgcagtggtgggcttatctaaatcagatcccaaatagtatttaaaaagcctctaccaaaagaagaggaggggctc

SEQ ID NO: 272571 - DNA, 101 bp, Homo sapiens
ccctcacctggtcaatgcagacggacagtacctcttctgcaggtactggaaacccacaggcacacccaagaagaattttaaatcgtttctccaaagacatt

SEQ ID NO: 272572 - DNA, 87 bp, Homo sapiens
ctgctcctgtcgccttcgcctcctaatccctagccactatggtgacagagctgaatgaacctctctccaatgaagatcgaaatctcc

SEQ ID NO: 272573 - DNA, 89 bp, Homo sapiens
agcccactttaggggggatagatgcaaaacccttttagagaaacccaaactcttcttcattcagaaacactttgtgctactctgtgggg

SEQ ID NO: 272574 - DNA, 100 bp, Homo sapiens
ccgcgagaagcagcgggggggcaggcgatcgaagtgaataccagggcctggtgaagcacacaggaggctgccactgtggagcagttcgttttgaagtttg

SEQ ID NO: 272575 - DNA, 96 bp, Homo sapiens
gtactgcccatgaaaaaggatgttgaccggacagcaatggtgaactagacccctggtcaggaggtggagtaactaaggatatcacagacactctgg

SEQ ID NO: 272576 - DNA, 100 bp, Homo sapiens
ctcctccgggggacccgcggtccccaccgtgcagcggggcatcatcaagatggtgcattgtgttgtaatcattcaaaggataaccaaatgtgccgtgatg

SEQ ID NO: 272577 - DNA, 74 bp, Homo sapiens
tactggagtaggtgttagtaaggctctaaattatcttggtattcagcccacaaaggaacaacaccaagccctga

SEQ ID NO: 272578 - DNA, 50 bp, Homo sapiens
ctctgcttcctttgaacagagctctaggatcgcagtatgtggtagggaag

SEQ ID NO: 272579 - DNA, 98 bp, Homo sapiens
ctgccgctgctgccgccgccgcctcgggtcgtggagccaggagcgacgtcaccgccatggcaggcatcaaagggccggtgggaaagtcagcaggatgt

SEQ ID NO: 272580 - DNA, 82 bp, Homo sapiens
cttggaaaaacgtgtgggtacgaccttgcgcaatgtccctgctcttctctcgatgcaactctatcgtcacagtcaagaaaaa

SEQ ID NO: 272581 - DNA, 95 bp, Homo sapiens
agaagatcaccccctattcttccaacactagattccttaaaaaccctagcagtccaagccttatgcatttgatcgggtgttccagtcaagcacat

SEQ ID NO: 272582 - DNA, 100 bp, Homo sapiens
gaggaggacttcagaaacccgactgagaagtggagcgacccccagggagggtcggacctgcctcaataccgccaagatttgaaagaagccaacactaaac

SEQ ID NO: 272583 - DNA, 83 bp, Homo sapiens
atgagggaaatcgtgcacttgcaggccgggcagtgcggcaaccaaatcggcgccaaggcagttgtgaaaaacttcaggacaaa

SEQ ID NO: 272584 - DNA, 110 bp, Homo sapiens
cctgttgaagaactcttagattcttatcacaaccaagtagaactggctcttcaaattgaaggaatgactctactaatgatggggtcagcagatgctcttccagaagaacc

SEQ ID NO: 272585 - DNA, 98 bp, Homo sapiens
ctccgcggtgtcgaggctctccctgcacagcatcgcgcagaacaaagggatcagatccctcatccacctacatcaggcaactggagagcaaagtgagg

SEQ ID NO: 272586 - DNA, 74 bp, Homo sapiens
tcccccgtgtcttcctatgcaggtatcagaacaaggtttaatagaaatccttaaaaaagtaagccaacaaacag

SEQ ID NO: 272587 - DNA, 100 bp, Homo sapiens
cggcggcggagcgggcggcagagcagggcggcggcgactcgcagtgtttggccagcgcttggatgagactgtggcctatgaacagaaattcggcccccat

SEQ ID NO: 272588 - DNA, 75 bp, Homo sapiens
cctgaacctcccagagccctccgtgattgttggaatatgaggctgctgtcatttgtggtgttggctctatttgct

SEQ ID NO: 272589 - DNA, 83 bp, Homo sapiens
cactgcagaactgggttctggactttgggcgtcccattgccatgattgcagatttgaaggcagccaggcagcttgcgtctgaa

SEQ ID NO: 272590 - DNA, 75 bp, Homo sapiens
aaagatgttgtccaccttgacagtgaaaagagacgagttgtactgctgtcacaggaaatggacgctggattacaa

SEQ ID NO: 272591 - DNA, 100 bp, Homo sapiens
gaccttcctttctattcacccatctggcaagttggccctgtcggttggtacagataaaactttaaggaaagaatacccacctcatgtccaaaaagttgaa

SEQ ID NO: 272592 - DNA, 90 bp, Homo sapiens
aacgacaagaaaaacaatcgcttcaatgatgggaaggtggatcccgccgggaggtactttgctgtccatgatggcagtgaagaagaagac

SEQ ID NO: 272593 - DNA, 100 bp, Homo sapiens
tggctggtctcctactcccagatgcatccgtgtcacttgttcagattattatcaatacaacacatttggagaaatcctgtaagtacttggaagaatttat

SEQ ID NO: 272594 - DNA, 78 bp, Homo sapiens
aaggtgccggtggtgcgagtcttcggagcgaccccggcaggtaatgaatttgggcatcctgaatggttagacttccca

SEQ ID NO: 272595 - DNA, 74 bp, Homo sapiens
agtccctggggattccttaccacattgtgaatattgtctcaggacatggtctgctatacagctcagactctcgt

SEQ ID NO: 272596 - DNA, 50 bp, Homo sapiens
cctgttcatcaatgcctacaacaggtcgacaaagatgctgaattagtggc

SEQ ID NO: 272597 - DNA, 74 bp, Homo sapiens
ggacagtggagatgaagcctaagaatatgatcagcaattaccagctctggctgggtcgccacaacttgtttgac

SEQ ID NO: 272598 - DNA, 100 bp, Homo sapiens
aacacttctccgagccagcgagccagcgagccgccgacccgccgagcaaaatggctgtggaaaatctctgttctcacaaagtctccccaatgctctacaa

SEQ ID NO: 272599 - DNA, 98 bp, Homo sapiens
gggagacaaagttgaaaacaaagtgctgagggagacgtggtgggcggtccttcctgtgacacgacccttgagtgacagttctatttgattgcctccgg

SEQ ID NO: 272600 - DNA, 100 bp, Homo sapiens
atttgcctcaaagcgagtctcaaaggtgttcctggatttgaaaagagtagttgaacagctacggaagaacctgatagtaaagcaagaacaaccggacaag

SEQ ID NO: 272601 - DNA, 73 bp, Homo sapiens
tgaccatagccagagaacagccctccatcttgcagcccagaagatccacaagaaggtgctgtggtggttctcc

SEQ ID NO: 272602 - DNA, 76 bp, Homo sapiens
ccgggcctgaggttgaactggggtgaaccggccatcgaagacggcaatttggaggaaatggaagaggaagtacggc

SEQ ID NO: 272603 - DNA, 97 bp, Homo sapiens
tgcaagtggaaggaaactcttcaccaaagaattgatcacatcatgaaaggatcctaagcacttcaagtcagagaagacaggacggggacagttgagg

SEQ ID NO: 272604 - DNA, 100 bp, Homo sapiens
ggagccacaggatggtacctggccccaaaaggaatcctggagaggaggacagtgacaacaggtgaatgaaaactttgccattgatttgatagcagagcag

SEQ ID NO: 272605 - DNA, 89 bp, Homo sapiens
gtggaagctggaccagaggccgggaggcgaggaaaccgtgtgaaggaagcccatcccccagaattgagctgctgcataatattgacccg

SEQ ID NO: 272606 - DNA, 100 bp, Homo sapiens
cgccagttgggatcaaatgtgagcctatggatcaaggtacatcaggaacgtctctatcaagaatacaatttcagcaaggctgagggccatctgaaacaga

SEQ ID NO: 272607 - DNA, 98 bp, Homo sapiens
gagcctagaatgcatcagtgcccttgtggcgaatggggctcacgtcgatgagggtcgctgtctgcccattgatagaggccagattgtcttggaagttc

SEQ ID NO: 272608 - DNA, 97 bp, Homo sapiens
aacgccttccagctccggctcccgctgcctgcaccatgtccgccagagatggcagatgatcagggctgtattgaagagcagggggttgaggattcag

SEQ ID NO: 272609 - DNA, 100 bp, Homo sapiens
gctgggataagagaggccctggtgaaagtgggagatacattggatcttctcattggagaggataaagaagcaggaacagagacagttatgcggattctct

SEQ ID NO: 272610 - DNA, 102 bp, Homo sapiens
tcgaagacctgaggagcaagggtgctgggtaggccaggtttcagcatcgcagacaagaagcgcaggacaggctgcattggggccaaacacagaatcagcaaa

SEQ ID NO: 272611 - DNA, 100 bp, Homo sapiens
atggagctggtccgctgcatccgccatatattgtacaatgaacagaggttggtccgagaagccaacaatggagaaaactggttgtcctggatgtttgaaa

SEQ ID NO: 272612 - DNA, 101 bp, Homo sapiens
taaaacaacagaaattcctctaattggattggcagattgctactctggctttactcctgggcggcgctgccatcattctcattgcattcctggtgggtttg

SEQ ID NO: 272613 - DNA, 100 bp, Homo sapiens
cactctgggaaaaaattagagacaatgaaaacagagttcctacatgtgaagagacctcagcactgtctgccaagtcctgtgaaagtaattctccattccc

SEQ ID NO: 272614 - DNA, 80 bp, Homo sapiens
agatggttctgctttagtgaagttgggaaatactacagtaatctgtggagttaaagcagatgtcctggaacaggtggagg

SEQ ID NO: 272615 - DNA, 90 bp, Homo sapiens
cagccctgtccaacatgcttcccaaagatgacagtcatgtccctttccagggacctcaaggacgactttcacagtgacacggtactctcc

SEQ ID NO: 272616 - DNA, 75 bp, Homo sapiens
gctcggcggtgagatcgtcagcgctgactccatgcaggaaatcatcgagttccccatcctaaagctaaatggccg

SEQ ID NO: 272617 - DNA, 50 bp, Homo sapiens
ccttctcccggcgcctcaagcggaagaaattcggaactatccgggcagat

SEQ ID NO: 272618 - DNA, 75 bp, Homo sapiens
aaaataagaattttaaatgccaccgaacctatcggctctttgcagccggaagtcggtgcagcccacctcagagga

SEQ ID NO: 272619 - DNA, 75 bp, Homo sapiens
ggcgccgcggctcttttctaaaagtaccattcctcaagaattttgtatccaaggcccaaaagtttgttacccaag

SEQ ID NO: 272620 - DNA, 51 bp, Homo sapiens
accaattcctgatgatcaaaaggctgaaaggttccctgagtcgaggtgact

SEQ ID NO: 272621 - DNA, 100 bp, Homo sapiens
ctgctcagacaagaggtccaagacctacaggcttcacttaagaaagccaggaatctcaggatgaatcagtctagatcgagatcagatggtggcagtgaag

SEQ ID NO: 272622 - DNA, 99 bp, Homo sapiens
ggaagttgtagaagacattactcaagaggagagagttcttctcttacagtttgttacgggcagactttttaaaactgtggacttaaatgttctgcaaag

SEQ ID NO: 272623 - DNA, 100 bp, Homo sapiens
attagaggtcatccaaagcagccgtcccctctgcagcctctctgacaagtgaaattataaagagctctgatgggctatttgggtgatacccagtgcagtg

SEQ ID NO: 272624 - DNA, 75 bp, Homo sapiens
atacgtataagggcaagtccttagagatccagaaacccgctgatggacaatctaaaatatgtaaatcagttgaag

SEQ ID NO: 272625 - DNA, 75 bp, Homo sapiens
gcggagttaccccagacccctcagcgtctggcatctgcagcagtacctgtccaaagatcgctttagttccacctt

SEQ ID NO: 272626 - DNA, 100 bp, Homo sapiens
aacgaaaatgagcctcgcgaggccgacaagagccacccggagcaggctgacgtgatggcagacagggttccccgctgcccggtctgcaccggcgttgtga

SEQ ID NO: 272627 - DNA, 95 bp, Homo sapiens
ccagaatactctccagctagaacaagaagtgagaaaccaagatagattcatctcgacactgaaattacagtgtttgaagaacctgaagatcccag

SEQ ID NO: 272628 - DNA, 91 bp, Homo sapiens
tggctcctcccgctgccgctgccgctccaggagacaggtatcatgaactgatcactaaatatgggaagttggagcctttggcagaagtgga

SEQ ID NO: 272629 - DNA, 90 bp, Homo sapiens
tggccgagagccgcggctccgtgtttctggaaagtgacagcagagcactgcagcctgtggtgttgaggctcacagcgatgccatccagcc

SEQ ID NO: 272630 - DNA, 98 bp, Homo sapiens
tggagcccgaggtccccgcgcggcccgggcctggcgccctgaggggaagagcggcccggcccgaggaaacatgccctgaactgtcacagaatgaaacc

SEQ ID NO: 272631 - DNA, 75 bp, Homo sapiens
ggttgcagaaaatcctcactctgagtacggtctcacagacaacgttgaggcaagataacccctgtgacagaaggc

SEQ ID NO: 272632 - DNA, 100 bp, Homo sapiens
gccccggagtgagcggagtagcgagtcggcaacccggaggatgtacagttacccagcacgtgtacctcctcctcctcctattgctcgggctgtagtgccc

SEQ ID NO: 272633 - DNA, 75 bp, Homo sapiens
gaagaagatcaaagctgcctttgctgaattacacaactgttgcatccttaatgtccagtcaaggagtggtgacac

SEQ ID NO: 272634 - DNA, 103 bp, Homo sapiens
ccccgctccccgaaacgtgaccatgtggattcaacagcttttaggactcagggacgcccaccagccctccccacgatgatccccgcagccagcagcaccccgc

SEQ ID NO: 272635 - DNA, 75 bp, Homo sapiens
atatggaaacgactcctcggccgagctgagtgagaaaaagcttgtggtgaaggggggcaaaaaaaagaagcaagt

SEQ ID NO: 272636 - DNA, 110 bp, Homo sapiens
gccaagcacaaagagcttgctccctacgatgagaactggttctacacgcgagctgctgctggagccagttctgcttctcggcaaggagcgatttgctggtgtagacatcc

SEQ ID NO: 272637 - DNA, 75 bp, Homo sapiens
cggctctccgccgtccccagccctgcctctccctgggctctgaccatggttaatgattccagacctagtgtttct

SEQ ID NO: 272638 - DNA, 100 bp, Homo sapiens
acgaaaccagcatgttttccaaaaactttctgagagtcgtgaaacaaaggcactgttccaatacctacagtcaaccagtatttgtacttcttatttgctc

SEQ ID NO: 272639 - DNA, 83 bp, Homo sapiens
gaagatgatacaaatgaatttgttagtgctgtgtgctggagggcactaccagatggggaaataatgcaaaaggtgtcccaagg

SEQ ID NO: 272640 - DNA, 87 bp, Homo sapiens
cctatgtcaactgcttctcaggtagcaagtacatggggaggtatgatctcgtgaaatcttgagagaaactgaatgacgaatgaaact

SEQ ID NO: 272641 - DNA, 116 bp, Homo sapiens
catcaggtaggctgcgttgaggatctttgctcttccatccgcctttgatcgtcttcctcttcagccatccagttaaacacagtgggaatatcacttttgatgagattgtcaacatt

SEQ ID NO: 272642 - DNA, 83 bp, Homo sapiens
atctccttaacggacacgcagaagtattgttacaatcacatttgacgtaccaggaaatgcaaaggaagaacatcttaatatgt

SEQ ID NO: 272643 - DNA, 100 bp, Homo sapiens
ttccagcccctgcatattatgcccggcttgtagcatttagggcaaggtatcatctggtggataaagatcatgacaggtaatttcatctgtgccaaagcct

SEQ ID NO: 272644 - DNA, 74 bp, Homo sapiens
agctaggtgagcggctccggccaggaagatgagaatgtgcctactgctcctgatcctccaagtcaacatttacg

SEQ ID NO: 272645 - DNA, 98 bp, Homo sapiens
accacagttactttatcccttcatctgtggatgggcaggtgccttgtccacattttgcgagagacaacagtaaaatactccaaaatacgttcttttca

SEQ ID NO: 272646 - DNA, 83 bp, Homo sapiens
gctgtcgctgccgtggcaccccttctagaagagacctacagagttgaaacagtgaaacctggaaagattgtctggcaggaaga

SEQ ID NO: 272647 - DNA, 51 bp, Homo sapiens
tcggcagtcacctttccaggaatcaaggattacaaggcagaggaagaccca

SEQ ID NO: 272648 - DNA, 75 bp, Homo sapiens
ttgaagtcaacaagaataattccttccatatcaacatgaggacttccatagcttggccacctatttgtctcagaa

SEQ ID NO: 272649 - DNA, 74 bp, Homo sapiens
aaagatgatgataatgttttcagcagcaatttgccctcagaggacagtgtgatggtccttagcgcaacccatcg

SEQ ID NO: 272650 - DNA, 75 bp, Homo sapiens
cgaggtaggagtcgactcctgtgaggaccctgatgctcccataagacagaaaatgccccttgatgatctggatag

SEQ ID NO: 272651 - DNA, 88 bp, Homo sapiens
atgataaagaagaagtcaccgtttctacctggtatccatcatcccacgtggcaaaggactaggttatgctcagtatttaccaaaagaa

SEQ ID NO: 272652 - DNA, 80 bp, Homo sapiens
tcacaggctggatgaagattggggagtccgcatgtgtgaaagtggtggctgctgtgagcatgtgggatgtgtgcatggag

SEQ ID NO: 272653 - DNA, 98 bp, Homo sapiens
agccgcagagtgtgaccgcctcctcggacaaggcttttgaagactggctgaatgatgacctcggctcctatcaaggttcatggcctcccacgggaacg

SEQ ID NO: 272654 - DNA, 90 bp, Homo sapiens
taagacaccgggacctcctggaagccaaaaatggtatgatctcgtgaaaccttgagagaaactgaatgacgaatgaaactattgttcctg

SEQ ID NO: 272655 - DNA, 100 bp, Homo sapiens
gcttacagacgctgccagcatcgccgccgccagaatagcctaacatggcagaccagagacagcgctcactgtctacctctggggagtcattgtaccacgt

SEQ ID NO: 272656 - DNA, 74 bp, Homo sapiens
cttcagaacagagccaatggcttggaatgagatatttggcatgatcttcagtatgatcttgtgctgtgctatcc

SEQ ID NO: 272657 - DNA, 87 bp, Homo sapiens
ttctgtggtctgcccggccagctctcgcttctgcaagaccacgaacacagtgatctgcagagatgaaaaaacgcagatgatatacca

SEQ ID NO: 272658 - DNA, 88 bp, Homo sapiens
tcgccagaaggaagatggcggatctggaggagcagttgtctgatgaagagaagtctaggtgtttttggaagagctgcagcctttgaag

SEQ ID NO: 272659 - DNA, 52 bp, Homo sapiens
aaggaagaatattgggcttactgagaccactctggctcacatcatagccagc

SEQ ID NO: 272660 - DNA, 87 bp, Homo sapiens
cgactccattgccgaggagctgaacaagaagttggccaacaagatctatgggagtcgtcagattatactggagaaagaggaaacaga

SEQ ID NO: 272661 - DNA, 82 bp, Homo sapiens
ggaggtgcaggcgagggtgcagagcctggagagcatgccccggccccctgagcaggaggcatacacggaatacctgaggagc

SEQ ID NO: 272662 - DNA, 101 bp, Homo sapiens
cctgtgccacctgtgcttcaacaaaggacactacatcaaggactgcccccaggtgtcagaaactatttaaaagaagcactggtgaatataattgccgtgca

SEQ ID NO: 272663 - DNA, 82 bp, Homo sapiens
cggcgagcgcgagcggcgcgagaaaatacctgaaaaaagcggcagtctgcaacccagaagagggccttacttggaacctaac

SEQ ID NO: 272664 - DNA, 90 bp, Homo sapiens
gttcttggtgcccctgggcatcaccaacatagccatcgacttcggggagcaggggaagatggtgaaaggaatgggaggtgctatggattt

SEQ ID NO: 272665 - DNA, 101 bp, Homo sapiens
ggaggaagaagaagaagaagaaaaagtttctcaaccagagcgagtgatagacagccaagcagagaaactgaaggagcttgacaaggagatccggcccttcc

SEQ ID NO: 272666 - DNA, 82 bp, Homo sapiens
tagaatgcatcagtgcccttgtggcgaatggggctcacgtcgaactgaagttgctgaagatcctcaacaagtttcaactgtc

SEQ ID NO: 272667 - DNA, 75 bp, Homo sapiens
ataatggatgaaaggaaccgacagctgaagaaatcaggggagaaacccctgcttggtggaagcctgatggaatat

SEQ ID NO: 272668 - DNA, 100 bp, Homo sapiens
acaacatgtccagaaagaggccttatgaccagtacagcagtgaccgagaccaccggggacacagagattattatgacagcatgattccacctttccactg

SEQ ID NO: 272669 - DNA, 83 bp, Homo sapiens
ctccagcctcgctctccgccgcccgcaccgccgcccgcgccctcaccaggcccagctgagagccagcctggaggttacccagc

SEQ ID NO: 272670 - DNA, 83 bp, Homo sapiens
tctgttgagtactggtcggaacaagaggatcgtctgtagacagaaatgggacgtcggtcatcagatactgaagaagaaagcag

SEQ ID NO: 272671 - DNA, 97 bp, Homo sapiens
gcggcccccgcgccccgcgggacccggacggcgacgacgggggaatgtggcgctggatccggcagcagctgtgatgaatcaccaacaccagcagcag

SEQ ID NO: 272672 - DNA, 82 bp, Homo sapiens
tgtcccaaggaacacctgggcaacagaatattggtcaagttgctgaccttgaaggtgtggatgaatggaacatagctcgcct

SEQ ID NO: 272673 - DNA, 74 bp, Homo sapiens
caccattcttggtttataaatcaatcagttcaatcagggagtggacatccgccataacaaggaccgaaaggttc

SEQ ID NO: 272674 - DNA, 82 bp, Homo sapiens
actggagagagaccagacctgcaagctctttgacacacagcagttcttgtcagcaatggctgccatccggaagaaactggtg

SEQ ID NO: 272675 - DNA, 90 bp, Homo sapiens
gcccccagcgcagcggccgcgacatgtcatgctgcccaaggacatagccaagctggtccctaaaacccatctgatgtctgaatctgaatg

SEQ ID NO: 272676 - DNA, 78 bp, Homo sapiens
gacgcgcccggcccggagcccccagcgcagcggccgcggattggtagcttatgtcgatcttgatgaaagagcaattga

SEQ ID NO: 272677 - DNA, 75 bp, Homo sapiens
ctattacatcagagacagtggcaacaattcagctgaaggaagaggatcaccttccaagacaaaacagtcttcatg

SEQ ID NO: 272678 - DNA, 98 bp, Homo sapiens
aacaacctcttgaggatcgaatcttcactcccgctgtctcagcagtctacagcacgttgtcgagatgtccacagaaggaggatttggtggtactagca

SEQ ID NO: 272679 - DNA, 51 bp, Homo sapiens
tccgcccacagacctcaaattcaaagcatttatgacattaacagagaacag

SEQ ID NO: 272680 - DNA, 73 bp, Homo sapiens
gagaaatgaacagctgaccctacatgatgagaggtttgagaaggggaaggagttcgagacacgactgaaggag

SEQ ID NO: 272681 - DNA, 87 bp, Homo sapiens
aacgactgcccgggctgcgggaggggaggagagcagagaacgtccccaggcatagagaaggagacgtgccagaagatggaagaagac

SEQ ID NO: 272682 - DNA, 83 bp, Homo sapiens
acgtgtcatttctaagtactttctcctactccataaagacttcaagatcacctgctgttaccagctaccacccataacaagac

SEQ ID NO: 272683 - DNA, 100 bp, Homo sapiens
agactctgggactcttggtgccaacagagttactctagtcgtgccccaatttctgcaaaacttgtggccaatatgctgtcggtggctggggcggatcaca

SEQ ID NO: 272684 - DNA, 82 bp, Homo sapiens
tcggatagtgggctctgtagaattcgacagtatgtgcacagccagaggacaacacatcacacacaagaaacagttgtgctca

SEQ ID NO: 272685 - DNA, 100 bp, Homo sapiens
gctgaggtctgagtcacccaatctactggaacatagcacccaatagatgttttctggcaaaggccttcctgcatttatgaattctctctcaagaagcaag

SEQ ID NO: 272686 - DNA, 83 bp, Homo sapiens
cgcaccgcccggactcaccatggtcaaaatgcagatcttcgtgaaaacccttaccggcaagaccatcacccttgaggtggagc

SEQ ID NO: 272687 - DNA, 50 bp, Homo sapiens
ccgctttgacgtgatggtgaacggcaagatgaaggatttgggggcagagc

SEQ ID NO: 272688 - DNA, 100 bp, Homo sapiens
tgacgccatgtcgggttattcgagtgaccgagaccgcggccgggaccgaggctactctcggaaccgcacgtttgacacgtacattgggcagggctacgtg

SEQ ID NO: 272689 - DNA, 75 bp, Homo sapiens
cactccagccacagggtccccaactaccggcggctggagacgcagagaggtgctgttgtcaagaccaatgccaat

SEQ ID NO: 272690 - DNA, 100 bp, Homo sapiens
cgcgcccgctccggccggccctgcgcctcccgccgcgcccgggatgtattcgtccccgctctgcctcacccaggcaatagccctctggaacaagacaatt

SEQ ID NO: 272691 - DNA, 75 bp, Homo sapiens
cgcctccccgcgccgctcgcgcagccatgtccgaggagaagcccaaggcgtccgacctccgatcatgaacgggcc

SEQ ID NO: 272692 - DNA, 76 bp, Homo sapiens
cgctgcagaaccagatccgggagcacgtcatctccatcgaggccctggcaggtgcccggcccgccccccaccctcc

SEQ ID NO: 272693 - DNA, 82 bp, Homo sapiens
agtggatggcgtggagatatggcgcaactgcggcgcatatctcttccaaatgcatgatgaaggagttctcgtcaacagcaca

SEQ ID NO: 272694 - DNA, 100 bp, Homo sapiens
acatggatcctactggtaaaactaggtcggatcatgctaaaaggagataatattactctgctacaaagtgtctccaactagaaatgatcaatgaagtgag

SEQ ID NO: 272695 - DNA, 75 bp, Homo sapiens
tgagttgaaactcttggaggaagcaaccatttcagtctgcaggtcattaggtaggatccatgccaaaagagcttc

SEQ ID NO: 272696 - DNA, 74 bp, Homo sapiens
ccgcccccacctgcacacgtgtatgctgcatccagtactcaggacgaggagcggaggcggcagcagcagttaga

SEQ ID NO: 272697 - DNA, 90 bp, Homo sapiens
atttcttcgaggtggagtcggagctgggacgatggaatcttgctctcttgctcagactggagtgcagtggcatgaccttggctcactgca

SEQ ID NO: 272698 - DNA, 76 bp, Homo sapiens
aacgggagtgtcctggacccagctgagcgggcggtcattcgcatcgcagactcggtgaaatacctggagtgctcag

SEQ ID NO: 272699 - DNA, 98 bp, Homo sapiens
ccttgctgcagccctacctgttccaccagtctgaccagtgcacaggacttcagggcttcctggtgttccacagctttggtgggggcactggctctggc

SEQ ID NO: 272700 - DNA, 80 bp, Homo sapiens
ttggaacaaaaggtgacccaggacctcctggtgctgaaggacctccagggctaccaagatagaatctcactatgttgacc

SEQ ID NO: 272701 - DNA, 100 bp, Homo sapiens
ctgccacctcagatatttaatggcgaccgatactgtggagttcaaaccttgtactactcagctgatcacaagctgcttgatgggaacctactagatggac

SEQ ID NO: 272702 - DNA, 85 bp, Homo sapiens
ccggcagctgtggccaacagcaacagagagagtccagggcgtgatggtgggcatgggtcagaaggattcctatgtgggcgacgag

SEQ ID NO: 272703 - DNA, 100 bp, Homo sapiens
acagccgggtcctgaacgctgtgaaatactgattcttgctattccaaatcctcttccacgttgacagcccttcagatatttcaacactcctctcagcatc

SEQ ID NO: 272704 - DNA, 75 bp, Homo sapiens
gagactcctgaccctcagaatgtgattcgcctttgccagtctcatctcgtgtctgctttgttaagttccatgatc

SEQ ID NO: 272705 - DNA, 74 bp, Homo sapiens
gggagcttctcagccattttccacagatcagtgtgtgttttaatagaaaagttgtcactttccaaaatgccctt

SEQ ID NO: 272706 - DNA, 90 bp, Homo sapiens
agctgagggagcaagaggtgtcggaggtctcatctttgaactactgccggagcttctgccagaataagctttccgatttgttggcaccca

SEQ ID NO: 272707 - DNA, 101 bp, Homo sapiens
cgatgggaaacccggagaccaaatccttgggaacaagggaaactctcagtcgtcactgtactacccttggtgatgctctccggaaagagaatgattttgct

SEQ ID NO: 272708 - DNA, 83 bp, Homo sapiens
cgcaggtgcaggtgtctcttctcgccctggcggggaagggtttccaggcctgaggtgcccgccctggccccaggagaatgaac

SEQ ID NO: 272709 - DNA, 75 bp, Homo sapiens
ccgcactgtcgctgcccgcctgccctgaggagtccccgctgcttgataacgaaggaggcccaacttcattcaata

SEQ ID NO: 272710 - DNA, 82 bp, Homo sapiens
cccgctctgctgtgggcgctgctggcgctctggctgtgctgcgcgacccccgcgcatggcatgtcgggccccaggcctgtgg

SEQ ID NO: 272711 - DNA, 90 bp, Homo sapiens
ctcaaaatgaagatggcacatggcccaggcagaccttgcagtcaaagtacaagaatattccacagatgtcctttgatgatacagaaaggg

SEQ ID NO: 272712 - DNA, 82 bp, Homo sapiens
gctaaagcagcgtgcgttcagccctggggccccctcagaccgtgccatgggtgacagtgatgacgagtacgatcgaaggcgc

SEQ ID NO: 272713 - DNA, 74 bp, Homo sapiens
aacttcaacagaatgtggcaaccagctgagcgggctttggacaccatgaactttgatgtgattaagggaaagcc

SEQ ID NO: 272714 - DNA, 98 bp, Homo sapiens
gaaaacaagtccaaggatgaatcccagtccctgttacggactcagtttctgattcaggagtgtgcgttgctgattacaaagccaaattttatctcgac

SEQ ID NO: 272715 - DNA, 100 bp, Homo sapiens
tgcaggtattgggagatgcacagctaagatgccaggaccacctggaagcctagaaatggtgtgactgcacagaaaagttacaaaacaaatttgacttttt

SEQ ID NO: 272716 - DNA, 115 bp, Homo sapiens
ctcagagaagatatgagagggaaggaacttgaagtcaagaaccttctggagaaaggcaagactgaacagcaggtgatctgtgaaaatggttcgctattcacttgacccggagaac

SEQ ID NO: 272717 - DNA, 100 bp, Homo sapiens
ctggcagggaatggcgcaccgtttgaggagagcctggccccactccaggagaggtttgatgaaatcctggaggccagtgatgggatcatggtggctcgtg

SEQ ID NO: 272718 - DNA, 50 bp, Homo sapiens
cccgcctgaaggcagtcaaatcaggttggtgaaaaccctgtgtccttgga

SEQ ID NO: 272719 - DNA, 99 bp, Homo sapiens
gcaaagccagcgtgaccatcgttgggtatctacagccattggttgctgttcaggtcagctttgctcctaacaacactgggaaagaagtaacagttgagt

SEQ ID NO: 272720 - DNA, 96 bp, Homo sapiens
cttccaacagtgacgtgttctccaaataccagctcgacaaagatggggttgtcctctttaagaagggaaatgtttcaacgtgcgcaagcgttgcgg

SEQ ID NO: 272721 - DNA, 100 bp, Homo sapiens
ggagcagatttacaaactggccaagaagggccttactccttcacagatcgggtacagccaaagaccggagctttggagagatgaagtttaaacagtgtcc

SEQ ID NO: 272722 - DNA, 100 bp, Homo sapiens
acagggcattcagggagactggaataactgatgaggaacaagccattagcagtgcaaggaaggtggcttccctcaggaactctggttgggtgtcagcgcg

SEQ ID NO: 272723 - DNA, 98 bp, Homo sapiens
aggactgaaccaagacttacccgaagttgccgcggggccttccgatcccctgttcgatacaagaggctgttttcctagcgtggcttgctgcctttggt

SEQ ID NO: 272724 - DNA, 100 bp, Homo sapiens
gcccaacggtcggtgtccccggctgaggcagcgcggccgcagcagccctgttatgaagacagtatggagtttccagaccatagtagacatttgctacagt

SEQ ID NO: 272725 - DNA, 100 bp, Homo sapiens
tcatggacagtctggcaaaagcctctgctctgcctccggggacaagaaactagagcaaataaccgttttgaaattgtagtggaggacatgctagaggacg

SEQ ID NO: 272726 - DNA, 99 bp, Homo sapiens
ggacaagtgctctcgacaggacaccgtcttcatgaagaaggtttgggtacccagaccccacctacctgacccgggtgcaagaggagctgagagcgaagg

SEQ ID NO: 272727 - DNA, 100 bp, Homo sapiens
tggatttagcccaaaggcagaatgggtggttgcccatctctgctatgaacaaggacttgcaggagatcaagaaggaactttcaaagactggtgaagaaaa

SEQ ID NO: 272728 - DNA, 82 bp, Homo sapiens
cagaaactagcaccagccccaaatttcggtacgctagctgggattttgattggtctggctcagttaaactgctctgaactaa

SEQ ID NO: 272729 - DNA, 100 bp, Homo sapiens
tgtgcagacagacaatcatcccaaaacgtcccgggttcacctaatagtgcaagagactctccaacatgtgccttctgaccatacaaatgaaacttccaac

SEQ ID NO: 272730 - DNA, 74 bp, Homo sapiens
tgaatggatcacagcgtcgcagatgtctttgcatttcagaagccagatcaaggcattgtaatacctctgcagta

SEQ ID NO: 272731 - DNA, 100 bp, Homo sapiens
ggaggtcgataagctggaactgatggtgacctcaaagcagaagctctgaattcacctctcatctgacgactgacagctgctgccaccgccagcctctgtc

SEQ ID NO: 272732 - DNA, 90 bp, Homo sapiens
cttttccctctccctttccctaaggttgtatcagagtaagatggacggtagctttgattgtgattgtggtgagctggagccacctgatca

SEQ ID NO: 272733 - DNA, 82 bp, Homo sapiens
cgcagagggctttcttcgccgtgctggccgcggcccgcctcagcatctggtacagccgagtttctggcatttgaagtcaaag

SEQ ID NO: 272734 - DNA, 80 bp, Homo sapiens
ggacttgagtccttgaacgtctctgtggctgcaggtcagcccaaggccaaccccactgtcactctgttcccgccctcctc

SEQ ID NO: 272735 - DNA, 99 bp, Homo sapiens
accgtgacatccgaggtgcctttctccaaaaggactcatctgatgatgtgagaagagttcagaggagggagaaaaatcgtattgccgcccagaagagcc

SEQ ID NO: 272736 - DNA, 74 bp, Homo sapiens
tggctgtgctcatatacacctggtggaatttaggcaaaacttacaatattgttctgggatctgggcaagttgtg

SEQ ID NO: 272737 - DNA, 88 bp, Homo sapiens
cagagtggagtatctggtgaaatggagaggctggtcgcccaagctcttgtcaggatggtgaagctgttcatcggaaacctgccccggg

SEQ ID NO: 272738 - DNA, 87 bp, Homo sapiens
gcaccctcaacggcgagatcagcgccctgacggccgaggaaggagtcaagactgagaacaacgatcatattaatttgaaggtggcgg

SEQ ID NO: 272739 - DNA, 100 bp, Homo sapiens
gcggccggcggcgcgggcccggcggcggcggcagcggggtccgggtccggagcgccacaggtcagtttgaaaaggaggatcgagctcactgtggagtatc

SEQ ID NO: 272740 - DNA, 97 bp, Homo sapiens
tggattatgcaaagaaaaatgaacccaaacatagacttgcaagaactatgaaatccctggagaatttttggtgacatgcactgagccaaggtgatgg

SEQ ID NO: 272741 - DNA, 90 bp, Homo sapiens
ctctgtggagtatctgcccaaggtcaccgggctacacaaaacttcacagagaatgcagttgtcttgacttcaggtctgtctgttctgttg

SEQ ID NO: 272742 - DNA, 75 bp, Homo sapiens
aagaagtcctttcaagtctctaggactggactcttcctaagcaagtccgcacacagcaagaaggaggccatcagc

SEQ ID NO: 272743 - DNA, 90 bp, Homo sapiens
ctggagcacaaaagagtctccgcggtggaggtctgcgttgctcttgcttttcctcgctggggtgtacgtgagtgatggattggaactgag

SEQ ID NO: 272744 - DNA, 50 bp, Homo sapiens
aagaaacaaatcttgaagcacctctccagcaggaggatgcattagcacaa

SEQ ID NO: 272745 - DNA, 75 bp, Homo sapiens
aagacagcaacctgctcctggaggacgtcacctggaagtacacagggatttcagtcataatcggttgtctaactg

SEQ ID NO: 272746 - DNA, 100 bp, Homo sapiens
ggacagacaattgttcagttgcaaaaagaaactggagccaccatcaagctgtctaagtccaaagatttttacccagagccccccaagatgaacccagtgg

SEQ ID NO: 272747 - DNA, 100 bp, Homo sapiens
atgcctacgtgggaagggacctcgaatgtgggaccccagcccctctccagctcgaaatcgtacaccaggggttggaaaaaccacactaggcaaagaactt

SEQ ID NO: 272748 - DNA, 50 bp, Homo sapiens
cagccatgttacctcccttaaagtcgggatcatagacggtatttctatgt

SEQ ID NO: 272749 - DNA, 74 bp, Homo sapiens
agtatgttatgaaaatgttttgaagcaagtaaaggctggacaccaggttggtgaaagatgctccttgggatgag

SEQ ID NO: 272750 - DNA, 98 bp, Homo sapiens
tgccttccgcgcacctcagtggtacctgcacctgtctggcctgggcgccagcgcggctgcaggccaaggtcccggatgttacaggtcagagccctcca

SEQ ID NO: 272751 - DNA, 83 bp, Homo sapiens
tgaagcttctgaaccatccacacatcataaagctttaccagggatgccaagtccccacttaaaagtggaccagacagcagtgc

SEQ ID NO: 272752 - DNA, 75 bp, Homo sapiens
ccgagagtcaccacaaggccaagggcaagtgatttgacagagcagcccgacggccatggaggctgaagagacgat

SEQ ID NO: 272753 - DNA, 83 bp, Homo sapiens
attctacaacacatggtggaatgtatccgggaggtcaacgaggtcatccaggggcactatggcagacaaagttaggaggcaga

SEQ ID NO: 272754 - DNA, 100 bp, Homo sapiens
ctggatgggatcatttcggacttcgaaggtaacctgtctggtcagagtgcagcttcagtcttgcacccccagcagaccctccaccctcctggcaacatcc

SEQ ID NO: 272755 - DNA, 50 bp, Homo sapiens
atcgtgtggcattttatgggcaggatacctgcccactatgtctatccgca

SEQ ID NO: 272756 - DNA, 104 bp, Homo sapiens
acatgggcaaccacctgccgctcctgcctggatgatgatgctgaagctatccttgctgcagacttcgaaattggtcactttttacgtgagcgtataatcccaag

SEQ ID NO: 272757 - DNA, 74 bp, Homo sapiens
ggcagacagcggcatacagaatgcctatgaccggcgtcgagaatttcaactggactttctaaatgggtacggca

SEQ ID NO: 272758 - DNA, 83 bp, Homo sapiens
cgccagcgacgtgcgcctcgggagtcggcctgtgagagtgaagacatttccacctggacacctgaccatgtgcctgccctgag

SEQ ID NO: 272759 - DNA, 100 bp, Homo sapiens
atgggctcctgctccggccgctgcgcgctcgtcgtcctctgcgcttttcagctgaaccgcatgcacgagtctctcatgctcttcgactccatctgtaaca

SEQ ID NO: 272760 - DNA, 100 bp, Homo sapiens
cggagcctcccctgcagcgactcggaagattcgaggcggcgggggacaagtcggcgccccagagcggacgagtagccggatcgagctgggagatgtgaca

SEQ ID NO: 272761 - DNA, 100 bp, Homo sapiens
atgactagcggcccgggtgggccggcggcggccgcgggcggcaggaaggagaaccaccagatatcagttttagagaatgtggcgtggagaaattctcaag

SEQ ID NO: 272762 - DNA, 100 bp, Homo sapiens
aggtccatgattgagacacggggggaaaagcccaaggaaaaagcaaagaatagcaaaaaaaagggggccaagaaggaagaccctgactaaagcttgaaat

SEQ ID NO: 272763 - DNA, 100 bp, Homo sapiens
cctgggaaccgaataggtgtttccttcattgatgatggaagtaatgcaacagaaaactagaagctgatagtcttgaagttaaagcaagcaaggagcaggc

SEQ ID NO: 272764 - DNA, 100 bp, Homo sapiens
atacttgctgcaaatgctcgtgctacctgccctggccctgctcagcgccagcggcactggctccgccgcccaagataatctcagtgataccttgaagaag

SEQ ID NO: 272765 - DNA, 98 bp, Homo sapiens
ggtgggtgtgacacagaattttgcagcaacagttctcagaaacaccaagggcaacgtcagaatgtgaaagatgttgcagaagtgttccagaagtggct

SEQ ID NO: 272766 - DNA, 90 bp, Homo sapiens
cgctcttccttctgctcctgatcctcgcctgccccgagccgcgggcttcccaggttgctgaaaagccaggagtcaaaatgactgagcgct

SEQ ID NO: 272767 - DNA, 49 bp, Homo sapiens
ccagtacacagacgagcatggggaaggacacaactcagatgggaagttc

SEQ ID NO: 272768 - DNA, 101 bp, Homo sapiens
tccatctaaagcaccagtaaaatatggtgaactcattgtcttaggacagcccacctgaggatattgaccataaggactcatatctcattacaagaagcatc

SEQ ID NO: 272769 - DNA, 99 bp, Homo sapiens
gtccaggccgtggtcagccgcttcgacgagcagttcgcctctacggaccaaacttcatccttcaggtgtactcatctcagaggaagtcctggcaccctg

SEQ ID NO: 272770 - DNA, 75 bp, Homo sapiens
ccggacgccacgtgcagaccggaagagacacgcggggcttcagggtctcttgcaacgtgtgagctgcctcttgcc

SEQ ID NO: 272771 - DNA, 100 bp, Homo sapiens
aaccgttgattggagatatgcccttagttggagctttgtctatcttcttccttaggaaaccacagggaggagagagcgatggcttttttcacccagaagg

SEQ ID NO: 272772 - DNA, 83 bp, Homo sapiens
tgcaaatttacatacgagaatggcttgtgaaatcatgcctctgcaaagataacgaaggaggcccaacttcattcaataaggag

SEQ ID NO: 272773 - DNA, 100 bp, Homo sapiens
aatgtcagatgatatcaggaaaaggtttgaatttccaaattctcttatccaatcacaggaaagaccacagcaagattctttcattcgtctcctcctagcc

SEQ ID NO: 272774 - DNA, 75 bp, Homo sapiens
aacatcacagtcacatacagagatggccgagtggcacagctggagcagagacagggttttgccgtgttgcccaag

SEQ ID NO: 272775 - DNA, 83 bp, Homo sapiens
cttcggcagtccacccaccgccgccgcctcccaggacctgaaggagaagaaggagaaggtggaggagaaggcaagccggaaag

SEQ ID NO: 272776 - DNA, 136 bp, Homo sapiens
tcagaaggcctcatctccacttgccaggagccccgacaccacccttggagacacggcttgttccagccagtcggatgatgattctgggtcagcttcaggctctggatctggttcgagttctggaagcagtagtgat

SEQ ID NO: 272777 - DNA, 50 bp, Homo sapiens
caacactctatacaccgtcagaaatcaggaaacccaggcccaacggcagg

SEQ ID NO: 272778 - DNA, 51 bp, Homo sapiens
tttcaagacaccaagtgagaggccaaccagagaccatcatgcagacatcag

SEQ ID NO: 272779 - DNA, 119 bp, Homo sapiens
gtcgtcatgaccaaggaggaggtgacagagctgctggcccgatacacggatgataccatcggggaccttaagaagctgattgcagcccaaactggtacccgttggaacaagattgtcct

SEQ ID NO: 272780 - DNA, 88 bp, Homo sapiens
gcagcccaagaagatcgtggcccctacggtgtcccaaatcaatgcggagttcgtgacccagatgtgaggtagaaaatcgataccaagg

SEQ ID NO: 272781 - DNA, 100 bp, Homo sapiens
ggaggctctggatggaagccatggatggccgggaacctaccatcattgaatgtctaaaatatatttgtactggagatttccctcctggaaccaaaggaaa

SEQ ID NO: 272782 - DNA, 103 bp, Homo sapiens
gccacttttgattgcaaagtgctatcaaggaaccacgctctcgtctggtttgatcacaagacgggcaagttggggaatggcggtcaatgtgtattctacctcg

SEQ ID NO: 272783 - DNA, 98 bp, Homo sapiens
ctggacacagcaatatctctgggctttcacaggtcccgttcaagaagttcttccagttcgcagtcaagatctcgttccagttccagagaacgttcgag

SEQ ID NO: 272784 - DNA, 104 bp, Homo sapiens
gccttagcagcaaaagactttgttaacctcagatgaacaagagaactgggcaacccatgatccacatctacctggacaaggaaacaggaaagcccaaaggcgat

SEQ ID NO: 272785 - DNA, 48 bp, Homo sapiens
gaagatggaagattactggcttctaattgtcaacatcacactgctggt

SEQ ID NO: 272786 - DNA, 100 bp, Homo sapiens
cgaagatggcagctgctgaggaggagccgaagcccaaaaagctgaaggtggaggcgccgcaagcgctgagtgtctgaaaaaagcagtgagactcgacagt

SEQ ID NO: 272787 - DNA, 97 bp, Homo sapiens
ggcctcacagactcagagcgtgaaaatgaatggaagtggctggatgggacatctccagactacaaggagctggacagccttgttcagtcctcacaat

SEQ ID NO: 272788 - DNA, 100 bp, Homo sapiens
gactatgagctcaagctcatccaccacgacagcaagccgcagggccgtaggcagccatggcgcccagccggaatggcatggtcttgaagccccacttcca

SEQ ID NO: 272789 - DNA, 100 bp, Homo sapiens
cagcgaattgtaatggaaagcatatggacaggtctacgccacatcacttaggaacaggagtacagctgtgtagtaaagatgccttctggtgaatttgcac

SEQ ID NO: 272790 - DNA, 90 bp, Homo sapiens
ttgcggaaaggatgttggcggtccctgtgacctgtggagacacggccagatctgccctccaggtgtcaaattgagaaccaggtagatccc

SEQ ID NO: 272791 - DNA, 101 bp, Homo sapiens
agagacaaggtggtgggaaaggattaccttttgtgtgactacaacagagatggggactcctataggtaccttctcaaaccagatttcatgaggcggcctga

SEQ ID NO: 272792 - DNA, 100 bp, Homo sapiens
gctgtggtgtctccttccgcagacgggctatgtgcacccagatgagttcttccagtcccctgaggtgatggcaggagtgtacaccttaaacaatgagaag

SEQ ID NO: 272793 - DNA, 58 bp, Homo sapiens
ctctttgaaggatattttggaaccatcctctacacagcggacaaacataaattgcaga

SEQ ID NO: 272794 - DNA, 83 bp, Homo sapiens
atttcgtggttcacccgctgccgggcaccgaggaccagctcaatgacaggctggcagtgatggtgaaagcataggaaactgcc

SEQ ID NO: 272795 - DNA, 100 bp, Homo sapiens
cttcaacacggtgggcgccgacatcatccagctgcctcaaatcgtcgtagtgggaacgcagattcagaatggacagtttagaagaacctcagaaaaaagt

SEQ ID NO: 272796 - DNA, 89 bp, Homo sapiens
tggtcagatagcgagtttgaatggcagattctacgggaaaatgtgggccccctccacctattgacaatggggacattacttcattcccg

SEQ ID NO: 272797 - DNA, 100 bp, Homo sapiens
tctcggtgaacgttcagctgctgcaggaccacggggaaattgccaagaaatccagggcctgaaaacccagaatgaacttgtgtccatcccagagatcact

SEQ ID NO: 272798 - DNA, 75 bp, Homo sapiens
cacgtgtaccagtgtgtgttgatcttggcttgattcagtctgccttgtaacaggccctggccaacgtcaacattg

SEQ ID NO: 272799 - DNA, 98 bp, Homo sapiens
gtggaacattataagaagaatcctatggtggaaacattgggtacagtactacaactcaagcagcctctacggcagacacatgcaggccaacccagaac

SEQ ID NO: 272800 - DNA, 88 bp, Homo sapiens
cagggacagatgcgccggatggatcctgtgctttccgagcccgtctatgacaagatgatcaacaaatacaagcgcagacgatttcaga

SEQ ID NO: 272801 - DNA, 75 bp, Homo sapiens
ctagatcatcaattgaaaatgcatgatttgaacactgatcaagtcagggactatgcggcgcaaacatctccttcg

SEQ ID NO: 272802 - DNA, 75 bp, Homo sapiens
ccctgaggagatccgttggctcctggaaggtgcctatggttcatgcttgaagttttaatgacaaagaatgaaaac

SEQ ID NO: 272803 - DNA, 82 bp, Homo sapiens
aagcgcggggaaccaaggagacgctcctggcactgcaggcatggaagaggagatggttcgtgttacgcagtggccgtttaac

SEQ ID NO: 272804 - DNA, 75 bp, Homo sapiens
gctgtggagcccgaggagatgctggatgttaaaatggaggacatcaagatggagtttgacgagaaggacttacga

SEQ ID NO: 272805 - DNA, 75 bp, Homo sapiens
gaccagctcacggggctggactcggagaagatcttcattcacaaacttccgctgtacctgcgtctaaaaaggccc

SEQ ID NO: 272806 - DNA, 87 bp, Homo sapiens
ggattatagcctgcacaaggagaggaccggcagcaatcgatttgccaaggacacattcagctaacgtattttagcaggtggagtgag

SEQ ID NO: 272807 - DNA, 100 bp, Homo sapiens
aagtactccgtcatgatcaacaaggccacgccctacaactacccagcccttcttcgattcaaccaagccatcctggtatcccggcatgacccggcttctc

SEQ ID NO: 272808 - DNA, 75 bp, Homo sapiens
caagctgtttcctaccaggtcacacactgttgcagcgcaggcctgctgggaacgggacttctaaaaggaactatg

SEQ ID NO: 272809 - DNA, 100 bp, Homo sapiens
gccaaaccattactgatgatgtggaggttaacagctatctttctgttatcaatactctggctgaccatcatcatcgtgggactgactttggtggaagtcc

SEQ ID NO: 272810 - DNA, 82 bp, Homo sapiens
ccgcgtttcagccctagggaagctggagaatgctggaggagaccttaaggatggccaccaccactatgaaggagctgttgtc

SEQ ID NO: 272811 - DNA, 100 bp, Homo sapiens
gggcgatgagagcgaggagttcctgcagcaaactgaaaccgtgtcagttcagtcttcggtattggggaagggtgtaaaacatcgacccccaccaatcaaa

SEQ ID NO: 272812 - DNA, 82 bp, Homo sapiens
gctgtcttcaatgctgttaactggattgagtccagctcttgggatggtgtctgctttttcaacgtgggagaaggagttgcac

SEQ ID NO: 272813 - DNA, 73 bp, Homo sapiens
gacgcggtgcgcaaatccctgcaaggggtggcagggagtcgtcgcatggtggatgtcatggacgtgaacacac

SEQ ID NO: 272814 - DNA, 100 bp, Homo sapiens
aggatggcgtgcgaggtcgccgcggggctggccgccatgcacaagctgcacttcctgcacagaaataagcgggttttgaaaacaaaaaaaagaaggagtg

SEQ ID NO: 272815 - DNA, 80 bp, Homo sapiens
ctccggctggaggccggactcaaccgcgtaaaaattggccatctgcaagcttcccttctccgtggagagcaggaagacag

SEQ ID NO: 272816 - DNA, 100 bp, Homo sapiens
cagctttgagcagagccctgcctaaggtccagggctcgatctggccctaaccacagagtcaccttgaggttccagcaacagatagaaatgctttaagttc

SEQ ID NO: 272817 - DNA, 100 bp, Homo sapiens
gatcctgtgcctgttccgcccgcagtctggccgcgccgtggagcaactgcgtgtgcacgtcagacggcacaagggggtgaggaagtttgagtgcaccgag

SEQ ID NO: 272818 - DNA, 50 bp, Homo sapiens
acttggagtccggacatctgaaacttgggtttccctagccagcagagctt

SEQ ID NO: 272819 - DNA, 124 bp, Homo sapiens
cagaaggatatcgacgtcgtgatccagaagtccagagctgaggactgcctgtttgcaggtgtccctggccagtgtccttccacctgtccacaagcatggggaacatcttcgccaacctcttcaa

SEQ ID NO: 272820 - DNA, 75 bp, Homo sapiens
catatgttggtttgtagccaaaaacttgctggaaaccctgaaaggtatctctcctctttgtcacaacctctttgc

SEQ ID NO: 272821 - DNA, 75 bp, Homo sapiens
gatcgagtgcgacgcctgcaaggactggttccacggcaggtccgggcccaccagctggtcttgccaccttgcgac

SEQ ID NO: 272822 - DNA, 83 bp, Homo sapiens
ccgacttcttgtatgcatactccacagcacctggatttcagatgcatgccaggtttccactgattgccagaactcgagatcac

SEQ ID NO: 272823 - DNA, 82 bp, Homo sapiens
cttggagccaggcgccggggtctgaggtcgcaatggaagaagagatcgccgcgctggtcattgacaatggctccggcatgtg

SEQ ID NO: 272824 - DNA, 100 bp, Homo sapiens
ctcacggtcaacgagcggggcaaccactgcgagtactgcttcaccagatatcagtattacctgcaagtcaaaaaagatgtgcttgaagggcgattacgat

SEQ ID NO: 272825 - DNA, 75 bp, Homo sapiens
aaagttttttcagccagtataagaaacccatctgtcaggttcatccacataaaacttatttcacagtagctgaaa

SEQ ID NO: 272826 - DNA, 83 bp, Homo sapiens
gaaaaacctaaaggataccttagttccagtgtctcgccccatcctcaccctcagggttcccagggcccaggctgtggtggggg

SEQ ID NO: 272827 - DNA, 100 bp, Homo sapiens
ctggggcccgccgccccgcgggggagggcggagctggcgcggcccctagctttctccttctggtgtggggcccgagggcatgctgttgaagcgaagtggc

SEQ ID NO: 272828 - DNA, 50 bp, Homo sapiens
cgaccgtccgccagtcgtcccgagacccgaacactgtttcagttccttcc

SEQ ID NO: 272829 - DNA, 100 bp, Homo sapiens
gccttatgtgggagagcagaggtcaaacctgaaagaccccagttatggatgggagatgatagtatttctgctgcaagtacttctgatgttcaagatcgcc

SEQ ID NO: 272830 - DNA, 100 bp, Homo sapiens
actgcgacgccaaatacgtctgggcagccacggccgggggcgtctttcagagcattacggggctggtgagtctgggaaaagcactatcgtcaaacagatg

SEQ ID NO: 272831 - DNA, 90 bp, Homo sapiens
gcaccacagcccatccccagaagatcctggtcccctgctttaaccatcgaaaatgagacctggaatcatttttctgataatgaggcagag

SEQ ID NO: 272832 - DNA, 98 bp, Homo sapiens
tgcgcgtggcgttgcagaagctttccggcacaggtgctggagaatctggtaaaagcaccattgtgaagcagatgaggatcctgcatgttaatgggttt

SEQ ID NO: 272833 - DNA, 82 bp, Homo sapiens
agtacagtggtgccttaaaaatggagtcagcctcactcctcccaaaggaacatcatcttcagcgggctatttcagcacagca

SEQ ID NO: 272834 - DNA, 83 bp, Homo sapiens
tttgaaactagacagctttatttcacatgtacagcatttggcgcctcaaggtacaaatcaagacctaccagctcctacattcc

SEQ ID NO: 272835 - DNA, 110 bp, Homo sapiens
cgagcacagagcctcgcctttgccgatccgccgcccgtccacacccgccgccaggagccttcacgtaaatgggtccagtcatgcctcccagtaagaagccagaaagctca

SEQ ID NO: 272836 - DNA, 75 bp, Homo sapiens
cagaagtggagaccagcagaactccaccaggtactatcgtggtgcagtgggggccctcctggtgtttgacctaac

SEQ ID NO: 272837 - DNA, 100 bp, Homo sapiens
attggagaaacatgcagattatatcgcatcctatggctcaaagaaagatgattatggaagacaaaggcgctttggctaagctggtggaagctatcaggac

SEQ ID NO: 272838 - DNA, 98 bp, Homo sapiens
ggagtctggcttggcatcctcttgggcatattctctgctcaggctcaaatgaccatactagcgttctcccggggaagtacttggaagagatcgccaca

SEQ ID NO: 272839 - DNA, 74 bp, Homo sapiens
ctgggtaatgaggatttgactgtgaagcgttttaccaacgaggatcatttggctgtccataaacataaacatga

SEQ ID NO: 272840 - DNA, 90 bp, Homo sapiens
cgcttatcttcaggagcgaagagctgcttctgtatcttaagcaagagtgagccatggagctacgtgtggggaacaagtaccgcctgggac

SEQ ID NO: 272841 - DNA, 98 bp, Homo sapiens
gtctggagtttcttccttctggtgagttcgtggtcttgctgacttcaggagtgcagctgcagaccttcacataactggtgcccctacccaatgtccaa

SEQ ID NO: 272842 - DNA, 51 bp, Homo sapiens
gccaaaagatgaagacattctccaagtgcgctgctgggacatcgccttggg

SEQ ID NO: 272843 - DNA, 82 bp, Homo sapiens
aggcaggtcgctgcctgtgccccagctggtgaactgaagcagattacctggctcagtgtcacagggctgctgatggtggtct

SEQ ID NO: 272844 - DNA, 76 bp, Homo sapiens
atctgttttcctaaaagactgaaatgggggcgaccattcttagactaaggaatttattgatgggagcttacaaatg

SEQ ID NO: 272845 - DNA, 85 bp, Homo sapiens
caggctgcaagtgaaagacaagaaagatgagactctggtgtgggaggccttggtgaaaccaggttccctcggagacatggaggcc

SEQ ID NO: 272846 - DNA, 100 bp, Homo sapiens
cattggcgtccgagcgacttctaggagcctggggttcggcgctatggaggagctcgatggcgagccaacagtcactgagataatctgaatgctggctggg

SEQ ID NO: 272847 - DNA, 98 bp, Homo sapiens
ccaagatggtgctgtcccagagacaacgagatgaactaacaagcactgcctgctggaggctgggatcggctgcacaagagacttgatcaagtccaaca

SEQ ID NO: 272848 - DNA, 96 bp, Homo sapiens
aaccagcagcagccatcatggagactggcagaagaccgaggcccagaagcgacgcgaacagcttctgctagatgagctggtggccctggtgaacaa

SEQ ID NO: 272849 - DNA, 73 bp, Homo sapiens
ttccatgttatcctccatggtggtgttggcaagaatggatccactatagcagagatattaaaggctattcagg

SEQ ID NO: 272850 - DNA, 86 bp, Homo sapiens
tccatacaagattgatataggcgcagtatattctcacagagtgaatatgaccatctcccagaacaggccttctatatggtgggacc

SEQ ID NO: 272851 - DNA, 75 bp, Homo sapiens
tttgaagacttgctagttaggattttattactggcagcatgtatatcttttgaattgaatgatctggcacgggac

SEQ ID NO: 272852 - DNA, 75 bp, Homo sapiens
tttgtgttgcgggggccggacttcaagactatctgtcaaaaaacacctaaggactctccgaagtatgaagtctgc

SEQ ID NO: 272853 - DNA, 75 bp, Homo sapiens
ccccccagagcccggcgtgagggggccgagcccctgcagatcaagtcagtagtggcaccagagcatgtgaagggc

SEQ ID NO: 272854 - DNA, 75 bp, Homo sapiens
aggaactagaggaatcccatgaccagcatgcggtgctaggtgaagaaataccaccggttgaaagaagaagccagc

SEQ ID NO: 272855 - DNA, 72 bp, Homo sapiens
aggagaaaatacggcattgctagttactccacaggatccgctgaacataggatgttgccacaaaatctacct

SEQ ID NO: 272856 - DNA, 100 bp, Homo sapiens
ctggtaaacctggcagggtctgaaaaacctgctggaagagacacagtaggttccttgtaatggcttcagtgacattgagaaccttgaaggaccagagatt

SEQ ID NO: 272857 - DNA, 75 bp, Homo sapiens
catcgaagctctagaaatgaatgtttccatctcttcagagatgaaccagcagagagactttcaagcagctggctg

SEQ ID NO: 272858 - DNA, 80 bp, Homo sapiens
aatgccagccagaagaggcgttcgctgcgcgtgcacattccggtcagcccaaggccaaccccactgtcactctgttcccg

SEQ ID NO: 272859 - DNA, 89 bp, Homo sapiens
aggataaactgttacgcatatatgacttgaacaaacctgaagcaggtatggtgtcagtcgtggaactgaaacagagttcagtaatgcaa

SEQ ID NO: 272860 - DNA, 100 bp, Homo sapiens
cactgctgagtcacacacaacgcttgttatgttttcatcacttctctccagaaggctgaccggttccctgatgtgttacctgcttctgctactgatccaa

SEQ ID NO: 272861 - DNA, 100 bp, Homo sapiens
tggtgaatgtcagtagcctctcactgaatgagcctgaagacaaggatgtgactgtccacatcacgctgagcacccatgagtgtgccggcctttcagaacg

SEQ ID NO: 272862 - DNA, 75 bp, Homo sapiens
gtctgcccctattgtaagtgcagatggaacacaacagcaggactctggactgtcttcacactaggtggtgtgggc

SEQ ID NO: 272863 - DNA, 128 bp, Homo sapiens
atgatcgagaggatctggtgtaccaggcgaagctggccgagcaggctgagcgatacgacggtgtcaagctagggatgcggtccattcccattgccactgcttgcaccatttaccataagttcttttgc

SEQ ID NO: 272864 - DNA, 50 bp, Homo sapiens
cgcaacctggcagccgccgccgtggaagggtgccttcaccagggatggaa

SEQ ID NO: 272865 - DNA, 97 bp, Homo sapiens
ttctgctgtatgcaagttttcacttatctcgaaagcctatcagcatagttaagtgtgacaccatcgccacaacaggctcgggtctgtcctccccata

SEQ ID NO: 272866 - DNA, 117 bp, Homo sapiens
aagacctctcctcattcttattgttttattagggcaatttgtctcaataaaagcccaggaagaagacgaggatgatttcctttcctggatgaaaatgttgtctcctttctaaattct

SEQ ID NO: 272867 - DNA, 100 bp, Homo sapiens
tgagaaggacgtggaccccgtacgcaccacgtccaatgacattgtggagatcttcacggcgtccgagctgggccacagcctgaacgagaacgtcctcaag

SEQ ID NO: 272868 - DNA, 82 bp, Homo sapiens
agtgcctccaaaggttgctgagggggcagctggcattttatgctatgtgggagcctatgtcttcatcacttatgatgactat

SEQ ID NO: 272869 - DNA, 75 bp, Homo sapiens
ccagttctgtttagaagatgacactcagagccaactgttggatgcagatggagagaagaagaaggaggttcctgc

SEQ ID NO: 272870 - DNA, 82 bp, Homo sapiens
gtgacagagtggagccatggctagagtccctgaagaggaaggagaaggaatatgagcatgaaatggagcggctggcacgtga

SEQ ID NO: 272871 - DNA, 90 bp, Homo sapiens
ccaatggacaccttctaagagtttggcgagtcagtgactgaagcgcccgtccattccaaggctcttgcagccaatgccggaacaggattt

SEQ ID NO: 272872 - DNA, 83 bp, Homo sapiens
tcgcgtctctctgctgcggcgcggggaccgctgtgctctcgcttataggctttatactgtggtgcctcgcctggtcaagtttg

SEQ ID NO: 272873 - DNA, 88 bp, Homo sapiens
agtttacacatctcacccaattcagatgcaacaaggagacgcgcctttgccctggtctctcaagcgtatacttcaatcatcgccgatg

SEQ ID NO: 272874 - DNA, 74 bp, Homo sapiens
gtcaagtagagatttgctcaatgcattgaagtcagtcattaatgaccctatgtttggtgcacctcgatttggag

SEQ ID NO: 272875 - DNA, 75 bp, Homo sapiens
tcatgaacccgagctatagagaaaggagatgagggacgtccagatcggtgacatcgtcacagtgggcgagtgccg

SEQ ID NO: 272876 - DNA, 119 bp, Homo sapiens
gtcggacccatggtttccagtgcagcgcggagtgggcgatgccagcgtgccaggtgctgagcgccgtcctcaaggatctctaccacctgctgaagcacgtagtgtgtctggagcccgat

SEQ ID NO: 272877 - DNA, 100 bp, Homo sapiens
acagttgaagaggaagtccggcagttaccttgcaatcacttctttcacagcagttgtattgtgccgtggctagaactgccttcgttcagaaaaacctggt

SEQ ID NO: 272878 - DNA, 90 bp, Homo sapiens
gtctgcgaaggccgggacccggttccccggcccacagtgggggtgtgcaaacccgagagaactggtgaaaattgataccaaggccattcc

SEQ ID NO: 272879 - DNA, 83 bp, Homo sapiens
aggatccagtgttcaccatcctggccccggaaggagctggtgactgccctcatgtgtgatttgcggcggccagcggcaggtgg

SEQ ID NO: 272880 - DNA, 97 bp, Homo sapiens
aacagacaaaatccactataggagtcatggtaacagcgtcccacaatcctgaggagagccggatctatgctgtggccacatcgggcatgcggctctc

SEQ ID NO: 272881 - DNA, 100 bp, Homo sapiens
aagtgattttttgcctttgttgattaactggacaaattcagcttgacctcagagatgatgtggtgaaaattacaatcgattggaacaagctccagagcct

SEQ ID NO: 272882 - DNA, 100 bp, Homo sapiens
aggaaacaccctgatatcagtggattatgaaatttttgggaaggtgcaaggggtgtttttccgtaagcatactcaggggctatttttggagcattacaag

SEQ ID NO: 272883 - DNA, 98 bp, Homo sapiens
cagaatcctgagggccaatggacaattatggacaacaagtcaccacgttctgcgcttttccgagtcggacatatgagcagcgtggagctggatgatga

SEQ ID NO: 272884 - DNA, 82 bp, Homo sapiens
cgcagacgcgggcgagctgcggctcggacgccagcggacacgcgggcgagaggctgaggggatctggcggtggagcgctagg

SEQ ID NO: 272885 - DNA, 83 bp, Homo sapiens
ctgcagtttgcaatatgactttggaggaattctcggctggagagcagaagaccgaaagtttggtgccctggttgtcagatgtt

SEQ ID NO: 272886 - DNA, 100 bp, Homo sapiens
cctcaagctcgaatgtgacaagttggccagtgagaagtcagagatgcagcgtcactatgtgatggatctgcttctgtatcatctataagtttaaccaaag

SEQ ID NO: 272887 - DNA, 75 bp, Homo sapiens
gcttctcctatgactacgtctttgactggaacatgctgaaattcgacctccagcagaaggttgtctacctgagct

SEQ ID NO: 272888 - DNA, 100 bp, Homo sapiens
gacatggggcacccggtgtaccgcggcgagaagccccagctgcactacgcgacaatccatggacacaagggaccaatcactgcagtggcttttgctcctg

SEQ ID NO: 272889 - DNA, 98 bp, Homo sapiens
gaaaacagggaagatattagccaatatggaattgccaggttcttcactgaatagtggaaccgtcccaaaatgtcccttgctcagaagaaggatcgggt

SEQ ID NO: 272890 - DNA, 100 bp, Homo sapiens
ggggacccagaccctggagcctcagttggaagcagccgatccagcctgcggagcctgtggggcaggtcttcatcctccaggtccacctttagcaagacct

SEQ ID NO: 272891 - DNA, 100 bp, Homo sapiens
cagccagtgcaacagttgcctatatcctataccgcaggtatagggaaagcagagatcggcgccaatggtgtgccatagccatcctctttgcagtcctgtt

SEQ ID NO: 272892 - DNA, 80 bp, Homo sapiens
ctctggaattgctactgctgcctctgtcactcctggtgaccagcattcaagatcactgtgtccactactatgatcttcgt

SEQ ID NO: 272893 - DNA, 88 bp, Homo sapiens
tgccctgaaaaagtatcgtcgagaagcctatcatcggacaacaccatcgacttcctggagtacgtggcagctctgaatctcgtgctga

SEQ ID NO: 272894 - DNA, 75 bp, Homo sapiens
ttgctgaataaagctccggaatatttacacagggcgtcttactactgcaggcactaacaagaagcaatggtgcaa

SEQ ID NO: 272895 - DNA, 88 bp, Homo sapiens
ctgtctctagactttttggacgatgtgcggcggatgaacaagcggcagtctgcgggccaggcatcgacatccgcaacgactatcagca

SEQ ID NO: 272896 - DNA, 82 bp, Homo sapiens
accacgccaaagctggcaccatcattgcccgccagggagaccaggttctggaggacacgtgccggcggcaggacttcaaccc

SEQ ID NO: 272897 - DNA, 105 bp, Homo sapiens
aaaagccaaagccacagataaaccagtggaagcaggagaagcagcaattatcgtccgagcaggtcctctcagggtgcgccatcattgtccgaggtcagcctcgtg

SEQ ID NO: 272898 - DNA, 83 bp, Homo sapiens
aaagggtcctcctgctcacagtgtgaataacaggctgccgccaaccaggagagcagccatgtgcagcagcaggcccttgctct

SEQ ID NO: 272899 - DNA, 101 bp, Homo sapiens
ggggaagatgttcagcgtagagtcgctggagcgggcggagctgtgcgagagcctcctcacttggatatttggagttcttacaacatggcagacattgacaa

SEQ ID NO: 272900 - DNA, 96 bp, Homo sapiens
gatttacagaagttaagtcgcagaatggagaattcatgacccacaaacttaaacatactgagaatactttcagacagagtctcgctctgttgccca

SEQ ID NO: 272901 - DNA, 75 bp, Homo sapiens
ggcagcggagcacgcgggctgctcatcgtcagcagggagaggctggtgctgggcgtcctcttctttgccatagcc

SEQ ID NO: 272902 - DNA, 111 bp, Homo sapiens
gctgcattctcttaggccagctgtcttgactggggtagctgaagctgttgtagctattgaagaattggaggagaaacttaatgatgcacttcaccagaagcagctactaac

SEQ ID NO: 272903 - DNA, 83 bp, Homo sapiens
cgaacatgtcgcggcctgtcagatgatcatgacgcagtcctgaggtttaatggggcacccacagccaacttccaacaagatgt

SEQ ID NO: 272904 - DNA, 100 bp, Homo sapiens
cagccttcccctggacaggatcccctacaacgccgtgcttgacctggtcaacaacaagatgcggctatcattgttaattatgcaagtaaaatgtttaacc

SEQ ID NO: 272905 - DNA, 100 bp, Homo sapiens
catgagctggggcaccgagctctgggtgaagccaaaaaccttccctcttacccggggccgagcaagatgagggattgctactgcacggtgaacctggacc

SEQ ID NO: 272906 - DNA, 100 bp, Homo sapiens
gcaggatgtgccttgttgaaattgagaaagcccctaagggctccaacaaaagaatcctctgaagaggagtatgactctggagttgaagaagaaggatggc

SEQ ID NO: 272907 - DNA, 74 bp, Homo sapiens
agacatgattggaccggaaaagactttggttgggggccgtcccgctcctaaggcaggaagatggtggccgcaaa

SEQ ID NO: 272908 - DNA, 80 bp, Homo sapiens
agagtactcccatagctgaaactataatggcttcaagcaacgaatccttaaaagatgttctcgtccgtggcgcacctggc

SEQ ID NO: 272909 - DNA, 98 bp, Homo sapiens
gaagacgaggccacagacacttctgatagtgaaggcctgatcttcgtggtggacagcaatgacagagagcgtgtgaacgaggcccgtgaggagctcat

SEQ ID NO: 272910 - DNA, 75 bp, Homo sapiens
aagatggatatcagctacagactttcctgagtcagactcctgggagagttggctctcaaggttctgatttagatt

SEQ ID NO: 272911 - DNA, 101 bp, Homo sapiens
ccacggtggataacgacaagaaaaacaatcgcttcaatgatgggaaggtggatcccgccgggaggtactttgctgcatatctttctgaagccatgaagctg

SEQ ID NO: 272912 - DNA, 83 bp, Homo sapiens
gctgacttcaagaatgaagccacggaccttcacggctgtacaggaagcatggctggggaggcctcaggaaacttacaatcatg

SEQ ID NO: 272913 - DNA, 76 bp, Homo sapiens
gttgtccaaaagtgaaattttacgaactcaggtatggcgatttagtactgcattttgttctgttaatgaatggaaa

SEQ ID NO: 272914 - DNA, 75 bp, Homo sapiens
tttctaatcagagaaagtgaaagccaaaaaggagaattctctctttcaggatattggtgctggaaaaggcaaata

SEQ ID NO: 272915 - DNA, 78 bp, Homo sapiens
ccaataaccaggtgcttggcaaaatcgagcgggccattgtttcaggaccacgtcaagacttgtggcaagtgtcgagtc

SEQ ID NO: 272916 - DNA, 87 bp, Homo sapiens
ggagctgacggtggaggttcgcggctctaacggggctttctacaagcctctgctgcgagaagttctggagaagcagccagtgctaag

SEQ ID NO: 272917 - DNA, 50 bp, Homo sapiens
gtctgcgagccaggattcccggtatcgagaaccttccctgcgaacttcag

SEQ ID NO: 272918 - DNA, 83 bp, Homo sapiens
caagagtgttgagcagcccatcgtgcttaaagaaggacaatgcagatcttcgtgaagactctgactggtaagaccatcaccct

SEQ ID NO: 272919 - DNA, 100 bp, Homo sapiens
gatgagaagctgcatgactcggtggtcatggtcacccaggagagtgacagcagctttctggtcaagatgcccctcaggacgctgtcctgtcctccttccg

SEQ ID NO: 272920 - DNA, 75 bp, Homo sapiens
gtggcagggggcctggctccgggcagtgcgggtcatgaagacatatcacatgtacaatgccgacagcatcagtgc

SEQ ID NO: 272921 - DNA, 75 bp, Homo sapiens
ctgaacccgctgcaggagaactgcaacgctgtgaggctgaccttgaagaattatatccagatcgagagacagaag

SEQ ID NO: 272922 - DNA, 100 bp, Homo sapiens
aaggccggccgcaaggaggaggccaccaaccagacgacctccaagaagctggtgaactcggtggctggctgtgctgatgacgctcttgctggcctggtgg

SEQ ID NO: 272923 - DNA, 75 bp, Homo sapiens
ccccttcctgcccctgtcgtcagcaggttttgtagtgcatccctgagcatgagcacagaatgaagcggcgtttgg

SEQ ID NO: 272924 - DNA, 74 bp, Homo sapiens
gggaggtagcatccgttggatatccacaccatccttctcgctgcagggtttgctggggctttcactctgcggca

SEQ ID NO: 272925 - DNA, 82 bp, Homo sapiens
gactatggacctatggagttggtccaaaccaggttgcagagaaggtggcctccagaatcgccgagggcttcagcgacactgc

SEQ ID NO: 272926 - DNA, 95 bp, Homo sapiens
tgagaatgatttacaacccctgctagcctggcttaaggtcatggagaaagcccacatcaacctggtgaggtaagtccatggcctacatgcgcggc

SEQ ID NO: 272927 - DNA, 108 bp, Homo sapiens
gccacagcccggactccatcgactcccccggctcttagactattccagaaagctgagtctgatctggattacattcaatacaggctggaatatgaaatcaagactaat

SEQ ID NO: 272928 - DNA, 99 bp, Homo sapiens
aagatacaattgaataatcaaagggtggagcctggacaaaatgtttacttgtctgattctgaagggagtggtaatggaagtgaagatgcttcaaaggac

SEQ ID NO: 272929 - DNA, 83 bp, Homo sapiens
cgggcactgctttccactcggctcctgtcgtccgttctctcaggctcccgttcagggagtggagcttggtttcgggatctcgg

SEQ ID NO: 272930 - DNA, 95 bp, Homo sapiens
tgatgagaagttccatgggggctgggccctcattgactgtgaccctagatacgtaggtaacctttccagagatgtgacagaagtccttatacttc

SEQ ID NO: 272931 - DNA, 100 bp, Homo sapiens
tgcattagaacacacatactctgataaagagaacatcatgggaatgctatgcagccatctgtcaaggataacagtggtagccatggctctcctatcagtg

SEQ ID NO: 272932 - DNA, 51 bp, Homo sapiens
ggacgccttctgcaactccgacatcggaagaggagcaggacttggatggtg

SEQ ID NO: 272933 - DNA, 80 bp, Homo sapiens
accggcgtccccggcgcgaagaggctggactcggattcgttgcctgagagagcgcctgctcgctgtgcccccgggttatg

SEQ ID NO: 272934 - DNA, 100 bp, Homo sapiens
ctgtcttcatctttacagaggaatagtctacaaaggaagacttgtaacctggagaagagtgagtgtgtccgcttgaaaccaactgacatacagcccgaca

SEQ ID NO: 272935 - DNA, 101 bp, Homo sapiens
gtgaccgagggggcctatcggagcatgctgcagggtaaagatgatgattcttttgatcggaaatcagtgtaccgaggctcgctgacacagagaaaccccaa

SEQ ID NO: 272936 - DNA, 97 bp, Homo sapiens
gatttaaaattgcaactgaagcaaactcagacagcttccagagcagttgtagcgcagcatgttgctccacctccaggaatagtggaaatagatagtg

SEQ ID NO: 272937 - DNA, 75 bp, Homo sapiens
ctcagagaaggaggaggtgaccacgcgcgagatcatggaagggaagtggttgctgtgtatgttactggtgcttgg

SEQ ID NO: 272938 - DNA, 98 bp, Homo sapiens
tggcagcattttttccagaacacaaaagtgccggtggtggtgtgcacattgagccccggtatagacagttcccccagctgaccagatcccaggtgttc

SEQ ID NO: 272939 - DNA, 101 bp, Homo sapiens
ggagaagctggccaagaaggcggagaaggactccaaggcggagcaggccaaagtgaagaaggcagcctggcatcctcgctacaacctcattgttgtgggcc

SEQ ID NO: 272940 - DNA, 75 bp, Homo sapiens
tttgtaacttttgatgatcatgatacagttgataaaattgttggaaatcataagtgcgctgccatttgtcaagct

SEQ ID NO: 272941 - DNA, 100 bp, Homo sapiens
ccaaaataaagcggctgcaaccaaacacattcaatgcagttagaaggaaaaggtcaactcgatccaatacagaccgttgcgacatgtgcgcggacaaccg

SEQ ID NO: 272942 - DNA, 75 bp, Homo sapiens
ggaaccttcactaccctggtgggaggcccagagtacgtgcactgcctgctggttctggcctataggaacaagaca

SEQ ID NO: 272943 - DNA, 75 bp, Homo sapiens
acctgaagcaacccaattagcatctgaacaattgcaagcacttttatcaaaatacaactcaaacctagctactcc

SEQ ID NO: 272944 - DNA, 88 bp, Homo sapiens
cccagtatttcaagagtcacttctttacttggtgcaggaaggcagtctttgctacgtacagcaaaagcttgtcagctcatttgcagct

SEQ ID NO: 272945 - DNA, 100 bp, Homo sapiens
caaggacggagacgccggcgtgggcagcggccactgggagctgagggggggccctcagcctcttggccttgaacgggctgttcatcttgattcacaaaca

SEQ ID NO: 272946 - DNA, 75 bp, Homo sapiens
ggagactcctgcgtcctccgacttttcatggtcccttaatatggactttgaaaatcaagataaggagaaagacag

SEQ ID NO: 272947 - DNA, 90 bp, Homo sapiens
cagcatttgccatcttcaagtttgttcaggactatggtgcagccctgcggggcctgtgcgaagacgccctggaaggcctgctcttcctgc

SEQ ID NO: 272948 - DNA, 75 bp, Homo sapiens
gttctggacaagatgaagtctttctgccagtgtatccaaagtgtgtacatcagtaagatcataagcagtgatcga

SEQ ID NO: 272949 - DNA, 90 bp, Homo sapiens
ctgtggccctggtagaggagctgcagaaagaccttgatggaccagcaatacaatgcctcaaattcctgcctttcctcaagagaagagccc

SEQ ID NO: 272950 - DNA, 95 bp, Homo sapiens
gcagaaggaattgtcaatgggcatactttgttggttgcatctgctaaagaggatcctgccaacattttacaggtctccaggaaaagttgggcttt

SEQ ID NO: 272951 - DNA, 80 bp, Homo sapiens
ccgatgcccgcggccggagagctggaggagaggttcaaccgcgccctggagcatcagatccatgctgctgctgactcgga

SEQ ID NO: 272952 - DNA, 82 bp, Homo sapiens
gaccaagaagccaaagaactggctaggcaaataagctttaagtttgtcactcaagccctatcagaaggttggtttgaattgg

SEQ ID NO: 272953 - DNA, 74 bp, Homo sapiens
cgggcacccctacgtcgtgtggaaatccgagttggaaatgcagaaatcacctgtcttctgcgtcgatcaggctg

SEQ ID NO: 272954 - DNA, 50 bp, Homo sapiens
ccacatccctggatctgccctcgcatcttattgccagcagttttgaagat

SEQ ID NO: 272955 - DNA, 100 bp, Homo sapiens
acgagatcctgcacatgtctttgtcttaaaattttggtagcagaaagcaaatgtgcaaagagcaatggaaaacaagtcagaagctgctgtctgattccag

SEQ ID NO: 272956 - DNA, 82 bp, Homo sapiens
cttgctcctcgccgcggcggggactgcagcaattctgtggtgttcttggtcacacatttatggagtttctgaagggcagtgg

SEQ ID NO: 272957 - DNA, 98 bp, Homo sapiens
gtgcctgatgatcacgcagctggctggcttcagtggaccaatgaccttgaatgatgccatgaggaacaaggcaaggctgtcaattacaggaagtactg

SEQ ID NO: 272958 - DNA, 96 bp, Homo sapiens
cctcctgcctcctccctgctttgttccaataattttgtgctcggtgtcatggagaaactccagctgggcccagagattctgcagcgggaaaatcca

SEQ ID NO: 272959 - DNA, 100 bp, Homo sapiens
ggtaggctgcgttgaggatctttgctcttccatccgcctttgatcgtcttcctcttcagccatccaggagctggctaaatatgaatacatggaagaacaa

SEQ ID NO: 272960 - DNA, 50 bp, Homo sapiens
cccgccgcccccgacgtttgcactgtggtggtgaccgcggtggcttcaaa

SEQ ID NO: 272961 - DNA, 100 bp, Homo sapiens
ttctacttggtggtgtgtaacgactgtaatcaggttgtcaaaccgcaggcatttcaatcacattatggcctctctgctgatggtggtgccaagcgccagg

SEQ ID NO: 272962 - DNA, 87 bp, Homo sapiens
gtcttccaaaggagaaattcatggcggaagtaatgggatctataaagctgatggtgagaccattctaaaaggcctccagtccatttt

SEQ ID NO: 272963 - DNA, 50 bp, Homo sapiens
tctagaccttgccaagatggcacaggacgacatagacagcctaaacccag

SEQ ID NO: 272964 - DNA, 50 bp, Homo sapiens
gaaggattcgggcgcctgcttcagtgatagtattgaagccagccttgagg

SEQ ID NO: 272965 - DNA, 90 bp, Homo sapiens
gtgaagtcaaatgcatgccaacattccagttttttaagaagggacaaaaggtggagtacgtcatcaagtgcgacatgtctgcgctgcagc

SEQ ID NO: 272966 - DNA, 97 bp, Homo sapiens
agacattaacagtatttactgagagctcatcagacctgatggccaaaagaaaggaagaaaatttttcctctcctaaaaatgccaaaaggccaagaca

SEQ ID NO: 272967 - DNA, 100 bp, Homo sapiens
cctggatatggcaaccagggtgggggctacggaggtggttatgacaactatggaggaggctatggtggtggaggtggtggcagcagaggtagttatggag

SEQ ID NO: 272968 - DNA, 83 bp, Homo sapiens
cctcaacttactctcaggtggagaacctgaatcgggagctgaccagcagggcatgatggctcatacctgtaataccagcactt

SEQ ID NO: 272969 - DNA, 98 bp, Homo sapiens
agattcgcagtggtcgcttcttctccttggaaagatttgaagcactcttcaccatctatgatgaccaggttacttttcagctgtttaaaagctttaga

SEQ ID NO: 272970 - DNA, 100 bp, Homo sapiens
gtgaactctgccacttcaggtttgcagtcgagcgcaaacccaggccgttagtggagaaactgattattgatgagaagaagtattacttatttgggagaaa

SEQ ID NO: 272971 - DNA, 100 bp, Homo sapiens
tgggtaacacacgtctgcggtgttacccacgactgcctgggacctggccaagggctccacacaccaagaccaaggcccagagccatggctatctcctctt

SEQ ID NO: 272972 - DNA, 75 bp, Homo sapiens
gccatatgtgttaattccacccacatttttactgcagctgaagctctaccctccgaatgccaaatgctcctcttt

SEQ ID NO: 272973 - DNA, 83 bp, Homo sapiens
cacctgagaaccatgctcaccgaccctggtcagtatagaccttctgatttgctgtgccctgagacatatgtttgggtacccat

SEQ ID NO: 272974 - DNA, 98 bp, Homo sapiens
ttgctccgcccaatgccattctggaaaaggtcttcactgcaattacaaagcaacagcttgcacaactacagaaagaaaaatcagagattctgaaaaat

SEQ ID NO: 272975 - DNA, 100 bp, Homo sapiens
caaagatgagatttacctgtgagatgtttcatcccaacagttgaagaaattgtggatattggagcatttgctccagaagacatccatattcctcagattt

SEQ ID NO: 272976 - DNA, 75 bp, Homo sapiens
gagcgatttgccatcgtgctggtgctgcagggtgcacagctgatcgccgtggcctcctcggaccccgcggcggcg

SEQ ID NO: 272977 - DNA, 149 bp, Homo sapiens
gatgatgatatcattatgctgacctctgacgagctgcaatttggttatgagaaggccaatgatgaggccaatcagagtgatacaagtgtctccttgtcagaacccaagagcaaaagcagccttcacttactgtcccatgaaacaaaaat

SEQ ID NO: 272978 - DNA, 139 bp, Homo sapiens
cggactcagtggacgacggcggcggcggcgaaagcggatgaagaccccggagccaacttgtttccggatgaaacaggcgcctatttaatcgacagagaccccacctactttgggcctgtgctgaactacctgagacacg

SEQ ID NO: 272979 - DNA, 90 bp, Homo sapiens
ggcggatcggatcccgcagatcggagacggggcctggaggcagcttcgaaccagtgcaatgacgatgccagtcaacggggcccacaagga

SEQ ID NO: 272980 - DNA, 100 bp, Homo sapiens
tgggctgcttcctcagccattactccatctgggaagagctgtgatccgaggtgtcaccaccaaagagttgtatccagagtttgggctggacatgaatgac

SEQ ID NO: 272981 - DNA, 82 bp, Homo sapiens
gatcttcctgagcagagctctccgggttccccggctcgcggggcccggcgaagggcaggaatactcccccagttgcaagagg

SEQ ID NO: 272982 - DNA, 75 bp, Homo sapiens
ggacgcgttgctgcggcgtctgcgaggcccgaggttagcagacttgaagaaagagaagcagaactgaagaaggaa

SEQ ID NO: 272983 - DNA, 51 bp, Homo sapiens
gaggagacgactttcttctccaagtctcttgttttcagcagccactgtaaa

SEQ ID NO: 272984 - DNA, 83 bp, Homo sapiens
ggtcttgactggagcacgacccaaggcttgggcactgtttaaaggaaagttccgagaaggcatcgacaagccggaccctccca

SEQ ID NO: 272985 - DNA, 100 bp, Homo sapiens
ggagatatggcgcaactgcggcgcgtattgatggtccagctgctgtcctgaaaccagacgaagttcatgctccatcagtaagctcctctgttgtggaaga

SEQ ID NO: 272986 - DNA, 74 bp, Homo sapiens
aatctatacacagccatgccccttccgattgggagggacaagggtggcccagttgaaatccttcccttcctcta

SEQ ID NO: 272987 - DNA, 80 bp, Homo sapiens
gccgccctggccacggggactctcttctggatggtcaaaatgcagatcttcgtgaaaacccttaccggcaagaccatcac

SEQ ID NO: 272988 - DNA, 101 bp, Homo sapiens
ctctgcctctgcctctgcctggccgcggctctgggaagtgcgcagtccggaactttatattgctgttggaatatctggagccatccaacatttagctggga

SEQ ID NO: 272989 - DNA, 101 bp, Homo sapiens
agtttgtaaactatgcaactgaaaaactgaggatgattgttagctccacgagtgcaaactgcagtcaccaagtaaaacacaacacagtcactcctggcggc

SEQ ID NO: 272990 - DNA, 112 bp, Homo sapiens
tggcatggatggcggcatgagtatctgggatgtgaagatgatgaaagttgttcaagtttatgcagacacacaagagattaatttgaaggtaagcttttcagaccatgcaaac

SEQ ID NO: 272991 - DNA, 83 bp, Homo sapiens
ctcatctgaatcaaacatttgaattctttctagaaggaagatgttaccgagtacttcagtgaattccttagtgcaggggaacg

SEQ ID NO: 272992 - DNA, 74 bp, Homo sapiens
ggcttcaggcgacccgtactgggcctactctggcaccagagaaggaggaattcctggcctggcagcatgatctg

SEQ ID NO: 272993 - DNA, 114 bp, Homo sapiens
acctcccggaaccatcaagatcttcacagagaacttcttatgaatcaaaaaaggctggcagtgatggtgaaagcataggaaactgccccttttcccagaggctcttcatgattc

SEQ ID NO: 272994 - DNA, 98 bp, Homo sapiens
gaaaaagaagacttgcttcagcatttctcatgtgcaggatgacagaattcgagtcgaaaggatggataacatttattttgaatacagccatgctttcc

SEQ ID NO: 272995 - DNA, 102 bp, Homo sapiens
tcaccaaataagctatatactttggttacctatgtacctgttaccactttcaaaagtattgcagttggacacatatattttttcttggaagatgtatttccc

SEQ ID NO: 272996 - DNA, 97 bp, Homo sapiens
caaaagcacaaggattctcgctgtgacagagacaacaccgagtatgagaactgttcgggggtcttgtctggattttggttgcctcctccaatgttcc

SEQ ID NO: 272997 - DNA, 100 bp, Homo sapiens
gagctttgtctatcttcttccttaggaaaccagagtgaaacctcggtccggctgggctattgatccctttggacactcaccaacaatggcttatcttcta

SEQ ID NO: 272998 - DNA, 100 bp, Homo sapiens
cccaactcgggtaaagctcctcggcctcggcgtgctgcgcctccgcggctgccctgcgccagacagggtctcactttgtcacccatgctggagtgtagtg

SEQ ID NO: 272999 - DNA, 85 bp, Homo sapiens
gtgcccccacgcatgggtggtggtcgcgctgtgctccagtttgctggggctttcactctgcggcagcgaatgctcaacttcgtcc

SEQ ID NO: 273000 - DNA, 82 bp, Homo sapiens
agggcttccgccgactggaggagaatgtggacccccctgtctggtacgacaccgacgtgaagctgtttgagatacagcgggt

SEQ ID NO: 273001 - DNA, 50 bp, Homo sapiens
caaatcatcaatgaagcaagtaaggggtcattgtcattcgaagatgtggc

SEQ ID NO: 273002 - DNA, 101 bp, Homo sapiens
cgcggggagagtagggtgctgtggtctgagctagagggtgaagctggcggagcaggaggatgggcgtttaatgcgctgaaggttcccgtgccagaggataa

SEQ ID NO: 273003 - DNA, 96 bp, Homo sapiens
cgccgcccccgccgccggggacatgtctaaccccggaggccggaggaacgggcccgtcaagctgcgcctgacagtgaagcgtgacattcaggaaaa

SEQ ID NO: 273004 - DNA, 100 bp, Homo sapiens
gagaaacatgaagttcgggactatcttctggtttctaagcatgaattgaggaacagaagaagcagagcagatgatcggagcagcatttgtttctccccaa

SEQ ID NO: 273005 - DNA, 96 bp, Homo sapiens
caggcattaccaatttttgtagtaatttgcattgtatatagatgatcgtctcaaaatttcacaatgagagactgatgaaattgacataaatcaatc

SEQ ID NO: 273006 - DNA, 100 bp, Homo sapiens
tgcagttcaaagatgccttttgggtatgcaaccactcatgtattcggttcaggaagcattaaatgccagaccatggtggattcgtatggggactgacatt

SEQ ID NO: 273007 - DNA, 82 bp, Homo sapiens
gccgaataccaagctcggatccctgaatttgatccaggttttaaaatcaaagatgggaaaatcggagaaaattgcccttccc

SEQ ID NO: 273008 - DNA, 100 bp, Homo sapiens
atcctgagcaggcagagagcagaagatattcacagacatgcggaatttgagacttgggaagatccccatgaaaaagataagagcacgaactgctttggag

SEQ ID NO: 273009 - DNA, 82 bp, Homo sapiens
gcgtccaccttaaagccagctccccggcaccacggatctgacccggacaatgcagatcttcgtgaagactctgactggtaag

SEQ ID NO: 273010 - DNA, 50 bp, Homo sapiens
cgggagttcaagaagaacactccagaggttcatgaaccatcgagctccag

SEQ ID NO: 273011 - DNA, 98 bp, Homo sapiens
ttcttcaccgccaggacctccttcttcaggagagcgccccagggcaagccccgctccggccaacaataccaaatatgccccaacagcggcaagaccag

SEQ ID NO: 273012 - DNA, 82 bp, Homo sapiens
aaaaagcaagctgaagacatcaagaagatcttcgagttcaaagagaccctcggaacgctggagtgcagcggcgcgatctcgg

SEQ ID NO: 273013 - DNA, 74 bp, Homo sapiens
gtgcaaacccgagagaactggggaggagtctgctactagtcttatcagctcttaaaaacagaaactcatctgtc

SEQ ID NO: 273014 - DNA, 90 bp, Homo sapiens
gaaggaacttggttccccctccctcagcttccgccccaaaaggattcctacaggaagcaagtagtaattgatggagaaacctgtctcttg

SEQ ID NO: 273015 - DNA, 75 bp, Homo sapiens
tcacatgtatgctcatcggggagatctttgagctcatatttgatgagcctgtcccagacctctgcagcctcaagc

SEQ ID NO: 273016 - DNA, 100 bp, Homo sapiens
aatggacttctggctttggccactttacttcctgccaggaaccacgtgaatgttgagggggcgacacacaagcaggtggtggacctgattcgagcaggcg

SEQ ID NO: 273017 - DNA, 82 bp, Homo sapiens
ggatcatgtctgcgagccaggattcccggggtggccgtgactggggagagcacaaccagcggctagaggagcaccaggcacg

SEQ ID NO: 273018 - DNA, 98 bp, Homo sapiens
cctctgtttgcagctcatggaggaagcagcagggaaaacctggcgctgcaaaatgtgcagaggctgaggggatctggcggtggagcgctaggatcaga

SEQ ID NO: 273019 - DNA, 90 bp, Homo sapiens
ccccaacagcgaggagaacagcaacgatattgccctggtccacctctccagtcccctgcccctcacagaaatgacctccaccttcaaccc

SEQ ID NO: 273020 - DNA, 74 bp, Homo sapiens
ggacacacatccacaccaagttggacgaaaagagttacactgttagaccttatgatagccaagataacgagtga

SEQ ID NO: 273021 - DNA, 100 bp, Homo sapiens
ccatcgccaaatatgacttcaaagctactgcagacgacgagctgagcttcaaaaggggggacatcctcaaggtgtagaatgagccaaggagactcaaacc

SEQ ID NO: 273022 - DNA, 102 bp, Homo sapiens
tttggaatgtaatcaactgggagaatgtaactgaaagatacatggcttgcaaaaagtaaaccacgatcgttatgctgagctgggtgcagtggcttgtgcctg

SEQ ID NO: 273023 - DNA, 90 bp, Homo sapiens
atgtaatacaagttccaaggaacttagtagagccatgggaccacaccaccaccaccacaaccaataggccaggaaccaccagagctccgg

SEQ ID NO: 273024 - DNA, 100 bp, Homo sapiens
aacattttggtcaaagacttcttgtaaaatgcttatcactcaagctcatgctgaagattcggttatggaccatcatttccggaagccagcaaatgatata

SEQ ID NO: 273025 - DNA, 98 bp, Homo sapiens
cggcggcgagaggatgaacaacaagttcgacgcgtcaatgagctgaaggagaaaggcaacaaggccctgagcgtgggtaacatcgatgatgccttaca

SEQ ID NO: 273026 - DNA, 97 bp, Homo sapiens
gaacttcaagcagaaagtggtagcgctgctgcggaggttcaaagtgtccgacgaggttcacgcttacatcatcagctacctgaagaaggagatgccc

SEQ ID NO: 273027 - DNA, 100 bp, Homo sapiens
aggcctggcacggaatgcagtttttacataagttgtgatgcttgcaagagtaaaagaaacaggagacctctatgctgtgaaggtgctgaagaaggacgtg

SEQ ID NO: 273028 - DNA, 82 bp, Homo sapiens
gaagccaaagaactggctaggcaaataagctttaaggaccaaatggctcgaaatccagctgctattgacatgtttattatag

SEQ ID NO: 273029 - DNA, 101 bp, Homo sapiens
tgcctaagaagaccgagagtcaccacaaggccaagggcaagtgatttgacaggccctggagagtgaatttgtttcctgccagcttcaccaatggattgatc

SEQ ID NO: 273030 - DNA, 101 bp, Homo sapiens
aaaaaacctctaggaaatgatctaggaaaatggtacccactgatggtaatgctggcctgctggctgaaccccagattgccatgttctgtggcagactgaac

SEQ ID NO: 273031 - DNA, 100 bp, Homo sapiens
tagcccagtgccaatgcatcttctgtactctgcgatacctctgggtattctagttgtgcgtggagactgtgatttggagacttgccgtatgtacatagac

SEQ ID NO: 273032 - DNA, 100 bp, Homo sapiens
tcgctggagcgggcggagctgtgcgagagcctcctcacttggtgtaatgttcaagctcagaaatgccttatgtggatcgtcagaatcgcatttgtggttt

SEQ ID NO: 273033 - DNA, 75 bp, Homo sapiens
cctgaagacccgaggccgtcggcacagagtgccttccaggtcgcgtctccttcttcacctcggggtccgagaacc

SEQ ID NO: 273034 - DNA, 100 bp, Homo sapiens
ctgggccctcattcaggcccagccctggcgcagacggggaagcggagccaacatgccagtggcccggagctgggtttgtcgcaaaacttatgtgaccccg

SEQ ID NO: 273035 - DNA, 80 bp, Homo sapiens
ccctgcgtcgccgggaccctcgcgcgcgaccgccgaatcgctcctgcagcagagttgatattcactgatggactccaaag

SEQ ID NO: 273036 - DNA, 100 bp, Homo sapiens
tcaggaggtgcatcaggaggtgcatatgcaggttctgactcctcaggagcaaaaaacataacctgaagagggaggaagtggatttggggttcaccatttc

SEQ ID NO: 273037 - DNA, 100 bp, Homo sapiens
cagcagcattgaactgtgtggggaagggcatggacaagaagaaggcagccgatcgcctgataggcttgccagaggggcgtgctcgcaatcacaatcgacc

SEQ ID NO: 273038 - DNA, 96 bp, Homo sapiens
ttgaggcgcaatgatgagaggatgtggtggtctactctgatgtcaatcttgagggctagtgagggccccaaggctgttgcagctcctcgacctgat

SEQ ID NO: 273039 - DNA, 100 bp, Homo sapiens
gagaagcagctcgccagccagcagcccgccagccgccgggagaattaaacaaccaccatgtcgagcaaaaaggcaaagaccaagaccaccaagaagcgcc

SEQ ID NO: 273040 - DNA, 96 bp, Homo sapiens
tcctcctgggtgggcctggcagtggctttcctcgcatccagcaactcttcaccagtatccgggtactggatggacctctcacagacagcatggagg

SEQ ID NO: 273041 - DNA, 73 bp, Homo sapiens
ggacagctgatttctgttgaaaaagtcaagactgatacagttcttatattgtgtagaaagaaagtggaaaaca

SEQ ID NO: 273042 - DNA, 73 bp, Homo sapiens
tatttgaatttgctagtaacgtcatggaggatgaacgacagcaatgaggtcttactgtgtagcccaggctgct

SEQ ID NO: 273043 - DNA, 82 bp, Homo sapiens
cccagagcgcccatcagatgaggactccaagagcacagagtccatcttcctgacccagatttataactacctcgacaagtat

SEQ ID NO: 273044 - DNA, 98 bp, Homo sapiens
agcgcagcaccgattcctctcgggctcttgggcgctgctctgaggataaggagcacaagtgtcctttgatttgtgggaggaaactccgttgtggcctt

SEQ ID NO: 273045 - DNA, 83 bp, Homo sapiens
ggcggcagcgctggactaggtggcagctggagctctcaaacactgctgtcctgcaccagatgcggcgggaccaggtgacagac

SEQ ID NO: 273046 - DNA, 75 bp, Homo sapiens
tgtgtgagcgcgccggaccaagcgggcccagaagcggggatcgtgggactttaccagatcggtttgtaataacac

SEQ ID NO: 273047 - DNA, 82 bp, Homo sapiens
gttggacacgggcctgccctgttttcgcggccagacaatcaagctcttgaaaggaattcccaattatgaatttaaacttggt

SEQ ID NO: 273048 - DNA, 74 bp, Homo sapiens
acttagcgaagctgccggtgaagatgacttcctttaataagtgttgcgctggttcaaggttgggcattgggtgg

SEQ ID NO: 273049 - DNA, 100 bp, Homo sapiens
agcaccacctccttccttcataatgagctacaaactaccaatggaggatcttaaagagaccagttagcagatgcttgaactgataaatttcaaacggaag

SEQ ID NO: 273050 - DNA, 98 bp, Homo sapiens
aagaaaggacagagattgaactcagctatgcaaagcaactcagtatgagtttaaagccaagaacatcaagaagaagaaagtgagcattatggtttcag

SEQ ID NO: 273051 - DNA, 51 bp, Homo sapiens
aagcaatatataattctggtcaagcacaaccagtgtctctgaagaagatgt

SEQ ID NO: 273052 - DNA, 106 bp, Homo sapiens
cgaatgcagcgacgaaatccccctgaaggtaccgcggacctcgccccgggacagcgaggagctgagggaccctgaatactcccccagttgcaagaggcgcaggacc

SEQ ID NO: 273053 - DNA, 100 bp, Homo sapiens
tcacggtctagatcacattctcgatccagaggaaggcgatactctcgctcacgcagcaggagcaggggacgaagtttaattggttggggtcagataagaa

SEQ ID NO: 273054 - DNA, 75 bp, Homo sapiens
ccaaggccgaggtccgcggccaggtgctggcgccgctgcccctccacggaggctctgccgacttccagttctgga

SEQ ID NO: 273055 - DNA, 75 bp, Homo sapiens
ctttttggataatgcaattatgattgttgctgtcagaatggcggcagtggagcatcgtcattcttcaggattgcc

SEQ ID NO: 273056 - DNA, 98 bp, Homo sapiens
gagcacgtgggcacggaccaattcgggaacaaatactactacatcccgcagtacaagaactggagagatttgggaatggatgatgaaggagatgatga

SEQ ID NO: 273057 - DNA, 100 bp, Homo sapiens
gcagtttgtttctctgtatggcacagaagaatatttgaccaactgccagagttttctctgggtgttaacagcggttggactacagacaattgcttccggg

SEQ ID NO: 273058 - DNA, 90 bp, Homo sapiens
ccagagcccagcgaggtgaagggactttctcacggtctcgtggtgaggaagccctcctatgacactgaaacagatcctagtgagggattg

SEQ ID NO: 273059 - DNA, 82 bp, Homo sapiens
cctcagcttcacctccatgggcatcaacatgccatcgactacagtgacagcgccatgctccaagctcagcagctgctcctgg

SEQ ID NO: 273060 - DNA, 100 bp, Homo sapiens
ttttactgccaggacactgagatttggagagtccaggcaactcctagtagtacaacggaagaaacagctacccagaaggaacagtggtttggcaacagat

SEQ ID NO: 273061 - DNA, 75 bp, Homo sapiens
cgtggatttggggatggctataatgggtatggaggaggacctggagggattaatgaaaatcaagttccatcctca

SEQ ID NO: 273062 - DNA, 82 bp, Homo sapiens
tccagcctcgctctccgccgcccgcaccgccgcccgcgccctcaccaggattatatctgtccaagatgcgagtctggtttta

SEQ ID NO: 273063 - DNA, 98 bp, Homo sapiens
aacacatgataaattgggtggagaagcacgtggtgcaaagcatctccacacagcaggaagaggagcaggacttggatggtgagaaggggccatcatcg

SEQ ID NO: 273064 - DNA, 96 bp, Homo sapiens
ttggaccctcctcccaactgtagggaatctctgcatatagctacaaagtcacccagggaaggacaagctcatggagggctctttcctgcccattcg

SEQ ID NO: 273065 - DNA, 80 bp, Homo sapiens
tcgtgaaggacgccagcatcatacaccggctgttcgaggccttgactgtaggcccatcttgacgattccaagaccacccc

SEQ ID NO: 273066 - DNA, 101 bp, Homo sapiens
cagcgttgaacaaccacagctctattcccatggacccagcaccacaccccactctggccggagcacgccaagcagctccccatcgctccggaaacggctgc

SEQ ID NO: 273067 - DNA, 111 bp, Homo sapiens
gggcacctgcgcagatagagacaatcttacccgcaggcactcagaatggtccagcgtttgacataccgacgtaggctttcctacaatacagcctctaacaaaactaggctg

SEQ ID NO: 273068 - DNA, 82 bp, Homo sapiens
ccaggagcctcgaggaccgacgggtgtctcttttgacaagacttcagctacctggcttgctctgtccagaattgcaggtctt

SEQ ID NO: 273069 - DNA, 90 bp, Homo sapiens
cagctgatgaagcttctgaaccatccacacatcataaagctttaccagatcacgcgctgccccatgatcccgtgctacatctcctccccg

SEQ ID NO: 273070 - DNA, 101 bp, Homo sapiens
ggaagactgaggaggaagggatggctgtggatctgctgtctgctcaggccgagacgcatccagagctttcgtgaccggggactgttctgaagcaggcctcg

SEQ ID NO: 273071 - DNA, 74 bp, Homo sapiens
taagactctgggacactcctgaagtcgggaaatggaccctgatgctcccataagacagaaaatgccccttgatg

SEQ ID NO: 273072 - DNA, 100 bp, Homo sapiens
gatcttcaacactagaagatatttgctgcagcctttaggcctcccagaagttcctgccgaatcgtcttcgtcacccccggggtccgaggtagcctccctt

SEQ ID NO: 273073 - DNA, 96 bp, Homo sapiens
caaagattgagacggaccactggcctggtcccccctcatttgctgtcgtagctgtggacaaagcttacaagttgctactggatcaggagcaaaaga

SEQ ID NO: 273074 - DNA, 100 bp, Homo sapiens
actccttgtctttgcaaacaaacagggcagcaggatgggtgtggaagcagtgatggcacttttggaggggaccccagataccccagcctgtgtagtgagc

SEQ ID NO: 273075 - DNA, 100 bp, Homo sapiens
gatccaggctgggacttttcaagaggggatcccttccgtttaaacatctccctctttcagtgattacagtggcgagatcttgaacaactgctgcgtcatg

SEQ ID NO: 273076 - DNA, 98 bp, Homo sapiens
ttgattatcgagcaaaactttgggcctgtaatttctgttttcaaagaaatcagctgagatctgtatctgtggacctgaatgttgatccctcgcttcag

SEQ ID NO: 273077 - DNA, 100 bp, Homo sapiens
ggccaaacaggagaaagtttcaactacactgaatgtggctcaggtaagaagagttcctgggtcaagtggtcaccttcataaaaccgaagacggggactgg

SEQ ID NO: 273078 - DNA, 75 bp, Homo sapiens
aaggagatgcaggagaaaatacggcattgctagatctactactatgcagctgcccagaccactcacacgacatac

SEQ ID NO: 273079 - DNA, 97 bp, Homo sapiens
gttcactggagtttgcattgtcttggctgttgagtgaagaaaaagagcaggaagtcattacatgtccccagaagaccatgtctgtgttgagctgtat

SEQ ID NO: 273080 - DNA, 100 bp, Homo sapiens
aagaaagaggtgggcaagatcctgtgcactgactgcggcaacgcggtaaaaatattgcttcggtgggtgacgcggtacagctgcccaagggcgttcgtaa

SEQ ID NO: 273081 - DNA, 100 bp, Homo sapiens
ttggtggccagcgccgcgcccggggccgtgcgctctcgggccactcggccgcagttccaaaggatggcctcaaaagccaggctgcatttgaagaaatgag

SEQ ID NO: 273082 - DNA, 101 bp, Homo sapiens
gatacaaacaactgccttggggatcaaaaactagttgagaggcttcatatgatatcgggaggcaattcagaagtgggatgaagcactacagttaactccaa

SEQ ID NO: 273083 - DNA, 100 bp, Homo sapiens
ctgggagcagaagggaggctccaagacctcatcaacaattaaggttgctccttgagggcaggacagttcttatggctttatccgttgcgtaagcacagag

SEQ ID NO: 273084 - DNA, 100 bp, Homo sapiens
aacaagtgtgtgcatctggctgttagaagaattcatgctcatccggatccttgttggatatccagaaagaagtctttagcatcaaaggatcaagaagtcc

SEQ ID NO: 273085 - DNA, 90 bp, Homo sapiens
tcagcaccaaatcccacagaggcatctgaggaagccgggaagccaagctccgcgggaccgcttcatgccgctgactggtgtagagcccgc

SEQ ID NO: 273086 - DNA, 76 bp, Homo sapiens
taatgactgtctcacattggccggcaacttgttccagggagaactaatgccgacgtgatgaccgccctgtcccagg

SEQ ID NO: 273087 - DNA, 101 bp, Homo sapiens
cccaggacctcattcaggcagaggatcgacaactgattattcgtgatattttacaagatgtgcatgataagatgttttgaacagagataaggatgaggagc

SEQ ID NO: 273088 - DNA, 89 bp, Homo sapiens
gagaggcgagctcgcgatgagtggtctcggcaggctcttcgggaaggttgctcttcaaaaaatggactcaatgctttcctcagaagctg

SEQ ID NO: 273089 - DNA, 98 bp, Homo sapiens
gaggacacctcggtggagaagctcaaggagcgctgcctcaagcacgtcaaaatgcagatcttcgtgaaaacccttaccggcaagaccatcacccttga

SEQ ID NO: 273090 - DNA, 100 bp, Homo sapiens
cggcgtcccgcggcctccccgagtcgggcgggaggggagagcgggtgtggatttgtcttgacggacaggaagatgtcacccaagcgcatagctaaaagaa

SEQ ID NO: 273091 - DNA, 51 bp, Homo sapiens
gatggcagccagtcagtggtggagaaagcgatagatctggctagcaaagca

SEQ ID NO: 273092 - DNA, 96 bp, Homo sapiens
cagagttcaaggaggccttccagctgtttgaccgaacagcaatccaagtcctgggcactgtcaaatggttcaacgtccggaatggttacggattca

SEQ ID NO: 273093 - DNA, 82 bp, Homo sapiens
gccatgtcgggttattcgagtgaccgagaccgcggccgggaccgaggtgcagggctcgcggcctggcaagaatgtacagctg

SEQ ID NO: 273094 - DNA, 91 bp, Homo sapiens
gatgggagaagtcacagacggaatgatggatacaaaggcctgggccgaggccactggtgcatatgttcccgggagggataagccagacctg

SEQ ID NO: 273095 - DNA, 82 bp, Homo sapiens
attgctctattaggacttgggaccttccttctgggtgtcccaaaagctgacctgcaagaagaggacgcagaaatagaagtag

SEQ ID NO: 273096 - DNA, 87 bp, Homo sapiens
tcagtctaatctcattgaaagccactcaacaactctttatgtgacaggacatggaggagtgaatcagcttgggggggtttttgtgaa

SEQ ID NO: 273097 - DNA, 75 bp, Homo sapiens
ggcgcccggatgggcagctgaggatactgtggcgtatgaggacctgtctgaggactatactcagaagaaatggaa

SEQ ID NO: 273098 - DNA, 88 bp, Homo sapiens
aaggacaacaatgagatcgtggacaagatcatgggcaaaggacagatccagactgtccaggacggccggcagtttctaaagtatgttg

SEQ ID NO: 273099 - DNA, 100 bp, Homo sapiens
gtggaggcagaggtggcatgggggcagggtgccatttgccgtgcctgacaaagtgctgtggccacagctgtgtgaggcgctcaacatgaaattcaaggcc

SEQ ID NO: 273100 - DNA, 117 bp, Homo sapiens
gattgggtgcgagaaaaatgtaaagacagagaaaggcatagacggggcatatctggaatctgaagttgctatatctgaggagttggttcagaagtacagtaattctgctcttggtca

SEQ ID NO: 273101 - DNA, 82 bp, Homo sapiens
gccgaggggcactgcagctgacaagagcacagacgcagtcttcagcaaggaagtgctgggaacgccctggagtgaacccagg

SEQ ID NO: 273102 - DNA, 101 bp, Homo sapiens
aaaagcccggattcaggattcagatgaaccagagcaggcagatggcttgtgcagaagattggagaaggcttgtattagtcccaagccacagaagccatggg

SEQ ID NO: 273103 - DNA, 98 bp, Homo sapiens
gcgtctccttgaacgttgtcccgcctgggattgcgagatgctcagtgacctccaggagtctgtggccagctctcgcccccaggaggtgtcagcatacc

SEQ ID NO: 273104 - DNA, 89 bp, Homo sapiens
cggcggttgcgggggggaagtgactgggcggtgccggcgccggagacgatgccgttgcccctccagccagcgtcaggtgcagaatggcc

SEQ ID NO: 273105 - DNA, 74 bp, Homo sapiens
tgcagtgattttaaccaaggcagttggtggaaatgagatacactgcctctaggactgggacagatagccactga

SEQ ID NO: 273106 - DNA, 100 bp, Homo sapiens
atcctgtttgaccaggcccagaggtccgtgcggcagcagctccagagctttgtcaaagagcttgcgaggatccctggaacgcctccagctgggatacgtg

SEQ ID NO: 273107 - DNA, 100 bp, Homo sapiens
cgactgtgattcctccaccacctcactctgctccttccctgttgccaatgtctcgctgactaagggtggacgtgatcggtagagacggggtttcaccgcg

SEQ ID NO: 273108 - DNA, 100 bp, Homo sapiens
gatggaagcaggtggaattatgccctgttggttccaatgctgggattggctgcttttcaaggtggtcttctgccctgttaaagaagccctggaggtggac

SEQ ID NO: 273109 - DNA, 75 bp, Homo sapiens
gtgaagtggaaaggatggcccccaaaagctccacgcaggagatcggtgaggagctgatcaacggagtcatctact

SEQ ID NO: 273110 - DNA, 96 bp, Homo sapiens
cggcggtcgacatgttccaggtcccggatagcgagggcggccgcgccggctccaggaatgggcaaagaagtggggaatctgctactggaaaactca

SEQ ID NO: 273111 - DNA, 75 bp, Homo sapiens
ctggctgtttgaagaaagggagaaggaagtcgatggcctacacaagcatctgggcaacactgtcaatgtggaggt

SEQ ID NO: 273112 - DNA, 75 bp, Homo sapiens
cagagaagttcagtgcccagctctactgagaagaatgctggtccaaattccaagcctgtagtgtccttcattgct

SEQ ID NO: 273113 - DNA, 98 bp, Homo sapiens
gtgggcaggaaagcagcgggactttcagaagggagaattccacaagttggctgatgccaagatatttttgagcgactgcctggcatgtgacagctgta

SEQ ID NO: 273114 - DNA, 75 bp, Homo sapiens
cgcttctatatgtttcattccttcaagcaattcccaagatatatggacaagaggaaagacccttcttccgttgat

SEQ ID NO: 273115 - DNA, 88 bp, Homo sapiens
gaacagttaatcctcaatttaagcctgatctaacccctagaaacaggctttcaaattcacctcacggaccatctgctaaattccttgt

SEQ ID NO: 273116 - DNA, 90 bp, Homo sapiens
gtgcatcaaaggtgtgaacacaggcatttataagacgctgtttggcatatcgaaaagaagatcgatttgatgtgcaccagctggcaaatg

SEQ ID NO: 273117 - DNA, 100 bp, Homo sapiens
agatggctcgcgagcaaaaccaccatacctgggaccagggcgccaataacagctgagcgggctttggacaccatgaactttgatgtgattaagggaaagc

SEQ ID NO: 273118 - DNA, 100 bp, Homo sapiens
taagacattaggagaaaaaatcgactcctatgatgtaataataaggattccaccagtactgttgctgctcttctcatagacttcaaaagctcattgcttc

SEQ ID NO: 273119 - DNA, 90 bp, Homo sapiens
gctgtacaatggtggaagcctttgacaggcagccaactttgaagggtgatgaaaagcctgtggccagtgttcgtcctgtgcagtccaccc

SEQ ID NO: 273120 - DNA, 140 bp, Homo sapiens
gttcctcgttttatcctgatggtggagatcaggaaactgcaaagactgggaagttcttaaaaagggataaactggcgttgagcaggaacattgagaagctagagggggagctcagccagtggaagatcaagtatgaggag

SEQ ID NO: 273121 - DNA, 90 bp, Homo sapiens
ctagagcaaggcaaagagccctggatggtggagagagtggtgtctggaggcctgtgtccaggtgcagcggaactgctgcctgacgctctg

SEQ ID NO: 273122 - DNA, 73 bp, Homo sapiens
accgcaaaagacgaagtgaccccaacttcaagaacaggcttcgagaacgacacaactcagatgggaagttcat

SEQ ID NO: 273123 - DNA, 75 bp, Homo sapiens
catcttctggacctttgtccagaaactggcgatggaatatgagaggagccctctggaaagaaaaggacagaccct

SEQ ID NO: 273124 - DNA, 100 bp, Homo sapiens
atcacccctggccgcgggcgtcgttcagggtcggagggagaagatggctttcaggtagagttggagctagtggagttgactgtggggactctggatcttt

SEQ ID NO: 273125 - DNA, 75 bp, Homo sapiens
gacgggcacatatgtccaggaggagtctccggaaggcagtggagctactgctgtggttcaggcagccctatgcaa

SEQ ID NO: 273126 - DNA, 75 bp, Homo sapiens
attgctgagtgcctggcagatgagctcatcaatgctgccaagggctccgaccaggccatcatcacgctccgcgtg

SEQ ID NO: 273127 - DNA, 82 bp, Homo sapiens
ttggacccttgacatcaaccagttactatttggtacgtttcagcccaaacctggactcctatggatggctggtatctggggg

SEQ ID NO: 273128 - DNA, 50 bp, Homo sapiens
ctagagacagtacaaggagggagagaggagcaatttttgatgaatctgcc

SEQ ID NO: 273129 - DNA, 100 bp, Homo sapiens
cggctgcccactcgcctcacctgagcctggctatgacagagactccactttcaatgtgtttgtgggaaaaggacagctgatcacagggatggaccaggct

SEQ ID NO: 273130 - DNA, 73 bp, Homo sapiens
agaccatcatgctgcgcggccttcccatcaccatcacagagagcgataaggtggtcttctgccctgttaaaga

SEQ ID NO: 273131 - DNA, 75 bp, Homo sapiens
gtgcgcttccggatcgggggcaagcggaaggtgatgcccaagatggaccaggaaaccgaggtacttggagcttga

SEQ ID NO: 273132 - DNA, 75 bp, Homo sapiens
tgtccagtgtcagtaaacaagagaccatcatgagacatcatacgcttcggcaggggtgacagaggccgtggtcgt

SEQ ID NO: 273133 - DNA, 100 bp, Homo sapiens
cgacgccacttcgtgttgggaagtgggagcgggagggccgggcaattcccgaccgaaccaaacggagtgaacaaccaaggcgatgggctgtaggatgttg

SEQ ID NO: 273134 - DNA, 98 bp, Homo sapiens
agtactgtgggtgatatttgcctttagtgcactcttctccttcacagtaaagtggctggcagagactccccctaatgggccagattgtggctatggct

SEQ ID NO: 273135 - DNA, 89 bp, Homo sapiens
ggtgaatttccatgtcaacatagtccaggcctcagaaaacggaatctctgtctgtgaccttctcctgccccatttcacttgctcaacac

SEQ ID NO: 273136 - DNA, 50 bp, Homo sapiens
cagacacgaccagtgaaactaacaagatgtgggcgctatctccaactgtc

SEQ ID NO: 273137 - DNA, 95 bp, Homo sapiens
atcgcagtcaatatcgcgctggagcgcttccgatacggggaccagagagatgaagactggcccatttgcagagcactccaaccagctgtggaaca

SEQ ID NO: 273138 - DNA, 90 bp, Homo sapiens
gtctgacatccacactcgaaaacctttccccgtcagcaaagcatcacaatcaggtgaagaaggaagttttagccatgggtctgttattga

SEQ ID NO: 273139 - DNA, 74 bp, Homo sapiens
aggtacctctccttttccctctccctttccctaagtttgcagttaacatgtttcgaacattaccaccttcctcc

SEQ ID NO: 273140 - DNA, 50 bp, Homo sapiens
gcctcccaaagtgctggtattacaggcagctatttttgctatgataatcc

SEQ ID NO: 273141 - DNA, 101 bp, Homo sapiens
aaaattgttgaaccatacaataagatagttgcccggactgcacaactagcaagacttcaggacgtgttcctcatgatccggcgccacaagaccaccatctt

SEQ ID NO: 273142 - DNA, 100 bp, Homo sapiens
gaaggcatggactcggagattggctgcctcatccgcttctatgcaggcttacgagaggccccagaaacattcaactctccattatgacacgggcctccca

SEQ ID NO: 273143 - DNA, 82 bp, Homo sapiens
aattcctgacgttcattgatctggtcctggatgcctcatcccttagtttcaacaccagattgaaatggtttgccatctgctt

SEQ ID NO: 273144 - DNA, 83 bp, Homo sapiens
gcaaagctgctctctgtgcttgcccaggtctttacagagcttgcccagaagctgctgctggtggtgacaatgtcaaataacgg

SEQ ID NO: 273145 - DNA, 75 bp, Homo sapiens
gttcggccaccggaggagcgggagccaagcaggagtgtggccatctggggccgtgtggtatttgccactcaggag

SEQ ID NO: 273146 - DNA, 75 bp, Homo sapiens
cagatgttgtcaaggtggcctaccaggaggccaggggtgtcgccatgatgatgaaactgaggcacaaactgctta

SEQ ID NO: 273147 - DNA, 75 bp, Homo sapiens
tacgaatccaaaatgcaatcaatatagctcaggtttatcaggtagaagatgtgtgtgaagaagaaatgccagaag

SEQ ID NO: 273148 - DNA, 101 bp, Homo sapiens
ctggccgcggccttcgggctgacgctgctgctcgccgcgctgcgcccttcggccgcctacttcggacttcccaagtaagaagcggaagaggagccgctgga

SEQ ID NO: 273149 - DNA, 82 bp, Homo sapiens
aagaattgactggtgacatgcagttgtccaaaagtgaaattttacgaactcaggagatcatgaatcagacagataaaaatca

SEQ ID NO: 273150 - DNA, 96 bp, Homo sapiens
atatgggccacatgcagtttctctcaggtacgtgaacacactcctgaaactcatcccgctggtgctgggtctgcaggaacaactgcggcaggcagt

SEQ ID NO: 273151 - DNA, 75 bp, Homo sapiens
cctcccagtttgaacctctggacatgaagctcatgagcccacagaatctgattgcccagtctcagtctggcactg

SEQ ID NO: 273152 - DNA, 82 bp, Homo sapiens
agagtgccggtggagaagccgctgggacagaaagaacaacccggagccctggaaccgcctgagccccaatgaccaatacaag

SEQ ID NO: 273153 - DNA, 50 bp, Homo sapiens
ttcctgttgatggtgatgaagacagtggccaacagtgttgcaaacaggaa

SEQ ID NO: 273154 - DNA, 98 bp, Homo sapiens
gagcatgtcgaccccggcccggaggaggctcatgcgggatttcaagcggccataggaaaaggatacagagtagagtttcatgaacctgaaacttggtg

SEQ ID NO: 273155 - DNA, 135 bp, Homo sapiens
gactccttgggggtcgagcacataacggggttcgggtgtctcgtgtgtgaacatcacaggattaaactgcaaatatctcatgaagctgctgcctgtatcactggtctccgggcagccatggaggctttggttgtt

SEQ ID NO: 273156 - DNA, 88 bp, Homo sapiens
cgagaaccgtcagtttgagccagatggccaagaagcttgagagaagaaaaatttcagaaaaattgtctcaatttgactagaatatcaa

SEQ ID NO: 273157 - DNA, 134 bp, Homo sapiens
ggacagtgggaaggccaaggctaaggcagtatctcgctcacagagagctgggctacagggtggtgacttcacacgccataatggcactggtggcaagtccatctatggggagaaatttgaagatgagaacttca

SEQ ID NO: 273158 - DNA, 100 bp, Homo sapiens
ctgcagtggatctgcgccaaggcctacggccgagatgagccccgctagggccgccccgcgctgagagcccagccccgccgctgcccgcccgccatgtctc

SEQ ID NO: 273159 - DNA, 75 bp, Homo sapiens
ctaaagttcgtgaatctcaacttacccttatagttgcctggatcaaagcaaacctaaatgtgtacatctcccgag

SEQ ID NO: 273160 - DNA, 90 bp, Homo sapiens
ttgcattggatattcgcatgcctggggttacacctaaacaggcgatgtaccaattttgacaactgaagacgacatggtttctcagccagc

SEQ ID NO: 273161 - DNA, 75 bp, Homo sapiens
agatgcaggaatcaggagagcaaactataaggaaaaccagcattggaatcagctgattcaggatgctcagaagcg

SEQ ID NO: 273162 - DNA, 80 bp, Homo sapiens
caaaccagggctcgccatgaagccaggttctgcggggagtgtctccagccctgcctgcaggtgccatccccgctgtgccc

SEQ ID NO: 273163 - DNA, 75 bp, Homo sapiens
cttcactcacagctaccctttttgctggaggatgaagcctgctgggagcgtgaatgacatggccctggatgcctt

SEQ ID NO: 273164 - DNA, 82 bp, Homo sapiens
gccagaaaagtggatgctgccccctcaaggtgctatctcagagaccaggagccagcaccgctctttgaccttgccatgcttg

SEQ ID NO: 273165 - DNA, 100 bp, Homo sapiens
ggctattggaaggaggagattctgaagataaggaggtgctgggtaggccaggtttcagcatcgcagacaagaagcgcaggacaggctgcattggggccaa

SEQ ID NO: 273166 - DNA, 75 bp, Homo sapiens
caaggccagccggactaaaacaaagtccaagtggtaagaagttcagaagcaagcctcagttggcaaggtacctgg

SEQ ID NO: 273167 - DNA, 100 bp, Homo sapiens
gtcgacgactgggacaatgagaacagctctgcgcggctttttgagcggtcccgcatcaaggctctggcagagttgtctctgtgggaagtttgtcctccgt

SEQ ID NO: 273168 - DNA, 74 bp, Homo sapiens
tccaactgtgggaactctttccagcttgtgtctgatggaacttgctaaggaagaaaagtgtgaatttctgccat

SEQ ID NO: 273169 - DNA, 112 bp, Homo sapiens
catagaggcaagtgggggaggagcgttccttgtcctccctctgcacaaggtgccatgcctctgcaactcctcctgttgctgatcctactgggccctggcaacagcttgcagc

SEQ ID NO: 273170 - DNA, 50 bp, Homo sapiens
ggactccctggaaacctagaaatggtgacttaagagattaaaattaattt

SEQ ID NO: 273171 - DNA, 100 bp, Homo sapiens
gagatttcatgaagatggcgccaggacgaaggccctactgggcaagtcttatgatgtaatcagcgcgatttcacttcctgaatttcgatgaattctaaga

SEQ ID NO: 273172 - DNA, 50 bp, Homo sapiens
ggaacacttcagtgcattcaagatgccggtggccgtgggtccctacggac

SEQ ID NO: 273173 - DNA, 50 bp, Homo sapiens
aaaacctgaaagatgtctcagcaatgaatcgctccctggctaatgtgatt

SEQ ID NO: 273174 - DNA, 82 bp, Homo sapiens
ctcgggtcatcacttggacaacagaacccaaaagttctgatgttcggaaggcttgctagctatccatgtgatgtcttctacc

SEQ ID NO: 273175 - DNA, 75 bp, Homo sapiens
gtgaaatcatcaacacccacactacctattctgttcttgggacccaagcttcttggctccagcccactcccccac

SEQ ID NO: 273176 - DNA, 80 bp, Homo sapiens
gcagataaccggaaaatcacacctcttatgtcagcatttcgcaaggctgcacggttaggtattttacctgtgggtcgagg

SEQ ID NO: 273177 - DNA, 100 bp, Homo sapiens
ggcgcggagcgcgcgtgtggtccttgcgccgctgacttctccactggttcctgggcaccgaaaggtttctgacaaagcgggagcaaaaattaatgcaacg

SEQ ID NO: 273178 - DNA, 100 bp, Homo sapiens
ccgtaggcaggaccccgggacaccctggaagccaggaaatgctttttaaagatgacatcaggtatctgttgacaatggacaaactatggcggaaaaggaa

SEQ ID NO: 273179 - DNA, 85 bp, Homo sapiens
cttccctctgcggccgtttgtcattcccttcctgaaggttctgcggggagtgtctccagccctgcctgcaggtgccatccccgct

SEQ ID NO: 273180 - DNA, 118 bp, Homo sapiens
aaagctttggatcacctgcggaatggggtagatattaacacctgtaaccaggtactccaaagattcaggtttactcacgtcatccagcagagaatggaaagtcaaatttcctgaattg

SEQ ID NO: 273181 - DNA, 100 bp, Homo sapiens
ctatcagcaacaattcccagaccttcagcccgtggcccggatgcaggacagacccctcaggttgttcaaggctacaagcccccggggagagccccaggat

SEQ ID NO: 273182 - DNA, 82 bp, Homo sapiens
cccagcctcgttgcggccatcgccctgccggaccgcgcctcaggctcccccagatctctggaaacatggctacagaacatgt

SEQ ID NO: 273183 - DNA, 100 bp, Homo sapiens
tcgccatggagtttgtgatgaagcaggctctaggagggagcagattaagcgagtaaaagactcggatgatgtacctatggtgctagtgggaaacaagtgt

SEQ ID NO: 273184 - DNA, 100 bp, Homo sapiens
aacggggttcgggtgtctcgtgtgtgaacatcacagctatatgttctcctttcagccaagacctttcaccagtgcaggggatagaagattcattccacaa

SEQ ID NO: 273185 - DNA, 82 bp, Homo sapiens
ttctcccttgatccgggagtctttccactgggttcatcagcaccaggatcggggagagacctttcagtgccagctgtgccct

SEQ ID NO: 273186 - DNA, 74 bp, Homo sapiens
ccaccttgggcatcatgcaccacaacaaacaggcccatcaaactccagagaagagagtgaatactggagaagaa

SEQ ID NO: 273187 - DNA, 100 bp, Homo sapiens
tagttgtgtatgatgtgacagatcagatattgcaggagaagaggctgggtccgatccacactcattatgtctgttccacaaacaagtacttcaaaaggga

SEQ ID NO: 273188 - DNA, 98 bp, Homo sapiens
gggaggtgggtactacacaaccgtctccagccttggtctgagtggactgtcctgcagaaaaatggctacaaacttcctagcacatgagaagatctggt

SEQ ID NO: 273189 - DNA, 74 bp, Homo sapiens
aggagctggcggagagcggcctgcgggcgatcgggccgagtcttgaatccagataatagttttgaaatactggt

SEQ ID NO: 273190 - DNA, 100 bp, Homo sapiens
ccaagatggcggcagcgatgcctgcccggctgttggggtggcggtgacgacaggcagcaaaagaccaggtgattgctggcttcaaccgccttcggcagga

SEQ ID NO: 273191 - DNA, 82 bp, Homo sapiens
cactgcacgcttgaacttctccggacagaggaacatctgtaccctctcaacgaggatacgaagcgttttcggcttcctgccc

SEQ ID NO: 273192 - DNA, 100 bp, Homo sapiens
aggcgccggccccttgggccccctcaagccgcggtgtactccagcggccccctgtggcctctccatccgcggcggattctgagaacaataactccacaat

SEQ ID NO: 273193 - DNA, 82 bp, Homo sapiens
tgcctttgaaaatcaacgacaacttgagcacaggtcaaaatgcagatcttcgtgaaaacccttaccggcaagaccatcaccc

SEQ ID NO: 273194 - DNA, 135 bp, Homo sapiens
tttccaaaaatccctagagagagcatcacaatataatattaggggtgttacgtataggctcactcaaggaaaaccgtcttcagatacagtccctaagcccaagagagccccaaaacagaagaaagtagtagaggc

SEQ ID NO: 273195 - DNA, 99 bp, Homo sapiens
aaacaataacatgtagaaacatatcagctgttgggacagatatggcttttctaaagactgctttggaaatggcaagaacagcagtatattccttacaca

SEQ ID NO: 273196 - DNA, 82 bp, Homo sapiens
cgccccggcccggccccgcgaggactgggaggtgctggtcctagggaagctcaagtgggacctggctgctgtgattgcacat

SEQ ID NO: 273197 - DNA, 75 bp, Homo sapiens
aagaaccaacccccaaattggctgggacagtgatgtaaattggagtcaaccaggtgaaaagaagttaactggggg

SEQ ID NO: 273198 - DNA, 80 bp, Homo sapiens
ttcggcagtccacccaccgccgccgcctcccaggaaccttcagaagtttagtctttttggagacataagtgttctacaac

SEQ ID NO: 273199 - DNA, 75 bp, Homo sapiens
tctgccgctgattgctatcacttctgcagaatccagtggtttggtaactctcattcgacatccatctgaactaat

SEQ ID NO: 273200 - DNA, 115 bp, Homo sapiens
gcccagccgaggtaccgctgaagaggaatcaattttgggagcatcgagtacagctgtccggcctccaacgagtgtgagatcaccaagcggagacgcaaggcctgccaggcctgcc

SEQ ID NO: 273201 - DNA, 120 bp, Homo sapiens
cgaaatccaaatcagagctcccaagtgatggaccctcccacagccaggcctacagaaccagtatctaccaaagcaaacacgactgtcatactgaagcatggagaagaaccatggacactg

SEQ ID NO: 273202 - DNA, 100 bp, Homo sapiens
tgttcccacagtcatgtctcagcgaagaagtcggagttcagcagccatcagaaccaaggcacagatagatcattatctaggacttgcaaataagaatgtt

SEQ ID NO: 273203 - DNA, 101 bp, Homo sapiens
cagaaatcacctatgtttacagcgacagagttgctaaaccttcccaggtgtattttggaggtacagttgttggcgagcaagctatgaaatctgaagatgaa

SEQ ID NO: 273204 - DNA, 90 bp, Homo sapiens
ggggatggcgtctccccgactccacctgagggactggctcctggggacctgaaggagaagaaggagaaggtggaggagaaggcaagccgg

SEQ ID NO: 273205 - DNA, 82 bp, Homo sapiens
cgcgggggaccgcggcccccagcagagcccgcctgcccggctgttaacacagaaatctgcctcctgggccatgccgcttcta

SEQ ID NO: 273206 - DNA, 99 bp, Homo sapiens
ggccggccttcgggctccatggacgggcgccgcgtccctgcacagcccgccgcagagattcttggtgccaccattgagaactccaggattgtcctgcag

SEQ ID NO: 273207 - DNA, 98 bp, Homo sapiens
ggacggggacagagagctgatgaagaccgagaaggacatcctgctgcgacctgagctggaggaactcaggaacaaacattctgcacgcttcaagctct

SEQ ID NO: 273208 - DNA, 75 bp, Homo sapiens
ttcaagaatgaagccgcagaccctcgtggtgaatgaaaactttgccattgatttgatagcagagcagcccgtgag

SEQ ID NO: 273209 - DNA, 100 bp, Homo sapiens
caatagttggagacattaatattggtgatggaactgtactggaacaatgggagaagctggtagcttataggaagccaagatgaccagaatgtttttaaat

SEQ ID NO: 273210 - DNA, 75 bp, Homo sapiens
agaattctggacaatcaaaacttaactcctggatacagatcagcttgaacgggtctttttacgacttggccatgc

SEQ ID NO: 273211 - DNA, 95 bp, Homo sapiens
agatgtcttcgcggacggtgctggccccgggcaacgatcggaactcggacacgggtcatggagtcctggagatgccctcaggcaccgggaagaca

SEQ ID NO: 273212 - DNA, 100 bp, Homo sapiens
aagaacaggatgatattgtttcagcagatgtggaagaggttatcaatactctggctgaccatcatcatcgtgggactgactttggtggaagtccttggtt

SEQ ID NO: 273213 - DNA, 75 bp, Homo sapiens
agatgatgtaacataccaagtctatgaggaacaagtgcagtcattggagaaatcgatgaagaaacagattctgcg

SEQ ID NO: 273214 - DNA, 97 bp, Homo sapiens
aagggtgcaaagtgggacgcggcacctacggtcacgtctacaaggcgaggcggaaagatggaatcgagagctccagatcatgagaaagctagatcac

SEQ ID NO: 273215 - DNA, 51 bp, Homo sapiens
ggagcttagggagagattgacttggatcctgaaactccgccacatctggaa

SEQ ID NO: 273216 - DNA, 74 bp, Homo sapiens
tctgtgaagccacacagtgtccagatacgaggttcttctcaccactaaatccaatacgagttcatattgatatt

SEQ ID NO: 273217 - DNA, 100 bp, Homo sapiens
acgggatcctccagttcctgcacatctaccacgccgtcaaggaccggcacaaggacgttctcaagtggggcgatgagctctaagcgaaagacatgaggcc

SEQ ID NO: 273218 - DNA, 88 bp, Homo sapiens
tggagcctcagttggaagcagccgatccagcctgcggagcctgtggggcaggtggccctcatgacactgacgctcttcccggtccggc

SEQ ID NO: 273219 - DNA, 82 bp, Homo sapiens
gaagaagactcccccacatctggatgccatggacaatattaccaggcagaaccaattctacgatacccaagtcatcaaacaa

SEQ ID NO: 273220 - DNA, 50 bp, Homo sapiens
gcctcctgagtagcttggattacaggctggagtgcagtggcgcaatctcg

SEQ ID NO: 273221 - DNA, 82 bp, Homo sapiens
ttgtggatcgctgtgatcgtcacttgaccggagagcaatggtgtgatctccgcacactgcaacctctgcctccagggttcaa

SEQ ID NO: 273222 - DNA, 123 bp, Homo sapiens
ctggccctctcgctgttgctggtctctggctccctcctcccagggccaggcgccgctcagaacggtgctggagaatctggtaaaagcaccattgtgaagcagatgaggatcctgcatgttaat

SEQ ID NO: 273223 - DNA, 50 bp, Homo sapiens
ctcgcttgcagttcagcgaccacgcgccatcatgaccgggtcctataaca

SEQ ID NO: 273224 - DNA, 75 bp, Homo sapiens
tggaccgcaactgtgacacaggagcctttgagctcatctataagcagatgataacaccctatgcccattgtcctg

SEQ ID NO: 273225 - DNA, 101 bp, Homo sapiens
gacacaatggaagtagtagttgttgagcagagggaaagggataggagaaggatgtggactgcagtgctgcagtgccagctccagggttccttgaaaagaaa

SEQ ID NO: 273226 - DNA, 100 bp, Homo sapiens
gaccatcagtgagagcgagctgagcgccagcgccactgagctgctgcaggactacatgctgacgaactggacataagtgtgtgcttcactttaaaccgtg

SEQ ID NO: 273227 - DNA, 74 bp, Homo sapiens
ttcagccagcacactcctcgcgagcaagggcattttggaagtgtcaaaggccagggacatccctgttgtcatcg

SEQ ID NO: 273228 - DNA, 101 bp, Homo sapiens
gggctgtgggacttcgaaggagggctctcctgtctgccaccatcctgggttgacaattctacacaaggaggtttctgagtcccttcaacatgatcctggga

SEQ ID NO: 273229 - DNA, 80 bp, Homo sapiens
tagtccagaatacaccaaaaaaatagaaaacctatgtgctatgggctttgataggctggctccaaggctgcatctctcca

SEQ ID NO: 273230 - DNA, 102 bp, Homo sapiens
ccgagcgggcggcttcctggcctgggcgctccggtggcggcggagggactggtgattgcagctggaagtgcccatgaccgagctggcgtcctccgggggcgg

SEQ ID NO: 273231 - DNA, 74 bp, Homo sapiens
agagggaaacattcactgcacagaaccgggaagcaggaattgaggaacagattctccagccatggattgtggtg

SEQ ID NO: 273232 - DNA, 75 bp, Homo sapiens
ccgactaatatccagaggagaataatttggaagactgttgtgggctgcttttattcgtgatgaaatgatgccagg

SEQ ID NO: 273233 - DNA, 76 bp, Homo sapiens
gttagcctttgcagtctcgacataagtctccagaaacatgacaaggaggactttcctgcctcttggagatcagagg

SEQ ID NO: 273234 - DNA, 75 bp, Homo sapiens
gattaatgaaactctagcaaatcaccctgagtgggcaaagaaaaatgccagctgtgggacaaggagtgcaggccg

SEQ ID NO: 273235 - DNA, 75 bp, Homo sapiens
aaaagtcgcagcgagctggagccgccggagaacgtggaatcttgtagaaggaagatcagcattcataaaaaatat

SEQ ID NO: 273236 - DNA, 78 bp, Homo sapiens
ctgtctctaggaatttcactactctaggtttatcttgcagattatggactttcctacagatattgtcccaatgggaac

SEQ ID NO: 273237 - DNA, 80 bp, Homo sapiens
ctatgactttcaacgggactattatgatagccctttctaaggcacaaaatgatgtgatggaaatgaagatgcagtcagag

SEQ ID NO: 273238 - DNA, 90 bp, Homo sapiens
cctcagagctccagcgactgtaccccaatggggtcccctttaagactcctgtcaagtccgcatcaacacgaccatcctgtggcaccaggg

SEQ ID NO: 273239 - DNA, 100 bp, Homo sapiens
atccactctaccaccccgctgtcttccacacggggcactgggcttcctgccatcaccgatgtgcctaggcgcatttcagtgcacgatctgattttctgga

SEQ ID NO: 273240 - DNA, 104 bp, Homo sapiens
ctctggcggaagccatcagctatggagataggcagatgagttgcagagaacacatcttagaagatgaaaaacctgaatctatcagtgacactactgacttggct

SEQ ID NO: 273241 - DNA, 100 bp, Homo sapiens
cagcggggctgagggcacctggttaatatctaactgcaatctcgcctccagcctggctcgcagttcctgtgaacccggctggagtgcaatggcgtgatct

SEQ ID NO: 273242 - DNA, 51 bp, Homo sapiens
gcacctttggagggaatattatccaggacgatgccccgaattcccaccctg

SEQ ID NO: 273243 - DNA, 83 bp, Homo sapiens
cacttcttgacgctctgctccagaacctttacgactttgtgcctccggagccagcgtggtggccatagacaacaagatcgaac

SEQ ID NO: 273244 - DNA, 75 bp, Homo sapiens
cgccagcaggcggccaatctgcttcaggacatggggcagcgtcttaacgtcttcctgtccacttccaacgaagcg

SEQ ID NO: 273245 - DNA, 90 bp, Homo sapiens
ttcagactggaagccagaagcaggcctttctccaccaaggaaaaaacgagaagaccccaaaaccaggtgcaaggaaccatcttcccagct

SEQ ID NO: 273246 - DNA, 82 bp, Homo sapiens
cgcgagcttgaacgcagcgtgatgaaggatttgggggcagagcacttggcaggtcatgaaggggtccaacttctcgggttgt

SEQ ID NO: 273247 - DNA, 108 bp, Homo sapiens
ggcaaggtgatccagcaaggtcggcagagcaaggggcttacgcagaaggacctggccacggcacttccgttccggcgcccctccggtcatcaacccgctgggcaccag

SEQ ID NO: 273248 - DNA, 82 bp, Homo sapiens
gaaagccgaagataccagcagacgatggggagcttgcagcccctttgccactcaggaaacccgaaccctagcggagattgcc

SEQ ID NO: 273249 - DNA, 75 bp, Homo sapiens
tgagatcgtcaagtctcccagcgaccccaagcaataccgtgtctttggtgcaacactaacaaggcttgtctggac

SEQ ID NO: 273250 - DNA, 76 bp, Homo sapiens
ctgccccattctgagagcagcagcctggctcctggtggctccagcagcaggatcacagaagaactgcagcttcctg

SEQ ID NO: 273251 - DNA, 82 bp, Homo sapiens
tgggattcaaatgaaagtgaaaatgttagaagaactcgtgagccggattgatggtcagctggccgccggcacctgtgagatt

SEQ ID NO: 273252 - DNA, 100 bp, Homo sapiens
ggaggttcgagcgctgttctcgctccggagccgctgcacatttcgagcttgtggacaaatgtataggatcaagaattcacatcgtgatgaagagtgataa

SEQ ID NO: 273253 - DNA, 82 bp, Homo sapiens
ccgcacccgccttttctctctctcctctggcaggatgaggcgtgcaggcctggctggaggaacagcagaccttagaggaggc

SEQ ID NO: 273254 - DNA, 88 bp, Homo sapiens
atatacaagatggccgcagtcggcaaggagagacgtcgctgaggggcttgcctgaagcgagggcttctggagctatttgacagcgaag

SEQ ID NO: 273255 - DNA, 75 bp, Homo sapiens
gagaagcagctgcagctcattaccagtctgaaggagcaaggcaggtgacaaacattaccaccccagctgtgcacg

SEQ ID NO: 273256 - DNA, 95 bp, Homo sapiens
caagcaggaatggaatcctacgatgaacaaaaaccagttgcgaaatggtctgaggcagagtgtggttcagcaattcaaatgagtgtctccagaat

SEQ ID NO: 273257 - DNA, 74 bp, Homo sapiens
agagaccagggctcctgtggctcctgctggatactccgtgagcacaaagcagtcatcattcagaagcgagtccg

SEQ ID NO: 273258 - DNA, 95 bp, Homo sapiens
caggaggctaagaaagtggtgaatcccctgtttgagaaaaggcctaagaattttggcattgccggaagtcggtgcagcccacctcagaggagcgc

SEQ ID NO: 273259 - DNA, 73 bp, Homo sapiens
tctatataccagtcaattgagtggtgttaaaggttatgagtccagggacaatatggagctcatagtgaagcag

SEQ ID NO: 273260 - DNA, 100 bp, Homo sapiens
ccttgggtgaaattgttaggcgtggagagggagtgatgtcttccagactcggtgctgtacccgccattagtgatgatgaaccaggttatgaccttgattt

SEQ ID NO: 273261 - DNA, 75 bp, Homo sapiens
gcaagaccatcatgctgcgcggccttcccatcaccatcacagagagcgatgtggatgagcttttagaaaagtaca

SEQ ID NO: 273262 - DNA, 80 bp, Homo sapiens
atgttgccctgagttacataaataggtaattattcgaggtggaggacatattttaccctatgaccagcctctgagagctt

SEQ ID NO: 273263 - DNA, 50 bp, Homo sapiens
gtcagctcagtgctgtgcgggccagattcattccacttaaaacctgaaaa

SEQ ID NO: 273264 - DNA, 82 bp, Homo sapiens
ggcacacgtccaccgcctccaccacgagggcaggttcagagaaggagtggggaaggccagggccagattctgcagcgcttcc

SEQ ID NO: 273265 - DNA, 83 bp, Homo sapiens
gcgatggctttgacggacccggcgcaggcagattattgccagagggctgcttgatatcttccgggacttcggtaacaatgaag

SEQ ID NO: 273266 - DNA, 71 bp, Homo sapiens
gctaaaaacaagactggggctgctcccatcattgatgtggtgcgatcgaatacttctgacaattggagtgg

SEQ ID NO: 273267 - DNA, 51 bp, Homo sapiens
aggactgggaggagcatgtcaacagttgtatcacggactgattcaccgagc

SEQ ID NO: 273268 - DNA, 82 bp, Homo sapiens
ctcgcgtcgcatttggccgcctccctaccgggccgcgatgggcctcttggaacattggtgtgttcatctgcattcgatgtgc

SEQ ID NO: 273269 - DNA, 96 bp, Homo sapiens
cttctctgaggacgagcacctgccgcgtggcggggctgtggagcggccgctgaccccggaaaccagcctggacaccaagtctgtgtcagaaggcca

SEQ ID NO: 273270 - DNA, 85 bp, Homo sapiens
ctgaaggaacgcgacggcggcgcccgcagatccagtccttctgtggaacttctgaacatcttttattagtggaaatattttctac

SEQ ID NO: 273271 - DNA, 128 bp, Homo sapiens
cgcgtccccactgaccagcgcgcaggacagcgccttcctcaacgacgcggacatggtcatgagctttgtgaacctggcttaaagcttttcaagccaggccaagaagctgtgaagtaccagggtcctcg

SEQ ID NO: 273272 - DNA, 74 bp, Homo sapiens
tgaggacacatggcctggagttcattctttaccacattttaagccagtctgactgacagtactccacaagcttg

SEQ ID NO: 273273 - DNA, 100 bp, Homo sapiens
ctggctcagtattcacagggaaagctgtgaggatatgatggacgtggtcacctgcatgacctttctgagtacgatgctgagtattccacgtggaacagag

SEQ ID NO: 273274 - DNA, 97 bp, Homo sapiens
ttgatgtggatcgagatgccaaaaagctgaacaaagcctgcaaaggaatgggttcgtaatgttcttaatgatgcagtggatttactggaattccgtg

SEQ ID NO: 273275 - DNA, 98 bp, Homo sapiens
cggttgctaagacttggcgaagcgctgcgctcgcgcccggatccctcagggtttccaggcctgaggtgcccgccctggccccaggagaatgaaccagc

SEQ ID NO: 273276 - DNA, 83 bp, Homo sapiens
agaagcagttctacaaggcgagccagcccgcggcgccatggctcacgtcggctcccgcaagcgctcgaggagtcgcagccggt

SEQ ID NO: 273277 - DNA, 100 bp, Homo sapiens
cgccaaagtggagagtgcgattgcagaagggggtgcttctcgtttcagaaatgctccacctgtaagaacagaaaatcgtcttatagttgagaatttatcc

SEQ ID NO: 273278 - DNA, 82 bp, Homo sapiens
ctgggagctggcatgctggagccgccgttcaagcctgacccttgatgacttacaagccctcaaggggaagcattttctcctg

SEQ ID NO: 273279 - DNA, 96 bp, Homo sapiens
cttggtggccttgcatggtttctgcagatccactccttcacagctataccaaacttaaaggccgcccatgcgtggactgccacgccttcgagttca

SEQ ID NO: 273280 - DNA, 75 bp, Homo sapiens
attccaagtaactcttatttgcctctggacgagaccagccagatgagcgacctcccggtgaaggtgatccacgtg

SEQ ID NO: 273281 - DNA, 75 bp, Homo sapiens
tatattccatgctatcagctttttaggaaaatgtttataggaggccttagctgggacactacaaagaaagatctg

SEQ ID NO: 273282 - DNA, 100 bp, Homo sapiens
aggtccggggcttgccctggtcttgctcggccgatgaagtgcagaggtttttttctgagtcatttgatgtggtcacaaaatgtgtgagtttcacactaac

SEQ ID NO: 273283 - DNA, 82 bp, Homo sapiens
ccgagactctagaagaaatgccctccgggtcacaggataaggaatcacatgcagcccaactacagattcttatggaattcct

SEQ ID NO: 273284 - DNA, 83 bp, Homo sapiens
atgaatgtaaatgaaatattcatggcaatagaaactgttcaggttccattatcaaaacgagcaaaatttgttggacctggtgg

SEQ ID NO: 273285 - DNA, 100 bp, Homo sapiens
cggcgcggcgcaggcaccggcccggggagaggcaccatgagcgtgtggaagccagctctccaggccacggaagtcctctgagcagcctgttaccttctgc

SEQ ID NO: 273286 - DNA, 102 bp, Homo sapiens
ccccgacacgctgcctgctgttgccacactcctcatggatgtcatgtcctacttcaatggggaggcttcctcaggatctcgaacctgcggaaggaggaccag

SEQ ID NO: 273287 - DNA, 90 bp, Homo sapiens
gaagatcttctctatggaagaatgtcattcagaggatttaatcctgaggttgaggtgcagtagacattgttgcaatcatgatcggcaatc

SEQ ID NO: 273288 - DNA, 90 bp, Homo sapiens
cggacatcgtcaaggtggccatagaatggccgggcgcctaccccaaactcatggaaattgatcagagtgatcagcagctggactgtgcct

SEQ ID NO: 273289 - DNA, 75 bp, Homo sapiens
caacaatattctttaacagtggactatcattgaaaacagagcctgtggacatctctacagcaatgagtgaacggg

SEQ ID NO: 273290 - DNA, 82 bp, Homo sapiens
acagttagtcacccacctacatgttgagaacaatgagatggtggagctacagagaatacggatgaaggatgaaatccgagaa

SEQ ID NO: 273291 - DNA, 118 bp, Homo sapiens
tcttcagtaagtcccaggggctagcgactcgccctagaggcgatagatatgaagcaaaagctgatgaagcattgaaagccaaagaaagaaatgaggaagaagcaaagagaagaaagga

SEQ ID NO: 273292 - DNA, 100 bp, Homo sapiens
gaaatctcgaaggggacctcatgtccctgtgggacacaatgcccccaaggccgctttgtagttcagaatgtttctgcacagaaagatggagaaaaatcta

SEQ ID NO: 273293 - DNA, 100 bp, Homo sapiens
atggggaagaggaagaggaagagctcatcctaatgtccaaaaggtggtgctagtatcatctgcgtcagatattcctgttcagtctcatcgtacttcggaa

SEQ ID NO: 273294 - DNA, 100 bp, Homo sapiens
cagaaggaactagaagaattgttgggacatcaggtcgtcctaaaggcatgtcatctatgctccaagcagccacaacaagtatgcaggggagtcattccca

SEQ ID NO: 273295 - DNA, 135 bp, Homo sapiens
cgggctccttccgctgcacctgtgcccagggctacgcgcccgcgcccgacggccgcagttgcttgggagtagtgaagaagttctcactgcagaagattgtgaaaatgtctatcatctggtttattcagctcaccg

SEQ ID NO: 273296 - DNA, 100 bp, Homo sapiens
cagaaacataactgccatagtgaagcaacttaatcgggatatcgagctcttccaccaaagccacctaagccaatgacttcagcagttccaaatggaatga

SEQ ID NO: 273297 - DNA, 49 bp, Homo sapiens
cggagctcgtccagctgcgtgcctaggtcacacagcggcagtgataaag

SEQ ID NO: 273298 - DNA, 75 bp, Homo sapiens
ggctgatgcagcaggcatcatccgctatgcaattggggtgctggaggcctggcagaagggtccaaatcctcctgg

SEQ ID NO: 273299 - DNA, 100 bp, Homo sapiens
gtgactgtctaggagagcatttgtatgttatggtgaatgccaaatttgaagaagagaaagaagatcttggcgatgaggatgaagcagaggaagaagagga

SEQ ID NO: 273300 - DNA, 74 bp, Homo sapiens
ctttcttccagcttctgctgtccttctttgtggagagcaagagtcctgtgtatggaaactcacatgagtcagct

SEQ ID NO: 273301 - DNA, 97 bp, Homo sapiens
cgggcggcttcctggcctgggcgctccggtggcggcggaggaggatacgaagcgttttcggcttcctgcccggagctgtgcagcaaacagtcgaccc

SEQ ID NO: 273302 - DNA, 100 bp, Homo sapiens
tatcaaccttctcaaatctaaaaaatgtcccttcattgttgcactcaataagttggcagatatccctgttacaatctgtacatatccatttgtatttgat

SEQ ID NO: 273303 - DNA, 97 bp, Homo sapiens
aaaattctgaactcaggacttggcaaaggccatgtggaagtgttacatcaccttttgcttggaaagatttactaagaagtcaaatagtgggttcctt

SEQ ID NO: 273304 - DNA, 74 bp, Homo sapiens
gaaaatcattcctgatggacttcatgttgagatacatgtacaaccagttgccagtagtcatcagagtaccaaaa

SEQ ID NO: 273305 - DNA, 100 bp, Homo sapiens
cttccagacgctttctgagagaatgggggcaggagctctagccatctgtggtgctggaaatgtaaacaagaatagactgttcattcctgatggcttttag

SEQ ID NO: 273306 - DNA, 75 bp, Homo sapiens
aacaaaagattgagctgcactgtattcctggccattcacatgttaaactgcagcttgcagccatgttttgtatat

SEQ ID NO: 273307 - DNA, 82 bp, Homo sapiens
agtgtggtttgctcagatgtggagcaacaagtgaaaatggtgtgaatggaacattaacttcaaatgtagcagactctccccg

SEQ ID NO: 273308 - DNA, 100 bp, Homo sapiens
cgagccccggcgccgccgccatctctgccttcggtcgagttggacccccggatcaaggtgtcatggagaaactccagctgggcccagagattctgcagcg

SEQ ID NO: 273309 - DNA, 80 bp, Homo sapiens
gtgaatgagggccgaaagagcttccccagtggacattcttcctgaatttaaactttgggataatgagctgcagtatgtgg

SEQ ID NO: 273310 - DNA, 139 bp, Homo sapiens
tgggatccggctcctccagctaccggcccaaggccatctacctggacatcgatggacgcattcagaagtaagactttgaccccgacgcaggcttcagtgattgccgcggatcagaagcctgagcactttggctcgagac

SEQ ID NO: 273311 - DNA, 100 bp, Homo sapiens
ttttgttcgtgataaactggatcctgatatggctctttgccgaaatgctagagaaatgggccatgtttatgagtggactaagtgaaagcaaacaaaccca

SEQ ID NO: 273312 - DNA, 75 bp, Homo sapiens
agcatccaggcctcattggacagcattcgagtactcccctgccctcaacaagatgttttgccaactggccaagac

SEQ ID NO: 273313 - DNA, 101 bp, Homo sapiens
cgccaggcggatctcagaaggccagttcaaagtgaaagctggtggaatgcgaattgtgcagaaacacccacatacaggagacaccaaagaagagaaagaca

SEQ ID NO: 273314 - DNA, 75 bp, Homo sapiens
aataacccaagcaaaacttcagatgcagtttatctggcaagactgaggcaaataagactacagaatttcaatgag

SEQ ID NO: 273315 - DNA, 73 bp, Homo sapiens
ggaaatcgggctgaagcgactgagtccgcgatggagggggcagctggcattttatgctatgtgggagcctatg

SEQ ID NO: 273316 - DNA, 90 bp, Homo sapiens
gatccgtccagtctgccgcaagttcatgcaagatattccctcccaggctgtccctcgccgccttgctacagcccccaagactgaaaaacc

SEQ ID NO: 273317 - DNA, 100 bp, Homo sapiens
cctcactctgcctttctctccttttcaaggctgcaatgatccccccgccacagtcctcagggtggatgtgaacactgaccggaagatcagtgccaaggag

SEQ ID NO: 273318 - DNA, 75 bp, Homo sapiens
gggatatttgagagtccaactggcactgcagcctggcatcctcgctacaacctcattgttgtgggccgataccca

SEQ ID NO: 273319 - DNA, 51 bp, Homo sapiens
aaccatttgtctttagtcttggcaaaggcatgaagctttgctgtattatgt

SEQ ID NO: 273320 - DNA, 100 bp, Homo sapiens
agctgacagcatatttttttagtcacaagcttattgaattgatcggccacatcaggaatgcaagaaggtggcctctgatgatagatcctcaaagtcaggc

SEQ ID NO: 273321 - DNA, 100 bp, Homo sapiens
tgcaccttgtgttgtaaaagtggttgtaaagctctctgaaatagtgaccttagcgaagcaagcacatgtggatgtgaaatttcagttgccaatatgatct

SEQ ID NO: 273322 - DNA, 83 bp, Homo sapiens
ctggagcacatggaggaactgcaggagcaagtggcgctggccaacgccacagggggcggtgggcacgtgcagatggtgcagag

SEQ ID NO: 273323 - DNA, 100 bp, Homo sapiens
gctgtagcctggaggctccgggcgcggggaagtcatgctcgcttcacggaggcaatagctagccgtggacagaggactgcagaaaatcaacctatcctcc

SEQ ID NO: 273324 - DNA, 50 bp, Homo sapiens
caaagccacccagccaatgaaggccttccttcggtggctgccatctctga

SEQ ID NO: 273325 - DNA, 75 bp, Homo sapiens
gcagtaatattgagcctagtgttcgcagctgcttccaacaggcagagacccgtgctgagtttgctgagagatcgg

SEQ ID NO: 273326 - DNA, 75 bp, Homo sapiens
gttttacaagatccactacctggacaccaccaccctcatcgagcctgcgcccagaccctgtccccagaggggctg

SEQ ID NO: 273327 - DNA, 93 bp, Homo sapiens
agaagtatggggagttctttccagtgcccgagtccattctcagaggatgtttcctgccatgagagtgaaaatcactggcctagatccacatca

SEQ ID NO: 273328 - DNA, 100 bp, Homo sapiens
ggcagtttcttctcctcggtatcagaagctctgtaaggaagtgctctctggcgtggtggtcatatcgagtaaggattcagtccaacaccagggagtgtct

SEQ ID NO: 273329 - DNA, 100 bp, Homo sapiens
cttcttttatctcaggtgacatcaatagcacttcaacacttaatcaaggactcacaccacccggcaagaactgctcactacggctccctgccccagaagt

SEQ ID NO: 273330 - DNA, 83 bp, Homo sapiens
gccgagtgggaggatggcggaagtcaaaatgcagatcttcgtgaaaacccttaccggcaagaccatcacccttgaggtggagc

SEQ ID NO: 273331 - DNA, 100 bp, Homo sapiens
tgccaacagtgtaccagcagggcgttggctatgtgcccatcacagcatgatgccttcttctgtagagtgggcgctttgcagaatacgtgttgaatgaaat

SEQ ID NO: 273332 - DNA, 100 bp, Homo sapiens
gtctgttgtggcgtgcgtgtccccagatagtcacagctttaacagtgaagacattcagtgaagcttgcctgatggtaaggaaaccagccctagaacttct

SEQ ID NO: 273333 - DNA, 100 bp, Homo sapiens
gaagccttggtctgtcatagaaaaggtgctgctgttttttcaaacgaaggaaaaggaaaaccatacagcgccacaaatgactctggacacagacagatcc

SEQ ID NO: 273334 - DNA, 75 bp, Homo sapiens
cctggtcgagccggaggaagccaccaggacttggaaaaggagagtgacacacccctccagcaagtatccattgaa

SEQ ID NO: 273335 - DNA, 96 bp, Homo sapiens
cgccgaggcgtgcacatgctcgcccagccacccccaggacgccttctgcaactccgacatcggcacagcagctacacagaagagatgggagaagag

SEQ ID NO: 273336 - DNA, 75 bp, Homo sapiens
cttcaatgcagattctagccaacataaaggatgggcttctttctcaaggttattctgattttataaataggatgc

SEQ ID NO: 273337 - DNA, 75 bp, Homo sapiens
tctctttctggcctggaggctatccagctggtgtgtggttgactctgtttctcgccatgtcttctcacaagactt

SEQ ID NO: 273338 - DNA, 75 bp, Homo sapiens
ccttttcctttgaaggtcctgagattgtggactgtgacgggtcaaaatgcagatcttcgtgaaaacccttaccgg

SEQ ID NO: 273339 - DNA, 100 bp, Homo sapiens
tgaagaagaagagagggaggagaggtctggcctccaactaagtcttgaacaaggacctccaggatatagtggctaccctgggccccaggtcagctaccca

SEQ ID NO: 273340 - DNA, 51 bp, Homo sapiens
cacccaccacgccgcagctgcccaccacagagggccggcgcagtgtgctac

SEQ ID NO: 273341 - DNA, 100 bp, Homo sapiens
ctgtgcacgaccacaccgctgatgaagacaaggactcacagtggctgcaaggtggtgttcccactgatgaagagcaggcgactgggttggagagggagat

SEQ ID NO: 273342 - DNA, 76 bp, Homo sapiens
gtgaaaaaggccctttctaaacaagagatgcagtctgctggatcacagagaggaacgaatgttcaatgcagagaat

SEQ ID NO: 273343 - DNA, 82 bp, Homo sapiens
acaccagcaccgcagatgttgtcaaggtggcctaccaggaggccaggggtgtcgccatggctccctggggaagggaatgcag

SEQ ID NO: 273344 - DNA, 75 bp, Homo sapiens
gcatctcggaagatccaggtcccaactggaagctgaagcttcttggacacttaatgattgttggcaagaaatgtg

SEQ ID NO: 273345 - DNA, 82 bp, Homo sapiens
ggatctcggtgctgcagacggcgagacctcctgcacaggtaattttttctgcaggatgaattaagagaagagacacttgctc

SEQ ID NO: 273346 - DNA, 75 bp, Homo sapiens
tgatcgccgggaacccttgccgctgctgtcctgcgaccccaagcaggatggcccaatggaatcagctacagcagc

SEQ ID NO: 273347 - DNA, 83 bp, Homo sapiens
ctcgcgctactctctctttctggcctggaggctatccagccacatgattaagtaccggtacatcccgttcacacatgggaaga

SEQ ID NO: 273348 - DNA, 100 bp, Homo sapiens
tcgcggcgctcgagggaccatggccgatcctcgcgtgagacagatcaagatcaagaccggcgtggtgaagcgatccaaggttttgccatcaaggggggac

SEQ ID NO: 273349 - DNA, 100 bp, Homo sapiens
gcggcgagcgagctcctgaggtacggcgtcggggatgatcggctgaatgtaacagaggaactaacgtccaacgacaagacgaggattctcaacgtccagt

SEQ ID NO: 273350 - DNA, 50 bp, Homo sapiens
tggagccccaccatggtagtcctgctggctgttgctccaggcccctcggt

SEQ ID NO: 273351 - DNA, 83 bp, Homo sapiens
gctacgtgcacgaccgctttctggtggggccttatcagaacattgagatggccatcctgcggttcccttacgagtcctggggg

SEQ ID NO: 273352 - DNA, 100 bp, Homo sapiens
gttgtaataaaataaaagataatgacaaagaagatggctgcttctatttcaggtgattcggtctgggcaaaaattaaggaaaaagtctgctgacacaggc

SEQ ID NO: 273353 - DNA, 51 bp, Homo sapiens
ggattttgtcagcttgtcgtcaagagagaagaagaaggaggttcctgctgt

SEQ ID NO: 273354 - DNA, 100 bp, Homo sapiens
gtggagcttggtttcgggatctcggtgctgcagacggcgagacctcctgcacagtgttctcaggcgctgtggtctcaccttccactggggcaacaatggg

SEQ ID NO: 273355 - DNA, 75 bp, Homo sapiens
caagaaggcaacgacgttccatctgtggaaggacctaccaaccaggggtcctactgggcaatagacaccaatccg

SEQ ID NO: 273356 - DNA, 100 bp, Homo sapiens
ttcattcctggttgtaaaactccggaccagttgaagaaggaagattcacactgtaacattattcacactgaggttggactcttcacagaaattgggccca

SEQ ID NO: 273357 - DNA, 80 bp, Homo sapiens
gaaatgccagaggacatggagcagcattatgccagtacatacaggcttctaaagccagggatggtgccagccctttcatt

SEQ ID NO: 273358 - DNA, 75 bp, Homo sapiens
ctgaagagcgacaagccgctggcagccgcggatctcaccgccgctcagggtaagaatgattgatgttggctgata

SEQ ID NO: 273359 - DNA, 75 bp, Homo sapiens
acagctggaggaagaaaatcgcatgctgccccagaaacccgggatggacgtggccgacgcctacgtgactttcgt

SEQ ID NO: 273360 - DNA, 102 bp, Homo sapiens
gtcgtgatccagaagtccagagctgaggactgcctgtttgcaggaggataagatcaatgccctcattaaagcagccggtgtaaatgttgagcctttttggcc

SEQ ID NO: 273361 - DNA, 75 bp, Homo sapiens
gtccgcgggaagatggcggcgccgctcatccccctctcccagcaggaagctcttcgtgggcggtcttgactggag

SEQ ID NO: 273362 - DNA, 100 bp, Homo sapiens
gccagaggaggagatcctgggatcagatgatgaggagcaagaggaccctgcggactactgcaaagcatctattgctggcaccatctgacgtggcaggctg

SEQ ID NO: 273363 - DNA, 98 bp, Homo sapiens
ccaaagtgcccggacccaaaacaggaatcctcctccgcctcctcctctctgcatgcgcgtcagagcccgtgccaagaacaagcagcagtcctgaactc

SEQ ID NO: 273364 - DNA, 120 bp, Homo sapiens
cattgaacagactgatggccagcagagggcgaagtttcaagcagacttcacttgctcttgtacatgaggaagaacctaggaaagtccgctttgattatgacttattcctgcatcttgaag

SEQ ID NO: 273365 - DNA, 90 bp, Homo sapiens
ggaccacagacctgcgctgcttcctacacagcctcctgtcgtgacagccttttgattgattatcaatttaccttcagcttattacaggaa

SEQ ID NO: 273366 - DNA, 75 bp, Homo sapiens
gtttgctctgatgttggcattttatgaagagacctttgcagatacagctatcaaaggtccatcatcaaaacacca

SEQ ID NO: 273367 - DNA, 50 bp, Homo sapiens
atcatccgcaacaccctctacaaggccaaccaggatctcccaacccgaag

SEQ ID NO: 273368 - DNA, 111 bp, Homo sapiens
atggcggacggcgtggaccacatagacatttacgcggatgtcggcgaagagttcaaccagcattgtcttcagtgttaagaaatgtggactcctgtgaggtgctggaggttt

SEQ ID NO: 273369 - DNA, 74 bp, Homo sapiens
gcccagctcgcgcttcagcgtcccggcgccgtcgcgccactcctccgagtggtatcacggaaaacttgacagaa

SEQ ID NO: 273370 - DNA, 100 bp, Homo sapiens
gcaacagtctcattttcccatgacgcatggcaacaccggattcagtggtgctggagaatctggtaaaagcaccattgtgaagcagatgaggatcctgcat

SEQ ID NO: 273371 - DNA, 100 bp, Homo sapiens
gtcaacttcaccactcaggctgaacgcaagattcgtatcattatggcagagcccctgattccacagtggtgtgtggagtacatgcgatcattaccaggac

SEQ ID NO: 273372 - DNA, 90 bp, Homo sapiens
tctcaaaccacttctcagacaagttccatcccacctttgagtcaggtatgaacgctgccgtccgtgccgtggtgcgcatgggtatctacg

SEQ ID NO: 273373 - DNA, 88 bp, Homo sapiens
ccctgctccgggtcgcgtcctggctatcatggtgaacttacttcagattgtgcgggaccactgggttcatgttcttgtccctatggga

SEQ ID NO: 273374 - DNA, 100 bp, Homo sapiens
aaatgatgaaatttggaagaaagaaaagagaccgagtggatcatatcctgattttgaagccagcttcataaggctattggacaaaataacgaatggttct

SEQ ID NO: 273375 - DNA, 100 bp, Homo sapiens
tgggaggacgtggagaggacagtgaacttccagatacttggtgcttgaaaaactgaagaaggaagacgctgaccgaattcatatattcagttcttttttc

SEQ ID NO: 273376 - DNA, 82 bp, Homo sapiens
atcgacggcaggaacgtgaccgtcactgacgtggacatcgtcttcagcaagatcaaagcggttctggtgaggttggaaggat

SEQ ID NO: 273377 - DNA, 77 bp, Homo sapiens
cattctcaatgagagcctcacagacccagccatcgttaaggcctggcatgcgtgggcagtgatgaacttcgaagctg

SEQ ID NO: 273378 - DNA, 51 bp, Homo sapiens
gaacgtgccatggagacgcttaacggtgtcttctctttagggatggtgagg

SEQ ID NO: 273379 - DNA, 90 bp, Homo sapiens
gttcttggcaagagaggcatcctccttgaagtatttggctgaggagttttcaatcccattacttcgagagcttaagcatccaaacgtcat

SEQ ID NO: 273380 - DNA, 87 bp, Homo sapiens
acagccggcagcccccctcccagtttgaacctctggacatgaagctcatgagtctcagaccagtatccttcaggggttctcttactc

SEQ ID NO: 273381 - DNA, 100 bp, Homo sapiens
gctgctctgaaccaggacctggacccggacccaaagtgccatgtctttaatggcaagtgtccagagaatggctgggatgaaagtacacttgaactctttt

SEQ ID NO: 273382 - DNA, 100 bp, Homo sapiens
actgtgcatctttatgataattggatcaaagatgctgcttcctgaggcctcaccagaaactgagcagatgctggcaccatgtttcttgtacactctgcag

SEQ ID NO: 273383 - DNA, 100 bp, Homo sapiens
gtttgtactatcctcggtgctgtggtgcagagctagttcctctccagctcagccgcgtagaagttttcatgggctgagctgctgagttcagcctgggaac

SEQ ID NO: 273384 - DNA, 75 bp, Homo sapiens
gagcttcgccaaggctggcgcagtcgatattaataaggcagcggaaagaagaaatatgaatacggctccatcaag

SEQ ID NO: 273385 - DNA, 100 bp, Homo sapiens
ctccacttgcccgcttccacccggaaagccccccaggctgagtgcggcatgatctccatcaccgaatggcagagtgtaatcctgagagattcacatggtg

SEQ ID NO: 273386 - DNA, 83 bp, Homo sapiens
cacagagcctcgcctttgccgatccgccgcccgtccacacccgccgccagggactggtgattgcagctggaagtgcccatgac

SEQ ID NO: 273387 - DNA, 75 bp, Homo sapiens
gcctgtggcatttattactttgaagtgaagattgtcagcaaaggaagagatggttcctcagcactttgtttgccc

SEQ ID NO: 273388 - DNA, 100 bp, Homo sapiens
ctatatgacctggttatgacccatgctcttcagtggcccagtcttaccgttcagtggcttcctgaagtgactaaaggattctgcagattgggaaaaagaa

SEQ ID NO: 273389 - DNA, 100 bp, Homo sapiens
gaacggaaaactcccaacttcctggggacggcaaaacagaacagaaaggcggagataaaaagaggggtgttaaaagaccacgagaagatcatggccgtgg

SEQ ID NO: 273390 - DNA, 90 bp, Homo sapiens
gtctaaatttcggtagccatggcacaagaatatagtgctggagaatctggtaaaagcaccattgtgaagcagatgaggatcctgcatgtt

SEQ ID NO: 273391 - DNA, 75 bp, Homo sapiens
gacctttaaagggtagaattaatttagttctcagcagagaactcaagttggtcaaagaaaaagtgatgtatgaaa

SEQ ID NO: 273392 - DNA, 82 bp, Homo sapiens
ggtgatccagcaaggtcggcagagcaaggggcttacgcagaaggacctggccacggtgaaatgacaatggatgctctgttgg

SEQ ID NO: 273393 - DNA, 107 bp, Homo sapiens
agaggagggtggacgaagctctctccagaaagacatcctgagaggacttggcagggattaggcaaagaggagtcccaaaatgagaaacagaccaaaaagagtctctt

SEQ ID NO: 273394 - DNA, 50 bp, Homo sapiens
gaacatcatgaattcccaagaaggaggtgcatcctgagctctacgtggac

SEQ ID NO: 273395 - DNA, 83 bp, Homo sapiens
ccaaaagcaccacaagtaccacaagcatggcaaggaactgtggctgcaccatctgtcttcatcttcccgccatctgatgagca

SEQ ID NO: 273396 - DNA, 75 bp, Homo sapiens
tcaccagcatccactggagctacaagacaaacggggattcagcgtccgatcctttggaacagggactcacgtgaa

SEQ ID NO: 273397 - DNA, 116 bp, Homo sapiens
ctcaactgcccagcgtgaccagtggccacctctgcagtgtcttccacaacctgggttgaaaggattgttgacaaaaggaaaaataaaaaagggaagacagagtatttggttcggtg

SEQ ID NO: 273398 - DNA, 80 bp, Homo sapiens
attcgtcttggtaaacttggtcggagctggagtttgttcagatcatcatcatcgtggtggtgatgatggtgatggtggtg

SEQ ID NO: 273399 - DNA, 76 bp, Homo sapiens
aaaaagcagagtttgctggacaaaggagtgatactacatactctgatgccagtatggactggagatgatgggagcc

SEQ ID NO: 273400 - DNA, 90 bp, Homo sapiens
gttcagttgtggaattggttatgctactgtgttctcagagaaagtggctcatgccaaagaagaaaaccttagtatgcatcagatgctgga

SEQ ID NO: 273401 - DNA, 95 bp, Homo sapiens
agaaaatgaccgcaatctctgccagcaccttgggaagagaaagaaaatgccgaaggcactcagacaggcctttgaagacctcagcaaactaatga

SEQ ID NO: 273402 - DNA, 75 bp, Homo sapiens
ggagctgatgaagagagagcagagacagctcgtctgtctgcagatctccaggggagcccaccagcctagtcaaca

SEQ ID NO: 273403 - DNA, 100 bp, Homo sapiens
gtaagcaatctacgaagaccgaggaaaagctgcgggtgctggagaatctggtaaaagcaccattgtgaagcagatgaggatcctgcatgttaatgggttt

SEQ ID NO: 273404 - DNA, 100 bp, Homo sapiens
taaagccaggacttgttaaaaagatcaatagattgcctacccccattgcaggactggagaagtattcttgcagattaaagggccactggaagatatttat

SEQ ID NO: 273405 - DNA, 50 bp, Homo sapiens
tggtctacttatcaagttaggagatgtatcggcaagcagtgtaaacggag

SEQ ID NO: 273406 - DNA, 127 bp, Homo sapiens
caacagcaacttgtgattggcggtgaccggatattcagttgcacatccccacatcaatgcactgccaatgatggactagaggcttttaccagatttcttaaaactgaattcagtgaagaaaatattg

SEQ ID NO: 273407 - DNA, 88 bp, Homo sapiens
acctgttaccactttcaaaagttgaaaggattgttgacaaaaggaaaaataaaaaagggaagacagagtatttggttcggtggaaagg

SEQ ID NO: 273408 - DNA, 100 bp, Homo sapiens
ctcccagcagagctacctatctatggagaaaatcattcaagtggccaagacctctgctgcacagattttgagaagagggggaaaaaggaagtttgtcctg

SEQ ID NO: 273409 - DNA, 98 bp, Homo sapiens
gtctgtacctactgatggtgctgtaaccacctcacagattccagcttcggaacaagagaccctgtaagactttgaccccgacgcaggcttcagtgatt

SEQ ID NO: 273410 - DNA, 106 bp, Homo sapiens
gccaggtaggatttccgggagaggctgctgtggaggctgaggaggcggcggcggagatctgggcaaggtgcccggcgacgactgcccgctggtgtggggccagtgc

SEQ ID NO: 273411 - DNA, 107 bp, Homo sapiens
ccgtggccttagctgtgctcgcgctactctctctttctggcctggaggctatccagcgggtgagcccctccagactccgaataggagatcaagagtttgattcattg

SEQ ID NO: 273412 - DNA, 74 bp, Homo sapiens
gctctggctgtgcgcgctggcgctgagcctgcagccggccctgccggaccgcagctgaatgcacagctagaagg

SEQ ID NO: 273413 - DNA, 90 bp, Homo sapiens
tgtgctgcaggatcctgggcaggagcgaaggaccaagaatcgccttcagccctgtctggtgcatccttggcagaaagtgaggaggaaaac

SEQ ID NO: 273414 - DNA, 73 bp, Homo sapiens
gaaatttcaggaattaagtcaaccacgttctcataccagcctgaagaaaaatcctgggtagaagctggatcag

SEQ ID NO: 273415 - DNA, 87 bp, Homo sapiens
agcagcagaaagcgggcgagcagcagttgagcgagcccgaggacatggagatggaaggatctgcatctccaatggatactgaggggt

SEQ ID NO: 273416 - DNA, 100 bp, Homo sapiens
ctgctgaaggagtctcgctgagctcgaggaggtggcgcgatggagggactggaagggagaaggtgtgacgtttcttggtcataggagggagtgtgatctg

SEQ ID NO: 273417 - DNA, 90 bp, Homo sapiens
ccacttgaagaaaagggtgaaggaggcgaattttcagttgatagttacaaggagaacatcatgcgcctctccagccttcacaaggaccgc

SEQ ID NO: 273418 - DNA, 100 bp, Homo sapiens
ggcaggggaggaagccacctcgagcggttaagaagattgtctaccaaatatagaacagaaaagatatatcccacagccactggagaaaaagaagaaaatg

SEQ ID NO: 273419 - DNA, 82 bp, Homo sapiens
gcgcccccgcggctggagggtggcggctatgagaggttttcctccgagtacccagaattctgttctaaaaccaaggccctgg

SEQ ID NO: 273420 - DNA, 50 bp, Homo sapiens
ccgagctggacccggaccggttttgggtgcagtgcccgccacaggcttcc

SEQ ID NO: 273421 - DNA, 50 bp, Homo sapiens
taaaaccatccatcaattactaccaagggataaaaacattcagatggcag

SEQ ID NO: 273422 - DNA, 74 bp, Homo sapiens
caggacggcaatactactttaatagttcaggaaataatgaagatgtttcattttcaagaccagcagatcttgac

SEQ ID NO: 273423 - DNA, 100 bp, Homo sapiens
tcagggatcaaagagcaaacagattcagtggcctgcattggatctgccagagcatcttttggagatcgaaaggtagaactttccagttcatcccagcacg

SEQ ID NO: 273424 - DNA, 100 bp, Homo sapiens
cacggatgcccagctgaagagcctgctgatgtcagtgggacccattcagatatggctgtatcagaacttaattaaacacagctctctgtttgtcaagcag

SEQ ID NO: 273425 - DNA, 100 bp, Homo sapiens
aattcatccggcaccagtcagaccgatatgtcaaaatcaagtttacaggctgtgcatttggatcagctgctatttggcaatatgaatcactgaaatccag

SEQ ID NO: 273426 - DNA, 83 bp, Homo sapiens
aatggaacgaagcttaagtagctacaggggaaaatattctgaggccaagaagcttgagagaagaaaaatttcagaaaaattgt

SEQ ID NO: 273427 - DNA, 75 bp, Homo sapiens
ttgccagtggaaggagttcctgctaaggggaggtgcaggaggtggtggtgaagtttattaagaaggagaaggtct

SEQ ID NO: 273428 - DNA, 100 bp, Homo sapiens
ccccgagaagtgggacatcatcacccgcaagggtggtgagcgcacctacacccagctggtgcggctcatcattctgctcttagcttctgccagctatgat

SEQ ID NO: 273429 - DNA, 82 bp, Homo sapiens
ctgcagcggcaacccccagcggcttaagccatggcggcctgcggcctcaccatggacccagaatgcgcccagctgctcccgg

SEQ ID NO: 273430 - DNA, 75 bp, Homo sapiens
ctgatttagaaggaggttcaggctacggtgagccgaagggaagtgctcagcggctgcactggacgtcctcgccaa

SEQ ID NO: 273431 - DNA, 98 bp, Homo sapiens
gagcaaggaaaagaaccttggaatgtgaagagacatgagatggtaactgaacccccagattcacagtctgagaatgaggcttcaccagtaaaacggcc

SEQ ID NO: 273432 - DNA, 89 bp, Homo sapiens
acgtggtactcagcaagctcgagttaaagttggatgtgctggaacagctagtatgttcaacacaccaggaatgcagagcttgttgcaac

SEQ ID NO: 273433 - DNA, 90 bp, Homo sapiens
cgtaaaggaaatctctccaaccaggaacaaacacctgccttgcaatattaggtgcataaggcaaatccaatacgcaagtaccagggtctg

SEQ ID NO: 273434 - DNA, 90 bp, Homo sapiens
ttgtgtccgagtatgcagagaagaatgaaactagtgatcgagaagatggcctccccaaaggacatcatgtgacagactctgagaacgatg

SEQ ID NO: 273435 - DNA, 76 bp, Homo sapiens
agaaagctaggccatctgaataactttactaagcagcttcatggagtttggccacaagatgttgttgacggaacgt

SEQ ID NO: 273436 - DNA, 102 bp, Homo sapiens
aagcagaaagcaagtgaatacgagtcagaagtatggtttgaagtggtgaacatggatttttctcggcttcacatgtacagtcctccccagtgtgtgccggag

SEQ ID NO: 273437 - DNA, 82 bp, Homo sapiens
cgagtttttggagcgccgggagcgagggggatatgagactttctactcggaatatcctgagtgttgcgtggatgtaaaaccc

SEQ ID NO: 273438 - DNA, 90 bp, Homo sapiens
ggagatggggaccgccctggacatcaagattaaaagagcgaataaagtttatcacgccggggtgcttccatacaaaggggacagaagaga

SEQ ID NO: 273439 - DNA, 107 bp, Homo sapiens
tgaagtatcttcaaaaattcatccctgaaattactatcagtgatatacttaggagcgagttcagaagacctttcctcacccaattgataaatgggccattgctgatg

SEQ ID NO: 273440 - DNA, 49 bp, Homo sapiens
ggcaaatgtggagttcatggatcttagcagtgtctgcaaaaacgaatct

SEQ ID NO: 273441 - DNA, 96 bp, Homo sapiens
cagcaccctccgcttcctctcctaggcgacgagacccagtggctagttaagtgggcagaccaacatccacctcagcaaaaacttcttcctgacgaa

SEQ ID NO: 273442 - DNA, 52 bp, Homo sapiens
gtgcagctgcctcagttcttagcgcaggaagcaattttggaggtggtggaag

SEQ ID NO: 273443 - DNA, 50 bp, Homo sapiens
ctgcctgcgtctcaacaccaacggcatgtgggagagtcccaatgtcttat

SEQ ID NO: 273444 - DNA, 49 bp, Homo sapiens
aaaacatggggattggaattcgacacgatgaggcgagtggtacgacaga

SEQ ID NO: 273445 - DNA, 100 bp, Homo sapiens
aggaacgggcccgtcaagctgcgcctgacaggagatttctgtagatgtggattttgtcacagcacaaagtaaaacaatggaagtgaagccatgtcctttt

SEQ ID NO: 273446 - DNA, 75 bp, Homo sapiens
agacatttcttcggcattctgcaacagccaatgttttcagttgcaccaagcttagccaccaatgcatcagcagcc

SEQ ID NO: 273447 - DNA, 97 bp, Homo sapiens
agcaattaaattcattgtctcagttcaagagtgaatatagcaacttatgtgaacctgagcagtttgtggttgtggcatcctctggtatcacgattcc

SEQ ID NO: 273448 - DNA, 75 bp, Homo sapiens
aagaaacagacattcaacatgattgcatttgaacagacctactccaatgaagtccattgtgttgaagagattctg

SEQ ID NO: 273449 - DNA, 99 bp, Homo sapiens
ggaggcgatatttctaggggtgtacttgttggggtcagggtgagaattatgaagatgatgacctagtaaattctgatgaggttatgaagaaaccatgtc

SEQ ID NO: 273450 - DNA, 78 bp, Homo sapiens
taatcctgaaagccatgcagcgggcatcaagcatgatggaaccatgtgtgatacctgccgccagcaaccaatcattgg

SEQ ID NO: 273451 - DNA, 100 bp, Homo sapiens
atgccggagacggaggaggtggtgtgcaataactgccctcccggggtcaccggtgaccttatatccagctgtgaaaagtctgctgcaggagggcatttac

SEQ ID NO: 273452 - DNA, 100 bp, Homo sapiens
cttctccaacacagacaaatttgtcctaatgcaggtgggtaaagcaggaatctgagatttccaaggaatctcaagaaatggatgctcgtcctaagttgga

SEQ ID NO: 273453 - DNA, 100 bp, Homo sapiens
tctgcgaagtggttgagaagcctgtacctgttttatacttgcttttgcttcagcgttctgtggttgtcaacaggttgatggacggatggctacatggatg

SEQ ID NO: 273454 - DNA, 100 bp, Homo sapiens
aagctgagaaagttgccaaagaagccaaagatcttgcacatgaagctacaaaactgattggctgataggctgaataatctcctgtagggtaagaagtgtc

SEQ ID NO: 273455 - DNA, 82 bp, Homo sapiens
gaacgaccaagagggtgttcgactgctagagccgagcgaagcagatgccctgtatccaagcccaatatgggacaccagcacc

SEQ ID NO: 273456 - DNA, 98 bp, Homo sapiens
attatcagcatggacatattaactcttacctgaagcccatgttgcagcgggactttattaccgctttaccagaaggcctttgagccctacttagagat

SEQ ID NO: 273457 - DNA, 50 bp, Homo sapiens
ggcacggatgacttctatcagctgaaggacacagcattgttggttttgcc

SEQ ID NO: 273458 - DNA, 83 bp, Homo sapiens
ctgggacttaggagggcaggaagagctgcagtctttgtgggacaaggtccctggtgctgaaccgcctgcgtccagttgccagc

SEQ ID NO: 273459 - DNA, 100 bp, Homo sapiens
ggatcatgtctgcgagccaggattcccgagacaagaggagcagcagcggcaccgcccctcaccctggagggtcctgtacaatctcatcatgggactcctg

SEQ ID NO: 273460 - DNA, 75 bp, Homo sapiens
tgtcctaaatgtggcgacttgtgcacacatgtagagacctttgtattgtatatcagcctcgtgtttggtatttca

SEQ ID NO: 273461 - DNA, 100 bp, Homo sapiens
tggaagagtacaagctgatcctgtccacaggggaatcccggaggcaagacacttgaggagaggcgctccagcctggacgctgagattgactccttgacca

SEQ ID NO: 273462 - DNA, 82 bp, Homo sapiens
tcatcctaggcatcgcactgattgttacctgttgcaggttttgagttctgtgagaagtaaaacacagagtacaacagatgga

SEQ ID NO: 273463 - DNA, 100 bp, Homo sapiens
ctaagaaagctctggctgagccctgcgcggtcctgccgaccgtgtgcgctccttatattcccccgcagagagttacactgttagaccttatgatagccaa

SEQ ID NO: 273464 - DNA, 112 bp, Homo sapiens
ggggaggcggcgggggctcggcggggttcctggagcctcccgccgcgctccctccgccgccgcgcaacggaggaggaagccaagaatctggtgagcgaagccatcgcagctg

SEQ ID NO: 273465 - DNA, 100 bp, Homo sapiens
ggaatgttgtcttctagatatgccactgatacatggacatttgggcttccaggacagttttgtcacatcaggtgtttttagtgtcactgagctagtaaga

SEQ ID NO: 273466 - DNA, 75 bp, Homo sapiens
gaaagaacagaggcgacggctagaagaggtcagctgattagccaccttagttccatctgcaactttagttcccac

SEQ ID NO: 273467 - DNA, 75 bp, Homo sapiens
cctggcgaggatgcaccttcccctgccttggaaagccaccaaagtccttggcactgtcaaatggttcaacgtcag

SEQ ID NO: 273468 - DNA, 100 bp, Homo sapiens
ggcatggatggcggcatgagtatctgggatgtgaagagccagataacagtgaatggaaactcaggaggtgccgtgagtcccatgagttactatcagaggc

SEQ ID NO: 273469 - DNA, 74 bp, Homo sapiens
aaggcgaacgcttcgctggccatttaggagctctgctcaaagccagacgcgttttaccaacgaggatcatttgg

SEQ ID NO: 273470 - DNA, 100 bp, Homo sapiens
cggattaccccgacattctccacctcctgggaggccagccattcccaaatgccccaaggatgaagaacggagacggatcactactcttggaatcaaagat

SEQ ID NO: 273471 - DNA, 50 bp, Homo sapiens
ctgaggggacataatcatcactcagtagaccatcatcaaagaggggatgc

SEQ ID NO: 273472 - DNA, 90 bp, Homo sapiens
gtgaccggatattcagttgcacatccccacatcaatgcactgccaatgtctgcagatgcctccaaggagtccgaaaccaagtccgaagtc

SEQ ID NO: 273473 - DNA, 83 bp, Homo sapiens
gagccgcgggccctttgcagctgcgattttcgccctacgttttcaacggaggattggagaaatgaaggcagaggtcaccaaac

SEQ ID NO: 273474 - DNA, 90 bp, Homo sapiens
ccgcctccgaatttgcaaagaggaggaaggagggacttcttggcttctcccagcatagccccaggtagtttgagctccctaaaagaggaa

SEQ ID NO: 273475 - DNA, 82 bp, Homo sapiens
gactgcccagagtccgcggccggggcgcgggaggacatggatttgattgacatactttggaggcaagatatagatcttggag

SEQ ID NO: 273476 - DNA, 98 bp, Homo sapiens
cgctgctgcccgcccgctgcctgcctgcctggcatctctctctcccgggcggcaccttcctacttctgcccagccacagccctcccctcacagttgag

SEQ ID NO: 273477 - DNA, 101 bp, Homo sapiens
tggcccatcacctgcctgcagccatggtgattgcatactcggaacatcgttaccgtatctttggggaaaccatcgatattgcagtgggtaattgtctggat

SEQ ID NO: 273478 - DNA, 75 bp, Homo sapiens
ggcttggtgacgctcacagtgctgggaaggaatctatccaagacaccttcagcagtaaacaagataaaacaactt

SEQ ID NO: 273479 - DNA, 50 bp, Homo sapiens
aggacttgagtaacagcaacatggcagaagctcctcctggggtagagaca

SEQ ID NO: 273480 - DNA, 111 bp, Homo sapiens
ggagccgccgcgcgcccgcgccctccgcgcgacgccagatctgccgacaccccaggccatcgagccccaggccatcgtgcagcaggtcccagcccccagtcgaatgcagat

SEQ ID NO: 273481 - DNA, 75 bp, Homo sapiens
tttccctcctcaaactgactttgcagccacggagaggtatatttgaaggctcccatgattctgaatggagtctgt

SEQ ID NO: 273482 - DNA, 95 bp, Homo sapiens
cacaccctgttgtgaagtgcacctactgcaggactgagtaccagcaggagaggtgatgatgaccaaacggaccaaagacatgggcaagttcagtt

SEQ ID NO: 273483 - DNA, 101 bp, Homo sapiens
cctcgagccgcgaaggagcccgagaagcagccacgatgtgcggtgctggagaatctggtaaaagcaccattgtgaagcagatgaggatcctgcatgttaat

SEQ ID NO: 273484 - DNA, 75 bp, Homo sapiens
gcctcagcctcccaagtagctgggattacaggtaggtagagcaagaagatggtgtttctgcccctcaaatggtcc

SEQ ID NO: 273485 - DNA, 98 bp, Homo sapiens
ccgctgctgctgccgctgccgccctgagtcactgcctgcgcagctccggccgcctggctccccatactagtcgccggcttcctgttggataaaaaaat

SEQ ID NO: 273486 - DNA, 74 bp, Homo sapiens
tcccccaatgacttcaagccgcaggacttccaccgcttccaggaatatgagagcctggagcaagaaaacaccat

SEQ ID NO: 273487 - DNA, 98 bp, Homo sapiens
gctgatgccgcccgcggcgaggtggcccggaccgcagtgccccaagagaggtgccgcccaggtgatgtggtttgagaagctgtatgctggcctgcagt

SEQ ID NO: 273488 - DNA, 98 bp, Homo sapiens
cgccgattcctcctccttggtcgccgcgtccttggctggcgtgatgacgacctcaggcgcgctctttccaagcctggtgccaggctctcggggcgcct

SEQ ID NO: 273489 - DNA, 100 bp, Homo sapiens
catcattgaccaggtgaatccagagctccatgacttcatgcagaggtctggcaccttccacgctctgtagtttcatttcttcttcgtcgggggtctcagg

SEQ ID NO: 273490 - DNA, 75 bp, Homo sapiens
ggaaccgtctgacccagattatgctgctaaaatccctcctgcagaaactaattctgaagcaagcccttatagttg

SEQ ID NO: 273491 - DNA, 98 bp, Homo sapiens
aggaagctgcagaaggaggcgtccgggagcaagtacaaagccatcaaggagagctgcacctgggccctggattctggaacttttcaaagcctgactct

SEQ ID NO: 273492 - DNA, 100 bp, Homo sapiens
tctgtcaccacatgaggttcaacctgaaagagtgctacctgggcgatgccttccgctgtgccagctgcccctaccttgggatgccagccttcaaacctgg

SEQ ID NO: 273493 - DNA, 98 bp, Homo sapiens
ctgttttgaagagaaggggaataagactgcatctgttcatatgagactctaaaatagagctcaagcttgagaagagagaaccactaaagggcagagca

SEQ ID NO: 273494 - DNA, 100 bp, Homo sapiens
acgggctcccttcgccaaactcttcattttctctgtggtccagcatgacccatgtcggggcggagcagggtattggaacagccttttccgtttcaagcat

SEQ ID NO: 273495 - DNA, 100 bp, Homo sapiens
cctccccttggattcagacgccgattcgcccagatgacttcaaacctgcttctattgacacttcttctgaaggataccttgaggttggtgaaggtgaaca

SEQ ID NO: 273496 - DNA, 100 bp, Homo sapiens
ctctcctgttcttatttgctttatatatcatgtgtgttcctcactcaggcctggcgctggtgccgaggaagctctgtgcccactacacttgggatgccag

SEQ ID NO: 273497 - DNA, 88 bp, Homo sapiens
ctgagaccaaggatgaccaatgactcagaagggaaaatgggatttaaacacccaaagggtgataaaagaaaatgtggctgaagttacc

SEQ ID NO: 273498 - DNA, 97 bp, Homo sapiens
gcgcccctggtcctgctgctcggggtccgcgcggcctccgcggagccagggaacaagtgcagaacaggataatcggttcagcaacaaacagaagaaa

SEQ ID NO: 273499 - DNA, 100 bp, Homo sapiens
tgacgatgatgatgaagaggatgatgatgaagaacatatctgaagagatggattaagaatgctttggattaaggattgtggagcacatttcaatcatttt

SEQ ID NO: 273500 - DNA, 83 bp, Homo sapiens
cctggctcttgccctcatcctggttctggaatcctcagttcaagatgatatcatcaagttgaatcgaaaggaagggaagaagc

SEQ ID NO: 273501 - DNA, 100 bp, Homo sapiens
ggtccatccatcgcataagagcaaagaacactgttgttgccacaggtgacggggctagtcaagctttggcaagttgccagagggacttccgcaacaaacc

SEQ ID NO: 273502 - DNA, 90 bp, Homo sapiens
gttagatctcccatcactaggagttttgctcgagagagtgaacatggaaaggtttgcagaagaagcagatgttgtaatagttggtgcagg

SEQ ID NO: 273503 - DNA, 90 bp, Homo sapiens
gctgccgccgcatctgctggactactgctgccaggcccagacatgtccgtccttgtaagttaaaagcttccatgggagccttccttccta

SEQ ID NO: 273504 - DNA, 75 bp, Homo sapiens
aacacaggaccagtttgccatcccaaggccgaaggtgggcaccatgtccttgaagcttcaggcaagcaatgtaac

SEQ ID NO: 273505 - DNA, 75 bp, Homo sapiens
cagcgagccacgggagcgagccaggtgccctacgagacgctgaacaaacgctttcgcgccgctcagaagaacatt

SEQ ID NO: 273506 - DNA, 51 bp, Homo sapiens
aaccaataacctgcttggctcaaaggggaaggggaggagttacagcccggc

SEQ ID NO: 273507 - DNA, 75 bp, Homo sapiens
cgggcaggagcctggcgaggatgcaccttcccctgccttggaaagaaagcagatgcatatacagtggagctggag

SEQ ID NO: 273508 - DNA, 97 bp, Homo sapiens
gagtacctgcgctatgaagacacgcttcttctggaagaccagccaacagattggccatctgcaagcttcccttctccgtggagagcaggaagacagt

SEQ ID NO: 273509 - DNA, 75 bp, Homo sapiens
gccacatccccccgggctacatctcacagtagtttatgccaacgtgacttcattcatacagatgaaccaaggatc

SEQ ID NO: 273510 - DNA, 100 bp, Homo sapiens
acctacgcaaagttaacaaacacataaagtttccggaaatcttagatttggctcctttttgcacccttaaatgtaagggtcttactctgtcacccaggct

SEQ ID NO: 273511 - DNA, 90 bp, Homo sapiens
agcgggcgcgcatggtcaccctgcacggctacattgagagcacatctccctaacacttcctgccaccttccgaggcaggaacagcacccg

SEQ ID NO: 273512 - DNA, 100 bp, Homo sapiens
ttcgggccgagatgtctcgctccgtggccttagctgtgctcgcgctactctctctttctggcctggaggctatccagcgaggatgctggtggtggaggtg

SEQ ID NO: 273513 - DNA, 110 bp, Homo sapiens
gaagcccagacctgcagggttcgtggataataaactcaagcagcgagtcatccaggctgcgtcatcaccatctcgggacgcatgaccttcacgagcaataagtccatgga

SEQ ID NO: 273514 - DNA, 98 bp, Homo sapiens
gccgagcggggtccgcggtgaccgcgccgcccgggcgatgcccgcggggacgccgccggccagcagagcgaggaggtgcttcccaaggaccgtagatg

SEQ ID NO: 273515 - DNA, 74 bp, Homo sapiens
ttccgaaggccatctaggaaccgtggactttctgcttgcacaagaagtggcatgaagattatagtttgttccga

SEQ ID NO: 273516 - DNA, 82 bp, Homo sapiens
ttcgctacacagcaatgcatcgagccttacggacatccaaaaattgcttggaactgacttcatgggtaccataagtacagag

SEQ ID NO: 273517 - DNA, 98 bp, Homo sapiens
ccacctacagccaagtggcagatttgttattggtgggcctcagggaccatggctaaacctcctggatcattagccagaagcagcagcctgtgccgttc

SEQ ID NO: 273518 - DNA, 83 bp, Homo sapiens
cagaccctggagcctcagttggaagcagccgatccagcctgcggagcctgtggggcaggagatacaactcgtcaacgaatcaa

SEQ ID NO: 273519 - DNA, 100 bp, Homo sapiens
cccagccagggacggaccctcattcctcccagggaccccagacctctgtctctctcggactgggcttccgaaatgtcgtcaccgtggatgagctgcggat

SEQ ID NO: 273520 - DNA, 88 bp, Homo sapiens
gcatattgtactggcctgctgctggcccgcaggacatttctcttgggaagttgtgcatctgacaggaatatagtactgtacgatatga

SEQ ID NO: 273521 - DNA, 100 bp, Homo sapiens
gcctagaccctgcccaacagaatttatatagagatgtgatgttggagaactacagaaacctcgtctccctgggtcagacatatttccaacatttgggtca

SEQ ID NO: 273522 - DNA, 100 bp, Homo sapiens
ccccagcagcccccgaaggccctatcaggacatggagtatgaaagacgatgccactgccgccaggagccctgtaacatcagccatcgtcaaccccaccgt

SEQ ID NO: 273523 - DNA, 75 bp, Homo sapiens
cccctggcctgcccggacgagttcgatgacttcgtcacctatgagaggtggggctggtgtccgagcacttctcgc

SEQ ID NO: 273524 - DNA, 107 bp, Homo sapiens
agaaacatagagaggaactggagcaattgaagctgactactaaggagaataagatgttgctgacaaaaatgcttctaacagaaattctgctggatgtcacagatgaa

SEQ ID NO: 273525 - DNA, 100 bp, Homo sapiens
atcaccaaagaggaagcctctggaagttctgtcacagctgaggaagccaaaaaggaggcaaaaccttcaactgaggacttgggggataagaaggaaggtg

SEQ ID NO: 273526 - DNA, 50 bp, Homo sapiens
ggagaggttcaaattgcaatggataaggatgctaaattccgtctgattct

SEQ ID NO: 273527 - DNA, 75 bp, Homo sapiens
gcgctgttttcgacaggtgtgcaggtttcggcacatggagattgatgtttctacgataaagacagttcagggtgg

SEQ ID NO: 273528 - DNA, 100 bp, Homo sapiens
ttaaaaaacacattgaagttcttcattacttactccaactctggccagtgacaaaaatgctgagtttcttccgtagaacactagggcgtcggtctatgcg

SEQ ID NO: 273529 - DNA, 75 bp, Homo sapiens
agacaaagggaagaaataaaattttcccatactgagatgttgccttatggctgtttagcaacaggagatcgctct

SEQ ID NO: 273530 - DNA, 90 bp, Homo sapiens
cctgcttcctgctcagcactggggactatgcctgcgccgatggtagtgtccggaaagaaatgtgcactcacgctctgctggaagacctac

SEQ ID NO: 273531 - DNA, 88 bp, Homo sapiens
tcaacaccagcaccgcagatgttgtcaaggtggcctaccaggaggccaggggtgtcgccatggcagcggaggaggagaaagagatgga

SEQ ID NO: 273532 - DNA, 73 bp, Homo sapiens
tgcaaccttagcgacatcaggaagaacagggtcgaggatcgaggccaagtcctgtatctgccatgtctgtggc

SEQ ID NO: 273533 - DNA, 82 bp, Homo sapiens
cgcgggaggtgttcgagaacgaccccgagacggtctcggcgcggaagatggccggcggcgtggacggccccatcgggatccc

SEQ ID NO: 273534 - DNA, 122 bp, Homo sapiens
cggaaggagaagatgtgccgccgctgccaacgtcgagcggcgacggctgattggatttgtcctgtatccccccagtggaggtcctgcatgggatctgatggatcatgaaaatattttgtttc

SEQ ID NO: 273535 - DNA, 100 bp, Homo sapiens
atccacagagctaaacgttttagagtaccaaccattgtgtgctgtgaggtaaagagacatattgatgtctttgactgttggaaaccttgcagagcaagaa

SEQ ID NO: 273536 - DNA, 75 bp, Homo sapiens
agctaagactccaggacacccctgaagccgagaaatggaatactcccccagttgcaagaggcgcaggaccgtgga

SEQ ID NO: 273537 - DNA, 100 bp, Homo sapiens
cccaaacactaacttgtttccctgggaatttggaggtgggttcgaaaaagctggagctaagaatcccgttgttcggatatttattatcgataccacttac

SEQ ID NO: 273538 - DNA, 99 bp, Homo sapiens
cagatcgagaaaaatcacgggctgtccaggaactgtcggaacagaaccaaaggctattggatcagctcagcaggaaatcagagcctcattcccttagta

SEQ ID NO: 273539 - DNA, 50 bp, Homo sapiens
ggctccttcaagcccagcgagcatgaaagttactgtggcccatgtcctaa

SEQ ID NO: 273540 - DNA, 101 bp, Homo sapiens
gcggagccgaacaagaccgaaatccagactctttttaagaggcttcgcgcagttccaaccaacaagatgcgtctgttactagagtggagagtctaccttcg

SEQ ID NO: 273541 - DNA, 90 bp, Homo sapiens
gaggagggggacctactggatgatgatgataatgaagatcggggggatgaccagaatgcttcagacatgcctgaaacaatcaccagccgg

SEQ ID NO: 273542 - DNA, 100 bp, Homo sapiens
gcggagggggcccgaaggacttcggcgcgggactcaagtacaactcccggcacgaggtggaattctactaagtatcagtcggccctacaagacaaagccc

SEQ ID NO: 273543 - DNA, 83 bp, Homo sapiens
atgggttctgacggataatttccaagccagctgctgcggactctggagcgtgagaaccagcgcctggaggctgtcctggcgtg

SEQ ID NO: 273544 - DNA, 75 bp, Homo sapiens
cgacgaggagcagggcctgactgcgcaggtgaccattgtgaggtagatattttgttctaattttccagatgagga

SEQ ID NO: 273545 - DNA, 100 bp, Homo sapiens
cacccaaggtcacagagcagctcatgaaactggatgaacaaggggataaaatgcaggttgatcaagaagaagggcatcaaaaatgtcatgctgaacacac

SEQ ID NO: 273546 - DNA, 89 bp, Homo sapiens
gactggaaatcaaatgttacaggtaacagtacttcaatttctaccttaaggacttcctgtctactgggttgtgcagtaatgcaagataa

SEQ ID NO: 273547 - DNA, 98 bp, Homo sapiens
caagttgggggctcagaggggagtcatcatgagcgatgttaccattgtgaaagaaggttgggttcagaagaggggatggagagcaatacatcatcatc

SEQ ID NO: 273548 - DNA, 100 bp, Homo sapiens
attgctgccgttctgtacttgcttttcatgattggagaacttgtaggcacagagcatggagaatgatgaacttccgtcagcggatgggatggattggagt

SEQ ID NO: 273549 - DNA, 75 bp, Homo sapiens
ctttgctgagcacatcagtgatgaatgcaagaggcgtttctataagaattggtgcgtgccctggaggaggccaac

SEQ ID NO: 273550 - DNA, 74 bp, Homo sapiens
gacaagcgacgcgtggcccacctgggctgccattcaggaccagaggagcgagagcagcaagaaccacacccagc

SEQ ID NO: 273551 - DNA, 100 bp, Homo sapiens
tgcaggacctagaagatgccattcatcaccaccagggaatatatgaacatatcactcttgcttattctgaggtgaatgaaaactttgccattgatttgat

SEQ ID NO: 273552 - DNA, 93 bp, Homo sapiens
cgaccccagtcggtgctccggggaggtcacctgacgaggaggaagttctccagcagctgattgtaatgaatttgcccaatgttttgatgattg

SEQ ID NO: 273553 - DNA, 75 bp, Homo sapiens
gccgctggattctgaggaccagcagatggccagtcacgagaacccagtggacattcttacgtatgttacctggaa

SEQ ID NO: 273554 - DNA, 83 bp, Homo sapiens
tagaagaataagagatgtgattaatgtattccaccacctccgccagttaagaggaaaaagcttgaaggatgccaatgatgtac

SEQ ID NO: 273555 - DNA, 74 bp, Homo sapiens
gctctctcaatctctgtctgaactggatcataaatgacaggaaaatggttctcctgaagaacatgcaatctatg

SEQ ID NO: 273556 - DNA, 95 bp, Homo sapiens
agcagccaagatggtgaagcagatcgagagcaagttttcggctttgtgagaaaccttaccatcaaacacgatggccagcaacgttaccaacaaga

SEQ ID NO: 273557 - DNA, 100 bp, Homo sapiens
gaatactgtgacactgaccaccaggccaacttaacatcagcagatatcctgtctcagatgaagaggatgtaatccctgttcattactacttaatacctcc

SEQ ID NO: 273558 - DNA, 74 bp, Homo sapiens
ggatgcttgttggatgaattaatgaaccttgacccacaccaagtcactagaggatcttgaagaccaaaaacgga

SEQ ID NO: 273559 - DNA, 74 bp, Homo sapiens
catcatgtgtgtgtgcgcggaggatggcaaaacgctgcctgtcagtttaggggctggtgcaaaggatgagttgc

SEQ ID NO: 273560 - DNA, 100 bp, Homo sapiens
cggccccggggtgcaccccgcaagaaagttcagcagtacacagtcatcgttcaggccacagatatggaaggaaatctcaactatggcctctcaaacacag

SEQ ID NO: 273561 - DNA, 82 bp, Homo sapiens
gtatcgtatgtccgctatccagaacctccactctttcgaccaaatacacgctgatcgatgagcaggacatcccgctggtgga

SEQ ID NO: 273562 - DNA, 100 bp, Homo sapiens
ttccccttcgagaggaggcagattcccctctacatagacgacaccctgacgggaccccagagctaagcacagctgagcggaaggagttggagaacaagtt

SEQ ID NO: 273563 - DNA, 100 bp, Homo sapiens
cttcattggccacctacagaaacaaaatgtcaacaaattgatggaggctgacccgcggctgattgagtccctctcccagatgctgtccatgggcttctct

SEQ ID NO: 273564 - DNA, 90 bp, Homo sapiens
cttaacagccatgtaaccttggaatgctatcttctttgagaagtcaaattgtcaggatcaggaatgtatgttttcttccatctggattct

SEQ ID NO: 273565 - DNA, 97 bp, Homo sapiens
aaaagacaaggaagatgagctgtcctttcaggaaggagccattatttatgtcatcaagaagaatgacgatgtatgggaagcagctctatatgaacta

SEQ ID NO: 273566 - DNA, 73 bp, Homo sapiens
tgtcgctcttgtgccctagcaccccgagaaccgtcagtttgagccagatggaggagtatttgaagacttctga

SEQ ID NO: 273567 - DNA, 83 bp, Homo sapiens
gacgtccccaacaccgccagcgcccaccctggctcaccgtgcggatctgcctccgcagaagttggaatcgaagcctcttaaaa

SEQ ID NO: 273568 - DNA, 96 bp, Homo sapiens
tgcacagcaggcaacgaagctgggaaggaaagctgtgtggtgcgagtaactgtacagtgagatcatgaatcagacagataaaaatcaacaagaaat

SEQ ID NO: 273569 - DNA, 120 bp, Homo sapiens
tacttgctttactggaaagacccagaatatgccaagtatctaaagtcagaagagatcaattctacagaaatttccagtggttctgttgaggctttatggaattcagcatgtcaaaattca

SEQ ID NO: 273570 - DNA, 83 bp, Homo sapiens
gtcttcaaaggagccccacatgaggtgagaagccctaccactgcaactgggacggctgcggctggaagtttgcgcgctcagac

SEQ ID NO: 273571 - DNA, 83 bp, Homo sapiens
caggtgctgagccaggagcagcagcctttctgatctctctaggagctgacactcgaaccttcacgacccattcggatttttcc

SEQ ID NO: 273572 - DNA, 100 bp, Homo sapiens
ccggtgccagcacctttcggcttctgagacggcggcagcagcggcattcagaaatcgagctatagcagattatcttcgttcaaatggctatgaagaggca

SEQ ID NO: 273573 - DNA, 90 bp, Homo sapiens
cacctcatcccctggatgggggaccacaagatcctcatcgacaggagtgagctgagtcgacagaaacttcatacccaagagctgctttct

SEQ ID NO: 273574 - DNA, 100 bp, Homo sapiens
ccacaagaccccttggggaaaatggaatctgaaccctcagcagttttataccatgttccgctattgagggcacctacattgacaagaaatgccccttcac

SEQ ID NO: 273575 - DNA, 90 bp, Homo sapiens
cagcggctgaggaggggccccagcagcccccgaaggccctatcaggacatggagtatgaaagacgacccttatagttgcctggatcaaag

SEQ ID NO: 273576 - DNA, 75 bp, Homo sapiens
ggatggctgcaagactgtcgacctaaagcctgactggggcaaggagacttggcgggtcgtgcagaaatactgggg

SEQ ID NO: 273577 - DNA, 75 bp, Homo sapiens
gactggagaggatggctactatttcaccaatctgagtgcctggtgaagaatgtgatgggatcactagcatgtctg

SEQ ID NO: 273578 - DNA, 153 bp, Homo sapiens
attgacaagagcttcatctgcgatggacagaataactgtcaagacaacagtgatgaggaaagctgtgaaagttctcaagagtacacagtcattaatgaagcctgccctggagcagagtggaatatcatgtgtcgggagtgctgtgaatatgat

SEQ ID NO: 273579 - DNA, 82 bp, Homo sapiens
gcggcagccgaggccgcgaactgcatcatggagagctccacgcaggagatcggtgaggagctgatcaacggagtcatctact

SEQ ID NO: 273580 - DNA, 75 bp, Homo sapiens
gcgcggcgggaagcggcggcggcggctccagcgtcctaagagatttgataatgggctgcattaaaagtaaagaaa

SEQ ID NO: 273581 - DNA, 87 bp, Homo sapiens
cctgtcatctctctggataagatggagcaagagaggccttttctgatgccattaaaaaatggcaggagctatcaccagaaaccagtg

SEQ ID NO: 273582 - DNA, 82 bp, Homo sapiens
cggcggcgggccgaggagccgggcgcaatggagcggaagaggaggccactgtctgcagctcccgtgaagatgtccactccag

SEQ ID NO: 273583 - DNA, 75 bp, Homo sapiens
cggcggcagctgcagtgacatgtccagcatgaatcccgaatactgagctgactgctgcccactttggaggaggcg

SEQ ID NO: 273584 - DNA, 82 bp, Homo sapiens
cttcaatgtgtcctacaccaggcagcccccaaatcccggcccagttaaaggcattaggatttcctgaaggacttgtgataca

SEQ ID NO: 273585 - DNA, 51 bp, Homo sapiens
gctggatggactgggccgcctccaagatgacagacaaccttctgtgccttc

SEQ ID NO: 273586 - DNA, 95 bp, Homo sapiens
agaaggacctggaggaagcccatcgagagaagagcaaaggagactgcaccatccgtgaactttatattgctgttggaatatctggagccatccaa

SEQ ID NO: 273587 - DNA, 100 bp, Homo sapiens
gacctccagaggaggctgctggtcctcatggattcctggtgccagcccggctttgacatcaaggacgttgccaggtgctgatccgcagtggccgggtgcc

SEQ ID NO: 273588 - DNA, 129 bp, Homo sapiens
cccgggaggaaggaacgaggcaaggagctaaagcagcgtgcgttcagccctgggctcaccatggatgatgatatcgccgcgctcgtcgtcgacaacggctccggcatgtgcaaggccggcttcgcgggc

SEQ ID NO: 273589 - DNA, 100 bp, Homo sapiens
gtagatggacctcgggaacccagaagcagtgctcggaatgtgaccaggcagggagcagtgacatggaagcagatatggccatggaaaccctaccagatgg

SEQ ID NO: 273590 - DNA, 51 bp, Homo sapiens
gagctgtgcgagagcctcctcacttggacctggaatggccaaatatcaagg

SEQ ID NO: 273591 - DNA, 103 bp, Homo sapiens
gcaccaacagcggcgcgggcaagaagcgctttgaagtgaaaaagcaggttcaggagaagtggcacctggtggaggacctgtcgcgactgctgccggagccagg

SEQ ID NO: 273592 - DNA, 74 bp, Homo sapiens
gttcctgggaaggtggagccaccagcctctccttggcacaattctgtcttctcttgaactgcataactgagaac

SEQ ID NO: 273593 - DNA, 83 bp, Homo sapiens
cgaaaatttgtgcaacacatcaagaggtcatcaagactcctgagatagcaaacttggccttgcttggctttggagatatcttt

SEQ ID NO: 273594 - DNA, 100 bp, Homo sapiens
cgggagcctagatcctgtgctttactctgaagactcaatctgaattatccagaacagaaagttgtgactgttggacagttcaaaattggtctgatccatg

SEQ ID NO: 273595 - DNA, 100 bp, Homo sapiens
tgaagaacaaagacacaggtcactcaaataggcagtaccaaaagaattggtggagctccatttgaagctgatgaggaaaattggcaaatctgttactgca

SEQ ID NO: 273596 - DNA, 74 bp, Homo sapiens
tgagatttgaaagtgttatccatgagtttgatcccctcagactatggcatgaaactgccaatcctgcgttccaa

SEQ ID NO: 273597 - DNA, 75 bp, Homo sapiens
actactatattcagtggctaaatggctccctgattcatggactgatcctttgaaatactccagccatgactaaaa

SEQ ID NO: 273598 - DNA, 96 bp, Homo sapiens
gggaaatcgtgcacttgcaggccgggcagtgcggcaaccaaatcggcgccaagattggccatctgcaagcttcccttctccgtggagagcaggaag

SEQ ID NO: 273599 - DNA, 90 bp, Homo sapiens
atgatagatacatcagtgtgggaagccaagcagatacaatgaataaccctataccttccaatttgaaatcagaagcaaaaaaggctgcca

SEQ ID NO: 273600 - DNA, 82 bp, Homo sapiens
caaaaaacgggtcgcccgcgattctcagggattgatcgcctcttcagaattcagcggggtgccaagtcgttttctgtgtggg

SEQ ID NO: 273601 - DNA, 90 bp, Homo sapiens
agcaagatgatgataatactcagaatcaggagaaggaaatgctgcttagattaaatgcgttgttggaatcccttggcaccatgtcctgtg

SEQ ID NO: 273602 - DNA, 100 bp, Homo sapiens
ccgccgccgccgcggtttgtcgccagaaggaagatggcggatctggaggagcagttgtctgatgaagagaaggtcaatgagtggtcattgaagataagaa

SEQ ID NO: 273603 - DNA, 96 bp, Homo sapiens
cacgcagcccaaatccccatccgggacagtgtgcacctcaagggactcgggcaagggtgccgaagatagacaagaggcacacagagacagaccaac

SEQ ID NO: 273604 - DNA, 100 bp, Homo sapiens
aattggcactaagctaccagagaatcaagctatccaaatgcgattagttgatgtggcctgcaaggtgaccttgaggaaccctgggagctcaggaaggaag

SEQ ID NO: 273605 - DNA, 83 bp, Homo sapiens
ccctcatctatatcctttggcagctcacaggttagcatggcctcattgaaagaactagatcaaagactctttgaaaattacat

SEQ ID NO: 273606 - DNA, 98 bp, Homo sapiens
aagagaaagaccgagtgctaaagaagcaggatgcattctacaaagaacagctggctagactggaggagagggtcaggcagttcctgctccgactgggg

SEQ ID NO: 273607 - DNA, 75 bp, Homo sapiens
accgagtacctaggagaggacaagacttctgctcagagcctctgcattgagaacagctgcatcgcggcccacgac

SEQ ID NO: 273608 - DNA, 88 bp, Homo sapiens
gcgaaaaactatgctgaccagaagtgcctggaagagctgggatgtctggttgagtcctatggcatgaatgtttgccaaccaaccccag

SEQ ID NO: 273609 - DNA, 75 bp, Homo sapiens
agcacttgtcccagagggagctcatcaccccatttgacattgtgcagcaaagaaatggttatggagaagcccagt

SEQ ID NO: 273610 - DNA, 90 bp, Homo sapiens
gtggtgcgctgtcttcccgcttgcgtcagggacctgcccgactcagtgggcctcgattgggtggctctggctgccaggaagattccagcc

SEQ ID NO: 273611 - DNA, 83 bp, Homo sapiens
gcgaacgaccaagagggtgttcgactgctagagccgagcgaagcaattcaattcgtcataatctgtccctacacagcaagttc

SEQ ID NO: 273612 - DNA, 82 bp, Homo sapiens
cgccatcactttcatcacatggatcctcatccagtttgcatttaggtagcctttccagtaaatatatgactcagggaaaagc

SEQ ID NO: 273613 - DNA, 74 bp, Homo sapiens
gaggagcgcgtcgtgcgcctgggggtgcgcgcctgcgacctgcccgcctgggtccccagtcccaagcggaagtt

SEQ ID NO: 273614 - DNA, 90 bp, Homo sapiens
gctcacattcggaggctggtgtccagggtctcagcgcgggggacgactcagagtcatcctttttgaacttccatgactcagactgcgaac

SEQ ID NO: 273615 - DNA, 100 bp, Homo sapiens
agcatctgcgatgtgaggaaaggcacctccaccagacctagaggatcaagacataatgggagcatttttagacaagccaaagatggaaaagcataatgcc

SEQ ID NO: 273616 - DNA, 100 bp, Homo sapiens
agaagttgtcttctcctgataatgtaaattgccgcgatacccaaggcagacattcaacacctttacatttagcaggaaaaccgtcttcagatacagtccc

SEQ ID NO: 273617 - DNA, 99 bp, Homo sapiens
cctctacccctgctgggccagagtgagccagaaaagtggatgctgccccctcaaggtgctatctcagagaccaggtatgtcttactgaaagaaagaaac

SEQ ID NO: 273618 - DNA, 75 bp, Homo sapiens
ttctccggcccctccagctgccccctgtgtggcaaacctttcttgagctcagatttggatcatacagcagatgtc

SEQ ID NO: 273619 - DNA, 75 bp, Homo sapiens
cccacgtcgcctgtcacccaatatctccagccgcgcagtcccgaagagtctggcccgagataacttcttccgctg

SEQ ID NO: 273620 - DNA, 100 bp, Homo sapiens
tcccctgttcctttttgctgacgtgtcatttctaagtactttctcctactccataaagacttcaaagaatagtgacagtggtacaggaaagaaagaaaaa

SEQ ID NO: 273621 - DNA, 75 bp, Homo sapiens
ccagcttcagtggcctgtcgttggaagagtacaagctgatcctgtccacaggcaaactaggcgtggcaactgctg

SEQ ID NO: 273622 - DNA, 98 bp, Homo sapiens
tccagcaacagctcctgcagcagtaccgagtgccccggggaagccattccccaccccccaggagccgcaggcagagcgtccggcggccgggagggacg

SEQ ID NO: 273623 - DNA, 83 bp, Homo sapiens
gctacatgcaggacttggaggtggagcaggccctgactccagggagtgcatccgccccaacccttttccccctcgtctcctgt

SEQ ID NO: 273624 - DNA, 97 bp, Homo sapiens
cctggacatggccaccctgaccggggctcagtgtatgaacccagggcactgtggggacagggcgacgtgtgtccaggcgtttgccggtaaggaatgc

SEQ ID NO: 273625 - DNA, 100 bp, Homo sapiens
gagcagtcaactcaaatgcaagtccaagaggaggaggaggcggaggtccaagcggaaagctcctgaagtcctcgcccagaaaccttacagcaaagccgtt

SEQ ID NO: 273626 - DNA, 98 bp, Homo sapiens
ttgtatctcgacactctgcaagattctctcctgaagtcccagttataggtgcacagcgaaggagaagccccagtgcactagccattgaagtatttgaa

SEQ ID NO: 273627 - DNA, 80 bp, Homo sapiens
gtttggattgaagccgcctctgtattacttaccagatctctgttgaggagctggcgcggaatctggtcatcaaggtcaac

SEQ ID NO: 273628 - DNA, 100 bp, Homo sapiens
aggaattggatctactagtgcaggcccgatgagagaaagggaaagttaaggatgctggagcagaacaatggatttctctttctctttcatgcaagggatc

SEQ ID NO: 273629 - DNA, 100 bp, Homo sapiens
ctgatagtctccagcgggcctggactgtgggctggtgtgtggaactggtcttacttatccgagcccagacattgtataagaagtttgtgaagtcaactgg

SEQ ID NO: 273630 - DNA, 100 bp, Homo sapiens
cctgagtatggcaaacctgactttgtgcttttggaccaagtgaccatggaggacttcatgaggaacctgcagctcagataacgaaggaggcccaacttca

SEQ ID NO: 273631 - DNA, 75 bp, Homo sapiens
tcatctgccccaggcccaactcatgttgacgggcagccagctagctgggtaatctcaggggcgatataatcaatg

SEQ ID NO: 273632 - DNA, 100 bp, Homo sapiens
catcagatgcttcacctgtcaagggttacacatcattttggaatgactgtatatcatctggattacgtggctgtatgttaattgaattagcattgagagg

SEQ ID NO: 273633 - DNA, 100 bp, Homo sapiens
tggcttccctggggcagatcctcttctggaggttgatgacaacaagaaactaggagaatgggtaggcctttgtaaaattgacagagaggggaaaccccgt

SEQ ID NO: 273634 - DNA, 108 bp, Homo sapiens
caagaacccactggaagtaaccaattccggaaatattttggcaaccatgaagggaccatcaccaagtggatcgaggccatcaagctacagatggtcttacaaatggaa

SEQ ID NO: 273635 - DNA, 100 bp, Homo sapiens
gctggctgacagagcagagagctcaatgtcctcattgccgctgtcaccactgactaaagaagagaaaactgcggcagagcaattcaaatttcacatgcca

SEQ ID NO: 273636 - DNA, 88 bp, Homo sapiens
ctcatctttgacatggacggacttcttctgggaccgtataatagacgctggccccaaaggaaactactctcgatttatgaatcacagc

SEQ ID NO: 273637 - DNA, 96 bp, Homo sapiens
gatcattctgcaagcaggcaacctgaatacagtgcaaacggttagagcaggagcttcatcatgtgaaagagcagaaccagacttcagcaaacaaca

SEQ ID NO: 273638 - DNA, 100 bp, Homo sapiens
gatgcatttcagggactgggagaagaagatgaagagattgatcaattcaatgatgatacatttgggtcaggtgcagttgtaccatccttccagatacaag

SEQ ID NO: 273639 - DNA, 75 bp, Homo sapiens
accttcaacttgatcccggctgttggacctggcaatgcccagacatctgtgtccccctcaaaagtcatcctgccc

SEQ ID NO: 273640 - DNA, 100 bp, Homo sapiens
gacagggatatgagtgaagaaaacacagagccaccctggaaagatgccccctaaaaagggaggtgatggaattaaaccacccccaatcattggaagattt

SEQ ID NO: 273641 - DNA, 87 bp, Homo sapiens
aatgaagggtgattacttccggtaccttgctgaagttgcgtgtggtgatgatcgaaaacgtgggagatgagggagcaggccacttcg

SEQ ID NO: 273642 - DNA, 90 bp, Homo sapiens
tacctcggcaaattccgacgtcttgaagacttccgagtagatttgttttttgaggacagcattgatgatgccaagtactgtgggcggctc

SEQ ID NO: 273643 - DNA, 95 bp, Homo sapiens
tctgtacatcctatgtcaactgcttctcaggtagcaagtacatggggagagattgagaatttatcacaagttgatggtcctcaagtggaagagca

SEQ ID NO: 273644 - DNA, 95 bp, Homo sapiens
tatactcaaatccaatatacttgatctgtctggtagtgatacctaaataaggcgcagttgtgtagcagttgagtaatgctggttagctgttaagg

SEQ ID NO: 273645 - DNA, 100 bp, Homo sapiens
cccagattccctagttactatctctaagcactgaagtcggtgtttggagaaaaggactcagctgttgaaaatggacagatagatgtgttaaggctgttgc

SEQ ID NO: 273646 - DNA, 74 bp, Homo sapiens
ccattccagcactggactcatggaggctgagcatttattcaggttgtgatgatgattggcttgccaggagctgg

SEQ ID NO: 273647 - DNA, 100 bp, Homo sapiens
ttgcaggatgcctttccttttgggtcttagacaggtatgacgctgggcgggatggcttcatcgacctgatggagctgaagctgatgatggagaagctggg

SEQ ID NO: 273648 - DNA, 75 bp, Homo sapiens
gaaatgggctaataatgctggcaaagtggaaaaatgtgcggtggttaccctaacagctaatgataagacaagtgt

SEQ ID NO: 273649 - DNA, 88 bp, Homo sapiens
tcagaccttccagatcgcttcctctcgcaacaaactatttgtcgcagtggaagctgttgctgccctggggaacaaagtcgtggaaagc

SEQ ID NO: 273650 - DNA, 74 bp, Homo sapiens
tttgagatcgccctgcccgtcgccaatgacaggagcagtatagcatcaagttctagaggaattgggagccattg

SEQ ID NO: 273651 - DNA, 100 bp, Homo sapiens
aggagagttccaaagtttttcaaggtgcagcggaactgctgcctgacgctctgcaacttcagcatccccgaggagctggaattccagtaccgccgggtca

SEQ ID NO: 273652 - DNA, 98 bp, Homo sapiens
ctcgtacaagatccttctttgagcctgcagacagggggatttgcctgggaaggagaagtagaaaacaacgtgtacagccaggctacaggggtggtccc

SEQ ID NO: 273653 - DNA, 100 bp, Homo sapiens
tgaaagtgcagaagactcggaagtgcatctgcagacgcagcaggaggtgaagctgcgcatgacgggcatggcgctgcgggtggtgcgtaccgacggcatc

SEQ ID NO: 273654 - DNA, 75 bp, Homo sapiens
ccagtacagtggtgccttaaaaatggagtcagcctcactcctcccaaagaaagctgtatacctgcacaagtggtg

SEQ ID NO: 273655 - DNA, 90 bp, Homo sapiens
gccacagcatcctccagcacctcagtgatgtcttggttcgtgtccccactgctttctggaattatgtctggaattttattcttcctggtt

SEQ ID NO: 273656 - DNA, 100 bp, Homo sapiens
tgctgaaaaggctaaatgtgaactctcctcatctgtgcaggctcttacagcactactttcagatgatagcaagtttggattcattgtaatagatggtagt

SEQ ID NO: 273657 - DNA, 73 bp, Homo sapiens
gcggaaggaggaggaggaggaggaggatgatgatgatgattcaaaggaaaatccacggctggaaattttcttg

SEQ ID NO: 273658 - DNA, 75 bp, Homo sapiens
caaagagcaactaactgatgctgacaccaaaggatgctgaaaacgccattcaacagatgggtggccagtggcttg

SEQ ID NO: 273659 - DNA, 101 bp, Homo sapiens
tgaacttccctggtcgaacagttttttctaatggctattcaagcacaccgttccggaaggcaaaagccttgtatgcctgcaaagctgaacatgactcagaa

SEQ ID NO: 273660 - DNA, 78 bp, Homo sapiens
gcgggaagagccggggccgtggctgacatggagcagcgggctgacgcacgaggcacacaggaaggaggtggagcaggt

SEQ ID NO: 273661 - DNA, 50 bp, Homo sapiens
atcgtttggtctcctgccgtgcccggtacatgtcccagagcaagcacacg

SEQ ID NO: 273662 - DNA, 50 bp, Homo sapiens
agttaaattgactccgctgattctggacttaaccaccaccatgtcgagca

SEQ ID NO: 273663 - DNA, 50 bp, Homo sapiens
atgcagcttctcttgcagtgcagactccagggattagagctcgatctgca

SEQ ID NO: 273664 - DNA, 100 bp, Homo sapiens
tgtgtttggagcagcagcctgcagcaggaccttcgcctctgcatttgtccagtaactctggctgtgccggatactgcttgggtaaaacgggcaccccagg

SEQ ID NO: 273665 - DNA, 75 bp, Homo sapiens
caaaatgaagatggcacatggcccaggcagaccttgcagtcaaagactatcctattaagtgtaatctcactgctt

SEQ ID NO: 273666 - DNA, 90 bp, Homo sapiens
gacaacatctgtgtgcctgacctgcagctggaagtgtttgggatccctccccgcggcggcgatggcccgagccatgagagtgaggacttt

SEQ ID NO: 273667 - DNA, 87 bp, Homo sapiens
ttgtagaaggaacgcctcttattgatggaagaagactcaagtatagattaaatgatgaaccagaaactcgagatgcatggtgggcag

SEQ ID NO: 273668 - DNA, 97 bp, Homo sapiens
ggaggaggatgctcctgcctcccagagaggggagccggcgaggatcaaaatcttcgaaggaggaaatgcacagcggtattgatgagtagatccttgg

SEQ ID NO: 273669 - DNA, 83 bp, Homo sapiens
cagtccccgacacgtcgtcttacatcaagcaaacggggattcagcgtccgatcctttggaacagggactcacgtgaagcttcc

SEQ ID NO: 273670 - DNA, 100 bp, Homo sapiens
gttccgggagcgccaacccctccaggcaggccagaaagcagacccagggaggatagcacatgtcttcggctacactggtgaaggcatcgtgcctgctcca

SEQ ID NO: 273671 - DNA, 82 bp, Homo sapiens
cgtgttcgacatcctggccgtgctgcagggagcatttcctgaagacgtagtcatgcagcacgtcagcagctcccagagcagc

SEQ ID NO: 273672 - DNA, 82 bp, Homo sapiens
ccttagctgtgctcgcgctactctctctttctggcctggaggctatccagctatatgaaaatgatgatcagctcctgtggga

SEQ ID NO: 273673 - DNA, 98 bp, Homo sapiens
tgggggtgcagccgggggctacggaggagctggaggaggtacaggtttgcagattccgccagcagcacagcaagctctacagatgagtggctctttgg

SEQ ID NO: 273674 - DNA, 100 bp, Homo sapiens
gaaccagcctccacatccttccacccacccaggattcagaggcgggatgtggtaacagagaccaagactgtggagttggtgattgtggctgatcactcgg

SEQ ID NO: 273675 - DNA, 90 bp, Homo sapiens
aggatgagataactgaaagggaagcagaaccatactatggggcttgtacatgacagctggaatagcctccagttgaggggcttggtggtg

SEQ ID NO: 273676 - DNA, 75 bp, Homo sapiens
aaaagacaaaggtagaaaggatggtggaggactacctggcaagtggttatcagtgtgaaatggcctttccccggg

SEQ ID NO: 273677 - DNA, 97 bp, Homo sapiens
catatctgagggagaagcacaagatcatgcacagaggaggccccgtgtgggccgcggcccggccctcaccatggagtccatgttcgaggacgacatc

SEQ ID NO: 273678 - DNA, 104 bp, Homo sapiens
cccgacgcagacacgcgctttcaaccggcggagacactggcagggccagaaacgcgcgcagcgggggcgggaggtcgtatcttaaatagtgaagatggagaaat

SEQ ID NO: 273679 - DNA, 100 bp, Homo sapiens
tgcggtttggtttccttgtcaacggaggatgaagtgaacagctgagcagctcgcagagagcagggctgtttaacgacccccaactccccatccatgcact

SEQ ID NO: 273680 - DNA, 100 bp, Homo sapiens
gtcaacatggagttggtggtgctgctacaattgttttgttcaagatacacaggaattctgaaatacatgctacaggatttaactatcagaatgaagatga

SEQ ID NO: 273681 - DNA, 75 bp, Homo sapiens
ctcccatccaagacatctggtaccacgaggatcggattagagcgtcagccccagttgatgctgacagcaggaccc

SEQ ID NO: 273682 - DNA, 82 bp, Homo sapiens
cccagtgcagggcatcatcaatttcgagcagaagattctcattcagattgtggatgcctcgtcagtcatcacttgggatttc

SEQ ID NO: 273683 - DNA, 74 bp, Homo sapiens
catggcaccagggacggtgactgtggttaagcaggtgctacagaatattttagaaacagaaaatgaatattcta

SEQ ID NO: 273684 - DNA, 82 bp, Homo sapiens
aggaggaatcacgctcggaaacaatggcaaacggggattcagcgtccgatcctttggaacagggactcacgtgaagcttcca

SEQ ID NO: 273685 - DNA, 100 bp, Homo sapiens
agagatggaaacctcatagcagctgcctgccagaatggaagcatacagatctgggaccgaaatttgactaaatttctgaataaattggcagaagaacgca

SEQ ID NO: 273686 - DNA, 105 bp, Homo sapiens
atgcgcgagatcgtgcacatccaggcgggccagtgcggcaaccagatcggcgccaagacaatgcagatcttcgtgaagactctgactggtaagaccatcaccctc

SEQ ID NO: 273687 - DNA, 100 bp, Homo sapiens
tgaagtacaccgtggtgacattgtatcattggtgccagtctatccatatggggatggggaagccttggcattgtcctttttctgataacctttggaccct

SEQ ID NO: 273688 - DNA, 100 bp, Homo sapiens
caggatccggagctggagcccccaggtgtccctggccagtgtccttccacctgtccacaagcatggggaacatcttcgccaacctcttcaagggcctttt

SEQ ID NO: 273689 - DNA, 75 bp, Homo sapiens
acacaaaactgcggcccttgtctgcaaacagtggtatcgacttatcaaaggaggcagccttctgtgctgtgattc

SEQ ID NO: 273690 - DNA, 76 bp, Homo sapiens
cacaataactgttgatcagaaaaccttccatttccaggctcactccatcactcgatgagataatatgagatttcta

SEQ ID NO: 273691 - DNA, 98 bp, Homo sapiens
ctcggttcacccacaaggaatgagagctgcctgcctgctgctgcttggagagccccagacagtcgcttgaagagcatccacccaacccaccagtatca

SEQ ID NO: 273692 - DNA, 82 bp, Homo sapiens
cgcgctactctctctttctggcctggaggctatccagcgatagaatttttgcggcatttgaagagctttttccagattatgt

SEQ ID NO: 273693 - DNA, 50 bp, Homo sapiens
ggataaggtcacttcccccactaagcctacccgtatattacaagaaatct

SEQ ID NO: 273694 - DNA, 83 bp, Homo sapiens
cagtttaaccggatggaagaaatgactccatcaagaatgctggaggaagggtgtttgtccactgccaggcaggcatttcccgg

SEQ ID NO: 273695 - DNA, 82 bp, Homo sapiens
agaccctggagcctcagttggaagcagccgatccagcctgcggagcctgtggggcaggtctgatgctacaggacttggtttc

SEQ ID NO: 273696 - DNA, 101 bp, Homo sapiens
tgacacgcgcaccttgtcaccttgtcaccaatttcctgcccgggatcccagagctacccttcttggagcccacagggttgtatgaagcatgtcgttacctt

SEQ ID NO: 273697 - DNA, 97 bp, Homo sapiens
ggccgtggaagcggccaccgactactgtcagcagctgtgccaggagtgtgaggaagaggctgtctgtgtcattatgtgtgcgtcggtcaagtataat

SEQ ID NO: 273698 - DNA, 75 bp, Homo sapiens
aagaggactcaggagcaaatcagtaatagagtctactgtggccacgagtacaccatcaacaacctcaagtttgca

SEQ ID NO: 273699 - DNA, 100 bp, Homo sapiens
ccagctcgcgcttcagcgtcccggcgccgtcgcgccactcctccgaattcgcttcaagctcagcttatcaatatgggtgttattcctaccttagtgaaat

SEQ ID NO: 273700 - DNA, 97 bp, Homo sapiens
cagtctttgacaagtgatgagaagctgtcggagcttcccaaggaagctgtagagaaatatgaagaagtgctacataatttggaatttgccaaggagc

SEQ ID NO: 273701 - DNA, 98 bp, Homo sapiens
tccagcgagcggcgcggagctggacgccgcgatcgtggggcccgcgaggcgggcagccggggcgtccagcacctgtggaatcctctcaagaggaacag

SEQ ID NO: 273702 - DNA, 100 bp, Homo sapiens
cgctcgcggcctggcccttggcctcctcctgctgctactgtgtccagcgcaggacactcatgaggaccatgatacttccactgagaatacagacgagtcc

SEQ ID NO: 273703 - DNA, 76 bp, Homo sapiens
gttttatgtgccttcagtttctcagctgcagcaggagattaccagggcttttgccaagaggcagcagcagctgacc

SEQ ID NO: 273704 - DNA, 88 bp, Homo sapiens
cgggccttcagcgtttctcactggttcgaggaaggcggcctcagaggagagggaaggtgccatggataacagaggctttcagcagggg

SEQ ID NO: 273705 - DNA, 90 bp, Homo sapiens
ctggcgctgctggctgcgctctgcccggcgagtcgggctctggaggaaaagaaagatccctaaagaagtggctgacatctttaacgcccc

SEQ ID NO: 273706 - DNA, 129 bp, Homo sapiens
ccctctgccgagtctcaatatctgtcttcggtggactccttcggcagtccacccaccgccgccgcctcccagccctcccaggcccaatacttcaaagcatcctacctctgctcaatatatattacttgg

SEQ ID NO: 273707 - DNA, 98 bp, Homo sapiens
gagattcatctttcatgcagtgacatgttgataaaaaatgatggttaattggactcctgagattaacaaagaacacttgctacagggtctgcttcctg

SEQ ID NO: 273708 - DNA, 100 bp, Homo sapiens
attctgttgaccgaagagtttgtagagaaaatgttggaggatttagaagatttgacttctccagaggaaaacaccaagtctgtgaaaatcctgatggaca

SEQ ID NO: 273709 - DNA, 82 bp, Homo sapiens
ccagcttactctgcaagttctccccggacggcaagtacctgccctgggcgctgcctatggcacagccaagagcggtaccggc

SEQ ID NO: 273710 - DNA, 82 bp, Homo sapiens
ctgcgggctgtcggggtacagacgcccgcgcgcgcaggtgcattcgctccaggattgacttggcctctacttcttgttaagg

SEQ ID NO: 273711 - DNA, 50 bp, Homo sapiens
gaagcgcctctccaaactcatcaagaaccgcttacaaacacgcagatggc

SEQ ID NO: 273712 - DNA, 136 bp, Homo sapiens
ccacggtctgtggctacggatcccaggaccctcttcgcgggcgattcgcgtagcctcagaatttgatggagcttcttgaggcagaaaaagaacgcaataacaaattatcattacagtttgaagaagataaagaaaa

SEQ ID NO: 273713 - DNA, 75 bp, Homo sapiens
gccatgacagcgagcgaggcggagtcaggatggctaaaggtgaccccaagaaaccaaagggcaagatgtccgctt

SEQ ID NO: 273714 - DNA, 100 bp, Homo sapiens
gggcggaggaggaagtaggggtgcacctcagcactatcccaagactgctggcaacagcatgtcaatccaaagaagcaaacaataggtaattcttgtaaag

SEQ ID NO: 273715 - DNA, 74 bp, Homo sapiens
gccgctcagttgtctcctggaagacgggcgtcttccgaaaccagctctggggtgtcaccaagcaaggctaccgc

SEQ ID NO: 273716 - DNA, 75 bp, Homo sapiens
tcctgcctcagcctctcaggtagctgggattacagtcgtgatgagaggagatggattgaaaagcagaacagagca

SEQ ID NO: 273717 - DNA, 100 bp, Homo sapiens
gaggagatacccattttgactcagatgagccatggacactaggaaatcctaatcatgatggtgccctaatgcatgagttatcaaatgatggtgctcgtag

SEQ ID NO: 273718 - DNA, 75 bp, Homo sapiens
ccaagaatacacatggtatagatgcagcatatatccagttaatatatccaggactgtaacgagattaaaggggag

SEQ ID NO: 273719 - DNA, 96 bp, Homo sapiens
gtcgtctctgggagcctcggtttccctgtccttccaactgggacaccaaccatgccctttgcttcctatggcctccaccacactagcctcctgaag

SEQ ID NO: 273720 - DNA, 100 bp, Homo sapiens
catctgtggcttttatctgatattttaggccaaggagctactgcaaatgtctttcgtggaagacataagtggctacacaaacaagctgaggcacgaagag

SEQ ID NO: 273721 - DNA, 82 bp, Homo sapiens
ccagcagctgcagccgcagcctgtggctgtgcagggccccgagccggcccgggtcgagatccagctatgggacacagcagga

SEQ ID NO: 273722 - DNA, 100 bp, Homo sapiens
ttgggaaaagcgcactgacaatccagctaatccagaaccactttgtagatgaatatgatcccaccatagagttggtgtaatacggtgcccagtatgccgc

SEQ ID NO: 273723 - DNA, 75 bp, Homo sapiens
tggcgtcttggtgttctccacgctggttcgcagctctttcagtctcacatggcaacgaaaacaacttgtatgtct

SEQ ID NO: 273724 - DNA, 80 bp, Homo sapiens
cttctgccagcaggtggtgcggaaagtggctggattggacaagcaggcaaagctgaggcatgaagctttgctgtattatg

SEQ ID NO: 273725 - DNA, 97 bp, Homo sapiens
ggcgaagccgggagtgtgggcgcggctgggtgtgatgaatgcagactctgctaccattttggctgtttggatcctcctttgaaaaagtctcctaaac

SEQ ID NO: 273726 - DNA, 75 bp, Homo sapiens
ctggaaatttctgaagactgtagttaacaagctgttcgaattcatgcatggacctccagcaggtgatggtgtcag

SEQ ID NO: 273727 - DNA, 83 bp, Homo sapiens
ctgtggccgtgggggacatcgtctggggagccttcacgtaaatgggtccagtcatgcctcccagtaagaagccagaaagctca

SEQ ID NO: 273728 - DNA, 100 bp, Homo sapiens
cgtgataaactggatcctgatatggctctttgccgaaatgctagagaaatggtaaaaatgtctccatcgtatcatcagtccaaaggggatcccactgcta

SEQ ID NO: 273729 - DNA, 82 bp, Homo sapiens
aggcaaggcgtcagcaggcatcgcccaccctgtccccgctgtcacccatcactcaggtgagaagccctaccactgcaactgg

SEQ ID NO: 273730 - DNA, 98 bp, Homo sapiens
cggcggcgctggggcccccagaagtgatcgctcagctggagaacgcggctaaagttctgatggatggtcatccagaggataagccaacgcacatcatc

SEQ ID NO: 273731 - DNA, 101 bp, Homo sapiens
gggagcggagagcgcaggcgtggtgatggcttctctgactggatgactgagcgagttgatttcacagctctcctccctctggagcctcccttaccccccgg

SEQ ID NO: 273732 - DNA, 98 bp, Homo sapiens
aatgagactgtgagaaacttggcttgttcagaagatactgtgcataagacatgagcattcccatggtttggcatggacatcggtggaacgctggttaa

SEQ ID NO: 273733 - DNA, 100 bp, Homo sapiens
agaggatccagtgttcaccatcctggccccggaagctggtcagtgagaaggtcggaggggccgaggggaccaagctggatgatgacttcaaagagatgga

SEQ ID NO: 273734 - DNA, 101 bp, Homo sapiens
acaggtccagggcagaggaccaacatgggcattttgtttatgagcaagtgtgagatcaaggtggcccagcccaaagaagtctatcagcagcagcagtatgg

SEQ ID NO: 273735 - DNA, 74 bp, Homo sapiens
gagagagagcttggttaacttgggagaaagtttcatctgtggatggagtattgatggagtcttgctctgtcgcc

SEQ ID NO: 273736 - DNA, 80 bp, Homo sapiens
ggaagcagccgatccagcctgcggagcctgtggggcagccgccaccggcacggccaggccagcatggtggaccacttact

SEQ ID NO: 273737 - DNA, 90 bp, Homo sapiens
agccaaagcaagtttatgttgataagttggctgaattaaaagtctaagagtgtaaccagttccagtagcagtagcagtgacagttctgcc

SEQ ID NO: 273738 - DNA, 75 bp, Homo sapiens
cagcggtttccctgtcagtgacagtaaacggcacctaacccccgaagaggagatgtccagctcgccgctgtccaa

SEQ ID NO: 273739 - DNA, 74 bp, Homo sapiens
taatatccaatcagtacaacaatgagccttcaaacatatttgagatggatagtggctataatacgcagaattgt

SEQ ID NO: 273740 - DNA, 75 bp, Homo sapiens
gcaggaggaggtggcggcggcgggaagatgccaaatagttgcatcacatgtatctaatccgagagtctcatgctt

SEQ ID NO: 273741 - DNA, 83 bp, Homo sapiens
caccgccgccccctccggcgtgttcatgcccccggggaaacttcctcctggccaaccctgtgtctggcagccccatcgtgacg

SEQ ID NO: 273742 - DNA, 75 bp, Homo sapiens
ccaatcccaggaggaaaaacgaacattgggtgctttctgcttgaagttaccaccaaagatccttcccttgtggta

SEQ ID NO: 273743 - DNA, 75 bp, Homo sapiens
agacggaccgtgccgggaagagagctcccctgaacagcagctgcagcagccatggccccgccctgggtgcccgcc

SEQ ID NO: 273744 - DNA, 75 bp, Homo sapiens
ttggagccgtctgcaaagtgtccccggcaagaagacacgaatgcagagtttgagtccagatcccaaagcccagta

SEQ ID NO: 273745 - DNA, 50 bp, Homo sapiens
ctgaacattactcttccagaagaggtgtgctgggcatcaaggtgaagatc

SEQ ID NO: 273746 - DNA, 100 bp, Homo sapiens
tcaagaaaagaccaatggaagttgttaatacagagatgctttctgatgcagcacctgggaaactgagaattgttcatggagatgtcttgacatttaaggt

SEQ ID NO: 273747 - DNA, 75 bp, Homo sapiens
ctgctgatgtggggactgctcacgttcatcatggtgcctggctgccaggcaggcgctgttcttgctggctggtgc

SEQ ID NO: 273748 - DNA, 50 bp, Homo sapiens
ctttgagaccgtgaagagaaagatgcagtgtcagctgctgctggaagtgg

SEQ ID NO: 273749 - DNA, 75 bp, Homo sapiens
tgggaatccacattaagaagtacaatagcattcgcggtaaagtcagtgataaatcttttgtttgctgcatatact

SEQ ID NO: 273750 - DNA, 100 bp, Homo sapiens
tctggcatgagctgcactttgttgagaaggctgcagcaggtggcggcgggaaggccaaggtctctggcagacccagcagccgaaaagccaagtccccggc

SEQ ID NO: 273751 - DNA, 100 bp, Homo sapiens
gacctcaagaagcagctccacgaaaggcagccgcggatcgccgcgctcagcgacaaacaagacctgaaggagaagaaggagaaggtggaggagaaggcaa

SEQ ID NO: 273752 - DNA, 90 bp, Homo sapiens
ggatgaaaaatacaggaaatgtaaagtggagtgcagacacaaaggaaagctaaaaccatgggggcaatctaaagaaaataattatctaaa

SEQ ID NO: 273753 - DNA, 83 bp, Homo sapiens
ctctgacagagaatgagatgaccacaattcactatgatagaattacttctctacaggtatctgctgtgcgtttcagtcaacaa

SEQ ID NO: 273754 - DNA, 96 bp, Homo sapiens
tcagtcccgtgggcaatagagtcactgtatttgaccttaaaaacctttgacgacccctatgccctggtggtgctggctgaggaggagctggtggtg

SEQ ID NO: 273755 - DNA, 83 bp, Homo sapiens
gcgagcgcgagcggcgcgagaaagctctgaagggctccaagaagctggtgctgtctgtgtactcagcagggcgcatccctggg

SEQ ID NO: 273756 - DNA, 74 bp, Homo sapiens
tggggagtttcatcctagcgggagccaaaaacctgtatatcatctccgtgaaggggatcaagggacggctgaac

SEQ ID NO: 273757 - DNA, 100 bp, Homo sapiens
cgggctgagcggcgagtttccgatttaaagctgagctgcgaggaaaatggcggcgggagctttgcaatcagcttgacctgtggggactcagaagaccctc

SEQ ID NO: 273758 - DNA, 98 bp, Homo sapiens
gagtgctttggacgatcttcagctggccaacagcaccatcattgcatttacctcggatcatgagcctaaaaccattggccaaccgtcacgcaactgcc

SEQ ID NO: 273759 - DNA, 100 bp, Homo sapiens
ccatttctgaagaatctgaagagctggatcagaagacattcagcattaactttgaccagaataagctggaagaagaaatgagaaagcgaaaagaaagagt

SEQ ID NO: 273760 - DNA, 74 bp, Homo sapiens
tttgtggacttgcaggatgacttagacgactggatctgaaacttgcccacccttcgggatattgcaggacgctg

SEQ ID NO: 273761 - DNA, 74 bp, Homo sapiens
gtcgtattgaatggtgttgtaggagagaagtggatgggccctatacctccagccgtgaatgccagactttaaga

SEQ ID NO: 273762 - DNA, 101 bp, Homo sapiens
gctcacccgcctctacaacatcaagaagagtccctgtgaagcaggaagagtgagggcaggttcactgcagctcagcagcatgtctgcagggaattcatctt

SEQ ID NO: 273763 - DNA, 98 bp, Homo sapiens
aacaatgatcgcccgagtggcggacgggctcccgctggccgcctcgatgcaggaggacgaacaggtagagatgacgacacaacagacagctgatgtat

SEQ ID NO: 273764 - DNA, 100 bp, Homo sapiens
tctgaagatgaaacagagtatggctgcagaggatccatctgtcttagcaaggctgtcatcacagcagtgaaatcaactgtgcagaccatcactgttggag

SEQ ID NO: 273765 - DNA, 100 bp, Homo sapiens
tctgagggaaaggacaagatgaagtggaaggcgcttttcaccgcggccatcctgcaggcacagttgccgattacagaccccaggcaggcacagtcttccc

SEQ ID NO: 273766 - DNA, 100 bp, Homo sapiens
tcagtgattgcccagaccaattggaagtttgtagagggcctgctgaaggaatgccgcaataagatgagtgccaaaccaaatatggaaatgctaatgcctg

SEQ ID NO: 273767 - DNA, 83 bp, Homo sapiens
ctgggatccccgccgctctgtctacaacccgaggacccgtgcatctcttccgactctcgggcaagtgcttcagcctggtggag

SEQ ID NO: 273768 - DNA, 100 bp, Homo sapiens
tgttggagccattaagcttacctacatttcaaaggaatgtatcctgtcaggtataatgtcagtgaatggcaagaaagttcttcatatggatcgaaaccct

SEQ ID NO: 273769 - DNA, 80 bp, Homo sapiens
tcgtctcttacgtctgcggaagtgcagctgcctcagttcttagcgcagggaaggagattacagcagaaacttttatggag

SEQ ID NO: 273770 - DNA, 50 bp, Homo sapiens
tgcgccaaggcctacggccgaggagatcatgaatcagacagataaaaatc

SEQ ID NO: 273771 - DNA, 75 bp, Homo sapiens
cacccgcgggggaccctactggcaggaggtcaagatttcaggtatgctgctgaaagtgggaatcctctacattgg

SEQ ID NO: 273772 - DNA, 100 bp, Homo sapiens
cacacctactgggattccttgggcaatggtgaatttgaaaaggcctactctgtgaagagaacattgatgactgtgcccggggtccccattgccttaatgg

SEQ ID NO: 273773 - DNA, 95 bp, Homo sapiens
tctcaagtagctgggattacagatcctgagagtcagaccttgaaagaacacttaattgatgaattggactatgtattggtccctaccgaggcgtg

SEQ ID NO: 273774 - DNA, 75 bp, Homo sapiens
gcgggagcctttggggcaccacagagatgcggcacttctcagaacttctggatgagttttcccagaacgtcttgg

SEQ ID NO: 273775 - DNA, 75 bp, Homo sapiens
cacactacccacccagaagaagtccgtccatgtcaaagatgagacagagctgtgaaccaaccccgctcacggcta

SEQ ID NO: 273776 - DNA, 75 bp, Homo sapiens
cggctgtcggctggtgcttggcggcagggacgatgtggatgaaagccaaactggagaacccggctggcttggagg

SEQ ID NO: 273777 - DNA, 75 bp, Homo sapiens
gactatataagtagcttaaagatgacaccttgcattccctatttaggtttttcatttctaacaaccagatggccc

SEQ ID NO: 273778 - DNA, 50 bp, Homo sapiens
gtggccagcggcgccgccgaagaatgccaattcctgtccagttgatcgaa

SEQ ID NO: 273779 - DNA, 98 bp, Homo sapiens
cctatccttacccgacctcagatgctcccttctgctcctgtgctcaagtaaagctctttgtgacagggcttttcagcttaaatcaagatattcctgct

SEQ ID NO: 273780 - DNA, 75 bp, Homo sapiens
gtacttttcatggtgcatggaaggaaagccaatgcgcagggaactctaatgatccaggacaaagaagttaccctg

SEQ ID NO: 273781 - DNA, 83 bp, Homo sapiens
aagtcttttgaagagcttcggctacacccccaaaggatggatttgtaatcgctgacgttcaactagttacaagcaattctcca

SEQ ID NO: 273782 - DNA, 96 bp, Homo sapiens
cagcctccaaaagtgctggcattacaggagacactgtcggacattcgggaaggtgcgccgctaggggtccacctgccttttgtgggctactcctac

SEQ ID NO: 273783 - DNA, 80 bp, Homo sapiens
ctgctttccactcggctcctgtcgtccgttctctcaggctcccgttcagaaaccaaggtgtatgttggtaacctgggaac

SEQ ID NO: 273784 - DNA, 75 bp, Homo sapiens
tcctggctgccgtgaataggcagcctaaaggacccacccgaggacgggtcaccatggctttggagcacctggtag

SEQ ID NO: 273785 - DNA, 76 bp, Homo sapiens
cagcaggagctttttgcttagcactgaaaattctggataatggtgaatggatgggctatgtgcgggagtatattct

SEQ ID NO: 273786 - DNA, 60 bp, Homo sapiens
gtggctgcggcgcgggccgagaaggaagctatgtgatgatgatgccatttaaacgacagg

SEQ ID NO: 273787 - DNA, 83 bp, Homo sapiens
ctgctgtcaaggatcttgtgtgctccatagtttatcaaaaggttgttgatcattatgaaaatcctagaaacgtggggtccctt

SEQ ID NO: 273788 - DNA, 100 bp, Homo sapiens
agttagtgccaaaacacctgaggaatcatgtgcacagcctgatgaagacttgttcaatccagactatgtagaagttgatcgcatcttggaggtggcccac

SEQ ID NO: 273789 - DNA, 75 bp, Homo sapiens
ccgagctcatcagtgatgaggcccaggccgacctggcgctgcggaggtatcattgcccagtgcctaagatctttt

SEQ ID NO: 273790 - DNA, 75 bp, Homo sapiens
gtggctgtagctgccctttccgtttccagggttccgaccagtacctttgtgttggatgaatttaagcgcaagtac

SEQ ID NO: 273791 - DNA, 95 bp, Homo sapiens
ggcaacctaccagctaactgaagagggcacctttaaggtggtggatgaagaggccatggagaagtgtactaatggtcacttgatgtgcgctggct

SEQ ID NO: 273792 - DNA, 100 bp, Homo sapiens
atccagcctatctgcatccctcaggagaatttccaggtggaagggccctggctccgggcctgcggtcagaccaacgtgtcctgcagggtggtgaagggga

SEQ ID NO: 273793 - DNA, 100 bp, Homo sapiens
gtggaccccaagaagaccattcagatgggatctttccggatcaatccagatggcagccagtcagtggtggagaacattcagaagattctcggccttgccc

SEQ ID NO: 273794 - DNA, 90 bp, Homo sapiens
atgcagtacgccacggggccgctgctcaagttccagatttgaagtgcctgtttcccattctgcccgattttaagtttcctgaggcacccc

SEQ ID NO: 273795 - DNA, 75 bp, Homo sapiens
gggcacaagccagcgtcacccatggagcacatggagatgatacagaaggtggtcatggcactaggagactacatg

SEQ ID NO: 273796 - DNA, 100 bp, Homo sapiens
ttagggtcctttatatagaagggagagtagatgctgcagttggagaagaaacttgaacgtgaacttgaggatgatgcacgagttattgcttgccggttcc

SEQ ID NO: 273797 - DNA, 75 bp, Homo sapiens
tccgtgttggcagcagtgctgttaccactctgggtgatccagccaaaggctaagtgctatttatggaggtaccta

SEQ ID NO: 273798 - DNA, 74 bp, Homo sapiens
gtagctgggattacaggtgtgcaccaccacgcccaggagctgactaaggctttggaacagaaaccagatgatgc

SEQ ID NO: 273799 - DNA, 101 bp, Homo sapiens
agcagtgcagcaactaccctcacagtcagccctgtcctccctctgaccagtgctgctgtgacgaatctttcagttacagatggtgctggatctttgccttg

SEQ ID NO: 273800 - DNA, 91 bp, Homo sapiens
cccagaccctggagcctcagttggaagcagccgatccagcctgcggagcctgtggggcaggttatcttatgatgaggcttttgctatggct

SEQ ID NO: 273801 - DNA, 82 bp, Homo sapiens
cagtaacagccaagatgctgcggaatctgctgaatccagttcggacctatggttatgcgttccttttttccctcactggata

SEQ ID NO: 273802 - DNA, 100 bp, Homo sapiens
gaggagccttctcaagaacagaggcatggaagaggagatggttcgtgttacgcagtggccgtttaactggagatccagatgttttggaatattacaaaaa

SEQ ID NO: 273803 - DNA, 90 bp, Homo sapiens
cagctgaagaccactttagaaactcaattaatgttgacctaaccaatgaagaaacaactgattccaccacttctaaaatcagcccatctg

SEQ ID NO: 273804 - DNA, 100 bp, Homo sapiens
caagtcctggctcagcaagactctcgagcccatagatcatgatgcagccgtccttttggatttctttttaataatgtgtgacccttcacctttgatcccc

SEQ ID NO: 273805 - DNA, 75 bp, Homo sapiens
aatggggaggacaacttcgcccgggacttcatgggcttcataaacttcacttaccaaatacttcaagggattcag

SEQ ID NO: 273806 - DNA, 82 bp, Homo sapiens
ccgcggttaaccacgtctcgtccacgacctccctagttggaatcgaagcctcttaaaatggcagatgacttggacttcgaga

SEQ ID NO: 273807 - DNA, 75 bp, Homo sapiens
gtcggggaaccatggctgccccgagagttgatcatggccttgccaggttggtgacagtatattgtgagcatggtc

SEQ ID NO: 273808 - DNA, 99 bp, Homo sapiens
ttaaaactgaagattgtcatgattgtttatcctaatcccaatgctgaagtaagattgtcttggaaatactaagttggatgagatcgtggggctcaccag

SEQ ID NO: 273809 - DNA, 79 bp, Homo sapiens
ggagcccaaacccggggcaggcgggcagctgtgcccgggcggcacggccaggtacatgtcccagagcaagcacacggag

SEQ ID NO: 273810 - DNA, 74 bp, Homo sapiens
gactactggggccagggaaccctggtcaccgtctcctcagaaaaatccagttacactcttaaaggaattgtcag

SEQ ID NO: 273811 - DNA, 75 bp, Homo sapiens
tcctgggtctccgggcctacatccgcaaacagtgcaaccacatcttcctccgggcctcgattgggtggctctggc

SEQ ID NO: 273812 - DNA, 100 bp, Homo sapiens
agaccaggaacccaccagaaggaaccaattccggacacataacaagcagcagtgaggacaccaaaggctccctggtcggccagagactctcagaccatcc

SEQ ID NO: 273813 - DNA, 96 bp, Homo sapiens
gtgattttaaaatgtgctacaagcttacttctgtttttaaccgtgattggagataccacaaagaagaacgagtatggattaccagggcaccaggca

SEQ ID NO: 273814 - DNA, 83 bp, Homo sapiens
cacgagcatggcatggccccgcaggtcttcacccaggccctggagtgcatgcgcagatgactccaatgatatgtgggaggacc

SEQ ID NO: 273815 - DNA, 95 bp, Homo sapiens
aaaaggcaatcactagggaagcacagatgtggaaagtgaatgtgcggaaaatgccttcaaatcaggaacaagctgaaagctggatacctaatgtc

SEQ ID NO: 273816 - DNA, 100 bp, Homo sapiens
tcaagcttaggaccacccaccatgcctatccagccgaaggtggtctggatgaagaacaagatggaaatccgtgaagatcccaagttcctgataaccaatt

SEQ ID NO: 273817 - DNA, 100 bp, Homo sapiens
cgcctatctgcgagaacagagaagggagctctatagtcggagtggagaactgcaagattgttgtgtccactgtatcctggcttgcttgttctgcgaattc

SEQ ID NO: 273818 - DNA, 90 bp, Homo sapiens
gtgcaactggtgaatgagcgacagccccaggcccgggttgtggtgctgatatgtgcagcgggggctacagcgagtggggctagatcccca

SEQ ID NO: 273819 - DNA, 98 bp, Homo sapiens
tacaccgactagcgcgggcccgttgcggctgcaggcaccatggaccgagcccccacggagcaggaaaaagcaatttcggtatctactagaatccaaag

SEQ ID NO: 273820 - DNA, 100 bp, Homo sapiens
tctaagctgaataaagctgttttggaactgtcaggtacctcaaagcgcaccaagtatagatgagaaagtagatcttcattttattgcattagttcatgta

SEQ ID NO: 273821 - DNA, 90 bp, Homo sapiens
cgctggccctgaggcaacggctcatcagttacatggacacagaacagtatgaagaagcagtacgagactatgaaaaagtataccagacag

SEQ ID NO: 273822 - DNA, 75 bp, Homo sapiens
tttaagatcaacttcctttgtaagatgaggacggggacttggttgccttttccagtgacgaggaattgacaatgg

SEQ ID NO: 273823 - DNA, 75 bp, Homo sapiens
attgaacagatgctcgtcaatgatcagatcatcatggcaaaaccagctggtgggcccaagcctccaagtgggaag

SEQ ID NO: 273824 - DNA, 123 bp, Homo sapiens
tcagtagaaactgctctgagagcttacgtaaaagaacattacccgaatggagtctgcactgcagttgtgaaaaacttcaggacaaaaatgtttcatttaaggacttgtgctgctaagttgagg

SEQ ID NO: 273825 - DNA, 89 bp, Homo sapiens
tttaactatgttcactgtatgtttggaatcagagcacatctgctattcttatagaaaatatggatctttacatgttgaatccttgcagc

SEQ ID NO: 273826 - DNA, 100 bp, Homo sapiens
attgaaaaaatggttgacctcacccagggaaagaatatggcaaagctgatgcaagatgggtttattttgatccaaccattgtgtctgtggaaattctgac

SEQ ID NO: 273827 - DNA, 51 bp, Homo sapiens
gttcctgtggaccccagtccaggtcctcagaatggttggaatgaccctcca

SEQ ID NO: 273828 - DNA, 90 bp, Homo sapiens
gccaggttcagcacagagctggaaagagagaagcttgttcatcatgcctagtggcgtataagaagaccccgccaccggtccctccacgca

SEQ ID NO: 273829 - DNA, 50 bp, Homo sapiens
acagcgaggagctgagggaccctaacccttaggagaaatcttgagagtgg

SEQ ID NO: 273830 - DNA, 101 bp, Homo sapiens
aactaactccaagccttgtgccaactgtaagtctccaatacagaagaatgaaggctgcaatcacatgcagtgtgctaagaatcaagctatagaagtggtct

SEQ ID NO: 273831 - DNA, 100 bp, Homo sapiens
agacccatttccagtcatgaatggcaaggacacggacaagcaagtcttcgcccgtaagcggtggctcacgcctatagtccagggatgccgaggagggagg

SEQ ID NO: 273832 - DNA, 100 bp, Homo sapiens
catagcctggtcctgcattacggtctctataagaagatgatcggcacaagagactatagtccccggcagatggcagttcgcgagaaggtgtttgacgtaa

SEQ ID NO: 273833 - DNA, 98 bp, Homo sapiens
ttcaaaggacctgcccccagagagagatacaatgtctctttgctatatgaccttgaaaatcttccggcatccaaggattccattgtgcatcaagctgg

SEQ ID NO: 273834 - DNA, 76 bp, Homo sapiens
gtcattaggatgctgtcctacggaaggagagctgcatgatctgattgcagagggtttttaatgaccacaacaagca

SEQ ID NO: 273835 - DNA, 100 bp, Homo sapiens
cctagtattgcatcctacagatgtgctgtaaacatcaaaagaagacggtgggatcaggagatgaaaaggtggacaagtcctattttcaagagaagatgac

SEQ ID NO: 273836 - DNA, 75 bp, Homo sapiens
ctgtactggtatagcaatcaaatggtcattcccaaaagcaagttcgtcttggtgaagttcgacacccagtacccc

SEQ ID NO: 273837 - DNA, 75 bp, Homo sapiens
gatgaggaaggctggtatctttcagagtgtaaagtaatcttggaatataaaggttaatttggagtggcccctgga

SEQ ID NO: 273838 - DNA, 82 bp, Homo sapiens
atgacgattcagagactgaaaaacctgaggctgatgacccaaaggatattaccttccaaatgatgatggagaattttatcag

SEQ ID NO: 273839 - DNA, 50 bp, Homo sapiens
atggtcttgaaacacaaatggtttttgataaatttgcgcctcattttggt

SEQ ID NO: 273840 - DNA, 101 bp, Homo sapiens
caaatgctaaaattctcatcaatcactgtcacacaaatcggggactggcagcccaccggcatcttttcttaaggaatgaatctgaagtctgctgcagtaaa

SEQ ID NO: 273841 - DNA, 75 bp, Homo sapiens
ctacactttctgaattttccaggtgattgcccacagtgagtatcaaaagtccaaaagaatttccatctttctgag

SEQ ID NO: 273842 - DNA, 74 bp, Homo sapiens
ctccctcaccttggacacctcgcttggggtccgcaagcaggtggtgaacatcccgtccttcattgtccgcctgg

SEQ ID NO: 273843 - DNA, 80 bp, Homo sapiens
acttcccgaaagcttcactaagtaagtggagaaagagttgaagggaaagtgttgggatttggacatggagttcctgaccc

SEQ ID NO: 273844 - DNA, 78 bp, Homo sapiens
tgaaagagaagcacggctccgactactccaaggctcctcagtggttggaaagtgattcttgtcagaaatgtgagcagc

SEQ ID NO: 273845 - DNA, 98 bp, Homo sapiens
cgccaggcagccctgaaatcagctcgagacatgtgggctgattacatcctgggagatgcacttatttacatggaaccagagaaacaagtgatgtccag

SEQ ID NO: 273846 - DNA, 100 bp, Homo sapiens
gctcaggacacacagacccagctggaactcgaacaaaatccagtctcatagcagaggagaatataatgtttacagcaccttccagagccatgaaccagag

SEQ ID NO: 273847 - DNA, 100 bp, Homo sapiens
ctggtgttgagtggtcggcttggtgtggtgtgcggaggagctccaggcccgtcggcgcggaggtgtggatgaggtcaccattgtcaacattttgaccaac

SEQ ID NO: 273848 - DNA, 95 bp, Homo sapiens
tcaaatggcacttcattggccacctacagaaacaaaatgtcaacaaattgatggagcatgaataatctttcatttagtgagctatgttgcctctt

SEQ ID NO: 273849 - DNA, 75 bp, Homo sapiens
gaaacatgcagattatatcgcatcctatggctcaaagaaagatgattatgtgtacccaggaaggatgtgggaaac

SEQ ID NO: 273850 - DNA, 134 bp, Homo sapiens
cagagattgagaatgtccatggatttgtttctcattctcatatttcaccaataaaggaaatcaaagagcaggaggttgtggacaaagtcatggaaacactggacaatgatggagacggcgaatgtgacttccag

SEQ ID NO: 273851 - DNA, 100 bp, Homo sapiens
tgggtcctccctttgcagcccgtgcggggccgtctcggagaccccgcgccgacggctgctcaaacatcagggatggcggtcgttcccatcgtcatcagcc

SEQ ID NO: 273852 - DNA, 98 bp, Homo sapiens
ccacagctgagaagtgtttgcataaaattaatgggaaaccccttccaggagccacacctgtttgatctgtggatgaaatgaatcatgattttcaagct

SEQ ID NO: 273853 - DNA, 100 bp, Homo sapiens
ccgacgagcagttgggcacgggctgagtccgcctgccggcagttgtattccctgaatgactataaaccacccatttcgaaagcgaaaatgacccaaatta

SEQ ID NO: 273854 - DNA, 100 bp, Homo sapiens
agactgttagattttgggatcttcgagtaccaagttgtgttcgtgttgttggcacaacatttcatggaactggcataatcaccagcaacacccgggacaa

SEQ ID NO: 273855 - DNA, 101 bp, Homo sapiens
gtgcagaggatcctggaggcctgggaagccaacgaccacacgcagtgcagagcattgtagaccaaggagccatggataggagaagtatgggtgaaacagaa

SEQ ID NO: 273856 - DNA, 100 bp, Homo sapiens
ccgcggagcgcacccccgtgcccttttcagaacccagcgggtgccgcttctccacccgaggcttccacctccaacgagccatgttccaggctgcaggagc

SEQ ID NO: 273857 - DNA, 101 bp, Homo sapiens
attgtggaccaacgggtgcgcttctacccagtggccttcttttgctgctggggcccagctttaaggaagcctcctatttcagtttctcaacatgaaagtca

SEQ ID NO: 273858 - DNA, 96 bp, Homo sapiens
tggcagaggctaaaaataaaggagaagtatttccaacaactgaaggagtgccccagcctctcccaatcacgcgggagtgctgtctgctcactctag

SEQ ID NO: 273859 - DNA, 100 bp, Homo sapiens
gatggtgtctctgggacatttagccaaaggagccagcctggacgatctcattgacagctgcattcaatcttttgccgggaagatttccagaggattccag

SEQ ID NO: 273860 - DNA, 50 bp, Homo sapiens
gtaacccaccgccatggccgaggaaggatgctgttcccaaaactgctaat

SEQ ID NO: 273861 - DNA, 50 bp, Homo sapiens
tggggataacattcatgcagaacatcagaatatggaaggctccatgttga

SEQ ID NO: 273862 - DNA, 50 bp, Homo sapiens
ctcgaccacagcaagctcctggggtctgtccacgttctctgtgggttcat

SEQ ID NO: 273863 - DNA, 90 bp, Homo sapiens
cggatctggaggagcagttgtctgatgaagagaaggactctgtctactagtgacgatgtcgaagacagggaaaatgaaaagggtcgcctt

SEQ ID NO: 273864 - DNA, 100 bp, Homo sapiens
cccggaaccgcgattcggcgtgtcaggtcacctggcggtagacccattcataagaggaaaagacagaattcacattgggatccagtttctttaatatctc

SEQ ID NO: 273865 - DNA, 74 bp, Homo sapiens
acttctgattttgaaacacctgggtctgggcttcccgggcgagcggtggtgcaagcagctaatgactcagtctg

SEQ ID NO: 273866 - DNA, 82 bp, Homo sapiens
catcctgcgggtgcctttgaaaatcaacgacaacttgagcacagggacttccttccccgcggttcaggaatcgtcacccggc

SEQ ID NO: 273867 - DNA, 75 bp, Homo sapiens
tgagttttatgcaaaatcagtatattggttccaatgattcttgttggtaataagtgtgacttggaagatgaaaga

SEQ ID NO: 273868 - DNA, 100 bp, Homo sapiens
acggcgtacgccctcatggggaaaatctccccggtgactttcagtgaacctaatgtcctcgatgactcccagggcctggccgccgagggcagcctctcta

SEQ ID NO: 273869 - DNA, 100 bp, Homo sapiens
ggccccggtccattctcctcgcgctgcaaggatgctcctgggatttcggagaggccgcaggagtcatttcctttccgcttggccctcatccagcttcaga

SEQ ID NO: 273870 - DNA, 90 bp, Homo sapiens
cctgcagtgcagacgaggtggatgaggccgagggcggcgacaagaaccggagggaggtgtagaaagaggtacatggagaacaagtttgtc

SEQ ID NO: 273871 - DNA, 83 bp, Homo sapiens
ccaggagttcgtctcttacgtctgcggaagtgcagctgcctcagttcttagcgcagttttctggatatgccgcagaaggatcc

SEQ ID NO: 273872 - DNA, 50 bp, Homo sapiens
ctctacctcatccttgagtgcctcagtgccagctgaggtgggtgtcctgg

SEQ ID NO: 273873 - DNA, 100 bp, Homo sapiens
cagcttcgcggcggtcatgggtgccctggacatggcccaggttcaacagagtttggaaaagatttctaaactggagcaggaaaaagaacattggatgttg

SEQ ID NO: 273874 - DNA, 90 bp, Homo sapiens
cctctgttgacctatgatctgcagggagacgcacagccaggacatcctggaacctgggaaaggcctcctccagctggtgatctcgggtcc

SEQ ID NO: 273875 - DNA, 100 bp, Homo sapiens
cgtaatgagcgtcaaaattatccgaaaccgcctcactgggaatcagagatcattgatttcttcctgggggcctctctcaaggatgaggttttgaagatta

SEQ ID NO: 273876 - DNA, 83 bp, Homo sapiens
gagaagatcctgggcagcctccagcagggacctgtgacaggcgatcagtgggtgaccgcggctgcgagggactttgtcatccg

SEQ ID NO: 273877 - DNA, 80 bp, Homo sapiens
ttgaacaccttcgggatatctttgaaacagaacagttggttgaatctggcgatgtggaacccatggatatggagggctga

SEQ ID NO: 273878 - DNA, 100 bp, Homo sapiens
atttaagtacaatggtgggcttaattttaggcaaaaactgattattccaagtggaagttgccctgttattctgaatacttacttttgtgagaaagttgtt

SEQ ID NO: 273879 - DNA, 100 bp, Homo sapiens
tgagtcagacaagcggtggtgaggcaggctcgcctcctccagctgttgttgctgctgatggcatctgagcgagaaggctctggaagttctggcactgggg

SEQ ID NO: 273880 - DNA, 95 bp, Homo sapiens
catgatcgaggccacagcccaggtcacagtgaaagatatgagaccttggtggggacaattgggaaaaagtttgccagaaagagagaccatgccaa

SEQ ID NO: 273881 - DNA, 90 bp, Homo sapiens
gcctattgagttaacacctctgccgctgctaaaagtatggtttgaagtggtgaacatggatttttctcggcttcacatgtacagtcctcc

SEQ ID NO: 273882 - DNA, 100 bp, Homo sapiens
tccgaaccctcagcctcaagccgctgctcttcgggccgagaactactggtggcgtggccagaacacacggacgctgtgtgtggggcccttccctcgcaac

SEQ ID NO: 273883 - DNA, 82 bp, Homo sapiens
gctgctcactgccgcgctcatcttcttcgccatttggcacaaggccaatgatgaggccaatcagagtgatacaagtgtctcc

SEQ ID NO: 273884 - DNA, 74 bp, Homo sapiens
ccggtagatctccttgaatatccacttcctgcctgacacagctcacttcaagaagtgcacaatgtcagaacgtg

SEQ ID NO: 273885 - DNA, 75 bp, Homo sapiens
tcgatccagcaccatggggaagcgggacaatcgggtgtaccaaacgattccctggttatgattctgaaagcaagg

SEQ ID NO: 273886 - DNA, 51 bp, Homo sapiens
ttcgcagtggtcgcttcttctccttggcttaccactcttctctcatggatc

SEQ ID NO: 273887 - DNA, 100 bp, Homo sapiens
gaaatacagaagcacagtcagcaaaagcaaagacccctcggggctgctcatctctgtgatcagaggacaagaattttgggcagatttgaatgccatgaac

SEQ ID NO: 273888 - DNA, 106 bp, Homo sapiens
caatatctgtcttcggtggactccttcggcagtccacccaccgccgccgcctcccagcccgcggcgccatggctcacgtcggctcccgcaagcgctcgaggagtcg

SEQ ID NO: 273889 - DNA, 50 bp, Homo sapiens
aacgtgctgaacaagagcaacgaggtctgcgaaacttgtatctgttttaa

SEQ ID NO: 273890 - DNA, 100 bp, Homo sapiens
gtccatgagatttttcagggaacgcttaccaatgaaactcgatgcttgaactgtgaaactaaaatatttacaccagcagctccagttcataccaataaag

SEQ ID NO: 273891 - DNA, 50 bp, Homo sapiens
cggatatctgcggctgatcctgccaggtcaagagcaatctgaatccaaat

SEQ ID NO: 273892 - DNA, 83 bp, Homo sapiens
tgagggtgccctcaatgagcacatgaccagcttagcttctgtcctaaaggctttatcctgtggataaacgcagagtgaacgag

SEQ ID NO: 273893 - DNA, 75 bp, Homo sapiens
cagctcctggcctattacttcacggagctgaaggatgaccaggtcaaaaagctctcatttcactcttcagtgttc

SEQ ID NO: 273894 - DNA, 97 bp, Homo sapiens
ccgctgtgcacgccgtcgcggagccagctgctcactggccgctaccagcttgaaattttgacaaacttggcaaatgaagccaacatatcaactcttc

SEQ ID NO: 273895 - DNA, 74 bp, Homo sapiens
ctgaaatactgaaagaaattcgagaagctgcaaatgccaatacaaaagttttgcagtactatttcaatctagga

SEQ ID NO: 273896 - DNA, 95 bp, Homo sapiens
cgagatacaggacatctcgctccatgggggaaagacgcaggtgacggccacccacggactctgtcacttgctgggattcacacacggcacggagg

SEQ ID NO: 273897 - DNA, 75 bp, Homo sapiens
cttctctgctggaagccgtctacatagatgagacacgatggcctgtgagtatctgtctgtggaagtaatggagcg

SEQ ID NO: 273898 - DNA, 108 bp, Homo sapiens
caagtttagggagtccatggccagaaaacttttgggtgtaaacaggaacatcgataagtagtgtaaaaacttgcacaatgaaatccgaagccaaggatggagaggagg

SEQ ID NO: 273899 - DNA, 50 bp, Homo sapiens
catcagcagctccaccctgtcagttcgaaaagatataatccgcatcctcc

SEQ ID NO: 273900 - DNA, 90 bp, Homo sapiens
ctctggatagcaccttatggacaggaaattgacaatggcccttcagctatgctaggtctataatgggaagtgtcacagttcggtatttct

SEQ ID NO: 273901 - DNA, 98 bp, Homo sapiens
ctcagattgtcatagatgatgcaactatcttaatcctcggagggtgtggcggtcccaatgcttggaaagaggccagaagatcagtgagcagattgtca

SEQ ID NO: 273902 - DNA, 95 bp, Homo sapiens
caacaagttcaaatgccggatattgaatgaaaaggtgaatactccaactaccacagtctatagaaatttgcctgtaatggtactgtgattgaaca

SEQ ID NO: 273903 - DNA, 82 bp, Homo sapiens
gacggcctcagcaggcggggaagatgaaagggttttaaaatcaaagatgggaaaatcggagaaaattgcccttccccatggc

SEQ ID NO: 273904 - DNA, 100 bp, Homo sapiens
aaggaagcaagcagttcagaagagccaaggaataaacatgcaatgaacccaaaaggctatttgcatgcaaagaacatcatccatagagacatgaaatcca

SEQ ID NO: 273905 - DNA, 100 bp, Homo sapiens
cttccctctacccgcccggcccgcggcgcgcaccgttggcgctggacgcttcctccttggaagcgcctctccctcagctgagtcagtgctgattctctca

SEQ ID NO: 273906 - DNA, 82 bp, Homo sapiens
cccagatatagccgttggtacaaaggcgccatgtcagaaccggctggggatgtccgtcagaacccatgcggcagcaaggcct

SEQ ID NO: 273907 - DNA, 101 bp, Homo sapiens
catttctgactctcctcctactcttgttcgtctgagaaaactgaagtttgccataaaagttgatggagattacctttgggcatagaatgtcaagctaacca

SEQ ID NO: 273908 - DNA, 73 bp, Homo sapiens
cgacatcgagatcaaccgggagccggagggctgtgctgaagtttgctgctgccactggagccactccaattgc

SEQ ID NO: 273909 - DNA, 75 bp, Homo sapiens
catccagcctcagtttgagacgccgctgccaacccttcagcctgcgcgaggatctggatgagctgcactaccagg

SEQ ID NO: 273910 - DNA, 100 bp, Homo sapiens
ttcggacaggtttagaaaatggaatcctcctctgcgacctgagcctccaacaacaaacaaatggcagctggacaactggctgaccaaagtcagccagcca

SEQ ID NO: 273911 - DNA, 90 bp, Homo sapiens
agctcagattccattagctgctgtcatcaagccctttgccaccattccttcaaatgagaggaaagccagaaattgtgggaagcaatttag

SEQ ID NO: 273912 - DNA, 83 bp, Homo sapiens
ttcgccccgggccccccagcatgaagaccccggcggacacaggattttttatcaagcagaaatgcatcgaacaacgagaatca

SEQ ID NO: 273913 - DNA, 75 bp, Homo sapiens
ttacacagacgtggggcgatgcttgtgaccctgcagctcctcaaataagactttgaccccgacgcaggcttcagt

SEQ ID NO: 273914 - DNA, 80 bp, Homo sapiens
aataattgagtgctttcgatcaggttgttttacgaatacgtgttgtagtcatccattaagcaatccagccgagcttgagg

SEQ ID NO: 273915 - DNA, 100 bp, Homo sapiens
acattctctgccccccacccaccgcgccggcgctcccttgtcacgcctcgggaagcgcgcacctgccaagcagagtccgtgcgtcctggtgcctcctaca

SEQ ID NO: 273916 - DNA, 51 bp, Homo sapiens
agctgacgagtgaacttgataagggaaagtacggtggccagactttaacca

SEQ ID NO: 273917 - DNA, 100 bp, Homo sapiens
ctgggatctatgagtggaaaggtgaccaagcccaaagaggagaaagatgcttctaagggcatggagagtagaaaactgatttctgctacagacattcagt

SEQ ID NO: 273918 - DNA, 98 bp, Homo sapiens
ctggatcgcagcgctgcctttccttatgaagaagacacaaacacgatgaggcgagtggtacgacagagcaagtttcggcatgtatttgggcaagcggt

SEQ ID NO: 273919 - DNA, 98 bp, Homo sapiens
catttacagcaaaattcagggcttcaaatataatgccatcttcaagatttctctatgaatcatcatcaagaactctgggagaacttttgaattcataa

SEQ ID NO: 273920 - DNA, 75 bp, Homo sapiens
ctgaaggaggaggacaaagagcccctcatcgagctcttcgtcaagatctttaatctcatgaagtacgacagctac

SEQ ID NO: 273921 - DNA, 100 bp, Homo sapiens
agcctcgagccgcagcacgagctcaaattccgaggtcttgagtcaccacgtccgaatataattcttgggttagtaatctgccaaaaaatcaaacgtcccg

SEQ ID NO: 273922 - DNA, 117 bp, Homo sapiens
ctggaggagaagctgaggaacttaactttccggaagcaggtctcgtacagaatgcaggctcaacagtaccagcagcagcgtcgaaaatttgcagctgccttcttggcattcattttc

SEQ ID NO: 273923 - DNA, 41 bp, Homo sapiens
cccgaggtgcggcacccactcaacagcaggtggctacccag

SEQ ID NO: 273924 - DNA, 100 bp, Homo sapiens
cccagagcccactctggatcagttaactgatgcccttggtgaagaagatagtggtgagctggcaaagccaaagattggttttccagagacaacagaagag

SEQ ID NO: 273925 - DNA, 100 bp, Homo sapiens
gctacaacgcctacccctcagagcaggagaagctgagcctttctggacagaccaacctgtcagtgctgcaaagaattcgagaagagaagcgagaagaacg

SEQ ID NO: 273926 - DNA, 75 bp, Homo sapiens
ggctggcaacattctctttaccttagatggagatatcaaattgggtgcacatgaacttgaacagatgcagctgat

SEQ ID NO: 273927 - DNA, 99 bp, Homo sapiens
cgccgcggagatgtgacccggcagtacggcaaatatggcggagagctctgagctcttcaccctgacctatggtgccctggtcacccagctatgtaagga

SEQ ID NO: 273928 - DNA, 100 bp, Homo sapiens
gcaaaggtgatgaagaagtaatttcaacactccactatttttccaaagtggtggatgagcatgcttttcacttccactgcatctctcgctggctcaaaac

SEQ ID NO: 273929 - DNA, 80 bp, Homo sapiens
gtggagacgctcaccgcagccggcaccctcattgccaaggtcaaagaccgtctatgaccagtatttcatcaccctgtata

SEQ ID NO: 273930 - DNA, 50 bp, Homo sapiens
tgtggatgatcctcactccttccaccaaccagaagcccctggtccctctg

SEQ ID NO: 273931 - DNA, 75 bp, Homo sapiens
gcagaacagccggcagctgagcctggtggcctccgttctcttggcccaggctgagcggaaggaggagaaaaaggc

SEQ ID NO: 273932 - DNA, 100 bp, Homo sapiens
aaaagaagctaagcataaaattacatctgctgatggacacatagaaaacttgggatgtagctttatcacggactgctagagcatggggaaaaaaatgttt

SEQ ID NO: 273933 - DNA, 100 bp, Homo sapiens
aggttattttacatcattccgtacttttgtggacagcatcccagatgcaggtgccaggattgctgagtattcccagttgtatgaccagattgtattcaga

SEQ ID NO: 273934 - DNA, 50 bp, Homo sapiens
ggattccacagtgtcctctggaaaatggaattcgaatttagagtttaatt

SEQ ID NO: 273935 - DNA, 110 bp, Homo sapiens
ggatggctcaaggatccggggatcaaagagcagtgggggttgctgacccagaggagagttctccaaacatgatcgtttactgcaaaatcatacctggagctgatgctgat

SEQ ID NO: 273936 - DNA, 100 bp, Homo sapiens
attgagtcactttctcagggacacatggctggccggtgatggagaaggacagagcgggatgccaccagcttgtccaaagggaagttccaggagctcctgg

SEQ ID NO: 273937 - DNA, 96 bp, Homo sapiens
catcttcacccgtgatgttggcctttaaattctgcagatctccaggggagcccaccagcctagtcaacatggcctcggaagacattgccaagctgg

SEQ ID NO: 273938 - DNA, 57 bp, Homo sapiens
gagactgactgggcaacatgttattcaggagatggggtctcaccctgtcacccaggc

SEQ ID NO: 273939 - DNA, 88 bp, Homo sapiens
aagcgtcgggattaggtgaaagcatctaataggattcaggaatcaaagaatcagtgtactcaggtggtacaggaaagagagagccttc

SEQ ID NO: 273940 - DNA, 80 bp, Homo sapiens
aattttggccgtggtggaaactttggtggaagaggaggatatgatggttaccgcccttcattctctaacactccaaacag

SEQ ID NO: 273941 - DNA, 100 bp, Homo sapiens
atctgcccccggagattgtgcctgccaccctacgccgtagccgtccagagactggcaggcctcggcctaaaggggcttgcttctgacatgtctgatgagc

SEQ ID NO: 273942 - DNA, 100 bp, Homo sapiens
gcccgagtggatcggggacggagagagcacgagcccatcaggttgcaaataaaaatgtggctaaagtaccacctcctgttcctacaaaaccaaaacagat

SEQ ID NO: 273943 - DNA, 101 bp, Homo sapiens
agcggaggagccaccctcaacgccctgctggtggctgctgaacacctgagtgcccgggcaggcttcactgcgcagttgtgtagcagttgagtaatgctggt

SEQ ID NO: 273944 - DNA, 100 bp, Homo sapiens
gccaggaagaaggttctcaaacaagcgtttgctgccaattgatggggcaaatgatctcttttttcagccacctccactgactcctacctccaaagtttat

SEQ ID NO: 273945 - DNA, 118 bp, Homo sapiens
cacgcccgctcgcacaagccacggcggactctcccgaggcggaacctccacgccgagcgagggggggccctcagcctcttggccttgaacgggctgttcatcttgattcacaaacaca

SEQ ID NO: 273946 - DNA, 100 bp, Homo sapiens
tgtggcatgaggaagctgggggcatcttctccccagattttcatgttccagctgctccggggcctcgcctactgtcaccaccgcaagatcctgcaccggg

SEQ ID NO: 273947 - DNA, 100 bp, Homo sapiens
tgagatgcaagtgtgcccccaagtgatgggcagaaggagagaaggtgttttggatgcattctagaacacaggaatggaagttggatacactttgtgactt

SEQ ID NO: 273948 - DNA, 50 bp, Homo sapiens
gagggtctgaagattggggacacggatttgttaaggattccaagtaactc

SEQ ID NO: 273949 - DNA, 100 bp, Homo sapiens
aaaactttgagtgggttgcagagagagtagaggtactggtcttcttggacattaatctttgaatacttgctgactgctaagaaatgaccagaggggaaga

SEQ ID NO: 273950 - DNA, 98 bp, Homo sapiens
cagcaccgagggccatggggccctctccatttctcctctcagcagaagtccaggttcccatgcaggcttcttctcatatcggtaattccactcaggcc

SEQ ID NO: 273951 - DNA, 82 bp, Homo sapiens
ccacactccaggaatgccagtgcatcttttgcacagctcaggagcattggtttgaaaaggccctacgagacaagaagggctt

SEQ ID NO: 273952 - DNA, 100 bp, Homo sapiens
ccattcagagtcaggaaaatcaagacttgtccagttacgtattgttgcagcatctggcagtgagactgaggatgaggacagcatggacattcccttggac

SEQ ID NO: 273953 - DNA, 99 bp, Homo sapiens
gttctatcagtgcattgctgaaaatgatgttggaaatgcacaagctggagcccaactgataatccttgaacatgtcttcccaagggattgttgaagaaa

SEQ ID NO: 273954 - DNA, 98 bp, Homo sapiens
aggccatctccaagaacgtgctcttcgctcacctggatgacaacgagaggagcctcctctattggcccaggaagcccacccagccccgccacgcagag

SEQ ID NO: 273955 - DNA, 83 bp, Homo sapiens
cgcgcggactgaaggagactgaaggattttttatcaagcagaaatgcatcgaacaacgagaatcaagatcactgagctaaatc

SEQ ID NO: 273956 - DNA, 90 bp, Homo sapiens
ccgccccgcgagcacagagcctcgcctttgccgatccgccgcccgtccacacccgccgccaggctacattattggaattttgaagtcatg

SEQ ID NO: 273957 - DNA, 100 bp, Homo sapiens
tctcggggcccctggctgcagccactgcctccatcctcaccaatcccatggatgtcatacgaacccgtgtgcaggttcctttggcttgagtgacgagcgc

SEQ ID NO: 273958 - DNA, 76 bp, Homo sapiens
acattgatctggtcagcagtgatgatgaagagcctagcacctcttatactgatcaactcggagcagaagccgcacc

SEQ ID NO: 273959 - DNA, 75 bp, Homo sapiens
cgcgaggggaacggaggccagagctgcggctcggcatggctgcccggggccacagctggccctgcctgcagcaga

SEQ ID NO: 273960 - DNA, 75 bp, Homo sapiens
tggttgagttctatgctccttggtgtggacactgcaaaaacggaagtgaccgtggtggcttcaataaatttggtg

SEQ ID NO: 273961 - DNA, 75 bp, Homo sapiens
tggacttcacgaggcctgggacgacctgtcatttactccatcctttatagtgatgctacaggacgaagaggaatg

SEQ ID NO: 273962 - DNA, 100 bp, Homo sapiens
tgagtggtggaaactgggacaatatttcagacggagcaaaggtagtgggcagcagtcagtgacaggtgtaacctctgtggatgacagcaacagttactgg

SEQ ID NO: 273963 - DNA, 76 bp, Homo sapiens
gggatcacctcctcggcgtgagcgacagcggcaaaaagtccaaggcttgcgagaaggtcatttccgtgggtcaaac

SEQ ID NO: 273964 - DNA, 101 bp, Homo sapiens
ctgcgggatcttcaaccacctcgagcggctgctggacgaagcctttactgttccaggatacagatctcctgattcaggtgtccagtgccttttgaactgac

SEQ ID NO: 273965 - DNA, 83 bp, Homo sapiens
gtgccgagagggacaggcttctccggaaggaacagattttagctgtggccagagacaagaggagcagcagcggcaccgcccct

SEQ ID NO: 273966 - DNA, 101 bp, Homo sapiens
gacagggctgaggaaccatgtctccatccccgaccgccctcttctgtcttggtatcgtgatttccgatacccacctggacacccccaggagtataaacaca

SEQ ID NO: 273967 - DNA, 75 bp, Homo sapiens
caacgacttactggggagagaaagaaaaggaacgggagctgagagaagctccaccatgaggcgaggtggatggag

SEQ ID NO: 273968 - DNA, 100 bp, Homo sapiens
gggagatccttgttgccgtcccttcgcctccttcaccgccgcagaccccttcaagttctagtcatgagtacaggggctcaggtccaggtggcaggggata

SEQ ID NO: 273969 - DNA, 96 bp, Homo sapiens
tttgcctttgcagaactctgtgttgttcctttgcggatcttctccttcttcccagttccaggcattgtcaaggattctgaagacatttacaattta

SEQ ID NO: 273970 - DNA, 90 bp, Homo sapiens
gtaacaaacgagggttcccgggattggaccgacgcagccatggcaaatcctgatcctaactgttgtcttggagtatttgggctgagcttg

SEQ ID NO: 273971 - DNA, 75 bp, Homo sapiens
gcaacgtccaagtctccgaacagagccacacgactcccgctggctcaatgggcaattgaaggaacagactaaaaa

SEQ ID NO: 273972 - DNA, 80 bp, Homo sapiens
cttcatgcccaaatcccggaaactccagcgtgtctccagccgtggagtcagaaataccatcagaggaggggtactgtgac

SEQ ID NO: 273973 - DNA, 100 bp, Homo sapiens
gatatggaaaacctggaagatgttttctaccaaatgatcgtgcctgaagacgtacactggccacaagaatgagaaatactgcatatttgccaatttctct

SEQ ID NO: 273974 - DNA, 75 bp, Homo sapiens
gaactgtgaggagagtaaaccaagaagaaatccacagatttagttctgcagctctggatatcaggattattatcc

SEQ ID NO: 273975 - DNA, 75 bp, Homo sapiens
ggggcctccgcgccgcggccgttagtcatgtcggggaactacagcctgtccagtgtgctgcccaacgcccccgac

SEQ ID NO: 273976 - DNA, 82 bp, Homo sapiens
ggagctggaatgactggcaacccaggagctcagtctgaatattcttggagaaagatgctgagtggcattgcagccttcctac

SEQ ID NO: 273977 - DNA, 100 bp, Homo sapiens
tggaggagctccccagctggtggctggagcgaccccttgttctttggtggcgctgctttaaggaagcctcctatttcagtttctcaacatgaaagtcatc

SEQ ID NO: 273978 - DNA, 83 bp, Homo sapiens
aatggcagcaaggtgggcccggacggcacaccctacgttaccgtgctcaaggtttggtgcacctcgatttggaggaagtaggg

SEQ ID NO: 273979 - DNA, 50 bp, Homo sapiens
ctggggcccgggcagtccctggaggaggaagttaacatccctaataggag

SEQ ID NO: 273980 - DNA, 88 bp, Homo sapiens
gctagccgggagttacaccgccaccgccagttggtctcttcccatggcgatgtccatctgccaccgtggcactggtattgctttgagt

SEQ ID NO: 273981 - DNA, 82 bp, Homo sapiens
gccaagctcacagacatccagatcgagctgcagcaggagaagagcaagttttagaaagagcgttttcgctacgtaaagcaca

SEQ ID NO: 273982 - DNA, 88 bp, Homo sapiens
cagttgcagtgttggagctaaagggaacaccaacacgaatgttcccacaccactccataactgagtctgtgaactatgatgtgaaaac

SEQ ID NO: 273983 - DNA, 100 bp, Homo sapiens
ggagccatcctctacaggacccgctttctaccattaagggagtctgaagatacagtattgctcgtcctcaaagagatctaccaaacccagggtatcttcc

SEQ ID NO: 273984 - DNA, 96 bp, Homo sapiens
tgcgggactcagtcccatcactccaaggagagaagggaggaataagtttttttcatctgtaatttggaagccaagtcagtaacaaaatgaaaccag

SEQ ID NO: 273985 - DNA, 100 bp, Homo sapiens
ccggatacttctgaagaacaaattaaagaatattttggagcctttggagaggaattaaaaagtcttgcaactaaaaagcctgataagattggtattcctg

SEQ ID NO: 273986 - DNA, 75 bp, Homo sapiens
gacgctggatttttttcgggtagtggaaaaccagccctgggcgctgcctatggcacagccaagagcggtaccggc

SEQ ID NO: 273987 - DNA, 100 bp, Homo sapiens
accagaactgcaagctggccaagccttttgactcggatgaagagacacggaaggggagaaatcattggaattcagaagctgaattcagatgacacttacc

SEQ ID NO: 273988 - DNA, 83 bp, Homo sapiens
tagaggacttgaagcagaaagcaagtgaatacgagtcagaagcatccggtgaaagacagagatcacatttcaactagattctt

SEQ ID NO: 273989 - DNA, 83 bp, Homo sapiens
ggaaaacatgatgttgtttgaagttgttaaaatgggcaagagtgctatgcagtcatccctttcaagccctgatatcttcgact

SEQ ID NO: 273990 - DNA, 98 bp, Homo sapiens
gatggtcggcggcgcccggatgggcagctgaggttggaatgttgcatcagcaggtagaagaacatgaaaaaatcaagcaagagatgaccatggaatat

SEQ ID NO: 273991 - DNA, 98 bp, Homo sapiens
agcgtgaggccggcatcgtctttccgtcctctgaggcgacggccgcggctgcacagtgacgggtcagtcttacgagaatatggtaactgagatcatgt

SEQ ID NO: 273992 - DNA, 100 bp, Homo sapiens
cgctcttaggcagccgagcggagctggaagcggacgagatcagccaaatggccgatgacacagtggcagaactggacaggcatctggcagtgaagaccaa

SEQ ID NO: 273993 - DNA, 101 bp, Homo sapiens
cccggaccctggaagagaagagggtggctaatgattaagggtcatcgagcagctcggtgggaagcagctggtcatgaaccacatgcatcatgaagaccagc

SEQ ID NO: 273994 - DNA, 73 bp, Homo sapiens
gcggggaccgctgtgctctcggcagcacgctggctcttctcctgaacttcctcgcctgcctggccagcttctg

SEQ ID NO: 273995 - DNA, 100 bp, Homo sapiens
aactgctataagtacaatcccccagatcacgatgttgtggcaatggcacgaaagctacagggatgctgccttgggtctggaaactgttagaggaaacccc

SEQ ID NO: 273996 - DNA, 81 bp, Homo sapiens
gggatgtcgtctcagcagtgctcgggcgcaggaaagaccacagcaagattctttcattcgtctcctcctagcctgggggac

SEQ ID NO: 273997 - DNA, 50 bp, Homo sapiens
taaagattgtggtagtagatgaagcagctgagcctccacccagaccgaaa

SEQ ID NO: 273998 - DNA, 82 bp, Homo sapiens
gtttcctttgttcacgagaacattgagacatttctttcggcagtttgaagagaacacatgaagaagaggatgattttggaac

SEQ ID NO: 273999 - DNA, 96 bp, Homo sapiens
gatgacttgcttgggtaaggacatgaagacagttcctgtcataccttttaaaggtaaagagaaatgtgtatgaccttacaagtatccccgttcgcc

SEQ ID NO: 274000 - DNA, 100 bp, Homo sapiens
aagagaatttccctttcaacaacccctggcgtgtgtcacggggtcccagccctgtcagccttggaaatcaggataccttacctgtggcagttgcccttac

SEQ ID NO: 274001 - DNA, 98 bp, Homo sapiens
agcatatcaaatcaagactggacactgtccagaaaaggctttgaaagactcactacaaccctatgaggctgcttatctatcaaaatccttatctcgac

SEQ ID NO: 274002 - DNA, 90 bp, Homo sapiens
ggcccaccctggagtaaccctcactggagaatccagaggcattgaagttgatatcgatgtggagcacggagggaaaagaagccgcctgac

SEQ ID NO: 274003 - DNA, 100 bp, Homo sapiens
ctctccgggtgatggggaacgtggtgtggccgtcgaggtccgtgtgcagagagagcatcagtgatgtcacgtttggagcaggggtcagttacatcgggac

SEQ ID NO: 274004 - DNA, 100 bp, Homo sapiens
ccggaggtgacaacaataacaagactgtccttcggacaagttttagtaagactttgaccccgacgcaggcttcagtgattgccgcggatcagaagcctga

SEQ ID NO: 274005 - DNA, 100 bp, Homo sapiens
cctttactacactggcagaattgcaaagatgcatgagccctactgccaataaagggaaaataagagatgctcatcgacgaattatgcttttaaatcatcc

SEQ ID NO: 274006 - DNA, 83 bp, Homo sapiens
cgttattgggccttaggaaattcgttgatgttctggtggattatggatcagatccaaatcactgcagccagctggaaggacat

SEQ ID NO: 274007 - DNA, 75 bp, Homo sapiens
tccttatcaagaaggatgcacaagatgaggggaaaaaagttgttccatgtagacatgactggcatcagactggag

SEQ ID NO: 274008 - DNA, 96 bp, Homo sapiens
gatggtattacttttggagtgtttggaagtaaattcagtctgcgggccaggcatcgacatccgcaacgactatcagcagctgaagcgcctggagaa

SEQ ID NO: 274009 - DNA, 82 bp, Homo sapiens
agcactcaccaactacctgcagccgcagctggactggcaggcccgagggcgaggttttaaaatcaaagatgggaaaatcgga

SEQ ID NO: 274010 - DNA, 75 bp, Homo sapiens
tgattaaacgctacaactctaccgctgctaccaatggagccaaaaacctgtatatcatctccgtgaaggggatca

SEQ ID NO: 274011 - DNA, 89 bp, Homo sapiens
ggcggagctgacggtggaggttcgcggctctaacggggctttctacaaggtagagttggctttgtgggacacagctgggcaggaagatt

SEQ ID NO: 274012 - DNA, 97 bp, Homo sapiens
gcctgcgaccccagtcggtgctccggggaggtcacctgacgaggaggtcgcaatggaagaagagatcgccgcgctggtcattgacaatggctccggc

SEQ ID NO: 274013 - DNA, 100 bp, Homo sapiens
aggggccgtgggggtcgtgggccggagcgcctccttcgcaggcttcagcagtgcacagagccggaggatcgcgcctggtactgtggcgctccgtgaaatt

SEQ ID NO: 274014 - DNA, 100 bp, Homo sapiens
tcccccgagataccggcgccatgtccagcgctcggacccccctacccacgctgaacgagagggacacggagcaggaaacttccattttagaagaatacag

SEQ ID NO: 274015 - DNA, 95 bp, Homo sapiens
tgtccccacttcatatgtcgaagtctgtttggacaaaaatgccaaaggtcacgagaagagaatgccttctagatgcaaaatcacctccaaaccag

SEQ ID NO: 274016 - DNA, 50 bp, Homo sapiens
ctggcttcgggaattttaccagattccagaattctctgatggtttctgga

SEQ ID NO: 274017 - DNA, 75 bp, Homo sapiens
ctggccccgatggctctgtgcaacggagactccaagacctgtcgcgaaatcgcctttcagaaattcctatagaag

SEQ ID NO: 274018 - DNA, 100 bp, Homo sapiens
gcttgagttgacacagggagctccaggactcaccctcaggccggccttgtgctggaaagagcatgatgtgggcatgtgagaaacaaactcacccatccac

SEQ ID NO: 274019 - DNA, 75 bp, Homo sapiens
gacgaagagacagctggatgaactgcccaacatgttcggcgaccttcggtccacgtttattgccttgatgattgg

SEQ ID NO: 274020 - DNA, 83 bp, Homo sapiens
atttgatgctcttgtgctcagtgacatcattcagacatcaacgagtgtgcaacaccgtcgaaagtgtcatgcggaaaattctc

SEQ ID NO: 274021 - DNA, 112 bp, Homo sapiens
ttctggaaccgggaaggtacacccaggcatgacaatagcttctctcctcacagaaatttaactgattggcagtatggagttactcaggccttccctcacacagaggaggagg

SEQ ID NO: 274022 - DNA, 75 bp, Homo sapiens
gaactttgcgatacatgagcccagaacagaggcggggtttcaccatgttgcccagactggtcttgaactcctgag

SEQ ID NO: 274023 - DNA, 72 bp, Homo sapiens
ccggagctgcccgcgccatgtccgcgcacaatcggggcaccgagctcgccccgcagcgcctccaccccagag

SEQ ID NO: 274024 - DNA, 118 bp, Homo sapiens
aggaaagcagcatagagaatgagatagccgtcctgagaaagatgcgtattggatagcaatgaatagttctctgaaatgtaaaaccctcagcgacatctttctgcttttcaagagttcc

SEQ ID NO: 274025 - DNA, 99 bp, Homo sapiens
ttcattggagatcacagcatacaaaagccaatcgacaacgtgaaccaggattaggatttagttttggtctagagagcctagtgctgacctatatcaatg

SEQ ID NO: 274026 - DNA, 100 bp, Homo sapiens
atcactggagtctgatggaaagagataggcgcatctctggagttgatcgttactatgtgtcaaagggtttggagctattcaagaggaaatgtcacagaag

SEQ ID NO: 274027 - DNA, 100 bp, Homo sapiens
actcagtctctaaaaagctaagagctgcatgcttctgggaggccggaagaccacggacatccctttggaaggctacctgttgtctccgatccagaggatc

SEQ ID NO: 274028 - DNA, 75 bp, Homo sapiens
catgaggtgcagctggacatggaaccccagggctgcctggtggctgagccctctgcctttgaagagaaggccatt

SEQ ID NO: 274029 - DNA, 83 bp, Homo sapiens
ggaagctgggagacactaacgaacgagccatgcgcatggctgacttctggctcacactggacagtgccacatcgcttatccag

SEQ ID NO: 274030 - DNA, 100 bp, Homo sapiens
ccgctcctaagcctgcacagccgcggcggcagcagcagtgagagcgccaagaagagggagggcgagcttacggtggcccagggccgtgtgaaggacctgg

SEQ ID NO: 274031 - DNA, 100 bp, Homo sapiens
attcccggctctgcggaggcctctaggcagccgcgcagcttccgtgtttgctgcgcccgcactgcgagactctccaacatgtgccttctgaccatacaaa

SEQ ID NO: 274032 - DNA, 82 bp, Homo sapiens
acccagaccctggagcctcagttggaagcagccgatccagcctgcggagcctgtggggcagcgccaaatcttaaaggcagac

SEQ ID NO: 274033 - DNA, 83 bp, Homo sapiens
ctatattgttacaattttttttcaagaactgccgtcttctttgcctgcactaatggggtggcctggaggccaagcagatgtgg

SEQ ID NO: 274034 - DNA, 50 bp, Homo sapiens
gctgcagtgctacccgcctccaggccctgggaggagcggggacactgagg

SEQ ID NO: 274035 - DNA, 83 bp, Homo sapiens
gtggcaggggctgactgagagcgtctgcttggcagaggtggaggagacactgaagcgactgcagagccagaagggagtgcagg

SEQ ID NO: 274036 - DNA, 100 bp, Homo sapiens
aggctcggagcgcgacacggagactaggtggcagtcaggatggctaaaggtgaccccaagaaaccaaagggcaagatgtccgcttatgccttctttgtgc

SEQ ID NO: 274037 - DNA, 82 bp, Homo sapiens
gctgctggatggaggggattttgtcagcttgtcgtcaaggtactggaggcgcaaagaaggcatcagaaggagaaatctggca

SEQ ID NO: 274038 - DNA, 97 bp, Homo sapiens
gccatgattggaccatcccccaatcctctcatcttgtcctacctgaagtatgccattagttcccaggtttttgccaatccagaagactgtgtagcat

SEQ ID NO: 274039 - DNA, 100 bp, Homo sapiens
accgagggactgggagtcgttagtgaggtcctggacccaagccagaagcctctgcaaagcttccttccagacctgcagataactatgacaactttgtcct

SEQ ID NO: 274040 - DNA, 90 bp, Homo sapiens
gatgaatcatacaatatttcagaggtcatgtcaaaagaggtacggattcccacatgtcatgacaagcctgggacaactcaaatagtgcag

SEQ ID NO: 274041 - DNA, 83 bp, Homo sapiens
aggccctgcggagctgcttcgccgctgcgacctgcctagagctggaacgttacctccagagcgagccctgctatgtttcagcc

SEQ ID NO: 274042 - DNA, 100 bp, Homo sapiens
ctccaggcttgcaagcgattaccagactgggctggcttagatgaagatgaagatgcacatgtctgggaggataattgggatgatgacaatgtagaggatg

SEQ ID NO: 274043 - DNA, 75 bp, Homo sapiens
aagactccgaagaaagcagtgatgaaattcttgtgcgtctaacatctgcggcatgtaaggaggaatcaagaagct

SEQ ID NO: 274044 - DNA, 49 bp, Homo sapiens
ctgctaacaaccagctggaggtgcattccactcttcgttcaacttgttt

SEQ ID NO: 274045 - DNA, 84 bp, Homo sapiens
acacattgaatgggccaaggaaaaatcgagcagaaagaatgtctttcaggtatctctgcattagccagattggacatatgtaaa

SEQ ID NO: 274046 - DNA, 80 bp, Homo sapiens
agcggaggacctacgccggcctggatgtggacgagtgctcactagcagaaaaaacctgtgtgaggaaaaacgaaaactgc

SEQ ID NO: 274047 - DNA, 100 bp, Homo sapiens
gttaaaagagcagcactccaaggctaaatttattgtgaagaaatcagaagatgaagaagacgccgctaaagatacttatattattgaatgccaaggaatt

SEQ ID NO: 274048 - DNA, 83 bp, Homo sapiens
gcacacccggctccccggacgcctcggtcctcagccagcagagccacgttccttatgagcaccgtgggtttatttcattttcc

SEQ ID NO: 274049 - DNA, 82 bp, Homo sapiens
tggctgctggagagttgaatgccagccaccagccatggcccaagaagatgaaaggattgttcttgttgacaacaaatgtaag

SEQ ID NO: 274050 - DNA, 100 bp, Homo sapiens
ttgtccgtgccaaatttcctgaacacaccattatgtaacaaatgtggcaattattttggatctatcacctgtcatcataactggcttctgcttgtcatcc

SEQ ID NO: 274051 - DNA, 90 bp, Homo sapiens
cggggagagtagggtgctgtggtctgagctagagggtgaagctggcggagcaggaggatgggcggtactttttgatcatatgggatgtct

SEQ ID NO: 274052 - DNA, 98 bp, Homo sapiens
cgacatgagtgatgtggaggaaaacaacttcgagggcagagttgttcctggtcattgagtacgtcaacggcggggacctgatgttccacatgcagagg

SEQ ID NO: 274053 - DNA, 75 bp, Homo sapiens
gggcggcttcctggcctgggcgctccggtggcggcggaggtgtgggcaagagcagtttactgttgcgttttgcag

SEQ ID NO: 274054 - DNA, 82 bp, Homo sapiens
aaggattccagtcttagcgatcagcatcagcaaaggctccgaggtgccagaggcatagactggactcgggccatatccgtgg

SEQ ID NO: 274055 - DNA, 83 bp, Homo sapiens
gaacacagtggatgtcgagaacggtgcttctatggcaggatatggattggattcagcatcaaaatacatctactcatattgag

SEQ ID NO: 274056 - DNA, 100 bp, Homo sapiens
cctggtaatagaggacttgaagcagaaagcaagtgaatacgagtcagaaggaatatgctgaatttcagtatcggaggaggcacagacaacgtcgtcgagg

SEQ ID NO: 274057 - DNA, 90 bp, Homo sapiens
atgacacagcacctcgaggcaaggaaataagaaaactgcctctgatccaagcagagaaggttcgatacaagaggctgttttcctagcgtg

SEQ ID NO: 274058 - DNA, 100 bp, Homo sapiens
gcgcacgatgctggagttgctcaaccagctcgacggctttgaggccaccaagaacatcaaggtagacaagggcgtggtccccctggcagggacaaatggc

SEQ ID NO: 274059 - DNA, 73 bp, Homo sapiens
cgtgcttgtgggacacccgtttgacacggtcaaggtatccttctgatgaagagaagaaaggcctaaactccca

SEQ ID NO: 274060 - DNA, 100 bp, Homo sapiens
atcatttcccgggaatgctgtgcaggcaaaaggaaaacaaaggcattcaggagccacaggccagatattcgaagcttacaacatggcagctttgtggaaa

SEQ ID NO: 274061 - DNA, 82 bp, Homo sapiens
ccggacagacgccagagcgaggagggcgctacgcggtcgctgtcaagatggagtttccaacccagtaaatccaagggccaga

SEQ ID NO: 274062 - DNA, 133 bp, Homo sapiens
actgcccaaggtgctgagccggcgcggggtcggcgctgggctggaggcggcggagcgcgagagcttcgagcggactcagagaagaagagctgtgtcatcattccagttcttcaactccattggcagcagacaa

SEQ ID NO: 274063 - DNA, 74 bp, Homo sapiens
cccttcttttttcctacccaaggacatgactatgtacttgcagaaaaacaggacagaatgacttggaagataac

SEQ ID NO: 274064 - DNA, 101 bp, Homo sapiens
ctccattcccgggaggggggagcggcgttggaggccaccgtttccagggtgtcgaagtgcagacagactacgtgcccctgctgaactcgctggcggcctat

SEQ ID NO: 274065 - DNA, 100 bp, Homo sapiens
tggcacaaagttctctcgatcagggcatacatctttcttcgacaaaggcaaattcaacacccaacagcttccttaatagcaaaggtagcaacagcccagg

SEQ ID NO: 274066 - DNA, 83 bp, Homo sapiens
cgttagccccgcgcagccgccggcgtcgccgccatggacctagctgtggcagaggtaaaacttcgagatgatcaatatacact

SEQ ID NO: 274067 - DNA, 98 bp, Homo sapiens
gaaacctttccaacacagatgtccaagctgccaatgtcacccgcaactacctagactggctcacgtccatcccttggggcaagtacagcaacgagaac

SEQ ID NO: 274068 - DNA, 75 bp, Homo sapiens
tggcctgcgcgccgctgcccgcgccacaggaagtgcacggctgtctataacgtgctgccgggtctcaggatggag

SEQ ID NO: 274069 - DNA, 50 bp, Homo sapiens
tccttttccctctccctttccctaagggatcgcttacacctgagacgaac

SEQ ID NO: 274070 - DNA, 100 bp, Homo sapiens
gccaccatgggggagaccgtaatgagcgtcaaaattatccgaaaccgcctcactgggtggcagggcccagccccgaaccagacaagggacccctcaagga

SEQ ID NO: 274071 - DNA, 74 bp, Homo sapiens
ggctccctggagaaggaccgcactctgaccccgctggagaggagccatcaaaactcgatcaggatgttttggcc

SEQ ID NO: 274072 - DNA, 83 bp, Homo sapiens
gtggatctgcgccaaggcctacggccgaggccaagcagatagaacttcagttcactattggcgaagccattaccagtgctgca

SEQ ID NO: 274073 - DNA, 100 bp, Homo sapiens
cgaggccctgagccgctctgccttgctgcccccaggtgggccgccaccccctgacctgcctgggtccaaagtcggccgtatactaacaaggtaattactt

SEQ ID NO: 274074 - DNA, 98 bp, Homo sapiens
gaccctgaaagcaaccaggaggcagtaaattcttcagctgctcggacagatgaagctccccaaggagctgcaggcaattgctggctactttgatatat

SEQ ID NO: 274075 - DNA, 100 bp, Homo sapiens
acagtcaagacgatcatagtcactgttggagtcattcgttgcccagtttgcagccaagaatgtgcagagagacacatcatagataacttttttgtgaagg

SEQ ID NO: 274076 - DNA, 100 bp, Homo sapiens
ctccgagttccagaggctgctcggcttccagctcaatcctgccggttgcgccttcttcctggacatgaccaactgtataaccccgttttcacacgaatgg

SEQ ID NO: 274077 - DNA, 76 bp, Homo sapiens
tcgtgatccagaagtccagagctgaggactgcctgtttgcaggacagaactgtaccgctctctttttggccagctc

SEQ ID NO: 274078 - DNA, 75 bp, Homo sapiens
ggcagaagaggatgagataccttttcctggaagtaaaccacagattgcagagataatcagaagttttaaaggcca

SEQ ID NO: 274079 - DNA, 75 bp, Homo sapiens
cctgaactcttcagataatcagagtggaggaagtacagccagcagtgttggggatgtcctttgcactgaccctga

SEQ ID NO: 274080 - DNA, 98 bp, Homo sapiens
ctcccgcccgcaactccgccgcccaccatggcttccgaggagctgtacgaggacatccaggcagaaattgatgcccacaatgacatatttaaaagcat

SEQ ID NO: 274081 - DNA, 100 bp, Homo sapiens
cgaaaacgtggttgtagagttccgtgactcccagattgccccagtggaaaatgacaatagctacgatgaactgaaaagagatgcaaagttatgtttatca

SEQ ID NO: 274082 - DNA, 100 bp, Homo sapiens
aactgatcagacgaactacgaacccctggacgggagagtctgccggcggagaatataaggtcctccaaaagctggggaaagctgatgagacaaaagacga

SEQ ID NO: 274083 - DNA, 88 bp, Homo sapiens
aacgaatctctcaggctgcatcaggatgaatgatgacccaagtatggaagtcagtttgctgagaacgaaaccaatgaggtcaatttta

SEQ ID NO: 274084 - DNA, 100 bp, Homo sapiens
ttcatattcacaagaggcagatgatcgagtatttagagctcatggcattgaatgccccagaggagcccgaaacctcccaggcttggtgcaggaaggagag

SEQ ID NO: 274085 - DNA, 114 bp, Homo sapiens
gaaaatagcaaacgatccagacggcagggagtgcatcaaaggtgtgaacacaggtatcattccttggaatgctttccccggaaaaatatgtggctctgccctggagaacatctg

SEQ ID NO: 274086 - DNA, 100 bp, Homo sapiens
gctgtggtgtcctctacaccatctgtggtcatgtcaacagtagcacaagcatcaattcctgaagattgccaagcccctctccagcctcactccactgatt

SEQ ID NO: 274087 - DNA, 100 bp, Homo sapiens
tctcattgcctgagaacatccagctctccctcttttcagccagctttctacggaacatcaatggtgagttctgcagtcagggtgtccgtgagggcctcat

SEQ ID NO: 274088 - DNA, 82 bp, Homo sapiens
taatacatcatgaactgcagggtatgagggtgctggttgatgctcgagagaagcttcatattccctggggagacaactcaaa

SEQ ID NO: 274089 - DNA, 100 bp, Homo sapiens
tttcctccgcctggtgggtccctccctgctgcgggacagcagctgggtcaaggtggaaggtccaaggactgagaaagaccctcgaaggcatccactttag

SEQ ID NO: 274090 - DNA, 75 bp, Homo sapiens
atggtacccatctctctctatgtcaggtacactcacgtggaagctgagtgtcctttcctgacttttgacgacctc

SEQ ID NO: 274091 - DNA, 80 bp, Homo sapiens
tgccagagtttgtagcctattggaggaaaacacaccaaggagctgaggcgggcggagttggtggaaattatcgtggagac

SEQ ID NO: 274092 - DNA, 75 bp, Homo sapiens
gttcgcgcccgccgacccgcgccctgctccctctcagcacctgggcggacgcggacaaggcaaaatctcagcaag

SEQ ID NO: 274093 - DNA, 100 bp, Homo sapiens
cgggcaggaactgggcgccggcgcttacagcatgagagcctgtgtggtgcccctatctccttgttccaagggcctctcttgccttgaaagccttcttatt

SEQ ID NO: 274094 - DNA, 82 bp, Homo sapiens
gcacgggatccagagcgccgcgcacttcgtcatgttcttcgcgccctggaactgtggctgcaccatctgtcttcatcttccc

SEQ ID NO: 274095 - DNA, 100 bp, Homo sapiens
gttgtctgtcctttccacactatcagggaccatcgccatcaaacattacttcagtatagttccaggatggtgccatgacaatggtgtgaactacaagatt

SEQ ID NO: 274096 - DNA, 100 bp, Homo sapiens
cctttctccgtactgtccctgtgaaggccaagatctgtaacgctgacagtccccagacatacgatgggagagttgcagctccgagctctgtccagtggtg

SEQ ID NO: 274097 - DNA, 97 bp, Homo sapiens
cactcgctcccttgatgatcttgagaaacgcttcgttaagggactcaggcagtacgggaagaacttcttcagaattagaaaggagctgcttcccaat

SEQ ID NO: 274098 - DNA, 74 bp, Homo sapiens
ggaaggccctcaacatcccggagcagctgccacaatgggacatgtgcaagtatctcaggagattacatttcagc

SEQ ID NO: 274099 - DNA, 50 bp, Homo sapiens
ggaagatggcgtctcccacagacggtaaagagtgtgtacaacagttagct

SEQ ID NO: 274100 - DNA, 76 bp, Homo sapiens
tgcgtcacactacgacagtgagaaaggagttgtcgagatgtccacagaaggaggatttggtggtactagcagcagt

SEQ ID NO: 274101 - DNA, 98 bp, Homo sapiens
tcttcaccatgaaatggatagatgaggaaggaatcgagcccactggaaacatggtgaagcagccagccaagttcactgtggacaccatcagcgccggg

SEQ ID NO: 274102 - DNA, 75 bp, Homo sapiens
ctcgccggacccggtggtcgtccgcggctccggtcacgtcaccgtggaggttcccctgaaggatgctaaggaata

SEQ ID NO: 274103 - DNA, 101 bp, Homo sapiens
ctgtggtggtggcaagaaatggaataaaggttggggagactacacctgacaaacttttcactcttatagaagtggaatgtttaggggcctgtgtgaacgca

SEQ ID NO: 274104 - DNA, 151 bp, Homo sapiens
ccgcgccctcccagaggcccaccttcaagcagctggtggaggacctggaccgtgtccttaccgtgacgtccaccgacgcagctgcattcagcctcagcggaggacacgcctgtggtgcagttggcagccgagaccccaacagcagagagca

SEQ ID NO: 274105 - DNA, 75 bp, Homo sapiens
cgtgagccgcgatggctctgccacgctgagcggcatccagcttgccaccagttctccaaggagaagtacatcctg

SEQ ID NO: 274106 - DNA, 80 bp, Homo sapiens
gcttgaacagggctgacaacatttttccttttccggtgacttaagagattaaaattaatttggttgctgttggttctgaa

SEQ ID NO: 274107 - DNA, 75 bp, Homo sapiens
attgttggagtcctgtgcacagattcacaaggacttaatctgggttgagaacgcccatataaatgtgaactttgt

SEQ ID NO: 274108 - DNA, 50 bp, Homo sapiens
tggacagaccaacctgtcagtgctgcaaattagaagcccaggacccagga

SEQ ID NO: 274109 - DNA, 95 bp, Homo sapiens
ctgccacccattgtgtcttctcaagaaggtgctggagaatctggtaaaagcaccattgtgaagcagatgaggatcctgcatgttaatgggtttaa

SEQ ID NO: 274110 - DNA, 100 bp, Homo sapiens
caggaggacacgctgcagttggccttcatcgacttgagacaagtcaaaatgcagatcttcgtgaaaacccttaccggcaagaccatcacccttgaggtgg

SEQ ID NO: 274111 - DNA, 83 bp, Homo sapiens
ccctgtcctagctctgtaactgtttacactttatcttcaagccaggatgaagggagactgggcaagactcttacgccccacac

SEQ ID NO: 274112 - DNA, 74 bp, Homo sapiens
tcaccttcccctgacctgagtagtcgccatggcacagatggaatcagtgtgagtggctttcccctgtccagtcc

SEQ ID NO: 274113 - DNA, 98 bp, Homo sapiens
ccgtctgttcgcgctgctgctgttcttcgtaggcggagtcgccgagtcggatatcaatgcttacaattgtgaagagcccacagaaaagttaccttttc

SEQ ID NO: 274114 - DNA, 133 bp, Homo sapiens
acagctgcggtgctctgccatattgtgtcttccccggccggtccctcgcctcccggccgagctgacgcttcgggctcagaatcaggttctgaaaaaaggtgttgtggatgaacaagcaaattctgcagcttta

SEQ ID NO: 274115 - DNA, 75 bp, Homo sapiens
aatacgaaggtttctggctgggccaaaattgtgcgcaatgccaaggacacagcacacacacgggctgagcggaac

SEQ ID NO: 274116 - DNA, 48 bp, Homo sapiens
aagagggctacgtgaaagatctgaaagtttcaccagtgatcattaaag

SEQ ID NO: 274117 - DNA, 100 bp, Homo sapiens
tttgaaatgctaagattcttggataccacagtatcataaaattcctctaaatgcaagtggagcctctaaggatctgctgttacttctgaaaacttggagt

SEQ ID NO: 274118 - DNA, 75 bp, Homo sapiens
gaagtatcgtaacccccaaagagaaaaagaaatgatgcaattgtatatcagactggagtttatccagaaattttc

SEQ ID NO: 274119 - DNA, 75 bp, Homo sapiens
gaggagacttccttgcttctttggagaatgatatcaaaccaattagcctgaggcctgctcagtcgttcctaatga

SEQ ID NO: 274120 - DNA, 100 bp, Homo sapiens
tttagaggaccactagttggaccccatcctcgtgctggaggaacaggcttgcagccaatttactggagcagggatgacgtagcccagtggctcaagtggg

SEQ ID NO: 274121 - DNA, 100 bp, Homo sapiens
cgccccctgggatccgcaggttccctacacggtctcctgggtcaaggttgcctgttcactctgatcgtagtattggaagttctggccaaggcaatcagac

SEQ ID NO: 274122 - DNA, 74 bp, Homo sapiens
gagcctccgtgcggagaccactgttcaaggccacaggtcgcaatggaagaagagatcgccgcgctggtcattga

SEQ ID NO: 274123 - DNA, 101 bp, Homo sapiens
tgatgctggaccggggtcacttagactaccccaggaacccgcgccgcgagggctccttccctcaggtggtatggtcaggaaaaagactacaatgtactagt

SEQ ID NO: 274124 - DNA, 136 bp, Homo sapiens
tcctgttcgactgcatcgtccgaggcatctcccccaccaagggcccctttgggctgcggccggttctaccagattctgaaagtcaagaagacatcatccggaatattgccaggcacctcgcccaggtcggggacag

SEQ ID NO: 274125 - DNA, 75 bp, Homo sapiens
agcgacactacctgggccatacagactgtgtgaaatggtatgtggaggggacaagccttacattgcaccttcaga

SEQ ID NO: 274126 - DNA, 75 bp, Homo sapiens
gtacaattggccgccaagattcaacaccttgagttcagctgctctgagaagagacagagttttgccatgctgccc

SEQ ID NO: 274127 - DNA, 90 bp, Homo sapiens
ccgttctttaatatgctggatgagctgctgaagcccaccgaattagatcatggaagggaagtggttgctgtgtatgttactggtgcttgg

SEQ ID NO: 274128 - DNA, 100 bp, Homo sapiens
tctgcaaaagtgccgccctgacttgtgcagcaaagtggcccaaatccatggcattgtgtcaacaggtgcctataagcgccaggtgcatgaggtccccctg

SEQ ID NO: 274129 - DNA, 83 bp, Homo sapiens
agagcggcggccgctcacaacatgcacagcctggcgacggctgcgcgagtaaccagctcataaatcacatcgaacagtttttg

SEQ ID NO: 274130 - DNA, 98 bp, Homo sapiens
ttaataggaataccactattccaaccaagaagagccagtctctggaatctgttctgcgccacccggcagataatcgcacccagattcgagagcttggc

SEQ ID NO: 274131 - DNA, 102 bp, Homo sapiens
ctgcaccagaatgaaggagaaccagaaacatatctattatatcacaggaagccttggaagatcgtttggaaaggattaatcgagaactgggttcagttcgca

SEQ ID NO: 274132 - DNA, 96 bp, Homo sapiens
tggctcctggacccgcaataaagtgtactaatggtcacttgatgtgcgctggctgttttatccacctactagcagatgcccggctgaaggaggagc

SEQ ID NO: 274133 - DNA, 98 bp, Homo sapiens
tggaagccgagaagcctctgaggcgctatggggcggtggaggagacggcttggaaaacggagagactggggagaaattgggaaaatgaggtacgttag

SEQ ID NO: 274134 - DNA, 98 bp, Homo sapiens
gttgcccagtccagcagagcagcacggtgcccaggacacagagctcagtgcaggcactggcaacttctatttgctccagaacctgggtatcaacccag

SEQ ID NO: 274135 - DNA, 123 bp, Homo sapiens
gtttcttctgatgactcagtacaacttcatgcctacatttcagacacaggatgatcagaagctacaggagagtttaaggcaaggtgctatcattattgcttcattaatcaaggaaagaaattc

SEQ ID NO: 274136 - DNA, 83 bp, Homo sapiens
ccgaggactgcggggtccggtgtccacgcagagtttttagaacttcagccataaaaatgggcagaattttccttgatcatatc

SEQ ID NO: 274137 - DNA, 100 bp, Homo sapiens
cggcaaagttgttggctggtacaccggctggagagcagacaggccttttgccatcgacatggcaggttatgatgtgattgctcaagcccaatctgggact

SEQ ID NO: 274138 - DNA, 110 bp, Homo sapiens
ccggcgggcagaagccgcccgctctccgggtttgaagtttgaggaaattcaaaaaagatttggtgaagagttctttaatatatgctttcatgagaatgagagagtccttc

SEQ ID NO: 274139 - DNA, 82 bp, Homo sapiens
cagcatcaatgaggagatcacaccccgacggcagtccatgacggtgaagaagggagaggttacgggcaggacttgagtggct

SEQ ID NO: 274140 - DNA, 100 bp, Homo sapiens
attcagcagcggcagcagctggagaaggtcgtggagcagcaccttgcctgcaggactgagtggagtagctggagtgagttcccgctgtgaaaaagcctgc

SEQ ID NO: 274141 - DNA, 98 bp, Homo sapiens
aaccacgttctccaatgcaatgctgtttgccctgaacatcatgaattcccaagaaggagggaagctatgcgaaattatttaaaagagcgaggggatca

SEQ ID NO: 274142 - DNA, 75 bp, Homo sapiens
tggtgtagcgctttaggggaagtgaagtgaagacttacgatccttctggtgactccacacttccaacctgttcta

SEQ ID NO: 274143 - DNA, 100 bp, Homo sapiens
ctgccttcgcgctgaggagccctcgttttcgagatcaggcctgaccgggataagctccaggttcaccaagttgaagagtcttaacctttccaataatcat

SEQ ID NO: 274144 - DNA, 75 bp, Homo sapiens
gagaactacagaaacctggtctccctagtggtccacatgtgccaggagatgtgggaatggctacccctgaagtca

SEQ ID NO: 274145 - DNA, 50 bp, Homo sapiens
ctcctgagtagctgggattgcagacagggtctcactttgttgtccaggct

SEQ ID NO: 274146 - DNA, 100 bp, Homo sapiens
cttggcaaagcttctccctcagtatttagaccagataagccaatggacacgtcagtgttatctgaagaaggaggagagccttttcagaagaaacttcaaa

SEQ ID NO: 274147 - DNA, 99 bp, Homo sapiens
cctcgaacgcgaggccaacagccccgacgttccatcctcagagcagcctgaactgttcctaaagaaacttcagcagtgctgtgtcatttttgacttcat

SEQ ID NO: 274148 - DNA, 101 bp, Homo sapiens
gcttcggagcggccggtactgttgaaagcgacaagtggaggcgccgctctagcggccgggactctgaactatggcgacatacggctatgagcacatattga

SEQ ID NO: 274149 - DNA, 98 bp, Homo sapiens
tgcctgggacctggccaagggctccacacaccaagaccaagtggaagaagttgttccgaatgtaattgaaccttccttcggcctgggtaggatcatgt

SEQ ID NO: 274150 - DNA, 100 bp, Homo sapiens
gcgaatatcgtcatcgttagaagaggtccttctgtagtgccatggtagaagaattgaggatgtccctgaagtgccagcgtcggttaaaacataagccaca

SEQ ID NO: 274151 - DNA, 100 bp, Homo sapiens
aatcaacgattcttgaagttgaagaaaagggatgcttgaagatggaaagaaatttgattcctcccgggacagaaacaagccctttaagtttatgctaggc

SEQ ID NO: 274152 - DNA, 75 bp, Homo sapiens
cgggactgcggcggcggggagagcggcgatttaatgtgtgccgaccatttccttcagtgctggacaggctgctgt

SEQ ID NO: 274153 - DNA, 100 bp, Homo sapiens
tggaagaggtagaggacgatactctgaccgttttagtagtcgcagacctcgaaatgatagacgcatcgacaccccaggagtgattagtcgtgtgtcccag

SEQ ID NO: 274154 - DNA, 83 bp, Homo sapiens
cggggaagccagagctgactgaagaccttgtgccggagccgactactggagatgacagtgatgctgccacctttaagccaact

SEQ ID NO: 274155 - DNA, 75 bp, Homo sapiens
caaccaagggcctccgtctggatttccaaggaagaatttcctctgaagcaccggaggctactcacagtcgaacta

SEQ ID NO: 274156 - DNA, 51 bp, Homo sapiens
cagaaattctggaacacctatatgattataacgatagaggagactcatgaa

SEQ ID NO: 274157 - DNA, 98 bp, Homo sapiens
agtcaagctgggaggaccaaggccgggcagccgggagcacccaaggcaggaaaatgagctgttttcactcattagctcctgaggtaaacaaattgaaa

SEQ ID NO: 274158 - DNA, 74 bp, Homo sapiens
gctgaggactgcctgtttgcagtaacctttggaaacatcagaagctactctccattgacctggacaaggtggtg

SEQ ID NO: 274159 - DNA, 80 bp, Homo sapiens
gtacacggagtacaacgagccgcatgagagccggacaaactcagacatcgtggagagtatggtgtttgcgaaaacttgcg

SEQ ID NO: 274160 - DNA, 101 bp, Homo sapiens
tgaagctaaaaaaccttctggccccagggcagtgtgcagcctggattttctttgctaagtgattcgcctttgccagtctcatctcgtgtctgctttgttaa

SEQ ID NO: 274161 - DNA, 130 bp, Homo sapiens
gccagcattggtgacatggaaaaggagccaggaattcccagtttgacaccacaggctgagctccctgaaccagcccttgatggaggggagccgacctcgcagcagcctgagcctggccagcagcgcctcc

SEQ ID NO: 274162 - DNA, 149 bp, Homo sapiens
gtcggagctagagccagaggtgcaggccatcgaccggagcttgctggaatgttcggccgaggagattgcggggataaacaggggtcacatgacgacagaagccaagagggctgcaaagatggaaaagaagatgaaaattttgcttgggg

SEQ ID NO: 274163 - DNA, 98 bp, Homo sapiens
ttcggcttctcgctggccatgcactggcaactgcagcccgaggacaagcggctacgaggacctattaaacttggaatggctaaaatcacgcaagtcga

SEQ ID NO: 274164 - DNA, 90 bp, Homo sapiens
acgaggtggacatcaagccggataagtgtccccgtagagtcaaccgctgaactgctcattttcagtgtcccgattgtctatgagaagtac

SEQ ID NO: 274165 - DNA, 100 bp, Homo sapiens
cgcttcgatcgcctcgcgccggctgctctttccgggtacatgtcccagagcaagcacacggaggcccgggagctcatgtactcgggagccctgctcttct

SEQ ID NO: 274166 - DNA, 75 bp, Homo sapiens
gctgagggactcacagctgatgacctgctgctcgtgctgatctcagcacctgtggaatcctctcaagaggaacag

SEQ ID NO: 274167 - DNA, 99 bp, Homo sapiens
gcgtttctctgttgtctcggtagaaggccagagtcacacacggtcctaagagctgggcaccaggaagcgaaggctgccttttccccacgactctgaaag

SEQ ID NO: 274168 - DNA, 82 bp, Homo sapiens
gtacagacagctcaggctgcccagatggtggctcccggagtccaggctaagtcctatcagccatggaaacaccattgctctc

SEQ ID NO: 274169 - DNA, 100 bp, Homo sapiens
ctatccagacgctctggtcatactaaagaacacatctggaagctgtgttgttggctacatcggggagcgatgtcagtaccgagacctgaagtggtgggaa

SEQ ID NO: 274170 - DNA, 100 bp, Homo sapiens
actacacagctgttccttaacctgcatagcctataaactgttttaagagctggcaaacttccccagactctgcgaggaaacggaaaggattgttgctaac

SEQ ID NO: 274171 - DNA, 96 bp, Homo sapiens
ccggataaggcggcgctgaacgcactgcagcctcctgagttcagtggccaatccgccatggtatagttgaagattgggacttaatggaaaggttta

SEQ ID NO: 274172 - DNA, 75 bp, Homo sapiens
aaagtctttccaaaaggtcaaggttcacaagaggcatcccaacacgctgtcttttcgctgctcgctggcggactt

SEQ ID NO: 274173 - DNA, 74 bp, Homo sapiens
ctgggactgaagagggacgggtcccgcggcgagcgagctcctgagctccagaacctgggtatcaacccagcaaa

SEQ ID NO: 274174 - DNA, 100 bp, Homo sapiens
ttatctcatctggcttggcgcctgaggttctcccattagatgtccggtctgtgctacgacagcaaaatgttccaggtgcatcaggtgctctgcatcccca

SEQ ID NO: 274175 - DNA, 50 bp, Homo sapiens
gaaaagaaaggctcacggaaaatgtaagtctgcccgtgccgtgaaggtgc

SEQ ID NO: 274176 - DNA, 100 bp, Homo sapiens
cgctgatggcatcttcaaagctgaactgaatgagtttcttactcgggagctggctgaagatggctactctggagttgagagagctggcggtcaccatggc

SEQ ID NO: 274177 - DNA, 87 bp, Homo sapiens
actagacgcacatcaggaagacagattaatcctaccatatgaaagatttattaaaggagaagaagataagcccctgcctccaatcaa

SEQ ID NO: 274178 - DNA, 82 bp, Homo sapiens
ccaaggaagaatttcctctgaagcaccggtgtccctggccagtgtccttccacctgtccacaagcatggggaacatcttcgc

SEQ ID NO: 274179 - DNA, 74 bp, Homo sapiens
tgaagtccaagtactcagacatcaccatcatgtttgaggagaccctcctgttcttaactgtgggcgatgagaaa

SEQ ID NO: 274180 - DNA, 87 bp, Homo sapiens
actcacaagaggggaagctgacagagatacctacagacggagtgctgtgccacgttgtactcgtaaaacaaggatcatcgatgttgt

SEQ ID NO: 274181 - DNA, 75 bp, Homo sapiens
tcacagctgttgctgttattacagtccagggctatctgatgggttagagtgcctttgagaagaaatcagtggata

SEQ ID NO: 274182 - DNA, 83 bp, Homo sapiens
gaagcatcgttaaagtctctcttcaccctgccgtcatgtctaagtcagagaaacacccgccgggcagcagaggtctggatgga

SEQ ID NO: 274183 - DNA, 75 bp, Homo sapiens
gaaaaatgcagatccagagacaacccttttggcctacctgagaagaaagtctatgtgacagagctgacacatcga

SEQ ID NO: 274184 - DNA, 100 bp, Homo sapiens
gctgctcaagcgacaactggcggagaccaagatcaccggggaacccttgatccgtcgatcagatgataatgaaaaggccttgaaaatccgcctgcaagcc

SEQ ID NO: 274185 - DNA, 87 bp, Homo sapiens
aacgcgggcgcctgaaggagttgttgtctcggcagcgcccgcggagacgtgaagagccacataaagaagatccctaatagtcatttc

SEQ ID NO: 274186 - DNA, 96 bp, Homo sapiens
ggcggcccgtcctggctcccttgtccgggaagcccgcccagcggagctggagtttgttcagatcatcatcatcgtggtggtgatgatggtgatggt

SEQ ID NO: 274187 - DNA, 75 bp, Homo sapiens
gggctggaggcggcggagcgcgagagcttcgagcggactcaggcaccatcatgtgttatgggcagacgggagctg

SEQ ID NO: 274188 - DNA, 75 bp, Homo sapiens
catcgacgccatcgacaagcgctgatgtagaaggccaatccttaagacaccgagacaagcggcttagtttgaatt

SEQ ID NO: 274189 - DNA, 83 bp, Homo sapiens
ctgggtgcccgtggaccacaggccctcgttgcccagatgtgacttaagagattaaaattaatttggttgctgttggttctgaa

SEQ ID NO: 274190 - DNA, 100 bp, Homo sapiens
cgagattccgtgggcgtaggaccctccgagccaggtctggagaacacattcaaatcagttattgcacagattggacctggaggaactatcagttcagaac

SEQ ID NO: 274191 - DNA, 75 bp, Homo sapiens
ggtagagggcatggatatctctactcgctccaaagcttcgttccagagcccagcatgaatggatacgcggaattt

SEQ ID NO: 274192 - DNA, 82 bp, Homo sapiens
cctccgcggctgccctgcgccagctaaaagatggcggcaaggcagcccaggcaaatgtaagaataggcgatgtggttctcag

SEQ ID NO: 274193 - DNA, 89 bp, Homo sapiens
tgctctgcctgtgatgtcgagaacactggtgccggtggtggtgtgcacattgagccccggtatagacagttcccccagctgaccagatc

SEQ ID NO: 274194 - DNA, 74 bp, Homo sapiens
tccgacatccttgttgtaccccagattatcaacgcctgatgactgtggcagaaggcatcaccacacttttgttc

SEQ ID NO: 274195 - DNA, 90 bp, Homo sapiens
gccgcgcgctgagggtctcggggcgggcgccgcgggacctctccgggccatgggtcaaaatgcagatcttcgtgaaaacccttaccggca

SEQ ID NO: 274196 - DNA, 100 bp, Homo sapiens
gggcgacgctggctgcagggacccggtgacagcgtgagagttatttctcaaactctgaggctgcggagttcacacattgaaatctgtcatctttttcaga

SEQ ID NO: 274197 - DNA, 50 bp, Homo sapiens
gtggctgtgaacctgactatggaaaaggtgaggcggaaccaaccctcctg

SEQ ID NO: 274198 - DNA, 98 bp, Homo sapiens
catcctcctgagcagcaccttcgtgtacaatagcatgggaaccatcaaccagcaggccatggaccaacttcagaaacatgacagctgccctacaggca

SEQ ID NO: 274199 - DNA, 100 bp, Homo sapiens
actctagaggaaaaaattgaaagagaaaaggaattagcagaagacattatgtcaggtgtcatggagaaactccagctgggcccagagattctgcagcggg

SEQ ID NO: 274200 - DNA, 83 bp, Homo sapiens
ccaggccctggagtgcatgcgcaggtgatgatgaacagtctacacagatggctgcaagttgggaagatgataaagttacagaa

SEQ ID NO: 274201 - DNA, 73 bp, Homo sapiens
gatgggatgccgggaggccccatcccgccaggtttctttcagattgtccagaacatcgtgggcacagctctga

SEQ ID NO: 274202 - DNA, 100 bp, Homo sapiens
aaagcgaggctgaagaaggccaaggctgcagaagccaaagccacggtgaagatcatgacggagaaggaactcctggccgtggcttgtgagcagtttctgg

SEQ ID NO: 274203 - DNA, 75 bp, Homo sapiens
gtccagcgctcggacccccctacccacgctgaacgagagggacacggagcaggggtaactatctccttcctgctg

SEQ ID NO: 274204 - DNA, 75 bp, Homo sapiens
acgccatgtcgggttattcgagtgaccgagaccgcggccgggaccgagggcccgatgagagaaagggaaagttaa

SEQ ID NO: 274205 - DNA, 96 bp, Homo sapiens
ttgacgcccctggggagattggacaagtatgctgcaagtgagaacatatttaacagggtccccctggaaacccaggaattccaggcctcccaggat

SEQ ID NO: 274206 - DNA, 75 bp, Homo sapiens
gaaagacagtgattgttataatcaaagcctataatgaggaaatttctgtctgaccaatatcaggggcacatcagc

SEQ ID NO: 274207 - DNA, 82 bp, Homo sapiens
gatcgctacggaccttaaaatacccgcaacagccccttcgtcccaagacagaactgtaccgctctctttttggccagctcca

SEQ ID NO: 274208 - DNA, 74 bp, Homo sapiens
gcggttatcagtgaagacgccttggtgggagactctgtcattttggagccagatgaccaggatgccccagatga

SEQ ID NO: 274209 - DNA, 100 bp, Homo sapiens
ggcaacagctttgccactcgactttccaacatttttgttattggcaaggcagcagctaccaagaaaccagcccctgaaaagaagcctgcagagaagaaac

SEQ ID NO: 274210 - DNA, 90 bp, Homo sapiens
gccacgcgtcggactggtctgtctgagggagatggtgacaagctcaaggcctgcgagacaaggagccccaaactgtctcacagtcctcaa

SEQ ID NO: 274211 - DNA, 100 bp, Homo sapiens
ggttaaagagagacagtggacagtattggccaagcgtataccatgcaatgccttattccagaatgactatcttgacttacccctttaaaaatcttcccac

SEQ ID NO: 274212 - DNA, 90 bp, Homo sapiens
tctctgattgaactttttgaatctttcaagagttttgaagaaccatatttatttagagtcagaatggagcgatttgtagtaacagcacca

SEQ ID NO: 274213 - DNA, 100 bp, Homo sapiens
ccggctcagcccccggccgcggcgggacccgaggtggcttgctttggtgaaggtattcatacagccttcctaaaggcaatgctttccacaggatttaaga

SEQ ID NO: 274214 - DNA, 100 bp, Homo sapiens
aacagaaggcgatcaaggccaagtatccgccagtcaataggaagtacgagtgtggttatcactaggctaaaactggacaaagaccgcaaaaagatcctcg

SEQ ID NO: 274215 - DNA, 82 bp, Homo sapiens
ctcgaaggcagcacaggacctggaaaaattacatggcttaaaagacaaccttcttgcttctgggacatccagcctgacagcc

SEQ ID NO: 274216 - DNA, 75 bp, Homo sapiens
ggggaaaatctccccggtgactttcaggcacattcaggaccccgcgagccagcggctgacgtggaacaagtcccc

SEQ ID NO: 274217 - DNA, 75 bp, Homo sapiens
ggacagagtcttctgggtctctctgcctgaggccctggagggagagaagtattctaccttgtaaatactgttatt

SEQ ID NO: 274218 - DNA, 82 bp, Homo sapiens
gtggatcgctgtgatcgtcacttggacagcctttcctgcctcagggaagaagagagagacagactacagtgatggagaccca

SEQ ID NO: 274219 - DNA, 116 bp, Homo sapiens
gccccgtcctccttcgccgccgcgcacaaccgcacgtgcagatggagcagctatcagatgaagaaattgatcatggtgctgaagaagacagtgacaaggaagatcaggacctggac

SEQ ID NO: 274220 - DNA, 83 bp, Homo sapiens
cgacggggcgcgcgcgaagcgagcgagaaggcacggagtcgccgcggagcgcagaagcccctgaatgtgacagtgatccgcag

SEQ ID NO: 274221 - DNA, 100 bp, Homo sapiens
ggaggcggcaccttctgggggcttggcgctctgctcaccaaaacgaagcctggtccgacccccagtggcactaacgtgggatcctcagggcgctctccca

SEQ ID NO: 274222 - DNA, 75 bp, Homo sapiens
agctttcgaagacgggatactgctcagcaaggtggtttgtgatgaaaatggttccaagggctatggatttgtaca

SEQ ID NO: 274223 - DNA, 100 bp, Homo sapiens
ggagaagcgccttcgctatctcatggacacagattcaagatggaaaaggtgatgtaaccattacaaatgatggtgctaccattctgaaacaaatgcaagt

SEQ ID NO: 274224 - DNA, 100 bp, Homo sapiens
gcgaagattaaatctcattctcagtgtgtttttatttctcgaaattttcatactgggagattccaattacagacaacaagggaggtgtcacagttttcca

SEQ ID NO: 274225 - DNA, 90 bp, Homo sapiens
gaagcagccgccagttgggatcaaatgtgagcctatggatcaagaaactgaaggctcagaagaggatgataaagaaaatgataagaccga

SEQ ID NO: 274226 - DNA, 75 bp, Homo sapiens
gtccccatcaccggcacacattgtcaatgagaagactttgggacatttcatgagtcattcaagcaacatttctaa

SEQ ID NO: 274227 - DNA, 90 bp, Homo sapiens
ctgcgggctgagcggcgagtttccgatttaaagctgagctgcgaggaaaatggcggcgggagggctctcacctttgtgtatccttttggt

SEQ ID NO: 274228 - DNA, 82 bp, Homo sapiens
tgacctgcgcgcccgcctcggcccgcacgccaagcacgtggtgggctatggccaccttggaaggtgctcgggtcttcggggc

SEQ ID NO: 274229 - DNA, 75 bp, Homo sapiens
accctccagcagcagaccttcaagatagacattgaccccgaggagacgttgtcactcagcccagtccatcagttt

SEQ ID NO: 274230 - DNA, 100 bp, Homo sapiens
cctatgacaggcctcggggtcgtcccatgtccaaaaagaaggatgtaagagcacacctaaaatgacaaagtcaactcaaactcaggattcatttcaggag

SEQ ID NO: 274231 - DNA, 90 bp, Homo sapiens
atgagcacatgaccagcttagcttctgtcctaaaggttaacgtccctaaaacccgccggactttctgtaagaagtgtggcaagcaccaac

SEQ ID NO: 274232 - DNA, 75 bp, Homo sapiens
ctgaatggcgggaagtgtgaagcggccaatggcacggaggcctgcgtgtcttgaggaccggcccagctcaggctc

SEQ ID NO: 274233 - DNA, 82 bp, Homo sapiens
gcaatgatgttggaacttgctcgtgccttagacaagaaactcctttccttaaaggttctgcacttttaaaagaaaagcaaag

SEQ ID NO: 274234 - DNA, 75 bp, Homo sapiens
agagaccaataaaaataaactgcttgaacatcctttgactggttagccagagctctgaggaacatgaatacagtg

SEQ ID NO: 274235 - DNA, 133 bp, Homo sapiens
acctttgtggatcagtgcaagactgtgctcaagctggcctctgaggagcctcctgatgatgagaacatacatatgatagttgagaaagacacatattctgatcatgaagaaataaacacaagttaaatatgac

SEQ ID NO: 274236 - DNA, 106 bp, Homo sapiens
cagggagattggccacttccacgaaaagaaagacctgcccttggacaccagaataccctctaccatctgctttggtcagggtgccgctcgaggatttaaaagcaac

SEQ ID NO: 274237 - DNA, 96 bp, Homo sapiens
gcgaaggcggcggctcctgccctctcgctttccctctcgcgtctctggctgcagatgaaggatttgggggcagagcacttggcaggtcatgaaggg

SEQ ID NO: 274238 - DNA, 90 bp, Homo sapiens
ggaacagtgccaagttagatgccgattacccacttcgagtcctttattgtggaggttccaaggagcaggggcctcgacaaaggaagggag

SEQ ID NO: 274239 - DNA, 71 bp, Homo sapiens
cattggaggagccacccgcacagacatctgccaaggagccctggttggattggatgctgctggcaagacaa

SEQ ID NO: 274240 - DNA, 83 bp, Homo sapiens
tcaacgacgcggacatggtcatgagctttgtgaacctgggatctcccagccatccagccccggctagtggcggtcagcaaaac

SEQ ID NO: 274241 - DNA, 74 bp, Homo sapiens
cttaagagtcttaggagtcagttggatgtgacacataaggagcaaatgcagccctgaggatttggctactgcat

SEQ ID NO: 274242 - DNA, 74 bp, Homo sapiens
cgtcttgttgtttgttgatggagggtggatggtggatgttagagagaatgccagctgatgaagaccgagaggcc

SEQ ID NO: 274243 - DNA, 100 bp, Homo sapiens
ctgagcgcaacacttctccgagccagcgagccagcgagccgccgacccgccgagcaaaatgttgctgaacagaagacttttgagagtcagcagaaatctt

SEQ ID NO: 274244 - DNA, 100 bp, Homo sapiens
agctgccctatcacctgccagctcatcacaaaagaaaatgtgatggaggatatttgtagtaaactgcaagagattaggaacccaatccatgcaattggac

SEQ ID NO: 274245 - DNA, 111 bp, Homo sapiens
cgacatgttcacgcacgggatccagagcgccgcgcacttcgtcatgttcttcgcgccctggcttgggcactgtttaaaggaaagttccgagaaggcatcgacaagccggac

SEQ ID NO: 274246 - DNA, 83 bp, Homo sapiens
caggcactgcctgctctgaaaagatttcaaataccgtgggccggatgtatcccccgcgttctcccaagtctgctgcccctgcc

SEQ ID NO: 274247 - DNA, 100 bp, Homo sapiens
gggggctcagagatccaagtgcgcgccctggcgggtccggaccaagctgcagtattgaagtatgagaacaatgttatgaatatcaggcaattcaactgtt

SEQ ID NO: 274248 - DNA, 100 bp, Homo sapiens
cgcagaggaggagcgcagcccggcctcggagcaggacatcgagactttacatggctctgttcacgtcacgctgtgtgggactcccaagggaaaccggcct

SEQ ID NO: 274249 - DNA, 88 bp, Homo sapiens
gatttaaacaagagatttccacagaagaggagaaggcagagcccccccaggctatgaatgccctgatgcggttgaaccagctgaagcc

SEQ ID NO: 274250 - DNA, 98 bp, Homo sapiens
ccagatgtcccaggtgcaggagctcttccatgaggcagcccagcaggttgcagatattttattccaaactgcccaaaatgcaggcatcagttttgaca

SEQ ID NO: 274251 - DNA, 97 bp, Homo sapiens
ggcaccgaggaccagctcaatgacagcaacgcacctcttgctttttcctccaaagtatgttatgttaagtttcgtgatccatcaagtgttggcgtgg

SEQ ID NO: 274252 - DNA, 75 bp, Homo sapiens
gccgatccagcctgcggagcctgtggggcaggcatctgggtcacaggccccagttccaccccctgaagcacggat

SEQ ID NO: 274253 - DNA, 75 bp, Homo sapiens
aagaaatggacaaagatcttaactcagtggtcatcgctgtgaagctgcaggccctggccaacgtcaacattggga

SEQ ID NO: 274254 - DNA, 49 bp, Homo sapiens
gccagcaagacgctgcccgccatcgaggcatggatcgcaatggggtgcc

SEQ ID NO: 274255 - DNA, 50 bp, Homo sapiens
tgcttgtgaagaaatagcctaccaggtgttgagccagtgcaggttcagga

SEQ ID NO: 274256 - DNA, 74 bp, Homo sapiens
ggcagtatccttggggcactgtgcagggagtacttcttgcaagcagagctgacaagcaacgtcttaaaaacagg

SEQ ID NO: 274257 - DNA, 80 bp, Homo sapiens
ccggaggagtcagctgtgtgtccagaacgtgccatggagacgcttaacgcggacaaggcaaaatctcagcaagttcggac

SEQ ID NO: 274258 - DNA, 88 bp, Homo sapiens
aggacttcatctcctcaacatggaaactaaggccctctttggattccagtacgatgcatcagaccataccatggcgtggctaggaccc

SEQ ID NO: 274259 - DNA, 100 bp, Homo sapiens
aatacgtttccattgtgatcccaccttctgggcaaagaatgtagtcaatttaggacctagatgtgaaggctggtggaggctgtgtaatgaccattggaga

SEQ ID NO: 274260 - DNA, 100 bp, Homo sapiens
cagctccttccgggacggcctggccttctgcgccatcctgcaccggcaccggcccgacctgctatagagccacgaaccccctgaacaaggagctcgactg

SEQ ID NO: 274261 - DNA, 98 bp, Homo sapiens
gcggcccaaggtgtcccttggcggcgcgagcaggaagaatggagctaccacatggtcaggaggaagagactcacaaagaaagatgaaggttgcagaga

SEQ ID NO: 274262 - DNA, 75 bp, Homo sapiens
tatagacccggctttaccttatatcagtgcaaagagccgtctcactcttctctctgaacgacccggccctgagcc

SEQ ID NO: 274263 - DNA, 101 bp, Homo sapiens
ccgccctgcgccagccttcgtccccgcagaggaccccccgacaccagcatggactgctgcaccgtactaggttttgacaagcttgcatcatgcgtgagtat

SEQ ID NO: 274264 - DNA, 82 bp, Homo sapiens
gaaggactcaccgaggcgcaggggctggaggtggtgctgggggttgagaacttgttgcttagtaaccaagggaccattaagc

SEQ ID NO: 274265 - DNA, 100 bp, Homo sapiens
cctcctcctcctccccaccaccaccatctccatcacccaccaacaacaccacaataatccacagccaagtgtgggatgagttggcctactacgaagaaaa

SEQ ID NO: 274266 - DNA, 83 bp, Homo sapiens
ctcccaccttctttcttcagccgaggccgccgccgcctctccttgctgcagccatggagttcacgcctacatcatcagctccc

SEQ ID NO: 274267 - DNA, 75 bp, Homo sapiens
taaagtgttacatgacagatgtatgaggctctgattgtactttctccacaagcttcagcatggcagtatctctca

SEQ ID NO: 274268 - DNA, 100 bp, Homo sapiens
actcttctgacctccgcgcgacgtacccgccgccgccgttggctggagttgtatcacggactgattcaccgagcccaaccgtactcaactcacatatttc

SEQ ID NO: 274269 - DNA, 90 bp, Homo sapiens
cggcaaggatgtgatgccagaggtcaacaaggttctggacaagatgaagtctttctgccagatattcccactctggccactgcccaaagg

SEQ ID NO: 274270 - DNA, 85 bp, Homo sapiens
ctggtcctaagtgtggtgggcacagcatggcttgaagaagcaaacagcatgctaaccaaagatattgaaatattaagaagagaga

SEQ ID NO: 274271 - DNA, 100 bp, Homo sapiens
gggtgaaatctggcatattagcgctagccctgcagacagaggtgtgctgacgacctgctacaacagaaacatgtcatgctgcccaaggacatagccaagc

SEQ ID NO: 274272 - DNA, 100 bp, Homo sapiens
tgggtttagcacgatgagctcaatcggcactggggtctcctctgagcctccggcctccataagacccaaaacagatgacacctcttcccagtcccccgcg

SEQ ID NO: 274273 - DNA, 98 bp, Homo sapiens
cccaaccacccttctacaagaacatgatgatataagtttgagaagctgaacactttccaggcagttttggcatctgatgggtctgatagctacgccct

SEQ ID NO: 274274 - DNA, 74 bp, Homo sapiens
atcataaccggtttgatgctgtgttgttgaatgttgggtcacgaagatctcaacctggccaaagaagagaaccc

SEQ ID NO: 274275 - DNA, 74 bp, Homo sapiens
ctgcttgccggccccaacacggaccttggggcaagctctgtgtgattgattggaagacatcagagaaaccaaag

SEQ ID NO: 274276 - DNA, 75 bp, Homo sapiens
ccggtgccggcctagcgtcctggaattacttcaatcaaagcaggcagatggcttgtgcagaagattggagaaggc

SEQ ID NO: 274277 - DNA, 75 bp, Homo sapiens
cccgggcactgttgctgctgcgggaggggtggcactgaatcaacaagacaagcaactcaattgattaatgctttg

SEQ ID NO: 274278 - DNA, 119 bp, Homo sapiens
ataaccgaagatgtcagcctcccctgtcccgaacgcagtgtgtggaaaggaaggatcgagatcgagaccgggatcgtgaagatcggtctaaagatcgagaccgagaacgtgatagagga

SEQ ID NO: 274279 - DNA, 75 bp, Homo sapiens
ggacgctgcacagaaaggatcatcccagagcccaggtcaagtttacccatgggggaactggttccagccaaaccg

SEQ ID NO: 274280 - DNA, 100 bp, Homo sapiens
cctcagacgcagcgtctagtccctggccatagctccgccgctgcccggccttccggagcagtactacagcctcacctggttcctgagccccatccttggc

SEQ ID NO: 274281 - DNA, 73 bp, Homo sapiens
aaagttgttcaagtttatgcagacacacaagagattaatttgaaggaccatgggctccatgttccggagcgag

SEQ ID NO: 274282 - DNA, 74 bp, Homo sapiens
tagtcattcgtaatcagcaggccaaagactcagagtgtgtgcaggaacggagaataaactgagctctctctctg

SEQ ID NO: 274283 - DNA, 101 bp, Homo sapiens
gggccgtgctgcttatggcggcgctggagagggggcgctgagctgttgggatgccatggacaatattaccaggcagaaccaattctacgatacccaagtca

SEQ ID NO: 274284 - DNA, 98 bp, Homo sapiens
gcacttatggccatttcagccagtgaggaaaatagcagctgaatactatgacaacctccctcactacaattcctggataaaagtactgtatgattttg

SEQ ID NO: 274285 - DNA, 101 bp, Homo sapiens
ctgaagttcgataaagggccgtggctcaagcaggacaatcgcactttataccacctgcgattactgtctgccatcatggatgttctcgcagaagcaaatgg

SEQ ID NO: 274286 - DNA, 100 bp, Homo sapiens
gcggccttcgtgctgttccgcggctcctaccagttcctcgtgcccatcgccacatgggcactgtgccccgactgcggcctcgcctcaatgccattctctt

SEQ ID NO: 274287 - DNA, 100 bp, Homo sapiens
ggaaaaaaaatgctcctttcattccaagtttgactccagattttgctgaatggattagagatctaagcattgaagaacagtcagagtgtgctcaggattt

SEQ ID NO: 274288 - DNA, 80 bp, Homo sapiens
ctaagaagaagctggaggtcctgcagaaatatggctacacacacctttctgcaggagagctgcttcgtgatgaaaggaag

SEQ ID NO: 274289 - DNA, 83 bp, Homo sapiens
cacatattcatcatcatgggtgcatcgcccgagcgggaagaagttccgcagcaagccgcagctggcgcgctacctgggcggct

SEQ ID NO: 274290 - DNA, 80 bp, Homo sapiens
caattcggtggaacgaggacgcggactgcgaaggcaggtttacccaaggtccagcctagcccctaggcaccatgtcggac

SEQ ID NO: 274291 - DNA, 75 bp, Homo sapiens
acaagaaacattcgtttatgagatgtctgaaccaatcagagtccttgtgactggagcagctggtcaaattgcata

SEQ ID NO: 274292 - DNA, 75 bp, Homo sapiens
gacttggtgttgaaagtgaaatgtcatgcctctgaaaatgaagctatgaagacggccaagtgggagatgcaaata

SEQ ID NO: 274293 - DNA, 75 bp, Homo sapiens
gtcgccggccgcccgcacgtccgtccggacgcccttgtggaatttgggtcatttgacccttcctgcctgatgcct

SEQ ID NO: 274294 - DNA, 82 bp, Homo sapiens
gccaccgtcgccggccgcccgcacgtccgtccgcaaattgtggctactaatttgccccctgaagatcaagatggctctgggg

SEQ ID NO: 274295 - DNA, 100 bp, Homo sapiens
agaaagtgccttggaaaaactcagctggctcaccctagaagcccaactccaactctgccactttctacaagcagctttgatgaacaaaactgatgccaac

SEQ ID NO: 274296 - DNA, 83 bp, Homo sapiens
ccgggcgctcgagacttaccagagccacaaggtgcgcgcggagccatggttatcatgtcggagttcagcgcggaccccgcggg

SEQ ID NO: 274297 - DNA, 75 bp, Homo sapiens
ggagctgctggtttcattcgaggtttcgggccgtcaaacgcttcagagaaccaaagcatgaaagacgtccgtgga

SEQ ID NO: 274298 - DNA, 75 bp, Homo sapiens
ctgaagggcatcatgcatcttactgaagaaatggtggagtcaatgaagaaagtagcagggatggatgtggagctg

SEQ ID NO: 274299 - DNA, 75 bp, Homo sapiens
aggagtactcggtgaaatcctgtcctgaagactgtaagaaaatggacccaagtggggtcaaagtgctggaaacag

SEQ ID NO: 274300 - DNA, 82 bp, Homo sapiens
ctgtgtgtgtgaattatgaatcttttgaagttggcgccggacagggaggagctgtgcagtgagaagcaaagcaggaaacaag

SEQ ID NO: 274301 - DNA, 100 bp, Homo sapiens
ccaagagctagagcagactcagaatgagctcaccagggagctgaaactcaacattcttcaggtcatctgaaccttctgagaaaacatggtcaacgtcttg

SEQ ID NO: 274302 - DNA, 100 bp, Homo sapiens
cacattgagagcaaaatctacaagatgatgcagggaggaggaatgggtaccacagaccatgtcatcgtcctggcgtccacgaaccgagctgacattttgg

SEQ ID NO: 274303 - DNA, 100 bp, Homo sapiens
gaagatggcccttccatgtctgtgaatttcacctcaccagctcagtctgcagtgatgatggagaaggaactgcatcagctgaagagagccagttatgcca

SEQ ID NO: 274304 - DNA, 100 bp, Homo sapiens
gccccaagacagagcgctactcctggcagtgcgtcaatcagagcgtcctgtgcggcccagcagcaaagaaacctggataacatcgtcttgcaacaaccca

SEQ ID NO: 274305 - DNA, 74 bp, Homo sapiens
tcactgcgcgcctgcgtctacaacaacaccctcaacaacgccatgcctcgtgagtgcatctccatccacgttgg

SEQ ID NO: 274306 - DNA, 100 bp, Homo sapiens
gtaatggcctttcttatactctagaatatacaaagacaaaaggagattctgatgaagaagttattcaagatggtaaacgccctgcagaagatatggaaga

SEQ ID NO: 274307 - DNA, 100 bp, Homo sapiens
aatagcagcccagccttgtcaggccagctccagttcccagagaatatgggtctgtgatgggaatccggttacctgctccttccaaaccctctgagactcc

SEQ ID NO: 274308 - DNA, 80 bp, Homo sapiens
caaaagttcatctccttctgcatccttaactgagaatgaggaatgtcgttgtctgctgggtcttcccctcttcattcccc

SEQ ID NO: 274309 - DNA, 100 bp, Homo sapiens
gatacagctggacaagaagattatgacagattacgccccctatcctatccgcaaacagtaccagcatcaagatgatttatggtaataaggtactcagtct

SEQ ID NO: 274310 - DNA, 98 bp, Homo sapiens
gccaatctacatgagtctagcaggcttcagggatgacttcttagggggcaggggaggtagtcgcccaggcgaccggcgaacaggcccccccatgggca

SEQ ID NO: 274311 - DNA, 100 bp, Homo sapiens
caggaggacgaggcttcctgctctggtacagcgggcgggccacctcgggcactggcctttccatgggtaaggagaaggcacttagcctccagatgatgaa

SEQ ID NO: 274312 - DNA, 98 bp, Homo sapiens
agctctgcgcggctttttgagcggtcccgcatcaaggctctggcagatgcctgaagaacaggcattcagtgttctggtcaagatcatgtttgactatg

SEQ ID NO: 274313 - DNA, 102 bp, Homo sapiens
aaggaggaagtaatgaccaaattaagtcattttcgagaattcattcgggctaaagttaaagagataaagactaagtgccatgatgtgactgcagtagtggag

SEQ ID NO: 274314 - DNA, 82 bp, Homo sapiens
ccaggactccaaaatggcgtcagttggtgagtgtccggccccagctgcatcttcctcccgtgaggctggccgagctccacgc

SEQ ID NO: 274315 - DNA, 100 bp, Homo sapiens
ggtgcctcggaaggactttgaagtagtggactcggaccagattagtgtctcagatctctataagatgttcttcagccttaacctaaggtctcatactcgg

SEQ ID NO: 274316 - DNA, 100 bp, Homo sapiens
cctgtcagtaatgaagttgacctggatgaactcatccttcaaaccgacgcatactcaggagcagagatcttatgccttcattcatccggcatggtccaac

SEQ ID NO: 274317 - DNA, 83 bp, Homo sapiens
gtaaaggaacggagagaaatcctcagtgaacttgggaagtgtgttgctggaaaaggtactggaggcgcaaagaaggcatcaga

SEQ ID NO: 274318 - DNA, 75 bp, Homo sapiens
tcactgacttcaagaatgaagccgcggaccctcgcgacgcatcttctctccagactgccgatcccagaaagccag

SEQ ID NO: 274319 - DNA, 83 bp, Homo sapiens
gagacggtgtcccagctggattcggtgcgggtctggctgggcaagcactacaagaagatcatggaagggaagtggttgctgtg

SEQ ID NO: 274320 - DNA, 98 bp, Homo sapiens
gtttgtatgacgtttatgaagcagattgcagatgacacctttgaggccctgtgcatcgagccgttttccagcccgccagagctgcccgatgtgatgaa

SEQ ID NO: 274321 - DNA, 101 bp, Homo sapiens
ctggtggtggagaaggatacaaccatcaatgagatcgaagacactttccgggcacctgtgctggttgcacttgctttgattgaatgtggaatgaagtacga

SEQ ID NO: 274322 - DNA, 83 bp, Homo sapiens
cttagctgtgctcgcgctactctctctttctggcctggaggctatccagcattaagatgttctacgaggagcatttgcacttg

SEQ ID NO: 274323 - DNA, 74 bp, Homo sapiens
gacttatgcctggaggaacttggaaatcaaactcaatgatacagaactttcaggaagaagcatgttttattctg

SEQ ID NO: 274324 - DNA, 75 bp, Homo sapiens
ctattgtggaagaagcatccattaagggtgacgaggaaacatttgaaaactattatcgaaaacaaagaaagaaac

SEQ ID NO: 274325 - DNA, 98 bp, Homo sapiens
gcttttgaaccactggaaagtgaggaattttgaagtacaccgtggtgacattgtatcattggtaatcccgcccattgtcagttcctgttaaagccatg

SEQ ID NO: 274326 - DNA, 60 bp, Homo sapiens
agatctcagatggctcggaatgtctggttcttcattacaaccagatgttccaatatttta

SEQ ID NO: 274327 - DNA, 83 bp, Homo sapiens
accctctcgcctcgggtctcgggggccgctctgggatcccggccaccagcaattgtccggctccataaaaatacagactcacc

SEQ ID NO: 274328 - DNA, 74 bp, Homo sapiens
cacgccgaggcccattttccagacgaccacgacgaggccggggtcacttgggccatatggtgctcttcccagtc

SEQ ID NO: 274329 - DNA, 100 bp, Homo sapiens
gttcagctcacgtgattcggcacagctctctgactctggctctgctgatgaggttgatgaatttgaaatccaaggggcttttgaccaactaaaacagaat

SEQ ID NO: 274330 - DNA, 102 bp, Homo sapiens
atcctcaagtagcttaacaggggtttcatcttcccaacccatacaacatcctcagcagcaaggccatcagtgaagagaaagagtgggagaaaaaggtttgag

SEQ ID NO: 274331 - DNA, 98 bp, Homo sapiens
cctgaaggcactggtgtccgtgggcgagatctgccaggactatgacagttgctgaacctgtttgcatgagttgctcctgacggccctttaggatactt

SEQ ID NO: 274332 - DNA, 75 bp, Homo sapiens
gaaagtcctacaacagtttggcgtgcaacatggggcttgagaaaggaatgccagctgatgaagaccgagaggccg

SEQ ID NO: 274333 - DNA, 74 bp, Homo sapiens
caacaccaaacgccgcttttaactggaatacctttcttcaacgctctgagctttttagatgaggaatttcctca

SEQ ID NO: 274334 - DNA, 88 bp, Homo sapiens
tttcctttagtcaggaaggacgttggtgttgagcctcctgacaaggtgatccgggcgggccccgcaggaattttatcccctcaccggc

SEQ ID NO: 274335 - DNA, 100 bp, Homo sapiens
ggccctcaaagaagctgtcattttgccaatcaaattcccacacttgttcacaggtggagttggcatgaacttaacagcagcagatactgtgatttttgtt

SEQ ID NO: 274336 - DNA, 82 bp, Homo sapiens
ccgccgccgctcaccgcagccccctcctggcgacccgcaaggctccacagagagctgcaacaccaccacagaagatgaggac

SEQ ID NO: 274337 - DNA, 83 bp, Homo sapiens
aaacactctccttctgccacatttgttttgagctaaatattgaggattactacaatgcagctagaacgtgaaaaggctcttga

SEQ ID NO: 274338 - DNA, 98 bp, Homo sapiens
cccggcgccggcaaggggacccagtgcgcccgcatcgtcgaggtggctggcatttgagtccagggccttccgcggggagcagtttgttctggagaagg

SEQ ID NO: 274339 - DNA, 82 bp, Homo sapiens
ggctagttaaacaaagaggctggcttaaaggagctgctcctttgaagatactaaatataggaaatgtcagtactccattgat

SEQ ID NO: 274340 - DNA, 90 bp, Homo sapiens
agtgagagcagcggcagccggcggtgcagcagccggccgacccagagtgttgtacatcctggagacctgaagaattctgttgaagtcgca

SEQ ID NO: 274341 - DNA, 80 bp, Homo sapiens
cgagccccttcctgagaagatcccaggttttaaaatcaaagatgggaaaatcggagaaaattgcccttccccatggccag

SEQ ID NO: 274342 - DNA, 82 bp, Homo sapiens
gacggagaggatgtgttcgaggtggagaagatcctggacatgaagaccgaggggacaatgcagatcttcgtgaagactctga

SEQ ID NO: 274343 - DNA, 100 bp, Homo sapiens
ctcaacccagccaacgccgtctatttctgcaacaggtttcgagacaaggagtggatcaggccagataagtatggccatttctctcaggagttctggaatt

SEQ ID NO: 274344 - DNA, 100 bp, Homo sapiens
ctgtggagtatctgcactcacaggggcgccctcacaaagccaatgctgaggagatgaccaagtaccacagcgatgactacattaaattcttgcgctccat

SEQ ID NO: 274345 - DNA, 100 bp, Homo sapiens
cgcttctttaagggctacgggaagatcctggaggtggatctgaagaacgggaaaataccatccactggcaagttggtgctgacactcacaaccgacgcct

SEQ ID NO: 274346 - DNA, 83 bp, Homo sapiens
ccaagctcctggccctggccctgatcatcctgctgggcttcgtccagatcgggaagggtgctttgcaagatatcaccttgtca

SEQ ID NO: 274347 - DNA, 83 bp, Homo sapiens
gacggcaggactgtggccgtgggggacatcgtctggggtgagcgagtgctgtgctttcatgggcctcttctttatgaagcaaa

SEQ ID NO: 274348 - DNA, 75 bp, Homo sapiens
ttcagacccatttccagtcatgagtgtgcaactgaggaacatggctcaagaaactaatcacagccaagtgcctat

SEQ ID NO: 274349 - DNA, 75 bp, Homo sapiens
gtaagatggtcactctccaccgaatggggagttctttggaatttatcctcatgtgatgctgtaaaaatgacaatc

SEQ ID NO: 274350 - DNA, 100 bp, Homo sapiens
gcaggactgcgccgcgtcttcctcaagcttttcgctgtggcctgcagtttttaggcaacattgcctcacggaatgaagattcccagtctattgtttgggt

SEQ ID NO: 274351 - DNA, 96 bp, Homo sapiens
cttcggccttggtcccagcgccttcccacggagcagcactcttcaccctgcacagccttgttagggtcaaagactctaaatggaggatctgatgct

SEQ ID NO: 274352 - DNA, 100 bp, Homo sapiens
gaagttatggcagagttagctaaagaactccctcaagtttcatttgtgaagttgcacaatatccttttgaagaccataacccaccacagctagaacttat

SEQ ID NO: 274353 - DNA, 51 bp, Homo sapiens
gttctctggagtttacatatcggcgtaacctgtctccagagaagattttcc

SEQ ID NO: 274354 - DNA, 100 bp, Homo sapiens
catgacagctctgagcgctggggttacaggtagcagaaggtcaagaaatttgtgtgattgaagccatgaaaatgcagaatagtatgacagctgggaaaac

SEQ ID NO: 274355 - DNA, 100 bp, Homo sapiens
gtctgctggacgcgggagacgccagcgagctggtgattggagccctgcggaggtactccaaagattcaggtttactcacgtcatccagcagagaatggaa

SEQ ID NO: 274356 - DNA, 90 bp, Homo sapiens
tacacttacaacaactagtgcaaccagtaagttgatccatccagatgaggatatatccctgagaagaagagctgtcttgccacagacccg

SEQ ID NO: 274357 - DNA, 100 bp, Homo sapiens
caaaggaatgatcccgctgaaagggagcactctgactagcccttgtcaagactttggcaaaaggatggcaggtgacagcagggacatgtctcgggagatg

SEQ ID NO: 274358 - DNA, 75 bp, Homo sapiens
gaaccagccgggcggcgcggcggctccgcaggaaaatcagttggagtggaaatgaacacccagaatgaactgatg

SEQ ID NO: 274359 - DNA, 99 bp, Homo sapiens
gaaatggccgctgtgtggttgcaacggagataaattcccggaaccgcgattcggcgtgtcagggtggcctcatcgcgctgctgctgctgctgctggtgt

SEQ ID NO: 274360 - DNA, 100 bp, Homo sapiens
gaaattccaagttcagattctccagacatagacgagtgcactgcagggacgcacaactgtagagcagaccaagtgtgcatcaatttacggggatcctttg

SEQ ID NO: 274361 - DNA, 87 bp, Homo sapiens
gaattaggaaaaattatttcagataatttaacatactgcaagtgtttacagaaagttggttatggaggttttgatgactatggtggc

SEQ ID NO: 274362 - DNA, 87 bp, Homo sapiens
ctgctggcccaaagggatccggagcgagctagggcagagagacaagagagacacctccaacttcgacaaagagttcaccagacagcc

SEQ ID NO: 274363 - DNA, 97 bp, Homo sapiens
gtgggctcctgcatgaccgacctggtcagattatggattggatatgtctacttctggatgcaaattttactgttgttgtaatgatgccagaagcaaa

SEQ ID NO: 274364 - DNA, 100 bp, Homo sapiens
tctttctggcctggaggctatccagcagtgaagatagtccaagtcctaagagacagcgcctctctcattcagtctttgattatacatcagcatcaccagc

SEQ ID NO: 274365 - DNA, 100 bp, Homo sapiens
gccttccaagctctactgtgacttcagagacactgccaagcagccttagccctagtgtagagtacctggagtagaacagaaaaattattatgtctgtgtt

SEQ ID NO: 274366 - DNA, 90 bp, Homo sapiens
gggcgctcggtgcccgggccgggcaggctccctggtcggccagagactctcagaccatcctgatgtgaggaaaatcgggttcacaggctc

SEQ ID NO: 274367 - DNA, 100 bp, Homo sapiens
acagaaaacccactcaccaagttactagctattgggaaagaagatgacaatgcacaatggcatgagcatattaatgaaaagtgccataaactgaaaaacc

SEQ ID NO: 274368 - DNA, 74 bp, Homo sapiens
ggaggagatgtactgtgcttggctggaaaaccccaaaagtgtacataagaactatgaatagactgacccagctg

SEQ ID NO: 274369 - DNA, 75 bp, Homo sapiens
acagctgtgtactttgccctcagcatctcccttcatgtctgggtcatgaatatgtgagatccaggctgttgactg

SEQ ID NO: 274370 - DNA, 50 bp, Homo sapiens
cgtggagacggtgctcaacctgcctgattacatcaaccccagagccgtgc

SEQ ID NO: 274371 - DNA, 100 bp, Homo sapiens
ccggagtgagaagcaagaaggccctggacacagcaatatctctgggctttcacaggaaattcataccgaagtgcagcaagattgtcattgactttgattc

SEQ ID NO: 274372 - DNA, 75 bp, Homo sapiens
aaggcccgcccgggagggccggggccgcgctcaggtctatcatttggcaagtgtacgcttacgtgatctatgtct

SEQ ID NO: 274373 - DNA, 74 bp, Homo sapiens
ttaattttagggtcctttatatagaagggagagtagtctggtggaaaggacagaggactaagtccatggactgg

SEQ ID NO: 274374 - DNA, 100 bp, Homo sapiens
cgagccacgcatccaataccagcagcctgtgggatttattattttgaagtaaaaattgtcagtaagggaagagatgggccacggaaaggtatgatatatt

SEQ ID NO: 274375 - DNA, 75 bp, Homo sapiens
cccatcttggctcagtctccacctccaagatcaacttgagatcttcttagcccagagagcagtggagttgagtga

SEQ ID NO: 274376 - DNA, 90 bp, Homo sapiens
ccctgtgcaggcctgctcctccgtttgcaagtgtgttctaggtcagtggcttcaaagactccagttggattcattggactgggcaacatg

SEQ ID NO: 274377 - DNA, 75 bp, Homo sapiens
gaccatgctggcaagtctgaaggtcaagttcgtgctggccgtgggcagcgccgtctttgatgccatgttcaacgg

SEQ ID NO: 274378 - DNA, 98 bp, Homo sapiens
gatgagaggaggcggcagaacattgcttatgaatatctgtgccacttagaggaagccaaaagggcacagtcttttgctgagcgcctgcgcctgggaat

SEQ ID NO: 274379 - DNA, 97 bp, Homo sapiens
ctagaaattccccccgaagaagactcccccacatctgggagtcctatccaaagaagagaaattacactatggaaattgtaccatctgcttctctgga

SEQ ID NO: 274380 - DNA, 90 bp, Homo sapiens
gccgagctctggggcaccagccagctccaggatgtgcggcggccgccagcggcgcggcgcgccagacccggtccgtttggaatgcctggg

SEQ ID NO: 274381 - DNA, 75 bp, Homo sapiens
gcagagcggccggaagcgcggagggagccgcgggatggaccgcagctgccccagagcacatcagctatgtgcccc

SEQ ID NO: 274382 - DNA, 98 bp, Homo sapiens
tttagaacgacggtatgagctgctgaaccgggaattgagggcaatgctagccattgaagaaaatagttgtgcaagaactgatgcgatttttacccctt

SEQ ID NO: 274383 - DNA, 74 bp, Homo sapiens
ctctttgggtggtctcagcttatctacaatcatatcacaaaattccgggatttctttaatcaaaatgaaaccag

SEQ ID NO: 274384 - DNA, 100 bp, Homo sapiens
tgagcggcggcgaacatgcgcttttgacacattggagctgggccacctggaaggaagggttacccctgaccatcgctgcagaccgtaaggatgatctacc

SEQ ID NO: 274385 - DNA, 98 bp, Homo sapiens
gagctggaggccagagaccttgtcatcgaggccctgcggtttcaccagtgatcattaaagaatgggcagcttacaaaggaaagtctcctcaaaccccg

SEQ ID NO: 274386 - DNA, 82 bp, Homo sapiens
gaagaataagcttcgacacctctcagttgtcaccctggctgctaaagtaaagttttgccaaaagctgctttctcatgattat

SEQ ID NO: 274387 - DNA, 50 bp, Homo sapiens
ggaaggttaatgttcttcagaagaagagaatgtaaagctgtacagttatg

SEQ ID NO: 274388 - DNA, 89 bp, Homo sapiens
aagaaaaacggcaacgtgtaatcagaaggcacagattagaggaaggaagaggatgccatagaagtttgcaagaagtttatggagcgcga

SEQ ID NO: 274389 - DNA, 76 bp, Homo sapiens
attggcattgtggggcggacaggatcagcataccataaagtctccaaaggatggcacagtaaagaaagtgttctac

SEQ ID NO: 274390 - DNA, 89 bp, Homo sapiens
tcacgggcggcggcggggccgagcgcggccctgcaggcgatgtcgccgaaaccgggctgcaggcggtacctaggtgctgatatggaaga

SEQ ID NO: 274391 - DNA, 95 bp, Homo sapiens
ggctgaggagttttcaatcccaaggcaaggaactgctccaccgccaatgaaacttcctcctccttataaagctctgactgatgacagtgatgaaa

SEQ ID NO: 274392 - DNA, 74 bp, Homo sapiens
caggtgtgcaccaccacgcccagatgagaactggactgatgaccaactgcttggttttaaaccatgcaatgaaa

SEQ ID NO: 274393 - DNA, 96 bp, Homo sapiens
gagagcagatggctgcagcagctgccagacctattaatgccagcatgaaaccagttctagacctggaaggcctcctaagaggactcaaagtgtcac

SEQ ID NO: 274394 - DNA, 87 bp, Homo sapiens
gaggctggagattccacccaaatcctcttctccaagaaggaagatgagaatgtgcctactgctcctgatcctccaagtcaacattta

SEQ ID NO: 274395 - DNA, 90 bp, Homo sapiens
ccatcttcttcaatcggatcggtggagtgcagcaggacactatcctggccgagggccttcacttcagcagtggacacgcatgtgcacaga

SEQ ID NO: 274396 - DNA, 100 bp, Homo sapiens
tagacatttacgcggatgtcggcgaagagttcaaccagggctgtggcagaaattctcaggagcagcatgccttgaagcactatctgacgccaagatctga

SEQ ID NO: 274397 - DNA, 99 bp, Homo sapiens
catgcaatgagaagactgatcaatctggtgcctatggttcatgcttgaagttttaatgacaaagaatgaaaacaatagccatgcctttatgaagaagat

SEQ ID NO: 274398 - DNA, 50 bp, Homo sapiens
cccagacaccagccccccaccatgctgccaatttgtggtgtctgaagacc

SEQ ID NO: 274399 - DNA, 99 bp, Homo sapiens
tggacccaggagatcccgctggtgaccctgccgctggcgagcgccaccgcatgggccggaaggtggtggtcgtacgctgtgaaggcatcaacatttctg

SEQ ID NO: 274400 - DNA, 100 bp, Homo sapiens
gacaagcccatgttgccagcgcattatcaccaagtcacttggcaagcgtttagcagaaatgctttgaacatagtgaagaatgatttgatagcaaaagtgg

SEQ ID NO: 274401 - DNA, 87 bp, Homo sapiens
caaaatgccttgatgttcctgacccttttgtgcctgaccctactgggtccatgagctgattccagctgtgatgacctgcatcgtgag

SEQ ID NO: 274402 - DNA, 80 bp, Homo sapiens
gcttgtccttgctggtgcatgcgtcgtcggcctctgggcagcagatggagtcccctgtttccacaccagcagtgctgcca

SEQ ID NO: 274403 - DNA, 83 bp, Homo sapiens
cagggagggagtccgcagcctgaggatcatgaattttctaaaactgaggaactaaaactagaagatgtggatgaggaaattaa

SEQ ID NO: 274404 - DNA, 100 bp, Homo sapiens
cggctactgtcaaggcctaaacaggcatctccttggaaacaatgccatctttgaatgtgagagataaacctagtttcagcatgtctgcagcagagaccag

SEQ ID NO: 274405 - DNA, 124 bp, Homo sapiens
gtgcccagcaagagattaaagatgcagtacgccacggggccgctgctcaagttccagatttgtatgccaccacgggctgttccctgaccctgcaccatacggagaaaccagaacatgaagacat

SEQ ID NO: 274406 - DNA, 75 bp, Homo sapiens
ctttgagtgcatctgccccgagcagtgggtgggggccacctgccagctggctccagcctcagacgacgagggcag

SEQ ID NO: 274407 - DNA, 75 bp, Homo sapiens
gggacttcactgtgaatatgcggctgctgcaggatggggaatttagcatggatcttcgtaccaagagcaccggtg

SEQ ID NO: 274408 - DNA, 50 bp, Homo sapiens
ggacgaactgcacgtgtacaacacggatggggctggcgagggcctggcac

SEQ ID NO: 274409 - DNA, 73 bp, Homo sapiens
cgggttggggatggcgtgcagcgcaaccacgagacggccttccaaggtgttctgggaagatggcatcatgtct

SEQ ID NO: 274410 - DNA, 100 bp, Homo sapiens
agaatatctgaagttttttgattttacaggaatgacgctggatcagtcactcaggctttccttaaagtttcccatgtctcaatggactcctgaatataac

SEQ ID NO: 274411 - DNA, 100 bp, Homo sapiens
gaaggtgaacatttgtagcattgatttcccggatctggtaacatggcaaaagatgtttggacatatttgactcttttccccccaggttgaattgaccaaa

SEQ ID NO: 274412 - DNA, 105 bp, Homo sapiens
ccgagatgctgggagctggtggctagctgtgcctggagctgggagattcatcaagtactttgttaaagggcgccaggctgtccttggcatggtccggaaggcaaa

SEQ ID NO: 274413 - DNA, 74 bp, Homo sapiens
gtttcatctctctataaagttatccaggagccacaaagtgagtgacctgaaaaaaatgtctggatttctagagg

SEQ ID NO: 274414 - DNA, 88 bp, Homo sapiens
gttattaaatggcctagcccagcaaatgatcagccttgcaaataatcacagattagctgaaacatgatgaaagtattgagggggcatc

SEQ ID NO: 274415 - DNA, 83 bp, Homo sapiens
cagcattggacacagctgcacgttcattttgaaagcgaagcagaagccgtagaatcagcggcgagcctgttgaaagaacccac

SEQ ID NO: 274416 - DNA, 51 bp, Homo sapiens
ggaagcggagcgccgctgggggccgggcgctggcgcagcgggaagatatgg

SEQ ID NO: 274417 - DNA, 82 bp, Homo sapiens
cgcgtgtctaggtgagtcgcggtgggtcctcgcttgcagttcagcgaccacgtctgatcatcggatatcatggagtctggca

SEQ ID NO: 274418 - DNA, 90 bp, Homo sapiens
aaagaaccttcagtacaagaggctacttctactaggagtctactcttcatcttgtgttgagacttcgtggtggtgctaagaaaaggaaga

SEQ ID NO: 274419 - DNA, 100 bp, Homo sapiens
agactctagaagaaatgccctccgggtcacaggataagaaatctcctgcaaagaagctgagccatgcaattagtaaatctttggggtgtgtacccacgag

SEQ ID NO: 274420 - DNA, 82 bp, Homo sapiens
ttctgccggctgtaaagtcatcacctcctgggatcagatgtgcattgagctatgtttccagtgtcctctgggtgtttccaag

SEQ ID NO: 274421 - DNA, 75 bp, Homo sapiens
tgtgtggattcttcagaaagtgaacttggcattttagatctaattcaaatttgaaaaatgtgtgagtgctaagga

SEQ ID NO: 274422 - DNA, 100 bp, Homo sapiens
atctgtacccattattggtggtttttgggagactatctttggcaacagagtcctcattgaaaagatgatgagaaattccacagaagatatcatgtctttg

SEQ ID NO: 274423 - DNA, 75 bp, Homo sapiens
gcagaagctccagagcccagacttgcaggaagatgatccctatgatcttgaagatgtttctgcacagaaatgagg

SEQ ID NO: 274424 - DNA, 106 bp, Homo sapiens
gctgggacttcccgtccgcggcgtggaggaaaatgatgcatcctgttgccagcagtaatccagctttctgtgggcctggcaagccttcctgcctcaatgaagatgc

SEQ ID NO: 274425 - DNA, 100 bp, Homo sapiens
attttcattgtccaagcaccctcagaccagaagggaaagatttcagcattcatcgacttgtcctggggacacacacatcggatgaacaaaaccatcttgt

SEQ ID NO: 274426 - DNA, 100 bp, Homo sapiens
acagctttaggaaacacctctacctcctgcgaggcctcccgggctccgggaaaactacactggccagggaacccgagcgtcatgttagggtgaagcagag

SEQ ID NO: 274427 - DNA, 88 bp, Homo sapiens
gcagtttgaatcggtgctgaacagaacatgaatttgctttcggatgctcgctctgccagaatgtaccgagatgaattagatgcacttc

SEQ ID NO: 274428 - DNA, 100 bp, Homo sapiens
ctttgttaatgtgactaccagaatttggaacgggactttcgcatcaggtctcctatggacagaagtgcgggcaaggagctttgttcctccccgatgtcac

SEQ ID NO: 274429 - DNA, 122 bp, Homo sapiens
aaggatcgatattttgtcgaagaaactgtggaagtcattaggaacaatggtgcaagataaatactgcaacaactgtagctgacttaaagtcaataataaatgaatgctataactaccttgag

SEQ ID NO: 274430 - DNA, 100 bp, Homo sapiens
ccgcgtccaggaccttgtgaggcagcctgatgtgtgagaagcggatattggcggcagtgaccagtgcgggacaccccttcctggtgaacctcttcggctg

SEQ ID NO: 274431 - DNA, 75 bp, Homo sapiens
gggagaggctgctgtggaggctgaggaggcggcggcggagatctgggctccatctatgagatctctgggaatgag

SEQ ID NO: 274432 - DNA, 100 bp, Homo sapiens
acagcttaacaattgaacccttgaatcagaaaggcaagtgcacactggtttttggctgttgtttgtttccccggtttggaaaaaccaaagtatgaaccta

SEQ ID NO: 274433 - DNA, 98 bp, Homo sapiens
gtctcccttggagacggaatcctaccttgcctctctaaaggaaaatatgtgaagctttgttctaagaatatttgtttcatctagtttatgagtccaaa

SEQ ID NO: 274434 - DNA, 101 bp, Homo sapiens
aaaatctctccccaggcttcaacttcaggttgtgcccacgtgcctcagggccttggtagaaatggcccgggtagggggtgcctcctccctggagaatactg

SEQ ID NO: 274435 - DNA, 75 bp, Homo sapiens
ggcgttcgcaccggaaaatgtagcttcccggttaaggtgctaaaatgatgtattttctggacaagtcaaggcagg

SEQ ID NO: 274436 - DNA, 100 bp, Homo sapiens
tttgctgtggaattttttccatcacagtgagcggtttctggtaagactgaacaagaatggtgggccgaggaacccagagaagatagaacgaatgtgtgcc

SEQ ID NO: 274437 - DNA, 82 bp, Homo sapiens
ctagaattggaaaaccttacagtgtcgtgaaaactacccctaaaagccaaaatgggaaaggaaaagactcatatcaacattg

SEQ ID NO: 274438 - DNA, 83 bp, Homo sapiens
gctggctggatctctggtgagacatttttcttccttctgtcacatcacacccaatgatggcagaagattttcaagtcccggct

SEQ ID NO: 274439 - DNA, 100 bp, Homo sapiens
ttaactcatgtctctctctcttttctttcagtctgcaactgtgtctgatggcgacatcccagttaccagtgtccttgaattgatagtggcttctgtttgt

SEQ ID NO: 274440 - DNA, 90 bp, Homo sapiens
caccaatcagatgtctgtctgccggatcctggtgtatagcctggaagcaggacgccgcctcttgaagctgggtaacgttctccgtgactt

SEQ ID NO: 274441 - DNA, 75 bp, Homo sapiens
gccggcagctgtggccaacagcaacagagagagtccagttatctccagaagaagaagagaaaaggagaatccgaa

SEQ ID NO: 274442 - DNA, 100 bp, Homo sapiens
tggatgttcttcttcgagtatttgtagaagggtgtgggcacaggcagttcctcactgtggaatctgatgggcaatgccatggtgatgacccagtatatcc

SEQ ID NO: 274443 - DNA, 99 bp, Homo sapiens
ctctgctcttccaacaccagtggaagatgatcacatcccagtttgttgcatattctaaggacccagacataggcttggtggcccgtctcttgtctttcc

SEQ ID NO: 274444 - DNA, 82 bp, Homo sapiens
atgagcaaacctctcggattgggtgtcaaggctgtagcaaggtgctgctgaggccacggacgtcggaggaggtgtcccacat

SEQ ID NO: 274445 - DNA, 89 bp, Homo sapiens
ctgccccgcccggaggtgaaagcgggtgtgaggagcgcggcgcggcagccgtcaggttctgaacagctggtagatgggctggcttactg

SEQ ID NO: 274446 - DNA, 99 bp, Homo sapiens
accgtagaagaccttggctccaagatactcctcacctgctccttgaatgacagcgccacagaggtgaagcccaacactcctgtcttaatgtgctctgtg

SEQ ID NO: 274447 - DNA, 75 bp, Homo sapiens
tgggacacccgggagtcaggaaatggtttcaagtgccccatttgctccaagtctgtggcttctgacgagatggaa

SEQ ID NO: 274448 - DNA, 74 bp, Homo sapiens
tgaccctgcccttgccagaatttcctgcgctgttccacctcattcaacttcagaacatccagtcatggataaaa

SEQ ID NO: 274449 - DNA, 82 bp, Homo sapiens
caccggagtcatctcttgtaccgtgtgcctagaggaattccagacgcccataacgtatgtggcccggccagataagatttca

SEQ ID NO: 274450 - DNA, 51 bp, Homo sapiens
ccagcacttcatccagcagtgcacaggctttccttaaagtttcccatgtct

SEQ ID NO: 274451 - DNA, 75 bp, Homo sapiens
cgctgtcctaaatgtggcgacttgtgcacacatgtagagacctttgtatccatgtctggtgagaacagagaaaat

SEQ ID NO: 274452 - DNA, 100 bp, Homo sapiens
tgaagtattaattcttccactgatatctcaaaaggtgatctggacaaaggaacaggtatctcagaattaaacaaccaccatgtcgagcaaaaaggcaaag

SEQ ID NO: 274453 - DNA, 104 bp, Homo sapiens
ggaacgaggacgcggactgcgaaggcaggaactgtggctgcaccatctgtcttcatcttcccgccatctgatgagcagttgaaatctggaactgcctctgttgt

SEQ ID NO: 274454 - DNA, 88 bp, Homo sapiens
aaaggcctgtgtgctgcagaacccccagaccatcatgctgaggccgcggaaggagcagggcacatacgccctgtccctcatctatggg

SEQ ID NO: 274455 - DNA, 100 bp, Homo sapiens
gaggcccttgtcccctggagagagcggcgcctgggacattcctggagattggccttaagagaaggacggagccacatactgctgacggcccagaactggc

SEQ ID NO: 274456 - DNA, 83 bp, Homo sapiens
ccagccactcggagctaatccacaatctccgcagaaggaccattacgacctgttcttgaatacattgatctggtcagcagtga

SEQ ID NO: 274457 - DNA, 83 bp, Homo sapiens
ctgagcatttcctcctgacggctgtacttgagcagtcacctggcacaggtcagcccaaggccaaccccactgtcactctgttc

SEQ ID NO: 274458 - DNA, 100 bp, Homo sapiens
cgcaggcctcgtgccgttacggccatcacggcggccgcagtggcgtcctggagccctcctcagaatgagaagactttgggacatttcatgagtcattcaa

SEQ ID NO: 274459 - DNA, 83 bp, Homo sapiens
ccggactctgggtgttttgctaccgtgaccgtttaggttttaaaatcaaagatgggaaaatcggagaaaattgcccttcccca

SEQ ID NO: 274460 - DNA, 100 bp, Homo sapiens
cgtcatggaggagatccggcggcagggcaagctgtgcgacgtgaccctcaaggagtggagtcaacatatcaatggagcaagtcacagtcgtcgatgccag

SEQ ID NO: 274461 - DNA, 100 bp, Homo sapiens
aattatttcgagagtcaaaatgtggatttccgaggcaagaagacaccatgccacaaggagagtgatctcttcccctgttttcacaatggaggactccgga

SEQ ID NO: 274462 - DNA, 87 bp, Homo sapiens
gacactgctgccgctgctaaacatggcctacaagttccgcacccacagccctggattttttatcaagcagaaatgcatcgaacaacg

SEQ ID NO: 274463 - DNA, 98 bp, Homo sapiens
aatacagaatccgtgtctgggagaaacctcgtggcctggtctccattatttgagatgagttacatcttggagggactttgaacatgtcggggatcgcc

SEQ ID NO: 274464 - DNA, 75 bp, Homo sapiens
gttctcctggcacccggtgcttatgtctttggctgtgatcatggagctcagcttggtctccatggggctggtggt

SEQ ID NO: 274465 - DNA, 87 bp, Homo sapiens
gagcggcggctccggggcagctccggcgggcggtatgatctcgtgaaatcttgagagaaactgaatgacgaatgaaactattgttcc

SEQ ID NO: 274466 - DNA, 89 bp, Homo sapiens
gccgaagccgagcagaggatctaaatacaagagtggcctattgatgctcccataatactctcagatagtgaagaagaagaaatgatcat

SEQ ID NO: 274467 - DNA, 74 bp, Homo sapiens
cagccctgtgtgacaccaagataagtaacgtgctgctgctgcctccactgtactcagacccaggtagcacagga

SEQ ID NO: 274468 - DNA, 75 bp, Homo sapiens
tgatattgcaccttcacagcaacaagcacttttccagccattaactccaggctctcgagaatttgaagatgttgt

SEQ ID NO: 274469 - DNA, 83 bp, Homo sapiens
ggagggggcagcggctgtctcacggaccacggcggcgcccgcagctcctcaccgacaatgcagatcttcgtgaagactctgac

SEQ ID NO: 274470 - DNA, 100 bp, Homo sapiens
aggcaccgggatcgtgaccgagaccgtgaccgagagcgtgaccgagagcgcgaatatcgtcatcgttagaagaatctgatgacctccgaggggaccctgc

SEQ ID NO: 274471 - DNA, 75 bp, Homo sapiens
cacctacagccgcaggctcacggggcttagtgaggtttccatccttggggaatgaccacgcaactgggcccagcc

SEQ ID NO: 274472 - DNA, 89 bp, Homo sapiens
agtaccgcggcgggcgcgagcgaggcgccctagacatcttctccctcccttgcctcaggttaatggaaaaggttccttatggtgtgttg

SEQ ID NO: 274473 - DNA, 75 bp, Homo sapiens
cgaggaggaggacagcgagcgcagcagtgacggcgaggaggccgagaatctgtgtttgtggatatcctcgacaac

SEQ ID NO: 274474 - DNA, 97 bp, Homo sapiens
atcgcactttataccacctgcgattactaactgataaatttcaaacggaagagagtggcagcatttagaaagaatctaattgaaatgtctgaactgg

SEQ ID NO: 274475 - DNA, 87 bp, Homo sapiens
taccgcaggggccgtgacaagccccccctcgttgagctgggacacctagctcccctgtttgacaaccctaagttggataaggagctg

SEQ ID NO: 274476 - DNA, 75 bp, Homo sapiens
cagcatattacctatcaggagaggaggcacaggttcaatatcaacagcagcatgaacaacagaaaaaagatttag

SEQ ID NO: 274477 - DNA, 50 bp, Homo sapiens
attaaatgccgagaaggccagtacgggatagctgggagtatggccaccct

SEQ ID NO: 274478 - DNA, 83 bp, Homo sapiens
cacgagaccggctacttctcggcgctgccgtctctggaggagtactggcaacaggatttttagactctgaggagcagttggag

SEQ ID NO: 274479 - DNA, 83 bp, Homo sapiens
cactgaaatgcgggaggctccttaactcttgtataaacagtttttcagttatgggacaaaaatattatatcaaaacactgaag

SEQ ID NO: 274480 - DNA, 101 bp, Homo sapiens
ctgggcggtgcaagtgctgggcggcccggccgaggcggaccgcgtggcggcggcgcacgggtacctcaacttgggccagttactccacaggatccgctgaa

SEQ ID NO: 274481 - DNA, 100 bp, Homo sapiens
agaccttcatcaacaacctcaagaagcgctttgaccacagtgaaatatactttaacggatgaagagtcccggaaaaattgggaagaatttggaaatccag

SEQ ID NO: 274482 - DNA, 100 bp, Homo sapiens
ccccaggtcagcaaggtgaagtccgtccgcctggacgcctgggaggaggcccaagtggagtttttggctttcacccccaaccagtgaccaaagacttgac

SEQ ID NO: 274483 - DNA, 100 bp, Homo sapiens
cgtccccagccctgcctctccctgggctctgcatggaagctccacaaagcagcagcctggtcaccttttctcttccaagtgcccagaacagcccctggat

SEQ ID NO: 274484 - DNA, 98 bp, Homo sapiens
ctgtgaaccgaggacgggcgtctgccggtgccgccccaacacccagggccccacctgcagcgagtatgtcggggagctgatctctgatgctgaggctg

SEQ ID NO: 274485 - DNA, 98 bp, Homo sapiens
gtgaagcaactgaagaaaatgtttgaagcaacaagattgcttgcaacaattgttatgcttggaatgactctactaatgatggggtcagcagatgctct

SEQ ID NO: 274486 - DNA, 100 bp, Homo sapiens
ctgtcgtgaagaagcaggaggctaagaaagtggtgaatcccctgtttgagaaaaggcctaagaattttggcattggccagaagcggactcctagaagagg

SEQ ID NO: 274487 - DNA, 74 bp, Homo sapiens
gcgagtgcatgatccgccacgggaaggagctgggcggcgagtccaactttggatttgagcctccttgattttaa

SEQ ID NO: 274488 - DNA, 101 bp, Homo sapiens
tgtatggaagaagtcaccaaaatgcatctgccattattaagactgccccatcaaaggtcaagctggttttcatcagcccaaagagtcgattgatccaatta

SEQ ID NO: 274489 - DNA, 75 bp, Homo sapiens
gccttagaggagccatttttccaggttagagcagccagcgggtacagaatggattttggaagagggagtcaccac

SEQ ID NO: 274490 - DNA, 83 bp, Homo sapiens
gtcggcaccagctgcggggcaagatggaggcgctgattttggggtcttgctcctcagaacaaaccagaattgcagaaggtgat

SEQ ID NO: 274491 - DNA, 75 bp, Homo sapiens
ggtcccccctcatttgctgtcgtaggaaccggctttacagttgatgcctttcagtatggcgtggttgaaggttgc

SEQ ID NO: 274492 - DNA, 75 bp, Homo sapiens
taggtgtatcaagtaatggtgcaaagcctgaaacctgcaggacatgtcgctgatgaccctgagcacgaagacccc

SEQ ID NO: 274493 - DNA, 82 bp, Homo sapiens
gccgacatcaattacgccaatgtggacggactcactgccctgcaccagaaaactttagaaactgttcctttggagaggaaaa

SEQ ID NO: 274494 - DNA, 50 bp, Homo sapiens
caattcaactttcagaatgcagagtgacatatatggaggaagagcgaaat

SEQ ID NO: 274495 - DNA, 74 bp, Homo sapiens
tcagaatgctttcaaggagtttttgggcacatgatggcagccgggaagatttccagaggattccagaacttgcc

SEQ ID NO: 274496 - DNA, 87 bp, Homo sapiens
agtaccgcatcgcccagctgtacatgatacagatgttctcaaatagtgatgaagctgtaatcaataaaaaacttcccaaagaactcc

SEQ ID NO: 274497 - DNA, 82 bp, Homo sapiens
ctgcaaattccaaagctgttggaataaataaaaatgactacttgcagtacttgctggaggaaagcaggaatgttcagaggca

SEQ ID NO: 274498 - DNA, 82 bp, Homo sapiens
gcagagatcagcaatccttggctcactgaggaggtttgctgtctgtgatcctggaaacatacgtgtgactgaagctcccaaa

SEQ ID NO: 274499 - DNA, 96 bp, Homo sapiens
agggcttagagtacgcagtgacaattgaggacctgcagtctccctttcctggtgatgatgaagaggaagtttttgacagtattgtaaatgatgaag

SEQ ID NO: 274500 - DNA, 88 bp, Homo sapiens
gaggctcgcgagcctccttcgccgcgccccacttgctcgtgcactttacacacatgagttggaatcaactggactcggccttagtagt

SEQ ID NO: 274501 - DNA, 98 bp, Homo sapiens
aacaggacactcctgctctgcctccgaagaaacctgctcctccacggcctaaaccgcccagcggcaaaacaacgagtggatgagaaacccagcctggg

SEQ ID NO: 274502 - DNA, 89 bp, Homo sapiens
gaacttctccgacatgacatggcagccgctggcttcactgaagcacttacctttgccctgattatggattggatatgtctacttctgga

SEQ ID NO: 274503 - DNA, 97 bp, Homo sapiens
tcactgcagaggtgctggagctggcagatgtgagaagggtgttatgtctctagtgaatgtcaggaactgtattcgcttctaccagacggcagaggag

SEQ ID NO: 274504 - DNA, 50 bp, Homo sapiens
agaatatagagatgacccttttcatcagcgccctctttggattgatatac

SEQ ID NO: 274505 - DNA, 97 bp, Homo sapiens
tgtgatgatggagaactacagcaacttactctcactggatattttagggcaagtgtggtggctcatgcctgtaatcccaatactttgagaggccgag

SEQ ID NO: 274506 - DNA, 101 bp, Homo sapiens
cgctacagaagtactttgatgcctgtgctgatgctgtctctaaggatgaacttcaaagggataaagatgatccaatttctccctacacgggctggttgctg

SEQ ID NO: 274507 - DNA, 75 bp, Homo sapiens
atcctaatgaggacattgtggagagaaacatccgaattatgaagcagtcaattatagatttcttcaaaccagctt

SEQ ID NO: 274508 - DNA, 96 bp, Homo sapiens
aagagcagcctcacatggtgtgggccgacatcaagagctgcgagatccaacaggctgaactccagtgcacccagttagacttggagcggaaactca

SEQ ID NO: 274509 - DNA, 74 bp, Homo sapiens
tttgtcaaagagaactggaataagcttgtacagaaattggaaccaaccagatggctgtgtgtgccaaagcacag

SEQ ID NO: 274510 - DNA, 100 bp, Homo sapiens
cagtcaataggaagtacgagtagaccatggcgagcccagggaaagacaattatcgaatgaagagctataagaacaatgctctaaaccctgaagaaatgag

SEQ ID NO: 274511 - DNA, 128 bp, Homo sapiens
gccgcagctggcgcagcccacgctcatgatcgacttcctcacccgcgcctgcgacctcggggccttcctgctgtgctggacgcccttcttcgtggtgcacatcacgcaggcgctgtgtcctgcctgct

SEQ ID NO: 274512 - DNA, 95 bp, Homo sapiens
cacggggtggctcttccgcatggtcttggtgaaaggcagcctgggaatgaacattgttagttctatcttggccttcattggagtgattctgctgc

SEQ ID NO: 274513 - DNA, 101 bp, Homo sapiens
acaagtttagggagtccatggccagaaaacttttgggtatgactatgaatatgatgaaaatggtgacagagtcgttttaggaaaaggcacttatgggatag

SEQ ID NO: 274514 - DNA, 100 bp, Homo sapiens
gctggctgcaaaagggctaagggatccatggggccgtgccggtggtggtgtgcacattgagccccggtatagacagttcccccagctgaccagatcccag

SEQ ID NO: 274515 - DNA, 76 bp, Homo sapiens
tttagtgctttttatttttccccaattcagcagagaatattttcaaggggggaggctactcacagtcgaactacaa

SEQ ID NO: 274516 - DNA, 50 bp, Homo sapiens
ccggaatgcctgaaccaactgttttgagccgtgccatctccaccccgagg

SEQ ID NO: 274517 - DNA, 75 bp, Homo sapiens
ttcagagttctttgtggatggacttgattctgatgagaggatcatccagcagctcgtcaacggcatcatcacgcc

SEQ ID NO: 274518 - DNA, 88 bp, Homo sapiens
gcgatctcaacagaaggtggtcatcaccaagatattttatgacctggtcagacagataaataggaaaacaccagtggaaaagaagaag

SEQ ID NO: 274519 - DNA, 51 bp, Homo sapiens
cctgaaggtcccggtgctcacttggacatgtgggaaagaagcctaaggaat

SEQ ID NO: 274520 - DNA, 98 bp, Homo sapiens
ggcggcggtgtgggcgcgtcaggccgcgacgagggcgctgaggtgaaaggtgtagcagtcactcggcctacacccacagcatcgaccttgtgaaccca

SEQ ID NO: 274521 - DNA, 80 bp, Homo sapiens
cgccgcggctccggccctggccccgatggctctgtgcaacggagactccaaggttccctctcccagcctgtgctgactca

SEQ ID NO: 274522 - DNA, 82 bp, Homo sapiens
gggaagagccggggccgtggctgacatggagcagatccagagacaatggccccgatgggatggagcccgaaggcgtcatcga

SEQ ID NO: 274523 - DNA, 100 bp, Homo sapiens
cggccgaggaggcagcgcgacctccgcacgaccactaaggcttttcttcctacgatgctggagattaatcatggtcatattgtgacagttgcaagttcct

SEQ ID NO: 274524 - DNA, 75 bp, Homo sapiens
gagcctcagttggaagcagccgatccagcctgcggagcctgtggggcagctgtccgtacctggcggtgaaaatca

SEQ ID NO: 274525 - DNA, 50 bp, Homo sapiens
caccactgggcaaagaaagtatccctttagccctaatttgtttagaactg

SEQ ID NO: 274526 - DNA, 99 bp, Homo sapiens
ctagaagacggtcacgaagtaggagtcgcaggagcagccgcagtagatctcgaagtatctcaaaaagtcgctcccggtgtgatcccagcagcccctaca

SEQ ID NO: 274527 - DNA, 122 bp, Homo sapiens
cccagcagcgcctagatggctttggtcacggtccagcggtcacctacccccagcaccacctccagcccctgcgcctcgcttgaaatggcgattgaaaacctccaaaaaagcgaaggaatcac

SEQ ID NO: 274528 - DNA, 96 bp, Homo sapiens
aggatattcctcatgacattgctgtctgatttattgctaaacatgggtgcatttttggataaacccaaaactgaaaaacataatgctcatggtgct

SEQ ID NO: 274529 - DNA, 87 bp, Homo sapiens
ggaagcgatgaaagagatgtctgcgagcctgtggtgctgaccgacacaaatcttgtgtatcctgccctgaaatgggaccttgaatac

SEQ ID NO: 274530 - DNA, 83 bp, Homo sapiens
gtactgctgctgcacctgctgcaacttgggccccttttcagcaattctgtggtgttcttggtcacacatttatggagtttctg

SEQ ID NO: 274531 - DNA, 100 bp, Homo sapiens
gtattctcccgctttcaaatgaatgtctacttttgatagaagccacagatgaagatatccttgctaaaggaaaacagtccatcaggagtcaggctttagg

SEQ ID NO: 274532 - DNA, 100 bp, Homo sapiens
gtgcaatgttcaccagtcagtgtttgaaggagaagagagcaagggctggttgatatgtgaagagccaacctgtcgcaatcgaactcgtcaccttcccctt

SEQ ID NO: 274533 - DNA, 90 bp, Homo sapiens
cgggggaactatgatgctgccaaaaggggacctgggggtgcctgggctgcagaagtgatcaggacacagagtctgggatctaataattca

SEQ ID NO: 274534 - DNA, 100 bp, Homo sapiens
gctcgcacttgctcaacaagggcctgccgcttggtctcggcgcggaagatggccggcggcgtggacggccccatcgggatcccgttccccgaccacagca

SEQ ID NO: 274535 - DNA, 97 bp, Homo sapiens
tccagatctctttgccaaattggcattgaattttgctactcagataaaaggcactgcgggtgatggggaagatgatgcgagagtgttggtatgccaa

SEQ ID NO: 274536 - DNA, 82 bp, Homo sapiens
aagaagcacctggatgagacatttgctacagcatcccacattaagtcaacggaattgaatgatctggcacgggaccctccag

SEQ ID NO: 274537 - DNA, 83 bp, Homo sapiens
ggcggctatggcggcggaggaggaggaggtggactctgccgacaccggagagagttcaaatctgaacatcaatgatgtactag

SEQ ID NO: 274538 - DNA, 75 bp, Homo sapiens
ccttggtctcctgtggaatgatggaagccttattgaaggctcgtggtcccaagaagcatctgaagcgggtggcag

SEQ ID NO: 274539 - DNA, 105 bp, Homo sapiens
cgggactctggggaaaatggctgcgtcttcgagtggttctgggaagttctggattgtttaataaccatggactccaagtacagcagcaacagcaaaggaatctct

SEQ ID NO: 274540 - DNA, 74 bp, Homo sapiens
aggaactgaccctgctctctcctttccctgttagacatggcttgcacagaaatctggaggcagtatcacctaac

SEQ ID NO: 274541 - DNA, 50 bp, Homo sapiens
tgacgagcggccgaagcagctttgcgaaggaagaggcccagcagaaggga

SEQ ID NO: 274542 - DNA, 100 bp, Homo sapiens
ggtcttgtagcagcgcctcctcgttcacagaaggctccttattggatgggctgtactggaagatgcagcccagcaaccagactgaagctgacaaccgaag

SEQ ID NO: 274543 - DNA, 97 bp, Homo sapiens
ccgggctcatgcttgttaccggctccatcaacacgctctcggcaaagttgtgaccgagattcccgacgagagagactgaggggaagagaggaaggag

SEQ ID NO: 274544 - DNA, 87 bp, Homo sapiens
ctaacctcgaccacatcaagaagctcagcactgatgtggacttgattgtggaagtgctaagatttccgccatggagtcatagttgca

SEQ ID NO: 274545 - DNA, 75 bp, Homo sapiens
cgaactaaacaaattcatcccagaaatctaagaggcatgttatttgaaagcaattgagacgcaaccgaactttgc

SEQ ID NO: 274546 - DNA, 99 bp, Homo sapiens
agaaaatcgacttggactcagatggctttctcactgaaaatattgatgatgttaagaagttcaaaccgggttacctggaagctactcttaattggttta

SEQ ID NO: 274547 - DNA, 77 bp, Homo sapiens
tttgcatacaagaatgtgaaatttgttctcaagcacaactggttcgatgcccagaactgaatgctgtgctccagctg

SEQ ID NO: 274548 - DNA, 115 bp, Homo sapiens
attgtcgtctggaacatggacgtggagaggcaggagacttcacagagaatgcagttgtcttgacttcaggtctgtctgttctgttggcaagtaaatgcagtactgttctgatccc

SEQ ID NO: 274549 - DNA, 82 bp, Homo sapiens
cagcttcccacagcaggttggacagttcacaggaccaagaatcgccttcagccctgtctggtgcatccttggcagaaagtga

SEQ ID NO: 274550 - DNA, 83 bp, Homo sapiens
cactgccgcagccaggagatggttcgggcctagcggagccgggactggagaccatagtcttgagtttacttatgaggtcaatt

SEQ ID NO: 274551 - DNA, 90 bp, Homo sapiens
ccccgggccccccagcatgaagaccccggcggacacaggaacttgctactaccagcaccatgccctaccaatatccagcactgaccccgg

SEQ ID NO: 274552 - DNA, 100 bp, Homo sapiens
gttcccccagactgccctccacttgtgcagaagggtgaatgccatgtcaactttgttcggaaggggaaggtgtggctcattgactttaatccatttggtg

SEQ ID NO: 274553 - DNA, 106 bp, Homo sapiens
ggaatcctggccctgtcccacaccatcaggatacttttgtggaactctatgggaacaatgcagcagccgagagccgaaagggccaggaacgcttcaaccgctggtt

SEQ ID NO: 274554 - DNA, 97 bp, Homo sapiens
gctaccggactacatgtcggaggagaagctgcaggagaaagctaacaggcctcacctcttccattccggagatgatccttggacatcttttcagcca

SEQ ID NO: 274555 - DNA, 115 bp, Homo sapiens
tttgacctggacctcggctacagactgctggctgtgtgtgctgcaaaccgagacaagttcaccccgaagtctgccgaaaacgggagcagccagaccctagcacaaagaagcaaca

SEQ ID NO: 274556 - DNA, 90 bp, Homo sapiens
gccgccgagccggacgtgtccgcgaagatggcgggccgggtatctccatacagccaagaataaagaaagaaagggatagatggaatgagt

SEQ ID NO: 274557 - DNA, 82 bp, Homo sapiens
cttgtggccctgggctttaccatctttgtggctgtgcttgccaggcctggctccaacgccctcctgcaaaacggcccaacta

SEQ ID NO: 274558 - DNA, 50 bp, Homo sapiens
gctcttgcttttcctcgctggggtgtacgtcctcacacaggtattcagga

SEQ ID NO: 274559 - DNA, 87 bp, Homo sapiens
cgaattagtctggctgagatgcttgaagaccttcatatttcccaagatgccactggtgaagaagagttttccgtctgatgaaggttg

SEQ ID NO: 274560 - DNA, 80 bp, Homo sapiens
aaaatgcaaaaaaggaggccaaagactttgatgttatcggcttcaatatggctggtcttgattatctcaagagggaatgc

SEQ ID NO: 274561 - DNA, 122 bp, Homo sapiens
cggggagagacgagccccgagcccggctggacgccgctgcctcaggtgccttatgcccgctcagaggcccacctcacagagctgctggaggagatatgtgaccggatgaaggagtatgggga

SEQ ID NO: 274562 - DNA, 96 bp, Homo sapiens
cggcgattatggacccggccgaggcggtgctgcaagagaaggcactcaagtttatgaatacaccagtggggacgcccatcttcatcgtgaatgcca

SEQ ID NO: 274563 - DNA, 75 bp, Homo sapiens
agattatccacgtgtgtaaggctgatcaagggaatgaaggaccgcctggagttctggtgcacggatgtgaagagc

SEQ ID NO: 274564 - DNA, 100 bp, Homo sapiens
atccttcgaaggaagcctgtggagaaccacaccttcatcaagcggtccgaggtggaagaagtggattttgccggctggttgtgtaaaaccctgcggctga

SEQ ID NO: 274565 - DNA, 101 bp, Homo sapiens
cagctatatttgcccatgttattcaaggatttttgccgtcctctcggccatcctgtacctgggcaacgtcacttataagaagagagctacaggccgagagg

SEQ ID NO: 274566 - DNA, 87 bp, Homo sapiens
cgcctcttctaccggggcaagcagcggggatctgatgagcttctttcttctggcatcattaacggaccttttaccatgaatagttct

SEQ ID NO: 274567 - DNA, 100 bp, Homo sapiens
ggagaattatccaacaagaaaaagacctgtggctattaagatagcgatgaagaacgatacagatacagggaatatgcagaaagaggttatgagcgtcaca

SEQ ID NO: 274568 - DNA, 50 bp, Homo sapiens
cggattgccagagaattggcagaagacggggtttcaccatctgctgggac

SEQ ID NO: 274569 - DNA, 96 bp, Homo sapiens
acaagatccaatcccttgtccttaaaaggtgtcatggagaaactccagctgggcccagagattctgcagcgggaaaatccaaggcttatttatgcc

SEQ ID NO: 274570 - DNA, 100 bp, Homo sapiens
ctcagcccttgcctgggagaacagttcaggagacagatggccccaagagcccagatccaggatgagtctgctccagctgacaaacagtgtaaaccagagg

SEQ ID NO: 274571 - DNA, 133 bp, Homo sapiens
cagaagtgaaggagctgaggcctcaactaatgacttcccagttcatcagcgtcttcagcctggaagtgactgatttattgctcactgctttggaaaatccagtaaaatatgctgaggacaatatggaacaaaa

SEQ ID NO: 274572 - DNA, 80 bp, Homo sapiens
tacatgttccacaagaagtgcagcttataatccaagctattactcaggtctgggtcactacaatatcaccagctcgccca

SEQ ID NO: 274573 - DNA, 96 bp, Homo sapiens
gacccatgtgagcaatctcagtgaccttcagggtgattctgggggtccacttgtctgtaatggtgtgcttcaaggtatcacatcatggggccctga

SEQ ID NO: 274574 - DNA, 75 bp, Homo sapiens
ccacattatagattatgcttgggtgatatgccatttgtagctgggaaggaattgaatgatctggcacgggaccct

SEQ ID NO: 274575 - DNA, 89 bp, Homo sapiens
gggcaagagcagtttactgttgcgttttgcagacaacactttctcagacaatgcagatcttcgtgaagactctgactggtaagaccatc

SEQ ID NO: 274576 - DNA, 98 bp, Homo sapiens
agaaaggcccacctgtgtcctggttgagggtctccagggttctttggggcccgaggtacgtagagaatacaggaaattcttcagagccaatgctggaa

SEQ ID NO: 274577 - DNA, 124 bp, Homo sapiens
atcaaggctgcctataatcaagtaaaaacaatagctcaaggaaacctttccaacacagatgtccaagctgccaagttggatggcaagcatgtggtgtttggcaaagtgaaagaaggcatgaata

SEQ ID NO: 274578 - DNA, 75 bp, Homo sapiens
gcgaggaggatggcggagtcggggctcctgacgcttcagacagcaaagtcctgacatgtgcagccgtgtggagga

SEQ ID NO: 274579 - DNA, 90 bp, Homo sapiens
ggagcccccagcgcagcggccgcgacagctctggctctggctattgctcaggagctgggtagtaaggtccccttctgcccaatggtgggg

SEQ ID NO: 274580 - DNA, 118 bp, Homo sapiens
atgtgggaagataaatgaaggggtctagatgtaaatgtcagtggaaaggagagctaccatcactaagggcagcaagagcccagagcaagggctgtttccaagctgagattgtgcctgt

SEQ ID NO: 274581 - DNA, 51 bp, Homo sapiens
caccgtgaacggacagtcccccccaggtgaaaggtgtagcagtcactcggc

SEQ ID NO: 274582 - DNA, 100 bp, Homo sapiens
tcagtacaaagccgtgaagtcagaggcgaacgccactcagcttttgcggcacttggagctatatgttctcctttcagccaagacctttcaccagtgcagg

SEQ ID NO: 274583 - DNA, 100 bp, Homo sapiens
tcatattccacccattactaaggattggtccaaaggaagattttttccattgtttgaaatgtaacttatgcctagctatgaatcttcaaggaagacacaa

SEQ ID NO: 274584 - DNA, 99 bp, Homo sapiens
catttcttttgtgcaagatgagcctcaagtgcttctgcattacaatccctgcatgtcactgagtccaccatgctttacagaagaagacagatttagtct

SEQ ID NO: 274585 - DNA, 75 bp, Homo sapiens
cctgaaccggcacctgcacacctggatccaggataacggaggctgggattctccttttacaaatgcaggaatggg

SEQ ID NO: 274586 - DNA, 100 bp, Homo sapiens
gaagaattattttcagtggaaccactaccaccacgaccatcatctgatcagtctagcagacagaaagaatttactttcaggttttcttacctaaagggag

SEQ ID NO: 274587 - DNA, 83 bp, Homo sapiens
ctgcgaaggcaggagggcggcgccgccgaggcccagatgcgccagggacatctacgagagggcaagtgccacctctctctggg

SEQ ID NO: 274588 - DNA, 113 bp, Homo sapiens
gaggagccagacgacaagcacacactatggcgctgaaacggattaataaggtggtatcacggcaacctcacacgccatgctgctgaagctcttctcctctcaaatggatgtga

SEQ ID NO: 274589 - DNA, 100 bp, Homo sapiens
ctgggatgcaattgttgcagaagtgaaggataggcagccaaggtacactcacgtggaagctgagtgtcctttcctgacttttgacgacctcctgaaccgg

SEQ ID NO: 274590 - DNA, 100 bp, Homo sapiens
cagaatccacgccagtacaagatcccagactggttcttgaacagacagaaggatgtaaaggatggaaaatacagccagatcgttcagaaagaggcagagc

SEQ ID NO: 274591 - DNA, 75 bp, Homo sapiens
ggggaccctcagctggacacggccatcgggcagtggctccgctgggataagggcaattgaaggaacagactaaaa

SEQ ID NO: 274592 - DNA, 98 bp, Homo sapiens
aaagaattaaagggggaaaaagtaattcgaccagaatggattgtggaaaggggtattttagtgacgcctggaacacgtttgactccctcatcgtaatc

SEQ ID NO: 274593 - DNA, 76 bp, Homo sapiens
atccagaggatctgcaagtacccgctcctccttaagagtttattaaccacttaacctctcagaactgaacaaagac

SEQ ID NO: 274594 - DNA, 75 bp, Homo sapiens
aatggctcatccacaccaagaatcagccacagacggaacaagcatgcaggtaatctgtaagtcagatgctccaac

SEQ ID NO: 274595 - DNA, 90 bp, Homo sapiens
tgtagaagcatttttttatgaaccttaccagtaccactccaaaggcaaggaaccatgattgacaacagtcaagctgtggatgaaatgacc

SEQ ID NO: 274596 - DNA, 121 bp, Homo sapiens
gtgaaggacttcgactgctgttgtctctccctgcagccttgccacgatcctgttgtcacggacgtccagatcggtgacatcgtcacagtgggcgagtgccggcctctgagcaagacagtgc

SEQ ID NO: 274597 - DNA, 76 bp, Homo sapiens
ttggattgcagcatgcagaattacaggaggaggaagccaagaatctggtgagcgaagccatcgcagctggcatctt

SEQ ID NO: 274598 - DNA, 100 bp, Homo sapiens
gtgaaggacactgcccacgactttcgggtatttactaccagggagcacccaattcttcttgagaacaccaacctacaacttgaagtacaattcacctgga

SEQ ID NO: 274599 - DNA, 100 bp, Homo sapiens
gcacctaaaaattgtataccgcagattcagtcaaggcctggccgacaacaccgttattgctaaagtaaataatgttgtgtgggacctggaccgccctctg

SEQ ID NO: 274600 - DNA, 75 bp, Homo sapiens
agctcaagaaggtgaagatgatacctttctaacagcccaagaggataagatcaatgccctcattaaagcagccgg

SEQ ID NO: 274601 - DNA, 88 bp, Homo sapiens
gagacgagaagcctgaaaagtcgcagcgagctggagccgccggagatatttcacagttcttgccgagtgcttcactttttcactagaa

SEQ ID NO: 274602 - DNA, 51 bp, Homo sapiens
gaaaaaatggttgacctcacccagatcccataaaaactgcccaaggatctc

SEQ ID NO: 274603 - DNA, 90 bp, Homo sapiens
gtgtgcgcttgggcgaggccgggcggcgcttctgtcctcctactcggacccgcaggtcacagtaaggctgttagggatatctgcttcaat

SEQ ID NO: 274604 - DNA, 98 bp, Homo sapiens
gatttctatgagaagtatcgtaacccccaaagagaaaaagaaatgatgcaattgtatatcagagtgggaaatgaagaaggatgaaacactagaagagg

SEQ ID NO: 274605 - DNA, 74 bp, Homo sapiens
cgaccaggtggaggaggagggggaggacgatgggatggaggtggataccacaccaacagttgctggacagtttg

SEQ ID NO: 274606 - DNA, 100 bp, Homo sapiens
agcaggagcggcctggcaccacagccgcgtcagtgttgcggcgcgggatggcagttttacagtctccgcacagatagtcgtgcaagcactgcagtgttcc

SEQ ID NO: 274607 - DNA, 90 bp, Homo sapiens
gcacttggaatcacgggttgaaggcgtcttcactcgaggacagctgggcctgatagacatcatcttccagtacattcactgtgatgagat

SEQ ID NO: 274608 - DNA, 88 bp, Homo sapiens
ggggctggtcccagaagatggcggaggcggggggtctttctctgtctctcagcctcaagccatcctcctgcatcagcctcccaagtag

SEQ ID NO: 274609 - DNA, 82 bp, Homo sapiens
gagctggtggcgtcggcaggttcgaggcgattcgagtttttcagaagaagtgaagtcaagatgaagaaccatttgcttttct

SEQ ID NO: 274610 - DNA, 98 bp, Homo sapiens
ggagcctcgtggctgcgtcaccgccgcccccccagacaagatggacaccgcggaggaaggcacgtggactccctttaatccagtgactgtcaggtcga

SEQ ID NO: 274611 - DNA, 120 bp, Homo sapiens
atttgttggggagaagaggattggaggtgtcagtgttaaaggaacctctacaacgaaggtgaagccacggaagataagctgggagtgtccactcgccttccaccagcatggcaacgtctt

SEQ ID NO: 274612 - DNA, 86 bp, Homo sapiens
gtcgctgagcggccaggccgtgcgccggcctttggtcgcctccgtgggcctcaatggtcaaaatgcagatcttcgtgaaaaccctt

SEQ ID NO: 274613 - DNA, 100 bp, Homo sapiens
cactcgtcaccccaggccattctcatgttccctccagatgttgacgatgagtatgaggacgaggaccagtgggaggatggagcagaggacattctagaga

SEQ ID NO: 274614 - DNA, 90 bp, Homo sapiens
aaaggccttaatattgtacatagaattaaggcgtataaatcagttttggagtctgatgacttttcacagtaccaactcaaaggcttgctt

SEQ ID NO: 274615 - DNA, 100 bp, Homo sapiens
cggaagcccaagtggcacaaatgcagaaactccctctggtgatgatttcaggttcctgatgaaaagttatgatcaggtgcactcaggaaagttggtgtgt

SEQ ID NO: 274616 - DNA, 100 bp, Homo sapiens
acagcggaatgtatataggcatgtgatgttagagaactacagaaacctggttttcttggcccccaaatacatcaagatgtttgtactggatgaagctgac

SEQ ID NO: 274617 - DNA, 73 bp, Homo sapiens
tgattttcctgatgcttattgtaacttggctcattgcctgcaggatggggaatttagcatggatcttcgtacc

SEQ ID NO: 274618 - DNA, 100 bp, Homo sapiens
cagcggtggcaccgggatcggttgccttgagcctggttgaagcactggacaatgccacatactttgtggatggtgtgggtcttgggggtcatcatcagcc

SEQ ID NO: 274619 - DNA, 48 bp, Homo sapiens
caaagtcaagcatgtgataaagcagtgttatagttttgccgctggact

SEQ ID NO: 274620 - DNA, 75 bp, Homo sapiens
cttgtgtatctggagaaaatagaggtttggtgcacctcgatttggaggaagtagggcagggcccttatctggaaa

SEQ ID NO: 274621 - DNA, 74 bp, Homo sapiens
atgttaccgccacctaaaaacaaagaggattttgagaaggcttgtttctggtgcaggtgacatcaaactcacca

SEQ ID NO: 274622 - DNA, 51 bp, Homo sapiens
cagccaaaacagttcattcatattcagccggcaacctttggcactgcatcc

SEQ ID NO: 274623 - DNA, 89 bp, Homo sapiens
ggggagtggaggcggaggggagcggagcccggagcgtcgtggaaaggtatgatctcgtgaaatcttgagagaaactgaatgacgaatga

SEQ ID NO: 274624 - DNA, 75 bp, Homo sapiens
cgaccaagatcaggaacctgccctgaattttccagttcatatgaagaggtgatctctcaaataaatacgtcatta

SEQ ID NO: 274625 - DNA, 100 bp, Homo sapiens
taagaacatactgcgctttattcagaagaaggtagataatgactataatgcccttcgagaaagactcagcaccttgcctgataaattgtcttataatata

SEQ ID NO: 274626 - DNA, 100 bp, Homo sapiens
ggctacatgcggttagatgacagtgggattggaggagcatattatttaatatctagaagtctagggccagaatttggtggtgcaattggtctaatcttcg

SEQ ID NO: 274627 - DNA, 100 bp, Homo sapiens
ctccaggacacccctgaagccgagaaatgacttgtgcaccatggacaattttgctgagggagatttcactgtggcggattatgccttgttagaagattgc

SEQ ID NO: 274628 - DNA, 98 bp, Homo sapiens
taagcgcagaaagcaggcgaacccgcggcgcaataacgccatcccaggcctcaggacctgagttctccgacgcccacatgacatggctgaactttgtc

SEQ ID NO: 274629 - DNA, 100 bp, Homo sapiens
taagaaacgatcttcgtccagctaacaaacttgctaaaggaaataggttattcatgagatttgctacaaaagacaattgtggcaattaataaagacccag

SEQ ID NO: 274630 - DNA, 100 bp, Homo sapiens
gggaaacaaggcttccagtgccaagacggtctggaaaatcccgaagcagaagcccgtattcatctaggcattcaagatctcgtagcaggcacagattgtc

SEQ ID NO: 274631 - DNA, 75 bp, Homo sapiens
acgccgagcgcaccgacatctgcctgctcaaaggtgtccctggccagtgtccttccacctgtccacaagcatggg

SEQ ID NO: 274632 - DNA, 97 bp, Homo sapiens
ctcggcttgggacttctacaacaggaaagacttcaggatcatgaggatgagaatgaagaaggtggtgaggtcccctgggccccgcctgaaggatcag

SEQ ID NO: 274633 - DNA, 100 bp, Homo sapiens
cgggggtgctgcagaggacacgaggcggcgggctggagacatggaccgcggcgagcaagaatgttatggaacagttcaatcctgggctgcgaaatttaat

SEQ ID NO: 274634 - DNA, 74 bp, Homo sapiens
ctcaaacgaaaagagaattgtacactgcagttgaaatggatgcagtcagaactgaatgttgaagaagtggtaaa

SEQ ID NO: 274635 - DNA, 98 bp, Homo sapiens
aggattaacactgcagagtaatggagttcatgatcaagtgttgcccacaccaaatgcttcatccagagtcatagtacatgtggatctggattgctttt

SEQ ID NO: 274636 - DNA, 117 bp, Homo sapiens
tgatggctgtgggcggtaaacgcggttagtgcaagcatctgggccatcttcaatgtcacttcctcctaacccatctgctgctagagaaactaaaggaatcagccccatcaaggatag

SEQ ID NO: 274637 - DNA, 90 bp, Homo sapiens
tgcagaatttttgactggagactatagtaggttgtttacattcagagctctatcaataagaggaatacatattacagtgaattcgacaac

SEQ ID NO: 274638 - DNA, 100 bp, Homo sapiens
cggtggctgcttcccgtccgctgtcctctgctgccagtcccctgccccgggcaaagcccatctggtccgccgagcagtcaggtcaattcagtgaagatat

SEQ ID NO: 274639 - DNA, 78 bp, Homo sapiens
ccgcgagaagcagcgggggggcaggcgatcgaaggtacagaggtgcagttccatggtacaccataaatcttgacttac

SEQ ID NO: 274640 - DNA, 80 bp, Homo sapiens
gtggaattttggagatattcaaaggtgaggtatatctgttcagctctgggttgtcgccaatgggatagtgacgaaatgga

SEQ ID NO: 274641 - DNA, 50 bp, Homo sapiens
cctgcctggacccctactattgcaacaagacttaattcagtgcacaaatg

SEQ ID NO: 274642 - DNA, 74 bp, Homo sapiens
ccgccccgcgcccccgccgcgccctcagggtcaacatatttcactggcacctattcacaagcttgaagaagctc

SEQ ID NO: 274643 - DNA, 83 bp, Homo sapiens
acaacctggatcttcgaacttttgacacggctttggaaacgacgtcatgtgttagtttaagctatgaagaaggacatccctca

SEQ ID NO: 274644 - DNA, 75 bp, Homo sapiens
ttcatcaccatcttggaagcaacacatcggaaccagtcttcagaaaacaaggctaatctagacgaaatccagatg

SEQ ID NO: 274645 - DNA, 75 bp, Homo sapiens
atgacaaaggcattcatcatagaaagcttaagggtatatttacttctggcacatgggaagagaaatcagatgaaa

SEQ ID NO: 274646 - DNA, 100 bp, Homo sapiens
tacatttagagactgaaatcactgcaccttaaaaacaaaagattgagctgcactgtattcctggctgcgaataaaggagaccaaggaagtttatgaaggt

SEQ ID NO: 274647 - DNA, 50 bp, Homo sapiens
gcagtggtcgcttcttctccttggtacaaatctattgtcaagtacaagac

SEQ ID NO: 274648 - DNA, 82 bp, Homo sapiens
atcaaaggtcacctggaaattgccttattggaaaaacatttcttacggaaagcaggcaggatgggagagtcgccgatagaac

SEQ ID NO: 274649 - DNA, 75 bp, Homo sapiens
aaaggtgaagatgcagcggccggattcctatgtccgagacatgaatctacctgttactcgtattttggacaatct

SEQ ID NO: 274650 - DNA, 76 bp, Homo sapiens
aagaataccagtttcaagcagtattaagagtaaatggtagatttcgggcagacaacttgaacaagctgaagaacct

SEQ ID NO: 274651 - DNA, 74 bp, Homo sapiens
agaatacagactgctacctccccgatgccttcaaaattatgactcaaagtgagaaagatcagtctaaagaaaag

SEQ ID NO: 274652 - DNA, 75 bp, Homo sapiens
gtgttcccggctgagatggattacttgcgctgtgctgcaggctctgtcgtgtacaacgtgggactctgcatttgt

SEQ ID NO: 274653 - DNA, 100 bp, Homo sapiens
gctccgtgtttctggaaagtgacagcagctgctctgacctacaaatgcacacgagaccagtggacggtatattgccgggtcatccgagaaaagaacctct

SEQ ID NO: 274654 - DNA, 75 bp, Homo sapiens
taccacgacaaaaccaccctaaggagaattctgcctaagccaactcgaaaaagccgtacaaaaaataagcaaaag

SEQ ID NO: 274655 - DNA, 90 bp, Homo sapiens
cagagaacacaggaccagtttgccatcccaaggccgaaggtaacattgtataacactgatcaggatggtagtgatagcccacgcagtagc

SEQ ID NO: 274656 - DNA, 75 bp, Homo sapiens
ctggaacgagttataggaagatgtagtccaacccacatcagcagatggagtgaaggtacctgagcgcaggaacca

SEQ ID NO: 274657 - DNA, 100 bp, Homo sapiens
ccgctgaatattcaatctacatcgcttgcgagccttccccttcagcgaacaatgaaatacatgtggccattcttgaattcggagtgatttaccactgcac

SEQ ID NO: 274658 - DNA, 49 bp, Homo sapiens
aaactgcaataagccgccttccaaggatgtacagttacccagcacgtgt

SEQ ID NO: 274659 - DNA, 75 bp, Homo sapiens
ctacaaccttcgatctcctgacgagtgttacttacaaagaggtgctcagcttcaagcctccccggcagctggggg

SEQ ID NO: 274660 - DNA, 51 bp, Homo sapiens
catcgatggacgcattcagaaggcctgtggactttctcctcgagacattac

SEQ ID NO: 274661 - DNA, 75 bp, Homo sapiens
cagttggatgacatcaaaagagggccagaggtggaggctcatctcaggaagctgggcctgggctatcgtgcccgt

SEQ ID NO: 274662 - DNA, 75 bp, Homo sapiens
cgaacgatgtgcgagaactgcgcagacctggtggaggtgttaaatgaaagtaatggggagagtgccaacaatttc

SEQ ID NO: 274663 - DNA, 100 bp, Homo sapiens
cctgatacgatttccatcgcctcacggacgtctcagaacacgctggacagcgataagcttggatcctagcatgactatacattgtgacatggtcattaca

SEQ ID NO: 274664 - DNA, 98 bp, Homo sapiens
ccagttagtggatatagcacaccatccccagccagtctggagcccccaactcccttgacagtgtacgctggagcaggttccagggtggggctgccctg

SEQ ID NO: 274665 - DNA, 74 bp, Homo sapiens
ggttttgcactatttacaaagtcccgctcccggtcccctcggaggagagcccactcccctgagagacggaggga

SEQ ID NO: 274666 - DNA, 75 bp, Homo sapiens
ttatctctggtgctgcagctctcttgccacagctaccttggatggtaaactccagctctttctagctgagtaacc

SEQ ID NO: 274667 - DNA, 98 bp, Homo sapiens
ggggaggcagcgcgggatcccagcctcaggcgtgcgcggacggtgtgcggctttctcctggggcaagcctgaaatcccaggggattgatgtcctgaga

SEQ ID NO: 274668 - DNA, 82 bp, Homo sapiens
agatgattcgctatacccgatcgcggttttaatcgacgagctccgcaatgaagacgtgcagtgaaactggaacgccaagctg

SEQ ID NO: 274669 - DNA, 75 bp, Homo sapiens
atgaaaccactgcagatgatagaaactgtaagaatactctggagcagtgcaatgtgtgttccaagcccatcatgg

SEQ ID NO: 274670 - DNA, 100 bp, Homo sapiens
gaacctcaccattctaagaatgaaaggccagcacggtcagatgcccagggccactgaagagaaaactccgcttttcatttagctgtcacttggcccaaac

SEQ ID NO: 274671 - DNA, 100 bp, Homo sapiens
caggatggattgccagggcttcctggcccgaaaggagagcctgttcacatcgagttcacagagggcgaagacaagatcaccctggagggccctacagagg

SEQ ID NO: 274672 - DNA, 140 bp, Homo sapiens
tattctcgttcaagttaatccaggtgagactttcacaataagagcagaggatggaacacttcagtgcattcaagggccccgtggttatgaatgtgcttcagtttcataatgcctcctgctatggcagacatccttgacat

SEQ ID NO: 274673 - DNA, 83 bp, Homo sapiens
ggactgtccccactgcgagcagtacaacggcttccaggaggcctgcaggtggagttcatcaaccccatcttcgagttctcgcg

SEQ ID NO: 274674 - DNA, 99 bp, Homo sapiens
atcatctcttcataaaacaaagaatttaatattgtatgaacgaagataagatgaagaagatgactttatgtgtaagaaggcggcctctaaatcaaaaga

SEQ ID NO: 274675 - DNA, 75 bp, Homo sapiens
tttgtgaatatggtggaaaaaggaatcattgacccaacaaaggctaattcacctaaataagattgatcctcatgc

SEQ ID NO: 274676 - DNA, 73 bp, Homo sapiens
ggagatgaggaggaggaaggagaagagaaacttgcagcagtgttgtactgctacttctataaacggacagccg

SEQ ID NO: 274677 - DNA, 96 bp, Homo sapiens
atcagtctttgacaagtgatgagaagctgtcggagcttcccaaggaaaattgggccgatttccacctatgatgcatcatcaccaggcaccctcaga

SEQ ID NO: 274678 - DNA, 50 bp, Homo sapiens
tcttctctggaagatcttgtggccagtactaaagtggaagtggacatgga

SEQ ID NO: 274679 - DNA, 75 bp, Homo sapiens
gccaattaagaatcatagggaagaggagctgaccagtgctttggtgcatctaaaactgcatctttttattcagat

SEQ ID NO: 274680 - DNA, 75 bp, Homo sapiens
ctgggtcttcggctctgccggccctacaggctggcggtttctccttggaccaagatgactgatggaaaactctcc

SEQ ID NO: 274681 - DNA, 75 bp, Homo sapiens
atgggcgcctcggccgccatggtcttcagcgaatagcctaacatggcagaccagagacagcgctcactgtctacc

SEQ ID NO: 274682 - DNA, 99 bp, Homo sapiens
ttgggggcaggagctgctttttcaatgagaagaatgaacagacctagtgggcgttgcctttagacccagggcttgataagatgatggtggataaggatg

SEQ ID NO: 274683 - DNA, 80 bp, Homo sapiens
gcttgtggaagccacccgggagtttgaggaggttgtggataccagaaggccctattgatcaggggccagctataggaaga

SEQ ID NO: 274684 - DNA, 101 bp, Homo sapiens
ccgggtcctcctagaaattccccccgaagaagactcccccacatctggtctttaacacctctgtgtgaagatgacaaccaggcacaggaaatcattaagaa

SEQ ID NO: 274685 - DNA, 97 bp, Homo sapiens
gatgtgggcccagccctgtgccaggaggctggctggaataaagatgaagatctccttcaacgacaaaagcctgcagaccacatttgagtacccttcc

SEQ ID NO: 274686 - DNA, 75 bp, Homo sapiens
aatcttgaatcagaaattgagaagctgtgagttattctccccacctcagaagtaccagcttttggtgtatcatgc

SEQ ID NO: 274687 - DNA, 98 bp, Homo sapiens
tgaagggggctctttatataatggaaatcaaatgttggacgaaggatttgtggaagatttttcagagcaaatggaaattgccatccgagccatcctct

SEQ ID NO: 274688 - DNA, 100 bp, Homo sapiens
atgacagatgtgtggtgcacccagaggccggggaccttgccaaccctcccaagaagttcagaggtcgccactgggacactgtgaaccaggagtgagtcgg

SEQ ID NO: 274689 - DNA, 75 bp, Homo sapiens
tggaccgcggggcgctaaccctggagagcccaggagcgggcgggacatgtgtgtcccggcatggatatccggaac

SEQ ID NO: 274690 - DNA, 83 bp, Homo sapiens
cgaagaaggacgtgctgacccgcctgaagcacctgcgggcgctgctggttggttctaaagagtggtgagtcagaagagacgtc

SEQ ID NO: 274691 - DNA, 75 bp, Homo sapiens
aaacttcctggcaccttgattttggacttcatagcctctagaactgcttcagtgtcatttgaggacgtgactgtg

SEQ ID NO: 274692 - DNA, 82 bp, Homo sapiens
agacacagaactgaaaaggtattttggtgcccgggcaatcctgggggagcaaagggagtgcatccgccccaacccttttccc

SEQ ID NO: 274693 - DNA, 108 bp, Homo sapiens
taataacacaacaagtttagggagtccatggccagaaaacttttggggtgactgcttagaaaactgcacagcatctgatgaaattagcgaataagaacatcaaccatg

SEQ ID NO: 274694 - DNA, 89 bp, Homo sapiens
acaataaaagagacctctacttagctcagcaattcttaccttgttctgggaagttctggattgtttaataaccatggactccaagtaca

SEQ ID NO: 274695 - DNA, 75 bp, Homo sapiens
aggcaaaaatcccatctaccgcaactctcagttcgagagtaaagggcgaccattgacgaggtggagacggacgtg

SEQ ID NO: 274696 - DNA, 74 bp, Homo sapiens
tatggcagagttagctaaagaactccctcaagtttcatttgtgaagtagagatcagagagttgtgacatctgag

SEQ ID NO: 274697 - DNA, 75 bp, Homo sapiens
gtggactccttcggcagtccacccaccgccgccgcctcccagttacgagaactggtcagcatgtgcatctgccct

SEQ ID NO: 274698 - DNA, 100 bp, Homo sapiens
atggaagcatcagaatttcttcagaatgcagtttacattaaccttcgacagggagtgcatccgccccaacccttttccccctcgtctcctgtgagaattc

SEQ ID NO: 274699 - DNA, 106 bp, Homo sapiens
tcaaaaagtgattaagcagagaatggagaagaaggttgattccagaacaccaatcagggtcttcaggcctggaagattgaagacattccagccaacaaaatgtcca

SEQ ID NO: 274700 - DNA, 75 bp, Homo sapiens
atccacctgtgcctcttcaccatgttcggaatgctgctgttcgctggtgggaagaagtccattggaatattaagc

SEQ ID NO: 274701 - DNA, 50 bp, Homo sapiens
ttcgaatggctgtcaacaaggctgaactgtggctgcaccatctgtcttca

SEQ ID NO: 274702 - DNA, 74 bp, Homo sapiens
cttcctgtcgctgacggcgactgcgggaggccaggaatactcccccagttgcaagaggcgcaggaccgtggaag

SEQ ID NO: 274703 - DNA, 95 bp, Homo sapiens
cactgcacctgatgacaaggacctgcagtgctgcaggaagctctggaggaatatgtgaaaaaagtaaactctattcagatggtaagaagaagtcc

SEQ ID NO: 274704 - DNA, 97 bp, Homo sapiens
acaaaatgaacataattagggaaaataaggatctggcatgtttctacacaacaaaacattcatggagggggaatgaacagcagagaatttcaaagga

SEQ ID NO: 274705 - DNA, 83 bp, Homo sapiens
attatttgcaacagctcacgggagcaagaacgcaaaacaagctatcgatcagggaagatctccagttataatagataacacta

SEQ ID NO: 274706 - DNA, 100 bp, Homo sapiens
aaggccagagataagaacaccaaccaaattgtcgccattaagaaagtggatggagagctagaagctctgatggaaaatggtgagggtctctctgataaaa

SEQ ID NO: 274707 - DNA, 96 bp, Homo sapiens
atcatggacaagtttcatacatttctccgccaattcaccttgactctgagctagaaagaccctctgttaaagctgtgcctttggctgcaacaagta

SEQ ID NO: 274708 - DNA, 87 bp, Homo sapiens
aatgaagctcaagaaactggagtccagtgtgagcactggtcgtaaattcccatgagcgtgtaagcaagcgtctacatcagagattcc

SEQ ID NO: 274709 - DNA, 100 bp, Homo sapiens
cacggcgacaatacccaaagacagagagaccaggaaacttggatttaactggccagaagcaggtattcaaagcagagaacaatccctgggtgacccccat

SEQ ID NO: 274710 - DNA, 131 bp, Homo sapiens
gcaagcctctgcagaggcgctggagctgggtcagtccgccgctcaccccgcggccgcaccttcccgccttctcagacaatgcagatcttcgtgaagactctgactggtaagaccatcaccctcgaggttga

SEQ ID NO: 274711 - DNA, 50 bp, Homo sapiens
aaggctccaagtagtctgagtgatggaacttacaatgtctcagaaaaatg

SEQ ID NO: 274712 - DNA, 50 bp, Homo sapiens
caagtgcattgcctttggaaacgaggatttcaataacgagagtgacagct

SEQ ID NO: 274713 - DNA, 100 bp, Homo sapiens
attgggcttattcagttttgcttatctgctcccaaaacagacatactgaaacaagaatggcccaaacattggccaacttttatcagtgatattgttggag

SEQ ID NO: 274714 - DNA, 82 bp, Homo sapiens
tgaagctcaagttgctactcgggacgctgcacctcccgcgccgcacggtggacgaggccctgggctgcatcttgtacctgct

SEQ ID NO: 274715 - DNA, 100 bp, Homo sapiens
cgaggcaacgccggggcgcccgaggtctggaaggcgcaggtcacggagctgctggacgtctccatggagctgggctgtttcctggctggagcgctcgtct

SEQ ID NO: 274716 - DNA, 75 bp, Homo sapiens
gagatttacggttccgaatcaaagttgtcaaaaaaatgagcaggcggaattgttggatttgtaagatgtgcagag

SEQ ID NO: 274717 - DNA, 99 bp, Homo sapiens
tggtgggcccacgtgctacaagctacactttagttgaaagctctttcaccatgcctggatcacttcctttgaatgcagaagcttgctggccaaaagatg

SEQ ID NO: 274718 - DNA, 100 bp, Homo sapiens
atgtccttcttccggcggaaagaaatcagagcctcattcccttagtagtgaagcattgatgaggagagcagtgtctttggtaacagatagcacctctacc

SEQ ID NO: 274719 - DNA, 100 bp, Homo sapiens
agggcggtaaggatttcaacatgcctctgacaatctctagtagtttccctacgtataccctggtggttcaagctgctgaccttcaaggtgaggggttaag

SEQ ID NO: 274720 - DNA, 51 bp, Homo sapiens
tcgctgttggatcgggttctaaaggaaagtcaggtcaattcagtgaagata

SEQ ID NO: 274721 - DNA, 100 bp, Homo sapiens
ccatctggggaaaaggcaaaaatcccatctaccgcaactctcagttcgagagtaaagagttcacatgagactctgaatatagtggaggagaagaagcggg

SEQ ID NO: 274722 - DNA, 51 bp, Homo sapiens
ggagatccgttggctcctggaaggtgtaatggataggtaacagagaagacc

SEQ ID NO: 274723 - DNA, 75 bp, Homo sapiens
caccaacagatgaagacagatgcaccaacgaggtcttgatagactttctgtaaagaaggaatgatttggtgatgg

SEQ ID NO: 274724 - DNA, 101 bp, Homo sapiens
gtgacagaatatgccaaaaatggagaaatttttgaaaatcctgacttccgagaaatccgctcctttgtggagacgaaggctgacagcatcatcagacagaa

SEQ ID NO: 274725 - DNA, 50 bp, Homo sapiens
gttgtttacgacaaacctccttgtcaaagctggagtgcgatggcatgatc

SEQ ID NO: 274726 - DNA, 109 bp, Homo sapiens
agtttctacaaatgctagaagctatcaaagcccttgaagtcaggctgctttgactctcccgcgaagacctttccttcactgttctactgtgattcccgttgtggttctg

SEQ ID NO: 274727 - DNA, 98 bp, Homo sapiens
tttgtggaacagaaatgtgaagaactctaagaaggagctgatgtggaggagcagctgagacagttcaagatgacgaccacagtagccacagactatga

SEQ ID NO: 274728 - DNA, 100 bp, Homo sapiens
taaagcaagcaagctgttttgaaagtgtctaatattggctgatgtagagctataggatcatccggacaaaagtacagcagccacccaaccaaccagtccc

SEQ ID NO: 274729 - DNA, 100 bp, Homo sapiens
gaggacgacgacgatggggatatcgtgtttgagcaacacacctccacttactgagtatttcctcaatgataagtatcaagaagaactgaattttgacaat

SEQ ID NO: 274730 - DNA, 107 bp, Homo sapiens
cccagtcctcatcctggatgaagccaccagcgctttggatgccgagagcgagtatctgaatttttccctagattggtgtaaacagccagacgtgggccttcccaaac

SEQ ID NO: 274731 - DNA, 129 bp, Homo sapiens
tcaaggcatcaccacagcgaacgcatgcaacacgtggtccagcttccccctgagccggtgcagggtaagctgctgtactgccatcctcctcctggaagagatcctgtaacttttcagcatcaacaccag

SEQ ID NO: 274732 - DNA, 98 bp, Homo sapiens
cctggctccccatactagtcgccgagggtcagctgtccgaggaggagaaaccagatcagcagcccctgagcggagaagaggagctagagcctgaggcc

SEQ ID NO: 274733 - DNA, 75 bp, Homo sapiens
agacatttacgcggatgtcggcgaagagttcaaccaggtaatgagagatccaaacaccaagcgctccaggggctt

SEQ ID NO: 274734 - DNA, 75 bp, Homo sapiens
agataccagtttgcgtcaggagacacagcctggagatgcccaaagatgagctgcccaaccataactgcattaagc

SEQ ID NO: 274735 - DNA, 100 bp, Homo sapiens
tttcacttatctcgaaagcctatcagcatagttaagaaatacactttcgggaaatggcctctaaatcctggctgaattttttaaccttcctctgtggatc

SEQ ID NO: 274736 - DNA, 100 bp, Homo sapiens
cgcgatgaagcccagacctgcagggttcgtggataataaactcaagcagcgagtcatccagaataacctgggtatcttgtggtctgaaagagaagaaatt

SEQ ID NO: 274737 - DNA, 75 bp, Homo sapiens
gcaaggacttcgttcaagtcatgagacataggcatttccggagagttcttttgaagtcacttcagaaggatctac

SEQ ID NO: 274738 - DNA, 80 bp, Homo sapiens
ctgaaattcatcctgagatgagtgttctaagaacggaagcatctgggctggatggaatttagcatcaagcagagtcccct

SEQ ID NO: 274739 - DNA, 100 bp, Homo sapiens
gtttacccggatggcctgactcatcccagagaaccagggaaaatgtgtagagggcatggtggagatcttcgacatgctgctggctacatcatctcggttc

SEQ ID NO: 274740 - DNA, 100 bp, Homo sapiens
gtggcagaagatgatgatgaaagtgatggaagagtgtagaaagtgtcccaaagttggtgtctgaatatatgtccaaaaagataaaagttgatgaatttgt

SEQ ID NO: 274741 - DNA, 98 bp, Homo sapiens
gagcgccgcggccgccgcagccatgaccgtggagttcgaggagtgcgtcaaggactccccgcgcttcaggcgagaaccactgtctctgatcaacgtgc

SEQ ID NO: 274742 - DNA, 74 bp, Homo sapiens
cctggttgcggaaagagcagttttatcttagcagtgtctgcaaaaacgaatcttttcctacaacctgttaactg

SEQ ID NO: 274743 - DNA, 75 bp, Homo sapiens
ggattctcgacctgctaacagaactggaccttttcgtttcacgctatggatacattgtatagacacagctatgat

SEQ ID NO: 274744 - DNA, 103 bp, Homo sapiens
tggaattgaagaattcaaacctcctgagagaatttcaagattgtggagttggactgaatgctgcacagttcaaacagctgcttatttcggctgtgaaggacct

SEQ ID NO: 274745 - DNA, 74 bp, Homo sapiens
tgcggtgggaccacgagagccaaactgcctagttgggctagagctgttgtccccaaaatattttatgtgacaga

SEQ ID NO: 274746 - DNA, 98 bp, Homo sapiens
cgatcatactgggagatgcggggcaatgcactagaaaagaagtctaactatgaagtattagaggtttaaatgcggtatttgacatcttggtgataggc

SEQ ID NO: 274747 - DNA, 50 bp, Homo sapiens
gcgctatggcgtctcccgcagtgaccagcccagggtcacctatcaggtcc

SEQ ID NO: 274748 - DNA, 95 bp, Homo sapiens
cgtagacaccagctccgaaatcaccaccaagatccgaattcgagatccaaaccaaggaggaaaggatatcacagaggagatcatgtctggggccc

SEQ ID NO: 274749 - DNA, 100 bp, Homo sapiens
tccttggaactgtggtccatggtaaagttttacagttacgttatgatgatgaagtgaagcgggtggtggcagagccggtggagttggcccaagagttccg

SEQ ID NO: 274750 - DNA, 106 bp, Homo sapiens
ggcgctttccgtcggcgtgtgttttggggttgccatcggcccgtagtatgtgaaaagtgactgaaaactcctgaggcatttcctggactagaatgggtagtgaaga

SEQ ID NO: 274751 - DNA, 50 bp, Homo sapiens
caagaacatatgagtattcacacaggaccttcgggagaaaaactgggaag

SEQ ID NO: 274752 - DNA, 115 bp, Homo sapiens
agctcgcccagacatggaagaggtctgagcagtgggccaccatcgagcagctgtgcagttcttcatgacagccagattccccgtaatggaaaagggcagcaagttggagacagag

SEQ ID NO: 274753 - DNA, 100 bp, Homo sapiens
aaagccatataataatcattctgaaatgtctgaccttttaaaaggaaagtggatggcattcccaatgacagtagtgatagtgaaatggaggacaaaacta

SEQ ID NO: 274754 - DNA, 82 bp, Homo sapiens
tactacgaggcgcaccagatgtaccggaccctgttcttcagacaccctgacgtggaataagcccagtctcagcggggtggcg

SEQ ID NO: 274755 - DNA, 75 bp, Homo sapiens
cccagagccacttctcaccgagatgattcatgaagtgcgggcattctatgtgaacgtgctgaatgaggaacagag

SEQ ID NO: 274756 - DNA, 96 bp, Homo sapiens
tagaatatatcacccataatcggaatgtgatcacagagcctatttacccagaagtagtccatatgagacgttttcttgctctgtcgcccagtctga

SEQ ID NO: 274757 - DNA, 101 bp, Homo sapiens
gcaccggacactttgttattggagaaacatgcagattatatcgcatcctatggctcaaagaaagatgattatatccagctccaggtcccacaggggctctt

SEQ ID NO: 274758 - DNA, 75 bp, Homo sapiens
gaacaaagttgcccactcatttaactgcacgccaatagaagagcactgcagtttcctcctgaaggctggctccgg

SEQ ID NO: 274759 - DNA, 51 bp, Homo sapiens
gaattataggaacctggtctccctggctcagttttcaaaggatcagccgtg

SEQ ID NO: 274760 - DNA, 100 bp, Homo sapiens
ggtggcacagcagcatcggctgcgacagatccaggagagactgagcgtgcctaccaaaagcagccgaccatctttcaaaacaagaagagggtcctgctgg

SEQ ID NO: 274761 - DNA, 152 bp, Homo sapiens
cttctgtgggtcctctggtgttgagtggtcggcttggtgtggtgtgcggaggagctccaggcccgtcggcgcggaggacaaagcaggacctcataaggaaatctacccctatgtcatccaggaacttagaccaactttaaatgaactgggaa

SEQ ID NO: 274762 - DNA, 74 bp, Homo sapiens
ccgaatcgctgtcacgccggcagacctgcctagagctggaacgttacctccagagcgagccctgctatgtttca

SEQ ID NO: 274763 - DNA, 100 bp, Homo sapiens
gccctgagctgcctgcctcacgcccatgcattgaaccctaatgagatccagcgggccctggtgcagtgcaaggaacaggaaacgtgggaagaataagtac

SEQ ID NO: 274764 - DNA, 75 bp, Homo sapiens
ccggtgtccggaggcgctgttccagccttccttcctgggacccatccattttcacagtattgactgctaagtctg

SEQ ID NO: 274765 - DNA, 75 bp, Homo sapiens
gaaatggctaaacaggcaacagttgtcctcaattgcgtaggaccagtacgacaccgagcttctggtcaggtgatg

SEQ ID NO: 274766 - DNA, 51 bp, Homo sapiens
gtgggcgctgagagcagcaaggccagaaaccaaggtgtatgttggtaacct

SEQ ID NO: 274767 - DNA, 75 bp, Homo sapiens
agaaaatacctcatgacctttgtttattccctcacctggacaccacagcttcctgcctgacacagctcacttcaa

SEQ ID NO: 274768 - DNA, 83 bp, Homo sapiens
agccggacccgccgcctcccggcgggagatacagatgacccaccaagaattactcagaaccctgtgatcaatgggaatgtggc

SEQ ID NO: 274769 - DNA, 112 bp, Homo sapiens
tgcccgacgagcaggacttcatccaggcctacgaggaggtgcgcgagaagtacaaaggtttggtgcacctcgatttggaggaagtagggcagggcccttatctggaaagaag

SEQ ID NO: 274770 - DNA, 50 bp, Homo sapiens
gccgccgcctgcgaggcgctgcgagcagatgaggataggaattcactcag

SEQ ID NO: 274771 - DNA, 75 bp, Homo sapiens
gtgttgttttgagctgctaaacaaaaagactccgtgggaaggaggcttgtttaaactacggatgcttttcaaaga

SEQ ID NO: 274772 - DNA, 82 bp, Homo sapiens
cagcggccgccggctcccccacgagtgcagagcagagcgggcggaggaccccgggcgcgggcgcggacggcacgcggggcat

SEQ ID NO: 274773 - DNA, 77 bp, Homo sapiens
tcttacacttgaaatacagactgttggggaacaagagaaaggcttcccaactgatgcaactcttgatgacataaaag

SEQ ID NO: 274774 - DNA, 101 bp, Homo sapiens
ggcgtggtggccttgaccttccggaaccagaggtgtctgcacttccatgtacaacaaacgctccgggaaatggaaagccagttggcagcccacatgtggtt

SEQ ID NO: 274775 - DNA, 50 bp, Homo sapiens
cgccttcgagcagctgcagaggtcccggatcatccatgaagatggcttct

SEQ ID NO: 274776 - DNA, 97 bp, Homo sapiens
cgtagacttccctttccagccctacaaatgccaacaggagtacatgaccaaggtcctggaatgtctgcagcagccctcgagcatgttccaaactcgg

SEQ ID NO: 274777 - DNA, 100 bp, Homo sapiens
ggccagaggcagaaaacggacggaagaaaaggtctggccggggagacaggtgtggacatgagtggctgggatgcagtgccgtagcaggctgggggacaca

SEQ ID NO: 274778 - DNA, 96 bp, Homo sapiens
cgtcaacagcctggtcaatttgtacctgcaggcctcctacacctacctctctctgatggctctgagagattcctctgcgaatctgtttttagctat

SEQ ID NO: 274779 - DNA, 75 bp, Homo sapiens
tggaggtggaggagtccaactcagaggacgaggcctccttcaagtccgagcccgcgggaggactcagactccagc

SEQ ID NO: 274780 - DNA, 89 bp, Homo sapiens
ggacggcccggatgagtacgataccgaagcgggctgtgtgccccttctccacccagagatcctgcccggcctgtacatcggcaacttca

SEQ ID NO: 274781 - DNA, 96 bp, Homo sapiens
ggtacagagtgttgagaagtttattcagaaatcactctgagaggagtgataccaatgaaaaaaggtcagttgattccagtgctaaaagggaaaaac

SEQ ID NO: 274782 - DNA, 100 bp, Homo sapiens
gtcgacggctatgacagttctgaactgataaatttcaaacggaagagagtggcagcatttagaaagaatctaattgaaatgtctgaactggaaataaaac

SEQ ID NO: 274783 - DNA, 88 bp, Homo sapiens
caccccgagtgggtggtcaaggagtcgggcatcctggtgctgggcgccattgctgagggtgggcaaacgcagaggcgggaacaaacta

SEQ ID NO: 274784 - DNA, 100 bp, Homo sapiens
agttgcaaagaatactcattgcagcagccttcctcattatcagaaattaaaggttttccctgatgaatttcacctccagactttgaatccttttcttcgg

SEQ ID NO: 274785 - DNA, 100 bp, Homo sapiens
tttgaattactttgttatgcagaaagtcagctgctggagtgtaataagtgccgaaacagctatcaccctgagtgcctgggaccaaactaccccaccaaac

SEQ ID NO: 274786 - DNA, 89 bp, Homo sapiens
aaaccgggaaaggagaggatcccggagccgccagcagggctccagcgggggagcggttgtctttgggggtgtggatagcagcctgtaca

SEQ ID NO: 274787 - DNA, 134 bp, Homo sapiens
cagccagccagtcagtgggtcccgcagtcgcccgcaaccggggcgaatcatggcggccgccaaggtatggcgactacccgaagctccctgaccgctcacagcatgagagagatccatggtatagctgggaccag

SEQ ID NO: 274788 - DNA, 100 bp, Homo sapiens
agactccacctgggatgttggctctggacaacatgctgtactttgccaagcaccaccaagatgcctacatccggcacgtgtggagtgagagcgaggactg

SEQ ID NO: 274789 - DNA, 101 bp, Homo sapiens
acccggtctggacacagaaagagaactctagaggacaaaatcccagtccttggcacaaactcaggaaatggaagccggagtctgttttttgtggggctgct

SEQ ID NO: 274790 - DNA, 75 bp, Homo sapiens
ggcctcccgtttctggctccgggctgagcttcctggagaagaggaagacccagacacttttgaaccccaaaaatt

SEQ ID NO: 274791 - DNA, 80 bp, Homo sapiens
agagttgaatgccagccaccagccatggagtgctgatggcagagattggtgaggatttggataaatctgatgtgtcctca

SEQ ID NO: 274792 - DNA, 51 bp, Homo sapiens
agctgcccaggcttcacggagcgtctcttgcatggcaccaagaatgttacc

SEQ ID NO: 274793 - DNA, 73 bp, Homo sapiens
tactggtcaaaaggtcaactaaaagcattgtttctagaacatgaggtgactctcctattccatctgtttcttc

SEQ ID NO: 274794 - DNA, 110 bp, Homo sapiens
tctgggggcgcaggccgcgggggagccgcctccagggtgctgctggtcatcgacgagccgcacaccgactggtggaagatggatgcctgaagtgtagactgctgctagct

SEQ ID NO: 274795 - DNA, 100 bp, Homo sapiens
cccagaggagcgtgcgcgggggctggcggcaggcatcgcgctctacgacaaggcgctaggctacgggcagcaggaaatggatcagacaatggctgccaat

SEQ ID NO: 274796 - DNA, 100 bp, Homo sapiens
ccgcccccaaaaggaaactgtcatcgataggaatacaataagagttccctatttcattgatttgaaaaaaccacaggatcaaggtttgaatcacacgtgt

SEQ ID NO: 274797 - DNA, 51 bp, Homo sapiens
aactgggatagattgcaccctggagagggtctcctcatgctgctacagaac

SEQ ID NO: 274798 - DNA, 50 bp, Homo sapiens
ctgagagagggaagtcgcctctgtgctcagttgtctgctggttctcagct

SEQ ID NO: 274799 - DNA, 74 bp, Homo sapiens
tgggccctccccccatggccaatggaaaacctggcgaccctaagtcagacaaagtgattccagttactcggtca

SEQ ID NO: 274800 - DNA, 82 bp, Homo sapiens
agcctcagttggaagcagccgatccagcctgcggagcctgtggggcagattttcagctgaactctcatctctcaacactggc

SEQ ID NO: 274801 - DNA, 90 bp, Homo sapiens
gcctgatctaacccctagaaacagagaaaggggacttcttggccttggaccttggaggaacaaatttccgggtcctgctggtccgtgttc

SEQ ID NO: 274802 - DNA, 86 bp, Homo sapiens
gaacaaattaaagaatattttggagcctttggagagttctttattggtgaaaacatgaatccagatggcatggttgctctattgga

SEQ ID NO: 274803 - DNA, 100 bp, Homo sapiens
ccacgtgcagacatctacaaccttcgatctcctgacgagaaaaaggtcactggtcagaacagcaagaagaaagtagctcttgaagacaaaagttaaaaac

SEQ ID NO: 274804 - DNA, 50 bp, Homo sapiens
cctgggtcgcttggaagaagccaagaaggcggtcaccttctccttactat

SEQ ID NO: 274805 - DNA, 98 bp, Homo sapiens
gatattgcgtgatcacctatatacttggagttggagacaggcacctggataaccttttgctaacaaaaacaggcaagagtacagcactgcatctgctc

SEQ ID NO: 274806 - DNA, 71 bp, Homo sapiens
aggatgcgccgctccactgtcggtagcaacaagcctgaagtgattcagaacatgaccgaattcaagcgtgg

SEQ ID NO: 274807 - DNA, 51 bp, Homo sapiens
gtggaacttctacaggaacggtgtacttttcccaacactggtgctcgtatc

SEQ ID NO: 274808 - DNA, 87 bp, Homo sapiens
caagaaaactgcacataactccgaaggctacaagatcaagctgcagagaccattgaagctctgcatgcagcaggcctgaaagtctgg

SEQ ID NO: 274809 - DNA, 51 bp, Homo sapiens
actgcatcatgcctacaagaaggtggtgttcccactgatgaagagcaggcg

SEQ ID NO: 274810 - DNA, 100 bp, Homo sapiens
cacaccttcctacagaacttgctcctgctctcctgtgcctccgaggcccccagctggaagtgccttgttgcctctgccctttgaagtcggaacaattcct

SEQ ID NO: 274811 - DNA, 120 bp, Homo sapiens
tggtgatgagatggtttctctcaaggactactgcaccagaatgaaggagaaccagaaacatatctattatatcacaggaaaggactcaaatgtcacagcatctcccacagcccctgcatg

SEQ ID NO: 274812 - DNA, 82 bp, Homo sapiens
aaaggcgcaagtcgagaggaaactgttgtgcctcttcatattggcgatcctgttgtgcctatgaaaggaggttccctacatg

SEQ ID NO: 274813 - DNA, 88 bp, Homo sapiens
ctgctgcaaggaactgatagcttatggttctccattgtgatgaaagcacatggtacaggtctatgaaaattatcctacttatgattta

SEQ ID NO: 274814 - DNA, 90 bp, Homo sapiens
cccagctattgctgcagcatttgccaaggagacatccctcttaggagtacttgattcttcagaaaacctccaaagtagatgtggactcaa

SEQ ID NO: 274815 - DNA, 83 bp, Homo sapiens
agaccctggagcctcagttggaagcagccgatccagcctgcggagcctgtggggcaggttgcttcatgtgcgaaatggaaact

SEQ ID NO: 274816 - DNA, 96 bp, Homo sapiens
gagaacgcgagaagggaagatgggggccgtcctgaggagcctcctggcctgcagcttctgtgtgctcctgagagatgcccattcaccagaatctca

SEQ ID NO: 274817 - DNA, 100 bp, Homo sapiens
ctggtcatactaaagaacacatctggaagatggggcattctcttctcccaccctcgggactttaccccagtgtgcaccacagagcttggcagagctgcaa

SEQ ID NO: 274818 - DNA, 117 bp, Homo sapiens
agtgggacaatatcctctgtggagaacacccccccatggaggcgaggatatgggccctcacattttccaaacctgtccatctgctaactattttgactgcagagccatgtccattgg

SEQ ID NO: 274819 - DNA, 83 bp, Homo sapiens
gcgcgctgtggtgcagccgccgcgacggcggcctccagctccgacccgcgtcagcctcgagtttgaccagcagcaggggtcgg

SEQ ID NO: 274820 - DNA, 100 bp, Homo sapiens
accattgctggtgaaatagaatcaaaggctgcaaacctcaataatttggtagtggaagcctatcaggcacagatagatcattatctaggacttgcaaata

SEQ ID NO: 274821 - DNA, 90 bp, Homo sapiens
ccctatctcaagaacttgttaacctccggggagagctagtgtcccaaagtttactcaagactacccaggaacctcttgcccgagatcctg

SEQ ID NO: 274822 - DNA, 100 bp, Homo sapiens
cggcggccgaagacactgcgactccggagacagcccaaatatcctcggaagagcgctcccaggagaaacaagtgatggcatcagctgagaagggaaggaa

SEQ ID NO: 274823 - DNA, 98 bp, Homo sapiens
ttctagcaaatgcctgcaatggactagctctgctacagaacaccaagacatatctgaagagatggattaagaatgctttggattaaggattgtggagc

SEQ ID NO: 274824 - DNA, 100 bp, Homo sapiens
gggcgcgtatgatgggaaatttgagaaaaccatatctggtcacaagctggccgctacctgtctgaggaacccgagccctacctggcagtctacctgcact

SEQ ID NO: 274825 - DNA, 151 bp, Homo sapiens
aaggtgactctctggatggaccagaatacgaggaggaagaggtggccataccgttgaccgctcctccaactaaccactacaagtggaccttctagtgcagttgttcctaatacctcatctcggaaaaagaatataactagcaaaacagaaa

SEQ ID NO: 274826 - DNA, 82 bp, Homo sapiens
ctggaatatttagcaaggattcaaggctttcagaccactaaggcttttcttcctacgatgctggagattaatcatggtcata

SEQ ID NO: 274827 - DNA, 100 bp, Homo sapiens
cgccgccgccgccatgaacaactcgggcgccgacgagatcgggtactccaaagattcaggtttactcacgtcatccagcagagaatggaaagtcaaattt

SEQ ID NO: 274828 - DNA, 90 bp, Homo sapiens
caacatggcggcgcccagtggcgtccacctgctcgtccgcagaggaattgaatgatctggcacgggaccctccagcacagtgttcagcag

SEQ ID NO: 274829 - DNA, 100 bp, Homo sapiens
gagagtaccagccagaaggagatggacaaggtccgagctatacctgtggacattggtttctccattgaagagctggaggacctttacatggtgtttaagg

SEQ ID NO: 274830 - DNA, 75 bp, Homo sapiens
aataaaataaccgtccccgccagtcagaagttgaggttctctacttaaaagacaatgactactgatgaaggtgcc

SEQ ID NO: 274831 - DNA, 75 bp, Homo sapiens
ggcaaagaacaagagaagacctcagatgtgaagtccattaaaggtggagccgccaccaaaatgcagattttcgtg

SEQ ID NO: 274832 - DNA, 75 bp, Homo sapiens
gcacaagggcccaactggaattccacttacgggtaagaatgattgatgttggctgatattggagtgctcattcac

SEQ ID NO: 274833 - DNA, 100 bp, Homo sapiens
ccccagcatgctggcctacacggaggactcgctgcagtacaaagtttgctagtaatagtgttagaagcattccactttgaccacaaaactcttgaagaac

SEQ ID NO: 274834 - DNA, 51 bp, Homo sapiens
acccaggaacaagtatctgacagacctggaatggccaaatatcaaggtgaa

SEQ ID NO: 274835 - DNA, 75 bp, Homo sapiens
catgatagtccaggcaaaaggaagaggacgtgggaggaaagaaacaggtgagaagccctaccactgcaactggga

SEQ ID NO: 274836 - DNA, 82 bp, Homo sapiens
ctcctggtgaagaaagcaaacagttggctggctcctctggctgatggcatgttgaggtacatgggccagcggcagcgagggc

SEQ ID NO: 274837 - DNA, 83 bp, Homo sapiens
gtttctgctgaccgcgggccctgccctgggctggaacgaccctgagatcctacagtaaggaattgtttgaagaagttatttca

SEQ ID NO: 274838 - DNA, 100 bp, Homo sapiens
ggagtcggcggctcagttgtccatgaccctgaaggtccaggagtacccgaccctcaaggaatgtatcctgtcaggtataatgtcagtgaatggcaagaaa

SEQ ID NO: 274839 - DNA, 75 bp, Homo sapiens
aacgctgcctttgctttaaaacagtattacttgcgacctccacaatctaaattgcttcgtgaagataagaaccat

SEQ ID NO: 274840 - DNA, 106 bp, Homo sapiens
ggctcaccagggccaccaactctccaccctagacgaagcctttgaagaattaagaggaacccatattgaaatgtctattggaattattttgggaatttcaactatg

SEQ ID NO: 274841 - DNA, 75 bp, Homo sapiens
tgtgaagaagaatttcgatctccgccctggggtcattgtcaggtcacaaacatgtcagacaaaagtgaattaaag

SEQ ID NO: 274842 - DNA, 76 bp, Homo sapiens
ggagctggacggcgagcgcgagcggcgcgagaaaaaactaattctgaagcaagcccttatagttgtgctgcagtgg

SEQ ID NO: 274843 - DNA, 100 bp, Homo sapiens
ccctcgttttcgagatcaggcctgaccgggataagctccagaacaactctgctcatggtgattacatgcaaaataacgagagcagcttaatagagcaagc

SEQ ID NO: 274844 - DNA, 99 bp, Homo sapiens
aacaactctcattattaccatatggcccatggaaaagattttgcatctagaggaattgaaaagtgtgtctgtaattacctgggcaccgtgcaagagcac

SEQ ID NO: 274845 - DNA, 60 bp, Homo sapiens
caagatcatgggcaaaggacagatccaggtcgccactgggacactgtgaaccaggagtga

SEQ ID NO: 274846 - DNA, 83 bp, Homo sapiens
ctactacatggacgtctggggcaaagggaccacggtcaccgtctcctcaggggctttgaccacgacctttgaagagcttcatt

SEQ ID NO: 274847 - DNA, 74 bp, Homo sapiens
gaaacattgtcacaggggatgatattcagacacaggtatggggaggatgtcaggcaggaccagcagcagctcct

SEQ ID NO: 274848 - DNA, 100 bp, Homo sapiens
tggccatccaggagatcatgtcgctgaccagcccgtctgccccgcccacatctagaacgtgtaccagatccgcagagctcgtcgggacgtttgtcagccc

SEQ ID NO: 274849 - DNA, 88 bp, Homo sapiens
gaccctcacagaagctgctgaaattcctgaataagcactacaatctggagaccacagtcccacaggtctcggcgcggaagatggccgg

SEQ ID NO: 274850 - DNA, 75 bp, Homo sapiens
gcaccgaggagcgcgccgcgcccttctccctggagtaccgagtcttcctcacatcagaagagctaacaattgctg

SEQ ID NO: 274851 - DNA, 129 bp, Homo sapiens
ccggcgtcagaaggagctcctgtgcaagatggagagggagaagagcattgagatcgagaacctgcagaccaggtggtgtgcagatcctgccttactaaactgtttgaagcaaaaaaacaccgtggtcag

SEQ ID NO: 274852 - DNA, 88 bp, Homo sapiens
gtggatatggtggcagtggggatggctataatggatttggtaatgatggaagcaaaatgtggattcagcaaacaaattctggaaatac

SEQ ID NO: 274853 - DNA, 100 bp, Homo sapiens
ctttacataaaaatggctgagtgtcttgtcatgctagcactgcattaagtgatgcatacagatcatggaagggaagtggttgctgtgtatgttactggtg

SEQ ID NO: 274854 - DNA, 51 bp, Homo sapiens
aatcccagcgctttgggaggctaaggcgggcggatcacctgaggtcaggag

SEQ ID NO: 274855 - DNA, 98 bp, Homo sapiens
gaggctcgggataacgcctgcaacgacatggcatcatggcagaacaggatgtggaaaacgatcttttggattacgatgaagaggaagagccccaggct

SEQ ID NO: 274856 - DNA, 100 bp, Homo sapiens
tcacatggtgtgggccgacatgaagagctgccagatccaacagacaatgcaggaatcacatgaacctgtccatccacagataaagtggtaaagaaactgc

SEQ ID NO: 274857 - DNA, 98 bp, Homo sapiens
cccgactcgccgcccggagaccccgaggctccaacgagcccatgcatgatgactatgacttaagacaagaacagttgaacaaagcttctcttctctcg

SEQ ID NO: 274858 - DNA, 75 bp, Homo sapiens
aatagtggtttgaaaggaggtgttcatttaacaaaagactacaaaccactgagtaagcaaaaatcagaggaagag

SEQ ID NO: 274859 - DNA, 83 bp, Homo sapiens
agaaaacagcaggcacccaagcgggcggcaggaggaggactgagcttatctgactccagagctttcaggagggaagaaagatg

SEQ ID NO: 274860 - DNA, 99 bp, Homo sapiens
agcggagccctgggctggggcaggagccgacgctctgctgttgcccgtattcaggagttcttcagacggagaaaagaaaggaaagaaatggaagaattg

SEQ ID NO: 274861 - DNA, 76 bp, Homo sapiens
aaacatgtactacagccagtcttctatgtttccacatcggtcagaaaaagatgcatttgtaaaggatgttcatgaa

SEQ ID NO: 274862 - DNA, 116 bp, Homo sapiens
gctggggtcgcgctggctcggactccgctccccgccccgccgcggccatggaggacgagcggaaaaacggagcctacggtctctaattaacagaagatggcaaagcccagccacag

SEQ ID NO: 274863 - DNA, 100 bp, Homo sapiens
agccttgaggacctactcacagataggaattgaagatgtatcctccactcctcgctggccaccatcctgctgcccaacagaagaagctcttctgtctccg

SEQ ID NO: 274864 - DNA, 100 bp, Homo sapiens
cactaacatttttcggaatctggagtccacccgttgtttgctggctgggcttttccagtgtcagaaagaaggcattctgaaggcaaatcctgtttagacc

SEQ ID NO: 274865 - DNA, 90 bp, Homo sapiens
aaggaaggcaagcctgcctgcttctgcatcgacagatagccgtcttcagcttgagccccatcactagccctggtacctgacagtgtaaag

SEQ ID NO: 274866 - DNA, 100 bp, Homo sapiens
atgcagcagatatgcctgctaacatggataagcatgccctgaaaaagtatcgtcgagaagcctatcatcggctggagcattggatttgctaaaggagctt

SEQ ID NO: 274867 - DNA, 90 bp, Homo sapiens
cttgtgtgcggaactcctcggaaccatgcatctgcaggaagccctaggactgcctgctgggaggggggatgagaatcctgccggaactgt

SEQ ID NO: 274868 - DNA, 98 bp, Homo sapiens
ggtgatccgcatgtgggcagatgagggcagtcgaaacagccgatttcagatgctcttcacatcctttcaagaacactacaagataaagttcgagaaac

SEQ ID NO: 274869 - DNA, 100 bp, Homo sapiens
ttcacagatgatacctttgatccagaacttgcagcaacaatagatgacaagagcacctcaaaggcagcagcctcaaggagcagccatggccccagacttg

SEQ ID NO: 274870 - DNA, 78 bp, Homo sapiens
aggaacagggcagacgttagcgtgagtgatcactctcaatcccggatcatggaagggaagtggttgctgtgtatgtta

SEQ ID NO: 274871 - DNA, 89 bp, Homo sapiens
ggaaacctcaagatataatcttcacttccgggggcactgagattcaattagcagagcctcacagacaatggccaaatgtgtcaaagctg

SEQ ID NO: 274872 - DNA, 100 bp, Homo sapiens
caggactccaaaatggcgtcagttggtgagtgtccggccccaggctgaccccgcactacatctacccaccagccatcgtgcagcccagcgtggtgatccc

SEQ ID NO: 274873 - DNA, 82 bp, Homo sapiens
tgaggcctccccagccatgtggaactaacttccaggtcctgagtcagagacacctggtgagagactacgggagggacagaca

SEQ ID NO: 274874 - DNA, 75 bp, Homo sapiens
agacccggaaggcttcaaaggctgtcgcaaggaggaaggagagaagtggatgggccctatacctccagccgtgaa

SEQ ID NO: 274875 - DNA, 87 bp, Homo sapiens
cggcgggaggttcggttgtcgcccgttggccgcgcggcgccgcgctcggcggccgccattgcaggcagcgctgttcataagatgatt

SEQ ID NO: 274876 - DNA, 83 bp, Homo sapiens
gggaagtcgcctctgtgctcgtgagtgcatggggtataagcatgaagcgtgccagctctctgaatgtccttaacgtgggtggc

SEQ ID NO: 274877 - DNA, 99 bp, Homo sapiens
ttcacgctggcgcgagccccgtcctccttcgccgccgcgcacaaccgcacgtgcaggaaacccagcgtttgctggcagaaccagttcctggcatcaaag

SEQ ID NO: 274878 - DNA, 80 bp, Homo sapiens
gcccacagctcctggagccccacaggggtgagcccctccagactccgaataggagatcaagagtttgattcattgcctgc

SEQ ID NO: 274879 - DNA, 75 bp, Homo sapiens
ttcagatgggatctttccggatcaatccagatggcagccagtcagtggtggagattcatgttacatgtaaagctg

SEQ ID NO: 274880 - DNA, 83 bp, Homo sapiens
gagatattctactccatctcattcattgtacagaatcctcactatggatgggctcattgaggacattaagcatcggcggtatt

SEQ ID NO: 274881 - DNA, 100 bp, Homo sapiens
tatgaccacactacagcctgtacacaacaagacagtttatcttgtccatggggatcctaagcacttcaagtcagagaagacaggacggggacagttgagg

SEQ ID NO: 274882 - DNA, 100 bp, Homo sapiens
gcgctgtcgcaagagaaaacttgactgtatacagaatcttgaatcagaaattgagaagctgcgccgcgcggtgaggttctctagtccacgctcgcagcca

SEQ ID NO: 274883 - DNA, 100 bp, Homo sapiens
ttctctgcggggccgtgcttggcagtacctgtcaggaggcaaggtgaagttacagcagaaccctggaaagtttgacgtgtgttaccgagtggaatgggcc

SEQ ID NO: 274884 - DNA, 140 bp, Homo sapiens
cgtgggcacggaccaattcgggaacaaatactactacatcccgcagtacaagaactggagagaaactatgttccaacttcctgtcaacaatcttggcagtttaagaaaagcccggaaaactgtgaaaaaaatacttagtg

SEQ ID NO: 274885 - DNA, 82 bp, Homo sapiens
ggaggcgtcgcgggagcctttggggcaccacagagatgcggcagaaaaatatggctcaggagactaaccagaccccggggcc

SEQ ID NO: 274886 - DNA, 100 bp, Homo sapiens
ctgacgctctgggtgaagaatggaagagcattgaatgaaatgtggaaatgtcaaaatctgctccgacatcaagtaaaggatttgcttgacttgattaagc

SEQ ID NO: 274887 - DNA, 90 bp, Homo sapiens
aaaaaggaagcatgttggacgatatctaatattacagctggaaatagggcacagatccaggtgatctttgcagagctgtttcaacttcca

SEQ ID NO: 274888 - DNA, 73 bp, Homo sapiens
accctatcgacgcagcgtccccacttgtccatgaaactgggaggcgaccgtgttagctgccagttcctgacag

SEQ ID NO: 274889 - DNA, 75 bp, Homo sapiens
cagaagagtgggatcattgacctaaaggccaccccagcagacatgtttgccaaggcctttcgggtcaagtccaac

SEQ ID NO: 274890 - DNA, 73 bp, Homo sapiens
ttaaaagaaactgtgaagcaaattcgtcagatcaaagaacaaggttgatgaaaagcccagaaccttgatgaca

SEQ ID NO: 274891 - DNA, 83 bp, Homo sapiens
tgcagggatgcctggaatagaagagaatgacctagcaaaagttgatgatcttccccctgcttggacttaaagtatgatgttga

SEQ ID NO: 274892 - DNA, 75 bp, Homo sapiens
agcaccgcagcctggtgcagatcatctacgacgagaaccgggtgatgtgtccaatctagatcccaacttctcatt

SEQ ID NO: 274893 - DNA, 75 bp, Homo sapiens
gtgctgaagaaatttgtgtggagcgaggaaaggtgtgctgtgcctgaggccaggagccaagccgccatggcctac

SEQ ID NO: 274894 - DNA, 96 bp, Homo sapiens
tttgggctagaagccatggacgccttcacccgcttcaccaaccagacccagggccgggaccgactcttcagcacatttctagccgaaggcataaag

SEQ ID NO: 274895 - DNA, 74 bp, Homo sapiens
agggtgggagagagccagctcctcctgcagagcccccagggggcagtacccaaaggaaacgctacgaaagaata

SEQ ID NO: 274896 - DNA, 76 bp, Homo sapiens
cgccggtgtcctggcctcttcctcagaggcaaaggcccattgaaaaatacatctgatgtcattaatgctgccaaga

SEQ ID NO: 274897 - DNA, 75 bp, Homo sapiens
ggagggcgccagctacttcatcgagtggagtgtgttactcttggggctggaatgagcatggcatgtgcggagatg

SEQ ID NO: 274898 - DNA, 100 bp, Homo sapiens
caccaatggaagcagctggcttcactgctcaggtaaagaatctcatttggacacattgagtcgggcacaactgacccaacttttcttagcctcagtcctg

SEQ ID NO: 274899 - DNA, 50 bp, Homo sapiens
ctcggtttcctggacccattccgactcagacaaatcttcctattttcaag

SEQ ID NO: 274900 - DNA, 101 bp, Homo sapiens
ggccgccctgggagcgagcggaggagcaggcgccggagtgccggtggtggtgtgcacattgagccccggtatagacagttcccccagctgaccagatccca

SEQ ID NO: 274901 - DNA, 75 bp, Homo sapiens
catgaccactagacccacagctgttaaagcaacagttggctggggaacagaccagggaattggtggatttggaga

SEQ ID NO: 274902 - DNA, 100 bp, Homo sapiens
ctgagctgtaacaaagcactctgtgctagtgatgtgagcaaatgcctcattcagacttaattcagtgcacaaatgagatgaatgtgaacatcccacagtt

SEQ ID NO: 274903 - DNA, 82 bp, Homo sapiens
gtcagggacacggggtgctgcgctgcgccgacggctccacctacaaggaaacatactggggagaaaccctttgagtgtccca

SEQ ID NO: 274904 - DNA, 50 bp, Homo sapiens
ttgatggctcaggaactaaatgtggccagactccactgatgatagctgcc

SEQ ID NO: 274905 - DNA, 101 bp, Homo sapiens
tattttattcctcttcctatccaatccctgccttttgagtccaggtgggaaaatggagctgatagtatcctggatcttggattagtagactcctcagaaaa

SEQ ID NO: 274906 - DNA, 100 bp, Homo sapiens
ctttgagtacgtcaagaatgaggacctggagaagatcggcatgggtcggcctgtttgctggcctagacctgaactcttcagataatcagagtggaggaag

SEQ ID NO: 274907 - DNA, 98 bp, Homo sapiens
cccgtttctggctccgggctgagcttcctggagaagaggaagccacacccactcgcccgggtctatggccacggtcggagagtggtcctgtgtgcgct

SEQ ID NO: 274908 - DNA, 100 bp, Homo sapiens
ataaagaatggcccttgtggataagcacaaagtcaagagacagcgattggacagaatttgtgaagatgaagatctccttcaacgacaaaagcctgcagac

SEQ ID NO: 274909 - DNA, 100 bp, Homo sapiens
taagggtgccttttaggagaaataaagagttaagtgggcagaccaacatccacctcagcaaaaacttcttcctgacgaatcgcgccagggagcgctcaga

SEQ ID NO: 274910 - DNA, 83 bp, Homo sapiens
gaagaattcttaaagtttcaaaattggctcctggctaaatacaaaagcttgcaatgggacaaagtactgaggctggaggaggt

SEQ ID NO: 274911 - DNA, 83 bp, Homo sapiens
agcaggaggaggtggcggcggcgggaagatgttaacacagaaatctgcctcctgggccatgccgcttctaaggcctgtttctt

SEQ ID NO: 274912 - DNA, 82 bp, Homo sapiens
cggaaatgtccgaaggccgcagtacttgaccctgtattttgggagtcgaacggacgcgagcccagcattgacctgctgcagg

SEQ ID NO: 274913 - DNA, 100 bp, Homo sapiens
ggtctgaaggtgtcgggacctcttcatctgagagcactcatccagaaggccctgaggaagtgtcgtgtgggagccaatgggagatgggaagaaaatcatt

SEQ ID NO: 274914 - DNA, 100 bp, Homo sapiens
aagacttattataaatgaagatctggacagtggcacacagataccgtttattaaaagagctgtggctgtccttaaaattctagtcagggcagtgattgat

SEQ ID NO: 274915 - DNA, 82 bp, Homo sapiens
aaagagaaaaggcaacatcctgtcacaggccatgctctggcaaaaactgtcacaccatgtctgaccggaaggcagtgatcaa

SEQ ID NO: 274916 - DNA, 100 bp, Homo sapiens
agtccctaaaaatcacgagttcaggcgtctgagacttggtgggaacggaccttcctcttaggtggtttttccccatcatcggccacatgggcatctgcac

SEQ ID NO: 274917 - DNA, 99 bp, Homo sapiens
gacagaacatttacttaacacatcatgaaggctagtttggatgtggaggggaatagactccatctatccatatgaggccagctcagtggagcagctgcg

SEQ ID NO: 274918 - DNA, 80 bp, Homo sapiens
cgccttttgccacctttccctttatttccggagatcttcgtgaagactctgactggtaagaccatcaccctcgaggttga

SEQ ID NO: 274919 - DNA, 74 bp, Homo sapiens
tctctgcctcctgtggacaaaaaaagaggtctgcggggtttccgagaggctcgccgggatttctggcggggggc

SEQ ID NO: 274920 - DNA, 50 bp, Homo sapiens
aaccttacaaatgtgacagatatcatcagatgggactgtctagttgcagg

SEQ ID NO: 274921 - DNA, 100 bp, Homo sapiens
agcggagcgaacccgagagcgtggagcgggctgggccagattttggtttcagtaacctcttcactcctgggcagctgctgaagacctggtgtggcagccc

SEQ ID NO: 274922 - DNA, 74 bp, Homo sapiens
gcctacgcagagctcatcgtccttgggcatcttgacccagccgaaaaagttgaagatgctcaccccaagttatg

SEQ ID NO: 274923 - DNA, 100 bp, Homo sapiens
gagttcagtgactgctattgaaccaccaaaagtccattatgaaactgcccgtgccccgcatcatggtgcagtcagccagcccggacatcagggtgaccag

SEQ ID NO: 274924 - DNA, 100 bp, Homo sapiens
caggaccctaacgacaggcgcctccggcccatttacgtctcgtttcctctcagtccatccacccttcatggggccagagccctctctccagaatctgagc

SEQ ID NO: 274925 - DNA, 74 bp, Homo sapiens
tgcccacggaggaagagtgggagtttgccgcccgagggggcttgaagggccacatccacgtcctccgagcctac

SEQ ID NO: 274926 - DNA, 80 bp, Homo sapiens
tttcagttcgccgatgggaaacccggagaccaaatccttgacttgctacatttgtgatgaacaaggaagagaaagcaaag

SEQ ID NO: 274927 - DNA, 75 bp, Homo sapiens
gcttacattttcagccatcagttttagattttggaatacactcccgattctcctgaaggggacgtccgatgatga

SEQ ID NO: 274928 - DNA, 83 bp, Homo sapiens
cagacacggccacgtccacctgagtgccaagatcaccattgctgcctacctgcccctcaagattcaacctagaatgacactga

SEQ ID NO: 274929 - DNA, 96 bp, Homo sapiens
cgtcgccagcggagcgaacccgagagcgtggagcgggctgggccagtttttgaaatcatgaatcctgtttatagtcctggatcttctggggttccc

SEQ ID NO: 274930 - DNA, 75 bp, Homo sapiens
gcaggggtaccttcgggaatctgacttggatgttgtgggtgatggtatgcagtgtcctccttcacctttgctttt

SEQ ID NO: 274931 - DNA, 78 bp, Homo sapiens
tggttgttccgttgcgagctgcagctgcgatctctgtggtaggcccagggggattcccgaagtcttccgttttctgag

SEQ ID NO: 274932 - DNA, 90 bp, Homo sapiens
tgcagagtcaaaacagcagcgcgggcaaccggggaccccggccactggagcaggtcacctgttacaagtgcatcgacagcgaggcacggg

SEQ ID NO: 274933 - DNA, 96 bp, Homo sapiens
agagacttcaaccaagtggttcgatttgagacggtcaatccaaattctacctcttcatggtttacagaatcaggacgaggttagccagccgctggc

SEQ ID NO: 274934 - DNA, 130 bp, Homo sapiens
aaggaaagcaccatgacgtccatccatttcgtggttcacccgctgccgggcaccgaggaccagctcaatgacagttacaatgccatcaagtcatataaaacagaaggaagagctgaacgtttagaggcaa

SEQ ID NO: 274935 - DNA, 100 bp, Homo sapiens
tttcagaactacttagtgactacattcgtcttattgctgcagtgaaagtgtttaagatagaagtgctaatgaatggaagaaaacattttgttgaaaagag

SEQ ID NO: 274936 - DNA, 100 bp, Homo sapiens
cgactggccgccaggcaggaggatgcccccatgatcgaaccacttgtccctgaagagtgcctccacttctcattcagagaattcagtgcatacaaaatca

SEQ ID NO: 274937 - DNA, 89 bp, Homo sapiens
gctggccgaagcgaagggcgacgccaagccggagggagagccttatagatgcaagtgaagacagccagctagaagctgccatcagagcc

SEQ ID NO: 274938 - DNA, 50 bp, Homo sapiens
cgtctcactggagagtccgttcagcttatgtccctgatgccaaaaatgca

SEQ ID NO: 274939 - DNA, 98 bp, Homo sapiens
tccactcgctggcgtccgggccgctggtgatctccggtagcactcgggccggcggacagtgagggcgcgcttatgtccctgatgccaaaaatgcacct

SEQ ID NO: 274940 - DNA, 137 bp, Homo sapiens
cctcgccggggaccgagcgcgctcgctccggcgccggcctcgcctcctcgcagcagcgccatggtgctggagaatctggtaaaagcaccattgtgaagcagatgaggatcctgcatgttaatgggtttaatggagag

SEQ ID NO: 274941 - DNA, 75 bp, Homo sapiens
gcttccgtttgttggtggaggaggtggcaggcctcggcggtgtgttccagagaacaagccttcagacatttgcta

SEQ ID NO: 274942 - DNA, 100 bp, Homo sapiens
gcgggctccgcgcccggccggacccgggcccgaggctgttactgaggcggagacacgggtgatgattggctttctggggagagaggaagtcctgtgattg

SEQ ID NO: 274943 - DNA, 100 bp, Homo sapiens
gagatcctaaaagtcgtggcagaaaagatccagtatgcagaagaggatctggctctggtggccatcacattctctggggctgtttttgcagcagtgttgc

SEQ ID NO: 274944 - DNA, 100 bp, Homo sapiens
cgacgagcaagaagcagcccaaagtcgaatgattcagacttgcaagttcgagcatcagacaagcggatagcttgtgatgaagaattctcagattctgagg

SEQ ID NO: 274945 - DNA, 100 bp, Homo sapiens
cccaacctccctcctggggtcccgccgttgttgcctaatccgtatattatggctccagggctgttacatgcctacccggctgttcggctcttgaatccca

SEQ ID NO: 274946 - DNA, 99 bp, Homo sapiens
tagtctcagaactgttccttcagccaaagaaacaagccgtggaataggtgtatcaagtaatggtgcaaagcctgaaggtcatgtaaaagttgttcaata

SEQ ID NO: 274947 - DNA, 75 bp, Homo sapiens
gtataacatggatcagttcacgcctgtgaagatagaaggatatgaagatcagcatcccagccatcactcttccac

SEQ ID NO: 274948 - DNA, 78 bp, Homo sapiens
ggaaggatgcttcagctcatcttaggctgtgctgtgaactgtgaacagaagcaagggctggggaaacaaagggaagat

SEQ ID NO: 274949 - DNA, 75 bp, Homo sapiens
gaaaatcatattatagatggagtaaaggtgcagataaaactctagactccagtgcagaggatcatactttgagtg

SEQ ID NO: 274950 - DNA, 90 bp, Homo sapiens
tcaagaaccccaggacaagtgttatcgcttatcagctcgttgggatttatgtgacaagccgaggcggtgagccgggcaggaggaaggagc

SEQ ID NO: 274951 - DNA, 76 bp, Homo sapiens
agtacaccgtggtgacattgtatcattggtggtaagaaggtggatggctctgtaaatgcctatgccataaatgtct

SEQ ID NO: 274952 - DNA, 50 bp, Homo sapiens
gacagcaacagctcggcgggctggaagggtctcctcatgctgctacagaa

SEQ ID NO: 274953 - DNA, 100 bp, Homo sapiens
tggtgaaacgcctgtacacgttggatgggaaacagggaggaatgatcaattggaatcgtctttttcctcctttacgtcagcgacaaaacgtaaactatca

SEQ ID NO: 274954 - DNA, 90 bp, Homo sapiens
tcgggctgtcgctcgtctacttcctcagcagcaccttcaagcaggttacgactatggctatgtctgcgtggagttttcactcttggaaga

SEQ ID NO: 274955 - DNA, 96 bp, Homo sapiens
ctcagcagcccccaccacggccggaccgaaggtgcggcggcggaggggagccagggcgccccagcagggcctctcttgtgatacctccgtgccaaa

SEQ ID NO: 274956 - DNA, 95 bp, Homo sapiens
gctcaagaaccggcacggcctcgtgcccttcgccttcgtgcgcttcgaggacccccgcacctttggggagttgaagacggtccgcctgccaaaga

SEQ ID NO: 274957 - DNA, 75 bp, Homo sapiens
cgcctactgcacacctctcaatgcagctttacagatgcatggtcatggaggctatgattctgattttagtgatga

SEQ ID NO: 274958 - DNA, 50 bp, Homo sapiens
cctggacggctccctccacgtcccgagcatcatgagagcatcagggaccc

SEQ ID NO: 274959 - DNA, 75 bp, Homo sapiens
ctgttccaatcgctcctgtttgtcttctgctttggcccagataagtttataccatggatagcacaaaggagaagt

SEQ ID NO: 274960 - DNA, 75 bp, Homo sapiens
atcttcgggatcttcgacgggcacgggggagagattgggctaatggatactacagacaacagagaaaacttgttg

SEQ ID NO: 274961 - DNA, 100 bp, Homo sapiens
ggcggatggaggtcagcggtggtgctcgctgcataagcatggattcctggttcattcttgttctgctcggcagtggtctgatatgtgtcagtgccaacaa

SEQ ID NO: 274962 - DNA, 100 bp, Homo sapiens
cctgcgaccgccctgcgcttcgtgcaccggggcggtccgttgccaaagccaggttgatactgcctctccaagcccaatggaaacatctggatgtgcccct

SEQ ID NO: 274963 - DNA, 75 bp, Homo sapiens
ttgaaacacaaatggtttttggcaatggtggcttgctatccgggaaatggaacaggttatgttcgccacgtggac

SEQ ID NO: 274964 - DNA, 75 bp, Homo sapiens
caggcttccatgcagcctgccttaccggcagaggtgatcatgaactaccatgtcggggagacggtgctgtccttg

SEQ ID NO: 274965 - DNA, 100 bp, Homo sapiens
gcgctgccggagctgtcgacccggcctggcgccggactaggtagagacagattctctggaagtaccttctcaaggccagtgtagagctcccaatcaccca

SEQ ID NO: 274966 - DNA, 75 bp, Homo sapiens
ggaaatcaagtcgtaaaaacaggtcaagtgcctccttttagaggactcagaagaagaagaaggtgacttatgtag

SEQ ID NO: 274967 - DNA, 75 bp, Homo sapiens
aaaagacagtcctcgtcagcactgactttcagctatggaatcggtgcagtagacattgttgcaatcatgatcggc

SEQ ID NO: 274968 - DNA, 98 bp, Homo sapiens
aagagcaagatcaccgtgacatccgaggtgcctttctccaaaaggtatgaaaatgaaagtcttcagaatggaaggaagtcaactgaatttccaagaaa

SEQ ID NO: 274969 - DNA, 98 bp, Homo sapiens
cccctaggagtgcaccacccccggagcccccctcaacacggaccgcgcccgccgggcacacaagaatggtcactggaagcagagactttcaaggaaca

SEQ ID NO: 274970 - DNA, 83 bp, Homo sapiens
gtcgtcagcgccgaggctgggctgaggcgccgcggtaccatgaggcgccggttgaagatgacagcgatgcagagacctatgga

SEQ ID NO: 274971 - DNA, 101 bp, Homo sapiens
attcgagagtatttagaattcaacaaatataagtatacagcatctgtcctcatagcagatctccagtctggctcagctgccagtggtgggagtggtgccgg

SEQ ID NO: 274972 - DNA, 88 bp, Homo sapiens
gcggcgacggccacaggggcggcgacggcgcagtgcgaagcgaaacaggttaactccgttgactgccaaaatagcatccccaacgtgc

SEQ ID NO: 274973 - DNA, 50 bp, Homo sapiens
cgacaggcggcgcgggcggcgatgggactgtctagttgcaggaaaacaag

SEQ ID NO: 274974 - DNA, 100 bp, Homo sapiens
tgctccgggacaacatgctgcggggcacagagagctggcggtcaccatggcaatgcgggagctggtggaggccgaatgcgggggtgccaacccgctcatg

SEQ ID NO: 274975 - DNA, 132 bp, Homo sapiens
caacaacctctcctcttcgtctccgccatcagctcggcagtcgcgaagcagcaaccatgacaatgcagatcttcgtgaagactctgactggtaagaccatcaccctcgaggttgagcccagtgacaccatcg

SEQ ID NO: 274976 - DNA, 101 bp, Homo sapiens
aaattcatctgtcttctagcaaagcccaactgcagctctctagaacaggaggatttcatccctctacttcagatagtcgtgcaagcactgcagtgttccca

SEQ ID NO: 274977 - DNA, 101 bp, Homo sapiens
gcgccgggcaggcgggacatggaggtggtggacgagacggaggcgctgcagcgcttcttcgaaggtcccccacggcccttcaggatgaaagctgcggtgct

SEQ ID NO: 274978 - DNA, 75 bp, Homo sapiens
gaggcaccgctggaacactaatgagggcaatttgcatatttctccaaagaaccatccagaacctgagcagcctgt

SEQ ID NO: 274979 - DNA, 82 bp, Homo sapiens
cagccatgtccgaggagaagcccaagactagacgcttgaagcaaagctgccatcccagaagacgacatgctctcagcaaccc

SEQ ID NO: 274980 - DNA, 100 bp, Homo sapiens
tcggatttcgacagtaacccgtttgccgacccggatctcaacaatcccttcaagaactcctctttcctaaaatggagtcgagtaaaaagatggactctcc

SEQ ID NO: 274981 - DNA, 74 bp, Homo sapiens
tcctgttcagagcaaccagctaatgaaaggttatttgtcaatgaagaaaatgttaatgagtttcttgaagaggt

SEQ ID NO: 274982 - DNA, 75 bp, Homo sapiens
aaaaaatgtggtcagtgaacctatcgaaggacatgaagactaccacatgatgaggtcagaggtcaactccgctca

SEQ ID NO: 274983 - DNA, 82 bp, Homo sapiens
cctaactcctgaccccacgccctgggaacccccgcaacatgggcacggtctcggcgcggaagatggccggcggcgtggacgg

SEQ ID NO: 274984 - DNA, 100 bp, Homo sapiens
agacacccgtgggtgatgcagacgcaagcctggccaccacggcactttacttcacatactcagccctcgaggaggaaatggagcgcaacaaggaccatcc

SEQ ID NO: 274985 - DNA, 99 bp, Homo sapiens
ctagaatacagacagttcctgctctaagaggccatctgtgaggctcagtctcccaacacctctgacagcccacctgaggatattgaccataaggactca

SEQ ID NO: 274986 - DNA, 74 bp, Homo sapiens
gatgttcctgctccttctacatctgcagataaagtggagagatctgaaatagctcaactcagtcaagaaaaaag

SEQ ID NO: 274987 - DNA, 75 bp, Homo sapiens
atcagtagaacagcgaagctcatagtagcagttttgacagtgtttcctgccttgctgactcttcttccctctcgg

SEQ ID NO: 274988 - DNA, 100 bp, Homo sapiens
atgccccgggaattggcatctatgtcacgcaatttctaaaccgggatgacattggcatcatcctcatcaaccagtacatcgcagagatggtgcggcatgc

SEQ ID NO: 274989 - DNA, 87 bp, Homo sapiens
agagcgtgaccgagagcgcgaatatcgtcatcgttagaagatccctgggtatcagtatgtgtcacctgaaggcaattgtatagaaca

SEQ ID NO: 274990 - DNA, 75 bp, Homo sapiens
ggaattctagagcctaaagagcaggaatcatggactgtggttccaagaccaaagattaaattaagagaaggtaaa

SEQ ID NO: 274991 - DNA, 75 bp, Homo sapiens
gagaggagccacaatggagacgccgccgctgcctcccgcatttatgtgatcagtttggctgaaccccgtctgccc

SEQ ID NO: 274992 - DNA, 82 bp, Homo sapiens
tggcggatgccctgcagtacctgcagaaggtctctggagacatcttcagcagctgcagatctgggacacggccggccaggag

SEQ ID NO: 274993 - DNA, 97 bp, Homo sapiens
agaaaagaatacacagggacccaggatgccgcgaactgctaagaaggttctggagaaggagaagaaacgtaagaagcgaagtgaggatgaatcagag

SEQ ID NO: 274994 - DNA, 75 bp, Homo sapiens
ggcgccgagaggccgtgcgggacgcgggcgccaggaccggccgaacgcagagctcccttgcctcagctcctatga

SEQ ID NO: 274995 - DNA, 100 bp, Homo sapiens
ctgggattggaactgtgtttgggagcctcatcattggttatgccagctgtgaaagttgtgtagatttactgtttgtgagaggagctggaaactgccctga

SEQ ID NO: 274996 - DNA, 98 bp, Homo sapiens
catggggctcaagacccggtgtggaggcaagctgggcttcctggccgatccctctggctgttgtgctgagaacagaaggggtcaagggagtgggggag

SEQ ID NO: 274997 - DNA, 143 bp, Homo sapiens
cctgcctcagcctcctgagtagctgggagccatcacgcccagctagccatcttctaattttcattccttcaaagggacaaaagtggctctcaatccagcacatgcacattgaagcaagttaaaggatttaatatgaagcacag

SEQ ID NO: 274998 - DNA, 82 bp, Homo sapiens
ctggttctggaatcctcagttcaagagaagcctgtgtctcccaaatcaggaacactgaagagccctcccaaaggatttgata

SEQ ID NO: 274999 - DNA, 75 bp, Homo sapiens
gattcgcagtggtcgcttcttctccttgatcgtcagtatttaaacagatcacatcatgcgtgagtacaagctagt

SEQ ID NO: 275000 - DNA, 100 bp, Homo sapiens
ctcaacacggaccgcgcccgccgggcacacaagaatggtcactcgcgagtggtctggacatggggaagatcgaggagatggagaagatgctgaaagaggc

SEQ ID NO: 275001 - DNA, 100 bp, Homo sapiens
gaattgctgatagacatgggggcctcaaacgtggagatcaactcctctctgttaatggagtggcaaccggtgaccaaaaacactttcaggcagtatcgag

SEQ ID NO: 275002 - DNA, 98 bp, Homo sapiens
tcctgctggccgcctggacggctcgggcgctggaggtggacgtctgatttatgaagctccccatccacctatctgagtacctgacttctcaggactga

SEQ ID NO: 275003 - DNA, 100 bp, Homo sapiens
atcacagaagccgacaaggcgttcaagcgaaaacatgaccgctgagcccatgagcttgacaaaagtaagctgaagccaggaacaagagttgctttggata

SEQ ID NO: 275004 - DNA, 100 bp, Homo sapiens
ccagaccttcaaaacccaccccttctttaggtgaatatgcaggttttgatgagacgcagccaacagctgaatctggtggaaaaggaaaagtgattaaact

SEQ ID NO: 275005 - DNA, 100 bp, Homo sapiens
tctgaagttcacgactactagaaggggaggggagtggaaaggctctcagtgaaaaaggtgctggagaatctggtaaaagcaccattgtgaagcagatgag

SEQ ID NO: 275006 - DNA, 83 bp, Homo sapiens
gaaaagcgtcaagaagaggaggaagccatgcgtaggatgatgacttacgagtggtatttacccaagatggcaaagcacttgcc

SEQ ID NO: 275007 - DNA, 100 bp, Homo sapiens
gtttgttcatcagactcttcaccagcatcagtgagcctccttcagctcccatctctcctcggatgaacaagggggagcctcaaccccggagacacttgct

SEQ ID NO: 275008 - DNA, 103 bp, Homo sapiens
cgcacaggccgtcgctatgagcgggaccaccctgggcacagcaggcatcggagtcaccttcaggccattcagaggaggaaagagaggggaatatgaagtcagc

SEQ ID NO: 275009 - DNA, 100 bp, Homo sapiens
agagggggcgctgagctgttgggaagtccattggaatattaagcccaggagttgctttggggatggctggaagtgcaatgtcttccaagttcttcctagt

SEQ ID NO: 275010 - DNA, 83 bp, Homo sapiens
ggtgccgaatttggaaatccctaccgtcaacccagttgccattaaacctggtacagatgttttgaacagagataaggatgagg

SEQ ID NO: 275011 - DNA, 75 bp, Homo sapiens
cctcggaaaatggttcccactgccgggcgagggcagcacgctgaggaaacgcaagatgtacgaggagttcctcag

SEQ ID NO: 275012 - DNA, 90 bp, Homo sapiens
ccagttagttacttcctgtctagagttgtagcttccacctgatacatgactgatggtggacttggcctctatacccgtcgcctgaaccgg

SEQ ID NO: 275013 - DNA, 75 bp, Homo sapiens
gcatgtcgtctttatcgctcaggtatctgtaattcttgcccaccaaacaagcctgcagaatctgttcagtcaaat

SEQ ID NO: 275014 - DNA, 75 bp, Homo sapiens
gagcccatggcatcatagttgtgtatgatgtgacagatcaggccaccctggagaaatgtgccacgtgctcccagc

SEQ ID NO: 275015 - DNA, 74 bp, Homo sapiens
cagctctgcagccacatactatccgtttgttcaggaaccaccagtgacagaagttgtggaaagtaaaaatgtag

SEQ ID NO: 275016 - DNA, 100 bp, Homo sapiens
ccttcagcccaagccttcagctgtctcgagaagattgtttaaatcctcccagtgaaaccgagacatgggtgcccggcaccgcgcccgagcccactccatt

SEQ ID NO: 275017 - DNA, 82 bp, Homo sapiens
cacagagatctacaaccttggagcccagagccacgtcaaaggttgaagctttgagagaagcagcaactgctgttgagcaaga

SEQ ID NO: 275018 - DNA, 99 bp, Homo sapiens
caggctcagtctgcggccaagactccatcctgcaagctggtgggcacggaggatgctcttctgcagcagctggcggactcgatgctcaaagaggactgc

SEQ ID NO: 275019 - DNA, 100 bp, Homo sapiens
gacaaggagaccaaagagaacaacctctctgaagaagtgtaatggagagagggctaaagaagaagcaattacacattttgaaaagctctttgaagttctg

SEQ ID NO: 275020 - DNA, 98 bp, Homo sapiens
tttaatccagtgactgtcaggtcgatcatatctgatggtgagaccattctaaaaggcctccagtccattttccaggagcaggggatggcggagtcggt

SEQ ID NO: 275021 - DNA, 50 bp, Homo sapiens
caagaagggctttgggggcagtgtctgaagatgatgagaaactgaaaaag

SEQ ID NO: 275022 - DNA, 104 bp, Homo sapiens
ctatgaccccgtcgggtgagagtctctctgagcaacccaaacagaagaaagaacacccaggttaatgcctgataaagaaagcatgtattacccacgggtacaac

SEQ ID NO: 275023 - DNA, 100 bp, Homo sapiens
cctgaacctgcacctccatcacgacccattcaggagcctccaggagcccagacaccagccccccaccatgggaagcacactgagaaagcggaagatgtat

SEQ ID NO: 275024 - DNA, 101 bp, Homo sapiens
ggagaagcagcgcctgttcccggggcagatccaggttcaggaacggcagagtcgaaacaaacaatgagggcgaaccagtttcttacatgttctaacgtttg

SEQ ID NO: 275025 - DNA, 100 bp, Homo sapiens
gagcgccttgggacagggggatttggaaatgtcatccgatggcacaatcagccccatggctgggggttatggagtgatgggtgacgatggttctattgat

SEQ ID NO: 275026 - DNA, 90 bp, Homo sapiens
ctcaagatataatcttcacttccgggggcactgagctcccagatggacgtatcatcaaagttgggggagagagatttgaagcaccagaag

SEQ ID NO: 275027 - DNA, 50 bp, Homo sapiens
cacaccagtggggcagtgcctcggtggttctgacaaccatttgatccttg

SEQ ID NO: 275028 - DNA, 82 bp, Homo sapiens
ctcagccgccaaagaccccgtccggtggggcaggagaccctgtaggaggaccccgggccgcaggcccctgaggagcgatgac

SEQ ID NO: 275029 - DNA, 100 bp, Homo sapiens
attactggcatcttcaatctgatttaatgtgtgccgaccatttccttcagtgctggacaggctgctgtgaagggacatcaccttttcgctttttccaaga

SEQ ID NO: 275030 - DNA, 80 bp, Homo sapiens
aagagattaaagatgcagtacgccacggggccgctgctcaagttccagatttggtttttagaacttcagccataaaaatg

SEQ ID NO: 275031 - DNA, 100 bp, Homo sapiens
ttggaagaagcccttcgtcatgaatgggatctgcagagttcgggcgagaggaggcgagaggcgcaaaggagccggaaaattcaaatccgaaatattccac

SEQ ID NO: 275032 - DNA, 87 bp, Homo sapiens
aagggacaatggtcaccgtctcttcagattgaatacctgcttaagaagcttacagaagctatgggaggaggttggcagcaagaacaa

SEQ ID NO: 275033 - DNA, 126 bp, Homo sapiens
actggacagtcggtggatgtggatgggggccggagtctctatactcactcgtatgaggtaccaggtctcatcatccatgaaggaccctcggtgtaccgcatctttaaacggtggcaggctgtcaac

SEQ ID NO: 275034 - DNA, 90 bp, Homo sapiens
agagcgtcacggcgtacgccctcatggggaaaatctccccggtgactttcagaggcttcgtgacggagttatcagagacattgagaggca

SEQ ID NO: 275035 - DNA, 98 bp, Homo sapiens
gatggctccttaagtgcagttgactcattagggaggtctgccatcatggatgttctcgcagaagcaaatggcacctttgccttaaaccttttgaaaac

SEQ ID NO: 275036 - DNA, 82 bp, Homo sapiens
acagggcagcccgcagaggacagcgaccacggtgagaagccctaccactgcaactgggacggctgcggctggaagtttgcgc

SEQ ID NO: 275037 - DNA, 75 bp, Homo sapiens
gtggctgttccaatcgctcctgtttgtcttctgctttggcccagacagcatcaactgggcaagtggtgaggatga

SEQ ID NO: 275038 - DNA, 82 bp, Homo sapiens
cggaggcagaggtggaggcgctttgaaagactgttggagcagaactactgagaaaaaccaggcattgtatcttcagttgtca

SEQ ID NO: 275039 - DNA, 82 bp, Homo sapiens
ccggcgggaaggaaaaccgcgcagagaggtagctacagcaagctgggtagcaggcagatccaaaggatatcatgaagtttcc

SEQ ID NO: 275040 - DNA, 100 bp, Homo sapiens
tatactctagaatatacaaagacaaaaggagattctgatgaagaagttattcaagatgatgcgtttagcccagcccctgctggtaaccaaggtcctcctc

SEQ ID NO: 275041 - DNA, 80 bp, Homo sapiens
gcagagttggaaagtgatccaccttacatggaaatgaagcagcctcccgcgacgatgcccctcaacgttagcttcaccaa

SEQ ID NO: 275042 - DNA, 100 bp, Homo sapiens
gtgatgtttccactctggttgcctgtgtggtggatgtcgaggtctttaccaatcaggaggttaaggtggtttgctctgttagaggttcagatgtgtatta

SEQ ID NO: 275043 - DNA, 74 bp, Homo sapiens
agcacctctccagcggggacctgctccgggacaacatgctgcggggcacagacatgcgtcgggatgtccaggaa

SEQ ID NO: 275044 - DNA, 98 bp, Homo sapiens
gggacttggccgagcggatcctaataaggggaaaatggattttttatcaagcagaaatgcatcgaacaacgagaatcaagatcactgagctaaatccc

SEQ ID NO: 275045 - DNA, 100 bp, Homo sapiens
tacgatccagttgaagattactggatgcacgtacagaatacattcagccgtcagatgttcctgcagcagccagctgtatccctgagcttcagcagcaccc

SEQ ID NO: 275046 - DNA, 75 bp, Homo sapiens
ctgtaacccagcctgtttcacttcttgccattaagaagcctgtgggaaagacaaaggaggaactggctttggaga

SEQ ID NO: 275047 - DNA, 83 bp, Homo sapiens
cggcactccagccccagctcgcaattctgtggtgttcttggtcacacatttatggagtttctgaagggcagtggagattactg

SEQ ID NO: 275048 - DNA, 100 bp, Homo sapiens
aaaatttccagaaggtgcctgaccagaaaggaactcccaagcgactgcaggcagaagctgagacggctaaggttgtatcagagtaagatggacggtagct

SEQ ID NO: 275049 - DNA, 50 bp, Homo sapiens
gaattataggaacctggtctccctgggttcaagggcagcaggaaagacga

SEQ ID NO: 275050 - DNA, 83 bp, Homo sapiens
cactctttccgccctaatggaggtctccagtttcggttgtgaccgagattcccgacgagagagactgaggggaagagaggaag

SEQ ID NO: 275051 - DNA, 75 bp, Homo sapiens
ctcactgcagaggtgctggagctggcagtagaatatcagagagcctaaactatgaacattggtgttactgtcctg

SEQ ID NO: 275052 - DNA, 82 bp, Homo sapiens
cattttttgaaatttttaagacacgctgcaacaaagcaggatcaaaaccattcaagtgcaagatatgccattttgcaacagc

SEQ ID NO: 275053 - DNA, 100 bp, Homo sapiens
gagagcactgacacggcctgcatcgggcccacgctcaggtgaaggcttccataattaccatcacacctttccctttgactactctgcgagtgaatttggc

SEQ ID NO: 275054 - DNA, 100 bp, Homo sapiens
aaagcaaacacaggattcaccacagtacttcacatcgtcgttcacatgggagtacaagaagatcatcctattatgtcttttactatttcaaaaaatggcc

SEQ ID NO: 275055 - DNA, 100 bp, Homo sapiens
aagtcctgcgcttggggatcctctgtacgcccgttcactgcaattcacagaagctgtgagtccttcagtgctacccccttcagctttgccactggacctg

SEQ ID NO: 275056 - DNA, 50 bp, Homo sapiens
tcttcgggaattccagcgaggtctggctcttgctgattgaattcctttgg

SEQ ID NO: 275057 - DNA, 100 bp, Homo sapiens
gcagctggctggcggagcatgagcgccccagggatcgcttacacctgagacgaactacagaacagcacgtaccagaggtggaagtccaagtcaaacgcag

SEQ ID NO: 275058 - DNA, 99 bp, Homo sapiens
ccacatttgcagctcattgaaggaaagctcaaccagaacgtaagttctttccaaagaaaatttgttggtgaggtgaagaggtgtgaagagctagagcga

SEQ ID NO: 275059 - DNA, 139 bp, Homo sapiens
cggcagccttatcgttttccccaggcaaggattccggagagaggatcaggtgttttcaggttaaccgtcagattgcccaaggactccagatactccaaataatgaccctcgttgttctactagcaacaatagattgaag

SEQ ID NO: 275060 - DNA, 80 bp, Homo sapiens
gccgctgttactgatatacctttagggagagatttaaagcaattatatttcaatctctatataactgtcaacaccatgaa

SEQ ID NO: 275061 - DNA, 82 bp, Homo sapiens
tttgagagtgggaacatgacgcaggtgcaggtgtctcttctcgccctggcggggaaggttcccaacaaggctacgcagaaga

SEQ ID NO: 275062 - DNA, 51 bp, Homo sapiens
caccttcgccacccactattggaccaggcttacggagttcctatgctagtc

SEQ ID NO: 275063 - DNA, 75 bp, Homo sapiens
ctgaagcaggctgcagactcaggcttgagagaggtcaaagagttagtggaagcagagttatttgcccgttatgac

SEQ ID NO: 275064 - DNA, 100 bp, Homo sapiens
agatcgagaatgtcctttgtttggtctttctggaatcaatgcaagttcggttcccactgatggctcaggtgattaaagtatacagtgaagatgaaaccag

SEQ ID NO: 275065 - DNA, 52 bp, Homo sapiens
ctccaccgtgcctgacctgctgctgccactgttctgggaggtgatcagtgat

SEQ ID NO: 275066 - DNA, 101 bp, Homo sapiens
tacaaatggaggaggaggaggacgacgacgatggggatatcggcctggtctccaagtcctctcctaagaagcctcgtggacgtaacatcttcaaggccctt

SEQ ID NO: 275067 - DNA, 75 bp, Homo sapiens
acggcgggatgcgggacaacaccagccccatcagcgtgattctggtctctaattaacagaagatggcaaagccca

SEQ ID NO: 275068 - DNA, 75 bp, Homo sapiens
atccgctgctgctgaggagaggagcgtcaacagcagcaccatgggtcacagccaagactgcctttctatttattt

SEQ ID NO: 275069 - DNA, 90 bp, Homo sapiens
acaccaggttgcttcttgagagaagccggatggatgtgcatgcagggagtcatccgtccttggctcaggatttggagagcttgcaccacc

SEQ ID NO: 275070 - DNA, 50 bp, Homo sapiens
cctgccctgggctggaacgaccctgacctgcaggctgggacaatgaaaag

SEQ ID NO: 275071 - DNA, 74 bp, Homo sapiens
tggaagaccacttcagcagtttcggacctatctctgaggttgctggaagtgcaggtgcgggaatctctggcaaa

SEQ ID NO: 275072 - DNA, 50 bp, Homo sapiens
ctcatccagctgatgcccttcttcgtctgtttgcagacaaggtcccaaag

SEQ ID NO: 275073 - DNA, 74 bp, Homo sapiens
agcgctccggtggtctggcgcgctgggctcgctaggtgtcatggagaaactccagctgggcccagagattctgc

SEQ ID NO: 275074 - DNA, 90 bp, Homo sapiens
gctcccatcattgatgtggtgcgatcgccaagagccgggccattgccattcccgtggacctggacagccaagtcaacaacctctttctca

SEQ ID NO: 275075 - DNA, 88 bp, Homo sapiens
cactgccaccaaagatcggaactccaacaagaccctgccctctaccacctgggaagtcgagacaacatgagtgtgattttgatctgtt

SEQ ID NO: 275076 - DNA, 98 bp, Homo sapiens
cgcgtcgctgtctctatggccccggatccgagcgcaaaggtggcctgccatgggtatccatggtgacaagagtcaacaagagcgtgactgggttctaa

SEQ ID NO: 275077 - DNA, 87 bp, Homo sapiens
gagaagggatggaaatacttcaacaagtctgaggacccagaagaagatgccaggttaaagcagttgcaggctgcagcagcacactgg

SEQ ID NO: 275078 - DNA, 100 bp, Homo sapiens
caaagccatcatcttctttgacccagtgtggcaaaggagcagagaactttgacaagttcttcacacgaggacagcccgtcttaacaccacctgatcagct

SEQ ID NO: 275079 - DNA, 100 bp, Homo sapiens
aggtgatccctgggcctccatcagagagccctggcatgctgactaagctccagtgtttctacacctgtgggttatgacaaagacaactgccaaagaatct

SEQ ID NO: 275080 - DNA, 96 bp, Homo sapiens
cggcgagtttccgatttaaagctgagctgcgaggaaaatggcggcgggaggtaagaatgattgatgttggctgatattggagtgctcattcacatg

SEQ ID NO: 275081 - DNA, 75 bp, Homo sapiens
acgccctctgcccgctccagaagcaggatgccaagtttgtggaggaacggagaaagcagctccagaattacctgc

SEQ ID NO: 275082 - DNA, 100 bp, Homo sapiens
cagagagtcgaccagtaaagcctcaagggaaatgtagtccaaggcctgagaagcgacgttgctggtaatagaaggtctttgagagctggatgcaccattg

SEQ ID NO: 275083 - DNA, 76 bp, Homo sapiens
atccagctgtcaaatcaacaccaagcccttagagatttgtttgattccatggataaaacttcttccagtattccac

SEQ ID NO: 275084 - DNA, 75 bp, Homo sapiens
gaaattacagaccactctctgtttctactcaactgcttttcactccgcacgtgtggttctcaaatataggcattc

SEQ ID NO: 275085 - DNA, 51 bp, Homo sapiens
ggaaaacaacttcgagggcagagtgattgcccacagtgagtatcaaaagtc

SEQ ID NO: 275086 - DNA, 128 bp, Homo sapiens
cggaagtccagcagctgctacacaacaagttcgtggtcatcttgggggactccagagggtgaggacaaaatcttcttaatcaacaagcttcactccatctacgagaggaaggagagggaggagaggag

SEQ ID NO: 275087 - DNA, 50 bp, Homo sapiens
aagctgctgacagcatctggctatcgcagattaccagagactgatgactg

SEQ ID NO: 275088 - DNA, 131 bp, Homo sapiens
cggagctgggtctggagacgccgtggcagcctgaacggagtgtgcgacggattgggagactcggtgaaatacctggagtgctcagctctcacccagagaggcctgaaaaccgtgttcgacgaggccatccg

SEQ ID NO: 275089 - DNA, 51 bp, Homo sapiens
gaagagcgatgccaagtggagggaggcaggacaaggaggcctggatcaagg

SEQ ID NO: 275090 - DNA, 100 bp, Homo sapiens
aggtaccatccctgacctggtcctcatgctgccgaggctgttgctgttgatctgtgagttacactgttagaccttatgatagccaagataacgagtgatg

SEQ ID NO: 275091 - DNA, 100 bp, Homo sapiens
cctgggtcagtgattcccggaccctggaagagaagagggtggctaatgattaagcatgcagcagattggaataaatatgatgaccgattgatgaaagcag

SEQ ID NO: 275092 - DNA, 98 bp, Homo sapiens
tgccacgtccaagcaaaccgggaaaggagaggatcccggagccgacccgaccgcatgtctgtcatggacctcgccaatacttgctccagctttcagtc

SEQ ID NO: 275093 - DNA, 100 bp, Homo sapiens
ctttgttcacgagaacattgagacatttctttcggccatggaaatgcaaattaaaaaacagtttcaggacacttgcaaagtacagaccaaacagtataaa

SEQ ID NO: 275094 - DNA, 50 bp, Homo sapiens
cagttggcaaaccagatatatgacttgatgcagacagacatgctgaacta

SEQ ID NO: 275095 - DNA, 100 bp, Homo sapiens
catccaatcccgagtgctctacttgagtactatactggcaattgctggagaagattttgcaattgttgcttctgatactcgattgagtgaagggttttca

SEQ ID NO: 275096 - DNA, 76 bp, Homo sapiens
caacgatcccgtcaacacgaaaatcccaggaatcagaggttgcacgttttcaaaaaatacctaatggtgaaaatga

SEQ ID NO: 275097 - DNA, 82 bp, Homo sapiens
gcgctggaattatgggcgtgagccactgtgcccagccatcactggtgcaagctatatttaacggagatcctgatgaagttcg

SEQ ID NO: 275098 - DNA, 51 bp, Homo sapiens
ggcggcccagctctctctgacacagcatttttgaaacgttggggttgttgg

SEQ ID NO: 275099 - DNA, 75 bp, Homo sapiens
cttcctggagggaaagtgccgctttaaggagaactgcaggtcaaaatgcagatcttcgtgaaaacccttaccggc

SEQ ID NO: 275100 - DNA, 100 bp, Homo sapiens
gcgaagacaagagagctcattggatggatcaaacctcactgcaagtcagagggcctatgcgcctgagcagctgcagaaacaggataatctaaccattgac

SEQ ID NO: 275101 - DNA, 98 bp, Homo sapiens
cagccgaagatctcacttcctcccagaggcctttgctgactgacccctcaggctgtctacaaggcctggctgtgctcagaatacttcagcgtgaccca

SEQ ID NO: 275102 - DNA, 98 bp, Homo sapiens
tggtgccacaggaggctgtgcgggccccgctccgcttcgaatgggtaaatcaacagactgggaagatgatggttggggagcatgggaagaaaatgaac

SEQ ID NO: 275103 - DNA, 98 bp, Homo sapiens
ggaaggaacgaggcaaggagctaaagcagcgtgcgttcagccctggggtcgcgtggggcaggcagtggcgctgcgggccaaggccttcggcttcaacg

SEQ ID NO: 275104 - DNA, 124 bp, Homo sapiens
ctattaccacagtcaaagcaacagaaacaaaagcaggcaaatggagtcgttgggaataccctcaaactgacacaagacctacagagaaaaccctttgccaaatctgctctcagcaagtggacag

SEQ ID NO: 275105 - DNA, 90 bp, Homo sapiens
gaaaggagcaagagcaagatcaccgtgacatccgaggtgcctttctccaaaaggtacccggaaattaaagaggagctggaggagctggac

SEQ ID NO: 275106 - DNA, 88 bp, Homo sapiens
agggagaaggaagaggtgtttgaaaaggtgaagctttgttctaagaatatttgtttcatctagtttatgagtccaaatgatatagact

SEQ ID NO: 275107 - DNA, 80 bp, Homo sapiens
agctggctgtcttccatgatgaaacaggtactggtcttcttggacattaatctttgaatacttgctgactgctaagaaat

SEQ ID NO: 275108 - DNA, 76 bp, Homo sapiens
ggtccctgaagagggaagacacgcggaaacagactgcaagtttaactgtcacaaacgctgcgccacccgcgtccct

SEQ ID NO: 275109 - DNA, 100 bp, Homo sapiens
cgacttatcgacatgagcaggcaccaaggactgtacaagaaatctggaaaacttgtattcttaggtttggataatgcaggcaaaaccactcttcttcaca

SEQ ID NO: 275110 - DNA, 75 bp, Homo sapiens
tccaccttccacagggtgatcccttccttcatgtgccagacccctttgctgatgcaagtaagggtgatgacctgc

SEQ ID NO: 275111 - DNA, 75 bp, Homo sapiens
caccacccgcctctgggccccagacagatgccacctgggacagcaagaccaggttctcgtggttgtcccataggg

SEQ ID NO: 275112 - DNA, 75 bp, Homo sapiens
cctggtcatacaccagtactaccaaggacagcttttttcctgcaagaacatcgatatattgaactcttcttgaat

SEQ ID NO: 275113 - DNA, 75 bp, Homo sapiens
ggaggatcaaaagaggtggtggggacttttaagctgattgggcagaaagtggcccatgctctggcagagggactc

SEQ ID NO: 275114 - DNA, 100 bp, Homo sapiens
cttgcagctgcttagacgctggatttttttcgggtagtggaaaaccaggatattggtgctggaaaaggcaaatactatgctgtcaattttccaatgagag

SEQ ID NO: 275115 - DNA, 82 bp, Homo sapiens
gagacattacatcaggaagatactgcagagatattctactccatctcattcattgtacagatggagtcatcagaacccactg

SEQ ID NO: 275116 - DNA, 90 bp, Homo sapiens
caggaacaccaatggaccaaaatgaacacagtcactgggctgcaagctttcttcctggtggcagatgacatcatggattcatcccttacc

SEQ ID NO: 275117 - DNA, 87 bp, Homo sapiens
tgctgcagtgacccagaccctctcctttccctttgagaccgtgaagagaaagatgcagaattgctcctgcgttgctaagacaagcat

SEQ ID NO: 275118 - DNA, 100 bp, Homo sapiens
actgaagggacagggaacagccagacgagagcttcagccatcacgaggatgatttcggaacctggagaaaatattcatgatgttgctatcaaaagttgag

SEQ ID NO: 275119 - DNA, 51 bp, Homo sapiens
ctctacgccctcaatctgctcttttggtacaaaattggacagctgtacatg

SEQ ID NO: 275120 - DNA, 88 bp, Homo sapiens
ttggtgggaacggaccttcctcttaggctgctctttggcgtaaattgcaatcgattagggatcgtttctcagaatcaagttagaagtg

SEQ ID NO: 275121 - DNA, 75 bp, Homo sapiens
cttcaaaagcagtgcaactggctcagtattcacagggaaagctgtgagggtggacccccaaaagtacaagggcat

SEQ ID NO: 275122 - DNA, 100 bp, Homo sapiens
cgctggctctgctgctgccgccggcgaaggaggaggcgttgccggggaaggtggtctatggtgaacccatagcagccagtcttggcacagatggcactca

SEQ ID NO: 275123 - DNA, 83 bp, Homo sapiens
catgtctgcgagccaggattcccggagggtgaggacaaaatcttcttaatcaacaagcttcactccatctacgagaggaagga

SEQ ID NO: 275124 - DNA, 100 bp, Homo sapiens
cttatgccctgcagtactttaaggagcaggcgctgaaggctaaagaattacctccaaagccattgtcaagaccacagcagtcatctgcaccagtccagct

SEQ ID NO: 275125 - DNA, 80 bp, Homo sapiens
cctgcaagctctttgacacacagcagttcttgtcaggaggaatgccagctcctgagcaggcctcattggtggaggagggg

SEQ ID NO: 275126 - DNA, 82 bp, Homo sapiens
aaagcaatttgcaatctttgcattaggccttgtttgtatgaagtccagcacatctgtggttgagcttgttatgctgctttgt

SEQ ID NO: 275127 - DNA, 100 bp, Homo sapiens
tgcagccaggagcaggaggtcaagcagctgctgaatgccatggtggcaaaactggggaaccgggaggacccactcccccaggactcctttgaaggcgtgg

SEQ ID NO: 275128 - DNA, 100 bp, Homo sapiens
gtccagggaaggaagcaaagcaaatggagaatggcatgctggtgacggacagtgcagggaagcaactgcagaggtatgaagaggagatcaacaaacgcac

SEQ ID NO: 275129 - DNA, 100 bp, Homo sapiens
gcgtggcggccgcgctctcttccaggacatcaagttgctgctgacacgccgaccgcctgctgcttcagctacacctcccggcagattccacagaatttca

SEQ ID NO: 275130 - DNA, 101 bp, Homo sapiens
aggctggataccaaatagcagtggaaaccggcaattaagttggaatatgcaaggttggttaagttggcccaagaagacaccccaccagaaaccgattatcg

SEQ ID NO: 275131 - DNA, 90 bp, Homo sapiens
aaccaccgtgctggaccgcttttacaatgcaggaggaattttgttgtcagagaataaaaggaggttgtccataattgactttaagcagca

SEQ ID NO: 275132 - DNA, 82 bp, Homo sapiens
gggatattatcaaatctactactgttcatggcaggaagggaaaaggccgaggcatcagcgtgtgaagaccgcaaagacgatc

SEQ ID NO: 275133 - DNA, 116 bp, Homo sapiens
ctcattcataggatataaagagaaacctcaagatgtggatttaccttatcccctcaacaacttttcagtggcaaatgttgatcttgtctcagaatattgcccaactggaggcccag

SEQ ID NO: 275134 - DNA, 97 bp, Homo sapiens
gtttttcctacctgttcagcacttctttcagcgatatgaagttaaatccagggagcatcgagtacagctgtccggcctccaacgagtgtgagatcac

SEQ ID NO: 275135 - DNA, 98 bp, Homo sapiens
cggtttcagcctccagtactggggatttgccaaaaggttgtgaaacagctattttattcccaatgcgttccaagaagatttttggaagcgtgcatcca

SEQ ID NO: 275136 - DNA, 51 bp, Homo sapiens
agaaacgcaactatatcctagatcagtctgcagatctccaggggagcccac

SEQ ID NO: 275137 - DNA, 90 bp, Homo sapiens
gagagatcgttggttcacagggaagtcgcctggaaaaaccaatagtagcatatatcattacagactatatgggcatccgaaatgaaagtt

SEQ ID NO: 275138 - DNA, 101 bp, Homo sapiens
tgatcttcgatgagctctcggattccttatgcagagtggccgacttggacccagatgatgtggtaccagttggccaaagaagagcctggtgttggtgcatg

SEQ ID NO: 275139 - DNA, 100 bp, Homo sapiens
ctgcatttggtgacaaagagccagccagtagcccttcgagcctgtgggcttccctcaggtacccactgatggtaatgctggcctgctggctgaaccccag

SEQ ID NO: 275140 - DNA, 71 bp, Homo sapiens
cgcgaccgcgggtgcatccagtttctgcgcccagatcaacagtacaaattctgaagtttgtaaacttgctg

SEQ ID NO: 275141 - DNA, 83 bp, Homo sapiens
ctctcctgatacagcaggcgctcaccatgttccctggagtgtcaacagcatctccaccctggagcctgtgagccggtgccagc

SEQ ID NO: 275142 - DNA, 100 bp, Homo sapiens
actgaggcagcggcaggctcaggtgcagccgctgtcctattttgtaacggattatgatccaaccattgaagattcttacacaaagcagtgtgtgatagat

SEQ ID NO: 275143 - DNA, 96 bp, Homo sapiens
attgaagatcagtacaaaaattcttcaagaaatctaagatctcaggaaacaggctcgacagctggaaaatgaacttgacctgaaactagtttcctt

SEQ ID NO: 275144 - DNA, 82 bp, Homo sapiens
ccgaggcggcgggacccccaagtttggaaagctcttttaacgctggaccagctattccttctgttgtggcgtatccgaaaag

SEQ ID NO: 275145 - DNA, 50 bp, Homo sapiens
cctgtcccctacgtcctacatgagttacagaatgtctgaaggggacagtg

SEQ ID NO: 275146 - DNA, 100 bp, Homo sapiens
ctcgtggccgcctccttcttcctcatcgtggcagctctgggcatcattcacgctagaggactggttcgggagtgcttggcagaaacggaacggaatgcca

SEQ ID NO: 275147 - DNA, 50 bp, Homo sapiens
agaggatcttgggcgccgccaggactgaaagaggtgtccccactgcctct

SEQ ID NO: 275148 - DNA, 98 bp, Homo sapiens
atgagagcgacgaagccaactgtccaggactatgatttaatctccaaagaaccaaagccttttgtatttgagggaaaagtacgtggtcctattgttgt

SEQ ID NO: 275149 - DNA, 101 bp, Homo sapiens
catcacgaggccacccagtcccacttcaaacattcgtctcggaaaccccgcctcttacagtcacgagacttaattcagtgcacaaatgagatgaatgtgaa

SEQ ID NO: 275150 - DNA, 76 bp, Homo sapiens
ccgcggttcccgagttgctgcagcagcaggaggaggaccgcagcaaggttttcaaaaccctcggcacagatgtcgt

SEQ ID NO: 275151 - DNA, 51 bp, Homo sapiens
acccactcgagaattggctcagcaggagttaaacatagatgtagctgatgt

SEQ ID NO: 275152 - DNA, 82 bp, Homo sapiens
ctaggagtgctgagcccgcggaaccgcagccatgcccatggcgaattgtggatgattgcggtggagccttcactatgggtgt

SEQ ID NO: 275153 - DNA, 95 bp, Homo sapiens
ggatgtcagaaacttcactgagcgcggcactgttggggggcaggagaaagacatatgtagagtgtgtcggtcagaaggaacacctgagaaaccgc

SEQ ID NO: 275154 - DNA, 74 bp, Homo sapiens
cgtgatcccggcgacatactacctctggccccgagatcagaatgccggtactccaaagattcaggtttactcac

SEQ ID NO: 275155 - DNA, 50 bp, Homo sapiens
aaaccaccacagcttccctggtgtgtcagaaactgtatacagtatgtgat

SEQ ID NO: 275156 - DNA, 90 bp, Homo sapiens
ctacccctcagagcaggagaagctgagcctttctggacagaccaacctgtcagtgctgcaagtttgacatctacaggaaggtgcccaagg

SEQ ID NO: 275157 - DNA, 90 bp, Homo sapiens
agagccatggatcatggagccaagcattccagtaggtacctgtgcagttggaattaacgacctctggaaagatgccttttatgttaccag

SEQ ID NO: 275158 - DNA, 75 bp, Homo sapiens
tgtacatccactggacctaaaatatgaccctgatccagaataactgaagtgaagtgatggactccgatttggaga

SEQ ID NO: 275159 - DNA, 100 bp, Homo sapiens
ggctgaaggcggtggtgggggaaaatgcacaccggctgcaccatgtcagcagcctggcctggctggacgagcacacgctggtcacgacctcccatgatgc

SEQ ID NO: 275160 - DNA, 100 bp, Homo sapiens
atttgatgttagaagccatccagggagcccatatgagggaaggcaccattggagatatggctatcctgggtataacagaaagttttcaagtgaagcgaca

SEQ ID NO: 275161 - DNA, 90 bp, Homo sapiens
cttggatggaccttgcactctagaagggacaatggacttctggctttggccactttacttcctgccagtggccggcatgaaccacctgcg

SEQ ID NO: 275162 - DNA, 98 bp, Homo sapiens
gtatcctacacaaagttgtctctgaccaaggaactcatttaatggagtcaaattgactttatcagctttaatcgatgggaagaacttcagtgcaggag

SEQ ID NO: 275163 - DNA, 93 bp, Homo sapiens
cgggcacctccgagcgcaaggacagcgcgaggtccgcgcagcccagcgcagccatggggagtggccacagcaggtcctatctggtggtgagtg

SEQ ID NO: 275164 - DNA, 100 bp, Homo sapiens
aagccatcaccactcaaaactgtaatactaaatgtgttaccataccaaggagtggacgcttctcttgtgagccagctggaggtcttacctctttgactga

SEQ ID NO: 275165 - DNA, 85 bp, Homo sapiens
aatctcagcccccaactctgcctgatgccctttatcttgggcctcttgtctggaggcctcgaaaaagcccaagacagcagaagca

SEQ ID NO: 275166 - DNA, 74 bp, Homo sapiens
taagggaattagtgaagccaaagctgataaaattctgtcttagagtttgaaagagtctatcttgataatctccc

SEQ ID NO: 275167 - DNA, 88 bp, Homo sapiens
ttagttcaagtagcaactatatcagagataattgacgaccttgccaacctagtggagaacacagatgaaaaacttcgcaatgaaacca

SEQ ID NO: 275168 - DNA, 51 bp, Homo sapiens
gctcccagctttgaaggtcttgcggtgggagtgaactactttatgtccaag

SEQ ID NO: 275169 - DNA, 95 bp, Homo sapiens
ctgccgttgaggaggagacggaggagaccgacgttgttagacaatgcagatcttcgtgaagactctgactggtaagaccatcaccctcgaggttg

SEQ ID NO: 275170 - DNA, 100 bp, Homo sapiens
gaggatcccacggtgccccagctgacagaagccagccaggttttgagtgcctcagagattcggcagttggactaaatgctcttccttcagaggattatcc

SEQ ID NO: 275171 - DNA, 90 bp, Homo sapiens
ccctcccatccgtccgcgggtccgtggagctggagcagatcccccagccggctgagacagaacttgggaatcagtgaaacgtacaaccag

SEQ ID NO: 275172 - DNA, 95 bp, Homo sapiens
atctcgagggccctggctgaacttcaccttttggctttcttggcctgatgctgaactctcgaggggatttagtgcaagaagaagaacagttgatg

SEQ ID NO: 275173 - DNA, 75 bp, Homo sapiens
gccggacgacccaagcccgctgagcaggatgaggaattcagcttagagaactatcaacacaggacaatgcaagcc

SEQ ID NO: 275174 - DNA, 74 bp, Homo sapiens
gcagggcttggagatgggcaccaccatggcgaccacacaggtcttgttgcagtaggagaaagagcacaaaagag

SEQ ID NO: 275175 - DNA, 75 bp, Homo sapiens
atcagattccatttcaacttctgccgacaacttttctcctgatttgaggtgatcaccagcagcttgcaaaactta

SEQ ID NO: 275176 - DNA, 100 bp, Homo sapiens
aatccaccagctacatccagctccctgaggcagagatctaccgcatcgtgtcacagaaacagatcgcagaccgcgctgcccacgacgagtccccggggaa

SEQ ID NO: 275177 - DNA, 100 bp, Homo sapiens
cggcgcagtttcatctagcgactggttatgaagacagtatggagtttccagaccatagtagacatttgctacagtgtctgagcgagcagagacaccaggg

SEQ ID NO: 275178 - DNA, 82 bp, Homo sapiens
gggactgcaaaggccaatgttggtgctggcaaaaagaaaaaggtagcagcactgcctaaacaagaggttatacaagaagagg

SEQ ID NO: 275179 - DNA, 83 bp, Homo sapiens
aaagccctgaagcagaagggcatcaccgtgaagcagaagagacttcccaagtaagaagcggaagaggagccgctggaaccaag

SEQ ID NO: 275180 - DNA, 82 bp, Homo sapiens
aaaatgcaaaaaaggaggccaaagacttttttctccacagacactacccaaagcagtccttcactacagtggcagacagacc

SEQ ID NO: 275181 - DNA, 82 bp, Homo sapiens
agacgttcagctcccggaaaaactacaccaagcacatgttcatccactcgggtgagaagccctaccactgcaactgggacgg

SEQ ID NO: 275182 - DNA, 100 bp, Homo sapiens
cagcctcagtgatgtccatgagattcttattgccaagtcccctctggctcccttcacctcatttgtctacaccatcaaggaggaaggcctggttcttcaa

SEQ ID NO: 275183 - DNA, 90 bp, Homo sapiens
atgatatccttctcaaccttgtgggatgtgaaaactctgttactgaagagcctggagaaagttcttgtggaattcagtcacaaggagttg

SEQ ID NO: 275184 - DNA, 50 bp, Homo sapiens
cgactgtgtctgccaacctggcttcacagtgcacagccagagaacaacac

SEQ ID NO: 275185 - DNA, 75 bp, Homo sapiens
tgtacagtggaaaccagcccaagctacaaaagtggtgctttccagagtgttgaatcttccaccagaaaacttgat

SEQ ID NO: 275186 - DNA, 78 bp, Homo sapiens
gggactatgtggtggacttggacacgtcccagctctctctgggcatctggaaaggcatggctaatgtaaaagcagccc

SEQ ID NO: 275187 - DNA, 75 bp, Homo sapiens
ggagtaggagactcagaatcgaatctcttctccctccccttcttgaattgatagatgtcacatgtaccctgctgc

SEQ ID NO: 275188 - DNA, 97 bp, Homo sapiens
cagctacgccctgctcacgtacatgattgcgcacatcacgggcctgaaggagcaactacagcgagccctagattttcgaaactcttcagctacttgc

SEQ ID NO: 275189 - DNA, 75 bp, Homo sapiens
gacactcgattcagctattggaaagtttttttaatgtggttggaacaactgagctgcaggacaagttcgagcatc

SEQ ID NO: 275190 - DNA, 97 bp, Homo sapiens
tcgagacaacagtggccttctgatgaatactttaaggtgtggccactgtaagaaaatgaagccggagtttgagaaggcagcagaagccctccatgga

SEQ ID NO: 275191 - DNA, 100 bp, Homo sapiens
ggagacaccaaagaagagaaagacaaggatgaccaggaatgggaaagccccaggtgggagagataaacgtggaggtcccattttaacgtttccggcccgc

SEQ ID NO: 275192 - DNA, 144 bp, Homo sapiens
gtacgtcaagacgcccgagggcctcaagcccctcgactgcttctatctgaagctgcacggagtgaagcttcagatagaagcagtcgaggggcttgaggccctcgggcgtcttgacgtacttgggctcgcccagcatgccgatgt

SEQ ID NO: 275193 - DNA, 98 bp, Homo sapiens
tcaagacagtgtctactatattgatacccttggaagaattatgaatttaacagtaatgctggttggactccatgaaagaattgcacaaaacaaatcga

SEQ ID NO: 275194 - DNA, 82 bp, Homo sapiens
gccggccgagggtggccctaggggcagcgagcaagacagcaagcaggtgtgaacccacatccctgcccccagggccacctgc

SEQ ID NO: 275195 - DNA, 90 bp, Homo sapiens
ctggagatgctgcctggtggggatcagacagagattggagagaaggagcacaggccaccacacacaccaccagagccagatccagagccc

SEQ ID NO: 275196 - DNA, 75 bp, Homo sapiens
cttggaatgaatccttctagagacgtccacggccctgggaggagcggggacactgaggacctctctccaaattgg

SEQ ID NO: 275197 - DNA, 100 bp, Homo sapiens
atcgccgggtgtcgatccttttccctccagtcaggtacctgcaccagtcaggggccctgaccatggaggccctggaggacccttcccccgagctcatgga

SEQ ID NO: 275198 - DNA, 75 bp, Homo sapiens
agtactgaattatcacttctggcagatgaggttactatgggcaaggcggcatgagtggaggtggatggcgtggga

SEQ ID NO: 275199 - DNA, 100 bp, Homo sapiens
tcatgtatcccatagctgtgagtggcgatcacgagaacaataagtcatccgtccttggctcaggatttggagagcttgcaccaccaaaaatggcaaacat

SEQ ID NO: 275200 - DNA, 100 bp, Homo sapiens
ccgacccttcctgtcgctgacggcgactgcgggaggccaggttatccggtgttggctcctgctgcttactatgaccaaactggtgcccttgtagtgaatg

SEQ ID NO: 275201 - DNA, 83 bp, Homo sapiens
ctagacctcgtaattacattctctcggccagcgcctccgcgctctaatggtaccaagtgacaggttggctttactgtgactcg

SEQ ID NO: 275202 - DNA, 80 bp, Homo sapiens
ccgcgaagatgcagctcaagccgatggagatcaaccccgaggtctcggcgcggaagatggccggcggcgtggacggcccc

SEQ ID NO: 275203 - DNA, 75 bp, Homo sapiens
agaaaagaaactgacaaaaacatttctgagctttgtgtccctggtgatgttggaacattaatgatggaacatggc

SEQ ID NO: 275204 - DNA, 82 bp, Homo sapiens
cgcagaggctcccgggctggactcaggcttctcagtttggtgccctggttgtcagatgttggaaagcagtaggacggaacat

SEQ ID NO: 275205 - DNA, 100 bp, Homo sapiens
gagaggaccttcccaccatcgtcatcgtggcccactacgacgcctttggagtggcccccgagagacgtcgggcagagcgggccgagcagcagcgcatccg

SEQ ID NO: 275206 - DNA, 104 bp, Homo sapiens
ttcaccttcagatgcgcggggcgtgcgcgtcctcctccccaggcccgccgcctccctgccaagcatcctggtggggaagaagttttaagggaacaagctggagg

SEQ ID NO: 275207 - DNA, 100 bp, Homo sapiens
gcagccctccttgtcccccttcttcattcacccccttgttgaggcccttggcttttgcataatacagaagccctgcagcagctgcagaaggactctgagg

SEQ ID NO: 275208 - DNA, 97 bp, Homo sapiens
aggaacctgttggcgtggcccagaaggcttagcgggattgcacgaggttgtccttctattcaggccactcttcgttttccatgtactgcatgctgtt

SEQ ID NO: 275209 - DNA, 90 bp, Homo sapiens
gcagagtatgacaaacatccggagcgctacataagtcgttttaatactgatgatgattatgtacttgaagtgaggcactttcagtgtcct

SEQ ID NO: 275210 - DNA, 118 bp, Homo sapiens
cggactatttgtagtcatgtacagaacatgatcaagggtgttacactgaaagtgactgagaccgaagatgatagtgatagtgacagcgatgatgatgaagatgatgttcatgtcacta

SEQ ID NO: 275211 - DNA, 100 bp, Homo sapiens
ccctgctctgggatcccttgtgaggctgccctcatggagttccccctggcccagatatgtccccaagttcaaacgatatgtcaataaacttcgaagcaag

SEQ ID NO: 275212 - DNA, 90 bp, Homo sapiens
cctgcacaagctctgtgagaggatagaggatgaagaagatgactttatgtgtaagaaggcggcctctaaatcaaaagagaatggaagatc

SEQ ID NO: 275213 - DNA, 96 bp, Homo sapiens
tttgagccattcgcttcctgacaaggcccgtggcgaggggagaggagctgaaggggccgtgggggatcagaatgaagtggagctgggggagctgct

SEQ ID NO: 275214 - DNA, 100 bp, Homo sapiens
agaaaaggaacataatgtatttcaaaacaaaatacatgtcagttatcaagagactcaacagatgcagatgaaggaccgtatccttgatgagcttgacaaa

SEQ ID NO: 275215 - DNA, 100 bp, Homo sapiens
acccctggtggatggcgaggatgagaggtaccaaccaagaagctgaagaaatatgagaaagaatatcagacaatgcgagagagtcagctgcaacaggaag

SEQ ID NO: 275216 - DNA, 75 bp, Homo sapiens
ggacaaaacgccaggcggatctcagaaggccagttcaaagaattaaacatgtggacatgaaccaaaagagcatat

SEQ ID NO: 275217 - DNA, 74 bp, Homo sapiens
tttccacctcgcggcagttcgaactgataaatttcaaacggaagagagtggcagcatttagaaagaatctaatt

SEQ ID NO: 275218 - DNA, 73 bp, Homo sapiens
caccacttcacttcacctctttctggaaaccaggctgaccggttccctgatgtgttacctgcttctgctactg

SEQ ID NO: 275219 - DNA, 100 bp, Homo sapiens
ttccgactgcgacgagggagtcgatttacctggagaaaggagtgcctggctgttatggaaagaatgtttctccatcccagagagatgaagtaattcaatg

SEQ ID NO: 275220 - DNA, 82 bp, Homo sapiens
gggcattatcccgctggatgcacactgctgcgtggagatgccccttggtgtggccactgcaaggctctggcccctgagtatg

SEQ ID NO: 275221 - DNA, 83 bp, Homo sapiens
gtgctggccacttgcttgggatcctttatcctggtcatcttctatttccaaactgtttgcagacaaggtcccaaagacagcag

SEQ ID NO: 275222 - DNA, 90 bp, Homo sapiens
ggcaggagatgagcaaggatctggaggaggtatttgggattcaattgaaggaaattgataagaatgaccacttgtacattcttctcagca

SEQ ID NO: 275223 - DNA, 90 bp, Homo sapiens
cgggccctggaagctgacggcgtccaagacccacatcatgaagtcggcggatgtggagaagagcagttgcagaagctcgaggttgaactg

SEQ ID NO: 275224 - DNA, 50 bp, Homo sapiens
tgatgtattaaaagacctgagaacctggtagatgaggtctcactctgtca

SEQ ID NO: 275225 - DNA, 100 bp, Homo sapiens
gctgaacttaaaaagcagtctaaacctgtgaccacccctgaagaaattgcacaggcatatactagtgtctcaaaggcttcacttggccttgcagatcaca

SEQ ID NO: 275226 - DNA, 85 bp, Homo sapiens
tccgtgggcacctggcaaagatctatgccatgcactgggggaccgactcaaggatcttttcagcctacatcaaggaggtggagga

SEQ ID NO: 275227 - DNA, 76 bp, Homo sapiens
gcagttctggttcctcctggccatccgcctggccttcgtcatcctctttgaggaaagaccacagcaagattctttc

SEQ ID NO: 275228 - DNA, 87 bp, Homo sapiens
cacggctggagcaggagatcgccacctacagccgcttgctagaggttgaggacgctcagtgtggacactgccagcggctgcagccga

SEQ ID NO: 275229 - DNA, 90 bp, Homo sapiens
tcatctccagatgctagggttatgggtctcctctgagcctccggcctccataagacccaaaacagatgacacctcttcccagtcccccgc

SEQ ID NO: 275230 - DNA, 100 bp, Homo sapiens
gccagctcaaattgtagtctatggtattttagtcattttggcgacaaacaagataaggcatctaataggattcaggaatcaaagaatcagtgtactcagg

SEQ ID NO: 275231 - DNA, 117 bp, Homo sapiens
ttttctactcttacaaaggaactgtccacactgctgaaaaatctgatctgagtgggacatacttttgaaggatgtgcaatgttcaatcataagtgtgacaaaaactgacaagcagga

SEQ ID NO: 275232 - DNA, 95 bp, Homo sapiens
ccaaccagctgctccaggcaatgcagcgcgtctatggagcccaggtagctacagcaagctgggtagcaggcagatccaaaggatatcatgaagtt

SEQ ID NO: 275233 - DNA, 100 bp, Homo sapiens
caacctcgagaaaaagggctgagtttgattgaggctaccccggagggaagtggaaaatcaactttagccaaagcaatctgtaaagaagcatttgacaaac

SEQ ID NO: 275234 - DNA, 51 bp, Homo sapiens
acatggaattggtttcagtcaaacgacagagtgctgatgctgtaaaaaagg

SEQ ID NO: 275235 - DNA, 100 bp, Homo sapiens
aaggaaaacatgacgtctccagccaaattcaaaaaggataaggagatcatagcagagtacgatactcaggtcaaagctctacgtggccacggaggccatc

SEQ ID NO: 275236 - DNA, 75 bp, Homo sapiens
aagcgattctcgtgcctcagcctctccagcagctgggattacagcacctgtggaatcctctcaagaggaacagtc

SEQ ID NO: 275237 - DNA, 109 bp, Homo sapiens
gaaaaacgtgttatggtggatgccaatgaagttccaattcaaaagatgtttgaaaagctgggtgtcactctgcaaacctgaatggtgtatactacagcggcccctacac

SEQ ID NO: 275238 - DNA, 50 bp, Homo sapiens
tgagtcctctgaaatgaacagcataaacgccagccaggcccctctgtggc

SEQ ID NO: 275239 - DNA, 50 bp, Homo sapiens
acacaaagaataagcttactgcaaggtgccttatgcccgctcagaggccc

SEQ ID NO: 275240 - DNA, 82 bp, Homo sapiens
gtccacccaccgccgccgcctcccagatttcacagagatgatgagagccctgggataccctcgacatatttctatggaaaat

SEQ ID NO: 275241 - DNA, 75 bp, Homo sapiens
gcctcagcctcctgagttgctgggactacagcttcttcatattgacaaaagaagagaatatctttatcaacttca

SEQ ID NO: 275242 - DNA, 119 bp, Homo sapiens
ctgagcctggagcagctcagcctggacctgtaccaaggcaccgggtccctcgcccaggtccccttggacaaatgggactttgtgtcattgtatcaagattttgaaaacttttatacaag

SEQ ID NO: 275243 - DNA, 75 bp, Homo sapiens
ctgacggcgactgcgggaggccagggataaacacacttgttacctatgatatggttccagagcccaaaatcattg

SEQ ID NO: 275244 - DNA, 109 bp, Homo sapiens
ctcttcagcaagaggaccgggctgggcgcgcccggccgcgacgcccgggacccagattgcgggttcagatggaagatggtaccccaaagcatatcatccagatgacagg

SEQ ID NO: 275245 - DNA, 73 bp, Homo sapiens
tggataacgtcagtgtgcatgcctctctgccagggtgggacaaaccagtccagctacgggggcccagccagcc

SEQ ID NO: 275246 - DNA, 50 bp, Homo sapiens
ctaaaatggctgaggagagagtcgcgacgcccaagccttgtcagtactgt

SEQ ID NO: 275247 - DNA, 102 bp, Homo sapiens
actctctctttctggcctggaggctatccagcgtccagggtggcgcgtggctgctgagcccccgcctgtgcgacgccctcatggccatggacgtcatgctgt

SEQ ID NO: 275248 - DNA, 82 bp, Homo sapiens
aggccgtctcgctctgggtctccaggcccgcgaccgtccgccagtcgtcccgagcagaaaaatatggctcaggagactaacc

SEQ ID NO: 275249 - DNA, 73 bp, Homo sapiens
tggccctaacacagggggaatgggagcctattgtccagcccctcaggctggtgcagtggtgtcatcttggctc

SEQ ID NO: 275250 - DNA, 97 bp, Homo sapiens
atggagcaaaatggcggatcatgtgcagataggaaccaaggctttagccttctcaactcattgactggaacaaaccatagcattgggtcagcagatc

SEQ ID NO: 275251 - DNA, 98 bp, Homo sapiens
cgcaaggctcttccctgaccattttctactgtccctgcgcgagtttcacctgtgattccctggatggttaccattcttttgaatgcggctccatagat

SEQ ID NO: 275252 - DNA, 100 bp, Homo sapiens
caggaacaggggtcacggggcaaggagcacgtggcagcgcaggaaacagctacgagttccagggagctctgtcctggtgaccgtgcccgggttatgacga

SEQ ID NO: 275253 - DNA, 90 bp, Homo sapiens
ggattacaggcacgcgccaccactcccaggtgctgctctccctgcgcattttgctactgatgaagcccagtgtgctatcccgagtcagcc

SEQ ID NO: 275254 - DNA, 75 bp, Homo sapiens
gttcaaggaggccttccagctgtttgaccgaacaggatttgatcaaagatctgaaatctgaactgtcaggaaact

SEQ ID NO: 275255 - DNA, 100 bp, Homo sapiens
gctcggtgcgtggagaaaagagaaaacctggagacgggatcttggacatgatacctggatgtgcagcagccatctggtaattatgaggtgacaagtcaat

SEQ ID NO: 275256 - DNA, 89 bp, Homo sapiens
cggacgtggttaagaaccaactggttgaggttcaatgcagacaagacggatgtgatgctgggcggcgactggcggcgcgatggacctga

SEQ ID NO: 275257 - DNA, 100 bp, Homo sapiens
ctccctccggtgggcccgggaggtagagaaaatcaacaaactccatttatgtaaacccctaattagagcaattgacagctcaaacctgaaagacgattac

SEQ ID NO: 275258 - DNA, 82 bp, Homo sapiens
tcggcagtccacccaccgccgccgcctcccagctcccgattctcctgaaggggacgtccgatgatgatgtcccgtgtccggg

SEQ ID NO: 275259 - DNA, 50 bp, Homo sapiens
aaccaaacaagaagacctcatgagagaggcttctccagggaaagtgaccg

SEQ ID NO: 275260 - DNA, 82 bp, Homo sapiens
agcacaagaaaatgatgttaatttaccagtagccgctgaagatttttcccaggaagagcaagatctggatcaacagggaaat

SEQ ID NO: 275261 - DNA, 87 bp, Homo sapiens
ggagcggcgttggaggccaccgtttccagcgtcgagggcgaggcccccagcagtgagactggcacatccctggacagcccctcagcc

SEQ ID NO: 275262 - DNA, 98 bp, Homo sapiens
acccattgcactggttccaattaaagaaggctttcaccaacaatcaccagtggtttacacaacattgcaaggagcattgaaactcgaaactactcaga

SEQ ID NO: 275263 - DNA, 100 bp, Homo sapiens
aaaaaggatggagaaatatctaggacagggtgatgctggtttgactggacgcaaaatcattgtggacacttatggcggttggggtgctcatggaggaggt

SEQ ID NO: 275264 - DNA, 100 bp, Homo sapiens
tcaaagtactcaagatgaatttgagatgcagagaggtgttcataaagagcaatatcagatggcaccccaaaaaaggatatgaaagaacaccaaaagggaa

SEQ ID NO: 275265 - DNA, 100 bp, Homo sapiens
tgggtaggcctttgtaaaattgacagagaggggaaaccccgtaaagtggttggttgcagttgtgtagtagttaaggactttgccattgatattattaaaa

SEQ ID NO: 275266 - DNA, 100 bp, Homo sapiens
gttgttcattaagacttcccagcattcctacagatataaataggttgattcttcaccacactgaaaccattaggaaaaatccttgtggttaacagcagag

SEQ ID NO: 275267 - DNA, 100 bp, Homo sapiens
cgccggcacgcgaagtggccgcatccgcaaggctgaagccgacgtagcttctctgaacagacgcatccagctggttgaggaagagttggatcgtgcccag

SEQ ID NO: 275268 - DNA, 119 bp, Homo sapiens
gaagacagcatgctgcatccctgggaggagggagctcttaaggaagttccaagatacaattgatctctgaacctgggaatgctagaagcaaggagccagtaagtctagacacattccag

SEQ ID NO: 275269 - DNA, 88 bp, Homo sapiens
caatatgttatctccagatgccgcgcaactgtctgatctcagttcatggaccagtcctgcctctgttgtagaagacatgtggtgtata

SEQ ID NO: 275270 - DNA, 75 bp, Homo sapiens
atcttcccagttcatcatggcttcaacatccagatgagaccccgctttctacaccaaccgcaagagacagccttg

SEQ ID NO: 275271 - DNA, 75 bp, Homo sapiens
ataaaaacaaggtggaagattcttccaaggaaccagtgcgaagatcttagcaaagcaatgtctcaagatggtgct

SEQ ID NO: 275272 - DNA, 101 bp, Homo sapiens
gggtgctggtttctaggacactaaacctcatggaatgtatacaaagactatcgcttccttgagctggcatgtgattcccaggaggatgtcgacagctggaa

SEQ ID NO: 275273 - DNA, 83 bp, Homo sapiens
cgcagagccgagtgcagaagatctgggtgcccgtggaccacaggccctcgttgcccagatcgccgtgccgtccctgcagtgac

SEQ ID NO: 275274 - DNA, 98 bp, Homo sapiens
cggatattatggtgaaaggcttgaggataacaccattttcatattatactgggattatggaggtggaaaatgaggttgatcgcagcattcagaaagtg

SEQ ID NO: 275275 - DNA, 90 bp, Homo sapiens
gttagaatctgggactttcttcgttgccatgaggaaagaattctccgagggtatgagtattatagaacaattagaccctgtatcttttag

SEQ ID NO: 275276 - DNA, 100 bp, Homo sapiens
gttcgaggatgtgtacgagctgtgcgaggtgatcggaaagtgattgcccacagtgagtatcaaaagtccaaaagaatttccatctttctgagcatgcaag

SEQ ID NO: 275277 - DNA, 83 bp, Homo sapiens
gggccaagggacaatggtcaccgtctcttcaggagggtgaggacaaaatcttcttaatcaacaagcttcactccatctacgag

SEQ ID NO: 275278 - DNA, 83 bp, Homo sapiens
gatggaaaaggagttcgagcagatcgacaagtccgggagctgggcggccatttaccaggaatgatttccctgatgaaaagatc

SEQ ID NO: 275279 - DNA, 75 bp, Homo sapiens
accgcgggccctgccctgggctggaacgaccctgaaatgtccaatcagggaagtaagtacgtcaataaggaaatt

SEQ ID NO: 275280 - DNA, 75 bp, Homo sapiens
tgctctgtgtgccatggacggggccaattcctgtccccccagcagcatggcatcgtgtgctgaaccctctgagcc

SEQ ID NO: 275281 - DNA, 101 bp, Homo sapiens
cagccccgctcccccggacccatcggcgcgctgcccacacctccaggcgaccggggttggatgactgcctgcaacaatatgtccacaagtttgaacgagag

SEQ ID NO: 275282 - DNA, 50 bp, Homo sapiens
cggaggtgctgggagcgagttggctgaaatgcttcggttacccacagtct

SEQ ID NO: 275283 - DNA, 100 bp, Homo sapiens
cgcagtggtcgcttcttctccttgattcgggaactggagcctctcctctgtcacagtgacaatccatctcagctcatctggacatcatctcgcagtgcaa

SEQ ID NO: 275284 - DNA, 76 bp, Homo sapiens
gctgtgcgagagcctcctcacttgggcggctatgagaggttttcctccgagtacccagaattctgttctaaaacca

SEQ ID NO: 275285 - DNA, 82 bp, Homo sapiens
aggaatccgtgctccaaactctacactcaagaacctagaagtcggaatccggaagaagatcgaacatgacgtggtgatgaaa

SEQ ID NO: 275286 - DNA, 90 bp, Homo sapiens
cggggatgtacactcactgattcttaaggctctgttccttagagatccaaaggttgatgctatgaaactgggagtaaaggaaatgaagaa

SEQ ID NO: 275287 - DNA, 100 bp, Homo sapiens
gacagaataactgtcaagacaacagtgatgaggaaagctgtgaaagttctcaaggtggaaccgtcccaaaatgtcccttgctcagaagaaggatcgggta

SEQ ID NO: 275288 - DNA, 73 bp, Homo sapiens
ggtacgctacgaagtctgtgacattcctcagtgttcagaagatgatgattggcaggaagcacatgagcgcctg

SEQ ID NO: 275289 - DNA, 82 bp, Homo sapiens
ctgcggaagtgcagctgcctcagttcttagcgcagaacactcctatgccaccttcaccagctgtacaagtgcagggccagcc

SEQ ID NO: 275290 - DNA, 100 bp, Homo sapiens
gtggtcgctgctgctgctgctcggagtcttcgccgccgccgccgcggccccgccagcaatgcagttgcaggcgagagtgctctagatcgaatggcttgcg

SEQ ID NO: 275291 - DNA, 87 bp, Homo sapiens
gtcaaaaacccaaagaggatctttcgcttttgctgataaaggacctcccccagggccctttgcctaacacatgcggtcacttttggg

SEQ ID NO: 275292 - DNA, 49 bp, Homo sapiens
aaaatgtcaacaaattgatggagttttatggacgaggagccccctacaa

SEQ ID NO: 275293 - DNA, 99 bp, Homo sapiens
gccaaagcctgcccagacggctcacctgtgcgggatggaacaaaagccttttccccacgactctgaaagaggacagcgttcccaatgtcccagtttaag

SEQ ID NO: 275294 - DNA, 90 bp, Homo sapiens
agatggggttgtcctctttaagaagctggaaatcttccatttggttatgtatcgaaactaccagcggaagaatgacatggatgagccccc

SEQ ID NO: 275295 - DNA, 100 bp, Homo sapiens
gaatggccaactatcggaacacgagcgagattcctctggttctggtgggaacccaggatgagcagcaccagcagtaagagggctccgaccacggcaaccc

SEQ ID NO: 275296 - DNA, 100 bp, Homo sapiens
atgcttttcagaatcttatcaagtagaatgtaagaaagctcagccgaaagaagtcatgttcccacctgggacaagaggccgggcccggggactgccttac

SEQ ID NO: 275297 - DNA, 75 bp, Homo sapiens
ctaccactgctggcgctgaccttcatcacagacaacagcctggtggcagcggtcatcatcagatttgaaatattt

SEQ ID NO: 275298 - DNA, 100 bp, Homo sapiens
ctcaaggggatgcagctgctgcgggagagccccgaagccaggacaggagacggcagcagcagcccctgaaccatcgtcctgcaggcagcctcgctccatc

SEQ ID NO: 275299 - DNA, 82 bp, Homo sapiens
tcagagaatatcatgcttccagtctactgtaaagctctggagcctcccagctcaattgcctgggatttatacaagataaaat

SEQ ID NO: 275300 - DNA, 74 bp, Homo sapiens
ttgtgggatgtgaaaactctgttactgaaggtatctcgtcatgaacgtcgaatttctcagattcagcagttgaa

SEQ ID NO: 275301 - DNA, 100 bp, Homo sapiens
tccgtttcgtctccagaaccctggacagctcctccaggtgatggcccgctccctctccccacccccggagctggaagaaagggatgtggccgcatactcg

SEQ ID NO: 275302 - DNA, 90 bp, Homo sapiens
cggccagctaggagcgctctgtggtgcctggggctgaacgcggctttctggtgttaatgttgactttgcaaaatgatccacccactttgg

SEQ ID NO: 275303 - DNA, 95 bp, Homo sapiens
agcagagggatggctgctcagctgctgactgatgaggcactggcctggctacagcaatatggctacctgcctcccggggacctacgtacccacac

SEQ ID NO: 275304 - DNA, 74 bp, Homo sapiens
cgcgtcctgctcctgtaacaaagaactcttagggtcacctggagcaccttgggagccagagatgcagccaaaga

SEQ ID NO: 275305 - DNA, 51 bp, Homo sapiens
acttcctcttcagtcatcagtgtggaggaaggagaggccagtctaccctcc

SEQ ID NO: 275306 - DNA, 50 bp, Homo sapiens
gaaaaagactcaaggctatttagactacagtgactatggtgggaagcttc

SEQ ID NO: 275307 - DNA, 98 bp, Homo sapiens
tcctgatgtccaggagtcagtgggtccactggtagcccccacccctctccgtccatggccccagatgacacttcagatgattgctgccaatgtccttt

SEQ ID NO: 275308 - DNA, 82 bp, Homo sapiens
gattctccagaatttctcctcataaaaaaggattacagtttaaagacaatttctgtgatcaagttgtcatttggaagattaa

SEQ ID NO: 275309 - DNA, 75 bp, Homo sapiens
aggcgttggtcttctgatagcaactttaatgtggggtcggcaccaggaattattatagaaagatcggctacagat

SEQ ID NO: 275310 - DNA, 74 bp, Homo sapiens
tgctgaaccagtcctgaaagctcaccagtctcactctgcacctctctacatatgacatcgtgatcactacctat

SEQ ID NO: 275311 - DNA, 101 bp, Homo sapiens
ggagcgccagctcagcgtgcccatcccggggggcagcaacggcgacatccagcaagggcagaaatttagcatctggagaggttggattttttccaagtgat

SEQ ID NO: 275312 - DNA, 73 bp, Homo sapiens
tctcatccaccccaccttgtatgcaacgccccccttcacacacagtaagggtggattacaggaggtggcagaa

SEQ ID NO: 275313 - DNA, 82 bp, Homo sapiens
cggcgcctgaggagcgggatctaacccaggagcagacagagaagctgctgcagtttcaggccgaatacatcaagcaatggta

SEQ ID NO: 275314 - DNA, 76 bp, Homo sapiens
gctggaagccatctgccctcactatcagcagccaggccaaatagttgcatcacatgtatctaatccgagagtctca

SEQ ID NO: 275315 - DNA, 100 bp, Homo sapiens
ggcccccatgtcatcatactttgaaagattaagcaaatttcaagatggagggtcctctgaaggagttcaaagctgctggccaagctcagtggggagcctg

SEQ ID NO: 275316 - DNA, 100 bp, Homo sapiens
atggtgggaagtactcagtcaagacccctgcaaaggatgactttgacaacgatgtggatgctctgctggaagaaggcctttgtgcccccaaaaagaggcg

SEQ ID NO: 275317 - DNA, 50 bp, Homo sapiens
gcgagttgcagatctacacttgaagctgaaacctatcaacactcttcaaa

SEQ ID NO: 275318 - DNA, 75 bp, Homo sapiens
ggaagctctgagctcactttgtgcactgaggagagttaatcttggtctatctggtgtgaatatattgtggatctt

SEQ ID NO: 275319 - DNA, 88 bp, Homo sapiens
ggagccgcggctcatgcgcggtgcacagaggcttgtttcacatctgtaacaacagttgggacccctgattttagcaggatggcccaat

SEQ ID NO: 275320 - DNA, 75 bp, Homo sapiens
ggcgagctagccgggagttacaccgccaccgccagccttcacagttgttgatcacatagcatggtcatccactca

SEQ ID NO: 275321 - DNA, 100 bp, Homo sapiens
agtcactgcctgcgcagctccggccgcctggctccccatactagtcgccggactcgctcagcagcagcctgaaaacttgctacaagtatctcaatcagac

SEQ ID NO: 275322 - DNA, 96 bp, Homo sapiens
ctttaagacggtctacaaaggtctggacactgaaaccaccgtggaagtcgcctggtgtgaactgcagggtaagcttgatgattaccaggaacgaat

SEQ ID NO: 275323 - DNA, 124 bp, Homo sapiens
tggcacttcattggccacctacagaaacaaaatgtcaacaaattgatgggtacaggtgaacaaaggcagagtaaactgtcaccccagatgcaggtacatcaagacaaaaccctgccaccagctc

SEQ ID NO: 275324 - DNA, 100 bp, Homo sapiens
agctgtcgtgaagaagcaggaggctaagaaagtggtgaatcccctgtttgagaaaaggcctaagaattttggcattgattgtagaaggcatgaaacaaaa

SEQ ID NO: 275325 - DNA, 120 bp, Homo sapiens
tcgcctccaggatgcgctgagccctacaacacccccagcggccgccggctcccccacgagggccatgaagcccccaggaggagaatcgagcaatctttttggaagtccagaagaagctac

SEQ ID NO: 275326 - DNA, 100 bp, Homo sapiens
gcagaatattctaagaggtcagaaattgatttctcgaatgctggcagccaaaaccgttttggctatccgttatgatgcttttggtgaggattcaagttct

SEQ ID NO: 275327 - DNA, 50 bp, Homo sapiens
ggcgtcgctgccaccatgacgggaaggtgatgatgaacagtctacacaga

SEQ ID NO: 275328 - DNA, 100 bp, Homo sapiens
tggatatccaagcctctcagcttcggagaatggagtcttccatcaatcatatctcacagatctttaatctcatgaagtacgacagctacagccgcttctt

SEQ ID NO: 275329 - DNA, 83 bp, Homo sapiens
acccattcgagggcagccggcgggaggaacgctcactgtcagcgcctggaaacttgctcacggaaccctactctggaaactgt

SEQ ID NO: 275330 - DNA, 73 bp, Homo sapiens
cgagccggacccctgctctgaccgcaggtgctggagaatctggtaaaagcaccattgtgaagcagatgaggat

SEQ ID NO: 275331 - DNA, 98 bp, Homo sapiens
aatgcaatcaaagccatgcatcagtctcagaccatggagagctgtaggtaaaacttgcctactgatcagttacacaaccaatgcatttcctggagaat

SEQ ID NO: 275332 - DNA, 96 bp, Homo sapiens
gtacaacccgacgaggaacgaatgggacaagatcccgtccatgaatcaggcctgagacctgggaggaagctggagaaaagatgccctctgaatctt

SEQ ID NO: 275333 - DNA, 118 bp, Homo sapiens
tgagaagtgtatatcaagccacaatttccatcaaaaagtgattaagcagagaatggagaagaaggttgattccaggaatgtatcctgtcaggtataatgtcagtgaatggcaagaaag

SEQ ID NO: 275334 - DNA, 100 bp, Homo sapiens
taactggttcaccaggatgttcgcctatttccgcagaaacactgccacctggaaggacctgaagccaggcaacctggctgtgaatgaggactgtgaactg

SEQ ID NO: 275335 - DNA, 100 bp, Homo sapiens
caaaacacactggaaacaaacagtatttctactggaaaaaccattttcagttaaagcagtttcctgctctacgaaacgcactcttttgccttgaagcggc

SEQ ID NO: 275336 - DNA, 100 bp, Homo sapiens
attctgaccttgtgggtttcctgtgctaatggacaagagcagagtggccaaaagaacagtttattccaccatatgttccacgattccgcaatggctggga

SEQ ID NO: 275337 - DNA, 100 bp, Homo sapiens
gcaagaagacggtgaagaagaagaaaaaaaagttgactccagtggagaaactgagaagaaagatttcagaggtagttgatgtcacttggcgatattcctg

SEQ ID NO: 275338 - DNA, 100 bp, Homo sapiens
aacagagcacccaagatgaagatgctgttagcctttgcagtctcgacataagtctggtgaattctatagccaagacgtatgttggaacaaatgcttatat

SEQ ID NO: 275339 - DNA, 75 bp, Homo sapiens
caagacttcaggtcacgctcggacccactgatctcagcatgaagagacaattggcgactagctcaggatcctcca

SEQ ID NO: 275340 - DNA, 75 bp, Homo sapiens
cctggcgttccaccagcaaccatgagtggttccatgatgggaagtgacatgatcatcagaaaagcccttactgag

SEQ ID NO: 275341 - DNA, 100 bp, Homo sapiens
cggaggctcgcgagatccgcatgaaggagctggagcggcagcagaaggaggaggttgtggggcgatgtatgaaattaaaattgaatcagaagaatttaag

SEQ ID NO: 275342 - DNA, 100 bp, Homo sapiens
tttcagctccgacgtgccccacgtggtcccctgcaaattcaccatctcactggccttccctgtgaatatgggttgtgggactggaaaatatcttaaagtg

SEQ ID NO: 275343 - DNA, 90 bp, Homo sapiens
ctcatcgtctcctcctacgccttccggctggcagggccggaggagtcggcctggggggacgaggaggactctttggagcacaattactac

SEQ ID NO: 275344 - DNA, 100 bp, Homo sapiens
gaatccctacgcgtccctttgggtttagcacgatgagctcaatcggcactgggatttccatggtgtcagtgattcatattcctgataggacttataaact

SEQ ID NO: 275345 - DNA, 80 bp, Homo sapiens
ggtgaggtgtctttggcaaggttgcacagggatccagagtgcttgtgatttcacgtatttttgctgaactcgtaaaagag

SEQ ID NO: 275346 - DNA, 75 bp, Homo sapiens
ccacttctcgttttcatctgggccaagatcctcgcagtggacagcaccatcatggagcagttcaaccctagcctc

SEQ ID NO: 275347 - DNA, 100 bp, Homo sapiens
cttgggtcctgctgcctgtactttggctcattgttcaaactcaaggagtgggaatagctttgcgaaaaatgggcgcaatggccaagccagattgtatcat

SEQ ID NO: 275348 - DNA, 75 bp, Homo sapiens
acaactactcattgagccgggagctgctcatcaaggaatcaaccctgcctaccggactgaggatgccaatgagga

SEQ ID NO: 275349 - DNA, 100 bp, Homo sapiens
aaagttgatgatatgttatcaaaagtagagaaaatgaaaggagagcaagaatctcataggtttgcccaaaggaccagccaaaacctcacctcaagccacg

SEQ ID NO: 275350 - DNA, 100 bp, Homo sapiens
caaaagaattacctgaatggagtgaaaaagtggctcacaacattttgtcagagtgatcagcagctggactgtgccttggacctaatgaggcgcctgcctc

SEQ ID NO: 275351 - DNA, 75 bp, Homo sapiens
gggactttcttttggccctaggccccttcctgcccctgtcgtcagcagggcccacctttcctgtcctttgaggag

SEQ ID NO: 275352 - DNA, 100 bp, Homo sapiens
cgcgaggtggcggtgctgaggcacctggagaccttcgagcaccccaacgtggtcaggtttgcctgcaatgagatttcattctctacatttaaaggacatc

SEQ ID NO: 275353 - DNA, 89 bp, Homo sapiens
aaaccggaagcagtagaagtaacatttgcagctcaacagacagtcagctaaaactgtggaatgtagggaaaccatactgcctacgttcc

SEQ ID NO: 275354 - DNA, 100 bp, Homo sapiens
ctgaccactactgcctggagctgctgcgttgaggaaacgtgtgaagcttgaagggaaagaacttgaagaatacttggaaaaagagaaactaaagaaagaa

SEQ ID NO: 275355 - DNA, 75 bp, Homo sapiens
gcggaggcgatcggtgctgattcggcgcgatttgaggagctgctgctgcaggatcactactcttggaatcaaaga

SEQ ID NO: 275356 - DNA, 100 bp, Homo sapiens
aaggcacccatccttattgctacagatgtagcctcccgtgggctagagcccgaacccagccctcaccttctgcgtaaagacccatgaccggctgtactac

SEQ ID NO: 275357 - DNA, 100 bp, Homo sapiens
agaggtggcgctcatgcatatttgagacaacatctggatggttggggagaacggtgtcatggagaaactccagctgggcccagagattctgcagcgggaa

SEQ ID NO: 275358 - DNA, 82 bp, Homo sapiens
aacagtgaagagctccgagaaattatgggtacccctgaatatgtgggaccttgggctacaccatttctagagaaactcagaa

SEQ ID NO: 275359 - DNA, 97 bp, Homo sapiens
ggactcaactgcaatgatgcagagacagtgatggggagttgccgtgtggctcctctcatccagtgtgactattgccctctcctgtttcacatggatt

SEQ ID NO: 275360 - DNA, 75 bp, Homo sapiens
acggttggtgtcgacggatctctttacaagacgcacccacaactggtcttctgaggacctctgccctctacacag

SEQ ID NO: 275361 - DNA, 99 bp, Homo sapiens
gcaatgatgacatcacagatggcaaccccaagttgaccctgggtctgatctggaccattattttgcatttccagatttaaattccaggttgtcatcaat

SEQ ID NO: 275362 - DNA, 76 bp, Homo sapiens
tgcctctcctgcctgcgctggtcctcagcaccagagttttgccgaattgacaagcccctgtgtcacagtgaggatg

SEQ ID NO: 275363 - DNA, 114 bp, Homo sapiens
gcaggaactacagcgttgggctgggcccctcccagccacgcacctccggcaccttggggagccgccaggtcagcagaggcggaggcccgggctgtggatggccgaggagccgaa

SEQ ID NO: 275364 - DNA, 100 bp, Homo sapiens
tcattaccgtcgccagcggagcgaacccgagagcgtggagcgggctgggccagttcacctgtggcagatgatatcatccagcccgctgcccccgcagacc

SEQ ID NO: 275365 - DNA, 101 bp, Homo sapiens
gagaagtgcccgaggagagttaacagagatcctgaaggagctagacgagtgctacgagcgcttcagtcgcgagacagacggggcgcagaagcggcggatgc

SEQ ID NO: 275366 - DNA, 100 bp, Homo sapiens
cgccgccgaagaagcatcgttaaagtctctcttcaccctgccgtcatgtctaagtcagagaggaatgtcgggtcctcacaattcaaaacaattgaagatg

SEQ ID NO: 275367 - DNA, 99 bp, Homo sapiens
cagagatgcctgtaccgtgatgtgacgctggagaacctggcacttatgtcctccctggctcccctttgccttccgccatgattggaagcttcctgaggc

SEQ ID NO: 275368 - DNA, 90 bp, Homo sapiens
aggggccgagcctgaggggtcctgcgctccgcctggcggggcttcccacccagcagggaaatctgcttcgccactgaaggtactctgcac

SEQ ID NO: 275369 - DNA, 100 bp, Homo sapiens
ctgaaaagtattccaagagaagttgtggcatataataaaaatataaatgatgactttgaaatgatagattgtggagacccccttcccacagaaagccgac

SEQ ID NO: 275370 - DNA, 50 bp, Homo sapiens
cagccttagccctagtgtagaggttcttctgtgtggcagttcagaatgat

SEQ ID NO: 275371 - DNA, 82 bp, Homo sapiens
tcaacagcatcttggaagtccttagctaccaggatgcggtgtcagctgtgatgcatgtttaaaaggaaattttcgaggtcgc

SEQ ID NO: 275372 - DNA, 100 bp, Homo sapiens
ggaaggactcaaattggaacacagtagtagcctgccagccaacgtgactggtttttcgttggaatatacgttgcacatttatggcgattctgagtgtgag

SEQ ID NO: 275373 - DNA, 100 bp, Homo sapiens
ctgagttgttgctgtcattagcagtagaacctctgactgccaatttccataagtggagcctctccgtgaagcttcttggacacttaatgattgttggcaa

SEQ ID NO: 275374 - DNA, 50 bp, Homo sapiens
gcaccttctccatcaggtgcagaagcaaacatgtctgacaaagagctaaa

SEQ ID NO: 275375 - DNA, 100 bp, Homo sapiens
ccttcatccctctctctttgcctccaagaagtgtaaccgccttgaagagctgatgaaggagccagcaccgctctttgaccttgccatgcttgccttagat

SEQ ID NO: 275376 - DNA, 100 bp, Homo sapiens
ctggcttcaccgtttcatcattggcaagaaagggcagaacctggccaaaatcactcagcagatgccaaagctccgccgcatgcaagagatgattgcaagg

SEQ ID NO: 275377 - DNA, 82 bp, Homo sapiens
gatccgcaagcatgctcagaccttcattgctctgtgtgccaccgcgagtaaccagctcataaatcacatcgaacagtttttg

SEQ ID NO: 275378 - DNA, 90 bp, Homo sapiens
atcctcaggcctgacagccgtttgggtcgctcgaaatcggtttgctgtcctagatcggatgcattcgacacccatcatactgactccaag

SEQ ID NO: 275379 - DNA, 83 bp, Homo sapiens
atggaacacttcagtgcattcaaggcctatatgaacccaatagcaatggcgagatcaaggggtccaatccagtcttcagggcc

SEQ ID NO: 275380 - DNA, 75 bp, Homo sapiens
aaaaaccccttggaaatagtcagcatacctgatatacctgtgtttcccacaatcacagccactgtgacttttcag

SEQ ID NO: 275381 - DNA, 100 bp, Homo sapiens
catatgacccttatgaacgagctcgccaaaagatgttattggagctattttgtaagctccatttatcttaaagaaattggacagcatatgaagacaggac

SEQ ID NO: 275382 - DNA, 100 bp, Homo sapiens
aacatcccggagcagctgccacaatgggacatgtgcaagattaatgcagtatcgaatggacaagtccgaggtgatagttacagtgaaggttgtctgggtc

SEQ ID NO: 275383 - DNA, 96 bp, Homo sapiens
gaaagatctaaaggagctgtcagatggagaaataaaagtggccattagtactgtgagcatgaaccttgaggtcatggaaaatggaagatttgcaaa

SEQ ID NO: 275384 - DNA, 100 bp, Homo sapiens
cagaaacgagattccttcatcggcacgccttactgaaagctgaatggatgacaacaacttgcaatcatgcactttatgcaatctgtgatgtattcactca

SEQ ID NO: 275385 - DNA, 80 bp, Homo sapiens
cagttcctgggaaggtggagccaccagcctctccttgatcttagcaaagcaatgtctcaagatggtgcttctcagttcca

SEQ ID NO: 275386 - DNA, 96 bp, Homo sapiens
tccagagatttccacagaaggactgggatgatacaccttttccacagggaattgagttgagggctgctgaagtatcaaactaatttagatacccac

SEQ ID NO: 275387 - DNA, 90 bp, Homo sapiens
cgacgttacccgcttcatgatcgagtgcgacgcctgcaaggactggttccacggcagatgaccgcacctcgagcaggagtggggatgcca

SEQ ID NO: 275388 - DNA, 100 bp, Homo sapiens
aagtggccccagcccaggaacgaatctctcaggctgcatcaggatgaatgatgacccaagtatggaagtcatgggtttggttcgtcaaagatgtctcgtg

SEQ ID NO: 275389 - DNA, 100 bp, Homo sapiens
gggagggaggacctggtccagcttcccttcctcaaataaggaaattgacacctggcgtgggagctgcagtccatggctgaccaggagcaggtgtcaccag

SEQ ID NO: 275390 - DNA, 100 bp, Homo sapiens
tgtaatgggcaaggagccacaaagaagaaaacatttcttttaatttttaaacttggtttgaaaggggcataaggaaatggtggcaggcacttcctcctaa

SEQ ID NO: 275391 - DNA, 100 bp, Homo sapiens
attcctacctaaaccagtcatatggcatggacaatcacagtggtggtggtgggggtagcagaatgtaaaaagggcagctctctggcatgttcctgactga

SEQ ID NO: 275392 - DNA, 98 bp, Homo sapiens
cgaagttggacataactttggatccccagtgcatgcctacatcatcagctacctgaagaaggagatgccaagtgtatttggaaaggaaaacaagaaga

SEQ ID NO: 275393 - DNA, 50 bp, Homo sapiens
gcggccagcaggaggctgatgaaggtcaaaatgcagatcttcgtgaaaac

SEQ ID NO: 275394 - DNA, 90 bp, Homo sapiens
cgacatcatccagctgcctcaaatcgtcgtagtgggaacgcaggaagaagaccttcgtcagatcttcatgttaactgttgaagttctgca

SEQ ID NO: 275395 - DNA, 50 bp, Homo sapiens
ctggcagcctccccgggtgcctccgcgatcctgataacttaagtgactct

SEQ ID NO: 275396 - DNA, 75 bp, Homo sapiens
caggaaccggcggagggagctgaccgaccgactccaggcggaaattatggaagtggaaattacaatgattttgga

SEQ ID NO: 275397 - DNA, 100 bp, Homo sapiens
caactggaacatttacaagctcctcgcccaccagaagccccccaaggagaagataatcttccaatggaaatccatggttcaagtgccacctcttcaggaa

SEQ ID NO: 275398 - DNA, 101 bp, Homo sapiens
ctcatgcccagcagcagcaagcagatagatgcaacgatcaggacacaaggacatcctatagaattggagacacctggagcaagaaggataatcgaggaaac

SEQ ID NO: 275399 - DNA, 101 bp, Homo sapiens
ggaacgtgaccgtcactgacgtggacatcgtcttcagcaagatcaaggtcgataaagacaggagtggagtgatatcagacaccgagcttcagcaagctctc

SEQ ID NO: 275400 - DNA, 50 bp, Homo sapiens
atcctggtcatcttctatttccaaacatcccagccatcactcttccacct

SEQ ID NO: 275401 - DNA, 90 bp, Homo sapiens
gtgagcgcgcgcccgccccgctctgggaggaccgcgagatggagtgaaggtacctgagcgcaggaaccatggtcttcattgctgcctcag

SEQ ID NO: 275402 - DNA, 51 bp, Homo sapiens
cagcaagactctcgagcccattttcttaaacaattaggtctacatcctaac

SEQ ID NO: 275403 - DNA, 99 bp, Homo sapiens
ccgcgcccggcgccccactccgcgcagcgggttgcctccgctccccatacggcggccccaggtgtggatgaggtcaccattgtcaacattttgaccaac

SEQ ID NO: 275404 - DNA, 100 bp, Homo sapiens
gaatgagttgcataaaattccatgttgtccgggtgccaaaaagcatgagtttctgaccagcgttctggacgcgctgtccacggacatggtccacgccgcc

SEQ ID NO: 275405 - DNA, 99 bp, Homo sapiens
cgttgacaaggcactgctttttcatgacgaaccgcatgcacgagtctctcatgctcttcgactccatctgtaacaacaagttcttcatcgatacctcca

SEQ ID NO: 275406 - DNA, 75 bp, Homo sapiens
gatattgacgacctcaagcggcagaatgctcttctggagcagcaagctcgtgcaagatttactgaaaactttgcc

SEQ ID NO: 275407 - DNA, 100 bp, Homo sapiens
ctgctctgtggactcaacagtttgtggcaagacaagctcagaactgagaagctgtcaccacaggttggggtgactcagtgggaacgccatctgagcgggg

SEQ ID NO: 275408 - DNA, 149 bp, Homo sapiens
tggcggcaatagggaaagtgaggcagctgcaaggagggcggcgggactgcactcgagtgtccagacctgctcgatggtgctggagaatctggtaaaagcaccattgtgaagcagatgaggatcctgcatgttaatgggtttaatggaga

SEQ ID NO: 275409 - DNA, 88 bp, Homo sapiens
aaaaggcaaaaatcccatctaccgcaactctcagttcgagagtaaaggtactgtgagaatagagatgtttcgaaatatgcagaatgca

SEQ ID NO: 275410 - DNA, 98 bp, Homo sapiens
ggcgaccggcggcgtccgaggagcaccttatgaagctaggcagccccttgtccagcccgagggatcctcatcagggggcccaggaaccaagccccttc

SEQ ID NO: 275411 - DNA, 90 bp, Homo sapiens
gcattggtgggaatatgtggatcctacagttactctagaattattagatgcgagtaaccagctcataaatcacatcgaacagtttttgga

SEQ ID NO: 275412 - DNA, 100 bp, Homo sapiens
gaaaaacctgacttttatcatcatattgataatctcaggagaactctatgcagaagtgtaaacaggaacatcgataagtagtgtaaaaacttgcacaatg

SEQ ID NO: 275413 - DNA, 51 bp, Homo sapiens
gagatcatggtggccaaacccacaggactcagtctcctttgaggatgtggc

SEQ ID NO: 275414 - DNA, 50 bp, Homo sapiens
cggaaactccagcgtgtctccagccgtgataccggggagaccacgacgct

SEQ ID NO: 275415 - DNA, 100 bp, Homo sapiens
cacttcgcattttggcattgacatttaattttagggtcctttatatagaagggagagtaggatgatgactttgagttcactggcagccacctgacagtaa

SEQ ID NO: 275416 - DNA, 97 bp, Homo sapiens
gtaaagtcgagtatctggtgaagtggaaaggatggcccccaaatgacaaagcataaatcatggacaccagagaataaggtggacctcaggaatccgg

SEQ ID NO: 275417 - DNA, 100 bp, Homo sapiens
gtctccactggagacctgcaacaggtacaataagaacatgtcagaagttcctaattcagtacaacaggagacagctgttgatcttgttgcagaactgcac

SEQ ID NO: 275418 - DNA, 100 bp, Homo sapiens
tgacaactgcccttctgtgtctccttacctcaaggtgaatgccatcgctaaccctccaaaccccctcccttccagaagagcccactctttgaccacagct

SEQ ID NO: 275419 - DNA, 98 bp, Homo sapiens
catcctcgctcccacctgtcagccttctaccccatgagaaagaccagaattggctatccaattcccatatttgcgggattctgcatcatgtttgtctc

SEQ ID NO: 275420 - DNA, 80 bp, Homo sapiens
gcgtgtgtgagcgcgccggaccaagcgggcccagaagcgggagcagctgatgagccagatccgggagacgcagcagctct

SEQ ID NO: 275421 - DNA, 97 bp, Homo sapiens
cagctttcctcagcaacatgaagtctcgctggtaggtgagtgctgtcctcggctcactttcctcaagctctccggctgccacggtgtgactgctgac

SEQ ID NO: 275422 - DNA, 100 bp, Homo sapiens
tggccatccagcaactggctgagggactcacagctgatgacctgctgctcgtgctgatctcaggccactttcctcttctccttgagcaagtacacccccc

SEQ ID NO: 275423 - DNA, 100 bp, Homo sapiens
gaagattaccccaaatttggacttttggatcaggaaacttacatgcttgctgtaactttggatgaatggaaaaagaaactggaatctcccaacagagaaa

SEQ ID NO: 275424 - DNA, 112 bp, Homo sapiens
ttcagatcttcacagcacagttcctgggaaggtggagccaccagcctctccttgcttgcattcacaagagatgggctctgtggtctgtggaatgaaatggttaaagatggag

SEQ ID NO: 275425 - DNA, 98 bp, Homo sapiens
tcggattcctcagctacgaggaggcgctgaggagaggcagatcgggagcggtgccgagaaaaatttccttactagatgacatttcatcgcaatgtccg

SEQ ID NO: 275426 - DNA, 60 bp, Homo sapiens
cactttgctactatacggacagcatcactgcttcagaaccaaactgggcaaggagatctg

SEQ ID NO: 275427 - DNA, 50 bp, Homo sapiens
aatagactccatctatccatatgagaccttaactgatgtaagaaatctca

SEQ ID NO: 275428 - DNA, 97 bp, Homo sapiens
gaaggatgcttcagctcatcttaggctgtgctgtgaactgtgaacagaagcaaggctatggaacaccatatggttacagcacagctgcccctgccta

SEQ ID NO: 275429 - DNA, 100 bp, Homo sapiens
cacgggccctggtgctgcagctgtgggccacacagtattaaaggtggaagaaggtccatatctttttctgtgggtgcttcaagtgttgttggaagtggag

SEQ ID NO: 275430 - DNA, 100 bp, Homo sapiens
ctctgatctcaacattttggctgaaacttaattcagtgcacaaatgagatgaatgtgaacatcccacagttggcagacagtttatttgaaagaactacta

SEQ ID NO: 275431 - DNA, 75 bp, Homo sapiens
ctgtgacgggagcaatgctgacctcggtttcctggacccattccgactcaggcatgttatttgaaagcaattgag

SEQ ID NO: 275432 - DNA, 83 bp, Homo sapiens
gtcgagatgtctacttcgaagactggcaagcacggccacgccaagcaggttcacaactacatgatgccacccctcgaccgaag

SEQ ID NO: 275433 - DNA, 50 bp, Homo sapiens
atcagaggccctgtgatgatcgtgtcagcacctttggggagttgaagacg

SEQ ID NO: 275434 - DNA, 100 bp, Homo sapiens
acacatggttaaggaacaggaggaaaccattcagagtgtgaagcctcagtttaggtcatctggtggttcagaacactcaacagagggctctgtatccttg

SEQ ID NO: 275435 - DNA, 50 bp, Homo sapiens
aacctttagatgaatttacagtgtcatctgaagacagaagtgccctgtgg

SEQ ID NO: 275436 - DNA, 90 bp, Homo sapiens
gaaatctgccaggagggtgcctcccgccagtatctgatgaaggtaagagggctggtgaattaccagatctctgtcaagggcagtaacctg

SEQ ID NO: 275437 - DNA, 83 bp, Homo sapiens
gcgcctcttcgccgtcatccgcttcgaaagcatcatccacgagttcgacccgtgaaaaagcttgtggtgaaggggggcaaaaa

SEQ ID NO: 275438 - DNA, 76 bp, Homo sapiens
tgcttggggatggagtgcctccaaaggttgctgaggttcagcttgttggtttagatgaggagagttcagagtttat

SEQ ID NO: 275439 - DNA, 82 bp, Homo sapiens
cctattgtaagtgcagatggaacacaacagataacgaaggaggcccaacttcattcaataaggagcctgacggatttatccc

SEQ ID NO: 275440 - DNA, 75 bp, Homo sapiens
gcggaggagctccaggcccgtcggcgcggaggttatcctacgcggagagccaggtaccaatgggtgcgctgcaat

SEQ ID NO: 275441 - DNA, 100 bp, Homo sapiens
ttggttggaagacctattatcagatcaaccaccaaagtgggaaacattgaaatcaagttggtagctggcagtgttgtgatggcttttgaagaagtatgcc

SEQ ID NO: 275442 - DNA, 147 bp, Homo sapiens
ctttttactctttgggcaattatattgtggcctccgaaatagctaaagaatctgccaaatctcctgtgattgtagacagttttgatgtggacaatggcacatctgcgggacggagtcccttggatcccatgaccagcccaggatccg

SEQ ID NO: 275443 - DNA, 90 bp, Homo sapiens
gcagaaactctggatctgcatggaattctgtggggctggttctctccaggacatctaccaagaccaagatcactccatggatgaaatgac

SEQ ID NO: 275444 - DNA, 100 bp, Homo sapiens
agggtttgaccctcagattggtgtctactacatcgatcacatcaacagtgaaaaattagacgatttcaagaattggagctgaatctgatgttaagtaatg

SEQ ID NO: 275445 - DNA, 50 bp, Homo sapiens
acctcctgacacaacaccactcaatcctagaagacagtatgatattttct

SEQ ID NO: 275446 - DNA, 100 bp, Homo sapiens
cagcattctacaaccccagaccaccgttaatccagatcgcatcaaacaattgttgaatgttgggtcacgaagatctcaacctggccaaagaagagaaccc

SEQ ID NO: 275447 - DNA, 98 bp, Homo sapiens
gtggttgcggcgcgggaagtttggatcctggttccgtccgctaggagtctgcgtgcgagagaacagcccatcttcaccacccgagcgcatgtcttcca

SEQ ID NO: 275448 - DNA, 75 bp, Homo sapiens
gacccagcagccgccatggctctgctccgaggtgaccaaaagccagccccactgtgagttgaactctttcgtgtt

SEQ ID NO: 275449 - DNA, 100 bp, Homo sapiens
ggcggcagagaacttgccggtgccagctgagagatcctgaaggagctagacgagtgctacgagcgcttcagtcgcgagacagacggggcgcagaagcggc

SEQ ID NO: 275450 - DNA, 83 bp, Homo sapiens
ccccaattcagcagagaatattttcaaggggggagtgtggccatctggggccgtgtggtatttgccactcaggagacatgtcc

SEQ ID NO: 275451 - DNA, 75 bp, Homo sapiens
agaacacacagtcggctatggagagctactcttggaactgtggctgcaccatctgtcttcatcttcccgccatct

SEQ ID NO: 275452 - DNA, 50 bp, Homo sapiens
tgagtcgcttcaagtttatcgaatgattacggacctgaagccaaagaaca

SEQ ID NO: 275453 - DNA, 75 bp, Homo sapiens
cggtgcttcgccccctgacccttcgcccccaaagaccagctctaacatgagcgggatcgtgtgcagaagaaaacc

SEQ ID NO: 275454 - DNA, 100 bp, Homo sapiens
ggcccggccggcctcgtgcgccccagattcccaaatgctggaaaatcctctttgctaagttgtgtttctcatgcaaaacctgcaattgcagattacgcat

SEQ ID NO: 275455 - DNA, 87 bp, Homo sapiens
aggcgtctgggatggtgtgggaccgggccgaatacatcaagcaatggtaacatctttaaatgaagataatgaaagtgtaactgttga

SEQ ID NO: 275456 - DNA, 90 bp, Homo sapiens
atggtgcagatattaatgggagcatatatgatgaggatgaatttcacccattcatcgaggcacttcttccacatgtccgtgcaattgcct

SEQ ID NO: 275457 - DNA, 98 bp, Homo sapiens
acccctccgtggagtccgtggtccagtgtgagatcgacgaggtctataagaaggagaaagctcgagtcatcactgaggaagagaagaatttcaaagcc

SEQ ID NO: 275458 - DNA, 83 bp, Homo sapiens
acgatttctgctcactgcagcctccacctcccggcctcagctggtcagtgagaaggtcggaggggccgaggggaccaagctgg

SEQ ID NO: 275459 - DNA, 100 bp, Homo sapiens
cggcaggaagaatctatacacagccatgccccttccgattgggagggacaagaatgcccttctgcctgcagggttccggcagaagaaccagacatcaaag

SEQ ID NO: 275460 - DNA, 80 bp, Homo sapiens
taagaactttgccgataccttaggatacaacatagaacctattatgctctatcagggattaatgaaaatcaagttccatc

SEQ ID NO: 275461 - DNA, 100 bp, Homo sapiens
agatcgacgtcatcaactctcgcacccagggcttcctggcgctcttctcaggtggtctatctgcactccaacaacatcaccaaagtgggtgtcaacgact

SEQ ID NO: 275462 - DNA, 98 bp, Homo sapiens
cgcgcatctggctgcagctctgcggggcgcaggaggcggtgcacagcgccaagaaccacacgatgagccagcacgcacagtgagggatcgctcaacag

SEQ ID NO: 275463 - DNA, 107 bp, Homo sapiens
ggacaagtttgcagatcgggagcgcaaggtcgccctcaaggccatgatcaaaacgtacatgtcccagagcaagcacacggaggcccgggagctcatgtactcgggag

SEQ ID NO: 275464 - DNA, 142 bp, Homo sapiens
tgtgtggcactggacggggaatcaagagacccggtttctaatccctgctctgtcactaacaagctgcgtgatcttcggaaggagctcattgccaagttagatcaggcagaaaaggagaaggtggatgctgctgagctggttc

SEQ ID NO: 275465 - DNA, 90 bp, Homo sapiens
agagaatcttaatcagctcatagccgttgacaaccaacttctgcatgtgaagcatttcagatctgctcggtagacctggtgcaccaccac

SEQ ID NO: 275466 - DNA, 99 bp, Homo sapiens
ccaaaacctggaagaggatacagtcactctggaagtattagactatgtgaaagggtttggaggaaaatttggtgtgcagacagacagacaagacaaatg

SEQ ID NO: 275467 - DNA, 100 bp, Homo sapiens
gcccccttcatggccaacatccctctcctcctctaccctcaggacggcccccgcagcaagccccagccaaagaaacgggctgtaaaggcagaaaaccacg

SEQ ID NO: 275468 - DNA, 95 bp, Homo sapiens
gtgcagctaagcagccaactgcagaaacgtcagattatgtttgagaccttcaacaccccggccatgtacgtggccatccaggccgtgctgtccct

SEQ ID NO: 275469 - DNA, 74 bp, Homo sapiens
ctatggctggcagtcaggacatattcgatgccatcgtgatggcggatgagaggcattgaagttgatatcgatgt

SEQ ID NO: 275470 - DNA, 74 bp, Homo sapiens
tgaagaaatctggaagttttccacctaccatgctctcggtgacgcatccaaagaagacattgacactgctatga

SEQ ID NO: 275471 - DNA, 100 bp, Homo sapiens
atttgcaaatgatatacaacttctaaggtcctgctcaggttccaatgatgtccccaaatggttctgtgcctcctatctatgtgcctcctggatatgcccc

SEQ ID NO: 275472 - DNA, 50 bp, Homo sapiens
tcattacaacttccctcgtgtagcggcggctggagcgagcactggctgag

SEQ ID NO: 275473 - DNA, 98 bp, Homo sapiens
attaggaatacaggaacttctaaatgaaccaaatatccaagacccagctcaagcagaggcctacacgatttactggtgtccccaggtgtcattgccaa

SEQ ID NO: 275474 - DNA, 100 bp, Homo sapiens
ggaacatggacatgaagaggaggatccacctggagctgaggaaccggaccccggcagctgctactgcagcactggggtgtcagttgttggtccgacccag

SEQ ID NO: 275475 - DNA, 90 bp, Homo sapiens
cgaacgctgagcacgcgcggaaaccctttaaaggacttgacccaatgaaagaagcatatggcacttgtgaagataaatgttactcctccc

SEQ ID NO: 275476 - DNA, 98 bp, Homo sapiens
aatgatctctttatgaaaatgaaggataccatacttgcagagctccttcagatacataaagaacacattgtaggataccatgaacatgattctctttt

SEQ ID NO: 275477 - DNA, 100 bp, Homo sapiens
ctttccatcattggtgaggtgctatctcggagacacatgaaggtggcattttttggcaggtatgtcttactgaaagaaagaaacatgcttctaaccctag

SEQ ID NO: 275478 - DNA, 101 bp, Homo sapiens
cgggtgcaggcagccctggtgtgggagcggccagctaggagcgctctgtggtgcctggggctgaacgcggctttctgcacaatcctggaggaagagaaggc

SEQ ID NO: 275479 - DNA, 100 bp, Homo sapiens
tggactcatggaggctgagcatttattcaggtcattcctgtcccaatcagctgctctactactgatgacattaaagatgccttcattacccaggcacagg

SEQ ID NO: 275480 - DNA, 100 bp, Homo sapiens
ggtgaatcccctgtttgagaaaaggcctaagaattttggcattgacctctgtgagtgaaagccttcagagggaagctgctaagaagcaggccatgaaaca

SEQ ID NO: 275481 - DNA, 100 bp, Homo sapiens
aagacagtgacgacaaaacaccagatgatgaccctgagcaaggaaaatctgaggggcaattgaaggaacagactaaaaatcgtgtcctggaaggaaacta

SEQ ID NO: 275482 - DNA, 90 bp, Homo sapiens
gaaaagaatacattcctgattacctgccacccattgtgtcttctcaagaagtacaagccagctgccatgttgtgagcacataccacatag

SEQ ID NO: 275483 - DNA, 74 bp, Homo sapiens
cagagaatggcagccatttatttgtcccgtggaccctgatgctcccataagacagaaaatgccccttgatgatc

SEQ ID NO: 275484 - DNA, 74 bp, Homo sapiens
gaggagagcagtgacggggaatccgacgaggagccttttgtggagatctgcatgaaacaacataacaaatacga

SEQ ID NO: 275485 - DNA, 90 bp, Homo sapiens
tacctccatcaggaccccagatgtctgacagccctgtgtgacaccaagataagtaacgtgctggagaatgccgaaggtgccagaaccacc

SEQ ID NO: 275486 - DNA, 90 bp, Homo sapiens
tcagtggctaaatggctccctgattcatgggacagagcagaatgggctgatatagatccggtgccgcagaatgatggccccaatcccgtg

SEQ ID NO: 275487 - DNA, 90 bp, Homo sapiens
acttgggagacatagagatctcagaagatgccacgctggcggagctgaagtctcagggctgtcagaaatcccgatgatcttgaagcaagg

SEQ ID NO: 275488 - DNA, 89 bp, Homo sapiens
tacgatattggtttcattatacacttgtggcctttgcatggttgggagttgttcctcttacagcatgttttggcttgtggttaacgggc

SEQ ID NO: 275489 - DNA, 96 bp, Homo sapiens
agaattccccttcctagaaggaccaagatggcagcagtgactctgctggctttggcgtatacacagtcgggcgcctccagcttcggggagaagttc

SEQ ID NO: 275490 - DNA, 100 bp, Homo sapiens
tgaactctgtggccctgggagcccccctgtgctcacgccgggttctttacctccgagccaggccgccgcaaagcaggccaagtcctgtatctgccatgtc

SEQ ID NO: 275491 - DNA, 99 bp, Homo sapiens
cctactggacaagaatatgctgccaaaattatcaacaccaaaaagctttctgctaggggtgccgtgagcgatgtggagatgcaggaacactatgatgag

SEQ ID NO: 275492 - DNA, 74 bp, Homo sapiens
aagaaaatcgcagactttctcaactcgttcggtgctggagaatctggtaaaagcaccattgtgaagcagatgag

SEQ ID NO: 275493 - DNA, 124 bp, Homo sapiens
caagcccacatagcgcagcatatgtcctctgggataatggtgctaagaacctttacagagttggctttgagggcatggacttcggcagtctgtccaaccttcaggtcactcagcctacagttgg

SEQ ID NO: 275494 - DNA, 100 bp, Homo sapiens
aggagtcagggatggctcttcctcagtggcagcatggaacctgcatttcatagaggagatcttctctttctaacaaatcgagttgaagatcccatacgag

SEQ ID NO: 275495 - DNA, 100 bp, Homo sapiens
tgctcttctgcctcttgatctccgccaccgtcttcaggccaggctaactatatgtcagaaagcatcagcttttctcgatggacccattcatctaatgaaa

SEQ ID NO: 275496 - DNA, 87 bp, Homo sapiens
gaagctttacctcgctgaccctatgaagaattcagacctaccttcagtcaacaaagccaattattgacttatatgaagaaatgggga

SEQ ID NO: 275497 - DNA, 133 bp, Homo sapiens
acggcgtggggcctcgctaaggaattcccggcccctcagggccacggctttagcggtgtcttttgcggtcacaaacatgtcagacaaaagtgaattaaaggctgagttggaacgtaagaagcagcgactggcc

SEQ ID NO: 275498 - DNA, 50 bp, Homo sapiens
gattccaagtaactcttatttgcgctgctgggacatcgccttgggtcccc

SEQ ID NO: 275499 - DNA, 75 bp, Homo sapiens
aagaccagaagtggatggagacaatcatttggggaagaatctacagttgctgatggacagagtggatgaaatgag

SEQ ID NO: 275500 - DNA, 98 bp, Homo sapiens
tctggctgctgcggaccccgccgagtcctagcgcctggcctgcgcgccgctgcccgcgccacaggacttaaagagagatctacttcagagccagcagt

SEQ ID NO: 275501 - DNA, 51 bp, Homo sapiens
cggctgccttccacctccagtgctggttacctgtgcatgacagatgagtgg

SEQ ID NO: 275502 - DNA, 75 bp, Homo sapiens
gcccgctcacctgcgctgtgatgcctgcagagctgtggcttaccaggaggtcgttcagctacctttagagtttgt

SEQ ID NO: 275503 - DNA, 74 bp, Homo sapiens
ctggggagcccttctgcgccacaggtacagaggtgcagttccatggtacaccataaatcttgacttaccaccct

SEQ ID NO: 275504 - DNA, 50 bp, Homo sapiens
aaaaattttccaaaagagagatgatgtactccagtatgccaagtctgcca

SEQ ID NO: 275505 - DNA, 101 bp, Homo sapiens
gcgagcggctgtgtggatgtcggcgaagccgcgggcgagatgccatggacaatattaccaggcagaaccaattctacgatacccaagtcatcaaacaagaa

SEQ ID NO: 275506 - DNA, 98 bp, Homo sapiens
tggggagcagctgcgggtgttccgggagcaccggggctccgtcatctgtctggaggccaagtcctgtatctgccatgtctgtggcgtccacctcaaca

SEQ ID NO: 275507 - DNA, 100 bp, Homo sapiens
agcacatgacgtatttgagttgaagcagttttctcagctgcctgctaacatagctgtttgcagttctaagccgaacaacaacgtatccttacacagagac

SEQ ID NO: 275508 - DNA, 100 bp, Homo sapiens
ctggagctgacccgctgcaaggagaagctgcacgacgtggacttctacaaggcccgcatggaggtcccccccgcctccagccagcctgtgcagacttgct

SEQ ID NO: 275509 - DNA, 83 bp, Homo sapiens
cccctttctggcaaagatgagggggattcttaaggtcagcccaaggccaaccccactgtcactctgttcccgccctcctctga

SEQ ID NO: 275510 - DNA, 75 bp, Homo sapiens
agttaatcctcaatttaagcctgatctaacccctagaaacagaataatcatgggccagactgggaagaaatctga

SEQ ID NO: 275511 - DNA, 100 bp, Homo sapiens
atggatgatcgagaggatctggtgtaccaggcgaagctggccgagcaggctgagcgatacgacggttttgaacgaagaatgtgatcagaactggtacaag

SEQ ID NO: 275512 - DNA, 75 bp, Homo sapiens
cttccctgagccactctccaggctgctccagtactcaagggaacgggagacgaaaccagacagagggtcaagttt

SEQ ID NO: 275513 - DNA, 52 bp, Homo sapiens
aagacttcaaaacccattttcttggaacagcatatgccatatatgagctggc

SEQ ID NO: 275514 - DNA, 74 bp, Homo sapiens
ggcttctatacagccagtgaccctaacaaggaggatatcaggatgaccattctgccccccttggagaaactgcg

SEQ ID NO: 275515 - DNA, 125 bp, Homo sapiens
ccctgatgaggtgaagtcatttcaccagcctatcacagcttctagtcttcttgggaatccctagaaaacaatctcctggtccaaggtgcttgagtgggccgatccagctatatcaagaacctttg

SEQ ID NO: 275516 - DNA, 100 bp, Homo sapiens
ctgttacagaggtctccagagccttctctctcctgagtcacctaaggtcctgcgagtacaagggtcgacccccaaaggcaggggcagagccagcatctga

SEQ ID NO: 275517 - DNA, 100 bp, Homo sapiens
cggagagagccgtaggcaggaccccgggacaccctggaagccaggaaatggctgagtcatcactagagagtgggaagggcagcagcagcagagaatccaa

SEQ ID NO: 275518 - DNA, 89 bp, Homo sapiens
gcagaggacattctagagaaaggaaatggggacatcttgtcatttgaggatgccaaccgcgccatgcagactggtgtcaccgggatcat

SEQ ID NO: 275519 - DNA, 89 bp, Homo sapiens
gtgaaatcaacagccaacaaataccaagtcttttttttcgggacccacgagacatatcaaagctcagctctttgaaacatccagcaaga

SEQ ID NO: 275520 - DNA, 51 bp, Homo sapiens
cagagtttggggagcattacgaggtatcgaaggatgatcgcagtgatgtgg

SEQ ID NO: 275521 - DNA, 82 bp, Homo sapiens
gactgaattaaaaggtgtcaagaagctcagaatggtattgtccttcttgtaaaactgattccagtgaagttgtaaaggctgg

SEQ ID NO: 275522 - DNA, 82 bp, Homo sapiens
aggacgcccccgagggtgtagaccgcgcccctggagaaggtagaagatagcaccatgccgattcgtcgaactgtgaattcta

SEQ ID NO: 275523 - DNA, 74 bp, Homo sapiens
tcaccacagatcccagccagtctctactcagcctggagcaaggtgatgtagtcaaggtgatcgtctccgtccag

SEQ ID NO: 275524 - DNA, 91 bp, Homo sapiens
cttcgatcgcctcgcgccggctgctctttccggacctgcctagagctggaacgttacctccagagcgagccctgctatgtttcagcctcag

SEQ ID NO: 275525 - DNA, 97 bp, Homo sapiens
atcgtgcctgaaggagtacatgccctttatgaagatattcttgagggtttctgctttgggacaaccatacatctaattccttaaagtagttttatat

SEQ ID NO: 275526 - DNA, 90 bp, Homo sapiens
cgatgttggaaaaagacggatcctcacacaggtattcaggaataccaggatggcgtgcccaagattccaacagcctgtattacggtggaa

SEQ ID NO: 275527 - DNA, 75 bp, Homo sapiens
gccctaatggaggtctccagtttcggtatggaaaaattgtatctacaaaggcaattcttgacaaaaacacaaatc

SEQ ID NO: 275528 - DNA, 100 bp, Homo sapiens
ttggagcaagggaaggagccctggatggttgtgagggaagagacaggaagatggtgcccaggaggctgtgacattcaaggatgtggctgtggtcttctcc

SEQ ID NO: 275529 - DNA, 83 bp, Homo sapiens
cgttcactccagactgggaaagccgagaagtttccactggggtcaaaatgcagatcttcgtgaaaacccttaccggcaagacc

SEQ ID NO: 275530 - DNA, 75 bp, Homo sapiens
tggcgacggctcagatgagggcgagctctgcgccctgggcgctgcctatggcacagccaagagcggtaccggcat

SEQ ID NO: 275531 - DNA, 83 bp, Homo sapiens
gtgtcggcgcctcattcgggtggagctgagccggagacagatgccatggacaatattaccaggcagaaccaattctacgatac

SEQ ID NO: 275532 - DNA, 75 bp, Homo sapiens
gttagagaactacagaaacctggttttcttgggagactacctaggtggagaagcgtactgggccggcggcctgca

SEQ ID NO: 275533 - DNA, 50 bp, Homo sapiens
ttggagtgtgcgtgcgcgccgagcgctctgcctcaccgagggagccaaag

SEQ ID NO: 275534 - DNA, 75 bp, Homo sapiens
gaattggttaaatatttgctggcttctgggaatcttttaactgagccagtcggctacttggaatcttgtttctcg

SEQ ID NO: 275535 - DNA, 80 bp, Homo sapiens
gaagacactccccagggcagaaatagcgaccatggcgagatttcaacactacacttgcacaatgtctttgaaaccaagag

SEQ ID NO: 275536 - DNA, 74 bp, Homo sapiens
cagaatttcctgtgttccctttgccgctcctggagttcactgtgagaaagatcagtctaaagaaaaggagaaga

SEQ ID NO: 275537 - DNA, 90 bp, Homo sapiens
ggggtcacatccagttgacaataaatgctcttgggacccaaccaccatgctgtgaagcagcccaggccacacagagaggccacgtgtaca

SEQ ID NO: 275538 - DNA, 75 bp, Homo sapiens
cggctcacgcagcttcaggacgctgtgaattcgaaaaagttacgtcgatcacaacacgctcgcaaagaaacagag

SEQ ID NO: 275539 - DNA, 76 bp, Homo sapiens
cccagcctcgtgggagccccgcgggtcctgcccaggcattcccatcaagagcaccatggacaaccccaccaccacc

SEQ ID NO: 275540 - DNA, 75 bp, Homo sapiens
gcagtctctgattgatttaggatctagtagaattcagacctaccttcagtcaacaaagccaattattgacttata

SEQ ID NO: 275541 - DNA, 99 bp, Homo sapiens
aatgcgttcttccattaaatgaggatagtccgttgatgtatcagccacaaaaaatggacttgactatgcactcagtcctggtacctgggataaaagttg

SEQ ID NO: 275542 - DNA, 74 bp, Homo sapiens
gagcctcacagctgtattcatgtggggctactacaaagttctgggaaagggaaagctcccaaagcagcctgtca

SEQ ID NO: 275543 - DNA, 82 bp, Homo sapiens
aagtgtggcaagtgtgacccacaaaattctcgcccatattcaggaagagcctaggctggatgtcttgatcaataacgcaggg

SEQ ID NO: 275544 - DNA, 100 bp, Homo sapiens
ttactgttgcgtggttcgttattaacagtggatggcattcccaatgacagtagtgatagtgaaatggaggacaaaactacagctaatttggcagccttga

SEQ ID NO: 275545 - DNA, 111 bp, Homo sapiens
ggagaggggccgtggcccctgcagcggaaccggacccagtccctgagccgcccctacacccacagggagtggagcttggtttcgggatctcggtgctgcagacggcgagac

SEQ ID NO: 275546 - DNA, 100 bp, Homo sapiens
gcttgccacctccatcaaggaaaaatgatctgttaaatgaagctgtcatcaggcgaggattaaatccaccacacagggtgaaatctatctccatgacaac

SEQ ID NO: 275547 - DNA, 80 bp, Homo sapiens
ggcggtggctgcggttgcgggaccgattctgaggttgggaccaagaaggaactatctattttaaaccaaaaattttccga

SEQ ID NO: 275548 - DNA, 75 bp, Homo sapiens
ggacaacatgctgcggggcacagaatacagattctgttcatcttgctctgaaattaaataattctgaactcatgg

SEQ ID NO: 275549 - DNA, 74 bp, Homo sapiens
cgggaggcgcttccacctctccaccaccgaccgcgtcatcaaagccccatggctgggggttatggagtgatggg

SEQ ID NO: 275550 - DNA, 74 bp, Homo sapiens
gtggctcatgcctgtagtcccagcactttgggaggtggtggcggtggaggacagcagcgagctggtgactggaa

SEQ ID NO: 275551 - DNA, 98 bp, Homo sapiens
tcggctggtgcttggcggcagggacgatatggcagaagattttcaagtcccggctggtggagttgttagtgtcctatggcaacaccttctttgtggtt

SEQ ID NO: 275552 - DNA, 100 bp, Homo sapiens
agtgacagcacaggtcacagtaaggccaaaaatgtgcatactcacagagttagagagagggatggtggacttggatgttgtgggtgatggtatgcagtgt

SEQ ID NO: 275553 - DNA, 75 bp, Homo sapiens
gacgtctggaaatgctacagtttcagaagtcgaactgaaccagcgatggcaactacaaaagcagtatgtaaaaac

SEQ ID NO: 275554 - DNA, 100 bp, Homo sapiens
atggaggacgatgcaccagtgatctacgggctggagttccagatcctgacattgatgctgccagtgccatgatgcttttgaatactccccctgagataca

SEQ ID NO: 275555 - DNA, 75 bp, Homo sapiens
caagggtgttcccgaactagagtggatattaataaggcagcggaaagaagaaatatgaatacggctccatcaaga

SEQ ID NO: 275556 - DNA, 75 bp, Homo sapiens
aaacgagtaggagacaatgacttcctggaggtcagagtgcctggtgaagaatgtgatgggatcactagcatgtct

SEQ ID NO: 275557 - DNA, 82 bp, Homo sapiens
gaatgaaatagaggatgcccgctggttcactagagaacagctcgatgcattctatttctcatcatttggctcataactggag

SEQ ID NO: 275558 - DNA, 98 bp, Homo sapiens
acatgtctaaagaagagacccaagatctgtgggaacagagcaaagagttcctgagctttttacctgcacctactcagctatctcaggaccagcttgag

SEQ ID NO: 275559 - DNA, 82 bp, Homo sapiens
ctatccttacccgacctcagatgctcccttctgctcctgatatccaggtgaaagaactggagaagcgtgcctcaggccaggc

SEQ ID NO: 275560 - DNA, 100 bp, Homo sapiens
cgggttcgccgagccgcaggagagacacgctgggccgaccccagagaggcgctggacagactgtgccctgtccacggtgcctcctgcatgtcctgctgcc

SEQ ID NO: 275561 - DNA, 75 bp, Homo sapiens
tcgaacacctgtgatggtacagccagggtgatgacaactccgtgagggtggagattatacatctctcatcatttc

SEQ ID NO: 275562 - DNA, 83 bp, Homo sapiens
ggcgcgcccagagccccgcgtttcagccctagggaagttggaatcgaagcctcttaaaatggcagatgacttggacttcgaga

SEQ ID NO: 275563 - DNA, 90 bp, Homo sapiens
cgcgccgccgggacccccaggacgacgtgtacctggacatcaccggtcgtaatctgaaggagtggctgagggagcaattttgtgatcatc

SEQ ID NO: 275564 - DNA, 75 bp, Homo sapiens
acccccgggatcctgtctggagagaagcagcggatcagcagaggttgtgaccgagattcccgacgagagagactg

SEQ ID NO: 275565 - DNA, 75 bp, Homo sapiens
cgaggatgcaccttcccctgccttggaaagcttttcatgcaacacccaacacttataagcggaagaacacagaaa

SEQ ID NO: 275566 - DNA, 101 bp, Homo sapiens
aggagggcaagtttgtccggctgcgcaacaagtccaatgaggggatgaacgtagggcacttagcttcttccaccagaagggcctccaggattttgacactc

SEQ ID NO: 275567 - DNA, 98 bp, Homo sapiens
gcagcggcgctcgcagcgcccgattctgcttctcagaagatgcactattatagatactctaacgccaaggtcagctgctggtacaagtacctcctttt

SEQ ID NO: 275568 - DNA, 85 bp, Homo sapiens
gacccccgagcagcgccgcgcgcccccaaatacatcaagatgtttgtactggatgaagctgacgaaatgttaagccgtggattca

SEQ ID NO: 275569 - DNA, 100 bp, Homo sapiens
ctcgcttgcagttcagcgaccacggtaacttacgacctatttctccgtggcgttggctgttttctgttgttgttcctgttctgatcgtctctaatggcct

SEQ ID NO: 275570 - DNA, 75 bp, Homo sapiens
cttcctgcacacagccacgatttgcaaagattgtgttcacctattgaaaattaaaaagacattttgtttatgtaa

SEQ ID NO: 275571 - DNA, 82 bp, Homo sapiens
gtcctcgcacctaaagtcgcacctgcggacgcacacagctggtaggtgagtgctgtcctcggctcactttcctcaagctctc

SEQ ID NO: 275572 - DNA, 82 bp, Homo sapiens
gctgctgctcggaccagcgcgtttggtgccctggttgtcagatgttggaaagcagtaggacggaacatactcttcgtggttg

SEQ ID NO: 275573 - DNA, 50 bp, Homo sapiens
cctcccgagtggctgggattacaggttttgagagattacctgaagttgca

SEQ ID NO: 275574 - DNA, 82 bp, Homo sapiens
ggacaggccacgctgtccgtccgcagtaccgacgcctgcaggacatggatttgattgacatactttggaggcaagatataga

SEQ ID NO: 275575 - DNA, 100 bp, Homo sapiens
tggaaattggactaaattaccagaatgcaggggaaggcccgaacaagacaggaacgtcctgtgccctggactgtggagctggcattgggaggatcaccaa

SEQ ID NO: 275576 - DNA, 100 bp, Homo sapiens
gtgccagatggctggaaaaccacccacctgctctttagcctgggagctgtgtgtctggacaggaagtttgtgtttttcaacatacctcagattcaataca

SEQ ID NO: 275577 - DNA, 100 bp, Homo sapiens
aaacaaaaggactgtgggattccattaaaagcccaaacaaattcgaatatcttctaaaacaggaatacctctcaatgtcttaccaaagaaaggactcaca

SEQ ID NO: 275578 - DNA, 50 bp, Homo sapiens
gaaagaagttgcaaaacactggttggtagctggcagtgttgtgatggctt

SEQ ID NO: 275579 - DNA, 75 bp, Homo sapiens
cgatgaagtgcagaggtttttttctgttggtcgcattatgtttcagctcttctcagacatatgtccaaaaacatg

SEQ ID NO: 275580 - DNA, 90 bp, Homo sapiens
cgcagaagtcgcgtgtctaggtgagtcgcggtgggtcctcgcttgcagttcagcgaccacgacctaatctgggagcctgcaagtgacaac

SEQ ID NO: 275581 - DNA, 51 bp, Homo sapiens
cacagctggagcggcgagctctgcaggatccagagctggtgcggaacatct

SEQ ID NO: 275582 - DNA, 97 bp, Homo sapiens
ccatctttaccggctgtggctcagcatggtcagtgccgtttaacctttattgtggtggagtccaccccgctgtgggtctcactctgtcgcccaggct

SEQ ID NO: 275583 - DNA, 100 bp, Homo sapiens
gaacttaatacagcaagaaagaccatcaagtttaccaccatttccaaagcagccaggaacatcaggtgcttatcctcttacttcaccccctacatcttat

SEQ ID NO: 275584 - DNA, 75 bp, Homo sapiens
gaagaacttcttcagaattagaaaggagctgcttcccaataaggaaacaggtgtgaaggagctgtgtctgctgct

SEQ ID NO: 275585 - DNA, 50 bp, Homo sapiens
ctctgccagtataaatgcagtgacgatccctgcatgtcactgagtccacc

SEQ ID NO: 275586 - DNA, 80 bp, Homo sapiens
gctagaggttgaggacgctcagctgaccccgcactacatctacccaccagccatcgtgcagcccagcgtggtgatcccag

SEQ ID NO: 275587 - DNA, 75 bp, Homo sapiens
agaacagccctccatcttgcagcccagaagttctccaagttgcagagtaaagtggagacagccgaatcacgagtg

SEQ ID NO: 275588 - DNA, 75 bp, Homo sapiens
ggacaagatggtttacatctcgaacggatttttagactctgaggagcagttggagctaatccacattatggaaat

SEQ ID NO: 275589 - DNA, 96 bp, Homo sapiens
gcggatctggaggagcagttgtctgatgaagagaagatgacaacggcaacacgacaagaagtccttggcctctaccgcagcattttcaggcttgcg

SEQ ID NO: 275590 - DNA, 100 bp, Homo sapiens
agtcgactcttctcatcccccaaagatcattctgcctgggaaagaaatgaaagtctttccaatgcagactgcagagagatcctgcttcccatgatgaccg

SEQ ID NO: 275591 - DNA, 100 bp, Homo sapiens
actgatgttcggccttatgtatgcaagttatgtaactttgccttcaaaacgaaaggtgttggagagcacaatggctgaacaagtccttcctcaggctttg

SEQ ID NO: 275592 - DNA, 74 bp, Homo sapiens
caacagtgttgtgccagcctacaggaggaaaggccagactcacagaagtctcaacagatcaccccccaacttgc

SEQ ID NO: 275593 - DNA, 100 bp, Homo sapiens
ggctcccctctcaggacaacccagatgtgcaacaaagtgcgatgggtgataaaagaaaatgtggctgaagttacccgaagttcagcttgcagtgtaattc

SEQ ID NO: 275594 - DNA, 83 bp, Homo sapiens
cattattgcgcgtggaacggctgcttttggaagagtaatcaagtcagaggattatatgacttttatctgcctagagaagaact

SEQ ID NO: 275595 - DNA, 96 bp, Homo sapiens
ttcacaggaagatgaaagacctctgtcacctttctatttgagtagcctctagttcgttagtcaaaacgtgaaaaaaaagacctgctttgccctggg

SEQ ID NO: 275596 - DNA, 76 bp, Homo sapiens
gtcgtcactgtactggtatagcaatcaaatggcccacctgccgtttgctgtcattggcagcacagaagaactgaag

SEQ ID NO: 275597 - DNA, 101 bp, Homo sapiens
ttgagcctctctctgccacaatggtagttgagggccaagaccagcttcaagtctccatggtaccagaaaacaacaacctcacagcacctgaacctcaagaa

SEQ ID NO: 275598 - DNA, 101 bp, Homo sapiens
agataatgaaatagtgttgtacttaatgttacgggctgttgatagatttcataaacaacagggtagatatccagggatgaagaaccaggaggccagctggt

SEQ ID NO: 275599 - DNA, 83 bp, Homo sapiens
ccggtcctcagcgactcttctgacctccgcgcgacgtacccgccgccgccgttggctggagccgagagggtgacctctctggg

SEQ ID NO: 275600 - DNA, 82 bp, Homo sapiens
ccccggaattctgagcaccaaaagtgatcagggccaaagcggtcagtgagaaggaagtggactctggaaacgacatttatgg

SEQ ID NO: 275601 - DNA, 100 bp, Homo sapiens
ctagccggacgtcctccgactcaagtgccggtggtggtgtgcacattgagccccggtatagacagttcccccagctgaccagatcccaggtgttccagag

SEQ ID NO: 275602 - DNA, 75 bp, Homo sapiens
atgtcgtccgaggcccagagatgaccccttatgaaggcctggcaaaaagcacgaagtgatgggtgggagcgagcc

SEQ ID NO: 275603 - DNA, 51 bp, Homo sapiens
agcctattggaggaaaacacaccaaggtggaatgaggtaccatctactgtc

SEQ ID NO: 275604 - DNA, 100 bp, Homo sapiens
aagcaataccagatattggcagtagagggtgctctttctctagaggagaaacttgttcggctttccagtttggcagcagcactacaaatttcaacttcac

SEQ ID NO: 275605 - DNA, 103 bp, Homo sapiens
cagggtataactttacattagcagatatactattgtactatggacttcatcgctttatacgtcatcacgtagacataaccaagaaacttcacccaaatcaagc

SEQ ID NO: 275606 - DNA, 82 bp, Homo sapiens
catctgcgatgtgaggaaaggcacctccaccagcttgctcacttccgacagagaaaaacaaaaggtgacagttcgcattcgg

SEQ ID NO: 275607 - DNA, 80 bp, Homo sapiens
ggcgggcgccgcgggacctctccgggccatgggtctcctccgggctggggctgagcaagccctcggagtgaccgtgggtg

SEQ ID NO: 275608 - DNA, 75 bp, Homo sapiens
taacatgcgtggagtggttctacgtgtagtaactgttctggaggaaaaggcttctcttttacatcgtactcagga

SEQ ID NO: 275609 - DNA, 96 bp, Homo sapiens
agcatcagcctcgagctgcgcaagcccgacggcaccctcgtctccttcaccgccgacttcaagaaggaggccatgatggatttcttcaacgcccag

SEQ ID NO: 275610 - DNA, 98 bp, Homo sapiens
aaacctactgcctgtagaagcagacattttagcatcctctttgatacgcaacctacggctctctgagtccttgaaaaagaaccaactctggaacggga

SEQ ID NO: 275611 - DNA, 82 bp, Homo sapiens
cgacgatcctctagagcactgtgtgtctccccggacgcgagcccgctcccctgaggagtgcatccgccccaacccttttccc

SEQ ID NO: 275612 - DNA, 83 bp, Homo sapiens
caaacatgtctctaaaagctctgaggatgagtctgaatgtacttcagatgaggaaatctttatctcacaagatgaaatacagt

SEQ ID NO: 275613 - DNA, 83 bp, Homo sapiens
cctgacggccctgcagagagaaacagagtgtgagctgtcagtggagaagtccacagtgctgcagtctgagctggaatcctgta

SEQ ID NO: 275614 - DNA, 50 bp, Homo sapiens
gccttgtccacggggcagatccgattagaatctttggagtaattacctac

SEQ ID NO: 275615 - DNA, 83 bp, Homo sapiens
ccatgatgccccacttggtgaatggagatgcagctcagcaggaaaactcaatgtgagtagtgacactgtccagcatggtgtgg

SEQ ID NO: 275616 - DNA, 74 bp, Homo sapiens
gcatgaatgaggctgagatagttgatgttgctctgggaatcctgattgaggtctgtttctgtcgactgtggacc

SEQ ID NO: 275617 - DNA, 96 bp, Homo sapiens
gggtccgagccagccgctgttttgccggaggagcccctcaggccgcttccagacagttcgtgttgggacagtgggcacccctgtgggcaccatcac

SEQ ID NO: 275618 - DNA, 51 bp, Homo sapiens
cattgtgatatccgatagtgatggagaggaatgtatcctgtcaggtataat

SEQ ID NO: 275619 - DNA, 100 bp, Homo sapiens
caggaccctacagaagatgctgaagctgaggacacacccaggaaaagactcaggacggacaagcacagtcttcggaaggatgtcctggaacaggtggagg

SEQ ID NO: 275620 - DNA, 100 bp, Homo sapiens
cagcggtgtcgtggccgtgttgctgatcgcctgggtggttgttggcgtgtccctgcagcgaaggatcctggttgcctcacttctaaccttctggaacccg

SEQ ID NO: 275621 - DNA, 82 bp, Homo sapiens
gagagcggtgcggaggactgaggtagcagtagctgatgtgcagtttggccccatgagatttcatcaagatcaacttcaggta

SEQ ID NO: 275622 - DNA, 100 bp, Homo sapiens
agtctacccctcctgtcggggaggcaaggtggttttggaccagacaggcgtgtctaatgaacagcagagaatttcaaaggaccttgctaatatctgtaag

SEQ ID NO: 275623 - DNA, 74 bp, Homo sapiens
gggcttacgcagaaggacctggccacggactcctcctattttgaggacttctccaacatctccatcttctcctc

SEQ ID NO: 275624 - DNA, 100 bp, Homo sapiens
cccacggagcctccggggctgggcgccctgcgtccggcagaggaggcgagcatcccgctcaggtgatgaggaacccctcgcgcacccagcgcagaaggct

SEQ ID NO: 275625 - DNA, 83 bp, Homo sapiens
acagatggatctcagagcggtatccctgtctcagcgaagtggtgaaagagcatcagatggtgttatctgaaaaggttagtcag

SEQ ID NO: 275626 - DNA, 82 bp, Homo sapiens
ccggctggacgccccggtggactacttctaccgaccagagacccagcaccggtatgatctcgtgaaatcttgagagaaactg

SEQ ID NO: 275627 - DNA, 75 bp, Homo sapiens
gcttcagtactcgggcaagaccaccttcgtcaacgtgatcgcgaaattgttgccaaggtcagagaagtctcccag

SEQ ID NO: 275628 - DNA, 100 bp, Homo sapiens
aaagactacctcttgagtgagagtgaagatgaggtttcttcctgaacgcgcctcagcgattttaaatcgtatgcagaatattcaatttgaagcagtggtt

SEQ ID NO: 275629 - DNA, 108 bp, Homo sapiens
ctgaagttcacgactactagaaggggaggggagtggaaaggctctcagtgaaaaagtgggctcgggatgagtttgaaggcctcttcaagcagccagcagaaaatgtca

SEQ ID NO: 275630 - DNA, 75 bp, Homo sapiens
caagtataaactggacaaccagtttgagctggtgtttgtgctgtatgagtactcatgggtccagggccctttgca

SEQ ID NO: 275631 - DNA, 85 bp, Homo sapiens
cattggtaactccagtctctaacgttttagaaaatcataacaagcggttctctaccctgtaaagtgacttcttgggaagtgttcc

SEQ ID NO: 275632 - DNA, 100 bp, Homo sapiens
tgttggaggaagccttgttctatggtactcggaccatggagccatacaggatgtaaatgaagaccctggagaagatgtggccctcctctctgttagtttt

SEQ ID NO: 275633 - DNA, 128 bp, Homo sapiens
ccagtcagcttgccgccggcggccaagcagccaaccatgctcaacttcggtgcctctctccagcagactgcggaggaggcaaaacagattcagaatctgcagaaagcaggcactcgtacagactcaag

SEQ ID NO: 275634 - DNA, 83 bp, Homo sapiens
cacaaagggacctgatgaagcgaagatcaaggaaacacaacctatttgtgggagtttcttttagatctacttcaagataaaaa

SEQ ID NO: 275635 - DNA, 100 bp, Homo sapiens
tcgtggttcacccgctgccgggcaccgaggaccagctcaatgacaggtggtgactatcctgttgagaagcaaaagatactttgcaagtaaaaaatatgcc

SEQ ID NO: 275636 - DNA, 50 bp, Homo sapiens
tttaaaacttcgccagaatttaggagaaggcagagcccccccaggctatg

SEQ ID NO: 275637 - DNA, 99 bp, Homo sapiens
gctggaacgaacatcccggtgctaggggtgcaggaggaggacggcagcaaccgcagcagcagccttcagcaatcagaaacggagactgttcatctgttt

SEQ ID NO: 275638 - DNA, 75 bp, Homo sapiens
gcgccctctatcatcttcattgatgagttggatgccatcggcaccaagcgatgcagaggccaggatgtgggccca

SEQ ID NO: 275639 - DNA, 100 bp, Homo sapiens
taagaattatcagcagctttttgattatatgaattctcagtccaagtttaaagttaaggctggacgtaaagaaagaagtgatgcactcaattctgcaata

SEQ ID NO: 275640 - DNA, 75 bp, Homo sapiens
ctgatctcgtatctcaggaacctcaggccctgcttgacagtgggtgtccgcaatgttgccagtgtctgtctgcag

SEQ ID NO: 275641 - DNA, 88 bp, Homo sapiens
ttgctttattgatattgcctgcgatgaaattccagagcgctactacaaagaatctgaggagattgtgactgctttaagctgcggcaag

SEQ ID NO: 275642 - DNA, 88 bp, Homo sapiens
atgctgcaagtgagaacatatttaacagtggagagcatcccagtgtttggggcactgtgttcctcttcgtccctgcaccagaccctgg

SEQ ID NO: 275643 - DNA, 100 bp, Homo sapiens
cggcggccctcacagcaaccagcaccagatgaaggagcattcctcttgggtgaaaggtgtagcagtcactcggcctacacccacagcatcgaccttgtga

SEQ ID NO: 275644 - DNA, 75 bp, Homo sapiens
gcctgcaaatcaaagatgaaagaacaacctgtcttggagcgcttgcaggcgcatattaaatttcctattgactac

SEQ ID NO: 275645 - DNA, 98 bp, Homo sapiens
gtgtttgcccgtatggcacctgatcagaagacacagttgatagaagcattgcaaaatgttgaccccaaagtggaactcacccaaatgtctatcgtctg

SEQ ID NO: 275646 - DNA, 110 bp, Homo sapiens
gcgctctggcgctacggtctggccgtcggctgcggcgccatcggttctagagccttctttccgccaggcctttcccaataccaaccgctggttcctcacctgcattaacc

SEQ ID NO: 275647 - DNA, 75 bp, Homo sapiens
aacccttgatcctcctcctaattgcaggaagggaaaaggccgaggcatcagcgtgtgaagaccgcaaagacgatc

SEQ ID NO: 275648 - DNA, 88 bp, Homo sapiens
aaaagcaaaggagaagagacaggacgcgggaccgtgcagccgacagctcatgatggagcagtccaagaagtcctccctcatggtggcc

SEQ ID NO: 275649 - DNA, 100 bp, Homo sapiens
agctccagctccgctctcttcggctgccccaatccccggcagctctctcaggcagaactggggctcccttgcatcttccagttacaaattcagtgccttc

SEQ ID NO: 275650 - DNA, 90 bp, Homo sapiens
ccttaaaagctgcttccagtgggaatccacattaagaagtacaatagcattcgcgctttaccgatttgttacaactcaagcaagggccag

SEQ ID NO: 275651 - DNA, 75 bp, Homo sapiens
caaaaatcccatctaccgcaactctcagttcgagagtaaagatggcatgatcaacattgacatgactggagagaa

SEQ ID NO: 275652 - DNA, 75 bp, Homo sapiens
gacctttcccgctggcgcgcagcctcagctaggtcttcatcctccaggtccacctttagcaagacctattctccc

SEQ ID NO: 275653 - DNA, 95 bp, Homo sapiens
cgtgaaggagcagatttacaaactggccaagaagggccttactccttcacagatcgctctagaggacaaaatcccagtccttggcacaaactcag

SEQ ID NO: 275654 - DNA, 75 bp, Homo sapiens
cggcccggagcaccgagctcgcggcacggtaggagagatcctgaaggagctagacgagtgctacgagcgcttcag

SEQ ID NO: 275655 - DNA, 49 bp, Homo sapiens
gaaatatcagcctccagtggcagcagggattaatgaaaatcaagttcca

SEQ ID NO: 275656 - DNA, 98 bp, Homo sapiens
atcagagccagaggaacatttggagcattcctgggagatggtcgggaagaagaagggagtctcaggccagaaggatggtggccagacggaatccaatg

SEQ ID NO: 275657 - DNA, 97 bp, Homo sapiens
gtctgcatcgcagaggccagggcctccggtgtggctgtctctgatggtgtcatcaaggtgttcaacgacatgaaggtgcgtaagtcttcaacgccag

SEQ ID NO: 275658 - DNA, 83 bp, Homo sapiens
cggcgagcagtctcaggcctttagtgatgatggaacagcgcttaaagtttttgaaacaacaagatcagcgacaacagcaacaa

SEQ ID NO: 275659 - DNA, 83 bp, Homo sapiens
ctccaccgtagcccttgccaaaggttgataacactgatgctgaggggaggctcatactggctgatgcgctctgttacgcacac

SEQ ID NO: 275660 - DNA, 89 bp, Homo sapiens
accagttatgtgtgttgcatgagaaaacgccacagactcagccgaggacgtgcgcaaggtgtgccaagactgccccctgctggccccgc

SEQ ID NO: 275661 - DNA, 75 bp, Homo sapiens
cttccccacgcaaccccagatccatttacactttacagagccgaggaggtgctgctgctggcccggcggacggac

SEQ ID NO: 275662 - DNA, 97 bp, Homo sapiens
acataacctctgcaccctgctagaaaatgccatacaggacactgtgagggaacaagaccagagtttcacgcccatttggaagccctttcctaatcaa

SEQ ID NO: 275663 - DNA, 95 bp, Homo sapiens
cggagagtgcgctccaagagcgacacgccgtacctcgcagaggccaggatctcctttaacctgggggcaggccgcatctacaagtgcttgtttac

SEQ ID NO: 275664 - DNA, 130 bp, Homo sapiens
ctgagccccggcactgcctggctgcgagcacatgatggcgatacgggagctcaaagtgtgccttctcgggccctggactttgtctcacaagatgaaatgttgacgcccctggggagattggacaagtatg

SEQ ID NO: 275665 - DNA, 114 bp, Homo sapiens
ccgagaacaggagccggagggagttccactctattggcgtgcaggtggaagaggacaagagttacaagggcccattgttggaagatggagcgctctctcaggcagtctctgctg

SEQ ID NO: 275666 - DNA, 100 bp, Homo sapiens
ctgcagaaaccacagtggtagagatctttaatctcatgaagtacgacagctacagccgcttcttaaagtctgacttgtttttaaaacacaagcgaaccga

SEQ ID NO: 275667 - DNA, 100 bp, Homo sapiens
gcagccgagaacgagctcaaccagaggcgacaggaagaagggtattacagccgcctggaagccgagaggcgcagacagcacgacgaggcggcgcgcaggt

SEQ ID NO: 275668 - DNA, 75 bp, Homo sapiens
gcttgcagaggaccctcctccacttcccccttgatgagcgtttgctgccaattgatggggcaaatgatctctttt

SEQ ID NO: 275669 - DNA, 75 bp, Homo sapiens
gcagccaataagctcatcaaagagatggtgcaggagccaagcgcccggcgccagcccggcccaccatgccgcccc

SEQ ID NO: 275670 - DNA, 100 bp, Homo sapiens
gagcaagttcaccaacagctgccacctctacctgtggctgttcctcctgctgctgcccctggccctgcacctggtaacaccatgttgttgagagtgttac

SEQ ID NO: 275671 - DNA, 99 bp, Homo sapiens
cgcgtcctgctccaaggactgcactgtgaagcgttcgctgagcggcgcgagcggagcttcagccggtcctggagcgaccccacccccatgaaagccgac

SEQ ID NO: 275672 - DNA, 73 bp, Homo sapiens
gaaaactggctctgcaaaagaatgtgatttgtgacaaatgtgaagttcaaatctgaacatcaatgatgtacta

SEQ ID NO: 275673 - DNA, 74 bp, Homo sapiens
aaaccctgcagaacggctgcctaatttacagcaaccatgagctagttgctacattgcctgatgatgttcagcct

SEQ ID NO: 275674 - DNA, 78 bp, Homo sapiens
ggaggaagaattcccaagccaaagctttccagtggatgaggatcgcagtacggaacctgaccgattgcaggtgtttca

SEQ ID NO: 275675 - DNA, 82 bp, Homo sapiens
aatttcatacagaaccttgtgttttacattgaagctgcatataaaactgctttgctcaggtacctgaatattggctttgtgt

SEQ ID NO: 275676 - DNA, 136 bp, Homo sapiens
cgagactatcaggatccggagacggaaatgtccgaaggccgcagtacttgaccctgtattttgggagtcgaacggagatttgtataagtccttgaaaacactatctgcagaactggtaccttggcttaatttgaag

SEQ ID NO: 275677 - DNA, 88 bp, Homo sapiens
tcggcggagtagcaagtggccatggggagcctcagcggtctgcgcctggcagcaggcaaagatgcaatctacacaatcccagtaaaaa

SEQ ID NO: 275678 - DNA, 100 bp, Homo sapiens
ctgaactcaggacttggcaagatgaaagtcaaacttctgcatcctcttgtgatgagactgagatacagatcagcaaccaggaagaagctgagagacagcc

SEQ ID NO: 275679 - DNA, 100 bp, Homo sapiens
gctacacttacaacaactagtgcaaccagtaagttgatccatccagatgaggatatatccctggtggagtttgtccatatgctcaatgctaccatgtgcg

SEQ ID NO: 275680 - DNA, 50 bp, Homo sapiens
cctaccccaaactcatggaaattgatcagattcaaccctatgaaaagata

SEQ ID NO: 275681 - DNA, 85 bp, Homo sapiens
atatcaatgtggattgtgcaaaattaaaacgactcctgaagggtcacccctcctaatttctcagtgtcacaagtgcccaacatgc

SEQ ID NO: 275682 - DNA, 100 bp, Homo sapiens
gccgaagtcagttccttgtggagccggagctgggcgcggattcgccgaggcaccgaggcactcagaggagaagaaaaagtcagcactttttgaagtgtct

SEQ ID NO: 275683 - DNA, 123 bp, Homo sapiens
tttgcctttgccatgcttactgtgtttcagtgcatcaccatggagggctggacagatgtgctctactgggaaaacagctcaggcatgtttgctgcagaagagacaggggaggcactgtctgag

SEQ ID NO: 275684 - DNA, 120 bp, Homo sapiens
actactactactactacatggacgtctggggcaaagggaccacggtcaccgtctcctcagtgttctaagaacggaagcatctgggctggatggaatttagcatcaagcagagtccccttt

SEQ ID NO: 275685 - DNA, 75 bp, Homo sapiens
cacgatgttgtggcaatggcacgaaagctacagatacagaaggtggtcatggcactaggagactacatgggcgcc

SEQ ID NO: 275686 - DNA, 75 bp, Homo sapiens
gaattctctacatttgtgaaagtcagtttctgaggaatttcatcagtagagacgggttttcaccgtgttagccag

SEQ ID NO: 275687 - DNA, 100 bp, Homo sapiens
gtgaggccgcggcgcagggcagagagacgccacacagccaccagccgcagcaccaggatcagttgcacactgggccacagaggatccagcaaggatgaag

SEQ ID NO: 275688 - DNA, 75 bp, Homo sapiens
gaacgatggtagaggaccaccggtcaaattcttaccagaactggaagaagttcgggaactcagagtttgaccccc

SEQ ID NO: 275689 - DNA, 102 bp, Homo sapiens
agaggagaggcacccgatatatgttctctaggccttttagaaaacatggttgcccccaagtttcctggcagtgtgtgatactgaggaggtgagcttgtttct

SEQ ID NO: 275690 - DNA, 79 bp, Homo sapiens
catgagcgacagcggcgagcagaactacggcgagcgggactggaatgtcacgtggaataccagcaaccccgacttcacc

SEQ ID NO: 275691 - DNA, 83 bp, Homo sapiens
cgcccagcctgactgactgcattggcacggttttgacaagcttgcatcatgcgtgagtataagctagtcgttcttggctcagg

SEQ ID NO: 275692 - DNA, 98 bp, Homo sapiens
tttggagagcaccccttttaccactgcctggttgcagaagtgccgaaagagcactggactccggaagccacctgcgtggacctgcagctcaggacctg

SEQ ID NO: 275693 - DNA, 100 bp, Homo sapiens
gggccgaacgtgaggctacgctgaccattgcccagtacaggaatttagataatgggctgtgtgcaatgtaaggataaagaagcaacaaaactgacggagg

SEQ ID NO: 275694 - DNA, 100 bp, Homo sapiens
gagaaatagcaggacctccagacacaccatatgaagattcctgacattcagacaactgacttgtaactgacttataactgacttgtaatacactgctact

SEQ ID NO: 275695 - DNA, 100 bp, Homo sapiens
atgtaccaggaacacatcaacgagatcaacgctgagctgtcagcgccagacatcgagggcgtatatgagactcagctacgaaactacagttcagatttgg

SEQ ID NO: 275696 - DNA, 98 bp, Homo sapiens
ttgtcgatatcacagccaccaaccacactaacgagattcaagattatttgcaacagctcacgggagcaagaacggcccagaccttctctttccctttc

SEQ ID NO: 275697 - DNA, 98 bp, Homo sapiens
gaacagagtgctgttttagagctggcagcagcatctcagcccaagagaaggagtttgacttacaaggaatctggagtagatatcgcagctggaaatat

SEQ ID NO: 275698 - DNA, 82 bp, Homo sapiens
ggaaaagacgccagacttcagacgtctctctcctcggctggcctgccactcctcctgctatgatgcctgggcagatcccgga

SEQ ID NO: 275699 - DNA, 75 bp, Homo sapiens
cgagatgggcaagcccaggaacgtggcgctcatcaccggtatcacaggccagaaggatgccctgcagtggtctcg

SEQ ID NO: 275700 - DNA, 98 bp, Homo sapiens
tggctctgccgtgccacctgctgcacccacgaatctgcccacccctcctgtaacccagcctgtttcacttcttgattccttggtgttactcagttttc

SEQ ID NO: 275701 - DNA, 98 bp, Homo sapiens
gctggacatgcccaatgttagagaggttttggcttggtttgaagaaggtgaagaaacaattacagcctttgtagaaccttttgtaattttactcatat

SEQ ID NO: 275702 - DNA, 75 bp, Homo sapiens
cgccatggctgccccgtgtttgctgcggcaaggacgagccggggcgctgaaggtgcagattcactttataggaac

SEQ ID NO: 275703 - DNA, 100 bp, Homo sapiens
ctggtgaatgagcgacagccccaggcccgggttgtggtgctgggagtggttttcagagacatttcagaaagtgaaggagaaactcaagattgactcatga

SEQ ID NO: 275704 - DNA, 75 bp, Homo sapiens
agcaccagggtggaggaggaggagaactggcatatgcactcaataactttgacgatgagaacaagttgagcagtg

SEQ ID NO: 275705 - DNA, 74 bp, Homo sapiens
atgtaatgtcaactttactgagaattttccacctcctgacacaacaccactcacatatcgcacggatgactgcc

SEQ ID NO: 275706 - DNA, 75 bp, Homo sapiens
ccctataagcctcggcctccacaggaaacattacctggagccagaataagtggaggtctttccaacttgtccttc

SEQ ID NO: 275707 - DNA, 75 bp, Homo sapiens
atcaacatcaactacgtccctctgaagcttttaggagagtatgagtcccttggaaaagaacacaggagagtaaag

SEQ ID NO: 275708 - DNA, 75 bp, Homo sapiens
aaggcaggaggatggcttgaggccaggagtttgagagcagccttgacaatatgagacgaggacttgctatgttgc

SEQ ID NO: 275709 - DNA, 100 bp, Homo sapiens
agcaaatggaagaacaaatatgtctgtcaggaagtcctggctgagcaaggttggaagccctagttctcgcattgaccgcacaaacttttctaatgaaaaa

SEQ ID NO: 275710 - DNA, 100 bp, Homo sapiens
gaggacttcttcttcaccgccaggacctccttcttcaggagagcgccccagggcaagccccgctccggccaacaaattggcggcagtaagcacacaatga

SEQ ID NO: 275711 - DNA, 82 bp, Homo sapiens
gctcgatcttgggacccaccgctgccctcagctccgagtccagggcgaggacttgggaccctggaggactgacgctgctggc

SEQ ID NO: 275712 - DNA, 100 bp, Homo sapiens
caatgctacagctgatccgggccatcctgaaagtccctgaagatccaacccagtgctttctgctttttgccaaccaggctgaagaagagcaaacatgccc

SEQ ID NO: 275713 - DNA, 75 bp, Homo sapiens
ttaccccgtctttaagcagctctccatggagaagataatgttaattcaagactctcgaagagaagcttcagtgca

SEQ ID NO: 275714 - DNA, 82 bp, Homo sapiens
ggcagatggcaagtggagacagcaatctcaacttcagtgagaaagatcagtctaaagaaaaggagaagaaagtgaaaaaaac

SEQ ID NO: 275715 - DNA, 98 bp, Homo sapiens
agtgcgccctctactggaggggtgaagaaacctcatcgttacaggcctgttatggaatcctcaaggtaccagagggcagctggctgtgccggacatgt

SEQ ID NO: 275716 - DNA, 83 bp, Homo sapiens
cggacacgatgcaggccatcaagtgtgtggtggtgggagatggatgaggaaaatgaggcccaaagaagtgatgccacttggtt

SEQ ID NO: 275717 - DNA, 82 bp, Homo sapiens
aggtgagtcgcggtgggtcctcgcttgcagttcagcgaccacgggtctcccttgatctgagaatggctacctctcgatatga

SEQ ID NO: 275718 - DNA, 75 bp, Homo sapiens
ttaactcattcaaggttacccagttggtgcagtacagaaggtttctaaaaaattagaaatgcacgtttacagcaa

SEQ ID NO: 275719 - DNA, 89 bp, Homo sapiens
agtaggagacatcgtagtgggacgaatcacagaggtcaagagcaatctgaatccaaatgcaaaggagtttgttcctggggtgaagtacg

SEQ ID NO: 275720 - DNA, 82 bp, Homo sapiens
gcggacctaactagctccaggttaggccgagctttgcgggaaagcagcggaggcaagtgaggcctatctggttggccttttt

SEQ ID NO: 275721 - DNA, 100 bp, Homo sapiens
cgtgaccctggctctgattcctttatgggatatgtgtaaccacaccaacggcctgagccagtcttggtgctctgtgttcacctggttcatctgaggagct

SEQ ID NO: 275722 - DNA, 100 bp, Homo sapiens
tgaattcggagaagcggctgtttggtcgctactatcgtgtggcattttatgggcaggaaataatgaagatgtttcattttcaagaccagcagatcttgac

SEQ ID NO: 275723 - DNA, 95 bp, Homo sapiens
attttagggtcctttatatagaagggagagtagagtactgggatttaatgaatttgtctgaaaaacatgataagataccagaaatctgggaaggc

SEQ ID NO: 275724 - DNA, 131 bp, Homo sapiens
cgccccggaaactgccccttctcgggggtcatgatgggcagcaagatggcgtctgctagtagggtcgttcaggagagaagtttgctgaggaatgccttcaagcacaaagtgatgaatgactgccttcaagt

SEQ ID NO: 275725 - DNA, 100 bp, Homo sapiens
gagaacgtgaacacctacttcgtgctgtccagctggtgggccaaggccctgaatgaagccttgaagctcttcaagatgcactcccctcagacttctgcca

SEQ ID NO: 275726 - DNA, 50 bp, Homo sapiens
cttgcgtcctggtgcttttgggagctgctgtgacttactcgaagcctcga

SEQ ID NO: 275727 - DNA, 90 bp, Homo sapiens
cagtttctgtgtcccacttcatctttaataaggttcagaaaatggtcttgcacagaagcatcgaacacctcgccgacgatgtcagcagcc

SEQ ID NO: 275728 - DNA, 96 bp, Homo sapiens
gcgtcctgctgctggtccctgtcatctgccaaatccggagccaaggcacgccagctgacgtcctgtacaagggcaccatcaccaggatcatcggcg

SEQ ID NO: 275729 - DNA, 74 bp, Homo sapiens
gaaacaagtccaaaccgaataggattaggtcctgatgaagttgtagggccagaaggaatggaaaaattttgtga

SEQ ID NO: 275730 - DNA, 100 bp, Homo sapiens
cctgcgtcccgccaccggccgcttctgtcctcgcattggcatcaacaaaagtcagaattcccgggaacttgaacagaggctgctaaattcccagtaattg

SEQ ID NO: 275731 - DNA, 83 bp, Homo sapiens
ctgggcttgtccttgctggtgcatgcgtcgtcggcctctgggcagcagattgcaaaagttgagaagctcaaaccattagaggt

SEQ ID NO: 275732 - DNA, 50 bp, Homo sapiens
tgaaggcacaccactgaaatgatcagaatcaagctttgcgactctgtctg

SEQ ID NO: 275733 - DNA, 101 bp, Homo sapiens
gaatccaatcctctgcttccaggacaagtcctgcgcttggggatcctctgtacgcccgttcactggcaaatggcattaaaattggccctcagcatgctgct

SEQ ID NO: 275734 - DNA, 100 bp, Homo sapiens
gtcatgatgccccagcgggtgaggctgcaacacgaggctgccgttcagcacccgtcgagcatgatatcatcaagttgaatcgaaaggaagggaagaagca

SEQ ID NO: 275735 - DNA, 100 bp, Homo sapiens
ggactggcccccttgagcctgtcccaagccctggtgccaggtgtccatccccgtgctgagcacatgcagatgacaatccaggctctccaggatgaattgc

SEQ ID NO: 275736 - DNA, 100 bp, Homo sapiens
gaggagctgcactgactctgcagccaggacgaagtccaggaaggccaggtgggaagaagagcgctatcctgaaggcatcaagtggaaattcctagaacat

SEQ ID NO: 275737 - DNA, 114 bp, Homo sapiens
ttgcatattccgctccagaaattctgcttggtgatgagtatgatgcacctgcagtagagctgagttatgcctggatcttcaatgaatacccttcctatcaggataatcgccgct

SEQ ID NO: 275738 - DNA, 100 bp, Homo sapiens
catttggtcctggagatgatgatgaaattcagtttgatgacattggagatgatgatgaagatattgatgactttgaaattggcacaatggaagaagctgg

SEQ ID NO: 275739 - DNA, 95 bp, Homo sapiens
cgactttgaggatctggaggacggagaggacctgttcaccagcactgtctccaccctagagctatgctaagaaggaatctgatcttaatggcgcc

SEQ ID NO: 275740 - DNA, 96 bp, Homo sapiens
aaaagttccagaaacaatttggggttaggcagaaatgggatcagaaatcacaggtgctggaaacatgcatgaagagctgcggcaagcggttccacg

SEQ ID NO: 275741 - DNA, 74 bp, Homo sapiens
tagtctcggcgcccctgggagccgcccggtggaagctcctgcggcagagtgtcctgccatacttcgtagctaca

SEQ ID NO: 275742 - DNA, 100 bp, Homo sapiens
cccagatacactcaggaagtgtttctcagagatcagtgaaaagcatgatgtggtgttcttgataaccaagtatggttatatccacctctatgatcttgag

SEQ ID NO: 275743 - DNA, 83 bp, Homo sapiens
ccctttgactgtgtcctgctgctgctgctgctactacttacaaatctttgtggagttcacctctgtgtttgactgccagaaag

SEQ ID NO: 275744 - DNA, 100 bp, Homo sapiens
ccgagggagaacaccatctcgccaccgcagctacgaacggagcagggacggagtgcatcaagccagttgtgcaggaagtcctgacaattacaccatttca

SEQ ID NO: 275745 - DNA, 60 bp, Homo sapiens
cggacatagaggccaaccaacctttggagctcgaatatgagactcaaattaagaagatgc

SEQ ID NO: 275746 - DNA, 100 bp, Homo sapiens
tttacacaggcaaactgtcagaaaagagtagcctgggctgtctggaaatctgaggatgtagctgagctgattcgggccagagcctgccagagggtggtgg

SEQ ID NO: 275747 - DNA, 75 bp, Homo sapiens
gaccccagttttgctgaccttattcaccatgacttatcagttagtaacaggagtatgggaaggcaaatacaactt

SEQ ID NO: 275748 - DNA, 74 bp, Homo sapiens
tctgatgagctgagaaacaaagccacccagccaatgaagaccttgttcccatcaggatacctaatccctctcac

SEQ ID NO: 275749 - DNA, 83 bp, Homo sapiens
ggcttaaggtcttcagcggggcgctccaggaggcactcacagatggcccactgcgtgaccttggttcagctgtccatttcctg

SEQ ID NO: 275750 - DNA, 85 bp, Homo sapiens
ggaaaggaaaacttggaagctctgcaaagacctacgctccttcatctaatccatggaaagggttttggccaaattgggcgagggc

SEQ ID NO: 275751 - DNA, 90 bp, Homo sapiens
ggtccattctgggcctctcagggtttcacacgtacctcgtcgcctccaacctgactactaatgaagaccttatcacacagactttcagcc

SEQ ID NO: 275752 - DNA, 75 bp, Homo sapiens
ctgatcgcagtccggaggtgaggcggaactctgagatcgtcagtatttaaacagatcacatcatgcgtgagtaca

SEQ ID NO: 275753 - DNA, 50 bp, Homo sapiens
cgaaggaggaggcgttgccgggcatgtggatatgtcaaatatgtcgacct

SEQ ID NO: 275754 - DNA, 96 bp, Homo sapiens
tgttggtggaggaggtggcaggcctcggcgacttaattcagtgcacaaatgagatgaatgtgaacatcccacagttggcagacagtttatttgaaa

SEQ ID NO: 275755 - DNA, 80 bp, Homo sapiens
caagtctctcatcaagtcctggaagaagctcctggaccgcactagggctgacctcatctccgaggatgtccagcggcggt

SEQ ID NO: 275756 - DNA, 96 bp, Homo sapiens
cccaggaagtgcagcgctttgcccaggagaagtcttgggcgtctttggtactggcttttttaggggtctgcctggggattacccttgctgtggata

SEQ ID NO: 275757 - DNA, 115 bp, Homo sapiens
ccgggaactgctgacgcttgatgagaaggacccacggcgtctgttcgaagacatggaaggtctttaatgtaactttaaatggttcaccaaaggatgctctaatggatgacagcga

SEQ ID NO: 275758 - DNA, 83 bp, Homo sapiens
ataccatatcagatgcctcgcagagcaccaggcccaccgtgaaaggtcagcccaaggccaaccccactgtcactctgttcccg

SEQ ID NO: 275759 - DNA, 75 bp, Homo sapiens
cgcggtgcggaagggcacgtgcagcttcccggtcaggcgggactacttgttgatatttgaggagggaagtgtctt

SEQ ID NO: 275760 - DNA, 75 bp, Homo sapiens
gccagcccttccgccacggccgtctctggagagcagcagatgcacagtctctgacatcagctctcctgggaccct

SEQ ID NO: 275761 - DNA, 100 bp, Homo sapiens
gtggtgtccagcgtggaaatatcctaaatctgaatggtgcaggagaccctctcacaccaggttacccagcaaatggaagcagacacctctcactcccgac

SEQ ID NO: 275762 - DNA, 77 bp, Homo sapiens
caccgacctgcaggctctgtcccgggtggagcgagctggcgcctgtaacacgctggtgcccctgggtgaactgacca

SEQ ID NO: 275763 - DNA, 100 bp, Homo sapiens
cctccaggtgctgctcacctaccgcgtcggggagggacccggggaaggtgctcgggtcttcggggcactgggtcccatcggtccctcctcacctgggctc

SEQ ID NO: 275764 - DNA, 51 bp, Homo sapiens
ttccttcactgtgcgtgctgaccatgattgtggacaaagccctagaagagc

SEQ ID NO: 275765 - DNA, 100 bp, Homo sapiens
tcaaacattcaagaaaacacacagactccaactgtacaagaggagagtgaagaggaagaggtgcaggttgtagagttgaaagttacatggattaccaaga

SEQ ID NO: 275766 - DNA, 99 bp, Homo sapiens
cccgcctgcaccaaagactgggaggctgtggaggttggggcctccagccatgacagtgatgagaaagcttgccctgcagggacattcaaggccagccag

SEQ ID NO: 275767 - DNA, 100 bp, Homo sapiens
caacacgagcatggcatggccccgcaggtcttcacccaggccctggagtgcatgcgcagctctcgtggcattatccttcagtggggctattggactgact

SEQ ID NO: 275768 - DNA, 96 bp, Homo sapiens
tcaattctgaaagctccggtattattctttgatagaaatccaatagatggagttcgctcttgttgcccaggctggaatgcaatggcatgaccttgg

SEQ ID NO: 275769 - DNA, 101 bp, Homo sapiens
gcgaaaccgtcgcctgtctcaccctggacatttctggaagtctgcagaagaaccatggagtctggcagtaccgccgccagtgaggaggcacgcagccttcg

SEQ ID NO: 275770 - DNA, 88 bp, Homo sapiens
cagaagagccaaggaataaacatgcaatgaacccaaaagggtggcgacatgtctaagaatgtgagccagtcacagatggcaaaattga

SEQ ID NO: 275771 - DNA, 51 bp, Homo sapiens
gttccttgaggaggtttgaaaaagttgatacccaaagatcagtattactgt

SEQ ID NO: 275772 - DNA, 100 bp, Homo sapiens
cccggcggaaaaccgaagttggaagtgtctcttagcagcgcgcggagaagaacggggagccaggaagtgtggaactggtctcaatcggttgaccacctta

SEQ ID NO: 275773 - DNA, 74 bp, Homo sapiens
gggagcgcaaaaccaacgacaaggatgagaagaaggaagacggcaagcaggcatctatcctttctctggtgaca

SEQ ID NO: 275774 - DNA, 100 bp, Homo sapiens
gggcaacaagctggacatggctcagtacagggggccgtctgccctgcccagagctgtgtcctgatgccgtgttcaggctcatggagcagtgctgggccta

SEQ ID NO: 275775 - DNA, 50 bp, Homo sapiens
gcaacatggggcttgagaaagggtgaggcggaccctgttcatcacaggac

SEQ ID NO: 275776 - DNA, 100 bp, Homo sapiens
gctggccaagaagatcatcattaaggacggaggcacggttctttcagagcacggcttcggccccatcactaccgacatccgggagggacagactttctac

SEQ ID NO: 275777 - DNA, 75 bp, Homo sapiens
gtgtacaacccgacgaggaacgaatgggacaagatcccgtccatgaatcaggccatcatctctcagcaaggtgac

SEQ ID NO: 275778 - DNA, 50 bp, Homo sapiens
tgaaaattctggataatggtgaatgggatgaggatgaagaagtatacaag

SEQ ID NO: 275779 - DNA, 50 bp, Homo sapiens
tataaagggagattctagtatacagagcagcccgacggccatggaggctg

SEQ ID NO: 275780 - DNA, 83 bp, Homo sapiens
cttcaggagtttggtcaaagcaaccgaaaaggagagtttcctgatctgctgatttgggtcctactttaatgacaagacctgga

SEQ ID NO: 275781 - DNA, 108 bp, Homo sapiens
ggagagcatcgactggaccaagatcgagcccagcgtcaacttcctcaagtcgcccaaaggtgtctcccagtctgctaaagccctaaggccatcaccatggacttccag

SEQ ID NO: 275782 - DNA, 100 bp, Homo sapiens
aggacactgaaattcagagaggggaagtgatttgcctcagcttgtactgaattgagttcttctcagactttatcacatgatggaggattcttcaatagac

SEQ ID NO: 275783 - DNA, 97 bp, Homo sapiens
ctgagatcaaatggcacttcattggccacctacagaaacaaaatgtcaacaaattgatgggttctgcacttttaaaagaaaagcaaaggcatcgatt

SEQ ID NO: 275784 - DNA, 100 bp, Homo sapiens
ctccaacgctcaagcaagtcaaggacacccacggactcaacaccgcgaccagattggaaaaggtagtgtgaacatggctacgcctcttcattcccgtcca

SEQ ID NO: 275785 - DNA, 100 bp, Homo sapiens
ttgaactctttaaggaaataacatttagagtggactgtgcccccagcagcccccaaggtaatgagaggccctaagatcccagaggatgccataagaggaa

SEQ ID NO: 275786 - DNA, 101 bp, Homo sapiens
gcggtggtggtggccgtggatgacggagactctcaggccttggcagatcctgtttgaccaaactcagagatcaattaaggcacagcttcagaactttgtta

SEQ ID NO: 275787 - DNA, 83 bp, Homo sapiens
cctaaactctcatctccggccctctcggcgtccgccagcgatggcacagacaatgcagatcttcgtgaagactctgactggta

SEQ ID NO: 275788 - DNA, 50 bp, Homo sapiens
gcagatcaagtctgacatggaaaaagatatgggagaagggactactataa

SEQ ID NO: 275789 - DNA, 75 bp, Homo sapiens
gaggacatgatgaagaattgatatcacattatagaagagaatgtttgctagtcaaaatgcagatcttcgtgaaaa

SEQ ID NO: 275790 - DNA, 100 bp, Homo sapiens
ctagtctccgccgggtttgatgctgttgaaggacatctgtctcctctgggtggctactctgtcaccgccagatattgatttcctaaattcagtaatagtg

SEQ ID NO: 275791 - DNA, 100 bp, Homo sapiens
cgggaggtgacggctagcagcgtgagaaggccgctggctcctgagaaatccccctcctccaggtatgggctacgtgagttcgtggtgattgcccctgctg

SEQ ID NO: 275792 - DNA, 100 bp, Homo sapiens
gcttcgaggtgaactggaccgagcagcagcagatgctgctgatgcaaggaatcccctgggctcccgtccactccactgctgaccagcccattcgcctgtg

SEQ ID NO: 275793 - DNA, 101 bp, Homo sapiens
ggagaggaggcaggtcctggggacccattactggaagctgttcccaagacgggcgatgagaaggatggtctgtgctgaatgtgtaatatgcggaactatat

SEQ ID NO: 275794 - DNA, 95 bp, Homo sapiens
gcggggcggccgggagggggcagtcctcgccggcgagttcagcgtctcagtggcccttagcagcagctccattcgtgtggccatgctggaggaaa

SEQ ID NO: 275795 - DNA, 98 bp, Homo sapiens
tttcagaggttgtgaagttagctccaaatcccagactagctgctaccccaagcccgggagcttctcaggtgaactgtcacccctacaactcagcttgc

SEQ ID NO: 275796 - DNA, 100 bp, Homo sapiens
aaaattccttcttggaacaatttatgatagagattctttaaacttctgatggaatccatcaaaaagaagaataataaagcatcagctttcaggaacgtaa

SEQ ID NO: 275797 - DNA, 99 bp, Homo sapiens
gaaccacagcatatggcagctgctgcaggctggacagcccccagacctggagaggatccgcacacttctggaggtaaactgtcttgagccccaccctca

SEQ ID NO: 275798 - DNA, 100 bp, Homo sapiens
gggcgcatctatgatcatggctgacaagtacaaaactttttaccaacaaaaaaaagcaagtagttatactcaggaagaacttcaagacacttacgggttt

SEQ ID NO: 275799 - DNA, 90 bp, Homo sapiens
gaaagatcagccctttttggaaacatacaggatatctaccacttcaataggttgaagttcatgagttcgcccagcctcagtgacctgggc

SEQ ID NO: 275800 - DNA, 50 bp, Homo sapiens
cattactgtagcatttgtgaattactccacaggatccgctgaacatagga

SEQ ID NO: 275801 - DNA, 74 bp, Homo sapiens
tgccatcacagacaccgcctacaggagtatgatgcaagtacctggagtagaacagaaaaattattatgtctgtg

SEQ ID NO: 275802 - DNA, 90 bp, Homo sapiens
tgggagcctatttgttcatcatttctcgtgttcaagtactactataattccttgacccagcagtacctttactgggatggggaaaaagag

SEQ ID NO: 275803 - DNA, 75 bp, Homo sapiens
gagccagtgacaccaaaggactccctgattgaccggagacgcaccccaggtgccgtgagcgatgtggagatgcag

SEQ ID NO: 275804 - DNA, 73 bp, Homo sapiens
aatcttcagaagagccaaatccaggggaagtagcaggcttgcaatcttcaggctaactcaggtgagatggagc

SEQ ID NO: 275805 - DNA, 100 bp, Homo sapiens
ggagcagcatgtacgccaaggggggcaagggttcggccgtgccctccgacagccaggcccgcgagaagtacatgtcccagagcaagcacacggaggcccg

SEQ ID NO: 275806 - DNA, 101 bp, Homo sapiens
gggacatgttctccaaaatggccacttacctgactggggaactgacgggtcgtaaaggtatcttcactggaagctcggggctgcagattgtgtacctcagt

SEQ ID NO: 275807 - DNA, 75 bp, Homo sapiens
ggaggaggctttggggaccgggaccgggatcgtgaccgtggagggtattatagctgcaaatgtccttgtattctg

SEQ ID NO: 275808 - DNA, 100 bp, Homo sapiens
gcagctggatgggatcatttcggacttcgaaggtcaaaatgcagatcttcgtgaaaacccttaccggcaagaccatcacccttgaggtggagcccagtga

SEQ ID NO: 275809 - DNA, 100 bp, Homo sapiens
ccctcggggcggcggactggctcgcggtgcaggaaggttcatatcacaaagacgaccctagcgtgcttgaatggggactacgaggtagaaccgggttacg

SEQ ID NO: 275810 - DNA, 100 bp, Homo sapiens
gaggctgaaagaaacaaggggccagggcagagggcacctgagcggctggagagcctgttggagaaacacaaagaggtatttcagttactaactgatctga

SEQ ID NO: 275811 - DNA, 80 bp, Homo sapiens
ggcggccgggggctcagagatccaagtgcgcgccctggcgggtccggaccaagccaaaagaatgcaatggtgtaaagatt

SEQ ID NO: 275812 - DNA, 51 bp, Homo sapiens
aacaagcagcagtgaggacaccaaaggtggttgtgggaagagaagtttgca

SEQ ID NO: 275813 - DNA, 85 bp, Homo sapiens
aagacgagggttcctgggagccccagggaattttgcccctggactctgaagaccctggactttgtgaagttgttagagtacatga

SEQ ID NO: 275814 - DNA, 100 bp, Homo sapiens
agcccgcgcctgagaaggtcaaggtggaggtgaagaagtttgtgaagatcggccgcccgggctacaaagagctgaggcttcgaagacctcagaggacttc

SEQ ID NO: 275815 - DNA, 100 bp, Homo sapiens
aaacgcatgaccgaaaatcagaagacaaacttgccaaagctacaagagacagatgtggtggtacagtgggagctattctgacatgtccactggaagttgt

SEQ ID NO: 275816 - DNA, 98 bp, Homo sapiens
gttggaaatgcacaagctggagcccaactgataatccttgaacatgctcctccacccccaccacctgtgatccgaaatggtgccagggatgctccccc

SEQ ID NO: 275817 - DNA, 75 bp, Homo sapiens
ccttggcaaggagagccgagacctcagttcccggcggctcttgcggggcacagtgtactatgaggggctgcagga

SEQ ID NO: 275818 - DNA, 75 bp, Homo sapiens
aatgcaacgtgccggtcaacatggtgtgctggatgaagatttgataaagtggaaggcactgtttgaggaagtccc

SEQ ID NO: 275819 - DNA, 100 bp, Homo sapiens
agaaatggggggctagggttgtatatggcgatactgacagagaagatggcgaattagaagatggtgaaatagacgatgcaggatttgaagaaatacaaga

SEQ ID NO: 275820 - DNA, 82 bp, Homo sapiens
cgaccagctgctggacatgtcctagtgactctcctattccatctgtttcttcgggatcatcttcacctctttcagccacttc

SEQ ID NO: 275821 - DNA, 93 bp, Homo sapiens
agagagcgatcaacacgctgaacggcttgaggctccagtcaaaaaccattaagcaaccatgtccaagggacctgcagttggtattgatcttgg

SEQ ID NO: 275822 - DNA, 100 bp, Homo sapiens
gttccctcagcctccggccttgtgtgtccgactcggcagcagtgtgccctgaaactctaatctcattgcctggccagaaaaggaagtaatccctagtgtc

SEQ ID NO: 275823 - DNA, 100 bp, Homo sapiens
aggacgagctgatcaagtatatgactgaagaagacttccaagtgctggccttcatctccccgcaagatgcgccccctccaactctcagccttcatcttcc

SEQ ID NO: 275824 - DNA, 90 bp, Homo sapiens
tggatggagaagaggcaccgaggcccagacaattccagggctttcgaatcgtgcttcagccttcctgaccgctctcgcctccaaagcccg

SEQ ID NO: 275825 - DNA, 98 bp, Homo sapiens
agcagatcttcttttggagcagcagagactggtagttttgcagaagtgcaaagtcaagtctctcttgcacagtcctggagactacatcctcttaagtg

SEQ ID NO: 275826 - DNA, 75 bp, Homo sapiens
ataaggtgctaaagttatctgtattcgaagcatgctgatcccattttcaatgaagaattgcttccagttactttg

SEQ ID NO: 275827 - DNA, 90 bp, Homo sapiens
aaggaggacaaggagcggtgggaggatgtcaagggttacctgggttgccaagccttgtctgagatgatccagttttacctggaggaggtg

SEQ ID NO: 275828 - DNA, 82 bp, Homo sapiens
gagcaccagagtcggcgtaactatcgcctgacagggtatctgaagtaaaagggggtgtcgtgaaaactacccctaaaagcca

SEQ ID NO: 275829 - DNA, 83 bp, Homo sapiens
cgaagccccctgcaggaactctacaacccaatccaggtgcagaccatgaattacgtggggcagttagccggccaggtgtttgt

SEQ ID NO: 275830 - DNA, 98 bp, Homo sapiens
tgaggacccagtccttctccagggcattcgagtctccattgcacaatggccagccctggtgctggagaatgccgaaggtgccagaaccaccccttcag

SEQ ID NO: 275831 - DNA, 95 bp, Homo sapiens
ccacttacgaaatcagggtcaaggtgtcagctgacaggggctctggccacagcttgtggggatgacgcgatccgcgtgtttcaggaggatcccaa

SEQ ID NO: 275832 - DNA, 76 bp, Homo sapiens
ttactgtcaagacatttcttcggcattctgcaacaggacccagatgatgtggtaccagttggccaaagaagagcct

SEQ ID NO: 275833 - DNA, 80 bp, Homo sapiens
tgggtctggactgatctccatgtcctgttgtggggcttttacagcctttgggcttcagcgattagccaaagatcttctaa

SEQ ID NO: 275834 - DNA, 83 bp, Homo sapiens
ttgtttgtggatcgctgtgatcgtcacttggcaacatgagtgagaatgaggaagaggaaatttctcagcaagaaggcagtggg

SEQ ID NO: 275835 - DNA, 74 bp, Homo sapiens
gttttttttgccgaaggcttgtctcaactttgaatttttcagaatggcctgtccagaagacagccaaatacatc

SEQ ID NO: 275836 - DNA, 100 bp, Homo sapiens
aacatcctttgactggttagccagtgcaccaattccagctggacatcactgtgaaaatgggacgggataaagtccgagaaatgtttatgaagaatgccca

SEQ ID NO: 275837 - DNA, 90 bp, Homo sapiens
gcgacccgctgctcagcgtcctcatgtggggggtaaaccactcgggagactcatgcatctgtatgccgtgtgcgtggactgcctggaagg

SEQ ID NO: 275838 - DNA, 75 bp, Homo sapiens
ctgtgctcgcgctactctctctttctggcctggaggctatccagcgactttaatttttggaagtgaataaaactt

SEQ ID NO: 275839 - DNA, 80 bp, Homo sapiens
caaggttttcgtcggggaggtggtagaagaaggaagttcaaactgatggcaacagtcagtttgcatcacaaggtaaaaca

SEQ ID NO: 275840 - DNA, 98 bp, Homo sapiens
tgagggggactggcctggcgtgcactccgcacctcggggacattattgcgcgtggaacggctgcttttggaagggtacttttgacttcagtgacattg

SEQ ID NO: 275841 - DNA, 100 bp, Homo sapiens
cgaagacaacgacagcgacggctacgccgaagcactcgttccgggggtgaagcctcctgcgccggccttgcctcggatcccatgcgaggcccaagaaaac

SEQ ID NO: 275842 - DNA, 75 bp, Homo sapiens
acatatatgcgaatctataagaaaggtgatattgtagacatcaaggtcccagactactatgacatcatcaaaaag

SEQ ID NO: 275843 - DNA, 89 bp, Homo sapiens
gtggcacctgcgcgaagctggccaaagcctgcccagacggctcacctgtgcgggatggaacaaaagaaaatgatgcatcctgttgccag

SEQ ID NO: 275844 - DNA, 73 bp, Homo sapiens
agctggagtggttgttgaggaagaacttttccaccagcagggaaaccccaaagccacggagaaaatcagggaa

SEQ ID NO: 275845 - DNA, 88 bp, Homo sapiens
ggaggtcgataagctggaactgatgtacaaaattggacagctgtacatgatcagcaaacacagccatgaacagagtgaccggggagaa

SEQ ID NO: 275846 - DNA, 98 bp, Homo sapiens
cttcagtttagttgaggataccacattagagccagaagggtttcatcaccttaaatggttttgaaccaatgaaggtgtattcccttaaaaagacggac

SEQ ID NO: 275847 - DNA, 98 bp, Homo sapiens
cagaagagaaggaatcgtggatcaatgccctcaactctgccatcacccgagccaagaaccgtatcttggatgaggtttacccagaccctgtgcgggtg

SEQ ID NO: 275848 - DNA, 87 bp, Homo sapiens
gagaaggactccaaggcggagcaggccaaagtgaagaaggtgctggagaatctggtaaaagcaccattgtgaagcagatgaggatcc

SEQ ID NO: 275849 - DNA, 99 bp, Homo sapiens
actggaggctgagtgctaaactgtgtggggcgcggatgggatccagctgttagtcgggtaggcatagaaagcgctttcagtcggagagtagaaggcaaa

SEQ ID NO: 275850 - DNA, 100 bp, Homo sapiens
ttccataagttcaaagggaccatcatcctgacagctgtgtactttgccctcagcatctcccttcatgtctgggtcatgattctatgggaagaagaaaggg

SEQ ID NO: 275851 - DNA, 51 bp, Homo sapiens
agaagaccgaagcgttcgtatctggaagcttgtgctgcattgcacctgtcc

SEQ ID NO: 275852 - DNA, 89 bp, Homo sapiens
gcgccccgcctcccccgtccggtccctctctccacggtaaggggtagcacaggcggagtgcagcggaggcccctgccgctgccgtcatg

SEQ ID NO: 275853 - DNA, 74 bp, Homo sapiens
cagatggcagccagtcagtggtggaggggtatcatcttatttcgtccttcacatctcactaacaagtttgagga

SEQ ID NO: 275854 - DNA, 100 bp, Homo sapiens
actggaaccatctcagaagccatgcccctcaggctggaacttgccctgtctcctcgcagatgaggtcatcctgtacagttctacagcatgaataggcctg

SEQ ID NO: 275855 - DNA, 82 bp, Homo sapiens
cagcaaagcagtggccgcccgggcggcgggatccactgtccggcagaggatcccttgacaagattgctgtggtaactgctga

SEQ ID NO: 275856 - DNA, 105 bp, Homo sapiens
gggagcccggccggagctgggtctggagacgccgtggcagcctgaacggagtgtgcgacggattgggagagctgcggtgcaaccctgggcagtttgcgtgtcgca

SEQ ID NO: 275857 - DNA, 98 bp, Homo sapiens
ctggaccccaactcagccttcctgcataccctggaccagcagaaacctagagtgattgccagcgtcctgacgtcacagaagccctctgtcctcctcac

SEQ ID NO: 275858 - DNA, 82 bp, Homo sapiens
aaatatttgatttttcacctgaagaacatctcaaacatggggagctatatgttctcctttcagccaagacctttcaccagtg

SEQ ID NO: 275859 - DNA, 82 bp, Homo sapiens
gtttcggcctggaggagttgtacggcctggcactgcgcttcttcaaagggggatatgagactttctactcggaatatcctga

SEQ ID NO: 275860 - DNA, 99 bp, Homo sapiens
caagaagctgatcgagcccctcaccaatctcatccacagggagtaccctgacttctaccggaagctctacggcctcttggacccctctgtctttcacgt

SEQ ID NO: 275861 - DNA, 90 bp, Homo sapiens
cttcgccgcgccccacttgctcgtgcactttacacacatgagttggtagctggcagtgttgtgatggcttttgaagaagtatgcccggac

SEQ ID NO: 275862 - DNA, 82 bp, Homo sapiens
gggaagcgtcgggattaggtgaaaactccatcaagaatgctggaggaagggtgtttgtccactgccaggcaggcatttcccg

SEQ ID NO: 275863 - DNA, 100 bp, Homo sapiens
tctgcggggcgcaggaggcggtgcacagcgccaagccggagaacatattgtgcgtcaatcagacaggacatcaaattaagatcattgactttgggctggc

SEQ ID NO: 275864 - DNA, 75 bp, Homo sapiens
agaacctgaacgaggacacgaccttcctgcccttcacgctccaggagctaggtccaaccgtgactgccagatcga

SEQ ID NO: 275865 - DNA, 97 bp, Homo sapiens
gaagtacgcaagcccacggggagcagagcagcaactcacccagcacacaaaatggatctcttacgccctggcctcccacgactacatcctgaagatt

SEQ ID NO: 275866 - DNA, 83 bp, Homo sapiens
aagcagttttctcagctgcctgctaacatagctgtttgcagttctaagatgatatcatcaagttgaatcgaaaggaagggaag

SEQ ID NO: 275867 - DNA, 76 bp, Homo sapiens
cgcagtggtcgcttcttctccttgcgggtcctcctcgccctggtatgatgccagcaccccatatggggggccctcc

SEQ ID NO: 275868 - DNA, 78 bp, Homo sapiens
gggcagcctcccctcggaactcgggcatcatggcctcagatcctctccttcatcctgcacacaatcgtgcgaggattc

SEQ ID NO: 275869 - DNA, 100 bp, Homo sapiens
cgcctcctcgcagcagcgccatgcacaggaagtcctggagaacctgaaggaccgctggtaccaggcggacagcccccctgcagacctgctgctgacggag

SEQ ID NO: 275870 - DNA, 100 bp, Homo sapiens
tctgctcttccaacaccagtggaagatgatcacatcccagattctgcttctcagaagatgcactattatagatactctaacgccaaggtcagctgctggt

SEQ ID NO: 275871 - DNA, 51 bp, Homo sapiens
gtgagccatcaggactcttgtcctgaaactggcgatggaatatgagaggag

SEQ ID NO: 275872 - DNA, 100 bp, Homo sapiens
caaaaacataaagctctcagaaagagtactgattcctgtcaagcagtatccaaagtgaaagagtttctagccaaagccaaagaagactttttgaaaaaat

SEQ ID NO: 275873 - DNA, 100 bp, Homo sapiens
cgttaaactcctgctctgtttactgtggattggatattctcaaggaaccacacatgtattaagatttggacactgtaatttatgatcgactggcagagac

SEQ ID NO: 275874 - DNA, 74 bp, Homo sapiens
gtctgtggagcctgggaatcctatttcaaatttacatagtacatgacgaagttaaggataaagcttttgaacta

SEQ ID NO: 275875 - DNA, 90 bp, Homo sapiens
gccagcgagagccagggctccaaagaactcggccaccagcccctcgggttccaagatgcagctactggagacagagttctcacacaccgt

SEQ ID NO: 275876 - DNA, 100 bp, Homo sapiens
cagaagcatgtgtcttccccagctctgcagccacatactatccgtttgttcaggaaccaccagtgacagaggttgaaaaataccggccacagaccctgaa

SEQ ID NO: 275877 - DNA, 80 bp, Homo sapiens
gtttgccctgaaacccatgaactgcccaggacactggttctctacttttagagtcgaaaataaatcctaacactgcatac

SEQ ID NO: 275878 - DNA, 50 bp, Homo sapiens
ggcagatggactcggagcgccccgccgggagactgcattgcttattgatc

SEQ ID NO: 275879 - DNA, 100 bp, Homo sapiens
gcttgttcgacccaacagcatcgttcctctttccaagaaggagatggtaacctgcacctcaatgtgacggcggaggccttcagcccctcgctcctggctg

SEQ ID NO: 275880 - DNA, 100 bp, Homo sapiens
cggcggccatggcccggctggctgactacttcatcgtggtaggctatgaccacgagaagccagatcttcttcagcagtatcgttctgctgtgtgcaaact

SEQ ID NO: 275881 - DNA, 100 bp, Homo sapiens
ccgtgtttgctgcggcaaggacgagccggggcgctgaaggtggtggcggtggcggcccgcgatctgagccgtgcgaaggagtttgcacagaaacacgaca

SEQ ID NO: 275882 - DNA, 71 bp, Homo sapiens
tgtctacaaattacttgttcagctgaaagttgctgatgtggtcatcaagttccctgaggaagaagctccct

SEQ ID NO: 275883 - DNA, 50 bp, Homo sapiens
aaggattccaagtaactcttatttggtatagctgtggaccaactgtatat

SEQ ID NO: 275884 - DNA, 82 bp, Homo sapiens
gcagaaggtctctggagacatcttcagcagtgccccgatggacaccaacctcttgagcaatatccagaagctattctctgaa

SEQ ID NO: 275885 - DNA, 85 bp, Homo sapiens
gcactcgaccaggaccacagcggcaaggtctccaagtcccagctcaaggcagcctgcttctgcaaagtggtacgatcgaagggac

SEQ ID NO: 275886 - DNA, 50 bp, Homo sapiens
aaatcccacagaggcatctgagattagtgacaagagctggggttaggatc

SEQ ID NO: 275887 - DNA, 100 bp, Homo sapiens
gaagccactttggccctgctcaaaaatggagccaataaggacatgcaggatagcaagggcactccacagaaggatgttattatcaagtcagatgcaccgg

SEQ ID NO: 275888 - DNA, 74 bp, Homo sapiens
ctgcagtgggggcgtaaaggctggcagcctccccgggtgcctccgcgaagtttcaggcacctgcaagagagacc

SEQ ID NO: 275889 - DNA, 73 bp, Homo sapiens
gaggaaggagggcgagcgaggaggatggcggagtcggggctcctgacgggtttcatcaccttaaatggttttg

SEQ ID NO: 275890 - DNA, 111 bp, Homo sapiens
ccggggggacgctcttctccaccacaccgggaggtgacttctgggggaacagaaagcatactgatggcctgcaaagcatatcgggatctggcctttgagaaggggatcaaa

SEQ ID NO: 275891 - DNA, 96 bp, Homo sapiens
agaacgcttgcccagcaaatgcgaaggtaaaattaagtattcggaaagagtctatgaagcttgtatggaagcttttgatagtttgcctcttgctgc

SEQ ID NO: 275892 - DNA, 100 bp, Homo sapiens
gaagacccacgtccacacctactcctcctcagcctggatgtgtaaatacaactgaagtggacattaagaagtcatccagaatgagaaacccccacaaaac

SEQ ID NO: 275893 - DNA, 73 bp, Homo sapiens
tggatgggaccgcctccgggagctgtttggcaaagattgggtatccctggtcagtaagaattatgagattgaa

SEQ ID NO: 275894 - DNA, 100 bp, Homo sapiens
gcagcccaggcgcgggggcgacgacagtggtcctttggcgtgctcctctgggagctgatgacaagaggagccccaccttatcctgacgtaaacacctttg

SEQ ID NO: 275895 - DNA, 97 bp, Homo sapiens
cggggccatgtgcaggaccctaacgacaggcgcctccggcccatttacggtactgcacaaaaccgaggactatttgaggcaagtgctatgtaaagcc

SEQ ID NO: 275896 - DNA, 100 bp, Homo sapiens
cggatggccccaggtgtaagcgcagaaagcaggcgaacccgcggcgcaataacgatggccaccatgtctgggagatggaagcgaaaactgaccgggacct

SEQ ID NO: 275897 - DNA, 75 bp, Homo sapiens
tcgcaaaaagcatttcacttgaacctctgcagaaagaactgcccatgcaggtgctgttttccggtgaggccaccc

SEQ ID NO: 275898 - DNA, 100 bp, Homo sapiens
tggcgaagcacgagcagatcctggtcctcgatccgcccacagacctcaaattcaaaggtttttgtcatccattggagggacactgtatgaggttggaaag

SEQ ID NO: 275899 - DNA, 100 bp, Homo sapiens
ccggccctccctcatgacacagctatctctgggccactccactatgccccttaccacaggagctctgcacagacatatctgaagagatggattaagaatg

SEQ ID NO: 275900 - DNA, 90 bp, Homo sapiens
cagcctgtgaccccagcgtgggtgaagataggatcaagatggccatgtggcaggtcttctgtgcttcaccatctacataatgaatcccag

SEQ ID NO: 275901 - DNA, 78 bp, Homo sapiens
acttctccgccaacgcggtcatctcgcagaacgccatcaaccagctgggaaactgactctactctgtgatgccaagac

SEQ ID NO: 275902 - DNA, 85 bp, Homo sapiens
gcggagcgaacccgagagcgtggagcgggctgggccaggtcaaaaggctgagtttcaaattctggataatgtagactcaacggga

SEQ ID NO: 275903 - DNA, 74 bp, Homo sapiens
ggcatgaccagcaatgaacagtagtaaggtgtagaatgagccaaggagactcaaacccagcagctattccgcat

SEQ ID NO: 275904 - DNA, 84 bp, Homo sapiens
gtcagaattattccagaaagccaagtatcctaagaaatccggtaaccaataagaagcattacagattgtatgtgatttataaag

SEQ ID NO: 275905 - DNA, 97 bp, Homo sapiens
tcgccaagtgggaatgcctactccagtcttgccaacaggactccagggttcgggccggatcgtggcacccagaggctgccaggactttggctgggac

SEQ ID NO: 275906 - DNA, 100 bp, Homo sapiens
catctctgtgcactgataataaccctgcagacgcatcttctctccagactgccgatcccagaaagccaggtgatcaccattaaccccgagctgcctgtgg

SEQ ID NO: 275907 - DNA, 73 bp, Homo sapiens
gaaattcatggaagatatgatgccaaagttccatgccattgcagtgtcaactaggcctcagttacttttcagt

SEQ ID NO: 275908 - DNA, 100 bp, Homo sapiens
agacgccgccgctgcctcccgcgcaaatgttctgaaaaagactctgcatgggaatggcctgccttacgatgacagaaatggagggaacatccacctcttc

SEQ ID NO: 275909 - DNA, 75 bp, Homo sapiens
tcaaggaggccttccagctgtttgaccgaacagggttggaaatcgtgccaaatgggataacattgacgatggact

SEQ ID NO: 275910 - DNA, 100 bp, Homo sapiens
cggcgctctcctggctcccttctgccccagctccgtctcggcggcggcgggcctcgaaaaagcccaagacagcagaagcagacacctccagtgaactagc

SEQ ID NO: 275911 - DNA, 75 bp, Homo sapiens
gaagtccagagctgaggactgcctgtttgcaggcacgtggaggagttcagccccagagctgtctacaccagtggt

SEQ ID NO: 275912 - DNA, 75 bp, Homo sapiens
cggagcagctggagcagacgaagcggcactgtaatggcgttgactggcgtcagaagctggactctcagcgagggg

SEQ ID NO: 275913 - DNA, 96 bp, Homo sapiens
gcctccggagtagctgggattacagaaatcctggatccaccaccgctgctgttcaccctctcccacccatcctgacccagacccagatgaaacagg

SEQ ID NO: 275914 - DNA, 100 bp, Homo sapiens
caagcaggcagcgggctttgccagcaaaaccgaaacagatcactgcgaaacctgctcgacggtgagatggagcactcagccgcgctccggcaagaggtgg

SEQ ID NO: 275915 - DNA, 101 bp, Homo sapiens
ttgtttcttatatgtgatgccattccagcactggactcatggaggctgagcatttattcagggttttggccaaattgggcgagggcacaaaataaccactt

SEQ ID NO: 275916 - DNA, 99 bp, Homo sapiens
ggatggagaaggaggaggaatcgaggtggtgggacacacgcaggggccactagatgggagcctgtatgctaaggtgaagaagaaagactccctgcacgg

SEQ ID NO: 275917 - DNA, 88 bp, Homo sapiens
tcagctctcacaggagagggcgttcaggtggaaccgtcccaaaatgtcccttgctcagaagaaggatcgggtagctcaaaagaaggca

SEQ ID NO: 275918 - DNA, 74 bp, Homo sapiens
cctccagaggcagctctatgggcggggacccaggcgcagtgcagtttgacagtccagagtgggagaggactcca

SEQ ID NO: 275919 - DNA, 50 bp, Homo sapiens
tcggagagtttcagtcgcattgatccactccttataccgccgcacaggtg

SEQ ID NO: 275920 - DNA, 97 bp, Homo sapiens
tcagggcttccagacttgatacttggaaaggtggagccgccaccaaaatgcagattttcgtgaaaacccttacggggaagaccatcaccctcgaggt

SEQ ID NO: 275921 - DNA, 100 bp, Homo sapiens
gccgctcctggcgcccctgctctgcctggcgctgctgcccgcgctcgccgcacgagtgaagatagtgatccggggagacaggaacacgggcaagacagcg

SEQ ID NO: 275922 - DNA, 75 bp, Homo sapiens
tattcttgctttgctttatttgtgaaatttggcaaagaggcttatgtagacatgaggaagattggcagtagccgg

SEQ ID NO: 275923 - DNA, 82 bp, Homo sapiens
atttctaagcaacttacattagaacaggcacggaatgttaacactggtgaattagcagcaattaaagtaataaaattggaac

SEQ ID NO: 275924 - DNA, 100 bp, Homo sapiens
acagaagaaaaccatctagagtgattatggattggatatgtctacttctggatgcaaattttactgttgttgtaatgatgccagaagcaaagaggctact

SEQ ID NO: 275925 - DNA, 100 bp, Homo sapiens
ccaacacataaaaattatttatccaacagctcctcccagccctaccacttatgtcttggatgaagatgaacctcgattccttgaagaagttgattacagt

SEQ ID NO: 275926 - DNA, 75 bp, Homo sapiens
ttggttttgcaggaggctatacttcaaatcctacttataaagaagtctgctcagctctaagcgaaagacatgagg

SEQ ID NO: 275927 - DNA, 75 bp, Homo sapiens
gagccgtgcgatctggacgcggcgctgctgaccgacatcgaagtgtggacgaatgtggaacctcgctctgtggct

SEQ ID NO: 275928 - DNA, 93 bp, Homo sapiens
ggtggctccatggacacagacctgctgtgtgtgcttctgcgccccaggtgagaagccctaccactgcaactgggacggctgcggctggaagtt

SEQ ID NO: 275929 - DNA, 97 bp, Homo sapiens
aaagcttcccaccacatttacccatattcttcctcacaagacgatgggaaattcacctcttctatagaagagtttgttttgaactatacgatttgaa

SEQ ID NO: 275930 - DNA, 100 bp, Homo sapiens
cgagcggcggcggcggcagcgggtcttgggtcctccgagagcagcagcggtacaggatttctccatgttgcccaggctggatatgaactcgtgactcatg

SEQ ID NO: 275931 - DNA, 100 bp, Homo sapiens
gaacatctcgctgtcggtgaagaagctcgcaaaggatctccttcatccctctccagaagaggagaagaggaaacacaagaagaaacgcctggtgcagagc

SEQ ID NO: 275932 - DNA, 98 bp, Homo sapiens
cggccctgggcgggcgccgcgagccgggtggtattaaagataatcaaacattatcaagaagaaggacaaggaactgaagttgttcaaggagtgctttt

SEQ ID NO: 275933 - DNA, 75 bp, Homo sapiens
ccaagagcagcggaaaatgatccagtcacagaattcagaaggagctggcggacatcactttagaccctccaccta

SEQ ID NO: 275934 - DNA, 96 bp, Homo sapiens
ggcgttccaccagcaaccatgagtggttccatgatgggaagtgacatggggaaggagaagttcctgggcatcctgaacaaatacatggagatccat

SEQ ID NO: 275935 - DNA, 75 bp, Homo sapiens
gagcgtgaccgagagcgcgaatatcgtcatcgttagaagaaacgtgttcagttgatcatcaaatacttaaaggac

SEQ ID NO: 275936 - DNA, 100 bp, Homo sapiens
tgccaatttatcgtagaccatatgaaaagggtcgcctaatcatcgaatttaagcttcttggacacttaatgattgttggcaagaaatgtgctgctgatct

SEQ ID NO: 275937 - DNA, 110 bp, Homo sapiens
tgagaaccctacttgcctaaatgaggaatgtctttcctaccatctaaaatacgaaggtttctggctgggacagagcgggatgccaccagcttgtccaaagggaagttcca

SEQ ID NO: 275938 - DNA, 83 bp, Homo sapiens
caggtgcatttcacagcactctgggcgaaaattggatgtgaaaatgaagccagaccgagtcctattttgtaacggattatgat

SEQ ID NO: 275939 - DNA, 74 bp, Homo sapiens
cacgccgggagctggtacacagcctcagtgtcgtgtgggagccaatgggagatgggaagaaaatcatttccttg

SEQ ID NO: 275940 - DNA, 100 bp, Homo sapiens
caatgctcaagtgatggctggttttcaggaactcataaatgccacctcaacaattcagagagccagctctcccaggcgctgaacggactgtcagacaggg

SEQ ID NO: 275941 - DNA, 78 bp, Homo sapiens
aaggagccagtttggctgaaaataaaaggccagtccctgagacgaataggaccttgtccctggatgaggtgtacctta

SEQ ID NO: 275942 - DNA, 98 bp, Homo sapiens
agagtcttctcgacatgtgtgtgggttttattgggaggagatctgctgcaagagtctgattgcttgggtcagtgcaacaggacagaatctagtcgctg

SEQ ID NO: 275943 - DNA, 106 bp, Homo sapiens
cgagaaggaggttgccgacgccatcaggctcaacgaggaactcaaagtggatgaggaaagcatgtcgggccccaggcctgtggtgctgagcgggccttcgggagct

SEQ ID NO: 275944 - DNA, 97 bp, Homo sapiens
gcggtttactcctcatgccgagatggaccttgggcagctcagttcacaaggctttaacaacaccgagagaacatgtgataaagagtttattatacgg

SEQ ID NO: 275945 - DNA, 100 bp, Homo sapiens
cacccaggtcagcaagggcacctgcgagcaaggttatgatgtgattgctcaagcccaatctgggactgggaaaacggccacatttgccatatcgattctg

SEQ ID NO: 275946 - DNA, 74 bp, Homo sapiens
ccctctgcagctgaataacccttttaacgagtattccaaatttgatggcaagcttggacgaaccttgacaggat

SEQ ID NO: 275947 - DNA, 100 bp, Homo sapiens
ttggagtatcgttctatttctctagctattgccttattttttctcatggatgttcttcttcgagtatttgtagaaggctaggtggaaaatttgcagccag

SEQ ID NO: 275948 - DNA, 85 bp, Homo sapiens
gagccccgcgtttcagccctagggaaggtatcctgaagaacttgcctggcacacaaatttaagtcgaaaaatcttgagaaaatcg

SEQ ID NO: 275949 - DNA, 80 bp, Homo sapiens
gacttgaacttaatacagcaagaaagaccatcaagtttaccagttttgcactgattgcaaaaataaagtcctccgagcat

SEQ ID NO: 275950 - DNA, 100 bp, Homo sapiens
ccatcttctcatgaccaactgtatcaagaaagactcagagccttggggcactgagggatgccagttctgcctgttcatctggaacctggatctaaggagg

SEQ ID NO: 275951 - DNA, 97 bp, Homo sapiens
cccgcccgccggcagcgccgctccccagggagggagtccgcagcctgaggaaacccagcgtttgctggcagaaccagttcctggcatcaaagccgaa

SEQ ID NO: 275952 - DNA, 50 bp, Homo sapiens
caacttggacgtcagagaatgtgaacagagcctcgcaaggtagtcctgca

SEQ ID NO: 275953 - DNA, 100 bp, Homo sapiens
taatggaagcatctacatcaacgagagccaagccacagagtgtgacgagacacaggagacaggatccagacacattagtcaagctgcagccaaagtcgac

SEQ ID NO: 275954 - DNA, 76 bp, Homo sapiens
cagagctagccggacgtcctccgactcaaggtaatatagctgctgctggaagtgacgagaagtgcaagctggcgat

SEQ ID NO: 275955 - DNA, 97 bp, Homo sapiens
accagccaatgatcttttcaatgctgcgaaagctgccaaaagtgacatgcaggtggtcgtgtgatggtaacagatgctgacaggtcaatactatctc

SEQ ID NO: 275956 - DNA, 83 bp, Homo sapiens
cggatccccgaacgctttttccctggcaaatgtgacatctggggggcagctggcattttatgctatgtgggagcctatgtctt

SEQ ID NO: 275957 - DNA, 100 bp, Homo sapiens
ttcgtggcggggctggggctgctttacgccctgaggatccctttgaggctgtgtgagaatttggcagcggccaacacaagccatcagccccatgctcagc

SEQ ID NO: 275958 - DNA, 83 bp, Homo sapiens
gcctacccgagtgtgcgaagctagccaagttctttatagctccaagctctacagattcttcaaatatattgagaatagggatg

SEQ ID NO: 275959 - DNA, 100 bp, Homo sapiens
gccgtcctgaggagcctcctggcctgcagcttctgtgtgctcctgagaggaaacccagcgtttgctggcagaaccagttcctggcatcaaagccgaacca

SEQ ID NO: 275960 - DNA, 51 bp, Homo sapiens
gaaattcccagaggactttggagaccagatattcccagacacccgatgcca

SEQ ID NO: 275961 - DNA, 73 bp, Homo sapiens
cgcagaagaaacccgcggcgaccacagccaaagcgggcctctttacacgctgtcttacaccgcttgtaccaga

SEQ ID NO: 275962 - DNA, 100 bp, Homo sapiens
gcacaggtcacagtaaggccaaaaatgtgcatactcacagagttagagagagggatggtgggaatgactctactaatgatggggtcagcagatgctcttc

SEQ ID NO: 275963 - DNA, 88 bp, Homo sapiens
agtctactctgtcgctcttgtgccctagcaccccgagaaccgtcagtttgagccagatggaacctggcttctgtatttaccatgtacc

SEQ ID NO: 275964 - DNA, 99 bp, Homo sapiens
gtggaattcgcgaagctgccaaagccttagacaaatgcctgaggaagtgcaccatggagaggaggaggtggagacttttgcctttcaggcagaaattgc

SEQ ID NO: 275965 - DNA, 100 bp, Homo sapiens
gacccggatttccagccagagctgagcggcgcgggctccagactcgccgtggtcaagttcaccatgagaggacatgcacatgatggtgtccaagccagaa

SEQ ID NO: 275966 - DNA, 149 bp, Homo sapiens
tgagggattgctactgcacggtgaacctggaccaggaggaggttttcaggaccaaaattgtggaaaagtcactctgccacataaagaagatccctaatagtcatttctcaacaattatatagtcaactgatgtaacaatggtactaata

SEQ ID NO: 275967 - DNA, 100 bp, Homo sapiens
tgtgttccggtgcctggggaatctacgtggggcaaagtgcaattgctggggaagaacatcccagaggttcaattctgcgggaagtgcacctcaagttcct

SEQ ID NO: 275968 - DNA, 98 bp, Homo sapiens
ctgtggccacctctgctgctgtgtggtgcgaggctgtgagcagaattatatccagatcgagagacagaagattctgaaagggttcaatgaaatgagag

SEQ ID NO: 275969 - DNA, 74 bp, Homo sapiens
gaaaatgaagtggatgccttttggtgctttgcctcttacatggaccaaatgaaaggtctggcttcacggtgagg

SEQ ID NO: 275970 - DNA, 96 bp, Homo sapiens
cgggacttggccgagcggatcctaataaggggaaaatgtacttcgggatgacttcagacaaaacccttcggatgtcatggttgcagtaggagagcc

SEQ ID NO: 275971 - DNA, 72 bp, Homo sapiens
tggtgtaatcactttatatgaggttcaaaccttgtactactcagctgatcacaagctgcttgatgggaacct

SEQ ID NO: 275972 - DNA, 100 bp, Homo sapiens
gaagtgttccaccagttgcacgatcctcaccgcaacattccttatccaatcccttaccggctcttgtcaggatggtgaagctgttcatcggaaacctgcc

SEQ ID NO: 275973 - DNA, 100 bp, Homo sapiens
tggactgtgggctggtgtgtggaactggtcctaactgggaccacctactccccttggagggtccggatggagtttcccctctgcggctgcctctcactca

SEQ ID NO: 275974 - DNA, 100 bp, Homo sapiens
tggttggccctgtgatccctcaagactggtccacggagtgtatgaccacaaacagccatcaagggaaactgaacagccaagactcctataacaattttac

SEQ ID NO: 275975 - DNA, 100 bp, Homo sapiens
ccagctacccctgttggcaaaggaacggagaacacttttccttcaccgaaaggctcttgtcaggatggtgaagctgttcatcggaaacctgccccgggag

SEQ ID NO: 275976 - DNA, 100 bp, Homo sapiens
tcaatatctgtcttcggtggactccttcggcagtccacccaccgccgccgcctcccagtcctcatcaccgggggcatcgtggccacagctgggcgcttca

SEQ ID NO: 275977 - DNA, 98 bp, Homo sapiens
ttgcagcctatggatttgctcccattactctgatcgctccgttaggctgtgtgtctgttacagtgccatggaaagccattcactcctcaatcccaacc

SEQ ID NO: 275978 - DNA, 97 bp, Homo sapiens
atcaggacagctgttccttggccatcccaaagctattctgggggcaacagagaggctgcagtcagttcgggaaggctgtaggacccgcagccagtgc

SEQ ID NO: 275979 - DNA, 75 bp, Homo sapiens
ctggaggacgagggccagctgacggagatggtgcagaagatggaggagggcctctgaaaaatggaaccaaattct

SEQ ID NO: 275980 - DNA, 107 bp, Homo sapiens
cagggaccagcgctggaactgctcaagcctggagactcgcaacaagatcccctatgagagtcccatcttcagcagaggaagccatcttcgacaagagcacagggaag

SEQ ID NO: 275981 - DNA, 96 bp, Homo sapiens
tgagcaatagcacgaggcctgttgtctaccaagtgcagtttaaataaaattgcccaggttattgcctcatacaccgccaccggccccgagcagctc

SEQ ID NO: 275982 - DNA, 98 bp, Homo sapiens
tcggaaccaggatatcaagaccaaatggccccagccaagcctggagatgagggcaaggtggagcagggcatgaaggactccaagtccctgagtttgcc

SEQ ID NO: 275983 - DNA, 101 bp, Homo sapiens
gtgcaggatcttgatggtggcaaggaaacaagttgaaatcatcgcagaaggataaagttcgtcagtttatgatcttcacacaatctagtgaaaaaacagca

SEQ ID NO: 275984 - DNA, 100 bp, Homo sapiens
acagtgcatggagatggttcagcaggacaaggatgtggaagatgtcaagtttgtgatcaactatgactatccaaacagctcagaggattatgtgcaccgt

SEQ ID NO: 275985 - DNA, 80 bp, Homo sapiens
cgttgtgccagcgactaaaaagaggtcagcccaaggccaaccccactgtcactctgttcccgccctcctctgaggagctc

SEQ ID NO: 275986 - DNA, 76 bp, Homo sapiens
cgacaaaccactttctgcccctggaggaggagggggccagtgggggagcagtccattcagacattgggagcagcag

SEQ ID NO: 275987 - DNA, 75 bp, Homo sapiens
caacatcgacagcattatccaacggctgctggaagttgtctatcaacgtctatgactacaactgccatgtggact

SEQ ID NO: 275988 - DNA, 100 bp, Homo sapiens
tgcggcgcacgccttgcccgcccagaattttgaacagaaaatgctgaaaaaaggagggtcatggattcaagaaataaatgttgctgaaaaaaattggtac

SEQ ID NO: 275989 - DNA, 100 bp, Homo sapiens
gcctgcatcccgttcccctctccctgaaaaggcaccaggaaaagagagagggagagaagagttcacagcaggtcaatgtgcgaaatggaatgagcttgca

SEQ ID NO: 275990 - DNA, 99 bp, Homo sapiens
tgaaaacagaaggaaattgaaggaacttggagttaatggtctaatttatgataggataagttctgaacgtcgaaaagaaaagtctcgagatgcagccag

SEQ ID NO: 275991 - DNA, 75 bp, Homo sapiens
tgtgtcacttgtggctgcagaccctgcgggagatgctggagaagctgaggattaatgaaaatcaagttccatcct

SEQ ID NO: 275992 - DNA, 101 bp, Homo sapiens
cccacgggccgggcatgctgccccccggaaggaacccctctcctcgctgtatgggcttattttgccaaagaaaacacagcagttgcaccctgttttgcaaa

SEQ ID NO: 275993 - DNA, 100 bp, Homo sapiens
aagtgaaaagagatctgttttcaggtggagctcatgaaggacttcagcatttgggtccttttggcaacatccccaacatcgtggcagagttgactggaga

SEQ ID NO: 275994 - DNA, 100 bp, Homo sapiens
tgccaaatagcagaagaataccatgaggtcaaaaaggaaatcaccctgcttgagcaaaggaacaccttatgaagctaggcagccccttgtccagcccgag

SEQ ID NO: 275995 - DNA, 90 bp, Homo sapiens
ttacaaaggagttgacagcacttttcaaaaacctggtgatgacattagggagtgaggcctttggaaggtgatgagatcatgagagcagag

SEQ ID NO: 275996 - DNA, 50 bp, Homo sapiens
tctcttcttctgaaaaagagatcttgttttcggctttgtgagaaacctta

SEQ ID NO: 275997 - DNA, 102 bp, Homo sapiens
cagacttcaagattgccttcttgggtgatgatgaatctgcattggataatgatgagctcgaggccatgagcagatataccagcccagtgaacccagctgtct

SEQ ID NO: 275998 - DNA, 75 bp, Homo sapiens
gcagaaggtctctggagacatcttcagcagcttgaaggatgccaatgatgtaccaatccaatgtgaaatctctcc

SEQ ID NO: 275999 - DNA, 80 bp, Homo sapiens
ttggttcagactcgctcagccttaaacttgcaaaaataattctagcacattactctactgactggcagagacaggagagg

SEQ ID NO: 276000 - DNA, 97 bp, Homo sapiens
ctttttcctcaatgaagttgaggttcaggaaggattcctgagattccaggaggaagtactggcgaagtgctccatgattttgctggaggagcttgcc

SEQ ID NO: 276001 - DNA, 100 bp, Homo sapiens
gaacaccgtcttatagctcgctatgctgcccggctggctgcagaagcaggaaacgtgaatgtgacagtgatgataacatgggtgccaaaaatacttcaat

SEQ ID NO: 276002 - DNA, 100 bp, Homo sapiens
gaggatgctaaagctatttatgagtgaaacctaaacatttgtcttgcattggagtctgttcttttttgctggctgctagaatagttgaagaagactgcaa

SEQ ID NO: 276003 - DNA, 51 bp, Homo sapiens
accatcgtcaccatgacaacactagggacagaggtcagatcaaggccaccc

SEQ ID NO: 276004 - DNA, 51 bp, Homo sapiens
gcgaggaaaatggcggcgggagatcctggctctgcagagagaacagcccag

SEQ ID NO: 276005 - DNA, 75 bp, Homo sapiens
ccccatcttcttctctcggtcccgggagcccccgcccggagaccagttacagaagtggatccgcggtaatgtgag

SEQ ID NO: 276006 - DNA, 75 bp, Homo sapiens
gaactcagggccggttgtggccatggattatatgcgtcaggcaggagaagtgacttatgcagatgctcacaaggg

SEQ ID NO: 276007 - DNA, 112 bp, Homo sapiens
agcttacagcccaacatgaactccagtgacccagacctggctgtggtcaaacccacccggcccaactcactatttgagttctgtgaacctgcatttgttgttggtaattgcc

SEQ ID NO: 276008 - DNA, 100 bp, Homo sapiens
tatctttaaaaggcccgagagccctctcctgcccacaactccatcttttcatccaaggactgtgttggttgatgccggcccaggatggatcagacctgtg

SEQ ID NO: 276009 - DNA, 98 bp, Homo sapiens
acacctcctcggaagtcggcatctctctccaacctgcattctccaaactgcaggccgctgtggtgttgaaccctggctactcctccatcccacctgtt

SEQ ID NO: 276010 - DNA, 89 bp, Homo sapiens
tcaaactacgttaagatgacgacagactcagatccaagtcaacagtagctccactggttcaacagcctctcctccagtttcgaccccag

SEQ ID NO: 276011 - DNA, 90 bp, Homo sapiens
atttgcctgtatactctcgttctgcgacttataaaggaccagacaaatcaaattagtggttttgctcaaatagctataactgtaccaaag

SEQ ID NO: 276012 - DNA, 100 bp, Homo sapiens
ggtccagtcccgggcgggccgtcgcgggagagaccaagatcactccatggatgaaatgacagctgtggtgaaaattgaaaaaggagttggtggcaataat

SEQ ID NO: 276013 - DNA, 114 bp, Homo sapiens
gccggcctgcggaacgaaagtgaacaggagccgctcttaggcgacacacctggaagcaggaaaattgcctaagaattatgacccaaaagttaccccagatccagaaagatggct

SEQ ID NO: 276014 - DNA, 90 bp, Homo sapiens
gcctggggcaggaatgcgtcctgagcagcagccccgcggtgctgggtgtacgatccatagcagaatttttggcaaagtctaagtcagaag

SEQ ID NO: 276015 - DNA, 100 bp, Homo sapiens
cgcatcacaagtcgcctgcagccgcccgaagagccaagagtcagtattccggccagcttcacgaagtcagagagacggtctggaaaatcccgaagcagaa

SEQ ID NO: 276016 - DNA, 74 bp, Homo sapiens
gttttggaactagcagatgctggcgacctatccagaatgatcaagacagcaccagttgcccttgaagcagaaaa

SEQ ID NO: 276017 - DNA, 98 bp, Homo sapiens
cgggctccaccctgctgcagcccctcagcaacgccgtgcagctgcccatcgaccagaaagttgaagttgatggtagtttaagtgatagccacgtatct

SEQ ID NO: 276018 - DNA, 95 bp, Homo sapiens
ctgcccctcttcaacacctggacaccttgttagatggaacctacaagcaggttatcaatagtctggctgtctatcgtcatcgtgagactgacttt

SEQ ID NO: 276019 - DNA, 80 bp, Homo sapiens
gctcctggcgcacattatcgccaaattcgccatacacaagaagatcgtcctgcaggtggcctctgtcagcctcttgcagc

SEQ ID NO: 276020 - DNA, 100 bp, Homo sapiens
aagaggcacgagatgccccctcacatctatgccatcacagacaccgcctacaggagtatgatgcaagggacgcggagcttgcagtggtgagagagcagcg

SEQ ID NO: 276021 - DNA, 80 bp, Homo sapiens
aacccaccatgaagggattgctcactaagatcacccggaagttcaggctgaattctgaaggcaaacttgagcagacggtc

SEQ ID NO: 276022 - DNA, 75 bp, Homo sapiens
ttggaaaaaggtgctgcagcaggaagaagctgggatctgattgaacagtttcaccagtgatcattaaagaatggg

SEQ ID NO: 276023 - DNA, 95 bp, Homo sapiens
acccaatggaacatcagcaatgcttctgattgctgctaaaattgattcaattcctcacttgaataattccacacctctagtggacccctcagtat

SEQ ID NO: 276024 - DNA, 100 bp, Homo sapiens
cggcagccgcacaccatcctgcgcgtcgtgtcttggcaggagcttccagcccgtgtgaacctctcagctgccccagccccagtctctgctgtgcccaccg

SEQ ID NO: 276025 - DNA, 98 bp, Homo sapiens
aaactactaggatcacgcggcatgtattgaggatgaatctcctccgaaacaacagctgcctctccaaaatgaagaattccatggcttccatgtctcag

SEQ ID NO: 276026 - DNA, 80 bp, Homo sapiens
acagcaaatgctgaggactcagaccggtctctgcaagagacagtcattttgtttactcattcagccctgttgcaggtccc

SEQ ID NO: 276027 - DNA, 99 bp, Homo sapiens
cttttctcatgtctctgagacaagaggaatccttaggacgaggaacttcattgtggacagagatagctctttaaaatccatgacggagttctcatcaac

SEQ ID NO: 276028 - DNA, 99 bp, Homo sapiens
accctggtcctcctggatcgacgccgccaaattacactgctccgacacaggaggccactgtctgcagctcccgtgaagatgtccactccagacccaccc

SEQ ID NO: 276029 - DNA, 98 bp, Homo sapiens
gacgtgctgtccacgcacctggacgacgcccggcgccagcacatcgcagattctctttgtggccagatgggtttgtatggacaggcttgtccatctgt

SEQ ID NO: 276030 - DNA, 89 bp, Homo sapiens
agctccagggccggcttcaggaggcccaagacaccacagaagccctccgagcccagctttgcatgttcaactgtcgttcgagcctatgt

SEQ ID NO: 276031 - DNA, 90 bp, Homo sapiens
cccgagaagtttactgggaaaactgccagcaaacggggattcagcgtccgatcctttggaacagggactcacgtgaagcttccaggacca

SEQ ID NO: 276032 - DNA, 100 bp, Homo sapiens
gtctggcaaaagcctctgctctgcctccggggacaagaaactagagcaaataaccgttttgaaatttcgatgaccagctgaccattaacatagatgaagg

SEQ ID NO: 276033 - DNA, 82 bp, Homo sapiens
cgacgagatcttccgcaacctggagaacgccaagcgcttcgccatcgacatagcaaattgtggctactaatttgccccctga

SEQ ID NO: 276034 - DNA, 75 bp, Homo sapiens
ctacggatccaaatgtaaaagatgcaagtatgacccaagccctttgcagatttgcttgtaaatgcatcacgaaga

SEQ ID NO: 276035 - DNA, 100 bp, Homo sapiens
acccactcgagaattggctcagcagatgctaggtgttcaaggagcatgcaaagataatcctggggaaaatgcccggcagcttgcccgaattgtgtgtggg

SEQ ID NO: 276036 - DNA, 100 bp, Homo sapiens
tgcagtggggccagtgaaccagtttgactatcagattttggaaataatcagggttattttaaaactatatgagcagtggaagaatttcgatgagagaaaa

SEQ ID NO: 276037 - DNA, 100 bp, Homo sapiens
gccagccccctgcgccgcggctacgtgcgcgtccagtggtacccggagggcgtcaagcagcatgtgaaggagaccaaggaactcaccttcgaggcttgga

SEQ ID NO: 276038 - DNA, 98 bp, Homo sapiens
gttcggaatgcttcatttggaggatacaatgaactttctccttcattgccaggctggccagctaaactatgtggatccagctactggctatgtggtgc

SEQ ID NO: 276039 - DNA, 90 bp, Homo sapiens
cagagttcatggagaacggcgccctggactccttcctgcgggcatcgactgggcccccgagagtaaccgtattgtgacctgcggcacaga

SEQ ID NO: 276040 - DNA, 76 bp, Homo sapiens
gaaacctcgtggcctggtctccattatttgagatgagttacatcttggaggtatccgttacagcactgatgtgagt

SEQ ID NO: 276041 - DNA, 100 bp, Homo sapiens
cagacggcctggctggagccctggacgcccggcagcagagcactggcgcggctttgaacccgaaacgtactgggatcgaatgcacctcttccaggaagcc

SEQ ID NO: 276042 - DNA, 101 bp, Homo sapiens
gggggaccttcgagacaaggctgtcagcccctaggtggagccccctgagctgcccgctgatctgcagcactggatctcctacaacgaggccagcagccagc

SEQ ID NO: 276043 - DNA, 100 bp, Homo sapiens
acaaggcactgctttttcatgacgactttctgctgacccctctgtcacccactgccagtcagggcagtccctcattctgcgttgggagtctggaagaaga

SEQ ID NO: 276044 - DNA, 100 bp, Homo sapiens
gggccgcggagccgcgcgtcgctgtctctatggccccggatccgagcgcaaagctcagcccacccttcaagccccaggtcacgtcggagactgacaccag

SEQ ID NO: 276045 - DNA, 49 bp, Homo sapiens
ccaagttctaccagccctacagtgatggctgttttagtacttcaggtgg

SEQ ID NO: 276046 - DNA, 132 bp, Homo sapiens
tgcctgtcttcagatcttcacagcacagttcctgggaaggtggagccaccagcctctccttgggcttatttcaaaacctttgtccctcagttccaggaggcagcatttgccaatggaaagctctaggaaaca

SEQ ID NO: 276047 - DNA, 80 bp, Homo sapiens
cgacaagccgctggcagccgcggatctcaccgccgctcaggatgtccagggtgctgcagaaggacgcggagcaggagtca

SEQ ID NO: 276048 - DNA, 100 bp, Homo sapiens
cctggtcttgctcggccgatgaagtgcagaggtttttttctggaccaggaagaaacaggctcctgccagcaccgacagcaacgaaaatgttcccacggag

SEQ ID NO: 276049 - DNA, 75 bp, Homo sapiens
cctcttcagctcgccatggatcccaactgctcctgcgccgccggtgaaccacctgcgctgcctccacgagttcgt

SEQ ID NO: 276050 - DNA, 100 bp, Homo sapiens
taacacctatgaacagtctggccacctctgtattcagcatagctattcctgttgatggtgatgaagacaggaagcaagatttccagatgtagcaaatggg

SEQ ID NO: 276051 - DNA, 100 bp, Homo sapiens
tttcaggaaggagccattatttatgtcatcaagaagaatgacgatgatggaagactgtatttgaaaactactgtcatgtactgaatctttcctgttgaag

SEQ ID NO: 276052 - DNA, 100 bp, Homo sapiens
ctgaattatggcagcccagtcaagtgattcgcctttgccagtctcatctcgtgtctgctttgttaagttccatgatccagactcagcagttgtggcacag

SEQ ID NO: 276053 - DNA, 101 bp, Homo sapiens
gggtcagtccgccgctcaccccgcggccgcaccttcccgccttctcaggttcgtgctggccgtgggcagcgccgtctttgatgccatgttcaacgggggaa

SEQ ID NO: 276054 - DNA, 74 bp, Homo sapiens
tcggaaggggacaaatccgcgatcccagtcatgcatgcagtctttagctctcatggattgggagctgggaaagg

SEQ ID NO: 276055 - DNA, 101 bp, Homo sapiens
ctttctcctcctccccaagtcgcagtgccactgcaagcccacaggattctcagcaagttacagaagtatctttgacaactcttgtgaactttgtggacatt

SEQ ID NO: 276056 - DNA, 98 bp, Homo sapiens
tcgacttgtagctcctgccccagtcatcattagttcctcagctgcacaagcaggatccttgccacggctggaactgacttcgacctgcgaacactgag

SEQ ID NO: 276057 - DNA, 83 bp, Homo sapiens
gaggcggtggctgcggttgcgggaccggtattagaaaactactcggatgctccaatgacaccaaaacagattctgcaggtcat

SEQ ID NO: 276058 - DNA, 75 bp, Homo sapiens
cggctggggccgtcccagttcgcaatgagaaagctttaaggaagcctcctatttcagtttctcaacatgaaagtc

SEQ ID NO: 276059 - DNA, 98 bp, Homo sapiens
agacgccgcgtgtacccggttgtcctcaggcgctgtcaggtagctacagcaagctgggtagcaggcagatccaaaggatatcatgaagtttccagggc

SEQ ID NO: 276060 - DNA, 90 bp, Homo sapiens
caaaatgtcaacaaattgatggaacatccatgatagcagtcttctgtaaatcgaacttttcaagaattctctgaaggaaccaagtaggat

SEQ ID NO: 276061 - DNA, 90 bp, Homo sapiens
ggagcaccagggcatcaagatcgagttcatcgggcagatcgacttaattcagtgcacaaatgagatgaatgtgaacatcccacagttggc

SEQ ID NO: 276062 - DNA, 96 bp, Homo sapiens
ccggcagcgcgcggtcgacgcgggcctgagctccctccaggatatgggccctcacattttccaaacctgtccatctgctaactattttgactgcag

SEQ ID NO: 276063 - DNA, 100 bp, Homo sapiens
gcacaacaaaatgtttgagtcaattctgaaagctccggtattattctttgatagaaatccaataggttatatacaggcatgtagaggacttatgatcgct

SEQ ID NO: 276064 - DNA, 97 bp, Homo sapiens
ctcgaagtgcgcaaacttgacactcaccctgaccgattcatctgaaaactacattaagatgaagacctttgaaggtttctgtgctttgcatctcgct

SEQ ID NO: 276065 - DNA, 89 bp, Homo sapiens
cctcttcttgaaatactgaaatatccttacttgcttctacatgaacgtgttagagttgtgaacagatgtgtgtacagcacaaccaaggc

SEQ ID NO: 276066 - DNA, 88 bp, Homo sapiens
ggatcctctgtacgcccgttcactggtgctggagaatctggtaaaagcaccattgtgaagcagatgaggatcctgcatgttaatgggt

SEQ ID NO: 276067 - DNA, 51 bp, Homo sapiens
acatgaagagctgccagatccaacaggctggtgcctctgccgagatcaccc

SEQ ID NO: 276068 - DNA, 82 bp, Homo sapiens
cgcggatgtcggcgaagagttcaaccaggaatgcctctggctcaggcagtagccattcttcagaagcactgtcgcatcatca

SEQ ID NO: 276069 - DNA, 83 bp, Homo sapiens
cacaaagaatagagttgagcctgtgggacacttcgggatttttagactctgaggagcagttggagctaatccacattatggaa

SEQ ID NO: 276070 - DNA, 83 bp, Homo sapiens
atttttttcgggtagtggaaaaccagtacctggagtagaacagaaaaattattatgtctgtgttcccttgggactcattggaa

SEQ ID NO: 276071 - DNA, 100 bp, Homo sapiens
cgggagaacatcaaggccagcaccgcgcttctctgaagtagctttggaaagtagagaagaaaatccagtttgcttcttggagaacactggacagctgaat

SEQ ID NO: 276072 - DNA, 75 bp, Homo sapiens
accatggccaggagggctccatcctgagtggacccagagggacctggaacgcatggagaacattcgattctgccg

SEQ ID NO: 276073 - DNA, 75 bp, Homo sapiens
gacctcgctgtacgccgagcacccaggcgactgcctcatcttcaagctgcctgtggaggaaccgattgtgtccac

SEQ ID NO: 276074 - DNA, 80 bp, Homo sapiens
atcacctctcagcacgattttcccgagagttcacagggttggggtgctggaggactgcttcaccttcctgggcatcttcc

SEQ ID NO: 276075 - DNA, 95 bp, Homo sapiens
atcccaggcccaagctcaggagctggagaccaaagctgagctcctccagtctgacactggaagaattgtcttaccaagctcttgccctgttttct

SEQ ID NO: 276076 - DNA, 74 bp, Homo sapiens
aaaagcgcactaaatcgtctccaagttaatcagctgtgttcagcgaatacttatgaacagaaggctccagcagc

SEQ ID NO: 276077 - DNA, 75 bp, Homo sapiens
gggccaaggtgtggctcctctgaagacctgcacgaggcaaatccagacagaacctttgacttggtgttgaaagtg

SEQ ID NO: 276078 - DNA, 50 bp, Homo sapiens
cgaggagcgcttccgccctcagtggagagttcaagctgaagaagatgtgg

SEQ ID NO: 276079 - DNA, 98 bp, Homo sapiens
tcagaaacaaaacttctattgagtcatggattgaagagaaggtcccagtcatgcagggaacaggaatgcaaggagcaagtatacagggtggaagccag

SEQ ID NO: 276080 - DNA, 100 bp, Homo sapiens
ccacccggctgctggcccacaagatccagtccccacaggagtgggaggcgatccaggccttgacgggaatgctggcagactttgtgtcccagacttctcc

SEQ ID NO: 276081 - DNA, 75 bp, Homo sapiens
caacatggcggaacgcaggagacacaagaagcggatccagaccagcatctcagacatgtcgaaaaagatgttttg

SEQ ID NO: 276082 - DNA, 98 bp, Homo sapiens
cagcaggagcttcatcaacgatatatgtcagatctaaagaatatggtgcacctgaagattgggaactcaaaacacagcaaccacttatgctgaaaaac

SEQ ID NO: 276083 - DNA, 75 bp, Homo sapiens
tggtaaaactcacctctttggatgtccctggtagatttgggaaagaagcttttagaagcggcacgagcaggtcaa

SEQ ID NO: 276084 - DNA, 100 bp, Homo sapiens
gagctgatgctgaagacaccgcggtgggattccagctgtctgattaatgagaaacataatgtattttggtgtatctcccgaacataaacaagatatcaat

SEQ ID NO: 276085 - DNA, 76 bp, Homo sapiens
tgggtatactgctcaaaagagaaggccccaacttcatcacaaaggaaggcattagatggcttcattatcgcagtga

SEQ ID NO: 276086 - DNA, 90 bp, Homo sapiens
ctggaatatgaagagacatgagatggtggatgaacccccagttcgatcctttggtacagaagacagaccgacagatcgtccaataccacc

SEQ ID NO: 276087 - DNA, 100 bp, Homo sapiens
ctcatccacaatgatttctccagtgctcatcttgttctcgagttttctctgccatgttgctattgcaggacggaagcctacctggacgtagacattactc

SEQ ID NO: 276088 - DNA, 100 bp, Homo sapiens
gcgagcggtccggaggtccggtttcggcgccactggacggatgtccaggtgaaggggacgtcgctgccccgagcactgcactgctgggacaggagcctcc

SEQ ID NO: 276089 - DNA, 75 bp, Homo sapiens
gagtccctgtgtgggcagctggagccttcagtctgcgctcctcagaccaccggcaggtgaacagcctgatgcaga

SEQ ID NO: 276090 - DNA, 83 bp, Homo sapiens
aaaccagctgagacagggcgccacttactagcggctggactctattacctggcagaactgatagaagaatacacagtggccac

SEQ ID NO: 276091 - DNA, 74 bp, Homo sapiens
tatctccagaaggatggatggagacttggattctcacttgcatttatcttcagctgctcctatttaatcctctc

SEQ ID NO: 276092 - DNA, 83 bp, Homo sapiens
ttatttggtgcaaccatctccttctcatgtaacacagggctgtgtgggtatccccccttctactccaaccacggccttgccat

SEQ ID NO: 276093 - DNA, 50 bp, Homo sapiens
cgaatatcgtcatcgttagaaggccaaaccagggtatcagccatctggag

SEQ ID NO: 276094 - DNA, 87 bp, Homo sapiens
catgcaagagtcttcaatcatattacaaatgttttgtttcctaagtcgggagtgcttttttaggaccaaaggatatatttccttact

SEQ ID NO: 276095 - DNA, 75 bp, Homo sapiens
aggctctgtggttcaggactcccgacttgacacgatattttttgctaagcaggcacgtgtggttctcaaatatag

SEQ ID NO: 276096 - DNA, 50 bp, Homo sapiens
caccagcacactgctctgccaggccactccccacctgtcctgcctttgtg

SEQ ID NO: 276097 - DNA, 83 bp, Homo sapiens
ctgtgctgttattgcacctgttcaggaaggtgggagtcaatcattttgacaagtctcctgaaaggaacagctagcaggaactg

SEQ ID NO: 276098 - DNA, 82 bp, Homo sapiens
ctgaatcaaggtccagagaaggtggaggaatcctgatactgagcggacctgaaggagaagaaggagaaggtggaggagaagg

SEQ ID NO: 276099 - DNA, 75 bp, Homo sapiens
gcaaagaactccactgtcagcagctgcacacacagttcaaaccttgtactactcagctgatcacaagctgcttga

SEQ ID NO: 276100 - DNA, 82 bp, Homo sapiens
cagagatcagcaatccttggctcactgaggaggtttggatttcagatgcatgccaggtttccactgattgccagaactcgag

SEQ ID NO: 276101 - DNA, 75 bp, Homo sapiens
gaatccacctgtataatgaatccagaagttgtgaatgctttgtgtggaaagcttcagtgtgagaatgtacaagag

SEQ ID NO: 276102 - DNA, 100 bp, Homo sapiens
ggcttccacggcagcatcttcagctcttgggtttagcaaaagttcatctccttctgcatccttaactgagaatgagtcacaccgaggagaagactcagtg

SEQ ID NO: 276103 - DNA, 82 bp, Homo sapiens
aggcggccatggtccaaccttgaagcactattcctgatcagagaactccagttgcttcaacacacagtatcagtagtgcagc

SEQ ID NO: 276104 - DNA, 126 bp, Homo sapiens
acagcttactccttgtattgattctactcttctctacaaatatagactccgttccctaccacagccttgcctcggcaagacgcgcaggaagaccagcgcgcgggatgcgtcccccacgcccagcac

SEQ ID NO: 276105 - DNA, 96 bp, Homo sapiens
tgtgcagattttcatccaagtggcacagtggtggccataggaacgcactcaggcagatcaaatgaatgcttcaggaccaattaaagagaagatggg

SEQ ID NO: 276106 - DNA, 100 bp, Homo sapiens
cagcagccgtcctatcaatgtgattaagtcttgggcgtctttggtactggcttttttaggggtctgcctggggattacccttgctgtggatagaagcaac

SEQ ID NO: 276107 - DNA, 74 bp, Homo sapiens
agatttgctatctggcaaaaaggcactgaaagtaaggcaagcagatatcaccagagagactgttcagaaaagtg

SEQ ID NO: 276108 - DNA, 83 bp, Homo sapiens
agactacgagggagtttgacagctattaaaaccagggctccacagttaggaggcggtgacagtgatcctccattaaagcgtag

SEQ ID NO: 276109 - DNA, 98 bp, Homo sapiens
aatctgctgtcgcctgcagctgctcgcctgtctccgtcggaagggagcccaagctttgcagagatggtggagccagggcaagatttactgcttgctgc

SEQ ID NO: 276110 - DNA, 83 bp, Homo sapiens
ccctatctcagcagtgatggggagagccatagcggatattatggggatggattaaatgccattgttgtgtttgctgtctgttt

SEQ ID NO: 276111 - DNA, 130 bp, Homo sapiens
ggggtcggaccatccgctctccctgcgctctccgcaccgcggcttaaatgatgtattttgtgatcgcagcgatgaaagatgccatggacaatattaccaggcagaaccaattctacgatacccaagtcat

SEQ ID NO: 276112 - DNA, 90 bp, Homo sapiens
gttcgcgtctctctgctgcggcgcggggaccgctgtgctctcgtttgggatatgagattgaaaatgacgactcggaattttcctgagaga

SEQ ID NO: 276113 - DNA, 90 bp, Homo sapiens
tgcaaggccacgacccacgagatcatggggcccaagaaaaagcacctggacttttccaggaatatggatctactggaacagcccatgctg

SEQ ID NO: 276114 - DNA, 100 bp, Homo sapiens
tccaaatgaaccgcagttggaattcatccttgactgttcgccatggatttccctatcaaccctcagccctggcctttgatcctgtacagaagatcctggc

SEQ ID NO: 276115 - DNA, 50 bp, Homo sapiens
tacgtaaccagaccaagctgtggggtgccttagctggaccaattattgtg

SEQ ID NO: 276116 - DNA, 50 bp, Homo sapiens
aggattccaagtaactcttatttgcatcattgacaaagaagtttcattaa

SEQ ID NO: 276117 - DNA, 75 bp, Homo sapiens
caagaaggcaacgacgttccatctgtggaaggacctaccaaccaggtacatgtcccagagcaagcacacggaggc

SEQ ID NO: 276118 - DNA, 89 bp, Homo sapiens
tattgttactgagtttggtgattcagcttgctttactctttcattgttgggacatgtatattgtgaacagcagagaatttcaaaggacc

SEQ ID NO: 276119 - DNA, 83 bp, Homo sapiens
cttcgcgtcccctgcaccatgagctggggcaccgagctctggaattctctggtggttgagatcccgccatttcggaatcagag

SEQ ID NO: 276120 - DNA, 74 bp, Homo sapiens
aaacccctgcgtccgccacggcccaggtgtccctggccagtgtccttccacctgtccacaagcatggggaacat

SEQ ID NO: 276121 - DNA, 114 bp, Homo sapiens
gaggagccgagcatctgggccgagaccattccgtatggagagccgggatttttagactctgaggagcagttggagctaatccacattatggaaatggaaaccaccgaacctgag

SEQ ID NO: 276122 - DNA, 75 bp, Homo sapiens
gatccattggtaaattgatcaggatttttggcctaccctccaaagaaaagctccgccgcatgcaagagatgattg

SEQ ID NO: 276123 - DNA, 83 bp, Homo sapiens
tataacggggagtctgtcaggaagtgccatggtaaactgttttaacagatatggctcgtggacagcagaaaattcagtctcag

SEQ ID NO: 276124 - DNA, 80 bp, Homo sapiens
aatgatcgacaagtgggaagaccgatgggaatggttaagactgagttgaaccctcggatacgatagaaaatgtaaaggcc

SEQ ID NO: 276125 - DNA, 100 bp, Homo sapiens
gaccgagagcgtgaccgagagcgcgaatatcgtcatcgttagaaggagtgtgggctgctgctctcctctgagggcgagtgtcagggctgctacccgctgg

SEQ ID NO: 276126 - DNA, 74 bp, Homo sapiens
cagggcctgcccatcaggagtcaccgcagctccaccgtcttcttggacacttaatgattgttggcaagaaatgt

SEQ ID NO: 276127 - DNA, 100 bp, Homo sapiens
cagcaggtcttctccactgagtttgaggtgaaggagtacgttcatggcctcccacgggaacgacgccgcgagagccaggtttgagtccaaagtaccctcc

SEQ ID NO: 276128 - DNA, 100 bp, Homo sapiens
cggcagcgggacccggcgaagacgcgaccgcggcgcgagtcaccatggtattaatctctggagaagacacatccacagttagcactttcttcagatgctg

SEQ ID NO: 276129 - DNA, 98 bp, Homo sapiens
tgcgagcagttttaccgcgacctccggaggccggcgtgacaggctctgtcactaaaatagttacagaatgtctgaaggggacagtgtgggagaatccg

SEQ ID NO: 276130 - DNA, 50 bp, Homo sapiens
aagatagtgcctttcagccctaccagaacaagttgaaatcatcgcagaag

SEQ ID NO: 276131 - DNA, 100 bp, Homo sapiens
ctggaagaaaatggtttggctgtgataggagtatttttaaaggttggtcaaagaaaaagtgatgtatgaaaaagaggcaaaacaacaagaagaaaagatt

SEQ ID NO: 276132 - DNA, 90 bp, Homo sapiens
tggtcctggagatgatgatgaaattcagtttgatgacattggagatgatgatgaagatattgatgacattaccagcaatgctaccagtga

SEQ ID NO: 276133 - DNA, 74 bp, Homo sapiens
gcagatcttccggccggacaacttcgttttcggtatgggttcatagaagggcacgtggtgattccccggatcca

SEQ ID NO: 276134 - DNA, 98 bp, Homo sapiens
ttggggattttgccagtacagtggtgccttaaaaatggagtcagcctcactcctcccaaagatgccacttcaaatgaacaacaagagcttttctgtca

SEQ ID NO: 276135 - DNA, 100 bp, Homo sapiens
tgaatgctgctaaaaacaagactggggctgctcccatcattgatgtggtgcgatcgatgtagaggactcaagtcagagaccagatcagggaccccagaga

SEQ ID NO: 276136 - DNA, 88 bp, Homo sapiens
gaacgaggcaaggagctaaagcagcgtgcgttcagccctgggcaactggatgatgctcgcaacaaagctgacaatcaagaaaaggcaa

SEQ ID NO: 276137 - DNA, 50 bp, Homo sapiens
ataatcgattgcattggcaatgagacaggagaacaagaacctggttcatg

SEQ ID NO: 276138 - DNA, 96 bp, Homo sapiens
cagaattgtcgaacacctgatgctgttgaggtatcgaaggatgatcgcagtgatgtggagagcagctcagaggaagaagatgtgaccacctgcaca

SEQ ID NO: 276139 - DNA, 83 bp, Homo sapiens
tttgcacccagtcctgcagcgccagcagctggactatggcatctatgttatcaaccagcccatgactgaagagttgctgaaac

SEQ ID NO: 276140 - DNA, 75 bp, Homo sapiens
ctctctggaccttgtctcgctcgggagcggaaacagcggcagccagaggccccttcacagatgtagtcactacaa

SEQ ID NO: 276141 - DNA, 97 bp, Homo sapiens
ccatggagatccagttcaattatgaatctcaggaacaccaccttctgtcaggagtacaagcgcaagctagccagagtttccctggtgcgcaaagaac

SEQ ID NO: 276142 - DNA, 100 bp, Homo sapiens
caaggctgtgctcaagcatttcaacgtgcgtgtcacccacgcagacatcttcagccgctgccagttttccttccagcagggtggatggggagcatcgctg

SEQ ID NO: 276143 - DNA, 76 bp, Homo sapiens
tgaatgaatttagagccaaactgtccaaggctttggcagcacaacagggttctatcaaggaggaaatggactgggc

SEQ ID NO: 276144 - DNA, 51 bp, Homo sapiens
caccaaagggcacattcagatgtttggctgctctttggcgtaaattgcaat

SEQ ID NO: 276145 - DNA, 100 bp, Homo sapiens
acatcctgaaatgcttcatgggatggcccctcagcaaaagcatgggcaggctgaccggttccctgatgtgttacctgcttctgctactgatccaaactgc

SEQ ID NO: 276146 - DNA, 86 bp, Homo sapiens
ggtaaattgatcaggatttttggcctaccctccaaagaaaaggttccagcaacagatagaaatgctttaagttcactctggggaaa

SEQ ID NO: 276147 - DNA, 104 bp, Homo sapiens
gcgaggaggaggaggatgtggcgcgcggaggggaaatggctgccgaaaacaagccggaagagtgatcagcagctggactgtgccttggacctaatgaggcgcct

SEQ ID NO: 276148 - DNA, 101 bp, Homo sapiens
caatgacagttgggactacactaaaccatatttgggaagacgagcagcaaagaagagtcgtgttgtctctgatgcagatgactctgacagtgatgctgtat

SEQ ID NO: 276149 - DNA, 102 bp, Homo sapiens
aagctcccgcggtactacaagaacatcggtctgggcttcaagacacccaaggaggaactcttgatcaagatgccgaaccctgtgttcagaacctccaaatac

SEQ ID NO: 276150 - DNA, 100 bp, Homo sapiens
cctccacaagggtcaggagccctggagccgcctagggggcaatcccctgttccggatggagctgggcgccgtgtacacagaaggtgggttcgtggaaggc

SEQ ID NO: 276151 - DNA, 101 bp, Homo sapiens
gttgccacagccgcagcagctgctcttgcctcagcggctaccaaagccaagcccattgcagatgcaaaggctcctgagaagcgggcctcaccatccaagcc

SEQ ID NO: 276152 - DNA, 98 bp, Homo sapiens
ctctgggacacacctccattggatttaaaagacagtcctcgtcagcactgactttcagctatggaatcggacatggatttgattgacatactttggag

SEQ ID NO: 276153 - DNA, 100 bp, Homo sapiens
ctgcatttctgcattctgcttaattccctttccttagtcatccgtccttggctcaggatttggagagcttgcaccaccaaaaatggcaaacatcaccagc

SEQ ID NO: 276154 - DNA, 50 bp, Homo sapiens
gggaggtcggaggactggagaggtgaatatgagaagggcgtagaccatct

SEQ ID NO: 276155 - DNA, 50 bp, Homo sapiens
cacttgcactagcagcgaacgattcgatccctgcatgtcactgagtccac

SEQ ID NO: 276156 - DNA, 98 bp, Homo sapiens
cagggaagctggggctggtgcaactttcagaagtggtcccaggcacttttaaatcaacttagagctgtgtttgatcaaattattgaacttcagaatgc

SEQ ID NO: 276157 - DNA, 90 bp, Homo sapiens
caagctggggacgcgtcctcagacgcagcgtctagtccctggccatagctccgccgctgcccggtaagaatgattgatgttggctgatat

SEQ ID NO: 276158 - DNA, 100 bp, Homo sapiens
cccacgacctccacgctggactggtgcgaggagaactactccgtgacctggtacatcgccgagttctatggcttttccctgccgcaggtccctgactgcc

SEQ ID NO: 276159 - DNA, 157 bp, Homo sapiens
tggcagtttttggaccagtctcagaaggtcttgtacaaggaagtaatgttggagaactacatcaacctagtatcaatagtccacaggtcctggctaccctgggaagagacaagaagtaaatgaagaaagaggaagattccaggacctagatatgatt

SEQ ID NO: 276160 - DNA, 83 bp, Homo sapiens
caaccgacgatggagggagacgtgctggacacactggaggcgctggggtgaaagaacttgtcctggacaacagtcggtcgaat

SEQ ID NO: 276161 - DNA, 76 bp, Homo sapiens
ttgtggcaggcatctgtgggatctgtaatagaaatgatgacgtagctttgccaaagacttagaagctaagcagaaa

SEQ ID NO: 276162 - DNA, 80 bp, Homo sapiens
gcgaccagacaggcggcgccatcttcgaacttagacttccggaaggactttggcgaggatcatggaagggaagtggttgc

SEQ ID NO: 276163 - DNA, 100 bp, Homo sapiens
cgacctccccgcgttccatgcgcacagggacaggggaaagaccacagcaagattctttcattcgtctcctcctagcctgggggaccaggctcgaactgac

SEQ ID NO: 276164 - DNA, 90 bp, Homo sapiens
agcgaaggcatccctgaaagtcccaagtgtcatgaaggaaatgggacatttgagtgtggcgcgtgcagccttgccaaactgaagcccgag

SEQ ID NO: 276165 - DNA, 101 bp, Homo sapiens
gagacatgttagaaggacaagcctaatgggattgtttgaaaaacgtcgcttcaggaaattcctagtgtatgttgccaacttcgatgaaaaagatccaagaa

SEQ ID NO: 276166 - DNA, 114 bp, Homo sapiens
agctggcgcagcccacgctcatgatcgacttcctcacccgcgcctgcgacctcgggcagctggtggaatttttgaagaaaatggaatctcgaggccccctttcgtgcgacacgg

SEQ ID NO: 276167 - DNA, 90 bp, Homo sapiens
ttcagcttcatactcctgagggctacagactcaaccgaaatggagactataaggagggcgcactgtgtgaggagaacatgcggggtgtgc

SEQ ID NO: 276168 - DNA, 90 bp, Homo sapiens
tcgggccagggccggttctgcaccatcttcaggtcctactccaggggcgctcagctgcccatagtggcttcttccatcgtatccttgtac

SEQ ID NO: 276169 - DNA, 75 bp, Homo sapiens
cgctgccgccgctctgaggagttaaagcaaatgcagccctgaggatttggctactgcatataacaacagggggca

SEQ ID NO: 276170 - DNA, 106 bp, Homo sapiens
cggattaaagctaaagacatagttcctggtgatattgtagaaattgctgtggtggacttgctttgtgaagagacagttcatgaacaagagtctttcaggacctgga

SEQ ID NO: 276171 - DNA, 75 bp, Homo sapiens
gaagaatattcccaagtccttcacccgggtgacttaagagattaaaattaatttggttgctgttggttctgaaca

SEQ ID NO: 276172 - DNA, 83 bp, Homo sapiens
tgcccgaggaggcagccaagctcgtagcctgccactccgtgcagaaagatgctggtttcgagttttggagatccttgtttttt

SEQ ID NO: 276173 - DNA, 80 bp, Homo sapiens
ttgcactaggagtttttgctttagctggactaacagatttgacaatgcagatcttcgtgaagactctgactggtaagacc

SEQ ID NO: 276174 - DNA, 82 bp, Homo sapiens
ataaacctcagccctgaggctccagctcactctaccccatctccttgccggcaatggctgccatccggaagaaactggtgat

SEQ ID NO: 276175 - DNA, 75 bp, Homo sapiens
gaaagctcgttctgccgatgatcaaggaacacattatgcaaatgcttcaaaatcagcctgttagtattaatgaag

SEQ ID NO: 276176 - DNA, 82 bp, Homo sapiens
agcaaacgcagagacaaaagaaacgggccccgactgggccatgaagcccccaggaggagaatcgagcaatctttttggaagt

SEQ ID NO: 276177 - DNA, 100 bp, Homo sapiens
gtaaggagcagcttccaggatcctgagatccggagcagccggggtcggagcggggcaccatgccggtggaaaggatgcgcatgcgcccgtggctggagga

SEQ ID NO: 276178 - DNA, 74 bp, Homo sapiens
ccggcacggcctcgtgcccttcgccttcgtgcgcttcgaggacccccgattatttatgtaaacccgaagacaac

SEQ ID NO: 276179 - DNA, 100 bp, Homo sapiens
atgtctgggaggataattgggatgatgacaatgtagaggatgacttctctaatcagttacggcccagtttaccctcaatttaccctcttctacatcttcc

SEQ ID NO: 276180 - DNA, 100 bp, Homo sapiens
gctctgctcctgggtttgctgtgtggcccttgggagctgtgatacacaagttgggcatcaccttggtgtctctccttttgtttttgacgctaacgaagac

SEQ ID NO: 276181 - DNA, 82 bp, Homo sapiens
tgtgtgatatggagatggtcaacaaagtggcatgttatttgaaagcaattgagacgcaaccgaactttgcagtagcttggag

SEQ ID NO: 276182 - DNA, 100 bp, Homo sapiens
aaggaaaactttcggaaagctacttgtagagaaatttgcctgtaatggtactgtgattgaacatcctgaatacggagaggttattcagcttcaaggtgac

SEQ ID NO: 276183 - DNA, 75 bp, Homo sapiens
gctgtgatgatctgactcgaaggatgcgcagagatggcccatcaaagctcctgagtcagtttccactataatcac

SEQ ID NO: 276184 - DNA, 78 bp, Homo sapiens
tgggcgacacgctgggcgtcggcaccttcggcaaagtgaagagaagcgcctcttggacgcgtgtgaccgatgcccaga

SEQ ID NO: 276185 - DNA, 75 bp, Homo sapiens
gcggaagaccaaagaggatgagaaggacgacaagcccatccgagtgccggtggtggtgtgcacattgagccccgg

SEQ ID NO: 276186 - DNA, 90 bp, Homo sapiens
catgcatgcaccaaaacgaggacaggaagagctgaagagagacctgaaaattaagaaagaaaaagacctgatgcagttggctcaggccac

SEQ ID NO: 276187 - DNA, 83 bp, Homo sapiens
ccgagacacgcggtgaggcggcgacgggctccgggtgtgcctacaggggttgtggaaggagacgctgcccccggtctatgccc

SEQ ID NO: 276188 - DNA, 100 bp, Homo sapiens
tgggcctcaacaagggccacaaagtgaccaagaacgtgagcaagcccaggcacagccgacgccgcggggtatgaagctaaaatgcagcggctaagaacgc

SEQ ID NO: 276189 - DNA, 100 bp, Homo sapiens
caggaactgatgatgttgtaggccctgaaggcatggagaaattttgtgaagacattggtgttgaaccagaaaacattgaaagaaaacttgttctgctcag

SEQ ID NO: 276190 - DNA, 90 bp, Homo sapiens
gccccagacacggaccccgcagggctctacaggaggaactagccatttactggagctccatggaggagcttgaccagacggcccaaaccc

SEQ ID NO: 276191 - DNA, 97 bp, Homo sapiens
aagaagtggggaaaacaaggctcagacaggaggacaaaagcatgtcttcccttcctgggtgcattggtttggatgcagcaacagctacagtggagtc

SEQ ID NO: 276192 - DNA, 73 bp, Homo sapiens
tgaagtatttgtgctataccatgaaagtatttacaaaggtgtctccagtgaaaatctgtgactttgacttggg

SEQ ID NO: 276193 - DNA, 75 bp, Homo sapiens
ctgtgatgtcgagaacactggttggcaaacatgaattgactgggcataaagtagctgtgaagatactcaatcgac

SEQ ID NO: 276194 - DNA, 100 bp, Homo sapiens
gtcggcgcctgttctcgggctgtttggcggggcaccaccaaaatcaacactttcaactggtccaaggtccgtaaactaagcttcaagaggaaaagatttc

SEQ ID NO: 276195 - DNA, 83 bp, Homo sapiens
gtgaagcgtgaggccggcatcgtctttccgtcctctgaggcgacggccgcggctgcacagggctgaaatctctttaatgatgg

SEQ ID NO: 276196 - DNA, 95 bp, Homo sapiens
ctaattataggtggacgagatcagcaacagaatgaaataattgtgaaaagatacttgacaccagcttatagtagctgttgaacaagaagaaattc

SEQ ID NO: 276197 - DNA, 100 bp, Homo sapiens
ggtgcttctatggcaggatatgttgctgagacaaaggaaaacccactcccttggaggagcatgaccttttcctgtaattcttcccactgctgttgttgag

SEQ ID NO: 276198 - DNA, 98 bp, Homo sapiens
tgggagccatcacgcccagctagccatcttctaattttcattccttcaaaggttgggacaaacattcctatggttaccatggtgatgatgggcattcg

SEQ ID NO: 276199 - DNA, 50 bp, Homo sapiens
gcgtgagtgatcactctcaatcccggcaggatcctaaggcctttgtagtc

SEQ ID NO: 276200 - DNA, 98 bp, Homo sapiens
gccagtggagcccccgcgcgcccggccggcccggagcaccgagctcgcggcacggtaggaggtctcctctgagcctccggcctccataagacccaaaa

SEQ ID NO: 276201 - DNA, 82 bp, Homo sapiens
ggagaactttgcacatgtaacatccctggttactccacaggatccgctgaacataggatgttgccacaaaatctacctcgtg

SEQ ID NO: 276202 - DNA, 75 bp, Homo sapiens
caggaagcaattctggaagcgcagcaacagcaagctcccgggcagatgctgagatgaatcgtcacctgtgtgttt

SEQ ID NO: 276203 - DNA, 100 bp, Homo sapiens
gctgccggccgggaaccgtggggcgcggaaggcctcccggcgctcttcctcccggagtatggctatcaagtactagctccaactgcctattatgatcaga

SEQ ID NO: 276204 - DNA, 100 bp, Homo sapiens
ctttgctcttccatccgcctttgatcgtcttcctcttcagccatccagggcaagtgtccagagaatggctgggatgaaagtacacttgaactctttttac

SEQ ID NO: 276205 - DNA, 102 bp, Homo sapiens
ccggcctggagcgcgccgccaaggcggcgcgcgagctggagcactcgctacctggagtagaacagaaaaattattatgtctgtgttcccttgggactcattg

SEQ ID NO: 276206 - DNA, 90 bp, Homo sapiens
gccagtgtttccacaatggaaccaattgttttacagtctgttccacatgatcattgtaataagagccagaatcaactcctgtgcccttgc

SEQ ID NO: 276207 - DNA, 80 bp, Homo sapiens
gggttggacgctgccagtttgcacagcagcaggcatctgcatctgggaccgacctcctgggctggctgatcaaagaggaa

SEQ ID NO: 276208 - DNA, 100 bp, Homo sapiens
ggagggagtgcctggccaggccggcctgtctgccgcgatggatgacagtaaggtggtttcagacaccctcacaggttttctaccatgcagcaactgaaca

SEQ ID NO: 276209 - DNA, 51 bp, Homo sapiens
gcctcccaaagagctgggattacagcctatccctcggccagatcctgtgca

SEQ ID NO: 276210 - DNA, 97 bp, Homo sapiens
gctggacaatcacttggggatcaacgacaaggaccttgctcaaagaacaagctgctgattctattttggtactagaagcagccctaaaattaaacaa

SEQ ID NO: 276211 - DNA, 75 bp, Homo sapiens
aacagttctcactgaactacagaaaaagcttgtggtgaaggggggcaaaaaaaagaagcaagttctgaagttcac

SEQ ID NO: 276212 - DNA, 73 bp, Homo sapiens
attattttaacatttgggagaaacacagccagaaggctggctacagcaaacatcattcaagatgtccagcaaa

SEQ ID NO: 276213 - DNA, 100 bp, Homo sapiens
ccctcaacgagcggggcgtggagggcgacttcctcattagggacagcgagtcctcgctgtgattgggttattatacccctgcattgacagacatctagga

SEQ ID NO: 276214 - DNA, 100 bp, Homo sapiens
tccacgctctgtctcctcaacctctacctggcggagactttgaatcctcctcttccaccaccccctctcctggctgccactgtccttgcctccacaccac

SEQ ID NO: 276215 - DNA, 103 bp, Homo sapiens
aagatggagccctgcatatgattggctctttagctgaaatacttctgaaggtgtccattgatggaagtgaaagtgtagcaggtactggaatgattggagaaaa

SEQ ID NO: 276216 - DNA, 82 bp, Homo sapiens
ggcctgcagcgggagctggacggcgagcgcgagcggcgcgagaaagtcatgttctctttcgaggccggccgccgctgcccct

SEQ ID NO: 276217 - DNA, 83 bp, Homo sapiens
agagaaaaggagaaggataaagggaaggacaaggaattacataacatcaaacgtggagtgttgcggagataggaacatgggag

SEQ ID NO: 276218 - DNA, 100 bp, Homo sapiens
acttggaacacgtggtatggcgagcaggaccaagctgtttggtgaggattcatcaacctccagtatgatgtctgtgaactttgatgttcaatcaaatcag

SEQ ID NO: 276219 - DNA, 82 bp, Homo sapiens
cagaagtcgcgtgtctaggtgagtcgcggtgggtcctcgcttgcagttcagcgaccacgctgcggttggatttctcacgatg

SEQ ID NO: 276220 - DNA, 50 bp, Homo sapiens
tataaagaagctcgagcattctttcagataaccatgatgactacacagac

SEQ ID NO: 276221 - DNA, 100 bp, Homo sapiens
tgccagcggtactaccaccgaggccacgtggacccggccaacgacacatttgacattgatccgatggtggttactggactcagaattcatgattgaagaa

SEQ ID NO: 276222 - DNA, 98 bp, Homo sapiens
cagggtgcaggagaacaaggtagaccagtgaggcagaatatgtatcggggatatagaccacgattccgcagaccccaacgtccccaacgtcgtggtga

SEQ ID NO: 276223 - DNA, 51 bp, Homo sapiens
cttctggccgcgggaaggagaggtctcctaaagcgtgcttttcaaaagtcg

SEQ ID NO: 276224 - DNA, 92 bp, Homo sapiens
gggagtggagcttggtttcgggatctcggtgctgcagacggcgagacctcctgcacaggttcgagaacttgtcttggacaattgcaaatcaa

SEQ ID NO: 276225 - DNA, 75 bp, Homo sapiens
cctgcacaggatcatcgaggtcgtcgacgccatcatgaccacggcccagagattcaagctagagccatctgtgag

SEQ ID NO: 276226 - DNA, 96 bp, Homo sapiens
aggatggtccagaattcacttttactaccccaaagtttgaatatcctccgaatcctaaatctagagctccaaggatgctggtcattaagaaaggta

SEQ ID NO: 276227 - DNA, 50 bp, Homo sapiens
ctcggaaaccggtagcgcttgcagcatgttttcggctttgtgagaaacct

SEQ ID NO: 276228 - DNA, 75 bp, Homo sapiens
agcccctatacaaggacagttggctcctaagggagggactaaatgtaatgggaaacccaggaactttcaaaagag

SEQ ID NO: 276229 - DNA, 100 bp, Homo sapiens
gagagcagcagtggagaaagtgctccagatagctacatcgggataggaaattcagaaaaggcagcaatgagcaggtggtgaaggcatttgtggtcctggc

SEQ ID NO: 276230 - DNA, 100 bp, Homo sapiens
tggacctccaaggaagccacgtgcagacatctacaaccttcgatctcctgacgagtatttgagtacagcatcccagacaaacagtatacagattggagcc

SEQ ID NO: 276231 - DNA, 100 bp, Homo sapiens
cttcccctggatacggtcactttctacaagtcccatatagaaatcatccgtggccatgcagccttcacgagtgatcccaagcccacaatagaggtcagtg

SEQ ID NO: 276232 - DNA, 78 bp, Homo sapiens
aagctgggcatccagggctcgtacttctgctcgcaggatatgacagcgcgtgatctgctacagcagagatacaccctt

SEQ ID NO: 276233 - DNA, 107 bp, Homo sapiens
cgcgcagggcctgcagcgggagctggacggcgagcgcgagcggcgcgagaaagtggctattatcatggaaaactaatttttcccagagaatttcctttcaaacctcc

SEQ ID NO: 276234 - DNA, 99 bp, Homo sapiens
accagaaggggaggagacgttggaatcagagaccagaaatgagtggaatgctatcttaagccaaaaaaaactattataatttttatttagtactactta

SEQ ID NO: 276235 - DNA, 75 bp, Homo sapiens
gccggcccttgttaactacaacagaccatctgaagagtcaagtaccattggccaggatcaaacgcttatggaacg

SEQ ID NO: 276236 - DNA, 74 bp, Homo sapiens
tcttgccaagtggaagtactgtttatgtcaaaattgaaatggatgcagtcagaactgaatgttgaagaagtggt

SEQ ID NO: 276237 - DNA, 82 bp, Homo sapiens
caaagagtaagaaacactaaaacttcctggagaaattagagacgctcttctggctcttccgtgacgcattacaacagccatc

SEQ ID NO: 276238 - DNA, 100 bp, Homo sapiens
gccagcacaatttcagctcactctaatccggcagaagctcctcctggggtagagacagatcttattgatgttggattcacagatgatgtgaagaaaggag

SEQ ID NO: 276239 - DNA, 100 bp, Homo sapiens
ctccctaggcgtcccatctcggttattcacagtcctatggtggttatgagaatcaaaagcagagctcatatagccagcaaccatataataaccagggaca

SEQ ID NO: 276240 - DNA, 119 bp, Homo sapiens
gtccccgcgcagtccccgcgcagtcccagcgccaccgggcagcagcggcgccgtgctcgctccaggcaaccacacctccaaatcaaggaaggccagattctcctgtctatgctaacctt

SEQ ID NO: 276241 - DNA, 50 bp, Homo sapiens
tgatgtcaaggataagtctcatgacacctgcagaatacagaaactgcagc

SEQ ID NO: 276242 - DNA, 98 bp, Homo sapiens
ctagcgctatgcctgcggcggagactgcatcaggctctcggtacaccaggggttggaaaaaccacactaggcaaagaacttgcgtcaaaatcaggact

SEQ ID NO: 276243 - DNA, 83 bp, Homo sapiens
ctgggtgcccgtggaccacaggccctcgttgcccagatgaagcggggagaggtggtgagagatgacccctgttgaggatttca

SEQ ID NO: 276244 - DNA, 100 bp, Homo sapiens
cccgctacaaccaagagacaccaatggagatctgcctcaatggaacccctgctctggcctacctggcggcacgtgtggttctcaaatataggcattctga

SEQ ID NO: 276245 - DNA, 100 bp, Homo sapiens
agcttcggagaatggagtcttccatcaatcatatctcacagggccaatgcaggaaaccatctatgacttctggaggatggtgtggcacgaaaacactgca

SEQ ID NO: 276246 - DNA, 105 bp, Homo sapiens
cttgggcctcgcgccggctatggccgtgccctggggctgagccctcaggccctgggctgcatcttgtacctgctgtgcttccggcagcacccttttgaggatgga

SEQ ID NO: 276247 - DNA, 83 bp, Homo sapiens
gagacctgcgtacattcggggtgccagaaggaaagcatagtgtcagagatggctttggattccccgttctgtgtgctgctgtc

SEQ ID NO: 276248 - DNA, 75 bp, Homo sapiens
ctatccagacggctgcccttcaagtaccagtcttggtgaagagtaacaacctgacggaccgcatcgtggtcatcc

SEQ ID NO: 276249 - DNA, 98 bp, Homo sapiens
caaactttccgagaatatggagatacaggtgaaatctggcatgaagtcatcaatatcaacctgaaaaataagcctgagtggttctttaagaaaaatcc

SEQ ID NO: 276250 - DNA, 99 bp, Homo sapiens
gtcactcatccacatcttgcagctcgggcaaatctggagccctaccacttatgtcttggatgaagatgaacctcgattccttgaagaagttgattacag

SEQ ID NO: 276251 - DNA, 87 bp, Homo sapiens
actacttaataatgacaatctcctcagggaaggggcagcacagtgattttacaacgagatgctgctctccatagggatgctcatgct

SEQ ID NO: 276252 - DNA, 110 bp, Homo sapiens
cagttggccaatactggtgcccaagcctggattaaaaagcactgccagtgaaagatgtagaagataaacctgaacaacaaaccagaacaagagagactgacaaatcaccc

SEQ ID NO: 276253 - DNA, 83 bp, Homo sapiens
cttcaccaccacagagcccatcaagcccgagcagcttcaaggttactgactttttatgatgtttggtggctatgagactatag

SEQ ID NO: 276254 - DNA, 100 bp, Homo sapiens
agcagaaagcatttaaccagcatggctacttcatattttggaaagcagtttttaagacaagtagtaacactctggtacagatctccagaagtattgctgg

SEQ ID NO: 276255 - DNA, 74 bp, Homo sapiens
gtcagaagcctcatagacagaacgattgatgaagtagttgagtgtgccacggaccacaatgtggacaacaccac

SEQ ID NO: 276256 - DNA, 100 bp, Homo sapiens
cccctttttgctcctgcccttggctgggcctgaggatttctccgaggaagagatggaactgggtaattccagaattgattggccataccattgtcactgt

SEQ ID NO: 276257 - DNA, 100 bp, Homo sapiens
gaaagtacaggtcctgacagctggcctccccatggccacccatggaccagtcggcattcacttcctcccttctgcggcccataaaagccctgggttcagg

SEQ ID NO: 276258 - DNA, 100 bp, Homo sapiens
agctgctgcagctgctgcacagaaattaatgcgaacagacagacttgagcctaccgtatgtgaacgggagctgtgtgtgtttgcttttcaaaccctggga

SEQ ID NO: 276259 - DNA, 146 bp, Homo sapiens
agccggggaggtggtgtgccgtgcacgtgcagatcgcctggcagatctaccgtcaccagcagaagataaagcttcatcactggtccagctgtaataccagggtacttctccgttgatgtgaataatgtggtactcattttaaatgg

SEQ ID NO: 276260 - DNA, 100 bp, Homo sapiens
ttctcatctgactcgtgatctgcccatcttgttactccctagcagtgtggtaaggcgccaagcccatctttgtgtgcttgcatccaactgtgatgagcct

SEQ ID NO: 276261 - DNA, 87 bp, Homo sapiens
tggaatgaatccttctagagacgtccacggaagtgtttggattgtgagctatttcagaactgttctcaggactcattattttaacat

SEQ ID NO: 276262 - DNA, 98 bp, Homo sapiens
tcgtgctctcgccccaacccgcgcgccagatgttccatttaagcagacctcttccatagctgtagctggagcggtaattggagctgttcttgcccttt

SEQ ID NO: 276263 - DNA, 100 bp, Homo sapiens
ccacatttcttccaagttctcttgccctgagacggtgaccaagaatatggcccaggtgaccaaagccctggacaaggccctgagcaccatggacctgcag

SEQ ID NO: 276264 - DNA, 98 bp, Homo sapiens
ttaaagatgagcgggtggcagcgacagagccaaaatcagagctggaacctgaggagagaggatgaaacaggcgcctatttaatcgacagagaccccac

SEQ ID NO: 276265 - DNA, 75 bp, Homo sapiens
acaaggccaaagagactgcagatgccatcactaaagaagagatccaggtgatgatgggcagcctggtgtacctgc

SEQ ID NO: 276266 - DNA, 90 bp, Homo sapiens
tggacatattcggttagcagattttggttcttgtctgaagctgatggaagatggaacgactttttaaaactgtggacttaaatgttctgc

SEQ ID NO: 276267 - DNA, 90 bp, Homo sapiens
tacgaatatgtattgctggattttactctacaagaagaagctcattcacacagaagacccatttaatgatgaacatcaggagaggcaaga

SEQ ID NO: 276268 - DNA, 50 bp, Homo sapiens
ggccaatggcacggaggcctgcgtgttatgaagacagtatggagtttcca

SEQ ID NO: 276269 - DNA, 75 bp, Homo sapiens
agcgtgagtgatcactctcaatcccggggacaggagagagtggcaagagtacgtttatcaagcagatgagaatca

SEQ ID NO: 276270 - DNA, 74 bp, Homo sapiens
taccctcagcgagagaagtaaccgattaagttgtcatcattctgggaagaaaaaaaaaacattaatgaagaggc

SEQ ID NO: 276271 - DNA, 82 bp, Homo sapiens
aaaacagacaagaatatgaagacatagctgtgaagctgggaactgatctagaatagttcacctccatttctcaatgtgaaag

SEQ ID NO: 276272 - DNA, 100 bp, Homo sapiens
cctctacagagatgtgatgctggagacctttcagaacctggcctcagtaggcatcttgacagcagtagcaatgagcgtccagacatcagttccatccaga

SEQ ID NO: 276273 - DNA, 100 bp, Homo sapiens
cgtcgccggcctggaggggcgaagaggacgagggggccaaggcttcctccggggaaaagaatacttgagatccatttgtaaggaaagaaaaggaagcaac

SEQ ID NO: 276274 - DNA, 50 bp, Homo sapiens
gggctggtgtactccagcaacttccagtccacaggtcctggctaccctgg

SEQ ID NO: 276275 - DNA, 83 bp, Homo sapiens
tggactccttcggcagtccacccaccgccgccgcctcccagatcctgtgcttgatgctggaatacaacatcatcgacaacaac

SEQ ID NO: 276276 - DNA, 75 bp, Homo sapiens
ctgaagccgtagatgacattacaagcattgatgacttccttgctgtatctggcaacgccctgctgcggcggctgg

SEQ ID NO: 276277 - DNA, 75 bp, Homo sapiens
ttcggagaatggagtcttccatcaatcatatctcacaggcccgatgagagaaagggaaagttaaggatgctggag

SEQ ID NO: 276278 - DNA, 137 bp, Homo sapiens
gaggccattgagctgtgcacgaccacaccgctgatgaagacaaggactcacagtggctgcaagaacccctgaacagtgcccaagtgttgtctctttgttgtcagagagttacaaccctcatgtgcgctacggagctg

SEQ ID NO: 276279 - DNA, 82 bp, Homo sapiens
ggctgaggctacctgtgaacagtacgcagtgaatgttagcttcctgcggctgagggagggatgaaacaagtacccatgtgac

SEQ ID NO: 276280 - DNA, 100 bp, Homo sapiens
cgccgcgcctgcgcagaaggccggggccggccagaagcgggcggcgcgggggagatggttgcccgaagctcagcagagagtcggaggctgctttttaaac

SEQ ID NO: 276281 - DNA, 75 bp, Homo sapiens
tctgaactcaggacttggcaatgcacactggtttttggctgttgtttgtttccccggtttggaaaaaccaaagta

SEQ ID NO: 276282 - DNA, 148 bp, Homo sapiens
aagagtgctgctgctaacgcggtccccggcacgcaccatctgttgccatcccggccggccgaggccattgcagagtgttgcggagataggaacatgggagagaaacaatctgggtaacatgaaagtgatgctggttgctaagggaagg

SEQ ID NO: 276283 - DNA, 100 bp, Homo sapiens
agccatcttccagctcatctgtgtgctggccatcatcgtacccattcccaagtcccacgaggcgcccaataggggcacaaaacgtccccgggatgatgaa

SEQ ID NO: 276284 - DNA, 82 bp, Homo sapiens
ggcagtccacccaccgccgccgcctcccaggccatgtagggcaggaccgggtggactttggccagactgagccgcacacggt

SEQ ID NO: 276285 - DNA, 100 bp, Homo sapiens
actgccacactgtgctgcctgctgtgtttgggaccctctaccaagtctccaaggagcactggaaccaaaacaccatctgattcagatcacaagaagaaga

SEQ ID NO: 276286 - DNA, 75 bp, Homo sapiens
caagttttacaggaaaactccagtgattttcaatcaaacattgcatagctcaccatggatgatgatatcgccgcg

SEQ ID NO: 276287 - DNA, 117 bp, Homo sapiens
tgcagcttccagacatcgccctggatgtcttcgcgctctggctggtctcccctctgctgggtccggcctctttggcctacccccgttggctccgctgccccaggtcgatgagtcccc

SEQ ID NO: 276288 - DNA, 100 bp, Homo sapiens
gagggtgaagtggcaggaggaggaggaggggctccggctggtctgtggtgagatgatcacggaagccttggcccaaggtgggatgcacataagagcccgg

SEQ ID NO: 276289 - DNA, 50 bp, Homo sapiens
gaaaaatggagccaaatggcatggagccctccaagccacaaaactgtggt

SEQ ID NO: 276290 - DNA, 106 bp, Homo sapiens
gtttgggactgccccggcaactccagggtgtctggtccacgacctatcctaggcgccatgaattaaagctatagagagtcccaacaaagaagatgatacccagtgg

SEQ ID NO: 276291 - DNA, 83 bp, Homo sapiens
ccacgatggcctagcacgtggaattcgcgaagctgccaaagccttagacaatgaagtacctggctttcctccgcaagcggatg

SEQ ID NO: 276292 - DNA, 100 bp, Homo sapiens
gaaaaaatggttgacctcacccagtgactgagatgctggtaaatgtcctcaacatctgctcagatgatgaactagggtcagaagaagatggatttgatgg

SEQ ID NO: 276293 - DNA, 90 bp, Homo sapiens
cgaagatgtgctctttcacatcctgaaatggctttctgtagaggacatcctggccgtccgagctaccatgctcgacagctgaccaaggcc

SEQ ID NO: 276294 - DNA, 83 bp, Homo sapiens
ccttatctttctgactctaagtggcattcaagacaatgcagatcttcgtgaagactctgactggtaagaccatcaccctcgag

SEQ ID NO: 276295 - DNA, 95 bp, Homo sapiens
ttcaacagccttctcaattttctttctcagaaagcagaggctcagagcttggagacagacggactttgcctcccgggccaaactggcagttcaaa

SEQ ID NO: 276296 - DNA, 96 bp, Homo sapiens
ccacgagcttcttctcttggagaaatagatgaatcttctgaattaagagttttggatataccaggacagcatccaggatattgcagtcctcttcaa

SEQ ID NO: 276297 - DNA, 100 bp, Homo sapiens
tagaaggaaaagtcagcgaagataaaagcagagaatttcaatctcttctaaaaggatctagtgaaaagccatttgatgtatgcggtcagagaagaagtgg

SEQ ID NO: 276298 - DNA, 50 bp, Homo sapiens
cagcatccttgatgataaaccagtaaataaagttcgtcgctgcttcctgt

SEQ ID NO: 276299 - DNA, 90 bp, Homo sapiens
aaagaaggaaaaaggaacgaacttcaaccagtgaaactggaacgccaagctgaagaagaacgaatacggaagcacaaagcagctgctgag

SEQ ID NO: 276300 - DNA, 100 bp, Homo sapiens
gatttacgtggagatcaagcgcagcgatgaactgtaagagtaaatgggtccagtaattggaatgactccagataagagagctgaaaccccaggagctgaa

SEQ ID NO: 276301 - DNA, 75 bp, Homo sapiens
tgactgctttggacgtgggagtcacctgaaagccaggaaatggtgaaaggcaggattgggaaccccacagaccgc

SEQ ID NO: 276302 - DNA, 100 bp, Homo sapiens
ggtcccgccgggtctgaagcctgaacaggtttatcaggtagaagatgtgtgtgaagaagaaatgccagaagagtcagatgaatgtgtccggatggataga

SEQ ID NO: 276303 - DNA, 82 bp, Homo sapiens
cctttggacgcaaagatctttcgaggccaggtagaacgtcatgacatgaataccttaagcctgcccctgaacatacgccgag

SEQ ID NO: 276304 - DNA, 97 bp, Homo sapiens
tcgaacttagacttccggaaggactttggcgaggggtacagtccttgacagaattgactataacgttgaacagtcctgtatcaaaactgaagatggt

SEQ ID NO: 276305 - DNA, 80 bp, Homo sapiens
caggaatctcactctgttaaagctggtctgttctaactgagccctaggcggcgtcgccgcagccgatcccggagtcggag

SEQ ID NO: 276306 - DNA, 98 bp, Homo sapiens
atttccatcaaaaagtgattaagcagagaatggagaagaaggttgattccaggtgtaacttggacccatttctcttgcgtgaatattgaacatcgagg

SEQ ID NO: 276307 - DNA, 73 bp, Homo sapiens
ctgttgcacagcctgtgacagaggatgagtttgctttggaatctgagacaggggcaagtgtccgagtggtgaa

SEQ ID NO: 276308 - DNA, 100 bp, Homo sapiens
ccggatctggtaacatggcaaaagatgtgtcatttgcctatgctgtatattggattagaatatggtttgaccaataactcaaaactagctgaaaggttct

SEQ ID NO: 276309 - DNA, 100 bp, Homo sapiens
aagatgcagtacgaggactggatggaaaaacatccagtcatggataaaaatgagctggttcagaaggccaaactggccgagcaggctgagcgatatgatg

SEQ ID NO: 276310 - DNA, 83 bp, Homo sapiens
cggcctcctggcgcgacacctgaaggcgacccacgggggccgcatcgactacatcgcagaacccagcttagactagaaagtct

SEQ ID NO: 276311 - DNA, 75 bp, Homo sapiens
atcgtcttatagttgagaatttatcctcaagagtcagctggcaggtgatggtgtttcttagagagaagatcactg

SEQ ID NO: 276312 - DNA, 75 bp, Homo sapiens
ttcattgtgggagagatgaagaacctgagtcaggacgtaaatggaaccctgcacccatatatctcccatcagcat

SEQ ID NO: 276313 - DNA, 80 bp, Homo sapiens
actcagatcaaaacctgttactgaaggaactggtgatattattaagccgggggccatcaagtataagaccacaggaccac

SEQ ID NO: 276314 - DNA, 80 bp, Homo sapiens
gccacttgtccgcttcacactccgccgccatcatggtgaagctcgcgaagtgagatggaagattttcgaggtatagcaga

SEQ ID NO: 276315 - DNA, 75 bp, Homo sapiens
gagacctctacttagctcagcaattcttaccttctaaattttcaggagtgaaaagaaaaagaggaaggaagaaac

SEQ ID NO: 276316 - DNA, 100 bp, Homo sapiens
gaagatgaaaatgcaatggatgctgatggtggtgatgatgatgatcaagcatttcatttagatagaagaaattcaccaccaaatagtttgacaccgtgtc

SEQ ID NO: 276317 - DNA, 100 bp, Homo sapiens
cttcaaagctgtttctgacatctgtaagacttttactcattgctatggacagtgctatcaccctgtggcagttccttcttcagctcctgcagaagcctca

SEQ ID NO: 276318 - DNA, 90 bp, Homo sapiens
ccttgtatgcctcaatttgctggatttaagcactgctgcactttatgaggacttgattattcttagaaatgcacttgacctgcttttgcc

SEQ ID NO: 276319 - DNA, 83 bp, Homo sapiens
cagcctcattaatcaagcatccaatttctctctccttagaaaaatggcaacacagatggtagctgcacagcttgcatcaatgg

SEQ ID NO: 276320 - DNA, 75 bp, Homo sapiens
aaaacgtgtgggtacgaccttgggcccttgctgtgtgtgagctagggggtggcatgacatgcttggctgggctca

SEQ ID NO: 276321 - DNA, 121 bp, Homo sapiens
ttgaggatgaagatgatgaagccgaggtagaagaagatgaacccacagatttgggatggggaaagacaccatagtcataaaagaagaaagcaaaaaatataaatgaagtacttgtacctat

SEQ ID NO: 276322 - DNA, 95 bp, Homo sapiens
aaaagaagttcatcagattcaagcagaaagatgaaggtcttagaatcattgattggaatgatccagaaattcccttatgatgaccctacttacga

SEQ ID NO: 276323 - DNA, 100 bp, Homo sapiens
aaagaaaacaagatgtccaattattccctcctgagtgttgattatgtagtggacaaagcacaacttctgagaaaagatggggagtgtgtctttccattcc

SEQ ID NO: 276324 - DNA, 85 bp, Homo sapiens
ttaatgaaggatcaacgtatcataaaaggaggttcaaaatggaagactgtttaggctcctagcaaaattgggaacaatcaatgag

SEQ ID NO: 276325 - DNA, 100 bp, Homo sapiens
catcctcgtgggtgtggggctgggctgcctgctccagatctcccgaagccacacagaagtgaagagtcaaacagacgtattactggaggggcaatgcaac

SEQ ID NO: 276326 - DNA, 100 bp, Homo sapiens
cacagctcggcgcggagcgtcctgtcaggcggcggccgagggcgtcgcggactctccccgcgatgatgccgatgttcctcctgctgatcaagagaagctt

SEQ ID NO: 276327 - DNA, 87 bp, Homo sapiens
gatctcgggctcggaacgagactgcacgggtgaggtggctttgaccccgggttgcccggccagcacgaccgaggaggtggctggaca

SEQ ID NO: 276328 - DNA, 75 bp, Homo sapiens
ggggactgggcacatcatcaatacggaactgcaagcacatgttgaccagataactgaaatggcagcagtaatgag

SEQ ID NO: 276329 - DNA, 100 bp, Homo sapiens
gtctgcagcccagagggcaccttctgcaaacatgtctgtggatcccctatccagcaaagctctaaaggttgggggccgtcccgctcctaaggcaggaaga

SEQ ID NO: 276330 - DNA, 73 bp, Homo sapiens
taattttagggtcctttatatagaagggagagtaggctcaagttcggctaaagggagctggcctaggagccaa

SEQ ID NO: 276331 - DNA, 88 bp, Homo sapiens
ccggcgcggcgtagtggatgcagcatcctagtggaggacgcccctgtgtggttagcaggaagaagatgagccttaagtctgaacgccg

SEQ ID NO: 276332 - DNA, 100 bp, Homo sapiens
ctaacatcttctggaaagtctgctgggcatttgtaaccccaaccattttaaccactctgctgatatacacaaagacattattgcttccagttgttatggt

SEQ ID NO: 276333 - DNA, 75 bp, Homo sapiens
aatccgccatgggctactcagtttacagccactgcagtatcacagccaggtaaacctagcctttaagcaacctgg

SEQ ID NO: 276334 - DNA, 74 bp, Homo sapiens
tgctcttcctggactcctgagcagaggttagtggttacttggatgattgtacctgtgatgttgaaaccattgat

SEQ ID NO: 276335 - DNA, 74 bp, Homo sapiens
tctcgatcagggcatacatctttcttcgacaaaggttcgatcctttggtacagaagacagaccgacagatcgtc

SEQ ID NO: 276336 - DNA, 100 bp, Homo sapiens
caaatgcagtcggcttgtcctggctcttgccctcatcctggttctggaatcctcagttcaaggttttaaaatcaaagatgggaaaatcggagaaaattgc

SEQ ID NO: 276337 - DNA, 95 bp, Homo sapiens
atcctgcaggcacagttgccgattacagaacccagtgacttgattgtaaaaatttacagagcggaatcatatgctggtctccaagagtttaaagc

SEQ ID NO: 276338 - DNA, 75 bp, Homo sapiens
tgacctggaggggaaaaatgaggactcagtggaactgctggtgttgggtcccagaacagttttcttctgggctcc

SEQ ID NO: 276339 - DNA, 100 bp, Homo sapiens
ctgggatgtgaagtagatgataaagatgatgatatccttctcaaccttgtgggatgtgaaaactctgttactgaaggtaagaatgattgatgttggctga

SEQ ID NO: 276340 - DNA, 100 bp, Homo sapiens
tcaaaataaaggaaacacatttcatatactgcagattttagtccatggagaacagaatgaaatggccagattgaaagcagcactgattcgagaatatgaa

SEQ ID NO: 276341 - DNA, 83 bp, Homo sapiens
ccttagaaaaaaatatggccattcttgatccaccagatgctgaccacttatacagtgcaaagagtaagccatatcaaagactt

SEQ ID NO: 276342 - DNA, 90 bp, Homo sapiens
gggcgcagcagtactttgagaaaatggacgctgacatcaatgtcacaaaagcggatgttgaaaaggtaaaaatgttgtacatcagctctc

SEQ ID NO: 276343 - DNA, 75 bp, Homo sapiens
agaagaagattaacctggagttaaggaacagatccccggaggaggtcatgatgatgggcagcgcccgagtggcgg

SEQ ID NO: 276344 - DNA, 100 bp, Homo sapiens
agagcagagacagctcgtctggatgggactgaggaagacccacaggcagaactggccatcattcatggtcagatggcttatattctgcagcttcagggtc

SEQ ID NO: 276345 - DNA, 100 bp, Homo sapiens
atggggtcgctcggtttgcgggccctgggcgctgcctatggcacagccaagagcggtaccggcattgcggccatgtctgtcatgcggccggagcagatca

SEQ ID NO: 276346 - DNA, 90 bp, Homo sapiens
ttgaaaaacagtattccaaagaactcggagatgcctggaatacagtaagtgggcctttggagtgacgctgtgggaactcatgactctggg

SEQ ID NO: 276347 - DNA, 100 bp, Homo sapiens
aacacgctgacaagtatctgtgaaaaggttattgtgcctaacatggaatttagagatgacgaagatgatcctgcagaagctgaaaaggagggaaatgaaa

SEQ ID NO: 276348 - DNA, 133 bp, Homo sapiens
ctttgacagctgggacatgtacaatgtgggtgaacataacctatttcctggcccaatagacaactctgggctattttcagagtgaaccagaggaaatgcctccagaagcaaagatgaggatgaagaatattgg

SEQ ID NO: 276349 - DNA, 98 bp, Homo sapiens
cactttcgccagcccgtgccgcgagcgcggcctgcaggaggtgatgtgtccaatctagatcccaacttctcatttgaaggcaccaaactggatgtggg

SEQ ID NO: 276350 - DNA, 100 bp, Homo sapiens
gcctagcacgtggaattcgcgaagctgccaaagccttagacaagagccgggtgtgggctgagccctgcctgattgatgctgccaaggaggagtacaacgg

SEQ ID NO: 276351 - DNA, 82 bp, Homo sapiens
attcacgggatcacttttgtgaacttgatgatataacacgtgggaaccggaggagaacatcctggaccccaggctgctgatc

SEQ ID NO: 276352 - DNA, 153 bp, Homo sapiens
ggatctactgataggcaggttaccatcactggatctgctgccagcattagcctggctcaatatctaatcaatgtcaggtgtttaaaattatccaactgccatagagctaaattcttttttggaaaattgaaccgaacttctactgaatacaag

SEQ ID NO: 276353 - DNA, 82 bp, Homo sapiens
cagattcgcagtggtcgcttcttctccttggtttgggattaaaggtgctgcttatctaaaaaataaagatggtttagtcatc

SEQ ID NO: 276354 - DNA, 90 bp, Homo sapiens
gaggaatccgagaagagcagagcggagggagccccagacacggccatttcataattctgaatcatgtctgataacggagaactggaagat

SEQ ID NO: 276355 - DNA, 75 bp, Homo sapiens
agttttctcaaatccgatatgatgctgtgaagagtaaaatcagtacaatggaacatgaattttcaataaaggaac

SEQ ID NO: 276356 - DNA, 83 bp, Homo sapiens
gcccagtatgggaaagatctaccttctggaagctactactacgtggtgcttggaaaggtgagaagccctaccactgcaactgg

SEQ ID NO: 276357 - DNA, 100 bp, Homo sapiens
tatgcttcctgagtgcttctttcttggagctgaccatgcaccaacaatgtttagcagtattcagcagagtgaaatttactcgtgtgttactgacagtgct

SEQ ID NO: 276358 - DNA, 83 bp, Homo sapiens
gtccgcatcgcaaccaccgccctggccatctaccatgtgagaaccatggagtctggcagtaccgccgccagtgaggaggcacg

SEQ ID NO: 276359 - DNA, 50 bp, Homo sapiens
gggcaatttcactgggtccacacatgatggctgcagctcctccaagttac

SEQ ID NO: 276360 - DNA, 98 bp, Homo sapiens
ctcaaagaggaccctgcttactgggtgtgtttgaccatcgaatgaagtgctggcagaaatgggaagatgctcaaattactttgctcaaaaaacgtgaa

SEQ ID NO: 276361 - DNA, 88 bp, Homo sapiens
ctggcctcggccacccagccgtctcctgtgaaggccatatttgataaacaggaacttgagaattgaagacgtaccacctcccactaaa

SEQ ID NO: 276362 - DNA, 75 bp, Homo sapiens
ctcagaagactcatctaactagacatatgcgtactcattcagaatgattacggacctgaagccaaagaacaagat

SEQ ID NO: 276363 - DNA, 74 bp, Homo sapiens
tgacttcaaagcctattcaaaaataaaggtggacaatcacctttttaacaaggattaatgaaaatcaagttcca

SEQ ID NO: 276364 - DNA, 98 bp, Homo sapiens
ggtctccagcgtgctcaggtcggcggaggagaagattagtgatgatgaaccaggttatgaccttgatttattttgcatacctaatcattatgctgagg

SEQ ID NO: 276365 - DNA, 100 bp, Homo sapiens
gccgagatgacgggctttctgctgccgcccgcaagcagagatttggtggcccagaacattgacgttgtcctgaatcgcagaagctgtatggcagctaccc

SEQ ID NO: 276366 - DNA, 100 bp, Homo sapiens
cagactcagggatcaaagagcaaacagattcagtggcctgcattggagtaccagtcttgcaacaccaacccgtgtcctgagctgaagaagaccacgccct

SEQ ID NO: 276367 - DNA, 98 bp, Homo sapiens
ttcaaagccagactgtcactcaagaaatcgacattcaatttgctggaacattatcagatggcttagggaagacgatggacaatcggcatcagtcagag

SEQ ID NO: 276368 - DNA, 90 bp, Homo sapiens
aatatggcctcaatatgtgccgccagtgtttccgtcagtacgcgaaggatatcggtttcattaaggtgagtgaagatggcagagaggacg

SEQ ID NO: 276369 - DNA, 98 bp, Homo sapiens
gggaagtgaccacgggtgcagacagcaatggtgagatgagtcccgcagagctgctgcacttccagcagcaacaggggaaggtgtggctcattgacttt

SEQ ID NO: 276370 - DNA, 100 bp, Homo sapiens
agctgtgctcgcgctactctctctttctggcctggaggctatccagcgttatggaaacaaaggacatgctttacatcgtcactgaatttgctaaaaatgg

SEQ ID NO: 276371 - DNA, 101 bp, Homo sapiens
gccgtcaacaatcccaagaagcaggaatgaaagtggcgctttctccgccccagagcagcggaaagagctcagtgctagaaagcctggtggggagggacctg

SEQ ID NO: 276372 - DNA, 50 bp, Homo sapiens
gttcgaagctgagtatgtgacagttggggaagcttcggcaggaaaagcat

SEQ ID NO: 276373 - DNA, 73 bp, Homo sapiens
cccatcacctgcctcagaacagactgtcacagtggaggaaggtatgggctacgtgagttcgtggtgattgccc

SEQ ID NO: 276374 - DNA, 100 bp, Homo sapiens
aaaagattcacctttggatttcatcgcttaggatagcgaggctgcggcaggaggagcgggagcaggagcagcggcaggcgttggagcaggcccgcaaggc

SEQ ID NO: 276375 - DNA, 95 bp, Homo sapiens
cgacaaatccctggcccgggtgacccacgcggaggccgtcaaggtaacttgggtttttactcctgtaacaactgaaataacaagtcttgatacag

SEQ ID NO: 276376 - DNA, 49 bp, Homo sapiens
agcacaggagaaccagtatggaaggagcctgcagacagggggatttgcc

SEQ ID NO: 276377 - DNA, 50 bp, Homo sapiens
ggctttctcttcctctgggtcacaggcagcgagttcctggggaaaacccc

SEQ ID NO: 276378 - DNA, 75 bp, Homo sapiens
tttaaatcacggtttgctcggttaaagcatcaagaaaagttccatctgggctggagtgtagtggcgcaatcttgg

SEQ ID NO: 276379 - DNA, 100 bp, Homo sapiens
actactgtgacaacattaacgagagacaagagagacacctccaacttcgacaaagagttcaccagacagcctgtggaactgacccccactgataaactct

SEQ ID NO: 276380 - DNA, 90 bp, Homo sapiens
gtttgagaaaaggcctaagaattttggcattgatgaagatgacgccaacagactcggggagaaggtgatcctgcgggagcaggtgaagga

SEQ ID NO: 276381 - DNA, 75 bp, Homo sapiens
cgtggaataggtgtatcaagtaatggtgcaaagcctgaagactccagtgggggtgactcatgtgcttctgaggag

SEQ ID NO: 276382 - DNA, 100 bp, Homo sapiens
atctgtaattacagctactccagcaacatcttgtccataaggctgaaccggcaaattggagctggagtgagccttccaggaattttggctgccaaatgtg

SEQ ID NO: 276383 - DNA, 75 bp, Homo sapiens
cgataccgaagcgggctgtgtgccccttctccacccagaggttaatttggagtggcccctggagtcagtttccta

SEQ ID NO: 276384 - DNA, 51 bp, Homo sapiens
cttaatctggctccagaaggggagcttcggctggggcatctccctgagaag

SEQ ID NO: 276385 - DNA, 82 bp, Homo sapiens
ccggacttcacctgagctacctcagggtttcacttccatcgcccaggctggagtgcaatggcgtgatctgggctcactgcaa

SEQ ID NO: 276386 - DNA, 100 bp, Homo sapiens
tcaagctgaaatagcacagctggccaatgaaaagcagaagtgtattgattctgcaaatttaaaggtacggttcctggagcagcagaacaagatgctggag

SEQ ID NO: 276387 - DNA, 100 bp, Homo sapiens
ctgcaatgtgtccaaggaattactggaagctaatagtgagatttcaatggaaaaagtgaaggtaaagcgttatgtgtccggaaaaaggccagactatgcc

SEQ ID NO: 276388 - DNA, 100 bp, Homo sapiens
tcgcgatgtgcttcagcagagcaggtcccgggcctcctccgagagtgaattggatgatgaaggcccctgtggtggtgatggggacccaggcctgttcccc

SEQ ID NO: 276389 - DNA, 80 bp, Homo sapiens
cttgtttgtggatcgctgtgatcgtcacttgatgtgaagttcatttccaatccgccctccatggtggcagcggggagcgt

SEQ ID NO: 276390 - DNA, 131 bp, Homo sapiens
atggagtcaccttttagcccgggactctttcacaggctggatgaagattgggaacatccatgatagcagtcttctgtaaatcgaacttttcaagaattctctgaaggaaccaagtaggatattcttacatc

SEQ ID NO: 276391 - DNA, 76 bp, Homo sapiens
ccgaactgaagtttccatcaataaatcatgactgatcttgtagcattacacagacagaggtccagcaaggacagca

SEQ ID NO: 276392 - DNA, 100 bp, Homo sapiens
cgtaaagatgatgttgtaacagtgactggagatatgtcagtattgaattctcccagacatcagagctgtataatgcatgttgatatggattgcttctttg

SEQ ID NO: 276393 - DNA, 100 bp, Homo sapiens
ggccctccagtgggggccatgcttcccagagcggagacaacagcagtgagcaagatttgggccaggcttagtcatctattggtatggatttatccaggag

SEQ ID NO: 276394 - DNA, 101 bp, Homo sapiens
atgggatgttggaggctctgtgggcagtgccagcagcgtgaaaagcacaagagcagtattctacaactccgtaaatgccgagccacatcgctcagacacca

SEQ ID NO: 276395 - DNA, 100 bp, Homo sapiens
accatattctaccttggtgaataacagcgagtgtgttgcaaacatgaaaggagctcgtgtaaatgccaaggacaacatgtggctgactccactgcaccgg

SEQ ID NO: 276396 - DNA, 100 bp, Homo sapiens
ctgccatggagtgaagggacaaaagggagtgcctggcaacattggtgctcccggacccaaaggagcaaaaggagattccagaacaatcacaaccaaaggt

SEQ ID NO: 276397 - DNA, 75 bp, Homo sapiens
tgcggctaaagatgcgcattagcacagggcaaggcttcccaggcctatgagagctacaagaagaaggactacacc

SEQ ID NO: 276398 - DNA, 74 bp, Homo sapiens
tgtcagattatcaggatgaggggatgatcatggtgattttactgctgcttgtggctatcgtggttgttgcagtc

SEQ ID NO: 276399 - DNA, 90 bp, Homo sapiens
gaaaaagaaaaaagacgacaagaaaaagaaggaagctgctcaaaagaaggagcagacgcctccgcctagacctgaagcctaccccatccc

SEQ ID NO: 276400 - DNA, 83 bp, Homo sapiens
ggagtgaattgaaagctaaggaggggctcaggtgcactttacaggtccccgatgaaccaagagaaccctccaccatatccagg

SEQ ID NO: 276401 - DNA, 75 bp, Homo sapiens
cttgctggctcaagctcggaggtggaagggtctggagcgagtccactggtacaatgagttcccacttgctcacct

SEQ ID NO: 276402 - DNA, 82 bp, Homo sapiens
gggatttgagattgacgcggtgaactctgtccagttttcaaaccacacagaattggctgtgaaaggactgaggcagccatct

SEQ ID NO: 276403 - DNA, 82 bp, Homo sapiens
gacctgcaccccgatgttttcgccaccgcgcccagcttctgcagaaagccgtcattacacctgattttgaaaaaaaccactg

SEQ ID NO: 276404 - DNA, 100 bp, Homo sapiens
gttgaagcttgctagggattacagtgggtttgactcaattcaaggccaagaccagcttcaagtctccatggtaccagaaaacaacaacctcacagcacct

SEQ ID NO: 276405 - DNA, 82 bp, Homo sapiens
tttatagtcctgattcaagtgttggcggatggaagggaggagactcctgaccctcagaatgttggggacgaaggacaaaaag

SEQ ID NO: 276406 - DNA, 90 bp, Homo sapiens
ctcgacctcgtgaagatccgcttcgccgctgttcgggggtcttgtctggattttggttgcctcctccaatgttcctctacctctactaca

SEQ ID NO: 276407 - DNA, 100 bp, Homo sapiens
cgatcctctccgtgggagccagcgagcctctctccctgatcttacgtgctcaagatcccagattacaggaatgcagtaatcgtggccaagtctccagcct

SEQ ID NO: 276408 - DNA, 50 bp, Homo sapiens
ggcgaggatgccgtacgagatcagcctcatggcggtccgagcttcgttcg

SEQ ID NO: 276409 - DNA, 98 bp, Homo sapiens
tccgggagccgtccgtgtcaccgccggaacctggcgcagattgctggactcgctgaagagagactacgcaggaaagccccagccacccatcaaatcag

SEQ ID NO: 276410 - DNA, 75 bp, Homo sapiens
ggccgcgttggggtgagaccctcacttcatccgaattaaacaaccaccatgtcgagcaaaaaggcaaagaccaag

SEQ ID NO: 276411 - DNA, 75 bp, Homo sapiens
ctgcagtccggactcatctagcctcggggcatcttctctgcattcagtttcatccaagtcattccgggatttctt

SEQ ID NO: 276412 - DNA, 50 bp, Homo sapiens
tagactagaactgtggataaacctcagatttcatgaacgtctactaccag

SEQ ID NO: 276413 - DNA, 100 bp, Homo sapiens
tttctccactggaagagaacgtctccgagtccctcaactctctacgctttgcctccaaggtgaagccaccagtgagaaacccccagaacagtaccgtctt

SEQ ID NO: 276414 - DNA, 142 bp, Homo sapiens
gagttttctagtccctcttacttgaagcatgtctttcagagcccggcaccacccatcttgagtatctggtgaccaagaatatggcccaggtgaccaaagccctggacaaggccctgagcaccatggacctgcagaaggtctc

SEQ ID NO: 276415 - DNA, 97 bp, Homo sapiens
aggggaaggaactttgggtcctgaatcttctgggagctgaggaaccagatatcttgaaaagctgccagaaagatggagtctcactctgtcgcccagg

SEQ ID NO: 276416 - DNA, 50 bp, Homo sapiens
acaaggtgttgatgccgccggacgcatttatgacattaacagagaacagg

SEQ ID NO: 276417 - DNA, 74 bp, Homo sapiens
tggccgggcccgccatggacctcctgcacccatccgtgggctatccggtgagtgagatcattggccgagacctg

SEQ ID NO: 276418 - DNA, 150 bp, Homo sapiens
tcgcgccgtgacctgcaggtactgacagatccgtagggaggacaccgtgacttcccggacgctgggaaatggtattgggagagttgctgctacatctttaggaaatttgactaaccatggttctgaagatttaccccttcctcctggctg

SEQ ID NO: 276419 - DNA, 50 bp, Homo sapiens
tcttcttcgagtatttgtagaaggggtcgagctgtgcagttttagcgggt

SEQ ID NO: 276420 - DNA, 100 bp, Homo sapiens
gagaagcgcgagggctacgagcgtctcctgaagatgcaaaaccagcgtggcggccgcgctctcttccaggacatcaagaaatatggctacacacaccttt

SEQ ID NO: 276421 - DNA, 98 bp, Homo sapiens
ctgctgtacttcgtctatgtggcgcccggcataggcattctgtgaaactttagaagagacaaactaccgcttacagaaagaactacttgaaaaacaaa

SEQ ID NO: 276422 - DNA, 98 bp, Homo sapiens
tccggaggcggcgggacagagcgcctgcgaccccagtcggtgctccggggaggtcacctgacgaggagaggcacagagctttggcctgctggatccca

SEQ ID NO: 276423 - DNA, 100 bp, Homo sapiens
atatcaggagacacagtatagcttctgacagtggagacactggcattggaacttcctgttctgatagcgtggaaggaatccttcaactgctttctaccaa

SEQ ID NO: 276424 - DNA, 98 bp, Homo sapiens
gcccggggtcctccaggaccagccggtgctaatggtgctcctggactgcgaggtggtgcaggtgagcctggtccagctggctccaaaggagagagcgg

SEQ ID NO: 276425 - DNA, 101 bp, Homo sapiens
tttaaagaaaattttaaaaggaatcttggattataatcatgaggataacttcaaactaatgtgtactaatgccatgatttacaataaaccagagaccattt

SEQ ID NO: 276426 - DNA, 98 bp, Homo sapiens
agagggcctttggaaacttcttggaggttttcaggaaacttgcagcaaagccattcgggttggagtaattgcacaaacgtgcagatatctgatagccc

SEQ ID NO: 276427 - DNA, 82 bp, Homo sapiens
gcccgtgccgcgtctccgcgttcccagcccgggtccccgcgttcacagccccagcgcaggtggtcaagtaccccctgcacgc

SEQ ID NO: 276428 - DNA, 75 bp, Homo sapiens
gagcaaataaccgttttgaaattgactcagcccaggagagtgttattactcgagatattcatcgtacatttcccg

SEQ ID NO: 276429 - DNA, 82 bp, Homo sapiens
ccggagttgccatgaaatatggaaacgactcctcggccgagctgagtgagacatgaagagtatttctggagaagaatcatcc

SEQ ID NO: 276430 - DNA, 82 bp, Homo sapiens
gggcaagcacgggaagaagcagctggacccgctcaccatctacggcatccggtggctgaaatctctttaatgatggagggaa

SEQ ID NO: 276431 - DNA, 100 bp, Homo sapiens
tgctgcgggtctgctcgggggtctacttcgaggttatgtgtctcggtaccacgtgaaagactcctcacgccacgtcatcctaggcacccagcagttcaag

SEQ ID NO: 276432 - DNA, 97 bp, Homo sapiens
gaagaaggcctcttgccagaccaggatctgtgggcgcggccaggctggaggactagggcggtggcagtggccagacactacaacaacaggagtgcaa

SEQ ID NO: 276433 - DNA, 100 bp, Homo sapiens
agctgcatgttcaagaagtggccggagagttctgcatgttgattctttgttgcatattctaaggacccagacataggcttggtggcccgtctcttgtctt

SEQ ID NO: 276434 - DNA, 82 bp, Homo sapiens
cgtcgctggtcgtgcgacccaagcccctgcattcctgtacgggaagatgaagtcctcagtacattctgaagaagatgatttt

SEQ ID NO: 276435 - DNA, 98 bp, Homo sapiens
gccagggcttctcctatgactacgtgttcgactggaacatgctcaaatttgtggatcagtacaagggaaagcgggatttggagtcactgagggagtac

SEQ ID NO: 276436 - DNA, 100 bp, Homo sapiens
cttaaatgatgtattttgtgatcgcagcgatgaaagatggagttttaacattgaatgcggagaacactaattatgcctatcaagttccaaacttccataa

SEQ ID NO: 276437 - DNA, 100 bp, Homo sapiens
gccgcggaggctcctcggtccttcagcacccctcggcccgacgcacccacgcccctcaccccccgagagccgaacggccggtttgtgggcgatgctgacc

SEQ ID NO: 276438 - DNA, 99 bp, Homo sapiens
gaatctccggagcgaggaacagaagaagaagaaccggaagaaactgtccgagaagcccaaagttgtactggtcagtggacatctggacagctgggatgt

SEQ ID NO: 276439 - DNA, 101 bp, Homo sapiens
aattatttatccaacagctcctcccaggtaccttgtggtctataatcctttagaacaagaccgaatctcgttggtctcagtctatgtgagttccccgacag

SEQ ID NO: 276440 - DNA, 100 bp, Homo sapiens
cctgcacgtgctcgagggcctcttccgcaccgaccccgaggccaagtttgcagatggcgtgtacctggttctgctcatgggccttctggaagactacttt

SEQ ID NO: 276441 - DNA, 75 bp, Homo sapiens
cggagggcgtggagtagaacagaatcatcagatcctgtgcttgatgctggaatacaacatcatcgacaacaacga

SEQ ID NO: 276442 - DNA, 100 bp, Homo sapiens
cctggaggcattggctcggctcaactatctgctcagaggtgctgtgccgttcctggtcagtgccacctctggcaccactgtgctaggggcctttgacccc

SEQ ID NO: 276443 - DNA, 75 bp, Homo sapiens
gctcaaagaaagatgattatgcaccgtataaacttgagttcagacttcctgattactcctgatttctactgggac

SEQ ID NO: 276444 - DNA, 83 bp, Homo sapiens
atgctgtgatgtgtgccgagggaggaattggttgtggattcccagctggtgtgcatgatgaacgaaaacagcattgattacat

SEQ ID NO: 276445 - DNA, 131 bp, Homo sapiens
cgggtttcttcttccttgagaacgatctgattcatcatcatctgaaccagggatcacagtctaaggtccagggcttccagggcagcgattgaggagaccttaccaaggagcaccacacagtagatgctgag

SEQ ID NO: 276446 - DNA, 100 bp, Homo sapiens
gggggacaggctgtggggtttctcagataactgggcccctgcgctcaggaggccttcaccctctgctctgggtaaaggtctgtggctcaggacatcccca

SEQ ID NO: 276447 - DNA, 100 bp, Homo sapiens
gggagattgagtccaagttcaaccaagccattgtctcaagtattcccatgtgttttaaaagcctgaagtcagtgagatgaaattcaacatcaagaatttg

SEQ ID NO: 276448 - DNA, 82 bp, Homo sapiens
aaagtaattttgtttgccgaagtgacccccacaacgatgcgtctcctggatgggtttggttacaaaagtacggctaccttcc

SEQ ID NO: 276449 - DNA, 76 bp, Homo sapiens
caaagattgaacgacatgccatgtactgcaatggtctgatggaggaagatacagatgtttctatactttgaagatc

SEQ ID NO: 276450 - DNA, 75 bp, Homo sapiens
gattgctgggaagctgacatcacagtttcttgcagaacataaattattaggaaacattaaaaatgtggccaagac

SEQ ID NO: 276451 - DNA, 82 bp, Homo sapiens
catggacgacgaggaggagacgtaccggctctggaaaatccgcaagaccatcatgcagagacaagaggagcagcagcggcac

SEQ ID NO: 276452 - DNA, 140 bp, Homo sapiens
aagacgaagacacttttgaccggctacttatttcaatagaaaataaaacaacagaaattcctctaattgggttttcacttccagttactgcaacagcagaaaactgcattcttactatttacccatatatggcaattcat

SEQ ID NO: 276453 - DNA, 99 bp, Homo sapiens
aggagaaggccagtgttgattctgacagcaatcttctggctctcattcgagatgtcttacttccccataacaacatgctgtaccccaaggaagacaagg

SEQ ID NO: 276454 - DNA, 80 bp, Homo sapiens
gaataacttaacagcagaaagtttgcaagtaatgttagcatggcctcattgaaagaactagatcaaagactctttgaaaa

SEQ ID NO: 276455 - DNA, 51 bp, Homo sapiens
atgctgcccagagatcgcagcatatcaaacgccagtgcttaggactactaa

SEQ ID NO: 276456 - DNA, 75 bp, Homo sapiens
cgccagccggggtcctcggatctggcccagggtaaaaagccccagaagatttaagaaaagggccattcaagatac

SEQ ID NO: 276457 - DNA, 101 bp, Homo sapiens
ccgctggagcggagccggccgtacgcggtgctgcgagggcagaacctgggccagaagcggactcctagaagaggggagcagcaaggatggaatgacagccg

SEQ ID NO: 276458 - DNA, 76 bp, Homo sapiens
ctcacacttactatcaggtgctgattgatgctcgtgactgcccacatatagcaggttggtctcctcttcatattgc

SEQ ID NO: 276459 - DNA, 98 bp, Homo sapiens
cggcacatcctctcggtgttcccgctggcggcgggcatcttcttcgtgaggctgctcttcgagcgacactgccctaaccatcatggaggtggccgagg

SEQ ID NO: 276460 - DNA, 98 bp, Homo sapiens
agaactccgtgcccagatgctcataaggattgtcctctttctacaaaaggcggcgctggcggcggccctgggacccgcggaagccggcatgctggaga

SEQ ID NO: 276461 - DNA, 100 bp, Homo sapiens
tggatgcagagctggagtttgcaatccagccaaatacaactggaaaacagctttttgatcagagggtggcctggaggagatggtggaggagctcaacagc

SEQ ID NO: 276462 - DNA, 100 bp, Homo sapiens
cagactgctgcttccccggatgagcagaaggtgtttgccctctgggagtctggagacatgagtgatcagcagaaggtgatttactacctctgcatcttat

SEQ ID NO: 276463 - DNA, 100 bp, Homo sapiens
ccgaggcccttcgcaactggcaaggtattgactgggctcccaagagcgaccgcattgtcacttgtggggcagaccgcaatgcctatgtctggagtcagaa

SEQ ID NO: 276464 - DNA, 98 bp, Homo sapiens
gaagacgggtgatttctgcatttccatctgagggaaagctaacagccagggagaggatcagtctcttgctggaccctggcagctttgttgagagcgac

SEQ ID NO: 276465 - DNA, 99 bp, Homo sapiens
ttccagtggatttccttgcggaaaggatgttggcggtccctgtgacctgtggagacacggccagatctgccctccagctggagtgcaatggtgcaatct

SEQ ID NO: 276466 - DNA, 75 bp, Homo sapiens
ggggcatcttcccggaatcagattcaaaggcccagctgagagccagcctggaggttacccagcagcaggccaccc

SEQ ID NO: 276467 - DNA, 87 bp, Homo sapiens
gatgccattccagcactggactcatggaggctgagcatttattcagaaatgacatcagatgtaccatcactgggtccagccattgcc

SEQ ID NO: 276468 - DNA, 82 bp, Homo sapiens
caggcccacgccagacacgacgtctggcaggaacctcggcctcagaggatgagagtagtgaagaagaggaagaatatgaaac

SEQ ID NO: 276469 - DNA, 73 bp, Homo sapiens
gggactctgaggaaaagctcgcaccagagatcctgaaggagctagacgagtgctacgagcgcttcagtcgcga

SEQ ID NO: 276470 - DNA, 101 bp, Homo sapiens
cactcctcatgcaaaaatcgcatctgatatcatgagttgcattttacagttattcaagcggagaaatgttgctacagcagaagaagaaacagaagaagaag

SEQ ID NO: 276471 - DNA, 75 bp, Homo sapiens
ctctgttccaaatgctttgctgaagaggatgtggagaactttgacgtgaccaacttgtctcaagacatgctgcga

SEQ ID NO: 276472 - DNA, 100 bp, Homo sapiens
agagaagctggcttgatgaaaaggctctccagtttgggaacagcgtttacattttctaaagcaacaggagcgccgtcagcagcagtctatttctgaaaat

SEQ ID NO: 276473 - DNA, 83 bp, Homo sapiens
ctgcttcaatgtccgcatcgcaaccaccgccctggccatctaccatgtgaccaaagtctgacattctgaaagatcctcctagt

SEQ ID NO: 276474 - DNA, 90 bp, Homo sapiens
aattgaagctgactactaaggagaataagtttcaggatctgaagctgagggaattctactgtgagggaaacccactgttcctgcagcagc

SEQ ID NO: 276475 - DNA, 50 bp, Homo sapiens
ctcaagttcggagtggtacagacattgtgccctgatcttgtagacaagta

SEQ ID NO: 276476 - DNA, 83 bp, Homo sapiens
cagaacaaagccgcgggcctctcagacaatgcagatcttcgtgaagactctgactggtaagaccatcaccctcgaggttgagc

SEQ ID NO: 276477 - DNA, 89 bp, Homo sapiens
ccgaaccactgaagagatgttagaggcagaattggagaaaaggcaaggttgtgcttatttggctcttctaagaatggatttggatttcg

SEQ ID NO: 276478 - DNA, 101 bp, Homo sapiens
gcgggccacgcacctcgtcaccaaggccaagcaatggtgaactagacccctggtcaggaggtggagtaactaaggatatcacagacactctggttgcagtc

SEQ ID NO: 276479 - DNA, 82 bp, Homo sapiens
aatgggtagcctcaccatgaaatcacagcttcagatcactggtacaggtttgcagattccgccagcagcacagcaagctcta

SEQ ID NO: 276480 - DNA, 74 bp, Homo sapiens
aagagggaagacacgcggaaacagatgacagatttgaagatctggaagaggcaaatccattctcttttagagag

SEQ ID NO: 276481 - DNA, 97 bp, Homo sapiens
ccgagacattctgctgattggacatagacaggcttttgcatgggttgatgagtggtatgcctacagagaaccctatctgtttgtgacccacttcaac

SEQ ID NO: 276482 - DNA, 96 bp, Homo sapiens
tcaccgacaagatcaccacggacgagatgatcaaacgcctgaagtcaaataaagtgcccgtggtgcagccatcccatgcggtccatcctctcaccc

SEQ ID NO: 276483 - DNA, 100 bp, Homo sapiens
accaacaaatgtccaaaccgtaacctgttctcctcgtgtaaaagccctgcctctcagccccaggaaacgtctggtgtcccggctcgtgaccatttccaag

SEQ ID NO: 276484 - DNA, 100 bp, Homo sapiens
tggagatgggcagacggattcatttagagctgcggaacaggacgccctctgatatgtcctggcgtccgcaataccgtagctccaagttccggaatgtcta

SEQ ID NO: 276485 - DNA, 53 bp, Homo sapiens
ggagcaagatggcgattccgggcaggcaagctatcagcttcccagtttgcaca

SEQ ID NO: 276486 - DNA, 80 bp, Homo sapiens
ctgggaaaaactggagaacagggagatccagccaccattcaagcccaaagtggtggagctgatcagaataatgttcagca

SEQ ID NO: 276487 - DNA, 75 bp, Homo sapiens
gtgacttgaaaccagaaaacgtgttgctggcatcagcagacccatttcctcagactttgagaatcactacaagaa

SEQ ID NO: 276488 - DNA, 100 bp, Homo sapiens
aacgcacagctatcttgacccacccttggtgacgagagcagacgtggatgtccagccctatgcgttcacaaccaagtctctgtttgttgggcacatggat

SEQ ID NO: 276489 - DNA, 73 bp, Homo sapiens
atttgccaatctaggagagcatgagtttgtagaagccaatggccaaaggccctgccaagaattcagaaccaga

SEQ ID NO: 276490 - DNA, 75 bp, Homo sapiens
agccaaaatcacagctttgagtgagaaacagctactctccagagagaccggatcttcaaacattttaccaggaag

SEQ ID NO: 276491 - DNA, 75 bp, Homo sapiens
gggcggcgaggaaggcgtctcccggttgattatggaagattcccacaagagtaccacgtcagagacagcacctca

SEQ ID NO: 276492 - DNA, 83 bp, Homo sapiens
gtggatctcctaggaggaggactagatagtctggtacacggctgccccacaccccctgctatctcttgatccccacttcagcc

SEQ ID NO: 276493 - DNA, 75 bp, Homo sapiens
tgagagtcggagccgaataccaagctcggatccctgaatttgatccagggagtaactattcccagtcagaggcgc

SEQ ID NO: 276494 - DNA, 100 bp, Homo sapiens
aggtgatccagcaaggtcggcagagcaaggggcttacgcagaaggacctggccacgagaggcgtttccatcaaccagttttgcaaggagttcaatgagag

SEQ ID NO: 276495 - DNA, 51 bp, Homo sapiens
aatgaggcgggcagcactgcgtattctgacaagtccctgtacacccagctg

SEQ ID NO: 276496 - DNA, 82 bp, Homo sapiens
tggcggatgaagcagctggtggggctctactgcgacaagatggaacagattaaaagggccaataaactgtttaccaatgatt

SEQ ID NO: 276497 - DNA, 95 bp, Homo sapiens
tctccagcctggagagttcactggaccggaggtttcggtctaagtaccacccagatgaggtggggaagcgtcggcaggaggcccggggggccctg

SEQ ID NO: 276498 - DNA, 82 bp, Homo sapiens
agcctcagcccggggaggccaggctggcagccctcaccgcaggagacaggtacgaggaacagcaaattcaggaaaaagtggc

SEQ ID NO: 276499 - DNA, 113 bp, Homo sapiens
ggagccccaacacacggtccacagctcatcatgatggacttggagctgccgccgccgggactcccgtcccagcagctgcagaaccttggcctgaaaatgctacattatatcag

SEQ ID NO: 276500 - DNA, 100 bp, Homo sapiens
gctgaagtcacctggaaggggaccgagcaaatgcccacaaccctgtcgaaatggaggtaaatgcattggtaaaagcaaatgtaagtgttccaaaggttac

SEQ ID NO: 276501 - DNA, 90 bp, Homo sapiens
aagatgtttccagccctgcctcggcggaccaaaggaggttgacggatatattcagacgttacgacacggatcaggacggctggattcagg

SEQ ID NO: 276502 - DNA, 101 bp, Homo sapiens
caaccaccatggaccagaagtctctctgggcaggtggaagcctcctccatctcctctgctggcgctgtgcacctttttagtttcagaaaagcatgctgggc

SEQ ID NO: 276503 - DNA, 101 bp, Homo sapiens
cgggggatgactgattctcctccgccagggtctccctccactgctgtagtaacccgggtccggggcctcggtggtgctcctgatgcccctcacccacccct

SEQ ID NO: 276504 - DNA, 74 bp, Homo sapiens
caaggtggagcactggggcctggaccagcctcttctgaaacactgggatcatgaatcggttcagtggtgttatg

SEQ ID NO: 276505 - DNA, 89 bp, Homo sapiens
aattcattctgatgtctggagcttaggaatctcttttatggaggactcacagaaaacactggacttccccggaagctacttgaaaaaca

SEQ ID NO: 276506 - DNA, 100 bp, Homo sapiens
gagttctcggtactcttcagggatgagtcatgtggcagtggaaaatgcgctcgggctggaccagcaggtcctggctataagtcaccatggcacagcaagc

SEQ ID NO: 276507 - DNA, 50 bp, Homo sapiens
cgccgctgcagctgccgcgcgtgtacatgtcccagagcaagcacacggag

SEQ ID NO: 276508 - DNA, 51 bp, Homo sapiens
ggcagagcaactcctccgcagtgaagtaaagaacaagcacctttggagatg

SEQ ID NO: 276509 - DNA, 100 bp, Homo sapiens
gaccgagacggtggagctccataagctaaagggcatccgtttccgaggctttagtatccctgaatgccagaaactgctacccaaggctaagggtggggaa

SEQ ID NO: 276510 - DNA, 82 bp, Homo sapiens
ggaggcgcgggaggtgttcgagaacgaccccgagacgtaaggtacctgccgtgggcagatctgagctttcttcttggacacc

SEQ ID NO: 276511 - DNA, 74 bp, Homo sapiens
agtcctcgtcagcactgactttcagctatggaatcggtggatccataaagaacccagccaacccgcagagggag

SEQ ID NO: 276512 - DNA, 83 bp, Homo sapiens
ccgtactgcacatcgtggtggtcggatttcaccacaagaagggctgccaggtcagcccaaggccaaccccactgtcactctgt

SEQ ID NO: 276513 - DNA, 74 bp, Homo sapiens
ctcttggagtcggagcttcgcgacggcagcggcaagaaggtcagtatgggaatcctttaaataaatatatcaga

SEQ ID NO: 276514 - DNA, 49 bp, Homo sapiens
cgtgcctgacctgctgctgccactggatggcactggatctttaaaacgc

SEQ ID NO: 276515 - DNA, 100 bp, Homo sapiens
ttttgtggtagaccgtctaagagaagtagtttatgccaacgtgacttcattcatacagatgaaccaaggatcgggatagcagtataaaattagaatcaag

SEQ ID NO: 276516 - DNA, 101 bp, Homo sapiens
cggcagcctccacccaccggcccaccctacatttagcgcatcatgtgatccggggctgatcccttatccaacatggttctaaccttcagtactaaagaaga

SEQ ID NO: 276517 - DNA, 98 bp, Homo sapiens
tgaggaggaaaacacccccattgctcctggatttggatttggaattgcaatatctggtggacgagataatcctcattttcagagtggggaaacgtcaa

SEQ ID NO: 276518 - DNA, 51 bp, Homo sapiens
agtgatcactctcaatcccggctttctgaaaaggatatgagcatgctcgag

SEQ ID NO: 276519 - DNA, 73 bp, Homo sapiens
gcacttcacttagtgccctcttggacttttgggccgagggaaatcaatattatgtagcaaagaagttccagca

SEQ ID NO: 276520 - DNA, 109 bp, Homo sapiens
catttagaacgatgtgaacatcgaatcatggaatcccttgcatggctctcaaattggagcgttattcagtatattaatgtcttattgataatggcagaacatccaccac

SEQ ID NO: 276521 - DNA, 51 bp, Homo sapiens
ccatgacaattgaggcgcccatcaccaaggatgtttggaccaggaagagag

SEQ ID NO: 276522 - DNA, 100 bp, Homo sapiens
caaaaatgtgcatactcacagagttagagagagggatggtgcctgcctgctccaggctgagctggtaaactatgaacgagtcaaggaatattgcctcaaa

SEQ ID NO: 276523 - DNA, 75 bp, Homo sapiens
tgccatctttgccctgatgagctcctgtttagccactgcaggttgcaacaaggacagtgtcagagcaggctgtaa

SEQ ID NO: 276524 - DNA, 83 bp, Homo sapiens
atctgggtgcccgtggaccacaggccctcgttgcccagatgtttgtcctggttgtggtcaagactggatgatgtaactggctc

SEQ ID NO: 276525 - DNA, 75 bp, Homo sapiens
gtggagttggcaggtgtgcgcaggtgattatcctgaaccatccaggccaaataagcgccggctatgcccctgtat

SEQ ID NO: 276526 - DNA, 82 bp, Homo sapiens
gctgttttagtgctttttatttttccccaattcagcagagaatattttcaaggggggtctctaattaacagaagatggcaaa

SEQ ID NO: 276527 - DNA, 90 bp, Homo sapiens
gcactattattcatgaggcaaatgaggaacagggcaatagtatgatgttttcggctttgtgagaaaccttaccatcaaacacgatggcca

SEQ ID NO: 276528 - DNA, 83 bp, Homo sapiens
gaatttgtacacatgtacaatgcccaatgcgatgctttgcatcctaaatcaggtgtggaaacaggaagagaactagaactgga

SEQ ID NO: 276529 - DNA, 83 bp, Homo sapiens
ggttacttggtttggaacctgaaggccctatggcccttaagtgagaagcaggaggctttgatgaccaagagccccgcatccaa

SEQ ID NO: 276530 - DNA, 73 bp, Homo sapiens
ccaaacccaaattcttcgttctgtgcggcgacctcatccacgccatgccagcacctgtggaatcctctcaaga

SEQ ID NO: 276531 - DNA, 100 bp, Homo sapiens
aaccgggagaaatggatctactactgcaatggccatgggattttatattggaagacatggatcttgctgccaacgagatcagcatttatgacaaactttc

SEQ ID NO: 276532 - DNA, 100 bp, Homo sapiens
tttgaaccactggaaagtgaggaattttgaagtacaccgtggtgacattgtatcattggtctacatccgatactcccagatctgtgcaaaagcagtgaga

SEQ ID NO: 276533 - DNA, 90 bp, Homo sapiens
gatataagaggaaattttctcaagtggcaaactttagaaggaggtgttttacagtttttcagttatgggacaaaaatattatatcaaaac

SEQ ID NO: 276534 - DNA, 98 bp, Homo sapiens
gatattgttggtggcgtacccatcattactcccactcagaattgtattcctattgaagagcagcttcagttggtgttgggcaatgctggatacaagca

SEQ ID NO: 276535 - DNA, 131 bp, Homo sapiens
ccaactagaggcagggtcatccttgcccttgtcctcccctttcatccctatgtggaaaacggtaaagtgaatgccgaagacagaagatttggatgatacaccactgactttctttgtttggaatacacgtt

SEQ ID NO: 276536 - DNA, 90 bp, Homo sapiens
catcatcaactcctaatagtaactctacatctggttctgctactagcaacccttttggtttagaatcatttgctgtttcaaatagagaac

SEQ ID NO: 276537 - DNA, 82 bp, Homo sapiens
ctgctgtgtgcggtgctgctgagcttggcctcggcgtcctcgggtggcgacatgtctaagaatgtgagccagtcacagatgg

SEQ ID NO: 276538 - DNA, 75 bp, Homo sapiens
cttcagtctataataaagagatgtcttggctggtccattggtccaaatcatttgataaaacatttacagacagtt

SEQ ID NO: 276539 - DNA, 75 bp, Homo sapiens
cagacctgctgtgtgtgcttctgcgccccaggtgttgtgtgtgggggtgcagcaaacggggattcagcgtccgat

SEQ ID NO: 276540 - DNA, 100 bp, Homo sapiens
ccaggccaccaccggccgcctcagccatggacgcgtccctggagaagtccaaaccaggttgcagagaaggtggcctccagaatcgccgagggcttcagcg

SEQ ID NO: 276541 - DNA, 100 bp, Homo sapiens
gaggatctggtgtaccaggcgaagctggccgagcaggctgagcgatacgacggtgaaaggtgtagcagtcactcggcctacacccacagcatcgaccttg

SEQ ID NO: 276542 - DNA, 50 bp, Homo sapiens
gttggcaacgcgacacagagccaggggctgacatcgccaacatctgcaat

SEQ ID NO: 276543 - DNA, 104 bp, Homo sapiens
tgataagggtactgtccatatctttgctctcaaggatacccgcctcaaccgccgctccgccctgaactctttgcttccggaatccgggattgttgctgacatag

SEQ ID NO: 276544 - DNA, 97 bp, Homo sapiens
cgtgtacccttaacaggtatctgctcctcatggcgcaggagcatctggagttccgcctgccgttgagaacatggtaactgttggaaaaaccattctt

SEQ ID NO: 276545 - DNA, 100 bp, Homo sapiens
cgaaggcggagcagagttcttctcaggggttggctgtgttccggccgcagagcaccgtctgcgtgaggagatcctggccaagttcctgcactggctgatg

SEQ ID NO: 276546 - DNA, 100 bp, Homo sapiens
atataagccaagttcttgagaagaagagaaacaactgttttgttgtttcaccagtgatcattaaagaatgggcagcttacaaaggaaagtctcctcaaac

SEQ ID NO: 276547 - DNA, 115 bp, Homo sapiens
ggccgtcgtctccggacggggccctgacacggccaccctactgcctggaggccggggagccgacgcctgatttctttaaagactcgtgcagcacatcattatcgctggatgcccg

SEQ ID NO: 276548 - DNA, 90 bp, Homo sapiens
aagaattgcctttgggactctgaaggctgaagccccattgacaaaccttcagattctctcagtatagggaacggtgataattcccagcag

SEQ ID NO: 276549 - DNA, 120 bp, Homo sapiens
aagttttcagcctcatccagcaggcggtgacccgctaccggaaggccatcgccaaggattttttatcaagcagaaatgcatcgaacaacgagaatcaagatcactgagctaaatccccac

SEQ ID NO: 276550 - DNA, 99 bp, Homo sapiens
gttcaggagcagcacaggcagaagcactttgagaagaggcggaacccggcagcaggcctgatccagtctgtaggtatattgttagagccatgcagtgac

SEQ ID NO: 276551 - DNA, 75 bp, Homo sapiens
ggagcacttgggagtgatctaggttgtgttgctttctgccacaatgccaactgatgtgttggaagtgaccaaaaa

SEQ ID NO: 276552 - DNA, 104 bp, Homo sapiens
gccgctgctacctgcagcgccgtgtggcacgacacaaaaatcagtcaccgagacttggagccagaatctgagcctcagctggagtcagagacagcaggaaaatg

SEQ ID NO: 276553 - DNA, 74 bp, Homo sapiens
cgagtcgcagatggcctgccacgttttccgcgccacagaccccagccagaacatccatgatagcagtcttctgt

SEQ ID NO: 276554 - DNA, 75 bp, Homo sapiens
tgcactgctctggtctagtacaaacaggctgctggcattgagatgactgccaggggcatgaaggggatgtgcttc

SEQ ID NO: 276555 - DNA, 100 bp, Homo sapiens
ttttgccttatgaacttggtcggctcttccagctacaaactctaggtttgaaaggatctaagcctttcccacgttatggttataaaccctccccaccgaa

SEQ ID NO: 276556 - DNA, 100 bp, Homo sapiens
gtcacaaaacagcagatttcccaagagcagcggaaaatgatccagtcacagctgctggctaccaatattctactttctgtctctatgaatgtgactaccc

SEQ ID NO: 276557 - DNA, 100 bp, Homo sapiens
aaactctgcaatgtcaccttgaactctgcacagcaagcccaggctcattatcagattgaagataaaactttccaagtccttggtaatctttacagcgagg

SEQ ID NO: 276558 - DNA, 75 bp, Homo sapiens
agatgcagtacgccacggggccgctgctcaagttccagatttgatggaccagcttttgggaaatatgattgaaat

SEQ ID NO: 276559 - DNA, 96 bp, Homo sapiens
cgaacagtctctcctcctcacagaagcctggtgacagagctgaatgaacctctctccaatgaagatcgaaatctcctctctgtggcctacaagaat

SEQ ID NO: 276560 - DNA, 90 bp, Homo sapiens
aactcccgggcctgcggacgctatgcacagaaccattccccttgcaatatgtatatccatggccattgtcaccattggctatgtgctgac

SEQ ID NO: 276561 - DNA, 100 bp, Homo sapiens
catcaatgaggtggcagaagatgaaagccgaagataccagcagacgatggggagcttgcagcccctttgccactcagggcagcagtttgataaacatgca

SEQ ID NO: 276562 - DNA, 100 bp, Homo sapiens
ctgctctgatggcgtaatcatcaaggttgctgataaaatggttatctgaaaaactgcaagacacagagaatgaagccatgtccaagattgtggaactgga

SEQ ID NO: 276563 - DNA, 101 bp, Homo sapiens
tggatgtgcaccaggtgtacaagtaccccttcgagcaggtggtcgccagctttctccgaaaggaaattcacagtatggccaacagcaagatgcataccagg

SEQ ID NO: 276564 - DNA, 74 bp, Homo sapiens
agttgtccaatctgtagacaaacggtttcctcttactcgacccagtctttgtaaagaatgggaggcagctgtca

SEQ ID NO: 276565 - DNA, 100 bp, Homo sapiens
ctgtgagacatgtctgagactcctgctcagtgtagcattaagacctgcctagagctggaacgttacctccagagcgagccctgctatgtttcagcctcag

SEQ ID NO: 276566 - DNA, 100 bp, Homo sapiens
ggctcgcggcgtctccggggaaagccgtggccccgagggcggatccgaggaaacccttttccaaagagaaatgaagaagaaaactgtatgtaccctaaat

SEQ ID NO: 276567 - DNA, 100 bp, Homo sapiens
ggatgttgcagcagagccagcagctagcgcagggcagccactgatcacaatgtggataatacaacagaaatattcagggagtggttgaaaaatgtacaga

SEQ ID NO: 276568 - DNA, 98 bp, Homo sapiens
tcagatcatccaagtggaggttcctacagagattcatatgagagttatggaccgagatctcactcagcagacagcagcagcccgggagcctgagctca

SEQ ID NO: 276569 - DNA, 82 bp, Homo sapiens
ctcccccaagtgcaaggggtgcttcaaggccattgtggcagaccggcatgggctgcaggagccgcggcgggtggaggagctg

SEQ ID NO: 276570 - DNA, 98 bp, Homo sapiens
cggctgcagtcggggcggcagctgaggcggaggctgacgaggaggcggatcccccggcgtcaggccgaatccgggtgcatggtattggcgggggccac

SEQ ID NO: 276571 - DNA, 101 bp, Homo sapiens
gacattctcctttgccatccctttgattgagaaacttcatggggaactgcaagacaggaagagaggccgtgcccctcagatgggaaccaacaaatgtgcca

SEQ ID NO: 276572 - DNA, 100 bp, Homo sapiens
ctcccaggagctccggagaggaaccctccgaaggtgacttcagaactggaggtgctggcaaaaccccgactctgggtggcggcttccacgtgaatctggg

SEQ ID NO: 276573 - DNA, 101 bp, Homo sapiens
gccttttggtaatgctgtttctgcttaagttggcaagacactccaagtttggcatgaaaggatcacctgctgttaccagctaccacccataacaagaccac

SEQ ID NO: 276574 - DNA, 97 bp, Homo sapiens
cgagatgtcatcttggcccaccaggcccacaaaatccacagcaccccccaggccaggaggaaagaatgggatgatgtgaactccatgtatctgtctt

SEQ ID NO: 276575 - DNA, 75 bp, Homo sapiens
gtacctgcagaaggtctctggagacatcttcagcaggctacgactggcaaagatgagggaggctgaagcggccca

SEQ ID NO: 276576 - DNA, 75 bp, Homo sapiens
gggacatctccagcaccctcatcgccctggccgacaagcacgcaaaagttcaccatgtctattctcaagatccat

SEQ ID NO: 276577 - DNA, 75 bp, Homo sapiens
gtacttcggacagcgtgagagagaaatttcttcaagaagcctaacaaaagtgcatttttatgtggagttatgaag

SEQ ID NO: 276578 - DNA, 83 bp, Homo sapiens
cttgattccagggcctgccctgctcctggtggcacccagtggcctgtactactggacccttgaacatctgtgaagaaatgact

SEQ ID NO: 276579 - DNA, 90 bp, Homo sapiens
aactacttcgtgtcctggcctcagctgggaggaatattgctgcccggctgagcaaaatatgctgtgaattccatcaagaagaaagtcaac

SEQ ID NO: 276580 - DNA, 80 bp, Homo sapiens
taaagcaaaaagatggccaagaactaagtaacgatctggatgcccaggaatcctgttcactggggagctctgggagttct

SEQ ID NO: 276581 - DNA, 110 bp, Homo sapiens
gcaggccccaatggcagccagtttggattttcactggacttccacaaggacagccatgggaggaggtcacaagccccaaagtggacgtgttcaatgctaacagcaacctc

SEQ ID NO: 276582 - DNA, 100 bp, Homo sapiens
ctcgttacctgcaggtattgggagatccacagctaagacgccaggacccactggaagcctagaaatgactccagcgggaggaagaagaggcctttgccag

SEQ ID NO: 276583 - DNA, 83 bp, Homo sapiens
tccagacatccaatcagagcattcaagggatggtgaaatggatgatagtcgaggggccagtgtcattcaaagatgtggctgtg

SEQ ID NO: 276584 - DNA, 75 bp, Homo sapiens
gtaattcttctgctgtaaatgtaggcttttgtttcgtttgtgccagaggtccagctgggagctccccgacctcca

SEQ ID NO: 276585 - DNA, 100 bp, Homo sapiens
cgatgtgcagtacgccgtgagcgtggccagccggccctgcaaccctgagccctctctctaccgcacgtcggcccggtacccactgatggtaatgctggcc

SEQ ID NO: 276586 - DNA, 100 bp, Homo sapiens
gaacagggctgacaacatttttccttttccgtttcctgttttccagcacccaacataacttgtaaggattccagtggcaatgaaacacattttactggga

SEQ ID NO: 276587 - DNA, 100 bp, Homo sapiens
attaagaagatcaatagactgtctacaccaatagcaggattgtaataaaagactagtggccttagtgcccatgcccagtgaccctccattcaatacccga

SEQ ID NO: 276588 - DNA, 100 bp, Homo sapiens
cgcagagacaggccgaggagacgcgggccttcgagcagctcatgaccgacctcaccctgtcgcgggaagcagaacatcagagagccatgcagagacgtgc

SEQ ID NO: 276589 - DNA, 115 bp, Homo sapiens
tggaccaacaaagtacagagatgccaagaacaggaaacggaccaatgtctgtgtgaaagacccctgacaaaagacaatcatcttctgggtacatttgatctgactggaattcctc

SEQ ID NO: 276590 - DNA, 95 bp, Homo sapiens
tatgcctgcttttatggagcatctgcaaagaaggttaaatcaggatggctggataaactctctcctcaaggaatcaaagaatcttcaggatggca

SEQ ID NO: 276591 - DNA, 75 bp, Homo sapiens
caacaacaacaaaagctcctcgatggaaccatttgatagtgacaaggattgaaattatcaacgcctgatgactgt

SEQ ID NO: 276592 - DNA, 88 bp, Homo sapiens
caagatcaaggttccgacgcagatcatctgggggaaacaagaccagccctcttgacttactgtaggtgtgatcagcactggaaaagat

SEQ ID NO: 276593 - DNA, 75 bp, Homo sapiens
cgaacttctgggagaggaccccctggccgctgggtccaggtggacattgcatctgggatggccattgaagggatg

SEQ ID NO: 276594 - DNA, 96 bp, Homo sapiens
ttcttagaagcctttggcccctctatttacattccattgatgggaacttaccacatactcagcggagtttaagagagctgtgaaagtagcaacagg

SEQ ID NO: 276595 - DNA, 75 bp, Homo sapiens
cacggccactggccagaggtacttcctcaagttctttatagagttggaagcaagacatcagaataatatcttcat

SEQ ID NO: 276596 - DNA, 152 bp, Homo sapiens
cagggaacatttacggatgagaagtcaaaagcttcccaccacatttacccatattcttcctcacaagacgatgtttgatgatcttatggcggagaaggaagctgtatcttcaaaatgtgtcaatttggctaaagagaatcaagtttttcaac

SEQ ID NO: 276597 - DNA, 50 bp, Homo sapiens
gagtccggacatctgaaacttggtgactgaaaactcctgaggcatttcct

SEQ ID NO: 276598 - DNA, 99 bp, Homo sapiens
tgcatcagtgcccttgtggcgaatggggctcacgtcgagttatcaatactctggctgaccatcatcatcgtgggactgactttggtggaagtccttggt

SEQ ID NO: 276599 - DNA, 51 bp, Homo sapiens
ggaggaagaactggatcctagaatacaggttcttagactctgtgagtaaag

SEQ ID NO: 276600 - DNA, 113 bp, Homo sapiens
cgcgagcatgtgtcccgggcgctgtgcatccacactggacgcgagctgcgctgcaagacaatgcagatcttcgtgaagactctgactggtaagaccatcaccctcgaggttga

SEQ ID NO: 276601 - DNA, 82 bp, Homo sapiens
ctgctactggggctgctgaggctgcgaggaggaggaggaggaggagggagtgcatccgccccaacccttttccccctcgtct

SEQ ID NO: 276602 - DNA, 50 bp, Homo sapiens
ttgactatggtctctccggctaccaggtgggccatgcacagacacagctc

SEQ ID NO: 276603 - DNA, 98 bp, Homo sapiens
aggcgccgctctagcggccgggactctgaactatggcggcctccggtgtggctgtctctgatggtgtcatcaaggtgttcaacgacatgaaggtgcgt

SEQ ID NO: 276604 - DNA, 73 bp, Homo sapiens
aggattccaagtaactcttatttgcagacatggccgcttaccaacaagaagggcagatgcagcttccccgagc

SEQ ID NO: 276605 - DNA, 96 bp, Homo sapiens
atggaggctgatggggccggcgagcagatgagaccgctactcacccggtactatactggcaattgctggagaagattttgcaattgttgcttctga

SEQ ID NO: 276606 - DNA, 75 bp, Homo sapiens
ggaagatggcgcctgttgtgacagggtttcaagtgccccatttgctccaagtctgtggcttctgacgagatggaa

SEQ ID NO: 276607 - DNA, 75 bp, Homo sapiens
agcctcctgagtagctggcattacagagtaaatattatcagtgtcactaacaagggactactgcactccttcgac

SEQ ID NO: 276608 - DNA, 75 bp, Homo sapiens
aatggcagccatttatttgtcccgtggtatttctgggaaaagccagcttctgtttgcactggtcttcacaactcg

SEQ ID NO: 276609 - DNA, 101 bp, Homo sapiens
gctggaggagctccccagctggtggctggagcgaccccttgttctttggtggcgctgacctcccagtgccaagtgtataagcgtgtccagaattggtgggt

SEQ ID NO: 276610 - DNA, 74 bp, Homo sapiens
ccatcttcggcatgtccttcgcctgccagtcatagcctgggctggaagctcttctacgtcacaggctgcctgtt

SEQ ID NO: 276611 - DNA, 50 bp, Homo sapiens
aaaggcccaccagaggactcacacaggaggagcaccgaacagccagttcc

SEQ ID NO: 276612 - DNA, 87 bp, Homo sapiens
ccattccgacgttacaatggtggagttggcaggtgtgcgcaggccaatgtctgcagcggtttcatccccgtgtactgtgggctcatc

SEQ ID NO: 276613 - DNA, 82 bp, Homo sapiens
cgccgcgctgcgcatctccaacagcgacctgagcggccagaagcggactcctagaagaggggagcagcaaggatggaatgac

SEQ ID NO: 276614 - DNA, 100 bp, Homo sapiens
ggaaagcatgttaaaggctaccattatatcattgcaaacttgtttctctgcaggtggatattgttcccagccagggggagatcagcgttggagagtccaa

SEQ ID NO: 276615 - DNA, 114 bp, Homo sapiens
ctgagagggacgcagctgatgaatggaacatctatgtcttcccccaatgcatgtggaggcattgccctgatcctttcaggatcacacctcgacacccaacccctgaaccccaca

SEQ ID NO: 276616 - DNA, 83 bp, Homo sapiens
cacgacttgaagacacgcacttatcattcagtggacatatgtagagtgtgtcggtcagaaggaacacctgagaaaccgcttta

SEQ ID NO: 276617 - DNA, 100 bp, Homo sapiens
aggactgccagctggcgctgcagaccaagatcactccatggatgaaatgacagctgtggtgaaaattgaaaaaggagttggtggcaataatgggggcaat

SEQ ID NO: 276618 - DNA, 83 bp, Homo sapiens
gccaagtgcaggggccagaagacaaagtcaattccatgctgttcacggaagaccaggatgtagatgagggacttgtctatgac

SEQ ID NO: 276619 - DNA, 98 bp, Homo sapiens
aaagcctacagcaccaccagtattgccagcgtcgctggcatcatgacggtgatgtcagctctgtcggtggccccctccaaggcccgcgagtactccaa

SEQ ID NO: 276620 - DNA, 97 bp, Homo sapiens
gggcctgaccatcactcattaagaacagaggaggctgcctgttactcctggtgttgagctcaggccccggggcctccagcggcaccagcggagacca

SEQ ID NO: 276621 - DNA, 100 bp, Homo sapiens
gagcgggtagtgccagctacggtccgcggctggggttccctcctccgtttctgtatccccacgagggcctgggttccaataaataattgctacctcatgt

SEQ ID NO: 276622 - DNA, 100 bp, Homo sapiens
ccttgtgaagatcattaatgaagtaaagcccacagagatctacaaccttggagcccagagccacgtcaaagtggaaaacgaagctcattcccaacgtgca

SEQ ID NO: 276623 - DNA, 98 bp, Homo sapiens
ggtccggggcttgccctggtcttgctcggccgatgaagtgcagaggtttttttctggtcaaatgggaaaaatgtgttctcttcttctggaacttcatt

SEQ ID NO: 276624 - DNA, 92 bp, Homo sapiens
tactcctcccagtgacgggtctggagtgcgtgggggaccggctgttggcggatgaaggatttgggggcagagcacttggcaggtcatgaagg

SEQ ID NO: 276625 - DNA, 100 bp, Homo sapiens
taaagtgtttagttattgatgaagctcataaagctctcggaaactatgcttattgccagcttgccgggattgctgtccttgccattggactatggctccg

SEQ ID NO: 276626 - DNA, 74 bp, Homo sapiens
acaaagaagtgatgctggagaattacaggaatcttctctcattgggttgcccccaagtttcctggcagtgtgtg

SEQ ID NO: 276627 - DNA, 75 bp, Homo sapiens
ccagattgaagctattcctttggccttacaagatatttgtcaggatacgaatcaggttctcttcaagtgctgcca

SEQ ID NO: 276628 - DNA, 100 bp, Homo sapiens
tggaggggaggattttgaggacacttgtggagagctcgaattccagaatgatgaaattgtgagtcagtggatcggtggggaaaatgctgcttaccctggg

SEQ ID NO: 276629 - DNA, 82 bp, Homo sapiens
gtcgcgggccggccccgcggggagcgcccccggcgcgatgcccttcaggaaaggtaattttttctgcaggatgaattaagag

SEQ ID NO: 276630 - DNA, 75 bp, Homo sapiens
tctgcagcatgtgggcggaaccacaccttggccttgacgggaatgtaccaatatttgctgtgatgctaagacatg

SEQ ID NO: 276631 - DNA, 101 bp, Homo sapiens
cccggctaattggctgcgtgctcctcctggacctgcctcttctcgactttaagaagcgatgagagagatatttggagttcttacaacatggcagacattga

SEQ ID NO: 276632 - DNA, 127 bp, Homo sapiens
tgtaaaattgacagagaggggaaaccccgtaaagtggttggttgcagttgtgtagtagttaaggttccagcaacagatagaaatgctttaagttcactctggggaaagctggcctctgaaatcttaa

SEQ ID NO: 276633 - DNA, 100 bp, Homo sapiens
aaccccagccgaccttgagctccaggagttcgtctcttacgtctgcggaagtgcagctgcctcagttcttagcgcagctgcggttggatttctcacgatg

SEQ ID NO: 276634 - DNA, 82 bp, Homo sapiens
tgctcacctacggcgtctacctgggcctcatggcggtccgagcttcgttcgagaacaactgtgagatcggctgctttgccaa

SEQ ID NO: 276635 - DNA, 74 bp, Homo sapiens
gagcgtgaccgagagcgcgaatatcgtcatcgttagaaggatggaatgctggacagacatgagttcctgacctg

SEQ ID NO: 276636 - DNA, 97 bp, Homo sapiens
gggctgggtgtttgcaatacaaaggcggccacgcgcggcgccgctcggtaagaatgattgatgttggctgatattggagtgctcattcacatgaagt

SEQ ID NO: 276637 - DNA, 100 bp, Homo sapiens
cactacaacatctccccccaggatttggagactgtatttccccatggccttcctcctcgctttgtgatgcaggatgagtctgaatgtacttcagatgagg

SEQ ID NO: 276638 - DNA, 89 bp, Homo sapiens
gcgtgatcacggccagcgaggacaggagtggcagaagctcaactatgatatccataccctgcggcaggttcgaagggaagtaagaaaca

SEQ ID NO: 276639 - DNA, 75 bp, Homo sapiens
tgcaccgacctcgacgtcttgcctgtgtcccacttgttcgcggcctataggtcactatcatatgacaaaggcttt

SEQ ID NO: 276640 - DNA, 100 bp, Homo sapiens
tcaatgtcactgatgaggctgccttgaaggacattgtcgatgccctgggggacagaatcttcagcctggaaggacagtcattttgtttactcattcagcc

SEQ ID NO: 276641 - DNA, 73 bp, Homo sapiens
tgacatctgatgctgtggaacttgcaaatcgaagagctgttgcgcagccattggtacctgtattggggaaaca

SEQ ID NO: 276642 - DNA, 100 bp, Homo sapiens
gaaacaagtgcgacctctcagatattagcatttaaatcaaacggtattgagatggattgggttatgaaacataatggtccaaatgacgctagtgatggga

SEQ ID NO: 276643 - DNA, 100 bp, Homo sapiens
gcgtcccgctcgctgggagagaggtacctctccttttccctctccctttccctaagatgtccagctcgccgctgtccaagaaacgtcgcgtgtccgggcc

SEQ ID NO: 276644 - DNA, 82 bp, Homo sapiens
accaacattcccaacagccaccaccaccaccagatggtgatgtgtccaatctagatcccaacttctcatttgaaggcaccaa

SEQ ID NO: 276645 - DNA, 49 bp, Homo sapiens
aacgactaccaccgcagcgacgagcaggaacttgtaatagctggcatcg

SEQ ID NO: 276646 - DNA, 74 bp, Homo sapiens
gtccggccgtgtcccgaggaagtgcaagacccgacatgtcatgctgcccaaggacatagccaagctggtcccta

SEQ ID NO: 276647 - DNA, 100 bp, Homo sapiens
tgagaaacctggatctgcgatctgtttgtgggggtgacaggtgctttgacagttttgatgaaagatgcaataaaaccaaacctgatgcagaccctggaag

SEQ ID NO: 276648 - DNA, 51 bp, Homo sapiens
ggagtatctgcggcagcatgacaaggtgttccatgtacccctggaggagag

SEQ ID NO: 276649 - DNA, 75 bp, Homo sapiens
tgcagtgggaggacagccatctgcaaggaggtttccatgctgagctcctgcccatcttcagtcctgaactctctc

SEQ ID NO: 276650 - DNA, 114 bp, Homo sapiens
tctccatcacccaccaacaacaccacaataatccacagccaagcctagtgtgttaattgtaacctacaaggagcctgcaaaatcatctactcagtttggatcctacaagcaagc

SEQ ID NO: 276651 - DNA, 100 bp, Homo sapiens
aacaagtcccggctccggaagatgaaggtctcggcgcggaagatggccggcggcgtggacggccccatcgggatcccgttccccgaccacagcagcgaca

SEQ ID NO: 276652 - DNA, 100 bp, Homo sapiens
cggaaaggatgttggcggtccctgtgacctgtggagacacggccagatctgccctccactccagcggcgccatgagcaaatgaaaaagaatttggaagca

SEQ ID NO: 276653 - DNA, 75 bp, Homo sapiens
cctcccaaagcgctgggattacagaggagcccaaggtgggcatcaagaccatcaaggtgtactgccagcgcatgc

SEQ ID NO: 276654 - DNA, 90 bp, Homo sapiens
tggataacactgtacaagctttcaaagtcaatgtctaccctgaactgcagatcaccaatgtggtagaagccaaccaaccagtgaccatcc

SEQ ID NO: 276655 - DNA, 90 bp, Homo sapiens
caaagatctcgtacaagatccttctttatttggagcaagaggtggtggtggccttcccccgaagaaatttggtaatcctggggagcgttt

SEQ ID NO: 276656 - DNA, 73 bp, Homo sapiens
tggccagtcactggctgcacctccacagtttcctcctagaccgacttctgcagtacgagaacgtggatgaaga

SEQ ID NO: 276657 - DNA, 100 bp, Homo sapiens
cgccgggcccgggggtggtgacagcaggtctgagggaatcatcgcagaagagaacaagaacctgcagccccagggagacgaggaccccgggaagttcaag

SEQ ID NO: 276658 - DNA, 73 bp, Homo sapiens
tttattcttggggcctggtgcagagtgttctgccagttctggataatccactgtccaagaaggttcgaggcct

SEQ ID NO: 276659 - DNA, 130 bp, Homo sapiens
caactgactgcttgctttcaccaggaatagggacctttttctgaatttcctgccctcagcccctgcctgacttctcacgagtccctggtctgacattgcccagtggagccttctcagactgcttgaccat

SEQ ID NO: 276660 - DNA, 89 bp, Homo sapiens
cgctcatgatcgacttcctcacccgcgcctgcgacctcgccaagaagacctgtgcagacagtgacttcacctgtgacaacggccactgc

SEQ ID NO: 276661 - DNA, 100 bp, Homo sapiens
taaacttattggtgtccactgtacccatggtttaaacaggactggctacctcatttgcagcctgagcggtgcatccccgttcctgggcgagaccaagcag

SEQ ID NO: 276662 - DNA, 95 bp, Homo sapiens
aggatgattatttcagaaactggaatcccaacaagccctttgaccaagatggtatacctcaagtttactatttcggcccttgtggtaaatacaat

SEQ ID NO: 276663 - DNA, 100 bp, Homo sapiens
ctccaccttaggagaagggagaatgggtaccacagaccatgtcatcgtcctggcgtccacgaaccgagctgacattttggacggtgctctgatgaggcca

SEQ ID NO: 276664 - DNA, 76 bp, Homo sapiens
tgataccaggggcagagggaccactctgacaggtgttagaggagtccaaatgcctcgtgcggagcttcctgaaatc

SEQ ID NO: 276665 - DNA, 98 bp, Homo sapiens
agatccactagaaattaacccagaatcttagcctctcagtggcctatcggtcagacacattctatgtgaaaaacatggcaaaatcatggaagccatgg

SEQ ID NO: 276666 - DNA, 120 bp, Homo sapiens
ggaaccgctctcgcttcgtcctacacttgcgcaaatgtctccgggatatcatgataacacattttgaaccttccatctcctttgagggcctttgcaatgaggttcgagacatgtgttctt

SEQ ID NO: 276667 - DNA, 99 bp, Homo sapiens
ggccgtggacacctgtgtcagcatgtgggacctggttctctccatcgccttgtctgtggggtgcactgagccttgcttcctgttttacatcacaaatct

SEQ ID NO: 276668 - DNA, 100 bp, Homo sapiens
aaaagtttcttcgatgggatttggaaaggatgtcagaggcatttgggcagtccttctccatccaccggaaggttgctgaagatggagagactcgggagga

SEQ ID NO: 276669 - DNA, 98 bp, Homo sapiens
tgggagcgacgcggggcgggccctgggggtcctcagcgtggtctgcctgctgcactgctttgctgaatatctgtattctacacctgaacagctttcaa

SEQ ID NO: 276670 - DNA, 82 bp, Homo sapiens
agaggagaggcgcccccggggacgctgaactatgtgctcttcagggcgggcaccgtgttgcattcatctttgtacccccagc

SEQ ID NO: 276671 - DNA, 103 bp, Homo sapiens
gctggcgcttcctgcgcatcgtctgcaagaccgcgaggcgagacctcttgtgctggagaatctggtaaaagcaccattgtgaagcagatgaggatcctgcatg

SEQ ID NO: 276672 - DNA, 83 bp, Homo sapiens
cccagaaccatgtgccgagcccgctgcttttggagacacgcttcacatacactacacgcacaaacacagagcagtctaaagca

SEQ ID NO: 276673 - DNA, 75 bp, Homo sapiens
ccgagagcgcgaatatcgtcatcgttagaagaccagatgatgtgcttctgcatcgcactcatgatgagattgtcc

SEQ ID NO: 276674 - DNA, 88 bp, Homo sapiens
ccaggtgcaccaacctttgaaacagccctcggcaaaaccatgaggaagaattaaacaaccaccatgtcgagcaaaaaggcaaagacca

SEQ ID NO: 276675 - DNA, 98 bp, Homo sapiens
gcctacacctgccgagcgtacagcattcagggggaggctgtccacacgactcacctgcttgtccaaggttccgaggtgacctgcggtggatcctcttc

SEQ ID NO: 276676 - DNA, 100 bp, Homo sapiens
aattagcccaacctgttcttgcaaacaagcagatatttgtgtgaatgcagtaatagtggccttgtcttcaaaatcatgggatgtagagactgcaacagaa

SEQ ID NO: 276677 - DNA, 82 bp, Homo sapiens
tgaaatccagtttgacgatattggagatgatgatgaagacattgatgatgtcagtactcctgcatttgtaccaacgaaaact

SEQ ID NO: 276678 - DNA, 80 bp, Homo sapiens
ccctcgcctcccggccgagctgacgcctcccgcgacgatgcccctcaacgttagcttcaccaacaggaactatgacctcg

SEQ ID NO: 276679 - DNA, 100 bp, Homo sapiens
gctttgtgaaatggccccgctatatcaggatttaaaaactggaacggtgaaggtgacagcagtcggttggagcgagcatcccccaaagttcacaatgtgg

SEQ ID NO: 276680 - DNA, 100 bp, Homo sapiens
gcaagatgcggaggctgcctcggcggagcagaggaaccacacgctgatcatggagtggagtcaacatatcaatggagcaagtcacagtcgtcgatgccag

SEQ ID NO: 276681 - DNA, 88 bp, Homo sapiens
gagccaacaaaaattgttttttctacctgttgacgtgtcaagcactaactgaattacatgaacgacagccttcgcaccgacgtcttcg

SEQ ID NO: 276682 - DNA, 95 bp, Homo sapiens
ctgtctttaaaagatgaggtgacttggtgattttcctggaaaattataggaatgggtaccacagaccatgtcatcgtcctggcgtccacgaaccg

SEQ ID NO: 276683 - DNA, 97 bp, Homo sapiens
ggcctcgctcaactccggcttcacgcggctcggcaccgacctgtagctacagcaagctgggtagcaggcagatccaaaggatatcatgaagtttcca

SEQ ID NO: 276684 - DNA, 75 bp, Homo sapiens
tcttgaccatgtgacatctgatgctgtggaacttgcaaatcgaagttttctggatatgccgcagaaggatccgtg

SEQ ID NO: 276685 - DNA, 74 bp, Homo sapiens
tcatctccttttccatggcctgggcgaaccacgtcttcctcgggtgccggattgatctgaagttaaacaaaaaa

SEQ ID NO: 276686 - DNA, 90 bp, Homo sapiens
gagaaggatgacaccggagtttgacgaagaggtggtttttgagcaggacagctggcctgaagctcagagccggggcgtgcgccatggccc

SEQ ID NO: 276687 - DNA, 75 bp, Homo sapiens
ggtagatgctatagtcaatgccgaacatctgctcaaattaatgaccatgggggatatgaagaccccagactttga

SEQ ID NO: 276688 - DNA, 100 bp, Homo sapiens
tgaccaattcccttggtcaaagaagtgaccaaaaagtcatctacatttcaggtttcatcagtttcacccttttctgtgtgcggctgattttagaaagatt

SEQ ID NO: 276689 - DNA, 100 bp, Homo sapiens
ctggagtttgcattgtcttggctgttgagtgaagaaaaagagcaggaagtcattacatgtttgagttcatgatcgagtccatcctgtatgcccgggatgc

SEQ ID NO: 276690 - DNA, 100 bp, Homo sapiens
ccgtcgctatgagcgggaccaccctgggcacagcaggcatcggagggacatcttcatcaccagcgtggacgccgccacgaccttcgaggagctctgtgag

SEQ ID NO: 276691 - DNA, 95 bp, Homo sapiens
tgaagttcacgactactagaaggggaggggagtggaaaggctctcagtgaaaaaggtgtcctggggaagtgtcgctacgtttactatgggaaaaa

SEQ ID NO: 276692 - DNA, 50 bp, Homo sapiens
accaatagccatgatggactggatggtagatggggtttcgccatgttgcc

SEQ ID NO: 276693 - DNA, 98 bp, Homo sapiens
caattcctgtgtttggaccattgagcagcagattggaaaagtgaatggtgtgcatcacattaagagaaagcatgggattatggcaaccacagaatctc

SEQ ID NO: 276694 - DNA, 100 bp, Homo sapiens
cttcaaagcacctagtacctcctaccattgtcaactggtagcacaggcggagtgcagcggaggcccctgccgctgccgtcatgccgttcccgtttgggaa

SEQ ID NO: 276695 - DNA, 97 bp, Homo sapiens
gaggtctcatgtctgcttatgcggtggctcgctgctcagaacagggacctacaagaacagtgaggagcttcggtctcgtattgtgtctggaatcatc

SEQ ID NO: 276696 - DNA, 100 bp, Homo sapiens
tgttagtgggagatccttgttgccgtcccttcgcctccttcaccgccgcagaccccttcaagttctagtcatgatggcaggagagctggctgacaaaaag

SEQ ID NO: 276697 - DNA, 75 bp, Homo sapiens
cgcagtatcatgctggccaagaagatcatcattaaggacggaggcacgaaatgagccgtcagactgctacagcat

SEQ ID NO: 276698 - DNA, 74 bp, Homo sapiens
tttgacgacactgatggtttgggcgctattttcttggaaggtgttactgttaaaggtgtaactcaagtaacaac

SEQ ID NO: 276699 - DNA, 82 bp, Homo sapiens
agacaggaggcagtagccaaacacccagattccagatgacctgaggaagagactaaatatagaaatgcatgccgtagtcagg

SEQ ID NO: 276700 - DNA, 83 bp, Homo sapiens
actctgtgctagtgatgtgagcaaatgcctcattcaggaagcttattttcgatacatggcagaaaacccaactgctggtgtgg

SEQ ID NO: 276701 - DNA, 145 bp, Homo sapiens
gcccagatattacactgtcaaaactttacaagttaattgaagagtcttgtccacagctggcaaattcagtgcagatcaggagacagtgtttcacaaaatgattttccttctgaagctcccatctccttgaatctttctcataaca

SEQ ID NO: 276702 - DNA, 78 bp, Homo sapiens
gtggagatcgtcccgcgcctgccggaggcatacacggaatacctgaggagcatccactatatctcccaggtgttacta

SEQ ID NO: 276703 - DNA, 100 bp, Homo sapiens
ccctgactaaagcttgaaatgctacatttccaagagcatgaataatctttcatttagtgagctatgttgcctcttctgctgtccaccttgtccagggaag

SEQ ID NO: 276704 - DNA, 74 bp, Homo sapiens
cttctgtcggttggtcctggagcggcgcagccggagtggggccgtgagtgattacagtggcgagatcttgaaca

SEQ ID NO: 276705 - DNA, 74 bp, Homo sapiens
aaaaccagtcatgaccactagacccacagctgttaaagcaacagccatcgacgagtacaagccccaggatgcta

SEQ ID NO: 276706 - DNA, 75 bp, Homo sapiens
cgccttcccacctagctctcctctctttgcagagccatacaaagtttactatactggcaattgctggagaagatt

SEQ ID NO: 276707 - DNA, 90 bp, Homo sapiens
gccggcggtacgggggtggtgccgcgctcctggccccgcgcgggcggacggcggaggcgcctcccagaaactcccacgttaacccacgaa

SEQ ID NO: 276708 - DNA, 90 bp, Homo sapiens
gttcagcccactactctgaaccaggcacgtgtggttctcaaatataggcattctgatgggaacttgtgtgttaaagtaacagatgattta

SEQ ID NO: 276709 - DNA, 90 bp, Homo sapiens
ctcgccctggtcttcgggctgtcgctcgtctacttcctcagcagcaccttcaagcaggatatgttcaaggaatgagtgatttactttccc

SEQ ID NO: 276710 - DNA, 90 bp, Homo sapiens
cggaagtccagcagctgctacacaacaagttcgtggtcatcttgggggactccaatgctgtgggccctgagggaaaggatcacagaggcg

SEQ ID NO: 276711 - DNA, 75 bp, Homo sapiens
gaaagaattcatcacactgtgtctcttaaccttcattaactgtgcctatgtcaaatggggaaccctggtacaaga

SEQ ID NO: 276712 - DNA, 90 bp, Homo sapiens
agagcgaggcctgagcctctgcgtctaggtggattcaccaatgaacttgaagcatcctcatgacctagtcatattaatgagacaagaagc

SEQ ID NO: 276713 - DNA, 100 bp, Homo sapiens
caaggcccgtggcgaggggagaggagctgaaggggccgtgggggatcaggtccttggatgtggctgtgttgcccaagctattctcagtcgaggacgtttt

SEQ ID NO: 276714 - DNA, 100 bp, Homo sapiens
gaagagcatatcaatgcaggacgtacagttcaggcctcccatgtgagtgcagccagctgcgcaaggccatcggggagatggacaaccaggtctctcagct

SEQ ID NO: 276715 - DNA, 75 bp, Homo sapiens
ctgggttcgttttattcagcggcagtggtgctttcccgaatctcagaatgccgtgtgaagatgccttaagaaaaa

SEQ ID NO: 276716 - DNA, 100 bp, Homo sapiens
aagtttgatactgttgaagacttttgggcccatgagaagccgatccattggtgaatgtgctctgccatcggcctatatacgcagtgctaaaagtgctcct

SEQ ID NO: 276717 - DNA, 100 bp, Homo sapiens
ggcaacagatgtatgctcatcagtattatatgcagtagagcatctttccttgaagaagtacattattgacattgtggttgaaagtacagctccagcagaa

SEQ ID NO: 276718 - DNA, 121 bp, Homo sapiens
agggacgtgatgttggagaactacaggaacctgctttctctcgatgaggataacatccctccagaagatgataattttccccagatggcccatcagaagcggttcatcgaacggaagtaca

SEQ ID NO: 276719 - DNA, 100 bp, Homo sapiens
ctactttgagaccagtgccaaggaggccatcaacgtggagcaggcgttccagacgattgcacggaatgcacttaagcagagacggggtcttgctctgtca

SEQ ID NO: 276720 - DNA, 142 bp, Homo sapiens
aagaccattgcttttctgttgcccatgtttagacacatcatggatcagaggtcattagaggaaggagaggggccaatagtatctggagtccatctttcaccatcttctcctgagattgtactggaccgtgaccactcttctt

SEQ ID NO: 276721 - DNA, 90 bp, Homo sapiens
ggtggaagccatcgagatcgactgttacaacagcctggcagacttaattcagtgcacaaatgagatgaatgtgaacatcccacagttggc

SEQ ID NO: 276722 - DNA, 90 bp, Homo sapiens
tggagcttggtttcgggatctcggtgctgcagacggcgagacctcctgcacagccctgggcgctgcctatggcacagccaagagcggtac

SEQ ID NO: 276723 - DNA, 96 bp, Homo sapiens
ggagaaaaactggatgttggtagaaaaagcaagagtttgttatatagcaagagtgaatctgtccttcgattttccattttatggccacttcctacg

SEQ ID NO: 276724 - DNA, 112 bp, Homo sapiens
catctatcgtaatccccaaaacagtgcacagacggctgacggctcacactgtgctggagaatctggtaaaagcaccattgtgaagcagatgaggatcctgcatgttaatggg

SEQ ID NO: 276725 - DNA, 90 bp, Homo sapiens
tgggaagtaaagaagatcaacaacgctcacaccgtggatattccatctattataaccaagaaactattaaaagcagcaatgaagcatata

SEQ ID NO: 276726 - DNA, 100 bp, Homo sapiens
aaaacagcagatttcccaagagcagcggaaaatgatccagtcacaggatcccattgaagataccacgctgcatgtgtccttagtagtcatgtctccttag

SEQ ID NO: 276727 - DNA, 82 bp, Homo sapiens
aattttttagaaccaaagaactaattgcagagaattctaccaaatatctggctgggtagctgccctcgtcaggtggaacatg

SEQ ID NO: 276728 - DNA, 75 bp, Homo sapiens
caagcaacagtagtcgctgttggatcgggttctaaaggaaaggtgttccatgtacccctggaggagagaaaatac

SEQ ID NO: 276729 - DNA, 90 bp, Homo sapiens
catctcagactgctgggatagcatttttcacaacaactgatttatgacctgtgtgttgatgccttgagtccaaccttctattttctcctg

SEQ ID NO: 276730 - DNA, 75 bp, Homo sapiens
ccaaaacgctggggccaagtcagcgaggcctacgtgagcctcctaggcgaggcggctttgcacaaggtggacatt

SEQ ID NO: 276731 - DNA, 83 bp, Homo sapiens
acaaagctgttcttttcaaaatggcatttcttgagacttaaagtggcattctaaaggcaatttaaaaatcatgtcaagctcag

SEQ ID NO: 276732 - DNA, 90 bp, Homo sapiens
aacaagactggggctgctcccatcattgatgtggtgcgatcgcgccacgatcatgtctctcgaagactttgagcagcgcttgaatcaggc

SEQ ID NO: 276733 - DNA, 90 bp, Homo sapiens
cgccgggagtgtgcggaggtggccccgcaggtggcgggggagccggctgcagctgataaattctaatgaacccggagtgatcatgtttaa

SEQ ID NO: 276734 - DNA, 95 bp, Homo sapiens
ccggggagcgccgccgccgcctcgatggggttgttatggagttgatggagagagtgactctattatgagttcagcttctgaaaactccactgaac

SEQ ID NO: 276735 - DNA, 82 bp, Homo sapiens
cagaggtgccgacatggggcttaagatgtcctgcctgaaaggttctgcggggagtgtctccagccctgcctgcaggtgccat

SEQ ID NO: 276736 - DNA, 129 bp, Homo sapiens
caagctttccagagaatgtttcagagaaagttacgtggagcgtgggcgtttcgcagactcctaagaaactgcctcattgggagccaggacttgtgatgatgatcttacagagcagcagttgagatcgac

SEQ ID NO: 276737 - DNA, 98 bp, Homo sapiens
tgagagctatgaccagggcaaggatcgtgatttggtaactgaagacactggtgtgagagactttagaagacagctttccatcgacactaggcccttta

SEQ ID NO: 276738 - DNA, 80 bp, Homo sapiens
gtcagagaatgaaacactcatcgcatggcatcttccttgacttgatgcacctgaagaaacctgggggctttgacatatcc

SEQ ID NO: 276739 - DNA, 100 bp, Homo sapiens
acacacggagctcagggaggcagcagtggcagtccatcgaggggaccaaactctccatcacccaggaggcggatttccctgactgaagaccatgttgcag

SEQ ID NO: 276740 - DNA, 90 bp, Homo sapiens
cggaggtggcagccatctccttctcgtgacctgtgtaattatgcagaagaatggagctggattacacacagcaagttcctgcttctggga

SEQ ID NO: 276741 - DNA, 82 bp, Homo sapiens
caaaatgcaaaaaaggaggccaaagactttgtaccccctgtaccggctgggtggcccacaacttcgggtgttccgaaccaac

SEQ ID NO: 276742 - DNA, 100 bp, Homo sapiens
gagaggagttttctggaagaggcaattccccaatatctcaaagaattactaaaggacttgatatgcctcttcatgttcgacgcagtagtgacccagctct

SEQ ID NO: 276743 - DNA, 82 bp, Homo sapiens
agcaaaggcaagaaggcaacgacgttccatctgtggaaggacctaccaaccagttcccatggagaatgttgcaacaattgct

SEQ ID NO: 276744 - DNA, 89 bp, Homo sapiens
agcaaggtgggcccggacggcacaccctacgttaccgtgctcaagggggatatgagactttctactcggaatatcctgagtgttgcgtg

SEQ ID NO: 276745 - DNA, 100 bp, Homo sapiens
ccctggaaacatgcaggcaagcaggacttccgggaggaccaggatgctgccttcttcaagggtgtccgcaatgttgccagtgtctgtctgcagattggct

SEQ ID NO: 276746 - DNA, 82 bp, Homo sapiens
gacgctggcaacgcattcaagaaagccgacccccaagtttctctgcaggtggatattgttcccagccagggggagatcagcg

SEQ ID NO: 276747 - DNA, 100 bp, Homo sapiens
cagcggaaacgcactttgggtttgagactgtgtcggaagaggagaaggggggcaaaggtcctggacccaagccagaagcctctgcaaagcttccttccag

SEQ ID NO: 276748 - DNA, 100 bp, Homo sapiens
attggtgtctgtgggctctttgctgggcagatggagacgagagatctggacttctgaacatctaccggaaaagataaaatgtgcaagcccttcagaacgc

SEQ ID NO: 276749 - DNA, 82 bp, Homo sapiens
cggctctcgtcagcctcccgccggccgtctccttaacaccgaacaccggttatgtaccgaaggactctaccgtgtcagcggg

SEQ ID NO: 276750 - DNA, 100 bp, Homo sapiens
ggacagttcacagatgcagacgatggaaagacttacgacactatcaacccaacagatggatctgagtatgtctacgaagatgtcgatgggcagacagaag

SEQ ID NO: 276751 - DNA, 95 bp, Homo sapiens
caacctggatggagagaccaacctgaagcggcggcaggtggtccgcggcttctcggagcttcaagccagggctgagcaggaagaagaattcatta

SEQ ID NO: 276752 - DNA, 82 bp, Homo sapiens
gagtgctgatcaactaaaagaggcccagcagtgagaaactttcacaatctgtaatagatggtgtgactgttctaggaggtca

SEQ ID NO: 276753 - DNA, 75 bp, Homo sapiens
cgtgaggtgagagagtccgggagcccgagcttgaggtcgtccacactggtgagaaaccctactgctgcctggtct

SEQ ID NO: 276754 - DNA, 88 bp, Homo sapiens
tcgtggaagcaggactgcgccgcgtcttcctcaagaaatcatgaccaccccaggaaaagagaactttcgcctgaaaagttacaagaac

SEQ ID NO: 276755 - DNA, 87 bp, Homo sapiens
agcagccgccgccgcagcgcgaacatggacgccgtcaacgccttcaaccaggagttttcaaacctcagccaaccccggaagaacctt

SEQ ID NO: 276756 - DNA, 90 bp, Homo sapiens
aggagaagaaagcggagttcgagcggcagcgaaaaatacgactaaatacgttgaacaagtgtgcctcaatgaaacttgatgtgaacttcc

SEQ ID NO: 276757 - DNA, 100 bp, Homo sapiens
ggcagagaggaacatagctttgcgttcaagtttagagtggaattcgtgtgttgtacagacccttaagatcccagatgcagtgactggttactacctgaac

SEQ ID NO: 276758 - DNA, 100 bp, Homo sapiens
aacctctagacaaagtaaccaaatctccagccagtttcttcctgaacgcgcctcagcgattttaaatcgtatgcagaatattcaatttgaagcagtggtt

SEQ ID NO: 276759 - DNA, 75 bp, Homo sapiens
tgactggctaccagactctgaaaaacctaagtcctttaggtcatcatcagatttgaaatatttaaagtggataca

SEQ ID NO: 276760 - DNA, 98 bp, Homo sapiens
tggatgcctttcggcgcgccgccgcccggcgccgcgggactgggagaccggcgcaaatctgtccaaggctgcctggggagcattggagaagaatggca

SEQ ID NO: 276761 - DNA, 82 bp, Homo sapiens
gtgacatggaaggggcagtacaagcttacgtctctgctcttcagtacaatcctggagaaactctggaaaccttgacaatggc

SEQ ID NO: 276762 - DNA, 83 bp, Homo sapiens
atcgagaaaaccatctccaaagccaaagggcagcacccatgtttttcgtgtaaagtgtctggtaaagatgtgaagcgttgttc

SEQ ID NO: 276763 - DNA, 51 bp, Homo sapiens
ggcagctatgtgtcttggattggctcacagtttggctgtagcagcaattcc

SEQ ID NO: 276764 - DNA, 100 bp, Homo sapiens
agacaaaacacatttctacccaagtttaaatgacctgctatgcccacagagcttgatccagaagtgcacagacagagcctgcagccaatgccccaggagc

SEQ ID NO: 276765 - DNA, 83 bp, Homo sapiens
gcaagcacaagtacccagagcagccgggaagggggatatgagactttctactcggaatatcctgagtgttgcgtggatgtaaa

SEQ ID NO: 276766 - DNA, 98 bp, Homo sapiens
tgaaaaggaaacgcctactaacgtgaggcagttcctgccgccttccaggcagagttcccgctctcttctttaccgatttgttacaactcaagcaaggg

SEQ ID NO: 276767 - DNA, 83 bp, Homo sapiens
gtgtccttcaggagatctgtgatgaggttggtcaaagaaaaagtgatgtatgaaaaagaggcaaaacaacaagaagaaaagat

SEQ ID NO: 276768 - DNA, 98 bp, Homo sapiens
tgagatagccgtcctgagaaacatgatgccttcttctgtagagtgggcgctttgcagaatacgtgttgaatgaaatcactgatctaggaaaagtaaaa

SEQ ID NO: 276769 - DNA, 80 bp, Homo sapiens
gctgtggggagatttcagtgcattgcctcccctgggtgctcttcatcttgggttgctatcaagatcatagataagaccca

SEQ ID NO: 276770 - DNA, 100 bp, Homo sapiens
gatgccttacacgaattacacatttgatttcaaggaaacccagcgtttgctggcagaaccagttcctggcatcaaagccgaaccagatgagagcaacgcc

SEQ ID NO: 276771 - DNA, 98 bp, Homo sapiens
aagcggaggagcctggcggccaccccctcttcctcacttccctgtactctcatcgctctcggcctccgacacgtgcaaggatgatgctgaaaggaata

SEQ ID NO: 276772 - DNA, 100 bp, Homo sapiens
ggggagtcgcagagtttggaagatctctctaacacctctcggccaagtatatttgcttacttaaactaccatgttcctcgaacgagacgagaaatcctgg

SEQ ID NO: 276773 - DNA, 87 bp, Homo sapiens
ggtctccggggccgctggattctgaggaccagcagatggccagtcacgagaacccagcttcgagagcatgcagaggctctgcgacaa

SEQ ID NO: 276774 - DNA, 75 bp, Homo sapiens
agttacacctccagagccaaaagtacagtcccagctatctgacttcatgtgaaagatggctaatgcagaagtgag

SEQ ID NO: 276775 - DNA, 136 bp, Homo sapiens
ctgccagtatgtggtgggccgcgagcgcactgagctggcccgccagctgaacctctccgagacccagtttggcttcattaactatgaagtaggagatagcaagaagctctttttccatgtgaaagaagttcaggat

SEQ ID NO: 276776 - DNA, 88 bp, Homo sapiens
cgggttattcgagtgaccgagaccgcggccgggaccgaggggttagctgagttggcacatcgagaatatcaggcaggagattttgagg

SEQ ID NO: 276777 - DNA, 100 bp, Homo sapiens
agagagggcttggtggatgacaaggaggcctgagtagaccgcagtactactataattccttgacccagcagtacctttactgggatggggaaaaagagac

SEQ ID NO: 276778 - DNA, 75 bp, Homo sapiens
gcaggttccggcccctcttttctcaacccagagcaaattgaaacgtccggcttcgcctcaacagcatcaagaagc

SEQ ID NO: 276779 - DNA, 82 bp, Homo sapiens
gcggcagagataccgcgatatttgggagcggccccgagacgcgcctggcgcgggtgctggagaatctggtaaaagcaccatt

SEQ ID NO: 276780 - DNA, 74 bp, Homo sapiens
gtgattgcagcattaaattcccgaactggggagatctgttctgccgatgatgagaggatcttgaggttcttgga

SEQ ID NO: 276781 - DNA, 100 bp, Homo sapiens
ctgatgagggaggtgcccctgcgttgtaccatccgcctgtgggacacctaccaggtttgacatctacaggaaggtgcccaaggaccttacgcagccaacg

SEQ ID NO: 276782 - DNA, 82 bp, Homo sapiens
tggggctggtgcaactttcagaagtggtcccagatctttccagttggaagactctcaggactgcagcagagattttgtggag

SEQ ID NO: 276783 - DNA, 75 bp, Homo sapiens
ttcatcgtctccatcctctacctcaagtatgagccaggattactacagcatcccatttcccacacccactactcc

SEQ ID NO: 276784 - DNA, 96 bp, Homo sapiens
aagacatgaatggattcccagtcaagaaatgctcagccttccaattttttaagaagcggggagcatttagtgggtggaaggttattttacatgtgg

SEQ ID NO: 276785 - DNA, 74 bp, Homo sapiens
gaaatctgaaaaatttcaattccaatcgacgcgtgaccaaaaccaaagacggccatgaagtgagatcgtgcaaa

SEQ ID NO: 276786 - DNA, 95 bp, Homo sapiens
ctggagtccgcgcctccctggaatgacagcccatatcaaggcggtgtattctttttgacaattcattttcctacagactaccccttcaaaccacc

SEQ ID NO: 276787 - DNA, 74 bp, Homo sapiens
ggatattcattgcatggtctccagatcattctcatgttgttgaagattggaaattcatagcccaggttcttgat

SEQ ID NO: 276788 - DNA, 137 bp, Homo sapiens
tggaggccaaggtggatgccctgaatgatgagatcaacttcctcaggaccctcaatgagacgatgtatgtccctgggaagctgcatgatgtggaacacgtgctcatcgatgtgggaactgggtactatgtagagaag

SEQ ID NO: 276789 - DNA, 98 bp, Homo sapiens
cagggcaccaactatgaagactctcagggcgcgatttaagaagacagaggcaccgcacgtggtattgttgtctacactggggatcgcactgtgatggg

SEQ ID NO: 276790 - DNA, 50 bp, Homo sapiens
tcgagggcattcagctaccacagaatgtgaggaaattatcaggaaaggag

SEQ ID NO: 276791 - DNA, 91 bp, Homo sapiens
cggaagctggtggaacagctacgcatagaagccgggattgagcgcatcaaggaatactcccccagttgcaagaggcgcaggaccgtggaag

SEQ ID NO: 276792 - DNA, 75 bp, Homo sapiens
aatcctaaagcgtttcctcgcttgcattcagctcctctgtgtttgccgcctgggacatggatttgattgacatac

SEQ ID NO: 276793 - DNA, 74 bp, Homo sapiens
cgtgtccctgcagcgaaggatcctggtggggtcccggtcagtgggccctcagcctccgatccctggacaccggc

SEQ ID NO: 276794 - DNA, 83 bp, Homo sapiens
cgacgccaggagaccccaagctgcatcgccgagtgggtgtcgtgaaaactacccctaaaagccaaaatgggaaaggaaaagac

SEQ ID NO: 276795 - DNA, 80 bp, Homo sapiens
caaagccgaacagttttactgtggcgacactgaagggaaaaaggccgagcaggagctccgcgtggcccagacagagtttg

SEQ ID NO: 276796 - DNA, 98 bp, Homo sapiens
ctgccccagagaaagtcctcgctcgtcaccagcaagcttgcgggttacagaatgtctgaaggggacagtgtgggagaatccgtccatgggaaaccttc

SEQ ID NO: 276797 - DNA, 50 bp, Homo sapiens
gggaaaatggagcccttcaccaatgattatgtctactttgagaattcctc

SEQ ID NO: 276798 - DNA, 101 bp, Homo sapiens
gagcaccaaagagccttcctccaggattaagcctgatgcagaagtggttacactgactacggcaaggtcaacagcgacctcatttacattacagctaagaa

SEQ ID NO: 276799 - DNA, 100 bp, Homo sapiens
caggcctccgggcccggcgccgccgcccgcaggactcacaccacccggcaagaactgctcactacggctccctgccccagaagtcacacggccggaccca

SEQ ID NO: 276800 - DNA, 129 bp, Homo sapiens
tcgagcgctactcgcgcttttcgccgtcgccgctctccatcaaacaattcctggacttcgggctggttgatatgtgaagagccaacctgtcgcaatcgaactcgtcaccttccccttcaattctcccga

SEQ ID NO: 276801 - DNA, 90 bp, Homo sapiens
cagaagacagagggttttcttttgagcaggatgaagttaaaggaagtagatcgtacagccatgcaggcatggagccctgcccagaatcac

SEQ ID NO: 276802 - DNA, 97 bp, Homo sapiens
agccttccagctgccagggggcttaatgaactgcaaagtcatccgtccttggctcaggatttggagagcttgcaccaccaaaaatggcaaacatcac

SEQ ID NO: 276803 - DNA, 73 bp, Homo sapiens
tggcagctgagtattggagccaggagcctgccatgagtctatctggccgtgacatgataggcatcgctttcac

SEQ ID NO: 276804 - DNA, 50 bp, Homo sapiens
cgtcaatcagagcgtcctgtgcgattggagctggagtgagccttccagga

SEQ ID NO: 276805 - DNA, 51 bp, Homo sapiens
tttagaccctccacctaattgcagaataactgaagtgaagtgatggactcc

SEQ ID NO: 276806 - DNA, 99 bp, Homo sapiens
ataatatcaaggacatcaggacaccgggagtgggagagattggactgggagactcagcaggaatccttcaactgctttctaccaagcgttccatttgaa

SEQ ID NO: 276807 - DNA, 100 bp, Homo sapiens
gccagaagagttatcctatgaagttatcaacatacaagccacccagggaggagatatcaccaaacatgatggaacaggcggacagtccatttatggagac

SEQ ID NO: 276808 - DNA, 90 bp, Homo sapiens
gttctggactttgggcgtcccattgccatggtcctgggaactccaacaagggagcaaatcagagaaatgaacccaaactacacagaattt

SEQ ID NO: 276809 - DNA, 83 bp, Homo sapiens
ctgaggtccgcggcagggtcccgcatggcggcgcacaggaagcacggtacatgtcccagagcaagcacacggaggcccgggag

SEQ ID NO: 276810 - DNA, 100 bp, Homo sapiens
cagaggccctcatcaacgcgggagacttccacggcctgcagacgttgagaaagaagggccttaatggctgtgacagcccagaccccgatgcggacgattc

SEQ ID NO: 276811 - DNA, 100 bp, Homo sapiens
ttcagggcccagtccctcggacccatcgccgcttctagaccctactgcggtctcggatattgccgggaacagcgtttacattttctaaagcaacaggagc

SEQ ID NO: 276812 - DNA, 74 bp, Homo sapiens
tcaaggatcttcacacctggatttaggcctactcctgcaactaccccaggaggcgcttggaaaccaccgtcaat

SEQ ID NO: 276813 - DNA, 82 bp, Homo sapiens
tgcagcggaaccggacccagtccctgagccgcccctacacccacaggtgtggacactgccagcggctgcagccgacttggaa

SEQ ID NO: 276814 - DNA, 83 bp, Homo sapiens
cccttcaaagatgtgagagagaaaagtgagtttattctgaagagcatccagatggcttgttcaatcagtatatcagtcaacag

SEQ ID NO: 276815 - DNA, 119 bp, Homo sapiens
ctcccagcggcgcgtgagcggcactgatttgtccctggggcggcagcgcggacccgcccggagatgagggcggcaccttcctacttctgcccagccacagccctcccctcacagttgag

SEQ ID NO: 276816 - DNA, 90 bp, Homo sapiens
ctggtgtccacgtgatcattggggggcacgattctccctctcctagaggcgagctcccagctcctccagcagccgacaggaggcccgtca

SEQ ID NO: 276817 - DNA, 75 bp, Homo sapiens
agacctgtgggcacggacgcacgccactttttctctgctgatccagtttgatgatcttatggtggagaaggaagc

SEQ ID NO: 276818 - DNA, 84 bp, Homo sapiens
gaacagttaatcctcaatttaagcctgatctaacccctagaaacaggtaagaatgattgatgttggctgatattggagtgctca

SEQ ID NO: 276819 - DNA, 100 bp, Homo sapiens
cacaagtctctgaagccgtgcccgttcttcctggagggaaagtgccgctttaaggagaactgcaggactcaaatggatagtgaagtccaaaacggaaagc

SEQ ID NO: 276820 - DNA, 74 bp, Homo sapiens
gggctttaggctggaagcgccttagaggagccatttttccaggtttacccaaggtccagcctagcccctaggca

SEQ ID NO: 276821 - DNA, 75 bp, Homo sapiens
cgacagccccggcatcctttctggggagaagcagcgcatcagccgaggcgacattgactacagcaccgtgctcct

SEQ ID NO: 276822 - DNA, 100 bp, Homo sapiens
ttttcggatcatgtctggtggctccgcggattataacagtccacaagccctagccatgccgtggtagccaatgttcagcttgtcttgcatctaatgaagc

SEQ ID NO: 276823 - DNA, 74 bp, Homo sapiens
tgtacttacaaagtccatgctaacctactatgagggtcgagcagagatccctgcatgtcactgagtccaccatg

SEQ ID NO: 276824 - DNA, 50 bp, Homo sapiens
accgccaccagtccacggagggcatgaggaaggaagcagccaccctcgcc

SEQ ID NO: 276825 - DNA, 83 bp, Homo sapiens
cccggagcggcgcggaggccgggcgctgacggtaaagtcagtgataaatcttttgtttgctgcatatactggagatgtgtctg

SEQ ID NO: 276826 - DNA, 101 bp, Homo sapiens
ttttaagattccaggacctctgatggctgatttcatcttcaagaatttgcaccatcctgggattgtaaacctggaatgtatgtttgaaaccccagaacgag

SEQ ID NO: 276827 - DNA, 51 bp, Homo sapiens
cagcctgcttcctcttcatgttcatggggaaactggagcacccatcctaac

SEQ ID NO: 276828 - DNA, 96 bp, Homo sapiens
cctgacagctctgcggctcgggccctgaggcagaaataaaacgtcttcaagaagccaataaggcagctcggaaggaaagacagctgattcttaaac

SEQ ID NO: 276829 - DNA, 80 bp, Homo sapiens
tattccgatgatgatgaagaggaggaatctgaggagaatagtagagactctggctgtggaaaatctctgttctcacaaag

SEQ ID NO: 276830 - DNA, 100 bp, Homo sapiens
atcgtgtctggagcagtggagcccaaagacccctggagacatggaggtggacatctataccgtcaaggtggaagacctgaccttcacctccccgttctgc

SEQ ID NO: 276831 - DNA, 83 bp, Homo sapiens
cagaggcccctgaatgagtgattctggaagtgcagattcagctctggtttagaaggagaatgaagtttctagattagaagaca

SEQ ID NO: 276832 - DNA, 100 bp, Homo sapiens
gtggagcctcgctgggggaaatgacagcttggaccatgggcgcccgcggtctggacaagcgaggaagtttctttaagcacaaccagtgtctctgaagaag

SEQ ID NO: 276833 - DNA, 100 bp, Homo sapiens
ttcctcacttatcgctatgatgaccagagagaagaggtactcccttatagggactcgtaaagacatagagcatctggaaattaactgcctccattacact

SEQ ID NO: 276834 - DNA, 87 bp, Homo sapiens
cggcgcgtccagcgcagcccgacgttccgctgctgggaaatgcactcggtgatggaaagagagccactattctgaagaacacttggc

SEQ ID NO: 276835 - DNA, 133 bp, Homo sapiens
gtggaagaaaatcataccatatcagatgcctcgcagagcaccaggcccaccgtgaaagcagtgactcttcgagaagacagtgccaagaggttggagaggagggcacgccgcatctccgcatgtctgtcggatt

SEQ ID NO: 276836 - DNA, 88 bp, Homo sapiens
gaagttgaaccagctgtgggagaaggcccagcgattccagggtctccctccactgctgtagtaacccgggtccggggcctcggtggtg

SEQ ID NO: 276837 - DNA, 110 bp, Homo sapiens
ccgtggacaatgtgctctttgcccctattatggagaaaggtgttccctagctacaagcctatcgtggaattcatcgatgcacaattcgaggcctacctgcaggaagagct

SEQ ID NO: 276838 - DNA, 75 bp, Homo sapiens
agtagaagtcaataacagccaaactgagacacataatgttttctacattcgaatgcaggctcaaggaagcttgtt

SEQ ID NO: 276839 - DNA, 83 bp, Homo sapiens
gggacaatggtcaccgtctcttcagtttggtgccctggttgtcagatgttggaaagcagtaggacggaacatactcttcgtgg

SEQ ID NO: 276840 - DNA, 83 bp, Homo sapiens
cctactgcggtctcggatattgccggaatgcgatgctggtggcagagaaggcagctttgcaggggcagctgcagcacctggag

SEQ ID NO: 276841 - DNA, 100 bp, Homo sapiens
agtacaaagccgtgaagtcagaggcgaacgccactcagcttttgcggcacttggaggtatagacacgtgtggccgtttacgctgtaggatcctcattccc

SEQ ID NO: 276842 - DNA, 100 bp, Homo sapiens
ctcagcagcaacatccccaaacagcggcgtttcacggtggcacatacatgaatgatatggaacctagcaaagctgttccactgaatgcatctaagcaaga

SEQ ID NO: 276843 - DNA, 82 bp, Homo sapiens
ctgcgggcttagcaggaaagggtgcctaagggtgcaactggaaactgacttgaagattgagaaggaatggaggcagactttg

SEQ ID NO: 276844 - DNA, 100 bp, Homo sapiens
ggcccagcatctaactaacacggtttttattgacagagctctgatagttgttccttgtgcagaagaaacctccacagctgttgagaaaaaggagaaacct

SEQ ID NO: 276845 - DNA, 83 bp, Homo sapiens
gtttggaaagacccaggagaagccgcccaaagaactgcaaacggggattcagcgtccgatcctttggaacagggactcacgtg

SEQ ID NO: 276846 - DNA, 74 bp, Homo sapiens
gcttcttggtcagaccccgcatcaagaatatgcgatacattgccagctcagaagcggaatcagaaagccacacc

SEQ ID NO: 276847 - DNA, 49 bp, Homo sapiens
ctgccttatgggacagatcaatgaagtttagcaactgcaatggaaaaag

SEQ ID NO: 276848 - DNA, 100 bp, Homo sapiens
ggtgtgagtgtgaagatggtcctgatgggcaggagatggacccgccaaatccagaggaggtgaaaacgcctgaagaagtggatatcaaagtattgcagag

SEQ ID NO: 276849 - DNA, 100 bp, Homo sapiens
cctgatagaagttttgatgtggaatcagtaaagaaagaaatccagagaggaaggaagttgctcctctggtgcaagtgtggtagctattgacaacaaaatc

SEQ ID NO: 276850 - DNA, 98 bp, Homo sapiens
ctacctcgagttcccggggactgtccacctgggtgctggagaatctggtaaaagcaccattgtgaagcagatgaggatcctgcatgttaatgggttta

SEQ ID NO: 276851 - DNA, 96 bp, Homo sapiens
gcagccgggccggcccgaccccaccggccatacgaattaaacaaccaccatgtcgagcaaaaaggcaaagaccaagaccaccaagaagcgccctca

SEQ ID NO: 276852 - DNA, 100 bp, Homo sapiens
gagagttcttctcttacagtttgttacgggcagcttattcagctgattctgaatcatcttacactaccagacctgtgtagattagcacagacttgcaaac

SEQ ID NO: 276853 - DNA, 50 bp, Homo sapiens
gtccaggttccagcgcccggcggcccaggacgccaagagtgccgaggatg

SEQ ID NO: 276854 - DNA, 74 bp, Homo sapiens
cacgcgttgtctgtgtcggttttcaataacaagaacaccagagtcacagcggaaggagtttgcagagaagctgg

SEQ ID NO: 276855 - DNA, 100 bp, Homo sapiens
gtttgtcccagattttcagtctgataaccgacaagtaaatttttgtgaaacattgcagatgttagatggatttgggagaattttccaaactaagtggacg

SEQ ID NO: 276856 - DNA, 88 bp, Homo sapiens
tctaacgctgcctttgctttaaaacagtattacttgcgtgtgaaagaaaatgtctttatttaaagcccgtgattggtggtctactatt

SEQ ID NO: 276857 - DNA, 98 bp, Homo sapiens
atgtctgacagccctgtgtgacaccaagataagtaacgaggaggagggggccagtgggggagcagtccattcagacattgggagcagcagcagcagca

SEQ ID NO: 276858 - DNA, 134 bp, Homo sapiens
gtgcgttgcgttccaaggcatctgtgagcccgcggagtatacaccatgagcaaagctcaccctcccgagttgaaaaagctatgtggttgatgttgcagaatgatgagccggaggacttcgttatagctactggg

SEQ ID NO: 276859 - DNA, 101 bp, Homo sapiens
caaaagcgcagaccacagttacatgtatggagaatggctggtctcctactcccagatgcatccgtgtcaatgaacgggaccgggttcagaagaaaacgttc

SEQ ID NO: 276860 - DNA, 100 bp, Homo sapiens
cgtcactcttacttgtttggccactgggaaaccagagccttccatttcttggcgacacatctccccatcaggcggtcaagaagcagatcgagacggcggt

SEQ ID NO: 276861 - DNA, 80 bp, Homo sapiens
acatcccctgttggcatcatgtgagagtgaagacagtatttgccagctcattgcctgaagttcaagttcgacaagtggct

SEQ ID NO: 276862 - DNA, 90 bp, Homo sapiens
gcggaagtgcagctgcctcagttcttagcgcagcttcacctgaacctaaaatggtgagcgagagtcaccatgaggccctggcagccccgc

SEQ ID NO: 276863 - DNA, 96 bp, Homo sapiens
atggggtcaagtcctggctgaagccacggctgggacaggaagccacaggaagaaggaggggccggcgtcagtgacgtcagcgagaccgaggtgagc

SEQ ID NO: 276864 - DNA, 100 bp, Homo sapiens
ccccagacatggggaacgcggcgaccgccaagaaaggcagcgaggtggagagcgaaataagcgggttttgaaaacaaaaaaaagaaggagtggaagaggg

SEQ ID NO: 276865 - DNA, 75 bp, Homo sapiens
aggatgttcatgaagattcaataacagttgcatttgaaaacaagctacagatgcacatgttgaatggagctcttc

SEQ ID NO: 276866 - DNA, 98 bp, Homo sapiens
ccccagccccccgccccgccatgagccccccgctctgagggccccggcccctggatgcacagccccggcgctggcaggtgacagcagggacatgtctc

SEQ ID NO: 276867 - DNA, 75 bp, Homo sapiens
gacaacaccgttcccccagccgggctggcttgtaaacatataacataaaaatggcttccaaaagagctctggtca

SEQ ID NO: 276868 - DNA, 98 bp, Homo sapiens
tctgccagcaggtggtgcggaaagtggctggattggacaagcaggcaaagctgaggccaagaagcttgagagaagaaaaatttcagaaaaattgtctc

SEQ ID NO: 276869 - DNA, 51 bp, Homo sapiens
tatactttattgatcaacatccttcataggaggaacgatgatgaatgtcgg

SEQ ID NO: 276870 - DNA, 90 bp, Homo sapiens
ggaattttgaagtacaccgtggtgacattgtatcattggtatttggagcaagaggtggtggtggccttcccccgaagaaatttggtaatc

SEQ ID NO: 276871 - DNA, 75 bp, Homo sapiens
tttggaggatgggagaggccatggcaaagccacataaagaagatccctaatagtcatttctcaacaattatatag

SEQ ID NO: 276872 - DNA, 75 bp, Homo sapiens
tgatgattacgaaccttgtggaaaaaggaagatatttcaagggaactttaggattacaacctggagattcagccc

SEQ ID NO: 276873 - DNA, 82 bp, Homo sapiens
ggaagttccacgtcagtcagtctgacggtctcccacacattctccaactacccgcccggcgtccgctacatctggtttcagc

SEQ ID NO: 276874 - DNA, 98 bp, Homo sapiens
atcgccgcgtcgcctggcgcccggctccggcggacccttctccggcaggagtcacatgccataggaaaaaagcctgaaaattcagcagacatgattga

SEQ ID NO: 276875 - DNA, 88 bp, Homo sapiens
gggagttcagcttttagagcaggtgtatgatcttttggaggaggaggatgaatttgatagagagggatcatagacggtatttctatgt

SEQ ID NO: 276876 - DNA, 100 bp, Homo sapiens
acagaatgagaagctacaaacaagaaatgggaaaactcgaaacagattttttgcgctacaagtcagacctgatcggcatgaagggcataggatggctggc

SEQ ID NO: 276877 - DNA, 90 bp, Homo sapiens
cacgcagtccgacttggccttcttcaggttcccgcgggaccctgccagacttaattcagtgcacaaatgagatgaatgtgaacatcccac

SEQ ID NO: 276878 - DNA, 100 bp, Homo sapiens
agttcttacaacatggcagacattgacaactgttgtagcaaacagtgacgaatctcagcttctgacaccaggaaagatgagtcagcgccaaggaaaagaa

SEQ ID NO: 276879 - DNA, 100 bp, Homo sapiens
gagcatgacaagcgagaccctgtggtggcttattactgtgtggatgaggtcaccattgtcaacattttgaccaaccgcagcaatgcacagagacaggata

SEQ ID NO: 276880 - DNA, 90 bp, Homo sapiens
gttcgtgtttggttaaagagagacagtggacagtattggccaagcgtataccatgcaatgccttcattgcagtgtcgagatggctatgaa

SEQ ID NO: 276881 - DNA, 89 bp, Homo sapiens
ggagaggccgtgtagcgtcgccgttactccgaggagataccagtcggtagaggattcatgatgttgctatcaaaagttgagaaattgtc

SEQ ID NO: 276882 - DNA, 100 bp, Homo sapiens
cccagcccacctcatggccctcctgcagcacgtggccctgcagtttgagccaggacccctgaagccagctgaagatgagtggggtaaaaccccagacgcc

SEQ ID NO: 276883 - DNA, 75 bp, Homo sapiens
cagaagcgtcccgcgaggcccgcgccaaggtggaatatgtgatcaagtgtgacatgtcagctctgcagaagattc

SEQ ID NO: 276884 - DNA, 83 bp, Homo sapiens
aagcacctcgtgtcggccggatatgtccacgtgaacaggacaatgcagatcttcgtgaagactctgactggtaagaccatcac

SEQ ID NO: 276885 - DNA, 89 bp, Homo sapiens
gaaggctatgcactatacgcccagagttttccgtctgatgaaggttggccatttgcaaagtatcttggagcttgtggaagaatggtggc

SEQ ID NO: 276886 - DNA, 51 bp, Homo sapiens
ctcagaccagtctctgcaagagatcttgaaaatatttgtgcagccatttgg

SEQ ID NO: 276887 - DNA, 82 bp, Homo sapiens
ctttgacaagctcagccatgccagctctggtgcgcaaattgtggctactaatttgccccctgaagatcaagatggctctggg

SEQ ID NO: 276888 - DNA, 100 bp, Homo sapiens
cagagttggacctccaggccctgctggtaacccaggacccccaggtcccagcggttctccaggcaaggatgggcccccaggtcctgcgggtaacactggt

SEQ ID NO: 276889 - DNA, 76 bp, Homo sapiens
ggaatgtacacgataattaaagagtaaagttgtgctcaacggttctgatctacaatggccaactggacatcatcgt

SEQ ID NO: 276890 - DNA, 74 bp, Homo sapiens
attaaaaccagggctccacagttaggagtgagcagtgaagattcagaagattctgattttcaggaatcaggagt

SEQ ID NO: 276891 - DNA, 100 bp, Homo sapiens
tctaattgcacttaaacttgaagaacttattttagaagacacttctctctcaccgacactacaacaacaggagtgcaaacttctctacagccgaaaagag

SEQ ID NO: 276892 - DNA, 100 bp, Homo sapiens
aacacagttacagcagttgcttcaggcggtaaaccaacagctcacaaaggagaaagagcactaccaggtgttagacttgtgcaccatggacaattttgct

SEQ ID NO: 276893 - DNA, 75 bp, Homo sapiens
gggagaagtaggagatcaaggaaatattggaaaaattggtgaaacagtctgaaggggcgtctcgattacctgagc

SEQ ID NO: 276894 - DNA, 83 bp, Homo sapiens
aaacgcccacgtgatgtagatcatagtgctccagcttttctgcagctcacccaaggctgctctccgctatgctgctgttcgta

SEQ ID NO: 276895 - DNA, 90 bp, Homo sapiens
cgtggatcgttgttttgaaacgctttcttcaatactaaaaatgtatggaagtcctttgaaaacaccgtcagtggtttatagacaaagact

SEQ ID NO: 276896 - DNA, 100 bp, Homo sapiens
gaaatagtccagaatgtcacaggtccagggcagaggaccaacatgggcattttgtttatgagcaaggagactacctaggtggagaagcgtactgggccgg

SEQ ID NO: 276897 - DNA, 50 bp, Homo sapiens
tcggaaatatacccctgtttcttatatggtacttgagctggatacactgg

SEQ ID NO: 276898 - DNA, 82 bp, Homo sapiens
atgctagaattacctggaacttcatcatcatctacttcacaggaattgccattttgtgaagcctcagtttaggtcatctggt

SEQ ID NO: 276899 - DNA, 74 bp, Homo sapiens
ccagcagagcccgcctgcccggctacctgagtcagaactccatcacaggggaacacagccaactgttaggtata

SEQ ID NO: 276900 - DNA, 146 bp, Homo sapiens
ggtggatccagggataaatcccaaacttcttaacccctagaccggtttttagtccattgactatgcagcctaatggcatcagtgtttttctgaccgaagttctcatttcctgacaatggaaatggaacaagaaaaaatgaccatga

SEQ ID NO: 276901 - DNA, 100 bp, Homo sapiens
tgcggaggaactttgtgaacattcgcccagccaagttgaagaacctaatcttgctggtgaagcactggtaccaccaggacaatctctatgggaagcagaa

SEQ ID NO: 276902 - DNA, 51 bp, Homo sapiens
tcatttttgccctcaaaagaaatggcaggttatcaagttatacccaaccag

SEQ ID NO: 276903 - DNA, 82 bp, Homo sapiens
cgggctccgggaaaactacactggccagagttgaagtattgataacaccaaggaactctatcacaatttgaaaagataagca

SEQ ID NO: 276904 - DNA, 71 bp, Homo sapiens
ggcctggtttgatactgacctgtaaatcatcctttagaacatagacagagttgtgtttgttggaaattttc

SEQ ID NO: 276905 - DNA, 83 bp, Homo sapiens
tccaagactcggtttggggtgaaagatggcgctgactgggtacagctggctgctcctcagtgttgccaccttccagagaagag

SEQ ID NO: 276906 - DNA, 82 bp, Homo sapiens
tcggagggagataatgaatcagaggaatttctctatggcgttcaggaccttaaaggctttgatccaggagagaaatactttc

SEQ ID NO: 276907 - DNA, 100 bp, Homo sapiens
tgacacacctcatggtatatttgcagccagtactctatatgaacaatccgtctggatcacggatgtaggaagtggtagttgatgtcacttggcgatattc

SEQ ID NO: 276908 - DNA, 100 bp, Homo sapiens
tggctgaagtgacgctgggcattggccgtggccgcagggtcatcctgcgcagctaccacgaggaggaggcaaaagtgaccgccaataacgacaagaaccg

SEQ ID NO: 276909 - DNA, 74 bp, Homo sapiens
tcaccagtgatggtgccatttcagtaccaagcctttctgctccaggtcaagccctagagaatgaagtgtactgc

SEQ ID NO: 276910 - DNA, 101 bp, Homo sapiens
gccatgtccttcttccggcggaaagtcactgtgtgcccagtattctgcagacaaacgagaagatgagaagatgtgtgatcatttgataagagcagcaaaat

SEQ ID NO: 276911 - DNA, 97 bp, Homo sapiens
gtgccgcgctcctggccccgcgcgggcggacggcggaggcgcctcccaggtactccaaagattcaggtttactcacgtcatccagcagagaatggaa

SEQ ID NO: 276912 - DNA, 82 bp, Homo sapiens
gagcagagtggaccaccccatgaacctcgaaagctgtatgtgatggcttctgtgtttgtctgtctactcctttctggattgg

SEQ ID NO: 276913 - DNA, 75 bp, Homo sapiens
ttttactcctacctgtgtaccgagccaggaatcagtgtctgtccctgaagggtcattaaatcagctatgttcttc

SEQ ID NO: 276914 - DNA, 74 bp, Homo sapiens
aacaaaggtagaacatggaggatcgtcaggctctaaacaaaattctggatggcaatgattcagatgaattcatg

SEQ ID NO: 276915 - DNA, 102 bp, Homo sapiens
atacgattcagttcactcatacacagatagaagccatccgtgctggaatgcagcctgggctgactatgggtgttcctgaaaagaaggtacttccaatcaccg

SEQ ID NO: 276916 - DNA, 83 bp, Homo sapiens
cgctccgccggccttgcgcggcgcgcccagggaaggcatttccagcccgcccacccagggcgtgatggtgggcatgggtcaga

SEQ ID NO: 276917 - DNA, 100 bp, Homo sapiens
gaaagcccatgggagaagtcaaatggagagtatgctcatcagtggctatgcactcaactgtgtggtgggatcccaggggtatcagctctgtgataacagc

SEQ ID NO: 276918 - DNA, 73 bp, Homo sapiens
gccgaactagatgagaccaaaatcattctgactattgcccagaagaaaagatgtttggttttcacaagccaaa

SEQ ID NO: 276919 - DNA, 101 bp, Homo sapiens
ggagaacaagcccatcgtcacctaattgagcccctgagtcctgagttggtggcagctgcatctgctgtggcagattctctcccttttgataagcaaacaac

SEQ ID NO: 276920 - DNA, 83 bp, Homo sapiens
ctgatgatgagaacacagccacgcttacggagtccatagaggccactgtattctattgaagaacatgtctaacagtaacacta

SEQ ID NO: 276921 - DNA, 75 bp, Homo sapiens
ttcgtttccagcctcaggaatttatggtcgcctttttgaatgaggtgctgatattcgtggcttcagtgctcctag

SEQ ID NO: 276922 - DNA, 75 bp, Homo sapiens
agaaactatatgccaccatggagaagcataaagagttctcttacatggaacctggtgaattgaaatcctggccca

SEQ ID NO: 276923 - DNA, 80 bp, Homo sapiens
acttccctgtgtcccgcaatgccaacctcagcaccatcaagcaggccgccatggcatcagatgaaggcaaactttttgtt

SEQ ID NO: 276924 - DNA, 88 bp, Homo sapiens
gaccgtcgctagaactcagttgtgcgttgcggccagtcgccactgctgagcttgaagaaatccgcaaatgtgggatgaaaaacttccg

SEQ ID NO: 276925 - DNA, 100 bp, Homo sapiens
cgactccgaacgaaggcggctccgtgcgggccatcccctatctccccgggcgggcatgtgggcacattccatgacagtacaggattatcaggatctcata

SEQ ID NO: 276926 - DNA, 75 bp, Homo sapiens
ttgaagggaatttctgcccagatagtgtctgcagctgaggcaagtgaggcctatctggttggcctttttgaagac

SEQ ID NO: 276927 - DNA, 51 bp, Homo sapiens
tcttccatgcccactgcctacaacacagtttcatcaagaccaacttctcct

SEQ ID NO: 276928 - DNA, 101 bp, Homo sapiens
ggacttgagcattgaagagtacattcgggtttacaagggagaagaaggagctgcagaagatcctggacagaaagcgccataacagcatctcggaggccaag

SEQ ID NO: 276929 - DNA, 83 bp, Homo sapiens
tttacagctcaccggatgtaaaagaactctggctagagaccctccaaggttggccagtcagtgctgaaagatgtaagcaaagt

SEQ ID NO: 276930 - DNA, 83 bp, Homo sapiens
ccctcctcaccatcccctcattgctgttgattaccaagtacttaaacttcacccttgtttagcccctattaaggttgctttgg

SEQ ID NO: 276931 - DNA, 101 bp, Homo sapiens
ccagggtcttctaagtcagagacatcaaaacctggaccttctggattacaggccaaattagcaagtagagtacagagagatggatgaaagcttggccaacc

SEQ ID NO: 276932 - DNA, 75 bp, Homo sapiens
tgaaaatgtaccactgttgcagaagctcctcacagagtatgtgtcaggttgtatcagagtaagatggacggtagc

SEQ ID NO: 276933 - DNA, 100 bp, Homo sapiens
ggggggccaccgaatcgctgtcacgccggcagatggagtcatcagaacccactgtgaggaagtgacttctccttgaggtcacccagacactccaaacaga

SEQ ID NO: 276934 - DNA, 98 bp, Homo sapiens
gagatttcgggcacaatagaggacacgagcggcgccttctcagggctcgacagcctcagcaagctaggctcatccaaaatagaggaagcatgcgaaat

SEQ ID NO: 276935 - DNA, 75 bp, Homo sapiens
ctggcagcgaagaagatcgaaaattaaacctcagacactcttgcactcctgtaatgagcctggcactgtgatgaa

SEQ ID NO: 276936 - DNA, 75 bp, Homo sapiens
ggcagccctccatttgagaaacctaatattgagcagcgcgagcttcggcctcggctctgtaccatgaagaagggc

SEQ ID NO: 276937 - DNA, 100 bp, Homo sapiens
ggcccaatcatccagtaaatcccctgagttgctggctcgatactgtgactccttgttgaagaaaaggaaagtggagaatgaggacatgaataaagaccag

SEQ ID NO: 276938 - DNA, 83 bp, Homo sapiens
cctccgccagttaagaggaaaaaggatttttagactctgaggagcagttggagctaatccacattatggaaatggaaaccacc

SEQ ID NO: 276939 - DNA, 90 bp, Homo sapiens
cagccctgtgtgacaccaagataagtaactggatatcaaagtattgcagagtgccttagcagccatccgacatgcccgctggttcgagga

SEQ ID NO: 276940 - DNA, 98 bp, Homo sapiens
gcccccaccacccggaggagcagctcctgcccctgtccgggggatgactgattctcctccgccagggcagcgggtggcatgagacgtgggaacatggg

SEQ ID NO: 276941 - DNA, 126 bp, Homo sapiens
gggtgaacaacccgttcttgcctcaggccagtcgcctccaggccaagagggatccttcacccgtgtctgaatggatgatgaacttgttgttggacatagtgcaagatcagacatctccagcttccc

SEQ ID NO: 276942 - DNA, 98 bp, Homo sapiens
agaaaaggagaggagcacagattcaggcagcaaatacgaccctatattttaaaatgcttaaaacatcttaacccattgcactggttccaattaaagaa

SEQ ID NO: 276943 - DNA, 97 bp, Homo sapiens
aggactccaaaggaaggactggtcatctctttcatatctcaaaaccatggctcagttaatatgatcctctgttgaagcaagaagacaaactgtatgg

SEQ ID NO: 276944 - DNA, 96 bp, Homo sapiens
gggatcgtgaccgagaccgtgaccgagagcgtgaccgagagcgcgaatatcgtcatcgttagaagcatgtcctcctcacattcttccaccagagaa

SEQ ID NO: 276945 - DNA, 51 bp, Homo sapiens
tgtaaagctctttctaagaatcgtaagccggatcgagctgggagatgtgac

SEQ ID NO: 276946 - DNA, 75 bp, Homo sapiens
tttacaggaaaactccagtgattttcaatcaaacattgcatagcacttttctgtagaaggtcagttggaattcag

SEQ ID NO: 276947 - DNA, 102 bp, Homo sapiens
gccagccttctcgcggccccttagcgcggtcaggccgccctccttttccagacaatgcagatcttcgtgaagactctgactggtaagaccatcaccctcgag

SEQ ID NO: 276948 - DNA, 90 bp, Homo sapiens
cagcaatatgcattagcagcagctcagcagccacatataggaattttctgaaccaacaattattctctttgaaagagaagacttcaaagg

SEQ ID NO: 276949 - DNA, 90 bp, Homo sapiens
gaaaaacgcttttcacgtcacctggagagatgcacaggtctcctagtaggacaaggaaagcccagcaagcacaaccacatggcagagact

SEQ ID NO: 276950 - DNA, 80 bp, Homo sapiens
ctggccacgtgcttcaacgctctgctgcccgctgtgagggaaaaggtctcggcgcggaagatggccggcggcgtggacgg

SEQ ID NO: 276951 - DNA, 50 bp, Homo sapiens
aacccggacctcgcttacctgcatgctggggagagaccattctaacacag

SEQ ID NO: 276952 - DNA, 99 bp, Homo sapiens
gactacagtccctacttcaagaccatcgaggatctgaggaacaaggtttgctgtggactttcagacgggcttcagtggaaacgacattgccttccactt

SEQ ID NO: 276953 - DNA, 100 bp, Homo sapiens
aactgacggagacgcagatgtggacttgaaagaagctgcagcggaggaaggcgagaaaatgtggacacagacttgccaggcagcctggggcagagtgaag

SEQ ID NO: 276954 - DNA, 100 bp, Homo sapiens
ggctaagaaagtggtgaatcccctgtttgagaaaaggcctaagaattttggcattgtttcaccagtgatcattaaagaatgggcagcttacaaaggaaag

SEQ ID NO: 276955 - DNA, 97 bp, Homo sapiens
ctggacgaaggcatggaagtctacgggggcgagaatgtggagcttgggatcaggaatgaagaaggagccccacaggaaggaattctggaagatatgc

SEQ ID NO: 276956 - DNA, 100 bp, Homo sapiens
ggattttctgcagatcttcactgtattagtgaatccgataaggttggatgtactggaaaagtcataggaattgatcacattaaagagctagtagatgact

SEQ ID NO: 276957 - DNA, 98 bp, Homo sapiens
tgccaacaactgtattttctataaaaaccacagagagactctccaacatgtgccttctgaccatacaaatgaaacttccaacagtactgtgaaaccac

SEQ ID NO: 276958 - DNA, 83 bp, Homo sapiens
aagactgggcttgtccttgctggtgcatgcgtcgtcggcctctgggcagcaggtatcatgatattagctggtttgacatcaag

SEQ ID NO: 276959 - DNA, 90 bp, Homo sapiens
gttgtaccttgtgacagaatatgccaaaaatggagaaatttttgctaagatatcaacatggactagggactccagacttgcggcaaaccc

SEQ ID NO: 276960 - DNA, 85 bp, Homo sapiens
ggcgcgggaggtgttcgagaacgaccccgagacgggaacggcaggagcagctgatgggatatcggaagagagggccgaagcccaa

SEQ ID NO: 276961 - DNA, 83 bp, Homo sapiens
ctgcctcagcctccagagtagctgggactacagatacgggcagctgtatgttctcttcttgaggcatcattctcggacctcca

SEQ ID NO: 276962 - DNA, 96 bp, Homo sapiens
ggcattactatgttagttggaataactggactcttttacactcaactaattggcatcatcacactttctaaaaccaatttttccaacaacaacgat

SEQ ID NO: 276963 - DNA, 83 bp, Homo sapiens
cgaagtcgtggaggtggcgaaacgaggaggagataacgcggccttgggctctggctgatcagctgaccgaagaacagattgct

SEQ ID NO: 276964 - DNA, 83 bp, Homo sapiens
gggacatcgaagccacgggcatcgcggtgcacgcgctcagcaaggttctgctccagacgagcccttaccacgttgactcactc

SEQ ID NO: 276965 - DNA, 82 bp, Homo sapiens
gaccaccgtcagcactcagcgcgggccgatgctgtgggccctgagggaaaggatcacagaggcgctgagccgggatggctac

SEQ ID NO: 276966 - DNA, 75 bp, Homo sapiens
tggtgcagaagaaaccagccgaacttcagggtttccaccgttcgttcaagcctaagttcgaggcccaggcgcctc

SEQ ID NO: 276967 - DNA, 96 bp, Homo sapiens
ataaactaggagacaagatccatggattcaccgtaaaccagggctaccagggcatggtggacggaggctcaaacatcgcagaggccgactgggaga

SEQ ID NO: 276968 - DNA, 100 bp, Homo sapiens
ctgcgcatgagtgggctgtaatcgggtgtctggggaattcaaggaagccttctccctatttgataaagatggcgatggcaccatcacaacaaaggaactt

SEQ ID NO: 276969 - DNA, 80 bp, Homo sapiens
ggggcgagcctggaggattgtcactccaacctcttttcgctggtggaagttaaacgagctgagcctcgggacagcaagag

SEQ ID NO: 276970 - DNA, 124 bp, Homo sapiens
aaggatccggggatcaaagagcagtgggggttgctgacccagaggagagttctccaaacatgatcgtttactgcaaagttgctttcaagatgtacctgggaattacaccaagtgtgacctgtaa

SEQ ID NO: 276971 - DNA, 82 bp, Homo sapiens
cacgacggcaggaattattggaggccaggtttactggagtaggtgttagtaagctattttgaagatgaggaagaagattcta

SEQ ID NO: 276972 - DNA, 100 bp, Homo sapiens
agcgccgcggggatgggggcctcgggcgccccgcagccccccaacatcctgctcctgctcatggacgacgcgtccgagctgggccacagcctgaacgaga

SEQ ID NO: 276973 - DNA, 100 bp, Homo sapiens
gggcagaggatgcagtggaggccatcaggggccttgataacacagagtttcaagatttcaccacccaatcctcagtcctttggaaagcagtttccagctg

SEQ ID NO: 276974 - DNA, 75 bp, Homo sapiens
ttcagggatgagtcatgtggtggtgaaaaatgaccctgaactggaccagcaggtactccaaagattcaggtttac

SEQ ID NO: 276975 - DNA, 90 bp, Homo sapiens
ggtcatcaatgttactcaggtagaggcttgtacagcatatgtggattttatgatttctgtggccagattgattcgtcaggaagaaagatt

SEQ ID NO: 276976 - DNA, 100 bp, Homo sapiens
gtcagcagttagagagatatatgggccacatgcagtttctctcaggtgtaaagtggatatctcggcactccctctgaagcaagccaactgcctggagctg

SEQ ID NO: 276977 - DNA, 100 bp, Homo sapiens
ggaagccgcccgccccccaccgccgccccctccggcgtgttcatgcccccggggtgcgcgcggagccatggttatcatgtcggagttcagcgcggacccc

SEQ ID NO: 276978 - DNA, 101 bp, Homo sapiens
aaaagttcaatctggaaacatcaatgctgccaagggtgtccgcaatgttgccagtgtctgtctgcagattggctacccaactgttgcatcagtaccccatt

SEQ ID NO: 276979 - DNA, 82 bp, Homo sapiens
atcaaagggccgggagcgatgggtaaaggatttagaggataaacttcactctgtgcagctaaccaggaagaaggaagaggaa

SEQ ID NO: 276980 - DNA, 100 bp, Homo sapiens
gattgaagctcaagaaaaagccaaacgggaaagagagtggcagaaaaactttgaggtaagccaagatgggtgcatacaagtacatccaggagctatggag

SEQ ID NO: 276981 - DNA, 74 bp, Homo sapiens
ctgctgactgagctcaccacaaagggacgggtgccctaccctggtgagaagccctaccactgcaactgggacgg

SEQ ID NO: 276982 - DNA, 138 bp, Homo sapiens
ggaaaacggacgatgtattactaagctggaaaacatggggtttcgagtgggacaaggattgatagaaaggtgccaatgggtcatgtttggttagaaggtgacaatctacagaattctacagattccaggtgctatgga

SEQ ID NO: 276983 - DNA, 75 bp, Homo sapiens
ttactgctttgcaacgcgcacctaactccagatgtcagtattgaatatggtggtgaggcgtgaccctggcaacac

SEQ ID NO: 276984 - DNA, 100 bp, Homo sapiens
cctcattatcttctgggacattaaagaggaggtggaccccagtgattggattggactttatcatatagcctcagagtttgaagaccccttagttggtgaa

SEQ ID NO: 276985 - DNA, 90 bp, Homo sapiens
gctgcgctgaacctctcggctctccacagccccgcgcacaggcctccgggttcagagcctggggcctgagaattaaactgacaaagacag

SEQ ID NO: 276986 - DNA, 75 bp, Homo sapiens
ccaagctcgtggtgggtggaaaagtgttcgccgaggttgaaggggcccggccaggactcggggaagggtggcctg

SEQ ID NO: 276987 - DNA, 52 bp, Homo sapiens
ttcgcagtggtcgcttcttctccttggacacattcagctaacgtattttagc

SEQ ID NO: 276988 - DNA, 83 bp, Homo sapiens
ctcggacctacagagggtgaaacaggactcagaattcatgattgaagaaatgcaggttagtttaaactttgaaggaaattttt

SEQ ID NO: 276989 - DNA, 100 bp, Homo sapiens
cgccaagctgtcatcacaaaagagttgattgaaattatctctggtgctgcagctctggtgaaaatcctatttataagagtgccgtaacaactgtggtcaa

SEQ ID NO: 276990 - DNA, 75 bp, Homo sapiens
cagcaatccttggctcactgaggaggtttggctaaagaattacctccaaagccattgtcaagaccacagcagtca

SEQ ID NO: 276991 - DNA, 75 bp, Homo sapiens
tgaaatagatctctcggctctgagggaccaagaatcgccttcagccctgtctggtgcatccttggcagaaagtga

SEQ ID NO: 276992 - DNA, 51 bp, Homo sapiens
ggcgcggggaccgctgtgctctcggcctgcgtgttggatgaacttgacatg

SEQ ID NO: 276993 - DNA, 82 bp, Homo sapiens
accccctccacggcgcccgggatttcggggacggcttctcccatcgcaagacctgcacacaaacagcccaaggcacagcaag

SEQ ID NO: 276994 - DNA, 100 bp, Homo sapiens
cggcgaaggaggcagaggcacttatgcttgtcagagatgtggtactggatcttcctctgggctctcttctcttctctgtttgtccatggtgctgcaggag

SEQ ID NO: 276995 - DNA, 85 bp, Homo sapiens
tacagctgtttccacgtgcggtgctcgtcgggagtgatcacctaccctacagcatttggaaacagagccctgggctccagctggc

SEQ ID NO: 276996 - DNA, 51 bp, Homo sapiens
cgcatagatgccgcggaaggtccctcagatgcatccaagaagtcagattca

SEQ ID NO: 276997 - DNA, 75 bp, Homo sapiens
tggagggtggcatcatgcaaagaagttcaccggaacagcacaatccgccctggctgtgatgtgaatccctcctgc

SEQ ID NO: 276998 - DNA, 88 bp, Homo sapiens
ccagcaccggctccagtgggctctgaagatgcccaggaagaatttggctggaaacttgttcatggtgatatattccgtcctccaagaa

SEQ ID NO: 276999 - DNA, 51 bp, Homo sapiens
tctacactgagtcggaggcgaagcgccgtgccgtccctgcagtgacaccga

SEQ ID NO: 277000 - DNA, 78 bp, Homo sapiens
aagttggtgagggttaaggagtggggtgtgaggaggtgattctgtccgagtcgcgcacaggagctgaggtgcccttct

SEQ ID NO: 277001 - DNA, 96 bp, Homo sapiens
gagagggggcgacggcggcggcggtggcctgaggaggcccgagcggcggcggtggcggcgaaggccgaggcgacaaatttacatgtattggagacc

SEQ ID NO: 277002 - DNA, 51 bp, Homo sapiens
gcagtgagggggccacggctcaagattaagcctgatcaagatgacaacctc

SEQ ID NO: 277003 - DNA, 100 bp, Homo sapiens
tttccaaatacactcacagtatcagaatacaactgtttccttttctccgactcaagttgcagaatataaacaactgaaagatactctgaataggattcca

SEQ ID NO: 277004 - DNA, 75 bp, Homo sapiens
ggccatgcctactctgtgaccggggccaagcaggttgcctgcggacacgctgggcctctgtcctgatgctgctga

SEQ ID NO: 277005 - DNA, 100 bp, Homo sapiens
ggcttcatcgttatgaagcatatgatgatcccgtggatagatgagagtccggagtgttgtcatgtgaagcctgccatccaggaacctccaatagttatta

SEQ ID NO: 277006 - DNA, 74 bp, Homo sapiens
tgctcacctatgccactcgagatgacctcatctacacccgcatcagaggctgggaggcggcagaatgcagccag

SEQ ID NO: 277007 - DNA, 75 bp, Homo sapiens
cctcttcaacacctggacaccttgttagatggaacctacaagcagccgttggacataccagatggtcgaagagct

SEQ ID NO: 277008 - DNA, 100 bp, Homo sapiens
cttccgtcccggacagagcccgtggtcgcgcagctttctacaagttctgattaaagtcagaaatagacacaatgatgtggttcctacaatggcacaagga

SEQ ID NO: 277009 - DNA, 100 bp, Homo sapiens
ttccacagctgggctatgtggcaacaagtcgggaaagaggttaaagaagacacgcaagtatgatatcatcaccactccagcagagcgagtggaaatggcg

SEQ ID NO: 277010 - DNA, 90 bp, Homo sapiens
gtaatctggagtgaagtatttttaagagcactaacttgggcgccagcctcccagtgatggacctgactgaactccccaagtgcacggtgt

SEQ ID NO: 277011 - DNA, 100 bp, Homo sapiens
gggcgacctgggcaccagcaggacccgaggccaggagccaggggcccagaagttgttctggagaatcatgtagcgacagatgaagacgaacctgctttga

SEQ ID NO: 277012 - DNA, 100 bp, Homo sapiens
gctgcaacctgcagcacatcagcgaccgggagaacatagacgactccagcgggaggaagaagaggcctttgccagcagtcagagcagccaaggggcccaa

SEQ ID NO: 277013 - DNA, 100 bp, Homo sapiens
ccgactgggagcagaggaagccttgaggacctactcacagataggaattgaagacacttgaatattgcaaaggaaggttttactcaagctagtttaggcc

SEQ ID NO: 277014 - DNA, 98 bp, Homo sapiens
ctactctgaggggcttagaaattaacaggatgagtgtgggtcagagagccaaactgactatatctccagattatgcctatggtgccactgggcaccca

SEQ ID NO: 277015 - DNA, 75 bp, Homo sapiens
attagaagctgcagaagaaagacgcaagcaaatagtagtgatagtgaagaactttcagctggtgaaagtataact

SEQ ID NO: 277016 - DNA, 100 bp, Homo sapiens
caagaacatatgccagttcctcgtagagtcaatcaccttctgctgcttggatgggtggatttggtgctcagcctccccaaggacaagctcctccccctgt

SEQ ID NO: 277017 - DNA, 125 bp, Homo sapiens
cgctgcgtgttgtccacccaagatggagttcctcctggggaacccgttcagcacaccagtggggcagtgcctcggtactaggttttgacaagcttgcatcatgcgtgagtataagctagtcgttc

SEQ ID NO: 277018 - DNA, 100 bp, Homo sapiens
gagtggagagcagcccaaaaatatgcagaaacttggtgagcgctggacagcagtatgccgttggactgaagaacgctggaataggttacaagaaatcaat

SEQ ID NO: 277019 - DNA, 99 bp, Homo sapiens
cagctgtggaaagaagttgcaaaacactggacaccattcgcttttcacccaagatgatttgatgtcttataaaactctgatgaaccatgatggctacac

SEQ ID NO: 277020 - DNA, 82 bp, Homo sapiens
caacagtgtaccagcagggcgttggctatgtgcccatcacaggaacggagctttgactgtaagatctgtgggaagagcttca

SEQ ID NO: 277021 - DNA, 100 bp, Homo sapiens
cctgaatcgcatttttgaccttgaaaatcttgggatcacctgctgttaccagctaccacccataacaagaccacaagaccaaaaatgtcaattgtgttac

SEQ ID NO: 277022 - DNA, 50 bp, Homo sapiens
agcaactcctccgcagtgaagtattatacctgaagaaccttagccctcgg

SEQ ID NO: 277023 - DNA, 75 bp, Homo sapiens
gcaccatgatctgtggctgggataagagaggccctgtgtcttccaaggtccatgaggatgcacacttatttatcc

SEQ ID NO: 277024 - DNA, 78 bp, Homo sapiens
tcggcgccgcggctcttttctaaaagtaaaatggacccaagtggggtcaaagtgctggaaacagcagaggacatccag

SEQ ID NO: 277025 - DNA, 100 bp, Homo sapiens
gcttcagaggcccaaattgaggcgcaatgatgagaggatgtggtggtctactctgatgtcaatcttgagggctaggacagaactgtaccgctctcttttt

SEQ ID NO: 277026 - DNA, 100 bp, Homo sapiens
agcactggagagaaaggatttggttataagggttcctgctttcacagaattattccagggtttatgtgtcagccagagcagctgagttccagataaaaac

SEQ ID NO: 277027 - DNA, 98 bp, Homo sapiens
aaagtcatacagctgttggcagaggagtagctgagcagcagcagcagcaaggctgtggtgacccagagaggaattcatagcagtgtgcagtgcaaact

SEQ ID NO: 277028 - DNA, 100 bp, Homo sapiens
ctgtgtttttccagaggtgccctgaggagcagggaagcatggctattgtggatgtaaaagccatgttcaagggcactgtgtttagtcttgagtcagagga

SEQ ID NO: 277029 - DNA, 83 bp, Homo sapiens
gaagaaattgagggttcttgccatgagtttacagatgcttcctcagcaacggaaagccatagctaagttcaaggagccagccc

SEQ ID NO: 277030 - DNA, 83 bp, Homo sapiens
agcctcagttggaagcagccgatccagcctgcggagcctgtggggcaggtgcagaccatgaattacgtggggcagttagccgg

SEQ ID NO: 277031 - DNA, 75 bp, Homo sapiens
atacatgctggaggtctggctcagaagatgctgtggacaattatcgagatagactaacagaataccccttctaca

SEQ ID NO: 277032 - DNA, 83 bp, Homo sapiens
ctctttctggcctggaggctatccagcgatggatagaatgacagaagatgctcttcgcttgaatctgttgaagcggagcttgg

SEQ ID NO: 277033 - DNA, 75 bp, Homo sapiens
gagaccctgcaggcccaaagtgaagaagccagaaggctcctggggacctggtgtgaattattcagggtgtcagat

SEQ ID NO: 277034 - DNA, 100 bp, Homo sapiens
actgggcggtgccggcgccggagacgatgccgttatgattttcagactgcccaactattggcacttgtattggaattgttaacattttgtgtggagcacc

SEQ ID NO: 277035 - DNA, 74 bp, Homo sapiens
tcaaggatcagttggctttagcaattgtgtctcctttcctcttgggccgggcactttgggctgccagtcggttc

SEQ ID NO: 277036 - DNA, 100 bp, Homo sapiens
ggaaaggagattacttggggaaaactgtccaaggtcaaaatgcagatcttcgtgaaaacccttaccggcaagaccatcacccttgaggtggagcccagtg

SEQ ID NO: 277037 - DNA, 101 bp, Homo sapiens
ggaagctgagtcagctacgggcaagcgggcagctgaagatgatgagatgaaacagtccatggaagaatttcgaagccttgcttctcgatatggagatcttt

SEQ ID NO: 277038 - DNA, 100 bp, Homo sapiens
acaccctaccgcccgccttctgttggctgctgaccctgggggcagcccagctcaacgtcgtcgcaccagcctcccaactgatatccaggctgaatctatc

SEQ ID NO: 277039 - DNA, 100 bp, Homo sapiens
agccaggagatgagatgcaccatccggctgctggacgactcggagatctcctgccacatccaggtattgatgtcaagctgaaccatcgtaggaagttgaa

SEQ ID NO: 277040 - DNA, 98 bp, Homo sapiens
cctcgctctgggggccaatggagctgcgcggggcctcagcggcctgacacaggggaaaccctgtggaaccacagcagcagcttcagcgggaatgcgtc

SEQ ID NO: 277041 - DNA, 74 bp, Homo sapiens
aaaacttacaaacaaccccatctccagacaaatgagaaagatcagtctaaagaaaaggagaagaaagtgaaaaa

SEQ ID NO: 277042 - DNA, 100 bp, Homo sapiens
caggaaaggggccgtcggtcgccgccatgacagcgagcgaggcggagaatacagtcgctttgaatcgaagatacatgacttacgagaacaaatgatgaac

SEQ ID NO: 277043 - DNA, 75 bp, Homo sapiens
gagaaaagggctatgaacgattaaaagaagaactcgcaaaagctcagaggttgcagagcttgaagtgaaaaccag

SEQ ID NO: 277044 - DNA, 49 bp, Homo sapiens
agcaccaggcccaccgtgaaagattgtgaagaggtctcttgaagtttgg

SEQ ID NO: 277045 - DNA, 100 bp, Homo sapiens
gatgccagaggtcaacaaggttctggacaagatgaagtctttctgccagcctcctccagctggtgatctcgggtcccgtgcagcagtcgcctcacgccgc

SEQ ID NO: 277046 - DNA, 100 bp, Homo sapiens
gaagtcttgaatgactggaaactgattggaaactctttgggaaagccactcgaaaagtggacagaggactgcagaaaatcaacctatcctccttcaggac

SEQ ID NO: 277047 - DNA, 100 bp, Homo sapiens
actctggaaacagtgcccctaatcccagaggtagtggagcttccaccgtcactgcccaggagctgtatgcggccggggagaaccgcctgggaacagacga

SEQ ID NO: 277048 - DNA, 83 bp, Homo sapiens
gaacaacctgaacgtcaccgaggagaagtaccaggaggcgttggccaaggcaattctgtggtgttcttggtcacacatttatg

SEQ ID NO: 277049 - DNA, 82 bp, Homo sapiens
tgggaacccgcggtggagcgggacacgaacgtggtggctattatcatggaaaactaatttttcccagagaatttcctttcaa

SEQ ID NO: 277050 - DNA, 100 bp, Homo sapiens
ccctggaatatgaagcaacatgagatggtggatgaacccacagggcttatttcaaaacctttgtccctcagttccaggaggcagcatttgccaatggaaa

SEQ ID NO: 277051 - DNA, 100 bp, Homo sapiens
atgcgggggtggcattcaagctcgccgcaggatctgtgagaatgggcctgactgtgcaggctgcaatgtgacgctggtatccagaagaatatgaatttgc

SEQ ID NO: 277052 - DNA, 129 bp, Homo sapiens
tacgaacagcgggcggtgttcccggctccgtggggccgtcttcccggcgagtccgcgacggtcgccgcccacggcgagcactctgttttctacagtggacactgatgaaataccagccaaaagaccaag

SEQ ID NO: 277053 - DNA, 100 bp, Homo sapiens
cgctgacttcggccttgcccgcatctatagtttccagatggctctaacctcagtgctgagatctgtatctgtggacctgaatgttgatccctcgcttcag

SEQ ID NO: 277054 - DNA, 96 bp, Homo sapiens
tggacagcctatggcttcgtcaagttcttcaccaatgcctggtgttggctggacttcctcattgtggctgttgggtatctacagccattggttgct

SEQ ID NO: 277055 - DNA, 100 bp, Homo sapiens
tgtgacagtccatatgtaaccaaatattatggatcctatctgaagatcatgatcagaagcatcttcctgttcttggaccgcacctatgtgctgcagaact

SEQ ID NO: 277056 - DNA, 100 bp, Homo sapiens
atcagggattccgaagcgtcgcacagggggccgggtgaagacgtggaagcggcgctggtttatcctcacagacaactgcctctactactttgagtacacc

SEQ ID NO: 277057 - DNA, 98 bp, Homo sapiens
ggggactctgagggaggagctggggacggcgaccctaggagagcttcttcctggagaagaatatgtttgttttcttcttgaacatcttgcggcaaaag

SEQ ID NO: 277058 - DNA, 50 bp, Homo sapiens
ctcgctcccttgatgatcttgaggcgtcgacattccagatggctatcctg

SEQ ID NO: 277059 - DNA, 51 bp, Homo sapiens
agtcagcagcagctctgagccagctattgtggacgatgaaaggctctctgc

SEQ ID NO: 277060 - DNA, 100 bp, Homo sapiens
ttgtaacatcagtcacagcatttgacaggcgggtcgagtctgaagaatccggcgatgaagaagggaagaaacacagcagtggcatcgtggccgacctcag

SEQ ID NO: 277061 - DNA, 100 bp, Homo sapiens
tggaaatggaacatacgggcaagtttataagcctcgtcacgtgttcaatatgctaaagaagtatgtccgcgcagaacagaaggacagacagcacacccta

SEQ ID NO: 277062 - DNA, 74 bp, Homo sapiens
gtccaggcctgacagctctgcggctcgggccctgaggttgacatcatggacatatgtgagtccatcctggagag

SEQ ID NO: 277063 - DNA, 75 bp, Homo sapiens
aagccccctgcaggaactctacaacccaatccaggctgccgcgggcggacacgccagaggaggaggccggggaat

SEQ ID NO: 277064 - DNA, 82 bp, Homo sapiens
ccggatggaaatcctaatgacagtctccaaattcgcctccatctgtaccatggttacgggcaggacttgagtggcttcggac

SEQ ID NO: 277065 - DNA, 100 bp, Homo sapiens
ttcctgtctcctctttctttttccctgtggctcagcccgttcgctggactgcaaaccgagctcccgtctgccttgcagaccagagtgaactccgagcagg

SEQ ID NO: 277066 - DNA, 111 bp, Homo sapiens
cggggaccaggacagtcgcgaggttcgagtgttgcagagcctgcggggcaagatctgtgagaagccctaccactgcaactgggacggctgcggctggaagtttgcgcgctc

SEQ ID NO: 277067 - DNA, 82 bp, Homo sapiens
ccgcgcggctcggagccctggaagcagcagctcaccgaggacggggactcgaatcccttggcaccatgtcctgtgtgcatta

SEQ ID NO: 277068 - DNA, 75 bp, Homo sapiens
gtgggcgagcaatgccagcactgcgggggccgcttcagagacggtaaagaacaggtccaagaaaagctcaaagaa

SEQ ID NO: 277069 - DNA, 51 bp, Homo sapiens
gtttcgtgagtttttactgactcgagaaaaatgttcgttggtggcctgagc

SEQ ID NO: 277070 - DNA, 100 bp, Homo sapiens
tctcaggaggagggagcggccgccgcggccaccgaagccaccgcggccacggagaagggcgagaagaagaaggagaatctgtcactgcgaaggggatgaa

SEQ ID NO: 277071 - DNA, 100 bp, Homo sapiens
gcccgcccaaggtctctcgcgggcgggagaacggaaaactcccaacttcctggtaactgtggagaattttttacgggtattaactgggaggatcccacct

SEQ ID NO: 277072 - DNA, 50 bp, Homo sapiens
tattaaagttactgctgttaaaaagaactgccattggatgtccagaatcc

SEQ ID NO: 277073 - DNA, 82 bp, Homo sapiens
cagacactgaacgaggagccagtggaacgtcaaggtcgtgggaaataaaaggcagttctacacagactgcagcaacggttgc

SEQ ID NO: 277074 - DNA, 100 bp, Homo sapiens
gagacagctcaacacggcacttccacaggagacgaaaccagacagagggtcaagtttacagatgaccgtgtctgcaagagtcaccttctggactgctgcc

SEQ ID NO: 277075 - DNA, 90 bp, Homo sapiens
gcatcaaaattactgcagccaggtgataaaattattcagtgatgcggctgactaagcctactttattcaccaatatcccagtaacatgtg

SEQ ID NO: 277076 - DNA, 74 bp, Homo sapiens
agcgggtgcgtctgccgcagagtcggcacctgaaggacatggaggatgttaaagtctttagtgaagatgggaca

SEQ ID NO: 277077 - DNA, 144 bp, Homo sapiens
ctgccgaagtcagttccttgtggagccggagctgggcgcggattcgccgaggcaccgaggcactcagaggagctgggagtgtccactcgccttccaccagcatggcaacgtcttcacagtaccgccagctgctcagtgactacg

SEQ ID NO: 277078 - DNA, 75 bp, Homo sapiens
gcttcaagccccgcgagtcgcatctgctcaacgacgaggacctgacgcagatctttaatctcatgaagtacgaca

SEQ ID NO: 277079 - DNA, 88 bp, Homo sapiens
tggccctgatcatcctgctgggcttcgtccagatcgggaaggggaacggcaggagcagctgatgggatatcggaagagagggccgaag

SEQ ID NO: 277080 - DNA, 83 bp, Homo sapiens
gatcactgaaaatgatttatgcaagtttaagttcaaacttctcatggaacatctggaccctgatgaagaagaagaagaagggg

SEQ ID NO: 277081 - DNA, 74 bp, Homo sapiens
gcctctgggagcagaagggaggctccaagacctcatcaacaattaagtttggaaattttagcattcaggtgcca

SEQ ID NO: 277082 - DNA, 109 bp, Homo sapiens
ctagaagtctactaatggacagttagtcacccacctacatgttgaggcatttgggcagtccttctccatccaccggaaggttgctgaagatggagagactcgggaggaa

SEQ ID NO: 277083 - DNA, 100 bp, Homo sapiens
tgaagaacagaaggcgatcaaggccaagtatccgccagtcaataggaagtacgagtgtggaatgaatcttacttgttgaatatcttctggttactagttg

SEQ ID NO: 277084 - DNA, 97 bp, Homo sapiens
tcttggccttcaggagtttgacattgccaggaacgttctagaactgatctatgcacaaactctggtgtgggccccccaggatctgaaggcctcccag

SEQ ID NO: 277085 - DNA, 100 bp, Homo sapiens
caccagcctggccgcagcactggatgaaaacaaggatggcaaggtcaacatcgacgacctcgtcaagatatggatcagaaactttcgaagttggtagaag

SEQ ID NO: 277086 - DNA, 90 bp, Homo sapiens
catcgagagcggcggcggcatcctccgcaatgtgtccagcctcgtcgccacccgtgaggactacagtctgcagatctccaggggagccca

SEQ ID NO: 277087 - DNA, 51 bp, Homo sapiens
tggatgggtcagaattgtgacataaactttgaaatactcgtgggatatgaa

SEQ ID NO: 277088 - DNA, 100 bp, Homo sapiens
agctacaggccagtcgtgtctccagtgatgtcattgaccagaaggtgtatgagatccaggacatctatgagaacagattgaatttagtggaagcttttgt

SEQ ID NO: 277089 - DNA, 101 bp, Homo sapiens
aagcagacggctcgcactgcgacccgaaggacaaatcccaatctgctgaaatatgggaaaaattgaattttggaaacaaggaccaaaatgtcaaatttagg

SEQ ID NO: 277090 - DNA, 100 bp, Homo sapiens
ctggaatgtgaagagacatgagaccatagccaaacccccagaattttaccttcaatgatgacttcagtcccagcagtaccagttcagcagacctcagcgg

SEQ ID NO: 277091 - DNA, 76 bp, Homo sapiens
aggcctctctcctgatacagcaggcgctcaccatgttccctggaggctggtgtgtgacagctctgtgctgctgtgc

SEQ ID NO: 277092 - DNA, 75 bp, Homo sapiens
ctgggccctgctggatccagaatccatcgtgagtctctgctttctatccgtcaagatgataaagtcgtgtgcccg

SEQ ID NO: 277093 - DNA, 74 bp, Homo sapiens
caccgactatgcagaggagaaggagatccagagttccaatctggagacgcaggacagctggcctgaagctcaga

SEQ ID NO: 277094 - DNA, 87 bp, Homo sapiens
acactatcgtgatgctgacggaggtgcaggagagagagcagcttagaccatgctcagcctccaagcagccttgtcatcgacaaagaa

SEQ ID NO: 277095 - DNA, 100 bp, Homo sapiens
gctgccgaagcatgaagaaggggtaaggcgtgagcccccaagatttcacgaacatgttcttcaagtatacatggaataactttttgcatacacaagtgga

SEQ ID NO: 277096 - DNA, 74 bp, Homo sapiens
tgatgccctattcgacagaactgatattttatattgaaatggatcctccagtattggtaaaggttttcaaggtg

SEQ ID NO: 277097 - DNA, 123 bp, Homo sapiens
ggatggtcctgctgcccctgcctgccttccagcccctgcccaccaggctgcgccctttggggggcccagggcaagggacataggatgaccccagcctgtcccctcttactgtctgtgattctg

SEQ ID NO: 277098 - DNA, 75 bp, Homo sapiens
atttcctacaagcagtgtggcaaggaagaagccaatcctgcttgtgcatggtgataagcgagaggctaaggctca

SEQ ID NO: 277099 - DNA, 90 bp, Homo sapiens
agacaggctacgcctggacaaatactatatgatgaaagccttgagggaattagacagattttctgttttgaatagccaacacatgtttga

SEQ ID NO: 277100 - DNA, 100 bp, Homo sapiens
tgagaagctggagaataattttgatgacatcaagcacacgactcttggtgagcgaggagctctccgagaagcaatgaggagccctctggcacaaatggaa

SEQ ID NO: 277101 - DNA, 75 bp, Homo sapiens
tccctcggtcgcgagtatctccgtttcctggatgtgaacgtagagttggctttgtgggacacagctgggcaggaa

SEQ ID NO: 277102 - DNA, 118 bp, Homo sapiens
gtttgctgtcttcccattggattcagccagtccgcggtcctggtgtacattccaagcagagtggccctcatccttcagaatgtggatctgccgaattgaagaggcctgatttcagctc

SEQ ID NO: 277103 - DNA, 75 bp, Homo sapiens
gcgatgactgtgaaggagttcaggcagctggccaacagtggcaaagcttactcacatagcatattggtatatcaa

SEQ ID NO: 277104 - DNA, 75 bp, Homo sapiens
cagacaccgcaatgaaaaaaggggagacactgcgaaagcaaaccgaggaggaattctcaagaaatttgaggaaga

SEQ ID NO: 277105 - DNA, 83 bp, Homo sapiens
gaaaatttcttccaaggttgatgcatctctctcagagatgcatggtcatggaggctatgattctgattttagtgatgatgaac

SEQ ID NO: 277106 - DNA, 97 bp, Homo sapiens
gaaaggaacgtgcccgattgaagacagtgaagtttaatgccaaacctggagtgattgattcgaaaggggtaaaataccatgaagattttgaaaaaac

SEQ ID NO: 277107 - DNA, 82 bp, Homo sapiens
ccactttctcggcgccgcggctcttttctaaaagtgccaccctgaggcacaaactaactgtcatgtacagtcagatcaacgg

SEQ ID NO: 277108 - DNA, 74 bp, Homo sapiens
tggtgaatcccctgtttgagaaaaggcctaagaattttggcattgcaacttgagttggtggaaccaagtggctg

SEQ ID NO: 277109 - DNA, 100 bp, Homo sapiens
agaaatggtcgcttgcccctagtctagacacggcagcacaacaagattcgcagcgtggaggggagccagctgaaggcctacctttccttagaagtgttag

SEQ ID NO: 277110 - DNA, 95 bp, Homo sapiens
catcagcaagctccagtgctacgtgtccctggcattttaggtgtcggttgggtaggacagagcgggatgccaccagcttgtccaaagggaagttc

SEQ ID NO: 277111 - DNA, 51 bp, Homo sapiens
tgggaagaggcggcagacagcggggagcgaatccgtttagctcgacagatt

SEQ ID NO: 277112 - DNA, 83 bp, Homo sapiens
cgagataattattctccaggttggaaattcaatcactgggagctcaaggcaattgttgacacagtggacaaccttctgagacc

SEQ ID NO: 277113 - DNA, 90 bp, Homo sapiens
gcagattatatcgcatcctatggctcaaagaaagatgattatctccaaagacaacaggccctccctctgccctcccgtctgtgagctccc

SEQ ID NO: 277114 - DNA, 46 bp, Homo sapiens
gacactatgcaatcacccgaaagatatgtgcagcgggggctacagc

SEQ ID NO: 277115 - DNA, 90 bp, Homo sapiens
atccgggcagcggagatcaacggggaagtggatgatgatgatgcaggtgacatctgttcccgagctgttcctgactgcagtgaagctcac

SEQ ID NO: 277116 - DNA, 100 bp, Homo sapiens
tgtcagaaggccacctcaagaggaacatcgtggtgaagaccgtggagatgcgggatggagaggccacaatgctgtttgctgagctgacctacactctggc

SEQ ID NO: 277117 - DNA, 90 bp, Homo sapiens
gagcaagcaggcatattgtaagaacccagtttataccactggaaggaaacctacgatggagttggctgtgggtccattctgtagacgagt

SEQ ID NO: 277118 - DNA, 75 bp, Homo sapiens
ggaccctgatgaagaccttgaacaagtctcgagagtggaaacaactctcactggtggtgaccgcggtggcttcaa

SEQ ID NO: 277119 - DNA, 112 bp, Homo sapiens
acggactcttatcttcaacttcacaataaaaaaagaggggaatctcatccagaacagattgtcatggattttaagcacccagatggcattgcagtgccagttatgttgcctc

SEQ ID NO: 277120 - DNA, 75 bp, Homo sapiens
cctgtgtcagcgtgctgagtaccagacggcgtgtgagcagctgggacaggtgacttaagagattaaaattaattt

SEQ ID NO: 277121 - DNA, 100 bp, Homo sapiens
aggtgatccagcaaggtcggcagagcaaggggcttacgcagaaggacctggccacgctgctgaacatgagaaatccagatggagggttcgccacctatga

SEQ ID NO: 277122 - DNA, 75 bp, Homo sapiens
atgcatttattgatctgactgaagattttacagcaggtaccgtttctgatcacattgagagagtctatagaagag

SEQ ID NO: 277123 - DNA, 100 bp, Homo sapiens
tctgcgaaggccgggacccggttccccggcccacagtgggggtgtgcaaacccgagagaactggagcatgtaacttctaatgccagcgatagtgaaagta

SEQ ID NO: 277124 - DNA, 111 bp, Homo sapiens
cagtattctaccaggcctggtgctggcctcctgtgatgggccttcgcactcccaggcacagaaaactgaatctgtagataacgagggagaatgaattgtcatgaaaaattg

SEQ ID NO: 277125 - DNA, 90 bp, Homo sapiens
atcctacaggagttcaaaacccacacatctttggtgtcatccccagcactcctctggccatccatacaccactgatgccaaaccagagca

SEQ ID NO: 277126 - DNA, 75 bp, Homo sapiens
gtgtcggaactagatctttctgacaacaaactcgaagactggcatgaggatgtcacatgtacttcagtttgagga

SEQ ID NO: 277127 - DNA, 100 bp, Homo sapiens
cccgcccagagtcatggcggcagcagccgctctgagggcgcctgctcagtttggaaattttagcattcaggtgccaggaatgcagatgggacagccagtg

SEQ ID NO: 277128 - DNA, 98 bp, Homo sapiens
tactggctattggaaggaggagattctgaagataaggaggagaagaacccttggttagattgagtcttactgagagactggggaaacgaaaattttca

SEQ ID NO: 277129 - DNA, 97 bp, Homo sapiens
ccaggagagcaacatcagtggccctttagcaggcagggccggccaaagcaagatcagatgccatggacaatattaccaggcagaaccaattctacga

SEQ ID NO: 277130 - DNA, 75 bp, Homo sapiens
cattgcgccgtacattcgagagtttgagttttttgtagcatcagatccaacagttaaaacagatcgactgtggca

SEQ ID NO: 277131 - DNA, 100 bp, Homo sapiens
ccgctgccgccgctgccaccatccgcgaggcaggagagaggaggaggagtgcggcgcggcggccccgggaccaaggaggaattagtaacctttgaggacg

SEQ ID NO: 277132 - DNA, 74 bp, Homo sapiens
cggcctcctcatcactccagttctggatgaatatgatgaattagttcccgcttctctaacaacaaaatatggag

SEQ ID NO: 277133 - DNA, 75 bp, Homo sapiens
tgatcctcttccccccattgatcattcagagcttcctttctcctcacgacggcctccacagtccggagcccggcg

SEQ ID NO: 277134 - DNA, 75 bp, Homo sapiens
aagggcctcttcctgaagcatgtggagtatgaggtttccagccagcgctaccaggcagaaatcaacgacctggag

SEQ ID NO: 277135 - DNA, 100 bp, Homo sapiens
atgtgtctcttctaagctgaataaagctgttttggaactgtcaggtacctcaaagcgctcctctgctgtttaatggctgccgctctggggaaatctttgc

SEQ ID NO: 277136 - DNA, 139 bp, Homo sapiens
gtttctcattttttattgcacttgcaatcattttaggaatatcctcaaaatatgctccagatgatttggagcaagaggtggtggtggccttcccccgaagaaatttggtaatcctggggagcgtttgcgtaaaaaaaag

SEQ ID NO: 277137 - DNA, 74 bp, Homo sapiens
ggcggagaagactcgaacggctcccacagccgggcgttgggggaaaggaatgtatcctgtcaggtataatgtca

SEQ ID NO: 277138 - DNA, 75 bp, Homo sapiens
caatgggatactcaacttgattccatcaaccaggtaagaatgattgatgttggctgatattggagtgctcattca

SEQ ID NO: 277139 - DNA, 89 bp, Homo sapiens
ctttattgatcaacatccttcatagagacctacagagttgaaacagtgaaacctggaaagattgtctggcaggaagaccctcgtttaca

SEQ ID NO: 277140 - DNA, 90 bp, Homo sapiens
cctgcctctctgcagccaccccaacccgcgaaagatggtgatccctggagaccctgaggagatgaggacgttccagagccggaccctggc

SEQ ID NO: 277141 - DNA, 74 bp, Homo sapiens
agaactcgcgtttccacttcagagatctggtggttggaggcaaagtaaagaagcccggtaaacgtggtcggaag

SEQ ID NO: 277142 - DNA, 50 bp, Homo sapiens
cccctttgaattaattatggctgactttgcctcccgggccaaactggcag

SEQ ID NO: 277143 - DNA, 100 bp, Homo sapiens
ctcctggccccaccttcctagtcctttcctgctgatgacgctactgctggggagactcacagtgatcccgaaggtcaccaagcacctgctctcaaaccct

SEQ ID NO: 277144 - DNA, 75 bp, Homo sapiens
gttttctctgctctgccaacactagtggaatatgatcacatcccagggagaagatgaatcagttatcctcaaatc

SEQ ID NO: 277145 - DNA, 75 bp, Homo sapiens
attgacgggctggaggatgaaagcggtctggtggagctggagctgcggggccgccaggagggctggtgccgggac

SEQ ID NO: 277146 - DNA, 83 bp, Homo sapiens
cgggagaggctttgtctcttcttgttacgtgcctacagcttcggagccagcaactgggaggagatgttaaagtaacccatctt

SEQ ID NO: 277147 - DNA, 100 bp, Homo sapiens
tgatgagagcttggtttctgatgaatcctcacagtatttaaccagaataactataggatggtgccatgacaatggtgtgaactacaagattggagagaag

SEQ ID NO: 277148 - DNA, 95 bp, Homo sapiens
cgcccccaatttcccagctgctaaaggaagaggaagcatcagcgagagctttctaactgtcaaaggtgctgccctttttctaccacggggaaatg

SEQ ID NO: 277149 - DNA, 90 bp, Homo sapiens
gttcccgggattggaccgacgcagccatgtgagggccccaaggctgttgcagctcctcgacctgatcggttggtcaatcgcttgaagaat

SEQ ID NO: 277150 - DNA, 71 bp, Homo sapiens
gtagtggacaaagatttccttgataagttgtgaactaaaggccgacaaagattatcactttaaggtggata

SEQ ID NO: 277151 - DNA, 100 bp, Homo sapiens
ctcgcccctgcccggcgtggagggcgcggggggcgcggaggcctatatgaacccaatagcaatggcgagatcaaggggtccaatccagtcttcagggcca

SEQ ID NO: 277152 - DNA, 98 bp, Homo sapiens
cggcgacggagggggcggccgggtccgcatcgagaagatgagctcagaggtggtggattcgaatccctacagtgatgctattgctgagattagagcca

SEQ ID NO: 277153 - DNA, 100 bp, Homo sapiens
ctgtgggggtgtcctggtgcacccccagtgggtgctcacagctgcccattgcctaaagaattcgatatctcaatgcctatactggaatagtgctacttcg

SEQ ID NO: 277154 - DNA, 73 bp, Homo sapiens
tggaaattgccaaacaatctgtgactattaagaccatgttggaaggtcactgcagccagaggggtccagaaga

SEQ ID NO: 277155 - DNA, 100 bp, Homo sapiens
cgcagttggaagcccatggggcagggcatgaggcagccttcgctgctttcctctgctgtctctgcaagattggggtgctccgggtggatgaccaaatagc

SEQ ID NO: 277156 - DNA, 78 bp, Homo sapiens
actttggtttacatacaggaaaaactttccagccattggttattgagccacatgatatatcagtggcactcaacaccc

SEQ ID NO: 277157 - DNA, 98 bp, Homo sapiens
gaacattggtctaaagtctttccaaaaggtcaaggttcacaagatcaggagtgatacttcacagatcctggaggaaaacatcccagtccttaaggcca

SEQ ID NO: 277158 - DNA, 82 bp, Homo sapiens
gaacctttgacttggtgttgaaagtgaaatgtcatgcctctgaaaatgaaggagcttcagaaatacgagcagttcatctttg

SEQ ID NO: 277159 - DNA, 100 bp, Homo sapiens
gatagggttgtagagtgcataaagatcatccttgatcttatatctgagcaaaaacttgcccaactagaagaggcgaagcaggcttccatccaacacatcc

SEQ ID NO: 277160 - DNA, 100 bp, Homo sapiens
cgcggggacccggctgcggtggctgcgggactgacgactttgacaattattctgccaatgttatggtagatggaaaaccggtgaatctgggcttatggga

SEQ ID NO: 277161 - DNA, 90 bp, Homo sapiens
ggcctcgctgcggcggcgactgagccaggctgggccgcgtccctgagtcccagagtcggcgcggcgcgatgccagcgagggctgcaccgt

SEQ ID NO: 277162 - DNA, 101 bp, Homo sapiens
tcctcttactgatcttcgttctgacttctccaagtttcaggaaatgatagaaacaactttagatatggatcaggataaatgtgcatcctcactaggaaaaa

SEQ ID NO: 277163 - DNA, 74 bp, Homo sapiens
agaagacaaacttgccaaagctacaagagacagtatttaggtcagttaacgtccataccaggatacctgaatcc

SEQ ID NO: 277164 - DNA, 90 bp, Homo sapiens
atttcaatcaacaagggtcctaaatgcctcatggccaatagtacatggggctaccccttccacgacggatggagtttcgctcttgtcgcc

SEQ ID NO: 277165 - DNA, 87 bp, Homo sapiens
ccacttgaggttggaactgctggagagacagccgctccgaccgctggtcccagatgccagcaagcagcggctgatggagaacacaga

SEQ ID NO: 277166 - DNA, 120 bp, Homo sapiens
acctgttttgaccaacggaaaagagcaaatgcagcatttttgataggtgcctatgcacctcaaggaataggttctcctagtgtctatcatgcagttatcgtcatctttttggagtttttt

SEQ ID NO: 277167 - DNA, 74 bp, Homo sapiens
ggcaggtcatgagtcaccatggtcaacaaaaatctctcatttacttcaccaccagcagtttcctcacaacagtc

SEQ ID NO: 277168 - DNA, 50 bp, Homo sapiens
tgcaagcaggcaacctgaatacagtgccggtggtggtgtgcacattgagc

SEQ ID NO: 277169 - DNA, 100 bp, Homo sapiens
ctgagtccttgtcagaatcagagtatattgaggaggaaaaatgctttctgaaagcagctcctttttgaagggtgtgatgcttggaagcattttctgtgct

SEQ ID NO: 277170 - DNA, 80 bp, Homo sapiens
ctgcagccgtgtattcagccttagggtaatcactttgatcagtatgaggaaggacacttggaaattgaacaagcgtcact

SEQ ID NO: 277171 - DNA, 100 bp, Homo sapiens
ctctaggcagccgcgcagcttccgtgtttgctgcgcccgcactgcggtgctccatacttgcttgcagtgcctacgtggctctggctttgggtgataacct

SEQ ID NO: 277172 - DNA, 90 bp, Homo sapiens
gaaagtccaacaaaaggaaggaggaagtgatctgggaatgtctggcaactctgaaaaaatgcctgtcttaaaggctgaagcgtcacatta

SEQ ID NO: 277173 - DNA, 51 bp, Homo sapiens
cttgaacatcctttgactggttagccaggtcttgggcgtctttggtactgg

SEQ ID NO: 277174 - DNA, 83 bp, Homo sapiens
gcgctcaggatggaggaagactcgatccgcctgcctgcgcacctgcgatcagattttattaagacctctactggaaaagaaac

SEQ ID NO: 277175 - DNA, 83 bp, Homo sapiens
ggatcagacttttgtgttgcagttcggccaacaagtcccaaatttggaaaagctgactcatatgaaaagctggaaaaactagg

SEQ ID NO: 277176 - DNA, 96 bp, Homo sapiens
gaagtcatcctgccagtcccgggattttgcagatacctggaaaaacaattcagtgacttaaagcagaaaggcatcgtgatcagttttgacgcccga

SEQ ID NO: 277177 - DNA, 92 bp, Homo sapiens
cgacgtcgtgatccagaagtccagagctgaggactgcctgtttgcagggtttccaggcctgaggtgcccgccctggccccaggagaatgaac

SEQ ID NO: 277178 - DNA, 100 bp, Homo sapiens
gggagccgcaccacctaacgctggccgacaacagcctggcgtccgccacggaagcggggagaggtggtgagagatgacccctgttgaggatttcattggt

SEQ ID NO: 277179 - DNA, 75 bp, Homo sapiens
atgggatccttcatgctgatgcttcttatccttgccagctcctaaaacctatggtagcatgaaagatgacagttg

SEQ ID NO: 277180 - DNA, 98 bp, Homo sapiens
cagatctcgaggaagttctcgtcctgacagatctccagctattgaaggttactgtaaaatggggaaaggagaaatttgaaggtgtagaattgaataca

SEQ ID NO: 277181 - DNA, 99 bp, Homo sapiens
cgcgcccggccggacccgggcccgaggcacgggcgagagcgggaagagcacgttcatcaagcagatgcgcatcatccacggcgccggctactcggagga

SEQ ID NO: 277182 - DNA, 100 bp, Homo sapiens
agaatcttcaagaacttcctcgcactgtgacatgtctgatcccttgctcccatccctgcagcatgaacaaggctctggaagccgaaaagccaagtggaat

SEQ ID NO: 277183 - DNA, 101 bp, Homo sapiens
ctatccagagtttttggagctgtacagttgccttttcgggccttggcttcacgacgttctacttggcgggcaagctgcactgcttcaccgagagtgggcgg

SEQ ID NO: 277184 - DNA, 98 bp, Homo sapiens
tctccttgcagctgcttagacgctggatttttttcgggtagtggaaaaccagaacccttaggagaaatcttgagagtggacagcaattgtgaagatcg

SEQ ID NO: 277185 - DNA, 100 bp, Homo sapiens
gaagaagcttatcgagagaatggtcaggacagattctctgtggagaggcctggcagaacgaagaggatgtgtatgtggtagaagaccaaagaagagatga

SEQ ID NO: 277186 - DNA, 101 bp, Homo sapiens
caaatggcacttcattggccacctacagaaacaaaatgtcaacaaattgatgggtgtggcagagaagacacagcttctgaaattgagtgtacctgctactt

SEQ ID NO: 277187 - DNA, 96 bp, Homo sapiens
caggagtgctgccagaaatttgaacaactttccgaatctgcaaaagaagatctacggaatccagaggcagcattgtctccaaccttccgtagtgac

SEQ ID NO: 277188 - DNA, 100 bp, Homo sapiens
cagaagacgcctagtacaccacgaagggtcacacaaggtgctggagaatctggtaaaagcaccattgtgaagcagatgaggatcctgcatgttaatgggt

SEQ ID NO: 277189 - DNA, 98 bp, Homo sapiens
ggcgctggaggcagcggtgcacgtgcaggcttccctgattgtgactgaggagctgcacctgatcacctttgagaccgaggtgtatcaccaaggcctca

SEQ ID NO: 277190 - DNA, 100 bp, Homo sapiens
ggaggaggtcggctcagccgggcagtttgaggagctgctgcgcctcaaagccaaatgatcctaccagacaatatgaaggaccattacatcactatcgacc

SEQ ID NO: 277191 - DNA, 76 bp, Homo sapiens
acaatggttgcatctgcagatggtttagtttatgaaccagtatttaacgttaatgcacctctgcctccacgaaaag

SEQ ID NO: 277192 - DNA, 74 bp, Homo sapiens
ggaaatctttgggatgctcaatgcagatataatttctacagtagaatttaatcattctggagaattactagcaa

SEQ ID NO: 277193 - DNA, 50 bp, Homo sapiens
ccgagaccgcggccgggaccgaggatccacctccgacccttaagccagag

SEQ ID NO: 277194 - DNA, 82 bp, Homo sapiens
actgggagagctaggatggaaaacatatccattaaatgggcactgccagtgaaagatgtagaagataaacctgaacaacaaa

SEQ ID NO: 277195 - DNA, 74 bp, Homo sapiens
ctgtaaactttggaactgataagtgagagagataaggtttgagcacaaaatgaacataattagggaaaataagg

SEQ ID NO: 277196 - DNA, 75 bp, Homo sapiens
gatgctgccctctgatgtttgtggaatgaactgcttttgggaagcggcttttagatggaatgaaaccttccaaaa

SEQ ID NO: 277197 - DNA, 100 bp, Homo sapiens
cgccagctcagcgtgcccatcccggggggcagcaacggcgacatccagcaagcggccctccaggcactgaagcgtaagaagaggtatgagaagcagctgg

SEQ ID NO: 277198 - DNA, 75 bp, Homo sapiens
gttgaaagtgaaatgtcatgcctctgaaaatgaaggacaaccctccatatgataagggagccttcagaatcgaaa

SEQ ID NO: 277199 - DNA, 90 bp, Homo sapiens
gccggggatagtggagctgcccactctagaggagctgaaagtagatgagatcatctctgttaatgcccatgttagaatggagcagtctgg

SEQ ID NO: 277200 - DNA, 116 bp, Homo sapiens
tgacgccatgtcgggttattcgagtgaccgagaccgcggccgggaccgaggttttccaagagataacttcaccaagatgtccagtgataggcaaaggtccgatgatgagagcccca

SEQ ID NO: 277201 - DNA, 71 bp, Homo sapiens
ctattatatcatttaaaccacatggctatctaaagagaatgcagagagcagtttgcagcagaagaatgaag

SEQ ID NO: 277202 - DNA, 100 bp, Homo sapiens
caaaggccatggcagtaatagcgtgtttatctgacacggacaatctgaattatccagaacagaaagttgtgactgttggacagttcaaaattggtctgat

SEQ ID NO: 277203 - DNA, 90 bp, Homo sapiens
ccggagcatggtcagccccgtcccctccccgacgggcaccatcagtgccggtggtggtgtgcacattgagccccggtatagacagttccc

SEQ ID NO: 277204 - DNA, 75 bp, Homo sapiens
gagcttctcagaagacagagggttttcttttgaggtaagaagacaagaggtttcttctcctagaaaagaaacttc

SEQ ID NO: 277205 - DNA, 90 bp, Homo sapiens
gccgcagttgccggtacatcggggatttctggctctttcctcttcgccttaaattcgcctggagcattggtaagcgtcacactgccaaag

SEQ ID NO: 277206 - DNA, 96 bp, Homo sapiens
cagatagttactattatgaagatggagtactgtaagattgatgttaaaggcatggtgttcaccccacttcatcagcgtacataagttatctcttct

SEQ ID NO: 277207 - DNA, 82 bp, Homo sapiens
atcgacaaaagaaccattgaaaaatttgagaaggaggctgctgaggtaatacctagcaaatacagaaagagagataaagcaa

SEQ ID NO: 277208 - DNA, 98 bp, Homo sapiens
gaaacgcactttgggtttgagactgtgtcggaagaggagaaggggggcaaagggtcaactgctatgatgtgtttggagcccagtcaccctttggtggc

SEQ ID NO: 277209 - DNA, 75 bp, Homo sapiens
tattatggataccaaggaagagaagaaggaacggaaacaaagttattttgctcgccaggcatggtggtgtgttcc

SEQ ID NO: 277210 - DNA, 74 bp, Homo sapiens
ttcagagcctcagccactagctgcgatgcatgtgatcaagcgagagtggcagaatttagtgacatttggaagct

SEQ ID NO: 277211 - DNA, 102 bp, Homo sapiens
aaaataatgagagaaaaggccaaagagaggtgttctgaacaagttcaagggctgacaggacaactggatcagtttcattaaaaaggtatgtatgcattagaa

SEQ ID NO: 277212 - DNA, 100 bp, Homo sapiens
agccagacgagagcttcagccatcacgaggatgatttcggaacctggagaaaatttattggagggtggtgaagagaggatggagacaccccaggaagacc

SEQ ID NO: 277213 - DNA, 101 bp, Homo sapiens
gttgtaagacgttcatcgccgtgttatccttgagtaaagttctttattggtgaaaacatgaatccagatggcatggttgctctattggactaccgtgagga

SEQ ID NO: 277214 - DNA, 75 bp, Homo sapiens
cttggtgaagagttactagctcaagcagcccctgtcaaagggaacaggaagcagtccacggagggtgacgcccta

SEQ ID NO: 277215 - DNA, 100 bp, Homo sapiens
aagaagcatctggagtttatgaatcagctaaaaaaatatgatgacgacatttccccatccgtctatgttaacaatgaatgggcaaccagtgttggggaag

SEQ ID NO: 277216 - DNA, 82 bp, Homo sapiens
aggagctgtgcagccgcgaggaggcgcgggaggtgttcgagaacgaccccgagacgccggatccagagcaatgtagaaggcc

SEQ ID NO: 277217 - DNA, 82 bp, Homo sapiens
cccgacgaccggatcctgaggaggcagctgcggtggcagctgctgagttctcggtgaaggaacaagactgccaatggagact

SEQ ID NO: 277218 - DNA, 82 bp, Homo sapiens
ggagagatcatctgggagcccacaacacagctgtttgatcagcctagggatgggcgtgttttgggcgtgctagaggtgtcac

SEQ ID NO: 277219 - DNA, 97 bp, Homo sapiens
gatcaacatactttagacaatttggaaaaagaattacaagtgctgagatctcttgcaggttatcctgaatacatgtctaacaattttccttgcaacg

SEQ ID NO: 277220 - DNA, 100 bp, Homo sapiens
cgcgagtgggagcaccaggatctcgggctcggaacgagactgcacggattaagaaagaatggtgggatcagattcccaacccagcccgcagccgcctcgt

SEQ ID NO: 277221 - DNA, 110 bp, Homo sapiens
attaacagacaagacacttttcagaaagacaggattgacatctttaagtatgtgatctacggcatcgcagctgcgttctttgtgtatggcattttgctgatggtggaagg

SEQ ID NO: 277222 - DNA, 82 bp, Homo sapiens
ctccggcctggtgaccgatgggaccatggccaccgaccagaggaaagtcaagaacccagcgggtgccgcttctccacccgag

SEQ ID NO: 277223 - DNA, 87 bp, Homo sapiens
gcagagcgcgcagtacctccggtatgatgccgggcgggacggcttcatcgacctgatggagctaaaactcatgatggagaaacttgg

SEQ ID NO: 277224 - DNA, 105 bp, Homo sapiens
gaggaggaagaggcggtagggggtacgggggctggtcccagaagatggcggaggcggggggaaacagtgcttcttagtcctacgtcagcagcagtttaatgtcca

SEQ ID NO: 277225 - DNA, 90 bp, Homo sapiens
atatcctggattgatgacacatcagcatttgtttcccttagccagcccgagcaagtaaagattgtgtgacttcaccgaagaccagaccgc

SEQ ID NO: 277226 - DNA, 100 bp, Homo sapiens
ccccatgtcgtcgaaacgggcgctatgaccccgtcgggtgagagtctctctgagcaacccaaacagaagccattggaaaagaagtttgttcgagtttcag

SEQ ID NO: 277227 - DNA, 83 bp, Homo sapiens
cttttggaatgaatttggaatcttcccttgaagaggtcctgaggcacgtgaatggccaggatcagattgtgcccggcctgtac

SEQ ID NO: 277228 - DNA, 100 bp, Homo sapiens
agtgacctcagcagggcatccagactttattacaactaccacctgctatggtagaagagggtgaggaagttcaaaatcaagaaacagaattggaaacaga

SEQ ID NO: 277229 - DNA, 75 bp, Homo sapiens
tgaccaccgtgatgagcccctgtggaggtgaagacattgtgggagcacggtctgaatctgcacagagcaagatgc

SEQ ID NO: 277230 - DNA, 107 bp, Homo sapiens
aagcgtcgagtctgcagtcgcccgggcgacggcggggtccgcgcggccaggtgagaagccctaccactgcaactgggacggctgcggctggaagtttgcgcgctcag

SEQ ID NO: 277231 - DNA, 74 bp, Homo sapiens
tcatccacgcacctgcagctctgctgagagagtgcaagccgtggggtgaatctggattgggaaagtcgacatta

SEQ ID NO: 277232 - DNA, 83 bp, Homo sapiens
gtagcgagtcggcaacccggaggctatggtgaactaaacggtaatgctggagaaagagaaatatctttaaagaacctgagttc

SEQ ID NO: 277233 - DNA, 82 bp, Homo sapiens
cctggaggaggacgagtaccacgccaccaccgagaccgtcattagcatggcccaggagattcaaaaggtgatgacctatcaa

SEQ ID NO: 277234 - DNA, 75 bp, Homo sapiens
ttcttcgagtatttgtagaaggaaaataatgttgagtttccatgaagaacaggaagtactgccagaaactttcct

SEQ ID NO: 277235 - DNA, 74 bp, Homo sapiens
gtctgcgagccaggattcccggccactcttcacctccaccatgagcctggacatccagagcctggacatccagt

SEQ ID NO: 277236 - DNA, 74 bp, Homo sapiens
ttcgaatctgggtcacttaaacaagccatctatccagcaatacgaggattctctccaccacatagaatctgcag

SEQ ID NO: 277237 - DNA, 100 bp, Homo sapiens
ggacttcctactccaaccattaaatggatgaaaaatgaggaggcacttgacacagaaagcttgcaggagggttcctacttgttatctcatgcagcagaag

SEQ ID NO: 277238 - DNA, 122 bp, Homo sapiens
cagcgtgagcagccggaggatcgcggagtcccaatgaaacgggcagccatggccctccacagcccgcagacctgggatgacgaactggagaagtctgctgcagcgtgggccagtcagtgcat

SEQ ID NO: 277239 - DNA, 74 bp, Homo sapiens
taagccgattttccggaaaaagggtttctatcttactaaaggatatttcagaaaatctatattcactgaggagg

SEQ ID NO: 277240 - DNA, 100 bp, Homo sapiens
tgttaatcatagactttcgacattggagtgcttcattaccacgagataggcaatacgaaagttgtgacttctcaccaggagatttggtttgggccaagat

SEQ ID NO: 277241 - DNA, 82 bp, Homo sapiens
accaaggatacccacagtacggctggcagggtggacctcaggagcctcctaaaaccacagcatgctacaagtgaaaactgat

SEQ ID NO: 277242 - DNA, 82 bp, Homo sapiens
tcattttggtggatgatgctagtgtagatgccagagactgctgctactttgaaacgtacgatagaggccctgatggacagag

SEQ ID NO: 277243 - DNA, 100 bp, Homo sapiens
atacacgaaaaaacttccagaacatctgggagaatatttaatggaaaatcgcttggttaaaacctgacacttttaacagcttagcataccagaggatgag

SEQ ID NO: 277244 - DNA, 83 bp, Homo sapiens
ccggcttcggagcgggagtgttcgttgtgccagcgactaaaaagagaattaaacaaccaccatgtcgagcaaaaaggcaaaga

SEQ ID NO: 277245 - DNA, 100 bp, Homo sapiens
atggaggactgtgtgatctccatcctgggaagggggctcattcacagagagaggagctacaggttctctgtgaaaacgctgctggagaagtacacagcgg

SEQ ID NO: 277246 - DNA, 74 bp, Homo sapiens
tgtggtacttctcgcagtccccgcgcgtggtcatccagtgtttgtggagaaggtgctgcagagactttttcctc

SEQ ID NO: 277247 - DNA, 75 bp, Homo sapiens
aatgataaatttccctctggaggaacttgtaatagctggcatcgttgagaatgaatggaaaagaacgtgctccag

SEQ ID NO: 277248 - DNA, 75 bp, Homo sapiens
ttctagaagcctgtcgaaaaatgggggtgcctgaggagtacgagagggcctccaaagtggaccagtttgtgacgc

SEQ ID NO: 277249 - DNA, 111 bp, Homo sapiens
cgggcatgccaagaagatgagaccgggggaggcgacgctaagttgctgatcgtggcggttttaaaatcaaagatgggaaaatcggagaaaattgcccttccccatggccag

SEQ ID NO: 277250 - DNA, 74 bp, Homo sapiens
aatgtcacctgtagtcccattattcagcgggaccaagcagcaaactgcagtagtttgtgaaggattctaatatg

SEQ ID NO: 277251 - DNA, 75 bp, Homo sapiens
gccggaggcgggaggacgggctgccgcagttgaggctgtgaagctgggcagggtttcagctgagctgaggttgga

SEQ ID NO: 277252 - DNA, 51 bp, Homo sapiens
ctggcgctgacaagggtccagcctccgataccatattttacatccttccac

SEQ ID NO: 277253 - DNA, 100 bp, Homo sapiens
cccaggcggtgacagagtggagccatggctagagggtgaagttgaacaaattgctatgatgaaaccaaaaggccagactgaacacgatgagggtatgctt

SEQ ID NO: 277254 - DNA, 100 bp, Homo sapiens
tcatcgtcaaagaagaagaaaacaaaggtagaacatggaggatcgtcaggctctaaacaaaattctggaataggaggccttcaagattttgtgctgaaat

SEQ ID NO: 277255 - DNA, 100 bp, Homo sapiens
tggaaggccacgcctcctcccgcctgccccctcagccctgtggctgggggcagagctcagctattgacctgaaaagtggttctggaaaagtgtaccaagg

SEQ ID NO: 277256 - DNA, 75 bp, Homo sapiens
agctgcagccggttgggccggtgtactttcccgggaactctaatgatccaggacaaagaagttaccctggagtat

SEQ ID NO: 277257 - DNA, 82 bp, Homo sapiens
tttagagctgcggaacaggacgccctctgatacttcccaagtaagaagcggaagaggagccgctggaaccaagacacaatgg

SEQ ID NO: 277258 - DNA, 75 bp, Homo sapiens
ttggaagagtacaagctgatcctgtccacagctttaccaacagggacgcttatgtcaactgggcagtgaattttg

SEQ ID NO: 277259 - DNA, 83 bp, Homo sapiens
cttggaatccctcagaacactattttggtgcagactttgctgagggtgacccaggatttacaaaaggtgcaggtatgagcagg

SEQ ID NO: 277260 - DNA, 128 bp, Homo sapiens
aatgattcctgcctttggaattttcagactgctgatcatcatcctgataatgcaaggaggaagtggtgagcaccttggatgctgtgcaggtactctcgggcgtcagccagctcctgcccaagtcccgc

SEQ ID NO: 277261 - DNA, 83 bp, Homo sapiens
tcggcagtccacccaccgccgccgcctcccaggtcgaatgggagcaggagaaaaaaagaatgcctgtagtgtccagtaccgac

SEQ ID NO: 277262 - DNA, 100 bp, Homo sapiens
cgcaggccgggaagcttctgcgagccctagcgctgcggccccgcttcctggcggccgggtcccaggagcctagtaataaacgggtcaaacccctttcccg

SEQ ID NO: 277263 - DNA, 74 bp, Homo sapiens
gaatctgcccacccctcctgtaacccagcctgtttcacttcttggggggacacagcgattgccacgcgccattg

SEQ ID NO: 277264 - DNA, 95 bp, Homo sapiens
ccctatcctatccgcaaacatctccgtctcctggcagctcctcccccttgggtgcagagtcatcaagcacatctcttcaccccagtgaccctgtg

SEQ ID NO: 277265 - DNA, 50 bp, Homo sapiens
ctgcaaagctgtacaagagatcatgcaggatgagaacaagttgagcagtg

SEQ ID NO: 277266 - DNA, 100 bp, Homo sapiens
acagttgcccagctctgatgcttttgctgctgtggctcagctgtttcagacaactcaaggccaacaggttattcttggacagtataattggctttcctat

SEQ ID NO: 277267 - DNA, 90 bp, Homo sapiens
gtttgtctggattttcctgtagaactgagggcagcctctgctgcgagaagttctggagaagcagccagtgctaagccagaccgaggcccg

SEQ ID NO: 277268 - DNA, 75 bp, Homo sapiens
ttcgcgtcctgctccaaggactgcactgtgaaggaggtggtccaggccacgctggtggtcctggccttggccatg

SEQ ID NO: 277269 - DNA, 50 bp, Homo sapiens
agaagacagagggttttcttttgaggtcaaaatgcagatcttcgtgaaaa

SEQ ID NO: 277270 - DNA, 83 bp, Homo sapiens
gcatccggaaacatgtggccctacatcaggaatttcatggcaaggagtggcagaatttagtgacatttggaagcttttcaaac

SEQ ID NO: 277271 - DNA, 74 bp, Homo sapiens
caacctgaacgtcaccgaggagaagtaccaggaggcgttggccaaggttttctggatatgccgcagaaggatcc

SEQ ID NO: 277272 - DNA, 100 bp, Homo sapiens
atccagttccaaggactccacgggcttcctgcctgacacagctcacttcaagaagtgcacaatgtcagaacgtggaattaagtgggcttgtgaatattgt

SEQ ID NO: 277273 - DNA, 90 bp, Homo sapiens
ccaaatggacgggactattaaggagcttcagagagacatagagaagcacagtacaggtgttgcatctgtcctcaacctgtgtgaagtcct

SEQ ID NO: 277274 - DNA, 100 bp, Homo sapiens
cgggagttcaagaagaacactccagagaataactgaagtgaagtgatggactccgatttggagagtagtaagacgtgaaaggaatacacttgtgtttaag

SEQ ID NO: 277275 - DNA, 100 bp, Homo sapiens
aagactctcaaacaacatggagcagagaccaagccgaaatactggaaggctataagccgatagtagaatatattgatgcccagttcgaggcctacctgca

SEQ ID NO: 277276 - DNA, 50 bp, Homo sapiens
gatccattgaacatctagataaaatggtgttcagtgtgaggtggagctga

SEQ ID NO: 277277 - DNA, 75 bp, Homo sapiens
ccccctgaaccccaaggccaaccgcgagaagatgacccagaaagaatgggctcaggtattcagtacggagatgct

SEQ ID NO: 277278 - DNA, 90 bp, Homo sapiens
gggcacctgtcagatgccagccagagctctcctgtatcaggtgtctgtcggtccaagctagaaggcgtccgacctccgatcatgaacggg

SEQ ID NO: 277279 - DNA, 100 bp, Homo sapiens
catgtacaaaattacaagtggaaatccacaaggattcttttcaatacatcctaaaacaggaagggaaaaggccgaggcatcagcgtgtgaagaccgcaaa

SEQ ID NO: 277280 - DNA, 75 bp, Homo sapiens
ggatgggcggagaaagattctgccagaagaagagaccacattgtgcaacacatcattggacaacccaacccagag

SEQ ID NO: 277281 - DNA, 98 bp, Homo sapiens
atgatggtcaaagaaaagatgatcacaattgaggaagcacttgctagggttgaaaacgacatatctgctttcacctacgagaggacactaatgatgga

SEQ ID NO: 277282 - DNA, 75 bp, Homo sapiens
ggtcggatttcaccacaagaagggctgccagggttacacatcattttggaatgactgtatatcatctggattacg

SEQ ID NO: 277283 - DNA, 100 bp, Homo sapiens
attgtcgtgtcagcttttggactccctattgtatttgccagagcacatctgattagagatggacaaccgaattgttatgtactaaagaataaagatttag

SEQ ID NO: 277284 - DNA, 100 bp, Homo sapiens
catggacctgaaggagaagcacctggtgagtgaactgccttcctccgtcatccataaggatgatttagagttaaaggagaaagaccaaaagaaaccacca

SEQ ID NO: 277285 - DNA, 100 bp, Homo sapiens
ggcctttaggaaagccaagatcagccgcctgtcttggttagatggctctggattaggattctcactggaataccccaccattagtttacatgcattatcc

SEQ ID NO: 277286 - DNA, 104 bp, Homo sapiens
ccaattttccaagtggcagattatggaatagttgcagatttatttaaggggacaggcaaatggtatgaattacaagacctccaggtgactgacatccttcccca

SEQ ID NO: 277287 - DNA, 100 bp, Homo sapiens
ccggattttgcggggttcgtcgggcctgtggaagaagcgccgcgcacggacttcggcagagcgtgttacacgttcccaagaagaacttcgagaagataaa

SEQ ID NO: 277288 - DNA, 101 bp, Homo sapiens
gcttgatcaggtggaacagattcagaaggagcaggattaccaaagggccttggacaagattcgctatgagagcctgacagacccttcgaagttggacagtg

SEQ ID NO: 277289 - DNA, 90 bp, Homo sapiens
cgggcatcgggcaggaactgggcgccggcgcttacagcatgaggcagttgcagtggtgcagaatggctgacctcagtcttgcagatgcat

SEQ ID NO: 277290 - DNA, 75 bp, Homo sapiens
ctcctacatttagccaatgaaaaggtacttttaggttgaaatacgcccctccagcagaaagtctggactccacag

SEQ ID NO: 277291 - DNA, 75 bp, Homo sapiens
gcttgagaagagagaagaatcagtgaaataatctcttgactggaagagttgaagaaatatggagatcaacacaaa

SEQ ID NO: 277292 - DNA, 100 bp, Homo sapiens
gccatggagccgggggaggtgaaggaccggatcctggagaacatctcgctgtcggtgaagaagctcaggttcagattgaaggagattttttgccatgttc

SEQ ID NO: 277293 - DNA, 91 bp, Homo sapiens
tcttggacacctaaaacccacagtcctccaggtacctgccgtgggcagatctgagctttcttcttggacaccccatacccacagtcctcca

SEQ ID NO: 277294 - DNA, 82 bp, Homo sapiens
tgcaatggtctcaatctctggaaaaacttcttgccaaccaaactcgatgcattctatttctcatcatttggctcataactgg

SEQ ID NO: 277295 - DNA, 75 bp, Homo sapiens
gtacaagagcaacaactatttggtgtaaacaggaacatcgataagtagtgtaaaaacttgcacaatgaaatccga

SEQ ID NO: 277296 - DNA, 101 bp, Homo sapiens
ttaatatctggcctggatatcgctgggacggagtggacagctgaggagtacctgtcatttgcctttgagcattgtcaccgttctagtcagaagaacaaaag

SEQ ID NO: 277297 - DNA, 75 bp, Homo sapiens
gaaagcatctattgtgaaaaacctaaaggataccttagagccccccaagatgaacccagtggtggagccactgtc

SEQ ID NO: 277298 - DNA, 50 bp, Homo sapiens
cggtggagatcgcaggtcgctcaggtcggcagataggatcaccattcagg

SEQ ID NO: 277299 - DNA, 100 bp, Homo sapiens
agagaggttttgaattcacgcttatggtagtgggtgcctgtgcagtcctggtttgatgacatggcagacactgagttgctgaacctgatcccaatctttg

SEQ ID NO: 277300 - DNA, 131 bp, Homo sapiens
tgcagaatcaccagattattttgtggattttcctgttccattttgtgcctcctggacacctcaggtttatcttgcagattatggactttcctacagatattgtcccaatgggaaccacaaacagtatcagg

SEQ ID NO: 277301 - DNA, 100 bp, Homo sapiens
cccggagtggggtgtcggcgcctcattcgggtggagctgagccggagacagatgcggcattccaaaagaactcactgtcctgattgggatagcagagaaa

SEQ ID NO: 277302 - DNA, 75 bp, Homo sapiens
gcggagagcacgccatgaaggcctcgggcacggtcaaaatgcagatcttcgtgaaaacccttaccggcaagacca

SEQ ID NO: 277303 - DNA, 80 bp, Homo sapiens
tctgcctggactgcattgtcgaatggtccaagaaagtttcctacactactgaggtttaggggcactgtgaagcaaaagcc

SEQ ID NO: 277304 - DNA, 100 bp, Homo sapiens
gagatctagggctccttacccaagtacatatcctgtaagaccagaattgcaaggccaggtccgttatgccacctggagcatcataatggactctgtggtg

SEQ ID NO: 277305 - DNA, 98 bp, Homo sapiens
tgaagaatctgaagagctggatcagaagacattcagcattaaatctcctgcaaagaagctgagccatgcaattagtaaatctttggggtgtgtaccca

SEQ ID NO: 277306 - DNA, 100 bp, Homo sapiens
ggctgctcatctctgtgatcagcggacaaggcaaaatctcagcaagttcggacctctagtacaataaggcgaacctcctctttggatacaataacaggac

SEQ ID NO: 277307 - DNA, 100 bp, Homo sapiens
cggagaccccgcgccgacggctgctcaaacatcaggctggctactccaagaccctggcatgaggctgaggacaacttacaagggcttcaccgaagcagtg

SEQ ID NO: 277308 - DNA, 100 bp, Homo sapiens
cagtctccacctcccagctgcaagcaattctcctgcctcagcctcccgagtagctgggactatagacatttcaatgatgagtctcccctggggctgcgcc

SEQ ID NO: 277309 - DNA, 101 bp, Homo sapiens
attttacataagaagttacctttttcagttctggacatggcaagacatgtgccactctatcgggcactgctggaattgcttcgggccattgcttcttgtgc

SEQ ID NO: 277310 - DNA, 98 bp, Homo sapiens
ctgggaatgtctggcaactctgccacataatattacctttggctgatgatctattctgtaggaagtctgctggaactggcgtatctctctgatgatgt

SEQ ID NO: 277311 - DNA, 75 bp, Homo sapiens
gtctgcgagccaggattcccggttaacattcaagatggtacatgctgaagccttttctcgtcctttgagtcggaa

SEQ ID NO: 277312 - DNA, 100 bp, Homo sapiens
cgcctcccctcggcacccccggccccggagctgcctggaggcggccgcactcgggcctccggtgtggctgtctctgatggtgtcatcaaggtgttcaacg

SEQ ID NO: 277313 - DNA, 100 bp, Homo sapiens
gtcggtctctgtcttggcacctgcaggaaacaagctcctacttccagaaaaagtgctcctgggactccaggataccagtgttctaagaacggaagcatct

SEQ ID NO: 277314 - DNA, 100 bp, Homo sapiens
cgacggcgtactttgggcttcatcatggaggactacctgcagggttgtcgagctgctctgcagcaaaagtactttgactcaggagactacaacatggcca

SEQ ID NO: 277315 - DNA, 119 bp, Homo sapiens
ctggcatgaggattctgccaccatggaagggctcctgtctccgatgaggacgaaggtgctgactgggttacttttttaaacactaggaatggtaatttctactcttctggacttcaaac

SEQ ID NO: 277316 - DNA, 82 bp, Homo sapiens
ggcgggagcttccgggagggcggctcgcagaacccttaggagaaatcttgagagtggacagcaattgtgaagatcgccagag

SEQ ID NO: 277317 - DNA, 140 bp, Homo sapiens
gccgctgttgtgacaagaaaagctgtggcaaccgaaatgagactccctcagatccagtgataattgacagaaaactgcccttcaattctaatctcacctcaaaaacagaatgaggaaactatttctgtgatcaagaaagc

SEQ ID NO: 277318 - DNA, 74 bp, Homo sapiens
ctggttgagggtctccagggttctttggggcccgaggatcaactcactatcctgaaggtccattctcccaagaa

SEQ ID NO: 277319 - DNA, 75 bp, Homo sapiens
gtcgtgcaggggcctgacggccgtctggagctggaagtcttctgaccaactggccctccgtccctcctaccataa

SEQ ID NO: 277320 - DNA, 50 bp, Homo sapiens
tgctggctgttatgtacgcaggaggtttaccgacaagactgtgaaacttt

SEQ ID NO: 277321 - DNA, 75 bp, Homo sapiens
tactttcaagtcatcccaaatatggttccatccctaaacttatacggttggttctggacattacacagcatacgc

SEQ ID NO: 277322 - DNA, 74 bp, Homo sapiens
gaacatgacgccgtcacccttcctgcgattctacttaggtgttatgtattctctgggacatggaaactgaagaa

SEQ ID NO: 277323 - DNA, 106 bp, Homo sapiens
ctggccacttgcttgggatcctttatcctggtcatcttctatttccaaaatggtttcacccaaatatcactggtgtggaggcagaaaacctactgttgacaagagg

SEQ ID NO: 277324 - DNA, 143 bp, Homo sapiens
gagcaacgtcaactattacaatcgcttgtacaaaggagagtttaaacagccaaaacagttcattcatattcagcatgtacattgaagatgtcagtttctacatgtgggaagtagacattgaaggctttatggtttacagacaa

SEQ ID NO: 277325 - DNA, 83 bp, Homo sapiens
atcttccgcaacctggagaacgccaagcgcttcgccatcgacataggtgaaatgacaatggatgctctgttggctcgattgaa

SEQ ID NO: 277326 - DNA, 98 bp, Homo sapiens
ccgtgccgctcgacctcctggtcagcacttaccggctgccccagatcgcgcgcctggacaacgttcaaagcagtattcagcgatttcaagagaagttt

SEQ ID NO: 277327 - DNA, 119 bp, Homo sapiens
aatttgctctgctaaaaggctccttcagtgagcaaggcatcaacgagtttctcagatttgtagccaaaccgtgcgccatagccctcaacattcaggccaatggaccacaaattgctccg

SEQ ID NO: 277328 - DNA, 75 bp, Homo sapiens
ggcagctgttagccgagcaagtggaaagcggtgacacgccaaaggaccctgcggtgatctccaagtccccatcca

SEQ ID NO: 277329 - DNA, 83 bp, Homo sapiens
gagagctgacaatgatgaatctcaatcatccagacttgaaacatatcgacccagtggttttaaaacattgtcatgcagcagct

SEQ ID NO: 277330 - DNA, 75 bp, Homo sapiens
tggaggttgaccagttcctggaagacgtgcggctacaggagcgcacgagcggggtctcgactctgaagacagagt

SEQ ID NO: 277331 - DNA, 100 bp, Homo sapiens
atatttatgaactgaaccctaataaggagccatggagaaaaatggatcttaggccacctgtctttaccagtttccaagactatgttactgggcttcagac

SEQ ID NO: 277332 - DNA, 100 bp, Homo sapiens
tccaggtgacccagggaacgggaccggagcttcatgcctgcaaagagatagcagaccccacgttagctgaaatgggaaaaaacttgaaggaggcagtgaa

SEQ ID NO: 277333 - DNA, 94 bp, Homo sapiens
cgcgaggcaggagagaggaggaggagtgcggcgcggcggccccgggaccaaggaggccccagggagcgccatggcccgcgcacgccaggagggc

SEQ ID NO: 277334 - DNA, 75 bp, Homo sapiens
ggagccgagggccagagactaagtgaagaaggtagataatgactataatgcccttcgagaaagactcagcacctt

SEQ ID NO: 277335 - DNA, 100 bp, Homo sapiens
aggccccaatggcagccagtttggattttcactggacttccacaaggacagccatgggagcaataccaagtttccaggcccgaagagcatcccagactat

SEQ ID NO: 277336 - DNA, 100 bp, Homo sapiens
ctgtcaaccagggtcgccactatcagaaagaaatgaacccaccttctccttctaatccccggtggaagctgaccccaagccacccttcacctggacagga

SEQ ID NO: 277337 - DNA, 50 bp, Homo sapiens
cagcctgcggagcctgtggggcaggcacttctgtctcctgctgccatgtg

SEQ ID NO: 277338 - DNA, 95 bp, Homo sapiens
gatcatcggtcaggccaagaagcatccgagcgtagattttcgttccgtcacccaggctggagtgcagtggtgtgaccttggcttgctgcaaccct

SEQ ID NO: 277339 - DNA, 100 bp, Homo sapiens
aaaccagctcacggggctcatggacatgaagattttctacaaggggaagaacactggactccaggagcagaggctgagcagcaggatacagctagcgtgg

SEQ ID NO: 277340 - DNA, 100 bp, Homo sapiens
gtttccctttagatgaacagatgtatgcaaaatatgtcaaggttacccgtttcctaaaactggttccagaccttttggccattgtgcagcgtaagaaaaa

SEQ ID NO: 277341 - DNA, 100 bp, Homo sapiens
gagagagtgaggagccagacgacaagcacacactatggcgctgaaacggattaataagctcgaattacatctttacaagaggaggtgaagcatctcaaac

SEQ ID NO: 277342 - DNA, 75 bp, Homo sapiens
caagatggcggacaaaacgccaggcggatctcagaaggccagttcaaagatgtgtatatctcatgattgatatgg

SEQ ID NO: 277343 - DNA, 100 bp, Homo sapiens
ggattcgttactgctttgcaacgcgcacctaactccagggacttccttccccgcggttcaggaatcgtcacccggcggcctctcattctgcagctcatct

SEQ ID NO: 277344 - DNA, 75 bp, Homo sapiens
gctggacaggcagagtgctgatgtgaaaaataccacgacaaaaccaccctacggccctccaggcactgaagcgta

SEQ ID NO: 277345 - DNA, 100 bp, Homo sapiens
tgcatcagccatctcttagtccagcaagtcctcatagccagggaaagaaaggagaggctatccaaatttgaatctattcgtcattcaattgctggaataa

SEQ ID NO: 277346 - DNA, 83 bp, Homo sapiens
agtggtgtgtgacggggctcctgatgaccctgcttttacatggaaacatcatcacctctcttagaatggcacctgcttaccta

SEQ ID NO: 277347 - DNA, 80 bp, Homo sapiens
ctcggcggcgccaccatgtactcgggagccggccccggtcagttcaccgggacctggaggcccagattgcgatcgtgacg

SEQ ID NO: 277348 - DNA, 97 bp, Homo sapiens
catgaccttccagaattacgggcaagcgctgttcaaacccatgaaggggggccctcagcctcttggccttgaacgggctgttcatcttgattcacaa

SEQ ID NO: 277349 - DNA, 90 bp, Homo sapiens
aagttctttcttcatcagaatcagattcatgcaataggtgctctgaagattcctcgaaaatacatctgagaaattcttttgacatcccgg

SEQ ID NO: 277350 - DNA, 75 bp, Homo sapiens
cccggggtgtaataatgttaactgaggtacaagaaaattccccaggacacagagctggtttggagcctttctttg

SEQ ID NO: 277351 - DNA, 75 bp, Homo sapiens
acactttctcaagcactgtgatcttcaaatagatgaagcatctggtttttgttatctcaatgatgctgtcctggg

SEQ ID NO: 277352 - DNA, 100 bp, Homo sapiens
aagagagacatttgaaatttctacagcaacttggcaaggtccaggagagcctcagattattttttgtagaagtgaagctgcacatcaaggagtaattacc

SEQ ID NO: 277353 - DNA, 74 bp, Homo sapiens
agtatcagaaggccattgacatctacgaacaggtggccatggctaccgggcaggtgttgttccagcggttcttt

SEQ ID NO: 277354 - DNA, 83 bp, Homo sapiens
gaggccgcctggggtagcggcggcgggagtcctggcgctctgcagagttatcattaccatgttggtgacctgttcagtttgct

SEQ ID NO: 277355 - DNA, 100 bp, Homo sapiens
acagcccatcgtgtgaactatagagtttgtggacagatttatattgttctgaaaatccagaatggcttgatgtttacatgcacattttacaactgcttac

SEQ ID NO: 277356 - DNA, 75 bp, Homo sapiens
ggcctgggtgctggcgaagcggaggccggagatgtccaacatcacagtcacatacagagatggccgagtggcaca

SEQ ID NO: 277357 - DNA, 100 bp, Homo sapiens
ccgcgccatgtccgcgcacaatcggggcaccgagctcgattagtgatgatgaaccaggttatgaccttgatttattttgcatacctaatcattatgctga

SEQ ID NO: 277358 - DNA, 75 bp, Homo sapiens
gccataatcgtcctcaccaagtctggcaggccctgcatcatggaaactctttctaatgcaagtggtacttttgcc

SEQ ID NO: 277359 - DNA, 100 bp, Homo sapiens
cgccgcggcccccgctgcccacacagcagtttggcgtcagtctgcaatatcagggccgggacctgaagctgtgcctgtgggacctcgcggagggcaggag

SEQ ID NO: 277360 - DNA, 100 bp, Homo sapiens
gggacatgctgatcttccctcaagacaggtggcctgctacagctgcacgtctggacagtggtcatctgtctgcccactccctgctgggcacggtgagcct

SEQ ID NO: 277361 - DNA, 100 bp, Homo sapiens
ctgcttctatttggaggctggggacctctcaaagctgctctgttaaaagcgaaaatgaaacaattgcctgcggcaacagttcgactcctttcaagttctc

SEQ ID NO: 277362 - DNA, 96 bp, Homo sapiens
cccttgccttgagtcagtgcgccgctctccagcccgcttgaacggtaatactgcattgcatgattgtgcagaatctggaagtttggacatcatgaa

SEQ ID NO: 277363 - DNA, 87 bp, Homo sapiens
tgtggatattttggtggggtgaagaccccagttttgctgaccttattcaccatgacttatcaggctttcctggggtttgatgtatgc

SEQ ID NO: 277364 - DNA, 100 bp, Homo sapiens
ctggctggagccctgcattcgcggcgtgtgcaggagtgtttctcaggagctatcagaaactatcctcaccatggtagccaattgcagtaatgttatgaat

SEQ ID NO: 277365 - DNA, 100 bp, Homo sapiens
gcagagggtctggagggctgagcagtcaactcaaatgcaagtccaagaggaggaggaggcggaggtccaagcggaaagctctcctacaagcttgtgtgcc

SEQ ID NO: 277366 - DNA, 100 bp, Homo sapiens
aaagcatttaaccagcatggctacttcatattttggaaagcagtttttaagacaagtacccactgatggtaatgctggcctgctggctgaaccccagatt

SEQ ID NO: 277367 - DNA, 76 bp, Homo sapiens
cagagaataagctggacaccaaatacccgtacggttaacgaagcccttgtcatttgctgattgtgttggggatgag

SEQ ID NO: 277368 - DNA, 100 bp, Homo sapiens
cgcgaggctcctcactgcagcgaagggtcccgcaggctcccgatggcgagattacggcgccctggccatcatcatggcaggcattgcatttggctttcac

SEQ ID NO: 277369 - DNA, 97 bp, Homo sapiens
ttatttagttctggggagcgcctcgtcgacatgagtgatgtggaggaaaacaacttcgagggcagagagaaaatgcagaagtctccatggacgtttc

SEQ ID NO: 277370 - DNA, 101 bp, Homo sapiens
ttatgtcaactgggcagtgaattttgtgaattggaagtttttgctaaagtactgagagctttggataaaagcaaagagagcaggatgaatggacagtacca

SEQ ID NO: 277371 - DNA, 80 bp, Homo sapiens
cagcctgcggagcctgtggggcagagctctcgatgttctgaagtatgaggaagttgacatggattcattagccaaggctg

SEQ ID NO: 277372 - DNA, 123 bp, Homo sapiens
gaggattaaccctgctcctgggtcctacgtctgtccagggagctgagcggggcgctcctcagactcctgcccctgccacgagaacacaccctttccagtttgctggagaaatataagagaagt

SEQ ID NO: 277373 - DNA, 94 bp, Homo sapiens
ctggggccagggaaccctggtcaccgtctcctcagccgaggaggagctggtggaggctgacgaggcgggcagtgtgtatgcaggcatcctcagc

SEQ ID NO: 277374 - DNA, 100 bp, Homo sapiens
cctatgaaacatatgttggctgcctctgctggagaagtgaaacttgaactttacctgatttctgtatgttgtcatcttgcgtacgcccagtccccacgac

SEQ ID NO: 277375 - DNA, 75 bp, Homo sapiens
cgcggcgtccccgcggccccagcccagacgccctgctggcggacttggagtctaccacctcccacatctccaaac

SEQ ID NO: 277376 - DNA, 92 bp, Homo sapiens
gaatgacagctgtgataaaaaaaaaattcatctgggcggtatctggaacttgggcaagtgtccagagaatggctgggatgaaagtacacttg

SEQ ID NO: 277377 - DNA, 75 bp, Homo sapiens
aaagaggactggagtggtttgtctgtgatggctggaagttcctctgtaccaggggagagaccattctaacacagg

SEQ ID NO: 277378 - DNA, 98 bp, Homo sapiens
gccgcgtggctggaagacatggccactccagtcggtgttgagcacggcgagcagtctcaggcctttagtgatgatggctgcgtcatcaccatctcggg

SEQ ID NO: 277379 - DNA, 100 bp, Homo sapiens
aggacaaccatggagccttcctgtggcaggagagacaacaaagcgctattatcctaaggggcacccacgggtacatggctccggaggtcctgcagaaggg

SEQ ID NO: 277380 - DNA, 75 bp, Homo sapiens
acagtctcagggacaccatgtagagaattttggtctcgattcaggatgttcacggaagaccagggtgtagatgac

SEQ ID NO: 277381 - DNA, 100 bp, Homo sapiens
cttggccaaccttggggagctgtgccagaggctggactttctgctgggctccgtggtccatgagctacgactaatagactggggtttggctgagttttat

SEQ ID NO: 277382 - DNA, 100 bp, Homo sapiens
agaggccgccatcaaccgccagatcaacctggagctctacgcctcctacgtttacctgtccatgtgtactaatggtcacttgatgtgcgctggctgtttt

SEQ ID NO: 277383 - DNA, 100 bp, Homo sapiens
tgaggggccaccgagatacctctatggttcatgagcttaatagtttgccagtgctctgagcaagttcgtggaggagcagaacctgaaggacctgcgcgtg

SEQ ID NO: 277384 - DNA, 83 bp, Homo sapiens
ccccaagtcgacgccgcaacccggggaaagcaggatgctggcacgtgtgtcctggtcctcaacaaccttctgtgagcctaggg

SEQ ID NO: 277385 - DNA, 73 bp, Homo sapiens
ttggagccctgaaatactctgatgacctactgaagaagcttctcaaagaaacctccacagctgttgagaaaaa

SEQ ID NO: 277386 - DNA, 154 bp, Homo sapiens
cgctcagccgccagagaagatgcggctgctcccggaatggttcctcttgctctttggcccgtggctccttaggaagtacattgtgaagtgccatggcaacacgcttctgccccagttcctggggatgtaccgagtcagtgtggacaacgaagac

SEQ ID NO: 277387 - DNA, 114 bp, Homo sapiens
cgactctgcttaaaaccacgtggttcgatggctgccgcggctacgctgaggctctccgctcagaatccagggcctgaaaacccagaatgaacttgtgtccatcccagagatcac

SEQ ID NO: 277388 - DNA, 101 bp, Homo sapiens
accgagcgcgggcaggcgggaggcaacggagctaccagccggtggatcatccatgccatggagtatgaacttcagatccgtggcggagacaagccagcctt

SEQ ID NO: 277389 - DNA, 75 bp, Homo sapiens
ggctaccctcactggcctgccagggccctgtttgtgctcttcgtcctggcctacatccacatcgtcttctcccgc

SEQ ID NO: 277390 - DNA, 100 bp, Homo sapiens
tcgcgctgtaagaagcaacaacctctcctcttcgtctccgccatcagctcggcagtcgcgaagcagcaaccatgatttggtcgtattgggcgcctggtca

SEQ ID NO: 277391 - DNA, 75 bp, Homo sapiens
gagaaggtacagtacttcttccttccaaggaccagcggtagctcccgggataacgaaggaggcccaacttcattc

SEQ ID NO: 277392 - DNA, 97 bp, Homo sapiens
aactctgaaaatcaacgcagctggaatgttaaccttagaaagtttccagaactgataaatttcaaacggaagagagtggcagcatttagaaagaatc

SEQ ID NO: 277393 - DNA, 50 bp, Homo sapiens
aaagagcttctctccagagtagaaagacggagtctcactctgtcgcccag

SEQ ID NO: 277394 - DNA, 111 bp, Homo sapiens
cgtgaccaccgtgacacccttcactgcgcagcagcgccaggcctgggaccggctttatcctgtggataaacgcagagtgaacgagtttggggagtcctacgaggagaaggc

SEQ ID NO: 277395 - DNA, 100 bp, Homo sapiens
tggtgcagagatggcattacgaacctttggccacttgcaggttcaggagaagtggcacctggtggaggacctgtcgcgactgctgccggagccaggcccg

SEQ ID NO: 277396 - DNA, 100 bp, Homo sapiens
tgcagcgggagctggacggcgagcgcgagcggcgcgagaaatgcagggctcgcggcctggcaagaatgtacagctgacagagaacgagatccgcggtctg

SEQ ID NO: 277397 - DNA, 100 bp, Homo sapiens
ggacggtctgcatactcgctgcccgccggctccctcccccgcgtccctgcgaccgccgcggcgaagatggaaagaccacagcaagattctttcattcgtc

SEQ ID NO: 277398 - DNA, 95 bp, Homo sapiens
agttggaagcagccgatccagcctgcggagcctgtggggcagggacatgagagatggctttagaagaaaaagtttctactcttcccattatgcga

SEQ ID NO: 277399 - DNA, 124 bp, Homo sapiens
ccatcgaaaggagcaagagcaagatcaccgtgacatccgaggtgcctttctccaaaagggcctacaaatccgcactggactacaccaaacgaagtctggggattttcattgacctccagaagaa

SEQ ID NO: 277400 - DNA, 100 bp, Homo sapiens
ctggaagccagagaccaacgagatcctgcacatgtctttacatatctgaagagatggattaagaatgctttggattaaggattgtggagcacatttcaat

SEQ ID NO: 277401 - DNA, 83 bp, Homo sapiens
actacgccaaggaggtttacaaaatagacatgccgcccttcttcccctccgaaagtttccaatacttatctacaggaatcgcc

SEQ ID NO: 277402 - DNA, 96 bp, Homo sapiens
gtcccagccacttttcccctggtcttcaatgccagaatggtgtttgaaaagaaaactgtggatttagttactccactctgccatgtctttccacca

SEQ ID NO: 277403 - DNA, 96 bp, Homo sapiens
cttctgcctaagaagaccgagagtcaccacaaggccaagggcaagtgatttgacaggacttggatgttgtgggtgatggtatgcagtgtcctcctt

SEQ ID NO: 277404 - DNA, 103 bp, Homo sapiens
ctgtctcatccaaaaagtctgagcgaggagtgactgccaaaaaggagtatgtgtgccaggtgctggagaatctggtaaaagcaccattgtgaagcagatgagg

SEQ ID NO: 277405 - DNA, 73 bp, Homo sapiens
caagggcagaaggttgaagaacaggaggcaggacaagctgaaggtgcacatgcggaagcacacgggcgagaag

SEQ ID NO: 277406 - DNA, 99 bp, Homo sapiens
gccaaagccagaggtcaagtggagaagtggttggttgaattagagagagttatgattaactccatccacaaggtgcaaaatgagttgataacaaccaga

SEQ ID NO: 277407 - DNA, 95 bp, Homo sapiens
ccgaggcgaggaggagcgctggcgtattctaccttgtaaatactgttatttgtatatactgtaaatgatgacatcggtgggcactaaccgagccc

SEQ ID NO: 277408 - DNA, 96 bp, Homo sapiens
tgcccgaccgccgcccgactgccatcgcccggcccggccgcgcccgcggaaccagaccagactgaggctgatgtgaatccaaaggcctatcccctt

SEQ ID NO: 277409 - DNA, 83 bp, Homo sapiens
gctggggacagctgctggtgtggttcggagccgcggcattactctactgactggcagagacaggagaggtagatgtccacgcc

SEQ ID NO: 277410 - DNA, 87 bp, Homo sapiens
acccaggtgttgcagcgctgtgacctcgagcatcactttcaaaccagtattcctgtgcacacaatatttgacagctgccctgaaggg

SEQ ID NO: 277411 - DNA, 100 bp, Homo sapiens
gtagagaagaatgaacattgtattgagaacaatatagatttgcaggagtggcatcaggattataggaaattcagggaaacaactatgtatctcataattg

SEQ ID NO: 277412 - DNA, 75 bp, Homo sapiens
caccggctggagcggatcccacacctccggaccgagggacgcggagctcagagttctacagagtcaccactgaac

SEQ ID NO: 277413 - DNA, 75 bp, Homo sapiens
aggtgcctgcatctggcgtctagtgtggaccctattcctggtttgcagatcactacagatctgaggcagcgttgc

SEQ ID NO: 277414 - DNA, 100 bp, Homo sapiens
cgcacacataaagtcattgcagtcgtcaacaagatggtgagcatgatggagggtgtcatccaggtgctgggcggcggagagccccgagaaggaggaggag

SEQ ID NO: 277415 - DNA, 75 bp, Homo sapiens
ttcgctgtatcaagccaaacatgcagaaggtaacagtgatgatgtcaaatgcttttgctgtgatggtggactcag

SEQ ID NO: 277416 - DNA, 99 bp, Homo sapiens
aagctgggatctatgagtggaaaggtgaccaagcccaaagaggagaaagatgcttctaagggagtccatagaggccactgtattctattgaagaacatg

SEQ ID NO: 277417 - DNA, 96 bp, Homo sapiens
taggtcctcagcccaggtggtggccgaaatgttattttaacgaggtgtggtgctggaggctgtggcatggctagcaggaggcacagtgtaccgcgg

SEQ ID NO: 277418 - DNA, 75 bp, Homo sapiens
gatgggccagccctgtgatgcttaccagaaaagggattaatgaaaatcaagttccatcctcagacaagaggtaaa

SEQ ID NO: 277419 - DNA, 82 bp, Homo sapiens
cgcgttcccagcccgggtccccgcgttcacagccccagcgcaggtgatggctgtggacacctagtgacttatcaggatagtg

SEQ ID NO: 277420 - DNA, 83 bp, Homo sapiens
ttagaatgcagcttcagcagaggctgcagggccagcagttggtgcttcccgtgctgctgttgatgctggctttgttcccaatg

SEQ ID NO: 277421 - DNA, 74 bp, Homo sapiens
cctgctcttcgctctcttcctggctgcgtccctaggtacaggtttgcagattccgccagcagcacagcaagctc

SEQ ID NO: 277422 - DNA, 50 bp, Homo sapiens
ctgtagatggacaaggcctgcagagtccctgtgaagcaggaagagtgagg

SEQ ID NO: 277423 - DNA, 50 bp, Homo sapiens
ccacaatcaagttccaaatgaagaaggtattctgcaagtactgtagatgt

SEQ ID NO: 277424 - DNA, 96 bp, Homo sapiens
gttggtccaagtgtcccggcctgaggtgtcggccggatccctccttctcccggcgcctcaagcggaagtgttatctacaaacttctggcatcgaaa

SEQ ID NO: 277425 - DNA, 74 bp, Homo sapiens
cgtttgatggcttcgaggtgaactggaccgagcagcagcagatggctcaagcaaagacagcctctgagctttct

SEQ ID NO: 277426 - DNA, 100 bp, Homo sapiens
caagaacagctaaaatgaaagccatcattcatcttactcttcttgctctcctttctgtaaacacagtgataatatgcagcatgcatactgggaactgaag

SEQ ID NO: 277427 - DNA, 75 bp, Homo sapiens
caaggccaaggccagccggactaaaacaaaggaccttaaaggctttgatccaggagagaaatactttcataacac

SEQ ID NO: 277428 - DNA, 100 bp, Homo sapiens
aactcatgtctctctctcttttctttcagtctgcaactgtgtctgatggcgttcccagtgacctgacagcagaggagcgtcaagaactggagaacatccg

SEQ ID NO: 277429 - DNA, 83 bp, Homo sapiens
cccgcctccagcaggacaatattcgcacccggctgaagggacgatccgtaaggctcagaaccttctgaaacagtattcccagc

SEQ ID NO: 277430 - DNA, 48 bp, Homo sapiens
aaaaatctgaggttatcaatgacgagtgtctcaatgagatcttggagt

SEQ ID NO: 277431 - DNA, 100 bp, Homo sapiens
cttggataccacagtatcataaaattcctctaaatgcaaataactgaagtgaagtgatggactccgatttggagagtagtaagacgtgaaaggaatacac

SEQ ID NO: 277432 - DNA, 96 bp, Homo sapiens
ctcctcgatcgaggacgacttcaactatggcagcagcgtggcctccgccaccgtgcacatccgaatgggaatgtgaattggacccttgctgcgaag

SEQ ID NO: 277433 - DNA, 90 bp, Homo sapiens
acttctaggagcctggggttcggcgctatggaggagctcgatggcgagccaacagtcactggagaagaagaagttgagcaagtccctgca

SEQ ID NO: 277434 - DNA, 98 bp, Homo sapiens
tagaccctgcccaacagaatttatatagagatgtgatgttggagaactacagaaacctcgtctccctggactatgtcttcagcagtggtgcagttata

SEQ ID NO: 277435 - DNA, 78 bp, Homo sapiens
ttgtatttaatttttggaacaatttgatgagctaggaggcccagcctaaagccggggtcaggcgcagaacagtacctt

SEQ ID NO: 277436 - DNA, 96 bp, Homo sapiens
cgcagttcttgtttgtggatcgctgtgatcgtcacttgagatgccctgtatccaagcccaatatgggacaccagcaccgagtccgggaccccgtga

SEQ ID NO: 277437 - DNA, 82 bp, Homo sapiens
cgaggtgcagctggccatcgagcagatggctcgttcggaacaccacctggatacggctgcgctgcagaccgggcagaggagc

SEQ ID NO: 277438 - DNA, 75 bp, Homo sapiens
gcaagtggtgtgtggcacaaaatgcaacacggccagagatcctcagcaggagcctatggaagagatagaaaattt

SEQ ID NO: 277439 - DNA, 50 bp, Homo sapiens
ctttctggcctggaggctatccagcgggcatggtctagtggcccagtcag

SEQ ID NO: 277440 - DNA, 100 bp, Homo sapiens
gaccgccgagcctgcagcctgccccgcggccaacatgagcttcttgttaaagcaaggagatggccaccaaggagaagctgcagtgtctgaaagatttcca

SEQ ID NO: 277441 - DNA, 75 bp, Homo sapiens
cagcaaagctgatattggtgcacccagtggattcaagtggggcaagtccgtgggcatcatgttgaccgagctgga

SEQ ID NO: 277442 - DNA, 82 bp, Homo sapiens
gcctccccagccatgtggaactgtctctaattaacagaagatggcaaagcccagccacagcagctatgtccttcagcagcta

SEQ ID NO: 277443 - DNA, 75 bp, Homo sapiens
cggtttttgaatttgacatctttacccgactctttcagcacaacagggctctctcaggaccttgcttggagatgg

SEQ ID NO: 277444 - DNA, 100 bp, Homo sapiens
aaagccttgctgaagaaaaccaagaactctgaggagtttgctgcagccatgtccagacgcccactattgcttggttctacttcctttatcccgattggcc

SEQ ID NO: 277445 - DNA, 90 bp, Homo sapiens
gccacgtgaagatgctgcggctggctgctctttggcgtaaattgcaatcgattagggatcgtttctcagaatcaagttagaagtgagagt

SEQ ID NO: 277446 - DNA, 75 bp, Homo sapiens
ccggagtgtatgtctttggagaacttctggagctggccaacgtgcaggaggcggctgagtgacagcccatcaatg

SEQ ID NO: 277447 - DNA, 75 bp, Homo sapiens
tggagctctacgcctcctacgtttacctgtccatggctttctgtctctggtcgtgatgagaacagtgtggagtta

SEQ ID NO: 277448 - DNA, 51 bp, Homo sapiens
ttatgatggacctaggactgctggctggtacacccctccaaaggaagatgg

SEQ ID NO: 277449 - DNA, 75 bp, Homo sapiens
tctgattgggacaacattcagacccatttccagtcatgaaattatatccagatcgagagacagaagattctgaaa

SEQ ID NO: 277450 - DNA, 90 bp, Homo sapiens
tgggaacgaggggtgaagcggcccaggtgaggaaggacaggtggagggaagcgccccagacaaggaagctggcaaccagccccagagcag

SEQ ID NO: 277451 - DNA, 98 bp, Homo sapiens
catcctccagacaacaggatttggtctccacggtcaacgtggtatactcgcagacaacccaaccggtatacaatgtcgtgcagccaggataccctgcc

SEQ ID NO: 277452 - DNA, 74 bp, Homo sapiens
cgaacctccagcatcagcttcgagatcctgggctttaacagcaagggagagctcctgaaagaggcagtagagtc

SEQ ID NO: 277453 - DNA, 119 bp, Homo sapiens
tttactaattccggggaggtcatcaatgattttgggataacctgcatccacggactgcatattttcatcatacctgatgaggataggaattcactcaggctccgtgctggctggagttg

SEQ ID NO: 277454 - DNA, 74 bp, Homo sapiens
accatcaaatccgtgtcggagtccttacaggaagaccatgtactcagctgcagcttctaaatccagaacgattt

SEQ ID NO: 277455 - DNA, 100 bp, Homo sapiens
caacttttcacccatctgtacatcctatgtcaactgcttctcaggtagcaagtacatggggaggtggtgcggctgaacaagctggaataatagaagctgg

SEQ ID NO: 277456 - DNA, 82 bp, Homo sapiens
ccagcgagcccagcgagaaggccaagcaaacggggattcagcgtccgatcctttggaacagggactcacgtgaagcttccag

SEQ ID NO: 277457 - DNA, 75 bp, Homo sapiens
ctggacttacgaggagcagtttaagcaggcctcctcgctggggaggcagagtcctcgcgtggtctcctgcctcga

SEQ ID NO: 277458 - DNA, 74 bp, Homo sapiens
tgctgggcgtcctgttcttccagggatgccaaagaagagtgaatggcccacaaagagcctggtagcacatacgc

SEQ ID NO: 277459 - DNA, 100 bp, Homo sapiens
gtgtactttgccctcagcatctcccttcatgtctgggtcatggtccggaaggtccatttcgacacccaggagcacgggcctcaggccatcacggggctgg

SEQ ID NO: 277460 - DNA, 82 bp, Homo sapiens
agaattcagctcctttacctggtgaacagcctttacaattgtttgtgacctagaggatcaagacataatgggagcattttta

SEQ ID NO: 277461 - DNA, 100 bp, Homo sapiens
cgcacagctaagatgcccggacatcctggaagctgggaaatgatgacaagattctgcagatcattacggaattgataaaaacagagaataactgaaactg

SEQ ID NO: 277462 - DNA, 103 bp, Homo sapiens
attaagttggagcagggagaggagctgtggataacgggaggtgaatttccatgtcaacatagtcctgggaaatcctcattgacgattcaatttgttgaaggcc

SEQ ID NO: 277463 - DNA, 100 bp, Homo sapiens
gggggctggtgtccaatgccccccacatccctgtgcacctgggtgccatgcaggagacggtgcagttccagtttgatgatgtatggcctatggaccccca

SEQ ID NO: 277464 - DNA, 98 bp, Homo sapiens
cgcgccggcggctcagcctagccccgttcggccggccgagctccagtccccaaaaggcaaaaatgtgaccactggactccctgcccatctgacaccta

SEQ ID NO: 277465 - DNA, 98 bp, Homo sapiens
cttgttggagtgctggtgaatcatttcaagaggtatttcatggaaacttggagagagaaaagtgatgaagtgatgggagagctgactgatcatgtgac

SEQ ID NO: 277466 - DNA, 90 bp, Homo sapiens
gtagaaggccagagtcacacacggtcctaagagctgggcaccaggaagcgaaggctgatataattgaccctgcaatcctgcgcccgggcc

SEQ ID NO: 277467 - DNA, 82 bp, Homo sapiens
ctgaagatggagcagtgaacagcactgacccagcctgtcctcctgttgcctgcaggccagacctcctgccccccgaggtctg

SEQ ID NO: 277468 - DNA, 83 bp, Homo sapiens
gcattggatattcgcatgcctggggttacacctaaacagtttctgtagaaaatgtttcctgactgcaatgagggaaagcggag

SEQ ID NO: 277469 - DNA, 82 bp, Homo sapiens
gtcagactccagcagccaagatggtgaagcagatcgagagcaagatgtgaagttcatttccaatccgccctccatggtggca

SEQ ID NO: 277470 - DNA, 100 bp, Homo sapiens
gtgcagcccaacttccagcaggacaagctgtcccccgaggcagcctatgatgtgctgagcgtcgccgacatgtacctgctgccaggcctgaagaggctgt

SEQ ID NO: 277471 - DNA, 95 bp, Homo sapiens
gccgccgccgccgcccgctttcggctcgggcctcaggactctagtatgggattcctttctacctacaatacctcgcccactggccagagtatttc

SEQ ID NO: 277472 - DNA, 100 bp, Homo sapiens
cctgaatgaccacctagagccttggatccaggagaacggcggctgggtcaaaatgcagatcttcgtgaaaacccttaccggcaagaccatcacccttgag

SEQ ID NO: 277473 - DNA, 98 bp, Homo sapiens
cttggctagtgcaagccttgtttattttcctcaccactgaatctacagaacgtggtgtagtatgggaagaaactattattttgcttcctgataacgtc

SEQ ID NO: 277474 - DNA, 100 bp, Homo sapiens
cagtgggaaaaatggaccaacttctttggcaagtggacattttactggctcaactccaaagacaacaggccctccctctgccctcccgtctgtgagctcc

SEQ ID NO: 277475 - DNA, 75 bp, Homo sapiens
atcattctgaacatgacagagaacatagactgtggttattttggagctgttggagcactccttgagctgttgaag

SEQ ID NO: 277476 - DNA, 117 bp, Homo sapiens
agggtttttgggaaagccaaatggagctcagaaagctgtatggacctctgtgtggtaccttggccatgtagaagttgatgaatcaagaggaatgcacatctgtgaagatgctgtaaa

SEQ ID NO: 277477 - DNA, 82 bp, Homo sapiens
gttgacctcatcctcgagaacacatccaaagtccctgcccccaaagagtctcggcgcggaagatggccggcggcgtggacgg

SEQ ID NO: 277478 - DNA, 101 bp, Homo sapiens
tcatttttcttttttccattcttcaggaccttcggcaagtgacgagtagcacagcccctctatggtttagatggcagtgctgcaaaggaggcaacagagga

SEQ ID NO: 277479 - DNA, 75 bp, Homo sapiens
gaaactatgggagttcccaattaacaatgaagcagttggaaaatggatataccttatttgattatgatgttggac

SEQ ID NO: 277480 - DNA, 100 bp, Homo sapiens
gccgccaaccccgtgaactatggccggccctacagactttcctgcgtggaagcgtttgctgccaccttctgcatcgtagcactctcgagtggaccctgag

SEQ ID NO: 277481 - DNA, 127 bp, Homo sapiens
ccggctgtaccggcagatcctcaggggcaagtacagttactctggggaggtctccgtgaggccgggtgacgctccagaatgggagacaagccaatttgggagcagattggatccagcttcattcaac

SEQ ID NO: 277482 - DNA, 83 bp, Homo sapiens
gaggcgcgggaggtgttcgagaacgaccccgagacgattctgattcccagcatagccacgaagtgatgcctctcctctatcct

SEQ ID NO: 277483 - DNA, 100 bp, Homo sapiens
ggaatggcaggacgaagatcttcccaggtttactattatgcaaatgctcagacgacacacacgacctaccctgatggtttggaagttgtgcagtttctta

SEQ ID NO: 277484 - DNA, 98 bp, Homo sapiens
ctaactccagatatctacctaattgattggatttttacctcctataactccaccagaaaagttttttctttcccagctgatgctggcacccccacggg

SEQ ID NO: 277485 - DNA, 88 bp, Homo sapiens
atgaaggatttaggacaaagagtatcttttctaacaagagatctttcttctaggttttgcggctagttggctattcaagaaacctcgc

SEQ ID NO: 277486 - DNA, 100 bp, Homo sapiens
gactgcggcagcgaactgggtggcgaacggggcgagcctggaggattgtcactccaacctcttttcgctgagtcatcttagtgggatttggggaagcaac

SEQ ID NO: 277487 - DNA, 89 bp, Homo sapiens
taaaagtcaccccccagaatctaaaaatgctgcgtatagtggaaccttatgtgacctggggtgagaaagatcagtctaaagaaaaggag

SEQ ID NO: 277488 - DNA, 100 bp, Homo sapiens
cggggccacgctgcgggcccgggccatggccgccgccgatgccgagatgagattgtggggaacctgggtgaaggcacctttggcaaggtggtggagtgct

SEQ ID NO: 277489 - DNA, 90 bp, Homo sapiens
gccgagccgagctgggggcgcagagcgcgggaggcggcggcggcgcggagcccagagccatcatcaaccactttaaccccaaaattgagt

SEQ ID NO: 277490 - DNA, 132 bp, Homo sapiens
ggacactttgcgttcgggctgggagcgtgctttccacgacggtgacacgcttccctggattggatatagcaggttctggtgatggtacacaagaagtatctaaacctcttccttcagaagggagcctagctg

SEQ ID NO: 277491 - DNA, 75 bp, Homo sapiens
ggcatttacagaaagagtcaacagcagtggcaacagtatgatgggggatgatgaagatgcctgtagtgacaccga

SEQ ID NO: 277492 - DNA, 80 bp, Homo sapiens
acatggaaggggcagtacaagcttacgtctctgctcttcagtacaatcctgtaatggaactgctggtccatctgaataaa

SEQ ID NO: 277493 - DNA, 90 bp, Homo sapiens
ccttgccgctgctgtcctgcgaccccaagcagtttttgaaatcatgaatcctgtttatagtcctggatcttctggggttccctatgcaaa

SEQ ID NO: 277494 - DNA, 82 bp, Homo sapiens
gaaactgattggaaactctttgggaaagccactcgaaaagataagccaatggacacgtcagtgttatctgaagaaggaggag

SEQ ID NO: 277495 - DNA, 100 bp, Homo sapiens
tagcaagtggccatggggagcctcagcggtctgcgcctggcagcaggagctgaagaagaagctgttcaaacgccggcgggtgttgaatcgggagcggcgt

SEQ ID NO: 277496 - DNA, 101 bp, Homo sapiens
tcagcctcccgagcggctgggattacagtcgcagatatggccagtacactatgaaccaggaaagcaccaccatcaaagttatggagaagcctccatttgat

SEQ ID NO: 277497 - DNA, 90 bp, Homo sapiens
ggaagaggtcatctcgctcggagcttcgctcggaagggtctttgttccctgcagccctcccacgcaaagccacaacacttgagaaaacct

SEQ ID NO: 277498 - DNA, 90 bp, Homo sapiens
ctcaaaatcggagacagagtattggtatctcattcagttgctaaacttatattagttaatttccactggcaagtttcagagatattggac

SEQ ID NO: 277499 - DNA, 100 bp, Homo sapiens
cacccggtgcgtgtgaagggacttgagggcagcgagatggaatcagcaagagaaaacatcgaccttcaattactgcaacaaggaggtatacaataaggag

SEQ ID NO: 277500 - DNA, 101 bp, Homo sapiens
gtgaactgcacgataaaggaactcaggcgcctcttcttagttgatgatttagttgattctctgaagacaatccatggacacaagggaccaatcactgcagt

SEQ ID NO: 277501 - DNA, 82 bp, Homo sapiens
ttggaagaggcgagtccggtctcaaaatggaggtgaatgaaaactttgccattgatttgatagcagagcagcccgtgagcga

SEQ ID NO: 277502 - DNA, 100 bp, Homo sapiens
gtggggatttgagtgatgagcaaaactgtggcatggaagaggagatggttcgtgttacgcagtggccgtttaactggagatccagatgttttggaatatt

SEQ ID NO: 277503 - DNA, 50 bp, Homo sapiens
accttcctgtgcagtcctgttggaatttgagtgcctgtgaagaaaacggg

SEQ ID NO: 277504 - DNA, 100 bp, Homo sapiens
ttcgactagaggggatgcagatatgtatgatcttcccaagaaagaggacgctttactctaccagagcaaggagccacactcaagaatgggaagaaagctt

SEQ ID NO: 277505 - DNA, 97 bp, Homo sapiens
gaggctgtgcgcatgcagcacctggttatctaccttgcctgctcctatgccacagtgtacctgatctacctgaaatttaaggcaacctacgatggaa

SEQ ID NO: 277506 - DNA, 80 bp, Homo sapiens
cgcgcgcagggcctgcagcgggagctggacggcgagcgcgagcggcgcgagaaaggagatcttgtgcgaaaactcaaaga

SEQ ID NO: 277507 - DNA, 100 bp, Homo sapiens
gatgaggagaatgaggacggagacttcacggtgtacgagtgcccgggcctggccccggaaagaaagaaatctcgttttgggaatgctttccacctgtgtc

SEQ ID NO: 277508 - DNA, 80 bp, Homo sapiens
gcgcgcagggcctgcagcgggagctggacggcgagcgcgagcggcgcgagaaaaccggagagcaatggtgtgatctccgc

SEQ ID NO: 277509 - DNA, 107 bp, Homo sapiens
gatccccctgtactttgtggacttgcaggatgacttagacgactgtcccttcaccgatgttgtcaccaccaacctaaagcttggcaacccgacagaccgaaatgtgt

SEQ ID NO: 277510 - DNA, 51 bp, Homo sapiens
ctcggggactcccccaaagacaagtggctgcagctcagacgactccaggag

SEQ ID NO: 277511 - DNA, 80 bp, Homo sapiens
cggcggctgccgcgcggcacacaatatgtggacgagtgctcactagcagaaaaaacctgtgtgaggaaaaacgaaaactg

SEQ ID NO: 277512 - DNA, 50 bp, Homo sapiens
aaatgctgtttgtattccagagactaggagctggaggatcttcagaagaa

SEQ ID NO: 277513 - DNA, 112 bp, Homo sapiens
ccagatctcagaggagcctggctaagcaaaaccctgcagaacggctgcctaatttacagcaaccatgagagtgtgaacatggctacgcctcttcattcccgtccatgccgag

SEQ ID NO: 277514 - DNA, 87 bp, Homo sapiens
acggcgccgagccgcggtccgagctggacgtaaagaaagaagtgatgcactcaattctgcaatagataaaatgaccaagaagaccag

SEQ ID NO: 277515 - DNA, 100 bp, Homo sapiens
ctgcacttcgcattttggcattgacatttaattttagggtcctttatatagaagggagaaattgctggaatccacaaataccaaactatggccattgaag

SEQ ID NO: 277516 - DNA, 74 bp, Homo sapiens
catcaaggagctcattaaggacggctctctgctcattggggcgttgaggagcagcacagcattctcagaagcag

SEQ ID NO: 277517 - DNA, 90 bp, Homo sapiens
ctgcattgcctctggccgagctgcaaccgcctccgcctattacagagggtgttgaaagcagcaggggcctagaagacattaaaccgatac

SEQ ID NO: 277518 - DNA, 80 bp, Homo sapiens
ggaagggctcctgacacacagcgaggaagagctgattggccgcgtaatccaggttgctgctgggagcagcaacctcaaga

SEQ ID NO: 277519 - DNA, 75 bp, Homo sapiens
taggagatcatagtcaacatggccctggggaaacaaaggacccatcgcaaatgttttccatgctgatctccaaag

SEQ ID NO: 277520 - DNA, 97 bp, Homo sapiens
ctcctctcaagaaatctcaagatattaaagttactgctgttaaaaagaccttgttcccatcaggatacctaatccctctcacgcagtgctcatccct

SEQ ID NO: 277521 - DNA, 100 bp, Homo sapiens
ctggatcgacggctccaacagggatgcgctgagcgatttcttcgaggtggagtcggagctgggacgagatggtgaattgtctttgagtcggtcacttgtc

SEQ ID NO: 277522 - DNA, 100 bp, Homo sapiens
tttagtgatgctgcttataatttgactggatttaatattacttacaggttcctagaaggtgagcgcggacggtatgcaaagttgtgaatccagtggtgac

SEQ ID NO: 277523 - DNA, 82 bp, Homo sapiens
ctctgggatccccgccgctctgtctacaacccgagctcaccatggatgatgatatcgccgcgctcgtcgtcgacaacggctc

SEQ ID NO: 277524 - DNA, 100 bp, Homo sapiens
cttcggaggcctatagcccgcaggaggcaggtggaagtcatcataaagtttctgtttcacccgtcgtccatgttcgaggactctgtgaatctgtggtgga

SEQ ID NO: 277525 - DNA, 75 bp, Homo sapiens
cggcgaaggaggaggcaagaggcggctaatggaggttggcaggatgctactaccccttcatcagtgacctcccct

SEQ ID NO: 277526 - DNA, 100 bp, Homo sapiens
cttctaccccatgagaaagaccagggactggtttggctgaaagacaaagaagcaacacattgtaaactttgtgaaaaggaattctcactctctaagagaa

SEQ ID NO: 277527 - DNA, 51 bp, Homo sapiens
cgtgtttcatgaactcagctattcagctaaacaaccctgagatggtggagg

SEQ ID NO: 277528 - DNA, 75 bp, Homo sapiens
gaggtgtctcgtcggaccctttggggctcagtggaggtccgacagtgctggaagtcttcaatacccttttgaaac

SEQ ID NO: 277529 - DNA, 82 bp, Homo sapiens
tcaaggtcttcatagaccagaaccttagtcccgggaaagagcttactcacatagcatattggtatatcaaaatgaaatgcaa

SEQ ID NO: 277530 - DNA, 82 bp, Homo sapiens
ttggtggcttccatgaaagtacacgatggcctactgccagcatattggggtggagttcatgttcatcaatgacctggagcag

SEQ ID NO: 277531 - DNA, 75 bp, Homo sapiens
tagaattaggcctctctggaagcattacttccagaatacccagggaccccggagtggagatgacagtgttccgga

SEQ ID NO: 277532 - DNA, 99 bp, Homo sapiens
gaacaacttagcaaaatgttctttactactaagcaccgttggtatcctcatggacgggtgtcaaattgagaaccaggtagatccccaccacctacagta

SEQ ID NO: 277533 - DNA, 75 bp, Homo sapiens
tctcacctgaggtgaaccttcgaccttggacttctcagcctccagaatgtggaaaagcgagattgtctttgacca

SEQ ID NO: 277534 - DNA, 75 bp, Homo sapiens
tcggctacctggtactgagtgaagtcctcctgcccctgctcgagtcttgcagtgtgcggcccgacgccagcgttt

SEQ ID NO: 277535 - DNA, 100 bp, Homo sapiens
agatagggaggagaagatcatgtctcaggcccggtacaagcagagccttgacccaactgtggatgaagtcaagaagctctgcacgtccttacgtcgcaac

SEQ ID NO: 277536 - DNA, 90 bp, Homo sapiens
tgggctggggactcacggccgggacactcagggcagatcgctgccgttttgcccttgggagtaggatgtggtgaaaggatggggcttctc

SEQ ID NO: 277537 - DNA, 100 bp, Homo sapiens
aaaatttcaaagtaaaggatattattagaattctgccatgcaatgctgtccccggcataggtccatctctgcagaagccatttcaggagtacctggaggc

SEQ ID NO: 277538 - DNA, 75 bp, Homo sapiens
aagagcagcggaaaatgatccagtcacagctggaatagtcaaatgatttcagttcgtgaagccaaagccattcca

SEQ ID NO: 277539 - DNA, 97 bp, Homo sapiens
ttttctttactctggggtcccggctgccctgtggcctcgctcctcggaggggaagcagtttaagtgcacggtgtgtgactacacagcggcccagaag

SEQ ID NO: 277540 - DNA, 100 bp, Homo sapiens
ctgtcccccaaactctacgagcctgatcagctccaggagctcaaggttgcagagcctgaggcctgtgatcagatgtacgagagcttagcgcgactccatt

SEQ ID NO: 277541 - DNA, 76 bp, Homo sapiens
cagggatgttcaggagctgaaagacgacatccagctctgtcacccaagctgcagtgtggtggcatgattgtagctc

SEQ ID NO: 277542 - DNA, 83 bp, Homo sapiens
ggctatccgcagcgagatggagcagctcaaggaggttttaaaatcaaagatgggaaaatcggagaaaattgcccttccccatg

SEQ ID NO: 277543 - DNA, 100 bp, Homo sapiens
tggatttgccatgaccagctttgtcacttttgaagcgctggagatgatggacttccaaaaccagaactaatatcctggattgaacacgggggagagccct

SEQ ID NO: 277544 - DNA, 83 bp, Homo sapiens
cccctgttgcgatggcgcagaaaccccgttgacaaggcactgctttttcatgacgatgaggacggggacttggttgccttttc

SEQ ID NO: 277545 - DNA, 88 bp, Homo sapiens
aaaggaagacaaccctgggcggaagatcgcggagatgcagggcaagctggccacggtcacagagatgcggcggaccctgacgcctgcc

SEQ ID NO: 277546 - DNA, 100 bp, Homo sapiens
atctttcagctggtcagcctcattctcaaggaccctgtgcgctggccctcaaccatcagtccctgctttaaggtggcaatggctacatcaatgactttcc

SEQ ID NO: 277547 - DNA, 120 bp, Homo sapiens
ggagcggcgctttctacctgcccggcctggcgcccgtcaacttctgcgacgaagaaaaaaagagcgacgagtgcaagggcactctttaatgaagaaacaccagagctgttaaacacattg

SEQ ID NO: 277548 - DNA, 100 bp, Homo sapiens
ccgacggcgacggcaccgtggagaaagtgaaggactaccagctggtccagaagggaggaggacaagagtgtggtgactctcgggcccagctgagccagta

SEQ ID NO: 277549 - DNA, 75 bp, Homo sapiens
aactgctccgcctggtggaatctgaggcccacccacccccatcagatccgtcctggccccacagccttctaccag

SEQ ID NO: 277550 - DNA, 88 bp, Homo sapiens
tcatgggcacggctcgggacggaaatgaaggtcctcagtccccattccatcacatcctgcccaagtgcaagctggccagggacctcaa

SEQ ID NO: 277551 - DNA, 75 bp, Homo sapiens
gaaaacttgcctgctctctacactattttccaaggagaggtcctggtgcttgatggtcgaggccatctcctgggc

SEQ ID NO: 277552 - DNA, 97 bp, Homo sapiens
ctccaggacacccctgaagccgagaaatggcttcaacggaccacaccaaaatgccatctcaaatggaacacgccatggaaaccatgatgtttacatt

SEQ ID NO: 277553 - DNA, 51 bp, Homo sapiens
gccgaagcccacccagggagttgatggtcaaactgtgctgaaaatatccgc

SEQ ID NO: 277554 - DNA, 50 bp, Homo sapiens
gcgcacctgccttcgctcccgcaccgaattaaacaaccaccatgtcgagc

SEQ ID NO: 277555 - DNA, 83 bp, Homo sapiens
tcagccaggcagacagactgacagactcgctagctcagaagtgacaaaagagaattatcaggatggcagtccttataaccaga

SEQ ID NO: 277556 - DNA, 82 bp, Homo sapiens
gatcacccgccgctccttgggctacgcgtatgtgaacttccagcagccggcggacgattcttcgctgctgctgccttaccgc

SEQ ID NO: 277557 - DNA, 117 bp, Homo sapiens
gccgcccgcagcctgccgcccgccgcagggcgctgacggtcccgcacgtctgccgctgccaccggcgcgcccgaagcagtcattatggcgaaccttggctgctggatgctggttctc

SEQ ID NO: 277558 - DNA, 82 bp, Homo sapiens
tcgcgctgcactgtctctccgacgcaagactgtcccggcccgggttttaaaatcaaagatgggaaaatcggagaaaattgcc

SEQ ID NO: 277559 - DNA, 100 bp, Homo sapiens
cagtggtgctgtcagcgcggccgtcggagacatgggagacccggggtcggagggtgttactatcgttaaaccaatagtttacggtaatgttgctcggtat

SEQ ID NO: 277560 - DNA, 100 bp, Homo sapiens
cacgctgacgtcggacccacggctgccgtacaaagtgctctccaaaaaatgcagtgccccctgtgatccattcacctaatgatcatgtggtctatgagaa

SEQ ID NO: 277561 - DNA, 100 bp, Homo sapiens
ttaagtttatgctaggcaagcaggaggtgatccgaggctgggaagaaggggttgcccagggccggagttaagatgagtccagcgaagtgcctagagtacc

SEQ ID NO: 277562 - DNA, 100 bp, Homo sapiens
cagacggtgccccatagatggccagctttcccccgagggtcaacgagaaagagatcggtacttacaatttcatcagaaattcctaaaagaattcgaagtg

SEQ ID NO: 277563 - DNA, 90 bp, Homo sapiens
tcggacccatggtttccagtgcagcgcggagtgggcgatgccagcgtgccaggttctggcttcagacaccctgaccaccctgtgtgccag

SEQ ID NO: 277564 - DNA, 98 bp, Homo sapiens
gagcctcaaaatgaagatggcacatggcccaggcagaccttgcagtcaaatggatccaaacttctacagcaaaaacttacttcttttaggaaagacat

SEQ ID NO: 277565 - DNA, 75 bp, Homo sapiens
cggaaacaaagttattttgctcggtgactgcttagaaaactgcacagcatctgatgaaattagcgaataagaaca

SEQ ID NO: 277566 - DNA, 90 bp, Homo sapiens
cctgcgtggaggaggcgccccgcgcagctggctggcggagcatgagcgccccaggttcatgcatgggagatctcagaccagttgttacag

SEQ ID NO: 277567 - DNA, 89 bp, Homo sapiens
gaactcccacaatgccacaggaggaggcagcagcaaattgaagagttttctgatgttaatgaaggagagaaagaagtgatgaaactctg

SEQ ID NO: 277568 - DNA, 50 bp, Homo sapiens
cgccgaccggcgccgggagatcctgggaaatgtaccttctccgaatgcac

SEQ ID NO: 277569 - DNA, 50 bp, Homo sapiens
ggacgaaaccatcggtagactccacaaggaaatctactttcttcaatgtg

SEQ ID NO: 277570 - DNA, 131 bp, Homo sapiens
aacaatgtactccagttgctggatatccaagcctctcagcttcggagaatggagtcttccatcaatcatatctcacagcttagaccatgctcagcctccaagcagccttgtcatcgacaaagaatctgaag

SEQ ID NO: 277571 - DNA, 108 bp, Homo sapiens
ccccggagccaggctggtttcggaaatgcccttacagcagcagagaatatgccttctgcatcctgtgatacactactggatgacatcgaagatatcgtgtctcaggaa

SEQ ID NO: 277572 - DNA, 50 bp, Homo sapiens
aacttgccctgtctcctcgcagatgagtgccagattggcctcactttttg

SEQ ID NO: 277573 - DNA, 100 bp, Homo sapiens
atgagcaagctgatgaagatctgctctctcaatatgaaaatggtagctccacagtaggatcagctcagctactatttaataaaacaaaatctgtagaatt

SEQ ID NO: 277574 - DNA, 80 bp, Homo sapiens
aaatgtcatccgatggcacaatcaggtattgtcaatatggactcgccatatggttctgtaacaccttcttcaacacattt

SEQ ID NO: 277575 - DNA, 82 bp, Homo sapiens
gaagagtaattgcctgctttgattccctaaagcagtacttctggaatagaaattctaaacattagcctgccgaacaactgga

SEQ ID NO: 277576 - DNA, 95 bp, Homo sapiens
ttctatgatgcccctgaagatgtgcacctagggggcggctaccccgtggggtgccgctacctggctgttcagctgtctcctgccatccctgtatt

SEQ ID NO: 277577 - DNA, 51 bp, Homo sapiens
gtgtgaaattgcttctgtcaaaggaagcaagaggctactatgagcagactg

SEQ ID NO: 277578 - DNA, 83 bp, Homo sapiens
gctggcgcagcccacgctcatgatcgacttcctcacccgcgcctgcgacctcgggaagcccgtcagcctgagctacagatgcc

SEQ ID NO: 277579 - DNA, 75 bp, Homo sapiens
gctcacagcccgacgaaaggatgccaaatgttttgagaacagagtgctgttttagagctggcagcagcatctcag

SEQ ID NO: 277580 - DNA, 82 bp, Homo sapiens
tgttgtctcagggagcacagaaaagctcctcctggggtagagacagatcttattgatgttggattcacagatgatgtgaaga

SEQ ID NO: 277581 - DNA, 74 bp, Homo sapiens
ggcagcaccagcgccttcgagcagctgcagaggtcccgtccaagtggtaagaagttcagaagcaagcctcagtt

SEQ ID NO: 277582 - DNA, 147 bp, Homo sapiens
tgaatttgaaggtcagcctgtggattttgtggatccaaataaacagaatttgattgctgaggtttcaaccaaggactatgctgagaaggaaaataccatagcaaaagctctggaagatctgaaggcaaatttttactgtgaactctg

SEQ ID NO: 277583 - DNA, 87 bp, Homo sapiens
cctgtaacccagcctgtttcacttcttggctccttcctcagagaagcttcctgttatgtaccttatggattctattgtgaaaaacgt

SEQ ID NO: 277584 - DNA, 50 bp, Homo sapiens
cagcaagtcctcatagccaggggaaacagtgcttcttagtcctacgtcag

SEQ ID NO: 277585 - DNA, 100 bp, Homo sapiens
cggcagcatggagggccccgacgatagcgaggtcacctttgcattgcactcagttagatcaaaccattgctgaaactgaagaggacatgtcaaatattac

SEQ ID NO: 277586 - DNA, 100 bp, Homo sapiens
agaacctttgacttggtgttgaaagtgaaatgtcatgcctctgaaaatgaagagttctaaagttcctgttgcttcagacaatggatgagcaatcacaagg

SEQ ID NO: 277587 - DNA, 82 bp, Homo sapiens
cccagccattaaacacattttacaaagccatgccctacaggtttactcctggcttgggggcattaggaagcactggaggctc

SEQ ID NO: 277588 - DNA, 75 bp, Homo sapiens
cagagattcatatgagagttatggcgaggcggctttgcacaaggtggacattcccagggccacgtggtgccaggt

SEQ ID NO: 277589 - DNA, 100 bp, Homo sapiens
gtggaaccggggtttggagggcagaaattcatggaagatatgatgccaaaggcttgcagccctgagtgatcgagagactcggctgcaggaggtgcgctca

SEQ ID NO: 277590 - DNA, 100 bp, Homo sapiens
cccgggagtaggagactcagaatcgaatctcttctccctccccttcttggaagggaaaaggccgaggcatcagcgtgtgaagaccgcaaagacgatcccg

SEQ ID NO: 277591 - DNA, 75 bp, Homo sapiens
caagtcccacccaaacccaaaggcctccttgaggatgagggcacctcctctgaatttgaagtggtcactcctgag

SEQ ID NO: 277592 - DNA, 100 bp, Homo sapiens
ttcctgcataccctggaccagcagaaacctagagtgaggactcaggagagtgcagcttgctctgtgagtgggtgacaacctcttggcgactcaggctcag

SEQ ID NO: 277593 - DNA, 96 bp, Homo sapiens
cagtcacacatgccagagattgctcaggaagcaatggagatatgcacccaatgtccagggagcgtgcaaaatttgtcaaaagtggccttttattgt

SEQ ID NO: 277594 - DNA, 100 bp, Homo sapiens
atagctacaaaccatactaaattattccatttgcaacttatccccaacagccatcagagggttctcgcttcagcacaagatccggagttttgaagaagcg

SEQ ID NO: 277595 - DNA, 83 bp, Homo sapiens
cgcgcctttgtgcgcgcgccgaggtgtggatgaggtcaccattgtcaacattttgaccaaccgcagcaatgcacagagacagg

SEQ ID NO: 277596 - DNA, 100 bp, Homo sapiens
cgctaccggaggatttataccgctgcgctcaatgacagggaccaggggggcggcagcgctggacacccagcctccaggtatgtcgagagtaccaacgtgg

SEQ ID NO: 277597 - DNA, 121 bp, Homo sapiens
ccctggagcctcagttggaagcagccgatccagcctgcggagcctgtggggcagcttcccagtgatcctgtccatcgaggagcactgcagcgtggagcaacagcgtcacatggccaaggcc

SEQ ID NO: 277598 - DNA, 80 bp, Homo sapiens
tcctgtgatgccattagatcgtttcattacagttgatttggagcatatgcgaacaataaaacctgaaaaacacttacggt

SEQ ID NO: 277599 - DNA, 100 bp, Homo sapiens
gggggtcggccggggccgcttcaccacttacgaaatcagggtcaaggactgggctaatgctaatgtcagcagacagattgaggacactgtattatacggt

SEQ ID NO: 277600 - DNA, 105 bp, Homo sapiens
gctgcctccactactgcaaagacaaggctaaggacttcatgcccgccagcaaagacttcccaagtaagaagcggaagaggagccgctggaaccaagacacaatgg

SEQ ID NO: 277601 - DNA, 50 bp, Homo sapiens
aggtgccggccccgacaggacggtgagggttttggccaaattgggcgagg

SEQ ID NO: 277602 - DNA, 100 bp, Homo sapiens
tcggcggaagatggcggccggcgaaaggagctggtgcctgtgcaagttgttgaggcgcctgtgtctggcagagctggtgtgagacgagacaatcctgccc

SEQ ID NO: 277603 - DNA, 51 bp, Homo sapiens
cgtggaacggctgcttttggaaggtcacggagctgctggacgtctccatgg

SEQ ID NO: 277604 - DNA, 97 bp, Homo sapiens
cattcgtgcagacagggcaaagaaaatgggactggttgaccaactggtggaacccctggctttcaccaacaatcaccagtggtttacacaacattgc

SEQ ID NO: 277605 - DNA, 83 bp, Homo sapiens
ctcagccgcgaccgcccgctcgtactgctgctgcacctgctgcaacttgggccccttttcagccttttatgtcacctcggtac

SEQ ID NO: 277606 - DNA, 100 bp, Homo sapiens
tggttaaaacctgacacttttaacaggtcctcttcctgatggatgggaacaagccatgactcaggatggagaaatttactatataaaccataagaacaag

SEQ ID NO: 277607 - DNA, 100 bp, Homo sapiens
ggagaccagacctactgcagccacgcgggcgagcggctgtgtggatgtcggcgaagccgcgggcgaggaggaaaaggcttctcttttacatcgtactcag

SEQ ID NO: 277608 - DNA, 74 bp, Homo sapiens
tggcgctactggtgctgtcctggccacccccaggaaccgacgctatgtccagcaaaggctccgtggttctggcc

SEQ ID NO: 277609 - DNA, 76 bp, Homo sapiens
ggatcctgctcctctgggttgaaacccgggcgccgccaagatgccgtcgcccctgtgctcctcctggagtcccact

SEQ ID NO: 277610 - DNA, 100 bp, Homo sapiens
gtcataacatatcactgactggtatttataacagcaatgatgtagcagtatcgtttccaaatgtagtatctggctcgggatctagtactcctgtctccag

SEQ ID NO: 277611 - DNA, 96 bp, Homo sapiens
atttcctccacctgtacctccagttttcaacttgaccaacaatgtggatttggacaacaccaaaaagaaaatggagatataccaaaaggaaaacaa

SEQ ID NO: 277612 - DNA, 101 bp, Homo sapiens
ctacttcaaggataagggtgacagcaacagctcggcgggctggaagacagagagtgcatgggctgaagaatactctgaaaagaagaaagggtctcacaagc

SEQ ID NO: 277613 - DNA, 100 bp, Homo sapiens
cacagactggctgacattaaatgttggagggcggtactttacaactacacggtaggcaagggctgctgtgctgctctcaaagctcttggagcaattgtct

SEQ ID NO: 277614 - DNA, 82 bp, Homo sapiens
cttccagggagacaccgattataagaagagaaactcagcgctggggaagaagctcctgaaactctgatgagagccctggaac

SEQ ID NO: 277615 - DNA, 134 bp, Homo sapiens
gaaagaagtattcctcgctcaacctgtttgatacgtataagggcaagtccttagagatccagaaacccgctggaatagccaggccagaagaaggaaggcctgtggtgagtgggacaggaaatgacatcaccacc

SEQ ID NO: 277616 - DNA, 100 bp, Homo sapiens
ccccattggtcctcctggccctgctggtgcccctggtgacaagggtgaacctggtgtggttggtgctgtgggcactgctggtccatctggtcctagtgga

SEQ ID NO: 277617 - DNA, 100 bp, Homo sapiens
cagagagttaacttctgtttacatggaactcagacatctgcaaatcatgatcatggggaatttcagaggtcatgccctccctggaaccttcttttttatt

SEQ ID NO: 277618 - DNA, 83 bp, Homo sapiens
caagctcctacttccagaaaaagtgctcctgggactccaggataccagcaaacggggattcagcgtccgatcctttggaacag

SEQ ID NO: 277619 - DNA, 82 bp, Homo sapiens
caacctgcagcacatcagcgaccgggagaacatagacggggtggccgtgactggggagagcacaaccagcggctagaggagc

SEQ ID NO: 277620 - DNA, 74 bp, Homo sapiens
cactcatcacagtaacttacgagcttggggcttccttggtcgcacccaccacctgcctgcccactggtcagcct

SEQ ID NO: 277621 - DNA, 75 bp, Homo sapiens
gccctttctgaggcagatacccaggaactaacccaggacatcatcgaggggggcagcctgcgcatcccgctccag

SEQ ID NO: 277622 - DNA, 75 bp, Homo sapiens
gggagttgcttttggaatgaatttggaatcttcccttgaagagtttctaagctgactaaacaactaatgctcctg

SEQ ID NO: 277623 - DNA, 50 bp, Homo sapiens
ctttgtctgactacaatattcaaaaggttggccgttgtccaatgtgttgc

SEQ ID NO: 277624 - DNA, 98 bp, Homo sapiens
gccctatgggaaccgcaactgctgggactgtccccactgcgagcagtacaacggcttccaggagtgaaaaagacttgggaggacatagaagacatctc

SEQ ID NO: 277625 - DNA, 95 bp, Homo sapiens
tctcttataagttaatatttttccagggatataacagtccactttggaaagaagatttctcagaggctgttggaagctgcttgggagaagtgggt

SEQ ID NO: 277626 - DNA, 100 bp, Homo sapiens
atatggtaataaagctagccaaggaattaccggcccgccaagctgccccctgtgtgctattctttgatgagctggattcgattgccaaggctcgtggagg

SEQ ID NO: 277627 - DNA, 95 bp, Homo sapiens
taggattgcctacaatgtttggttatattatttgtggtgtacttctgggaccttcaggactaaatagtattaagagtgaagacatttccacctgg

SEQ ID NO: 277628 - DNA, 98 bp, Homo sapiens
tgcagcagcaagtcccatcggaggacctccctgccctgtataccgagggaacagacccaacatgagtgaagtttcctgcaagaaacgggacgactatt

SEQ ID NO: 277629 - DNA, 76 bp, Homo sapiens
ccgcgcactcggagatgcagccgctgtgacatattcgatgccatgttccctgtcactcacatcgctggggagactg

SEQ ID NO: 277630 - DNA, 99 bp, Homo sapiens
gcgggggactctgagggaggagctggggacggcgaccctaggagagatgctgcagccccagttcaagtcacacaacaccaatgaggtgctggagaagct

SEQ ID NO: 277631 - DNA, 96 bp, Homo sapiens
cagctgggtctgggggagtacaagaggatgccctgatggcagttagcacactggtggaagaattactgggagatgtactcaaagatcggccccagg

SEQ ID NO: 277632 - DNA, 51 bp, Homo sapiens
aagctgtcagaattgcaagggaaattggagtaccagtaagtagccgggtgt

SEQ ID NO: 277633 - DNA, 75 bp, Homo sapiens
gggggtgccccacgctgaaagagagtattctaccttgtaaatactgttatttgtatatactgtaaatgatgacat

SEQ ID NO: 277634 - DNA, 100 bp, Homo sapiens
gtattgactggagtgagagaagaaatgctgtggcatctgttgtcgcaggtatattgattgccttgggtccccagtgtttactcccatcaaggcagacata

SEQ ID NO: 277635 - DNA, 100 bp, Homo sapiens
tgagcctttttggcctggcttgtttgcaaaggttcatctgcagaagccagcggacgcctctgttcaacttgtgggttacctggctcatgagaccttgccg

SEQ ID NO: 277636 - DNA, 98 bp, Homo sapiens
atggagagctgaacattactcttccagaagagaatttcgctaaggagtttgtgatcagtgatcggaaggagctggaggaagatttcatcaagagcgag

SEQ ID NO: 277637 - DNA, 95 bp, Homo sapiens
tcggcggaaagtttggctgcgcgggttcccccgaagttcagaaactagatgatggccatttaaacaactctttgagctctccagttcaagcggac

SEQ ID NO: 277638 - DNA, 100 bp, Homo sapiens
catgctcatcctggtcggcctgggatttccctttatcatggtctcacactctgaggatgactgtctagctttcaaagttcaccaatactttaatgtagag

SEQ ID NO: 277639 - DNA, 90 bp, Homo sapiens
aaacaactgataatcaagaaggcagtgtggtgctcttaaagttccgtacagataaaggaagagatcccagttctgatacatatgaggaag

SEQ ID NO: 277640 - DNA, 100 bp, Homo sapiens
ctgcaaagtgcccccaaggcccttagaggctgaaggtgcccagctgcagggcggcagtaatgagggcctctttattgctgtcaaagatgaggaccctggc

SEQ ID NO: 277641 - DNA, 100 bp, Homo sapiens
caactcttcagtgttggctgataaaattgccctgaaactggttggtgaagaaggatttgtagcgagtaaccagctcataaatcacatcgaacagtttttg

SEQ ID NO: 277642 - DNA, 100 bp, Homo sapiens
ttctcctgcccgcaccgcctgcgggagcacctggagaggggccgcggaaacctggagtggaagggtccttgaatgggcaagagggcacatgaagtacggc

SEQ ID NO: 277643 - DNA, 50 bp, Homo sapiens
ccgagcaggaggcgccatcatggactggcagccaccctttgctgtggaag

SEQ ID NO: 277644 - DNA, 101 bp, Homo sapiens
ccatgtttggattgaagccgcctctgtattacttaccagtgaactttgaggcgctgatcatcaccatgtcggtagtcgggggaaccctcctcctgggcatt

SEQ ID NO: 277645 - DNA, 100 bp, Homo sapiens
cggcgcccgtggtccggccatggacgacctcggctgctgtccccaaggcccagcctcctcaccccgactggcgacccccgggccaatgcctcaccccaga

SEQ ID NO: 277646 - DNA, 100 bp, Homo sapiens
ggaattatgaatgtccaaagtttgaagagcttaatcttctccatacagagctggctaaacagttggcagacacaatggttctacctatcatacaattccg

SEQ ID NO: 277647 - DNA, 75 bp, Homo sapiens
cgagcagtcctctcagcccacttgcacgcgtcgagggcgaggcccccagcagtgagactggcacatccctggaca

SEQ ID NO: 277648 - DNA, 90 bp, Homo sapiens
aagagctcactttctttccttgttccttccttgctacaattcacgttctcagaagatgctcatgccttgcctatgttccgtgagccccgc

SEQ ID NO: 277649 - DNA, 83 bp, Homo sapiens
cacaggccctcgttgcccagatgtgtgaacccacatccctgcccccagggccacctgcaggacgccgacacctacccctcagc

SEQ ID NO: 277650 - DNA, 100 bp, Homo sapiens
cagacatctcaactccacggacgacgcagacaggatccccttccaggaggactggatgaagatgaagcacccgacagacgtggactacagggtcatggcc

SEQ ID NO: 277651 - DNA, 97 bp, Homo sapiens
agaaatacaacatagagaaggacattgcggctcatatcaagaagatgccggtggccgtgggtccctacggacagtcccagccaagctgcttcgaccg

SEQ ID NO: 277652 - DNA, 75 bp, Homo sapiens
aagatgcagagttcattgttgccaagaatatgtttcgacagcaacaaaagattcttcaacaatctagaattgttc

SEQ ID NO: 277653 - DNA, 97 bp, Homo sapiens
cgccaagggttatgtctggaatggaggaagcaacccacagattccagttcttcagacaaacaatggtccaagtctaacaggattgactactatagca

SEQ ID NO: 277654 - DNA, 90 bp, Homo sapiens
atgttgccactgctgttttagaacatataaaggggccaacaggacaaaactctacgacatgatagctgatctgggagatgatgagctgcc

SEQ ID NO: 277655 - DNA, 100 bp, Homo sapiens
ctggagtcatgcctgaaatgccagaggacatggagcagcttattgcaggagtgaccaggacactacctcctagaagtaatgcccacagaaagcgcaagtt

SEQ ID NO: 277656 - DNA, 90 bp, Homo sapiens
gaggaaaatgcaagaagactgatggagcaggcttgcaatattaaaatcagtgctaacatcttccgtacacttcctccaagtgataatcca

SEQ ID NO: 277657 - DNA, 100 bp, Homo sapiens
ctcatgtatcatgcaaggatattcctcatatatcatgtcccagtagggatggcacaatcagcgaggacaccatccgagcctctctcatctctgcggtcag

SEQ ID NO: 277658 - DNA, 100 bp, Homo sapiens
cgtaaatgcaaaggacatggccggccggaagtcttctcccctgcacttcgctgcaggctcattggtgggcagtattacttatgggaattgctctgatcat

SEQ ID NO: 277659 - DNA, 90 bp, Homo sapiens
tcctgggatctttgaaatgctaagattcttggataccacagtatcataaaattcctctaaatgcaggacatggcttgcagtgtggcaggc

SEQ ID NO: 277660 - DNA, 99 bp, Homo sapiens
cttaggagagacgagcagccttcagggagcgtggagacagagtgtgaacatggctacgcctcttcattcccgtccatgccgagcccccgactgcagcat

SEQ ID NO: 277661 - DNA, 75 bp, Homo sapiens
ctggggccagggaaccctggtcaccgtctcctcaggccgggctctcgccatgggtcactgtcgcctctgccacgg

SEQ ID NO: 277662 - DNA, 100 bp, Homo sapiens
ttcacatttgatcatggcatgggtgtgaaagctgttttggccgaaagttatgaaaaaatacacaaagatcatttgattggaattggcatagctccacttc

SEQ ID NO: 277663 - DNA, 99 bp, Homo sapiens
ttcagacctgccactcgactgtggactacgccactttctaccgggcggcgactggcggcgcgatggacctgaccgggctcctgctggacgaagaaggca

SEQ ID NO: 277664 - DNA, 82 bp, Homo sapiens
ggccagagagaaaagactgcgaggtggccgcagctgtggccggagagaactcccccactggaaaggattctgaaagaaatga

SEQ ID NO: 277665 - DNA, 88 bp, Homo sapiens
tgagagccaagagcttctttgatggtgtgatgaatgcagactctgctaccattttggctgtttggatcctcctttgaaaaagtctcct

SEQ ID NO: 277666 - DNA, 75 bp, Homo sapiens
gctgagcagaggacgacatgttgcttttcgtggaggttagagcagccagcgggtacagaatggattttggaagag

SEQ ID NO: 277667 - DNA, 118 bp, Homo sapiens
gaccgcgcgcagggcctgcagcgggagctggacggcgagcgcgagcggcgcgagaaagtgaaagaacttgtcctggacaacagtcggtcgaatgaaggcaaactcgaaggcctcacag

SEQ ID NO: 277668 - DNA, 100 bp, Homo sapiens
cacggtgtccatcttgtgtccacccaagcccagggctgtgaacgtggctttcctcgctgcaccaccaccgcctgtgctgatgcaccatggagagtcctcc

SEQ ID NO: 277669 - DNA, 100 bp, Homo sapiens
cttgagtaaggtggcaaagatagatttgagaacactagaatttcaagtcttcagaaacagtgacaaggagcatccaagatacctgatcccagaactttgc

SEQ ID NO: 277670 - DNA, 113 bp, Homo sapiens
cacagcactagcagcgatcgggcccaggaaaaagaggaaagtggactgtccggggccgggctcaggagcagagtaagactttgaccccgacgcaggcttcagtgattgccgcg

SEQ ID NO: 277671 - DNA, 75 bp, Homo sapiens
ctacacctggacccgacctcctcgccttggaggaagaatataagttaccttttcgacaaaatgattcatctagtc

SEQ ID NO: 277672 - DNA, 100 bp, Homo sapiens
accaaagaaaaaacatctgccagtttctcttggagcaccaaggatgacattgatcttgatgccttggctgcagaaatagaaggagctggtgctgccaaag

SEQ ID NO: 277673 - DNA, 83 bp, Homo sapiens
ccaaatgctgatgaagatggggagcaaatagatctctcatagattgctggtggcaaggacatggtctgctatacagctcagac

SEQ ID NO: 277674 - DNA, 74 bp, Homo sapiens
gcagtggtcgcttcttctccttggcaatgaatcgctccctggctaatgtgattcttggaggctatggcaccact

SEQ ID NO: 277675 - DNA, 90 bp, Homo sapiens
cgggaagtcgcgaccagagccattggagggcgcggggactgcaaccctaatcaggttggcgctgtacgtttatgagtacctgctgcacat

SEQ ID NO: 277676 - DNA, 83 bp, Homo sapiens
tttttctaactatttcaagatgatatttattcaccaaacaaggtcaaaatgcagatcttcgtgaaaacccttaccggcaagac

SEQ ID NO: 277677 - DNA, 87 bp, Homo sapiens
atagacatgtaattaaagtattgcttggtagaaaacaaaggaaacaagtttctgactctggtgatataaaaatcaaatcttggaggg

SEQ ID NO: 277678 - DNA, 100 bp, Homo sapiens
tttcgtttttcggatgatgccttcaatactacctttatttccaccataggaggcaaaaccttcaactgaggacttgggggataagaaggaaggtgaatat

SEQ ID NO: 277679 - DNA, 99 bp, Homo sapiens
tggatggaagccatggatggccgggaacctgcactgacatggccgtcttctgtctgctgtgtgggaagcgcttccaggcgcagagcgcactgcagcagc

SEQ ID NO: 277680 - DNA, 90 bp, Homo sapiens
ctcgagaacatcgtggccaactcgctgctgctgaaagcgcgtcaagccacataaagaagatccctaatagtcatttctcaacaattatat

SEQ ID NO: 277681 - DNA, 100 bp, Homo sapiens
gatccatttccatcggtccttacagccgctcgtcagactccagcagccaagatggtgaagcagatcgagagcaaggtgatctttgcagagctgtttcaac

SEQ ID NO: 277682 - DNA, 101 bp, Homo sapiens
gattcgcagtggtcgcttcttctccttgatatggtggaatcccaaatttcagtcatcggcaggtcaggtatttagagaagaatgtgaagcttaagtctaag

SEQ ID NO: 277683 - DNA, 97 bp, Homo sapiens
aggacggggaagactcggacgagaaaacagatgccattggcctgcagccagatgcccgtggtgtggccacatctctggggctcaatgagcgtctctt

SEQ ID NO: 277684 - DNA, 100 bp, Homo sapiens
ggtgaaggaccggatcctggagaacatctcgctgtcggtgaagaaggcgtggtgtccctcgtggccgttcacccctccaccgtcaacccgctcgggaagc

SEQ ID NO: 277685 - DNA, 80 bp, Homo sapiens
tggaagatggacgtactttgtctgactacaatattcaaaagcttccttggaaatcattgactagcatcattgaatattat

SEQ ID NO: 277686 - DNA, 100 bp, Homo sapiens
cgccgaagctgtcaagtccaactacagccccaccatcgtgaaagagtagccggcttcagtgcctgccttggggccaagtggcagctcctggcctcagagg

SEQ ID NO: 277687 - DNA, 100 bp, Homo sapiens
acctggtccagcttcccttcctcaaataaggaaattgacacctggcgtggagaaggaagccaacatccttttggagccatgaatattgtccgaactccat

SEQ ID NO: 277688 - DNA, 100 bp, Homo sapiens
gccgagaggagctgagcgagcgcggaagaggttggcgatttgaaggagctgcagacactagacatttctaccaatcgtttgctaactttacccgagaggc

SEQ ID NO: 277689 - DNA, 88 bp, Homo sapiens
cgcccagcggccgcgacgctatggcgcactggagtaccctgttcctggcaaatgtacctgaaacatgggagcccagttaaaatgatgg

SEQ ID NO: 277690 - DNA, 98 bp, Homo sapiens
aaaacatcatcgttttgaagagttctgcgttttgccagtcacctctcaactgtgtgccaaaggtttaccgacaagactgtgaaactttcgggatggtg

SEQ ID NO: 277691 - DNA, 73 bp, Homo sapiens
cttgatatcacagaggaaactctgcattctcgcttcctggagggccgcgcattgaagacggcaacctcattgg

SEQ ID NO: 277692 - DNA, 80 bp, Homo sapiens
cttcccgcgtccgccgattcctcctccttggtcgccgcgtccttggctggcgtatgacgtccggttgtttgccttcgtgc

SEQ ID NO: 277693 - DNA, 74 bp, Homo sapiens
aaaatggcggtgtctacagtgttctcgacttcgtcgctgtcttgtgaaaatgccattgtgtgctggaaacctgg

SEQ ID NO: 277694 - DNA, 74 bp, Homo sapiens
ccagttccccagttctggcagattctggaaactgtacattgaagcagaggtgttggaaatcaatagctcttcta

SEQ ID NO: 277695 - DNA, 75 bp, Homo sapiens
ctgcagcagagggagcttgccttgaaggacaagaacagcgccgtcaccagcaggagtacgagagggcctccaaag

SEQ ID NO: 277696 - DNA, 101 bp, Homo sapiens
gagacagggccatgtatggaatatttgcttcatcacaagatcttggaaacattatataccttggggaaagctgatgtaccttaacatggggaatcttctta

SEQ ID NO: 277697 - DNA, 100 bp, Homo sapiens
ttgatatctatgcgtgtgcattagatcagacaggtctcctggagatgaaatgctgtcccaaccttactggatattgatgatgttaagaagttcaaaccgg

SEQ ID NO: 277698 - DNA, 100 bp, Homo sapiens
gggaaacagaagcttactttgctgacctgataatgaagaattattttgcaccactggatgttgtttactgatttggagcaagaggtggtggtggccttcc

SEQ ID NO: 277699 - DNA, 51 bp, Homo sapiens
ccgctaccgcaagctgctcctgcaggagtgggaggagcggcgcaggcagaa

SEQ ID NO: 277700 - DNA, 75 bp, Homo sapiens
gcctgctattgcaacatgggattttcaggaaatggtgtcacaatttgtgaaggtgctggagaatctggtaaaagc

SEQ ID NO: 277701 - DNA, 90 bp, Homo sapiens
gggctctgtgcgttgggaaagggaagtggagataaatttgcgcctcattttggtaagcggaaaaacaaaagagttcctgttttctcctaa

SEQ ID NO: 277702 - DNA, 50 bp, Homo sapiens
tggggaacttttgccttagcaaatgagatgccttcaattaagttgcagag

SEQ ID NO: 277703 - DNA, 98 bp, Homo sapiens
cacagcttcacgcagctagaccccgacctgccgcgcccggaggaccaagaatcgccttcagccctgtctggtgcatccttggcagaaagtgaggagga

SEQ ID NO: 277704 - DNA, 96 bp, Homo sapiens
gcagcctgtctcccaaagagagaactcttctcaaagaggaccctgcttactgacaagaggctacagtggatggaaactctgtgactgtaagaattg

SEQ ID NO: 277705 - DNA, 110 bp, Homo sapiens
ctctacttcactgggcctgtgatcgaggacataaggaactagtcacagtgttgctgcaacatagagctgacattaactgtcagcctacaacacagcagtcccctcaggat

SEQ ID NO: 277706 - DNA, 75 bp, Homo sapiens
tgacgctactatgggccgagtggcagggacgacgcccagattcactttataggaacagcttcagcttcagtgatg

SEQ ID NO: 277707 - DNA, 82 bp, Homo sapiens
gcgctgcccgcactcctggtcctgctcggggctctgttcccaggtccattttagcttcctatctcctgaaggaaaagctcaa

SEQ ID NO: 277708 - DNA, 50 bp, Homo sapiens
cgcagtggtcgcttcttctccttggatctgtgccagttcagaagcaggcg

SEQ ID NO: 277709 - DNA, 83 bp, Homo sapiens
cgccgcccgtccccggcacacgcgcagccccggcctctcggcctctgccggagaaacagagacaagaggagcagcagcggcac

SEQ ID NO: 277710 - DNA, 100 bp, Homo sapiens
gaggaatttgcctcttctacagatagagctgttaaggcctaaagatattggaagacctaaggctgaagttgctgcagaatttctaaatgacagagttcct

SEQ ID NO: 277711 - DNA, 100 bp, Homo sapiens
atggatgtagagaaatggcgtgtgaagagatgagatacctgtcctgtctgaagagggagaagaggaagaagagacttattctcaaaaagtggagtccgtg

SEQ ID NO: 277712 - DNA, 100 bp, Homo sapiens
agagggggaaaaaggaagtttgtcctgtcctggatcagtttctttgtcatgtagccaagactggagaaacaatcagtagcagccagatgaagaagcggcc

SEQ ID NO: 277713 - DNA, 101 bp, Homo sapiens
taagattcttcaaggtggggttggcatcccccacatacggtttgaagacatacctgatatcgggtcagagagccaaggagtctcgctgcagctgtgcagag

SEQ ID NO: 277714 - DNA, 75 bp, Homo sapiens
acgactccgaggatgagctggagaagagcctaggctggatgtcttgatcaataacgcagggatcttccagtgccc

SEQ ID NO: 277715 - DNA, 100 bp, Homo sapiens
caaatacttatcttctgtgagctcacaagaaactcagggcggccccttagctcctatgactggaaccattgaaaagagctttcagagagtgacatggtac

SEQ ID NO: 277716 - DNA, 88 bp, Homo sapiens
gtggggacgagctttgaaagaacttgccagacttaaacagaaatatgttggtgaagtctttaacatcgtcagtcaacaatcaacagcc

SEQ ID NO: 277717 - DNA, 51 bp, Homo sapiens
aggaaccccagggccagccactgcaggaggccatgatggatttcttcaacg

SEQ ID NO: 277718 - DNA, 100 bp, Homo sapiens
gaggaggcggcggtggggccccggaccaggcgttggagaccagggccagccctggccacaccccaggctgtgtcaccttcgtcctgaatgaccacagcat

SEQ ID NO: 277719 - DNA, 100 bp, Homo sapiens
cacggccactggccagaggtacttcctcaactttttcctgaaaccaagtacctctggtgacagtttacaaagtggaagcattccattggcaaatgaatcc

SEQ ID NO: 277720 - DNA, 83 bp, Homo sapiens
tctgcggctctcggtgccctctccttttcgtttccggaaacatggaaatttggtgagcggcctccacctaaacgacttactag

SEQ ID NO: 277721 - DNA, 76 bp, Homo sapiens
aaatgcagataaggatggagatggaagaatatcctttgaagaattctgtgctgcatttcagaagatggacacaaag

SEQ ID NO: 277722 - DNA, 131 bp, Homo sapiens
aggaaacatgctagaattacctggaacttcatcatcatctacttcacaggaattgccatttgtgaaaaaccatttcaatgtagtcaatgtgacatgcgtttcatacagaagtacctgcttcagagacatga

SEQ ID NO: 277723 - DNA, 100 bp, Homo sapiens
gattgcagcagttctgtgaggcagcctagtttgcatatgagtgctgctgcagcttcccgagacatcaccttgcatcaaagctaagccagaagatttatca

SEQ ID NO: 277724 - DNA, 75 bp, Homo sapiens
cgcgttgtctgtgtcggttttcaataacaagaacataaaagctttgattgatcaagaagtgaagaatggcattcc

SEQ ID NO: 277725 - DNA, 98 bp, Homo sapiens
cttgacaaattgagatttgctgatggaagcataagaacatgagaactgcgactcagcatgcagaagattgtagaaggcatgaaacaaaaaatgtggag

SEQ ID NO: 277726 - DNA, 101 bp, Homo sapiens
tgtgaagcggagacggcatccagtggggggcgagcctctcagccggccgggatggctaccacggccgagctcttcgagtgaagtacatgcgagaagccacg

SEQ ID NO: 277727 - DNA, 83 bp, Homo sapiens
tacaacattaatcagatactgcatttaaggtgtggggaagtcatgtctcctcctgcagtttacagataagcggttccagcctg

SEQ ID NO: 277728 - DNA, 50 bp, Homo sapiens
ccaagtccagccccagcatggcagcgacgttgtggacgtttaccagcggg

SEQ ID NO: 277729 - DNA, 96 bp, Homo sapiens
gaaggagactctgaattcttacaacctctctacgccaaagaaatccagtcccgaccaaattctccaaaacaccagtggggagaagaggaaccaaat

SEQ ID NO: 277730 - DNA, 74 bp, Homo sapiens
gctgggcctgcccttcaccctctacatgaatgactgctgatggagcgccagaattgaagatagagagtctgaat

SEQ ID NO: 277731 - DNA, 98 bp, Homo sapiens
tcaagctgtgtgcattagtacaaatgaacaccgaaaagctttggaggatttcactcttgataatattctttctcatatttattattttcgctgtcgtg

SEQ ID NO: 277732 - DNA, 97 bp, Homo sapiens
atccagagctgcatcattccttggggcaaaatgtggacaagggcgcctaaccaaggaaaatgtgaagccttctggaagacaaattgggaagttgagc

SEQ ID NO: 277733 - DNA, 88 bp, Homo sapiens
atcaccgatatcattatcttcttccaggccgtttgcagaggttacctggccagaaagctgtggaaaatctctgttctcacaaagtctc

SEQ ID NO: 277734 - DNA, 74 bp, Homo sapiens
gagaggcacccgatatatgttctctaggccttttagaaaacatgacggagtttcgctcttgttgctcaggctgg

SEQ ID NO: 277735 - DNA, 113 bp, Homo sapiens
agtcaccacaaaaacctatcgttagagtcttcctgcccaacaaacagaggacagtgtgccggtggtggtgtgcacattgagccccggtatagacagttcccccagctgaccag

SEQ ID NO: 277736 - DNA, 75 bp, Homo sapiens
atcaacaaatatggtcgacggtccaaatttggaatgaaggaattactgggagatgtactcaaagatcggccccag

SEQ ID NO: 277737 - DNA, 89 bp, Homo sapiens
gcgccccttcgcgtcccctgcaccatgagctggggcaccgagctctgggtttggtgcacctcgatttggaggaagtagggcagggccct

SEQ ID NO: 277738 - DNA, 50 bp, Homo sapiens
ccccctcggtccatcaccctcagggtgctgctggtgagtagcagccggta

SEQ ID NO: 277739 - DNA, 88 bp, Homo sapiens
catgttgttaccctcggacgtagcccggcttgtattggatacagtaccaatgaaggggagacctggaaaacattcatcttctctgaga

SEQ ID NO: 277740 - DNA, 100 bp, Homo sapiens
ctttggccacatatatgcgaatctataagaaaggtgatattgtagacatcaagctgcccctcagcctctacaagaaggtgctgctgattgtgcatgacgc

SEQ ID NO: 277741 - DNA, 76 bp, Homo sapiens
aaaagattcccaggatgtgagcaacacgggaccgatggaaagcccgtgtctctgtcaccgctggagtcccaggcac

SEQ ID NO: 277742 - DNA, 101 bp, Homo sapiens
gagctttctggaagggggcagtcatctttctgtccaagggcaaggatgccatgcagtccttcatgatgccattttatctcatgaaagactgtgagatcaag

SEQ ID NO: 277743 - DNA, 102 bp, Homo sapiens
gggacatctccagcaccctcatcgccctggccgacaagcacgcaacggagctggagtttgttcagatcatcatcatcgtggtggtgatgatggtgatggtgg

SEQ ID NO: 277744 - DNA, 75 bp, Homo sapiens
cttgaattagggaaagatttatcttttctccactcatataaaattactatactggcaattgctggagaagatttt

SEQ ID NO: 277745 - DNA, 50 bp, Homo sapiens
cctgagccggttcctgttcaaaagatagctctttaaaatccatgacggag

SEQ ID NO: 277746 - DNA, 100 bp, Homo sapiens
cagttcatgaaggccggcagcatcaatgtctggaacatctgtcccctgttcaaagaaagctacatccatattggaattttaccgggaacttggattgccg

SEQ ID NO: 277747 - DNA, 50 bp, Homo sapiens
cagccagccagccacctaactcctcaggatggcacatttcctagaggcag

SEQ ID NO: 277748 - DNA, 100 bp, Homo sapiens
cagcagtcacccaaacctggggagaagttggaaaatggatataccttatttgattatgatgttggactgaatgatataattcagctgctagttcgcccag

SEQ ID NO: 277749 - DNA, 100 bp, Homo sapiens
tgggacccggttttacacttttcaagtcatttttatcacagaatacatgtcatctgggagtctgaagcaatttctgaagaagaccaaaaagaaccacaag

SEQ ID NO: 277750 - DNA, 93 bp, Homo sapiens
gatctgcgcgaccagaccggcccccccgagggtttcatcaccttaaatggttttgaaccaatgaaggtgtattcccttaaaaagacggacagc

SEQ ID NO: 277751 - DNA, 83 bp, Homo sapiens
cctgacatgtgacaatgaaattgaattgaagaaaattgcacgtaatcacccaaatgccaagaaatccttttgtactattgctc

SEQ ID NO: 277752 - DNA, 88 bp, Homo sapiens
gggagccagtttgccattcgctggggctttatccctcttgtgatttacctgggtgacgcactggcacagcccctacttcttcgcctac

SEQ ID NO: 277753 - DNA, 90 bp, Homo sapiens
gtcgagatcccctgtgtggccaagaagctggtgtgcggagatgaagctatccagtcagttcgctgctattcccatgggtcacaggagaca

SEQ ID NO: 277754 - DNA, 75 bp, Homo sapiens
gggtatgagccacacatccccgaccacttgcggcctgagtatggtcaaaatgcagatcttcgtgaaaacccttac

SEQ ID NO: 277755 - DNA, 133 bp, Homo sapiens
aaaatcattagtttggaccttcctgtggctgaagtttacaagaaagtctggtgtaccacgaatgaggtattttgaaggtggcgtctcatctgtctacctctgggatctggatcatggctttgctggagtgatc

SEQ ID NO: 277756 - DNA, 100 bp, Homo sapiens
tgagactgggcctgaagggagagtttcagttcttcattgacgatgcctgaaatgtgcagatgccccgtgtcagaagagctgtccaactaatcttgatatt

SEQ ID NO: 277757 - DNA, 100 bp, Homo sapiens
tgcacgtgcagatcgcctggcagatctaccgtcaccagcagaagataaagggtggtgtcatcggggtcattatcaactgggactgtgacctggacctgcc

SEQ ID NO: 277758 - DNA, 75 bp, Homo sapiens
gggacttccccgcgtgacagcacagagataacggccagccctgggcgaaggcaaagaacagagcagttcaccatt

SEQ ID NO: 277759 - DNA, 80 bp, Homo sapiens
tcccaaagcgctgggattacagccagtcagaagtccagaaagaagagatagaaaagcatcagctaatgctcgaaagagga

SEQ ID NO: 277760 - DNA, 75 bp, Homo sapiens
accctgctgctgtcttcaaagaaggaatttaaactttgggataatgagctgcagtatgtggaccaacttctgaaa

SEQ ID NO: 277761 - DNA, 90 bp, Homo sapiens
ctccggcgctcgccatggccgacgaaaagcccaagacctgcgaccgcatcaagcagtccgccagcggaaccaagcggcgcgtgttcatca

SEQ ID NO: 277762 - DNA, 96 bp, Homo sapiens
tcggtcgcctggaggaccagtatttcccatggagggtgagagaactggagcagaccttgcaggcctctgaggagcagctccaacagagcaagggca

SEQ ID NO: 277763 - DNA, 75 bp, Homo sapiens
atctgaagggaggaaatagtggcaggtgacagtctgcatgtgcagttttcaggcaaggcagtttccccggcatga

SEQ ID NO: 277764 - DNA, 97 bp, Homo sapiens
gatgggttttaactacagacccagtctctgccaagagagcgacttgcagttgtggaggtacagtgtgaacggctgaggatgctctaccgggactgtg

SEQ ID NO: 277765 - DNA, 82 bp, Homo sapiens
acaagaaataccgtgccctgaggttggacgtggggaatttctcctggggctcagagtgtgatggaagctgttttattgtcca

SEQ ID NO: 277766 - DNA, 100 bp, Homo sapiens
ccaaagaattttttcagctggttgtggaggaaatcttcaatccagatattggtgaccttgggaaaggtgttgaaagtgatcgtcgtcatgcggagcctgt

SEQ ID NO: 277767 - DNA, 75 bp, Homo sapiens
caggagcccgtgcgcggcccgggcagccgcgctttcccaggttgtgagtcccggcccagcccctccacccccctg

SEQ ID NO: 277768 - DNA, 87 bp, Homo sapiens
actggattgtagctgcatatgcccattttgctgtgtgttacaggacacaactcagatgggaagttcatcgcccgggcacagcggata

SEQ ID NO: 277769 - DNA, 75 bp, Homo sapiens
ctgccttgctctttggaccacattgtcaattcacaccggtgtgatgaatgcagactctgctaccattttggctgt

SEQ ID NO: 277770 - DNA, 100 bp, Homo sapiens
aatgttaagtcagctgcagacttgattagcctgcctaccactgtagagggacttcagaagctgcgcagttggacagcattggcttcagcataatcaggaa

SEQ ID NO: 277771 - DNA, 100 bp, Homo sapiens
cggcactgggacttctcgatctctggaggcacctgttgcaagtgacaggacattgtcaatacctctggccgcttcttcatcatcaacaaggaaaattaca

SEQ ID NO: 277772 - DNA, 50 bp, Homo sapiens
ggaaaactggggactggtctacgtgttatagttttgccgctggactcttc

SEQ ID NO: 277773 - DNA, 83 bp, Homo sapiens
ggaacccgcacctgtgaacctcggcagtgcgtccccgggactctgttctgtgagacaatgcagatcttcgtgaagactctgac

SEQ ID NO: 277774 - DNA, 88 bp, Homo sapiens
aatttattcactcaagactaaaaactaaaggcctgggcctgagaactgaatcagaacactctgctccagccaaggtggtgagggcagc

SEQ ID NO: 277775 - DNA, 100 bp, Homo sapiens
aggacataaggaactagtcacagtgttgctgcaacatagagctgacattaactgtcaggttcgatctggggctaatgttctaatttgtggtccaaatggc

SEQ ID NO: 277776 - DNA, 98 bp, Homo sapiens
catctccaggccatccttggaggagcagaggtgaaaattgaactagatcacgccagtctggaggaggatgcaggtggacattgaagtggacctaattc

SEQ ID NO: 277777 - DNA, 90 bp, Homo sapiens
ggcggtccctgtgacctgtggagacacggccagatctgccctccagaaatgcttccagactgcacacttttacttagaggacagtacatc

SEQ ID NO: 277778 - DNA, 100 bp, Homo sapiens
actcttactaatgtctataaagccagtatgatagcaatgatggcagcatctggcgaggccccaatgtgaactgcacagacagttcgggttacactgcttt

SEQ ID NO: 277779 - DNA, 96 bp, Homo sapiens
cggctgctcctcccctccccgccggtgctggagaatctggtaaaagcaccattgtgaagcagatgaggatcctgcatgttaatgggtttaatggag

SEQ ID NO: 277780 - DNA, 100 bp, Homo sapiens
gggacacgcaggatgagccccgcgaccactggcacattcttgctgacaggtttttctaaagagtgaccgagtggccagaatggtacagagtggagggtgt

SEQ ID NO: 277781 - DNA, 75 bp, Homo sapiens
gaaggcagtgctacccaaaagcacactattcctgatcagagaactccagttgcttcaacacacagtatcagtagt

SEQ ID NO: 277782 - DNA, 100 bp, Homo sapiens
ctgtgaacaggattgtgtctctgggaccatgcctggccggatgctgccgcctggcttcagtgccatctgcatgtcctcagggatgacaaaggactcattg

SEQ ID NO: 277783 - DNA, 80 bp, Homo sapiens
catctccagcaccctcatcgccctggccgacaagcacgcaaagagcgcctgctcgctgtgcccccgggttatgacgaccc

SEQ ID NO: 277784 - DNA, 73 bp, Homo sapiens
agcacgtggaattcgcgaagctgccaaagccttagacaactggctgcgtcctggtgttgagcaggaacttcgt

SEQ ID NO: 277785 - DNA, 75 bp, Homo sapiens
ggaatgttccctgacaatttcgttaagcataagctgtggccatgactactgaagtaggctctgtgtctgaagtga

SEQ ID NO: 277786 - DNA, 98 bp, Homo sapiens
gggacccagctagctggccttaaagatggagcaacatatggtctctctcaaggtctctggccgctgtacaaccagccctccgacacccggcagtatca

SEQ ID NO: 277787 - DNA, 73 bp, Homo sapiens
tccgcgcggccgcggggagggacgagagggcctgacgtacagtgcctggatcaaagtggaacagctgaagcca

SEQ ID NO: 277788 - DNA, 123 bp, Homo sapiens
gacatgttgacgtcgtccgagagtcttaaaatcctgctctggccggattccagactcgtgggggaaaggctgatgtccaacatcacagtcacatacagagatggccgagtggcacagctggag

SEQ ID NO: 277789 - DNA, 100 bp, Homo sapiens
cagagcggcactcggcctgagcggatgtccagctcgccgctgtccaagaaacgtcgcgtgtccgggcctgatccaaagccgggttctaactgctcccctg

SEQ ID NO: 277790 - DNA, 98 bp, Homo sapiens
ttgtcctcctgtttctatagaaactgggttggaagtcagagctgcacaaagggaaagggtactccaaagattcaggtttactcacgtcatccagcaga

SEQ ID NO: 277791 - DNA, 76 bp, Homo sapiens
gcctcctcctctcccgcgggcaccgaggactccgctcctgcccaggtgatctgcaactctttcaccatctgtaatg

SEQ ID NO: 277792 - DNA, 75 bp, Homo sapiens
cggcaagagcagcgggagcggcgcggggaagggggcggtgtccgcagagcaggcatttgttgctatcggggacta

SEQ ID NO: 277793 - DNA, 100 bp, Homo sapiens
caggcgcttctggcagggcagcacggaccaccgcggggtccccggcaaggaagaaggaccatggaaatctcagttatcttcaacaaaatctaaaaaggtg

SEQ ID NO: 277794 - DNA, 50 bp, Homo sapiens
gaactctggtggtttcaggaagctgtcacagcttctatagcaaacgctac

SEQ ID NO: 277795 - DNA, 50 bp, Homo sapiens
ggaggatttgctgatctcatggacagagggagttacaaagcgtttggcag

SEQ ID NO: 277796 - DNA, 90 bp, Homo sapiens
cctcccgccgccgcctcggtacaccgtcccgcggggaacctagaaagattgtacaatgaatggtgattctcgtgctgcggtggtgacctc

SEQ ID NO: 277797 - DNA, 93 bp, Homo sapiens
tttgctgatagtgaccccaaaccagaaagttcattgggcctgcacctccaggggaccacttctataagagaaacaagaacctgccacctgagg

SEQ ID NO: 277798 - DNA, 86 bp, Homo sapiens
atacatgaaaaatggggcagaagaagagcagaaaatagcagccaggaaccaagaaaacttggttgaaggggaccagctgcctccag

SEQ ID NO: 277799 - DNA, 75 bp, Homo sapiens
gggacccggttccccggcccacagtgggggtgtgcaaacccgagagaactgggcagacctgttatcctaaactag

SEQ ID NO: 277800 - DNA, 73 bp, Homo sapiens
ccatgagggccatcccgaaactgtgattgttttctgataagaccatcatcatgtggaaactgaccagggatga

SEQ ID NO: 277801 - DNA, 100 bp, Homo sapiens
catccggagacttcactgcccaaacaggaagtctatgatgagtacaagatgaagcctgctgggagcgtgaatgacatggccctggatgccttcgacttgg

SEQ ID NO: 277802 - DNA, 98 bp, Homo sapiens
ggcctcctcccttagctccctgttcttgggaactggcgctgaagaccctggggacagatggcctttttctcttttcctccttggacactgacggggat

SEQ ID NO: 277803 - DNA, 75 bp, Homo sapiens
acctccgaaacccctcggcggcgttcttctgtgtggcccgcctgcagggtgattacaattcagaaattcatcaga

SEQ ID NO: 277804 - DNA, 82 bp, Homo sapiens
gggttgcccagggggccggagggccagggtctcccggagggccatgatccaaaggaaccagagcagttgagaaaactgttta

SEQ ID NO: 277805 - DNA, 87 bp, Homo sapiens
gtgccgccggcgccatgggcaattgccacacggtggggcccaacgaggcgctggtggtttcaggtattgttgcagcatctggcagtg

SEQ ID NO: 277806 - DNA, 100 bp, Homo sapiens
cagcctagcagtcgggaccgtactgagcagggaggagagagcgatggcttttttcacccagaaggccagccccagcggcttccccagcctccggaagtgg

SEQ ID NO: 277807 - DNA, 100 bp, Homo sapiens
tcatcacggagccctttctgccaaagtgaccaagaatatggcccaggtgaccaaagccctggacaaggccctgagcaccatggacctgcagaaggtctcc

SEQ ID NO: 277808 - DNA, 98 bp, Homo sapiens
ggagtccggacatctgaaacttggggcactatggcagacaaagttaggaggcagaggccgaggaggcgagtctgttgggccttggtggctgtgctctt

SEQ ID NO: 277809 - DNA, 100 bp, Homo sapiens
caaggaggaggaagagagaagtgcagatgtcgaaggacaaggaagctgttgatgttctgccgcaccacggcctccacgcagcagggttcttcattgcctt

SEQ ID NO: 277810 - DNA, 95 bp, Homo sapiens
ctacaacgtacccattccggaaggggacgaggaaggaaacatggaactcaggcagaaattcgaggctcttgcagccaatgccggaacaggatttg

SEQ ID NO: 277811 - DNA, 74 bp, Homo sapiens
ccgatccagcctgcggagcctgtggggcagtgcctacaccaactaatgttacaattgaatcctataacatgaac

SEQ ID NO: 277812 - DNA, 100 bp, Homo sapiens
ccgccgctgccccggctgcctcctccctgagttgtatatgaacacagatcaagattagagaaatccttgcaaaaagaaagacttgaacataaaaaagcaa

SEQ ID NO: 277813 - DNA, 98 bp, Homo sapiens
attactaagagaaaattttctcctggtagacctcggtccaaacagggtcactcatctaagaaagataacttggcagtcaatgcagttgctttacaaga

SEQ ID NO: 277814 - DNA, 50 bp, Homo sapiens
tagacattgaccccgaggagacggcagttatttaggattgaaggagtaaa

SEQ ID NO: 277815 - DNA, 100 bp, Homo sapiens
gaaccttctgaaacagtattcccagcatggtctagatgggaaaaaggggggctctaacctcattcctctggaagctatctgggcagtgttgtcgagacaa

SEQ ID NO: 277816 - DNA, 98 bp, Homo sapiens
agccagccagcaacctggaccgtccacaagaatcggaatgtcagttaatgctattcgcaagcagagtacagatgaggaagttacatctttggcaaagt

SEQ ID NO: 277817 - DNA, 90 bp, Homo sapiens
gctggcggagacatttttcacaaaagagcccttgcggtgctggtgtccgtggcgtgcctggaaccagacgtcctgggtcctctccagcat

SEQ ID NO: 277818 - DNA, 75 bp, Homo sapiens
ccgcctgccatgccccagccagtccccacagcataacagactccccatccccaggatgtcaacctcagtccctca

SEQ ID NO: 277819 - DNA, 101 bp, Homo sapiens
aaaggaggagaaggaagaggaggaggaggaggaaacagccaggcatcacgttgggtggtttccatttagaccgaggccggttcagaacttcccaaatgatg

SEQ ID NO: 277820 - DNA, 75 bp, Homo sapiens
tgttgcggtgcgctggagccgaacatccagtcatggataaaaatgagctggttcagaaggccaaactggccgagc

SEQ ID NO: 277821 - DNA, 82 bp, Homo sapiens
ctttccgaggaagccggtgttgccgaggtgctggagaatctggtaaaagcaccattgtgaagcagatgaggatcctgcatgt

SEQ ID NO: 277822 - DNA, 74 bp, Homo sapiens
ccgccatgggctgctgcagctccgcctcctccgccgcgcaggttttgcgtgtgaagctgtgtggaaatgtgaaa

SEQ ID NO: 277823 - DNA, 75 bp, Homo sapiens
cgggatcggttgccttgagcctggaaaggcagactacaagttactgagcacctccctgagaaaattgaaagtagt

SEQ ID NO: 277824 - DNA, 50 bp, Homo sapiens
cctcggagacccagacaatcacaggccatccacggcttccgagagacaga

SEQ ID NO: 277825 - DNA, 75 bp, Homo sapiens
cgcagtggtcgcttcttctccttgcctttctgagaaaagtctacagcattctttctctgcaggttctcttaacta

SEQ ID NO: 277826 - DNA, 50 bp, Homo sapiens
atttttagaactccacatttgagtgggtaattccagaattgattggccat

SEQ ID NO: 277827 - DNA, 90 bp, Homo sapiens
cggcgtgggagcacctctggggctatggaggcccctgagccgggcctttttctgtggccgcagtgactacttccgagccctgctggatga

SEQ ID NO: 277828 - DNA, 100 bp, Homo sapiens
atggactcgggaaccgaggagtacgagctcaacggcggcctgcctccgggcacacccggctccccggacgcctcggttgatggacggatggctacatgga

SEQ ID NO: 277829 - DNA, 95 bp, Homo sapiens
ggttcttcaatgaagatggagttatcagaccgtacaggttgagggatgggactggaaatcaaatgttacagtatgactatgaatatgatgaaaat

SEQ ID NO: 277830 - DNA, 75 bp, Homo sapiens
atgatttactggatgaactgataaaacccaccagtctagccgtcatttcaccaagctgataatgttcggggaacc

SEQ ID NO: 277831 - DNA, 92 bp, Homo sapiens
aagaaattgacagagctttgggcattcctgaacttgtcaatcaggaaacccagcgtttgctggcagaaccagttcctggcatcaaagccgaa

SEQ ID NO: 277832 - DNA, 90 bp, Homo sapiens
agccagacagcgcagcagaaggtgacccagtgggcagaagagaggccctagcacaaaacacagatcttaaagaacgcttacgcagaatcc

SEQ ID NO: 277833 - DNA, 75 bp, Homo sapiens
ggctctttcactgccgcattgtctctaaagctccatggaatagagattcctgaaaggacagattatgaaatggac

SEQ ID NO: 277834 - DNA, 99 bp, Homo sapiens
catcttcattcatgactccagacagtgattcgcctttgccagtctcatctcgtgtctgctttgttaagttccatgatccagactcagcagttgtggcac

SEQ ID NO: 277835 - DNA, 75 bp, Homo sapiens
ggggactcggagctgagaggagctgctgctcggaccagcgcggttggtgaccagattgttgaaatcaatggggaa

SEQ ID NO: 277836 - DNA, 74 bp, Homo sapiens
caaacagtttcagaagtctttacctccacgattccagcggcagcagtagacccaaatgatttgtacattgtaga

SEQ ID NO: 277837 - DNA, 50 bp, Homo sapiens
aataaacagtagaaacttgagtggtgaccagaagtcagcagcttcccaga

SEQ ID NO: 277838 - DNA, 75 bp, Homo sapiens
cagatcgggatttacgtggagatcaagcgcagcgatggtctcctctgagcctccggcctccataagacccaaaac

SEQ ID NO: 277839 - DNA, 82 bp, Homo sapiens
actgaaacgatcctctcatctcagcctccaaaagtgctggcattacagacacacctgccagggtttgtggagcaggctgagg

SEQ ID NO: 277840 - DNA, 76 bp, Homo sapiens
ctcccgcgccgcgctcccctcgcccgcccgggccgccagctctaagcgaaagacatgaggcctcagcctgaaatga

SEQ ID NO: 277841 - DNA, 100 bp, Homo sapiens
gatagttccgtgaagaagatcaaagctgcctttgctgaattacacaactggtgcaggcctggggtagtctcctgtctggacagagaagagaaaaatgcag

SEQ ID NO: 277842 - DNA, 97 bp, Homo sapiens
ccccaaatattgaccaactggcatcccacagcctcctcttccagaatgcctttgcgcagctcctggtaacgtttttatccatggatgacttgcttgg

SEQ ID NO: 277843 - DNA, 75 bp, Homo sapiens
ctgaaaagaaggtggcagacccggtttgctgatcgccccagggatcaggaggactttccttatcccagttgattg

SEQ ID NO: 277844 - DNA, 100 bp, Homo sapiens
tgccggccggtgtccccaccgccatccctgacccatggcgctgaagaggattcagaaactgctgctgaagggaaaggcagaagtggggaagacttttttc

SEQ ID NO: 277845 - DNA, 100 bp, Homo sapiens
caagtgattcattccaaggacaggcagcccagtctggtgtttggaatgacgacagtatggtggggacccaaactgtatgcattgttccagatgcgctctt

SEQ ID NO: 277846 - DNA, 100 bp, Homo sapiens
tgacaccatggatctcttcaggcacactacagaactaaatatgcatttaagtgggcagaccaacatccacctcagcaaaaacttcttcctgacgaatcgc

SEQ ID NO: 277847 - DNA, 100 bp, Homo sapiens
agctgccgaagtcagttccttgtggagccggagctgggcgcggattcgccgaggcaccgaggcactcagaggagatccagagacaatggccccgatggga

SEQ ID NO: 277848 - DNA, 73 bp, Homo sapiens
tggcgacagcggcggcgagaggatgaacaacaagttcgacgcgaagagaggatggtgatgcaccggttacaaa

SEQ ID NO: 277849 - DNA, 100 bp, Homo sapiens
gaagagagaagccatgagagacagttgagctgatgactatcagccagttcgtctgctcagtaaacctggggaactgagaagagaatatgaagaggaaata

SEQ ID NO: 277850 - DNA, 90 bp, Homo sapiens
tgccacctgctgcacccacgaatctgcccacccctcctgtaacccagcctgtttcacttcttgctgatttcatgccaatattgggaacca

SEQ ID NO: 277851 - DNA, 100 bp, Homo sapiens
cgccgattcctcctccttggtcgccgcgtccttggctggcgtgccatgtcaaaggacgccctgaatctggcgcagatgcaggagcagacgctgcagttgg

SEQ ID NO: 277852 - DNA, 100 bp, Homo sapiens
caggaagctccagcaccaacaacaatgggagcaattatgtttgcctctccacattttagaagagaaaggtttgagccaggttgcagtgacggtccaggct

SEQ ID NO: 277853 - DNA, 95 bp, Homo sapiens
agcctcctgagtagctggaattacagactgaagcgttcccggctgaaggtgaggttctgcaccaacgagtcgcagaagtcccgggcagagctggt

SEQ ID NO: 277854 - DNA, 82 bp, Homo sapiens
caatttgtccgtaaccttgtggagaagaccccggcgctggtgaacggctggtctccaatttctggcctcaagtgatcctcct

SEQ ID NO: 277855 - DNA, 95 bp, Homo sapiens
atttcctgcttctccttttcatgagtgttcctgtggtctctgcacctcctttctctgaaggaagaggatcaccttccaagacaaaacagtcttca

SEQ ID NO: 277856 - DNA, 74 bp, Homo sapiens
gtttagatcccataatcacagaagaaatgccactgttggagctgttaagaagaaatcctgaacggcgccttggg

SEQ ID NO: 277857 - DNA, 100 bp, Homo sapiens
gggagccctcacgttctttcgcttttttacctgccaatcaaactgctacaagacaacaccctgatctggcatggacatcatcttctaaagtactaaagag

SEQ ID NO: 277858 - DNA, 83 bp, Homo sapiens
cgaaagagaaacccggagggcgccggggtttttagaacttcagccataaaaatgggcagaattttccttgatcatatcggtgg

SEQ ID NO: 277859 - DNA, 75 bp, Homo sapiens
agatggttcccagcctcatttagtgaacatccaattcagaaaaatatgtcgtaactgcaagtgtggccaagaaga

SEQ ID NO: 277860 - DNA, 100 bp, Homo sapiens
aggaagaggaaagcaaaggagtcagggatggctcttcctcaggttggaagctgtgtactgtgggtgttacccactttgtcctaaagatttggtttatccc

SEQ ID NO: 277861 - DNA, 90 bp, Homo sapiens
gtgagcactgggggtggtgccagtttggagctcctggaagatgatggagtttcttcagttaatgagcaaatttaaggagatgggctttga

SEQ ID NO: 277862 - DNA, 73 bp, Homo sapiens
caagagcaacatctttcctcaccccaagacagcaaatcacccaccttgaggtcataaaggagctggaagctgc

SEQ ID NO: 277863 - DNA, 75 bp, Homo sapiens
catcaccatgctggtcagcttggtcatgatctaccagttcattgttcagcttccagctgatcttaccaagatgca

SEQ ID NO: 277864 - DNA, 82 bp, Homo sapiens
cggtcaaccgcatgtatgccatctgccgcaggtgatgtgtccaatctagatcccaacttctcatttgaaggcaccaaactgg

SEQ ID NO: 277865 - DNA, 100 bp, Homo sapiens
ctaaactgtgtggggcgcggatgggatccagctgttagtcggatgatagtatttctgctgcaagtacttctgatgttcaagatcgcctgtcagctcttga

SEQ ID NO: 277866 - DNA, 87 bp, Homo sapiens
aacagaattagaagaaaaggaaccctggcctgagattgtctccagctttaagaccacgacatcgagagctgcctgccagctcgtgaa

SEQ ID NO: 277867 - DNA, 100 bp, Homo sapiens
ccacctgccggttcttcatgaaaggttccgtggggaccccactgcctggagtacaggtgcgcattgtctcagaaaacccacagagggaagcctgctccta

SEQ ID NO: 277868 - DNA, 75 bp, Homo sapiens
gccccgtgtccttcattgccacgtacagattttatggaaagaactcttcttatgtccatgggggattggattcaa

SEQ ID NO: 277869 - DNA, 101 bp, Homo sapiens
gaggaggcgctgcgtcagtaccagcagattcctggtcgggtggcttccagtggtcttcagtctgtcgtgcaccgatgagaactctccttattgctgtgaag

SEQ ID NO: 277870 - DNA, 100 bp, Homo sapiens
attggctgaagctgatgaacaggaagttgtggctgaggttcaggagctgcgggcgtctttggagacacagcgtgctcagagcagtcgactctgcgtggca

SEQ ID NO: 277871 - DNA, 97 bp, Homo sapiens
ccccgagaaccgtcagtttgagccagatggttttactgcaatcacagcaaccaaccccatttggcttataaagactcggttacagcttgatgcaagg

SEQ ID NO: 277872 - DNA, 100 bp, Homo sapiens
gggtgatgacagcactatagtgcaggtgttggaagtgaaaggagatgaccaggatagtgaaaagtcaaaaccagcaggctcagatggtgagcggcggggg

SEQ ID NO: 277873 - DNA, 152 bp, Homo sapiens
actcagggaccgggagatggaagggaggctgctggagtccctggggcagctttatcggaacctaaataccgccagctaactgccttctatgaaagcagtcattattcaaggtgatcgtattcttccagtgaaaacaagactgaaatatgatg

SEQ ID NO: 277874 - DNA, 83 bp, Homo sapiens
aaatgagtctgtatataaggcttcattaagcttaactgagaagtatttctctgtagaggaattacatgaacgacagccttcgc

SEQ ID NO: 277875 - DNA, 83 bp, Homo sapiens
tgcaacgggctcatcaactcctacgaggacaaaagcaacgacttcgtatgcaattctgtggtgttcttggtcacacatttatg

SEQ ID NO: 277876 - DNA, 100 bp, Homo sapiens
gcatatgaaagtggattatggattcatgatgttgctatcaaaagttgagaaattgtcagaagaaatcatggagataatgcaaaatttaagtagtatacag

SEQ ID NO: 277877 - DNA, 100 bp, Homo sapiens
ggccgtggaggcagaggtggcatggggaaggttatagagatggaatagatgctggcaaagcagttactcttcaacagggcttcaatcaaggttataagaa

SEQ ID NO: 277878 - DNA, 100 bp, Homo sapiens
cacttcgcattttggcattgacatttaattttagggtcctttatatagaagggagaatatttggttcccgggtaagagttgactctacagcaaaggttgc

SEQ ID NO: 277879 - DNA, 90 bp, Homo sapiens
caccatcttttcctccgcctggtgggtccctccctgctgcgggacagcagctgatgggacgcctatgcctgacagctacccaacaacccc

SEQ ID NO: 277880 - DNA, 100 bp, Homo sapiens
tggaggcacctgttgcaagtgacagaccttagctggatctccaaaatacaagtgaatcacccggcagttctgaggcgtgcggaacaaatccaggctcgca

SEQ ID NO: 277881 - DNA, 88 bp, Homo sapiens
tgcagaacagagatgacatgccagcccagactttcatattagaagcccaggacccaggaaggagacacaggaaatttattcaaagtcc

SEQ ID NO: 277882 - DNA, 75 bp, Homo sapiens
cagggaggagaccggcacccagacaggtggcgaaggcagaggaaatggctattcaagtggacaagttcaactttg

SEQ ID NO: 277883 - DNA, 115 bp, Homo sapiens
ccgcaagctgagcgagctgtcagagcccggggacggcgaggccctcatgtaccacacggagatacaactcgtcaacgaatcaaattcagtgatgacagagtatgcaagagtcacc

SEQ ID NO: 277884 - DNA, 88 bp, Homo sapiens
ctgacgcagaatgcagactgtgtgctggacacctgttctgctgttgtgtcctgccattctcctgaagaacagaggcacactgtaaaac

SEQ ID NO: 277885 - DNA, 89 bp, Homo sapiens
cagcaccgcagagcggagagcggagcccggagcccgccgccccagacaatgcagatcttcgtgaagactctgactggtaagaccatcac

SEQ ID NO: 277886 - DNA, 100 bp, Homo sapiens
cgagggtctgaagttcacgactactagaaggggaggggagtggaaaggctctcagtgaaaaagggtgcctctgacagctgctgcaggaaacatggccaag

SEQ ID NO: 277887 - DNA, 82 bp, Homo sapiens
tttcgatggcttcgtggtggaggtctggaaccagctgctaagccagaagcgcgtggcgaagctgtgctcaggcccgggctgg

SEQ ID NO: 277888 - DNA, 100 bp, Homo sapiens
atttagagactgaaatcactgcaccttaaaaacaaaagattgagctgcactgtattcctatgaaggatttgggggcagagcacttggcaggtcatgaagg

SEQ ID NO: 277889 - DNA, 100 bp, Homo sapiens
tcgccctgtcctccatgctgtgcgtgccgctgcacctcctgggctgcctcctcagggccaagggcaccatggctgagggtctcctatggacagaagtgcg

SEQ ID NO: 277890 - DNA, 82 bp, Homo sapiens
ggagctttaccgcaattatggcatcctggccgatgccacggagcaagtgggccaggtagaagaccatgatggagaaggtgat

SEQ ID NO: 277891 - DNA, 75 bp, Homo sapiens
gagaacgaaaatgcatattatgccacatcgtgtacagctcaaaaaagttgaaaacaatcctcgaacaggaaatct

SEQ ID NO: 277892 - DNA, 99 bp, Homo sapiens
ccttactcactctctcgggattattgccgattgccagggtgctgaccgtgggagccgaccgaggtgctttacaaggccaagtacggtccaatgtggatg

SEQ ID NO: 277893 - DNA, 89 bp, Homo sapiens
ctctgaatacatagagagacacattgaacatggaggcaagactgtggaagttaaaattacctctctagtgacccttcagctgttaaccc

SEQ ID NO: 277894 - DNA, 101 bp, Homo sapiens
cagtgtttgagaagaagcccctggtatgggaggaggatatggagctctattcgaagttcctggaccggaagcttctctgggtgctgctctgggccaccgtg

SEQ ID NO: 277895 - DNA, 75 bp, Homo sapiens
tttggcttcggggtcaccatcgggaccctctgttgcttccctttggttatggctgcagcttcgattgccaatatt

SEQ ID NO: 277896 - DNA, 100 bp, Homo sapiens
ttttggtacccctttttatccactcattggcagagaagctttccatgccattgcagtgtcaactaggcctcagttacttttcagtttgcccaaattgagc

SEQ ID NO: 277897 - DNA, 83 bp, Homo sapiens
ccggagttgccatgaaatatggaaacgactcctcggccgagctgagtgaggtggagctgatcagaataatgttcagcatcaac

SEQ ID NO: 277898 - DNA, 98 bp, Homo sapiens
ctggcagtgcagaagtccagggaatggctggcccagcagctgagatcacagagacgagttgtactgctgtcacaggaaatggacgctggattacaagc

SEQ ID NO: 277899 - DNA, 95 bp, Homo sapiens
ccagcaatgcctccatgaacaatctcacccaattactctgctcagatgcctgtgaggagccaccaacatttgaagctatggagctcattggtaaa

SEQ ID NO: 277900 - DNA, 100 bp, Homo sapiens
tggctccccatactagtcgccggtttaatagactacaacttccactgtttccgaaaagctattcatgaggtttttgaggtgggtgtgacttctcacagga

SEQ ID NO: 277901 - DNA, 100 bp, Homo sapiens
gcaagaagcgccacgaggtgccaccccacgtgtacgcagtgaccgagggggcctatcggagcatgctgcaggattccttttgcaataaaaacaacaccag

SEQ ID NO: 277902 - DNA, 50 bp, Homo sapiens
tgtcagaagtgtattgataaatggccaggaatagttgctgaacaccccag

SEQ ID NO: 277903 - DNA, 82 bp, Homo sapiens
ccggcgcctcctcggagtccttggggacggagcagcgcgtcgtggggcgagcggcagacaaatttacatgtattggagacca

SEQ ID NO: 277904 - DNA, 82 bp, Homo sapiens
tgttcacgcacgggatccagagcgccgcgcacttcgtcatgttcttcgcgccctgccacaatggtgcgcatgaatgtcctgg

SEQ ID NO: 277905 - DNA, 83 bp, Homo sapiens
cagctcccagcccctccaaagatttactttcccatccgtgactcctggaatgcagcttcttggacacttaatgattgttggca

SEQ ID NO: 277906 - DNA, 83 bp, Homo sapiens
cgcccggccaagctatcttctcgctagcagctgaccctctggtgggcagcatcgccacacagtacatgaccaacagagcagag

SEQ ID NO: 277907 - DNA, 82 bp, Homo sapiens
ccagtggccacctctgcagtgtcttccacaacctgggaactcctcctcccacatctgatggagctaccaatcatcagatctc

SEQ ID NO: 277908 - DNA, 100 bp, Homo sapiens
gccaacttcttcgccaaattaaagttttacaagatttaacctgtcatcaagacctgggattttggtgtgacgagtagcacagcccctctatggtttagat

SEQ ID NO: 277909 - DNA, 100 bp, Homo sapiens
cgtcaccgctgctctttccactcggctggcctctgcgcctttctctcatcccgatatccttggaacagaagatcttattgtggaagtgacttccaatgat

SEQ ID NO: 277910 - DNA, 76 bp, Homo sapiens
gtactttccatttgccttcctgggaatcccgttctgcttccagaagtggaagtgctcacggatcggggaaatctgc

SEQ ID NO: 277911 - DNA, 98 bp, Homo sapiens
gtatttgagttgaagcagttttctcagctgcctgctaacatagctgtttgcagttctaagcttcagaggatgattccgaagaagacggagaccataac

SEQ ID NO: 277912 - DNA, 49 bp, Homo sapiens
aaggtgcaagatactatataaagtttaccgacaagactgtgaaactttc

SEQ ID NO: 277913 - DNA, 99 bp, Homo sapiens
cggggaaagccgtggccccgagggcggatccgagctgactacacagacttagtcttctccactccgtgttcctgcagctagagacatgacctaacaccc

SEQ ID NO: 277914 - DNA, 51 bp, Homo sapiens
ccgggctgagcttcctggagaagaggaagactctggtggagcaacgttcag

SEQ ID NO: 277915 - DNA, 90 bp, Homo sapiens
cgagcagaccgtttattagctgcaggcaaatacgaagaggctatttcttgtcacaaaaaggctgcagatttaggcctattaaaggaaggc

SEQ ID NO: 277916 - DNA, 90 bp, Homo sapiens
cgtagagggagtagtcaggattctcttggaacattattacaagacttaattcagtgcacaaatgagatgaatgtgaacatcccacagttg

SEQ ID NO: 277917 - DNA, 74 bp, Homo sapiens
gatattattcagttgaaacagttacactgcttgtagctcttaagattcagaccaggatgtagcactcaaacttg

SEQ ID NO: 277918 - DNA, 75 bp, Homo sapiens
caagactggggctgctcccatcattgatgtggtgcgatcggcatctaataggattcaggaatcaaagaatcagtg

SEQ ID NO: 277919 - DNA, 101 bp, Homo sapiens
ccctcccatctgccttggacatggcaatatgggtggggggaattgtgtgttaggagaggagacgccgtgagcgggacgaccagatgtaccgagagcggctg

SEQ ID NO: 277920 - DNA, 49 bp, Homo sapiens
aggagccggagcagaagcaaagaggctaacagagaccctgatgctggaa

SEQ ID NO: 277921 - DNA, 50 bp, Homo sapiens
atcagattattcacgaagctctagaaagctccagaaacatgacaaggagg

SEQ ID NO: 277922 - DNA, 97 bp, Homo sapiens
ttgaaagcaaattattagctaagaaagcagaggttaatacaatccctggctttgatggagtagtcaaggttgctggtgttgtcggccgtgcagacct

SEQ ID NO: 277923 - DNA, 74 bp, Homo sapiens
tattggaaggaggagattctgaagataaggagcggatactctgttttcaaggaagctgaatgggaaatacagac

SEQ ID NO: 277924 - DNA, 101 bp, Homo sapiens
caacgctacatcaacctctttgttgagaagtatttgaaagtttgtaaaacagaggatgaggctgtttacaaggatcaaccccaaacgtgcctgcattttgg

SEQ ID NO: 277925 - DNA, 95 bp, Homo sapiens
tctgagcccagatattgtggctgaacaaaagaagctggaagccgcagaccttgtgatattccagtggagaacatgcagctgaccctgaacctgca

SEQ ID NO: 277926 - DNA, 100 bp, Homo sapiens
ggccttctacagtgacggggagatcagcatttgcatggaacacatggtggaagcagggaaaggcctggagatgaggaagctggttctctcggggttcttg

SEQ ID NO: 277927 - DNA, 97 bp, Homo sapiens
tctcgctcacagagagctgggctacaggtgtgatgaatgcagactctgctaccattttggctgtttggatcctcctttgaaaaagtctcctaaacag

SEQ ID NO: 277928 - DNA, 100 bp, Homo sapiens
gcatcctggacttccagagccggaacgtcatccctgatatccctgaccacttcctgtgtctgtgggagcactgtgaggatccgagccaggagacactgag

SEQ ID NO: 277929 - DNA, 97 bp, Homo sapiens
gtcagggtccgccagctcggggccagcgcatggggctgctgagaccgctccggacgtgcgaagcgttcgcggtgcgagcgtttcccaaagtgtattc

SEQ ID NO: 277930 - DNA, 87 bp, Homo sapiens
ccaatgaagatgaagacataggaggaaggttgtgcaggaccagcgttccctgtgcaggcgccactgcgtttcctgcagattccgacc

SEQ ID NO: 277931 - DNA, 98 bp, Homo sapiens
tccatggccgggcccctgcccctgttttctttgtcacccccttggtggtgggggtcaccatggtcaatgtgacggtggactacattagaccagccagc

SEQ ID NO: 277932 - DNA, 100 bp, Homo sapiens
cccagtgggtgctcacagctgcccattgcctaaagaataacatatcagcagacgacatgctgtataccgagacagatttggaagaaagcatggacaaaat

SEQ ID NO: 277933 - DNA, 74 bp, Homo sapiens
accgctacgacctggtcaacctggcagtcaagcaggtaagaagagttcctgggtcaagtggtcaccttcataaa

SEQ ID NO: 277934 - DNA, 75 bp, Homo sapiens
aatcacgacccctccctgccatgtatccgcagggcagacatccgctgtttgcagacaaggtcccaaagacagcag

SEQ ID NO: 277935 - DNA, 96 bp, Homo sapiens
ccagactcagggatcaaagagcaaacagattcagtggcctgcattggaatcattaaccaatggcaacaggaatccaaggataaagtgatttccctc

SEQ ID NO: 277936 - DNA, 73 bp, Homo sapiens
gctgggtggtctcggccgcccactgcttcagccacagagccagccgccaaggttgacctcagcttcggagcca

SEQ ID NO: 277937 - DNA, 75 bp, Homo sapiens
tggttccccctccctcagcttccgccccaaaagtttggtgccctggttgtcagatgttggaaagcagtaggacgg

SEQ ID NO: 277938 - DNA, 100 bp, Homo sapiens
gtcatcgagtatgagcagttcatcgcagtgcgtcagcatttatcccgtttgccaaccattgatccgaataccaggaccctgcttttgtgtgggtacccaa

SEQ ID NO: 277939 - DNA, 96 bp, Homo sapiens
accccgactacctgcgcggcgcgctcggccgcctcaaggtcgcccaagtggcttttgtggccacaggaaccaatctgtctctccagttttttccgg

SEQ ID NO: 277940 - DNA, 100 bp, Homo sapiens
cgatggattgactttgacaatgactataaaactctgtatccacaattcatggaatcagtctgcatattgagtatcagtgctgatattgaaacaattggag

SEQ ID NO: 277941 - DNA, 74 bp, Homo sapiens
gcagcatgttggcattgacgtgctcaagagagacccgaccctgtacaggctgtggaaaatctctgttctcacaa

SEQ ID NO: 277942 - DNA, 75 bp, Homo sapiens
accgtgatgtgacgctggagaacctggcacttatgtcctccctggttgaaaacaatcctcgaacaggaaatcttg

SEQ ID NO: 277943 - DNA, 100 bp, Homo sapiens
ggagagaggtacctctccttttccctctccctttccctaaggaaaatggctttgtaaagaagtttgaacctaaatctggctggatgacttttctagaagt

SEQ ID NO: 277944 - DNA, 100 bp, Homo sapiens
tggcagaagcggtgcaagtactcggagacagcgactgcgattgcttacgagcagcacgggttctttgagcaggcagagaaaatcctgaaggagcaagagc

SEQ ID NO: 277945 - DNA, 98 bp, Homo sapiens
ggagacgacgctgctgggtccgctgagcggggcgacccgagggtcatctagtagcaggcacccaaatcaggcaactcccaagaaaagtggtttaaaga

SEQ ID NO: 277946 - DNA, 100 bp, Homo sapiens
tggagaacaggcgtggccagcactggctccttgatgaacgaaaagggtcttggtcagagaggaggaattctagtattgttggcagacgatcacttgaaag

SEQ ID NO: 277947 - DNA, 90 bp, Homo sapiens
ctgaaagaacactttgcacagttcggccatgtcagaaggtgcattttaccttttgtcgacaaagatgctgaattagtggcccaatggaac

SEQ ID NO: 277948 - DNA, 75 bp, Homo sapiens
ttgaccttggtggcagccacgtttttcaggtcactgaactgatgcaggagcagtcatacctgaagtctgaattgg

SEQ ID NO: 277949 - DNA, 83 bp, Homo sapiens
cctcgttcccccgattggggccgcaggcaacacttccccagatcaaaaggagccaacacctttcatcatcgagtggatcccag

SEQ ID NO: 277950 - DNA, 102 bp, Homo sapiens
tgtacagttgagatgtgcagtgttacaactcctttggcagaaatctgaagctatcatggaacaattgaagtcttttcaaataattgctcatctaaagcgtct

SEQ ID NO: 277951 - DNA, 122 bp, Homo sapiens
cggcgagatgcctttgttcaccgccaaccccttcgagcaagacgtggatgccttcaattaagttgcagagttctgatggagagatatttgaagttgatgtggaaattgccaaacaatctgtg

SEQ ID NO: 277952 - DNA, 83 bp, Homo sapiens
atctacgaggacatcatcaaggtggaggtgcagcagcccatggtgatgtgtccaatctagatcccaacttctcatttgaaggc

SEQ ID NO: 277953 - DNA, 100 bp, Homo sapiens
gggtggaggtggtgcctctggcagtgacgaggacgaagtgtccgaggttgaattgaccaaagcaatggtgatggagaagcctagtcccctgctggtcggg

SEQ ID NO: 277954 - DNA, 49 bp, Homo sapiens
gcatctcccttcatgtctgggtcatgatatcaatgatgtcaaacggctg

SEQ ID NO: 277955 - DNA, 101 bp, Homo sapiens
gagagccgggagtcgctgggtgcgtggggctgcctcgccgcgtctcgccacggtccctggtgctgaaccgcctgcgtccagttgccagcgggggtgggaaa

SEQ ID NO: 277956 - DNA, 75 bp, Homo sapiens
ttagagtcaagttcttcgtggagcctcatctcatcttacaggagcagactagcctatttgatggctttgcagatg

SEQ ID NO: 277957 - DNA, 82 bp, Homo sapiens
ttatgatttgctaaaaacaaacctttatcaggatgatgcagtaacagatgtggaagatgtgaaatttgtcatcaattatgac

SEQ ID NO: 277958 - DNA, 100 bp, Homo sapiens
gttcccccagtctgcagaaacactggcaacatttacaaagagtgaagatgaagctggatgtagctcagttgatgaagaaagttacaagactctgaagcag

SEQ ID NO: 277959 - DNA, 99 bp, Homo sapiens
agccctgccgtccgtcgctggccttttcacacagccttcggggtctcccctcaacctcaactccatggaccatcagcacgtgcccatcgacatccagac

SEQ ID NO: 277960 - DNA, 95 bp, Homo sapiens
tagaactacccagagcaagaccacagctggtgaacagtccaggttggtactaagaagtgcctttcctgacgtctctgctgcttggaaccgcttct

SEQ ID NO: 277961 - DNA, 98 bp, Homo sapiens
gagttggaacatggatagccgcttgcaggagatccgggagcggcagaagttacggcgacagctcctcgcgcagcaggagaatttgtgaagtaattaat

SEQ ID NO: 277962 - DNA, 82 bp, Homo sapiens
aggagaccgcccagtggctgcgctgggacaaggacccagatgatgtggtaccagttggccaaagaagagcctggtgttggtg

SEQ ID NO: 277963 - DNA, 82 bp, Homo sapiens
ctggactcatggaggctgagcatttattcaggtcttccccagggaggtcctgaactacacagctgagaacatctgtaagtgg

SEQ ID NO: 277964 - DNA, 90 bp, Homo sapiens
cgcggcggcgcgcggagaagtgcggcggagcggcgcctgcattagcaggccctccctatcctgaagacattagctgagagtctggcacct

SEQ ID NO: 277965 - DNA, 100 bp, Homo sapiens
tgcgtctcgctcaagtgatctttgataagaatgattcagattttgaagctaaagttaagcaggcactgaagtggcagcagcatcagggattgcttcctcc

SEQ ID NO: 277966 - DNA, 48 bp, Homo sapiens
ggtgatcgtcatggaccgctcggtggccgacatgaaaaagaagatgga

SEQ ID NO: 277967 - DNA, 50 bp, Homo sapiens
ttgttagaccaaatttaccacaactgttgtgtggaggaaacttggagatg

SEQ ID NO: 277968 - DNA, 100 bp, Homo sapiens
aaggctttcagagcatcgatgaagctatagcctggctcaggaaggaactggaccctccggtggacatgggtggggccctggggccggccctgttgctcac

SEQ ID NO: 277969 - DNA, 83 bp, Homo sapiens
gacggctctgtaggaaggaacttggttccccctccctcagcttccgccccaaaaggtggttagacgatgctattattgacgag

SEQ ID NO: 277970 - DNA, 80 bp, Homo sapiens
tccttgcagggccaagatctcttcaacagggcttcaccactggaacaagcacaaggtggatgaaaatactaggaaaagtt

SEQ ID NO: 277971 - DNA, 80 bp, Homo sapiens
cctccgggcacacccggctccccggacgcctcgttccagggtctccctccactgctgtagtaacccgggtccggggcctc

SEQ ID NO: 277972 - DNA, 100 bp, Homo sapiens
gcagaagctaacggagctgcagcgggacctggtgggcatagagaacctcattgctcctggcaggtttgcgtgtgaacttggacatgggcaaagcggtgta

SEQ ID NO: 277973 - DNA, 90 bp, Homo sapiens
atattgcacctactatgcaaacaaatgaaccagacataagttcagaggaatctgtctccactgtagaagaacaagagaatgaaactccac

SEQ ID NO: 277974 - DNA, 100 bp, Homo sapiens
ccggtgtctggcggatgcggtcgtgaagataggtccccagtctatgtgaggatctcctgtcttctgttgaccagccactgaaaattgccagagacaaggt

SEQ ID NO: 277975 - DNA, 101 bp, Homo sapiens
aagtatcctatcttcttttttggcacccatgaaacttctttaaggaaaaacagtagtgctctgcatagtttactgaaacgagtggtcagcacatttagtaa

SEQ ID NO: 277976 - DNA, 87 bp, Homo sapiens
ccccgaccctctgcgcactctctcccgcgccggcggctcagcctagccccgttcggccggccgagtgtctcctttcctcttgggccg

SEQ ID NO: 277977 - DNA, 99 bp, Homo sapiens
gggccgcgccgccaccgtctgaactaggatgtcccgacatgaagcggtcttgcgagtggctggttccctgcagaagagcacagaagtgatgaaggccat

SEQ ID NO: 277978 - DNA, 74 bp, Homo sapiens
accaccgccctggccatctaccatgtgtctctgctttctatccgtcaagatgataaagtcgtgtgcccgagaac

SEQ ID NO: 277979 - DNA, 96 bp, Homo sapiens
attttccaaatgaatttgcaaaacttactgtagagcactgcagtttcctcctgaaggctggctccggctctccctcaataatggcagcatcaccca

SEQ ID NO: 277980 - DNA, 100 bp, Homo sapiens
accgcatcgtgcccgtggacatctacatcccaggccgcgggaccctgtcagatgagcatgctggagtgatatctgttctagcccagcaagcagctaagct

SEQ ID NO: 277981 - DNA, 76 bp, Homo sapiens
ctagaatatacaaagacaaaaggagattctgatgaagaagttattcaagatgagtgtgaacatggctacgcctctt

SEQ ID NO: 277982 - DNA, 95 bp, Homo sapiens
ctttatatagaagggagagtaggctcccagccccattgccaataccttcctccactatcgaaccagcaaggtgagggtgctgagggcagcgcgcc

SEQ ID NO: 277983 - DNA, 80 bp, Homo sapiens
atttggcaacacagaatcgtcctctttggcaatgttttcttggacgattgcaaaagttgagaagctcaaaccattagagg

SEQ ID NO: 277984 - DNA, 87 bp, Homo sapiens
gcaaggtctccaagtcccagctcaagagatggacagagacgtatgtgcgttggtctcctaagggcacctacctggctacctttcatc

SEQ ID NO: 277985 - DNA, 90 bp, Homo sapiens
gtggaaagtgcgaagatagaaccaccacttattcagctgattctgaatcatcttacactaccagacctgtgtagattagcacagacttgc

SEQ ID NO: 277986 - DNA, 114 bp, Homo sapiens
ctgttgaaacaactgcaccatctgcaggagcccagcaagcggttaagaagattgtctaccaaatatagaacagaaaagatatatcccacagccactggagaaaaagaagaaaat

SEQ ID NO: 277987 - DNA, 50 bp, Homo sapiens
cccagcgaccccaagcaataccggtctcgctctcgaagcagacattcccg

SEQ ID NO: 277988 - DNA, 75 bp, Homo sapiens
aaattaataaatcttaaacttggtgcccaactattggatggggaaagacaccatagtcataaaagaagaaagcaa

SEQ ID NO: 277989 - DNA, 74 bp, Homo sapiens
cacacctccggaccgagggacgcgggttgaattctcttacccgcccctgattccaggagatggacatgacagcc

SEQ ID NO: 277990 - DNA, 87 bp, Homo sapiens
gccaagggctccacacaccaagaccaaggaaagaccacagcaagattctttcattcgtctcctcctagcctgggggaccaggctcga

SEQ ID NO: 277991 - DNA, 100 bp, Homo sapiens
tgacaccggcatttcgtccaaggccatgggcatcatgaattcgtttgtgaacgacattttcgagcgcatcgcagatttattgctaaacatgggtgcattt

SEQ ID NO: 277992 - DNA, 82 bp, Homo sapiens
agggaccagcagttactgggaagatatcttaatgcaattcagacaatgtgtccacacattcttcgctatttgactacagcag

SEQ ID NO: 277993 - DNA, 100 bp, Homo sapiens
ttcgtggcctgggagttcagcttttagagcaggtgtatgatcttttggaggaggaggatgaatttgatagagaggaacgaatgatcacacactttgaaag

SEQ ID NO: 277994 - DNA, 83 bp, Homo sapiens
cagacactgaacgaggagccagtggcagagtggcatgattccgactggatactctcagtgccagccaaattacctgaaattga

SEQ ID NO: 277995 - DNA, 90 bp, Homo sapiens
gcaatgaggcgggcagcactgcggctccggtagattgcaaatgacctgctttctttctgttcccgggcgtttggacccctgtcttggacc

SEQ ID NO: 277996 - DNA, 75 bp, Homo sapiens
gaatattgtgaccacacagttctccatgagttggacagataccaaagagggtcagacatatttccaacatttggg

SEQ ID NO: 277997 - DNA, 74 bp, Homo sapiens
gcactggcaagtgcagcgcctgtaatgtttggcgagtctggatgcctggtgtgcaggagtatatacaacagcct

SEQ ID NO: 277998 - DNA, 101 bp, Homo sapiens
cgatgagcgatgaggagcggattcagctaatgatgatggtcaaagaaaagatgatcacaattgaggaagcacttgctaggaaactgaaggctcagaagagg

SEQ ID NO: 277999 - DNA, 100 bp, Homo sapiens
agattatgacagattacgccccctatcctatccgcaaacagctcttgtcaggatggtgaagctgttcatcggaaacctgccccgggaggctacagagcag

SEQ ID NO: 278000 - DNA, 100 bp, Homo sapiens
gccctcccccagcagtatcctgcatcgggagaaaacaagtccaaggatgaatcccagtccctgttacggcaaagaacagtctgaacttgatcaagatttg

SEQ ID NO: 278001 - DNA, 101 bp, Homo sapiens
gccagagctccccaggggacttctccatctctgtcagaaggcgcttacagctcaatgctaatcaggccttcttcctgttggtgaacggacacagcatggtc

SEQ ID NO: 278002 - DNA, 100 bp, Homo sapiens
tggcgcggccgagtccccgtacggccacccggcgggatgagttccacccgttcatcgaggccctgctgcctcacgtccgcgccttcgcctacacctggtt

SEQ ID NO: 278003 - DNA, 82 bp, Homo sapiens
accgccttgaagagctgatgaaggattttttatcaagcagaaatgcatcgaacaacgagaatcaagatcactgagctaaatc

SEQ ID NO: 278004 - DNA, 100 bp, Homo sapiens
cacaaccttgttgcatgccagataaatgatcaggaaacccagcgtttgctggcagaaccagttcctggcatcaaagccgaaccagatgagagcaacgccc

SEQ ID NO: 278005 - DNA, 101 bp, Homo sapiens
gccgcggcctcttcggctgcggaccctgccattccggaggagggtggatccatgctgtgctcacttctcaggactgtatggcttttggggggaacttcctg

SEQ ID NO: 278006 - DNA, 75 bp, Homo sapiens
tcagctcttccacatcccccgggttacctccctgaagctgtagggccttgtgggggaagtcatctacaataagac

SEQ ID NO: 278007 - DNA, 100 bp, Homo sapiens
atttaaacaagagatttccacagaagctgataggaagatgtcttcaggaaatgctaaaattgggcaccctgcccccaacttcaaagccacagctgttatg

SEQ ID NO: 278008 - DNA, 100 bp, Homo sapiens
ctggcctggaggctatccagcgaatgcagtttattctactccaagagattctgcctcccttgtgtccgggagaacatcaatgcttttcctcaggaaattc

SEQ ID NO: 278009 - DNA, 80 bp, Homo sapiens
actgaacaaagacaacattgttcctggaacgccctctttttaaaaaaggtgaatatgaccatctcccagaacaggccttc

SEQ ID NO: 278010 - DNA, 132 bp, Homo sapiens
cccttctactgaattagtttctggaggatctgataatcaagtgattcactgggaaatagaggataatcaggaaatccagttatcaaaattgactcaagaagagagaacctaacagaacaataacaatggaag

SEQ ID NO: 278011 - DNA, 51 bp, Homo sapiens
ctcggttctgccccctcgaggagatcgagatggtgatcatggagcgtagca

SEQ ID NO: 278012 - DNA, 99 bp, Homo sapiens
ccatgaccttgaactttccagccttctgaactgaatcaagaacccagtctcggttgccaacagactcttatgtgaagggcagaagggcaagctctcggc

SEQ ID NO: 278013 - DNA, 101 bp, Homo sapiens
cagtgagggtgtacaaatacccctttgaattaattatggctgagtttcctttaacagtgtttacactcagatttggagagtcctgctgcacctggctgctg

SEQ ID NO: 278014 - DNA, 75 bp, Homo sapiens
ttccaaagcctcctggaccgtccaagaaggcgaagctgtgctcaggcccgggctggacgcagagccagagctgtc

SEQ ID NO: 278015 - DNA, 51 bp, Homo sapiens
gaaactggaggagtcccgctcgaagctaggaaaccaagtgctacctcctgg

SEQ ID NO: 278016 - DNA, 100 bp, Homo sapiens
gaggtcgagtaccttccctgtcccatcgcaaacccaaagatccccgttcctggagattctgattgagccgccgccgcgccgccgtcgctctccaacgcca

SEQ ID NO: 278017 - DNA, 100 bp, Homo sapiens
ctggagttgcttcacttagctctacaatcaacccatgtggttgctgctccaagatagccaaaatgtggaagcactgagaatgcaggcactctactatgtg

SEQ ID NO: 278018 - DNA, 98 bp, Homo sapiens
gccatgtccatgatgcctaccctgtgaagatctctcaccatccaaaaaagcaagtagcctgcagtatgaaatgctgctgctgacggattctatctcca

SEQ ID NO: 278019 - DNA, 75 bp, Homo sapiens
ccatcatatcagacctgcgcagccggataatttgcaagtaccttttgagtgaagaagaggaccacttcagtgagg

SEQ ID NO: 278020 - DNA, 100 bp, Homo sapiens
tgtgcagccagaaggtggtggtcaccacaccactgcaccgggacaagacacccctgcaccagaaacatgctgcgaggaccatgacatcatggaagccgat

SEQ ID NO: 278021 - DNA, 101 bp, Homo sapiens
gttcagggttgccatgctgctgctgagctgatcaaggaagtctctctagattaacgtcttcaaggacccagttgctgatcccaacaaaaggtccaaaaagg

SEQ ID NO: 278022 - DNA, 74 bp, Homo sapiens
ttcttcttgttatctttccttggctactgtaaagcatttagagaaacagtgttaaaagaatcagcggctgggcg

SEQ ID NO: 278023 - DNA, 133 bp, Homo sapiens
gtttgtgcggcgattccgaggacaggccgactgcagacaggcgctgcccctgctggcctctgcctgcccagtcatcagtgagttctgcctcagtcagctcccaagtgaggacgcagtcacctttgaagactcc

SEQ ID NO: 278024 - DNA, 100 bp, Homo sapiens
tccgttggccttcgtacccgtcttgattgaggcaagaagagaggcggaggcgatccttccaggattacactgggcagaagatcacccttgaggctgtctt

SEQ ID NO: 278025 - DNA, 100 bp, Homo sapiens
cctcaacgctgcccgggtagcttcccgacttatcgacatgagcaggcaccaagaggagatcgccaagcacaaggggcccccggtgttcactcaggaggag

SEQ ID NO: 278026 - DNA, 100 bp, Homo sapiens
cttttatccagctctaaactttatttcctcccagaagacactccccagggcagaaatagcgaccatggcgagatgcggcattccaaaagaactcactgtc

SEQ ID NO: 278027 - DNA, 50 bp, Homo sapiens
cgttatgtctttccgcgacctccgcaagacgagttgtactgctgtcacag

SEQ ID NO: 278028 - DNA, 98 bp, Homo sapiens
caaggtgctgagccggcgcggggtcggcgctgggctggaggcggcggagcgcgagagcttcgagcggactcagcttggatttacactgggcaacgtgg

SEQ ID NO: 278029 - DNA, 75 bp, Homo sapiens
ctctatagagacgtgatgcaggaaaccttcaggaatctggcttccatagactggatacacgtctgtttaactacg

SEQ ID NO: 278030 - DNA, 100 bp, Homo sapiens
tggatcatgatagacaaactggagagcatattccaagccctgccaagaaagtaccaagactccctgccacagcagcagaacctgaagcagctgtcattag

SEQ ID NO: 278031 - DNA, 98 bp, Homo sapiens
ccaaaatgcatctgccattattaagactgccccatcaaaggtcaagctggttttcatcagtgatgcagcttggtttaacgaatcttggttaagccgaa

SEQ ID NO: 278032 - DNA, 88 bp, Homo sapiens
ccatgatgatcctgccatgcaggcaggccctgagcacgctgctgtgtgagcagcagtgcaagaagaaacacacgctgctgtgccccga

SEQ ID NO: 278033 - DNA, 50 bp, Homo sapiens
catccatcaattactaccaagtaacagttgacaaatgggaacctttgttg

SEQ ID NO: 278034 - DNA, 75 bp, Homo sapiens
atggctagcaggaatgcttactgttgcgtggttcgttattaacagttcattcggctcctaaagaagtagcagtgt

SEQ ID NO: 278035 - DNA, 97 bp, Homo sapiens
gaggctgagtacgacagcctcaaacaggagctggagcagctcaaagaggcgcccgggcgggccgggggccgtggcggaggaggagcgctgcacggtg

SEQ ID NO: 278036 - DNA, 98 bp, Homo sapiens
ggccatggagatccctgccccggagcccgagaagacagcaagaggtggaaacatacagaagaagcaaggaaattacagttagaggtcacaactgcccg

SEQ ID NO: 278037 - DNA, 100 bp, Homo sapiens
acctgctcaccttacacccaatagaaattgctcgacaactcactttacttgaatcagatctataccgctccccagttaaagatctcagatgaccggctga

SEQ ID NO: 278038 - DNA, 82 bp, Homo sapiens
agaggacgccggaacaccctggaagccgagaaatgtgggtaattccagaattgattggccataccattgtcactgtattact

SEQ ID NO: 278039 - DNA, 50 bp, Homo sapiens
gattaatgagaaacataatgtattttggaatgttttaaaggaagttgggc

SEQ ID NO: 278040 - DNA, 98 bp, Homo sapiens
tgtgctaaatcttcagtgggacaatgggttcagacaaaagaagaaggctcaagcttggaggaaactggctttaactggggagaatatttggaagagac

SEQ ID NO: 278041 - DNA, 100 bp, Homo sapiens
atccaccaaaggacttgaagaaacctcgcggaaagaaatgcttctttgtgaaattttttggaacagaagatcagaatgatgagaagacagcagctgatta

SEQ ID NO: 278042 - DNA, 100 bp, Homo sapiens
ggcaggagcctctcaatggagtccacttccgagtccagcaacgaaggttttgggaacagtaaaatggttcaatgtaaggaacggatatggtttcatcaac

SEQ ID NO: 278043 - DNA, 100 bp, Homo sapiens
aatcctcaaaaaatcttcttggttctgctacaagttgtggcagcactgcctgaaggtatgagaccagattctaatctttatggttttccatgggaattgg

SEQ ID NO: 278044 - DNA, 101 bp, Homo sapiens
ggcctgcacggacggtgttggttgggaagttgaatataccggcaattttgcgagcacccaaggagagaaaaccaagtaaaaaagaaggaggcacacaaaag

SEQ ID NO: 278045 - DNA, 83 bp, Homo sapiens
gtgcttttatattcatctcaaaaacaaaattctgaactcaggacttggcaaatgtccgtaggagaattgaacttattcaggac

SEQ ID NO: 278046 - DNA, 50 bp, Homo sapiens
gaagaatcccccagggcccagaggatcagattttattaagacctctactg

SEQ ID NO: 278047 - DNA, 135 bp, Homo sapiens
tctgtggcttttatctgatattttaggccaaggagctactgcaaatgtctttcgtggaagacataagaatgcctgtctggggaggtggaaacaagtgtggggcctgtgggaggaccgtgtaccacgcagaagagg

SEQ ID NO: 278048 - DNA, 75 bp, Homo sapiens
agtctttgaggacacagcctcgctggaggcagtttctgaatgacctggatgaccctgaaagaggaatgatttttg

SEQ ID NO: 278049 - DNA, 90 bp, Homo sapiens
ggaggagcaaggcagcatagcactgcggcaggagcagattgacaatcatgactgtgaagtgctgaccacactcaccccagacactggccg

SEQ ID NO: 278050 - DNA, 100 bp, Homo sapiens
gtatttctcgttttcattggagatcacagcatacaaaagccaatcgacaacgtgaaccaggattaggatttagttttggctgtggagtttgaaggctggg

SEQ ID NO: 278051 - DNA, 75 bp, Homo sapiens
tgcacattctgcggctaaagatgcgcattagcacagggcaaggcttcccaggaagaaaaaatgctgggcatcttg

SEQ ID NO: 278052 - DNA, 88 bp, Homo sapiens
actccgggcagcctgtagactgagctgccggagaagcaggagcagctggctgccatctatgccgtcctggagcaccttccagaagcca

SEQ ID NO: 278053 - DNA, 90 bp, Homo sapiens
ttgccatggatcagttgctttcccaaagggtctgagtgcccggaccgcttggctatggactttggtggggctggtgccgcccagcaaggg

SEQ ID NO: 278054 - DNA, 51 bp, Homo sapiens
cactatggcgctgaaacggattaataagactattgggaagaagttacctgc

SEQ ID NO: 278055 - DNA, 75 bp, Homo sapiens
ttagtccattgactatgcagcctaatggattactacagcatcccatttcccacacccactactccgctgactggg

SEQ ID NO: 278056 - DNA, 98 bp, Homo sapiens
aagatcattcgagaccatggagacatgaccaacaggaagttccgccatgacaaaagggtttacttggggaggcaacgcacgggccacaggcatgttcc

SEQ ID NO: 278057 - DNA, 100 bp, Homo sapiens
cctggagcctcagttggaagcagccgatccagcctgcggagcctgtggggcaggtaatctgtaagtcagatgctccaacaggggatgttcttcttgatga

SEQ ID NO: 278058 - DNA, 97 bp, Homo sapiens
agaaaacctaaagtatttgccgttggtgattcaagggttcctaagtggtagcagagatggaacagcacggatttggagatttgagcagttagaatgg

SEQ ID NO: 278059 - DNA, 116 bp, Homo sapiens
cttgattacccgttaagtcccccaaagatgagatttacctgtgagatgtttcatcccaacagagatgaccaggatagtgaaaagtcaaaaccagcaggctcagatggtgagcggcg

SEQ ID NO: 278060 - DNA, 104 bp, Homo sapiens
ataaagaggaagcatgctgtcctatgtcagcaaaaactggagcagaaattggaggctcagcatagcccctgcagatcaagtcagtagtggcaccagagcatgtg

SEQ ID NO: 278061 - DNA, 100 bp, Homo sapiens
gggtggagtcggaaaatctactacagcagatgtgcagcccccagagggccggagccgagatggcctgctgactgtgaacctacgggaaggcggccgcctg

SEQ ID NO: 278062 - DNA, 103 bp, Homo sapiens
ggcaaatttgtcaaacatcagcaaaatcatagggcagaaacactaaggcagccgtgtctgtgtttttgtctcgcagaattagagcccattgggaacgatgcca

SEQ ID NO: 278063 - DNA, 96 bp, Homo sapiens
tgctggaggacgagggccagctgacggagatggtgcagaagatggaggaggtagctacagcaagctgggtagcaggcagatccaaaggatatcatg

SEQ ID NO: 278064 - DNA, 100 bp, Homo sapiens
atataaaaatctattgtaaaaatacggaaaagaatggcagcggaaacgcagacactgaactttgggcctgaatgatggttcccctcatcagccaagcctg

SEQ ID NO: 278065 - DNA, 98 bp, Homo sapiens
ccagagtctggagccggaccccggcacgcccgggagtgagcggacagttaagtgggcagaccaacatccacctcagcaaaaacttcttcctgacgaat

SEQ ID NO: 278066 - DNA, 100 bp, Homo sapiens
attctcgacctgctaacagaactggaccttttcgcttcttccagaccagctggtcttgcttctggagcatctcttggagcagaagactctgagcccccga

SEQ ID NO: 278067 - DNA, 82 bp, Homo sapiens
gttgttttgaatgggcgcccgtaagagaggtgggcaagtgccaagtcctgccctgccaacttcttggcagctgccgacgaca

SEQ ID NO: 278068 - DNA, 90 bp, Homo sapiens
tgggccgggagctgtacttctatatctacaagggggtccgcaaggaaattcagttcatgaagataagaagtttcttgacaaatacatgcc

SEQ ID NO: 278069 - DNA, 75 bp, Homo sapiens
gaggtggaggaggaggaggaagaggaggagcggatccgtcgcggggatgacctgcggctgcagatggcaatcgag

SEQ ID NO: 278070 - DNA, 75 bp, Homo sapiens
aaggacagcacgagcacccccgttggtgttcgaggaagagacattgttgttcttggtgtggagaagaagtcagtg

SEQ ID NO: 278071 - DNA, 90 bp, Homo sapiens
ttttgccacagtttttgtaccagttcttctgtggattctcacaacagtgaaagatgtcatgtatatctgcccatttatgggagcagtgag

SEQ ID NO: 278072 - DNA, 83 bp, Homo sapiens
gcagagccgagtgcagaagatctgggtgcccgtggaccacaggccctcgttgcccagatgaaactactaaagttcctggggaa

SEQ ID NO: 278073 - DNA, 74 bp, Homo sapiens
gagcagtggagcaaggtcatttgtgcactcacttccagatgctcaagtccatgtgtgccgggcagaggctagcg

SEQ ID NO: 278074 - DNA, 101 bp, Homo sapiens
gcacaggggccactcagagtcgcccgagaaagtagtgaagccccgtgtcaactcactgaggcccaaggggttagggctgggtgccaacctgaccgaggccc

SEQ ID NO: 278075 - DNA, 90 bp, Homo sapiens
cggacgcgcagcatggcggtggaggacgaggggctccgggtcttccagagcgtgaagatcaagatcgtaatctatgccagcaattatgac

SEQ ID NO: 278076 - DNA, 75 bp, Homo sapiens
ccactgatatctcaaaaggtgatctggacaaaggaacaggtatctcaggttggacagcatttggacttggaatga

SEQ ID NO: 278077 - DNA, 100 bp, Homo sapiens
agatggcctcgccctcaccgtgcaccagcagcttcgacaaagggaccatgcggaggatggcgctgtccatgatcgatcatgctgcaaagcttggagccca

SEQ ID NO: 278078 - DNA, 50 bp, Homo sapiens
caagaggcgtttctataagaattggagaagcaggacaaggtggtgctcca

SEQ ID NO: 278079 - DNA, 75 bp, Homo sapiens
tcggcccgcgggggagccccgggagccgcacgtgtgccggtccaacaaaagcccttgggtctgtttgacttgttc

SEQ ID NO: 278080 - DNA, 90 bp, Homo sapiens
ctgggacttcccgtccgcggcgtggagggacaactgtcatctgggaagtaacaacgcaggatgccccctggggtggactgccccatggaa

SEQ ID NO: 278081 - DNA, 75 bp, Homo sapiens
ccgcctcctcctcctcagtaacgcgggaaatctactttcttcaatgtgttaaccaatagtcaggcttcagcagaa

SEQ ID NO: 278082 - DNA, 89 bp, Homo sapiens
gcaatgtttagccaacccaaattaccttaattgtggttccttaaaaacagttattgctcaagatgaaaacctcccagaagatgttgtga

SEQ ID NO: 278083 - DNA, 95 bp, Homo sapiens
tggatttttgcatgagacgcttctggacaggctttccttaaagtttcccatgtctcaatggactcctgaatataacgagctctacaccttaaaag

SEQ ID NO: 278084 - DNA, 49 bp, Homo sapiens
tgggatccagctgttagtcgggcctgcactgcccaaagtcttggaaact

SEQ ID NO: 278085 - DNA, 87 bp, Homo sapiens
cagagttgccctgtcaccatttctttcacaaaccttgtgtctcaatttggctacaaaagattcagaatggacagtttagaagaacct

SEQ ID NO: 278086 - DNA, 100 bp, Homo sapiens
aagcctgaacaggcagggccagacccagccttttggccataaccagtctcagcaagacatcctacaagagaatacgattcttaaagctactgaagtgcag

SEQ ID NO: 278087 - DNA, 100 bp, Homo sapiens
caagatgatttatggtaataagcacaacctccaagagggaaaacatttctccagattatccactcacccttctagaaggtctaacgaccattagtcattt

SEQ ID NO: 278088 - DNA, 100 bp, Homo sapiens
gggagtgccctgagggtgggtcgggggagctgcgcagatgatgcagtttgcttggcagagctataagcgttatgcaatggggaaaaacgaactccgtcca

SEQ ID NO: 278089 - DNA, 100 bp, Homo sapiens
cttccggatcctgcgcgcagagtacaactgtaactgctttaagattatttaagaatctacctgtaagaaagcagttttactcaactgcaaaaaaatgtaa

SEQ ID NO: 278090 - DNA, 100 bp, Homo sapiens
gtgctggcggcggcagctgaggccttggccgaagccgcgcgtcaactgtcccggcccccaactttgccatgcctgtcacggtgcccgtgtccaatcagag

SEQ ID NO: 278091 - DNA, 98 bp, Homo sapiens
gcggccaattcggtggaacgaggacgcggactgcgaaggcaggatcttagtaagagccctaagaccatgaaaaagctgctgcccaagcgcaaacctga

SEQ ID NO: 278092 - DNA, 83 bp, Homo sapiens
agactttcgacaaggaagtgaaacaccaatgcaggtgatggctgtggacacctagtgacttatcaggatagtggcacaatgac

SEQ ID NO: 278093 - DNA, 100 bp, Homo sapiens
tgtagctccacattcctgtgcattgagggatatggtccggcttgctttcacagatgtttcgataaaaaattttgaagagttttttaacctccacagaacc

SEQ ID NO: 278094 - DNA, 107 bp, Homo sapiens
ttcaaagggaaggtcattgtcatcgtggggcatgtggcaaaacacacagctgagatgcaaaatcggatggtgattttactttgtaacctgaaacctgcaaagatgag

SEQ ID NO: 278095 - DNA, 80 bp, Homo sapiens
ctggttgatggtgttaagaaactctcagtttgtgtttctgagaaagggctgacaggacaactggatcagtttcattaaaa

SEQ ID NO: 278096 - DNA, 75 bp, Homo sapiens
tacaacatggaccgggccgcggtccagaccaacatgagagacgattctctcggcaccacgggaaccaccttctct

SEQ ID NO: 278097 - DNA, 83 bp, Homo sapiens
cctggggctggaaattgcgctggaccgtcgccttgctcctcgccgcggcggggactgcagaacgtaggcgttcccggtccaca

SEQ ID NO: 278098 - DNA, 86 bp, Homo sapiens
gtactgctccccaagaagactgagagtcaccacaaggccaagggagcagcatggacctgtcagcaactaaggaacaaaagtaatga

SEQ ID NO: 278099 - DNA, 117 bp, Homo sapiens
aggcgcggcgagggagaagtgattcccgaagaatcaaggctgggccggacccggtggcctggcaacaggaataatccagaatggctactctgatctatgttgataaggaaaatggag

SEQ ID NO: 278100 - DNA, 90 bp, Homo sapiens
ctcgccgccaccgcccaggaccgccggccgggggacgagctcggagcagcagccagagccccccaagatgaacccagtggtggagccact

SEQ ID NO: 278101 - DNA, 82 bp, Homo sapiens
cagcccctgcgtcgccgggaccctcgcgcgcgaccgccgaatcgctcctgcagcagagaagatggctgtgccacccacgtat

SEQ ID NO: 278102 - DNA, 50 bp, Homo sapiens
gtcccagggatattctgtgctgagtgtggtgatggtggtcttcagtgaag

SEQ ID NO: 278103 - DNA, 95 bp, Homo sapiens
agagggacctctatagagatgtgatgctggagaattacgggaatgtgttctcactgggtgccgtgagcgatgtggagatgcaggaacactatgat

SEQ ID NO: 278104 - DNA, 88 bp, Homo sapiens
acaccctcgtcagcggctccctgcccttcgacgggcacaacctcaaggtgactgaatgtctgaccaccgtgaagtcagtcaacaaaac

SEQ ID NO: 278105 - DNA, 90 bp, Homo sapiens
gacaagagtggccctgcaggctgagaaactggaccaccatcctgaatggtttaacgtgtacaacaaggtattatccatgcagcagaagag

SEQ ID NO: 278106 - DNA, 100 bp, Homo sapiens
tgttatctctgtaccgggcgatgctgagagagagcaagcgtttcagcgcctacaattacaggtctctaattaacagaagatggcaaagcccagccacagc

SEQ ID NO: 278107 - DNA, 96 bp, Homo sapiens
gtcttggaagataattactcaaaatatgcagggaagtgatgatgatgtagaagaaacacatccaatggatgggaatgatagtgattatgatcccaa

SEQ ID NO: 278108 - DNA, 124 bp, Homo sapiens
gaggcacttcagtgaaagaattttggctcctaaagattttgcagaacagagatgacatgccagcccagactttcataataactgaagtgaagtgatggactccgatttggagagtagtaagacg

SEQ ID NO: 278109 - DNA, 98 bp, Homo sapiens
tgccagaaaccttatgttgcacttattcatggaattacaatgggtgggggtttcgaaaaaacgatgaaatgaaagctatggatgttttaccaattttg

SEQ ID NO: 278110 - DNA, 83 bp, Homo sapiens
gtagaaactgccaagaaatccaaaaagccgagtagagaagttatcaggacctgaaggagaagaaggagaaggtggaggagaag

SEQ ID NO: 278111 - DNA, 82 bp, Homo sapiens
caaggagctaaagcagcgtgcgttcagccctgggtggccagagcccccttcccaggcagagatttccagtacctgacagtgt

SEQ ID NO: 278112 - DNA, 100 bp, Homo sapiens
caaagaggtgtccacagcttgtgccaccgccgtgctgggcaatcaggagtacaagcgcaagctagccagagtttccctggtgcgcaaagaactcaggtcc

SEQ ID NO: 278113 - DNA, 74 bp, Homo sapiens
aggattgtggctgtcacaggtgccgaggcccagaagctcccattgctatcacatgttttaccagaggcttggac

SEQ ID NO: 278114 - DNA, 80 bp, Homo sapiens
caacattaacgacaggatcaaggaactgggcactctcatccctaagtccagtgacccagatggagtctcgcgctgtcacc

SEQ ID NO: 278115 - DNA, 90 bp, Homo sapiens
ccaaagtttttgaacacaacatgtggaagatgaagtcctcagtacattctgaagaagatgattttgttccagagctacatagaaatgtac

SEQ ID NO: 278116 - DNA, 90 bp, Homo sapiens
aacaaactcatattgatattaattccaaaatcaggtgaccaagaatatggcccaggtgaccaaagccctggacaaggccctgagcaccat

SEQ ID NO: 278117 - DNA, 100 bp, Homo sapiens
aggaagtttgagacgcgggagaatgcaggctgcgtgctggtacgtgcttttcctcctgcagcccaccgtctacttgaaataagcgggttttgaaaacaaa

SEQ ID NO: 278118 - DNA, 100 bp, Homo sapiens
cccgccacatcccaactacacttggcctttcgacgacatcatcgtcttcgcctatgcctgccaggctgctgatcccagcatggtgagtgcctacatgtac

SEQ ID NO: 278119 - DNA, 78 bp, Homo sapiens
taaagtgttttggttttgatatggattatacccttgctgtttgaaattgttcctgaagatgacccccagaatgccatt

SEQ ID NO: 278120 - DNA, 100 bp, Homo sapiens
taacagaactggaccttttcgaggaatgtcgggtcctcacaattcaaaacaattgaagatgacttggtgtccgccctcgtccggtcaggctgtattcctg

SEQ ID NO: 278121 - DNA, 90 bp, Homo sapiens
acacgttgatgttccaaaggatttgaccaaacctgtggaacaaatgtggtatctggggctggcggtctgagaagatggaaactgttagcg

SEQ ID NO: 278122 - DNA, 83 bp, Homo sapiens
gacagagggctctgatctgtgcgacagagtttttagaacttcagccataaaaatgggcagaattttccttgatcatatcggtg

SEQ ID NO: 278123 - DNA, 100 bp, Homo sapiens
ggacctacggcaccagtggcctggacaacagacctctgtttggggagacgtccgccaagacttcatcacctgattcttccaatgagaattccgtagcaac

SEQ ID NO: 278124 - DNA, 75 bp, Homo sapiens
ctccggtgtggtgaagagcgtccaccggcggctccgcaagaagtaccgagaagattctgaagggagtggtaatgg

SEQ ID NO: 278125 - DNA, 83 bp, Homo sapiens
gtggcggcgactggccggcggggctgaccacttaccgcagcatccaagtcggccctgtcaccttcaggccattcagaggagga

SEQ ID NO: 278126 - DNA, 80 bp, Homo sapiens
tggaagatatagataagaatgctgatggtttcattgatctagaagagtatattgccgcctgtcttggttagatggctctg

SEQ ID NO: 278127 - DNA, 76 bp, Homo sapiens
agaagcgctggcagtttcaaactgtgtcaggaagctgtctgggaagccttcaggactttttgggatcgacttcctg

SEQ ID NO: 278128 - DNA, 75 bp, Homo sapiens
cacgctcatgatcgacttcctcacccgcgcctgcgacctcgagacgtctcccacaacctgctccgggcgctggac

SEQ ID NO: 278129 - DNA, 96 bp, Homo sapiens
gactcactgacggagaagcagtggctcaagagtggagactgctgcacggactctggaaccatgaacatatttgatcgaaagatcaactttgatgcg

SEQ ID NO: 278130 - DNA, 75 bp, Homo sapiens
cgcagagggatccaagatcaacgcgagcaagaatcagcaggatgacgggaggatacgaagcgttttcggcttcct

SEQ ID NO: 278131 - DNA, 75 bp, Homo sapiens
ctgggattcgcgctgctgggcacccacggagcctccggggctgacaaagatcattccactcagcctgggacgatg

SEQ ID NO: 278132 - DNA, 83 bp, Homo sapiens
ctgcaggttacaagcagcagatcccaccttcagtcctggctctgacaagccctccagtttgtcactcaagccctatcagaagg

SEQ ID NO: 278133 - DNA, 99 bp, Homo sapiens
ccagctttgacaatacaggaaatgtttgtacagagccagatggactccttcggacaaactacagttctgtgttaacaaatgttggtgctgctctgcatg

SEQ ID NO: 278134 - DNA, 75 bp, Homo sapiens
ggacggtcactcagcctatggagctgaaaatgtgtgtctgacatgcaagctcagtggggcagagacccgtggatt

SEQ ID NO: 278135 - DNA, 83 bp, Homo sapiens
caaggactcgctccggatggccatcatggtgcaggtcgggaaagaggttaaagaagacacgcaagtatgatatcatcaccact

SEQ ID NO: 278136 - DNA, 60 bp, Homo sapiens
ccaaaaccggcagctgttagccgagcaaataatctgcaaaatggcttcaatgctgagtaa

SEQ ID NO: 278137 - DNA, 83 bp, Homo sapiens
gtgcgaggcggcggagagcgaggcctggtgagcaccgccgaggcgcgggccagctcttcgagataacgaaggaggcccaactt

SEQ ID NO: 278138 - DNA, 75 bp, Homo sapiens
aaagattaaaacttgaagcaacccttaatgtgcatgatggttgtggcccagtcatatatgcacagttagaccact

SEQ ID NO: 278139 - DNA, 82 bp, Homo sapiens
atcgagtggaaataccacagccctgaggaggagataaggtgccaacatcgcctctggtgaggaagtcgccatcaagctggag

SEQ ID NO: 278140 - DNA, 90 bp, Homo sapiens
agaagagccatggaaacaggaggaagaattcccaagccaaagctttccaggtggaaccgtcccaaaatgtcccttgctcagaagaaggat

SEQ ID NO: 278141 - DNA, 83 bp, Homo sapiens
cgggacttctaaaaggaactatgtctggaagtgtcccttttgatgagaagaataagcctcattctgattcaacagcagagatc

SEQ ID NO: 278142 - DNA, 100 bp, Homo sapiens
gctaagctcatcattgttactgggtgatttcacctggaacagcatgtcaggccgcagtgtacggctgaggtcagtccccatccagagtctctcagagctg

SEQ ID NO: 278143 - DNA, 82 bp, Homo sapiens
tcacggtggaaaacacagatccagagtgttactggcttacaaattggattgagttctcagagtacattcacgcccaggtggc

SEQ ID NO: 278144 - DNA, 98 bp, Homo sapiens
tgagcagcacgtccaccctcactgtggctgtgaagaaggagaatatgccttctgcatcctgtgatacactactggatgacatcgaagatatcgtgtct

SEQ ID NO: 278145 - DNA, 100 bp, Homo sapiens
aagctcatttctggcacataagagatgcgagccacccctctggctgctcctgcgggttccctgtccaggaagaagcggttggagttggatgacaacttag

SEQ ID NO: 278146 - DNA, 103 bp, Homo sapiens
tcctgctggccctcatgacagtggtcatggccgtgtgctccctgcctctcacgggctctgaagcagaagatctggcctggcatcccgagcccagagagcgagt

SEQ ID NO: 278147 - DNA, 51 bp, Homo sapiens
aggaccgtggccgaccggcagctggtagaaccctggaagaagaggaagagg

SEQ ID NO: 278148 - DNA, 82 bp, Homo sapiens
cagactttcctgcgtggaagcgtttgctgccaccttctgcatcgtagtcaggatggctaaaggtgaccccaagaaaccaaag

SEQ ID NO: 278149 - DNA, 98 bp, Homo sapiens
ccgtgtccgacccctggaagctgatgctgctggacgccactttccggggtgcacagcaagtgtcctatgcaccagctccccaccccatggctcctccc

SEQ ID NO: 278150 - DNA, 99 bp, Homo sapiens
gattcctgcgtattccaagaaccgggcctatgccatcttcttcatagtcttcactgtgatagcctcgccgctcctgctatttgccaaccgccgggacgt

SEQ ID NO: 278151 - DNA, 100 bp, Homo sapiens
gaacacaacaatggtccaagggggtttcccaggaaggatcagaatgttctctctccagtcaactgctggaatctcctcttaaaccaggtgaagcgggaaa

SEQ ID NO: 278152 - DNA, 82 bp, Homo sapiens
ctcgagggaacgtggtcggaggccgattcgacacagacaaggtatcaacttgaactgaaggatgactacatcattagaacta

SEQ ID NO: 278153 - DNA, 116 bp, Homo sapiens
tgcgctgcccccaactgcacgcggaagagcacgcagtccgacttggccttcttcaggttcccgcgggaccctgccagaatcccacgtggcgaagtctcgattttggaattatgcca

SEQ ID NO: 278154 - DNA, 83 bp, Homo sapiens
aacattcccaaaggtaatgcgatggagataaggtgaaatgacaatggatgctctgttggctcgattgaaacttctgaatccag

SEQ ID NO: 278155 - DNA, 88 bp, Homo sapiens
ggagaagggattgcccagtcagcaaaggttcagccctccaaggaattgaatgatctggcacgggaccctccagcacagtgttcagcag

SEQ ID NO: 278156 - DNA, 83 bp, Homo sapiens
gccaatttcatgctccactatagaaacggtgggagcccagagtatatgagatgtcttcagaggctcatctaactctgtcctta

SEQ ID NO: 278157 - DNA, 100 bp, Homo sapiens
tgaactctcagtggtcctacctggggatattatcaaatctactactgttcatggcagaactctaagaaggagctgatgtggaggagcagctgagacagtt

SEQ ID NO: 278158 - DNA, 82 bp, Homo sapiens
ttgagcatcgcatccacggattcctttgcttccgcagcagaggacttctccaggcctcggccgccccagaaggcactcccgg

SEQ ID NO: 278159 - DNA, 100 bp, Homo sapiens
gctatatggcaagcactaaaccactatgcttaccgagatgcggttttcctcgcagaacgcctttatgcagaagtctgaaaggcactttattatgcaggtg

SEQ ID NO: 278160 - DNA, 100 bp, Homo sapiens
ggccgtgctgcttatggcggcgctggagagggggcgctgagctgttgggctttaaggaagcctcctatttcagtttctcaacatgaaagtcatcaagcaa

SEQ ID NO: 278161 - DNA, 100 bp, Homo sapiens
atcctcaatgtcacgctggtgccctacggaaacgcacaggaacattatacatggcagtgattctgtggagagtgcagagaaggagatcggcttgtggttt

SEQ ID NO: 278162 - DNA, 95 bp, Homo sapiens
ctgaggcgggggccgtgccctcggaggcggcgtgggcggcagagagcggggcggcggcagacaccattcgcttttcacccaagatgatttgatgt

SEQ ID NO: 278163 - DNA, 101 bp, Homo sapiens
aaggtgtctactgtttacagtacgatgatgaaaaaattatcagtggcctacgagataattctattaagtgaatatatcttggacctactggaaagtggaag

SEQ ID NO: 278164 - DNA, 100 bp, Homo sapiens
cctggtccccagtgactccaggggaacagccaagaacctacacggaggaggaactgaatgccaagctgacccggcgtgtgcaaaaggcagctcggagaca

SEQ ID NO: 278165 - DNA, 56 bp, Homo sapiens
gctgccgccgccgcagctgccaaaatgaaagaggaggagcgacagaagcaggagga

SEQ ID NO: 278166 - DNA, 83 bp, Homo sapiens
ggaggagatgcttcagagagaggaagccgaaaacaccctgcaatctttcagacagggaccatggctaaacctcctggatcatt

SEQ ID NO: 278167 - DNA, 82 bp, Homo sapiens
cggcctgcagcacccgccaccgtcgccggccgcccgcacgtccgtccgaccatggtgaatccgggcagcagctcgcagccgc

SEQ ID NO: 278168 - DNA, 75 bp, Homo sapiens
gaagccaagttggaccgttctgatgtgactgagagagaaggattattgcatcgagcttttagtgtcttcttattc

SEQ ID NO: 278169 - DNA, 100 bp, Homo sapiens
atcatcaagctgctgctcgtcttctatgtcaagaaggaagctgagaccaagaccaaggacgagatggctgctgctgaagaaaaagtcggtaagaatgaac

SEQ ID NO: 278170 - DNA, 88 bp, Homo sapiens
atttcctgagaatcaagttaaaacctctagacaaagtaaccaaatctccagccagtacaggtttgcagattccgccagcagcacagca

SEQ ID NO: 278171 - DNA, 98 bp, Homo sapiens
atacaaagacagaccatcccagttgaatgctgtcttccaagaacagaagaaaatgatccaggcccaggtctaccccgagccccggagcgagagcgagt

SEQ ID NO: 278172 - DNA, 99 bp, Homo sapiens
tgcgccggcagaggatccagtgttcaccatcctggccccggaaggctcctcctgctggaccctccagccccgggcctcaggagcccgagaaggaggaga

SEQ ID NO: 278173 - DNA, 74 bp, Homo sapiens
gacccccattgctgagccagcggagctgcttggaaaacacagatcctggtgccgaacatgaggacagggcaggc

SEQ ID NO: 278174 - DNA, 75 bp, Homo sapiens
catcctgggagctccattccctaaggcactgtggtgtgcaactgaggaacatggctcaagaaactaatcacagcc

SEQ ID NO: 278175 - DNA, 75 bp, Homo sapiens
ggcccgggggtggtgacagcaggtctgagggtgtactctgtgtgaccgcgcctatccctcggactgtcccgaaca

SEQ ID NO: 278176 - DNA, 76 bp, Homo sapiens
gtccgaagcccgaggcagaggaaccggctcccagtcagtacctccgaaatgcttccagactcggaccctgcaccag

SEQ ID NO: 278177 - DNA, 97 bp, Homo sapiens
gcagctggaggaggctgaggaggagaggacagaggtgcctggggcaacctccaccttgacggttccagtgctgggcctaaaggagataacatttatg

SEQ ID NO: 278178 - DNA, 90 bp, Homo sapiens
ggtgggtactacacaaccgtctccagccttggtctgagtggactgtcctgcaggtaccttgtggtctataatcctttagaacaagaccga

SEQ ID NO: 278179 - DNA, 100 bp, Homo sapiens
tgcttcaggaatcttgcagaagaccgcagtgggataaatctcaaagatctcgtacaagatccttctttgtgactctgacatcattagaagcatgccagaa

SEQ ID NO: 278180 - DNA, 83 bp, Homo sapiens
cgtggccttagctgtgctcgcgctactctctctttctggcctggaggctatccagcgtcatcgacatcctgagggggaaggcc

SEQ ID NO: 278181 - DNA, 75 bp, Homo sapiens
ccaagctggaggtggacgccatcgtcaacgccgcaagagtgagccatggagctacgtgtggggaacaagtaccgc

SEQ ID NO: 278182 - DNA, 75 bp, Homo sapiens
atgtttttattgctctttatcagtctattttgggagaaaaggtaccagatgacggtcgaaccaaacccattccaa

SEQ ID NO: 278183 - DNA, 76 bp, Homo sapiens
agaagcagtgaaggagtgcagaggcatcacctgaaagtgtactaatggtcacttgatgtgcgctggctgttttatc

SEQ ID NO: 278184 - DNA, 100 bp, Homo sapiens
gcagatttgcagaccagacagctgtccagctcccaccccaacgaaggctcatagctgtgtgccaaccacgatgcaaacatggtgaatgtatcgggccaaa

SEQ ID NO: 278185 - DNA, 75 bp, Homo sapiens
cttcaagcagcgccgcaccttcgttggaatcgaagcctcttaaaatggcagatgacttggacttcgagacaggag

SEQ ID NO: 278186 - DNA, 75 bp, Homo sapiens
gcgaatcctaccttccaaacagattttgactaaaggagaagttcaagtatcagataaagacacacacaactggag

SEQ ID NO: 278187 - DNA, 97 bp, Homo sapiens
gcttttttcactgctaggaaaggatccaaacaggcttgcattgatgacaatgttgatatggtgaagtttctggtagaaaatggagcaaatattaatc

SEQ ID NO: 278188 - DNA, 100 bp, Homo sapiens
gccaatcagcatttcacattcctcatggttggttcaaaggttatcaatactctggctgaccatcatcatcgtgggactgactttggtggaagtccttggt

SEQ ID NO: 278189 - DNA, 90 bp, Homo sapiens
tgctcacacttcagaatagagaagggctacttctacaagtccgaacagccagtccagcaaaatgaacagcattgtctaccagaagcagtt

SEQ ID NO: 278190 - DNA, 82 bp, Homo sapiens
ggggagcgcggggcgacgctggctgcagggacccggtgacagcgtgagaggttcgcagagctgaccccgcactacatctacc

SEQ ID NO: 278191 - DNA, 75 bp, Homo sapiens
gggcctctgtaaggcacatggaggtggaacgtgtgatcaccattatgcagaatccacgccagtacaagatcccag

SEQ ID NO: 278192 - DNA, 100 bp, Homo sapiens
acaaggagtggaacgggagctgcagctgcagtggtcacaatgttggctaccagggtatttagcctagttggcaagcgagcaatttccacctctgtgtgtg

SEQ ID NO: 278193 - DNA, 90 bp, Homo sapiens
gatggagtgcctccaaaggttgctgagggaatgggtactgttcaaaaaggaatgccccacaagtgttaccatggcaaaactggaagagtc

SEQ ID NO: 278194 - DNA, 82 bp, Homo sapiens
cgaggtcagcaagaaacgcatcttctccaccatcctgggcaactggttgggatcagtgaatgcttgtgaaaagacctcattt

SEQ ID NO: 278195 - DNA, 82 bp, Homo sapiens
cttcaaccactatctcagtgcaatggtacctggagtagaacagaaaaattattatgtctgtgttcccttgggactcattgga

SEQ ID NO: 278196 - DNA, 100 bp, Homo sapiens
cagctctgtcgctgacgggaggatctgaagccggccgcaggtctcctctgagcctccggcctccataagacccaaaacagatgacacctcttcccagtcc

SEQ ID NO: 278197 - DNA, 75 bp, Homo sapiens
tgcactttacagaggtccaatcacgcggacccacatgttcagctcttgacacaaatccaccttcttgccacctgc

SEQ ID NO: 278198 - DNA, 83 bp, Homo sapiens
cgggagtgtcctggacccagctgagcgggcggtcattcgcatcgcagtgcagagcagagcgggcggaggaccccgggcgcggg

SEQ ID NO: 278199 - DNA, 98 bp, Homo sapiens
tactatccatttcaactacagatactttgaagtagaagaagctgatgttggattggatgctgctggcaagacaaccattctgtataaactgaagttag

SEQ ID NO: 278200 - DNA, 134 bp, Homo sapiens
ctccttcaggataaggacgtaattgccatcaatcaggaccccttgggcaagcaagggtaccagcttagacagcacacaggtgaactccagaaagaagaagctatggccgcagtgattctggagagcatctttct

SEQ ID NO: 278201 - DNA, 96 bp, Homo sapiens
taagtggatcctctggccagctgactgcacttcttttttgagaaaggaaggaatatatcctgactgattgagaagttgccccagtgcaaggcactg

SEQ ID NO: 278202 - DNA, 98 bp, Homo sapiens
aagcggtcaggaaagccccgtggctatgccttcatcgagtacgaacacgagcgagacatgcactgtatcagtgcttcaaatcggcctggatgtttgag

SEQ ID NO: 278203 - DNA, 100 bp, Homo sapiens
gttgaagttcaagagctcagaccctaaagtactttgaactcaagtaaacaaaagggaagattttctcgttgatactggagactgcacaacaatggggcca

SEQ ID NO: 278204 - DNA, 101 bp, Homo sapiens
gcgtgcggagcttgttactggttacttgaaagatcaactgaaatcggcaaacttctgagttcctacttgcaaaagaaaagtgacgtggaggatcactcggt

SEQ ID NO: 278205 - DNA, 97 bp, Homo sapiens
gaagttgctctgtgtgctgagcgttctaaaggaaggcgtccgttggccttcgtacccgtcttgattgaggtgggtcctacgtgtatgaactcagcgc

SEQ ID NO: 278206 - DNA, 50 bp, Homo sapiens
gggagaagcgcatgagccgcagctcaggaggcagttccctccatccccat

SEQ ID NO: 278207 - DNA, 76 bp, Homo sapiens
tgatttactcctagaaggtgttcaaggttcacgcaaagaatctgctccacaagttttgcttccagaagaagagaaa

SEQ ID NO: 278208 - DNA, 100 bp, Homo sapiens
gagccaggaatgcaggatggcggcggtgaagaaggaagggggtgctctgaggtgcaggcctggggtagtctcctgtctggacagagaagagaaaaatgca

SEQ ID NO: 278209 - DNA, 82 bp, Homo sapiens
tcctgcttaagccagcacagaagtgtctggagtggttgattcacagaataaacagccattggactcttcaaacaaaaacgct

SEQ ID NO: 278210 - DNA, 75 bp, Homo sapiens
cagaagccgacaaggcgttcaagcgaaaacatgaccgctgagcccatgagaatacagtcgctttgaatcgaagat

SEQ ID NO: 278211 - DNA, 74 bp, Homo sapiens
cgtgctgcttatggcggcgctggagagggggcgctgagctgttggggtgtttcccattaaacactaccaggaca

SEQ ID NO: 278212 - DNA, 100 bp, Homo sapiens
cccgtctcctgggcctgtcccgcccgcgccctccgccggccctcagggccggtgcataaacttctcccgagttccatctcagtaaaagggaagcaggaag

SEQ ID NO: 278213 - DNA, 90 bp, Homo sapiens
actttactgaagtttatcttattaaatttatgaacttacaaagtgcaaggcctgagtgttccttccagcatgtcggagggggagtcccag

SEQ ID NO: 278214 - DNA, 82 bp, Homo sapiens
tattgtgaggcggttgtagaaggttgaaggggcccggccaggactcggggaagggtggcctgagagcagcgatgacctctgg

SEQ ID NO: 278215 - DNA, 100 bp, Homo sapiens
cagctcagatcgagaaaatgaccgcaatctctgccagcaccttgggaagagaaagaaaatgccgaaggcactcagacagaggctcctgccaagcctgagg

SEQ ID NO: 278216 - DNA, 82 bp, Homo sapiens
cagggtcctgggcagtcgcgccagagctgagcggagggcgcggcgcgagaacgatattagaaatggctactccccagtcaat

SEQ ID NO: 278217 - DNA, 83 bp, Homo sapiens
tgggtgcaagacttccgcctcaaggcttacgccagccccgccaagctcgagtccatcgatgaaagtttcctacactactgagg

SEQ ID NO: 278218 - DNA, 100 bp, Homo sapiens
aagtatgtggcggacgtcctgccggggaagaatcaaagagcagtggatatcccaacttcgtggcgacctatggccgtggctaccccggatttgctccaag

SEQ ID NO: 278219 - DNA, 83 bp, Homo sapiens
gcggggccccggactccgtcggcgcacatccccgtcccagcgcagagctatcagttgagggatttgcagttgataaaatggct

SEQ ID NO: 278220 - DNA, 83 bp, Homo sapiens
gctcatccctgtgcatggtgatcaccatctattatggtcaaaatgcagatcttcgtgaaaacccttaccggcaagaccatcac

SEQ ID NO: 278221 - DNA, 83 bp, Homo sapiens
ctgggacctctgaagtgaacactgcagggccatttggccaagaagcttgagagaagaaaaatttcagaaaaattgtctcaatt

SEQ ID NO: 278222 - DNA, 97 bp, Homo sapiens
gagcagctcacctgagagacggagccccggctcgcccgtgtgcagagcttgcctgggaccagtggcagggaccccggaacctgaaggtgctgacaaa

SEQ ID NO: 278223 - DNA, 74 bp, Homo sapiens
atgttgtccacttctcagccttagttttgcacactagggaccaagaagccctcggggacactgctgagaaaaga

SEQ ID NO: 278224 - DNA, 100 bp, Homo sapiens
ttgccggctcccctctcaggacaacccagatgtgcaacaaagtgcgatgtattctaccttgtaaatactgttatttgtatatactgtaaatgatgacatc

SEQ ID NO: 278225 - DNA, 102 bp, Homo sapiens
aagctcaccatgtctctctcagaacttggtgctgctagaatgcaggaacagcagcagccacctcagcagagaagtgctcctgacatctctttcaccatcgat

SEQ ID NO: 278226 - DNA, 50 bp, Homo sapiens
cttggcaggaatatggaagacagaccattcccggagtaataaatccagtt

SEQ ID NO: 278227 - DNA, 75 bp, Homo sapiens
caagaggaagcccgctgccttgtggaggagttgagaaaaaccaagggatacagttgatatattagttggatggca

SEQ ID NO: 278228 - DNA, 76 bp, Homo sapiens
aaagagtgtctcatcttcttcaagataacttgccaaaatattcttaatgcttttcggactcctgatggcatgcctg

SEQ ID NO: 278229 - DNA, 90 bp, Homo sapiens
ggcgacgctaagttgctgatcgtggcgtgatgtcttggcattgcccattttcaagcaggaagattccagccttccattggatggtgaaac

SEQ ID NO: 278230 - DNA, 75 bp, Homo sapiens
aagggctaggcctgggggaccagaagcaagaggtttgaggagttcctacagcggaagtggtcctctgagaagcgc

SEQ ID NO: 278231 - DNA, 50 bp, Homo sapiens
gttccctacacggtctcctgggtcaagccccaaactggataccacccaca

SEQ ID NO: 278232 - DNA, 82 bp, Homo sapiens
ctagaaaatcatttttgcatgaacaagaagagaatgtggtcaaaatacaggcagggcaagaatcctttcgttccatcacaag

SEQ ID NO: 278233 - DNA, 100 bp, Homo sapiens
ttaacactccagtgggatgaacagacaaaccccacaagcactgcatacgcccccttacccaggaatggaacaacctccacaccatccttactatcagcac

SEQ ID NO: 278234 - DNA, 98 bp, Homo sapiens
agcagctctgctgcggagcgggaggaggaccgaaagagagaaaaggaacagttccgtaagctctttattggtggcttaagctttgaaaccacagaaga

SEQ ID NO: 278235 - DNA, 83 bp, Homo sapiens
gaagttagaaaagccctgtcaaagcaagagatggctagtgcttcatccagccaaagaggtaaccaaggagcagtgaacagcag

SEQ ID NO: 278236 - DNA, 107 bp, Homo sapiens
cagcccacatgcccgctcacctgcgctgtgatgcctgcagagctgtggcttaccaggctattgagggcacctacattgacaagaaatgccccttcactggtaatgtg

SEQ ID NO: 278237 - DNA, 100 bp, Homo sapiens
cagcccaggatcagcctgtgaagatgatgtctttctacctaaagatattgacctagacagtgtggatatggatgagacagagagggaagtggaatatttc

SEQ ID NO: 278238 - DNA, 100 bp, Homo sapiens
gagctgcacgtcttcaccttcggcagccggctgtacgcacacaccatcgcaggtcatcatcagatttgaaatatttaaagtggatacaaaactatttcag

SEQ ID NO: 278239 - DNA, 50 bp, Homo sapiens
agagtacctcaattcctccgtggtacagttaagtgggcagaccaacatcc

SEQ ID NO: 278240 - DNA, 105 bp, Homo sapiens
gcaagcctaactcaagccattggcacacaggaagcagtgtggttcctctccaacatcactgcaggaaatcagcagcaggtacaggcagtaattgatgccaatctt

SEQ ID NO: 278241 - DNA, 51 bp, Homo sapiens
ctttccctctcccaacatggcggcctcagacaccaaggccgcactgttgct

SEQ ID NO: 278242 - DNA, 87 bp, Homo sapiens
tcattatggattatatttttatactgtaaagttccttgctgtggtcctatggcagcgtatacaaagctattcataaagagaccggcc

SEQ ID NO: 278243 - DNA, 100 bp, Homo sapiens
tggacctccaaggaagccacgtgcagacatctacaaccttcgatctcctgacgatgctagttgccgcagaccaatcaaaggggctgcaggccggccatta

SEQ ID NO: 278244 - DNA, 75 bp, Homo sapiens
ggatcctgacggcggccttcccccgggacttggatgttgtgggtgatggtatgcagtgtcctccttcacctttgc

SEQ ID NO: 278245 - DNA, 101 bp, Homo sapiens
atttggagttcttacaacatggcagacattgacaatgaccatgcagcaggtggccaggacagtggctaaagtggagctctcagaccacgtgtgtgatgtgg

SEQ ID NO: 278246 - DNA, 100 bp, Homo sapiens
ctccagatgatcgaggtgcccgtcctctccgacgactcagtgcctatcggcatgctgggaggagactactacaggatcaagcgtgctttccttatcgagg

SEQ ID NO: 278247 - DNA, 50 bp, Homo sapiens
gctgatcccactctgaaggccggggattgacgagatgcctgaggctgccg

SEQ ID NO: 278248 - DNA, 82 bp, Homo sapiens
tcggcccgccgtgctcccaggtgcccccggcctgcgctcccatccacacgctcggttatggaaacaaaggacatgctttaca

SEQ ID NO: 278249 - DNA, 100 bp, Homo sapiens
aaatcctccaggaggagatcaaggagtacaagaaaccaaggtgtatgttggtaacctgggaactggcgctggcaaaggagagttagaaagggctttcagt

SEQ ID NO: 278250 - DNA, 100 bp, Homo sapiens
agaacctattactaaagacttggatttccaactccaggaccctttccttctctacagaaatgccagatgctgctttgaatgctgcatcaagtgtctggga

SEQ ID NO: 278251 - DNA, 83 bp, Homo sapiens
cggattcgtcgctttcacggccatcgagccgaacctctcgcaaggcgtgatggtgggcatgggtcagaaggattcctatgtgg

SEQ ID NO: 278252 - DNA, 98 bp, Homo sapiens
gagatgcagcatcccagtttttggtcttctgtcaaaaacacagggatgaggtttatgaactgacgttacatcatacacagcaccaagaccacaatgtt

SEQ ID NO: 278253 - DNA, 153 bp, Homo sapiens
tccggctgtaaagatggcggcttcctagtgagtcggcggctgatttagaaggaggttcaggctacggtgagccgaagctgctgaggagcttgatatggaaaatgaatttttattaccacctgtttttggcgaagaatatgaggaacagcccag

SEQ ID NO: 278254 - DNA, 75 bp, Homo sapiens
atgggacatttgagtgtggcgcgtgcaggtcatcactccccaaaatggacgttaccaaatagattccgatgttct

SEQ ID NO: 278255 - DNA, 82 bp, Homo sapiens
aggagacggcggccttcgaggaggtcatgaaggacctgagcctgacgcgggccgcgcgggatagtggctacccagagacgct

SEQ ID NO: 278256 - DNA, 98 bp, Homo sapiens
tcgacatgagtgatgtggaggaaaacaacttcgagggcagatgttctaagaacggaagcatctgggctggatggaatttagcatcaagcagagtcccc

SEQ ID NO: 278257 - DNA, 75 bp, Homo sapiens
gattagtggctgctaaacttgaaccgaaaagtgatgatgatgatgattttgatgatgaggaagctgaagaaaaag

SEQ ID NO: 278258 - DNA, 74 bp, Homo sapiens
cttatagaaaatatggatctttacatgttgaatccttgcagcactaaaatttgtgcatcatcgaggagtcggga

SEQ ID NO: 278259 - DNA, 98 bp, Homo sapiens
gaatgcttgaagacagagatttattcgtaatgcgactcaaagctgcacggcagtctgtttatgagacatttgaagacagtgatttgttccatttgatt

SEQ ID NO: 278260 - DNA, 86 bp, Homo sapiens
aagagggatactcccatgctgccaaagatcacagaactgtgtggtgcaaagcgggttggttattttggtccaacacagttttacat

SEQ ID NO: 278261 - DNA, 100 bp, Homo sapiens
tttcatggatgcccctgtttctggtggtgactctgacatcattagaagcatgccagaacagactggtgaaaagtaaaccttttcacctacaaaatttcac

SEQ ID NO: 278262 - DNA, 80 bp, Homo sapiens
gtgccagcacctttcggcttctgagacggcggcagcagcggcattcagccctcatgtagtcaaatattatggcagttatt

SEQ ID NO: 278263 - DNA, 75 bp, Homo sapiens
cgaaggatccccaacggggaggccaacgtgaagaatctgagtcacaacagcatttctcaggaaagtgccctgtac

SEQ ID NO: 278264 - DNA, 100 bp, Homo sapiens
gcgcatggaagtgctcaccgacagtgaaggtaccacaagagccaggccatctatctggagtcaaaggacaaccagaaactgagctgcgtgatcagttctg

SEQ ID NO: 278265 - DNA, 101 bp, Homo sapiens
accgtgatggaaattgtcaagaggtgcaaaaatcttagctctctcaatctctgtctgaactggatcataaatgacaggttacctacctgggcaaagtctcc

SEQ ID NO: 278266 - DNA, 96 bp, Homo sapiens
cctgaaggagtacatgccctttatgaagatattcttgaggttgctgattgttggaggttcttttggtcttcgtgagttttctcaaatccgatatga

SEQ ID NO: 278267 - DNA, 50 bp, Homo sapiens
accagagagacatcctcctcatacagaattgatgaattgcaagtttgtgc

SEQ ID NO: 278268 - DNA, 89 bp, Homo sapiens
cttcagtatctcaggcggcaccctgtccccgaggaggggaccatgacacagtgagaagccctaccactgcaactgggacggctgcggct

SEQ ID NO: 278269 - DNA, 83 bp, Homo sapiens
gaagaaatttggagtgtgcgtgcgcgccgagcgccttttccccacgactctgaaagaggacagcgttcccaatgtcccagttt

SEQ ID NO: 278270 - DNA, 100 bp, Homo sapiens
aatactttgcacaggaagctataagtgaattctgcttggtcagaatcgtgatggcattgtgttcagcactgatgactattttcaccatcaagatgggtac

SEQ ID NO: 278271 - DNA, 100 bp, Homo sapiens
tacctaaaggctgaggttgctgatgaaaagctccatgtcacagtatgagcccagaggacctggtcggcccttgtaccaaagaagaatctcatctagctca

SEQ ID NO: 278272 - DNA, 50 bp, Homo sapiens
cgcctgttctcgggctgtttggcggggtagtggtggtgcacgaagatccg

SEQ ID NO: 278273 - DNA, 75 bp, Homo sapiens
aacttattaataggaataccactattccaaccaagaagagccagttacaggcccaaaaactgcgactggcataca

SEQ ID NO: 278274 - DNA, 96 bp, Homo sapiens
ctctactggccttgcccagcgcctaggcaatttgaatcaacccatagaagtgacagcgctgtattcatttgaaggacagcagcctggggatttgaa

SEQ ID NO: 278275 - DNA, 75 bp, Homo sapiens
agaaggaaatgaacttacaaagacattgattaaggtgttgaaagcagcaggggcctagaagacattaaaccgata

SEQ ID NO: 278276 - DNA, 75 bp, Homo sapiens
gttggaatggacttcggaccctggcctcttgggatgcaaaggccaccaggaacacacctgtagcccagcaaagtt

SEQ ID NO: 278277 - DNA, 75 bp, Homo sapiens
tgtattaaaaagcttccaagccgagatctccagtctatgtgctgaagaagcagcagcccaagagcagacaggtca

SEQ ID NO: 278278 - DNA, 73 bp, Homo sapiens
ggtcagacaaagtgccggataacaagaacacccacacgttgctcctggctgatggagtctcgctctgttgccc

SEQ ID NO: 278279 - DNA, 83 bp, Homo sapiens
tacaagacgaccaccatcctgctggacgggcggcgggtgaagctgcagctctggccaagactaaggggctgcagagcggggtg

SEQ ID NO: 278280 - DNA, 51 bp, Homo sapiens
ccagagccacacacaccatcatggtcctggactggaaggatcaccagcaca

SEQ ID NO: 278281 - DNA, 74 bp, Homo sapiens
gtagaccttccacactgccacctgattaaaggaattgggaagtttggttggcttagtggattatccagatgatg

SEQ ID NO: 278282 - DNA, 74 bp, Homo sapiens
cggccttcatcgacatcagtgaagaagatcaggttgacaatggtctccaggatggtctctaccatgctatctgg

SEQ ID NO: 278283 - DNA, 88 bp, Homo sapiens
ggggaacgcccgctgcctgccagggacgactatgacaagaaggtgaagcaggcggccaaggagaaggtgaggaggcggcacacgcccg

SEQ ID NO: 278284 - DNA, 114 bp, Homo sapiens
atgcggcggcagcaagaagaaatgatgcggcgacagcaggaaggattcaagggaaccttccctgatgcgggtgggttaggagtacagaagatgctgtggactattcagacatca

SEQ ID NO: 278285 - DNA, 83 bp, Homo sapiens
tccgcaaggccggagaaggccgccgggcccgggcatggtggtctggggcaacgcggaaggattttaaacaatttgaacctaat

SEQ ID NO: 278286 - DNA, 97 bp, Homo sapiens
aactcgtacctttattgtgggggcccagctgagcagcgccagttggcactagctgagaagttcaaggagctgaaacgcagcaagaaattggagaact

SEQ ID NO: 278287 - DNA, 73 bp, Homo sapiens
cgattcatcaggcggtcttgtacacccaatgcagagacctggaatcatttttctgataatgaggcagagcggg

SEQ ID NO: 278288 - DNA, 100 bp, Homo sapiens
cactccagcacccactcctcaggaacatttaaccaaggtgttggtgtctgtccagtcccttatattagtagctgagccttattttaatgaaccgggatat

SEQ ID NO: 278289 - DNA, 100 bp, Homo sapiens
tgatgaagggaaggaaatcatgtcaagcgaagccttgaaaaagctgccctgagacggtgtcccgccgaaagcaattctgtggtgttcttggtcacacatt

SEQ ID NO: 278290 - DNA, 75 bp, Homo sapiens
gatcattggagagatctctaaaaaagtggctcagattcagaatgctccatttatcttaaagaaattggacagcat

SEQ ID NO: 278291 - DNA, 83 bp, Homo sapiens
agtggttgccattgtaggacctcaactctctatgtttgccagtggtttattttacaggcgtaacctgatgatggaaggtgcag

SEQ ID NO: 278292 - DNA, 80 bp, Homo sapiens
ccatatagtattttactaggtcatgaagggaagatggctgtggaaggtgttttaaaggactatacaggctccaacccaag

SEQ ID NO: 278293 - DNA, 100 bp, Homo sapiens
ggctcctgcgtcgatctccctgtttgacctcagcgcggatgctccggtctttcagggcctgagcctgatcgccacatcacagaatcgtatctatctcaca

SEQ ID NO: 278294 - DNA, 71 bp, Homo sapiens
aggatccacctggagctgaggaaccggaccccggcagctgttggtgttcgaggaagagacattgttgttct

SEQ ID NO: 278295 - DNA, 95 bp, Homo sapiens
tggacacagcaatatctctgggctttcacagctggatgaactgcagctttgcaagaattgcttttacttgtcaaatgctcgtcctgacaactggt

SEQ ID NO: 278296 - DNA, 125 bp, Homo sapiens
gtccactctgactgcaagcacccctttcttgaaccgaacagagtcaagtggaatcaaaggtcgctacccacaggagaacaagggaacctacatcccagtgcctatagtctcagagttacaaagtg

SEQ ID NO: 278297 - DNA, 85 bp, Homo sapiens
caggacttcgacctggagccgtcccaggactgtgcaggggactctgtcacatactatactggcaattgctggagaagattttgca

SEQ ID NO: 278298 - DNA, 82 bp, Homo sapiens
ctgaaacagaagatgtgcaggagcaaatccatccccacaccctgttcactcctttgctgattggtttcgtaatcgtagctgg

SEQ ID NO: 278299 - DNA, 75 bp, Homo sapiens
cggcccagaagccacagctgctgcggcacatggaacagcatgtctccttcaaggatgggtcatcagttaaggaag

SEQ ID NO: 278300 - DNA, 100 bp, Homo sapiens
cgggcatccaacgcaatgatgaacaacaatgaccttgatatttcacagttcttgccgagtgcttcactttttcactagaagtaaacgactttttacagcc

SEQ ID NO: 278301 - DNA, 100 bp, Homo sapiens
atgtcacttacaacattaatcagatactgcatttaaggattttttatcaagcagaaatgcatcgaacaacgagaatcaagatcactgagctaaatcccca

SEQ ID NO: 278302 - DNA, 90 bp, Homo sapiens
gcggaagtgcagctgcctcagttcttagcgcagaccagaatctgagggagagcagattcggccttgagaacgcctacaacaacttccggc

SEQ ID NO: 278303 - DNA, 100 bp, Homo sapiens
ctcggagaagccgctggcggcagtcacttgtacagcgccggtcaacatcgcggtcatcaagtactaggtggggctggtgtccgagcacttctcgcaggcc

SEQ ID NO: 278304 - DNA, 100 bp, Homo sapiens
cgcgtacatcctaagtctgggcgtcgtgaaagagttcaggaagcacggcatagggggctcccacccctaagagaattgaatatcctctcaaagctcatca

SEQ ID NO: 278305 - DNA, 100 bp, Homo sapiens
agaacatctgggagaatatttaatggaaaatcgcttggttaaaacctgacacttttaacagataagtttataccatggatagcacaaaggagaagtgtga

SEQ ID NO: 278306 - DNA, 75 bp, Homo sapiens
ggaccgagtgctttaggccgcttgaaagaaagttgctccgcaaaagactgttgaagtagagagcattttgcccag

SEQ ID NO: 278307 - DNA, 100 bp, Homo sapiens
cggaaaccggtagcgcttgcagcatgatttattgctaaacatgggtgcatttttggataaacccaaaactgaaaaacataatgctcatggtgctgggaat

SEQ ID NO: 278308 - DNA, 74 bp, Homo sapiens
gtccattcacactggtttggaagttgcaatcaaaatggtggggtggaagacaacccgtgagtattacaccttca

SEQ ID NO: 278309 - DNA, 50 bp, Homo sapiens
ccaagaggcagtctttggatctggaaagggattgtggtccatcaggagtc

SEQ ID NO: 278310 - DNA, 101 bp, Homo sapiens
cacatccttcgaaaagctgccaagttgaaaatggacgagtaatcgcctgctttgattcattgaaaatggactagaggcttttaccagatttcttaaaactg

SEQ ID NO: 278311 - DNA, 90 bp, Homo sapiens
ggaggaggaggaggcttgggcttgcgccgttgaagttggaccctgggcgttttttacacatggggacccaggctcgccaaagcattgctg

SEQ ID NO: 278312 - DNA, 50 bp, Homo sapiens
gtcggacgcgtctccccaagaaaggtccgcgggagagctgtggggcttgg

SEQ ID NO: 278313 - DNA, 50 bp, Homo sapiens
ctattttcacgttttaatgccgagagaatgtatgacaacatgtccacaat

SEQ ID NO: 278314 - DNA, 100 bp, Homo sapiens
agtcagtgttgtgtggaagccagaacatcgttctcaatggcaagggaaaagctttcagcagcaaagggaagccatgaaacaaaccatagaagaagataag

SEQ ID NO: 278315 - DNA, 75 bp, Homo sapiens
tttctcccttgatccgggagtctttccactggggggaaatttgcagtggtgagaaaatgtataaagaaagattct

SEQ ID NO: 278316 - DNA, 100 bp, Homo sapiens
ctatgacttcgaggtggtccgctgcatctgtgaggtccaggaggaaaatgacttcatgattcagttcactgagacttttttgacggagagggacaaacaa

SEQ ID NO: 278317 - DNA, 100 bp, Homo sapiens
gaagtttgtaaaagtctgggctaccggcgcggcgtagtggatgcagcatcctagtggaggacgcccctgtgggaaattcaactactgaggaggttacggc

SEQ ID NO: 278318 - DNA, 88 bp, Homo sapiens
gtcagccccccgcccggccagccgccccgtccgggagatatccgacattcacctgagcaggtttcgagatccaggcagagcggtagac

SEQ ID NO: 278319 - DNA, 88 bp, Homo sapiens
agtaccgagtgccccggggaagccattccccaccccccaggcgcagcccagcctcgaaatgcagaacgacgccggcgagttcgtggac

SEQ ID NO: 278320 - DNA, 100 bp, Homo sapiens
agactcctagaccctcagaagagatagaaaatggcagtagttcttcagatgatcagatgtggccgcccagcagttgtgcacataggaggagaaggggcca

SEQ ID NO: 278321 - DNA, 110 bp, Homo sapiens
gaagttacatctttggcaaagtctctcatcaaatcctggaaaaaattattagctttgtgacaacaaactgtgctctgcagttttcatcccgtggaatccgacccggcctg

SEQ ID NO: 278322 - DNA, 96 bp, Homo sapiens
ctcacttcgtggtggtccactgcacaggctacatcaaggcctggcccccagcagctgtcggaaaaggtaacagaagatggaactcgaaatcccaat

SEQ ID NO: 278323 - DNA, 50 bp, Homo sapiens
gttggctatagcaaatgccccagagtatcgagatcgttatgattcagacc

SEQ ID NO: 278324 - DNA, 80 bp, Homo sapiens
tcgttgtgccagcgactaaaaagagcactgccagtgaaagatgtagaagataaacctgaacaacaaaccagaacaagaga

SEQ ID NO: 278325 - DNA, 100 bp, Homo sapiens
ccttctgaaaaggcgatcttcctgtttgtggataagacagtcccacagtccagatgaccgcacctcgagcaggagtggggatgccacgtctgcccccagc

SEQ ID NO: 278326 - DNA, 87 bp, Homo sapiens
aacagcaacacagttacatagtaaaaggaggcctaagctgtgggtgagcgtggaggatgctcagatgcacaccgtcaccatctggct

SEQ ID NO: 278327 - DNA, 75 bp, Homo sapiens
cccataatgatgctgcctcaaaactcgtggcatattgggcaggctgcagtggaccatatcaatgctgtcattccg

SEQ ID NO: 278328 - DNA, 101 bp, Homo sapiens
acagaactatgcgaaacaattgaggaatgaatctgaagtctgctgcagtaaaacacagaaggctttaaaatgttttcttgcataaaattcaaaacttttaa

SEQ ID NO: 278329 - DNA, 82 bp, Homo sapiens
ggattcaaatgctagcagacacggtggctactctgcctcggggacgaaagcagccacccggcccaagttgaagaagatgaag

SEQ ID NO: 278330 - DNA, 75 bp, Homo sapiens
cagccaaaggggactatcctctggaggctgtgcgcatgcagcacctggcacgtgtggttctcaaatataggcatt

SEQ ID NO: 278331 - DNA, 51 bp, Homo sapiens
ttccagccagatggtagaagcgatggtgccgtgagcgatgtggagatgcag

SEQ ID NO: 278332 - DNA, 75 bp, Homo sapiens
gcccagggccacctaaggagcggaccccgcatcttcgccgtctggaaagtgtggatgatttggctctgagcatat

SEQ ID NO: 278333 - DNA, 54 bp, Homo sapiens
acacagaaagcaacgtgtatgaaaatggttctatattggctgtgatctttgtac

SEQ ID NO: 278334 - DNA, 82 bp, Homo sapiens
cgatcccggggctcaagtggcttaacaagctgatgactatcagccagttcgtctgctcagtaaacctggggaactgagaaga

SEQ ID NO: 278335 - DNA, 101 bp, Homo sapiens
gcaagggaaggaagtatattgggaggtacagaaaattcacgaattgtgagagtaagagttatagccggaataggccttgccaagaaggatatattgggagc

SEQ ID NO: 278336 - DNA, 100 bp, Homo sapiens
ggagaaggctctgaaagaatacatcaagattctgaatctggtgatgaacttagcagcagctccactgaacagataagggactgggcacttggagtcctgc

SEQ ID NO: 278337 - DNA, 101 bp, Homo sapiens
agcagtaccaccctgttgtacatccactggacctaaaatatgaccctgatccagttctgtcaggccaagcagaaggcagccttgctggagctgctgcatga

SEQ ID NO: 278338 - DNA, 75 bp, Homo sapiens
acatttccagcaggctgcagatacgagtggacaagcaggtaacttgcagactcacttacgacggcattctggtga

SEQ ID NO: 278339 - DNA, 75 bp, Homo sapiens
ttacaggaagagtcagacctcgaattagcaaaggaaacttttggaagagagagaaaatccttcaaaacggagtag

SEQ ID NO: 278340 - DNA, 74 bp, Homo sapiens
cagaacggaatccagaaccccatctcgctggaggaggagctgcagcatcgacaggtctccgggcgctggctcac

SEQ ID NO: 278341 - DNA, 82 bp, Homo sapiens
aagcagcagctgccggagcccgagtggatcggggacggagagaacacgagcccatcaggaaatggtgtttgcaagtgtcgtg

SEQ ID NO: 278342 - DNA, 100 bp, Homo sapiens
ctgggggaccgcttgcagcggggacgcgaggacccgggctgggctttcctcacccgggaggggatgctacagcactgggaactgggccaggccctgcggc

SEQ ID NO: 278343 - DNA, 82 bp, Homo sapiens
ccatgacaggaggccgagcgcagagcattggcaggaggggcaaggtggaacagcattttgaaagcgaagcagaagccgtaga

SEQ ID NO: 278344 - DNA, 90 bp, Homo sapiens
cacccttctactttctgtctctaggaatttcactactctaggctctgtgtgctccgggatggagcaggtgtgcagagggtgagaacccag

SEQ ID NO: 278345 - DNA, 100 bp, Homo sapiens
gaacagagaactaccgaggcgaagcctgaactctttgcttccggaatccgggattgttgctgacatagaattagaaaacgtccttgatcctgacagcttc

SEQ ID NO: 278346 - DNA, 76 bp, Homo sapiens
tcttcccctggatgggaaaacatctcaagagccctcatcctgcaagtctctcggaaacacctccctgagtggcccc

SEQ ID NO: 278347 - DNA, 96 bp, Homo sapiens
gtggtgctctatgaccccctgtgggcctttggagtgacgctgtgggaactcatgactctgggccagactccctacgtggacattgaccccttcgag

SEQ ID NO: 278348 - DNA, 82 bp, Homo sapiens
cagagtcatggcggcagcagccgctctgagggcgcctgctcagataattcctgtggacaaattagtaaaaggaaagtttcag

SEQ ID NO: 278349 - DNA, 75 bp, Homo sapiens
cgtggagatcgtcccgcgcctgccggctcttgtcaggatggtgaagctgttcatcggaaacctgccccgggaggc

SEQ ID NO: 278350 - DNA, 90 bp, Homo sapiens
gcttcaggaggcccaagacaccacagaagccctccgagcccaggccaggtcagagcagcccaccatgggatggggagggggtggaggctg

SEQ ID NO: 278351 - DNA, 75 bp, Homo sapiens
gcgacggcagcccgagggcggcgcaaggcctgaggcccagcacagggatttccacaagatcaaattcgattgtgg

SEQ ID NO: 278352 - DNA, 75 bp, Homo sapiens
cagctgtgggagccccgagaacgcctccagcggggatgacacagaagggaaagcaggcaggatgggagagtcgcc

SEQ ID NO: 278353 - DNA, 75 bp, Homo sapiens
ggcgcagcccacgctcatgatcgacttcctcacccgcgcctgcgacctcgccctgggcgctgcctatggcacagc

SEQ ID NO: 278354 - DNA, 88 bp, Homo sapiens
tccccggcccacagtgggggtgtgcaaacccgagagaactggagaaagcttcttgctatctacctccaccatgatgaaagtgtgttaa

SEQ ID NO: 278355 - DNA, 74 bp, Homo sapiens
atgaacccagaggtcgtggaggtggccgtggaggcagaggtggcatggggctaaagaattacctccaaagccat

SEQ ID NO: 278356 - DNA, 76 bp, Homo sapiens
gcctcaagcacagaggctccagtctgcatcctttcaggagcctcagggaacccagccagcacagcagcagcagcct

SEQ ID NO: 278357 - DNA, 51 bp, Homo sapiens
gacgaattggagaagaaggatggaggagtggtaaaatttcagccttccctt

SEQ ID NO: 278358 - DNA, 83 bp, Homo sapiens
ctgagggccttcgagagctaccgcgccagacagaataccctctaccatctgctttggtcagggtgccgctcgaggatttaaaa

SEQ ID NO: 278359 - DNA, 82 bp, Homo sapiens
agaaagacccggtgccttacatctgtgccgagcccctcccttcgaatattctcgagtggactcaaatccaaaagcatgaagc

SEQ ID NO: 278360 - DNA, 74 bp, Homo sapiens
tggggctgctgtttctcttcgccgacgctgcaagctttcttcctggtggcagatgacatcatggattcatccct

SEQ ID NO: 278361 - DNA, 88 bp, Homo sapiens
aagctcctgtggcagctctccatcttgtcgttttgcttctccaccagtggaagatgcaatgctgatgtttgataaaactaccaacagg

SEQ ID NO: 278362 - DNA, 98 bp, Homo sapiens
tgcaacatgggattttcaggaaatggtgtcacaatttgtgaaggccaaagaactgccaactctgaaagataatgatttcattaatgagggccaaaaga

SEQ ID NO: 278363 - DNA, 100 bp, Homo sapiens
gtgtgcacggccgctgcgtttccccggacacctgccactgcgagcctggctggggagggcccgactgctccagcgtttaacggatgaagagtcccggaaa

SEQ ID NO: 278364 - DNA, 90 bp, Homo sapiens
gggcgctgagagcagcaaggccaggaagttattccaacttttgacatggctgtcaatgaaatcttctttgaccgttaccctgactcaatc

SEQ ID NO: 278365 - DNA, 100 bp, Homo sapiens
ggttcatcattagcatcacaagtccatgctgctgccgttaatggagataagggtgctctacagaggctcatcgtaggagcccaggatgtgcgagttcaag

SEQ ID NO: 278366 - DNA, 82 bp, Homo sapiens
cgcaggagagcgcagtcacgcctgggacccccgaccccacttgtgctggaagcaaaatgatgcttcaacacccaggccaggt

SEQ ID NO: 278367 - DNA, 100 bp, Homo sapiens
ctacatcagatccagggtcactcagctcctcgacatttccacacccagacccaaagtttgcaacaatcagtcagacctgcttttttaaaggctgcagaaa

SEQ ID NO: 278368 - DNA, 75 bp, Homo sapiens
tgtgttcagggtgctgatcccacggatagcaagagtgtgcaagcaatcaaggagaccgcgaaggcgtacattccc

SEQ ID NO: 278369 - DNA, 75 bp, Homo sapiens
ttttccctctaccttaaggatgtgcaggatcttgatggtggcaaggagagtataacatgtatggctggtgggtgg

SEQ ID NO: 278370 - DNA, 102 bp, Homo sapiens
gaccgaagatgagcttcctcttgctccactttgaggctctgatgaacattccagtgctggtgttggatgtcaatgatgatttttctgaggaagtaaccaaac

SEQ ID NO: 278371 - DNA, 73 bp, Homo sapiens
tctattcttgggtagccaggatttgaaggagatactctgacctgtgccagtgaatggtgtgctcttgcttgca

SEQ ID NO: 278372 - DNA, 90 bp, Homo sapiens
tgtgatgttggagaactacagaaacctggtctccctaggctcaccagctggattccctcctgggggcttcattcccaaaacggccaccac

SEQ ID NO: 278373 - DNA, 82 bp, Homo sapiens
atggcgtcatctgccttgagaaaatctccaatgagtgattatagagcagtttgttgaatctcatcccaatggccttcaggtc

SEQ ID NO: 278374 - DNA, 120 bp, Homo sapiens
ggcctggcgtgcactccgcacctcggggacattattgcgcgtggaacggctgcttttggaagcataagcagtactataatggatgtagacagcacaatttccagtgggcgttcaactcca

SEQ ID NO: 278375 - DNA, 100 bp, Homo sapiens
gagtcatcatgagcgatgttaccattgtgaaagaaggttgggttcagaagagggtggctacagcaaaccaaacagcccagcagcccagcagcccagccat

SEQ ID NO: 278376 - DNA, 100 bp, Homo sapiens
tgagtcagctacgggcaagcgggcagctgaagatgatgaggatgacgtggaacgctgcaagcagaaggacctactggagcagatgatggccgagatgatt

SEQ ID NO: 278377 - DNA, 74 bp, Homo sapiens
ccggagtccggatccgatcccgctctgcacattccaaaggcttgggcactgtttaaaggaaagttccgagaagg

SEQ ID NO: 278378 - DNA, 75 bp, Homo sapiens
gacggcctagaagccatcatcttcacggcccagggagacatgaggcagattgtccccttggggcggaaagaagcc

SEQ ID NO: 278379 - DNA, 101 bp, Homo sapiens
ctcagaagcatgtgtcttccccagctctgcagccacatactatccgtttgttcaggaaccaccagtgacagaagctccaaacgagaatggaagccgctgga

SEQ ID NO: 278380 - DNA, 83 bp, Homo sapiens
cttgctggtgcatgcgtcgtcggcctctgggcagcagataccccatgtttccccatcactcgaggagtctgggcagagactgg

SEQ ID NO: 278381 - DNA, 75 bp, Homo sapiens
ctgtccccgaggaggggaccatgacacagtctcaccaacggctttgggggtgcgaggagcgagcaggagccgggc

SEQ ID NO: 278382 - DNA, 83 bp, Homo sapiens
aggtgctcaaaacgcccgtgcggaccacggcctgtcagcacgtgtatctcttcaactgtggagaaggcgttcagagactcatg

SEQ ID NO: 278383 - DNA, 90 bp, Homo sapiens
caaccagagattcatctttcatgcagtgacatgttgataaaaaatgatgggtacagctctgccggggggggaaaaagtggtaccattttg

SEQ ID NO: 278384 - DNA, 75 bp, Homo sapiens
gagctcagagcgttgcttcggtttccctccagacagcatttagcagaagagaaacctgatggccttatcaatgaa

SEQ ID NO: 278385 - DNA, 90 bp, Homo sapiens
cgccggttgccaggccaaggagtggactagggtcgccggggaagcggatggagtcgggtggtacagttttgagtaccaactggtctgatg

SEQ ID NO: 278386 - DNA, 100 bp, Homo sapiens
agaagataatgaagaggaagttgtatattccaataaacagtcactactaggaaaactcaaatctttggcaaccaaggccttctctgactaccagatccag

SEQ ID NO: 278387 - DNA, 100 bp, Homo sapiens
gtggagcagtgctacacgcactacgtaaaactacctaccattggcaagaactgaggatggtgaagaagacgaagtaagtgctggagaaaaggagcaagat

SEQ ID NO: 278388 - DNA, 155 bp, Homo sapiens
cgaggtgcggcctccgcacaggcggggggcgtaggcgcgcggggcccgccatggctgcgtcggagctctacacaaagatttttacatgagttagcccagattcctaattttgctgaacgtgcccagtgcataatcttcagatctgtcttttctga

SEQ ID NO: 278389 - DNA, 82 bp, Homo sapiens
cagtccacccaccgccgccgcctcccagacatggaagagaaggtgagaagttgtgaaacgctgaggctccagccctaagcca

SEQ ID NO: 278390 - DNA, 83 bp, Homo sapiens
gtcttccccggccggtccctcgcctcccggccgagctgacgaaaaagcttgtggtgaaggggggcaaaaaaaagaagcaagtt

SEQ ID NO: 278391 - DNA, 50 bp, Homo sapiens
ggatctgattatcagtacgtaggcaaggatcccactgcgttccctgtgcc

SEQ ID NO: 278392 - DNA, 49 bp, Homo sapiens
cgaatagatgggcaggacatttcacagtcgttccccatcaggaagtcct

SEQ ID NO: 278393 - DNA, 80 bp, Homo sapiens
tgctcgaaactttagtcggcctgatggcttagaggactctgaggatagcaaatcatcaagagttcatataactagagctg

SEQ ID NO: 278394 - DNA, 74 bp, Homo sapiens
cggatcagtacaactcccggtggctgaacggatgaccggaaagaagggatgaccgcgtttgtggaaaagagaaa

SEQ ID NO: 278395 - DNA, 100 bp, Homo sapiens
ttaacacttctacaactggcatttacatcagtcactctaaatggacaccacatgaacctctgtttagaatacctacgtgctggagaatctggtaaaagca

SEQ ID NO: 278396 - DNA, 90 bp, Homo sapiens
ctgaaccccaaagggaggatctggaccatggtggccgggggtggcgcctctgtcgtgtacagggttgacatgatgaacaatcggtttcgg

SEQ ID NO: 278397 - DNA, 101 bp, Homo sapiens
ctgcacatccccaggctcctggagccagaagatgctgagctttttataccaccaaagatcaacagaagaacccagtggaagctgagcctgctagactgagt

SEQ ID NO: 278398 - DNA, 114 bp, Homo sapiens
cggggaggaggagcgggcgagaagctgccgccgaacgacaggacgttggggcggcctggctccctcagaatacctcctctgaaaaatggcagaagcagttttccatgccccaaa

SEQ ID NO: 278399 - DNA, 76 bp, Homo sapiens
ctggattccatgaacagcaagggctgcaaggcagagaaaatcctgaaggagcaagagcggctggcctacataaacc

SEQ ID NO: 278400 - DNA, 100 bp, Homo sapiens
gacaagacccatctttatgcaaagccagcgttacagtaatgttccagaaagggctattgcaagacacgaagtccgagaaattgagcagcgacatacaatg

SEQ ID NO: 278401 - DNA, 76 bp, Homo sapiens
gccagctgactgcacttcttttttgagaaaggaaggaatatatcctgactgattcctcctccagagttgtgacctg

SEQ ID NO: 278402 - DNA, 75 bp, Homo sapiens
gatcctggcaagatttttaaagaaatgtttggagaccagaatgatgatactctgagaggtgagagacttcagagg

SEQ ID NO: 278403 - DNA, 74 bp, Homo sapiens
tcaagcagtcctaccatgtcagccttcccagtagctgggaccacagctggtcagtgagaaggtcggaggggccg

SEQ ID NO: 278404 - DNA, 95 bp, Homo sapiens
catatgaagactttattgtgaaacctcccgtgagaaaggagttgaggagccagaaacagaagatggtctcagaaagggagcggctccaggcagaa

SEQ ID NO: 278405 - DNA, 88 bp, Homo sapiens
tggatgaaatacatcgtgagaagagaggtattctttaggtgatgctagaaggcctcttcatgaaacagcagttttggtagaagatgtg

SEQ ID NO: 278406 - DNA, 90 bp, Homo sapiens
gctcaaatgtggactgaccaaaaagcagctggacagcacaattggaatccaccctgtctgtgcagagatcatgtttcactccttcggcaa

SEQ ID NO: 278407 - DNA, 98 bp, Homo sapiens
tttgttccaggaatcacaaatgatatggatgatggcttggaaaaaagtccaatgaaaaaaaaacagaagaagaaagagaacaaggagaacaaggagaa

SEQ ID NO: 278408 - DNA, 97 bp, Homo sapiens
agagacctaaacatcgttgtccacgtccagcattatgagaacatggacacgagaacccccataaataatcttcgatctggggactttgatgatttta

SEQ ID NO: 278409 - DNA, 87 bp, Homo sapiens
cacaaattgcctccttatgtctccaacatggaccgcctgggggactcggaactatataatgaagatctggaacttgaagatgccatt

SEQ ID NO: 278410 - DNA, 92 bp, Homo sapiens
tgagccagagctccagcagccttgttagggcgtggcctgaggcttggataagtgggacctgcctagagctggaacgttacctccagagcgag

SEQ ID NO: 278411 - DNA, 50 bp, Homo sapiens
ccgaagtctggacatcaatgcctttaggaagcgtaaaagatgtgttgttt

SEQ ID NO: 278412 - DNA, 75 bp, Homo sapiens
gacctgctcttcatctccctgctctggatcatcgaactgaatgaggccaacggtcctgctgatggctacgcagcc

SEQ ID NO: 278413 - DNA, 75 bp, Homo sapiens
tatgtattccagaaacacaaatgaaaatcctcaggaggaacgggattttccaacagaaaccattaaatttggtcc

SEQ ID NO: 278414 - DNA, 75 bp, Homo sapiens
cacaaatgctccttctcctggagacgcaactcaagtgccggatggagtgctgtgatgtgccagccgagacactct

SEQ ID NO: 278415 - DNA, 90 bp, Homo sapiens
cgggaaatgcatgtgcaaggcaggatatgaagagaaaaatggcacctgtcaaggcaccagattctccagccccaggctgtcagccaggcc

SEQ ID NO: 278416 - DNA, 82 bp, Homo sapiens
cttccgacgtgggcggtgggccccagccccacagaccagcccagcattcaggagcatcagatccatgctgctgctgactcgg

SEQ ID NO: 278417 - DNA, 75 bp, Homo sapiens
tgcctgctcccggagggagacgcgctgccgaggagaacccagcgggagcgtgaggatcatccccggagaggacgg

SEQ ID NO: 278418 - DNA, 75 bp, Homo sapiens
tcactccagcatgatcgcagatgcggtgaagaaggtgatcaaagttggcaagaaataacatctgctttgctgccg

SEQ ID NO: 278419 - DNA, 72 bp, Homo sapiens
tatttggtgatccaaattctcatatggacaatctctatgggaagcagaaggcaaggaccccggtcattttag

SEQ ID NO: 278420 - DNA, 90 bp, Homo sapiens
cagagcaagagctggatctcgtctttctgtagttttgctgtcagccacaatgccttctgatgtgcttgaggtgaccaagaagttcatgag

SEQ ID NO: 278421 - DNA, 100 bp, Homo sapiens
tcagcctgggtttagtagattatatcttcgtagccatgttactttacatccgagatgcttctgcttttctaacccaaactgtatgtcttgatgacactac

SEQ ID NO: 278422 - DNA, 90 bp, Homo sapiens
ggcggacggcccggatgagtacgataccgaagcgggctgtgtgccccttctccacccagaggtcctggatgcctcatcccttagtttcaa

SEQ ID NO: 278423 - DNA, 74 bp, Homo sapiens
aaggataagcctcgacttagaagctaccgagttaccctaagaaagttttccaagagataacttcaccaagatgt

SEQ ID NO: 278424 - DNA, 80 bp, Homo sapiens
gcagtatcatgctggccaagaagatcatcattaaggacggaggcacgcgtccgtctccaagagagtatgaagagagtgcg

SEQ ID NO: 278425 - DNA, 100 bp, Homo sapiens
gtggccccagctcttctgtgtttggaagcctccctccagctggtcaagcctcgttccaggcccagccaactcctgcagatcgagaacggctactttgtac

SEQ ID NO: 278426 - DNA, 83 bp, Homo sapiens
caaaaagatgctgtaaatgatgatgattttgagccatacttaagtagccagacaaatcagaactaaagatgactcagagccat

SEQ ID NO: 278427 - DNA, 80 bp, Homo sapiens
aacagtccagagactcatccccgccctgtgggagaagcacagtccacaggtcccaggagttgcagaaacgccaccaggac

SEQ ID NO: 278428 - DNA, 83 bp, Homo sapiens
cagacagagccctgcaaaaatactggattttttatcaagcagaaatgcatcgaacaacgagaatcaagatcactgagctaaat

SEQ ID NO: 278429 - DNA, 100 bp, Homo sapiens
cgtctgtattcccacttccttccagtaccttctccaggcaaattccgttcccctgcagcaccatctcctttggctcttcggcaaccagtgaaagcattta

SEQ ID NO: 278430 - DNA, 75 bp, Homo sapiens
actggctctgctgaccttgtgccttgtgatgatgacagcctcttcatctatgactgcagtgctgcagaaaagaag

SEQ ID NO: 278431 - DNA, 144 bp, Homo sapiens
tttttttttgcggaacctgaaaaattcaagaagttgaaaaacgcttttcacgtcacctggagagatgcacagatgatcatagcagggttaagctagcacagcttgctgaaaaggatggcaaactgactgattatatcaatgcca

SEQ ID NO: 278432 - DNA, 80 bp, Homo sapiens
gacttaagttgaacggcagatatatttcactgatcctcgcggtgcaaataggtactccaaagattcaggtttactcacgt

SEQ ID NO: 278433 - DNA, 82 bp, Homo sapiens
tggatttccaaggaagaatttcctctgaagcaccggaagacacagctgcccagagcagcccaggccgtggtgaggaggcgga

SEQ ID NO: 278434 - DNA, 75 bp, Homo sapiens
ctcaactccaaccacgacggggccgacgagacctcagccactgaggcggctcccagctgcgttggcgacatggcc

SEQ ID NO: 278435 - DNA, 101 bp, Homo sapiens
gcaaggatgctgttggcctgggtacaagcattcctcgtcagcaacatgctcctagcagaagcctatggatctggaggtccgagtggacagatgaattaaac

SEQ ID NO: 278436 - DNA, 100 bp, Homo sapiens
gtcctatgactcagacctgggcacagcaaatgctgaggactcagaccagtctctgcaagagcatggcgatttgttgttcctgtttccctcgagccttgct

SEQ ID NO: 278437 - DNA, 74 bp, Homo sapiens
tcagccatgtgagcactgggggtggtgccagtttggagctcctggaagttaaaagatgttgatactcggaaaat

SEQ ID NO: 278438 - DNA, 90 bp, Homo sapiens
cacgtgatgtgtctacttatcaggtaatctatgccagcaattatgacaatgttagcagaccatgcagctcgtcagctgcttgatttcagc

SEQ ID NO: 278439 - DNA, 100 bp, Homo sapiens
ccaatgggttcacctgggagcagattaacacatgggagaaaccaatgctggaccaggcagtgcccacagcaaggagcaaggaccaaccccagtggagaaa

SEQ ID NO: 278440 - DNA, 50 bp, Homo sapiens
ggactcttcgtcaaccgctttggcagtgaacagcagagaatttcaaagga

SEQ ID NO: 278441 - DNA, 90 bp, Homo sapiens
cggagccggccgtacgcggtgctgcgagggcagaacctggcaaagcgtagaaggttttcctccaaaccagttgtactcacagaagcccag

SEQ ID NO: 278442 - DNA, 76 bp, Homo sapiens
agaactgggttctggactttgggcgtcccattgccatgtatccatttgaggccctcttccgcagccagcactacgc

SEQ ID NO: 278443 - DNA, 75 bp, Homo sapiens
cagccaatgaagatgaagacataggagatttcaagttattcaggaccttgttgtatcagtgttgacctatcctct

SEQ ID NO: 278444 - DNA, 75 bp, Homo sapiens
cagtgaatgtggaaaggagattgacagtcacaattttgtaataagcctatttgatggctttgcagatggactagg

SEQ ID NO: 278445 - DNA, 73 bp, Homo sapiens
tctcattcctggactttcctgcagtgtgaagcctcagtttaggtcatctggtggttcagaacactcaacagag

SEQ ID NO: 278446 - DNA, 82 bp, Homo sapiens
aataaaagagcagtagatttccagatgaagctactgaatctttacatcaaacgtgcacaaacaggttctggaggagctgatc

SEQ ID NO: 278447 - DNA, 74 bp, Homo sapiens
agaaaattggaaaagttgttcatcaaccaggttcgagaacttgtcttggacaattgcaaatcaaatgatggaaa

SEQ ID NO: 278448 - DNA, 90 bp, Homo sapiens
gccacacagtgtccagatacgaggaaacttctcctttcagaagaacaaagagtagactatgtccaagtggatgagcagaagacacaggct

SEQ ID NO: 278449 - DNA, 82 bp, Homo sapiens
cggcgaatcacttataaatggcgccgaagcaggacccgaagcctaaattccaggaggccttagccccgtgggccccacggag

SEQ ID NO: 278450 - DNA, 82 bp, Homo sapiens
agcaggcgaacccgcggcgcaataacgggcgtctctggccgagcctctttttgtggaaaacgacagcagcagcagtggcctg

SEQ ID NO: 278451 - DNA, 51 bp, Homo sapiens
attgcctcatttttgcaactggcttcctggagattcacgaacaagaatagg

SEQ ID NO: 278452 - DNA, 82 bp, Homo sapiens
ttcaagaataaaatcacagttgtttctgagaaacagttctctaaaaggttactcactataaacaatatccacccaacacaag

SEQ ID NO: 278453 - DNA, 89 bp, Homo sapiens
tttgggaaagacgaagacactcctcatgcaaaaatcgcatctgatatcatgagttgcattttacagcagacggttgatgatgaagcgcc

SEQ ID NO: 278454 - DNA, 82 bp, Homo sapiens
tgcggtgtctgctgctattctccgagcttcgcaatgaatgagtccctggaacgccagatgcgtgaaatggaagagaactttg

SEQ ID NO: 278455 - DNA, 101 bp, Homo sapiens
tcaagatggcgtgcttgttggagaccccaatccgcatgagcgtcctttcgggggaaatttgcagtggtgagaaaatgtataaagaaagattctgggaaaga

SEQ ID NO: 278456 - DNA, 76 bp, Homo sapiens
gagcacattgagcagcagatccagacctaccagcgcaggaatcagtaacatgatagccaagcttgccaaaacctgc

SEQ ID NO: 278457 - DNA, 100 bp, Homo sapiens
gtttcactgtgaggcacacagaattctctacatttgtgaaagtcagtttctgaggaatttcatcaggtggatgaaaatactaggaaaagtttatttaagt

SEQ ID NO: 278458 - DNA, 75 bp, Homo sapiens
tcgtggtcaccttcgacccccgctcgggtagcagaaggtcaagaaatttgtgtgattgaagccatgaaaatgcag

SEQ ID NO: 278459 - DNA, 100 bp, Homo sapiens
actgccggattccctggatcccctggtgctaagggtgaagctggtccccaagggccccgaggctctgaaggtccccagggtgtgcgtggtgagcctggcc

SEQ ID NO: 278460 - DNA, 100 bp, Homo sapiens
ccggcccctcccctcgcctcctctcctaggtgccggccgggagggcggccgcagcagatctgtcttctaaggcagcaggtacaccaaagaagaaagctgt

SEQ ID NO: 278461 - DNA, 100 bp, Homo sapiens
tttagagctgcggaacaggacgccctctgatatgcagcagcttttttatgagaattacgagcagaacaaaaaggggtacattagagatctccataacagt

SEQ ID NO: 278462 - DNA, 75 bp, Homo sapiens
tctggcggtattgactcttcagattcagagtttcgccgtgaggaagatgcggaaaaggctgtgattgacttgaat

SEQ ID NO: 278463 - DNA, 76 bp, Homo sapiens
cagggacatttctgaagcgagcgtcttcgatgcagccaacagggaagagtgtcgcacccaggagaaagttaatgca

SEQ ID NO: 278464 - DNA, 100 bp, Homo sapiens
gtttccaagtcaggatatgtgcctttcagctttaaagagaattgaagggatttttgcacgagaacatggatcaaataagaaattggcagcacagtcctgt

SEQ ID NO: 278465 - DNA, 75 bp, Homo sapiens
tgtcgagcctgcgagagcagaaggatggcccactgcgtgaccttggttcagctgtccatttcctgtgaccatctc

SEQ ID NO: 278466 - DNA, 100 bp, Homo sapiens
ctgctgggcttcgtccagatcgggaagggcaccatgactcctgtgaggatgcagcactccctggcaggtcagacctatgccgtgcccctcatccagccag

SEQ ID NO: 278467 - DNA, 88 bp, Homo sapiens
ggcccgggacccagcgtgtgtggcaaggggctctacggatcctacagctcccaggagcccctcgaatgaagaaggtcccaaagtgtgc

SEQ ID NO: 278468 - DNA, 74 bp, Homo sapiens
tgactacctgctgtacaccctcaacaaacaccagcgctttgggtatatctatgttgctgacatattggctcatg

SEQ ID NO: 278469 - DNA, 83 bp, Homo sapiens
gagaaggtatttctgcttggagaagaagttgcccagtatgatggggcatacaagatccgagctggatccagagttgcatacag

SEQ ID NO: 278470 - DNA, 75 bp, Homo sapiens
gaaagggcagtacagactttggcagggttaaagcacgaattgggagctctcagcgacatcaccagtcagcagcca

SEQ ID NO: 278471 - DNA, 74 bp, Homo sapiens
catgtaggagctcagaaatcagctcaaacatttttatcagagggctgatcccttatccaacatggttctaacct

SEQ ID NO: 278472 - DNA, 98 bp, Homo sapiens
cgcgaggacggacgccattatcgcatctccccgacaaacaccacgagaattccgcagcccacacgttacagaatgtctgaaggggacagtgtgggaga

SEQ ID NO: 278473 - DNA, 75 bp, Homo sapiens
aaggagaagtggagaagaaatcagtcagccgcaggatgtgtctagtccgaatgaagcaggaaggccggagtggga

SEQ ID NO: 278474 - DNA, 90 bp, Homo sapiens
cggggctggcagccctggccaagagctggctttatgtgctggggcagaagagatccgatagctatgttctgctggagcattctgtgaaga

SEQ ID NO: 278475 - DNA, 101 bp, Homo sapiens
gccgcaggggctcatgcagccgccaagcccatcacctcttcatgaccactgcctgccaggaggctaactacggtgccctcctccgggagctctgcctcacc

SEQ ID NO: 278476 - DNA, 97 bp, Homo sapiens
gaagttacgcgaagtccacccagcgtttctgagcaggaaatccaaatctcctcccaaagtgcccattgtgattcaggacgatagccttcccgcgggg

SEQ ID NO: 278477 - DNA, 51 bp, Homo sapiens
cggccaaggatgaagcctcacttcagagtttgagtactgctgggacacctt

SEQ ID NO: 278478 - DNA, 100 bp, Homo sapiens
agctgccggcggcgcggcgagagagcggctgacagaggggatgcgagcaggagcattggtttgaaaaggccctacgagacaagaagggcttcatcatcaa

SEQ ID NO: 278479 - DNA, 51 bp, Homo sapiens
cttggtcaccggggaacagctacgatttggaggccaatcactgccaccttt

SEQ ID NO: 278480 - DNA, 75 bp, Homo sapiens
attatggattggcaacctggaccccaaaattaccgaaacattgagctcaaggtggaagtagaaagtctgaagcgg

SEQ ID NO: 278481 - DNA, 100 bp, Homo sapiens
gacctccagatttccttactggtacaactccaaaaggagacattggagaagaaccaagctgggtctataaggaattgcacatgagatggcacacatattt

SEQ ID NO: 278482 - DNA, 51 bp, Homo sapiens
cctaccttcatatgactcaatggacacttcacggccatggtatggaagaac

SEQ ID NO: 278483 - DNA, 75 bp, Homo sapiens
tcagtttgtgcaggacaccgacatggaacagggactcactggggtgctggagacacaggagcagcaggggcccag

SEQ ID NO: 278484 - DNA, 80 bp, Homo sapiens
ggtcacggccgcaggtgaccccttagcccagctccagtgggcgggtggcagttgattatggaagattcccacaagagtac

SEQ ID NO: 278485 - DNA, 87 bp, Homo sapiens
tcccactgattctacattacggtattagaaaactactcggatgctccaatgacaccaaaacagattctgcaggtcatagaggcagaa

SEQ ID NO: 278486 - DNA, 100 bp, Homo sapiens
gctccagcagccttgttagggcgtggcctgaggcttggataagtgggctcttcagtgggtcatctgtgtgtcacagcctcagaagaccagcgagatggct

SEQ ID NO: 278487 - DNA, 74 bp, Homo sapiens
aggctcaagcaatcctaccatgtcagccttcccagtagctggaactacaggaacacctttgtcctagaatattg

SEQ ID NO: 278488 - DNA, 100 bp, Homo sapiens
cgacctgctaacagaactggaccttttcggtatttattacagtatcaggagccaataccttgtgagcagttggttacagcgctgtgtgatatcaaacaag

SEQ ID NO: 278489 - DNA, 75 bp, Homo sapiens
cgaacatgcgcttttgacacattggagctgtcagtggtagctataggaattaacatatacagaacatcaaatgtg

SEQ ID NO: 278490 - DNA, 100 bp, Homo sapiens
caggcacgttcccgaacaagacgacgacacagagatggcttcccccaacccagacgaagaaatccaggagtcctccagctgagaacgaggtgtccacccc

SEQ ID NO: 278491 - DNA, 75 bp, Homo sapiens
attatccgactcctcggaccagcaggacaggtgtcgtgaaaactacccctaaaagccaaaatgggaaaggaaaag

SEQ ID NO: 278492 - DNA, 89 bp, Homo sapiens
gggcgcagccctttgcgcagccgccgggaccctggcccctgtcgaggtacgccttcgtcaggcccgtcatcctgcagggactcacggac

SEQ ID NO: 278493 - DNA, 75 bp, Homo sapiens
tgaaaatggacgagtaatcgcctgctttgattcattgaaagatgagctttggaggatccaggagaagctggaatg

SEQ ID NO: 278494 - DNA, 88 bp, Homo sapiens
cattgcaggctccaaagtgaaggatatggctggagactggcactgggctctgaggcagtgttgtactgctacttctataaacggacag

SEQ ID NO: 278495 - DNA, 134 bp, Homo sapiens
gcggcctctacgaggtggatgtgacccaaggagagtgctacccggtgtactggaaccgtgtccaaggcagctgcagatttgatggcctactgtgaagcacatgccaaggaagaccccctcctgacccctgttcc

SEQ ID NO: 278496 - DNA, 75 bp, Homo sapiens
tctagacagacaggcctttctagtcttcaggagacatatgaagcaaaaaggaatgaattcctgggagaactgcag

SEQ ID NO: 278497 - DNA, 99 bp, Homo sapiens
gccgctcttccccacctgcccggtgcccgaggaggcagccaagctcgtagcctgccactccgtgcgacaagtgagatagaaggggccaaccagctactg

SEQ ID NO: 278498 - DNA, 51 bp, Homo sapiens
ggaaacgcttgtagggtttcaccagaattgggttgtgagcaaatttggaag

SEQ ID NO: 278499 - DNA, 87 bp, Homo sapiens
acataagagagcagctgcccatgccaaatagttacctcttttaaactcattctactggagcaaatgaagcctaaagaaactgttcca

SEQ ID NO: 278500 - DNA, 76 bp, Homo sapiens
gctaaaaatgggtcacacagtgactgtctggaaccgcactgcagagaaagaggactcggaggagagtgaaattgac

SEQ ID NO: 278501 - DNA, 91 bp, Homo sapiens
gggggcttcccggaggccaaccgtatcgccagcaagtacggattcatcaacataggacaggttcgccatcggtggtgtgaactcattgtta

SEQ ID NO: 278502 - DNA, 100 bp, Homo sapiens
gagccgcgcgcctttgtgcgcgcgccgaggaatgtatcctgtcaggtataatgtcagtgaatggcaagaaagttcttcatatggatcgaaacccttacta

SEQ ID NO: 278503 - DNA, 75 bp, Homo sapiens
gagaagatcatcgagcatttcaaacggcccactgctcagtggagcgtggaggacgaggaggaggccgtccacgag

SEQ ID NO: 278504 - DNA, 74 bp, Homo sapiens
ggcagctgcacttcttgcggctggatcacaggtaaaaatgcatttgcaaagggagaaaatgaaggccaaacaga

SEQ ID NO: 278505 - DNA, 75 bp, Homo sapiens
aagaccttcaagcagcgccgcaccttcggctgtctgtccccagaccccagagcacgtccggcaccaccatgactg

SEQ ID NO: 278506 - DNA, 100 bp, Homo sapiens
ctgcggagctgtgatccggtgttctataggcaggtgttgggtgcagagagcgcccctcccggacagttgcagaatgaagaagagtctggagaacctgaac

SEQ ID NO: 278507 - DNA, 75 bp, Homo sapiens
cagcctcctgaagggctgggattacaggaacctagaaagattgtacaatgaatggtgattctcgtgctgcggtgg

SEQ ID NO: 278508 - DNA, 75 bp, Homo sapiens
actctctgcatttattcgtaatggacttttagagaggctcaactaagtgaaaagatttcacttcaggcaattcag

SEQ ID NO: 278509 - DNA, 100 bp, Homo sapiens
caccctgggcacagcaggcatcggagttacagaatgtctgaaggggacagtgtgggagaatccgtccatgggaaaccttcggtggtgtacagatttttca

SEQ ID NO: 278510 - DNA, 90 bp, Homo sapiens
ttcaagagacaaggtttctcctatcagggtcgggcttccagtacagctttatggcggtcatccactttgcggggctcaaggccgtgggcg

SEQ ID NO: 278511 - DNA, 100 bp, Homo sapiens
cttccacaagtatatggggattccgcagatccggcagctttccgaaagagacactatggacagcgtgaagcagagcgcggccctgtgcttgctgcgcctg

SEQ ID NO: 278512 - DNA, 100 bp, Homo sapiens
agagccgccgacatgaagaaagacgtgcggatcctgctggtgggagaacgtgttgaagcacaacgggtcatccgagattctcaacaaactgtatgacacg

SEQ ID NO: 278513 - DNA, 73 bp, Homo sapiens
ccagacactttaacctattctgcatatagagaactgagggctttccctggctatggcgtgtgctcggtggggc

SEQ ID NO: 278514 - DNA, 91 bp, Homo sapiens
cgagtgacccgggtgccgaggagcgggaagagttgctgggacttcccaagtaagaagcggaagaggagccgctggaaccaagacacaatgg

SEQ ID NO: 278515 - DNA, 83 bp, Homo sapiens
gttctggaatcctcagttcaagatcgcctcaggcatggcgtacgtggagcggatgaactacgtccaccgggaccttcgtgcag

SEQ ID NO: 278516 - DNA, 100 bp, Homo sapiens
attttaccttggataccctgctttggcagtatcctggtgtgaaccagctatcctccagtataggaggattgagtcttcagagttctccacaaccagaaag

SEQ ID NO: 278517 - DNA, 98 bp, Homo sapiens
tgggatggaaaggagatacgggattccccaggcataatgcaaggcaaggtccagccgttccacccggcatgcaagcttatggagcagccccctttgaa

SEQ ID NO: 278518 - DNA, 100 bp, Homo sapiens
gacacttccgacacgacctctactggccttgcccagcgcctagatttgagaatggcagtgagtttccctcagagctggaggacggggacgacccagcagc

SEQ ID NO: 278519 - DNA, 82 bp, Homo sapiens
tgatccagcaaggtcggcagagcaaggggcttacgcagaaggacctggccacgaaagaagcttccggttctgaggtcctgga

SEQ ID NO: 278520 - DNA, 100 bp, Homo sapiens
ctgcaagctctgtctcccgggttcacgccgttctcagcctctcgagcagctggaactacaggtggcaagtgcaggcagctgtcccggttatgccggaatc

SEQ ID NO: 278521 - DNA, 87 bp, Homo sapiens
gatggagaagagattgaaagattctttaaattacatcagaatgcagtaatagtggccttgtcttcaaaatcatgggatgtagagact

SEQ ID NO: 278522 - DNA, 99 bp, Homo sapiens
agcctgctggacatccaggagaaggagtttgagaaggtcagccatgtcatctgagcctcccccaccaccacagccccccacccatcaagcttcagtcgg

SEQ ID NO: 278523 - DNA, 112 bp, Homo sapiens
gaaccatgtttggattgaagccgcctctgtattacttaccaggtttggtgcacctcgatttggaggaagtagggcagggcccttatctggaaagaagtttggaaaccctggg

SEQ ID NO: 278524 - DNA, 90 bp, Homo sapiens
gaaagaagcaagaagagcaggccaaacgtcagcaagaagaagaagcagctgctcagatgaattgatcatggccttgccaggttggtgaca

SEQ ID NO: 278525 - DNA, 90 bp, Homo sapiens
agcggcaggctcaggtgcagccgctggaagtagtcatgccccacaagatgtcagtttgtcatatccccaacatcatgttggaaattcaag

SEQ ID NO: 278526 - DNA, 81 bp, Homo sapiens
tcggaacagaaccaaaggctattggatcagctcagcagggacagtcattttgtttactcattcagccctgttgcaggtccc

SEQ ID NO: 278527 - DNA, 98 bp, Homo sapiens
cgccggcacacgggtgagaagcccttcgcctgcacctggccaggctgcggctggaggcctactcctccgtcccggtcagcaacatgaactcaggcctg

SEQ ID NO: 278528 - DNA, 75 bp, Homo sapiens
agccgatccagcctgcggagcctgtggggcagagaatggaggatgaagattacaacacttccatcagttacggtg

SEQ ID NO: 278529 - DNA, 100 bp, Homo sapiens
gaccacggcgcagacgcgggcgagctgcggctcggacgccagcggacacgcgggcgaggtggatccataaagaacccagccaacccgcagagggagggga

SEQ ID NO: 278530 - DNA, 123 bp, Homo sapiens
gccagctcttccacagcatccccaccatcctcctccactgccatctttcagccctctgaaaccgtgtccagcacaggcgccccagcgggatcccagagaaggatctgcacagtgttatggcac

SEQ ID NO: 278531 - DNA, 50 bp, Homo sapiens
ctgcgccaaggcctacggccgagagtccctgcaggaagcatcacccaggc

SEQ ID NO: 278532 - DNA, 100 bp, Homo sapiens
gttccatcctgagaatatttcacaaagaatttccttaagagctggactgggacaaaactttcggtttgaagaataagaaaggagcaaagcaacagaagtt

SEQ ID NO: 278533 - DNA, 101 bp, Homo sapiens
gctgaggaagtctgcatccacattgcacataaagttggatgagacctgcacgcagtggctcacagcagcacgatttgtgacagcccgaggcggagaacacc

SEQ ID NO: 278534 - DNA, 51 bp, Homo sapiens
ggtgtgttcacatttgatcatggcatggtggttgaagatggatatgaattt

SEQ ID NO: 278535 - DNA, 82 bp, Homo sapiens
tagaggaccagtattagaaagcatagttgcccgtactttacggcaggccttggaaaaccattgcagagtgaatggaggctat

SEQ ID NO: 278536 - DNA, 90 bp, Homo sapiens
gttgcggccagtcgccactgctaaaacctcggatcaattctcagctggtggcacaacaagtggcacaacagtatgccaccccaccacccc

SEQ ID NO: 278537 - DNA, 100 bp, Homo sapiens
tcgccccttgcaacaaaggcagactgagcgccagagaggacgtttccaactcaaagaactcaacggattggagcctactgggcttgagagccccgctgag

SEQ ID NO: 278538 - DNA, 96 bp, Homo sapiens
ttgcctttgggactctgaaggctgaaggcaatgttcagtctttgtatggtggaaagtggagctgatgaggttaatttgcacggtgtgaccagcctt

SEQ ID NO: 278539 - DNA, 90 bp, Homo sapiens
tctctctcatctcgctcggctgcgggaaatcgggctgaagcgactgagtccgcgatggagccttgggacaataatgcagtctgtgcagac

SEQ ID NO: 278540 - DNA, 71 bp, Homo sapiens
gcggctacctgctgacacggaaccctcacctcaacaaggatgagagggccttaccaaaaggagatttcttc

SEQ ID NO: 278541 - DNA, 113 bp, Homo sapiens
gaagaagcatatacttttgaaggtgcaagatactatataaactcagcgatgagttgaaccagcagctggaggccgtgtgcgggtcggtgtttggggagctggagtcccaggcc

SEQ ID NO: 278542 - DNA, 100 bp, Homo sapiens
ctgagcctccaggccggggaggtggtggatgtcatcgagaagaacgagagcgatattatggctgtggtctggtgatccctgagcatctagaaaactgctg

SEQ ID NO: 278543 - DNA, 50 bp, Homo sapiens
ccccttacccctgccataccagcgacctaaccacgaagctgccctgagac

SEQ ID NO: 278544 - DNA, 100 bp, Homo sapiens
tgaatatttgagctcattcaaagtggcccagtatgtggtacgggaagaagaaatggggcttttctgggagaagaggctacaaggacttagtgcatcagat

SEQ ID NO: 278545 - DNA, 98 bp, Homo sapiens
gatcaagtcttccaacagaatgttctcagcacagatattctacacctcacgccttcacctttaacacctccagtccctcatctgaaggttccctctcc

SEQ ID NO: 278546 - DNA, 100 bp, Homo sapiens
ttccacacctctagtggacccctcagtatatggatacggagtacaaaaacggcccttggatgatggagtgtgacaacatctggggtgatggaaagtatga

SEQ ID NO: 278547 - DNA, 51 bp, Homo sapiens
cctgatttcgaaccgagcactgaagaacgtcaaggtcgtgggaaataaaag

SEQ ID NO: 278548 - DNA, 100 bp, Homo sapiens
gccctttctcctcggcactgtattctttacctgcttcccaatcccactgatgaggatcagcccatgactggaatcagccattttaccaagaaagttgggt

SEQ ID NO: 278549 - DNA, 100 bp, Homo sapiens
ctttaacgtgtctgtgcagggtattatcatctaccgagccgcctacttcggtatctatgacactgcaaaggggtacaggcatccttcacctgctattgtt

SEQ ID NO: 278550 - DNA, 98 bp, Homo sapiens
ctcgctgtaccccatcgcggtgctcatagacgaactccgcaatgaggacgttcaggttctggcctataggaacaagacattttcagtaatggaagaag

SEQ ID NO: 278551 - DNA, 89 bp, Homo sapiens
agatcaaagatgccaagaaaccctgtgaaagtgacgtcctgcatttcacctccaccaccacgtcgaagaatcgcatcatcataacctgg

SEQ ID NO: 278552 - DNA, 100 bp, Homo sapiens
gctgaagaatttaatgatgaaactaatgtgaggatggagacattccctgcagtggctgagaaggtcctcaaggagttccaggtgttactgcagcacagcc

SEQ ID NO: 278553 - DNA, 75 bp, Homo sapiens
ctgaatcacacgccgccatccgggaggcccagggaaggtgtgtgtggtttcagcgcagcatggctgtggtcatcc

SEQ ID NO: 278554 - DNA, 50 bp, Homo sapiens
tggagtccggacatctgaaacttgcatgggctactgcatcctttttgtgc

SEQ ID NO: 278555 - DNA, 98 bp, Homo sapiens
ggcggagcaggttactcgcacgcggatttggctggcgtcccgcagctgcagaaactggagggcagcagtggacctgtgcggacgtctcctcacagccc

SEQ ID NO: 278556 - DNA, 100 bp, Homo sapiens
caagcaattcctcaaaaagaccaagaagaaccacaaggccatgaacgcccggaaatccaccatggagagtaaggatgaggtcagcgacaccgacagtggc

SEQ ID NO: 278557 - DNA, 100 bp, Homo sapiens
tgaagtttccagagcattccttgcttcttttatcttggtctttgaccttcttattgtgatgcagaacatgatgagtgtatcacaaatcagcacaactgtg

SEQ ID NO: 278558 - DNA, 100 bp, Homo sapiens
cacaccatccttctcgctgcaggaacagagaatgtcagtatccaataggatgccagtggaattccctgacgattccatccatgcggctctgctggagcag

SEQ ID NO: 278559 - DNA, 100 bp, Homo sapiens
ttgaggattcattatgaacaaagaagtctcccaggtgcgagaagatgtactaaattcattgaataacaactttcttcaaacgctaaatcaagcttggaat

SEQ ID NO: 278560 - DNA, 76 bp, Homo sapiens
aacatgaacaactacaaaggctatgaaaagaagccctattgtaatgcattccacaggatgcgagcatatgcagtgg

SEQ ID NO: 278561 - DNA, 82 bp, Homo sapiens
aaggagagtgctacccggtgtactggaaccatcttgatgtggaagaaatggaggactcagaaccaaggatttccaagtgatt

SEQ ID NO: 278562 - DNA, 100 bp, Homo sapiens
tcttgaaaatctggataaatcccgaaaaggagaacttcttaagaagagtgatttgctcccattcatgctgaggctccagagttcatggaaatgagtgttg

SEQ ID NO: 278563 - DNA, 98 bp, Homo sapiens
cgtgtccaaaatcgtggcctccatgtgggacagcctgggagaggaacagaagcaggcctactgaacttgacgcactggtatttggccatctatacacc

SEQ ID NO: 278564 - DNA, 49 bp, Homo sapiens
gactactgtcagcagctgtgccagtaagctgtgctagaacaaaaatgca

SEQ ID NO: 278565 - DNA, 74 bp, Homo sapiens
gcggagcttgacccgtccatcgctgtggaagttctactacatcaccctgctacgagaccccgtgtcccgctacc

SEQ ID NO: 278566 - DNA, 100 bp, Homo sapiens
gaaacgaggcactcagttggaagagtccagcaaggagctcttgtccctggcaaagcgaaagcgcagtgactctgaggagaaggagccgcctgtgagtcag

SEQ ID NO: 278567 - DNA, 75 bp, Homo sapiens
aggactgcgccgcgtcttcctcaagcactgtgacttctgccgtgttcaccgtgggagacaacgtggtttcaggca

SEQ ID NO: 278568 - DNA, 100 bp, Homo sapiens
gatgagatggcaactcaggaagttcctactggtcttgaacactgtgtctcagtttaattggttggggtcagataagaagaggagtgacaatcaagccaac

SEQ ID NO: 278569 - DNA, 100 bp, Homo sapiens
cgctggtcactgaggcccaggtcgccgccgcggcgcgggagagacaaaggcagcgctgccctcgggggagtattggccctggcggaacgcagcaaccacg

SEQ ID NO: 278570 - DNA, 87 bp, Homo sapiens
accatgagcgacgtggctattgtgaaggagggttggctgcacaaacgaggtctgagagtcactggagctaccagaagcatcatgggg

SEQ ID NO: 278571 - DNA, 100 bp, Homo sapiens
cagaaggccggcgggaccagtgtgaggcacccagtgaccccaagttccctgactgctcagggaaggtggagccttacgaaggatgaatccaaaaggccaa

SEQ ID NO: 278572 - DNA, 100 bp, Homo sapiens
cttgaaaagactgggcttgtccttgctggtgcatgcgtcgtcggcctctgggcagcagggcacggccgagcagatgaggactgtgtggacgaccgggcca

SEQ ID NO: 278573 - DNA, 100 bp, Homo sapiens
cgcgggaagacgcggcggcggcggcggaggatgagcctgcagagcgcgcagtacctccgtgaggactcagaagacaaagatgtgaagaccaagaaggatg

SEQ ID NO: 278574 - DNA, 98 bp, Homo sapiens
ctggtcatacaccagtactaccaaggacagcttttttcctgcaagtctggctcttgctgattgaattcctttggtgcagtttagcatgttcctctgtg

SEQ ID NO: 278575 - DNA, 50 bp, Homo sapiens
cttcccaccaccttaaaccactgagacgatctgccgaccctctgggagaa

SEQ ID NO: 278576 - DNA, 75 bp, Homo sapiens
taccagaagtgcctggccatgggcatgaagcgggaagtcctgagcctcctacctctgctggaagcccagatccca

SEQ ID NO: 278577 - DNA, 98 bp, Homo sapiens
accagagtgccgagcccaggacgcccccggcccaggcccttgggtctcggcgcggaagatggccggcggcgtggacggccccatcgggatcccgttcc

SEQ ID NO: 278578 - DNA, 100 bp, Homo sapiens
cgtgaagggcattcagaaatacaaagcaaagattgtttttgcagatgcttcaagagaagagttgctggaaaaaacacatcaagtgtagaagacgtgttca

SEQ ID NO: 278579 - DNA, 76 bp, Homo sapiens
cctttcctgctagaactttcagaatctcaggcgggtgaggttccaagaccaaagattaaattaagagaaggtaaag

SEQ ID NO: 278580 - DNA, 100 bp, Homo sapiens
ccggaagtgccccttagcgggtgggggaagctggtaggcacgggcggctccgcagtgaccggactcgggggaggtaattgaacggcgcattcggcaagag

SEQ ID NO: 278581 - DNA, 76 bp, Homo sapiens
ctgcttgttgatgtgatatgggttgcttcctctgaacttacttcggttcacagctggagcaaagctgttgtttcac

SEQ ID NO: 278582 - DNA, 75 bp, Homo sapiens
acagctctggattaccttgcaccttatgccaagagtttgaacaactgactcttgatggacacaaccttccttctc

SEQ ID NO: 278583 - DNA, 76 bp, Homo sapiens
cgaaagcctacaaaagtgtggagaggttccttcaggaggatcaggttcgatacaagaggctgttttcctagcgtgg

SEQ ID NO: 278584 - DNA, 50 bp, Homo sapiens
ccgggagttacaccgccaccgccagagcaatggtggaacaaagcggcaaa

SEQ ID NO: 278585 - DNA, 83 bp, Homo sapiens
gcgaagatccggactctgggtgttttgctaccgtgaccgtttagttgggtttgcctgggtacctttgctgaaagatggtagaa

SEQ ID NO: 278586 - DNA, 73 bp, Homo sapiens
cgccggaggcctgactctgggagcacgcaattcctaagcggctgtacaaggccctctccctgctgaagaagga

SEQ ID NO: 278587 - DNA, 96 bp, Homo sapiens
ccacctcccatgtgttcagttcacccatgcagggctgctaaggaagcaaaaaaggctaagcaagcatctaaaaagactgcaatggctgctgctaag

SEQ ID NO: 278588 - DNA, 98 bp, Homo sapiens
tgctgtacaccctcaacaaacaccagcgctttgggtacatgtcccagagcaagcacacggaggcccgggagctcatgtactcgggagccctgctcttc

SEQ ID NO: 278589 - DNA, 100 bp, Homo sapiens
atttcaagagagtaccattggggggttcttttcctatgactccatcaattccagctaatcctcccatggctttcaatccttacataccacatcctgggat

SEQ ID NO: 278590 - DNA, 97 bp, Homo sapiens
ctacgtgctcacggtcaacgagcggggcaaccactgcgagtactgcttcaccagagccctgaggatgatgacaggaaggtccgaaggagagaaaaaa

SEQ ID NO: 278591 - DNA, 76 bp, Homo sapiens
cttgatgtcatgctcaaggggctctttaaggtgattcgcaaggggtggctcaccatcagcaacattggcatcatga

SEQ ID NO: 278592 - DNA, 50 bp, Homo sapiens
tcgtttctctcagtttggggtcagagaacagctttgctgagccatcaagg

SEQ ID NO: 278593 - DNA, 82 bp, Homo sapiens
gcgagcacagagcctcgcctttgccgatccgccgcccgtccacacccgccgccagatcgaagacctgcaggtgaagctgcag

SEQ ID NO: 278594 - DNA, 101 bp, Homo sapiens
cccgactaaaacatctgttgcagcgagccccagattattgcccagagacaatgactctgttacggcatggtgcaaatccagatctgagagatgaagatggg

SEQ ID NO: 278595 - DNA, 101 bp, Homo sapiens
gaaatctctccaaccaggaacaaacacctgccttgcaatattagatatggatcagaaactttcgaagttggtagaagagctcacaacttcaggagaacccc

SEQ ID NO: 278596 - DNA, 97 bp, Homo sapiens
ggattcgtgcgcggtaagaagctgcgcggtagcgcggtgagctggcctgctgctgtgggtctgcaggctgctctctctgctgtgattgctgccccag

SEQ ID NO: 278597 - DNA, 50 bp, Homo sapiens
agcctcctcagtagctgggattacaggtttatttgcaagatgggtttgag

SEQ ID NO: 278598 - DNA, 75 bp, Homo sapiens
cagaccaggatggagataaaggaactcaaagaatttgggtctccagaaatgctttgggttcatctttcattgctg

SEQ ID NO: 278599 - DNA, 83 bp, Homo sapiens
ccgaccgcgaggacgacttctccgcaggttctgcggggagtgtctccagccctgcctgcaggtgccatccccgctgtgcccac

SEQ ID NO: 278600 - DNA, 83 bp, Homo sapiens
gtggagccaccagcctctccttggctccccatcaacccgggcagccgggatttaaattcacggtggctgagtcttgtgacagg

SEQ ID NO: 278601 - DNA, 82 bp, Homo sapiens
ccaacattcccaacagccaccaccaccaccagatgctggagaatgctggaggagaccttaaggatggccaccaccactatga

SEQ ID NO: 278602 - DNA, 90 bp, Homo sapiens
ccttcgaccttggacttctcagcctccagaatgaattaaacaaccaccatgtcgagcaaaaaggcaaagaccaagaccaccaagaagcgc

SEQ ID NO: 278603 - DNA, 100 bp, Homo sapiens
aagtccaagaatccgagtggaggctcaccgaggcgaaggggccaaccatgggaaaggagagtggatgggactcagtgttctaagaacggaagcatctggg

SEQ ID NO: 278604 - DNA, 100 bp, Homo sapiens
cttggtcattcttcgtgggaaagatgtgcaaagtgcagatgtggttgcctttccccatcttcctggttctgctccttcgtggcctagtcttgtggacacc

SEQ ID NO: 278605 - DNA, 75 bp, Homo sapiens
catgctcaacttcggtgcctctctccagcagactgcggccaccagcttgggctccccacggagggcagcaagtgg

SEQ ID NO: 278606 - DNA, 98 bp, Homo sapiens
ttccatcctggagatctacaggatttatcaaatcgagtcactgtcaaatgtcctgtgaagtcaacgagtgccgaaaaattgagagtcttgaaaacttg

SEQ ID NO: 278607 - DNA, 75 bp, Homo sapiens
ggctgtatgattaggccacaatcttcaatgagtaaacatattcctgatagtggctacccagagacgctggtcaac

SEQ ID NO: 278608 - DNA, 100 bp, Homo sapiens
gacggcctgggtgctggcgaagcggaggccggaggggcccagatcattgatctgatgatgctggtcatcgatgtgaccaaggggatgcagacccagtcag

SEQ ID NO: 278609 - DNA, 82 bp, Homo sapiens
aggctggacgtgcacgcagcccggcgggaggataaagaccaccacgggtttccaggcctgaggtgcccgccctggccccagg

SEQ ID NO: 278610 - DNA, 83 bp, Homo sapiens
ccaccctcaatgcctccaacctcatctaccccatctttgtcacggttggttctggacattacacagcatacgcaactcacgaa

SEQ ID NO: 278611 - DNA, 98 bp, Homo sapiens
ggcagcgcgggaaacgtcaaactcgaggatgatggcctcccagaaaatgaacatcagctgtcagtagctggaaagataaagaagcatttcaacacagg

SEQ ID NO: 278612 - DNA, 98 bp, Homo sapiens
tctggagggattctggcatcagggaggctttcagccggagaagcgagtttcagctgattatgccgacaagcccctggagaagcctctaaagctagtcc

SEQ ID NO: 278613 - DNA, 100 bp, Homo sapiens
tccgagagtttgtaatgcaagaagctcagcagagtgatgacctctccagggcacaccgtattcagctctgagcggtctttgctagtgaggccaaggagcc

SEQ ID NO: 278614 - DNA, 74 bp, Homo sapiens
gggatccacggacccctgctggacgtccagatcggtgacatcgtcacagtgggcgagtgccggcctctgagcaa

SEQ ID NO: 278615 - DNA, 50 bp, Homo sapiens
cgtgtcaccatccaggaactcacaggtggagtgcagtggcacaatcccag

SEQ ID NO: 278616 - DNA, 82 bp, Homo sapiens
cgcgcgggccgggaggggacggccgccggagccgcgaggccaatttaagctatgaagaaggacatccctcacactctgaaac

SEQ ID NO: 278617 - DNA, 97 bp, Homo sapiens
catctcagatgttgttgatgaagtaatacagaactgccccatcgatgtgcggcgtccgctgtataaggtttgcctgcaatgagatttcattctctac

SEQ ID NO: 278618 - DNA, 82 bp, Homo sapiens
ctgcggtgtgcaagtccgactggaacagagtgaagacatttccacctggacacctgaccatgtgcctgccctgagcagcgag

SEQ ID NO: 278619 - DNA, 82 bp, Homo sapiens
ctgaagcccaccggtccccaacgcatcatgccagggagccaagcgtcctgcccggccgttaaacactttaagatgagaaaaa

SEQ ID NO: 278620 - DNA, 82 bp, Homo sapiens
cgggacccggtgtctgctcctgtcgccttcgcctcctaatccctagccactatgattcctggtcgggtggcttccagtggtc

SEQ ID NO: 278621 - DNA, 75 bp, Homo sapiens
caacgacgttccatctgtggaaggacctaccaaccaggattcgtgaagttttttggaaacctggctgtcatggat

SEQ ID NO: 278622 - DNA, 75 bp, Homo sapiens
ggctgggctcggtattccccttcctgctagtcctggtggatctgcagtacgaagcttggctgaagaggaaataaa

SEQ ID NO: 278623 - DNA, 100 bp, Homo sapiens
cggagcgtgagcaacagcttcccggctggaggagccactgccccacgcgcccgcggcccgcgcgccgagggagttcccattagacttgaagttgggccac

SEQ ID NO: 278624 - DNA, 100 bp, Homo sapiens
tcctggtgcccctgatgatgaagcagtacggatatttttagaatttgagagagttgaatcagcaattaaagaaccccaaggagtggaccaagaaggtcat

SEQ ID NO: 278625 - DNA, 50 bp, Homo sapiens
tcgttttcaggagcatctccaggagccaaaaacctgtatatcatctccgt

SEQ ID NO: 278626 - DNA, 50 bp, Homo sapiens
tacaactggaaaacagctttttgatcaggctatagaaagcgcaattggtg

SEQ ID NO: 278627 - DNA, 100 bp, Homo sapiens
catttcagtcactggtttgcagagtccaggtgactctggagaagaccttttgtttgggacatcagacggaaaacttgcgcttatacagattactacatcc

SEQ ID NO: 278628 - DNA, 100 bp, Homo sapiens
gtcggggcaaagctgggcctgcgtgagattcgcatccacttatgtcagcgctcgcccggcagccagggcgtcaggcccttctgcgatgttttacctggct

SEQ ID NO: 278629 - DNA, 83 bp, Homo sapiens
gggcgttggctatgtgcccatcacagcccgctgatccagttccacctgctgcactccaagttccacctgtgcagcgtccccac

SEQ ID NO: 278630 - DNA, 123 bp, Homo sapiens
agaagcagctccacgaaaggcagccgcggatcgccgcgctcagcgacaaacaagtctcctctgagcctccggcctccataagacccaaaacagatgacacctcttcccagtcccccgcgcctt

SEQ ID NO: 278631 - DNA, 50 bp, Homo sapiens
tgatgttcgcctacgccatccaggagtccttcaataatgttaaacagtgg

SEQ ID NO: 278632 - DNA, 83 bp, Homo sapiens
ggcaggccctgagcacgctgctgtgtgagcagcagccgtgttgccgcccgctgtgctatgagcagtcagagcgccgtctccac

SEQ ID NO: 278633 - DNA, 97 bp, Homo sapiens
ccgggagatcccaggcggtgacagagtggagccatggctagagatcaggatcctcatgaccagccaaagagaagaagaattaggaagcataaatcaa

SEQ ID NO: 278634 - DNA, 83 bp, Homo sapiens
gtggaaaccaggcggccagccagctggaggacctgcctagagctggaacgttacctccagagcgagccctgctatgtttcagc

SEQ ID NO: 278635 - DNA, 89 bp, Homo sapiens
ctcccgagtggctgggattacaggttacattgattacccacctagtacaacatcttacgggaagagcatagtatttcctagaggaatat

SEQ ID NO: 278636 - DNA, 82 bp, Homo sapiens
ggagagaacagttcattgaagctatcactgtcagtgctggacacttggtggggttcccacacaagctcctccacctcttgaa

SEQ ID NO: 278637 - DNA, 100 bp, Homo sapiens
gggccccagcgcaggagccgcgcccggacccaggctacgagttccagggagctctgtcctggtgaccgtgcccgggttatgacgactaatcccaaaccga

SEQ ID NO: 278638 - DNA, 90 bp, Homo sapiens
aagaagagcagaaaatagcagccaggaaccaagaaaacttggtgaaggaaatacaggtgctgcagaatcttctttttctcaggaggtttc

SEQ ID NO: 278639 - DNA, 99 bp, Homo sapiens
gtggccttctcagtacttttggaggatccactggacgaatgatgctgaaaggttcttctgagctatgaaggggcccagatttaagggctatttttgaca

SEQ ID NO: 278640 - DNA, 98 bp, Homo sapiens
caacttctgcgggatcttcaaccacctcgagcggctgctggacgaaggtaagtaaggaggtctctgtaccatggctcgtacaaagcagactgcccgca

SEQ ID NO: 278641 - DNA, 75 bp, Homo sapiens
ggagagcctactgagcagcctgagtgggtcagataccaggcccaggttccatgatgcccgggcagcacatgccag

SEQ ID NO: 278642 - DNA, 100 bp, Homo sapiens
agatctgagatctaaagctaaaattgcctttggacagtctatggatctacattataccaataacgagaatgaaactagtgatcgagaagatggcctcccc

SEQ ID NO: 278643 - DNA, 100 bp, Homo sapiens
gcggccaacatggcggaacgcaggagacacaagaagcggatccagattttgagaagagggggaaaaaggaagtttgtcctgtcctggatcagtttctttg

SEQ ID NO: 278644 - DNA, 100 bp, Homo sapiens
gggccgagccgctggccgacgagcggagcctcaggagccggcggggacgccatgcgagccagagttgtctgctggttctcagcttgaagaagattctgca

SEQ ID NO: 278645 - DNA, 100 bp, Homo sapiens
aaacggattgccagagaattggcagaaggtccggaagatcggggtgtttagctgtggcccccctggcatgaccaagaatgtggaaaaggcctgtcagctc

SEQ ID NO: 278646 - DNA, 90 bp, Homo sapiens
gaaatcttgatcagccagatctttattacgagtactacccgcacgtgtaccctgggcgcaggggtgctgtcatctatatgatctcagtat

SEQ ID NO: 278647 - DNA, 74 bp, Homo sapiens
tatgccaaggaaaaactggagagcttcatcaaaaatagtgatagctttgataaagctgaatgaagatgtgtctg

SEQ ID NO: 278648 - DNA, 75 bp, Homo sapiens
gttcaagataaagtgattttttgcctttgttgattaactggacaaattcagattggatctggttcctcgcgtctt

SEQ ID NO: 278649 - DNA, 100 bp, Homo sapiens
tcctcggcactgtattctttacctgcttcccaatcccactgatgaggatcagcccatggaacacaatgcacaacatccgtggcaacaagcaggcccaggg

SEQ ID NO: 278650 - DNA, 100 bp, Homo sapiens
actacaggaacctgctttctctcgatgaggataacatccctccagaagatgttctctttgccatgaaggaggataatgagaaggtgcctactttgctaac

SEQ ID NO: 278651 - DNA, 99 bp, Homo sapiens
gctgagccgcacctaccgcacggattctaacattttcagagaaccttttggaaagaacaagcctacttcaataaatgaaggagaataaagaaaattcaa

SEQ ID NO: 278652 - DNA, 100 bp, Homo sapiens
aacattgaagacgtcattgcccagggatcgtgtgggtggacgagttgccacatttcgcaaaggaaactatgtagctgatcttggagccatggtggtaaca

SEQ ID NO: 278653 - DNA, 75 bp, Homo sapiens
aaagaataaacttatccaaaatcgacaagtacttcaaggtcttgccaagaaatattgctgttccttactgccaac

SEQ ID NO: 278654 - DNA, 75 bp, Homo sapiens
tgtccatcaaggtcaagcttctgcgctcccttcctcagcgtttcaagatattctctaagccgctttcatcatggg

SEQ ID NO: 278655 - DNA, 75 bp, Homo sapiens
catgtaccagaaaggacaggagacgtccaccaatcccattgatattgatgatgttaagaagttcaaaccgggtta

SEQ ID NO: 278656 - DNA, 73 bp, Homo sapiens
agcagatggaggcgcatgcggggaaggccagcagcagcatgcctgggccgagccagtggcccccagaggatga

SEQ ID NO: 278657 - DNA, 75 bp, Homo sapiens
tctacctggggatatacatgcatgcaccaaaacgaggacaggtgtaccttgaaagacttttaacatacgcagaga

SEQ ID NO: 278658 - DNA, 76 bp, Homo sapiens
cggagagcggcctgcgggcgatcgggccgagagctgctgaaatcttggagggaagaaaacacatcccaccctgcct

SEQ ID NO: 278659 - DNA, 71 bp, Homo sapiens
gaaagagctgaaccacatgctgtcggacttgaacgcaactcccaattgcagaaaattggcaacgtctctga

SEQ ID NO: 278660 - DNA, 76 bp, Homo sapiens
acaatggagcatttgactcttcctcggcagtcttccttattattaagctttgtgtccctggtgatgttggaacatt

SEQ ID NO: 278661 - DNA, 101 bp, Homo sapiens
tctgtcttggtgcttcttgctcttttgggtgtcatcattgccaaaagaagctgtgctgaatggtttggtggccactgaggtgttgatgtggttttatgtcg

SEQ ID NO: 278662 - DNA, 75 bp, Homo sapiens
cagaacttggactgagtcctgcaggacacagcttcctgcctgacacagctcacttcaagaagtgcacaatgtcag

SEQ ID NO: 278663 - DNA, 101 bp, Homo sapiens
cccagaccctggagcctcagttggaagcagccgatccagcctgcggagcctgtggggcagggcaccatgccggtggaaaggatgcgcatgcgcccgtggct

SEQ ID NO: 278664 - DNA, 50 bp, Homo sapiens
tgtatccgtcgaggctacagtagagaaatgtgagagcttcttgccgccag

SEQ ID NO: 278665 - DNA, 98 bp, Homo sapiens
accttacaagtatccccgttcgccaccaattatgggagggctggccaacttctgctacagacgactcagcaatctgaaagcaaatcctgtttagatgc

SEQ ID NO: 278666 - DNA, 83 bp, Homo sapiens
cacctctgcgggcccggcggcgtggaccacctcccggtgaagatcctgcagccagagcaagtgcaccggcacctggaccaaca

SEQ ID NO: 278667 - DNA, 75 bp, Homo sapiens
tatgcttcgtgggatctttgagccttttggaagatgtgacagctatgaaattcgccctggtaaacaccttggagt

SEQ ID NO: 278668 - DNA, 98 bp, Homo sapiens
atgtccctcacaccccttccagctacatcgaaacgctcagcaacagcctcaccaaggactccatgaatatcaaagcccatatccacatgttgctagag

SEQ ID NO: 278669 - DNA, 74 bp, Homo sapiens
ctaactcattgtattcctcctgagataataatgaaggtgtgactgcacagaaaagttacaaaacaaatttgact

SEQ ID NO: 278670 - DNA, 101 bp, Homo sapiens
tccaccagttgcacgatcctcaccgcaacattccttatccaatcccttaccggactcctagaagtaccccaccccacccctgctccttggaggacaacgtg

SEQ ID NO: 278671 - DNA, 82 bp, Homo sapiens
ttgcgggccccgggacctgggctgggaacccgcggtggagcgggacacgaacgtgaggctgtggccaggccagctgggctcg

SEQ ID NO: 278672 - DNA, 75 bp, Homo sapiens
agagcttcatcaaaaatagtgatagctttgataaagtttgaggaagaggcaaagaaccctggcctggaaacacac

SEQ ID NO: 278673 - DNA, 100 bp, Homo sapiens
aacgcgcccctcggggctccagtggagagttcttacggggcaagattcttgccaagagaattaatgtgcgtattgagcacattaagcactctaagagccg

SEQ ID NO: 278674 - DNA, 75 bp, Homo sapiens
aaagtttagaagaggaggaaaaatttgacccttttcagagtggcagaatcacaccaccccgaagagccccttcac

SEQ ID NO: 278675 - DNA, 50 bp, Homo sapiens
gaaaaggaacgggagctgagagggcgaactttctgaccaagtatacaact

SEQ ID NO: 278676 - DNA, 100 bp, Homo sapiens
ttctggacaaatacaggaatgccattaaacggaccagccccagtgatggagcaatggcaaactatgaaagtacagaatgtgacagtgatgataacatggg

SEQ ID NO: 278677 - DNA, 82 bp, Homo sapiens
gcgcgtccaggcctgacagctctgcggctcgggccctgaggcaagtgaaccggagcaaacgacttccgatccagtctgcgct

SEQ ID NO: 278678 - DNA, 100 bp, Homo sapiens
gtcgccgccaagatgatgtgcggggcgccctccgccacgcagccggccaccgccgagacccagcacatcgccgaccaggagctcttgtccctggcaaagc

SEQ ID NO: 278679 - DNA, 90 bp, Homo sapiens
aaggttgaagcagaagaataaggagaaggataagtcgaaggggaaggcgcctgaagaggacgaaggtcacgagaagagaatgccttctag

SEQ ID NO: 278680 - DNA, 76 bp, Homo sapiens
gtactgagcctgttggaggaactggcccggaaacaggaggactcaccttcaggccattcagaggaggaaagagagg

SEQ ID NO: 278681 - DNA, 99 bp, Homo sapiens
gggctgagagacggcggcggccgaaagcggagagatgctgggcgtggcggccgggatgacccacaggtttgcccaaaggaccagccaaaacctcacctc

SEQ ID NO: 278682 - DNA, 98 bp, Homo sapiens
cgggagtgccgtgcgccgcagcccgggcccaggccccggcagcgcctgggacaaggtctcagtggcccttagcagcagctccattcgtgtggccatgc

SEQ ID NO: 278683 - DNA, 80 bp, Homo sapiens
tgacggtggcgccgcccggggcgaggcagggccagcagcaggcgggagaggccacaagaggaagctgaatgaagaggacg

SEQ ID NO: 278684 - DNA, 75 bp, Homo sapiens
cgcccctccgagctggggttggacgctgccagtttgcacagcagcaggtaagaatgattgatgttggctgatatt

SEQ ID NO: 278685 - DNA, 100 bp, Homo sapiens
ctgtctctagacagcagtcttgtgctggacagtgccacatcgcttatccaggcagctaaaaacctgatgaatgctgttgtcctcacggtgaaagcatcct

SEQ ID NO: 278686 - DNA, 74 bp, Homo sapiens
cagtggtcgcttcttctccttggagatgctgaaggacgaggtgcgcaccctcacttaccgcaactccatgtttc

SEQ ID NO: 278687 - DNA, 100 bp, Homo sapiens
gcccgcgctgcccgcactcctggtcctgctcggggctctgttcccagaaatggtggagtcaatgaagaaagtagcagggatggatgtggagctgacagtt

SEQ ID NO: 278688 - DNA, 100 bp, Homo sapiens
cctcggcctcggagcaacgagcgcagcgccggcgtggtgtccctcgtggccgttcacccctccaccgtcaacccgctcgggaagcagctcttgccaaaaa

SEQ ID NO: 278689 - DNA, 98 bp, Homo sapiens
gtagagggagctgtcgtcgccctggaagacgatcccgagttcaacgcagatgccaacgtccggcggtacctccagctgacacagtcagaactcagcag

SEQ ID NO: 278690 - DNA, 83 bp, Homo sapiens
ctacagttataccaagtggatagtagaacttatctactggatttccgtagtattgatgggggatatgagactttctactcgga

SEQ ID NO: 278691 - DNA, 51 bp, Homo sapiens
gtgcagggcagagcaggaggccccccgagaatgtccgtctgtctgcccagg

SEQ ID NO: 278692 - DNA, 74 bp, Homo sapiens
tttgaggttgactttccaatgattgtcacgagaaagctgcacagtatcaagtcttccccagggaggtcctgaac

SEQ ID NO: 278693 - DNA, 100 bp, Homo sapiens
aatggctgaagccatctcagaaggatttatacagagatgtcatgttggagaactacaggaacttggtatggcttggggagccctggaagcttatgttcaa

SEQ ID NO: 278694 - DNA, 100 bp, Homo sapiens
atatgatatcccagttggagagggaagaaaagctttggatgaaggagcttcaaacccaaagaggtaagcattcagggatacttgactttcagagatgtgg

SEQ ID NO: 278695 - DNA, 97 bp, Homo sapiens
cagggcggcgcgtggtctacgccgagtgacagagacgctcaggctgtgttctcaggatgagagccactcagagtgggtgtcttgtgtccgcttctcg

SEQ ID NO: 278696 - DNA, 90 bp, Homo sapiens
acagcagcagaaaatgaccatgttacagctcctttacaattccaaagaaaaataaaaagaaaacatcaaatcaaaaagcacaagaagaat

SEQ ID NO: 278697 - DNA, 100 bp, Homo sapiens
aaagctaccaaagacgtagaaagaaatcttagcaggaactttatattgctgttggaatatctggagccatccaacatttagctgggatgaaagacagcaa

SEQ ID NO: 278698 - DNA, 75 bp, Homo sapiens
accgaccaggtggaggtgaatgcccagaacagtagacccaaatgatttgtacattgtagaacccctcaagttttc

SEQ ID NO: 278699 - DNA, 100 bp, Homo sapiens
ggtttctatagagcctggcaccaagtggaatattacagacaggcagcaccatctggcctgaggtcacaagtacaattcaatgtggaggttctctgtcaag

SEQ ID NO: 278700 - DNA, 75 bp, Homo sapiens
gagaagaattagctatcaaatccggccagaacatagataccctggagcgaatagccgggctggaacaggaggact

SEQ ID NO: 278701 - DNA, 98 bp, Homo sapiens
ttgagctccaggagttcgtctcttacgtctgcggaagtgcagctgcctcagttcttagcgcaggtgtttaaaagacacaatcccagcacggctgagga

SEQ ID NO: 278702 - DNA, 74 bp, Homo sapiens
gccgagctcgttggagcttgaacccattgtcacccctccgtttggtgccctggttgtcagatgttggaaagcag

SEQ ID NO: 278703 - DNA, 83 bp, Homo sapiens
ctgaagagcagacccgtttgggttctccacgcattctagactcccgaagaggtgggaggaggagctcgccaagcgcatgaacc

SEQ ID NO: 278704 - DNA, 100 bp, Homo sapiens
ggaatgtcatccagcgagtgattaggaatactcccccagttgcaagaggcgcaggaccgtggaagacttcaacaaattctgcacctttgtcttggcctat

SEQ ID NO: 278705 - DNA, 82 bp, Homo sapiens
tgccccaccatgtcagacgcagccgtagacaccagctccgaaatcaccaccaagtgtccttgaatccgacccctactttggg

SEQ ID NO: 278706 - DNA, 80 bp, Homo sapiens
ggcgtgctcagtctagacaggtgtgacaagctggctgctgactgtgcccacgagctgcggcgccatggggtcagctgtgt

SEQ ID NO: 278707 - DNA, 50 bp, Homo sapiens
cctgtacagcctgcagaactttctttctacaacttcaacaggctgcactg

SEQ ID NO: 278708 - DNA, 58 bp, Homo sapiens
gttcgagaacgaccccgagacggtgagtcgctctgcctgtctgatgacgacacagctg

SEQ ID NO: 278709 - DNA, 100 bp, Homo sapiens
cgcggccctgctgagagggaaaaggacgccgcggtcttcccaggcgtcgcggagagcagtttctttcaagatggcttgaaaacagctgataagttgaaac

SEQ ID NO: 278710 - DNA, 100 bp, Homo sapiens
cttccctgttggatatgggaaacatgtctgcctctgatctcgatgttgctgacaggaccaaatttgataaggagattatggtgggctccatgtttcaagc

SEQ ID NO: 278711 - DNA, 100 bp, Homo sapiens
gtacctgcagaaggtctctggagacatcttcagcaggcaatagccctctggaacaagacaattcatgtgagataagaaagaagagcccacaagaccaagg

SEQ ID NO: 278712 - DNA, 100 bp, Homo sapiens
ctagtcctgagcttcccaccgaagatgaacagggttcctggggcatcgacgatctccatatttcattgcaagtggggccctcgtggaggtaaagtgcctg

SEQ ID NO: 278713 - DNA, 98 bp, Homo sapiens
ttcgggctcagcggccgcgaggccgcagctcccgtcaccaccaagtaagcgaagaaaattagagaaaccgagaaaacccataacattcgtggtgctgg

SEQ ID NO: 278714 - DNA, 83 bp, Homo sapiens
ctgggatcccggccaccagcaattgtccgcgtttgcctcagcatggagggcggggccgcggcagccacccccacagcactgcc

SEQ ID NO: 278715 - DNA, 97 bp, Homo sapiens
aagccttgcaccaagacttgccaagggaagatcagttttcctgccatccaggctgctccctccttcagcaactcattcccacagatcttccgagaca

SEQ ID NO: 278716 - DNA, 82 bp, Homo sapiens
ctccttccacactattcgttcactattcctgatcagagaactccagttgcttcaacacacagtatcagtagtgcagccaccc

SEQ ID NO: 278717 - DNA, 50 bp, Homo sapiens
cctcggcgtgagcgacagcggcaaagttatttccagaaagaagagaatgg

SEQ ID NO: 278718 - DNA, 100 bp, Homo sapiens
agaaattcttcttgaaggctgtgctgagaaaagtaaacagctgaaggatgaaggagccagtttggctgaaaataaaagacgaagggaacgtcatcgtttg

SEQ ID NO: 278719 - DNA, 82 bp, Homo sapiens
gtccttcaatgttccaggcttgtacattgctgtgcagaacaagttgaaatcatcgcagaaggataaagttcgtcagtttatg

SEQ ID NO: 278720 - DNA, 98 bp, Homo sapiens
tccaagcttcacaatttcagatcctaaactggttgctaaatggaaaggcctgtgattggaattgaaacagtacaactgcctccaccagaggaaaatag

SEQ ID NO: 278721 - DNA, 82 bp, Homo sapiens
gggacagcgagtcggaggaggacgaggacttggaaggcatttattaatacagcaaaagaaatttatgaaaaaattcaagaag

SEQ ID NO: 278722 - DNA, 100 bp, Homo sapiens
atacttagtggataccatcgaatagtacaacagcctgtggacatctctacagcaatgagtgaacgggcacttgctcagaaaagactcagtgagaatgcat

SEQ ID NO: 278723 - DNA, 88 bp, Homo sapiens
cagcaggcgctggctcctgctcaggtttggtgcacctcgatttggaggaagtagggcagggcccttatctggaaagaagtttggaaac

SEQ ID NO: 278724 - DNA, 75 bp, Homo sapiens
cagcacagccagctcgccgcagccgtggagaacctcaagaacatcttctcagcttcagtatcagacacagcacag

SEQ ID NO: 278725 - DNA, 82 bp, Homo sapiens
aaccctggtcaccgtctcctcaggttgggcccgaaggcatcctgcagaacggggctgtggacgacagtgtagccaagaccag

SEQ ID NO: 278726 - DNA, 88 bp, Homo sapiens
ttcaccgaggcctcaattctgggatttggcagctttgctgtgaaagcccaagaattttggagagtaaaaggctgaaccttgttaaaga

SEQ ID NO: 278727 - DNA, 100 bp, Homo sapiens
agaaaatgaaacaagcctttgctgaattggagagctgttacgatatcagaagtgcttggtagccaggccgccttctcagaaagttcgaccacctccaccg

SEQ ID NO: 278728 - DNA, 100 bp, Homo sapiens
gcctctagctgccacccaggagtctgtacccaccctcctgcctgaggaggcccaggtttcttgagtacaggcgatcaggctgcaaaggggaactatggac

SEQ ID NO: 278729 - DNA, 80 bp, Homo sapiens
cgcgaccaagcgaggcggaccctgaagcggaccccgaggaagagctagagccggtgcaggccacgcagaacaagacaggg

SEQ ID NO: 278730 - DNA, 100 bp, Homo sapiens
ctggaactgtgcccacaccagaagccatcagcagcaaggaatggcggcgctagatagtaaggcatcagggaagatgggaatgcgagctgtagtctattat

SEQ ID NO: 278731 - DNA, 101 bp, Homo sapiens
ggatcctggagtacctgtctggtacctggtacccggcacactgtgagttcctggacatcaagggctggttctgactaataagaagacgaccttctttggtg

SEQ ID NO: 278732 - DNA, 75 bp, Homo sapiens
tcaacaaatataagtatacagcatctgtcctcatagcagtctcacaccattttgctggtacagcctaccaagagg

SEQ ID NO: 278733 - DNA, 98 bp, Homo sapiens
ctgcgtccgttcgcccgaggaagccaaccgcgacttcattgatgcacccattccagtggtgtaacggtacgtacctgtgggcatcatgttccttgttg

SEQ ID NO: 278734 - DNA, 100 bp, Homo sapiens
aaatacatctactcatattgagagctgtcgacagttacgtcaacatctattgcgtctgcagacatggatttcaaccagctggaggcattcttgactgctc

SEQ ID NO: 278735 - DNA, 101 bp, Homo sapiens
agaactgactactttgaaaaacattcaggactactttaatccagctactctacctctaacacagtacctgttaacaacagatgcagaggatgctatttatg

SEQ ID NO: 278736 - DNA, 98 bp, Homo sapiens
ttttcagccccttctttttggactaattggagcagaggtatctattgcatctctcagaccagaaactgtaggtgcaacagctgcagcccggaaagagg

SEQ ID NO: 278737 - DNA, 99 bp, Homo sapiens
tgaaaagtagaatactatttcaccctcgaagtttgcgtggtttacaaatgatccttaacaggggcataaggaaatggtggcaggcacttcctcctaaca

SEQ ID NO: 278738 - DNA, 100 bp, Homo sapiens
aatgtccgcatcgcaaccaccgccctggccatctaccatgtgacataatgaagcctacacctggaccaaccccacctgctgcgtccacaacgtcatcatc

SEQ ID NO: 278739 - DNA, 90 bp, Homo sapiens
tattgctagatacagagggctttgtgaaaattgctgattttggtctttgcaaagaagatgtgttcagagcaacattgttttgttgacaca

SEQ ID NO: 278740 - DNA, 75 bp, Homo sapiens
atagactcccctggatttaagccagcctctcaacagggttattttggagctgttggagcactccttgagctgttg

SEQ ID NO: 278741 - DNA, 101 bp, Homo sapiens
ggcaattgacctcacctcaagcacacccaatggacagcatgcctcaccaagtcacatgacaagcacaatcattccggccaagattccttggtgtggctgaa

SEQ ID NO: 278742 - DNA, 100 bp, Homo sapiens
cgagaaggagggaggggaaacacaaagccggctacgcgctgcgagcactctacacccccaagtgcatatgggtctgtcaaagcctatactaactttgatg

SEQ ID NO: 278743 - DNA, 51 bp, Homo sapiens
tccatattctcaggcacagagaaagtatgccgagattttgctgtcctggag

SEQ ID NO: 278744 - DNA, 75 bp, Homo sapiens
acaacaagcacattaacatcagcttccacagaccagatgatgtgcttctgcatcgcactcatgatgagattgtcc

SEQ ID NO: 278745 - DNA, 50 bp, Homo sapiens
ccgcggtctgggccagggctgggcgctttgtccagggatctgaaaccact

SEQ ID NO: 278746 - DNA, 81 bp, Homo sapiens
aaccccagatccatttacactttacagttcggctttccagtttggcagcagcactacaaatttcaacttcacaaacaacag

SEQ ID NO: 278747 - DNA, 75 bp, Homo sapiens
caaagatcttgcacatgaagctacaaaactggacagttttggcatgtgactgacttacacttagaccctacttac

SEQ ID NO: 278748 - DNA, 97 bp, Homo sapiens
tgaaattcagcggctccctccagaaatagcaaacttcatgcagctggtggaactagatgtgtctcgaaatggtcacagccaagactgcctttctatt

SEQ ID NO: 278749 - DNA, 80 bp, Homo sapiens
agagaggcaaagagaggagcagctggtctcatttgacagctcctctcgggctcttggaccactgcctccttccccttctc

SEQ ID NO: 278750 - DNA, 98 bp, Homo sapiens
cggttccccggcccacagtgggggtgtgcaaacccgagagaactgggacatggatttgattgacatactttggaggcaagatatagatcttggagtaa

SEQ ID NO: 278751 - DNA, 100 bp, Homo sapiens
ggattccatggtagctgggatgttagggctcagggaatgaaagctactggttgattttaaagtgcctgggcctcacaggtttggagatgtcccagaataa

SEQ ID NO: 278752 - DNA, 102 bp, Homo sapiens
acaggtgtgcaccaccacgcccagagtcaatgcatgtgttgatgtggtgctctcaggggtgaagctcttgcaggcacttggccttagtcctgggaatgggaa

SEQ ID NO: 278753 - DNA, 90 bp, Homo sapiens
cgagtggtgctggcctccttcctgctcctgctgctggggctgggcctcctctagcccgtggaatccaaccccggctcctgtcagcagccc

SEQ ID NO: 278754 - DNA, 100 bp, Homo sapiens
ccgggcgcaatggagcggaagagggtgctttcttctgcgacctggtactcatctacctcatcaaaaagagagagttttaccgtgacaagaagtacgagga

SEQ ID NO: 278755 - DNA, 100 bp, Homo sapiens
ctcagttttctggagtgctttggaggagagcgaacacttgccaagtatttcaatccttgctatgccactgctaggttaaaaccaacattcatcagcaagg

SEQ ID NO: 278756 - DNA, 74 bp, Homo sapiens
ccttagagaagaagtcggagttgaaggtaattgaacggcgcattcggcaagagctgcctttcatggccacagag

SEQ ID NO: 278757 - DNA, 133 bp, Homo sapiens
aaaaaaagagaaacctgggtgaactttcacggacaacctcagaggacaacgaagtgttcggcattgtttccaagtcgtacgagtgccgtctaaagggacaaggagccaccttcgtggagacagacagcccctt

SEQ ID NO: 278758 - DNA, 75 bp, Homo sapiens
gctacctgtgaacagtacgcagtgaatgtttggtgccagtgaagaagaggacacatgaaggcttgctacccccag

SEQ ID NO: 278759 - DNA, 92 bp, Homo sapiens
tcgcctcgggtctcgggggccgctctgggatcccggccaccagcaattgtccgaatgtggaggctgtggacccacgaggtcgaacattattg

SEQ ID NO: 278760 - DNA, 74 bp, Homo sapiens
cttgctcggccgatgaagtgcagaggtttttttctggacacagcattgttggttttgccatgtactattttacc

SEQ ID NO: 278761 - DNA, 82 bp, Homo sapiens
cttgcagcatattacctatcaggagaggagatactgagccttcataagggttgactacctcagatttgctgcactcattgtg

SEQ ID NO: 278762 - DNA, 74 bp, Homo sapiens
ggagctcggggactcccccaaagacaagagtgttctgccagttctggataatccactgtccaagaaggttcgag

SEQ ID NO: 278763 - DNA, 75 bp, Homo sapiens
aaagagcacgaggagttccagataactgcaaaggatgtgtttcacatggtagttgaagtaccacgctggtctaat

SEQ ID NO: 278764 - DNA, 110 bp, Homo sapiens
gggccttctacaaccatgggctcctctgtgcatcctatcccatccccatcatcctcttcacagggttctgcatcttagcctgctgaaatgcactcggtgatggaaagaga

SEQ ID NO: 278765 - DNA, 99 bp, Homo sapiens
tttttggaggttgggaaagttgctagaggcttcagaactccagcctaatggatcccaaactcgggagaatggatgaaagaagcaggagtagaccatagg

SEQ ID NO: 278766 - DNA, 76 bp, Homo sapiens
gtcactgcctgcgcagctccggccgcctggctccccatactagtcgccgaagtccccacgagaagaagaagaagag

SEQ ID NO: 278767 - DNA, 88 bp, Homo sapiens
tggtttgatactgacctgtaaatcatcctttagaatttgatggagcttcttgaggcagaaaaagaacgcaataacaaattatcattac

SEQ ID NO: 278768 - DNA, 80 bp, Homo sapiens
agcctgcggagcctgtggggcaggtgccctacgagacgctgaacaaacgctttcgcgccgctcagaagaacattgaccgg

SEQ ID NO: 278769 - DNA, 74 bp, Homo sapiens
aaagaagctgcagcggaggaaggcgagaatgtgacagtgatgataacatgggtgccaaaaatacttcaatagga

SEQ ID NO: 278770 - DNA, 100 bp, Homo sapiens
attttaggcgcaggaagttccagctctgcgccgatctatgcacgcagatgctggagaagtccccttatgaccaggaagcaatgaggctccccaagaacac

SEQ ID NO: 278771 - DNA, 74 bp, Homo sapiens
ccctcctcctgctgttctcgggagccgtggccctgatccagacctgggcagcacaaacacagagcagtctaaag

SEQ ID NO: 278772 - DNA, 100 bp, Homo sapiens
atgaatttgttactttttcttgtccgggtgcggataagggacccgacactgatatgtgttcagagcaacattgttttgttgacacaagcatttagaagaa

SEQ ID NO: 278773 - DNA, 100 bp, Homo sapiens
gtgttgatcaggagtgaattcacagtctaccatgaattggaaggatcaacactctgtggtaggccagaacacaggccccagtccaagtcctaacccctgc

SEQ ID NO: 278774 - DNA, 80 bp, Homo sapiens
cagggctgccgatgggaaatcccaggctgccgcggctcctgtgtgctttgaaggctccctggggaagggaatgcagggtt

SEQ ID NO: 278775 - DNA, 96 bp, Homo sapiens
tgacagcagtgccgactggttctccctgggctgcatgcttttcaaacttctgagaggatgctcttcccgagggagatgctagccctttgggtcctt

SEQ ID NO: 278776 - DNA, 75 bp, Homo sapiens
gtgcaggaaaaatgttcactgcagggaccagttactctccacaagaaaattcacacaaccacagtgctcttcata

SEQ ID NO: 278777 - DNA, 96 bp, Homo sapiens
tccctatgacgcgtttagaacgggtcacgtgagcgcctcgcctggatgtgagtttcagccagggtttggacagaggagccaaaggccaaatttcca

SEQ ID NO: 278778 - DNA, 100 bp, Homo sapiens
catggaagctttggagcagtgtattttcgagcccaagctgcactgcaggctgtcagtgccgtccaatcaggaagcctggccctttctggaggtccttcca

SEQ ID NO: 278779 - DNA, 50 bp, Homo sapiens
ttgtcgaggaggtttgccgcggcaggttatgaagacagtatggagtttcc

SEQ ID NO: 278780 - DNA, 82 bp, Homo sapiens
ccggcggggaccgctgggaaggcgaggacgaggacgaggacgtcaaggatttgcctcaaagggcactgcaaaaattgaacag

SEQ ID NO: 278781 - DNA, 75 bp, Homo sapiens
catgctgcagttttatattccggaggtagaaggcgtagaacagggtaatagatggtctggaaactctagatgagt

SEQ ID NO: 278782 - DNA, 83 bp, Homo sapiens
acgagacggcggcgcagcggtacagcgcccgactgctgcaggccggctacgagcccgagagcttcgagagctgtgcccaggag

SEQ ID NO: 278783 - DNA, 50 bp, Homo sapiens
ctggaactatttgtcctcttccagaattgaaattacagaagacatccccg

SEQ ID NO: 278784 - DNA, 82 bp, Homo sapiens
tttgggtttcatttgtaaaggagccggagccccaggtcacgagaagagaatgccttctagatgcaaaatcacctccaaacca

SEQ ID NO: 278785 - DNA, 75 bp, Homo sapiens
tggtgcttgccgcagccagcaactatttcagggttgccatagtttctaaatcttttgaaggaaaaactgatcgca

SEQ ID NO: 278786 - DNA, 83 bp, Homo sapiens
ttatgctgtacatggaaatcatgtgaaatgtgtaaagatgctcttaggttacttcttgctgcagattctgcgcaggatcggag

SEQ ID NO: 278787 - DNA, 76 bp, Homo sapiens
caaaggatcaaatgctttgctgaggaacagcggctcacaggaagaggatggagatgaagatgaggaagctgagtca

SEQ ID NO: 278788 - DNA, 98 bp, Homo sapiens
aggacgaggacgaggacgagatggacctggagcccaacgtcaaaccggcacgatgtccaggcaccagaaccagaacaccatccaggagctgctgcaga

SEQ ID NO: 278789 - DNA, 51 bp, Homo sapiens
ctttaaatagtggaggcggaaagtggttatccaaatgccaacccagtccag

SEQ ID NO: 278790 - DNA, 100 bp, Homo sapiens
ctgcaagtatggagctcaagttcttaattattcagaatgctgcggttttccaaggagttaaagttcctcgtaattttcgcttgttggaagaacttgaaga

SEQ ID NO: 278791 - DNA, 105 bp, Homo sapiens
agggcacccacagcgctcacgtgccttccatggtgggggtgaatcctttgccaatagtgcctggtgggtttcagtgcacagccagagaacaacacatcacacaca

SEQ ID NO: 278792 - DNA, 90 bp, Homo sapiens
gcctcgtgggagccccgcgggtcctgcccagggccatgaagcccccaggaggagaatcgagcaatctttttggaagtccagaagaagcta

SEQ ID NO: 278793 - DNA, 75 bp, Homo sapiens
caatggagattggatggatgcacaatcggagacaaagttccaatgacaggatttacacagagagcaactattgat

SEQ ID NO: 278794 - DNA, 90 bp, Homo sapiens
gtttgtggaactggattgaattaaacaagacgtgcaaagcaagtggttcacgaggatctgtgccagttcagaagcaggcgagcctcttcc

SEQ ID NO: 278795 - DNA, 51 bp, Homo sapiens
tagacggccagccagtcatcaaactgtttctgaaagatctatccagcactc

SEQ ID NO: 278796 - DNA, 75 bp, Homo sapiens
gtagacgcgggcagtcagctagcagagatgctgcccccacccccttaggcccgagggatcaggagctatgggacc

SEQ ID NO: 278797 - DNA, 98 bp, Homo sapiens
ccacctgtgtcctggttgagggtctccagggttctttggggcccgagatggagtctcgctctgttggccaagctggagtgcagaggcgcaatctcagc

SEQ ID NO: 278798 - DNA, 51 bp, Homo sapiens
cgcgagtgaggaaaggaggtactgtagtgcaagagaagcctgagccagtgc

SEQ ID NO: 278799 - DNA, 99 bp, Homo sapiens
gacctttttgaggaaaaaataaagaggagtccgttaactatctgttatccagaatacacaggtgtggtgttgggtggctgtggtgacaaatccattcgt

SEQ ID NO: 278800 - DNA, 83 bp, Homo sapiens
gccaacgtgggctcgctcttcgacgacaacatccagtcatggataaaaatgagctggttcagaaggccaaactggccgagcag

SEQ ID NO: 278801 - DNA, 75 bp, Homo sapiens
ccactgtcttgttccgaggcggccccagaggtgtgatgaatgcagactctgctaccattttggctgtttggatcc

SEQ ID NO: 278802 - DNA, 50 bp, Homo sapiens
ctctttgaatatgactctgcaaagtgcagaatacagaaactgcagccatg

SEQ ID NO: 278803 - DNA, 101 bp, Homo sapiens
tctaaagaaacgactcagggactgcggcgcttgcacgtcaacgggaggtgtgagcccaaagctgctctgttaaaagcgaaaatgaaacaattgcctgcggc

SEQ ID NO: 278804 - DNA, 100 bp, Homo sapiens
tgtggcaggagcttttcgtaaagggaagtcatttctactggacttcatgcttagatacatgtataacaaggagtccttcaataatgttaaacagtggctg

SEQ ID NO: 278805 - DNA, 100 bp, Homo sapiens
caacttcaaagtgggctacaacactctcttttcctgtacctgtgtgccacctgacccaggtgagagttacgtgtgtgcatccaatgaaccatttcgtaaa

SEQ ID NO: 278806 - DNA, 88 bp, Homo sapiens
ggttggaaatggcacctatggacaagtctataagcactttcagaccatgctgaagtctaaattgaatgtcttaacactgaaaaaggaa

SEQ ID NO: 278807 - DNA, 82 bp, Homo sapiens
attggtatcaagcgggcctgggatgtggccaggcttcagtcactggacacaagctttctggtccggatgctgctgatagcac

SEQ ID NO: 278808 - DNA, 100 bp, Homo sapiens
aaataaatacgatccattcagtagaaaccctctgttctgtggagctgaaaatacaagtctttgggaactcaaaaaggctccttgccagaggcctccactc

SEQ ID NO: 278809 - DNA, 88 bp, Homo sapiens
aagccggcggacggttttcgtacgggcggccgtgcgcgaggcgagattctgcttctcagaagatgcactattatagatactctaacgc

SEQ ID NO: 278810 - DNA, 100 bp, Homo sapiens
cagagttcaaggaggccttccagctgtttgaccgaacaggcatccgtgtcattctggaccttactcccaactaccggggtgagaactcgtggttctccac

SEQ ID NO: 278811 - DNA, 50 bp, Homo sapiens
cctagtacctcctaccattgtcaactggatcgaggccatcaagctacaga

SEQ ID NO: 278812 - DNA, 88 bp, Homo sapiens
gtggttagcagtactgtgactgggccacgtgtggaggaggccatgtacaggagagaagatgactgaggaggaggtggagaccgttctg

SEQ ID NO: 278813 - DNA, 90 bp, Homo sapiens
catgatttaaacaagagatttccacagaaggctacagctatgagcgtgtggatggttctgtgagaggagaagagagacacttggccatta

SEQ ID NO: 278814 - DNA, 112 bp, Homo sapiens
tgcagcaggctgagctggaccacctgtctggacgccacaaagacaccaggaggaattccaggctggatgatcctttcaaaaataaagccttgttatttagcaacaacacgca

SEQ ID NO: 278815 - DNA, 82 bp, Homo sapiens
tgaactggatcataaatgacagtttggtgccctggttgtcagatgttggaaagcagtaggacggaacatactcttcgtggtt

SEQ ID NO: 278816 - DNA, 101 bp, Homo sapiens
gaaaatagcctttgccatcactgccattaaggtttgcagtacccgaagccctgagcacaatacagaaagctgaggaggttctgtcgctgcactgtggccca

SEQ ID NO: 278817 - DNA, 75 bp, Homo sapiens
ccatgcacttgttgcagaaacagccaagtcttcccgaggctgctgtccatgacactgagtccagatcttcacatg

SEQ ID NO: 278818 - DNA, 90 bp, Homo sapiens
ggaggtcagaggccctttcatcatcaggctactgcagcactggggtgtcagttgttggtccgacccagaacgcttcagttctgctctgca

SEQ ID NO: 278819 - DNA, 101 bp, Homo sapiens
ggtcagtgtgcttgcttggagatcaggacgcaaaggcatggagaagcatattgaagaagatgaggtcaggtcatcggcagaccttcggattcggaaatccc

SEQ ID NO: 278820 - DNA, 100 bp, Homo sapiens
ggatgacattggaaggagggcagaaatgaatgaacttatggagcagacctcggagatcatcacgtttgccgagtcagcatcaggtattatctactgctgt

SEQ ID NO: 278821 - DNA, 75 bp, Homo sapiens
tcctatatgggtccccaacagctgaaaatgtggggaagccaacaatcattgagggaagtgttcgccagttactac

SEQ ID NO: 278822 - DNA, 73 bp, Homo sapiens
ttgattcgttccgtgctgctgcagggttccttacctggctgtggcccggacgtttgagaagatcgaggaggtg

SEQ ID NO: 278823 - DNA, 75 bp, Homo sapiens
ggctgtgatgctcgggagggagactgttgttcccggagatgcggcgcgcaggaaatgggtcctgatgaatatgaa

SEQ ID NO: 278824 - DNA, 90 bp, Homo sapiens
catttttccagccagcgtgtgcttacttcatgtctctgggtcacattttgaaactcagagaatatttggaaggcagtaatctcatcacaa

SEQ ID NO: 278825 - DNA, 100 bp, Homo sapiens
tacatccaggagcctcccacgaatgggaagaagttaccccccaagcgtccagaactccctccaactctaatgagaatgaaagatgagcctgaagtagaag

SEQ ID NO: 278826 - DNA, 96 bp, Homo sapiens
aattccacttaaaccacatcaacagagaatggcaggatgaagttaaaggaagtagatcgtacagccatgcaggcatggagccctgcccagaatcac

SEQ ID NO: 278827 - DNA, 98 bp, Homo sapiens
ctatttctctagctattgccttattttttctcatggatgttcttcttcgagtatttgtagaagggagtctactcttcatcttgtgttgagacttcgtg

SEQ ID NO: 278828 - DNA, 83 bp, Homo sapiens
tattgacctcgactcccatgcgagttaaacatgaagtttctggagagacagtggtatttcaagggggagctcttggcaaaaca

SEQ ID NO: 278829 - DNA, 100 bp, Homo sapiens
caagtgtcacggcatacaagcaggatttaagcgagagcctcactggttcccaggacatcaacctgaactggatcctccccgatacaaatgcacagaaaag

SEQ ID NO: 278830 - DNA, 101 bp, Homo sapiens
cttaataaagtgtttgcatctcagtggttgaatcataggcaagtggtgtgtggcacaaaatgcaacacgtgggtaattccagaattgattggccataccat

SEQ ID NO: 278831 - DNA, 100 bp, Homo sapiens
atggcaccgcaagccgtccccggccacgcgggacgggatgggtcatcagttaaggaagttgaaacctaccaccggacacgtgctttaagatctttgagaa

SEQ ID NO: 278832 - DNA, 74 bp, Homo sapiens
ggcactgaggctctggaacttctgcccagctctccttggtctctggacactatgggcacacgactcctcccagc

SEQ ID NO: 278833 - DNA, 75 bp, Homo sapiens
gggagacgtgctggacacactggaggcgctgggacccaacatgagtgaagtttcctgcaagaaacgggacgacta

SEQ ID NO: 278834 - DNA, 100 bp, Homo sapiens
atggtgtggggttggtgtgattagcttcgcagtctggaaagctttaggagttcacagtaccccaccaacaactgaacgctttggtcaggctgctacaatg

SEQ ID NO: 278835 - DNA, 98 bp, Homo sapiens
gttccaatgagacagggcacaccaaactccatctgaatttcgctaaggagtttgtgatcagtgatcggaaggagctggaggaagatttcatcaagagc

SEQ ID NO: 278836 - DNA, 130 bp, Homo sapiens
cgcggtggattcagaggaggtcgtgggggccgggagtttgcggattttgaatatagggtgttggggcgatgtttcctgactgtggtgcaagtccatttccagtttttgactcatgcgttacagaaggtcc

SEQ ID NO: 278837 - DNA, 100 bp, Homo sapiens
gttcgtcttcaattcttgacttgtgtattttcaactctgggatcacctgatcatttcacctaaacccaccaagggacgaatgcgcatccactgcttagag

SEQ ID NO: 278838 - DNA, 50 bp, Homo sapiens
ctttgtcagctcccgcacagtaacaatttattgttcaccgatgaaaatga

SEQ ID NO: 278839 - DNA, 51 bp, Homo sapiens
gcggaggtcgataagctggaactgatggcctaatgggattgtttgaaaaac

SEQ ID NO: 278840 - DNA, 75 bp, Homo sapiens
aaggagaagctgcagatatggaaggcttacctatttctactccatgtaccaccataaacaaagtttgtgcttcag

SEQ ID NO: 278841 - DNA, 98 bp, Homo sapiens
accgggatcggttgccttgagcctggacaggaagatgtcacccaagcgcatagctaaaagaaggtcccccccagcagatgccatccccaaaagcaaga

SEQ ID NO: 278842 - DNA, 83 bp, Homo sapiens
tgacgtggagcggtacatcgcctcggtgcagggctccaccccgtcgcctcgacagcaaccatgtccaagggacctgcagttgg

SEQ ID NO: 278843 - DNA, 100 bp, Homo sapiens
caaaaactgacactcgattcagctattggaaagtttttttaatgtggttggaacaactgagccttatgtttgatcatcggccaaggtcctggcgagaact

SEQ ID NO: 278844 - DNA, 100 bp, Homo sapiens
tctgctcttcctcccttcgctcgcaccatgtatccgtaccattctgatgttttgagacaatacagatgttttcccttgtggcagtcttcagcctcctcta

SEQ ID NO: 278845 - DNA, 98 bp, Homo sapiens
tcttcccaaatgtagagacacaatgcgggacagcctcagccaggttctccagagatccgctacatctgttacttttgttggtgttatgggaatgagat

SEQ ID NO: 278846 - DNA, 75 bp, Homo sapiens
aaagtaatgttaacaataacccaggtaccaggatcatctatgaccggaaattcctgatggagtgtcggaactcac

SEQ ID NO: 278847 - DNA, 100 bp, Homo sapiens
ctgggccgcaatggacaagctgaagaaggtgctgagcgggcaggacacggaggaccggagcggcctgtccgaggagggtgcatctgcccggaagactcag

SEQ ID NO: 278848 - DNA, 90 bp, Homo sapiens
tgaaaatccatggacaagatcctgtttcatttcaagatgtcaagtacgaattggagcaatgttggcttatacacctctggatgagaagag

SEQ ID NO: 278849 - DNA, 101 bp, Homo sapiens
catgccgtgtgtgtgctgggcaccttgactcagcttgacatctgcagtgcaccaattccagctggacatcactgtgaaaatgggacgggataaagtccgag

SEQ ID NO: 278850 - DNA, 100 bp, Homo sapiens
cgagaggaggccgtccagcagatggcggatgccctgcagtacctgcagaaggtctctggagacatcttcagcagaacatccagtcatggataaaaatgag

SEQ ID NO: 278851 - DNA, 75 bp, Homo sapiens
aactacaaatgagcgcttcctgaaccagagcgggaagctgagccgagagctggactttgtcagccaccacgtccg

SEQ ID NO: 278852 - DNA, 86 bp, Homo sapiens
acggcacctcgggggccacactgcaggcctccgcgctcagtgatttattgctaaacatgggtgcatttttggataaacccaaaact

SEQ ID NO: 278853 - DNA, 98 bp, Homo sapiens
gagggagaagacgaggatgatgcggaaattaaccccaaggccaaaggtgtccaaactatacagacccacagaatctaacaacagatgtctcaatattc

SEQ ID NO: 278854 - DNA, 80 bp, Homo sapiens
gactccgtgggcgtaggaccctccgagccagcttggctgaagaggaaataaaaacagaacaggaggtggtagagggcatg

SEQ ID NO: 278855 - DNA, 75 bp, Homo sapiens
ggatgagttcccaaacctgaaggctttcatgtgccgttttgaggcccagagcaagagaggcatcctcaccctgaa

SEQ ID NO: 278856 - DNA, 49 bp, Homo sapiens
atagcctgaaggcagccattcagtagtattattgattccacagaataca

SEQ ID NO: 278857 - DNA, 100 bp, Homo sapiens
cggacggctgcgtcgcccgaggcgaggaggagcgctggcggtaaaataccatgaagattttgaaaaaacaaaggggagaggctttactcccgtcgtggac

SEQ ID NO: 278858 - DNA, 100 bp, Homo sapiens
accactcgttgctgacagtcagaaatgtttctgaaagatctatccagcactccgatggccagcaacaacaccgccagcatagcacaagccaggaagctgg

SEQ ID NO: 278859 - DNA, 97 bp, Homo sapiens
cgctgctgtgcggagacccccgggtgaagccaccgtcatcatgtctgaccaggaggaggaaggtgaggacggcgatccatcgtcagggcccccaggg

SEQ ID NO: 278860 - DNA, 75 bp, Homo sapiens
tacagcctttgcctgcttggcctatcaagtgtcttcattggctgctctggcatggagctgatatcacacacgtaa

SEQ ID NO: 278861 - DNA, 90 bp, Homo sapiens
cgcagggctattcagctaagtatgcaagttgatgcgatgaagagagttgaagaaatcaaacagaagcgccaagctaaatttataatgaac

SEQ ID NO: 278862 - DNA, 80 bp, Homo sapiens
atcagaagacaatatcatgcaagtgtggcaaatggcctactgaacttgacgcactggtatttggccatctatacaccatt

SEQ ID NO: 278863 - DNA, 88 bp, Homo sapiens
gttcctgaggccagggcatgaccctgtgcgggagaggctcaagcgggacctgttccagtttaacaagatccaaaagaactcaggcaga

SEQ ID NO: 278864 - DNA, 75 bp, Homo sapiens
aacagctcgtacaccttctagccgtgttctacagagtaaggagaaaatacttacagattcctacaaattcagagc

SEQ ID NO: 278865 - DNA, 82 bp, Homo sapiens
ctctccctgtcctagctctgtaactgtttacagccttgtacctcattgccaccaatgggaccccagaacttcagaacccaga

SEQ ID NO: 278866 - DNA, 75 bp, Homo sapiens
tgtgcagccgcgaggaggcgcgggaggtgttcgagaacgaccccgagacgatgcctgctctgtgcctgtatctga

SEQ ID NO: 278867 - DNA, 99 bp, Homo sapiens
tcagttcctcaaatatgcagcaaagattacaccaagatctgtgctgaccacaggaattggatctactagtgcaggaaggaaaggaggtgagctggcctc

SEQ ID NO: 278868 - DNA, 95 bp, Homo sapiens
ccagcttgtcatccccgacggacaggaggaggagcaggaagctgccggggaagaaatttaaaagcctgttgattcaagaactttctaaagtattt

SEQ ID NO: 278869 - DNA, 83 bp, Homo sapiens
ccccacgcaaccccagatccatttacactttacagtggaccaggtgctctgaggctggcgtacagacacagcacgtgcgacgg

SEQ ID NO: 278870 - DNA, 51 bp, Homo sapiens
cagaaatgagatccgcttcctgcccaacggcgaggaggatggccgagacca

SEQ ID NO: 278871 - DNA, 88 bp, Homo sapiens
tggatgactgagtacctgaaccggcacctgcacacctggatccaggataacggaggctgggcactactgcagtcttcagttaagcaac

SEQ ID NO: 278872 - DNA, 83 bp, Homo sapiens
ctcagtttgttccaaaacaatgaattacatgaatgacagtcttcgaaccaatgtgtttgttcgatttcaaccagagactatag

SEQ ID NO: 278873 - DNA, 88 bp, Homo sapiens
cagattcgcagtggtcgcttcttctccttgatggggtcgaggatttggtcttttgggttccatttttggaaaggatggtgtattaaac

SEQ ID NO: 278874 - DNA, 82 bp, Homo sapiens
gtaagaagaggtcccaatcccccactctttccgccctaatggaggtctccagtttcgggcacctggacgatgacggattacc

SEQ ID NO: 278875 - DNA, 74 bp, Homo sapiens
gctttccacatgaaccctgaaggctatggagttactagtagagaaagcaatcagcagtgcttctagccctcaga

SEQ ID NO: 278876 - DNA, 75 bp, Homo sapiens
cggatgagtacgataccgaagcgggctgtgtgccccttctccacccagaggatgatgatgctgaagctatccttg

SEQ ID NO: 278877 - DNA, 75 bp, Homo sapiens
gcgaaacgccgacagatcccagtgctgagaacatcaccaccctgaagccagagactaacactgcaggactcagca

SEQ ID NO: 278878 - DNA, 80 bp, Homo sapiens
ggaaccctggtcaccgtctcctcaggatgcctaaatcaaaggaacttgtttcttcaagctcttctggcagtgattctgac

SEQ ID NO: 278879 - DNA, 100 bp, Homo sapiens
agtgaggaattttgaagtacaccgtggtgacattgtatcattggtgtcaaaatgcagatcttcgtgaaaacccttaccggcaagaccatcacccttgagg

SEQ ID NO: 278880 - DNA, 83 bp, Homo sapiens
aagggccgtggctcaagcaggacaatcgcactttataccacctgcgattactgagggccgcaagaacgagatgctgctgtcca

SEQ ID NO: 278881 - DNA, 100 bp, Homo sapiens
gtttttttgtttcagagaattggaagctaaagctaccaaagacgtagaaagaaatcttagcagtgggtaattccagaattgattggccataccattgtca

SEQ ID NO: 278882 - DNA, 75 bp, Homo sapiens
ccagatgatgaactacttccttgtctgtgctgagacctataaccctgatgaggaagaggaagatacagatccaag

SEQ ID NO: 278883 - DNA, 76 bp, Homo sapiens
cttcctggcccgaaaggagagcctggcagcaggatgggtgtggaagcagtgatggcacttttggaggggaccccag

SEQ ID NO: 278884 - DNA, 100 bp, Homo sapiens
attttctgacatcaagtcccacgcgttcttccgcagcatagactgggacttggtactggctgtgatcgaacttctcaaccctcagagacttagatcttcc

SEQ ID NO: 278885 - DNA, 100 bp, Homo sapiens
acggccgccttgccccggacccgcggcgccggcctcttggagtcggagcttcgcgacggcagcggcaagaagatcctaattatctcatggctaatgaacg

SEQ ID NO: 278886 - DNA, 90 bp, Homo sapiens
gcgaaagctattccttcaaggatacttctactggtcataagaataaggagtttgtggcaaggattactctgtggaaggtatgagtgattc

SEQ ID NO: 278887 - DNA, 96 bp, Homo sapiens
gaaagtcctcgctcgtcaccagcaagcttgcgggcatgtattccactgatgagaacctgatcctttccccactcctgggtaacgtctgcttctcca

SEQ ID NO: 278888 - DNA, 101 bp, Homo sapiens
gctcttttcatcttcacggccacccacagaaatgaagcagagtggcctagcctcgagctgtggcaggttttcgagggacagttcgttatgcatcaatcaac

SEQ ID NO: 278889 - DNA, 99 bp, Homo sapiens
tggccaacatctttgcaggtgtgcatgacagcatggacagcgactgcgaggtgctgggaggtccaatgaagcgtcaagtggcagtaaaatcaacccgag

SEQ ID NO: 278890 - DNA, 128 bp, Homo sapiens
gtggccgtggctgacactaaagactttgtagccatcaacccgagtgcagtttcgatggaaaatgaaggaggatacttcatcgagacttaaagtcaaagaatgtatttctgaaaaataatctccttaaa

SEQ ID NO: 278891 - DNA, 74 bp, Homo sapiens
tttgctgacgatgacaacacctacagccgggagctgtttgaggagatcctgtttgaccaaactcagagatcaat

SEQ ID NO: 278892 - DNA, 101 bp, Homo sapiens
tgaggtggatctgacagatgccagcgtagctgaatccagtaccaaaaacgtcaacaacagttttacgcatacgatgaggcctatgctgaattccagaggtt

SEQ ID NO: 278893 - DNA, 75 bp, Homo sapiens
ctgtatcagaagacaatatcatgcaagtgtggcaaatggattatatgcgtcaggcaggagaagtgacttatgcag

SEQ ID NO: 278894 - DNA, 75 bp, Homo sapiens
ccgggaggggggagcggcgttggaggccaccgtttccagggtgataaaagaaaatgtggctgaagttacccgaag

SEQ ID NO: 278895 - DNA, 75 bp, Homo sapiens
atttctacgacccggagcacccgacccctgactgatgactatcagccagttcgtctgctcagtaaacctggggaa

SEQ ID NO: 278896 - DNA, 100 bp, Homo sapiens
ctgaagtggaagaacaggagaagcaactgacgacagatgctgcccgcattggtgcagatgcagcccagaagcacctgggttcagcaatacgtcactgatt

SEQ ID NO: 278897 - DNA, 73 bp, Homo sapiens
gcatcgggatggcttctcctgcagtgatctaccccaacgagagacacagtattcgctgccccgagtcgggcga

SEQ ID NO: 278898 - DNA, 100 bp, Homo sapiens
caccgaggctggagggggagaacacccaggaaagaaccggaggctgaagcaggccaaagaagaagctcaggctgaaattgaacagtaccgcctgcagagg

SEQ ID NO: 278899 - DNA, 100 bp, Homo sapiens
tctcaaccttgtgggatgtgaaaactctgttactgaagggacaggagagagtggcaagagtacgtttatcaagcagatgagaatcatccatgggtcagga

SEQ ID NO: 278900 - DNA, 88 bp, Homo sapiens
aatgatgagggacaacctctttgaaattgtaacaacgtctcgaactttctatgtgcaggggaaagtggagatgacattggaaatcctc

SEQ ID NO: 278901 - DNA, 74 bp, Homo sapiens
cgggagacagcgtccacagcctgctcagcatcctggacatcatcaccgtgaatgaaaactttgccattgatttg

SEQ ID NO: 278902 - DNA, 48 bp, Homo sapiens
gcccaagtccctctactcgcgaggcatagaatgtcaagctaaccaggc

SEQ ID NO: 278903 - DNA, 75 bp, Homo sapiens
cgccttcacccgcttcaccaaccagacccagggccgggaccgactcttcagcctctgcagagatgtgggcagctg

SEQ ID NO: 278904 - DNA, 78 bp, Homo sapiens
agtggcaggtgacagtctgcatgtgcagttttcagtttgaaattggcacaatggaagaagctggaatttgtgggctag

SEQ ID NO: 278905 - DNA, 98 bp, Homo sapiens
gcgcgggctggttcgggatgagcgatggcatcggtcaaggtggccgtgagggtccggcccatgaatcgcagattcaagatggaaaaggtgatgtaacc

SEQ ID NO: 278906 - DNA, 101 bp, Homo sapiens
tgcccacggattccagagccaatcccagatttcgcaattcttctttccacttaaactctgaaacaggcactttgagcccgaacccagccctcaccttctgc

SEQ ID NO: 278907 - DNA, 100 bp, Homo sapiens
agcggcggcgtcttatccaaccttgcgctgcatccgctcgacctcgtgaagatccgcttcgccggctggagcattggatttgctaaaggagcttaagaat

SEQ ID NO: 278908 - DNA, 90 bp, Homo sapiens
gggcccgagggtctggctgtcgcagcgccgggccgccccgactccgagcggctgctgagatgagtgcagagtctcactctgttgcccagg

SEQ ID NO: 278909 - DNA, 100 bp, Homo sapiens
ggcccagtcagaatcaggagctgccttcctgctcttctaggacacattcagctaacgtattttagcaggtggagtgaggttgaagattcctgtgacagcg

SEQ ID NO: 278910 - DNA, 83 bp, Homo sapiens
agcgactcttctgacctccgcgcgacgtacccgccgccgccgttggctggagccccactgcaggccccaccatggcgccgttc

SEQ ID NO: 278911 - DNA, 100 bp, Homo sapiens
aaatacatccaggaaagacatggagattctcttaaaaagaactgataaatttcaaacggaagagagtggcagcatttagaaagaatctaattgaaatgtc

SEQ ID NO: 278912 - DNA, 50 bp, Homo sapiens
gccagctggagctgtcctgtatgaggagaccaggcacctggatgagatga

SEQ ID NO: 278913 - DNA, 137 bp, Homo sapiens
tcgttaagggactcaggcagtacgggaagaacttcttcagaattagaaaggagctgcttcccaataaggaaacagagccgtcactctgctaagcctgtatctgctgttcggctacggagcgtctctgctgtgcaatc

SEQ ID NO: 278914 - DNA, 85 bp, Homo sapiens
gtgagagccggacgggcactgggcgactctgtgcctcgctgaggggggatatgagactttctactcggaatatcctgagtgttgc

SEQ ID NO: 278915 - DNA, 100 bp, Homo sapiens
ggatgctgccgtgcctcgtagtgctgctggcggcgctcctcagcctccgtcttggctcagacgctcatgttgccaaaacaaaggggatttggtgatggag

SEQ ID NO: 278916 - DNA, 50 bp, Homo sapiens
cgctcttgacagccaggtaccagagtgttgcggagataggaacatgggag

SEQ ID NO: 278917 - DNA, 90 bp, Homo sapiens
ttgatgccagacatcatgagggccgttaccattacgatccatctccgattcctccattgcatatgtaacctggatggagaggaccatgcc

SEQ ID NO: 278918 - DNA, 51 bp, Homo sapiens
ccttctgcgaacactgtgcgggatttccctcaaggacgttttgttctgaag

SEQ ID NO: 278919 - DNA, 90 bp, Homo sapiens
gtttgcaccatttaaaatttcttgtgtatgatctcgtgaaatcttgagagaaactgaatgacgaatgaaactattgttcctgtttcacac

SEQ ID NO: 278920 - DNA, 85 bp, Homo sapiens
aactctgaggagtttgctgcagccatgtccagatgcttgaaggcagcatgttcgttaagagtcatcaccactccctaatctcaag

SEQ ID NO: 278921 - DNA, 128 bp, Homo sapiens
cgccctcggcccggacccatgcagcttgggcccgcatcatcgcttgttcgctgtggcagaggtaaaacttcgagatgatcaatatacactggaacacatgcatgcttttggaatgtataattacctgc

SEQ ID NO: 278922 - DNA, 96 bp, Homo sapiens
tggaccctgtgtggaagccattcacagtgcccttggtgtccctgtgtgatggggacatggagaagcccatccagagcactgcagtttcctcctgaa

SEQ ID NO: 278923 - DNA, 100 bp, Homo sapiens
actagttggaccccatcctcgtgctggaggaacagaaacatgagttctgctggcgctgatgggagaaaagcgatgagaagatgtgacggactcattgact

SEQ ID NO: 278924 - DNA, 100 bp, Homo sapiens
cgtgtctgcaagagagcatcctatctggttcacagctggagcaaagctgttgtttcacctgaggcagctgctgaaggagctgaagggactgagttgcctg

SEQ ID NO: 278925 - DNA, 85 bp, Homo sapiens
ctcccaaggtgctgggattacagaattagacctttacgagaagcacagttttgtcttcagtttcctctccccccacccggaatgg

SEQ ID NO: 278926 - DNA, 100 bp, Homo sapiens
aacccaagaatgccttcttggcacctgcctgccttccaggtgacaagtttcggttggtcatagctagtaccttgtatgaagatggtaccctggatgatgg

SEQ ID NO: 278927 - DNA, 51 bp, Homo sapiens
tgattcgggaatatcggcaaatgtcatcaggtactcacaggttgactgcag

SEQ ID NO: 278928 - DNA, 96 bp, Homo sapiens
gactacactttgggagtgaggacagccaagggtcggagcacctcctcaatggacaggccttctctggggaggtgtcggatgatttatcagagacag

SEQ ID NO: 278929 - DNA, 75 bp, Homo sapiens
cccctaacaacccagcagccacagaaatgaccatggttgacacagagatgccattctggcccaccaactttggga

SEQ ID NO: 278930 - DNA, 100 bp, Homo sapiens
agaggacggaaattaagtggagaccaaataactttgccaactacagttgattattcatcagttcctaagcagccctggtacctgacagtgtaaagaagga

SEQ ID NO: 278931 - DNA, 83 bp, Homo sapiens
ccagcaacgtgtttgacgggctcctcaccgttgtcctgctggagcaggccgggctctcgccatgggtcactgtcgcctctgcc

SEQ ID NO: 278932 - DNA, 76 bp, Homo sapiens
aagctgttttgaaagtgtctaatattggctgatgtagagctataggacatggaggagtgaatcagcttgggggggt

SEQ ID NO: 278933 - DNA, 82 bp, Homo sapiens
tggactctagggaccctgctgaatagctggggctacaggcgtgtgtcactgcgcccaggacatccataaaaattcatcagag

SEQ ID NO: 278934 - DNA, 99 bp, Homo sapiens
ctcagatgtgaagtccattaaaggatcgacgagaacgtgctaggagcccagctggacgttgaggccgcccattcagagatcctcaagtacttccagtct

SEQ ID NO: 278935 - DNA, 75 bp, Homo sapiens
cactgcaccttaaaaacaaaagattgagctgcactgtattcctgcttgagaaagagatccaagatcttgaaaaag

SEQ ID NO: 278936 - DNA, 51 bp, Homo sapiens
ctgtgcggccctacatgcctcagaagaaagaatcttcaagagggagacata

SEQ ID NO: 278937 - DNA, 100 bp, Homo sapiens
cgggccaggtggtcgccccaggtcagagcaccataacatggtgtgggaagtgaagacaaatcagatgcctaatgcagtacagaaactcctgttggtgatg

SEQ ID NO: 278938 - DNA, 100 bp, Homo sapiens
gccggaagccctgagggcagctgttcccactggctctgctgaccttgtgccttgaattaaacaaccaccatgtcgagcaaaaaggcaaagaccaagacca

SEQ ID NO: 278939 - DNA, 80 bp, Homo sapiens
ctgcgccgcaacgccgagcgcaccgacatctgcctgctcaaaggcgtccgagctgggccacagcctgaacgagaacgtcc

SEQ ID NO: 278940 - DNA, 101 bp, Homo sapiens
tgaaaacgagcccctatcctaggattacctgaaggtgaaacagattgagccagaaggaagacaatgctgttttcagatgcttcaagtgttgtgaacagaga

SEQ ID NO: 278941 - DNA, 100 bp, Homo sapiens
agggcagtgtggtgtccagccggatccagcatctctccaccatcgactacgtggaggacgtgcacgatctgattttctggagagatgtgaagaagactgg

SEQ ID NO: 278942 - DNA, 100 bp, Homo sapiens
aaacttgtgagggcgaaggtcgtattgaatggtgttgtagatttggtcgtattgggcgcctggtcaccagggctgcttttaactctggtaaagtggatat

SEQ ID NO: 278943 - DNA, 99 bp, Homo sapiens
cgacgattcgaggtgctctgtggccgcgagtgcatcttccacgctgtgggtgagcgtggaggatgctcagatgcacaccgtcaccatctggctcacagt

SEQ ID NO: 278944 - DNA, 78 bp, Homo sapiens
tgcgtgtcacccacgcagacatcttcagccgctgccaggagcatcagatccatgctgctgctgactcggagccccaca

SEQ ID NO: 278945 - DNA, 124 bp, Homo sapiens
tgagagtgaccggcgaggtgcacattggaggcgtgatgcttaagctggtggagaaactcgaacttggagcgtgatgcccagaagtgtgtgaactggtctgtgaccacaaagatgagaaccgcat

SEQ ID NO: 278946 - DNA, 50 bp, Homo sapiens
gacaggaggcagtagccaaacacccaggttcaaagtacggagggagaagc

SEQ ID NO: 278947 - DNA, 88 bp, Homo sapiens
cggcgtccaagacccacatcatgaagtcggcggatgtggagaatcatccgtccttggctcaggatttggagagcttgcaccaccaaaa

SEQ ID NO: 278948 - DNA, 97 bp, Homo sapiens
ttcatgtgtctggttgtttgaaatgtatttgcagtttcctgggactgctaggagttgatcatggccttgccaggttggtgacagtatattgtgagca

SEQ ID NO: 278949 - DNA, 58 bp, Homo sapiens
ctgctccgcctggtggaatctgaggttgcatctggaggtggtggggttggagatggtg

SEQ ID NO: 278950 - DNA, 50 bp, Homo sapiens
gacgacttttacatcatcacggaggtccggcgggcggtggcctccgtggt

SEQ ID NO: 278951 - DNA, 153 bp, Homo sapiens
ttggaggcttcaaacacaagaatttccgtactcgagaaggcatctgtctctgccttatagcaacactcaatgcgactgaagtgtgtatgtcttttgtgtgattcttcaaacttcacctgccaaacagaaggagcatgttgggcatcagtcatg

SEQ ID NO: 278952 - DNA, 100 bp, Homo sapiens
cagcctgcggtttccggctgcaccgcggcatgaatgtgcccttcaagcgcctgtctgggccctgcgtggtgggctatgggatatactatttcatctacag

SEQ ID NO: 278953 - DNA, 101 bp, Homo sapiens
tacaaaaatcaatctcagggctacaaccagtggcagcagggtagagaaaaggaacagttccgtaagctctttattggtggcttaagctttgaaaccacaga

SEQ ID NO: 278954 - DNA, 76 bp, Homo sapiens
aggactgtcaggaccaccagaaagggagagatgcctgtttcagcaatgtacaggaaagggaagcacagtttggaac

SEQ ID NO: 278955 - DNA, 75 bp, Homo sapiens
gcctggagcggctggccatcggttaatttggagtggcccctggagtcagtttcctacaccatccgaggccccacc

SEQ ID NO: 278956 - DNA, 82 bp, Homo sapiens
tgaaggccatcgtgcaggggcagacaatgcagatcttcgtgaagactctgactggtaagaccatcaccctcgaggttgagcc

SEQ ID NO: 278957 - DNA, 101 bp, Homo sapiens
cggcactgcgggtcccgattgctgcagccgcttgtcagtgtgatgaagattggcacccagtcaggatggctaaaggtgaccccaagaaaccaaagggcaag

SEQ ID NO: 278958 - DNA, 83 bp, Homo sapiens
aatccaaaaagccgagtagagaagttatcagtttggcacttacagcgaatctgagaggaaaaccgaggagtacgatactcagg

SEQ ID NO: 278959 - DNA, 101 bp, Homo sapiens
gaaaaaggcgagtttgtcttttcttacctgagactgggcctgaagggagagtttcagttcttcattgacgaatgatatggaacctagcaaagctgttccac

SEQ ID NO: 278960 - DNA, 50 bp, Homo sapiens
ccatcgactcccccggctcttagactagatacctacaaattaccgcacag

SEQ ID NO: 278961 - DNA, 82 bp, Homo sapiens
ctgcagcagacgcaccggctcctgctgctcgccattgatctgatgtacggaggcatctactgttttctgtgccaggactaca

SEQ ID NO: 278962 - DNA, 83 bp, Homo sapiens
cgctcgagaaagtcctctcgggagaagcagcgcctgttcccggggcagatccaggttcaggaaagggataaagtgatgcctct

SEQ ID NO: 278963 - DNA, 100 bp, Homo sapiens
aagcatgtggctcctggtcagtgtaattctaatctcacggatatcctctgttgggggagaagaatcagcatgattcttcagaggctcttcaggttctcct

SEQ ID NO: 278964 - DNA, 90 bp, Homo sapiens
gctgcttcaccaaggattatgaagagcatgacaaggatcccggctactcaacagaaatgaaggaggaatctgtaaagaaacaccagtatc

SEQ ID NO: 278965 - DNA, 82 bp, Homo sapiens
catcggggatgtggacgaaggggccgacctcctagtaagactttgaccccgacgcaggcttcagtgattgccgcggatcaga

SEQ ID NO: 278966 - DNA, 75 bp, Homo sapiens
ggggtgtgcaaacccgagagaactggaaatcttcccaaggctgcagacaccgacggatttgctttgggagccaga

SEQ ID NO: 278967 - DNA, 95 bp, Homo sapiens
gggagagcctggctgagctggagctggagctgtcggaagccactgaggcggctcccagctgcgttggcgacatggccgacacccccagagatgcc

SEQ ID NO: 278968 - DNA, 90 bp, Homo sapiens
gtttggagcagatggataccgtatcgacgtggggcctccggtatgttgccgctgcgttgagaatcccaaggactgcagcaaagccaaaaa

SEQ ID NO: 278969 - DNA, 75 bp, Homo sapiens
ttaaaatgcaccctccttccacctggccaggaatcagatgaaatgcatagcttaacttgccacgtggtaaaaatg

SEQ ID NO: 278970 - DNA, 90 bp, Homo sapiens
cgaggagagcctggtgaagcggctggctgctgcccaggccgacatggagagcagactggacctacagagacatctgggattttctgcgtc

SEQ ID NO: 278971 - DNA, 100 bp, Homo sapiens
ggagaggcccgtggccaatgactcgcaaccactcaccgtctacttctccctgagcctcctgcagatcatggacgtggtggctgccccctgcgttcctcca

SEQ ID NO: 278972 - DNA, 100 bp, Homo sapiens
tctctctgtccccggccgccatggagcagccgccggcgcctaagaggacagataggcatggacccttcaagtggacagcttgtgtcaggaggggtagcag

SEQ ID NO: 278973 - DNA, 98 bp, Homo sapiens
atgaacagcgtcctggaaaacttcaccatcctccaggatgggcgggatccccgctgtgaacggccgcggggagcggctgctgctgcacattggcatca

SEQ ID NO: 278974 - DNA, 100 bp, Homo sapiens
cacaagagcgaggagaagcgagaaaagatgaaacggacccttgggggcccctgaagccactgatggaagccacactaccggggcatcggaccatgaaccc

SEQ ID NO: 278975 - DNA, 100 bp, Homo sapiens
gttttggtgtcttcgtttgttatggccgctgctgtcgctatggagacagtactatactggcaattgctggagaagattttgcaattgttgcttctgatac

SEQ ID NO: 278976 - DNA, 102 bp, Homo sapiens
ggggtcggaaaagagaaagaagaagagcaggaaagacacctcgaggaactgctcggcctccacatcccaaggaggataagatcaatgccctcattaaagcag

SEQ ID NO: 278977 - DNA, 101 bp, Homo sapiens
cttcacccgggctccgctcttgccttctccacacttgtttggcggtaaccagcgtgagctcgcccgccagaagaatatgaaaaagcagagcgactcggtta

SEQ ID NO: 278978 - DNA, 75 bp, Homo sapiens
ctgcctcagcctctcgagtagctgggactacagtcagtccagagggaactccggtcttgaagtaatcttctgctg

SEQ ID NO: 278979 - DNA, 100 bp, Homo sapiens
ctcgaaggcccgcggcgccccgtgctgcagaatgcttcagacatgcctgaaacaatcaccagccgggatgccgcccgcttccccatcatcgccagctgca

SEQ ID NO: 278980 - DNA, 75 bp, Homo sapiens
tggagaagtccccttatgaccagattctgtttctggcgtctgcatacgcaagtccccaactcgctgaggagagct

SEQ ID NO: 278981 - DNA, 75 bp, Homo sapiens
aggaggagctcccagatcataatgtggctgtggaacggattgagaggatccagaatccagatctctggaatagct

SEQ ID NO: 278982 - DNA, 99 bp, Homo sapiens
aggtcgtcaaggtgacagcaccagaagcccaagcaaaggtcgagtttgagtggctgaggcagttttggtttcaaggcaatcgatacagaaagtgcactg

SEQ ID NO: 278983 - DNA, 100 bp, Homo sapiens
gtctttgtgtcctgagatcaaatggcacttcattggccacctacagaaacaaaatgtcaacaaattgatgggttgtgcaccatctccaggtgcttatgat

SEQ ID NO: 278984 - DNA, 90 bp, Homo sapiens
cagaacccttagcacacaggaaatggattactctttggatataacaccaccttcaaaaatttctgatattttgctcatcaacctcattat

SEQ ID NO: 278985 - DNA, 83 bp, Homo sapiens
gccagcagatgcaggaaaatttcgatattgaagtgtcaaaatccatagatggaaaagatgatgacttcaaacctgcttctatt

SEQ ID NO: 278986 - DNA, 107 bp, Homo sapiens
gaaaaagttcagtgggaagcatgtcgtctttatcgctcagaggttacaatcaaaagttttaaaattagttgatatatcctatggtggtgaaaatggattcaaccaag

SEQ ID NO: 278987 - DNA, 100 bp, Homo sapiens
tgaaactgaccacagtgctcaccacccaccaccactggacacactgaagccggcgttcacagtcaccaacctgccgggtacaacctccaccatccaaaca

SEQ ID NO: 278988 - DNA, 96 bp, Homo sapiens
tggagatatggcgcaactgcggcgctacgaggatgtcgtccaggaaagattgtgcagatgactgaagcagaagttcgaggcttatgtatcaagtct

SEQ ID NO: 278989 - DNA, 75 bp, Homo sapiens
gaaggaagaggtgtttgaaaagattctgtttctggcgtctgcatacgcaagtccccaactcgctgaggagagctg

SEQ ID NO: 278990 - DNA, 96 bp, Homo sapiens
tctcacctgagcaaacggcacagcttgaagagcttttcatggcagttaagtgcaaggatgatgctgaaaggaataacaaggcttatctctaggatc

SEQ ID NO: 278991 - DNA, 75 bp, Homo sapiens
cccactttctgaggacctggctcccagcagtcatcaagatccagtctgcgctcctcagaccaccggcaggtgaac

SEQ ID NO: 278992 - DNA, 51 bp, Homo sapiens
aaaaacatcagagagagagagagtttactttgagaatcactacaagaaaaa

SEQ ID NO: 278993 - DNA, 100 bp, Homo sapiens
gtgtgatccgaaaagtgctggcaaaatgcggctgctgcttcgcccgggggggacgtgttccacagaggacgtcccccacaggcccaaaaaacatgcagac

SEQ ID NO: 278994 - DNA, 100 bp, Homo sapiens
aagctcatccctgtctctggaaagctggagaaggtcatgtgctacgactatgacaatgacgggggccatgacttcatcggcgagttccagacctcagtgt

SEQ ID NO: 278995 - DNA, 145 bp, Homo sapiens
cggagccggagccgacgggcggtggccgcactgggaccccggaatcccgcgcgctgcccacgattcgcttctgaggggccaccaaggacatggggaagatgctggggggtgacgaggagaaggacccagacgccgccaagaagga

SEQ ID NO: 278996 - DNA, 100 bp, Homo sapiens
tggcctccagcctgagccccagccaggacgagaggatgcggagcccgcagaacctccacagtcaagaggacgattgcttccaagtatgatcatcaggcag

SEQ ID NO: 278997 - DNA, 95 bp, Homo sapiens
ggagatgaggaacaagtacattagagccgaggttcatggaggatctcctgatgcagtccagcaaagaactttcacatgtggacctccctgaagat

SEQ ID NO: 278998 - DNA, 100 bp, Homo sapiens
tgtacataagtgtcatgcagcaggacgtcactgttggaagaagttccggagtctcaccactgcatttttcagagacgccatgggcttcttattaatgttt

SEQ ID NO: 278999 - DNA, 74 bp, Homo sapiens
tggaccccaaacagaccaccctcctgtgtcttgatgccagagacgcggaacaattgagcaagaacaaggtgaca

SEQ ID NO: 279000 - DNA, 101 bp, Homo sapiens
tctggagtccgtgtgccagcaacagagctgggtccgggtgtacggttttccaagtctcattaacagtttgtttcttcaaaaacatcaagaatataatccat

SEQ ID NO: 279001 - DNA, 111 bp, Homo sapiens
aagagtcctgaccacaatggggaggacaacttcgcccgggacttcatgatccaaaaggaaagtcctcggccgtagagattcagatgatgaccactcccgaaaccattctcc

SEQ ID NO: 279002 - DNA, 100 bp, Homo sapiens
catgccccgctacgagctggctttaatcctgaaagccatgcagcggatgctagctaaacagttggaagctcttggtttagctgaaaagcctcagttggtg

SEQ ID NO: 279003 - DNA, 71 bp, Homo sapiens
gcagaggacaacatgaactgccagaattaactcctgaggagagagcccaaaagattgccaaagccatgcgc

SEQ ID NO: 279004 - DNA, 88 bp, Homo sapiens
gcgtccggcagtaactggctctccggggtgaatgtcgtgctggtgatggcctacgggagcctggtggtccattatggctgacatgcaa

SEQ ID NO: 279005 - DNA, 50 bp, Homo sapiens
tggtgaagtttggtgagactcttccaaagagtcttgctctgtggcccagg

SEQ ID NO: 279006 - DNA, 75 bp, Homo sapiens
gcggccgcagctgccacaaaccagcccttctgttacagtggatgatctgaagaaccttttcatagaagctggatg

SEQ ID NO: 279007 - DNA, 90 bp, Homo sapiens
cgctgccgccgctctgaggagttaaagaccctgacagccagcccccaagcacctgggtccccagaggattctgagggtgtccccctcatc

SEQ ID NO: 279008 - DNA, 100 bp, Homo sapiens
cagcctcgtgggagccccgcgggtcctgcccagttcaggacctcaaggggctcggctatgagaaggggaagcctgtgggtctagtgggcgtcacagagct

SEQ ID NO: 279009 - DNA, 100 bp, Homo sapiens
tcgtcttctcggcgacaactgccctgctcttcatcccagagaagcctgtgtctcccaaatcaggaacactgaagagccctcccaaaggatttgatacgac

SEQ ID NO: 279010 - DNA, 100 bp, Homo sapiens
cagcagcgcgggccagagcgcagcgccgagcgcggcccgggcgccatcgagccttggcggcggacgtgcaggccgccatggcatcagatgaaggcaaact

SEQ ID NO: 279011 - DNA, 100 bp, Homo sapiens
ataatctatgtcagaaacaagttaaagcacaactcccaaggcaccattcaggaagattacctaagagagctgctgacaaccatgggggatcggtttacag

SEQ ID NO: 279012 - DNA, 74 bp, Homo sapiens
cgacgaggaaccgcccaacatggcctcggaggcctgtttaaagaagaaaacccgtatgctagatttgaaaacaa

SEQ ID NO: 279013 - DNA, 89 bp, Homo sapiens
ggagccaccagcctctccttggcttccccaaatataaatgaccatgaagtcaccatagaagcggatacttatttgcctgtggatgaaac

SEQ ID NO: 279014 - DNA, 51 bp, Homo sapiens
gaagagttaaaagcagagttagttcaggagtacgagacccaatctagtgca

SEQ ID NO: 279015 - DNA, 90 bp, Homo sapiens
gaggaacagggcaatagtatgatggatacagttgatatattagttggatggcatatagatcatactcagaaaccttcgctcacgcagcag

SEQ ID NO: 279016 - DNA, 100 bp, Homo sapiens
cagggggctgcgcctgcctgctccgccccagacctgtcggcgaaagggagagaacattgaaagtattctctaagctatttgaagagagtgactaaatgca

SEQ ID NO: 279017 - DNA, 50 bp, Homo sapiens
cgcgtcgtcgctacctcctcggacagatccctcatccacctacatcaggc

SEQ ID NO: 279018 - DNA, 101 bp, Homo sapiens
ccctcgaagtgcgcaaacttgacactcaccctgaccggtgattcgcaaggggtggctcaccatcagcaacattggcatcatgaaaggcggctcgaagggat

SEQ ID NO: 279019 - DNA, 144 bp, Homo sapiens
agaagaaacgggccgcgaaccgcagtatcatgctggccaagaagatcatcattaaggacggaggcacggaaacttggatttaactggccagaagcaggtattcaaagcagagaacaatccctgggtgacccccattgcagacca

SEQ ID NO: 279020 - DNA, 83 bp, Homo sapiens
atcgccagctgcacactcttggggctctacctctttttcaaagtgacagagctgaatgaacctctctccaatgaagatcgaaa

SEQ ID NO: 279021 - DNA, 135 bp, Homo sapiens
tccggagtggggaagacctgcgtcctttttcgtttttcggatgatgccttcaatactacctttatttccaccatagggcagctgcaatgactctccgcacggtattattgtcattgcaagcactattggcagctg

SEQ ID NO: 279022 - DNA, 50 bp, Homo sapiens
ctcccaaagtgctgggatgacagctgataccccaatgtccttctttgact

SEQ ID NO: 279023 - DNA, 100 bp, Homo sapiens
gccaccatgtgagatgtgcctttcatcttctgccatgattgtgaggcctccccacccacgcggaactatgctgtccatgggcttctctgatgaaggcggc

SEQ ID NO: 279024 - DNA, 101 bp, Homo sapiens
gcctgttggaggaactggcccggaaacaggaggactggagacctttggcgacttggcctttggcgacatcttcctccacctgctcacgggcaaccttgcgc

SEQ ID NO: 279025 - DNA, 101 bp, Homo sapiens
aggacgacgtgtacctggacatcaccggatcagtttgacaacttagaaaaacacacacagtggggaattgatattcttgagaaatatatcaagtttgtgaa

SEQ ID NO: 279026 - DNA, 83 bp, Homo sapiens
ggacagcgcgaggtccgcgcagcccagcgcagccatgccaggtgcagtggctcacgcctatatttccaggactttgagaggct

SEQ ID NO: 279027 - DNA, 100 bp, Homo sapiens
acaggctacccatgttcagccaggtactccaaagattcaggtttactcacgtcatccagcagagaatggaaagtcaaatttcctgaattgctatgtgtct

SEQ ID NO: 279028 - DNA, 75 bp, Homo sapiens
ggcagcctcaacgagaactcggagggcaccggagaccgacaaggagcagctgacagcagaggccaaggagctgcg

SEQ ID NO: 279029 - DNA, 75 bp, Homo sapiens
aaacgtgggtttcttactaaggacgagctgatcaagtatatgactgaagaagctgaagaaaaggtgactggtctc

SEQ ID NO: 279030 - DNA, 75 bp, Homo sapiens
cggcgagcagaactacggcgagcgggatgatggcttggaaaaaagtccaatgaaaaaaaaacagaagaagaaaga

SEQ ID NO: 279031 - DNA, 100 bp, Homo sapiens
attaattcgactgatagaaccagcaacatggccaatctttcctaagctgctcagcttacaagaaaaggaatcatactgctaagaattcaaacttcagcag

SEQ ID NO: 279032 - DNA, 84 bp, Homo sapiens
gcgcggattcgccgaggcaccgaggcactcagaggagaacatgaaaggctcccggagcagcgctgactcctccaggaaacactg

SEQ ID NO: 279033 - DNA, 75 bp, Homo sapiens
tgaagagctgtggcaagaagatccatatgagtatataaggatgaaatttggtatccaacactcacagccttccag

SEQ ID NO: 279034 - DNA, 100 bp, Homo sapiens
ttcctcaggaaatgtccaccactgtttctcatcatcaccaaacggatgtaatccctgttcattactacttaatacctccaccaacaaagactaagaatgg

SEQ ID NO: 279035 - DNA, 88 bp, Homo sapiens
gccgctgaagctgccgccgttgcctccgccgccaagagtgagcgagcggacccgcgatgggtgaaaggtgtagcagtcactcggccta

SEQ ID NO: 279036 - DNA, 50 bp, Homo sapiens
aggaataaacatgcaatgaacccaaaaggttcttatcaggagaggatcaa

SEQ ID NO: 279037 - DNA, 82 bp, Homo sapiens
agctaaagcagcgtgcgttcagccctggggtcttccactttcgccttggtgcctgtcttcgcccacctgagcatcctccaga

SEQ ID NO: 279038 - DNA, 90 bp, Homo sapiens
gcagcctcaaagcagaagccgagaacaccaggtctccgtctctccaccgggggcttcatccttccagggaggagaagagggactccagaa

SEQ ID NO: 279039 - DNA, 75 bp, Homo sapiens
cgagctggagctgaagcgcaggctgcggggcgcggagtcgggagaatttcacggtccctcatggtgtctcactcc

SEQ ID NO: 279040 - DNA, 75 bp, Homo sapiens
gggaagtgggcaatgccatcctcttctgcctcctcatagagcaagctctgtggccacagatgtctttaattccaa

SEQ ID NO: 279041 - DNA, 101 bp, Homo sapiens
tagagaagaaagctgaagacttgagttcattaaatggtcagctgcagggtctcctatggacagaagtgcgggcaaggagctttgttcctccccgatgtcac

SEQ ID NO: 279042 - DNA, 51 bp, Homo sapiens
ccagacggaaagagctacttgctgagagcgcctgccaacggtaccgctgtc

SEQ ID NO: 279043 - DNA, 75 bp, Homo sapiens
gagactcctgctcagtgtagcattaagcaatgtttttggaacagtgccagtggttgcttctgcacagacacagcc

SEQ ID NO: 279044 - DNA, 101 bp, Homo sapiens
cttgggacccaccgctgccctcagctccgagtccagggcgaggtcaaaatgcagatcttcgtgaaaacccttaccggcaagaccatcacccttgaggtgga

SEQ ID NO: 279045 - DNA, 76 bp, Homo sapiens
cttgagacttcactcactagccagacagagtgcaagacgatgacttgcaaaatgtcgcagctggaacgcaacatag

SEQ ID NO: 279046 - DNA, 83 bp, Homo sapiens
gccagagttgattgtgatcagcactattcagaccaggatgtagcactcaaacttgcccaggagcgagctgaaatagttgctaa

SEQ ID NO: 279047 - DNA, 83 bp, Homo sapiens
acgtcctggcaggagttgcagaaagcatccacctgtgggaggattatatctgtccaagatgcgagtctggttttatcgaggag

SEQ ID NO: 279048 - DNA, 83 bp, Homo sapiens
cgatggtcttcctgctggggctcatgtttgagcactattcctgatcagagaactccagttgcttcaacacacagtatcagtag

SEQ ID NO: 279049 - DNA, 75 bp, Homo sapiens
tcacgtgactgtggatctcaagtactaccggccaactgaagtggacgcacaagaccagccactgctaccgcatca

SEQ ID NO: 279050 - DNA, 83 bp, Homo sapiens
gcacgactggaggcacaaggaggacgccggcgtcttctgctcaggctactgcagcactggggtgtcagttgttggtccgaccc

SEQ ID NO: 279051 - DNA, 97 bp, Homo sapiens
cgggacgccatgtccatggaggaccccttctttgtggtgaaagggctgcctgctgtttcccggggagatcatgaaacgaggtcgccttcccagcagc

SEQ ID NO: 279052 - DNA, 83 bp, Homo sapiens
gacttttctcagatgttggatatttgcttggaaaaacgtgtgggtacgaccttgggaagacatgtaaggaatttgcataagac

SEQ ID NO: 279053 - DNA, 95 bp, Homo sapiens
cgtggatagcctgaaggcagccattcaggatgcagaaaatgcgattgtgcatatgggcggtcagtggttgggtggtcgtcaaatccgaaccaatt

SEQ ID NO: 279054 - DNA, 74 bp, Homo sapiens
tgtgcacaaatgaagatgtttccagccctgcctcggcggaccaaaggtacgaattggagcaatgttggcttata

SEQ ID NO: 279055 - DNA, 101 bp, Homo sapiens
ctcatgcccagcagcagcaagcaggagtggtaaaatttcagccttccctttggccttgggactcagtgaggaacaatttgagaagtgccctgacagagatg

SEQ ID NO: 279056 - DNA, 75 bp, Homo sapiens
ctaccctggaggagattctggggcagtatcaacggagtctccggggtgcatacattcagagggccacactggtgt

SEQ ID NO: 279057 - DNA, 82 bp, Homo sapiens
ctcctccgtcaccagccacatctaccagtgtggacgaatgtggaacctcgctctgtggctgtgttcccttggcactccttag

SEQ ID NO: 279058 - DNA, 75 bp, Homo sapiens
cctgtacccttagaaggttttgaagacaaggtggagcgaatcaaggagcgtgtggaggagaaagagggaatcccc

SEQ ID NO: 279059 - DNA, 139 bp, Homo sapiens
tgaaacttgggactctgcaatagatacatggagcccatcagaatggcagatggcttatgaaccacaggatgaaaactttcggaagagaaagttgcctgtggtaagttcagttgttaaagtaaaaaaattcaatcatgat

SEQ ID NO: 279060 - DNA, 50 bp, Homo sapiens
cgagaaagaagtgaaaagagtgtagaggatcagttccatgacaagacccc

SEQ ID NO: 279061 - DNA, 100 bp, Homo sapiens
ttcccacagtcaaatcactcgcctctacagccggttcaccagcctggacaaaggagagaatgggactctcaggattcctgagctgaaatgcagatgacca

SEQ ID NO: 279062 - DNA, 74 bp, Homo sapiens
tttgaccgccacattaccattttttcacccgagggtcggctctaccaagtagtgcatttgcccagtataacatg

SEQ ID NO: 279063 - DNA, 95 bp, Homo sapiens
agctgttggaaatcccagagcactctgacatcaagcagctacctgaacgacctggagcgtattgcacagagtgactacatccccacacagcaaga

SEQ ID NO: 279064 - DNA, 98 bp, Homo sapiens
tgggaaggtggtgcttgtcctggctggacgctactccggacgcaaagctgtcatcgtgaagcatgattttgaagtcagaggagatgtggtcaatggaa

SEQ ID NO: 279065 - DNA, 51 bp, Homo sapiens
aacttgcagctcatctctattgatgatgattcaacgagaagccgatgtaaa

SEQ ID NO: 279066 - DNA, 100 bp, Homo sapiens
ctccaggccaagagggatccttcacccgtgtctgataaggatgacattcggctgctgccgtcagcattgggtgtgaagaagagaaaacgaggacccaaga

SEQ ID NO: 279067 - DNA, 100 bp, Homo sapiens
agtggctgagcaccgtctcccagtacgaccgggacaagtactggaaccgctttcgagacttgctgatcatctgggctgtgatccacaaacccggttcttt

SEQ ID NO: 279068 - DNA, 100 bp, Homo sapiens
gtacacatggagcgggcagaggatgcagtggaggccatcaggggccttgacaacacagagtttcaaggccctcgggaccaaggatcacgtcatgactccg

SEQ ID NO: 279069 - DNA, 100 bp, Homo sapiens
gacgtcatcagcctggtggacaagtaccctaaggaggactcggagataaggtggatctcgagccagaggggaaagtatttgtggtaataacccttaccgg

SEQ ID NO: 279070 - DNA, 75 bp, Homo sapiens
aaaaatccaggaacatatcaccaaccagatgttgtctgaaagcgtcacatctatccagggtggttgtgtaggaaa

SEQ ID NO: 279071 - DNA, 101 bp, Homo sapiens
cccgaatccccgggacagatgctcaagctcagggccatggcctcccctgctgcccgggaccagtttttacgtcagatggaacagattgtggaaggaattaa

SEQ ID NO: 279072 - DNA, 100 bp, Homo sapiens
atctacttcctggaggagcgcatgcaacagaagtatgaggccagccgggaggacatctacaagcggccctctccagggtcaccctagaatcagatctgct

SEQ ID NO: 279073 - DNA, 78 bp, Homo sapiens
caaggaaaaactggagagcttcatcaaaaatagtgatagctttgataagctatctgaacgtgctctccaacagccgct

SEQ ID NO: 279074 - DNA, 90 bp, Homo sapiens
tcgacaagtggccttgcgggccggatcgtcccagcagtaagccgaaaggatgaagagttagaccccatggaccctagctcatactcagac

SEQ ID NO: 279075 - DNA, 100 bp, Homo sapiens
tgagtcagctaaccaatcaaccaccttgtctggacagcagtcagcatgatcccctaacaacagtgagagagcaatgcgagcagttggagaaatgtgtaaa

SEQ ID NO: 279076 - DNA, 75 bp, Homo sapiens
acatgacagaggaccatgtgatgcacctgctccagattcgtgtgagggatgacaagatgcctttggcgcaccttg

SEQ ID NO: 279077 - DNA, 76 bp, Homo sapiens
agagagagcgcagaatatcaagtgctgccaacattggtactcagaccacaggacccagtggggtaggatgctgtac

SEQ ID NO: 279078 - DNA, 98 bp, Homo sapiens
aaggagcaagagcaagatcaccgtgacatccgaggtgcctttctccaaaagagtccagatgcctgtccagcctccaagcaaagacacagaagagatgg

SEQ ID NO: 279079 - DNA, 105 bp, Homo sapiens
ttccctgcggcggcgactcagcggggtgtcgttcggccggcgtgacgcagccggatcggcgccagacggaaacctagcgacaatgcagatcttcgtgaagactct

SEQ ID NO: 279080 - DNA, 75 bp, Homo sapiens
tgacggggtggctggatccgtggcagactttgtgtggacagtaatgacctcacgtttccgattgcctgctggcag

SEQ ID NO: 279081 - DNA, 96 bp, Homo sapiens
ttggtaggttggagttgagtctcacgttgaaacagaatgaagtgcttcctggagctaaggacttggaccactctataggaactcagtatagtgcca

SEQ ID NO: 279082 - DNA, 100 bp, Homo sapiens
aaaaacacacctatgacacctttaaggaggttcttggatcagggatgcagtaccacttgcaggaattacatgaacgacagccttcgcaccgacgtcttcg

SEQ ID NO: 279083 - DNA, 51 bp, Homo sapiens
gtgatatcttcagcgaaagtgaaaccaggtccccaaagctccagagataga

SEQ ID NO: 279084 - DNA, 100 bp, Homo sapiens
gtgcagcgtgtgtggggtcgagcttcctgataacgaggctgtggagcagcacagcccaccttgggacaccttgactccaagcccagcagtaagtccaaca

SEQ ID NO: 279085 - DNA, 100 bp, Homo sapiens
ccggacggggccctgacacggccaccctactgcctggaggccggggagccgacgcctgcaccagtaactccagatagtggttattcatcagcccacgcgg

SEQ ID NO: 279086 - DNA, 100 bp, Homo sapiens
gtgagcggtggcagtcgcgaccgcgggtgcatccagtttctgcgcccagtaactgtagtactgaatggaagtggcttgtagacagagcacgagttggcag

SEQ ID NO: 279087 - DNA, 82 bp, Homo sapiens
ccccggggaagccattccccaccccccagatcttcacatatgagcgcaagtggtactcgcgcaaggacctggcccggcatcg

SEQ ID NO: 279088 - DNA, 100 bp, Homo sapiens
tcctctgccacatcttcctgacccgcttcaagaagcctgctgagttcaccacagaatcgcctaccatttggtgcaagcaaaaagcaatcagcaattggac

SEQ ID NO: 279089 - DNA, 100 bp, Homo sapiens
tgctgctaaaaacaagactggggctgctcccatcattgatgtggtgcgatcgggttaaagcacgaattgggagctctcagcgacatcaccagtcagcagc

SEQ ID NO: 279090 - DNA, 98 bp, Homo sapiens
agaatggtggccgcagagttcgtctgtttctgaagcggggagacggctcagtaccagaatatgaccggagagcaatggtgtgatctccgcacactgca

SEQ ID NO: 279091 - DNA, 75 bp, Homo sapiens
gtgtcaaaatccatagatggaaaagatgctgcagaaccttggcctgaaaatgctacattatatcagcaattgaaa

SEQ ID NO: 279092 - DNA, 75 bp, Homo sapiens
gctatgaacccagaggtcgtggaggtggccgtggaggcagaggtggcatggggattttttatcaagcagaaatgc

SEQ ID NO: 279093 - DNA, 98 bp, Homo sapiens
cggcgggagcccaggagcctgccccgccctggggacgaagagctgcagctcctcctgtgcggtgggagtctttttgctcatgttcgtgtgcggcctct

SEQ ID NO: 279094 - DNA, 82 bp, Homo sapiens
ggttgcaggtgcagagcatccctgacgcacacagccttatgccagcctggaccatcttggaggcagtgtaggatcatggaag

SEQ ID NO: 279095 - DNA, 75 bp, Homo sapiens
tcagttgttgcatcaaatacttcatatttggcttcaatgtcatattttggggtgatgaattagaagacaatggaa

SEQ ID NO: 279096 - DNA, 98 bp, Homo sapiens
atataatcagacatgcccaaagaagtctgcttagggtgaaacaaatacctttgaggtttaaatcagcagccagactgccttccgggtcactgccatgg

SEQ ID NO: 279097 - DNA, 73 bp, Homo sapiens
gaggacgccgggacacctggaagccgagaaatggactggacctacagagacatctgggattttctgcgtcagc

SEQ ID NO: 279098 - DNA, 82 bp, Homo sapiens
agaagatgaaagttgacctgagcccgaaggacaaaaaggttgaattattccattaccagaggatctccttatatagcagcca

SEQ ID NO: 279099 - DNA, 82 bp, Homo sapiens
gagtcacctgaaagccaggaaatgcatgatgccttcttctgtagagtgggcgctttgcagaatacgtgttgaatgaaatcac

SEQ ID NO: 279100 - DNA, 75 bp, Homo sapiens
gagagagcttggttaacttgggagaaagtttcatctgtggatggagtattggacagtcattttgtttactcattc

SEQ ID NO: 279101 - DNA, 88 bp, Homo sapiens
caaaagaaacttttgcccttatcagtaacacctgagaaagatgtagcacttaagcctcaggaacgtgtggagaaacgccagacgcccc

SEQ ID NO: 279102 - DNA, 100 bp, Homo sapiens
caggtgcttggcaaaatcgagcgggccattggtcagcaggctgcccagcagcggcgaggctgcagccacgcccaccatgtccatgaccgtggtcaccaag

SEQ ID NO: 279103 - DNA, 50 bp, Homo sapiens
gtttccctctggcagttttatctctctaaacgaggagaagaccttttcat

SEQ ID NO: 279104 - DNA, 100 bp, Homo sapiens
cagcctggccctgttaggggtgccccattgcagaaagccactctggcagccagactgccttccgggtcactgccatggaggagccgcagtcagatcctag

SEQ ID NO: 279105 - DNA, 100 bp, Homo sapiens
agctgaccaaccacaaggcctgtgtgcgtgacgtcagttggcacccctttgaagagaagattgtcagcagttcgccattgcactgaatggtgtggaggac

SEQ ID NO: 279106 - DNA, 98 bp, Homo sapiens
ggcaatatggcccgagcagtgtttgactaagaaaaatggctttgtcagcccaacagatacccagatggtttaactcagttaagttgaggagcctcatt

SEQ ID NO: 279107 - DNA, 96 bp, Homo sapiens
gtcccccgggggcccgtactgcacatcgtggtggtcggatttcaccacaagaagggctgccagaatgatatggaacctagcaaagctgttccactg

SEQ ID NO: 279108 - DNA, 122 bp, Homo sapiens
cagaactgttctcaggactcattattttaacatttgggagaaacacagccagaagcttccaaactacaaaaactttaaaggcacgattcaagaacttggtcaaaaccagtatgcagtcagtg

SEQ ID NO: 279109 - DNA, 52 bp, Homo sapiens
aacagaagagtttgtgaaaccatcacagtggactcccgaaaaattgaccagg

SEQ ID NO: 279110 - DNA, 90 bp, Homo sapiens
caagaggctctgcaccctggatggaaagcaggctgttgaagctcaaatccgaagttttggacagactccttctcaactactcatagagcc

SEQ ID NO: 279111 - DNA, 100 bp, Homo sapiens
cgctgggaacactgaatcaacatgggcaatgagaacagcacctcggacaaccagctacattttgaaaactctaggcattaaatacttttcaatgactgaa

SEQ ID NO: 279112 - DNA, 97 bp, Homo sapiens
cagccaccactgttgccttttcaagaacgggggagtattttgcttctggaggctctgatgaacaaaacctgcaaccatggtcgtgccactagccagc

SEQ ID NO: 279113 - DNA, 100 bp, Homo sapiens
caactgcctccaccagaggaaaatagtatgggaattcctattatgaataacaagcctttgtattcatttgaagataatgcagactatgtttatgatgtta

SEQ ID NO: 279114 - DNA, 100 bp, Homo sapiens
ttttcatcctctcactcagatgatgtatagccctcagaattctgattatcttttagctctcagcactgaagccccgagcattcctctgattcagaataca

SEQ ID NO: 279115 - DNA, 51 bp, Homo sapiens
gaggcttttgagagattcagtttaggtctccaatggtgcagggaccatgtc

SEQ ID NO: 279116 - DNA, 82 bp, Homo sapiens
tctcggatcgaatccctcacgcgggcgcggatcgaccggagcagagagctggcgagcaagctgtttgcagacaaggtcccaa

SEQ ID NO: 279117 - DNA, 73 bp, Homo sapiens
aactgatttctcaactccaacaccaagaaggaaaaccccatttaacacagtcttgactcgtctgctgaacaaa

SEQ ID NO: 279118 - DNA, 87 bp, Homo sapiens
aagcggatttccgattgaatgggagtaactattcccagtcagaggcgctatgtgtattattatagctacctgttaaagaatcatctg

SEQ ID NO: 279119 - DNA, 100 bp, Homo sapiens
ttcagaagtttcctggcatcaactacccagtcctgaccccaaatttgaaaggcttcgaggcagcggagtggagtcaacatatcaatggagcaagtcacag

SEQ ID NO: 279120 - DNA, 100 bp, Homo sapiens
actggaggagcggcgggcttcagacagaatctcatctgttctgagtgtggggatgagtttactctgcagagtcagctggccgtgcacatggaggagcacc

SEQ ID NO: 279121 - DNA, 90 bp, Homo sapiens
acacagcattctaaagtgaatgactccaacgaattaggtggtctgactaccagtggctctgcagagtctcagaccagtatccttcagggg

SEQ ID NO: 279122 - DNA, 82 bp, Homo sapiens
gattgaccagctggccctggagtcccctgaggattttttatcaagcagaaatgcatcgaacaacgagaatcaagatcactga

SEQ ID NO: 279123 - DNA, 100 bp, Homo sapiens
ctggtgaatgagcgacagccccaggcccgggttgtggtgctgaggccacaagaggaagctgaatgaagaggacgccgccagcgagtccagcagggagtcc

SEQ ID NO: 279124 - DNA, 100 bp, Homo sapiens
acaatttgcaagaattatcctcatcttaggggataaatttacggagaaatggcagcacacgttgagatgacctgatcagagccatcaagaaactaaaggc

SEQ ID NO: 279125 - DNA, 50 bp, Homo sapiens
ccacaagcaggtccaaagagagagagctgggcaccaccccatgggaggag

SEQ ID NO: 279126 - DNA, 100 bp, Homo sapiens
agcttgcccggctggccctggtcatctccgaactggagggcaaggcgcagcagccagctgcagagctcatgcaggatgaatattctatctttcctcagac

SEQ ID NO: 279127 - DNA, 100 bp, Homo sapiens
ttggggaccagagatggacggtcactcagcctatggagttcaactttgtggggaaacttttgggtccacgtggcaattctctgaagcgtttacaagaaga

SEQ ID NO: 279128 - DNA, 80 bp, Homo sapiens
aaaggcgctccgtcatggggatccagacggtttcggtctaagtaccacccagatgaggtggggaagcgtcggcaggaggc

SEQ ID NO: 279129 - DNA, 75 bp, Homo sapiens
gctgtcctgtcctcgtccgtctcatcaaaggaagcgccgcggagccatcaacagcaagcagctcacctacctgga

SEQ ID NO: 279130 - DNA, 50 bp, Homo sapiens
tcctattttttattatgttgcacggagccagatgaaaactcgctggattt

SEQ ID NO: 279131 - DNA, 95 bp, Homo sapiens
atcgggtggcggctcgggacggaggacgcgctagtgaactttatattgctgttggaatatctggagccatccaacatttagctgggatgaaagac

SEQ ID NO: 279132 - DNA, 82 bp, Homo sapiens
gtaaacccatgctaggagttatacataagccattttccgaatatacaggccttgcagtattaaaacatgtgctaacaccacg

SEQ ID NO: 279133 - DNA, 100 bp, Homo sapiens
tttcgaagatgccttggaaaccatctcaatgatcttcagcctgttaaacaagaaaacgaaaaaccccttccagaaaacatggatgcatttgaaaaagtga

SEQ ID NO: 279134 - DNA, 82 bp, Homo sapiens
caacgccgtgatgcttggctgggcgcggcagtcagagagtccccaggaagctggccgcgggcacccctccttcctgccccag

SEQ ID NO: 279135 - DNA, 100 bp, Homo sapiens
ctcagtcacacatgccagagattgctcaggaagcaatggagcttgtcgtcacgcagctgggctatgacacacgtgtgaccatcctcgggcacgtgcagag

SEQ ID NO: 279136 - DNA, 83 bp, Homo sapiens
ggcagtcggcggagcttcgccaaggctggcgcagtcggttgacatcatggacatatgtgagtccatcctggagaggaagcggc

SEQ ID NO: 279137 - DNA, 98 bp, Homo sapiens
tggtgtttgttgggaaaggaattacctttgacagatgaccatgctgactgtcatagagcagccagtacctccaacaccagctacccctgaggaccctg

SEQ ID NO: 279138 - DNA, 101 bp, Homo sapiens
cccacggatatgttgaagtaacaagcttgcctagaggttttgacaacaattcgttcagggcaccgagcaaacatatttagtgcaaagttcttaccttgtac

SEQ ID NO: 279139 - DNA, 83 bp, Homo sapiens
ccagatgtgactcactctcattaggtagcgtggaaggagccttcggatggggtggcccagttgaaatccttcccttcctctac

SEQ ID NO: 279140 - DNA, 101 bp, Homo sapiens
tatctcttctatgacggagaatccgtttcaggaaaggacccagatgatgtggtaccagttggccaaagaagagcctggtgttggtgcatgtgctttggact

SEQ ID NO: 279141 - DNA, 100 bp, Homo sapiens
gttccggaggcccggccacctctgagaagggagacgacgctgctgggtccgctgagcggggcgacccgagaccgagacatgggtgcccggcaccgcgccc

SEQ ID NO: 279142 - DNA, 100 bp, Homo sapiens
cctgtacagcctgcagaactgttgaaatcacaaagattagacacctttttagataggtgttcttcagcaccactgacaacacggttctgacagtatttca

SEQ ID NO: 279143 - DNA, 83 bp, Homo sapiens
gtcacacacaacgcttgttatgttttcatcacttctctccagaagatgcctttgagtaatggacagatgggccagcctctcag

SEQ ID NO: 279144 - DNA, 75 bp, Homo sapiens
cagaagaggaggttgcccagaagaaaaaggctaaagaacgtgccaatggaatggagcttgatgggcgtaggatca

SEQ ID NO: 279145 - DNA, 100 bp, Homo sapiens
ctccgagaggctgcaccggccgccggtcatcgtcctgcagcgcggagcctgcggccaaggcatgtgggcacattccatgacagtacaggattatcaggat

SEQ ID NO: 279146 - DNA, 100 bp, Homo sapiens
cacaggacacctcaggacccattctgcgagtaaccagctcataaatcacatcgaacagtttttggatactaatgaaacaccgtattttatgaagagcata

SEQ ID NO: 279147 - DNA, 100 bp, Homo sapiens
ttgtactctcagctggaacggcaggcctgggcattacagtacttacgtaaactgtgcaaccatccagcattagtcttaacacctcaacatccagaattca

SEQ ID NO: 279148 - DNA, 100 bp, Homo sapiens
ttcagacagcaattaacaaagaccagccagctaaccctacagaaggtggtcgtgtgatggtaacagatgctgacaggtcaatactatctccaggtggaag

SEQ ID NO: 279149 - DNA, 90 bp, Homo sapiens
agatggatttttgcatgagacgcttctggacagagtttacagatgcttcctcagcaacggaaagccatagctaagttcaaggagccagcc

SEQ ID NO: 279150 - DNA, 50 bp, Homo sapiens
ctgctgctcgtcttctatgtcaagaaggctgaccccgcactacatctacc

SEQ ID NO: 279151 - DNA, 90 bp, Homo sapiens
cattttgatcaaaatctcaacttcatgtacatagaagttgataaagtaacagagaggcttttcaggctgcctttcgagctcaggggcccc

SEQ ID NO: 279152 - DNA, 50 bp, Homo sapiens
gttaaggattccaagtaactcttatttggcctagaatatcctgcagtggt

SEQ ID NO: 279153 - DNA, 100 bp, Homo sapiens
ttaacgtgtatggcgtgtgcgtgccagatatggctcgtggacagcagaaaattcagtctcagcagaaaaatgccaaaaagcaagctggacaaaagaagaa

SEQ ID NO: 279154 - DNA, 100 bp, Homo sapiens
gaagaaccagttacagatccaagaggaggaggagacccttcaggacgaggatggactgtgaacggacaactgagggttgggttttttaccaccaaactgg

SEQ ID NO: 279155 - DNA, 100 bp, Homo sapiens
gtatattttttgaacctaaaatactttacagggcagcaggatactgctattgttcatccagttcccattcgtatgactccaagcaaaatccacatgcagg

SEQ ID NO: 279156 - DNA, 75 bp, Homo sapiens
gcgtgctgccgagagaggaagcgaagggcaccatctttgcctaccgtatgtgaacgggagctgtgtgtgtttgct

SEQ ID NO: 279157 - DNA, 51 bp, Homo sapiens
atcagagatttcacagtgaaaaatcttaacattggtatcccttccctgaca

SEQ ID NO: 279158 - DNA, 100 bp, Homo sapiens
aacccctcctcccctagcttcactcaatgttagtaaggataatattggacaccgcttactccagaaacatgggtggaagctgggccagggattgggaaaa

SEQ ID NO: 279159 - DNA, 75 bp, Homo sapiens
tggagcttttcccctccccggaccattcccggagtaataaatccagttggagcagcagtgatgagaagaggggat

SEQ ID NO: 279160 - DNA, 75 bp, Homo sapiens
ctccactgccgtctactcggccactccggtcccgacacctagcctgcagaagctcatagccaaactgaaaagcgg

SEQ ID NO: 279161 - DNA, 135 bp, Homo sapiens
cggccgcgcggcgctggactggagcagaaccccaggactgcgcccccgggagcgggcgcccagaggtttttcgttggaatatacgttgcacatttatggcgattctgagtgtgagggcagacttctgccaggctc

SEQ ID NO: 279162 - DNA, 75 bp, Homo sapiens
ggcaaaaatcccatctaccgcaactctcagttcgagagtaaaggtttgatctgtggatgaaatgaatcatgattt

SEQ ID NO: 279163 - DNA, 83 bp, Homo sapiens
tcccatttcgcccctcgcgtccggagtccccgtggccagggaactgctcgcagaaagaagaaggtggttcatagaacagccac

SEQ ID NO: 279164 - DNA, 100 bp, Homo sapiens
gaaagcacggggtgaaactgaccacagtgctcaccacccaccaccactgacctgcctagagctggaacgttacctccagagcgagccctgctatgtttca

SEQ ID NO: 279165 - DNA, 75 bp, Homo sapiens
cgcaggtcctcgcggtgcgcaccgtttgcgacttggacactcatgaggaccatgatacttccactgagaatacag

SEQ ID NO: 279166 - DNA, 51 bp, Homo sapiens
ctggaaaatggtctgctctgcgaatcgggccgagatggacgaaaaaatgtg

SEQ ID NO: 279167 - DNA, 100 bp, Homo sapiens
gaaacttatcccagagctttgctacattggaacagggccgcctctcaagttcgatatctcaatgcctatactggaatagtgctacttcgatgcagaaaag

SEQ ID NO: 279168 - DNA, 100 bp, Homo sapiens
cccacagtcagcagcacaacagaggcggagaaatggtcaatgcatggtttgctgagagagttcacaccatccctgtgtgcaaggaaggtatcagaggcca

SEQ ID NO: 279169 - DNA, 83 bp, Homo sapiens
cagaagtcgcgtgtctaggtgagtcgcggtgggtcctcgcttgcagttcagcgaccacgcacccagtcagcttgaagagtttc

SEQ ID NO: 279170 - DNA, 50 bp, Homo sapiens
ctagatccaggttggaatcctcagtctggccttaccaaggcagtgaagga

SEQ ID NO: 279171 - DNA, 83 bp, Homo sapiens
tgaagatggcgccagaacgaagaccctactaggcaaggaacagcgccttttgatagtcctaagtaattgctgctatctagaac

SEQ ID NO: 279172 - DNA, 100 bp, Homo sapiens
ggtggcacagccgccctcagccccggcgcagacatggacccctcgcgagccatccagaacgagatcagctccctcaaagagctgccatcagtcatgctct

SEQ ID NO: 279173 - DNA, 80 bp, Homo sapiens
ttcacagtttgcgggactcagtcccatcactccaaggagagaaggaaaacagttcctcctgaggatttcagagaagagct

SEQ ID NO: 279174 - DNA, 100 bp, Homo sapiens
ctggatacctgggaaggtctatgtcagcacgcagaaggtttgaggagcattgcttctcatacagtaaggtgtttatacgggagctgatctccaatgccag

SEQ ID NO: 279175 - DNA, 89 bp, Homo sapiens
gaagacattcaagaagaccgccagcctgatagccaacagttgtaaagcaacatctcgagatctggcgtgttttatacagtttgaaaatg

SEQ ID NO: 279176 - DNA, 90 bp, Homo sapiens
tcccgcctgagcgcaactagcggcgggtcgtgggcacctccagacttaattcagtgcacaaatgagatgaatgtgaacatcccacagttg

SEQ ID NO: 279177 - DNA, 100 bp, Homo sapiens
agaggtttgctgagctggttggccctgtgatccctcaagactggtccacggagtgtatgaccacaaacagccatcaagtacgtagagaaatcgacactct

SEQ ID NO: 279178 - DNA, 75 bp, Homo sapiens
ctcagttggaagcagccgatccagcctgcggagcctgtggggcagaccctacagcttggggcctgggctcctctg

SEQ ID NO: 279179 - DNA, 99 bp, Homo sapiens
aagaaagaaagaaaacgagcgcgagagggggaaaagcgagcgatcgagcgagcgcgcgcgcgaaaactccgggcagatggagctaacacccattatgga

SEQ ID NO: 279180 - DNA, 80 bp, Homo sapiens
gcgacctggaccaacccgccttccaacagctgaaactatgttccaacttcctgtcaacaatcttggcagtttaagaaaag

SEQ ID NO: 279181 - DNA, 74 bp, Homo sapiens
atgaggaggaggatgaggatgaggaggaagaaggtgggaaaggtgaaaagaggaagagagaaacagatgatgaa

SEQ ID NO: 279182 - DNA, 75 bp, Homo sapiens
ggggcgttgccatggagacgcgggcggcagagagaagaagaaggaggttcctgctgtgccagaaacccttaagaa

SEQ ID NO: 279183 - DNA, 75 bp, Homo sapiens
tattcagctgtaccagtccgccattttgctaccaagaaagccaaagacgctatgtccagcaaaggctccgtggtt

SEQ ID NO: 279184 - DNA, 50 bp, Homo sapiens
tagcctgtataccagcacggccagaggaaggaacagagccacagagaaaa

SEQ ID NO: 279185 - DNA, 90 bp, Homo sapiens
atgagctacgccaacgacgccttcccagaggaatacgtgcccactgtgtttgaccactatgcaggtgatctgtgaaaatggttcgctatt

SEQ ID NO: 279186 - DNA, 98 bp, Homo sapiens
ctcgtgcttcgggatggaaacctatggttatctgcagagggagtcatgctttcaaggacctcatggtcttgacaatgttcacaaacagagggtggcag

SEQ ID NO: 279187 - DNA, 98 bp, Homo sapiens
cgactctcatacaggcgggcgccagtgcatcttctaggagccctctggcacaaatggaagaagaaagaagggagcaagtagctaaaattaagaagatg

SEQ ID NO: 279188 - DNA, 50 bp, Homo sapiens
tgcaagaggcgtttctataagaattggaggaagagcaagcaggccctgag

SEQ ID NO: 279189 - DNA, 97 bp, Homo sapiens
acgcgaagagaaaacattgaagcttcagaaattgttagaaaggagagctgcttttgcacattttcctgaactctatgattttgccctctcaaatgtg

SEQ ID NO: 279190 - DNA, 90 bp, Homo sapiens
gaaaatcaacgacaacttgagcacaggtgctgtcctggagccgagagctgccttgcgcttggcgcgccctgcacacctccccggtctgcg

SEQ ID NO: 279191 - DNA, 50 bp, Homo sapiens
cccgttccccctccccagagcaagttttcggctttgtgagaaaccttacc

SEQ ID NO: 279192 - DNA, 100 bp, Homo sapiens
aaatgacaagaagcaaaatgcccagtcttcggacgagtcctttgagccttacccagaaaggaaacatgcgtcgggatgtccaggaaatttttcgcatgac

SEQ ID NO: 279193 - DNA, 82 bp, Homo sapiens
tatggaggagctcgatggcgagccaacagtcactgaggatacgaagcgttttcggcttcctgcccggagctgtgcagcaaac

SEQ ID NO: 279194 - DNA, 51 bp, Homo sapiens
tcgcagtggtcgcttcttctccttgcttcatagtacagcgacacagctggc

SEQ ID NO: 279195 - DNA, 80 bp, Homo sapiens
aaaagacagtgttctgctttcatggagttcacagaagagtcgaggagggctgatggagttatgagaacaatgaacacaga

SEQ ID NO: 279196 - DNA, 97 bp, Homo sapiens
aaggaaactaatggaagagtgtaaaagacttcagggagaaatgatgaagctatcagaagaaaatcggcacctgagatggaaaagcgagattgtcttt

SEQ ID NO: 279197 - DNA, 90 bp, Homo sapiens
gagttcaccaaaattcagacattggcagctgcaatgactctccgcacggtattattgtcattgcaagcactattggcagctgcagagcca

SEQ ID NO: 279198 - DNA, 100 bp, Homo sapiens
taatcgctgaagatgttgatggagaagctctaagtacactcgtcttgaataggactcagtaatgttgaacggctttggcacagtggttaatgctcttggc

SEQ ID NO: 279199 - DNA, 75 bp, Homo sapiens
tgtgggccgggagctgtacttctatatctacaagggggtccgcaagatgaggaaaatgaggcccaaagaagtgat

SEQ ID NO: 279200 - DNA, 82 bp, Homo sapiens
cccagaccctggagcctcagttggaagcagccgatccagcctgcggagcctgtggggcagtgccaaatctttggagtgttga

SEQ ID NO: 279201 - DNA, 101 bp, Homo sapiens
gaggagagttctccaaacatgatcgtttactgcaaagactttgtttggagaagctgcctatttcttcttctaccagtaatctccatgtggaccgggaacag

SEQ ID NO: 279202 - DNA, 107 bp, Homo sapiens
ccaaacccacttcgttcaagacaggtgtttaagcgtctccaccagctcctggccgggttcgaggacaagtcagcctatgcgctctgcacgtttgcactcagcaccgg

SEQ ID NO: 279203 - DNA, 100 bp, Homo sapiens
atgaacaggaaaagtcttggcaagactcagagaggctatgaaaggagaaaagggaattggtggagcagtcacagctacagatggactaagtgaagagctt

SEQ ID NO: 279204 - DNA, 121 bp, Homo sapiens
caaaatatggtgtgaaggttggcctgacaaattatgctgcagcatattgtactggcctgctgctggcccgcaggatggcttaatggtacaaataactccagagaccatgaatggcttgcgg

SEQ ID NO: 279205 - DNA, 99 bp, Homo sapiens
gaggaccttagactgatgggtgcccagctctgcttcgaggccaatttaccaacagcatgaatcaagaaaagttagccaaacttcaggctcaggtccgga

SEQ ID NO: 279206 - DNA, 73 bp, Homo sapiens
aagaactgaccagagctgatcccgagcagcgtcatgtacccctgtttttgattggtcaaggagcacatgtagg

SEQ ID NO: 279207 - DNA, 90 bp, Homo sapiens
tggattgactatggaaaagttgccaaattggtgaaagaaaagatgttgtcccggttaagagtagtttccaccacttgtactttggcatgt

SEQ ID NO: 279208 - DNA, 98 bp, Homo sapiens
taaggagcttgatttgtttttggcatactacgtgcaggagcaaggtggaggaagctaaacaagaattacaggaagttgttgaattcttgaaaaatcca

SEQ ID NO: 279209 - DNA, 75 bp, Homo sapiens
cccacgcaaccccagatccatttacactttacagatattcaccttgcgaaacgtttttatgacatggcagctgaa

SEQ ID NO: 279210 - DNA, 100 bp, Homo sapiens
ctgagtgctaaactgtgtggggcgcggatgggatccagctgttagtcgggcgtcctgcctctgcggctctgccccctgcatcctgtgcagctgctgcccc

SEQ ID NO: 279211 - DNA, 75 bp, Homo sapiens
ttggaaagcatctgtgtggtatggcaacaggcacgtgtggttctcaaatataggcattctgatgggaacttgtgt

SEQ ID NO: 279212 - DNA, 88 bp, Homo sapiens
aaagatgctgctgctaaaggtatccaggaaattgctgactctgtaaaggttgcaagaaagctcaagtagcctatggagaggatgcaag

SEQ ID NO: 279213 - DNA, 51 bp, Homo sapiens
agaaattgttcagttcttctcagaggaacagtcagtccctcccaaagtgga

SEQ ID NO: 279214 - DNA, 100 bp, Homo sapiens
ctgcaagaatttcttcaaaccctgagagaaggtgatgtcgagtctatgctgtcttgtcaaagagagaaggtcgggtacttcaagaagaaatgaaagaagg

SEQ ID NO: 279215 - DNA, 100 bp, Homo sapiens
cgctgagtgtggaccctaacacctggcagactctgctccatgagaggtgagcccgtggtagcagcagaagcaggcattatgggataacgattgtgtaaag

SEQ ID NO: 279216 - DNA, 50 bp, Homo sapiens
ctcagctctcggcctgctgatgtgaaacaaagagtcctcttcgtggaaaa

SEQ ID NO: 279217 - DNA, 98 bp, Homo sapiens
tatccagtgcggcctccagagccggcatgtggcgctgtcggtgggcggccgcgagatcctcaaggttaaaaagatcaagtggcatgagcagccttttg

SEQ ID NO: 279218 - DNA, 90 bp, Homo sapiens
agcacaatcaacgcaaccacagaaacaagtggtacagatcacaaatcgggacaaaccgctgtcatttggtatttcccttcaaaatctgag

SEQ ID NO: 279219 - DNA, 96 bp, Homo sapiens
tgcaccctgataactcaaaggcacctggcttcagaccaccttcccagcgagtttctactagtccagttgcagctgaagaacaatgggaactctact

SEQ ID NO: 279220 - DNA, 82 bp, Homo sapiens
tccaaaaacagtggataattttgtggccttagctacaggagagggtgtgggccgaagatatgctcatgtggtgttgaggaaa

SEQ ID NO: 279221 - DNA, 82 bp, Homo sapiens
atacagagttgccagacactatagtcgagccaaacagacgctccctgtgatttatgtcaagaccagaagggaaagatttcag

SEQ ID NO: 279222 - DNA, 100 bp, Homo sapiens
cgtagagtcgctggagcgggcggagctgtgcgagagcctcctcacttggtgtactaatggtcacttgatgtgcgctggctgttttatccacctactagca

SEQ ID NO: 279223 - DNA, 100 bp, Homo sapiens
gactaaactgacaagccttcaaggagcccaggggactcaagcacagagggttcggaaaccgcgttgctgcacggggccccaggggctgcttccccgatat

SEQ ID NO: 279224 - DNA, 83 bp, Homo sapiens
aagacatggcaacaggaaagtctaagggatatggctttgtctcctttttcaacaaatggactctgatgccagtatggactgga

SEQ ID NO: 279225 - DNA, 74 bp, Homo sapiens
ggaactgtatgccagcagcttgttgtacaattcctgaatttgacaacttgtacctggatatgaatggaattata

SEQ ID NO: 279226 - DNA, 96 bp, Homo sapiens
ccaagagattcgatgctcagacaggggcctgccaggagtgaagaaagctttgggcaaatatggtcctgccgatgtggaagacactacaggaagtgg

SEQ ID NO: 279227 - DNA, 100 bp, Homo sapiens
caccaatggtaaaagttttgaaaacatcagcaaatggcttagaaacatagatgaggcagcactcgtcggaggcaccaccatgatcatcggccacgtcctg

SEQ ID NO: 279228 - DNA, 100 bp, Homo sapiens
tatgaagaaaatgggtttctagtaatcaaaaatcttgtacctgatgccgatattcaacgctttcggtctccatcatcaccagttccagtagtgaaaaaca

SEQ ID NO: 279229 - DNA, 100 bp, Homo sapiens
ccaaaagacgagtgaaagtaacctggttgtcacatacccccagcttagaggtgcttcaccctgccccaaggactatacaggctccaacccaagttccagt

SEQ ID NO: 279230 - DNA, 75 bp, Homo sapiens
agccctttgcaggatgcagaagaagccaaaaacattctggcccgttttacggagaagacttttactgtgaaattc

SEQ ID NO: 279231 - DNA, 50 bp, Homo sapiens
ccagggcaagccccgctccggccaacaagcagcggaggaggagaaagaga

SEQ ID NO: 279232 - DNA, 83 bp, Homo sapiens
cggcgaacgcggagagcacgccatgaaggcctcgggcacgacccctcctcctgtagagagtggtgctgccctctcgggatgta

SEQ ID NO: 279233 - DNA, 49 bp, Homo sapiens
aaccttcgatctcctgacgaggtgtcaaattgagaaccaggtagatccc

SEQ ID NO: 279234 - DNA, 75 bp, Homo sapiens
ccccgcagagcgcatccatcaaagctttgcgcaacgccaacctcaggcgagatgtcacgtgaactggaaatttca

SEQ ID NO: 279235 - DNA, 100 bp, Homo sapiens
ttctgttttgctgcccgaagcttgacctgatggccaaaagaaaggaagaaaatttttcctctcctaaaaatgccaaaaggccaagacaagaagaattgga

SEQ ID NO: 279236 - DNA, 100 bp, Homo sapiens
gcgagaggaggccgtccagcagatggcggatgccctgcagtacctgcagaaggtctctggagacatcttcagcagccgatcgggtcaggcaagtccatcc

SEQ ID NO: 279237 - DNA, 101 bp, Homo sapiens
accatccgtgtggtgtccatggacagagactaccacgtggcatgttaccactgtgagggagatgacgggagagacggagttggcagtgaaggacgcagagg

SEQ ID NO: 279238 - DNA, 50 bp, Homo sapiens
aagcagcccaatttttgcattccaggagattctggatgaaattgaagaac

SEQ ID NO: 279239 - DNA, 75 bp, Homo sapiens
atggtgacaacagagtccatgagcatcttgacagcagtagcaatgagcgtccagacatcagttccatccagagac

SEQ ID NO: 279240 - DNA, 98 bp, Homo sapiens
ggagcagcagcaaaagcatttacagcaacagcagttccttcagaggcaacagcaccttctcgcggaacaggaggaagagcaagcaggccctgagggac

SEQ ID NO: 279241 - DNA, 87 bp, Homo sapiens
cattgctcttagcaggaaggacaaaactattcaacatgtggaagtattttgttatgccagaacccttaggagaaatcttgagagtgg

SEQ ID NO: 279242 - DNA, 100 bp, Homo sapiens
gtacaatttgccagtgtttccacaatggaaccaattgttttacagtctgttccacatgatcattgtaataagattgctgtgctaaggagacagcaacgta

SEQ ID NO: 279243 - DNA, 51 bp, Homo sapiens
atgaccacaaacagccatcaagatattgatgatgttaagaagttcaaaccg

SEQ ID NO: 279244 - DNA, 74 bp, Homo sapiens
tctcaaaccacttctcagacaagttccatcccacctttgagtcagtaggcctggaaaatccccagagaggagtc

SEQ ID NO: 279245 - DNA, 83 bp, Homo sapiens
gcacgttcttccaagaaaccaacattcccaacagccaccaccaccaccagatgagaggaccctcatgctgcccctgaccgagg

SEQ ID NO: 279246 - DNA, 100 bp, Homo sapiens
ggtgcttgattttgtgcaggatccgtgctttgcccaaggagatggtctcattaaggatgaaattgattctgcagtaaagatgttggtgtcattaaaaatg

SEQ ID NO: 279247 - DNA, 101 bp, Homo sapiens
gaaataaatcagcagttatgaggcagagcctaagagaactatggcaacatcaggtgactgtcccagaagtgaatcgcagcccccggtccctgagaagcggc

SEQ ID NO: 279248 - DNA, 75 bp, Homo sapiens
ccggacccgcatgcaggcacaagtgcctccggagccagcgtggtggccatagacaacaagatcgaacaggccatg

SEQ ID NO: 279249 - DNA, 100 bp, Homo sapiens
acacagttcctctttctgaagatcagcttacaaaacactacacagcaaaataatgatctgctagactgctaacccgagcatccagcttccacaatgcctg

SEQ ID NO: 279250 - DNA, 90 bp, Homo sapiens
cccgggagtcatcttcaaagccctgaaggaggactggaatgaaattgaccccattaaaaagaaagaccttcatcacagcaatggagaaga

SEQ ID NO: 279251 - DNA, 100 bp, Homo sapiens
gagccaggaagagggactggaaccatctcagaagccatgcccctcaggctggaacttgccctgtctcctcgcagatgagttccaatgacaggatttacac

SEQ ID NO: 279252 - DNA, 100 bp, Homo sapiens
ctcagcaagactctcgagcccatcatcaattcctgaagattgccaagcccctctccagcctcactccactgattgctgcagctaaggaggcaacaaagaa

SEQ ID NO: 279253 - DNA, 100 bp, Homo sapiens
ttccaagctagagagtattctggagcaccttattcccaaaggcaattgtgggcacacttgaagctgaaaaagaaagaagaaaatctgggctatcctcaag

SEQ ID NO: 279254 - DNA, 108 bp, Homo sapiens
tgcctccttcttgaatagcccagtgaattcatctaaacaggcagcctggcatcctcgctacaacctcattgttgtgggccgatacccagatcctaatttcaaaagttg

SEQ ID NO: 279255 - DNA, 100 bp, Homo sapiens
tgggaaggggaaggaaacctctctgaaatctgacacctgctctcccggcaaggaaacttcgcaggctggtagacatagctgacattgagaatgaagagaa

SEQ ID NO: 279256 - DNA, 106 bp, Homo sapiens
gcaaagcggggacccagaccctggagcctcagttggaagcagccgatccagcctgcggagcctgtggggcagtatcaccttttgccatgatagcatttctttcatt

SEQ ID NO: 279257 - DNA, 75 bp, Homo sapiens
aacttttggccatctgacagatcaaccatgtccaagggacctgcagttggtattgatcttggcaccacctactct

SEQ ID NO: 279258 - DNA, 75 bp, Homo sapiens
agaacattgaagatcacaaaaatcaggggagaaagctaaggtatatgccctcattttgcttaagacctctggcca

SEQ ID NO: 279259 - DNA, 88 bp, Homo sapiens
atggaggccatcactttcaagaagttggtgaagggccatgcctactctgtgaccggggccaagcaggatccctccccgcggcggcgat

SEQ ID NO: 279260 - DNA, 97 bp, Homo sapiens
aggaagtcagctagagagccgtctcccctctctggagccgagagaggccggtttcccccaccagaagttgatgacgcctgagatgttttcagaaatc

SEQ ID NO: 279261 - DNA, 100 bp, Homo sapiens
cgtgcactgggccgcgcatttcggcaagggtgtcttttatgaataatcaaaagcagcaaaagccaacgctatcaggccagcgttttaaaactagaaaaag

SEQ ID NO: 279262 - DNA, 100 bp, Homo sapiens
tgctacctcgcccgggggcatcaggtttttctcccgctccagaaaaaggcgaagctgtgctcaggcccgggctggacgcagagccagagctgtccccaga

SEQ ID NO: 279263 - DNA, 75 bp, Homo sapiens
gaggaagtggaggaccctatagcaagaaactactaaagttcctggggaagcaaagtagaatttcataagaacaaa

SEQ ID NO: 279264 - DNA, 80 bp, Homo sapiens
gttcttcttcagtcagtccggcctcagcatcgtctgtgccatgatatctatacaggccttcatggtgaaacacctcttgg

SEQ ID NO: 279265 - DNA, 82 bp, Homo sapiens
tgcacgaaagctttcctaggccaaaaagaggtgtgttccagagaacaagccttcagacatttgctatattgacgctgagctg

SEQ ID NO: 279266 - DNA, 75 bp, Homo sapiens
caccaagggcgcccttcccctggatacggtcactttctacaagaaacaggaagattggaatctgcctggaacaaa

SEQ ID NO: 279267 - DNA, 100 bp, Homo sapiens
aacacatcaccttgatttttaatcccacggtgctggagaatctggtaaaagcaccattgtgaagcagatgaggatcctgcatgttaatgggtttaatgga

SEQ ID NO: 279268 - DNA, 100 bp, Homo sapiens
tgaagtcagtcattaatgaccctgttggaaggagcctgggagaggccaggcctccccggactgctagcctgcttttcctggggtccctggagccggagga

SEQ ID NO: 279269 - DNA, 50 bp, Homo sapiens
caacggttaccgtgacaaccgagcccggccaattcctgtccccccagcag

SEQ ID NO: 279270 - DNA, 83 bp, Homo sapiens
cccggggcagatccaggttcaggttgaaatcacaaagattagacacctttttagataggtgttcttcagcaccactgacaaca

SEQ ID NO: 279271 - DNA, 100 bp, Homo sapiens
cgtggaccacatagacatttacgcggatgtcggcgaagagttcaaccaggtctctcaggcagctgcagagcttcaacagtactgtatgcagaatgcctgc

SEQ ID NO: 279272 - DNA, 75 bp, Homo sapiens
gtgaacaggtgaccataactctgccaaatatagaacacaaacatttcactgaagatattcaaacaaggcaatatc

SEQ ID NO: 279273 - DNA, 100 bp, Homo sapiens
aagattcatttctcccctgttcaagaccaccgaacagcatgccttcgtctccgcattgcttaactggagcaactgaggtgctgggtcttcagctctaaag

SEQ ID NO: 279274 - DNA, 75 bp, Homo sapiens
ttggaagcagccgatccagcctgcggagcctgtggggcagatcaagaagctactctagaagtcggagcagaggat

SEQ ID NO: 279275 - DNA, 97 bp, Homo sapiens
tgctgcaccacgccaaagctggcaccatcattgcccgccagggagaccagcccaacggtagcggccagggcaaagtcccggggtcatttttgctacc

SEQ ID NO: 279276 - DNA, 60 bp, Homo sapiens
ctacttcaagatgagctatcatgtggagcttagcagtgtctgcaaaaacgaatcttttcc

SEQ ID NO: 279277 - DNA, 90 bp, Homo sapiens
agtgtgactgtggtactccaaaggtcagtactcctgcatttgtaccaacgaaaactcacgtgctgcttcatcgaatgagtggaaaaggac

SEQ ID NO: 279278 - DNA, 100 bp, Homo sapiens
ttttccctttggctttttcaccaccgtcttcaatgcccatgagcctttccgccggggtacagaagaacatgtgatcatccaggccgagttctatctgaat

SEQ ID NO: 279279 - DNA, 131 bp, Homo sapiens
gaaggaagaggtcatctcgctcggagcttcgctcggaagggtctttgttccctgcagccctcccacgcggcccttctcagcattcctggctttgttgagcggctttgcaaactggcgactcgaaaggtgtc

SEQ ID NO: 279280 - DNA, 100 bp, Homo sapiens
ccagtgtcatgcagaagattatacctcactattctcttgctcgatggctactctgtaatggcaggttggtcaaagaaaaagtgatgtatgaaaaagaggc

SEQ ID NO: 279281 - DNA, 75 bp, Homo sapiens
gtggtcaagttcaccatgagaggggctgatcccttatccaacatggttctaaccttcagtactaaagaagatgca

SEQ ID NO: 279282 - DNA, 87 bp, Homo sapiens
aaaagggaatcctttgggaaattatttagacccagaccagccaaagaaacaaaaaatacttgtggaggagatggcccctctgaaagg

SEQ ID NO: 279283 - DNA, 100 bp, Homo sapiens
ggacattcaacaagaaatcacagtgctgagtcagtgtgacagtccatatgtaaccaaatattatggatcctatctgaagtgaggagttgggggagttcat

SEQ ID NO: 279284 - DNA, 98 bp, Homo sapiens
aagcagagacaccaggacagaaaagacagtgttctgctttcatggagttcacagaagagtcgaggaggatttgtactgtgttcgcagtgacctgggga

SEQ ID NO: 279285 - DNA, 100 bp, Homo sapiens
gtctgaaggggttgtcctcacttctgtgcaacttcactaagtccatggaagaagggaataccttggcaagcagctccagtccgagcagccccagaccgct

SEQ ID NO: 279286 - DNA, 89 bp, Homo sapiens
cgggcacgaaggcttgctgctgcttctccagaacttcccttcctcgtagacacaggcccggattgcatttctacaaggcgaaagaaaag

SEQ ID NO: 279287 - DNA, 90 bp, Homo sapiens
cccccagacaagatggacaccgcggaggaaggtctcctctgagcctccggcctccataagacccaaaacagatgacacctcttcccagtc

SEQ ID NO: 279288 - DNA, 76 bp, Homo sapiens
aagctgggagagactggaccagaccatgggcctgagcatcagggagaagtttctgcctggattgaaacaaaaaaac

SEQ ID NO: 279289 - DNA, 75 bp, Homo sapiens
actgtgcgctcgatccagcaccatggggaagcgggacaatcgggtgagaggaggttcagatgagcccctgctgac

SEQ ID NO: 279290 - DNA, 74 bp, Homo sapiens
gaagctattgctgggattttgaggagcccactttccttgtggaactgtccagagtgctggcaaatccaggaaac

SEQ ID NO: 279291 - DNA, 101 bp, Homo sapiens
gccaatctctgcttgaaaggagaagacttggattctcagggtaaagcccacagcttgaagccaagcataaaggagaagctggcaggcagccccattcgtac

SEQ ID NO: 279292 - DNA, 110 bp, Homo sapiens
ggcggcgcgggtcggcagcgggagggcgcgcggccgagcggaggcggagtcggcgccgagaacatgggggaaatttgcagtggtgagaaaatgtataaagaaagattctg

SEQ ID NO: 279293 - DNA, 100 bp, Homo sapiens
aagatgtggagcacaaggtgacaacagtatttggacaacctcttgatctacattacatgaacaatgaggtcagtcattggcaccatgaactggaataaag

SEQ ID NO: 279294 - DNA, 100 bp, Homo sapiens
aacaggccctatggggcatacctatggctttattgacctcgactcccatgcgttatcaggaactgttgccgttattacatcagatgggagaatgattgtg

SEQ ID NO: 279295 - DNA, 80 bp, Homo sapiens
tctcttcgggatttgcgacgctgtcacaggttccagggtataccccgcgaatgaaggtgagaagccctaccactgcaact

SEQ ID NO: 279296 - DNA, 73 bp, Homo sapiens
ggaacccgagctggagctgaagcgcaggctgcggggcgcggagtcgggaggtcactctgtgagactgctgggt

SEQ ID NO: 279297 - DNA, 95 bp, Homo sapiens
caacactgttgtgatggaggaaatcagagaacctcatgctttccatcctgcccaagcacgtggctgacgagatgctgaaagacatgaagaaagac

SEQ ID NO: 279298 - DNA, 101 bp, Homo sapiens
aagtacccgtccatcatagtcaactgcgtggaagagaagtgtggggctgccttccaggaggatgatgtcatcatgctcaatggcaccaaggaggatgtgga

SEQ ID NO: 279299 - DNA, 100 bp, Homo sapiens
tgaacaacagctctagcctgatgaacacgcaggcgccgccctacagcatggcgcccgccatggtgaacagctcggcagaatttgttcctagagacagaga

SEQ ID NO: 279300 - DNA, 100 bp, Homo sapiens
ctggcactgagcggccgcggccatggcgtacgcctatctcttcaagtacatcataatcggcgacacaggtgtcatggagaaactccagctgggcccagag

SEQ ID NO: 279301 - DNA, 90 bp, Homo sapiens
gtgtgggagaggaagcggcggcggcggcgccgggcccgggggtggtgacagcaggtctgagcataaacttgaatgtgatttgcagcagag

SEQ ID NO: 279302 - DNA, 100 bp, Homo sapiens
aggggagcggcctcggctacctggtgcaggtgaagcccatggcaggtgctggagaatctggtaaaagcaccattgtgaagcagatgaggatcctgcatgt

SEQ ID NO: 279303 - DNA, 50 bp, Homo sapiens
acagagatgtgactctgtttgagagctccaagagtcaggatcgcaagtca

SEQ ID NO: 279304 - DNA, 74 bp, Homo sapiens
tctgggtccatcaccaaagagcagatgccaaatctggttgatgctatgaaactgggagtaaaggaaatgaagaa

SEQ ID NO: 279305 - DNA, 83 bp, Homo sapiens
cagcaacagctcggcgggctggaaggactgaaaactggatatttggtccccatggactttctggtcaccctgtgaagtggact

SEQ ID NO: 279306 - DNA, 100 bp, Homo sapiens
cggcgccgctgcccatggagggagtggacatcagccccaaacaggacgaaggcgtgctgaaggcataatcaccagcaacacccgggacaataatacgggg

SEQ ID NO: 279307 - DNA, 100 bp, Homo sapiens
gggagaggagctgtggataacgggaggtgaatttccatgtcaacatagtcctgatctcacattcttgaaggtggcattgaagagcactaagatcggaaga

SEQ ID NO: 279308 - DNA, 75 bp, Homo sapiens
cggccgcctggctccccatactagtcgccggattgacttggcctctacttcttgttaaggaaattcatctcttgt

SEQ ID NO: 279309 - DNA, 100 bp, Homo sapiens
gatgggcagagtctgcatgtggctgcaggacctctgtcagagaatgaaacactcatcgcatggcagagaaagctgatggatttgtcaacctgcctgattt

SEQ ID NO: 279310 - DNA, 96 bp, Homo sapiens
agaattttttgcaggggaaaacatccagtgtggtggaaatgacccgaccgcatgtctgtcatggacctcgccaatacttgctccagctttcagtcg

SEQ ID NO: 279311 - DNA, 82 bp, Homo sapiens
accctacccgcttcactggcaccatggatcatccagcagctcgtcaacggcatcatcacgcccgccaccatccccagcctgg

SEQ ID NO: 279312 - DNA, 101 bp, Homo sapiens
cccaggaccgccggccgggggacgagctcggagcagcagccagttcactgagacttttttgacggagagggacaaacaatccaagtggagtggaattcctc

SEQ ID NO: 279313 - DNA, 100 bp, Homo sapiens
tgacaatgtagaggatgacttctctaatcagttacgtgaaaccaatccgtaatctaaatggacattcaattgggcaatatagaatacatgctggaaaaac

SEQ ID NO: 279314 - DNA, 100 bp, Homo sapiens
cgccaccatgaactcgctcttcaggaagagaaacaaaggcaaatacagccccactgtgcagacccggaggtgttggtaaatcatgcttattgctacagtt

SEQ ID NO: 279315 - DNA, 100 bp, Homo sapiens
accccagtgaagctgccagtgaagaaagtaacagtgagatagagcagaataacctgggtatcttgtggtctgaaagagaagaaattgaaactgcacaggc

SEQ ID NO: 279316 - DNA, 97 bp, Homo sapiens
cgtgcagcacatgcaccggcagaagccgcccatcatccacagggacctcaagccaagaccgaggataggtgtggccattggcgaccagatcctggac

SEQ ID NO: 279317 - DNA, 82 bp, Homo sapiens
aggacatggacctgtacagcatcaactacctgcactttggggagcctaagtcctggaggctactcacagtcgaactacaact

SEQ ID NO: 279318 - DNA, 101 bp, Homo sapiens
gttcttttggggtagtgtctgggatccagtacgagttgaatcattgttcaaataagtttgtgaagaaatatgggaacctttttagcttggagcttggtgac

SEQ ID NO: 279319 - DNA, 101 bp, Homo sapiens
aggaagtgatccgaaaatctgggctaagtgctggcaagagcgatgtctactacttcagactgcttttcaggaagccttggacgctgcaggtgataaacttg

SEQ ID NO: 279320 - DNA, 75 bp, Homo sapiens
atcttgaatcatgaagctactaaccagagccggctctttctcgccttcgtgaccctgctgaatggggagcaggcc

SEQ ID NO: 279321 - DNA, 124 bp, Homo sapiens
atctgtcttcggtggactccttcggcagtccacccaccgccgccgcctcccagataacgaaggaggcccaacttcattcaataaggagcctgacggatttatcccagacggtagaacaaaagga

SEQ ID NO: 279322 - DNA, 80 bp, Homo sapiens
aattgacagagaggggaaaccccgtaaagtggttggttgcagttgtgtagtagttaaggctgaggcaggaggaatgcttg

SEQ ID NO: 279323 - DNA, 101 bp, Homo sapiens
tcaactgctgtattgcagaacagcctcagcctgttcttgctcaagtaccaactctatggacccaggacaggtttgtcccatgacctgctgtgaacagtgtg

SEQ ID NO: 279324 - DNA, 90 bp, Homo sapiens
aggacacttataggctttttaagaagcattgatcaatttggatgcatcatctgcagacatcagaaaagcatatcgtaagctttcactaac

SEQ ID NO: 279325 - DNA, 100 bp, Homo sapiens
aaaatctttcgccgggattctgacctgacttgtttgcagaaagaacaaactctagccctcaggaaagaagggattggagttgttttggattctgaactgc

SEQ ID NO: 279326 - DNA, 82 bp, Homo sapiens
gccgctggcagccgcggatctcaccgccgctcagggcccctggccccaacatggcccgtcgctctcagagctcctcgcaggg

SEQ ID NO: 279327 - DNA, 100 bp, Homo sapiens
ctgggggttcgcgcccgccgacccgcgccctgctccctctcagcacctgggcggacgaataatccagaatggctactctgatctatgttgataaggaaaa

SEQ ID NO: 279328 - DNA, 99 bp, Homo sapiens
gagcggcggcctcggcctccggcgcagcccggaaatgtccggcaagatcgagaaagcaggcagatcgggagcggtgccgagaaaaatttccttactaga

SEQ ID NO: 279329 - DNA, 82 bp, Homo sapiens
gggggattctcgacctgctaacagaactggaccttttcgctgctggagccagttctgcttctcggcaaggagcgatttgctg

SEQ ID NO: 279330 - DNA, 75 bp, Homo sapiens
ttaacagcgcgttcccgttggcgtctgagctcgacccctttgaatccagtgatcccttttcatcctccagtgtct

SEQ ID NO: 279331 - DNA, 80 bp, Homo sapiens
gcgtctatggcaccgcggagttcaaggagcctacgccgagcctcaccgagctgagcagctagccagtgtacagtatacac

SEQ ID NO: 279332 - DNA, 98 bp, Homo sapiens
cacaaatgcaaatacttgtgcactgggagaggcccttgagggaaagctacttgatcaaacatccgatagtcacaaatttgaaaccgtgcttcagaatc

SEQ ID NO: 279333 - DNA, 100 bp, Homo sapiens
cggaagggtctatggccgaggcggtgaagccccagcgccgggccaaggccaaggccagccggactaaaacaaaggactcacaccacccggcaagaactgc

SEQ ID NO: 279334 - DNA, 100 bp, Homo sapiens
ggacaggaggaggagcaggaagctgccggggaagatcatccaattatgatgggttttgaaccccttgtgaaccagaggctacttccacctaccttccctc

SEQ ID NO: 279335 - DNA, 107 bp, Homo sapiens
ccgcaaccattgacgccatgtcgggttattcgagtgaccgagaccgcggccgggaccgaggattttgcaagaacgaggctcaaggatgtgagggacacagtattgac

SEQ ID NO: 279336 - DNA, 100 bp, Homo sapiens
gggtttgctgtctaacagtggacaaccagaaagaaagtttatgcaaacctttgttctggctcctgaatgccatcagacaagatcagttgatcagaacaga

SEQ ID NO: 279337 - DNA, 74 bp, Homo sapiens
gacaaccttcccagaaagtccaagctcgtgatctgtgactttggcctggcccgtgttgcagatccagaccatga

SEQ ID NO: 279338 - DNA, 100 bp, Homo sapiens
ttgaacctatctgctttcaagctggtcatcatgatgaaacttagacacagatgcccaggctgaggaagagatcaagcaagagatgaacacactgcagcag

SEQ ID NO: 279339 - DNA, 50 bp, Homo sapiens
tccgcagctctggttcctgttgcggccgagtgatcagcagctggactgtg

SEQ ID NO: 279340 - DNA, 74 bp, Homo sapiens
cagacagaatctattaccttggagaaccagcagaaatccaccaatgtagtctatcaggcccaccatgtgagcag

SEQ ID NO: 279341 - DNA, 100 bp, Homo sapiens
gaaatctgggatggattccctgatggctgcctggtgcgggcagagaggtttcagttgatcgtagagagggacgtgagaagcagcttcccttcctggaagg

SEQ ID NO: 279342 - DNA, 100 bp, Homo sapiens
aggaaactgcaaagactgggaagttcttaaaaaggtgcagagcattgtagaccaaggagccatggataggagaagtatgggtgaaacagaaagtggagat

SEQ ID NO: 279343 - DNA, 100 bp, Homo sapiens
tgtggccagtaggcaatcacctgaaggatctgacttccagaagctatgagcagacgtgtggttcggcaaagcaagttccgccatgtgtttgggcaggcag

SEQ ID NO: 279344 - DNA, 100 bp, Homo sapiens
ccgccacctcgagctgcggtagcagcgactcatgagagcgcggccggaggacagattattcaggacagggagttgaccaactgcaaagagtgattgacac

SEQ ID NO: 279345 - DNA, 71 bp, Homo sapiens
gcagagagctattattccctgtattaaagatagctgatcagcttccttgggttttgctgatgacacaagag

SEQ ID NO: 279346 - DNA, 50 bp, Homo sapiens
tggaccagcagaaacctagagtgcaaatccagtttgctgatgacatgcag

SEQ ID NO: 279347 - DNA, 100 bp, Homo sapiens
gcaaaggtcaccagtcccaagtcgtccccctctccgccccccaggaggggcgagagggagccgcagctgatgtcagattgatcgtgtcctgtgctgaaga

SEQ ID NO: 279348 - DNA, 82 bp, Homo sapiens
ctgggcctggactttcccaataaactaatctggattcactccctctggttgatacccactcaaaaaggacacttctgattaa

SEQ ID NO: 279349 - DNA, 75 bp, Homo sapiens
gggcaacttacccgagaacgtgcgggaagagaagatcatcgagcatttcaaacgttccagggtctccctccactg

SEQ ID NO: 279350 - DNA, 90 bp, Homo sapiens
ggaataggagctggggagcccttctgcgccacaggccaagatcaaggctcgagatcttcgcgggaagaagaaggaggagctgctgaaaca

SEQ ID NO: 279351 - DNA, 75 bp, Homo sapiens
gctgaagctgtctctcgggtcctcaataagcttggagtgatgtccttgcattgcccatttttaagcaagaagagt

SEQ ID NO: 279352 - DNA, 51 bp, Homo sapiens
ctcccaagtagttgggattacagatgacctgagaaccttgtgctccaggct

SEQ ID NO: 279353 - DNA, 90 bp, Homo sapiens
ggggccgacgagtccggaggggctgccgcgggagggagggcaatgagccaggggagaccactcagatcacataccatcagcttctggtcc

SEQ ID NO: 279354 - DNA, 100 bp, Homo sapiens
ctcgcagtcatttatcatcagacctcagaaagggaagactgagagcgaggcgcgggagatcgaacacgtcatgtaccatgactggcggctggtgcccaag

SEQ ID NO: 279355 - DNA, 110 bp, Homo sapiens
caagtaatcagtctttgacaagtgatgagaagctgtcggagcttcccaaggttcgactagtgatagtggatggtattgcttttccatttcgtcatgacctagatgacctg

SEQ ID NO: 279356 - DNA, 100 bp, Homo sapiens
gaagatttagaggccgctacagaagtccttaagttcagacttaggagtaaaacagaaaagtgaactaaacagtcgcttggaagagaagactaatcagatg

SEQ ID NO: 279357 - DNA, 100 bp, Homo sapiens
tgccacagcgctgaggctggccttgcagtacagaaatgggacgtcggtcatcagatactgaagaagaaagcagaagcaagagaaaaaagaaacaccgtag

SEQ ID NO: 279358 - DNA, 88 bp, Homo sapiens
gagatcccaccgttccaccccttccaccccttcccagccctacctgagaacgaagaggcatgccaggtggaagtgaggctgctgctgg

SEQ ID NO: 279359 - DNA, 100 bp, Homo sapiens
gctgtcggatatgaagatcatgtcccaagatgccatgatgatcacggatgaggtcaaggaccttgcagatgcttcgggagaacctggaggaggaggccat

SEQ ID NO: 279360 - DNA, 90 bp, Homo sapiens
cacaagagccttggggaagacagttggaagctcagacatggaattgaatgatctggcacgggaccctccagcacagtgttcagcaggtcc

SEQ ID NO: 279361 - DNA, 73 bp, Homo sapiens
ttgacgacgttgaccgcacactggatgaatggaagcacgaaagacggtcactgcctgggacacagccattgct

SEQ ID NO: 279362 - DNA, 83 bp, Homo sapiens
cgcggagagcacgccatgaaggcctcgggcacgatgatatcatcaagttgaatcgaaaggaagggaagaagcagaattttcca

SEQ ID NO: 279363 - DNA, 100 bp, Homo sapiens
tcccgtgtggcgtttatagagtctctgaagagtgctacctgggcgatgccttccgctgtgccagctgcccctaccttgggatgccagccttcaaacctgg

SEQ ID NO: 279364 - DNA, 82 bp, Homo sapiens
acagaggccaacgtggcagagagagttcaagctgaagaagatgtggaaaagtcccaatggaactatccggaacatcctgggg

SEQ ID NO: 279365 - DNA, 100 bp, Homo sapiens
catgttggaaaaagcagcagagttactgatgagctgtttccgggtctgtgccagcgacacgccactcgaccggatatgatcaggatcttgtcagcagccc

SEQ ID NO: 279366 - DNA, 51 bp, Homo sapiens
ctttgacaatacaggaaatgtttgaataggaaaattgtccacggctgatgg

SEQ ID NO: 279367 - DNA, 97 bp, Homo sapiens
atccccatcaccctgttcatggacctgcaggcggtgctgccgcgcgagctctacccagtcgaggtctgggaggggctgaacgtggtgaagacaggcc

SEQ ID NO: 279368 - DNA, 85 bp, Homo sapiens
aaggagacgtcgcctctgcttcggagaagacaactgttagttttgtggcttactgctgctccacccagtgtctgcagacttttga

SEQ ID NO: 279369 - DNA, 100 bp, Homo sapiens
ctgtggcgccccaactcttcgccagcatatcatcccggcaggtaaatgagctggatggtatcccgttgatcctggacaactgcaacatcagtgacagtaa

SEQ ID NO: 279370 - DNA, 97 bp, Homo sapiens
ccgaagccaccgcggccacggagaagggcgagaagaagaaggaggtgaccaagaatatggcccaggtgaccaaagccctggacaaggccctgagcac

SEQ ID NO: 279371 - DNA, 98 bp, Homo sapiens
gcgagactgcggccgaagcgtggggcgcgcgtgcggaggaccaggcgcggcgcggctgcggctgagatcactggggtgatcctgctggctgttggagt

SEQ ID NO: 279372 - DNA, 97 bp, Homo sapiens
tccggttatggcgtcattatgcagccagggagtctctgagaacaagccagccagaggagaagaaggatgtttctctggattcagatgctgccggtcc

SEQ ID NO: 279373 - DNA, 100 bp, Homo sapiens
cagctcagaggccatttccattgacctgcttcagaaaaaaggaccttttccagtggtgagtttaatggtgggatctgttgttctgagcatggcccccgac

SEQ ID NO: 279374 - DNA, 75 bp, Homo sapiens
gagcagctactactccaagttccaggcagggaatggctcatggggatatccggtcaaaatgcagatcttcgtgaa

SEQ ID NO: 279375 - DNA, 76 bp, Homo sapiens
ctatgtgctgtgtccggacaacggctgcggcgacaattttggaaatcctcattgacgattcaatttgttgaaggcc

SEQ ID NO: 279376 - DNA, 74 bp, Homo sapiens
ttttatattcatctcaaaaacaaaattctgaactcaggacttggcaacagaaacagtcctgctccagctgtaac

SEQ ID NO: 279377 - DNA, 83 bp, Homo sapiens
gcttttggaagtggagattatactgctgctatagccttccttgataagattttagaggtttgaattttctcggagaaagacag

SEQ ID NO: 279378 - DNA, 51 bp, Homo sapiens
cccctttgatccctgtgtgctgaagagaattcaattcgtcataatctgtcc

SEQ ID NO: 279379 - DNA, 51 bp, Homo sapiens
taccaggaggccaggggtgtcgccatgggagagcacatctgcctgatccgc

SEQ ID NO: 279380 - DNA, 90 bp, Homo sapiens
acttctttgcacagcctgagtaattgtaaaaaacttaagtacattgatgcacaggagaatttagttgagagcaaacaccacaagcttgcc

SEQ ID NO: 279381 - DNA, 75 bp, Homo sapiens
tacgcctggtcaaacctggaaatcaggccctggccaacgtcaacattgggagcctcatctgcaatgtaggggccg

SEQ ID NO: 279382 - DNA, 75 bp, Homo sapiens
tatttggggagaatgactgaggagccattgatgtgtgtcaatggcatgcagctttatggaaaatctcgccgagaa

SEQ ID NO: 279383 - DNA, 75 bp, Homo sapiens
aaggaacagagggggcaaagccaacaaccccccgtatttgccccccgagcttctcagatgaccaagatggtgctg

SEQ ID NO: 279384 - DNA, 100 bp, Homo sapiens
ctcggccccgggccccctggagctggacctgacgggtgaaaggtgtagcagtcactcggcctacacccacagcatcgaccttgtgaacccagcgacctga

SEQ ID NO: 279385 - DNA, 100 bp, Homo sapiens
gtagttcctacctcaaatgtgctcacgatgttgaatgatgctttaacacattctgcagttttaattcagcttccaatcagaagactatacaacctcctag

SEQ ID NO: 279386 - DNA, 75 bp, Homo sapiens
gatgggtcattatgaccagagtattgccgcggtggaaatggagatgttctcagtgcagctgagtcttggtgagca

SEQ ID NO: 279387 - DNA, 100 bp, Homo sapiens
tgctccaaccttttatatactatagatttcttacccttcgatattcgtctcgaagaaacccatattgtcgcagaaggtataggcacagaactcaaagctc

SEQ ID NO: 279388 - DNA, 100 bp, Homo sapiens
gcattctaagacgaagagggctccagatcttagcaaagcaatgtctcaagatggtgcttctcagttccaagaagtcattcggcaagagctagaattatct

SEQ ID NO: 279389 - DNA, 100 bp, Homo sapiens
tcagtgaacagacacgggtgaatgctgctaaaaacaagactggggctgctcccatcattgatgtggtgcgatcggcttctcacggcattcagcagcagcg

SEQ ID NO: 279390 - DNA, 51 bp, Homo sapiens
ctcccaagtagctggaattacaggatgacatgcacttggtgataagaaagc

SEQ ID NO: 279391 - DNA, 100 bp, Homo sapiens
taccacgccgtcaaggaccggcacaaggacgttctcaagtggggcgatgagtctttataacctggcttcactggaactgagagagaatcttcttacatat

SEQ ID NO: 279392 - DNA, 75 bp, Homo sapiens
gcagatgagaaggttcagttggcaaaccagatatatgacttggtgacagaccatgccaccactgccctgctccac

SEQ ID NO: 279393 - DNA, 75 bp, Homo sapiens
aaggaccaagatggcagcagtgactctgctggctttggcgtatacacaggaactcctcctcccacatctgatgga

SEQ ID NO: 279394 - DNA, 90 bp, Homo sapiens
gccatttttccagccagcgtgtgcttacttcatgtctctgggtcacattttggttgaaggggaccagctgcctccaggacacacagtcag

SEQ ID NO: 279395 - DNA, 75 bp, Homo sapiens
tcggcggcgcccggatgggcagctgaggatgctgacctgttggatgttgaaagcaaacactttgaagacctggag

SEQ ID NO: 279396 - DNA, 75 bp, Homo sapiens
ggagggagcgaatccacacgagagctctccagcatccatagtccttcagatgtcttagggaaaagtcttgctgat

SEQ ID NO: 279397 - DNA, 100 bp, Homo sapiens
agccagctcctggggctgcacgagcaggctcctttgccagcacgctgcccacctaccagcgctccgaggtgatcctcttcatcatgagcaaggtcccgcg

SEQ ID NO: 279398 - DNA, 75 bp, Homo sapiens
ttctgccacagctactccatctggtacctcatggcagggccaggttccagcagtgaggaggatgaggcctctcac

SEQ ID NO: 279399 - DNA, 100 bp, Homo sapiens
gataagaatgttctggacagtgaagatgtttggatggttgagttctatgctccttggtgtggacactgcaaaaaatatgagaacggccgaggcagctccc

SEQ ID NO: 279400 - DNA, 137 bp, Homo sapiens
cgagggccggttggcggcagcctgggacgcgcttatcgtgcggccagtccggcgctggcgccgcgtggcagtggggcaaagatgccttttgatgccaacaaactgtattgcagtgaagtgctggccatattgctcca

SEQ ID NO: 279401 - DNA, 97 bp, Homo sapiens
tcaacggccggaccggctggttccccagcaactacgtgcgcgaggtcaaggccagcggcgacattgactacagcaccgtgctcctcggcatgctggt

SEQ ID NO: 279402 - DNA, 100 bp, Homo sapiens
ccagacaagatggacaccgcggaggaagattccactgtgtaaagtaattagattcaacatagactacacgattcatttcattgaagagatgatgccggag

SEQ ID NO: 279403 - DNA, 82 bp, Homo sapiens
actaacctcaacctctgccatcacaaggagttacttccagagtcttcaagagtgccaactgggaccaggaccccagaccaca

SEQ ID NO: 279404 - DNA, 75 bp, Homo sapiens
cctgctggatggcaacatggacatcaagctggcaggaattggtggagagaaggcgcaccatgatggaagatttcc

SEQ ID NO: 279405 - DNA, 49 bp, Homo sapiens
gtctatgtggcgcccggcataggcgtggtgtccctcgtggccgttcacc

SEQ ID NO: 279406 - DNA, 83 bp, Homo sapiens
cgagagcaagctctataagattcttcaaggtggggttggcatcccccacatacgaatcatcggactcaggtacatctgtgagt

SEQ ID NO: 279407 - DNA, 90 bp, Homo sapiens
agctggagctggccatggtgccccactatggtggcatcaaccgagttcgggtgatggcccgctccctctccccacccccggagctggaag

SEQ ID NO: 279408 - DNA, 75 bp, Homo sapiens
ctatctgaagacattgacctgctgaaatccaggatagagagtgagctactacccacagatggcatgatccgaaaa

SEQ ID NO: 279409 - DNA, 100 bp, Homo sapiens
ctccagggaaggcactcaaaagtggggggcaggaaaggaagctgaatatggtgggcatgatcagatagatttgtatgacgatgtcatatctccatctgca

SEQ ID NO: 279410 - DNA, 90 bp, Homo sapiens
cagcagctgtactggagccacccgcgaaaattcggccagggttctcgctcttggaaaccacccctactcctaatcccccgactacagaag

SEQ ID NO: 279411 - DNA, 51 bp, Homo sapiens
gccaaaaatggcccagacacagaaagggtttcgaaaaaacgatgaaatgaa

SEQ ID NO: 279412 - DNA, 53 bp, Homo sapiens
aggcaccctgcacaccctgcacagctaccatcgcctcgcggcattcgctctcc

SEQ ID NO: 279413 - DNA, 75 bp, Homo sapiens
tggacagctccttcctcacgttctcaggcctccacgctgagtgggctgagggccatgtcagttttctgccaccta

SEQ ID NO: 279414 - DNA, 75 bp, Homo sapiens
gcgtggatggcctattacatcaatcaccctctctacactccccctaccctcaacaggaggcgcagaaaatcttca

SEQ ID NO: 279415 - DNA, 74 bp, Homo sapiens
tgcaagattgtggtgcacacgccctgcatcgagcagctggagaaggaggtgatgcaggattaccgagatgagct

SEQ ID NO: 279416 - DNA, 75 bp, Homo sapiens
ttgcgagcaggttctcggagggaccgggatagggtgaggacgcttgagcggaagttagaagcaaaaatgatcaag

SEQ ID NO: 279417 - DNA, 97 bp, Homo sapiens
gggagacctctcccacctcctcgccatcatcttgctactgctcaaaatctggaagtcccgctcgtgcgccggcatcaagcagatcctgccacaccag

SEQ ID NO: 279418 - DNA, 51 bp, Homo sapiens
ggacagccagccaccacaatgaaagaatttatccagttggcgaaggacttt

SEQ ID NO: 279419 - DNA, 83 bp, Homo sapiens
gtcatcaagccctttgccaccattccttcaaatgaggtccagtggcattgcagagcacggatggttgcaggagccaactttta

SEQ ID NO: 279420 - DNA, 82 bp, Homo sapiens
cattgcaattgcaaaggaaaagcatggctacaatgtggaacagtactgccaaatctgtcgaaagggagataatgaagaactg

SEQ ID NO: 279421 - DNA, 112 bp, Homo sapiens
gatgaagcagctggcttagaagcagatctggaatgcaaacagatctggcaaaatttgggcgcggagtcgcggcgggtagggcggcgtcgcgtgcgtgacgtcatccagcggc

SEQ ID NO: 279422 - DNA, 90 bp, Homo sapiens
ggccgacgccatcaacaccgagttcaagaacacccgcaccaacgagaaggtgctggctgctgtctacaaggctctgagtgaccaccacat

SEQ ID NO: 279423 - DNA, 82 bp, Homo sapiens
gcgggagctggacggcgagcgcgagcggcgcgagaaagtaagaacaagagagttggaaagcagttagcctcacagaagatcc

SEQ ID NO: 279424 - DNA, 100 bp, Homo sapiens
gtcttccagttcatctaactcttatttctccgttggcccaaccagtcccagcgctgtcgtgctcctctactcgtgtacacttgactgtgaagtggctgtg

SEQ ID NO: 279425 - DNA, 101 bp, Homo sapiens
caggaactgaattttgccagcaaccagtgagtgaccttggaagtggatccttcccccgaaagcccggctttcaggtctttaaggaggagaagtacttgaaa

SEQ ID NO: 279426 - DNA, 50 bp, Homo sapiens
tccagaggggtgacagcgaaattattcccggcaggagcaggaggaggagg

SEQ ID NO: 279427 - DNA, 75 bp, Homo sapiens
ctcaccaacagcagcaactgcagggatattaaacaccgtcgaattccaatcttattctttgcaaataaaatggat

SEQ ID NO: 279428 - DNA, 100 bp, Homo sapiens
gagagggatgggttacatgcccaagaggggacttgatgttaacaaatgtgagattgccagaattctgcttggtcagaatcgtgatggcattgtgttcagc

SEQ ID NO: 279429 - DNA, 80 bp, Homo sapiens
agctgctgaagcccaccgaattagaagctggcagggcggagatgctggaccacgccgtcctgcttcaggtgatcaaagaa

SEQ ID NO: 279430 - DNA, 75 bp, Homo sapiens
cacaccatccttctcgctgcaggagtgactgcaccaagctcttcagccagggcattggaggggagcaggcccagg

SEQ ID NO: 279431 - DNA, 90 bp, Homo sapiens
gttgatttctccaaggatctgctgaaaagtattgggaaagggtcgttgtggtgcatagacccagagtatagacaaaatctaattcaggct

SEQ ID NO: 279432 - DNA, 83 bp, Homo sapiens
tgcgcggggcgtgcgcgtcctcctccccaggcccgccgcctccctgccaagaagccgaggccaaaagagcatgtgagtggctt

SEQ ID NO: 279433 - DNA, 90 bp, Homo sapiens
ctgggagcaaatatccagaacaggctcaggctgcacgaagaaaaggttattaaagatagacgtcatcatctcaagacctacccaaactgt

SEQ ID NO: 279434 - DNA, 76 bp, Homo sapiens
attgctcactggaaggatcataggtggcactcatgtctcactgccccactcaggatcagttcttaagagcagcccc

SEQ ID NO: 279435 - DNA, 75 bp, Homo sapiens
ggtgtacacactgctgtttaccttggcgaggcctttcaccaagtccatggactggaatgtcacgtggaataccag

SEQ ID NO: 279436 - DNA, 100 bp, Homo sapiens
cagaccttcgcctcgccccgccggttcctcaccctcggggagcaacatggaggacctgaaaaacgtgttcccacccgaggtcgctgtgtttgagccatca

SEQ ID NO: 279437 - DNA, 51 bp, Homo sapiens
gtgacctgaacctgaaaatcccagaggatggagatgaagatgaggaagctg

SEQ ID NO: 279438 - DNA, 75 bp, Homo sapiens
taaactatggacgactccgaggaacattgagggagcagattttaagagtaaaagaagatgagaatgttccatttc

SEQ ID NO: 279439 - DNA, 99 bp, Homo sapiens
gatggaatcatggatgctgccaattttgttgtggaaaggaggagaacccctgctgaaattcgagaggagtttgagcggctgcagagagagagagaagag

SEQ ID NO: 279440 - DNA, 74 bp, Homo sapiens
cctcgaagtgcgcaaacttgacactcaccctgaccgattctgaaagtcaagaagacatcatccggaatattgcc

SEQ ID NO: 279441 - DNA, 100 bp, Homo sapiens
ctgcagccatggccccaatcaaggctcctgggtgtggacaaggtgctgggctatgccctcaacgagtggctgcaggacatccgcaagaaccagctgcccg

SEQ ID NO: 279442 - DNA, 100 bp, Homo sapiens
cggagttaccccagacccctcagcgtctggcatctaataactgtgtagaatacattgaggatgatgaggagcacgtggacattgagactgtagaagagct

SEQ ID NO: 279443 - DNA, 98 bp, Homo sapiens
agatgggggtgaagctggagatatttcggggatccaggtccggcacgatcaagacccaggctacatgcatcacaagtttgccatcgtggacaagaggg

SEQ ID NO: 279444 - DNA, 75 bp, Homo sapiens
tgtgaacgtgctgtggaatatatgataaacaggggtcacatgacgacagaagccaagagggctgcaaagatggaa

SEQ ID NO: 279445 - DNA, 100 bp, Homo sapiens
atacaccaagaggactttgatgcgtctacatcccaacataaagttttttgctccactcaagcctgttagaatcaccatggaatacagctccagtgggaag

SEQ ID NO: 279446 - DNA, 80 bp, Homo sapiens
aggaggtcctgccgtccatgcggaagatcgtcgccacctggatgctggaggtgctcttacagcctgttccaagtgtggct

SEQ ID NO: 279447 - DNA, 82 bp, Homo sapiens
caccacaccacggggagggatttttttctattttccctacgaaaaacagatctttttaagtcccaggggcagccactggcct

SEQ ID NO: 279448 - DNA, 75 bp, Homo sapiens
cgacgctggagtggggagaagcatcatggttcaacactcactgccacaacgacattgtcaaccttctcctggact

SEQ ID NO: 279449 - DNA, 100 bp, Homo sapiens
aaactcgaagaacagctgtggaaagaagttgcaaaacactgggaatcagtgtctgtccctgaagggtcattaaatcagctatgttcttcagaagaaccag

SEQ ID NO: 279450 - DNA, 83 bp, Homo sapiens
cgtggacagcctcatcacccggctgctggagggacctgaaggagaagaaggagaaggtggaggagaaggcaagccggaaagag

SEQ ID NO: 279451 - DNA, 100 bp, Homo sapiens
gtggataccccgagcggcaccaacagcggcgcgggcaagaagcgctttgaagtgaaaaagtaccaaatatgccccaacagcggcaagaccagcatcatca

SEQ ID NO: 279452 - DNA, 100 bp, Homo sapiens
tgactatattttatactatggtggcaaaaaagaagacttcaagcgtttgggctggcttggctttttcagaggaaacagagactctcagacatgaatactg

SEQ ID NO: 279453 - DNA, 100 bp, Homo sapiens
ctgaacaccgcacaggcaggaggcatggccaagtgtttgcagaagccaaacctgaccacagacactaaggacaaggagtacaaaccccatgatattcccc

SEQ ID NO: 279454 - DNA, 73 bp, Homo sapiens
tgagaacaacttaaacggcgattttagtgaagttgacgctcaagagcagatggcagttaaacagggaaaccaa

SEQ ID NO: 279455 - DNA, 113 bp, Homo sapiens
agtccgcgggaagatggcggcgccgctcatccccctctcccagcagactcagcccacctgcacccaggtgaaataaacagctttattgctcacacgaagcctgtttggtggtc

SEQ ID NO: 279456 - DNA, 80 bp, Homo sapiens
agacctcggggccggcctcgcaaggcgcttcccctttccagagagccagaaagaagaacttgctactaccagcaccatgc

SEQ ID NO: 279457 - DNA, 98 bp, Homo sapiens
caaatcgatgtgcatgcacttacggatttactggaccccagtgtgaaagagccacagcaattgtctgctattttaaaagcactgtgatgcttaaatat

SEQ ID NO: 279458 - DNA, 100 bp, Homo sapiens
tgaccaggtgctccacgaagacgaaaccacggttctagtaaataccgcttgctgtgttttgatgttggtggctaagctcatccagtgtattgtgtttggc

SEQ ID NO: 279459 - DNA, 100 bp, Homo sapiens
caatgcaatgctgtttgccctgaacatcatgaattcccaagaaggagatggtctgtcttctgctgatcccaactctgattggaatgcaccagcagaagag

SEQ ID NO: 279460 - DNA, 106 bp, Homo sapiens
gggcaatcgggattactgttctggttatcttcatcatcatcatcatcggtcctactgctctgttggctcatgaaataggttttggaagtaaagttacaacacaccc

SEQ ID NO: 279461 - DNA, 102 bp, Homo sapiens
ttgacaatttgcttgcgcttataagttcctggtccagaactttacacagaaaaggtgctcaaaggatatttgtttaatgaatgtggtatgctgacatttaaa

SEQ ID NO: 279462 - DNA, 75 bp, Homo sapiens
gcgctagtctgaccctccgccaggcaaaaggaaggtctcctctgagcctccggcctccataagacccaaaacaga

SEQ ID NO: 279463 - DNA, 100 bp, Homo sapiens
cgagctgccactgcccccgggctgggagatgaccttcacggccactggccagaggtacttcctcaaggtgttggaactcgccataaggcattgatcagga

SEQ ID NO: 279464 - DNA, 100 bp, Homo sapiens
cctgcaagacttaaaagtaggaggccataggaaaaggatacagagtagagtttcatgaacctgaaacttggtggaaatttgatcctgaagaattagaaaa

SEQ ID NO: 279465 - DNA, 101 bp, Homo sapiens
tgctgctgctgcccgcgtccgaggctcgcgggcggcgggcccgggatgctgatatgctaactggtgatgagcaagtatggaaggaagttcaagaatccctg

SEQ ID NO: 279466 - DNA, 100 bp, Homo sapiens
aaccgacgcgttgcattggccacaattgtgacaattgtgttgctccatatgctgctttctgtgggctgcttgattctttcagtgacctgtatagttccta

SEQ ID NO: 279467 - DNA, 100 bp, Homo sapiens
ctcctcgccgccaccgcccaggaccgccggccgggggacgagctcggagcagcagccagtattctaccttgtaaatactgttatttgtatatactgtaaa

SEQ ID NO: 279468 - DNA, 100 bp, Homo sapiens
gcaagatttaaaaactacgccgagctgacgattatgaagactctggaagcccacaaagactcccataaggagccaccaaaatgccagaagagatggacaa

SEQ ID NO: 279469 - DNA, 83 bp, Homo sapiens
ttgtggctggctggatctctgctaaacaagcattgaggaagcagcaaacaaaggcatggaagaaactacaacaacaaaaagag

SEQ ID NO: 279470 - DNA, 100 bp, Homo sapiens
tcagatggagtgactccactcattggggaggtctgaatttcctgctgctgttcacaaagatgctttttatctttaactttttgttttccccacttccgac

SEQ ID NO: 279471 - DNA, 129 bp, Homo sapiens
ggtaccggccccctgactacagggatctcatcagcttcaccgtttactacaaggaagcgtgatgaacttcaataccctgatgaaaccagctgctgtgttgttgtgagctcccctgtggagaagccaaca

SEQ ID NO: 279472 - DNA, 95 bp, Homo sapiens
ctgtcatcctggaccaggatacttgttcagggttgccatgctgctgctgagctgatcaaggaagtctctctagggtcctgagaacattatctgta

SEQ ID NO: 279473 - DNA, 75 bp, Homo sapiens
tgtcggcaaggggttgtcaccggcttccgcatccaagatgaagagtgtcccagctgcatctctggtgacccctgc

SEQ ID NO: 279474 - DNA, 83 bp, Homo sapiens
cgtccagaagaccaagtacctgcagatcctgacctctctgatgagatggatcggaagctcttcgtgggcggtcttgactggag

SEQ ID NO: 279475 - DNA, 97 bp, Homo sapiens
ggaagatgaggacagcatggatgggctggagacaacagaaacagaaacgattgtggaaacagggcgcaccctacgacgcgcacaccaccggcatgac

SEQ ID NO: 279476 - DNA, 75 bp, Homo sapiens
agcccccagaaccaggcccccaactcagccatctgcggaggtcaagcctggcacctgtgtttgctctgtttgtac

SEQ ID NO: 279477 - DNA, 75 bp, Homo sapiens
agaaagcatccgtggaaacgctgacagagatgctgcagagctgtgtgagcgacgtctcctcaccacagtgctgtg

SEQ ID NO: 279478 - DNA, 98 bp, Homo sapiens
cttcaatccaatccggctgacacctaatattaatcatcgaacattatgatccagaaacacgatggcatcacggtggcagtgcacaaaatggcctcttg

SEQ ID NO: 279479 - DNA, 82 bp, Homo sapiens
ccagtgagggtgtacaaatacccctttgaattaattatggctgcctgatcttttggccagaaggagattaaaaagatgcccc

SEQ ID NO: 279480 - DNA, 100 bp, Homo sapiens
agcctgcccaccggggacaggaccaggaggagctactacctcaatggtggtgagccggctgggcctggactccctgtgccccttcagccctaaggagcgg

SEQ ID NO: 279481 - DNA, 83 bp, Homo sapiens
gaagtaagcttctacaaaatacttcaggaaaaggggaagatagtgatgtactcagtataaatgcagatgcttatgacagcgac

SEQ ID NO: 279482 - DNA, 83 bp, Homo sapiens
gcagggcctgcagcgggagctggacggcgagcgcgagcggcgcgagaaaatcgacgacatcgcggatggcgccgtgaagcccc

SEQ ID NO: 279483 - DNA, 100 bp, Homo sapiens
cctgctgctcgaggacgctggagcccagcaagcaatggctgccatccggaagaaactggtgattgttggtgatggagcctgtggaaagacatgcttgctc

SEQ ID NO: 279484 - DNA, 127 bp, Homo sapiens
gtgaccgagaccgtgaccgagagcgtgaccgagagcgcgaatatcgtcatcgttagaaggcgaggaaacgagacctctttcgttccttctagaaggtctggaggacgtagagttattgaaaatgcag

SEQ ID NO: 279485 - DNA, 90 bp, Homo sapiens
agaccccgaagagtcattgcccgctaccgctaccagcaagtggtggtaggaaacgtgcaggttcccaagacaacccaaaagggaaaaggg

SEQ ID NO: 279486 - DNA, 75 bp, Homo sapiens
gtgctcactgctgtgctgcggtggaaacaggcttactctgacttccctggggtgttgagatctgcatagccactc

SEQ ID NO: 279487 - DNA, 100 bp, Homo sapiens
cgtacagggtttcagggcagaaagcagggcgttgaagggcaagattaagaaggaaagctccaagagggagctgctttccgacactgcccatctgaacgag

SEQ ID NO: 279488 - DNA, 98 bp, Homo sapiens
ccacccgccgacgcctcagccgcttggggcccgcacggaccctctacttcagtacatgtcccagagcaagcacacggaggcccgggagctcatgtact

SEQ ID NO: 279489 - DNA, 75 bp, Homo sapiens
acacaaactggtcagcgtttccctggagaggaagaggcaaggaccaactgttgccaatcctgagctgttccgcaa

SEQ ID NO: 279490 - DNA, 90 bp, Homo sapiens
ctgttttggaactgtcaggtacctcaaagcgttcatcatgcctagtggcgtataagaagaccccgccaccggtccctccacgcaccactt

SEQ ID NO: 279491 - DNA, 100 bp, Homo sapiens
tctcttcactcgagagatgaggacactgaaattcagagaggggaagtgatttgcctcagcttgtactgtgcttacactccagagcccctcagcagtttcc

SEQ ID NO: 279492 - DNA, 101 bp, Homo sapiens
agtgcggcctcggctggcggcggcaccaggcatgagccatgagcccaagtccccttcgctagggatgctttccaccgcgaccaggaccaccgccaccgtca

SEQ ID NO: 279493 - DNA, 100 bp, Homo sapiens
ctccgtgccgtccacgcccattgctcaccgaggacccagctcaagtttaaacacacctgggagcttcagacgtgggtggcaatgaccatgagatcttcac

SEQ ID NO: 279494 - DNA, 83 bp, Homo sapiens
accccttcatgcccaaatcccggaaactccagcgtgtctccagccgtgtcaggatggctaaaggtgaccccaagaaaccaaag

SEQ ID NO: 279495 - DNA, 95 bp, Homo sapiens
gccgcttcagttctcccggtgtggccacgagtcggcctgcaggatgtttcctcaatgaggggaaggctgctgcacaatggcagtttttgatactc

SEQ ID NO: 279496 - DNA, 74 bp, Homo sapiens
aatgacaccttctcaggttgcctttgaaataagaggaactcttttaccagaaaattatgacttacctgtttgac

SEQ ID NO: 279497 - DNA, 100 bp, Homo sapiens
ggctccgccgccgcgaaggacagcctttccgcgcgggactccggggcgccacgggggccatgtaagcaggaaagaaggattgtccaaatgtggaagatgc

SEQ ID NO: 279498 - DNA, 75 bp, Homo sapiens
gaacatgtggtggtggttgcacagtcgccttttccagtttggagagacgttgcaggaaactgcatatcttctggt

SEQ ID NO: 279499 - DNA, 97 bp, Homo sapiens
gtgcttctccaaaaacacccatccaggcagggggatatggtgtcatggagaaactccagctgggcccagagattctgcagcgggaaaatccaaggct

SEQ ID NO: 279500 - DNA, 86 bp, Homo sapiens
gttaacttgggagaaagtttcatctgtggatggagtattgagatggagtttcaccatgttggccagactggttccgaactcctgac

SEQ ID NO: 279501 - DNA, 82 bp, Homo sapiens
gaagtggaagacccacctccctatctcatgatggatgaacttcttggaaggcagagaaaagaatccagggcctgaaaaccca

SEQ ID NO: 279502 - DNA, 75 bp, Homo sapiens
gcgcgggcggcggcggctgggcgggagccccagaggttgcaacaaggacagtgtcagagcaggctgtaaaaaatg

SEQ ID NO: 279503 - DNA, 100 bp, Homo sapiens
gaagatacaagcactgagttcactgacagtattgaggaggaggctgcacaccatagtcaccagcaactcagatttcttttatccaagatattggaaggct

SEQ ID NO: 279504 - DNA, 100 bp, Homo sapiens
cttgtacagcaatctcctcctccactgccactacagggaagtgcatcacatgtcaggtgcaacacgcaggactacatctggcacaaggggatgcgctgcg

SEQ ID NO: 279505 - DNA, 50 bp, Homo sapiens
caaaagtccattatgaaactgaaataagcgggttttgaaaacaaaaaaaa

SEQ ID NO: 279506 - DNA, 82 bp, Homo sapiens
aaatgcgctcagcttcaattgggcatggtgctgatgtgaaatgtgtagactggcatccaaccaaagggttagttgtttcagg

SEQ ID NO: 279507 - DNA, 75 bp, Homo sapiens
ctgtacgcggagggctcggtcaacggcttcatcagcaccttggggtaggagcaacggtgggaatgccctctgagg

SEQ ID NO: 279508 - DNA, 50 bp, Homo sapiens
gccaaggcctgttggtccatccagagtggaacacagccaggacacagacg

SEQ ID NO: 279509 - DNA, 98 bp, Homo sapiens
gacctctcagatcccaaacaactggcagaatttgctagagacccccaacacagcaggcgcaggggccacaggcggcatcatcgggggcatcatcgccg

SEQ ID NO: 279510 - DNA, 49 bp, Homo sapiens
cgcgggcgcccgaggggccgagcgaggggctttgaccacgacctttgaa

SEQ ID NO: 279511 - DNA, 75 bp, Homo sapiens
gcccattgagctccctgtcaaagaggaagaaccccctgaaaaaactgttgatgtatacttggcatatcgaaattt

SEQ ID NO: 279512 - DNA, 95 bp, Homo sapiens
agctaagatgtcaggacatcctggaagctgggaaagggttttacacatccataagtagacctttttggagcctcaccagccaattcaatggcgtc

SEQ ID NO: 279513 - DNA, 75 bp, Homo sapiens
cgattgcagcgcagtggaagtcaagagcaagggcggaagcttcgacgtggcagacagaatgttccacagtgtgaa

SEQ ID NO: 279514 - DNA, 75 bp, Homo sapiens
ctcttcgctggctcccgggggctctcccgggttcctctcattgcaggctgaaggaggaggaagccaagaatctgg

SEQ ID NO: 279515 - DNA, 51 bp, Homo sapiens
cgccgctctccagcccgcttgaacgaataatccagaatggctactctgatc

SEQ ID NO: 279516 - DNA, 100 bp, Homo sapiens
aagaagaacaaactgacgcagagtaaggccctggtatgcgtccaccactaggcttaagagaatttgcaccaggcgttccaccaggaagacgggacctgcc

SEQ ID NO: 279517 - DNA, 100 bp, Homo sapiens
agaccacgcgggtgcccactcctcggcccagggacggtgtgatccctcacatccacaaatctctgattggaaagaagggacagcagaaaactgcttagag

SEQ ID NO: 279518 - DNA, 94 bp, Homo sapiens
ctcagttggaagcagccgatccagcctgcggagcctgtggggcagcacttgcacctcctgcgccgccgccccccatccaaggatatgccttcaa

SEQ ID NO: 279519 - DNA, 114 bp, Homo sapiens
gatgatcgagaggatctggtgtaccaggcgaagctggccgagcaggctgagcgatacgacgagtgcctggtgaagaatgtgatgggatcactagcatgtctgcggagagcggcc

SEQ ID NO: 279520 - DNA, 100 bp, Homo sapiens
gcttacatgacgctggcagatttctgtgaccaacagctgcgcaaggaggaagagaatgcatcagatataattggtgattacaactttcctctataaatta

SEQ ID NO: 279521 - DNA, 100 bp, Homo sapiens
acaccaggcggcctccgggggaaccgaaatgaaacacgatttccaaaatgaacttaatctttcatgagaaactgaggatagagatgtcaataagcagcca

SEQ ID NO: 279522 - DNA, 75 bp, Homo sapiens
aagaaactgtccgagaagcccaaagattgcagtaacggatgctccgcagagtgtaccggagaaggaggatcaaaa

SEQ ID NO: 279523 - DNA, 74 bp, Homo sapiens
aagcactgtcctcctctctctgtgtaccccaaacaggccagcgatctgtacatgagacccaggaattatttcca

SEQ ID NO: 279524 - DNA, 100 bp, Homo sapiens
gaaggggaaaccgactggaaagtcattgccattaatgtggatgatcctgatgcagccaattataatggacgaaaaggaggttgtgctaaagggaaaggag

SEQ ID NO: 279525 - DNA, 88 bp, Homo sapiens
aaagaggaaatagttcagttctttcaagggaactgtccaggtttattgctgccgggagactacactgcaaaatagataaagtgaatga

SEQ ID NO: 279526 - DNA, 88 bp, Homo sapiens
caagacaaagggaagaaataaaattttcccatactgaggttctccaaaaaatgtggaatcctttgcatctatgctgagacattctcct

SEQ ID NO: 279527 - DNA, 46 bp, Homo sapiens
ggtggagccaccagcctctccttgatttggtcgtattgggcgcctg

SEQ ID NO: 279528 - DNA, 100 bp, Homo sapiens
caagttccaaggttacgtttcaataacgaaggaggcccaacttcattcaataaggagcctgacggatttatcccagacggtagaacaaaaggaagaatat

SEQ ID NO: 279529 - DNA, 100 bp, Homo sapiens
tctgcacaggagagacgtgtcagacgatggccgtgtgcaacaccaaattgtggctactaatttgccccctgaagatcaagatggctctggggatgactct

SEQ ID NO: 279530 - DNA, 74 bp, Homo sapiens
acgtgcgggaagagaagatcatcgagcatttcaaacggtcgcctgcgaggccgctggccaggcctgagcctctg

SEQ ID NO: 279531 - DNA, 137 bp, Homo sapiens
tattgcgtcatctgttgcagaagaataggaacctctacttccccaccaaaaagtggcacacactggagagatatcagagtcaaattgactttatcagctttaatcgatgggaagaacttcagtgcaggaggtcacaa

SEQ ID NO: 279532 - DNA, 100 bp, Homo sapiens
tcaaccagcagagcttccaggacatcaagcccatgcgggaccagatcatccgcgtgaagcgaatgattacggacctgaagccaaagaacaagatgcgcta

SEQ ID NO: 279533 - DNA, 83 bp, Homo sapiens
ctaagtggcttgcttgagttgacacagggagctccaggactcaccctcagcgggctacattgagagacctcagctgattcgag

SEQ ID NO: 279534 - DNA, 75 bp, Homo sapiens
cattgttcctggaacgccctctttttaaaaaagctgccttcctatttcaaggaaagacgccaaggtaattttgac

SEQ ID NO: 279535 - DNA, 100 bp, Homo sapiens
tagtgagctcttaccggctgaagcagcctaatgtaccatttcctccaacaagcaatgatgatcatagcagggttaagctagcacagcttgctgaaaagga

SEQ ID NO: 279536 - DNA, 49 bp, Homo sapiens
gcagtcagtccagagctgcccagtggtataagttgaaatccaaaccagg

SEQ ID NO: 279537 - DNA, 100 bp, Homo sapiens
cctcgagaatactgggattacgagtcacatgtggtggaatgggggttggatggcaagcatgtggtgtttggcaaagtgaaagaaggcatgaatattgtgg

SEQ ID NO: 279538 - DNA, 51 bp, Homo sapiens
aaacacctgaggaatcatgtgcacaggccaaacgtaccaagaaagtcggga

SEQ ID NO: 279539 - DNA, 100 bp, Homo sapiens
tcatggtttgctcagaattctcggggcggcacagttccaggggactgctgagatgtcctctattcttgaagagcgtattcttggagctgatacctctgtt

SEQ ID NO: 279540 - DNA, 100 bp, Homo sapiens
tgaatctacctctgagttatgccaaagcaacgtctcaggatgaacgaaatgtcccttaacaaggttgattccatcctgtcaattggaaattgaatcagta

SEQ ID NO: 279541 - DNA, 100 bp, Homo sapiens
cggctaccatgtccgcccaggcgcagatgcgggccctgctggaccagctcatgggcacggctcgggacgagacacgctgtgaacaagacaggccttcccc

SEQ ID NO: 279542 - DNA, 115 bp, Homo sapiens
caccgccagacggccagaaagttccgccatgagctggggcacggagctgtgggtactccaaagattcaggtttactcacgtcatccagcagagaatggaaagtcaaatttcctga

SEQ ID NO: 279543 - DNA, 100 bp, Homo sapiens
ctttccctctcccaacatggcggcctcagtttttggctttcacccccaaccagtgaccaaagacttgaccactcaaagtccagctccccagaacactgct

SEQ ID NO: 279544 - DNA, 98 bp, Homo sapiens
caacagaacagtcgaacctttcccagagggaacacagatggctgtatttgaatgtggtgacagatctattttcgagggaagaactcggtattccagaa

SEQ ID NO: 279545 - DNA, 83 bp, Homo sapiens
gagtctgaagttgttaccaatggtgaaactacatgttcagaaagtccttttggaataaatcatgggattgagcttcattcaga

SEQ ID NO: 279546 - DNA, 100 bp, Homo sapiens
ggacagctcggggtcagtcgacggagcacaccgggcgcccgaatccgccgggtcccactcacgcccgccggccgccgcttccctctgtgtgttgcagtcc

SEQ ID NO: 279547 - DNA, 100 bp, Homo sapiens
cttggagcggagccttcagtccttagggacaccgagtgacacgcaggagcttcgggacagcctttacagaatgtctgaaggggacagtgtgggagaatcc

SEQ ID NO: 279548 - DNA, 83 bp, Homo sapiens
gctgaatggaggccagatagtaccatgatagctgtatcagtatgctccagaatcactgacagagagcaagttttctgtggcct

SEQ ID NO: 279549 - DNA, 90 bp, Homo sapiens
aaaacacatcatgaaggcctgttttgaagagaaggggaataagactgcatctgttcatatgagaagccctacaggtggcaactactagcc

SEQ ID NO: 279550 - DNA, 50 bp, Homo sapiens
gaatgaagtgcttcagatttaaataggatcgcttacacctgagacgaact

SEQ ID NO: 279551 - DNA, 82 bp, Homo sapiens
ggcagccgctcgcccctcttttccatgtatccgtccagttgattatggaagattcccacaagagtaccacgtcagagacagc

SEQ ID NO: 279552 - DNA, 75 bp, Homo sapiens
gcctgagacaagccacaagctgcaaaacagtttctcatggagttaaactttctcagaagcaacgaaaaatgattg

SEQ ID NO: 279553 - DNA, 75 bp, Homo sapiens
gaggcacctaaaaattgtataccgcagattcaggtcaaaatccagttttgatggtgcctctttagcaagtgataa

SEQ ID NO: 279554 - DNA, 100 bp, Homo sapiens
tgcctgctgttcgaggccggcacggtggccacgctggtactatactggcaattgctggagaagattttgcaattgttgcttctgatactcgattgagtga

SEQ ID NO: 279555 - DNA, 100 bp, Homo sapiens
tgaaatcattgatgaccacagagctgggaaaattgttgtgaacctcacaggcaggctaaacaagataaagctgtacaccaagcatgggactttgaaatac

SEQ ID NO: 279556 - DNA, 97 bp, Homo sapiens
aacttacgcacttaaaataattgggcagaagagaagcagtgaaggagtgcagaggcatcacctgaaaggtcgtgatgtctcgggagtcggatgttga

SEQ ID NO: 279557 - DNA, 50 bp, Homo sapiens
ccagaatgagaacacgatgccacgccctacagacctggtacctggatttt

SEQ ID NO: 279558 - DNA, 90 bp, Homo sapiens
cgacacacaaagaatagagttgagcctgtgggacacttcgggagccttcacgtaaatgggtccagtcatgcctcccagtaagaagccaga

SEQ ID NO: 279559 - DNA, 88 bp, Homo sapiens
atgcccagaccctgaggaaggccatgaaagggctcgagcccccctccatgcgcctgaaggcccgacccagcagccctggcttttccgt

SEQ ID NO: 279560 - DNA, 82 bp, Homo sapiens
caccgctgccctcagctccgagtccagggcgagggcgcggatggcgtcggggcgccccgaggagctgtgggaggccgtggtg

SEQ ID NO: 279561 - DNA, 82 bp, Homo sapiens
cttcgcgtctgcccggccaagaggcaaaggggaggttacgcagcaaaccatccagaagctcagagcccgggcgctgtggaag

SEQ ID NO: 279562 - DNA, 96 bp, Homo sapiens
tcctatggacagacgcacagacacctgcagtacaaaattggacagctgtacatgatcagcaaacacagccatgaacagagtgaccggggagaaggg

SEQ ID NO: 279563 - DNA, 99 bp, Homo sapiens
tcgcccgggcagccacccccggccctgctgccacagcagacaatgcagatcttcgtgaagactctgactggtaagaccatcaccctcgaggttgagccc

SEQ ID NO: 279564 - DNA, 98 bp, Homo sapiens
gcagccggagtggggccgtgaggcatgcatgtagggaataccggattcataaagagctggatcatcccagaatagttaagctgtatgattacttttca

SEQ ID NO: 279565 - DNA, 101 bp, Homo sapiens
tgtctacagtgttctcgacttcgtcgctggagcttgaagaaatccgcaaatgtgggatgaaaaacttccgtaacatccaggttgatgaagctaatttattg

SEQ ID NO: 279566 - DNA, 95 bp, Homo sapiens
gcggctggtccaggccttccagtacacagacgagcatggggaagggtctccgtctctccaccgggggcttcatccttccagggaggagaagaggg

SEQ ID NO: 279567 - DNA, 75 bp, Homo sapiens
gagtcctcgcggacgtcagccaagatgacccctaaatccaaaaggaagagtatccatagccgaatgctgcggcct

SEQ ID NO: 279568 - DNA, 90 bp, Homo sapiens
caggaactggatgccaactctgcccttatggaattggacaaaggctgttgcaaatgagtccggactaaattttatatctgtcaagggccc

SEQ ID NO: 279569 - DNA, 100 bp, Homo sapiens
gctcgggcggtgaacagcccggatttcacaggggcgccgagcaacccaggcaaatgctaaaattctcatcaatcactgtcacacaaatcggggactggca

SEQ ID NO: 279570 - DNA, 76 bp, Homo sapiens
aataatggcaaaagacctcaccaagaatttggcatttcaagacacgatgaggcgagtggtacgacagagcaagttt

SEQ ID NO: 279571 - DNA, 75 bp, Homo sapiens
gaaggaagccaagacttaaagtttcctagatcccagcttatgcagacagacatgctgaactatctggaagtccac

SEQ ID NO: 279572 - DNA, 50 bp, Homo sapiens
catgggacactattacgcaacagatgtacgagatcaaagcaggaggcagc

SEQ ID NO: 279573 - DNA, 101 bp, Homo sapiens
attgcctctggaaactctggacctggaattcaaggtggaggagccattgtccagagggctattaagcggcgaccaggattcaccagaccagagcacttggg

SEQ ID NO: 279574 - DNA, 100 bp, Homo sapiens
gcctaaagtctgagagagggaagtcgcctctgtgctcctgccttgaggtgcagtgttggggatccagagccatgtcggacctgctactactgggcctgat

SEQ ID NO: 279575 - DNA, 75 bp, Homo sapiens
ctctgaggctcattttgcagttgttgaaattgtccccgcagttttcaatcatgtaatctatgccagcaattatga

SEQ ID NO: 279576 - DNA, 100 bp, Homo sapiens
aaacagttacagtgaactctatagattctgctggtatacagctacatccaggagagaatgctgacagtcctgcagctctcgtggcattatccttcagtgg

SEQ ID NO: 279577 - DNA, 75 bp, Homo sapiens
atgacattgatgtggccaaggtcaacaccctgattcgtttgcagaaaaaacttcagcatgtgccaggaacacaac

SEQ ID NO: 279578 - DNA, 75 bp, Homo sapiens
caggatttgccttccgccagacatacgagaagtttcttcacaggtcgagctgtgtttagagtgcatcgaatgggc

SEQ ID NO: 279579 - DNA, 88 bp, Homo sapiens
gggaaatacagaagcacagtcagcaaaagcaaagacccctcggggctgctcatctctgtgatcagccctggcaggtgcccggcccgcc

SEQ ID NO: 279580 - DNA, 100 bp, Homo sapiens
tgtggaggaagagaagaccagtgccaaccctgagactctgctgggggagatggaggcgaagacaagagagctcattgttactgtaaaatggggaaaggag

SEQ ID NO: 279581 - DNA, 100 bp, Homo sapiens
gctccgtgttgtgatgacaggagaatgtgtgtgtgtcccgggcccagacgaattgctgcggttggatttctcacgatgtccagtgttatctccatgtctg

SEQ ID NO: 279582 - DNA, 100 bp, Homo sapiens
atgcctattttatgaagtagaagtcaataacagccaaactgagacacataatgttttctacgacacagcattgttggttttgccatgtactattttacct

SEQ ID NO: 279583 - DNA, 100 bp, Homo sapiens
tcgcccaagccgcgtccccagagagcgccctgagagaacagggtggccgcttggtccagagtggagactgctgcacggactctggaaccatgaacatatt

SEQ ID NO: 279584 - DNA, 74 bp, Homo sapiens
gcagggagagccccaggtccagttcaaattggttgaatctggcgatgtggaacccatggatatggagggctgac

SEQ ID NO: 279585 - DNA, 83 bp, Homo sapiens
gaagaagaagagcatgatcggcatgtccaccaagtcaccttcaggccattcagaggaggaaagagaggggaatatgaagtcag

SEQ ID NO: 279586 - DNA, 75 bp, Homo sapiens
agaaaggagaacaccttatttcaggagtctcgctctcagtcaaaatctccaacgggaactcctgctcgtgtaaaa

SEQ ID NO: 279587 - DNA, 83 bp, Homo sapiens
ctgaaccctgagcccaggagactgagcccagaagagccgaatgcacataaggtcgccagcccaccctccggacccgcataccc

SEQ ID NO: 279588 - DNA, 75 bp, Homo sapiens
tgatctttcaccacagcagaaagagtggcagaggagagaagtggatgggccctatacctccagccgtgaatgcca

SEQ ID NO: 279589 - DNA, 75 bp, Homo sapiens
ctacgagaatgtcatcattccacgagaggaggggaagcgaccgtggcagccatgtattacagctactacatgcta

SEQ ID NO: 279590 - DNA, 90 bp, Homo sapiens
agcctggacgacatcgacctgtccgccctgcggactctgaacaggaagtgcctcctggaaccacagagtcggttcagtctgtggattact

SEQ ID NO: 279591 - DNA, 102 bp, Homo sapiens
cagggccttcgcaccccttcctgtcaggggccgagagacgagttgtactgctgtcacaggaaatggacgctggattacaagcatggcagctcaggcagcaga

SEQ ID NO: 279592 - DNA, 90 bp, Homo sapiens
tgtgtgaaattgcttctgtcaaagggtaatctacagttgctgcagaactgcctggcagtgttaaatggagacacataagccacactccgc

SEQ ID NO: 279593 - DNA, 50 bp, Homo sapiens
caagtcctgacagattcagcaacactgcaccaataaatggttgtcgatgt

SEQ ID NO: 279594 - DNA, 100 bp, Homo sapiens
cagttagtagcccagaagcaaaagagacccacagatttggatgtagatacgttagccagtttacttaatgttgggatgagagtcggagccgaataccaag

SEQ ID NO: 279595 - DNA, 98 bp, Homo sapiens
gagcgcttctttaagggctacgggaagatcctggaggtggatctgaagaacggtgaacagagtatctgtcaggcaagagctgctgtgatggtttatga

SEQ ID NO: 279596 - DNA, 75 bp, Homo sapiens
tcaggggccgtccccaggacactgtccggatcttccctccctggaaatgcacaattttgaggaagagttaacttg

SEQ ID NO: 279597 - DNA, 94 bp, Homo sapiens
cccagaccggccgctctcccctcctctcacggcacctcccaccatgaaggaaggaacaccagccagccgtggaacctcaggtgcaacagagacg

SEQ ID NO: 279598 - DNA, 100 bp, Homo sapiens
agacactcctgctctcttccatccccatcttacagatgtattaagaagcctcagccagtgagctcctccgacagcgaggcccccgaggccaaccccgccg

SEQ ID NO: 279599 - DNA, 100 bp, Homo sapiens
aggaactttgggtcctgaatcttctgggagctgaggaaccagatatcttgaaaagctgccagaaaggccctgggaggagcggggacactgaggacctctc

SEQ ID NO: 279600 - DNA, 90 bp, Homo sapiens
ggagaggcgcatcgtgttcgaggcggagaccgagggggagccccgcgcgcggcgtcggtgtctgaatctccctggctccatgccccatct

SEQ ID NO: 279601 - DNA, 100 bp, Homo sapiens
ctggtctattatatcatttaaaccacatggctatctaaagaggtcttagtacccactgtgtctatggttggaaagcatttgggcgcaagaaaggatcatc

SEQ ID NO: 279602 - DNA, 132 bp, Homo sapiens
cagacagagctgcaggaccctcacccttcccgggaactgccctggcccatgcaggccagacgggcacacagtgcccgtccgtgatgatgggaacatgcccgacgtgcccagccacccccaggaccctcaggg

SEQ ID NO: 279603 - DNA, 98 bp, Homo sapiens
gtccctgtttctagggaacaacacaattcgattcaccgtatggagtataatgtctcaggaaggcgattatgggaggtggaccatatctagtagtgatg

SEQ ID NO: 279604 - DNA, 100 bp, Homo sapiens
agacgctgcgggagcccggcgccggagcccaaggcatgaatgctttacagttgcagaacctggcgacgctggctgctgctgcagctgcggcccagacctc

SEQ ID NO: 279605 - DNA, 75 bp, Homo sapiens
ctggtaggagcaattgtctactatgacggcttacggagttcctatgctagtcagcatagtcagcttgggcaagac

SEQ ID NO: 279606 - DNA, 100 bp, Homo sapiens
agttgcttattcctctattgctgcaaaaaatgcagaactagaacaggagcttatgcaaatatttccatggttcaagctgcttcagcaggacccccatctc

SEQ ID NO: 279607 - DNA, 97 bp, Homo sapiens
caaaggatccacgttgctgcagcagtttccttcttgggaggtgtgattcaggttcaggaagatttgactgaagagaaaaaaagggaactggagcata

SEQ ID NO: 279608 - DNA, 75 bp, Homo sapiens
agggtcatctcttctattgtacctgcaggtctctcagccagggtagtacaaatgcaacagtgctagatgttgctc

SEQ ID NO: 279609 - DNA, 82 bp, Homo sapiens
aacagacccatctttggatcttcattcattaagcagtgcagaaacacagcattttgaaagcgaagcagaagccgtagaatca

SEQ ID NO: 279610 - DNA, 101 bp, Homo sapiens
gctctctggaccttgtctcgctcgggagcggaaacagcggcagccagaggtaatgattgatgaatccctttcatccgatgaccctgattcatatgtgacat

SEQ ID NO: 279611 - DNA, 90 bp, Homo sapiens
aacccattgataatccaccgcatcctggatcaactggttctccaaaaaatgtggaatcctttgcatctatgctgagacattctcctctta

SEQ ID NO: 279612 - DNA, 97 bp, Homo sapiens
gggaaggacaccctgaaggctggcaaaaatgcagtcgagaggaggtcgaacagatcaaagcctcccaatcaccggcctgcagaaagctctgtgtcca

SEQ ID NO: 279613 - DNA, 83 bp, Homo sapiens
atcccgggatgaccggagcacctggatccgggtcattcagcagagcgtgcgcacgaaaactgaagccagtcatcaaatcccag

SEQ ID NO: 279614 - DNA, 75 bp, Homo sapiens
ggtgaagccattctgagtttatgtgttgactccgattctgaagggagtggtaatggaagtgaagatgcttcaaag

SEQ ID NO: 279615 - DNA, 90 bp, Homo sapiens
catcatcgctgttgtgcaaaagatgattgaaaattatgaagccctgttcatggtgttttggggaacgagtttagtatattaaaatcacca

SEQ ID NO: 279616 - DNA, 74 bp, Homo sapiens
tttttggttgggacgcagtctcttaaatatgataatcagggagatgcagttaaagacttgatgcttcgctttct

SEQ ID NO: 279617 - DNA, 51 bp, Homo sapiens
gtttctgtcacttgtgtgatggtcagtaacaaatgtggcaattattttgga

SEQ ID NO: 279618 - DNA, 89 bp, Homo sapiens
ctgctgcggcgcggggaccgctgtgctctcggagccaaggaggtcctgctgctggcccggtagacggaccaatggagggtctcgctgga

SEQ ID NO: 279619 - DNA, 83 bp, Homo sapiens
gaggagcctcggccccgtacccagacaatgcagatcttcgtgaagactctgactggtaagaccatcaccctcgaggttgagcc

SEQ ID NO: 279620 - DNA, 96 bp, Homo sapiens
gactgtttgttcaacatatctacaatctcggtactacaggtacagaggtgcagttccatggtacaccataaatcttgacttaccaccctacaaaag

SEQ ID NO: 279621 - DNA, 100 bp, Homo sapiens
cgtaaagattatgacaaatcacaacttgtagaggtcattttatgccacctgaaaaagtacataaagaactctttaaagactggaatattccatttaagca

SEQ ID NO: 279622 - DNA, 80 bp, Homo sapiens
atggaaaaccagttattgaatatcaagaggaggagttgttgattcgtattttacatggagaagtgaacaaagtgaaactg

SEQ ID NO: 279623 - DNA, 97 bp, Homo sapiens
attcctgtatgatatctacctcaggatgactggaagaagcccaaggttgttgaagattggaaattcatagcccaggttcttgatcggatgtttctgt

SEQ ID NO: 279624 - DNA, 101 bp, Homo sapiens
cagctcaagaaaatggtgtccaagtgagacggtttaagcggaagcatcttactgccattgactgccagcatttggctcggagtcacttggctgtgacccag

SEQ ID NO: 279625 - DNA, 75 bp, Homo sapiens
ggctgctaccatcccagtgagccaaatctctaccattgcaggttgctccttgagggcaggacagttcttatggct

SEQ ID NO: 279626 - DNA, 100 bp, Homo sapiens
cctggctctttcccccagctgcggagggttcctccttgcagccggccctggctgcccaaggaggtggagctgtataaaagcagccaccgggacaagctgg

SEQ ID NO: 279627 - DNA, 98 bp, Homo sapiens
tcccctgtgtggccaagaagctggtgtgcggagatgaaggtgggagatgagggagcaggccacttcgtgaagatggtgcacaacgggatagagtatgg

SEQ ID NO: 279628 - DNA, 75 bp, Homo sapiens
acttcaaatgctgtttgtattccagagactagtgtcacaccatgtctgaccggaaggcagtgatcaagaacgcag

SEQ ID NO: 279629 - DNA, 75 bp, Homo sapiens
cggcataccaccctgcactgtgaggttcggagcgaccttggccgttggcctgaccatctttgtgctgtctgtcgt

SEQ ID NO: 279630 - DNA, 82 bp, Homo sapiens
aaaacattcaagaatgagagcgagaacacctgtcaagggtctccgtctctccaccgggggcttcatccttccagggaggaga

SEQ ID NO: 279631 - DNA, 50 bp, Homo sapiens
atggcaagaactggcgtcacgtttacaagtcttgccacttgcctagtgag

SEQ ID NO: 279632 - DNA, 100 bp, Homo sapiens
gtcagttccttgtggagccggagctgggcgcggattcgccgaggcaccgaggcactcagaggagtttgacaagtatgcgcccaagctggacagcccctac

SEQ ID NO: 279633 - DNA, 75 bp, Homo sapiens
ctgggggccacagctgcttcaccgagaagccaggtgctacagaccggaagggaggcgtggggatgccctctcggg

SEQ ID NO: 279634 - DNA, 98 bp, Homo sapiens
taaaaagaagcgggagaatctgggcgtcgctctagaggtgtttgctgactagcactttggagagtgtatgcttatctgccatgtccataacagaacga

SEQ ID NO: 279635 - DNA, 75 bp, Homo sapiens
ggaccagctcatgggcacggctcgggacgggaagaaatgatttcccttggggatggagacatcaggaccatgtgc

SEQ ID NO: 279636 - DNA, 100 bp, Homo sapiens
ggccacaagacatttcctgctcggaaccttgtttactaattgtgagaagccatttaaatgtgatcagtgcagttatgtggcctctaatcaacatgaagta

SEQ ID NO: 279637 - DNA, 75 bp, Homo sapiens
cctgagaaccatgctcaccgacccttttaaaattggtggtgaatggtggacatggatcgattataaccgcttcca

SEQ ID NO: 279638 - DNA, 101 bp, Homo sapiens
ggcaggcatttcagtaacactggactggatcggaacacttttctgggagaagaggctacaaggacttagtgcatcagatgtaacagaacaaattataaaaa

SEQ ID NO: 279639 - DNA, 75 bp, Homo sapiens
gacgtcatcatgctgaccaccaatcagatccgtaagatagttcatttaaagcccccatccctgcaaggtggtgct

SEQ ID NO: 279640 - DNA, 98 bp, Homo sapiens
ggaaggcaaggagccaggccacggggccacagccgcgggggccaccacactggcccaaatatttcctgcaggtctctaattaacagaagatggcaaag

SEQ ID NO: 279641 - DNA, 90 bp, Homo sapiens
gacagacttttcagtattgtaagaccaagaagacttctctacatggcaatagatggagtgagtaccaagttcgatccatagcaagtcatg

SEQ ID NO: 279642 - DNA, 100 bp, Homo sapiens
acaggtcacaaaatagaaacagaccttccccagatacgatcgaaagttcacatccttggctccttccaaaatatcaagatggcaagaactgccatttgca

SEQ ID NO: 279643 - DNA, 75 bp, Homo sapiens
atggatatgactctctgcagcgggatcaagctgtgtgcattagtacaaatgagccaacacagatctatagatttc

SEQ ID NO: 279644 - DNA, 51 bp, Homo sapiens
tgccgggagccgacagcttcgcgccggatattaataaggcagcggaaagaa

SEQ ID NO: 279645 - DNA, 75 bp, Homo sapiens
ggaatactatgaggaagaaagttgcatgcggtacctgcacagggaactcctggatatgatgattgctgaagagga

SEQ ID NO: 279646 - DNA, 83 bp, Homo sapiens
gcccgcccgcccgtaaaatggtcccctcggctggacagctcgccctgttcgctctggagccaaatctcctcagccacctgttg

SEQ ID NO: 279647 - DNA, 75 bp, Homo sapiens
cccaggtgtaagcgcagaaagcaggcgaacccgcggcgcaataacgatgggtgagtcaagtgaagacatagacca

SEQ ID NO: 279648 - DNA, 97 bp, Homo sapiens
agcatctttgtctagccccagtgcaggtcccagtagggatggcacaatcagcgaggacaccatccgagcctctctcatctctgcggtcagtgacaaa

SEQ ID NO: 279649 - DNA, 90 bp, Homo sapiens
ctttgtccgaagagccaaaaatgaccaagtccctgaggccttcgaggaagaggcccacctccttcatgggcctctgagcctgaacgccca

SEQ ID NO: 279650 - DNA, 100 bp, Homo sapiens
gtttctgggatgctgacactgacaactatactcatgatgttttcatgaatgtggagaaagtggagaaagtagagtgacgcagctaagggagtaaatcgac

SEQ ID NO: 279651 - DNA, 100 bp, Homo sapiens
gaaaactcaggaccatgatggctcagtttcccacagctatgaatggttccgccgagcccgtcccttggcggtggtgtcactggatgctgggaagagatgg

SEQ ID NO: 279652 - DNA, 80 bp, Homo sapiens
gcagccgatccagcctgcggagcctgtggggcagggccaattcctgtccccccagcagcatggcatcgtgtgctgaaccc

SEQ ID NO: 279653 - DNA, 90 bp, Homo sapiens
gtcaccctggcatgggctctggggctacttctacaagtccgaacagccagtccagcaaaatgaacagcattgtctaccagaagcagttcc

SEQ ID NO: 279654 - DNA, 90 bp, Homo sapiens
gatgccgggggagcggggccttccacaccccctccgtgggtgtgtggtcatggcaaaaccccaaaagatgccgcgtcagttcgagccacg

SEQ ID NO: 279655 - DNA, 96 bp, Homo sapiens
ctttgcctttctggacacagaagtatttgtgacagcaccagcagacgtttttgaatcaactgagagaaattacggggattaatgacacccagatac

SEQ ID NO: 279656 - DNA, 97 bp, Homo sapiens
cacctgtcggcagactggtgacttcacttttgagtgcaactgccttccaggtggaaaaagctaatgaggctgcgaaaagtgagcagagctgtggaaa

SEQ ID NO: 279657 - DNA, 100 bp, Homo sapiens
ctagcagatgctggcgacctatccagaatgatcaaggaatatgatgaagaatgggctaagaaaattcagagtgaaaagtttcgctggcataactctcagt

SEQ ID NO: 279658 - DNA, 50 bp, Homo sapiens
atcagtgtgggaagccaagcagatacaatgaacagcagagaatttcaaag

SEQ ID NO: 279659 - DNA, 75 bp, Homo sapiens
attccggcgcctccactccgtcccccgcgggtctgctctgtgtgccatggacggcctgacatttaccccggtaac

SEQ ID NO: 279660 - DNA, 98 bp, Homo sapiens
gcactgttgcctatcagaagtcaattcaaaggacctgcccccagagagaattttcagctgaactctcatctctcaacactggcaaatattcataagat

SEQ ID NO: 279661 - DNA, 100 bp, Homo sapiens
tggacagcgtgcggtctgggccttttgggcagcttttccggcctgacaacttcatctttgtcactcaagactgcttgcaactgattgcagacagtgaaac

SEQ ID NO: 279662 - DNA, 80 bp, Homo sapiens
cgcaggtgctatgctgtgggccccgctcaggcccggtggttctgggaagcgtacttccagtcaattaaagccattgccct

SEQ ID NO: 279663 - DNA, 90 bp, Homo sapiens
agatgattcagccttctgcatctggatctcttgttggaagagaaaatgagccacaagtatatggttatgatgacttgcagatgcttcaga

SEQ ID NO: 279664 - DNA, 89 bp, Homo sapiens
gtttgagattgcacttaaacggaacttgcctgtgaatttcgaggtgaacctgatgcagcacatgaagctcagcacctcacgagacttca

SEQ ID NO: 279665 - DNA, 100 bp, Homo sapiens
tcatggaaggcaactgtgtttcacttaccagaatactacgttcagctaaattaaggatgaatttttagatgtgatctactggttccgacagatcattgct

SEQ ID NO: 279666 - DNA, 74 bp, Homo sapiens
agtttcccaagaccaaggacaagtcccagggagcccaggccaacgtgcagcggctgaaggagtaccgctccaaa

SEQ ID NO: 279667 - DNA, 100 bp, Homo sapiens
cggcgtcctcaggagctgtggggtcccctgctagaagtgggggactcggcgggcaaaatgatgcttcaacacccaggccaggtctctgcctcggaagtga

SEQ ID NO: 279668 - DNA, 87 bp, Homo sapiens
ggtcgtccaggagggtcgacaaggcaaagaacctgaagacgacccaaaagggtacctagtagctgctgctggtggtgacaatgtcaa

SEQ ID NO: 279669 - DNA, 100 bp, Homo sapiens
gatgagcatagagacgctactggaggcggcccgcttcctggaatggcaagcgcagcaacaacagagagcacgtggttttgggatttgagattgacgcggt

SEQ ID NO: 279670 - DNA, 83 bp, Homo sapiens
tcataatgctgtggagtacaaagagaagatctatgttttacagggaagtgtttggattgtgagctatttcagaactgttctca

SEQ ID NO: 279671 - DNA, 100 bp, Homo sapiens
ttgatctccagtacagacatatggtggaacagaagcctggatacaggactcagactcttactgggttcagaaatgctcagaaatcaatcacatgaatgcc

SEQ ID NO: 279672 - DNA, 101 bp, Homo sapiens
tcatcttccctgttggatatgggaaacatgtctgcctctgatctcgatgttgctgacaggaccaaatttgataagttgaaggcacagttaaatgaaacact

SEQ ID NO: 279673 - DNA, 88 bp, Homo sapiens
tcagacaggttttacgaatattttttacacaaccaggggaagcatgtatcatgggagcaaaaaggatatataagaagcgaaaatcaga

SEQ ID NO: 279674 - DNA, 75 bp, Homo sapiens
aaggattccaagtaactcttatttgacttgtggaagaaagcaaactgatcccactcatttttgaagtaactctgg

SEQ ID NO: 279675 - DNA, 51 bp, Homo sapiens
gcgtgtggcatctccacctcaaggacttggattctcacttgcatttatctt

SEQ ID NO: 279676 - DNA, 75 bp, Homo sapiens
ccgcccaccagttcgcccgtccccctgccccgttcacaatttggaatcgaagcctcttaaaatggcagatgactt

SEQ ID NO: 279677 - DNA, 100 bp, Homo sapiens
cggggttcgggtgtctcgtgtgtgaacatcacagtctgaagatgatgagaaactgaaaaagaggaaggagcgatttgggattgtcacaagttcagctgga

SEQ ID NO: 279678 - DNA, 75 bp, Homo sapiens
gtcagaccatactgtgcattggcagagacaagagcagctgcagccagataagctggtggtggtatggacccgtcg

SEQ ID NO: 279679 - DNA, 100 bp, Homo sapiens
acatttaattttagggtcctttatatagaagggagagtaggtcacgtgtcttgggacgagtataaggtgaagtttttggcgagtaaaggccatagcgaga

SEQ ID NO: 279680 - DNA, 75 bp, Homo sapiens
gcagaattcaccagagagcagcagccatgccaatgcgatgagagacaagagagacacctccaacttcgacaaaga

SEQ ID NO: 279681 - DNA, 82 bp, Homo sapiens
tacggagacacactgcatttctgtcggcactgcagcattctcttttggaagccttagattgtaagcaaaagaaatcaaggtc

SEQ ID NO: 279682 - DNA, 100 bp, Homo sapiens
tggcagtggaaaatgcgctcgggctggaccagcaggtggcaggacaaattgcgcccatttagaggatgtggctgtaacctgctggatgggactccatagc

SEQ ID NO: 279683 - DNA, 75 bp, Homo sapiens
atggagcagtagaggatggtgcaaccatgacttttttcaaggtacccttgggcgagactgtacagtacttcccaa

SEQ ID NO: 279684 - DNA, 75 bp, Homo sapiens
gatcttgtctacgatctctccacctcagggtctggctcagagacctcacctctgaggaccagatcgtactgctga

SEQ ID NO: 279685 - DNA, 100 bp, Homo sapiens
ctcacgttcatcatggtgcctggctgccaggcaggtattctctactgccgctgatggtcaaacgcaagtggaaattaaagtgtgtcagggtgaaagagag

SEQ ID NO: 279686 - DNA, 100 bp, Homo sapiens
cgccaatgtggacggactcactgccctgcaccagagagaactcgatgccaccgcaacggtattggcgaaccggcaggatgaaagtgagcagtccagaaag

SEQ ID NO: 279687 - DNA, 60 bp, Homo sapiens
taccatgcttcaagagccattccttttggaacaatgggagccagagggccatttttaagc

SEQ ID NO: 279688 - DNA, 96 bp, Homo sapiens
cttcaggatgttcagctcacagagatcaaaccacttctaaatgataagatgacaaatcctgccatacagaatgatttcagctattatagaagaaca

SEQ ID NO: 279689 - DNA, 100 bp, Homo sapiens
agaagaaggctgctggcaaaggggacgtcccaacgaagagaccacctgtccttcgagcagttgttgacctcctgtactggagagacattaagaagactgg

SEQ ID NO: 279690 - DNA, 95 bp, Homo sapiens
aatgcctgaacttgattaatgagaacctaaaggcagacccagaagagctttttacaaaactagagaaaattgggaagggctcctttggagaggtg

SEQ ID NO: 279691 - DNA, 82 bp, Homo sapiens
aactaaagccccacatttgcagctcattgaaggaaagataaacaggggtcacatgacgacagaagccaagagggctgcaaag

SEQ ID NO: 279692 - DNA, 83 bp, Homo sapiens
gcagcagcaactgcagatgaacaagggggatatgagactttctactcggaatatcctgagtgttgcgtggatgtaaaacccat

SEQ ID NO: 279693 - DNA, 100 bp, Homo sapiens
gactcaacatgaagctaccggccagggttttctttactctggggtcccggctgccctgtggcctcgctcctcggagggcctgtgttgcctactgcttcat

SEQ ID NO: 279694 - DNA, 100 bp, Homo sapiens
gaaaaggtcactgccatctggagtggatggacacacctggttgctcagacagattgttagccctgaaaacaccaaatctagctcagatgatgaggagcag

SEQ ID NO: 279695 - DNA, 82 bp, Homo sapiens
cggggaagaggaggcggaaaaggacgcaaagttctccggcgagaacatccagtcatggataaaaatgagctggttcagaagg

SEQ ID NO: 279696 - DNA, 80 bp, Homo sapiens
gcccgcggctcctgagggatcggtctcagccgcgcgggttgcacactgggccacagaggatccagcaaggatgaagaaat

SEQ ID NO: 279697 - DNA, 100 bp, Homo sapiens
caggctcaagcaatcctaccatgtcagccttcccagtagctggaactacaggagacagtgtttcacaaaatgattttccttctgaagctcccatctcctt

SEQ ID NO: 279698 - DNA, 100 bp, Homo sapiens
cggccccggagctgcctggaggcggccgcactcggagttgtggaaagtaaaaatgtagccctaccaaaaggaactattgtactggcttctccaggctgga

SEQ ID NO: 279699 - DNA, 121 bp, Homo sapiens
gagttcagtcgagagttccagttgcaccagcatctctttgatccggaacatgactatccaggcttgggcaagtggtatgagccgcacagcctacacggtgggagccctgcttctcctcttg

SEQ ID NO: 279700 - DNA, 88 bp, Homo sapiens
ttctggcggccatggtgttgctgctgtactccttctccggaggctgtgcagaaggtatcctgcagaccatgaactgagcactgttccc

SEQ ID NO: 279701 - DNA, 51 bp, Homo sapiens
cggagcgtcccttccatcaggagagtgttatagttttgccgctggactctt

SEQ ID NO: 279702 - DNA, 51 bp, Homo sapiens
tctcaactacaacatcgtttcagggtgttgacagctcttctaccacaagca

SEQ ID NO: 279703 - DNA, 100 bp, Homo sapiens
gaaagagtcaacagcagtggcaacagttagagatgtttatgattacttccgagctgtcctgcagcgtgatgaaagaagtgaacgagcttttaagctaacc

SEQ ID NO: 279704 - DNA, 51 bp, Homo sapiens
cctctcagaagaggaccgcggagttgcagtgtaggattttggaagtcctcc

SEQ ID NO: 279705 - DNA, 75 bp, Homo sapiens
tcaggaagatactgcagagatattctactccatctcattcattgtacagatgggactgtctagtttcaggaaaac

SEQ ID NO: 279706 - DNA, 73 bp, Homo sapiens
ttcaagaatgaagccgcggaccctcctggcctccgacatccaggcaaggacagtagtacttacctggtcacca

SEQ ID NO: 279707 - DNA, 97 bp, Homo sapiens
tccaacattcatcgcagctggtgggtgtacacactgctgtttaccttggcgaggcctttcaccaagtccatggtgctgctgctaacatctgcagaag

SEQ ID NO: 279708 - DNA, 51 bp, Homo sapiens
atcctaactatgatgatgaccaggttgctcaagaaacagatgtgagagccc

SEQ ID NO: 279709 - DNA, 98 bp, Homo sapiens
cgggcgcctgccttctgtgatcactgcggggagatgctcttcggcctagtgcgccagggcctcaagtgcgatgaaaatacctcacccttgaacactcc

SEQ ID NO: 279710 - DNA, 100 bp, Homo sapiens
tcgagctaaaatatcgtgttggtgaagcaaaaaatttattgccatatcttggaccccacaaaatgagagattgtttctgtaccataaatttggaccagga

SEQ ID NO: 279711 - DNA, 100 bp, Homo sapiens
tgaaggggaagagcaagatgcagtcagtggagctgactccactggaacccattctctgtacacaacatacaaagattatgaaattatgttccatgtttct

SEQ ID NO: 279712 - DNA, 82 bp, Homo sapiens
cggccttggtgcggcgagccgagcgaggcagctctgagccgcgcgacatgcaagaaagcacttcagccaagcagaagggagc

SEQ ID NO: 279713 - DNA, 75 bp, Homo sapiens
atttcaccttcaaacaggaattcatctcaactcgaactccacctccaccttcaccgttgccatttccaacacaag

SEQ ID NO: 279714 - DNA, 82 bp, Homo sapiens
gcggatctcaccgccgctcaggttgctgatgtatattcaagatgagtggattaggagaaaacttggatccactggccagtga

SEQ ID NO: 279715 - DNA, 101 bp, Homo sapiens
attccactgagtggtaatggatgatgcagttcaaataactaagggcatatctggaatctgaagttgctatatctgaggagttggttcagaagtacagtaat

SEQ ID NO: 279716 - DNA, 98 bp, Homo sapiens
cttgcacgaaagctttcctaggccaaaaagagatgatcaagttccagatgatcctcagtgagggataccatcctttcaatattcaagagtcacccttc

SEQ ID NO: 279717 - DNA, 92 bp, Homo sapiens
tgggcggtgggccccagccccacagaccagcccagcattcaggtgcgtcctggctgagagttggagctctccagcaacatgcctgagcagag

SEQ ID NO: 279718 - DNA, 83 bp, Homo sapiens
ccgggacccggtgtctgctcctgtcgccttcgcctcctaatccctagccactatggcgccatgtcagaaccggctggggatgt

SEQ ID NO: 279719 - DNA, 75 bp, Homo sapiens
tactgcagaacgtcccaattcttcaggccaaggtgctggagaatctggtaaaagcaccattgtgaagcagatgag

SEQ ID NO: 279720 - DNA, 100 bp, Homo sapiens
ctttacctgcttcccaatcccactgatgaggatcagcccatggtttggcatagaaatggtaccccttgttcaaaatgaacaagaagccttagatttggat

SEQ ID NO: 279721 - DNA, 83 bp, Homo sapiens
tcaggcccacgctgctgccgccttcgctgccgctgctgctgctgctaatgctaggaaatttggtgagcggcctccacctaaac

SEQ ID NO: 279722 - DNA, 100 bp, Homo sapiens
ctgggacggagatcttcaatatgcccgccatcaccggaacaggttggttcctgtataccttgggccagagagcaaacataggtggcctgagagagccctg

SEQ ID NO: 279723 - DNA, 100 bp, Homo sapiens
caaccgggcagttttcaccatgcatcagtccctgactcagcagcggtccagcgacatgtccctgcccgattccatggagctgagctcaatgtgcagcaat

SEQ ID NO: 279724 - DNA, 98 bp, Homo sapiens
ctcagagtatcaagattcagtgggtagagcatcagcattcttctgctgtccttgacataggatgccaaagaagagtgaatggcccacaaagagcctgg

SEQ ID NO: 279725 - DNA, 78 bp, Homo sapiens
cttcggcaccatcggcatgcggcccaacgccaagaacaaccggaacggggccgactacgctgtttacatcaacacagc

SEQ ID NO: 279726 - DNA, 96 bp, Homo sapiens
cggacggcccggatgagtacgataccgaagcgggctgtgtgccccttctccacccagagcatctcttgggcagtgaacagcagtcttctgtccagc

SEQ ID NO: 279727 - DNA, 100 bp, Homo sapiens
caaaaatgacccaccaatggaagcagctggcttcactgctcaggaaaggccgagggggacggcaagatgcacatcaccctctgtgacttcatcgtgccct

SEQ ID NO: 279728 - DNA, 83 bp, Homo sapiens
gcggaagggcacctccacccggtttttagaacttcagccataaaaatgggcagaattttccttgatcatatcggtggtacccg

SEQ ID NO: 279729 - DNA, 75 bp, Homo sapiens
cggcgcctctcgaacgagtgtgggcgcgaggcagccacatccatcctgaagcggcagaagcagctgcggaggaag

SEQ ID NO: 279730 - DNA, 100 bp, Homo sapiens
agagggaggagatgtcctgtattcctataccatcatcacagtggattcctgcaaaggcttgagtgacatccaccacaggtactggaggcgcaaagaaggc

SEQ ID NO: 279731 - DNA, 75 bp, Homo sapiens
cttagaagtggtgatgcaagaagtttctaggaaaggccggacaccaggatttaagtgccctgtatgctcaaaatt

SEQ ID NO: 279732 - DNA, 101 bp, Homo sapiens
aaaagaagaagcctaaaaagaaatcatgtctgctgctctaggcccatagtcagcagcagctctgagccaggtggtttcagttgggcaggagcctgtgctgt

SEQ ID NO: 279733 - DNA, 83 bp, Homo sapiens
ccgcgtcccgctcgctgggagagagggacccagacatggagctgcgggaagaagcctggtctccggggccgctggattctgag

SEQ ID NO: 279734 - DNA, 88 bp, Homo sapiens
ccgggagtgccgtgcgccgcagcccgggcccaggccccggcagcgcctgggacaaggaatcccgttctgcttccagaagtggaagtgc

SEQ ID NO: 279735 - DNA, 101 bp, Homo sapiens
ctggcatgacgtgcaggtctctagcgcgttcgtgctggccgtgggcagcgccgtctttgatgccatgttcaacgggggaatggccacaacatccacggaga

SEQ ID NO: 279736 - DNA, 75 bp, Homo sapiens
caagaatgtgcttaagaagttcatctgcatatctgaccttcgggcccaagcctcccccagggaagaacttcacta

SEQ ID NO: 279737 - DNA, 75 bp, Homo sapiens
aacaagtttgtcaatccgtctgaacttcagttgccttacctgtaagattttctctgtgggcagttctttttgttt

SEQ ID NO: 279738 - DNA, 100 bp, Homo sapiens
cctggatctggtggactttgtgaggcaacatcggataccactgggcaaatactgtggtctggggttgcaaatgaaccattcaattgaatcaaaaggcaat

SEQ ID NO: 279739 - DNA, 82 bp, Homo sapiens
ctgtgcagccgcgaggaggcgcgggaggtgttcgagaacgaccccgagacggctgatcagctgaccgaagaacagattgctg

SEQ ID NO: 279740 - DNA, 100 bp, Homo sapiens
tgccggtgtcctgctcgccgtccccgccatgctgtctctagactttttggacgatgtgcggcggatgaacaagcggcagatagaagagcgagcagaattt

SEQ ID NO: 279741 - DNA, 80 bp, Homo sapiens
aaaccggtagcgcttgcagcatggtatctcccaataagtcaccccagattcgttcgaaccatcccggagctgagtgttcg

SEQ ID NO: 279742 - DNA, 101 bp, Homo sapiens
cttggtggaggggtggtgaccatcgaaaggagcaagagcaagatcaccgtgacatccgaggtgcctttctccaaaagctctgcggccgtcacgatgttctg

SEQ ID NO: 279743 - DNA, 101 bp, Homo sapiens
gtcccgagcatggcaggctccctgcctccctgcgtggtggactgtggcaccggggtctaaaattcccaggactccacagctttgcaccagataagcctgga

SEQ ID NO: 279744 - DNA, 100 bp, Homo sapiens
gtggaatgtcactacacccttcccccaggcaccatgcccagtgccagtgactggattggcatcttcaaggagagtgtgaaccggctgcacgcacagatgc

SEQ ID NO: 279745 - DNA, 75 bp, Homo sapiens
agcccccaagctggttcccgctgtagcaaacgtccgcggcctctcaggtaattgaacggcgcattcggcaagagc

SEQ ID NO: 279746 - DNA, 100 bp, Homo sapiens
tacagactgctggctgtgtgtgctgcaaaccgagacaagttcaccccgaagtctgccgatcctcagtttgtggtctgccagctaaaggtgaagatatatt

SEQ ID NO: 279747 - DNA, 75 bp, Homo sapiens
tgagaagccttccgctattcagcagagagctattattccctgtattaaaggccggaaggtggtggtcgtacgctg

SEQ ID NO: 279748 - DNA, 100 bp, Homo sapiens
gaactctgagataattcgaaaaatgactgaagaattcgatgaggtattaacaagtaaaggtgacgcgtgggccaagtacatggcagaagtgaaaaagtac

SEQ ID NO: 279749 - DNA, 100 bp, Homo sapiens
tccctcacctggtcaatgcagacggacagtacctcttctgcaggtactggaaacccacaggcacacccaagggccagatcatcaaacaattttatttaac

SEQ ID NO: 279750 - DNA, 90 bp, Homo sapiens
caaatgggacctacaggccctcgaggaccagtgggaattggagtacaaggtccaaaggtggataagattgtggaccagctgcagcagtta

SEQ ID NO: 279751 - DNA, 98 bp, Homo sapiens
ggttccccggcccacagtgggggtgtgcaaacccgagagaactggggggcaagcgcgatgaagagctggttctgcccatcaactcctccctgagcgtc

SEQ ID NO: 279752 - DNA, 90 bp, Homo sapiens
cacaattataaaatgtcagcttttaaggatcacctcagccagttctcagacacttaggggacatgttctctgcaggaccactctgaggga

SEQ ID NO: 279753 - DNA, 83 bp, Homo sapiens
gaaaagaagcgaaggaagtcaaatactcagacggttgatgatgaagcgccggccgtgtaaatgaagatcgggtgaggagcagg

SEQ ID NO: 279754 - DNA, 82 bp, Homo sapiens
gtcggctacagggagggacccaccgtagagactaagggcatcgagcgcctcaaacgaaagaaccagcccagggagcacatgg

SEQ ID NO: 279755 - DNA, 75 bp, Homo sapiens
tgagaacctctctgagctgatcctcacggagaacctgctgatgctgcggcggagccccatcaagaaagtccggaa

SEQ ID NO: 279756 - DNA, 75 bp, Homo sapiens
actgccaaaaacggtccaacagccaacaggggtggcatgcagcggctctgaccccagttggaaatgtatctgtac

SEQ ID NO: 279757 - DNA, 80 bp, Homo sapiens
gcttgcagttcagcgaccacgaatgattacggacctgaagccaaagaacaagatgcgctagtggacagattgctgaccag

SEQ ID NO: 279758 - DNA, 95 bp, Homo sapiens
gaccagctccggcatgcggtcccagtggccctcggcgcggcagcgctccagctcgctctccaccttcaggctgaccaactgactgaagagcagat

SEQ ID NO: 279759 - DNA, 100 bp, Homo sapiens
gatattcctccccagcatgtcagcatgaccaagcgcctctactacctctggatgtacgcaaacatgcagatctttgtgaagaccctcactggcaaaacca

SEQ ID NO: 279760 - DNA, 100 bp, Homo sapiens
cggaccccggcgcgcggtccgggttgctggggcggcgcgtgaaacttccattttagaagaatacagtatcaattggactcagaagctgggagctggaatt

SEQ ID NO: 279761 - DNA, 75 bp, Homo sapiens
gtctctgcggccacctccggaagggtccgccggctgtgctggtgaggtcatgcttcaccccttcctccatctgct

SEQ ID NO: 279762 - DNA, 100 bp, Homo sapiens
gctccgtggccttagctgtgctcgcgctactctctctttctggcctggaggctatccagcgctctgacgcccgctctgcggcttcggtgtttgaacaggc

SEQ ID NO: 279763 - DNA, 74 bp, Homo sapiens
tccgaccttatgggtccagccaagcatttgctagtgtgtggaatgcagtagccctctgggcctgggatattgtg

SEQ ID NO: 279764 - DNA, 75 bp, Homo sapiens
aaggattccaagtaactcttatttgtactttggaagtgttgctgaaatcatcaggaatcatcaacatagtccttt

SEQ ID NO: 279765 - DNA, 103 bp, Homo sapiens
tacaaggaaatgatggaggaggcaaatggacaaattgccccagaaaacgggacacagacccccagcccgcccaacggagtctcgctctgtcccccaggctgga

SEQ ID NO: 279766 - DNA, 100 bp, Homo sapiens
ctcagacagatcgccggggaggcagcgcgggatcccagcctcaggcgtgcgcggacggtgtgcggcttactgcagagtgggtctgggcatctgctacgac

SEQ ID NO: 279767 - DNA, 87 bp, Homo sapiens
cgccgtccgcaccgggaccggagaggaagcggaggaatactcccccagttgcaagaggcgcaggaccgtggaagacttcaacaaatt

SEQ ID NO: 279768 - DNA, 90 bp, Homo sapiens
catcaggaaggaagcacaggggccactcggagtcgcccgagaagtgtgaccaattcagtgaaaggaacgaatgcgattctctggacctgt

SEQ ID NO: 279769 - DNA, 135 bp, Homo sapiens
ccggcgagctggccaagcacgccgtgtccgagggcaccaaggcggtcaccaagtacaccagctcgaaggggacattcagcagtttttgatcacaggtgatcccaaggcagcatatgactactgtgagcattatag

SEQ ID NO: 279770 - DNA, 80 bp, Homo sapiens
agagggaagagattcagccagcacactcctcgcgagcaagtacggtggggattgcagctgctgagcagggattctggaaa

SEQ ID NO: 279771 - DNA, 80 bp, Homo sapiens
aggcctggattaaggattcagacgtgggccctcagatgggctactgcagcactggggtgtcagttgttggtccgacccag

SEQ ID NO: 279772 - DNA, 100 bp, Homo sapiens
ctccaaaatgagtctacagttataccaagtggatagtagaacttatctactggatttccgtagtattgatggtgttggtaaatcatgcttattgctacag

SEQ ID NO: 279773 - DNA, 75 bp, Homo sapiens
aagccttggaattttaccagatcgaatctgggccaaatagaaaggaaatttggtgagcggcctccacctaaacga

SEQ ID NO: 279774 - DNA, 75 bp, Homo sapiens
cagcaattgaaccatcagattagccagcagacccagctacgtggactagagccttcgatctggctctgacatcca

SEQ ID NO: 279775 - DNA, 100 bp, Homo sapiens
ccagcgtggctgtccgcagagggacctgctgtgccatcaacaaggacgatgaggtggtcctgcagtgcagcgctaccgtgctcaaggagcagctcaagct

SEQ ID NO: 279776 - DNA, 50 bp, Homo sapiens
ggaagttgtgttgtcagagaataagtgtagtgtgcttcagagtctgaaag

SEQ ID NO: 279777 - DNA, 100 bp, Homo sapiens
cagccaccaggaggaagccacacctgctgctggtagctgctgtggcccttgtctcctcttcagccgcttacaaacacgcagatggcaagaagattgatgg

SEQ ID NO: 279778 - DNA, 100 bp, Homo sapiens
tctgggatcccggccaccagcaattgtccgtatctccagatgaaatggccactgcttgatgtccaggcagggagcctccagagtagacaagccctcaagg

SEQ ID NO: 279779 - DNA, 113 bp, Homo sapiens
cgcgccacgactcctcctacggcaccttcgcgggggagttctacgacctgcgctacctgtcggaggagggagtcgggtgggagaatgtgctgctaaaggaaggtgagtcagcc

SEQ ID NO: 279780 - DNA, 98 bp, Homo sapiens
aacggagccagcggctgaggaggggccccagcagcccccgaaggccctatcaggacatggagtatgaaagacggtaaacgcaaagcactgaagttgaa

SEQ ID NO: 279781 - DNA, 105 bp, Homo sapiens
ttgcattgactggaaacaatggcatttacagaaagagtcaacagcagtggcaacagggtgtcaaattgagaaccaggtagatccccaccacctacagtaaaaagg

SEQ ID NO: 279782 - DNA, 100 bp, Homo sapiens
tgaatggagaaggttacctctacccatcaagcctgcattgattctaatgaagatggggacttgagtaaatctaccgtgttgagaaactacaaagaagccc

SEQ ID NO: 279783 - DNA, 83 bp, Homo sapiens
aatggttcccactgccgggcgaggatttttagactctgaggagcagttggagctaatccacattatggaaatggaaaccaccg

SEQ ID NO: 279784 - DNA, 101 bp, Homo sapiens
ttaattttatgctgtggattctgaacttaataatttggcctgtgagtcgatctttttagtggagacttttcagaaactgcagaaggcaaaggagattctga

SEQ ID NO: 279785 - DNA, 100 bp, Homo sapiens
gcaactctccgtacatcgtgggcttctatggtgcgttctacagcgatggcgagatcagtatctgcatggagcacatggaaccacgtgaatgttgaggggg

SEQ ID NO: 279786 - DNA, 75 bp, Homo sapiens
tagggaaacctgggggctccctggacaactccgagcagagtctcactgtcgcccaggctgcagtgcagtggtgcc

SEQ ID NO: 279787 - DNA, 50 bp, Homo sapiens
ggctctacctctttttcaaagtgattgaaatctctgaatatcgaacccag

SEQ ID NO: 279788 - DNA, 100 bp, Homo sapiens
atctctggtgctgcagctctagtaaatgtgtcaaatactggcctgatgagtatgctctaaaagaatatggcgtcatgcgtgttaggaacgtcaaagaaag

SEQ ID NO: 279789 - DNA, 101 bp, Homo sapiens
gtgaggctttagcccgcttcgagcgcccgggggcgccgctcctctggaagagctaacaatgggaacctcctgcctccctgatacgttcaccaagctgataa

SEQ ID NO: 279790 - DNA, 82 bp, Homo sapiens
cggaagcggcgcggcggtcggagaagtggcctaaaacttcggcgttggacccaacatgagtgaagtttcctgcaagaaacgg

SEQ ID NO: 279791 - DNA, 100 bp, Homo sapiens
atctggaggacggagaggacctgttcaccagcactgtctccaccctagagtacctgccatcctggctggacttgaccccagggacattgtggctgtgctg

SEQ ID NO: 279792 - DNA, 100 bp, Homo sapiens
tcgagatcctgcggctccccaaggctctgcgcgagatgaactggcttgactacttcggttctgcttggattctgctagacagacccgacaaagactgtct

SEQ ID NO: 279793 - DNA, 75 bp, Homo sapiens
gacaaccttggaacagaacaagaggacaggaggtgtcgttccagctcatctttgggtgaaaaattgtcgggatct

SEQ ID NO: 279794 - DNA, 99 bp, Homo sapiens
cttcacaaacgaggatagaagacaaggtgcggtggtcctccatgtgctctgtgtggaaaggctgcagaggatcctggaaggggaagggaatcaagaagc

SEQ ID NO: 279795 - DNA, 50 bp, Homo sapiens
ctgagctgcgaggaaaatggcggcgggagaatttggaggttttggttcag

SEQ ID NO: 279796 - DNA, 100 bp, Homo sapiens
gcgaggtggagggtggaacgcgggcgcctgaaggagttgttgtctcggcagcgcccgcggagacgtgaagagagaacgcattcgactgcagaaaaagttc

SEQ ID NO: 279797 - DNA, 108 bp, Homo sapiens
cccggcttcaggatttacacagacgtggggcgatgcttgtgaccctgcagctcctcaaacaatggctgccatccggaagaaactggtgattgttggtgatggagcctg

SEQ ID NO: 279798 - DNA, 100 bp, Homo sapiens
ggatgagctgccgtggggatgggaagcagggtttgaccctcagattggtgtctactacatcgatcacatcaacaagaggccaatgagacttgaaccctga

SEQ ID NO: 279799 - DNA, 74 bp, Homo sapiens
ggctagaggaccgcgcggaggcagcgggaatggacagcaaattatggatgaacctatgggagaggaggagatta

SEQ ID NO: 279800 - DNA, 100 bp, Homo sapiens
acaggtcataactcctggagaagggattgcccagtcagcaaaggttcagccctccaaggggccacctacagatgctcctgcagtggacacagcagaacaa

SEQ ID NO: 279801 - DNA, 82 bp, Homo sapiens
attgaagccgcctctgtattacttaccaggtccggcctctttggcctacccccgttggctccgctgccccaggtcgatgagt

SEQ ID NO: 279802 - DNA, 100 bp, Homo sapiens
cgaggagcagctcactgcgaaaactctctatatgagtcatcgagagctacctgcctggcctgtcttagaagtgatctgctcccgaatgcgctacatctcc

SEQ ID NO: 279803 - DNA, 98 bp, Homo sapiens
gacgtccttctatggccgcttcaggcacttcttggatatcatcgaccctcgcacactctttgtcactgagaactcccccactggaaaggattctgaaa

SEQ ID NO: 279804 - DNA, 74 bp, Homo sapiens
cggaagatgcatatgaagactttattgtgaaacctcccgtgagaaagagacggggtcttactcttgcccagggt

SEQ ID NO: 279805 - DNA, 82 bp, Homo sapiens
gacaaaaagtttgtcattaaacccatcgacaagaaggcaccttggaagatagatgataagcctgtaaaaattgacaagtggg

SEQ ID NO: 279806 - DNA, 116 bp, Homo sapiens
gaagagccgttagtcatgccggtgtggtggcggcggcggagactgcgggcccgtagctgggctctgcgagatgaggacggggacttggttgccttttccagtgacgaggaattgac

SEQ ID NO: 279807 - DNA, 100 bp, Homo sapiens
ggagctgtaaagccacccacaaacaaactacccattttcttttttggaactcatgagacaatttgttgttcgtggatagaattatttatattattactgt

SEQ ID NO: 279808 - DNA, 100 bp, Homo sapiens
acataagcaacataaccaagaaaatggttgcagaggagacagtgataccttgggagcgctacatgatctagccaacagggtgaagttcctggtgatgaat

SEQ ID NO: 279809 - DNA, 82 bp, Homo sapiens
agatctagaatcaactgagagagatgcttaaaaatcaccagttactttaatgagagccttcacgtaaatgggtccagtcatg

SEQ ID NO: 279810 - DNA, 75 bp, Homo sapiens
agagagagactattttcgttattacaaggtggcccactttaaggactacattccccaggcttttcctgggggcca

SEQ ID NO: 279811 - DNA, 83 bp, Homo sapiens
gaaggctgcgagggactaagagcagagaaataatgcaaaaggtgtcccaaggctcctgaccagtgaacaaagatttgagaaag

SEQ ID NO: 279812 - DNA, 75 bp, Homo sapiens
ctggaaccgggatggcgacgtctacactgagtcggaggcgaagaaaaattgtatggcgacttcttgagctggaag

SEQ ID NO: 279813 - DNA, 98 bp, Homo sapiens
attggcctttgtccacgaatgagtaccattgatgggaaagagctacttggttatattcgggctgtaaattttaatgattgtacaagaatctccattcc

SEQ ID NO: 279814 - DNA, 119 bp, Homo sapiens
aatcacagactcctatttgaagtatttgacgaaaatagactgaacaactctgctcatggtgattacatgcaaaataacgagagcagcttaatagagcaagctccaatacctcaggacgg

SEQ ID NO: 279815 - DNA, 101 bp, Homo sapiens
taatgccaagaagcagccgccagttgggatcaaatgtgagcctatggatcaaggacgtctttctgatctgcttctctctggtgagcccggcctccttcgag

SEQ ID NO: 279816 - DNA, 100 bp, Homo sapiens
tgctcagcgccagcggcactggctccgccgcccaaggtgaatggcattgacctccgtggtgcatcccacgagcaggcagctgctgcactaaagggggctg

SEQ ID NO: 279817 - DNA, 100 bp, Homo sapiens
ctgcagcctcctatgtgctcccagagatgaccaaaatgttagacttgcttgaggacttcttagactatgaaggctacaagtatgagcgcatcgatggtgg

SEQ ID NO: 279818 - DNA, 82 bp, Homo sapiens
aaaacttcaaagagccggatcgcaggctccctgcctactcccccaccggggatttcagatgtccagctcgccgctgtccaag

SEQ ID NO: 279819 - DNA, 95 bp, Homo sapiens
gaagtggttacaagtacagactctggagccagactgcctgggtttgaattgtgcggtttcagtgaaaatgcctcgtgtaaaagcagctcaagctg

SEQ ID NO: 279820 - DNA, 100 bp, Homo sapiens
ctcgacctgctaacagaactggaccttttcgcatttgaagacatgctggagaacccactgaacagcacccagtggatgaatgatccagaaacggggcctg

SEQ ID NO: 279821 - DNA, 100 bp, Homo sapiens
aagagagggtggtgcggatagcttgaggaagggtgtccatcgcgcttccttcactgccttgatcatgtcggggtcaccacctgcgggggtttgtcctgca

SEQ ID NO: 279822 - DNA, 98 bp, Homo sapiens
cttagtcaaagaagtcaatcagtttccatcagattctgaatgtatgagatacatagcaaccatcactgataaggtgaaagaaaagatgttgtcccggt

SEQ ID NO: 279823 - DNA, 100 bp, Homo sapiens
agtagtagcagcagctgccttcttggacgcctttcagaaagtggctgacatggccaccaacacacgtgccttgataaatttgctgaagttccttatgtca

SEQ ID NO: 279824 - DNA, 100 bp, Homo sapiens
cgcaaggcttcaggcgacccgtactgggcctactctggagggaattgtcgagaatcttttcaaatgggcccgagaggccgatcaaccattgaggacatat

SEQ ID NO: 279825 - DNA, 131 bp, Homo sapiens
tcgcgggaagacgcggcggcggcggcggaggatgagcctgcagagcgcgcagtacctccgcctggcccagtcactatgggccctgttcacctcctctctggccatctccctggtgtttgccgtcatcccct

SEQ ID NO: 279826 - DNA, 82 bp, Homo sapiens
ggttccttcactgtgcgtgctgaccatgttcaccaaccgctgcctgctcaagtggctgaagttgtgggacctggtggtgttt

SEQ ID NO: 279827 - DNA, 100 bp, Homo sapiens
cggacactttgttattggagaaacatgcagattatatcgcatcctatggctcaaagaaagatgattattaagactttgaccccgacgcaggcttcagtga

SEQ ID NO: 279828 - DNA, 51 bp, Homo sapiens
gctgctgccctagctggctacacagaattcttccatctctatgacaacaag

SEQ ID NO: 279829 - DNA, 96 bp, Homo sapiens
gtgttaagcctttttgaagttccagagggagaacaagagagcggaggctcctggtggctggtgacaggttgtggcagcactgcctgaaggtatgag

SEQ ID NO: 279830 - DNA, 82 bp, Homo sapiens
cgacaaccccttcggagacaacaacctgctgggcaccttcatctggaataaggattgtggctgcacggctcaacggttccct

SEQ ID NO: 279831 - DNA, 75 bp, Homo sapiens
agtgacccgggtgccgaggagcgggaagagttgctgggggcgaccattgacgaggtggagacggacgtggtggag

SEQ ID NO: 279832 - DNA, 98 bp, Homo sapiens
cctgcattcgcggggcatgttcccgaggctgtcaccaggaatcgcttaattctgaaagtctggtgagaagacacggcgagaatcggggtccagcacag

SEQ ID NO: 279833 - DNA, 82 bp, Homo sapiens
tttcatcctggtttatagcctggttaatcaacagtcttttcaggtgacagagctgaatgaacctctctccaatgaagatcga

SEQ ID NO: 279834 - DNA, 100 bp, Homo sapiens
ggtgttcagaagacaatggagaaaaaatggaaatactgtgctgtctattacatcatccagatacattttgtcaaggttttccaagagataacttcaccaa

SEQ ID NO: 279835 - DNA, 75 bp, Homo sapiens
gttggagaactacaggaacctggagtctgtggtcaagcccgaccctccagaaggcgtgcgcctaagccccctcgc

SEQ ID NO: 279836 - DNA, 100 bp, Homo sapiens
gtcctggtctttggcttctcgactcggtcctgtttcgacagcgaacatgtcgcggcctgtcaggttcatgatcaagagggcccaaggacggaagcgcttt

SEQ ID NO: 279837 - DNA, 75 bp, Homo sapiens
accaaaggctattggatcagctcagcaggaatcatattctaagaactcagccactcaggtatccaccatggtgct

SEQ ID NO: 279838 - DNA, 98 bp, Homo sapiens
cagaggtgggcggggaggaggacgcggtggaatgggaaacatccctttattttgatgtatgaagaacgtgccgttgaggtcgcatgctatgtttgtaa

SEQ ID NO: 279839 - DNA, 100 bp, Homo sapiens
tgtttttctaagccctttttgtgccaggtgtcccgttaacgtctctgttagttcagagattgagggatactccccctttccaccatgggcaagaagggca

SEQ ID NO: 279840 - DNA, 75 bp, Homo sapiens
gaaggcgggcggcagaggcgatcaggttttggctacgggcctccacctccaccgccagatcagtttgcccctccg

SEQ ID NO: 279841 - DNA, 79 bp, Homo sapiens
cgtgcacatccaggctggtcagtgtggcaaccagatcggtgccaagtacctggagtagaacagaaaaattattatgtct

SEQ ID NO: 279842 - DNA, 100 bp, Homo sapiens
aggctggagacaaacctcatatgcagacttatgaagttgaccttaataagtcctcaggatatagccgtgacctaaacacagaaatctaccctggcggagc

SEQ ID NO: 279843 - DNA, 76 bp, Homo sapiens
ctgaggcacagagtgaaggggaggtgccagcccgcgaatccggccggagctgtgcggccccactctgccccagaat

SEQ ID NO: 279844 - DNA, 114 bp, Homo sapiens
tgttcatgaagctgaggaggggagtaaattgaaaatattggggccatttagtaacttctttgcaaggagaatgacatcttcctgggctgggaaaaaggagcttataagaaatgg

SEQ ID NO: 279845 - DNA, 82 bp, Homo sapiens
gaacccttgtcatctgtaggggagctctacagattcctatcagacctcatagttgaccagacgatagagaaagtttctttct

SEQ ID NO: 279846 - DNA, 60 bp, Homo sapiens
aaatacctgaaaatggggaagcagctttggaactagctcgtcgtcaaggtgcacatgaat

SEQ ID NO: 279847 - DNA, 101 bp, Homo sapiens
gaaggctgaggtggcagcggcaggagagtccggccgcgacaggacggaatgaatctgaagtctgctgcagtaaaacacagaaggctttaaaatgttttctt

SEQ ID NO: 279848 - DNA, 100 bp, Homo sapiens
gaacccaccaagccccgctaggagccacctagactggatgcagagcatgcaccagtggcagttcgcagcctccaggacttggctcgcatcgccatccggg

SEQ ID NO: 279849 - DNA, 74 bp, Homo sapiens
gtccttgccaagagtaccaagaaggcactggacttcacagagaatgcagttgtcttgacttcaggtctgtctgt

SEQ ID NO: 279850 - DNA, 80 bp, Homo sapiens
tttcacaagatgatgtttgaaactattccaatgttcagtggcggaacttgcaatcctgataacttaagtgactctctctt

SEQ ID NO: 279851 - DNA, 100 bp, Homo sapiens
gagtttggccgatttggcagctccttgacccccctgggggacctggaccaggatggctacaatgttcatgaaaagaacctgctgaaggccctgaggaagc

SEQ ID NO: 279852 - DNA, 75 bp, Homo sapiens
cgctacctggctgacggcaggctgtaccatcgccactgcttccgggggaggtgaccatccactacaacaagctgc

SEQ ID NO: 279853 - DNA, 82 bp, Homo sapiens
gcgagcacagagcctcgcctttgccgatccgccgcccgtccacacccgccgccaggcaggtgacagcagggacatgtctcgg

SEQ ID NO: 279854 - DNA, 100 bp, Homo sapiens
ctggtgacttcacttttgagtgcaactgccttccaggacatggatttgattgacatactttggaggcaagatatagatcttggagtaagtcgagaagtat

SEQ ID NO: 279855 - DNA, 74 bp, Homo sapiens
agattcgcagtggtcgcttcttctccttggacactcatgaggaccatgatacttccactgagaatacagacgag

SEQ ID NO: 279856 - DNA, 100 bp, Homo sapiens
tttcaaatacagtaatgaaagtaaagcagatcctgggcagaagtggtacacctgatactgttctatgagaaccggctgaaggaccatcatcttgtgatcc

SEQ ID NO: 279857 - DNA, 100 bp, Homo sapiens
acagcaaatccaaagtttcttctcagtttgatccaaataaacagaccccgtctggcaagctaagtttggtgcgaacgccattctgggggtgtcccttgcc

SEQ ID NO: 279858 - DNA, 51 bp, Homo sapiens
aaattcccagaggactttggagaccaggttcaaaccttgtactactcagct

SEQ ID NO: 279859 - DNA, 101 bp, Homo sapiens
cgcctgtaatgtttggcgagtctgggacagagcagaatgggctgatatagatccggtgccgcagaatgatggccccaatcccgtggtccagatcatttata

SEQ ID NO: 279860 - DNA, 82 bp, Homo sapiens
gaacaagcgtcacttgacaagcctatagaatcgcattgatatgaaccatggacaagtatattctgctgccacaaagactgta

SEQ ID NO: 279861 - DNA, 90 bp, Homo sapiens
agtacatcagcgtgaagacgcagagggagacagatctgactgcagccatgagcagcaatgagtgcttcaagtgtggacgatctggccact

SEQ ID NO: 279862 - DNA, 100 bp, Homo sapiens
caacatttgccccccggaggaaagaactggaaccagggtcggcactcttcaccctcccgagccctgcccgtctcggccccatgcccccaccagtcagccc

SEQ ID NO: 279863 - DNA, 82 bp, Homo sapiens
cgggagctggcaaagacgctggtctcggcgcggaagatggccggcggcgtggacggccccatcgggatcccgttccccgacc

SEQ ID NO: 279864 - DNA, 89 bp, Homo sapiens
gcaggatgagccccgcgaccactggcacattcttgctgacagttgacgaaggatcagagattggtgtattcgggcagactgcttcccga

SEQ ID NO: 279865 - DNA, 50 bp, Homo sapiens
gaacgctctacaagctgcacccgcggtcttgaggaccggcccagctcagg

SEQ ID NO: 279866 - DNA, 96 bp, Homo sapiens
tcggcctggagaagcaacacgggagcaacaccttcacggtcaaggcccagcccaggtctgtgcagacttttgcagacaaatcaaaacaagaagctc

SEQ ID NO: 279867 - DNA, 100 bp, Homo sapiens
ccaacatcagcagccagcatcttctttattgagcaatactacaaaatccgcagtcaagcaattcatcagctgaaggtcaatggggaagacccatacccac

SEQ ID NO: 279868 - DNA, 82 bp, Homo sapiens
gccgtccttctccactttcgccagcccgtgccgcgagcgcggcctgcaggaggcaagtgaaccggagcaaacgacttccgat

SEQ ID NO: 279869 - DNA, 97 bp, Homo sapiens
aatacacctgcaagcatttcacgaattctgcttggtcagaatcgtgatggcattgtgttcagcactgatgactattttcaccatcaagatgggtaca

SEQ ID NO: 279870 - DNA, 83 bp, Homo sapiens
ttgcaataaaatagaacttccaactactgaattaaatgtgagggagtctgacgtaagagtttgtgatgagtcatcatgtaaat

SEQ ID NO: 279871 - DNA, 80 bp, Homo sapiens
taaggaagtaaaatggcggacctggcgaacgaagcctgacatttaccccggtaactgctgggcatttaaaggctcccagg

SEQ ID NO: 279872 - DNA, 100 bp, Homo sapiens
ttcaccactcaggctgaacgcaagattcgtatcattatggcagagcccctggtctaccctgaactgcagatcaccaatgtggtagaagccaaccaaccag

SEQ ID NO: 279873 - DNA, 101 bp, Homo sapiens
gctgaacaggccaaagccagactacagctggttcttgaagctgctgaacgtggttctcctcaagatttagttactaaagacatcactgacacatcaattgg

SEQ ID NO: 279874 - DNA, 100 bp, Homo sapiens
actattcaggtgtccgttattcagattatctttctcaaggaatagatctttctggaatagaagtgatagaaaatgatctactttttattgcaagagcccg

SEQ ID NO: 279875 - DNA, 88 bp, Homo sapiens
ttgagaccaacctggccaacatggtttgacagtgagctctcgcaggcgcatgaggaggcccagcgggagaagctgcagcgggagaagc

SEQ ID NO: 279876 - DNA, 100 bp, Homo sapiens
gccgtatccaagacagtatgcaaggccacgacccacgagatcatggggcccaagaaaaagcacctggactgtgttggctacgtttgtggttttaagaaag

SEQ ID NO: 279877 - DNA, 100 bp, Homo sapiens
cgaagaggtggcagcgcgagctgggaccagcgtctcggaggcgccgcaggagatggtaacctgcacctcaatgtgacggcggaggccttcagcccctcgc

SEQ ID NO: 279878 - DNA, 71 bp, Homo sapiens
agaacctagcctatcagctggggctggatgagtatatcaatgagtgtgagcagccaggggtgtgcagcggg

SEQ ID NO: 279879 - DNA, 75 bp, Homo sapiens
agtttgatgcgtcacactacgacagtgagaaaggaggaaagcagctggcccttctcaagaccaattcggctgtcc

SEQ ID NO: 279880 - DNA, 120 bp, Homo sapiens
tccgggcggcgcgaagcgctggtggcgggcccgggctgcggcgtgtgcgcgcccgccagctgctccggagatacgggggacttgatctcatcttcatgccaggccttgggtttgacaaac

SEQ ID NO: 279881 - DNA, 76 bp, Homo sapiens
gcattattggcatgggaacaggagcaggcgcctacatcctaactcgatttgctatggatttaaatctgaaagaaca

SEQ ID NO: 279882 - DNA, 100 bp, Homo sapiens
gaatacctgaaactggagtttatcaaggttgctgtgagtctaggtactccaattatgaagccagaatggatttataaagcttgggaaaggcggaatgaac

SEQ ID NO: 279883 - DNA, 101 bp, Homo sapiens
caaaagagtctccgcggtggaggtctgcgttgctcttgcttttcctcgctggggtgtacgctctagaggacaaaatcccagtccttggcacaaactcagga

SEQ ID NO: 279884 - DNA, 100 bp, Homo sapiens
ctccggagacagcccaaatatcctcggaagagcgctcccaggagaaacaagtcacggcagttgcacaacagaatcaaggagaggtccctgaaccccaaga

SEQ ID NO: 279885 - DNA, 82 bp, Homo sapiens
aagagaccccaagagtgttgagcagcccatcgtgcttaaagaaggaattcagaaggagctggcggacatcactttagaccct

SEQ ID NO: 279886 - DNA, 51 bp, Homo sapiens
attcgctcccagagcagctgcggccagtgtaaaagacaactgtacttatgg

SEQ ID NO: 279887 - DNA, 100 bp, Homo sapiens
tcttcagcattgtccgccaggcctgtgtccggagcctgagctgtgaggtctatgttaacaatgaatgggcaaccagtgttggggaaggagggagctttgg

SEQ ID NO: 279888 - DNA, 101 bp, Homo sapiens
aggacctggtccagcttcccttcctcaaataaggaaattgacacctggcgtggtgaataagtctgatgacacagcagaacatcttctggagttgggctggt

SEQ ID NO: 279889 - DNA, 89 bp, Homo sapiens
ccggccgcgctagtcagggctcagcagtgccccagcatggggcagagcctctcggtgccagccaggtgaaaggtgtagcagtcactcgg

SEQ ID NO: 279890 - DNA, 75 bp, Homo sapiens
ggagctaagagatatctgcaatgatgtactggtcgacttatcaaaggatctccctcactggaacaagcttaaagc

SEQ ID NO: 279891 - DNA, 90 bp, Homo sapiens
gactcatggaggctgagcatttattcagtattggaccaggtacagacatttctcccacagatggcacgggcaaatgaaaagctaagaaaa

SEQ ID NO: 279892 - DNA, 100 bp, Homo sapiens
gcgctttcccgagaccgtcctggcgcgatgcgtcaagtacactgaaattcatcctgagatgagagtgatagattcgtgtggcctttcaaatgattgtgaa

SEQ ID NO: 279893 - DNA, 82 bp, Homo sapiens
gaaatcatcttgttcacaaactcttatttcaacaattccaactagccgtttaaaattcctcaaagaagctggtcatggaaca

SEQ ID NO: 279894 - DNA, 82 bp, Homo sapiens
ttgcgtccgctacagtatgtcaatcgcttgccccagcacagactctgatgccagtatggactggagatgatgggagccagtt

SEQ ID NO: 279895 - DNA, 75 bp, Homo sapiens
gaagaggcccttgcccagcgattccagaccctgtgtcaaggagagtggaaagcctcatttgaagagctccacgat

SEQ ID NO: 279896 - DNA, 92 bp, Homo sapiens
ggaagcaagtggatgccctggggctgacaggaatcttctggtgtactctttttatgaaaaggacactgcccatctctaagataagaacctgg

SEQ ID NO: 279897 - DNA, 74 bp, Homo sapiens
aacgtcatcacgccctttctcttgctcaagggtatttctcaagctgccagatacgtttaccaacgactcatcaa

SEQ ID NO: 279898 - DNA, 75 bp, Homo sapiens
caaggagtttgggaaaaaccgcgaagtcatggggctctgtcgggaagatcctgataacttaagtgactctctctt

SEQ ID NO: 279899 - DNA, 83 bp, Homo sapiens
aaaatgtcagggctcagcccagaaattgctgcaggatctctctaggagctgacactcgaaccttcacgacccattcggatttt

SEQ ID NO: 279900 - DNA, 74 bp, Homo sapiens
ccctgtcaagaaggtgccggtggtgcgagtcttcggagcgaccccggcaggttcgatacaagaggctgttttcc

SEQ ID NO: 279901 - DNA, 90 bp, Homo sapiens
cggggtccggacagccgcgcgctgagggtctcggggcgggcgccgcgggacctctccgggccatgggctgtgccaagaccttgtaccact

SEQ ID NO: 279902 - DNA, 99 bp, Homo sapiens
tcttttaaagtatatgtatgacttttaaaagagagagcttgtgaaactgagggaataggttgaatgcctttgagaacttgatgcataaaatttgcatga

SEQ ID NO: 279903 - DNA, 100 bp, Homo sapiens
gatagcccagtgcctagtgtctgtgccgcctaccaggcagagcctgaggaagctgaagcagaggtttcccagggtacttttgacttcagtgacattgctg

SEQ ID NO: 279904 - DNA, 100 bp, Homo sapiens
gctggaccacctggtcggggaggagaccatggctgactacctgctgtacaccctcaacaaacaccagcgctttggttttctttttaaaagcggaaggaga

SEQ ID NO: 279905 - DNA, 100 bp, Homo sapiens
cttctttatactgcagtgatattggtgtgatccctcacatccacaaatctctgattggaaagaagggacagcagaaaactgcttagagggatgctttaac

SEQ ID NO: 279906 - DNA, 114 bp, Homo sapiens
ttaccctggccaagatccgcaaggccgcccgggaactgctgacgcttgatgagaaggacccacggcgtctgttcgaaggagaggcaagagaaagctctgggcatcctgacatac

SEQ ID NO: 279907 - DNA, 100 bp, Homo sapiens
aaaatccaagtccggctagtacgcgaattggagaaaaagttcagtgggaagcatgtcgtctttatcgctcaggagacatgggggacaaaggacagaaagg

SEQ ID NO: 279908 - DNA, 100 bp, Homo sapiens
atcgcatcctatggctcaaagaaagatgattatcaacacgctagaagggtttatgaaattcttcgactactggtaactgacatgagtgatgccgaacaat

SEQ ID NO: 279909 - DNA, 100 bp, Homo sapiens
acgtttatgagtacctgctgcacatcggtgcccagaagtcagcccagaccttcctgtctgagcacacagattatggcgatgagatcgccattgagctgcg

SEQ ID NO: 279910 - DNA, 100 bp, Homo sapiens
ttgacagctgcattcaatcttttggtgtgcaactgaggaacatggctcaagaaactaatcacagccaagtgcctatgctttgttccactggctgtggatt

SEQ ID NO: 279911 - DNA, 100 bp, Homo sapiens
gcctgtattactcctactacaagcagatgctgcaggctccaaccctcgtgcaagatccctctctgggcgcattgttggaggtgtgtggtggttctttacc

SEQ ID NO: 279912 - DNA, 96 bp, Homo sapiens
attatgcccagacaagtccccagggaatgccacagcatcctccagcacctcagaaacctgtgcccagcagctctggtggagatgcccacgttcccc

SEQ ID NO: 279913 - DNA, 75 bp, Homo sapiens
gttcatcaagcaaagggactaccaccagcaggtcagatgggcagacctggaagagaagaaggatgcagataggaa

SEQ ID NO: 279914 - DNA, 75 bp, Homo sapiens
atgccaaaaacctgagagtcaatgcagcttccccttcctccctgcacttcctctacaagctggcccagctcttcc

SEQ ID NO: 279915 - DNA, 75 bp, Homo sapiens
ctacctggggatatacatgcatgcaccaaaacgaggacaggtaaccctgtatcatttgctaaagctgtttcaatc

SEQ ID NO: 279916 - DNA, 100 bp, Homo sapiens
agaacatgacgccgtcacccttcctgcgattctacttaggaactgactcagcacaagaagacagcttcgactccctatgatttcatctctgaccaatcag

SEQ ID NO: 279917 - DNA, 50 bp, Homo sapiens
catccccttagcagcagcctctggtttctaccatgaatgaaatgaagagt

SEQ ID NO: 279918 - DNA, 100 bp, Homo sapiens
gcttgtagtaagttcttctacaaattctttcaggagtttacccaagaaccattggtggagatagaaggtggaaggaacagcatatttaagttcttttctg

SEQ ID NO: 279919 - DNA, 98 bp, Homo sapiens
agggcagataaaacttgcagactttggacttgctcgattgtatagctcagaagaaaggttctgtcttttacacatcctacctcgttccactctgcaga

SEQ ID NO: 279920 - DNA, 113 bp, Homo sapiens
ctccgtggccttagctgtgctcgcgctactctctctttctggcctggaggctatccagcgcgccatgtcagaaccggctggggatgtccgtcagaacccatgcggcagcaagg

SEQ ID NO: 279921 - DNA, 50 bp, Homo sapiens
tttattgtggtggagtccaccccgctgtgaccagattatcaaaaattctc

SEQ ID NO: 279922 - DNA, 50 bp, Homo sapiens
tcgcagtggtcgcttcttctccttggagttgtaagacgttcatcgccgtg

SEQ ID NO: 279923 - DNA, 100 bp, Homo sapiens
accttatatatggcatgcatacgctctggaggtaaaatgtgactactggttcaagaaatttacaaagcagcaagccaatcactgaggtgatgcgttttgc

SEQ ID NO: 279924 - DNA, 83 bp, Homo sapiens
cgaggaggtcatgaaggacctgagcctgacgcgggccgcgcgggcatggccgcctttgccaccgcccacctcctctacgtctg

SEQ ID NO: 279925 - DNA, 98 bp, Homo sapiens
ctgccttgggtttcctctgcttactgtggatggccccagagggggagaagccggagacccagggccccctggactacctgcctactcccctcaccctt

SEQ ID NO: 279926 - DNA, 75 bp, Homo sapiens
ctcgtttgtaccgtccctcttcagggtggcaggggagaatgacttccttcagactgttataaacaaagtcatcgc

SEQ ID NO: 279927 - DNA, 120 bp, Homo sapiens
ccgcccactgccccgtgcccacatcaaggagtatttctacaccagtggcaagtgctccaacccagcagtcgtgcaatgtcccctgatggggaggccatcgtcactggtgctggagacgag

SEQ ID NO: 279928 - DNA, 83 bp, Homo sapiens
gtcccaatcccccactctttccgccctaatggaggtctccagtttcggcaacatgagtgagaatgaggaagaggaaatttctc

SEQ ID NO: 279929 - DNA, 100 bp, Homo sapiens
ctgaattaattggtcctgctgaagctcactcagattccctcattgatacctttcctgagtgtagtacggaagttgacattttgctaaaggctgtgggaga

SEQ ID NO: 279930 - DNA, 101 bp, Homo sapiens
agacaccacctccttccctctcttcacatggatcctcttcaagcttaaacctgggttgcccccaagtttcctggcagtgtgtgatactgaggaggtgagct

SEQ ID NO: 279931 - DNA, 100 bp, Homo sapiens
cacgcatttcggaagaatatttttctcaggcaagataacccctgtgacagaaggctactgttgctgtaacaaagggcatacatacattttcaagaactgc

SEQ ID NO: 279932 - DNA, 50 bp, Homo sapiens
aaagcggacaccaagaaacgccacagtcacggagctgctggacgtctcca

SEQ ID NO: 279933 - DNA, 82 bp, Homo sapiens
gtgtatcaagtaatggtgcaaagcctgaagaatccatcaacagcatcaagtccagactaagcaaaagtgggcacatacaaac

SEQ ID NO: 279934 - DNA, 100 bp, Homo sapiens
gtcggtgtttggagaaaaggactcaggtgaggactggaggaggcgtctgacacagtatgatgatgaagatcccatggggcagcatcccagtactgatgtt

SEQ ID NO: 279935 - DNA, 100 bp, Homo sapiens
ggggccgccctactctggggcttcctgctccagctggttccaatacatatgaagaggcagctgcctatattcaatgccagtttgaagatctgaacagaag

SEQ ID NO: 279936 - DNA, 75 bp, Homo sapiens
cggatgatgccttcaatactacctttatttccaccatagatatccttggaacagaagatcttattgtggaagtga

SEQ ID NO: 279937 - DNA, 102 bp, Homo sapiens
gaggaggttttcaggaccaaaattgtggaaaagtcactctggccggtctaattgaagccaacggagaactcaaggtcttcatagaccagaaccttagtcccg

SEQ ID NO: 279938 - DNA, 142 bp, Homo sapiens
tggcaggctgcgtcccactgctccagggcctggtcctggtcctcgccctccatcgtgtggagccctcagatggagtcccactctgttgcccaggctggagtacagtggcatgatcttggctcactgcaacctccacctccca

SEQ ID NO: 279939 - DNA, 100 bp, Homo sapiens
ccgcgcccgccgggcacacaagaatggtcactttttagaaagagcgttttcgctacgtaaagcacattcgataaaggatatggaaaatactttgcagctg

SEQ ID NO: 279940 - DNA, 98 bp, Homo sapiens
cacttcccgcttgggcgcccggacggcgaatggagcaggggcgcgcaggagcattgggctcaggatctgaacaaagtccgtgagcggatgacaaagtt

SEQ ID NO: 279941 - DNA, 83 bp, Homo sapiens
ctaaggcggaggaactgagacgtttcgaattccaggcttggcttggactcatcgtcaacagcagcagcatcatcatcatcacc

SEQ ID NO: 279942 - DNA, 82 bp, Homo sapiens
ggccgcaggatccccaaggacgtggttgaggaattcagcgatttatacaacgagagatgccctgtatccaagcccaatatgg

SEQ ID NO: 279943 - DNA, 100 bp, Homo sapiens
ccatcgaaaggagcaagagcaagatcaccgtgacatccgaggtgcctttctccaaaaggcgaatctttctgcattgaatttgaagatttctgaacagaag

SEQ ID NO: 279944 - DNA, 83 bp, Homo sapiens
gcgtgtgcgcgcccgccagctgctccggagatacgggaaatcctcattgacgattcaatttgttgaaggccaatttgtggact

SEQ ID NO: 279945 - DNA, 82 bp, Homo sapiens
taaagtcgagtatctggtgaagtggaaaggatggcccccaaatggccacagatgtctttaattccaaaaacctggccgttca

SEQ ID NO: 279946 - DNA, 90 bp, Homo sapiens
cttggcgaagcgctgcgctcgcgcccggatccctcaggcacacggaatgcagtgctgaacacggaggcgcgcacgatggcggcggaggtg

SEQ ID NO: 279947 - DNA, 100 bp, Homo sapiens
atccaggtgttaatcaacctttccttattaaaactaaccattacttggcaactttatacaagtgataatatgcagcatgcatactgggaactgaagagag

SEQ ID NO: 279948 - DNA, 100 bp, Homo sapiens
gtttctacaaatgctagaagctatcaaagcccttgaagtcaggtgccagagtgggtcatcgctccttgatgagatactacaaacagcgatttggcttgtc

SEQ ID NO: 279949 - DNA, 97 bp, Homo sapiens
aaggaaacgctcagcctcactgtagatgccaagacagagactgcggtcttcaaaaggccgtcgctttcgggttctctcatcgcttcgtcgttcgcca

SEQ ID NO: 279950 - DNA, 98 bp, Homo sapiens
cctgccggaaggcggcgtccgcgacgcagctgttcacgcttaggtgggcgacgtgggcgcaggtgggcgcaggaagaaaacaggcagattttggcgcg

SEQ ID NO: 279951 - DNA, 88 bp, Homo sapiens
ggactgtcaacgaaacctggcacggctcttgcttccggggtaaccttaaggccggatgtttacggggagaaaggcctggaaattgtct

SEQ ID NO: 279952 - DNA, 82 bp, Homo sapiens
cgacagccaggcccgggagaaccttatgccagcctggaccatcttggaggcagtgtaggatcatggaagaactttgaattag

SEQ ID NO: 279953 - DNA, 50 bp, Homo sapiens
agcatgactcatccccgggagtgttgagctttattgaaaaggcttgaggc

SEQ ID NO: 279954 - DNA, 98 bp, Homo sapiens
gaaggcttggagagcatacgaggcggaatccggatcgaatgtgtatatctcatgattgatatggagaaactagtcatgggccaaaggtcaagatactt

SEQ ID NO: 279955 - DNA, 80 bp, Homo sapiens
ttccaatgagacagggcacaccaaactccatctgatcaccagaaactagaacgtgaggctcggatatgtcgacttctgaa

SEQ ID NO: 279956 - DNA, 83 bp, Homo sapiens
catctttggcaaagtctctcatcaaatcctggaaaaaattattagcattgtcttcagtgttaagaaatgtggactcctgtgag

SEQ ID NO: 279957 - DNA, 100 bp, Homo sapiens
ctggggcccccagaagtgatcgctcagctggagaacgcggctaaagttctgatggctcacctccacctccagtaaaagtttcttctgaacctcccacaca

SEQ ID NO: 279958 - DNA, 74 bp, Homo sapiens
ttggtgaagatgcagaggttgcagcagattttgatatggaagctccaaatgagaagatgaagcaagtgttaaag

SEQ ID NO: 279959 - DNA, 74 bp, Homo sapiens
caaaaagacacttatactatgaaagagctctacattaatcatactcctccaccactgtccaagagtaaggagag

SEQ ID NO: 279960 - DNA, 100 bp, Homo sapiens
tgagaagttgctctgtgtgctgagcgttctaaaggaaggcgtccgttggccttcgtacccgtcttgattgagatatcagttttagagaatgtggcgtgga

SEQ ID NO: 279961 - DNA, 75 bp, Homo sapiens
catcgagcgcccctccgagctggggttggacgctgccagtttgcacagcagcagcctcctgcccgaaggccacct

SEQ ID NO: 279962 - DNA, 99 bp, Homo sapiens
ccacactggccccagagtatttgccaactatgtcttctactgacatggcatacagaaagttagccaaggaatatcatcctgataagaatccaaatgcag

SEQ ID NO: 279963 - DNA, 75 bp, Homo sapiens
gctcttctgcctcttgatctccgccaccgtcttcaggccagctgctctgttaaaagcgaaaatgaaacaattgcc

SEQ ID NO: 279964 - DNA, 98 bp, Homo sapiens
ctagggttctaagtgatgtccaggaaggaggaggaataatatttatggagcatatattatggaacacacagaaaaggttgttgaaagtccagattttt

SEQ ID NO: 279965 - DNA, 100 bp, Homo sapiens
gctcgaaaggtggagcccccctttaaacctctgttggttctcttgctgcaaatggccctaccaccttggttgataaagtttcaaatcccaaaactaatgg

SEQ ID NO: 279966 - DNA, 74 bp, Homo sapiens
gaacttctgcccagctctccttggtcctcagaatggttggaatgaccctccagctttgaacagagtacccaaaa

SEQ ID NO: 279967 - DNA, 50 bp, Homo sapiens
ctcagctctcggcctgctgatgtatctggagtccatctttcaccatcttc

SEQ ID NO: 279968 - DNA, 101 bp, Homo sapiens
cccgggcggacgccgcagagcgccgaggaggctttcctgctggtggcaaccgcctacgagacactcaaggagataggaacaggtggcacatgtcagtggaa

SEQ ID NO: 279969 - DNA, 83 bp, Homo sapiens
agcggggtagagaccgccgggtctcggcccgcaccaggagcggaacaaaccctgtacccaagcctgtcatcaaaattgagaag

SEQ ID NO: 279970 - DNA, 115 bp, Homo sapiens
gagcaggtgattggcgggaaaaagaggccaaagatctgacagaactggttcagcggagaataacatatcttcaggcccttccttctaccatgattatagtagcagtttattgtcc

SEQ ID NO: 279971 - DNA, 82 bp, Homo sapiens
ccagtacagcaccggcaagaccaccttcatcagcaataccaagaaggagggtgacctgatagctgctcaggctcggctgaag

SEQ ID NO: 279972 - DNA, 80 bp, Homo sapiens
agaaggcacagattagaggaaggaagagcccaagaagatgaaaggattgttcttgttgacaacaaatgtaagtgtgcccg

SEQ ID NO: 279973 - DNA, 115 bp, Homo sapiens
acagccaagactgcctttctatttattttacctcagtataacattagcgtgcctacagcagatcaaaggtccatcatcaaaacaccaaagactcaagacacagaagatgatgagg

SEQ ID NO: 279974 - DNA, 80 bp, Homo sapiens
tttcagggacgtagccatccagaggagcttactccacgggaacagcctctagataatctgagttgttgaaaatacgaagc

SEQ ID NO: 279975 - DNA, 97 bp, Homo sapiens
ggcccaggtcacccagcaagtcagtggtagagggccgctgcacttgggtgaaccctttgcagaagacagaggaggaggaggacctgggggaggagga

SEQ ID NO: 279976 - DNA, 80 bp, Homo sapiens
taccactttggcatcgtcggcctcaacatgaatggctactttcacatcctaagtgtgaacgtgaagtccccagccctgct

SEQ ID NO: 279977 - DNA, 90 bp, Homo sapiens
tctgcaccagtccagctgaactctggctctcaaaattgagaggatccagaatccagatctctggaatagctaccaggcaaagaaaaaaac

SEQ ID NO: 279978 - DNA, 83 bp, Homo sapiens
gggacagagcgcctgcgaccccagtcggtgctccggggaggtcacctgacgaggagtgacgccaatgccccctttgcccagtg

SEQ ID NO: 279979 - DNA, 100 bp, Homo sapiens
gcctggatgtgagtttcagccagatcttggagacatctcagctttaatgaggactttccaacattccagactgccgtcctgcaatgaagctctgagtcac

SEQ ID NO: 279980 - DNA, 100 bp, Homo sapiens
agaacctggcttttagctgaactaaggagaaagtcctacaacagtttggcgtgcaacatggggcttgagaaagggtaagaatgattgatgttggctgata

SEQ ID NO: 279981 - DNA, 122 bp, Homo sapiens
ccgagagctcttcatttctgattacgttgacacttaccatgctgctgcccttaggtcctactgctctgttggctcatgaaataggttttggaagtaaagttacaacacaccctcttgctaaa

SEQ ID NO: 279982 - DNA, 90 bp, Homo sapiens
gattgaccctgtttctgttcaggacaaggacacactcagcattcactacctcatgctgccccgtgttcgtatgaaagttttcaagacgcc

SEQ ID NO: 279983 - DNA, 100 bp, Homo sapiens
atggcctgtcgctggagcacaaaagagtctccgcggtggaggtctgcgttgctcttgcttttcctcgctggggtgtacgaggatatattcccttgcaagt

SEQ ID NO: 279984 - DNA, 75 bp, Homo sapiens
ctatgggaagagaagtttcctgaaagaacaactgttactgaattacctcaggtccggtttatcactaaaatatgg

SEQ ID NO: 279985 - DNA, 100 bp, Homo sapiens
aaacagacatttacaaacagatacgtgctaataagcaattctgtggtgttcttggtcacacatttatggagtttctgaagggcagtggagattactgcca

SEQ ID NO: 279986 - DNA, 110 bp, Homo sapiens
tacttgctggatggtggactcagagaccaataaaaataaactgcttgaacatcctttgactggttagccaggtaattaataaaatgtctccaacatctctaaagatcaca

SEQ ID NO: 279987 - DNA, 100 bp, Homo sapiens
gaagcaggactcggggcacttgggtcttatatccagatggccaggctcagatgattcaccccaagcctgcagacttccggaatcctggcccagggcggca

SEQ ID NO: 279988 - DNA, 100 bp, Homo sapiens
ccggatgcaggacagacccctcagctcaaatagctataactgtaccaaagacatggaagaaaccaaaagatcggacccgaaccactgaagagatgttaga

SEQ ID NO: 279989 - DNA, 83 bp, Homo sapiens
agagattcagccagcacactcctcgcgagcaaggctgaaggtgatgtggccgccctcaaccgacgcatccagctcgttgagga

SEQ ID NO: 279990 - DNA, 100 bp, Homo sapiens
cactcgggaattcatcaaccgcatcacacagagtgaacttcctgccaagatgtgatctcgacatggcaggagctgaggcagctgcaggagcagatccgga

SEQ ID NO: 279991 - DNA, 98 bp, Homo sapiens
gtagtgccagctacggtccgcggctggggttccctcctccgtttctgtatccccacgagcttggctgaagaggaaataaaaacagaacaggaggtggt

SEQ ID NO: 279992 - DNA, 90 bp, Homo sapiens
acacagaactggagacccttttggctaaactcatccaaacctgtcaacatgttgaactttgctcagggtccgttgaaagatgccccgaat

SEQ ID NO: 279993 - DNA, 75 bp, Homo sapiens
cggcccgcgggtctacttcctcaaagcgtccagcctgcatgccgtgcggactgcacccaccagcaaggtgatcaa

SEQ ID NO: 279994 - DNA, 100 bp, Homo sapiens
gtacatcgacaagacgatccgggtaaagttccagggaggccgcgaaggaaaaccgtcttcagatacagtccctaagcccaagagagccccaaaacagaag

SEQ ID NO: 279995 - DNA, 75 bp, Homo sapiens
atagacccaatcaaaaaagaaactagcaaactttttaatgaggaagctgaccaactgactgaagagcagattgca

SEQ ID NO: 279996 - DNA, 75 bp, Homo sapiens
tcgcaggtaccatcaaaacggaaggcgagcatgaccctgtgacggagtttatagatgctcccataatactctcag

SEQ ID NO: 279997 - DNA, 100 bp, Homo sapiens
atgaggcgcctgcctccccagcaaatcgagaaaaacctcagcgacctgatcgacctgttgcagagtgggcaggatcttaagacccgataggtgcagaacc

SEQ ID NO: 279998 - DNA, 97 bp, Homo sapiens
gataagcctcgacttagaagctaccgagttaccctaagaaagagggccagttgagagtggatgccaatatatccgtgcatcaccctggggagccttt

SEQ ID NO: 279999 - DNA, 100 bp, Homo sapiens
agtctggcaaaagcctctgctctgcctccggggacaagaaactagagcaaataaccgttttgaaattgtctcctctgagcctccggcctccataagaccc

SEQ ID NO: 280000 - DNA, 100 bp, Homo sapiens
caagagcaagatcaccgtgacatccgaggtgcctttctccaaaaggatgaccagtgtcccagtgaaggaacgagtgaaggtgtctcagaactggagactg

SEQ ID NO: 280001 - DNA, 50 bp, Homo sapiens
cgggacaacatgctgcggggcacagaatgttcacttaggttgtatggctc

SEQ ID NO: 280002 - DNA, 96 bp, Homo sapiens
cagccacgcgggcgagcggctgtgtggatgtcggcgaagccgcgggcgaggctcttgcagccaatgccggaacaggatttgctgttgctgagcctc

SEQ ID NO: 280003 - DNA, 83 bp, Homo sapiens
cgcagagcaagcgcggggaaccaaggagacgctcctggcactgcaggagtatgctgctgctgttccgctttgcgtcctcgcta

SEQ ID NO: 280004 - DNA, 75 bp, Homo sapiens
gtacaacctgaacttctcaggaagcagtactattcaagagaaatatggctacacacacctttctgcaggagagct

SEQ ID NO: 280005 - DNA, 100 bp, Homo sapiens
cactttcatttctgggtctcttgataagaccattcgactctgggatctccggtctcctaactgccagggaatggccttaagtcttggagataaaatcaac

SEQ ID NO: 280006 - DNA, 100 bp, Homo sapiens
ttaaagctatagttctctttagccccgtttttggtgttgagccagacttgaccagggaaggcggcagtattcccgtgaccttgacctttcaggaggccac

SEQ ID NO: 280007 - DNA, 90 bp, Homo sapiens
tggatcaggcctccctctgctgtcccacagtgttttgttcgccccacggaggccaagaaagccgcagatgaggccaagatgagatttgcc

SEQ ID NO: 280008 - DNA, 109 bp, Homo sapiens
tgacagcacaggtcacagtaaggccaaaaatgtgcatactcacagagttagagagagggatggtgcgggtcacagaaagtcgagagagccaaatgacgattgaggagag

SEQ ID NO: 280009 - DNA, 100 bp, Homo sapiens
tggacttcatgcttagatacatgtataacaaggatgatgactttgagttcactggcagccacctgacagtaaggaatggctactcgtgtgtgcctgtggc

SEQ ID NO: 280010 - DNA, 100 bp, Homo sapiens
ggggaagccgaggcggagaagccgcgcgcgcctcagaagctcccggacgcccagtttccccctttctagggtgaggatggttctacacagccacccggag

SEQ ID NO: 280011 - DNA, 100 bp, Homo sapiens
gggttttgagctgccgcggtcccgggactgaggctgctccagttacagcaccacccggccgctgcacccggctgctcccaggccccccagccggcccctg

SEQ ID NO: 280012 - DNA, 75 bp, Homo sapiens
tgtgtttgtgaaacagagaaagataggcggccatggtccaaccttgaagctggagctctcaaacactgctgtcct

SEQ ID NO: 280013 - DNA, 99 bp, Homo sapiens
cccaggagatcccgctggtgaccctgccgctggcgagcgccaccgcatggagcccttctgcctggcaaactatccatcagcctttcatagtgtcatgtt

SEQ ID NO: 280014 - DNA, 100 bp, Homo sapiens
ggcagaggaggcggccaaggacctggccgacatcgcggccttcttccgatccggtcaaaatgcagatcttcgtgaaaacccttaccggcaagaccatcac

SEQ ID NO: 280015 - DNA, 82 bp, Homo sapiens
gaagactttgaccaggccttgctacggcacattgtgaaggagttcaagagagaggcttcttgcagtggagatgaatacagat

SEQ ID NO: 280016 - DNA, 82 bp, Homo sapiens
gtgaagggggcttcctgaccgaggttgtctttgaagcttggtgatgctggaaaccccagaagtcttgctataaggtaggtag

SEQ ID NO: 280017 - DNA, 96 bp, Homo sapiens
aaccctggctggggaaaagggaagtgaaaagagatctgttttcaggtggacccaagtggagagattgtggaactggcgaaaggtgcatgtccctgg

SEQ ID NO: 280018 - DNA, 82 bp, Homo sapiens
ccctaatggaggtctccagtttcgtctttcccagggaactccgatgaagtgttccaacaaaatgagcgagtgaaccaagaag

SEQ ID NO: 280019 - DNA, 75 bp, Homo sapiens
gaaaatgttaaaaagaacagatacaaggacatactgccatggaaagacattcccggtcaggcatctctggtgttt

SEQ ID NO: 280020 - DNA, 98 bp, Homo sapiens
gtggtgtgaactcattgttaagcacaagttcacgaaagcctacaaaagtgtggagaggttccttcaggaggatcagtcgttgaagaaagttggaaaag

SEQ ID NO: 280021 - DNA, 74 bp, Homo sapiens
ggctgtttggaaagacccaggagaagccgcccaaagaactgttgattatggaagattcccacaagagtaccacg

SEQ ID NO: 280022 - DNA, 100 bp, Homo sapiens
caggattatgaagtattaattcttccactgatatctcaaaaggtgatctggacaaaggaacaggtatctcaggattggcgagcgtgctattctactggga

SEQ ID NO: 280023 - DNA, 50 bp, Homo sapiens
ttccagctctcagtagactggccagaaagtctccctctccctctctttcc

SEQ ID NO: 280024 - DNA, 80 bp, Homo sapiens
ccactttcgccagcccgtgccgcgagcgcggcctgcaggaggcatccggtcttgggatgtcgatcctggcgtctgcaacc

SEQ ID NO: 280025 - DNA, 101 bp, Homo sapiens
tatccaaccctgaagatatttagagatggtgaagaagcaggtgcttatgatggacctaggactgctgcttcagcgcctgctcctggtcatcactaaccaga

SEQ ID NO: 280026 - DNA, 83 bp, Homo sapiens
aggcgggagcaggagcccgcggccggccagccgaagatggtggcggctactcctcctgggtttggaaatcccttgtctccagg

SEQ ID NO: 280027 - DNA, 75 bp, Homo sapiens
ggcgccgtgaagagccttcaggcgctgggcgaggagccatgtgttcacatgtcatgtggaccagtatttaactgt

SEQ ID NO: 280028 - DNA, 75 bp, Homo sapiens
caagggaactgggtggtgaagagtgacgaggaattgacaatggccatgtcctacgtgaaggatgacatcttccga

SEQ ID NO: 280029 - DNA, 96 bp, Homo sapiens
ccggccggatggagcgtccgcaacccgacagattcatgatgttgctatcaaaagttgagaaattgtcagaagaaatcatggagataatgcaaaatt

SEQ ID NO: 280030 - DNA, 82 bp, Homo sapiens
gggaaccctggtcaccgtctcctcaggttatgatgtgattgctcaagcccaatctgggactgggaaaacggccacatttgcc

SEQ ID NO: 280031 - DNA, 73 bp, Homo sapiens
gcctcccaagtagctgggaccacagaggaacagaatccccagccctggtgaagaagaggatgcctgatgcgtg

SEQ ID NO: 280032 - DNA, 83 bp, Homo sapiens
cgtatctgcctaggcattttgctgtctcctcctaatacgggtcatctagtagcaggcacccaaatcaggcaactcccaagaaa

SEQ ID NO: 280033 - DNA, 74 bp, Homo sapiens
ctaaaccagaagaggaggttgcccagaagaaaaaggttgactatagtcaatggggccaatggagccaagtgtat

SEQ ID NO: 280034 - DNA, 97 bp, Homo sapiens
aatagctcagttaatgaaggatcaacgtatcataaaagaagtctcaggggatccagaactgcagccagtccttgctgggctgttcctgtccatgtgc

SEQ ID NO: 280035 - DNA, 101 bp, Homo sapiens
agcagaaatcaaattgaagagagcagttgaagaagtgaagaaattattggtacctgcagtatctttcagatgaaggcattgaagcttgcacaagctctcca

SEQ ID NO: 280036 - DNA, 75 bp, Homo sapiens
gtgcactggcaacctcaccaatgcagagaaccgtgtaccacatgaaggaagatggttgggtgaaagtagaaagta

SEQ ID NO: 280037 - DNA, 75 bp, Homo sapiens
ggagccatcctctacaggacccgctttctaccattaaggtttaccgacaagactgtgaaactttcgggatggtgg

SEQ ID NO: 280038 - DNA, 82 bp, Homo sapiens
tgatcctcccacctcagctttgctcaagtaaagctctttgtgacagggcttttcagcttaaatcaagatattcctgctttca

SEQ ID NO: 280039 - DNA, 96 bp, Homo sapiens
ctatgatgctgatggtgatggagattttgatgtggatgatgccaaagttttattaggatctaagcctttcccacgttatggttataaaccctcccc

SEQ ID NO: 280040 - DNA, 100 bp, Homo sapiens
gccgtgagctgcggcaggacggctggagtactatactggcaattgctggagaagattttgcaattgttgcttctgatactcgattgagtgaagggttttc

SEQ ID NO: 280041 - DNA, 74 bp, Homo sapiens
tggggcaaagtgatcaatttcctaaaagaggtcaaccagaatcaagatgtctgggactgaggaagcaattcttg

SEQ ID NO: 280042 - DNA, 141 bp, Homo sapiens
atttttttgtgcagtgggcaggaagaacccatcgggcagctacacatcttgaaagagaagctcttcctgtgagattttctggcatccttaaatcttgtgtcaaggattggttataatataaccagaaaccatgacggcggc

SEQ ID NO: 280043 - DNA, 50 bp, Homo sapiens
cagcacactcctcgcgagcaaggctgacttgacaggaattaagtggaaaa

SEQ ID NO: 280044 - DNA, 75 bp, Homo sapiens
ccaagatccatctgccttctgcataggccaaacaggaacactgagactccgttcctgcttgtcttgtcctacctc

SEQ ID NO: 280045 - DNA, 111 bp, Homo sapiens
ttcctttactacagcagccaaaacgagaagaagaagaagtgttagaccaggcccctcatatggaaaatttgaaatgcagaggggaaacagtagcaaaggagatcagtgaag

SEQ ID NO: 280046 - DNA, 75 bp, Homo sapiens
gaaattctgtgtgctccctccggcgagagactttgtcagctcccgcacagtaacacaaatttacatgtattggag

SEQ ID NO: 280047 - DNA, 101 bp, Homo sapiens
ttacataagaagttacctttttcagaaataagcgggttttgaaaacaaaaaaaagaaggagtggaagagggggccaggatccaggcctccatccccacaga

SEQ ID NO: 280048 - DNA, 75 bp, Homo sapiens
ggatgatgcggaaattaaccccaaggcccatggacagaccttcacgttcccagatctgtttcccgagaaagacga

SEQ ID NO: 280049 - DNA, 74 bp, Homo sapiens
cccctctccgccccccaggaggggcgagagggagccgcagctgatgtcagggaaatcctcattgacgattcaat

SEQ ID NO: 280050 - DNA, 88 bp, Homo sapiens
aagaagaaatattctcttcctaaggatacccctcaagtgtacttttcccaacactggtgctcgtatcatgatgttcattggtggtcct

SEQ ID NO: 280051 - DNA, 51 bp, Homo sapiens
acagaagcctacaggcagagccgtatctgatcccctgcaatcacatgatgc

SEQ ID NO: 280052 - DNA, 99 bp, Homo sapiens
atgagaagatgcgcctggatgtcaacaagcttcaccagcctccaccaagacgggacaagcagggagtttatccggcagcccaaagcccttctctcctca

SEQ ID NO: 280053 - DNA, 90 bp, Homo sapiens
gagcagcagaggcagaagctgccggtattcaaggcaatggatcacttggagtcctttattgctgaatgtgatcggagaactgagctcgcc

SEQ ID NO: 280054 - DNA, 75 bp, Homo sapiens
ggacgaaggccctactgggcaagtactttaggaagaatcatcaaagtaactcaggaggtgattgactaccggagg

SEQ ID NO: 280055 - DNA, 124 bp, Homo sapiens
tcattttcacctcgcgtcgcgcccgggaggaaggaacgaggcaaggagctaaagcagcgtgcgttcagccctgggtgcctccggagccagcgtggtggccatagacaacaagatcgaacaggcc

SEQ ID NO: 280056 - DNA, 100 bp, Homo sapiens
tccgccgcaccttctgtctcttcgtcaccttcgacctgctcttcatctccctgctctggatcatcgaactgaataggagttgaagccaaacagccaaatt

SEQ ID NO: 280057 - DNA, 114 bp, Homo sapiens
caaacccaactcctgagaatcatttctgggagaatgccgaagactgcatttcaacttcaagaatggacactcatgaggaccatgatacttccactgagaatacagacgagtcca

SEQ ID NO: 280058 - DNA, 75 bp, Homo sapiens
caattttgaaggaaaaagttgcatacctttcaggtgcactttacaggtccccgatgaaccaagagaaccctccac

SEQ ID NO: 280059 - DNA, 100 bp, Homo sapiens
gccgcctagagtggttcagccacaaggaggtgttcgaaatccgcaccactgatgacctcactgaggcctggctccaagaaaagttgtctttctttcgttg

SEQ ID NO: 280060 - DNA, 101 bp, Homo sapiens
ggcggcggcccagccggggccccgaagaggacagagcccgcggccgcgccgagcgggacacgatgaggcgagtggtacgacagagcaagtttcggcatgta

SEQ ID NO: 280061 - DNA, 100 bp, Homo sapiens
ggaggcgccaggcttcgtgacggatggtgcgggcaactacagcgtcaatggcaactgcgagtggctcatcgaggatttggagttaaaatatggacctgag

SEQ ID NO: 280062 - DNA, 100 bp, Homo sapiens
cagaaggcctccatccacgaggcctggactgacgacagccagctaaaggtgtggatgagcaaatacggctggagtgccgacgagtcggggcagatcttca

SEQ ID NO: 280063 - DNA, 101 bp, Homo sapiens
caggaaggaggaggaataatatttatggagcatatattatggaacacattggagtcacttctccaattgtggctcacactgagcctgaattctagttcaac

SEQ ID NO: 280064 - DNA, 90 bp, Homo sapiens
gccgcccccacgccctgcctgagatcagaccctacattaatatcaccatcctgaaggattatgtctactttgagaattcctccagcaacc

SEQ ID NO: 280065 - DNA, 100 bp, Homo sapiens
gcatgaccattttcttcagcctccttgtcctaggtgcacattcaggttcccgagcacaaacatcaagataacgttcactgccctgtccagcgagaagaga

SEQ ID NO: 280066 - DNA, 75 bp, Homo sapiens
ccgaacacaggatgaacatccgaagacaatgttctccaaagataaggccacgcccagatttcttctaccgctgct

SEQ ID NO: 280067 - DNA, 88 bp, Homo sapiens
acaccggagacttttggggggaaactaggtcgatggtcggcggcgcccggatgggcagctgagccggatcgagctgggagatgtgaca

SEQ ID NO: 280068 - DNA, 100 bp, Homo sapiens
aagaaagcaagctgaaatcaatgaaaacaacgtcagggaattttgcaatgttattgattgtaatcaagatcttatgccttcattcatccggcatggtcca

SEQ ID NO: 280069 - DNA, 101 bp, Homo sapiens
agatccgcagctccacgcagcaagacccgcgccgccgggacccccaggacgacgtgtacctggacatcaccgattacataccggttacggcacctccttcg

SEQ ID NO: 280070 - DNA, 108 bp, Homo sapiens
atggaacccaagcagtggcgaagggaatcgcaaggctcttccctgaccattttctactgtccctgcgcgagggaaatcctcattgacgattcaatttgttgaaggcca

SEQ ID NO: 280071 - DNA, 51 bp, Homo sapiens
aaatttgagaaggaggctgctgagatagtagtgccaggaaacacgcgcatg

SEQ ID NO: 280072 - DNA, 83 bp, Homo sapiens
ttctatctttgattctccatatcacctacagcaaagaacagtctgaacttgatcaagatttggatgatgttgaagaagtagaa

SEQ ID NO: 280073 - DNA, 85 bp, Homo sapiens
gcttcccgtacagcctgcagaactgaggaactaccctgccctgacagaggctggggatgaaggaggaagagacagccggtcccct

SEQ ID NO: 280074 - DNA, 100 bp, Homo sapiens
gtagtggaaggagtacagggaagtctataagctttgcaacagaattacagagtatgatgtcaacaaaaatctctcatttacttcaccaccagcagtttcc

SEQ ID NO: 280075 - DNA, 75 bp, Homo sapiens
aacacacgttcctccgaaaccggtttgcaagtccttgtagagagtggagactgctgcacggactctggaaccatg

SEQ ID NO: 280076 - DNA, 75 bp, Homo sapiens
gatacattggagaccattgctcctgggcatgagccagaaggagagctctaagtctgccatgatgtatattcagga

SEQ ID NO: 280077 - DNA, 50 bp, Homo sapiens
tcggagctacatccagtgaataagacaaagatcattccactcagcctggg

SEQ ID NO: 280078 - DNA, 130 bp, Homo sapiens
ggcactcagctcaaatacacacacctgttgccattatagagctggaattaggcaaatatggacagttcacagacattgggaccttcgagacagtgtggcaagtcaagttctacaattaccacaagcggga

SEQ ID NO: 280079 - DNA, 75 bp, Homo sapiens
tctacactgagtcggaggcgaaggcccagggccccggccagtgcccagccccgctgggagacccggccagcacca

SEQ ID NO: 280080 - DNA, 100 bp, Homo sapiens
tctagtggagatcacgcaactgctgctttggaagaacaacttaaggacatgagaaacctgaggttcgctttgaaacaggaaggccacagcagaagagata

SEQ ID NO: 280081 - DNA, 75 bp, Homo sapiens
atcgtgggcgagctgggcgacggcgccttcggcaaggtttacaaggaggagcagcccccacaacatcgatccaag

SEQ ID NO: 280082 - DNA, 75 bp, Homo sapiens
gttctgcacctcaggagggaattcagcctcagtgatgtccatgaggtataagtgtgctagcggagtgtctagatt

SEQ ID NO: 280083 - DNA, 73 bp, Homo sapiens
tcagatgtcccaaggacctattgctatgcaggccataggaaaaggatacagagtagagtttcatgaacctgaa

SEQ ID NO: 280084 - DNA, 100 bp, Homo sapiens
ccacactggccgtcccggccatctcgctgcccgacgatgtccgcaggcggttttaaaatcaaagatgggaaaatcggagaaaattgcccttccccatggc

SEQ ID NO: 280085 - DNA, 100 bp, Homo sapiens
agaacattctcgaatacctagaatgggtgttcagaatcaagtggatgaagttattgatgtcatgcaagaaaatattacaaaggtaattgagagaggggag

SEQ ID NO: 280086 - DNA, 75 bp, Homo sapiens
gagcttctcagccattttccacagatcagttgtcgccgtgatcctgaaggcgctgacctacgacgagaagcgggg

SEQ ID NO: 280087 - DNA, 83 bp, Homo sapiens
tgcagtttgtgaagaaaaaattaggatgcctaaatcaaaggaacttgtttcttcaagctcttctggcagtgattctgacagtg

SEQ ID NO: 280088 - DNA, 78 bp, Homo sapiens
caccagtagcaaatgagatgaaccatcttcctgcacacagccacgatttgcaaaggacaagaggaccctgccttggtg

SEQ ID NO: 280089 - DNA, 51 bp, Homo sapiens
ttcggtgcctctctccagcagactgcgacagggtctcgctgtgtcacccag

SEQ ID NO: 280090 - DNA, 90 bp, Homo sapiens
agaaaaaaaccacaaatgtttttctgttttgcctgaatacatgatttaaacaagagatttccacagaagacatgaagaccctgttaccag

SEQ ID NO: 280091 - DNA, 90 bp, Homo sapiens
gtggatgcaaacaaggttattcttaatcctgtaaatacgaatctttccaaaggagatgcccgtgagaaagatcagtctaaagaaaaggag

SEQ ID NO: 280092 - DNA, 129 bp, Homo sapiens
gaaccatttagcgtcagaaataagccgttttttgacatctgtacttcaagaaagctcttctgttagaaatagtatctttgttttcctttgctgttcctcaatcccctactcttcaccccttgttttcac

SEQ ID NO: 280093 - DNA, 83 bp, Homo sapiens
aacttgccaggttccagactctatgacatctgctgcctgactgaacctccattgaatactccagaaaacagggaatatactgc

SEQ ID NO: 280094 - DNA, 90 bp, Homo sapiens
ttctgctgtttcagttgtactactacaagcactatttatcaacaaaggtgctatcagtgctaaagcattcattgctgtccttcaagcaac

SEQ ID NO: 280095 - DNA, 75 bp, Homo sapiens
aattctgcccactctgcggagttagcagtcacgacctccagcacagatatcagttttagagaatgtggcgtggag

SEQ ID NO: 280096 - DNA, 101 bp, Homo sapiens
gaaccagatgagagccttcaaaagcagtgcaactggctcagtattcacagggaaagctgtgaggagtgcccttatgcctgcacagttgttttttaagacgg

SEQ ID NO: 280097 - DNA, 90 bp, Homo sapiens
ccgaccacgacggccccagggaggatgacgaacccaacctggtgcccggcccgcagacaatgcagatcttcgtgaagactctgactggta

SEQ ID NO: 280098 - DNA, 80 bp, Homo sapiens
caggagactgaccgcaacggcagggcacctgaatggacagaagaggacctcagccaactgacaagaagtatggttaagtt

SEQ ID NO: 280099 - DNA, 100 bp, Homo sapiens
tcgatggtgttgtgagagatttctgcagtgaagattgctgtaaaaaatttcaggattggtactacaagatttggagcaagaggtggtggtggccttcccc

SEQ ID NO: 280100 - DNA, 100 bp, Homo sapiens
cccaaggttcttccttgcctgcacaccttctgtgagaggagctgccaaggccatgtctgttccatcatcactgagccagtcggccattaatgccaacagc

SEQ ID NO: 280101 - DNA, 100 bp, Homo sapiens
tggaattctaatttgaaccatgtttggattgaagccgcctctgtattacttaccagagccgatgatgagcaccccacctcctgccagcgagctcccgcag

SEQ ID NO: 280102 - DNA, 83 bp, Homo sapiens
ggtccgcggcatccgtaaccacaaggaggacgagaatagcctaacatggcagaccagagacagcgctcactgtctacctctgg

SEQ ID NO: 280103 - DNA, 99 bp, Homo sapiens
ttatttagccggagtgagaagcaagaaggccctggacacagcaatatctctgggctttcacagttccagaccccctgagccacagaaagctccttccag

SEQ ID NO: 280104 - DNA, 83 bp, Homo sapiens
gtctctacgaacacgtgaaggaaaagcagctccgtccacaacgccgcttcggggctcctagccttaaattggaatgtgagaaa

SEQ ID NO: 280105 - DNA, 88 bp, Homo sapiens
aagaaaaccacctaaatatgaaagattcatcaggccaatggcagcctggcatcctcgctacaacctcattgttgtgggccgataccca

SEQ ID NO: 280106 - DNA, 80 bp, Homo sapiens
tgccatctaccgtcattatgcaaggaccagcaaacaaatcatgtggttttggcaggaaatgatccgactagatgaagtcc

SEQ ID NO: 280107 - DNA, 75 bp, Homo sapiens
gagcagggtgcgggagagccccttgcagaagacgccgtacgagttagagatgtttatgattacttccgagctgtc

SEQ ID NO: 280108 - DNA, 100 bp, Homo sapiens
caacccggcccaggagcatctttctccgcagaccgtttcctggcgaggggttctccaggacaaggacctcttctctgtcttcgctgatcccaatatgctt

SEQ ID NO: 280109 - DNA, 119 bp, Homo sapiens
ctgtaacgtgtgcagagagagtctttctggagtcacctcccatggcctgtcctgcgaagggctgcggtggcttgtgtcggagcattttatgaaaaaatggggagaatgttgggcagcgc

SEQ ID NO: 280110 - DNA, 100 bp, Homo sapiens
cgtcccggccctgagcgcactctggagggattctggcatcagggaggctttcagccggagaagcgagtttcagctggtcttcaataaactcatcaggaga

SEQ ID NO: 280111 - DNA, 75 bp, Homo sapiens
ctggccccgatggctctgtgcaacggagactccaagatcatatggtaaaggaaccagtggaagacacagacccta

SEQ ID NO: 280112 - DNA, 83 bp, Homo sapiens
caggagacggaggaccagaactacggcatgcccaggtgaccaagctcggcgaagaggtgagcctgcgcttcctgaagagggag

SEQ ID NO: 280113 - DNA, 83 bp, Homo sapiens
aaaagcctctgggagcagaagggaggctccaagacctcatcaacaattaagtgctgggcctaaaggagataacatttatgaat

SEQ ID NO: 280114 - DNA, 90 bp, Homo sapiens
tggcttcccttccgttttcgcgtggttcttttgcaaggtgctggagaatctggtaaaagcaccattgtgaagcagatgaggatcctgcat

SEQ ID NO: 280115 - DNA, 75 bp, Homo sapiens
caggccaaggaactggagcggctcattgacaaggccatgaagaaaggtggccatggtggaggtgcagctggagag

SEQ ID NO: 280116 - DNA, 86 bp, Homo sapiens
acaagaaactagagcaaataaccgttttgaaattccatcactggtgcaagctatatttaacggagatcctgatgaagttcgagcac

SEQ ID NO: 280117 - DNA, 98 bp, Homo sapiens
ttggtgctcaggtgccagatgcaaaggaaatagctcgtctgctggccctggaggaggctaccctgagtaccgatctgcagcagggttatgcccttaaa

SEQ ID NO: 280118 - DNA, 100 bp, Homo sapiens
gcaccgttggtatcctcatggacggccttcccttcttcttggtggtgttcttgagtaagataatctggactggcccccgtctttgcttccctgcctgctg

SEQ ID NO: 280119 - DNA, 50 bp, Homo sapiens
tgctttaaccatcgaaaatgagaaccacatccctgtgtttagtcccgcac

SEQ ID NO: 280120 - DNA, 100 bp, Homo sapiens
ctctcctgccagatccctggcttgaatggcatcctcaggggcgtgtaccctggcagccccaccagctggctggtcgtcatcatggcaacagtgggttcct

SEQ ID NO: 280121 - DNA, 100 bp, Homo sapiens
gagcgcagatcggcgcccagcaatcacagaagccgacaaggcgttcaagcgaaaacatgaccgctgagcccatgaggtctgccatcatggatgttctcgc

SEQ ID NO: 280122 - DNA, 100 bp, Homo sapiens
gaaatacaatcggaagcttcaaatgccgttgcaatagtggctttgctctagacatggaggaaagaaactgcacgggatgtcacatgtacttcagtttgag

SEQ ID NO: 280123 - DNA, 76 bp, Homo sapiens
taggaagcagagtgttcgtgtgagtggagactgctgcacggactctggaaccatgaacatatttgatcgaaagatc

SEQ ID NO: 280124 - DNA, 87 bp, Homo sapiens
ttaaataatcagaaagtggaagaagctatacaacagtatgagagagcatgcaaagacacgaatgcagagtttgagtccagatcccaa

SEQ ID NO: 280125 - DNA, 97 bp, Homo sapiens
cagtgcatggaggagctggtgagcctcatcacacaggatccgcccctggacatggaggagaaggtccgcttcaatagagatggtttcagcatgttgg

SEQ ID NO: 280126 - DNA, 98 bp, Homo sapiens
tccctcctcggtggtcgcggcgacctccggcggcgggaggcccggcctgggcaggttaatgacccagagactgcagtaaaggaattagaagctctctt

SEQ ID NO: 280127 - DNA, 82 bp, Homo sapiens
tttacacctgcaaggtctctggaggaattcaatgatgtctacctggtgatgcccttcatgcagacggatctgcagaagatca

SEQ ID NO: 280128 - DNA, 77 bp, Homo sapiens
cggcgaaaggaacggctgaaggccctacgggagaaaaccgggcgcaagagttatgcccagccaagtcttcagtatat

SEQ ID NO: 280129 - DNA, 100 bp, Homo sapiens
gatggcattgttccacttcgttatgttaagtttcagaatgttaacagtgtaactgtatatgttgtcggtggctatgatgggcaaaacagacttagcagcg

SEQ ID NO: 280130 - DNA, 80 bp, Homo sapiens
ggatttgggtcgcagttcttgtttgtggatcgctgtgatcgtcacttgaagtcccgggcccagagcccggccagcaggag

SEQ ID NO: 280131 - DNA, 76 bp, Homo sapiens
caaagaccatcatcctgccccagaaagtggagttctgtccgctgcgagcctggagatggggaacaggagcctgagt

SEQ ID NO: 280132 - DNA, 76 bp, Homo sapiens
aggatctggggatcttcgcactatcccaagggaaatcctcattgacgattcaatttgttgaaggccaatttgtgga

SEQ ID NO: 280133 - DNA, 87 bp, Homo sapiens
ccaagaacttctacgggggcaatggcatcgtgggagcgcaggtttgaagatgccgcatttggattggatgaattccaaattctgctt

SEQ ID NO: 280134 - DNA, 82 bp, Homo sapiens
cagcccggcccggcagcgacatggaagctgaagtgagtagtgaatatagtatggacaaggcaatggttgaatttgctacatt

SEQ ID NO: 280135 - DNA, 51 bp, Homo sapiens
tcctcatccgagcctttgatttgagtgggatttcaaatatgcgtgcattag

SEQ ID NO: 280136 - DNA, 75 bp, Homo sapiens
gcccgcttcctggaatggcaagcgcagcaacaacagagagcacgtgcaaacggggattcagcgtccgatcctttg

SEQ ID NO: 280137 - DNA, 75 bp, Homo sapiens
ggatgatccagttggaccttttggacaggaaagtgtaacatcagttacagagcacgtgtggttctcaaatatagg

SEQ ID NO: 280138 - DNA, 97 bp, Homo sapiens
tttatggcttccagtggaggcattttggggcagaatacagagatatggaatcaggagtccatagaggccactgtattctattgaagaacatgtctaa

SEQ ID NO: 280139 - DNA, 75 bp, Homo sapiens
cggcagcgaccacacgggagtggggcgctccatcgtgtacggttcgtaagaagaactcgctgaaggactgcgtgg

SEQ ID NO: 280140 - DNA, 75 bp, Homo sapiens
aaaccttcgcctcaagcaacagagtgagctccagagtcaggtggctgacccagttgtcacgttttgtgagacggt

SEQ ID NO: 280141 - DNA, 83 bp, Homo sapiens
caagagcaaactgagggagctcaacaagggggatatgagactttctactcggaatatcctgagtgttgcgtggatgtaaaacc

SEQ ID NO: 280142 - DNA, 88 bp, Homo sapiens
agctcgatccgctgctcgcacgggagccagctgggtggagtctccccaggacagtgctatcacccgggatattaaccgaacattccca

SEQ ID NO: 280143 - DNA, 100 bp, Homo sapiens
gcacacagaattctctacatttgtgaaagtcagtttctgaggaatttcatcaggcctctggctgtacctggcagggagcagcctgccctgtctcacgctg

SEQ ID NO: 280144 - DNA, 50 bp, Homo sapiens
accagccctgggcagcgagctgcaaaaggaggctgccggcgtggaccgcg

SEQ ID NO: 280145 - DNA, 75 bp, Homo sapiens
tgcctcaccaagtcacatgacaagcaagaaatgggagattaacccttcagaactgacctttatgagggaattggg

SEQ ID NO: 280146 - DNA, 119 bp, Homo sapiens
accagcctggaggtgatcaaggccggaccccactgccccactgcccaactgatgtcaacagcgacctcatttacattacagctaagaaagatggcactcatgtggtggaaaatgtggat

SEQ ID NO: 280147 - DNA, 98 bp, Homo sapiens
tgcatcgcatcccactccatcgccaggatctccttcgccaaggagccccacgtagagcaggatttggagttccatggagtgatgagattttattttca

SEQ ID NO: 280148 - DNA, 75 bp, Homo sapiens
ggaacgcccggcccagccccgtcctcagccagcagagccacgttccttatgagcaccgtgggtttatttcatttt

SEQ ID NO: 280149 - DNA, 100 bp, Homo sapiens
cgttgaagatgtcggccttctgagccgactgcggtggtcaagagtgccggtggtggtgtgcacattgagccccggtatagacagttcccccagctgacca

SEQ ID NO: 280150 - DNA, 50 bp, Homo sapiens
agcagcgtgcgttcagccctggggatgggagctacagtttttgtccagcc

SEQ ID NO: 280151 - DNA, 98 bp, Homo sapiens
ccgagcattcaagggtgataactcactggagtccctgaaatccctgatggacgcaccaggcattttccctgaagatgagatcccagagaaggcctgca

SEQ ID NO: 280152 - DNA, 75 bp, Homo sapiens
acagccaccaccaccaccagatgggctgaagaagatgcagagcagcctgaagctggtggactgtatcatcgaggt

SEQ ID NO: 280153 - DNA, 60 bp, Homo sapiens
ccttaataaccagcggagctgacacagccaaaccctggaagctgtcctgaatttcaaata

SEQ ID NO: 280154 - DNA, 75 bp, Homo sapiens
caaagacccagtgaacaaatccgggggcaaggccaaaaagaagggtaagatgatcatgcaggataaactggagaa

SEQ ID NO: 280155 - DNA, 100 bp, Homo sapiens
tttcaaactttgcacaggcaccccagttgtctgtgccaggtggcctccttggtatgccaggtccccagtcccaagcggaagttggaagaaccagttctgg

SEQ ID NO: 280156 - DNA, 74 bp, Homo sapiens
caacaactaactcagcagcaacttaatggaaactagatattaataaggcagcggaaagaagaaatatgaatacg

SEQ ID NO: 280157 - DNA, 100 bp, Homo sapiens
cttcaactccgtcggaggcaactcactttgttggagggatgtataggacactacaacaacaggagtgcaaacttctctacagccgaaaagagggtcaaag

SEQ ID NO: 280158 - DNA, 83 bp, Homo sapiens
aaggaacgaggcaaggagctaaagcagcgtgcgttcagccctggggctcggacatcatcatgcagctggacgacgtggttagc

SEQ ID NO: 280159 - DNA, 100 bp, Homo sapiens
gaccccactccggcggcgcgtcccccgagcttgacaatgcagatcttcgtgaagactctgactggtaagaccatcaccctcgaggttgagcccagtgaca

SEQ ID NO: 280160 - DNA, 75 bp, Homo sapiens
tggtgcagaagaaaccagccgaacttcagggtttccaccgttcgttcaagctgtgagaaacgaccgaaacaagaa

SEQ ID NO: 280161 - DNA, 100 bp, Homo sapiens
aggatgtggcccagaggtgcaaggagctgggtatcaccgccctacacatcaaactccgggccacaggaggaaatagcttctatttctagcctaaaagctg

SEQ ID NO: 280162 - DNA, 100 bp, Homo sapiens
tcgaggagtttggcaaaatctacgagcttacggttctgaaggacaggttcacaggcatgcacaaagatgctggcccgcgagagacattgatgcattttgc

SEQ ID NO: 280163 - DNA, 111 bp, Homo sapiens
ctgcgggtggctgtgctggtggcgttcaagatgtcgaccaagaatttccgatttttcagaagaagtgaagtcaagatgaagaaccatttgcttttctggggagtcctggcg

SEQ ID NO: 280164 - DNA, 113 bp, Homo sapiens
tagacagcagcgactagggctcgggcgccggcgagatgcctttgttcaccgccaaccccttcgagcaagacgtggagcacaaagttatcattgttgggctggataatgcaggg

SEQ ID NO: 280165 - DNA, 95 bp, Homo sapiens
cagagccgacctgcagcaaataattgtcagtctaacagaatcctgtcggagttgtagccatgccctaggcactgtggttggcgtggacgagagca

SEQ ID NO: 280166 - DNA, 101 bp, Homo sapiens
ggcttttgaagaagagaaatgggatgagatttcaattggctctttgcgtttccagctggatgactgtactctgcagctctctcacaatggcgcctacctgg

SEQ ID NO: 280167 - DNA, 80 bp, Homo sapiens
ctcaaggaaacctttccaacacagatgtccaagctgccaaaccaaacctggaccacccaaaaagccgaagaccccttcaa

SEQ ID NO: 280168 - DNA, 98 bp, Homo sapiens
tggaggagacgtattacaacttttagctgcagtggagcttgagaaagatcagtctaaagaaaaggagaagaaagtgaaaaaaacaattccttcctggg

SEQ ID NO: 280169 - DNA, 75 bp, Homo sapiens
ctgcactcagttgctggcttccacttcgggcttcctttccacaggtgcccctgggcgctgggattgctctagcct

SEQ ID NO: 280170 - DNA, 75 bp, Homo sapiens
gccgccatccgggaggcccagggaaggtccctgtgcgttttattgcgacctgccggtgggaactttgtctccgag

SEQ ID NO: 280171 - DNA, 75 bp, Homo sapiens
ggggcgacctcaccaacctcatccacaccaagtacccgcagcttctgccagaagttggtgtctctcttcaatttc

SEQ ID NO: 280172 - DNA, 100 bp, Homo sapiens
gagagggaagagattcagccagcacactcctcgcgagcaagtgtactaatggtcacttgatgtgcgctggctgttttatccacctactagcagatgcccg

SEQ ID NO: 280173 - DNA, 100 bp, Homo sapiens
ttttagatggcgtggtacagacctttaaagttactatttaatccagagactgacttcactatagaacccacagttgtatcaatggttggggaaagatagt

SEQ ID NO: 280174 - DNA, 82 bp, Homo sapiens
tggacggcgagcgcgagcggcgcgagaaatgccctctggtggtcagaagatgctgtgctgtctcgttaggatgaatggatta

SEQ ID NO: 280175 - DNA, 100 bp, Homo sapiens
gccggacccggtgtggagagcggtgctgaggctacgcgggctggagactcagggacctcttctcagctctcatcaagggccccactcgaaccccctacga

SEQ ID NO: 280176 - DNA, 107 bp, Homo sapiens
gggcagaaacgggactggcagtgcccacacgtgtgcgttctccccgtccgcccgaaggtttattgttggccaaaaccaggctttgattgaaccaggatgaatgcggg

SEQ ID NO: 280177 - DNA, 95 bp, Homo sapiens
aaaattataatgtggttgcaccaggctgtctttcacaatccagattatttgcatgggtgcaaaagaaaatggtttgccgctggagtatcaagaga

SEQ ID NO: 280178 - DNA, 152 bp, Homo sapiens
gcaaccagagcagagaccatatagctgccctcagctgcactgtggcaaggcttttgcttccaaatacaagctgtataggatggggtgcatgaagtccaagttcctccaggtcggaggcaatacattctcaaaaactgaaaccagcgccagcc

SEQ ID NO: 280179 - DNA, 100 bp, Homo sapiens
agtttgtcctgggagattgtatggagagcccccctccatgcgcctgaaggcccgacccagcagccctggcttttccgtgcttacctgcagcgccttctcc

SEQ ID NO: 280180 - DNA, 90 bp, Homo sapiens
gtgccatattccaatggctgagccgttttgccccaaaacgagagagtcagggtgaccgtcgatgccatctctgtggaaactccgcaggac

SEQ ID NO: 280181 - DNA, 102 bp, Homo sapiens
tctgactagccacaagtatgttacccagatgtagaattttcatcactaaacatgaaattggagcgatttgaaattccaatcaaggttcgattaagcccagag

SEQ ID NO: 280182 - DNA, 102 bp, Homo sapiens
ttctttaagggctacgggaagatcctggaggtggatctgaagaacggctatggcattgctggttctaccaacgtgacaggtgatcaagttaagaagctggac

SEQ ID NO: 280183 - DNA, 76 bp, Homo sapiens
tgcctctcagctgccacctgcctttgacctttttgaagcctttgcaaaaattataagcgccatggctatggctagt

SEQ ID NO: 280184 - DNA, 98 bp, Homo sapiens
tgcgcttccccatggggctggcctgcggcgcctgggcgctctgagggagctgagcggaaaatcagggatgaagaacgaaagcaaagcaaaagaaaagg

SEQ ID NO: 280185 - DNA, 80 bp, Homo sapiens
taaactagttgagaagcagaacccagctgaaggactgcttctcagatgaccaagatggtgctgcagatggtgctgaggat

SEQ ID NO: 280186 - DNA, 50 bp, Homo sapiens
ttcctccccgcgctctggcgtagagatatgagccccagactgacatcccg

SEQ ID NO: 280187 - DNA, 98 bp, Homo sapiens
tcggctggaaggaaccgctctcgcttcgtcctacacttgcgcaaatgtctccgggttatatcctgtgttgtgacctcatggtttaagtgggaataaag

SEQ ID NO: 280188 - DNA, 74 bp, Homo sapiens
tggggcgcccagctgccaacaccaaggccaaatttgagtttcatcatggtgactatgaaaaacagtttctgcat

SEQ ID NO: 280189 - DNA, 83 bp, Homo sapiens
cacaacctctgtggtccgtaggagccactatgaggagggccctgggaagtaacagcaacaagtgggaatggagactttggtga

SEQ ID NO: 280190 - DNA, 75 bp, Homo sapiens
cctgttgttgaatgacatgcagaaaagaaatttggtaagaagaaagtgatttgaaacactcgtgaaactgctcag

SEQ ID NO: 280191 - DNA, 75 bp, Homo sapiens
caacgggcttctccctgatgacaagcttaccctcttctgcgaggtatgctgccccacaaaaccaagcgaggccag

SEQ ID NO: 280192 - DNA, 100 bp, Homo sapiens
ttctcagcgcctatggcgaggtcggacgcgtcttctttcaggctgaggggcgaatcaaagccatccagctggagtactcagaggcccggagaacgatgac

SEQ ID NO: 280193 - DNA, 75 bp, Homo sapiens
gatggaatccgtagcgcccagctcattgcctcagctaaaatgagccggcaggtggtccgctccagcaagttccgc

SEQ ID NO: 280194 - DNA, 100 bp, Homo sapiens
ctggagtcactcaaattagaaaatcgtcatctttctgaaatggtgatgaaattggaattgggtttacatgagaagaaagctgtggtgattcgtcacttgt

SEQ ID NO: 280195 - DNA, 100 bp, Homo sapiens
cggatggaaaacgtggacgtgaaggaggaatggcaggacgaagatcttcccagggcaaacctggtggacctgcagaagaagctggaggagctggaacttg

SEQ ID NO: 280196 - DNA, 101 bp, Homo sapiens
gctgaagcgcaggctgcggggcgcggagtcgggaggtaaagatgagccttccagctacatttgcacaacatgcaagcagcccttcaacagcgcgtggttcc

SEQ ID NO: 280197 - DNA, 82 bp, Homo sapiens
tgcctgctaacatggataagcatgccctgaaaaagtatcgtcgagaagcctatcatcgagatgcgctggcagctgagcgagc

SEQ ID NO: 280198 - DNA, 50 bp, Homo sapiens
acagctcgcgcgtgctgatgatggcgtggtggagacccaagaagggaaga

SEQ ID NO: 280199 - DNA, 82 bp, Homo sapiens
gattaacctggagttaaggaacagatccccggaggagctcattgctatggacagtgctatcaccctgtggcagttccttctt

SEQ ID NO: 280200 - DNA, 100 bp, Homo sapiens
ccagtgcgggaaagaggagatgcttctggtcaaaatgcagatcttcgtgaaaacccttaccggcaagaccatcacccttgaggtggagcccagtgacacc

SEQ ID NO: 280201 - DNA, 101 bp, Homo sapiens
gacttccttggtggcttggaataagctataagggaattggccaatatgatatacaagacaaggtgaagcctcggaaggtcagccccagttgatgctgacag

SEQ ID NO: 280202 - DNA, 75 bp, Homo sapiens
ccgcggctccggtcacgtcaccgttggccaacagtgttgcaaacaggaacccgaggttttcacttcactgttgat

SEQ ID NO: 280203 - DNA, 100 bp, Homo sapiens
attggagccaagaaatgagtataggcttaacagcattgcgcagtgatgaagtgattgatttaatgataaaagaatatccagccaaacatgctgagtattc

SEQ ID NO: 280204 - DNA, 75 bp, Homo sapiens
cggtggtgcgagtcttcggagcgaccccggcaggtctcggcgcggaagatggccggcggcgtggacggccccatc

SEQ ID NO: 280205 - DNA, 82 bp, Homo sapiens
cggcctgcagcacccgccaccgtcgccggccgcccgcacgtccgtccgagtaatcaagtcagaggattatatgacttttatc

SEQ ID NO: 280206 - DNA, 89 bp, Homo sapiens
tgctgctgatgaagacgttatttaccatatccagtatgatgagttggcgttgcaaacgctatggtcaccgaacgggtgacaaagaatgc

SEQ ID NO: 280207 - DNA, 98 bp, Homo sapiens
agaaacatctcaccaatttcaaatccgaattaaacaaccaccatgtcgagcaaaaaggcaaagaccaagaccaccaagaagcgccctcagcgtgcaac

SEQ ID NO: 280208 - DNA, 83 bp, Homo sapiens
ggggctggtgctgcgggacctcaagctgcggaaattcatctttaaggacgaagagagggggaacacacctgaaactagaggaa

SEQ ID NO: 280209 - DNA, 100 bp, Homo sapiens
acgaaccacttcaactcctcatattcccagaagggactgatctcacaggtttggaaggtttgcagttgctgctcttcagtccaaagtagaacagtatgag

SEQ ID NO: 280210 - DNA, 100 bp, Homo sapiens
cccgaggacaccgactaccagcaggagcaaatggaatgatgactttgaaaaccactggcttacgcccaccatttccgaggtcctgtccacggcggggcct

SEQ ID NO: 280211 - DNA, 90 bp, Homo sapiens
aatgaagatggcacatggcccaggcagaccttgcagtcaaagtactgctataaccagaatttggtagaaaaaggatttacttgttggggc

SEQ ID NO: 280212 - DNA, 98 bp, Homo sapiens
ggagggctcgcccgcggaggagccgcctgcgcatgctccatcgcctgggaaagaccacagcaagattctttcattcgtctcctcctagcctgggggac

SEQ ID NO: 280213 - DNA, 75 bp, Homo sapiens
aggaatcatcacctccaaatactggtcccacgtgtctatgtctctccccaacgtatgagctcgccctccaaacag

SEQ ID NO: 280214 - DNA, 121 bp, Homo sapiens
cactgggacttctcgatctctggaggcacctgttgcaagtgacagggtcggtgtacccgagagaactgcaagtaccttcaccctcctccacacttaaaaacgcagctggagattaatgggc

SEQ ID NO: 280215 - DNA, 98 bp, Homo sapiens
tggcatcaagtggcatccatcataaggcacatctactatgcttcttactagaataaactgtgcagattggtctgatgtatgtactaagcaaaatgtta

SEQ ID NO: 280216 - DNA, 75 bp, Homo sapiens
tccattctagaggaagtgaagaagctttctgagcagggaaagaacatcagggggtccagaggcagccgacttctc

SEQ ID NO: 280217 - DNA, 96 bp, Homo sapiens
cggtgctaatggtgctcctggactgcgaggtggtgcaggtgaacctggtcctcttggcattgccggccctcctggggcccgtggtcctcctggtgc

SEQ ID NO: 280218 - DNA, 83 bp, Homo sapiens
cctgcacacctggatccaggataacggaggctgggacatgtattcctctgagaaaccttggacagcagattttggtttaatat

SEQ ID NO: 280219 - DNA, 82 bp, Homo sapiens
gctccctggacaactccgagcaggatgatcggctgaatgtaacagaggaactaacgtccaacgacaagacgaggattctcaa

SEQ ID NO: 280220 - DNA, 82 bp, Homo sapiens
acatttgaacaacttttggggtacttagaaggggctgctccttcctctccaagactcgggtggtccaggagcacggcgggcg

SEQ ID NO: 280221 - DNA, 100 bp, Homo sapiens
ggcggccctgccgggaaggaggaagcgcagtgcgttcggctccgcgcccgccgcgccgggagcagcaccgcggggccagagaaaccctaaagcaggcagc

SEQ ID NO: 280222 - DNA, 83 bp, Homo sapiens
ctgtatggatggcattaatcgctacagttgtgtctgctcaccaggattcacagataacgaaggaggcccaacttcattcaata

SEQ ID NO: 280223 - DNA, 50 bp, Homo sapiens
gccgagcccgcccgcgcgccggtgtggaaacaggaagagaactagaactg

SEQ ID NO: 280224 - DNA, 98 bp, Homo sapiens
cgccccgctggaggagctccccagctggtggctggagcgaccccttgttctttggtggcgctgctgacatagcccagagatacaggataagcaaatac

SEQ ID NO: 280225 - DNA, 75 bp, Homo sapiens
gttcagtctcctgcagatgcctgcacacctcctggagagtagttatcttgatggaattagaagttttgaagtcag

SEQ ID NO: 280226 - DNA, 88 bp, Homo sapiens
aaacagtggttctgctggattgataaacccagctgctacagggcatggtgctgatgtgaaatgtgtagactggcatccaaccaaaggg

SEQ ID NO: 280227 - DNA, 98 bp, Homo sapiens
gcaaattaaactttgatttttcatcttgtgaaagcagtccttgttcctatggcctaatgaacaacttccagcacttttcaggattagaagaggctgtg

SEQ ID NO: 280228 - DNA, 74 bp, Homo sapiens
tatagatattttatccacaactggccacagctgtgcttcttggtaccagcatcaagatgatttatggtaataag

SEQ ID NO: 280229 - DNA, 75 bp, Homo sapiens
cgcagacctcgaaatgatagacggattgccatatgaacttcaggactatgttgaagatacatcggaatacctagc

SEQ ID NO: 280230 - DNA, 50 bp, Homo sapiens
tactcagccttttaaagcttgaggtggaacgtgtgatcaccattatgcag

SEQ ID NO: 280231 - DNA, 75 bp, Homo sapiens
cggcgcggggaccgctgtgctctcgaacctgtctccagagaagattttccacgtcattgtggccccttgttatga

SEQ ID NO: 280232 - DNA, 100 bp, Homo sapiens
ggctgaccacgagcttttcctccaggcctttgagagtgaaatcgccatgcttggtggtgtgggagaagagaatgagaaactgtggagctttaccaaaaag

SEQ ID NO: 280233 - DNA, 50 bp, Homo sapiens
tgggcccagagccctagtggtgggcgcagctcactaccctgggaaatctt

SEQ ID NO: 280234 - DNA, 100 bp, Homo sapiens
gtggacaccatggtgtttaagccaagtgatgtcatgcttgttcacttccgaaatgttgacttcaactatgctactaaagctttgtgtccctggtgatgtt

SEQ ID NO: 280235 - DNA, 75 bp, Homo sapiens
ctgaaaatccatcagtgccagcataccaatgaacctctattcaaggtgaacattcctatctggctcaagtgttca

SEQ ID NO: 280236 - DNA, 75 bp, Homo sapiens
cttggggccctttgggacgagtgctgtgactgtgttgaaggaagaatcctgctcaaaaatgaggtgaattaatac

SEQ ID NO: 280237 - DNA, 74 bp, Homo sapiens
ctgctgctcgggctgctcttggagaatctgcaaaatggctgataatttggatgaatttattgaagagcaaaaag

SEQ ID NO: 280238 - DNA, 100 bp, Homo sapiens
cacaataagagcagaggatggaacacttcagtgcattcaagactggaccaagaggattgagtaccagcctggctccgggagcatgcccctgttccccagc

SEQ ID NO: 280239 - DNA, 95 bp, Homo sapiens
cctcaacttcttgtcctcaagtgatcctcccaccttagcctcctaagtagctgggaccacagctttatcttcaagccaggatgaagggagactgg

SEQ ID NO: 280240 - DNA, 95 bp, Homo sapiens
agaccgtcgaaagcggattccaaggaatccaggttatatgtcaccacacccatctccattaggagccccagagcacgtctccagccctatgtctg

SEQ ID NO: 280241 - DNA, 82 bp, Homo sapiens
cggctgcagtgctgacaccactcagggcaagggtgtccgacggctggagcggaattgaatgatctggcacgggaccctccag

SEQ ID NO: 280242 - DNA, 101 bp, Homo sapiens
cagaatttcacacagggtattccatggagaatgagggaaatcctcattgacgattcaatttgttgaaggccaatttgtggactcctacgatccaaccatag

SEQ ID NO: 280243 - DNA, 75 bp, Homo sapiens
aaggggaccaaactctcggtcataccaagatgtacagttacccagcacgtgtacctcctcctcctcctattgctc

SEQ ID NO: 280244 - DNA, 50 bp, Homo sapiens
cccagattccaaaacttatgtcaaagagacacatctcaattcaaaggcag

SEQ ID NO: 280245 - DNA, 75 bp, Homo sapiens
aaccagatccgggagcacgtcatctccatcgagggtgattttacaacgagatgctgctctccatagggatgctca

SEQ ID NO: 280246 - DNA, 100 bp, Homo sapiens
tatactctagaatatacaaagacaaaaggagattctgatgaagaagttattcaagatgtgatcatgaagttccagaaccagaatcagaaatgaagatgag

SEQ ID NO: 280247 - DNA, 50 bp, Homo sapiens
cttgaagaggtccttcacatcccttctctggatggacaaggaaaaagagg

SEQ ID NO: 280248 - DNA, 88 bp, Homo sapiens
gggctatggcgccagtaagaagaaaaaagcgtccgcttccagctttgcgcagatgatgtctgtcctcatgaacaccattgtctttgaa

SEQ ID NO: 280249 - DNA, 50 bp, Homo sapiens
ccgcgccgcgcctcagctctggttttcaaatggaacattttgatgcatca

SEQ ID NO: 280250 - DNA, 75 bp, Homo sapiens
catgcctctgacaatctctagtttggatatgtcaagtgaccagatagctgccaatctgcaagcagttattaatga

SEQ ID NO: 280251 - DNA, 48 bp, Homo sapiens
ctgaactcaggacttggcaagacatgaaagatcagatgtcaacttcat

SEQ ID NO: 280252 - DNA, 100 bp, Homo sapiens
gtacacccaagtgggtcctgatcacaacaggactccaagccccctgatccttgatcagaactacattaacaccaaaaatcaagttatcaaagcagagagg

SEQ ID NO: 280253 - DNA, 103 bp, Homo sapiens
ttgtcaactctgtgcacagccgatgtcgtccagtccgaaagaaaccaccttctccagcaaatacttcagagagtcagagttgtgccagaagtctcttaatggc

SEQ ID NO: 280254 - DNA, 95 bp, Homo sapiens
gctggacccaacacaaatggttcccagtttttcatctgcactgccaagactgagtgcatgtttgtgtcattagtgaaactggaaaagcaaaatac

SEQ ID NO: 280255 - DNA, 49 bp, Homo sapiens
gaagatcagaggctcacattccaggaactggcatttgatccatatgaat

SEQ ID NO: 280256 - DNA, 100 bp, Homo sapiens
aggctggtgacggagctgcgctggcagaagttcgtcatgttctacgacagcgagtatgacggcagaatgcctccaaaggtgacttcagagctgcttcggc

SEQ ID NO: 280257 - DNA, 75 bp, Homo sapiens
gtgctggcgagacgggggtgatgcccacccgggcgagaaagtaagactttgaccccgacgcaggcttcagtgatt

SEQ ID NO: 280258 - DNA, 90 bp, Homo sapiens
tcgtgcagcagttcacggacatggagcacaacaggagcaagccatgggccacagccaggaccggctcaccaccttccaggagaaccaagc

SEQ ID NO: 280259 - DNA, 90 bp, Homo sapiens
caccgaatagccagtggcgaagagcatttgacattgtgcagcaaagaaatggttatggagaagcccagtccgctgcttgtagggcgggag

SEQ ID NO: 280260 - DNA, 75 bp, Homo sapiens
gcgacatactacctctggccccgagatcagaatgccgggcagcccaatggatccaatggtgatgaagagacctca

SEQ ID NO: 280261 - DNA, 100 bp, Homo sapiens
agcaagctctgctctctctatgagaacgactgcatctttgacaagtttgagtgttgctggaacggttcggataggacatgtattcctctgagaaaccttg

SEQ ID NO: 280262 - DNA, 100 bp, Homo sapiens
ataagaccctgcaggagctggaggagttgcagaatgactcggaggcgattgaccagctggccctggagtcccctgagacccagtcatggcagcctccagc

SEQ ID NO: 280263 - DNA, 88 bp, Homo sapiens
tggggatgaaggccgagggcttcgtggatgccctgcaccgggtccggcaggacctcagcagccatgtcgaagccccatagtgaagccg

SEQ ID NO: 280264 - DNA, 83 bp, Homo sapiens
ccttcctctgaaggcaaagtgacctgtgttcaaaaggtgatgacctatcaacagccattctcaaacagaagaaccgtcccaat

SEQ ID NO: 280265 - DNA, 82 bp, Homo sapiens
gttgagaaagaatttgagcctctgctgaattggatgaaagataaagcccttaaggacaaggacatgatgagctacattgggc

SEQ ID NO: 280266 - DNA, 100 bp, Homo sapiens
tgaggggaaagccactgttcggttaaaggagcctcctgtggatatctgtctaagtaagggatagtatccaaagccaccaagaaagcctttctgttctcag

SEQ ID NO: 280267 - DNA, 75 bp, Homo sapiens
gagagactgtggagtttgatgttgttgaaggagaaaagcaagaatttcgactgggagtgcgactctactcagagg

SEQ ID NO: 280268 - DNA, 100 bp, Homo sapiens
cctgcgcgcccgggatttcgatctggacctggcctggcggatcatggaagggaagtggttgctgtgtatgttactggtgcttggaactgctattgttgag

SEQ ID NO: 280269 - DNA, 74 bp, Homo sapiens
tcctgagtagctgggattagaggctgaccccgcactacatctacccaccagccatcgtgcagcccagcgtggtg

SEQ ID NO: 280270 - DNA, 100 bp, Homo sapiens
ctctgatgaaaccctctcggctttatgatgcttatgaactgaaacatgccttgaagggagctgctgttgacggaggcaagttggatgtcgggaatgctga

SEQ ID NO: 280271 - DNA, 75 bp, Homo sapiens
atccagcaaggatatggagagccatgttttcctgaaggccaagacccggatggagtctcgctctgtctcccaggc

SEQ ID NO: 280272 - DNA, 97 bp, Homo sapiens
ggaagtactgagcctgttggaggaactggcccggaaacaggaggacgctggagtgcagtggcgagatctcgactcactgcaggctccgactccccag

SEQ ID NO: 280273 - DNA, 101 bp, Homo sapiens
ctgtccccggactgggagtttgaccgcgttgacgacggctcgcagactataaggaagaccagatggatgagaaactaatggaacctctgaaatatgctgaa

SEQ ID NO: 280274 - DNA, 97 bp, Homo sapiens
cagggggcatcaggaaacttggccacagaagacctggtctacatgctagagggcttgggcattcacacgagagaggagaagcagcttgaggcatcat

SEQ ID NO: 280275 - DNA, 83 bp, Homo sapiens
gtattatggataccaaggaagagaagaaggaacggaaacaaagttattttgctcggagcttgaaaaatcacatttgagaagag

SEQ ID NO: 280276 - DNA, 75 bp, Homo sapiens
acagatgccattcggtttttggttgggacgcagtctcttaaatatgataatcagacagcagtgaagaccgtttgg

SEQ ID NO: 280277 - DNA, 89 bp, Homo sapiens
tacgagggcatcctctacaccatcgacaccgaaaactccaccgtagcccttgccaaagtctcctgggctacctgaccaagtacgactgc

SEQ ID NO: 280278 - DNA, 90 bp, Homo sapiens
gcactgatgatgagaggtctaatcccagagtgctgtgctgtttacagaattcaggatgggaaaatgtttataggaggccttagctgggac

SEQ ID NO: 280279 - DNA, 83 bp, Homo sapiens
ttttatcaagagcaccctgatttggctaggcgcacagcagaatatcttgtaccggaattatcaagtgaagtacagtctctttg

SEQ ID NO: 280280 - DNA, 83 bp, Homo sapiens
gtggacgatgctcttgcaggatgcctttccttttgggtcttagacagaaagcataaaggatgttattggcagaaagataaaaa

SEQ ID NO: 280281 - DNA, 90 bp, Homo sapiens
tgttttacttgtagtgtatgcctcgtttgttgggaacctactgatgaaccttgccggagaattttcatccttgggccttctcatcatgtg

SEQ ID NO: 280282 - DNA, 51 bp, Homo sapiens
ccgaagaactgggacttttagagtgggaagccgtgtccgccttttaagatt

SEQ ID NO: 280283 - DNA, 82 bp, Homo sapiens
gtcgtggtggaccacgtggtggcaaatcctccatcagttctgttgccaaaacaaaggggatttggtgatggaggctttgtta

SEQ ID NO: 280284 - DNA, 75 bp, Homo sapiens
ccactttggaaccaagcccagaattcagaattaggtggtgtttggactctagaccatgtgcctaggtagaagttt

SEQ ID NO: 280285 - DNA, 103 bp, Homo sapiens
gcccgacgcaaaccaaggatctggggatcttcgcactatcccaaggtgtccctggccagtgtccttccacctgtccacaagcatggggaacatcttcgccaac

SEQ ID NO: 280286 - DNA, 94 bp, Homo sapiens
gagctgtgcagccgcgaggaggcgcgggaggtgttcgagaacgaccccgagacggccctgggaggagcggggacactgaggacctctctccaaa

SEQ ID NO: 280287 - DNA, 98 bp, Homo sapiens
gctgggtccattccaaatgtgagaatctttcagtgaacgagataattgggagagacatgtcccagatttctgtttcccaaggagcaggggtgagcagg

SEQ ID NO: 280288 - DNA, 100 bp, Homo sapiens
gctacagtttggccctggcacagattgaggaaattgagcgagagatcatcaagcaggaggagaatgtggaccctgactactgggagaagctgctgaggca

SEQ ID NO: 280289 - DNA, 83 bp, Homo sapiens
gcagccagaagaacaagaagtaggcattgaccccttgtccagttactctaacaagtctggagcttaaagcttttcaagccagg

SEQ ID NO: 280290 - DNA, 50 bp, Homo sapiens
gagcgaccccttgttctttggtggcgctgcccatgactgaagagttgctg

SEQ ID NO: 280291 - DNA, 75 bp, Homo sapiens
tcaagcccccaacatcccagtcctcagtcctcagtcatcttggttctaaatggcttctaagaagttgggtgcaga

SEQ ID NO: 280292 - DNA, 50 bp, Homo sapiens
tgtgcccagccaggagcactcccagaacatcttcctaaacttcaacccag

SEQ ID NO: 280293 - DNA, 75 bp, Homo sapiens
catcaaagtcagccgtgtggggtctgcaatgcctttggaatgagtacacatccaggagtgaagaagacaagctca

SEQ ID NO: 280294 - DNA, 96 bp, Homo sapiens
gatgtttcaatattggaagcgctttgatttacagcagctgcagggtttccaggcctgaggtgcccgccctggccccaggagaatgaaccagccgca

SEQ ID NO: 280295 - DNA, 101 bp, Homo sapiens
cagggcccacgggccagccccgccgccctcgcaacctggcagccgccgccgtggaaggagtacaaaccaccaggaacccgtaaacttcataacattcttgg

SEQ ID NO: 280296 - DNA, 75 bp, Homo sapiens
cgagagggacaggcttctccggaaggaacagattttagctgtggccagggttaaagcacgaattgggagctctca

SEQ ID NO: 280297 - DNA, 75 bp, Homo sapiens
tcagtgcaagactgtgctcaagctggcctctgaggagcctcctgatgatgaggttccaattgtggacaagataag

SEQ ID NO: 280298 - DNA, 101 bp, Homo sapiens
aattatactcagtggctgcaaaaaatcctgggaagactctgcctgaagcccttgattattgcactgtttggctacagacagtgcctggagaaatagacagc

SEQ ID NO: 280299 - DNA, 101 bp, Homo sapiens
tgctgctgtactccttctccggaggactcacgaatggcagtggaagatacatctctgctgctccaggcgctgaagccaagtaccgcagtgcaagcagcgcc

SEQ ID NO: 280300 - DNA, 100 bp, Homo sapiens
tgctgccgagctgtagggtttgaagctcgctatgtttgggattacacaggccctggccaacgtcaacattgggagcctcatctgcaatgtaggggccggt

SEQ ID NO: 280301 - DNA, 75 bp, Homo sapiens
tggtgaaacaggatgtgggaagagcacacagattcctcaggacaagaggaccctgccttggtgtgagagtgaggg

SEQ ID NO: 280302 - DNA, 100 bp, Homo sapiens
gttcctggaggaatccgagaagagcagagcggagggagccccagacacgatttcaggtatgctgctgaaagtgggaatcctctacattggtgggcagctg

SEQ ID NO: 280303 - DNA, 75 bp, Homo sapiens
atgagccaactgctgctgctattgcttacggcttagacaaaaaggctgttcacggaagaccaggatgtagatgag

SEQ ID NO: 280304 - DNA, 100 bp, Homo sapiens
acattaactaatgaaaccagatgtcttacttgtgaaactgtcatccatgcctggcttattatatcatctctattgttgctgttctttttttcattcattt

SEQ ID NO: 280305 - DNA, 98 bp, Homo sapiens
ctcagagcagagccgccatcttcatataaggtaatgactccacagggaagaggcactgtagcagctgctgctgttgctgcgactgccagtattgctgg

SEQ ID NO: 280306 - DNA, 90 bp, Homo sapiens
tccgccaggctgcattcaagctctatgcctctcttggagcaaatgatgaagacatccggaagaagaattggcagagggggtcgatttggg

SEQ ID NO: 280307 - DNA, 87 bp, Homo sapiens
cagctgaagagcgacaagccgctggcagccgcggatctcaccgccgctcagggaagatgttaccgagtacttcagtgaattccttag

SEQ ID NO: 280308 - DNA, 83 bp, Homo sapiens
ggcgtccccggcgcgaagaggctggactcggattcgttgcctgaggagcttactccacgggaacagcctctagataatctgag

SEQ ID NO: 280309 - DNA, 82 bp, Homo sapiens
ccggccgcctccgcgagggcaccatggaggtgaatgcagcgtctgttcctcacacaccccgcccaaggacgtgcctggcagc

SEQ ID NO: 280310 - DNA, 100 bp, Homo sapiens
atgggggcctcgggcgccccgcagccccccaacatcctgctcctgctcatggacgacgaggcaaaaccttcaactgaggacttgggggataagaaggaag

SEQ ID NO: 280311 - DNA, 125 bp, Homo sapiens
tcccgccgcgcccccctccaccccggccgcgcccaagcgcaggggctcctcgggctcagtggatgagcgtgaagccgtgcagaagaagaccttcaccaagtgggtcaattcccaccttgcccgtg

SEQ ID NO: 280312 - DNA, 97 bp, Homo sapiens
gaatgggctacctacacctgtgtgctgggctttcacgtctacgctgtggactgtggcattcctgaatccattgagaatggtaaagttgaagacccag

SEQ ID NO: 280313 - DNA, 75 bp, Homo sapiens
aatgagagcccggaaccactctttgtgccgcagcttcgcaggtatggtgtcagtcgtggaactgaaacagagttc

SEQ ID NO: 280314 - DNA, 74 bp, Homo sapiens
tctgaaggggggcatagacatcaatacctgcaatcaggagtcaactgagagttcaaatacaacaattgaggatg

SEQ ID NO: 280315 - DNA, 88 bp, Homo sapiens
gcaaaaatcccatctaccgcaactctcagttcgagagtaaagaatttgcaccatcctgggattgtaaacctggaatgtatgtttgaaa

SEQ ID NO: 280316 - DNA, 100 bp, Homo sapiens
tttgcagaagtggaaggagcagaacgtgagggtgtaacttacaaaaaggttatgaagacagtatggagtttccagaccatagtagacatttgctacagtg

SEQ ID NO: 280317 - DNA, 82 bp, Homo sapiens
ctcggtgctgcagacggcgagacctcctgcacagaccaaatacacgctgatcgatgagcaggacatcccgctggtggagagc

SEQ ID NO: 280318 - DNA, 97 bp, Homo sapiens
ctccgcgcgcgacctccggccctgcgcgtgcgccgtggcgcggcccggctgacaggttcagagcactggtgaaggagaagcacagagatattttgat

SEQ ID NO: 280319 - DNA, 90 bp, Homo sapiens
gcagcagatgccctatccgtgctatgtggacgacgttcaagggttatacacggaaagccgctgcgctggaagcgatgaaggactacacca

SEQ ID NO: 280320 - DNA, 80 bp, Homo sapiens
ccggccggtccctcgcctcccggccgagctgacggcaacatcttcgtggtcagtctctctgtggccgatatgctggtggc

SEQ ID NO: 280321 - DNA, 82 bp, Homo sapiens
cagaacccccagaccatcatcaaattgtggctactaatttgccccctgaagatcaagatggctctggggatgactctgacaa

SEQ ID NO: 280322 - DNA, 96 bp, Homo sapiens
ctgaaatggttaaaggggagtggatcaaacctggggcaatagtcatcgactgtggaatcaattatgtcccaggtaaaaaagctccagttttattta

SEQ ID NO: 280323 - DNA, 80 bp, Homo sapiens
caactgtaaccgctataatgaggatgatgcaaaggcagcaagagatgcacaggagatgaggtttatataactttccaaga

SEQ ID NO: 280324 - DNA, 100 bp, Homo sapiens
ggaagaggcccaccctggagtaaccctcactggagaatccagagtgaacagagtatctgtcaggcaagagctgctgtgatggtttatgatgatgccaata

SEQ ID NO: 280325 - DNA, 82 bp, Homo sapiens
gccagccgcaccatgccgctcctaagcctgcacagccgcggcggcagcagcagtgagaggcctcttcggcacaggaattcgg

SEQ ID NO: 280326 - DNA, 100 bp, Homo sapiens
agagactcaaccaactagagcagggataaggtttcccttgttcagcttttcagtgtctgctggaatgtgatgagcatgcaagcggcaagatgtcctacag

SEQ ID NO: 280327 - DNA, 82 bp, Homo sapiens
agaagatcgaagccgagacgcgggccgtgtgatctgctgggctagtcttcctcatcaccgggggcatcgtggccacagctgg

SEQ ID NO: 280328 - DNA, 75 bp, Homo sapiens
cctccacagtgactttgttgagtgtcaaaacatcctcaagctatctcattatcgagagcatttgaacattcagga

SEQ ID NO: 280329 - DNA, 50 bp, Homo sapiens
cagaggtctccagagccttctctctcctgatccagagacaatggccccga

SEQ ID NO: 280330 - DNA, 100 bp, Homo sapiens
aacgagctcaacgccaggcgccgctcctttacagacaatgcagatcttcgtgaagactctgactggtaagaccatcaccctcgaggttgagcccagtgac

SEQ ID NO: 280331 - DNA, 83 bp, Homo sapiens
caccagtattgccagcgtcgctggctttatcctgtggataaacgcagagtgaacgagtttggggagtcctacgaggagaaggc
